United States Patent Application Publication US 2025/0333808 A1 - sequence listing, part 4

SEQ ID NO: 46184 - DNA, 80 bp, synthetic construct
  source 1..80: mol_type = other DNA
tcagcatgtagcaatataagtacatcaatagctaaagccattgaaaatggcatgtcgaaagatgtcgggtattccttgaa

SEQ ID NO: 46185 - DNA, 80 bp, synthetic construct
  source 1..80: mol_type = other DNA
catcttgaaaactatacaacagattgtagtgtctctcaaattctctattaatgagacaatgactccggatgtgacaaatc

SEQ ID NO: 46186 - DNA, 80 bp, synthetic construct
  source 1..80: mol_type = other DNA
ccttgattcaaaatgttaattggctgttaacagcgtgtcttatgcccgcatcattaggaggctttaactacctaaacttg

SEQ ID NO: 46187 - DNA, 80 bp, synthetic construct
  source 1..80: mol_type = other DNA
ccgagacagctgacagtttattcaatctggcagggcttggtcgcgattatgacaatgcgagaacgacacaaagagaaaca

SEQ ID NO: 46188 - DNA, 80 bp, synthetic construct
  source 1..80: mol_type = other DNA
tctcgattgtacgttaggaatataggtgaccctataacagcatcgttggcagatttgaagaggatgatatcatcaggatt

SEQ ID NO: 46189 - DNA, 80 bp, synthetic construct
  source 1..80: mol_type = other DNA
aatgacagaaagggtactgcaccagattatgacacaggcgcctggagatgctacattcttagattgggcaagcgaccctt

SEQ ID NO: 46190 - DNA, 80 bp, synthetic construct
  source 1..80: mol_type = other DNA
actctgcaaatcttccaagttcacagagtataacaaagaccataaagaatgttactgctagactggttctggcgaatgct

SEQ ID NO: 46191 - DNA, 80 bp, synthetic construct
  source 1..80: mol_type = other DNA
aaaaatccaatattaaaagggttatttcatacaacatatcatgatgaagacagatgtttggctgaattcctaatggaccg

SEQ ID NO: 46192 - DNA, 80 bp, synthetic construct
  source 1..80: mol_type = other DNA
cagtattattatgccaagagctgcacatgagatattggacaattcaatcacaggggcgcgggaggaaatatcaggaatgc

SEQ ID NO: 46193 - DNA, 80 bp, synthetic construct
  source 1..80: mol_type = other DNA
tagatacaacaaaagggctgataaggaccggtctgtcaaaaggtgggattcaaccaagattagtctccaaactttcacat

SEQ ID NO: 46194 - DNA, 80 bp, synthetic construct
  source 1..80: mol_type = other DNA
tatgactatgaacaattccgggtatttaataatttgatgagaaacaaaaatatgagcccatatataaaacctactatttg

SEQ ID NO: 46195 - DNA, 80 bp, synthetic construct
  source 1..80: mol_type = other DNA
ttctgttgagttggcaaaatacctgagagcacatatgtggagaagattatcacaaggaagattgatctacggtttagagg

SEQ ID NO: 46196 - DNA, 80 bp, synthetic construct
  source 1..80: mol_type = other DNA
taccagacccaattgaatccatgcaaggatcaattataagaggaagtgaggagtgtagtatatgtacatcagaaagatcc

SEQ ID NO: 46197 - DNA, 80 bp, synthetic construct
  source 1..80: mol_type = other DNA
ccatattgttggttttttataccaaaaggtatggatttggatagagttcacagacctacgaatagtattagggttcctta

SEQ ID NO: 46198 - DNA, 80 bp, synthetic construct
  source 1..80: mol_type = other DNA
tctagaggtaggacagacatgtcagttagagacagattactgatgagtctacgagatgaggaagcgagaaaagctgaagc

SEQ ID NO: 46199 - DNA, 80 bp, synthetic construct
  source 1..80: mol_type = other DNA
tatagggtcctcaacagatgagagatcagagataaaactgggtcatgtgaaatcatctagtcgtgctcttaaatccgcta

SEQ ID NO: 46200 - DNA, 80 bp, synthetic construct
  source 1..80: mol_type = other DNA
taagaattgcaactgtttacacttgggcgtttggtgatgatgatgagtcatggttagaggcatggtatctagcgtcacaa

SEQ ID NO: 46201 - DNA, 80 bp, synthetic construct
  source 1..80: mol_type = other DNA
agagtcaatatagatcttgaggtactgaaagcaataacaccgatatccacatcaaataatcttgctcataggttgcgaga

SEQ ID NO: 46202 - DNA, 80 bp, synthetic construct
  source 1..80: mol_type = other DNA
tagggccactcaagttaagtttaatggatcatccctgaatcgggtttctaggtatgtgactatcagtaacgatagattgg

SEQ ID NO: 46203 - DNA, 80 bp, synthetic construct
  source 1..80: mol_type = other DNA
aatttattataaatgaccaaaaagttgacacgaatctgatattccaacaagttatgttgctaggtctatctgcaattgag

SEQ ID NO: 46204 - DNA, 80 bp, synthetic construct
  source 1..80: mol_type = other DNA
caaagatatcgttaccgagtacaaactggagatgaaaatgtaatttatcatttacacgctaaagaacactgttgcataat

SEQ ID NO: 46205 - DNA, 80 bp, synthetic construct
  source 1..80: mol_type = other DNA
tgagatgtcatctaccggtaatgttccatccctcattgagccgccaatatacaaagagataaaagagaatcgattgattt

SEQ ID NO: 46206 - DNA, 80 bp, synthetic construct
  source 1..80: mol_type = other DNA
atgatgacaatccaatcatagataaagacttgaaaaagttaaggactcaagcttggtattcctctgatgttgatttttca

SEQ ID NO: 46207 - DNA, 80 bp, synthetic construct
  source 1..80: mol_type = other DNA
aactggaagtcatctgacctgcattgtgtcttagcccaatcattagcccataccattattgaatctatttcgaaaagtga

SEQ ID NO: 46208 - DNA, 80 bp, synthetic construct
  source 1..80: mol_type = other DNA
taatgatattctaaagcagtttgtaacaattagttcagatgacaacataaatagtttaataaccgagtttttgttggttg

SEQ ID NO: 46209 - DNA, 80 bp, synthetic construct
  source 1..80: mol_type = other DNA
aaagttcagggagtatcaggctaacctgggtcgacaagggaaaccattggcttcaacagcgactttaactactaaaatca

SEQ ID NO: 46210 - DNA, 80 bp, synthetic construct
  source 1..80: mol_type = other DNA
tcagatgctaggtctcatggatctaggaagcaaaagaagtaatactgctcccaaccaagtggcagacgactcagtaagaa

SEQ ID NO: 46211 - DNA, 80 bp, synthetic construct
  source 1..80: mol_type = other DNA
atgtcaatttgctcagcatatatcttggacaagcttgttctaataaatgggcttttgatattcattttaagagaccccaa

SEQ ID NO: 46212 - DNA, 80 bp, synthetic construct
  source 1..80: mol_type = other DNA
gggaaatggcagatgatagaattgttgactgatttattatcagagacttcagtacatgtgtttagagtgctaactaatgc

SEQ ID NO: 46213 - DNA, 80 bp, synthetic construct
  source 1..80: mol_type = other DNA
cctttcacacccgcgtgtctttaaaaagttctgggactcaggattactatctccttactatggaccctatttttataatc

SEQ ID NO: 46214 - DNA, 80 bp, synthetic construct
  source 1..80: mol_type = other DNA
aagatgtcacgaaattagcgatagatttaataatatcatcgtacacaatgtacttgacagtatggttggaaggtagaact

SEQ ID NO: 46215 - DNA, 80 bp, synthetic construct
  source 1..80: mol_type = other DNA
gttaatttcctaatggcagaacaatcagtagatgcaattgagattagaactcaaacaattcaggccaaacacttgtgcat

SEQ ID NO: 46216 - DNA, 80 bp, synthetic construct
  source 1..80: mol_type = other DNA
gctatgtgatttgtattgtaatgaacagggacccccacatataagagacctattacctcatcaaaaaatcgacatcctgt

SEQ ID NO: 46217 - DNA, 80 bp, synthetic construct
  source 1..80: mol_type = other DNA
ctgactttatcaggaagaccagattaaatatagttggttctgatgcttggaatgtccataatttgcacataaatgtttat

SEQ ID NO: 46218 - DNA, 80 bp, synthetic construct
  source 1..80: mol_type = other DNA
cctgcctctttaacttacctcagaagaggagttattaaacaattgagaattagacaagacataggtgaaatgtttgacat

SEQ ID NO: 46219 - DNA, 80 bp, synthetic construct
  source 1..80: mol_type = other DNA
aattgaaatggataggaaatatcataaatatatggttgaaacagcaattaattataagcctagatcaacatgtacagttt

SEQ ID NO: 46220 - DNA, 80 bp, synthetic construct
  source 1..80: mol_type = other DNA
taaacttaagtgacattgacagaccccttaactccacactctatatcgatctggaagatagtgtgccagtgaatggttgg

SEQ ID NO: 46221 - DNA, 80 bp, synthetic construct
  source 1..80: mol_type = other DNA
agcaggccgatacttcatcagcaggaaattcttttcaaactgtcaatgatcttgatgctctaaatagttaaataatcctg

SEQ ID NO: 46222 - DNA, 80 bp, synthetic construct
  source 1..80: mol_type = other DNA
gagtcacacaaatacagaagagttggcatcaactcaacatctgggtataaagcattggagctgtattcaatcatagaaag

SEQ ID NO: 46223 - DNA, 80 bp, synthetic construct
  source 1..80: mol_type = other DNA
attctatactcctggttcggcgcgattgtttgtaggtgaaggatcaggtgccatgatgagcgtttacttcaagttgttag

SEQ ID NO: 46224 - DNA, 80 bp, synthetic construct
  source 1..80: mol_type = other DNA
ggaaatctgtgaattattataattcaggtataagtgaattggatgttgttggacaaagagagcttaggttatacccagca

SEQ ID NO: 46225 - DNA, 80 bp, synthetic construct
  source 1..80: mol_type = other DNA
gaagcatgcattgtggatcataatctgggtgaggagtatggtctgttaaaatctattgttcctctattcaacggtaggcc

SEQ ID NO: 46226 - DNA, 80 bp, synthetic construct
  source 1..80: mol_type = other DNA
cgaaacaacatggataggaaatatggactgtttcatacatattatgaggatgattaaaagtcatagtttaggtcttttgc

SEQ ID NO: 46227 - DNA, 80 bp, synthetic construct
  source 1..80: mol_type = other DNA
acagtgatatggaaagcggtgttgacaaggataacttgattatattgaatgaacacagtcatttactgtctctcgctgta

SEQ ID NO: 46228 - DNA, 80 bp, synthetic construct
  source 1..80: mol_type = other DNA
aatttacttcgcttcgatggaatacttgtgtctaagataaatccttcatcttctttcccattgactgctttattcaatat

SEQ ID NO: 46229 - DNA, 80 bp, synthetic construct
  source 1..80: mol_type = other DNA
gtataaagcttgcttcgttgatattaaaatagcattacctaaatatagtaatcctaattcgactgaatgttacctcatct

SEQ ID NO: 46230 - DNA, 80 bp, synthetic construct
  source 1..80: mol_type = other DNA
gtactcagcctaggatcctaactgttgtcacacccgagattattttagagcatagtgtagacaagccagaagactgcaac

SEQ ID NO: 46231 - DNA, 80 bp, synthetic construct
  source 1..80: mol_type = other DNA
aaatctgtcttgaattatatcttgatattgaaattcagaattgggatatcatttgaagacagaggtaggagcgttattga

SEQ ID NO: 46232 - DNA, 80 bp, synthetic construct
  source 1..80: mol_type = other DNA
tcttcttaattactaatctatcaattggaatgtatatgattaagcataataactaacctgatgattatttattgactctt

SEQ ID NO: 46233 - DNA, 80 bp, synthetic construct
  source 1..80: mol_type = other DNA
tgacgagactgaggcatcatttgcaaacagtgttaatgaatataacagagctagattacctcatagaccacctcacccca

SEQ ID NO: 46234 - DNA, 80 bp, synthetic construct
  source 1..80: mol_type = other DNA
gaaatttttaccggcaggggaatgcagaaaatctgacactgataaatttagtttctggtctcacagaggacgataaggtc

SEQ ID NO: 46235 - DNA, 80 bp, synthetic construct
  source 1..80: mol_type = other DNA
ttattatcttgtggtttgtcgcttaacgggcctacagtatgtcagaaattgttgggctatgataccggtagtcccttggg

SEQ ID NO: 46236 - DNA, 80 bp, synthetic construct
  source 1..80: mol_type = other DNA
gactattcttgagtcatctttccttcttttaaatgaggccttgaatatctacgacgggaatagaatgccgtctagttttt

SEQ ID NO: 46237 - DNA, 80 bp, synthetic construct
  source 1..80: mol_type = other DNA
ttgagccgtatcctattctcgagtcaacaagattgtcaaaatatatgcacaaattcatcagaaaaattatagggtatact

SEQ ID NO: 46238 - DNA, 80 bp, synthetic construct
  source 1..80: mol_type = other DNA
tacctaaaatatgatagcttagatctctcattggtggacagacatatctcaaatctgaaacgtcgatacctaatattcga

SEQ ID NO: 46239 - DNA, 80 bp, synthetic construct
  source 1..80: mol_type = other DNA
ttttagtgattacaagcataccaaaataatacctaattattattacaagaggataaagaaaggtaaattcaaacagagtt

SEQ ID NO: 46240 - DNA, 80 bp, synthetic construct
  source 1..80: mol_type = other DNA
ggatgatcagtttagctacaaaggagataaagctctggtggaaattgatatcatatgttcctgtgttcagaaagattgtc

SEQ ID NO: 46241 - DNA, 80 bp, synthetic construct
  source 1..80: mol_type = other DNA
tgaatcaatcctccagcaccacgactacctgttttttaaataaaaataaaaaacttattaataatgttcgaaaattagaa

SEQ ID NO: 46242 - DNA, 80 bp, synthetic construct
  source 1..80: mol_type = other DNA
agcaccacgactacctgttttttaaataaaaataaaaaacttattaataatgttcgaaaattagaattcacatattttcc

SEQ ID NO: 46243 - DNA, 80 bp, synthetic construct
  source 1..80: mol_type = other DNA
aagattagtttaacacttgtaaataatacaatattatggtagatatctaattttatactaatttattaaataaaacttag

SEQ ID NO: 46244 - DNA, 80 bp, synthetic construct
  source 1..80: mol_type = other DNA
gagccaagatatcaatgtctgctcacagcagttattcgattctaaagaatcaaccgtcagagttggaccaaggcctattc

SEQ ID NO: 46245 - DNA, 80 bp, synthetic construct
  source 1..80: mol_type = other DNA
agagacgacacaaatcagagtagtaaaggaaaaaataaaagaaagctgactagacctattaagtactttggccagccagg

SEQ ID NO: 46246 - DNA, 80 bp, synthetic construct
  source 1..80: mol_type = other DNA
aggctcatccaaaaaagatagatcacctcttttaaagacccgacttaaagaggaggatataccttatattgacctggccg

SEQ ID NO: 46247 - DNA, 80 bp, synthetic construct
  source 1..80: mol_type = other DNA
aagcaggaccaagtagggttgaactaacatgtcctacgaagacaggattcgacagattcaaaatggtctcgagattgtcg

SEQ ID NO: 46248 - DNA, 80 bp, synthetic construct
  source 1..80: mol_type = other DNA
acttggtcaaaaaggttcggaaggagtcaatcgaaaagccaacatacggaagaagtgcaattgggttgccaacaacaaaa

SEQ ID NO: 46249 - DNA, 80 bp, synthetic construct
  source 1..80: mol_type = other DNA
gacagaaccgcagcatgggagctgttccatcaatctacagttgatgaaaccagacctgaagaactatctcttgaagaaag

SEQ ID NO: 46250 - DNA, 80 bp, synthetic construct
  source 1..80: mol_type = other DNA
tagtgtataatccgtctaataagagcccggcattgaggtgggaaatcacaaaatttgcaatgcgactgatatggtcccct

SEQ ID NO: 46251 - DNA, 80 bp, synthetic construct
  source 1..80: mol_type = other DNA
aaatggtacaattagctcaagagatggagtgggcatttcagagcctattcatcatgctgacagcggaggaggtaggacat

SEQ ID NO: 46252 - DNA, 80 bp, synthetic construct
  source 1..80: mol_type = other DNA
acaaagaatccaagtgggatgagggggacgaaccaatactcgaaaatcagttggttacaaacattcaatcgaatgataca

SEQ ID NO: 46253 - DNA, 80 bp, synthetic construct
  source 1..80: mol_type = other DNA
ggaaggaagattacctacgggaaatctgatcactcgtatgctgacagccaagataatagaacagagggaagtaagtggag

SEQ ID NO: 46254 - DNA, 80 bp, synthetic construct
  source 1..80: mol_type = other DNA
cgatggatgtactacgattgattcgtctgatgtgtccagcatactccagggcagtctatctcaggacacagatgctacga

SEQ ID NO: 46255 - DNA, 80 bp, synthetic construct
  source 1..80: mol_type = other DNA
gacctcgtgggaaaacagcaccagcattccaaatgaatcccaatgccaaagagtactaccctaagaatcacttgtcaaag

SEQ ID NO: 46256 - DNA, 80 bp, synthetic construct
  source 1..80: mol_type = other DNA
caggagtcgtgtaccaatgatttagataaagtcacaaatcataacaaagacacgaaaggacaagagaagggatctgcata

SEQ ID NO: 46257 - DNA, 80 bp, synthetic construct
  source 1..80: mol_type = other DNA
tgtatttgaggtagaatccaacaaaccaaccataagaccgagaatggcaaaacaaatccagattgaatcaccaccagagg

SEQ ID NO: 46258 - DNA, 80 bp, synthetic construct
  source 1..80: mol_type = other DNA
acggcactgagataataaatcttacaattacacctaagcaaagaaagtctatacttaaggaacaaaagagtgatgatgat

SEQ ID NO: 46259 - DNA, 80 bp, synthetic construct
  source 1..80: mol_type = other DNA
gcagtgccaaaaaagcaacccaagccagatctaatagtgattgaagaagaggatgaagatcaacagagtgaaccgatcga

SEQ ID NO: 46260 - DNA, 80 bp, synthetic construct
  source 1..80: mol_type = other DNA
gaatatagacaagagtgaatccgaatcagacataacaatatttgatctagcagatcaggccgctgatcatgtgagaagga

SEQ ID NO: 46261 - DNA, 80 bp, synthetic construct
  source 1..80: mol_type = other DNA
gccgcatcacactcagtcaaagttggggcagccttgacactgctatctgctcatgctgaaaatcctggtgcaatgattag

SEQ ID NO: 46262 - DNA, 80 bp, synthetic construct
  source 1..80: mol_type = other DNA
cccagatgactgctaaagcaatcggtggaataatcgaggcttccctcaaaaatccaagtgactttggagagattgtgtat

SEQ ID NO: 46263 - DNA, 80 bp, synthetic construct
  source 1..80: mol_type = other DNA
ctatcagatgggcctacacaagcatcgtcaccggaggggaagaaagaaggaggaaggaaactccgagcgttggatagaac

SEQ ID NO: 46264 - DNA, 80 bp, synthetic construct
  source 1..80: mol_type = other DNA
tgagtctggtaaatctgagtctgaaacatcttcaaagcaggttaaaaaaggcatcgaagagaatacagtctctactggga

SEQ ID NO: 46265 - DNA, 80 bp, synthetic construct
  source 1..80: mol_type = other DNA
tggttcagaaatcaaggtcgaagactggtgcaacccaatgtgctccaaaatcaaatcagagccatcaagagagaaatgct

SEQ ID NO: 46266 - DNA, 80 bp, synthetic construct
  source 1..80: mol_type = other DNA
cctgtaagcagtgtccagtcgtctgtcaagatgaacattgtacgcaaatcgagtacgagtgaacagagtaccggaaatga

SEQ ID NO: 46267 - DNA, 80 bp, synthetic construct
  source 1..80: mol_type = other DNA
ccaagggtacacatcggaagactctactcaatcatctgcaaatatcagttttgatgactattttgacggattgactaaca

SEQ ID NO: 46268 - DNA, 80 bp, synthetic construct
  source 1..80: mol_type = other DNA
atctctcaaaagaagacattatgaaagaaatatatagaaaccagttagttatgcttagtaagctagaagagaataacgca

SEQ ID NO: 46269 - DNA, 80 bp, synthetic construct
  source 1..80: mol_type = other DNA
acatctgaactcattaaactcgtagccaacaatcagaaagcaacgcttgctaaattagatgcactagacagaaacataag

SEQ ID NO: 46270 - DNA, 80 bp, synthetic construct
  source 1..80: mol_type = other DNA
tagattagggctggctgtttcatcaatggagcagatgctggcatctatgaggatcatgatcccaggtaagcctgtagata

SEQ ID NO: 46271 - DNA, 80 bp, synthetic construct
  source 1..80: mol_type = other DNA
ccaatgacaaacagaaaaatcctttactcaagcctgtcatcgggcggtccagcacaagagcagaagaggtaattgacatc

SEQ ID NO: 46272 - DNA, 80 bp, synthetic construct
  source 1..80: mol_type = other DNA
gtcacttgtgaatgacccggatattgaggtagtgattacagatatatcagagtttgaccacggagttcccagacttgaaa

SEQ ID NO: 46273 - DNA, 80 bp, synthetic construct
  source 1..80: mol_type = other DNA
aacccggatttgggctcagggaagaccagtctgcacagtgcgaagaaagaactgttcatagagcctcttgatcccaataa

SEQ ID NO: 46274 - DNA, 80 bp, synthetic construct
  source 1..80: mol_type = other DNA
aactaatgctacacaatttatacctgaagatagtagtgtaactattcaaacacttagggcaatagtcatcaacagggtta

SEQ ID NO: 46275 - DNA, 80 bp, synthetic construct
  source 1..80: mol_type = other DNA
atgataatgaattaaagtcagcatttctagcaaaaataaatgaaaatcttagtcttgatcaaattaggaagatacacaaa

SEQ ID NO: 46276 - DNA, 80 bp, synthetic construct
  source 1..80: mol_type = other DNA
cagatcaaggaggcactacaggctggactgtgatctggctcaaaccatgatgaaaagctaacttacagcatagtaaggta

SEQ ID NO: 46277 - DNA, 80 bp, synthetic construct
  source 1..80: mol_type = other DNA
gtatacctcataatcttgcaacttagtcgaaatatgtgcaatgcatgcaacttatctatctaatgactcttgagtagatt

SEQ ID NO: 46278 - DNA, 80 bp, synthetic construct
  source 1..80: mol_type = other DNA
actggtatcataaaaaacttaggagccagggtacttatacagggctgcatccaatcacccctcacctggatggaagctac

SEQ ID NO: 46279 - DNA, 80 bp, synthetic construct
  source 1..80: mol_type = other DNA
ctcagatttcaaggagacaacatggagcgaaggtggactcttgagggccatggaagcagagctagacggttcaggataca

SEQ ID NO: 46280 - DNA, 80 bp, synthetic construct
  source 1..80: mol_type = other DNA
tgatacctaaatacagggtaatcaatcctggaggtaatgaaaggaagacgatgggttatatgtacctgattgcttacgga

SEQ ID NO: 46281 - DNA, 80 bp, synthetic construct
  source 1..80: mol_type = other DNA
tttgttgaagatttgcctagtgaacacaacacgaacgaaaagccaaggattcgcacggttgcagcatatccatttggtgt

SEQ ID NO: 46282 - DNA, 80 bp, synthetic construct
  source 1..80: mol_type = other DNA
gggggcatcagaagcctcacccgaagaactccttaagagtgcctgctccctggatgtgtcagtcagaagaactgcaggag

SEQ ID NO: 46283 - DNA, 80 bp, synthetic construct
  source 1..80: mol_type = other DNA
gaaggggcgagaaagcggagcaacaaatggacagctacagaaggatactagacagggcacctcaagaaaatctcttctac

SEQ ID NO: 46284 - DNA, 80 bp, synthetic construct
  source 1..80: mol_type = other DNA
ccatggaaaagcttgttatgggggctcgaggtacactggggtgcttggcaccatgggcatcagtgttaaacaatggtgct

SEQ ID NO: 46285 - DNA, 80 bp, synthetic construct
  source 1..80: mol_type = other DNA
atatttaatgcatccaagatttgcaataatgtagatctgatccagttgggtgttcctcagaggttgagaattttctttct

SEQ ID NO: 46286 - DNA, 80 bp, synthetic construct
  source 1..80: mol_type = other DNA
gtcaatcacattgttgacagataaaggcatttataagatccccaaaaccgtcttggaattccgagaaagtaatgctgtag

SEQ ID NO: 46287 - DNA, 80 bp, synthetic construct
  source 1..80: mol_type = other DNA
catttaatctattagtttccttgagaatagatactgatttgtcaagagcaggtatgaaaggtataattgataaggaagga

SEQ ID NO: 46288 - DNA, 80 bp, synthetic construct
  source 1..80: mol_type = other DNA
agaagactggcaacatttatgttgcatataggtaactttgtcagaagagggaagaagccttattcaatagagtactgcaa

SEQ ID NO: 46289 - DNA, 80 bp, synthetic construct
  source 1..80: mol_type = other DNA
gaagaaggttgagaatatggcactggtcttctcattaggagcagtcggaggtttaagtttgcatgtaagattcacaggta

SEQ ID NO: 46290 - DNA, 80 bp, synthetic construct
  source 1..80: mol_type = other DNA
agttaagccgaagattaattgcttccatgaggttccacaggaatatctgtttctctctaatggacatcaatcctggttta

SEQ ID NO: 46291 - DNA, 80 bp, synthetic construct
  source 1..80: mol_type = other DNA
aataaactcacttggaatcatgagtgtgaaatacaaaagatcactgcagtgttccaaccctctatcccgaaggattttaa

SEQ ID NO: 46292 - DNA, 80 bp, synthetic construct
  source 1..80: mol_type = other DNA
gatctatgatgatgtgttaatagacaacacagggaaaatcttaaggaactgaggatcaagacaaagcaaagagaagataa

SEQ ID NO: 46293 - DNA, 80 bp, synthetic construct
  source 1..80: mol_type = other DNA
gagagattaaaccaatactgtattctgtacacattctcatcacttacacttggaaatcaattagtcgagatcactggacg

SEQ ID NO: 46294 - DNA, 80 bp, synthetic construct
  source 1..80: mol_type = other DNA
aacccagaagtcgatgacttggaaattctggattctggaacattcctgttcgcgatcgctactgtgttggcacaagtctg

SEQ ID NO: 46295 - DNA, 80 bp, synthetic construct
  source 1..80: mol_type = other DNA
gttctctttctaggccataaatttaattatattattaacggttacgggtatatattatttacctcttgttttcacatggt

SEQ ID NO: 46296 - DNA, 80 bp, synthetic construct
  source 1..80: mol_type = other DNA
gctcatggatagtggggatcacccatgctattcaaataggcttgacaatctttaagagttggtcaattaatgttgattta

SEQ ID NO: 46297 - DNA, 80 bp, synthetic construct
  source 1..80: mol_type = other DNA
ttacaccaagtcaatgattataggattagtgtttacgatttatagtatatagatttattatacaagttttatcaatttcc

SEQ ID NO: 46298 - DNA, 80 bp, synthetic construct
  source 1..80: mol_type = other DNA
tagctttatgtagctaaatttgaaatagtcaaaatctcgccaaatcctcagcacaaccacccctaaatacagcagatatc

SEQ ID NO: 46299 - DNA, 80 bp, synthetic construct
  source 1..80: mol_type = other DNA
ccgaaacaattttgacagatctgatttaaagattaacataaaaaacttaggggccaagattatgcccttcagtatctatg

SEQ ID NO: 46300 - DNA, 80 bp, synthetic construct
  source 1..80: mol_type = other DNA
agacaccatatactgagcagggttcaatcagatctcagaatcataggaggaggaaaagagtcgactacaagtgtgtcacc

SEQ ID NO: 46301 - DNA, 80 bp, synthetic construct
  source 1..80: mol_type = other DNA
ataatatcactcctatttctgctggctttgactattgttctcggcttttcttcaaactggttgtcattaatattaaaaaa

SEQ ID NO: 46302 - DNA, 80 bp, synthetic construct
  source 1..80: mol_type = other DNA
tcctggatataatactgatattgacccacgaggcataccgcctcaaacaagagttgagccaactaaaagaatactcgttc

SEQ ID NO: 46303 - DNA, 80 bp, synthetic construct
  source 1..80: mol_type = other DNA
gaaagccagacagatacccattcagaccaggggtgcctggaagaggcaattgcgagagtagaacagtaccgccatatccg

SEQ ID NO: 46304 - DNA, 80 bp, synthetic construct
  source 1..80: mol_type = other DNA
cagctctctggtagatctagactctgaaccacttaagacattgatcgtctttcttgatcaaactgtcttaatactgttga

SEQ ID NO: 46305 - DNA, 80 bp, synthetic construct
  source 1..80: mol_type = other DNA
gattttggtagcaaaagcagtaacagctccggatacagcagaagagagtgagaacaaaaggtgggcaaagtatgttcaac

SEQ ID NO: 46306 - DNA, 80 bp, synthetic construct
  source 1..80: mol_type = other DNA
cggtattctggaaaaaatataaagagactgtactagagaagtatccagcctacatctgcacttgctagcaattaagttga

SEQ ID NO: 46307 - DNA, 80 bp, synthetic construct
  source 1..80: mol_type = other DNA
ttttgaagatactcaaattaaataatatatggacttcagaattatactttttgccgctttgttactaattacattcctca

SEQ ID NO: 46308 - DNA, 80 bp, synthetic construct
  source 1..80: mol_type = other DNA
tattattttactactactatattgtagaggaaagatataaaccgcttccaacaatagaagttagggagataccctaggca

SEQ ID NO: 46309 - DNA, 80 bp, synthetic construct
  source 1..80: mol_type = other DNA
tcactttcaagaagaagtgccttgttagtatctcgaatgagtatgtgtaatcaatgatagtaagatgctgagagtaatta

SEQ ID NO: 46310 - DNA, 80 bp, synthetic construct
  source 1..80: mol_type = other DNA
attgtatactccttattattatcataatactatatattaaactgatacttcttataatactatcactaagaggtataaat

SEQ ID NO: 46311 - DNA, 80 bp, synthetic construct
  source 1..80: mol_type = other DNA
tgcttcacattttacaacagggacagataatacacccaaagaactgtaaaccagtatatacaagaatcagcttcaaatta

SEQ ID NO: 46312 - DNA, 80 bp, synthetic construct
  source 1..80: mol_type = other DNA
cacttaagaattagtaaagatgggaagaatggcatttcttaagtcagctataatttgttaccttttattctatccgcaca

SEQ ID NO: 46313 - DNA, 80 bp, synthetic construct
  source 1..80: mol_type = other DNA
tcgttaaatctagtctacactatgactctctgtctaaggtcggaataataaagggattgacctataattataaaatcaag

SEQ ID NO: 46314 - DNA, 80 bp, synthetic construct
  source 1..80: mol_type = other DNA
ggctctccatccacaaagcttatggtggttaaattgatacccaacattgatggagttagaaattgtacacagaaacagtt

SEQ ID NO: 46315 - DNA, 80 bp, synthetic construct
  source 1..80: mol_type = other DNA
tgacgagtataaaaatttagtcaagaatgttttggagccggtgaagttagccttgaatgctatgttagataacgttaagt

SEQ ID NO: 46316 - DNA, 80 bp, synthetic construct
  source 1..80: mol_type = other DNA
agaagcgtgtaaatccagattatttggtctcaaacaggtggataactgccatgaggtccttaatatcaatcgacctatca

SEQ ID NO: 46317 - DNA, 80 bp, synthetic construct
  source 1..80: mol_type = other DNA
caggcaataataagtatagatttgctggtgcaattatggcaggtgtggcattaggtgttgcaactgcagcgactgtaaca

SEQ ID NO: 46318 - DNA, 80 bp, synthetic construct
  source 1..80: mol_type = other DNA
gccgggattgctctgcatcgctcaaatgagaatgctcaagctatagcaaacatgaagaatgcaatacaaaacactaatga

SEQ ID NO: 46319 - DNA, 80 bp, synthetic construct
  source 1..80: mol_type = other DNA
ggcagtcaaacaattacaacttgcaaacaaacaaacactggctgtcattgacacaataagaggggagattaataataata

SEQ ID NO: 46320 - DNA, 80 bp, synthetic construct
  source 1..80: mol_type = other DNA
tcatccctgtaataaaccagcttagctgtgatacaatcgggttaagtgtaggaatcaagttaacgcaatattattctgaa

SEQ ID NO: 46321 - DNA, 80 bp, synthetic construct
  source 1..80: mol_type = other DNA
atactaacagcatttggacctgctttgcaaaaccctgtaaatacaaggatcacaattcaggcaatatccagtgtcttcaa

SEQ ID NO: 46322 - DNA, 80 bp, synthetic construct
  source 1..80: mol_type = other DNA
caggaattttgatgaattattgaagatcatggggtacactagtggcgatctctatgaaatattacatagcgggttaataa

SEQ ID NO: 46323 - DNA, 80 bp, synthetic construct
  source 1..80: mol_type = other DNA
gagggaacatcattgatgtagatgtagaggctggttacatagcacttgagatagaattcccaaatttgacacttgttcca

SEQ ID NO: 46324 - DNA, 80 bp, synthetic construct
  source 1..80: mol_type = other DNA
aatgctgtggttcaagaattgatgcccattagttataatgtggatggggatgagtgggtaacacttgttcctaggtttgt

SEQ ID NO: 46325 - DNA, 80 bp, synthetic construct
  source 1..80: mol_type = other DNA
gttaacgaggactacattgttatccaatatagacacaagtagatgcacagtcaccgaaagtagtgtcatatgtgataatg

SEQ ID NO: 46326 - DNA, 80 bp, synthetic construct
  source 1..80: mol_type = other DNA
attacgcattgcctatgtcatacgaactgataggctgtttgcaaggtgatacatccaagtgtgccagagagaaggttgta

SEQ ID NO: 46327 - DNA, 80 bp, synthetic construct
  source 1..80: mol_type = other DNA
ggtttactccaaataccctatccaggagaacgaagactttactaatcaaacatgttctcgactttgaagaatgagacaga

SEQ ID NO: 46328 - DNA, 80 bp, synthetic construct
  source 1..80: mol_type = other DNA
gttaggaagtacatggttgagatcctgatagaagttaagaagagtggtgtcgccagagggagactgaatgagatgattgc

SEQ ID NO: 46329 - DNA, 80 bp, synthetic construct
  source 1..80: mol_type = other DNA
tccagttatgtcccaagatttgcattgtctgatggattggtctatgctaattgcctgaatacaatctgtaggtgcatgga

SEQ ID NO: 46330 - DNA, 80 bp, synthetic construct
  source 1..80: mol_type = other DNA
caccgacacccctatatcccaaagtttgggcactacagtctctctacttgataataagaagtgcttggtgtatcaggtag

SEQ ID NO: 46331 - DNA, 80 bp, synthetic construct
  source 1..80: mol_type = other DNA
gggatatcctaatctcggttggatcatatttaggggaaggtgaatatagcgcggataatgtcgaattggagcctcctgtt

SEQ ID NO: 46332 - DNA, 80 bp, synthetic construct
  source 1..80: mol_type = other DNA
gtaattgataagatagacataggaaatcagttggcaggtataaaccaaactttacagaatgcagaagactacattgagaa

SEQ ID NO: 46333 - DNA, 80 bp, synthetic construct
  source 1..80: mol_type = other DNA
atccgaggagttcttgaaaggtattaacccttccatcataacacttggctcgatggcggttctatacatcttcatgattg

SEQ ID NO: 46334 - DNA, 80 bp, synthetic construct
  source 1..80: mol_type = other DNA
tcatagctgtcatttcaatcatagctttagtattgtcaatcaaattgacagtaaaagggaatgtggttagacagcagttc

SEQ ID NO: 46335 - DNA, 80 bp, synthetic construct
  source 1..80: mol_type = other DNA
gcttacacacagcatgttccaagtatggagaatgtgaattatgtaagtcattaatccaaggctttaatacattaaatgat

SEQ ID NO: 46336 - DNA, 80 bp, synthetic construct
  source 1..80: mol_type = other DNA
tattattaatacatttatgatcaatctttagttaattcaatgcccttctaagaatcttaaacataattggctctattaat

SEQ ID NO: 46337 - DNA, 80 bp, synthetic construct
  source 1..80: mol_type = other DNA
gcagtaactcacaggatctctagtttctattatttcctcttcctttcttcacactgattaaagaaaacttaggacccagg

SEQ ID NO: 46338 - DNA, 80 bp, synthetic construct
  source 1..80: mol_type = other DNA
tccattgagcacaagtccaaaccagctatttcgtattatcatatcatttctgttcttagaaagtatttagttaattggct

SEQ ID NO: 46339 - DNA, 80 bp, synthetic construct
  source 1..80: mol_type = other DNA
cgacattgggaactacattgaagagacaggtatggcaggattcttcttgaccataaagtatggccttgaaatgaagttcc

SEQ ID NO: 46340 - DNA, 80 bp, synthetic construct
  source 1..80: mol_type = other DNA
tagaaatctttgacaaatcatggcaacaaacaaaagggatgtaatcaagacaactgagtcaacccgcgaggataaagtta

SEQ ID NO: 46341 - DNA, 80 bp, synthetic construct
  source 1..80: mol_type = other DNA
agaaattttatggcgttgaaacagctgaaaaggtagcagatagtataagtagtaataaagtgtttatattgatgaacaca

SEQ ID NO: 46342 - DNA, 80 bp, synthetic construct
  source 1..80: mol_type = other DNA
ttacttatactaacaggtgctatcataacaataactcttaatgtgactaatctgactacaattaagaatcaacaagcaat

SEQ ID NO: 46343 - DNA, 80 bp, synthetic construct
  source 1..80: mol_type = other DNA
gctgaagatcatccaagatgaagtgaactcaaaattggaaatgtttgtaagtttggaccaacttgttaaaggtgaaatca

SEQ ID NO: 46344 - DNA, 80 bp, synthetic construct
  source 1..80: mol_type = other DNA
aaccgaaggtttccctgattaacacagctgttagtgtgagcatccctggtcagatttcaaatttgcagacaaaattccta

SEQ ID NO: 46345 - DNA, 80 bp, synthetic construct
  source 1..80: mol_type = other DNA
caaaaatacgtatacctagaagaatcaatcaccaaacaatgcacttgtaatccattatcaggaatttttccaactacaaa

SEQ ID NO: 46346 - DNA, 80 bp, synthetic construct
  source 1..80: mol_type = other DNA
gccgccacctccgcctacagataaacccgatgatgacacgacagatgatgacaaagtggacactacaatcaaaccggtgg

SEQ ID NO: 46347 - DNA, 80 bp, synthetic construct
  source 1..80: mol_type = other DNA
aatattataaaccagatggttgtaacaagacaaacgatcactttacaatgcagccaggtgttaatttttacactgtaccc

SEQ ID NO: 46348 - DNA, 80 bp, synthetic construct
  source 1..80: mol_type = other DNA
aaccttggtccatccagctctagtgctgatgagtgttacactaatccatcattttctataggatcatcaatttatatgtt

SEQ ID NO: 46349 - DNA, 80 bp, synthetic construct
  source 1..80: mol_type = other DNA
ctcccaagagattagaaaaacagattgtacaacaggagaaatattatcaattcagatcgtcttaggccgaatcgtagaca

SEQ ID NO: 46350 - DNA, 80 bp, synthetic construct
  source 1..80: mol_type = other DNA
ctgttatagtgataaatgagttccaagctgatcttctaactcttcaaacattaatgagaacctatatggatctcggacca

SEQ ID NO: 46351 - DNA, 80 bp, synthetic construct
  source 1..80: mol_type = other DNA
agggtcaacagggaccacaagcatcacccttattagtatggagcgtcccaaatccaaaaatcatcaactcgtgtgctgtc

SEQ ID NO: 46352 - DNA, 80 bp, synthetic construct
  source 1..80: mol_type = other DNA
gcagctggagacgagacgggatgggtgttatgctcagtgacattaactgcagcctcaggggaaccaataccccacatgtt

SEQ ID NO: 46353 - DNA, 80 bp, synthetic construct
  source 1..80: mol_type = other DNA
tgatgggttctggttgtataagtttgaaccagacactgaggtagttgcttatagaatcacaggctttgcttatctgcttg

SEQ ID NO: 46354 - DNA, 80 bp, synthetic construct
  source 1..80: mol_type = other DNA
ataaggtttatgactctgtctttataggcaaaggaggaggaatccagagaggcaatgatctgtactttcagatgtttggg

SEQ ID NO: 46355 - DNA, 80 bp, synthetic construct
  source 1..80: mol_type = other DNA
ctttccagaaacagacagagcattaaggcgctatgtgaacacggttcatgcctagggacaggaggaggagggtaccaagt

SEQ ID NO: 46356 - DNA, 80 bp, synthetic construct
  source 1..80: mol_type = other DNA
ccaatccatgtttaaaaatgaccatttatatcgttaaaatgtatcgtatataatagttttctaacgtggagtacagaatt

SEQ ID NO: 46357 - DNA, 80 bp, synthetic construct
  source 1..80: mol_type = other DNA
tgatctcaagccgtcttttctgaagtaggtttcttatttagtagttgttgtagataatccaaatctaattcttcaaatga

SEQ ID NO: 46358 - DNA, 80 bp, synthetic construct
  source 1..80: mol_type = other DNA
acgacgacatattagtaactgttttccatttttttcgttttaagatctacccacggatacgaaataaacatgtctattgt

SEQ ID NO: 46359 - DNA, 80 bp, synthetic construct
  source 1..80: mol_type = other DNA
ccgtatagtactcccaagaatcaagctaggctggaaactatttacgaaactatcaaaatgcaaggtacaacaaacaataa

SEQ ID NO: 46360 - DNA, 80 bp, synthetic construct
  source 1..80: mol_type = other DNA
aggagcctctaaagctgtaaagttaaagatagtatatggcgttagttagtgtgatggttctttttctgggtgggagccac

SEQ ID NO: 46361 - DNA, 80 bp, synthetic construct
  source 1..80: mol_type = other DNA
ataattaatcatctcaagggctatcttttataactcaaggggtcattattataagggtggtagttgggtttacactaatt

SEQ ID NO: 46362 - DNA, 80 bp, synthetic construct
  source 1..80: mol_type = other DNA
agggggttggggacgatttataaccatgttgtagttttacattcactagttaggaattgtctaagtgttaggtctgctag

SEQ ID NO: 46363 - DNA, 80 bp, synthetic construct
  source 1..80: mol_type = other DNA
ctgcatgaaatcagtgattgatcagctagatcaggtgatataatcatttatgttggtataattttagataagtatgatta

SEQ ID NO: 46364 - DNA, 80 bp, synthetic construct
  source 1..80: mol_type = other DNA
ccatatattaaggtttactaacaatgatattatgtaattggatgtaaatttcattccctgcttcgctgctttgcattata

SEQ ID NO: 46365 - DNA, 80 bp, synthetic construct
  source 1..80: mol_type = other DNA
aataaccaataaatgcactgataattataggtataacaagtactaacatgcagatttattattcaggggattgttatagt

SEQ ID NO: 46366 - DNA, 80 bp, synthetic construct
  source 1..80: mol_type = other DNA
taattgtttactaatttaagcatttacgggtttatcaatatattatcagggcattactaatcatcaggttaatcagggtt

SEQ ID NO: 46367 - DNA, 80 bp, synthetic construct
  source 1..80: mol_type = other DNA
tacctggaaatagaatgtagacatgcatatcatgtatatgaattattaatgacaattatgaatgtactagtttaattagt

SEQ ID NO: 46368 - DNA, 80 bp, synthetic construct
  source 1..80: mol_type = other DNA
cactgttccattattatcaccagcattaatttgatagatttaggtcttaatatgtattagactcccagcattatatactt

SEQ ID NO: 46369 - DNA, 80 bp, synthetic construct
  source 1..80: mol_type = other DNA
gtattttattactgttattgggcccaacaatgtgaagctgagctatccttttccctttcaccactgtctctcttaccttc

SEQ ID NO: 46370 - DNA, 80 bp, synthetic construct
  source 1..80: mol_type = other DNA
aaaacaaaggaactcgcattcgtttcaaagatgacacttcttttgaggacattaacggtatcaggagaccaaagcaccta

SEQ ID NO: 46371 - DNA, 80 bp, synthetic construct
  source 1..80: mol_type = other DNA
gagaatctatggaaaaagagtgcccctttctaaaaccagatgtaaagccagggacaccagcccaggaaaccgaattttta

SEQ ID NO: 46372 - DNA, 80 bp, synthetic construct
  source 1..80: mol_type = other DNA
aagaggaataaaatatattttatgcaaagacaagaagtactggataagaatcatgttgctgaaattgataagttgattga

SEQ ID NO: 46373 - DNA, 80 bp, synthetic construct
  source 1..80: mol_type = other DNA
ttatgcagcttcaggagatccaacatcaccagataacattgagtccccgaatgcaccctgggtatttgcctgtgcacctg

SEQ ID NO: 46374 - DNA, 80 bp, synthetic construct
  source 1..80: mol_type = other DNA
cagcagtcacggctgcgtccttggcaatccttgcacggcagtcagaggcgacaccaataacagcctcggccgttgcactg

SEQ ID NO: 46375 - DNA, 80 bp, synthetic construct
  source 1..80: mol_type = other DNA
tgaatgatataatcttaaaaacaaaatctggactcccctcaggcatgccattaaccagtgttgtcaactcccgcggccgc

SEQ ID NO: 46376 - DNA, 80 bp, synthetic construct
  source 1..80: mol_type = other DNA
aacccttaaagatataatattcactaattgcactgatatattaggtatagtaagtactaacatgcagacatgtatattca

SEQ ID NO: 46377 - DNA, 80 bp, synthetic construct
  source 1..80: mol_type = other DNA
gggattattgtagctaagtgtttactaatctgggtatttacgggttcaacattattgtatcagggttcattaatcattag

SEQ ID NO: 46378 - DNA, 80 bp, synthetic construct
  source 1..80: mol_type = other DNA
gtcaatcagggtttaactggaagtaaggcattgtgtatatactttaaatttatgaaattactaatgacagttaagaatgt

SEQ ID NO: 46379 - DNA, 80 bp, synthetic construct
  source 1..80: mol_type = other DNA
attattttaattaaatgctgcttaatcattgtatccagcattaagttgatatatatttaggctttagtatatattgagtg

SEQ ID NO: 46380 - DNA, 80 bp, synthetic construct
  source 1..80: mol_type = other DNA
ttagaccttatagatttatattcatcatttatttaatgggcccatcaatgtgaaactgagctatcccctttctttttcac

SEQ ID NO: 46381 - DNA, 80 bp, synthetic construct
  source 1..80: mol_type = other DNA
aaaataagggaactcgtattaggtttaaagatgatacttcattcgaggacataaatggtatcagaagaccaaagcatttg

SEQ ID NO: 46382 - DNA, 80 bp, synthetic construct
  source 1..80: mol_type = other DNA
tgggggtctgatattgtcaatcatttccatctgggtgatgatatggaccctgaactcaggacactagcacagagtctcat

SEQ ID NO: 46383 - DNA, 80 bp, synthetic construct
  source 1..80: mol_type = other DNA
aatgttagtttgttaagtttaagagttaagtccttgtttagtttaagattttatttttggtgtagatttatttttatatt

SEQ ID NO: 46384 - DNA, 80 bp, synthetic construct
  source 1..80: mol_type = other DNA
atgttgttagtttgtttctgtattgggcccacaaatgtgaaactgagctatcattttcatctcttctcttcatctctgat

SEQ ID NO: 46385 - DNA, 80 bp, synthetic construct
  source 1..80: mol_type = other DNA
caattggtcagtacattatgggctttgcgcttgcaattgtcttgaaagccttgtatatgctgtccacccgaggtaggcag

SEQ ID NO: 46386 - DNA, 80 bp, synthetic construct
  source 1..80: mol_type = other DNA
agaacaagggcacaagaatcagattcaaggatgacagttcatatgaagaaataaatggaatccgacgccctaagcattta

SEQ ID NO: 46387 - DNA, 80 bp, synthetic construct
  source 1..80: mol_type = other DNA
aagagtttctcatcaagccgtgcccattcttgaaaaagcaaggtggtcccaacaaggatgaagaatttctcgtgagtaat

SEQ ID NO: 46388 - DNA, 80 bp, synthetic construct
  source 1..80: mol_type = other DNA
gatgccccccaacatgtatatatgtggctgggatggctgaattaggagccttcttctcaatcctacaggatatgagaaac

SEQ ID NO: 46389 - DNA, 80 bp, synthetic construct
  source 1..80: mol_type = other DNA
gagatgacatggatccagaactgagaggtttgacccaagcactaatcgaccaaaaggtaaaggaaatatctaacccagag

SEQ ID NO: 46390 - DNA, 80 bp, synthetic construct
  source 1..80: mol_type = other DNA
cctttaaagatttgaatgatcatcatggcattatcaactacatagtaggttattaacatataaatgtatatactatattc

SEQ ID NO: 46391 - DNA, 80 bp, synthetic construct
  source 1..80: mol_type = other DNA
agggattgttatagccaattgtttactaatgaatattaatacgggtttaatcgaaggtcagtatcagggtttaaataaat

SEQ ID NO: 46392 - DNA, 80 bp, synthetic construct
  source 1..80: mol_type = other DNA
attattatcagggtttattaatcaataagctaatcggggtttatactggaattagaataataaggtgataattactacta

SEQ ID NO: 46393 - DNA, 80 bp, synthetic construct
  source 1..80: mol_type = other DNA
ctaattataaaattataatctttagcagttatgaatgtattcctatatatttagcatcatattattatctggatttgcac

SEQ ID NO: 46394 - DNA, 80 bp, synthetic construct
  source 1..80: mol_type = other DNA
aaaccagaagtaaaacctggaacaccagcgcaggaaattgaattcttgaagaaaaacaagatctactttatgcaacgtca

SEQ ID NO: 46395 - DNA, 80 bp, synthetic construct
  source 1..80: mol_type = other DNA
taccagacaaggatagatacagatactagatatataaatataaaaacaaaacccttaagaatcaatgacttaacagttgg

SEQ ID NO: 46396 - DNA, 80 bp, synthetic construct
  source 1..80: mol_type = other DNA
aacctggaggttacggattaatgatttctaataaagggtggtttgctaggatcaggtatggtcaaacagagaggactatt

SEQ ID NO: 46397 - DNA, 80 bp, synthetic construct
  source 1..80: mol_type = other DNA
aagagcaccctacatggtgctgctggaagaatctatccaaaccaagtttgcaccaggtaattaccctttactctggagtt

SEQ ID NO: 46398 - DNA, 80 bp, synthetic construct
  source 1..80: mol_type = other DNA
cctcagaggtacgactggaccgattatatgagtttggaaacaccttattatttgtattgtaatggtggtagaatatgccc

SEQ ID NO: 46399 - DNA, 80 bp, synthetic construct
  source 1..80: mol_type = other DNA
tggtagctgcaaaacatggaattttactgtgcctactatattaaatccaagcggtagtataataataggtgtcacagcaa

SEQ ID NO: 46400 - DNA, 80 bp, synthetic construct
  source 1..80: mol_type = other DNA
aatcatcagaaccacaaactgcatccatgataacgataaacacaccaaatgatctaatagatcaatacgaaattttcagt

SEQ ID NO: 46401 - DNA, 80 bp, synthetic construct
  source 1..80: mol_type = other DNA
gattacaaatcaattggatctacgattactaagtgctttctatataaaagacaaccttggtgcttagttttgattgaagg

SEQ ID NO: 46402 - DNA, 80 bp, synthetic construct
  source 1..80: mol_type = other DNA
aattcctaaatcaacaggattaacagaaacatctatacaaaccttccgaatttacaagtcttgtgtcaagagtcgaacat

SEQ ID NO: 46403 - DNA, 80 bp, synthetic construct
  source 1..80: mol_type = other DNA
atttagattcatcaggtaatcgtttttattatgcaataggagataatgggaacaaaactaaagtcatgtacaagccgata

SEQ ID NO: 46404 - DNA, 80 bp, synthetic construct
  source 1..80: mol_type = other DNA
tccgaatcatgacacaaattctataaattgaataattattatctaataatggatgataattgatttataaatgatcctgt

SEQ ID NO: 46405 - DNA, 80 bp, synthetic construct
  source 1..80: mol_type = other DNA
ggttcagataaaagtcctgttgataggatactaaaccaatataaactataagttgttaatgtttaaattaacttaaagct

SEQ ID NO: 46406 - DNA, 80 bp, synthetic construct
  source 1..80: mol_type = other DNA
catgaagtcctaaattgatattcaataactaaggtaatcaactgttgatatctaaattatgtaaaaatgatttataagtg

SEQ ID NO: 46407 - DNA, 80 bp, synthetic construct
  source 1..80: mol_type = other DNA
tatgattaatgcagtgtatagttcaatgaacatacaattaatgtaaaacacataggtttgtaatgtctcaattaagttta

SEQ ID NO: 46408 - DNA, 80 bp, synthetic construct
  source 1..80: mol_type = other DNA
agtctcattatcttaactcctgatcaactcgtatttattgaaattgccaatagctttcgcttttgcttatgtttattgca

SEQ ID NO: 46409 - DNA, 80 bp, synthetic construct
  source 1..80: mol_type = other DNA
gtactaataaacaatattattgctcaattatattataatatactaagaaaaacttaagattcaaagagacacattaatct

SEQ ID NO: 46410 - DNA, 80 bp, synthetic construct
  source 1..80: mol_type = other DNA
acatgtccacaagagcctcaaaaatactctcttggacaagatacacctccatcacacaaagtgtgagtaggggtacatta

SEQ ID NO: 46411 - DNA, 80 bp, synthetic construct
  source 1..80: mol_type = other DNA
atatgatctttaaaacaacagagaaataagttatgctaagccctatcaataatttttcttttaacttgatcttcttcttt

SEQ ID NO: 46412 - DNA, 80 bp, synthetic construct
  source 1..80: mol_type = other DNA
ctcttaccttcactccctatccaaaaaaacatccctataccttgatcatcttttatcttaattctttaagatctgacatt

SEQ ID NO: 46413 - DNA, 80 bp, synthetic construct
  source 1..80: mol_type = other DNA
cttgacttgtgatatggtgaagcaagtaagaattatggactagtagaaaacatggcaggtaggaatcattaaatagagac

SEQ ID NO: 46414 - DNA, 80 bp, synthetic construct
  source 1..80: mol_type = other DNA
aatttactatttatattataatacatgtgagatagattactaattattcaaaatggatttcactgatacttcgttatcgg

SEQ ID NO: 46415 - DNA, 80 bp, synthetic construct
  source 1..80: mol_type = other DNA
atgtgttgtatccagaatgtcacttagacagtcctattgtagctggtaaacttgtacaatcaatcctatatgcagaaatt

SEQ ID NO: 46416 - DNA, 80 bp, synthetic construct
  source 1..80: mol_type = other DNA
ccatgcaatcaattgttaatagatgagacacttaaaaacactatcgattggagaatccagaatggtaagctaggctatat

SEQ ID NO: 46417 - DNA, 80 bp, synthetic construct
  source 1..80: mol_type = other DNA
aggtcggactcagaagttatatggggatacactgaaagatcatatcaacaatttgaataaatacaatcatgtaccttatc

SEQ ID NO: 46418 - DNA, 80 bp, synthetic construct
  source 1..80: mol_type = other DNA
tacaggctcggacaaatgatggcaaggagaaatgctggagcagtggacaagaaaatggcacaagagttggggcttgataa

SEQ ID NO: 46419 - DNA, 80 bp, synthetic construct
  source 1..80: mol_type = other DNA
ctgaatgcaataaatcattatttactatgtatgatagggatatctcaagatatcttgaaaatatattagacaaatccaat

SEQ ID NO: 46420 - DNA, 80 bp, synthetic construct
  source 1..80: mol_type = other DNA
aatttatataagaagatatcccataaaattacagagcttttagatactgtagaaaaagatataactggcttagattctag

SEQ ID NO: 46421 - DNA, 80 bp, synthetic construct
  source 1..80: mol_type = other DNA
gactgattcccaaacacgtcacatatataggtcattaaataacttatcaaacatcatggaaaatagtaagtggtacaaac

SEQ ID NO: 46422 - DNA, 80 bp, synthetic construct
  source 1..80: mol_type = other DNA
cattcctgttctggtttacaataaaaacagagatgaggaatattatcaaggagagtaagaagaaatcaaatgtgaactca

SEQ ID NO: 46423 - DNA, 80 bp, synthetic construct
  source 1..80: mol_type = other DNA
acaaatattgtgaaattagagagtaaaaagacatatgttcaaattaatcagaatttatgcacaattgttgacaggataca

SEQ ID NO: 46424 - DNA, 80 bp, synthetic construct
  source 1..80: mol_type = other DNA
gcgggaagtatatcatctaacgccagaaattgttctaatgtgttgtgatgtggtcgaaggtcgactaatgatacagacga

SEQ ID NO: 46425 - DNA, 80 bp, synthetic construct
  source 1..80: mol_type = other DNA
caatcagagcagatgcaaaatttttaccattactagatagatcagacaaactttgggaattaatagatagcttgtttgaa

SEQ ID NO: 46426 - DNA, 80 bp, synthetic construct
  source 1..80: mol_type = other DNA
gagttgggtaacagcacctataatatagtttctttattagaacccctcacacttggaatattacaactacaggataaatc

SEQ ID NO: 46427 - DNA, 80 bp, synthetic construct
  source 1..80: mol_type = other DNA
actcgttttggctggctcattcatgcattattgtaccacagaaattggaaatgaactcaagagtaatggatttactaact

SEQ ID NO: 46428 - DNA, 80 bp, synthetic construct
  source 1..80: mol_type = other DNA
ctgatgatataaataattttactagagcccttatcgatataatgtcattagatgatatacactgcgtgtctgaattcttt

SEQ ID NO: 46429 - DNA, 80 bp, synthetic construct
  source 1..80: mol_type = other DNA
gaaagagctggataatataaaggaattgatggctgacttgactacacagcgtcatgagactgcagtccaggcaagagaag

SEQ ID NO: 46430 - DNA, 80 bp, synthetic construct
  source 1..80: mol_type = other DNA
tcattttttagaacatttggccatcctatattagaggcaataacagctgccgagaaagttagatcacacatgcagaaacc

SEQ ID NO: 46431 - DNA, 80 bp, synthetic construct
  source 1..80: mol_type = other DNA
taaaatgttgacttatctaccaatgatgaaagcacatgcaatattctgtgggattatcatcaatggttacagagatagac

SEQ ID NO: 46432 - DNA, 80 bp, synthetic construct
  source 1..80: mol_type = other DNA
ccaccgttggaactacctgttcatgcaacatcaactatcagaagggctcattctaatggcgaagctttgactcatgagat

SEQ ID NO: 46433 - DNA, 80 bp, synthetic construct
  source 1..80: mol_type = other DNA
gtgtgctaccaactggaagtcattctgtggattaaggtttaaatgcttcatgcctttggaattagactcagatttgagta

SEQ ID NO: 46434 - DNA, 80 bp, synthetic construct
  source 1..80: mol_type = other DNA
tgtatatgaaagataaagctctgtcacctatatgttctgagtgggatactgtgtaccctagagagaatttaaaatactca

SEQ ID NO: 46435 - DNA, 80 bp, synthetic construct
  source 1..80: mol_type = other DNA
ccacctaggttgactacatctagaagattggtagatgtcttcattgacgatgataaatttgatccttacacacttataca

SEQ ID NO: 46436 - DNA, 80 bp, synthetic construct
  source 1..80: mol_type = other DNA
atatgtcctatctggtgaatataagacagaccctgacttcaatatctcgtatagtcttaaagagaaagagacaaaacaag

SEQ ID NO: 46437 - DNA, 80 bp, synthetic construct
  source 1..80: mol_type = other DNA
atggaatggtaaaggatgagcatgagctcattaaaaatctattacaactatcaatatcctctgtaccaaaggcagaagta

SEQ ID NO: 46438 - DNA, 80 bp, synthetic construct
  source 1..80: mol_type = other DNA
tataatgatgatcattgggaattaagaaagaagacactgaagactatacgtactaaaacagcaaggaacaaaaataagag

SEQ ID NO: 46439 - DNA, 80 bp, synthetic construct
  source 1..80: mol_type = other DNA
ggaagtttaacgtagcagaaggtgttgttcagggtttagagcaggatgatgatgatgaggatgattatcaggatatgtct

SEQ ID NO: 46440 - DNA, 80 bp, synthetic construct
  source 1..80: mol_type = other DNA
agaaattgacatatttaaattaaaacaaagtccatcctttaaaatgcaacactatggattttcatttgttaagaataaat

SEQ ID NO: 46441 - DNA, 80 bp, synthetic construct
  source 1..80: mol_type = other DNA
cagttaaacaacaagttttaatgaactattttaaaaatagtgatgacacagatatatactctgaggatactgattctacg

SEQ ID NO: 46442 - DNA, 80 bp, synthetic construct
  source 1..80: mol_type = other DNA
attaatgatgtttataccaatcctacgataaaaaatgaggacaagtatgatactataagttctttcctaactactgatct

SEQ ID NO: 46443 - DNA, 80 bp, synthetic construct
  source 1..80: mol_type = other DNA
ttcataagcctatgggaggtattgaaggttacagccaaaaattatggaccataataactatcccttttttgtttttaagt

SEQ ID NO: 46444 - DNA, 80 bp, synthetic construct
  source 1..80: mol_type = other DNA
ggtcttgaaactaacacaaggattgcagctgtagttcaaggggataatcaatcaatagctatcacatataaggttcatcc

SEQ ID NO: 46445 - DNA, 80 bp, synthetic construct
  source 1..80: mol_type = other DNA
gaacctaagttatttagaaaagaaaagaatcagtgctgaacgggcacaagcctactttatcaaacttagagaaaatctag

SEQ ID NO: 46446 - DNA, 80 bp, synthetic construct
  source 1..80: mol_type = other DNA
ctgctctaggccacaatttgaaagctaccgagactataataagtacacatttctttgtttactccaaacgtatatattat

SEQ ID NO: 46447 - DNA, 80 bp, synthetic construct
  source 1..80: mol_type = other DNA
caaaatcagagttaccagttcagcgattatcataaggatagcttcttgacagagagatttggttctaatccaagtacagc

SEQ ID NO: 46448 - DNA, 80 bp, synthetic construct
  source 1..80: mol_type = other DNA
gatggcatggtattgtcacaatcacttaaaacaatatcaagatgtgttttctggtcggaaacattagttgacgaaacacg

SEQ ID NO: 46449 - DNA, 80 bp, synthetic construct
  source 1..80: mol_type = other DNA
ttctgcctgtagtaatataagtacagcagtggccaaatcaattgagacaggattatccaaagacattggttatggattga

SEQ ID NO: 46450 - DNA, 80 bp, synthetic construct
  source 1..80: mol_type = other DNA
acttacttaaaactattcaacaacttcatatctctcttcaattctcgattaatgaaactatgacaaaagacgttgtgact

SEQ ID NO: 46451 - DNA, 80 bp, synthetic construct
  source 1..80: mol_type = other DNA
cccttaattaataatcaatcatggtttctgtcagcatgtctaatgcctgcccccttaggaggatttaattacctaaattt

SEQ ID NO: 46452 - DNA, 80 bp, synthetic construct
  source 1..80: mol_type = other DNA
atcgagaatatatgttagaaacataggtgaccctgtgacagcgtcatttgctgatgttaaaagaatgattaaaattggat

SEQ ID NO: 46453 - DNA, 80 bp, synthetic construct
  source 1..80: mol_type = other DNA
tgttcaaacctgatatattgcaaaagatagtaaatcaagacagtggagatgcaacgtacttagactgggctagtgacccc

SEQ ID NO: 46454 - DNA, 80 bp, synthetic construct
  source 1..80: mol_type = other DNA
tattcagcaaacttaccatcatcccaaagtatcaccaaaacaatcaagaatgtgactgcaagagtaatattatctaattc

SEQ ID NO: 46455 - DNA, 80 bp, synthetic construct
  source 1..80: mol_type = other DNA
caagaatcctttgcttaaaggcttatttcatcatgactttcacaatgaggatatggaattggctgcatttctcatggaca

SEQ ID NO: 46456 - DNA, 80 bp, synthetic construct
  source 1..80: mol_type = other DNA
ggtcaataataattcctagagctgcacatgagataatagaaaattctatcacaggggcaagagaagaaatagcaggtatg

SEQ ID NO: 46457 - DNA, 80 bp, synthetic construct
  source 1..80: mol_type = other DNA
ttagacacaacaaaagggttaatcaggaccagcttgagaaaaggagggattcagccaagactgatttctcgattatctca

SEQ ID NO: 46458 - DNA, 80 bp, synthetic construct
  source 1..80: mol_type = other DNA
attgaagaataaaatactctttgagcttgggaaaacaggactctcaacccaatctcagacatcatcaaaatcatcatcga

SEQ ID NO: 46459 - DNA, 80 bp, synthetic construct
  source 1..80: mol_type = other DNA
ttatgattatgaacaattcaggttttttaacaaattaatgaatgtaaagaagacagatataaacataagaccagaaatct

SEQ ID NO: 46460 - DNA, 80 bp, synthetic construct
  source 1..80: mol_type = other DNA
gttcagttgaacttgctagacatctcaggtctaagatgtggtttaaactaacatatggtagattaatttatggactggaa

SEQ ID NO: 46461 - DNA, 80 bp, synthetic construct
  source 1..80: mol_type = other DNA
gtgcctgatcctctagagtcgatgagggggtttactatcttaggcagtgagctatgccatctatgcacaactatgcatac

SEQ ID NO: 46462 - DNA, 80 bp, synthetic construct
  source 1..80: mol_type = other DNA
aggttactgctggttttttatacctaagaatgtgaacttagacaaagtgtctaaacctacaggtagtattagagttcctt

SEQ ID NO: 46463 - DNA, 80 bp, synthetic construct
  source 1..80: mol_type = other DNA
atataggttcaactacagatgaaagatctgatatcaaattaggctctacaaaagtagcaagcaaagcactaaagtcagca

SEQ ID NO: 46464 - DNA, 80 bp, synthetic construct
  source 1..80: mol_type = other DNA
gaggtcgaaagggaagatatcaaactagatactaacataatctttcagcaagtaatgttattaggtttgtcaagtataga

SEQ ID NO: 46465 - DNA, 80 bp, synthetic construct
  source 1..80: mol_type = other DNA
acaaagatttcgttatcaaacttcaactcctaacgataatattattatgcatctccatgtagttcctaattgttgtgtta

SEQ ID NO: 46466 - DNA, 80 bp, synthetic construct
  source 1..80: mol_type = other DNA
atcagaatacttcaagtgacgtgagggccaaccctaatcaaccatctcagattctgaataaacaaacagataatgctcag

SEQ ID NO: 46467 - DNA, 80 bp, synthetic construct
  source 1..80: mol_type = other DNA
tagagatgtcaaatgtaccacatgtaccttcttatctcgacatccctgtatacaaagaattgattgagaatccaataata

SEQ ID NO: 46468 - DNA, 80 bp, synthetic construct
  source 1..80: mol_type = other DNA
tatgatagtaaccctttgatcgaaagtgatcagaataaattagaattgcagtactggaaaagaggggaagtcaactttcc

SEQ ID NO: 46469 - DNA, 80 bp, synthetic construct
  source 1..80: mol_type = other DNA
tgaatggactataactgatctacatcagtgtctttctcaaacattagcacttactatagtagacataataactaaaagtg

SEQ ID NO: 46470 - DNA, 80 bp, synthetic construct
  source 1..80: mol_type = other DNA
ataaagatgtccttaagcaattcatatcagttagcagtagtgatgatattaacagcttgataactgaatttcttttagtc

SEQ ID NO: 46471 - DNA, 80 bp, synthetic construct
  source 1..80: mol_type = other DNA
taggtagacaagggagaccgattgcagcgactgcaacattaactaccaaagttgtagtttttaaccctacatctaaaagg

SEQ ID NO: 46472 - DNA, 80 bp, synthetic construct
  source 1..80: mol_type = other DNA
gatatagaatcatttgtggtctacttaggacaagcttgtgcactaaaatggtcatttgatatccactacaaaagacctct

SEQ ID NO: 46473 - DNA, 80 bp, synthetic construct
  source 1..80: mol_type = other DNA
tggaaaatggcagatggtggaattattagaagatcaacttagtatgacatctaagcatagctttgcagtattaaataatg

SEQ ID NO: 46474 - DNA, 80 bp, synthetic construct
  source 1..80: mol_type = other DNA
cattatctcatcctaaagtttttaaacgtttttggaatgcaggtatactttcacctatctatggaccatatttatacaac

SEQ ID NO: 46475 - DNA, 80 bp, synthetic construct
  source 1..80: mol_type = other DNA
ttatatgtgacttatattgcaatgatatgaaacccccacatatccgtgatttaattccggcatataaaattgaactgtta

SEQ ID NO: 46476 - DNA, 80 bp, synthetic construct
  source 1..80: mol_type = other DNA
gcaggacctagcattgttcaagacgacatttcagtccttaattcacagatctaatgttgttgcattgaaacaggaaattg

SEQ ID NO: 46477 - DNA, 80 bp, synthetic construct
  source 1..80: mol_type = other DNA
caagatttcatagatacttgcagaaagaacaacaatggtgtggactcatggaatgttaaaaacctagatgttaatgttct

SEQ ID NO: 46478 - DNA, 80 bp, synthetic construct
  source 1..80: mol_type = other DNA
tgcagcctcaacaacttacttgagaagaggtgtcataaaacaaataagaattagacaagatatacatacagattttgata

SEQ ID NO: 46479 - DNA, 80 bp, synthetic construct
  source 1..80: mol_type = other DNA
aaatggaagtagatcttaaatatgcaaagtatacaattgaaacacaatttaattatcaacctcgaaatgcatgtgtttgt

SEQ ID NO: 46480 - DNA, 80 bp, synthetic construct
  source 1..80: mol_type = other DNA
ttaagattggaagagatagacagaccccataattctatcatgtctgtaaaacttgatgattcaaaaccagtaaatggatg

SEQ ID NO: 46481 - DNA, 80 bp, synthetic construct
  source 1..80: mol_type = other DNA
ggagagccacaaatataggcgggtaggaataaattccacatctgcatataaaacactggatctgttaccatatatcctga

SEQ ID NO: 46482 - DNA, 80 bp, synthetic construct
  source 1..80: mol_type = other DNA
gacattacaaatctggaactgatagactttacgtaggtgaaggttcaggctcaatacttgcgtttttagaccgggcatta

SEQ ID NO: 46483 - DNA, 80 bp, synthetic construct
  source 1..80: mol_type = other DNA
gggcctagcactaattactacaattctggtatcagtgaattggaagttattggacaaagggaactaaaattgtatccatc

SEQ ID NO: 46484 - DNA, 80 bp, synthetic construct
  source 1..80: mol_type = other DNA
agaatgctgtattgtggataagaatttgtatgataactcagatttactgcaacgtattgtaccgctatttaatgggagac

SEQ ID NO: 46485 - DNA, 80 bp, synthetic construct
  source 1..80: mol_type = other DNA
ctgaaacaacatggatagggaatttagattgttatgttcacataatgaagactataagatctcatagtctaggattaatg

SEQ ID NO: 46486 - DNA, 80 bp, synthetic construct
  source 1..80: mol_type = other DNA
cacaatgatatggaaagtggcatggggaaagagccaatggagatcttagttgaacatagtcatttgttgtcattatctat

SEQ ID NO: 46487 - DNA, 80 bp, synthetic construct
  source 1..80: mol_type = other DNA
aataataatcagatattaaacgtatcaatataacaataaggtatagatatcaaataactatatcctattgcaagatattt

SEQ ID NO: 46488 - DNA, 80 bp, synthetic construct
  source 1..80: mol_type = other DNA
aaaccttttagaaaaggatggtttattaatatccaaaattaatgtgagcaatgatttccctattacattattactaagta

SEQ ID NO: 46489 - DNA, 80 bp, synthetic construct
  source 1..80: mol_type = other DNA
tttacaagtattgttatagcaatattatggtggctttccctaaatatagtaacccttacagcactgaagtgtaccttatg

SEQ ID NO: 46490 - DNA, 80 bp, synthetic construct
  source 1..80: mol_type = other DNA
tgcactggggctaggatacagacactttgtactcctgaattactgttagataagagggacggtaagtcttgttggaatga

SEQ ID NO: 46491 - DNA, 80 bp, synthetic construct
  source 1..80: mol_type = other DNA
tcgtgctgtaattaattacatatacacaattaagaatcgtgtatatacagcatttgagaacaggctatggagaaaaagta

SEQ ID NO: 46492 - DNA, 80 bp, synthetic construct
  source 1..80: mol_type = other DNA
aaagttatcgtcctaaaaatgatttaaccaaaaaattgtttataaataaacatacctgtacagaggatagtcagatctct

SEQ ID NO: 46493 - DNA, 80 bp, synthetic construct
  source 1..80: mol_type = other DNA
gaatctgcagtgatcaatagtggcaaagaagaatcaaaagaatattatttaggggatgtccccattgaggataagaaaga

SEQ ID NO: 46494 - DNA, 80 bp, synthetic construct
  source 1..80: mol_type = other DNA
cataaacacacagttaaacattagagggatctcaaataagctaacatctgacgatcgtttactcttgaatagtggtctag

SEQ ID NO: 46495 - DNA, 80 bp, synthetic construct
  source 1..80: mol_type = other DNA
aactaaatggaccctacattgttaaaaagataacagggcatgatcctggtgatggctgtaaatcattactagactcatgt

SEQ ID NO: 46496 - DNA, 80 bp, synthetic construct
  source 1..80: mol_type = other DNA
atattgctcttcacagaagtgataaatatattagatcaaagtagactcccgtcaacattttttgaaccctatccgatatt

SEQ ID NO: 46497 - DNA, 80 bp, synthetic construct
  source 1..80: mol_type = other DNA
ggaggaaacaaggataaggaaatatatggagaaattttccagaaagattacatgctatattcttttagataaagacaatg

SEQ ID NO: 46498 - DNA, 80 bp, synthetic construct
  source 1..80: mol_type = other DNA
acctcaatattataccaataatttctttagatttagtgagtaattagtaataagttagttttcacggtgctactctatag

SEQ ID NO: 46499 - DNA, 80 bp, synthetic construct
  source 1..80: mol_type = other DNA
atagattagaatacaagaagaagatagtatcaaatctaagaagaggttatctcgtatgggatttacaggattacgtatgc

SEQ ID NO: 46500 - DNA, 80 bp, synthetic construct
  source 1..80: mol_type = other DNA
accaatctcataccaaaatatctgaggaagaaagccagagaggtaggggttaaatctgactgggtgataaaattagatac

SEQ ID NO: 46501 - DNA, 80 bp, synthetic construct
  source 1..80: mol_type = other DNA
aagggaaatcaaacaatggtggaaattaatcagttattctgtaattctataaattgttataaaaaacttgaatcctgtgc

SEQ ID NO: 46502 - DNA, 80 bp, synthetic construct
  source 1..80: mol_type = other DNA
cagatctattaatactcttaatagtttatataccagagttagtcagacaaatgtttaagtatccatctatcttccttgtc

SEQ ID NO: 46503 - DNA, 80 bp, synthetic construct
  source 1..80: mol_type = other DNA
cttccttgtctggctaactctggtatataaactattaagagtattaatagatctggcacaggattcaagttttttataac

SEQ ID NO: 46504 - DNA, 80 bp, synthetic construct
  source 1..80: mol_type = other DNA
ggatatttcgttgtggtgttgtgtctatcaagtctacttttaatttttgtagaataaaaagagagattattagttggtag

SEQ ID NO: 46505 - DNA, 80 bp, synthetic construct
  source 1..80: mol_type = other DNA
gtgagaaaatgtcaatgtatttatcatcaatttcaattttttatagacaattaagaaaaacttaggaatcaaagatctaa

SEQ ID NO: 46506 - DNA, 80 bp, synthetic construct
  source 1..80: mol_type = other DNA
actatcagtccaaaccattcccagactagccctccaaaccaacaacataaacaatcaggaactctgtaattcaaaagaac

SEQ ID NO: 46507 - DNA, 80 bp, synthetic construct
  source 1..80: mol_type = other DNA
cctgaccacaattttgaaaattacagattaacaaaatgagctatgatgataagctcaagcaaattgatcaagggcttgca

SEQ ID NO: 46508 - DNA, 80 bp, synthetic construct
  source 1..80: mol_type = other DNA
gcgattgactacatcaatcagcttcgaaagacagaagttgaaaaaaggacctacggaagaagtgccattgggcttcctaa

SEQ ID NO: 46509 - DNA, 80 bp, synthetic construct
  source 1..80: mol_type = other DNA
ggacctacggaagaagtgccattgggcttcctaaaattaaggacagagcccaagcttgggaattgttcatcaactctgta

SEQ ID NO: 46510 - DNA, 80 bp, synthetic construct
  source 1..80: mol_type = other DNA
aattaaggacagagcccaagcttgggaattgttcatcaactctgtacctgaagaaacaggacatgaagaggggggaatac

SEQ ID NO: 46511 - DNA, 80 bp, synthetic construct
  source 1..80: mol_type = other DNA
aaagcactgatgaaggaattggagagggagatagaccttgctctggacatgatgaaaatgatcctaatacagaagttgga

SEQ ID NO: 46512 - DNA, 80 bp, synthetic construct
  source 1..80: mol_type = other DNA
cgagagttcagagaatcaacttgggaagacagcgatgatattatactcgaggatgaactggttacatacattccaaaaca

SEQ ID NO: 46513 - DNA, 80 bp, synthetic construct
  source 1..80: mol_type = other DNA
tgataaaggaaggaaagcttccaacggccaatcaaatcacgaggctgcaaatgtcgaaagtgatatgccaggcggaaacc

SEQ ID NO: 46514 - DNA, 80 bp, synthetic construct
  source 1..80: mol_type = other DNA
gaaaaggcaatggaggtgctgtgtctcttacggaaagtatgcccatcatactcgaggattctgcagatcaagcaggattt

SEQ ID NO: 46515 - DNA, 80 bp, synthetic construct
  source 1..80: mol_type = other DNA
gttgatgatgaagatacggaggagcgactcaatgaactagcaaggtggctagaagagtcagatgtagattctagctacaa

SEQ ID NO: 46516 - DNA, 80 bp, synthetic construct
  source 1..80: mol_type = other DNA
tatccatgatcagaaagcaacagaacaacggcctccactgcaggatcaagatatctctactacagaggaagagatagagg

SEQ ID NO: 46517 - DNA, 80 bp, synthetic construct
  source 1..80: mol_type = other DNA
aagaaaacaagcatgatcacaactaccctaaaacaagaccaggtacacccataccaaaacacagaaatgttataaaacat

SEQ ID NO: 46518 - DNA, 80 bp, synthetic construct
  source 1..80: mol_type = other DNA
gatcaaggagcaagtgcatctgtacctgagcaggacatagctgatcataatgctcccaaacgtctaaaagcaatcactac

SEQ ID NO: 46519 - DNA, 80 bp, synthetic construct
  source 1..80: mol_type = other DNA
atttataaagaaaattgaggcagatgcagagcgtctaacatccgtgtctcctgcggtaaactcaaatgataaacaagaca

SEQ ID NO: 46520 - DNA, 80 bp, synthetic construct
  source 1..80: mol_type = other DNA
gtgtaattaaaaaaggcatcgaaaagaatatcagctctgttgggacggggaaagaattgaagtcaaagaatggtgcaacc

SEQ ID NO: 46521 - DNA, 80 bp, synthetic construct
  source 1..80: mol_type = other DNA
cctcatgcacaaaagtcagaccagatgaggggcagcaaggatgtacctgtgggtcatgtccaacctactgcgatgaccca

SEQ ID NO: 46522 - DNA, 80 bp, synthetic construct
  source 1..80: mol_type = other DNA
agctatgctctcgcttctctcattgtatgctgagaacccaggaaccatgattcggaatttggtcaatgaccctgatattg

SEQ ID NO: 46523 - DNA, 80 bp, synthetic construct
  source 1..80: mol_type = other DNA
gagtgtcatggaatcatgcgagactgagctgccagttgagcttaataacactgaaacctttgatacatacatagagcaag

SEQ ID NO: 46524 - DNA, 80 bp, synthetic construct
  source 1..80: mol_type = other DNA
tagtggctaacactagtgaagcagacagattcaaaatattgtataaatcacaacttgatatactagttaaattagaaaca

SEQ ID NO: 46525 - DNA, 80 bp, synthetic construct
  source 1..80: mol_type = other DNA
ctagaagtcttatttagcaaattatcagatatggatttgattcaacaggatatgaggaacagggtggattcattagatag

SEQ ID NO: 46526 - DNA, 80 bp, synthetic construct
  source 1..80: mol_type = other DNA
gagtattgggaaattaggactaagtatttctttgattgagcaaatgataagttcaatgagaattatgatacccggaacac

SEQ ID NO: 46527 - DNA, 80 bp, synthetic construct
  source 1..80: mol_type = other DNA
ctgtcgtagattctaaaatagatagaaatccaacattgcttccaattgttggaaggaaagggcaaaaagtaaatgatata

SEQ ID NO: 46528 - DNA, 80 bp, synthetic construct
  source 1..80: mol_type = other DNA
gttgatatcgacatgacccaaaacctgaactgtccatttaaagctaaaagcaatttaatacttgagcctttagatatggc

SEQ ID NO: 46529 - DNA, 80 bp, synthetic construct
  source 1..80: mol_type = other DNA
aaagactaatgcatcacaatttataactgtgtgtgataaatcaactaaaaatgccttatatggattaataattaacagag

SEQ ID NO: 46530 - DNA, 80 bp, synthetic construct
  source 1..80: mol_type = other DNA
tcaaagacattgatattagaggggcattattggaaaaattagaagaaagtgaaacggataatgatataagagaacttcat

SEQ ID NO: 46531 - DNA, 80 bp, synthetic construct
  source 1..80: mol_type = other DNA
aaaatcataaaagaagtaattgatggaaatctgtaagcgctagattagtaattgataacaatttaggaatagctacgaat

SEQ ID NO: 46532 - DNA, 80 bp, synthetic construct
  source 1..80: mol_type = other DNA
taatatactacagttttacaataggtagtactatttactaattgtactaatacaacaatatatttaaaatgtttataatt

SEQ ID NO: 46533 - DNA, 80 bp, synthetic construct
  source 1..80: mol_type = other DNA
agatagttgtcattgatgtaggggattttgaaaacggaattcccaaactcgaaagaagaggtgacaaagggacaaaccag

SEQ ID NO: 46534 - DNA, 80 bp, synthetic construct
  source 1..80: mol_type = other DNA
aatctatataagtagtttaagtaatataatagtactggttatacagggtatagattcatgtaaagtcaaagcagctatag

SEQ ID NO: 46535 - DNA, 80 bp, synthetic construct
  source 1..80: mol_type = other DNA
atgctggatttggtaaggttaaagacaggacacttatagttagtacaacaattgaaaggtttatatcctattcttgaata

SEQ ID NO: 46536 - DNA, 80 bp, synthetic construct
  source 1..80: mol_type = other DNA
aattactgtactgtgattgatcattaagaaaaacttaagaatcaaggatatattccagaatcagggccacagacctacga

SEQ ID NO: 46537 - DNA, 80 bp, synthetic construct
  source 1..80: mol_type = other DNA
cacaaaatggagagcacaattgacttcaataaagcaacgtgggaagaaggcaaatacctcaaatcgattgaggctgaagt

SEQ ID NO: 46538 - DNA, 80 bp, synthetic construct
  source 1..80: mol_type = other DNA
agacaaagatggcttcatgattccaaaatatagagtaatcaacccaggagggaatgataggaaaacaaatggctatatgt

SEQ ID NO: 46539 - DNA, 80 bp, synthetic construct
  source 1..80: mol_type = other DNA
atttgtggaggacgtgccagactacaattcagatggtaagaagcctataatcaggacgattgctgcatttccttttggag

SEQ ID NO: 46540 - DNA, 80 bp, synthetic construct
  source 1..80: mol_type = other DNA
ttggtgcttccacttcatcaccagaggaccttctcaaaagtgcatgctctctcgatatatcagtcagaagaacagctggt

SEQ ID NO: 46541 - DNA, 80 bp, synthetic construct
  source 1..80: mol_type = other DNA
tctactgagaaaattgtcctgggtgctcggggcacgctaggagaattagcaccttggagttcagtattgtcgaatggtgc

SEQ ID NO: 46542 - DNA, 80 bp, synthetic construct
  source 1..80: mol_type = other DNA
tatattcaatgcagtcaaaatatgcaacaatgtggaattgattcaactagaaaaaccacaaagactcagaatcttcttcc

SEQ ID NO: 46543 - DNA, 80 bp, synthetic construct
  source 1..80: mol_type = other DNA
tctcaattactctgcttacagataaaggtatttataaggttcctagaacaatcttggatttcagagaacataatgcagtt

SEQ ID NO: 46544 - DNA, 80 bp, synthetic construct
  source 1..80: mol_type = other DNA
atggctagcttcgaaaggatattgactagatcacccggggaaccgttgttcaatgacccacagaaagatgcgagtgagtt

SEQ ID NO: 46545 - DNA, 80 bp, synthetic construct
  source 1..80: mol_type = other DNA
tctttcaacctccttgtgtctttactcttgaatgcagatttgacaagagcaggaatgaaaggtatagttgataaagacgg

SEQ ID NO: 46546 - DNA, 80 bp, synthetic construct
  source 1..80: mol_type = other DNA
gaaacggcatgctacattcatgctacatataggaaactttgtcagaaaaggaaagaaaccatactcagtggagtactgta

SEQ ID NO: 46547 - DNA, 80 bp, synthetic construct
  source 1..80: mol_type = other DNA
aaaagaaggttgacttaatgaacatggtgttttctcttggagcagttggtggattgagtttccatgttaagtttaaaggg

SEQ ID NO: 46548 - DNA, 80 bp, synthetic construct
  source 1..80: mol_type = other DNA
aagttaagtaaaagattaatagcatcgatggggtttcatcgaaatctatgttactcactcatggatattaatcctggatt

SEQ ID NO: 46549 - DNA, 80 bp, synthetic construct
  source 1..80: mol_type = other DNA
gaacaagctgacatggaaccatgaatgtgaaataagtaaagtgacagcagtgtttcagccttctataccaaaagatttta

SEQ ID NO: 46550 - DNA, 80 bp, synthetic construct
  source 1..80: mol_type = other DNA
aaatatatgaagatgtcttgattgatgccacaggtaaagttcttaagaactgagatcctgaaagctcttgtatcctgtat

SEQ ID NO: 46551 - DNA, 80 bp, synthetic construct
  source 1..80: mol_type = other DNA
tactgtttacatgttactcggttaagtacctcaattttgattgttaacctgcaaattctgagcccacaggccaagagcac

SEQ ID NO: 46552 - DNA, 80 bp, synthetic construct
  source 1..80: mol_type = other DNA
tagatacctcatttattaataactggaataatagttgattataataatgttgtagtctaacttataatcaatattgctat

SEQ ID NO: 46553 - DNA, 80 bp, synthetic construct
  source 1..80: mol_type = other DNA
gttacaaattcattcttatctgatacaataatctactagatttatttcctttcctaataattgggtaaatctttaggtag

SEQ ID NO: 46554 - DNA, 80 bp, synthetic construct
  source 1..80: mol_type = other DNA
aaataaaactaaatatataaaattaaaattattaatgttgattaagttaacctagataatgagtatattactttattaat

SEQ ID NO: 46555 - DNA, 80 bp, synthetic construct
  source 1..80: mol_type = other DNA
gaatgatcctggcaggtttatgattgctatctcttcagtgcttgcccaagtatggatcctggttgctaaagcagttacgg

SEQ ID NO: 46556 - DNA, 80 bp, synthetic construct
  source 1..80: mol_type = other DNA
gaccacttgacttaaaactaataagaaaaacttaagattcaaagacatgaatccacctatctatgaggtgccttatgagt

SEQ ID NO: 46557 - DNA, 80 bp, synthetic construct
  source 1..80: mol_type = other DNA
ggagatatatgagacaacccgaaaatccgagcagagacagaactctcacccagaccccaaataagagattccccacttac

SEQ ID NO: 46558 - DNA, 80 bp, synthetic construct
  source 1..80: mol_type = other DNA
tacttcttactgttcataatctcttgctttcttatctttatactagggtatactgttatttatctcttatattgtacagg

SEQ ID NO: 46559 - DNA, 80 bp, synthetic construct
  source 1..80: mol_type = other DNA
caaagacaaccctggatatactcttgaagatagaggaacatttaaggcggttggtggaagagaggaacagattgttgatc

SEQ ID NO: 46560 - DNA, 80 bp, synthetic construct
  source 1..80: mol_type = other DNA
tgatttgaggaaaatccactacaatactgcaaatcctgatagacagcttgctttcagtctactagatattattcttgcat

SEQ ID NO: 46561 - DNA, 80 bp, synthetic construct
  source 1..80: mol_type = other DNA
cattacttgattatttctgggtcaaatatagagaaatcaggcctggagataattaacaattcttaacatctacaaaagtg

SEQ ID NO: 46562 - DNA, 80 bp, synthetic construct
  source 1..80: mol_type = other DNA
ataaattctatgatcattaataaataaattaaaaatagtgatttcctaaaggtgtaatagtagtagtatactttctggat

SEQ ID NO: 46563 - DNA, 80 bp, synthetic construct
  source 1..80: mol_type = other DNA
gcataataattgtattgcatttgtagcactcatattatttggtctatgcctttatctattgtatctttatttcaagctga

SEQ ID NO: 46564 - DNA, 80 bp, synthetic construct
  source 1..80: mol_type = other DNA
taaggggactggtattatattttgatttattgtaacaaatggttatattaaactatccaaggtcgattatctgtactcca

SEQ ID NO: 46565 - DNA, 80 bp, synthetic construct
  source 1..80: mol_type = other DNA
cacctgacacagctgaggaaagtgaagggaaaaggtgggcaaaatatgtgcaacagaagagagttgatccagaatattca

SEQ ID NO: 46566 - DNA, 80 bp, synthetic construct
  source 1..80: mol_type = other DNA
ttttgatcactttagtaatcacaattcaattgattgacctaagataagatcttagattgtggatagtaattaaacaccac

SEQ ID NO: 46567 - DNA, 80 bp, synthetic construct
  source 1..80: mol_type = other DNA
ataatgggtttgaccaaatcaaccatcctggtgtacctattagtttattaccatgcccacattattgcaataaatgctgg

SEQ ID NO: 46568 - DNA, 80 bp, synthetic construct
  source 1..80: mol_type = other DNA
tttggattatgagggcctggctagtattggtgttgtcaaagggccatcatacaactataagattagaggtacaccaacta

SEQ ID NO: 46569 - DNA, 80 bp, synthetic construct
  source 1..80: mol_type = other DNA
ctaaactattagtgataaagctaataccgaatgtagggtctctggacaattgtactcaaaaacaaatggcagattataag

SEQ ID NO: 46570 - DNA, 80 bp, synthetic construct
  source 1..80: mol_type = other DNA
tctttagttaagaatgtgttgactcctgtatcagatgcattaagcacaatgttgaactatatagaacagcaaagtaatgg

SEQ ID NO: 46571 - DNA, 80 bp, synthetic construct
  source 1..80: mol_type = other DNA
tgtgagactcattggtgcagtcctagcaggcgctgcactgggtgtggccacaggtgctgccatcacagcagggatagcac

SEQ ID NO: 46572 - DNA, 80 bp, synthetic construct
  source 1..80: mol_type = other DNA
tccacaagtctaatcaaaatgcacaggcaatagctcaacttaaggatgccattaaaaatactaatcaagcagtccaaact

SEQ ID NO: 46573 - DNA, 80 bp, synthetic construct
  source 1..80: mol_type = other DNA
ctcaaattagcaaatcaagagatattgggagtggttgactcattaagaggtcagatcaatacacaaatcatacctgttat

SEQ ID NO: 46574 - DNA, 80 bp, synthetic construct
  source 1..80: mol_type = other DNA
taatcaattgagttgtgatactataggcctcactttgggtataaagttaacacagtattactcagagatccttacggcat

SEQ ID NO: 46575 - DNA, 80 bp, synthetic construct
  source 1..80: mol_type = other DNA
ttggtcctgctatacaagatcctgtcaattctaagctgacaatacaggctatttcaggcgcatttagtggtaatttcgat

SEQ ID NO: 46576 - DNA, 80 bp, synthetic construct
  source 1..80: mol_type = other DNA
acaaatcctcgatggattgcgaagatcagagagttgatatcatctgacttgtcagtaaggaagttcatggtggaaatcct

SEQ ID NO: 46577 - DNA, 80 bp, synthetic construct
  source 1..80: mol_type = other DNA
gaaatgatgaaagtcatggggtacaccggatcagatctacacgatatacttcaaggtgacctgataacagggaacattat

SEQ ID NO: 46578 - DNA, 80 bp, synthetic construct
  source 1..80: mol_type = other DNA
aggtgtagacccagatatcggatatatcgcacttgagatacactttccaacattgactgagattccaaatgctgtgatac

SEQ ID NO: 46579 - DNA, 80 bp, synthetic construct
  source 1..80: mol_type = other DNA
aggaattgatgcctattagtttcaacgataaaggtgatgagtggatgactctggttccccgatatgtattattgaggacg

SEQ ID NO: 46580 - DNA, 80 bp, synthetic construct
  source 1..80: mol_type = other DNA
acttatgtctcaaacattgatatatcaaaatgtttaataactgaaaggagtgttatatgttataatgactatgcaacacc

SEQ ID NO: 46581 - DNA, 80 bp, synthetic construct
  source 1..80: mol_type = other DNA
tatgtcatttgatgttatcagatgtctaacagggaatttaacctattgtcctagagaacaaatcattgctagttatgtac

SEQ ID NO: 46582 - DNA, 80 bp, synthetic construct
  source 1..80: mol_type = other DNA
ctagatttgctttgtcaggtggtgttatctatgctaactgtctgagtacagtatgtcgttgcgcagtggatggtgtacct

SEQ ID NO: 46583 - DNA, 80 bp, synthetic construct
  source 1..80: mol_type = other DNA
tcgatttgggcggtcaaatagcaggcataaatcagacccttcaaggtgttgaagattatatagataaatcaaatgagata

SEQ ID NO: 46584 - DNA, 80 bp, synthetic construct
  source 1..80: mol_type = other DNA
gattggagacagatcaaacaacaacatggagagttctctcaaaaaggagactgaactatttagagagtatcaagctaact

SEQ ID NO: 46585 - DNA, 80 bp, synthetic construct
  source 1..80: mol_type = other DNA
agggctaatagccctaatgattgatgtcaagctcaattctcagattaagatattgatcaatcaatctatagttaatcaaa

SEQ ID NO: 46586 - DNA, 80 bp, synthetic construct
  source 1..80: mol_type = other DNA
tgagggctggcttagaaaacccaggttatagtagaagtcttccatcttttagctctatcgcatcaaaaggcagctcccaa

SEQ ID NO: 46587 - DNA, 80 bp, synthetic construct
  source 1..80: mol_type = other DNA
gaattagtcaatacaaattgatctcttatagtcactagctcgataattgataaattctgaattacaggatgagcaatttt

SEQ ID NO: 46588 - DNA, 80 bp, synthetic construct
  source 1..80: mol_type = other DNA
gatatctattagcaataatcatagttacagacatgaaggcttcagatagacaagtcatgaaacaacatatctgtaagata

SEQ ID NO: 46589 - DNA, 80 bp, synthetic construct
  source 1..80: mol_type = other DNA
caggtttagagatatagtccgattatactatgatcttgatatatttttaatctcattgaatctgtgttgaaaaattgcac

SEQ ID NO: 46590 - DNA, 80 bp, synthetic construct
  source 1..80: mol_type = other DNA
tacctcatcttaactaatgcattaattgaattaaatagttaataatatatcgtatgccttaaatgtatattaaaatccca

SEQ ID NO: 46591 - DNA, 80 bp, synthetic construct
  source 1..80: mol_type = other DNA
cagacattggcaattatatcgaagaaactggaatggcaggatttttcctcacaatcaaatatggccttgagacaagatac

SEQ ID NO: 46592 - DNA, 80 bp, synthetic construct
  source 1..80: mol_type = other DNA
ttaagttttgagatacctaatcaattattaattaagaaaaacttaagaatcaaagattatctctttgatccataggagac

SEQ ID NO: 46593 - DNA, 80 bp, synthetic construct
  source 1..80: mol_type = other DNA
ttgagagatcaacagtcaacccaacaatcaagactgttccagcaagactccgaatcgtcaaatcctgtaaatacataatt

SEQ ID NO: 46594 - DNA, 80 bp, synthetic construct
  source 1..80: mol_type = other DNA
tatcaaatccgacacaaacaaaacatggcacctaagattgatacaacaaagacaacagcgacatctgattcaagaaggta

SEQ ID NO: 46595 - DNA, 80 bp, synthetic construct
  source 1..80: mol_type = other DNA
ttatggtgttgagagtgttgagaagtttgctgatggggtaacaaataacaagatatttattcttgcaaatatgttgctaa

SEQ ID NO: 46596 - DNA, 80 bp, synthetic construct
  source 1..80: mol_type = other DNA
tcattatgagttccattgtaatgattagcttgaatattacaaatttagaaaacctgaataatcagaagacatcccttaag

SEQ ID NO: 46597 - DNA, 80 bp, synthetic construct
  source 1..80: mol_type = other DNA
atactcaatgaggatgtaacaaacaaactagagcaaattgatacattggatcagattgtaaaaggtgaaatcaaaccaaa

SEQ ID NO: 46598 - DNA, 80 bp, synthetic construct
  source 1..80: mol_type = other DNA
actgacacttgtaaattctgctgtcagtgtgaccatacctagtcaaatatcaaaccttgcaacaaaactgaacaaccaaa

SEQ ID NO: 46599 - DNA, 80 bp, synthetic construct
  source 1..80: mol_type = other DNA
acgggcgatagtaccaacccagatgatagtaataatgatgacagtgttgatgatttagaaggagatatgagacctctgaa

SEQ ID NO: 46600 - DNA, 80 bp, synthetic construct
  source 1..80: mol_type = other DNA
gacgtactggctatcaatgaatttcaagctgacataaacacactccagactctaatgaggacctatagagggcttggcat

SEQ ID NO: 46601 - DNA, 80 bp, synthetic construct
  source 1..80: mol_type = other DNA
gtttattcacatcagattagaaaaaccccatgcagatcagaggacgcaactcatcaaagagtgagtctcggaagaatagc

SEQ ID NO: 46602 - DNA, 80 bp, synthetic construct
  source 1..80: mol_type = other DNA
cgacagagggttctcagggcctcgagcttcaccattatcaacctgggatctccaagaaacaaattatttaagttcatgtt

SEQ ID NO: 46603 - DNA, 80 bp, synthetic construct
  source 1..80: mol_type = other DNA
ctgtcgccgcgtccggagaaacaggatgggtgttgtgtgtgaccacggataagtttacaaggtatactgtttactcagga

SEQ ID NO: 46604 - DNA, 80 bp, synthetic construct
  source 1..80: mol_type = other DNA
ccttatactgggctcaagttatataaacttaatgttagaggccagaaagaggagtattcaattgctgttagcgatattaa

SEQ ID NO: 46605 - DNA, 80 bp, synthetic construct
  source 1..80: mol_type = other DNA
agcagatgctaatattattgcattgtccttaacaagaggttcaggagtccctaaaaacaataaattaatattcttgggga

SEQ ID NO: 46606 - DNA, 80 bp, synthetic construct
  source 1..80: mol_type = other DNA
ttgcagcagtaagagatgtggatactacaggagtgttgtgccctgagtggaaatgtgacaatattgacaataatgtaata

SEQ ID NO: 46607 - DNA, 80 bp, synthetic construct
  source 1..80: mol_type = other DNA
tcctgtatacattcatatagagtaacatcagatgataacaattaccttatgaatgttgtagtaacagttgatgttgcacc

SEQ ID NO: 46608 - DNA, 80 bp, synthetic construct
  source 1..80: mol_type = other DNA
aacaggcaaaatgactgctaccataagtctaataccgatgagtgagtcttacataggttcagaaggaggagtcattgata

SEQ ID NO: 46609 - DNA, 80 bp, synthetic construct
  source 1..80: mol_type = other DNA
atgtcaccacaacgagaccggataaatgccttctacaaagataacccccatcccaagggaagtaggatagttattaacag

SEQ ID NO: 46610 - DNA, 80 bp, synthetic construct
  source 1..80: mol_type = other DNA
caggctttacctctcatctcacagaggtgttatcgctgacaatcaagcaaaatgggctgtcccgacaacaagaacagatg

SEQ ID NO: 46611 - DNA, 80 bp, synthetic construct
  source 1..80: mol_type = other DNA
acaagttgcgaatggagacatgcttccagcaggcgtgtaagggtaaaatccaagcactctgcgagaatcccgagtgggca

SEQ ID NO: 46612 - DNA, 80 bp, synthetic construct
  source 1..80: mol_type = other DNA
ccattgaaggacaacaggattccttcatacggggtcatgtctgttgatctgagtctgacagttgatcttaaaatcaaaat

SEQ ID NO: 46613 - DNA, 80 bp, synthetic construct
  source 1..80: mol_type = other DNA
tgcttcgggattcgggccattgatcacacacggtttagggatggacctatacaaatccaaccacaacaatgtgtattggc

SEQ ID NO: 46614 - DNA, 80 bp, synthetic construct
  source 1..80: mol_type = other DNA
tgactatcccgccaatgaagaacctagctttaggtgtaatcaacacattggagtggataccgagactcaaggttagtcct

SEQ ID NO: 46615 - DNA, 80 bp, synthetic construct
  source 1..80: mol_type = other DNA
aacctcttcactgtcccaattaaggaagcaggcgaggactgccatgccccaacatatctacctgcggaggtggatggtga

SEQ ID NO: 46616 - DNA, 80 bp, synthetic construct
  source 1..80: mol_type = other DNA
tgtcaaactcagttccaatctggtgattctacctggtcaagatctccaatatgttttggcaacctacgatacttccaggg

SEQ ID NO: 46617 - DNA, 80 bp, synthetic construct
  source 1..80: mol_type = other DNA
ccattgcaggcattagacttcatcgggcagccatctacaccgcagagatccataaaagcctcagcactaatctagatgta

SEQ ID NO: 46618 - DNA, 80 bp, synthetic construct
  source 1..80: mol_type = other DNA
ttgaacatgctgtggtttattatgtttacagcccaagccgctcattttcttacttttatccttttaggttgcctataaag

SEQ ID NO: 46619 - DNA, 80 bp, synthetic construct
  source 1..80: mol_type = other DNA
ggggcccccatcgaattacaagtggaatgcttcacatgggacaaaaaactctggtgccgtcacttctgtgtgcttgtgga

SEQ ID NO: 46620 - DNA, 80 bp, synthetic construct
  source 1..80: mol_type = other DNA
ctcagaatctggtggacatatcactcactctgggatggtgggcatgggagtcagctgcacagccacccgggaagatggaa

SEQ ID NO: 46621 - DNA, 80 bp, synthetic construct
  source 1..80: mol_type = other DNA
gacatatcactcactctgggatggtgggcatgggagtcagctgcacagccacccgggaagatggaaccaacctcagatag

SEQ ID NO: 46622 - DNA, 80 bp, synthetic construct
  source 1..80: mol_type = other DNA
actaactcaatcgagcatcaggtcaaggacgtgctgacaccactcttcaaaatcatcggtgatgaagtgggcctgaggac

SEQ ID NO: 46623 - DNA, 80 bp, synthetic construct
  source 1..80: mol_type = other DNA
acctcagagattcactgacctagcgaaattcatctctgacaagattaaattccttaatccggatagggagtacgacttca

SEQ ID NO: 46624 - DNA, 80 bp, synthetic construct
  source 1..80: mol_type = other DNA
gggatctcacttggtgtatcaacccgccagagagaatcaaattggattatgatcaatactgtgcagatgtggctgctgaa

SEQ ID NO: 46625 - DNA, 80 bp, synthetic construct
  source 1..80: mol_type = other DNA
gagctcatgaatgcattggtgaactcaactctcctggagaccagaacaactaatcagttcctagctgtctcaaagggaaa

SEQ ID NO: 46626 - DNA, 80 bp, synthetic construct
  source 1..80: mol_type = other DNA
ctgctcagggcccactacaatcagaggtcaattttcaaacatgtcgctgtctctgttggacttgtatttaagtcgaggtt

SEQ ID NO: 46627 - DNA, 80 bp, synthetic construct
  source 1..80: mol_type = other DNA
acaatgtgtcatctatagtcactatgacatcccagggaatgtacgggggaacttacctagtggaaaagcctaatctgagc

SEQ ID NO: 46628 - DNA, 80 bp, synthetic construct
  source 1..80: mol_type = other DNA
agcaaagggtcagagttgtcacaactgagcatgtatcgagtgtttgaaataggtgtcatcagaaatccgggtttgggggc

SEQ ID NO: 46629 - DNA, 80 bp, synthetic construct
  source 1..80: mol_type = other DNA
agaacatcttatgattgatagaccctatgttttgctggctgttctgttcgtcatgtttctgagcttgatcggattgctag

SEQ ID NO: 46630 - DNA, 80 bp, synthetic construct
  source 1..80: mol_type = other DNA
tccggtgttccatatgacaaactattttgagcagccagtcggtaatgatctcagcaactgtatggtggctttgggggagc

SEQ ID NO: 46631 - DNA, 80 bp, synthetic construct
  source 1..80: mol_type = other DNA
tcaaacttgcagccctttgtcacggggaagattccgtcacaattccctatcagggatcagggaaaggtgtcagcttccaa

SEQ ID NO: 46632 - DNA, 80 bp, synthetic construct
  source 1..80: mol_type = other DNA
ctcgtcaagctaggtgtctggaaatccccaaccgacatgcaatcctgggtccccttatcaacggatgatccagtgataga

SEQ ID NO: 46633 - DNA, 80 bp, synthetic construct
  source 1..80: mol_type = other DNA
ccgttgaaggacagcaggattccttcatacggggtcttgtctgtcgacctgagtctggcagctgagcccaaaatcaaaat

SEQ ID NO: 46634 - DNA, 80 bp, synthetic construct
  source 1..80: mol_type = other DNA
ctcggaatctggtggacatatcacccactctgggatggtgggcatgagagtcagctgcacagtcaaccgggaagacgaag

SEQ ID NO: 46635 - DNA, 80 bp, synthetic construct
  source 1..80: mol_type = other DNA
gacatatcacccactctgggatggtgggcatgagagtcagctgcacagtcaaccgggaagacgaagccaatcgcagatag

SEQ ID NO: 46636 - DNA, 80 bp, synthetic construct
  source 1..80: mol_type = other DNA
agcaaaggatcagaattatcacaactgagcatgtaccgagtgtttgaagtaggtgttataagaaatccaggcttgggggc

SEQ ID NO: 46637 - DNA, 80 bp, synthetic construct
  source 1..80: mol_type = other DNA
gaactcatgaatgcattggtgaacgcaactctgctggaggccagggcaaccaatcagttcctagctgtttcaaagggaaa

SEQ ID NO: 46638 - DNA, 80 bp, synthetic construct
  source 1..80: mol_type = other DNA
tcaaactcgcagccctctgtcacagggaagactctatcacaattccctatcaggggtcagggaaaggtgtcatcttccag

SEQ ID NO: 46639 - DNA, 80 bp, synthetic construct
  source 1..80: mol_type = other DNA
atgtgaaactgagcagcaacctggtgattctgccgggccaggatctgcagtatgtgctggcgacctatgataccagccgt

SEQ ID NO: 46640 - DNA, 80 bp, synthetic construct
  source 1..80: mol_type = other DNA
gtggaacatgcggtggtgtattatgtgtatagcccgagccgtagctttagctatttttatccgtttcgtctgccgattaa

SEQ ID NO: 46641 - DNA, 80 bp, synthetic construct
  source 1..80: mol_type = other DNA
aggcaccccgattgaactgcaggtggaatgctttacctgggatcagcgtctgtggtgccgtcatttttgcgtgctggcgg

SEQ ID NO: 46642 - DNA, 80 bp, synthetic construct
  source 1..80: mol_type = other DNA
atagcgaaagcggcggccatattacccatagcggcatggtgggcatgggcgtgagctgcaccgtgaaccgtgaagatgaa

SEQ ID NO: 46643 - DNA, 80 bp, synthetic construct
  source 1..80: mol_type = other DNA
atgagcccgcagcgtgatcgtattaacgcgttttataaagataacccgcatagcaaaggcagccgtattgtgattaaccg

SEQ ID NO: 46644 - DNA, 80 bp, synthetic construct
  source 1..80: mol_type = other DNA
ccgataaccaggcgaactgggcggtgccgaccacccgtaccgatgataaactgcgtatggaaacctgctttcagcaggcg

SEQ ID NO: 46645 - DNA, 80 bp, synthetic construct
  source 1..80: mol_type = other DNA
tgcaaaggcaaaattcaggcgctgtgcgaaaacccggaatgggcgccgctgaaagatagccgtattccgagctatggcgt

SEQ ID NO: 46646 - DNA, 80 bp, synthetic construct
  source 1..80: mol_type = other DNA
gctgagcgtggatctgagcctggcggcggaaccgaaaattaaaattgcgagcggctttggcccgctgattacccatggca

SEQ ID NO: 46647 - DNA, 80 bp, synthetic construct
  source 1..80: mol_type = other DNA
gcggcatggatctgtataaaagcaaccataacaacgtgtattggctgaccattccgccgatgaaaaacctggcgctgggc

SEQ ID NO: 46648 - DNA, 80 bp, synthetic construct
  source 1..80: mol_type = other DNA
gtgattaacaccctggaatggattccgcgtctgaaagtgagcccgaacctgtttaccgtgccgattaaagaagcgggcga

SEQ ID NO: 46649 - DNA, 80 bp, synthetic construct
  source 1..80: mol_type = other DNA
acattgccatgcgccgaccgatctgccggcggaagtggatggcgatgtgaaactgagcagcaacctggtgattctgccgg

SEQ ID NO: 46650 - DNA, 80 bp, synthetic construct
  source 1..80: mol_type = other DNA
gccaggatctgcagtatgtgctggcgacctatgataccagccgtgtggaacatgcggtggtgtattatgtgtatagcccg

SEQ ID NO: 46651 - DNA, 80 bp, synthetic construct
  source 1..80: mol_type = other DNA
cgattgcgggcattcgtctgcatcgtgcggcgatttataccgcggaaattcataaaagcctgagcaccaacctggatgtg

SEQ ID NO: 46652 - DNA, 80 bp, synthetic construct
  source 1..80: mol_type = other DNA
agccgtagctttagctatttttatccgtttcgtctgccgattaaaggcaccccgattgaactgcaggtggaatgctttac

SEQ ID NO: 46653 - DNA, 80 bp, synthetic construct
  source 1..80: mol_type = other DNA
ctgggatcagcgtctgtggtgccgtcatttttgcgtgctggcggatagcgaaagcggcggccatattacccatagcggca

SEQ ID NO: 46654 - DNA, 80 bp, synthetic construct
  source 1..80: mol_type = other DNA
gccatattacccatagcggcatggtgggcatgggcgtgagctgcaccgtgaaccgtgaagatgaagcgaaccgtcgttaa

SEQ ID NO: 46655 - DNA, 80 bp, synthetic construct
  source 1..80: mol_type = other DNA
accccgctgtttaaaattattggcgatgaagtgggcctgcgtaccccgcagcgttttaccgatctggtgaaatttattag

SEQ ID NO: 46656 - DNA, 80 bp, synthetic construct
  source 1..80: mol_type = other DNA
cgataaaattaaatttctgaacccggatcgtgaatatgattttcgtgatctgacctggtgcattaacccgccggaacgta

SEQ ID NO: 46657 - DNA, 80 bp, synthetic construct
  source 1..80: mol_type = other DNA
ttaaactgaactatgatcagtattgcgcggatgtggcggcggaagaactgatgaacgcgctggtgaacagcaccctgctg

SEQ ID NO: 46658 - DNA, 80 bp, synthetic construct
  source 1..80: mol_type = other DNA
gaaacccgtaccaccaaccagtttctggcggtgagcaaaggcaactgcagcggcccgaccaccattcgtggccagtttag

SEQ ID NO: 46659 - DNA, 80 bp, synthetic construct
  source 1..80: mol_type = other DNA
caacatgagcctgagcctgctggatctgtatctgagccgtggctataacgtgagcagcattgtgaccatgaccagccagg

SEQ ID NO: 46660 - DNA, 80 bp, synthetic construct
  source 1..80: mol_type = other DNA
gcatgtatggcggcacctatctggtggaaaaaccgaacctgaacagcaaaggcagcgaactgagccagctgagcatgtat

SEQ ID NO: 46661 - DNA, 80 bp, synthetic construct
  source 1..80: mol_type = other DNA
cgtgtgtttgaagtgggcgtgattcgtaacccgggcctgggcgcgccggtgtttcatatgaccaactattttgaacagcc

SEQ ID NO: 46662 - DNA, 80 bp, synthetic construct
  source 1..80: mol_type = other DNA
tgaacatctgatgattgatcgtccgtatgtgctgctggcggtgctgtttgtgatgtttctgagcctgattggcctgctgg

SEQ ID NO: 46663 - DNA, 80 bp, synthetic construct
  source 1..80: mol_type = other DNA
cgattagcaaagatctgagcaactgcatggtggcgctgggcgaactgaaactggcggcgctgtgccatggcggcgatagc

SEQ ID NO: 46664 - DNA, 80 bp, synthetic construct
  source 1..80: mol_type = other DNA
attaccattccgtatcagggcagcggcaaaggcgcgagctttcagctggtgaaactgggcgtgtggaaaagcccgaccga

SEQ ID NO: 46665 - DNA, 80 bp, synthetic construct
  source 1..80: mol_type = other DNA
tatgcatagctgggtgccgctgagcaccgatgatccggtgattgatcgtctgtatctgagcagccatcgtggcgtgatta

SEQ ID NO: 46666 - DNA, 80 bp, synthetic construct
  source 1..80: mol_type = other DNA
atcgctaaaccagaactaataatagacttctagacagccatgcaatccagagctgtcattctgaagcacaagtctggttc

SEQ ID NO: 46667 - DNA, 80 bp, synthetic construct
  source 1..80: mol_type = other DNA
gacaatatagaggatcctaatgcaccatgggtattctcctgtgctccagataggtgtccacctacatgtctctatgttgc

SEQ ID NO: 46668 - DNA, 80 bp, synthetic construct
  source 1..80: mol_type = other DNA
agagttcattattatctataagatagtactaatatagattagatttactaacatgcagacatatagcccagtatattgct

SEQ ID NO: 46669 - DNA, 80 bp, synthetic construct
  source 1..80: mol_type = other DNA
atgtttacagttattaagggttaagtttagttaaagtttagattaattagcatttaagttcactataatcacatagcatt

SEQ ID NO: 46670 - DNA, 80 bp, synthetic construct
  source 1..80: mol_type = other DNA
aataggtcttcagggtataaatcgttaataagctataatatgggactaactggaagttataaagaattttactaacttta

SEQ ID NO: 46671 - DNA, 80 bp, synthetic construct
  source 1..80: mol_type = other DNA
gtactactaatgacatttgaatgtaccattattttattattgctacagctgttagttgagctagtgtaactaactgacca

SEQ ID NO: 46672 - DNA, 80 bp, synthetic construct
  source 1..80: mol_type = other DNA
tatgattgtatcctcatttaatgggcccttaatgtgaaactgagctatcccctcattctttcttctatctttttcattgt

SEQ ID NO: 46673 - DNA, 80 bp, synthetic construct
  source 1..80: mol_type = other DNA
tccaggtgagaaacatcatgagtcctgtaatgggagtaataaggttttccttcttggttaaagattggtctgaaaaaatc

SEQ ID NO: 46674 - DNA, 80 bp, synthetic construct
  source 1..80: mol_type = other DNA
aaagagttcatggagaaagaatgcccatttattaagccagaacctaaaccaggcacaccagctagtgaaattgagttctt

SEQ ID NO: 46675 - DNA, 80 bp, synthetic construct
  source 1..80: mol_type = other DNA
tgaacagcaacttgtggtggcaaggcaaaaactcagggatgcagagaaggcagtggaggtggacccagatgacgttaaca

SEQ ID NO: 46676 - DNA, 80 bp, synthetic construct
  source 1..80: mol_type = other DNA
gaaaagaaacaagatctatttcatgaataggcaagatgtcttagataagaatcatgtacctgatattgataaactgattg

SEQ ID NO: 46677 - DNA, 80 bp, synthetic construct
  source 1..80: mol_type = other DNA
attatgcagcctcaggagatccaacatcacctgacaatatagaggctcctaatgcaccatgggtattctcctgtgctcca

SEQ ID NO: 46678 - DNA, 80 bp, synthetic construct
  source 1..80: mol_type = other DNA
gataggtgtccgcctacatgtctctatgttgcagggatggccgaattaggtgcattcttctcaatccttcaggacatgag

SEQ ID NO: 46679 - DNA, 80 bp, synthetic construct
  source 1..80: mol_type = other DNA
tccttgatgtgaatgcaatagatatagaagaaccaagtggtcagacagcagattggtatacaattggtgtgtatgtcatt

SEQ ID NO: 46680 - DNA, 80 bp, synthetic construct
  source 1..80: mol_type = other DNA
tgtgtggtttgttcccaacacagatccaggtgagaaacatcatgagtcctgtaatgggagtgatagggttttccttcttt

SEQ ID NO: 46681 - DNA, 80 bp, synthetic construct
  source 1..80: mol_type = other DNA
ttaagccagaacctaaaccaggcacaccagctagtgaagttgagttcttgaaacgaaacaagatctatttcatgaatagg

SEQ ID NO: 46682 - DNA, 80 bp, synthetic construct
  source 1..80: mol_type = other DNA
caagatgtcttagataagaatcatgttcctgacattgataaactgattgattatgcagcctcaggagatccaacatcacc

SEQ ID NO: 46683 - DNA, 80 bp, synthetic construct
  source 1..80: mol_type = other DNA
tgaaatttagattgtattgttaattatagatatagtaatttactaacataattaaacttatgtattcagggattactata

SEQ ID NO: 46684 - DNA, 80 bp, synthetic construct
  source 1..80: mol_type = other DNA
attaatcaaacttatgtattcagggattattataattaattgtttactaattaaattatacgggtttatagttattatca

SEQ ID NO: 46685 - DNA, 80 bp, synthetic construct
  source 1..80: mol_type = other DNA
gggtaattaaccgaagagttaatcagggtctaactggaaatgtagcattctaagtacatatcagttttataacaatcaat

SEQ ID NO: 46686 - DNA, 80 bp, synthetic construct
  source 1..80: mol_type = other DNA
tacatatttgaattattaaccaatatagcattaaatagttatagatttaccttttattatatcatttagtgggcccagac

SEQ ID NO: 46687 - DNA, 80 bp, synthetic construct
  source 1..80: mol_type = other DNA
gccccctggtcatatcgcacactcgggggctgcggcatgatttcatccccatattgtagtttatgtttaaatagtttaac

SEQ ID NO: 46688 - DNA, 80 bp, synthetic construct
  source 1..80: mol_type = other DNA
aaaatatgaataacaatcaattgcgctgaagacataggcataataagtactaacatgcagacatatataattcagggatt

SEQ ID NO: 46689 - DNA, 80 bp, synthetic construct
  source 1..80: mol_type = other DNA
atttagttaattgtttactaatagggtatttacgggttcatatattattatatcagggttcaatatattatcatcaggat

SEQ ID NO: 46690 - DNA, 80 bp, synthetic construct
  source 1..80: mol_type = other DNA
ttactaatcatcaggtaatcagggtttaactggaattaaggtattagatacatttcaagttaattataggaagctactaa

SEQ ID NO: 46691 - DNA, 80 bp, synthetic construct
  source 1..80: mol_type = other DNA
tgacaattatgaatgtattgtataatcaattgctgctttattatcataccagcattaagtaagtatagctaggttcattt

SEQ ID NO: 46692 - DNA, 80 bp, synthetic construct
  source 1..80: mol_type = other DNA
agatcaagtactgaagttataagtttatttatttaatgggcccatgaaatgtgaaactgagctgtcccctttctttttca

SEQ ID NO: 46693 - DNA, 80 bp, synthetic construct
  source 1..80: mol_type = other DNA
ctcaatcaaccatgaaagcagaagagttaacccctggcaggttcaggactatagtttgtggtttattcccaactcagatt

SEQ ID NO: 46694 - DNA, 80 bp, synthetic construct
  source 1..80: mol_type = other DNA
ggaattcatggaaagagaatgccctttcatcaaacctgaaattaaaccagggactccagcacaggaggctgaattcttga

SEQ ID NO: 46695 - DNA, 80 bp, synthetic construct
  source 1..80: mol_type = other DNA
cctgaagctctaaaatatagttaggttattgttacttgacaacactaatgattagttggtaagtgtaggtagttactaat

SEQ ID NO: 46696 - DNA, 80 bp, synthetic construct
  source 1..80: mol_type = other DNA
aagatattaacttgggttatgggtcattataatcagattatcagggtatatttagataagcacaattatcccacagtaag

SEQ ID NO: 46697 - DNA, 80 bp, synthetic construct
  source 1..80: mol_type = other DNA
ttaattaaccttcttatatatgtgattattaatgtgaattatgtatactactgattattatcactgccatatcagggtaa

SEQ ID NO: 46698 - DNA, 80 bp, synthetic construct
  source 1..80: mol_type = other DNA
tggttttcatatcaatgcaacaggggtgggtttaggaccaagctaccttaagtagctttttttgtatatatggatgtaga

SEQ ID NO: 46699 - DNA, 80 bp, synthetic construct
  source 1..80: mol_type = other DNA
ctttacaaaacaacacactacctctttattactacctcatgattttgttgccttttgtctttttagggagcatactactg

SEQ ID NO: 46700 - DNA, 80 bp, synthetic construct
  source 1..80: mol_type = other DNA
tccgtaaacctaaacacctttacatctccatgccaaatgcccaatcaagtatgaaagcagaggaaataacaccagggagg

SEQ ID NO: 46701 - DNA, 80 bp, synthetic construct
  source 1..80: mol_type = other DNA
ctctagcaagggattggaccaacagaattcaggactggttaggttcaccatgtaaatttctccctgatttgtcaacacag

SEQ ID NO: 46702 - DNA, 80 bp, synthetic construct
  source 1..80: mol_type = other DNA
agcccgcctacgaatgctgattatattgcccaaaggcaaggtctactggcaagtatggagaccaaagaatcaaaaggtat

SEQ ID NO: 46703 - DNA, 80 bp, synthetic construct
  source 1..80: mol_type = other DNA
acgggatcatgctagggatgctggttgtagcctgatagaccatcttgactcgccttcctccatatgggtgtttgctggtg

SEQ ID NO: 46704 - DNA, 80 bp, synthetic construct
  source 1..80: mol_type = other DNA
aagtggataagggcagtatgatgcttggacggtttttcgggcttgtgccacacaattaatcatctcagggctttactgtg

SEQ ID NO: 46705 - DNA, 80 bp, synthetic construct
  source 1..80: mol_type = other DNA
acagattttaaatactttatatgttatcccattattgtaatccatttaatcaaattaggtgttttaagtaagtcattaac

SEQ ID NO: 46706 - DNA, 80 bp, synthetic construct
  source 1..80: mol_type = other DNA
tagctgtatgaaatcagtgattgaccagctaggttattaattataatcaattatgccagtataatcatgtttgtgtttaa

SEQ ID NO: 46707 - DNA, 80 bp, synthetic construct
  source 1..80: mol_type = other DNA
ttatagtaataatcctgaatatattaacaatatattataccaatagatgtaaatttcattccatgctttgctgctttgcg

SEQ ID NO: 46708 - DNA, 80 bp, synthetic construct
  source 1..80: mol_type = other DNA
actggatggaaagaattgaagatttcttagctgcagagtgtccgtttctacctaagcctaaaaccacctctgaggcattc

SEQ ID NO: 46709 - DNA, 80 bp, synthetic construct
  source 1..80: mol_type = other DNA
atgtcaactaataaggcttatttcttaaacaggcagagacaggttgatgaatctcaagtcccagacatagcagaactgat

SEQ ID NO: 46710 - DNA, 80 bp, synthetic construct
  source 1..80: mol_type = other DNA
aagatttaaatgatcattagggcattactaactaaatagtagagtattaacatataggtgtatagaatgtattcaaggat

SEQ ID NO: 46711 - DNA, 80 bp, synthetic construct
  source 1..80: mol_type = other DNA
tattgtaatcaattgtttactaataaatattaatacgggtttaaatatcattatcagggttcaaatagggtttaatgggt

SEQ ID NO: 46712 - DNA, 80 bp, synthetic construct
  source 1..80: mol_type = other DNA
attattatcagggttcattgattaataagctaatcagggtttaaactggaattatgaatattatggtggcaattattaat

SEQ ID NO: 46713 - DNA, 80 bp, synthetic construct
  source 1..80: mol_type = other DNA
actaattacagggatataattgttggcagttatgaatgtactcctctatatgtagcattatatcattatctggatttgca

SEQ ID NO: 46714 - DNA, 80 bp, synthetic construct
  source 1..80: mol_type = other DNA
tgaacagcaacttgttgctgccagacaaaaactcaaggatgcagagagagcagtggagatggacccagatgacgttaaca

SEQ ID NO: 46715 - DNA, 80 bp, synthetic construct
  source 1..80: mol_type = other DNA
acacatagctccctgaaaatttatttaatacaaaatgtcatacgaagagattgccgttcagtttgcctctgagtctatag

SEQ ID NO: 46716 - DNA, 80 bp, synthetic construct
  source 1..80: mol_type = other DNA
cttgttcttttcttggttgttggatttggatcacttcttatgattatatgtcttgatttagcattgttaggggaagccag

SEQ ID NO: 46717 - DNA, 80 bp, synthetic construct
  source 1..80: mol_type = other DNA
agcctatttcccagtaattctttggatgtaacctcgtattgtagctctaccagcttgaataattctgactgacagcaatc

SEQ ID NO: 46718 - DNA, 80 bp, synthetic construct
  source 1..80: mol_type = other DNA
atctcttttatcatgctccagtgctgtcataagtctgatcaattgtatgtaggcgatttctttctctatggcttggcctg

SEQ ID NO: 46719 - DNA, 80 bp, synthetic construct
  source 1..80: mol_type = other DNA
taaaaacatctgcaggaatgttcctaatagagagctctctcatcatgcttttgtaagtgaacatcaatgagtcatccaat

SEQ ID NO: 46720 - DNA, 80 bp, synthetic construct
  source 1..80: mol_type = other DNA
ccaaggccttttccgattctacagatttgggtcgcaaagtcacattttcgctcccagttcaactggtagccttccagtgt

SEQ ID NO: 46721 - DNA, 80 bp, synthetic construct
  source 1..80: mol_type = other DNA
tgagaactcaaagaatttcagagttggataagtgagaggccaggatagagccctcttaatgtttggctcacaccacttta

SEQ ID NO: 46722 - DNA, 80 bp, synthetic construct
  source 1..80: mol_type = other DNA
gtgcatctttaatgtctaacattgagattcgtgctattgtgacatcaaagaatgatggagaagccctaatgacaagaccc

SEQ ID NO: 46723 - DNA, 80 bp, synthetic construct
  source 1..80: mol_type = other DNA
gatcgtggaggtgaggactggaagcaggatgtcaagaagatgattgttctctctcttactagaggcaacaagccaaacaa

SEQ ID NO: 46724 - DNA, 80 bp, synthetic construct
  source 1..80: mol_type = other DNA
tgctcataaccccactccttaggcaaatcataattatttaggaaagtaatcaatctatttttggcaataacagattgtct

SEQ ID NO: 46725 - DNA, 80 bp, synthetic construct
  source 1..80: mol_type = other DNA
gagattatgcagtgggatctccatacctttgtaaagactgactggagcattgtggcgttttccaaatgggacaaagtcca

SEQ ID NO: 46726 - DNA, 80 bp, synthetic construct
  source 1..80: mol_type = other DNA
tgggacaaagtccacggtcactcttttcaactggtccggagaagtgctcattacgggcaactcgcgagcataatagttta

SEQ ID NO: 46727 - DNA, 80 bp, synthetic construct
  source 1..80: mol_type = other DNA
cggtcactcttttcaactggtccggagaagtgctcattacgggcaactcgcgagcataatagtttatgttggacatgacg

SEQ ID NO: 46728 - DNA, 80 bp, synthetic construct
  source 1..80: mol_type = other DNA
agaagtgctcattacgggcaactcgcgagcataatagtttatgttggacatgacgaaaaaattcaggggggtctttgtgt

SEQ ID NO: 46729 - DNA, 80 bp, synthetic construct
  source 1..80: mol_type = other DNA
aatgattcttaaaatgtcagacaagggcaaggcaatggtgaatgagctcgtgttaaaatacaagctcaaatctggaaacc

SEQ ID NO: 46730 - DNA, 80 bp, synthetic construct
  source 1..80: mol_type = other DNA
cttctcgagatgacttgactctttccagaatcactgctgcttttgctggttggacatgtcaggctgctgattatgtccag

SEQ ID NO: 46731 - DNA, 80 bp, synthetic construct
  source 1..80: mol_type = other DNA
gagtacttgccagtgactggcagagccatggatgccatatccagcagttatcctagggcgatgatgcatcccagctttgc

SEQ ID NO: 46732 - DNA, 80 bp, synthetic construct
  source 1..80: mol_type = other DNA
tggactgattgaccaagagcttccagcagatgtgttctctgagataactcaagctcactgcttgttcatgatccaattct

SEQ ID NO: 46733 - DNA, 80 bp, synthetic construct
  source 1..80: mol_type = other DNA
caaagactatcaacccctcactgagaggtttgagtaaggatgaaattgtctccagctttgagcgaccaatgcaagctgca

SEQ ID NO: 46734 - DNA, 80 bp, synthetic construct
  source 1..80: mol_type = other DNA
atcagcagtacatttttaacttctgccaatagaagagcaatgttgaagactcttgggatcataaatgataacctaaagcc

SEQ ID NO: 46735 - DNA, 80 bp, synthetic construct
  source 1..80: mol_type = other DNA
ctcatcttcaactgtgagtgctgcaaaagtcttcagatccctctaggacccgaaaggccttaatacaacccagacaacat

SEQ ID NO: 46736 - DNA, 80 bp, synthetic construct
  source 1..80: mol_type = other DNA
atgagcaaactgttgccggttgggtgactgattttgcttatcaaggatttgatgcgaagagggtgatagctcttgtgaaa

SEQ ID NO: 46737 - DNA, 80 bp, synthetic construct
  source 1..80: mol_type = other DNA
cacctgggcagcttgtctgcctgagtgtgtgtgagagtgtgttttttgtggtttcagtgttagtgtgtttttgaattttt

SEQ ID NO: 46738 - DNA, 80 bp, synthetic construct
  source 1..80: mol_type = other DNA
gatctacgacagatattcaagttgattatcgtggaactgatggacgcgtaatgggtgatgagaatatatatgaaacaata

SEQ ID NO: 46739 - DNA, 80 bp, synthetic construct
  source 1..80: mol_type = other DNA
ttttacaaaaatatttttattctctttctctcttcgatggtctcacaaaaaagttttacaaaaatatttttattctcttt

SEQ ID NO: 46740 - DNA, 80 bp, synthetic construct
  source 1..80: mol_type = other DNA
tacaaaattgatgagagacgtaggcgaatgggtctgcctgatactttcataacaggactgaatccaataatggatgtggc

SEQ ID NO: 46741 - DNA, 80 bp, synthetic construct
  source 1..80: mol_type = other DNA
tccccctcgaatttgtattttttcccagatgttatcctgtgaaagaaccccttgaattttcaaaacatgtccttgtctaa

SEQ ID NO: 46742 - DNA, 80 bp, synthetic construct
  source 1..80: mol_type = other DNA
aatactaaaagatgacgaagtaatggaaattaatactgaaggaaaattctttgcatataaaatcgatacacttaatgaag

SEQ ID NO: 46743 - DNA, 80 bp, synthetic construct
  source 1..80: mol_type = other DNA
agacttggcagcactcattgatagtaaaccctttgccttagccttcttgtcatctttcctatcaagcttgctcagaacta

SEQ ID NO: 46744 - DNA, 80 bp, synthetic construct
  source 1..80: mol_type = other DNA
taaattggttgcaaaagcattttctagaatgaccagagactcccaactgatgatatacttttcaataagcccagtggaat

SEQ ID NO: 46745 - DNA, 80 bp, synthetic construct
  source 1..80: mol_type = other DNA
atagattactatttcgaggagctcctgttcttgtctgagtttgatccaggatctattcagagatatctcaaattactggt

SEQ ID NO: 46746 - DNA, 80 bp, synthetic construct
  source 1..80: mol_type = other DNA
cagggaattctccatttatgaggaagtgtgaaagagttggtcttgacttgtatactacctcataattttttatgtaaata

SEQ ID NO: 46747 - DNA, 80 bp, synthetic construct
  source 1..80: mol_type = other DNA
ttgcctaggttctacatagactgtgacctggacacctttgattttgaaaaggactgctctttaattgagaatgagttccc

SEQ ID NO: 46748 - DNA, 80 bp, synthetic construct
  source 1..80: mol_type = other DNA
ttacccaccttggcccgatacttctctgcgcttctcactactgctgatgccaaaaccaggtcctcatcaataattccgac

SEQ ID NO: 46749 - DNA, 80 bp, synthetic construct
  source 1..80: mol_type = other DNA
gtaagctgccatggggtggagggttcgggattagaggaaaggggacctagagaatcttaggggtgggttcacaggggtgc

SEQ ID NO: 46750 - DNA, 80 bp, synthetic construct
  source 1..80: mol_type = other DNA
gggactaggcagccactttgtcactctcttgtcttccttagggcatcgtctattagacagcacagactcatgtattgtgg

SEQ ID NO: 46751 - DNA, 80 bp, synthetic construct
  source 1..80: mol_type = other DNA
tgactacttcatgaaaacagacctgagatttagagaaactgctctttccaccttctgggctaaagattggcccacaatac

SEQ ID NO: 46752 - DNA, 80 bp, synthetic construct
  source 1..80: mol_type = other DNA
atcaaaaggttaaggaaatttctaatcaggaaccactaaagctctagacagatgaatgtttaattagcccatattaatac

SEQ ID NO: 46753 - DNA, 80 bp, synthetic construct
  source 1..80: mol_type = other DNA
ttgacaacactaatcattaggtaagtaattataggataagaaattaacatgttactaatttaaatttaggattgataaga

SEQ ID NO: 46754 - DNA, 80 bp, synthetic construct
  source 1..80: mol_type = other DNA
tagcattaagatatagtttgataagcacaattatcccacaataagttaggttaaataagttaactaatcaagttaattag

SEQ ID NO: 46755 - DNA, 80 bp, synthetic construct
  source 1..80: mol_type = other DNA
caactggggtagagccaggggatcatctcaaggaaagatcgatgttaagttacggcaatgtcttggatctcaacaatctt

SEQ ID NO: 46756 - DNA, 80 bp, synthetic construct
  source 1..80: mol_type = other DNA
tcaggactgctgtttgtggcctctacccagcacaggtcaaagcaaggaacatggtgagccctgtgatgagtgtgattggg

SEQ ID NO: 46757 - DNA, 80 bp, synthetic construct
  source 1..80: mol_type = other DNA
caagccctccaacaaatgcagattatattgctcaaaggcaggggcttctcacaagtatggagacaaaggagtcaaagggc

SEQ ID NO: 46758 - DNA, 80 bp, synthetic construct
  source 1..80: mol_type = other DNA
gcaagggatgctgggtgcacactagtggaccatcttgactcaccgtcatcaatttgggtgtttgctggagctcctgatag

SEQ ID NO: 46759 - DNA, 80 bp, synthetic construct
  source 1..80: mol_type = other DNA
ccacatgtctgtttgttgctgggatggctgagcttggggcatttttttcaatcttacaagatatgagaaacaccattatg

SEQ ID NO: 46760 - DNA, 80 bp, synthetic construct
  source 1..80: mol_type = other DNA
ctattcatcagctaaaaaggagcaataagaaatatctcttgtctgccctcagatggccaacaggaatcccctctctagag

SEQ ID NO: 46761 - DNA, 80 bp, synthetic construct
  source 1..80: mol_type = other DNA
aaataccttctttacaatatagcagactagataataatcttcgtgttaatgataattaaggcattgaccacgctcatcag

SEQ ID NO: 46762 - DNA, 80 bp, synthetic construct
  source 1..80: mol_type = other DNA
tgaatgtaatatctcattatatcaccaaatttaattagatcaattataataggtgtaagttcatggtttagttttattta

SEQ ID NO: 46763 - DNA, 80 bp, synthetic construct
  source 1..80: mol_type = other DNA
aatagatgtgtaagtcaaagtaatacataagactaacatgtagatatagatgtagcttcaacatgtagacatatagaatg

SEQ ID NO: 46764 - DNA, 80 bp, synthetic construct
  source 1..80: mol_type = other DNA
tgaatattatatgcagacatatagaatgtatttagggatcaactatgcactaatttacttatacgggtagtattggtatt

SEQ ID NO: 46765 - DNA, 80 bp, synthetic construct
  source 1..80: mol_type = other DNA
ttgggcccatcaatgtgaaactgagctatcccctttctttttttcaccactatctttctttctttctttttttctacctc

SEQ ID NO: 46766 - DNA, 80 bp, synthetic construct
  source 1..80: mol_type = other DNA
agaacaaaggaacacgcatccgcttcaaagatgacacttcatttgaggacattaatggtatcagacgaccaaaacacctt

SEQ ID NO: 46767 - DNA, 80 bp, synthetic construct
  source 1..80: mol_type = other DNA
tatgtatccatgcctactgctcagtccactatgaaagcagaagaacttacaccgggtcggttccgtacaatagtttgtgg

SEQ ID NO: 46768 - DNA, 80 bp, synthetic construct
  source 1..80: mol_type = other DNA
agcctttgaagatttagatgattattagggtattactaactatatagtagattattaacacataggtgtatagactgtat

SEQ ID NO: 46769 - DNA, 80 bp, synthetic construct
  source 1..80: mol_type = other DNA
tcagggattatgtagccaattgtttactaataaacattaatacgggtttaaataaatatcattatcagggttttaagaaa

SEQ ID NO: 46770 - DNA, 80 bp, synthetic construct
  source 1..80: mol_type = other DNA
tatcattatcagggtttgataagtattatcatcagggttcattaattaataagctaatcggggtttaaactggaactatg

SEQ ID NO: 46771 - DNA, 80 bp, synthetic construct
  source 1..80: mol_type = other DNA
aatattatggtgataatcattaatactaattacagggatataattattggcagttatgaatgtattcctctatatgtagc

SEQ ID NO: 46772 - DNA, 80 bp, synthetic construct
  source 1..80: mol_type = other DNA
attatattattacctgtatttgcactaagtagttattagtttgttttatatattcttatttaatgggcccaagaatgtga

SEQ ID NO: 46773 - DNA, 80 bp, synthetic construct
  source 1..80: mol_type = other DNA
attcaagaatatcgaagtgattggcgagatagactttctcatcatgaaagatatggtatgaaagttaggttgacctaccg

SEQ ID NO: 46774 - DNA, 80 bp, synthetic construct
  source 1..80: mol_type = other DNA
ttcgttcattctatgcctgagctgttcgaggccatgggtggatgtgttgctgagatagttccgacccacagtaccagatt

SEQ ID NO: 46775 - DNA, 80 bp, synthetic construct
  source 1..80: mol_type = other DNA
ggcgttcgttgggaaattggctgttctacctgcgcaagttttgacctctaaggagcatgattttcagtctaaattaatga

SEQ ID NO: 46776 - DNA, 80 bp, synthetic construct
  source 1..80: mol_type = other DNA
gggtgaagacttcagtaagcaattcttatcaatggctgtaggaacgatggatacaccgagtaggtatgccataactattg

SEQ ID NO: 46777 - DNA, 80 bp, synthetic construct
  source 1..80: mol_type = other DNA
gttgacgagatattattgcagccagcacgtttggtattgttgggtcggaaagggggcggtaagtcaaggttgtcgaagat

SEQ ID NO: 46778 - DNA, 80 bp, synthetic construct
  source 1..80: mol_type = other DNA
cttttcggaattgggatacaacgtgctagattcagacacttacggaaaggtgcttacgcttgtggcagatcggggagaag

SEQ ID NO: 46779 - DNA, 80 bp, synthetic construct
  source 1..80: mol_type = other DNA
atggtttagatgacgcactaaagaagtttgtgcgactgactccagacgaaaggaaagcggttccctctatatttgagact

SEQ ID NO: 46780 - DNA, 80 bp, synthetic construct
  source 1..80: mol_type = other DNA
ttgcttattttgcagagttggagcgtggtgggtttgatgacaatggattgaccttttctcctgagttgaagactgttgtg

SEQ ID NO: 46781 - DNA, 80 bp, synthetic construct
  source 1..80: mol_type = other DNA
agctatattgctccggggccaaggcttgtcggttaatgctgagcttcatttgcatgatttttacgttgctcttaatcaga

SEQ ID NO: 46782 - DNA, 80 bp, synthetic construct
  source 1..80: mol_type = other DNA
atccgaaagtgaacgagcgaaactcgaagagaaaatcactgatttagttatatctcatggtaagaaagcttctacagttc

SEQ ID NO: 46783 - DNA, 80 bp, synthetic construct
  source 1..80: mol_type = other DNA
acttacttgttttggttttgtggacccagctaaaggttgtcgttttaatttgctaccgtatgtaaagacattgcatccta

SEQ ID NO: 46784 - DNA, 80 bp, synthetic construct
  source 1..80: mol_type = other DNA
atgacaagtggttgcttgacctccaggcgagttggcggcttgaatacggagtttctcgatctatagaggaaggtgcactc

SEQ ID NO: 46785 - DNA, 80 bp, synthetic construct
  source 1..80: mol_type = other DNA
tatgatttttttgctgaatcgcatactttgtacgctgttcggacttggcctggatgtgagaaatatttgggagctttaga

SEQ ID NO: 46786 - DNA, 80 bp, synthetic construct
  source 1..80: mol_type = other DNA
agcgtttgttggaaaattggctgtcttacctgcgcaagttttaacccccaaggagtatgactttcagtccaaattaatga

SEQ ID NO: 46787 - DNA, 80 bp, synthetic construct
  source 1..80: mol_type = other DNA
gtcaaggaggcattggctacagtgaaggtattcagttttgttattgggcgagatcatttgcctgctgtgggtgtctattc

SEQ ID NO: 46788 - DNA, 80 bp, synthetic construct
  source 1..80: mol_type = other DNA
gacatttgagatgctcaagcgtccggcttactacaacatttttctgcttcccactgggcgacgactggcaaaaacttaca

SEQ ID NO: 46789 - DNA, 80 bp, synthetic construct
  source 1..80: mol_type = other DNA
tgtctggaatgcaggttgatgtggatgtgaagagcgttactggtattgctagttttaaggatgggactcagcatacgatt

SEQ ID NO: 46790 - DNA, 80 bp, synthetic construct
  source 1..80: mol_type = other DNA
gttgatgagatactattgcagcccgcacggctagtattgttgggccgaaagggaggtggtaaatcaaggttgtcaaagat

SEQ ID NO: 46791 - DNA, 80 bp, synthetic construct
  source 1..80: mol_type = other DNA
cttttcagagttgggatacaatgtgttagattcagacacttatggaaaagtgcttacgcttgtagcagatcgaggagaag

SEQ ID NO: 46792 - DNA, 80 bp, synthetic construct
  source 1..80: mol_type = other DNA
atggcttggatgatgcactacggaagtttgtgcggttaactccggatgaaaggaaagcagttccttctgtatttgagact

SEQ ID NO: 46793 - DNA, 80 bp, synthetic construct
  source 1..80: mol_type = other DNA
gagatggatagattatgtgaagtttttggctctagaggtctccgcccgtatgcccagcgatgtcagcaacaggctggtcg

SEQ ID NO: 46794 - DNA, 80 bp, synthetic construct
  source 1..80: mol_type = other DNA
tttgcattgggagttgtatgctgcatttcaggagttttacgatcgaatgatacgagtcatcactccagataagtttcgat

SEQ ID NO: 46795 - DNA, 80 bp, synthetic construct
  source 1..80: mol_type = other DNA
ttgcctattttgcagagttggagcgtggtgggttcgacgataatggattgaccttctcttccgagttgaagactgttgta

SEQ ID NO: 46796 - DNA, 80 bp, synthetic construct
  source 1..80: mol_type = other DNA
attcaggaatatcggagtgattggcgagataggctctctcatcatgaaaggtatggtatcaaagttagattaacctatcg

SEQ ID NO: 46797 - DNA, 80 bp, synthetic construct
  source 1..80: mol_type = other DNA
tttgttcattctatgcctgagttgtttgaagccatgggcggatgtgtcgctgagatagttccaactcatagtactagatt

SEQ ID NO: 46798 - DNA, 80 bp, synthetic construct
  source 1..80: mol_type = other DNA
agccatattgctccgtggccaaggtctgtcagttaatgctgaacttcatttgcatgacttttacgttgctctgaatcaga

SEQ ID NO: 46799 - DNA, 80 bp, synthetic construct
  source 1..80: mol_type = other DNA
atggtgcgcggaaggtttctttagggtggttagtgcacgctttaaacgagttgttaaaaatgaggtagtaagccggtggg

SEQ ID NO: 46800 - DNA, 80 bp, synthetic construct
  source 1..80: mol_type = other DNA
ctttaaacgagttgttaaaaatgaggtagtaagccggtgggattggtgactggtgcaggatgctgatctcccttgcagtc

SEQ ID NO: 46801 - DNA, 80 bp, synthetic construct
  source 1..80: mol_type = other DNA
atctgaaaatgagcgaacgaaacttgaggaaaaaatcactgatttagttatatctcatggtaagaaagcctctacagtcc

SEQ ID NO: 46802 - DNA, 80 bp, synthetic construct
  source 1..80: mol_type = other DNA
atttttgtacacgtgagtcatacaagggaagagttcgtgctaaccaaattttaattttgttggagcctgaaggtttaggt

SEQ ID NO: 46803 - DNA, 80 bp, synthetic construct
  source 1..80: mol_type = other DNA
gaagtcgagggtttgaccgttcgagcggaaggcaactggatgtctttagttacacattgtttattcattttaggttctac

SEQ ID NO: 46804 - DNA, 80 bp, synthetic construct
  source 1..80: mol_type = other DNA
acttacttgtttcggtttcgtggatccagctcgaggttgtcgctttaatttactaccgtatataaagacattgcatccta

SEQ ID NO: 46805 - DNA, 80 bp, synthetic construct
  source 1..80: mol_type = other DNA
atgataaatggttgcttgatcttcaggcgagctggcgacttgagtatggagtttctcgatccatagaggaaggtgcactt

SEQ ID NO: 46806 - DNA, 80 bp, synthetic construct
  source 1..80: mol_type = other DNA
tacgatttttttgctgagtcacatactctatatgctgttcggacttggcctggatgtgaaagatacttaggagctttaga

SEQ ID NO: 46807 - DNA, 80 bp, synthetic construct
  source 1..80: mol_type = other DNA
ggcatttgttggaaagttggctgtgctgcctgcgcaggttttaaccccgaaggagtacgattttcaatccaaattgatga

SEQ ID NO: 46808 - DNA, 80 bp, synthetic construct
  source 1..80: mol_type = other DNA
atatactagaaaatttaatcaccctacccaaaaccgattggaaattgtacgagactattgaacagaagctgaaatggatg

SEQ ID NO: 46809 - DNA, 80 bp, synthetic construct
  source 1..80: mol_type = other DNA
gtaaggctaaaaagacaggatttcactatttgtattatttggtttccttcaccatgaaaacgtccctgacggatcgcatc

SEQ ID NO: 46810 - DNA, 80 bp, synthetic construct
  source 1..80: mol_type = other DNA
attaaggaggcgttggctacagtgaaggtatttagttttgtcattggacgagatcacttgcctgctgtaggtgtttattc

SEQ ID NO: 46811 - DNA, 80 bp, synthetic construct
  source 1..80: mol_type = other DNA
aggcgaggactttagcaagcagtttttatcaatggctgtgggaacgacggatacaccgagtaggtatgctataactattg

SEQ ID NO: 46812 - DNA, 80 bp, synthetic construct
  source 1..80: mol_type = other DNA
tccttcgtggttccaatactcctgaaggccctttatatgctaacaacaagggggagacagacaaccaaggacaataaagg

SEQ ID NO: 46813 - DNA, 80 bp, synthetic construct
  source 1..80: mol_type = other DNA
tcctttgaggatgtgaatggaatccggaagccaaagcatctctatgtttccttgcccaatgcacagcctagcatgaaagc

SEQ ID NO: 46814 - DNA, 80 bp, synthetic construct
  source 1..80: mol_type = other DNA
atcactttcgtaaattagttagatatatagaattagtatacacgttagattattctcaaactcctaattatgaaagacta

SEQ ID NO: 46815 - DNA, 80 bp, synthetic construct
  source 1..80: mol_type = other DNA
atctatatcatctatatcatctatataatctacgatattattacacataaacatcggcaacatactattgtccattatct

SEQ ID NO: 46816 - DNA, 80 bp, synthetic construct
  source 1..80: mol_type = other DNA
agataactatataagctaagttaatatagaagactaacacatagatatatagaatgtagcattaacatgtagatatacag

SEQ ID NO: 46817 - DNA, 80 bp, synthetic construct
  source 1..80: mol_type = other DNA
ttgggcccattaatgtgaaactgagctatcccctttcttttttcacaactatcttcatttctccttttttctctacctca

SEQ ID NO: 46818 - DNA, 80 bp, synthetic construct
  source 1..80: mol_type = other DNA
tcagacgaccaaaacacctttatgtatccatgcctactgcccagtccaccatgaaagcagaagaactgacaccaggtcgg

SEQ ID NO: 46819 - DNA, 80 bp, synthetic construct
  source 1..80: mol_type = other DNA
gaatacatccccatatgcaagtataatacaaataccaatacacgtataaccacactttgttgctatattaatatctgcac

SEQ ID NO: 46820 - DNA, 80 bp, synthetic construct
  source 1..80: mol_type = other DNA
catcaatatagagattagaggagggctatatagagccaagacgaacaaaatcaaaccgagtaacgttctaacatcattat

SEQ ID NO: 46821 - DNA, 80 bp, synthetic construct
  source 1..80: mol_type = other DNA
ttgacctcgtcgatttccgaccaatctgggcgtataatgaatctgaactttaatttcttgtaatcattcgaaataatttt

SEQ ID NO: 46822 - DNA, 80 bp, synthetic construct
  source 1..80: mol_type = other DNA
gttcagtcttcatgcgtctctctctatcgagtttatcagagcagtctttctgaaggcgatcgaactccataaatttctcc

SEQ ID NO: 46823 - DNA, 80 bp, synthetic construct
  source 1..80: mol_type = other DNA
aatcgtcgaacgttctagtatacggaaacactttgatttcttatctgtagttaatgacttagtgatatcacgaagaatat

SEQ ID NO: 46824 - DNA, 80 bp, synthetic construct
  source 1..80: mol_type = other DNA
gttaaacataagggaatgtcatttgtattttataagccaaagcattctaccgttgttaaatacttgtctggaggaggtat

SEQ ID NO: 46825 - DNA, 80 bp, synthetic construct
  source 1..80: mol_type = other DNA
ttataattataattatgatgatacattttttgacgacgatgattgatcgctattgcacaattttgtttttgtactttcta

SEQ ID NO: 46826 - DNA, 80 bp, synthetic construct
  source 1..80: mol_type = other DNA
gtagaggatgaggatacattagtatgcggaaccaataacggaaacagacaaccccatataattttatagctaagaatgcc

SEQ ID NO: 46827 - DNA, 80 bp, synthetic construct
  source 1..80: mol_type = other DNA
ctttataacagatagggatgataaatatttgatcattaagctattgcttcccggattagacgatagaatttataacatga

SEQ ID NO: 46828 - DNA, 80 bp, synthetic construct
  source 1..80: mol_type = other DNA
tatattggggaaatatgaacctgacatgattaagattgctctttcagtggctggtaatttaataagaaatcgagactaca

SEQ ID NO: 46829 - DNA, 80 bp, synthetic construct
  source 1..80: mol_type = other DNA
ggagtaaagcatataacgtaaccagaattgtaaaattagaggtacgggataaaataatacctcctactatgcaattacca

SEQ ID NO: 46830 - DNA, 80 bp, synthetic construct
  source 1..80: mol_type = other DNA
aattacattttatcagatccagataataaacaaattttgtcgccctaactaattctatattgttatatattttacaattg

SEQ ID NO: 46831 - DNA, 80 bp, synthetic construct
  source 1..80: mol_type = other DNA
taaaaactatgatctaaacagacgacagcctgtaactgggtataccgcactacactgctatttgtataataattacttta

SEQ ID NO: 46832 - DNA, 80 bp, synthetic construct
  source 1..80: mol_type = other DNA
cacacgtaatagattatcttatacgtatcaacggagatataaatgcgttaaccgacaataacaaacacgctatccaactc

SEQ ID NO: 46833 - DNA, 80 bp, synthetic construct
  source 1..80: mol_type = other DNA
acacgacactatattctgttttaagatgtcataattcgagaaagttaaaaagatacctcagcgtgttaaaaaaatataat

SEQ ID NO: 46834 - DNA, 80 bp, synthetic construct
  source 1..80: mol_type = other DNA
aattatatcgtatttgtgctatagaatggatgaagatacgaaactatctaggtatttgtatctcaccgatagagaacata

SEQ ID NO: 46835 - DNA, 80 bp, synthetic construct
  source 1..80: mol_type = other DNA
ccacccatgataatgaatagatgtcgtttttctttggctgtaatcgatgatacaatttatgctataggtggtcaaaaact

SEQ ID NO: 46836 - DNA, 80 bp, synthetic construct
  source 1..80: mol_type = other DNA
tacattgtttacggtgatgtttatcttcttccagcgcatatagtctaatagcgattcaaacgcgtgatagtttataccat

SEQ ID NO: 46837 - DNA, 80 bp, synthetic construct
  source 1..80: mol_type = other DNA
caacgctatggcaaaaggacgtggttctcctaaaccggatccgttatatagtactgttaagaaaacacctaaaagtatag

SEQ ID NO: 46838 - DNA, 80 bp, synthetic construct
  source 1..80: mol_type = other DNA
tttgtatcccctagacggtgtagaagatcaacctctggagtcgtatgtggtatgatacaatcaagaccaaacgatgatac

SEQ ID NO: 46839 - DNA, 80 bp, synthetic construct
  source 1..80: mol_type = other DNA
tgatagtaatagtaataccaatactcaagactacgaaactgatacaatctcttatcgtgcgggtaatgttctcgatgtcg

SEQ ID NO: 46840 - DNA, 80 bp, synthetic construct
  source 1..80: mol_type = other DNA
ggcttgattttcgcattgactttacacagacataaacatcccctgaatctgtacctgctttgtggatttacactgtcaga

SEQ ID NO: 46841 - DNA, 80 bp, synthetic construct
  source 1..80: mol_type = other DNA
cactggcggaggccacgctgctgccatagttgaagtcgtcctcgatcgaggagcgagggtaccggtggtcggggtcagcc

SEQ ID NO: 46842 - DNA, 80 bp, synthetic construct
  source 1..80: mol_type = other DNA
aatcagtaaagaacactccacctataggattcttaatatgatacgcagtgctaactggcagacaacaagccgaagagtat

SEQ ID NO: 46843 - DNA, 80 bp, synthetic construct
  source 1..80: mol_type = other DNA
agttaacaaaaaatttacatatcctgttccatcaacgattctagaacgtcatcggctatatcgctaaaatcttcatcaaa

SEQ ID NO: 46844 - DNA, 80 bp, synthetic construct
  source 1..80: mol_type = other DNA
aataatggatagtatggatagtatggatagtataaatagttattagtgataagatagtaaaaataattattagaataaga

SEQ ID NO: 46845 - DNA, 80 bp, synthetic construct
  source 1..80: mol_type = other DNA
gcaatagtccgtgtaatccataatccagtaacacgagctggtgcttgctagacaccttttcaatgtttaattttttcgaa

SEQ ID NO: 46846 - DNA, 80 bp, synthetic construct
  source 1..80: mol_type = other DNA
ttttatcataaattacacatttccaatgagacaaataacaaaatccaaacattacaaatctagaggtagaacttttaatt

SEQ ID NO: 46847 - DNA, 80 bp, synthetic construct
  source 1..80: mol_type = other DNA
tcatcgataaaggataccgttaaatataactggttgccgatagtctcatagtctattaagtggtaagtttcgtacaaata

SEQ ID NO: 46848 - DNA, 80 bp, synthetic construct
  source 1..80: mol_type = other DNA
ttgtagataccattaatcactgattcctttttcgatgccggacaataacacaattgtttagctttggactctatgtattc

SEQ ID NO: 46849 - DNA, 80 bp, synthetic construct
  source 1..80: mol_type = other DNA
ttatggcgtttttagattaatactttcaatgagataaatatgggtggcggagtaagtgttgagctccctaaacgggatcc

SEQ ID NO: 46850 - DNA, 80 bp, synthetic construct
  source 1..80: mol_type = other DNA
ggatagatagtatacccaaagagaccaatgaattaacttacttattaggtatgatcgttaagaattgtaacttgaatgct

SEQ ID NO: 46851 - DNA, 80 bp, synthetic construct
  source 1..80: mol_type = other DNA
tagtaggcgtacaagcagccaagacatcaacacttatattctttgttattatattggcaattagtgcgctattactttgg

SEQ ID NO: 46852 - DNA, 80 bp, synthetic construct
  source 1..80: mol_type = other DNA
ttattttgtattgcacatgttcgtgatctatgagttcttcttcgaatggcataggatctccgaatctgaaaatgtataaa

SEQ ID NO: 46853 - DNA, 80 bp, synthetic construct
  source 1..80: mol_type = other DNA
ctcattacgggcaactcgcgagcataatagtttatgttggacatgacgaaaaaattcaggaggtctttggtgtccccccc

SEQ ID NO: 46854 - DNA, 80 bp, synthetic construct
  source 1..80: mol_type = other DNA
aattaattgggttgactggaattatggcattatacatgttactcaggttaataacagtgaatactaatggcagttatgaa

SEQ ID NO: 46855 - DNA, 80 bp, synthetic construct
  source 1..80: mol_type = other DNA
tgcagtatctcatcatattactaaatttaatttagaccagttataataggtataagtttagagtttagttttatttattg

SEQ ID NO: 46856 - DNA, 80 bp, synthetic construct
  source 1..80: mol_type = other DNA
ttagacgaccgaaacacctttatgtatccatgcccactgctcaatccaccatgaaagcggaagaacttacaccagggcgg

SEQ ID NO: 46857 - DNA, 80 bp, synthetic construct
  source 1..80: mol_type = other DNA
ttccgtacaatagtttgcgggttatttcctacacagatccaagtgcgaaatataatgagtccagtaatgggagtgattgg

SEQ ID NO: 46858 - DNA, 80 bp, synthetic construct
  source 1..80: mol_type = other DNA
agataaatgtatcacttagatttatatatgactaacatgtggatatatatagaatgtaacactaacatgtatatctatat

SEQ ID NO: 46859 - DNA, 80 bp, synthetic construct
  source 1..80: mol_type = other DNA
cattattatcagggttaagggtgtatcagggtttactaatcaatgaattaattgggttaactggaattatggcattatac

SEQ ID NO: 46860 - DNA, 80 bp, synthetic construct
  source 1..80: mol_type = other DNA
atgttactcaggttaattacagtgaatactaatggcaattatgaatgcagtatcttatcgtattactaaatttaatttag

SEQ ID NO: 46861 - DNA, 80 bp, synthetic construct
  source 1..80: mol_type = other DNA
accagttataataggtataagtttggagtttagttttatctattgggcccattaatgtgaaactgagctgtccctttctt

SEQ ID NO: 46862 - DNA, 80 bp, synthetic construct
  source 1..80: mol_type = other DNA
cacaggaaattgaatttctgaagaagaataaagtctatttcttggaccgtcaaactgttcttgacaaaaatcatgtggcc

SEQ ID NO: 46863 - DNA, 80 bp, synthetic construct
  source 1..80: mol_type = other DNA
ataatgtaaaattaacatgcagacatatagaatgtatttgggaatcaactatgcactaatttacttatacgggtagtact

SEQ ID NO: 46864 - DNA, 80 bp, synthetic construct
  source 1..80: mol_type = other DNA
cgcttcaaagacgacacctcattcgaggacattaatggtatcagacgaccgaaacatctttatgtatccatgcccactgc

SEQ ID NO: 46865 - DNA, 80 bp, synthetic construct
  source 1..80: mol_type = other DNA
gacattttgtgtcacgaacgttcaccctgcgttcagcatcatgtttggatatctgcagctcatcaaccccaccactgaca

SEQ ID NO: 46866 - DNA, 80 bp, synthetic construct
  source 1..80: mol_type = other DNA
agggctgctgttgacggtgttggcctggtgagctgtacctcattaacatcgagagtgcaggctttcgtgaaggagcttca

SEQ ID NO: 46867 - DNA, 80 bp, synthetic construct
  source 1..80: mol_type = other DNA
gcggctgcggcttaccaggcgggctttttgcgtgctttttatgggtgtctgaatacatctgtgtgttccttttcgtcttt

SEQ ID NO: 46868 - DNA, 80 bp, synthetic construct
  source 1..80: mol_type = other DNA
ggatgatgggttgaggtggctgtgcacacgattgagcacaaaatccattggcgcaaaaggacgaaccgtggttctgtttg

SEQ ID NO: 46869 - DNA, 80 bp, synthetic construct
  source 1..80: mol_type = other DNA
gatgtcactcggagggtgaggtactggcagatggattcggaaaaacatattcagcagcagaggcgcgtgagcaggtagcc

SEQ ID NO: 46870 - DNA, 80 bp, synthetic construct
  source 1..80: mol_type = other DNA
ctgtcgggaaaaatcggtgggagtgctcaagtgattgttgtgtggcaacgttgtcgtgagtccaaactccaaaggttgct

SEQ ID NO: 46871 - DNA, 80 bp, synthetic construct
  source 1..80: mol_type = other DNA
gcctgaattggctatggtgtcttatgtgccagaggaggttgttgcaggctttaagcgagtgcgggagcttgagacctacc

SEQ ID NO: 46872 - DNA, 80 bp, synthetic construct
  source 1..80: mol_type = other DNA
cccaatggtgtctatggttatatagaagtatgattgagtctatggggggtattgatgttggcgtgcgcgacgcatctccg

SEQ ID NO: 46873 - DNA, 80 bp, synthetic construct
  source 1..80: mol_type = other DNA
tattgatgttggcgtgcgcgacgcatctccgttaactgagagcggggttgtttatcaggtggaggctgctcagtacggaa

SEQ ID NO: 46874 - DNA, 80 bp, synthetic construct
  source 1..80: mol_type = other DNA
ttgagatcaatgaaattgcactttggaccaaattcaaaattactatggctaggcgattttcacgccatcaccctgtcaca

SEQ ID NO: 46875 - DNA, 80 bp, synthetic construct
  source 1..80: mol_type = other DNA
ttaactgagagcggggttgtttatcaggtggaggctgctcagtacggaatgcgaacgacgcgagtgaggagggcagatgg

SEQ ID NO: 46876 - DNA, 80 bp, synthetic construct
  source 1..80: mol_type = other DNA
cacgcttgattaccagggtctgagttggacatcgttgttgatgctgttgttgggtcactatggggctgaccagacgtatg

SEQ ID NO: 46877 - DNA, 80 bp, synthetic construct
  source 1..80: mol_type = other DNA
aggctcttcgcgtcagttccatgttcatccgtgctcgtgaagtcggctggcgcaagagggggaccttttcctgcatagta

SEQ ID NO: 46878 - DNA, 80 bp, synthetic construct
  source 1..80: mol_type = other DNA
ggctggcgcaagagggggaccttttcctgcatagtatccacatgatgtgacacaccctcatatagggaatccttgcagtc

SEQ ID NO: 46879 - DNA, 80 bp, synthetic construct
  source 1..80: mol_type = other DNA
tgcaaatatgatatttggagcaagctcggtcggatttaagggcgttaatgtgtctactttgccccctgacaccctgacga

SEQ ID NO: 46880 - DNA, 80 bp, synthetic construct
  source 1..80: mol_type = other DNA
ctggcattcgccctcgccccgtagtcacaatggattttgcacagctaaaaggtttttacagcgacttagctcagaaggag

SEQ ID NO: 46881 - DNA, 80 bp, synthetic construct
  source 1..80: mol_type = other DNA
gattacatcatgtatttccatgacatggtgaagtttgtcagccagacaggaggtgctcctgtatcattgagagatgtgtt

SEQ ID NO: 46882 - DNA, 80 bp, synthetic construct
  source 1..80: mol_type = other DNA
cttgtggattagtgaaagcgtgaccgggcctgttgtcattcggacagattgtgttacgggctgcaacaacttatggccaa

SEQ ID NO: 46883 - DNA, 80 bp, synthetic construct
  source 1..80: mol_type = other DNA
gtggtagtggacacttttatttcccttatgagaggaagaccaaattcaggtatggcacgtttgttgagtgtggcaaaaat

SEQ ID NO: 46884 - DNA, 80 bp, synthetic construct
  source 1..80: mol_type = other DNA
ttgacttggtccgaagggcctcagtgggatgtgaagagttatgttgtgggctttaactttgtcacacgagcgaactcgct

SEQ ID NO: 46885 - DNA, 80 bp, synthetic construct
  source 1..80: mol_type = other DNA
gcttggtgggggttttgacgaggtttgctatcgattgatgatgcaggcggaagtgcctcggcaggttgcagagcaaggat

SEQ ID NO: 46886 - DNA, 80 bp, synthetic construct
  source 1..80: mol_type = other DNA
tttacattaaagattatggaaacttttctgggattgttgcacaccaagcttatgaccctgtccgccgagaccatatgctt

SEQ ID NO: 46887 - DNA, 80 bp, synthetic construct
  source 1..80: mol_type = other DNA
tgacacttgaacaagcagttcggaagttggcgtcagaacatcacatgtctagaccgcaattgacttcacgccgagtgcct

SEQ ID NO: 46888 - DNA, 80 bp, synthetic construct
  source 1..80: mol_type = other DNA
ggaatcacagaccagacaaagtatgaggcttacgtggtatgtggtcctttccgaactggacaggtagtggctgattcttt

SEQ ID NO: 46889 - DNA, 80 bp, synthetic construct
  source 1..80: mol_type = other DNA
gcagatggctgaagatctggcgtggcgagagatgcttggtactctgaaaacattgattcacgatgaagcgcgtcaaacca

SEQ ID NO: 46890 - DNA, 80 bp, synthetic construct
  source 1..80: mol_type = other DNA
acacacaaaaagaaagaaaagtttttaagactttttgtgtgcgaataactatgaggaagattaatcattttcctcaaact

SEQ ID NO: 46891 - DNA, 80 bp, synthetic construct
  source 1..80: mol_type = other DNA
atctcatttctcattgaactattctactcgtaggatcctactgggaatataaatcagaacatctgtgacactttgactat

SEQ ID NO: 46892 - DNA, 80 bp, synthetic construct
  source 1..80: mol_type = other DNA
aggaaataattttcaaaactacctgagatcgggtcatttctccaactcattctgcaagtaattgtttagcatcataacaa

SEQ ID NO: 46893 - DNA, 80 bp, synthetic construct
  source 1..80: mol_type = other DNA
cagcgttataatttaaaaatcaagtcttgtaacaaaaataaggataacagaaagaacccttcttatacgggttcactaat

SEQ ID NO: 46894 - DNA, 80 bp, synthetic construct
  source 1..80: mol_type = other DNA
tttataggagaagctccttttgcaagcctaagattccattagagataaccagaatggctaaagccacaggccggtacaac

SEQ ID NO: 46895 - DNA, 80 bp, synthetic construct
  source 1..80: mol_type = other DNA
ttggtaacaccaaaacgggagctagagcaaggagttgtatttagcgacctatgcaacttcctagtgactccaactgtgca

SEQ ID NO: 46896 - DNA, 80 bp, synthetic construct
  source 1..80: mol_type = other DNA
aggatggaaggtttactgggctggacttgagtttgatgtcaaccaaaaaggtattaccctgttaaatcgtcttaaagtga

SEQ ID NO: 46897 - DNA, 80 bp, synthetic construct
  source 1..80: mol_type = other DNA
atgattttgctcctgcatgggcgatgacccggaaccttttcccacacttgttcaaaaaccaacagtctgaagtccaaact

SEQ ID NO: 46898 - DNA, 80 bp, synthetic construct
  source 1..80: mol_type = other DNA
cccatttgggccttgagggtaattcttgccgccgggattcttgaccaattaatggatcattccctcatcgagccactatc

SEQ ID NO: 46899 - DNA, 80 bp, synthetic construct
  source 1..80: mol_type = other DNA
aggggccctgaacttgattgctgattggttactaacaacatctactaatcacttcaacatgagaacgcaacgagtgaagg

SEQ ID NO: 46900 - DNA, 80 bp, synthetic construct
  source 1..80: mol_type = other DNA
accaactgagcatgaggatgttatctcttataaggtcaaatattattaactttataaataagctcgaaactcttcatgtt

SEQ ID NO: 46901 - DNA, 80 bp, synthetic construct
  source 1..80: mol_type = other DNA
gttaattacaagggacttctaagcagtgttgagataggaacaccaagctatgcaatcatcattaccagaactaatatggg

SEQ ID NO: 46902 - DNA, 80 bp, synthetic construct
  source 1..80: mol_type = other DNA
ctatcttgtcgaagttcaggaaccagataaatctgcgatggatatacgacaccctggtcctgtcaagttctctctactgc

SEQ ID NO: 46903 - DNA, 80 bp, synthetic construct
  source 1..80: mol_type = other DNA
atgaatcgaccctcaaacctgttgccacttctaaaccgtcaagcattacttcattgatcatggagttcaatagttctttg

SEQ ID NO: 46904 - DNA, 80 bp, synthetic construct
  source 1..80: mol_type = other DNA
gcaatttaattgccataacaaagattgtatgatagggctaatattgattcaataatctatcgtaggacagaatcattttc

SEQ ID NO: 46905 - DNA, 80 bp, synthetic construct
  source 1..80: mol_type = other DNA
ctgtatgatctcagtttaatctctctttatgcaataattaataaggagcttgtttaaaatgttacaaaagtataatgttt

SEQ ID NO: 46906 - DNA, 80 bp, synthetic construct
  source 1..80: mol_type = other DNA
gaacctctagtatccctgtaaatattttcattcaattgtcagcccttacatgtgtagtcacttgtgtagcatgacactag

SEQ ID NO: 46907 - DNA, 80 bp, synthetic construct
  source 1..80: mol_type = other DNA
tgatgcgaatgacacagtaatatctaattctgttgcccaggcaaggttctctggtcttctgattgtaaagactgttctgg

SEQ ID NO: 46908 - DNA, 80 bp, synthetic construct
  source 1..80: mol_type = other DNA
ttttgccttcaattaatatctaacctagcagtcaatataatgtataactttctatgttcaaagagtagtcaaaacaatgt

SEQ ID NO: 46909 - DNA, 80 bp, synthetic construct
  source 1..80: mol_type = other DNA
gagatccagtttcactcacagcatctattcaatatttacagtatgatgagtccgaattaacacagtagaggtctaggtgt

SEQ ID NO: 46910 - DNA, 80 bp, synthetic construct
  source 1..80: mol_type = other DNA
gttaacagaacgaggaagattaagaaaaagtccataatgctgggtggacaatccttgccaccataggactttttcaattc

SEQ ID NO: 46911 - DNA, 80 bp, synthetic construct
  source 1..80: mol_type = other DNA
ctctactttatgatggctacccaacatacacaatatcctgatgcaagattgtcttccccaatcgttttagaccaatgtga

SEQ ID NO: 46912 - DNA, 80 bp, synthetic construct
  source 1..80: mol_type = other DNA
cctagtgacaagagcatgcggactgtactctgagtattcgctgaaccctaaactaagaacatgccgcttgccgaaacata

SEQ ID NO: 46913 - DNA, 80 bp, synthetic construct
  source 1..80: mol_type = other DNA
tctatagattaaaatatgacgccattgttttacgatttatcagtgatgtccctgtagctacaatcccaatagattacatt

SEQ ID NO: 46914 - DNA, 80 bp, synthetic construct
  source 1..80: mol_type = other DNA
gctccaatgttaataaatgttctggcagatagtaaaaatgcaccattagaacctccctgtttgagcttcctagatgagat

SEQ ID NO: 46915 - DNA, 80 bp, synthetic construct
  source 1..80: mol_type = other DNA
agtcaattatactgtgcaggatgcggcattccttaattattacatgaatcagattaaaacacaggaaggagtaattacag

SEQ ID NO: 46916 - DNA, 80 bp, synthetic construct
  source 1..80: mol_type = other DNA
atcaattaaaacagaacattcgtagggtcattcacaaaaacagatatttatctgctctatttttctggcatgatctctcc

SEQ ID NO: 46917 - DNA, 80 bp, synthetic construct
  source 1..80: mol_type = other DNA
atcctcacccgtcgagggagaatgaaccgaggaaatgtgcgctccacttggtttgtaacgaatgaggttgttgatatcct

SEQ ID NO: 46918 - DNA, 80 bp, synthetic construct
  source 1..80: mol_type = other DNA
atcacatcctacaaaaaacagatctcggagtacgacttcatccactggccaggacagcaaaagtgaagaatgaggtcagt

SEQ ID NO: 46919 - DNA, 80 bp, synthetic construct
  source 1..80: mol_type = other DNA
aggatatggtgattatattttctggaagatccctattgctctattaccaatgaacacagctaatgttcctcatgcatcga

SEQ ID NO: 46920 - DNA, 80 bp, synthetic construct
  source 1..80: mol_type = other DNA
ctgactggtaccaacctaatatcttcaaggaggctattcaaggacacacacatattatttcagtctctacagccgaggtt

SEQ ID NO: 46921 - DNA, 80 bp, synthetic construct
  source 1..80: mol_type = other DNA
cttattatgtgtaaggatcttgtcacaagtcgttttaacacccttctgattgctgagttagccaggttggaagatccagt

SEQ ID NO: 46922 - DNA, 80 bp, synthetic construct
  source 1..80: mol_type = other DNA
gtccgctgattatccactggtagatgatattcaatctctgtataatgcaggagactacttgttgtccatattgggatcgg

SEQ ID NO: 46923 - DNA, 80 bp, synthetic construct
  source 1..80: mol_type = other DNA
aggggtacaaaataatcaagtatctcgagcctctgtgtttggctaagattcaactatgttcccaatatacagaacgaaaa

SEQ ID NO: 46924 - DNA, 80 bp, synthetic construct
  source 1..80: mol_type = other DNA
gggcggtttttaacccagatgcatcttgcagttattcaaacattgcgtgaacttctccttaatagagggttgaaaaaatc

SEQ ID NO: 46925 - DNA, 80 bp, synthetic construct
  source 1..80: mol_type = other DNA
acagctttctaaaatccgtgagttccaccaactgttgctcagacttcgatctacaccacaacaattatgtgaattatttt

SEQ ID NO: 46926 - DNA, 80 bp, synthetic construct
  source 1..80: mol_type = other DNA
caatccaaaagcactggggccatccagttctgcatagtgaaaaggccatacaaaaggttaaaaatcatgcaacagttcta

SEQ ID NO: 46927 - DNA, 80 bp, synthetic construct
  source 1..80: mol_type = other DNA
aaggcattgcgtccgattatcatctttgaaacgtactgtgtattcaagtacagtgttgcaaaacatttctttgatagcca

SEQ ID NO: 46928 - DNA, 80 bp, synthetic construct
  source 1..80: mol_type = other DNA
aggcacttggtacagtgtgatatcagaccgatgtttaacgccgggattgaattcctacattaggcgaaatcaattcccac

SEQ ID NO: 46929 - DNA, 80 bp, synthetic construct
  source 1..80: mol_type = other DNA
tcattcaaggcggctcttggttcacttgccaagcatggagaatatgctccgtttgcacgtctccttaatctttctggagt

SEQ ID NO: 46930 - DNA, 80 bp, synthetic construct
  source 1..80: mol_type = other DNA
cacttccaatgatcaaagatcttctatgggaattttaccatttggatcatcctccattattctccacgaagatcattagt

SEQ ID NO: 46931 - DNA, 80 bp, synthetic construct
  source 1..80: mol_type = other DNA
gatctcagcattttcattaaagaccgtgcaacagcagttgaacaaacctgttgggatgcagttttcgagcctaacgtttt

SEQ ID NO: 46932 - DNA, 80 bp, synthetic construct
  source 1..80: mol_type = other DNA
gggctacagtccaccttatcgattcaacaccaaacgtgtacccgaacaattcctggagcaagaggatttttctattgaga

SEQ ID NO: 46933 - DNA, 80 bp, synthetic construct
  source 1..80: mol_type = other DNA
gtgtcttacaatacgcccaagaacttaggtacctattgccccagaatcgaaatttttctttttcattgaaagaaaaagaa

SEQ ID NO: 46934 - DNA, 80 bp, synthetic construct
  source 1..80: mol_type = other DNA
ttaaatgttggtaggacatttggaaaattgccttatttaactaggaatgtccaaaccctctgcgaagcattacttgcaga

SEQ ID NO: 46935 - DNA, 80 bp, synthetic construct
  source 1..80: mol_type = other DNA
tggtttggctaaagcctttccaagcaacatgatggttgtcacagagagggaacaaaaggagagcctccttcaccaagcat

SEQ ID NO: 46936 - DNA, 80 bp, synthetic construct
  source 1..80: mol_type = other DNA
cttggcatcatacgagtgatgatttcggagagcatgccacagttcgcgggagtagttttgtcacagacctagagaaatat

SEQ ID NO: 46937 - DNA, 80 bp, synthetic construct
  source 1..80: mol_type = other DNA
tggctttcaggtatgaattcacagctcccttcatcaaatattgcaaccaatgctatggggttcgcaatgtctttgattgg

SEQ ID NO: 46938 - DNA, 80 bp, synthetic construct
  source 1..80: mol_type = other DNA
atgcacttcctaattccgcaatgttacatgcatgttagtgattattataacccaccacataatgtaactttagagaatag

SEQ ID NO: 46939 - DNA, 80 bp, synthetic construct
  source 1..80: mol_type = other DNA
ggaatatcctcccgaaggaccaagtgcttatcgaggccaccttggtggtattgaggggcttcaacagaagttatggacta

SEQ ID NO: 46940 - DNA, 80 bp, synthetic construct
  source 1..80: mol_type = other DNA
caacaacttggaacatgggctttatccacaactttcagccatcgctttgggtgttgcaactgcccacgggagtacgcttg

SEQ ID NO: 46941 - DNA, 80 bp, synthetic construct
  source 1..80: mol_type = other DNA
gcatctcatgtgctcaaatttcattggtagagatcaagaccggattcaaattgcgatcagcagtcatgggggataatcaa

SEQ ID NO: 46942 - DNA, 80 bp, synthetic construct
  source 1..80: mol_type = other DNA
tgtatcacagtattatcagtctttccactagaatccagtccgaatgagcaagagagatgtgcagaagacaatgcagccag

SEQ ID NO: 46943 - DNA, 80 bp, synthetic construct
  source 1..80: mol_type = other DNA
agtagctgctagcttggccaaagtcacaagtgcctgtgggatattcctcaagcctgatgagactttcgtacactcaggct

SEQ ID NO: 46944 - DNA, 80 bp, synthetic construct
  source 1..80: mol_type = other DNA
ttatctattttggcaaaaagcaatacttaaacggaattcaattgcctcaatcactcaagacagcagctaggatggcccct

SEQ ID NO: 46945 - DNA, 80 bp, synthetic construct
  source 1..80: mol_type = other DNA
ctctcagatgcaatttttgatgacttgcagggtacacttgccagtataggaactgcctttgagcgatcaatctccgaaac

SEQ ID NO: 46946 - DNA, 80 bp, synthetic construct
  source 1..80: mol_type = other DNA
tagacatattttaccatgtcgtgttgcagctgcctttcatacatatttctctgttcggatcttacaacatcatcaccttg

SEQ ID NO: 46947 - DNA, 80 bp, synthetic construct
  source 1..80: mol_type = other DNA
gcttccataaaggttcagaccttggacaattggcaatcaataaacctcttgattttgggaccattgcactatccttagca

SEQ ID NO: 46948 - DNA, 80 bp, synthetic construct
  source 1..80: mol_type = other DNA
gttccccaggtactgggtggattatccttcctaaatccagaaaaatgtctttatcgcaacctgggtgaccctgtgacttc

SEQ ID NO: 46949 - DNA, 80 bp, synthetic construct
  source 1..80: mol_type = other DNA
aggcctattccagttgaagcattatctatcaatggtaggtatgagtgatatctttcacgcacttgttgcaaaaagtccag

SEQ ID NO: 46950 - DNA, 80 bp, synthetic construct
  source 1..80: mol_type = other DNA
ggaattgtagcgcaattgactttgttctaaacccaggagggttaaatgtccctggatcacaggatctaacatctttcctt

SEQ ID NO: 46951 - DNA, 80 bp, synthetic construct
  source 1..80: mol_type = other DNA
ctggtgtgaatgtaggggagcaatatcagcaactgcgtgaggctgctactgaggctgaaaagcaactccaacaatatgct

SEQ ID NO: 46952 - DNA, 80 bp, synthetic construct
  source 1..80: mol_type = other DNA
cgtcagattgtcagaaggagtatcacactttcggcaaggaataagttaatcaacacgctgtttcatgcctctgcagatct

SEQ ID NO: 46953 - DNA, 80 bp, synthetic construct
  source 1..80: mol_type = other DNA
tgaagatgaattagtttgtaaatggttactttcttcaacgcccgtcatgagccgtttcgcagccgatattttctcacgaa

SEQ ID NO: 46954 - DNA, 80 bp, synthetic construct
  source 1..80: mol_type = other DNA
caccaagcgggaaaagattacaaatcttgggatatctcgagggaaccagaactttattagcatctagaatgataagcaat

SEQ ID NO: 46955 - DNA, 80 bp, synthetic construct
  source 1..80: mol_type = other DNA
aatgcagagacaccaatcttagagagactcagaaagataacacttcaaagatggaatttatggtttagttacctagatca

SEQ ID NO: 46956 - DNA, 80 bp, synthetic construct
  source 1..80: mol_type = other DNA
ttgtgactcagctttaatggaagcaattcaaccaattaggtgtactgttgatattgctcaaattcttagagaatactcct

SEQ ID NO: 46957 - DNA, 80 bp, synthetic construct
  source 1..80: mol_type = other DNA
gggctcatattcttgacggtagacagttaataggggcaacattgccatgtatacctgagcagttccaaaccacatggtta

SEQ ID NO: 46958 - DNA, 80 bp, synthetic construct
  source 1..80: mol_type = other DNA
aaaccttacgagcaatgtgtggaatgttcatccacaaacaattctagtccatatgtatcagttgcattaaaaaggaacgt

SEQ ID NO: 46959 - DNA, 80 bp, synthetic construct
  source 1..80: mol_type = other DNA
ggtcagcgcttggcctgacgcatctagattggggtggacgattggtgatgggattccctatataggctcaagaactgagg

SEQ ID NO: 46960 - DNA, 80 bp, synthetic construct
  source 1..80: mol_type = other DNA
acaagataggtcagcccgctattaagccgaggtgcccatcagctgcattgagggaagctattgaattgacctctaggtta

SEQ ID NO: 46961 - DNA, 80 bp, synthetic construct
  source 1..80: mol_type = other DNA
acctgggtcactcaaggtagtgcaaatagcgatcagttaattcgtccttttcttgaggcaagagtgaacttgagtgtaca

SEQ ID NO: 46962 - DNA, 80 bp, synthetic construct
  source 1..80: mol_type = other DNA
ctgaaacacgtgagttggataaccttgggcttgatgaacaggagaagaagattctcatgagcttccaccagaagaagaat

SEQ ID NO: 46963 - DNA, 80 bp, synthetic construct
  source 1..80: mol_type = other DNA
agaaattcttcaaatgacaccctcacattattccggtaatattgtgcatcggtataatgatcagtatagccctcactcct

SEQ ID NO: 46964 - DNA, 80 bp, synthetic construct
  source 1..80: mol_type = other DNA
ccttgtatgacattaggtttcggaacacctgtacatcctctattcaatatcacagggctcatattcacctgacagattgt

SEQ ID NO: 46965 - DNA, 80 bp, synthetic construct
  source 1..80: mol_type = other DNA
tgtacgagggaagtaccagcccaatacttaacatacacaaccacgctaaatctagatttgagtaagtatcgtaataatga

SEQ ID NO: 46966 - DNA, 80 bp, synthetic construct
  source 1..80: mol_type = other DNA
actgatttatgattcagagccactaagaggaggtctaaactgcaacttatcgattgacagtcctttgatgaagggcccac

SEQ ID NO: 46967 - DNA, 80 bp, synthetic construct
  source 1..80: mol_type = other DNA
gtttaaatattattgaggatgacttaatacggttgccacatttatccggttgggaattagcaaaaacagttttgcaatcc

SEQ ID NO: 46968 - DNA, 80 bp, synthetic construct
  source 1..80: mol_type = other DNA
ataatttctgatagtagcaattcatcaacagatcccattagcagcggtgaaacaagatcctttacaacccacttcttaac

SEQ ID NO: 46969 - DNA, 80 bp, synthetic construct
  source 1..80: mol_type = other DNA
cgtatcctaaaatagggctcttatacagttttggagccctcataagtttttatttgggtaatactatcttgtgcacgaaa

SEQ ID NO: 46970 - DNA, 80 bp, synthetic construct
  source 1..80: mol_type = other DNA
aagatcggacttacagaatttctatactatctccagaaccagatccacaacttatcacatagatcccttcgaatcttcaa

SEQ ID NO: 46971 - DNA, 80 bp, synthetic construct
  source 1..80: mol_type = other DNA
cattcctaaagtgttgcgaaggtatgtgggtcgtattgcttggccttttcctaacctggctcctcctacaattctaacct

SEQ ID NO: 46972 - DNA, 80 bp, synthetic construct
  source 1..80: mol_type = other DNA
gagatcagcttccagcagactaatgcaatggtaaccttaaggaaagaacggctggctaaattgaccgaagccatcacgac

SEQ ID NO: 46973 - DNA, 80 bp, synthetic construct
  source 1..80: mol_type = other DNA
accgacattcagacactcaagtgtcatgtctaggttgatggatatagaccccaacttctcaatatatattggtgggactg

SEQ ID NO: 46974 - DNA, 80 bp, synthetic construct
  source 1..80: mol_type = other DNA
caggtgatcgtggattatcggatgctgcaagattatttctccgaatcgcaatttcaactttcttgagctttgttgaggag

SEQ ID NO: 46975 - DNA, 80 bp, synthetic construct
  source 1..80: mol_type = other DNA
tgggttatctttaggaaggcaaacattccactatgggttgtctatcctctcgaaggccaacgccctgatcctcctggtga

SEQ ID NO: 46976 - DNA, 80 bp, synthetic construct
  source 1..80: mol_type = other DNA
atttttaaaccgagtaaaatctttaattgttgggattgaggatgataaaaataaaggctctatactttcaagatctgaag

SEQ ID NO: 46977 - DNA, 80 bp, synthetic construct
  source 1..80: mol_type = other DNA
agaagggctcttcaaatctagtttataattgcaaaagtacagcaagcaattttttccacgcatcattggcttattggaga

SEQ ID NO: 46978 - DNA, 80 bp, synthetic construct
  source 1..80: mol_type = other DNA
ggtcgacatagacctaagaagactataggtgcaactaaagcgacaacagctccacacatcattttgccgctaggaaattc

SEQ ID NO: 46979 - DNA, 80 bp, synthetic construct
  source 1..80: mol_type = other DNA
tgatcgaccgcctggcctagatcttaatcagagcaatgatacttttattcctaccagaattaaacagatagtccaaggag

SEQ ID NO: 46980 - DNA, 80 bp, synthetic construct
  source 1..80: mol_type = other DNA
actctagaaatgacagaacaaccaccacgagacttccacccaaaagtaggtccaccccaacatcagcaaccgagcctcct

SEQ ID NO: 46981 - DNA, 80 bp, synthetic construct
  source 1..80: mol_type = other DNA
acaaaaatatatgagggttcgacaacctatcgaggaaaatcaacagatacacatttggatgagggtcataatgccaaaga

SEQ ID NO: 46982 - DNA, 80 bp, synthetic construct
  source 1..80: mol_type = other DNA
gttcccattcaatccacatcgtttagtagtaccattttttaaattaacaaaagatggggaatacagtatcgaaccttccc

SEQ ID NO: 46983 - DNA, 80 bp, synthetic construct
  source 1..80: mol_type = other DNA
ctgaagaaagccgcagtaatataaaagggttacttcaacatttaagaaccatggttgatactaccatatattgtcgcttc

SEQ ID NO: 46984 - DNA, 80 bp, synthetic construct
  source 1..80: mol_type = other DNA
catcgaagatcaaggttggagaccgttatcctgatgacaatgatattccatttcccgggccgatctatgatgacactcac

SEQ ID NO: 46985 - DNA, 80 bp, synthetic construct
  source 1..80: mol_type = other DNA
actgggattgtttcatcaatgcattataaattagatgaagtactatgggaatataataaatttgaatcagctgtaaccct

SEQ ID NO: 46986 - DNA, 80 bp, synthetic construct
  source 1..80: mol_type = other DNA
agcagagggggagggttcaggtgctttactactgatccaaaaatacggcgttaagaagttatttttgaatacacttgcta

SEQ ID NO: 46987 - DNA, 80 bp, synthetic construct
  source 1..80: mol_type = other DNA
ctgaacatagtattgagagtgaagtgatatcaggttacaccaccccaagaatgctactctcagttatgcctagaacacat

SEQ ID NO: 46988 - DNA, 80 bp, synthetic construct
  source 1..80: mol_type = other DNA
cgtggtgagctagaggtcatattaaataactcagctagtcaaataactgatatcacacaccgagattggttttcaaatca

SEQ ID NO: 46989 - DNA, 80 bp, synthetic construct
  source 1..80: mol_type = other DNA
aaaaaataggattccaaatgatgttgatattattaccatggatgctgaaactacagaaaatttagatcgttcaagattat

SEQ ID NO: 46990 - DNA, 80 bp, synthetic construct
  source 1..80: mol_type = other DNA
atgaagcagtatatacgattatttgtaatcatatcaatcctaaaactttaaaagtggtcatcttaaaagtcttcctcagc

SEQ ID NO: 46991 - DNA, 80 bp, synthetic construct
  source 1..80: mol_type = other DNA
gatttggatgggatgtgctggattaacaattatcttgctcctatgtttggatcaggatacttaatcaaacctataacatc

SEQ ID NO: 46992 - DNA, 80 bp, synthetic construct
  source 1..80: mol_type = other DNA
aagtgcaaggtcaagtgagtggtatttatgcttatctaatctactttcaactttgagaactactcagcatcaaacccaag

SEQ ID NO: 46993 - DNA, 80 bp, synthetic construct
  source 1..80: mol_type = other DNA
caaactgtcttcatgtcgtacaatgtgctcttcaacagcaagttcaaagagggtcatattggctaagtcatctcaccaaa

SEQ ID NO: 46994 - DNA, 80 bp, synthetic construct
  source 1..80: mol_type = other DNA
tacaccacaagtagattgcacaatagttatattgcatttggttttccttcgttagagaaggtcctatatcatagatataa

SEQ ID NO: 46995 - DNA, 80 bp, synthetic construct
  source 1..80: mol_type = other DNA
cccaatccctctgatgacaatcctgatgattcacgtgatacaactattccaggtggtgttgttgacccgtatgatgatga

SEQ ID NO: 46996 - DNA, 80 bp, synthetic construct
  source 1..80: mol_type = other DNA
tcttgttgattcgagaaatggaccattggtttctatcacaagacaccttgccctcctccaaactgagatccgggagttgg

SEQ ID NO: 46997 - DNA, 80 bp, synthetic construct
  source 1..80: mol_type = other DNA
taactgattataatcagctgcgacaaagtcgaacccagacttatcatttcataaaaacatccaagggacggataactaaa

SEQ ID NO: 46998 - DNA, 80 bp, synthetic construct
  source 1..80: mol_type = other DNA
ctagtgaatgattatctaagatttgagttggttatacgggctcttaaaaataattctacatggcaccatgagttgtactt

SEQ ID NO: 46999 - DNA, 80 bp, synthetic construct
  source 1..80: mol_type = other DNA
actaccagaacttataggtgtttgccatcgatttaatcatacacgcaactgtacatgcagtgaaaggttcctggttcaaa

SEQ ID NO: 47000 - DNA, 80 bp, synthetic construct
  source 1..80: mol_type = other DNA
ccttatatctacaccggatgagtgatgctgagataaaacttatggaccggctcaccagcctagtcaatatgtttcccgaa

SEQ ID NO: 47001 - DNA, 80 bp, synthetic construct
  source 1..80: mol_type = other DNA
ggtttcaggtctagttcagtctaattctaactgcatctcaggttctagaagtattttaaataaccaggtatatatcaaag

SEQ ID NO: 47002 - DNA, 80 bp, synthetic construct
  source 1..80: mol_type = other DNA
tcaatacaagtgtaagaacaatatgcaagggaccacatttggcattagtttattgactcttccaatatacagcgttggaa

SEQ ID NO: 47003 - DNA, 80 bp, synthetic construct
  source 1..80: mol_type = other DNA
gcatcgattcaaggtttcgaagacactctattgattatgttgataatgtaaataataatttttcctagctattatgacta

SEQ ID NO: 47004 - DNA, 80 bp, synthetic construct
  source 1..80: mol_type = other DNA
aaataaacaaatctataacgaacatcacaaccaaattgttgccctagttcatatattaaattcaaatttagaagctaggt

SEQ ID NO: 47005 - DNA, 80 bp, synthetic construct
  source 1..80: mol_type = other DNA
tgactccagttacataagtattaagaaaaaattactaagactaatactcttatgttaagaactagtaatatgtttcacat

SEQ ID NO: 47006 - DNA, 80 bp, synthetic construct
  source 1..80: mol_type = other DNA
gagtaataattatcctgactacgaggattcggctgaaggcaccacaggagatcttgatctcttcaatttggacgacgacg

SEQ ID NO: 47007 - DNA, 80 bp, synthetic construct
  source 1..80: mol_type = other DNA
gacaggttatttctgatactaaattgcaatttcacttttaaagctaagtttaatacttatacagccaaaatatttcctag

SEQ ID NO: 47008 - DNA, 80 bp, synthetic construct
  source 1..80: mol_type = other DNA
ggccggtgggaataacataagaagaacacggtcaatgaaccttttattccaaccaggtagttgattgataatctacaaat

SEQ ID NO: 47009 - DNA, 80 bp, synthetic construct
  source 1..80: mol_type = other DNA
tccataagatgttcttacgacatttttttgtttttaatctcaatgtcaatgatttaattagtagtaagaaaaaagttaca

SEQ ID NO: 47010 - DNA, 80 bp, synthetic construct
  source 1..80: mol_type = other DNA
gaaaaaagttacattagaggtgcaggaagatcttaacctcaccaggaaaattaagcgcacacaaataaattaaaaaatct

SEQ ID NO: 47011 - DNA, 80 bp, synthetic construct
  source 1..80: mol_type = other DNA
atgatgacagccgaccaggaccaccagacagggggcagaacaaggagagggcggcccggacatatggcctccaagatccg

SEQ ID NO: 47012 - DNA, 80 bp, synthetic construct
  source 1..80: mol_type = other DNA
accttggacggagcgaaaaaggtgccggagttgaccccaggttcccatcaaccaggcaacctccacatcaccaagtcggg

SEQ ID NO: 47013 - DNA, 80 bp, synthetic construct
  source 1..80: mol_type = other DNA
ttcaaacaccaaccaaccacaaggcaatatgtcatctactctccatagtatgacccctatacaggaagaatcagagcccg

SEQ ID NO: 47014 - DNA, 80 bp, synthetic construct
  source 1..80: mol_type = other DNA
atgatcaaaaagataatgatgacgagagtctcacatcccttgactctgaaggtgacgaagatggtgagagcatctctgag

SEQ ID NO: 47015 - DNA, 80 bp, synthetic construct
  source 1..80: mol_type = other DNA
gagaacaccccaactgtagctccaccagcaccagtctacaaagacactggagtagacactaatcagcagaatggaccaag

SEQ ID NO: 47016 - DNA, 80 bp, synthetic construct
  source 1..80: mol_type = other DNA
cagtactgtagatagtcaaggttctgaaagtgaagctctcccaatcaactctaaaaagagttccgcactagaagaaacat

SEQ ID NO: 47017 - DNA, 80 bp, synthetic construct
  source 1..80: mol_type = other DNA
tcttgataagtgtggttaccagagtaatagactaaatttgtcctggtagttagcattttctagtaagaccgatactatcc

SEQ ID NO: 47018 - DNA, 80 bp, synthetic construct
  source 1..80: mol_type = other DNA
attatcatctcctaaaaacacagggtccatttgaggcaatcaattattatcacctaatgagtgatgaacccattgctttt

SEQ ID NO: 47019 - DNA, 80 bp, synthetic construct
  source 1..80: mol_type = other DNA
agcactgaaagtggcaaggaatatatctttccagactcccttgaagaagcctacccgccgtggttgagtgagaaggaggc

SEQ ID NO: 47020 - DNA, 80 bp, synthetic construct
  source 1..80: mol_type = other DNA
cttagagaaggaaaatcgttatctggtcattgatggccagcaattcttctggccggtaatgagcctacaggacaagttcc

SEQ ID NO: 47021 - DNA, 80 bp, synthetic construct
  source 1..80: mol_type = other DNA
ttgccgttcttcaacatgactgaggacctatgattggtggatcttgtttattccgagcctgattataattgttctgataa

SEQ ID NO: 47022 - DNA, 80 bp, synthetic construct
  source 1..80: mol_type = other DNA
ttcaagtataagcacctaccccgaaatataaaccctatcttagttataaggaaattaaataaataacctgtaagttatag

SEQ ID NO: 47023 - DNA, 80 bp, synthetic construct
  source 1..80: mol_type = other DNA
gactacgaagagctgcttgtgtcaatttatcatgggttgatacccgtaccgcaagaatcattatttagtagttttggtca

SEQ ID NO: 47024 - DNA, 80 bp, synthetic construct
  source 1..80: mol_type = other DNA
gcttctgatatgtaccaataagaaaacattatagcattaaaacataagatatctttcaatgagcttaggaggataatatc

SEQ ID NO: 47025 - DNA, 80 bp, synthetic construct
  source 1..80: mol_type = other DNA
ctgataaattctatagaacttaagattaagaaaaaatccatgatgaagattaaaaccttcatcatcttttaaaaagagag

SEQ ID NO: 47026 - DNA, 80 bp, synthetic construct
  source 1..80: mol_type = other DNA
ctatttctgatctaaatgttcttattaatgtcaaagagctattagtttgtatcctcttagcctagacgctgcctaacata

SEQ ID NO: 47027 - DNA, 80 bp, synthetic construct
  source 1..80: mol_type = other DNA
taagccatgcagcaggataagacttatagacatcatggacccgaagtgtctggctggttttctgagcaattaatgaccgg

SEQ ID NO: 47028 - DNA, 80 bp, synthetic construct
  source 1..80: mol_type = other DNA
caagtctcaagagagggtgagaggagggccccgaggtatccctttagtccacaaaatctagccaattttagctaagtgga

SEQ ID NO: 47029 - DNA, 80 bp, synthetic construct
  source 1..80: mol_type = other DNA
caaaataccgctaacagaggtgtttgttgacgttgaaaccaagccaagtcctaccccgataaccattattagtaagaatc

SEQ ID NO: 47030 - DNA, 80 bp, synthetic construct
  source 1..80: mol_type = other DNA
ctaaaacaacgcgtaaaagtgataagcaagtccaaacagatgatgctagtagcttattgacagaagaggtcaagactgcc

SEQ ID NO: 47031 - DNA, 80 bp, synthetic construct
  source 1..80: mol_type = other DNA
ataaattcggtgatatcggctgtgcgtcggcaaaccaatgctattgaatcactagaaagtcgaatagcaaaccttgaggc

SEQ ID NO: 47032 - DNA, 80 bp, synthetic construct
  source 1..80: mol_type = other DNA
cagcttaaaaccagttcaagatatggcaaagaccatttcatccctgaatcgcagttgtgctgaaatggttgcaaaatacg

SEQ ID NO: 47033 - DNA, 80 bp, synthetic construct
  source 1..80: mol_type = other DNA
acctactggtgatgaccactggacgcgcaactgccactgctgcagcaacagaagcatattggaatgaacatggacaagca

SEQ ID NO: 47034 - DNA, 80 bp, synthetic construct
  source 1..80: mol_type = other DNA
cctccaggcccatcattgtacgaagatgatgctatcaaggctaaattgaaagatccgaacgggaaggttccagagagtgt

SEQ ID NO: 47035 - DNA, 80 bp, synthetic construct
  source 1..80: mol_type = other DNA
caaacaggcctacacaaatctggatagcacaagtgccctcaatgaggaaaattttgggcgaccttacatctcagcaaaag

SEQ ID NO: 47036 - DNA, 80 bp, synthetic construct
  source 1..80: mol_type = other DNA
atctcaaggaaatcatctatgatcatctcccaggatttgggacagcctttcatcagctggtgcaggttatctgcaaaatt

SEQ ID NO: 47037 - DNA, 80 bp, synthetic construct
  source 1..80: mol_type = other DNA
ggtaaggataataatatcctagacataatccatgcagaattccaagcaagcttggctgagggagactccccccagtgtgc

SEQ ID NO: 47038 - DNA, 80 bp, synthetic construct
  source 1..80: mol_type = other DNA
attaatccagataacaaaacggatccctactttccaagatgcctctcctccaatcgtgcatataaagtctcgaggagata

SEQ ID NO: 47039 - DNA, 80 bp, synthetic construct
  source 1..80: mol_type = other DNA
ctgattaccttcatcacacgctatctactaagggtttacctgagagcctacaacatggataaacgggtgagaggttcatg

SEQ ID NO: 47040 - DNA, 80 bp, synthetic construct
  source 1..80: mol_type = other DNA
tacccaaagcctgtcagaaaagcctccggccggtcccaccgtcaccaaagatcgatagaggttgggtctgtatttttcaa

SEQ ID NO: 47041 - DNA, 80 bp, synthetic construct
  source 1..80: mol_type = other DNA
tttcaagacgggaagacccttgggctaaaaatatgatacagaagcaaggtaagctcattttgcgatggcaaagtgatact

SEQ ID NO: 47042 - DNA, 80 bp, synthetic construct
  source 1..80: mol_type = other DNA
tatgactgtttggaatcaagttagactcatagtctatcacgtcataagcttataagtcagttaaaaatttatcctctatc

SEQ ID NO: 47043 - DNA, 80 bp, synthetic construct
  source 1..80: mol_type = other DNA
ctaatcaattgatgatgctgtcaatagggagattcccctgtattgtaataaaacctcattaacatatctcccctgcttgg

SEQ ID NO: 47044 - DNA, 80 bp, synthetic construct
  source 1..80: mol_type = other DNA
tactatgtagaaacccttgaataaatcaaaattgatgaagattaagaaaaagagggattttctcaggaaaaatcttcttt

SEQ ID NO: 47045 - DNA, 80 bp, synthetic construct
  source 1..80: mol_type = other DNA
cttaccttcatcttatttagataaatctaggatttagggaaaatgagaagggttactgtgccgactgcaccacctgcata

SEQ ID NO: 47046 - DNA, 80 bp, synthetic construct
  source 1..80: mol_type = other DNA
tgctgacattggctatcctatgagcatgcttccaatcaagtcaagcagggctgtaagtggaattcaacagaaacaagagg

SEQ ID NO: 47047 - DNA, 80 bp, synthetic construct
  source 1..80: mol_type = other DNA
tccttcctggaatggatacaccatcgaactctatgagacctgttgctgatgataacattgatcacacaagtcatacccca

SEQ ID NO: 47048 - DNA, 80 bp, synthetic construct
  source 1..80: mol_type = other DNA
aacggagtggcctcagcattcatcttggaggcaactgtcaatgtgatctcggggcccaaagtcctcatgaaacaaatccc

SEQ ID NO: 47049 - DNA, 80 bp, synthetic construct
  source 1..80: mol_type = other DNA
tatttggttgccactcggaattgctgaccaaaaaacatacagctttgactcaacaacagcagcaattatgctcgcatcct

SEQ ID NO: 47050 - DNA, 80 bp, synthetic construct
  source 1..80: mol_type = other DNA
ggccctgggaggacaatctgaggttgatcttgactaccacaagatattaacagccgggctttcagtccaacaggggattg

SEQ ID NO: 47051 - DNA, 80 bp, synthetic construct
  source 1..80: mol_type = other DNA
acacgatcactcattttggaaaggccaacaaccccctcgtcagagtgaatcgacttggtcaaggaataccggatcaccca

SEQ ID NO: 47052 - DNA, 80 bp, synthetic construct
  source 1..80: mol_type = other DNA
ctcagattgctcaggatggggaaccaggctttccttcaagagtttgtgctaccaccagttcaactgccgcaatatttcac

SEQ ID NO: 47053 - DNA, 80 bp, synthetic construct
  source 1..80: mol_type = other DNA
ccgagcaacctttcaggagcactccgtccagggctctcatttcacccgaaactgagacccgttctacttccaggcaagac

SEQ ID NO: 47054 - DNA, 80 bp, synthetic construct
  source 1..80: mol_type = other DNA
gggaaagaaagggcatgtttctgatctgaccgccccagacaaaatccagacaattgtgaacctgatgcaagatttcaaga

SEQ ID NO: 47055 - DNA, 80 bp, synthetic construct
  source 1..80: mol_type = other DNA
ttgtgccaatcgacccagccaagagcatcattgggatcgaggttccagaattgctggtccacaagctcaccgggaagaaa

SEQ ID NO: 47056 - DNA, 80 bp, synthetic construct
  source 1..80: mol_type = other DNA
atgagtcagaagaacggacagcctataattcctgtcttactcccaaaatacattgggctagatccaatctcgcccggaga

SEQ ID NO: 47057 - DNA, 80 bp, synthetic construct
  source 1..80: mol_type = other DNA
cctaactatggtcataacaccagattatgatgattgtcattcacccgccagttgctcttatctcagtgaaaagtgattct

SEQ ID NO: 47058 - DNA, 80 bp, synthetic construct
  source 1..80: mol_type = other DNA
cacaaagtgagagagacacctccagtaaagaaatcaaatcttatctatagcaactcaatcgacttttggaaggctagcag

SEQ ID NO: 47059 - DNA, 80 bp, synthetic construct
  source 1..80: mol_type = other DNA
tacatatactatgggacaactcaaccctcctgccaaaatgcactaatcgggtcaaggaactctcactgatcaagtctaaa

SEQ ID NO: 47060 - DNA, 80 bp, synthetic construct
  source 1..80: mol_type = other DNA
tccaggatagaaccagcccaaagggtctcctccaagtctcccacaagcttagccaatcaatttacatgcgtaagcgatcc

SEQ ID NO: 47061 - DNA, 80 bp, synthetic construct
  source 1..80: mol_type = other DNA
tgcgacagagagtcatcccggtatatgtcgtgaatgatcttgagggtatttgtcaacatatcattcaggcttttgaagca

SEQ ID NO: 47062 - DNA, 80 bp, synthetic construct
  source 1..80: mol_type = other DNA
atacttaatccaattagtgttcgatgctcacccctccaagcctccctcctggcaaatcaacctagctgtaccaggagatt

SEQ ID NO: 47063 - DNA, 80 bp, synthetic construct
  source 1..80: mol_type = other DNA
ccctcagtctccttctcaaatgacctgatacttgagggttacatcctcaccaatctatgcttatttaacccaaacataaa

SEQ ID NO: 47064 - DNA, 80 bp, synthetic construct
  source 1..80: mol_type = other DNA
aagcaatgcctttacatgattgcactattaagaaaaacaaatttgatgaagattaagcctgattaaggcccaaccttcat

SEQ ID NO: 47065 - DNA, 80 bp, synthetic construct
  source 1..80: mol_type = other DNA
ctttttaccataatcttgttctcaataccatttaataggggtatacttgccaaagcgcccccatcctcaggatctcgcaa

SEQ ID NO: 47066 - DNA, 80 bp, synthetic construct
  source 1..80: mol_type = other DNA
tggagggtcttagcctactccaattgcccagagataaatttcgaaaaagctctttctttgtttgggtcatcatcttattt

SEQ ID NO: 47067 - DNA, 80 bp, synthetic construct
  source 1..80: mol_type = other DNA
caaaaggccttttccatgcctttgggtgttgtgaccaacagcactttagaagtaacagagattgaccagctagtctgcaa

SEQ ID NO: 47068 - DNA, 80 bp, synthetic construct
  source 1..80: mol_type = other DNA
ggatcatcttgcatccactgaccagctgaaatcagttggtctcaacctcgaggggagcggagtatctactgatatcccat

SEQ ID NO: 47069 - DNA, 80 bp, synthetic construct
  source 1..80: mol_type = other DNA
ctgcgacaaagcgttggggcttcagatctggtgtgcctcccaaggtggtcagctatgaagcaggagaatgggctgaaaat

SEQ ID NO: 47070 - DNA, 80 bp, synthetic construct
  source 1..80: mol_type = other DNA
gcttacccccaccgccggatggtgtcagaggctttccaaggtgccgctatgttcacaaagcccaaggaaccgggccctgc

SEQ ID NO: 47071 - DNA, 80 bp, synthetic construct
  source 1..80: mol_type = other DNA
ccgggtgactatgcctttcacaaggatggagctttcttcctctatgacaggctggcttcaactgtaatttacagaggagt

SEQ ID NO: 47072 - DNA, 80 bp, synthetic construct
  source 1..80: mol_type = other DNA
tttccaggataatgctgatagcttccttttacttttatgtttacatcatgcctaccaaggagatcataggctcttcctca

SEQ ID NO: 47073 - DNA, 80 bp, synthetic construct
  source 1..80: mol_type = other DNA
caattttgctgagggggtaattgcattcttgatattggctaaaccaaaggaaacgttccttcaatcaccccccattcgag

SEQ ID NO: 47074 - DNA, 80 bp, synthetic construct
  source 1..80: mol_type = other DNA
aggcagtaaactacactgaaaatacatcaagttactatgccacatcctacttggagtacgaaatcgaaaattttggtgct

SEQ ID NO: 47075 - DNA, 80 bp, synthetic construct
  source 1..80: mol_type = other DNA
caacactccacgacccttttcaaaattaacaataatacttttgttcttctggacaggccccacacgcctcagttcctttt

SEQ ID NO: 47076 - DNA, 80 bp, synthetic construct
  source 1..80: mol_type = other DNA
ccagctgaatgataccattcaccttcaccaacagttgagcaacacaactgggaaactaatttggacactagatgctaata

SEQ ID NO: 47077 - DNA, 80 bp, synthetic construct
  source 1..80: mol_type = other DNA
tcaatgctgatattggtgaatgggctttttgggaaaataaaaaaatctctccgaacaactacgtggagaagagctgtctt

SEQ ID NO: 47078 - DNA, 80 bp, synthetic construct
  source 1..80: mol_type = other DNA
tcgaaactttatcgctcaacgagacagaagacgatgatgcgacatcgtcgagaactacaaagggaagaatctccgaccgg

SEQ ID NO: 47079 - DNA, 80 bp, synthetic construct
  source 1..80: mol_type = other DNA
gccaccaggaagtattcggacctggttccaaaggattcccctgggatggtttcattgcacgtaccagaaggggaaacaac

SEQ ID NO: 47080 - DNA, 80 bp, synthetic construct
  source 1..80: mol_type = other DNA
attgccgtctcagaattcgacagaaggtcgaagagtagatgtgaatactcaggaaactatcacagagacaactgcaacaa

SEQ ID NO: 47081 - DNA, 80 bp, synthetic construct
  source 1..80: mol_type = other DNA
tcataggcactaacggtaacaacatgcagatctccaccatcgggacaggactgagctccagccaaatcctgagttcctca

SEQ ID NO: 47082 - DNA, 80 bp, synthetic construct
  source 1..80: mol_type = other DNA
ccgaccatggcaccaagccctgagactcagacctccacaacctacacaccaaaactaccagtgatgaccaccgaggaatc

SEQ ID NO: 47083 - DNA, 80 bp, synthetic construct
  source 1..80: mol_type = other DNA
aaagtgatgcagttcaatatttagagggccatggcttcaggtttgaggtccgagaaaaggagaatgtgcaccgtctggat

SEQ ID NO: 47084 - DNA, 80 bp, synthetic construct
  source 1..80: mol_type = other DNA
aacaacaccaccgagaaactctcctggctcaacaacagaagcacccactctcaccaccccagagaatataacaacagcgg

SEQ ID NO: 47085 - DNA, 80 bp, synthetic construct
  source 1..80: mol_type = other DNA
ttaaaactgttttgccacaagagtccacaagcaacggtctaataacttcaacagtaacagggattcttgggagccttgga

SEQ ID NO: 47086 - DNA, 80 bp, synthetic construct
  source 1..80: mol_type = other DNA
cttcgaaaacgcagcagaagacaagttaacaccagggccacgggtaaatgcaatcccaacttacactactggactgcaca

SEQ ID NO: 47087 - DNA, 80 bp, synthetic construct
  source 1..80: mol_type = other DNA
agaacaacataatgctgctgggattgcctggatcccgtactttggaccgggtgcagaaggcatatacactgaaggcctta

SEQ ID NO: 47088 - DNA, 80 bp, synthetic construct
  source 1..80: mol_type = other DNA
tgcacaaccaaaatgccttagtctgtggactcagacaacttgcaaatgaaacaactcaagctctgcagcttttcttaagg

SEQ ID NO: 47089 - DNA, 80 bp, synthetic construct
  source 1..80: mol_type = other DNA
gccacgacggagctgcggacatataccatactcaataggaaggccatagatttccttctgcgacgatggggcgggacatg

SEQ ID NO: 47090 - DNA, 80 bp, synthetic construct
  source 1..80: mol_type = other DNA
taggatcctgggaccagattgttgcattgagccacatgattggaccaaaaacatcactgataaaatcaaccaaatcatcc

SEQ ID NO: 47091 - DNA, 80 bp, synthetic construct
  source 1..80: mol_type = other DNA
atgatttcatcgacaaccctttacccaatcaggataatgatgataattggtggacgggctggagacagtggatccctgca

SEQ ID NO: 47092 - DNA, 80 bp, synthetic construct
  source 1..80: mol_type = other DNA
ggaataggcattactggaattattattgcaatcattgctcttctttgcgtctgcaagctgctttgttgaatatcaacttg

SEQ ID NO: 47093 - DNA, 80 bp, synthetic construct
  source 1..80: mol_type = other DNA
caaactaatattgacattgagattgatctcatcatttaccaattggagacaatttaactagttaatcccccatttggggg

SEQ ID NO: 47094 - DNA, 80 bp, synthetic construct
  source 1..80: mol_type = other DNA
aatcattaatttaaagttgatacatttctaacattataaattataatctgatattaatacttgaaaataaggctaatgcc

SEQ ID NO: 47095 - DNA, 80 bp, synthetic construct
  source 1..80: mol_type = other DNA
gaattgttgcccaatgttaccggtggaaaaaatctcaggagaacattggctgctatgcccgaagaggagacaacggaagc

SEQ ID NO: 47096 - DNA, 80 bp, synthetic construct
  source 1..80: mol_type = other DNA
aaattctgtgcaaaacttgaaagtaggtttaaaaaaatcctttgaactggaatgctttaatgctctttctcaatactata

SEQ ID NO: 47097 - DNA, 80 bp, synthetic construct
  source 1..80: mol_type = other DNA
taagttccttcccaaaaataatattgatgaagattaagaaaaagtgacattgtgtccacttttgtaatcttcatccacct

SEQ ID NO: 47098 - DNA, 80 bp, synthetic construct
  source 1..80: mol_type = other DNA
aaacatccgttgtcaggaatctttgaatcaacccttacacttgcttaggaaagagcctgtcctcgacaagaattccgagg

SEQ ID NO: 47099 - DNA, 80 bp, synthetic construct
  source 1..80: mol_type = other DNA
cggcaattcagttaatttaatatcaagataacatccatttccaaggccacagctagttatattattaacttttatcacaa

SEQ ID NO: 47100 - DNA, 80 bp, synthetic construct
  source 1..80: mol_type = other DNA
atatggagaggggtcgtgagcgcgggagatcaagaagttcacgtgctgaccagcaaaattcaacaggtccgcaatttagg

SEQ ID NO: 47101 - DNA, 80 bp, synthetic construct
  source 1..80: mol_type = other DNA
acaagatccatttcccgggataagacaacaacagactaccgtagtagtcgaagcacttcgcaagttagagtccctacagt

SEQ ID NO: 47102 - DNA, 80 bp, synthetic construct
  source 1..80: mol_type = other DNA
cttccataagaaaggtaccgggacccttactgtccctccagcacctaaggatatctgtcctactcttagaaaaggatttc

SEQ ID NO: 47103 - DNA, 80 bp, synthetic construct
  source 1..80: mol_type = other DNA
tgtgtgatagcaatttctgtaaaaaggaccaccaacttgaaagcctaaccgaccgggagctcctgcttcttatagcacgg

SEQ ID NO: 47104 - DNA, 80 bp, synthetic construct
  source 1..80: mol_type = other DNA
aagacctgtggatcaactgattcatcacttaatatagctgctcctaaagacttaagactggcaaatcctacggctgatga

SEQ ID NO: 47105 - DNA, 80 bp, synthetic construct
  source 1..80: mol_type = other DNA
cttcaagcaggacggcagtccaaaattaaccctaaaattactagtagagactgctgagttttgggctaatcagaatatta

SEQ ID NO: 47106 - DNA, 80 bp, synthetic construct
  source 1..80: mol_type = other DNA
taatgctggtcagtttctatcctttgccagtttgtttctacccaaacttgtcgttggggagaaagcgtgcctggaaaaag

SEQ ID NO: 47107 - DNA, 80 bp, synthetic construct
  source 1..80: mol_type = other DNA
atgaggtagatgatgcaaaactccgtgctcttttgacgttgagtgctgttctagtgcggaaattctctaagtcacaactt

SEQ ID NO: 47108 - DNA, 80 bp, synthetic construct
  source 1..80: mol_type = other DNA
agtcaattatgtgagagtcatcttaggagggaaaacttggggcaagaccaagctgaatcagttctcgaggtttatcaacg

SEQ ID NO: 47109 - DNA, 80 bp, synthetic construct
  source 1..80: mol_type = other DNA
agtgggatagacaatcattgactatgtttatatctgcttttctccatgtagcattgcaactttcctgtgagagctccacc

SEQ ID NO: 47110 - DNA, 80 bp, synthetic construct
  source 1..80: mol_type = other DNA
gtagtgatatcaggcctacgcttacttgccccgccaagcgtgaatgaagggctccctcctgcaccaggagaatatacttg

SEQ ID NO: 47111 - DNA, 80 bp, synthetic construct
  source 1..80: mol_type = other DNA
gtcagaagatagtacaacttagtccgtagggaggacaagtcaaataagatatcctcatcctctataggaggtatttttta

SEQ ID NO: 47112 - DNA, 80 bp, synthetic construct
  source 1..80: mol_type = other DNA
agagggggacaggatatgaataaggataacgactaaagccaatataaagataagaacacaaataggaattaaaatagaaa

SEQ ID NO: 47113 - DNA, 80 bp, synthetic construct
  source 1..80: mol_type = other DNA
tcaaaacaatctccctttattaaatatgaaacacaatggtgagtatttgtttcctgatattaatcatttattgttaaaaa

SEQ ID NO: 47114 - DNA, 80 bp, synthetic construct
  source 1..80: mol_type = other DNA
taaacaaagtcagtaagagtgttaggatcattatattgtaaggatcttcccttgaagcgttgaatcatctcaagtagcct

SEQ ID NO: 47115 - DNA, 80 bp, synthetic construct
  source 1..80: mol_type = other DNA
agaaccaaaacagtagagcattaaattgtaatagataatagggacattacttgtttttaagataattttgggaagtttaa

SEQ ID NO: 47116 - DNA, 80 bp, synthetic construct
  source 1..80: mol_type = other DNA
tacaaaggcaaattcaggtccatgcagaacaagggctcattcaatatccaacttcctggcaatcagttggacacatgatg

SEQ ID NO: 47117 - DNA, 80 bp, synthetic construct
  source 1..80: mol_type = other DNA
aattaagaaaaagaacccatggacacactctaacattgaggatagggtttccttgatgatagtctagtcttaggtacagg

SEQ ID NO: 47118 - DNA, 80 bp, synthetic construct
  source 1..80: mol_type = other DNA
gtagtcctacacgccctatattatacaatctaaacttgtaaaattgaactacaaaaacatgatgaaaattaatgagaagg

SEQ ID NO: 47119 - DNA, 80 bp, synthetic construct
  source 1..80: mol_type = other DNA
ttccaagattgacttcaatccaaacaccttgctctgccaattttcatctccttaagatatatgattttgttcctgcaaga

SEQ ID NO: 47120 - DNA, 80 bp, synthetic construct
  source 1..80: mol_type = other DNA
taaggttatcaaacagggtgtgtagctctttcacatatttgggctcctactgggctagggtttatagttaaggaagactc

SEQ ID NO: 47121 - DNA, 80 bp, synthetic construct
  source 1..80: mol_type = other DNA
tttttttaacctttttgtgtccttaataccttgaagaatattaatctcttcccggaaatcgagatcgagatctggcttca

SEQ ID NO: 47122 - DNA, 80 bp, synthetic construct
  source 1..80: mol_type = other DNA
aaaacccaccaaggtagaaggccagccgacctgtcagccaacaacaacaaagtaagcaacctaccccaactcctaccacc

SEQ ID NO: 47123 - DNA, 80 bp, synthetic construct
  source 1..80: mol_type = other DNA
gatccgaacaacgaacaaccaacacagtcctccgaggaggcaacacaacacagaacagtccacccgactccagagcaaca

SEQ ID NO: 47124 - DNA, 80 bp, synthetic construct
  source 1..80: mol_type = other DNA
aaacaaacgggccttcaaaagctgcacagtcagccaccacacaaaccatccaccccagactccgacacacccagacccca

SEQ ID NO: 47125 - DNA, 80 bp, synthetic construct
  source 1..80: mol_type = other DNA
tgccagtagagggcacgacaccaacacagcccacagaggctcccccagccaacaccacctacacaaaaggggtttcgtcc

SEQ ID NO: 47126 - DNA, 80 bp, synthetic construct
  source 1..80: mol_type = other DNA
aaacacccaagcacgatcacctgcaccaaccggccctcttgtccaccaaagatagcaccactccaggggaggcgaaacaa

SEQ ID NO: 47127 - DNA, 80 bp, synthetic construct
  source 1..80: mol_type = other DNA
gtaggacatatgatggttgtattcaggctgattcgtgtcaactttgtcctcaaattcctcctagttcaccagggcatgca

SEQ ID NO: 47128 - DNA, 80 bp, synthetic construct
  source 1..80: mol_type = other DNA
tttattaagaaaaaagagacgaagaacattaagtgagcttagattgccacattgagctttaacatagtcaattccaacac

SEQ ID NO: 47129 - DNA, 80 bp, synthetic construct
  source 1..80: mol_type = other DNA
tccaaagcaatagtttaaaagtaatttatcaaagaaatttccaagaaaaaagaggcaggagtggagaataaccctaccag

SEQ ID NO: 47130 - DNA, 80 bp, synthetic construct
  source 1..80: mol_type = other DNA
acaagactgcaaaaaagaagacccccttttgggggggtgtagatacccagggcaatcaaccaaccatcaagcaacaacca

SEQ ID NO: 47131 - DNA, 80 bp, synthetic construct
  source 1..80: mol_type = other DNA
tgtagatacccagggcaatcaaccaaccatcaagcaacaaccaacaaacaggaaaggacctccccctgccataggggaca

SEQ ID NO: 47132 - DNA, 80 bp, synthetic construct
  source 1..80: mol_type = other DNA
acaaacaggaaaggacctccccctgccataggggacaagccagacagtttccaccactccctccaggactaacaaaccgc

SEQ ID NO: 47133 - DNA, 80 bp, synthetic construct
  source 1..80: mol_type = other DNA
ggaaccattcaagagccccaccgctgcagacaaacgaacaagaacacaaaccaggcacacccagcatccagccctccgag

SEQ ID NO: 47134 - DNA, 80 bp, synthetic construct
  source 1..80: mol_type = other DNA
ccagtccacacaccacaagaggatccaggctgggcagaagtcccaaccagctgccgacagacgaaagacaaaggttcctc

SEQ ID NO: 47135 - DNA, 80 bp, synthetic construct
  source 1..80: mol_type = other DNA
ccacgatccaaggccgcccacgccaccaagcccgagacaaaacatcgatccgctcagatcggcacaaccgaacacggccc

SEQ ID NO: 47136 - DNA, 80 bp, synthetic construct
  source 1..80: mol_type = other DNA
ccgaagtcgggcatcccaaaaccagacaccaccgcaaagaggacctagacaaagggccaccacagttcaaggcctgcatc

SEQ ID NO: 47137 - DNA, 80 bp, synthetic construct
  source 1..80: mol_type = other DNA
aggagacccacgggacaaacccagacaaaatcccacacaaaaggctgacccaccatggcccgaccatcaggaaggtacaa

SEQ ID NO: 47138 - DNA, 80 bp, synthetic construct
  source 1..80: mol_type = other DNA
catcctccagaccgacacactccatgagaatactgttgtaaaacatgatctatgtaattttcttgtcacaacaacaatca

SEQ ID NO: 47139 - DNA, 80 bp, synthetic construct
  source 1..80: mol_type = other DNA
catgatggctgggcatgatgctaatgatgcaatcattgccaattcaatatcccaaacacgattttcaggattgttaatcg

SEQ ID NO: 47140 - DNA, 80 bp, synthetic construct
  source 1..80: mol_type = other DNA
ctgggtgggatgtctactgggctggtcatcttttccatgtccccaacaagggaattgcgcttctcacccgtctaaagaca

SEQ ID NO: 47141 - DNA, 80 bp, synthetic construct
  source 1..80: mol_type = other DNA
tcagactttgcacctgcatggaccctgaccaagaatctatttccacatctatttcacaacccgaccagtaccctcaaaga

SEQ ID NO: 47142 - DNA, 80 bp, synthetic construct
  source 1..80: mol_type = other DNA
ccccgtttggggccttagagtgatcctggcagcagccctgtatgatcaagtaatggaacaatccctcatcaaacccctaa

SEQ ID NO: 47143 - DNA, 80 bp, synthetic construct
  source 1..80: mol_type = other DNA
gcgagaccttaactctgctaggagattggcttttgaccacagaaacgcaaaaattcaatctgagaacccctcgggcccag

SEQ ID NO: 47144 - DNA, 80 bp, synthetic construct
  source 1..80: mol_type = other DNA
gaacaaataagcttgaggatgttatccttggtgaagaagcatgtgaacaactttatcctaaaacttcttgaacttcatgt

SEQ ID NO: 47145 - DNA, 80 bp, synthetic construct
  source 1..80: mol_type = other DNA
cataaacaatcgagggtttacaagcagcattgaaatcggaaacaagtataatactataatcatttcccgaacaaacatgg

SEQ ID NO: 47146 - DNA, 80 bp, synthetic construct
  source 1..80: mol_type = other DNA
gataccttgttgaacagcaggaaccggacaagtctgcacttcgaaaaacaaaacctggtccagtcaaatttactttagtg

SEQ ID NO: 47147 - DNA, 80 bp, synthetic construct
  source 1..80: mol_type = other DNA
cacgaggatgcattcagggactttaaaccagaaagatcgagcattaatttattaatcatggagtttaatagttcactcgc

SEQ ID NO: 47148 - DNA, 80 bp, synthetic construct
  source 1..80: mol_type = other DNA
catatgagtcccgcaggaaacctctgggggtctggccgcaacccactggagggtcaccaaggcatcccccagagaaacac

SEQ ID NO: 47149 - DNA, 80 bp, synthetic construct
  source 1..80: mol_type = other DNA
ccgaaccgaaaccgctcataactcaacatgtcgatcactctcaccctcactagcaaaagagaacaggaggcctcccacaa

SEQ ID NO: 47150 - DNA, 80 bp, synthetic construct
  source 1..80: mol_type = other DNA
tgaagactgtcctagagcatattctccaaaaaactgaggcaggggtccaacttcatccattagctcgaacctcgaaagtc

SEQ ID NO: 47151 - DNA, 80 bp, synthetic construct
  source 1..80: mol_type = other DNA
gtacattcgttttcttgaatcaatcctaatcttcccttcaactctcaagatccttcctcttcttactttgttccgctcct

SEQ ID NO: 47152 - DNA, 80 bp, synthetic construct
  source 1..80: mol_type = other DNA
cgcctagtcccaatacagcaatcaccaaccagatcgaagaaaccgcggcaggtcgacccaactgagcaacatcgactgca

SEQ ID NO: 47153 - DNA, 80 bp, synthetic construct
  source 1..80: mol_type = other DNA
acttcacacaagcctccaactggcctccaacagacaccgcaaagaacccaaatgcaggaagcacagtacccagatgctag

SEQ ID NO: 47154 - DNA, 80 bp, synthetic construct
  source 1..80: mol_type = other DNA
attatcatcaccaatagtgctcgatcaatgtgatctagtagcaagagcatgtaatttatattcaaattactcatataacc

SEQ ID NO: 47155 - DNA, 80 bp, synthetic construct
  source 1..80: mol_type = other DNA
caacactcaagaagtgtcgattacccaagcacatttatagactacagtatgatatagcagtaaatgagtttcttgccggg

SEQ ID NO: 47156 - DNA, 80 bp, synthetic construct
  source 1..80: mol_type = other DNA
gtccctctttctactttacccattgactatctggttccacttatcatgaatgccaatacagattcaatcaaaattcaaga

SEQ ID NO: 47157 - DNA, 80 bp, synthetic construct
  source 1..80: mol_type = other DNA
tcaaccctcgattaaaaatcatatcaaggacggaatttcctttgctctacatgattctggatttctcaactattatctca

SEQ ID NO: 47158 - DNA, 80 bp, synthetic construct
  source 1..80: mol_type = other DNA
aaacaattggtattaatactatgatcgatttggggacgttccataactcagccaaaaagatcctactaaatgagcgaata

SEQ ID NO: 47159 - DNA, 80 bp, synthetic construct
  source 1..80: mol_type = other DNA
attgatgaagcggtcacatggctagatcttgttgtggctgcaagacgtgcacgtatgaaccgtggaaacacacgatccac

SEQ ID NO: 47160 - DNA, 80 bp, synthetic construct
  source 1..80: mol_type = other DNA
atggtacgcatcaggagaattaatagatatattgggttatggggattacattttctggaaaatccccttaaagttattac

SEQ ID NO: 47161 - DNA, 80 bp, synthetic construct
  source 1..80: mol_type = other DNA
aaaggagaactccttgcattcaaatcagcactggaagcgttggcctcacacagagagtatgcaccatttgcacggctctt

SEQ ID NO: 47162 - DNA, 80 bp, synthetic construct
  source 1..80: mol_type = other DNA
cattaaataagagaggtgttccccatgcgtcagcaccgtggtatgaccctacaacttttaagtcatgttcagaaggatca

SEQ ID NO: 47163 - DNA, 80 bp, synthetic construct
  source 1..80: mol_type = other DNA
actgtggttgtctcaatatctacagtagaagtcttacttatgatcaaggatgtagctttctcacgaatgaacacattact

SEQ ID NO: 47164 - DNA, 80 bp, synthetic construct
  source 1..80: mol_type = other DNA
tatatgtaagttggctgaattagaggacaccttgacggactaccctactgtggaatccttgcatgatctgtaccgcagtg

SEQ ID NO: 47165 - DNA, 80 bp, synthetic construct
  source 1..80: mol_type = other DNA
gagactacttaatttcattactgggatcgacagggtatgatatcattaaatatttggaaccactgtgtctgggccggata

SEQ ID NO: 47166 - DNA, 80 bp, synthetic construct
  source 1..80: mol_type = other DNA
caattgttatccaactttactccacggaaaacctggtattactcccaaatgcaagttgcattgctcaaggacttggcaga

SEQ ID NO: 47167 - DNA, 80 bp, synthetic construct
  source 1..80: mol_type = other DNA
aagaacaaagggcagggaacttactttatatcaacaaacaaagattcggtctttccatcaaatattatttagacttaaac

SEQ ID NO: 47168 - DNA, 80 bp, synthetic construct
  source 1..80: mol_type = other DNA
tccgagctcaacaatggtgtgagttattttctatccagaaacactgggggcatcctgtcttgcacagtgagttagcgatt

SEQ ID NO: 47169 - DNA, 80 bp, synthetic construct
  source 1..80: mol_type = other DNA
gcgaaagttaaaaaacatgggacatgtctgaaagtgctaaggcctagcatcatgtttgatactttctgcgttttcaaata

SEQ ID NO: 47170 - DNA, 80 bp, synthetic construct
  source 1..80: mol_type = other DNA
catggtagggaaacatcattttgacaatacaggacattggtaccgtgtgacacatgacaagaatcttactccaactttaa

SEQ ID NO: 47171 - DNA, 80 bp, synthetic construct
  source 1..80: mol_type = other DNA
agacttacattcagaagaaccactttccgacatttcgtgatgttaggaagtttctttgggagttttacttggtgcaacat

SEQ ID NO: 47172 - DNA, 80 bp, synthetic construct
  source 1..80: mol_type = other DNA
gaacctctctggtgttaataatttagaacatggcctgtatcctcagctctctgccatcgcgcttggagttgctacagctc

SEQ ID NO: 47173 - DNA, 80 bp, synthetic construct
  source 1..80: mol_type = other DNA
gaggatcttttctcaactaaagtaatcagtgatctcagtattttcatcaaagatcgggccactgctgttgagagcatctg

SEQ ID NO: 47174 - DNA, 80 bp, synthetic construct
  source 1..80: mol_type = other DNA
ctgggatgccgttttcgaaccaaatgtactaggttatgcccctcccatgcgattcattacaaaacgggtgcctgaacagt

SEQ ID NO: 47175 - DNA, 80 bp, synthetic construct
  source 1..80: mol_type = other DNA
tcttagcccaagaggatttctcattagaagcagtaatctcttatgcagagaaattacagtacttggaaccagtaaataga

SEQ ID NO: 47176 - DNA, 80 bp, synthetic construct
  source 1..80: mol_type = other DNA
aatttctccttctctttgaaagagaaagaattaaatataggacgcacctttggaaaattaccttatttaacccgaaattt

SEQ ID NO: 47177 - DNA, 80 bp, synthetic construct
  source 1..80: mol_type = other DNA
acaaactctttgtgaggcactattggctgacgggttagctaaagcatttccgagtaatatgatggttgttaccgagaggg

SEQ ID NO: 47178 - DNA, 80 bp, synthetic construct
  source 1..80: mol_type = other DNA
agcagaaagaaactctccttcatcaggcctcatggcatcatgagcagggcaatctaggagaccatgtacaagttcgtgga

SEQ ID NO: 47179 - DNA, 80 bp, synthetic construct
  source 1..80: mol_type = other DNA
gcgagttttgttacagatctggaaaaatacaatctagcctttaggtttgaattcactcgaccattcattgagtactgcaa

SEQ ID NO: 47180 - DNA, 80 bp, synthetic construct
  source 1..80: mol_type = other DNA
ccattgttataacattaagaatgcattcaattggatgcattacttaattcctagctgctatatgcatgtaagtgactatt

SEQ ID NO: 47181 - DNA, 80 bp, synthetic construct
  source 1..80: mol_type = other DNA
acaatccacctcatggactgacattggaaaaccgaggatatccgcccgagggtccaagttcatacagaggacatcttgga

SEQ ID NO: 47182 - DNA, 80 bp, synthetic construct
  source 1..80: mol_type = other DNA
gggattgagggcttacagcaaaaattatggacaagtatttcttgtgctcagatcagccttgctgaacttcgctctggctt

SEQ ID NO: 47183 - DNA, 80 bp, synthetic construct
  source 1..80: mol_type = other DNA
atggtagcacactagcaggagttaatgtgagtgaacaataccagcaactccgagaggctgcaacagaggctgagaaacaa

SEQ ID NO: 47184 - DNA, 80 bp, synthetic construct
  source 1..80: mol_type = other DNA
caagacaagatcagccgtcatgggtgacaaccaatgtattactgtcctctcggttttcccggatcactatcaggaagatt

SEQ ID NO: 47185 - DNA, 80 bp, synthetic construct
  source 1..80: mol_type = other DNA
tacaggagctggaggcggaagacaatgcagcaagagtagcagctatattggctcgaataactgcttcgtgcggtatattt

SEQ ID NO: 47186 - DNA, 80 bp, synthetic construct
  source 1..80: mol_type = other DNA
ctaaagcctgaggagactttcgtccactctggattcatttacttcggtaagaaacaatacctaaatggtgtccagttacc

SEQ ID NO: 47187 - DNA, 80 bp, synthetic construct
  source 1..80: mol_type = other DNA
tagcattggcactgcatttgaaagggctattgctgaatcccgacatattttcccaattaggattatggctgccatccaat

SEQ ID NO: 47188 - DNA, 80 bp, synthetic construct
  source 1..80: mol_type = other DNA
cttacttggcagttaaggttttacaagagaaccatttgggttttccaaaaaacacagatttaggtgtattggcactcggg

SEQ ID NO: 47189 - DNA, 80 bp, synthetic construct
  source 1..80: mol_type = other DNA
aaaccaattagtgccaaaatgatcagactctgcttatccattcctcaagtcctgggtgggctctcattcttgaacccgga

SEQ ID NO: 47190 - DNA, 80 bp, synthetic construct
  source 1..80: mol_type = other DNA
gaaatgcttttatcgcaacttaagtgacccagtcacttctggtctctatcaagttaaaaagtacttagcctacatcggcc

SEQ ID NO: 47191 - DNA, 80 bp, synthetic construct
  source 1..80: mol_type = other DNA
aaggagacctgtttcctctctttgtggctaagcgaccaggtgatgcaagtgcgattgacctggttcttaaccctctagga

SEQ ID NO: 47192 - DNA, 80 bp, synthetic construct
  source 1..80: mol_type = other DNA
ctcaattatccaggagcccaggatttaacctccttcttgaggcgcatagttcgtcagagtattacctttcattcaaagaa

SEQ ID NO: 47193 - DNA, 80 bp, synthetic construct
  source 1..80: mol_type = other DNA
taaattaataaactcattgtttcatgctaatgcagacttagaggatgagtatttatgtgagtggttactctcatctgagc

SEQ ID NO: 47194 - DNA, 80 bp, synthetic construct
  source 1..80: mol_type = other DNA
ttacaacagcactcagagatgcgggaattggagacccttggactggatgaacaagaaaggaagatccttgcaacattcca

SEQ ID NO: 47195 - DNA, 80 bp, synthetic construct
  source 1..80: mol_type = other DNA
ctgtcatgtcaagatttgctgctgacatcttctctcgaacacccagtggtaagaggctccaaatccttgggtacttggaa

SEQ ID NO: 47196 - DNA, 80 bp, synthetic construct
  source 1..80: mol_type = other DNA
gggactagaactctcttggcatcacggaatctccacacaaattccgaatcatcactcctatctcgactcagagcattaac

SEQ ID NO: 47197 - DNA, 80 bp, synthetic construct
  source 1..80: mol_type = other DNA
aacgaagcggtggcaattgtggttcagttatatggaccagtacgatgaagatcttggggacgtaattagacagttgacat

SEQ ID NO: 47198 - DNA, 80 bp, synthetic construct
  source 1..80: mol_type = other DNA
gtacattggacatcgcgaatgtcttacgtgaatattcctggagtcatgtcctacaaggtcgccgattgattggagcaaca

SEQ ID NO: 47199 - DNA, 80 bp, synthetic construct
  source 1..80: mol_type = other DNA
ttgccatgtgtgccagaacagtttgaactcacctggttgactggtgataaggcttgtaagcactgtcagtctaaactgag

SEQ ID NO: 47200 - DNA, 80 bp, synthetic construct
  source 1..80: mol_type = other DNA
gggcaagaagaagccttatgtgtcagcggcattagttgacaaaattattagtcaaaggccgagttatcatcggttaagtt

SEQ ID NO: 47201 - DNA, 80 bp, synthetic construct
  source 1..80: mol_type = other DNA
ggacaatagggactctgacaccttacattgggtcaaggacagaggacaaaatcgggcaatcagcttttaaacccagatgt

SEQ ID NO: 47202 - DNA, 80 bp, synthetic construct
  source 1..80: mol_type = other DNA
ccctcagctgcactccgggaaacgattgagttagcttcccgaattctctgggtaacacaaggttcgagccaagcggaaga

SEQ ID NO: 47203 - DNA, 80 bp, synthetic construct
  source 1..80: mol_type = other DNA
tattattcgtccattttgcgaggccaggataaacctgccagtccaggaactattcaaattgcttccatcgcactactctg

SEQ ID NO: 47204 - DNA, 80 bp, synthetic construct
  source 1..80: mol_type = other DNA
gcaatattgttcatcgttacaatgaccagtatggtccgcgctcctttatggccaatagaatgagtaacactgccacaagg

SEQ ID NO: 47205 - DNA, 80 bp, synthetic construct
  source 1..80: mol_type = other DNA
ctcatattgtgtcgccactcaagatcaagatctggcaaacccagctgggttgaccaaggtacttgggagacctcttggtc

SEQ ID NO: 47206 - DNA, 80 bp, synthetic construct
  source 1..80: mol_type = other DNA
ctcccggaaaaatgagatcaacattcaacagaccagctcaatattagcaattcgtaaggaacgactccgcaagctgacag

SEQ ID NO: 47207 - DNA, 80 bp, synthetic construct
  source 1..80: mol_type = other DNA
attatcgtttcaacaaacaccctcgggccatattcgggagggggccaagcggcccgtgacagcaacattatatttcaaaa

SEQ ID NO: 47208 - DNA, 80 bp, synthetic construct
  source 1..80: mol_type = other DNA
tgtaataaatttcgctgttgctgtacttgacatccagaatagtttcttagatcagccaatgagtgaatttaagcacatcc

SEQ ID NO: 47209 - DNA, 80 bp, synthetic construct
  source 1..80: mol_type = other DNA
atctacatattaaagattgctgcactcgtgaagtccctagtcagtatttaacctataaggctaattttgggatgaatctc

SEQ ID NO: 47210 - DNA, 80 bp, synthetic construct
  source 1..80: mol_type = other DNA
caaaagtatcaatcaaatgagttaatttatgacaaagatcctctacgctgtgggctcacctgtagagtcagtgttgagaa

SEQ ID NO: 47211 - DNA, 80 bp, synthetic construct
  source 1..80: mol_type = other DNA
tttcttcttaaaacaccattttaaaaactcagttgaaggtgaactattgagatatccgcacctgtcggcttgggggttag

SEQ ID NO: 47212 - DNA, 80 bp, synthetic construct
  source 1..80: mol_type = other DNA
ccaacactgtaatgacttctctactagcagatatgaataatgcatctacggacttaataagcgggaatgaagtcaagtcc

SEQ ID NO: 47213 - DNA, 80 bp, synthetic construct
  source 1..80: mol_type = other DNA
tttacttctcaatttcttgcttacccattgattggaattttttattcattcggggcaataaccacgttcaaacttggtcg

SEQ ID NO: 47214 - DNA, 80 bp, synthetic construct
  source 1..80: mol_type = other DNA
caatttgagccttcaaaaaataacaaaatcccagattatctattacttagacagtcagctgtacaatctgcctcatcggg

SEQ ID NO: 47215 - DNA, 80 bp, synthetic construct
  source 1..80: mol_type = other DNA
cacttcgtgtatttaaaaccactttccaacatccagccgtccttgaatctcttttaaccatcgatccaagtttctcgttc

SEQ ID NO: 47216 - DNA, 80 bp, synthetic construct
  source 1..80: mol_type = other DNA
tttcttggaggagcctctggagggaaatcagtggctgatgcgacccgattgtttttaaggttagctatccaagtcttcct

SEQ ID NO: 47217 - DNA, 80 bp, synthetic construct
  source 1..80: mol_type = other DNA
aggcccttactgaagaaaagaataagaatgcacttgatgatgaggacgaaagtgaagaagacgactggtcaccagaaaat

SEQ ID NO: 47218 - DNA, 80 bp, synthetic construct
  source 1..80: mol_type = other DNA
gaatttcattagcttatacagccaacaaaagatagggaagactcttcccttatgggtggtgttcccactagagggagaac

SEQ ID NO: 47219 - DNA, 80 bp, synthetic construct
  source 1..80: mol_type = other DNA
ctgacgaacctatccttgagtttctatctgaactactaagagctttatcccatccactaccagaccaagaggcatccact

SEQ ID NO: 47220 - DNA, 80 bp, synthetic construct
  source 1..80: mol_type = other DNA
gatacccgaattcaaccatcttgtgtatttcgatcagaacagatctacaagagcatgtcaacaatgagtaacttcttcca

SEQ ID NO: 47221 - DNA, 80 bp, synthetic construct
  source 1..80: mol_type = other DNA
tgcgtcactagcctgctggagggaccgacgacagggacgggcaagaggaagttccaatgtaaaagggaccatcttgctat

SEQ ID NO: 47222 - DNA, 80 bp, synthetic construct
  source 1..80: mol_type = other DNA
atgacattaaaggtctactatccttaggatggaaagactgttctctctcaaatgcaccccttaagaactccctctcctct

SEQ ID NO: 47223 - DNA, 80 bp, synthetic construct
  source 1..80: mol_type = other DNA
tcacactgttcaagggatatcctcgaacatcgtagcaggaatataacagagtgcccacccttgctctccagacgaaccag

SEQ ID NO: 47224 - DNA, 80 bp, synthetic construct
  source 1..80: mol_type = other DNA
aatctcccaagaattaaaacatgcccaaaatattgtgcagaatactcaacacgtacggtctgcaactctaccaggcgatg

SEQ ID NO: 47225 - DNA, 80 bp, synthetic construct
  source 1..80: mol_type = other DNA
cccccccggacccctctcatagaccaggatgcttgcgcttgaatgtctttaagactgaacaggacgagactggcctcagc

SEQ ID NO: 47226 - DNA, 80 bp, synthetic construct
  source 1..80: mol_type = other DNA
acagaagaaacaattgagcaattactggccaggcttaagatgatgccagacactacatcttattgtcgattcactggggt

SEQ ID NO: 47227 - DNA, 80 bp, synthetic construct
  source 1..80: mol_type = other DNA
cattgcatcaatgcattacaagctagatgaggtcctgtacccaacaaatgagaccccaactgttgctctattagctgaag

SEQ ID NO: 47228 - DNA, 80 bp, synthetic construct
  source 1..80: mol_type = other DNA
agagggatacggagcaacaagggatcaaccaaagagccatcctcctacactgctagcagaaccgaagaagacagaaacaa

SEQ ID NO: 47229 - DNA, 80 bp, synthetic construct
  source 1..80: mol_type = other DNA
gtgagggctctggggcattattactgataaggaaataccgggcacgacaaatatttttcaataccttggcaaccggcaat

SEQ ID NO: 47230 - DNA, 80 bp, synthetic construct
  source 1..80: mol_type = other DNA
atggttgaggctgaggttttgatgggtgagtcagtaccccgcatgttacttcctctgctcccttctatcaataataagga

SEQ ID NO: 47231 - DNA, 80 bp, synthetic construct
  source 1..80: mol_type = other DNA
gattaagatcttcttcaacacgtcagtaacaatgaagacagacataactgatccaaaatggtttgatagtatagaggatc

SEQ ID NO: 47232 - DNA, 80 bp, synthetic construct
  source 1..80: mol_type = other DNA
ggcttccaagatcacttgatttactagttatggatgctgagactattggaaatagtatcaggattccgctctacaatgct

SEQ ID NO: 47233 - DNA, 80 bp, synthetic construct
  source 1..80: mol_type = other DNA
gttatcaagtgcatagatcgggacaagatgcaagataaaccaaaatgtgttattgtcaaattatttcttaatgattacct

SEQ ID NO: 47234 - DNA, 80 bp, synthetic construct
  source 1..80: mol_type = other DNA
agggacctgttggatcttaaaccatatcacccttcgctacaataaagtagagattattaaaccattaagttcaaatgctc

SEQ ID NO: 47235 - DNA, 80 bp, synthetic construct
  source 1..80: mol_type = other DNA
gatcatcagaatggtacttgaaagcagagcaaccggtcctatcatctgaactaaattacataaatgttaattgggagggt

SEQ ID NO: 47236 - DNA, 80 bp, synthetic construct
  source 1..80: mol_type = other DNA
cataccaccaaactgatcaaaaaggccttgcattgccaactctctcgccaatcctattgggttacccatctaatgtccta

SEQ ID NO: 47237 - DNA, 80 bp, synthetic construct
  source 1..80: mol_type = other DNA
tgcaaatttggatttacaccgggagtatatcagaatgggcttccctccccttacatctgtactccattaccggtaccata

SEQ ID NO: 47238 - DNA, 80 bp, synthetic construct
  source 1..80: mol_type = other DNA
tggtcgcaacagagtcgtcaccattacttactatacgtaggcatacaaatcttttgctccaggaaataagagaattagtg

SEQ ID NO: 47239 - DNA, 80 bp, synthetic construct
  source 1..80: mol_type = other DNA
ttataatagtaaggatgaccatctctcaggaaaggaacaaatgtccactcaacaggagtcaggtgctgacgatcttgatc

SEQ ID NO: 47240 - DNA, 80 bp, synthetic construct
  source 1..80: mol_type = other DNA
agggactacttcttaagtcgatgtacaagaactcaagcatttcactttatcaaaacacagaaagggcggataactaaact

SEQ ID NO: 47241 - DNA, 80 bp, synthetic construct
  source 1..80: mol_type = other DNA
tgctaatgattatcttaaatggagactcgtattatcagcattagagcgatatactttatttgaacaagcactgaacaata

SEQ ID NO: 47242 - DNA, 80 bp, synthetic construct
  source 1..80: mol_type = other DNA
ttgagccctacattcaggtatgtattttaggtccctgcaacaaagctttatgcagcaacgatcatttgcccattccgctg

SEQ ID NO: 47243 - DNA, 80 bp, synthetic construct
  source 1..80: mol_type = other DNA
ctctatctcacacgaactgatcaagccgagaggaagctactgaaccgactagtaggtctagtccagttcttcccagatgg

SEQ ID NO: 47244 - DNA, 80 bp, synthetic construct
  source 1..80: mol_type = other DNA
ttcttcccagatgggctataataataatatctgggaaatgagtcaaaatccccctgtagtataatcaccttaaccagatg

SEQ ID NO: 47245 - DNA, 80 bp, synthetic construct
  source 1..80: mol_type = other DNA
ttttcgatctggacgacgacggtgatacaaacagccaggatccaaacaacagacaaaaacaatccgatactcaacaaaca

SEQ ID NO: 47246 - DNA, 80 bp, synthetic construct
  source 1..80: mol_type = other DNA
caagaatccagcgaccgttccgactattcaaggcgaccagcctacgactggcccccaggcgacaggccccacacaacaca

SEQ ID NO: 47247 - DNA, 80 bp, synthetic construct
  source 1..80: mol_type = other DNA
ggctacagatgagcacactgacctcttaaacaaggaccatcgacgcaaccaggtgaagcccggaagaagaggaaatgatc

SEQ ID NO: 47248 - DNA, 80 bp, synthetic construct
  source 1..80: mol_type = other DNA
caaggaccctcccattaatcagctttgatgacaatgagggagagatcttagacgacaagtcagacctccctgctccagac

SEQ ID NO: 47249 - DNA, 80 bp, synthetic construct
  source 1..80: mol_type = other DNA
acccactcagaccccgacactgaggagtcagaggaagaacatccagatgaagaactactaccacctgctcctaagtacag

SEQ ID NO: 47250 - DNA, 80 bp, synthetic construct
  source 1..80: mol_type = other DNA
cactaaaacttcagagcaagaacccggggattggaagcagcccactagccccctaagtacaataccggaagaagagggag

SEQ ID NO: 47251 - DNA, 80 bp, synthetic construct
  source 1..80: mol_type = other DNA
caagctggagtgtcctctggtattcacctgacagtaatagtcctaaaatagtgtgcaatcggttcaccgtaaattataat

SEQ ID NO: 47252 - DNA, 80 bp, synthetic construct
  source 1..80: mol_type = other DNA
gtcatgaggcaaacaacgataattccgagtctgatctgatcgatcaaatgtaccagcatatatttaagacagaaggcgct

SEQ ID NO: 47253 - DNA, 80 bp, synthetic construct
  source 1..80: mol_type = other DNA
tatgcagctatcaactattattacaaaaccacaggtcgaccagtgaccttcacctcaaacaacaaccatgactacacatt

SEQ ID NO: 47254 - DNA, 80 bp, synthetic construct
  source 1..80: mol_type = other DNA
tcctcaagacactgaaggtctgttcccaccgtgggaaggcaaagaaaatcaaaaggtggcagagatcctcaccaactctc

SEQ ID NO: 47255 - DNA, 80 bp, synthetic construct
  source 1..80: mol_type = other DNA
tacatgagacagggcaagaatgggctgatatgagtgcaaaggaacggtaccttttcttgataaataactaatcaccccat

SEQ ID NO: 47256 - DNA, 80 bp, synthetic construct
  source 1..80: mol_type = other DNA
taaaattgctcatggggcctggagtgaaacctgcgctgcatgtaattaaccatcaagcagtaatctctacactaagatca

SEQ ID NO: 47257 - DNA, 80 bp, synthetic construct
  source 1..80: mol_type = other DNA
attcatcaatgcatgtgagcaaagagaccgcgggctgaacataatggaacaaaagtcgaagaatattaagaaaaacccgg

SEQ ID NO: 47258 - DNA, 80 bp, synthetic construct
  source 1..80: mol_type = other DNA
caacgtgttgtaaaggtggcaacagagaaacctccacggcatatcagccaatcaacacagcccaacacaaaggagacacc

SEQ ID NO: 47259 - DNA, 80 bp, synthetic construct
  source 1..80: mol_type = other DNA
cgacgggatacaaatccaagggttaggtgatcccgccccaaatacaggactcaaagcccaccagaagggcacaccccaga

SEQ ID NO: 47260 - DNA, 80 bp, synthetic construct
  source 1..80: mol_type = other DNA
gactccacaggccatccctctccaaaagacccgagacgaactacacggcatggacaaagtgacggatgccatcatgactg

SEQ ID NO: 47261 - DNA, 80 bp, synthetic construct
  source 1..80: mol_type = other DNA
ggcgattatcactcgacacaatccctggctttcaatgctctgcgccgacctccaggagcaggcccaccgggcgaaagtgt

SEQ ID NO: 47262 - DNA, 80 bp, synthetic construct
  source 1..80: mol_type = other DNA
tgatatctgttatatcctagtaagcattcaaaatccaatcctcccctgaataaccgcccaatccgcaaagtactttgggt

SEQ ID NO: 47263 - DNA, 80 bp, synthetic construct
  source 1..80: mol_type = other DNA
ccaccgtgggaaggaccactcattgagcccaagacttccgccaacaaatcaacacaaactgagaacatctatcaaagcga

SEQ ID NO: 47264 - DNA, 80 bp, synthetic construct
  source 1..80: mol_type = other DNA
ccaggtcctacgcgaaatcaaacaactgagctcaattctagcccaccaaatcacaaccatggagaggctagagggttcac

SEQ ID NO: 47265 - DNA, 80 bp, synthetic construct
  source 1..80: mol_type = other DNA
ttcaaagcatacaccaacagcttcaggtggtcgggggcatggcacataacctaacatccttgacaaccctgtgcacagaa

SEQ ID NO: 47266 - DNA, 80 bp, synthetic construct
  source 1..80: mol_type = other DNA
atggttgccaaatatgacttccttgtcatgactaccggacgagcaactgcaacagcggcggcaacagaggcttactggaa

SEQ ID NO: 47267 - DNA, 80 bp, synthetic construct
  source 1..80: mol_type = other DNA
agaacatgggaaagccccacctggcccagccttgttcgaagcagatgcacttaaggcacgaatccaagaaaatcccaaaa

SEQ ID NO: 47268 - DNA, 80 bp, synthetic construct
  source 1..80: mol_type = other DNA
gtgtcccgactgatgttagagaggcctttgaccgtctagagaagactgaggaggtaacagagaggacgttcggaaagcca

SEQ ID NO: 47269 - DNA, 80 bp, synthetic construct
  source 1..80: mol_type = other DNA
accatctcagctaagctcctcaaggaacttttctatgatcatcttcctggatatgggactgccttccatcagcttgccca

SEQ ID NO: 47270 - DNA, 80 bp, synthetic construct
  source 1..80: mol_type = other DNA
agtcgtatgcaaggtcgggaaagacaatgatctcctggatatcatacatgctgagttccaggccagcctagcagagggtg

SEQ ID NO: 47271 - DNA, 80 bp, synthetic construct
  source 1..80: mol_type = other DNA
actctccgcaatgtgccctgattcagatcacgaagcgaatccccatcttcggggagacaccacctcccgtcatctacata

SEQ ID NO: 47272 - DNA, 80 bp, synthetic construct
  source 1..80: mol_type = other DNA
aaaacaaaacaagaaatacccaaagcatgccaaaaaagcctccgccctcttccccccaatcctaaaattgaacggggctg

SEQ ID NO: 47273 - DNA, 80 bp, synthetic construct
  source 1..80: mol_type = other DNA
ataggtataatccaagttgaattctcaagtagacaactaggcctttgagtatcctgtgatcatgaatcgttatcttggtc

SEQ ID NO: 47274 - DNA, 80 bp, synthetic construct
  source 1..80: mol_type = other DNA
ggtatgccattatgtaacagcagatggaaaggaaatgggcctcaagatataaaactgaacaagcaccccaaaggcctaca

SEQ ID NO: 47275 - DNA, 80 bp, synthetic construct
  source 1..80: mol_type = other DNA
tccaacatcattatggtggacaacctgtcccaatccagtacacaggcaaaaaacttgcaacaacaggaggtgcccaataa

SEQ ID NO: 47276 - DNA, 80 bp, synthetic construct
  source 1..80: mol_type = other DNA
cccgagttccccaacaatctcgagcggaagaaattgactacgaggttgtcagaagggggccacaggagatatggcttacc

SEQ ID NO: 47277 - DNA, 80 bp, synthetic construct
  source 1..80: mol_type = other DNA
acctcccgaacagggcacaatctgcacaaaacacaccatctccatctccaccccaaaaccaggaccagaggcaggaacaa

SEQ ID NO: 47278 - DNA, 80 bp, synthetic construct
  source 1..80: mol_type = other DNA
gcacaaagggcctacatcgggctcaagcatgagcagccagacacatatccaagacccttcaccccatcaaccccaagacc

SEQ ID NO: 47279 - DNA, 80 bp, synthetic construct
  source 1..80: mol_type = other DNA
aacaacaaggctgcagcgctgcaacaccaaaataagattgactaccctgcaaagatccctccacatacaacacgacaatc

SEQ ID NO: 47280 - DNA, 80 bp, synthetic construct
  source 1..80: mol_type = other DNA
cataaatccctagagcctaacggccaaccacaccaaacactcacgaggaagacaccacccgcaaagcaacccaaatgaac

SEQ ID NO: 47281 - DNA, 80 bp, synthetic construct
  source 1..80: mol_type = other DNA
aacaccagcagctccccgaccacccggacgggcaaccgagagcacaacaccccaaacccgtcaacagaccgccacagagg

SEQ ID NO: 47282 - DNA, 80 bp, synthetic construct
  source 1..80: mol_type = other DNA
acccggctaaaacccctcttgagacaagaccagacaccatatcccatctacattgatcccaaaacaaaatcctgaagaat

SEQ ID NO: 47283 - DNA, 80 bp, synthetic construct
  source 1..80: mol_type = other DNA
attaagaaaaaacaccttggcttgacagttcataagcgaccttataagaggatactctatacgtggataaagaatgttct

SEQ ID NO: 47284 - DNA, 80 bp, synthetic construct
  source 1..80: mol_type = other DNA
atggtactagaacatctagggaaaataccaacctgagtgaattacatggtattctaagcctcgggttaaatgtagatcat

SEQ ID NO: 47285 - DNA, 80 bp, synthetic construct
  source 1..80: mol_type = other DNA
ccaaacatgtaacacttccaccacctccatacaatccaagctcaccggaaggactctattacaacccagatgcagggaag

SEQ ID NO: 47286 - DNA, 80 bp, synthetic construct
  source 1..80: mol_type = other DNA
aaacatgggaacctacactcccatcccgtcccgcacacggagcattctcgagcttccaacaccattcgtccaactgccga

SEQ ID NO: 47287 - DNA, 80 bp, synthetic construct
  source 1..80: mol_type = other DNA
tttcagccttgactatgacagtagttctgcttcaggggccatttcagcctttatgttagaagcctatgtcaatgttatct

SEQ ID NO: 47288 - DNA, 80 bp, synthetic construct
  source 1..80: mol_type = other DNA
ccaataacaaggtgctgctgaaacttgttccgttgtggttgccacttggggtcgcaggacaagacttgtacagctttgac

SEQ ID NO: 47289 - DNA, 80 bp, synthetic construct
  source 1..80: mol_type = other DNA
tcaacggcttctgccctactgattgcttcatataccattactcacttcggaatgaccacccgacctcttgtccgtgtcaa

SEQ ID NO: 47290 - DNA, 80 bp, synthetic construct
  source 1..80: mol_type = other DNA
cagactgggtccaggaatacctgaccatccccttcacttgctccgactcggcaaccaggcattcctgcaagaactagtgc

SEQ ID NO: 47291 - DNA, 80 bp, synthetic construct
  source 1..80: mol_type = other DNA
taccgcctcttcagctgccccaattttttacttttgaactcactgaattgaggctctacacacatctgatgcctcaaacc

SEQ ID NO: 47292 - DNA, 80 bp, synthetic construct
  source 1..80: mol_type = other DNA
atctggatagactcagcgcatggagacagacatgaacttcttcgacctgggctctctgtcaacccccgtctgcgccctat

SEQ ID NO: 47293 - DNA, 80 bp, synthetic construct
  source 1..80: mol_type = other DNA
attgctcccgtgtaagactgggaagaaggtatctcaacacgagattgcctcacctgacaaaataaagtctgttgccaact

SEQ ID NO: 47294 - DNA, 80 bp, synthetic construct
  source 1..80: mol_type = other DNA
acataaaagagctcaagttggtgaccttggatgccacaaagggcgtatatgctctggagatccccgagccattgtttgag

SEQ ID NO: 47295 - DNA, 80 bp, synthetic construct
  source 1..80: mol_type = other DNA
accattgtaaggaagaagagcatcccgttgtttgagatcggtaactctgatcaagtatgtaattggataattcaaataat

SEQ ID NO: 47296 - DNA, 80 bp, synthetic construct
  source 1..80: mol_type = other DNA
aaactaacagggaagaagtctccgcagaaaggaagcagcacactgatccccatcctggttccaagactcatgtcgaaaga

SEQ ID NO: 47297 - DNA, 80 bp, synthetic construct
  source 1..80: mol_type = other DNA
tgatctaggagggagggatctggtcatgtcaaccaaaggctcttgcgagaattgttattaccctggagccagtccaactc

SEQ ID NO: 47298 - DNA, 80 bp, synthetic construct
  source 1..80: mol_type = other DNA
aacctggaggggaacagtcgtagcctggagttaattacaacctagctatgattgagtgtccctgaattaaactgagaatt

SEQ ID NO: 47299 - DNA, 80 bp, synthetic construct
  source 1..80: mol_type = other DNA
tttcttattgatcctccctgaccacacccagacacgcagagcttccaagtcctattgaggacgcactggagggtaggagg

SEQ ID NO: 47300 - DNA, 80 bp, synthetic construct
  source 1..80: mol_type = other DNA
aacgcgctggtcgactccgtcgctccgaccaatagctaacgcacaatgctatatctcttaacaagctaaccaactcaacc

SEQ ID NO: 47301 - DNA, 80 bp, synthetic construct
  source 1..80: mol_type = other DNA
caaagcaatatgcaactaccatcgacatccccccgccaccgagacaacccggcacccccccagttccccatgctggctca

SEQ ID NO: 47302 - DNA, 80 bp, synthetic construct
  source 1..80: mol_type = other DNA
atctaacagtcaaacatcacttagactatagtgaaagaaaacatatattgaagaacattaagaaaaagctgttcggagac

SEQ ID NO: 47303 - DNA, 80 bp, synthetic construct
  source 1..80: mol_type = other DNA
agggatttcccatccactatattgctttaccaataacatcgagcttacatactcctcttgaaaatcaagagaggctgagt

SEQ ID NO: 47304 - DNA, 80 bp, synthetic construct
  source 1..80: mol_type = other DNA
tttgccacgggtgcagaaccgggacaagatggtgcccacctacccgtacagcagcctattagattggagaccaccaccaa

SEQ ID NO: 47305 - DNA, 80 bp, synthetic construct
  source 1..80: mol_type = other DNA
acaccctaccatggatcctcaaccttgtggtcttttataccatagcctggctacccgggggagtctcaggaattccactc

SEQ ID NO: 47306 - DNA, 80 bp, synthetic construct
  source 1..80: mol_type = other DNA
tgaggctggggtggacctgcaggatgttgctgatagctttttaacaatgctctgtgtaaatcatgcttatcaaggagatc

SEQ ID NO: 47307 - DNA, 80 bp, synthetic construct
  source 1..80: mol_type = other DNA
ggtttgttgggaaacaacagcatcacccaaactgtcgtggacaatgtagtgtgcaaggaacaccttgccacaacagatca

SEQ ID NO: 47308 - DNA, 80 bp, synthetic construct
  source 1..80: mol_type = other DNA
gctacaagctattggattgggactagaggggcttggtgaacatgctgacctccctactgccaccaagcgatggggttttc

SEQ ID NO: 47309 - DNA, 80 bp, synthetic construct
  source 1..80: mol_type = other DNA
gatctgatgtcatcccaaaaatcgtgggatacaccgctggggaatgggtggaaaactgctacaatcttgaaatcaccaag

SEQ ID NO: 47310 - DNA, 80 bp, synthetic construct
  source 1..80: mol_type = other DNA
aaagatggtcatccttgcctccccagcccgccaactggcttacttggctatccccgatgccgctatgtccacagagccaa

SEQ ID NO: 47311 - DNA, 80 bp, synthetic construct
  source 1..80: mol_type = other DNA
aggagcaggcccttgcccaggtgggaatgctttccacaaatatggttctttcttcctgtaccacggtatggcttctacag

SEQ ID NO: 47312 - DNA, 80 bp, synthetic construct
  source 1..80: mol_type = other DNA
taatttatcatggtgtaacctttacggaaggcacaattgctttcctaattgtcccgaaggatgcaccccgtctcaaggca

SEQ ID NO: 47313 - DNA, 80 bp, synthetic construct
  source 1..80: mol_type = other DNA
gggcttggaacaggattcagtcatcaagcagagaaccaaaacccaaacaaccaatttcgcacaacaactttagattatga

SEQ ID NO: 47314 - DNA, 80 bp, synthetic construct
  source 1..80: mol_type = other DNA
tgtaatgagtccttggatggacaatgctaccttcttctttcgagcgagggaagacacatcaatgctaatccaaacaaggt

SEQ ID NO: 47315 - DNA, 80 bp, synthetic construct
  source 1..80: mol_type = other DNA
accctccagcaaatctagagcttgttcaagaaagattggctaaccttaccggagatcaagctgatccatcaaagatggaa

SEQ ID NO: 47316 - DNA, 80 bp, synthetic construct
  source 1..80: mol_type = other DNA
gagattgtcgctgaggttttgacattggagctcggtgattggtccggttggacaactaaaaaaaccgcagtacaaaccat

SEQ ID NO: 47317 - DNA, 80 bp, synthetic construct
  source 1..80: mol_type = other DNA
ctaatttgttccttgagagtcctgcagctcattatttaaaaggacatggtatccacttcgaaatccagcatcgtgataat

SEQ ID NO: 47318 - DNA, 80 bp, synthetic construct
  source 1..80: mol_type = other DNA
acggctaagaaacccttcaccagcatctggttcaaccaaggacaagactggccagaagcccatgacggatcatcaggagt

SEQ ID NO: 47319 - DNA, 80 bp, synthetic construct
  source 1..80: mol_type = other DNA
tcatcctccaacctcattctgctgttggacaaccctgcctctggaacattcttcgaaccccggggcggaaccctgcacga

SEQ ID NO: 47320 - DNA, 80 bp, synthetic construct
  source 1..80: mol_type = other DNA
agacaccggcgggaaacaccaccaacaatgtccatcactgctgctcctgggtcaggatacaagccgtacatccaggcaat

SEQ ID NO: 47321 - DNA, 80 bp, synthetic construct
  source 1..80: mol_type = other DNA
acctctggtgaaatttcgatgccattgggagggtcttcggcatgtgtgtcgtcgatacccctcctgggttcagtgaacaa

SEQ ID NO: 47322 - DNA, 80 bp, synthetic construct
  source 1..80: mol_type = other DNA
caatagttcaatacagaagcttgagacctcatccaaaagtgcaacagaattgacaactcccatcaatcactcccaatcac

SEQ ID NO: 47323 - DNA, 80 bp, synthetic construct
  source 1..80: mol_type = other DNA
cacagcccgcatccgtcacaaacacccccacaccgacaacacagtccaagccctggacagccgaccacaacaacacaacg

SEQ ID NO: 47324 - DNA, 80 bp, synthetic construct
  source 1..80: mol_type = other DNA
ccaaccatggatcccacaccaataccgacgacatccgacaccgcaaccaccccccccaacaacccatccgaccacaacgc

SEQ ID NO: 47325 - DNA, 80 bp, synthetic construct
  source 1..80: mol_type = other DNA
cacaacaacaagcaaaacaagacgaaggagacaggtcaacccagcgcccccaacgatcacccaacaaacctccacaagca

SEQ ID NO: 47326 - DNA, 80 bp, synthetic construct
  source 1..80: mol_type = other DNA
tcaatacctcctaccaccccaatatgacaacacagttagcaagacatccgagtgtgcaaacaaggatgcaaaaccccagc

SEQ ID NO: 47327 - DNA, 80 bp, synthetic construct
  source 1..80: mol_type = other DNA
tgtaatcccaaccttagatactggacaagcagggagatgagtaatgctggggggcttgcatggattccatggattggacc

SEQ ID NO: 47328 - DNA, 80 bp, synthetic construct
  source 1..80: mol_type = other DNA
ggtggcttgcatggattccatggattggaccagggattgagggagggatcacagacgggataatggagcatcagaacaca

SEQ ID NO: 47329 - DNA, 80 bp, synthetic construct
  source 1..80: mol_type = other DNA
agtaacactagttttcgcagtgtccttgactaaggttgagaatatctgtgttcttttgggtgatctccatacgataatca

SEQ ID NO: 47330 - DNA, 80 bp, synthetic construct
  source 1..80: mol_type = other DNA
gttgatcacatcacagatctccttggagtagggagtcgagacaaatcactcagaaaaactctttctgcacttgaattcga

SEQ ID NO: 47331 - DNA, 80 bp, synthetic construct
  source 1..80: mol_type = other DNA
agggattgagagagggatcacagacgggataatggagcatcagaacacaattgtctgtcagttacgggagctcgcgaaca

SEQ ID NO: 47332 - DNA, 80 bp, synthetic construct
  source 1..80: mol_type = other DNA
ccactactaaagccctacagcttttcctccgggctaccactgagctccgaacctactctatcctcaaccgccatgcaatt

SEQ ID NO: 47333 - DNA, 80 bp, synthetic construct
  source 1..80: mol_type = other DNA
gactttctactacagcgttggggtggtacctgcagaatccttggcccaaactgctgtatcgaacctcatgattggtctgc

SEQ ID NO: 47334 - DNA, 80 bp, synthetic construct
  source 1..80: mol_type = other DNA
caacattacggctgagataaatcatattagagaagatatcctgaaccatcatgagatccaaccttctcaagacccctcct

SEQ ID NO: 47335 - DNA, 80 bp, synthetic construct
  source 1..80: mol_type = other DNA
tttgggctggatggcaacagtgggtcccaacaggagccagtgctctcggaatcatcctggcaatattagccttgatttgt

SEQ ID NO: 47336 - DNA, 80 bp, synthetic construct
  source 1..80: mol_type = other DNA
ctgtgcagaataacacgatgagtagaccgaaaggggaaggcaaaacaaaaagcaatcaccgccgtgttgccacagctgaa

SEQ ID NO: 47337 - DNA, 80 bp, synthetic construct
  source 1..80: mol_type = other DNA
agtcagtccaagccccaatacacagacacccgacaacctcctacgaggcctcaaagggccaaaacacaccctcgaaccag

SEQ ID NO: 47338 - DNA, 80 bp, synthetic construct
  source 1..80: mol_type = other DNA
gagattaacaggtttaactgagggccgagagaccaaccgctagacaactacaaatgatggggacctctcctgcaacttcg

SEQ ID NO: 47339 - DNA, 80 bp, synthetic construct
  source 1..80: mol_type = other DNA
acccgacgcagcatcaaccctacaatccagcataaggtcagacggtgagcccctgattggctccaccgaacactttaaaa

SEQ ID NO: 47340 - DNA, 80 bp, synthetic construct
  source 1..80: mol_type = other DNA
cataagcatcaatacaacccatctgcatctaatccaatctgcttcccagtacttcttatatacttgaaataaagcaatga

SEQ ID NO: 47341 - DNA, 80 bp, synthetic construct
  source 1..80: mol_type = other DNA
gcctgatggctcaactacggctgggatgtttttgtctttcgcaagtttatttctcccgaagttagttgtcggtgaacgtg

SEQ ID NO: 47342 - DNA, 80 bp, synthetic construct
  source 1..80: mol_type = other DNA
tgaatattaagaaaaaactaggctagtattgtatagtcttgaccttcttgaaacaaggtagcctagcttgcttaaccggc

SEQ ID NO: 47343 - DNA, 80 bp, synthetic construct
  source 1..80: mol_type = other DNA
tcttaaagggatcgagatggctgctggtccactaagagccaaagaatgggcaaggagacaattggacaatacaatcagtc

SEQ ID NO: 47344 - DNA, 80 bp, synthetic construct
  source 1..80: mol_type = other DNA
atccagttggtccacggccttcgaactaccacatcggatctaacctggcccctcagcactatccgagtggaaggggtttt

SEQ ID NO: 47345 - DNA, 80 bp, synthetic construct
  source 1..80: mol_type = other DNA
aatgaaagagggagaagcgtcagtcgacagtgtccaggacaaggcacacaagtcaggccacgttcgcagtcaatgtcgag

SEQ ID NO: 47346 - DNA, 80 bp, synthetic construct
  source 1..80: mol_type = other DNA
gttgactaactcaagaataacccctggagattggcaatgtcaaccgtgtgattatcccaaggcaagattcaaacgtgttg

SEQ ID NO: 47347 - DNA, 80 bp, synthetic construct
  source 1..80: mol_type = other DNA
aacagtccctggtgccacctgcacctaaagacatctgtccaactctgaaaaaggggtatctttgtgacagccaattctgt

SEQ ID NO: 47348 - DNA, 80 bp, synthetic construct
  source 1..80: mol_type = other DNA
aaaaaagaccataatctagagcaactaacggatcatgagttgttgttacttgtggcacgacagagctgcatatcatctcc

SEQ ID NO: 47349 - DNA, 80 bp, synthetic construct
  source 1..80: mol_type = other DNA
ggcagcacgagaaatcccgcgggccaaagactgtaggcttgcgacaccatcattgtgtgactaccagcagcataaccaag

SEQ ID NO: 47350 - DNA, 80 bp, synthetic construct
  source 1..80: mol_type = other DNA
agagtctgaccctaaacaggctttgtgagatcgctcaaacctgggcatctatgacttgggaggatatagacgacaaacaa

SEQ ID NO: 47351 - DNA, 80 bp, synthetic construct
  source 1..80: mol_type = other DNA
ttacgagccttattaacattaagtgcagttcttgtcagaaagcactccaaatcgcagttatcagctctttgtgagaatca

SEQ ID NO: 47352 - DNA, 80 bp, synthetic construct
  source 1..80: mol_type = other DNA
cctgcttggaaaaggtgcagcggcaaattcaaattcatgcagaacaaggcttaatccaatatcccacccaatggcagtcc

SEQ ID NO: 47353 - DNA, 80 bp, synthetic construct
  source 1..80: mol_type = other DNA
tgtccgcagggaggccctcgctcaagaccaagctagcattgttctcgaagtatatcagaaactacatagcgacaagggtg

SEQ ID NO: 47354 - DNA, 80 bp, synthetic construct
  source 1..80: mol_type = other DNA
gaaagtttgaagctgcgttatggcaacattgggatcggggatctttgactcttttcatccatgctgctctgcgggcagtg

SEQ ID NO: 47355 - DNA, 80 bp, synthetic construct
  source 1..80: mol_type = other DNA
accactatcccatgtgaaagctcggcaattgtagtcgccagtattatgtcattgttgtccaattcccaaaatgattcttc

SEQ ID NO: 47356 - DNA, 80 bp, synthetic construct
  source 1..80: mol_type = other DNA
tgaaccagtagctgaagggccacctggccaagatcagcaatagggctcagcactgcatccaccagtccaccaacagaact

SEQ ID NO: 47357 - DNA, 80 bp, synthetic construct
  source 1..80: mol_type = other DNA
aatctttctgaccctgaccctacccacatactacatacccatgcaagcagagatcccactaccagcaaacacccctctcg

SEQ ID NO: 47358 - DNA, 80 bp, synthetic construct
  source 1..80: mol_type = other DNA
agataaatgtataagttgatttaatatgtaagactaacatgtagatatatagaatatagcattaatatgtagatatagaa

SEQ ID NO: 47359 - DNA, 80 bp, synthetic construct
  source 1..80: mol_type = other DNA
aatgtgaaattaatatgcagacatatagaatgtatttagggatcaactatgcactaatttacttatacgggtaatattgg

SEQ ID NO: 47360 - DNA, 80 bp, synthetic construct
  source 1..80: mol_type = other DNA
tgaatgtaatcttttattatatcattaaatttaattatatcaattataataggtgtaagtttatagtttagttttattta

SEQ ID NO: 47361 - DNA, 80 bp, synthetic construct
  source 1..80: mol_type = other DNA
ggtgcttacaacagcgaagaggtaaagtgaaggcgtttcgggcttgagccaatcagttattcatctcaggacctttcctt

SEQ ID NO: 47362 - DNA, 80 bp, synthetic construct
  source 1..80: mol_type = other DNA
attgggctgggaatcattatattactgtttactatatcatatagtttgataagtttaggaataagttcatagaatcacac

SEQ ID NO: 47363 - DNA, 80 bp, synthetic construct
  source 1..80: mol_type = other DNA
tttatggctaaccgcatgagtaacacagcaacgcgcttgatggtatctaccaacacactaggagagttttccggaggggg

SEQ ID NO: 47364 - DNA, 80 bp, synthetic construct
  source 1..80: mol_type = other DNA
tcaggctgcacgtgatagcaacattatatttcaaaatgtgattaactttgcagtggccttgtatgacattaggtttcgga

SEQ ID NO: 47365 - DNA, 80 bp, synthetic construct
  source 1..80: mol_type = other DNA
gaagatcttgacctcgccaggaaaattaagcgcacacaaataaattaaaaaatctgtattttctcttttttgtgtgtcca

SEQ ID NO: 47366 - DNA, 80 bp, synthetic construct
  source 1..80: mol_type = other DNA
tacacattcatattcaggaatctttgaattaaccctcacacttgcttaggaaagagcctatcctctacaagaatcccgag

SEQ ID NO: 47367 - DNA, 80 bp, synthetic construct
  source 1..80: mol_type = other DNA
gcggcaattcagttaatttcatataaagataacatccatttccaagaccacagataactatattattaatctttaccaca

SEQ ID NO: 47368 - DNA, 80 bp, synthetic construct
  source 1..80: mol_type = other DNA
tataaccttgtcgattcaaaaagaggtccactagtctctgtcactcagcacttagcacatcttagggcagagattcgaga

SEQ ID NO: 47369 - DNA, 80 bp, synthetic construct
  source 1..80: mol_type = other DNA
ggacacacaaaaagaaaaaaggttttttaagactttttgtgtgcgagtaactatgaggaagattaacagttttcctcagt

SEQ ID NO: 47370 - DNA, 80 bp, synthetic construct
  source 1..80: mol_type = other DNA
gaacacttttttgaagctgacatacgaatacatcatatcatatgaaaacatcgcaattagagcgtccttgaagtctggca

SEQ ID NO: 47371 - DNA, 80 bp, synthetic construct
  source 1..80: mol_type = other DNA
ttgacagtcaccaggctgttctcagtagtctgtccttggaagctcttggggagacaaaaagaggtcccagagagtcccaa

SEQ ID NO: 47372 - DNA, 80 bp, synthetic construct
  source 1..80: mol_type = other DNA
caggttggcataaggtcattaacaccagcatagtcggctcgaccaagactgtaagcgagtcgatttcaactaaaaagatt

SEQ ID NO: 47373 - DNA, 80 bp, synthetic construct
  source 1..80: mol_type = other DNA
atttcttgttgtttaaacaaattccttttgtgtgagacatcctcaaggcacaagatggctaaagccacaggccgatacaa

SEQ ID NO: 47374 - DNA, 80 bp, synthetic construct
  source 1..80: mol_type = other DNA
tctcgtgcccccaaagaaagatatggaaaagggagtgatttttagtgatctttgtaatttcttgattactcaaaccctgc

SEQ ID NO: 47375 - DNA, 80 bp, synthetic construct
  source 1..80: mol_type = other DNA
aaggttggaaggtttattgggcaggaattgagtttgatgtaagtcaaaaaggcatggctcttctgacaagactcaaaaca

SEQ ID NO: 47376 - DNA, 80 bp, synthetic construct
  source 1..80: mol_type = other DNA
ccacatctgttccagaacccaaattcggttattcaatctcccatctgggctttgagggtaattttggcagccggattgca

SEQ ID NO: 47377 - DNA, 80 bp, synthetic construct
  source 1..80: mol_type = other DNA
gtaatcttcagattgatgaggactaatttcttgattaaatatttactgatccaccagggtatgcatatggtagctggcca

SEQ ID NO: 47378 - DNA, 80 bp, synthetic construct
  source 1..80: mol_type = other DNA
ggatcagttgttagaccattcattggttgagccattgacaggggctctcggtctaatttctgattggctcctaactacaa

SEQ ID NO: 47379 - DNA, 80 bp, synthetic construct
  source 1..80: mol_type = other DNA
cgtcaacacatttcaatcttcgtactagaagcgtaaaggaccagcttagtcttcgtatgttatctttgatcaggtcaaac

SEQ ID NO: 47380 - DNA, 80 bp, synthetic construct
  source 1..80: mol_type = other DNA
atcttgcagttcatcaacaagcttgacgccctgcatgttgtcaattacaatggtttactcagtagtattgagatcgggac

SEQ ID NO: 47381 - DNA, 80 bp, synthetic construct
  source 1..80: mol_type = other DNA
ttctacacacacaatcattataactcgtacaaatatgggttttctcgtggaagttcaagagcctgacaaatcagctatga

SEQ ID NO: 47382 - DNA, 80 bp, synthetic construct
  source 1..80: mol_type = other DNA
attctaagcgcccaggaccagtcaagttctcattacttcatgagtctgccttcaaacctttcactcgtgttccacaatct

SEQ ID NO: 47383 - DNA, 80 bp, synthetic construct
  source 1..80: mol_type = other DNA
gggatgcaatcattaataatggagttcaacagtttgttggcaatttaacaaggtaatcttaaaataagtacatgaatgag

SEQ ID NO: 47384 - DNA, 80 bp, synthetic construct
  source 1..80: mol_type = other DNA
aattagttgtgggtcttatctagcattgttgagttaactatctaatctattttcgctaattgcattgagcactgctaata

SEQ ID NO: 47385 - DNA, 80 bp, synthetic construct
  source 1..80: mol_type = other DNA
ggtttgtatcacgttaaagatttagagtgtatgaattgtgcagatttaaacttgggttttgccttatgcttcataggtgg

SEQ ID NO: 47386 - DNA, 80 bp, synthetic construct
  source 1..80: mol_type = other DNA
tctttttgaaatggagattatcagcatttcttaaatgggaggagttagcaatcagaaattggagataaatggacatcggg

SEQ ID NO: 47387 - DNA, 80 bp, synthetic construct
  source 1..80: mol_type = other DNA
atagaacaatgcctaactattgggcggcttccatttttacatgtgtatataaccaatcttttcctatctttgcttatatt

SEQ ID NO: 47388 - DNA, 80 bp, synthetic construct
  source 1..80: mol_type = other DNA
cgatgccaatgatgctgtcattgctaattcagttgctcaggctcgcttttcaggactcctaattgtcaaaaccgttcttg

SEQ ID NO: 47389 - DNA, 80 bp, synthetic construct
  source 1..80: mol_type = other DNA
ggtgtaactttattttaataacatgtcaatgctatactgttaagagaaggtctgaggaagattaagaaaaaggcctcgtg

SEQ ID NO: 47390 - DNA, 80 bp, synthetic construct
  source 1..80: mol_type = other DNA
ttcacttggttgccgtcaagtatcctgtggtttttttctacctaacttcctcatgccatatggctacccagcatacccag

SEQ ID NO: 47391 - DNA, 80 bp, synthetic construct
  source 1..80: mol_type = other DNA
tacccggatgcacgtttatcctcacctatagtcctggatcaatgtgatttggtaactcgagcatgtgggttatattcatc

SEQ ID NO: 47392 - DNA, 80 bp, synthetic construct
  source 1..80: mol_type = other DNA
ttattctctaaatcctcaactaaggcaatgtaaattaccaaaacatatatatcgacttaagttcgacacaatagtatcca

SEQ ID NO: 47393 - DNA, 80 bp, synthetic construct
  source 1..80: mol_type = other DNA
aattcctaagtgatacacctgtagcaacactgccgatagactatttagtaccaattctcctgcgttccctaacggggcac

SEQ ID NO: 47394 - DNA, 80 bp, synthetic construct
  source 1..80: mol_type = other DNA
ggtgataggccattgaccccgacttgcaatcaattccttgatgaaattattaattacactcttcatgatgcagcctttct

SEQ ID NO: 47395 - DNA, 80 bp, synthetic construct
  source 1..80: mol_type = other DNA
tgattactatctcaaggcaacaggtgcacaggaccatttgacaaacattgcaactagagagaagcttaaaaacgaaattc

SEQ ID NO: 47396 - DNA, 80 bp, synthetic construct
  source 1..80: mol_type = other DNA
taaacaatgattatgtccatcaattgttcttctggcatgacctttctattttggctcgacgtgggcgtctgaatcgcggg

SEQ ID NO: 47397 - DNA, 80 bp, synthetic construct
  source 1..80: mol_type = other DNA
aacaaccgttcaacctggtttgttcatgatgaattcattgatattttaggatatggcgattatattttttggaaaatacc

SEQ ID NO: 47398 - DNA, 80 bp, synthetic construct
  source 1..80: mol_type = other DNA
tttatcattattaccagttactatagacggggtcccacacgcagcaactgactggtatcaaccgactctttttaaagaat

SEQ ID NO: 47399 - DNA, 80 bp, synthetic construct
  source 1..80: mol_type = other DNA
atcatattctgcaaaaaaccgaccaaggagtaagacttcaccctttggcccgaacagccaaagtgcgtaatgaggttaat

SEQ ID NO: 47400 - DNA, 80 bp, synthetic construct
  source 1..80: mol_type = other DNA
ccatcctagggcatagccaaatcctatctgtgtcaacagctgaaatactaattatgtgtaaagatattatcacctgtagg

SEQ ID NO: 47401 - DNA, 80 bp, synthetic construct
  source 1..80: mol_type = other DNA
tttaatacatcactgattgcatccatggcaaaattagaggatgtagatgtgtctgattatcctgacccgagtgatattct

SEQ ID NO: 47402 - DNA, 80 bp, synthetic construct
  source 1..80: mol_type = other DNA
taagatatacaatgctggagactatgtaatatctattcttggctcagagggttataagataataaagtaccttgaaccac

SEQ ID NO: 47403 - DNA, 80 bp, synthetic construct
  source 1..80: mol_type = other DNA
tttgtttggccaaaatccaactttgctctaaattcacagaaagaaaaggtcgtttcctcacacagatgcatttatcagta

SEQ ID NO: 47404 - DNA, 80 bp, synthetic construct
  source 1..80: mol_type = other DNA
ataaatgatcttcgggagttgatttctaaccgcaggttaaaggactatcagcaagagaagattagagattttcacaaaat

SEQ ID NO: 47405 - DNA, 80 bp, synthetic construct
  source 1..80: mol_type = other DNA
attattacaattgcaattatctcctcaacagttttgtgaattattctctgttcaaaaacattgggggcatccaattttac

SEQ ID NO: 47406 - DNA, 80 bp, synthetic construct
  source 1..80: mol_type = other DNA
atagtgagaaagctatacaaaaagtaaaacggcatgcaaccatccttaaggctctcagacctaatgtcatctttgagaca

SEQ ID NO: 47407 - DNA, 80 bp, synthetic construct
  source 1..80: mol_type = other DNA
tattgtgtattcaagtacaatattgccaagcactatttcgacagccaaggaacttggtacagtgtaatctcagacaggaa

SEQ ID NO: 47408 - DNA, 80 bp, synthetic construct
  source 1..80: mol_type = other DNA
tttaactccaggactcaactccttcataaaacgtaatcactttccttcactgcccatgattaaggatcttctatgggaat

SEQ ID NO: 47409 - DNA, 80 bp, synthetic construct
  source 1..80: mol_type = other DNA
tctatcatcttaatcaccctccgttattctctacaaaggtgattagtgacttaagtattttcatcaaagatagggccaca

SEQ ID NO: 47410 - DNA, 80 bp, synthetic construct
  source 1..80: mol_type = other DNA
gcatttaaggccgccctaagctcacttgctaagcatggggaatatgccccttttgctcgccttctcaatctctcgggagt

SEQ ID NO: 47411 - DNA, 80 bp, synthetic construct
  source 1..80: mol_type = other DNA
gctgttgaacagacatgttgggatgcagtctttgaacccaatgtgctaggttacaatcctccaaacaaattctccactaa

SEQ ID NO: 47412 - DNA, 80 bp, synthetic construct
  source 1..80: mol_type = other DNA
aagggtgccggaacaatttctagaacaagaggatttttcaatcgaaagtgtcctgaattatgcacaggaattacattatt

SEQ ID NO: 47413 - DNA, 80 bp, synthetic construct
  source 1..80: mol_type = other DNA
tattaccacagaataggaatttttccttttctctcaaagaaaaggaattaaatattggacgaacatttgggaagctacca

SEQ ID NO: 47414 - DNA, 80 bp, synthetic construct
  source 1..80: mol_type = other DNA
tatctcacacggaatgtccaaactttatgtgaggctctgttagcagatggactggccaaggccttccccagtaacatgat

SEQ ID NO: 47415 - DNA, 80 bp, synthetic construct
  source 1..80: mol_type = other DNA
tgcattatttaatcccgcagtgttacatgcatgtaagtgattattataatccgcctcacaatgttaatcttagcaatcga

SEQ ID NO: 47416 - DNA, 80 bp, synthetic construct
  source 1..80: mol_type = other DNA
gaatatcctcctgaaggcccgagttcgtaccgagggcacttaggaggcatagagggattacaacaaaaactgtggacgag

SEQ ID NO: 47417 - DNA, 80 bp, synthetic construct
  source 1..80: mol_type = other DNA
taacaacctagaacatggtctctacccacagttatcagcaattgctcttggagttgccacagcacatggtagcacccttg

SEQ ID NO: 47418 - DNA, 80 bp, synthetic construct
  source 1..80: mol_type = other DNA
gtataaccgtattgtctgtttttccacttgaaacagaccctgaagagcaggagcaaagcgccgaagacaatgctgcaaga

SEQ ID NO: 47419 - DNA, 80 bp, synthetic construct
  source 1..80: mol_type = other DNA
gtagcagcaagtcttgcaaaagtaaccagtgcatgtgggatctttcttaaaccagatgagacatttgtacactcaggttt

SEQ ID NO: 47420 - DNA, 80 bp, synthetic construct
  source 1..80: mol_type = other DNA
gaatggcaccactctctgatgctatattcgatgatctacaaggaacacttgccagtattggaactgccttcgaacgtgct

SEQ ID NO: 47421 - DNA, 80 bp, synthetic construct
  source 1..80: mol_type = other DNA
atatcggaaacgcgacatatcctcccatgtcgtattgtagcagctttccatacgtatttcgccgttcggattttacaata

SEQ ID NO: 47422 - DNA, 80 bp, synthetic construct
  source 1..80: mol_type = other DNA
tcaccatcttggatttaataaaggcatcgatttaggacagttgtcacttagtaaaccattagactatgggactattactc

SEQ ID NO: 47423 - DNA, 80 bp, synthetic construct
  source 1..80: mol_type = other DNA
taacattggcggttccacaagtccttgggggattgtcttttctaaatccagaaaagtgtttttatcgaaacttcggagat

SEQ ID NO: 47424 - DNA, 80 bp, synthetic construct
  source 1..80: mol_type = other DNA
cctgtgacttctggacttttccagctacgggtgtacctagaaatggttaacatgaaagacctattttgtccattaatatc

SEQ ID NO: 47425 - DNA, 80 bp, synthetic construct
  source 1..80: mol_type = other DNA
gaaaaatccaggaaattgtagtgccattgattttgtcttaaatccatccggattaaatgttccaggatcacaagacttga

SEQ ID NO: 47426 - DNA, 80 bp, synthetic construct
  source 1..80: mol_type = other DNA
catcctttttgcgacaaatcgttaggcgtagtattaccctaactgctagaaataagttaattaacactctcttccatgcc

SEQ ID NO: 47427 - DNA, 80 bp, synthetic construct
  source 1..80: mol_type = other DNA
caggagttaatgttggtgagcagtatcagcagcttagagaggctgccactgaagctgagaagcaactccaacaatatgct

SEQ ID NO: 47428 - DNA, 80 bp, synthetic construct
  source 1..80: mol_type = other DNA
tctgctgatttggaagatgagatggtttgtaagtggctcctttcatcaaaccctgtcatgagtcgctttgcagcggatat

SEQ ID NO: 47429 - DNA, 80 bp, synthetic construct
  source 1..80: mol_type = other DNA
tttttccaggacaccgagtggtaaacgtctccaaatattaggttatcttgaagggaccaggactctattggcctccaaaa

SEQ ID NO: 47430 - DNA, 80 bp, synthetic construct
  source 1..80: mol_type = other DNA
tcataaacaacaacagtgagacacctgtacttgataagctgaggaagatcaccctacaaagatggaatctgtggttcagt

SEQ ID NO: 47431 - DNA, 80 bp, synthetic construct
  source 1..80: mol_type = other DNA
tatttggaccattgtgaccaattactagcagatgctctacagaaaattagttgcacggtggatttggcccagattttgcg

SEQ ID NO: 47432 - DNA, 80 bp, synthetic construct
  source 1..80: mol_type = other DNA
tgagtatacatggtcacacatcttagagggtagatcattgatcggagcgacattaccatgtatggtggagcaattcaaag

SEQ ID NO: 47433 - DNA, 80 bp, synthetic construct
  source 1..80: mol_type = other DNA
ttaagtggctaggacaatatgaaccttgtccagaatgtctcaacaaaaaaggctcaaatgcttatgtctcagttgcagtc

SEQ ID NO: 47434 - DNA, 80 bp, synthetic construct
  source 1..80: mol_type = other DNA
aaagatcaagtggtcagtgcttggcctaatacttctcgaataagttggacaatagggagtggtgtcccctatatagggtc

SEQ ID NO: 47435 - DNA, 80 bp, synthetic construct
  source 1..80: mol_type = other DNA
aagaaccgaggataaaatcggacagcctgctatcaagccgcgatgcccttcatctgccctcaaggaggctatagaattag

SEQ ID NO: 47436 - DNA, 80 bp, synthetic construct
  source 1..80: mol_type = other DNA
catcaaggctcacttgggttacacaaggaggttctaatagtgaacaattaatccggcctttcttggaagcgagagtcaac

SEQ ID NO: 47437 - DNA, 80 bp, synthetic construct
  source 1..80: mol_type = other DNA
cttagtgtcagtgaagtcctgcaaatgacaccatcacattattcaggaaatattgtccatcgatataacgaccaatacag

SEQ ID NO: 47438 - DNA, 80 bp, synthetic construct
  source 1..80: mol_type = other DNA
ctgagtccagagaactcgacagcctaggcctggacgatcaggaaagaagaatactaatgaacttccatcagaagaaaaac

SEQ ID NO: 47439 - DNA, 80 bp, synthetic construct
  source 1..80: mol_type = other DNA
cccgcactcatttatggcgaatcgcatgagcaatactgcgacccgtctcatagtgtcaactaatacacttggagaatttt

SEQ ID NO: 47440 - DNA, 80 bp, synthetic construct
  source 1..80: mol_type = other DNA
caggtggagggcaggccgccagggatagcaatataattttccagaatgttataaatttagcagttgccctttatgatatt

SEQ ID NO: 47441 - DNA, 80 bp, synthetic construct
  source 1..80: mol_type = other DNA
agattccggaatacaaacacctctgatataaggcataatagggctcatcttcacctgacagagtgctgtactaaagaggt

SEQ ID NO: 47442 - DNA, 80 bp, synthetic construct
  source 1..80: mol_type = other DNA
cccggcccagtatttgacatatacaagtgcacttaatctggatttaagccgttatcgtgataatgaactaatatatgact

SEQ ID NO: 47443 - DNA, 80 bp, synthetic construct
  source 1..80: mol_type = other DNA
caaatccactgaagggaggattgaactgcaatttaacaatagatagtcctttagtgaagggtcctaggcttaacatgatt

SEQ ID NO: 47444 - DNA, 80 bp, synthetic construct
  source 1..80: mol_type = other DNA
gaagatgatcttctccgctttccacacctttctggatgggagttagcgaaaacggtggtacaatccatcatctcagacaa

SEQ ID NO: 47445 - DNA, 80 bp, synthetic construct
  source 1..80: mol_type = other DNA
tagcaactcatcaacagatccaatcagtagcggagaaacacgctctttcacaactcattttctcacttaccctcagattg

SEQ ID NO: 47446 - DNA, 80 bp, synthetic construct
  source 1..80: mol_type = other DNA
gccttctttacagtttcggagcagtattatgcttttatctaggcaatactatcctatggactaaaaaacttgattacgaa

SEQ ID NO: 47447 - DNA, 80 bp, synthetic construct
  source 1..80: mol_type = other DNA
gttttatctattaccaattaccatcaacatggtatgtctagtgatcttgggactcttcttcatctggtttttcctagagc

SEQ ID NO: 47448 - DNA, 80 bp, synthetic construct
  source 1..80: mol_type = other DNA
cagtttctatattatttgcataaccagctgcacaacttacctcatcgagcactccgtgtttttaaaccaacatttaagca

SEQ ID NO: 47449 - DNA, 80 bp, synthetic construct
  source 1..80: mol_type = other DNA
tgccagtgtgatgtcccgattaatggaaattgattctaacttctcaatttatattggcgggacatctggagatcgagggc

SEQ ID NO: 47450 - DNA, 80 bp, synthetic construct
  source 1..80: mol_type = other DNA
gaaattagtttccagcagaccaatgcaatggtaacccttaggaaagagcgactggctaaattaacagaagctataacgct

SEQ ID NO: 47451 - DNA, 80 bp, synthetic construct
  source 1..80: mol_type = other DNA
tgtctgatgctgctcgactgtttcttcggacagcaatcgcgagttttttacaatttcttaaaagctggatcatcgatcgc

SEQ ID NO: 47452 - DNA, 80 bp, synthetic construct
  source 1..80: mol_type = other DNA
caaaagacaattcctttatggatagtatatccgcttgaaggtcaacagccggaatccatcaatgaatttctacataaaat

SEQ ID NO: 47453 - DNA, 80 bp, synthetic construct
  source 1..80: mol_type = other DNA
tttgggtctgctcaaacaaggccccaaaagtattccaaaggaggtcagcatccaaaatgatggacatttggatttggcag

SEQ ID NO: 47454 - DNA, 80 bp, synthetic construct
  source 1..80: mol_type = other DNA
aaaataattatgtttacaatagtaagagcactgctagtaatttcttccatgcatccttagcttactggagaagtaggaaa

SEQ ID NO: 47455 - DNA, 80 bp, synthetic construct
  source 1..80: mol_type = other DNA
tctcggaaaactcaagaccataatgatttctcaagaggggatggaacacttacagaacccgtgcgtaagttttcaagcaa

SEQ ID NO: 47456 - DNA, 80 bp, synthetic construct
  source 1..80: mol_type = other DNA
tcatcagtcagatgaaaagtactacaatgtgacatgtggaaagtcaccgaagccgcaagaacgcaaagacttctcgcaat

SEQ ID NO: 47457 - DNA, 80 bp, synthetic construct
  source 1..80: mol_type = other DNA
acagactcagcaataacgggcaaacagtgagtaatcatcgtaagaaagggaagttccacaagtggaatccctgcaaaatg

SEQ ID NO: 47458 - DNA, 80 bp, synthetic construct
  source 1..80: mol_type = other DNA
ttaatggagagtcaaaggggaactgttctaacagagggtgactactttcaaaacaatactccaccaacagatgatgtatc

SEQ ID NO: 47459 - DNA, 80 bp, synthetic construct
  source 1..80: mol_type = other DNA
aagtcctcaccgactcattctaccattttttaaattgggaaatcacaaccatgcacatgatcaagatgcccaagaattga

SEQ ID NO: 47460 - DNA, 80 bp, synthetic construct
  source 1..80: mol_type = other DNA
tgaatcaaaatattaaacagtacctacatcagctaaggtctatgttggacaccactatatattgtagattcacagggatt

SEQ ID NO: 47461 - DNA, 80 bp, synthetic construct
  source 1..80: mol_type = other DNA
ggcctcaagacctaacctcgggtctagacaagacgacggcaatgaaataccgttccctgggcctataagcaacaacccag

SEQ ID NO: 47462 - DNA, 80 bp, synthetic construct
  source 1..80: mol_type = other DNA
gtctcatccatgcattacaaattggacgaagttcttctagaatacaatagtttcgattcagctatcacattagctgaagg

SEQ ID NO: 47463 - DNA, 80 bp, synthetic construct
  source 1..80: mol_type = other DNA
tgaggggtcaggggctctattacttttgcaaaaatatagtacaaggttattatttttgaacacattggcaacagaacaca

SEQ ID NO: 47464 - DNA, 80 bp, synthetic construct
  source 1..80: mol_type = other DNA
gtatagaatcagaagttgtatcaggtttttctactccgagaatgttgttaccaataatgcaaaaggttcatgaaggacaa

SEQ ID NO: 47465 - DNA, 80 bp, synthetic construct
  source 1..80: mol_type = other DNA
gtcactgttatcttaaataattcagcaagtcagataactgacataactagctcaatgtggttaagtaatcaaaaatataa

SEQ ID NO: 47466 - DNA, 80 bp, synthetic construct
  source 1..80: mol_type = other DNA
tctaccttgtcaagttgaaatcattacgatggatgctgaaacaacagagaacttaaacaggtcccaactctaccgagcag

SEQ ID NO: 47467 - DNA, 80 bp, synthetic construct
  source 1..80: mol_type = other DNA
tatataacttaatacttgatcacattgatccgcagtatctcaaggtggtggtactcaaagtatttctgagtgatatagaa

SEQ ID NO: 47468 - DNA, 80 bp, synthetic construct
  source 1..80: mol_type = other DNA
ggaatattatggattaatgattacttggctccattattcggggctggttacttgattaaaccgattacatcaagtgcccg

SEQ ID NO: 47469 - DNA, 80 bp, synthetic construct
  source 1..80: mol_type = other DNA
gtcaagtgaatggtacctttgcttatcaaatttgatatctactaacaggagatcggcccatcagactcacaaggcatgtc

SEQ ID NO: 47470 - DNA, 80 bp, synthetic construct
  source 1..80: mol_type = other DNA
ttggtgttatcagagatgctttgcaagcacaagtccagcgaggcgtgtactggttgagtcacatcgcacagtatgctaca

SEQ ID NO: 47471 - DNA, 80 bp, synthetic construct
  source 1..80: mol_type = other DNA
aagaatctccattgtgaatacataggccttggtttcccatctctagaaaaggtcctatatcacaggtataatctagttga

SEQ ID NO: 47472 - DNA, 80 bp, synthetic construct
  source 1..80: mol_type = other DNA
accaagatcatctggaggatgatcctagagactccagagacaccatcattcctaatggtgcaattgaccccgaggatggt

SEQ ID NO: 47473 - DNA, 80 bp, synthetic construct
  source 1..80: mol_type = other DNA
tactggactcggtccattgtcgtcagttattagacatttaactaacctccaggcagagatacgagacttagtattagatt

SEQ ID NO: 47474 - DNA, 80 bp, synthetic construct
  source 1..80: mol_type = other DNA
ataacctgatgagggagagtcgcactcaaacgtaccattttattaagactgcaaaaggcagaatcacaaagttagtcaat

SEQ ID NO: 47475 - DNA, 80 bp, synthetic construct
  source 1..80: mol_type = other DNA
gactttctgaagttttctttaattgtccaggcactcaaaaataattcttcttggtatactgagcttaaaaaattacctga

SEQ ID NO: 47476 - DNA, 80 bp, synthetic construct
  source 1..80: mol_type = other DNA
ggttattaatgtgtgtaatcgattttatcatactcacaattgcgaatgtcaggaaaaattctttgtccagacgctttatt

SEQ ID NO: 47477 - DNA, 80 bp, synthetic construct
  source 1..80: mol_type = other DNA
tacaacgcctacgcgatgcagaaatcaagctaattgaacgccttaccgggttaatgcgattttatccagaagggttaata

SEQ ID NO: 47478 - DNA, 80 bp, synthetic construct
  source 1..80: mol_type = other DNA
tattccaatcacacataggtactaaatcatcatagtatgaggaataagataatgataattcctgacgacagttttagttc

SEQ ID NO: 47479 - DNA, 80 bp, synthetic construct
  source 1..80: mol_type = other DNA
cgattctaagtatatcggaagagagtatgccaatcttaattgttagaggtaacaagctattagttattacttattgataa

SEQ ID NO: 47480 - DNA, 80 bp, synthetic construct
  source 1..80: mol_type = other DNA
gaatacactttatcatagcgtaacacatcataactttataacgattttgcatttctaatcctagtatttattagaatgta

SEQ ID NO: 47481 - DNA, 80 bp, synthetic construct
  source 1..80: mol_type = other DNA
ctaccagagaaatgaccccagttcctatctttaaataatgattgtgtgtattaaattattagtttattaggtttatgagt

SEQ ID NO: 47482 - DNA, 80 bp, synthetic construct
  source 1..80: mol_type = other DNA
tggttacacagtgagtattagtaattgaggattatgtagataggtaatctaacactgaatcacccatctgatgtcaccat

SEQ ID NO: 47483 - DNA, 80 bp, synthetic construct
  source 1..80: mol_type = other DNA
gattttgaaaattacaatggctatcatgatgatgaagttgggacggcaggtgacttggtcctgttcgatcttgacgatca

SEQ ID NO: 47484 - DNA, 80 bp, synthetic construct
  source 1..80: mol_type = other DNA
atccaaatgttgtgctagtcgcatttaaacatgctatcttcagttaagtaacatagactgaaaatgctaagaagagattg

SEQ ID NO: 47485 - DNA, 80 bp, synthetic construct
  source 1..80: mol_type = other DNA
gagtaaaagtataaaataaatttaattaaacttcaaagtgattaaatgataatgatcttgggaactcgatatgacctcaa

SEQ ID NO: 47486 - DNA, 80 bp, synthetic construct
  source 1..80: mol_type = other DNA
gtcaaaaataatgtcaatataattatttagtaatatgagtgataatgtaaattttgataactaactagctttagtagtta

SEQ ID NO: 47487 - DNA, 80 bp, synthetic construct
  source 1..80: mol_type = other DNA
tagttaagatcaaatgcaaacattataagaatgttaagcgcacacaaaaacattataaaaaaccaattttttcctttttg

SEQ ID NO: 47488 - DNA, 80 bp, synthetic construct
  source 1..80: mol_type = other DNA
tgaggatgacaataaagcttttgagccacaggacagctcgccacaatcccaaagggaaatagagagagaaagattaattc

SEQ ID NO: 47489 - DNA, 80 bp, synthetic construct
  source 1..80: mol_type = other DNA
atccacccccaggcaacaacaaggacgacaatcgagcctcagacaacaatcaacaatcagcagattctgaggaacaagga

SEQ ID NO: 47490 - DNA, 80 bp, synthetic construct
  source 1..80: mol_type = other DNA
ggtcaatacaactggcaccgaggcccagaacgtacgaccgccaatcgaagactctcaccagtgcacgaagaggacaccct

SEQ ID NO: 47491 - DNA, 80 bp, synthetic construct
  source 1..80: mol_type = other DNA
tatggatcaaggcgatgatgatccctcaagcttacctccgctggaatctgatgatgacgatgcatcaagtagccaacaag

SEQ ID NO: 47492 - DNA, 80 bp, synthetic construct
  source 1..80: mol_type = other DNA
atcccgattatacagctgttgcccctcctgctcctgtataccgcagtgcagaagcccacgagcctccccacaaatcctcg

SEQ ID NO: 47493 - DNA, 80 bp, synthetic construct
  source 1..80: mol_type = other DNA
aacgagccagctgaaacatcacaattgaatgaagaccctgatatcggtcaatcaaagtctatgcaaaaattagaagagac

SEQ ID NO: 47494 - DNA, 80 bp, synthetic construct
  source 1..80: mol_type = other DNA
tctgaatccattttgcgagaagttcatccaaacgacccagtgtctgaaaatacaaaaggttcccctttccgtcaagttta

SEQ ID NO: 47495 - DNA, 80 bp, synthetic construct
  source 1..80: mol_type = other DNA
atatcaccatctgctgagaactcaaggtccatttgaagccatcaattattatcacatgatgaaggatgagccggtaatat

SEQ ID NO: 47496 - DNA, 80 bp, synthetic construct
  source 1..80: mol_type = other DNA
ttagcactgatgatgggaaggaatacacctacccggattcacttgaggaagcctatcctccatggctcaccgagaaagaa

SEQ ID NO: 47497 - DNA, 80 bp, synthetic construct
  source 1..80: mol_type = other DNA
cgactggacaaagagaatcgctacatttacataaataatcaacagttcttctggcctgtcatgagtcccagagacaaatt

SEQ ID NO: 47498 - DNA, 80 bp, synthetic construct
  source 1..80: mol_type = other DNA
tcttgcaatcttgcagcaccatcagtaaccacagcacaaagcgcggtccacttcgtaaagctaaatacacttaagacttg

SEQ ID NO: 47499 - DNA, 80 bp, synthetic construct
  source 1..80: mol_type = other DNA
accgattcatctacaaaaactaatccattataacttattagtgctacttttctataagtgattcttaatctaaggccatt

SEQ ID NO: 47500 - DNA, 80 bp, synthetic construct
  source 1..80: mol_type = other DNA
aagagtttaagtaatatacatatacacttacaccggtctatccaagatgtggctcaatgttcttgatttgaacatagtca

SEQ ID NO: 47501 - DNA, 80 bp, synthetic construct
  source 1..80: mol_type = other DNA
taaggggataaataatactttatatttctgattgtggattgacccattctgcttaaaatgcttcgcccattgaaaatgtg

SEQ ID NO: 47502 - DNA, 80 bp, synthetic construct
  source 1..80: mol_type = other DNA
atctaatagatagccctgactagacaaattaagaaaaacatttgatgaagattaaaaccttcatcgccagtaaatgattg

SEQ ID NO: 47503 - DNA, 80 bp, synthetic construct
  source 1..80: mol_type = other DNA
tattgtctgtaggcaggtgtttactccaccttaaatttggaaatatcctaccttaggaccattgtcaagaggtgcatagg

SEQ ID NO: 47504 - DNA, 80 bp, synthetic construct
  source 1..80: mol_type = other DNA
cattaccacccttgagaacatgtacaataataaattgaaggtatgttcaggcccagaaacgactggatggatttctgagc

SEQ ID NO: 47505 - DNA, 80 bp, synthetic construct
  source 1..80: mol_type = other DNA
aggggttgttttgattgtgtgtagattttataatcctagagtgccaaggagttgcgtgccatcattgattgggaagatca

SEQ ID NO: 47506 - DNA, 80 bp, synthetic construct
  source 1..80: mol_type = other DNA
aacttatgacaggtaagattccagtaactgatatattcattgatattgataacaagccagatcaaatggaagtccgactc

SEQ ID NO: 47507 - DNA, 80 bp, synthetic construct
  source 1..80: mol_type = other DNA
aaaccatcatcaaggagctcaacaagaacttgtacaagtagcagtcagacggaggtcaactatgtacctctccttaaaaa

SEQ ID NO: 47508 - DNA, 80 bp, synthetic construct
  source 1..80: mol_type = other DNA
ggttgaggatacattaactatgctagtgaatgccaccagtcgtcagaatgctgcaatcgaggcccttgaaaaccgcctca

SEQ ID NO: 47509 - DNA, 80 bp, synthetic construct
  source 1..80: mol_type = other DNA
gcacacttgagagtagcttaaagccaatccaagacatgggtaaagtgatttcatcattgaatcgcagttgtgccgaaatg

SEQ ID NO: 47510 - DNA, 80 bp, synthetic construct
  source 1..80: mol_type = other DNA
gttgcaaaatatgatcttctagttatgacaactggacgggctacttcaactgcagctgcagtagatgcgtattggaaaga

SEQ ID NO: 47511 - DNA, 80 bp, synthetic construct
  source 1..80: mol_type = other DNA
gcacaaacagccaccaccagggccagcgttgtatgaagagaatgcgcttaaaggaaaaatcgatgatccaaacagctatg

SEQ ID NO: 47512 - DNA, 80 bp, synthetic construct
  source 1..80: mol_type = other DNA
taccagatgctgtgcaagaggcttacaagaaccttgacagtacatcgaccctgaccgaggaaaattttgggaaaccttat

SEQ ID NO: 47513 - DNA, 80 bp, synthetic construct
  source 1..80: mol_type = other DNA
atatctgctaaagacctgaaggagatcatgtatgatcatctacctggttttgggactgcctttcaccaacttgttcaagt

SEQ ID NO: 47514 - DNA, 80 bp, synthetic construct
  source 1..80: mol_type = other DNA
gatttgtaaaataggaaaggataacaaccttttggacacaatccatgctgagttccaggcaagtctagcagatggtgact

SEQ ID NO: 47515 - DNA, 80 bp, synthetic construct
  source 1..80: mol_type = other DNA
tccccaatgtgcactcatacagataaccaaaagggtcccaatctttcaggatgtgccgcccccgataatccatattagat

SEQ ID NO: 47516 - DNA, 80 bp, synthetic construct
  source 1..80: mol_type = other DNA
aggaaacaatttgttccaataatatcgtacatcttgactaagtcgaacaaggggaagtcgatatggatcgtgggaccagg

SEQ ID NO: 47517 - DNA, 80 bp, synthetic construct
  source 1..80: mol_type = other DNA
cccgtggtgacatcccacgagcatgccaaaagagtctccgaccagcaccaccatcacccaaaattgatcgtggttgggtt

SEQ ID NO: 47518 - DNA, 80 bp, synthetic construct
  source 1..80: mol_type = other DNA
tgtttgtttaagatgcaagatggtaaaacgcttggacttaagatctaagaatcaagatttatttaacaaggcaagccaca

SEQ ID NO: 47519 - DNA, 80 bp, synthetic construct
  source 1..80: mol_type = other DNA
accttagatggaacctcagccagactattgaactattgacgctgttgatgataatatataattaatggtcttatttgaat

SEQ ID NO: 47520 - DNA, 80 bp, synthetic construct
  source 1..80: mol_type = other DNA
atgacaacatcttgcttcttgttctgccttgtagctctttgaattggaagatcattccaaacttacaaacatgcacaaga

SEQ ID NO: 47521 - DNA, 80 bp, synthetic construct
  source 1..80: mol_type = other DNA
tgttatggtttagcaaagaattgataggagtactggtatataatgtaaatataacaagtgatgaagattaagaaaaacca

SEQ ID NO: 47522 - DNA, 80 bp, synthetic construct
  source 1..80: mol_type = other DNA
gtcggtattttccagacttggcatttcttatcttcatcttctaaagtgagatattttatcatcaaaaaatgaggcgcgga

SEQ ID NO: 47523 - DNA, 80 bp, synthetic construct
  source 1..80: mol_type = other DNA
gtgttaccaacggctcctccagcatataatgatattgcataccctatgagcatactcccaacccgaccaagtgtcatagt

SEQ ID NO: 47524 - DNA, 80 bp, synthetic construct
  source 1..80: mol_type = other DNA
caatgagaccaaatcagatgtactggcagtgccaggggcagatgttccatcaaactccatgagaccagtggctgatgata

SEQ ID NO: 47525 - DNA, 80 bp, synthetic construct
  source 1..80: mol_type = other DNA
acattgatcactcaagccatactccaagcggagtagcttctgcctttatattggaagctacagtgaatgtaatttcggga

SEQ ID NO: 47526 - DNA, 80 bp, synthetic construct
  source 1..80: mol_type = other DNA
acaaaagtcctgatgaagcaaatacctatttggcttccactgggtgtagctgatcagaagatatacagctttgattcaac

SEQ ID NO: 47527 - DNA, 80 bp, synthetic construct
  source 1..80: mol_type = other DNA
agaatctgggtgtcgcaaaatcaaggtgatactgatttagattatcataaaattttgacagctggccttactgttcaaca

SEQ ID NO: 47528 - DNA, 80 bp, synthetic construct
  source 1..80: mol_type = other DNA
ttatgttggcttcctacacagtgacacacttcgggaagatatctaacccgctggtacgtgtcaacaggctaggcccagga

SEQ ID NO: 47529 - DNA, 80 bp, synthetic construct
  source 1..80: mol_type = other DNA
atacccgatcatccgctacgactcctaaggttgggtaatcaggcattccttcaagagtttgttcttccaccagtccagct

SEQ ID NO: 47530 - DNA, 80 bp, synthetic construct
  source 1..80: mol_type = other DNA
tccccagtatttcacatttgatctaacagctctaaagctcatcactcaaccattgccagctgcaacctggacagacgaaa

SEQ ID NO: 47531 - DNA, 80 bp, synthetic construct
  source 1..80: mol_type = other DNA
ccagcaggagcagtcaatgctcttcgtcctgggctctcactccatcccaagcttcgtccaattctcctgccggggaagac

SEQ ID NO: 47532 - DNA, 80 bp, synthetic construct
  source 1..80: mol_type = other DNA
aggaaagaaaggacatgcttcagacttaacatcacctgacaagattcaaacaatcatgaatgcaataccggacctcaaaa

SEQ ID NO: 47533 - DNA, 80 bp, synthetic construct
  source 1..80: mol_type = other DNA
ttgtcccgattgatccaaccaagaacatagttggaattgaggttccagaattactagttcaaaggctgaccggcaaaaaa

SEQ ID NO: 47534 - DNA, 80 bp, synthetic construct
  source 1..80: mol_type = other DNA
ccacaacccaaaaatggccaaccaattattccagttcttcttccgaaatatgttggacttgatcctatatcgccagggga

SEQ ID NO: 47535 - DNA, 80 bp, synthetic construct
  source 1..80: mol_type = other DNA
cttaactatggttatcacccaggattgtgattcatgccactctccagccagccatccgtatcacatggacaagcagaata

SEQ ID NO: 47536 - DNA, 80 bp, synthetic construct
  source 1..80: mol_type = other DNA
gttaccaataatttaaattccattcgagctattattctgctagtaattccgacgggatcaatagactaaaaatctgattg

SEQ ID NO: 47537 - DNA, 80 bp, synthetic construct
  source 1..80: mol_type = other DNA
tatagaattataaaagaatcaagcagaggcaacagactcacagcttacgcctagataactaatattaaggagttttttaa

SEQ ID NO: 47538 - DNA, 80 bp, synthetic construct
  source 1..80: mol_type = other DNA
gggaattgtcaggcagaaaataatttctgtatatcttgttgataacttggaggctatgtgtcaattggtaatacaagcct

SEQ ID NO: 47539 - DNA, 80 bp, synthetic construct
  source 1..80: mol_type = other DNA
tctaattttccagtcttgagtaataatcatttcttttgtaattaattatgcatttgttaacttatcggtgcgagattttc

SEQ ID NO: 47540 - DNA, 80 bp, synthetic construct
  source 1..80: mol_type = other DNA
ttgagaacccggcggagcttctactatctgcagtaaccagaagagaagttcaacccagtcaaaactaaaccaagcaatat

SEQ ID NO: 47541 - DNA, 80 bp, synthetic construct
  source 1..80: mol_type = other DNA
tctgaatgctctatagtctattctaatcagaggtataacaatggctaagatttcaatgactcgttaacaatcgctagtaa

SEQ ID NO: 47542 - DNA, 80 bp, synthetic construct
  source 1..80: mol_type = other DNA
ttttaatctccagattaagaaaaagatatacgatgaagattaaggcgacaacgagccgaaacttcatctcttttaaagat

SEQ ID NO: 47543 - DNA, 80 bp, synthetic construct
  source 1..80: mol_type = other DNA
ctaacattatctgttccaaagtcatacaaggacacattcaaatcagggattgtaagctgctatttcttacctccccaaat

SEQ ID NO: 47544 - DNA, 80 bp, synthetic construct
  source 1..80: mol_type = other DNA
tacctatacaacatggggtcaggatatcaacttctccaattgcctcgggaacgttttcgtaaaacttcgttcttagtatg

SEQ ID NO: 47545 - DNA, 80 bp, synthetic construct
  source 1..80: mol_type = other DNA
ggtaatcatcctcttccagcgagcaatctccatgccgcttggtatagtgacaaatagcactctcaaagcaacagaaattg

SEQ ID NO: 47546 - DNA, 80 bp, synthetic construct
  source 1..80: mol_type = other DNA
atcaattggtttgtcgggacaaactgtcatcaaccagtcagctcaagtctgtggggctgaatctggaaggaaatggaatt

SEQ ID NO: 47547 - DNA, 80 bp, synthetic construct
  source 1..80: mol_type = other DNA
gcaaccgatgtcccatcagcaacaaaacgctggggatttcgttcaggtgtgcctcccaaggtggtcagctatgaagccgg

SEQ ID NO: 47548 - DNA, 80 bp, synthetic construct
  source 1..80: mol_type = other DNA
ttgaggccggaattgatttccaagaaaatgccgacagcttccttctgatgctttgcctacatcatgcttaccaaggtgac

SEQ ID NO: 47549 - DNA, 80 bp, synthetic construct
  source 1..80: mol_type = other DNA
tccctctccctcccgacggtgtacgaggattccctagatgtcgctatgtccacaaagttcaaggaacaggtccttgtccc

SEQ ID NO: 47550 - DNA, 80 bp, synthetic construct
  source 1..80: mol_type = other DNA
ggtgacttagctttccataaaaatggggcttttttcttgtatgatagattggcctcaactgtcatctaccgagggacaac

SEQ ID NO: 47551 - DNA, 80 bp, synthetic construct
  source 1..80: mol_type = other DNA
ttttgctgaaggtgtcgtagcttttttaattctgtcagagcccaagaagcatttttggaaggctacaccagctcatgaac

SEQ ID NO: 47552 - DNA, 80 bp, synthetic construct
  source 1..80: mol_type = other DNA
cggtgaacacaacagatgattccacaagctactacatgaccctgacactcagctacgagatgtcaaattttgggggcaat

SEQ ID NO: 47553 - DNA, 80 bp, synthetic construct
  source 1..80: mol_type = other DNA
gaaagtaacaccctttttaaggtagacaaccacacatatgtgcaactagatcgtccacacactccgcagttccttgttca

SEQ ID NO: 47554 - DNA, 80 bp, synthetic construct
  source 1..80: mol_type = other DNA
gctcaatgaaacacttcgaagaaataatcgccttagcaacagtacagggagattgacttggacattggatcctaaaattg

SEQ ID NO: 47555 - DNA, 80 bp, synthetic construct
  source 1..80: mol_type = other DNA
aaccagatgttggtgagtgggccttctgggaaactaaaaaaacttttcccaacaacttcatggagaaaacttgcatttcc

SEQ ID NO: 47556 - DNA, 80 bp, synthetic construct
  source 1..80: mol_type = other DNA
aaattctatcaacccacaccaacaactcctcagatcagagcccggcgggaactgtccaaggaaaaattagctaccaccca

SEQ ID NO: 47557 - DNA, 80 bp, synthetic construct
  source 1..80: mol_type = other DNA
cccgccaacaactccgagctggttccaacggattcccctccagtggtttcagtgctcactgcaggacggacagaggaaat

SEQ ID NO: 47558 - DNA, 80 bp, synthetic construct
  source 1..80: mol_type = other DNA
gtcgacccaaggtctaaccaacggagagacaatcacaggtttcaccgcgaacccaatgacaaccaccattgccccaagtc

SEQ ID NO: 47559 - DNA, 80 bp, synthetic construct
  source 1..80: mol_type = other DNA
caaccatgacaagcgaggttgataacaatgtaccaagtgaacaaccgaacaacacagcatccattgaagactccccccca

SEQ ID NO: 47560 - DNA, 80 bp, synthetic construct
  source 1..80: mol_type = other DNA
tcggcaagcaacgagacaatttaccactccgagatggatccgatccaaggctcgaacaactccgcccagagcccacagac

SEQ ID NO: 47561 - DNA, 80 bp, synthetic construct
  source 1..80: mol_type = other DNA
agagcaatgctgtacagtatttggaaggtcatggattcaaatttgagctccggaagaaggacggtgtcaatcggctcgag

SEQ ID NO: 47562 - DNA, 80 bp, synthetic construct
  source 1..80: mol_type = other DNA
caagaccacgccagcacccacaacatccccgatgacccaggacccgcaagagacggccaacagcagcaaaccaggaacca

SEQ ID NO: 47563 - DNA, 80 bp, synthetic construct
  source 1..80: mol_type = other DNA
gcccaggaagcgcagccggaccaagtcagcccggactcactataaatacagtaagtaaggtagctgattcactgagtccc

SEQ ID NO: 47564 - DNA, 80 bp, synthetic construct
  source 1..80: mol_type = other DNA
accaggaaacaaaagcgatcggttcgacaaaacaccgctaataaatgtaacccagatctttactattggacagctgttga

SEQ ID NO: 47565 - DNA, 80 bp, synthetic construct
  source 1..80: mol_type = other DNA
tgagggggcagcagtaggattggcatggattccatatttcggacctgcagcagaaggcatctacattgagggtgtaatgc

SEQ ID NO: 47566 - DNA, 80 bp, synthetic construct
  source 1..80: mol_type = other DNA
ataatcagaatgggcttatttgcgggctacgtcagctagccaatgaaactacccaggctcttcaattatttctgcgggcc

SEQ ID NO: 47567 - DNA, 80 bp, synthetic construct
  source 1..80: mol_type = other DNA
acaacagaactgaggacttactcacttcttaacagaaaagctattgattttcttcttcaacgatggggaggtacctgtcg

SEQ ID NO: 47568 - DNA, 80 bp, synthetic construct
  source 1..80: mol_type = other DNA
aatcctaggaccatcttgttgcattgagccacatgattggacaaaaaatattactgatgaaattaaccaaattaaacatg

SEQ ID NO: 47569 - DNA, 80 bp, synthetic construct
  source 1..80: mol_type = other DNA
actttattgacaatcccctaccagaccacggagatgatcttaatctatggacaggttggagacaatggatcccggctgga

SEQ ID NO: 47570 - DNA, 80 bp, synthetic construct
  source 1..80: mol_type = other DNA
ttaagatatacactgaaattgagattgagattctcctctttgctattctgtaactttccctggttgtgacaattgaatca

SEQ ID NO: 47571 - DNA, 80 bp, synthetic construct
  source 1..80: mol_type = other DNA
attgggattattggagttataattgctataatagccctactttgtatatgtaagattttgtgttgatttattctgagatc

SEQ ID NO: 47572 - DNA, 80 bp, synthetic construct
  source 1..80: mol_type = other DNA
tgagagagaaaaatctcagggttactctaaggagaaatattatttttaaaatttacttgaatgctgaccacttatcttaa

SEQ ID NO: 47573 - DNA, 80 bp, synthetic construct
  source 1..80: mol_type = other DNA
gaattgcttcctgctgcaacgagtggaaaaaacatcaggcgtacgttggccgcactgcctgaagaggagactacagaagc

SEQ ID NO: 47574 - DNA, 80 bp, synthetic construct
  source 1..80: mol_type = other DNA
atgagcaattaataatatgtttttctgcttctttgcttgatttacaatatgatatttctcttaataatgattaatatatt

SEQ ID NO: 47575 - DNA, 80 bp, synthetic construct
  source 1..80: mol_type = other DNA
aagaaaaacttatgacgaagattaaaggagaggatcgttaacgggaaaacctcccatctcgttcgtcgaagccacgttgg

SEQ ID NO: 47576 - DNA, 80 bp, synthetic construct
  source 1..80: mol_type = other DNA
tggtgcttgcagctgagaacaactccagagattgtaggtagaaaggaccaacatttataggtaggggtcagaaagcaaca

SEQ ID NO: 47577 - DNA, 80 bp, synthetic construct
  source 1..80: mol_type = other DNA
ataaccataaaaggagagcctgacattgctatttaatatcctagaacctgatttctaggttctagctttaaaatccggat

SEQ ID NO: 47578 - DNA, 80 bp, synthetic construct
  source 1..80: mol_type = other DNA
gatggagcattcaagagaacggggtagatctagcaacatgcgacataatagccgggaaccatacgaaaatccatcaaggt

SEQ ID NO: 47579 - DNA, 80 bp, synthetic construct
  source 1..80: mol_type = other DNA
ctcgctcattatctcgggaccctaatcaggttgatcgtagacagcctcgaagtgcatcccaaattcgtgttccgaatctg

SEQ ID NO: 47580 - DNA, 80 bp, synthetic construct
  source 1..80: mol_type = other DNA
ttccatcggaaaaagactgatgcactcatagttcctccggctcctaaagatatatgcccaacactcaaaaaaggattcct

SEQ ID NO: 47581 - DNA, 80 bp, synthetic construct
  source 1..80: mol_type = other DNA
ctgcgatagcaaattttgcaaaaaagatcaccaattggatagcttaaatgatcatgaattactactgctaattgcaagaa

SEQ ID NO: 47582 - DNA, 80 bp, synthetic construct
  source 1..80: mol_type = other DNA
gaacatgtggaattatcgagagcaattcgcagattacatccccaaaagatatgcggttagcgaatccaacagctgaagac

SEQ ID NO: 47583 - DNA, 80 bp, synthetic construct
  source 1..80: mol_type = other DNA
ttctcacaaggtaatagtcctaaattaacacttgcagtccttcttcaaattgctgaacattgggcaaccagagacctaag

SEQ ID NO: 47584 - DNA, 80 bp, synthetic construct
  source 1..80: mol_type = other DNA
aaatgcagggcaatttctctcatttgcgagtttgtttcttcccaaactggttgtgggagagaaggcttgcttggaaaaag

SEQ ID NO: 47585 - DNA, 80 bp, synthetic construct
  source 1..80: mol_type = other DNA
gcaaattgaggactctaaacttagagctcttttaaccctttgtgccgtattaacaaggaaattttctaaatcccaactgg

SEQ ID NO: 47586 - DNA, 80 bp, synthetic construct
  source 1..80: mol_type = other DNA
gtcttctatgtgagacccacctacggcatgagggcctcggacaggaccaagctgattctgtattagaggtctaccaaaga

SEQ ID NO: 47587 - DNA, 80 bp, synthetic construct
  source 1..80: mol_type = other DNA
ctccacagtgataaaggagggaattttgaggctgccctgtggcaacaatgggaccgacagtcattaataatgttcatctc

SEQ ID NO: 47588 - DNA, 80 bp, synthetic construct
  source 1..80: mol_type = other DNA
tgcttttctcaacattgctctccagataccttgtgaaagttctagtgtcgtagtctcaggtcttgccacattgtacccag

SEQ ID NO: 47589 - DNA, 80 bp, synthetic construct
  source 1..80: mol_type = other DNA
cacaagacaattctacaccatccgaggcaactaatgataccacctggtcaagtacagttgaatagaaaaccactggagct

SEQ ID NO: 47590 - DNA, 80 bp, synthetic construct
  source 1..80: mol_type = other DNA
atttttccacgattgctctcagtcaataaattaatatagatataatacgacttcggtgtgcaattgtcaagagttccatt

SEQ ID NO: 47591 - DNA, 80 bp, synthetic construct
  source 1..80: mol_type = other DNA
tagtaataatgattcttaaaacaatctactatcgcaattatcgatggatctaccctatttgacggtacatgacttgaatg

SEQ ID NO: 47592 - DNA, 80 bp, synthetic construct
  source 1..80: mol_type = other DNA
taataaggtaagttggtatctgaggtattttgtctagagtatactcaaaatcgtatgtctagcaaattatcaatagcaaa

SEQ ID NO: 47593 - DNA, 80 bp, synthetic construct
  source 1..80: mol_type = other DNA
gttaaattctcctaacctcatattttgatcaagtaatcatgattttatgataattcttttcagattatcggtttaatctt

SEQ ID NO: 47594 - DNA, 80 bp, synthetic construct
  source 1..80: mol_type = other DNA
tattaagaaaaaatcatgattgtagacaatttactggtagtccttgggtatccaagtttatgaatagagctagagagaat

SEQ ID NO: 47595 - DNA, 80 bp, synthetic construct
  source 1..80: mol_type = other DNA
tccagcgacaaattcaggttcatgcagaacagggtttaattcaatatcccactgcatggcaatcagttggacacatgatg

SEQ ID NO: 47596 - DNA, 80 bp, synthetic construct
  source 1..80: mol_type = other DNA
ttgctacttccgaggtataactttattatttgctacttcgaatgcctaaaaccagtaatgcaggatgaagattaattgcg

SEQ ID NO: 47597 - DNA, 80 bp, synthetic construct
  source 1..80: mol_type = other DNA
gaggaatcaggaattcaactttagttccttaaggcctcgtccgaatcttcatcagttcgtaagttcttttatagaagtca

SEQ ID NO: 47598 - DNA, 80 bp, synthetic construct
  source 1..80: mol_type = other DNA
ttagcttctaaggtgattatattttagtattaaattttgctaattgcttgctataaagttgaaatgtctaatgcttaaat

SEQ ID NO: 47599 - DNA, 80 bp, synthetic construct
  source 1..80: mol_type = other DNA
taggggcaataatatctaattgaacttagccatttaaaatttagtgcataaatctgggctaactccaccaggtcaactcc

SEQ ID NO: 47600 - DNA, 80 bp, synthetic construct
  source 1..80: mol_type = other DNA
ggtattgagtttgatgtgactcacaaaggaatggccctattgcatagactgaaaactaatgactttgcccctgcatggtc

SEQ ID NO: 47601 - DNA, 80 bp, synthetic construct
  source 1..80: mol_type = other DNA
ccgcaagaagcctgggccggcgaaattttccctccttcatgagtccacactgaaagcatttacacaagggtcctcgacac

SEQ ID NO: 47602 - DNA, 80 bp, synthetic construct
  source 1..80: mol_type = other DNA
ggttaagaaaaaagcttgaggaagattaagaaaaactgcttattgggtctttccgtgttttagatgaagcagttgacatt

SEQ ID NO: 47603 - DNA, 80 bp, synthetic construct
  source 1..80: mol_type = other DNA
ggtagattaaatcgaggaaactctagatcaacgtggtttgttcatgatgatttaatagacatcttaggctatggggacta

SEQ ID NO: 47604 - DNA, 80 bp, synthetic construct
  source 1..80: mol_type = other DNA
tgttttttggaagatcccaatttcactgttaccactgaacacacaaggaatcccccatgctgctatggattggtatcaga

SEQ ID NO: 47605 - DNA, 80 bp, synthetic construct
  source 1..80: mol_type = other DNA
tacaaaaacactgggggcatcctgtgctacatagtgaaacagcaatccaaaaagttaaaaaacatgctacggtgctaaaa

SEQ ID NO: 47606 - DNA, 80 bp, synthetic construct
  source 1..80: mol_type = other DNA
aaacaacccccctgaagggcctagttcatacaggggtcatatgggagggattgaaggactgcaacaaaaactctggacaa

SEQ ID NO: 47607 - DNA, 80 bp, synthetic construct
  source 1..80: mol_type = other DNA
tatctattttggaaaaaaacaatatttgaatggggtccaattgccccagtcccttaaaacggctacaagaatggcaccat

SEQ ID NO: 47608 - DNA, 80 bp, synthetic construct
  source 1..80: mol_type = other DNA
ggatggaatcccatacattggatcaaggacagaagataagatagggcaacctgctattaaaccaaaatgtccttccgcag

SEQ ID NO: 47609 - DNA, 80 bp, synthetic construct
  source 1..80: mol_type = other DNA
ttatcccaaaataggacttctgtacagttttggggcctttgtaagttattatcttggcaatacaattcttcggactaaga

SEQ ID NO: 47610 - DNA, 80 bp, synthetic construct
  source 1..80: mol_type = other DNA
catcactgcccaaaacaagtggacattacgatgatgatgacgacattccctttccaggacccatcaatgatgacgacaat

SEQ ID NO: 47611 - DNA, 80 bp, synthetic construct
  source 1..80: mol_type = other DNA
ccaagccagtgcctaacagatcgaccaagggtggacaacagaaaaacagtcaaaagggccagcatacagagggcagacag

SEQ ID NO: 47612 - DNA, 80 bp, synthetic construct
  source 1..80: mol_type = other DNA
caggggccatttgatgccgttttgtattatcatatgatgaaggatgagcctgtagttttcagtaccagtgatggtaaaga

SEQ ID NO: 47613 - DNA, 80 bp, synthetic construct
  source 1..80: mol_type = other DNA
aagggcaggggccatactgtggccacgactcaaaacgacagaatgccaggccctgagctttcgggctggatctctgagca

SEQ ID NO: 47614 - DNA, 80 bp, synthetic construct
  source 1..80: mol_type = other DNA
gggtaagattgaatctagagatgagactgtccctcaaagtgttagggaggcattcaacaatctagacagtaccacttcac

SEQ ID NO: 47615 - DNA, 80 bp, synthetic construct
  source 1..80: mol_type = other DNA
gtaaaacattagaaatagtttaaagacaaattgctcggaatcacaaaattccgagtatggattctcgtcctcagaaagtc

SEQ ID NO: 47616 - DNA, 80 bp, synthetic construct
  source 1..80: mol_type = other DNA
ttcctgacaccggagtcagtcaatggagacactccatcgaatccactcaggccaattgctgatgacaccatcgaccatgc

SEQ ID NO: 47617 - DNA, 80 bp, synthetic construct
  source 1..80: mol_type = other DNA
tgggaagaaggggaacagtgccgatctaacatctccggagaaaatccaagcaataatgacttcactccaggactttaaga

SEQ ID NO: 47618 - DNA, 80 bp, synthetic construct
  source 1..80: mol_type = other DNA
aacaggggattgttcggcaaagagtcatcccagtgtatcaagtaaacaatcttgaggaaatttgccaacttatcatacag

SEQ ID NO: 47619 - DNA, 80 bp, synthetic construct
  source 1..80: mol_type = other DNA
atctctcttagattatttgtcttccagagtaggggtcatcaggtccttttcaattggataaccaaaataagcttcactag

SEQ ID NO: 47620 - DNA, 80 bp, synthetic construct
  source 1..80: mol_type = other DNA
tggggcttcaggtccggtgtcccaccaaaggtggtcaattatgaagctggtgaatgggctgaaaactgctacaatcttga

SEQ ID NO: 47621 - DNA, 80 bp, synthetic construct
  source 1..80: mol_type = other DNA
accagcagcgccagacgggattcggggcttcccccggtgccggtatgtgcacaaagtatcaggaacgggaccatgtgccg

SEQ ID NO: 47622 - DNA, 80 bp, synthetic construct
  source 1..80: mol_type = other DNA
ccgaaattgatacaacaatcggggagtgggccttctgggaaactaaaaaaacctcactagaaaaattcgcagtgaagagt

SEQ ID NO: 47623 - DNA, 80 bp, synthetic construct
  source 1..80: mol_type = other DNA
gatggggtggcacatgccacattttgggaccggactgctgtatcgaaccacatgattggaccaagaacataacagacaaa

SEQ ID NO: 47624 - DNA, 80 bp, synthetic construct
  source 1..80: mol_type = other DNA
ttattcatgattttgttgataaaacccttccggaccagggggacaatgacaattggtggacaggatggagacaatggata

SEQ ID NO: 47625 - DNA, 80 bp, synthetic construct
  source 1..80: mol_type = other DNA
cgcgaagggcttgggcaagatcaggcagaacccgttctcgaagtatatcaacgattacacagtgataaaggaggcagttt

SEQ ID NO: 47626 - DNA, 80 bp, synthetic construct
  source 1..80: mol_type = other DNA
aacccggggacatgctcatggtctgatgagggtaccccttaataaggctgactaaaacactatataaccttctacttgat

SEQ ID NO: 47627 - DNA, 80 bp, synthetic construct
  source 1..80: mol_type = other DNA
aataaaccttattattcagattaggccccaagaggcattcttcatctccttttagcaaaatactatttcaggatagtcca

SEQ ID NO: 47628 - DNA, 80 bp, synthetic construct
  source 1..80: mol_type = other DNA
cgtcttttagctgtataccagttgcccctgagatacgccacaaaagtgtctctgagctaaagtggtctgtacacatctca

SEQ ID NO: 47629 - DNA, 80 bp, synthetic construct
  source 1..80: mol_type = other DNA
tatcacacaaagacctcccgtattgtaaaaccagagctaacaacagacttctagacagccatgcaatccagagctgtcat

SEQ ID NO: 47630 - DNA, 80 bp, synthetic construct
  source 1..80: mol_type = other DNA
aatgtcgcgataattctcgtctgacatgttgatagcttttgtttaatacacgggatatctctgtgtgatatccgatatct

SEQ ID NO: 47631 - DNA, 80 bp, synthetic construct
  source 1..80: mol_type = other DNA
ctataaattgttcttggagagcaatgctgtacagtatttggaaggtcatggattcaaatttgagctccggaagaaggacg

SEQ ID NO: 47632 - DNA, 80 bp, synthetic construct
  source 1..80: mol_type = other DNA
ataagagaatgattgctacaaaggattcattccaatcattcaatataacagaaccacatatcacagcaaattcactagaa

SEQ ID NO: 47633 - DNA, 80 bp, synthetic construct
  source 1..80: mol_type = other DNA
agtaccccacaaggcatgaggtgtcctgaacatgcaggttcttttagaaagaaatgttcttttgccacaatgccctcatg

SEQ ID NO: 47634 - DNA, 80 bp, synthetic construct
  source 1..80: mol_type = other DNA
ataaaagaatgatagctacaaaggactcattccaatcatttaatataacagaaccacacattacagcgaattcgctagaa

SEQ ID NO: 47635 - DNA, 80 bp, synthetic construct
  source 1..80: mol_type = other DNA
ccagtatgaaggaaataccatttctggatataaaagaatgatagctacaaaggactcattccaatcatttaatataacag

SEQ ID NO: 47636 - DNA, 80 bp, synthetic construct
  source 1..80: mol_type = other DNA
ctctacaattgtggaaggtgaagtgaaggcgtttcgggcttgagccaatcagttattcatctcaggatctttccttaatg

SEQ ID NO: 47637 - DNA, 80 bp, synthetic construct
  source 1..80: mol_type = other DNA
cggacacacaaaaagaaagaaggttttttgatctttattgtgtgcgaataactatgaggaagattaataattttcctctc

SEQ ID NO: 47638 - DNA, 80 bp, synthetic construct
  source 1..80: mol_type = other DNA
tatcttgcaacgtcgacattcccatcaatctgaggagtaacagctatcaaaacaacgcatatgtagacattgtcggtaat

SEQ ID NO: 47639 - DNA, 80 bp, synthetic construct
  source 1..80: mol_type = other DNA
agtactgcctaagacaactatttataataacagttggaattcattttttcacccaagctattctcaagttaacagttgaa

SEQ ID NO: 47640 - DNA, 80 bp, synthetic construct
  source 1..80: mol_type = other DNA
acaggactcgacccaggacaactccggatacgtaacataagaaaagaacaacccttgacccagagtgaacaagctcatac

SEQ ID NO: 47641 - DNA, 80 bp, synthetic construct
  source 1..80: mol_type = other DNA
tatcaaggctaatcctcgggcctgcctggagtccacaatggccaaggctactgggaggtacaaccttatctccccaaaga

SEQ ID NO: 47642 - DNA, 80 bp, synthetic construct
  source 1..80: mol_type = other DNA
aagatcttgaaaaagggctggttctgaatgacctttgcactctctcagtggcccagacggtccagggatggaaggttacc

SEQ ID NO: 47643 - DNA, 80 bp, synthetic construct
  source 1..80: mol_type = other DNA
tgggctgggattgaatttgatgttacacagaaagggatggccttattgcacaggctcaagaccagtgattttgctccagc

SEQ ID NO: 47644 - DNA, 80 bp, synthetic construct
  source 1..80: mol_type = other DNA
ctggtcaatgaccaggaacttatttccacatctctttcaaaacccgaactctacaattgagtcgccactttgggcactgc

SEQ ID NO: 47645 - DNA, 80 bp, synthetic construct
  source 1..80: mol_type = other DNA
ggtcattttcagactgatgagaacaaattttctaattaagttcctccttatacatcaagggatgcatatggtagcaggac

SEQ ID NO: 47646 - DNA, 80 bp, synthetic construct
  source 1..80: mol_type = other DNA
gggtcatactagcagcaggtattcaagatcagctaattgatcaatcgttgatcgaacccttggcaggagcgctaggctta

SEQ ID NO: 47647 - DNA, 80 bp, synthetic construct
  source 1..80: mol_type = other DNA
attgctgattggcttcttactactggaacaaaccactttcaaatgcgcacacaacaggctaaggagcaactaagtctaaa

SEQ ID NO: 47648 - DNA, 80 bp, synthetic construct
  source 1..80: mol_type = other DNA
aatgttgtccctggtgcgatcaaacatcctaaagttcatcaaccaactagatgcactacatgttgtgaattacaatggac

SEQ ID NO: 47649 - DNA, 80 bp, synthetic construct
  source 1..80: mol_type = other DNA
ttctcagtagcattgaaattggcaccaaaagccatacaattataattacccggacaaatatgggttttttggtagagttg

SEQ ID NO: 47650 - DNA, 80 bp, synthetic construct
  source 1..80: mol_type = other DNA
caagagcctgacaaatcagccatgaacaccagaaaaccaggaccagtcaaattctccctcctccatgaatcaaccttgaa

SEQ ID NO: 47651 - DNA, 80 bp, synthetic construct
  source 1..80: mol_type = other DNA
gacacttgctaaaaaacctgcgacccagatgcaagcactaatcttagaattcaatagttctctcgctatttaactcaact

SEQ ID NO: 47652 - DNA, 80 bp, synthetic construct
  source 1..80: mol_type = other DNA
catcaaaatgctaacttgtgatccttaagctgcaccttagacttttgataagaatactaactattgatgattgtctttga

SEQ ID NO: 47653 - DNA, 80 bp, synthetic construct
  source 1..80: mol_type = other DNA
catgaggataagaacactgcccattagatagatggggttcaccattaatacacaattacccaatcatgttaacagcagtt

SEQ ID NO: 47654 - DNA, 80 bp, synthetic construct
  source 1..80: mol_type = other DNA
agatccctcaagtatatcaagttcattctaccctttgcattgtcactctaattaaatcacctgatacaattatgttaatt

SEQ ID NO: 47655 - DNA, 80 bp, synthetic construct
  source 1..80: mol_type = other DNA
agctagattctctcatttttagacttgtttgctagaataattgatcatccacttgattacacatccaactagggtctagt

SEQ ID NO: 47656 - DNA, 80 bp, synthetic construct
  source 1..80: mol_type = other DNA
acgatgctaacgatgctgtcatcgcaaactctgtagctcaagcacgtttttcaggattattgatcgttaaaacagtgcta

SEQ ID NO: 47657 - DNA, 80 bp, synthetic construct
  source 1..80: mol_type = other DNA
tcatagattgctaataatctttagttcaatactaatgacaaagagattagattagctatagcttgaggaagattaagaaa

SEQ ID NO: 47658 - DNA, 80 bp, synthetic construct
  source 1..80: mol_type = other DNA
aagtgtctgtggggtctttccgtgtagaagggcacacagccataattcttcctctttatacaacatggctacacaacata

SEQ ID NO: 47659 - DNA, 80 bp, synthetic construct
  source 1..80: mol_type = other DNA
cgcaatatccagacgcaaggttatcatcacctatagttttagatcagtgtgatcttgtcactcgtgcttgtggattgtat

SEQ ID NO: 47660 - DNA, 80 bp, synthetic construct
  source 1..80: mol_type = other DNA
cgactaaaatatgacaccactgttacagagtttttgagtgatgtgccggtagcaacattgccagcggattttttagtacc

SEQ ID NO: 47661 - DNA, 80 bp, synthetic construct
  source 1..80: mol_type = other DNA
tacatttcttaggactctatcaggaaatggttcttgtccaattgatccaaaatgcagtcaatttttagaagaaattgtca

SEQ ID NO: 47662 - DNA, 80 bp, synthetic construct
  source 1..80: mol_type = other DNA
attatactctacaagatattcgcttcctaaactattacctcaatcgagccggagtgcataacgatcatgtggatagggat

SEQ ID NO: 47663 - DNA, 80 bp, synthetic construct
  source 1..80: mol_type = other DNA
tttggacaaaaaattcgcaatctaatttgcgacaatgaggttttacatcaaatgtttcactggtatgatcttgcaattct

SEQ ID NO: 47664 - DNA, 80 bp, synthetic construct
  source 1..80: mol_type = other DNA
agcacgtagagggcgactaaatagagggaataatcgctcaacatggtttgcaagtgataatttggtagatatcctaggtt

SEQ ID NO: 47665 - DNA, 80 bp, synthetic construct
  source 1..80: mol_type = other DNA
atggagattatattttttggaaaataccattatcactactaccagtggatacacaaggcctcccacatgcagccaaggac

SEQ ID NO: 47666 - DNA, 80 bp, synthetic construct
  source 1..80: mol_type = other DNA
atcacatccttcagaaaacagagcacggagtgcgtcttcatcctttggcaagaactgctaaggtcaagaacgaagtaaat

SEQ ID NO: 47667 - DNA, 80 bp, synthetic construct
  source 1..80: mol_type = other DNA
tggtatcatgaatcggttttcaaggaggctattcaaggccatacacacatcgtgtccgtctctacagcagatgtcttaat

SEQ ID NO: 47668 - DNA, 80 bp, synthetic construct
  source 1..80: mol_type = other DNA
catgtgtaaggacataatcacctgtcgatttaatactttactgattgctgctgtggcaaatctagaggattcagttcatt

SEQ ID NO: 47669 - DNA, 80 bp, synthetic construct
  source 1..80: mol_type = other DNA
cagattaccctttaccagaaacagtgtctgacctatacaaagcaggagattatttaatctcattgctaggatcagaaggt

SEQ ID NO: 47670 - DNA, 80 bp, synthetic construct
  source 1..80: mol_type = other DNA
tacaaagtcataaaattccttgagccgttatgcttagcaaagatccaactctgctcaaattacactgagaggaaaggaag

SEQ ID NO: 47671 - DNA, 80 bp, synthetic construct
  source 1..80: mol_type = other DNA
attcctcactcaaatgcatttagctgtaaatcatacacttgaggaacttacagggtcccgagaattaaggccacaacaga

SEQ ID NO: 47672 - DNA, 80 bp, synthetic construct
  source 1..80: mol_type = other DNA
ttcggaaggtaagggaattccatcaaatgctgataaaccttaaggcaactcctcaacaactctgtgagttgttttcagtg

SEQ ID NO: 47673 - DNA, 80 bp, synthetic construct
  source 1..80: mol_type = other DNA
caaaagcattgggggcaccctgtcttgcatagcgaaaaggctatccaaaaagtaaagaagcatgcaacagtgataaaagc

SEQ ID NO: 47674 - DNA, 80 bp, synthetic construct
  source 1..80: mol_type = other DNA
attgcgcccaataataatctttgaaacatattgtgtgtttaaatacagcattgcaaaacattattttgatagtcagggta

SEQ ID NO: 47675 - DNA, 80 bp, synthetic construct
  source 1..80: mol_type = other DNA
gtacgtggtacagtgtgacttctgacagatgcttaacaccaggcctttcctcttacatcaaaagaaaccaatttcctcca

SEQ ID NO: 47676 - DNA, 80 bp, synthetic construct
  source 1..80: mol_type = other DNA
ctacctatgatcaaagaacttttgtgggaattttatcacttagatcatcctccgttattctccaccaaagtgattagtga

SEQ ID NO: 47677 - DNA, 80 bp, synthetic construct
  source 1..80: mol_type = other DNA
tcctttaaggctgcccttagctcgctagcacaacatggagagtatgctccttttgctcgcttgctgaatctttctggagt

SEQ ID NO: 47678 - DNA, 80 bp, synthetic construct
  source 1..80: mol_type = other DNA
tttgagtatctttattaaagatcgtgctactgcagtcgagaaaacatgctgggacgcagtttttgaacccaatgttcttg

SEQ ID NO: 47679 - DNA, 80 bp, synthetic construct
  source 1..80: mol_type = other DNA
gttataacccaccgaataaatttgctacaaaaagggtacctgagcaattccttgaacaggagaatttctcaatagagagt

SEQ ID NO: 47680 - DNA, 80 bp, synthetic construct
  source 1..80: mol_type = other DNA
gtcctacattatgctcaacgtctggaatatcttctcccggagtaccggaacttctctttttcactcaaggagaaggagtt

SEQ ID NO: 47681 - DNA, 80 bp, synthetic construct
  source 1..80: mol_type = other DNA
aaacattggacgagcttttgggaaattgccatatccaacacgcaatgttcaaactctgtgcgaagctttgttagcagatg

SEQ ID NO: 47682 - DNA, 80 bp, synthetic construct
  source 1..80: mol_type = other DNA
gtttggcgaaagcattcccaagcaatatgatggttgtgacagagcgcgagcaaaaagaaagccttttgcatcaagcgtct

SEQ ID NO: 47683 - DNA, 80 bp, synthetic construct
  source 1..80: mol_type = other DNA
tgcactacactataccacagtgttatatacatgtgagtgattattataaccccccacatggagtctctctcgaaaaccga

SEQ ID NO: 47684 - DNA, 80 bp, synthetic construct
  source 1..80: mol_type = other DNA
gaaaatccaccagaaggtccaagctcttaccgtggtcatctaggcgggattgagggacttcaacaaaaactctggacaag

SEQ ID NO: 47685 - DNA, 80 bp, synthetic construct
  source 1..80: mol_type = other DNA
gtataactgtactctctgtatttcccctcgaaactgagtctagtgagcaagaattaagttctgaagataatgccgctaga

SEQ ID NO: 47686 - DNA, 80 bp, synthetic construct
  source 1..80: mol_type = other DNA
gtagctgctagcttagcaaaagtcacaagtgcctgcggcatctttttaaaacctgatgaaacttttgttcactcaggttt

SEQ ID NO: 47687 - DNA, 80 bp, synthetic construct
  source 1..80: mol_type = other DNA
tcatttattttggcaaaaaacaatatttgaatggagtacaattacctcaatcactgaaaactgctactagaattgcaccc

SEQ ID NO: 47688 - DNA, 80 bp, synthetic construct
  source 1..80: mol_type = other DNA
ctaggcacgtagtcccttgtagagtagcagctgcattccatacctttttttccgtaagaatcttacaatatcatcatctt

SEQ ID NO: 47689 - DNA, 80 bp, synthetic construct
  source 1..80: mol_type = other DNA
ggcttcaacaagggaacagacctgggtcaattgtcattaagcaagccattagattttggaactataactttggccttggc

SEQ ID NO: 47690 - DNA, 80 bp, synthetic construct
  source 1..80: mol_type = other DNA
agtaccacaagtcttgggtggcttatcattcctaaatccagaaaaatgtttttatagaaatctgggtgatcctgttactt

SEQ ID NO: 47691 - DNA, 80 bp, synthetic construct
  source 1..80: mol_type = other DNA
cagggctgtttcagctcaagacatatcttcaaatgatccacatggatgatttgtttttacctttgatcgcaaagaaccca

SEQ ID NO: 47692 - DNA, 80 bp, synthetic construct
  source 1..80: mol_type = other DNA
gggaactgtagcgcaattgactttgtgttaaaccctagtgggttaaacgtaccggggtcacaggatttgacatccttcct

SEQ ID NO: 47693 - DNA, 80 bp, synthetic construct
  source 1..80: mol_type = other DNA
acgtcagatagtgcgccgaacaattactctaagtgctaaaaataaattaataaacactttgttccattcttctgctgatt

SEQ ID NO: 47694 - DNA, 80 bp, synthetic construct
  source 1..80: mol_type = other DNA
caggagtaaatgtgggggaacagtatcagcaactacgagaagcagccactgaggcagaaaaacaattgcagaaatacgct

SEQ ID NO: 47695 - DNA, 80 bp, synthetic construct
  source 1..80: mol_type = other DNA
tagaagatgaaatggtttgcaaatggttgctttcttctacaccagtcatgagtaggtttgccgccgatatattttctcgc

SEQ ID NO: 47696 - DNA, 80 bp, synthetic construct
  source 1..80: mol_type = other DNA
actcccagtgggaaacgtttacagatcttaggttaccttgaagggactagaacattgttagcctctaaaattataaatca

SEQ ID NO: 47697 - DNA, 80 bp, synthetic construct
  source 1..80: mol_type = other DNA
taatactgagacacctatcctagatcgattgaggaaaattacgctgcaaaggtggagcctgtggtttagttatctcgacc

SEQ ID NO: 47698 - DNA, 80 bp, synthetic construct
  source 1..80: mol_type = other DNA
actgtgatcaagttctggctgatgccctaactcagataacctgcactgtggacttagcacagattcttcgcgagtacacc

SEQ ID NO: 47699 - DNA, 80 bp, synthetic construct
  source 1..80: mol_type = other DNA
tgggcacacatactagagggaaggcagctcattggagcaacacttccttgtatactagaacaactaaatgtcatctggct

SEQ ID NO: 47700 - DNA, 80 bp, synthetic construct
  source 1..80: mol_type = other DNA
caaaccatatgagcattgccctaaatgtgcaaagtcagcaaaccctaaaggggaaccttttgtttctattgcaattaaaa

SEQ ID NO: 47701 - DNA, 80 bp, synthetic construct
  source 1..80: mol_type = other DNA
aacatgtagtaagtgcttggcctgatcaatcacgacttagttggacaattggagatggcatcccttatatcggatctcga

SEQ ID NO: 47702 - DNA, 80 bp, synthetic construct
  source 1..80: mol_type = other DNA
acagaggataagattgggcagccagccatcaaaccaaaatgcccttcagcagccttacgtgaagcaattgagttgacatc

SEQ ID NO: 47703 - DNA, 80 bp, synthetic construct
  source 1..80: mol_type = other DNA
aagattgacttgggttactcaaggtggagcaaacagcgacttactagttaaacccttcatagaagcacgagtaaatttaa

SEQ ID NO: 47704 - DNA, 80 bp, synthetic construct
  source 1..80: mol_type = other DNA
gcgtacaggaaattctccaaatgacaccttctcattactccggcaacattgtgcatcgatataatgatcaatatagtcca

SEQ ID NO: 47705 - DNA, 80 bp, synthetic construct
  source 1..80: mol_type = other DNA
gaatctcgcgagcttgaccatctaggtctcgatgatcaagagaagaagatcttgaaagacttccatcagaagaaaaatga

SEQ ID NO: 47706 - DNA, 80 bp, synthetic construct
  source 1..80: mol_type = other DNA
cactcatttatggcaaataggatgagtaattctgctactaggttagttgtttcgacaaacactcttggagaattttcagg

SEQ ID NO: 47707 - DNA, 80 bp, synthetic construct
  source 1..80: mol_type = other DNA
aggaggtcagtcagcaagagatagtaatattatcttccagaatgtcattaattttgctgttgcactttttgatctacgat

SEQ ID NO: 47708 - DNA, 80 bp, synthetic construct
  source 1..80: mol_type = other DNA
ttaggaacgtggctacttcttctatacaacatcatcgggctcatcttcatttgtcaaagtgttgcacgcgagaggttcca

SEQ ID NO: 47709 - DNA, 80 bp, synthetic construct
  source 1..80: mol_type = other DNA
gcccaatatttagtttatacatcaacattgccattggaccttacacggtatcgggataatgagttgatttacgatgacaa

SEQ ID NO: 47710 - DNA, 80 bp, synthetic construct
  source 1..80: mol_type = other DNA
tccattaagaggtggtttaaattgcaatctttcttttgataatccgcttttcaagggccagagacttaacataattgaag

SEQ ID NO: 47711 - DNA, 80 bp, synthetic construct
  source 1..80: mol_type = other DNA
aagacttgattagactaccttacttatcaggatgggagctagctaaaactgttatccaatctataatttctgacagcaac

SEQ ID NO: 47712 - DNA, 80 bp, synthetic construct
  source 1..80: mol_type = other DNA
catatcctaagattggactactatatagttttggtgcactcatcagttattatctaggcaacaccattattagaaccaaa

SEQ ID NO: 47713 - DNA, 80 bp, synthetic construct
  source 1..80: mol_type = other DNA
aaattgactcttaacaacttcatatattacctagctactcaaatacataatttacctcatcgctcgttgagaatccttaa

SEQ ID NO: 47714 - DNA, 80 bp, synthetic construct
  source 1..80: mol_type = other DNA
acctactttgaaacacgctagtgttatctcgagattaataagtattgactctcacttctcaatttatattggaggaactg

SEQ ID NO: 47715 - DNA, 80 bp, synthetic construct
  source 1..80: mol_type = other DNA
aatcagcttccagcagacaacagccatggtcacactacggaaggaaaggctagccaagctcactgaggcaatcacctcca

SEQ ID NO: 47716 - DNA, 80 bp, synthetic construct
  source 1..80: mol_type = other DNA
ctggtgatcgaggactttccgatgcggcaagattgtttcttagaactgccattactgtcttccttcaattcgttagaaag

SEQ ID NO: 47717 - DNA, 80 bp, synthetic construct
  source 1..80: mol_type = other DNA
tggatagttgaacgcaagacagctattccactgtgggtcatctaccctctagaaggtcaaagtcctagtccgatcaacag

SEQ ID NO: 47718 - DNA, 80 bp, synthetic construct
  source 1..80: mol_type = other DNA
ttttctacaccacgtcatcgcattgttgcaacatgagtcctcccacgatcatgtttgtgctgcagaagcccacagtcgag

SEQ ID NO: 47719 - DNA, 80 bp, synthetic construct
  source 1..80: mol_type = other DNA
tggagacatttgataatttagtttatatgtgtaaaagcacagcaagtaacttctttcatgcttcattagcatactggaga

SEQ ID NO: 47720 - DNA, 80 bp, synthetic construct
  source 1..80: mol_type = other DNA
agtcgatctaaaaatcaagacaaaagagagatgacaaagatattatctttgacgcaaacggaaaagaaaaattcattcgg

SEQ ID NO: 47721 - DNA, 80 bp, synthetic construct
  source 1..80: mol_type = other DNA
ctatacagcacatccagaaagcactgctgttcttggttccctccagaacagccttgctccacctccatctgctgacgagg

SEQ ID NO: 47722 - DNA, 80 bp, synthetic construct
  source 1..80: mol_type = other DNA
ctacatatgataggaaaaacaaagttttgaaagcttccagacctggcaagtattcccagaatacaaccaaagccccaccc

SEQ ID NO: 47723 - DNA, 80 bp, synthetic construct
  source 1..80: mol_type = other DNA
aaccaaaccagttgtcgcgatgtatctcccaatatcacaggcacagatgggtgcccttctgccaatgagggttctaacag

SEQ ID NO: 47724 - DNA, 80 bp, synthetic construct
  source 1..80: mol_type = other DNA
caataacaataatttagtctcgcacagaattgtactgccgttttttacattgtctcataattataacgaaagaccctcta

SEQ ID NO: 47725 - DNA, 80 bp, synthetic construct
  source 1..80: mol_type = other DNA
tcagaaagtctgaggggacaacagagattgtaaggcttactcggcagctgagggcaataccagacaccacaatatattgc

SEQ ID NO: 47726 - DNA, 80 bp, synthetic construct
  source 1..80: mol_type = other DNA
catcccttctcaagacaggaaaacagtatgatgatgacaacgatatcccctttcctgggcccatcaatgataacgaaaac

SEQ ID NO: 47727 - DNA, 80 bp, synthetic construct
  source 1..80: mol_type = other DNA
cgcttcacgggaatagtttcttcaatgcactataagctcgatgaagtcctttgggaatttgataattttaagtctgctat

SEQ ID NO: 47728 - DNA, 80 bp, synthetic construct
  source 1..80: mol_type = other DNA
aacacttgccgaaggtgaaggttcgggtgcattactcttattacaaaaatataaagtagaaaccttgttttttaatacac

SEQ ID NO: 47729 - DNA, 80 bp, synthetic construct
  source 1..80: mol_type = other DNA
tagccacagaacacagcattgaagcagaaattatttctggaataactacaccaagaatgcttctccctattatgtctagg

SEQ ID NO: 47730 - DNA, 80 bp, synthetic construct
  source 1..80: mol_type = other DNA
ttccatggtggacaaataaaagtcactttaaacaattctgcaagccagattaccgatattactaatccaagttggttggc

SEQ ID NO: 47731 - DNA, 80 bp, synthetic construct
  source 1..80: mol_type = other DNA
agaccaaaaatctaggatccctaagcaagtagagattataaccatggatgctgaaacaacagaaaacattaatcggtcaa

SEQ ID NO: 47732 - DNA, 80 bp, synthetic construct
  source 1..80: mol_type = other DNA
gggcaaagacagtccaaaagactcaacttgtcctattcaactaatctgttttgtctcagtagttcacatattgatcatac

SEQ ID NO: 47733 - DNA, 80 bp, synthetic construct
  source 1..80: mol_type = other DNA
aattgtacgaagcagtccaacagctgattgtctcacatattgatccgaatgcactcaaagttgtggttcttaaagttttc

SEQ ID NO: 47734 - DNA, 80 bp, synthetic construct
  source 1..80: mol_type = other DNA
ttaagtgacattgatggaatcctatggctgaatgataaccttacccctttgtttgggctgggttacttgatcaagccgat

SEQ ID NO: 47735 - DNA, 80 bp, synthetic construct
  source 1..80: mol_type = other DNA
cacctctagcccaaaatctagtgagtggtacctatgtctctcaaaccttctttcaacttcaagacgattacctcatcaga

SEQ ID NO: 47736 - DNA, 80 bp, synthetic construct
  source 1..80: mol_type = other DNA
gtcatactacttgcatgcatgttattcaaacagcactccagctacaaattcagaggagctcatattggcttagccacctt

SEQ ID NO: 47737 - DNA, 80 bp, synthetic construct
  source 1..80: mol_type = other DNA
gtccagtatgccaatcataatttgcatttagattatattaatctcggtttcccttcattggagagggttttataccatag

SEQ ID NO: 47738 - DNA, 80 bp, synthetic construct
  source 1..80: mol_type = other DNA
tcagaacagcaagacgatgatccaacagattctcaggacactaccatccctgatatcattgttgacccggatgatggcag

SEQ ID NO: 47739 - DNA, 80 bp, synthetic construct
  source 1..80: mol_type = other DNA
atacaatttagtcgattctcagaaaggccctttgacttccattgtccaacatctagcgcacctgcagaccgagattaggg

SEQ ID NO: 47740 - DNA, 80 bp, synthetic construct
  source 1..80: mol_type = other DNA
agttggttaatgactataatcaacaaagacaaagtcgaacccaaacatatcatttcattaaaacaataaaaggtcgtatt

SEQ ID NO: 47741 - DNA, 80 bp, synthetic construct
  source 1..80: mol_type = other DNA
acaaaattggtaaatgattaccttaagttctttctaataatacaagccttaaagcacaattgcacatggcaagaggaact

SEQ ID NO: 47742 - DNA, 80 bp, synthetic construct
  source 1..80: mol_type = other DNA
aagagctcttccagatctaattagtgtctgcactcgattctatcatactcgaaactgttcatgtgaaaaccggttcctag

SEQ ID NO: 47743 - DNA, 80 bp, synthetic construct
  source 1..80: mol_type = other DNA
tacagactttatacttatcacgcatgcaggattcggaaatcaaactaatagatagattgaccggccttcttagtctatgt

SEQ ID NO: 47744 - DNA, 80 bp, synthetic construct
  source 1..80: mol_type = other DNA
ccaaatggtttttttcggtaaggactcttgacgtacaaactccacatagttatacaatggtaccaggacactatatgtaa

SEQ ID NO: 47745 - DNA, 80 bp, synthetic construct
  source 1..80: mol_type = other DNA
attgaccctaagaaagagtaattcgacacacagagttctcaagtgaaacccctcatctcagattatctgtggttgcaatt

SEQ ID NO: 47746 - DNA, 80 bp, synthetic construct
  source 1..80: mol_type = other DNA
ctaatatccgattgttaccccgtgagtataactccagattaatataagaaaataccttttgtcctgcaaatttatcttaa

SEQ ID NO: 47747 - DNA, 80 bp, synthetic construct
  source 1..80: mol_type = other DNA
attcaagtacatacgctccaaatcgtataaaatattaagaaaaagttaatctgcttgctttaattataactttaatattc

SEQ ID NO: 47748 - DNA, 80 bp, synthetic construct
  source 1..80: mol_type = other DNA
gacaaatagttaacggtctcatcactcaaaaatttcattaacaaaagaagtactctgagtatattcacatatcatatgtg

SEQ ID NO: 47749 - DNA, 80 bp, synthetic construct
  source 1..80: mol_type = other DNA
atacaacaattatggagactatcctagtgagacggcgaatgcccctgaagaccttgttctttttgaccttgaagatggtg

SEQ ID NO: 47750 - DNA, 80 bp, synthetic construct
  source 1..80: mol_type = other DNA
attaacatataagcaacgcatgatgcgccttcctcttacttattgtgttgtcacgcagtcgttgtactacctcgaaaatt

SEQ ID NO: 47751 - DNA, 80 bp, synthetic construct
  source 1..80: mol_type = other DNA
ccaaacaataaatcgtgtctatcccgcatttagtgtctttaatttaagatctcaaatccaaaaaactgggtttatgttga

SEQ ID NO: 47752 - DNA, 80 bp, synthetic construct
  source 1..80: mol_type = other DNA
tgtaaatcaataataccgaaattgcttgatattaaaataaagcttaaaggatttttccttaaacggtgatgttaggtata

SEQ ID NO: 47753 - DNA, 80 bp, synthetic construct
  source 1..80: mol_type = other DNA
taggaaagctcgatcacgatgtcccttactcagaaaaagaaaaacggaagccctattggccatttaatcgtacacaaaaa

SEQ ID NO: 47754 - DNA, 80 bp, synthetic construct
  source 1..80: mol_type = other DNA
gaaaaacggaagccctattggccatttaatcgtacacaaaaatatctttaccaaattgttttctcttttttgtgtgtcca

SEQ ID NO: 47755 - DNA, 80 bp, synthetic construct
  source 1..80: mol_type = other DNA
acgaggatgatcaccgaccgtcaagttcatcagagaacaacaacaaacacagtcttacaggaactgacagtaacaaaaca

SEQ ID NO: 47756 - DNA, 80 bp, synthetic construct
  source 1..80: mol_type = other DNA
agtaactggaatcgaaacccgactaatatgccaaagaaagactccacacaaaacaatgacaatcctgcacagcgggctca

SEQ ID NO: 47757 - DNA, 80 bp, synthetic construct
  source 1..80: mol_type = other DNA
agaatacgccagggataacatccaggatacaccaacaccccatcgagctctaactcccatcagcgaagaaaccggctcca

SEQ ID NO: 47758 - DNA, 80 bp, synthetic construct
  source 1..80: mol_type = other DNA
atggtcacaatgaagatgacattgatagcatccctcctttggaatcagacgaagaaaacaacactgagacaaccattacc

SEQ ID NO: 47759 - DNA, 80 bp, synthetic construct
  source 1..80: mol_type = other DNA
accacaaaaaataccactgctccaccagcacctgtttatcggagtaattcagaaaaggagcccctcccgcaagaaaaatc

SEQ ID NO: 47760 - DNA, 80 bp, synthetic construct
  source 1..80: mol_type = other DNA
ccagaagcaaccaaaccaagtgagtggtagtgagaataccgacaataaacctcactcagagcaatcagtggaagaaatgt

SEQ ID NO: 47761 - DNA, 80 bp, synthetic construct
  source 1..80: mol_type = other DNA
atcgacacatcctccaaacacaaggaccatttgatgccatcctatactattacatgatgacggaggagccgattgtcttt

SEQ ID NO: 47762 - DNA, 80 bp, synthetic construct
  source 1..80: mol_type = other DNA
agcactagtgatgggaaagaatacgtataccctgattctcttgaaggggagcatccaccgtggctcagtgaaaaagaggc

SEQ ID NO: 47763 - DNA, 80 bp, synthetic construct
  source 1..80: mol_type = other DNA
ccaggagttggacctaattccaaagcttagagtgggacctagtgtatcctcggggctgtaatataatcagccatttaaca

SEQ ID NO: 47764 - DNA, 80 bp, synthetic construct
  source 1..80: mol_type = other DNA
ttatcacaatggatgatcaacaattctactggcctgtaatgaatcacaggaacaaattcatggctatccttcagcaccac

SEQ ID NO: 47765 - DNA, 80 bp, synthetic construct
  source 1..80: mol_type = other DNA
aagtaatttcttcataatgacagatcattgtaaggttattaccaccatccctgcaacaaagcatgaaaaccacactcaac

SEQ ID NO: 47766 - DNA, 80 bp, synthetic construct
  source 1..80: mol_type = other DNA
aacgccctaccacaggataccttggagaccatacaccaagatcagcagctgtgcaaccacccccatgcgaatccaccacc

SEQ ID NO: 47767 - DNA, 80 bp, synthetic construct
  source 1..80: mol_type = other DNA
acaaccaccaaacaataatcccaagaccaaaccgcacacatccagatcaacccaaaccctcaaacaccaccccactccgc

SEQ ID NO: 47768 - DNA, 80 bp, synthetic construct
  source 1..80: mol_type = other DNA
gatcccagaccaaactccgccccagacaagcaccccacccatcccagaaaccgcacggccgagaatcgatccccagcatt

SEQ ID NO: 47769 - DNA, 80 bp, synthetic construct
  source 1..80: mol_type = other DNA
caaaatgcgttattaagaaaaaacatatgatgaagattaaaaccttcatcaacattgcacagactttgatccttaggagt

SEQ ID NO: 47770 - DNA, 80 bp, synthetic construct
  source 1..80: mol_type = other DNA
ttattctagctatctacaaaacgggtccaaaacggaatgatttccactagggctgcagcaatcaatgatccttcattacc

SEQ ID NO: 47771 - DNA, 80 bp, synthetic construct
  source 1..80: mol_type = other DNA
aatcagaaaccagtgtacacgtggccctgaactatcaggatggatctccgaacaattaatgacaggcaaaattccggtac

SEQ ID NO: 47772 - DNA, 80 bp, synthetic construct
  source 1..80: mol_type = other DNA
atgaaatcttcaacgacactgagccccacataagctcagggtccgactgccttcccagacccaaaaacacggccccccgg

SEQ ID NO: 47773 - DNA, 80 bp, synthetic construct
  source 1..80: mol_type = other DNA
actcgcaacacccagacacagaccgatccggtttgcaatcacaattttgaagacgttacacaagcactaacatcattaac

SEQ ID NO: 47774 - DNA, 80 bp, synthetic construct
  source 1..80: mol_type = other DNA
cataacaagccctactgttttcttgttttgccgtgcatttagaataagagacaacttaaacctccgattcggcaacacag

SEQ ID NO: 47775 - DNA, 80 bp, synthetic construct
  source 1..80: mol_type = other DNA
caatgtcatacaaaaacaggctcttaacttagagtctctcgaacaacgcatcatagatctagagaatggcttaaagccaa

SEQ ID NO: 47776 - DNA, 80 bp, synthetic construct
  source 1..80: mol_type = other DNA
tgtatgacatggctaaagtcatttctgcattgaatagatcttgtgctgagatggtagcaaaatatgatctcctggtgatg

SEQ ID NO: 47777 - DNA, 80 bp, synthetic construct
  source 1..80: mol_type = other DNA
tagaggcaagattaacaagcaagaggataaagtacctaaggaagttcaagaagcttttcgtaatctggacagtaccagct

SEQ ID NO: 47778 - DNA, 80 bp, synthetic construct
  source 1..80: mol_type = other DNA
cactaacagaagagaactttggcaagccagatatatctgcaaaggacctacgagacatcatgtatgaccacctaccaggc

SEQ ID NO: 47779 - DNA, 80 bp, synthetic construct
  source 1..80: mol_type = other DNA
ttcggtacggcttttcaccaactggtccaggtaatttgcaagctaggaaaagacaattctgcattggacattattcatgc

SEQ ID NO: 47780 - DNA, 80 bp, synthetic construct
  source 1..80: mol_type = other DNA
tccccaatgtgccctgatccaaataacaaaacggatccccatcttccaggatgccactccgcccacaattcacatccgct

SEQ ID NO: 47781 - DNA, 80 bp, synthetic construct
  source 1..80: mol_type = other DNA
ctcgtggtgacatcccacgtgcctgccaaaaaagtctccgtccagttcctccatcaccaaaaatagacagaggttgggtt

SEQ ID NO: 47782 - DNA, 80 bp, synthetic construct
  source 1..80: mol_type = other DNA
tgcattttccaattgcaggacgggaagacacttgggctcaagatatagggtcccccagtcaaagacacgtgcggtcccat

SEQ ID NO: 47783 - DNA, 80 bp, synthetic construct
  source 1..80: mol_type = other DNA
ggaataatctcaccagacccggcagtgtcttcaggcttcatagccccaagatggagagtcgggcccacaaagcatggatg

SEQ ID NO: 47784 - DNA, 80 bp, synthetic construct
  source 1..80: mol_type = other DNA
cctccctcaccttcagacatcaacgcatggcagtcccaaacaccggtgagggaggcgcccggcgacaacacatgatgata

SEQ ID NO: 47785 - DNA, 80 bp, synthetic construct
  source 1..80: mol_type = other DNA
ggctgatcttcgggataagagacatgaaaaaccaaaaagccgtttacatccagatccaagatcaagagtggcttggaaat

SEQ ID NO: 47786 - DNA, 80 bp, synthetic construct
  source 1..80: mol_type = other DNA
aaggggcacttgttctttgtctcaaaggacttacaaaaacaagggtgatgaagattaagaaaaagcctccttcagttgca

SEQ ID NO: 47787 - DNA, 80 bp, synthetic construct
  source 1..80: mol_type = other DNA
aggagctaattcttaaaacttcatctagactaaggataaatcgattccaatcacgatgaggagaatcatcctacccacgg

SEQ ID NO: 47788 - DNA, 80 bp, synthetic construct
  source 1..80: mol_type = other DNA
caccacctgaatacatggaggctgtttacccaatgagaacaatgaattctggtgcagacaacactgccagtggccctaat

SEQ ID NO: 47789 - DNA, 80 bp, synthetic construct
  source 1..80: mol_type = other DNA
tacacaacaactggtgtgatgacaaatgatactccctctaattcactccgaccagttgcagatgataatattgatcatcc

SEQ ID NO: 47790 - DNA, 80 bp, synthetic construct
  source 1..80: mol_type = other DNA
gagccacacgcctaacagtgttgcctctgcatttatattggaagctatggtgaatgtaatatctggcccgaaagtgctga

SEQ ID NO: 47791 - DNA, 80 bp, synthetic construct
  source 1..80: mol_type = other DNA
ttatgctagcatcatataccatcactcattttggcaaaacctcaaatccccttgtgagaatcaaccgacttggtcctggc

SEQ ID NO: 47792 - DNA, 80 bp, synthetic construct
  source 1..80: mol_type = other DNA
atacctgatcacccactacgactcctaagaataggaaatcaagccttcctacaagagtttgtgctacctcctgtacaact

SEQ ID NO: 47793 - DNA, 80 bp, synthetic construct
  source 1..80: mol_type = other DNA
acgcacaccgcatcaggtttcgaaacagattaccataagattttaacagcaggattgtcagtccaacaaggcattgtgag

SEQ ID NO: 47794 - DNA, 80 bp, synthetic construct
  source 1..80: mol_type = other DNA
gccacaatacttcacttttgatctgacagcgctgaagctgatcacccagccactcccagcggcaacctggacagatgaaa

SEQ ID NO: 47795 - DNA, 80 bp, synthetic construct
  source 1..80: mol_type = other DNA
ccagctgtgtcaactggcacgctccgcccagggatctcattccatcccaaattaaggcctatcctgctaccaggaagagc

SEQ ID NO: 47796 - DNA, 80 bp, synthetic construct
  source 1..80: mol_type = other DNA
tggaaagaagggctccaactccgatctaacatctcctgacaaaatccaggctataatgaatttcctacaagacctcaaaa

SEQ ID NO: 47797 - DNA, 80 bp, synthetic construct
  source 1..80: mol_type = other DNA
ttgtaccaatcgatccaaccaagaatatcatgggtattgaagtgccagaactcctggttcacaggctgactgggaagaag

SEQ ID NO: 47798 - DNA, 80 bp, synthetic construct
  source 1..80: mol_type = other DNA
gacaactaccaagaatggtcaaccaatcattccaattctgctaccaaagtacattggtcttgatcctctatctcaaggtg

SEQ ID NO: 47799 - DNA, 80 bp, synthetic construct
  source 1..80: mol_type = other DNA
atctcacaatggtgatcactcaggactgtgattcctgccactccccggccagtcttcccccagtcaatgaaaaatgacca

SEQ ID NO: 47800 - DNA, 80 bp, synthetic construct
  source 1..80: mol_type = other DNA
tgagactcaacatcacactgccagagcacctcaccgcaagtctatacaacaatcaaccccggcatctacaacctgcaaaa

SEQ ID NO: 47801 - DNA, 80 bp, synthetic construct
  source 1..80: mol_type = other DNA
accagcccatctgatactcctggcatcgggggcaagacaaggcagccaagcagcagcccccgagccgagcccaaacccat

SEQ ID NO: 47802 - DNA, 80 bp, synthetic construct
  source 1..80: mol_type = other DNA
tacacccgagcccaacacccatccagcaacccacaaccgtcaaacgcacagatggacaagcaaagaacatcaagccagga

SEQ ID NO: 47803 - DNA, 80 bp, synthetic construct
  source 1..80: mol_type = other DNA
gcaacacagaccccaagtctaagctgatcaacccctcccgcaatcccaccaacgccagcaaaaatcccccaactcgatac

SEQ ID NO: 47804 - DNA, 80 bp, synthetic construct
  source 1..80: mol_type = other DNA
acaacgggtcattcaagtccaccaggttacaaacctagaagaaatatgccaattgatcattcaagcctttgaagctggtg

SEQ ID NO: 47805 - DNA, 80 bp, synthetic construct
  source 1..80: mol_type = other DNA
taaccccaagcaaatcagttcaaaccgtctatctctccccgcttcactccacaccccagattcagcaaacgatcaacgca

SEQ ID NO: 47806 - DNA, 80 bp, synthetic construct
  source 1..80: mol_type = other DNA
cttcttatgccacagcttatattaagaaaaagaacttgatgaagattaaggcaaccagtggtgctatcttcatctctttg

SEQ ID NO: 47807 - DNA, 80 bp, synthetic construct
  source 1..80: mol_type = other DNA
atttgagtcttaagtgaatacacaggttctaatactgttcttctgtccaacggtataattcagccaggcctaagacagta

SEQ ID NO: 47808 - DNA, 80 bp, synthetic construct
  source 1..80: mol_type = other DNA
gctaatcacagtcatcatgggagcgtcagggattctgcaattgccccgtgagcgcttcaggaaaacatctttctttgttt

SEQ ID NO: 47809 - DNA, 80 bp, synthetic construct
  source 1..80: mol_type = other DNA
gggtaataatcctattccataaagtcttttcaatcccgttgggggttgtacacaacaataccctacaagtgagtgatatt

SEQ ID NO: 47810 - DNA, 80 bp, synthetic construct
  source 1..80: mol_type = other DNA
gacaagtttgtgtgccgagacaaactctcttcaactagccaattgaagtcagtcgggttgaacttggagggcaatggagt

SEQ ID NO: 47811 - DNA, 80 bp, synthetic construct
  source 1..80: mol_type = other DNA
agcaactgatgtaccaacggcaaccaaaagatggggttttcgagctggtgttccaccaaaggtggtaaattacgaagctg

SEQ ID NO: 47812 - DNA, 80 bp, synthetic construct
  source 1..80: mol_type = other DNA
gagaatgggctgagaactgttataacctggctataaagaaagttgatggtagtgagtgcctaccagaagcccctgaggga

SEQ ID NO: 47813 - DNA, 80 bp, synthetic construct
  source 1..80: mol_type = other DNA
gtgagggattttccccattgccgctatgtacacaaagtctcaggaactggaccatgcccaggaggactcgcctttcacaa

SEQ ID NO: 47814 - DNA, 80 bp, synthetic construct
  source 1..80: mol_type = other DNA
agaaggagccttcttcctgtatgaccgactcgcatcaacaatcatttatcggggtacaacctttgccgaaggagttattg

SEQ ID NO: 47815 - DNA, 80 bp, synthetic construct
  source 1..80: mol_type = other DNA
ttgattttcaagagagtgcagacagtttcttgctgatgctatgtttacatcatgcttatcagggtgactacaagcaattc

SEQ ID NO: 47816 - DNA, 80 bp, synthetic construct
  source 1..80: mol_type = other DNA
catttctgatcttgcctaaggcgcgaaaggattttttccagtctcctccattgcatgagcctgccaacatgaccacggat

SEQ ID NO: 47817 - DNA, 80 bp, synthetic construct
  source 1..80: mol_type = other DNA
ccctccagttactatcacacgacaacaataaactacgtggttgataattttggaaccaacaccacagagtttctgttcca

SEQ ID NO: 47818 - DNA, 80 bp, synthetic construct
  source 1..80: mol_type = other DNA
agtcgatcatttgacgtatgtgcagctcgaggcaagattcacaccacaattccttgtcctcctaaatgaaaccatctact

SEQ ID NO: 47819 - DNA, 80 bp, synthetic construct
  source 1..80: mol_type = other DNA
ctgataaccgcagaagtaacacaacaggaaaactaatctggaaaataaatcccactgttgataccagcatgggtgagtgg

SEQ ID NO: 47820 - DNA, 80 bp, synthetic construct
  source 1..80: mol_type = other DNA
gctttctgggaaaataaaaaaacttcaaaaaaaccctttcaagtgaagagttgtctttcgtacctgtaccagaaacccag

SEQ ID NO: 47821 - DNA, 80 bp, synthetic construct
  source 1..80: mol_type = other DNA
aaccaggtccttgacacgacagcgacggtctctcctcccatctccgcccacaaccacgcagccgaagaccacaaagaatt

SEQ ID NO: 47822 - DNA, 80 bp, synthetic construct
  source 1..80: mol_type = other DNA
ggtttcagaggattccactccagtggttcagatgcaaaacatcaagggaaaggacacaatgccaaccacagtgacgggtg

SEQ ID NO: 47823 - DNA, 80 bp, synthetic construct
  source 1..80: mol_type = other DNA
taccaacaaccacaccctctccatttccaatcaatgctcgcaacactgatcataccaaatcatttatcggcctggagggg

SEQ ID NO: 47824 - DNA, 80 bp, synthetic construct
  source 1..80: mol_type = other DNA
ccccaagaagaccacagcaccacacagcctgccaagaccaccagccaaccaaccaacagcacagaatcgacgacactaaa

SEQ ID NO: 47825 - DNA, 80 bp, synthetic construct
  source 1..80: mol_type = other DNA
cccaacatcagagccctccagtagaggcacgggaccatccagccccacggtccccaacaccacagaaagccacgccgaac

SEQ ID NO: 47826 - DNA, 80 bp, synthetic construct
  source 1..80: mol_type = other DNA
aaagcaatgcagtcaagtaccttgagggtcatggctttcgctttgaggtcaggaaaaaggaaggagtcaagcgactcgaa

SEQ ID NO: 47827 - DNA, 80 bp, synthetic construct
  source 1..80: mol_type = other DNA
ttggcaagacaaccccaaccacactcccagaacagcacactgccgccagtgccattccaagagccgtgcaccccgacgaa

SEQ ID NO: 47828 - DNA, 80 bp, synthetic construct
  source 1..80: mol_type = other DNA
ctcagtggacctggcttcctgacgaacacaatacggggggttacaaatctcctgacaggatccagaagaaagcgaaggga

SEQ ID NO: 47829 - DNA, 80 bp, synthetic construct
  source 1..80: mol_type = other DNA
tcctgacaggatccagaagaaagcgaagggatgtcactcccaatacacaacccaaatgcaacccaaacctgcactattgg

SEQ ID NO: 47830 - DNA, 80 bp, synthetic construct
  source 1..80: mol_type = other DNA
tgtcactcccaatacacaacccaaatgcaacccaaacctgcactattggacagccttggatgagggtgctgccataggtt

SEQ ID NO: 47831 - DNA, 80 bp, synthetic construct
  source 1..80: mol_type = other DNA
tagcctggataccatacttcgggccagcagctgagggaatttacactgaaggcataatggagaatcaaaatggattgatc

SEQ ID NO: 47832 - DNA, 80 bp, synthetic construct
  source 1..80: mol_type = other DNA
cttaagggcaactactgagttgcgtacattctctatactaaatcggaaagcaatagacttcttgctccaaagatggggag

SEQ ID NO: 47833 - DNA, 80 bp, synthetic construct
  source 1..80: mol_type = other DNA
gaacatgtcacattctagggcctgattgttgcattgaaccccaagattggaccaaaaatatcactgataaaattgatcaa

SEQ ID NO: 47834 - DNA, 80 bp, synthetic construct
  source 1..80: mol_type = other DNA
taatccatgactttgtcgataataatcttccaaatcagaatgatggcagcaactggtggactggatggaaacaatgggtt

SEQ ID NO: 47835 - DNA, 80 bp, synthetic construct
  source 1..80: mol_type = other DNA
cctgctggaataggaatcacaggagtaatcattgctattattgctttgctgtgcatttgcaaattcatgctttgaactaa

SEQ ID NO: 47836 - DNA, 80 bp, synthetic construct
  source 1..80: mol_type = other DNA
tatagcatcatactttctaatattcccccaatatgaatttttgttttcgattttatttaatgatatatcctctgtatacc

SEQ ID NO: 47837 - DNA, 80 bp, synthetic construct
  source 1..80: mol_type = other DNA
tcactaatgtactcgagcataatttccctgatagacttgattgtatttgatgattaaggacctcacaaaattcctgggga

SEQ ID NO: 47838 - DNA, 80 bp, synthetic construct
  source 1..80: mol_type = other DNA
gaattgcttcctgctgcatccagtggcaagagcatcaggagaacactggctgcaatgcctgaagaggagacaacagaagc

SEQ ID NO: 47839 - DNA, 80 bp, synthetic construct
  source 1..80: mol_type = other DNA
ttgaaaagaactggataactcaataaattttatgctaggaccacaaatacacttgatgaagattaagaaaaagataatct

SEQ ID NO: 47840 - DNA, 80 bp, synthetic construct
  source 1..80: mol_type = other DNA
tatgattatcattgatcttcatctataccttaaatactctattcaaggagagtatgacaaaaccaagtagtattggataa

SEQ ID NO: 47841 - DNA, 80 bp, synthetic construct
  source 1..80: mol_type = other DNA
acttgtcctgcattcaaatctgaagacatacggcttatctattcactattgtattagaaaatctagggaatatcatttga

SEQ ID NO: 47842 - DNA, 80 bp, synthetic construct
  source 1..80: mol_type = other DNA
aactaattagtgactaaaacacacaactcaagtcggccagaatggaagttgttcatgaaagaggtcgctccaggatctcc

SEQ ID NO: 47843 - DNA, 80 bp, synthetic construct
  source 1..80: mol_type = other DNA
cgacaaaacacaagggatggacctagtcatttagtacgggcgagatcatcctctcgagatagttatcgaagtgaatacca

SEQ ID NO: 47844 - DNA, 80 bp, synthetic construct
  source 1..80: mol_type = other DNA
tacaccaaggagtgcctcgcagatccgtgtccccactgtctttcatcggaaaaagacagatttattgacagttccaccag

SEQ ID NO: 47845 - DNA, 80 bp, synthetic construct
  source 1..80: mol_type = other DNA
cacctaaagatgtatgcccgactttaaagaaagggtttctatgtgacagcaatttctgtaaaaaggatcaccaacttgaa

SEQ ID NO: 47846 - DNA, 80 bp, synthetic construct
  source 1..80: mol_type = other DNA
agcttaacagatagagagttactcttgctgattgcacgcaagacatgtggatccacggaacaacaactaagcatagttgc

SEQ ID NO: 47847 - DNA, 80 bp, synthetic construct
  source 1..80: mol_type = other DNA
tccaaaagattcacgtctggctaatcctattgctgaggatttccaacaaaaagatgggcctaaggtaacactgtcgatgc

SEQ ID NO: 47848 - DNA, 80 bp, synthetic construct
  source 1..80: mol_type = other DNA
ttatagagacagcagagtattggtccaaacaggacattaagaacatcgatgattcaagattaagagctttattgaccctt

SEQ ID NO: 47849 - DNA, 80 bp, synthetic construct
  source 1..80: mol_type = other DNA
caaatgccggacagttcctctcttttgctagcttatttcttcctaagctagttgtcggagaaaaagcctgtctagaaaag

SEQ ID NO: 47850 - DNA, 80 bp, synthetic construct
  source 1..80: mol_type = other DNA
tgtgctgttatgacgcgcaaattttcaaaatctcaacttagcttgctatgtgaaagccacttacggcgagaaggacttgg

SEQ ID NO: 47851 - DNA, 80 bp, synthetic construct
  source 1..80: mol_type = other DNA
tcaagaccaatcagagtcagttctggaggtatatcaacgcttacacagcgataaaggtgggaatttcgaggcagcactat

SEQ ID NO: 47852 - DNA, 80 bp, synthetic construct
  source 1..80: mol_type = other DNA
ggcagcagtgggatcggcaatcattgataatgttcataacagcatttttaaatattgcattacaattaccatgtgagagt

SEQ ID NO: 47853 - DNA, 80 bp, synthetic construct
  source 1..80: mol_type = other DNA
tcatctgttgttatttcaggtttgagaatgctgataccccagtcggaagccactgaggttgtaaccccctccgaaacctg

SEQ ID NO: 47854 - DNA, 80 bp, synthetic construct
  source 1..80: mol_type = other DNA
ttaagattaagattctcattgatctgttacttactctgaggataataattggtgttcagaagtaccccattccccagtgg

SEQ ID NO: 47855 - DNA, 80 bp, synthetic construct
  source 1..80: mol_type = other DNA
cacatggtcagaaggaggaagttcccattgaagccccaaatcacaaggcgagctaaaaaatcccttttgaacatgcataa

SEQ ID NO: 47856 - DNA, 80 bp, synthetic construct
  source 1..80: mol_type = other DNA
catcacatacaatttcaaaggcattggaataaatggtgatttcaggaagattagtgtttgccctcaaaatcagatccgag

SEQ ID NO: 47857 - DNA, 80 bp, synthetic construct
  source 1..80: mol_type = other DNA
caataatcatctactctacagccagttaatttctaatataaaggttaaaaaaatgctgcaggccagctattgttccacag

SEQ ID NO: 47858 - DNA, 80 bp, synthetic construct
  source 1..80: mol_type = other DNA
gtcccaattcttcttgttaaattgtaggagctagcacaagtgatgcaattaaatgatactagtatatacaatgccaccaa

SEQ ID NO: 47859 - DNA, 80 bp, synthetic construct
  source 1..80: mol_type = other DNA
cttaattctaagattttgtatatctcggaaattcaaaattaaatgctacgttattgattcaattaagaaaaagacaatgg

SEQ ID NO: 47860 - DNA, 80 bp, synthetic construct
  source 1..80: mol_type = other DNA
accatcaaaattagttcaatgcctgaactaatgcacttatagaaacaggagaaccagccagacagcagacaaataacaat

SEQ ID NO: 47861 - DNA, 80 bp, synthetic construct
  source 1..80: mol_type = other DNA
gtgcagcggcaaattcaagttcattctgagcagggattgatccaataccccacagcctggcagtcagttggacacatgat

SEQ ID NO: 47862 - DNA, 80 bp, synthetic construct
  source 1..80: mol_type = other DNA
gaaccacaatatgttactgctataatgaagttcgttaattcaaaaacaaatgatgaagattaatgcagatgtctaaagga

SEQ ID NO: 47863 - DNA, 80 bp, synthetic construct
  source 1..80: mol_type = other DNA
taaacactccatgcatcagtgttataattgggctctgtagaaaatcttcatctcctccaacctacctcaaagaaggattt

SEQ ID NO: 47864 - DNA, 80 bp, synthetic construct
  source 1..80: mol_type = other DNA
taccgcgattgggagttataacgacaatagggacaaccacctttgacactagccaagcttgtcgtgggcacacagcattt

SEQ ID NO: 47865 - DNA, 80 bp, synthetic construct
  source 1..80: mol_type = other DNA
cggacacacaaaaagaatgaaggattttgaatctttattgtgtgcgagtaactacgaggaagattaaagattttcctctc

SEQ ID NO: 47866 - DNA, 80 bp, synthetic construct
  source 1..80: mol_type = other DNA
acttacgacaatcattatcttaataatatttccctaaattactgacttaatcagcttgtaatcagataatatcgaaacca

SEQ ID NO: 47867 - DNA, 80 bp, synthetic construct
  source 1..80: mol_type = other DNA
atttatcataaggtataatttgtataagtgatttaggatttaccccagaagtgaaataattcttagaataaaagaccgac

SEQ ID NO: 47868 - DNA, 80 bp, synthetic construct
  source 1..80: mol_type = other DNA
tagaatatccttaaggctgtctgacgtgccacacagctagggttagcctgacatctggaacaagatcgatactaatatag

SEQ ID NO: 47869 - DNA, 80 bp, synthetic construct
  source 1..80: mol_type = other DNA
ggatttgtttcatactaactctctgcaaacacaatggctaaggcaacaggtaggtacaacttggtttcacctaaaaagga

SEQ ID NO: 47870 - DNA, 80 bp, synthetic construct
  source 1..80: mol_type = other DNA
cctcgagaggaggctagttttgaatgatttgtgcacgtttttagttgatcagactatccaggtgtgtcgggtgacttggg

SEQ ID NO: 47871 - DNA, 80 bp, synthetic construct
  source 1..80: mol_type = other DNA
ttgggattgaatttgatatcgcccagaaagggatggctctactgcatcggttaaaaactgctgacttcgctcctgcatgg

SEQ ID NO: 47872 - DNA, 80 bp, synthetic construct
  source 1..80: mol_type = other DNA
gtcatcttcagactaatgcgaaccaacttcctgattaagttcctcctaatacatcagggaatgcatatggttgcagggca

SEQ ID NO: 47873 - DNA, 80 bp, synthetic construct
  source 1..80: mol_type = other DNA
ctcatttattccaaaattcaaattctactattgagtctcccctctgggcattacgagtgattctggcagctggtattcaa

SEQ ID NO: 47874 - DNA, 80 bp, synthetic construct
  source 1..80: mol_type = other DNA
gaccagttaattgaccaatccttggtagaaccgttggccggagccctgagtttagtctccgattggcttctcacaacaaa

SEQ ID NO: 47875 - DNA, 80 bp, synthetic construct
  source 1..80: mol_type = other DNA
cacaaaccattttcaaatgcgcacgcagcacgctaaagagcaactgagcttgaagatgctatcattagtgcgctccaata

SEQ ID NO: 47876 - DNA, 80 bp, synthetic construct
  source 1..80: mol_type = other DNA
tcctgaaattcatcagtcaattggacgcactacatgtcgtgaactacaatggactcttgagcagtatcgaaattggcact

SEQ ID NO: 47877 - DNA, 80 bp, synthetic construct
  source 1..80: mol_type = other DNA
agaaatcataccattatcatcacaagaaccaacatgggtttcctggtagaattacaggagcctgataaatctgccatgaa

SEQ ID NO: 47878 - DNA, 80 bp, synthetic construct
  source 1..80: mol_type = other DNA
tcaaaagaaaccaggaccagtcaagttctccctcctgcatgaatcaaccttcaaggctctaatcaaaaaacccgcaacta

SEQ ID NO: 47879 - DNA, 80 bp, synthetic construct
  source 1..80: mol_type = other DNA
agatgcaggccttgattctggaatttaacagctccctggcaatatagtccaacgataccaaccatcattttttgtaactg

SEQ ID NO: 47880 - DNA, 80 bp, synthetic construct
  source 1..80: mol_type = other DNA
catctcttttatttcttttctaacttgatacaattataatcaagatccctaatcccttttgacgaagtgggctaattttt

SEQ ID NO: 47881 - DNA, 80 bp, synthetic construct
  source 1..80: mol_type = other DNA
gctcattctaataataaatcataacctgaataaaagacaccacaatattataacccaataacacctagagaattgctaaa

SEQ ID NO: 47882 - DNA, 80 bp, synthetic construct
  source 1..80: mol_type = other DNA
ttgctaaagattatatactcgcactaagggacaagttaatcaatctttacttaataatatactaaatgctagatagctct

SEQ ID NO: 47883 - DNA, 80 bp, synthetic construct
  source 1..80: mol_type = other DNA
tgatgctaatgatgccgtcattgccaactctgtagctcaagctcgtttctccggattgttgatagtcaaaacagtgcttg

SEQ ID NO: 47884 - DNA, 80 bp, synthetic construct
  source 1..80: mol_type = other DNA
ggctaattaacctgagttgtggattactccttttaaaagtctatcaatttaagcttatcactaatattaaggaggacttt

SEQ ID NO: 47885 - DNA, 80 bp, synthetic construct
  source 1..80: mol_type = other DNA
ttaaataagagcaagtgttatgtagtcttactaagaatgatttgaggaagattaagaaaaagtgcttgtggggtctttcc

SEQ ID NO: 47886 - DNA, 80 bp, synthetic construct
  source 1..80: mol_type = other DNA
gttgtggaggacacacgagcaaacttcttcctctaattttaatatggcaactcaacatacacaatatccagatgcaagat

SEQ ID NO: 47887 - DNA, 80 bp, synthetic construct
  source 1..80: mol_type = other DNA
tcactcgtgcttgcggtctgtattcttcatattcattaaatcctcagttgaaaaattgtagactaccaaaacatatttac

SEQ ID NO: 47888 - DNA, 80 bp, synthetic construct
  source 1..80: mol_type = other DNA
cgcctcaaatttgatgctacggttacaaaatttttaagcgatgttccaatagttacattgccaatagattacttgacccc

SEQ ID NO: 47889 - DNA, 80 bp, synthetic construct
  source 1..80: mol_type = other DNA
tttacttttacgaactttatccggggagggcttatgccctgtcgaaccaaagtgcagccaattcttagatgaaatagtaa

SEQ ID NO: 47890 - DNA, 80 bp, synthetic construct
  source 1..80: mol_type = other DNA
gttatgttttgcaggatgcacgttttttaagacactattttaggcatgttggagtacacgatgacaatgtggggaaaaat

SEQ ID NO: 47891 - DNA, 80 bp, synthetic construct
  source 1..80: mol_type = other DNA
tttgagccaaagattaaggctttgatttatgataatgaatttctgcaacaattgttttattggtacgatttagcaatcct

SEQ ID NO: 47892 - DNA, 80 bp, synthetic construct
  source 1..80: mol_type = other DNA
aacgcgtagagggcgcctgaatcgagggaataaccgttcaacatggtttgcaaatgacgatttaatagacattctcgggt

SEQ ID NO: 47893 - DNA, 80 bp, synthetic construct
  source 1..80: mol_type = other DNA
atcatatcctccaaaaaacagagcacggagttcgcctgcatcccttggcgcgaacagccaaagtcaaaaatgaggtaagc

SEQ ID NO: 47894 - DNA, 80 bp, synthetic construct
  source 1..80: mol_type = other DNA
acggtgattatattttctggaaaataccgttgtcattgttgtcactcaacacagaggggattcctcatgcagctaaggac

SEQ ID NO: 47895 - DNA, 80 bp, synthetic construct
  source 1..80: mol_type = other DNA
tggtatcacgcatcaatcttcaaagaagcggttcaaggtcacacacatatcgtgtcagtttccactgcagatgttttaat

SEQ ID NO: 47896 - DNA, 80 bp, synthetic construct
  source 1..80: mol_type = other DNA
ttatgtgtaaggacatcataacctgtcgtttcaataccacactcattgcagcattggcaaatttagaagattctatctgt

SEQ ID NO: 47897 - DNA, 80 bp, synthetic construct
  source 1..80: mol_type = other DNA
tctgactatccacaacctgaaacaatctctaatctgtataaagcaggggattacttaatttcgatattgggttcagaagg

SEQ ID NO: 47898 - DNA, 80 bp, synthetic construct
  source 1..80: mol_type = other DNA
ttataaggtcataaagtttttagaaccactatgtttagctaagatccaattgtgctcaaattacactgagaggaaaggga

SEQ ID NO: 47899 - DNA, 80 bp, synthetic construct
  source 1..80: mol_type = other DNA
gattccttactcaaatgcatttggccgttaatcacacacttgaagaacttattgagggccggggattgaagtcacaacaa

SEQ ID NO: 47900 - DNA, 80 bp, synthetic construct
  source 1..80: mol_type = other DNA
gactggaagatgagggaatttcaccgaatcttagtaaatttaaagtcaacaccacaacaactctgtgaattgttttcagt

SEQ ID NO: 47901 - DNA, 80 bp, synthetic construct
  source 1..80: mol_type = other DNA
gcaaaagcattgggggcatcctgtgctacatagtgagaaggctattcagaaagtaaagaaacatgcaaccataataaaag

SEQ ID NO: 47902 - DNA, 80 bp, synthetic construct
  source 1..80: mol_type = other DNA
cattgcgtcctataatcatctttgagacatattgtgtgttcaagtacagcattgccaaacattattttgatagccaaggg

SEQ ID NO: 47903 - DNA, 80 bp, synthetic construct
  source 1..80: mol_type = other DNA
catggtatagtgtaatctcagataaacatctaacaccaggtttacattcttacattaagaggaaccaatttccgccactg

SEQ ID NO: 47904 - DNA, 80 bp, synthetic construct
  source 1..80: mol_type = other DNA
tcttttaaggccgctttagcctcactagcacaacatggagaatatgccccgttcgctcgtctgctgaatctatctggggt

SEQ ID NO: 47905 - DNA, 80 bp, synthetic construct
  source 1..80: mol_type = other DNA
cctatgattaaagacttattgtgggaattctatcaccttgatcatcctcccttattttccaccaagattattagtgactt

SEQ ID NO: 47906 - DNA, 80 bp, synthetic construct
  source 1..80: mol_type = other DNA
gagtattttcattaaggatcgcgctaccgcagtggaaaaaacatgttgggatgcagttttcgaacctaatgttcttggat

SEQ ID NO: 47907 - DNA, 80 bp, synthetic construct
  source 1..80: mol_type = other DNA
atagtcctccaaacaagttctcaactaagagggttcctgaacagtttcttgaacaagaaaatttctcgattgatagtgtt

SEQ ID NO: 47908 - DNA, 80 bp, synthetic construct
  source 1..80: mol_type = other DNA
ctcacttatgcccagcgcctggattatctacttccacaataccggaatttttctttctcacttaaggaaaaggaattaaa

SEQ ID NO: 47909 - DNA, 80 bp, synthetic construct
  source 1..80: mol_type = other DNA
tgtaggacgagcttttggtaagctaccttatcctacacgtaatgttcaaactttatgtgaagccttattggcagatggat

SEQ ID NO: 47910 - DNA, 80 bp, synthetic construct
  source 1..80: mol_type = other DNA
tagctaaagcctttcctagtaacatgatggttgtaacagagcgtgaacagaaggaaagcctcttgcaccaggcgtcgtgg

SEQ ID NO: 47911 - DNA, 80 bp, synthetic construct
  source 1..80: mol_type = other DNA
caccacacaagtgacgatttcggtgagaatgccactgttagaggcagcagttttgttaccgacctagaaaaatacaactt

SEQ ID NO: 47912 - DNA, 80 bp, synthetic construct
  source 1..80: mol_type = other DNA
tgcattatacgataccgcaatgttatatacatgtaagtgattattataatccccctcatggagtttcgctagaaaatcgg

SEQ ID NO: 47913 - DNA, 80 bp, synthetic construct
  source 1..80: mol_type = other DNA
gaagatcctccggaaggccctagctcttaccggggtcatcttggaggaattgagggactccaacagaaactctggaccag

SEQ ID NO: 47914 - DNA, 80 bp, synthetic construct
  source 1..80: mol_type = other DNA
taacaatcttgagcatgggcttttccctcaactttctgcaattgctttgggagtagcaactgcacatgggagcactctgg

SEQ ID NO: 47915 - DNA, 80 bp, synthetic construct
  source 1..80: mol_type = other DNA
gcatcacagttctttccgtattccctctagagacagattccaatgagcaagagcatagctccgaggacaatgctgctcgc

SEQ ID NO: 47916 - DNA, 80 bp, synthetic construct
  source 1..80: mol_type = other DNA
gtagcagccagtttagccaaagtcacgagtgcctgtggcatcttcctaaaaccagatgagacttttgtgcattcaggctt

SEQ ID NO: 47917 - DNA, 80 bp, synthetic construct
  source 1..80: mol_type = other DNA
tatttatttcggtaagaagcaatatttaaatggcgttcaattgccacaatcactcaagactgctaccaggattgctccct

SEQ ID NO: 47918 - DNA, 80 bp, synthetic construct
  source 1..80: mol_type = other DNA
tgtcagatgcaatctttgatgaccttcagggaactctggctagtataggaacggcatttgagagatctatatccgagact

SEQ ID NO: 47919 - DNA, 80 bp, synthetic construct
  source 1..80: mol_type = other DNA
ctagacatgtatacccttgccgggtggttgccgcattccatacattcttctccgttaggatcctccaataccaccacctt

SEQ ID NO: 47920 - DNA, 80 bp, synthetic construct
  source 1..80: mol_type = other DNA
ggtttcaacaaaggaactgatctaggtcaactatcactaagcaaaccgttggatttcggaactatcactcttgctttagc

SEQ ID NO: 47921 - DNA, 80 bp, synthetic construct
  source 1..80: mol_type = other DNA
ggtacctcaagttctaggaggtttatcgtttttgaacccagaaaaatgtttttatcgcaaccttggagaccccgtgacct

SEQ ID NO: 47922 - DNA, 80 bp, synthetic construct
  source 1..80: mol_type = other DNA
ctggcctattccaacttaggacttacctgcaaatgatcaacatggacgacttatttctacctttaattgccaagaacccc

SEQ ID NO: 47923 - DNA, 80 bp, synthetic construct
  source 1..80: mol_type = other DNA
gggaactgtagtgcaattgactttgtactcaacccaagcggattgaatgtccctgggtcacaagacctaacatctttttt

SEQ ID NO: 47924 - DNA, 80 bp, synthetic construct
  source 1..80: mol_type = other DNA
caggagtcaatgtaggagagcaataccaacaactgcgagaagcagccactgaggccgaaaagcagttgcagaaatatgct

SEQ ID NO: 47925 - DNA, 80 bp, synthetic construct
  source 1..80: mol_type = other DNA
acgtcagatagtgcgtagaacaatcacattgagtgcaaaaaataagctaataaacacattgtttcattcctcagccgatt

SEQ ID NO: 47926 - DNA, 80 bp, synthetic construct
  source 1..80: mol_type = other DNA
tagaagatgagatggtatgtaaatggctactttcttcaacacctgtaatgagtcggtttgctgctgatatattctctcgt

SEQ ID NO: 47927 - DNA, 80 bp, synthetic construct
  source 1..80: mol_type = other DNA
ctccgagtgggaagcgcctgcagatcctaggttatttagaagggactagaaccttgctagcctccaaagtcatcaataac

SEQ ID NO: 47928 - DNA, 80 bp, synthetic construct
  source 1..80: mol_type = other DNA
aatgcagagactcctattttagataggttgaggaaaatcacactgcagagatggagtttatggtttagctacctagacca

SEQ ID NO: 47929 - DNA, 80 bp, synthetic construct
  source 1..80: mol_type = other DNA
ctgtgatcaggttctagcagatgctttaataaaagtttcttgtacagttgatttggcgcaaattttacgtgaatatacct

SEQ ID NO: 47930 - DNA, 80 bp, synthetic construct
  source 1..80: mol_type = other DNA
gggcacacatactagagggaagacagctcattggtgcaacacttccttgcatgttagaacaatttaatgtgttttggctc

SEQ ID NO: 47931 - DNA, 80 bp, synthetic construct
  source 1..80: mol_type = other DNA
aaatcgtacgaacaatgccctaaatgtgcaagatctagaaatccaaaaggagagccatttgtgtcaattgcaattaagaa

SEQ ID NO: 47932 - DNA, 80 bp, synthetic construct
  source 1..80: mol_type = other DNA
acaagttgtgagtgcatggccgaatcagtcacggttaaattggaccattggggacggtgtaccttacatcgggtctcgaa

SEQ ID NO: 47933 - DNA, 80 bp, synthetic construct
  source 1..80: mol_type = other DNA
cagaggacaagattgggcagccagcaatcaagcctaagtgtccctctgctgccttacgtgaagcaatagagttgacatct

SEQ ID NO: 47934 - DNA, 80 bp, synthetic construct
  source 1..80: mol_type = other DNA
agactaacatgggttacccaaggtggtgccaatagtgatttgctagtcaaaccttttgtagaagcacgagtaaacctgag

SEQ ID NO: 47935 - DNA, 80 bp, synthetic construct
  source 1..80: mol_type = other DNA
gaatctcgtgaacttgatcacctaggtcttgatgatcaggaaaagaaaatcctaaaagacttccatcagaaaaagaatga

SEQ ID NO: 47936 - DNA, 80 bp, synthetic construct
  source 1..80: mol_type = other DNA
tgtgcaggagatccttcaaatgacgccttctcattattcagggaacatcgtacatcggtataatgaccaatacagccctc

SEQ ID NO: 47937 - DNA, 80 bp, synthetic construct
  source 1..80: mol_type = other DNA
gattggtggtgtcgacaaatactctcggggagttctcaggtggggggcaatcagcaagggacagcaatatcatctttcaa

SEQ ID NO: 47938 - DNA, 80 bp, synthetic construct
  source 1..80: mol_type = other DNA
tctcggggagttctcaggtggggggcaatcagcaagggacagcaatatcatctttcaaaatgtaatcaattttgcggttg

SEQ ID NO: 47939 - DNA, 80 bp, synthetic construct
  source 1..80: mol_type = other DNA
ccctatttgatttacgatttcggaacaccgaaacatcctccattcagcataaccgtgcccatctccatctttcacagtgt

SEQ ID NO: 47940 - DNA, 80 bp, synthetic construct
  source 1..80: mol_type = other DNA
tgcacacgggaagtcccagctcaatacctaacctacacgtctacgctttccttggatctcacaaggtaccgagagaatga

SEQ ID NO: 47941 - DNA, 80 bp, synthetic construct
  source 1..80: mol_type = other DNA
gttaatttatgataacaatccattaaaaggtggacttaattgcaacctatcctttgataatccacttttcaagggccaaa

SEQ ID NO: 47942 - DNA, 80 bp, synthetic construct
  source 1..80: mol_type = other DNA
ggctcaatatcatagaggaggatttgattagatttccacatttatctgggtgggaacttgcgaaaaccatcattcagtcc

SEQ ID NO: 47943 - DNA, 80 bp, synthetic construct
  source 1..80: mol_type = other DNA
attatctcagacagcaataactcatccacagaccccattagcagtggagaaacacgatcattcacaactcactttctcac

SEQ ID NO: 47944 - DNA, 80 bp, synthetic construct
  source 1..80: mol_type = other DNA
tcacatatcctaaggttgggctcctctatagtttcggcgccatcgtgagttattacttagggaataccattattaggacc

SEQ ID NO: 47945 - DNA, 80 bp, synthetic construct
  source 1..80: mol_type = other DNA
tgctccttggcaaaaccaagagcaggcccaaagggccattaggccacatctgttgagcctgcagaacacgcaggacttac

SEQ ID NO: 47946 - DNA, 80 bp, synthetic construct
  source 1..80: mol_type = other DNA
aaaaagctagacctcagtcatttcatgtattacttaacaactcaaatccataatttgccacatcgctcgttgaggatact

SEQ ID NO: 47947 - DNA, 80 bp, synthetic construct
  source 1..80: mol_type = other DNA
taagcccacttttaaacatgttagtgtgatatcaagactaatgagtattgatcctcatttttcaatctacatcgggggta

SEQ ID NO: 47948 - DNA, 80 bp, synthetic construct
  source 1..80: mol_type = other DNA
agatcagcttccagcagacgacagccatggtcacactgcggaaagagagattggccaaattgactgaagctattacttcc

SEQ ID NO: 47949 - DNA, 80 bp, synthetic construct
  source 1..80: mol_type = other DNA
cagcaggtgatcgagggctttcggatgctaccagactattccttcgagtggccatttcttccttccttcaatttgtcaaa

SEQ ID NO: 47950 - DNA, 80 bp, synthetic construct
  source 1..80: mol_type = other DNA
aagtggatcgtggaatacaggacagctattcctctgtgggttgtataccctttggagggacaaaatccagatccaattaa

SEQ ID NO: 47951 - DNA, 80 bp, synthetic construct
  source 1..80: mol_type = other DNA
tagctttctacatcagattatagccttactgcaaaatgaatcccctcaaaacaacatccaattccaagaaggcagaaata

SEQ ID NO: 47952 - DNA, 80 bp, synthetic construct
  source 1..80: mol_type = other DNA
atcaacagttgtccgataatctagtttacatgtgcaagagcactgccagtaatttcttccatgcatcacttgcctattgg

SEQ ID NO: 47953 - DNA, 80 bp, synthetic construct
  source 1..80: mol_type = other DNA
aggagccggcacaaaggacggcccaaaaatcgatcgaccgaagaacagacagttaaacccagaccatataataattttca

SEQ ID NO: 47954 - DNA, 80 bp, synthetic construct
  source 1..80: mol_type = other DNA
ttctgttaaatgtgcctcaaacccaccaagcatccccaaatctaagtcaggaactcaaggctcaagcgcattttttgaga

SEQ ID NO: 47955 - DNA, 80 bp, synthetic construct
  source 1..80: mol_type = other DNA
aacttgaatatgataaagaaatagaattgccaacagcttccacaccagccgaaaaacccaagacctataccaaggcccta

SEQ ID NO: 47956 - DNA, 80 bp, synthetic construct
  source 1..80: mol_type = other DNA
tccagccgaatttaccatggtaaaacaccatccaatgccgcaaaagatgattcaacaacctccaagggctgcgattccaa

SEQ ID NO: 47957 - DNA, 80 bp, synthetic construct
  source 1..80: mol_type = other DNA
agaagaaaatgccgttcaagcttcacaccgaattgtcctaccattttttacattgtcacagaacggctacagaactccct

SEQ ID NO: 47958 - DNA, 80 bp, synthetic construct
  source 1..80: mol_type = other DNA
cagttaaaaagtcagagtatgtaactgaaatcaccaaactaattcgacaattaaaggcaattccagataccactgtatac

SEQ ID NO: 47959 - DNA, 80 bp, synthetic construct
  source 1..80: mol_type = other DNA
acctccatcctcaaaacaggaaggcggtatgatgatgacaatgacataccctttccagggccaatcaatgataacgagaa

SEQ ID NO: 47960 - DNA, 80 bp, synthetic construct
  source 1..80: mol_type = other DNA
tgtcgctttacaggggttgtgtcttcaatgcattataagcttgatgaggttctctgggaattcgatagtttcaaaactgc

SEQ ID NO: 47961 - DNA, 80 bp, synthetic construct
  source 1..80: mol_type = other DNA
tgtgactctagctgaaggagaagggtcaggtgccttattactactacaaaaatataaggttagaacaatcttttttaaca

SEQ ID NO: 47962 - DNA, 80 bp, synthetic construct
  source 1..80: mol_type = other DNA
ctttagctacagagcatagcatcgaggcagaaatagtttctgggacaaccacacctcgaatgctccttcctgtaatggcc

SEQ ID NO: 47963 - DNA, 80 bp, synthetic construct
  source 1..80: mol_type = other DNA
aaacttcatgatgatcaaataaatgtaatattaaacaattctgctagccaggttactgatatcactaaccctgcatggtt

SEQ ID NO: 47964 - DNA, 80 bp, synthetic construct
  source 1..80: mol_type = other DNA
cactgaccagaaatctagaatccccacacaagttgagattatgactatggatgctgaaacgacagaaaatattaatcggt

SEQ ID NO: 47965 - DNA, 80 bp, synthetic construct
  source 1..80: mol_type = other DNA
caaaattatacgaagctatccagcaattaattgtttcacacattgatacaagggtgctaaagattgttattataaaggtt

SEQ ID NO: 47966 - DNA, 80 bp, synthetic construct
  source 1..80: mol_type = other DNA
tttttaagtgatattgatggtctactgtggcttaatgaccatcttgcccctttattcggatccggctatttaattaagcc

SEQ ID NO: 47967 - DNA, 80 bp, synthetic construct
  source 1..80: mol_type = other DNA
gattacttcgagtccaaagtcaagcgaatggtacttatgtctttcaaatttcctttcagcttctcgacgacggcctcatc

SEQ ID NO: 47968 - DNA, 80 bp, synthetic construct
  source 1..80: mol_type = other DNA
agggtcatgctacctgtatgcaagtcatccaaacagcgctacgactccaagttcaaaggagttcatactggcttagccat

SEQ ID NO: 47969 - DNA, 80 bp, synthetic construct
  source 1..80: mol_type = other DNA
ttagtgcaatatgctgatattaatttgcacttgagttatgttaatttgggtttcccttcattggaaaaggttctttacca

SEQ ID NO: 47970 - DNA, 80 bp, synthetic construct
  source 1..80: mol_type = other DNA
ctctggtcagaacgatgacgatccaacagactcccaggataccacaatcccggatgtaataatcgatccaaacgatggtg

SEQ ID NO: 47971 - DNA, 80 bp, synthetic construct
  source 1..80: mol_type = other DNA
tcgatataacctagttgattcacggaagggtccactggtctcgatcctttaccatttaacacacttgcaagcagaaatta

SEQ ID NO: 47972 - DNA, 80 bp, synthetic construct
  source 1..80: mol_type = other DNA
gagaattggtgtgtgactataatcagcaacgacaaagtcgaacccaaacataccacttcatcaaaacgacaaagggccgg

SEQ ID NO: 47973 - DNA, 80 bp, synthetic construct
  source 1..80: mol_type = other DNA
attacaaaattagtcaatgactaccttaaattttatctcgtagtgcaagcactgaagcataattgtctttggcaggaaga

SEQ ID NO: 47974 - DNA, 80 bp, synthetic construct
  source 1..80: mol_type = other DNA
actcagaacacttcctgacttaatcaatgtttgcaatcgattttaccatataagggactgctcatgtgaagatcgatttt

SEQ ID NO: 47975 - DNA, 80 bp, synthetic construct
  source 1..80: mol_type = other DNA
taattcaaactctttacttaacccgtatgcaagactcagaagtaaaattaatggagagattaaccgggtttctaggattg

SEQ ID NO: 47976 - DNA, 80 bp, synthetic construct
  source 1..80: mol_type = other DNA
tatcctaatggtattaacacttaagatccccttagaggcatcgcaatatgactccaaacattaaatgatattgctgtcaa

SEQ ID NO: 47977 - DNA, 80 bp, synthetic construct
  source 1..80: mol_type = other DNA
tatatctacctgaccgagagtaaggtttattataaaaaatctatacacatgactgcaatgcgtgatttataccgaaacac

SEQ ID NO: 47978 - DNA, 80 bp, synthetic construct
  source 1..80: mol_type = other DNA
agtgagggctgcacatgcaggttcctgttgagcttaaaaagatcatgcaatacaaaatgatatttgtatactaatcatgt

SEQ ID NO: 47979 - DNA, 80 bp, synthetic construct
  source 1..80: mol_type = other DNA
taatactaactaacagtactcactgcatataccatatcaattaagaaaaattactgtggtttatgcatttaaatgacatc

SEQ ID NO: 47980 - DNA, 80 bp, synthetic construct
  source 1..80: mol_type = other DNA
acggatggatataatatagttaattcttacctaaatgttgagttatagtaatttgaagttgtaattatgattagtgctta

SEQ ID NO: 47981 - DNA, 80 bp, synthetic construct
  source 1..80: mol_type = other DNA
ggtataataactacagcgattatgcaaatgatgctgcaagtgctcctgatgacctagttctttttgaccttgaggacgag

SEQ ID NO: 47982 - DNA, 80 bp, synthetic construct
  source 1..80: mol_type = other DNA
tactataaataatagctataccaagtatacacaagaagttatgattttgtatttaagttatattcacaggaacttgtgat

SEQ ID NO: 47983 - DNA, 80 bp, synthetic construct
  source 1..80: mol_type = other DNA
taataacaaaagtctcagttgttggttgttgagttgcaaaacccccgttaaaaatttattttccacttataactaataat

SEQ ID NO: 47984 - DNA, 80 bp, synthetic construct
  source 1..80: mol_type = other DNA
aatcatagatcagtatgagttgaggctatttagaccttagaaaaattgtgcgatgttttttaccatatcaatcttgattt

SEQ ID NO: 47985 - DNA, 80 bp, synthetic construct
  source 1..80: mol_type = other DNA
caatgatattggagggcttgtcgataaatttagtaattaacattaagtcagtgtggaacctcattggatatttgatcgta

SEQ ID NO: 47986 - DNA, 80 bp, synthetic construct
  source 1..80: mol_type = other DNA
agtcagtgtggaacctcattggatatttgatcgtacacaaaaatatctttacaaaattgttttctcttttttgtgtgtcc

SEQ ID NO: 47987 - DNA, 80 bp, synthetic construct
  source 1..80: mol_type = other DNA
gatgatgctgataacccggctcagaacacgccagaaaaaaatgatagaccagcaacaacaaagctgagaaatggacggga

SEQ ID NO: 47988 - DNA, 80 bp, synthetic construct
  source 1..80: mol_type = other DNA
ccaggatggaaaccaaagcgaaactgcatccccacgggcagcccccaaccaatacagagacaagccaatgccacaagtac

SEQ ID NO: 47989 - DNA, 80 bp, synthetic construct
  source 1..80: mol_type = other DNA
agagcagatccgaaaatcatgaccaaacccttcaaacacagcccagggttttgactcctatcagcgaggaagcagacccc

SEQ ID NO: 47990 - DNA, 80 bp, synthetic construct
  source 1..80: mol_type = other DNA
agcgaccacaacgatggcgacaatgaaagcattcctcccctggaatcagacgacgagggtagcactgatactactgcagc

SEQ ID NO: 47991 - DNA, 80 bp, synthetic construct
  source 1..80: mol_type = other DNA
agaaacaaagcctgccactgcacctcccgctcccgtctaccgaagtatctccgtagatgattctgtccccttagagaaca

SEQ ID NO: 47992 - DNA, 80 bp, synthetic construct
  source 1..80: mol_type = other DNA
ttcccgcacagtccaatcaaacgaacaatgaggacaatgtcaggaacaatgcccagtcggagcaatccattgcagaaatg

SEQ ID NO: 47993 - DNA, 80 bp, synthetic construct
  source 1..80: mol_type = other DNA
ttagcagaagagagcgcgtgccgaagccagccaacaaattgacacagctgctcactctgaccctgaattcataaacaata

SEQ ID NO: 47994 - DNA, 80 bp, synthetic construct
  source 1..80: mol_type = other DNA
tatcaacatatcttgaaaacacaaggaccttttgatgccatcctttactaccatatgatgaaagaagagcccatcatttt

SEQ ID NO: 47995 - DNA, 80 bp, synthetic construct
  source 1..80: mol_type = other DNA
cagcactagtgatgggaaggagtatacatatccagactctcttgaagatgaatatccaccctggctcagcgagaaggaag

SEQ ID NO: 47996 - DNA, 80 bp, synthetic construct
  source 1..80: mol_type = other DNA
tcataaccatggatggtcagcagttttactggcctgtgatgaatcatagaaataaattcatggcaatcctccaacatcac

SEQ ID NO: 47997 - DNA, 80 bp, synthetic construct
  source 1..80: mol_type = other DNA
aggtgacccgacctctaaaactgagctcttaactacaagctaccccatcactctgccggaatgccagaacctccctccaa

SEQ ID NO: 47998 - DNA, 80 bp, synthetic construct
  source 1..80: mol_type = other DNA
aacagctccacatcgagaacctccgacgtggtacacaggcaagacaggcaacccaatgatgttcctgttcacctacaacc

SEQ ID NO: 47999 - DNA, 80 bp, synthetic construct
  source 1..80: mol_type = other DNA
gcaaccaacacttgatcgacttccaagacaactacaacccccttagccaactccaccacagaagcactaccccataacaa

SEQ ID NO: 48000 - DNA, 80 bp, synthetic construct
  source 1..80: mol_type = other DNA
caaccccaaatcaacgacactgcatgtaagtattgtctcaccccaagatgctccctggacaccaacaaccccctaacctc

SEQ ID NO: 48001 - DNA, 80 bp, synthetic construct
  source 1..80: mol_type = other DNA
cccaagttgtcattaagaaaaaatatatgatgaagattaaaaccttcatcggagctatttcttctacgcttggttaggac

SEQ ID NO: 48002 - DNA, 80 bp, synthetic construct
  source 1..80: mol_type = other DNA
cagtattcacaaactattttacaatccctacccaatatgacctctaacagagcaagggtgacttacaacccaccaccaac

SEQ ID NO: 48003 - DNA, 80 bp, synthetic construct
  source 1..80: mol_type = other DNA
aaccacaggcacacgatcgtgtgggccggaactttccgggtggatctctgagcaattgatgacaggcaagattccgatta

SEQ ID NO: 48004 - DNA, 80 bp, synthetic construct
  source 1..80: mol_type = other DNA
ttaagttgacaacagagatactaatccaatatttggatcaagaatcaaaatagtgaaacgactgactatccctccttaga

SEQ ID NO: 48005 - DNA, 80 bp, synthetic construct
  source 1..80: mol_type = other DNA
ccgatatcttcaatgaaattgaaaccttacctagtataagtccctcgatccactccaaaatcaaaaccccaagtgttcaa

SEQ ID NO: 48006 - DNA, 80 bp, synthetic construct
  source 1..80: mol_type = other DNA
acacgcagtgtccagacccaaactgacccaaattgtaatcatgattttgcagaggttgtgaaaatgctaacatctctaac

SEQ ID NO: 48007 - DNA, 80 bp, synthetic construct
  source 1..80: mol_type = other DNA
ccttgtcgtacaaaaacaaacccttgcaactgaatcacttgagcaacgcattaccgacctggaaggtagcctgaaaccag

SEQ ID NO: 48008 - DNA, 80 bp, synthetic construct
  source 1..80: mol_type = other DNA
tgtctgagatcaccaagattgtttctgcactaaatagatcctgtgcagagatggtggccaaatatgatcttctagtaatg

SEQ ID NO: 48009 - DNA, 80 bp, synthetic construct
  source 1..80: mol_type = other DNA
catggacgtcctccaccggggccctcattgtacgaagaggatgcaatcaggactaaaattgaaaaacaaggggatatagt

SEQ ID NO: 48010 - DNA, 80 bp, synthetic construct
  source 1..80: mol_type = other DNA
acccaaggaagtgcaagaggccttccgtaatctggatagtactgcccttctaacggaagagaattttgggaaaccagaca

SEQ ID NO: 48011 - DNA, 80 bp, synthetic construct
  source 1..80: mol_type = other DNA
tatccgcaaaagacttgcgcaatatcatgtatgatcacctcccaggttttggcacagcatttcatcaactagtgcaagtt

SEQ ID NO: 48012 - DNA, 80 bp, synthetic construct
  source 1..80: mol_type = other DNA
atctgcaagttagggaaggacaattcctcacttgatgtaattcatgcagaatttcaggccagccttgctgaaggagactc

SEQ ID NO: 48013 - DNA, 80 bp, synthetic construct
  source 1..80: mol_type = other DNA
tcctcagtgtgccctgattcagataaccaaacggattcctattttccaagatgcagcaccacccgtaatccatattcgtt

SEQ ID NO: 48014 - DNA, 80 bp, synthetic construct
  source 1..80: mol_type = other DNA
attagcaaagatccttttgtagactattgtgctacattttctatccaagacctcaaaatggatcctcgtccaatcagaac

SEQ ID NO: 48015 - DNA, 80 bp, synthetic construct
  source 1..80: mol_type = other DNA
cacgcggtgatataccaaaggcgtgtcaaaagagcctccgcccagttccaccatcaccaaagattgataggggttgggta

SEQ ID NO: 48016 - DNA, 80 bp, synthetic construct
  source 1..80: mol_type = other DNA
tgcatattccagctacaagacggaaaaacactcggactcaaaatctaaggtgaacaattgcacaacctccacagtcgcct

SEQ ID NO: 48017 - DNA, 80 bp, synthetic construct
  source 1..80: mol_type = other DNA
atattgcttccttccggaattagggtatgatcgcgtaaaaaataagcttccaacatattgatatacgatccatacccata

SEQ ID NO: 48018 - DNA, 80 bp, synthetic construct
  source 1..80: mol_type = other DNA
atgccatctccaggaatatgagaacgcaaggccatatcaggacccgatctcaattccaatgcaacctactgttaagaata

SEQ ID NO: 48019 - DNA, 80 bp, synthetic construct
  source 1..80: mol_type = other DNA
aaataaccaatgtcctctagcctcatatgttctcaaaaatacaagtgatgaagattaagaaaaagcatcctttacttgag

SEQ ID NO: 48020 - DNA, 80 bp, synthetic construct
  source 1..80: mol_type = other DNA
aggagctaattctttatacttcatctaatctttaagtaagttgatcattaccaccatgaggagggcaattctacctactg

SEQ ID NO: 48021 - DNA, 80 bp, synthetic construct
  source 1..80: mol_type = other DNA
caccgccagaatacatggaggctgtctacccaatgagaacggttagtactaatatcagcagtacctccagtggtccgaac

SEQ ID NO: 48022 - DNA, 80 bp, synthetic construct
  source 1..80: mol_type = other DNA
tttccagcaccggatgtaatgatgagtgatacaccctccaactcactcagaccaattgctgatgataatatcgatcatcc

SEQ ID NO: 48023 - DNA, 80 bp, synthetic construct
  source 1..80: mol_type = other DNA
aagtcatacaccaaccagtgtttcatcagcctttatactcgaggcaatggtgaatgtgatatcggggccgaaggtactaa

SEQ ID NO: 48024 - DNA, 80 bp, synthetic construct
  source 1..80: mol_type = other DNA
tgaagcaaattcctatatggctccccttgggtgttgctgatcaaaaaacatatagttttgactcaactacagctgcaatt

SEQ ID NO: 48025 - DNA, 80 bp, synthetic construct
  source 1..80: mol_type = other DNA
ctggatgatgcataacacatctgaagttgaagcagactaccataagattttaactgccggattgtccgtccagcaaggca

SEQ ID NO: 48026 - DNA, 80 bp, synthetic construct
  source 1..80: mol_type = other DNA
atgctcgcatcgtacaccatcactcactttggcaaaacctccaatccgcttgtgagaatcaatcgacttggtcctgggat

SEQ ID NO: 48027 - DNA, 80 bp, synthetic construct
  source 1..80: mol_type = other DNA
ccctgatcacccgttgcggcttctaagaataggaaatcaagccttcttgcaagagtttgtgctgcctccagtgcaattgc

SEQ ID NO: 48028 - DNA, 80 bp, synthetic construct
  source 1..80: mol_type = other DNA
cgcagtatttcacttttgacctgacggctctaaagctgatcactcaacctctcccggcagcaacctggacagatgatact

SEQ ID NO: 48029 - DNA, 80 bp, synthetic construct
  source 1..80: mol_type = other DNA
ccgaccggtcctacaggaatacttcgtcctggaatttcctttcatcccaaactgagacctatcctattgccagggaagac

SEQ ID NO: 48030 - DNA, 80 bp, synthetic construct
  source 1..80: mol_type = other DNA
cgggaaaagaggatccagctccgatcttacttctcctgataaaatacaagcaataatgaactttctccaagacctcaaac

SEQ ID NO: 48031 - DNA, 80 bp, synthetic construct
  source 1..80: mol_type = other DNA
tcgtgccgattgatccagccaagaacattatgggtattgaagtgccggaactcttggtccacagactaactggaaagaaa

SEQ ID NO: 48032 - DNA, 80 bp, synthetic construct
  source 1..80: mol_type = other DNA
atcacaacaaaaaatggtcaaccaataattcctattcttctaccaaagtatattggcatggatcccatttctcagggaga

SEQ ID NO: 48033 - DNA, 80 bp, synthetic construct
  source 1..80: mol_type = other DNA
cctcacaatggtcatcactcaagactgtgacacttgccattctcctgctagtcttcctccagtcagcgagaaataagcat

SEQ ID NO: 48034 - DNA, 80 bp, synthetic construct
  source 1..80: mol_type = other DNA
gaagtccgaggctgcctggcccacacggcccccagggccttcgtccgaccaccgaaccaaccatctgaccttcatcaaaa

SEQ ID NO: 48035 - DNA, 80 bp, synthetic construct
  source 1..80: mol_type = other DNA
ccaaaaaataccaccacgcgaaagctaaaatgcaggaccacaatccaaccagcaacaccatccatacacaggcatcaatt

SEQ ID NO: 48036 - DNA, 80 bp, synthetic construct
  source 1..80: mol_type = other DNA
ttgtgagacaaagaatcattcctgtttaccaaatctcaaacctggaggaagtatgtcaactcatcatacaggcattcgag

SEQ ID NO: 48037 - DNA, 80 bp, synthetic construct
  source 1..80: mol_type = other DNA
gggctaccgcagcatatagacccaatagcaagctgctgtccagaaaacagttccagaaagtaactcaaccatcgcaagcc

SEQ ID NO: 48038 - DNA, 80 bp, synthetic construct
  source 1..80: mol_type = other DNA
caatgcagctttcagaaatccgccagcaacccaactccactgtaccaccaatattaacctgaatcgactaaccgcacttt

SEQ ID NO: 48039 - DNA, 80 bp, synthetic construct
  source 1..80: mol_type = other DNA
aatttgaagcacatttgttcaatgggttcattattaacagtgttgcttttagattgtacctttgctcacagatagtaaat

SEQ ID NO: 48040 - DNA, 80 bp, synthetic construct
  source 1..80: mol_type = other DNA
tgttatggtatctaatcttattaagaaaaagaacacgatgaagattaacgcgacctagagcgctgccttcatctcatcaa

SEQ ID NO: 48041 - DNA, 80 bp, synthetic construct
  source 1..80: mol_type = other DNA
tttaacttgtcaatagcgcaacctagtttgtgattactcatctttcgtagttggcaaacactttgctaattaattgtaga

SEQ ID NO: 48042 - DNA, 80 bp, synthetic construct
  source 1..80: mol_type = other DNA
tataccacagtcatcatggttacatcaggaattctacaattgccccgtgaacgcttcagaaaaacatcattttttgtttg

SEQ ID NO: 48043 - DNA, 80 bp, synthetic construct
  source 1..80: mol_type = other DNA
ggtaataatcctatttcacaaagttttccctatcccattgggcgtagttcacaacaacactctccaggtaagtgatatag

SEQ ID NO: 48044 - DNA, 80 bp, synthetic construct
  source 1..80: mol_type = other DNA
ataaattggtgtgccgggataaactttcctccacaagtcagctgaaatcggtcgggcttaatctagaaggtaatggagtt

SEQ ID NO: 48045 - DNA, 80 bp, synthetic construct
  source 1..80: mol_type = other DNA
gccacagatgtaccaacagcaacgaagagatggggattccgagccggtgttccacccaaagtggtgaactacgaagctgg

SEQ ID NO: 48046 - DNA, 80 bp, synthetic construct
  source 1..80: mol_type = other DNA
acctgaagcccctgagggtgtaagaggcttccctcgctgccgttatgtgcacaaggtttctggaacagggccgtgtcctg

SEQ ID NO: 48047 - DNA, 80 bp, synthetic construct
  source 1..80: mol_type = other DNA
gccggtgtcgacttccaggatagtgcagatagctttttgttaatgctatgtctgcatcatgcctatcaaggggattataa

SEQ ID NO: 48048 - DNA, 80 bp, synthetic construct
  source 1..80: mol_type = other DNA
aaggtttcgctttccacaaagaaggcgctttcttcctgtatgatcgactggcatcaacaatcatctatcgaagcaccacg

SEQ ID NO: 48049 - DNA, 80 bp, synthetic construct
  source 1..80: mol_type = other DNA
ttttcagaaggtgttgtggctttcttgatcctccccaagaccaaaaaggactttttccaatcaccaccactacatgaacc

SEQ ID NO: 48050 - DNA, 80 bp, synthetic construct
  source 1..80: mol_type = other DNA
ggccaatatgacaacagacccatccagctactaccacacagtcacacttaattatgtggctgacaattttgggaccaata

SEQ ID NO: 48051 - DNA, 80 bp, synthetic construct
  source 1..80: mol_type = other DNA
tgactaactttctgtttcaagtggatcatccaacttatgtgcaacttgaaccaagattcacaccacaatttcttgtccaa

SEQ ID NO: 48052 - DNA, 80 bp, synthetic construct
  source 1..80: mol_type = other DNA
ctcaatgagaccatttatactaatgggcgtcgcagcaacaccacaggaacactaatttggaaagtaaatcctactgttga

SEQ ID NO: 48053 - DNA, 80 bp, synthetic construct
  source 1..80: mol_type = other DNA
caccggcgtaggtgaatgggccttctgggaaaataaaaaaacttcacaaaaaccctttcaagtgaagagctgtctgtcat

SEQ ID NO: 48054 - DNA, 80 bp, synthetic construct
  source 1..80: mol_type = other DNA
acttgtaccaagagcccaggatccaggcagcaaccagaagacgaaggtcactcccaccagcttcgccaacaaccaaacct

SEQ ID NO: 48055 - DNA, 80 bp, synthetic construct
  source 1..80: mol_type = other DNA
ccaagaaccacgaagacttggttccaaaggatcccgcttcagtggttcaagtgcgagacctccagagggaaaacacagtg

SEQ ID NO: 48056 - DNA, 80 bp, synthetic construct
  source 1..80: mol_type = other DNA
ccgacctcacccttgaacacagtccccacaactctgatccccgacacaatggaggaacaaaccaccagccactacgaact

SEQ ID NO: 48057 - DNA, 80 bp, synthetic construct
  source 1..80: mol_type = other DNA
accaaacatttccggaaaccatcaagagaggaacaacaccgcacaccccgaaactctcgccaacaatcctccagacaaca

SEQ ID NO: 48058 - DNA, 80 bp, synthetic construct
  source 1..80: mol_type = other DNA
acaatttttggaaagtaatgcggtaaaataccttgaaggtcatggattccgttttgagatgaagaaaaaggaaggtgtca

SEQ ID NO: 48059 - DNA, 80 bp, synthetic construct
  source 1..80: mol_type = other DNA
caaccccgtcgacaccacctcaagacggtgagcggacaagttcccacacaacaccctccccccgcccagtcccaaccagc

SEQ ID NO: 48060 - DNA, 80 bp, synthetic construct
  source 1..80: mol_type = other DNA
acaatccatcccaccacacgagagactcaaattcccaccacaatgataacaagccatgatactgacagtaatcgacccaa

SEQ ID NO: 48061 - DNA, 80 bp, synthetic construct
  source 1..80: mol_type = other DNA
cccaattgacatcagcgagtctacagagccaggactactcaccaacaccataagaggggttgcaaatttgctgacaggtt

SEQ ID NO: 48062 - DNA, 80 bp, synthetic construct
  source 1..80: mol_type = other DNA
caagaagaacccggagggaaatcaccttgagaacacaagccaaatgtaatccgaacctacactattggacaacccaagat

SEQ ID NO: 48063 - DNA, 80 bp, synthetic construct
  source 1..80: mol_type = other DNA
gaaggggctgccattggtctagcctggataccttacttcgggcccgcagcagagggaatttatacggaaggaataatgca

SEQ ID NO: 48064 - DNA, 80 bp, synthetic construct
  source 1..80: mol_type = other DNA
caatcaaaatgggctaatttgcgggttgaggcagctagcaaatgagacgactcaagccctacagttattcttgcgtgcta

SEQ ID NO: 48065 - DNA, 80 bp, synthetic construct
  source 1..80: mol_type = other DNA
ccacggaattgcgcactttctccatattgaatcgaaaagccatcgactttttacttcaaagatggggaggaacgtgccac

SEQ ID NO: 48066 - DNA, 80 bp, synthetic construct
  source 1..80: mol_type = other DNA
tcattcatgatttcattgataaacctctaccagatcaaacagataatgacaattggtggacagggtggaggcaatgggtt

SEQ ID NO: 48067 - DNA, 80 bp, synthetic construct
  source 1..80: mol_type = other DNA
attgaaattgaaattgagattctaatctcgacggatcgatccccaataccaacactgagaattggcctgaagaagtcatc

SEQ ID NO: 48068 - DNA, 80 bp, synthetic construct
  source 1..80: mol_type = other DNA
agcgcctggaggaactactccctgctgcctcgagtggaaagaacatcaagagaacattggctgcaatgcccgaggaggaa

SEQ ID NO: 48069 - DNA, 80 bp, synthetic construct
  source 1..80: mol_type = other DNA
tagcactgctgtgtatttgcaaatttctactctaatctagtccgactctgtaccagcataatggcctctaaaataagctt

SEQ ID NO: 48070 - DNA, 80 bp, synthetic construct
  source 1..80: mol_type = other DNA
ttgcttctgcttcctatagttaatacatctcagcaaaaatcaactattaagttaaaagaagatccctctaataatcctaa

SEQ ID NO: 48071 - DNA, 80 bp, synthetic construct
  source 1..80: mol_type = other DNA
ttaccttcaaaaatctagaactttattaattctcagggtatttagaacagccagatgacttgactaagtttgtactgtaa

SEQ ID NO: 48072 - DNA, 80 bp, synthetic construct
  source 1..80: mol_type = other DNA
taaaaagatacttgatgaagattaagaaaaagacagtcttgtgattgtcactaatcttcatctcaaaacatattatttta

SEQ ID NO: 48073 - DNA, 80 bp, synthetic construct
  source 1..80: mol_type = other DNA
ccagaagctaccatagcctacctccttgacacatagcaaaccttactcatgttgataattgtttgcctgctatttacata

SEQ ID NO: 48074 - DNA, 80 bp, synthetic construct
  source 1..80: mol_type = other DNA
tttactaacttacaaaattatcttggggatttctctgaacatataatcaggattggcatttaaaacacaagttagtccta

SEQ ID NO: 48075 - DNA, 80 bp, synthetic construct
  source 1..80: mol_type = other DNA
atggactcatttcatgaaagagggcgtagcagaactattcgacagagtgcaagagatgggccgagtcatcaagtaagaac

SEQ ID NO: 48076 - DNA, 80 bp, synthetic construct
  source 1..80: mol_type = other DNA
aagatcatcctccagagacagccaccgcagcgaatatcatacacctaggagctcttcccaagttcgagtcccgactgtgt

SEQ ID NO: 48077 - DNA, 80 bp, synthetic construct
  source 1..80: mol_type = other DNA
ttcatcggaagcgtactgattttttgacagttccaccagcaccaaaggacatatgtcctaccttaaggaaaggatttttg

SEQ ID NO: 48078 - DNA, 80 bp, synthetic construct
  source 1..80: mol_type = other DNA
acagatagggagctgcttttgctgattgcacggaaaacctgcggctcccttgaacaacaattgaacatcactgctcctaa

SEQ ID NO: 48079 - DNA, 80 bp, synthetic construct
  source 1..80: mol_type = other DNA
acaacagaagcaaatgctggacaatttctttcatttgctagtctgtttctcccaaaattggttgtcggagaaaaggcctg

SEQ ID NO: 48080 - DNA, 80 bp, synthetic construct
  source 1..80: mol_type = other DNA
agatacacgattagcaaatccaattgcagatgatttccaacaaaaagacggcccaaaaattacactattgacacttttgg

SEQ ID NO: 48081 - DNA, 80 bp, synthetic construct
  source 1..80: mol_type = other DNA
agactgcggagtattggtcaaaacaagatatcaagggcattgatgattcaagactaagagcattactaaccctttgtgcc

SEQ ID NO: 48082 - DNA, 80 bp, synthetic construct
  source 1..80: mol_type = other DNA
gtcatgacgaggaaattctcaaaatcccagctgagtctattgtgtgagagtcatctacgacgagaagggctaggacagga

SEQ ID NO: 48083 - DNA, 80 bp, synthetic construct
  source 1..80: mol_type = other DNA
tcaatcagaatctgttcttgaagtgtaccagcgcttgcatagcgacaaaggcggaaattttgaggcagccctatggcaac

SEQ ID NO: 48084 - DNA, 80 bp, synthetic construct
  source 1..80: mol_type = other DNA
aatgggaccgacagtccttgatcatgtttataacagcatttcttaatattgctttacaattaccctgtgaaagttcatct

SEQ ID NO: 48085 - DNA, 80 bp, synthetic construct
  source 1..80: mol_type = other DNA
gttgttatttcaggattaaggctgctagtgcctcaatcagaagataccgagacctcaacctacaccgagacacgtgcatg

SEQ ID NO: 48086 - DNA, 80 bp, synthetic construct
  source 1..80: mol_type = other DNA
gtcagaggaaggtggcccccattaacatcttccacagttgaatctaccataacttccctattcaacgcaggtaagaatca

SEQ ID NO: 48087 - DNA, 80 bp, synthetic construct
  source 1..80: mol_type = other DNA
gtactaaaccacaagtgcaaaaattaacaaaacaccagcataagtgaaatcttgtctgtgattagcaagacgaatgatct

SEQ ID NO: 48088 - DNA, 80 bp, synthetic construct
  source 1..80: mol_type = other DNA
tcaatcctgttgcaattcgccagtgataattgtattcacattgtggccacaatatactgttttttccattgaaaaacaag

SEQ ID NO: 48089 - DNA, 80 bp, synthetic construct
  source 1..80: mol_type = other DNA
gctgaatctattgcgctacacaaacttacaggattagcaccacgacggctcaatactatacctattggtcacggctcgat

SEQ ID NO: 48090 - DNA, 80 bp, synthetic construct
  source 1..80: mol_type = other DNA
gtgttaatcacttatattgtattcatttgaaattattcattaggcaaatattttgattaagaaaaaataattggaaaacc

SEQ ID NO: 48091 - DNA, 80 bp, synthetic construct
  source 1..80: mol_type = other DNA
agaaaatccctaggtatttaaattcctatctccggagatccgagataattaatcaagcaatgaaggaacaatggtgaaca

SEQ ID NO: 48092 - DNA, 80 bp, synthetic construct
  source 1..80: mol_type = other DNA
acaacatattgttgccccctttagattggtcagttccaaaaacaagtgatgaagattaatgcagatgtccaaggaacaca

SEQ ID NO: 48093 - DNA, 80 bp, synthetic construct
  source 1..80: mol_type = other DNA
tatttgtgatttaaacgttccagttagactctgttcaaggatcttcatcttttgtagctccactctgagtcacaacataa

SEQ ID NO: 48094 - DNA, 80 bp, synthetic construct
  source 1..80: mol_type = other DNA
ttgagtttttgctcagaacagttatcaggattaaattctctcaaataactgaaactactagcatcactctcaatttcatt

SEQ ID NO: 48095 - DNA, 80 bp, synthetic construct
  source 1..80: mol_type = other DNA
aaaataaacgttgcaaaaaggattcctggaaaaatggtcgcacacaaaaatttaaaaataaatctatttcttcttttttg

SEQ ID NO: 48096 - DNA, 80 bp, synthetic construct
  source 1..80: mol_type = other DNA
tcagaggggttggttgcttcggctccgcatctagagagagttacaggatttaatcagattgattcagacaaagtttatga

SEQ ID NO: 48097 - DNA, 80 bp, synthetic construct
  source 1..80: mol_type = other DNA
gctaacttactaacaataccatgtttatttactttatccttactaacaatataaccttatgttagttactgttatataac

SEQ ID NO: 48098 - DNA, 80 bp, synthetic construct
  source 1..80: mol_type = other DNA
ctaacaatataaccttatgttagttactgttatataaccgttagctaaaaaaaacaaatactttactcatatacaattcc

SEQ ID NO: 48099 - DNA, 80 bp, synthetic construct
  source 1..80: mol_type = other DNA
cgttgcaaaaaggattcctggaaaaatggtcgcacacaaaaatttaaaaataaatctatttcttcttttttgtgtgtcca

SEQ ID NO: 48100 - DNA, 80 bp, synthetic construct
  source 1..80: mol_type = other DNA
ctagcaacacaatggttacatcaggaattctacaattgccccgtgaacgcttcagaaaaacatcattttttgtttgggta

SEQ ID NO: 48101 - DNA, 80 bp, synthetic construct
  source 1..80: mol_type = other DNA
tagcactgctgtgtatttgcaaatttctactctaatttttctcgagattgcttcatggaaaagctcagcctcaaatcaat

SEQ ID NO: 48102 - DNA, 80 bp, synthetic construct
  source 1..80: mol_type = other DNA
aagagccaacaacatgtaggtgctagagtaactggataggttggatggtctttctgggcttgagccacatatttaatcat

SEQ ID NO: 48103 - DNA, 80 bp, synthetic construct
  source 1..80: mol_type = other DNA
ctcaggacctttaatgtgattaatgcgggtttattataagggtggtaagtgggtttcaattactaactacgggtaaggga

SEQ ID NO: 48104 - DNA, 80 bp, synthetic construct
  source 1..80: mol_type = other DNA
acttagggttgggataatgggtaggatcatagttcataagttagcattgtgatagtcctaggttaagtatagattttgat

SEQ ID NO: 48105 - DNA, 80 bp, synthetic construct
  source 1..80: mol_type = other DNA
taggtaagtaattagccatatgaaatcaatgattgattggcttgcatttattgataattagtatttagttatagattaag

SEQ ID NO: 48106 - DNA, 80 bp, synthetic construct
  source 1..80: mol_type = other DNA
ttcaattgttaatgtttttaggttaagattaactaacaatcatttactccattggatgtaaatttcgttcattgctttgc

SEQ ID NO: 48107 - DNA, 80 bp, synthetic construct
  source 1..80: mol_type = other DNA
gctgggaatcattatattcactgtttattatatcatatagtttgataagtttaggaataagtagcaataagttcatagaa

SEQ ID NO: 48108 - DNA, 80 bp, synthetic construct
  source 1..80: mol_type = other DNA
tcacactggctgtatgaaattaattattgattagccggaattaccatattagctatctgtgagtatacatatattcatat

SEQ ID NO: 48109 - DNA, 80 bp, synthetic construct
  source 1..80: mol_type = other DNA
atcaaatagaattattgtataatcatatatatttcattaggtgttaaggttactaacaaatcaaactactttaatggatg

SEQ ID NO: 48110 - DNA, 80 bp, synthetic construct
  source 1..80: mol_type = other DNA
gtgtttcttggggagttttttggttttcttgtgttttttatttattttgaaagtcggattggggttccatctctttgtgg

SEQ ID NO: 48111 - DNA, 80 bp, synthetic construct
  source 1..80: mol_type = other DNA
tctatatgtcttgatttagcattgttagaggaagccagagtctgtttcccagtagttctttggatgtaacttcatactgt

SEQ ID NO: 48112 - DNA, 80 bp, synthetic construct
  source 1..80: mol_type = other DNA
aactccactaacttaaacaattctgactgacagcaatcatctcttttatcatgctctaatgctgtcatgagtctgatcag

SEQ ID NO: 48113 - DNA, 80 bp, synthetic construct
  source 1..80: mol_type = other DNA
ttgtatgtaggcaatctctttctctatggcttgacctgtaaatacttctgcaggtatgttcctaacagatagctctctca

SEQ ID NO: 48114 - DNA, 80 bp, synthetic construct
  source 1..80: mol_type = other DNA
tcatggtcttgtaagtgaacattaatgaatcatccagaccaagacccttcccaactctgcagatttgagttgcaaagtca

SEQ ID NO: 48115 - DNA, 80 bp, synthetic construct
  source 1..80: mol_type = other DNA
cattttttctcccagtttaactggtaaccatccagtgttgagaattcaaaaaatttaaaagttggataagtaagaggcca

SEQ ID NO: 48116 - DNA, 80 bp, synthetic construct
  source 1..80: mol_type = other DNA
ggacagagccctcttaatgtttggttcacaccactttagtgcatctttaacgtccaacattgaaatacgggctattgtga

SEQ ID NO: 48117 - DNA, 80 bp, synthetic construct
  source 1..80: mol_type = other DNA
catcaaaaaatgatggagaggcctttattacaagaccttgttcatatccccactccttaggtaaatcataattatttaag

SEQ ID NO: 48118 - DNA, 80 bp, synthetic construct
  source 1..80: mol_type = other DNA
aaggtaattagtctatttttggctataacagattgtctgagattgtgcagtgggatctccatacctttgtaaaggctgac

SEQ ID NO: 48119 - DNA, 80 bp, synthetic construct
  source 1..80: mol_type = other DNA
tggggcattatgacgcttaccgaatgggacaaaatccacggtcactcttttcaactggttcggagaagtgctcattatgg

SEQ ID NO: 48120 - DNA, 80 bp, synthetic construct
  source 1..80: mol_type = other DNA
tcatcttcaactgtgagtgctgcaaaagtcttcagatccctttgaaacaccagaggccttgatgaaacctagacaatatg

SEQ ID NO: 48121 - DNA, 80 bp, synthetic construct
  source 1..80: mol_type = other DNA
tgcatactaaattggacattccaaaacacactgtgggtcaaaacaaaaaaacaaagaaaaacaataaaatataaaataaa

SEQ ID NO: 48122 - DNA, 80 bp, synthetic construct
  source 1..80: mol_type = other DNA
gaaacattgacccacagtcccacctgggcagcttatctgcctaggtgtgtgtaagagtgtgtttgtagttttctttgaga

SEQ ID NO: 48123 - DNA, 80 bp, synthetic construct
  source 1..80: mol_type = other DNA
gcactctggaaacattgattcacgatgaaacgcgtcagaccaagggctgctgttgacggtgttggcctggtgagctgtat

SEQ ID NO: 48124 - DNA, 80 bp, synthetic construct
  source 1..80: mol_type = other DNA
tgaagttaagaggggttgctatagaacattgggggtgtttagatataaaagtagatgttatgtaggactagtatggtgcc

SEQ ID NO: 48125 - DNA, 80 bp, synthetic construct
  source 1..80: mol_type = other DNA
aagaaaagtgtttgattgttcaccatttatatcatgacacagttttttttaatattaggccaacatgtactcaatgctat

SEQ ID NO: 48126 - DNA, 80 bp, synthetic construct
  source 1..80: mol_type = other DNA
ttgaagagattaatattcttcaaggtattaaggatacaaaaaggttaaaaaaactttttttctttttgtgtgtccttaat

SEQ ID NO: 48127 - DNA, 80 bp, synthetic construct
  source 1..80: mol_type = other DNA
gaatcaacttatctcaatacaggtttagaattaagaaaaaactagttgtagcgcacatgtatatagagatatgtatatat

SEQ ID NO: 48128 - DNA, 80 bp, synthetic construct
  source 1..80: mol_type = other DNA
cttctacgccagatgtccatttttaccaaagccaaaagttgcatctgaggcattcatggcaactaacaaggcatacttcc

SEQ ID NO: 48129 - DNA, 80 bp, synthetic construct
  source 1..80: mol_type = other DNA
aaaagaaagaagaattttttaacttttttgtgtgagagtaactatgaggaagattaagaactctcctctcatggctgaat

SEQ ID NO: 48130 - DNA, 80 bp, synthetic construct
  source 1..80: mol_type = other DNA
ccactaaactgggcagtaccagccgggacaccacccatcgtacgaccaggtggcagtcccccaagcccccttacgattat

SEQ ID NO: 48131 - DNA, 80 bp, synthetic construct
  source 1..80: mol_type = other DNA
tgccagtgctcctgttgctattctaggaggaggaggcccaccatctgcaagctgttgcccagtggcagtattccagccgg

SEQ ID NO: 48132 - DNA, 80 bp, synthetic construct
  source 1..80: mol_type = other DNA
tgctcagagtcatcaccagcaggtcagaatctggctcaagattgggtagggtcctaaagggttcttactacttgccatat

SEQ ID NO: 48133 - DNA, 80 bp, synthetic construct
  source 1..80: mol_type = other DNA
tcgttgcaggggttatctagtgccgaacatttgtcgtccaggaaatcctgacagtcaatcattattgtgtcatctatcgt

SEQ ID NO: 48134 - DNA, 80 bp, synthetic construct
  source 1..80: mol_type = other DNA
ctgccctatctatactcatggcaaaggcaactggccgttacaatctgatttcccccaaacaagaactcgaaaagggggta

SEQ ID NO: 48135 - DNA, 80 bp, synthetic construct
  source 1..80: mol_type = other DNA
gtattcagtgatttatgcaactttgttgtaagtcaaactgtccagggatggagagtttactgggcgggtatcgaatttga

SEQ ID NO: 48136 - DNA, 80 bp, synthetic construct
  source 1..80: mol_type = other DNA
gttatcttccggttaatgagaacaaatttcctgatcaagttcttgttgatacatcagggtatgcacatgattgccggaca

SEQ ID NO: 48137 - DNA, 80 bp, synthetic construct
  source 1..80: mol_type = other DNA
ggttacccagaaagggatggctctattgagcagacttaaaaccaatgactttgctccggcatgggcaatgactaggaatc

SEQ ID NO: 48138 - DNA, 80 bp, synthetic construct
  source 1..80: mol_type = other DNA
ctcacctctttcagaatccaaactcagtgattgaacacccactctgggccctcagagtcatcctggctgctggaatctat

SEQ ID NO: 48139 - DNA, 80 bp, synthetic construct
  source 1..80: mol_type = other DNA
gaccaattgattgagcagtcattgattgaacctctcgcaggggcattaggcttaattgcagattggttattagtgacaag

SEQ ID NO: 48140 - DNA, 80 bp, synthetic construct
  source 1..80: mol_type = other DNA
cacagcacatctgaatctacgggctcggagtgtcaaagaacaattaagcctgaagatgttatcattgattcgctcgaaca

SEQ ID NO: 48141 - DNA, 80 bp, synthetic construct
  source 1..80: mol_type = other DNA
ttctgaagtttattgggaaactggatgctctccatgttgtcaattacaatggattactgagcagcattgaagtcaacaca

SEQ ID NO: 48142 - DNA, 80 bp, synthetic construct
  source 1..80: mol_type = other DNA
aatatgcatgctgtcataattacccggacaaacatggggtacttagtagaactccaagaacctgacaagtcggcccttga

SEQ ID NO: 48143 - DNA, 80 bp, synthetic construct
  source 1..80: mol_type = other DNA
tccaaggcaccctgggcctgtcaaattctcactactccatgagtccaccctgaaggcatttactgagaaatctacatcag

SEQ ID NO: 48144 - DNA, 80 bp, synthetic construct
  source 1..80: mol_type = other DNA
ggatacagaatcttatacttgaattcaatagctcccttgcgatataggggcccaattctaggccctaggctgaaacaagt

SEQ ID NO: 48145 - DNA, 80 bp, synthetic construct
  source 1..80: mol_type = other DNA
ttagtaagtgctctcatcagaattaaaccaagacatgccatgctgagaaaaatcatcaatgcctcccaaactatgaagtc

SEQ ID NO: 48146 - DNA, 80 bp, synthetic construct
  source 1..80: mol_type = other DNA
atctgacataagtgagtcaaccagccactgatgcccacccaagcaatttaaacctcgacatcgactaatcatccggatac

SEQ ID NO: 48147 - DNA, 80 bp, synthetic construct
  source 1..80: mol_type = other DNA
tgatgctaacgatgctgttatcgctaattcagttgctcaggcacgcttttcaggcttgttgatcgtcaagacagtgctgg

SEQ ID NO: 48148 - DNA, 80 bp, synthetic construct
  source 1..80: mol_type = other DNA
ggaccgtctagcttaggcaacactcgcccgaccaccggccgagccaacaagtcaaggatcaaactgactgatcttcttcc

SEQ ID NO: 48149 - DNA, 80 bp, synthetic construct
  source 1..80: mol_type = other DNA
actcaggctcggagtcacactcaagaccagggccatgcctctatcgaagctgcaataggtagcatctcacctcaccaaac

SEQ ID NO: 48150 - DNA, 80 bp, synthetic construct
  source 1..80: mol_type = other DNA
tagaaagtgcacagaccaaagacaaagccactttgattagtcttaacaggttctcccaaagggatgtaccacgaggaaga

SEQ ID NO: 48151 - DNA, 80 bp, synthetic construct
  source 1..80: mol_type = other DNA
ttaagaaaaaacttttcttagtcttctctatatccattacatagcgctggtgaaagttagcctaatgatagggagattat

SEQ ID NO: 48152 - DNA, 80 bp, synthetic construct
  source 1..80: mol_type = other DNA
ggctagctcacatacccaatatccagatgctaggttatcatctccaattgtgttggatcagtgtgaccttgtaacccgag

SEQ ID NO: 48153 - DNA, 80 bp, synthetic construct
  source 1..80: mol_type = other DNA
cttgcgggatattctcagcttattcattgaatccacaattaaaatcctgtcgcttgccaaaacatatctacagacttcgg

SEQ ID NO: 48154 - DNA, 80 bp, synthetic construct
  source 1..80: mol_type = other DNA
tacgatcctactgtagctcagttcctaagcgatgtcccagtggcaacactgccaattgattatatcctaccagtgttatt

SEQ ID NO: 48155 - DNA, 80 bp, synthetic construct
  source 1..80: mol_type = other DNA
acgtgcaatctcggagggggaatactgtcctttagagcctcgatgcaagcaatttcaggatgagattctagactataccc

SEQ ID NO: 48156 - DNA, 80 bp, synthetic construct
  source 1..80: mol_type = other DNA
tacaagatgcacgatttttagaatattacttgcggacaacaggatctgaagagaaggaaggtaatttaactgccaatcct

SEQ ID NO: 48157 - DNA, 80 bp, synthetic construct
  source 1..80: mol_type = other DNA
gcaataaaaaatgtcatcttaaaaaatgagtttctgcctcaactgtacttttggtatgatctagcaatccttgctcgtcg

SEQ ID NO: 48158 - DNA, 80 bp, synthetic construct
  source 1..80: mol_type = other DNA
accacattctgcagaaaacagaccgtggagtccgtcttcatcctttggcacgtacagccaaggtcaggaacgaggtccat

SEQ ID NO: 48159 - DNA, 80 bp, synthetic construct
  source 1..80: mol_type = other DNA
aggccgattaaatcgcggtaacgcaaggtcaacctggtttgtgcatgataagttaatagacatcctgggttacggcgatt

SEQ ID NO: 48160 - DNA, 80 bp, synthetic construct
  source 1..80: mol_type = other DNA
acattttctggaagtttcccctctctttactaccaatgaatgaaaatggtatcccacatgcagccatagactggtaccaa

SEQ ID NO: 48161 - DNA, 80 bp, synthetic construct
  source 1..80: mol_type = other DNA
agggggttatttcaggaggctatacaagggtacaaatatattgtttctgtgtctacagcagatgtactcataatgtgtaa

SEQ ID NO: 48162 - DNA, 80 bp, synthetic construct
  source 1..80: mol_type = other DNA
ggatattgttacttgtcgtttcaatacagttcttattgcagcagttgcccggattgaggaccatgtccatattgactacc

SEQ ID NO: 48163 - DNA, 80 bp, synthetic construct
  source 1..80: mol_type = other DNA
ctgatgtgagtgtaatttctaccctttaccgggctggggactatctcctttcaatattaggttctgaagggtataaaatt

SEQ ID NO: 48164 - DNA, 80 bp, synthetic construct
  source 1..80: mol_type = other DNA
ataaaattccttgagcccttgtgtctagcaaaaatacaactttgtgcaaagtacaccgagaggaagggcaggtttcttac

SEQ ID NO: 48165 - DNA, 80 bp, synthetic construct
  source 1..80: mol_type = other DNA
tcaaatgcacctggctgttatccatactttggaagaattactcaacggccgaaatctcaagacgtttcaactccaaaaaa

SEQ ID NO: 48166 - DNA, 80 bp, synthetic construct
  source 1..80: mol_type = other DNA
tccgtgaatttcatcaaattattgtcaggttgagatcaacacctcaacaattctgcgaactcttttcaattcaaaaacat

SEQ ID NO: 48167 - DNA, 80 bp, synthetic construct
  source 1..80: mol_type = other DNA
tggggccatcctattcttcacagtgagaaagccattcaaaaagtcaagcggcatgcaaccataatgaaggcattacgccc

SEQ ID NO: 48168 - DNA, 80 bp, synthetic construct
  source 1..80: mol_type = other DNA
tcgttcaaagctgctcttaactccctggctcagcatggggaatatgccccctttgctagactcttgaacctgtctggagt

SEQ ID NO: 48169 - DNA, 80 bp, synthetic construct
  source 1..80: mol_type = other DNA
aacttggtacagtgttacttcagataaggctctaaccccttccttacaatcatatattcgtcggaatcaatttccccctt

SEQ ID NO: 48170 - DNA, 80 bp, synthetic construct
  source 1..80: mol_type = other DNA
tgccaatgattaaggacctactctgggagttctatcatttagaccatccaccattattctcgacgaaggtcattagcgat

SEQ ID NO: 48171 - DNA, 80 bp, synthetic construct
  source 1..80: mol_type = other DNA
ttaagtatcttcatcaaggatcgggcaaccgctgttgagcagacttgctgggatgctgtctttgagcctaatgtattggg

SEQ ID NO: 48172 - DNA, 80 bp, synthetic construct
  source 1..80: mol_type = other DNA
ttacagccccccttatcggttcactaccaagcgagtaccagagcaatttttagagcaggagaacttttcaatagattcag

SEQ ID NO: 48173 - DNA, 80 bp, synthetic construct
  source 1..80: mol_type = other DNA
tcttaaatttcgctcaaagtctagactacttactaccacaataccgtaacttctcattttctcttaaagagaaggagctc

SEQ ID NO: 48174 - DNA, 80 bp, synthetic construct
  source 1..80: mol_type = other DNA
aatattgggagaacgtttggcaaattgccctatctaactcgtaatgtccaaaccttatgcgaagcgctcttggcagatgg

SEQ ID NO: 48175 - DNA, 80 bp, synthetic construct
  source 1..80: mol_type = other DNA
tgcatttcataattccacaatgttatatgcatgttagcgattactataaccctccccatgggttgtcattagagaatcgt

SEQ ID NO: 48176 - DNA, 80 bp, synthetic construct
  source 1..80: mol_type = other DNA
aaataacctcgaacatgggctgtatcctcaactctctgcgattgcacttggtgtggcgactgcacacggcagcactttgg

SEQ ID NO: 48177 - DNA, 80 bp, synthetic construct
  source 1..80: mol_type = other DNA
gagactcccccagatggaccaagtgcatatcgcggtcatctaggcgggatagaaggattgcagcagaaattatggactag

SEQ ID NO: 48178 - DNA, 80 bp, synthetic construct
  source 1..80: mol_type = other DNA
tatatcctgctcacagatatccttagttgagattaaaacaggcttcaaattacgctcggcagttatgggggacaaccagt

SEQ ID NO: 48179 - DNA, 80 bp, synthetic construct
  source 1..80: mol_type = other DNA
gtattacagtcttatcggtattcccattagagtctgatcctgacgaacaggaactacatgccgaggacaatgctgcgagg

SEQ ID NO: 48180 - DNA, 80 bp, synthetic construct
  source 1..80: mol_type = other DNA
gttgccgcaagtttagcaaaggttacaagtgcgtgtgggatatttttgaagcctgaagagacctttgtccactcaggttt

SEQ ID NO: 48181 - DNA, 80 bp, synthetic construct
  source 1..80: mol_type = other DNA
catctacttcggtaagaagcaatacctcaatggcgtgcagctcccccagtcccttaagactgctgccaggatggccccac

SEQ ID NO: 48182 - DNA, 80 bp, synthetic construct
  source 1..80: mol_type = other DNA
tctccgatgctatctttgatgatttgcagggtacactggcaagcattggtactgcatttgagcggtcgatatctgagacc

SEQ ID NO: 48183 - DNA, 80 bp, synthetic construct
  source 1..80: mol_type = other DNA
agacatatactcccttgtaggattgccgctgcctttcatacctttttttcagtgagaatacttcagcaccaccatcttgg

SEQ ID NO: 48184 - DNA, 80 bp, synthetic construct
  source 1..80: mol_type = other DNA
ctttaataaaggaacagacttgggccagcttgcgataagcaaaccattggacttcgggaccattaccttggccctggctg

SEQ ID NO: 48185 - DNA, 80 bp, synthetic construct
  source 1..80: mol_type = other DNA
tgcctcaggttctaggaggattatctttccttaacccagagaagtgcttttatcgcaatttgggagatcccgttacctcc

SEQ ID NO: 48186 - DNA, 80 bp, synthetic construct
  source 1..80: mol_type = other DNA
ggattatttcaacttaagaaatatcttcagatgctcgacatggatgacttattcttgcccctaattgctaaaaatcctgg

SEQ ID NO: 48187 - DNA, 80 bp, synthetic construct
  source 1..80: mol_type = other DNA
caggggtgaacgttggtgagcagtaccaacagctcagggaggctgccacggaagctgagaagcagctgcagcaatatgct

SEQ ID NO: 48188 - DNA, 80 bp, synthetic construct
  source 1..80: mol_type = other DNA
aaattgtagtgccattgattttgtccttaaccccagcgggttgaacgtgccgggctcacaagatctgacctcctttttac

SEQ ID NO: 48189 - DNA, 80 bp, synthetic construct
  source 1..80: mol_type = other DNA
gacagattgtccgacggactatcacactcagtgccaaaaatagccttatcaacacactatttcatgcatctgctgacttt

SEQ ID NO: 48190 - DNA, 80 bp, synthetic construct
  source 1..80: mol_type = other DNA
gaggacgagacggtctgtaagtggctactgtcctcaaatcctgtgatgagtcgttttgctgctgatatcttctctcggac

SEQ ID NO: 48191 - DNA, 80 bp, synthetic construct
  source 1..80: mol_type = other DNA
cccgagtggcaagaggcttcaaatcctaggctatttggagggaaccaggactttattagcttcgaaaatcatcaataacg

SEQ ID NO: 48192 - DNA, 80 bp, synthetic construct
  source 1..80: mol_type = other DNA
atagtgacacaccgatcctagatcgcctaaggaaaataaccatacagagatgggggctgtggttcagctacctcgatcag

SEQ ID NO: 48193 - DNA, 80 bp, synthetic construct
  source 1..80: mol_type = other DNA
tgtgatcaagcactggctgaagccctggataagatacattgtactgttgatctggcccaaattctacgggagtattcctg

SEQ ID NO: 48194 - DNA, 80 bp, synthetic construct
  source 1..80: mol_type = other DNA
ggcccacctcttagaagggcgtcggctcattggagcaaccctgccgtgtatgcttgaacagtttcaagtttggtggctta

SEQ ID NO: 48195 - DNA, 80 bp, synthetic construct
  source 1..80: mol_type = other DNA
agccatacgagcagtgtccagcttgcaatagcctaaaagatgccggtgctaatccctacgtgtcggcagcaattaagcaa

SEQ ID NO: 48196 - DNA, 80 bp, synthetic construct
  source 1..80: mol_type = other DNA
aatattgttagtgcatggccaaaccgggctaggctcagttggacaattggggacgggataccgtacatcggatctcgtac

SEQ ID NO: 48197 - DNA, 80 bp, synthetic construct
  source 1..80: mol_type = other DNA
tgaggacaagataggacagccagcgatcaaaccgcggtgtccttctgccgcgttgcgagaggcaatcgaactagcatcta

SEQ ID NO: 48198 - DNA, 80 bp, synthetic construct
  source 1..80: mol_type = other DNA
ctgaaacacgtgagctggaccacttaggcctagacacaaaagaaaaggaaatattaatgaatttccatcaacggaaaaat

SEQ ID NO: 48199 - DNA, 80 bp, synthetic construct
  source 1..80: mol_type = other DNA
cacttggcgagttttcgggtggcggtcaatcagctcgcgacagtaacatcatcttccaaaatgtcataaattatgctgtg

SEQ ID NO: 48200 - DNA, 80 bp, synthetic construct
  source 1..80: mol_type = other DNA
gctttatttgatatacgtttcaggaataaagacccttcaagtataccatttaaccgagcgcatcttcatcttgcacgatg

SEQ ID NO: 48201 - DNA, 80 bp, synthetic construct
  source 1..80: mol_type = other DNA
ttgcactcgtgaggtcccggctcaatatctaacttacacgacaacattaaaattagatcttacccgttataaagacaatg

SEQ ID NO: 48202 - DNA, 80 bp, synthetic construct
  source 1..80: mol_type = other DNA
cttacacgacaacattaaaattagatcttacccgttataaagacaatgagttgatttacgacaatgatcctcttcgaggg

SEQ ID NO: 48203 - DNA, 80 bp, synthetic construct
  source 1..80: mol_type = other DNA
agttgatttacgacaatgatcctcttcgaggggggctaaattgtaatttaacatttgatcatccactttttaaaggtgaa

SEQ ID NO: 48204 - DNA, 80 bp, synthetic construct
  source 1..80: mol_type = other DNA
cgactaaacattattgaagaggacctaatccgattcccgcatctgtcaggttgggaattagcaaaaacaattcttcaatc

SEQ ID NO: 48205 - DNA, 80 bp, synthetic construct
  source 1..80: mol_type = other DNA
gattatgtctgacagtagtaattcttcaacagacccaattagtagcggggaaacccggtccttcacaactcattttctta

SEQ ID NO: 48206 - DNA, 80 bp, synthetic construct
  source 1..80: mol_type = other DNA
cgagattgaatcactaattggctcgttaccctagcatttactaggccaatagttctattactgattttgcatctgagaag

SEQ ID NO: 48207 - DNA, 80 bp, synthetic construct
  source 1..80: mol_type = other DNA
catatcctataatcggattattgtacagcttcggggcattgacaagtttttacttagggggaactatcattagtacaaag

SEQ ID NO: 48208 - DNA, 80 bp, synthetic construct
  source 1..80: mol_type = other DNA
gagattagtttccagcaaacaaatgcaatggtgtcccttcgcaaggagagactagcaaaactaacagaagctattgccgc

SEQ ID NO: 48209 - DNA, 80 bp, synthetic construct
  source 1..80: mol_type = other DNA
aagatcaagatagaagaatttctctactatctaactactcaaattcataacctcccacatcggtcattacgggtcttaaa

SEQ ID NO: 48210 - DNA, 80 bp, synthetic construct
  source 1..80: mol_type = other DNA
acccactttcaaacatgcaagtgtgattgcacgtcttgtggacatagatcctcatttctcgatatatataggtggatccg

SEQ ID NO: 48211 - DNA, 80 bp, synthetic construct
  source 1..80: mol_type = other DNA
ctggggaccgaggactatcagatgctgcacggttatttctgcgaatatctatcaagacgttcattgattttattcaagat

SEQ ID NO: 48212 - DNA, 80 bp, synthetic construct
  source 1..80: mol_type = other DNA
tggataatcattcggaaagttgcaaccccgctatggataatataccctcttgaagggcatagtcctcatcctatcaacaa

SEQ ID NO: 48213 - DNA, 80 bp, synthetic construct
  source 1..80: mol_type = other DNA
ttatctaaatagagttatctcattatgtgaatgccagtctataagtagaaagcttcccgcaagcaatgatcaaaccagca

SEQ ID NO: 48214 - DNA, 80 bp, synthetic construct
  source 1..80: mol_type = other DNA
ctatgattacccaaaaccttgtttacatgtgcaaaagtactgcaagtaatttcttccatgcatccttggcctattggagg

SEQ ID NO: 48215 - DNA, 80 bp, synthetic construct
  source 1..80: mol_type = other DNA
aacaggcaaaagtcacagacgaaaaagaggttgaatgcatgtgccacaaagaaccacaaggcgtctcctcaaaggggatt

SEQ ID NO: 48216 - DNA, 80 bp, synthetic construct
  source 1..80: mol_type = other DNA
aactgcagatccattcaatcttactacggccaaattacacaccaacctcactccttgccgatggagactggacatgggct

SEQ ID NO: 48217 - DNA, 80 bp, synthetic construct
  source 1..80: mol_type = other DNA
cgaaggatcccgtcagatcccaacgtgcaatcccaaccgagcagatgcgctcatccctggacaatctgcctgaggagaac

SEQ ID NO: 48218 - DNA, 80 bp, synthetic construct
  source 1..80: mol_type = other DNA
accacccattcaactctgcccaacaatagcctagcagagagttggatacattcggatttgagtacagccccagactcagg

SEQ ID NO: 48219 - DNA, 80 bp, synthetic construct
  source 1..80: mol_type = other DNA
tgcatcagcccaaagagagagaggctactacgacgatgacaatgaaattccgtttccaggcccaatcaatgacaatgatg

SEQ ID NO: 48220 - DNA, 80 bp, synthetic construct
  source 1..80: mol_type = other DNA
cacgcggtgtcactcccgatgcttagctgttcctttttttgcccaagcctcagggtggaactcacagaacatggctgtgt

SEQ ID NO: 48221 - DNA, 80 bp, synthetic construct
  source 1..80: mol_type = other DNA
caactcaatacattagtatcatttcaacactactaagtcaaattaagacaatggttgatacaaccaggtattgtcggttt

SEQ ID NO: 48222 - DNA, 80 bp, synthetic construct
  source 1..80: mol_type = other DNA
accggtattgtatcatcaatgcattataaactggatgagatcttgtgtggcttaggaaatttcccgacagcaattactct

SEQ ID NO: 48223 - DNA, 80 bp, synthetic construct
  source 1..80: mol_type = other DNA
agcagaaggtgagggctctggtgctctgctccttattcaaaaatatgggactcgcaatttattcttcaatacattggcca

SEQ ID NO: 48224 - DNA, 80 bp, synthetic construct
  source 1..80: mol_type = other DNA
cagagcacagtattgagtctgagattgttacagggtctactacccctaggatgctcctacctataatggagcgattttat

SEQ ID NO: 48225 - DNA, 80 bp, synthetic construct
  source 1..80: mol_type = other DNA
aaggatgaactacacattatcttgaataattctgcaagccaaataaccgatattacaagttcttgttggtttacgagcca

SEQ ID NO: 48226 - DNA, 80 bp, synthetic construct
  source 1..80: mol_type = other DNA
aaagaataggctcccccataatgtcgatataataacaatggatgccgaaactattgaaaatatagatagatcacgattgt

SEQ ID NO: 48227 - DNA, 80 bp, synthetic construct
  source 1..80: mol_type = other DNA
atgaggctgtcaaacatgttattgtaaaccacattgacaccgcagcactccgggtggttgtcttaaaggtcttcttaagt

SEQ ID NO: 48228 - DNA, 80 bp, synthetic construct
  source 1..80: mol_type = other DNA
gatgttaagggcatgatatggttgaatgacaatcttgctccatattttggagcaggacttttagttaagcctataacatc

SEQ ID NO: 48229 - DNA, 80 bp, synthetic construct
  source 1..80: mol_type = other DNA
aaatgcccgttctagcgagtggtacctttgtctcactaattttttaacactacatcgagttgctccacatcagggtcacg

SEQ ID NO: 48230 - DNA, 80 bp, synthetic construct
  source 1..80: mol_type = other DNA
accaagatcagcatgttgatgacccaacagatacccaggacacaacaattccagacattgtcgtagacccagacgatgga

SEQ ID NO: 48231 - DNA, 80 bp, synthetic construct
  source 1..80: mol_type = other DNA
catcttgccttcaagtcatatgcaaagccttgcattgtcagctaaggcggaactcttattggttaagtcacctaatgcat

SEQ ID NO: 48232 - DNA, 80 bp, synthetic construct
  source 1..80: mol_type = other DNA
tacggaagccgtgatttacatatcgaatatatcaatctgggttttccttcgttagaaaaggtcctctatcatcgctataa

SEQ ID NO: 48233 - DNA, 80 bp, synthetic construct
  source 1..80: mol_type = other DNA
tctagttgattctgggcgaggacctctgacttcagttatgcaacaccttgtgcacttgcagtcagaaatccgggaactag

SEQ ID NO: 48234 - DNA, 80 bp, synthetic construct
  source 1..80: mol_type = other DNA
ttagtgattaccatcaattgcggcagagtcggactcaaacgtatcactttattaaaacctcaaaaggtaggattacaaag

SEQ ID NO: 48235 - DNA, 80 bp, synthetic construct
  source 1..80: mol_type = other DNA
ctagtcaacgattatcttaagttctatctaattatccgtgcacttaagcatgggaaggactggcgtcatgaatttcacca

SEQ ID NO: 48236 - DNA, 80 bp, synthetic construct
  source 1..80: mol_type = other DNA
gctccccgaattagtaagtgtttgtaaaaggttctatcatgttaagaattgccaatgtgatgatcgcttttgggttcaaa

SEQ ID NO: 48237 - DNA, 80 bp, synthetic construct
  source 1..80: mol_type = other DNA
ccctgtatttgagtcgtatgccggaatcagaacttaagctcctggaacgagttaccggatttctcaccctatttcctgaa

SEQ ID NO: 48238 - DNA, 80 bp, synthetic construct
  source 1..80: mol_type = other DNA
ggttttcaaaatccgccctagagggaatagactgtttactagacccagaaaagccctatcaatcactttaaaatgatgct

SEQ ID NO: 48239 - DNA, 80 bp, synthetic construct
  source 1..80: mol_type = other DNA
gtgattacaggagacattatagaattattgtatgtggcatttccgggaatatgactcctttgagccaacatcttgggccc

SEQ ID NO: 48240 - DNA, 80 bp, synthetic construct
  source 1..80: mol_type = other DNA
acaaaagattgttatctctgtaatgtaagctaagattcagagacgaaggtggctcctcggtaagtttaactgcccagggg

SEQ ID NO: 48241 - DNA, 80 bp, synthetic construct
  source 1..80: mol_type = other DNA
gggtatagaggctaccagactcgacaagatgatgacatggatgcgcccgatgacttggtactcttcgatctggacgacaa

SEQ ID NO: 48242 - DNA, 80 bp, synthetic construct
  source 1..80: mol_type = other DNA
attaatcagtctcacaaacccttattctcaaatagaaggtacaccgttcattatagttggttgttataactttaagattt

SEQ ID NO: 48243 - DNA, 80 bp, synthetic construct
  source 1..80: mol_type = other DNA
aatgtggtcaaaagtgtagactgcttagggatggctaatttgccaattgtgcccctcctcaaccgacatccttaccttat

SEQ ID NO: 48244 - DNA, 80 bp, synthetic construct
  source 1..80: mol_type = other DNA
aatagttaactatgggctatggttatgcaggttatgtgactcataggtgatatctcgctatcaatttgcagatcccttaa

SEQ ID NO: 48245 - DNA, 80 bp, synthetic construct
  source 1..80: mol_type = other DNA
aattgttatattgacgtgccatattaagaaaaactaaatgcccagcagctgtactggttattaatacctaggatttggat

SEQ ID NO: 48246 - DNA, 80 bp, synthetic construct
  source 1..80: mol_type = other DNA
tcagaaaacaacaaatggacggtgttgtttatttatctcgatgactagagtcgattattgattcataagtataatatgtt

SEQ ID NO: 48247 - DNA, 80 bp, synthetic construct
  source 1..80: mol_type = other DNA
gagtcatcaatgtcctgtcagtgataatttgaatgtctatgtctaggtacatgcactgggtaagaccctcaactaagctt

SEQ ID NO: 48248 - DNA, 80 bp, synthetic construct
  source 1..80: mol_type = other DNA
atgtctaggtacatgcactgggtaagaccctcaactaagcttatcgcacacaaaaatagtcatctgttttttcctttttg

SEQ ID NO: 48249 - DNA, 80 bp, synthetic construct
  source 1..80: mol_type = other DNA
tgagcaagggcctccgtccgagaatgcacgacttggattcaccgtcgaaagaggtcctcgaagttccgggcagcagaaat

SEQ ID NO: 48250 - DNA, 80 bp, synthetic construct
  source 1..80: mol_type = other DNA
ccaccgagcgacaccaacccccacccagctcagacctacaggctccgacttacaataaccactccagagaacaccacgca

SEQ ID NO: 48251 - DNA, 80 bp, synthetic construct
  source 1..80: mol_type = other DNA
gatcaaggcacccgaagtcatgagcttcgaagtgtgcaagaatctgacctcctcgcttccatcccggaggaacaccaccc

SEQ ID NO: 48252 - DNA, 80 bp, synthetic construct
  source 1..80: mol_type = other DNA
tgctgaccacaccgacgacaaggcctcactgtcactgccacctgattcagaaagtgatggggagagtagcccggatacag

SEQ ID NO: 48253 - DNA, 80 bp, synthetic construct
  source 1..80: mol_type = other DNA
acgaggctgatcgaacgacagctccgccggcacctgtctacaagaaccacaaagatgccggacttgccactgttggagag

SEQ ID NO: 48254 - DNA, 80 bp, synthetic construct
  source 1..80: mol_type = other DNA
gccaacgaggagaccgactttgatgacaacatcaacaaccaaccagagagtcctttgaatgaccacggtattgaaagaat

SEQ ID NO: 48255 - DNA, 80 bp, synthetic construct
  source 1..80: mol_type = other DNA
tgagcatcggcaacatatctagaggtgctacccagtgactctatatgtatatacttctggaaatacctatcaagctcagg

SEQ ID NO: 48256 - DNA, 80 bp, synthetic construct
  source 1..80: mol_type = other DNA
gtaccgccacatcctggaaacccaagggccttttgatgctatactttattatcatatgatgaaggatgagcctgtcacct

SEQ ID NO: 48257 - DNA, 80 bp, synthetic construct
  source 1..80: mol_type = other DNA
cctgactctctcgagaatgaatatcctccatggctgagcgaaaaggaggccacccagagtgagagtcgatttatcaatgt

SEQ ID NO: 48258 - DNA, 80 bp, synthetic construct
  source 1..80: mol_type = other DNA
tgatggccagcagttctactggccggtcatgaattatagagataaattcatggctatccttcagcaccatagttaactag

SEQ ID NO: 48259 - DNA, 80 bp, synthetic construct
  source 1..80: mol_type = other DNA
ctcatgtcccagagacaatactctccacaacgctccagacacgccacacaacctgagacaaaacacgcggcaacaacaga

SEQ ID NO: 48260 - DNA, 80 bp, synthetic construct
  source 1..80: mol_type = other DNA
acaagaagttataccaaacagctcagcataacatacacagggacaaacggcctcacccacctggtggcccagccaatgca

SEQ ID NO: 48261 - DNA, 80 bp, synthetic construct
  source 1..80: mol_type = other DNA
cgagaacccctgctccgcccaaccgccatccacacacccactgacatgcgccagagctcgtcccaccccagcaccccaac

SEQ ID NO: 48262 - DNA, 80 bp, synthetic construct
  source 1..80: mol_type = other DNA
acaccaggagcacaaagacgacccaagcaccaaggaacatccgcgtcccgcaacagattgttgacccatcttttgcttga

SEQ ID NO: 48263 - DNA, 80 bp, synthetic construct
  source 1..80: mol_type = other DNA
tattaagaaaaagaatctgatgaagattaaggccctcgtccaccgccagcatctttcatctgttaacatcctgctggatt

SEQ ID NO: 48264 - DNA, 80 bp, synthetic construct
  source 1..80: mol_type = other DNA
agcgtcccagagcttagtgaagtgtgatgaatagccaacgaataaaagtcatcaatgcatcatcaacacagccaaaaatt

SEQ ID NO: 48265 - DNA, 80 bp, synthetic construct
  source 1..80: mol_type = other DNA
caaccgaaacatgggcccgatctatctggatggatttcagagcaactcatgaccgggaagattccagtaaatgatatttt

SEQ ID NO: 48266 - DNA, 80 bp, synthetic construct
  source 1..80: mol_type = other DNA
aaaactccagaaaattaaaaagattgcaacaataggtctaagagaggactgtaatcttccctatcctaagtttcttatat

SEQ ID NO: 48267 - DNA, 80 bp, synthetic construct
  source 1..80: mol_type = other DNA
ttatgacactgatagcatatcaagttacaccgggattcctcctctagctgtgaaaacccaaaaacctaagagggtcgaca

SEQ ID NO: 48268 - DNA, 80 bp, synthetic construct
  source 1..80: mol_type = other DNA
atgacactcaaactgaccccgtttgtcaacacagctttgatgaggttgtgcagacattaacctccttgacaactgtggtg

SEQ ID NO: 48269 - DNA, 80 bp, synthetic construct
  source 1..80: mol_type = other DNA
cagcagcaagccctcgcaacggagtctttggaacaacggatttctagcttggaaagcaactttaaaccagtccttgatat

SEQ ID NO: 48270 - DNA, 80 bp, synthetic construct
  source 1..80: mol_type = other DNA
ggcgaaaaccatagcctctctccaacgcgcgtgttcagagatggtggcaaagtatgatttattagtaatgaccactggac

SEQ ID NO: 48271 - DNA, 80 bp, synthetic construct
  source 1..80: mol_type = other DNA
gtgcaacagcgactgctgccgccaccgaggcttattggaaagagcatggtcaacctccacctgggccctctctttatgaa

SEQ ID NO: 48272 - DNA, 80 bp, synthetic construct
  source 1..80: mol_type = other DNA
gcataaaattgaaaccatgcaagatgtagttcctcaagcagttcaagaggccttcaaaaatttggagagcacaacatcct

SEQ ID NO: 48273 - DNA, 80 bp, synthetic construct
  source 1..80: mol_type = other DNA
tgactgaggaaaactttgggaagccatatatttcagcaaaggatttacgagatatcatgtatgacaatctcccaggtttt

SEQ ID NO: 48274 - DNA, 80 bp, synthetic construct
  source 1..80: mol_type = other DNA
gggacagcctttcatcagctggtgcaggtaatatgtaagattgggaaagacaatggattgttggataccatccacgctga

SEQ ID NO: 48275 - DNA, 80 bp, synthetic construct
  source 1..80: mol_type = other DNA
atttcaggcaagcttggctgatggagactctccacaatgtgctctcatccaaatcactaaacgggtaccagcctttcagg

SEQ ID NO: 48276 - DNA, 80 bp, synthetic construct
  source 1..80: mol_type = other DNA
agatcccgcctcccaccatccacatcaggtcaaggggagacatccctcgagcttgtcaaaagagcctccgcccagttccc

SEQ ID NO: 48277 - DNA, 80 bp, synthetic construct
  source 1..80: mol_type = other DNA
tattagcaagtggtactactacctattaattctaggactctttcagacaagagatggaggttcgtaatcctcgccaatgg

SEQ ID NO: 48278 - DNA, 80 bp, synthetic construct
  source 1..80: mol_type = other DNA
ccttcacccaagatcgaccggggctgggtatgcatctttcaactacaggatggaaagaccttgggcctcaaaatctgaaa

SEQ ID NO: 48279 - DNA, 80 bp, synthetic construct
  source 1..80: mol_type = other DNA
gggccagccgaacctgcaagcagtgtcaaggcagccaaccaatactcaagttctccttcaatcaactctaggaggcagtc

SEQ ID NO: 48280 - DNA, 80 bp, synthetic construct
  source 1..80: mol_type = other DNA
cacgtccgtctcagtcagcacccaagatcaacccgcgtcaaagggcggaaacacaagagaggcccatcttcctttgcaaa

SEQ ID NO: 48281 - DNA, 80 bp, synthetic construct
  source 1..80: mol_type = other DNA
gagtcaggcccatcccggccaaccacctcccgattcccacgctcaaccctgctgagagacatccaacaagaaaatgatga

SEQ ID NO: 48282 - DNA, 80 bp, synthetic construct
  source 1..80: mol_type = other DNA
agattaagaaaaatagcctgtgatacccaggagcgatttttcttaattcttcacttggtatccctattttcagcactatc

SEQ ID NO: 48283 - DNA, 80 bp, synthetic construct
  source 1..80: mol_type = other DNA
caacatgcgtaggacagtgataccgacagcaccaccggactacacagaagccctatatccccagagggcaaattcgattg

SEQ ID NO: 48284 - DNA, 80 bp, synthetic construct
  source 1..80: mol_type = other DNA
gttcaacaagcactagcacaaatcaacaatactaccccacggatgttcctggtggggatataccttcaaactcattgagg

SEQ ID NO: 48285 - DNA, 80 bp, synthetic construct
  source 1..80: mol_type = other DNA
ccagttgcagatgacaacattgaccacactaatcatacaccggacaatgtctcatcagcattcatcctagaagcaatggt

SEQ ID NO: 48286 - DNA, 80 bp, synthetic construct
  source 1..80: mol_type = other DNA
caatgtgatttctggccctaaggttttgatgaagcagatccccatatggctgcccttgggggttgcagatcaaaagaaat

SEQ ID NO: 48287 - DNA, 80 bp, synthetic construct
  source 1..80: mol_type = other DNA
acagctttgactctaccactgctgctatcatgctggcatcatatacaatcactcactttgggaaaacctcaaatcctctt

SEQ ID NO: 48288 - DNA, 80 bp, synthetic construct
  source 1..80: mol_type = other DNA
actacgcagagtgcatctgattctagcgtggattaccatagtatcctaactgcagggttatcgatgccacaaagtatagt

SEQ ID NO: 48289 - DNA, 80 bp, synthetic construct
  source 1..80: mol_type = other DNA
gtcagggtgaatcgtcttggacctgggattcctgatcatcccctgcggcttctaagactgggcaatcaggccttcttgca

SEQ ID NO: 48290 - DNA, 80 bp, synthetic construct
  source 1..80: mol_type = other DNA
ggagtttgttttgccacctgtgcagctcccccaatacttcaccttcgatttgactgctctgaagttgatcacacaaccgc

SEQ ID NO: 48291 - DNA, 80 bp, synthetic construct
  source 1..80: mol_type = other DNA
ttccagctgcaacctggacagatgaagtcctactaacttcacccaacatgctccgtccagggctctcgtttcatccaaag

SEQ ID NO: 48292 - DNA, 80 bp, synthetic construct
  source 1..80: mol_type = other DNA
ctgcgcccgatactcttgccgggtaaaccaggaaagaaaggggccaacctaggattgactgctccggacaagattcatgc

SEQ ID NO: 48293 - DNA, 80 bp, synthetic construct
  source 1..80: mol_type = other DNA
aatcatggatcacctgcaagaccttaaggttgtgccgattgattcctcgaagaacatcgtggggattgaagtcccggatg

SEQ ID NO: 48294 - DNA, 80 bp, synthetic construct
  source 1..80: mol_type = other DNA
ctctggtccagaagttaacggggaagaaacctcatgccaagaacggtcagtcgatcataccagttctactgcccaagtac

SEQ ID NO: 48295 - DNA, 80 bp, synthetic construct
  source 1..80: mol_type = other DNA
attgggccagatcccgtttcagccagtgatcttacaatggtgattactcaagattgtgatacctgcaattccccggcgag

SEQ ID NO: 48296 - DNA, 80 bp, synthetic construct
  source 1..80: mol_type = other DNA
cttccccatcgcaagcgaaaaatgagtctgctcggatagggtcggcaaagaaaggtttccgaaacaggataaagatatat

SEQ ID NO: 48297 - DNA, 80 bp, synthetic construct
  source 1..80: mol_type = other DNA
tctcacttagtagaatgacgacacgcctactataaaggcttcataagcttttgcaacgtgcagtagggcttgcaatattt

SEQ ID NO: 48298 - DNA, 80 bp, synthetic construct
  source 1..80: mol_type = other DNA
gtgttatgtaccatgattggccctcggccaatacttcctctgctcatgcctcacgctctggctgtcccacaaatgctccc

SEQ ID NO: 48299 - DNA, 80 bp, synthetic construct
  source 1..80: mol_type = other DNA
tcgccaaagagtaatccccgtgtttcaaattagcaaccttgaagatatttgtcaaatgattatacaggcttttgaagcgg

SEQ ID NO: 48300 - DNA, 80 bp, synthetic construct
  source 1..80: mol_type = other DNA
ctcaaaacacagcctagatcccgccctcctcactcgaacaaacgggccccctcctaggcgcggtaccccaggatatcaga

SEQ ID NO: 48301 - DNA, 80 bp, synthetic construct
  source 1..80: mol_type = other DNA
agcaaccagagtggacaacactctagagcaacatcatccagctggccaccgctttgcgggttgccgtgggttgatcgcac

SEQ ID NO: 48302 - DNA, 80 bp, synthetic construct
  source 1..80: mol_type = other DNA
ccgaaacatggtctcctgggccctgcgcctccatcaatctgctttaggattaagaaaaaatatatgatgaagattaagcc

SEQ ID NO: 48303 - DNA, 80 bp, synthetic construct
  source 1..80: mol_type = other DNA
gatcaacgggttactcttcatcttaatagtttcttagttgactttagttggacctcctggtattgccctaaacctaccat

SEQ ID NO: 48304 - DNA, 80 bp, synthetic construct
  source 1..80: mol_type = other DNA
ctttcccaatcaggttggcaagatttctacacattgttgagggtaataacaacaaacagtcatgatccttcaggttccag

SEQ ID NO: 48305 - DNA, 80 bp, synthetic construct
  source 1..80: mol_type = other DNA
aaaaacggcaccaacggacagtgctgttcatctggttggttattctgtttcaaagagctgtatctgttcccctcggggta

SEQ ID NO: 48306 - DNA, 80 bp, synthetic construct
  source 1..80: mol_type = other DNA
atccacaacagcactctccaggtgagtgatattgacaaacttgtctgtcatgacaaattaacatcaacaaaccagctgag

SEQ ID NO: 48307 - DNA, 80 bp, synthetic construct
  source 1..80: mol_type = other DNA
gtcaattgggctaaatcttgagggaaatggaattgccactgacgttccatcggcaacaaaaagatgggggttccgtgctg

SEQ ID NO: 48308 - DNA, 80 bp, synthetic construct
  source 1..80: mol_type = other DNA
gtgtaccaccaaaagtggttgggtatgaagctggagaatgggctgagaattgctacaatctagagatcaagaagcctgat

SEQ ID NO: 48309 - DNA, 80 bp, synthetic construct
  source 1..80: mol_type = other DNA
gggagtgagtgcttaccgatggccccagaggggatccgtggcttccctagatgtcgatacgtgcataaggtatcgggcac

SEQ ID NO: 48310 - DNA, 80 bp, synthetic construct
  source 1..80: mol_type = other DNA
tgggtcatgtgagtctggttttgcttttcataaggagggagccttctttctgtatgatcgccttgcatcaacgatcatct

SEQ ID NO: 48311 - DNA, 80 bp, synthetic construct
  source 1..80: mol_type = other DNA
acttccaggatagtgctgacagttttctactaatgctttgtctacatcatgcctaccagggtgattataagttgttcctt

SEQ ID NO: 48312 - DNA, 80 bp, synthetic construct
  source 1..80: mol_type = other DNA
accggggaaccacatttgcggaaggggttgttgcattcataatcctacctaaagctgaaaagaatttcctccagccccct

SEQ ID NO: 48313 - DNA, 80 bp, synthetic construct
  source 1..80: mol_type = other DNA
ctaacccaaggacccaccaataccacaaatgatccatcaagtatgtatcactcaacaacccttgagtatgagaccacccg

SEQ ID NO: 48314 - DNA, 80 bp, synthetic construct
  source 1..80: mol_type = other DNA
cttcgggaccaatagatcagcattttggtttaaagtggacaacctcacctttgtgcaactagaatcaagatttacaccgc

SEQ ID NO: 48315 - DNA, 80 bp, synthetic construct
  source 1..80: mol_type = other DNA
agttcctagttgagctcaatgagacaatctatattgaaggcaagagaagtaacaccacgggcaggctgatttggcaagtg

SEQ ID NO: 48316 - DNA, 80 bp, synthetic construct
  source 1..80: mol_type = other DNA
aactcacgagtcgacactgatgtcggtgagtgggctttctgggaaaataaaaaaacctcaaaaagagctttccacgtgaa

SEQ ID NO: 48317 - DNA, 80 bp, synthetic construct
  source 1..80: mol_type = other DNA
gagctgtctctcgcagctgtaccaagagcagctgactctgaacacgacacgcacccgccggagcatacaccaggcccaga

SEQ ID NO: 48318 - DNA, 80 bp, synthetic construct
  source 1..80: mol_type = other DNA
ctccaaccccacaatcaatgacaacaccgaactggttacagaagatcccgctcacctggttcaactgcaacgtcagggac

SEQ ID NO: 48319 - DNA, 80 bp, synthetic construct
  source 1..80: mol_type = other DNA
ggaaagagatattgccgaccccaataccccaagccatagagcgcgagcctccagctgcccagcatgacaatccccgaaac

SEQ ID NO: 48320 - DNA, 80 bp, synthetic construct
  source 1..80: mol_type = other DNA
agcccaactccacccagccccatagagtccgacatcacagacagcacccaagcagaagacctgacccacgctgacgaccc

SEQ ID NO: 48321 - DNA, 80 bp, synthetic construct
  source 1..80: mol_type = other DNA
ctcgacaatcaactccgcaacggaagagtctctccccgaagtgggcggaatcacccaagtccccagggaccccgaggacc

SEQ ID NO: 48322 - DNA, 80 bp, synthetic construct
  source 1..80: mol_type = other DNA
gagagtggggctgttaaatatcttgaaggacatgggtttaggtttgaaccccgcaagaaggaaggagtcaagagactaga

SEQ ID NO: 48323 - DNA, 80 bp, synthetic construct
  source 1..80: mol_type = other DNA
caagaataaccctatcgactccacccacaagtcaacccgagcagccctcggacaacacaatgaccccaggccaaatccac

SEQ ID NO: 48324 - DNA, 80 bp, synthetic construct
  source 1..80: mol_type = other DNA
agcgaatcagctgcaccaatgggagaaagatcaatcgatggcccgggcctgctgaccaacacactcgctggtgtcgcaag

SEQ ID NO: 48325 - DNA, 80 bp, synthetic construct
  source 1..80: mol_type = other DNA
attgatcactggcgccgggcgggccaaaagggaatccccagaaatcagaggggccaaatgcaatcctaatctacattact

SEQ ID NO: 48326 - DNA, 80 bp, synthetic construct
  source 1..80: mol_type = other DNA
ggactacacatgaggaaagtgcagcggcaggtttggcatggataccttattttggtcccgctgcggaaggaatttatact

SEQ ID NO: 48327 - DNA, 80 bp, synthetic construct
  source 1..80: mol_type = other DNA
gaagggttgatgcagaatcagaatgagttgatttgtggccttcggcaactagcaaatgagaccacgcaagcactccaatt

SEQ ID NO: 48328 - DNA, 80 bp, synthetic construct
  source 1..80: mol_type = other DNA
gtttctccggtctacaactgagctccgaaccttttctatactaaaccgaaaagcaattgatttcctactacaacgttggg

SEQ ID NO: 48329 - DNA, 80 bp, synthetic construct
  source 1..80: mol_type = other DNA
ggggcacatgtcgtatcctagggcctgattgctgtatagagccccatgactggacaaaaaatatcaccgataggatagat

SEQ ID NO: 48330 - DNA, 80 bp, synthetic construct
  source 1..80: mol_type = other DNA
caaattatccatgattttgttgataaaccactgcccgatcaaagcaacaacgacaactggtggacggggtggaggcaatg

SEQ ID NO: 48331 - DNA, 80 bp, synthetic construct
  source 1..80: mol_type = other DNA
gatcccagccggaataggagttgtcggtgtcattgctgcttttattgcgctgatctgcatctgcaaaatcatttgttgaa

SEQ ID NO: 48332 - DNA, 80 bp, synthetic construct
  source 1..80: mol_type = other DNA
ttactggatttgacattcaaattgagatcgtgacttagttataacttgttttagcctccgttttaacactagtaggctgc

SEQ ID NO: 48333 - DNA, 80 bp, synthetic construct
  source 1..80: mol_type = other DNA
ttacagcacgattcgcatataacttgaagctactgcttagccgcaataccgcttttaccttccagttatcaatataatat

SEQ ID NO: 48334 - DNA, 80 bp, synthetic construct
  source 1..80: mol_type = other DNA
agaattacttccggcagttacaaatggaaagaatataagaagaactttagccgcgatgccagaaggtgagacaactgagg

SEQ ID NO: 48335 - DNA, 80 bp, synthetic construct
  source 1..80: mol_type = other DNA
tggtagtggaaaccccaccttacaagatttgccgcatcaacatataatcacctcagcacttaacgacttttattagactc

SEQ ID NO: 48336 - DNA, 80 bp, synthetic construct
  source 1..80: mol_type = other DNA
ccgaccattctaggataatattaacttgctcctatcagtattcaagacagaaaaagatgaggaagattaagaaaaactgc

SEQ ID NO: 48337 - DNA, 80 bp, synthetic construct
  source 1..80: mol_type = other DNA
agtcccaggactgtggataatcttcctttaattagcagaaactcttaactcatcaagtacgagtgatctctctctaccca

SEQ ID NO: 48338 - DNA, 80 bp, synthetic construct
  source 1..80: mol_type = other DNA
accagacaggactgactccacttaacttataaacatcatcaattagttcaagattggatccaaattaagactacaagttg

SEQ ID NO: 48339 - DNA, 80 bp, synthetic construct
  source 1..80: mol_type = other DNA
ctattttaatcatccaataagcatgcatcagcagaggactcagaatccacatagtacggaagccataagagaacgtggcc

SEQ ID NO: 48340 - DNA, 80 bp, synthetic construct
  source 1..80: mol_type = other DNA
gaactcggacagtccatccaccttcaagagacagcggtgagtttcgtatgagggctcggtcggtgtctcgtgattactcg

SEQ ID NO: 48341 - DNA, 80 bp, synthetic construct
  source 1..80: mol_type = other DNA
cgaggggagaattatcatcaacgtggtacatcacaaacaagagcacccgttatgttccataagaagaagaccgaggcatt

SEQ ID NO: 48342 - DNA, 80 bp, synthetic construct
  source 1..80: mol_type = other DNA
gcttgttccgccagcacccaaggacatatgtccaactttgaaaaagggttttctttgtgacagcaatttttgcagaaagg

SEQ ID NO: 48343 - DNA, 80 bp, synthetic construct
  source 1..80: mol_type = other DNA
atcatcatcttgagggcttaactgatcgtgagctgctcctgttaattgctagaaagactagtggtctcgtggacccgtca

SEQ ID NO: 48344 - DNA, 80 bp, synthetic construct
  source 1..80: mol_type = other DNA
gtctgtgcctcggctccaaaggatgcacgactggctcatcccactgcagaggactttgatcagcaaagtggacctaaaat

SEQ ID NO: 48345 - DNA, 80 bp, synthetic construct
  source 1..80: mol_type = other DNA
ctaatgctgggcagttcctttcattcgccagcctattcctgccgaaactcgttgttggagaaaaggcctgtctggagaag

SEQ ID NO: 48346 - DNA, 80 bp, synthetic construct
  source 1..80: mol_type = other DNA
gaccctgtctctggtccttcgcatcattgaatattgggcagaaaaagatcttaggaatattgatgattcgaaacttcggg

SEQ ID NO: 48347 - DNA, 80 bp, synthetic construct
  source 1..80: mol_type = other DNA
ctttgttgactctctgtgctgtcaccacacggaagttttcaaaatctcagcttagtttgttgtgtgatgcccatctcaga

SEQ ID NO: 48348 - DNA, 80 bp, synthetic construct
  source 1..80: mol_type = other DNA
cgagagagccttgggcaggatcagtctgaatcagttctcgaggtctatcaaaaattgcacagtgacaaaggtggacattt

SEQ ID NO: 48349 - DNA, 80 bp, synthetic construct
  source 1..80: mol_type = other DNA
tgaggctgccttatggcaacaatgggacaggcagtctctagtaatgttcataacggcttttttgaatatcgctccacaat

SEQ ID NO: 48350 - DNA, 80 bp, synthetic construct
  source 1..80: mol_type = other DNA
taccctgcgagagctcagcagttgtaatatcaagcttgaagttattgattccggctgcagagcataacaccaccggaagt

SEQ ID NO: 48351 - DNA, 80 bp, synthetic construct
  source 1..80: mol_type = other DNA
aaccctaccaccccgtcctggtcagatgccgccgactcttgacccggctccgaaccaatcggcccaaaaatatggcccaa

SEQ ID NO: 48352 - DNA, 80 bp, synthetic construct
  source 1..80: mol_type = other DNA
tcataattgatgtaaaggcgacacaattattccacataatattccacatccttcaggtttgtcgcgcagggctatacacc

SEQ ID NO: 48353 - DNA, 80 bp, synthetic construct
  source 1..80: mol_type = other DNA
ctcatgcacagcacgtgtcaagcccgacctcaacctcgaccaaaagcacataaagaacaatgacgtgatcacccaagaaa

SEQ ID NO: 48354 - DNA, 80 bp, synthetic construct
  source 1..80: mol_type = other DNA
ggatagctccactgcaccatgggggcaatgaaactcaatggtacttgcactctgccacgaaagacaacaacacctgccca

SEQ ID NO: 48355 - DNA, 80 bp, synthetic construct
  source 1..80: mol_type = other DNA
gtccttacccccttaaaaaccagcctaaatcaactatataaatgccggtggtagatctccccaatcattaagaaaaatct

SEQ ID NO: 48356 - DNA, 80 bp, synthetic construct
  source 1..80: mol_type = other DNA
gtcggaccataagaggttgtattcgttgactgttctgggtgctgcactagtcatccgggccttgcttaaacctccccata

SEQ ID NO: 48357 - DNA, 80 bp, synthetic construct
  source 1..80: mol_type = other DNA
gattgaattaaccggttacgacctggatatgctattgaaatagtgaactcagagctaagaaagggcgatgaagattaata

SEQ ID NO: 48358 - DNA, 80 bp, synthetic construct
  source 1..80: mol_type = other DNA
ccgactttcaaggacaggatctcccatcctcaattgatgtgtctgtaggaattcttcatcttttctatatgtatgttcca

SEQ ID NO: 48359 - DNA, 80 bp, synthetic construct
  source 1..80: mol_type = other DNA
aggtgaggttgtgggagtggacttgagctctagattgcagggcaagtaggtaattcttgtccacgaactagggattggct

SEQ ID NO: 48360 - DNA, 80 bp, synthetic construct
  source 1..80: mol_type = other DNA
attgtgaaggtgaagtgaaggcgtttcgggcttgagccaatcagttactcatctcaggatctttccttcatgtgactact

SEQ ID NO: 48361 - DNA, 80 bp, synthetic construct
  source 1..80: mol_type = other DNA
aagggtggtagattaggggtgtttatcattaatctgggtttatgggccactactgttcttatttgcactaaagggttaag

SEQ ID NO: 48362 - DNA, 80 bp, synthetic construct
  source 1..80: mol_type = other DNA
gtggggagtaattacatttactgtttactatattatctatagattgataagtttaggattaagtagccataattatgtag

SEQ ID NO: 48363 - DNA, 80 bp, synthetic construct
  source 1..80: mol_type = other DNA
tttcaacccgagggagacagacagtaaaggacaacaaagggactaggatcaggtttaaagatgactcatccttcgaagag

SEQ ID NO: 48364 - DNA, 80 bp, synthetic construct
  source 1..80: mol_type = other DNA
aaataaagaagaatattaacattgacattgagacttgtcagtctgttaatattcttgaagagatggatttacatagtttg

SEQ ID NO: 48365 - DNA, 80 bp, synthetic construct
  source 1..80: mol_type = other DNA
aaacatcctaaattttcaatcgtacacataataatcattctggtagcattgcttttcagtataggataggtggtcgtgaa

SEQ ID NO: 48366 - DNA, 80 bp, synthetic construct
  source 1..80: mol_type = other DNA
aagacttccaagcatggcagaattatcaacacgttacaacttgcctgtgaatgttccagaaaagagcataaatcttgatc

SEQ ID NO: 48367 - DNA, 80 bp, synthetic construct
  source 1..80: mol_type = other DNA
tttccacataccaaatactggaatgacattgttgcatcatttaaagtctaattttgttgttccagagtggcaacaaacaa

SEQ ID NO: 48368 - DNA, 80 bp, synthetic construct
  source 1..80: mol_type = other DNA
taactgggcaacagatcattatcactcgtgttaatatggggtttctagtggaagtcaggaggattgacatagaaccttgt

SEQ ID NO: 48369 - DNA, 80 bp, synthetic construct
  source 1..80: mol_type = other DNA
gatttatatttactggtataaaatagtagcatcatcttatcaactagttgtcatacaataggctgttcctataatctgat

SEQ ID NO: 48370 - DNA, 80 bp, synthetic construct
  source 1..80: mol_type = other DNA
taaaatattagggatttcaaatgctgccagacttactgaattttacataggattatatgattcttttcgatacacgttac

SEQ ID NO: 48371 - DNA, 80 bp, synthetic construct
  source 1..80: mol_type = other DNA
gtgaggatttttctcctaaagaaaatccttattattgggggatgttgttactcgtacatttgtcccaacttgccaggagg

SEQ ID NO: 48372 - DNA, 80 bp, synthetic construct
  source 1..80: mol_type = other DNA
ctgtgaattattctctctacaaaagcattggggtcatcccgttctatacaatgatgttgcactagataaggtcaaaaaac

SEQ ID NO: 48373 - DNA, 80 bp, synthetic construct
  source 1..80: mol_type = other DNA
gccttgctggcagatggattagcaaaagcattccctagtaatatgatggttgtcactgagagggaacagaaagaagcatt

SEQ ID NO: 48374 - DNA, 80 bp, synthetic construct
  source 1..80: mol_type = other DNA
atcttgagaaatacaatcttgccttccgatatgaatttacacggcatttcatagactactgtaatcgatgttatggtgtg

SEQ ID NO: 48375 - DNA, 80 bp, synthetic construct
  source 1..80: mol_type = other DNA
tatatcaactaacacactgggtaaatacgcagggggaggtcaagctgctcttgatagtaatataatctttcaaaatacta

SEQ ID NO: 48376 - DNA, 80 bp, synthetic construct
  source 1..80: mol_type = other DNA
gttagggggctctgcaggagagaaaagttcatcagatgccgtccggctatttcttacagcaagttatcagaatttcatca

SEQ ID NO: 48377 - DNA, 80 bp, synthetic construct
  source 1..80: mol_type = other DNA
caggggatggacatcaaaatgccactctcagagcaaaatctagttgaaggttgtcaactatcaaagggcatcagatgcaa

SEQ ID NO: 48378 - DNA, 80 bp, synthetic construct
  source 1..80: mol_type = other DNA
gagatatgggaagaaggagtcctcatcgcgacaaatgctccccaaagacaacatgcaaactcctgcgtacatacatggct

SEQ ID NO: 48379 - DNA, 80 bp, synthetic construct
  source 1..80: mol_type = other DNA
cctccccatctcaaaccattataaaatcactaggtgtacatgaggactttgatgcctcgaaggtaatcttaaattctgaa

SEQ ID NO: 48380 - DNA, 80 bp, synthetic construct
  source 1..80: mol_type = other DNA
gttttacaggggtagtctcatcaatgcattataagctttatgatcttttgcctccaggtgaattgaaaaaggcaatttgc

SEQ ID NO: 48381 - DNA, 80 bp, synthetic construct
  source 1..80: mol_type = other DNA
ttggctgaaggggaaggaagtggtgctcggttacttttgaagtggaaggaaactgattatttattcttcaacactctggc

SEQ ID NO: 48382 - DNA, 80 bp, synthetic construct
  source 1..80: mol_type = other DNA
taaggggaaagataactaaatattacaatgatatactaaagttaaatctagtcatcaaagccgtggaaaaaggtaaaaac

SEQ ID NO: 48383 - DNA, 80 bp, synthetic construct
  source 1..80: mol_type = other DNA
ataacaccttaggccttacacaggttagaaaattacgcacacagattaacttgtggttgaacggtcagttacaacaatgg

SEQ ID NO: 48384 - DNA, 80 bp, synthetic construct
  source 1..80: mol_type = other DNA
tgactttttcatgttggttattcaaacattattgatcataattagcaccagcattggcacactgtgtgaaaccctgagcc

SEQ ID NO: 48385 - DNA, 80 bp, synthetic construct
  source 1..80: mol_type = other DNA
tcatccctaacatgaggcaagagaccaagggaacactgaaacatactagttggactgagctacaacatgccatatatcat

SEQ ID NO: 48386 - DNA, 80 bp, synthetic construct
  source 1..80: mol_type = other DNA
aaatataaaagaactgtctgctgtaatctataagcctctcttttatatacattggagaaagaacgaggttatcattgtga

SEQ ID NO: 48387 - DNA, 80 bp, synthetic construct
  source 1..80: mol_type = other DNA
actacagcacaattacccacccatccacttcgatatgattcactctcagatcacagcaatcaaccctatttgaatatcca

SEQ ID NO: 48388 - DNA, 80 bp, synthetic construct
  source 1..80: mol_type = other DNA
ggggtttgctgacgttatgtgttgaacactactataattccgacaaagataaattcaacacaagtcctatcgcaagatac

SEQ ID NO: 48389 - DNA, 80 bp, synthetic construct
  source 1..80: mol_type = other DNA
aatcactatttagtatcctattacttgtcactattgtgtgagacaacataagctatcaaataacaatcacgggcaagaac

SEQ ID NO: 48390 - DNA, 80 bp, synthetic construct
  source 1..80: mol_type = other DNA
tctccaaggggatgtcagaaatgttagctaaatatgaccaccttgtaatctcaactggaagaaccactgcaccagctgct

SEQ ID NO: 48391 - DNA, 80 bp, synthetic construct
  source 1..80: mol_type = other DNA
cttacttaaatgagcatggtgtccctcctcctcaacccgcgatcttcaaagatcttggggttgcccaacaagcttgcagc

SEQ ID NO: 48392 - DNA, 80 bp, synthetic construct
  source 1..80: mol_type = other DNA
gacattagaaagcactgaatctcagagggggaggattgggctctttttgtcattttgcagtctttttctcccaaaacttg

SEQ ID NO: 48393 - DNA, 80 bp, synthetic construct
  source 1..80: mol_type = other DNA
aggggtctacctaacgggtatgatcgagtgatcagtctatcttataaaccagacaattgacttcttactttttaagaatc

SEQ ID NO: 48394 - DNA, 80 bp, synthetic construct
  source 1..80: mol_type = other DNA
aactaacagcatagaaaccacatttagctttacgtaatctttggcttagttggaatgaacttttgttgtaattcaacaca

SEQ ID NO: 48395 - DNA, 80 bp, synthetic construct
  source 1..80: mol_type = other DNA
tttagtcatagtatattgtagaattttttataagtttagaataccttaaatcatacccacaaagaatactgttttaatta

SEQ ID NO: 48396 - DNA, 80 bp, synthetic construct
  source 1..80: mol_type = other DNA
ttggatcagttgtcacttaagttgttatttttaaaattaattcacacaaagtagtttaaatttgtatctagaataaattt

SEQ ID NO: 48397 - DNA, 80 bp, synthetic construct
  source 1..80: mol_type = other DNA
atgaagaaaagaggagaaaattccccggtagtttatttccaagcacctgagaacttccctttgaatggcttcaataacag

SEQ ID NO: 48398 - DNA, 80 bp, synthetic construct
  source 1..80: mol_type = other DNA
aaggaattgtcacataccctaatcattggcttactacaggtcacatgaaagtaattttcgggatcttgaggtctagcttt

SEQ ID NO: 48399 - DNA, 80 bp, synthetic construct
  source 1..80: mol_type = other DNA
aaggggaggaagctaaaacatgttacaatataagtgtaacggatccctctggaaaatccttgctgttagatcctcctacc

SEQ ID NO: 48400 - DNA, 80 bp, synthetic construct
  source 1..80: mol_type = other DNA
catcgcctccacaacaatgtatcgaggcaaagtcttcactgaagggaacatagcagctatgattgtcaataagacagtgc

SEQ ID NO: 48401 - DNA, 80 bp, synthetic construct
  source 1..80: mol_type = other DNA
gggaggaacatgcaaagtgcttggacctgattgttgcatcggaatagaagacttgtccagaaatatttcagaacaaattg

SEQ ID NO: 48402 - DNA, 80 bp, synthetic construct
  source 1..80: mol_type = other DNA
gattcaggggtgacactacatcctttggtgcggacctccaaagtgaaaaacgaagttactagtttcaagcaggcgttgag

SEQ ID NO: 48403 - DNA, 80 bp, synthetic construct
  source 1..80: mol_type = other DNA
gctactactgtccatagctgtcttaattgctctgtcctgtatttgtcgtatttttactaaatatattggataacattaag

SEQ ID NO: 48404 - DNA, 80 bp, synthetic construct
  source 1..80: mol_type = other DNA
aagggtgaatttgaagagatttcttgttgcatagttttttgtattacttatttaggcttgaagacatagttaagactggc

SEQ ID NO: 48405 - DNA, 80 bp, synthetic construct
  source 1..80: mol_type = other DNA
ttggatgcaaatcataaggaaaaatgagccactttccctctaccttaagctaaagaaatttctcttatcagctcaaaata

SEQ ID NO: 48406 - DNA, 80 bp, synthetic construct
  source 1..80: mol_type = other DNA
tgatccgtcaggtcacaggccattcataatctgtttgagcgttaatattgatcaaataaccaaatgatgttgcatttgta

SEQ ID NO: 48407 - DNA, 80 bp, synthetic construct
  source 1..80: mol_type = other DNA
gaattataaaaatcttgaaggataaattatagtagagtagagtcgaagaacattaagtgttctttgttagaattattcat

SEQ ID NO: 48408 - DNA, 80 bp, synthetic construct
  source 1..80: mol_type = other DNA
cgacacggagagtacgcaccatttgcacgggttttgaatttatcagggattaacaatctcgaacatggactctatcctca

SEQ ID NO: 48409 - DNA, 80 bp, synthetic construct
  source 1..80: mol_type = other DNA
gagatgatgattttgtgtatcatataaataaagaagaatattaacattgacattgagacttgtcagtctgttaatattct

SEQ ID NO: 48410 - DNA, 80 bp, synthetic construct
  source 1..80: mol_type = other DNA
aagcccattacaatcctctgggtattcatcaactcctagagaaaggtctttactatctagagaacaagcctcatatttgt

SEQ ID NO: 48411 - DNA, 80 bp, synthetic construct
  source 1..80: mol_type = other DNA
tccagaatgtcaatgtgaatgtgaattaagaaaaacgaagatataaaattaaaaaattgaaaagctttgatacaagtaac

SEQ ID NO: 48412 - DNA, 80 bp, synthetic construct
  source 1..80: mol_type = other DNA
attcagaaaaactaaaaattgaagaatattaaagattttctttaatattcagaaaagattttttattctcttctttcatt

SEQ ID NO: 48413 - DNA, 80 bp, synthetic construct
  source 1..80: mol_type = other DNA
gcgttgtgcccttcattgccaagtcaactcaactgatgatgatattcttcctgaaatagtaagaaaaactaatgaagaac

SEQ ID NO: 48414 - DNA, 80 bp, synthetic construct
  source 1..80: mol_type = other DNA
acacacaaagcatggccactgaaaatgagaaaaccagtgcccccccgaaagcaaccctgcctccaacagaaaatcctacc

SEQ ID NO: 48415 - DNA, 80 bp, synthetic construct
  source 1..80: mol_type = other DNA
tcgcaaaataccaggggtttcatatgctgccatatttactaaatcttacataggattatatcattctcttcgatacacgt

SEQ ID NO: 48416 - DNA, 80 bp, synthetic construct
  source 1..80: mol_type = other DNA
caggggatggatatcaagatgccactctcggagcaaaatctggttggaaattgtcgaccatcaaagggcattagattcaa

SEQ ID NO: 48417 - DNA, 80 bp, synthetic construct
  source 1..80: mol_type = other DNA
ggccgaaggagaaggaagtggtgctcggttacttttgaagtggaagaagacggattatttatttttcaacactttggcta

SEQ ID NO: 48418 - DNA, 80 bp, synthetic construct
  source 1..80: mol_type = other DNA
tgaggggaaagataaccaagtattacaatgatatattaaagttaaatctagttatcaaggcagtagagaaaggtaaaaat

SEQ ID NO: 48419 - DNA, 80 bp, synthetic construct
  source 1..80: mol_type = other DNA
acaccatggtgatgcgagggcaccattcagtgctacaaattcttctttcaactgctataatgatacaaccacgaacctcc

SEQ ID NO: 48420 - DNA, 80 bp, synthetic construct
  source 1..80: mol_type = other DNA
cagcctagtatactgtaacacataagtggactctccacctctcctctcgagcattccccataagtgatccacttgacaga

SEQ ID NO: 48421 - DNA, 80 bp, synthetic construct
  source 1..80: mol_type = other DNA
atgtcaagtccactggcctggagcctccctactctaatgattgtaataattaactgttggcctagatgacaacagacacg

SEQ ID NO: 48422 - DNA, 80 bp, synthetic construct
  source 1..80: mol_type = other DNA
aggggtctacctaacaggtatgactgagtgatcagtatattttataaaccaagcaattgacttctcactttttaagaatc

SEQ ID NO: 48423 - DNA, 80 bp, synthetic construct
  source 1..80: mol_type = other DNA
aactaacaacatagaaaacatatttatccttgtgtaattctcggcttagttggaattaacttttgttgcaattcaagacg

SEQ ID NO: 48424 - DNA, 80 bp, synthetic construct
  source 1..80: mol_type = other DNA
aggggatcgtcacataccctaatcactggcttactacaggccatatgaaagtaatttttgggattttgaggtctagcttt

SEQ ID NO: 48425 - DNA, 80 bp, synthetic construct
  source 1..80: mol_type = other DNA
gctactattatccatagctgtcttgattgctctatcctgtatttgtcgtatctttaccaaatatatcgggtaatattaag

SEQ ID NO: 48426 - DNA, 80 bp, synthetic construct
  source 1..80: mol_type = other DNA
gaggttaatttaaagagatttcttgttgcacagttttttgtattacttacttgggcttgaagacatagttaagactggcc

SEQ ID NO: 48427 - DNA, 80 bp, synthetic construct
  source 1..80: mol_type = other DNA
caagtttaatcacataataatgttggaggcacagtatattatagttgattgttctgtacaataaaggatatacctactct

SEQ ID NO: 48428 - DNA, 80 bp, synthetic construct
  source 1..80: mol_type = other DNA
agggtgttgtatgagaaataataaagtaaacaagaaaaagagaaaaatattagacagtttgcttgacacaagataatctt

SEQ ID NO: 48429 - DNA, 80 bp, synthetic construct
  source 1..80: mol_type = other DNA
gtatcaccttaagcctcacacaagtgagagaattacacgcacagattaacttgtgattggatgttcggtcacaacaatgg

SEQ ID NO: 48430 - DNA, 80 bp, synthetic construct
  source 1..80: mol_type = other DNA
aaagatacagaagaactgtttgctgtgagctctaagcatctcttttaaacacattggggaaagagctaggttaccattga

SEQ ID NO: 48431 - DNA, 80 bp, synthetic construct
  source 1..80: mol_type = other DNA
gatcaagaaaactacgttatgttttctttgatgacaagtgataaaactttgtagttacagttccagaatgtcaatgtgaa

SEQ ID NO: 48432 - DNA, 80 bp, synthetic construct
  source 1..80: mol_type = other DNA
agtacagttacccacttatccactctgatacgaattatccccagatcatggcaatcaaatctatctgaatattcaaacca

SEQ ID NO: 48433 - DNA, 80 bp, synthetic construct
  source 1..80: mol_type = other DNA
acatgatggcgatttgagagcgctgcccagtgctacaaattcttcttttcattaccatgatgatacaactataaacctcc

SEQ ID NO: 48434 - DNA, 80 bp, synthetic construct
  source 1..80: mol_type = other DNA
tcccaacacacaaagcatgaccactgaaaatgagaaaaccagtgcctccccgaaaacaactccgccctcaacagaaagtc

SEQ ID NO: 48435 - DNA, 80 bp, synthetic construct
  source 1..80: mol_type = other DNA
ctcccacagaaaagagcaccaacaatacaaaaagccccaccacagtggaaccaaatacaacaaatggacatttcactagt

SEQ ID NO: 48436 - DNA, 80 bp, synthetic construct
  source 1..80: mol_type = other DNA
ccctcctccacccccaactcgactactcaacatcttatatatttcaggaggaaacgaagtatcctctggagggaaggcga

SEQ ID NO: 48437 - DNA, 80 bp, synthetic construct
  source 1..80: mol_type = other DNA
gactcaattatcctttattaagaaaaagataaatagaacacagagaattgataaaatttttctttgaacattcttgcgag

SEQ ID NO: 48438 - DNA, 80 bp, synthetic construct
  source 1..80: mol_type = other DNA
taattgccaggtaagagtgattaagttctttaaatttgaccaaagtaatgttttgttaatgaatacactcttatattgct

SEQ ID NO: 48439 - DNA, 80 bp, synthetic construct
  source 1..80: mol_type = other DNA
tgattaaaaacaagaaattatcctaacatgaagaccacatgtctctttatcagtcttatcttaatccaagggataaaaac

SEQ ID NO: 48440 - DNA, 80 bp, synthetic construct
  source 1..80: mol_type = other DNA
gagatacgagaagaaagaatcctcattacaacaaatgtcccctgaggacaacatgcagactcttgcgtacatgcacaatt

SEQ ID NO: 48441 - DNA, 80 bp, synthetic construct
  source 1..80: mol_type = other DNA
taactatttagtgttggtcactcaaatatgatcactaatgattggtattaatattggtacattgggtgaatccttgagct

SEQ ID NO: 48442 - DNA, 80 bp, synthetic construct
  source 1..80: mol_type = other DNA
ccaccacaatctccaccaacaacacctcaaaaaataacctcagcaccctctccgaactaccacaaaacaccaccaatccc

SEQ ID NO: 48443 - DNA, 80 bp, synthetic construct
  source 1..80: mol_type = other DNA
tcccatacagcatccagacgtgagctcccaagatccctttggcagtattggagatgtagatggtgatattttggaaccta

SEQ ID NO: 48444 - DNA, 80 bp, synthetic construct
  source 1..80: mol_type = other DNA
taagatcgccttcttcaccgtctgctcctcaggaggacacaaggatgggagaagcctatgaattatcacctgattttaca

SEQ ID NO: 48445 - DNA, 80 bp, synthetic construct
  source 1..80: mol_type = other DNA
agacacacaaaaacaagagatgatgattttgtgtatcatataaataaagaagaatattaacattgacattaagactagtc

SEQ ID NO: 48446 - DNA, 80 bp, synthetic construct
  source 1..80: mol_type = other DNA
aaccaaggttgtatatatttggccgatatcctcggagaataattgtcaatatctgacaattgatcatacacattccaata

SEQ ID NO: 48447 - DNA, 80 bp, synthetic construct
  source 1..80: mol_type = other DNA
atacattatagactttttatcatatatagaactgggattctaatagttctacttcttagtgcagtacaggtttttgcaaa

SEQ ID NO: 48448 - DNA, 80 bp, synthetic construct
  source 1..80: mol_type = other DNA
gaaacttctgagtatggcagaactgtcaacacgttacaacttaccaacaaatattacagagaagagcataaatcttgatc

SEQ ID NO: 48449 - DNA, 80 bp, synthetic construct
  source 1..80: mol_type = other DNA
tatctttcacatcccaaataccggaatgacattgttgcatcatttaaaatctaattttgttgttccagaatggcaacaaa

SEQ ID NO: 48450 - DNA, 80 bp, synthetic construct
  source 1..80: mol_type = other DNA
ttttagaagttacgtcagctatccatatcagtcctaacctgttggggatctatttgacctcagacatgtttaaaatccta

SEQ ID NO: 48451 - DNA, 80 bp, synthetic construct
  source 1..80: mol_type = other DNA
taaccggacaacagatcataatcactcgagttaacatggggttcttagtagaagttaggaggattgacattgaaccttgc

SEQ ID NO: 48452 - DNA, 80 bp, synthetic construct
  source 1..80: mol_type = other DNA
gagaggtcaacctcttaatttgacacaatacatgaacagcaaaattgctatttagacagcttgattcggcatctaaagct

SEQ ID NO: 48453 - DNA, 80 bp, synthetic construct
  source 1..80: mol_type = other DNA
ttaattcagctgtataaggatattgagaagacagtggatcataatcaattgccctttataataaaagatgtagttgccct

SEQ ID NO: 48454 - DNA, 80 bp, synthetic construct
  source 1..80: mol_type = other DNA
aatttgtattcactaacctaaaataatagtattatcacactagatagtcatcacataataagttgtttctatgaattaat

SEQ ID NO: 48455 - DNA, 80 bp, synthetic construct
  source 1..80: mol_type = other DNA
catgatagtataatcttgtagaattactatgggttctatatacggcatttattccggactgtatcctttgtaaacaatgc

SEQ ID NO: 48456 - DNA, 80 bp, synthetic construct
  source 1..80: mol_type = other DNA
atgcttaagtattctcatatcatacatgttatcactgcctgattaagaaaaaccaatgatggatattaaacatccttcaa

SEQ ID NO: 48457 - DNA, 80 bp, synthetic construct
  source 1..80: mol_type = other DNA
ttgactgttttgagactttaaaatcttacaggctgtcttgatttttaaattctctacgggattatacagtcacctttagc

SEQ ID NO: 48458 - DNA, 80 bp, synthetic construct
  source 1..80: mol_type = other DNA
atacattatgcctctcgcgaaataatataagtgactctatgacattccgagccaggtctttatcttgaattaaccctctt

SEQ ID NO: 48459 - DNA, 80 bp, synthetic construct
  source 1..80: mol_type = other DNA
tttggtatgcaacacccgactcaatatccagatgcaagattatcttctcccataattttagatcagtgtgatttattgac

SEQ ID NO: 48460 - DNA, 80 bp, synthetic construct
  source 1..80: mol_type = other DNA
cagaagtctagggttgtatagtcattactcacacaatccaaaactacgtaattgtaggattccataccacatttatcgct

SEQ ID NO: 48461 - DNA, 80 bp, synthetic construct
  source 1..80: mol_type = other DNA
ggacaatgagttcttaagagtattccttaacaagatcttgagactcgatcatgcttttacaaattctgcaaagttacaat

SEQ ID NO: 48462 - DNA, 80 bp, synthetic construct
  source 1..80: mol_type = other DNA
gtgaggatttctctcccaaagagaatccttattattgggggatgttattgctcgtgcatttatctcaacttgccagaagg

SEQ ID NO: 48463 - DNA, 80 bp, synthetic construct
  source 1..80: mol_type = other DNA
ggttaaagacatggtaccgtgatcaaaacttaactccttatctgtgtgatgatgaatttgttgtaagcatcgctagttat

SEQ ID NO: 48464 - DNA, 80 bp, synthetic construct
  source 1..80: mol_type = other DNA
ggtcgaagataatgaagaagctgattacccacctcttggtatattaagagatttgtacaatcaaggggaccaaattataa

SEQ ID NO: 48465 - DNA, 80 bp, synthetic construct
  source 1..80: mol_type = other DNA
ccatgtatctagaggatggtttcaaattaataaaacacttagaacccttatgtgtcagttgtatacaaacgtacggtatt

SEQ ID NO: 48466 - DNA, 80 bp, synthetic construct
  source 1..80: mol_type = other DNA
tttacgccgaggaagtactggtttcaatctcagatgattaaatcatattatgatgaacttcaaagtcttaacctaaaact

SEQ ID NO: 48467 - DNA, 80 bp, synthetic construct
  source 1..80: mol_type = other DNA
ctgtgaattgttctctttacaaaaacattggggtcacccagttttatacaatgatgttgcactagacaaagtgaagaaac

SEQ ID NO: 48468 - DNA, 80 bp, synthetic construct
  source 1..80: mol_type = other DNA
gccttattagcagatggactagcgaaggcattccctagtaatatgatggttgttactgagagagagcagaaagaagctct

SEQ ID NO: 48469 - DNA, 80 bp, synthetic construct
  source 1..80: mol_type = other DNA
tctttcttaaatgatcccacacctgtagaagtgacagtccaagccaggtctataaatcgaccaacagccctgcccccccc

SEQ ID NO: 48470 - DNA, 80 bp, synthetic construct
  source 1..80: mol_type = other DNA
agtcgacaacaaaattgagcatgaaactgaagaggacagctcctcatcaagtagttttgttgacttgaatgatccatttg

SEQ ID NO: 48471 - DNA, 80 bp, synthetic construct
  source 1..80: mol_type = other DNA
ctttgatcacacctcaagtgctagggggattatctttcttaaacccggagaaattattctatcggaacatcagtgatcct

SEQ ID NO: 48472 - DNA, 80 bp, synthetic construct
  source 1..80: mol_type = other DNA
cgttattagcttcccgcacgatcagtttaaccactgagggtacaatgttgatgagattaagagagttaactaagagtcga

SEQ ID NO: 48473 - DNA, 80 bp, synthetic construct
  source 1..80: mol_type = other DNA
tggaagagttggttttcttacattgatgcattagatgatgatttgtctgagtctcttgaaaagttcatatgcactgttga

SEQ ID NO: 48474 - DNA, 80 bp, synthetic construct
  source 1..80: mol_type = other DNA
cactgctgaacgaagacgaggatactcttgaaaatagtgtcatggccccaagcactactttgagagaacccaaagaagtt

SEQ ID NO: 48475 - DNA, 80 bp, synthetic construct
  source 1..80: mol_type = other DNA
agctatcttcagatctgggatcacctacggatttattgcagtacgattgcaatggactgcattcaaagggggccgataac

SEQ ID NO: 48476 - DNA, 80 bp, synthetic construct
  source 1..80: mol_type = other DNA
gcagaattaaattatgtgagttgtgcccttgaccggaaaattgttcaaaagcatccatctgacaatcgcctggcatggac

SEQ ID NO: 48477 - DNA, 80 bp, synthetic construct
  source 1..80: mol_type = other DNA
tcatatcaactaacacactagggaaatatgctggagggggtcaagctgctgttgatagtaatataatcttccagaacact

SEQ ID NO: 48478 - DNA, 80 bp, synthetic construct
  source 1..80: mol_type = other DNA
tccgaaccactaaggcaaactcaggaccttgatattagccaaaagaaacagggaaatgaatcaacagatccagcaagaaa

SEQ ID NO: 48479 - DNA, 80 bp, synthetic construct
  source 1..80: mol_type = other DNA
agacaattattggaagtattttttctgatgaatcttctcaaagtacagaccctataagttcaggctgtacaaaaactttt

SEQ ID NO: 48480 - DNA, 80 bp, synthetic construct
  source 1..80: mol_type = other DNA
gtaacacactttcttgtgtatccagttgagagtatcttttatgcctttggagctaatctaatagtggaaagtttaagttt

SEQ ID NO: 48481 - DNA, 80 bp, synthetic construct
  source 1..80: mol_type = other DNA
gctaggaggttctgcgggtgagaaaagttcgtcggatgctgtccgactatttcttacggcaagttatcaaaattttatca

SEQ ID NO: 48482 - DNA, 80 bp, synthetic construct
  source 1..80: mol_type = other DNA
aaacctattttaaaaattttgcaaaggttatcatgtttattaacaactaaaaaggttcaaaatcacagacctgtagctga

SEQ ID NO: 48483 - DNA, 80 bp, synthetic construct
  source 1..80: mol_type = other DNA
tacttgttttttgactgataatttttgggtctatccaagcaaatcaacgagaactaatcattattatgcaagtcttaatt

SEQ ID NO: 48484 - DNA, 80 bp, synthetic construct
  source 1..80: mol_type = other DNA
acaattcttacgatatcaagaattacctcctgttcaagaagacgatgaatcagaatacacaactgattctcaggaaagtg

SEQ ID NO: 48485 - DNA, 80 bp, synthetic construct
  source 1..80: mol_type = other DNA
accctctctacatgcgagctctatctcttctagtcaagaagtggtcaatttaaaacacaccagtcgtttagatgaaacac

SEQ ID NO: 48486 - DNA, 80 bp, synthetic construct
  source 1..80: mol_type = other DNA
ctaatatgagtgaaagggctcaatcaacaaatcatgagccaacagctttacaagaggtgtgcactgagataccctactcg

SEQ ID NO: 48487 - DNA, 80 bp, synthetic construct
  source 1..80: mol_type = other DNA
gaacaagatccagccaaaagttatttgctgttagagaatactagattcagggatgatcagaaaatattaagacatgatca

SEQ ID NO: 48488 - DNA, 80 bp, synthetic construct
  source 1..80: mol_type = other DNA
gaaagctgagaggggtgaacctctttcattgcaagtgtcttctaggggttgcctgcaggctcttacttgccctcatcacc

SEQ ID NO: 48489 - DNA, 80 bp, synthetic construct
  source 1..80: mol_type = other DNA
cctccccatctcaaaccaccacagaaccactaagcatgcttaggaattgtgacgccataaaagcagccttacgttctgag

SEQ ID NO: 48490 - DNA, 80 bp, synthetic construct
  source 1..80: mol_type = other DNA
acgaatgatccccgacttatgagcagtatccttgatatgagatcattgaaaactcccatgagaatagaatctcgaaacac

SEQ ID NO: 48491 - DNA, 80 bp, synthetic construct
  source 1..80: mol_type = other DNA
gagtctattgcaaccttctgagtgtctgtcaacttctaagggaaaatctgtactgtctagagaacaggcttcatacctgt

SEQ ID NO: 48492 - DNA, 80 bp, synthetic construct
  source 1..80: mol_type = other DNA
atgttgattgcagtaatatctcttctatttctctggattcaggttttcgaaatatgtctgatagaaatcaagtccaaatg

SEQ ID NO: 48493 - DNA, 80 bp, synthetic construct
  source 1..80: mol_type = other DNA
gctaataaatacttacaaacgtgacttatacacttgttttgatagtaaccaattctgcaggtttacaggggtcgtttcat

SEQ ID NO: 48494 - DNA, 80 bp, synthetic construct
  source 1..80: mol_type = other DNA
caatgcattataagctttatgatcttttgccagcaggcaaactcggaaaggcaatctgcctagccgaaggggaagggagt

SEQ ID NO: 48495 - DNA, 80 bp, synthetic construct
  source 1..80: mol_type = other DNA
acgatcaaccaggatctgataatgaacaaggtgttgatctcccaccacctccattatatgctcaggaaaagagacaggat

SEQ ID NO: 48496 - DNA, 80 bp, synthetic construct
  source 1..80: mol_type = other DNA
cagaaattttgagtggtcgagttattccaaggatgttgtataacatagataagctaagtgttttacttgaatccagaaaa

SEQ ID NO: 48497 - DNA, 80 bp, synthetic construct
  source 1..80: mol_type = other DNA
ttaatcttgaataatctaactattcaaatcacggatattacaaacccactatggctggactctgtcatacaatacctacc

SEQ ID NO: 48498 - DNA, 80 bp, synthetic construct
  source 1..80: mol_type = other DNA
gttctttataactttaggttttccttctttagagtcatctttctgccatcgctacaccattccgttcactgagggaacgg

SEQ ID NO: 48499 - DNA, 80 bp, synthetic construct
  source 1..80: mol_type = other DNA
ctctctttcacaaggtccagtcttatgtccgacaaggtagacaacacctacactctcttatgttagattacgaaaataat

SEQ ID NO: 48500 - DNA, 80 bp, synthetic construct
  source 1..80: mol_type = other DNA
tgaggggaaagataaccaagtattacaatgacatattgaaattaaatctagtagtgagagcagtagaaagagggaaaaat

SEQ ID NO: 48501 - DNA, 80 bp, synthetic construct
  source 1..80: mol_type = other DNA
aagatagcagaacaaaagttactcaatagggtaattgggtatattctattcttcccttttggtttctccagacccaagtg

SEQ ID NO: 48502 - DNA, 80 bp, synthetic construct
  source 1..80: mol_type = other DNA
actacagatatattcttcaataaaggaagctcagtctaactcacagaaataatctacttcaaaacaaggatcacccattt

SEQ ID NO: 48503 - DNA, 80 bp, synthetic construct
  source 1..80: mol_type = other DNA
tggaacattgtataagaaactgcaagacaaataataaggaaaggatactactgtataacttgttatatccaaaaggatct

SEQ ID NO: 48504 - DNA, 80 bp, synthetic construct
  source 1..80: mol_type = other DNA
tgggtcattttaagcatgatgcaaataaaaaatcgtctacatagccgaactgaccgctcagtacttattcacaatcatgc

SEQ ID NO: 48505 - DNA, 80 bp, synthetic construct
  source 1..80: mol_type = other DNA
taacttttagtttttaattgtgcaaaaattactaagaataattaatattgatattaaaacattaaatggacatttgagtt

SEQ ID NO: 48506 - DNA, 80 bp, synthetic construct
  source 1..80: mol_type = other DNA
ttatgcctagagtaatataaagaaatttaagagacatttagatatatcagttgaattgatttatgacacatagtgcatca

SEQ ID NO: 48507 - DNA, 80 bp, synthetic construct
  source 1..80: mol_type = other DNA
tgaatacaaagagaaaaattgttgcaattcaggaatatcttatttaaatgtattagagagaaagtcagattattatcaaa

SEQ ID NO: 48508 - DNA, 80 bp, synthetic construct
  source 1..80: mol_type = other DNA
atcaagcaaaatacaataggttttttcaaagaataggtggtaaagccttatggttattttttaaagatgtcaatgtgaat

SEQ ID NO: 48509 - DNA, 80 bp, synthetic construct
  source 1..80: mol_type = other DNA
ttttattaagaaaaagtaatgcatgaaattaaaaaattaaagaactttgatataagtaacacaaaacattcttcatcttt

SEQ ID NO: 48510 - DNA, 80 bp, synthetic construct
  source 1..80: mol_type = other DNA
agcacgactactcatttatttacttcaatatattttacctccgaaacataatagtcaaatttatttaaatatctagacca

SEQ ID NO: 48511 - DNA, 80 bp, synthetic construct
  source 1..80: mol_type = other DNA
ctttcaaataccttgttatatatcactgttatgtgagatggtgcaaaccttagaatgataaccaaaggtaggaactggtt

SEQ ID NO: 48512 - DNA, 80 bp, synthetic construct
  source 1..80: mol_type = other DNA
atatgacagtacctcgaaggtgttattcaatggtttagatctctcctctaattgctacgataatacaactacaaacctct

SEQ ID NO: 48513 - DNA, 80 bp, synthetic construct
  source 1..80: mol_type = other DNA
ttaccttggttacaatactgtaatagatatgattgtatttctttcttaaatcatctgattcaacttgatagatataactt

SEQ ID NO: 48514 - DNA, 80 bp, synthetic construct
  source 1..80: mol_type = other DNA
gattcagagaacattttgggaacgtcattaactaaattctctaaatgatgtactgtattactgtttcacccgactaatta

SEQ ID NO: 48515 - DNA, 80 bp, synthetic construct
  source 1..80: mol_type = other DNA
tatagtagcatattaatggatcctttacctctcctcctatgctcttcttataagtcactcaaccggtgaaacgccgagtt

SEQ ID NO: 48516 - DNA, 80 bp, synthetic construct
  source 1..80: mol_type = other DNA
gcggcttgttgacattatgtgttgaacattattacaattctgacaaagataaattcaatacaagtcctattgcaaaatat

SEQ ID NO: 48517 - DNA, 80 bp, synthetic construct
  source 1..80: mol_type = other DNA
tgttggcttagagttttcctgttgtactgaatgtagtaattaatgattgacttgagtgttgatggaatcaagatagtgcg

SEQ ID NO: 48518 - DNA, 80 bp, synthetic construct
  source 1..80: mol_type = other DNA
atgattcatattataaggcacaacttccacttctgttctgccaatgtatcctcttccttatcacatgccaatcaagaaaa

SEQ ID NO: 48519 - DNA, 80 bp, synthetic construct
  source 1..80: mol_type = other DNA
acaaagagtcgaagaatattaaagattctctttaatattcaaaaacagttcttaattcttttcctttccctcattaatat

SEQ ID NO: 48520 - DNA, 80 bp, synthetic construct
  source 1..80: mol_type = other DNA
aatatatcgataaatcttacaatgtgggactcgtcatacatgcaacaagtgagtgagggactgatgactggaaaagttcc

SEQ ID NO: 48521 - DNA, 80 bp, synthetic construct
  source 1..80: mol_type = other DNA
tgggattacaatgtagtccttgcttaatatcaaaatcaacaagtactgacgacattgtttgggatcagctaatcgtaaag

SEQ ID NO: 48522 - DNA, 80 bp, synthetic construct
  source 1..80: mol_type = other DNA
aaaacattggctgacttgcttatacctataaataggcaaatgtcggacattcaaagcaccctaagcgaaatgacaacaaa

SEQ ID NO: 48523 - DNA, 80 bp, synthetic construct
  source 1..80: mol_type = other DNA
ttccaaaggaatgtcagagatgctagctaagtacgatcatctcgtgatttcaactggaagaaccaccgcaccagctgctg

SEQ ID NO: 48524 - DNA, 80 bp, synthetic construct
  source 1..80: mol_type = other DNA
cttacttaaacgagcatggagtccccccccctcagcctgcaatcttcaaagatcttggagttgcccaacaagcctacagt

SEQ ID NO: 48525 - DNA, 80 bp, synthetic construct
  source 1..80: mol_type = other DNA
caaaagactatggtcaaaaaccaaacaacagatgcagctgacaaaatgtcaaaggttctggaactcagtgaagaaacatt

SEQ ID NO: 48526 - DNA, 80 bp, synthetic construct
  source 1..80: mol_type = other DNA
caagggatgggtctgtgtctattcatctgaacagggtgaaacccgggctcttaaaatctaatccttgcgattcattcttg

SEQ ID NO: 48527 - DNA, 80 bp, synthetic construct
  source 1..80: mol_type = other DNA
aacaaagaatgatctttctaggttaatacaaaaacactaaacatttcaagagtttgtggatgatttaagcatatttgggt

SEQ ID NO: 48528 - DNA, 80 bp, synthetic construct
  source 1..80: mol_type = other DNA
aaatttaatcaggatagtagtttaaatttgttttaagcgtgattttcattaagagagggttaattagttatagattgatc

SEQ ID NO: 48529 - DNA, 80 bp, synthetic construct
  source 1..80: mol_type = other DNA
tttagtgtactccatacgcataatatagagaaattaatattactaacaaaaagggttttttaaacggatttgattaatag

SEQ ID NO: 48530 - DNA, 80 bp, synthetic construct
  source 1..80: mol_type = other DNA
atcagtatatctcaaaagccaaataattgacttcttactctttgggaatttactaacaatataggaaagatatttattct

SEQ ID NO: 48531 - DNA, 80 bp, synthetic construct
  source 1..80: mol_type = other DNA
tacgtaatccttggcccaacggaaactaacctcaatggtcattcaatatgcttgctcatgatatatccagagatttttta

SEQ ID NO: 48532 - DNA, 80 bp, synthetic construct
  source 1..80: mol_type = other DNA
taagttcaaaacgttgtaaattatacttgcctaaaatactgttttaattaagaaaaactatgaagaacattaagtggatt

SEQ ID NO: 48533 - DNA, 80 bp, synthetic construct
  source 1..80: mol_type = other DNA
tttccttcttagtgttcttttacaaagcaaggtttttaaattcaagtagatcaagtctactcttgctgaacttacttctt

SEQ ID NO: 48534 - DNA, 80 bp, synthetic construct
  source 1..80: mol_type = other DNA
taaaaattaatttacactaaacaattcgtttttgttgacggaacaaattcagatatggccagttccagcaattataatac

SEQ ID NO: 48535 - DNA, 80 bp, synthetic construct
  source 1..80: mol_type = other DNA
atgaagaaaagaggagaaggttctccggtagtttatttccaagcgcctgagaattttcctttgaatggcttcaacaaccg

SEQ ID NO: 48536 - DNA, 80 bp, synthetic construct
  source 1..80: mol_type = other DNA
ctagcatatgctaacccgacactcagtgctgtttaataagataattgggtaagacaatggcccttctgtacaaagggtct

SEQ ID NO: 48537 - DNA, 80 bp, synthetic construct
  source 1..80: mol_type = other DNA
gattcagatagatatttgtcagattcatgcaggatcattttaagttgattttaatagtgctttaacccttcactgctacc

SEQ ID NO: 48538 - DNA, 80 bp, synthetic construct
  source 1..80: mol_type = other DNA
ctaaaggattgattgagctgattaacctataatgtataacttcttttaaaccgctaaatcaatcataagtttgtcagatc

SEQ ID NO: 48539 - DNA, 80 bp, synthetic construct
  source 1..80: mol_type = other DNA
atataggatgaatgttaatacgtgataaatggttcctattcagttttactttaacctcatagtaaatcttataagactac

SEQ ID NO: 48540 - DNA, 80 bp, synthetic construct
  source 1..80: mol_type = other DNA
tcatcttcaagttgatcaattcaaagataatttcccttctaaaataataagaaaaactaatgaagaacattaattgctag

SEQ ID NO: 48541 - DNA, 80 bp, synthetic construct
  source 1..80: mol_type = other DNA
gtaaaggcaattaagttctttgaactttgcaaaagtaaggtttcactagtgagtaaattcctgtattagtagattaaaac

SEQ ID NO: 48542 - DNA, 80 bp, synthetic construct
  source 1..80: mol_type = other DNA
caaggaagcaccccgacatgaagaccatatattttctgattagtctcattttaatccaaagtataaaaactctccctgtt

SEQ ID NO: 48543 - DNA, 80 bp, synthetic construct
  source 1..80: mol_type = other DNA
aagggattgtaacataccccaatcattggctcactacaggtcacatgaaagtaatctttgggattttaagatctagcttc

SEQ ID NO: 48544 - DNA, 80 bp, synthetic construct
  source 1..80: mol_type = other DNA
aaggagaagaagccaaaacatgttacaatataagtgtaacagacccttctggaaaatccttgctgctggatcctcccagt

SEQ ID NO: 48545 - DNA, 80 bp, synthetic construct
  source 1..80: mol_type = other DNA
cgttgcctctacaacaatgtaccgaggcaaggtcttcactgaaggaaatatagcagctatgattgttaataagacagttc

SEQ ID NO: 48546 - DNA, 80 bp, synthetic construct
  source 1..80: mol_type = other DNA
tttttctaggcaaggacaaggttatcgtcacatgaacttgacctccaccaataaatattggacaagcagcaatgaaacgc

SEQ ID NO: 48547 - DNA, 80 bp, synthetic construct
  source 1..80: mol_type = other DNA
agagaaatgatacgggatgttttggcatcctccaagaatacaactccacaaacaatcaaacatgccctccatctcttaaa

SEQ ID NO: 48548 - DNA, 80 bp, synthetic construct
  source 1..80: mol_type = other DNA
cctccatccctgcccacagtaactccgagcattcactctacaaatactcaaattaatactgctaaatctggaactatgaa

SEQ ID NO: 48549 - DNA, 80 bp, synthetic construct
  source 1..80: mol_type = other DNA
cccaagtagcgacgatgaggaccttatgatttccggctcaggatctggagaacaggggccccacacaactcttcatgtag

SEQ ID NO: 48550 - DNA, 80 bp, synthetic construct
  source 1..80: mol_type = other DNA
tcactgaacagaaacaatcgtcaacaatattgtccactccttcactacatccaagcacctcacaacatgagcaaaacagt

SEQ ID NO: 48551 - DNA, 80 bp, synthetic construct
  source 1..80: mol_type = other DNA
acgaatccttcccgacatgctgtaactgagcacaatggaaccgacccaacaacacaaccagcaacgctcctcaacaatac

SEQ ID NO: 48552 - DNA, 80 bp, synthetic construct
  source 1..80: mol_type = other DNA
taatacaactcccacctataacactctcaagtacaacctcagtactccttcccctccaacccgcaacatcaccaataatg

SEQ ID NO: 48553 - DNA, 80 bp, synthetic construct
  source 1..80: mol_type = other DNA
atacacaacgtgaactagcagaaagcgaacaaaccaatgctcagttgaacacaactctagatccaacagaaaatcccacc

SEQ ID NO: 48554 - DNA, 80 bp, synthetic construct
  source 1..80: mol_type = other DNA
acagcacaagacaccaacagcacaaccaacatcatcatgacgacatcagatataacaagcaaacaccccacaaattcttc

SEQ ID NO: 48555 - DNA, 80 bp, synthetic construct
  source 1..80: mol_type = other DNA
tccggattctagtccgacaacccgccctcctatatactttagaaagaaacgaagcattttctggaaagaaggtgatatat

SEQ ID NO: 48556 - DNA, 80 bp, synthetic construct
  source 1..80: mol_type = other DNA
tcccgtttttagatgggttaataaatactgaaattgattttgatccaatcccaaacacagaaacaatctttgatgaatct

SEQ ID NO: 48557 - DNA, 80 bp, synthetic construct
  source 1..80: mol_type = other DNA
ctcccagctttaatacttcaactaatgaggaacaacacactcccccgaatatcagtttaactttctcttattttcctgat

SEQ ID NO: 48558 - DNA, 80 bp, synthetic construct
  source 1..80: mol_type = other DNA
aaaaatggagatactgcctactctggggaaaacgagaatgattgtgatgcagagttgaggatttggagtgtgcaggagga

SEQ ID NO: 48559 - DNA, 80 bp, synthetic construct
  source 1..80: mol_type = other DNA
gggcggaacatgcaaggtgctaggacctgattgttgcataggaatagaagatctatctaaaaatatctcagaacaaatcg

SEQ ID NO: 48560 - DNA, 80 bp, synthetic construct
  source 1..80: mol_type = other DNA
tcctgctactattatctatagctgttctgattgctctgtcctgtatctgtcgtatcttcactaaatacattggatgacat

SEQ ID NO: 48561 - DNA, 80 bp, synthetic construct
  source 1..80: mol_type = other DNA
aaagtttacaatggttagagctttaggaaagttgctgctgagccctttgtctaatctactgaaatcgacttaaagaatcc

SEQ ID NO: 48562 - DNA, 80 bp, synthetic construct
  source 1..80: mol_type = other DNA
tcagggagcttataactcaatgtgaatcgattccctatatattgttgatcgtgatgatatagcagtcaagtgtcaccatc

SEQ ID NO: 48563 - DNA, 80 bp, synthetic construct
  source 1..80: mol_type = other DNA
attaggagcaattcttctgatccaatgcattgaagtcactaattacttctaaaatccttatctttaatccgaatattcac

SEQ ID NO: 48564 - DNA, 80 bp, synthetic construct
  source 1..80: mol_type = other DNA
atagaaatcaattttgggaaaattccagtagtgcgtcttttcatgtcacttctctgaacctaagaccataataaatattg

SEQ ID NO: 48565 - DNA, 80 bp, synthetic construct
  source 1..80: mol_type = other DNA
gattcaggggtggcattgcatccacttgtgcggacctcaaaagtaaaaaatgaagttgcaagcttcaaacaggcattgag

SEQ ID NO: 48566 - DNA, 80 bp, synthetic construct
  source 1..80: mol_type = other DNA
gttaaagaggtcagctggtcaatcttctattttcatattaaagatatactgctcagaaactcctagtttgcaacccaatc

SEQ ID NO: 48567 - DNA, 80 bp, synthetic construct
  source 1..80: mol_type = other DNA
ttggaaaaataaacctcctcttttgatcataactatctctatcaatgtcttgaacacttaatattattaacaacttattt

SEQ ID NO: 48568 - DNA, 80 bp, synthetic construct
  source 1..80: mol_type = other DNA
ttatttaatcttttaaatgcaaatcaaaagaggacatgagccaccctcattttacttcaatacgaaggaattcttcttct

SEQ ID NO: 48569 - DNA, 80 bp, synthetic construct
  source 1..80: mol_type = other DNA
cagcctacattttaatttaccaggtgataaacttttggtaatttaccttaacataggtgctgataagatgattggatgat

SEQ ID NO: 48570 - DNA, 80 bp, synthetic construct
  source 1..80: mol_type = other DNA
aacacatttaccgagatttaatcgtatctcattaagaaaaagataattagaacactggaaattgataaacttctattttg

SEQ ID NO: 48571 - DNA, 80 bp, synthetic construct
  source 1..80: mol_type = other DNA
atcaatgtagaaaagaattataaaaatcttagtaaataaattactgcaaagtaaaaacgaagaacattaagtgttcttta

SEQ ID NO: 48572 - DNA, 80 bp, synthetic construct
  source 1..80: mol_type = other DNA
ttaaaattgttcatccttttcgcttttgattatatttgatcaaatacaacttcatttggtattcattccaagattcagaa

SEQ ID NO: 48573 - DNA, 80 bp, synthetic construct
  source 1..80: mol_type = other DNA
tgcaacagcctcgtgggagaagccgaaatcgtagccaccaagttgcactatccacataccatgaaaatcaattaccctct

SEQ ID NO: 48574 - DNA, 80 bp, synthetic construct
  source 1..80: mol_type = other DNA
aaacctcagtacattaaccatcatccacgtgcaagatcaatgagttcaacccgtagtagtacagaaggtagccctactaa

SEQ ID NO: 48575 - DNA, 80 bp, synthetic construct
  source 1..80: mol_type = other DNA
taacttagctcgtcatggagagtacgcaccatttgcacgggttttgaatttatcagggatcaataaccttgagcatgggc

SEQ ID NO: 48576 - DNA, 80 bp, synthetic construct
  source 1..80: mol_type = other DNA
ggctttcaaaagtcagcaggactgtggatcgccatctctttccaaagggctttcaaaggacaagcaggaacaagcaaagg

SEQ ID NO: 48577 - DNA, 80 bp, synthetic construct
  source 1..80: mol_type = other DNA
atgtactgactttggaaaatctagggcacatattgaattatcttcatagatcagaaatcggaaaattggacgagacatca

SEQ ID NO: 48578 - DNA, 80 bp, synthetic construct
  source 1..80: mol_type = other DNA
ttgaagctgccttatggcagggctgggacaagaagtcaatatcgttgtttgtgcaagctgcattatatgtgatgaataat

SEQ ID NO: 48579 - DNA, 80 bp, synthetic construct
  source 1..80: mol_type = other DNA
atcccctgtgaatcgtccatcagtgtgcaggcctcatatgatcactttattctccctcgaaatcagggtgaaagacaatg

SEQ ID NO: 48580 - DNA, 80 bp, synthetic construct
  source 1..80: mol_type = other DNA
attgtcatttcaaaatcaacgatataattattgttaacattctaccttggttcttattgtaagacttgtatactctccta

SEQ ID NO: 48581 - DNA, 80 bp, synthetic construct
  source 1..80: mol_type = other DNA
tcaactgtgactactagttcaaaattaaaactcacaaaaattcaatcgcattgtaatcaattatttatcatcgattgttt

SEQ ID NO: 48582 - DNA, 80 bp, synthetic construct
  source 1..80: mol_type = other DNA
agtttgagggattccacatcatcttaaatccaataacacgattttgtttgatttttcttttaatttctacaccacaacaa

SEQ ID NO: 48583 - DNA, 80 bp, synthetic construct
  source 1..80: mol_type = other DNA
catacaagtgtctgacgaacgacctgtgtttctatggaaaaacatgaagaacattaagaaaaaggatgttcttgtatttc

SEQ ID NO: 48584 - DNA, 80 bp, synthetic construct
  source 1..80: mol_type = other DNA
cgtatatgcaatacctgaaccctcccccccatgccgaccatggtgcaaatcagttaatcccagcagaccagctatcaaat

SEQ ID NO: 48585 - DNA, 80 bp, synthetic construct
  source 1..80: mol_type = other DNA
ggcgcaaatcagtcaatcccagcagaccagccatcaaatcaacatggtataactccgaattatgtgggcgacttgaatct

SEQ ID NO: 48586 - DNA, 80 bp, synthetic construct
  source 1..80: mol_type = other DNA
agatgatcagtttaaagggaatgtttgtcacgccttcactttggaagcaataattgatatatctgcttataatgagcgga

SEQ ID NO: 48587 - DNA, 80 bp, synthetic construct
  source 1..80: mol_type = other DNA
aaaaacaaattaatcggaaacaccatgcaccctgcggtttctgtacacccaaacctgccgcctattgtcctaccaacagt

SEQ ID NO: 48588 - DNA, 80 bp, synthetic construct
  source 1..80: mol_type = other DNA
taaaaaacaagcctatcgtcagcataagaatcctaacaatggaccactgctggccatatctggcatccttcatcaactga

SEQ ID NO: 48589 - DNA, 80 bp, synthetic construct
  source 1..80: mol_type = other DNA
ccgaggaaaggacattttccttaatcaataggcatgcaattgactttttgcttacgaggtggggcggaacatgcaaggtg

SEQ ID NO: 48590 - DNA, 80 bp, synthetic construct
  source 1..80: mol_type = other DNA
tcaattcaacacgatgcaattaatcatatcaatgatttcagatacctattaccatcagaactcataaagtatgctaattg

SEQ ID NO: 48591 - DNA, 80 bp, synthetic construct
  source 1..80: mol_type = other DNA
aaacaccccaactttccaatcatacacctaataaccactttagtagcgttacctttcagtacagtataggtaatcgagga

SEQ ID NO: 48592 - DNA, 80 bp, synthetic construct
  source 1..80: mol_type = other DNA
attaagaaaaactaaaaatcgaagaatattaaagatcctcctcaacattcagaaaaggcttttcactcccctccctcccc

SEQ ID NO: 48593 - DNA, 80 bp, synthetic construct
  source 1..80: mol_type = other DNA
ccacaaatatgccaaaataataattctcacaatgtgggactcatcatacatgcaacaagtcagcgaagggctgatgactg

SEQ ID NO: 48594 - DNA, 80 bp, synthetic construct
  source 1..80: mol_type = other DNA
gccgatagttgtcaatatcatgatagttgtgttgaatggatagtctttctgggcttgtgccaaatattaatcatctcagg

SEQ ID NO: 48595 - DNA, 80 bp, synthetic construct
  source 1..80: mol_type = other DNA
ataccttaatgtgattaattcgggttcactcgagggtggtaagtgggtttcattactaactacgggtatgggaacactac

SEQ ID NO: 48596 - DNA, 80 bp, synthetic construct
  source 1..80: mol_type = other DNA
tagggataatgggttagaactatagtctatattttatatttacatttaggttataagataagtgtaggataagtgtaagc

SEQ ID NO: 48597 - DNA, 80 bp, synthetic construct
  source 1..80: mol_type = other DNA
cataattatgtagattattagccaaatgaaatcactgattgactggctaatattaattattcttagtataatgtttaatt

SEQ ID NO: 48598 - DNA, 80 bp, synthetic construct
  source 1..80: mol_type = other DNA
ataggttaagtttgatcataggttaagatttactaataattattatatgccattggatgtaaatttcgttcattgctttg

SEQ ID NO: 48599 - DNA, 80 bp, synthetic construct
  source 1..80: mol_type = other DNA
atgtttagaggcagtagtcaaaatgacttttataatagacgtacactaacttctgatactagactcgtaggaatattaaa

SEQ ID NO: 48600 - DNA, 80 bp, synthetic construct
  source 1..80: mol_type = other DNA
aattttattaatcaaaataatccaattataaggaatagaattgaacaattaattctacaatgtaagttgtgagagcgcat

SEQ ID NO: 48601 - DNA, 80 bp, synthetic construct
  source 1..80: mol_type = other DNA
acgcaaaagtgactcaatttggaggagagccacgtccattattgggttcaatcctgttatgaaagtatcaggcagaccca

SEQ ID NO: 48602 - DNA, 80 bp, synthetic construct
  source 1..80: mol_type = other DNA
tcaacagctattgcggaccagtcagtcatgcttgatgattcaaaggggttctctgtgttcttggggctgcttcgagagag

SEQ ID NO: 48603 - DNA, 80 bp, synthetic construct
  source 1..80: mol_type = other DNA
agacacacaaaaacaagagagacacacaaaaacaagagatgatgattttgtgtatcatataaataaagaagaatattaac

SEQ ID NO: 48604 - DNA, 80 bp, synthetic construct
  source 1..80: mol_type = other DNA
aaacaccctaaatttttaatcatacacacaataatcactttggtagcgttacctttcagtacagtataggtaatcgagga

SEQ ID NO: 48605 - DNA, 80 bp, synthetic construct
  source 1..80: mol_type = other DNA
aaaaaattgaaaagctttgatacaagtaacacaaaacattattcatcttttttgtgtgtcccatcttttttgtgtgtcca

SEQ ID NO: 48606 - DNA, 80 bp, synthetic construct
  source 1..80: mol_type = other DNA
gagccattaaagctgtaagagccataattataagagccattatgctatgagagcgaaaatagtttacatcttgatggtta

SEQ ID NO: 48607 - DNA, 80 bp, synthetic construct
  source 1..80: mol_type = other DNA
tatcagtcagacggctttccgggcttgtgccacatatttaatcatctcaggaacctttaatgtgattaatacgggtttac

SEQ ID NO: 48608 - DNA, 80 bp, synthetic construct
  source 1..80: mol_type = other DNA
tatataaggcgtggtgggttcaattactaactacgggtaaggggacattaatctttgcactagggttaagggtcattatc

SEQ ID NO: 48609 - DNA, 80 bp, synthetic construct
  source 1..80: mol_type = other DNA
acaggggattgggatatggtttacattataatctataggtcaatatataggataggtataagtatgtatagtagtaagta

SEQ ID NO: 48610 - DNA, 80 bp, synthetic construct
  source 1..80: mol_type = other DNA
tataagtagatggccaaatgaaatcattgattgaatggctagagtcaatgtatgattataggttaagtgttactatttat

SEQ ID NO: 48611 - DNA, 80 bp, synthetic construct
  source 1..80: mol_type = other DNA
gtatttttaggtttaagatctactaacaattattgtatgccactagatgtaaatttcgttcattgctttgctgctttacg

SEQ ID NO: 48612 - DNA, 80 bp, synthetic construct
  source 1..80: mol_type = other DNA
tgggactgtatctaagttttcacaaggtgatacactattgttttttgggccacttgaaggcggtggcttgatatttaaac

SEQ ID NO: 48613 - DNA, 80 bp, synthetic construct
  source 1..80: mol_type = other DNA
ccaggagacatcatgagcccaagagacaaaggttttttatgccctgagttcccaggtagttttaggaaaaaatgtaactt

SEQ ID NO: 48614 - DNA, 80 bp, synthetic construct
  source 1..80: mol_type = other DNA
atagtttacatcttgatggttatatcactcagatggctttccgggcttgtgccacatatttaatcatctcaggaaccttt

SEQ ID NO: 48615 - DNA, 80 bp, synthetic construct
  source 1..80: mol_type = other DNA
aatgtgattaatacgggtttactatataaggggtggtgggttcaattactaactacgggtaaggagacattaatctttgc

SEQ ID NO: 48616 - DNA, 80 bp, synthetic construct
  source 1..80: mol_type = other DNA
aacagctggaataatcaaagattgctgtttctgatggctttctgggcttgtgccaatagttattcatctcagggctattc

SEQ ID NO: 48617 - DNA, 80 bp, synthetic construct
  source 1..80: mol_type = other DNA
tgggtggtgactatactactgatggcgtttcatttatacgggcctagtatcttatcagggaattatataacaatcactat

SEQ ID NO: 48618 - DNA, 80 bp, synthetic construct
  source 1..80: mol_type = other DNA
gaatcattatgtttattgcactacacaatattaatttagttgttaagaataggttgattatgacttgatcatatggtgct

SEQ ID NO: 48619 - DNA, 80 bp, synthetic construct
  source 1..80: mol_type = other DNA
tactggttggtcaatgattaaacctcttattagcattaatatataatcgttatataatcgttatatagtagttattgtaa

SEQ ID NO: 48620 - DNA, 80 bp, synthetic construct
  source 1..80: mol_type = other DNA
gtcttatgtataatcagacatatgatttttatttgtaacaagcaataaattactaacaattgagtacatcgggtgtaaat

SEQ ID NO: 48621 - DNA, 80 bp, synthetic construct
  source 1..80: mol_type = other DNA
ttcgttccaggctttgctttgcattactatcaccaaataacacatttctacctcagccaactaccctctccttaatacta

SEQ ID NO: 48622 - DNA, 80 bp, synthetic construct
  source 1..80: mol_type = other DNA
taccctctccttaatactacctcatttatcctacctcattagttttctttcttgattgcttttcaagaattctactacta

SEQ ID NO: 48623 - DNA, 80 bp, synthetic construct
  source 1..80: mol_type = other DNA
tgatttcttagcagcagactgcccgtttcttcccaaaccaagagtccaatctgaagcatttatggcgacaaacagagctt

SEQ ID NO: 48624 - DNA, 80 bp, synthetic construct
  source 1..80: mol_type = other DNA
atttcataaaccggcagcgacaaattgatgaatcaaggatgcctgatattatggatttaatacaagcagcagaagcaggt

SEQ ID NO: 48625 - DNA, 80 bp, synthetic construct
  source 1..80: mol_type = other DNA
tcagccactctgtttaatgatattgcgacacctcattctgcatgggtatttgcttgtgccccagacagatgtcccccaac

SEQ ID NO: 48626 - DNA, 80 bp, synthetic construct
  source 1..80: mol_type = other DNA
ttggactaattatactttggtaaatgttacaactgacaatagtgtctacttaaatgtatctagtgatatcgtgatcaata

SEQ ID NO: 48627 - DNA, 80 bp, synthetic construct
  source 1..80: mol_type = other DNA
taaactataaactaaaaattaaacaatatcgttattatataagtaataccaaaatgatgatatacggattaatagcctgt

SEQ ID NO: 48628 - DNA, 80 bp, synthetic construct
  source 1..80: mol_type = other DNA
cttggaattaatagttttgatattagtaaaaaatttatttctaaaattttgatcatcgtaattaataaaaatacaatcct

SEQ ID NO: 48629 - DNA, 80 bp, synthetic construct
  source 1..80: mol_type = other DNA
caataaaagagaatgcatactgtctaatcctaagaaaactcttgctacaaaatgttgataatccttgaggcgtactacgt

SEQ ID NO: 48630 - DNA, 80 bp, synthetic construct
  source 1..80: mol_type = other DNA
ttatacttctaatgagcaagtagaaaacctctcatctacaaaaacatactcgtgtccataatcctctaccatagtaacac

SEQ ID NO: 48631 - DNA, 80 bp, synthetic construct
  source 1..80: mol_type = other DNA
aagtacctgatacacatttctattaacgatttattatatatgtatacgtagtagcgacgttttatgttctcaactgtgct

SEQ ID NO: 48632 - DNA, 80 bp, synthetic construct
  source 1..80: mol_type = other DNA
ttgtgtctacaaccgctacataatcgtagattcatgttaacactctacgtatctcgtcgtccaatattttatataaaaac

SEQ ID NO: 48633 - DNA, 80 bp, synthetic construct
  source 1..80: mol_type = other DNA
ttatcgactaaccattctactagtatggtattatgataataaacacaataataaagtatgctacgtccacgcgtatctat

SEQ ID NO: 48634 - DNA, 80 bp, synthetic construct
  source 1..80: mol_type = other DNA
tttatttatatcatcgatatacggcttacaaagttttaatatagataacacatcttcatcatgattattgtgcacgcaga

SEQ ID NO: 48635 - DNA, 80 bp, synthetic construct
  source 1..80: mol_type = other DNA
tccactcatatagaagatgtgcattccaatcttaaacatatagggaatcatatatctgctcttaaacgacgctatactag

SEQ ID NO: 48636 - DNA, 80 bp, synthetic construct
  source 1..80: mol_type = other DNA
cagggaataatggcataatatttattgtattattatcatcttctacgacatcaactccatttttcaaaatatactcaact

SEQ ID NO: 48637 - DNA, 80 bp, synthetic construct
  source 1..80: mol_type = other DNA
tctactttgtgtatattaataaaatattcatttacgtgcttatatctatataatactgcgccttcatctatcatacattt

SEQ ID NO: 48638 - DNA, 80 bp, synthetic construct
  source 1..80: mol_type = other DNA
gacagatcttcgttaaaaagttttccatctatgtagaatccatcggttgttaacaccattcccgcgtcagattgaatagg

SEQ ID NO: 48639 - DNA, 80 bp, synthetic construct
  source 1..80: mol_type = other DNA
ctttcttttttactatcattacctcatgaactatttcttgaatgagtatatgtattttctttcctatatcggacgcgttc

SEQ ID NO: 48640 - DNA, 80 bp, synthetic construct
  source 1..80: mol_type = other DNA
gataatattagtacgcactataccatgtgaaatgtatctcgtcaataggtcttggatagaatatttgtatcgtttaatac

SEQ ID NO: 48641 - DNA, 80 bp, synthetic construct
  source 1..80: mol_type = other DNA
ttaccaaaattaaggatatacggacttactatctttttctcaacgtcgatttgatgaacacacgatgaaaatgtgcttct

SEQ ID NO: 48642 - DNA, 80 bp, synthetic construct
  source 1..80: mol_type = other DNA
tatatttccccaaaggatccatgcacgtaaacattatgccgttatcattaataaagacttctttctcatcggatctgtaa

SEQ ID NO: 48643 - DNA, 80 bp, synthetic construct
  source 1..80: mol_type = other DNA
caataactaaaaatgtaaaatatttttctatgttaggaatatggtttttcactttaatagatatatggtttttggccaaa

SEQ ID NO: 48644 - DNA, 80 bp, synthetic construct
  source 1..80: mol_type = other DNA
tcgtatatattataacgcaccatattaaacaatactaaaatatctttagacccacaaccatctaataatcgatcaattat

SEQ ID NO: 48645 - DNA, 80 bp, synthetic construct
  source 1..80: mol_type = other DNA
ttagattggtacgaaatatattgttaaactttgattctacagtaatgtccaaatctagttgtggaaatacttccatcagc

SEQ ID NO: 48646 - DNA, 80 bp, synthetic construct
  source 1..80: mol_type = other DNA
ataattatcaatgggatttttattcttataccgtatacgtaaatagttatgtagaatattcatacgttcattattctgat

SEQ ID NO: 48647 - DNA, 80 bp, synthetic construct
  source 1..80: mol_type = other DNA
tttagatcatagagagattcattatttgttcagatgcgttgacgctgtaaaagacgtcactattaccaaaaaaaataaca

SEQ ID NO: 48648 - DNA, 80 bp, synthetic construct
  source 1..80: mol_type = other DNA
aattattgtcgtacatcgcacctaccaacgtaataatgaagtgtggtatatgatctataagtataatatagtatctcttt

SEQ ID NO: 48649 - DNA, 80 bp, synthetic construct
  source 1..80: mol_type = other DNA
attactattactattactatcattatcagtgttagcattattggtattcttcttgtcatcttgttcagaaatatataaca

SEQ ID NO: 48650 - DNA, 80 bp, synthetic construct
  source 1..80: mol_type = other DNA
ttcgtaagatattaaacagtttatcacatctagagataatttatctcgtgatctagtgataatataataatagagtgcgg

SEQ ID NO: 48651 - DNA, 80 bp, synthetic construct
  source 1..80: mol_type = other DNA
aaattattgtcactaacgtgattattattgtcataaacattattgaacaggcattgctaaaactcggatttgacgaaatc

SEQ ID NO: 48652 - DNA, 80 bp, synthetic construct
  source 1..80: mol_type = other DNA
tcgacataccatctatcaaacaaaatttgggtttaatttctcctggagacgtttcataataatacatataactttcttcg

SEQ ID NO: 48653 - DNA, 80 bp, synthetic construct
  source 1..80: mol_type = other DNA
tgtgaattcgtaaatacattgattgccataataattacagcagctacaatacacacaatagacattcccacagtgttgcc

SEQ ID NO: 48654 - DNA, 80 bp, synthetic construct
  source 1..80: mol_type = other DNA
tctctgttagatgaggatagcaaaataaagttttttaaggggaaaaagctcaatattgtagcattacgatctctggagga

SEQ ID NO: 48655 - DNA, 80 bp, synthetic construct
  source 1..80: mol_type = other DNA
tgatctcaagccgtcttttctgaagtaggtttcttatttagtagttgttgtagataatcgtcaatattatcgagataatc

SEQ ID NO: 48656 - DNA, 80 bp, synthetic construct
  source 1..80: mol_type = other DNA
tttattatgaaaaccgacattaccatcatatatttcgtgatatacatgtgatccgtttacgttaaaccataaatacatgg

SEQ ID NO: 48657 - DNA, 80 bp, synthetic construct
  source 1..80: mol_type = other DNA
gtatatatcatgatgatttggttgtattggggaaggtaacaattaatgatctaaagatgatgctattttacatggattta

SEQ ID NO: 48658 - DNA, 80 bp, synthetic construct
  source 1..80: mol_type = other DNA
tacctcataaaacgaaaaaaaaaaaagctattatcaaatactgtacggaatggattcattctcttctctttttatgaaac

SEQ ID NO: 48659 - DNA, 80 bp, synthetic construct
  source 1..80: mol_type = other DNA
taccacgaagaatggaactaaacatatgaacggaactaaaaaacgaaatatatttgtagtacaacgaatactcccaaact

SEQ ID NO: 48660 - DNA, 80 bp, synthetic construct
  source 1..80: mol_type = other DNA
cttactgggtacgcccctgtatctccgatcgttatagcgagaactcataccgcacttatatttttgatgggtaagccaac

SEQ ID NO: 48661 - DNA, 80 bp, synthetic construct
  source 1..80: mol_type = other DNA
tttagtatctaaacattgggaattgacaaataaaaagtataggtgtatggcattagccgaacatatagctgatagtattc

SEQ ID NO: 48662 - DNA, 80 bp, synthetic construct
  source 1..80: mol_type = other DNA
gggcaactgtggatgtaataaagtgaaattacatttttataaatagatgttagtacagtgttagaaatggatgaagcata

SEQ ID NO: 48663 - DNA, 80 bp, synthetic construct
  source 1..80: mol_type = other DNA
gcatttaaaaaagctacgtctatcgtattggattctgaaattgttcttgtagacgaacataatgtaccgctcccgtttgg

SEQ ID NO: 48664 - DNA, 80 bp, synthetic construct
  source 1..80: mol_type = other DNA
ctatgttctatcaaccagatattatgtgttatagaggtataagtaatatagtggtttttcaaaacatataaatctaaaat

SEQ ID NO: 48665 - DNA, 80 bp, synthetic construct
  source 1..80: mol_type = other DNA
atctgataactttaaacatctaggattttttgatggtgataattaaattaacatagtggtttaaagtttaaaaaagactt

SEQ ID NO: 48666 - DNA, 80 bp, synthetic construct
  source 1..80: mol_type = other DNA
aaatgtaattagtcatgatcatggtaccgtacaattatattgctggtagtatattattcagtatgaagacatattaatac

SEQ ID NO: 48667 - DNA, 80 bp, synthetic construct
  source 1..80: mol_type = other DNA
atcactacggacacaaagtagctgacataaaccattgtataatttttatgttttatgtttattagcgtacacattttgga

SEQ ID NO: 48668 - DNA, 80 bp, synthetic construct
  source 1..80: mol_type = other DNA
tatacgaatgtataacattcttaaacaatatatcattcttggatgaatcatttcctagataccatagcatcgagttgata

SEQ ID NO: 48669 - DNA, 80 bp, synthetic construct
  source 1..80: mol_type = other DNA
tctatcggtataagtaattcacatgataagatttccataaactgctataatcgtaaaaaaaatacgtgggagataatatc

SEQ ID NO: 48670 - DNA, 80 bp, synthetic construct
  source 1..80: mol_type = other DNA
catttaccggaaactagttctgagaaacctgattatatagataattctaattgctcgttggtattcgaaatcgcgactcc

SEQ ID NO: 48671 - DNA, 80 bp, synthetic construct
  source 1..80: mol_type = other DNA
aaccatctactgtgtcaccaacaactgtagaaaacatcacgaaatctataggtaagtatagtactaaagactatgtcgaa

SEQ ID NO: 48672 - DNA, 80 bp, synthetic construct
  source 1..80: mol_type = other DNA
taaaatttttgttgataaaaattaaaaaaataacttaatttattattgatctcgtgtgtacaaccgaaatcatggcgatg

SEQ ID NO: 48673 - DNA, 80 bp, synthetic construct
  source 1..80: mol_type = other DNA
ccaatccatgtttaaaaaaatgacctatatgttttttattaattctattttaaactttatttcttattagatacttccaa

SEQ ID NO: 48674 - DNA, 80 bp, synthetic construct
  source 1..80: mol_type = other DNA
cgcttattgttttaattgtttttataaactaacattgttaattgaaaagggataacatgttacagaatataaattatata

SEQ ID NO: 48675 - DNA, 80 bp, synthetic construct
  source 1..80: mol_type = other DNA
aaatttattccatattttagaatatggggaaaatattctacatatttattctatggatgatgctaatacgaatattataa

SEQ ID NO: 48676 - DNA, 80 bp, synthetic construct
  source 1..80: mol_type = other DNA
tcaattatgtaaatatctctaatacagagtttaatactaatactactacttgtaagaatgagactgactacacaccaatg

SEQ ID NO: 48677 - DNA, 80 bp, synthetic construct
  source 1..80: mol_type = other DNA
gagacaaaagagatccactgagatgactggaaatcacttctgtctacataagaattatggaatggatacaatagatgatt

SEQ ID NO: 48678 - DNA, 80 bp, synthetic construct
  source 1..80: mol_type = other DNA
gtaattcgtatgtggataatcgtgttgtaaaaaagattactagagcaagaagatctcctaaaaaggctccaaagattatc

SEQ ID NO: 48679 - DNA, 80 bp, synthetic construct
  source 1..80: mol_type = other DNA
aaatcagaacctatagatcctaatgatgtcttggtatttagatctatggatgaattaggagcaagacctaaaatacctag

SEQ ID NO: 48680 - DNA, 80 bp, synthetic construct
  source 1..80: mol_type = other DNA
gcgataatatatattcgcaagtcagagatagagtagtatcaaatggtatgttagatagtagacgactacctaccgctact

SEQ ID NO: 48681 - DNA, 80 bp, synthetic construct
  source 1..80: mol_type = other DNA
agaactattatcggaaacgcgattgaatcaaagatgacaactgcaaatgctgttagacaaattgtcaaaaatgttaaaac

SEQ ID NO: 48682 - DNA, 80 bp, synthetic construct
  source 1..80: mol_type = other DNA
agtcgatgataattcatatagcattatttatgaaaagcttggaatgcctaccgatagaagaagtggactagtcattgatt

SEQ ID NO: 48683 - DNA, 80 bp, synthetic construct
  source 1..80: mol_type = other DNA
cagaaaatccagtcactggaatattaaacgttcctacttcaactggattatattcagaaccttataccaaacctagtaaa

SEQ ID NO: 48684 - DNA, 80 bp, synthetic construct
  source 1..80: mol_type = other DNA
gataaacgcgactattcgctaaccgcgtatagtactcccaagaatcaagctaggctggaaactatttacgaaactatcaa

SEQ ID NO: 48685 - DNA, 80 bp, synthetic construct
  source 1..80: mol_type = other DNA
aaatgaactgacatatagcgaatataaggatatcgtcatggattatcatagacgtaatggtcatcaatcaggaacttatg

SEQ ID NO: 48686 - DNA, 80 bp, synthetic construct
  source 1..80: mol_type = other DNA
atgatgttagattatcaccatcttctagattaggaacttatgatgatgttggcatatctaatactagaggagatgaacct

SEQ ID NO: 48687 - DNA, 80 bp, synthetic construct
  source 1..80: mol_type = other DNA
aatttaaggagatccaacgctatcaggagaaagccaggtcatatggaagatgttcaagttgttaatatcaatctcgataa

SEQ ID NO: 48688 - DNA, 80 bp, synthetic construct
  source 1..80: mol_type = other DNA
aagctgcaacagatgcaagaacagattgatgatatccaagtagaaattgatagaggctaacacatactcttcaggcgaga

SEQ ID NO: 48689 - DNA, 80 bp, synthetic construct
  source 1..80: mol_type = other DNA
tattatatagttaagatttttttaaaaatagaaaaaacatgtggtattagtgcaggtcgttattcttcccattgcaattg

SEQ ID NO: 48690 - DNA, 80 bp, synthetic construct
  source 1..80: mol_type = other DNA
gtaataatatccatatgactaaaatgctgttgacttttaatccgaatttcgaaatatgtaataatcatggattaacgcct

SEQ ID NO: 48691 - DNA, 80 bp, synthetic construct
  source 1..80: mol_type = other DNA
gcttatgtattagtgagtgcgtgtcatagataatgaatccgcagaatacaagggctcaaaagcagacaggaccagctcca

SEQ ID NO: 48692 - DNA, 80 bp, synthetic construct
  source 1..80: mol_type = other DNA
cttattcacttgtataatttccccattgatagaaaatatcacgctttccattcttgaagtactataagtaattatagtat

SEQ ID NO: 48693 - DNA, 80 bp, synthetic construct
  source 1..80: mol_type = other DNA
ggggattcctgaatactatcgattgatgagtaatggggttgatggttgattattgattagttttccttattctttttatt

SEQ ID NO: 48694 - DNA, 80 bp, synthetic construct
  source 1..80: mol_type = other DNA
ctgtttcattttgtacaaatatcctcaaaagtcctgacaaaattaaaatccacaaagtagcaaacaatcctgctccaagt

SEQ ID NO: 48695 - DNA, 80 bp, synthetic construct
  source 1..80: mol_type = other DNA
tcctacattcctaaactttgtatccgacatcaaatggtataaaaaagaaataaagtccgtcattacagagactgtaaaga

SEQ ID NO: 48696 - DNA, 80 bp, synthetic construct
  source 1..80: mol_type = other DNA
acagtgagaggatcgactccatagtggacaacattaatacagacgataacttgatttcaaaattaccaatggagatacaa

SEQ ID NO: 48697 - DNA, 80 bp, synthetic construct
  source 1..80: mol_type = other DNA
ttttctttcgcacatcgctaattatgaaaaagtaaatgatgaaatgtatgagatgggcgagatggacgagattgtgagca

SEQ ID NO: 48698 - DNA, 80 bp, synthetic construct
  source 1..80: mol_type = other DNA
gaacgattgtgcaacaggtcatattctcataatgttactcaattggcacgaacaaaaatacgggaaattacaaaaggaag

SEQ ID NO: 48699 - DNA, 80 bp, synthetic construct
  source 1..80: mol_type = other DNA
ccaaacaccgaccaatgataagatttgccaatccgtaacggaaattacagagtccgagtcagatccagatcccgaggtgg

SEQ ID NO: 48700 - DNA, 80 bp, synthetic construct
  source 1..80: mol_type = other DNA
aaattatatcattgtctaatagatatttgatgcatcttatggatcccacttcgacagccatcttaaaatcggtagaatca

SEQ ID NO: 48701 - DNA, 80 bp, synthetic construct
  source 1..80: mol_type = other DNA
catctacataatctacgatattattacacataaacatcggcaacatactattgtccattatctaagtccggttgatccaa

SEQ ID NO: 48702 - DNA, 80 bp, synthetic construct
  source 1..80: mol_type = other DNA
tcctatatcaatgccttttagggacagaccagacctaggagctattctaccatagcagaacttaggcatggacatactaa

SEQ ID NO: 48703 - DNA, 80 bp, synthetic construct
  source 1..80: mol_type = other DNA
ttattgttagcgggtaccccgctagcatacagtctggggctattcatcggaggaattggaatccaattgtttgatatata

SEQ ID NO: 48704 - DNA, 80 bp, synthetic construct
  source 1..80: mol_type = other DNA
ctcgattagtaccacatgaacctctacaactatgacaccaaggagaacgattatatattgacgtgaatgtatcacccgga

SEQ ID NO: 48705 - DNA, 80 bp, synthetic construct
  source 1..80: mol_type = other DNA
ccgtcactggctgcaaaaaacgccaatacatgttttataaaatatttttcgtctggtgttagtttattccaatcattgat

SEQ ID NO: 48706 - DNA, 80 bp, synthetic construct
  source 1..80: mol_type = other DNA
tgaatagcacaagtgacattagtagggatagaatgttgagctaatttttgtaaataactatctataaaaagattatacaa

SEQ ID NO: 48707 - DNA, 80 bp, synthetic construct
  source 1..80: mol_type = other DNA
gggtgaagaatggaaacctttaatctatatttatcacagtctgttttggtacacatgatgaattcttctaatgctgtact

SEQ ID NO: 48708 - DNA, 80 bp, synthetic construct
  source 1..80: mol_type = other DNA
ttaatacgttcattaaaaacaaactttttatcctttagatgaattattattggttcattggaatcaaaaagtaagatatt

SEQ ID NO: 48709 - DNA, 80 bp, synthetic construct
  source 1..80: mol_type = other DNA
tacactattattcagaaaatgttttatgacatctagatcaacatattgagccatttgtatatacagatgcaatatctctg

SEQ ID NO: 48710 - DNA, 80 bp, synthetic construct
  source 1..80: mol_type = other DNA
gtatattagttatcttgttatcgtccatgtaaatctttataatttcttcgtctatattcatcgcattatatagtatataa

SEQ ID NO: 48711 - DNA, 80 bp, synthetic construct
  source 1..80: mol_type = other DNA
ataaccttggctgtctcattcaatagggtagtgatatttgtatgagtgatattgatatctttttgaattgtttcttttag

SEQ ID NO: 48712 - DNA, 80 bp, synthetic construct
  source 1..80: mol_type = other DNA
gtcattataggagttaacttcatacaacatctgagattcctatcagcacctagttcaataactttcttaaacacgcttgc

SEQ ID NO: 48713 - DNA, 80 bp, synthetic construct
  source 1..80: mol_type = other DNA
tgaaattgattcgtctctccgtaaatatgaatgtaatggagtaattagatgattgttttgttcatttatattctttccac

SEQ ID NO: 48714 - DNA, 80 bp, synthetic construct
  source 1..80: mol_type = other DNA
tgttggattcctgattattcactataatataatctagacagatagatgattcgataaatagagaagatatatcgttggta

SEQ ID NO: 48715 - DNA, 80 bp, synthetic construct
  source 1..80: mol_type = other DNA
ttctacataataattctagtacatctgtgtctacgtacatattaccgagatatgtatgcaatataccagatccatattcg

SEQ ID NO: 48716 - DNA, 80 bp, synthetic construct
  source 1..80: mol_type = other DNA
tttttataattaatatctacgcctttagcaatcatccatttaaccaattttatgtcgatgcctatcgtgttatgtgcttt

SEQ ID NO: 48717 - DNA, 80 bp, synthetic construct
  source 1..80: mol_type = other DNA
gaaatatacagagaatatgttactactatatttgccactgttttcataacgactatcctcgtcctcatcatcactatcac

SEQ ID NO: 48718 - DNA, 80 bp, synthetic construct
  source 1..80: mol_type = other DNA
tatcactatcatcattatcatcatagtctattaaacacaaatcatctacatttataacaacattctcatcattaattagt

SEQ ID NO: 48719 - DNA, 80 bp, synthetic construct
  source 1..80: mol_type = other DNA
tacggcttgaactaattatataatgacgatgaaatcgagtagtaacttctaatacagacttgatatcattatcatatgtt

SEQ ID NO: 48720 - DNA, 80 bp, synthetic construct
  source 1..80: mol_type = other DNA
aatagattatttttaaatactgatctaacatatatgtcgtaactatcatactgattctcacaatcccgtgatgtagcagt

SEQ ID NO: 48721 - DNA, 80 bp, synthetic construct
  source 1..80: mol_type = other DNA
agttggtgcatggtctaatatcgttaaaatgtatcgtatataatagttttctgacgtggagtacagaattttcggttaat

SEQ ID NO: 48722 - DNA, 80 bp, synthetic construct
  source 1..80: mol_type = other DNA
agaattcaactatatcgacatatttcatttgtatacacataaccattactaacgtagaatgtataggaagagatgtaacg

SEQ ID NO: 48723 - DNA, 80 bp, synthetic construct
  source 1..80: mol_type = other DNA
ttaattttgttatagtagatatcaaatccaatggagctacagttcttggcttaaacagatatagtttttctggaacgaat

SEQ ID NO: 48724 - DNA, 80 bp, synthetic construct
  source 1..80: mol_type = other DNA
atgtttaacagcaacacattcaatattgtattgttatttttatattattagtttatattactgaattaataatataaaat

SEQ ID NO: 48725 - DNA, 80 bp, synthetic construct
  source 1..80: mol_type = other DNA
cttctagtttcgctagtacctttattaattctctcaggtacagattttgaattcgacgatgccgagtatttcatcgttgt

SEQ ID NO: 48726 - DNA, 80 bp, synthetic construct
  source 1..80: mol_type = other DNA
acaaaatccatcaaaaatgtcgatgaaatatctgatgttgttgttcgctgctatgataatcagatcattcgccgatagtg

SEQ ID NO: 48727 - DNA, 80 bp, synthetic construct
  source 1..80: mol_type = other DNA
gacactctatatctagaaataagtacgatcttgggatatcgaatctaggtatttctttagcgaaacagttacgtggatcg

SEQ ID NO: 48728 - DNA, 80 bp, synthetic construct
  source 1..80: mol_type = other DNA
tgtctcgccatttcgacatctggatttcagatataaaaatctgttttcaccatgactttcgaaccaattaatacaccgaa

SEQ ID NO: 48729 - DNA, 80 bp, synthetic construct
  source 1..80: mol_type = other DNA
taagaaatagttgatgcatcagaatgagaataaaaatattttagtgactccatcagaaaggtttaatattttgtgagacg

SEQ ID NO: 48730 - DNA, 80 bp, synthetic construct
  source 1..80: mol_type = other DNA
attcttgatctcatcattccataattttctctcggttaaaactctaaggagatgcggattaactacttgaaattctccag

SEQ ID NO: 48731 - DNA, 80 bp, synthetic construct
  source 1..80: mol_type = other DNA
aatgattccatgatcaagagtgatttgagaacatcctccggagtattaatgggcttagtaaacagtccatcgttgcaata

SEQ ID NO: 48732 - DNA, 80 bp, synthetic construct
  source 1..80: mol_type = other DNA
ttatatccagggatagatcttgcaagttaaatagaatgctcttaaataatgtcatttttttatccgctaaaaatttaaag

SEQ ID NO: 48733 - DNA, 80 bp, synthetic construct
  source 1..80: mol_type = other DNA
tgaataaaacatcaatgtcgcaatttgtattatccaatacagaatgtctgtgattcgtgttaaaaccatcggagaaggaa

SEQ ID NO: 48734 - DNA, 80 bp, synthetic construct
  source 1..80: mol_type = other DNA
tgtctttaagtatatacgataagatatgtttattcataaacgcgtcaaatttttcatgaatcgctaaggagtttaagaat

SEQ ID NO: 48735 - DNA, 80 bp, synthetic construct
  source 1..80: mol_type = other DNA
aattactaaatctgtatatctttccatttatcatggaaaagaatttaccagatatcttcttttttccaaactgcgttaat

SEQ ID NO: 48736 - DNA, 80 bp, synthetic construct
  source 1..80: mol_type = other DNA
ggaatatatagactcgttcgatattagtacagaaacatggaataaattattatccaattattatatgaagatgatagagt

SEQ ID NO: 48737 - DNA, 80 bp, synthetic construct
  source 1..80: mol_type = other DNA
ataattctctgatgtcattccttatacaatcaaattcattattaaacagtttaatagtctgtagacctttatcgttgtaa

SEQ ID NO: 48738 - DNA, 80 bp, synthetic construct
  source 1..80: mol_type = other DNA
taacaatgcactacattgtttcctcgtctatctatatgttttgataagttatgacacgtttcaatctctagttttatttt

SEQ ID NO: 48739 - DNA, 80 bp, synthetic construct
  source 1..80: mol_type = other DNA
aatactacaatacggtttaccgaaaataatcagtacgttcttcatttatgggtatcaaaaacttaaaatcgttactgctg

SEQ ID NO: 48740 - DNA, 80 bp, synthetic construct
  source 1..80: mol_type = other DNA
tatagccgtcgccaattgtgtcagaaacttagaagagttaactacggtattcataaaatacgtaaacggatgggtaaaaa

SEQ ID NO: 48741 - DNA, 80 bp, synthetic construct
  source 1..80: mol_type = other DNA
tctactcgtatattcctccttgtcaatgcactgttcaagaatttatattttccgcattagatgaaaaatggaacgatttt

SEQ ID NO: 48742 - DNA, 80 bp, synthetic construct
  source 1..80: mol_type = other DNA
ttaaaggatgtactcgtcagtgtaaagaacgaatgttgtaggttaaaattatctacacaaatagaacctcaacgtaactt

SEQ ID NO: 48743 - DNA, 80 bp, synthetic construct
  source 1..80: mol_type = other DNA
ggggatacgttcgatagaaacatatgccatcagtggatcggttcagcatttaataggagtgatagaactgtagagggtca

SEQ ID NO: 48744 - DNA, 80 bp, synthetic construct
  source 1..80: mol_type = other DNA
tattgataatattttaatagattaacatggaagttatcgctgatcgtttagacgatatagtgaaacaaaatatagcggat

SEQ ID NO: 48745 - DNA, 80 bp, synthetic construct
  source 1..80: mol_type = other DNA
attaattgattaacagaaaaaacaatgttcgttctgggaatagaaaccaaatcaaaacaaaattcgttagaatatatgcc

SEQ ID NO: 48746 - DNA, 80 bp, synthetic construct
  source 1..80: mol_type = other DNA
ctatcgtcctaatataccattaaaaattgttagatttttccgcaataacatgataactggcgtagagatagccgatagat

SEQ ID NO: 48747 - DNA, 80 bp, synthetic construct
  source 1..80: mol_type = other DNA
aaaccaattaacaagaatacgccaaggaaagtttatcaaaaataaaatacatttattgcctggtgattgggtagaagtag

SEQ ID NO: 48748 - DNA, 80 bp, synthetic construct
  source 1..80: mol_type = other DNA
atcagagctaccgaaggagatactatcaaaatatctcccggaattgccaactctcaaaatgctgatttcgacggagatga

SEQ ID NO: 48749 - DNA, 80 bp, synthetic construct
  source 1..80: mol_type = other DNA
ttgaaaagttctatgaaaaactcaattatactctaggtggtggaactcctattggaattatttctgcacaggtattgtct

SEQ ID NO: 48750 - DNA, 80 bp, synthetic construct
  source 1..80: mol_type = other DNA
ggaatggggtatggagacattcattgaggacgaggataatattagatttactgtctatctaaatttcgttgaaccagagg

SEQ ID NO: 48751 - DNA, 80 bp, synthetic construct
  source 1..80: mol_type = other DNA
atatcggtagttgtatcatctaccaacggtatatgaataatattaatattagagttaggtaatgtatatttatccatcgt

SEQ ID NO: 48752 - DNA, 80 bp, synthetic construct
  source 1..80: mol_type = other DNA
cgtgaccgctgtagagctcgatgatagcgacggggatgatgatgatgaacctatggtacaagttgaagctggtaaagtaa

SEQ ID NO: 48753 - DNA, 80 bp, synthetic construct
  source 1..80: mol_type = other DNA
ttaagaaaattattactagaatctctgcagtatcaactgttctagaggatgttcaagcagctggtatctctagacaattt

SEQ ID NO: 48754 - DNA, 80 bp, synthetic construct
  source 1..80: mol_type = other DNA
attctttctccacctattaacgcacctataaagacttttatgttgcctaaacaagatatagtaggtatggatctggaaaa

SEQ ID NO: 48755 - DNA, 80 bp, synthetic construct
  source 1..80: mol_type = other DNA
atcttggttatattattagatatccagttaagagaataatagattctgaagtagtagtctttggtgaggcagttaaggat

SEQ ID NO: 48756 - DNA, 80 bp, synthetic construct
  source 1..80: mol_type = other DNA
tcgaatctaaactagtggatatttgtgatcggatagtattcaagtcaaagaaatacgaaggtccttttactacaactagt

SEQ ID NO: 48757 - DNA, 80 bp, synthetic construct
  source 1..80: mol_type = other DNA
tccatactcatcatcctcatcctcataaagaacattgcagccattttttatgaacaaatcaataatttcaggaacaggat

SEQ ID NO: 48758 - DNA, 80 bp, synthetic construct
  source 1..80: mol_type = other DNA
ttagaacatctgattagaagccactatagagtttctaaacatataacaatagttagatacaaggataccgaagaattaaa

SEQ ID NO: 48759 - DNA, 80 bp, synthetic construct
  source 1..80: mol_type = other DNA
cttatcacgatgattgggaaccagtcatgaatcaattagtagagttttataacgaagtagccagttggctgctacgagac

SEQ ID NO: 48760 - DNA, 80 bp, synthetic construct
  source 1..80: mol_type = other DNA
tattacttaagttgtaaattaggagaaacaaaaagtcacgcgatttactgggataagatttctaagttactgctgcatca

SEQ ID NO: 48761 - DNA, 80 bp, synthetic construct
  source 1..80: mol_type = other DNA
tgttctaaatggatgcggttattagaggtaatgatgttatctttgttcttaagactataggtgtcccgtcagcatgcaga

SEQ ID NO: 48762 - DNA, 80 bp, synthetic construct
  source 1..80: mol_type = other DNA
gagagagcatgaagaagatttagtatttagcagtgtggatatgatccaagagggtgagatagtcgttctcgttcagaatc

SEQ ID NO: 48763 - DNA, 80 bp, synthetic construct
  source 1..80: mol_type = other DNA
acatccgcatcaactatcgttggaaaatgatgctattagaatttacaaaactggtaatccacatagttgtaaagttaaaa

SEQ ID NO: 48764 - DNA, 80 bp, synthetic construct
  source 1..80: mol_type = other DNA
ggggtaagctgtctccaatttttgtgtaatggattagtgccactgtctagtagtagtttgacgacctcgacattattaca

SEQ ID NO: 48765 - DNA, 80 bp, synthetic construct
  source 1..80: mol_type = other DNA
ctagagaattaatatctattaaacgaataaaagatattccaagatcaaaagacacgcacgtgtttgctgcgtgtataaca

SEQ ID NO: 48766 - DNA, 80 bp, synthetic construct
  source 1..80: mol_type = other DNA
tatctttagagtatccactaaactattacggtttatgtattacaatgaactaagagaaatctttagacggttgagaaaag

SEQ ID NO: 48767 - DNA, 80 bp, synthetic construct
  source 1..80: mol_type = other DNA
cctatggtgtcataaacgagtatccgtgtccgctattttattaactactgataacaaaatattagtatgtaacagacgag

SEQ ID NO: 48768 - DNA, 80 bp, synthetic construct
  source 1..80: mol_type = other DNA
ggatacaaactttgatttggccctcgccacctacaacgcctggttcataggtggtacagctccagatccagagcgcccca

SEQ ID NO: 48769 - DNA, 80 bp, synthetic construct
  source 1..80: mol_type = other DNA
agggcaatggctccaaattgccaacctatcagaacggtggccatgttggccaggatgttgatccgcctggtgcgactggc

SEQ ID NO: 48770 - DNA, 80 bp, synthetic construct
  source 1..80: mol_type = other DNA
ctgaaggtgcacccaaattagtgtttgagatggagggcaatggctccaaattgccaacctatcagaacggtggccatgtt

SEQ ID NO: 48771 - DNA, 80 bp, synthetic construct
  source 1..80: mol_type = other DNA
tcatggagcgattcagacccaaaacaatcagcaccgagatatggcagatgtcggaacattcgactgagtggatatctgcc

SEQ ID NO: 48772 - DNA, 80 bp, synthetic construct
  source 1..80: mol_type = other DNA
tactaaagaagctgtaatgagcaacctcaaagaagtacaagacaatattacagctcacgagcagcagcttgtaacagcca

SEQ ID NO: 48773 - DNA, 80 bp, synthetic construct
  source 1..80: mol_type = other DNA
gatcaaaaaatcattatactgtatatgctgagttggggaaaggaagcagttaatcatttccatcttggagatgatatgga

SEQ ID NO: 48774 - DNA, 80 bp, synthetic construct
  source 1..80: mol_type = other DNA
gggcatattatgattgtattcatgtgattatctgttttatgttagttgtatgtttaaagtcagtgtattgacattgttta

SEQ ID NO: 48775 - DNA, 80 bp, synthetic construct
  source 1..80: mol_type = other DNA
gtaggtttattttaattattattgttattgatagtcaacatatgttagtcaattattgttaagttagtgttgagttcatg

SEQ ID NO: 48776 - DNA, 80 bp, synthetic construct
  source 1..80: mol_type = other DNA
tagtcaattattattaagttagtgttaagttcaggtaaatcatgttaatttagtgttaagttagtaataagttagtgata

SEQ ID NO: 48777 - DNA, 80 bp, synthetic construct
  source 1..80: mol_type = other DNA
agttagtgttaactgtcattaagattcaaaattatagccattattcatatataggactgtgatcatataatgcctgatag

SEQ ID NO: 48778 - DNA, 80 bp, synthetic construct
  source 1..80: mol_type = other DNA
actggaacattatgttatttgcactatcatttaaacactactaattaaatgcaaactgatgtaaatttcgttattgctgc

SEQ ID NO: 48779 - DNA, 80 bp, synthetic construct
  source 1..80: mol_type = other DNA
acaacaactcctacctcatccctaaaccctatccctttaaactacctcttaaagtctacctcagatttcttgtttcttga

SEQ ID NO: 48780 - DNA, 80 bp, synthetic construct
  source 1..80: mol_type = other DNA
gaacttcttaaaggaagaatgtccatttcttcctaagcccaagggacagactgatccttatctttccactaatgctgctt

SEQ ID NO: 48781 - DNA, 80 bp, synthetic construct
  source 1..80: mol_type = other DNA
actttgtaaacagacaaacacaagttgatgaatccaaggtgcctgacatcgtagacttgataggaactgcagaggcagag

SEQ ID NO: 48782 - DNA, 80 bp, synthetic construct
  source 1..80: mol_type = other DNA
tggctggaattcctgaactgggtgcctttttctcaatcctacaagatatgagaaacacaatcatggcctctaagtcagtc

SEQ ID NO: 48783 - DNA, 80 bp, synthetic construct
  source 1..80: mol_type = other DNA
tgctaaggtaaaagagatttccaaccaagacccgctaaagctgtaagatagctttattttccaggtggctttccgggctt

SEQ ID NO: 48784 - DNA, 80 bp, synthetic construct
  source 1..80: mol_type = other DNA
tgggtggtagttcttatgggtgggattgtttacttacatgggttcagggccatattaaatgcactataattaagatagcc

SEQ ID NO: 48785 - DNA, 80 bp, synthetic construct
  source 1..80: mol_type = other DNA
attttaagtaattgcactacatagttatatagagttgatagttgattgttatatgattgatcaaatgatgcattgctgat

SEQ ID NO: 48786 - DNA, 80 bp, synthetic construct
  source 1..80: mol_type = other DNA
tgatcaaattaatgaatttaagcacgttaattattagagttaattattagagttatgttatagtgataagttacgggtat

SEQ ID NO: 48787 - DNA, 80 bp, synthetic construct
  source 1..80: mol_type = other DNA
aagtttaattaggcttagattaagtataattaggttaagttaggtttaagttgagtataggttaggtgtgattgtaggtt

SEQ ID NO: 48788 - DNA, 80 bp, synthetic construct
  source 1..80: mol_type = other DNA
taagttcatttattttaatctactagtaattaatgccattggatgtaaatttcgttccaagcaaaagctttgcatactaa

SEQ ID NO: 48789 - DNA, 80 bp, synthetic construct
  source 1..80: mol_type = other DNA
cactaactttacacacttctacctcatccattctccccatccctctattctacctcaattatactacctcatcagtgatt

SEQ ID NO: 48790 - DNA, 80 bp, synthetic construct
  source 1..80: mol_type = other DNA
atggggacaaatagagcctatttcattaaccggcagcggcaagttgatgagtcaaaaatacccgatatagttgatctaat

SEQ ID NO: 48791 - DNA, 80 bp, synthetic construct
  source 1..80: mol_type = other DNA
tgattatggaaacatatactataaaaataaacatcaataacttaggactcaggattgtgtaaattggaattggatttggg

SEQ ID NO: 48792 - DNA, 80 bp, synthetic construct
  source 1..80: mol_type = other DNA
ttacaaatatagggaaagatcaaccattgtgtaatcacgagaagtgtagtggatcagggtcatatacacctatatgtctt

SEQ ID NO: 48793 - DNA, 80 bp, synthetic construct
  source 1..80: mol_type = other DNA
attatggtgtttatcttgcctcatcgtcttggaaccgatacctgaaatttggaacaactaatactctgataccgactgag

SEQ ID NO: 48794 - DNA, 80 bp, synthetic construct
  source 1..80: mol_type = other DNA
acataagaaaggggacaaacaacgaattttcgcccactcatacaaacttaagaaatcttgtataaaacgatcaagaatta

SEQ ID NO: 48795 - DNA, 80 bp, synthetic construct
  source 1..80: mol_type = other DNA
ccgatctagctactaccagtataacaatcaacaatagatctataagataacattcaaaatttcataaataaaatacaaaa

SEQ ID NO: 48796 - DNA, 80 bp, synthetic construct
  source 1..80: mol_type = other DNA
tgagtatatacaacaatatgtaatatgaaaattttaattattgggctattgtattgaactaaattaaatcaataattttt

SEQ ID NO: 48797 - DNA, 80 bp, synthetic construct
  source 1..80: mol_type = other DNA
agggcttgtaacaaattagtaaatttaataatttctaatctattttattgattcagcggattttgtgaaagccaatagta

SEQ ID NO: 48798 - DNA, 80 bp, synthetic construct
  source 1..80: mol_type = other DNA
gtagactgtttttttaacctatgatttggtataacagatggtcatggaaactgatactagagaatcaagtttaatacaat

SEQ ID NO: 48799 - DNA, 80 bp, synthetic construct
  source 1..80: mol_type = other DNA
ttgtcttaacctatggtgccgggtgattaacattaaactataatagtaattaattgtacgaatttgagatcatgcaatgt

SEQ ID NO: 48800 - DNA, 80 bp, synthetic construct
  source 1..80: mol_type = other DNA
tggttgaaaactacaaaaagtcaagttgagaatctacacggattgaattaacctgatttccagctctatcctggattact

SEQ ID NO: 48801 - DNA, 80 bp, synthetic construct
  source 1..80: mol_type = other DNA
tgaagtttgaactctaataatgtgttagttgataatctaataagtatatatgtaattattttaaaattaatagttagtta

SEQ ID NO: 48802 - DNA, 80 bp, synthetic construct
  source 1..80: mol_type = other DNA
gccggttcagttaatcggcaattggcagaagaactccagcttaccgctgaacaactagcagagataaaagacatgatgag

SEQ ID NO: 48803 - DNA, 80 bp, synthetic construct
  source 1..80: mol_type = other DNA
gaagatttgaataaagagatcttaaaagaaaaggagaaagaagctcaggagaaaagagacaaaaggagaggcaaaagacc

SEQ ID NO: 48804 - DNA, 80 bp, synthetic construct
  source 1..80: mol_type = other DNA
ttataaaatcaaacatttgccacctacgcaggaagagaagaaaaggttgttcatatcttgcctacgctctatgctagatt

SEQ ID NO: 48805 - DNA, 80 bp, synthetic construct
  source 1..80: mol_type = other DNA
aacaataatagaggtttccttgtaatagttttatagtaaaagagttaagttttttatctttagaattagtgttatctata

SEQ ID NO: 48806 - DNA, 80 bp, synthetic construct
  source 1..80: mol_type = other DNA
acataaaggtagtgattaagctcacaagagtcttattcgaatgaacatattgaatatgaatttcacagatgtctcagtat

SEQ ID NO: 48807 - DNA, 80 bp, synthetic construct
  source 1..80: mol_type = other DNA
agaggtgactgtacaaaggcatgagacaactgttcaagcaagagaaggtaaatttaatctagcatctggaggtattgaga

SEQ ID NO: 48808 - DNA, 80 bp, synthetic construct
  source 1..80: mol_type = other DNA
acttattaacagaagatgacgatgaattcactgggtcaagatacctggcagaaacaaacctagagcgtccaagaagtcag

SEQ ID NO: 48809 - DNA, 80 bp, synthetic construct
  source 1..80: mol_type = other DNA
ggaatttctccctatcatgaaagctcatgctatattttgcggtatcataattaatgggtaccgtgataggcatggaggtg

SEQ ID NO: 48810 - DNA, 80 bp, synthetic construct
  source 1..80: mol_type = other DNA
gaaatctgctgccaagaatggcggtcattttgtggattccacttcaaatgttttatgcctttagaactagataatgatct

SEQ ID NO: 48811 - DNA, 80 bp, synthetic construct
  source 1..80: mol_type = other DNA
acaggtaggcagactgtttgccaaaatgacttataagatgagggcatgtcaagtagttgcagaatccctgattgcaaatg

SEQ ID NO: 48812 - DNA, 80 bp, synthetic construct
  source 1..80: mol_type = other DNA
agaacaggggacttcttccaatccagaggacgaggacaagatctagaagatctagatgatatggactcagatcttaagaa

SEQ ID NO: 48813 - DNA, 80 bp, synthetic construct
  source 1..80: mol_type = other DNA
tgccaaatagtactataaacaaagatatcagacaaatactcaaatccaaagttcttgaaaatcaaattggtaacatacaa

SEQ ID NO: 48814 - DNA, 80 bp, synthetic construct
  source 1..80: mol_type = other DNA
cagcaaagttaagaggagattgaatttggaccaatctctgattgataataattttatcccaaaagataggtcagatgata

SEQ ID NO: 48815 - DNA, 80 bp, synthetic construct
  source 1..80: mol_type = other DNA
tttgctgaaagggttgatgagatttacggattaccaggtttttttaattggttacataagaggcttgagaattgtgttct

SEQ ID NO: 48816 - DNA, 80 bp, synthetic construct
  source 1..80: mol_type = other DNA
ctaatttatcataccagcgtaaaaaagacttgagtgctgaacaagctaaaatttacttcaaacaattgagaaaaaatctt

SEQ ID NO: 48817 - DNA, 80 bp, synthetic construct
  source 1..80: mol_type = other DNA
taggatacttagggctatgagggaggaaagaatcaacgaagagaggtataatgcacttggtagtaataaagaaacatctg

SEQ ID NO: 48818 - DNA, 80 bp, synthetic construct
  source 1..80: mol_type = other DNA
gccgcattagggcacaatttaaaattgacagaaactataataagtacacatttctttgtatactctaaacgaatttatta

SEQ ID NO: 48819 - DNA, 80 bp, synthetic construct
  source 1..80: mol_type = other DNA
taaccaaaactatcaaaaatgttacagcaagactagtattatctcatgcgaaaaatcctattctaaaaggcctcttccat

SEQ ID NO: 48820 - DNA, 80 bp, synthetic construct
  source 1..80: mol_type = other DNA
ttacaacagctagataccctctgatcaacatcggcccacaatctaatctttccgatactggaacaggagatgggagtata

SEQ ID NO: 48821 - DNA, 80 bp, synthetic construct
  source 1..80: mol_type = other DNA
attggcagcaactgccacattgacaactaagataattgtgtacaatcctgcaggaaaaaatgcagccttaagatgggaag

SEQ ID NO: 48822 - DNA, 80 bp, synthetic construct
  source 1..80: mol_type = other DNA
acattggatcaactactgatgaaagatcagaaataaaattaggacatgttaaatctactagtagagctcttagagcagca

SEQ ID NO: 48823 - DNA, 80 bp, synthetic construct
  source 1..80: mol_type = other DNA
attagaattgcgactgtttatacatgggcatatggtgatgacgaggaatcatggttggaagcatggtatttagcctctca

SEQ ID NO: 48824 - DNA, 80 bp, synthetic construct
  source 1..80: mol_type = other DNA
aaacctaacactcctgctatgtcaggattatcggatttagatgcattaaataattaaagaagcttagaaggatatagtgg

SEQ ID NO: 48825 - DNA, 80 bp, synthetic construct
  source 1..80: mol_type = other DNA
atagaaatgtcatcagttggagttgtcaaatccttacaagaagtgccagagtacaaggaagtgagagaaaatcgtttaat

SEQ ID NO: 48826 - DNA, 80 bp, synthetic construct
  source 1..80: mol_type = other DNA
caaattggacaactcctgatctacataaagtattagcccaatcactagcccaaacaatcgtagaatccatatcgaaaaca

SEQ ID NO: 48827 - DNA, 80 bp, synthetic construct
  source 1..80: mol_type = other DNA
gatagagacatattaaaacaatttatctctattagtgcagatgataatattaacagcttaattacggagttcttactagt

SEQ ID NO: 48828 - DNA, 80 bp, synthetic construct
  source 1..80: mol_type = other DNA
agatcctaatctattaagtatatatctaggtcaagcatgtgcaatcaaatggtcttttgatattcattacaaaagacctc

SEQ ID NO: 48829 - DNA, 80 bp, synthetic construct
  source 1..80: mol_type = other DNA
aaggcaaatggcagatgatagaattactaaatgacttactgtctgagacatcaattcatgtattgagagttttaacaaac

SEQ ID NO: 48830 - DNA, 80 bp, synthetic construct
  source 1..80: mol_type = other DNA
gctctgacacatcctaaaatatttagaaagttctgggattcgggtttattatcacctaattatggtccatacttttacaa

SEQ ID NO: 48831 - DNA, 80 bp, synthetic construct
  source 1..80: mol_type = other DNA
ccaagatccgacaagattggccatagatttaataatctcttcatatactatgtatttaactgtttggttagagggtagaa

SEQ ID NO: 48832 - DNA, 80 bp, synthetic construct
  source 1..80: mol_type = other DNA
atttggaatgtctaatagcagaacaagcattagatgcagttgaaatgagaacttacactattcaggcaaaacacttatgt

SEQ ID NO: 48833 - DNA, 80 bp, synthetic construct
  source 1..80: mol_type = other DNA
taatatttctaatggaattatttatagtaaagcaaggaatacaataggaatttacacaatcaataagctaacaatccatt

SEQ ID NO: 48834 - DNA, 80 bp, synthetic construct
  source 1..80: mol_type = other DNA
atggtaagcgacctttattgtaatgatttaaacccaccacatattagggaacttatgcctgatcaaaaagtcaatattat

SEQ ID NO: 48835 - DNA, 80 bp, synthetic construct
  source 1..80: mol_type = other DNA
ggataattttataactcaatcaaaattcatgactaacggctccgaatcatggaatgtacaacctttgagactttgtactt

SEQ ID NO: 48836 - DNA, 80 bp, synthetic construct
  source 1..80: mol_type = other DNA
atgctgcttctttaacatatttgagaagaggtattgttaaacaattacgtattagacaggatattgacagaaattttgat

SEQ ID NO: 48837 - DNA, 80 bp, synthetic construct
  source 1..80: mol_type = other DNA
gtcatggagatagatcacagacaatctagatttacacttgagagtgccttaaattacaagcctaaaaatgcatgtacagt

SEQ ID NO: 48838 - DNA, 80 bp, synthetic construct
  source 1..80: mol_type = other DNA
catgaatttgcaagatatcgataggccgttaaattcaacccttaggattaatattgaagatatgattcctacaaatggct

SEQ ID NO: 48839 - DNA, 80 bp, synthetic construct
  source 1..80: mol_type = other DNA
gggaatcacataaatatagacgagttggaatcaattcgacatcaggctataaggcattagagttatatacaataattaag

SEQ ID NO: 48840 - DNA, 80 bp, synthetic construct
  source 1..80: mol_type = other DNA
agatattataaagatcattcaagcagattatttttaggagaaggttctgggactatgttgagtgtatattataaattact

SEQ ID NO: 48841 - DNA, 80 bp, synthetic construct
  source 1..80: mol_type = other DNA
tggaccagcacagtgttattacaactctggaataagtgagtatgatgtaataggacaaagagagttaagattgtatccat

SEQ ID NO: 48842 - DNA, 80 bp, synthetic construct
  source 1..80: mol_type = other DNA
ctgaaacttgcatcgttgattacaataaaggagagaattatagattattaaataatattattcctttatttaatggtaga

SEQ ID NO: 48843 - DNA, 80 bp, synthetic construct
  source 1..80: mol_type = other DNA
cctgaaaccacatgggtaggtaatgaggattgttttgttcatattatgaagtctataagaagtcacactattggaatggt

SEQ ID NO: 48844 - DNA, 80 bp, synthetic construct
  source 1..80: mol_type = other DNA
catgaatgtcacggtgctaaacataaggattaagaataagctattcaaaccctgccttggtttagatcttttaacaatca

SEQ ID NO: 48845 - DNA, 80 bp, synthetic construct
  source 1..80: mol_type = other DNA
acatagtgatatggagagtggtcatgataaggacaatttactgatactgaatgaacatagtcatataatagccattgcaa

SEQ ID NO: 48846 - DNA, 80 bp, synthetic construct
  source 1..80: mol_type = other DNA
taaatttgatgatacctgaaggtattctaatatctaagataaacccttcattaagcttccctctgtcatccttgcttaat

SEQ ID NO: 48847 - DNA, 80 bp, synthetic construct
  source 1..80: mol_type = other DNA
atgtataaagcccatttcatagatataaaagttgcatttccaaaatatagcaatcctaattccacagagtgttatctaat

SEQ ID NO: 48848 - DNA, 80 bp, synthetic construct
  source 1..80: mol_type = other DNA
atgtacccaaccaagaatattgaccctcactactccttcgaatgtacttggccatgcaatagacaaacctgcggaatgtg

SEQ ID NO: 48849 - DNA, 80 bp, synthetic construct
  source 1..80: mol_type = other DNA
ataggactgttataaactatttacttacattaaaatttagaatatatacatcatttgaggatcaaggggtaaattctaca

SEQ ID NO: 48850 - DNA, 80 bp, synthetic construct
  source 1..80: mol_type = other DNA
gatgggtatagaaacaaaatagatcatgataatacaatatgttattcagactttgatcataattcaacatttaagaactc

SEQ ID NO: 48851 - DNA, 80 bp, synthetic construct
  source 1..80: mol_type = other DNA
tgaatttggccactctattttgaacttaagtggtgtgctaacagaagatgataaagtgttgttatcctgtggactctcat

SEQ ID NO: 48852 - DNA, 80 bp, synthetic construct
  source 1..80: mol_type = other DNA
taggtagccctattactactttattagattcttcctttctactcttgaatgaagcacttaatatatatgatcataataga

SEQ ID NO: 48853 - DNA, 80 bp, synthetic construct
  source 1..80: mol_type = other DNA
cttccaagttctttctttgagccatatcctattctagaaactacaaaactgaaaaaatatatggatagatttattaggaa

SEQ ID NO: 48854 - DNA, 80 bp, synthetic construct
  source 1..80: mol_type = other DNA
caatctttatttcactttgctctttatcatagattttgattgtaaataaatttaaatgtattatgtatagataattactt

SEQ ID NO: 48855 - DNA, 80 bp, synthetic construct
  source 1..80: mol_type = other DNA
gatatttaatatttgattttaatgattacaagaatactaatactattccaagctactattataaaagaataaagaagaac

SEQ ID NO: 48856 - DNA, 80 bp, synthetic construct
  source 1..80: mol_type = other DNA
tcattcaaacaaaattggattttagagcttgaaactaaggagatcaaaatgtggtggaaactgatctcttacgtacctat

SEQ ID NO: 48857 - DNA, 80 bp, synthetic construct
  source 1..80: mol_type = other DNA
ctacaattctgagcaccacccataattcaatgtataggaggggactagtataccagcaccaattccattttttagaaaat

SEQ ID NO: 48858 - DNA, 80 bp, synthetic construct
  source 1..80: mol_type = other DNA
agcaccaattccattttttagaaaataagatataaaaaacttaattgagttcacacaatggtaaaattcatatattttcc

SEQ ID NO: 48859 - DNA, 80 bp, synthetic construct
  source 1..80: mol_type = other DNA
atcaatgttcattataggtttataaaaatgactagaattaacctatatcattctgaacaagtgtttaagatgtaatataa

SEQ ID NO: 48860 - DNA, 80 bp, synthetic construct
  source 1..80: mol_type = other DNA
ttcctcatcatctttataattgatgtcatgaagtgagtatattctaaggtttttatgagtattttatagatttatatctt

SEQ ID NO: 48861 - DNA, 80 bp, synthetic construct
  source 1..80: mol_type = other DNA
atcagaattcagattatcaatatgattataaaaaacttaggacgcaagtataccatcaatgctcgccaccagatggcctc

SEQ ID NO: 48862 - DNA, 80 bp, synthetic construct
  source 1..80: mol_type = other DNA
agaattgtctagtgacagcataaaggtagaaatcaaacaagaaacagaagaaattgagattgaacaattacagcccatca

SEQ ID NO: 48863 - DNA, 80 bp, synthetic construct
  source 1..80: mol_type = other DNA
acttaagtcgtaggaaacaattatatcctgttaaagtagaagattcaattgacaacgaagagccttgttgtagcaagaca

SEQ ID NO: 48864 - DNA, 80 bp, synthetic construct
  source 1..80: mol_type = other DNA
ttaacaaatcagcagattagtgtgttcacagaagctgctcttaatcaggatattaagctacctaagctcaaatctgttga

SEQ ID NO: 48865 - DNA, 80 bp, synthetic construct
  source 1..80: mol_type = other DNA
tggcaaagtttgctatgaggttgatatggtcacctgctgcatcccattcggtaagggtaggggctgcattgacacttcta

SEQ ID NO: 48866 - DNA, 80 bp, synthetic construct
  source 1..80: mol_type = other DNA
tcttaataaagaagagaaagaaatacaggatagtgcatcatcatgtcacacgaagatagaatcaagcaaattcaaaatgg

SEQ ID NO: 48867 - DNA, 80 bp, synthetic construct
  source 1..80: mol_type = other DNA
tctccaaattgtcgagttggtcgagaaaattcgtaaggaaaacaaaatccagccaagctacgggagaagtgcaattggac

SEQ ID NO: 48868 - DNA, 80 bp, synthetic construct
  source 1..80: mol_type = other DNA
tcccaagtaccaaagacagaacatcagcgtgggaacttttccataaagttgcacttgatgccgatagacatgaagagggg

SEQ ID NO: 48869 - DNA, 80 bp, synthetic construct
  source 1..80: mol_type = other DNA
attggtgaagaaggagatagcaacactccagtacgagatgatagtaggaatgaacatgatgatgatggtgttgatagcag

SEQ ID NO: 48870 - DNA, 80 bp, synthetic construct
  source 1..80: mol_type = other DNA
aggagaaagaacatataaagaatccacctgggatgacgacgaaccaatcatacttgaaaattcattggcttcaaacattc

SEQ ID NO: 48871 - DNA, 80 bp, synthetic construct
  source 1..80: mol_type = other DNA
aacagaatgattcaggaagaaaaaatacctacaggttcactaataaccagaatgatgactgcaggagtggtaaaccatgt

SEQ ID NO: 48872 - DNA, 80 bp, synthetic construct
  source 1..80: mol_type = other DNA
ggaagcacaaaaggcaatggatgtgttagccatgatcaggctaacatgtccagcatactcgagaatcatatacctccaga

SEQ ID NO: 48873 - DNA, 80 bp, synthetic construct
  source 1..80: mol_type = other DNA
acgaattgttgaaggagctgatcaaaagagggggtttgtcatgaatcccaatgcaaaggaatatgttcctaaaatgagaa

SEQ ID NO: 48874 - DNA, 80 bp, synthetic construct
  source 1..80: mol_type = other DNA
caacagtatggtcagccaatgatggattagtagaggctatgggatcgtcagatcgaaacaacaatgtcagagataatatt

SEQ ID NO: 48875 - DNA, 80 bp, synthetic construct
  source 1..80: mol_type = other DNA
ataccacctgcaaaaccagtaatgcaaaagaaaataataaacagtgataaatattctgatgtccagattccagcaaaacc

SEQ ID NO: 48876 - DNA, 80 bp, synthetic construct
  source 1..80: mol_type = other DNA
acatcccatgcagaaaatcctggatcaatgattagatcacttgtcaatgacccagacatagaagtggtgatcattgatgt

SEQ ID NO: 48877 - DNA, 80 bp, synthetic construct
  source 1..80: mol_type = other DNA
gataccagtgcctaaaaagagaagtggggtgatagttgaatcagcaggaaccattgaacctatagataatgagcctgagt

SEQ ID NO: 48878 - DNA, 80 bp, synthetic construct
  source 1..80: mol_type = other DNA
atgaggatatggaaggtgaaggacgtggagcaccaacatccacacctatatcaatgagtcctacaacaccaagtacatct

SEQ ID NO: 48879 - DNA, 80 bp, synthetic construct
  source 1..80: mol_type = other DNA
tcctcacaggaaacggtgttcaatctatccgacattgtaacagataatgatcgtagaaacatgatctcagatcaatctgt

SEQ ID NO: 48880 - DNA, 80 bp, synthetic construct
  source 1..80: mol_type = other DNA
taaagctttggacaaacaaactgcaagggaaagaaagagaagcaagagtagtgatcatacatatcatagactacaagaga

SEQ ID NO: 48881 - DNA, 80 bp, synthetic construct
  source 1..80: mol_type = other DNA
aaaccggaagtgaagcaagatccttgtcagaaggaagggccaaatctgagaaaaagacgggcaaaaaattgagagctctt

SEQ ID NO: 48882 - DNA, 80 bp, synthetic construct
  source 1..80: mol_type = other DNA
tcaaacactgatgcaggtatgaatgactatttcaagatagacaatgagaaaaagtgtgatgttaaaaagggcacagacga

SEQ ID NO: 48883 - DNA, 80 bp, synthetic construct
  source 1..80: mol_type = other DNA
gaatacagtctgtcctgggatggttcagaaatcagggtcgaagaatggtgcaaccctacatgcgccaggattaaatcatg

SEQ ID NO: 48884 - DNA, 80 bp, synthetic construct
  source 1..80: mol_type = other DNA
caagtgcaggacatgccccagatactgtcaacaggaagattgcacaggaatcgagtatgaaacaaaataaactgattact

SEQ ID NO: 48885 - DNA, 80 bp, synthetic construct
  source 1..80: mol_type = other DNA
aatcataataatgagacaggagaggaaaactctaatcctgaagctgctagttttgatgattattacaataatatgataat

SEQ ID NO: 48886 - DNA, 80 bp, synthetic construct
  source 1..80: mol_type = other DNA
caatgaatttgacaatggcatcccaaaactagagaggagaggagaaaaggctgaacaacaaatggctagctacagacgga

SEQ ID NO: 48887 - DNA, 80 bp, synthetic construct
  source 1..80: mol_type = other DNA
ctcaatccctcaagaagaaataatgaaagaaatttatagaaatcagctagaaatattaactaaactaagtgagaatcaga

SEQ ID NO: 48888 - DNA, 80 bp, synthetic construct
  source 1..80: mol_type = other DNA
ctctaacaagtgctataaaggatatacagactactcaaaaagcaactataagtagaattgaatcattggagagaagcatt

SEQ ID NO: 48889 - DNA, 80 bp, synthetic construct
  source 1..80: mol_type = other DNA
gggaaacttggattagcagtatcttcaatggaacagatgctagcgtctatgagaattatgatacctgggaagcctacaga

SEQ ID NO: 48890 - DNA, 80 bp, synthetic construct
  source 1..80: mol_type = other DNA
tatcaagagccctgaaaagacaaagaatccaatgctaaaaccagttatcggaagagaaacattgaaagctgaggaggtga

SEQ ID NO: 48891 - DNA, 80 bp, synthetic construct
  source 1..80: mol_type = other DNA
ttgatatagattttgaatcaacgggtaattctaaaactaaaggtacgattaagaagaatttatttatagaaccaatagat

SEQ ID NO: 48892 - DNA, 80 bp, synthetic construct
  source 1..80: mol_type = other DNA
gacaagaaaactaatgcatctcaattcattccggatgatgattttagcactataaacacattatatgcacttataatcaa

SEQ ID NO: 48893 - DNA, 80 bp, synthetic construct
  source 1..80: mol_type = other DNA
tagggttaaagatacagaacttaaggatgtattcctggcagcattaaagaaggccgaaactagaaaagatatcgatatgc

SEQ ID NO: 48894 - DNA, 80 bp, synthetic construct
  source 1..80: mol_type = other DNA
tgtatgcaaatgttgcaagggcaataaagggtaagctataattcatatataagataaatggtatgatgatgcattaagat

SEQ ID NO: 48895 - DNA, 80 bp, synthetic construct
  source 1..80: mol_type = other DNA
tatattttatactcacattattaatattagtattatttttatcttttattattaataaaatagttatctaaatatataat

SEQ ID NO: 48896 - DNA, 80 bp, synthetic construct
  source 1..80: mol_type = other DNA
atcatattacactaataattaatcttactcttcacattcaagataacatagtattatataataatattaattaagaaaaa

SEQ ID NO: 48897 - DNA, 80 bp, synthetic construct
  source 1..80: mol_type = other DNA
tactagataggtcaccaagtgatcctctatttaacaacccagaaatagatgactcagagataagtgatacaggtagctat

SEQ ID NO: 48898 - DNA, 80 bp, synthetic construct
  source 1..80: mol_type = other DNA
cttaggggtaaagtaaatatatctgaggcaacgaaagttcaaattcgaatctccatcgtccaaaatctaaccaataaaat

SEQ ID NO: 48899 - DNA, 80 bp, synthetic construct
  source 1..80: mol_type = other DNA
cttcaaggttaagacattctatatacgaaaatctgaccttcattagataaggacaatagcaaaattataacaatcttgca

SEQ ID NO: 48900 - DNA, 80 bp, synthetic construct
  source 1..80: mol_type = other DNA
gttaactaatgttaatagctaggatggagggagtgtctgatttcagaccaaaatcttgggaagaaggtggcgtcctcaag

SEQ ID NO: 48901 - DNA, 80 bp, synthetic construct
  source 1..80: mol_type = other DNA
agcattgaggcagaattagatagcaagggatacatggtgcccaaataccgtgttataaaccctggaggaaatgatagaaa

SEQ ID NO: 48902 - DNA, 80 bp, synthetic construct
  source 1..80: mol_type = other DNA
gacactagggtacatgtatctaattgcctacggttttgttgaagatgcaccaagtgaaacacaggtgggtgagaaaccca

SEQ ID NO: 48903 - DNA, 80 bp, synthetic construct
  source 1..80: mol_type = other DNA
caattagaacagttgctgcttatccatttggtgtaggggcaagcgatgcatcacctgaagagctgctcaaaagtgcatgc

SEQ ID NO: 48904 - DNA, 80 bp, synthetic construct
  source 1..80: mol_type = other DNA
agccttgaagtatctgtaagaaggaccgcaggagcaactgagaagattgttatgggagcaaaggggacattgggatctct

SEQ ID NO: 48905 - DNA, 80 bp, synthetic construct
  source 1..80: mol_type = other DNA
gacaccttgggcacctgttctcaccacaggagcaatcttcaatgcagccaagatatgcaataatgtagatcttattcaat

SEQ ID NO: 48906 - DNA, 80 bp, synthetic construct
  source 1..80: mol_type = other DNA
tttatctattacattattaacagataaaggagtctacaaaatcccaaaaacagtactagattttagagaaagtaatgcta

SEQ ID NO: 48907 - DNA, 80 bp, synthetic construct
  source 1..80: mol_type = other DNA
tagctttcaatctgttaatatcattgaggattgacacagacttgactagggcagggatgaagggcttgattgataaagac

SEQ ID NO: 48908 - DNA, 80 bp, synthetic construct
  source 1..80: mol_type = other DNA
atgatagctatagcgtcagtccttgctcaggtctggattcttgtagcaaaagcagtcacagctcctgacactgctgagga

SEQ ID NO: 48909 - DNA, 80 bp, synthetic construct
  source 1..80: mol_type = other DNA
gggaagagagtggcgactttcatgctccatattgggaattttgtcaggagagggaaaaaaccttactcaattgagtactg

SEQ ID NO: 48910 - DNA, 80 bp, synthetic construct
  source 1..80: mol_type = other DNA
cacaacaggaaaaatcctgaagaactaagtctgcagtctaaagatcatgaaatatatttagtaagaagttattgcatacc

SEQ ID NO: 48911 - DNA, 80 bp, synthetic construct
  source 1..80: mol_type = other DNA
tatatcatatgatatctagaaaaatatcaatttagaaatttatatcaaacctacacatcttaagtttaattacagatttc

SEQ ID NO: 48912 - DNA, 80 bp, synthetic construct
  source 1..80: mol_type = other DNA
ccaggatttatattcattaatataatgattgaaaggtacgaatttcaattaatttactagtaatagtatgattaaataat

SEQ ID NO: 48913 - DNA, 80 bp, synthetic construct
  source 1..80: mol_type = other DNA
aattacttataaaatttataatttatctaatcaactgtttttagaatagataggccagtaaggatgcatccttttatata

SEQ ID NO: 48914 - DNA, 80 bp, synthetic construct
  source 1..80: mol_type = other DNA
cctcacactctgaactgttcctgtgattttatgagccatatgataatctaaaagtataagaaagcattattcaaacggta

SEQ ID NO: 48915 - DNA, 80 bp, synthetic construct
  source 1..80: mol_type = other DNA
caagtaataaatcagataacttttataataatctattatagattacaattgataatttaaataattgagtctaaggtcag

SEQ ID NO: 48916 - DNA, 80 bp, synthetic construct
  source 1..80: mol_type = other DNA
aagtgagatgaaacgatggactaaatatgtccagcagaagagagtgaatcctgacttcttattgaacgggagatggataa

SEQ ID NO: 48917 - DNA, 80 bp, synthetic construct
  source 1..80: mol_type = other DNA
aaaaaatgagtttaagaaatgaattaatcatcagtactgattagttagagtatttttaagaattattaaagaaaacttag

SEQ ID NO: 48918 - DNA, 80 bp, synthetic construct
  source 1..80: mol_type = other DNA
cctgcttatcaagctttccaagagatctctagaaacaaataaatgtccacttgttgtcctgtaatctcaaatttcttagg

SEQ ID NO: 48919 - DNA, 80 bp, synthetic construct
  source 1..80: mol_type = other DNA
gtgttgcaaggaatttaatatctcaagatttatctatcagaaaatttatggtagaaatcttgatagaagtcaagaagagt

SEQ ID NO: 48920 - DNA, 80 bp, synthetic construct
  source 1..80: mol_type = other DNA
taactctataagtactctcatataaaagctaacttacttacaaccattgatataacttcatatatggtatgttattgata

SEQ ID NO: 48921 - DNA, 80 bp, synthetic construct
  source 1..80: mol_type = other DNA
ctgaatatattcttgtctttagtggcactaatattattattcgaattgttatatataaacattattctactaagaaaatt

SEQ ID NO: 48922 - DNA, 80 bp, synthetic construct
  source 1..80: mol_type = other DNA
ataataattacagtctttaaaatataaatcacagttaagggttgtttataataataatcatagataattaagaatcaaaa

SEQ ID NO: 48923 - DNA, 80 bp, synthetic construct
  source 1..80: mol_type = other DNA
cacaaaataagatacaaatcaggaaaatgagttcttctaataagattagaataactgtcataataattaatatattgatc

SEQ ID NO: 48924 - DNA, 80 bp, synthetic construct
  source 1..80: mol_type = other DNA
caaaattaggggtgaaccatcaacaaaacttatggttgttaagttagtacctaatgtaggggatgtggcaaattgttcta

SEQ ID NO: 48925 - DNA, 80 bp, synthetic construct
  source 1..80: mol_type = other DNA
ctactcaggtgtctaattataaaaagctagttaaaaatgttctatcacctgtcagtaatgctttaaatactatgttagaa

SEQ ID NO: 48926 - DNA, 80 bp, synthetic construct
  source 1..80: mol_type = other DNA
tccaagatgttttcaagcttgaaacatgagactgagaggtttagagaataccaggcaaatctgggaagacagggcagacc

SEQ ID NO: 48927 - DNA, 80 bp, synthetic construct
  source 1..80: mol_type = other DNA
aacaatcagataatccctttattaaataaactgagctgtgaaaccgttggactaaacgtaggaataaaattaacacaata

SEQ ID NO: 48928 - DNA, 80 bp, synthetic construct
  source 1..80: mol_type = other DNA
aagcatttggtggaaattttgatgaattactaaatgtgatgggatacacaagtcaagatctctacgaaatactacatgga

SEQ ID NO: 48929 - DNA, 80 bp, synthetic construct
  source 1..80: mol_type = other DNA
tgtaataatgattatgcactgcctatgtcaacagagttaataaattgtcttcagggtatgactgagtcatgtgcaagaga

SEQ ID NO: 48930 - DNA, 80 bp, synthetic construct
  source 1..80: mol_type = other DNA
aaaaaaacctaaattatattgataaattgactgtaattattataaaaaacttaggggtcaagatctactcattatccgag

SEQ ID NO: 48931 - DNA, 80 bp, synthetic construct
  source 1..80: mol_type = other DNA
actgatctgaattcaatcaacacctagagatctagattatagaggacccaacacaaccaacagcaacatcaaatcaacca

SEQ ID NO: 48932 - DNA, 80 bp, synthetic construct
  source 1..80: mol_type = other DNA
atctgaatcataaagaatacaggtcattaaacctacttgctgaataaaaccatttactattccaaataagaccatctgac

SEQ ID NO: 48933 - DNA, 80 bp, synthetic construct
  source 1..80: mol_type = other DNA
aaataagaatcctaatcccagtcatcaacaaattcatcaataatcaaacagaactgataaaatacaccagtaggtcacaa

SEQ ID NO: 48934 - DNA, 80 bp, synthetic construct
  source 1..80: mol_type = other DNA
cctagagaaattaattaagagatggacaagatcatggcaaacaaaaacaataacaacaacaaagttaataccagagagac

SEQ ID NO: 48935 - DNA, 80 bp, synthetic construct
  source 1..80: mol_type = other DNA
tgatctgaaaccaaaggttaccttgataaattctgcagtaagtgtcagtattccgagccagatctctaatctgcaaacga

SEQ ID NO: 48936 - DNA, 80 bp, synthetic construct
  source 1..80: mol_type = other DNA
caaacaaggatgattatggaaacatatactataaaaataaacatcagtaacttaggactcaggtttgtgcaaattggagt

SEQ ID NO: 48937 - DNA, 80 bp, synthetic construct
  source 1..80: mol_type = other DNA
tattcaatcatttgattatcctagttttaccgtgtgcaataatagtgatgaaacaactagtataattccaggaccgaacc

SEQ ID NO: 48938 - DNA, 80 bp, synthetic construct
  source 1..80: mol_type = other DNA
tttatgctgttcctaacttatcaataaaagaagatgaagaagatgagtgtgtcactaatccctctttttcagtagggact

SEQ ID NO: 48939 - DNA, 80 bp, synthetic construct
  source 1..80: mol_type = other DNA
tcaatttacatgtattctcaagagattagaaaaacagactgcaaatcaggaccattaacaggtataaaaataatactagg

SEQ ID NO: 48940 - DNA, 80 bp, synthetic construct
  source 1..80: mol_type = other DNA
cagaagacgaggtgggttgggcactctgcagtataacatcgattgcaaactcaggagaaccaataccttacctccttagt

SEQ ID NO: 48941 - DNA, 80 bp, synthetic construct
  source 1..80: mol_type = other DNA
ggattcaaattattcaaatttgaaccagactcggaagtagtccagtatgtattaggtagtaaatcatttaggttagatag

SEQ ID NO: 48942 - DNA, 80 bp, synthetic construct
  source 1..80: mol_type = other DNA
agtttatcatacactttatgtagggaaaggaggtggagcagcaagatatgatggtttgtattttgaaggtttcggagtga

SEQ ID NO: 48943 - DNA, 80 bp, synthetic construct
  source 1..80: mol_type = other DNA
ttacaaacatagggaaggatcaaccactgtgcaatcatgggaagtgtagtggatcaggatcatacatacctatatgtctt

SEQ ID NO: 48944 - DNA, 80 bp, synthetic construct
  source 1..80: mol_type = other DNA
tctgctatgtctatgatgggtgatactgattttctcgttgtatctaacattataaaagttgttgatgctaatataggcaa

SEQ ID NO: 48945 - DNA, 80 bp, synthetic construct
  source 1..80: mol_type = other DNA
gccagtgattacagttcagactttcaagattcaggatacttataaaggttctcatggtaggatttatcagatggataata

SEQ ID NO: 48946 - DNA, 80 bp, synthetic construct
  source 1..80: mol_type = other DNA
attatggtatttatctggcatcatcttcatggaaccgatatctgaaatttggaacgactaatactctgataccaactgag

SEQ ID NO: 48947 - DNA, 80 bp, synthetic construct
  source 1..80: mol_type = other DNA
gttgagtggtcaaaacttaaagaccctattatggatattcaaaataattgtcacaacaccaatcaagatatgtgccctgc

SEQ ID NO: 48948 - DNA, 80 bp, synthetic construct
  source 1..80: mol_type = other DNA
tgtctgctcaagttatggttatgaagacatatttcctctaaatattgaagggaatgctatgacatatatgtcgatgtcta

SEQ ID NO: 48949 - DNA, 80 bp, synthetic construct
  source 1..80: mol_type = other DNA
gaaatggagaaggtacatcaaattttatagttgctagatctcaggataattatgttaacactatgaaagcattgggtgaa

SEQ ID NO: 48950 - DNA, 80 bp, synthetic construct
  source 1..80: mol_type = other DNA
tattttaaaataattactgcaacaacaagttgtttcacttttaaagacgaagcctggtgtattgttgtgaacgaaggtca

SEQ ID NO: 48951 - DNA, 80 bp, synthetic construct
  source 1..80: mol_type = other DNA
acacaagaaaggagacaaacaacggatctttgctcactcatacaaactcaaaaaatcttgtataaaacgatcaaaaatta

SEQ ID NO: 48952 - DNA, 80 bp, synthetic construct
  source 1..80: mol_type = other DNA
cagatttagctactactagtataacattcaacaatcgatctatacgataacattcaatattttatagatgaaatatgaaa

SEQ ID NO: 48953 - DNA, 80 bp, synthetic construct
  source 1..80: mol_type = other DNA
caaatatataaaaagatatataatacacaaacttgaattattgggttattgtattagatcaaatcagatcaacatgattt

SEQ ID NO: 48954 - DNA, 80 bp, synthetic construct
  source 1..80: mol_type = other DNA
ggaactgataacacatctgcaaatttgataatttttaacctatgtaattgactcagcagactttgtgagagtcacaaata

SEQ ID NO: 48955 - DNA, 80 bp, synthetic construct
  source 1..80: mol_type = other DNA
gtagactaattatttaaactatgatttggtataacagatggctataaacactgatgatgaaggatcaaattcaatacaat

SEQ ID NO: 48956 - DNA, 80 bp, synthetic construct
  source 1..80: mol_type = other DNA
acttcaaacttggacaaaatgctgcaaggaagaatgctggctcagttaatcggcaattggcagaggaactccaacttaca

SEQ ID NO: 48957 - DNA, 80 bp, synthetic construct
  source 1..80: mol_type = other DNA
ttagtttaacctatggtgttgggtgattaacattaagtggtactagtaattaattgtatggttctgaaatcatacaacat

SEQ ID NO: 48958 - DNA, 80 bp, synthetic construct
  source 1..80: mol_type = other DNA
tagttggagattgcaaagagtcaagttgagaatctacacagattaaattatcctgatttccagctctatcctggattact

SEQ ID NO: 48959 - DNA, 80 bp, synthetic construct
  source 1..80: mol_type = other DNA
tgaagtctgaactataataatatgttagttaatgatctaattaatatatatgtgattattagaagattgatatttagtta

SEQ ID NO: 48960 - DNA, 80 bp, synthetic construct
  source 1..80: mol_type = other DNA
gatgatttattaagaaaaacttaggtgcaatgcaccatcgagatgtctaatttgcatagatgttttcacactttcgtttg

SEQ ID NO: 48961 - DNA, 80 bp, synthetic construct
  source 1..80: mol_type = other DNA
gaggacctgaacaaagagattctaaaagaaaaagagaaggaagctcaagagagaagagataaaaagagaggcaaaaggcc

SEQ ID NO: 48962 - DNA, 80 bp, synthetic construct
  source 1..80: mol_type = other DNA
ttataaaatcaaacatcttccacctacacaagaagaaaaaagaaagttgtttatatcttgtttacgttctatgctagatt

SEQ ID NO: 48963 - DNA, 80 bp, synthetic construct
  source 1..80: mol_type = other DNA
gtataagagatattagaattgtaaatttagaaaaattacaagggacagtatttagtcaaccaacacctgaagaacagata

SEQ ID NO: 48964 - DNA, 80 bp, synthetic construct
  source 1..80: mol_type = other DNA
caatttcgttattttcctcccaatgtaaattccataatgttcaatgataggttaagtttgttatatcaagtagatttaaa

SEQ ID NO: 48965 - DNA, 80 bp, synthetic construct
  source 1..80: mol_type = other DNA
tttgtttactttaactttacttgttagtgatatactaatacatttttatggatataaatttttatctaatgatgatgagc

SEQ ID NO: 48966 - DNA, 80 bp, synthetic construct
  source 1..80: mol_type = other DNA
aacaacaatagaggtgtctttgtaataattgtttagtaaaggagttaagttttttgttttaagaattagtgttttctata

SEQ ID NO: 48967 - DNA, 80 bp, synthetic construct
  source 1..80: mol_type = other DNA
gccgagcaacttgcagagataaaagatatgatgaaagaagtgaccgtacaaagacatgagacaactgtccaagcaaggga

SEQ ID NO: 48968 - DNA, 80 bp, synthetic construct
  source 1..80: mol_type = other DNA
atataaaggtagttattaagtttatataagttttacttgttagaatatattgaatatgaatttcacagatgtttcagtat

SEQ ID NO: 48969 - DNA, 80 bp, synthetic construct
  source 1..80: mol_type = other DNA
ctgatattttatatcctgaatgtcatttaaatagtcctatcgtaacaggaaagatagtacaagctattagatatagtgat

SEQ ID NO: 48970 - DNA, 80 bp, synthetic construct
  source 1..80: mol_type = other DNA
caacttttgaaggataatactctcaatgaagttatcgattttaaaataaaatcacagaaacttggtattataggaagacg

SEQ ID NO: 48971 - DNA, 80 bp, synthetic construct
  source 1..80: mol_type = other DNA
ccagagagaatatggtagattgcttagagaaataattactgatatcgatagttacaatcatattccttatcctgaagcaa

SEQ ID NO: 48972 - DNA, 80 bp, synthetic construct
  source 1..80: mol_type = other DNA
atacttaccttttttatatatatgatgaatcattaactaagtatttaaatagtattttaagttatgctaatagaagttat

SEQ ID NO: 48973 - DNA, 80 bp, synthetic construct
  source 1..80: mol_type = other DNA
atgagaatatcatctagaatagtaaatttacttgataagacagagtgtactctaacaggtattaattctagaagtgatga

SEQ ID NO: 48974 - DNA, 80 bp, synthetic construct
  source 1..80: mol_type = other DNA
tcagacaaggaatatctacaaaaatgtggaaaatttaccaaagattatgatgcatagtaaatggtataagccctttcttt

SEQ ID NO: 48975 - DNA, 80 bp, synthetic construct
  source 1..80: mol_type = other DNA
tctggttcactgtcaaaacagagatgaggaacaacataaaagagaataataaatactcaaaatttaataaaccaaacata

SEQ ID NO: 48976 - DNA, 80 bp, synthetic construct
  source 1..80: mol_type = other DNA
acccaattaaatggtaaattgctatatgttcaaattaatatgaatttaattacaattgtagaatgggagtccaaaagaat

SEQ ID NO: 48977 - DNA, 80 bp, synthetic construct
  source 1..80: mol_type = other DNA
aggtaaatttaatttagcatcaggaggtattgagaatttattaactgaagatgatgatgaattcaccggcccgagatacc

SEQ ID NO: 48978 - DNA, 80 bp, synthetic construct
  source 1..80: mol_type = other DNA
ctttcatctgacccctgagctagtattgatgtattgtgatgttttagagggacgattaatgatagatacaataatgtatg

SEQ ID NO: 48979 - DNA, 80 bp, synthetic construct
  source 1..80: mol_type = other DNA
ccgaccctagatatgagagattattggacagagctcatcagttgtgggaattacttgataagatgttttttgaatttgga

SEQ ID NO: 48980 - DNA, 80 bp, synthetic construct
  source 1..80: mol_type = other DNA
aataacctttacaatttagtatccatgttagaacctcttacattaggaattatacaattacaagataaagctttgatttt

SEQ ID NO: 48981 - DNA, 80 bp, synthetic construct
  source 1..80: mol_type = other DNA
agctgggtcatttatgaatttctgtgtggaggaaatcaagaatgaatttattgcaaatggttttgatgatatgaatgata

SEQ ID NO: 48982 - DNA, 80 bp, synthetic construct
  source 1..80: mol_type = other DNA
tagatgacttcaccaaaagaataataaatataatgtcattggatgatatacatctcatagctgaatttttctctttctat

SEQ ID NO: 48983 - DNA, 80 bp, synthetic construct
  source 1..80: mol_type = other DNA
cgtaccttcggtcatcctactcttgaggcattaactgctgctgataaagtgagatcccatatgcaaaaaccaaagatgtt

SEQ ID NO: 48984 - DNA, 80 bp, synthetic construct
  source 1..80: mol_type = other DNA
gaaatctgttgtcaggagtggaggtcattttgtggattccattttaaatgttttatgcctttagaactagataatgattt

SEQ ID NO: 48985 - DNA, 80 bp, synthetic construct
  source 1..80: mol_type = other DNA
aagtatgtacatgaaagacaaagccttatcacctataaaatcagaatgggactcagtataccctaaagagtcgatgtttt

SEQ ID NO: 48986 - DNA, 80 bp, synthetic construct
  source 1..80: mol_type = other DNA
tggcagaaacaaaccttgagcgacctagaggccaaagaacaggggacttctttcaatccaggggacgagggcaagaacta

SEQ ID NO: 48987 - DNA, 80 bp, synthetic construct
  source 1..80: mol_type = other DNA
acaaagttcctccgaatactacatcaagacgtcttgtggatgtttttataaatgatgctgattttgatccttataatata

SEQ ID NO: 48988 - DNA, 80 bp, synthetic construct
  source 1..80: mol_type = other DNA
ttaaattatatactatcaggtgaatatattaatgatcctgaattcaatatatcatacagtctgaaagagaaagaaactaa

SEQ ID NO: 48989 - DNA, 80 bp, synthetic construct
  source 1..80: mol_type = other DNA
atctgcctcatctgtacctaaaaatgaaggatataatcaagatagttggaaacttctaaaaagagctgtcaaatcacttg

SEQ ID NO: 48990 - DNA, 80 bp, synthetic construct
  source 1..80: mol_type = other DNA
taccgaatagtaccataaacaaagatatcaaacaaatactcaaatctaaagtccttgaaaatcagattggcaacatacaa

SEQ ID NO: 48991 - DNA, 80 bp, synthetic construct
  source 1..80: mol_type = other DNA
atgaatacaattctacagaataaggacaataatctatctaggacagagaaaaagagacaaccattactagagaattactc

SEQ ID NO: 48992 - DNA, 80 bp, synthetic construct
  source 1..80: mol_type = other DNA
cagcaaagttaagaggagactgaacttggatcattctctgactgacaataatttcatcccaaaagatagatcagatgata

SEQ ID NO: 48993 - DNA, 80 bp, synthetic construct
  source 1..80: mol_type = other DNA
aatatgacacaattagctctttcttgacgacagacctacagaaattctgtctcaactggagatatgaatcaactgccttg

SEQ ID NO: 48994 - DNA, 80 bp, synthetic construct
  source 1..80: mol_type = other DNA
tttgctgagagagtagatgaaatttatggattaccaggtttttttaattggttacataggagacttgagaattgcgtact

SEQ ID NO: 48995 - DNA, 80 bp, synthetic construct
  source 1..80: mol_type = other DNA
ctatgtctcagatccttattgtcccccaaatgaatatgttcataaagagttaaacgatacagaagaccagggaatattta

SEQ ID NO: 48996 - DNA, 80 bp, synthetic construct
  source 1..80: mol_type = other DNA
gaagatctagatgatatggactcagatcttaagaataggatacttagagctatgagagaggaaagaataaacgaagagag

SEQ ID NO: 48997 - DNA, 80 bp, synthetic construct
  source 1..80: mol_type = other DNA
tccaccatccaatgggagggattgaaggttatagccaaaaattgtggacaattataactattccttttttgtttcttagc

SEQ ID NO: 48998 - DNA, 80 bp, synthetic construct
  source 1..80: mol_type = other DNA
ggagtggagactaatattagggtggctgcagtagttcaaggggataatcaatcaatagcaataacacataaagtgcatcc

SEQ ID NO: 48999 - DNA, 80 bp, synthetic construct
  source 1..80: mol_type = other DNA
taatctgtcatatcagcgcaaaaaagacttgagtgctgagcaagccaaaatttacttcaaacagttgagaaaaaatcttg

SEQ ID NO: 49000 - DNA, 80 bp, synthetic construct
  source 1..80: mol_type = other DNA
ctgcattagggcataatttaaaattaacagagactataataagtacacatttttttgtatactcaaaaagaatttactat

SEQ ID NO: 49001 - DNA, 80 bp, synthetic construct
  source 1..80: mol_type = other DNA
caatttctaggtgtgtcttctggtcggagacattggtagatgagactagatcagcatgtagtaatataagcacatcaatt

SEQ ID NO: 49002 - DNA, 80 bp, synthetic construct
  source 1..80: mol_type = other DNA
gcaaaatcaattgaaaacggattgtcaaaagatataggatacgcacttaatgttctcaaaacaattcaacaaatctgtat

SEQ ID NO: 49003 - DNA, 80 bp, synthetic construct
  source 1..80: mol_type = other DNA
atcattgaaattttcgattaatgagaccatgactccagatgtaacaaatccaatacttcacaatgtgaattggttactca

SEQ ID NO: 49004 - DNA, 80 bp, synthetic construct
  source 1..80: mol_type = other DNA
cagcttgtattatgccagcatctttaggtggatttaattatcttaacttatcaagactttatgttagaaatattggagat

SEQ ID NO: 49005 - DNA, 80 bp, synthetic construct
  source 1..80: mol_type = other DNA
atataatgcacttggtagcaacaaagaaacatctgttacaacagctagatatcctctgatcaatattggcccacaatcca

SEQ ID NO: 49006 - DNA, 80 bp, synthetic construct
  source 1..80: mol_type = other DNA
taacaaaaaccatcaaaaatgtcacagcaaggctagtattgtcgcatgcaaaaaatcccattctcaagggtctcttccat

SEQ ID NO: 49007 - DNA, 80 bp, synthetic construct
  source 1..80: mol_type = other DNA
tctaactatcatgatgaggatcagcaactagcattatttcttatggatagaaatataataatgcctagagctgctcatga

SEQ ID NO: 49008 - DNA, 80 bp, synthetic construct
  source 1..80: mol_type = other DNA
aattctggataattctataacaggtgctagggaagaaatatcgggaatgttagatacaacaaaaggtttaataaggactg

SEQ ID NO: 49009 - DNA, 80 bp, synthetic construct
  source 1..80: mol_type = other DNA
aaggtagaccattagcagctacagccacattgacaactaaaataattgtatataatcctgcagggaaaaatgcagcctta

SEQ ID NO: 49010 - DNA, 80 bp, synthetic construct
  source 1..80: mol_type = other DNA
aaataagattgttagcccttttatcaatattaagatttgttcagtagaattggcaaaacatctaagaaatcatatgtgga

SEQ ID NO: 49011 - DNA, 80 bp, synthetic construct
  source 1..80: mol_type = other DNA
ggcatttatcccatggaaggttaatttatggattagaagtaccagatcctttagaatcaatgaaaggagttattatatct

SEQ ID NO: 49012 - DNA, 80 bp, synthetic construct
  source 1..80: mol_type = other DNA
ggaagtgagctgtgtacaatctgtgaaatagaatgtaccccttattgctggttctttattccaaaatcagttgatctgga

SEQ ID NO: 49013 - DNA, 80 bp, synthetic construct
  source 1..80: mol_type = other DNA
tcaagttcagaaaccaactaatagtattagagtcccatatattggatcaaccactgatgaaaggtcagaaataaaattag

SEQ ID NO: 49014 - DNA, 80 bp, synthetic construct
  source 1..80: mol_type = other DNA
gacatgttaaatctacgagtagagctcttagagcagcaatcaggattgcaactgtttatacatgggcatatggtgatgac

SEQ ID NO: 49015 - DNA, 80 bp, synthetic construct
  source 1..80: mol_type = other DNA
acctttctgacactggaacaggagatggaagcataaaacccaacactcctgctatgtcaggactatcagatctagatgca

SEQ ID NO: 49016 - DNA, 80 bp, synthetic construct
  source 1..80: mol_type = other DNA
gcaaagatttagatatcaacagactacaggtgatcaaaatcttatataccatttacatgcagtagacaattgttgtgtta

SEQ ID NO: 49017 - DNA, 80 bp, synthetic construct
  source 1..80: mol_type = other DNA
tagagatgtcatcagtaggagtcgtcaaggctttacaagaagtgccagagtacaaggaagtgagagagaatcgtctaata

SEQ ID NO: 49018 - DNA, 80 bp, synthetic construct
  source 1..80: mol_type = other DNA
tatgataatgatccagttattgaaaaagacatagttaaattaagtacacaagcatggtattcaagtgatgttaacttttc

SEQ ID NO: 49019 - DNA, 80 bp, synthetic construct
  source 1..80: mol_type = other DNA
aaattggacaactcctgacttgcataaagttttagctcagtcattagcccaaacgatcgtagaatcaatatcgaaaacag

SEQ ID NO: 49020 - DNA, 80 bp, synthetic construct
  source 1..80: mol_type = other DNA
ataatattaatagcttgattactgagtttttgctggtagatcctaatttattaagcatatatctaggtcaggcatgtgca

SEQ ID NO: 49021 - DNA, 80 bp, synthetic construct
  source 1..80: mol_type = other DNA
attaaatggtcctttgatattcattacaaaagacctcaaggcaaatggcaaatgatagaattgctgaatgacctactgtc

SEQ ID NO: 49022 - DNA, 80 bp, synthetic construct
  source 1..80: mol_type = other DNA
ttgaataactgaagaagctcagaaggatatagtggtaatatctctaatggaattattcacagtaaaacaagaaatataat

SEQ ID NO: 49023 - DNA, 80 bp, synthetic construct
  source 1..80: mol_type = other DNA
gcttattatcacctaattacggtccatacttttataaccaagatccaacaagattggccatagatttgataatatcttca

SEQ ID NO: 49024 - DNA, 80 bp, synthetic construct
  source 1..80: mol_type = other DNA
tatactatgtatttaactgtttggctagaaggtaggaatttagaatgtctaatagcagaacaggctttagatgcagttga

SEQ ID NO: 49025 - DNA, 80 bp, synthetic construct
  source 1..80: mol_type = other DNA
aatgagaacttatactattcaggcaaaacacttatgtatggtaagtgatctttattgtaatgatttgaaccctccacata

SEQ ID NO: 49026 - DNA, 80 bp, synthetic construct
  source 1..80: mol_type = other DNA
ttagggaacttatgcctgatcagaaagtcaatatcatggataattttataactcaatctaaattcatgactaacggctcc

SEQ ID NO: 49027 - DNA, 80 bp, synthetic construct
  source 1..80: mol_type = other DNA
gaatcatggaatgtacaacctttgagactttgtacttatgctgcttctttaacatatttaagaagaggtattgttaaaca

SEQ ID NO: 49028 - DNA, 80 bp, synthetic construct
  source 1..80: mol_type = other DNA
attgcgcattagacaggatattgatagaaactttgatgtaatggagatagatcacagacaatctagatttacacttgaga

SEQ ID NO: 49029 - DNA, 80 bp, synthetic construct
  source 1..80: mol_type = other DNA
gtgctttaaactacaaacctaaaaatacatgtacagttatgaatttgcaagatattgatagaccattgaattctaccctt

SEQ ID NO: 49030 - DNA, 80 bp, synthetic construct
  source 1..80: mol_type = other DNA
aggattaatattgaagacatgattcctacaaatggttgggaatcacataagtatagacgggttggaattaattcgacatc

SEQ ID NO: 49031 - DNA, 80 bp, synthetic construct
  source 1..80: mol_type = other DNA
aggttataaggcattagaattatatacaataattaaaaggtattataaagatcattcaagcagactatttttgggagaag

SEQ ID NO: 49032 - DNA, 80 bp, synthetic construct
  source 1..80: mol_type = other DNA
agtaatttacacaattaataagctaacaatccattcatgaatgtcacggtgctaaacacaaggatgaagaataagctatt

SEQ ID NO: 49033 - DNA, 80 bp, synthetic construct
  source 1..80: mol_type = other DNA
gttctgggactatgttgagtgtatattataaattgctcgggccagcacagtgttactacaactctggaataagtgagtat

SEQ ID NO: 49034 - DNA, 80 bp, synthetic construct
  source 1..80: mol_type = other DNA
gacgtaataggtcaaagagagctaagattatatccgtccgaaacttgcattgttgattacaacaaaggagagaattatag

SEQ ID NO: 49035 - DNA, 80 bp, synthetic construct
  source 1..80: mol_type = other DNA
attactaaataatataactcctttatttaatggtagacctgagacgacatgggtaggtaatgaggattgttttgtccata

SEQ ID NO: 49036 - DNA, 80 bp, synthetic construct
  source 1..80: mol_type = other DNA
ttatgaagtccataagaagtcatactattggaatggtacacagtgatatggagagtggtcatgataaggataacttacta

SEQ ID NO: 49037 - DNA, 80 bp, synthetic construct
  source 1..80: mol_type = other DNA
atactgaatgaacacagtcacataatagctatagcaataaatttgatgatacctgaaggtattctaatatctaagataaa

SEQ ID NO: 49038 - DNA, 80 bp, synthetic construct
  source 1..80: mol_type = other DNA
cccttcactaagctttcctttgtcatctttgctcaatatgtataaagcccatttcatagatataaaggttgcatttccaa

SEQ ID NO: 49039 - DNA, 80 bp, synthetic construct
  source 1..80: mol_type = other DNA
aatatagcaatccgaactctacagagtgttatctagtgtgtacccaaccaaggatattgacactcactaccccttcaaat

SEQ ID NO: 49040 - DNA, 80 bp, synthetic construct
  source 1..80: mol_type = other DNA
gtatttggccatgcaatagacaagcctgcagaatgtgacagaactgttataaactatttactcacattaaaatttagaat

SEQ ID NO: 49041 - DNA, 80 bp, synthetic construct
  source 1..80: mol_type = other DNA
atatacatcttttgaagatcaaggagtaaactctaccgatggatataggaacaaaatagattatgatagtacagcctgtt

SEQ ID NO: 49042 - DNA, 80 bp, synthetic construct
  source 1..80: mol_type = other DNA
attcagaccttgatcatagttcatcatttaagaactctgaattcggtcattctattttgaatctaagtggtgtgcttaca

SEQ ID NO: 49043 - DNA, 80 bp, synthetic construct
  source 1..80: mol_type = other DNA
taatcttcacatctgttgatatcttcatacaagtctaatccttattccattctattctctatcatagatcataactgtaa

SEQ ID NO: 49044 - DNA, 80 bp, synthetic construct
  source 1..80: mol_type = other DNA
gaggatgataaagtgttgttatcttgtggactttcattaaatggtcctgtaatttgcaagaaattattatcctatgatgt

SEQ ID NO: 49045 - DNA, 80 bp, synthetic construct
  source 1..80: mol_type = other DNA
aggtagccctatcaccactttattggattcttcttttctacttttaaatgaggcacttaatatatatgatcataatagac

SEQ ID NO: 49046 - DNA, 80 bp, synthetic construct
  source 1..80: mol_type = other DNA
tcccaagttctttctttgaaccatatcccattctagaaactacaaaacttaaaaaatacatggacagatttataaggaag

SEQ ID NO: 49047 - DNA, 80 bp, synthetic construct
  source 1..80: mol_type = other DNA
gtaataggttacacttatttgatgtatgatcgttttagtattaatctttgcaataagcatatttcaaatttgaaaagaag

SEQ ID NO: 49048 - DNA, 80 bp, synthetic construct
  source 1..80: mol_type = other DNA
atatttaatatttgacttcagtgattataagaatactaatactattccaggctactactataaaagaatcaagaagaact

SEQ ID NO: 49049 - DNA, 80 bp, synthetic construct
  source 1..80: mol_type = other DNA
cattcaaacaaaattggattttagaacttgaaaccaaggaaatcaagatgtggtggaaactgatatcatatgtgcctatc

SEQ ID NO: 49050 - DNA, 80 bp, synthetic construct
  source 1..80: mol_type = other DNA
tacaattctgaataccacccctaattcagtatttagaaaagaactagtataccatcaccaattccaatttttagaaagtg

SEQ ID NO: 49051 - DNA, 80 bp, synthetic construct
  source 1..80: mol_type = other DNA
atcaccaattccaatttttagaaagtgagatataaaaaacttaattgagttcatacaagagtacaattcatatattttcc

SEQ ID NO: 49052 - DNA, 80 bp, synthetic construct
  source 1..80: mol_type = other DNA
ataaatctaaatttatcatgtataactaattacttatcaatcttcattatagatttataaaaatgtctaaaaataatcca

SEQ ID NO: 49053 - DNA, 80 bp, synthetic construct
  source 1..80: mol_type = other DNA
cattatactggacaagtgtttaaaatgtaatataatttatcatcatttttataattaatgttatgaagtaaatatgttct

SEQ ID NO: 49054 - DNA, 80 bp, synthetic construct
  source 1..80: mol_type = other DNA
aaggtttttatgagtattttatagatttatacattattaaaattcagatcctcaatatgattataaaaaacttaggatgc

SEQ ID NO: 49055 - DNA, 80 bp, synthetic construct
  source 1..80: mol_type = other DNA
aagtataccattcatgctcatcaccagatggcctcagaattgcccaatgatagcataaaggtagagatcaaacaagaaac

SEQ ID NO: 49056 - DNA, 80 bp, synthetic construct
  source 1..80: mol_type = other DNA
agaggaagttgagattgaacaattacaacccatcaatctaagtcgtagaaaacagttatatcctgccaaggtagaagatt

SEQ ID NO: 49057 - DNA, 80 bp, synthetic construct
  source 1..80: mol_type = other DNA
caattgacaacgaagaaccttgttgtagtaagacactaacagatcagcagattagtgtattcacagaggctgcacttaat

SEQ ID NO: 49058 - DNA, 80 bp, synthetic construct
  source 1..80: mol_type = other DNA
agatgggaagtggcaaagtttgctatgaggttaatatggtcacctgctgcatcccattcagtcagggtaggagctgcact

SEQ ID NO: 49059 - DNA, 80 bp, synthetic construct
  source 1..80: mol_type = other DNA
caagatattaagctacctaagctaaaatctgttgatcttaataaagaagaaagagaaatacaagatagtgcctcatcatg

SEQ ID NO: 49060 - DNA, 80 bp, synthetic construct
  source 1..80: mol_type = other DNA
tcacacgaagatagaatcaagcaaattcaaaatggtctccaaattgtcgagctggtcgagaaaattcgtaaggaaaacaa

SEQ ID NO: 49061 - DNA, 80 bp, synthetic construct
  source 1..80: mol_type = other DNA
aatccagccaagctacgggagaagtgcaattggactcccaagcaccaaagacagaacatcagcgtgggaacttttccata

SEQ ID NO: 49062 - DNA, 80 bp, synthetic construct
  source 1..80: mol_type = other DNA
aagttgcacttgatgccgatagacatgaagaggggactggtgaagaaggagatagcaacactccagtacgagatgatagt

SEQ ID NO: 49063 - DNA, 80 bp, synthetic construct
  source 1..80: mol_type = other DNA
aggaatgaacatgatgatgatggtgttaatagcagaggagaaagaacatataaagaatccacctgggatgatgacgaacc

SEQ ID NO: 49064 - DNA, 80 bp, synthetic construct
  source 1..80: mol_type = other DNA
aatcatacttgaaaattcattggcttcaaacattcaacaggatgattcaggaagaaaaaatacctacaggttcactaata

SEQ ID NO: 49065 - DNA, 80 bp, synthetic construct
  source 1..80: mol_type = other DNA
accagaatgatgactgcaggagtagtaaatcatgtggaagcacaaaaggcaatggatgtgttagccatgatcaggctaac

SEQ ID NO: 49066 - DNA, 80 bp, synthetic construct
  source 1..80: mol_type = other DNA
atgtcctgcatactcgagaatcatatacctccagaacgaattgttgaaggagctgatcaaaagagggggtttgtcatgaa

SEQ ID NO: 49067 - DNA, 80 bp, synthetic construct
  source 1..80: mol_type = other DNA
tcccaatgcaaaggaatatgttcctaaagttagaacaacaatatggtcagccaatgatggattgctagaggccatgggat

SEQ ID NO: 49068 - DNA, 80 bp, synthetic construct
  source 1..80: mol_type = other DNA
tgtcagatcgaaataacaacataagagataatattataccacctgcgaaaccagtaatgcaaaagaaaataataaacagt

SEQ ID NO: 49069 - DNA, 80 bp, synthetic construct
  source 1..80: mol_type = other DNA
gataaatatcctgatatccagattccagcaaaacctataccagtaccaaaaaagagaagtggagtgatagttgaatcagc

SEQ ID NO: 49070 - DNA, 80 bp, synthetic construct
  source 1..80: mol_type = other DNA
aggaactatcgaacccatagacaacgagcctgagtatgaagacatggaaggagaaagacatggagcaccaacatccacac

SEQ ID NO: 49071 - DNA, 80 bp, synthetic construct
  source 1..80: mol_type = other DNA
ccatatcaatgagtcctacaacaccaagtacatcctcttcacaggaaacagtgttcaatctatcagacattgtgacagat

SEQ ID NO: 49072 - DNA, 80 bp, synthetic construct
  source 1..80: mol_type = other DNA
aatgatcgtagaaacatgatctcagatcaatctgtcaaagcattggacaagcaaacagcaagggaacgaaagaggagcaa

SEQ ID NO: 49073 - DNA, 80 bp, synthetic construct
  source 1..80: mol_type = other DNA
gagtagcgatcacacatatcatagactacaagagaagactggaagtgaagcaagatccctgtcagaagggagagccaaat

SEQ ID NO: 49074 - DNA, 80 bp, synthetic construct
  source 1..80: mol_type = other DNA
ctgagaaaaagacaggcaaaaaactgagagcactttcaaacaccgatgcaggtatgaatgactatttcaagatagataat

SEQ ID NO: 49075 - DNA, 80 bp, synthetic construct
  source 1..80: mol_type = other DNA
gagaaaaaatgtgatgttaaaaagggcacagacgagaatacagtctgtcctgggatggttcagagatcagggtcgaagaa

SEQ ID NO: 49076 - DNA, 80 bp, synthetic construct
  source 1..80: mol_type = other DNA
tggtgcaaccctacatgcgccaggattaaatcatgtgcaacaagagagagatgcaaatgcaggacatgtcccagatactg

SEQ ID NO: 49077 - DNA, 80 bp, synthetic construct
  source 1..80: mol_type = other DNA
tcaacaggaagattgcacaggaatcgagtacgatacaaaataaattgatcactaatcataataatgagacaggagaagaa

SEQ ID NO: 49078 - DNA, 80 bp, synthetic construct
  source 1..80: mol_type = other DNA
aactctaatcctgaagctgctagttttgatgattattacaataatatgataatctcaatccctcaagaagaaataatgaa

SEQ ID NO: 49079 - DNA, 80 bp, synthetic construct
  source 1..80: mol_type = other DNA
tgatcattgatgttaatgaatttgataatggcatcccaaaattggagaggaggggagagaaggctgaacaacaaatggcc

SEQ ID NO: 49080 - DNA, 80 bp, synthetic construct
  source 1..80: mol_type = other DNA
ggaaatttataggaatcagttagaaatattaactaaattaagtgagaatcagactctaacaaatgcaataaaggatatac

SEQ ID NO: 49081 - DNA, 80 bp, synthetic construct
  source 1..80: mol_type = other DNA
agactactcaaaaagcaactataagcagaatcgaatcattagaaaggagcattggaaaacttggactggcggtatcatcc

SEQ ID NO: 49082 - DNA, 80 bp, synthetic construct
  source 1..80: mol_type = other DNA
atggaacagatgttggcgtctatgagaattatgatacctgggaaaccttcagatattaagagtcctgagaaggcaaagaa

SEQ ID NO: 49083 - DNA, 80 bp, synthetic construct
  source 1..80: mol_type = other DNA
tcccatgttaaagccagttataggaagagaaaccctgaaagctgaagaggtgattgatatagactttgaatcaacgggta

SEQ ID NO: 49084 - DNA, 80 bp, synthetic construct
  source 1..80: mol_type = other DNA
attctaaaactaaaggtacgattaagaagaatttatttatagaaccaatagatgacaagaaaactaatgcatcacagttt

SEQ ID NO: 49085 - DNA, 80 bp, synthetic construct
  source 1..80: mol_type = other DNA
attccagatgatgattttagcactataaacaccttatatgcacttataatcaacagagtcaaagatgcagaacttaaaga

SEQ ID NO: 49086 - DNA, 80 bp, synthetic construct
  source 1..80: mol_type = other DNA
tgtattcttggcagcattaaagaaagctgaaactagaaaagatatcgatgtgttgtatgcaaatgttgcaagagcaataa

SEQ ID NO: 49087 - DNA, 80 bp, synthetic construct
  source 1..80: mol_type = other DNA
agggtaaactataaatcgtatacaatacagatgggatgatgattgattatgattatattttatactcacattattaatat

SEQ ID NO: 49088 - DNA, 80 bp, synthetic construct
  source 1..80: mol_type = other DNA
taatattatttttaacttttattattaacaaagtagttatctaagtacataatatcatattacactaataattaatctta

SEQ ID NO: 49089 - DNA, 80 bp, synthetic construct
  source 1..80: mol_type = other DNA
ctcctcacatttaaggtaacatcatatcatttaactatattaattaagaaaaacttaggggtaaagtaaacatatctgag

SEQ ID NO: 49090 - DNA, 80 bp, synthetic construct
  source 1..80: mol_type = other DNA
agctataggcgaatactggataggtcaccaagtgatcctctattcaacaacccagagatagatgactcagagataagtga

SEQ ID NO: 49091 - DNA, 80 bp, synthetic construct
  source 1..80: mol_type = other DNA
acaaccagaaaccgaacccaagtccccaccaatccaaaccaaacaaagaagatcccaaaagtccagacaccccccacaag

SEQ ID NO: 49092 - DNA, 80 bp, synthetic construct
  source 1..80: mol_type = other DNA
aaaatccaacccccgcgaggcaaaagcaacagtgtcatcacaacaatcctttacttaactaatgttaatagctaggatgg

SEQ ID NO: 49093 - DNA, 80 bp, synthetic construct
  source 1..80: mol_type = other DNA
agggggtatccgatttcagaccaaaatcttgggaagagggaggtatcctcaaaagcattgaggcagaattggatagcaag

SEQ ID NO: 49094 - DNA, 80 bp, synthetic construct
  source 1..80: mol_type = other DNA
ggatacatggtgcctaaatatcgtgttataaaccctggaggaaatgatagaaagacattggggtacatgtatctaattgc

SEQ ID NO: 49095 - DNA, 80 bp, synthetic construct
  source 1..80: mol_type = other DNA
ctatggatttgttgaagatgcaccgagcgaaacacaggttggcgagaaacccacaattaggacagttgctgcttatccat

SEQ ID NO: 49096 - DNA, 80 bp, synthetic construct
  source 1..80: mol_type = other DNA
ttggtgtgggggctagcgatgcgtcacctgaggagctgctcaaaagtgcgtgtggtcttgaggtatctgtgagaaggact

SEQ ID NO: 49097 - DNA, 80 bp, synthetic construct
  source 1..80: mol_type = other DNA
gcaggtgcaacggagaagattgttatgggggcaaaaggaacattgggtgcattaacaccttgggcacctgttcttactac

SEQ ID NO: 49098 - DNA, 80 bp, synthetic construct
  source 1..80: mol_type = other DNA
aggtgcaatctttaatgcagctaaaatatgtaataatgtagatcttatccaattgggtgtacctcaaagattaaggatat

SEQ ID NO: 49099 - DNA, 80 bp, synthetic construct
  source 1..80: mol_type = other DNA
tcttcttatctattacattactaacagataagggagtctacaagatcccaaaaacagtactagattttagagaaagtaat

SEQ ID NO: 49100 - DNA, 80 bp, synthetic construct
  source 1..80: mol_type = other DNA
gctatagctttcaatttactaatatcattaaggattgacacagacttgactaaggcagggatgaaaggtctgatagacaa

SEQ ID NO: 49101 - DNA, 80 bp, synthetic construct
  source 1..80: mol_type = other DNA
tacaggaagctatatgatagccatagcatccgtccttgctcaagtctggattcttgtggcgaaagcagtcacagcccctg

SEQ ID NO: 49102 - DNA, 80 bp, synthetic construct
  source 1..80: mol_type = other DNA
ggacgggaagagagttgccactttcatgctccacatcgggaattttgtcagaagagggaaaaaaccttattcaattgagt

SEQ ID NO: 49103 - DNA, 80 bp, synthetic construct
  source 1..80: mol_type = other DNA
gatattttctcttggtgcagtaggaggccttagttttcacataagatttacaggaaaactaagcaaaagactgattgcat

SEQ ID NO: 49104 - DNA, 80 bp, synthetic construct
  source 1..80: mol_type = other DNA
cgatgaagtttcacagaaatatatgctattgtttaatggacataaatccaggtcttaataaactaacttggaatcatgaa

SEQ ID NO: 49105 - DNA, 80 bp, synthetic construct
  source 1..80: mol_type = other DNA
tgtgaaattcaaaaagtaactgctgtctttcagccttcaattcctcgagacttcaagatctatgatgatgtcttgataga

SEQ ID NO: 49106 - DNA, 80 bp, synthetic construct
  source 1..80: mol_type = other DNA
cacaacagggaaaatcctgaagaattgaatatgcagtctacatatcgtggaatatatttaacaaggagttattgcatatc

SEQ ID NO: 49107 - DNA, 80 bp, synthetic construct
  source 1..80: mol_type = other DNA
gatatcatataatatataggagaatataaatctagatatttgtattgctctcacacatcttgatcttaattgcaaattat

SEQ ID NO: 49108 - DNA, 80 bp, synthetic construct
  source 1..80: mol_type = other DNA
ccaggatttatactaattaacataatgattgaaaggtacgaattacaattgattcaatagtaatagtattattgaatgag

SEQ ID NO: 49109 - DNA, 80 bp, synthetic construct
  source 1..80: mol_type = other DNA
aattccttctatgatttatgattcatttaatcaatcacttttagattaaataggccagtaaggatgcatcccttaatata

SEQ ID NO: 49110 - DNA, 80 bp, synthetic construct
  source 1..80: mol_type = other DNA
cctcatattttgaactgttcctgtgattttatgagccatatagtaatctagaagcttaataaggcattattcaaacggta

SEQ ID NO: 49111 - DNA, 80 bp, synthetic construct
  source 1..80: mol_type = other DNA
acactgctgaagaaagtgaaatgaaaagatggactaaatatgttcagcagaaaagagtgaatcctgacttcctactaaat

SEQ ID NO: 49112 - DNA, 80 bp, synthetic construct
  source 1..80: mol_type = other DNA
caagtgataaatcagatgtcttttataatagtctattatagattataattaataatttaaatagttgggtctaagattag

SEQ ID NO: 49113 - DNA, 80 bp, synthetic construct
  source 1..80: mol_type = other DNA
agaacataattttaagaaatgaattagttaccagtactgatcagtcaaaacattttaaaggattattaaagaaaacttag

SEQ ID NO: 49114 - DNA, 80 bp, synthetic construct
  source 1..80: mol_type = other DNA
gacgtcaagatatgtctaacgatgtgtatgaggttccatcttttgacaccagatcattcagaacattaggaagcagaaga

SEQ ID NO: 49115 - DNA, 80 bp, synthetic construct
  source 1..80: mol_type = other DNA
ataagatatataagaaaagactataaatgcactgcaattattgtgttattacttatcctagcagtgacaatcactcttag

SEQ ID NO: 49116 - DNA, 80 bp, synthetic construct
  source 1..80: mol_type = other DNA
ttattctctaatttggtttatctcatcaaacaataaagctggatataatccagaaattgaccaacgaaatattaacttta

SEQ ID NO: 49117 - DNA, 80 bp, synthetic construct
  source 1..80: mol_type = other DNA
aaaatagaatacaaccaactccaagaattcggctccctaaaccaagtcagtacccatttagacctgggattcctggaaga

SEQ ID NO: 49118 - DNA, 80 bp, synthetic construct
  source 1..80: mol_type = other DNA
agcaattgcccgggtagaacaatacagagtcacccggagccgattgctaagcgtaaacacagaacctcagtcagttttag

SEQ ID NO: 49119 - DNA, 80 bp, synthetic construct
  source 1..80: mol_type = other DNA
taaatattcttgatcacgtgctatttgcaactatagacaatttctgggtcacatataaagctaacatatacataaaatac

SEQ ID NO: 49120 - DNA, 80 bp, synthetic construct
  source 1..80: mol_type = other DNA
ccagcttatcaagctttccaggaaatttctagaaacaaataaatgtcttcttgctgtcctgtaatctcgaacttcttagg

SEQ ID NO: 49121 - DNA, 80 bp, synthetic construct
  source 1..80: mol_type = other DNA
tttacttcttatattcttggttcttgctttcttaagttatgtgatattcatgatagttaaatttggagaatatcataact

SEQ ID NO: 49122 - DNA, 80 bp, synthetic construct
  source 1..80: mol_type = other DNA
gggagatggataagtgttgcaaggaatttaatatctcaagatttatctatcagaaagtttatggtagaaatcttgataga

SEQ ID NO: 49123 - DNA, 80 bp, synthetic construct
  source 1..80: mol_type = other DNA
ttgacttcttatgtcataagaactaatcaatgtgaccactaaagacaaattccttactaaccctactaacagctctcatt

SEQ ID NO: 49124 - DNA, 80 bp, synthetic construct
  source 1..80: mol_type = other DNA
taactctataagtactttgatataaaatctaacttacttaataagactgatataactccatatatggtatggtattgata

SEQ ID NO: 49125 - DNA, 80 bp, synthetic construct
  source 1..80: mol_type = other DNA
ctgaatattttcctgtctttagtggcactaatattattatttgaactactatatataaacattatcttactaaaacaatt

SEQ ID NO: 49126 - DNA, 80 bp, synthetic construct
  source 1..80: mol_type = other DNA
atagtgattacagtctttaaaatattaattaaatttaaggtttatgtaacataataatcatatataattaagattcgaaa

SEQ ID NO: 49127 - DNA, 80 bp, synthetic construct
  source 1..80: mol_type = other DNA
actaaaataagatacataccggaagaatgagttcttctaataagattagaataactgtcataataattaatatcttaatt

SEQ ID NO: 49128 - DNA, 80 bp, synthetic construct
  source 1..80: mol_type = other DNA
agtaattatttgattcactgcagtatggattttgtggaactatctagagtaggtataataaaaggatctacatataatta

SEQ ID NO: 49129 - DNA, 80 bp, synthetic construct
  source 1..80: mol_type = other DNA
caagattaggggtgaaccatctacaaagctcatggttgttaaattaatacctaatgtaggggatgtagcaaattgttctg

SEQ ID NO: 49130 - DNA, 80 bp, synthetic construct
  source 1..80: mol_type = other DNA
caactcaagtttctaattacaaaaagctagttaaaaatgttttatcaccagttagtaatgctttgaacactatgttagaa

SEQ ID NO: 49131 - DNA, 80 bp, synthetic construct
  source 1..80: mol_type = other DNA
aatgtacaaactgaaaataatagatatagattgtttggagctataatggcaggagctgcattaggagttgcaactgctgc

SEQ ID NO: 49132 - DNA, 80 bp, synthetic construct
  source 1..80: mol_type = other DNA
aacagtgacggctggaattgcacttcatcgatcaaatgagaatgctaggaatatagcagcgatgaagaacgcaatccaaa

SEQ ID NO: 49133 - DNA, 80 bp, synthetic construct
  source 1..80: mol_type = other DNA
agtcaagaagagtggaacctcaaaaggaaggttaaatgagatgatagctgatatagggaattatatagaagaaacaggga

SEQ ID NO: 49134 - DNA, 80 bp, synthetic construct
  source 1..80: mol_type = other DNA
atacaaatcaggcaataacgaagctacagatggcaggtcaacaaacattggcagttattgataatattaggggtgagata

SEQ ID NO: 49135 - DNA, 80 bp, synthetic construct
  source 1..80: mol_type = other DNA
tggatttggactcaagatgttttcaagcttaaaacatgagactgagaggtttagagaataccaggccaatctaggaaggc

SEQ ID NO: 49136 - DNA, 80 bp, synthetic construct
  source 1..80: mol_type = other DNA
aacaatcagataatcccattgctgaataagttgagctgtgaaactgttggattaaatgtaggaataaaattgacacaata

SEQ ID NO: 49137 - DNA, 80 bp, synthetic construct
  source 1..80: mol_type = other DNA
ctattcagaaatattgactgtatttggccctgcaattcaagacccaataaattctaaaataactatacaggctatctcaa

SEQ ID NO: 49138 - DNA, 80 bp, synthetic construct
  source 1..80: mol_type = other DNA
aagcattcggtggaaacttcgatgaattactaaaagtaatggggtacacaagtcaagatctttatgaaatactacatgga

SEQ ID NO: 49139 - DNA, 80 bp, synthetic construct
  source 1..80: mol_type = other DNA
ggattaataacagggaatataattggagttgatcctgatacaggttatattgcattggaaattgagttccccaatctatc

SEQ ID NO: 49140 - DNA, 80 bp, synthetic construct
  source 1..80: mol_type = other DNA
tatagtacaaaatgcttatatacaagagttgatgcctattagtttcaatgttgatggagatgagtgggttacattagcgc

SEQ ID NO: 49141 - DNA, 80 bp, synthetic construct
  source 1..80: mol_type = other DNA
caagatttgttttgataagaacaactttactgtcaaacatagacacttctatgtgtacaataatagatagtagtgtaatt

SEQ ID NO: 49142 - DNA, 80 bp, synthetic construct
  source 1..80: mol_type = other DNA
tgtaataatgattatgcattacctatgtcaacagaattaataaactgcctccaaggtatgactgaatcatgtgcaagaga

SEQ ID NO: 49143 - DNA, 80 bp, synthetic construct
  source 1..80: mol_type = other DNA
gaaagttatatcaagttatgttccaaaatttgcattatccggaggggttatatatgcaaattgcttgagtactgtatgtc

SEQ ID NO: 49144 - DNA, 80 bp, synthetic construct
  source 1..80: mol_type = other DNA
gttgtatggacaaccaaaaacctataagtcaaagcttaagaagtactgttgttatgttagataataaaatgtgtaaggta

SEQ ID NO: 49145 - DNA, 80 bp, synthetic construct
  source 1..80: mol_type = other DNA
tatcaaataggtgatatcttgatttctgtaggtgaatacaaaggtgcagtagaatacaatccagaagatgtccacttagg

SEQ ID NO: 49146 - DNA, 80 bp, synthetic construct
  source 1..80: mol_type = other DNA
tcctcctatagttttagataaaatagatattggtaatcaattagcggggataaatcagacattatcagaagctggtgatt

SEQ ID NO: 49147 - DNA, 80 bp, synthetic construct
  source 1..80: mol_type = other DNA
tttctaacaatcaaatatggtcttgaaatgaaatttcatatcatagtgataaacgaatttcaagctgacctattaacagt

SEQ ID NO: 49148 - DNA, 80 bp, synthetic construct
  source 1..80: mol_type = other DNA
tcataagtaaatctgaggagatattaaaagacattaatccagcaatattatcggtaagctcaatgatagttctttatatc

SEQ ID NO: 49149 - DNA, 80 bp, synthetic construct
  source 1..80: mol_type = other DNA
tttattatagtgataaccataatttctttgacatcactaatattatctataagactaacaattaaagcaaaaatatttaa

SEQ ID NO: 49150 - DNA, 80 bp, synthetic construct
  source 1..80: mol_type = other DNA
caatcagtttgcatacggaagacatagtcctagtatggataatgtcagttatgtaacccactaaataaaataatcatggt

SEQ ID NO: 49151 - DNA, 80 bp, synthetic construct
  source 1..80: mol_type = other DNA
taaaaaatctaaattatatctatagattgactgtaattattataaaaaacttaggggtcaagaaccactcattatttgag

SEQ ID NO: 49152 - DNA, 80 bp, synthetic construct
  source 1..80: mol_type = other DNA
actaatctaaattcagttcacagtcttagatttagaattcagagcattcaatataacccacaactaaatcataacaacca

SEQ ID NO: 49153 - DNA, 80 bp, synthetic construct
  source 1..80: mol_type = other DNA
acttaagtcataaggaatacagggtaataaacccaatcacacaacaaaaccactcaccattctaaacaggatcatttgac

SEQ ID NO: 49154 - DNA, 80 bp, synthetic construct
  source 1..80: mol_type = other DNA
aaaccaagattccaatctcagttatcaacacatttaccaattattaaatagaactgataaaccatactaattaatcataa

SEQ ID NO: 49155 - DNA, 80 bp, synthetic construct
  source 1..80: mol_type = other DNA
caaaaagaaaccaaaaagaagatggacaagatcatggcaaacaagaacaacaataacaacaaagttaataccagagagac

SEQ ID NO: 49156 - DNA, 80 bp, synthetic construct
  source 1..80: mol_type = other DNA
aacagttaagaagttctatggggtagatacggctgagaaggtagcagattctataatcagtaataaaatatttatactta

SEQ ID NO: 49157 - DNA, 80 bp, synthetic construct
  source 1..80: mol_type = other DNA
taaatacactactgataattacaagttctgtaattacaattaccttaaatataaccaatttagaaggaataaagaaccaa

SEQ ID NO: 49158 - DNA, 80 bp, synthetic construct
  source 1..80: mol_type = other DNA
ccagacactgatgaaaacttacatggaactgggtccaagagcaccttatatggtgttgcttgaagattccatgcaaacaa

SEQ ID NO: 49159 - DNA, 80 bp, synthetic construct
  source 1..80: mol_type = other DNA
aatgctattattaaaacattacaaatggagataatgaataaagtagaaacaatatcaaagttagaacaaatagtaaaagg

SEQ ID NO: 49160 - DNA, 80 bp, synthetic construct
  source 1..80: mol_type = other DNA
tgatctgaaaccaaaggttactttgataaattctgcagtaagtgtaagtattccagggcaaatctctaatcttcagacaa

SEQ ID NO: 49161 - DNA, 80 bp, synthetic construct
  source 1..80: mol_type = other DNA
aaatgtctcagaaattaaaattcattgaagattcagtaattgatcaatgcacttgcaaccctctttctggtatattcccg

SEQ ID NO: 49162 - DNA, 80 bp, synthetic construct
  source 1..80: mol_type = other DNA
tcaaaggagccacctaaagaaccacacccaggaacagaagatgatgatgacacaagtgatgatgacaaggtagatgacag

SEQ ID NO: 49163 - DNA, 80 bp, synthetic construct
  source 1..80: mol_type = other DNA
ccatcagacagagaatgtgttgcattggatagatatttatccaaagagcagaaggaactaagagaaacttttaaggatgg

SEQ ID NO: 49164 - DNA, 80 bp, synthetic construct
  source 1..80: mol_type = other DNA
ttttatctccttcacctcccagacgattcactcaacatggagtcgttccaatgagagaaataaaaacaaatacggatata

SEQ ID NO: 49165 - DNA, 80 bp, synthetic construct
  source 1..80: mol_type = other DNA
gtgattgatgctctcaagaatgtttataaaacagatttttatatgtctagaaagttaagggcatatatagataatatgaa

SEQ ID NO: 49166 - DNA, 80 bp, synthetic construct
  source 1..80: mol_type = other DNA
tctttcctgatggtcattgtggggaggtccggggtaactggctacagggaaatctgaataaatgctcatctctctttggt

SEQ ID NO: 49167 - DNA, 80 bp, synthetic construct
  source 1..80: mol_type = other DNA
gtgattgatgctcttagaaatgtctataaaacagacttttatatgtctaggaaattaagggcatatatagacaacatgaa

SEQ ID NO: 49168 - DNA, 80 bp, synthetic construct
  source 1..80: mol_type = other DNA
gtaattgatgcattgagaaatgtatataaaactgatttttatatgtctagaaagttgagggcttatatagacaacatgaa

SEQ ID NO: 49169 - DNA, 80 bp, synthetic construct
  source 1..80: mol_type = other DNA
tcttccctgatggtcattgtggggaagtacggggtaattggctacaggggaaccttaataaatgttcatcactctttggt

SEQ ID NO: 49170 - DNA, 80 bp, synthetic construct
  source 1..80: mol_type = other DNA
gtaattgatgcccttagaaatgtttataaaacagacttttatatgtctagaaaactgagagcttatatagacaatatgaa

SEQ ID NO: 49171 - DNA, 80 bp, synthetic construct
  source 1..80: mol_type = other DNA
tctttcctgatggtcactgtggagaagtccggggcaattggttacagggaaatttgaataaatgttcatctctttttggt

SEQ ID NO: 49172 - DNA, 80 bp, synthetic construct
  source 1..80: mol_type = other DNA
taatcagtattagtgtagtatggtgttaagtatctgttaattgtatttgtgtttatgtagtctttgtattaatgttgcat

SEQ ID NO: 49173 - DNA, 80 bp, synthetic construct
  source 1..80: mol_type = other DNA
tgtattaattgttaagtcttgttaggtcttttaagtttaagttctgttaagtctttaagtttttggtaagtctttaagtt

SEQ ID NO: 49174 - DNA, 80 bp, synthetic construct
  source 1..80: mol_type = other DNA
tttgataagtctttaagtttttggtaagtctttaagttttgttaagtctttaaagtttattagtgttaagtcatatatat

SEQ ID NO: 49175 - DNA, 80 bp, synthetic construct
  source 1..80: mol_type = other DNA
ggaatttattggtgttgagtattgaattcatatatgatttattaattagaataaggttatatacagatctattttattca

SEQ ID NO: 49176 - DNA, 80 bp, synthetic construct
  source 1..80: mol_type = other DNA
attatattcatatttgtatatatggatgtaaatttcgttccgttaatagtacatgacactaatgcttgcttcgctactaa

SEQ ID NO: 49177 - DNA, 80 bp, synthetic construct
  source 1..80: mol_type = other DNA
atccaccggtgcaagtggatttgatcctgatgcagggtatgtggacttctgtattaaacatggggaagcaattaatctcc

SEQ ID NO: 49178 - DNA, 80 bp, synthetic construct
  source 1..80: mol_type = other DNA
ccaaagctactctcgctcgtaagccggagaggaaggctagtcctaaatttggagagtggcaggtggaggtcgtctataat

SEQ ID NO: 49179 - DNA, 80 bp, synthetic construct
  source 1..80: mol_type = other DNA
tcaaagaagtgcaagacaacatcacccttcacgaacaacaactcgtgactgccaggcagaagctcaaagatgcagaaaga

SEQ ID NO: 49180 - DNA, 80 bp, synthetic construct
  source 1..80: mol_type = other DNA
gtatgggggttgtttagtgttaagtcatatgtatggggttgtttagtgttaagtcattgtttattgtttattattatttg

SEQ ID NO: 49181 - DNA, 80 bp, synthetic construct
  source 1..80: mol_type = other DNA
agcaaaaacaagcagtaattgtcaatcatggagcgattcagacccaaaacaatcagcaccgagatatggcagatgtcgga

SEQ ID NO: 49182 - DNA, 80 bp, synthetic construct
  source 1..80: mol_type = other DNA
agagccagagtgggtagtagaagaactcgaagaactagaaaggcccacagacatggaatggctcactttagatgataact

SEQ ID NO: 49183 - DNA, 80 bp, synthetic construct
  source 1..80: mol_type = other DNA
acatccatactattgtggatgaacatgcaacagaagcagtcaactcatacaaggacatagttaccaaactttgggtgagc

SEQ ID NO: 49184 - DNA, 80 bp, synthetic construct
  source 1..80: mol_type = other DNA
gcactcattgaaaggatgcaggttgccgcaacgagagcatttaatgaactgcacacagacagagccaaagttaccacagt

SEQ ID NO: 49185 - DNA, 80 bp, synthetic construct
  source 1..80: mol_type = other DNA
ccctataataactaggaagtcgtggaagacacattcactttcacaactatgggggtttgtcattgttggcccgcatcaca

SEQ ID NO: 49186 - DNA, 80 bp, synthetic construct
  source 1..80: mol_type = other DNA
tcaaacaagaaacagatagaatccccatcgtcactgtggagttggtttcagaagacaaccctgaaaaataccccaaccac

SEQ ID NO: 49187 - DNA, 80 bp, synthetic construct
  source 1..80: mol_type = other DNA
tcacactttaaattcctgtaccacaagggaaatgattctgtggggcatgaggacgttctggtgagagtcacttcaattgc

SEQ ID NO: 49188 - DNA, 80 bp, synthetic construct
  source 1..80: mol_type = other DNA
caaatacaagctgttcaccttctcaactatcagaagagtatatatacaaccttgtagcgtgttcagcaagctgattctca

SEQ ID NO: 49189 - DNA, 80 bp, synthetic construct
  source 1..80: mol_type = other DNA
acatcagtgatatgcatctgcataatgggcttccaaggtacatcctgctcacatggtgcccgaaagaagttgtagattca

SEQ ID NO: 49190 - DNA, 80 bp, synthetic construct
  source 1..80: mol_type = other DNA
agcaatctgcagagaagagagagaaggactttagcctggaaaatcgcatagagatcatgatcaacgggaggccagtgctt

SEQ ID NO: 49191 - DNA, 80 bp, synthetic construct
  source 1..80: mol_type = other DNA
gtcacctggaggagttggataattagggtactctgcattgagtatctgatggccatacataacaacccacaaatggaagg

SEQ ID NO: 49192 - DNA, 80 bp, synthetic construct
  source 1..80: mol_type = other DNA
gtttctcgcaaacatcaggcgtctgcatatggcacggcacgctatgatggagaagtcctgtgtgttcctgccatttggct

SEQ ID NO: 49193 - DNA, 80 bp, synthetic construct
  source 1..80: mol_type = other DNA
ctgcacctgaggacaaatgtaatgagtgcatcataaacaacccagtggttgcgtttctggctaggacctggaatgagttg

SEQ ID NO: 49194 - DNA, 80 bp, synthetic construct
  source 1..80: mol_type = other DNA
ccagtggttgcgtttctggctaggacctggaatgagttgccaaatgtttacatgtaggaaaaaactgctttgatttctct

SEQ ID NO: 49195 - DNA, 80 bp, synthetic construct
  source 1..80: mol_type = other DNA
gtaatgagacaaaaccagatggtgtttgcaaggccaaacattcctgacatgctggacctgaagactaaactgggtctcta

SEQ ID NO: 49196 - DNA, 80 bp, synthetic construct
  source 1..80: mol_type = other DNA
tgtaaagatctacaccaatgaagatcaacccaaagactatgattccgcaccgaacgaaatgatcctcaggatgaccacca

SEQ ID NO: 49197 - DNA, 80 bp, synthetic construct
  source 1..80: mol_type = other DNA
caggacggtttagccctgctactctcgaatacttggatccatctcaatctcaagatgtgagaaactttttggtgacattc

SEQ ID NO: 49198 - DNA, 80 bp, synthetic construct
  source 1..80: mol_type = other DNA
tacaatgaatgcctagaatcaaacctttacgaaaggattgcaagagttcagaatgaagagcctgttccatttgctgtccc

SEQ ID NO: 49199 - DNA, 80 bp, synthetic construct
  source 1..80: mol_type = other DNA
tttgacagtggagacgttgctcctacaggacacggatcttgatctgataccaaatttagaggttagcggtacaataccac

SEQ ID NO: 49200 - DNA, 80 bp, synthetic construct
  source 1..80: mol_type = other DNA
cagtaaagggagacagatggagccaaatgaagactctgccaaaactcaagaccccaatagggagaccagcaaaatggggt

SEQ ID NO: 49201 - DNA, 80 bp, synthetic construct
  source 1..80: mol_type = other DNA
gcttggctggcaggcaaagaggcaagattcaaagtctttgatgagagcacagaccaagtggtggctgcaagatttctagc

SEQ ID NO: 49202 - DNA, 80 bp, synthetic construct
  source 1..80: mol_type = other DNA
acattcgactgagtggatatctgccagcagtccccacgagatgcgaattttagagtgtgtgaaatatacagtatgttgcc

SEQ ID NO: 49203 - DNA, 80 bp, synthetic construct
  source 1..80: mol_type = other DNA
ggactataccgacactgtctgtgtaagagaatctcatgccactccaaagaccatcattgagaccgttctagcatcattga

SEQ ID NO: 49204 - DNA, 80 bp, synthetic construct
  source 1..80: mol_type = other DNA
gagcattctcagaggggaggcccaaaaggacaaagatccaagaagaccttcaagcatttgggatcggtatcaagaagagg

SEQ ID NO: 49205 - DNA, 80 bp, synthetic construct
  source 1..80: mol_type = other DNA
aaaaaacaggacgaagaggtcagactgaaatcttcggtagatgattggaaacgagcatcttttccgatggaagaagcctc

SEQ ID NO: 49206 - DNA, 80 bp, synthetic construct
  source 1..80: mol_type = other DNA
attttactattttatttagtgtctagaaaaaaatgtgtgacccacgaccgtaggaaactctagagggtaagaaaaatcaa

SEQ ID NO: 49207 - DNA, 80 bp, synthetic construct
  source 1..80: mol_type = other DNA
tttgtgagacctatcgaagagagaaaggataaaaactttttacgactccatcagaaagaggtttaatatttttgtgagac

SEQ ID NO: 49208 - DNA, 80 bp, synthetic construct
  source 1..80: mol_type = other DNA
tctcttttccatatcagcattgatttcattattacgttcgcagtcgttcaactgtatttcaagatctgagattctagatt

SEQ ID NO: 49209 - DNA, 80 bp, synthetic construct
  source 1..80: mol_type = other DNA
ccgacataaacatataaaaagaaggaattaaacgatggagaagatttgacggaccatgtggttatgattaaacgagttaa

SEQ ID NO: 49210 - DNA, 80 bp, synthetic construct
  source 1..80: mol_type = other DNA
gttttttaagaagccttagaagagaggctattgggtatgagaatccgaaatattaaaccagacaaccccatataatttta

SEQ ID NO: 49211 - DNA, 80 bp, synthetic construct
  source 1..80: mol_type = other DNA
taacactacttcggttagatgttttagaaaaaataaatatcaccgtaccgttttgttgtataaaaataacaattaacaat

SEQ ID NO: 49212 - DNA, 80 bp, synthetic construct
  source 1..80: mol_type = other DNA
tttattttatattttgtagtaagaatagaatgctaatgtcaagtttattcgaatagatgtcttattaaaaaacatatata

SEQ ID NO: 49213 - DNA, 80 bp, synthetic construct
  source 1..80: mol_type = other DNA
tatcggtataagtaattcacatgataagatttccataaactgctacaatcataaaaaaattcatgggaaatgatatcttc

SEQ ID NO: 49214 - DNA, 80 bp, synthetic construct
  source 1..80: mol_type = other DNA
aaatttttgttgataaaaaaattaaaaaaataacttagttattatcactctcgtgagtacaatagaaacatggcgatgtt

SEQ ID NO: 49215 - DNA, 80 bp, synthetic construct
  source 1..80: mol_type = other DNA
taataactaacaatttgtgtatcatatagacaattaattaggtaactgttatctctttttaactaactaactaactaact

SEQ ID NO: 49216 - DNA, 80 bp, synthetic construct
  source 1..80: mol_type = other DNA
aactcttatatactattaataatacatctattaatcattgattagcttattgctttaattgtttttgtaaactaacactg

SEQ ID NO: 49217 - DNA, 80 bp, synthetic construct
  source 1..80: mol_type = other DNA
aattcttccacatctcatataatacaggaatataatcttgttcgaaaatatgagaaagtggataaaacaatagttgattt

SEQ ID NO: 49218 - DNA, 80 bp, synthetic construct
  source 1..80: mol_type = other DNA
tggggattaaaaatagggttgtgtataattgccaaagatttctatcccgaaagaactgattgcagtgttcatcgcccaac

SEQ ID NO: 49219 - DNA, 80 bp, synthetic construct
  source 1..80: mol_type = other DNA
ccggggaacttaacaattcgttctgatctacagacattggttaataaatcatcttattttgccaatatattaaaatgtgg

SEQ ID NO: 49220 - DNA, 80 bp, synthetic construct
  source 1..80: mol_type = other DNA
acagatacagatacagatacagatgtagaagatatcatgaatgaaatagatagagagaaagaagaaatactaaaaaatgt

SEQ ID NO: 49221 - DNA, 80 bp, synthetic construct
  source 1..80: mol_type = other DNA
agaaattgaaaataataaaaacattaacaagaatcatcccagtgaatatattagagaagcacttgttattaataccagta

SEQ ID NO: 49222 - DNA, 80 bp, synthetic construct
  source 1..80: mol_type = other DNA
aatatcaattatatgtgtgtagacaatcatcttggagcaacagtttcaagacgaggagatttagaaatgttgggatattg

SEQ ID NO: 49223 - DNA, 80 bp, synthetic construct
  source 1..80: mol_type = other DNA
ctggagagactgattacacgtacctctctaatggggggttgcctgcatactatcgtaatggggtcgatggttgattattg

SEQ ID NO: 49224 - DNA, 80 bp, synthetic construct
  source 1..80: mol_type = other DNA
ggggggttgcctgcatactatcgtaatggggtcgatggttgattattgattagtatattccttatattccttattctttt

SEQ ID NO: 49225 - DNA, 80 bp, synthetic construct
  source 1..80: mol_type = other DNA
taaaaatgacactgttgacaataacaccatggttgatgatgagacatctaacaataacacattacatggtaatataggat

SEQ ID NO: 49226 - DNA, 80 bp, synthetic construct
  source 1..80: mol_type = other DNA
ctggatcggatgtcaccgcagtaatattgttgattatttctgacatcgacgtattatatagttttttaattccatatctt

SEQ ID NO: 49227 - DNA, 80 bp, synthetic construct
  source 1..80: mol_type = other DNA
taggtctcacaaaaatattaaacctctttctgatggtctctataaacgattgatttttcttaccctctagagtttcctac

SEQ ID NO: 49228 - DNA, 80 bp, synthetic construct
  source 1..80: mol_type = other DNA
aatttgtaaaccatcttactcaaaaatatgcgacaataggaaatctatcttatacacataattattctatcaattttacc

SEQ ID NO: 49229 - DNA, 80 bp, synthetic construct
  source 1..80: mol_type = other DNA
tcggggtgttaatcttgggaattatttttctaaccttgttggtagccttcaagacctgactagcaaatccagccttaatt

SEQ ID NO: 49230 - DNA, 80 bp, synthetic construct
  source 1..80: mol_type = other DNA
tttaccattccattccatcccatatattccatgaataagtgcgattattgtacacttctatagtatctatatacgatcca

SEQ ID NO: 49231 - DNA, 80 bp, synthetic construct
  source 1..80: mol_type = other DNA
ttgcacaatcgttctttatgtattccatgatgggtgtacaattaagattattacgtatcctcgtatcggctcctcgagat

SEQ ID NO: 49232 - DNA, 80 bp, synthetic construct
  source 1..80: mol_type = other DNA
ctaaaagacataaaaagcggtaggatataaatattatggccgcaaccgttccgcgttttgacgatgtgtacaaaaatgca

SEQ ID NO: 49233 - DNA, 80 bp, synthetic construct
  source 1..80: mol_type = other DNA
tttttatattatttacacaattaacaatgtattattagtttatattactgaattaataatataaaattcccaatcttgtc

SEQ ID NO: 49234 - DNA, 80 bp, synthetic construct
  source 1..80: mol_type = other DNA
atagtctttacaaacataatatccttatccgactttatatttcctgtagggtggcataattttattctgcctccacaatc

SEQ ID NO: 49235 - DNA, 80 bp, synthetic construct
  source 1..80: mol_type = other DNA
aatcgggaatgtgactactatcagttacaatgtgatgggttggcaatgggtttattgcactaatttagggttaagggcca

SEQ ID NO: 49236 - DNA, 80 bp, synthetic construct
  source 1..80: mol_type = other DNA
accaaacaaggatgattatgggaatgaatacgattaaaaggaatttaaataacttaggactaaggttcttaaagattggt

SEQ ID NO: 49237 - DNA, 80 bp, synthetic construct
  source 1..80: mol_type = other DNA
tactagcacagtgataataattacattaaacattacaaatcttgaaggaatcaaacaccaaaatcaagtcataaagacac

SEQ ID NO: 49238 - DNA, 80 bp, synthetic construct
  source 1..80: mol_type = other DNA
tgcatgatgagattcaagcaaaaatagacgtaatatcccagcttgaaaccataattaagggtgacctaaaacctaaaatt

SEQ ID NO: 49239 - DNA, 80 bp, synthetic construct
  source 1..80: mol_type = other DNA
tcactcatcaattctgcagtaagtgttagcctacctggacagatcactaatcttcaaacaaagcttaatcaaaagatcaa

SEQ ID NO: 49240 - DNA, 80 bp, synthetic construct
  source 1..80: mol_type = other DNA
gttgctggaagatcaggtgcaagatcagtgtacgtgcaatcctctttctggtatcttcccatcaagacctccccaaccaa

SEQ ID NO: 49241 - DNA, 80 bp, synthetic construct
  source 1..80: mol_type = other DNA
caccttctccagatgatgaatcagatgatgacatgtctgatgatgataaagttgatgactcaattcaagggattgattac

SEQ ID NO: 49242 - DNA, 80 bp, synthetic construct
  source 1..80: mol_type = other DNA
atgcagaccaaatttgctcctggtaactaccctcttctttggagctttgcaatgggggtaggaaccacattagataggtc

SEQ ID NO: 49243 - DNA, 80 bp, synthetic construct
  source 1..80: mol_type = other DNA
ccgaatttcatgatctgcaatggaacaagaaatgaattgagcataactcctggtcaaaatctgtattcagttcccagtct

SEQ ID NO: 49244 - DNA, 80 bp, synthetic construct
  source 1..80: mol_type = other DNA
gacaatgagagaggatcatgatgatgagtgtgttgttaatccatctttttcagtaggaacatcgatatatatgtattccc

SEQ ID NO: 49245 - DNA, 80 bp, synthetic construct
  source 1..80: mol_type = other DNA
aagagattagaaaaaccgattgcaagcagggtcccctaataggtatcaaaataagtctaggaagagttgtagacaagggt

SEQ ID NO: 49246 - DNA, 80 bp, synthetic construct
  source 1..80: mol_type = other DNA
caatctggtccacaggtgtctccactattagtatgggacgtgccaaaaccagagactataagctcgtgtgctgtcgtagc

SEQ ID NO: 49247 - DNA, 80 bp, synthetic construct
  source 1..80: mol_type = other DNA
aggagacgaaataggttgggccctatgcagtacaattatgactgcaaaatcaggagagccaattccatacatgtttgaag

SEQ ID NO: 49248 - DNA, 80 bp, synthetic construct
  source 1..80: mol_type = other DNA
ggttcaaattatttaaatttgaaccggacaaggatgtagttcaatatactctcgctccaagagcatttagattagatgag

SEQ ID NO: 49249 - DNA, 80 bp, synthetic construct
  source 1..80: mol_type = other DNA
aagtaccacactctaaatataggtaaaggaggtggtattattagaggagaagagctttattttacaggatttggtataat

SEQ ID NO: 49250 - DNA, 80 bp, synthetic construct
  source 1..80: mol_type = other DNA
cacaaactacaagaaggtcgatcccttgtgtaaccatgggatatgtccaggatcaggtagttacttgcctgtctgtaaga

SEQ ID NO: 49251 - DNA, 80 bp, synthetic construct
  source 1..80: mol_type = other DNA
gtgctatctcatttatgggagatgaagacctgatagtagtagataatataataaaagtagttaatgtagatataggcaca

SEQ ID NO: 49252 - DNA, 80 bp, synthetic construct
  source 1..80: mol_type = other DNA
cctgtaatcgatctcaagacatttaaggctagtgatacctacagaggctcaaatggcagattatatgcaatgggagataa

SEQ ID NO: 49253 - DNA, 80 bp, synthetic construct
  source 1..80: mol_type = other DNA
catgggagcccttaacattaataggtcttacctggagcctatgtatttcaaactcggtcaaaatgtggcaagaaagaatg

SEQ ID NO: 49254 - DNA, 80 bp, synthetic construct
  source 1..80: mol_type = other DNA
tttcggtgtctacttctcaccatcttcctggaataggtatctaagatttgggacatcaagttcacccgttccaggcacat

SEQ ID NO: 49255 - DNA, 80 bp, synthetic construct
  source 1..80: mol_type = other DNA
ttaaatggtctcctctgaaaagtcctgttttggctgtcggaacaacatgtcataatgataatctatcaatgtgccctcaa

SEQ ID NO: 49256 - DNA, 80 bp, synthetic construct
  source 1..80: mol_type = other DNA
gtttgtcatagttatggctatgaggatgttttccctctggatgtagatggaacgtccatgacatatatgagcatcagcac

SEQ ID NO: 49257 - DNA, 80 bp, synthetic construct
  source 1..80: mol_type = other DNA
agatggacagagaagtaaggcatacgtgcaagctagatcaaaggatggctttgtaaattcaatacctgcacttactgact

SEQ ID NO: 49258 - DNA, 80 bp, synthetic construct
  source 1..80: mol_type = other DNA
attacaacatttatacatcaactataagctgttttatgtacagaaatgatgtgtggtgcattgtcatcaatgaagcttcc

SEQ ID NO: 49259 - DNA, 80 bp, synthetic construct
  source 1..80: mol_type = other DNA
ttaaagaagaatgataaacaacgaatatacgctcattcatataaactcaagaaagagtgtgttaaatcagatatgctcat

SEQ ID NO: 49260 - DNA, 80 bp, synthetic construct
  source 1..80: mol_type = other DNA
gacagatatggttactcttatgcaaaacaacaagtccaggaccagatagcacacgattatcttaattatcataggtaatt

SEQ ID NO: 49261 - DNA, 80 bp, synthetic construct
  source 1..80: mol_type = other DNA
atattggaacaatactgtgaataggttactacttgattgaaaacaattggttatttgtaataattgttaatttcactttt

SEQ ID NO: 49262 - DNA, 80 bp, synthetic construct
  source 1..80: mol_type = other DNA
actagatatttatggaattaaagttctaagataagcaaccaaagacagtgattatcatagaaactgttatagtcaaggaa

SEQ ID NO: 49263 - DNA, 80 bp, synthetic construct
  source 1..80: mol_type = other DNA
caaatactatccgataatccttacctaacaaatcaattaggtatgaaattctaaaatcacaatatagtttagtataacta

SEQ ID NO: 49264 - DNA, 80 bp, synthetic construct
  source 1..80: mol_type = other DNA
caggatcagtagacaggaaactagcagcagagttacagctcacggatgatcaaatcactgagataaaggacatgatgaga

SEQ ID NO: 49265 - DNA, 80 bp, synthetic construct
  source 1..80: mol_type = other DNA
gattcataacactacggaataaataagaaatactatattcagtacataggataatccaaatgagaacagacttatctttt

SEQ ID NO: 49266 - DNA, 80 bp, synthetic construct
  source 1..80: mol_type = other DNA
aatttaaaattaagacaaaaaatatctagagttacacaaagctccattaaatataagtcagtaaaaatcacgaaatacaa

SEQ ID NO: 49267 - DNA, 80 bp, synthetic construct
  source 1..80: mol_type = other DNA
gttagattaaccattctaaataatctacctctttccttgagaaacttgaatggatgttccagatctataaacacacacat

SEQ ID NO: 49268 - DNA, 80 bp, synthetic construct
  source 1..80: mol_type = other DNA
aaaactaataaagagtgcagatcttattatatcttatggataaaatgttgattaaagtatgttctagattctcttaaaag

SEQ ID NO: 49269 - DNA, 80 bp, synthetic construct
  source 1..80: mol_type = other DNA
aaatgagcctcttatttattattataaatattataagcatattataaaaaacttaggagtcatgtgtcattactccagaa

SEQ ID NO: 49270 - DNA, 80 bp, synthetic construct
  source 1..80: mol_type = other DNA
tctattctttgctattgcaacacttagaaaacgtcactatattactaaatcttttttgtctttactctacctgggttaat

SEQ ID NO: 49271 - DNA, 80 bp, synthetic construct
  source 1..80: mol_type = other DNA
ttagagaacattttattcttgtattgatgtactattatgttaccagctaattttagtatactctttaagactattacaga

SEQ ID NO: 49272 - DNA, 80 bp, synthetic construct
  source 1..80: mol_type = other DNA
tttacttgaagctatattgacagtccaaatccttatcacaaatactaaatattattcaaattataccccaaacacaattg

SEQ ID NO: 49273 - DNA, 80 bp, synthetic construct
  source 1..80: mol_type = other DNA
atagggttgcactattgtataattactataaggacagcatcaagaaataactcaaatgatagattctattaatagatttt

SEQ ID NO: 49274 - DNA, 80 bp, synthetic construct
  source 1..80: mol_type = other DNA
aaaatttaaaggtatccatattgatatggactacatgaattaaattgattaagatactgttaaacaatcaatggtacaga

SEQ ID NO: 49275 - DNA, 80 bp, synthetic construct
  source 1..80: mol_type = other DNA
gatgtaacaaatcagagacatgaaacaacagtccaggccagagaagggaaattcaacttggcaacaggtggaattgaaga

SEQ ID NO: 49276 - DNA, 80 bp, synthetic construct
  source 1..80: mol_type = other DNA
ttctgatttaatgagacttgttgaatataatgtttaagaacaatgaatttcactgatgtttctgtgtctgatattttgta

SEQ ID NO: 49277 - DNA, 80 bp, synthetic construct
  source 1..80: mol_type = other DNA
tcctgagtgtcacttgaatagtccaattgtatcagggaaaatagttcaggctatcaaatatagtggtataccatgcaatc

SEQ ID NO: 49278 - DNA, 80 bp, synthetic construct
  source 1..80: mol_type = other DNA
aaatactcaaagacaacacaataaatgatattattgaaacaaaaattaggtcaggtaaattgggattaataggaagacgt

SEQ ID NO: 49279 - DNA, 80 bp, synthetic construct
  source 1..80: mol_type = other DNA
caattagaatttgggaaattattgaaagaagttgtttcagatataacaagttataatcatatcccatatcctgaatccaa

SEQ ID NO: 49280 - DNA, 80 bp, synthetic construct
  source 1..80: mol_type = other DNA
tacgtcattattctatatccaggataatagtttaaccaaatacttggatagcatactaagttatgcaaaccaaagttata

SEQ ID NO: 49281 - DNA, 80 bp, synthetic construct
  source 1..80: mol_type = other DNA
taaaaatatcatcaagattgatcaatctccttgataaaacagagtgtcagttaacgggtataaattcaagatctgatcaa

SEQ ID NO: 49282 - DNA, 80 bp, synthetic construct
  source 1..80: mol_type = other DNA
caaactagacatgtgtacaagaatgttgaaaatttgccaaaaatcatgtcatgtagtaagtggtacaattcattcttgtt

SEQ ID NO: 49283 - DNA, 80 bp, synthetic construct
  source 1..80: mol_type = other DNA
ctggtttacaattaagacagagatgagaaataacatcaaggaaaacaataaatattctaaatttaacaaaccaaatataa

SEQ ID NO: 49284 - DNA, 80 bp, synthetic construct
  source 1..80: mol_type = other DNA
cacaattgaatggtaaaaattactatgtccaaatgaacatgaatctgattagtatagttgattggagtaagaaactcatt

SEQ ID NO: 49285 - DNA, 80 bp, synthetic construct
  source 1..80: mol_type = other DNA
taccatctcacaccagagattgtacttatgtactgtgatgtattggaaggaagactgatgattgacacgatattatgctc

SEQ ID NO: 49286 - DNA, 80 bp, synthetic construct
  source 1..80: mol_type = other DNA
tctggtgaatgacgatgatgacgactatacaggtggaagatacttggctgaaacaaccagggataattcaaggtaccaag

SEQ ID NO: 49287 - DNA, 80 bp, synthetic construct
  source 1..80: mol_type = other DNA
tgatccaagatattctgacctcaagaatcgagctcatgatttatgggaattgttggatagtatgttttttgaatttggca

SEQ ID NO: 49288 - DNA, 80 bp, synthetic construct
  source 1..80: mol_type = other DNA
acaatctttacaatctcgtgtcattgctcgagccattaactctagggattctacaactacaagataaagcaactatacta

SEQ ID NO: 49289 - DNA, 80 bp, synthetic construct
  source 1..80: mol_type = other DNA
gctgggtcatttatgaatttttgtatggatgaaataaggaatgaatttatctccaatgggtttacagatgatgatgatat

SEQ ID NO: 49290 - DNA, 80 bp, synthetic construct
  source 1..80: mol_type = other DNA
taatgattttactcaaagaatcattaatataatgtccataccagatatccatctaattgcagaattcttctcattctaca

SEQ ID NO: 49291 - DNA, 80 bp, synthetic construct
  source 1..80: mol_type = other DNA
ggactttcggacatcccacattagaagctttaacagccgctgagaaggtgagatctcacatgcaaaaaccgaaaatgtta

SEQ ID NO: 49292 - DNA, 80 bp, synthetic construct
  source 1..80: mol_type = other DNA
gaatttctccctattatgaaagctcatgcaatcttttgtggaatcattatcaatgggtatagagatagacatggtggagc

SEQ ID NO: 49293 - DNA, 80 bp, synthetic construct
  source 1..80: mol_type = other DNA
ttggcctcctgtagagtttccagaacatgtctctccattaattaaaagaatttacgggaatagtgaggccttaacacatg

SEQ ID NO: 49294 - DNA, 80 bp, synthetic construct
  source 1..80: mol_type = other DNA
agatatgttgtcaagaatggaggtccttctgtggtttccactttaagtgttttctccctttagaattagacagtgactta

SEQ ID NO: 49295 - DNA, 80 bp, synthetic construct
  source 1..80: mol_type = other DNA
agtatgtatatgaaagacaaggcattatcacctgttaaatctgaatgggacagtgtttacccaagagactctatgtacta

SEQ ID NO: 49296 - DNA, 80 bp, synthetic construct
  source 1..80: mol_type = other DNA
caaggttcctcctacaacaacatctagaagattggtagatgtatttattaatgatgctgactttgatccttacaatatct

SEQ ID NO: 49297 - DNA, 80 bp, synthetic construct
  source 1..80: mol_type = other DNA
aagcaagaggtttcaatcctctttttgtcaaatccgtaaatattgaggattcagatcaaattgatgaggatttgaaagaa

SEQ ID NO: 49298 - DNA, 80 bp, synthetic construct
  source 1..80: mol_type = other DNA
tagattatattatctcaggagagtatataaatgatccagaatttaatatatcatatagtctaaaagaaaaagaaacaaaa

SEQ ID NO: 49299 - DNA, 80 bp, synthetic construct
  source 1..80: mol_type = other DNA
atgacttacaaaatgagagcatgccaagttgttgcagaatcacttattgctaatgggataggaaaatatttcaaagaaaa

SEQ ID NO: 49300 - DNA, 80 bp, synthetic construct
  source 1..80: mol_type = other DNA
tggaatggtaaaggatgaacatgaacttttgaagagtttgcatcagttatcagcttcatcagtacctaagaatgagggat

SEQ ID NO: 49301 - DNA, 80 bp, synthetic construct
  source 1..80: mol_type = other DNA
ataatcaagacaattggaggctcctgaaaaatgatcaacagaaagtaaagaataaggcacagataaataaggagataaga

SEQ ID NO: 49302 - DNA, 80 bp, synthetic construct
  source 1..80: mol_type = other DNA
aacataatgaattctaaagtagttgaaaatcaaataggcaatcgaagattaaatacagacctccagaacaaagacaatag

SEQ ID NO: 49303 - DNA, 80 bp, synthetic construct
  source 1..80: mol_type = other DNA
tatgacatccgggattacaaaatcacagccaatgttgatgaataaagtcaaaaagatgaaaaacaagatgacaatggatt

SEQ ID NO: 49304 - DNA, 80 bp, synthetic construct
  source 1..80: mol_type = other DNA
attcagttaatgattcattggtagatccaaaaataaaatcagaagacaaatatgacaccattagttcatttttaacaaca

SEQ ID NO: 49305 - DNA, 80 bp, synthetic construct
  source 1..80: mol_type = other DNA
gatttgcagaaattttgtctaaattggaggtatgagtctacagctatatttgcagagagggtggatgagatatatgggct

SEQ ID NO: 49306 - DNA, 80 bp, synthetic construct
  source 1..80: mol_type = other DNA
acctaacttctttaattggcttcataaaagattagaaagatgtgtgttatatgtagctgatccttattgtccgcccgatt

SEQ ID NO: 49307 - DNA, 80 bp, synthetic construct
  source 1..80: mol_type = other DNA
tgcataaacacctagacttggatgaaactccggatgaaggtatctttatacatcatcctatgggagggatagaagggtat

SEQ ID NO: 49308 - DNA, 80 bp, synthetic construct
  source 1..80: mol_type = other DNA
aggcttctgagagacatgagaaatgcaggccttcatgaagacagattcatcaaattcagagcccaaaaagaaggagagag

SEQ ID NO: 49309 - DNA, 80 bp, synthetic construct
  source 1..80: mol_type = other DNA
agtcaaaagctgtggacaataattacaatacctttcttgtttttaagcggagtcgaaacaaacatcagagtagccgcagt

SEQ ID NO: 49310 - DNA, 80 bp, synthetic construct
  source 1..80: mol_type = other DNA
ggtacagggagataaccaatcaattgcaataactcacagggtacatccaaatttatcttatcaagctaagaaagacatca

SEQ ID NO: 49311 - DNA, 80 bp, synthetic construct
  source 1..80: mol_type = other DNA
gtgctgaacaagctaaaatatattttaaaagtcttagaaagaatttagctgcattgggacataaccttaaattgacagaa

SEQ ID NO: 49312 - DNA, 80 bp, synthetic construct
  source 1..80: mol_type = other DNA
acaataataagcacacattttttcgtttattcgaaaaggatttattacgacggtatggtgctatctcaaggacttaaatc

SEQ ID NO: 49313 - DNA, 80 bp, synthetic construct
  source 1..80: mol_type = other DNA
tatttcaagatgtgtattctggtctgaaaccttagtagatgaaaccagatctgcttgtagcaacatcagcacctctattg

SEQ ID NO: 49314 - DNA, 80 bp, synthetic construct
  source 1..80: mol_type = other DNA
caaaatctatagaaaatggactatctaaagatatagggtacagtttgaatattcttaagacaatccaacaaatatgtata

SEQ ID NO: 49315 - DNA, 80 bp, synthetic construct
  source 1..80: mol_type = other DNA
tcacttaaattttcaattaatgagactatgactcctgatgtgacgaatcctatcctacataatactaactggcttctgac

SEQ ID NO: 49316 - DNA, 80 bp, synthetic construct
  source 1..80: mol_type = other DNA
agcttgtcttatgcctgcgtctatagggggatttaactatctcaacttatcaagattgtatgtaagaaatataggagacc

SEQ ID NO: 49317 - DNA, 80 bp, synthetic construct
  source 1..80: mol_type = other DNA
ctttgacggcatcacttgcagatgttaaaagaatgatcaatgcaaaaatactagaagagaatattttacaaaagattatg

SEQ ID NO: 49318 - DNA, 80 bp, synthetic construct
  source 1..80: mol_type = other DNA
aatcaaacaccaggagatgctaccttccttgattgggccagtgacccatattctgctaacctacctaatacgcagagtat

SEQ ID NO: 49319 - DNA, 80 bp, synthetic construct
  source 1..80: mol_type = other DNA
acaaggtagacctctagctgcaactgcaaccttaacaaccaaaattgtagtgtataatccaacaacaaaaagcccttcat

SEQ ID NO: 49320 - DNA, 80 bp, synthetic construct
  source 1..80: mol_type = other DNA
gacagcaaatgtggccgacaacagaccaatcagctacacatcatcggcatctgcagtagacgatagatcagatttaagta

SEQ ID NO: 49321 - DNA, 80 bp, synthetic construct
  source 1..80: mol_type = other DNA
taaagaaagttacagctagacttgttctatctcatgctaagaatcctatactcaaaggtctcttccataataattatagg

SEQ ID NO: 49322 - DNA, 80 bp, synthetic construct
  source 1..80: mol_type = other DNA
gatgaagatatccaattagcagagttcctcatggatagaaatattataatgccaagagcagctcacgagatattggacaa

SEQ ID NO: 49323 - DNA, 80 bp, synthetic construct
  source 1..80: mol_type = other DNA
ttctatcacaggtgccagagaagagatatctgggatgttggatacaacaaaagggttgataagaacaggtttatcaagag

SEQ ID NO: 49324 - DNA, 80 bp, synthetic construct
  source 1..80: mol_type = other DNA
gaggaatacagcctagactagtttcaaaattatctcattatgattacgaacaatttagggtatttaataatctgatgaga

SEQ ID NO: 49325 - DNA, 80 bp, synthetic construct
  source 1..80: mol_type = other DNA
aataagatagttagtccttttgtaaataaagagatctgttctgttgaattagctagatttcttagaaatcacatgtggag

SEQ ID NO: 49326 - DNA, 80 bp, synthetic construct
  source 1..80: mol_type = other DNA
acatcttactcatggaagaatgatttatggtttagaagtacctgatcctatagaatctatgaaaggtgtgattataactg

SEQ ID NO: 49327 - DNA, 80 bp, synthetic construct
  source 1..80: mol_type = other DNA
gcagtgaactctgtactttgtgtgtgactgaacagacaccgtattgttggttcttcgttcctaaagatgtggatttagat

SEQ ID NO: 49328 - DNA, 80 bp, synthetic construct
  source 1..80: mol_type = other DNA
caagttgggaaaccgacaaacagcattagagtaccatatgttgggtcaacaacagatgagagatctgaaattaaactagg

SEQ ID NO: 49329 - DNA, 80 bp, synthetic construct
  source 1..80: mol_type = other DNA
acatgtgaaatcgtccagtagagctctcaaggctgcgatccggattgcaactgtatatacttgggcatttggggacgatg

SEQ ID NO: 49330 - DNA, 80 bp, synthetic construct
  source 1..80: mol_type = other DNA
aggagtcatggttagaagcatggtatcttgcatctcaaagggcaaatatagatttagagatcttgaaatcaataacacca

SEQ ID NO: 49331 - DNA, 80 bp, synthetic construct
  source 1..80: mol_type = other DNA
agcccaatacaccaggcatgtcttctgtcaatgaccttgatgcactaaataactaaaatgaagtgattaagtggtaatct

SEQ ID NO: 49332 - DNA, 80 bp, synthetic construct
  source 1..80: mol_type = other DNA
atctcgacatctaacaatttggcacatcgattacgtgatagagcaacacaagtcaaatttaatgggtcatcattgaatag

SEQ ID NO: 49333 - DNA, 80 bp, synthetic construct
  source 1..80: mol_type = other DNA
agtttctagatacgtcactattagtaatgataaacttgaatttgttatagatgatcaaaaggttgataccaatttaatat

SEQ ID NO: 49334 - DNA, 80 bp, synthetic construct
  source 1..80: mol_type = other DNA
tccagcaagtgatgcttttgggtctttctgcactggaacaaagatacagatatttagataatacaggaaatacaaatgta

SEQ ID NO: 49335 - DNA, 80 bp, synthetic construct
  source 1..80: mol_type = other DNA
atttatcatcttcattcagttcaaaattgttgtatagtcgaaatgtcatcagttgggatgataccatcaataagggaagc

SEQ ID NO: 49336 - DNA, 80 bp, synthetic construct
  source 1..80: mol_type = other DNA
acctgaatatcatgagataaaagataatcgtctgatctatgataatgaaccagttcttgaaaaggatattgaaaaattga

SEQ ID NO: 49337 - DNA, 80 bp, synthetic construct
  source 1..80: mol_type = other DNA
gtgcacaagcttggtattctagcgatgttgatttttctaattgggaaacaccagatctacacaaagtcttagctcagtct

SEQ ID NO: 49338 - DNA, 80 bp, synthetic construct
  source 1..80: mol_type = other DNA
ttagcacaaaccattattgaatcaatttcaaaaagtgacagagatgtattaaagcaatttatttcaataaattcagatga

SEQ ID NO: 49339 - DNA, 80 bp, synthetic construct
  source 1..80: mol_type = other DNA
caatgtaaatagcctcataactgaattccttcttgtagatcctaacttgttgagtatatacctaggtcaagcatgtgctg

SEQ ID NO: 49340 - DNA, 80 bp, synthetic construct
  source 1..80: mol_type = other DNA
taaaatgggcatttgatatacattataagagaccccaggggaaatggcagatggtagagctcataacagaccttctatct

SEQ ID NO: 49341 - DNA, 80 bp, synthetic construct
  source 1..80: mol_type = other DNA
gacacatcaatccatgttcttagggttcttactaacgcattaacacatccaaaaatattcagaaaattttgggattcagg

SEQ ID NO: 49342 - DNA, 80 bp, synthetic construct
  source 1..80: mol_type = other DNA
aaatttaaattattactataatatatatctattagatatgtaatcattttaaatctatttaatttcctatattaagaaat

SEQ ID NO: 49343 - DNA, 80 bp, synthetic construct
  source 1..80: mol_type = other DNA
acttctgtcacctaattatggcccatatttttataatcaagatgcaacccgattagccattgatttgataatttcatcat

SEQ ID NO: 49344 - DNA, 80 bp, synthetic construct
  source 1..80: mol_type = other DNA
acacaatgtatttgacagtttggctggagggaagaaacctagaatgtcttattgcagaacaatctattgatgcagtagaa

SEQ ID NO: 49345 - DNA, 80 bp, synthetic construct
  source 1..80: mol_type = other DNA
acaagagcagatactatacaagcaaaacatttgtgcatgttatgtgatttgtattgtaatgatggcacaccccctcatat

SEQ ID NO: 49346 - DNA, 80 bp, synthetic construct
  source 1..80: mol_type = other DNA
tagagatatgttacctcatcaaaaattagctattctgtctgattatattaataaaatgagatacattacaagtggagcag

SEQ ID NO: 49347 - DNA, 80 bp, synthetic construct
  source 1..80: mol_type = other DNA
agtcttggaatattcaatctctaagattatgtgtttatgctgcatctctcacttaccttagaaggggtataattaaacaa

SEQ ID NO: 49348 - DNA, 80 bp, synthetic construct
  source 1..80: mol_type = other DNA
ctgagaataaggcaagatatagatcgaaactttgatgttatggagatagatcacaggcagtcacggtttattatggaaag

SEQ ID NO: 49349 - DNA, 80 bp, synthetic construct
  source 1..80: mol_type = other DNA
tgctctaaattatagacctaaaacaacatgtacagttatgaatctacaagatatcgataagccattaaattcaaccttga

SEQ ID NO: 49350 - DNA, 80 bp, synthetic construct
  source 1..80: mol_type = other DNA
ggattactatagatgagacaagacctataaatggatgggaatctcataagtatagaagagtgggtattaattcaacatca

SEQ ID NO: 49351 - DNA, 80 bp, synthetic construct
  source 1..80: mol_type = other DNA
ggatataaagccttagaattatacactgtcataaaaaggtattatgttgaaggaacagaccgtttatttgttggtgaagg

SEQ ID NO: 49352 - DNA, 80 bp, synthetic construct
  source 1..80: mol_type = other DNA
atcagggaacatgttgagtgtttactataaattgttaggacctgcaaggaatttctataattcaggaataagtgaatatg

SEQ ID NO: 49353 - DNA, 80 bp, synthetic construct
  source 1..80: mol_type = other DNA
agaaatagatgatgtatataatgtaaaataggatcattataattgttttattctaaactaatatagtcatgacattgcta

SEQ ID NO: 49354 - DNA, 80 bp, synthetic construct
  source 1..80: mol_type = other DNA
atgtgatcgggcaaagagaactaagattatacccatctgaagcgtgtattgtggattttaataaaggggaaaattattat

SEQ ID NO: 49355 - DNA, 80 bp, synthetic construct
  source 1..80: mol_type = other DNA
attttacagaatatagtacctcttttcaatggtcggccagaaacaacatggataggtaatgaagactgttttgtacacat

SEQ ID NO: 49356 - DNA, 80 bp, synthetic construct
  source 1..80: mol_type = other DNA
aatgaagacaattaaaagtcattctttagggatgcttcacagtgatatggagagcgggcatgacaaggagaatcttgaaa

SEQ ID NO: 49357 - DNA, 80 bp, synthetic construct
  source 1..80: mol_type = other DNA
ttttagttgagcatagtcacttaatagcattagctataaacttgttgagaacagatggtgtgcttgtgtctaagattaac

SEQ ID NO: 49358 - DNA, 80 bp, synthetic construct
  source 1..80: mol_type = other DNA
cctacttttgattttccattatcatctttgtttaatatgtatagatcacattatgttgatattaaagttgcatttccaaa

SEQ ID NO: 49359 - DNA, 80 bp, synthetic construct
  source 1..80: mol_type = other DNA
atatagtaatccaaactctactgagtgttatcttatatgcactcaacctcgtatattgacattaacaacacctaataatg

SEQ ID NO: 49360 - DNA, 80 bp, synthetic construct
  source 1..80: mol_type = other DNA
tgttttcccatgcaatagacaaacctgctgaatgtgataagactgtcttaaattacattatcactctaaaatttaggata

SEQ ID NO: 49361 - DNA, 80 bp, synthetic construct
  source 1..80: mol_type = other DNA
tatacatcatttgaagaccaggggcttaatgctactgataggaaaaaggcatatacctctaaattaaataaagaaacaac

SEQ ID NO: 49362 - DNA, 80 bp, synthetic construct
  source 1..80: mol_type = other DNA
cgataagtcttattttgaaggatcggataatatatcaggattccataactcagttataaatttatcagcaggtcttactg

SEQ ID NO: 49363 - DNA, 80 bp, synthetic construct
  source 1..80: mol_type = other DNA
aagatgataaagtgttgttaagttgtgggctttctctaaatggacctgtgatctgtaaaaaattgctttcttatgatgtc

SEQ ID NO: 49364 - DNA, 80 bp, synthetic construct
  source 1..80: mol_type = other DNA
tgcataatcataatacaatttttcaaattattataaaaaacttaggatacaggaatttaattttctgggtccactaaatg

SEQ ID NO: 49365 - DNA, 80 bp, synthetic construct
  source 1..80: mol_type = other DNA
ggaagccctttaactacattgctagaatcatcatttatgttattaaatgaagcacttaatatctatgataacaatagatt

SEQ ID NO: 49366 - DNA, 80 bp, synthetic construct
  source 1..80: mol_type = other DNA
acctactactttttttgagccttatcctatactagaatcaactaaattaaaaagatacatggataaattcatcagaaaaa

SEQ ID NO: 49367 - DNA, 80 bp, synthetic construct
  source 1..80: mol_type = other DNA
ttattggatatacataccttatgtatataaatttcagcattaaattatgtaataaacatatatcgaatcttaaacgcaga

SEQ ID NO: 49368 - DNA, 80 bp, synthetic construct
  source 1..80: mol_type = other DNA
tatcttatattcgatttcaatgattacaaacaaacaaagataatccctaaatactattacaagaggattaagaagaactc

SEQ ID NO: 49369 - DNA, 80 bp, synthetic construct
  source 1..80: mol_type = other DNA
atttaaacagaattggttaattgagctagagacaaaagagatcaaaatgtggtggaaactgatttcatatgttcctgttt

SEQ ID NO: 49370 - DNA, 80 bp, synthetic construct
  source 1..80: mol_type = other DNA
acaatacaaattaatgtttaccaggtccatcactaatctttccaagatatattataaaaaacttatcatttgtaaaaaaa

SEQ ID NO: 49371 - DNA, 80 bp, synthetic construct
  source 1..80: mol_type = other DNA
actaatctttccaagatatattataaaaaacttatcatttgtaaaaaaatattagtattcatatattttccttgtttggt

SEQ ID NO: 49372 - DNA, 80 bp, synthetic construct
  source 1..80: mol_type = other DNA
gcaaatctctctcctgtaggagacacaactcaagatttgaacaaacaacaaacaattctagaaaagccgataatcagaaa

SEQ ID NO: 49373 - DNA, 80 bp, synthetic construct
  source 1..80: mol_type = other DNA
taaaagaaaacaatctcatccttctaaactatcaattgatatcaacacggactcaaagatagacaagattgagcaacctg

SEQ ID NO: 49374 - DNA, 80 bp, synthetic construct
  source 1..80: mol_type = other DNA
aaccaaaaaggggtaagaagtggttcttcagaggattaaataaatcgtcaataaaatcatctttatctgctgatagtacg

SEQ ID NO: 49375 - DNA, 80 bp, synthetic construct
  source 1..80: mol_type = other DNA
acacttgaaaggcctgccaagtcacaatcatgtcctacgaagacagagtcaaacaaatccaaaatgggttacagattgtc

SEQ ID NO: 49376 - DNA, 80 bp, synthetic construct
  source 1..80: mol_type = other DNA
gaattggtcaatgagattagggctaacaacaaacccaaaccaacatacggaagaagtgccatcagtctaccatcaacaaa

SEQ ID NO: 49377 - DNA, 80 bp, synthetic construct
  source 1..80: mol_type = other DNA
tgagatgggaaatagttaaatttgccatgaagctgatctggtcacctgcatctgctcattctgtcaaagttggtgctgca

SEQ ID NO: 49378 - DNA, 80 bp, synthetic construct
  source 1..80: mol_type = other DNA
agacagaaccagtgcttgggaacttttccaccaagttgcgtctgatgccaatggacatgaagagaggcctaataaagaag

SEQ ID NO: 49379 - DNA, 80 bp, synthetic construct
  source 1..80: mol_type = other DNA
gagatgactcagttgaaagaggaaatgtcagaggggtcgaatatgataatgatgatacttctggcagaggagaaagatct

SEQ ID NO: 49380 - DNA, 80 bp, synthetic construct
  source 1..80: mol_type = other DNA
tttaaggaggccaactgggatgaatcagacaacatcatacttgaaaacccattggctgcaaacattcacaaagatgattc

SEQ ID NO: 49381 - DNA, 80 bp, synthetic construct
  source 1..80: mol_type = other DNA
aggaagagaatctgccaacagggtcattaataacaaggatgatgtcagcaaatgtgataacgcacatagaggcttacaga

SEQ ID NO: 49382 - DNA, 80 bp, synthetic construct
  source 1..80: mol_type = other DNA
gcaatggaagtactgaaaatgatcaggttggtgtgcccagcatactcaagagtagtttatctacagacagagatgctcaa

SEQ ID NO: 49383 - DNA, 80 bp, synthetic construct
  source 1..80: mol_type = other DNA
ggatctaataataagaccaaacaccagatgaatccttatgctcaagaatatgtcccaaaatggtcaacaaatacagcaaa

SEQ ID NO: 49384 - DNA, 80 bp, synthetic construct
  source 1..80: mol_type = other DNA
taatattgtagaaagcaagaaagaccaagatacctctgacagctgcactcaaaaaaatcaaggcaatttgataaaaccaa

SEQ ID NO: 49385 - DNA, 80 bp, synthetic construct
  source 1..80: mol_type = other DNA
tgatgcagaagaaaattctagattgcgacaagtatccaggagcaattgataatgttaagctgacacccatcccaaaacag

SEQ ID NO: 49386 - DNA, 80 bp, synthetic construct
  source 1..80: mol_type = other DNA
aggggttcaataataaacaggattgatatgaatattgaacccattgagtcaggagatgaaagtgaggatgatgaggatga

SEQ ID NO: 49387 - DNA, 80 bp, synthetic construct
  source 1..80: mol_type = other DNA
tgatcaggttgtgcccgagacaggagaacaagatgtcgacagtttagaaaagaatttaacactgtcatcatcacaggaga

SEQ ID NO: 49388 - DNA, 80 bp, synthetic construct
  source 1..80: mol_type = other DNA
ctcactctcctgacctcacatgctgagaatccaggctcaatgataagatcccttgtgaatgacccagatattgaagttgt

SEQ ID NO: 49389 - DNA, 80 bp, synthetic construct
  source 1..80: mol_type = other DNA
cgttatttaatatctctgattatgaaacagacaatgaaagacgtaatagatggagtctaaagccagtcagaacactgagc

SEQ ID NO: 49390 - DNA, 80 bp, synthetic construct
  source 1..80: mol_type = other DNA
gagtgcgacagtacaggtgagaccaaagaggaaatggcagagaaaaaatccaagatggaaaaccctaatcaggatctgaa

SEQ ID NO: 49391 - DNA, 80 bp, synthetic construct
  source 1..80: mol_type = other DNA
gcctaaagaaggacgcaagctgcgggctttgcagtcaactaatgctgggaaggaaggacaaccagaaaaggaagcataca

SEQ ID NO: 49392 - DNA, 80 bp, synthetic construct
  source 1..80: mol_type = other DNA
atacaggagatattaaaaagggcaccgtcgagaatacagcttatcttgggatggttcagaaatccaagtcgaagaatggt

SEQ ID NO: 49393 - DNA, 80 bp, synthetic construct
  source 1..80: mol_type = other DNA
gcaatccaacctgtgccccaatcagaacagaaccagtacgagaagaatgcacctgttaccagtgccctccagaatgctct

SEQ ID NO: 49394 - DNA, 80 bp, synthetic construct
  source 1..80: mol_type = other DNA
caagaaggatgcactaagatcagatacaaggcaacggatgagctcaaaaagtgataatgatgattcattgctcacagatt

SEQ ID NO: 49395 - DNA, 80 bp, synthetic construct
  source 1..80: mol_type = other DNA
cttctaataactcactaacatttgatgattattttcataaattaactaatacaatgactactgatgatttacttaaagaa

SEQ ID NO: 49396 - DNA, 80 bp, synthetic construct
  source 1..80: mol_type = other DNA
atttacaagaatcaactagaaattttgactaatctcacagagaaagaaagcttgattctggtgattagagaattacaaaa

SEQ ID NO: 49397 - DNA, 80 bp, synthetic construct
  source 1..80: mol_type = other DNA
tgtgcaaaaatccacggtaagcaagattgaatcattggaaaggaacatagggaaactaggattggctgtttcatcaatgg

SEQ ID NO: 49398 - DNA, 80 bp, synthetic construct
  source 1..80: mol_type = other DNA
aacagatgttgtcatcgatgagaattatgatacctggaaaaccagacgagaatcaaaacagcataaagcctaagaatcct

SEQ ID NO: 49399 - DNA, 80 bp, synthetic construct
  source 1..80: mol_type = other DNA
ggtcctggacattggtgaatttgaaaatggagttcccaaactagaaagaagaggagagagatcagagcagcaaacggcca

SEQ ID NO: 49400 - DNA, 80 bp, synthetic construct
  source 1..80: mol_type = other DNA
ttactcaaaccggttattgggagggagaccttaaaacctgaggaggtcatagatataactgttgattcggaaggtaatat

SEQ ID NO: 49401 - DNA, 80 bp, synthetic construct
  source 1..80: mol_type = other DNA
gaaagcatcagctcaaaagaaactgctcattgagcctatagatgataagagaactaatgcatctcagtttatacctgaaa

SEQ ID NO: 49402 - DNA, 80 bp, synthetic construct
  source 1..80: mol_type = other DNA
atgacaacagtacgatcaatactttatatggtttagtcataaatcgaataaaagataaggaattgaaagatgcatttctc

SEQ ID NO: 49403 - DNA, 80 bp, synthetic construct
  source 1..80: mol_type = other DNA
aatgcattaaagatggtgaaaacaaaagacgagattgagatattgtataccaacataataaaagcagtaagagctgggat

SEQ ID NO: 49404 - DNA, 80 bp, synthetic construct
  source 1..80: mol_type = other DNA
ttaactgtcgagaaaacaaaccatacagtataagtaacacaattaagaatattggagatgttcactatatatagataggg

SEQ ID NO: 49405 - DNA, 80 bp, synthetic construct
  source 1..80: mol_type = other DNA
aaactgcactattttaaaaataatgataatacaactctcaattaactagaataatagtatcattaatattcttactttaa

SEQ ID NO: 49406 - DNA, 80 bp, synthetic construct
  source 1..80: mol_type = other DNA
tatgcaacagtgtagtctaaattattatttattgatatatcattaaaggattagaaaaaacttaggagaaaagtacatga

SEQ ID NO: 49407 - DNA, 80 bp, synthetic construct
  source 1..80: mol_type = other DNA
agacatcacaagacaacacaaacaatcagaacatcagctaacacaccaaaaagcacctcaataaagcataatacaaaaac

SEQ ID NO: 49408 - DNA, 80 bp, synthetic construct
  source 1..80: mol_type = other DNA
cctcttaaaacctccaaagtcaaaaacgcaaaagatagaaggaccaaacaaatcacacaaacaaggcacaaagatcaata

SEQ ID NO: 49409 - DNA, 80 bp, synthetic construct
  source 1..80: mol_type = other DNA
caaaatacatcaggagtcaatcaaaatcattttcccaatcaatttaaatttgtaatctagaaggaaatcaagttaatcac

SEQ ID NO: 49410 - DNA, 80 bp, synthetic construct
  source 1..80: mol_type = other DNA
gctttagaaggattctagataggtcaccaagagactcaatatttaataacacggaaatggatgagcttgtcataaatgat

SEQ ID NO: 49411 - DNA, 80 bp, synthetic construct
  source 1..80: mol_type = other DNA
accataatcagcatctggctgggtactcatctaagacaataacaatggaaggtatttctgaattcaggtcgaaatcatgg

SEQ ID NO: 49412 - DNA, 80 bp, synthetic construct
  source 1..80: mol_type = other DNA
gaagaaggaggtcttctcaagagtatagaggccgagcttgatagtgagggatacatgatacctaagtatagagtcattaa

SEQ ID NO: 49413 - DNA, 80 bp, synthetic construct
  source 1..80: mol_type = other DNA
tcctggagggaatgaaagaaaaactctcgggtatatgtatttgatagcatatggatttgtagaagacacacctgatgaca

SEQ ID NO: 49414 - DNA, 80 bp, synthetic construct
  source 1..80: mol_type = other DNA
gatcaaaccatttgaaaccaactataagaactgtggctgcatttcctttcggggttggagcatgtgatgcatcgcctgat

SEQ ID NO: 49415 - DNA, 80 bp, synthetic construct
  source 1..80: mol_type = other DNA
gatctcttgaaaagtgcatgttctttagaagtctctgtaagaagaactgcaggtgctacagaaaagattgtgatgggagc

SEQ ID NO: 49416 - DNA, 80 bp, synthetic construct
  source 1..80: mol_type = other DNA
acgaggaactcttggagcattaacgccttggtcaagtgtgctcactaatggggcaatattcaatgcctctaaaatctgca

SEQ ID NO: 49417 - DNA, 80 bp, synthetic construct
  source 1..80: mol_type = other DNA
acaatgttgacttgatccagctaggtatcccccaaaggctcagaatatttttcttgtccataacattgttgacagataag

SEQ ID NO: 49418 - DNA, 80 bp, synthetic construct
  source 1..80: mol_type = other DNA
ggtgtttacaaaataccaaaaacaattcttgatttcagagaaagtaatgctgttgcgttcaatcttttggtttctcttag

SEQ ID NO: 49419 - DNA, 80 bp, synthetic construct
  source 1..80: mol_type = other DNA
aattgatactgacctgacaaaagctggcatgaaagggacaattgacaaagatgggaagagaatagctactttcatgctcc

SEQ ID NO: 49420 - DNA, 80 bp, synthetic construct
  source 1..80: mol_type = other DNA
atatagggaattttgtaagaagaggtaagaaaccttattcaatagaatactgtaaaaagaaggtcgaaatgatgtcgatg

SEQ ID NO: 49421 - DNA, 80 bp, synthetic construct
  source 1..80: mol_type = other DNA
actggaacttttatgattgcagtatcatctgttcttgctcaactctggattctagttgcaaaagcagtaactgcgcctga

SEQ ID NO: 49422 - DNA, 80 bp, synthetic construct
  source 1..80: mol_type = other DNA
atcttctccttaggagcagtggggggtttaagctttcacatcaggttcacaggcaaactcagtaagagattgattgcttc

SEQ ID NO: 49423 - DNA, 80 bp, synthetic construct
  source 1..80: mol_type = other DNA
gctttcacatcaggttcacaggcaaactcagtaagagattgattgcttctatgaaatttcatagaaacatttgctactgt

SEQ ID NO: 49424 - DNA, 80 bp, synthetic construct
  source 1..80: mol_type = other DNA
tatgaaatttcatagaaacatttgctactgtttgatggatataaatccaggtttgaataaattgacatggaaccatgaat

SEQ ID NO: 49425 - DNA, 80 bp, synthetic construct
  source 1..80: mol_type = other DNA
gtgaaatccagaaagtaacagcagtctttcaaccatcaattcctaaagatttcaagatctacgatgatgtgctcattgat

SEQ ID NO: 49426 - DNA, 80 bp, synthetic construct
  source 1..80: mol_type = other DNA
actacaggaaaaatactcaagaactaatgtcaaataagtcagtaatatcggaaggtcatatttcaatacttatcgatatc

SEQ ID NO: 49427 - DNA, 80 bp, synthetic construct
  source 1..80: mol_type = other DNA
acatttcttagatttataataatcagaggttaaatttaagaaataagcctatgcaataagtgttgagcttagttttctaa

SEQ ID NO: 49428 - DNA, 80 bp, synthetic construct
  source 1..80: mol_type = other DNA
taaggtgtatataacctaaccaagatataaaatattattatatttaagtacaaaatgtaatcactagttgttatattaaa

SEQ ID NO: 49429 - DNA, 80 bp, synthetic construct
  source 1..80: mol_type = other DNA
taatgaggttctaagattatattactactgcaaacgttgaacctgttaatctatacattaacatataattattggagtat

SEQ ID NO: 49430 - DNA, 80 bp, synthetic construct
  source 1..80: mol_type = other DNA
tacaaaaagtaagatgattgatgtggatcaaagagactgtggcttaagtaatccttacatactaatcaacctcatgtaat

SEQ ID NO: 49431 - DNA, 80 bp, synthetic construct
  source 1..80: mol_type = other DNA
attttcaactttagcctttattctacaaagttcttaaatcactatacgaaaatttttaagatttcataattataataagc

SEQ ID NO: 49432 - DNA, 80 bp, synthetic construct
  source 1..80: mol_type = other DNA
tgcaagtagttggtaattaataagactttatattaattattatgaatgatctacctcttttcaaacatttactatgtgat

SEQ ID NO: 49433 - DNA, 80 bp, synthetic construct
  source 1..80: mol_type = other DNA
tacagctgaggagagtgaaatgaaaagatggacaaaatatgtccaacagaaaagagtaaatccggacttcatgatctctg

SEQ ID NO: 49434 - DNA, 80 bp, synthetic construct
  source 1..80: mol_type = other DNA
tgtattgattggtctaaaagatggttaagaataaatgtttatataaatgttgtatatatatctaatcaacgatctgggtt

SEQ ID NO: 49435 - DNA, 80 bp, synthetic construct
  source 1..80: mol_type = other DNA
ataactggataaatgatatgactaataatttattcagtattattggtctataaatgtcataatcatatcattataatgat

SEQ ID NO: 49436 - DNA, 80 bp, synthetic construct
  source 1..80: mol_type = other DNA
gttaattctcaagtcaaaaaatgcacaataactattagctactatattgattggtaaacttggtataactatatattaga

SEQ ID NO: 49437 - DNA, 80 bp, synthetic construct
  source 1..80: mol_type = other DNA
tgataacatcataaatggatgaatcaacatataatgtcagctttattattcattaatcataaaaatgttcgatataagta

SEQ ID NO: 49438 - DNA, 80 bp, synthetic construct
  source 1..80: mol_type = other DNA
aaagtaaattaaaggtaattaagaaaaacttaggagaaagggaaatgtcatttgatgtctacgaagttccaccttcagag

SEQ ID NO: 49439 - DNA, 80 bp, synthetic construct
  source 1..80: mol_type = other DNA
gctagatcatatacttccaacactagtagaagaactagatatatcagaaaagattataagtgtactgctataattatact

SEQ ID NO: 49440 - DNA, 80 bp, synthetic construct
  source 1..80: mol_type = other DNA
attaataatattggctattactattacatctagttatttcgtaatttggttggtttcaaattctaacaaaactggatata

SEQ ID NO: 49441 - DNA, 80 bp, synthetic construct
  source 1..80: mol_type = other DNA
atacagagattgaccaacgaaattatcatactcaaaacagaatacaaccaattacaacaatacggcataacccaccaaat

SEQ ID NO: 49442 - DNA, 80 bp, synthetic construct
  source 1..80: mol_type = other DNA
aaatacccatttagaccaggaattcctgggagaaacgattgtcagagtagaacagtaccgaactacccgtagtaggttgt

SEQ ID NO: 49443 - DNA, 80 bp, synthetic construct
  source 1..80: mol_type = other DNA
tgacagttaatacagaacctcagtctgtcttaattagtatattggatcacgtggttttcgcaactctagataatttctgg

SEQ ID NO: 49444 - DNA, 80 bp, synthetic construct
  source 1..80: mol_type = other DNA
ctcggtggattggcacagcaagagcgctgatctcccaagatttgtcagtgcggaaattcatggttgaaatcttgattgaa

SEQ ID NO: 49445 - DNA, 80 bp, synthetic construct
  source 1..80: mol_type = other DNA
ttgacttacagaacaaatataaatattaaatttcctggatatactccctacacacagcaatcaggcttaatctaaatgac

SEQ ID NO: 49446 - DNA, 80 bp, synthetic construct
  source 1..80: mol_type = other DNA
taaactaagcaagataataaataacacagtaggtcttatactaatactattaactctgtcatttattctttatctcgttt

SEQ ID NO: 49447 - DNA, 80 bp, synthetic construct
  source 1..80: mol_type = other DNA
ttttagtctttaagtttgatgaagtttatggtaaacagttgatacagagattgattgatgactactcggattaaattata

SEQ ID NO: 49448 - DNA, 80 bp, synthetic construct
  source 1..80: mol_type = other DNA
atccgatattatatacccttttttggaaatatctaatatcaaagatcttacccagtaatattacgattatgaaagatttg

SEQ ID NO: 49449 - DNA, 80 bp, synthetic construct
  source 1..80: mol_type = other DNA
atctgtattgttgtaataatcacaatacttgcattagctgaactaatatatcttaactatctactttatcgtacatatac

SEQ ID NO: 49450 - DNA, 80 bp, synthetic construct
  source 1..80: mol_type = other DNA
tttaatcaatcataattaatagtatatacctatacatattatacaagatttccagtatttcagaatggcaagacttcaag

SEQ ID NO: 49451 - DNA, 80 bp, synthetic construct
  source 1..80: mol_type = other DNA
ttgtaattttgtatttgtacttgctagtagcatctgatgtagttaaagcaagcctagattttgacaacatgtcaaagatt

SEQ ID NO: 49452 - DNA, 80 bp, synthetic construct
  source 1..80: mol_type = other DNA
gggattataaaaggaaacacatacaattataaaatacggggtgaacctacaactaaattaatggttgttaagctgattcc

SEQ ID NO: 49453 - DNA, 80 bp, synthetic construct
  source 1..80: mol_type = other DNA
aaatattgatgtagtcgaaaattgttctgctactcaactagcaaattataagaaattagtaactaatgtattgacacctg

SEQ ID NO: 49454 - DNA, 80 bp, synthetic construct
  source 1..80: mol_type = other DNA
ttaaattatccttagataatatgctaaaaaatgtgcaagaccaaaataacagagtgaggttatttggggcaattatggct

SEQ ID NO: 49455 - DNA, 80 bp, synthetic construct
  source 1..80: mol_type = other DNA
gttgggattggagacaagatgttttcaacactaagagatgagacagagaaatttagggagtatcaagccaatctaggacg

SEQ ID NO: 49456 - DNA, 80 bp, synthetic construct
  source 1..80: mol_type = other DNA
gtcaaaaaggggggaacatcaaagggaaggttgaacgagatgattgctgacataggaaactacatcgaagagacaggtat

SEQ ID NO: 49457 - DNA, 80 bp, synthetic construct
  source 1..80: mol_type = other DNA
ggagcagcattaggtgtggcaacagcagcaacagtaacggcaggaattgcattacacagatccaatgagaacgcaaaaaa

SEQ ID NO: 49458 - DNA, 80 bp, synthetic construct
  source 1..80: mol_type = other DNA
tatagcaaaactcaagaatgcaattcagaacactaacttagccatcactaaattacaaatggcaggacaacaaactttgg

SEQ ID NO: 49459 - DNA, 80 bp, synthetic construct
  source 1..80: mol_type = other DNA
gggaacatcaaagggaaggttgaacgagatgattgctgacataggaaactacatcgaagagacaggtatggcaggtttct

SEQ ID NO: 49460 - DNA, 80 bp, synthetic construct
  source 1..80: mol_type = other DNA
ctgtaatcgataacatcagaggagaaatcaataatcaaataattcctgtcttaaaccaattatcatgtgagacagttggg

SEQ ID NO: 49461 - DNA, 80 bp, synthetic construct
  source 1..80: mol_type = other DNA
ctgaatgttggtataaaactaacacagtattattcagaagtgttaaccgcatttggtcctgctattcaagatcctgttaa

SEQ ID NO: 49462 - DNA, 80 bp, synthetic construct
  source 1..80: mol_type = other DNA
ctccaaaataaccattcaagctatatctaaagcattcaacaacaactttgatgaattattaaaggtgatgggatatactt

SEQ ID NO: 49463 - DNA, 80 bp, synthetic construct
  source 1..80: mol_type = other DNA
ctcaggatctctatgagatacttcatggagatctgataacaggtaatgttatcagtgcagatcctgaagcaggctatata

SEQ ID NO: 49464 - DNA, 80 bp, synthetic construct
  source 1..80: mol_type = other DNA
gctctggagatagagtttcccaacttatcaacagttccaaatgcttatgttcaagaacttatgccaataagtttcaatgt

SEQ ID NO: 49465 - DNA, 80 bp, synthetic construct
  source 1..80: mol_type = other DNA
ggatggtgatgaatgggtaacactagtacctaggtacgtgttaataaggacaacatttttatcaaatattgacataagcc

SEQ ID NO: 49466 - DNA, 80 bp, synthetic construct
  source 1..80: mol_type = other DNA
tatgctcaatcatggaaacaagtatagtatgtaataatgattatgctttacctatgtcttctgaattgattaactgtctc

SEQ ID NO: 49467 - DNA, 80 bp, synthetic construct
  source 1..80: mol_type = other DNA
caaggtgatacaggtgtttgtgcaagagaaaaggtcatatccagttatgtacctaaatttgcactttcgggcggtgttgt

SEQ ID NO: 49468 - DNA, 80 bp, synthetic construct
  source 1..80: mol_type = other DNA
ggcaggtttcttcttgactattaagtatggcttggagatgaagttttctgtaatcgtgatcaacgaatttcaggcggatc

SEQ ID NO: 49469 - DNA, 80 bp, synthetic construct
  source 1..80: mol_type = other DNA
atatgcaaactgtcttagtacagtatgtagatgcatggataatggaaccccgataagtcaagggatacgacatacagttg

SEQ ID NO: 49470 - DNA, 80 bp, synthetic construct
  source 1..80: mol_type = other DNA
cattacttgacaataaaaaatgttcagtttaccaagttggtgatatattgatctcagttggtaagtatttgggtcactta

SEQ ID NO: 49471 - DNA, 80 bp, synthetic construct
  source 1..80: mol_type = other DNA
gattataatacagaggacattgtacttgggccgcctatagtaatagataagatagacataggtaatcaattagctggcat

SEQ ID NO: 49472 - DNA, 80 bp, synthetic construct
  source 1..80: mol_type = other DNA
aaattcatccctccagcaagctgaaaattatattgataagtctaatgagatactcaaaagtataaatcctacaataatct

SEQ ID NO: 49473 - DNA, 80 bp, synthetic construct
  source 1..80: mol_type = other DNA
ctactaattcaatgatcacattatatatatttataataataactgtgattatagcaataacgtccttggtgttatcacta

SEQ ID NO: 49474 - DNA, 80 bp, synthetic construct
  source 1..80: mol_type = other DNA
aggttgactatgaaggctaaaattctaactaaccaattcgcatatgggaggcactcacctagtatggataatgtaagcta

SEQ ID NO: 49475 - DNA, 80 bp, synthetic construct
  source 1..80: mol_type = other DNA
tgtaagcagataacatcatatagagaatccgactatctgtttaatgttatgctcatgtaaggtttagtaagtccatatga

SEQ ID NO: 49476 - DNA, 80 bp, synthetic construct
  source 1..80: mol_type = other DNA
taataaatatcataatttagtaaaataggaatatccttacagtatattggttactaacaatcttaactttttaacataga

SEQ ID NO: 49477 - DNA, 80 bp, synthetic construct
  source 1..80: mol_type = other DNA
caataagcataatccatcattacatctgataaatacataaaaccgtatttagatttaataataattttttatttttatca

SEQ ID NO: 49478 - DNA, 80 bp, synthetic construct
  source 1..80: mol_type = other DNA
gtattcattataaaaaacttaggagtcaggtgtatcacacgatctagctccaacaaaccccccgtcacatatccacaaca

SEQ ID NO: 49479 - DNA, 80 bp, synthetic construct
  source 1..80: mol_type = other DNA
tgctcaccatacagactttgatgagaacatacatggaactgggcccaagagcaccgtacatggtgttgctggaggattca

SEQ ID NO: 49480 - DNA, 80 bp, synthetic construct
  source 1..80: mol_type = other DNA
caacaccaccccatcaaccaaagagatctacaagattgcaatcacccacaaaaacacccaattatacaacaaaacacaca

SEQ ID NO: 49481 - DNA, 80 bp, synthetic construct
  source 1..80: mol_type = other DNA
atcctcaagattcagaacactaatcacaggatatcaaaaggaacaataaattaggatataaatatataatattactaaga

SEQ ID NO: 49482 - DNA, 80 bp, synthetic construct
  source 1..80: mol_type = other DNA
aactgttaataatttaaaacaagagtaattcgataagagtagaataatttattcctttattggttgagtaaaggaataga

SEQ ID NO: 49483 - DNA, 80 bp, synthetic construct
  source 1..80: mol_type = other DNA
aacataagacgttaaaaatggcaaacacaaatacaagtaataaggtccagacaagggaatcaaccgttaagaaattttat

SEQ ID NO: 49484 - DNA, 80 bp, synthetic construct
  source 1..80: mol_type = other DNA
ggggtagacactgcagaaaaagtagctgatagtattagtaataataagctatttatattagcaaactctttactgatact

SEQ ID NO: 49485 - DNA, 80 bp, synthetic construct
  source 1..80: mol_type = other DNA
gcaccgttggatcaaatttgagtgatgttgttgaaactgaatgtgcagtctttttgaatcccattatagcaaaagactct

SEQ ID NO: 49486 - DNA, 80 bp, synthetic construct
  source 1..80: mol_type = other DNA
ccaatgacaccaagttctttggtgcttatggctggatatttcagtggaccagaaattagtgacaattttggcaagtacat

SEQ ID NO: 49487 - DNA, 80 bp, synthetic construct
  source 1..80: mol_type = other DNA
gcctttgcttttccaacagaacacttctaaggttacatttaggagtggtaatcataccataaagattgtaagcatggttc

SEQ ID NO: 49488 - DNA, 80 bp, synthetic construct
  source 1..80: mol_type = other DNA
ttgttgaccggcttatgtggttggataagcactttaaccagtacactaatgaaccagatggagtttttggtgacgttggc

SEQ ID NO: 49489 - DNA, 80 bp, synthetic construct
  source 1..80: mol_type = other DNA
aatgtttttgttgacaacgataatgttgccaaggttattaccatgagtgggtcatccgcgccagctaacagaggagccac

SEQ ID NO: 49490 - DNA, 80 bp, synthetic construct
  source 1..80: mol_type = other DNA
cttgatgctatgtaaagccacaaaaaatatccagactttcaattttgcagcaacagtgtacataccagcttataaagtaa

SEQ ID NO: 49491 - DNA, 80 bp, synthetic construct
  source 1..80: mol_type = other DNA
aagatggtgcaggtggcaaagatgttgttctgaatgtggcccagtgggaagcaaacaagactttgacatacccagctata

SEQ ID NO: 49492 - DNA, 80 bp, synthetic construct
  source 1..80: mol_type = other DNA
cctaaggacacatattttatggttgtaacaatgggaggtgctagctttaccatccaaaggtatgtggtatacaatgaggg

SEQ ID NO: 49493 - DNA, 80 bp, synthetic construct
  source 1..80: mol_type = other DNA
acttcagcctttggtgggaaactcagctgtgagtggtaccgtagctcgtgttagtcttaacatgactactggtcccactc

SEQ ID NO: 49494 - DNA, 80 bp, synthetic construct
  source 1..80: mol_type = other DNA
aattggtgatggcctagaattaccagcattctggggcaaatacttatcccagctatatggttttagttggagttcaccaa

SEQ ID NO: 49495 - DNA, 80 bp, synthetic construct
  source 1..80: mol_type = other DNA
cctatgcatgtgtaacctgggagcccatctatgctgatgagggtataccacatagaagtgcattaaatgatgatgaagta

SEQ ID NO: 49496 - DNA, 80 bp, synthetic construct
  source 1..80: mol_type = other DNA
agcagtgatggtggtactgattatgacactgacacagaagacgaagatgagttcttcggtgaggatcccattgctgcatt

SEQ ID NO: 49497 - DNA, 80 bp, synthetic construct
  source 1..80: mol_type = other DNA
gcacgctattgatgaaaagagaccagctagacgtgcaatgtttgatgcacttgttaaaactggtgtcagtgttgaagaag

SEQ ID NO: 49498 - DNA, 80 bp, synthetic construct
  source 1..80: mol_type = other DNA
aactggtgtcagtgttgaagaagcatctagatgtgtccttagagcatgtcctacaaaacttcaggttaagaaaaggaatc

SEQ ID NO: 49499 - DNA, 80 bp, synthetic construct
  source 1..80: mol_type = other DNA
tcaattcatggtctggtcttggagctcgaattcacaaggatgttagagttggttcaaatcttgtttggcgcattaaacag

SEQ ID NO: 49500 - DNA, 80 bp, synthetic construct
  source 1..80: mol_type = other DNA
cgtctagtgagtggaccttgtgaaacttggtggaaaaccaatacagctgaggacccatcattatctcttggacctgcact

SEQ ID NO: 49501 - DNA, 80 bp, synthetic construct
  source 1..80: mol_type = other DNA
ggaagtacataccataggtaagactatgagcacttataaaaatgaagtgttttccagtggactattccttcttgagataa

SEQ ID NO: 49502 - DNA, 80 bp, synthetic construct
  source 1..80: mol_type = other DNA
ctggccactgggaatttgcaaattatgctgcttctccagcccttgctacactcacacaacataaagatgacagtgagacc

SEQ ID NO: 49503 - DNA, 80 bp, synthetic construct
  source 1..80: mol_type = other DNA
acaaaaacacttgcaattagtgctgatggtgctaatgaaccagttgagatgctaatacctgtgaatgaatggaatatgaa

SEQ ID NO: 49504 - DNA, 80 bp, synthetic construct
  source 1..80: mol_type = other DNA
ggcacagtatggaggaaatggcacacttggtgaagcaatttaccaagttgttgataccagtgttacagttgtaacagacc

SEQ ID NO: 49505 - DNA, 80 bp, synthetic construct
  source 1..80: mol_type = other DNA
tctttccaccaccattttcatggattggtaaagcttcatggtggtttatcagaaaaatgattggtaaaacaaaacaattc

SEQ ID NO: 49506 - DNA, 80 bp, synthetic construct
  source 1..80: mol_type = other DNA
ggtgccagtgcaacttttgggccccttcaatccttgggcgcacagtatgcattatggaggctcaagtggctcgaagtcag

SEQ ID NO: 49507 - DNA, 80 bp, synthetic construct
  source 1..80: mol_type = other DNA
caggttgttgttaatggtcaaaaccaaactcttacagcagacgtctatcgtgtttacacttcagcttctgctgctagaga

SEQ ID NO: 49508 - DNA, 80 bp, synthetic construct
  source 1..80: mol_type = other DNA
tgataaaccagcaatttccagcaaggcacatgaagctaagcatctgactggtgcagttgttatcacacaaatttctacag

SEQ ID NO: 49509 - DNA, 80 bp, synthetic construct
  source 1..80: mol_type = other DNA
acaacattctttcagaaaccacatatacaggcccaagatccattgtcacaccagaaactcctattggcccgtctagctat

SEQ ID NO: 49510 - DNA, 80 bp, synthetic construct
  source 1..80: mol_type = other DNA
aacttcttcggatacctcatcatcttcggatacctcatcatcttcggtctctgtaacttccgttacggattgacaaatct

SEQ ID NO: 49511 - DNA, 80 bp, synthetic construct
  source 1..80: mol_type = other DNA
agtttttaagtttttggtaagtctttaagttttgttaagtctttaaagtttattagtgttaagtcatatatatggaattt

SEQ ID NO: 49512 - DNA, 80 bp, synthetic construct
  source 1..80: mol_type = other DNA
attggtgttgagtattgaattcatatatgatttattaattagaataaggttatatacaaatctattttattcatatatta

SEQ ID NO: 49513 - DNA, 80 bp, synthetic construct
  source 1..80: mol_type = other DNA
tggcttctttgatctacagacagttactatccaattcatacgtaacaaatatctctgatgaagtcagtgagattggagct

SEQ ID NO: 49514 - DNA, 80 bp, synthetic construct
  source 1..80: mol_type = other DNA
ttagatcattatcagctaatttaaatgatgtagtttgtagtggtggtgattatagctttgcattaccagtaggtgcgtat

SEQ ID NO: 49515 - DNA, 80 bp, synthetic construct
  source 1..80: mol_type = other DNA
ccagtaatgagtggtggcgcagtgacactgtcgccagcgggggttacattgtcaacgcaatttactgactatgtgtcgct

SEQ ID NO: 49516 - DNA, 80 bp, synthetic construct
  source 1..80: mol_type = other DNA
taattcattaagatttagatttagattagctgttagtgaaccacctttttcaatttcgcgaacgagactaagtggtatat

SEQ ID NO: 49517 - DNA, 80 bp, synthetic construct
  source 1..80: mol_type = other DNA
atggattaccagcagcgaatccaaataacaatgtacaatactatgaaatagctggtagattttcattaatatctttagtg

SEQ ID NO: 49518 - DNA, 80 bp, synthetic construct
  source 1..80: mol_type = other DNA
ccaactaatgatgactatcaaacaccaatagctaattcagtgacggtacgacaggacttggaaaggcaacttggtgaatt

SEQ ID NO: 49519 - DNA, 80 bp, synthetic construct
  source 1..80: mol_type = other DNA
gagggaagaatttaactcactatcgcaagaaattgcgctgtcacaactaattgatttagcgacactgccgctggacatgt

SEQ ID NO: 49520 - DNA, 80 bp, synthetic construct
  source 1..80: mol_type = other DNA
attgtccgattcaacgctggttcagccaacattggatggaccgtatcaacctaccacgtttaatttaccaatcgattatt

SEQ ID NO: 49521 - DNA, 80 bp, synthetic construct
  source 1..80: mol_type = other DNA
aatcaacagtagaagcagtaaaatctatgactacgaatattatgaaaaagtttaaaacatcaaacttggcgaatgctata

SEQ ID NO: 49522 - DNA, 80 bp, synthetic construct
  source 1..80: mol_type = other DNA
tcagacttaacaaataacatgtcagatgcagcttcttcaattagtagatctacgtcaataagatcagtaggtagtgatac

SEQ ID NO: 49523 - DNA, 80 bp, synthetic construct
  source 1..80: mol_type = other DNA
gacgatgcgaattagtaccactatacagaccggagaagatttaagaacagtgactgatgcatcaacgcaaatatcaaatg

SEQ ID NO: 49524 - DNA, 80 bp, synthetic construct
  source 1..80: mol_type = other DNA
ttagtagaagtttacggttacgtgaatttactacgcaaactgataacttgagttttgatgacatatcagctgctgtattg

SEQ ID NO: 49525 - DNA, 80 bp, synthetic construct
  source 1..80: mol_type = other DNA
gctgtattgaaaacgaaattggacaagtcgacacagatttcacaaaatacaataccagatataatatctgagtcatcaga

SEQ ID NO: 49526 - DNA, 80 bp, synthetic construct
  source 1..80: mol_type = other DNA
ggatgttaattgcaccaactcaaataggtagagtggcagagggtacgaatacgactgacagatggtttgcttgtgttcta

SEQ ID NO: 49527 - DNA, 80 bp, synthetic construct
  source 1..80: mol_type = other DNA
gttgaaccaaacgtacaaaatacacagagagaatatatcttagatggacaaacggtacagttgcaagtttcaaacacctc

SEQ ID NO: 49528 - DNA, 80 bp, synthetic construct
  source 1..80: mol_type = other DNA
gagtactctttggaaattcatactattcattaaactagagaaaaatggaacatattctcaatattcaacgctatctacgt

SEQ ID NO: 49529 - DNA, 80 bp, synthetic construct
  source 1..80: mol_type = other DNA
caaataagttatgtgcgtggatgaagagagaaggaagagtatactggtacgcgggaactacaccgaatgcatcagaaagt

SEQ ID NO: 49530 - DNA, 80 bp, synthetic construct
  source 1..80: mol_type = other DNA
tattatttgacaataaataatgataatagtaatgtgtcatgcgacgctgagttctacttgataccaagatcgcaaaccga

SEQ ID NO: 49531 - DNA, 80 bp, synthetic construct
  source 1..80: mol_type = other DNA
cttgtgtacgcagtatataaataatgggctacctccaatacaaaatactagaaacgtagtgccagtaagcataacatcaa

SEQ ID NO: 49532 - DNA, 80 bp, synthetic construct
  source 1..80: mol_type = other DNA
gagagataagacacacacgtgcacaaatgaacgaagatatagtggtatcgaaaacatcattgtggaaagagatgcagtat

SEQ ID NO: 49533 - DNA, 80 bp, synthetic construct
  source 1..80: mol_type = other DNA
aggaaaactacgaacgttacagttaatccaggaccattcgcacagactgggtacgctccagttaactggggacatggtga

SEQ ID NO: 49534 - DNA, 80 bp, synthetic construct
  source 1..80: mol_type = other DNA
tacaaatggtcagaaatatcatttaaaccaatgaattatcaatatacctatacaagagatggagaggaaataacagcaca

SEQ ID NO: 49535 - DNA, 80 bp, synthetic construct
  source 1..80: mol_type = other DNA
tacgacatgttcggttaatggagtaaatgacttcagctataatggtggtacgttaccaacagattttgcaatttctagat

SEQ ID NO: 49536 - DNA, 80 bp, synthetic construct
  source 1..80: mol_type = other DNA
accaaacaaggataattatggatatgaacacaatcaaaatgaatgataataacttaggactaaggtcttagtcttttgga

SEQ ID NO: 49537 - DNA, 80 bp, synthetic construct
  source 1..80: mol_type = other DNA
agatcaagaaacacaatcatgagtggaccagcaaaacaaaataaccctaaaatcaacacaagggaaacaaatgtcaagaa

SEQ ID NO: 49538 - DNA, 80 bp, synthetic construct
  source 1..80: mol_type = other DNA
attctatggtgtggaaactgcagaaaaggttgcagacagtattagtaataacaaattatttattttagcaaataccctgc

SEQ ID NO: 49539 - DNA, 80 bp, synthetic construct
  source 1..80: mol_type = other DNA
taatattgactagtactgtaatcataattaccttgaatataaccaacctagaaggtataaaacatcaaaatgaggttata

SEQ ID NO: 49540 - DNA, 80 bp, synthetic construct
  source 1..80: mol_type = other DNA
agaaatcttcatgatgagattaaatccaaaattgaaacaatcaacaacttagaacaaataattaagggagatctaaaacc

SEQ ID NO: 49541 - DNA, 80 bp, synthetic construct
  source 1..80: mol_type = other DNA
taaaatttcattgattaattcagctgtaagtgtgagtttgcctggtcagatttctaacttacagaataaaatgcttcaga

SEQ ID NO: 49542 - DNA, 80 bp, synthetic construct
  source 1..80: mol_type = other DNA
aatttaaaacactggaagattcggttattgatcagtgtacatgcaaccctttgtcagggatctttccttcaaaacctccg

SEQ ID NO: 49543 - DNA, 80 bp, synthetic construct
  source 1..80: mol_type = other DNA
cataccagcaaacctgatgatgaagaggatgataacgatttcactgatgatgacaaagttgatgacacaatccagggcat

SEQ ID NO: 49544 - DNA, 80 bp, synthetic construct
  source 1..80: mol_type = other DNA
agattatccaaccttcacaacatgcaataaaagtgaccactcaatgagtattacacctggacccaatctatatactgtac

SEQ ID NO: 49545 - DNA, 80 bp, synthetic construct
  source 1..80: mol_type = other DNA
cctcacttacttacagagaagataatgatgatgaatgtgtggtgaatccttcattttcaattggaacatcgatatatatg

SEQ ID NO: 49546 - DNA, 80 bp, synthetic construct
  source 1..80: mol_type = other DNA
tattcacaagagattagaaaaaccgattgcaaacaaggcccgttagtaggaataaaaataacactaggaagaattgtaga

SEQ ID NO: 49547 - DNA, 80 bp, synthetic construct
  source 1..80: mol_type = other DNA
caggaaacgaagtaggttgggtcctatgcagtacgacattagctgcaagctcaggagaaccaatacctaatatgtttgag

SEQ ID NO: 49548 - DNA, 80 bp, synthetic construct
  source 1..80: mol_type = other DNA
ggatttaaattatacaagttcgaacctgaaaaagaagtggttcagtatattattactaaaagagcatttaggttagacaa

SEQ ID NO: 49549 - DNA, 80 bp, synthetic construct
  source 1..80: mol_type = other DNA
tccatatcatactatgaatatagggaaaggtggaggtataataaaagaggatggactctactttcaaggatttggtgtta

SEQ ID NO: 49550 - DNA, 80 bp, synthetic construct
  source 1..80: mol_type = other DNA
tctataattcgggaaaagttgatccactttgtgatcatggaaaatgtccaggtgtcggatcttatatgcctacttgtctc

SEQ ID NO: 49551 - DNA, 80 bp, synthetic construct
  source 1..80: mol_type = other DNA
aagggcaccatatatggttttgttggaagattctatgcagactaagtttgctcctggtaattatccattgctttggagct

SEQ ID NO: 49552 - DNA, 80 bp, synthetic construct
  source 1..80: mol_type = other DNA
agtgccatgtcaatgatgggtgatgtggattttgtagttgtagataatattattaaggtagttgattatgatatagggaa

SEQ ID NO: 49553 - DNA, 80 bp, synthetic construct
  source 1..80: mol_type = other DNA
acctgtaatagatctcaaaacatttaaaattagtgaaacatatagagggtccaacggtaggatatatgatatgggcagca

SEQ ID NO: 49554 - DNA, 80 bp, synthetic construct
  source 1..80: mol_type = other DNA
aatttgggttatatcttgcatcatcttcatggaataggtttctaaagtttggaacttcgaatgatatgaatccagacagt

SEQ ID NO: 49555 - DNA, 80 bp, synthetic construct
  source 1..80: mol_type = other DNA
tttaaatgggcaaattttaagaccccaatcatgaatgttcaaacatcatgcagaaacacaaacgaaaatatgtgtccaca

SEQ ID NO: 49556 - DNA, 80 bp, synthetic construct
  source 1..80: mol_type = other DNA
agtttgttacggaactggttatgaagacatttttcctcttaatgatgatggatcatccaggacttatacaactataacaa

SEQ ID NO: 49557 - DNA, 80 bp, synthetic construct
  source 1..80: mol_type = other DNA
cgaatggatctagaacacaagtttacattagagcaagggttaatggaaataatgtaggctcaattcaggttttaaatgat

SEQ ID NO: 49558 - DNA, 80 bp, synthetic construct
  source 1..80: mol_type = other DNA
tactattttgtgtattcagctacaactagttgttttatgttcaaaaacgaagggtggtgcatagttatcaatgaagccaa

SEQ ID NO: 49559 - DNA, 80 bp, synthetic construct
  source 1..80: mol_type = other DNA
gctaaacaaaaatgataaacagagaatctatgcacactcttacagattaaagagattatgtatgtctggaatgagatcaa

SEQ ID NO: 49560 - DNA, 80 bp, synthetic construct
  source 1..80: mol_type = other DNA
ttaatagtacaacaggattgacaacagtcgttttgccatcaaacagacggacaagataatgtatgtgaaatctacataaa

SEQ ID NO: 49561 - DNA, 80 bp, synthetic construct
  source 1..80: mol_type = other DNA
taacctgtgaatgaaattatgaacactaattcagtacaacatggtacgagataattcccattattttaagtattgttgtt

SEQ ID NO: 49562 - DNA, 80 bp, synthetic construct
  source 1..80: mol_type = other DNA
tattaaatcaggtaattgataattaatgcctctaaatggtatataataagtctaaaattattcttaattgaagcctactg

SEQ ID NO: 49563 - DNA, 80 bp, synthetic construct
  source 1..80: mol_type = other DNA
tgaattttaaagaacaactcatgctacctcttgtgttttactgtgatgatgcagataaattaatgaatattgttagatgt

SEQ ID NO: 49564 - DNA, 80 bp, synthetic construct
  source 1..80: mol_type = other DNA
gattatatcttgattcaattgatgctgcactatatctacctctttatcacggtcatctcattatatttggcagtaattaa

SEQ ID NO: 49565 - DNA, 80 bp, synthetic construct
  source 1..80: mol_type = other DNA
tcacgatacatatgtgtaatcaaaaattatattaatgaaaataaatattatgtctatatagctgattataaaaaacttag

SEQ ID NO: 49566 - DNA, 80 bp, synthetic construct
  source 1..80: mol_type = other DNA
gggtcatgtacttctaccttgttgccaagcgtattgtactgactaccctagacacagctaccatacttcttcacatattt

SEQ ID NO: 49567 - DNA, 80 bp, synthetic construct
  source 1..80: mol_type = other DNA
gagctatatattctttatgagaacttagttagtatcaatgaaatatataaatagattataatgttagttaataattttat

SEQ ID NO: 49568 - DNA, 80 bp, synthetic construct
  source 1..80: mol_type = other DNA
tatcctgtttagattaatttgcgatatttttgatttaataaacttttgccaaattattgttattaatgttatatactaca

SEQ ID NO: 49569 - DNA, 80 bp, synthetic construct
  source 1..80: mol_type = other DNA
ataattatacgccaataagatctaatagatatactgaagattcttctgatactgttcttggtaagaaaaaccaaaagact

SEQ ID NO: 49570 - DNA, 80 bp, synthetic construct
  source 1..80: mol_type = other DNA
aaacacattgacaaataaaatcatataatctgtctactttgtttaattttgatattatagatacttataatagataacaa

SEQ ID NO: 49571 - DNA, 80 bp, synthetic construct
  source 1..80: mol_type = other DNA
tatgtgttgttttaaagttttgcatagttttataaaccctttttttaggttctttgatttttcatatagatgtttttaat

SEQ ID NO: 49572 - DNA, 80 bp, synthetic construct
  source 1..80: mol_type = other DNA
tttaagcttggacaaaatacagcaagaaagaatgcaggatctgttgacagaaagcttgctgcagaattgcaactaacaga

SEQ ID NO: 49573 - DNA, 80 bp, synthetic construct
  source 1..80: mol_type = other DNA
taattgatttgcatttaatagaacattagttaaatacaagatatataaggttgttaagaactaacttaggtttttacaaa

SEQ ID NO: 49574 - DNA, 80 bp, synthetic construct
  source 1..80: mol_type = other DNA
actatacaaaaagacaaaacaaatatacaaaaagaaaacactttttattctctttactgtataatctataatacgagaat

SEQ ID NO: 49575 - DNA, 80 bp, synthetic construct
  source 1..80: mol_type = other DNA
catgaattttacagatgtgtcagtttctgatatattatatcctgaatgtcatttaaacagtcctattgtaactgggaaaa

SEQ ID NO: 49576 - DNA, 80 bp, synthetic construct
  source 1..80: mol_type = other DNA
ttgtacaagcaattagatatagtgacttgccatgtaatcaaattcttaaagataataccctaaatgaaattatagatgtt

SEQ ID NO: 49577 - DNA, 80 bp, synthetic construct
  source 1..80: mol_type = other DNA
aaattaaggagcaaaaaattagggttgatagggagaagacagaaagaattcggtcagttgctccgagaaacagttcctga

SEQ ID NO: 49578 - DNA, 80 bp, synthetic construct
  source 1..80: mol_type = other DNA
tatcacaagttataaccatattccttatcctgaatctaattccaatcttttttatatcagtgatagtagtttaacaaaat

SEQ ID NO: 49579 - DNA, 80 bp, synthetic construct
  source 1..80: mol_type = other DNA
acttaggtaacattttaaattatgctaatcaaggttatcttaaaatatcttcaagactagttacattattagatagaact

SEQ ID NO: 49580 - DNA, 80 bp, synthetic construct
  source 1..80: mol_type = other DNA
gagtgtcagttgacaggtataaattctagatgcgacaatcagacaagaaatatttacaagaatattgaaaatttacctaa

SEQ ID NO: 49581 - DNA, 80 bp, synthetic construct
  source 1..80: mol_type = other DNA
aattatgactaggagtaaatggtatgaaccttttctattctggtttactattaagacagaaatgaggaacaatataaaag

SEQ ID NO: 49582 - DNA, 80 bp, synthetic construct
  source 1..80: mol_type = other DNA
aaaatagtaaatactcacgctacaacaagcctaacattactcaacttagtggaaagaaatattatgttcaaattaatatg

SEQ ID NO: 49583 - DNA, 80 bp, synthetic construct
  source 1..80: mol_type = other DNA
tgaacaactggatgagatcagagacatgatgaaagaagtgacgactcagaggcacgagacatccattcaggccagagagg

SEQ ID NO: 49584 - DNA, 80 bp, synthetic construct
  source 1..80: mol_type = other DNA
aatttgataactataattgattgggaaaagaagttgatttatcatctgactcctgagattgttctcatgtattgtgatgt

SEQ ID NO: 49585 - DNA, 80 bp, synthetic construct
  source 1..80: mol_type = other DNA
actagaaggtcgattgatgattgatacaacaatgttttctgatccgagataccacgaccttctagacagagctcatcaat

SEQ ID NO: 49586 - DNA, 80 bp, synthetic construct
  source 1..80: mol_type = other DNA
tgtgggaattactggactcaatgttttttgagtttggaaataatctttacaatattatatcaatgttagaacctcttaca

SEQ ID NO: 49587 - DNA, 80 bp, synthetic construct
  source 1..80: mol_type = other DNA
ttgggaattttgcaattgcatgataaagctactatattggcagggtcatttatgaatttttgtatggaagaaattcagaa

SEQ ID NO: 49588 - DNA, 80 bp, synthetic construct
  source 1..80: mol_type = other DNA
taaatgatttcacccatagaataattaatatcatgtcaatacctgacattcatcttatagctgaattcttttctttttat

SEQ ID NO: 49589 - DNA, 80 bp, synthetic construct
  source 1..80: mol_type = other DNA
aggacatttggtcaccctacattagaagccttaacagctgcagagaaagttaggtcacatatgcaaaaaccaaagatgct

SEQ ID NO: 49590 - DNA, 80 bp, synthetic construct
  source 1..80: mol_type = other DNA
tgaatttttacctatgatgaaagcacacgcaatattttgtgggattataatcaatggatatagagataggcatggaggag

SEQ ID NO: 49591 - DNA, 80 bp, synthetic construct
  source 1..80: mol_type = other DNA
ccgccagtcattttcccagatcatgtttcaccattgattaaaaggatttatggcaacagtgaagcattaacacatgagat

SEQ ID NO: 49592 - DNA, 80 bp, synthetic construct
  source 1..80: mol_type = other DNA
gcaaattcaatgtggctgcgggagggattgaaactctcataaatgacgaagatgatgactacacggaaaccagatttctt

SEQ ID NO: 49593 - DNA, 80 bp, synthetic construct
  source 1..80: mol_type = other DNA
tgtacatgaaagacaaagccctttcaccaataaagtcagagtgggacagtgtctatccaaaagaatcgatgtattacaaa

SEQ ID NO: 49594 - DNA, 80 bp, synthetic construct
  source 1..80: mol_type = other DNA
gtgtcacctgcaacaacatctagaagattggtagatgtgtttatcaatgatatagattttgatccttacaatattctaaa

SEQ ID NO: 49595 - DNA, 80 bp, synthetic construct
  source 1..80: mol_type = other DNA
acaagttggtagattgtttgcaaagatgacatataaaatgagagcttgccaggtagtagcagaatcattgatagcaaatg

SEQ ID NO: 49596 - DNA, 80 bp, synthetic construct
  source 1..80: mol_type = other DNA
tttcagcatctgctgtacccaaaaacgaaggttacaatcaagataattggagacttttaaagaatactacaaataaaatc

SEQ ID NO: 49597 - DNA, 80 bp, synthetic construct
  source 1..80: mol_type = other DNA
agggccaaatctaatatcaacaaggacataagagatatcatgaattcaaagacaatacataatcacataggctataaaca

SEQ ID NO: 49598 - DNA, 80 bp, synthetic construct
  source 1..80: mol_type = other DNA
actgaacacaaaattacaaaatagtgataacaatatgatcaagaaatgtaataaaaatcaacccattattaaggacaaca

SEQ ID NO: 49599 - DNA, 80 bp, synthetic construct
  source 1..80: mol_type = other DNA
ctaaagagataaaagaaaatattataaaggattattcagttagtgatactgatattaatcccacagagagatcagatgaa

SEQ ID NO: 49600 - DNA, 80 bp, synthetic construct
  source 1..80: mol_type = other DNA
aagtatgatacaataagctctttcttaacaacagatctacaaaaattctgcctaaattggagatatgaatccactgctat

SEQ ID NO: 49601 - DNA, 80 bp, synthetic construct
  source 1..80: mol_type = other DNA
caggaaacaggaagagaccaaatgagggcaatcagccatgggaattatatgcctccaactattaaatctgtcaacattga

SEQ ID NO: 49602 - DNA, 80 bp, synthetic construct
  source 1..80: mol_type = other DNA
tgaaaaggaacatattgaactagacgatattagagatgaaggtatttttataaaacatccaatgggtggcatagaaggtt

SEQ ID NO: 49603 - DNA, 80 bp, synthetic construct
  source 1..80: mol_type = other DNA
aaacttgtcatatcaggccaaaaaggatataagtgcagagcaggcaaagatttattttaaagctctaagaagaaatttag

SEQ ID NO: 49604 - DNA, 80 bp, synthetic construct
  source 1..80: mol_type = other DNA
ctgctttgggccacaatttgaaattgactgaaactataataagcacacatttttttatatattcaaaaagaatatattat

SEQ ID NO: 49605 - DNA, 80 bp, synthetic construct
  source 1..80: mol_type = other DNA
ctatatcaagatgtgtgttttggtcagagacattagtggatgagacacgatcagcatgtagtaatataagcacatcaatt

SEQ ID NO: 49606 - DNA, 80 bp, synthetic construct
  source 1..80: mol_type = other DNA
gctaaatcaatagaaaatggtttatcaaaagacataggctacagtcttaacatattgaaaacattgcaacaagtctgtat

SEQ ID NO: 49607 - DNA, 80 bp, synthetic construct
  source 1..80: mol_type = other DNA
atcattgaaattttccattaatgaaactatgacccctgatgttacaaaccctatactgcataatattaattggctactaa

SEQ ID NO: 49608 - DNA, 80 bp, synthetic construct
  source 1..80: mol_type = other DNA
ctgcatgtttaatgcctgcatctcttgggggattcaattacttaaatttatcaaggttatatgtacggaatattggtgat

SEQ ID NO: 49609 - DNA, 80 bp, synthetic construct
  source 1..80: mol_type = other DNA
tgattctaattctaattatcagacttcagggaagtagggcagggaatccaaaatgttttcaacattgagagatgaaacag

SEQ ID NO: 49610 - DNA, 80 bp, synthetic construct
  source 1..80: mol_type = other DNA
agacgctgaagggctggacaatgacctcaaagagaaacttctaaggaatatgtatgatgcagggttacatcaagacagat

SEQ ID NO: 49611 - DNA, 80 bp, synthetic construct
  source 1..80: mol_type = other DNA
cctcttacagcttcattggcagatgttaaaaggatgattaattcaagaatccttgaggaaaatattttgcaaaaaataat

SEQ ID NO: 49612 - DNA, 80 bp, synthetic construct
  source 1..80: mol_type = other DNA
gaatcaaactcctggtgatgcaacttttcttgattgggcaagcgatccttattctgctaatttacctagcactcaaagta

SEQ ID NO: 49613 - DNA, 80 bp, synthetic construct
  source 1..80: mol_type = other DNA
ttacaaagacaatcaagaatgttactgctaggttagttttgtcacatgccaaaaatcctattttgaaaggtttatttcat

SEQ ID NO: 49614 - DNA, 80 bp, synthetic construct
  source 1..80: mol_type = other DNA
gcaaattatagagatgaagatattcaattagctgaatttctgatggataggaatattattatgccaagagcagctcatga

SEQ ID NO: 49615 - DNA, 80 bp, synthetic construct
  source 1..80: mol_type = other DNA
agggattgattagaactggactgaacaagggtgggattcaaccgaggctagtatcaaaattatctcattatgattatgaa

SEQ ID NO: 49616 - DNA, 80 bp, synthetic construct
  source 1..80: mol_type = other DNA
gacacctctcacagggtagattaatttatggtttagaagtacctgatcctatcgaatccatgaaaggcgtgataataaca

SEQ ID NO: 49617 - DNA, 80 bp, synthetic construct
  source 1..80: mol_type = other DNA
gggagtgaattatgcactctatgtacagttgaaagtaccccttactgttggttttttgtacccaaggatgttgatcttga

SEQ ID NO: 49618 - DNA, 80 bp, synthetic construct
  source 1..80: mol_type = other DNA
tcaagttcaaaagcctaccaatagtattagggttccatatgtaggatctacaacagaagaaaggtcagagattaaattgg

SEQ ID NO: 49619 - DNA, 80 bp, synthetic construct
  source 1..80: mol_type = other DNA
atttgaaatttaaacagagccaggattcagggggtaatccaaacaaaattgactctagagctatgagttttgcatcatct

SEQ ID NO: 49620 - DNA, 80 bp, synthetic construct
  source 1..80: mol_type = other DNA
gtcatgttaaatcatcaagtagagctctaaaatcagctattcgtatagcaacagtatatacttgggcatttggagatgat

SEQ ID NO: 49621 - DNA, 80 bp, synthetic construct
  source 1..80: mol_type = other DNA
acgcgcaaacatagatttagaaatattaaaggcaatcacacctatatctacatcaaataatttggctcatagattacgtg

SEQ ID NO: 49622 - DNA, 80 bp, synthetic construct
  source 1..80: mol_type = other DNA
tctttcaacaagtgatgctgttaggactatcagcattggaacaacgttatagatatttaaacaacacagggaaatccaat

SEQ ID NO: 49623 - DNA, 80 bp, synthetic construct
  source 1..80: mol_type = other DNA
gtcatttatcatttgcatgcagtaacgagttgttgtataattgagatgtcatctgtaggaataataccctctattaggga

SEQ ID NO: 49624 - DNA, 80 bp, synthetic construct
  source 1..80: mol_type = other DNA
ggcccccgaatatcatgagataaaggaaaatagattaatttatgataatgatcctgttctagaaaaagatatagagaaac

SEQ ID NO: 49625 - DNA, 80 bp, synthetic construct
  source 1..80: mol_type = other DNA
cactggctcaaactattatagaatctatatctaaaagtgatagagatgtcttgaaacattttatttctgttaactcggat

SEQ ID NO: 49626 - DNA, 80 bp, synthetic construct
  source 1..80: mol_type = other DNA
gacaatgttaatagtcttataacagagtttttgcttgttgatccaaatttactaagcatatacctaggtcaagcatgtgc

SEQ ID NO: 49627 - DNA, 80 bp, synthetic construct
  source 1..80: mol_type = other DNA
gcatctcttcttgatgatagatcagaaacaagcaaaccagcaacacctggtgcatctgctcttaatgatcttgaagcatt

SEQ ID NO: 49628 - DNA, 80 bp, synthetic construct
  source 1..80: mol_type = other DNA
cgtcaaatgggcttttgatgttcattttaaaagaccacaagggaaatggcagatgatagaattaattaatgatcttttat

SEQ ID NO: 49629 - DNA, 80 bp, synthetic construct
  source 1..80: mol_type = other DNA
cattgacacatcctaaaatatttagaaagttctgggacgcaggtttactttcacctaattacggtccttatttctataat

SEQ ID NO: 49630 - DNA, 80 bp, synthetic construct
  source 1..80: mol_type = other DNA
caagatgcatcaaaattagccattgatcttataataacatcttatacaatgtatctaacagtttggttggaagggaggaa

SEQ ID NO: 49631 - DNA, 80 bp, synthetic construct
  source 1..80: mol_type = other DNA
tttagaatgtttaatagctgaacaatctatagaggcagtggagactagagtggatacagttcaatcaaaacatctctgta

SEQ ID NO: 49632 - DNA, 80 bp, synthetic construct
  source 1..80: mol_type = other DNA
tgctttgtgacctttactgtaatgatggtgaaccacctcatatcagggaacttctaccacatcaaaagtttgaagtatta

SEQ ID NO: 49633 - DNA, 80 bp, synthetic construct
  source 1..80: mol_type = other DNA
agtgatttcatcaacaaaatgaagtttattactagtggctcagagtcctggaatactcaaccgttgagactatgcgttta

SEQ ID NO: 49634 - DNA, 80 bp, synthetic construct
  source 1..80: mol_type = other DNA
tgctgcatcattaacatacttgagaagagggattataaaacagctaagaatcagacaggatattaatagggattttgatg

SEQ ID NO: 49635 - DNA, 80 bp, synthetic construct
  source 1..80: mol_type = other DNA
taatggaaatagatcatcgtcaatctaggttcacaatggaaagtgcgctcaattatcaacctaaaacttcatgtactatt

SEQ ID NO: 49636 - DNA, 80 bp, synthetic construct
  source 1..80: mol_type = other DNA
agaattacaattgatgatttgagacctattaactgctgggaatcacataaatatcgaagagttggaataaattcaacatc

SEQ ID NO: 49637 - DNA, 80 bp, synthetic construct
  source 1..80: mol_type = other DNA
aaataactgataaaatcagaaatatctgagtataaattaacactaatttttttatctgaataagctataatttaaacaaa

SEQ ID NO: 49638 - DNA, 80 bp, synthetic construct
  source 1..80: mol_type = other DNA
tggttacaaagctctagaattgtacacaataatccaaaggtattaccctgaaaactcagacagattatttataggagagg

SEQ ID NO: 49639 - DNA, 80 bp, synthetic construct
  source 1..80: mol_type = other DNA
ggtcaggaaatatgcttagtgtgtattataaactattaggttctgccaggtgttattataattcaggtattagtgaattt

SEQ ID NO: 49640 - DNA, 80 bp, synthetic construct
  source 1..80: mol_type = other DNA
gatgttataggccagagagaattaaggttatatccttcagaagcttgtattgttgatttcaataagggtgaaaattacca

SEQ ID NO: 49641 - DNA, 80 bp, synthetic construct
  source 1..80: mol_type = other DNA
aattctacaaaatattattcctctcttcaacggtagaccagaaaccacatgggttggtaatgatgattgttttatacata

SEQ ID NO: 49642 - DNA, 80 bp, synthetic construct
  source 1..80: mol_type = other DNA
ttatgaaatctatcaaaagtcacacgattggactagttcatagtgatatggaaagtggtaatgataaagaacatcttgaa

SEQ ID NO: 49643 - DNA, 80 bp, synthetic construct
  source 1..80: mol_type = other DNA
gttttagttgaacatagtcacttaatagccatctctataaacttattacgaacagacgggatatttgtctccaaaattaa

SEQ ID NO: 49644 - DNA, 80 bp, synthetic construct
  source 1..80: mol_type = other DNA
tcctcctataggttttcctttatcatcactttttaatatgtataaagcttattacatagatattaaagtagcctttccaa

SEQ ID NO: 49645 - DNA, 80 bp, synthetic construct
  source 1..80: mol_type = other DNA
aatatagtaaccctaattctactgagtgctacttaatatgcactcaacctagaattcttacattaacaacgcctaataat

SEQ ID NO: 49646 - DNA, 80 bp, synthetic construct
  source 1..80: mol_type = other DNA
gttatggaacattcaatagacaagcctccagaatgtgatagaactgtaatgaattatattctgacactgaaattcagaat

SEQ ID NO: 49647 - DNA, 80 bp, synthetic construct
  source 1..80: mol_type = other DNA
ttatacatcattcgaagatcaaggattgaatgccactgataaccgtaataagagaaagtttaacaaaatacataagagtg

SEQ ID NO: 49648 - DNA, 80 bp, synthetic construct
  source 1..80: mol_type = other DNA
taattaaatgagtgaaatctgaaaatacaattgtataatttttatactcaataattatttgtgcatttatggatgtaaaa

SEQ ID NO: 49649 - DNA, 80 bp, synthetic construct
  source 1..80: mol_type = other DNA
atataaaggatagaattgaatatcatgatagaaaaattaataataagaaccagtcaggatttaacaaatcaatactaaat

SEQ ID NO: 49650 - DNA, 80 bp, synthetic construct
  source 1..80: mol_type = other DNA
ttgaactcgaatctaacagtagatgacaaaatcctacttgagtgtggtctttctttaaatggacctataatttgcaagaa

SEQ ID NO: 49651 - DNA, 80 bp, synthetic construct
  source 1..80: mol_type = other DNA
gcttttgtctttcgatgtaggtagtcctataagtactttgttggaatcatcatttatgttacttaatgaggcattgaata

SEQ ID NO: 49652 - DNA, 80 bp, synthetic construct
  source 1..80: mol_type = other DNA
tatatgaccataacagactaccgactactttttttgaaccttaccctgtgttagaatcgacaaaacttaagagatatatg

SEQ ID NO: 49653 - DNA, 80 bp, synthetic construct
  source 1..80: mol_type = other DNA
aacaagtttataagaaagataataggctatacatatctgatgtatctgaactttgatattgatctgtgtaataagcatat

SEQ ID NO: 49654 - DNA, 80 bp, synthetic construct
  source 1..80: mol_type = other DNA
ctcaaatttaaagaggaggtacctaatatttgattttaatgattataaaagaacaaagatcataccaggttattattaca

SEQ ID NO: 49655 - DNA, 80 bp, synthetic construct
  source 1..80: mol_type = other DNA
aacgaattaagaagaactcatttaaacagaattggctgattgagttggaaaccaaggaaatcaaaatgtggtggaaatta

SEQ ID NO: 49656 - DNA, 80 bp, synthetic construct
  source 1..80: mol_type = other DNA
atatcctatgttccaatttacaattcttgatacagtgatccatcaccagtccgagaaattattagtagaattaagaaaaa

SEQ ID NO: 49657 - DNA, 80 bp, synthetic construct
  source 1..80: mol_type = other DNA
ccgagaaattattagtagaattaagaaaaacttaatcaaagaaaattgatgtaactaatcatatatcaccattgtgtggt

SEQ ID NO: 49658 - DNA, 80 bp, synthetic construct
  source 1..80: mol_type = other DNA
tatctacttgtatataaattagttatataaataatttttataattgttagatttagatctatctttggattaattaagtg

SEQ ID NO: 49659 - DNA, 80 bp, synthetic construct
  source 1..80: mol_type = other DNA
gattataaaaaacttaggaggcaggtgtggataaataagtcacaaataaatggcatgttcttctacaattgatctctcct

SEQ ID NO: 49660 - DNA, 80 bp, synthetic construct
  source 1..80: mol_type = other DNA
acacaggcagtgagagtcatacagtgagttccactgacgacagcactagcgtgaaaaacaggagaaaacaatcgaaccca

SEQ ID NO: 49661 - DNA, 80 bp, synthetic construct
  source 1..80: mol_type = other DNA
acaaaaataataatttgtgaacaagaagagatcgatagaattaagaaacaccaagaaactacttccaaaatcaagcagtg

SEQ ID NO: 49662 - DNA, 80 bp, synthetic construct
  source 1..80: mol_type = other DNA
gtatcttaaatcgatcgctaaaagaaaggcaggtaatttggatagtcaagttcaagctttcgtagaattggataaaagac

SEQ ID NO: 49663 - DNA, 80 bp, synthetic construct
  source 1..80: mol_type = other DNA
aaaaatttagagagtatcaggctaatctggggcggcaaggcagaccattagcagcaactgctacacttacaactaagatt

SEQ ID NO: 49664 - DNA, 80 bp, synthetic construct
  source 1..80: mol_type = other DNA
cgaaatcatgtcccacgaggatagaatcaggcaaattcagaatggcctcaagattatcgacttggtcgacgagattaggt

SEQ ID NO: 49665 - DNA, 80 bp, synthetic construct
  source 1..80: mol_type = other DNA
caaataaccagcagaaaccaacctatggcagaagcgcaatcagcctgccaacaacaagagaaagaacaaatgcctgggag

SEQ ID NO: 49666 - DNA, 80 bp, synthetic construct
  source 1..80: mol_type = other DNA
aaagagagatgacaacactgaagagcgagatgaacgaggctctgaacatgatgacaatgatatttctgggagaggagaaa

SEQ ID NO: 49667 - DNA, 80 bp, synthetic construct
  source 1..80: mol_type = other DNA
gaacttttaaggagtcaacatgggatgactcagacaacatcatatttgaaaattcattggctacaaacattcaacagaat

SEQ ID NO: 49668 - DNA, 80 bp, synthetic construct
  source 1..80: mol_type = other DNA
caagaagggaatcttccaacaggatcactgataacaagaatgatgacagcaaacgtgataacacatcacgaggcgggcag

SEQ ID NO: 49669 - DNA, 80 bp, synthetic construct
  source 1..80: mol_type = other DNA
agcaatggacgtgctgaggatgatcagattaatttgcccagcatactcaagggtggtctatctgcagacagagatgcttc

SEQ ID NO: 49670 - DNA, 80 bp, synthetic construct
  source 1..80: mol_type = other DNA
ttcgagatttggtgagtcaacaaaatcagtcatgaatcctaatgctaaagaatatataccaaaatacgtctatgatcagt

SEQ ID NO: 49671 - DNA, 80 bp, synthetic construct
  source 1..80: mol_type = other DNA
ggtcaagaggaggtaaccaagactctccagaaagcaaggctccagtcactggtatccagttggaaaacaaggtaggccct

SEQ ID NO: 49672 - DNA, 80 bp, synthetic construct
  source 1..80: mol_type = other DNA
gaaatccctccagctaaacctgggatgcaaaagaaaataaaagatagtgacaagtatcctgaattccaaggaatcaattc

SEQ ID NO: 49673 - DNA, 80 bp, synthetic construct
  source 1..80: mol_type = other DNA
gcctccgcctattcctaaaaaaagaggttgtgtgttgctgataccagatacaaatattgaaccaatagagtcagaaggct

SEQ ID NO: 49674 - DNA, 80 bp, synthetic construct
  source 1..80: mol_type = other DNA
gtcgtatacaatccggtttcaaagagcccctcattaagatgggagattgccaaatttgctatgagactaatgtggtcacc

SEQ ID NO: 49675 - DNA, 80 bp, synthetic construct
  source 1..80: mol_type = other DNA
ctgaggaagaagaagaggatgaagatcaaattgtaccaaccggaaacacagaaaagaattctgaattccgaaacagtgct

SEQ ID NO: 49676 - DNA, 80 bp, synthetic construct
  source 1..80: mol_type = other DNA
gctctctcatcatcacaagagactatattccagatttctgactatgaaacagacaatgaaagacgaaacaaaatgggatc

SEQ ID NO: 49677 - DNA, 80 bp, synthetic construct
  source 1..80: mol_type = other DNA
aagactaccaaaagagattgagaaagaagtcatcaaagaaggacagaaaggaaatggtaaaaaggaagaagtaacaaaga

SEQ ID NO: 49678 - DNA, 80 bp, synthetic construct
  source 1..80: mol_type = other DNA
aggctggcaattcttcagacaaggaaaagaaacccaaaaaagaaggtcgcaagttgagggctctacaaaacactgatgca

SEQ ID NO: 49679 - DNA, 80 bp, synthetic construct
  source 1..80: mol_type = other DNA
ggaacagccggaccaaacagcagcaatgtctcagaagaagggagtattaaaaagggcacagaagagaatacagtctttcc

SEQ ID NO: 49680 - DNA, 80 bp, synthetic construct
  source 1..80: mol_type = other DNA
tgcaacccttcatgttcccgtatacgatcagaagccatcagggaagactgcacctgtttccagtgccctccagaatgctc

SEQ ID NO: 49681 - DNA, 80 bp, synthetic construct
  source 1..80: mol_type = other DNA
acaagaagggtgtacaggaattagatatgcaacaagacagtcatagaaaagattcaagtaatgaatctggattaacaaca

SEQ ID NO: 49682 - DNA, 80 bp, synthetic construct
  source 1..80: mol_type = other DNA
ccttcagggagttcaataagctttgatgattattttgagaaattaacaaataatatgaaaactgaagatatattgaaaga

SEQ ID NO: 49683 - DNA, 80 bp, synthetic construct
  source 1..80: mol_type = other DNA
gatatataaaaatcaattggaaatattaactaggatcacagaaaaagaaagtttgattgctgttatcagggagttacaaa

SEQ ID NO: 49684 - DNA, 80 bp, synthetic construct
  source 1..80: mol_type = other DNA
tgcagctgcacactctgtcaaagttggggcagcattaacattactaacatctcatgcagagaatcctggctctatgatta

SEQ ID NO: 49685 - DNA, 80 bp, synthetic construct
  source 1..80: mol_type = other DNA
atacacaaaaaacaacaaacagtaagattgagtctcttgagagaaacataggcaaactgggcttggctgtatcatctatg

SEQ ID NO: 49686 - DNA, 80 bp, synthetic construct
  source 1..80: mol_type = other DNA
gagcaaatgattgcatcaatgaggatcatgatccctgggaaaccggaagatcaaaactctaaagataaacccaaaaatcc

SEQ ID NO: 49687 - DNA, 80 bp, synthetic construct
  source 1..80: mol_type = other DNA
tttgttgaaacctgtgattgcaagacagactctcaaaccagatgaggtgatagatataaatcccgattttactgatctgt

SEQ ID NO: 49688 - DNA, 80 bp, synthetic construct
  source 1..80: mol_type = other DNA
caaaatcaacaattaagaagaaattatttatagagcctatagatgacacaaaagcaaatgcttcacaatttatacctgag

SEQ ID NO: 49689 - DNA, 80 bp, synthetic construct
  source 1..80: mol_type = other DNA
aatgataatagcaccttgaatactttatatgcactagtaatgaacagagttagagataaagatctaaaagaagcattctt

SEQ ID NO: 49690 - DNA, 80 bp, synthetic construct
  source 1..80: mol_type = other DNA
gtttgctataaagaaagctaaatcaaaagaagagattgagattttatatactaatatcactaaagcggtaagaggaaatc

SEQ ID NO: 49691 - DNA, 80 bp, synthetic construct
  source 1..80: mol_type = other DNA
tttgataagaaacagaaattcggtacttgattaatataattaaatataataattatatttatatcttataatataatata

SEQ ID NO: 49692 - DNA, 80 bp, synthetic construct
  source 1..80: mol_type = other DNA
tccatttataaataatgattaatatacatgatttgatattaatattaaatataattgatactatatatggtaattatatc

SEQ ID NO: 49693 - DNA, 80 bp, synthetic construct
  source 1..80: mol_type = other DNA
atttataattctcttcatatattatcaatattagtagaaatgttagaagttttatttgatatgaataatgaggactgatc

SEQ ID NO: 49694 - DNA, 80 bp, synthetic construct
  source 1..80: mol_type = other DNA
aattcgattagaaaaaacttagggagcaggtatagtagtacaatcattgatgattacttctaatctgctcccacactaaa

SEQ ID NO: 49695 - DNA, 80 bp, synthetic construct
  source 1..80: mol_type = other DNA
gatctttagtaaatgacccagatattgaggttgttgtcttagacgttggtgaattcgaaaacggagttcctagacttgag

SEQ ID NO: 49696 - DNA, 80 bp, synthetic construct
  source 1..80: mol_type = other DNA
ttatagtgtgttaaatactatataactatatataatatagttgccatacactgctctaattgaaaacactaatcaaaatt

SEQ ID NO: 49697 - DNA, 80 bp, synthetic construct
  source 1..80: mol_type = other DNA
tagattgattgaaatctatataattccacaaatcaacaaacacctaccacaaataggaacaaaaatcacaactccataat

SEQ ID NO: 49698 - DNA, 80 bp, synthetic construct
  source 1..80: mol_type = other DNA
taacttaagttagttctatattaatagtcaaaaatggaaggaatttctgattttagaccaaaatcctgggaagaaggtgg

SEQ ID NO: 49699 - DNA, 80 bp, synthetic construct
  source 1..80: mol_type = other DNA
gctgttgaaaagtatagaggcagaattagatgaggacgggtatatgatacctaaatacagagtaataaacccaggaggaa

SEQ ID NO: 49700 - DNA, 80 bp, synthetic construct
  source 1..80: mol_type = other DNA
agatctttgaatgtgaaacctacaatcagaacagtggcagcctttccatttggagtaggatcatcagaagcatcgcctga

SEQ ID NO: 49701 - DNA, 80 bp, synthetic construct
  source 1..80: mol_type = other DNA
agatttgctcagaagtgcatgtgcactagaggtgtccgtgcgcagaactgcaggtgcaactgagaaaattgtgatgggtg

SEQ ID NO: 49702 - DNA, 80 bp, synthetic construct
  source 1..80: mol_type = other DNA
cgaaaggaacactgggagctctcacaccatggtcttcagttctaaccaacggtgctattttcaatgcttctaaaatttgt

SEQ ID NO: 49703 - DNA, 80 bp, synthetic construct
  source 1..80: mol_type = other DNA
aataatgtggatttgattcaacttggtataccccagagattaagaatatttttcctgtcaattacgttattaactgataa

SEQ ID NO: 49704 - DNA, 80 bp, synthetic construct
  source 1..80: mol_type = other DNA
gggtgtttataaaataccaaaaactgttctggattttagagaaagcaatgcagtagcatttaatttgcttgtctctttaa

SEQ ID NO: 49705 - DNA, 80 bp, synthetic construct
  source 1..80: mol_type = other DNA
ttaagaatagacactgatttgacaagagcaggcatgaagggcaccatagataaagacggaagacgtgtggcaacatttat

SEQ ID NO: 49706 - DNA, 80 bp, synthetic construct
  source 1..80: mol_type = other DNA
agaaggggtgagaggggtgagcaacagatggcaagcttcaggagaattcttgacagagccccaagagaccctatgttcat

SEQ ID NO: 49707 - DNA, 80 bp, synthetic construct
  source 1..80: mol_type = other DNA
agatgatggctatggtcttttctcttggtgcagtaggaggtctaagctttcatatccggttcacagggaaactcagcaaa

SEQ ID NO: 49708 - DNA, 80 bp, synthetic construct
  source 1..80: mol_type = other DNA
gcttgatggacatcaatccaggactcaacaaactcacttggaatcatgagtgtgaaattcagaaaataactgctgttttc

SEQ ID NO: 49709 - DNA, 80 bp, synthetic construct
  source 1..80: mol_type = other DNA
acactacaggaaaaatactgaaaaattaatttcgggaatattcagaaaatcaaatataataatggatgtatttgtgcaga

SEQ ID NO: 49710 - DNA, 80 bp, synthetic construct
  source 1..80: mol_type = other DNA
tgaaagagtaggtatattacgattatgaagatggatcatttgatttatcaataatttatgtagaacctacaatttaatac

SEQ ID NO: 49711 - DNA, 80 bp, synthetic construct
  source 1..80: mol_type = other DNA
atgattttaattataaagagaaaaataaattacactgataggttaaattaagcaagttgtataaattaaatacctgatta

SEQ ID NO: 49712 - DNA, 80 bp, synthetic construct
  source 1..80: mol_type = other DNA
aacattataactacattattaaatgataatcttgatttcattataaatagataggaatgtagatatgtgtaatagtttat

SEQ ID NO: 49713 - DNA, 80 bp, synthetic construct
  source 1..80: mol_type = other DNA
ccctgttaatgtgaactgctcactgtgaaagataaatttagattaatagaatattagaataaaaattttattactaaata

SEQ ID NO: 49714 - DNA, 80 bp, synthetic construct
  source 1..80: mol_type = other DNA
tgaatactttgagatataaaacctttgctaaattatcttgataggtctaataaagttatataatattaaattaatatagg

SEQ ID NO: 49715 - DNA, 80 bp, synthetic construct
  source 1..80: mol_type = other DNA
gaacacagaaatagatgaaatggagattcatgacactggcacatatatgatagctatttcatctgtgttggctcaagtct

SEQ ID NO: 49716 - DNA, 80 bp, synthetic construct
  source 1..80: mol_type = other DNA
acccaaaacacaataaacttgatgtttattttaagacacaaatagagtaaattcataagcaattactgcatgatttaaca

SEQ ID NO: 49717 - DNA, 80 bp, synthetic construct
  source 1..80: mol_type = other DNA
aacgatagataataattatactttgtcaattaggtactgaatttcttaaggtgctaaatattataaaaaacttaggagga

SEQ ID NO: 49718 - DNA, 80 bp, synthetic construct
  source 1..80: mol_type = other DNA
caagctatgtcctttgatgtatatgaagttcctgactcttgttctagatcattccgaacaacatcaagcagaaggtctag

SEQ ID NO: 49719 - DNA, 80 bp, synthetic construct
  source 1..80: mol_type = other DNA
atatatcagaaaagactacaagtgtactattattatagtactagtggtgatattggctgtaaccataacatcaagttatt

SEQ ID NO: 49720 - DNA, 80 bp, synthetic construct
  source 1..80: mol_type = other DNA
ttgtaatttggttggtttcatcaaatagcaaagctggatataatacagaagcttaccaacgaaataataactttgaaaac

SEQ ID NO: 49721 - DNA, 80 bp, synthetic construct
  source 1..80: mol_type = other DNA
agagtacaatcaattacaacagtacggacacgctcatcaagtaaacacccatttagaccaggaattcctgggcgaaacaa

SEQ ID NO: 49722 - DNA, 80 bp, synthetic construct
  source 1..80: mol_type = other DNA
gttgacttataagactaacataaacataaaatttcctggatacacttcttatgcccaatatacaggatcattataaatga

SEQ ID NO: 49723 - DNA, 80 bp, synthetic construct
  source 1..80: mol_type = other DNA
gatttggaaaaaaatgtatcaatacatctttagcagtgacattaatagtcctgacagtgggttttttgttgtatctggta

SEQ ID NO: 49724 - DNA, 80 bp, synthetic construct
  source 1..80: mol_type = other DNA
tatcttgtttttaaatttgatgatatattaggaagaaaattactagaaggctttttgtcaagatatttagattgatttta

SEQ ID NO: 49725 - DNA, 80 bp, synthetic construct
  source 1..80: mol_type = other DNA
aaaatttctaaagattaattaaataagtaaattataagttttaacattatattatattgatatctaattgatcaaataaa

SEQ ID NO: 49726 - DNA, 80 bp, synthetic construct
  source 1..80: mol_type = other DNA
gataatagtaatttgttggtagctcacaatctatatctgtattagaatcagagtaacattctattgttaattaattgatt

SEQ ID NO: 49727 - DNA, 80 bp, synthetic construct
  source 1..80: mol_type = other DNA
taaaatagatactgatatcttaatttttctaatatataatctagatttattaggaatcacatgattgatttatgatgatc

SEQ ID NO: 49728 - DNA, 80 bp, synthetic construct
  source 1..80: mol_type = other DNA
gctttacacatttttttaatcattattgtgatagtggttttatttgaactcatttacctaaattgcttattatactatac

SEQ ID NO: 49729 - DNA, 80 bp, synthetic construct
  source 1..80: mol_type = other DNA
atttttcagtaacaaattgacatattgaaagtatagcgtctagtaaagaatttaacaaaatttcttattgtaattggtaa

SEQ ID NO: 49730 - DNA, 80 bp, synthetic construct
  source 1..80: mol_type = other DNA
taatcaagaaataattttaagttgataggagtgtaatcttgatttctcaatttagaatttatattgtatactgttaatta

SEQ ID NO: 49731 - DNA, 80 bp, synthetic construct
  source 1..80: mol_type = other DNA
aaatcacatcattattagaccagtatatttatgctatttaacatcaactttaaaataatttcaaattaagaattcaaaca

SEQ ID NO: 49732 - DNA, 80 bp, synthetic construct
  source 1..80: mol_type = other DNA
tggctaaattcgtttttcttaagactatgtgtattggtttattgattataattagtgatcgtgtggattctagtatggat

SEQ ID NO: 49733 - DNA, 80 bp, synthetic construct
  source 1..80: mol_type = other DNA
ttccatagtttatcaaaaataggaattattaaaggtaagacttataattataaaataagaggtgagcctaacacaaaatt

SEQ ID NO: 49734 - DNA, 80 bp, synthetic construct
  source 1..80: mol_type = other DNA
tctggacctggttaaaaaacaaagagaaaacaaaaataaaaaaacaaaataaggataggtagttaaacatttgttaatac

SEQ ID NO: 49735 - DNA, 80 bp, synthetic construct
  source 1..80: mol_type = other DNA
aatggtaataaaattgatacctaacatagatgttgttgagaattgttctactactcaggtaaataattacaagaaattag

SEQ ID NO: 49736 - DNA, 80 bp, synthetic construct
  source 1..80: mol_type = other DNA
taagaaatgtattgacaccagttagaattatctctcgatactatgttaaaaatgttattgaacaaaataacagagttagg

SEQ ID NO: 49737 - DNA, 80 bp, synthetic construct
  source 1..80: mol_type = other DNA
ttgtttggtgcaataatggctggagcagctttgggagttgcaacagctgcaacagttactgcaggaatagctttacacag

SEQ ID NO: 49738 - DNA, 80 bp, synthetic construct
  source 1..80: mol_type = other DNA
atattgcattaatgaaggaagctataaagaacacaaatcaggcagtaactaaattacaattggcaggtcaacaaacattg

SEQ ID NO: 49739 - DNA, 80 bp, synthetic construct
  source 1..80: mol_type = other DNA
gcaaggtgggtgggaagtgctcgatctctgatatctcaagatctatcagtgagaaaattcatggtggagatcctgattga

SEQ ID NO: 49740 - DNA, 80 bp, synthetic construct
  source 1..80: mol_type = other DNA
gcggttatagacaatatcagaggcgagatcaacaatcaaattataccagtcatcaacaaattaacctgtgagaacattgg

SEQ ID NO: 49741 - DNA, 80 bp, synthetic construct
  source 1..80: mol_type = other DNA
tttaaatgtaggcataaagttaacccaatattattcagaagtattgacagcatttggtcctgctatacaagatcctgtta

SEQ ID NO: 49742 - DNA, 80 bp, synthetic construct
  source 1..80: mol_type = other DNA
atgcgaggattacaattcaagctatatctaaagtgtttaataataattttgatgagttgctgaatgtaatggggtattcc

SEQ ID NO: 49743 - DNA, 80 bp, synthetic construct
  source 1..80: mol_type = other DNA
acacaagatctttacgaagttctgcatggagggctgattagaggtaatgttataagtgcagatcctgaagtgggttacct

SEQ ID NO: 49744 - DNA, 80 bp, synthetic construct
  source 1..80: mol_type = other DNA
ggctttagagattgaatttcctaatctatctgttgttccaaacgcatatatacaagagataatgcctataagtttcaacg

SEQ ID NO: 49745 - DNA, 80 bp, synthetic construct
  source 1..80: mol_type = other DNA
ttgatggagatgaatgggtgacagtggtacctagacatacactgatcagaacaaccctattatcaaacatagatataaca

SEQ ID NO: 49746 - DNA, 80 bp, synthetic construct
  source 1..80: mol_type = other DNA
acttgttctataatagaatctagtataatctgtaataatgattatgcattgcctatgtcaaatgaattgataaattgcct

SEQ ID NO: 49747 - DNA, 80 bp, synthetic construct
  source 1..80: mol_type = other DNA
tcaaggatctactgatttgtgcgcacgagaaaaagtcatttcaaactatgttcctaaatttgcattgtcagatggtgtgg

SEQ ID NO: 49748 - DNA, 80 bp, synthetic construct
  source 1..80: mol_type = other DNA
tttatgccaactgtttaagtactgtttgcagatgcatggataatggggttccgataagccagagcctcaaaagcaccgtt

SEQ ID NO: 49749 - DNA, 80 bp, synthetic construct
  source 1..80: mol_type = other DNA
atgatgctagatgataagaagtgcacaatatatcagattggtgatatcttgatatcagtgggtaagtatatgggtcatat

SEQ ID NO: 49750 - DNA, 80 bp, synthetic construct
  source 1..80: mol_type = other DNA
ggtcaagaaaagtggaacttcaaaagggaggctgaatgaaatgattgcagatattggaaattatattgaagaaactggaa

SEQ ID NO: 49751 - DNA, 80 bp, synthetic construct
  source 1..80: mol_type = other DNA
agactataacccagaaaatgtagtattaggaccaccaatagttattgataaaatagatataggcaaccaattggcaggta

SEQ ID NO: 49752 - DNA, 80 bp, synthetic construct
  source 1..80: mol_type = other DNA
taaatcagacattacaagaagctggggattttatcgaaaagtcagaagaaatattaaattctattaatccaagtgtgtta

SEQ ID NO: 49753 - DNA, 80 bp, synthetic construct
  source 1..80: mol_type = other DNA
acattaagttccatgatcacattatatatttttctaattataacagttattattgcggtggccgcattagttttatctat

SEQ ID NO: 49754 - DNA, 80 bp, synthetic construct
  source 1..80: mol_type = other DNA
aagattaacaattaaagctcgaattttaacaaatcaatttgcttatggtagacattcacctagtatggataatgttagtt

SEQ ID NO: 49755 - DNA, 80 bp, synthetic construct
  source 1..80: mol_type = other DNA
atgttagtaaataactgatttaaagtatataaggtaagatttatcaaatttcttttaatattaacctttaattggaatat

SEQ ID NO: 49756 - DNA, 80 bp, synthetic construct
  source 1..80: mol_type = other DNA
aataaatatgatataaaatatgttagacaatagatataatacaatataaacataacattttcgatattagatatgagtta

SEQ ID NO: 49757 - DNA, 80 bp, synthetic construct
  source 1..80: mol_type = other DNA
ttttaactttcttagtaattaatttgatttgatataagtataaggataatttagagatatatattaagatttttattata

SEQ ID NO: 49758 - DNA, 80 bp, synthetic construct
  source 1..80: mol_type = other DNA
ttattataaaaaacttagggcccatgtttatataggatcctccaattaccactgactttatctctgacttagattgtaca

SEQ ID NO: 49759 - DNA, 80 bp, synthetic construct
  source 1..80: mol_type = other DNA
tatattacaagctaagcaaataataatagtattaaaaaaatatttctgtaaatattctaagatctgtaccactctaaatc

SEQ ID NO: 49760 - DNA, 80 bp, synthetic construct
  source 1..80: mol_type = other DNA
actctagcattatcaaaaaccattccctatttttactccatttaaaaagtgatttcccacataaggataataattttaaa

SEQ ID NO: 49761 - DNA, 80 bp, synthetic construct
  source 1..80: mol_type = other DNA
gtgtttggctcatttgtgtattgcttcaaataattagattgagttatatattttctaacttagactgcaataagactcaa

SEQ ID NO: 49762 - DNA, 80 bp, synthetic construct
  source 1..80: mol_type = other DNA
gatctagtcagactgccttaatcatatgaattgacatgtgatttaaactgatgtcttaaatgtgagattgcctttcaggg

SEQ ID NO: 49763 - DNA, 80 bp, synthetic construct
  source 1..80: mol_type = other DNA
ctggtgccaattattaatcgtctcagggcttttctatcttaatacgggtgggtcaatatactccaatattatcctttaat

SEQ ID NO: 49764 - DNA, 80 bp, synthetic construct
  source 1..80: mol_type = other DNA
gtgatgggtggtttaacagggtatatattatgagaacatatcaatcacatcataatatagattgttacattactcaaatt

SEQ ID NO: 49765 - DNA, 80 bp, synthetic construct
  source 1..80: mol_type = other DNA
atatttaattattaaataattttcatgttataatgagttgttaataaagttaattactattacgtaatcagttagttaat

SEQ ID NO: 49766 - DNA, 80 bp, synthetic construct
  source 1..80: mol_type = other DNA
attaagttaggaagttaagtatatagactagatcacgtaaattaagttaggtagagtaagtttatcattatattttatat

SEQ ID NO: 49767 - DNA, 80 bp, synthetic construct
  source 1..80: mol_type = other DNA
catagttatagtgtctttaagtttaatcatcagtaaggagtcctagttagatgtttattgtttcactggagtatccttta

SEQ ID NO: 49768 - DNA, 80 bp, synthetic construct
  source 1..80: mol_type = other DNA
attgcactatctactaatactactaattcattgccactagatgtaaatttcgttcctgcagcttcgcgcttggctaacta

SEQ ID NO: 49769 - DNA, 80 bp, synthetic construct
  source 1..80: mol_type = other DNA
atcaatactaaccacaacttctacctcatccattacccttccccttttatctacctcttacatactacctcaaatttttt

SEQ ID NO: 49770 - DNA, 80 bp, synthetic construct
  source 1..80: mol_type = other DNA
gattttctgagagaagaatgtccgtttctatcaaaacctaaaggacaaaccgggcagcctacctccacaaatggggtgta

SEQ ID NO: 49771 - DNA, 80 bp, synthetic construct
  source 1..80: mol_type = other DNA
tttcatgaataggcaagcacaagttgatgaatcaaaggtagcagacattgttgacctgattgacacagcagcagctgagg

SEQ ID NO: 49772 - DNA, 80 bp, synthetic construct
  source 1..80: mol_type = other DNA
gtgccacactgtttgatgagatatccagccctcatgcagcatgggttttctcatgtgcccctgaccgttgcccaccgact

SEQ ID NO: 49773 - DNA, 80 bp, synthetic construct
  source 1..80: mol_type = other DNA
tgttgccaaagatatagatgtcgatctattaatggccagacatgacttcttcggaaaggaattatgcaagtcactgaata

SEQ ID NO: 49774 - DNA, 80 bp, synthetic construct
  source 1..80: mol_type = other DNA
tttccaagatggggctatagtgaagcaaaacccatctaaggaagctgttactgaagtatccctaaaggatgacgttagca

SEQ ID NO: 49775 - DNA, 80 bp, synthetic construct
  source 1..80: mol_type = other DNA
ccggcagtaatcaacttatattcagggcattattataaccagggtaatgggcactaatcaaggtttattgcactagggtg

SEQ ID NO: 49776 - DNA, 80 bp, synthetic construct
  source 1..80: mol_type = other DNA
taattagtgttagtgtagtattgtatcatgtattgtcagttatgtctattaaatcttgttaagtttgttaagttttgtta

SEQ ID NO: 49777 - DNA, 80 bp, synthetic construct
  source 1..80: mol_type = other DNA
tatatggggtttatttagtgttaagtcattgttcattgtttattgttatttgtctaatgttaagtctatatgattcatta

SEQ ID NO: 49778 - DNA, 80 bp, synthetic construct
  source 1..80: mol_type = other DNA
ctttgctactaattgatttcttcattacaacaatctacctcattgtccctatccccttccctattacctcaacaaaacta

SEQ ID NO: 49779 - DNA, 80 bp, synthetic construct
  source 1..80: mol_type = other DNA
taccgattatccttaaagccttgtacatgttatctactagaggccgtcagacaatcaaagaaaacaagggaacaagaatt

SEQ ID NO: 49780 - DNA, 80 bp, synthetic construct
  source 1..80: mol_type = other DNA
acatctgtatatatggatgtaaatttcgttccgttaatagtacatgacactaatgcttgctttgctactaattgatttct

SEQ ID NO: 49781 - DNA, 80 bp, synthetic construct
  source 1..80: mol_type = other DNA
gctggcttcttataccaacagttactttaattatattaaaaatcttaaggctattgactttctcatgctcacactattct

SEQ ID NO: 49782 - DNA, 80 bp, synthetic construct
  source 1..80: mol_type = other DNA
aatttcgaggttcagaacaaagaattaattttatgtgtcaaagggttgatcaagatgttgtggtttactgtaatggacag

SEQ ID NO: 49783 - DNA, 80 bp, synthetic construct
  source 1..80: mol_type = other DNA
cacattgtcttcctacagtccatttgattgctccagttcaaacatgtatgtctgtacggagctgtatgataggtctgtta

SEQ ID NO: 49784 - DNA, 80 bp, synthetic construct
  source 1..80: mol_type = other DNA
gacatttgtcgcgctaggatgagagccgaaagacagagtaccgctaagctacgcccatccttacatgctgtgattcaaac

SEQ ID NO: 49785 - DNA, 80 bp, synthetic construct
  source 1..80: mol_type = other DNA
ggaagagattagagttgaagagaatgctcgtcgtttaggtggtgaaatcggtctacatgattttgaaattgcagagaggc

SEQ ID NO: 49786 - DNA, 80 bp, synthetic construct
  source 1..80: mol_type = other DNA
cagaaagagctctcttacatgccgagtacttggggaatctaatgcatgttgaacaggaaaagttattaacaactggtcgt

SEQ ID NO: 49787 - DNA, 80 bp, synthetic construct
  source 1..80: mol_type = other DNA
acgtttgtagcccatattcatcaggctgggtactgtaatccagagggatggtgttgtttgcaagatgttgaggtgcaagt

SEQ ID NO: 49788 - DNA, 80 bp, synthetic construct
  source 1..80: mol_type = other DNA
ccaagggattgagcccgagagtctcttgcctgcgctggctgttcgcacaaattgtcgaggattggtgctccgagccccgc

SEQ ID NO: 49789 - DNA, 80 bp, synthetic construct
  source 1..80: mol_type = other DNA
ttccgatcatacgggttttgactcagataattcaccacccctcaggtctcgaccgactcgaagcgaccttgaatgtatta

SEQ ID NO: 49790 - DNA, 80 bp, synthetic construct
  source 1..80: mol_type = other DNA
cttactgacatgcgtgagcgagtttcgactttgacgacagctgattctatgagacgtattcgtgtaaatgatgctcatga

SEQ ID NO: 49791 - DNA, 80 bp, synthetic construct
  source 1..80: mol_type = other DNA
tcttgcagccatgacagcgccgttaggtcacgtatatgctatgctgtctagatggagggacaacgtggccaggttgaggg

SEQ ID NO: 49792 - DNA, 80 bp, synthetic construct
  source 1..80: mol_type = other DNA
caaatggctggttctttaaaattggtaaccaggttatcatacctgttctgcgaaatttccctgcattcaactacaacact

SEQ ID NO: 49793 - DNA, 80 bp, synthetic construct
  source 1..80: mol_type = other DNA
cgagcgctcaacatcaattgatagctcaggaacttgctcgtaagtatgcggagtggcgtccagggcaacactacaccatt

SEQ ID NO: 49794 - DNA, 80 bp, synthetic construct
  source 1..80: mol_type = other DNA
cctggtagagtattaaatttatttgcaaatcgtcagctgcgatatcaatcccagcttgaatgggtgtatcctcatctatg

SEQ ID NO: 49795 - DNA, 80 bp, synthetic construct
  source 1..80: mol_type = other DNA
gatagccgacaggaatttggcaggagcatggattctcaacggtgttgttccaacgtatcggaatcttggtgagtgggtgc

SEQ ID NO: 49796 - DNA, 80 bp, synthetic construct
  source 1..80: mol_type = other DNA
ctgatattgcctttattggcttggttcaatttttggagttctgggaggagtttgtgacatggttccctcattatggggtt

SEQ ID NO: 49797 - DNA, 80 bp, synthetic construct
  source 1..80: mol_type = other DNA
ggaccaattaatcgtggagttccagtgttccctactgtgttttctcctagaatgtcatcgttagcggtgcggcttcttta

SEQ ID NO: 49798 - DNA, 80 bp, synthetic construct
  source 1..80: mol_type = other DNA
tccctactgtgttttctcctagaatgtcatcgttagcggtgcggcttctttaggctctcgcgcacggggaatttgcagtc

SEQ ID NO: 49799 - DNA, 80 bp, synthetic construct
  source 1..80: mol_type = other DNA
gacattggaaggtttacctcttttccttttgaaactcttgaagatgtgacaaagctacatgatttagctaatggagattt

SEQ ID NO: 49800 - DNA, 80 bp, synthetic construct
  source 1..80: mol_type = other DNA
ggtcccacattttgcttttgttgaggatggatccccagtagttgctgccatatgtgatagacatgataatgtagtcactc

SEQ ID NO: 49801 - DNA, 80 bp, synthetic construct
  source 1..80: mol_type = other DNA
tgcgcttccgagatagtggagggcgaatcataacggttgaagagttgctagctggtgagcaacgagacttgaatctatat

SEQ ID NO: 49802 - DNA, 80 bp, synthetic construct
  source 1..80: mol_type = other DNA
caaggtttagaccaactggcagatgaggctggaattcggcctgaagatattgatcaagcggctttagcggctcaagctgt

SEQ ID NO: 49803 - DNA, 80 bp, synthetic construct
  source 1..80: mol_type = other DNA
tgctgatgcaggaggtggggttgcacaacaacaggcggctgcagcggcggcaggtgtgcaggctcaagaggatttaccag

SEQ ID NO: 49804 - DNA, 80 bp, synthetic construct
  source 1..80: mol_type = other DNA
ttgggcgtgaagatgaacttagaccggaagatgtagcagatgctcgtggacaagcggctgctccacctcaggcacaggca

SEQ ID NO: 49805 - DNA, 80 bp, synthetic construct
  source 1..80: mol_type = other DNA
ccagcaccacctgatgccgcactacaacgtcaacgcgagcaagcaattctgcggcaggttcccaacttgcatgtcttgcc

SEQ ID NO: 49806 - DNA, 80 bp, synthetic construct
  source 1..80: mol_type = other DNA
tggaaatttaaatgcgttcaattttaccgttgaaggggttgattgcccaacgcccgcggatctaagtagatactgtgttg

SEQ ID NO: 49807 - DNA, 80 bp, synthetic construct
  source 1..80: mol_type = other DNA
tcagcctcgacagcaattaatcgatcggctggctcaggtacgtgaggcggagcagaaattcattaatgaaatgattcaag

SEQ ID NO: 49808 - DNA, 80 bp, synthetic construct
  source 1..80: mol_type = other DNA
aagtgggcgtaattgagcaacagagagatgtggcggcggctggaatgcgattggagttgtgtcggtccgtgcatcgggtt

SEQ ID NO: 49809 - DNA, 80 bp, synthetic construct
  source 1..80: mol_type = other DNA
gatggaattttacgggcttaccaagagcgagtgaatccgttcagattaggtttgaattatagacctcctatcttgctcga

SEQ ID NO: 49810 - DNA, 80 bp, synthetic construct
  source 1..80: mol_type = other DNA
ccccctcactaaacacggagacaatgcttcatgaactcaggtaagaagcaagagacagcaaaaaagagagggaggaagcc

SEQ ID NO: 49811 - DNA, 80 bp, synthetic construct
  source 1..80: mol_type = other DNA
cccccgaggctctgcccacgagaccgtcctggtccatgctcatgccctcttcctggcagagttctccaaggtcatcaacc

SEQ ID NO: 49812 - DNA, 80 bp, synthetic construct
  source 1..80: mol_type = other DNA
ccgacctgagagggaagggcagctccgacatcagggactccttcaagggagccctgaagaccgccctggagaagcgggag

SEQ ID NO: 49813 - DNA, 80 bp, synthetic construct
  source 1..80: mol_type = other DNA
ccctacctgaatgaggccaggcaggcactggtcaggggcatcggcatcttggtggcaggtgtggaagaggtggccgcact

SEQ ID NO: 49814 - DNA, 80 bp, synthetic construct
  source 1..80: mol_type = other DNA
ggctttggcagctggcattcaagaggctgccaacacttttgtcaacacgtatggcccgctggccttcaattgagaaggcc

SEQ ID NO: 49815 - DNA, 80 bp, synthetic construct
  source 1..80: mol_type = other DNA
atgttcatttccttatcacatttttgttcgttttgttcttttgcatgttcccattcccttattgtgttcaaattttgcta

SEQ ID NO: 49816 - DNA, 80 bp, synthetic construct
  source 1..80: mol_type = other DNA
gtcaataatcctccaagatgagaggcatgtgattccaaactgtgatattttgactgtgtctgagtgaaagtgcgaataaa

SEQ ID NO: 49817 - DNA, 80 bp, synthetic construct
  source 1..80: mol_type = other DNA
acccacccccacccccgacagggagagggtccggaggaggagacggccaaggtggaggagaaggccaaggaggtgcagcg

SEQ ID NO: 49818 - DNA, 80 bp, synthetic construct
  source 1..80: mol_type = other DNA
tcatttttggatccgggcaggatggctgcacaagagaaatagtgctagggacactggaataaaagtgaaaccataaaaaa

SEQ ID NO: 49819 - DNA, 80 bp, synthetic construct
  source 1..80: mol_type = other DNA
gggtcaggaagaggaggcggaggcactggtggaggtggccctggtccgaagccaggaccctcccagcagcctgatcttgc

SEQ ID NO: 49820 - DNA, 80 bp, synthetic construct
  source 1..80: mol_type = other DNA
aggaggccctgaggtcccctcctgcgtggagattgatctccttaacggcaactatgaggatgaccccgaggacaccccgc

SEQ ID NO: 49821 - DNA, 80 bp, synthetic construct
  source 1..80: mol_type = other DNA
gggttaggtacatcaagtggtgtggcagggccaaccgcagggcctcggtgaggtggttgctggggccagaagcaggtgcg

SEQ ID NO: 49822 - DNA, 80 bp, synthetic construct
  source 1..80: mol_type = other DNA
gaccctgctaacatgccagccggtttcgtggagggcctgcagtgggccatggatgcgatggacaacgcatcaacgccagt

SEQ ID NO: 49823 - DNA, 80 bp, synthetic construct
  source 1..80: mol_type = other DNA
gcctcgggagacaatcctgcgtctcatcaggcggtccttccaatacaagccagtcatgaaggacattgaggaggccgctg

SEQ ID NO: 49824 - DNA, 80 bp, synthetic construct
  source 1..80: mol_type = other DNA
agctcttccagtaccagggctttgaccctgtgttggtgacagcccagctgctgtcttgtgggaaggcaaagaaccaaggc

SEQ ID NO: 49825 - DNA, 80 bp, synthetic construct
  source 1..80: mol_type = other DNA
gcaggggaggtggccaaggacattgtggccatgattgtgctctacctcacaaggggcacaaacacagagaaaatgaagaa

SEQ ID NO: 49826 - DNA, 80 bp, synthetic construct
  source 1..80: mol_type = other DNA
agccatagtcccgcccggaccaagaagagagaccagaagccagtcccgatccacaatgtcggacgaccaacagcacacca

SEQ ID NO: 49827 - DNA, 80 bp, synthetic construct
  source 1..80: mol_type = other DNA
ccgcatgtccgagatgggcaagatgctgatggatcggctggaaaagcagtaccagatccggaagggtgccgtggcgccca

SEQ ID NO: 49828 - DNA, 80 bp, synthetic construct
  source 1..80: mol_type = other DNA
aggagatcaccctggccagagttgccctcacctacccggccatcaccatcagatacaccatgcagctgggcgagaagctg

SEQ ID NO: 49829 - DNA, 80 bp, synthetic construct
  source 1..80: mol_type = other DNA
ccagtgcccatctcacacatgcgccaactctcaccactgtaccctgtggccatgtgcacacaagccttctccgccgtcat

SEQ ID NO: 49830 - DNA, 80 bp, synthetic construct
  source 1..80: mol_type = other DNA
taatcagtattagtgtagtatggtgttaagtatctgtcaattatatctgtgtttatgtagtctttgtattaattgttaag

SEQ ID NO: 49831 - DNA, 80 bp, synthetic construct
  source 1..80: mol_type = other DNA
tcttgttaggtcttttaagtttaagttctgttaagtctttaagtttttggtaagtctttaagtttttgataagtttttga

SEQ ID NO: 49832 - DNA, 80 bp, synthetic construct
  source 1..80: mol_type = other DNA
taagtctttaagtttttggtaagtctttaagttttttgtaagtctttaagttttgttaagtctttaaagtttattagtgt

SEQ ID NO: 49833 - DNA, 80 bp, synthetic construct
  source 1..80: mol_type = other DNA
taagtcatatatatggaatttattggtgttgagtattgaattcatatatgatttattaattagaataaggttatatacag

SEQ ID NO: 49834 - DNA, 80 bp, synthetic construct
  source 1..80: mol_type = other DNA
aagagaacgattcaaagccattctacggaaaataaaggaggagtttgaaaaaacaaagggttccatggtttgtgagatct

SEQ ID NO: 49835 - DNA, 80 bp, synthetic construct
  source 1..80: mol_type = other DNA
ttcattacaacgctctcatgggaaagaatgttcatcaactggccttcaagccagtgcaccacatctggataaggtcaatg

SEQ ID NO: 49836 - DNA, 80 bp, synthetic construct
  source 1..80: mol_type = other DNA
caagaaatttcctaaggttctgagaactgagctacaggtgtttattatgaacaaggtcatagacagtatcatgagaatcg

SEQ ID NO: 49837 - DNA, 80 bp, synthetic construct
  source 1..80: mol_type = other DNA
tggtcgggaatgtttaatcccttctcggggagacccactaaggagcttcaagtgattattagctgctgttataatggcta

SEQ ID NO: 49838 - DNA, 80 bp, synthetic construct
  source 1..80: mol_type = other DNA
ctaggtgtcctttcactcttcagaagagagatgggaagatctcatggtcgggaatgtttaatcccttctcggggagaccc

SEQ ID NO: 49839 - DNA, 80 bp, synthetic construct
  source 1..80: mol_type = other DNA
ttggatagatatttatccaaagagcagaaggaactcagagaaacttttaaggatggaaaaaatgatagatcagctttaag

SEQ ID NO: 49840 - DNA, 80 bp, synthetic construct
  source 1..80: mol_type = other DNA
atttgtcctgccctcagtcacagtgtccttattgttttacacattgtgagcctacagaatctgcctttcaggcacattat

SEQ ID NO: 49841 - DNA, 80 bp, synthetic construct
  source 1..80: mol_type = other DNA
gacaataacacctcagtctacaagccctgggtgttaccggacattaaatctctttagatataaaagtaggtgttacatct

SEQ ID NO: 49842 - DNA, 80 bp, synthetic construct
  source 1..80: mol_type = other DNA
tattaattaaagtaagatttacctatatagatacatttaatacttcattatcatctctgatcagggttttcaaaaatttc

SEQ ID NO: 49843 - DNA, 80 bp, synthetic construct
  source 1..80: mol_type = other DNA
caacccgggttatgatgaattgcttgaagccgtattgaagtgtccaggtaggcagaagagatccacggaagcactgttta

SEQ ID NO: 49844 - DNA, 80 bp, synthetic construct
  source 1..80: mol_type = other DNA
tgatgaattgcttgaagccgtattgaagtgtccaggtaggcagaagagatccacggaagcactgtttaaagaatacaagc

SEQ ID NO: 49845 - DNA, 80 bp, synthetic construct
  source 1..80: mol_type = other DNA
gagactgtcagtctgggtgcccctctcatttcacgtccaactccttctctgatgattgggcaggtaaaatggacagggct

SEQ ID NO: 49846 - DNA, 80 bp, synthetic construct
  source 1..80: mol_type = other DNA
gaaagggtgaatgaggatatgaggaaccatgtacgcagaccaaatacaaccatagcccctacaatcataactactctgct

SEQ ID NO: 49847 - DNA, 80 bp, synthetic construct
  source 1..80: mol_type = other DNA
tgggagaatgtgtctccgaccgctgcctcagatggaagaccaatgaaacatctgcagaattcactgggaaggcacatgga

SEQ ID NO: 49848 - DNA, 80 bp, synthetic construct
  source 1..80: mol_type = other DNA
aagaagaaggagcgtgaagatctggtggccagagaaagggtggatgaggatatgagaaaccatgtacgcagaccaaatac

SEQ ID NO: 49849 - DNA, 80 bp, synthetic construct
  source 1..80: mol_type = other DNA
gctcgcgaaggtgccacctgatgggagaatgtgtctccgaccgctgcctcagatggaagaccaatgaaacatctgcagaa

SEQ ID NO: 49850 - DNA, 80 bp, synthetic construct
  source 1..80: mol_type = other DNA
gtttgatgaatgtgcactctaatggtcaagcagctcatgacaatggtgcagggaagccagtgcagggcaccagctttcat

SEQ ID NO: 49851 - DNA, 80 bp, synthetic construct
  source 1..80: mol_type = other DNA
ggtcaagcagctcatgacaatggtgcagggaagccagtgcagggcaccagctttcattttttttctgttggggtggaggt

SEQ ID NO: 49852 - DNA, 80 bp, synthetic construct
  source 1..80: mol_type = other DNA
gtgtattaattgttctatgttaacatgttaagtttgagtttaatgttagtatctgttaagtttaagttcaagtttaagtt

SEQ ID NO: 49853 - DNA, 80 bp, synthetic construct
  source 1..80: mol_type = other DNA
acattaatataagtcaggtaatcgttataggtcagtacatgttatgattatatgttgtcaattcaattatctttcattct

SEQ ID NO: 49854 - DNA, 80 bp, synthetic construct
  source 1..80: mol_type = other DNA
tttactcaatcagggtattatctcaggtctatccctatattggaagtttgtttgattactatgttgactggaactaacac

SEQ ID NO: 49855 - DNA, 80 bp, synthetic construct
  source 1..80: mol_type = other DNA
ttgagttaattgtatatttgggtgtaaatttcattctatcaatagtatacatagcactaatgcctgctttgctactaact

SEQ ID NO: 49856 - DNA, 80 bp, synthetic construct
  source 1..80: mol_type = other DNA
aactccctttccctatcacctcaacaaaactacctcattataagtaaattcttgattgcttttcaaggagtatactacta

SEQ ID NO: 49857 - DNA, 80 bp, synthetic construct
  source 1..80: mol_type = other DNA
cgaattaggtgcattcttctcaatcctccaggacatgaggaacacaataatggcatccaaaactgtaggcactgctgaag

SEQ ID NO: 49858 - DNA, 80 bp, synthetic construct
  source 1..80: mol_type = other DNA
cacagtcaatgggaatccaactggatcagaggattattctactctatatgcttgagtggggaaaagaaatggtagatcat

SEQ ID NO: 49859 - DNA, 80 bp, synthetic construct
  source 1..80: mol_type = other DNA
agaacttggtgcattcttctctattctccaagatatgcggaatacaattatggcatcaaaaacagtgggcacagctgagg

SEQ ID NO: 49860 - DNA, 80 bp, synthetic construct
  source 1..80: mol_type = other DNA
cacaatcgatgggaatacaactagaccaacggattattctactttacatgcttgaatggggaaaagaaatggtagaccac

SEQ ID NO: 49861 - DNA, 80 bp, synthetic construct
  source 1..80: mol_type = other DNA
ctgcatttgttccatggactgttcaggcacttcgtgttctgtcagaatcactgccagtttctgggaccactatggatgcc

SEQ ID NO: 49862 - DNA, 80 bp, synthetic construct
  source 1..80: mol_type = other DNA
gggattattgacctagatctgccaaatggagctggagccaccattgctgatgctcatggattgttcatgattgagttctc

SEQ ID NO: 49863 - DNA, 80 bp, synthetic construct
  source 1..80: mol_type = other DNA
gaatatatgttatcatgttaagtctatatgttagatttgatttatatatgttaagtttaggtttgcatgttaaatttgat

SEQ ID NO: 49864 - DNA, 80 bp, synthetic construct
  source 1..80: mol_type = other DNA
taagtttaagtctatatgttaagtttgatctatatatatgttatagttaattaaatgtattaagttcaaatcatatgtgt

SEQ ID NO: 49865 - DNA, 80 bp, synthetic construct
  source 1..80: mol_type = other DNA
tcaattatgttaagtttaattatgtatgttaaggttaaggttaaggttaagttagttaatgttatatatataattcaagg

SEQ ID NO: 49866 - DNA, 80 bp, synthetic construct
  source 1..80: mol_type = other DNA
tattattgtgatatttcaatctcactttgtcttttttcagtcatatctgtgggttatcagggtctgtatctcaggactat

SEQ ID NO: 49867 - DNA, 80 bp, synthetic construct
  source 1..80: mol_type = other DNA
gaatactaacaaaaattattcaactggaactaatactgtgattttctaagtcaaatctattcatttgtatatatggatgt

SEQ ID NO: 49868 - DNA, 80 bp, synthetic construct
  source 1..80: mol_type = other DNA
tcccaattgttttaaaagccttatatatgttatcaaccaggggccgccaaacagttaaagagaataaaggcactagaata

SEQ ID NO: 49869 - DNA, 80 bp, synthetic construct
  source 1..80: mol_type = other DNA
taatcagtgttactataatatgatattatgtattgttagttatgtttgtaatcatttttttatcaatgttaagttttgtt

SEQ ID NO: 49870 - DNA, 80 bp, synthetic construct
  source 1..80: mol_type = other DNA
aagttttgttaagttctgttagttctgttaagttctgttaggtttgttaagtcttgttaggtgttgttaagtttagtttg

SEQ ID NO: 49871 - DNA, 80 bp, synthetic construct
  source 1..80: mol_type = other DNA
tcattatatagtcacataggatattagtgttaagtttggtatatggggtttattagtgttaagtcaattaatatatatgt

SEQ ID NO: 49872 - DNA, 80 bp, synthetic construct
  source 1..80: mol_type = other DNA
catttagtattaagtccagtcttattgattagattgagtttcttgtatagatttgttttatccactctgttatcatctct

SEQ ID NO: 49873 - DNA, 80 bp, synthetic construct
  source 1..80: mol_type = other DNA
ttaactgattgatcagggtttctttgatttattctcaggtttatccctatattggaagattgtcctattaaccgttcaaa

SEQ ID NO: 49874 - DNA, 80 bp, synthetic construct
  source 1..80: mol_type = other DNA
cgccagatgcaagttgatgagtcaaaagtcagtgatattgaagacttgattgctgatgcaagagctgaatcagccaccat

SEQ ID NO: 49875 - DNA, 80 bp, synthetic construct
  source 1..80: mol_type = other DNA
atttgcagatattgctacccctcattctgtttgggtctttgcatgtgctcctgatcgttgtccacctacagcactatatg

SEQ ID NO: 49876 - DNA, 80 bp, synthetic construct
  source 1..80: mol_type = other DNA
ggtgtaaacatgaaagtattagctttaagacatagtgtggctcaggtgtatgcagacactcaggtgtacacacatgatga

SEQ ID NO: 49877 - DNA, 80 bp, synthetic construct
  source 1..80: mol_type = other DNA
gaagaaatatggactggaaagaatggcggaaagtagtagaagaacaaactattaacaacttacgtattgcgtataaatat

SEQ ID NO: 49878 - DNA, 80 bp, synthetic construct
  source 1..80: mol_type = other DNA
tcatatataaataatacaattactgaaaatgtattcatacaacagccatttaaattaaaaacattggaaaatgaatatgt

SEQ ID NO: 49879 - DNA, 80 bp, synthetic construct
  source 1..80: mol_type = other DNA
ccaacagatttcgaaacaagcggatcgataattacttcatatgatggatgcttgggcatttttggtttatcaatatcatt

SEQ ID NO: 49880 - DNA, 80 bp, synthetic construct
  source 1..80: mol_type = other DNA
agcttcaaaaccaactggtaataatcacttgtttattttaagtggtacagataaatactttaaattggaccaattcgcga

SEQ ID NO: 49881 - DNA, 80 bp, synthetic construct
  source 1..80: mol_type = other DNA
accacatgagtatatcacggcgatcacatcagatacgattttcggagtcagccacttcatactcggggtacattttcaga

SEQ ID NO: 49882 - DNA, 80 bp, synthetic construct
  source 1..80: mol_type = other DNA
gatttgtctaacaataattttaacttaataggtacgaatgtagagaattcagtatctggacatgtgtataatgcattaat

SEQ ID NO: 49883 - DNA, 80 bp, synthetic construct
  source 1..80: mol_type = other DNA
gatttatgcgtgtagatcagcaagagaatttgcgagactacaagatgacttaacagtattaaggtactcaaatgaaatag

SEQ ID NO: 49884 - DNA, 80 bp, synthetic construct
  source 1..80: mol_type = other DNA
tgcgagactacaagatgacttaacagtattaaggtactcaaatgaaatagaagactatattaatagagtgtatagtataa

SEQ ID NO: 49885 - DNA, 80 bp, synthetic construct
  source 1..80: mol_type = other DNA
tttcttagaccacccattaataaaacagttctcgaatggaccatatctagtcaaagacacaattaagctcaaacaagaaa

SEQ ID NO: 49886 - DNA, 80 bp, synthetic construct
  source 1..80: mol_type = other DNA
tattatgacatgtaccatgagaagccaattatatatatgataggatcagcgccctcatattggatatatgatgttaaaca

SEQ ID NO: 49887 - DNA, 80 bp, synthetic construct
  source 1..80: mol_type = other DNA
tattgaatataccacaattctgaccattttgatatatatcatattattgaattatatattaaaaattataactaatatga

SEQ ID NO: 49888 - DNA, 80 bp, synthetic construct
  source 1..80: mol_type = other DNA
tggactacataatttttagatttttactactcatcgctctgctgtcaccatttgtgagggcgcaaaattatggcatgtat

SEQ ID NO: 49889 - DNA, 80 bp, synthetic construct
  source 1..80: mol_type = other DNA
atgaaacatctgcagaattcactgggaaggcacatggagaagttatgcatgagaataggtgctttgagcagagcggtgga

SEQ ID NO: 49890 - DNA, 80 bp, synthetic construct
  source 1..80: mol_type = other DNA
ctaactagtgcgatggactttataatttatagatttcttttacttattgttattgcatcaccttttattaaaacgcaaaa

SEQ ID NO: 49891 - DNA, 80 bp, synthetic construct
  source 1..80: mol_type = other DNA
ttgtagatatcggaagatcatcattaacaactacgtttccattttttaaaatatactctacaactttaggatccctattg

SEQ ID NO: 49892 - DNA, 80 bp, synthetic construct
  source 1..80: mol_type = other DNA
cacatggagaagttatgcatgagaataggtgctttgagcagagcggtggaataggctatggatgctttaatgtgaaccct

SEQ ID NO: 49893 - DNA, 80 bp, synthetic construct
  source 1..80: mol_type = other DNA
gtggcaatagaaagggtgagtgaggatatgagaaaccatgtgcgtagaccaaatacaaccatagcccctgctcccacgat

SEQ ID NO: 49894 - DNA, 80 bp, synthetic construct
  source 1..80: mol_type = other DNA
catctgcagaattcactgggaaggcgcatggagaggttatgcatgagaataggtgctttgagcagagcggtggaataggc

SEQ ID NO: 49895 - DNA, 80 bp, synthetic construct
  source 1..80: mol_type = other DNA
ctactgaaggaaaattcttcgcatataagattaatacacttgatgaagtaccatttgacataaacaaattcgctgaactt

SEQ ID NO: 49896 - DNA, 80 bp, synthetic construct
  source 1..80: mol_type = other DNA
aaaatgcaatgccaggcacagtgaagaatgcctgcaagcggagaattgagtacatcattgaccaaagtgatctaccccaa

SEQ ID NO: 49897 - DNA, 80 bp, synthetic construct
  source 1..80: mol_type = other DNA
gacattttgtccacatcacgaacatggcagctcgacttcctatcgacgccttcggcatgtcagtgattcaacaaaatggt

SEQ ID NO: 49898 - DNA, 80 bp, synthetic construct
  source 1..80: mol_type = other DNA
agtgctcgacccaaatctagtccatgtgatacgtgtactgacgactcgtctttgcttcagtccttgctcagtacagattg

SEQ ID NO: 49899 - DNA, 80 bp, synthetic construct
  source 1..80: mol_type = other DNA
ggttacttcggtcagtacacctcttcatggccctacactgcctatagatgcggcgaaggatttgtcagtagcttcagagt

SEQ ID NO: 49900 - DNA, 80 bp, synthetic construct
  source 1..80: mol_type = other DNA
cggaggacgaagtctcgatgtctcaaagtgatgcccctcccgaaacggcaatggatgtatccgccaatcataagccgaac

SEQ ID NO: 49901 - DNA, 80 bp, synthetic construct
  source 1..80: mol_type = other DNA
accgattctgcccattgtgccccctctcccttgcctcagcgtgcgcgaaagattagaccaacggaagcgcggcgtcgagc

SEQ ID NO: 49902 - DNA, 80 bp, synthetic construct
  source 1..80: mol_type = other DNA
agagagagagaaaagaaaattgaagccttattatcggtctatggaagagtgttttgttccagcgtgcgatattgaatcat

SEQ ID NO: 49903 - DNA, 80 bp, synthetic construct
  source 1..80: mol_type = other DNA
atcgtactagtgtaattgttcaaccattgccgcagaatgttttgccgttccctggtactcagttgacgcgagagactgtt

SEQ ID NO: 49904 - DNA, 80 bp, synthetic construct
  source 1..80: mol_type = other DNA
ttacgcaaggcattggtacgagagtgtgagcgagttgctcctagtcaggcgcctgatccagaagagttgctagactcgga

SEQ ID NO: 49905 - DNA, 80 bp, synthetic construct
  source 1..80: mol_type = other DNA
aagtgaacgacacgttcgtgaacttgatcaaagagataaaggaaaagtcaagaaaattaaatttatagtcacatctaagt

SEQ ID NO: 49906 - DNA, 80 bp, synthetic construct
  source 1..80: mol_type = other DNA
tacagtaaagatttgtgagggcagagcgaaggtgatgtatgagtccattccttctcatcttcgtggagttgaaattgagt

SEQ ID NO: 49907 - DNA, 80 bp, synthetic construct
  source 1..80: mol_type = other DNA
cagttgctcctgagtctaacgaggtctcagtcatctatcctcgacctcagatttctatgcctgataatttttcattgggt

SEQ ID NO: 49908 - DNA, 80 bp, synthetic construct
  source 1..80: mol_type = other DNA
aacgaggaggagagaattcgcacatacgtaaggaaaaggactattatggagcgagaatctggaggttacgcgatgcttcg

SEQ ID NO: 49909 - DNA, 80 bp, synthetic construct
  source 1..80: mol_type = other DNA
tcctggttatggagctgaggcattagagcatgcgagatatgtctctgcagccggcgtaccgattcctgaactcagggggc

SEQ ID NO: 49910 - DNA, 80 bp, synthetic construct
  source 1..80: mol_type = other DNA
aagttttgcgttctagagcttcgcgagagatgatgagtcagactgatttgcgtttgttagaactgatgatgcctgtagtg

SEQ ID NO: 49911 - DNA, 80 bp, synthetic construct
  source 1..80: mol_type = other DNA
aatgtaccacctgaaggagttgataaggacctgttggcggtgtacaaagcaacagtgatggatattttaaccggttaggc

SEQ ID NO: 49912 - DNA, 80 bp, synthetic construct
  source 1..80: mol_type = other DNA
agtgatggatattttaaccggttaggcgtggatgagtggggctgcgcagtgagtgacgagtgggtagaacggttgcagtc

SEQ ID NO: 49913 - DNA, 80 bp, synthetic construct
  source 1..80: mol_type = other DNA
cggttgattatgaaaattggtttggcccagacacagacacagaaattatacagtatcttgaagaaggaggtttgtaccat

SEQ ID NO: 49914 - DNA, 80 bp, synthetic construct
  source 1..80: mol_type = other DNA
gcactttacaacgcctacaaagaacagaaaagtactccatcttttgttgccagcccctcaaaccctgctcctgtgtcact

SEQ ID NO: 49915 - DNA, 80 bp, synthetic construct
  source 1..80: mol_type = other DNA
taagcaaaaagaaattttatcgaactggaagctgggcactatcgtggaattctgtcaagctgttggtttgaatcgaacac

SEQ ID NO: 49916 - DNA, 80 bp, synthetic construct
  source 1..80: mol_type = other DNA
ctgaggaaccatggcgtcagctagctcgatcctatggattgattttcattagtgaagttggtgcattggcatccactcat

SEQ ID NO: 49917 - DNA, 80 bp, synthetic construct
  source 1..80: mol_type = other DNA
gttgcctctctagacgctgatttggcaaaattcgagcagcgcgagcaacgttggatgaaaatggtcgactacaaggagtc

SEQ ID NO: 49918 - DNA, 80 bp, synthetic construct
  source 1..80: mol_type = other DNA
ttttgcacatcttggcactgatttcaacagatatgctttctgccctttgataccacctccttgtcctgaagattctgaag

SEQ ID NO: 49919 - DNA, 80 bp, synthetic construct
  source 1..80: mol_type = other DNA
aagcgattttgattcatggctcgtgggtaagaagtgaagagcatgacggaggcttgtttgtgctattcaaacgtgtgacg

SEQ ID NO: 49920 - DNA, 80 bp, synthetic construct
  source 1..80: mol_type = other DNA
ctcaaagtatacacaatcctaccaacaagcaacttgtccaatctgagtgatcaaatatctcaaaacaaactctatgctgt

SEQ ID NO: 49921 - DNA, 80 bp, synthetic construct
  source 1..80: mol_type = other DNA
attatggaccggcaccaagtgatgggagcgagagcgcctagcgaggatgaggaagagagctctgacccaacagaaggttc

SEQ ID NO: 49922 - DNA, 80 bp, synthetic construct
  source 1..80: mol_type = other DNA
aatggatgaggtgacccaccagactgaaaccttgtccctagactcgataccccctccagatttctctagggctccagtga

SEQ ID NO: 49923 - DNA, 80 bp, synthetic construct
  source 1..80: mol_type = other DNA
ttgtgactgggatgacgagtgccaaagcatcaacatcgtatagtcgagatgagccacctgaggacgaaggaaaccgtgca

SEQ ID NO: 49924 - DNA, 80 bp, synthetic construct
  source 1..80: mol_type = other DNA
cttcaattcagacttaccagaatctggtggcaggaatgttaggggaactcagcaaatcacaacaggaggtgcttgctttc

SEQ ID NO: 49925 - DNA, 80 bp, synthetic construct
  source 1..80: mol_type = other DNA
aaaggaaaatttgaccagttagagaggaaagtgaataatcatttagccgttaatccgcttacagagttgagtcgaataaa

SEQ ID NO: 49926 - DNA, 80 bp, synthetic construct
  source 1..80: mol_type = other DNA
gacatttgtaagaatggcagcctcgggatggaacgcagtgataccaaagacctcaagttatgattatattactgtttcaa

SEQ ID NO: 49927 - DNA, 80 bp, synthetic construct
  source 1..80: mol_type = other DNA
cattagcattaaatcgagaatataagcctcgtagacggcgagctgctattgctccgcaaatccaagacccagctgttccc

SEQ ID NO: 49928 - DNA, 80 bp, synthetic construct
  source 1..80: mol_type = other DNA
gcgatccagacttatcaaaatctggtggcggagatgttaggagagcttaacaagtcgcaacaggaggtgcttgcgtttaa

SEQ ID NO: 49929 - DNA, 80 bp, synthetic construct
  source 1..80: mol_type = other DNA
aggaaaatttgagcagttggagaggaaagtgaataaccatttagccgtcaatccgcttacgaagctaagtcggataaagc

SEQ ID NO: 49930 - DNA, 80 bp, synthetic construct
  source 1..80: mol_type = other DNA
agagaatggatcagtttgaaactagccttgcgggtgtctcatccgtagtgaatgaggtgcagggattacgtaactcccac

SEQ ID NO: 49931 - DNA, 80 bp, synthetic construct
  source 1..80: mol_type = other DNA
ggtcagttgtctacagagattaatagaattaaggaggctgagggtcatttcttgaatgatctagagagtgtgcgccgtca

SEQ ID NO: 49932 - DNA, 80 bp, synthetic construct
  source 1..80: mol_type = other DNA
tttgcagggtgagactggtcatttaaggagtcaacttgggaattctctcgtgacaatttttaagccaataattaagatga

SEQ ID NO: 49933 - DNA, 80 bp, synthetic construct
  source 1..80: mol_type = other DNA
tatcgagagatataggaatgtgtctgaaagttggcagtgctgatcaatctcagaatgatgtggtggctctttcgtctcga

SEQ ID NO: 49934 - DNA, 80 bp, synthetic construct
  source 1..80: mol_type = other DNA
actacagatgatatgattattgttagacttccagcttcaaccacttcctcacaagatttaagcaaaatggtcacaattac

SEQ ID NO: 49935 - DNA, 80 bp, synthetic construct
  source 1..80: mol_type = other DNA
attgataggctgactcaggaagtagtagctttacaaaatagtgagaagccgaggttattctatcttcatgataaaagtga

SEQ ID NO: 49936 - DNA, 80 bp, synthetic construct
  source 1..80: mol_type = other DNA
gattaaggctgcagcaggagcattagaggccgtagctgcgcatgtgtacttagggtggatgagtcagcgtttcatttgcc

SEQ ID NO: 49937 - DNA, 80 bp, synthetic construct
  source 1..80: mol_type = other DNA
cccctgttttgggaaccgtgtaccatcatgaccgatatattcagggtgtatattataaattggtggcgtgtactattgaa

SEQ ID NO: 49938 - DNA, 80 bp, synthetic construct
  source 1..80: mol_type = other DNA
atggttcaccttgataaagggacgatgatcctgttaattcgtgatgaaattctgccggtgggtgttctgcatgaagtcga

SEQ ID NO: 49939 - DNA, 80 bp, synthetic construct
  source 1..80: mol_type = other DNA
atcaaacattgtgttggaccaatgtgatcatgttcccgggattgttcggttgtctcgagatcgggtgtctcctgtggatt

SEQ ID NO: 49940 - DNA, 80 bp, synthetic construct
  source 1..80: mol_type = other DNA
atattgaagtttatgaagttgtagatccgggagtgtttactttgtctttttcccatgttattgcgatctatatcccgaga

SEQ ID NO: 49941 - DNA, 80 bp, synthetic construct
  source 1..80: mol_type = other DNA
ttgcgatctatatcccgagatgttccgggctgaggttgcttccgtgatggcggtgcaccacgccatacacaattgcagtc

SEQ ID NO: 49942 - DNA, 80 bp, synthetic construct
  source 1..80: mol_type = other DNA
aaagttacggtggactttccaaaaccagaaatttacgtgtagtgttggcagtgatctggcatttcggataattatgactt

SEQ ID NO: 49943 - DNA, 80 bp, synthetic construct
  source 1..80: mol_type = other DNA
gtaacgttggtacgatgtattttactgctacctttctgttaaatacattaacatccactgggactaaggtatatggtatg

SEQ ID NO: 49944 - DNA, 80 bp, synthetic construct
  source 1..80: mol_type = other DNA
ttcaattatgtgtctttatcaagtttggtggtcgttgtaactggtaatgatgctgcacatgtggaagcattaatcgctgt

SEQ ID NO: 49945 - DNA, 80 bp, synthetic construct
  source 1..80: mol_type = other DNA
tgaaggtgctgcagtccgtaaccaagtagcaaaattaattttgtggtctgtaactgagacaactaattatttgagttttg

SEQ ID NO: 49946 - DNA, 80 bp, synthetic construct
  source 1..80: mol_type = other DNA
aaaaactgatttctaaggcgggtaaggatgttgagtcaggctactataaaggtgatacaaaaacaaagcgggccattcaa

SEQ ID NO: 49947 - DNA, 80 bp, synthetic construct
  source 1..80: mol_type = other DNA
gcactttcgatctctcagggtgagtcgtggtactacaccgaactgtgtactagttccccattagatgttggtggctcagg

SEQ ID NO: 49948 - DNA, 80 bp, synthetic construct
  source 1..80: mol_type = other DNA
gttagctttcttcatgcgtattcgcggagtcggactacggtcagaggcaggggtaacaccttggaaggtgagtgaaattt

SEQ ID NO: 49949 - DNA, 80 bp, synthetic construct
  source 1..80: mol_type = other DNA
tacaacctgctcaacaagataacaagaaaaatttggtaatagagttcccaccagtctcgtacttctatggtgtctattgg

SEQ ID NO: 49950 - DNA, 80 bp, synthetic construct
  source 1..80: mol_type = other DNA
ttaagcctctcacttctcgtttggaatcggacttttcttattcaattcatccagaagcacaggaagatgacagtgtggtg

SEQ ID NO: 49951 - DNA, 80 bp, synthetic construct
  source 1..80: mol_type = other DNA
gttcataaggctcatttactggcccagaacattattcgggatttgggatataagacggtagcggagttggatacagcaga

SEQ ID NO: 49952 - DNA, 80 bp, synthetic construct
  source 1..80: mol_type = other DNA
ggattcccatttacccgtagggtcggctgattgtttggctgctttgctcgatttattatatcgtaggtcggaggaaatga

SEQ ID NO: 49953 - DNA, 80 bp, synthetic construct
  source 1..80: mol_type = other DNA
cttcgattcagacttaccaaaatttagtagtgggcatgttaggggaggtcagtaaatcaaagcaggaagtgctcgcgttc

SEQ ID NO: 49954 - DNA, 80 bp, synthetic construct
  source 1..80: mol_type = other DNA
aaagaaaaatttgagcagttggagaggaaggtaaacaaccacctggctgttaatccacttacagatttgaaccgagtaaa

SEQ ID NO: 49955 - DNA, 80 bp, synthetic construct
  source 1..80: mol_type = other DNA
acaaagagtagatcaatttgaaactagtctcgctggtgtctcagctgcagtcaatgaggtgcaaggattacgcaactcac

SEQ ID NO: 49956 - DNA, 80 bp, synthetic construct
  source 1..80: mol_type = other DNA
agatcaaggccgcggcaggggcattggaggctgtggctgctcatgtgtatttggcgtggatggggcagcgctttatttgt

SEQ ID NO: 49957 - DNA, 80 bp, synthetic construct
  source 1..80: mol_type = other DNA
cctcccgttttaggaacagtatatcatcatgatcggtatattcagggtgtatattacagattggttgcgtgtactattga

SEQ ID NO: 49958 - DNA, 80 bp, synthetic construct
  source 1..80: mol_type = other DNA
agatggttcatcttgataaggggacgatgattttgttaattcgcgacgagatacctccaacaggtgttttacatgaagta

SEQ ID NO: 49959 - DNA, 80 bp, synthetic construct
  source 1..80: mol_type = other DNA
gaatcaaatattatactggatcagtgtgatcatgttcctgggattgtccggttgtctcgggatcgagtatcacccgtgga

SEQ ID NO: 49960 - DNA, 80 bp, synthetic construct
  source 1..80: mol_type = other DNA
ttcaaaccccctacttcgcgtttggaatcagatttttcttattcacttcatccagaagcacaggaagatgatagtgtggt

SEQ ID NO: 49961 - DNA, 80 bp, synthetic construct
  source 1..80: mol_type = other DNA
agtccataaggctcatttgttggctcagaacatcatccgagatttggggtataaaacagtggcggaattagatacagcag

SEQ ID NO: 49962 - DNA, 80 bp, synthetic construct
  source 1..80: mol_type = other DNA
atgagaataggtgctttgagcagagcggtggaataggctatggatgctttaatgtgaacccttcttgtctctatgtccat

SEQ ID NO: 49963 - DNA, 80 bp, synthetic construct
  source 1..80: mol_type = other DNA
atttattaaagctcaaaattatggaataaatattccaataacaggttctatggataccgcatatgtaaactctacacaac

SEQ ID NO: 49964 - DNA, 80 bp, synthetic construct
  source 1..80: mol_type = other DNA
gctgtggacccgcctggtgcgactggtccggccacatcccatgttgttacttctaatccggaacaacccaatgggcccgc

SEQ ID NO: 49965 - DNA, 80 bp, synthetic construct
  source 1..80: mol_type = other DNA
acgggaaactttttcttgggaatctaatattcgctttcatcccaacatttaaacccgtaacactttctcaccttcttctg

SEQ ID NO: 49966 - DNA, 80 bp, synthetic construct
  source 1..80: mol_type = other DNA
gtgcattatgtgttatagacacacctgaaggaaaagggacaggtttcttttccggcaacgacatagtaacagcagcacat

SEQ ID NO: 49967 - DNA, 80 bp, synthetic construct
  source 1..80: mol_type = other DNA
gagatccgtgatgctaatgggaaggttgtggccactgtaccaactaggatcaaaaatgttgcatttgacttcttccagaa

SEQ ID NO: 49968 - DNA, 80 bp, synthetic construct
  source 1..80: mol_type = other DNA
gtgctttatgcgttatagacactcctgaggggaaaggaacaggcttcttttctggcaacgacatagtaacagcagcacat

SEQ ID NO: 49969 - DNA, 80 bp, synthetic construct
  source 1..80: mol_type = other DNA
ctatacctactaacttttcaattagcattactacagaagtaatgcctgtttctatggctaaaacctccgtagattgtaat

SEQ ID NO: 49970 - DNA, 80 bp, synthetic construct
  source 1..80: mol_type = other DNA
tacgcgccagtttcatggggatcaggagagacattaagtggaaatgttgaagaacagactttagatgggccatatgcacc

SEQ ID NO: 49971 - DNA, 80 bp, synthetic construct
  source 1..80: mol_type = other DNA
gtcatggtcggtgatgccaggagggagtgtaattctaacgtttgatggtgtaacgttatcaacgcaatttactgactatg

SEQ ID NO: 49972 - DNA, 80 bp, synthetic construct
  source 1..80: mol_type = other DNA
tgtcgctgaactcactaaggttcagatttagatgtgcagtgagtgaaccttcatttagggttaccggtacgagaatatca

SEQ ID NO: 49973 - DNA, 80 bp, synthetic construct
  source 1..80: mol_type = other DNA
aatttgtatggccttccagccgctaacccaatgggagaccaacaatattatgaggcatcaggtaggttttcattgatatc

SEQ ID NO: 49974 - DNA, 80 bp, synthetic construct
  source 1..80: mol_type = other DNA
gttagtgccaagtaatgatgactaccaaactccaattgcaaattcagtcactgtaagacaggatctagagagacagctag

SEQ ID NO: 49975 - DNA, 80 bp, synthetic construct
  source 1..80: mol_type = other DNA
atgaaatgagaaaagaattcaatgaactatcagctaatatagctttgtcacagctaatagatttagcactattgccactt

SEQ ID NO: 49976 - DNA, 80 bp, synthetic construct
  source 1..80: mol_type = other DNA
gatatgttttcaatgttcagtggaatacaaagtaccgttgaagcagcaaaaagcttcgcgacgtcagtgatgaagaaatt

SEQ ID NO: 49977 - DNA, 80 bp, synthetic construct
  source 1..80: mol_type = other DNA
tagaaagtcggatttggcaaaaagtgttaatagtttgactgacgccataactgatgccgctggttcaatttctaggtcat

SEQ ID NO: 49978 - DNA, 80 bp, synthetic construct
  source 1..80: mol_type = other DNA
acagcacgttttggatgtttacttatttagtcttaccaaacacagctcagactaatgtcacagtaaatgtgatgaatgag

SEQ ID NO: 49979 - DNA, 80 bp, synthetic construct
  source 1..80: mol_type = other DNA
caacattgcgatcggtcaacagcgcggcttcagtatggacggatataagtgacatagtagattcaacagataatgttgtg

SEQ ID NO: 49980 - DNA, 80 bp, synthetic construct
  source 1..80: mol_type = other DNA
gcagctacagcaacagccgctgcgaagaaattcagagttaaagagtttacaacggagtttaatggtgttagttttgatga

SEQ ID NO: 49981 - DNA, 80 bp, synthetic construct
  source 1..80: mol_type = other DNA
catatctgctgcggttgtgaaaacgaaaatgaacaaattgaatgttgtggatgaggaaatactaccacaaataataactg

SEQ ID NO: 49982 - DNA, 80 bp, synthetic construct
  source 1..80: mol_type = other DNA
aggcgtcagagaagttcataccgaaccgtgcatatagattaatagatggagaaaaagtatacgaggttacaacggaaggg

SEQ ID NO: 49983 - DNA, 80 bp, synthetic construct
  source 1..80: mol_type = other DNA
aagtattttgcttatctgacggaaacattcgaagaagtggtgtttgatgcagagagatttgctgaattggttactgactc

SEQ ID NO: 49984 - DNA, 80 bp, synthetic construct
  source 1..80: mol_type = other DNA
gccagtaatatcagcaattatagactttaagacgataaagaatctgaatgataattatggtattacgagggagcaagcgt

SEQ ID NO: 49985 - DNA, 80 bp, synthetic construct
  source 1..80: mol_type = other DNA
tgaacatgttacgttcagatccgaaagtattaagaagctttattaatcaaaacaatcctataattaaaaacagaatagag

SEQ ID NO: 49986 - DNA, 80 bp, synthetic construct
  source 1..80: mol_type = other DNA
tacgttcagatccgaaagtattaagaagctttattaatcaaaacaatcctataattaaaaacagaatagagcaactgata

SEQ ID NO: 49987 - DNA, 80 bp, synthetic construct
  source 1..80: mol_type = other DNA
acggtgaatatatcaatagacaattcgggatcgacatacaggtttgtggactacattaagactagttccacacaagcgta

SEQ ID NO: 49988 - DNA, 80 bp, synthetic construct
  source 1..80: mol_type = other DNA
tgggtcaaggaactatctgaacactgcgcatagattgcaagcctatagaagagatggagatggaaatatatcaaattatt

SEQ ID NO: 49989 - DNA, 80 bp, synthetic construct
  source 1..80: mol_type = other DNA
ggggtgcggatacacaaggtgatttgagggttggaacatattccaatccggtgccaaatgtagtgatcaatctaaatgca

SEQ ID NO: 49990 - DNA, 80 bp, synthetic construct
  source 1..80: mol_type = other DNA
gattttttcgtcataccagattcgcaacaagaaatatgtacagaatacataaggggaggattgccagccatgcaaactac

SEQ ID NO: 49991 - DNA, 80 bp, synthetic construct
  source 1..80: mol_type = other DNA
aacttacgtgacaccaattagttatgctattagaagtcaaagaattgcgagaccgaatgaagacataatcatatcaaagg

SEQ ID NO: 49992 - DNA, 80 bp, synthetic construct
  source 1..80: mol_type = other DNA
catcactatggaaagaggttcagtataatagagacattgtgataagatttgtgtttgcgaataatataattaaagcaggt

SEQ ID NO: 49993 - DNA, 80 bp, synthetic construct
  source 1..80: mol_type = other DNA
ggacttggttataagtggtcagaaatatcatataaggctaataattaccaatatacatatatgagagacggcgtagaagt

SEQ ID NO: 49994 - DNA, 80 bp, synthetic construct
  source 1..80: mol_type = other DNA
agatagttcgaacttgccgtctagctattggtatttagtcaatccatcaaatgatggtgtggtgttctcagtgacggata

SEQ ID NO: 49995 - DNA, 80 bp, synthetic construct
  source 1..80: mol_type = other DNA
tgtcgcccatactactgtttcagtgaacggtgttagcgtgtataattacaacactggaccgttaccaactgatttcatga

SEQ ID NO: 49996 - DNA, 80 bp, synthetic construct
  source 1..80: mol_type = other DNA
tacgaaattatgatgttctgaaagaaagttcgttcgtatatgttgattattgggatgattcacaggctttcagaaatatg

SEQ ID NO: 49997 - DNA, 80 bp, synthetic construct
  source 1..80: mol_type = other DNA
gtatatgtgcggtcgctgaatgcggaactaaatcaagtgcggtgcgtaggaggtcattattcgttcgcattgcctgttgg

SEQ ID NO: 49998 - DNA, 80 bp, synthetic construct
  source 1..80: mol_type = other DNA
gtagacttacatgacgaaatagaacagattggatcggagaaaactcaaaatgtgacaataaatccaggcccatttgcgca

SEQ ID NO: 49999 - DNA, 80 bp, synthetic construct
  source 1..80: mol_type = other DNA
gttgaattatcagatgaaattagtacgattggatcagaaaaaactcaaaatgtgacgattaatcccggaccgtttgctca

SEQ ID NO: 50000 - DNA, 80 bp, synthetic construct
  source 1..80: mol_type = other DNA
gagccagtactcgatggtccttatcaaccaacaagttttaatccaccaagcgattactggatattattgaatccaactat

SEQ ID NO: 50001 - DNA, 80 bp, synthetic construct
  source 1..80: mol_type = other DNA
actgcccagcgtgttgagttggctgcagcaacaggggccattaccagcaatgtcccaaactgtgtccgtgagtgctttgc

SEQ ID NO: 50002 - DNA, 80 bp, synthetic construct
  source 1..80: mol_type = other DNA
cagcagtcacggctgcgtctttggcaacccttgaggggctgtcagaggcatcatcaatatcaaccttgagcactgcagtg

SEQ ID NO: 50003 - DNA, 80 bp, synthetic construct
  source 1..80: mol_type = other DNA
tcacttcaggcatgccattaaacagtattgccaacacccggggccatacgacaaatcagacgactgcagtgctgaaggct

SEQ ID NO: 50004 - DNA, 80 bp, synthetic construct
  source 1..80: mol_type = other DNA
ctatcgtatgcagcacgggtccacttgaatgatataatgttagtgacaaaatctggactcacttcaggcatgccattaaa

SEQ ID NO: 50005 - DNA, 80 bp, synthetic construct
  source 1..80: mol_type = other DNA
gccagcacacctaaaggccctttttagggccagtttttttaaaaaaattttttttcattttgcttcctctattttcctat

SEQ ID NO: 50006 - DNA, 80 bp, synthetic construct
  source 1..80: mol_type = other DNA
tggatgtgcgtctgatgaatgaatgtgaaagaccagtaaccacatgcagggtgaaagtctaaaagatccgcactcctgag

SEQ ID NO: 50007 - DNA, 80 bp, synthetic construct
  source 1..80: mol_type = other DNA
cctgcgggccttgagaatcagggtgcctgatctgtgtgattgagtgcatggacctcagcacgccaatggcgtagcattat

SEQ ID NO: 50008 - DNA, 80 bp, synthetic construct
  source 1..80: mol_type = other DNA
gagtgatgcccaagcaccgtttctctttgttcccatcctatcatttgacccctcaagtggaaaattttccaactcattga

SEQ ID NO: 50009 - DNA, 80 bp, synthetic construct
  source 1..80: mol_type = other DNA
ccatcctcccctagactactggaggaacccataggatcaggtcacaaattcgtgaaatggagctaggtaaaactaaatga

SEQ ID NO: 50010 - DNA, 80 bp, synthetic construct
  source 1..80: mol_type = other DNA
acgatcaagtttagatccgggcaggatggcagcacaagggaaatggtgctagggacactagaatcaaagtgaaaccacaa

SEQ ID NO: 50011 - DNA, 80 bp, synthetic construct
  source 1..80: mol_type = other DNA
aaccccacagacaccctgtgctaagctttcgaccactgattaccttgcttagtacagattgatgagggggggtctttgtg

SEQ ID NO: 50012 - DNA, 80 bp, synthetic construct
  source 1..80: mol_type = other DNA
gacaccctgtgctaagctttcgaccactgattaccttgcttagtacagattgatgagggggggtctttgtgtcggagcta

SEQ ID NO: 50013 - DNA, 80 bp, synthetic construct
  source 1..80: mol_type = other DNA
ctttcgaccactgattaccttgcttagtacagattgatgagggggggtctttgtgtcggagctaggtaaaactaaatgaa

SEQ ID NO: 50014 - DNA, 80 bp, synthetic construct
  source 1..80: mol_type = other DNA
ccgcgcagcgcctggaaatggctgttgctactgggtcaattcaatcaaatgtccctgatgcaatacgcaacagcctttgc

SEQ ID NO: 50015 - DNA, 80 bp, synthetic construct
  source 1..80: mol_type = other DNA
attgtgtcttgtgccattgaggctctttcttcccctgcagagggttatgtcaatgacatcaaatttgtaacacgtggtgg

SEQ ID NO: 50016 - DNA, 80 bp, synthetic construct
  source 1..80: mol_type = other DNA
tggcggcagccatcttgcaggcatatgaaagccacaatgttccatacactgggaatgtctccaaggtggagatcattgac

SEQ ID NO: 50017 - DNA, 80 bp, synthetic construct
  source 1..80: mol_type = other DNA
atgctcaagaagaaggagcgtgaagatctggtggccagagaaagggtgaatgaggatatgaggaaccatgtacgcagacc

SEQ ID NO: 50018 - DNA, 80 bp, synthetic construct
  source 1..80: mol_type = other DNA
tggggatcaggagagacattaagtggaagtgttgaagaacagactttagatgggccgtatgcaccagatggctcgaacct

SEQ ID NO: 50019 - DNA, 80 bp, synthetic construct
  source 1..80: mol_type = other DNA
gcaaggagggagtgtgattctaacattcgatggtgtaacgttatcgacgcaatttactgactatgtgtcgttgaactcac

SEQ ID NO: 50020 - DNA, 80 bp, synthetic construct
  source 1..80: mol_type = other DNA
taaggttcagatttagatgtgcagtaagcgaaccttcgtttagggttaccggtacgaggatatcaaatttgtatggcctt

SEQ ID NO: 50021 - DNA, 80 bp, synthetic construct
  source 1..80: mol_type = other DNA
ccagccgcgaacccaatgggagaccaacaatattatgaggcagcaggtaggttttcattgatatcgttagtgccaagtaa

SEQ ID NO: 50022 - DNA, 80 bp, synthetic construct
  source 1..80: mol_type = other DNA
ttcagtggaatacaaagtaccgttgaagcagcaaaaagtttcgcaacatcagtgatgaagaaatttagaaagtcagattt

SEQ ID NO: 50023 - DNA, 80 bp, synthetic construct
  source 1..80: mol_type = other DNA
ggcaaaaagtgttaataatttgactgacgccataactgatgctgctggctcaatttctaggtcatcaacactgcgatcga

SEQ ID NO: 50024 - DNA, 80 bp, synthetic construct
  source 1..80: mol_type = other DNA
tgtttacttatttagtcttgccaaatacagctcagactaatgtcacagtaaatgtgatgaatgagacggtgaatatatca

SEQ ID NO: 50025 - DNA, 80 bp, synthetic construct
  source 1..80: mol_type = other DNA
tcaacagcgcggcttcagtgtggacggatataagtgacatagtagattcaacagataacgttgtggcagctacagcaaca

SEQ ID NO: 50026 - DNA, 80 bp, synthetic construct
  source 1..80: mol_type = other DNA
gccgctgcgaagaaattcagagttaaagagtttacaacggagtttaatggtgttagctttgatgatatatccgctgcggt

SEQ ID NO: 50027 - DNA, 80 bp, synthetic construct
  source 1..80: mol_type = other DNA
tgtaaaaacaaaaatgaacaaattgcatgttgtggatgaggaaatactaccacaaataataactgaggcgtcagagaagt

SEQ ID NO: 50028 - DNA, 80 bp, synthetic construct
  source 1..80: mol_type = other DNA
ctgacggaaacattcgaagaagttgtgtttgatgcagaaaggtttgctgaattggttactgactcgccagtaatatcagc

SEQ ID NO: 50029 - DNA, 80 bp, synthetic construct
  source 1..80: mol_type = other DNA
aattatagattttaaaacgataaagaatctgaatgataattatggcatcacgagggagcaagcgttgaacatgttacgtt

SEQ ID NO: 50030 - DNA, 80 bp, synthetic construct
  source 1..80: mol_type = other DNA
atagacaattcgggttcgacgtacaggtttgtggattacatcaagactagctccacacaagcgtatgggtcgaggaacta

SEQ ID NO: 50031 - DNA, 80 bp, synthetic construct
  source 1..80: mol_type = other DNA
cctaaatactgcacatagattgcaagcttacagaagagatggagatgggaatatatcaaattactggggtgcagatacac

SEQ ID NO: 50032 - DNA, 80 bp, synthetic construct
  source 1..80: mol_type = other DNA
aaggcgatttgagggttggaacatattctaatccggtgccaaatgcagtgatcaatctaaatgcagatttttacgtcata

SEQ ID NO: 50033 - DNA, 80 bp, synthetic construct
  source 1..80: mol_type = other DNA
ccagattcgcaacaagagaaatgcacagaatacataaggggaggattgccagctatgcaaactacaacttacgtgacacc

SEQ ID NO: 50034 - DNA, 80 bp, synthetic construct
  source 1..80: mol_type = other DNA
aattagttatgctattagaagtcagagagttgcgagaccaaacgaagacgtaatcatatcaaaggcatcattatggaaag

SEQ ID NO: 50035 - DNA, 80 bp, synthetic construct
  source 1..80: mol_type = other DNA
tggtcagagatatcatataaagctaataactaccaatacacgtatatgagagacggcgtagaagttgttgctcatactac

SEQ ID NO: 50036 - DNA, 80 bp, synthetic construct
  source 1..80: mol_type = other DNA
gccgtctaattattggtatttagtcaacccatcaaatgatggtgtggtgttttcagtgacggacaacagcacgttttgga

SEQ ID NO: 50037 - DNA, 80 bp, synthetic construct
  source 1..80: mol_type = other DNA
tgtttcagtgaacggtgttagcgtgtataattataacactggaccattaccaaccgatttcatgatacgaaactatgacg

SEQ ID NO: 50038 - DNA, 80 bp, synthetic construct
  source 1..80: mol_type = other DNA
ctgaatgcggaactaaatcaagtgcggtgcgaagggggacactattcgttcgcactgcctgttggctcatggccggtgat

SEQ ID NO: 50039 - DNA, 80 bp, synthetic construct
  source 1..80: mol_type = other DNA
taaaaatattccttataagtataacgttaaggtaccacatttgacgttaggagtactatttatatctgataatatgatac

SEQ ID NO: 50040 - DNA, 80 bp, synthetic construct
  source 1..80: mol_type = other DNA
agagataagttatttaaaacgttatcaacaactcatgataaagtagttaatattgggcccagaaatgaatctatgtttac

SEQ ID NO: 50041 - DNA, 80 bp, synthetic construct
  source 1..80: mol_type = other DNA
agcaaaaacaagcagttgttaaccatgaatctcttctcaccaagaacatgtctgagcccaacagagacacaagaattgct

SEQ ID NO: 50042 - DNA, 80 bp, synthetic construct
  source 1..80: mol_type = other DNA
ggtctttaaaagtaaaatagcagacataggagaagggttgacctatgaaaagagcaaaataatcaggaacttccctttgg

SEQ ID NO: 50043 - DNA, 80 bp, synthetic construct
  source 1..80: mol_type = other DNA
ggacataccagtctgagtttgatgatttgttgcccaaccttgtgagaaacaaagaaggagaacctgttggagtaaaatgt

SEQ ID NO: 50044 - DNA, 80 bp, synthetic construct
  source 1..80: mol_type = other DNA
actcttggtatgttcatggggatgttcaacctcagctctacacttctagcactgatagcagcggaccgcgaagagatcac

SEQ ID NO: 50045 - DNA, 80 bp, synthetic construct
  source 1..80: mol_type = other DNA
tggagaccatgtggaaagcagcgacgactttattcatttcttcaaaacaaagacccacgacgaaatgtttaaacaggcag

SEQ ID NO: 50046 - DNA, 80 bp, synthetic construct
  source 1..80: mol_type = other DNA
agttgctgagatggtctctcaagcttgtcgggattaacatgtctcccagcaaatgcatcctgataagccccgctgggatt

SEQ ID NO: 50047 - DNA, 80 bp, synthetic construct
  source 1..80: mol_type = other DNA
ggagagttcaattccaaatatcaccatagagactttgttgggaacgttgctacagatctgccttccttggttccaggtgg

SEQ ID NO: 50048 - DNA, 80 bp, synthetic construct
  source 1..80: mol_type = other DNA
gaaaaacccttccagtgacttggcaatgggactgaatgtgatcaggcactctgtgaacacaaaccagatgaattttatca

SEQ ID NO: 50049 - DNA, 80 bp, synthetic construct
  source 1..80: mol_type = other DNA
aatatttctatccagaagaggacgttcagagagccctaatgatcaagaccgggatgaagagtcctgataatatttcaacc

SEQ ID NO: 50050 - DNA, 80 bp, synthetic construct
  source 1..80: mol_type = other DNA
gtggagatttggcactccggatttttacaaaagcatacaggtactcatacatggctgaaggagttaccaggcgaactaag

SEQ ID NO: 50051 - DNA, 80 bp, synthetic construct
  source 1..80: mol_type = other DNA
ttcttggaagcaataagtcaagaaccaaagctcctgaaccagggagccaagactgtacacagcatatcaactctacacct

SEQ ID NO: 50052 - DNA, 80 bp, synthetic construct
  source 1..80: mol_type = other DNA
ggatgagatatgtcttagatacaagatgggcctgatatcagaacaggagctctgcagactaatgaacccctcaaacccaa

SEQ ID NO: 50053 - DNA, 80 bp, synthetic construct
  source 1..80: mol_type = other DNA
tttccaaaatgggagatgaagttgtcgctttccggcctgagggcaaattgccgctggtactagaggacacaagtgttggt

SEQ ID NO: 50054 - DNA, 80 bp, synthetic construct
  source 1..80: mol_type = other DNA
agttgcttcaaatacaactttacaaggaacagaaccgtggtggataagccacatcgtgtgctgcttgaaaaagagatcaa

SEQ ID NO: 50055 - DNA, 80 bp, synthetic construct
  source 1..80: mol_type = other DNA
gtatcaacagatgacctcttttgtggaggagtgcttccctgaacttatgataaagcaaaatgcaatgccaggcacagtga

SEQ ID NO: 50056 - DNA, 80 bp, synthetic construct
  source 1..80: mol_type = other DNA
agaatgcctgcaagcggagaattgagtacatcattgaccaaagtgatctaccccaagacgtgaagagaagcctggttgag

SEQ ID NO: 50057 - DNA, 80 bp, synthetic construct
  source 1..80: mol_type = other DNA
aaagtgatctaccccaagacgtgaagagaagcctggttgaggagttgggttagtttggaaaaaactgctttgatttctct

SEQ ID NO: 50058 - DNA, 80 bp, synthetic construct
  source 1..80: mol_type = other DNA
aggacaccaagcagtggattccacagagactctgtaatacttctctcggaacaactaatgcacaagtacccggagggttt

SEQ ID NO: 50059 - DNA, 80 bp, synthetic construct
  source 1..80: mol_type = other DNA
tgagaggcttaagacatggttggagtgtgacctcctggaaatgaactactctgagttaagcaaaggaagacaaacattaa

SEQ ID NO: 50060 - DNA, 80 bp, synthetic construct
  source 1..80: mol_type = other DNA
gttttctgagagacaggaatcagccagcacctatagcactagaagaaacaattgagtatctacaacaaaatctcaaccgg

SEQ ID NO: 50061 - DNA, 80 bp, synthetic construct
  source 1..80: mol_type = other DNA
ccaatagggcaatcgatgatgtgctatctgaatgcaattatggaggtgctttcactaccaaaaaccaccttcacttatga

SEQ ID NO: 50062 - DNA, 80 bp, synthetic construct
  source 1..80: mol_type = other DNA
agttgctacccaactggcacattttgactatgatgaatttgatgatggagaaaccggcccactcagaatgcactttgaaa

SEQ ID NO: 50063 - DNA, 80 bp, synthetic construct
  source 1..80: mol_type = other DNA
gagcaaaaaagaaggttacaatcactctcactaggcaagagctgtggagcaaaatgtgcaccttaggcaccatgtggaaa

SEQ ID NO: 50064 - DNA, 80 bp, synthetic construct
  source 1..80: mol_type = other DNA
catctcgaacgaggacgattaaaccgaaggaccattgctactccgtccatgttagtaaggggctttgtgaaagtggtgga

SEQ ID NO: 50065 - DNA, 80 bp, synthetic construct
  source 1..80: mol_type = other DNA
ctacgcctatacagggcctgcaccagtcgcatacggaaccaggacgagagccgttctagagaatgtcctcagaccatata

SEQ ID NO: 50066 - DNA, 80 bp, synthetic construct
  source 1..80: mol_type = other DNA
agatgcagcaagggtcttattggaatgtctaccaagttctggagtccctgtaggaggtgaagaaaagcttgcaaagctgt

SEQ ID NO: 50067 - DNA, 80 bp, synthetic construct
  source 1..80: mol_type = other DNA
ccagcaagctcgaaacagtggcagaggttacaggtgaactgagtggagaccaagagaagttcaatgaatgtttagaccca

SEQ ID NO: 50068 - DNA, 80 bp, synthetic construct
  source 1..80: mol_type = other DNA
gatgctatgaggattatgtggactgtgtttctcagagaccagccagactggatgaaaaagcttttcaacattcccttctt

SEQ ID NO: 50069 - DNA, 80 bp, synthetic construct
  source 1..80: mol_type = other DNA
cactggcattgtgaagaaggggctggagtggttcgaaaagaatgcaggaaccattaaattttgggatgaaagctacacgg

SEQ ID NO: 50070 - DNA, 80 bp, synthetic construct
  source 1..80: mol_type = other DNA
agtggaggaaggacataggttttcgtgtcaatgcaaatacggcagccttaagccacaaggtccttgcagagtacaaagtc

SEQ ID NO: 50071 - DNA, 80 bp, synthetic construct
  source 1..80: mol_type = other DNA
aatattacaattgtataacaaccatcgttagcccatccatttacaaagaatcggagctatactcattattattatctgca

SEQ ID NO: 50072 - DNA, 80 bp, synthetic construct
  source 1..80: mol_type = other DNA
aaataaaaagagacaattagagtttgaagattggtctatagatccaaaaaattatgcaatgaaattcggatgtgagatag

SEQ ID NO: 50073 - DNA, 80 bp, synthetic construct
  source 1..80: mol_type = other DNA
cactattctatcccgaccgtttcttttcacatattggtattaggcaaccatcaattttcaaaagagatagttatatgacg

SEQ ID NO: 50074 - DNA, 80 bp, synthetic construct
  source 1..80: mol_type = other DNA
gagctaagaaatcattgactaaaagtaaaataagggataaatttaaaataggtgatggtcaacctcatacgcgtgaagag

SEQ ID NO: 50075 - DNA, 80 bp, synthetic construct
  source 1..80: mol_type = other DNA
cttatgattatctcaaaatcaatagattagtcaacagtacatttcattctttactgttgggctaaaccataagtaactta

SEQ ID NO: 50076 - DNA, 80 bp, synthetic construct
  source 1..80: mol_type = other DNA
agttttttcattggtaaagggacacatacatttaataggacctgaaatggaatcattgagaaatataattatgtttttac

SEQ ID NO: 50077 - DNA, 80 bp, synthetic construct
  source 1..80: mol_type = other DNA
acaccccacgggttaggtacatcaagtggtggggcagggccaaccgcagggcatcggtgaggtggttgctggtgccagaa

SEQ ID NO: 50078 - DNA, 80 bp, synthetic construct
  source 1..80: mol_type = other DNA
gcaggtgcagatcctgccaacatgccagccggcttcgtggagggcctgcagtgggccatggatgcgatggacaacgcatc

SEQ ID NO: 50079 - DNA, 80 bp, synthetic construct
  source 1..80: mol_type = other DNA
acgataattatggaattacccgcatagaagcgcttaatttaataaaatcgaatccaaatgtactgcgtagtttataccaa

SEQ ID NO: 50080 - DNA, 80 bp, synthetic construct
  source 1..80: mol_type = other DNA
tgacaactttgatgaatgtgcactctaatggtcaagcaactcatgacaatggtgcaggaaagccagtgcagggcaccagc

SEQ ID NO: 50081 - DNA, 80 bp, synthetic construct
  source 1..80: mol_type = other DNA
tcatgacaatggtgcaggaaagccagtgcagggcaccagctttcattttttttctgttgggggggaggctttaaaaaata

SEQ ID NO: 50082 - DNA, 80 bp, synthetic construct
  source 1..80: mol_type = other DNA
gaattacccgcatagaagcgcttaatttaattaaatcgaatccgaatgtactacgtaattttattaatcaaaataatcca

SEQ ID NO: 50083 - DNA, 80 bp, synthetic construct
  source 1..80: mol_type = other DNA
agatttataggaggaatagaacaaattggatcagaaaaaactcaaaacgtaaccgtaaatccaggtccatttgctcaaac

SEQ ID NO: 50084 - DNA, 80 bp, synthetic construct
  source 1..80: mol_type = other DNA
atggaattactcgaactgaagcgttaaatttaattaaatcaaatccacaatgtattacgaatttatttaaccaaaaaaat

SEQ ID NO: 50085 - DNA, 80 bp, synthetic construct
  source 1..80: mol_type = other DNA
catttacatctgttgtcaactccatcaaccacatgatatatgtggcggcagccattctgcaggcatatgaaagtcacaat

SEQ ID NO: 50086 - DNA, 80 bp, synthetic construct
  source 1..80: mol_type = other DNA
gcgctcttgctcccaactcaaattgaaactccaaatgccactgcacagcgcgttgaactggcggctgcgactggagcagt

SEQ ID NO: 50087 - DNA, 80 bp, synthetic construct
  source 1..80: mol_type = other DNA
cgcgccaagcggccaacacgttcctgggcgcaatccaccttggtccgaggattaatccttacactgcgcacatgagtgcc

SEQ ID NO: 50088 - DNA, 80 bp, synthetic construct
  source 1..80: mol_type = other DNA
taccagcaatgttcccagttgcatcagggagtgtttcgccagtgtcaccacgctcccctggaccacgcgccaagcggcca

SEQ ID NO: 50089 - DNA, 80 bp, synthetic construct
  source 1..80: mol_type = other DNA
tatttacgcagagagtggcagtcatttggggagactgtcactatcaaaaatactttcaatgctcaagaagatagcagtca

SEQ ID NO: 50090 - DNA, 80 bp, synthetic construct
  source 1..80: mol_type = other DNA
atcagtgggatcgaacgcactagatatcactgctgatccaacaacagttccacaggttcaaagaatcatgcgagtaaatt

SEQ ID NO: 50091 - DNA, 80 bp, synthetic construct
  source 1..80: mol_type = other DNA
ggaaaaaatggtggcaagttttttatactgttgttgattatgtaaaccagataattcaagcaatgtccaaaagatctaga

SEQ ID NO: 50092 - DNA, 80 bp, synthetic construct
  source 1..80: mol_type = other DNA
caaaggcaccaggatcagatttaaagatgattcatccttcgaagaggtaaatggggataagaaagcctaaacatctttat

SEQ ID NO: 50093 - DNA, 80 bp, synthetic construct
  source 1..80: mol_type = other DNA
agagcacaattgacgcagctaaatcaatggccacaaaggtgatgaagaagtttaagaaatcagaattagctacatcaatc

SEQ ID NO: 50094 - DNA, 80 bp, synthetic construct
  source 1..80: mol_type = other DNA
tctgaattgactggatcattatcaaatgccgcctcatcagtttccagaagtatttccattcgatcaaatttatctgcaat

SEQ ID NO: 50095 - DNA, 80 bp, synthetic construct
  source 1..80: mol_type = other DNA
ttcaaattggactagtgcctcaaatgacgtatcaaatatagctaatttagtgaatgatgtttcaacacaaacgtctgcaa

SEQ ID NO: 50096 - DNA, 80 bp, synthetic construct
  source 1..80: mol_type = other DNA
tttaaatgacaattatggaattacccgtatggaagcgcttaatttaattaaatcgaatccaaatgtgctacgtaatttca

SEQ ID NO: 50097 - DNA, 80 bp, synthetic construct
  source 1..80: mol_type = other DNA
atggagggcaatggctcccagtcacctcaaaagactgctaacggcaataattcggtggttgacccgcctggcacaactgg

SEQ ID NO: 50098 - DNA, 80 bp, synthetic construct
  source 1..80: mol_type = other DNA
cattggtttccaaaacaatggggatgtgtttgaaaacaaaactccatcagtcatgtttgccacatacagccctctaacca

SEQ ID NO: 50099 - DNA, 80 bp, synthetic construct
  source 1..80: mol_type = other DNA
gtggaccatcagttgcactctatgattcattaaaccctgcatccctcgcacttgttagaattgaatccaatcaggacttt

SEQ ID NO: 50100 - DNA, 80 bp, synthetic construct
  source 1..80: mol_type = other DNA
cctgatggaggctttgacaacgacaagaacgtggtggtggaaatgtcttgggagatgttccgcgattcaacacaaattta

SEQ ID NO: 50101 - DNA, 80 bp, synthetic construct
  source 1..80: mol_type = other DNA
gcacaactggaacgccaaaaccagttaatggaacaatggatgaccaagcaagagacactccaaagagatcaaatggcatt

SEQ ID NO: 50102 - DNA, 80 bp, synthetic construct
  source 1..80: mol_type = other DNA
gactcgtgatttggcaatcaatggccctgcggagagggtgaatgctgcaattaatgctgggtttgacccaatcagtgccc

SEQ ID NO: 50103 - DNA, 80 bp, synthetic construct
  source 1..80: mol_type = other DNA
gaaggctcgctggctcccaagagcgggttatctatgggaaccttgacaggccaatttcacacattggcacaatggaaggt

SEQ ID NO: 50104 - DNA, 80 bp, synthetic construct
  source 1..80: mol_type = other DNA
attagggccactagacacctcgagtccatgagcactgcactatcaacattcaagaagggcaccccatttggaaagccagc

SEQ ID NO: 50105 - DNA, 80 bp, synthetic construct
  source 1..80: mol_type = other DNA
caccaccaaagttcaccactggtcgcccaaccaattcaaagcccgcagtaaatttgaaccactccccaggtagctcaaat

SEQ ID NO: 50106 - DNA, 80 bp, synthetic construct
  source 1..80: mol_type = other DNA
gtttaaattttatttccttaactgtgatgccacacgcgttcgggtggttaaatgtagttaagcgactacagtcacatgga

SEQ ID NO: 50107 - DNA, 80 bp, synthetic construct
  source 1..80: mol_type = other DNA
gttgagacctcccggacagcagatggaaaatggagtgtctcctgagggtctcctccctaggaggcttggttatgcaagag

SEQ ID NO: 50108 - DNA, 80 bp, synthetic construct
  source 1..80: mol_type = other DNA
gtaaccgtgttggtgggttggctgtgggcatggtcattgttgcagatcaccgtcaagtcaacaggcacttcaatgcacaa

SEQ ID NO: 50109 - DNA, 80 bp, synthetic construct
  source 1..80: mol_type = other DNA
cccggccacatcccaccttgttgtttctaatccggaacaacccaatgggcccgcgcagcgcttggaaatggctgtcgcta

SEQ ID NO: 50110 - DNA, 80 bp, synthetic construct
  source 1..80: mol_type = other DNA
tctatcacatatggttggtcaactgctcctgtcaacccaatggcagcggagatagtcactcggaatggccatgctgggtc

SEQ ID NO: 50111 - DNA, 80 bp, synthetic construct
  source 1..80: mol_type = other DNA
cctgactcctgtgcctccaccgtcaatggcgctcttgacacttccagtggacgtccatcaactggcgtttgtgggccagc

SEQ ID NO: 50112 - DNA, 80 bp, synthetic construct
  source 1..80: mol_type = other DNA
attaggaccaccagacaccttgagtccatgagtactgcactgtcaacattcaagcagggcaccccttttggaaaaccagc

SEQ ID NO: 50113 - DNA, 80 bp, synthetic construct
  source 1..80: mol_type = other DNA
gaccccccggacagcaaatggaaaatggagtgtcccctgaaggtctcctccctaggaggcttggttatgcaagaggtaac

SEQ ID NO: 50114 - DNA, 80 bp, synthetic construct
  source 1..80: mol_type = other DNA
cgtggtggcggattggctgtgggcatggtcatcgtcgcagatcaccgccaagtcaacagacacttcaatgcacaatccat

SEQ ID NO: 50115 - DNA, 80 bp, synthetic construct
  source 1..80: mol_type = other DNA
gtggtaacatcagaaatgcctggctactcgtcgggtcacagaacaagggcccgttgattccaggaatgcccaaccatttt

SEQ ID NO: 50116 - DNA, 80 bp, synthetic construct
  source 1..80: mol_type = other DNA
cctgactcctgtgcttccactgtcaacggtgcacttgatacctccagtggacgtccatcaactggtgtttgcgggtcagc

SEQ ID NO: 50117 - DNA, 80 bp, synthetic construct
  source 1..80: mol_type = other DNA
attgaccatcacttgagtcatagtgaatgcagcgggaggccctatgggcgtgtcacaatttttaccgattattaagaaaa

SEQ ID NO: 50118 - DNA, 80 bp, synthetic construct
  source 1..80: mol_type = other DNA
atggagggccttggctcccagcgaggccagcggcctgatgaacaggttgccagcgatgctgctcaggccaccccccaaga

SEQ ID NO: 50119 - DNA, 80 bp, synthetic construct
  source 1..80: mol_type = other DNA
cattggtttccaaaacaatggtgatgtttatgaaaattacaccccctctgtgatgtttgccacatacaacccacttactg

SEQ ID NO: 50120 - DNA, 80 bp, synthetic construct
  source 1..80: mol_type = other DNA
aggagcgcctgcttagttatgatggtcacgctgcaattttacactcatctcaacttgaacgcacagctgaagttttccaa

SEQ ID NO: 50121 - DNA, 80 bp, synthetic construct
  source 1..80: mol_type = other DNA
cgtgcagttgactaccaccgcatggacggcacagaacccacatgctcattgggcctttgggtttaccaaccactgattaa

SEQ ID NO: 50122 - DNA, 80 bp, synthetic construct
  source 1..80: mol_type = other DNA
tgggtttaccaaccactgattaacccatttgccactgcagcagtgtccacatgttgggtgtcaattgagaccaaaccggg

SEQ ID NO: 50123 - DNA, 80 bp, synthetic construct
  source 1..80: mol_type = other DNA
cccatttgccactgcagcagtgtccacatgttgggtgtcaattgagaccaaaccggggggcgactttgacttttgccttt

SEQ ID NO: 50124 - DNA, 80 bp, synthetic construct
  source 1..80: mol_type = other DNA
taaaaccaccagggcagcagatgcaaaacggtatatcacctgagggcctattgccacgccgactgggttacgcaaggggc

SEQ ID NO: 50125 - DNA, 80 bp, synthetic construct
  source 1..80: mol_type = other DNA
aatagggttggtggccttgcagttggcatggttttggtgtctgaacacaagcaagtcaatcgccacttcaactcccaatc

SEQ ID NO: 50126 - DNA, 80 bp, synthetic construct
  source 1..80: mol_type = other DNA
aataacatatggctggtcaacggcacctgtcaacccaatggcagccgaaattgtcaacaagtatgaccacactggcactg

SEQ ID NO: 50127 - DNA, 80 bp, synthetic construct
  source 1..80: mol_type = other DNA
gtaacaccaagaggaatgcatggctatcaattggggcacaaaataagggtccattgttccctggtctacccaaccacttt

SEQ ID NO: 50128 - DNA, 80 bp, synthetic construct
  source 1..80: mol_type = other DNA
ccagactcctgtgcatcaaccgtggtgggtgccatggacacaaaccgtgggatgccatccactggggtctgtggtcctgc

SEQ ID NO: 50129 - DNA, 80 bp, synthetic construct
  source 1..80: mol_type = other DNA
ttcttcatttctctttcttcttttcttttcttttctacatggttactaacgcatcaaggtggataattatgattaagcga

SEQ ID NO: 50130 - DNA, 80 bp, synthetic construct
  source 1..80: mol_type = other DNA
cttttcttttcttttctacatggttactaacgcatcaaggtggataattatgattaagcgatcacagccatgctttctgg

SEQ ID NO: 50131 - DNA, 80 bp, synthetic construct
  source 1..80: mol_type = other DNA
atggcagccaacacttttctgggggccatccacctcggtccccgaatcaacccctacactgcacacatgagtgccatgtt

SEQ ID NO: 50132 - DNA, 80 bp, synthetic construct
  source 1..80: mol_type = other DNA
attttaaaattggtagatttgatatacttgatactgactcatatgtatatattgattattgggatgattcagaaatattt

SEQ ID NO: 50133 - DNA, 80 bp, synthetic construct
  source 1..80: mol_type = other DNA
aacatggggatctgggtcaatacttaaatcagcattctctacacctgaaataactggaccacatacgaatacagtaattg

SEQ ID NO: 50134 - DNA, 80 bp, synthetic construct
  source 1..80: mol_type = other DNA
tcatttattaatcaggataatccactcatacggaatagaataactaatctaataagtcaatgtaaattgtaaacagtgat

SEQ ID NO: 50135 - DNA, 80 bp, synthetic construct
  source 1..80: mol_type = other DNA
agttagaaaagcaagtagtaacattcaactggaatgtgggtggtatactaattaaaccaataaattcaaatagaatgaga

SEQ ID NO: 50136 - DNA, 80 bp, synthetic construct
  source 1..80: mol_type = other DNA
aatattaatatgtatactgagtattttctggcaagtaatgatccatatacatatcttaaaaatttacaacagccaacagt

SEQ ID NO: 50137 - DNA, 80 bp, synthetic construct
  source 1..80: mol_type = other DNA
gacatgaaaatgatgaaaaagatgaatgatatctcaaaattaggagatggtcctattaatgttagtaatattattagtaa

SEQ ID NO: 50138 - DNA, 80 bp, synthetic construct
  source 1..80: mol_type = other DNA
gaggatggggatatgactatactagtgtaacatttaaaacagttaatcatacatattcatatactagagcgggagaaaat

SEQ ID NO: 50139 - DNA, 80 bp, synthetic construct
  source 1..80: mol_type = other DNA
cttttcttttctttctacacggtacctcacgcgttcgggtggtcaaatgcaattaagcgattgcagccgtgctttcttgc

SEQ ID NO: 50140 - DNA, 80 bp, synthetic construct
  source 1..80: mol_type = other DNA
gggcttctggccctgtggtgatgttccagaataatggagatgttaatgaaagctcagctaaccatggcatactcactgca

SEQ ID NO: 50141 - DNA, 80 bp, synthetic construct
  source 1..80: mol_type = other DNA
gccgccggctctgttgtagacatggccggcaccatttcatctattgtggctcaacataggcaattagatctgatggcgca

SEQ ID NO: 50142 - DNA, 80 bp, synthetic construct
  source 1..80: mol_type = other DNA
ccacctccagtcaatgcaaggggcactcagtgccttcaaacagggatccaaatatggtgctcccccggcacctgctggct

SEQ ID NO: 50143 - DNA, 80 bp, synthetic construct
  source 1..80: mol_type = other DNA
ctttcttccattccgtggttcctcacgcgttcgggtggacaattgcgattaagcgatcgcagccacgtttctctcatggt

SEQ ID NO: 50144 - DNA, 80 bp, synthetic construct
  source 1..80: mol_type = other DNA
gcagtttccaggttcgcgtcacactctctggctctgggctctatgcggggcgtgctgttgtggctgtcttaccaccaggg

SEQ ID NO: 50145 - DNA, 80 bp, synthetic construct
  source 1..80: mol_type = other DNA
caacctgccagacattcgggccgtcgactaccaccgagtcgacggcgacgaacccacagccaccgttggcctttgggttg

SEQ ID NO: 50146 - DNA, 80 bp, synthetic construct
  source 1..80: mol_type = other DNA
ctgatcatcctggtcctacaattctgtattcttcacaattggacagtacagccactatcttccaatctggtccagtcaac

SEQ ID NO: 50147 - DNA, 80 bp, synthetic construct
  source 1..80: mol_type = other DNA
ttaaattacatttcttttcttccctttgtggttgcacacgcgtccgggtgcatgtcggccaattaagcgattggcgccac

SEQ ID NO: 50148 - DNA, 80 bp, synthetic construct
  source 1..80: mol_type = other DNA
tgcttgctaaagccccctggtcaagccatggagaacggaggctcaccgtcacaccttttgccacgcaagttacagcgggc

SEQ ID NO: 50149 - DNA, 80 bp, synthetic construct
  source 1..80: mol_type = other DNA
tttgagatggagggcttgggccagcagcagccacagggtggcgaaaagagcgcaccacagcctgtgacaccacaggacac

SEQ ID NO: 50150 - DNA, 80 bp, synthetic construct
  source 1..80: mol_type = other DNA
cctcaggcccgcttgtcacttttgccgacaatggagatgtgaatgagagctctgcacagaatgccattctaacagcagcc

SEQ ID NO: 50151 - DNA, 80 bp, synthetic construct
  source 1..80: mol_type = other DNA
aatcaaggattcactgccttctctcccacatttgatgcggcaggtatgtgggtgtggatgccatggagcacatcacgtcc

SEQ ID NO: 50152 - DNA, 80 bp, synthetic construct
  source 1..80: mol_type = other DNA
aggtgcaacagatagtaacatctacatcaatcccacatgggtcaatggaaacccctctcacccaatccatgagaagtgca

SEQ ID NO: 50153 - DNA, 80 bp, synthetic construct
  source 1..80: mol_type = other DNA
ctaacatgattggcacaaatttccagtttggtgggactggcactaataacatcatgttgtggcaggaacagcacttcact

SEQ ID NO: 50154 - DNA, 80 bp, synthetic construct
  source 1..80: mol_type = other DNA
cctggtgctgcagaggtgtattgctcgcagctagagagcacggctgaaattttccagaacaacattgtcaatataccaat

SEQ ID NO: 50155 - DNA, 80 bp, synthetic construct
  source 1..80: mol_type = other DNA
gaatcaaatggccgtgttcaatgtggaaactgctggcaactcattccaaattgccatcctgccaaatgggtactgtgtca

SEQ ID NO: 50156 - DNA, 80 bp, synthetic construct
  source 1..80: mol_type = other DNA
tggcgacaggagcagtcacgagcaacgtaccaaattgcatccgggagtgttttgcttccgtcaccaccataccctggact

SEQ ID NO: 50157 - DNA, 80 bp, synthetic construct
  source 1..80: mol_type = other DNA
tcacttcaagggccccatgggaacagtggacgggccgtcaggtttttagaataatgtcttggttcactggagcatctttg

SEQ ID NO: 50158 - DNA, 80 bp, synthetic construct
  source 1..80: mol_type = other DNA
gctgctggctcccttgtggacatggccggcacaatatcatcaattgtggcacaacagaggcaaatcgacctgatggcaga

SEQ ID NO: 50159 - DNA, 80 bp, synthetic construct
  source 1..80: mol_type = other DNA
agcaaacaagatccaggctgactgggttcgccgccaggaagcattacaaatcagaggccaggacatttcacgagaccttg

SEQ ID NO: 50160 - DNA, 80 bp, synthetic construct
  source 1..80: mol_type = other DNA
caataaatggcacttcccagcgtgtcgagtccctcataaacgcaggcttcactcctgtcgatgcccgccggctggccggt

SEQ ID NO: 50161 - DNA, 80 bp, synthetic construct
  source 1..80: mol_type = other DNA
gggacagagaccgtaagctatgggctgctagaccgtcccatacttcaacggggcgtcttgtctggcatcactgaaacgcg

SEQ ID NO: 50162 - DNA, 80 bp, synthetic construct
  source 1..80: mol_type = other DNA
ccacctgcagtcaatgcagggcgctttgagtgcgttcaagaatggggcatcatatggggctccaccagctccagcaggtt

SEQ ID NO: 50163 - DNA, 80 bp, synthetic construct
  source 1..80: mol_type = other DNA
ttgtgaatccaaattatcagccctcacctccaaaattgaaattgggtcccagaccccctagtacaaatgtttaagtgtct

SEQ ID NO: 50164 - DNA, 80 bp, synthetic construct
  source 1..80: mol_type = other DNA
tttcttattgttcttttcttttctttctttctcacacggttcctcacgcgttcgggtggttaaatgcaattaagcgattg

SEQ ID NO: 50165 - DNA, 80 bp, synthetic construct
  source 1..80: mol_type = other DNA
ctttctttctcacacggttcctcacgcgttcgggtggttaaatgcaattaagcgattgcagccgtgcatttctctttggg

SEQ ID NO: 50166 - DNA, 80 bp, synthetic construct
  source 1..80: mol_type = other DNA
acacggcaagctgccaacaccttcctcggggccatccatctcgggcctcgcatcaatccatacactgcccatctgagtgc

SEQ ID NO: 50167 - DNA, 80 bp, synthetic construct
  source 1..80: mol_type = other DNA
gttttcaggtccgggtcaccatatctggctcaggtctgttcgcagggcgagctataactgctatcctgcctcccggggtt

SEQ ID NO: 50168 - DNA, 80 bp, synthetic construct
  source 1..80: mol_type = other DNA
aaccctgccagtgtccaaaaccctggggtgttcccgcacggcttcattgatgcacgcaccactgagccaattttaatcaa

SEQ ID NO: 50169 - DNA, 80 bp, synthetic construct
  source 1..80: mol_type = other DNA
cttgccagacattcgccccgtcgactttcatcgtgttgacggcgatgatgccaccgcgtctgtcgggctatgggtggccc

SEQ ID NO: 50170 - DNA, 80 bp, synthetic construct
  source 1..80: mol_type = other DNA
aacctctcatcaacccatttcagactggccctgtgtccacctgctggctgagctttgagactagacctggccctgacttt

SEQ ID NO: 50171 - DNA, 80 bp, synthetic construct
  source 1..80: mol_type = other DNA
gatttctgcctactgaaggcccccgagcagcaaatggacaatggaatttcgcccgcatcactgttgcctcgacggcttgg

SEQ ID NO: 50172 - DNA, 80 bp, synthetic construct
  source 1..80: mol_type = other DNA
gcggtcgaggggcaatcggatgggtggacgaatcgtggggctcgtcgtggtggctgctgcagaacaggtgaaccaccatt

SEQ ID NO: 50173 - DNA, 80 bp, synthetic construct
  source 1..80: mol_type = other DNA
cattggtcctacagcggccttgctacttcccactcaaattgaaaccccaaatgcaagtgctcagcgcctggagctggcta

SEQ ID NO: 50174 - DNA, 80 bp, synthetic construct
  source 1..80: mol_type = other DNA
ttgacggccgttccacaacgttggggtggtccacgttgcctgttgggcccattgctgtggatatatcttggtatggtgac

SEQ ID NO: 50175 - DNA, 80 bp, synthetic construct
  source 1..80: mol_type = other DNA
tatgaacataagtcaatccgtggattggttagtgctcaaggtaagggaataatatttccaaacatagtcaaccactggac

SEQ ID NO: 50176 - DNA, 80 bp, synthetic construct
  source 1..80: mol_type = other DNA
agatgtggcattatcatctaaaacatccaacaccaccacaattccaactgacacggccacacttggtaatttgccaggtg

SEQ ID NO: 50177 - DNA, 80 bp, synthetic construct
  source 1..80: mol_type = other DNA
cactaactcatattcagtagatttatatgatgaaatagagcagattggatcagaaaaaactcaagatgtaactgtaaatc

SEQ ID NO: 50178 - DNA, 80 bp, synthetic construct
  source 1..80: mol_type = other DNA
caacctcaaccagtgtcccggggcctctggtcccgttgtgatgtttcaaaacaacggggatgtgaatgagacaagtgcca

SEQ ID NO: 50179 - DNA, 80 bp, synthetic construct
  source 1..80: mol_type = other DNA
acaactgtgtgttaacagctgcttcacatgattttgtcaacctgtccagtaattttgatgcggctggcatgtgggtttgg

SEQ ID NO: 50180 - DNA, 80 bp, synthetic construct
  source 1..80: mol_type = other DNA
ctcccttggacaactaccaagcctgatgccacaataaaccgcaatgtttacatcactccaacttggatcaatggtgaccc

SEQ ID NO: 50181 - DNA, 80 bp, synthetic construct
  source 1..80: mol_type = other DNA
ctctcgaccaatccatggcaagtgtaccaacatgattgggactaactttcagtttggtggtactggcactaacaacatta

SEQ ID NO: 50182 - DNA, 80 bp, synthetic construct
  source 1..80: mol_type = other DNA
tgctttggcaagagcagcacttcacatcttttcctggagcagcagaagtctactgttcacagcttgagagcactgctgag

SEQ ID NO: 50183 - DNA, 80 bp, synthetic construct
  source 1..80: mol_type = other DNA
atgttccaaaacaatgttgttaatataccagctaaccagatggcagtcttcaatgtggaaactgcgggcaacacatttca

SEQ ID NO: 50184 - DNA, 80 bp, synthetic construct
  source 1..80: mol_type = other DNA
agcacagagacagtccagtatggcctgctggatcgcccaatcctacaacgggaggtcctagcgggcatcagtgaaacaca

SEQ ID NO: 50185 - DNA, 80 bp, synthetic construct
  source 1..80: mol_type = other DNA
ttgccaacccaaatttccaaccggccccccccagggtgaatttagggttcaggcccccatcaaccaatgtttaggacacc

SEQ ID NO: 50186 - DNA, 80 bp, synthetic construct
  source 1..80: mol_type = other DNA
aaccttccttcccttctcttagtaagttcttattttcttttctttccaagtggttcctcacgcgttcgggtggataaatg

SEQ ID NO: 50187 - DNA, 80 bp, synthetic construct
  source 1..80: mol_type = other DNA
cagtgctacctccaggtgttaacccagccaatgtccaaaaccctggggtttttccacatgctttcattgatgcccgcacc

SEQ ID NO: 50188 - DNA, 80 bp, synthetic construct
  source 1..80: mol_type = other DNA
ctagacctggacctgattttgacttttgtcttctcaaggccccagagcaagaaatggacaatggcatatcacccgccaac

SEQ ID NO: 50189 - DNA, 80 bp, synthetic construct
  source 1..80: mol_type = other DNA
ttgctccctcgccgtcttgggcgatctcgaggcaacaggctcggtggccgggtggtgggtctcgtggtggtggccgttgc

SEQ ID NO: 50190 - DNA, 80 bp, synthetic construct
  source 1..80: mol_type = other DNA
ggaacaagtcaaccatcactttgctgccaactccaccacactcggttggtcaacactcccaattgagcccattgctggtg

SEQ ID NO: 50191 - DNA, 80 bp, synthetic construct
  source 1..80: mol_type = other DNA
ctatttcctggtaccagaacaccacaccaggcattagcacacgtggcctgctcagtgctgaaggcaaaggcatcatcttt

SEQ ID NO: 50192 - DNA, 80 bp, synthetic construct
  source 1..80: mol_type = other DNA
ccaaacatagtcaaccactggactgacgtcgctctatccagcaaaacttccgggagaacaactgtaccaactgaccaggc

SEQ ID NO: 50193 - DNA, 80 bp, synthetic construct
  source 1..80: mol_type = other DNA
agtgtaccaacatggttggaactaattttcagtttggtggcactggtactaataacattatgctttggcaagaacagcac

SEQ ID NO: 50194 - DNA, 80 bp, synthetic construct
  source 1..80: mol_type = other DNA
gtttgccggctggggtgggagtttccagatacgagtcaccctctctggttccggcctgtacgcaggccgagcggtggtag

SEQ ID NO: 50195 - DNA, 80 bp, synthetic construct
  source 1..80: mol_type = other DNA
ctgtactgcccccgggtgttaacccagccaatgtccaaaaccctggagttttcccacacgcattcattgatgcccgaact

SEQ ID NO: 50196 - DNA, 80 bp, synthetic construct
  source 1..80: mol_type = other DNA
gtggatcccatcctcatcaatctccctgacattcgtgcggtggattaccatcgcgtggacggcgatgagcaaactgcaac

SEQ ID NO: 50197 - DNA, 80 bp, synthetic construct
  source 1..80: mol_type = other DNA
cgttgggctttgggtcgctcaaccgctcatcaatccgtttcagactggatccatctccacgtgttggttgacatttgaga

SEQ ID NO: 50198 - DNA, 80 bp, synthetic construct
  source 1..80: mol_type = other DNA
ctagacctgggcctgattttgacttttgcctcctcaaggccccggagcaggaaatggacaacggcatatcacctgccaat

SEQ ID NO: 50199 - DNA, 80 bp, synthetic construct
  source 1..80: mol_type = other DNA
taaggtcgttagctgcaaacttaaattctgtaatgtgtacaggaggtgattatagttttgcattaccagttggtcaatgg

SEQ ID NO: 50200 - DNA, 80 bp, synthetic construct
  source 1..80: mol_type = other DNA
cggctaatcctaaaaacggaaaagaatattatgaagtagcaggtagattttcattaatatcactagttccgtctaatgat

SEQ ID NO: 50201 - DNA, 80 bp, synthetic construct
  source 1..80: mol_type = other DNA
gattatcaggcaccgatagctaattcagtggcagtcagaaaagatttagagcggcagttaggtgaacttagagaagagtt

SEQ ID NO: 50202 - DNA, 80 bp, synthetic construct
  source 1..80: mol_type = other DNA
ggtcctggtgaaacgaatgattctactaccgttgagcctgtattagatggaccatatcaaccaactacatttaatccacc

SEQ ID NO: 50203 - DNA, 80 bp, synthetic construct
  source 1..80: mol_type = other DNA
ctggttcagtatccacattaacagactcattatctgacgcagcttcttcaatatcgagaggagcttcaattcgttcagta

SEQ ID NO: 50204 - DNA, 80 bp, synthetic construct
  source 1..80: mol_type = other DNA
ggatcatcagtttcggcttggacagatgtctcaacgcaagtcaccgacatctcttcgtctgttagcacgatttcaacaca

SEQ ID NO: 50205 - DNA, 80 bp, synthetic construct
  source 1..80: mol_type = other DNA
gacttcaaccattagcagaagattgaggctaaaagaaatggctacccagacggaaggaatgaattttgatgacatatctg

SEQ ID NO: 50206 - DNA, 80 bp, synthetic construct
  source 1..80: mol_type = other DNA
ctgcagtattaaaaactaaaattgatagatctactcaaatttctccaaatacgctgccagatattgtcactgaagcgtcg

SEQ ID NO: 50207 - DNA, 80 bp, synthetic construct
  source 1..80: mol_type = other DNA
gaaaagtttattcctaatagagcatatagagtaataaataatgacgaagtttttgaggctggaacagatggtagattttt

SEQ ID NO: 50208 - DNA, 80 bp, synthetic construct
  source 1..80: mol_type = other DNA
tgcttatcgagttgaaacgtttgaagagataccattcgatgtgcaaaaatttgcagatttagtaactgactccccagtaa

SEQ ID NO: 50209 - DNA, 80 bp, synthetic construct
  source 1..80: mol_type = other DNA
tagacttcaagacattaaagaacttgaatggcaattacggtattagcaaacaacaagcgtttaatttgttaagatctgat

SEQ ID NO: 50210 - DNA, 80 bp, synthetic construct
  source 1..80: mol_type = other DNA
ttaatttgttaagatctgatccaagggtgtttcgtgagtttattaatcaagataacccaataattcgaaatagaattgaa

SEQ ID NO: 50211 - DNA, 80 bp, synthetic construct
  source 1..80: mol_type = other DNA
tgttactagcgcctgcgacagctggtgtagtggtagaagggactaataatacagatcgatggctagctactatcctagtt

SEQ ID NO: 50212 - DNA, 80 bp, synthetic construct
  source 1..80: mol_type = other DNA
gaaccaaatgtggcatcggtaaccagaaattatacaatatttggaatacaagaacagattgtagtagctaacacttcaca

SEQ ID NO: 50213 - DNA, 80 bp, synthetic construct
  source 1..80: mol_type = other DNA
aacgcaatggaaatctattgatgttgttaaaactacacaaaatggaacgtactctcaatacgggccactactatccacac

SEQ ID NO: 50214 - DNA, 80 bp, synthetic construct
  source 1..80: mol_type = other DNA
caaaactttgtgccgtgatgaaacataatggtaaaatttatacatataatggagagacgccaaacgcaactactggatat

SEQ ID NO: 50215 - DNA, 80 bp, synthetic construct
  source 1..80: mol_type = other DNA
ttatattataccaaggtcagaagaagcaacatgcactgaatacattaacaatggtctacctccagtacagaacacgcgga

SEQ ID NO: 50216 - DNA, 80 bp, synthetic construct
  source 1..80: mol_type = other DNA
atgtagttccgttagcgctttcggccagaaatattatatcacctagagctcaggcaaacgaagatattgtcgtatctaaa

SEQ ID NO: 50217 - DNA, 80 bp, synthetic construct
  source 1..80: mol_type = other DNA
acgtcattatggaaagagatgcagtataatagggatattacaattcgatttaaattcgcaaattcaataattaaatctgg

SEQ ID NO: 50218 - DNA, 80 bp, synthetic construct
  source 1..80: mol_type = other DNA
tggattgggctataagtggtcagaaatatcattcaagccagcgaattatcgatatacctatatgagagatggagaggaag

SEQ ID NO: 50219 - DNA, 80 bp, synthetic construct
  source 1..80: mol_type = other DNA
taacagcacatacgacatgttccgtaaatggaatgagtgacttcaactttaatggaggatcactaccgacagattttgtg

SEQ ID NO: 50220 - DNA, 80 bp, synthetic construct
  source 1..80: mol_type = other DNA
taacataccagctaaccagatggcagtctttaatgtggaaactgcgggtaacacatttcaaattgccatcatgccaaatg

SEQ ID NO: 50221 - DNA, 80 bp, synthetic construct
  source 1..80: mol_type = other DNA
gttattgtgttaccaatgcagctgttggtactcatcagcttttggattacgagacaagttttaggtttgttggacttttc

SEQ ID NO: 50222 - DNA, 80 bp, synthetic construct
  source 1..80: mol_type = other DNA
ccccaaagcactagtcttcaagggcccaatgggaacgctggacgggccgtcagattccttgaataatgtcttggttcaca

SEQ ID NO: 50223 - DNA, 80 bp, synthetic construct
  source 1..80: mol_type = other DNA
aaatttttctccccccctcttagtaagttcttattttcttttctttccaagtggttcctcacgcgttcgggtggacaatt

SEQ ID NO: 50224 - DNA, 80 bp, synthetic construct
  source 1..80: mol_type = other DNA
gtggatcccatcctcatcaacctccctgacatccgtgcagtggactaccaccgcgtggatggtgatgagcaaactgccac

SEQ ID NO: 50225 - DNA, 80 bp, synthetic construct
  source 1..80: mol_type = other DNA
aaccgctcatcaacccgtttcaaactggatccatctccacgtgttggttgacatttgaaactagacctggacctgatttt

SEQ ID NO: 50226 - DNA, 80 bp, synthetic construct
  source 1..80: mol_type = other DNA
gacttttgccttctcaaggccccagagcaagaaatggacaatggcatatcacctgccaacttgctccctcgccgcctcgg

SEQ ID NO: 50227 - DNA, 80 bp, synthetic construct
  source 1..80: mol_type = other DNA
tatctaagttaaaatctagaaagaagacttcaccaatgccgatagcagctacttctataattgataaaaccactgttgac

SEQ ID NO: 50228 - DNA, 80 bp, synthetic construct
  source 1..80: mol_type = other DNA
caaaaaaaacatgattttagcacttttacagtagctactgaagttaaacttccgtatatatcaaaagctaccaacttttc

SEQ ID NO: 50229 - DNA, 80 bp, synthetic construct
  source 1..80: mol_type = other DNA
tataaaagtaaaaccttatttcaaagcttatggaacgatgggaggcgcctttaagaattggcttgttgactctggatttg

SEQ ID NO: 50230 - DNA, 80 bp, synthetic construct
  source 1..80: mol_type = other DNA
acatgattatgcatatgtgcgggacggcgtgaccgtcaatgcacacacaattacatatgttaatccgtcaggaaaagccg

SEQ ID NO: 50231 - DNA, 80 bp, synthetic construct
  source 1..80: mol_type = other DNA
gcagattaatcaagccatatatgctaaaaattttcaatcagatacacaagcgcagggatgcctggagaatgtggggactt

SEQ ID NO: 50232 - DNA, 80 bp, synthetic construct
  source 1..80: mol_type = other DNA
ggcaatatatttgctatgttgacgtatttacgcagagagtggcagtcatttggggagactgtcactgtcaaaaatacttt

SEQ ID NO: 50233 - DNA, 80 bp, synthetic construct
  source 1..80: mol_type = other DNA
gggagaaaactatggagagagtattactagtgatttagaagtgtctattaggaatctacaagatcaaataaattcaatta

SEQ ID NO: 50234 - DNA, 80 bp, synthetic construct
  source 1..80: mol_type = other DNA
tatccaaattaaaatctagaaaaaaaacttcgccaatgccgatagcagccacttctataattgataagactactgttgac

SEQ ID NO: 50235 - DNA, 80 bp, synthetic construct
  source 1..80: mol_type = other DNA
caaaaaaaacatgatttcagtacgtttacaatagctactgaagtcaaacttccatacatatcaaaagctaccaacctttc

SEQ ID NO: 50236 - DNA, 80 bp, synthetic construct
  source 1..80: mol_type = other DNA
gaatttctacatcgaatacagcatcaactacgtgagtattgatagtagtacgcttatgttgcaaatacatataaaaaccc

SEQ ID NO: 50237 - DNA, 80 bp, synthetic construct
  source 1..80: mol_type = other DNA
tataaaattaaaaccttattttaaagcttacggaacaatgggaggtgcttttaaaaattggcttgttgactcgggatttg

SEQ ID NO: 50238 - DNA, 80 bp, synthetic construct
  source 1..80: mol_type = other DNA
atatgattatgtatatatgcgggatggcatgaccattaatgcacacacaatcacatatgttaatccatcaggaaaggccg

SEQ ID NO: 50239 - DNA, 80 bp, synthetic construct
  source 1..80: mol_type = other DNA
agactggagaccagcaacagattataatggtcagatgacagttttacaacctggtgacggattttcagtttggtattatg

SEQ ID NO: 50240 - DNA, 80 bp, synthetic construct
  source 1..80: mol_type = other DNA
gcaaatcaatcaggccatatatgctaagaattttcaatcagatacacaagcacagggatgtctggagaatttcgggtctt

SEQ ID NO: 50241 - DNA, 80 bp, synthetic construct
  source 1..80: mol_type = other DNA
gtggtactaatgagaatcctgtagctctctttagttcaatcaatctggcctctctagctgtggttcgtactcaacaggat

SEQ ID NO: 50242 - DNA, 80 bp, synthetic construct
  source 1..80: mol_type = other DNA
ccccgaggacaccccacgggttaggtacatcaagtggtgtggcagggccaaccgcagggcatcggtgaggtggttgctgg

SEQ ID NO: 50243 - DNA, 80 bp, synthetic construct
  source 1..80: mol_type = other DNA
ggccagaagcaggtgcagatcctgccaacatgccagccggcttcgtggagggcctgcagtgggccatggatgcgatggac

SEQ ID NO: 50244 - DNA, 80 bp, synthetic construct
  source 1..80: mol_type = other DNA
tagacaacttctcactaattcatattcagtagatttatatgatgaaatagagcagattggatcagaaaaaactcaagatg

SEQ ID NO: 50245 - DNA, 80 bp, synthetic construct
  source 1..80: mol_type = other DNA
ctttgcaaacttttgggtctttggctgatgttgctggtactgtctccaacatagtgtaccagcagcgccaggccgctcag

SEQ ID NO: 50246 - DNA, 80 bp, synthetic construct
  source 1..80: mol_type = other DNA
cctcaacaatagccctggagcagcaggcccggtggttatgtttgaaaataatggagatgtcaatgagtccactgcaaacc

SEQ ID NO: 50247 - DNA, 80 bp, synthetic construct
  source 1..80: mol_type = other DNA
ccgccccatacacgagaaatgtaccaacatggttgggaccaatttccaattcggcggtactggtacaaataacatcatgt

SEQ ID NO: 50248 - DNA, 80 bp, synthetic construct
  source 1..80: mol_type = other DNA
cctcaataacagccctggtgcagctggtccggtagttatgtttgaaaacaatggagatgtcaatgagtccacggcaaacc

SEQ ID NO: 50249 - DNA, 80 bp, synthetic construct
  source 1..80: mol_type = other DNA
atggcatactaaccgctgcgtcgcatgacttcacatcattgtcccaaactttcgatgcagccgggttgtgggtttggatg

SEQ ID NO: 50250 - DNA, 80 bp, synthetic construct
  source 1..80: mol_type = other DNA
ccatggacccggaacaaaccagacgggcgtacaaacacaaatgtctacatcactccaacctggattaacggcaaccctgc

SEQ ID NO: 50251 - DNA, 80 bp, synthetic construct
  source 1..80: mol_type = other DNA
ccgtcccatacatgagaaatgtactaatatggttgggaccaattttcaattcggtggcactgggacaaacaacatcatgt

SEQ ID NO: 50252 - DNA, 80 bp, synthetic construct
  source 1..80: mol_type = other DNA
tgtggcaggaacaacacttcacatctttcccaggtgctgcagaggtgtactgttcacaattggaaagcacagcagaaatg

SEQ ID NO: 50253 - DNA, 80 bp, synthetic construct
  source 1..80: mol_type = other DNA
ttccaaaacaatgtggtcaacattccagcaaaccaaatggcagtcttcaacgtggaaactgcaggtaacacatttcaaat

SEQ ID NO: 50254 - DNA, 80 bp, synthetic construct
  source 1..80: mol_type = other DNA
gctgttaatggaacggcgcaacgcgtcgattcactggtcaaggcagggttcacccctgttgatgctcgcagattggcggg

SEQ ID NO: 50255 - DNA, 80 bp, synthetic construct
  source 1..80: mol_type = other DNA
caagcagcaaatacctttcttggtgctatacacctgggcccacgcattaacccctacactgcacacctgagcgcgatgtt

SEQ ID NO: 50256 - DNA, 80 bp, synthetic construct
  source 1..80: mol_type = other DNA
tcctgccaccaggtgtcaacccagctgctgttcagaacccgggtgtcttcccccatgcgtttattgacgctcgcacaact

SEQ ID NO: 50257 - DNA, 80 bp, synthetic construct
  source 1..80: mol_type = other DNA
gaccccatactgatcaacttacctgacatccggcccattgattttcaccgtgtagacggggacgacgcgacagcgtctgt

SEQ ID NO: 50258 - DNA, 80 bp, synthetic construct
  source 1..80: mol_type = other DNA
ggggttatgggtcgcgcagcccttgatcaacccgtttcaaactggctccgtatccacatgttggcttagttttgaaacac

SEQ ID NO: 50259 - DNA, 80 bp, synthetic construct
  source 1..80: mol_type = other DNA
ggcctggccctgattttgatttttgtctcctcaaggcccctgagcaggaaatggacaatgggatatcacctgccaacctg

SEQ ID NO: 50260 - DNA, 80 bp, synthetic construct
  source 1..80: mol_type = other DNA
ttgccacgccgcctcgggcgttctcggggcaaccgcctcggtggtcgtgttgtggggctggttgtggtagctgcggccga

SEQ ID NO: 50261 - DNA, 80 bp, synthetic construct
  source 1..80: mol_type = other DNA
acaagtcaatcaccacttcggcgcaaactccaccacacttggttggtcaacgctgcctattgagccaattgccggggcag

SEQ ID NO: 50262 - DNA, 80 bp, synthetic construct
  source 1..80: mol_type = other DNA
tttcttggtacgatgacaacaatgaacataccaagatacggggccttttgagtgcacaaggaaagggcatcatcttccca

SEQ ID NO: 50263 - DNA, 80 bp, synthetic construct
  source 1..80: mol_type = other DNA
aacattgtcaaccactggacagatgtgtcattgtccgccaagacctcggggcagaccactatccccatagctgccgacaa

SEQ ID NO: 50264 - DNA, 80 bp, synthetic construct
  source 1..80: mol_type = other DNA
tactactcccatttgtgagtatgatggaaatatggtctcaggttacaaaaaagtgatggcaacaattgactctttccaat

SEQ ID NO: 50265 - DNA, 80 bp, synthetic construct
  source 1..80: mol_type = other DNA
accatataaatattttagtaacaaaggatattgatttcgataatcttggcgaaaacccctgtaaaattggcttgcagaca

SEQ ID NO: 50266 - DNA, 80 bp, synthetic construct
  source 1..80: mol_type = other DNA
aatggatactgtatattccaactctactcgagaagaagtatttttaacatccacattatgtttgtattatctaactgaaa

SEQ ID NO: 50267 - DNA, 80 bp, synthetic construct
  source 1..80: mol_type = other DNA
ctggaactttcctgggatctttatcgcttcatcccaacattaatccatacacatcccatctttcaggcatgtgggcaggg

SEQ ID NO: 50268 - DNA, 80 bp, synthetic construct
  source 1..80: mol_type = other DNA
aaccagagcaggctaagaagcaaatgaaattatttagaatctttgaaccaagacaattaccaatctaccgagcaaatggt

SEQ ID NO: 50269 - DNA, 80 bp, synthetic construct
  source 1..80: mol_type = other DNA
tcttgtgcttcaacattggtaggggctatggacacaggtagacacatgcccgccacaggggtttgtggtcccgctattgg

SEQ ID NO: 50270 - DNA, 80 bp, synthetic construct
  source 1..80: mol_type = other DNA
attccaagacaatggagacgtctttgagaacgagacacctgcagtgatgtttgccacattcaacccactgactggtggtg

SEQ ID NO: 50271 - DNA, 80 bp, synthetic construct
  source 1..80: mol_type = other DNA
acaataccaacccaatagcattgtatgactccatcaatccggcctctctggcagttatgtgcaccaaatcaaattctaat

SEQ ID NO: 50272 - DNA, 80 bp, synthetic construct
  source 1..80: mol_type = other DNA
tttgattcaagtgggtttgctaatgacaagaatgttgttgtccagatgtcctgggagatgtacaccaactcccaacaaat

SEQ ID NO: 50273 - DNA, 80 bp, synthetic construct
  source 1..80: mol_type = other DNA
gcctactcaaaccccctggacaaagaatggagaatggtgtgtcccctgagggcttgctacctcgacgattgggttacgcg

SEQ ID NO: 50274 - DNA, 80 bp, synthetic construct
  source 1..80: mol_type = other DNA
acaatagaaatgcctggctgtcaattggcgccaagaataagggcccacttttccccggtctaccaaaccacttcccagac

SEQ ID NO: 50275 - DNA, 80 bp, synthetic construct
  source 1..80: mol_type = other DNA
atggcttcgctcatatacagacagctgctcgctaattcttatgcagtgaatttgtctgatgagatacagtcagttggatc

SEQ ID NO: 50276 - DNA, 80 bp, synthetic construct
  source 1..80: mol_type = other DNA
tggtctacgtacgatcattggcagcgaatttgaatgacgtaatgtgttctggcgggcattatagctttgcgctacctgtt

SEQ ID NO: 50277 - DNA, 80 bp, synthetic construct
  source 1..80: mol_type = other DNA
ggacagtggccggtgatgaaaggaggggcggtaacgttacacacagcgggagtgacattatctacacaattcaccgactt

SEQ ID NO: 50278 - DNA, 80 bp, synthetic construct
  source 1..80: mol_type = other DNA
cgtgtcgttgaattcactaagatttaggtttagactggcggttgaggaaccatctttcacgataactagaacacgtgtgt

SEQ ID NO: 50279 - DNA, 80 bp, synthetic construct
  source 1..80: mol_type = other DNA
caaagctgtatggtctaccagcagcgaacccaaacggcggaaaagagtactatgaagtggctggaaggttttcgttcata

SEQ ID NO: 50280 - DNA, 80 bp, synthetic construct
  source 1..80: mol_type = other DNA
tcattggtgccatcaaatgatgattaccaaacgccaattatgaactcagtaacagtaaggcaagacttggaaaggcgttt

SEQ ID NO: 50281 - DNA, 80 bp, synthetic construct
  source 1..80: mol_type = other DNA
aaatgaattgagagaagaatttaataacttgtcacaagagatagccgtgtcacagttaattgacttagctatgttgccac

SEQ ID NO: 50282 - DNA, 80 bp, synthetic construct
  source 1..80: mol_type = other DNA
tagacatgttttcgatgttctcgggaattgagagtaccgtgaatgcagcaaaatcaatggctaccaatgtgatgaggaag

SEQ ID NO: 50283 - DNA, 80 bp, synthetic construct
  source 1..80: mol_type = other DNA
aagtgaatgattcgaccgtagtgcaacctgtgttggatggaccgtatcagccggcgccgtttgatctaccagtaggaaat

SEQ ID NO: 50284 - DNA, 80 bp, synthetic construct
  source 1..80: mol_type = other DNA
tttaagagttcaaaactcgcgtcatcagtgtcgatgttaacggactctttatccgatgcggcctcatctatcgcaagaag

SEQ ID NO: 50285 - DNA, 80 bp, synthetic construct
  source 1..80: mol_type = other DNA
tacatcagtacgatcaataggatcaacagcatcagcttgggctaatatttcagaacagacacaagacgctgttagtgaag

SEQ ID NO: 50286 - DNA, 80 bp, synthetic construct
  source 1..80: mol_type = other DNA
ttgcgacaatatcatcacaagtgtcacaaataagtggaagattaagattgaaagaaattacgactcaaacagaaggaatg

SEQ ID NO: 50287 - DNA, 80 bp, synthetic construct
  source 1..80: mol_type = other DNA
aatttcgatgacatatcagcggcggtactaaaagccaagatagatagatcaatacaggtcgaccagaatgcattaccaga

SEQ ID NO: 50288 - DNA, 80 bp, synthetic construct
  source 1..80: mol_type = other DNA
cgtcattacagaagcgtcagagaaattcattcgtaatagggcatatagagtgatagacggggatgaagcatttgaggcgg

SEQ ID NO: 50289 - DNA, 80 bp, synthetic construct
  source 1..80: mol_type = other DNA
gcactgacggaagatttttcgcgtacaaggtggaaacacttgaggaaatgccattcaatatggagaaattcgcagactta

SEQ ID NO: 50290 - DNA, 80 bp, synthetic construct
  source 1..80: mol_type = other DNA
tagactttaagacattaaaaaacctgaatgacaattatgggataaccagagagcaagcattcaatttgttacggtcagac

SEQ ID NO: 50291 - DNA, 80 bp, synthetic construct
  source 1..80: mol_type = other DNA
cccaaagttttgcgtggatttattgaccaaaacaatccaattattaaaaacaggatagaacaattgatcatgcaatgtag

SEQ ID NO: 50292 - DNA, 80 bp, synthetic construct
  source 1..80: mol_type = other DNA
tggatgttgctagcgccaacaagaccgggtgtagtagtggaagggacggacaattctggtagatggttatctgtaattct

SEQ ID NO: 50293 - DNA, 80 bp, synthetic construct
  source 1..80: mol_type = other DNA
aattgagccaggtgtcgcatcagagactagaacgtatatgatgtttggatcgagcaaacaggtagtagtgtcgaacgtgt

SEQ ID NO: 50294 - DNA, 80 bp, synthetic construct
  source 1..80: mol_type = other DNA
ctgacacgaaatggaaattcgtcgaaatggtgaagacggcagttgatggtgactatgcggaatggggaacattgctatcg

SEQ ID NO: 50295 - DNA, 80 bp, synthetic construct
  source 1..80: mol_type = other DNA
gacaccaagctctacgggatgatgaaatatggaaggaggctattcatttacgaaggagaaactccaaatgccacgaccaa

SEQ ID NO: 50296 - DNA, 80 bp, synthetic construct
  source 1..80: mol_type = other DNA
aggatactttataacgaattacgcatcggctgaggtaaggccatatagtgacttctatataatttctagatcgcaggagt

SEQ ID NO: 50297 - DNA, 80 bp, synthetic construct
  source 1..80: mol_type = other DNA
cagcatgcactgagtacataaacaacgggctgccgcctatccaaaacaccagaaatgtagtgcctgtggcaatatcgtcg

SEQ ID NO: 50298 - DNA, 80 bp, synthetic construct
  source 1..80: mol_type = other DNA
agatcaattaaaccaagagaagtgcaggctaatgaagatattgtagtttctaagacttcactatggaaagaaatgcaata

SEQ ID NO: 50299 - DNA, 80 bp, synthetic construct
  source 1..80: mol_type = other DNA
aggaaagaaccaacgcgttacagtgaatccaggaccatttgcgcagacggggtatgcaccagtgaattggtggcctggtg

SEQ ID NO: 50300 - DNA, 80 bp, synthetic construct
  source 1..80: mol_type = other DNA
taatagagatatcataattagatttaagttcgataactcgataataaaatccggaggtttgggctataagtgggctgaaa

SEQ ID NO: 50301 - DNA, 80 bp, synthetic construct
  source 1..80: mol_type = other DNA
tctcatttaaagctgcaaattatcaatacaattatatgagagatggagaagaggttacggcgcatacgacgtgctcagtt

SEQ ID NO: 50302 - DNA, 80 bp, synthetic construct
  source 1..80: mol_type = other DNA
aatggcgttaatgatttcagctttaacggaggcccattaccaacggatttcgcgatatcgagatatgaagtaataaaaga

SEQ ID NO: 50303 - DNA, 80 bp, synthetic construct
  source 1..80: mol_type = other DNA
aaagagtttataaataataataatccaataattagaaatagaattggaaatttaatatcgcagtgtcggttgtaactgtc

SEQ ID NO: 50304 - DNA, 80 bp, synthetic construct
  source 1..80: mol_type = other DNA
cgtaatttcattaaccaaaataatccaattataaggaatagaattgaacaactaattctacaatgtaagttgtgagaatg

SEQ ID NO: 50305 - DNA, 80 bp, synthetic construct
  source 1..80: mol_type = other DNA
caaatggaaattcttcgaaatgttcagaagtagtgttagtgccgaatttcaacacaagcgcaccttaacatcagacacta

SEQ ID NO: 50306 - DNA, 80 bp, synthetic construct
  source 1..80: mol_type = other DNA
aattagctggttttatgaaattttataatagtgtttggactttccatggtgaaacgccacatgctacaactgattactcg

SEQ ID NO: 50307 - DNA, 80 bp, synthetic construct
  source 1..80: mol_type = other DNA
tagtgaatatataaatactggattaccaccaatgcagaatacaaggaatatagttccagttgcgttatcgtctagatcgg

SEQ ID NO: 50308 - DNA, 80 bp, synthetic construct
  source 1..80: mol_type = other DNA
tgacttatcaacgtgctcaagttaatgaagatatcattgtatcaaagacatcgttgtggaaggaaatacagtataacaga

SEQ ID NO: 50309 - DNA, 80 bp, synthetic construct
  source 1..80: mol_type = other DNA
ttagatctaacatatcatccatatcagtgtggacgaatgtttccgaacaaatagcggactcgtcagactctgtcaggaat

SEQ ID NO: 50310 - DNA, 80 bp, synthetic construct
  source 1..80: mol_type = other DNA
atttccacgcaaacgtcagctattagtaaaagattgcgactacgcgaaattattacacaaactgaaggtatgaattttga

SEQ ID NO: 50311 - DNA, 80 bp, synthetic construct
  source 1..80: mol_type = other DNA
cccagagttttacgcgattttatcaaccagaataatccaattattaaaaatagaattgaacagctgatactgcagtgtaa

SEQ ID NO: 50312 - DNA, 80 bp, synthetic construct
  source 1..80: mol_type = other DNA
cgtaattttattaatcaaaataatccaatcataagaaatagaattgagcagttaattctgcaatgtaaattgtgagaatg

SEQ ID NO: 50313 - DNA, 80 bp, synthetic construct
  source 1..80: mol_type = other DNA
ctatcacaagaaatagcaatgacgcaattgatagatttagcattattgccattagatatgttttctatgttctcaggtat

SEQ ID NO: 50314 - DNA, 80 bp, synthetic construct
  source 1..80: mol_type = other DNA
tcagtttaaccgttgaagagccaccattttcaattttacgcacacgtgtatcaggattgtacggactaccagcattcgat

SEQ ID NO: 50315 - DNA, 80 bp, synthetic construct
  source 1..80: mol_type = other DNA
ccgaataacggacatgaatattatgaaataaatgggagattttctcttatttcattagtgccatctaatgacgattatca

SEQ ID NO: 50316 - DNA, 80 bp, synthetic construct
  source 1..80: mol_type = other DNA
aactccaatcatgaattcagttacagtgcgacaagatcttgaacgccaactaggtgatttaagggaggaattcaattctc

SEQ ID NO: 50317 - DNA, 80 bp, synthetic construct
  source 1..80: mol_type = other DNA
cagatccgatcccagagttttacgcgattttatcaaccagaataatccaattattaaaaatagaattgaacagctaatac

SEQ ID NO: 50318 - DNA, 80 bp, synthetic construct
  source 1..80: mol_type = other DNA
cgcgattttatcaaccagaataatccaattattaaaaatagaattgaacagctaatactgcaatgtagactgtgagagct

SEQ ID NO: 50319 - DNA, 80 bp, synthetic construct
  source 1..80: mol_type = other DNA
tatcatctagatcggtaacttatcaacgtgctcaggttaatgaagatatcattatatcaaagacgtcgttgtggaaggaa

SEQ ID NO: 50320 - DNA, 80 bp, synthetic construct
  source 1..80: mol_type = other DNA
tggtatatgtcagatcattagcagctaatttaaactcagtgaaatgtgcaggtggagggtatcactttagtttacctgta

SEQ ID NO: 50321 - DNA, 80 bp, synthetic construct
  source 1..80: mol_type = other DNA
gtctttgtcaatcctcgagcgattgtctgaggcgacaccaataacaacgtcagctgttgagttgctttcgtcgcccgcac

SEQ ID NO: 50322 - DNA, 80 bp, synthetic construct
  source 1..80: mol_type = other DNA
atggcttctttaatttatagacagttattatcaaactcatatgttacgaacatctctgacgaagttaatgaaattggaac

SEQ ID NO: 50323 - DNA, 80 bp, synthetic construct
  source 1..80: mol_type = other DNA
tggtatatgtaaggtcattagctgcaaatttgaatgatgtagtatgcagtggaggttcttacagttttgcattacctgta

SEQ ID NO: 50324 - DNA, 80 bp, synthetic construct
  source 1..80: mol_type = other DNA
ggcaatcatccggtgatgagtggtggcgcagtgaccttaacatctgctggtgtaacactatcaacccagtatacagatta

SEQ ID NO: 50325 - DNA, 80 bp, synthetic construct
  source 1..80: mol_type = other DNA
tcagattggcggtgagcgaaccgtcattttctatctcgcgaactagaatgagtggcatatacggattaccagctgtaaat

SEQ ID NO: 50326 - DNA, 80 bp, synthetic construct
  source 1..80: mol_type = other DNA
ccaaataataacgcagaatattatgagatagctggtagattctcactcatatcactaataccaacaaatgatgactatca

SEQ ID NO: 50327 - DNA, 80 bp, synthetic construct
  source 1..80: mol_type = other DNA
aacgccaatcgctaattcaattaccgtgagacaagatttagagagacaattaggtgagttaagagaagaattcaattcgt

SEQ ID NO: 50328 - DNA, 80 bp, synthetic construct
  source 1..80: mol_type = other DNA
tgtcacaagaaatagctgtttcccaacttatagacctagcaacactaccacttgatatgttctcaatgttctctggaata

SEQ ID NO: 50329 - DNA, 80 bp, synthetic construct
  source 1..80: mol_type = other DNA
aattgcctgattctacattagtgcaaccaactctcgatggtccatatcaacccacttcactcaacttaccagttgattat

SEQ ID NO: 50330 - DNA, 80 bp, synthetic construct
  source 1..80: mol_type = other DNA
aaatcaacggtagaggcggtaaaatctatgactacgaatgtgatgaaaagatttaaaacatcaagtttagcaaacgccat

SEQ ID NO: 50331 - DNA, 80 bp, synthetic construct
  source 1..80: mol_type = other DNA
atctgatttaacaagcaatatgtcggaagcggcatcatccgtaagattgacgtcagtgaggtcggttggcactgttacac

SEQ ID NO: 50332 - DNA, 80 bp, synthetic construct
  source 1..80: mol_type = other DNA
tgccaagagctagagtttcattgcaagtaagtgatgacttaaggtctatgcaggacgtatcaacacaagtgtcaaatgtg

SEQ ID NO: 50333 - DNA, 80 bp, synthetic construct
  source 1..80: mol_type = other DNA
agtagaaatttgagattgaaagagttcacgacgcaaactgacactttaagctttgatgacatttctgcagctgtattgaa

SEQ ID NO: 50334 - DNA, 80 bp, synthetic construct
  source 1..80: mol_type = other DNA
gacgaagctagacaaatcgacgcaaatttcacaacaaacaatgccggatattatagctgagtcatctgaaaagtttatac

SEQ ID NO: 50335 - DNA, 80 bp, synthetic construct
  source 1..80: mol_type = other DNA
cgaaaagatcgtacagaatagttgatgaggatatcgcattcgaaactggaattgacggaacgttttatgcttacaaagtc

SEQ ID NO: 50336 - DNA, 80 bp, synthetic construct
  source 1..80: mol_type = other DNA
gatacatttaatgaaattccgttcgatatggaacgatttaataaattaataacagactcaccagttttatcagcaataat

SEQ ID NO: 50337 - DNA, 80 bp, synthetic construct
  source 1..80: mol_type = other DNA
agactttaagacgttgaagaacttaaacgataattatggaataacaaagaaacaagccatggaactgttgcattcaaatc

SEQ ID NO: 50338 - DNA, 80 bp, synthetic construct
  source 1..80: mol_type = other DNA
caaagacattaaaagagtttataaataataataatccaataattagaaatagaattgagaatttgatatcgcagtgtaga

SEQ ID NO: 50339 - DNA, 80 bp, synthetic construct
  source 1..80: mol_type = other DNA
ttataaataataataatccaataattagaaatagaattgagaatttgatatcgcagtgtagattgtaactgtctattaga

SEQ ID NO: 50340 - DNA, 80 bp, synthetic construct
  source 1..80: mol_type = other DNA
tggatgctaattgcgcctactagagaagggaaagttgctgaaggtacgaatacgactgatagatggtttgcttgtgtgct

SEQ ID NO: 50341 - DNA, 80 bp, synthetic construct
  source 1..80: mol_type = other DNA
agttgaaccaaatgtgcaaaacacacaaagacaatacgtattagatgggcgaaatgtccaattacaggtctcaaacgatt

SEQ ID NO: 50342 - DNA, 80 bp, synthetic construct
  source 1..80: mol_type = other DNA
caagtacttcgtggaaatttatactattcattaaattgacgcctgacggaacgtacactcaatactcaaccttgtcaaca

SEQ ID NO: 50343 - DNA, 80 bp, synthetic construct
  source 1..80: mol_type = other DNA
ccgcataagttatgtgcgtggatgaaaagagacaacagagtgtactggtatcaaggagcgacgccgaacgcatcagaaag

SEQ ID NO: 50344 - DNA, 80 bp, synthetic construct
  source 1..80: mol_type = other DNA
ctattacttgactataaacaatgatgatagcaacgtttcaagtgacgctgaattttatttgataccgcaagcgcagactg

SEQ ID NO: 50345 - DNA, 80 bp, synthetic construct
  source 1..80: mol_type = other DNA
ctatgtgtacacaatatataaataatggtttaccaccgattcagaatacaaggaatattgtaccagtaaatattacatct

SEQ ID NO: 50346 - DNA, 80 bp, synthetic construct
  source 1..80: mol_type = other DNA
agacagattaaagatataagagctcagatgaatgaagacatagtaatatcgaaaacttcattatggaaagaaatgcaata

SEQ ID NO: 50347 - DNA, 80 bp, synthetic construct
  source 1..80: mol_type = other DNA
taaaaaaacaactaacgtcactgttaatccagggccgtttgcacaaacgggatatgcgcctgttgattggggacatggtg

SEQ ID NO: 50348 - DNA, 80 bp, synthetic construct
  source 1..80: mol_type = other DNA
tgacagcacacacaacatgttcagtgaatggtgtcaatgattttaattataatggaggtacgttgcctactgattttgca

SEQ ID NO: 50349 - DNA, 80 bp, synthetic construct
  source 1..80: mol_type = other DNA
aaaagaaagttcgttcgtgtatgttgattattgggacgattctcaggctttcagaaatatggtatatgtgagatcgctga

SEQ ID NO: 50350 - DNA, 80 bp, synthetic construct
  source 1..80: mol_type = other DNA
gtgcggaactaaatcaagtgcattgtgtaggaggtaattattcgttcgcattgcccgttggctcatggccagtgatgcaa

SEQ ID NO: 50351 - DNA, 80 bp, synthetic construct
  source 1..80: mol_type = other DNA
ggaggaagtgtgattttaacatttgatggtgtgacgttatcaacacaatttactgactatgtatcattgaattcgctaag

SEQ ID NO: 50352 - DNA, 80 bp, synthetic construct
  source 1..80: mol_type = other DNA
gttcagatttagatgtgcagtgaacgaacctccatttagggtcactggtacgaggatatcgaatttgtatggccttccag

SEQ ID NO: 50353 - DNA, 80 bp, synthetic construct
  source 1..80: mol_type = other DNA
ccgctaacccaatgggagaccaacaacattatgaggcatcaggtaggttttcattgatatctttagtgccaagtaatgat

SEQ ID NO: 50354 - DNA, 80 bp, synthetic construct
  source 1..80: mol_type = other DNA
caatgaactatcatctaatatagctttgtcacaactcatagatttagcattattaccacttgatatgttttcaatgttca

SEQ ID NO: 50355 - DNA, 80 bp, synthetic construct
  source 1..80: mol_type = other DNA
gatcaggagagatattaagtggaaatgttgaagaacaggctctagatggaccatatacaccagatagttcgaacttaccg

SEQ ID NO: 50356 - DNA, 80 bp, synthetic construct
  source 1..80: mol_type = other DNA
gtggtatacgaagtaccgttgaagcagcaaaaagcttcgcaacatcagtgatgaagaaatttagaaagtcgaatttggca

SEQ ID NO: 50357 - DNA, 80 bp, synthetic construct
  source 1..80: mol_type = other DNA
aaaagtgttaatagtttaactgatgccataactgatgccgctggttcaatttctaggtcatcgacactacgatcggtcag

SEQ ID NO: 50358 - DNA, 80 bp, synthetic construct
  source 1..80: mol_type = other DNA
tagcgcgacttcagtatggacggatataagtgacatagtggattcaacagacgatattgtggcagctacagcaacagccg

SEQ ID NO: 50359 - DNA, 80 bp, synthetic construct
  source 1..80: mol_type = other DNA
ctgcgaagaagtttagagttaaagagttcacaacggaatttagtggtgttagctttgatgatatatctgctgcggttgta

SEQ ID NO: 50360 - DNA, 80 bp, synthetic construct
  source 1..80: mol_type = other DNA
aaaacgaaaatgaacaaattgaatgccgtggatgaggaaatactaccacaaataataactgaggcgtcggagaagttcat

SEQ ID NO: 50361 - DNA, 80 bp, synthetic construct
  source 1..80: mol_type = other DNA
cagaaacattagaagaagtggtttttgatgcagagagatttactgaattagttactgattctccagtaatatcagcaatt

SEQ ID NO: 50362 - DNA, 80 bp, synthetic construct
  source 1..80: mol_type = other DNA
atagactttaaaacgataaagaatctgaatgataattatggtattacaagggagcaagcgttgaatatgttacgttcgga

SEQ ID NO: 50363 - DNA, 80 bp, synthetic construct
  source 1..80: mol_type = other DNA
ttattaaccaaaacaatcctataattaaaaacagaatagagcaactaatattgcagtgtaggatatagagctgtttgtat

SEQ ID NO: 50364 - DNA, 80 bp, synthetic construct
  source 1..80: mol_type = other DNA
tctaactattggtatttgatcaatccatcaaatgatggtgtggtgttttcagtaacgaataacagcacattctggatgtt

SEQ ID NO: 50365 - DNA, 80 bp, synthetic construct
  source 1..80: mol_type = other DNA
tacttatttaatcttaccaaatacagctcaaactaatgtcacagtaaatgtgatgaatgagacagtaaatatatcaatag

SEQ ID NO: 50366 - DNA, 80 bp, synthetic construct
  source 1..80: mol_type = other DNA
acaattcgggttcgacatataggtttgtggattactttaagactagttccacgcaatcgtataggcagaggaactatctg

SEQ ID NO: 50367 - DNA, 80 bp, synthetic construct
  source 1..80: mol_type = other DNA
attactgaacatagattacaagcttacagaagagatgaaagtggaaatatatcaaattattggggttcgtctacatatgg

SEQ ID NO: 50368 - DNA, 80 bp, synthetic construct
  source 1..80: mol_type = other DNA
tgacttgagagttggaacatattttaatcctgtactcaatgcagtgataaacctaaatgcagatttctacattataccag

SEQ ID NO: 50369 - DNA, 80 bp, synthetic construct
  source 1..80: mol_type = other DNA
attcgcaacaagagaaatgcacagaatacataaagggaggattgccggctatgcagaccacaacttatgtgacaccaatt

SEQ ID NO: 50370 - DNA, 80 bp, synthetic construct
  source 1..80: mol_type = other DNA
aattatgctattaggagtcaaagaattgcaagaccaaatgaagacataatcatatcgaaggcatcactgtggaaagaggt

SEQ ID NO: 50371 - DNA, 80 bp, synthetic construct
  source 1..80: mol_type = other DNA
cgatcatgggagataaattgggtacagtttataatgaagacgaccgtattgctgcaaaagccaataatttaccaaattat

SEQ ID NO: 50372 - DNA, 80 bp, synthetic construct
  source 1..80: mol_type = other DNA
atctaatttcgttcagatttaagcagaaaaactttttctcagatcagaaattttcacattttggcatacgtcaaccatct

SEQ ID NO: 50373 - DNA, 80 bp, synthetic construct
  source 1..80: mol_type = other DNA
aacaaaacaatttcgagggattttctggacatttaattgctgttgagaagtactttcatgcattagtatacacgatgtca

SEQ ID NO: 50374 - DNA, 80 bp, synthetic construct
  source 1..80: mol_type = other DNA
gaattacattggacctgaatttgaatcattcaaagagatcataaatcttcttacagatagaaattacacagggaaatttg

SEQ ID NO: 50375 - DNA, 80 bp, synthetic construct
  source 1..80: mol_type = other DNA
cgatcatggggaataagttgggtacaacctacaatgaagacgaccgtattgctgtaaaaaccaataatttaccaaattat

SEQ ID NO: 50376 - DNA, 80 bp, synthetic construct
  source 1..80: mol_type = other DNA
tccattttagagagattcatggaaagcagtccattagtgtcctgtgcaatagagtcactttcctcaccagcaattggcta

SEQ ID NO: 50377 - DNA, 80 bp, synthetic construct
  source 1..80: mol_type = other DNA
gaaccacatgatatactttgcagcgggtgtgctcaaagcttacgaagaccatcacgtcccatacaccggcaatgtgtttc

SEQ ID NO: 50378 - DNA, 80 bp, synthetic construct
  source 1..80: mol_type = other DNA
tctcaatgacattaaatttgtaactaaaggaggtctcccatcaggaatgcctttcacctcagtcatcaattcggtgaacc

SEQ ID NO: 50379 - DNA, 80 bp, synthetic construct
  source 1..80: mol_type = other DNA
atggcttcgctcatttatagacagttacttactaattcttatacagtagacttatctgacgaaattgaaagtattggatc

SEQ ID NO: 50380 - DNA, 80 bp, synthetic construct
  source 1..80: mol_type = other DNA
atatcacgatatgaagtaataaaagagaattcctatgtttacgtagactattgggatgactcgcaagcatttagaaacat

SEQ ID NO: 50381 - DNA, 80 bp, synthetic construct
  source 1..80: mol_type = other DNA
ggtttatgtgagatcattagccgcagatttaaatgacgtattatgcactggtggtgactacagtttcgcattaccagtcg

SEQ ID NO: 50382 - DNA, 80 bp, synthetic construct
  source 1..80: mol_type = other DNA
ggcagtggccggtgatgacgggtggtgctgtttcattacattcagctggagttacattatcaacgcagtttactgacttt

SEQ ID NO: 50383 - DNA, 80 bp, synthetic construct
  source 1..80: mol_type = other DNA
gcttcgcttaactcacttagattcagatttaggttatcagttgaagaaccacatttctctattactagaactcgtgtaac

SEQ ID NO: 50384 - DNA, 80 bp, synthetic construct
  source 1..80: mol_type = other DNA
tggattgtacggactaccagctgcaaatccaaataataataacgagtattatgaggtcgctggaaggttttcattgatat

SEQ ID NO: 50385 - DNA, 80 bp, synthetic construct
  source 1..80: mol_type = other DNA
cgttagtaccatccaacgacgactatcagacgccgattgcgaactccgtcacagttcgacaagatttagaaagacagtta

SEQ ID NO: 50386 - DNA, 80 bp, synthetic construct
  source 1..80: mol_type = other DNA
ggaccaggagaggtaaatgactccactactgttgaaccaacattagatggtccctatcgaccaacaagctttaatccacc

SEQ ID NO: 50387 - DNA, 80 bp, synthetic construct
  source 1..80: mol_type = other DNA
ctacatccgtttctaccttaactgactcactgtcagatgcagcatcctcaatttctaggggttcgtcaattagatctata

SEQ ID NO: 50388 - DNA, 80 bp, synthetic construct
  source 1..80: mol_type = other DNA
ggatcatcagcttcggcttggactgatgtatcaacacagttgattgatgtttcaagtaccgtgaatactatatcgacaca

SEQ ID NO: 50389 - DNA, 80 bp, synthetic construct
  source 1..80: mol_type = other DNA
aacttctactattagcagacgtctgagactaaaagaaatcgctacacaaactgaaggtatgaattttgatgacatttccg

SEQ ID NO: 50390 - DNA, 80 bp, synthetic construct
  source 1..80: mol_type = other DNA
ctgccgttctaaaaactaaaattgataggtcaacacaaatagcaccagctacgttacccgatattgttactgaagcatct

SEQ ID NO: 50391 - DNA, 80 bp, synthetic construct
  source 1..80: mol_type = other DNA
gaaaaatttattcctaacagagcatatagagtaatggataataatgaagtattggaggctagtactgatggtagattttt

SEQ ID NO: 50392 - DNA, 80 bp, synthetic construct
  source 1..80: mol_type = other DNA
cgcttatagagtagagacatttgaagaaataccatttgatgtacaaaagtttgctgacttagtaactgattcaccagtga

SEQ ID NO: 50393 - DNA, 80 bp, synthetic construct
  source 1..80: mol_type = other DNA
ttgatttcaaaacattaaagaatctgaatgataattatggaatatctagggagcaggcgtttaatcttctacgttctgat

SEQ ID NO: 50394 - DNA, 80 bp, synthetic construct
  source 1..80: mol_type = other DNA
cctaggatgctacgagagttcattaaccaagacaatccaataattagaaataggattgaacaattgatactgcaatgtag

SEQ ID NO: 50395 - DNA, 80 bp, synthetic construct
  source 1..80: mol_type = other DNA
agttaattattggatgcttttagccccattaaatgctggagtaattgttgaagggactaacaataccaatcgttggctag

SEQ ID NO: 50396 - DNA, 80 bp, synthetic construct
  source 1..80: mol_type = other DNA
ctaccattttagtagaaccaggagtagcgtcgacaacgaggacatatacattatttggaatacaagaacagattactgta

SEQ ID NO: 50397 - DNA, 80 bp, synthetic construct
  source 1..80: mol_type = other DNA
gaaaatagttcaaatacgaaatggaagttcatagatttgatgaaaaccacatcatcaggaacatatactcaacactctcc

SEQ ID NO: 50398 - DNA, 80 bp, synthetic construct
  source 1..80: mol_type = other DNA
actattatcagagccaaaactctatggtataatgaagcacggtggtcagctctggacttataatggagagactccaaatg

SEQ ID NO: 50399 - DNA, 80 bp, synthetic construct
  source 1..80: mol_type = other DNA
caatcacgaatggttatccgactactaactatgattcagttaatatgacttcattctgtaatttttatatcatacctaga

SEQ ID NO: 50400 - DNA, 80 bp, synthetic construct
  source 1..80: mol_type = other DNA
agtttcaatttcctcacgcagcattatacatcaaagagcacaggctaacgaagatatcatagtgtcgaaaacttcgcttt

SEQ ID NO: 50401 - DNA, 80 bp, synthetic construct
  source 1..80: mol_type = other DNA
ggaaagaaatgaagtacaatagagatattacaatcagatttaagtttgctaatgcaataattaaatcaggtggattgggg

SEQ ID NO: 50402 - DNA, 80 bp, synthetic construct
  source 1..80: mol_type = other DNA
tgactgcacatacaacatgttccgtaaacggagtgaatgattttagttttaatggtgggtcactaccaactgactttgtc

SEQ ID NO: 50403 - DNA, 80 bp, synthetic construct
  source 1..80: mol_type = other DNA
ggcttttataatgcgttcgctaatatacagacagctactttataactcatattcagtagatttatcagatgaaataacta

SEQ ID NO: 50404 - DNA, 80 bp, synthetic construct
  source 1..80: mol_type = other DNA
tgaaagaaagttcgttcgtatacgttgattattgggacgattcacaggcttttagaaatatggtatatgtgcggtcgctg

SEQ ID NO: 50405 - DNA, 80 bp, synthetic construct
  source 1..80: mol_type = other DNA
aatgcagaattaaatcaagtgcaatgtgtaggaggtcattactcgttcgcgttgcctgttggctcatggccggtgatgca

SEQ ID NO: 50406 - DNA, 80 bp, synthetic construct
  source 1..80: mol_type = other DNA
aggagggagtgtggttctaacatttgatggtgtaacgttatcaacacagtttactgactatgtgtcgttgaactcattaa

SEQ ID NO: 50407 - DNA, 80 bp, synthetic construct
  source 1..80: mol_type = other DNA
ggttcagattcagatgtgcggtgagtgaacctccgttcagggttaccggtacgagaatatcaaatttgtatggcctgcca

SEQ ID NO: 50408 - DNA, 80 bp, synthetic construct
  source 1..80: mol_type = other DNA
gccgctaacccaatgggagaccaacaatattatgaagcatcaggtaggttctcgttgatttcgttagtgcctagtaatga

SEQ ID NO: 50409 - DNA, 80 bp, synthetic construct
  source 1..80: mol_type = other DNA
tgactatcaaactccaattgcaaattcagtcactgtaagacaggatctagagagacagctagatgaaatgaggagagaat

SEQ ID NO: 50410 - DNA, 80 bp, synthetic construct
  source 1..80: mol_type = other DNA
tcaatgaactatcagctaatatagctttgtcacagttaatagatttagcactattgccacttgatatgttctcaatgttc

SEQ ID NO: 50411 - DNA, 80 bp, synthetic construct
  source 1..80: mol_type = other DNA
ggatcaggagagacgttaagcggaaatgttgaagagcaacctttagacgggccatatacaccagataagtcaaatttgcc

SEQ ID NO: 50412 - DNA, 80 bp, synthetic construct
  source 1..80: mol_type = other DNA
agcggaatacgaagtaccattgaagcagcaaaaaacttcgcgacgtcggtgatgaagaagtttagaaagtcaaatttggc

SEQ ID NO: 50413 - DNA, 80 bp, synthetic construct
  source 1..80: mol_type = other DNA
gaaaagtgttaatagtttgactgatgcaataacggatgccgctggctcaatttctaggtcgtcaacactgcgatcagcta

SEQ ID NO: 50414 - DNA, 80 bp, synthetic construct
  source 1..80: mol_type = other DNA
acagcgctgtttcagtatggacggatataagtgatatagtagattcaacggataatgtcgtaacagccacggcaacagcc

SEQ ID NO: 50415 - DNA, 80 bp, synthetic construct
  source 1..80: mol_type = other DNA
gctgcgaagaaattcagagtcaaagaatttacgacagagtttaatggcgttagttttgatgacatatctgctgctgttgt

SEQ ID NO: 50416 - DNA, 80 bp, synthetic construct
  source 1..80: mol_type = other DNA
aaaaacaaaaatgaataagttgaatgttgtggatgaggaaatgctaccacaaattataactgaagcgtcggagaaattta

SEQ ID NO: 50417 - DNA, 80 bp, synthetic construct
  source 1..80: mol_type = other DNA
taccgaaccgtgcatatagattaatagatggagataaagtatacgaggttacaacggaagggaagtattttgcttatttg

SEQ ID NO: 50418 - DNA, 80 bp, synthetic construct
  source 1..80: mol_type = other DNA
acagaaacattcgaagaggtaatgttcgatgcagagagatttgctgagttagttacttattcgcccgtaatatcagcaat

SEQ ID NO: 50419 - DNA, 80 bp, synthetic construct
  source 1..80: mol_type = other DNA
tatagactttaaaacaataaagaatcttaatgataattatggtattacgagggaacaagcattaaacatgttacgttcag

SEQ ID NO: 50420 - DNA, 80 bp, synthetic construct
  source 1..80: mol_type = other DNA
atccgaaagtattgagaagctttattaatcaaaacaatcctataattaaaaacagaatagagcaactaatattacagtgt

SEQ ID NO: 50421 - DNA, 80 bp, synthetic construct
  source 1..80: mol_type = other DNA
acaatcctataattaaaaacagaatagagcaactaatattacagtgtagaatatagagctgtttgtatgaggatgtgacc

SEQ ID NO: 50422 - DNA, 80 bp, synthetic construct
  source 1..80: mol_type = other DNA
gtctaactattggtatttaatcaatccatcaaatgatggcgtggtgttctcggtaacggataacagtacgctttggatgt

SEQ ID NO: 50423 - DNA, 80 bp, synthetic construct
  source 1..80: mol_type = other DNA
ttacttatttagtcttaccaaatacagctcagactagtgtcgtagtaaatgtaatgaatgagacagtgaatatatcaata

SEQ ID NO: 50424 - DNA, 80 bp, synthetic construct
  source 1..80: mol_type = other DNA
gacaactcaggttcggcatataaatttgtggattactttaagactagttccgcacaagcgtataggtcaaggaactttct

SEQ ID NO: 50425 - DNA, 80 bp, synthetic construct
  source 1..80: mol_type = other DNA
gattactgcacacagattgcaagcttacaagagagatggagatggaaatatatcaaattattggggttcggatgcatacg

SEQ ID NO: 50426 - DNA, 80 bp, synthetic construct
  source 1..80: mol_type = other DNA
gtgatctgagagttggaacatattttaatccagtgccaaatgcagtgattaatctaaatgcagatttttacgttatacca

SEQ ID NO: 50427 - DNA, 80 bp, synthetic construct
  source 1..80: mol_type = other DNA
gattcgcaacaagagatgtgtacagagtatataaggagaggattgccagccatacaaactacaacttatgtgacaccaat

SEQ ID NO: 50428 - DNA, 80 bp, synthetic construct
  source 1..80: mol_type = other DNA
cagttatgctgttagaagtcaaagaattgcgagaccgaatgaagacataaccatatcaaaagcatcactatggaaagagg

SEQ ID NO: 50429 - DNA, 80 bp, synthetic construct
  source 1..80: mol_type = other DNA
atataggtgcagaaaagaaagagaatgtgactgtacagattggtgagttcgctcaaagtcaatacgcaccagtttcgtgg

SEQ ID NO: 50430 - DNA, 80 bp, synthetic construct
  source 1..80: mol_type = other DNA
ttcaatataatagagacattgtgataagatttgtgtttgcaaataatataatcaaagcaggtggacttggttataaatgg

SEQ ID NO: 50431 - DNA, 80 bp, synthetic construct
  source 1..80: mol_type = other DNA
tcagagatatcatataaggctaataattatcaatatacatatatgagggatggcatagaagttgttgctcatactactgt

SEQ ID NO: 50432 - DNA, 80 bp, synthetic construct
  source 1..80: mol_type = other DNA
ttcagtgaacggtgttagtgtgtatgattataacactgggtcgttaccaactgatttcacgatccgaaattacgacgttt

SEQ ID NO: 50433 - DNA, 80 bp, synthetic construct
  source 1..80: mol_type = other DNA
gaccgatgttgctctctccagcaaaacctcaggcaggtccacagtgccaaccgatcaggccaacctcaaccagtgtcctg

SEQ ID NO: 50434 - DNA, 80 bp, synthetic construct
  source 1..80: mol_type = other DNA
acgcagattgagacacccaatggtgctgctcaaagagtggagatggctgcggcaacgggagccattagcaataatgtccc

SEQ ID NO: 50435 - DNA, 80 bp, synthetic construct
  source 1..80: mol_type = other DNA
gcagccgggtctctcgtagacatggccggcactgtgtcatccattgtggcacaacaccgccagatagatttgatggcgca

SEQ ID NO: 50436 - DNA, 80 bp, synthetic construct
  source 1..80: mol_type = other DNA
cagttaacggcactgcccagcgggtggagtcgctggtgggtgcaggtttcactcctgttgatgctcgacggctggccggg

SEQ ID NO: 50437 - DNA, 80 bp, synthetic construct
  source 1..80: mol_type = other DNA
agctcagaaacagtccagtatggcctgctagaccgcccaattctacaacgggatgttctggcaggcattagtgaaactca

SEQ ID NO: 50438 - DNA, 80 bp, synthetic construct
  source 1..80: mol_type = other DNA
ccatctccagtccatgcaagcttctttgagtgcattcaagaaagggtccagttatggtgctccacctgcccctgttgggt

SEQ ID NO: 50439 - DNA, 80 bp, synthetic construct
  source 1..80: mol_type = other DNA
ttgctaacccaaactttcagccggccccccccaaggttaatttagggttcaggcctccatcaaccaatgtttagtgtgtt

SEQ ID NO: 50440 - DNA, 80 bp, synthetic construct
  source 1..80: mol_type = other DNA
gatcatccctccttttcttttaatcagctattattttcttttctttccaagtggttcctcacgcgttcgggtggacaatt

SEQ ID NO: 50441 - DNA, 80 bp, synthetic construct
  source 1..80: mol_type = other DNA
attttcttttctttccaagtggttcctcacgcgttcgggtggacaattgtgattaagcgatcacagccacatcttctagg

SEQ ID NO: 50442 - DNA, 80 bp, synthetic construct
  source 1..80: mol_type = other DNA
catgtgcgtgagggagtgctttgctagtgtaaccacgctcccctggacaacgcgccaagcgtccaacaccttccttggcg

SEQ ID NO: 50443 - DNA, 80 bp, synthetic construct
  source 1..80: mol_type = other DNA
ccattcatcttggtccacgcattaatccctacaccgcacatctgagtgccatgtttgctggctggggtgggagtttccag

SEQ ID NO: 50444 - DNA, 80 bp, synthetic construct
  source 1..80: mol_type = other DNA
atacgagtcaccctttctggttctggcctgtacgcaggccgagcggtggtagctgtactacccccgggtgttaacccagc

SEQ ID NO: 50445 - DNA, 80 bp, synthetic construct
  source 1..80: mol_type = other DNA
caatgtccaaaaccccggagttttcccacacgcattcattgatgcccgaactgtagatcccatcctcatcaatctccctg

SEQ ID NO: 50446 - DNA, 80 bp, synthetic construct
  source 1..80: mol_type = other DNA
acattcgcgcggtggattaccatcgtgtggacggcgatgagcaaactgcaaccgttgggctctgggtcgctcaaccgctc

SEQ ID NO: 50447 - DNA, 80 bp, synthetic construct
  source 1..80: mol_type = other DNA
atcaacccatttcagactggatccatctccacgtgttggttgacatttgagactagacctgggcctgattttgacttttg

SEQ ID NO: 50448 - DNA, 80 bp, synthetic construct
  source 1..80: mol_type = other DNA
ccagggccaattccaatgaaaacgtgcccctcgcatcaccacaagacacaattgggccaagcgcggcacttcttctgccc

SEQ ID NO: 50449 - DNA, 80 bp, synthetic construct
  source 1..80: mol_type = other DNA
gcctgatgctacaataaaccgcaacgtttacattactccaacctggattaatggtgacccctcccgaccaattcacggca

SEQ ID NO: 50450 - DNA, 80 bp, synthetic construct
  source 1..80: mol_type = other DNA
gcggtctcgaggcaataggcttggtggccgagtgggtggtctcgtagtggtggccgttgcggaacaagtcaaccatcact

SEQ ID NO: 50451 - DNA, 80 bp, synthetic construct
  source 1..80: mol_type = other DNA
gagttaacactgatagctcacataacgcaaatttaaacgatatatcgattgtaatacattcaggattttatattattcca

SEQ ID NO: 50452 - DNA, 80 bp, synthetic construct
  source 1..80: mol_type = other DNA
aggtctcaagaatgtaagtgtaatgaatatattaacaatggtttgccaccaattccaaatactagaaatgtagtaccatt

SEQ ID NO: 50453 - DNA, 80 bp, synthetic construct
  source 1..80: mol_type = other DNA
gcacaagttaatgaagacattacaatttcaaagacctcattatggaaagaatgcaccataataagggacattataattag

SEQ ID NO: 50454 - DNA, 80 bp, synthetic construct
  source 1..80: mol_type = other DNA
atgcaccataataagggacattataattagatttaaatttggtaatagtattgtaaaactggggggactaggttataaat

SEQ ID NO: 50455 - DNA, 80 bp, synthetic construct
  source 1..80: mol_type = other DNA
tggtatatgtaagatcattagcagctaatttgaactcagttaaatgtacaggtggaagttacaactttagtctacctgta

SEQ ID NO: 50456 - DNA, 80 bp, synthetic construct
  source 1..80: mol_type = other DNA
ggctataaaatggcttcgctcatttatagacagttattatcaaactcatatgttacgaacatctctgacgaaattaacga

SEQ ID NO: 50457 - DNA, 80 bp, synthetic construct
  source 1..80: mol_type = other DNA
tgtatcattaaattcattgcgattcagattcagattggcggtgagcgaaccatcattttctatctcgcgaactagaatga

SEQ ID NO: 50458 - DNA, 80 bp, synthetic construct
  source 1..80: mol_type = other DNA
gtggcatatacggattaccagctgtaaatccaaataataacgcagaatattatgagatagctggtagattctcactcata

SEQ ID NO: 50459 - DNA, 80 bp, synthetic construct
  source 1..80: mol_type = other DNA
tcactagtaccaacaaatgatgactatcacacgccaatcgctaattcagttactgtgagacaagatttagagagacaatt

SEQ ID NO: 50460 - DNA, 80 bp, synthetic construct
  source 1..80: mol_type = other DNA
aggtgagttaagcgaagaattcaattcgttgtcacaagaaatagatgtgtcccaacttatagacctagcaacactaccgc

SEQ ID NO: 50461 - DNA, 80 bp, synthetic construct
  source 1..80: mol_type = other DNA
ttgatatgttctcaatgttctctggaataaaatcaacggtagaggcagtaaaatctatgactacgaatgtgatgaaaaga

SEQ ID NO: 50462 - DNA, 80 bp, synthetic construct
  source 1..80: mol_type = other DNA
gacatggtgaattacctgattctacattagtgcaaccaactctcgatggtccatatcaacccacttcactcaacttacca

SEQ ID NO: 50463 - DNA, 80 bp, synthetic construct
  source 1..80: mol_type = other DNA
tttaaaacatcaagtttagcaaacgccatatctgatttaacaagccatatgtctgaagcggcatcttctgtaagattgac

SEQ ID NO: 50464 - DNA, 80 bp, synthetic construct
  source 1..80: mol_type = other DNA
gtcagtgagatcggttggcactgttacactgccaagagctagagtttcattgcaagtaagtggtgacttaaggtctatgc

SEQ ID NO: 50465 - DNA, 80 bp, synthetic construct
  source 1..80: mol_type = other DNA
aggacgtatcaacacaagtgtcaaatgtgagtagaaatttgagattgaaagagttcacgacgcaaactgatactttaagc

SEQ ID NO: 50466 - DNA, 80 bp, synthetic construct
  source 1..80: mol_type = other DNA
tttgatgacatctctgcagctgtattgaagacgaaactggacaaatcgacgcaaatttcacaacaaacaatgccagatat

SEQ ID NO: 50467 - DNA, 80 bp, synthetic construct
  source 1..80: mol_type = other DNA
tatagctgagtcatctgaaaagtttataccgaaaagttcgtacggaatagttgatggggataccgcattcgaaactggaa

SEQ ID NO: 50468 - DNA, 80 bp, synthetic construct
  source 1..80: mol_type = other DNA
ttgacggaacgttttatgcttacaaagtcgatacatttaatgaaattccgtttgatatggaacgatttaataaattaata

SEQ ID NO: 50469 - DNA, 80 bp, synthetic construct
  source 1..80: mol_type = other DNA
acagactcaccagttttatcagcaataatagactttaagacgttaaagaatttaaacgataattatggaataacaaagaa

SEQ ID NO: 50470 - DNA, 80 bp, synthetic construct
  source 1..80: mol_type = other DNA
acaagccatggagctgctacattcaaatcccaagacattaaaagagtttataaataataataatcccataattagaaata

SEQ ID NO: 50471 - DNA, 80 bp, synthetic construct
  source 1..80: mol_type = other DNA
taataatcccataattagaaatagaagggcaaatttaatatcgcagtgtaggttgtaactgtctattttaagatgtgacc

SEQ ID NO: 50472 - DNA, 80 bp, synthetic construct
  source 1..80: mol_type = other DNA
gttgattattggatgttaattgcgcctactaaagaaggaaaagttgctgaaggtacgaatacaactgacagatggtttgc

SEQ ID NO: 50473 - DNA, 80 bp, synthetic construct
  source 1..80: mol_type = other DNA
ttgtgtgctagttgaaccaaatgtgcaaaacatacaaagacaatacgtattagatgggcaaaatgtccaattacaggtct

SEQ ID NO: 50474 - DNA, 80 bp, synthetic construct
  source 1..80: mol_type = other DNA
caaatgattcaagtacttcgtggaaatttatattattcattaaattgacgcctgacggaacgtacactcaatactcaacc

SEQ ID NO: 50475 - DNA, 80 bp, synthetic construct
  source 1..80: mol_type = other DNA
ttgtcaacaccgcataagttatgcgcgtggatgaaaagagacaacagagtgtactggtatcaaggagcgacgccgaacgc

SEQ ID NO: 50476 - DNA, 80 bp, synthetic construct
  source 1..80: mol_type = other DNA
atcagcgagctattacttgactataaacaatgataacagcagtgtttcaagcgacgctgaattttatttgatgccgcaat

SEQ ID NO: 50477 - DNA, 80 bp, synthetic construct
  source 1..80: mol_type = other DNA
cgcagactgctatgtgtacacaatatataaataatggtttaccaccaattcagaatacaaggaatattgtaccagtaaat

SEQ ID NO: 50478 - DNA, 80 bp, synthetic construct
  source 1..80: mol_type = other DNA
attacatctagacagattaaagacataagagctcagatgaatgaagacatagtaatatcgaaaacttcattatggaaaga

SEQ ID NO: 50479 - DNA, 80 bp, synthetic construct
  source 1..80: mol_type = other DNA
aattggaactaaaaaaacaactaacgttactgttaatccagggccgttcgcacaaacgggatatgtgcctgttgattggg

SEQ ID NO: 50480 - DNA, 80 bp, synthetic construct
  source 1..80: mol_type = other DNA
taattcgttgtcacaagaaatagctgtttcccaacttatagatctagcaacattaccgcttgatatgttctcaatgttct

SEQ ID NO: 50481 - DNA, 80 bp, synthetic construct
  source 1..80: mol_type = other DNA
ctggaataaaatcaacggtagaggcagtaaaatctatgactacgaatgtgatgaaaagatttaaaacatcaagtttagca

SEQ ID NO: 50482 - DNA, 80 bp, synthetic construct
  source 1..80: mol_type = other DNA
aacgccatatctgatttaacaagtaatatgtcggaagcggcatcatctgtaagattgacgtcagtgagatcggtgggcac

SEQ ID NO: 50483 - DNA, 80 bp, synthetic construct
  source 1..80: mol_type = other DNA
tattacattgccaagagctagggtttcattgcaagtgggcgatgacttgaggtccatgcaagacgtatcaacacaagtgt

SEQ ID NO: 50484 - DNA, 80 bp, synthetic construct
  source 1..80: mol_type = other DNA
caaatgtgagtagaaatttaagattgaaagagttcacgacgcaaactgatactttaagctttgatgacatctctgcagct

SEQ ID NO: 50485 - DNA, 80 bp, synthetic construct
  source 1..80: mol_type = other DNA
gtattgaagacgaaactagataaatcgacgcaaatttcacaacaaacaatgccagatattatagctgagtcatctgagaa

SEQ ID NO: 50486 - DNA, 80 bp, synthetic construct
  source 1..80: mol_type = other DNA
gtttataccgaagagatcgtatagaatagttgatgaggatattcgattcgaaactggaattgacggaacgttttatgctt

SEQ ID NO: 50487 - DNA, 80 bp, synthetic construct
  source 1..80: mol_type = other DNA
acaaagtcgatacatttaatgaaattccgtttgatatggaacgatttaataaattaataacagattcaccagttttatca

SEQ ID NO: 50488 - DNA, 80 bp, synthetic construct
  source 1..80: mol_type = other DNA
gcaataatagactttaagacgttaaagaacttaaacgacaattatggaataacaaagaaacaagccatggaactattaca

SEQ ID NO: 50489 - DNA, 80 bp, synthetic construct
  source 1..80: mol_type = other DNA
ttcaaatccaaagacattaaaagagtttataaataataataatccaataattagaaatagaatcgaaaacttaatatcgc

SEQ ID NO: 50490 - DNA, 80 bp, synthetic construct
  source 1..80: mol_type = other DNA
ctgttacactgccaagagctagagtttcattgcaagtaagtgatgacttaatgtccatgcaggacgtatcaacacaggtg

SEQ ID NO: 50491 - DNA, 80 bp, synthetic construct
  source 1..80: mol_type = other DNA
tacaagattgatacattcaatgaaattccatttgatatagaacgatttaataaattaataacagactcaccagttttatc

SEQ ID NO: 50492 - DNA, 80 bp, synthetic construct
  source 1..80: mol_type = other DNA
catataaagttggcacttttgaagaagtaccatttgacgtagataaatttgttgatctggtaaccgattctcctgtaatt

SEQ ID NO: 50493 - DNA, 80 bp, synthetic construct
  source 1..80: mol_type = other DNA
tcagaaatttcgtttaaagcggctaattatcagtacagttacttgcgagatggagagcaagttacggcacacactacttg

SEQ ID NO: 50494 - DNA, 80 bp, synthetic construct
  source 1..80: mol_type = other DNA
atcaggattagctacatcaatctctgaattgactggatcattatcaaacgctgcttcatcagtttccagaagttcatcta

SEQ ID NO: 50495 - DNA, 80 bp, synthetic construct
  source 1..80: mol_type = other DNA
ttatggcacatactacttgttcagtcaacggtgtgaataacttcagttataatggaggatcactgccaactgattttagt

SEQ ID NO: 50496 - DNA, 80 bp, synthetic construct
  source 1..80: mol_type = other DNA
tgagatcattggcagcgaacctaaattcagtgagatgtagtggaggtaattatgactttaagataccagttggcgcatgg

SEQ ID NO: 50497 - DNA, 80 bp, synthetic construct
  source 1..80: mol_type = other DNA
ccagtaatgaatgggggcgcagtgtcattgcattttgcaggggttacgctatctactcaatttactgatttcgtgtcgct

SEQ ID NO: 50498 - DNA, 80 bp, synthetic construct
  source 1..80: mol_type = other DNA
caattcattaagattcagattcagtttaactgttgaagaaccacctttttcaattttgcgtacacgtgtatcaggattat

SEQ ID NO: 50499 - DNA, 80 bp, synthetic construct
  source 1..80: mol_type = other DNA
atgggttaccagcggctagtccaaatagtggacatgaatattacgagatagctgggaggttctctcttatttcattagta

SEQ ID NO: 50500 - DNA, 80 bp, synthetic construct
  source 1..80: mol_type = other DNA
aaaccccaattatgaattcggttacagttcgacaggaccttgagcgtcaattaggcgatttaagagaagaatttaattct

SEQ ID NO: 50501 - DNA, 80 bp, synthetic construct
  source 1..80: mol_type = other DNA
aaagcacaattgatgtggctaaatcaatggcgacgaacgtgatgaaaagattcaagagatcgggattggctacgtcagtc

SEQ ID NO: 50502 - DNA, 80 bp, synthetic construct
  source 1..80: mol_type = other DNA
tctgagttgactggatcattatcaagtgctgcttcatcgatttctagaggctcatctattagatctggcatatcatccat

SEQ ID NO: 50503 - DNA, 80 bp, synthetic construct
  source 1..80: mol_type = other DNA
ttcagtatggacggatgtctctgaacaaatagcggattcatcaaattccatcaggaatatttctacgcaaacatcagcta

SEQ ID NO: 50504 - DNA, 80 bp, synthetic construct
  source 1..80: mol_type = other DNA
ttagtaaaagattacggttgcgtgaaattaccacgcaaactgaaggtatgaattttgatgatatctcagcagcagttctt

SEQ ID NO: 50505 - DNA, 80 bp, synthetic construct
  source 1..80: mol_type = other DNA
aagactaagatagataaatcaacgcatataagccctgatacactgcctgacataataactgaatcatctgaaaaatttat

SEQ ID NO: 50506 - DNA, 80 bp, synthetic construct
  source 1..80: mol_type = other DNA
accgaaacgagcttacagagtccttaaagatgatgaagtaatggaagctgatgtggatgggaaatttttcgcatataaag

SEQ ID NO: 50507 - DNA, 80 bp, synthetic construct
  source 1..80: mol_type = other DNA
ttgatacctttgaagaagtaccattcgatgtagataaattcgttgacttagtaactgactctcctgttatatcagctata

SEQ ID NO: 50508 - DNA, 80 bp, synthetic construct
  source 1..80: mol_type = other DNA
ttgattttaagacattaaaaaacttgaatgataattatggtatagcacggtctcaagcattagacttaattagatctgat

SEQ ID NO: 50509 - DNA, 80 bp, synthetic construct
  source 1..80: mol_type = other DNA
cccagagttttgcgagattttattaatcaaaataatccaattattaaaaatagaatcgaacaattaatactgcaatgtag

SEQ ID NO: 50510 - DNA, 80 bp, synthetic construct
  source 1..80: mol_type = other DNA
cgaacgattattggatattgttaaatccaactaatcaaaaagttatattagaaggtactaatagaacagatgtttgggtt

SEQ ID NO: 50511 - DNA, 80 bp, synthetic construct
  source 1..80: mol_type = other DNA
gctatactgcttatcgaaccaaacacaaccagtcaagacagacaatacacgctgtttggagaaacgaagcaaatcactat

SEQ ID NO: 50512 - DNA, 80 bp, synthetic construct
  source 1..80: mol_type = other DNA
tgagaataattcaagtaaatggaaattctttgaaatgtttagaaataatacaagcgctgaatttcagcataaacgcactc

SEQ ID NO: 50513 - DNA, 80 bp, synthetic construct
  source 1..80: mol_type = other DNA
tgacatcagatactaaattagctggatttttaaagcatggtggacgcgtatggacttttcacggtgaaacaccaaatgct

SEQ ID NO: 50514 - DNA, 80 bp, synthetic construct
  source 1..80: mol_type = other DNA
acaaccgattactcaacaacttcaaatctacctgatatagaaactgtaatacacactgatttttatataataccaaggtc

SEQ ID NO: 50515 - DNA, 80 bp, synthetic construct
  source 1..80: mol_type = other DNA
gcaagagtctaaatgtaaagaatacataaatacaggattgccaccaatgcaaaacacaaggaatatagttccagttgcgc

SEQ ID NO: 50516 - DNA, 80 bp, synthetic construct
  source 1..80: mol_type = other DNA
tatcatcaagatcagtgactcatcagcgtgctcaggttaatgaagatattatcatatcaaaaacatcattatggaaagaa

SEQ ID NO: 50517 - DNA, 80 bp, synthetic construct
  source 1..80: mol_type = other DNA
atgcaatacaatagagacattataataagatttaagtttaataatagtatagtgaagcttggtggacttggttataaatg

SEQ ID NO: 50518 - DNA, 80 bp, synthetic construct
  source 1..80: mol_type = other DNA
ttagatcattagcagctaatttaaattcagtgaaatgtacaggtggaagttacgactttagtatacctgtgggtgcatgg

SEQ ID NO: 50519 - DNA, 80 bp, synthetic construct
  source 1..80: mol_type = other DNA
ccagttatgaatggaggtgctgtttcgttgcattttgctggtgttacattatctacgcaattcacagatttcgtatcatt

SEQ ID NO: 50520 - DNA, 80 bp, synthetic construct
  source 1..80: mol_type = other DNA
agtttgacagtggatgaaccatctttttcaatattgagaacacgtacggtaaatttatacggattaccagctgctaatcc

SEQ ID NO: 50521 - DNA, 80 bp, synthetic construct
  source 1..80: mol_type = other DNA
aaataatggaaatgaatattacgaaatatcaggaaggttttcacttatttctttagttccaactaacgatgattatcaga

SEQ ID NO: 50522 - DNA, 80 bp, synthetic construct
  source 1..80: mol_type = other DNA
ctccaattatgaattcagtaacagtaagacaagatttagaacgtcaacttactgatttacgagaggaattcaattcatta

SEQ ID NO: 50523 - DNA, 80 bp, synthetic construct
  source 1..80: mol_type = other DNA
tcacaagaaatagctatgtcacaattaattgatttagcgctattacctttagatatgttttctatgttttcaggaattaa

SEQ ID NO: 50524 - DNA, 80 bp, synthetic construct
  source 1..80: mol_type = other DNA
gtcatggagaaataaatgattcaacgacagtggaaccaattttagatggtccttaccaacctactacatttacaccacct

SEQ ID NO: 50525 - DNA, 80 bp, synthetic construct
  source 1..80: mol_type = other DNA
aagcacaattgatctaactaaatcaatggcaactagtgtaatgaaaaaatttagaaaatcaaagttagctacatcagttt

SEQ ID NO: 50526 - DNA, 80 bp, synthetic construct
  source 1..80: mol_type = other DNA
cagaaatgactaattcattgtcagacgcagcatcatcagcatcaagaagcgtttctgttagatcaaatatatccgcagtt

SEQ ID NO: 50527 - DNA, 80 bp, synthetic construct
  source 1..80: mol_type = other DNA
tcaaactggactaacgtttcaaatgatgtgtcaaatgtgactaattcagtaaatgatatttcgacacaaacgtctacgat

SEQ ID NO: 50528 - DNA, 80 bp, synthetic construct
  source 1..80: mol_type = other DNA
cagtaaaaaccttagattaaaggagatgattactcaaactgaaggaatgagttttgacgatatttcagcagcagtactaa

SEQ ID NO: 50529 - DNA, 80 bp, synthetic construct
  source 1..80: mol_type = other DNA
aaacaaaaatagatatgtctactcaaattgggaaaaacactttacctgacatagtcacagaggcatctgagaaatttatt

SEQ ID NO: 50530 - DNA, 80 bp, synthetic construct
  source 1..80: mol_type = other DNA
ccaaaacgatcatatcgaatattaaaagatgatgaagtaatggaaattaatactgaaggaaaattctttgcatataaaat

SEQ ID NO: 50531 - DNA, 80 bp, synthetic construct
  source 1..80: mol_type = other DNA
tgatacacttaacgaagtgccatttgatgtaaataaattcactgaacttgtaacaaattctccagttatatcagcgataa

SEQ ID NO: 50532 - DNA, 80 bp, synthetic construct
  source 1..80: mol_type = other DNA
tcgattttaaaacattaaaaaatttaaatgataattatggaattactcgaactgaagcgttaaatttaattaaatcaaat

SEQ ID NO: 50533 - DNA, 80 bp, synthetic construct
  source 1..80: mol_type = other DNA
ccaaatgtattacgtaattttattaatcaaaataatccaattataaggaatagaattgaacagttaattctacaatgtaa

SEQ ID NO: 50534 - DNA, 80 bp, synthetic construct
  source 1..80: mol_type = other DNA
aaataatccaattataaggaatagaattgaacagttaattctacaatgtaagttgtgagagcgctattgaggatgtgacc

SEQ ID NO: 50535 - DNA, 80 bp, synthetic construct
  source 1..80: mol_type = other DNA
actgattattggatacttattacctcaaatacaaatggagtagtatacgagagtacaaataatagtgacttttggactgc

SEQ ID NO: 50536 - DNA, 80 bp, synthetic construct
  source 1..80: mol_type = other DNA
agtcattgctgttgaaccgcacgtcaatccagtagatagacaatataatgtatttggtgaaaataaacaatttaatgtaa

SEQ ID NO: 50537 - DNA, 80 bp, synthetic construct
  source 1..80: mol_type = other DNA
gaaatgattcagataaatggaagtttttagaaatgtttagaggcagtagtcaaaatgacttttataatagacgtacacta

SEQ ID NO: 50538 - DNA, 80 bp, synthetic construct
  source 1..80: mol_type = other DNA
acttctgatactagactcgtgggaatattaaaatatggtggaagagtatggacatttcatggtgaaacaccgagggctac

SEQ ID NO: 50539 - DNA, 80 bp, synthetic construct
  source 1..80: mol_type = other DNA
cactgatagttcaaacactgcaaacttggacggtatatcaattacaattcattcagaattttatattattccaaggtccc

SEQ ID NO: 50540 - DNA, 80 bp, synthetic construct
  source 1..80: mol_type = other DNA
aagagtctaagtgtaatgaatatattaacaacggtctgccaccaattcaaaatactagaaatgtagtaccattatcatta

SEQ ID NO: 50541 - DNA, 80 bp, synthetic construct
  source 1..80: mol_type = other DNA
aattggatcagaaaaaactcaaaatgtaactgtaaatccaggtccatttgctcaaacaagatatgctccagttaattggg

SEQ ID NO: 50542 - DNA, 80 bp, synthetic construct
  source 1..80: mol_type = other DNA
gcaatataacagagatattataattagatttaaatttggtaatagtattgttaaactagggggactaggttataaatggt

SEQ ID NO: 50543 - DNA, 80 bp, synthetic construct
  source 1..80: mol_type = other DNA
ccgaaatatcatataaagcagcaaactatcaatataattatctacgtgatggcgaacaagtaactgcacatactacttgc

SEQ ID NO: 50544 - DNA, 80 bp, synthetic construct
  source 1..80: mol_type = other DNA
tcagtgaatggagtaaataattttagctataacggaggatctttacctactgattttagcgtttcaaggtatgaagttat

SEQ ID NO: 50545 - DNA, 80 bp, synthetic construct
  source 1..80: mol_type = other DNA
gtttataccgaagagatcgtacagaatagttgatgaagataccgcattcgaaaccgggattgacggaacgttttatgctt

SEQ ID NO: 50546 - DNA, 80 bp, synthetic construct
  source 1..80: mol_type = other DNA
ggctttaaaatggcttcgctcatttatagacagctactcactaattcatacacagttgaattatcagatgaaattagcac

SEQ ID NO: 50547 - DNA, 80 bp, synthetic construct
  source 1..80: mol_type = other DNA
caggtcattagcagcaaatttaaattcagtaaagtgtagtggaggaaactatgattttcaaataccagttggtgcgtggc

SEQ ID NO: 50548 - DNA, 80 bp, synthetic construct
  source 1..80: mol_type = other DNA
cggtaatgagtggaggtgcagtgtctttacattttgcaggagtcacattatccactcaattcactgattttgtatcactt

SEQ ID NO: 50549 - DNA, 80 bp, synthetic construct
  source 1..80: mol_type = other DNA
aattcgctaagatttagattcagtttaaccgttgaagagccacctttttcaattttacgtacacgcgtgtcaggattata

SEQ ID NO: 50550 - DNA, 80 bp, synthetic construct
  source 1..80: mol_type = other DNA
tgccgtctaatgacgattatcaaactccaatcatgaattcagttacagtacgacaagatcttgaacgtcaactaggtgat

SEQ ID NO: 50551 - DNA, 80 bp, synthetic construct
  source 1..80: mol_type = other DNA
ttaagggaagagtttaattcgctatcacaagaaatagcaatgacgcaattgatagatttagcattattaccgttagatat

SEQ ID NO: 50552 - DNA, 80 bp, synthetic construct
  source 1..80: mol_type = other DNA
gtcatggagaagtgaatgactcgacaacaatagaaccagtacttgatggtccttaccaaccaacaagttttaaaccacca

SEQ ID NO: 50553 - DNA, 80 bp, synthetic construct
  source 1..80: mol_type = other DNA
aaagcacaattgacgtagctaaatcgatggccacgaaggtgatgaaaaagttcaagaggtcaggactagctacatcaatt

SEQ ID NO: 50554 - DNA, 80 bp, synthetic construct
  source 1..80: mol_type = other DNA
tctgaattaactggatcattatcaagtgccgcctcatcagtttccagaagctcatctattagatctaatatatcatccat

SEQ ID NO: 50555 - DNA, 80 bp, synthetic construct
  source 1..80: mol_type = other DNA
ttcagtgtggacggacgtttccgaacagatagcgagttcgtcagactctgtcaggaatatctctacacaaacgtcagcta

SEQ ID NO: 50556 - DNA, 80 bp, synthetic construct
  source 1..80: mol_type = other DNA
cagcagttcttaaaactaagatagatagatcaactcatataagtccagatacgttaccagacataataactgagtcatct

SEQ ID NO: 50557 - DNA, 80 bp, synthetic construct
  source 1..80: mol_type = other DNA
gaaaaatttataccaaaacgagcttatagagttctaaaagatgatgaagtgatggaagctgacgtagatgggaaattctt

SEQ ID NO: 50558 - DNA, 80 bp, synthetic construct
  source 1..80: mol_type = other DNA
tgcatatagggttgacacttttgaagaagtgccatttgacgtagataaatttgttgatttggtaactgattcccctgtaa

SEQ ID NO: 50559 - DNA, 80 bp, synthetic construct
  source 1..80: mol_type = other DNA
tttcagctataattgattttaaaacattgaagaatttaaacgacaattatggcataacgcgatctcaagcattagactta

SEQ ID NO: 50560 - DNA, 80 bp, synthetic construct
  source 1..80: mol_type = other DNA
atcagatctgatcccagagttttacgtgatttcatcaatcaaaataatccaattattaaaaatagaattgaacaactgat

SEQ ID NO: 50561 - DNA, 80 bp, synthetic construct
  source 1..80: mol_type = other DNA
aacgattactggatattattaagtccaactaatcaacaaattgtattagaaggtaccaatagaactgatgtttgggttgc

SEQ ID NO: 50562 - DNA, 80 bp, synthetic construct
  source 1..80: mol_type = other DNA
tttattacttgttgaaccgaacgtgacaaatcagagtagacaatacacgttatttggagaaacgaaacaaattactgtgg

SEQ ID NO: 50563 - DNA, 80 bp, synthetic construct
  source 1..80: mol_type = other DNA
aaaataatacgaacaaatggaaattctacgaaatgttcagaggcagtgctagcgccgaatttcagcataagcgcacttta

SEQ ID NO: 50564 - DNA, 80 bp, synthetic construct
  source 1..80: mol_type = other DNA
acatcagatactaagctagctgggtttttaaaacatggtggacgtgtttggacttttcacggcgaaacgccacatgctac

SEQ ID NO: 50565 - DNA, 80 bp, synthetic construct
  source 1..80: mol_type = other DNA
aactgattactcatcgacttcaaacctatctgaagtagaaactgtaatacataccgagttttacataataccaagatcgc

SEQ ID NO: 50566 - DNA, 80 bp, synthetic construct
  source 1..80: mol_type = other DNA
aggaatctaaatgtaatgaatatataaataccgggttgccaccaatgcagaatacaagaaatgtagttccagttgctttg

SEQ ID NO: 50567 - DNA, 80 bp, synthetic construct
  source 1..80: mol_type = other DNA
tcatctagatcagtgacttatcaacgtgctcaagttaatgaagatattattgtgtcaaagacgtcgttatggaaggaaat

SEQ ID NO: 50568 - DNA, 80 bp, synthetic construct
  source 1..80: mol_type = other DNA
aattggatcagagaaaagtcagaatgtaacaattaaccctggaccgttcgctcaaacaaattatgcgccagtgacttgga

SEQ ID NO: 50569 - DNA, 80 bp, synthetic construct
  source 1..80: mol_type = other DNA
ggctataaaatggcttcgctcatttatagacaacttctcactaattcatattcggtagacttgcatgatgaaatagaaca

SEQ ID NO: 50570 - DNA, 80 bp, synthetic construct
  source 1..80: mol_type = other DNA
atttcgagatatgaagttagtaaagaaaattcttatgtgtatatagactactgggatgattcaaaagcatttagaaatat

SEQ ID NO: 50571 - DNA, 80 bp, synthetic construct
  source 1..80: mol_type = other DNA
ttagatcgctagcagcaaatttaaattcagtgaaatgtacaggtgggagttatgattttagattgcccgtaggtggatgg

SEQ ID NO: 50572 - DNA, 80 bp, synthetic construct
  source 1..80: mol_type = other DNA
cctattatgaatggtggtgctgtatcattacattttgctggagttacattatctacacagttcactgattttgtatcatt

SEQ ID NO: 50573 - DNA, 80 bp, synthetic construct
  source 1..80: mol_type = other DNA
aaattcactgcgatttagattcagtttaacagtagatgaaccatctttctcaataatacgaacacgtacaataaacttgt

SEQ ID NO: 50574 - DNA, 80 bp, synthetic construct
  source 1..80: mol_type = other DNA
acggattaccagcagctaatccgaacaatggaaatgagtactatgaaatgtcaggaaggttttcacttatttctttagtt

SEQ ID NO: 50575 - DNA, 80 bp, synthetic construct
  source 1..80: mol_type = other DNA
ctaaccaatgatgattatcaaactccaattatgaattcagtaacagtaaggcaggatttagaacgccagcttaatgattt

SEQ ID NO: 50576 - DNA, 80 bp, synthetic construct
  source 1..80: mol_type = other DNA
gcgagaagaatttaattcattgtcacaagaaatagctatgtcacaattaattgatttagcattactacctttagatatgt

SEQ ID NO: 50577 - DNA, 80 bp, synthetic construct
  source 1..80: mol_type = other DNA
tctctatgttttcgggaataaaaagtacaattgatctaaccaaatcaatggcaactagtgtaatgaaaaaatttagaaaa

SEQ ID NO: 50578 - DNA, 80 bp, synthetic construct
  source 1..80: mol_type = other DNA
gacatggggagattaatgattcaactacagtggaaccagttttagatggtccttatcaacccactacattcaaaccaccc

SEQ ID NO: 50579 - DNA, 80 bp, synthetic construct
  source 1..80: mol_type = other DNA
tcgaaattagctacatcaatttcagaaatgactaattcattgtcagatgcggcttcatcagcatcaagaagtgcttctat

SEQ ID NO: 50580 - DNA, 80 bp, synthetic construct
  source 1..80: mol_type = other DNA
tagatcaaatttatctacgatttcaaattggactaatacttcaaaaagtgtgtcaaatgtaactgactcagtaaatgatg

SEQ ID NO: 50581 - DNA, 80 bp, synthetic construct
  source 1..80: mol_type = other DNA
tttcaacacaaacatctacaattagtaagaaacttagattaagagagatgattactcaaactgaaggaatgagttttgat

SEQ ID NO: 50582 - DNA, 80 bp, synthetic construct
  source 1..80: mol_type = other DNA
gatatttcagcagctgtactgaaaacgaaaatagatatgtccacacaaattggaaaaaacactttacctgatatagttac

SEQ ID NO: 50583 - DNA, 80 bp, synthetic construct
  source 1..80: mol_type = other DNA
tgaagcgtctgaaaaatttattccaaaacgatcatatcgagtattaaaagataatgaagtaatggaaattaacactgaag

SEQ ID NO: 50584 - DNA, 80 bp, synthetic construct
  source 1..80: mol_type = other DNA
gaaagttttttgcatataaagtggatacactcaatgagataccatttgatataaataaattcgccgaacttgtcacggat

SEQ ID NO: 50585 - DNA, 80 bp, synthetic construct
  source 1..80: mol_type = other DNA
tctccagttatatcagcgataatagactttaagacgttaaaaaatttaaacgacaattatggaattactcgtattgaagc

SEQ ID NO: 50586 - DNA, 80 bp, synthetic construct
  source 1..80: mol_type = other DNA
gtttaatttaattaaatcgaatccaaatgtgctacgtaatttcattaatcaaaataatccaattataagaaatagaattg

SEQ ID NO: 50587 - DNA, 80 bp, synthetic construct
  source 1..80: mol_type = other DNA
aaataatccaattataagaaatagaattgagcagttaattctacaatgtaagttgtgagaatgtcatccaggatgtgacc

SEQ ID NO: 50588 - DNA, 80 bp, synthetic construct
  source 1..80: mol_type = other DNA
aatgattattggttccttattagttcaaatacagatggagtagtctacgaaagtacaaataataatgatttttggacagc

SEQ ID NO: 50589 - DNA, 80 bp, synthetic construct
  source 1..80: mol_type = other DNA
agttatcgcagttgaaccacatgttagtcaaacaaataggcaatatattttatttggtgaaaataaacagtttaacgtag

SEQ ID NO: 50590 - DNA, 80 bp, synthetic construct
  source 1..80: mol_type = other DNA
aaaacaattcagataaatggaaatttttcgaaatgtttaaaggtagtagtcagggtgatttttctaatagacggactcta

SEQ ID NO: 50591 - DNA, 80 bp, synthetic construct
  source 1..80: mol_type = other DNA
acctctaacaatagacttgtagggatgctaaaatatggtggaagagtatggacatttcatggtgaaacaccaagagctac

SEQ ID NO: 50592 - DNA, 80 bp, synthetic construct
  source 1..80: mol_type = other DNA
tactgatagttcaaatactgcggatttaaataatatatcaattatgattcattcagagttttatattattccaagatccc

SEQ ID NO: 50593 - DNA, 80 bp, synthetic construct
  source 1..80: mol_type = other DNA
aagaatctaaatgtaacgagtatatcaagaatggtttaccaccaattcagaatactagaaacgtagttccattatcttta

SEQ ID NO: 50594 - DNA, 80 bp, synthetic construct
  source 1..80: mol_type = other DNA
tcatccagatctattcagtataggagagcacaagttaatgaagatattacaatttcaaaaacttcattatggaaggaaat

SEQ ID NO: 50595 - DNA, 80 bp, synthetic construct
  source 1..80: mol_type = other DNA
gattggatcggagaaaactcaaagtgtaacagtaaatccaggtccatttgcacaaaccagatacgctccagttaattggg

SEQ ID NO: 50596 - DNA, 80 bp, synthetic construct
  source 1..80: mol_type = other DNA
ttactgcacataccacttgttcagtaaatggagtaaataattttagctataatggaggttcactacctactgatttcagt

SEQ ID NO: 50597 - DNA, 80 bp, synthetic construct
  source 1..80: mol_type = other DNA
cagtgatgagtggaggtgcagtgtctttgcattttgcaggagtcactttatccactgaatttactgactttgtgtcactt

SEQ ID NO: 50598 - DNA, 80 bp, synthetic construct
  source 1..80: mol_type = other DNA
cgggctaccagcattcaatccgaataacggacatgaatattatgaaatagctgggagattttcttttattttgttagtgc

SEQ ID NO: 50599 - DNA, 80 bp, synthetic construct
  source 1..80: mol_type = other DNA
aaagtaccattgacgcagctaaatcaatggctacaatggtgatgaaaaagtttaagaaatcgggattagctacatcaatc

SEQ ID NO: 50600 - DNA, 80 bp, synthetic construct
  source 1..80: mol_type = other DNA
tctgaattgactagatcattatcaaacgctgcttcatcagtttccagaagttcatctattaaatctaacatatcatccat

SEQ ID NO: 50601 - DNA, 80 bp, synthetic construct
  source 1..80: mol_type = other DNA
ttcagtgtggacggatgtttccgaacaaataacgggttcgtcagactcagtcaggaatatttccacgcaaacgtcagcta

SEQ ID NO: 50602 - DNA, 80 bp, synthetic construct
  source 1..80: mol_type = other DNA
aaaatttttaccaaaacgagcttatagagtcctaaaagatgatgaagtaatggaagttgatgtggatgggaagttctttg

SEQ ID NO: 50603 - DNA, 80 bp, synthetic construct
  source 1..80: mol_type = other DNA
ttgattttaagacgttgaagaatttaaacgacaattatggtataacgcgatctcaagcgttagacttaattagatctgat

SEQ ID NO: 50604 - DNA, 80 bp, synthetic construct
  source 1..80: mol_type = other DNA
acatcagacactaaattagctggatttttaaaattttataatagtgtttggactttctacggtgaaacgccacatgctac

SEQ ID NO: 50605 - DNA, 80 bp, synthetic construct
  source 1..80: mol_type = other DNA
aagaatctaagtgtaatgaatatataaatactgggttaccaccaatgcagaatacaaggaatatagttccagttgcacta

SEQ ID NO: 50606 - DNA, 80 bp, synthetic construct
  source 1..80: mol_type = other DNA
gattggatcagaaaaaagtcaaaatgtaacgattaatcccggaccgtttgctcaaacaaattatgcaccagtcgtacttg

SEQ ID NO: 50607 - DNA, 80 bp, synthetic construct
  source 1..80: mol_type = other DNA
gccagaaatttcgtttaaagctgctaattatcagtacaattacttacgagatggagaacaagttatggcacatactactt

SEQ ID NO: 50608 - DNA, 80 bp, synthetic construct
  source 1..80: mol_type = other DNA
gttcagtcaatggtgagaataactacagttataatggaggattactgccaactcattttagtgtatcaagatatgaagtg

SEQ ID NO: 50609 - DNA, 80 bp, synthetic construct
  source 1..80: mol_type = other DNA
aaagtttataccaaaacgggcttatagagttctaaaagacgatgaagtgatggaagctgatgtagatggaaagttctttg

SEQ ID NO: 50610 - DNA, 80 bp, synthetic construct
  source 1..80: mol_type = other DNA
gcctcggtgaggtggttgctggggccagaagcaggtgctgatcctgccaacatgccagccggcttcgtggagggcctgca

SEQ ID NO: 50611 - DNA, 80 bp, synthetic construct
  source 1..80: mol_type = other DNA
ggctataaaatggcttctttgatttacagacagttgctgtctaactcgtatgtaacaaacatttctgatgaagttagtga

SEQ ID NO: 50612 - DNA, 80 bp, synthetic construct
  source 1..80: mol_type = other DNA
ttaggtcactatcggctaatttgaatgatgtagtctgcagtggcggcgattatagttttgcattaccggtaggtgcatat

SEQ ID NO: 50613 - DNA, 80 bp, synthetic construct
  source 1..80: mol_type = other DNA
ccagtaatgagtggtggtgcagtaacattgtcaccagcaggtgtaacattatcaacgcagtttactgattatgtatcgct

SEQ ID NO: 50614 - DNA, 80 bp, synthetic construct
  source 1..80: mol_type = other DNA
taattcactgaggttcagatttagattagctgtcagtgagccgtctttttcaatttctcgaactaggttaagcggtatat

SEQ ID NO: 50615 - DNA, 80 bp, synthetic construct
  source 1..80: mol_type = other DNA
atggattaccagcagcaaacccaaataataatgtagattattacgaaatagctggtagattttcgttgatatcactagta

SEQ ID NO: 50616 - DNA, 80 bp, synthetic construct
  source 1..80: mol_type = other DNA
ccaactaatgacgattatcagacaccaatagctaattctgtcacagtgagacaagacttggaaagacaacttggtgagtt

SEQ ID NO: 50617 - DNA, 80 bp, synthetic construct
  source 1..80: mol_type = other DNA
gagggaagagtttaattcattatcacaagaaattgcgttatcacaactaatcgatttggcaacattaccgcttgacatgt

SEQ ID NO: 50618 - DNA, 80 bp, synthetic construct
  source 1..80: mol_type = other DNA
ggacatggtgagttgtctgattcaacattagttcagccaacgttggatggtccatatcaacctactacgtttaatttacc

SEQ ID NO: 50619 - DNA, 80 bp, synthetic construct
  source 1..80: mol_type = other DNA
tctcaatgttctctggaattaaatcaacagtggaagcggtgaaatctatgacaacaaatatcatgaaaaagtttaaaaca

SEQ ID NO: 50620 - DNA, 80 bp, synthetic construct
  source 1..80: mol_type = other DNA
tcaaacttggcaaatgctatatcagacttaacaaatagcatgtctgacgcagcttcttcaattagcagatccacatctat

SEQ ID NO: 50621 - DNA, 80 bp, synthetic construct
  source 1..80: mol_type = other DNA
aagatcgataagtagtagtacaacgatgcgaattaacactgctatacaaactggagaagatttaagaacaatggcggacg

SEQ ID NO: 50622 - DNA, 80 bp, synthetic construct
  source 1..80: mol_type = other DNA
cgtcgacacaaatttcaaatatcagcagaagtttgcgactacgtgagtttactacacaaaccgacaacttaagttttgac

SEQ ID NO: 50623 - DNA, 80 bp, synthetic construct
  source 1..80: mol_type = other DNA
gacatatcagctgcagtattaaagacgaaattggacaaatcaacgcaaatttcgcaaaatacaataccagatataatatc

SEQ ID NO: 50624 - DNA, 80 bp, synthetic construct
  source 1..80: mol_type = other DNA
cgagtcatcagaaaaatttataccaatacgaacttatagagtactggataatgacactgcatttgaaactggaattgatg

SEQ ID NO: 50625 - DNA, 80 bp, synthetic construct
  source 1..80: mol_type = other DNA
gtactttttacgcatatagagttgacactttcgatgaaattccgtttgatgtggaaaaattcaataaactaatcacagat

SEQ ID NO: 50626 - DNA, 80 bp, synthetic construct
  source 1..80: mol_type = other DNA
tcaccagtactgtcagctataatagactttaaaacactgaaaaacttaaatgataattatggaataacgaagacacaagc

SEQ ID NO: 50627 - DNA, 80 bp, synthetic construct
  source 1..80: mol_type = other DNA
aatggagctgttgcagtcaaatccaagaactttgaaagaatttataaataataataatcccataattagaaataggatag

SEQ ID NO: 50628 - DNA, 80 bp, synthetic construct
  source 1..80: mol_type = other DNA
cctgtgtactcgttgaaccaaacgtgtcaaatacacagagagaatatattctagatggacaaacagtgcagctacaagtt

SEQ ID NO: 50629 - DNA, 80 bp, synthetic construct
  source 1..80: mol_type = other DNA
tcaaatgactcgagcactctttggaaatttatattatttattaaattagagaaaaatggaacctattcacaatattcaac

SEQ ID NO: 50630 - DNA, 80 bp, synthetic construct
  source 1..80: mol_type = other DNA
cgtcagcaagctactatctgacaataaataacgataacagtaatgtatcatgcgatgctgagttttatttgataccaaga

SEQ ID NO: 50631 - DNA, 80 bp, synthetic construct
  source 1..80: mol_type = other DNA
tcacaaactgaattgtgtgcgcaatatataaacagtggattgcctccgatacaaaataccaggaatgtggtaccagtaag

SEQ ID NO: 50632 - DNA, 80 bp, synthetic construct
  source 1..80: mol_type = other DNA
tcagagatatcatttaaaccaatgaactaccaatatacttacacaagagatggagaagagataacagcacatacaacatg

SEQ ID NO: 50633 - DNA, 80 bp, synthetic construct
  source 1..80: mol_type = other DNA
ttcagttaacggagtaaacgattttagctacaacggcggtacactgccgacagatttcgcagtttccagatttgaagtaa

SEQ ID NO: 50634 - DNA, 80 bp, synthetic construct
  source 1..80: mol_type = other DNA
ggctataaaatggcttctttgatctacagacagttactatccaactcatacataacaaatatctctgacgaagtcagtga

SEQ ID NO: 50635 - DNA, 80 bp, synthetic construct
  source 1..80: mol_type = other DNA
tggtgtatgttagatcattatcagctaatttaaatgatgtagtttgtagtggtggtgattatagctttgcattaccagta

SEQ ID NO: 50636 - DNA, 80 bp, synthetic construct
  source 1..80: mol_type = other DNA
ggtgcgtatccagtgatgagtggtggcgcagtgacactgtcgccagcgggggtcacattgtcaacgcagtttactgacta

SEQ ID NO: 50637 - DNA, 80 bp, synthetic construct
  source 1..80: mol_type = other DNA
tgtatcacttaattcattgagatttagatttagattagctgtcagtgaaccatctttttcaatttcacgaactagactaa

SEQ ID NO: 50638 - DNA, 80 bp, synthetic construct
  source 1..80: mol_type = other DNA
gtggtatatatggattaccagcggcaaacccaaataacaatgtgcagtattatgaaatagctggtagattttcattaata

SEQ ID NO: 50639 - DNA, 80 bp, synthetic construct
  source 1..80: mol_type = other DNA
tctttggtaccaactaatgatgactatcaaacaccaatagctaattcagtgacggtgcgacaggacttggaaaggcaact

SEQ ID NO: 50640 - DNA, 80 bp, synthetic construct
  source 1..80: mol_type = other DNA
tggtgaattgagggaagaatttaattcactatcacaagaaattgcactgtcacaactaattgatttagcgacactgccgc

SEQ ID NO: 50641 - DNA, 80 bp, synthetic construct
  source 1..80: mol_type = other DNA
gacatggtgaattgtctgattcaacgctagtccagccgacattagatggaccgtatcaacccaccacatttaatttacca

SEQ ID NO: 50642 - DNA, 80 bp, synthetic construct
  source 1..80: mol_type = other DNA
aaaacgaaattggacaagtcgacacaaatttcacaaaatacaataccagatataatatctgaatcatcagaaaaatttat

SEQ ID NO: 50643 - DNA, 80 bp, synthetic construct
  source 1..80: mol_type = other DNA
accaatgcgaacctatagagtgatagataatgacactgcatttgagactgggatcgatggtacgttttacgcgtataggg

SEQ ID NO: 50644 - DNA, 80 bp, synthetic construct
  source 1..80: mol_type = other DNA
ttgatactttcgatgaaatcccgtttgatgtggaaaaattcaataaactgataacagattcaccagtactgtcagctata

SEQ ID NO: 50645 - DNA, 80 bp, synthetic construct
  source 1..80: mol_type = other DNA
attgactttaaaacactaaagaatttgaacgataattatggaataacgaaaacacaggcgatggaattgctacaatcaaa

SEQ ID NO: 50646 - DNA, 80 bp, synthetic construct
  source 1..80: mol_type = other DNA
tccaagaactttgaaagaattcataaataataacaatcctataattagaaatagaatagaaaatttaattgcgcaatgta

SEQ ID NO: 50647 - DNA, 80 bp, synthetic construct
  source 1..80: mol_type = other DNA
ataacaatcctataattagaaatagaatagaaaatttaattgcgcaatgtagattgtaactgtctgttcaagatgtgacc

SEQ ID NO: 50648 - DNA, 80 bp, synthetic construct
  source 1..80: mol_type = other DNA
ttgcgttctagttgaaccaaacgtacaaaatacacagagagaatatatcttagacggacagacggtacagctgcaggtct

SEQ ID NO: 50649 - DNA, 80 bp, synthetic construct
  source 1..80: mol_type = other DNA
caaacaactcaagtaccctttggaaattcatactattcatcaaactagagaaaaatggaacatattctcaatattcaacg

SEQ ID NO: 50650 - DNA, 80 bp, synthetic construct
  source 1..80: mol_type = other DNA
ctatctacgtcaaataagttgtgtgcatggatgaaaagagaaggaagagtatattggtacgcgggaactgcaccgaatgc

SEQ ID NO: 50651 - DNA, 80 bp, synthetic construct
  source 1..80: mol_type = other DNA
atcagatagttattatttaacaataaataatgacaatagcaatgtgtcatgcgacgctgagttctacttgataccaagat

SEQ ID NO: 50652 - DNA, 80 bp, synthetic construct
  source 1..80: mol_type = other DNA
cgcaaaccgacttgtgtgcacagtatataaataatgggctgcctccaatacaaaatactaggaacgtagtgccagtaagc

SEQ ID NO: 50653 - DNA, 80 bp, synthetic construct
  source 1..80: mol_type = other DNA
ataacatcaagagaaataagacatacacgtgcacaaatgaacgaagatatagtggtatcaaaaacatcattatggaaaga

SEQ ID NO: 50654 - DNA, 80 bp, synthetic construct
  source 1..80: mol_type = other DNA
gattggagctagaaaatctacgaacgttacagttaatccaggaccattcgcacagactgggtacgctccagttaactggg

SEQ ID NO: 50655 - DNA, 80 bp, synthetic construct
  source 1..80: mol_type = other DNA
tggtatatgtacgctcgttggcagccgatttaaattcagtaatgtgtacaggaggtgactatagctttgcgcttccagtt

SEQ ID NO: 50656 - DNA, 80 bp, synthetic construct
  source 1..80: mol_type = other DNA
ggtaattatccagttatgactgggggtgctgtgtcattgcattcagcaggtgtaactttatcaacgcagtttacggattt

SEQ ID NO: 50657 - DNA, 80 bp, synthetic construct
  source 1..80: mol_type = other DNA
agattatcagtagaagaaccgccgttctcaattctacggaccagaattagtgggttgtatggacttccagcggcaaaacc

SEQ ID NO: 50658 - DNA, 80 bp, synthetic construct
  source 1..80: mol_type = other DNA
gaataattcacaagaatattatgagatagctgggagattttcattaatatcacttgtaccatcaaatgatgattatcaga

SEQ ID NO: 50659 - DNA, 80 bp, synthetic construct
  source 1..80: mol_type = other DNA
atcaagtctcgctaactcagtgtcaacgctcactgattcattgtctgatgcagcatcatcaatttctagaagtgcatcgg

SEQ ID NO: 50660 - DNA, 80 bp, synthetic construct
  source 1..80: mol_type = other DNA
ttagatcagttagttcaactgcatcagcttggacggaagtatctaacattgcatcagatattaatgtgacaacgggctca

SEQ ID NO: 50661 - DNA, 80 bp, synthetic construct
  source 1..80: mol_type = other DNA
atttctacacagacatcaacaataagcagaaggttgagactaaaagaaatggcgacccaaacggacggtatgaattttga

SEQ ID NO: 50662 - DNA, 80 bp, synthetic construct
  source 1..80: mol_type = other DNA
cagcggtacttaagactaaaattgataaatcaacccaattaaatacaagtacattgccagaaatagtaactgaagcttca

SEQ ID NO: 50663 - DNA, 80 bp, synthetic construct
  source 1..80: mol_type = other DNA
gaaaagtttataccaaacagagcgtatcgtgtgattaaagatgatgaagtgctggaggctagtactgatggtaaatattt

SEQ ID NO: 50664 - DNA, 80 bp, synthetic construct
  source 1..80: mol_type = other DNA
cgcttacaaagttgaaacatttgaagagattccattcgatgtccaaaaattcgccgacttagtgactgactcgccagtta

SEQ ID NO: 50665 - DNA, 80 bp, synthetic construct
  source 1..80: mol_type = other DNA
ttgactttaaaacacttaagaatctaaatgataattacggaataagcagacaacaagcactaaatcttctaagatctgat

SEQ ID NO: 50666 - DNA, 80 bp, synthetic construct
  source 1..80: mol_type = other DNA
ccgcgagtattacgtgaatttattaatcaagataatccaataatacgaaatagaatagaaagcttgataatgcaatgtcg

SEQ ID NO: 50667 - DNA, 80 bp, synthetic construct
  source 1..80: mol_type = other DNA
agataatccaataatacgaaatagaatagaaagcttgataatgcaatgtcgcttgtaagcaactgacagaggatgtgacc

SEQ ID NO: 50668 - DNA, 80 bp, synthetic construct
  source 1..80: mol_type = other DNA
tgttgttagcaccaacaaacgcgggggtagtagctgaaggtacgaacaatacaaatagatggttagcgacaatattaatt

SEQ ID NO: 50669 - DNA, 80 bp, synthetic construct
  source 1..80: mol_type = other DNA
gaaccaaatgtacagcaagttgagcgaacatatacattatttggacaacaagttcaagtgacggtatcaaatgactcaca

SEQ ID NO: 50670 - DNA, 80 bp, synthetic construct
  source 1..80: mol_type = other DNA
aacaaagtggaaatttgtggatctaagtaagcagacacaagatggtaattattcacagcatggtcctctactgtcaacac

SEQ ID NO: 50671 - DNA, 80 bp, synthetic construct
  source 1..80: mol_type = other DNA
cgaaactgtatggagtaatgaaacatgggggtaaaatttacacttataatggagagacgccgaatgcaaacactggttac

SEQ ID NO: 50672 - DNA, 80 bp, synthetic construct
  source 1..80: mol_type = other DNA
tactctacaactaactttgacactgtaaatatgacagcatattgtgatttttatataattccattagcacaagaggcaaa

SEQ ID NO: 50673 - DNA, 80 bp, synthetic construct
  source 1..80: mol_type = other DNA
atgcactgaatacataaataatgggttaccaccaatacaaaatacgagaaatgtcgtaccggtttcaatagtatcaagga

SEQ ID NO: 50674 - DNA, 80 bp, synthetic construct
  source 1..80: mol_type = other DNA
atattgtatatacaagagcacaacctaatcaagacatagtagtatcaaaaacctcattatggaaagagatgcaatataat

SEQ ID NO: 50675 - DNA, 80 bp, synthetic construct
  source 1..80: mol_type = other DNA
taaaagaaaattcattcgtctatattgactattgggatgattctcaagcctttaggaatatggtatatgtacgttcattg

SEQ ID NO: 50676 - DNA, 80 bp, synthetic construct
  source 1..80: mol_type = other DNA
actgctaatttgaactctgtgatgtgtacggggggcgattatagtttcgcgctaccggttggaaactatccggtcatgac

SEQ ID NO: 50677 - DNA, 80 bp, synthetic construct
  source 1..80: mol_type = other DNA
tttcgcgctaccggttggaaactatccggtcatgaccggtggtgctgtttcactacattcagctggagttacattgtcga

SEQ ID NO: 50678 - DNA, 80 bp, synthetic construct
  source 1..80: mol_type = other DNA
cggtggtgctgtttcactacattcagctggagttacattgtcgacacaatttactgactttgtatcactgaactcattgc

SEQ ID NO: 50679 - DNA, 80 bp, synthetic construct
  source 1..80: mol_type = other DNA
gatttagatttagactctctgtagaagaaccatcgttttccattatgagaactagagttagtggattgtacggattacca

SEQ ID NO: 50680 - DNA, 80 bp, synthetic construct
  source 1..80: mol_type = other DNA
gcagcaaaaccaaataattcacaagaatattatgaaatagcaggaagattttcactaatatcacttgtaccgtcaaatga

SEQ ID NO: 50681 - DNA, 80 bp, synthetic construct
  source 1..80: mol_type = other DNA
tgactaccaaacaccaattatgaattcagttacagttagacaggatttagaacgtcagctaggcgaattgagagacgaat

SEQ ID NO: 50682 - DNA, 80 bp, synthetic construct
  source 1..80: mol_type = other DNA
ttaataatttgtcgcaacaaatagcaatgtcacaattgatagacttagcgctactaccacttgatatgttttcaatgttt

SEQ ID NO: 50683 - DNA, 80 bp, synthetic construct
  source 1..80: mol_type = other DNA
ggtcctggcgaaacaaatgactcaacagtggtagaaccagtactagacggaccatatcaaccgacaactttcaacccacc

SEQ ID NO: 50684 - DNA, 80 bp, synthetic construct
  source 1..80: mol_type = other DNA
aaagcacaattgacgcagcaaagtcaatggcaacaaacgtaatgaagaaatttaaggagtcaaatttggcgaattcggtg

SEQ ID NO: 50685 - DNA, 80 bp, synthetic construct
  source 1..80: mol_type = other DNA
tctacattaactgactcactgtcagatccagcgtcgtctgtatcaagaagttcatcagttagatcactaggatcaactgc

SEQ ID NO: 50686 - DNA, 80 bp, synthetic construct
  source 1..80: mol_type = other DNA
gtcagcttggacggaagtatctgaagtggcaacagaagttaatgaactaacaaattcaatatcgacgcagacatcgacta

SEQ ID NO: 50687 - DNA, 80 bp, synthetic construct
  source 1..80: mol_type = other DNA
ctgcagtacttaaaactaaaatagataaatcaactcaaataaatacgaatacattgcctgacatagtaactgaagcttca

SEQ ID NO: 50688 - DNA, 80 bp, synthetic construct
  source 1..80: mol_type = other DNA
gaaaagtttataccgaacagagcttatcgtgtaattgctgatgatgaagtattagaagagggtactgatggaagattttt

SEQ ID NO: 50689 - DNA, 80 bp, synthetic construct
  source 1..80: mol_type = other DNA
tgcttataaagtagaaacatttgaggaagtgccgtttgatgtacaaaaattcgcagatttggtgactgattctccagtaa

SEQ ID NO: 50690 - DNA, 80 bp, synthetic construct
  source 1..80: mol_type = other DNA
ttgattttaagacgctgaagaatttgaatgacaattatggaattaataaacaacacacattaaacttgttaagatcagat

SEQ ID NO: 50691 - DNA, 80 bp, synthetic construct
  source 1..80: mol_type = other DNA
ccaaaggtgttaagagaatttattaatcagaataatccaataatacggaataggatagagaatctaattatgcaatgtcg

SEQ ID NO: 50692 - DNA, 80 bp, synthetic construct
  source 1..80: mol_type = other DNA
gaataatccaataatacggaataggatagagaatctaattatgcaatgtcgtttgtaagtaactgacgcaggttgtgacc

SEQ ID NO: 50693 - DNA, 80 bp, synthetic construct
  source 1..80: mol_type = other DNA
agtggattattggatgctacttgctccgactgacgcaggggtggtagttgaaggcacaaataatacaaataggtggttag

SEQ ID NO: 50694 - DNA, 80 bp, synthetic construct
  source 1..80: mol_type = other DNA
cgacaatattaatagaaccgaacgtacagtcggtcgaaagaaccatcacattatttggtcaacaggtacaaattacagta

SEQ ID NO: 50695 - DNA, 80 bp, synthetic construct
  source 1..80: mol_type = other DNA
tcaaacgattcccaaacgaaatggaaattcatagatgtcagcaaacagacgcaagatggtaattattcgcagcatggacc

SEQ ID NO: 50696 - DNA, 80 bp, synthetic construct
  source 1..80: mol_type = other DNA
attattatcaacaccaaaactatatggagtgatgaaacacggaggtaaaatatatacatataatggagaaacaccgaacg

SEQ ID NO: 50697 - DNA, 80 bp, synthetic construct
  source 1..80: mol_type = other DNA
caaacacagggtattattctacaacaaactatgactccgttaatatgacagcatattgtgatttctatatatacctgttg

SEQ ID NO: 50698 - DNA, 80 bp, synthetic construct
  source 1..80: mol_type = other DNA
gcgcaagaggcgaagtgtactgagtacataaataacgggttaccaccgatacaaaacactagaaacgttgtaccagtgtc

SEQ ID NO: 50699 - DNA, 80 bp, synthetic construct
  source 1..80: mol_type = other DNA
aatcagttcgaggagcatagtgcacactagagcacaagcgaatgaggatatcgtagtgtcaaaaacgtcattgtggaaag

SEQ ID NO: 50700 - DNA, 80 bp, synthetic construct
  source 1..80: mol_type = other DNA
tataaatggtctgaagtgtcatttaaaccagcgaactatcaatacacttatacaagagacggtgaagaagtaacggcgca

SEQ ID NO: 50701 - DNA, 80 bp, synthetic construct
  source 1..80: mol_type = other DNA
cacaacatgttcagtgaatggagtaaatgattttaattataatggagggtcgttaccaactgattttgttatatcaaagt

SEQ ID NO: 50702 - DNA, 80 bp, synthetic construct
  source 1..80: mol_type = other DNA
tacgatcattagctgccaatttaaatacagtaatgtgcacaggaggagattatagctttgcgctaccagttggaaattat

SEQ ID NO: 50703 - DNA, 80 bp, synthetic construct
  source 1..80: mol_type = other DNA
ccagtaatgaccggtggggcagtatcattgcattcagctggggtaacgctctcaacgcaatttactgattttgtatcatt

SEQ ID NO: 50704 - DNA, 80 bp, synthetic construct
  source 1..80: mol_type = other DNA
aggttagcggtggaagagccaccattcgcgataatgagaacaagagttagtggtttgtatgggctaccagctgcaaaacc

SEQ ID NO: 50705 - DNA, 80 bp, synthetic construct
  source 1..80: mol_type = other DNA
aaataattcacaagaatattatgagatagctggacggttctcactcatttcactagtgccttcgaatgatgactatcaaa

SEQ ID NO: 50706 - DNA, 80 bp, synthetic construct
  source 1..80: mol_type = other DNA
caccaataatgaattcagttacggttagacaagacttggaaagacagcttggggagttaagagatgaattcaacaattta

SEQ ID NO: 50707 - DNA, 80 bp, synthetic construct
  source 1..80: mol_type = other DNA
ggaccaggtgaaactaatgattcaacgacagtagaaccagtgttggatggaccatatcaacctacgactttcaatccgcc

SEQ ID NO: 50708 - DNA, 80 bp, synthetic construct
  source 1..80: mol_type = other DNA
agagtacaatagacgccgctaaatcaatggcgacgaatgtaatgaagagatttaaaaaatcaggactagcaaattcagtc

SEQ ID NO: 50709 - DNA, 80 bp, synthetic construct
  source 1..80: mol_type = other DNA
tctactctaactgactccctgtcagatgcagcgtcatcagtgtctagaagcgcatcaataagatcaataggatcgactac

SEQ ID NO: 50710 - DNA, 80 bp, synthetic construct
  source 1..80: mol_type = other DNA
atcagcatggacagaagtatcaacgacaacttccggtattagtggactaacaaattcgatatcaacccaaacatcaacta

SEQ ID NO: 50711 - DNA, 80 bp, synthetic construct
  source 1..80: mol_type = other DNA
cagccgtattgaaaacaaaaattgacagatcaactcaagtaactccaaatacattaccagagatagtaactgaggcttca

SEQ ID NO: 50712 - DNA, 80 bp, synthetic construct
  source 1..80: mol_type = other DNA
gagaaatttattccaaatagggcgtaccgtgtcattgacaatgatgaagttttagaagctagtacagatggaaagttctt

SEQ ID NO: 50713 - DNA, 80 bp, synthetic construct
  source 1..80: mol_type = other DNA
cgcttatagagtagaaactttcgaggaggtgccatttgacgtacaaaaatttgcagatctagtaactgattcgcctgtta

SEQ ID NO: 50714 - DNA, 80 bp, synthetic construct
  source 1..80: mol_type = other DNA
tatcagcgataattgattttaagacattaaagaatttgaatgataactatggtataagtaaacagcaagcgttgaacctt

SEQ ID NO: 50715 - DNA, 80 bp, synthetic construct
  source 1..80: mol_type = other DNA
ttgcggtctgatccaaaagtattacgtgagttcattaatcaaaacaatccaataatacgaaacagaatagagagtctaat

SEQ ID NO: 50716 - DNA, 80 bp, synthetic construct
  source 1..80: mol_type = other DNA
aaacaatccaataatacgaaacagaatagagagtctaataatgcaatgtagattgtaagcaactgacagaggatgtgacc

SEQ ID NO: 50717 - DNA, 80 bp, synthetic construct
  source 1..80: mol_type = other DNA
tgctacttgcaccaacaaacgctggggtagttgtcgaggggacaaataacacaaacagatggttagcaacaatattaatt

SEQ ID NO: 50718 - DNA, 80 bp, synthetic construct
  source 1..80: mol_type = other DNA
gaaccagacgtacaatcagttgaacgtacatacacactttttggacaacaagtacaattaacggtatcaaatgactctca

SEQ ID NO: 50719 - DNA, 80 bp, synthetic construct
  source 1..80: mol_type = other DNA
gactaagtggaaattcatcgatgtgagtaagcaaacgcaggatggtaactattcacagcatgggccgttactgtcaactc

SEQ ID NO: 50720 - DNA, 80 bp, synthetic construct
  source 1..80: mol_type = other DNA
cgaaattatatggagtaatgaaacatggagggaaaatttatacgtataatggtgagacgccgaacgctaacactggatac

SEQ ID NO: 50721 - DNA, 80 bp, synthetic construct
  source 1..80: mol_type = other DNA
tattctacaacaaactttgatactgtcaacatgactgcattttgtgatttttatataataccattagcgcaagaagcaaa

SEQ ID NO: 50722 - DNA, 80 bp, synthetic construct
  source 1..80: mol_type = other DNA
atgcactgaatacattaataatgggctaccaccaatacaaaatacgagaaatgttgtaccagtgtcaattgcttctagaa

SEQ ID NO: 50723 - DNA, 80 bp, synthetic construct
  source 1..80: mol_type = other DNA
gtatagttcataccaaagcacaggccaatgaagacattgtagtatcaaaaacatcactgtggaaggaaatgcagtacaat

SEQ ID NO: 50724 - DNA, 80 bp, synthetic construct
  source 1..80: mol_type = other DNA
agagatataatcataagatttaagttcgcaaactcgattgtgaaatcaggaggactaggttacaaatggtcagaagtgtc

SEQ ID NO: 50725 - DNA, 80 bp, synthetic construct
  source 1..80: mol_type = other DNA
tgacagcacatacgacatgttcggttaacggcgtaaatgattttaattataatggtgggtcattgccaactgacttcgtt

SEQ ID NO: 50726 - DNA, 80 bp, synthetic construct
  source 1..80: mol_type = other DNA
ggctttaaaatggcttcactcatttatagacagttgcttactaattcatacacagtagaactttcagatgaaatccaaga

SEQ ID NO: 50727 - DNA, 80 bp, synthetic construct
  source 1..80: mol_type = other DNA
agagtacaattgacgcagcgaagtctatggcgacgaatgtaatgaagagatttaaaaagtcaagtctcgctaactcagtg

SEQ ID NO: 50728 - DNA, 80 bp, synthetic construct
  source 1..80: mol_type = other DNA
tcaacgctcactgattcattgtctgatgcagcatcatcaatttctagaaatgcatcggttagatcagttagttcaactgc

SEQ ID NO: 50729 - DNA, 80 bp, synthetic construct
  source 1..80: mol_type = other DNA
gaatgactcaactacagttgaaccagtacttgatggaccatatcaaccaacgacttttaatccacctgtaagttattgga

SEQ ID NO: 50730 - DNA, 80 bp, synthetic construct
  source 1..80: mol_type = other DNA
atcagcttggacggaagtatctaacattacatcagatattaatgtgacaacgagctcgatctctacacagacatcaacaa

SEQ ID NO: 50731 - DNA, 80 bp, synthetic construct
  source 1..80: mol_type = other DNA
aagactcaagacgttaccgttaatccaggaccgttcgcgcaaacaaattacgctccagttaattggggacctggtgaaac

SEQ ID NO: 50732 - DNA, 80 bp, synthetic construct
  source 1..80: mol_type = other DNA
taaggtcattagctgctaatttaaactctgttatatgtactgggggtgattatagctttgcattaccggttggtcaatgg

SEQ ID NO: 50733 - DNA, 80 bp, synthetic construct
  source 1..80: mol_type = other DNA
cagctaacccaaataatggaaaagaatattatgaagtggctggcagattctcactaatatcattggtaccatctaatgac

SEQ ID NO: 50734 - DNA, 80 bp, synthetic construct
  source 1..80: mol_type = other DNA
gattaccagacaccaataactaattcagttacagtcagacaagatttagaacgacagttgggtgaacttagagaagaatt

SEQ ID NO: 50735 - DNA, 80 bp, synthetic construct
  source 1..80: mol_type = other DNA
caacgctctctcacaagagatagccatgtcgcagctaattgatttggcattacttccattggatatgttttcgatgtttt

SEQ ID NO: 50736 - DNA, 80 bp, synthetic construct
  source 1..80: mol_type = other DNA
ggtcctggtgaaactaatgattctactactgtagaaccggtacttgatggtccttatcaaccaacaacgttcaatccacc

SEQ ID NO: 50737 - DNA, 80 bp, synthetic construct
  source 1..80: mol_type = other DNA
agagcaccatagatgcagctaaatcaatggctactagtgtaatgaagaaatttaagaaatcaggtttagctaactctgta

SEQ ID NO: 50738 - DNA, 80 bp, synthetic construct
  source 1..80: mol_type = other DNA
tctacattaacagactcactgtccgacgcagcttcttcaatttcaagaggagcatctattcgttcagttggatcatcagc

SEQ ID NO: 50739 - DNA, 80 bp, synthetic construct
  source 1..80: mol_type = other DNA
cttcaactattagtagacggctacgactaaaagaaatggctacgcaaacagaagggatgaatttcgatgatatatctgct

SEQ ID NO: 50740 - DNA, 80 bp, synthetic construct
  source 1..80: mol_type = other DNA
gcagtattgaagactaaaattgatcgatccactcaaatatctccaaacacattaccagatatagtcactgaagcttcaga

SEQ ID NO: 50741 - DNA, 80 bp, synthetic construct
  source 1..80: mol_type = other DNA
gaagttcattcctaatagagcgtacagagtaataaataatgatgaagtctttgaagcgggaacagatggaagattttttg

SEQ ID NO: 50742 - DNA, 80 bp, synthetic construct
  source 1..80: mol_type = other DNA
cgtatcgtgttgaaacgttcgatgaaataccttttgatgtgcaaaagtttgcagatctagtaactgactctccggtcatc

SEQ ID NO: 50743 - DNA, 80 bp, synthetic construct
  source 1..80: mol_type = other DNA
tcagccataatagactttaagacactaaagaatctaaacgacaattatggtattagtaggcaacaagcatttaatctgct

SEQ ID NO: 50744 - DNA, 80 bp, synthetic construct
  source 1..80: mol_type = other DNA
tacgtgaatttatcaatcaagacaatccaataattcgtaacagaattgaacagttaataatgcagtgtagactgtaagca

SEQ ID NO: 50745 - DNA, 80 bp, synthetic construct
  source 1..80: mol_type = other DNA
tgctattagcacctacagcagctggagtagtagtagaaggtactaataatacagaccgatggctagctacaattttagtt

SEQ ID NO: 50746 - DNA, 80 bp, synthetic construct
  source 1..80: mol_type = other DNA
gagccaaacgtaacatcagaaaccagaagttatacgctatttggaacgcaagagcaaattacaatagctaatgcttccca

SEQ ID NO: 50747 - DNA, 80 bp, synthetic construct
  source 1..80: mol_type = other DNA
aacacaatggaaatttattgatgtcgttaaaactacacaaaatggaagctattcacaatacggaccattacaatctactc

SEQ ID NO: 50748 - DNA, 80 bp, synthetic construct
  source 1..80: mol_type = other DNA
caaaactctatgccgtgatgaaacataatggtaaaatttatacatataatggagaaactccgaatgtgaccactaagtac

SEQ ID NO: 50749 - DNA, 80 bp, synthetic construct
  source 1..80: mol_type = other DNA
tactcaactacaaattatgattcagtaaacatgacagcattttgtgacttttatattatacctagagaagaagaatcaac

SEQ ID NO: 50750 - DNA, 80 bp, synthetic construct
  source 1..80: mol_type = other DNA
atgtaccgagtacattaataacgggttacctccgattcagaatacacgaaacattgttccattggcgctttcagctagaa

SEQ ID NO: 50751 - DNA, 80 bp, synthetic construct
  source 1..80: mol_type = other DNA
atataatatcacatagagctcaagcgaatgaagatatcgttgtgtcaaagacatcactttggaaagagatgcaatacaat

SEQ ID NO: 50752 - DNA, 80 bp, synthetic construct
  source 1..80: mol_type = other DNA
agagacatcacaattcgatttaaattcgcaagttcaattgttaaatccggtgggctaggttataaatggtcagagatttc

SEQ ID NO: 50753 - DNA, 80 bp, synthetic construct
  source 1..80: mol_type = other DNA
tgacagctcacacgacgtgctccgtaaacggaatgaacgattttaatttcaatgggggatcgttaccaacggattttgta

SEQ ID NO: 50754 - DNA, 80 bp, synthetic construct
  source 1..80: mol_type = other DNA
tggtttatgtaagatctttagctgcaaatttaaattctgtgacgtgtgcaggaggtgattataattttgcactaccagtt

SEQ ID NO: 50755 - DNA, 80 bp, synthetic construct
  source 1..80: mol_type = other DNA
ggccaatggccatatatgacaggtggagcagtgtcactacattcagcaggtgttacattatccacacagttcaccgattt

SEQ ID NO: 50756 - DNA, 80 bp, synthetic construct
  source 1..80: mol_type = other DNA
tgtgtctctaaattctttaagatttagattcagattggctgtagaagaaccctcatttgcaattatgagaactagagtta

SEQ ID NO: 50757 - DNA, 80 bp, synthetic construct
  source 1..80: mol_type = other DNA
gtggactgtatggactgcctgcagctaatccaaataacgggagagaatattatgagatagctggcagattttcattaatt

SEQ ID NO: 50758 - DNA, 80 bp, synthetic construct
  source 1..80: mol_type = other DNA
tctttggtaccctctaatgataattatcagacgccaatagctaattcggttacagtcagacaagatctggaacggcaatt

SEQ ID NO: 50759 - DNA, 80 bp, synthetic construct
  source 1..80: mol_type = other DNA
aggtgagcttagagaagaatttaatgctttgtcacaggaaatagcaatgtctcaactaatcgatctagcattacttccat

SEQ ID NO: 50760 - DNA, 80 bp, synthetic construct
  source 1..80: mol_type = other DNA
ctggcattaaaagtaccatcgacgcagctaaatctatagctactaatgtaatgaagaaatttaaaagatcgagtttagcc

SEQ ID NO: 50761 - DNA, 80 bp, synthetic construct
  source 1..80: mol_type = other DNA
agttcagtttctacattaacggactcattgtctgacgccgcctcttcagtatcaagaggatcatctatcagatcagtagg

SEQ ID NO: 50762 - DNA, 80 bp, synthetic construct
  source 1..80: mol_type = other DNA
acgaatgactccacaacaattgaaccggtgttagatggaccatatcaaccaacctcatttaatccaccagtaggttattg

SEQ ID NO: 50763 - DNA, 80 bp, synthetic construct
  source 1..80: mol_type = other DNA
atcatcagtctcagcatggacagacgtgtctatacaaattacagatgtctcatcatcagttagttcaatttcaacacaaa

SEQ ID NO: 50764 - DNA, 80 bp, synthetic construct
  source 1..80: mol_type = other DNA
ctgcagttctgaagactaaaattgataaatcaatccaaatttctccaaccacattaccagacattgttaccgaagcttca

SEQ ID NO: 50765 - DNA, 80 bp, synthetic construct
  source 1..80: mol_type = other DNA
gagaaatttattcctaatagggcatatagagtaattaataacgatgaagtttttgaagctggcacagatggaaggttttt

SEQ ID NO: 50766 - DNA, 80 bp, synthetic construct
  source 1..80: mol_type = other DNA
tgcgtatcgtgttgatacgtttgaagaaataccatttgatgttcaaaaatttgcagacttagtgactgattcaccagtga

SEQ ID NO: 50767 - DNA, 80 bp, synthetic construct
  source 1..80: mol_type = other DNA
tagatttcaagacactgaagaacttaaatgacaattatggtatcggtaaacagcaagcattcaatttactacgatctgac

SEQ ID NO: 50768 - DNA, 80 bp, synthetic construct
  source 1..80: mol_type = other DNA
tgttactttcacctactacagctggagtaatagtagagggaacgaataatacagatcgttggttagctacgatattaata

SEQ ID NO: 50769 - DNA, 80 bp, synthetic construct
  source 1..80: mol_type = other DNA
gaaccgaatgtaacatcacagcaacgaacatatacaatttttggagtacaagaacagattacaatagagaatacttcaca

SEQ ID NO: 50770 - DNA, 80 bp, synthetic construct
  source 1..80: mol_type = other DNA
gacgcaatggagatttgttgatgtatctaaaactacgcagaatggaagttattcacagtatggtccattgttgtctactc

SEQ ID NO: 50771 - DNA, 80 bp, synthetic construct
  source 1..80: mol_type = other DNA
cgaaactgtatgctgtaatgaaatatggtggtagaatccatacatatagtggccaaacgccaaacgcaaccactggctat

SEQ ID NO: 50772 - DNA, 80 bp, synthetic construct
  source 1..80: mol_type = other DNA
tactcagctactaattatgactcagtgaatatgacgactttttgcgatttttatataataccacggtcagaagagtccaa

SEQ ID NO: 50773 - DNA, 80 bp, synthetic construct
  source 1..80: mol_type = other DNA
atgtactgaatatattaacaatggattaccacctattcaaaatacaagaaacatcgttccgttagcgctctcagctagaa

SEQ ID NO: 50774 - DNA, 80 bp, synthetic construct
  source 1..80: mol_type = other DNA
atgtgataccattaaaagctcaatcaaatgaggatatcgttgtctcaaagacgtcactgtggaaggaaatgcaatacaat

SEQ ID NO: 50775 - DNA, 80 bp, synthetic construct
  source 1..80: mol_type = other DNA
agggatataacaataagatttaaatttgcaaattcaattgttaaatctggtggattaggttacaaatggtcagaaatttc

SEQ ID NO: 50776 - DNA, 80 bp, synthetic construct
  source 1..80: mol_type = other DNA
atttaaaccagcgaactatcaatatacatacatgcgagacggtgaagaagtaacagcgcatacaacatgttccgttaatg

SEQ ID NO: 50777 - DNA, 80 bp, synthetic construct
  source 1..80: mol_type = other DNA
cgaaaactcaaaatactactattaacccaggtccatttgcgcaaactggatacgctccagtaaattggggtcccggtgaa

SEQ ID NO: 50778 - DNA, 80 bp, synthetic construct
  source 1..80: mol_type = other DNA
gtatgaacgatttcagttttaatggagggtcgttgccaacagatttcgttatttctagatatgaagtgataaaagagaat

SEQ ID NO: 50779 - DNA, 80 bp, synthetic construct
  source 1..80: mol_type = other DNA
tcaacttcaaatttatcaaatttatctgaagtagaaactacaatacatgttgagttttatataataccaagatcgcaaga

SEQ ID NO: 50780 - DNA, 80 bp, synthetic construct
  source 1..80: mol_type = other DNA
atctaagtgtagtgaatatataaatactggattaccaccaatgcagaatacaaggaatatagttccagttgcgttatcat

SEQ ID NO: 50781 - DNA, 80 bp, synthetic construct
  source 1..80: mol_type = other DNA
ctagatcggtcacttatcaacgtgctcaggttaatgaagatattattgtatcaaaaacatcgttgtggaaggaaatgcaa

SEQ ID NO: 50782 - DNA, 80 bp, synthetic construct
  source 1..80: mol_type = other DNA
atggaaagcagcccattagtgtcctgtgcaatagagtccctgtcctcaccagcaattggctatctcaatgacattaaatt

SEQ ID NO: 50783 - DNA, 80 bp, synthetic construct
  source 1..80: mol_type = other DNA
tgtaactaaaggaggtctaccatcaggaatgcccttcacctcagtcattaactcggtgaaccacatgatatactttgcag

SEQ ID NO: 50784 - DNA, 80 bp, synthetic construct
  source 1..80: mol_type = other DNA
acacctatcaccacatcagcagtcgagctcctttcatcgcctgctcgtggccaccttaatgacatagtcttcatcactaa

SEQ ID NO: 50785 - DNA, 80 bp, synthetic construct
  source 1..80: mol_type = other DNA
agcaacaacaagcagttattcgacataagagaacatacgcacagatggagggcaacgagacagccaaaggaatcaaagcg

SEQ ID NO: 50786 - DNA, 80 bp, synthetic construct
  source 1..80: mol_type = other DNA
aaccgagaggcagagaggataaatgttgagtgcataaagaagttcgggaatatccagtacctgcataaataccaaaggtt

SEQ ID NO: 50787 - DNA, 80 bp, synthetic construct
  source 1..80: mol_type = other DNA
tgaagggccttacaaggtattttttcattggaggcatgtcaaggggataatcattggatccgatatgaaaataagcaaga

SEQ ID NO: 50788 - DNA, 80 bp, synthetic construct
  source 1..80: mol_type = other DNA
tcctgttacatgcagaacaaggtgacttcctgctaccacttgtgttggacattctgtactacacagcatcccttgagcca

SEQ ID NO: 50789 - DNA, 80 bp, synthetic construct
  source 1..80: mol_type = other DNA
ggatttgaaaggtcctatgaccaatttgtggaaaagaagaatctgttctcccacttcttcgcacaccacacttcaaaccc

SEQ ID NO: 50790 - DNA, 80 bp, synthetic construct
  source 1..80: mol_type = other DNA
actggaggtgtacagagtgcttggggttggacccactggtgctctagccaacagtttccattggaaaatagtatcagaag

SEQ ID NO: 50791 - DNA, 80 bp, synthetic construct
  source 1..80: mol_type = other DNA
ggttcttgagcaagattggagaaatggaaacaagtgtacagccatatagtgcgtatgcagcaactcaccaactatctgat

SEQ ID NO: 50792 - DNA, 80 bp, synthetic construct
  source 1..80: mol_type = other DNA
cagctggaagtgttccgcatcagtaaacattccaaacacaagctgatagacccaaacgagttgctggtaccaaaaacacc

SEQ ID NO: 50793 - DNA, 80 bp, synthetic construct
  source 1..80: mol_type = other DNA
gtatacgaccagcaaaaaagaccatgctccacacactcgactggtgtacaatgtgaggaggagttatccactgcaagtac

SEQ ID NO: 50794 - DNA, 80 bp, synthetic construct
  source 1..80: mol_type = other DNA
actcccactcggactggatgctacatcaactgaattagtggatgtgataacaaacccgcttgtcaaagccaagactatgt

SEQ ID NO: 50795 - DNA, 80 bp, synthetic construct
  source 1..80: mol_type = other DNA
ggaccaaactgataacagaccccatgaggtgtaagacttttgtgtcaaatgcaataacagggaatcctgacccctttatg

SEQ ID NO: 50796 - DNA, 80 bp, synthetic construct
  source 1..80: mol_type = other DNA
aagactgtccaacagatcatgcctccacgaagtagggttgccaacaaaagaaggcttgaagaactggtcgaagacgatcc

SEQ ID NO: 50797 - DNA, 80 bp, synthetic construct
  source 1..80: mol_type = other DNA
caattggacaagatccccagagaaaaggttcaaggcggcgtttgatgctgcagtcctgttagcaggcaagccgaagaaac

SEQ ID NO: 50798 - DNA, 80 bp, synthetic construct
  source 1..80: mol_type = other DNA
gccctgctgagggcccacccctgaataaagtagcgatgagctgcttgggcgagacacttgactacagcatgtctggagga

SEQ ID NO: 50799 - DNA, 80 bp, synthetic construct
  source 1..80: mol_type = other DNA
cttgttgtcagtacagggcacaaaatacgtgtgatgagtcagatagtagtggacaactccatcactcctgttgaaggatt

SEQ ID NO: 50800 - DNA, 80 bp, synthetic construct
  source 1..80: mol_type = other DNA
tgtctacactggtgtgtacacagagaagccgaaggacatggaagtgaccactcttgaggatgcgatgaagatgaggctaa

SEQ ID NO: 50801 - DNA, 80 bp, synthetic construct
  source 1..80: mol_type = other DNA
aacgaatttgcctgatgcaacacaaccgatactacgtgctggaagagaaaacatctctgtggagtgcaattgaaaatata

SEQ ID NO: 50802 - DNA, 80 bp, synthetic construct
  source 1..80: mol_type = other DNA
aggacaacaatagaccaccaacaaagcatgataaaggccagccaggtcgacgaggcactgctatcgttgggtgcacccgg

SEQ ID NO: 50803 - DNA, 80 bp, synthetic construct
  source 1..80: mol_type = other DNA
tatcgttgggtgcacccggaccttcctggaagtagggtgtggggatttgcttggtttgaaaaaactgctttgatttctct

SEQ ID NO: 50804 - DNA, 80 bp, synthetic construct
  source 1..80: mol_type = other DNA
tgccaacgctcccagaagtgtacaaaggccacagactgtgcaagagggaggtagatattggagaatctaaaagaatcctc

SEQ ID NO: 50805 - DNA, 80 bp, synthetic construct
  source 1..80: mol_type = other DNA
ggcacaatctactgtcctgattactggatgtcccaaggtgaacctacgagcaaggaaattgcagaatccttgatcgggcc

SEQ ID NO: 50806 - DNA, 80 bp, synthetic construct
  source 1..80: mol_type = other DNA
agaaatggataaggtagataggttcttccaagccagttggggcgacctgcagtatggacatttactgccttaccggaaac

SEQ ID NO: 50807 - DNA, 80 bp, synthetic construct
  source 1..80: mol_type = other DNA
cagtatctattgtaccagtgattcaagaagtcacacctggatccattgcaccaacccttgagcaagtcttttgtccacag

SEQ ID NO: 50808 - DNA, 80 bp, synthetic construct
  source 1..80: mol_type = other DNA
ttcagcaccatagatgctgccggtaggtccaacagagaggctgtagagaagatcaccaagaagatccggcctctcctatc

SEQ ID NO: 50809 - DNA, 80 bp, synthetic construct
  source 1..80: mol_type = other DNA
attgaagagcactcctgcactcatacacctagcccgaggactcatcactcaaagaaagaaatgggtccctgtcactatcg

SEQ ID NO: 50810 - DNA, 80 bp, synthetic construct
  source 1..80: mol_type = other DNA
atactaaccccagcacagcagagctgtctcacttcctgtacagcagttaccaccatcttccagtttcaaaggtgcacaca

SEQ ID NO: 50811 - DNA, 80 bp, synthetic construct
  source 1..80: mol_type = other DNA
cttataaagaagtacaaagaactgtcaaatgaacctctctttcaagagaaaagaatttgggagtatgacacgttcaaaag

SEQ ID NO: 50812 - DNA, 80 bp, synthetic construct
  source 1..80: mol_type = other DNA
atagaaactgcgtcgatagaaagactgtgcggagaaatcgttcagtgggcactgaagacgtgggaaccaaagaagaagct

SEQ ID NO: 50813 - DNA, 80 bp, synthetic construct
  source 1..80: mol_type = other DNA
actggaattgctggaaaagataactgtaaaagggaccagcttgtcctcaatactggaatcactggactccgacaagcaat

SEQ ID NO: 50814 - DNA, 80 bp, synthetic construct
  source 1..80: mol_type = other DNA
acacaagcatctgcaaagttgccctaggaattcctattcacctggtgaatcagatcagagaaactaggtttgtaataatg

SEQ ID NO: 50815 - DNA, 80 bp, synthetic construct
  source 1..80: mol_type = other DNA
accctaccatcttgccaatacgatggtaatacaatatcaggttaccaaagaatgattgccacaaaggactcatttcagtc

SEQ ID NO: 50816 - DNA, 80 bp, synthetic construct
  source 1..80: mol_type = other DNA
atctaattgttaatcgtgatctctcatttcaagatttggctgaaaatccatgccaagtggacttaagtgtttcgtcaatt

SEQ ID NO: 50817 - DNA, 80 bp, synthetic construct
  source 1..80: mol_type = other DNA
catgatgattccaaagatgagtatgagaacgcattcttaatttctaatctcactacacataatatattatatttaaatta

SEQ ID NO: 50818 - DNA, 80 bp, synthetic construct
  source 1..80: mol_type = other DNA
taattagatgtaactttacatatgattatattgatgatgttgtttatttacatgactattcatattatactaataatgaa

SEQ ID NO: 50819 - DNA, 80 bp, synthetic construct
  source 1..80: mol_type = other DNA
atacggactgaccaacattggataactaagacaaatatagaagattatttattgcctggatggaagctgacatacgttgg

SEQ ID NO: 50820 - DNA, 80 bp, synthetic construct
  source 1..80: mol_type = other DNA
taatgtaaaaacgctacaaatattaaataaatctggtatagctgcaatagaaatacagaagatagatgagttattcacgt

SEQ ID NO: 50821 - DNA, 80 bp, synthetic construct
  source 1..80: mol_type = other DNA
taactttgcaactaccccagtctgtgaatatgatggaaacatggtctcgggttacaagaaagtcatggctacaattgatt

SEQ ID NO: 50822 - DNA, 80 bp, synthetic construct
  source 1..80: mol_type = other DNA
accacatcaatatcttggttacaaaggatattgactttgacaatcttggtgacaatccctgtaaagttgggctacagaca

SEQ ID NO: 50823 - DNA, 80 bp, synthetic construct
  source 1..80: mol_type = other DNA
tatctatgttgcaggaatggcagagttaggagcgttcttttctatcctgcaggatatgaggaacaccataatggcatcta

SEQ ID NO: 50824 - DNA, 80 bp, synthetic construct
  source 1..80: mol_type = other DNA
ggatccaacttgaccaaaggataatcctgttatacatgcttgagtggggagaagagatggtggatcactttcatctcggg

SEQ ID NO: 50825 - DNA, 80 bp, synthetic construct
  source 1..80: mol_type = other DNA
aacaacagtcggccgccagtttgatggaaatactatttcaggatatttgaggatgatagccacaaaagattcatttcaat

SEQ ID NO: 50826 - DNA, 80 bp, synthetic construct
  source 1..80: mol_type = other DNA
tcaatgtagttgttgggagagatctcccgtttcaagatttgagtgaaaccccatgtcaaattgacctatcctcatcttca

SEQ ID NO: 50827 - DNA, 80 bp, synthetic construct
  source 1..80: mol_type = other DNA
ttaatgtggtagttgggagggaccttccctttcaagatttgagtgagacaccatgccagattgatctatccacatcttct

SEQ ID NO: 50828 - DNA, 80 bp, synthetic construct
  source 1..80: mol_type = other DNA
tttgtttgttggagggatggctgagttaggtgccttcttttctatacttcaggatatgaggaacacaatcatggcctcaa

SEQ ID NO: 50829 - DNA, 80 bp, synthetic construct
  source 1..80: mol_type = other DNA
gaatacaactggaccagaggataattgttatgtttatggttgcctggggaaaggaggcagtggacaactttcatctcggt

SEQ ID NO: 50830 - DNA, 80 bp, synthetic construct
  source 1..80: mol_type = other DNA
aatgttattgttgggcgtgatctctcgttccaagatctaagtgaaacaccatgtcaggtcgatttaagtgtttcatctat

SEQ ID NO: 50831 - DNA, 80 bp, synthetic construct
  source 1..80: mol_type = other DNA
ccttcaatgttacagaacctcatatttcagcaagtgcccttgagtggattgacccagacagctctttgagagatcatatt

SEQ ID NO: 50832 - DNA, 80 bp, synthetic construct
  source 1..80: mol_type = other DNA
caccacaccggtttgccaatttgatggtaacacaatttcaggctaccagcgcatgatcgcaaccaaagattcattccagt

SEQ ID NO: 50833 - DNA, 80 bp, synthetic construct
  source 1..80: mol_type = other DNA
cattcaatgtgacagaaccacatatctctgcaagtgcacttgagtgggtagaccctgatagttccctgagggaccatatt

SEQ ID NO: 50834 - DNA, 80 bp, synthetic construct
  source 1..80: mol_type = other DNA
aatgtagttgtaagtcgtgatctatctttccaggatcttagtgagacaccttgtcaagtggatttaacaacttcaactat

SEQ ID NO: 50835 - DNA, 80 bp, synthetic construct
  source 1..80: mol_type = other DNA
cttttaatgtgacagaacctcatatttccgccagtgcattggaatggatagatcctgatagctcactacgagaccacatc

SEQ ID NO: 50836 - DNA, 80 bp, synthetic construct
  source 1..80: mol_type = other DNA
gcatgaaagtattagctttaagacacagtgtggctcaggtatatgcagatacgcaaacctatttacacgatgattcaaaa

SEQ ID NO: 50837 - DNA, 80 bp, synthetic construct
  source 1..80: mol_type = other DNA
gcgtgttttacgctttcataaacaatgtaactacggaaaatgtgtttatacaacctccttttaaattaaaaacatcatcc

SEQ ID NO: 50838 - DNA, 80 bp, synthetic construct
  source 1..80: mol_type = other DNA
aatgattacatagttgcattatatgctttatcaaatgatttcaatccaagaaaagatgttattaatttaattaatcaaca

SEQ ID NO: 50839 - DNA, 80 bp, synthetic construct
  source 1..80: mol_type = other DNA
acatttttagagatctttcaaataataatttcaacttgataggtactaacgtagagaattccgtttcaggacatgtctat

SEQ ID NO: 50840 - DNA, 80 bp, synthetic construct
  source 1..80: mol_type = other DNA
acgtgttctataggaatcatattacgtttgggcaatcacgaatgttcattcctcatattacactcagtttcagcaataaa

SEQ ID NO: 50841 - DNA, 80 bp, synthetic construct
  source 1..80: mol_type = other DNA
catttctcatttctaatctaactacgcataacatattgtatttgaattacagtgttaaaacattgaaaatactaaataaa

SEQ ID NO: 50842 - DNA, 80 bp, synthetic construct
  source 1..80: mol_type = other DNA
cacaactccttcctgccaatatgatggaaatactatttcaggttataagaggatgatagctacgaaagattcctttcagt

SEQ ID NO: 50843 - DNA, 80 bp, synthetic construct
  source 1..80: mol_type = other DNA
tgtgatagtaaacagggacatttcattccaggatctaagtgaaaatccatgtcaaattgatcttagtactacctctatag

SEQ ID NO: 50844 - DNA, 80 bp, synthetic construct
  source 1..80: mol_type = other DNA
cacatatcactgcaaattcacttgagtgggtagacccagatagctcattacgagatcacataaatgtgatagtaaacagg

SEQ ID NO: 50845 - DNA, 80 bp, synthetic construct
  source 1..80: mol_type = other DNA
gcagatacgcaaacttacttgcatgacgattcgaaagatgagtatgaaaatgcatttctcatttctaatctaactacaca

SEQ ID NO: 50846 - DNA, 80 bp, synthetic construct
  source 1..80: mol_type = other DNA
cacatattacactgagttttagtaataaacaaacagttagaatagaaagcacaagactaaagatcaattcaatttactta

SEQ ID NO: 50847 - DNA, 80 bp, synthetic construct
  source 1..80: mol_type = other DNA
ggtgtatgcagacactcagatgtacacacatgatgattctaaagatgagtatgagaatgcattcttaatttctaatctca

SEQ ID NO: 50848 - DNA, 80 bp, synthetic construct
  source 1..80: mol_type = other DNA
agactggaaggaatggcgaagaatagtagaaaggcaaactattgacaatttgcatattgcatacaaatacctatctacag

SEQ ID NO: 50849 - DNA, 80 bp, synthetic construct
  source 1..80: mol_type = other DNA
atacagaagatagatgagttattcacgttaattagatgtaactttacatatgattacattgataatgttgtttacttaca

SEQ ID NO: 50850 - DNA, 80 bp, synthetic construct
  source 1..80: mol_type = other DNA
ttattcctcatgtaacgttgagttttagtaatgagaaaacggtgagaatagacactacaaaactgtacatagattctatt

SEQ ID NO: 50851 - DNA, 80 bp, synthetic construct
  source 1..80: mol_type = other DNA
ctacacataacatattatatttaaattacaatgtaaaaacgctacaaatattaaataaatctggcatagctgcaatagag

SEQ ID NO: 50852 - DNA, 80 bp, synthetic construct
  source 1..80: mol_type = other DNA
gtcactccgtgtttcagagcgccggggaaaggaagatgtgcacgactctggatttgatgtttcatcagttgttcttgttg

SEQ ID NO: 50853 - DNA, 80 bp, synthetic construct
  source 1..80: mol_type = other DNA
tcgacaggcgacgtctggcttggagctctggtgattcatgatccacggagtcacgtttccaagacaatgaagagcgtcaa

SEQ ID NO: 50854 - DNA, 80 bp, synthetic construct
  source 1..80: mol_type = other DNA
actgcttgtgtggggtgtgaaaatcaattgttggtgtaatctgacgcaggggttcagtctgtgttcggatgcatgcagtc

SEQ ID NO: 50855 - DNA, 80 bp, synthetic construct
  source 1..80: mol_type = other DNA
gcttctttgaaaccgcttgtttccgatggagctgctagtgtgaatcatgggccgtctgttgtcggtgccaattttgagcc

SEQ ID NO: 50856 - DNA, 80 bp, synthetic construct
  source 1..80: mol_type = other DNA
gccttccacttccaactgcaaccctgacgatggtggatcaaccccagttgatgcagttgagcttcgttctgcgacagacg

SEQ ID NO: 50857 - DNA, 80 bp, synthetic construct
  source 1..80: mol_type = other DNA
tgcctgagaatgatcatgctttgaggcttcttgaggagatagctcgcagtcatctccctggccaccagcagacccataac

SEQ ID NO: 50858 - DNA, 80 bp, synthetic construct
  source 1..80: mol_type = other DNA
aagcactcttgaaaacttagctgcaggtgagattactgcctgagccggtgggtaatacggtttgatccttgagctataag

SEQ ID NO: 50859 - DNA, 80 bp, synthetic construct
  source 1..80: mol_type = other DNA
cagactgtacttgctcatttatagacagcttctcactaattcatattcagtagatttatatgatgaaatagagcaaattg

SEQ ID NO: 50860 - DNA, 80 bp, synthetic construct
  source 1..80: mol_type = other DNA
tttggttacaaaggatattgattttgacaaccttggtgataatccatgcaaagtagggctacagacatcagctattgaag

SEQ ID NO: 50861 - DNA, 80 bp, synthetic construct
  source 1..80: mol_type = other DNA
cagattggaaaacgtggaggaagattgtagaagagcagaccgttaacaatttgaatatcgcatacaaatatttatccaca

SEQ ID NO: 50862 - DNA, 80 bp, synthetic construct
  source 1..80: mol_type = other DNA
ggaaagctaaagtatgttgtgttaaaatgactgctatggatttagaactaccgatatctgcgaaactactacaccaccca

SEQ ID NO: 50863 - DNA, 80 bp, synthetic construct
  source 1..80: mol_type = other DNA
ttagatcagaattttatttaataatggatatatgggactctaaaaatattaaacgatttataccgaaaggtgtgttatat

SEQ ID NO: 50864 - DNA, 80 bp, synthetic construct
  source 1..80: mol_type = other DNA
tcatacataaacaatataattaccgaaaacgtgtttatacaacaaccgtttaaattgaaaacattaaggaatgagtatgt

SEQ ID NO: 50865 - DNA, 80 bp, synthetic construct
  source 1..80: mol_type = other DNA
ggttgcattgtacgcgctgtctaacgattttaacaatagagaggacgtaattaaattgattaataatcagaagaatgcgc

SEQ ID NO: 50866 - DNA, 80 bp, synthetic construct
  source 1..80: mol_type = other DNA
taataactgtaagaattaataatacatttaaagatgaaccaaaagtagggttcaaagatatttatgattggactttttta

SEQ ID NO: 50867 - DNA, 80 bp, synthetic construct
  source 1..80: mol_type = other DNA
aatacgattttcggaatcagcgacttcgtattcaggttacatttttagagatttatcaaataacaattttaatttaatag

SEQ ID NO: 50868 - DNA, 80 bp, synthetic construct
  source 1..80: mol_type = other DNA
gtacgaatgttgagaattcggtatctggacatgtgtataatgcattgatttattatagatataattattcatttgatctt

SEQ ID NO: 50869 - DNA, 80 bp, synthetic construct
  source 1..80: mol_type = other DNA
aatttacgcatgtagatcggcaagggaattcgcaaagttgcaagacgacttgacggtattaagatattcaaatgagatag

SEQ ID NO: 50870 - DNA, 80 bp, synthetic construct
  source 1..80: mol_type = other DNA
ccatatgaatatgatgttaaagcaccacatcttacatttggcgtattaaatatttcagattctatggtgccggatgtagt

SEQ ID NO: 50871 - DNA, 80 bp, synthetic construct
  source 1..80: mol_type = other DNA
tctatgtagcaaacataagcggcgtgttatcaacatattttaagctttacaatgcattctataaagagcaaattacgttc

SEQ ID NO: 50872 - DNA, 80 bp, synthetic construct
  source 1..80: mol_type = other DNA
tccacacataacactaagtttcagtaacaagaaagtagtgagaatagatagtacgcgattgaacatagactttatatatt

SEQ ID NO: 50873 - DNA, 80 bp, synthetic construct
  source 1..80: mol_type = other DNA
agagacaaattatttaagacattagtatcagatcatagtaaaatagttaatgttggaccaaggaatgaatctatgttcac

SEQ ID NO: 50874 - DNA, 80 bp, synthetic construct
  source 1..80: mol_type = other DNA
ttttctagatcatccatcaataaagcagttttcaaacgggccctatttagttaaggatacgataaaacttaaacaagaga

SEQ ID NO: 50875 - DNA, 80 bp, synthetic construct
  source 1..80: mol_type = other DNA
ccttatatcaatactatgacatgtatcatgagaagccaataatctacatgttaggatcagcaccttcatattggatatac

SEQ ID NO: 50876 - DNA, 80 bp, synthetic construct
  source 1..80: mol_type = other DNA
gatgtaaaacagtactctaatctaaaatttgagacatgggacccattggatacaccatactctgatttacatcataaaga

SEQ ID NO: 50877 - DNA, 80 bp, synthetic construct
  source 1..80: mol_type = other DNA
accgttttatataagtaatgtaaccaaacttaaagataattcgatattatatatagatatacgaacggacagagaaaatg

SEQ ID NO: 50878 - DNA, 80 bp, synthetic construct
  source 1..80: mol_type = other DNA
ttagtgtttgagatggagggcaatggcttccccccaagtcagaaaaatggtccaggagttagccaggaagttgacccacc

SEQ ID NO: 50879 - DNA, 80 bp, synthetic construct
  source 1..80: mol_type = other DNA
ttgctactggatccatccaatcgaacatccctgacgcaatacgcaactgctttgcagtccatcgcacttttgcttgggaa

SEQ ID NO: 50880 - DNA, 80 bp, synthetic construct
  source 1..80: mol_type = other DNA
catgatgattcaaaagatgagtatgagaatgcatttctcatttctaatctcactacacataatatattatacctgaatta

SEQ ID NO: 50881 - DNA, 80 bp, synthetic construct
  source 1..80: mol_type = other DNA
caatcttaaaacattaaaaatattaaataaatcaggtatagcagcagttgaagtacaatctccagatgaattatttgcgt

SEQ ID NO: 50882 - DNA, 80 bp, synthetic construct
  source 1..80: mol_type = other DNA
cagttagaatagaaagtacaagactcaaaatcaattcaatttacttaaaaaagattaaaggggagaccgtatttgatatg

SEQ ID NO: 50883 - DNA, 80 bp, synthetic construct
  source 1..80: mol_type = other DNA
tatgccgaagccgcacaagatgcgcaagaaatttcctaaggttttaagatcagaactgcaagttctaataatgaataaag

SEQ ID NO: 50884 - DNA, 80 bp, synthetic construct
  source 1..80: mol_type = other DNA
tttaatccattcacaggaagaccaaccaaagacttgcaagtggtaattagttgctgctataatggctacctcaaaaacaa

SEQ ID NO: 50885 - DNA, 80 bp, synthetic construct
  source 1..80: mol_type = other DNA
gcaggtaccgcaaccctttgactttagagcgtcaatgcatatgttaacgtctaacctcacctttactgtttattccgatt

SEQ ID NO: 50886 - DNA, 80 bp, synthetic construct
  source 1..80: mol_type = other DNA
acaaacagttagaatagaaagcacaagactaaagatcaattcaatttacttaagaaagattaaaggggagaccgtatttg

SEQ ID NO: 50887 - DNA, 80 bp, synthetic construct
  source 1..80: mol_type = other DNA
atggagggcaatggctcccaacaaggggcacgaccaaaaagtccacctcaaagtgctgaccttcctggcacggttggccc

SEQ ID NO: 50888 - DNA, 80 bp, synthetic construct
  source 1..80: mol_type = other DNA
aaccacatccaacattgttgtggctaatccggaacaacccaatgggaccgcacaacgcttggagatggctgttgccactg

SEQ ID NO: 50889 - DNA, 80 bp, synthetic construct
  source 1..80: mol_type = other DNA
tgcccacggcaacttttcttggatctatatcgcttcatcccaacattaacccgtacactgctcacctctctgggacatgg

SEQ ID NO: 50890 - DNA, 80 bp, synthetic construct
  source 1..80: mol_type = other DNA
ctatatcgcttcatctcaacattaacccgtacactgctcacctctctgggacatgggccgggtgggggggtacttttgca

SEQ ID NO: 50891 - DNA, 80 bp, synthetic construct
  source 1..80: mol_type = other DNA
agacacagtgtggctcaggtgtatgcagatacgcaaacttacttgcatgacgattcaaaagatgagtatgaaaatgcatt

SEQ ID NO: 50892 - DNA, 80 bp, synthetic construct
  source 1..80: mol_type = other DNA
atgaaagtattagctttaagacatagtgtggctcaggtgtatgcggacactcaaatatatattcatgatgaaactaaaga

SEQ ID NO: 50893 - DNA, 80 bp, synthetic construct
  source 1..80: mol_type = other DNA
tagatagtacgcgattgaacatagactttatatatttgaggaaaataaaaggcgatacagtgttcgatatggctgagtga

SEQ ID NO: 50894 - DNA, 80 bp, synthetic construct
  source 1..80: mol_type = other DNA
gctgagccccacccaatcgtgtcttgtgccattgaggcgctttcctcccctgcagagggttacgtcaatgatatcaagtt

SEQ ID NO: 50895 - DNA, 80 bp, synthetic construct
  source 1..80: mol_type = other DNA
caggcatacgagagccatagtgtcccgtacactggaaatgttttccaagtggaaactgtccacacgtatggtgatgattg

SEQ ID NO: 50896 - DNA, 80 bp, synthetic construct
  source 1..80: mol_type = other DNA
cagagtatatcttcacaaacctgagatacacactcttggattgttttgtttcacaaccatctctgccaaacccacacaat

SEQ ID NO: 50897 - DNA, 80 bp, synthetic construct
  source 1..80: mol_type = other DNA
ttcacaaacctgagatacacactcttggattgttttgtttcacaaccatctctgccaaacccacacaatattatttataa

SEQ ID NO: 50898 - DNA, 80 bp, synthetic construct
  source 1..80: mol_type = other DNA
acctaattatgcctccatttcttctgtgtcgaagatgatgaatatttgcctgttggtaatgctagaagacaagcccagga

SEQ ID NO: 50899 - DNA, 80 bp, synthetic construct
  source 1..80: mol_type = other DNA
gaagatttgcctgatggtaatgctagaggacaaggccaggacagaggagatctgcactaacctgagatacacactcttgg

SEQ ID NO: 50900 - DNA, 80 bp, synthetic construct
  source 1..80: mol_type = other DNA
ttctggagagagcagtataacatccagccctgggaaaccttgcctaatgaggcctccatggcttctgtgtcgaagatgat

SEQ ID NO: 50901 - DNA, 80 bp, synthetic construct
  source 1..80: mol_type = other DNA
aggggtttgtgtctgagccatgtctgccaaagccacacaagatgatcgagaaacttcctgagtttgcgagaaccaaactc

SEQ ID NO: 50902 - DNA, 80 bp, synthetic construct
  source 1..80: mol_type = other DNA
tctgagccatgtctgccaaagccacacaagatgatcgagaaacttcctgagtttgcgagaaccaaactccaggtctggct

SEQ ID NO: 50903 - DNA, 80 bp, synthetic construct
  source 1..80: mol_type = other DNA
gaagatttgcctgatggttatgctggaggacaaggccagaacagaagagatctgcacgaacttgagatacacgctcctgg

SEQ ID NO: 50904 - DNA, 80 bp, synthetic construct
  source 1..80: mol_type = other DNA
cttgtccgatgctcctccaccatgagcaatttctattgcttctggaaagagcagtttaacattcagccttgcgaaacctt

SEQ ID NO: 50905 - DNA, 80 bp, synthetic construct
  source 1..80: mol_type = other DNA
cagagcagatctgcacaaacctgagatacacactcttgcacggttttctctcaaaaccatatctacaaaagccacaaaaa

SEQ ID NO: 50906 - DNA, 80 bp, synthetic construct
  source 1..80: mol_type = other DNA
tgcacaaacctgagatacacactcttgcacggttttctctcaaaaccatatctacaaaagccacaaaaaatggttggaga

SEQ ID NO: 50907 - DNA, 80 bp, synthetic construct
  source 1..80: mol_type = other DNA
acctaatgttgccgccatggcttctgtgtcgacgatgatgaagatttacctaatggtaatgctagaagacaatgccagga

SEQ ID NO: 50908 - DNA, 80 bp, synthetic construct
  source 1..80: mol_type = other DNA
gcctaatgaggccgccatggcttctgtatcgaagatgatgaagatttgcctgatggttatgctagaagacaaggccagga

SEQ ID NO: 50909 - DNA, 80 bp, synthetic construct
  source 1..80: mol_type = other DNA
cttgtccgatgctcctccaccatgagcaacctctattggttctggagagagcagtataacatcccgccctgggaaacctt

SEQ ID NO: 50910 - DNA, 80 bp, synthetic construct
  source 1..80: mol_type = other DNA
cagaacagatctacacgaacttcagatacaagcacctgcagctgcatgtgcctaaaccatctctcccaaacacacacaat

SEQ ID NO: 50911 - DNA, 80 bp, synthetic construct
  source 1..80: mol_type = other DNA
tacacgaacttcagatacaagcacctgcagctgcatgtgcctaaaccatctctcccaaacacacacaatatgatagagaa

SEQ ID NO: 50912 - DNA, 80 bp, synthetic construct
  source 1..80: mol_type = other DNA
gcctaatgaggcctccatgccttctgtgtcgaagatgatcaagatttgcctgatgtttatgctggaggacaaggccagaa

SEQ ID NO: 50913 - DNA, 80 bp, synthetic construct
  source 1..80: mol_type = other DNA
cagaggagatctgcacaaacctgagatacacactcttggaggggtttgtgtcagaaccaagtctgccaaagccacacaag

SEQ ID NO: 50914 - DNA, 80 bp, synthetic construct
  source 1..80: mol_type = other DNA
tgcacaaacctgagatacacactcttggaggggtttgtgtcagaaccaagtctgccaaagccacacaagatgatcgagaa

SEQ ID NO: 50915 - DNA, 80 bp, synthetic construct
  source 1..80: mol_type = other DNA
tagctttaagacatagtgtggctcaggtatatgcggacactcaaacatatactcatgatgaaattaaggatgattacgag

SEQ ID NO: 50916 - DNA, 80 bp, synthetic construct
  source 1..80: mol_type = other DNA
aagtggaggaaaattgtggaagagcagaccgtcaataatttgaatatcgcatacaaatacttatccacaggaaaagctaa

SEQ ID NO: 50917 - DNA, 80 bp, synthetic construct
  source 1..80: mol_type = other DNA
gcgtattatactcatatataaataatgtaattactgagaacgtgttcatacaacaaccattcaaattgaaaacagtaagg

SEQ ID NO: 50918 - DNA, 80 bp, synthetic construct
  source 1..80: mol_type = other DNA
aatgagtatgtggttgcattatacgcgttgtctaacgactttaacaatagagaggatgtaataaaattgattaacaatca

SEQ ID NO: 50919 - DNA, 80 bp, synthetic construct
  source 1..80: mol_type = other DNA
gaaaaatgcgttaataactgtgaggatcaataacacatttaaagatgaaccaaaagtggggtttaaagatatttatgact

SEQ ID NO: 50920 - DNA, 80 bp, synthetic construct
  source 1..80: mol_type = other DNA
caatatcattagcttcaaaaccaactggaaataatcatctgttcatcttgagcggtactgataaatattttaaattggat

SEQ ID NO: 50921 - DNA, 80 bp, synthetic construct
  source 1..80: mol_type = other DNA
aatctggtatagctgcggtggaaatacagaggatggatgaattgtttacgctgattagatgcaatttcacatatgattat

SEQ ID NO: 50922 - DNA, 80 bp, synthetic construct
  source 1..80: mol_type = other DNA
aagcgatggatatacttacattcaacaaacaaggctatcattgaaggcggcagatactatgaacacgctccgatagagtt

SEQ ID NO: 50923 - DNA, 80 bp, synthetic construct
  source 1..80: mol_type = other DNA
gatttacgcatgtagatcggcaagggagttcgcaaaattgcaagacgatttaacggtcctaagatattcaaatgaaatag

SEQ ID NO: 50924 - DNA, 80 bp, synthetic construct
  source 1..80: mol_type = other DNA
aaaactacatcaataaagtgtacagtataacatacgccgacgatccgaactattttattggaattaagttcaaaaatata

SEQ ID NO: 50925 - DNA, 80 bp, synthetic construct
  source 1..80: mol_type = other DNA
agtaattttaaagaagtttaaaagtgaattgtttagaatggatgtaaccacgagttatacgtatatgttgtcagacgaaa

SEQ ID NO: 50926 - DNA, 80 bp, synthetic construct
  source 1..80: mol_type = other DNA
ggacaatcaagaatgtttattccgcacataacgttaagtttcagtaacaagaaagtagtgagaatagatagtacgcgatt

SEQ ID NO: 50927 - DNA, 80 bp, synthetic construct
  source 1..80: mol_type = other DNA
attgacgacattgtttaccttcatgattattcatattatactaataatgagataaggactgatcaacattgggtaactaa

SEQ ID NO: 50928 - DNA, 80 bp, synthetic construct
  source 1..80: mol_type = other DNA
attgaacatagattttatatatttgaggaaaataaaaggcgatacagtgttcgatatgactgagtgagctagaaacttaa

SEQ ID NO: 50929 - DNA, 80 bp, synthetic construct
  source 1..80: mol_type = other DNA
aacaaatatagaagactatttactaccaggatggaaactgacgtatgttggatataacggaagtgacacaagagggcatt

SEQ ID NO: 50930 - DNA, 80 bp, synthetic construct
  source 1..80: mol_type = other DNA
tccagaatttcatacttaaaaagatcaaggaaaggatgacaacatcgctgccaatagcgagattatcaaatcgtgtgttc

SEQ ID NO: 50931 - DNA, 80 bp, synthetic construct
  source 1..80: mol_type = other DNA
agagacaaattgtttaggacattagtgtcagatcatagtagagtagttaacgttggaccaaggaatgagtctatgtttac

SEQ ID NO: 50932 - DNA, 80 bp, synthetic construct
  source 1..80: mol_type = other DNA
ttttctagatcatccgtcaataaagcagtattcaaacggaccttatctagttaaagacacaataaaacttaaacaagaga

SEQ ID NO: 50933 - DNA, 80 bp, synthetic construct
  source 1..80: mol_type = other DNA
tactatgacatgtatcatgagaagccaataatttacatggtaggatcggcaccttcatattggatacatgatgtcaaaca

SEQ ID NO: 50934 - DNA, 80 bp, synthetic construct
  source 1..80: mol_type = other DNA
atactctaatttaaagtttgagacgtgggacccattggatacgccatactctgatttgcatcataaagaactatttcaca

SEQ ID NO: 50935 - DNA, 80 bp, synthetic construct
  source 1..80: mol_type = other DNA
tgagtgacgtaaacaaacttaaagataattcgatattatatgtagatatacgaacggatagagaagatacagattggaaa

SEQ ID NO: 50936 - DNA, 80 bp, synthetic construct
  source 1..80: mol_type = other DNA
tgcatatgttaacttcgaatcttacttttacggtttattcagatcttctcgcgttcgtatcagctgacacagtgaaccta

SEQ ID NO: 50937 - DNA, 80 bp, synthetic construct
  source 1..80: mol_type = other DNA
atgcagtgcgtcagtgctttgcactccttcgcacatttccttggaacactcgacaggccacaggcacccatccgggatct

SEQ ID NO: 50938 - DNA, 80 bp, synthetic construct
  source 1..80: mol_type = other DNA
tcaacggcaactatgaggatgaccccgaggacaccccacgggttaggtacatcaagtggtgtggcagggccaaccgcagg

SEQ ID NO: 50939 - DNA, 80 bp, synthetic construct
  source 1..80: mol_type = other DNA
aggagcagaccctgctagcatgccagccggctttgtggaaggcctgcagtgggccatggatgcaatggacaatgcatcaa

SEQ ID NO: 50940 - DNA, 80 bp, synthetic construct
  source 1..80: mol_type = other DNA
gtgggccatggatgcaatggacaatgcatcaacgccagtgcctcgggagacaatcctgcgtctcatcaggcggtccttcc

SEQ ID NO: 50941 - DNA, 80 bp, synthetic construct
  source 1..80: mol_type = other DNA
tgcaatggacaatgcatcaacgccagtgcctcgggagacaatcctgcgtctcatcaggcggtccttccaatacaagccag

SEQ ID NO: 50942 - DNA, 80 bp, synthetic construct
  source 1..80: mol_type = other DNA
gcctcggtgagggaggtgctgggccccgaagcaggagcagaccctgctagcatgccagccggctttgtggaaggcctgca

SEQ ID NO: 50943 - DNA, 80 bp, synthetic construct
  source 1..80: mol_type = other DNA
gaggacctgtagactggaaggaatggcgaaaaatagtagaaaggcaaactattgataatttacatattgcatacaaatat

SEQ ID NO: 50944 - DNA, 80 bp, synthetic construct
  source 1..80: mol_type = other DNA
tctggtatagctgcaatagagatacagaatatggatgaattattcacgttaattagatgtaactttacatatgattacat

SEQ ID NO: 50945 - DNA, 80 bp, synthetic construct
  source 1..80: mol_type = other DNA
tacaaaactgtacatagattctatttacttaagaaaaataaaaggtaacacggtgtttgatatgactgggtgagctaaaa

SEQ ID NO: 50946 - DNA, 80 bp, synthetic construct
  source 1..80: mol_type = other DNA
caacaggaggaactaactacgctcaatcggtaactgcagttctagaagaatcatttattaatttacagaatcaagttaat

SEQ ID NO: 50947 - DNA, 80 bp, synthetic construct
  source 1..80: mol_type = other DNA
ccaaaatcaattatggaatttaatcaagtatctaatactatcagtatattagattcaacaaagaaattagcgcaatatgc

SEQ ID NO: 50948 - DNA, 80 bp, synthetic construct
  source 1..80: mol_type = other DNA
gatgttatagatggtatattaaataaaatggtgggcggacatgccagatcattattttcacttaaagttagaaaacattt

SEQ ID NO: 50949 - DNA, 80 bp, synthetic construct
  source 1..80: mol_type = other DNA
aacaaataatctatcttcacaaaaacaatttgaattagcaaaagaatttcgtgatctgttaatcaacgctcttgcttaga

SEQ ID NO: 50950 - DNA, 80 bp, synthetic construct
  source 1..80: mol_type = other DNA
ttgaattagcaaaagaatttcgtgatctgttaatcaacgctcttgcttagatgatatgaaagagatctttaaatataccc

SEQ ID NO: 50951 - DNA, 80 bp, synthetic construct
  source 1..80: mol_type = other DNA
ctctgatggtgtaagcatgaaagtattagctttaagacacagtgtggctcaggtgtatgcagatacgcaaacttacttgc

SEQ ID NO: 50952 - DNA, 80 bp, synthetic construct
  source 1..80: mol_type = other DNA
agaaaatacaagactcaaaatcaattcaatttacttaagaaagattaaaggggagaccgtatttgatatgtctgagtgag

SEQ ID NO: 50953 - DNA, 80 bp, synthetic construct
  source 1..80: mol_type = other DNA
gacattttgtcctgaagactgagactgcgtcttgttttctgccgtgcttttgctcaactcacttaccaaatctcaacatg

SEQ ID NO: 50954 - DNA, 80 bp, synthetic construct
  source 1..80: mol_type = other DNA
cagccgttccactcatatggaggtccgaatgaatctcatttcgcaccgatggggatcatgttgaattatgacaaatatga

SEQ ID NO: 50955 - DNA, 80 bp, synthetic construct
  source 1..80: mol_type = other DNA
ctgtggttttgtcattcctttggaagatcctcgtcacacagattgcaacttgtggaccgaaatgccaaccatgcgggatg

SEQ ID NO: 50956 - DNA, 80 bp, synthetic construct
  source 1..80: mol_type = other DNA
actttgcacgccaaggtcgtttttggaggtatgatttgaatgtggatcatttccgggagtgcattgctcgacacactcac

SEQ ID NO: 50957 - DNA, 80 bp, synthetic construct
  source 1..80: mol_type = other DNA
gtgtacgcagacggggccaggttgatgggaacatttgtgttcgaactggtgaaaggggagagatggactctagagatttg

SEQ ID NO: 50958 - DNA, 80 bp, synthetic construct
  source 1..80: mol_type = other DNA
ctcgtaccgagatcgacaatttagatctgctcttttggctcgagcgaccccccgcctcatgcacgctctcggttatggga

SEQ ID NO: 50959 - DNA, 80 bp, synthetic construct
  source 1..80: mol_type = other DNA
caaattttggccggttcatcatcgctatggacccgagaatgaacttgtctgactttcctgtggacgtgatgagacctgca

SEQ ID NO: 50960 - DNA, 80 bp, synthetic construct
  source 1..80: mol_type = other DNA
gagggacgtcggccttgtgtatgtcaggagtcacgtggtgctgggcctttgatggatgagctcgatttctattttgaaaa

SEQ ID NO: 50961 - DNA, 80 bp, synthetic construct
  source 1..80: mol_type = other DNA
taaccttgtgaattcatgctatgtggagacattccagcacagaggaaacattaaattcggtgaccgtcaggctcaagtga

SEQ ID NO: 50962 - DNA, 80 bp, synthetic construct
  source 1..80: mol_type = other DNA
gaactggaatgagcttgaacgtcgtgctcaagaaggtggagagcctaagacgctgacccggccgaccgaactgatagagg

SEQ ID NO: 50963 - DNA, 80 bp, synthetic construct
  source 1..80: mol_type = other DNA
cgttaactgcactgggcaagggtactgctttctctctcacgccgcagaagggatcatgtgttccaacaacaatggcccga

SEQ ID NO: 50964 - DNA, 80 bp, synthetic construct
  source 1..80: mol_type = other DNA
atgttgagagatcgcggagcggatgagtgggccgttatcttggagaagatggcaacatctcttgcattggcggcggcgaa

SEQ ID NO: 50965 - DNA, 80 bp, synthetic construct
  source 1..80: mol_type = other DNA
ggagggtaacccggcagaggccttctatcgtgacatgtcctcatggaccaatgatgagaggagcagggcgatgcagctta

SEQ ID NO: 50966 - DNA, 80 bp, synthetic construct
  source 1..80: mol_type = other DNA
tcacctggaagcggctggcaattaattttggtgtcaaggtttcaatgcgtgcactgggagtgagaaatggctatcgtgtc

SEQ ID NO: 50967 - DNA, 80 bp, synthetic construct
  source 1..80: mol_type = other DNA
tctcgggcggcgattccaaaaggcgttatggcgttgaacaattgtgaattgttcggtggtgggcacgtgtgtcctgagtg

SEQ ID NO: 50968 - DNA, 80 bp, synthetic construct
  source 1..80: mol_type = other DNA
tcattctgtgtttcagagtgctggcgagagaaagatgtgcacgactttggatctgatgtttcaccagctgttcctattat

SEQ ID NO: 50969 - DNA, 80 bp, synthetic construct
  source 1..80: mol_type = other DNA
caacgggtgatgtttggcttggagcgttggtgattcatgatccccgaagtcatgtctctaagacgatgaagggtgtcaac

SEQ ID NO: 50970 - DNA, 80 bp, synthetic construct
  source 1..80: mol_type = other DNA
ttgtcctcattgagattggatattttctaagactgcttgcttaaaggtgtgaaaatcaattgtcggtgtaatctgacgca

SEQ ID NO: 50971 - DNA, 80 bp, synthetic construct
  source 1..80: mol_type = other DNA
tctctcatttcaatcaagtcattgatttgctaagaacatcagtcagcgacagtattgacagtatgattaggtacgttggt

SEQ ID NO: 50972 - DNA, 80 bp, synthetic construct
  source 1..80: mol_type = other DNA
ggggttcagtctgtgttcggatgcatgcagtcttagaaaatatccaatctcaatgaggacaagttcggccaaacggaaac

SEQ ID NO: 50973 - DNA, 80 bp, synthetic construct
  source 1..80: mol_type = other DNA
atctcaatgaggacaagttcggccaaacggaaacttgaccatgaactgcctcaccttgcgaatctcctcatacttgacac

SEQ ID NO: 50974 - DNA, 80 bp, synthetic construct
  source 1..80: mol_type = other DNA
gagcagggaaatgatgacactcgagcccttgttgttcgtgctatgaatgacttctttccagccaaggtcggggaggctgt

SEQ ID NO: 50975 - DNA, 80 bp, synthetic construct
  source 1..80: mol_type = other DNA
gtttcaggctgttcaggcggcgcttcaaggaccaggcatgctgacaacgttgatgaccagacaactggagtttcttggaa

SEQ ID NO: 50976 - DNA, 80 bp, synthetic construct
  source 1..80: mol_type = other DNA
atacgacgctttacaacactcgtatgctggaggcgattctgcacatcgtggataccaagcgagctccagctcaagatgtg

SEQ ID NO: 50977 - DNA, 80 bp, synthetic construct
  source 1..80: mol_type = other DNA
gcacctgttgattatatcaatgggccagcgaagacaccgttgtgggagccctatgttgttcaatgtcctgatctggcgcc

SEQ ID NO: 50978 - DNA, 80 bp, synthetic construct
  source 1..80: mol_type = other DNA
cactggtcgggttgatgttcctgatatgcatgtcactcataatggccagccattgaccactgcatggtacccgccccctg

SEQ ID NO: 50979 - DNA, 80 bp, synthetic construct
  source 1..80: mol_type = other DNA
cttccctgagaccgcttcttcctgatggaactgttggtgcaaatcctgagccgtccgctgctggtgccaactttgagcct

SEQ ID NO: 50980 - DNA, 80 bp, synthetic construct
  source 1..80: mol_type = other DNA
ttcaccaacaaagcaattcttgccgtttaccaactccctgaagaatgtactttggaactggtcgtgcgtgatggaactgg

SEQ ID NO: 50981 - DNA, 80 bp, synthetic construct
  source 1..80: mol_type = other DNA
ccctcagcttctagccgcaatcccgatgatggtgggtcaactccggttgatacagtcgagctccgctctgcgacagatgt

SEQ ID NO: 50982 - DNA, 80 bp, synthetic construct
  source 1..80: mol_type = other DNA
gcccgagaacgatcatgctctaaggcttcttgaggagatagctcgtagtcatctgcctagccatcagcagacgcataata

SEQ ID NO: 50983 - DNA, 80 bp, synthetic construct
  source 1..80: mol_type = other DNA
tgattgtgcctcagaaagatggtgcccagggtgtggttgtgacgccagattatgcaaaatctggatgcaaggtggacatg

SEQ ID NO: 50984 - DNA, 80 bp, synthetic construct
  source 1..80: mol_type = other DNA
agattggaaagagtggaggaaaatagttgaagcgcaaactattaataatcttaaacttgcatatcaatacttagctagtg

SEQ ID NO: 50985 - DNA, 80 bp, synthetic construct
  source 1..80: mol_type = other DNA
acgactgaaatccggtcagaattttacttgcttttagatatttgggacattagtaatgtaaaaagatttatcccaaaggg

SEQ ID NO: 50986 - DNA, 80 bp, synthetic construct
  source 1..80: mol_type = other DNA
agtattatattcatttataaataacgtcactactgaaaatgtgttcatacaaccaccatttaaaattaaaatatctaaga

SEQ ID NO: 50987 - DNA, 80 bp, synthetic construct
  source 1..80: mol_type = other DNA
gtgattacattgtagcgctgtacgcactctcaaacgatttcaatgacagaacagatgtaataaacttaattaacaatcag

SEQ ID NO: 50988 - DNA, 80 bp, synthetic construct
  source 1..80: mol_type = other DNA
aaacaatcacttattactgtgagaattaataatacatttaaagatgaaccaaaagtaggctttaaaaatatatatgattg

SEQ ID NO: 50989 - DNA, 80 bp, synthetic construct
  source 1..80: mol_type = other DNA
caatatctttagcttcaaagccaacggggaacaatcacttgtttattttaaatgggaccgacaaatattataaattagat

SEQ ID NO: 50990 - DNA, 80 bp, synthetic construct
  source 1..80: mol_type = other DNA
tcgggaattgcggctattgagattcaatctcctgaagaattgttcactctaattagatgtaatttcacttatgattacga

SEQ ID NO: 50991 - DNA, 80 bp, synthetic construct
  source 1..80: mol_type = other DNA
agtaaagcttatgaaagatatgaaaaaggaattgtttgaaatggatgtaactactagttatacttatatgttatctgacg

SEQ ID NO: 50992 - DNA, 80 bp, synthetic construct
  source 1..80: mol_type = other DNA
actgaaaattagctcaatatatttaagaaaaattaaaggagatacggtgtttgatatgtctgagtgagctaaaaacttaa

SEQ ID NO: 50993 - DNA, 80 bp, synthetic construct
  source 1..80: mol_type = other DNA
gagataagttatttccatcactaagtgaaaagtaccaacgtatagtaaacattggaccaagaaatgagtcaatgtttact

SEQ ID NO: 50994 - DNA, 80 bp, synthetic construct
  source 1..80: mol_type = other DNA
catttcttatatctaatcttacaacacacaacatattatatctaaattacagcattaaaacacttgaaatattgaataaa

SEQ ID NO: 50995 - DNA, 80 bp, synthetic construct
  source 1..80: mol_type = other DNA
ttcttcctcatggacaaccctgcattcgcaggaggagcaggatttagattcaatctgtggagggcctgcaagactacaga

SEQ ID NO: 50996 - DNA, 80 bp, synthetic construct
  source 1..80: mol_type = other DNA
agttacaatattgaagaaaatgaagacagaactatttaagacggaaattagtactagttacacttatatgctatctgata

SEQ ID NO: 50997 - DNA, 80 bp, synthetic construct
  source 1..80: mol_type = other DNA
taagcatgaaagtactagctttaagacacagtgtggctcaggtatatgcagacactcaaatctacacccatgatgacact

SEQ ID NO: 50998 - DNA, 80 bp, synthetic construct
  source 1..80: mol_type = other DNA
agactggaaagaatggaggaaaatagttgaggcacaaactattaataatctcaatcttgcgtatcaatacttaactagtg

SEQ ID NO: 50999 - DNA, 80 bp, synthetic construct
  source 1..80: mol_type = other DNA
gtaaatcaaaggtgtgctgtgttaaaatgacagccatggatttagagcttcctatctctgcaaaattgttgcatcaccca

SEQ ID NO: 51000 - DNA, 80 bp, synthetic construct
  source 1..80: mol_type = other DNA
tccgttcggaattttatctgcttttggatatttgggacattagtaatgtgaaaagatttataccaaagggagtattatat

SEQ ID NO: 51001 - DNA, 80 bp, synthetic construct
  source 1..80: mol_type = other DNA
tcatttataaataacgttactactgaaaatgtgttcatacaaccaccatttaaacttaaaacatctaagaatgattatat

SEQ ID NO: 51002 - DNA, 80 bp, synthetic construct
  source 1..80: mol_type = other DNA
tgtagcgttgtatgcactctcaaatgattttaacgatagaacggatgtgataaacttaattaataatcagaaacaatcac

SEQ ID NO: 51003 - DNA, 80 bp, synthetic construct
  source 1..80: mol_type = other DNA
aatcgggaattgcagccattgagattcaatctcctgaagaattatttaccctaattagatgcaatttcacttatgattac

SEQ ID NO: 51004 - DNA, 80 bp, synthetic construct
  source 1..80: mol_type = other DNA
aaaaagatggatatatttacattcaatagagaaagctgatatagaaggtgggaaatattatgagcatgctccaatagaac

SEQ ID NO: 51005 - DNA, 80 bp, synthetic construct
  source 1..80: mol_type = other DNA
tgatttatgcatgcagatcagcaaaagaattcgctttattgcaagatgatctaactgtactgcgttatgctaatgaaatt

SEQ ID NO: 51006 - DNA, 80 bp, synthetic construct
  source 1..80: mol_type = other DNA
aacaatatataaataaagtatatagtataacatatgcagatgatccaaattattttataggtattaaatttagatacatc

SEQ ID NO: 51007 - DNA, 80 bp, synthetic construct
  source 1..80: mol_type = other DNA
ccttataaatatgatgttaaaattccgcatttaacatttggagtactatccatttcagataatatgattccggatgtagt

SEQ ID NO: 51008 - DNA, 80 bp, synthetic construct
  source 1..80: mol_type = other DNA
aaagcttatgaaagatatgagaaaggaattgtttggaatgaatgtaacaactagttatacttatatgttatctgatgaga

SEQ ID NO: 51009 - DNA, 80 bp, synthetic construct
  source 1..80: mol_type = other DNA
tatatgtggcgaatgttagtggagtcttagcgacatattttaaaatatataatttattttataagagccaaattacattc

SEQ ID NO: 51010 - DNA, 80 bp, synthetic construct
  source 1..80: mol_type = other DNA
ggtcagtctagaatgtttattccgcatataacattaagttttagtaacaataaaacagtaagaatagaaactactaaact

SEQ ID NO: 51011 - DNA, 80 bp, synthetic construct
  source 1..80: mol_type = other DNA
gaaaatgggataatttatttacatgattactcatattatactaacaatgaaataagaactgatcaacattgggttacaaa

SEQ ID NO: 51012 - DNA, 80 bp, synthetic construct
  source 1..80: mol_type = other DNA
atagagtttttagagataaattatttccatcactaagtgaaaagtatcaacgtatagtgaacattggaccaagaaatgag

SEQ ID NO: 51013 - DNA, 80 bp, synthetic construct
  source 1..80: mol_type = other DNA
tcaatgtttacttttctgaattttccatctattaagcaattctcaaacggatcatatttagttaaggatactattaaatt

SEQ ID NO: 51014 - DNA, 80 bp, synthetic construct
  source 1..80: mol_type = other DNA
aacaggagagatggttaggaaagagaatatctcagtttgacatcggacaatataaaaatatgatgaatgttataacatct

SEQ ID NO: 51015 - DNA, 80 bp, synthetic construct
  source 1..80: mol_type = other DNA
gtgtattattactacaatttgtatcaaaggaaacctattatatatatgcttggttcagctccttcatattggatttacga

SEQ ID NO: 51016 - DNA, 80 bp, synthetic construct
  source 1..80: mol_type = other DNA
ttgttttttgagaaggatgtaaataaattaaaagatgattccatattatatattgatattagaactgatcgtggaaacgc

SEQ ID NO: 51017 - DNA, 80 bp, synthetic construct
  source 1..80: mol_type = other DNA
taagcatgaaagtattagctttaagacacagtgtggctcaggtgtatgcagatacgcagacttacttgcatgacgattcg

SEQ ID NO: 51018 - DNA, 80 bp, synthetic construct
  source 1..80: mol_type = other DNA
ggaaaaatatggattggaaagagtggagaaaagtagtagaacaacaaactgtcaacaatttaaatattgcatataaatat

SEQ ID NO: 51019 - DNA, 80 bp, synthetic construct
  source 1..80: mol_type = other DNA
catttctcatttctaatctaactacacataatatattgtacctgaattacagccttaaaacattaaagatattaaataaa

SEQ ID NO: 51020 - DNA, 80 bp, synthetic construct
  source 1..80: mol_type = other DNA
ttccttataagtataacgttaaagtaccacatctcacttttggcgtgttaaatatttctgaacaaatgctaccagatgta

SEQ ID NO: 51021 - DNA, 80 bp, synthetic construct
  source 1..80: mol_type = other DNA
aaaactatataaacaaagtttatagcataacgtacgccgacgatcctaaccactttattggagttaagtttaaaaatatt

SEQ ID NO: 51022 - DNA, 80 bp, synthetic construct
  source 1..80: mol_type = other DNA
cattcttaatttctaatcttactacacataacatattatatttaaattacaatgtaaaaacgctacaaatattaaataaa

SEQ ID NO: 51023 - DNA, 80 bp, synthetic construct
  source 1..80: mol_type = other DNA
ttatctatagggaaagctaaggtatgttgcgttaaaatgaccgccatggatttagaattaccgatatccgcaaaattgct

SEQ ID NO: 51024 - DNA, 80 bp, synthetic construct
  source 1..80: mol_type = other DNA
ttggacagtcaagaatgtttattcctcatgtgacgttgagctttagtaatgagaagacggtgagaatagacactacaaaa

SEQ ID NO: 51025 - DNA, 80 bp, synthetic construct
  source 1..80: mol_type = other DNA
tgataatgttgtttacttacatgactattcatattatactaataatgaaatacggactgaccaacattggataaccaaga

SEQ ID NO: 51026 - DNA, 80 bp, synthetic construct
  source 1..80: mol_type = other DNA
taaacatgaaagtattagctttaagacatagtgtggctcaggtatatgcagacactcaagtatacactcacgatgagacc

SEQ ID NO: 51027 - DNA, 80 bp, synthetic construct
  source 1..80: mol_type = other DNA
gaggagatacagattggaaaacgtggagaaaaattgtggaggaacagacaattagtaatttaactattgcatacaagtat

SEQ ID NO: 51028 - DNA, 80 bp, synthetic construct
  source 1..80: mol_type = other DNA
ttatccacggggaaagctaaagtatgttgtgtaaaaatgactgccatggatttagaactgccaatatctgcaaaattatt

SEQ ID NO: 51029 - DNA, 80 bp, synthetic construct
  source 1..80: mol_type = other DNA
ttagatcagagttttacttaataatggatatatgggattctaaaaatatcaaacggtttataccaaaaggcgtactatac

SEQ ID NO: 51030 - DNA, 80 bp, synthetic construct
  source 1..80: mol_type = other DNA
tcatatataaataacgtagtcactgagaatgtattcatacaacaaccgtttaaattgaaaacactgaagaatgagtatgt

SEQ ID NO: 51031 - DNA, 80 bp, synthetic construct
  source 1..80: mol_type = other DNA
ggttgcgttgtacgcactgtctaatgattttaataacagagaagatgtaataaaattaattaacaatcagaagaacgcat

SEQ ID NO: 51032 - DNA, 80 bp, synthetic construct
  source 1..80: mol_type = other DNA
taataactgtgagaattaataatacgtttaaagatgagccaaaagtgggatttaaaaatatttatgattggacttttttg

SEQ ID NO: 51033 - DNA, 80 bp, synthetic construct
  source 1..80: mol_type = other DNA
atgagtcaataatcacgtcatatgatggctgcttaggtatgtttggtttatcaatatcattagcttcaaaaccaactgga

SEQ ID NO: 51034 - DNA, 80 bp, synthetic construct
  source 1..80: mol_type = other DNA
aacaatcatttattcatcttgagcggtaccaacaaatactttaaattggatcagtttgcaaatcatatgggcatatcacg

SEQ ID NO: 51035 - DNA, 80 bp, synthetic construct
  source 1..80: mol_type = other DNA
gcgatcgcatcaaatacgattttcagaatcagcgacttcgtattcaggctacatttttagagatttgtccaacaataact

SEQ ID NO: 51036 - DNA, 80 bp, synthetic construct
  source 1..80: mol_type = other DNA
tcgggtatagctgcagtagaaatacaaaaaatggatgaattattcacactgattagatgtaattttacatatgactatgt

SEQ ID NO: 51037 - DNA, 80 bp, synthetic construct
  source 1..80: mol_type = other DNA
ttaatttaataggtacgaatattgaaaactcagtgtctggacatgtgtacaatgcattgatttattacagatataattat

SEQ ID NO: 51038 - DNA, 80 bp, synthetic construct
  source 1..80: mol_type = other DNA
aaaattacattaacaaagtgtatagtataacgtatgctgatgatccaaactattttattggcattagatttaagaatata

SEQ ID NO: 51039 - DNA, 80 bp, synthetic construct
  source 1..80: mol_type = other DNA
ccttataaatatgacgttaaggtaccacatctaacatttggtgttttaaacatttcagattcaatggtgtcagatgtagt

SEQ ID NO: 51040 - DNA, 80 bp, synthetic construct
  source 1..80: mol_type = other DNA
agcgattttaaagaagtttaaaaatgaactatttaaaatggacgtaacaacgagctatacatatatgttatcagatgaaa

SEQ ID NO: 51041 - DNA, 80 bp, synthetic construct
  source 1..80: mol_type = other DNA
tttatgtagcaaatgtaagtggcgtgttagcaacatattttaaactttataatgcgttctataaagagcaaattacattc

SEQ ID NO: 51042 - DNA, 80 bp, synthetic construct
  source 1..80: mol_type = other DNA
gggcaatcgcgaatgttcattccacacataacattgagttttagtaataagaaagtggtgagaatagaaaatacgcgatt

SEQ ID NO: 51043 - DNA, 80 bp, synthetic construct
  source 1..80: mol_type = other DNA
aaacatagacttaatttatttaaggaaaataaaaggtgatacggtgtttgatatggctgagtgagctaaaaacttaacac

SEQ ID NO: 51044 - DNA, 80 bp, synthetic construct
  source 1..80: mol_type = other DNA
tgatgacgtcgtttatctacatgactattcgtattacactaacaacgaaataagaactgaccaacattgggtaaccaaga

SEQ ID NO: 51045 - DNA, 80 bp, synthetic construct
  source 1..80: mol_type = other DNA
agacgaacatagaggattacttgttaccaggatggaaactgacatacgttggatataatggaagcgacacaagggggcat

SEQ ID NO: 51046 - DNA, 80 bp, synthetic construct
  source 1..80: mol_type = other DNA
tacaatttctcctttaaatgtcaaaatgcagctacagacgatgacgcaataatagagtatatctactcaaacgaattgga

SEQ ID NO: 51047 - DNA, 80 bp, synthetic construct
  source 1..80: mol_type = other DNA
atcgtgtatttagggataaattgtttaagacattagtatcagatcattataaagtagttaatgttggaccaaggaatgag

SEQ ID NO: 51048 - DNA, 80 bp, synthetic construct
  source 1..80: mol_type = other DNA
tctatgttcacttttttggattatccatcaataaaacaatattcaaacggaccatatttggttaaagatacaataaaact

SEQ ID NO: 51049 - DNA, 80 bp, synthetic construct
  source 1..80: mol_type = other DNA
tttatatcaatactacgacatgtatcatgagaagccgacagtttacatgataggatcagcaccttcatactggatacacg

SEQ ID NO: 51050 - DNA, 80 bp, synthetic construct
  source 1..80: mol_type = other DNA
atgtgagacaatattctaatttaaaatttgaaacatgggatccactagatacaccatactctgatctgcatcataaagaa

SEQ ID NO: 51051 - DNA, 80 bp, synthetic construct
  source 1..80: mol_type = other DNA
tctggtatagctgcaatagaaatacagcaaatagatgagttattcacgttaattaggtgcaattttacatatgattatat

SEQ ID NO: 51052 - DNA, 80 bp, synthetic construct
  source 1..80: mol_type = other DNA
ataataattttaaagagatttaaaaatgaattatttagaatggaaataacaacgagttatacgtacatgttatcagatga

SEQ ID NO: 51053 - DNA, 80 bp, synthetic construct
  source 1..80: mol_type = other DNA
ttatttcacataaatgacgtgcaaaaacttaaagataattcaatattatatatagatataagaacagacagaggaactgt

SEQ ID NO: 51054 - DNA, 80 bp, synthetic construct
  source 1..80: mol_type = other DNA
tgtattttatgcttttataaataatataattacagagaatgtatttatacaacctccgtttaaattgaaagtatcatcta

SEQ ID NO: 51055 - DNA, 80 bp, synthetic construct
  source 1..80: mol_type = other DNA
ctgattatatagtggcattatatgctttatctaacgattttaattcaagaaaagatgttattaatttaattaataaacaa

SEQ ID NO: 51056 - DNA, 80 bp, synthetic construct
  source 1..80: mol_type = other DNA
gctttaatacacagtgtggctcaggtgtatgcagatacgcaaacttacttgcatgacgactcgaaagatgagtatgaaaa

SEQ ID NO: 51057 - DNA, 80 bp, synthetic construct
  source 1..80: mol_type = other DNA
tgcatttctcatttctaatctaactacacataatatactatatttaaattatagtcttaaaacattaaaaatattaaata

SEQ ID NO: 51058 - DNA, 80 bp, synthetic construct
  source 1..80: mol_type = other DNA
ttagatcagaattttatttaataatggatatatgggattccaaaaatattacgagatttgtaccaaaaggcgtgttatac

SEQ ID NO: 51059 - DNA, 80 bp, synthetic construct
  source 1..80: mol_type = other DNA
aacttcgactacaaaagtatacaaacaggttccgcaacaatttgattttagaaattcaatgcatatgttaacttcaaatc

SEQ ID NO: 51060 - DNA, 80 bp, synthetic construct
  source 1..80: mol_type = other DNA
caaagtacaacaccacttgtagatgaaaatggtgtagggattttgtgtacctatggcactgtgtatcttacctctgcaga

SEQ ID NO: 51061 - DNA, 80 bp, synthetic construct
  source 1..80: mol_type = other DNA
tttttagactgcatatgagacagaaaacaattaaacacccatatacagtggacatgatgtttaggcaattcctgaaacct

SEQ ID NO: 51062 - DNA, 80 bp, synthetic construct
  source 1..80: mol_type = other DNA
aatgactggaattccaggcaatcctacccttgatactggctacagtcttcagagaggggtgcaggctgcttttggcaggt

SEQ ID NO: 51063 - DNA, 80 bp, synthetic construct
  source 1..80: mol_type = other DNA
tgcagaggcaggatgtgcttgacaagaatcatgtcccggatattgataaactaatagattatgcagcttcaggtgatcca

SEQ ID NO: 51064 - DNA, 80 bp, synthetic construct
  source 1..80: mol_type = other DNA
catagattctatttacttaagaaaaataaaaggtgacacggtgtttgatatgactgggtgagctaaaaacttaacacact

SEQ ID NO: 51065 - DNA, 80 bp, synthetic construct
  source 1..80: mol_type = other DNA
gcccaataactagactacccataatggagaaggttcacgttgacatcgaggaggacagccccttcctcagagcactacaa

SEQ ID NO: 51066 - DNA, 80 bp, synthetic construct
  source 1..80: mol_type = other DNA
gagacggaggtggacccatctgatacgatcctagacattggaagtgcgcccgcccgcagaatgtattcaaatcacaagta

SEQ ID NO: 51067 - DNA, 80 bp, synthetic construct
  source 1..80: mol_type = other DNA
cgttttacctctgatggtgtaagcatgaaagtattagctttaagacacagtgtggctcaggtgtatgcagatactcaaac

SEQ ID NO: 51068 - DNA, 80 bp, synthetic construct
  source 1..80: mol_type = other DNA
tagaaaacagcaattatctgacaaagtgttatcacaaaaagaagaaataataactgacgtacaagatgacattaaaatag

SEQ ID NO: 51069 - DNA, 80 bp, synthetic construct
  source 1..80: mol_type = other DNA
gtgtgttttacctctgatggtgtaaacatgaaagtattagctttaagacatagtgtggctcaggtgtatgcagacacgca

SEQ ID NO: 51070 - DNA, 80 bp, synthetic construct
  source 1..80: mol_type = other DNA
taagtgatgtaactaaacttaaagataattcaatactatatatagatataaggacagaccgagaaaacgcagattggaaa

SEQ ID NO: 51071 - DNA, 80 bp, synthetic construct
  source 1..80: mol_type = other DNA
ggaaagctaaaatatgttgtgttaaaatgaccgctatggatttgaaactaccaatatctgcgaaattattacatcaccca

SEQ ID NO: 51072 - DNA, 80 bp, synthetic construct
  source 1..80: mol_type = other DNA
ttaggtcagaattttatatgattatgaatatatgggatttaaaaaatgttaaaagatttataccgaaaggagtattatac

SEQ ID NO: 51073 - DNA, 80 bp, synthetic construct
  source 1..80: mol_type = other DNA
tcatacataaacaatactattactgaaaatgtattcatacaacagccatttaaattgaaaacgttgaagaacgaatatat

SEQ ID NO: 51074 - DNA, 80 bp, synthetic construct
  source 1..80: mol_type = other DNA
agttgcgttatatgctctgtcgaatgattttaacaatagggaagacgtgataaaattagttaataatcagaaaaatgcac

SEQ ID NO: 51075 - DNA, 80 bp, synthetic construct
  source 1..80: mol_type = other DNA
taataacattgagaataaataatacattcaaagatgaaccaaaagttggatttaaagacatttatgattggacttttcta

SEQ ID NO: 51076 - DNA, 80 bp, synthetic construct
  source 1..80: mol_type = other DNA
caatatcgttatcgtcgaaaccaactggaaacaatcatttattcattttaagtggtacaaacaagtattttaagttggat

SEQ ID NO: 51077 - DNA, 80 bp, synthetic construct
  source 1..80: mol_type = other DNA
aatacgattctcagagtcagcaacttcatattcgggttacatttttagggacttatctaacaataattttaatttaatag

SEQ ID NO: 51078 - DNA, 80 bp, synthetic construct
  source 1..80: mol_type = other DNA
gtactaatatagaaaattcggtgtcggggcatgtatataatgcattaatatattatagatataactattcatttgatctt

SEQ ID NO: 51079 - DNA, 80 bp, synthetic construct
  source 1..80: mol_type = other DNA
aaacggtggatatatttgcattcaacaggcaacgcaagtattgagggtggtagatactacgaacatgctccaatagagtt

SEQ ID NO: 51080 - DNA, 80 bp, synthetic construct
  source 1..80: mol_type = other DNA
aatctggtataactgcaatagaaatacaggaaatggatgaactatttacgttaatcagatgcaactttacgtatgattat

SEQ ID NO: 51081 - DNA, 80 bp, synthetic construct
  source 1..80: mol_type = other DNA
gatttatgcgtgtaggtcagcaaaggaattcgcgaaactgcaagacgatttaacagtgctaagatactcaaatgaaatag

SEQ ID NO: 51082 - DNA, 80 bp, synthetic construct
  source 1..80: mol_type = other DNA
aaaattatattaacaaggtatatagtataacatatgctgatgatccaaactatttcattggaattaaattcaaagatatt

SEQ ID NO: 51083 - DNA, 80 bp, synthetic construct
  source 1..80: mol_type = other DNA
ccttacaaatatgacgttaaagtaccacatcttacatttggtgtattaagtatttctgaaataatggtaccagatgtggt

SEQ ID NO: 51084 - DNA, 80 bp, synthetic construct
  source 1..80: mol_type = other DNA
ggtaattttgaagaaattcaaaaacgaactgtttaaaatggatgtaaccacaagctatacatatatgttatcggatgaag

SEQ ID NO: 51085 - DNA, 80 bp, synthetic construct
  source 1..80: mol_type = other DNA
tgtacgtagcaaacataagtggtgttctatcagtatacttcaaaatttacaacgcattttataaagaacaaattacattt

SEQ ID NO: 51086 - DNA, 80 bp, synthetic construct
  source 1..80: mol_type = other DNA
ggacagtcgagaatgttcattccgcatgtaacgttaagttttagtaacaagaaaacagtgagaatagataccacgaagtt

SEQ ID NO: 51087 - DNA, 80 bp, synthetic construct
  source 1..80: mol_type = other DNA
aaatatacaatctatatatctaagaaagattaaaggtgatacggtgtttgatatgactgagtgagctaaaaactcaacac

SEQ ID NO: 51088 - DNA, 80 bp, synthetic construct
  source 1..80: mol_type = other DNA
attgataatattgtctatttacatgactattcatattatactaacaatgagatacggactgatcagcattgggtgactaa

SEQ ID NO: 51089 - DNA, 80 bp, synthetic construct
  source 1..80: mol_type = other DNA
ttcagaactttatactcaagaagattaaagaaagaatgacaacttcgttaccaatagcaagactttcgaatcgtgtattc

SEQ ID NO: 51090 - DNA, 80 bp, synthetic construct
  source 1..80: mol_type = other DNA
agagatagactgtttaaaatgttaacagtagatcataataaagtggttaatgttggacctagaaatgaatccatgttcac

SEQ ID NO: 51091 - DNA, 80 bp, synthetic construct
  source 1..80: mol_type = other DNA
ctttttagatcatccatcgattaagcaattctcaaatggaccatacctagttaaagatacaattaaacttaagcaagaga

SEQ ID NO: 51092 - DNA, 80 bp, synthetic construct
  source 1..80: mol_type = other DNA
ggtggcttggtaaaaggttgtcacagtttgatattggccaatataaaaacatgctgaatgtgctaacaactttataccaa

SEQ ID NO: 51093 - DNA, 80 bp, synthetic construct
  source 1..80: mol_type = other DNA
tattacgacatgtaccacgaaaaaccaacaatatatatgctaggatcagcaccatcgtactggatatatgacgttaaaca

SEQ ID NO: 51094 - DNA, 80 bp, synthetic construct
  source 1..80: mol_type = other DNA
gtactcagatttgaagtttgagacatgggacccattagatacaccatattctgatttgcatcacaaagagttattttata

SEQ ID NO: 51095 - DNA, 80 bp, synthetic construct
  source 1..80: mol_type = other DNA
attcttaaactttccaaccattaagcaattttcaaacggtgcatacatcgtaaaacatactattaagttgaggcaggaaa

SEQ ID NO: 51096 - DNA, 80 bp, synthetic construct
  source 1..80: mol_type = other DNA
tatgttgataatctccttaatcgccatgtgcttctgccatctggtgaggttaccttgcaaacacgaggcaatccatctgg

SEQ ID NO: 51097 - DNA, 80 bp, synthetic construct
  source 1..80: mol_type = other DNA
acctatgatactgtagtttatggagatgacaggctttcaacgacaccctcggtgcctgatgattatgaggagaaagtgat

SEQ ID NO: 51098 - DNA, 80 bp, synthetic construct
  source 1..80: mol_type = other DNA
tatgttgacaaccttcttaaccgccatgtcttattaccatctggtgaagttaccgtgcagacacggggcaacccatctgg

SEQ ID NO: 51099 - DNA, 80 bp, synthetic construct
  source 1..80: mol_type = other DNA
acctacgacaccgtagtctacggggatgacaggctctctaccacaccttcagtaccagagaactatgaggaaagagtgat

SEQ ID NO: 51100 - DNA, 80 bp, synthetic construct
  source 1..80: mol_type = other DNA
tatgttgacaacctcctcaatcgtcatgtgttattgccatctggtgaggtaaccgtgcaaacacggggaaacccgtctgg

SEQ ID NO: 51101 - DNA, 80 bp, synthetic construct
  source 1..80: mol_type = other DNA
acttatgacaccgtagtctatggagatgataggctctccaccacaccttcagtgccagacaattatgaagaaagagtaat

SEQ ID NO: 51102 - DNA, 80 bp, synthetic construct
  source 1..80: mol_type = other DNA
acttatgacactgtggtttatggagatgacaggctttctacaacaccttcagtgccagacaattatgaggagagagtcat

SEQ ID NO: 51103 - DNA, 80 bp, synthetic construct
  source 1..80: mol_type = other DNA
tatgttggtaacctccttaatcgccatgtacttctaccatctggcgaagtcacctcgcaaacccgaggcaatccatctgg

SEQ ID NO: 51104 - DNA, 80 bp, synthetic construct
  source 1..80: mol_type = other DNA
tacgttgataatctcctcaaccgtcatgtactcctaccatctggtgaagtcaccttgcagacacgaggcaatccatccgg

SEQ ID NO: 51105 - DNA, 80 bp, synthetic construct
  source 1..80: mol_type = other DNA
agaggttaaaaagggttgttacaggacgcttggggtatttcgctacaaaagcagatgttatgtgggtctggtatggtgcc

SEQ ID NO: 51106 - DNA, 80 bp, synthetic construct
  source 1..80: mol_type = other DNA
cgcttggggtatttcgctacaaaagcagatgttatgtgggtctggtatggtgcctattgttaacatgtgaaattgttatt

SEQ ID NO: 51107 - DNA, 80 bp, synthetic construct
  source 1..80: mol_type = other DNA
cacttggggtattccgatataaaagtagatgttatgtgggtttggtgtggtgcttattgttgacatgtgaaattgttatt

SEQ ID NO: 51108 - DNA, 80 bp, synthetic construct
  source 1..80: mol_type = other DNA
tgtaactttgcaactaccccggtctgtgaatatgatgggaacatggtatctgggtacaagaaggtcatggctacaattga

SEQ ID NO: 51109 - DNA, 80 bp, synthetic construct
  source 1..80: mol_type = other DNA
aaacattgactatcacagaatggacagtactgatcccacttgctcccttgggttctgggtttaccaaccactgctcaatc

SEQ ID NO: 51110 - DNA, 80 bp, synthetic construct
  source 1..80: mol_type = other DNA
cgagttggggggttaatagttggtatggttttggttgctgaccaccgccaggtgaacagacactttaatgcacggtctat

SEQ ID NO: 51111 - DNA, 80 bp, synthetic construct
  source 1..80: mol_type = other DNA
ccaggtgaacagacactttaatgcacggtctatcacctatgggtggtctactgcaccagtcaatccaatggcagcagcaa

SEQ ID NO: 51112 - DNA, 80 bp, synthetic construct
  source 1..80: mol_type = other DNA
atgccaacaaaaggaatgcttggctgttactcagtgcagaaaacaagggcccactgttcccaggcatcccaaaccacttc

SEQ ID NO: 51113 - DNA, 80 bp, synthetic construct
  source 1..80: mol_type = other DNA
ccagactcgtgtgcttccacggtaatgggtggtatggacacagaccgccacatgccatccacaggagtctgtggtccagc

SEQ ID NO: 51114 - DNA, 80 bp, synthetic construct
  source 1..80: mol_type = other DNA
gtggtacaaatgagaatcctgtggctctctttggttcaatcaatatggcctccttagctgtggttcgcacccaacaggat

SEQ ID NO: 51115 - DNA, 80 bp, synthetic construct
  source 1..80: mol_type = other DNA
gcggacttcccaactgccggcttccgcaacgatatgaatgtggttgtggaaatgtcctgggaaatgtattcaggatcaca

SEQ ID NO: 51116 - DNA, 80 bp, synthetic construct
  source 1..80: mol_type = other DNA
ggtgaaccacatgatatactttgcagcgggtgtgctcaaagcttatgaggatcaccacgtcccgtacactggcaatgtgt

SEQ ID NO: 51117 - DNA, 80 bp, synthetic construct
  source 1..80: mol_type = other DNA
ggttctgttctcgccaacctatcctcctttggtctcaagcccactgccgctgacaaaactgcggaaattaagcccactca

SEQ ID NO: 51118 - DNA, 80 bp, synthetic construct
  source 1..80: mol_type = other DNA
aacaccagtgttcctgaaaagaacatttacacaaacgccccatggggtgagggcactattggacatcaattccatcattc

SEQ ID NO: 51119 - DNA, 80 bp, synthetic construct
  source 1..80: mol_type = other DNA
ggcagttctattgggtcaaggcgaaccgcaccagcgacccatctagtccccccgcatttgatcgcactgcacgcagtgcc

SEQ ID NO: 51120 - DNA, 80 bp, synthetic construct
  source 1..80: mol_type = other DNA
cagttggaagcagccctagcctatgcatcacaacatggacctttagtgtttgacaaggtgcgtgacattgccatcaaaac

SEQ ID NO: 51121 - DNA, 80 bp, synthetic construct
  source 1..80: mol_type = other DNA
ctagtctctccattttggagagattcatggaaagtagtccactagtgtcctgcgcaatagaatccctctcttcaccagca

SEQ ID NO: 51122 - DNA, 80 bp, synthetic construct
  source 1..80: mol_type = other DNA
actgttttatgtagataatgtaagcaaacttaaagataattcgatattatatgtagatatacgaacggatagagaaaata

SEQ ID NO: 51123 - DNA, 80 bp, synthetic construct
  source 1..80: mol_type = other DNA
ttaggtcagaattttacttaataatggacgtatgggattctaaaaacattaaacggtttataccaaaaggcgtgttatat

SEQ ID NO: 51124 - DNA, 80 bp, synthetic construct
  source 1..80: mol_type = other DNA
aacaatcatttgttcattttgagcggtactaataaatattttaaattggatcaatttgcaaatcatatgagtatatcaag

SEQ ID NO: 51125 - DNA, 80 bp, synthetic construct
  source 1..80: mol_type = other DNA
aatctggtatagctgcgatagaaatacaaaaagtagatgagttgtttacactgattagatgcaatttcacatatgattac

SEQ ID NO: 51126 - DNA, 80 bp, synthetic construct
  source 1..80: mol_type = other DNA
ccctatcaatatgatgttaaagtaccacatcttacatttggtgtattaaatatctcatgttccatggtgccggatgtagt

SEQ ID NO: 51127 - DNA, 80 bp, synthetic construct
  source 1..80: mol_type = other DNA
ggacaatcaagaatgtttattccacacataacactaagttttagtaacaagaagacagtgagaatagatagcacgcgatt

SEQ ID NO: 51128 - DNA, 80 bp, synthetic construct
  source 1..80: mol_type = other DNA
acttttctagattatccatcaataaagcagttttcaaatggaccctatttagttaaagatacaataaagcttaaacaaga

SEQ ID NO: 51129 - DNA, 80 bp, synthetic construct
  source 1..80: mol_type = other DNA
ccgtatatcaatactatgatatgtatcacgagaagccaataatatatatggtaggatcagcaccttcatattggatacat

SEQ ID NO: 51130 - DNA, 80 bp, synthetic construct
  source 1..80: mol_type = other DNA
tgcatatgttaacgtctaatttaacttttaccgtttattctgatttactatctttcgtttctgcagacacggtgaaccta

SEQ ID NO: 51131 - DNA, 80 bp, synthetic construct
  source 1..80: mol_type = other DNA
cgcacatttccttggaacacacgacaggccacaggcacttatctgggatctgctgcgctgtccccagctctcaacccata

SEQ ID NO: 51132 - DNA, 80 bp, synthetic construct
  source 1..80: mol_type = other DNA
atgtaactttgccacaactccagtttgtgaatatgatgggaataccatctcaggctataagaaagttcttgcaacaattg

SEQ ID NO: 51133 - DNA, 80 bp, synthetic construct
  source 1..80: mol_type = other DNA
gttgaccttcctggcacgactggcccggccacatccaacgttgttgtggctaatccggaacaacccaatggggccgcaca

SEQ ID NO: 51134 - DNA, 80 bp, synthetic construct
  source 1..80: mol_type = other DNA
catttcttatttctaatctaactacacataatatactgtacttaaattacagtgttaaaacattaaaaatattgaacaaa

SEQ ID NO: 51135 - DNA, 80 bp, synthetic construct
  source 1..80: mol_type = other DNA
gcaccaatgtggagaattctgtttcaggacacgtttataacgcattaatctactatagatataattatgcatttgattta

SEQ ID NO: 51136 - DNA, 80 bp, synthetic construct
  source 1..80: mol_type = other DNA
tcacggccttgaaaaaaatgagaacagaattatttaaaatgcagatcagtactagctacacctatatgctgtctgataat

SEQ ID NO: 51137 - DNA, 80 bp, synthetic construct
  source 1..80: mol_type = other DNA
atatacgtggcaaatgtgagtggtgtattatcaacttatttcaaactgtataacacgttttatagaagtcacattacatt

SEQ ID NO: 51138 - DNA, 80 bp, synthetic construct
  source 1..80: mol_type = other DNA
tggacaatcacgtatgtttattcctcacatcacacttagttttagtaataaacgaacggttagaatagaaaacacgagac

SEQ ID NO: 51139 - DNA, 80 bp, synthetic construct
  source 1..80: mol_type = other DNA
caatatcattatcatctaaacctactggaaataatcacttattcataataaatggaactgacaaatattacaagttggat

SEQ ID NO: 51140 - DNA, 80 bp, synthetic construct
  source 1..80: mol_type = other DNA
caatatgcgaaccatatgggtatctctagaagatcacatcaaattagattttcggaatctgcaacgtcatactcgggata

SEQ ID NO: 51141 - DNA, 80 bp, synthetic construct
  source 1..80: mol_type = other DNA
atcaattcgcgaatcatatgagcatatcacgacgatcgcatcagatacgattttcagagtcagctacttcatattcggga

SEQ ID NO: 51142 - DNA, 80 bp, synthetic construct
  source 1..80: mol_type = other DNA
tatatttttagggatttatctaataataatttcaatttaataggtacgaatgtagaaaattcagtatccggacacgtata

SEQ ID NO: 51143 - DNA, 80 bp, synthetic construct
  source 1..80: mol_type = other DNA
ttgatttatgcatgtagatcagcaagagaatttgcaaaattgcaagatgacttaacggtattaagatattcaaacgagat

SEQ ID NO: 51144 - DNA, 80 bp, synthetic construct
  source 1..80: mol_type = other DNA
caaatatagaagattatttactacctggatggaagctgacatacgttggatacaatggaagtgatacgcgcggacattat

SEQ ID NO: 51145 - DNA, 80 bp, synthetic construct
  source 1..80: mol_type = other DNA
atggcttggtaaaagattatcacagtttgatattggtcaatataagaatatgctaaacgtattaacgactttgtatcaat

SEQ ID NO: 51146 - DNA, 80 bp, synthetic construct
  source 1..80: mol_type = other DNA
actacaatatatatcatgagaaaccaatcgtatatatgataggatcagcaccctcgtattggatatatgacatcaagcag

SEQ ID NO: 51147 - DNA, 80 bp, synthetic construct
  source 1..80: mol_type = other DNA
tctgtatcaatattacaacatatatcatgagaaaccaatcgtatatatgataggatcagcgccctcgtattggatatatg

SEQ ID NO: 51148 - DNA, 80 bp, synthetic construct
  source 1..80: mol_type = other DNA
ggaaagctaaggtatgttgcgttaaaatgaccgccatggatttagaattaccgatatccgcaaaattgcttcatcatcca

SEQ ID NO: 51149 - DNA, 80 bp, synthetic construct
  source 1..80: mol_type = other DNA
caatatcgctagcttcgaaaccaactggtaataatcatttgttcattttaagtggaacagacaaatattttaaactggat

SEQ ID NO: 51150 - DNA, 80 bp, synthetic construct
  source 1..80: mol_type = other DNA
cttacgaaaaataaaaggtgacacggtgtttgatatgactgggtgagctaaaaacttaacacactggtcacatcgtgacc

SEQ ID NO: 51151 - DNA, 80 bp, synthetic construct
  source 1..80: mol_type = other DNA
ttattctatattgacaatgtgcaaaaacttaaagataattcgatactgtatatagatataagaacagacagaggaaatat

SEQ ID NO: 51152 - DNA, 80 bp, synthetic construct
  source 1..80: mol_type = other DNA
ggattggaaggaatggcgaagagtagtagaagaacaaactattagtaacttacatattgcgtacaaatatctatctacag

SEQ ID NO: 51153 - DNA, 80 bp, synthetic construct
  source 1..80: mol_type = other DNA
tgtgttatactcatatataaataatataattactgagaatgtattcatacaacagccatttaaattaaaaacgttaaaaa

SEQ ID NO: 51154 - DNA, 80 bp, synthetic construct
  source 1..80: mol_type = other DNA
atgaatatgtgacagcactgtatgctttgtcaaatgatttcaacaatagagaagatatagtaaaactaattaataatcag

SEQ ID NO: 51155 - DNA, 80 bp, synthetic construct
  source 1..80: mol_type = other DNA
gacatttttgccaacagattttgaaacaagtggatcaataattacttcatatgatggatgtttaggtatttttggtttat

SEQ ID NO: 51156 - DNA, 80 bp, synthetic construct
  source 1..80: mol_type = other DNA
caattcgcgaaccatatgagcatatcacgacgatcacatcagataagattctcggagtcagctacttcatattcaggata

SEQ ID NO: 51157 - DNA, 80 bp, synthetic construct
  source 1..80: mol_type = other DNA
aaacgatggatatatttacattcaacgggcaaggctagcattgaaggtggcaaatactatgaacatgctccaatagaact

SEQ ID NO: 51158 - DNA, 80 bp, synthetic construct
  source 1..80: mol_type = other DNA
gatttacgcatgtaggtcagcgagagaatttgcgaaattgcaagatgacttaacagtattaaggtattcaaatgaaatag

SEQ ID NO: 51159 - DNA, 80 bp, synthetic construct
  source 1..80: mol_type = other DNA
aaaattatattaatagagcgtatagcataacgtacgccgatgaccctaactatttcattggaattaagtttaaaaatatt

SEQ ID NO: 51160 - DNA, 80 bp, synthetic construct
  source 1..80: mol_type = other DNA
ccctataaatataacgtcaaagtgccacatctcacatttggcgtactaaatatttctgaacaaatactaccggatgcgat

SEQ ID NO: 51161 - DNA, 80 bp, synthetic construct
  source 1..80: mol_type = other DNA
tctggtatagctgcaatagaaatacagaaaatggatgagctattcacactaattagatgtaattttacgtatgattatat

SEQ ID NO: 51162 - DNA, 80 bp, synthetic construct
  source 1..80: mol_type = other DNA
agctattctgaagaaatttaagaatgagttgtttggaatggacataacgacgagttacacgtatatgttatctgatgaag

SEQ ID NO: 51163 - DNA, 80 bp, synthetic construct
  source 1..80: mol_type = other DNA
ggacagtcaagaatgtttataccgcatataacattgagttttagtaatgagaaaacagtgagaatagatactacaaagct

SEQ ID NO: 51164 - DNA, 80 bp, synthetic construct
  source 1..80: mol_type = other DNA
tgatgatatcgtttatttacatgattattcatattacattaataatgaaatacgaactgaccaatattgggtaacaaaga

SEQ ID NO: 51165 - DNA, 80 bp, synthetic construct
  source 1..80: mol_type = other DNA
cgaatatagaagattatctattgccagggtggaaactaacatacgtcggatataacggaaacgatactagaggacattac

SEQ ID NO: 51166 - DNA, 80 bp, synthetic construct
  source 1..80: mol_type = other DNA
agagacaaattgtttaaaacgttgtcagcaaatcatagcaaagtagttaatgttgggcctagaaatgaatccatgtttac

SEQ ID NO: 51167 - DNA, 80 bp, synthetic construct
  source 1..80: mol_type = other DNA
taagtaataatgatcgtatgcaagagaagaatgatgaaaaacaagattcaaataataaaatgcaattgtcagataaagta

SEQ ID NO: 51168 - DNA, 80 bp, synthetic construct
  source 1..80: mol_type = other DNA
acaggtataaattcgcaagcagctaatgactgttttaaaactttgatcgcggcaatgttaagtcaacgcactatgtcatt

SEQ ID NO: 51169 - DNA, 80 bp, synthetic construct
  source 1..80: mol_type = other DNA
gctgcacttcgttaataataaccaattcagacaagtagtcatcgatggagtactaaaccaggtgctaaatgataatatca

SEQ ID NO: 51170 - DNA, 80 bp, synthetic construct
  source 1..80: mol_type = other DNA
gaaatggacatgttattaatcaattaatggaggctttaatgcagttgtcgcgacaacaatttccaacaatgccagttgac

SEQ ID NO: 51171 - DNA, 80 bp, synthetic construct
  source 1..80: mol_type = other DNA
aatcgacaaaagaagaatcaaagcaattacttgaagtgttaaaaacgaaggaagaacatcagaaagaggtacagtatgaa

SEQ ID NO: 51172 - DNA, 80 bp, synthetic construct
  source 1..80: mol_type = other DNA
aacgcggaatattactactgtctaatagacttggtcaactggttgacttgaccagactgttagcttacaattacgaaaca

SEQ ID NO: 51173 - DNA, 80 bp, synthetic construct
  source 1..80: mol_type = other DNA
ctaatggcatgtatcacaatgaacatgcaacatgttcaaactctaacaactgaaaagctacagttaacttcagtcacatc

SEQ ID NO: 51174 - DNA, 80 bp, synthetic construct
  source 1..80: mol_type = other DNA
acagattacgtttgttaccagtggaagtcagaagactagacatctttaatttaatattaatgaatatggagcaaatagag

SEQ ID NO: 51175 - DNA, 80 bp, synthetic construct
  source 1..80: mol_type = other DNA
cgtgcctcagacaaaattgcccaaggggtgatcattgcatatcgtgacatgcagttggagagagatgaaatgtacggtta

SEQ ID NO: 51176 - DNA, 80 bp, synthetic construct
  source 1..80: mol_type = other DNA
atattacagaaaacgataccaacatttgaaccaaaagagtcaattttgaaaaaattagaggatattaaaccagaacaagc

SEQ ID NO: 51177 - DNA, 80 bp, synthetic construct
  source 1..80: mol_type = other DNA
aatagcgaagcttgacgccacggttttcgcccaaatagttaaactaagaaaagttgatactttaaaaccaatactatata

SEQ ID NO: 51178 - DNA, 80 bp, synthetic construct
  source 1..80: mol_type = other DNA
ttattcagacttacttgcattcgtgtcagctgatacggtagaaccaataaatgcggtcgcattcgataacatgcgcatca

SEQ ID NO: 51179 - DNA, 80 bp, synthetic construct
  source 1..80: mol_type = other DNA
tgctactgaaagatatggcagtagagaacaaaaactcaagagacgcaggtaaggtcgttgatttagagacagctagtata

SEQ ID NO: 51180 - DNA, 80 bp, synthetic construct
  source 1..80: mol_type = other DNA
tgtgatgcaatatttcaagatgaggagacagaaggtgcagtaagaagatttattgcagagatgaggcaacgtgtgcaagc

SEQ ID NO: 51181 - DNA, 80 bp, synthetic construct
  source 1..80: mol_type = other DNA
tagttgaaccattgaataacgacataatattcaactatatcccagaaagaataaggaatgacgttaattacatactcaat

SEQ ID NO: 51182 - DNA, 80 bp, synthetic construct
  source 1..80: mol_type = other DNA
caacagaagcgcaaatacagaagatgtcacaagatttgcaattagaagcgctaacgattcaatcagaaacacaatttctt

SEQ ID NO: 51183 - DNA, 80 bp, synthetic construct
  source 1..80: mol_type = other DNA
atggaaagtagaaataaaaataaaaataacaatagaaagcaacaattatctgacaaagtgctatcacaaaaagaggaaat

SEQ ID NO: 51184 - DNA, 80 bp, synthetic construct
  source 1..80: mol_type = other DNA
tatctttcgtttctgcagatacggttgaacctattaatgcaattgcttttgacaatatgcgcattatgaacgaattataa

SEQ ID NO: 51185 - DNA, 80 bp, synthetic construct
  source 1..80: mol_type = other DNA
cttctgagaaatttatcccaaatagaacatatagggttattaacaatgatgaagtatttgaagctggaatggatggtaag

SEQ ID NO: 51186 - DNA, 80 bp, synthetic construct
  source 1..80: mol_type = other DNA
ttgatcttaagacgttaaaaaatctgaaagataattatggaataagtaagcagcaagcttttgacttactacgatcagat

SEQ ID NO: 51187 - DNA, 80 bp, synthetic construct
  source 1..80: mol_type = other DNA
tttttcgcatatcgtgtagacacattcgatgaaataccatttgatgtacagaaattcgcagatttagttacagattcacc

SEQ ID NO: 51188 - DNA, 80 bp, synthetic construct
  source 1..80: mol_type = other DNA
gagataagttatttaaaacgttatcagcaaatcatgataaaatagttaacattggacccagaaacgagtctatgtttact

SEQ ID NO: 51189 - DNA, 80 bp, synthetic construct
  source 1..80: mol_type = other DNA
cgttcttaatttctaatctcactacacataatatattatatttaaattatagtgtaaaaacactgcaaatattgaataaa

SEQ ID NO: 51190 - DNA, 80 bp, synthetic construct
  source 1..80: mol_type = other DNA
caatatcactagcttcaaaaccaaccggtaataatcatttattcattttaagtggtacggacaagtattttaaattggat

SEQ ID NO: 51191 - DNA, 80 bp, synthetic construct
  source 1..80: mol_type = other DNA
ggtgtatgtagcaaatataagtggtgtactatcaacatatttcaaaatttacaacgcgttttataaagagcaaattacat

SEQ ID NO: 51192 - DNA, 80 bp, synthetic construct
  source 1..80: mol_type = other DNA
tatttttagagatctctcaaataataatttcaacttgataggtactaatatagaaaattcagtttcaggacatgtttata

SEQ ID NO: 51193 - DNA, 80 bp, synthetic construct
  source 1..80: mol_type = other DNA
aatctggtatagctgcaatagaaatacagaagatggatgaattatttactttaataagatgtaattttacatacgattat

SEQ ID NO: 51194 - DNA, 80 bp, synthetic construct
  source 1..80: mol_type = other DNA
caaatatagaagattatctattaccagggtggaaataacatacgtcggatactaatggagccaatacaagaggacattat

SEQ ID NO: 51195 - DNA, 80 bp, synthetic construct
  source 1..80: mol_type = other DNA
actacagagattagatcagagttttatctagtaatggatatatgggactctaaaaatattaaaagattcataccaaaagg

SEQ ID NO: 51196 - DNA, 80 bp, synthetic construct
  source 1..80: mol_type = other DNA
tgtattatactcatatataaacaatacaattaccgaaaacgtattcatacaacaaccttttaagttgaaaatattgaaaa

SEQ ID NO: 51197 - DNA, 80 bp, synthetic construct
  source 1..80: mol_type = other DNA
acgaatatataatagcactttatgctttatcaaatgatcttaacaacagagaagatgtggtgaaactaattaataatcag

SEQ ID NO: 51198 - DNA, 80 bp, synthetic construct
  source 1..80: mol_type = other DNA
aaaaaagcgttaatgacagtgagaattaataatacgtttaaagatgaaccaaaagtcggatttaaaaacatttacgattg

SEQ ID NO: 51199 - DNA, 80 bp, synthetic construct
  source 1..80: mol_type = other DNA
gacatttctaccaacggatttcgagactaatggatcaataattacttcatatgatggatgtctaggcatctttggtttat

SEQ ID NO: 51200 - DNA, 80 bp, synthetic construct
  source 1..80: mol_type = other DNA
aacaattttaaagagatttaaaaatgagttatttggaatggaaataacaacgaattatacgtatatgttatctgatgagg

SEQ ID NO: 51201 - DNA, 80 bp, synthetic construct
  source 1..80: mol_type = other DNA
tgtatgtagcaaatataagtggtgtattatcaacatattttaaaatttataatacgttttataaagagcaaatcacattt

SEQ ID NO: 51202 - DNA, 80 bp, synthetic construct
  source 1..80: mol_type = other DNA
ccagagttttatcctcaagaaaattaaagaaaggatgacaacatcactaccaatagcaagactttcaaatcgcgtattta

SEQ ID NO: 51203 - DNA, 80 bp, synthetic construct
  source 1..80: mol_type = other DNA
gagataaattatttaaaacattatcagtaaatcatgataaagtagttaatattggacctagaaatgaatctatgtttact

SEQ ID NO: 51204 - DNA, 80 bp, synthetic construct
  source 1..80: mol_type = other DNA
tttttagactatccatcaataaaacagttctcgaatggaccgtatctagttaaagatacaattaaactcaaacaagagag

SEQ ID NO: 51205 - DNA, 80 bp, synthetic construct
  source 1..80: mol_type = other DNA
acgtcaaacagtattctaacttgaagtttgaaacatgggatccactagataccccatactctaatttacatcataaggaa

SEQ ID NO: 51206 - DNA, 80 bp, synthetic construct
  source 1..80: mol_type = other DNA
tattttttgataaggatgtcgataagcttaaagataattcagttttatatatagacataagaactgatagaggtaatatg

SEQ ID NO: 51207 - DNA, 80 bp, synthetic construct
  source 1..80: mol_type = other DNA
gattggaaagagtggagaaagatagtagaacaacaaactgttagcaatttaaatattgcatataaatatctatcaacagg

SEQ ID NO: 51208 - DNA, 80 bp, synthetic construct
  source 1..80: mol_type = other DNA
aaaagcaaaggtgtgttgtgttaaattaactgctatggacctagaattaccaataacagcaaaattacttcatcatccaa

SEQ ID NO: 51209 - DNA, 80 bp, synthetic construct
  source 1..80: mol_type = other DNA
ctactgaagttagatcagaattttatgcaatattggatgtatgggatattattaccattaaaagatttataccaaagggt

SEQ ID NO: 51210 - DNA, 80 bp, synthetic construct
  source 1..80: mol_type = other DNA
gtactttatgcttttataaataacgtaaccacagagaatgtatttatacaacctccttttaaattaaaaacgtcacctaa

SEQ ID NO: 51211 - DNA, 80 bp, synthetic construct
  source 1..80: mol_type = other DNA
tgattatatagtggcattatatgctttatccaatgacttcaattcaaggcaagatgttattaatttggttaataaacaaa

SEQ ID NO: 51212 - DNA, 80 bp, synthetic construct
  source 1..80: mol_type = other DNA
aacaatcactcattactgtccgtataaataacacttttaaagatgaaccaaaagtaaattttaaaaatatttatgattgg

SEQ ID NO: 51213 - DNA, 80 bp, synthetic construct
  source 1..80: mol_type = other DNA
acgtttctaccaacagattttgagcttaaagattcgataattacatcatatgatggttgtttaggtatatttggattatc

SEQ ID NO: 51214 - DNA, 80 bp, synthetic construct
  source 1..80: mol_type = other DNA
aatatctttaccgtctaaaccaaccggaaataatcatttatttataataaatggaactgacaaatatgataaactagacc

SEQ ID NO: 51215 - DNA, 80 bp, synthetic construct
  source 1..80: mol_type = other DNA
agtatgcaaatcatatgggtatttctagaagatcgcatcaaattagattctcagagtctgcgacatcatattcgggatat

SEQ ID NO: 51216 - DNA, 80 bp, synthetic construct
  source 1..80: mol_type = other DNA
aaaagatggatttatctacactcaattggaaaagttgctgtagaaggtggaagatattacgaacatgcaccaatcgaatt

SEQ ID NO: 51217 - DNA, 80 bp, synthetic construct
  source 1..80: mol_type = other DNA
gatatatgcatgccgatcagctaaagagtttgctatattacaagatgacttaacggtattgagatacgctaatgaaattg

SEQ ID NO: 51218 - DNA, 80 bp, synthetic construct
  source 1..80: mol_type = other DNA
aagggtatataaataaagtatatagtataacctatgctgacgatcccaattactttataggaattaaatttaatagcata

SEQ ID NO: 51219 - DNA, 80 bp, synthetic construct
  source 1..80: mol_type = other DNA
ccttatgaatacgatgttaaaattccacatttgacactaggagtattatttatatctgataatatgatacatgatgtaat

SEQ ID NO: 51220 - DNA, 80 bp, synthetic construct
  source 1..80: mol_type = other DNA
aatcaggtatagcggcagttgaagtacaatctccaaatgaattatttgcgttaataagatgtaattttacgtatgattat

SEQ ID NO: 51221 - DNA, 80 bp, synthetic construct
  source 1..80: mol_type = other DNA
cacagtgctgaaaaaaatgaagacagaactatttaaaatggaaattagtactagttatacttacacgctgtctgataata

SEQ ID NO: 51222 - DNA, 80 bp, synthetic construct
  source 1..80: mol_type = other DNA
catatgtagcaaatgctagtggtgtgctatcaacttattttaaattatataatatgttctatagaaatcatatcacgttt

SEQ ID NO: 51223 - DNA, 80 bp, synthetic construct
  source 1..80: mol_type = other DNA
ggacaatcgcgaatgtttattccacatattacgcttagtttcagcaacaaacagacggttagaatagaaagtacaaaact

SEQ ID NO: 51224 - DNA, 80 bp, synthetic construct
  source 1..80: mol_type = other DNA
caaaattagttcaatttacttaagaaagattaaaggtgaaaccgtatttgatatgtctgagtgagctaaaaacttaacac

SEQ ID NO: 51225 - DNA, 80 bp, synthetic construct
  source 1..80: mol_type = other DNA
gagaataacatagtttatttacatgattattcatattatactaacaatgaaataagaacagaccaacattggataactaa

SEQ ID NO: 51226 - DNA, 80 bp, synthetic construct
  source 1..80: mol_type = other DNA
ctgatatgattgattatctattacctggatggaaattaacgtatgtaggctataatggaaaaaatacacgaggtcactat

SEQ ID NO: 51227 - DNA, 80 bp, synthetic construct
  source 1..80: mol_type = other DNA
aatttttcatttacatgtcaaaatgcagctacagatgatgatataataattgaatacatatactccagtgagttagactt

SEQ ID NO: 51228 - DNA, 80 bp, synthetic construct
  source 1..80: mol_type = other DNA
tcaaaatttcctgctaagaaaaattaaagagagaatgaccacatctcttccaattgctagactatcaaatcgtgtgttta

SEQ ID NO: 51229 - DNA, 80 bp, synthetic construct
  source 1..80: mol_type = other DNA
gagataaactatttccatctattgtaaacatacataaaaaagtgataaacgttgggccgaggaatgaatctatgttcaca

SEQ ID NO: 51230 - DNA, 80 bp, synthetic construct
  source 1..80: mol_type = other DNA
agcaggagagatggttgggtaaaagagtatcacaatttgatatcggacaatataaaaatatgttaaatgtaattactact

SEQ ID NO: 51231 - DNA, 80 bp, synthetic construct
  source 1..80: mol_type = other DNA
atttactattactacaatctatactattcaaaacctataatatacatgcttggttcagctccatcttattggatttatga

SEQ ID NO: 51232 - DNA, 80 bp, synthetic construct
  source 1..80: mol_type = other DNA
tattaaacagtattctgattttacatttgaaacatgggatccattagatactccatattctacaacacatcataaagaat

SEQ ID NO: 51233 - DNA, 80 bp, synthetic construct
  source 1..80: mol_type = other DNA
ttgttttacataagtgatgtagctaaactgagagatgattcgatattatatgtagacatacgaacagatagagaaaatat

SEQ ID NO: 51234 - DNA, 80 bp, synthetic construct
  source 1..80: mol_type = other DNA
agattggaaaacatggaggaaagttgtagaagaacaaaccattaacaatttgaatatcgcatacaaatacttatccacgg

SEQ ID NO: 51235 - DNA, 80 bp, synthetic construct
  source 1..80: mol_type = other DNA
ggaaagctaaagtatgttgtgttaaaatgactgctatggatttagagttaccaatatccgcaaagctactgcatcatcca

SEQ ID NO: 51236 - DNA, 80 bp, synthetic construct
  source 1..80: mol_type = other DNA
actacggagattaggtcagaattctatttaataatggatatatgggattctaagaatattaaacggtttataccaaaagg

SEQ ID NO: 51237 - DNA, 80 bp, synthetic construct
  source 1..80: mol_type = other DNA
cgtattatactcatatataaacaatgtaatcactgagaacgtgttcgtacaacaaccgtttaaattgaaaacattaaaga

SEQ ID NO: 51238 - DNA, 80 bp, synthetic construct
  source 1..80: mol_type = other DNA
atgagtatatagttgcgttatacgcgttatctaacgacttcaatactagagaagatgtaataaaattagtcgacaaccag

SEQ ID NO: 51239 - DNA, 80 bp, synthetic construct
  source 1..80: mol_type = other DNA
catttctaatttctaatctcactacgcataatatattatatctaaattatagcgttaagacactgcaaatattgaataaa

SEQ ID NO: 51240 - DNA, 80 bp, synthetic construct
  source 1..80: mol_type = other DNA
aagagtgcgttaataactgtaagaataaataatacatttaaagatgaaccaaaagtggggtttaaagatatctatgactg

SEQ ID NO: 51241 - DNA, 80 bp, synthetic construct
  source 1..80: mol_type = other DNA
gacttttttgccaactgatttcaaaacgaaggagtcaataattacatcatatgatggttgtttaggtatatttggtttat

SEQ ID NO: 51242 - DNA, 80 bp, synthetic construct
  source 1..80: mol_type = other DNA
caattcgcaaatcatatgagtatatcacgacggtcgcatcaaatacgattttcagaatcagcaacttcgtattcaggtta

SEQ ID NO: 51243 - DNA, 80 bp, synthetic construct
  source 1..80: mol_type = other DNA
aagcggtggatatacttacactcaacgggtaaggctagtattgaaggcggcaaatattatgaacacgctccaatagagtt

SEQ ID NO: 51244 - DNA, 80 bp, synthetic construct
  source 1..80: mol_type = other DNA
gatttacgcatgcagatcagcaaaggaatttgcaaaattgcaagacgatttaacggtactgagatattcaaacgaaatag

SEQ ID NO: 51245 - DNA, 80 bp, synthetic construct
  source 1..80: mol_type = other DNA
ccttatagatatgacgttaaagtaccgcatcttacatttggtgtattaaatatttcggattccatggtaccagatgtagt

SEQ ID NO: 51246 - DNA, 80 bp, synthetic construct
  source 1..80: mol_type = other DNA
agcaattttagagaagtttaaaaatgaattgtttagaatggacataactacgagttatacttatatgttatcagacgaaa

SEQ ID NO: 51247 - DNA, 80 bp, synthetic construct
  source 1..80: mol_type = other DNA
tctatgtagcaaatgtaagtggtgtgctatcaacatatttcaaactttataatgcattctataaagagcaaattacgttt

SEQ ID NO: 51248 - DNA, 80 bp, synthetic construct
  source 1..80: mol_type = other DNA
gggcaatcgagaatgttcattccacatataacacttagtttcagcaacaaaaaagtagtgagaataaatagtacgcggtt

SEQ ID NO: 51249 - DNA, 80 bp, synthetic construct
  source 1..80: mol_type = other DNA
aaacatagacttcatatatttgagaaaaataaaaggcgacacagtgttcgatatggctgagtgagctaaaaacttaacac

SEQ ID NO: 51250 - DNA, 80 bp, synthetic construct
  source 1..80: mol_type = other DNA
tgatgacattgtttaccttcatgactattcgtattataccaacaatgaaataagaactgatcaacattgggtaactaaga

SEQ ID NO: 51251 - DNA, 80 bp, synthetic construct
  source 1..80: mol_type = other DNA
atcgtgtgttcagagataagttgtttaagacattggtatcagatcatggtagagtagttaatattggaccaaggaatgag

SEQ ID NO: 51252 - DNA, 80 bp, synthetic construct
  source 1..80: mol_type = other DNA
tctatgtttacttttctagactatccatcaataaagcagttttcaaatggaccatatttagttaaggatacaataaagct

SEQ ID NO: 51253 - DNA, 80 bp, synthetic construct
  source 1..80: mol_type = other DNA
taaacaagagagatggcttggtaagagactatcgcaatttgacatcggtcaatataaaaatatgttaaatgtactaacga

SEQ ID NO: 51254 - DNA, 80 bp, synthetic construct
  source 1..80: mol_type = other DNA
tttgtatcaatactatgacatgtatcataagaagccaataatatacatgataggatcagcgccttcatattggatacacg

SEQ ID NO: 51255 - DNA, 80 bp, synthetic construct
  source 1..80: mol_type = other DNA
acgtgaaacaatattccgatttgaaatttgaaacgtgggatccactagatacaccttattctgatttacatcataaagat

SEQ ID NO: 51256 - DNA, 80 bp, synthetic construct
  source 1..80: mol_type = other DNA
agttattttctgaaagggatgtaactagattgaaggatgattccattctgtatattgacatcagaactgatcgtggaaac

SEQ ID NO: 51257 - DNA, 80 bp, synthetic construct
  source 1..80: mol_type = other DNA
acggactggaaagaatggagaaaaatagtcgaggcacaaaccatcagtaaccttaaaatcgcataccaatatttagctag

SEQ ID NO: 51258 - DNA, 80 bp, synthetic construct
  source 1..80: mol_type = other DNA
tggtaaatcgaaagtgtgttgcattaaaatgactgccatggacctagaacttcctatctctgcaaagctattgcatcatc

SEQ ID NO: 51259 - DNA, 80 bp, synthetic construct
  source 1..80: mol_type = other DNA
caacgactgaaatccgatcagaattttatcttcttttagacatttgggatattagtaacatcaaaagattcattccaaaa

SEQ ID NO: 51260 - DNA, 80 bp, synthetic construct
  source 1..80: mol_type = other DNA
ggagtgttatattcatttataaacaacgtgactactgaaaatgtgttcatacaaccaccgtttaaggttaaagcatccaa

SEQ ID NO: 51261 - DNA, 80 bp, synthetic construct
  source 1..80: mol_type = other DNA
aaatgactatattgtagcattatacgcactgtcaaatgattttaatgatagaacagatgtgattaatttaattaataatc

SEQ ID NO: 51262 - DNA, 80 bp, synthetic construct
  source 1..80: mol_type = other DNA
cattccttatatctaatcttacaacacataatatcctatatttaaactacagcaccaagacacttgaaatattgaataaa

SEQ ID NO: 51263 - DNA, 80 bp, synthetic construct
  source 1..80: mol_type = other DNA
gacttttctaccaacagacttcaatacaacggatgccataataacctcatatgatggatgtttaggcatatttggattgt

SEQ ID NO: 51264 - DNA, 80 bp, synthetic construct
  source 1..80: mol_type = other DNA
caatatctttagcttcgaagccaacgggaaataaccacttatttattttaaacggaacagataaatattataaattagat

SEQ ID NO: 51265 - DNA, 80 bp, synthetic construct
  source 1..80: mol_type = other DNA
ggacgaacgtagaaaattcagtttcaggacatgtatataacgcattaatttattacagatataattattcttttgattta

SEQ ID NO: 51266 - DNA, 80 bp, synthetic construct
  source 1..80: mol_type = other DNA
aaagctatataaatagagtgtatagtataacgtatgcagatgatccaaattactttataggtattaaattcaggcacatt

SEQ ID NO: 51267 - DNA, 80 bp, synthetic construct
  source 1..80: mol_type = other DNA
ccctataaatatgacgttaaaaccccacatttgacatttggagtattgtttatttcagataatatgattccagatgtggt

SEQ ID NO: 51268 - DNA, 80 bp, synthetic construct
  source 1..80: mol_type = other DNA
tcaggaattgcggctattgagatccggtctctcgaagagttatttactctaattagatgtaatttcacttatgattatga

SEQ ID NO: 51269 - DNA, 80 bp, synthetic construct
  source 1..80: mol_type = other DNA
gaagattatgaaaggtatgaagaaagagttatttgaaatggacgtgactactagttatacgtatatgttatctgatggaa

SEQ ID NO: 51270 - DNA, 80 bp, synthetic construct
  source 1..80: mol_type = other DNA
tatatgtagcgaatattagcggagttttagcggtatattttaaaatgtataatttattttataagagtcagattacattc

SEQ ID NO: 51271 - DNA, 80 bp, synthetic construct
  source 1..80: mol_type = other DNA
ggtcaatctagaatgtttattccgcacatgacgttgagttttagcaataatggaacagtaagaatagaaactactaggtt

SEQ ID NO: 51272 - DNA, 80 bp, synthetic construct
  source 1..80: mol_type = other DNA
aaatattagctcaatatatttgagaaaaattaagggagatacggtgtttgatatgtctgagtgagctagaaacttaacac

SEQ ID NO: 51273 - DNA, 80 bp, synthetic construct
  source 1..80: mol_type = other DNA
aatttttcattcacgtgccagaatgccgcgaccgacgacgatttgataatagaatatatatattctgaagcattagattt

SEQ ID NO: 51274 - DNA, 80 bp, synthetic construct
  source 1..80: mol_type = other DNA
ccagaatttcatgttaaggagaattaaagagagaatgaccacgtctttaccaatagcacgtttgtcaaatagagttttca

SEQ ID NO: 51275 - DNA, 80 bp, synthetic construct
  source 1..80: mol_type = other DNA
gagataaattatttccgtcactaagcgcaaagcatcaacgtatagtgaacgttggaccaagaaacgaatcaatgtttacc

SEQ ID NO: 51276 - DNA, 80 bp, synthetic construct
  source 1..80: mol_type = other DNA
aacaggaaaggtggttgggaaagagagtatctcaattcgacatcgggcaatataaaaacatgatgaatgttataacaacc

SEQ ID NO: 51277 - DNA, 80 bp, synthetic construct
  source 1..80: mol_type = other DNA
gtatactattattataacttgtatcagaaaaagcctattatatatatggttggttcagctccttcatattggatttacga

SEQ ID NO: 51278 - DNA, 80 bp, synthetic construct
  source 1..80: mol_type = other DNA
tgtcaaacagtattctgattttatatttgaaacttgggatccacttgatactccatattcatcgatacaccataaagagt

SEQ ID NO: 51279 - DNA, 80 bp, synthetic construct
  source 1..80: mol_type = other DNA
aacttttcattcaaatgccagaatgcagctacggatgacgatgcaataatagagtatatctactcaaatgaattagattt

SEQ ID NO: 51280 - DNA, 80 bp, synthetic construct
  source 1..80: mol_type = other DNA
tcagaattttatactcaaaaagattaaagaaagaatgacaacgtcattaccaatagcaagactttcaaatcgcgtgttca

SEQ ID NO: 51281 - DNA, 80 bp, synthetic construct
  source 1..80: mol_type = other DNA
actattttttgataaagacgttggcaaacttaaagataattcaatcttatatatagacataagaactgatagggaagata

SEQ ID NO: 51282 - DNA, 80 bp, synthetic construct
  source 1..80: mol_type = other DNA
tggattggagagagtggagaaaaatggtagaacagcagactattaataatctaaatattgcgtataagtatctatcaaca

SEQ ID NO: 51283 - DNA, 80 bp, synthetic construct
  source 1..80: mol_type = other DNA
aatgcattaatttactacagatataattatgcatttgatttaaaaagatggatttatttgcattcaattggagaagttgc

SEQ ID NO: 51284 - DNA, 80 bp, synthetic construct
  source 1..80: mol_type = other DNA
atttttaaatttcccaactattaaacaattttcaaacggtgcttacctagttaaacatactattaagcaaaaaaaggaga

SEQ ID NO: 51285 - DNA, 80 bp, synthetic construct
  source 1..80: mol_type = other DNA
actgttttatgcaagtgacgtaaccaaacttaaagataattcgatattatatgtggatatacgaacggatagagaaaatg

SEQ ID NO: 51286 - DNA, 80 bp, synthetic construct
  source 1..80: mol_type = other DNA
gcgtgttatattcatatataaacaatacaatcactgagaacgtgtttatacaacaaccgtttaaattgagaacattaagg

SEQ ID NO: 51287 - DNA, 80 bp, synthetic construct
  source 1..80: mol_type = other DNA
aatgagtatgtggttgcgttgtacgcgctgtctaacgatttcaacaatagagaagatgtggttaaattggttaacaatca

SEQ ID NO: 51288 - DNA, 80 bp, synthetic construct
  source 1..80: mol_type = other DNA
tctggtatagctgcgatagaaatacagaaaaatgatgaattgtttacgttgattagatgtaatttcacatacgattatat

SEQ ID NO: 51289 - DNA, 80 bp, synthetic construct
  source 1..80: mol_type = other DNA
agatacgattttcagagtcagctacttcatattcggggtatatttttagggatttatctaataataatttcaatttaata

SEQ ID NO: 51290 - DNA, 80 bp, synthetic construct
  source 1..80: mol_type = other DNA
acaatttttcatttagatgtcaaaatgcggctacagatgatgatgcaataatagagtatatctattcagatgaattagac

SEQ ID NO: 51291 - DNA, 80 bp, synthetic construct
  source 1..80: mol_type = other DNA
tgataacagtgagaattaataatacgtttaaagatgaaccgaaagtcggatttaagaatatttatgactggacatttttg

SEQ ID NO: 51292 - DNA, 80 bp, synthetic construct
  source 1..80: mol_type = other DNA
ttattttacataaatgacgtgcaaaaacttaaagataattcgatactatatatagatataagatcggatagaggagctat

SEQ ID NO: 51293 - DNA, 80 bp, synthetic construct
  source 1..80: mol_type = other DNA
ggactggaaggaatggcgaaaagtggtggaagggcaaactgctgacaatttacatattgcatacaaatatctatctacag

SEQ ID NO: 51294 - DNA, 80 bp, synthetic construct
  source 1..80: mol_type = other DNA
gaaaagctaagatatgttgtgttaaaatgaccgctatggatgtagaattaccaatatctgcaaaattacttcaccatcca

SEQ ID NO: 51295 - DNA, 80 bp, synthetic construct
  source 1..80: mol_type = other DNA
ttagatcagagttttatttaatgatggatatatgggattccaaaaatattaaaagattcataccaaaaggtgtattatac

SEQ ID NO: 51296 - DNA, 80 bp, synthetic construct
  source 1..80: mol_type = other DNA
tcatatataaacaatacaattactgaaaacgtatttatacaacaaccttttaagttgaaaacattgaaaaatgaatatgt

SEQ ID NO: 51297 - DNA, 80 bp, synthetic construct
  source 1..80: mol_type = other DNA
aatagcactttatgctttatcaaatgattttaacaatagagaagatgtggtaaaactaattaataatcagaaaaaagcgt

SEQ ID NO: 51298 - DNA, 80 bp, synthetic construct
  source 1..80: mol_type = other DNA
taataacggtgagaattaacaatacatttaaagatgaaccaaaagtcggatttaaaaacatttacgattggacctttttg

SEQ ID NO: 51299 - DNA, 80 bp, synthetic construct
  source 1..80: mol_type = other DNA
ccgacggattttgaaatgaatggatcaataattacctcatatgatggatgtctaggcatttttggtttatcaatatcgtt

SEQ ID NO: 51300 - DNA, 80 bp, synthetic construct
  source 1..80: mol_type = other DNA
agcttcaaaaccaaccggtaataatcatttattcattttaaatggtacggacaagtattttaaattggatcaattcgcaa

SEQ ID NO: 51301 - DNA, 80 bp, synthetic construct
  source 1..80: mol_type = other DNA
agatacgattttcggagtcggccacttcatactcgggatacatttttagagatttgtctaataataatttcaatttaata

SEQ ID NO: 51302 - DNA, 80 bp, synthetic construct
  source 1..80: mol_type = other DNA
ggtacgaatgtagagaattcagtatccggacacgtatataatgcattgatttattatagatataattactcatttgacct

SEQ ID NO: 51303 - DNA, 80 bp, synthetic construct
  source 1..80: mol_type = other DNA
aaacgatggatatacttacattcaacaggtaaagctagcattgaaggtggtaagtattatgaacatgctccaatagaatt

SEQ ID NO: 51304 - DNA, 80 bp, synthetic construct
  source 1..80: mol_type = other DNA
gatttatgcatgcaggtcagcaagagaattcgcgaaattgcaagatgatttaacggtattaagatattcaaatgagatag

SEQ ID NO: 51305 - DNA, 80 bp, synthetic construct
  source 1..80: mol_type = other DNA
aaaactacatcaataaagtttatagtataacatacgccgacgaccctaattactttattggaattaagtttaaaaatatt

SEQ ID NO: 51306 - DNA, 80 bp, synthetic construct
  source 1..80: mol_type = other DNA
ccttacaagtataatgttaaagtaccacatctcacatttggtgtgttaaatatttctgaacagatgataccagatgcaat

SEQ ID NO: 51307 - DNA, 80 bp, synthetic construct
  source 1..80: mol_type = other DNA
aatccggtatagctgcaatagagatacagaagatagatgagttattcacgctaattagatgtaattttacatacgactac

SEQ ID NO: 51308 - DNA, 80 bp, synthetic construct
  source 1..80: mol_type = other DNA
agcaattttaaagaaatttaaaaacgaactatttggaatggacataacaacgagttatacatatatgttatctgataagg

SEQ ID NO: 51309 - DNA, 80 bp, synthetic construct
  source 1..80: mol_type = other DNA
gggcagtcaagaatgtttattcctcatgtaacgttgagttttagtaatgagaaaacagtgagaatagacacaacaaaatt

SEQ ID NO: 51310 - DNA, 80 bp, synthetic construct
  source 1..80: mol_type = other DNA
gtatatagattccatttatctaagaaaaataaaaggtgacacggtatttgatatgactgagtgagctaaaaacttaacac

SEQ ID NO: 51311 - DNA, 80 bp, synthetic construct
  source 1..80: mol_type = other DNA
attgatgacattgtctatttacatgactattcatattatactaataatgaaatacggactgaccagtattgggtaaccaa

SEQ ID NO: 51312 - DNA, 80 bp, synthetic construct
  source 1..80: mol_type = other DNA
ttcagagctttgtactcaaaaagattaaagaaaggatgacaacatcactaccaatagcaagactttcaaatcgtgtattt

SEQ ID NO: 51313 - DNA, 80 bp, synthetic construct
  source 1..80: mol_type = other DNA
ttttttagaccacccatcaataaaacagttttctaatggaccatatttggtcaaagatacaattaaactcaaacaagaga

SEQ ID NO: 51314 - DNA, 80 bp, synthetic construct
  source 1..80: mol_type = other DNA
tttatatcaatattacgatatgtatcatgaaaaaccaattatatatatgataggatcagcgccctcgtattggatatatg

SEQ ID NO: 51315 - DNA, 80 bp, synthetic construct
  source 1..80: mol_type = other DNA
atgtcaaacagtactctgacttgaaatttgagacatgggatccactagatacaccatattctagtttacatcataaggaa

SEQ ID NO: 51316 - DNA, 80 bp, synthetic construct
  source 1..80: mol_type = other DNA
aggtgtatgcagatacgcaaacttacttgcatgacgattcccaagatgagtatgaaaacgcatttctcatttctaatcta

SEQ ID NO: 51317 - DNA, 80 bp, synthetic construct
  source 1..80: mol_type = other DNA
tgtcgtgcttgattatacgcaaacttactggtactgctatacccaagatgagtatgaaaatgcatttctcatttctaatc

SEQ ID NO: 51318 - DNA, 80 bp, synthetic construct
  source 1..80: mol_type = other DNA
ttaacgatgtacaaaaacttaaagataactcaatactgtatatagatataaggacagatagaggaaatatggactggaaa

SEQ ID NO: 51319 - DNA, 80 bp, synthetic construct
  source 1..80: mol_type = other DNA
ggaaagctaagatatgttgtgttaaaatgaccgccatggatttagaactaccaatttccgcaaagctgttacaccaccca

SEQ ID NO: 51320 - DNA, 80 bp, synthetic construct
  source 1..80: mol_type = other DNA
acaacagaagttagatcagaattttatttaatgatggatatgtgggactccagaaatattaagagatttgtacccaaagg

SEQ ID NO: 51321 - DNA, 80 bp, synthetic construct
  source 1..80: mol_type = other DNA
cgtattatactcgtatataaacaatacaattactgagaacgtatttatacaacagccgtttaagttaaaaacgttgaaaa

SEQ ID NO: 51322 - DNA, 80 bp, synthetic construct
  source 1..80: mol_type = other DNA
acgaatatgtgacagcactgtatgctttgtcaaatgattttaataatagggaagatgtgataaaattaattaataatcag

SEQ ID NO: 51323 - DNA, 80 bp, synthetic construct
  source 1..80: mol_type = other DNA
catttctgatttctaatctcactactcacaatatactatatctaaactatagtgttaagacgctacaaatattaaataaa

SEQ ID NO: 51324 - DNA, 80 bp, synthetic construct
  source 1..80: mol_type = other DNA
tgagaattaataatacgtttaaagatgaaccaaaagttggatttaaaaatatttatgattggacgtttttgccaacagat

SEQ ID NO: 51325 - DNA, 80 bp, synthetic construct
  source 1..80: mol_type = other DNA
caatatcattagcctcaaaaccgactggtaacaatcatttgtttattttaagtggtacggacaaatattttaaattggat

SEQ ID NO: 51326 - DNA, 80 bp, synthetic construct
  source 1..80: mol_type = other DNA
caattcgcgaaccatatgagcatatcacggcgatcgcatcaaatacgattctcagagtcggctacttcgtactcggggta

SEQ ID NO: 51327 - DNA, 80 bp, synthetic construct
  source 1..80: mol_type = other DNA
cattttcagagatttgtccaataataattttaacttaataggtacaaacatagaaaattcagtatctggacatgtgtata

SEQ ID NO: 51328 - DNA, 80 bp, synthetic construct
  source 1..80: mol_type = other DNA
aagcgatggatatatttacattcaacaggtaaagctagtatcgaaggtggtaaatattacgaacatgccccaatagaact

SEQ ID NO: 51329 - DNA, 80 bp, synthetic construct
  source 1..80: mol_type = other DNA
ttccttataagtatagtgttaaagtaccacatctcacatttggcgtattaaatatttctgaacaaatgttaccggataca

SEQ ID NO: 51330 - DNA, 80 bp, synthetic construct
  source 1..80: mol_type = other DNA
tctggcatagctgcgatagaaatacagaagatggacgagttattcacgctaattagatgcaattttacatatgattatat

SEQ ID NO: 51331 - DNA, 80 bp, synthetic construct
  source 1..80: mol_type = other DNA
atagctattctaaagaaatttaaaaacgaactgtttggaatggatataacaacgaattacacgtatatgctatccgatga

SEQ ID NO: 51332 - DNA, 80 bp, synthetic construct
  source 1..80: mol_type = other DNA
agtatatgtagcaaatgtaagcggtgtgctatcaacgtattttaaaatttacaacgcgttttataaagaacagattacat

SEQ ID NO: 51333 - DNA, 80 bp, synthetic construct
  source 1..80: mol_type = other DNA
ttgggcaatcaagaatgtttatacctcatataacattgagctttagtaacgagaagacagtgagaatagatactacaaaa

SEQ ID NO: 51334 - DNA, 80 bp, synthetic construct
  source 1..80: mol_type = other DNA
ctacacatagattctgtttatttgagaaaaataaaaggtgacacggtgtttgatatgactgggtgagctaaaaacttaac

SEQ ID NO: 51335 - DNA, 80 bp, synthetic construct
  source 1..80: mol_type = other DNA
tgatgatattgtttatttgcatgactattcgtattatactaataatgaaatacggactgatcaacattgggtaacgaaga

SEQ ID NO: 51336 - DNA, 80 bp, synthetic construct
  source 1..80: mol_type = other DNA
caaatatagaaaattatttgttacccggatggaaactgacatatgtcggatacaatggaagcaatacgagaggacattat

SEQ ID NO: 51337 - DNA, 80 bp, synthetic construct
  source 1..80: mol_type = other DNA
tccagaattttgtactcaaaaagattaaagaaagaatgacaacgtcgttaccaatagcgagactttcaaatcgcatattt

SEQ ID NO: 51338 - DNA, 80 bp, synthetic construct
  source 1..80: mol_type = other DNA
agagataaattatttaaaacgttgtcagcagatcatgacaaagtagttaatgttggacctaggaatgaatctatgtttac

SEQ ID NO: 51339 - DNA, 80 bp, synthetic construct
  source 1..80: mol_type = other DNA
tttcttaaactacccatcaataaaacagttctcgaacggaccatacttagttaaagacacaattaaactcaaacaagaga

SEQ ID NO: 51340 - DNA, 80 bp, synthetic construct
  source 1..80: mol_type = other DNA
gatggcttggcaaaagattatcgcaatttgacattggtcaatataaaaatatgttgaatgtgttaacaactttatatcaa

SEQ ID NO: 51341 - DNA, 80 bp, synthetic construct
  source 1..80: mol_type = other DNA
tactatgacgtataccatgaaaaaccaattgtatatatgataggatcggctccctcgtattggatatatgatgttagaca

SEQ ID NO: 51342 - DNA, 80 bp, synthetic construct
  source 1..80: mol_type = other DNA
gtactctgatttaaaatttgagacgtgggacccgtcagatacaccgtattctgatttacatcataaagaattattctaca

SEQ ID NO: 51343 - DNA, 80 bp, synthetic construct
  source 1..80: mol_type = other DNA
tgtacgtagcgaatgtaagcggtgtgctatcaacatattttaaaatttacaacgcgttttataaaaaacagatcacattt

SEQ ID NO: 51344 - DNA, 80 bp, synthetic construct
  source 1..80: mol_type = other DNA
atgttaaacagtactctgatttaaaatttgagacgtgggatccattagacacaccatattctgacttacatcataaagaa

SEQ ID NO: 51345 - DNA, 80 bp, synthetic construct
  source 1..80: mol_type = other DNA
tattctaacttaaaatttgaaacatgggatccacttgatacaccatactctgatttacatcataaggaattattttgcat

SEQ ID NO: 51346 - DNA, 80 bp, synthetic construct
  source 1..80: mol_type = other DNA
tattttttgagaaggacataactagattaaaggatgattcaatattgtatattgatatcaggactgatcgtggaaacacg

SEQ ID NO: 51347 - DNA, 80 bp, synthetic construct
  source 1..80: mol_type = other DNA
gattggaaagaatggaggaaaatagttgaggcgcaaactattagtaaccttaaacttgcataccgatacttatctggtgg

SEQ ID NO: 51348 - DNA, 80 bp, synthetic construct
  source 1..80: mol_type = other DNA
taagtcgaaggtatgttgtgttaaaatgactgctatggatttagagcttcccatatctgcaaagttattgcatcatccaa

SEQ ID NO: 51349 - DNA, 80 bp, synthetic construct
  source 1..80: mol_type = other DNA
ctactgaaatccgatcagagttttatcttcttctggacatctgggacattagtaatgtcaaaagatttattccaaaggga

SEQ ID NO: 51350 - DNA, 80 bp, synthetic construct
  source 1..80: mol_type = other DNA
gtattatattcattcataaataacgttactactgaaaatgtattcatacaaccgccgttcaaaatcaaaccgtttaagaa

SEQ ID NO: 51351 - DNA, 80 bp, synthetic construct
  source 1..80: mol_type = other DNA
tgattatattgtggcattatacgcattatcaaatgattttaatgatagaacggatgtaattaacttaattaacaatcaga

SEQ ID NO: 51352 - DNA, 80 bp, synthetic construct
  source 1..80: mol_type = other DNA
caatatccttagcttcaaagcctacgggaaataatcacttgtttatcttaaatggaaccgataagtattataaattggat

SEQ ID NO: 51353 - DNA, 80 bp, synthetic construct
  source 1..80: mol_type = other DNA
agtggagatcatgaaaattatgaaaaaggaattatttgaaatggatataaccactagttacacatatatgttatctgatg

SEQ ID NO: 51354 - DNA, 80 bp, synthetic construct
  source 1..80: mol_type = other DNA
gaatatatgtagcaaacgttagtggagttctagcgacatattttaaaatgtataatttattttataagagtcagattaca

SEQ ID NO: 51355 - DNA, 80 bp, synthetic construct
  source 1..80: mol_type = other DNA
ttcggtcaatctagaatgtttattccacatataacactaagttttagtaataataaaacagtaagaatagaaagtactag

SEQ ID NO: 51356 - DNA, 80 bp, synthetic construct
  source 1..80: mol_type = other DNA
tgtcaaacaatattctgattttatgtttgagacttgggacccacttgacactccatattcatcagtgcatcataaagaat

SEQ ID NO: 51357 - DNA, 80 bp, synthetic construct
  source 1..80: mol_type = other DNA
ttattttttgataaggacgttaataaacttaaagataattcagttttatacattgatatacgaactgatagggaaaattt

SEQ ID NO: 51358 - DNA, 80 bp, synthetic construct
  source 1..80: mol_type = other DNA
ggattggaaagagtggagaaaagtggtggaacagcaaactatcaacaatctaaatattgcatataaatatctagcaacag

SEQ ID NO: 51359 - DNA, 80 bp, synthetic construct
  source 1..80: mol_type = other DNA
tcagagataaattatttccatatattgtgaacatgtatgaaaaagtaataaatattggaccaagaaatgaatccatgttt

SEQ ID NO: 51360 - DNA, 80 bp, synthetic construct
  source 1..80: mol_type = other DNA
ggtagatgactcatacctacggagccacagggaggagctgctaacccatggaatgtagccaaacaggaaggaaagtgcat

SEQ ID NO: 51361 - DNA, 80 bp, synthetic construct
  source 1..80: mol_type = other DNA
ttgtcaccccccaggacaccatcgggccaacaagtgcacttctattgcccactcaagttgagacaccaaatgccagtgct

SEQ ID NO: 51362 - DNA, 80 bp, synthetic construct
  source 1..80: mol_type = other DNA
caccacaataccatggaccacccggcaagcagcaaacacctttctcggtgccatacacctgggcccacgcattaacccct

SEQ ID NO: 51363 - DNA, 80 bp, synthetic construct
  source 1..80: mol_type = other DNA
cccggcaagcagcaaacacctttctcggtgccatacacctgggcccacgcattaacccctacactgcacacctgagtgca

SEQ ID NO: 51364 - DNA, 80 bp, synthetic construct
  source 1..80: mol_type = other DNA
cagcgcgtagaacttgcaatggccacaggggcagtgaccagtaatgtgcccaactgcatccgggagtgttttgctgcggt

SEQ ID NO: 51365 - DNA, 80 bp, synthetic construct
  source 1..80: mol_type = other DNA
aactgttcttgaatatttagtgtcttttggagtgtggattcgcactcctcctgcatatagaccaccaaatgcccctatct

SEQ ID NO: 51366 - DNA, 80 bp, synthetic construct
  source 1..80: mol_type = other DNA
ttgctgagccccacccaatcgtgtcctgtgccattgaagctctttcctcacctgcagagggctacgtcaatgacatcaag

SEQ ID NO: 51367 - DNA, 80 bp, synthetic construct
  source 1..80: mol_type = other DNA
tgaaagccacaatgttccgtacactggaaatgttttccaagtggaaactgtccacacgtacggagatgatgaaatcgtca

SEQ ID NO: 51368 - DNA, 80 bp, synthetic construct
  source 1..80: mol_type = other DNA
gagctgcgacgggtacgtcgttaagcgtatcgctatcagtcctggcctgtacgggaagccgtcaggctatgctgccacca

SEQ ID NO: 51369 - DNA, 80 bp, synthetic construct
  source 1..80: mol_type = other DNA
atcttatcttattccaaatatggaagtcctaaacttaatctggttgctgacattgtgttcggccagtccagtgttccaac

SEQ ID NO: 51370 - DNA, 80 bp, synthetic construct
  source 1..80: mol_type = other DNA
tctttaaaaagtaccagcatagattcttagatttttatgcaatatactgcgaggagtgcgatatgtatcatgaaaaggct

SEQ ID NO: 51371 - DNA, 80 bp, synthetic construct
  source 1..80: mol_type = other DNA
ggtctgacacactggggagactttacaaataagtgcagacagtgtacatgcggacaatttgaagatgctgctgggttgat

SEQ ID NO: 51372 - DNA, 80 bp, synthetic construct
  source 1..80: mol_type = other DNA
ctttgaaatatattgatagtttggagacatatcatgagcaacttactgctgaatatgcattcctcactaagtattgtgat

SEQ ID NO: 51373 - DNA, 80 bp, synthetic construct
  source 1..80: mol_type = other DNA
ctgaaatatccacatttgagcttgatgaggactgggaagacttcaaatacaagcctgaaccaactgagccaacactccag

SEQ ID NO: 51374 - DNA, 80 bp, synthetic construct
  source 1..80: mol_type = other DNA
gctagatcacatagaagtgatcaatataacttcaaaaatgcagctagtaatagaaatgtcaaggtgtgtaaaaatgtcca

SEQ ID NO: 51375 - DNA, 80 bp, synthetic construct
  source 1..80: mol_type = other DNA
cttagaagaatatgaagtggtggaaacagagctcctgaatgcactaaaaaagtctaaatgttgggttaaagaggtagatg

SEQ ID NO: 51376 - DNA, 80 bp, synthetic construct
  source 1..80: mol_type = other DNA
atgtaatcttacacaagcaaagtgacggcctaagaagttgtagaatgaaagacactggaaattgcaatgtcaaagagaat

SEQ ID NO: 51377 - DNA, 80 bp, synthetic construct
  source 1..80: mol_type = other DNA
aatagcaatgatcgaatgcaagagaaagatgatgaaaagcgagatcagaacaataaaatgcaactatcagacaaagtact

SEQ ID NO: 51378 - DNA, 80 bp, synthetic construct
  source 1..80: mol_type = other DNA
cgctcgactttgtgactaccaactacatgtcattaatctcaggtatgtggttgctaactgtagtgccgaacgatatgttt

SEQ ID NO: 51379 - DNA, 80 bp, synthetic construct
  source 1..80: mol_type = other DNA
tgttaataacaaccaatttagacaagtagtcattgatggtgtattgaaccaggtgctgaacgataacatcaggaatggac

SEQ ID NO: 51380 - DNA, 80 bp, synthetic construct
  source 1..80: mol_type = other DNA
atgttatcaatcaactaatggaagccttaatgcagctgtcacgacaacagtttccaacaatgcccgttgattacaagaga

SEQ ID NO: 51381 - DNA, 80 bp, synthetic construct
  source 1..80: mol_type = other DNA
atcaattcagcgtggaatattgttgctatcaaatagacttggtcagctagtcgatttaactagattgctagcttataatt

SEQ ID NO: 51382 - DNA, 80 bp, synthetic construct
  source 1..80: mol_type = other DNA
aatccaaacagttacttgaagtgctgaaaacaaaagaagagcaccaaaaggaaatgcagtatgagattttacaaaaaacg

SEQ ID NO: 51383 - DNA, 80 bp, synthetic construct
  source 1..80: mol_type = other DNA
actcaaattacaatgagagaatcaatgatgcagtagccattataactgcggctaacagattgaacttataccagaaaaag

SEQ ID NO: 51384 - DNA, 80 bp, synthetic construct
  source 1..80: mol_type = other DNA
tagttgaagattttctaaaaagattacatattttcgacgtggctagagttccagatgaccaaatgtatcggctaagggac

SEQ ID NO: 51385 - DNA, 80 bp, synthetic construct
  source 1..80: mol_type = other DNA
agactacgattgctgccagtagaagtaagacgattagatatttttaatttgatactgatgaacatggaccagatagaacg

SEQ ID NO: 51386 - DNA, 80 bp, synthetic construct
  source 1..80: mol_type = other DNA
tgcctcagataaaattgcacagggtgtcatcattgcataccgtgacatgcaattagaaagagatgaaatgtatggttatg

SEQ ID NO: 51387 - DNA, 80 bp, synthetic construct
  source 1..80: mol_type = other DNA
tgaatatagctaggaatctagatgggttccagcaaataaacctggaagaactaatgagaacgggcgactatgcacaaata

SEQ ID NO: 51388 - DNA, 80 bp, synthetic construct
  source 1..80: mol_type = other DNA
actaatatgcttttaaataatcaaccagtagcactagttggggctcttccatttattacagattcatcagtaatatcact

SEQ ID NO: 51389 - DNA, 80 bp, synthetic construct
  source 1..80: mol_type = other DNA
ccaagacagctacctatttatagggcgaatggtgaaaaagaattgcgtaacagatggtattggaagctgaagaaagacac

SEQ ID NO: 51390 - DNA, 80 bp, synthetic construct
  source 1..80: mol_type = other DNA
tctaccagatggagactatgatgttagagaatacttccttaatttgtatgatcaggtccttactgaaatgccagattact

SEQ ID NO: 51391 - DNA, 80 bp, synthetic construct
  source 1..80: mol_type = other DNA
ttcaaagaaagaagaagtcataactgacaatcaagaagaggttaaaattgctgatgaagtgaaaaaatcaacgaaagagg

SEQ ID NO: 51392 - DNA, 80 bp, synthetic construct
  source 1..80: mol_type = other DNA
tgagtctttgtgggatacaataacgacttcaaattatattctggcaagatcagtagtaccagatttaaaggaactagttt

SEQ ID NO: 51393 - DNA, 80 bp, synthetic construct
  source 1..80: mol_type = other DNA
caaccgaagcacaaattcaaaagatgtcacaagacttgcaattagaagcgttgacgatacagtcagagacacagttctta

SEQ ID NO: 51394 - DNA, 80 bp, synthetic construct
  source 1..80: mol_type = other DNA
gatcgaatgcaggagaaaattgatgaaaagcaagatttaaataaaatgcaattatctgataaggtactttcgaagaaaga

SEQ ID NO: 51395 - DNA, 80 bp, synthetic construct
  source 1..80: mol_type = other DNA
agaagttgtaacggatagtcatgaggaagttaaagttactgatgaagtaaaaaaatcaacgaaagaagaatcgaaacaat

SEQ ID NO: 51396 - DNA, 80 bp, synthetic construct
  source 1..80: mol_type = other DNA
attttagaaaggctttcagaggccacacctatcaccacatcagcagtcgagctcctttcatcgcctgctcgtggccacct

SEQ ID NO: 51397 - DNA, 80 bp, synthetic construct
  source 1..80: mol_type = other DNA
gctcaaggcctatgaacaacatggtgccccttataccggcaatgtgttccaggtggaaactgtccacacttatggtgatg

SEQ ID NO: 51398 - DNA, 80 bp, synthetic construct
  source 1..80: mol_type = other DNA
cctctgcacgtcgcatggagaccaccgtgaacgcccgccaggtcttgcccaaggtcttacataagaggactcttggactc

SEQ ID NO: 51399 - DNA, 80 bp, synthetic construct
  source 1..80: mol_type = other DNA
gtaaatagacctattgattggaaagtatgtcaaagaattgtgggtcttctgggctttgctgccccttttacacaatgtgg

SEQ ID NO: 51400 - DNA, 80 bp, synthetic construct
  source 1..80: mol_type = other DNA
gtttgggactctaccgtccccttctttggagcttctgtggagttactctcttttttaccttctgacttctttccttctat

SEQ ID NO: 51401 - DNA, 80 bp, synthetic construct
  source 1..80: mol_type = other DNA
tcgtgatctcctcgacaccgcctctgctctgtatcgggaggccttagagtctccggaactattgtggtttcacatttcct

SEQ ID NO: 51402 - DNA, 80 bp, synthetic construct
  source 1..80: mol_type = other DNA
gagcttctgtggagttactctcttttttgccttctgacttctttccgtctattcgggatctcctcgacaccgcctctgct

SEQ ID NO: 51403 - DNA, 80 bp, synthetic construct
  source 1..80: mol_type = other DNA
atccatactgcggaactcctagcagcttgttttgctcgcagccggtctggagcaaaacttatcggcaccgacaactctgt

SEQ ID NO: 51404 - DNA, 80 bp, synthetic construct
  source 1..80: mol_type = other DNA
ctgtatcgggaggccttagagtctccggaacattgttcacctcaccatacagcactaaggcaagctattctgtgttggtg

SEQ ID NO: 51405 - DNA, 80 bp, synthetic construct
  source 1..80: mol_type = other DNA
gaaacgtggagcgcgccgtgaggcgaacttaaataataatgatcgaatgcaggagaaaattgatgaaaagcaagattcaa

SEQ ID NO: 51406 - DNA, 80 bp, synthetic construct
  source 1..80: mol_type = other DNA
gatgaagtaaaaaaatcaacgaaagaagaatcaaaacaattgctcgaagtgttgaaaacaaaggaagaacatcagaaaga

SEQ ID NO: 51407 - DNA, 80 bp, synthetic construct
  source 1..80: mol_type = other DNA
ataaaatacaattatctgataaggtactttcgaaaaaagaagaagttgtaacggatagtcatgaggaagttaaagttact

SEQ ID NO: 51408 - DNA, 80 bp, synthetic construct
  source 1..80: mol_type = other DNA
actgtccctgtctttaatccgcattggaaaacaccatcttttcctaatatacatttacaccaagatattatcaaaaaatg

SEQ ID NO: 51409 - DNA, 80 bp, synthetic construct
  source 1..80: mol_type = other DNA
atgctatctgataatatatatgtagcaaatgccagcggtgtgttatcaacgtattttaaattatataatatgttttacag

SEQ ID NO: 51410 - DNA, 80 bp, synthetic construct
  source 1..80: mol_type = other DNA
tgaaccccatccaattgtgtcttgtgccattgaggctctttcttcccctgcagagggttatgtcaatgacatcaaatttg

SEQ ID NO: 51411 - DNA, 80 bp, synthetic construct
  source 1..80: mol_type = other DNA
cacaatgttccatacactggaactgtcttccaggtggagaccattcacacgtacggtgatgactgcatatactgcgtgtg

SEQ ID NO: 51412 - DNA, 80 bp, synthetic construct
  source 1..80: mol_type = other DNA
tccttagcatccttgagcggctgtctgaagcaacaccaataacaacatcagccgtagagttgctctcatcaccagcacgt

SEQ ID NO: 51413 - DNA, 80 bp, synthetic construct
  source 1..80: mol_type = other DNA
tgcagtgttgaaggcctatgaacaacatggggcgccttatactggtaatgtgttccaggtggaaactgttcacacatatg

SEQ ID NO: 51414 - DNA, 80 bp, synthetic construct
  source 1..80: mol_type = other DNA
atctgccgttaatggtactgttctcagggtctcacttaaccccacatctacaccatcttccactagttggtcaggattag

SEQ ID NO: 51415 - DNA, 80 bp, synthetic construct
  source 1..80: mol_type = other DNA
gtacgctaaatctttttaggtacaagagcaggtgttatatttttacagtttgggtgattcttctcattattgagtcgatc

SEQ ID NO: 51416 - DNA, 80 bp, synthetic construct
  source 1..80: mol_type = other DNA
atggcgtacaggaaacgtggagcgcgccgtgaggcgaatataaataataatgaccgaatgcaagagaaagatgacgagaa

SEQ ID NO: 51417 - DNA, 80 bp, synthetic construct
  source 1..80: mol_type = other DNA
aacaggcataaactcacaagcagcaaatgactgttttaagactctgattgcagcaatgttaagtcaacgaaccatgtcgc

SEQ ID NO: 51418 - DNA, 80 bp, synthetic construct
  source 1..80: mol_type = other DNA
gagcaccaaaaagaaatacaatatgaaattttacaaaaaacgataccaacatttgaaccaaaagagtcaatattgaagaa

SEQ ID NO: 51419 - DNA, 80 bp, synthetic construct
  source 1..80: mol_type = other DNA
ttgcattcgtatcggccgatacagtagaacctataaatgcagttgcatttgataatatgcgcatcatgaacgagttgtaa

SEQ ID NO: 51420 - DNA, 80 bp, synthetic construct
  source 1..80: mol_type = other DNA
acaagatcaaaacaatagaatgcaattgtctgacaaagtactttcaaagaaagaggaagtcgtaaccgacagtcaggagg

SEQ ID NO: 51421 - DNA, 80 bp, synthetic construct
  source 1..80: mol_type = other DNA
gctcaatggcgtataggaaacgtggagtgcgccgtgaggcgaacttaaataataatgatcgaatgcaggagaaaattgat

SEQ ID NO: 51422 - DNA, 80 bp, synthetic construct
  source 1..80: mol_type = other DNA
tcgcgttcgtatcagctgacacagtagaacctataaatgcagttgcatttgacaatatgcgcatcatgaacgaattgtag

SEQ ID NO: 51423 - DNA, 80 bp, synthetic construct
  source 1..80: mol_type = other DNA
aattgccgaaattgccaagaggacggcacagtcagaagggttagtgctcaccaacgtgaactatgaccaggctctcgcca

SEQ ID NO: 51424 - DNA, 80 bp, synthetic construct
  source 1..80: mol_type = other DNA
cctacgaagcgtggtttataggtggtacaggcaccagtcaagatagccccagtgaagagactaccaaattagtgtttgaa

SEQ ID NO: 51425 - DNA, 80 bp, synthetic construct
  source 1..80: mol_type = other DNA
ccaggatgttgacccgcctggcgcgactggtccgaccacatcccacgttgttgtgtctaatccagaacaacccaacgggc

SEQ ID NO: 51426 - DNA, 80 bp, synthetic construct
  source 1..80: mol_type = other DNA
tgcctcagataaaattgctcaaggtgtaatcattgcttatcgtgacatgcatcttgaaagagatgagatgtacgggtatg

SEQ ID NO: 51427 - DNA, 80 bp, synthetic construct
  source 1..80: mol_type = other DNA
atggcgtacaggaaacgtggagcgcgccgtgaggcaaacttaaataataatgatcgaatgcaggagaaaattgatgaaaa

SEQ ID NO: 51428 - DNA, 80 bp, synthetic construct
  source 1..80: mol_type = other DNA
gggaatcgttagtcgcgtgtcaactggctatagtaaacacaataatctatccagcatttggaatgcagcgaatgcattac

SEQ ID NO: 51429 - DNA, 80 bp, synthetic construct
  source 1..80: mol_type = other DNA
aatgaaggctattgttgaagatttcttaaaaagattatacatttttgatgtatctagagttccggacgaccaaatgtata

SEQ ID NO: 51430 - DNA, 80 bp, synthetic construct
  source 1..80: mol_type = other DNA
gattaagggatagattacgtttattaccagtagaaatcagaagattggatatcttcaatctaatactaatgaacatggat

SEQ ID NO: 51431 - DNA, 80 bp, synthetic construct
  source 1..80: mol_type = other DNA
agtgttgaaaacaaaggaagaacatcagaaagaaatacagtatgagatattacagaaaactataccaacatttgaaccta

SEQ ID NO: 51432 - DNA, 80 bp, synthetic construct
  source 1..80: mol_type = other DNA
aagagacgatattgagaaaactagaggatattaaaccagaattagcgaaaaaacagactaagctatttagaatatttgaa

SEQ ID NO: 51433 - DNA, 80 bp, synthetic construct
  source 1..80: mol_type = other DNA
acaagattcaaataaaacacaattatctgataaggtactttcgaagaaagaagaagttgtaacggatagtcatgaggaag

SEQ ID NO: 51434 - DNA, 80 bp, synthetic construct
  source 1..80: mol_type = other DNA
ttaaaattactgatgatgtaagaaaatcaacgaaagaagaatcaaaacagttgcttgaagtgttgaaaacaaaggaagaa

SEQ ID NO: 51435 - DNA, 80 bp, synthetic construct
  source 1..80: mol_type = other DNA
caaattgaacgtgcctcagataaaattgctcaaggtgtaataattgcttatcgtgacatgcatcttgaaagagatgagat

SEQ ID NO: 51436 - DNA, 80 bp, synthetic construct
  source 1..80: mol_type = other DNA
acattttgttaataataatcaatttagacaggcagttattgatggtgtattgaatcaggtactgaacgacaatattagaa

SEQ ID NO: 51437 - DNA, 80 bp, synthetic construct
  source 1..80: mol_type = other DNA
atcagctgacacagtagaacctataaatgcggttgcatttgacaacatgcgcatcatgaatgaattgtagacgccaaccc

SEQ ID NO: 51438 - DNA, 80 bp, synthetic construct
  source 1..80: mol_type = other DNA
catcagaaagaaatacagtatgaaatattacagaaaactataccaacattcgaacctaaagagacgatattgagaaaatt

SEQ ID NO: 51439 - DNA, 80 bp, synthetic construct
  source 1..80: mol_type = other DNA
aagttaaagttactgatgaggtaaaaaaatcaacgaaagaagaatcaaaacaattacttgaagtgctgaaaacaaaggaa

SEQ ID NO: 51440 - DNA, 80 bp, synthetic construct
  source 1..80: mol_type = other DNA
ccgaaacaattaccgatttatagagcaaatggagagagagaattgcgtaatagatggtattggaaattaaaaaaagatac

SEQ ID NO: 51441 - DNA, 80 bp, synthetic construct
  source 1..80: mol_type = other DNA
tcaatccagcgtggaatattattgctatcaaataggcttggtcaattagttgatttaactaggttattagcttacaacta

SEQ ID NO: 51442 - DNA, 80 bp, synthetic construct
  source 1..80: mol_type = other DNA
aaattaagattgctgatgaagtgaagaaatcaacgaaagaagaatctaaacaattgcttgaagttttgaaaacaaaagaa

SEQ ID NO: 51443 - DNA, 80 bp, synthetic construct
  source 1..80: mol_type = other DNA
cgaaacactaatggcatgtgttacgatgaatatgcaacatgttcagactttgacaacagaaaaattacagttaacttcag

SEQ ID NO: 51444 - DNA, 80 bp, synthetic construct
  source 1..80: mol_type = other DNA
aggaagttaaagttactgatgaattaaaaaaatcaacgaaagaagaatcaaaacaattgcttgaagtattgaaaacaaag

SEQ ID NO: 51445 - DNA, 80 bp, synthetic construct
  source 1..80: mol_type = other DNA
caactgaagcgcaaatccaaaaaatgtcgcaagacttacaattagaagccttaacaatacagtcagaaacacagttttta

SEQ ID NO: 51446 - DNA, 80 bp, synthetic construct
  source 1..80: mol_type = other DNA
atgttattaatcaattgatggaagctttgatgcaactatcacgacaacagtttccaacaatgcctgttgattataagaga

SEQ ID NO: 51447 - DNA, 80 bp, synthetic construct
  source 1..80: mol_type = other DNA
acaggtataaactcacaagcagcaaatgactgttttaagaccctaatcgcagcgatgttaagtcagcgaactatgtcgct

SEQ ID NO: 51448 - DNA, 80 bp, synthetic construct
  source 1..80: mol_type = other DNA
tgatttcgtgaccacaaattacatgtcattaatctcaggtatgtggctgctaactgtagtgccaaatgacatgttcataa

SEQ ID NO: 51449 - DNA, 80 bp, synthetic construct
  source 1..80: mol_type = other DNA
tgtcaataacaaccagtttaggcaagtagttattgatggtgtattgaatcaggtgctgaatgataatattagaaatggac

SEQ ID NO: 51450 - DNA, 80 bp, synthetic construct
  source 1..80: mol_type = other DNA
gcgtggaatactattgttatcaaataggcttggtcaattagttgatttaactaggttattagcttacaattatgagacac

SEQ ID NO: 51451 - DNA, 80 bp, synthetic construct
  source 1..80: mol_type = other DNA
agaggaaattaaaattactgatgaagtgaagaaatcgacgaaagaagaatctaaacaattgcttgaagttttgaaaacaa

SEQ ID NO: 51452 - DNA, 80 bp, synthetic construct
  source 1..80: mol_type = other DNA
taatggcatgcgttacgatgaatatgcaacatgttcagactctgacaacagaaaaactacagttgacttcagtcacgtca

SEQ ID NO: 51453 - DNA, 80 bp, synthetic construct
  source 1..80: mol_type = other DNA
agctgatacggtagaacctataaatgcagttgcatttgacaatatgcgcatcatgaacgaattataaacgccaaccccac

SEQ ID NO: 51454 - DNA, 80 bp, synthetic construct
  source 1..80: mol_type = other DNA
tactgttaaaagatatggcagttgaaaataaaaattcaagagatgccggcaaagttgtcgattctgaaacggcgagtatc

SEQ ID NO: 51455 - DNA, 80 bp, synthetic construct
  source 1..80: mol_type = other DNA
tgtgatgccatatttcaagatgaagaaacagaaggtgcggtgcgaagattcatcgcagagatgagacagcgcgtacaagc

SEQ ID NO: 51456 - DNA, 80 bp, synthetic construct
  source 1..80: mol_type = other DNA
tgacagaaacgttgtcaattacccatcaatattgcatccaatagattacgctttcaatgagtatttcttacaacaccaat

SEQ ID NO: 51457 - DNA, 80 bp, synthetic construct
  source 1..80: mol_type = other DNA
tagtcgaaccattgaataatgatataatattcaattacattcctgaaaggataaggaacgacgttaattatatactgaat

SEQ ID NO: 51458 - DNA, 80 bp, synthetic construct
  source 1..80: mol_type = other DNA
gagaaacaagatcaaaacaatagaacgcaattggctgacaaagtactttcaaaaaaagaagaagtcgtaacagacagtca

SEQ ID NO: 51459 - DNA, 80 bp, synthetic construct
  source 1..80: mol_type = other DNA
tgaatccttgtgggatacgataacaacctcaaactatattttggcaagatcggtagtaccagatttaaaggaattagtct

SEQ ID NO: 51460 - DNA, 80 bp, synthetic construct
  source 1..80: mol_type = other DNA
gctcaatggcgtacaggaaacgtggagcgcgccgtgaggcgaacataaacaataatgaccgaatgcaagagaaagacgat

SEQ ID NO: 51461 - DNA, 80 bp, synthetic construct
  source 1..80: mol_type = other DNA
caaccgaagcgcaaattcaaaagatgtcacaagatttgcaactagaagcattaacaatacagtcagaaacgcagttttta

SEQ ID NO: 51462 - DNA, 80 bp, synthetic construct
  source 1..80: mol_type = other DNA
gctgcatttcgttaataataaccaatttaggcaagtagtcattgatggtgtattaaatcaagcactgaatgataatataa

SEQ ID NO: 51463 - DNA, 80 bp, synthetic construct
  source 1..80: mol_type = other DNA
gaaatggacatgtcattaatcaattgatggaagctttgatgcaattatcacgacaacagttcccgacgatgcccgttgat

SEQ ID NO: 51464 - DNA, 80 bp, synthetic construct
  source 1..80: mol_type = other DNA
taatggcatgtattacaatgaatatgcaacatgttcagactttaacgacggaaaaattgcaattaacttcagttacatcg

SEQ ID NO: 51465 - DNA, 80 bp, synthetic construct
  source 1..80: mol_type = other DNA
aggctgagactgttgccagtagaggtgagacgattagacatttttaatttaatactgatgaacatggatcaaatagaacg

SEQ ID NO: 51466 - DNA, 80 bp, synthetic construct
  source 1..80: mol_type = other DNA
agcaattcgatttcagaaattcgatgcatatgctaacatcaaatctcactttcactgtctattcagatctgcttgcattc

SEQ ID NO: 51467 - DNA, 80 bp, synthetic construct
  source 1..80: mol_type = other DNA
agccgatacagtagaacctataaatgcagtcgcatttgataacatgcgcatcatgaacgagttgtgaacgccaaccccac

SEQ ID NO: 51468 - DNA, 80 bp, synthetic construct
  source 1..80: mol_type = other DNA
tgacagaaatgttgttaattatccatcaatattgcatccaatagactacgctttcaatgagtattttttgcaacatcaac

SEQ ID NO: 51469 - DNA, 80 bp, synthetic construct
  source 1..80: mol_type = other DNA
gagaaacaagatcaaaacaataaaatgcaattatctgataaagtgctatcaaagaaagaagaaattataactgataatca

SEQ ID NO: 51470 - DNA, 80 bp, synthetic construct
  source 1..80: mol_type = other DNA
tgaatctttatgggacacaataacaacttcaaactacattttagcaagatccgtagtgccggatttgaaggaattagttt

SEQ ID NO: 51471 - DNA, 80 bp, synthetic construct
  source 1..80: mol_type = other DNA
gggactaaacgtgaagacttaccacaacaaaatgaacgtctgcaagaaaaagaaattgaaaataatacagacgtaaccat

SEQ ID NO: 51472 - DNA, 80 bp, synthetic construct
  source 1..80: mol_type = other DNA
actatctttcgtttctgcagacacggttgaacctattaacgcaattgcttttgacaatatgcgcattatgacgaaaactt

SEQ ID NO: 51473 - DNA, 80 bp, synthetic construct
  source 1..80: mol_type = other DNA
gctcaatggcgtacagaaaacgtggagcgcgccgtgaggcgaatataaatagtaataatgatcgaatgcaagagaaagat

SEQ ID NO: 51474 - DNA, 80 bp, synthetic construct
  source 1..80: mol_type = other DNA
caacagaagcgcaaattcaaaaaatgtcacaagatctacaattagaagcgttaacaattcaatcagagacgcagtttttg

SEQ ID NO: 51475 - DNA, 80 bp, synthetic construct
  source 1..80: mol_type = other DNA
tgacgggtataaattcacaagcggctaatgactgcttcaagactttaattgcagcaatgctaagtcaacgaacaatgtca

SEQ ID NO: 51476 - DNA, 80 bp, synthetic construct
  source 1..80: mol_type = other DNA
cttgattttgtaacaacaaattacatgtcattaatttctggtatgtggttattaactgttgttccaaacgacatgttcat

SEQ ID NO: 51477 - DNA, 80 bp, synthetic construct
  source 1..80: mol_type = other DNA
tgcactttgttaacaataatcagtttagacaagttgttattgatggtgtactaaatcaagtgttaaatgacaatattaga

SEQ ID NO: 51478 - DNA, 80 bp, synthetic construct
  source 1..80: mol_type = other DNA
aatggacacgttattaatcaattaatggaagctctaatgcaattatcacgacagcaatttccaacgatgccagttgatta

SEQ ID NO: 51479 - DNA, 80 bp, synthetic construct
  source 1..80: mol_type = other DNA
ccaagaagaagttaaaattgccgatgaagtgaagaaatcaacgaaagaggaatctaagcagttgctcgaagtgttgaaaa

SEQ ID NO: 51480 - DNA, 80 bp, synthetic construct
  source 1..80: mol_type = other DNA
attcaaattataatgaaagaattaatgatgctgtagctataataactgcagctaataggttgaatttgtatcaaaagaag

SEQ ID NO: 51481 - DNA, 80 bp, synthetic construct
  source 1..80: mol_type = other DNA
agattgcgattgctgccagtagaagttaggcggttagatatttttaatttaatactaatgaatatggatcaaatagagcg

SEQ ID NO: 51482 - DNA, 80 bp, synthetic construct
  source 1..80: mol_type = other DNA
tgcctcagataaaattgcacagggtgttataattgcgtaccgtgatatgcagttagagagagatgagatgtacggttatg

SEQ ID NO: 51483 - DNA, 80 bp, synthetic construct
  source 1..80: mol_type = other DNA
aatagcaaagcttgacgccacagtttttgctcaaatagttaaattacgtaaagttgacactttgaagccaatattatata

SEQ ID NO: 51484 - DNA, 80 bp, synthetic construct
  source 1..80: mol_type = other DNA
cgaaagaagaacatcaaaaagaaatacaatatgaaattttacaaaaaacgataccaacatttgaaccgaaagagtcaata

SEQ ID NO: 51485 - DNA, 80 bp, synthetic construct
  source 1..80: mol_type = other DNA
agcaatttgattttagaaattcaatgcacatgctgacgtcgaatcttacttttactgtttattcagatttacttgcattc

SEQ ID NO: 51486 - DNA, 80 bp, synthetic construct
  source 1..80: mol_type = other DNA
ctttaccagatggagattatgatgtcagagaatattttctcaatctatatgaccaagttctaactgaaatgccggattat

SEQ ID NO: 51487 - DNA, 80 bp, synthetic construct
  source 1..80: mol_type = other DNA
ttattgttgaaagatatggcagttgagaataagaattcaagagatgcagggaaagttgtagattctgagactgcaagtat

SEQ ID NO: 51488 - DNA, 80 bp, synthetic construct
  source 1..80: mol_type = other DNA
gatgataaacaagataaaaacaataaaatacaattatctgataaggtgctctcaaagaaagaagaaatcataaccgacaa

SEQ ID NO: 51489 - DNA, 80 bp, synthetic construct
  source 1..80: mol_type = other DNA
tgaatctctgtgggatacgataacgacttcaaactacatactagcacggtcagtagtaccagacttgaaagaattagttt

SEQ ID NO: 51490 - DNA, 80 bp, synthetic construct
  source 1..80: mol_type = other DNA
cacaatgggctgcctgatgatcgtctaaaaaactgtgtaattgatgcattgagaaatgtatataaaactgatttttatat

SEQ ID NO: 51491 - DNA, 80 bp, synthetic construct
  source 1..80: mol_type = other DNA
cataatgggctgccagatgaccgtcttagaaattgtgtgattgatgctcttagaaatgtttataagacagacttttatat

SEQ ID NO: 51492 - DNA, 80 bp, synthetic construct
  source 1..80: mol_type = other DNA
aaagcgcggagctaaacgtgaaaacttaccacaacaaaatgaacgtctgcaagaaaaagaagttgaaaagaacatagacg

SEQ ID NO: 51493 - DNA, 80 bp, synthetic construct
  source 1..80: mol_type = other DNA
caactatggagagtaaagctaataataaaaagcaacaattatctgataaagtattatcacaaaaagaagatataataact

SEQ ID NO: 51494 - DNA, 80 bp, synthetic construct
  source 1..80: mol_type = other DNA
gacacagtagaacctataaatgcagttgcatttgacaatatgcgcatcatgaacgaattgtagacgccaaccccactctg

SEQ ID NO: 51495 - DNA, 80 bp, synthetic construct
  source 1..80: mol_type = other DNA
gctgcatttcgtcaataataatcaatttagacaagtagtaattgatggagtgttaaaccaagttctaaacgataacataa

SEQ ID NO: 51496 - DNA, 80 bp, synthetic construct
  source 1..80: mol_type = other DNA
tgattacggacaatcaagaagaaattaaaatagctgatgaagttaaaaagtctagtaaagaggagtcaaaacaactattg

SEQ ID NO: 51497 - DNA, 80 bp, synthetic construct
  source 1..80: mol_type = other DNA
aatggcgtgcatcactatgaatatgcaacatgttcaaactctaactactgaaaagctgcaattgacgtcagttacttccc

SEQ ID NO: 51498 - DNA, 80 bp, synthetic construct
  source 1..80: mol_type = other DNA
tatgtatgctaataggaaatgccacggttataccaagcccacaaacgttatttcactattataacgtcaatgtcaatttc

SEQ ID NO: 51499 - DNA, 80 bp, synthetic construct
  source 1..80: mol_type = other DNA
accaacatgctactaaacaatcagccagtggcgttagtaggagcattaccattcataacagactcatcagtcatatcatt

SEQ ID NO: 51500 - DNA, 80 bp, synthetic construct
  source 1..80: mol_type = other DNA
aatagctaaattagacgctactgtctttgcacaaattgtcaaacttagaaaggttgatactttgaaaccaatactgtata

SEQ ID NO: 51501 - DNA, 80 bp, synthetic construct
  source 1..80: mol_type = other DNA
gaggttctaaaaactaaggaagaacatcaaaaagaagttcaatatgaaatattacaaaaaacaatacctacttttgaacc

SEQ ID NO: 51502 - DNA, 80 bp, synthetic construct
  source 1..80: mol_type = other DNA
agcaattcgattttagagcatctatgcacatgctgacgtccaatttgacttttaccgtatattctgatcttcttgcattc

SEQ ID NO: 51503 - DNA, 80 bp, synthetic construct
  source 1..80: mol_type = other DNA
tttgcctgatggagattatgatgtgagggaatattttttgaatctatatgaccaagtactaactgaaatgccagattacc

SEQ ID NO: 51504 - DNA, 80 bp, synthetic construct
  source 1..80: mol_type = other DNA
tttgtgacgcaattttccaggatgaggagactgaaggtgtagtaagaagatttatagcggaaatgaggcaaagagtacaa

SEQ ID NO: 51505 - DNA, 80 bp, synthetic construct
  source 1..80: mol_type = other DNA
gctgatcgaaatgtagttaattatccatcgatattgcatccaatcgaccatgctttcaatgagtattttttacagcatca

SEQ ID NO: 51506 - DNA, 80 bp, synthetic construct
  source 1..80: mol_type = other DNA
aaacgtaattggtaacattgaaaataaaaacactacaaaaactcaattatcagaaaaagtattctctaaaaaagaagaag

SEQ ID NO: 51507 - DNA, 80 bp, synthetic construct
  source 1..80: mol_type = other DNA
tcgaatctttgtgggatactataactacatcaaactatatattagctaggtcagttgtaccagatctaaaagaactagtg

SEQ ID NO: 51508 - DNA, 80 bp, synthetic construct
  source 1..80: mol_type = other DNA
atggcgtacagaaaacgtggagcgcgtcgtgagacaaatttaaaacaagatgatcgaatgcaagaaaaagaagagaataa

SEQ ID NO: 51509 - DNA, 80 bp, synthetic construct
  source 1..80: mol_type = other DNA
taattacagataatcaagaagaaattaaaatatctgatgaaatcaaaaaatctagcaaagaagaatctaaacagctgcta

SEQ ID NO: 51510 - DNA, 80 bp, synthetic construct
  source 1..80: mol_type = other DNA
aatagctaaactagatgccactgtctttgcacaaattgttaagcttagaaaagttgatactttaaagccaatattgtaca

SEQ ID NO: 51511 - DNA, 80 bp, synthetic construct
  source 1..80: mol_type = other DNA
aagtatgaacggtattattgagaacaagaatgctacaaaagctcaattatcagagaaagtgttatcccagaaagaagaag

SEQ ID NO: 51512 - DNA, 80 bp, synthetic construct
  source 1..80: mol_type = other DNA
tttgcactgtggagattatgacgtgagagaatactttttgaatttatacgatcaggtattgaccgagatgccagattatt

SEQ ID NO: 51513 - DNA, 80 bp, synthetic construct
  source 1..80: mol_type = other DNA
atgaaaagcaagatttaaataaaatgcaattatctgataaggtactttcgaagaaagaagaagttgtaacggatagtcat

SEQ ID NO: 51514 - DNA, 80 bp, synthetic construct
  source 1..80: mol_type = other DNA
catccatgttgtgtgtctatcagaacaacccaatgggcccgcacaacgcctggaaatggctgttgctactggttccatcc

SEQ ID NO: 51515 - DNA, 80 bp, synthetic construct
  source 1..80: mol_type = other DNA
ccaacattaatccatacacatcccatctttcaggcatgtgggcagggtggggaggtgggctttgaggcccgcatatcaat

SEQ ID NO: 51516 - DNA, 80 bp, synthetic construct
  source 1..80: mol_type = other DNA
aattggtctgttcaccagcaccatgcaactttttcaccaaatgcccctatcttatcaacacttccggaaactactgttgt

SEQ ID NO: 51517 - DNA, 80 bp, synthetic construct
  source 1..80: mol_type = other DNA
atcgttggcattgcagatgatacatatgttatgggtctgcatggcaatcagacgttgttttgcaacataatgaaattttc

SEQ ID NO: 51518 - DNA, 80 bp, synthetic construct
  source 1..80: mol_type = other DNA
agatgtggatgtaactatggaaaataaaaataacaatagaaagcagcaattatctgataaagtactatcacaaaaagagg

SEQ ID NO: 51519 - DNA, 80 bp, synthetic construct
  source 1..80: mol_type = other DNA
tgtttcttcgtgagtcgttagttgcatgtgagttggctataataaatactattgtttatccagcatttggaatgcaaaga

SEQ ID NO: 51520 - DNA, 80 bp, synthetic construct
  source 1..80: mol_type = other DNA
tagttgaagaatttttgaagagactgcaaatttttgatgtaccgcgagtgcccgatgatcaaatgtatagactaagggat

SEQ ID NO: 51521 - DNA, 80 bp, synthetic construct
  source 1..80: mol_type = other DNA
gaacatagacgcaactatggagagtaaagctaataataaaaagcaacaattatctgataaagtattatcacaaaaagaag

SEQ ID NO: 51522 - DNA, 80 bp, synthetic construct
  source 1..80: mol_type = other DNA
ggtcaattcaacgtggaatattactgttatctaacagacttggtcagttagttgatttaactagattattagcttacaat

SEQ ID NO: 51523 - DNA, 80 bp, synthetic construct
  source 1..80: mol_type = other DNA
ttgttgaggattttttaaagagattatatatttttgatgtatctagagttccggacgaccaaatgtatagattaagggac

SEQ ID NO: 51524 - DNA, 80 bp, synthetic construct
  source 1..80: mol_type = other DNA
agattacgcttattgccagtagaaatcagaagattggatatctttaacctaatattaatgaatatggatcaaattgaacg

SEQ ID NO: 51525 - DNA, 80 bp, synthetic construct
  source 1..80: mol_type = other DNA
gtaaatatagctagaaatttagacggattccaacagataaatttagaggagctaatgagatcaggtgattatgcgcaaat

SEQ ID NO: 51526 - DNA, 80 bp, synthetic construct
  source 1..80: mol_type = other DNA
aactaacatgcttttaaataatcaaccggtagcattggttggagcacttccatttattactgattcatcagtcatatcac

SEQ ID NO: 51527 - DNA, 80 bp, synthetic construct
  source 1..80: mol_type = other DNA
ttatacaaaataaattcagattcaaatgacttttatttggtagctaactatgattgggtgccaacttcgactacgaaagt

SEQ ID NO: 51528 - DNA, 80 bp, synthetic construct
  source 1..80: mol_type = other DNA
atattgcagaaaactataccaacatttgaacctaaagaaacaatattgaaaaaactagaggatattaaaccagaactagc

SEQ ID NO: 51529 - DNA, 80 bp, synthetic construct
  source 1..80: mol_type = other DNA
gaaaaaacagactaagctatttagaatatttgaaccgaaacaactaccgatttatagagcaaatggagaaagagagttgc

SEQ ID NO: 51530 - DNA, 80 bp, synthetic construct
  source 1..80: mol_type = other DNA
ccttaccagatggagattacgatgtgagagaatattttctgaatctgtatgatcaagtgcttactgagatgccagactat

SEQ ID NO: 51531 - DNA, 80 bp, synthetic construct
  source 1..80: mol_type = other DNA
atggtcatgttattaatcagctaatggaagctctaatgcagctgtcgcgacaacaatttccaacaatgccgattgattat

SEQ ID NO: 51532 - DNA, 80 bp, synthetic construct
  source 1..80: mol_type = other DNA
aatagcaaaacttgacgctacagtgttcgctcaaatagttaaattacgaaaagttgatactttaaaaccaatattatata

SEQ ID NO: 51533 - DNA, 80 bp, synthetic construct
  source 1..80: mol_type = other DNA
agataaattcagactcaaatgacttttatttagtagccaattacgattgggtgccaacttcgactacaaaagtatacaaa

SEQ ID NO: 51534 - DNA, 80 bp, synthetic construct
  source 1..80: mol_type = other DNA
tcatgaggaagttaaagttactgatgaagtaaaaaaatcaacgaaagaagaatcaaaacaattgctcgaagtgttgaaaa

SEQ ID NO: 51535 - DNA, 80 bp, synthetic construct
  source 1..80: mol_type = other DNA
ttatacaagataaattcagactcaaatgacttttatttagtagccaattacgattgggtaccaacttcgactacaaaagt

SEQ ID NO: 51536 - DNA, 80 bp, synthetic construct
  source 1..80: mol_type = other DNA
cactaccagacggagactatgatgtgagagagtattttctgaatttgtatgatcaagtgcttactgaaatgccagactac

SEQ ID NO: 51537 - DNA, 80 bp, synthetic construct
  source 1..80: mol_type = other DNA
ttattattgaaagatatggcagtagaaaataagaactctagggatgcaggtaaagtcgttgactcagaaacggctagtat

SEQ ID NO: 51538 - DNA, 80 bp, synthetic construct
  source 1..80: mol_type = other DNA
gggagtcattagtagcgtgccagttagctatagtaaatacaataatctatccagcgtttggaatgcaacgcctacattat

SEQ ID NO: 51539 - DNA, 80 bp, synthetic construct
  source 1..80: mol_type = other DNA
tgcattttgtcaacaataatcaatttagacaggcagttattgatggtgtattgaaccaggtattaaatgacaatattaga

SEQ ID NO: 51540 - DNA, 80 bp, synthetic construct
  source 1..80: mol_type = other DNA
agtggtcatgttattaatcaactaatggaagctttaatgcagttgtcgcgacaacaatttccaaccatgccagttgatta

SEQ ID NO: 51541 - DNA, 80 bp, synthetic construct
  source 1..80: mol_type = other DNA
tcatgaagaagttaaaattactgatgaggtgaaaaaatcaacgaaagaggaatcaaagcagttgcttgaagtgttaaaaa

SEQ ID NO: 51542 - DNA, 80 bp, synthetic construct
  source 1..80: mol_type = other DNA
aacaatttgattttagaaattcaatgcatatgttaacttcgagtctcacttttacagtttattcagatcttctcgcattc

SEQ ID NO: 51543 - DNA, 80 bp, synthetic construct
  source 1..80: mol_type = other DNA
tattattaaaagatatggcagtcgaaaataagaattccagagacgcaggtaaggttgttgattcagaaacggctagcata

SEQ ID NO: 51544 - DNA, 80 bp, synthetic construct
  source 1..80: mol_type = other DNA
tgcgatgccatttttcaagatgaagaaacggaaggtgccgtcagaagattcattgcagagatgagacagcgtgtgcaagc

SEQ ID NO: 51545 - DNA, 80 bp, synthetic construct
  source 1..80: mol_type = other DNA
aatgatgaaaagcaagattcaaataaaatacaattatctgataaggtactttcgaagaaagaagaaattgtaacagatag

SEQ ID NO: 51546 - DNA, 80 bp, synthetic construct
  source 1..80: mol_type = other DNA
tgttaataataatcaatttagacaggcagttattgatggtgtgttgaatcaggtactgaatgacaatattagaaatggtc

SEQ ID NO: 51547 - DNA, 80 bp, synthetic construct
  source 1..80: mol_type = other DNA
atgttattaatcaactgatggaagctctaatgcaactgtcgcgacaacaatttccaaccatgccgattgattataagaga

SEQ ID NO: 51548 - DNA, 80 bp, synthetic construct
  source 1..80: mol_type = other DNA
aacaattcctcctcctgcctccaccaatcggcccagagtcaggggtctgtagtttcctgctggtggctccagttcaggaa

SEQ ID NO: 51549 - DNA, 80 bp, synthetic construct
  source 1..80: mol_type = other DNA
ggatatggacgtaactatggagaataaaaataacaatagaaaacaacaactatctgataaagtactatcgcaaaaagagg

SEQ ID NO: 51550 - DNA, 80 bp, synthetic construct
  source 1..80: mol_type = other DNA
agattttgtaactacaaattatatgtcacttatatctggcatgtggctattgactgttataccaaatgacatgtttcttc

SEQ ID NO: 51551 - DNA, 80 bp, synthetic construct
  source 1..80: mol_type = other DNA
taatacagacgtaatcatggaaaataagaataacaacagaaagcagcagttatctgacaaagtgctatcacaaaaagagg

SEQ ID NO: 51552 - DNA, 80 bp, synthetic construct
  source 1..80: mol_type = other DNA
tcagtttactagtgccatttgttcagtggttcgtagggctttcccccactgtttggctctgccgatccataccgcggaac

SEQ ID NO: 51553 - DNA, 80 bp, synthetic construct
  source 1..80: mol_type = other DNA
tcctagcagcttgttttgctcgcagccggtctggagcgaacctcatcgggaccgacaactctgttgtcctctctcggaaa

SEQ ID NO: 51554 - DNA, 80 bp, synthetic construct
  source 1..80: mol_type = other DNA
tcaactgaagcacaaattcagaagatgtcacaggatttgcagctggaagcgttgacaatacagtcagaaacacagttttt

SEQ ID NO: 51555 - DNA, 80 bp, synthetic construct
  source 1..80: mol_type = other DNA
tgttaacaacaaccagtttagacaagtagttattgatggtgtattgaatcaggtactaaatgacaatattcggaatggac

SEQ ID NO: 51556 - DNA, 80 bp, synthetic construct
  source 1..80: mol_type = other DNA
atgtcattaatcaattaatggaggctctaatgcaactatcgcgacaacaatttccaacaatgcctgttgattataagagg

SEQ ID NO: 51557 - DNA, 80 bp, synthetic construct
  source 1..80: mol_type = other DNA
gcgtggaatattgttgctatcaaacagacttggtcaactagttgatttaaccagattgttagcttacaactatgaaacgc

SEQ ID NO: 51558 - DNA, 80 bp, synthetic construct
  source 1..80: mol_type = other DNA
taatggcatgtattacaatgaacatgcaacatgtccagactctgacaacagaaaaattacacttaacttcagttacatcg

SEQ ID NO: 51559 - DNA, 80 bp, synthetic construct
  source 1..80: mol_type = other DNA
ttgtataaaataaattcagactcaaatgacttttatctcgtagctaactatgattgggtgcccacttcaacaacaaaagt

SEQ ID NO: 51560 - DNA, 80 bp, synthetic construct
  source 1..80: mol_type = other DNA
agcaatttgatttcagaaattcgatgcatatgttgacatcaaatcttacttttactgtttactcagatttgcttgcattc

SEQ ID NO: 51561 - DNA, 80 bp, synthetic construct
  source 1..80: mol_type = other DNA
gtatcggctgatacagtagaacctataaatgcagttgcgtttgataacatgcgcatcatgaacgaattgtaaacgccaac

SEQ ID NO: 51562 - DNA, 80 bp, synthetic construct
  source 1..80: mol_type = other DNA
aggatgatgagaaacaagatcaaaataataaaatacaactatctgataaagtgctttcaaaaaaagaagaagttgtaact

SEQ ID NO: 51563 - DNA, 80 bp, synthetic construct
  source 1..80: mol_type = other DNA
ttgaatctttatgggacacaataacaacttcaaactatattttagcgagatcagttgtaccagatttaaaagagttagtt

SEQ ID NO: 51564 - DNA, 80 bp, synthetic construct
  source 1..80: mol_type = other DNA
gctgcattttgtcaataacaatcaatttagacaagtagttattgatggtgtattgaatcaggtgctgaatgacaatatta

SEQ ID NO: 51565 - DNA, 80 bp, synthetic construct
  source 1..80: mol_type = other DNA
gacagtcaagaagaaattaaaattgctgatgaagtgaagaaatcgacgaaagaagaatctaaacaattgcttgaagtttt

SEQ ID NO: 51566 - DNA, 80 bp, synthetic construct
  source 1..80: mol_type = other DNA
gaaaacaaaagaagagcaccaaaaagagatacaatatgaaattttgcaaaaaacgataccaacatttgaaccaaaagagt

SEQ ID NO: 51567 - DNA, 80 bp, synthetic construct
  source 1..80: mol_type = other DNA
aagatgacgagaaacaagatcaaaacaatagaatgcagttgtctgataaagtactttcaaagaaagaggaagtcgtaacc

SEQ ID NO: 51568 - DNA, 80 bp, synthetic construct
  source 1..80: mol_type = other DNA
caacggaagcacaaatccaaaaaatgtcacaggatttacagctagaagcactaacgatacagtcggaaacgcagttctta

SEQ ID NO: 51569 - DNA, 80 bp, synthetic construct
  source 1..80: mol_type = other DNA
acaggtataaactcgcaagcagctaatgactgcttcaaaactctaattgcggcaatgttgagtcaacgaactatgtcact

SEQ ID NO: 51570 - DNA, 80 bp, synthetic construct
  source 1..80: mol_type = other DNA
acttgactttgtgactactaattatatgtcattaatttcaggtatgtggttgttaaccgtcgtgccaagcgacatgttta

SEQ ID NO: 51571 - DNA, 80 bp, synthetic construct
  source 1..80: mol_type = other DNA
taagagagtcgttagtcgcatgccagctagctatagtgaatacaatagtgtatccagcatttggaatgcaacgaatgcat

SEQ ID NO: 51572 - DNA, 80 bp, synthetic construct
  source 1..80: mol_type = other DNA
tgcattttgttaataacaaccaattcagacaagtagtcattgatggtgtattgaatcaggtattaaatgataatatcaga

SEQ ID NO: 51573 - DNA, 80 bp, synthetic construct
  source 1..80: mol_type = other DNA
aatggacatgtcattaaccaactgatggaagctctaatgcaattatcacgccaacagttcccaacgatgcctgttgatta

SEQ ID NO: 51574 - DNA, 80 bp, synthetic construct
  source 1..80: mol_type = other DNA
aacggggaatattgttactatcgaacagacttggccaattagttgatttaactagattattagcttacaattatgaaacg

SEQ ID NO: 51575 - DNA, 80 bp, synthetic construct
  source 1..80: mol_type = other DNA
tgacaatcaggaagaggttaaaattgctgatgaagtaaagaagtcaacaaaagaagaatctaaacagttacttgaagtac

SEQ ID NO: 51576 - DNA, 80 bp, synthetic construct
  source 1..80: mol_type = other DNA
ttgatggcgtgtattacaatgaatatgcagcacgttcaaactttgacaacggaaaaattgcagctgacttcagttacatc

SEQ ID NO: 51577 - DNA, 80 bp, synthetic construct
  source 1..80: mol_type = other DNA
tgcttcagataaaattgcacagggtgttatcattgcgtatcgcgacatgcaactagaaagggatgaaatgtacgggtatg

SEQ ID NO: 51578 - DNA, 80 bp, synthetic construct
  source 1..80: mol_type = other DNA
ttaacattgctcgaaatctagatggattccaacaaataaatctagaagaattaatgcggacaggcgattacgcgcagata

SEQ ID NO: 51579 - DNA, 80 bp, synthetic construct
  source 1..80: mol_type = other DNA
actaatatgcttctgaacaatcaaccagtagcactggttggagctcttccatttatcacagattcatcagtcatatcatt

SEQ ID NO: 51580 - DNA, 80 bp, synthetic construct
  source 1..80: mol_type = other DNA
aatagcgaaacttgatgctacagtctttgctcagatagttaaattgcggaaagttgacactttaaaaccaatattatata

SEQ ID NO: 51581 - DNA, 80 bp, synthetic construct
  source 1..80: mol_type = other DNA
agataaattcagattcaaatgacttttacctagttgctaactatgattgggtacctacttcaaccacgaaagtatataaa

SEQ ID NO: 51582 - DNA, 80 bp, synthetic construct
  source 1..80: mol_type = other DNA
acttactgttaaaggatatggcagttgaaaataagaattcaagggatgccggcaaagttgttgactccgaaacagcaagt

SEQ ID NO: 51583 - DNA, 80 bp, synthetic construct
  source 1..80: mol_type = other DNA
atctgcgatgcaatatttcaggatgaggaaacagaaggtgcagtgagaagattcattgcggaaatgagacaacgtgtaca

SEQ ID NO: 51584 - DNA, 80 bp, synthetic construct
  source 1..80: mol_type = other DNA
tgacagaaacgttgttaattacccatcaatattgcacccaatagattatgctttcaatgaatattttttgcagcatcaat

SEQ ID NO: 51585 - DNA, 80 bp, synthetic construct
  source 1..80: mol_type = other DNA
tagttgaaccactgaataatgacataatatttaattatattcctgagaggataaggaatgatgttaactacatacttaat

SEQ ID NO: 51586 - DNA, 80 bp, synthetic construct
  source 1..80: mol_type = other DNA
agggacgatgagaagcaagatcaaaataataaagtacaattatctgataaagtactttcgaagaaggaagaagttataac

SEQ ID NO: 51587 - DNA, 80 bp, synthetic construct
  source 1..80: mol_type = other DNA
tcaatggcgtacaggaagcgcggagctaaacgtgaaaatttaccacaacagaatgaacgtctgcaagaaaaagaagctga

SEQ ID NO: 51588 - DNA, 80 bp, synthetic construct
  source 1..80: mol_type = other DNA
ttagtttcaaccgaagctcaaatacaaaaaatgtctcaagatttacagcttgaagcgctaactatacaatctgaaacaca

SEQ ID NO: 51589 - DNA, 80 bp, synthetic construct
  source 1..80: mol_type = other DNA
tgcagatacagttgaaccgatcaacgcagttgcttttgacaatatgcgcattatgaacgaactataagcgccaaccccac

SEQ ID NO: 51590 - DNA, 80 bp, synthetic construct
  source 1..80: mol_type = other DNA
aaagaatgtagacgcaaatatggagaataaaactaataataaaaagcagcaattatcagacaaagtactatcacaaaaag

SEQ ID NO: 51591 - DNA, 80 bp, synthetic construct
  source 1..80: mol_type = other DNA
ttttcaaacgtagcagccacctcattagcctgcttggttctcaaagatggatttattgtcttagagaactcaatcatgaa

SEQ ID NO: 51592 - DNA, 80 bp, synthetic construct
  source 1..80: mol_type = other DNA
atgtatgttaattggaaataccacagtaattccaagtccacaaacactatttcactattataacataaatgtgaattttc

SEQ ID NO: 51593 - DNA, 80 bp, synthetic construct
  source 1..80: mol_type = other DNA
ttagtttcaactgaagctcagatacagaaaatgtctcaagatttgcagcttgaagctttaacaatacaatccgaaacgca

SEQ ID NO: 51594 - DNA, 80 bp, synthetic construct
  source 1..80: mol_type = other DNA
gtttctggccggcataaattcacaagcagcaaatgattgttttaaaacactgatagcagctatgttaagccaacgtacaa

SEQ ID NO: 51595 - DNA, 80 bp, synthetic construct
  source 1..80: mol_type = other DNA
tgtcattagattttgtaactacgaattatatgtcacttatatctggtatgtggctattgactgttataccaaatgatatg

SEQ ID NO: 51596 - DNA, 80 bp, synthetic construct
  source 1..80: mol_type = other DNA
ttctgcagacacggttgaacctattaacgcaattgcttttgacaatatgcgcattatgaacgaactgtaaacgccaaccc

SEQ ID NO: 51597 - DNA, 80 bp, synthetic construct
  source 1..80: mol_type = other DNA
taagaagcagatgaaattatttagaatctttgaaccaagacagctaccaatctaccgagcaaatggtgaaaaagaattaa

SEQ ID NO: 51598 - DNA, 80 bp, synthetic construct
  source 1..80: mol_type = other DNA
tggttgaaccattgaataatgatataatatttaattatataccagaaaggataagaaatgatgttaattatattctcaac

SEQ ID NO: 51599 - DNA, 80 bp, synthetic construct
  source 1..80: mol_type = other DNA
tagatttggtactattatagcaaggaactttgacacaattcgtttgtcatttcagttaatgcgtccaccaaacatgacac

SEQ ID NO: 51600 - DNA, 80 bp, synthetic construct
  source 1..80: mol_type = other DNA
aatgagactctgttagcgaatgtgaccgcggtgcgtcaagagtatgctataccagttggaccagtattcccaccaggcat

SEQ ID NO: 51601 - DNA, 80 bp, synthetic construct
  source 1..80: mol_type = other DNA
aagatttggaacaatcgtagctagaaattttgatacaatcagattgtcatttcagttgatgagaccaccaaatatgacac

SEQ ID NO: 51602 - DNA, 80 bp, synthetic construct
  source 1..80: mol_type = other DNA
aagatttggaacaataatagctagaaactttgatactattagattgtcattccagctaatgagaccaccaaatatgacac

SEQ ID NO: 51603 - DNA, 80 bp, synthetic construct
  source 1..80: mol_type = other DNA
acgatttggaactatcgtagctagaaactttgataccattcgcctatcatttcaattggtacgtccaccgaatatgacac

SEQ ID NO: 51604 - DNA, 80 bp, synthetic construct
  source 1..80: mol_type = other DNA
tcagaaactttgttggcaaatgtgacatcagtacgtcaggagtatgcaataccagtaggaccagtattcccaccaggcat

SEQ ID NO: 51605 - DNA, 80 bp, synthetic construct
  source 1..80: mol_type = other DNA
cagcagttgcaaacctatttccgcaagcgccaccatttatatttcatgctacagttggactcacattacgtattgaatct

SEQ ID NO: 51606 - DNA, 80 bp, synthetic construct
  source 1..80: mol_type = other DNA
caatctaaatgaggatctaacctgtggaaatatactcatgtgggaggctgtgaccttaaaaactgaggttataggggtga

SEQ ID NO: 51607 - DNA, 80 bp, synthetic construct
  source 1..80: mol_type = other DNA
aaattacagggggtggtttttaattacagaacaaagtacccagatggaacaatttttccaaagaatgccacaggcaatca

SEQ ID NO: 51608 - DNA, 80 bp, synthetic construct
  source 1..80: mol_type = other DNA
ggagagattcgctgagccccacccaatcgtgtcttgtgccattgaggcgctttcctcccctgcagagggctacgtcaatg

SEQ ID NO: 51609 - DNA, 80 bp, synthetic construct
  source 1..80: mol_type = other DNA
gaaagtcatagtgtcccgtacactggaaatgttttccaagtggaaactgtccacacctacggtgatgactgcatatacac

SEQ ID NO: 51610 - DNA, 80 bp, synthetic construct
  source 1..80: mol_type = other DNA
tctgggttaaaatcatgctcctttaagcccccttgaatgctttcttctattgtatggtatggatccctagttaaggcact

SEQ ID NO: 51611 - DNA, 80 bp, synthetic construct
  source 1..80: mol_type = other DNA
tggatggacaggattgaggattttttggctgcagattgcccctttctgcctaaaccaaaaacccaggcagatgctttcat

SEQ ID NO: 51612 - DNA, 80 bp, synthetic construct
  source 1..80: mol_type = other DNA
gggcaacagtctttcgggatatagcagtacctcactctgcatggatttttgcatgtgcacctgacagatgcccaccaact

SEQ ID NO: 51613 - DNA, 80 bp, synthetic construct
  source 1..80: mol_type = other DNA
ttcgggatatagcagtacctcactctgcatggatttttgcatgtgcacctgacagatgcccaccaactgcactgtatgtg

SEQ ID NO: 51614 - DNA, 80 bp, synthetic construct
  source 1..80: mol_type = other DNA
ctttattaacaggcaaaatcagattgaggaatcaaagatccctgatattgtggacttaattgatgcggcagaagcagaag

SEQ ID NO: 51615 - DNA, 80 bp, synthetic construct
  source 1..80: mol_type = other DNA
aagtgctgtgtgttctagtctaagggtttcgtgttccgtcacgagattccattctacaaacgccttacgcgaggttctgt

SEQ ID NO: 51616 - DNA, 80 bp, synthetic construct
  source 1..80: mol_type = other DNA
ccgcagagtctagactcgtggtggacttctctcaattttctagggggaactaccgtgtgtcttggccaaaattcgcagtc

SEQ ID NO: 51617 - DNA, 80 bp, synthetic construct
  source 1..80: mol_type = other DNA
acagcaattatctgacaaagtgttatcacaaaaagaagaaataataactgatgtacaagatgatattaaaatagctgatg

SEQ ID NO: 51618 - DNA, 80 bp, synthetic construct
  source 1..80: mol_type = other DNA
aataataataatagaaagcaacaattatctgacaaagtgctatcacaaaaagaggaaataataactgatgctcaagatga

SEQ ID NO: 51619 - DNA, 80 bp, synthetic construct
  source 1..80: mol_type = other DNA
agtcgtattcaatctcggaatccttcaagtgacagaaaccataacagtcaggatgacatcatgaaggcagtcgctgcggc

SEQ ID NO: 51620 - DNA, 80 bp, synthetic construct
  source 1..80: mol_type = other DNA
agatttcgttactacaaattatatgtcattgatttcgggaatgtggctgttaacggttatacctaatgatatgtttatac

SEQ ID NO: 51621 - DNA, 80 bp, synthetic construct
  source 1..80: mol_type = other DNA
gtgaatctttagtggcatgtcagttagcaataattaataccatcatatatccagcctttggaatgcaaagaatgcactac

SEQ ID NO: 51622 - DNA, 80 bp, synthetic construct
  source 1..80: mol_type = other DNA
tgttaataataatcaatttaggcaagtagtgattgacggagtactaaatcaagtcctaaatgacaatataagaaatggtc

SEQ ID NO: 51623 - DNA, 80 bp, synthetic construct
  source 1..80: mol_type = other DNA
gaggaattctacttctatctaatagattaggacaattggttgatttgactagattgttagcatataattatgagactttg

SEQ ID NO: 51624 - DNA, 80 bp, synthetic construct
  source 1..80: mol_type = other DNA
cagaaagaagaagtaattacagatgatcaagaagaaattaaaatatctgatgaaatcaaaaaatctagcaaagaagaatc

SEQ ID NO: 51625 - DNA, 80 bp, synthetic construct
  source 1..80: mol_type = other DNA
atggcgtgtattactatgaatatgcaacatgtgcaaactttgaccactgagaagttgcaattaacatcagttacgtctct

SEQ ID NO: 51626 - DNA, 80 bp, synthetic construct
  source 1..80: mol_type = other DNA
atgcatgctaataggaaatgctacagttataccaagtccacaaacgttattccattactacaatgttaacgttaacttcc

SEQ ID NO: 51627 - DNA, 80 bp, synthetic construct
  source 1..80: mol_type = other DNA
attcaaattataatgagagaataaatgatgcagtagcaatcataaccgctgcaaatagattgaatttataccaaaagaaa

SEQ ID NO: 51628 - DNA, 80 bp, synthetic construct
  source 1..80: mol_type = other DNA
tagttgaagattttttaaagagattgcaaatattcgacgtttcgagggttccagatgatcaaatgtatagactcagggac

SEQ ID NO: 51629 - DNA, 80 bp, synthetic construct
  source 1..80: mol_type = other DNA
aggttgaggttgcttccagtcgaaattagaagattagatatttttaatttaatattaatgaacatggaacaaatcgaacg

SEQ ID NO: 51630 - DNA, 80 bp, synthetic construct
  source 1..80: mol_type = other DNA
tgcgtcagataaaattgctcagggagtgatcatagcctatagagacatgcagctagagagagatgaaatgtatggttatg

SEQ ID NO: 51631 - DNA, 80 bp, synthetic construct
  source 1..80: mol_type = other DNA
ttaatatagctcgtaatttagaagggtttcaacagataaatttagaagagttaatgagaacaggagattacgcacaaatt

SEQ ID NO: 51632 - DNA, 80 bp, synthetic construct
  source 1..80: mol_type = other DNA
aacaattcgatttcagagcatctatgcatatgctaacatccaatttaactttcactgtatattccgatcttcttgcattc

SEQ ID NO: 51633 - DNA, 80 bp, synthetic construct
  source 1..80: mol_type = other DNA
aagaagagaataaaagtacgaacggtattattgagaacaagaatgctacaaaaccccaattatcagagaaagtgttatcc

SEQ ID NO: 51634 - DNA, 80 bp, synthetic construct
  source 1..80: mol_type = other DNA
tccaccgaggctcaaatacaaaaaatgtcacaggatttgcaattagaggcgctgacaattcaatcagaaacacaattttt

SEQ ID NO: 51635 - DNA, 80 bp, synthetic construct
  source 1..80: mol_type = other DNA
acaggtatcaattcacaggcagctaatgactgctttaagacgttaattgccgctatgcttagtcaacgtactatgtcttt

SEQ ID NO: 51636 - DNA, 80 bp, synthetic construct
  source 1..80: mol_type = other DNA
agatttcgtcactacaaactacatgtcattaatttcagggatgtggttattaacagttgtacctaatgatatgttcatac

SEQ ID NO: 51637 - DNA, 80 bp, synthetic construct
  source 1..80: mol_type = other DNA
acattttgttaacaataatcaatttagacaagtagtaattgatggagtattaaaccaagttctgaatgataatataagaa

SEQ ID NO: 51638 - DNA, 80 bp, synthetic construct
  source 1..80: mol_type = other DNA
gaggaatattacttctatcgaatagattaggacaattggttgacctaactaggctattggcatataattatgaaactctg

SEQ ID NO: 51639 - DNA, 80 bp, synthetic construct
  source 1..80: mol_type = other DNA
caaaaggaagaggtgattacagataatcaagaagaaattaaaatagctgatgaagttaaaaaatctaataaagaggaatc

SEQ ID NO: 51640 - DNA, 80 bp, synthetic construct
  source 1..80: mol_type = other DNA
atggcgtgcattaccatgaacatgcaacatgtacaaactctaactactgaaaagttgcaattaacatcagttacttcctt

SEQ ID NO: 51641 - DNA, 80 bp, synthetic construct
  source 1..80: mol_type = other DNA
attcaaattacaatgaaagaataaatgacgcagtagcaatcataaccgccgcaaatagattgaatttgtatcagaaaaag

SEQ ID NO: 51642 - DNA, 80 bp, synthetic construct
  source 1..80: mol_type = other DNA
tagttgaagatttcttaaagagactacaaatattcgacatttctagagttccagatgatcaaatgtacagactcagggat

SEQ ID NO: 51643 - DNA, 80 bp, synthetic construct
  source 1..80: mol_type = other DNA
ttaacatagctcgtaatttagacggttttcagcagataaatttagaggagttgatgagaacgggagattatgcacaaatt

SEQ ID NO: 51644 - DNA, 80 bp, synthetic construct
  source 1..80: mol_type = other DNA
tggtagctaaattagacgctactgtctttgcacaaattgttaagctcaggaaggttgatactttaaagccaatcctgtat

SEQ ID NO: 51645 - DNA, 80 bp, synthetic construct
  source 1..80: mol_type = other DNA
aaaataaattctgattcaaatgatttttatcttgtagcgaattatgactgggttccaacgtctacaacaaaagtttataa

SEQ ID NO: 51646 - DNA, 80 bp, synthetic construct
  source 1..80: mol_type = other DNA
cctaggcaactaccagtatacagagcaaacggagagaaagaactacgcaacagatggtattggaagttaaaacgagacac

SEQ ID NO: 51647 - DNA, 80 bp, synthetic construct
  source 1..80: mol_type = other DNA
cttgcccgatggagattatgatgtgagagaatattttttaaatttgtatgatcaagtactaactgaaatgccagattatt

SEQ ID NO: 51648 - DNA, 80 bp, synthetic construct
  source 1..80: mol_type = other DNA
ttgcgatgcgattttccaagatgaagaaaccgaaggtgtagtaagaagattcatagcagaaatgaggcaaagagtacaag

SEQ ID NO: 51649 - DNA, 80 bp, synthetic construct
  source 1..80: mol_type = other DNA
tagttgaaccattgaataatgatataatattcaattacatacctgaaagaatacggaatgacgtaaactatatactgaac

SEQ ID NO: 51650 - DNA, 80 bp, synthetic construct
  source 1..80: mol_type = other DNA
aagaagaaaataaaaacgtaaatactaatagtgaaaataaaaatgctacaaaacctcaattatcagagaaagtgctatct

SEQ ID NO: 51651 - DNA, 80 bp, synthetic construct
  source 1..80: mol_type = other DNA
tcgaatccttatgggatactacaactacatcaaactacatcttagctagatcagttgtgccagaccttaaggaactagtg

SEQ ID NO: 51652 - DNA, 80 bp, synthetic construct
  source 1..80: mol_type = other DNA
cgtacaggaagcgcggagctaaacgtgaagacttaccacaacaaaatgaacgtctgcaagaaaaagaaattgaaaataat

SEQ ID NO: 51653 - DNA, 80 bp, synthetic construct
  source 1..80: mol_type = other DNA
cattaaatctttttagatataagagtagatgttatatttttactgtttgggtggtcctcctcatcatcgagtcgattcta

SEQ ID NO: 51654 - DNA, 80 bp, synthetic construct
  source 1..80: mol_type = other DNA
aacggcggagggacttaaagcccataatttgtcctgccctcagtcacagtgtccttattgctttacacattgtgaaccca

SEQ ID NO: 51655 - DNA, 80 bp, synthetic construct
  source 1..80: mol_type = other DNA
cattaaatctttttaggtataaaagtaggtgttacatttttacagtgtgggttactctgctaatcattgaatcaatcatg

SEQ ID NO: 51656 - DNA, 80 bp, synthetic construct
  source 1..80: mol_type = other DNA
cattaaatcttttcagatacaaaagcaggtgttacatttttactgtatgggtaattctcctcatcattgagtctattttg

SEQ ID NO: 51657 - DNA, 80 bp, synthetic construct
  source 1..80: mol_type = other DNA
catattgtgattaaaatcacgaggaccaaagcactgaataacattttcctctctggtaggaacacgcttccaacgagttt

SEQ ID NO: 51658 - DNA, 80 bp, synthetic construct
  source 1..80: mol_type = other DNA
gtccactttttatccacagttgcagtctgctgaatggaagtgtggttatgctatgccacaaatttataagcttcaacgta

SEQ ID NO: 51659 - DNA, 80 bp, synthetic construct
  source 1..80: mol_type = other DNA
atacgtttaaacgcttctgtcactttgaggatttgtaagtttggaaacacttcttttgattttttaagtaatgtttctac

SEQ ID NO: 51660 - DNA, 80 bp, synthetic construct
  source 1..80: mol_type = other DNA
ttgatgccaaaggttttccacagcttgctgaattgattcctaatcaggctgcgttattctttgatagtgaggttagcact

SEQ ID NO: 51661 - DNA, 80 bp, synthetic construct
  source 1..80: mol_type = other DNA
tgtcgtcctgtcacggaaatacacctcatttccatggctgctgggttgtgctgccaactggattcttcgagggacgtcct

SEQ ID NO: 51662 - DNA, 80 bp, synthetic construct
  source 1..80: mol_type = other DNA
gtcaaggctggggaaagaatcaatcagtccccaatcctctgggattctttcccgatcatcagttggatccagcattcaga

SEQ ID NO: 51663 - DNA, 80 bp, synthetic construct
  source 1..80: mol_type = other DNA
atttcatttgggttgcaacagtttggaagcaagtgctgtgtgttctagtctaagggtttcgtgttccgtcacgagattcc

SEQ ID NO: 51664 - DNA, 80 bp, synthetic construct
  source 1..80: mol_type = other DNA
ctttgtgtctacttttctcaactaaacgaaatttttgctatggccggcatctttgatgctggagtcgtagtgtaattgaa

SEQ ID NO: 51665 - DNA, 80 bp, synthetic construct
  source 1..80: mol_type = other DNA
aaatgtgctggagtaatcaaagatcgcattgacgagccaacaatggaagagccagtcatttgtcttgagacctatctagt

SEQ ID NO: 51666 - DNA, 80 bp, synthetic construct
  source 1..80: mol_type = other DNA
agaatttgtgactacaaattacatgtcacttatatctggtatgtggttgctaacaattataccaaatgacatgtttcttc

SEQ ID NO: 51667 - DNA, 80 bp, synthetic construct
  source 1..80: mol_type = other DNA
gaaaaagaaactgaaaagaatgtagacgcaactatggagaataaaactagtaataaaaaacaacaattatctgataaagt

SEQ ID NO: 51668 - DNA, 80 bp, synthetic construct
  source 1..80: mol_type = other DNA
catggacatgaatctaccatcaacagcgagatatattagaccaaatttgttacaagatagactaaatttgcatgataatt

SEQ ID NO: 51669 - DNA, 80 bp, synthetic construct
  source 1..80: mol_type = other DNA
tggaatttgtgactacaaattatatgtcattaatatctggtatgtggttactaacagttataccaaacgacatgtttctt

SEQ ID NO: 51670 - DNA, 80 bp, synthetic construct
  source 1..80: mol_type = other DNA
actcaaactataatgagcgaattaatgatgcagtagcgatcattacagcagctaatagattgaatttatatcagaagaag

SEQ ID NO: 51671 - DNA, 80 bp, synthetic construct
  source 1..80: mol_type = other DNA
agagagacacactaccagatggagactatgatgtacgagaatacttcttaaatttatatgatcagatattgatagaaatg

SEQ ID NO: 51672 - DNA, 80 bp, synthetic construct
  source 1..80: mol_type = other DNA
tgacagaaacgtcgttaattatccatcaatcctacatccaattgatcacgcattcaatgagtattttttaaatcatcaat

SEQ ID NO: 51673 - DNA, 80 bp, synthetic construct
  source 1..80: mol_type = other DNA
tagttgaaccattaaataatgaaataatttttaattacataccagaaagaataagaaacgatgttaattatatcctaaac

SEQ ID NO: 51674 - DNA, 80 bp, synthetic construct
  source 1..80: mol_type = other DNA
atagcagttatttaaacgagtcaggggctctagtgccgctcgactagagccctgtaatggtacagacatagattactgtg

SEQ ID NO: 51675 - DNA, 80 bp, synthetic construct
  source 1..80: mol_type = other DNA
aaggagatattggttcttactggttgttgtaatactgattactttgaaatgaagaattggtttgaccccatagaaaatga

SEQ ID NO: 51676 - DNA, 80 bp, synthetic construct
  source 1..80: mol_type = other DNA
taaggaggttttgtttaacaagtactttaagtattggggacaggattatcatcctgattgtgttgattgccatgacgaga

SEQ ID NO: 51677 - DNA, 80 bp, synthetic construct
  source 1..80: mol_type = other DNA
ctcaagggtttttcgatgagggttcagaattaacattgaagcatttcttttttacacaaaagggtgatgctgcaattaaa

SEQ ID NO: 51678 - DNA, 80 bp, synthetic construct
  source 1..80: mol_type = other DNA
aaggggtaatggcaagtgtttgagttttagtaatcatttagtctcaactaaataaaatgtttgttttacttgttgcatat

SEQ ID NO: 51679 - DNA, 80 bp, synthetic construct
  source 1..80: mol_type = other DNA
taaagggcccttgtgtgttgacacatcacacttcactacccaattcgtcgacaatgtcaagcttgctaggtggagtgcta

SEQ ID NO: 51680 - DNA, 80 bp, synthetic construct
  source 1..80: mol_type = other DNA
atgtttttcgctaaagtatatacccggtggttgcgcaatgcctataatggctaatttggttaattataaatctcataata

SEQ ID NO: 51681 - DNA, 80 bp, synthetic construct
  source 1..80: mol_type = other DNA
taggctcattgtatgtttcttggagtgatggtgatgtaattactggcgtcccgaaacctgttgagggtgttagttccttt

SEQ ID NO: 51682 - DNA, 80 bp, synthetic construct
  source 1..80: mol_type = other DNA
ctgaggggcttgtttttctccatactgtcttgctgccgacacaatataaggatgttgaagcgtggtctgggttgtgcgtt

SEQ ID NO: 51683 - DNA, 80 bp, synthetic construct
  source 1..80: mol_type = other DNA
gttgcaaactattgtgccagagtatattgatgttaataagacgctgcaagaattaagttacaaattgccaaattacactg

SEQ ID NO: 51684 - DNA, 80 bp, synthetic construct
  source 1..80: mol_type = other DNA
gtttttacggaggggaccaattcctttacataggtgacagaattgttacttatctctcaactaacgatttgtacgttgct

SEQ ID NO: 51685 - DNA, 80 bp, synthetic construct
  source 1..80: mol_type = other DNA
tgtgaccttgttgagcggcgtgctttacgttgacggacatagattggcttcaggtgttcaggttcataacctacctgaat

SEQ ID NO: 51686 - DNA, 80 bp, synthetic construct
  source 1..80: mol_type = other DNA
tgccgtgcctagcactactataatttatagtagagtcggaaggtccgtaaattctcaaaatagcacaggctgggttttct

SEQ ID NO: 51687 - DNA, 80 bp, synthetic construct
  source 1..80: mol_type = other DNA
agtcgtagtcgtggtgaatccaaatctcaatctcggaatccttcaagtgacagaaaccataacagtcaggatgacatcat

SEQ ID NO: 51688 - DNA, 80 bp, synthetic construct
  source 1..80: mol_type = other DNA
gctttagttggaattttgcttttgctcttgtttttattatctttcttttatgaatatatttctttcctctgatctacgta

SEQ ID NO: 51689 - DNA, 80 bp, synthetic construct
  source 1..80: mol_type = other DNA
tttttgagtcagataaggaagaagatgttcaacaagctcaacaagaagctactcatattgctgaggatgttgttgaccaa

SEQ ID NO: 51690 - DNA, 80 bp, synthetic construct
  source 1..80: mol_type = other DNA
caaactcctattgtttggcatgcaaaggattttaacagtctttctgctgaaggtcgtaagtatattgtaaaaactagcaa

SEQ ID NO: 51691 - DNA, 80 bp, synthetic construct
  source 1..80: mol_type = other DNA
gctatggccggcatctttgatgctagagtcgtagtgtaattgaaatttcatttgggttgcaacagtttggaagcaagtgc

SEQ ID NO: 51692 - DNA, 80 bp, synthetic construct
  source 1..80: mol_type = other DNA
tcatgccctattttatgcacgatgtagtgagtagttttgagggttatgattttaagtatatagaaaatggtcagttgaag

SEQ ID NO: 51693 - DNA, 80 bp, synthetic construct
  source 1..80: mol_type = other DNA
agttagtctcaacagaagctcaaatacagaaaatgtctcaagatttgcaacttgaagcactaactatacaatctgaaacg

SEQ ID NO: 51694 - DNA, 80 bp, synthetic construct
  source 1..80: mol_type = other DNA
cagtttctagctggtataaattcacaagcggcaaatgattgctttaaaacattaatagcagctatgttaagccaacgtac

SEQ ID NO: 51695 - DNA, 80 bp, synthetic construct
  source 1..80: mol_type = other DNA
aatgtcattagaatttgtaactacaaattatatgtcacttatatctggtatgtggttattaacagttataccaaacgaca

SEQ ID NO: 51696 - DNA, 80 bp, synthetic construct
  source 1..80: mol_type = other DNA
tgtttcttcgtgagtcagtagttgcatgtgaattagctataataaacactgttatttatccagcattcggaatgcaaaga

SEQ ID NO: 51697 - DNA, 80 bp, synthetic construct
  source 1..80: mol_type = other DNA
ccaagacaattaccaatttatcgagcgaacggtgaaagagaattgagaaatagatggtactggaagttaaaaagagacac

SEQ ID NO: 51698 - DNA, 80 bp, synthetic construct
  source 1..80: mol_type = other DNA
gaaaaagaagttgaaaagaacatagacgtaactatggagagtaaagctaatagtaaaaagcaacagctatctgataaagt

SEQ ID NO: 51699 - DNA, 80 bp, synthetic construct
  source 1..80: mol_type = other DNA
agttagttgaaccattgaataatgaaataatttttaattatataccagaaaggataagaaacgatgtcaattacgttcta

SEQ ID NO: 51700 - DNA, 80 bp, synthetic construct
  source 1..80: mol_type = other DNA
aacatggatatgaatttgccatcaacagcaaggtatattagaccaaatttgctgcaagatagactaaatttgcatgataa

SEQ ID NO: 51701 - DNA, 80 bp, synthetic construct
  source 1..80: mol_type = other DNA
gaaaaagaaattgaaaaagatgtggatgtaactatggagaataaaaataacaatagaaagcagcaattatctgataaagt

SEQ ID NO: 51702 - DNA, 80 bp, synthetic construct
  source 1..80: mol_type = other DNA
caactgaagctcagatccagaaaatgtctcaagatttacaacttgaagctttaacaatacaatctgaaacgcagtttctg

SEQ ID NO: 51703 - DNA, 80 bp, synthetic construct
  source 1..80: mol_type = other DNA
gctggtataaattcgcaagcagcaaatgattgttttaaaacattgatagcggctatgttaagtcagcgtacaatgtcatt

SEQ ID NO: 51704 - DNA, 80 bp, synthetic construct
  source 1..80: mol_type = other DNA
agaatttgtgactacgaattatatgccacttatatctggtatgtggttattgacagttataccaaatgatatgtttcttc

SEQ ID NO: 51705 - DNA, 80 bp, synthetic construct
  source 1..80: mol_type = other DNA
aatgaaagcaatagttgaggactttttgaaaaggctacagatttttgatgtgccgcgagtaccagatgatcaaatgtaca

SEQ ID NO: 51706 - DNA, 80 bp, synthetic construct
  source 1..80: mol_type = other DNA
ttaatatcgctagaaatcttgacggatatcagcagatcaatctagaagaattaatgagaactggggattatggccagatt

SEQ ID NO: 51707 - DNA, 80 bp, synthetic construct
  source 1..80: mol_type = other DNA
gaaaaagaaattgaaaagaatacagatgtaatcatggagaataaaaatagtaataaaaaacagcaattatctgataaagt

SEQ ID NO: 51708 - DNA, 80 bp, synthetic construct
  source 1..80: mol_type = other DNA
tctcaactaaacgaaatttttgctatggccggcatctttgatgctagagtcgtagtgtaattgaaatttcatttgggttg

SEQ ID NO: 51709 - DNA, 80 bp, synthetic construct
  source 1..80: mol_type = other DNA
gcattgacgagccaacaatggaagagccagtcatttgtcttgagacctatctagttagtaactgctaatggaacggtttc

SEQ ID NO: 51710 - DNA, 80 bp, synthetic construct
  source 1..80: mol_type = other DNA
agttgctttttagactttgtgtctacttttctcaactaaacgaaatttttgctatggccggcatctttgatgctagagtc

SEQ ID NO: 51711 - DNA, 80 bp, synthetic construct
  source 1..80: mol_type = other DNA
attggagagatttgctgagccccacccaatcgtgtcctgtgccattgaagctctttcctcccccgcagagggctacgtca

SEQ ID NO: 51712 - DNA, 80 bp, synthetic construct
  source 1..80: mol_type = other DNA
agctgttactgcggctagtctctccattttagagagattcatggaaagcagtccattggtatcctgtgcgatagagtccc

SEQ ID NO: 51713 - DNA, 80 bp, synthetic construct
  source 1..80: mol_type = other DNA
ctttgcagcgggtgtgctcaaagcttatgaggaccaccatgtcccatacactggcaatgtgtttcagattgagactgtcc

SEQ ID NO: 51714 - DNA, 80 bp, synthetic construct
  source 1..80: mol_type = other DNA
ataaaaataaaaataataatagaaaacagcaattatctgacaaagtgctatcacaaaaagaagaaataataactgatgta

SEQ ID NO: 51715 - DNA, 80 bp, synthetic construct
  source 1..80: mol_type = other DNA
tcttccgatcttacagatagaaaagttgctttttagactttgtgtctacttttctcaactaaacgaaatttttgctatgg

SEQ ID NO: 51716 - DNA, 80 bp, synthetic construct
  source 1..80: mol_type = other DNA
cgaacatgggcgtggccctggcaagtgttataactgtcgtcctgctgttattaatattacactggccaattttaatgaaa

SEQ ID NO: 51717 - DNA, 80 bp, synthetic construct
  source 1..80: mol_type = other DNA
aagagccagtcatttgtcttgagacctatctagttagtaactgctaatggaacggtttcgatatggaagatcggaagagc

SEQ ID NO: 51718 - DNA, 80 bp, synthetic construct
  source 1..80: mol_type = other DNA
acttaagtaccttatctatctacagatagaaaagttgctttttagactttgtgtctacttttctcaactaaacgaaattt

SEQ ID NO: 51719 - DNA, 80 bp, synthetic construct
  source 1..80: mol_type = other DNA
gaccatccacacttgggtaagttaagtaccttatctatctacagatagaaaagttgctttttagactttgtgtctacttt

SEQ ID NO: 51720 - DNA, 80 bp, synthetic construct
  source 1..80: mol_type = other DNA
gcaattgttgttgacaatgatgtgtatctatctacagatagaaaagttgctttttagactttgtgtctacttttctcaac

SEQ ID NO: 51721 - DNA, 80 bp, synthetic construct
  source 1..80: mol_type = other DNA
attcggaaatttcaggttttggttttgccattccttctgtagccgttcgcacttatagcgaagccgctgcacaaggtttt

SEQ ID NO: 51722 - DNA, 80 bp, synthetic construct
  source 1..80: mol_type = other DNA
tgcgtaagcctatgttgtgcactaaatgcgcatatgatcatgtatttggtaccgaccacaagtttattttggctataaca

SEQ ID NO: 51723 - DNA, 80 bp, synthetic construct
  source 1..80: mol_type = other DNA
aaatcataaaccacagttgtcttttccattatgttcagctggtaatatatttggtctatataaaaattcagcaactggtt

SEQ ID NO: 51724 - DNA, 80 bp, synthetic construct
  source 1..80: mol_type = other DNA
gccctaaaggtaagattgttgttattgctggacaagcttttttctatagtggtggtttttatcgttttatggttgatcct

SEQ ID NO: 51725 - DNA, 80 bp, synthetic construct
  source 1..80: mol_type = other DNA
tgctttttcacatgtaatagtaatgctaatctctctatgttacaattaggtgttcctgacaattcttcaactattgttac

SEQ ID NO: 51726 - DNA, 80 bp, synthetic construct
  source 1..80: mol_type = other DNA
tagttcttttgactgtatagttaatttgttatttacagaacagttaggtgcgcctttgggcataactatatctggtgaaa

SEQ ID NO: 51727 - DNA, 80 bp, synthetic construct
  source 1..80: mol_type = other DNA
gttgcatttgctacttttgttgatgttttggttaatgttagtgcaactaagattcaaaacttactttattgtgattctcc

SEQ ID NO: 51728 - DNA, 80 bp, synthetic construct
  source 1..80: mol_type = other DNA
tatcttgcagagtaataaccctcaatgtgctattgttcaagcatcggagtctaaagttttgcttgagaggtttttaccta

SEQ ID NO: 51729 - DNA, 80 bp, synthetic construct
  source 1..80: mol_type = other DNA
acaagagtttgcacaaaatttaccaaagtatgttaagcctaattttgacttgactccttttaatttaacatatcttaatt

SEQ ID NO: 51730 - DNA, 80 bp, synthetic construct
  source 1..80: mol_type = other DNA
atgctgttaatgttccatatgtagttattagtggttttgtaagtcgtgtaattcgtagagaaaggtgtgacatgactttt

SEQ ID NO: 51731 - DNA, 80 bp, synthetic construct
  source 1..80: mol_type = other DNA
caggtgttacattaacacttcttagtggtgtacttcttgttgatggccacaagattgctactcgtgttcaagtgggtcag

SEQ ID NO: 51732 - DNA, 80 bp, synthetic construct
  source 1..80: mol_type = other DNA
taagtaatttgctatcatattaacatgtctagaggaaagtcagaactttttctgtttgtgttgttggagtacttaaagat

SEQ ID NO: 51733 - DNA, 80 bp, synthetic construct
  source 1..80: mol_type = other DNA
gaagaagttgaacatgtgctctcaattaaacaacctttttctttttcttttagagatgaattgggtgttcgtgttttaga

SEQ ID NO: 51734 - DNA, 80 bp, synthetic construct
  source 1..80: mol_type = other DNA
gcttaaagatggttgtgatgttggtttttgtccacacagacataaattgcgttcacgtgttaagtttgttaatggacgtg

SEQ ID NO: 51735 - DNA, 80 bp, synthetic construct
  source 1..80: mol_type = other DNA
ttggacttttatattttgttgcacaatttattagtacttttggttctttcttaggctttcatcagaaacagtggttttta

SEQ ID NO: 51736 - DNA, 80 bp, synthetic construct
  source 1..80: mol_type = other DNA
gttaattgtgattcttttgggcctggtaatacttttattaatggtgatattgcaagagagcttggtaatgttgttaaaac

SEQ ID NO: 51737 - DNA, 80 bp, synthetic construct
  source 1..80: mol_type = other DNA
acgtacttataattttgtgtggtatgtatgtttatttgttgttgcattgtttattggcgtttcatttattgattatacaa

SEQ ID NO: 51738 - DNA, 80 bp, synthetic construct
  source 1..80: mol_type = other DNA
agcctaatgcttattataagtatgatgttaaaaattatgtacgttttccagaaattttagctagaggttttggcttacgt

SEQ ID NO: 51739 - DNA, 80 bp, synthetic construct
  source 1..80: mol_type = other DNA
tatacacaatggtaagcctgtggtagtaaaggtataagaaatttgctactatgttactgaacctaggtgaacgctagtat

SEQ ID NO: 51740 - DNA, 80 bp, synthetic construct
  source 1..80: mol_type = other DNA
ggctattaaaggctcaatggcgtacaggaagcgcggagctaaacgtgaagacttaccacaacaaaatgaacgtctgcaag

SEQ ID NO: 51741 - DNA, 80 bp, synthetic construct
  source 1..80: mol_type = other DNA
tcttcgtgagtcgctagtcgcatgcgaattggccataataaatactatagtttacccagcatttggaatgcaaagaatgc

SEQ ID NO: 51742 - DNA, 80 bp, synthetic construct
  source 1..80: mol_type = other DNA
attatagaaatggcgatccccagactccatttcaaatagcagaacaacaaatacaaaattttcaagtagctaattggtta

SEQ ID NO: 51743 - DNA, 80 bp, synthetic construct
  source 1..80: mol_type = other DNA
tattaataataatagatttagacaagttgttattgatggagtgttaaatcaaacgcttaacgacaacattaggaatggac

SEQ ID NO: 51744 - DNA, 80 bp, synthetic construct
  source 1..80: mol_type = other DNA
aagttattaatcaattaatggaagcattaatgcagttatctagacaacaatttccgaccatgccagttgattataaaaga

SEQ ID NO: 51745 - DNA, 80 bp, synthetic construct
  source 1..80: mol_type = other DNA
tctgataaagtactatcacaaaaagaggaaataataactgatgcacaagatgacattaaaatagctgatgaggtcaaaaa

SEQ ID NO: 51746 - DNA, 80 bp, synthetic construct
  source 1..80: mol_type = other DNA
gaggaatattgttattgtctaacagattaggtcagttagttgatttaacaagattattatcatataattatgaaactcta

SEQ ID NO: 51747 - DNA, 80 bp, synthetic construct
  source 1..80: mol_type = other DNA
atggcttgtataactatgaatatgcaacaagttcaaactctcactaccgaaaaattacagttaacttctgtcacatcttt

SEQ ID NO: 51748 - DNA, 80 bp, synthetic construct
  source 1..80: mol_type = other DNA
attcgaattacaacgaacgaattaacgatgctgtggctattattacggctgctaatagactaaatttatatcagaaaaaa

SEQ ID NO: 51749 - DNA, 80 bp, synthetic construct
  source 1..80: mol_type = other DNA
tagttgaggattttttgaaacgattgcaaatttttgatgtaccacgagtaccagacgaccagatgtacaggttgagagac

SEQ ID NO: 51750 - DNA, 80 bp, synthetic construct
  source 1..80: mol_type = other DNA
agacttagattattgccagttgaaagacgaagacttgatatatttaacttaatattaatgaatatggagcagatcgagcg

SEQ ID NO: 51751 - DNA, 80 bp, synthetic construct
  source 1..80: mol_type = other DNA
agcttcagataaaattgctcaaggagtaataattgcttacagagatatgcaactagaaagagatgagatgtatggatttg

SEQ ID NO: 51752 - DNA, 80 bp, synthetic construct
  source 1..80: mol_type = other DNA
gatttgttaacatcgctaggaacctcgatggatatcaacaaatcaatttagaagagttgatgagaactggagactatggt

SEQ ID NO: 51753 - DNA, 80 bp, synthetic construct
  source 1..80: mol_type = other DNA
caaattactaatatgttattaaacaaccagcctgtagctttggtaggagcgaagccatttgtgacagattcatcagttat

SEQ ID NO: 51754 - DNA, 80 bp, synthetic construct
  source 1..80: mol_type = other DNA
atcgctaattgcaaaattagatgccacagtttttgctcaaatagttaaacttagaaaagtggacactttaaaaccaatat

SEQ ID NO: 51755 - DNA, 80 bp, synthetic construct
  source 1..80: mol_type = other DNA
atcatcaaaagaagagtcgaaacagttacttgaaatattaaaaacgaaagaagatcataagaaagaagtacagtacgaaa

SEQ ID NO: 51756 - DNA, 80 bp, synthetic construct
  source 1..80: mol_type = other DNA
aaataaattctgattctaatgatttctacttagttgcaaattatgattggataccaacttcaaccacaaaagtttataag

SEQ ID NO: 51757 - DNA, 80 bp, synthetic construct
  source 1..80: mol_type = other DNA
aaccttttgatttcagagcatcaatgcatatgttaacatctaatttaacttttactgtttattctgatttactatctttc

SEQ ID NO: 51758 - DNA, 80 bp, synthetic construct
  source 1..80: mol_type = other DNA
ttctacaaaaaacaatcccgacttttgaaccaaaagaatcaattttgaaaaaattagaggatataagaccagaacaagct

SEQ ID NO: 51759 - DNA, 80 bp, synthetic construct
  source 1..80: mol_type = other DNA
ccaagacaattaccaatctatcgagcaaatggtgagaaagaattaaggaatagatggtattggaaattgaaaaaggatac

SEQ ID NO: 51760 - DNA, 80 bp, synthetic construct
  source 1..80: mol_type = other DNA
attgccagacggagattatgacgtacgggaatattttttaaatttatatgatcaaatactgatagaaatgccagattatt

SEQ ID NO: 51761 - DNA, 80 bp, synthetic construct
  source 1..80: mol_type = other DNA
tattactaaaagatatggctgtagaaaataaaaactctagggatgctggtaaagttgtagactctgagactgcaagtatt

SEQ ID NO: 51762 - DNA, 80 bp, synthetic construct
  source 1..80: mol_type = other DNA
tgtgatgctatatttcaagatgaggagacagagggagttattagaagatttatagcagatatgagacaacaagttcaggc

SEQ ID NO: 51763 - DNA, 80 bp, synthetic construct
  source 1..80: mol_type = other DNA
agataggaatattgtcaattatccatcaattttacatccaattgatcatgcatttaatgaatattttttgaatcatcaat

SEQ ID NO: 51764 - DNA, 80 bp, synthetic construct
  source 1..80: mol_type = other DNA
aaaaagaaattgaaaataataccgacgtaaccatggaaaatagaaataaaaataaaaataacaatagaaagcaacaatta

SEQ ID NO: 51765 - DNA, 80 bp, synthetic construct
  source 1..80: mol_type = other DNA
atggatatgaatttgccatcaacagcgagatatattagaccgaatctattgcaagatagactaaacttacatgataattt

SEQ ID NO: 51766 - DNA, 80 bp, synthetic construct
  source 1..80: mol_type = other DNA
tgaatcattatgggacacaataactacatcaaattacatattggcaagatcagtcgtgcctgatttgaaggaaaaagaat

SEQ ID NO: 51767 - DNA, 80 bp, synthetic construct
  source 1..80: mol_type = other DNA
cagtttctggccggcataaattcacaagcagaaaatgtgtgttttaaaacactgatagcatctatgttgagccaccgtac

SEQ ID NO: 51768 - DNA, 80 bp, synthetic construct
  source 1..80: mol_type = other DNA
agggtcagaagcagatgaaattattcagaatcttagaaccaagacaattttcaatccacagaccaaatggtgacaaagaa

SEQ ID NO: 51769 - DNA, 80 bp, synthetic construct
  source 1..80: mol_type = other DNA
atacaatccaagcaggctttcactttcttcgcttcacctccgcacgtcgcatggaaaccaccgtgaacgcccaccaggtc

SEQ ID NO: 51770 - DNA, 80 bp, synthetic construct
  source 1..80: mol_type = other DNA
agctggcataaattcacaagcagcaaatgattgttttaaaacactaatagcagctatgttaagccaacgtacaatgtcat

SEQ ID NO: 51771 - DNA, 80 bp, synthetic construct
  source 1..80: mol_type = other DNA
gacgtgtgctcgtccgatctctacagatagaaaagttgctttttagactttgtgtctacttttctcaactaaacgaaatt

SEQ ID NO: 51772 - DNA, 80 bp, synthetic construct
  source 1..80: mol_type = other DNA
cccgcctggcacaacaggtccgaaccacatcccacgttgttgttgctaatccggaagcaacccaatggggccgcacagcg

SEQ ID NO: 51773 - DNA, 80 bp, synthetic construct
  source 1..80: mol_type = other DNA
gcatatgaaagtcacaatgtcccgtacactggaaatgttttccaagtggaaactgtccacacgtacggtggttactgcct

SEQ ID NO: 51774 - DNA, 80 bp, synthetic construct
  source 1..80: mol_type = other DNA
tttctactaaacggtcagataataaacacttaccaggctagatttggaacaatcgtagctagaaattttgatacaatcag

SEQ ID NO: 51775 - DNA, 80 bp, synthetic construct
  source 1..80: mol_type = other DNA
aatctgcagtctgtgaatctgtacttgccgatgcgagcgagacaatgctagcaaatgtgacatctgttagacaagaatac

SEQ ID NO: 51776 - DNA, 80 bp, synthetic construct
  source 1..80: mol_type = other DNA
cagaagattataattatgtatatgctattctggggcaaagaggcagtcaaccacttccatctgggcgacgacatggaccc

SEQ ID NO: 51777 - DNA, 80 bp, synthetic construct
  source 1..80: mol_type = other DNA
tatgctccagtgaattgggggccaggtgaagtgaatgactcgactgtggtgcaacctgtgttggatggaccgtatcaacc

SEQ ID NO: 51778 - DNA, 80 bp, synthetic construct
  source 1..80: mol_type = other DNA
agccaggtgtcgcatcagagacaagaacgtatacaatgtttggatcaagtaaacaggtgttagtgtcgaacgtgtccgat

SEQ ID NO: 51779 - DNA, 80 bp, synthetic construct
  source 1..80: mol_type = other DNA
agcgtcgtttgatctaccagtaggaaattggatgttgctagcgccaacgggaccaggtgtggtggtggaagggacggaca

SEQ ID NO: 51780 - DNA, 80 bp, synthetic construct
  source 1..80: mol_type = other DNA
tacgggttaccatatctggttctgggctgtatgcaggccgtgcagtggtcgcagtgctgccaccaggtgttgaccccacc

SEQ ID NO: 51781 - DNA, 80 bp, synthetic construct
  source 1..80: mol_type = other DNA
tctctgtgcccaatccactgggattcttgccagaacatcagctggatcctcttttcagagcaaattccagcagtccggat

SEQ ID NO: 51782 - DNA, 80 bp, synthetic construct
  source 1..80: mol_type = other DNA
taacgcaattgcttttgacaatatgcgcattatgaacgaactgtaaacgccaaccccactaactgtaaacgccaacccca

SEQ ID NO: 51783 - DNA, 80 bp, synthetic construct
  source 1..80: mol_type = other DNA
ttatctgacaaagtgttatcgcaaaaagaagaaataataactgatgtacaagatgacattaaaatagctgatgaggttaa

SEQ ID NO: 51784 - DNA, 80 bp, synthetic construct
  source 1..80: mol_type = other DNA
aaccggcttcttcacttatcagcgaactaaacaagggcaaaacactgcttcacgccgggccgcaaaagtgtgaaaaaaag

SEQ ID NO: 51785 - DNA, 80 bp, synthetic construct
  source 1..80: mol_type = other DNA
cacactagtcatgatgtgaccccgggaggatcattaacggcatttcatgaacgattaatggagctggccagaggcagtat

SEQ ID NO: 51786 - DNA, 80 bp, synthetic construct
  source 1..80: mol_type = other DNA
ccagttgggctattaaagcaatactagtagtgcgttttacctctgatggtgtaagcatgaaagtattagctttaagacac

SEQ ID NO: 51787 - DNA, 80 bp, synthetic construct
  source 1..80: mol_type = other DNA
aaaataacaatagaaagcagcaattatctgacaaagtattatcacaaaaagaggaaataataactgatgtacaagatgac

SEQ ID NO: 51788 - DNA, 80 bp, synthetic construct
  source 1..80: mol_type = other DNA
tgacatactttgcggctgcagtgttgaaggcctatggacaacatggggcaccttacactggtaatgtgttccaggtggag

SEQ ID NO: 51789 - DNA, 80 bp, synthetic construct
  source 1..80: mol_type = other DNA
tgacatacttcgcagctgcagtattgaaggcttacgagcagcatggagcaccctacactggtaacgtgttccaggttgag

SEQ ID NO: 51790 - DNA, 80 bp, synthetic construct
  source 1..80: mol_type = other DNA
ggttatggaacaggttgttaccccccaggacaccattggaccaacgagtgcacttttattgcccactcaagttgagacac

SEQ ID NO: 51791 - DNA, 80 bp, synthetic construct
  source 1..80: mol_type = other DNA
tgttttgctgcggtcaccacaataccatggaccacccggcaagcagcaaacacctttctcggtgccatacatctgggccc

SEQ ID NO: 51792 - DNA, 80 bp, synthetic construct
  source 1..80: mol_type = other DNA
caaatgctagtgctcagcgtgtggaacttgcaatggccacaggggcagtaaccagcaatgtgcccaattgcatccgggag

SEQ ID NO: 51793 - DNA, 80 bp, synthetic construct
  source 1..80: mol_type = other DNA
tttatgttgcagggatggcagagctaggtgcctttttttcaatcttgcaggatatgagaaataccatcatggcatctaag

SEQ ID NO: 51794 - DNA, 80 bp, synthetic construct
  source 1..80: mol_type = other DNA
ggcagagctaggtgcctttttttcaatcttgcaggatatgagaaataccatcatggcatctaagactgtgggcacagcaa

SEQ ID NO: 51795 - DNA, 80 bp, synthetic construct
  source 1..80: mol_type = other DNA
caggtgatccaacatccccagagaacattgactcaccaaatgcaccatgggtgtttgcatgtgccccagatagatgcccc

SEQ ID NO: 51796 - DNA, 80 bp, synthetic construct
  source 1..80: mol_type = other DNA
aactaaacgaaatttttctagtgctgtcatttgttatggcagtcctagtgtaattgaaatttcgtcaagtttgtaaactg

SEQ ID NO: 51797 - DNA, 80 bp, synthetic construct
  source 1..80: mol_type = other DNA
ttaacatgtctagaggaaagtcagaactttttctgtttgtgttgttggagtacttaaagatcgcacaggcgcgccaacaa

SEQ ID NO: 51798 - DNA, 80 bp, synthetic construct
  source 1..80: mol_type = other DNA
ttcgtcaagtttgtaaactggttaggcaagtgttgtattttctgtgtctaagcactggtgattctgttcactagtgcata

SEQ ID NO: 51799 - DNA, 80 bp, synthetic construct
  source 1..80: mol_type = other DNA
agactgtttgtttaaggactgagaccagatttcctgtcttacttttggaagagaaactgttcttgagtatttggtgtctt

SEQ ID NO: 51800 - DNA, 80 bp, synthetic construct
  source 1..80: mol_type = other DNA
ttgctcgcagcaggtctggagcaaacattctcggaactgacaactctgttgtcctctcccgcaaatatacatcgtttcca

SEQ ID NO: 51801 - DNA, 80 bp, synthetic construct
  source 1..80: mol_type = other DNA
acagcaattatgttcttcaggactttgatgttgtttttggccatggtgcaggaagtgtggtttttgtggataagtatatg

SEQ ID NO: 51802 - DNA, 80 bp, synthetic construct
  source 1..80: mol_type = other DNA
ccctctgggattcttccccgatcatcagttggaccctgcattcggagccaattcaaacaatccagattgggacttcaacc

SEQ ID NO: 51803 - DNA, 80 bp, synthetic construct
  source 1..80: mol_type = other DNA
actttgtgtctactcctctcaactaaacgaaatttttctagtgctgtcatttgttatggcagtcctagtgtaattgaaat

SEQ ID NO: 51804 - DNA, 80 bp, synthetic construct
  source 1..80: mol_type = other DNA
tgatggtgagttacctgttgcagttgttaacgacaaagtttttgttcgctatggcgatgttgacaacttggttttcacaa

SEQ ID NO: 51805 - DNA, 80 bp, synthetic construct
  source 1..80: mol_type = other DNA
gtttctaactctggtaatttacttggttttaaaaatgtttccactggtaacatttttattgtgacaccatgtaaccaacc

SEQ ID NO: 51806 - DNA, 80 bp, synthetic construct
  source 1..80: mol_type = other DNA
aaaatttttcatttgttttgttcaatgttactaaactatgcttcgtttcaggcaagtgttggtatcttgaacaatcattt

SEQ ID NO: 51807 - DNA, 80 bp, synthetic construct
  source 1..80: mol_type = other DNA
catatgttgatgttttgtgtaatagtttttttaaagagctaactgctaacatgtccatggctgaatgtaaagctacactt

SEQ ID NO: 51808 - DNA, 80 bp, synthetic construct
  source 1..80: mol_type = other DNA
taataataataaaaataacaatagaaagcagcaattatctgacaaagtattatcacaaaaagaggaaataataactgatg

SEQ ID NO: 51809 - DNA, 80 bp, synthetic construct
  source 1..80: mol_type = other DNA
cccatttatgcctttgatgatttcgaatcgtttattagaaattttattcaagattttgacagaacgtttttaatgtttaa

SEQ ID NO: 51810 - DNA, 80 bp, synthetic construct
  source 1..80: mol_type = other DNA
tgaagctgcagttgttgctgccacttcaacattagaataaatgggtattcaatacgattacaatgaagtatttactagag

SEQ ID NO: 51811 - DNA, 80 bp, synthetic construct
  source 1..80: mol_type = other DNA
aataaatgggtattcaatacgattacaatgaagtatttactagagttaaaagtaaatttgattatgtgatggatgactct

SEQ ID NO: 51812 - DNA, 80 bp, synthetic construct
  source 1..80: mol_type = other DNA
aggactttttaagcaatgcaactatgaatatgcatatgagtagtcacacagatggtaagctccattattaacacttcttt

SEQ ID NO: 51813 - DNA, 80 bp, synthetic construct
  source 1..80: mol_type = other DNA
ggggaagttgaatattcactcccaattaaacaacctttttctttttcttttagagatgaattgggtgttcgtattttaga

SEQ ID NO: 51814 - DNA, 80 bp, synthetic construct
  source 1..80: mol_type = other DNA
ttcttatttagactttgtgtctactcctctcaactaaacgaaatttttctagtgctgtcatttgttatggcagtcctagt

SEQ ID NO: 51815 - DNA, 80 bp, synthetic construct
  source 1..80: mol_type = other DNA
ttcagagtgttgcttcatcatttgttagtatgccatcatatattgcttatgaaaatgctagacaagcttatgaggatgct

SEQ ID NO: 51816 - DNA, 80 bp, synthetic construct
  source 1..80: mol_type = other DNA
gacaccctaattctgaatatcgtaaggttttttacgtattacttgattgggttaagcatcttaacaaaaatttgaatgag

SEQ ID NO: 51817 - DNA, 80 bp, synthetic construct
  source 1..80: mol_type = other DNA
atagatacacttagactctttgcggctgaaactattaaagctaaagaagagagtgttaagtcttcttatgcttttgcaac

SEQ ID NO: 51818 - DNA, 80 bp, synthetic construct
  source 1..80: mol_type = other DNA
ctgttgattataacgttgttactcaacgtatgtgtgctataggccctgatgtttttcttcataaatgttatagatgtcct

SEQ ID NO: 51819 - DNA, 80 bp, synthetic construct
  source 1..80: mol_type = other DNA
tctttggacggttgcatttgctacttttgttgatgttttggttaatgttagtgcaactaacattcaaaacttactttatt

SEQ ID NO: 51820 - DNA, 80 bp, synthetic construct
  source 1..80: mol_type = other DNA
ctgatggttctttaattcctgttcgtccgcgtaattctagtgataatggtatttcagccataatcactgctaatttatct

SEQ ID NO: 51821 - DNA, 80 bp, synthetic construct
  source 1..80: mol_type = other DNA
tatgaaaatcgttttgctgctatttatggtggtgaccactatgtcgttttaggtggtgaaactattacttttgtttcttt

SEQ ID NO: 51822 - DNA, 80 bp, synthetic construct
  source 1..80: mol_type = other DNA
tgaacatttagagcttaaagaaactgtttttgttgaacctaaggatggtggtcaattttttgtttctgatgattatcttt

SEQ ID NO: 51823 - DNA, 80 bp, synthetic construct
  source 1..80: mol_type = other DNA
cttttaatagtcttttatgtggtgacattgtaagtggttatgaaaaatccacttttaataaggatatttattgtggtaat

SEQ ID NO: 51824 - DNA, 80 bp, synthetic construct
  source 1..80: mol_type = other DNA
tgtggttttgatggtaaacctgtgttacctaaaaacatgtgggaatttagagattactttaatgataatactgatagtat

SEQ ID NO: 51825 - DNA, 80 bp, synthetic construct
  source 1..80: mol_type = other DNA
ggtggtaaggttatttttggtttaaaaacaatgtttttatttagcgttttcttcacaatgttttgggcagaactctttat

SEQ ID NO: 51826 - DNA, 80 bp, synthetic construct
  source 1..80: mol_type = other DNA
gctcttccgatctagatagagaattttcttatttagactttgtgtctactcctctcaactaaacgaaatttttctagtgc

SEQ ID NO: 51827 - DNA, 80 bp, synthetic construct
  source 1..80: mol_type = other DNA
gttgtacatcatattattcttatatgatgcctattatgggtttaactaattgtttagctagtgagtgttttgtcaagagt

SEQ ID NO: 51828 - DNA, 80 bp, synthetic construct
  source 1..80: mol_type = other DNA
cgttttggtggttttagtaatcatttagtctcaactaaatgaaacttttcttgattttgcttattttgcccctggtttct

SEQ ID NO: 51829 - DNA, 80 bp, synthetic construct
  source 1..80: mol_type = other DNA
tttttcaattaggtatatttataaccgcgttaagagtgtttcaccaggtgactcttcatggcacatttatttaaagagtg

SEQ ID NO: 51830 - DNA, 80 bp, synthetic construct
  source 1..80: mol_type = other DNA
gttccactttttggcgttataattttgacatcactgaaagtaagtatggttgtaaagaagttctgaagaattgtaatgtt

SEQ ID NO: 51831 - DNA, 80 bp, synthetic construct
  source 1..80: mol_type = other DNA
tcttacggattttatagtttacaacaatagtggttctaatgtaacacaagtgcgtaatgcttgtgtttatttttctcaat

SEQ ID NO: 51832 - DNA, 80 bp, synthetic construct
  source 1..80: mol_type = other DNA
tgttgtgtgaacctataaagttggtaaattcagagttgttgtcaactttatcagttgattttaatggtgttttgcataag

SEQ ID NO: 51833 - DNA, 80 bp, synthetic construct
  source 1..80: mol_type = other DNA
cgagcactgattttcatcaattagaatttgttagagaagaggttgatataattgaacaatcttttggggaagttgaacat

SEQ ID NO: 51834 - DNA, 80 bp, synthetic construct
  source 1..80: mol_type = other DNA
taatataagtttaaatgctcctgtcactctgaagatttgtaagtttggaaacacttcttttgcttgtttaagtaatgttt

SEQ ID NO: 51835 - DNA, 80 bp, synthetic construct
  source 1..80: mol_type = other DNA
cttcttccgatctattttcttatttagactttgtgtctactcctctcaactaaacgaaatttttctagtgctgtcatttg

SEQ ID NO: 51836 - DNA, 80 bp, synthetic construct
  source 1..80: mol_type = other DNA
caacatatctaaaaatgttttgtctggtacttgttaatgatattgtttttgatatgtatagatctgaagagcgtcgtgta

SEQ ID NO: 51837 - DNA, 80 bp, synthetic construct
  source 1..80: mol_type = other DNA
acacatggcgcttttctaaagaacgttttacacattggtttacatatgtgtgttctcttatagcagttgcttacacttat

SEQ ID NO: 51838 - DNA, 80 bp, synthetic construct
  source 1..80: mol_type = other DNA
attaattatttaggtgactttattcaaggtccttttatagctggtaacactgttcatgctaattatatattttggcgtaa

SEQ ID NO: 51839 - DNA, 80 bp, synthetic construct
  source 1..80: mol_type = other DNA
ggggaagttaaacaccttggggaagttaaacaacctttttctttttcttttagagatgaattgggtgttcgtgttttaga

SEQ ID NO: 51840 - DNA, 80 bp, synthetic construct
  source 1..80: mol_type = other DNA
tcaatccgataataattgttggattagtaccacacttatacagttgcaacttacaaaacttttggatgattctattgaga

SEQ ID NO: 51841 - DNA, 80 bp, synthetic construct
  source 1..80: mol_type = other DNA
tgttattgttactttgtttaagttcttattgttattatatgctatttatgcacttgtttttatgattgtgcaatttagtc

SEQ ID NO: 51842 - DNA, 80 bp, synthetic construct
  source 1..80: mol_type = other DNA
ttactaggacagtgcgttatgcttggatttggcatattgcatacattgttgcatatttcttgttaataccatggtggctt

SEQ ID NO: 51843 - DNA, 80 bp, synthetic construct
  source 1..80: mol_type = other DNA
gatagagaattttcttatttagactttgtgtctactcttctcaactaaacgaaatttttctagtgctgtcatttgttatg

SEQ ID NO: 51844 - DNA, 80 bp, synthetic construct
  source 1..80: mol_type = other DNA
gaatgttgtaaatgatcctgtttctaatagtagtgtgcctctttcagaggtttatgtccatttacgtaactggaacttta

SEQ ID NO: 51845 - DNA, 80 bp, synthetic construct
  source 1..80: mol_type = other DNA
taggcgcgccaacaatggaagagccaacaacatatctaaaaatgttttgtctggtacttgttaatgatattgtttttgat

SEQ ID NO: 51846 - DNA, 80 bp, synthetic construct
  source 1..80: mol_type = other DNA
ggatctttgtcatttaataatttttttatttcttatgctaaacctgaagataagttgtccgtttatgacattgcttgttg

SEQ ID NO: 51847 - DNA, 80 bp, synthetic construct
  source 1..80: mol_type = other DNA
atatgcgcattatgaacgaactgtaaacgccaaccccactgtggagatatgacccaaacacacccaacctgtcgcttata

SEQ ID NO: 51848 - DNA, 80 bp, synthetic construct
  source 1..80: mol_type = other DNA
tacttctcatcattgtatagttaattcgtcattcacagaacagttaggtgtgcctttgggcataactatatcgggtgaaa

SEQ ID NO: 51849 - DNA, 80 bp, synthetic construct
  source 1..80: mol_type = other DNA
ctgtacgtttgcatttatataatgcaactcgcactttttatgtgccggccgcttataaacttactaaacttagtgttaaa

SEQ ID NO: 51850 - DNA, 80 bp, synthetic construct
  source 1..80: mol_type = other DNA
gttcagatgtgctcttccgatcttttagactttgtgtctactcctctcaactaaacgaaatttttctagtgctgtcattt

SEQ ID NO: 51851 - DNA, 80 bp, synthetic construct
  source 1..80: mol_type = other DNA
ttggcagcaatagtggtcgttttggtctccatactggttattatgatgttaatcagtattatatttatgttactaatgaa

SEQ ID NO: 51852 - DNA, 80 bp, synthetic construct
  source 1..80: mol_type = other DNA
ataggcttaaatgcttctgttactcttaagatttgtaagtttggtataaacactacttttgattttttaagtaattcttc

SEQ ID NO: 51853 - DNA, 80 bp, synthetic construct
  source 1..80: mol_type = other DNA
aacaatggaagagccaacaacatatctaaacatgttttgtctggtacttgttaatgatattgtttttgatatggatacac

SEQ ID NO: 51854 - DNA, 80 bp, synthetic construct
  source 1..80: mol_type = other DNA
tatttttggtttaaaaacaatgtttttatttagcgttttcttcacaatgttttgggcagaactctttatttatacaaaca

SEQ ID NO: 51855 - DNA, 80 bp, synthetic construct
  source 1..80: mol_type = other DNA
gggcattttgtattggttcaataggttttttaaatgtactatgggtgtttatgattttaaggtgagtgctgctgaattta

SEQ ID NO: 51856 - DNA, 80 bp, synthetic construct
  source 1..80: mol_type = other DNA
attaagatgttatctaatggtgctggtaatggtcaagctataacaactagtgtagatgctaacaccaatcaagattctta

SEQ ID NO: 51857 - DNA, 80 bp, synthetic construct
  source 1..80: mol_type = other DNA
gggttatgttggttccttgagccagaaccaccacacgttctgtaacattcatagaaacgagcatgatgcttctggtgatg

SEQ ID NO: 51858 - DNA, 80 bp, synthetic construct
  source 1..80: mol_type = other DNA
gtggacggggtctctagactttatcaaccactccgtttaacttgtttatggcctgtacctggtcttaaatcttcaactgg

SEQ ID NO: 51859 - DNA, 80 bp, synthetic construct
  source 1..80: mol_type = other DNA
ccaaatataatatttatgattatgttggtactggaattatacgttcttcaaaccagtcacttgctggtggtattacatat

SEQ ID NO: 51860 - DNA, 80 bp, synthetic construct
  source 1..80: mol_type = other DNA
catttaataaggctattaataatattgttgcttcttttagtagcgttaatgatgctattacacatactgcagaggctata

SEQ ID NO: 51861 - DNA, 80 bp, synthetic construct
  source 1..80: mol_type = other DNA
gcgcagggggcaacgtgttgatttgcctcctaaagttcatttttattacctaggtactggacctcataaggaccttaaat

SEQ ID NO: 51862 - DNA, 80 bp, synthetic construct
  source 1..80: mol_type = other DNA
gtcctcgtgattttaatcacaatatgggggattcagatcttgttcagaatggtgttgatgccaagggttttccacagctt

SEQ ID NO: 51863 - DNA, 80 bp, synthetic construct
  source 1..80: mol_type = other DNA
gttctgtttttaacttggttgcttagtatgtttagtcttttacgtacttctattatgaagcatgatattaaagttattgc

SEQ ID NO: 51864 - DNA, 80 bp, synthetic construct
  source 1..80: mol_type = other DNA
tgttattggtggtgtcacttatcaattagcatgggatgttatacgtaaagacctttcttatgaacagcaaaatgttttag

SEQ ID NO: 51865 - DNA, 80 bp, synthetic construct
  source 1..80: mol_type = other DNA
gtttggggtgtcaaggactttaatactctttctcaagaaggtaagaagtaccttgttaaaacaactaaagcaaagggttt

SEQ ID NO: 51866 - DNA, 80 bp, synthetic construct
  source 1..80: mol_type = other DNA
tttttgataattttaatcaatggcatgaggctaagtttggtgttgttactactaatagtgataaatgtcctatagttgtt

SEQ ID NO: 51867 - DNA, 80 bp, synthetic construct
  source 1..80: mol_type = other DNA
atttttcagtgtctcataatggtgtcttcttgggagttgttggtgttacaatgcatggttctgtgttgcgtattaaggtt

SEQ ID NO: 51868 - DNA, 80 bp, synthetic construct
  source 1..80: mol_type = other DNA
ctagatataattgttaaaccagttttctttaatgcttttgttaaatgcaattgtggttctgagaattggagtgttggtgc

SEQ ID NO: 51869 - DNA, 80 bp, synthetic construct
  source 1..80: mol_type = other DNA
gagccaacaacatatctaaaaatgttttgtctggtacttgttaatgatattgtttttgatatggatacagatcggaagag

SEQ ID NO: 51870 - DNA, 80 bp, synthetic construct
  source 1..80: mol_type = other DNA
accctgctggtggctccagttcagggatagtgaaccctgttccgactattgcctctcacatctcgtcaatcttctcccgg

SEQ ID NO: 51871 - DNA, 80 bp, synthetic construct
  source 1..80: mol_type = other DNA
tcccgtctgttcgtgatcttctcgacaccgcttcagctttgtaccgggaatcctgtcctctgatcattgttcgcctcacc

SEQ ID NO: 51872 - DNA, 80 bp, synthetic construct
  source 1..80: mol_type = other DNA
gtgtgctcttccgatcttttctatctacagatagagaattttcttatttagactttgtgtctactcctctcaactaaacg

SEQ ID NO: 51873 - DNA, 80 bp, synthetic construct
  source 1..80: mol_type = other DNA
cttattgagcacccaaagaatttttctatctacagatagagaattttcttatttagactttgtgtctactcctctcaact

SEQ ID NO: 51874 - DNA, 80 bp, synthetic construct
  source 1..80: mol_type = other DNA
gcatgcgtggaacctttgtgtctcctctgccacgtcgcatggaaaccaccgtgaacgcccacaggaacctgcccaaggtc

SEQ ID NO: 51875 - DNA, 80 bp, synthetic construct
  source 1..80: mol_type = other DNA
tcagttggaccctgcattcaaagccaactcgttggggtagagccctcaggctcagggcctactcacaactgtgccagcag

SEQ ID NO: 51876 - DNA, 80 bp, synthetic construct
  source 1..80: mol_type = other DNA
tcagttgtcaactcacttaaccatatgatatacattgctgcagcggtcctacaggcgtatgaagaacaccacgcccctta

SEQ ID NO: 51877 - DNA, 80 bp, synthetic construct
  source 1..80: mol_type = other DNA
ctgcagcggtcctacaggcgtatgaagaacaccacgccccttacactggcaatgttttccaaattgaaaccattcataca

SEQ ID NO: 51878 - DNA, 80 bp, synthetic construct
  source 1..80: mol_type = other DNA
tgtcatccccagcagttggttatatcaatgacatcaagtttacaaccagagggggcttaccttcgggaatgccattcaca

SEQ ID NO: 51879 - DNA, 80 bp, synthetic construct
  source 1..80: mol_type = other DNA
cgcagttacagcagcctcgctggcaattcttgagagatttgctgaaccccacccaattgtttcatgcgccattgagtcac

SEQ ID NO: 51880 - DNA, 80 bp, synthetic construct
  source 1..80: mol_type = other DNA
agcggtcacggcctcctcattgtcaatcctagaacggctgtctgaggccaccccagtcaccacatccgcggtggagttgc

SEQ ID NO: 51881 - DNA, 80 bp, synthetic construct
  source 1..80: mol_type = other DNA
ccgcagcagtgttgctggcctacgagcaacacggggccccctacaccggaaatgttttccaagttgaaacagtgcacacc

SEQ ID NO: 51882 - DNA, 80 bp, synthetic construct
  source 1..80: mol_type = other DNA
tgctgtcactgctgcatctctatcaattttggaaaggctttcagaagccacacccatcaccacatcagcagtcgagcttc

SEQ ID NO: 51883 - DNA, 80 bp, synthetic construct
  source 1..80: mol_type = other DNA
cgcagtgacagcagcatcgctagcaatattggagagatttgctgaaccccacccaatcgtgtcttgtgccattgaggccc

SEQ ID NO: 51884 - DNA, 80 bp, synthetic construct
  source 1..80: mol_type = other DNA
cagcagctattctacaggcatatgaaagtcacaatgttccatacactggaaatgtcttccaagtagaaactgtccatacg

SEQ ID NO: 51885 - DNA, 80 bp, synthetic construct
  source 1..80: mol_type = other DNA
agctgtcactgcagctagtctctccattttagagagatttatggaaaccagtccactagtgtcctgtgcaatagagtcgc

SEQ ID NO: 51886 - DNA, 80 bp, synthetic construct
  source 1..80: mol_type = other DNA
tcagtcatcaactcggtgaaccacatgatatactttgcagcaggtgtgctcaaagcttatgaggaccaccacgtcccata

SEQ ID NO: 51887 - DNA, 80 bp, synthetic construct
  source 1..80: mol_type = other DNA
cagcaggtgtgctcaaagcttatgaggaccaccacgtcccatacactggcaatgtgtttcagatagagactgtccacact

SEQ ID NO: 51888 - DNA, 80 bp, synthetic construct
  source 1..80: mol_type = other DNA
tttcctcaccagcaattggttacctcaatgacattaaatttgtaactaaaggaggtctcccatcaggaatgccctttacc

SEQ ID NO: 51889 - DNA, 80 bp, synthetic construct
  source 1..80: mol_type = other DNA
ggctgtcacagctgcgtccttggcaatccttgagcggctgtctgaagctacaccaataacaacgtcagccgtagagttgc

SEQ ID NO: 51890 - DNA, 80 bp, synthetic construct
  source 1..80: mol_type = other DNA
tctcatcaccagcacgtggccacttgaatgacatcatttttgtgacaaagtctggactcccctcaggcatgccattcacc

SEQ ID NO: 51891 - DNA, 80 bp, synthetic construct
  source 1..80: mol_type = other DNA
cggctgcagtgttgaaggcctatgaacaacacggggcgccttacactggtaatgtatttcaggtggaaactgttcacaca

SEQ ID NO: 51892 - DNA, 80 bp, synthetic construct
  source 1..80: mol_type = other DNA
cgcagtcacagcagccagcttgtcggtgttggagaggtttatggaatcacacccactagtgtcatgcgcagtggaatctc

SEQ ID NO: 51893 - DNA, 80 bp, synthetic construct
  source 1..80: mol_type = other DNA
tcggtgataaactctatcaaccacatgatctatttcgcagctggtgtgcttaaagcatatgaagaccaccatgtccctta

SEQ ID NO: 51894 - DNA, 80 bp, synthetic construct
  source 1..80: mol_type = other DNA
cagctggtgtgcttaaagcatatgaagaccaccatgtcccttacactggaaatgtcttccaagtggagactgttcatact

SEQ ID NO: 51895 - DNA, 80 bp, synthetic construct
  source 1..80: mol_type = other DNA
tatcatctcctgctgtgggttacctcaatgatatcaagtttatcaccaagggtggtttaccgtctggcatgccttttaca

SEQ ID NO: 51896 - DNA, 80 bp, synthetic construct
  source 1..80: mol_type = other DNA
tgcagtcactgcagcctctttggcaattcttgaaagatttgctgaacctcacccaattgtttcgtgtgccattgagtcgc

SEQ ID NO: 51897 - DNA, 80 bp, synthetic construct
  source 1..80: mol_type = other DNA
tcagttgtcaactcactcaaccacatgatatacattgctctagcagttttacaggcatatgaggagcaccatgcccctta

SEQ ID NO: 51898 - DNA, 80 bp, synthetic construct
  source 1..80: mol_type = other DNA
ctctagcagttttacaggcatatgaggagcaccatgccccttacactggcaatgttttccaaattgaaaccattcataca

SEQ ID NO: 51899 - DNA, 80 bp, synthetic construct
  source 1..80: mol_type = other DNA
tgaaagatttgctgaacctcacccaattgtttcgtgtgccattgagtcgcaatcatccccagctgttggttatatcaatg

SEQ ID NO: 51900 - DNA, 80 bp, synthetic construct
  source 1..80: mol_type = other DNA
aatcatccccagctgttggttatatcaatgatattaagttcactaccagggggggcttaccttcaggcatgccatttaca

SEQ ID NO: 51901 - DNA, 80 bp, synthetic construct
  source 1..80: mol_type = other DNA
cagcagttacggctgcgtctttggcaatccttgagcggctgtctgaggcgacacctataacaacctcggccgttgaactg

SEQ ID NO: 51902 - DNA, 80 bp, synthetic construct
  source 1..80: mol_type = other DNA
cagtgttgtcaactccctcaaccacatgacatactttgcggctgcggtgctgaaggcctatgaacaacatggggcgcctt

SEQ ID NO: 51903 - DNA, 80 bp, synthetic construct
  source 1..80: mol_type = other DNA
gcggctgcggtgctgaaggcctatgaacaacatggggcgccttacactggcaatgtgttccaggtggagactgtccacac

SEQ ID NO: 51904 - DNA, 80 bp, synthetic construct
  source 1..80: mol_type = other DNA
ctctcttcaccagcacgtggccacgtgaatgatataatctttgtaacaaaatctggactcccctcaggcatgccatttac

SEQ ID NO: 51905 - DNA, 80 bp, synthetic construct
  source 1..80: mol_type = other DNA
cagcagttacggctgcgtctttgtcaatccttgagcgactgtctgaggcaacaccaataacgacctcggctgttgagttg

SEQ ID NO: 51906 - DNA, 80 bp, synthetic construct
  source 1..80: mol_type = other DNA
gcagctgcagtgttgaaggcttacgagcagcacggtgcgccctacactggtaatgtgttccaggttgagactgtccacac

SEQ ID NO: 51907 - DNA, 80 bp, synthetic construct
  source 1..80: mol_type = other DNA
ctgtcatcacccgcacgtggccatctgaatgacatagtgtttgtcacaaagtcggggcttccctcgggcatgccgttcac

SEQ ID NO: 51908 - DNA, 80 bp, synthetic construct
  source 1..80: mol_type = other DNA
cagctgtcaccgctgcatctctgtcaatcttggaaaggctgtcagaggccacacccatcaccacatcggcagttgagctt

SEQ ID NO: 51909 - DNA, 80 bp, synthetic construct
  source 1..80: mol_type = other DNA
ctgcggtcacggccgcctcactcggaatcctggagaggctatcagaggccaccccaattaccacatcagcagttgagttg

SEQ ID NO: 51910 - DNA, 80 bp, synthetic construct
  source 1..80: mol_type = other DNA
tagtgtcatcaattcccttaaccacatgacctacttcgcagcagctgtactcaaggcatatgaacagcacggtgcccctt

SEQ ID NO: 51911 - DNA, 80 bp, synthetic construct
  source 1..80: mol_type = other DNA
gcagcagctgtactcaaggcatatgaacagcacggtgccccttacacgggcaacgtgttccaggtcgagaccgttcacac

SEQ ID NO: 51912 - DNA, 80 bp, synthetic construct
  source 1..80: mol_type = other DNA
ttgtcctcgccggcgaggggacacctgaatgacattgttttcattacgaagtctggtctaccatctggaatgccattcac

SEQ ID NO: 51913 - DNA, 80 bp, synthetic construct
  source 1..80: mol_type = other DNA
tgcagataacagcagcgtcactggccatattggagagatttgctgagccccacccaatcgtgtcttgtgccattgaggct

SEQ ID NO: 51914 - DNA, 80 bp, synthetic construct
  source 1..80: mol_type = other DNA
ttaatgatattgtttttgatatggatactggtttagtcttacacacaatggtaggccagtgatagtaaagtgtaagtaat

SEQ ID NO: 51915 - DNA, 80 bp, synthetic construct
  source 1..80: mol_type = other DNA
ttgatgttgattttcatagtgtaaaaccttttgctgtatataaaaatgttaaattttatttaggtgatatttcacacctt

SEQ ID NO: 51916 - DNA, 80 bp, synthetic construct
  source 1..80: mol_type = other DNA
atacgtgtggtacatccgggcttaaagaatttttctatctatagatagagaattttcttatttagactttgtgtctactc

SEQ ID NO: 51917 - DNA, 80 bp, synthetic construct
  source 1..80: mol_type = other DNA
gcagtgacagcagcatccctggcaatattggagagatttgctgaaccccatccacttgtgtcctgtgctattgaggccct

SEQ ID NO: 51918 - DNA, 80 bp, synthetic construct
  source 1..80: mol_type = other DNA
gcagtaacagcagcatcactatcaatattggaaagatttgctgaaccccacccaatcgtatcttgtgccattgaagctct

SEQ ID NO: 51919 - DNA, 80 bp, synthetic construct
  source 1..80: mol_type = other DNA
cagccattttgcaggcatatgaaagtcacaatgttccgtacactggaaatgtcttccaagtggaaactatccacacgtac

SEQ ID NO: 51920 - DNA, 80 bp, synthetic construct
  source 1..80: mol_type = other DNA
cagccattctgcaggcatatgaaagccacaatgtcccatacactgggaatgttttccaggtggagaccattcacacgtac

SEQ ID NO: 51921 - DNA, 80 bp, synthetic construct
  source 1..80: mol_type = other DNA
cagcggtgctcaaggcctatgaacaacatggtgccccctatactggcaatgtgttccaggtggaaactgtccacacttat

SEQ ID NO: 51922 - DNA, 80 bp, synthetic construct
  source 1..80: mol_type = other DNA
ctctcttttgtacggaaggccaacaggatcattggactttattatttacagatttcttttaattatagttatattatcac

SEQ ID NO: 51923 - DNA, 80 bp, synthetic construct
  source 1..80: mol_type = other DNA
gcgagtcgaccaagacattgtcatctactgcaatggacaaaaaaagacaattttgactaagacattagtgattgggcagt

SEQ ID NO: 51924 - DNA, 80 bp, synthetic construct
  source 1..80: mol_type = other DNA
ctttggctggatactgatcccttccattacattggctgtattggttgtcttaaagttttttgcagcaatcttacataata

SEQ ID NO: 51925 - DNA, 80 bp, synthetic construct
  source 1..80: mol_type = other DNA
tgtcttgttggcttgggaccgtacagagttcaggttgtttatgagaggacctattgtactgttgggatactgacagaggg

SEQ ID NO: 51926 - DNA, 80 bp, synthetic construct
  source 1..80: mol_type = other DNA
atgtggctgttccttctttcaattgaatccgtaatgtgggctgcaagtgcagctgaaatcccacttgtcccactctggac

SEQ ID NO: 51927 - DNA, 80 bp, synthetic construct
  source 1..80: mol_type = other DNA
ccatgtcaaaatatgtatcattggtactgtgtctaaattcatacaaggggatacattacttgttctaggcccacttgaag

SEQ ID NO: 51928 - DNA, 80 bp, synthetic construct
  source 1..80: mol_type = other DNA
aatctttcaataccagcagcattcattttacagatgaaagaattgaatggaaagatcctgatggcatgttacgtgaccat

SEQ ID NO: 51929 - DNA, 80 bp, synthetic construct
  source 1..80: mol_type = other DNA
gtcagtgagttgactaatgaaaccgtatatgatgatggggcaccccaatgtggaatcgcttgctggttcataaaatctgg

SEQ ID NO: 51930 - DNA, 80 bp, synthetic construct
  source 1..80: mol_type = other DNA
cagcagaacaacaaataaatattatgtgtcagcgtgttgacatggatattgttgtatactgtaatggccaaaaaaagacc

SEQ ID NO: 51931 - DNA, 80 bp, synthetic construct
  source 1..80: mol_type = other DNA
gaaatgctttattccagataagacaattttaagttcaatcaagagaggaatgtttgttgtcactagtgtgcaggtgcttt

SEQ ID NO: 51932 - DNA, 80 bp, synthetic construct
  source 1..80: mol_type = other DNA
atgtcaggatcaatggatactgttgctgagaatgaaaaattactcaagaagggatatggtgatgggataaatcataaaat

SEQ ID NO: 51933 - DNA, 80 bp, synthetic construct
  source 1..80: mol_type = other DNA
cattgttgatttttccgttgacccacaattatattgtgattataacattaattgtaaaagataggatcaaaatcttgaat

SEQ ID NO: 51934 - DNA, 80 bp, synthetic construct
  source 1..80: mol_type = other DNA
aaatttgatccaactgaagcaagtactcaaatcagtgatggtgaatggaaagactcattatcgcaaatgtttcttacaaa

SEQ ID NO: 51935 - DNA, 80 bp, synthetic construct
  source 1..80: mol_type = other DNA
cttgtataccctgtcctactccaactaaagttcctagaattgtttataagggtgggatagatgttttaaatataattcca

SEQ ID NO: 51936 - DNA, 80 bp, synthetic construct
  source 1..80: mol_type = other DNA
ggccatcacagtgagctgcgccatacagctgcagtcacggctgcccatcacccccgaacagatgtccgccatcagcccgg

SEQ ID NO: 51937 - DNA, 80 bp, synthetic construct
  source 1..80: mol_type = other DNA
gcccatgctctgttcctcatggagttctcaaagctcatcaacccagatctccgaaagaaaggagattctgacataaaggc

SEQ ID NO: 51938 - DNA, 80 bp, synthetic construct
  source 1..80: mol_type = other DNA
ccagatctccgaaagaaaggagattctgacataaaggcctcattcattggggccctgagaactgcccttgacaagaggga

SEQ ID NO: 51939 - DNA, 80 bp, synthetic construct
  source 1..80: mol_type = other DNA
gctacccaccggcaatgtgaacccaggcctttgctgcagtggtgccaaaaggccactccctggagcaacatctagtcaca

SEQ ID NO: 51940 - DNA, 80 bp, synthetic construct
  source 1..80: mol_type = other DNA
ggaccaacaggttatggagcaggttgtcaccccccaggacaccattggaccaacgagtgcacttctattgcccactcaag

SEQ ID NO: 51941 - DNA, 80 bp, synthetic construct
  source 1..80: mol_type = other DNA
ttgttgattacgtactcaaatccttaactagaataatggactttattatttacagatttcttttaattatagttatatta

SEQ ID NO: 51942 - DNA, 80 bp, synthetic construct
  source 1..80: mol_type = other DNA
caactgaagcagcaacagaaataaatgataattcatggaaggatacactttctcagctatttttaatcaaaggatggcca

SEQ ID NO: 51943 - DNA, 80 bp, synthetic construct
  source 1..80: mol_type = other DNA
gttttatctatatattaaaatcactaactagtgcgatggactttataatttatagatttcttttacttattgttattgca

SEQ ID NO: 51944 - DNA, 80 bp, synthetic construct
  source 1..80: mol_type = other DNA
ctactcactatatattaaaatcagtgacccaaataatggactacattatatatagatttttgttaatttctatagcatta

SEQ ID NO: 51945 - DNA, 80 bp, synthetic construct
  source 1..80: mol_type = other DNA
catctgctcttgcatctgtgaatgtcgcctctgctcaacagactcttttgacattattgaatttatccctttttcgcttc

SEQ ID NO: 51946 - DNA, 80 bp, synthetic construct
  source 1..80: mol_type = other DNA
caactggaagtcagtcaaatttcggttccgctgtctctgcagccctaatgctgatcgtgtttccaactgacgagcaatca

SEQ ID NO: 51947 - DNA, 80 bp, synthetic construct
  source 1..80: mol_type = other DNA
tgatttagtgcatgttattccagcttttagagatgagagattgagagtgaaagttccagtgtctgggatgttgtctatag

SEQ ID NO: 51948 - DNA, 80 bp, synthetic construct
  source 1..80: mol_type = other DNA
agtcaatgttttctcaagttctatagataacgctaaagatgcaatttatcgtatggctgaaatttcttttaccgtcgcag

SEQ ID NO: 51949 - DNA, 80 bp, synthetic construct
  source 1..80: mol_type = other DNA
gtctgctcttgcgtctgtgaatgtagcctctgctcagcagactcttttgactttactgaatttgtccctttttcgtttcg

SEQ ID NO: 51950 - DNA, 80 bp, synthetic construct
  source 1..80: mol_type = other DNA
gaccggaagccagtcaaatttcggctccgctgtctctgcagctctaatgctaatcgtatttccaactgatgagcaatcaa

SEQ ID NO: 51951 - DNA, 80 bp, synthetic construct
  source 1..80: mol_type = other DNA
tgatttagtacacatcattcctgcttttagagatgagagactaagagtgaaagttccagtgtctggaatgttgtctatag

SEQ ID NO: 51952 - DNA, 80 bp, synthetic construct
  source 1..80: mol_type = other DNA
aaccatccgatgcatctgcgattgaatctgttacatctgcctaccttacaatgtcctctccttacgacgcttgcgtgaga

SEQ ID NO: 51953 - DNA, 80 bp, synthetic construct
  source 1..80: mol_type = other DNA
aaaacgccagacgttactctatttaatggaatgttggtttatgaagattaagtagttgtgacatgatattttaaaaaccc

SEQ ID NO: 51954 - DNA, 80 bp, synthetic construct
  source 1..80: mol_type = other DNA
caattcaaattcaaaacacgctaccaaatttagagtttatttcttcattggaaaaagaagtgaaccctttcaatatacat

SEQ ID NO: 51955 - DNA, 80 bp, synthetic construct
  source 1..80: mol_type = other DNA
caacacccagcagtcacggctgcatctttgtcaatcctcgagcgattgtctgaggcaacaccgataacaacatcagctgt

SEQ ID NO: 51956 - DNA, 80 bp, synthetic construct
  source 1..80: mol_type = other DNA
cattcaccagtgttgttaattcgctcaatcatatgacatacttcgcagctgcagtgttgaaagcttacgagcagcatgga

SEQ ID NO: 51957 - DNA, 80 bp, synthetic construct
  source 1..80: mol_type = other DNA
tgaattactctcgtcacccgcacgaggccatctgaatgacatagtgtttgtcacgaagtcggggctcccttcaggcatgc

SEQ ID NO: 51958 - DNA, 80 bp, synthetic construct
  source 1..80: mol_type = other DNA
atggagggcaatggcctaccccaggctggagaccagcatgttcttgacgtgccgggtacaactggtccgacttcgtcggc

SEQ ID NO: 51959 - DNA, 80 bp, synthetic construct
  source 1..80: mol_type = other DNA
atttccttggaacactcgacaggccacaggcacttatttgggatctgctacgctatccccggctctcaacccatataccg

SEQ ID NO: 51960 - DNA, 80 bp, synthetic construct
  source 1..80: mol_type = other DNA
ccaaaaccccgctgtcactgccgcctcactggcaatccttgaacggtttgcagaaccccacccaattgtttcatgcgcca

SEQ ID NO: 51961 - DNA, 80 bp, synthetic construct
  source 1..80: mol_type = other DNA
ccattcacttcagtcatcaattcactaaaccacatgatatacattgctgcggcagtgctacaggcatatgaagagcacca

SEQ ID NO: 51962 - DNA, 80 bp, synthetic construct
  source 1..80: mol_type = other DNA
ctgcggcagtgctacaggcatatgaagagcaccatgcaccttacactggcaacgtgtttcaaatagaaaccatacacacg

SEQ ID NO: 51963 - DNA, 80 bp, synthetic construct
  source 1..80: mol_type = other DNA
ttgagtcactcacatctccagctgttgggtatattaatgacatcaaattcacaactaggggtggtttaccgtccggaatg

SEQ ID NO: 51964 - DNA, 80 bp, synthetic construct
  source 1..80: mol_type = other DNA
acaaaatcctgcagtaacagcagcatccctggcaatattggagagatttgctgaaccccatccaattgtgtcttgtgcca

SEQ ID NO: 51965 - DNA, 80 bp, synthetic construct
  source 1..80: mol_type = other DNA
cagcagccatcctgcaggcatacgaaagccacaatgttccgtacactggaaatgttttccaagtggaaacagttcacacg

SEQ ID NO: 51966 - DNA, 80 bp, synthetic construct
  source 1..80: mol_type = other DNA
acaaaaccccgcagtaacagcagcatcactatcgatattggaaagatttgctgaaccccacccaatcgtatcttgtgcca

SEQ ID NO: 51967 - DNA, 80 bp, synthetic construct
  source 1..80: mol_type = other DNA
acaacacccagcagtgacagccacatcactggcaatcctggaaagatttgctgaaggtcacccattagtgtccagtgcca

SEQ ID NO: 51968 - DNA, 80 bp, synthetic construct
  source 1..80: mol_type = other DNA
gttgggtacatcaatgacatcaagtttgtcacccgtggtggtttaccctctgggatgccatttacctctgtcatcaactc

SEQ ID NO: 51969 - DNA, 80 bp, synthetic construct
  source 1..80: mol_type = other DNA
actgaaccacatggtgtacattgcagccgccatcttgcttgcgtatgaggagcaccatgtaccatacagtggaaatgtgt

SEQ ID NO: 51970 - DNA, 80 bp, synthetic construct
  source 1..80: mol_type = other DNA
cagccgccatcttgcttgcgtatgaggagcaccatgtaccatacagtggaaatgtgttccagctagagaccatccacaca

SEQ ID NO: 51971 - DNA, 80 bp, synthetic construct
  source 1..80: mol_type = other DNA
ccaaaacccagcagtcacagcagccagtttgtcagttctggagaggttcatggagtcacacccactggtgtcgtgcgcgg

SEQ ID NO: 51972 - DNA, 80 bp, synthetic construct
  source 1..80: mol_type = other DNA
ccattcacatcagtgataaattcaatcaaccacatgatctattttgcagctggtgtgctcaaagcatatgaagaccacca

SEQ ID NO: 51973 - DNA, 80 bp, synthetic construct
  source 1..80: mol_type = other DNA
tggaatccttgtcatctcctgctgtaggttaccttaatgatattaagtttgtcaccaagggtggtctaccatctggcatg

SEQ ID NO: 51974 - DNA, 80 bp, synthetic construct
  source 1..80: mol_type = other DNA
acagaccccagctgtcactgctgccagtctctccatcttagaaaggttcatggaaagcagcccactagtgtcatgtgcca

SEQ ID NO: 51975 - DNA, 80 bp, synthetic construct
  source 1..80: mol_type = other DNA
cccctcacatcagtcatcaatcctgtgaaccatatgatatactttgcagcgggtgtgctcaaagcctatgaggaccatca

SEQ ID NO: 51976 - DNA, 80 bp, synthetic construct
  source 1..80: mol_type = other DNA
cagcgggtgtgctcaaagcctatgaggaccatcacgtcccgtacactggcaatgttttccagattgagactgttcacact

SEQ ID NO: 51977 - DNA, 80 bp, synthetic construct
  source 1..80: mol_type = other DNA
tagaatccctctcttcaccagcgattggctacctcaatgacatcaagtttgtacccaagggaggtctcccatcaggaatg

SEQ ID NO: 51978 - DNA, 80 bp, synthetic construct
  source 1..80: mol_type = other DNA
ccaacaccctgccgtcactgcctcatcacttgacatcctcgcacgtttttcagaagccacccccataactgcttctgcgg

SEQ ID NO: 51979 - DNA, 80 bp, synthetic construct
  source 1..80: mol_type = other DNA
cccttcaccagtgttgtcaactctcttaaccacatgacatactttgctgctgctgttctcaaagcctatgagtctcgagg

SEQ ID NO: 51980 - DNA, 80 bp, synthetic construct
  source 1..80: mol_type = other DNA
ctgctgctgttctcaaagcctatgagtctcgaggggtaccctacactggcaatgtatttcagctagaaactgtgcacacc

SEQ ID NO: 51981 - DNA, 80 bp, synthetic construct
  source 1..80: mol_type = other DNA
ttgaattactaacatcacccgcaaaaggccacctcaatgacatcgtgttcacaacacgctctggattaccctcaggcatg

SEQ ID NO: 51982 - DNA, 80 bp, synthetic construct
  source 1..80: mol_type = other DNA
acaacaccctgctgtcactgctgcatctctatcaattttggaaaggctgtcagaggccacacccatcaccacgtcagcag

SEQ ID NO: 51983 - DNA, 80 bp, synthetic construct
  source 1..80: mol_type = other DNA
cagcagcagtgcttaaggcctatgagcaacatggtgccccctacactggcaatgtgttccaggtggagactgtccacaca

SEQ ID NO: 51984 - DNA, 80 bp, synthetic construct
  source 1..80: mol_type = other DNA
acaacatcccgccgtcacggccgcctcacttggaattttggagagattgtctgaagccactcccatcacaacgtcagctg

SEQ ID NO: 51985 - DNA, 80 bp, synthetic construct
  source 1..80: mol_type = other DNA
ccattcaccagtgtcatcaactcgctcaaccacatgacttactttgcagctgctgtgctgaaggcgtatgaacaacatgg

SEQ ID NO: 51986 - DNA, 80 bp, synthetic construct
  source 1..80: mol_type = other DNA
cagctgctgtgctgaaggcgtatgaacaacatggagcaccatacacgggcaacgtatttcaggttgagaccgttcacact

SEQ ID NO: 51987 - DNA, 80 bp, synthetic construct
  source 1..80: mol_type = other DNA
ttgagttgctatcctcccctgctagaggccatttgaatgacattgtgttcatcacaaaatctggtcttccatctggcatg

SEQ ID NO: 51988 - DNA, 80 bp, synthetic construct
  source 1..80: mol_type = other DNA
ccagcaccctgcagtcacggcctcctcattgtcaatcctagaacggctgtctgaggccaccccaatcaccacatccgcag

SEQ ID NO: 51989 - DNA, 80 bp, synthetic construct
  source 1..80: mol_type = other DNA
acaacacccagcagtcacggctgcatccctgtcaatccttgagcggttgtctgaggcaacaccaataacaacgtcggctg

SEQ ID NO: 51990 - DNA, 80 bp, synthetic construct
  source 1..80: mol_type = other DNA
cagctgcagtgttaaaagcttatgagcagcacggagcaccctacaccggcaatgtgttccaggttgaaactgttcacact

SEQ ID NO: 51991 - DNA, 80 bp, synthetic construct
  source 1..80: mol_type = other DNA
ttgagttgctttcatcacccgcacgtggtcacctaaatgacatagtgtttgtcacaaagtctggactcccttcaggaatg

SEQ ID NO: 51992 - DNA, 80 bp, synthetic construct
  source 1..80: mol_type = other DNA
ttgagttgctctcatcaccagcacgtggccacttaaatgacataatctttgtcacaaagtctgggctcccttcgggcatg

SEQ ID NO: 51993 - DNA, 80 bp, synthetic construct
  source 1..80: mol_type = other DNA
ttgagttgctttcgtcacccgcacgtggccatctgaacgacatagtgtttgtcacaaagtcagggctcccctcaggcatg

SEQ ID NO: 51994 - DNA, 80 bp, synthetic construct
  source 1..80: mol_type = other DNA
tcaacatccggccgttacagctgcgtccttggcaatccttgagcggctgtctgaagcgacaccaataacaacatcggccg

SEQ ID NO: 51995 - DNA, 80 bp, synthetic construct
  source 1..80: mol_type = other DNA
tagagttgctctcatcaccagcacgtggtcatttgaatgacatcatctttgtgacaaagtctggacttccttcgggcatg

SEQ ID NO: 51996 - DNA, 80 bp, synthetic construct
  source 1..80: mol_type = other DNA
tcagcaccctgctgtcactgcctcatcacttgacatccttgcacgtttctcagaagctactcccataactgcctctgcag

SEQ ID NO: 51997 - DNA, 80 bp, synthetic construct
  source 1..80: mol_type = other DNA
cccttcactagcgttgttaactccctaaaccacatgacatattttgctgctgctgtcctcaaggcatatgaatcccgagg

SEQ ID NO: 51998 - DNA, 80 bp, synthetic construct
  source 1..80: mol_type = other DNA
ctgctgctgtcctcaaggcatatgaatcccgaggggtgccatacactggcaatgtgttccagctggaaactgtacacacc

SEQ ID NO: 51999 - DNA, 80 bp, synthetic construct
  source 1..80: mol_type = other DNA
ttgagttgttgacatcacctgcaaaaggtcacctcaatgacattgtgttcacaactcggtctggactaccatcaggcatg

SEQ ID NO: 52000 - DNA, 80 bp, synthetic construct
  source 1..80: mol_type = other DNA
acaaaacccagctgtcactgcagctagcctgtccattttagagagattcatggaaagcagcccattggtgtcctgtgcaa

SEQ ID NO: 52001 - DNA, 80 bp, synthetic construct
  source 1..80: mol_type = other DNA
cccttcacctcagtcatcaactcggtgaaccacatgatatactttgcagcgggtgtgctcaaagcttatgaggaccacca

SEQ ID NO: 52002 - DNA, 80 bp, synthetic construct
  source 1..80: mol_type = other DNA
tagagtccctgtcctcaccagcaattggctatctcaatgacattaaatttgtaaccaaagggggtctcccatcaggaatg

SEQ ID NO: 52003 - DNA, 80 bp, synthetic construct
  source 1..80: mol_type = other DNA
cagctgcagtactgaaggcatatgaacaacatggggcaccatatacgggtaacgtgtttcaggttgagactgttcacacc

SEQ ID NO: 52004 - DNA, 80 bp, synthetic construct
  source 1..80: mol_type = other DNA
accacattctgtatgggtatttgcatgtgcacctgatagatgcccaccgacagcattgtatgtagcaggagttccagagc

SEQ ID NO: 52005 - DNA, 80 bp, synthetic construct
  source 1..80: mol_type = other DNA
gaagaattaacccctggtagattcagaactatagtgtgtggcctatttccaactcagattcaagttcgtaacataatgag

SEQ ID NO: 52006 - DNA, 80 bp, synthetic construct
  source 1..80: mol_type = other DNA
gcctaccccaggctgggcaacagcaagctcttgacgtgccaggaacaactggcccgacttcgtcggcagtggtggtggca

SEQ ID NO: 52007 - DNA, 80 bp, synthetic construct
  source 1..80: mol_type = other DNA
ctcgacaggccacaggcacttatctgggatctgctgcgctgtccccagctctcaacccatataccgcacatctttcggcg

SEQ ID NO: 52008 - DNA, 80 bp, synthetic construct
  source 1..80: mol_type = other DNA
acttcaatcccaacaaggacacctggccagacgccaacaaggtaggagctggagcattcgggctgggattcaccccaccg

SEQ ID NO: 52009 - DNA, 80 bp, synthetic construct
  source 1..80: mol_type = other DNA
cgcgggacgtcctttgtttacgtcccgtcggcgctgaatcccgcggacgacccctctcggggccgcttgggacactatcg

SEQ ID NO: 52010 - DNA, 80 bp, synthetic construct
  source 1..80: mol_type = other DNA
gaaaattagaagatataagaccagaacaagctaagaagcaaatgaaattgtttagaatatttgaaccaagacattaccta

SEQ ID NO: 52011 - DNA, 80 bp, synthetic construct
  source 1..80: mol_type = other DNA
ttgactaactttgggaaaagtatagttgatcaggtgacaatgatggttagacagtgcaatgcagtgtgtaggggccctgg

SEQ ID NO: 52012 - DNA, 80 bp, synthetic construct
  source 1..80: mol_type = other DNA
atagtatatctgaacttaaagtaccaagagactttgtgccttcaccaggcaccttccatgggtgttcaagattcccgtcg

SEQ ID NO: 52013 - DNA, 80 bp, synthetic construct
  source 1..80: mol_type = other DNA
gcaccttccatgggtgttcaagattcccgtcgtatagtaaccattatgggttatggtgttatagtcatactgtatcaaat

SEQ ID NO: 52014 - DNA, 80 bp, synthetic construct
  source 1..80: mol_type = other DNA
tgataaaccaacccagaatatccaattattcaatgggcgctacgctataataaataattcaacaacatatccatcaagaa

SEQ ID NO: 52015 - DNA, 80 bp, synthetic construct
  source 1..80: mol_type = other DNA
tgttttgtgactaggcatgtgaaggtttgtataattggtactgtatctaagttctcacaaggggacacacttgtcttttt

SEQ ID NO: 52016 - DNA, 80 bp, synthetic construct
  source 1..80: mol_type = other DNA
ttcggaaaaaatgtaattttgcaacaacacctgtttgtgagtattctgggaacatggtatcaggttacaagaaggtcatg

SEQ ID NO: 52017 - DNA, 80 bp, synthetic construct
  source 1..80: mol_type = other DNA
aggccctcttgaaggtggtggtattattttcaaggattggtgcacatctacatgccagtttggcgatcccggagatataa

SEQ ID NO: 52018 - DNA, 80 bp, synthetic construct
  source 1..80: mol_type = other DNA
tgacgaacaggttgccagcagtgctgcacaggccgctccccaagacacaatcagtcccacgagtgcacttttgttaccaa

SEQ ID NO: 52019 - DNA, 80 bp, synthetic construct
  source 1..80: mol_type = other DNA
cgcggcaggctgccaacacattcctgggtgccatccaccttggtccacgcatcaacccatacactgctcatctgagtgcc

SEQ ID NO: 52020 - DNA, 80 bp, synthetic construct
  source 1..80: mol_type = other DNA
gaacaacatggggcgccttacactggtaatgtgtttcaggtggaaactgtccacacatatggtgatgatgaaatcgtcaa

SEQ ID NO: 52021 - DNA, 80 bp, synthetic construct
  source 1..80: mol_type = other DNA
agctacagcatgggaggttggtcttccaaacctcgacaggcacctctaagagacagtcatcctcaggccatgcagtggaa

SEQ ID NO: 52022 - DNA, 80 bp, synthetic construct
  source 1..80: mol_type = other DNA
caagtactcaaatcagtgatggtgaatggaaagaatcattatcacaaatgtttcttacaaaaggatggccaacaggatca

SEQ ID NO: 52023 - DNA, 80 bp, synthetic construct
  source 1..80: mol_type = other DNA
ctcaattatatattaaaatcagtgactcgaatgatggactacattatatatagatttttgttaatttctgtagcattatt

SEQ ID NO: 52024 - DNA, 80 bp, synthetic construct
  source 1..80: mol_type = other DNA
cacgactcctgctcaaggcaactctatgaatctctcatgttgctgtaccaaaccttcggacagaaattgcacctgtattc

SEQ ID NO: 52025 - DNA, 80 bp, synthetic construct
  source 1..80: mol_type = other DNA
gacaacaaaaaaggatacggctttatcagttatgatgacacagaagaaatttttgtacattttactgcgattgaagaaga

SEQ ID NO: 52026 - DNA, 80 bp, synthetic construct
  source 1..80: mol_type = other DNA
agaaagtggccgccacgggtgactgccggcaggtggctcatgatttactggcagggaaaggagattccgggaaatgaaac

SEQ ID NO: 52027 - DNA, 80 bp, synthetic construct
  source 1..80: mol_type = other DNA
caggtggctcatgatttactggcagggaaaggagattccgggaaatgaaacgtattttacctctgatactggctctggtt

SEQ ID NO: 52028 - DNA, 80 bp, synthetic construct
  source 1..80: mol_type = other DNA
gagcacacggaggtcttttggggtggagccctcaggctcagggcctattgaccacagtgccagtagcacctcctcctgcc

SEQ ID NO: 52029 - DNA, 80 bp, synthetic construct
  source 1..80: mol_type = other DNA
gttcccaaccctctgggattctttcccgatcatcagttggaccctgcattcggagccaattcaaacaatccagactggga

SEQ ID NO: 52030 - DNA, 80 bp, synthetic construct
  source 1..80: mol_type = other DNA
tccgtctattcaagacctcttcgacaccgcaacagctctgtatcgggaggccttagagtctccgggacattgctcacctc

SEQ ID NO: 52031 - DNA, 80 bp, synthetic construct
  source 1..80: mol_type = other DNA
accatacagcactcaggcaagcaattttgtgttgtggggggttgagtactctagctacctgggttggaagtaatttggac

SEQ ID NO: 52032 - DNA, 80 bp, synthetic construct
  source 1..80: mol_type = other DNA
gggttgagtactctagctacctgggtgggaagtaatttggacgaccctgcctccaaggatttggtagtcaactatgtcaa

SEQ ID NO: 52033 - DNA, 80 bp, synthetic construct
  source 1..80: mol_type = other DNA
accatacagcactcaggcaagctagtctgtgttgggacgacgaggcaggtcccctagaagaagaactccctcgcctcgca

SEQ ID NO: 52034 - DNA, 80 bp, synthetic construct
  source 1..80: mol_type = other DNA
acatttcttgtctcatgtttggaagaccacaaaatgcccctatcttatcaacacttccggagactactgttgttagacga

SEQ ID NO: 52035 - DNA, 80 bp, synthetic construct
  source 1..80: mol_type = other DNA
cgcaagatcatatcagacacaaaatcaaagaatgtttccgtaaactccctgttaacaggcctatcgattggaatcagcgc

SEQ ID NO: 52036 - DNA, 80 bp, synthetic construct
  source 1..80: mol_type = other DNA
atggagggcaatggcctaccccaggctggacaacagcaagctctcgacgtgccaggaacaactggtccgacttcgtcagc

SEQ ID NO: 52037 - DNA, 80 bp, synthetic construct
  source 1..80: mol_type = other DNA
ctaaaaatgagatttcagataatgaatgggaaaatactctatcacaattatttttaactaaaggatggccaacaggatca

SEQ ID NO: 52038 - DNA, 80 bp, synthetic construct
  source 1..80: mol_type = other DNA
ttgttaaactatattttaaaatcagtaacgaggataatggactacataatttatagatttttgctcgttgtagtcattat

SEQ ID NO: 52039 - DNA, 80 bp, synthetic construct
  source 1..80: mol_type = other DNA
cgcagaacgagccgtttttgacatcgaccctgtgcctatattatccaaccgaagcatcaaacgagatcgctgatacggaa

SEQ ID NO: 52040 - DNA, 80 bp, synthetic construct
  source 1..80: mol_type = other DNA
catcaaacgagatcgctgatacggaatggaaaaacaccttatcccaactatttttaacgaagggatggccaacaggatca

SEQ ID NO: 52041 - DNA, 80 bp, synthetic construct
  source 1..80: mol_type = other DNA
gaccatcattgtgaacgcgcaaaattatggaataaatctacccataacggggtcgatggatactgcatatgcaaattcta

SEQ ID NO: 52042 - DNA, 80 bp, synthetic construct
  source 1..80: mol_type = other DNA
ttcccagctgaaaactcttactcaaggtggagtggacttctaagcccctgtgatgctgattggcttgggatgcttgtcgt

SEQ ID NO: 52043 - DNA, 80 bp, synthetic construct
  source 1..80: mol_type = other DNA
tccttcagtacgagatcttctagataccgcctcagctctgtatcgggaacatactgcactcaggcaagcatttctttgct

SEQ ID NO: 52044 - DNA, 80 bp, synthetic construct
  source 1..80: mol_type = other DNA
tccttcgccgtcatagagtatttggtgtctttcggagtgtggattcgcactcctccagcttatagaccaccaaatgcccc

SEQ ID NO: 52045 - DNA, 80 bp, synthetic construct
  source 1..80: mol_type = other DNA
atgcaagctctgcaggatcccagagtcaggggtctgcattttcctgctggtggctccagttcaggaacagtaaaccctgc

SEQ ID NO: 52046 - DNA, 80 bp, synthetic construct
  source 1..80: mol_type = other DNA
accatactgcactcagagatgcccctatcttatcgagacttccggaaactactgttgttagacgacgggaccgaggcagg

SEQ ID NO: 52047 - DNA, 80 bp, synthetic construct
  source 1..80: mol_type = other DNA
tcccctagaagaagaactccctcgcctcgcagacgcagatctcaatcgccgcgtcgcagaagatctcaatctcgggaatc

SEQ ID NO: 52048 - DNA, 80 bp, synthetic construct
  source 1..80: mol_type = other DNA
tccttctattcgagaaactgttcttgagtatttggtgtcttttggagtgtggattcgccctcctcctgcttacagaccac

SEQ ID NO: 52049 - DNA, 80 bp, synthetic construct
  source 1..80: mol_type = other DNA
acatttacaccacctattgattattggatacttattaactcaaatacaaatggagtagtatacgagagtacgaataatag

SEQ ID NO: 52050 - DNA, 80 bp, synthetic construct
  source 1..80: mol_type = other DNA
agattgggacctcaaccaagctctgctagatcccagagtgaggggtcttgctggtggctcaagttccggaacagtaaacc

SEQ ID NO: 52051 - DNA, 80 bp, synthetic construct
  source 1..80: mol_type = other DNA
aacctttctgttcccaatcctctgggattttttcccggtcaccagttggacccggcgttcggagccaattcaaacaatcc

SEQ ID NO: 52052 - DNA, 80 bp, synthetic construct
  source 1..80: mol_type = other DNA
tgcctacgggtacgctgcttgtcgattcagatcttaatgactttgtctctgatgcagattcaactttgattggtgattgt

SEQ ID NO: 52053 - DNA, 80 bp, synthetic construct
  source 1..80: mol_type = other DNA
tacactaattctttcacacgtggtgtttattaccctgacaaagttttcagatcctcagttttacattcaactcaggactt

SEQ ID NO: 52054 - DNA, 80 bp, synthetic construct
  source 1..80: mol_type = other DNA
ctagtgcgaataattgcacttttgaatatgtctctcagccttttcttatggaccttgaaggaaaacagggtaatttcaaa

SEQ ID NO: 52055 - DNA, 80 bp, synthetic construct
  source 1..80: mol_type = other DNA
gattttacaggctgcgttatagcttggaattctaacaagcttgattctaaggttagtggtaattataattacctgtatag

SEQ ID NO: 52056 - DNA, 80 bp, synthetic construct
  source 1..80: mol_type = other DNA
gtcttgaaaactggtgatttacaaccattagaacaacctactagtgaagctgttgaagctccattggttggtacaccagt

SEQ ID NO: 52057 - DNA, 80 bp, synthetic construct
  source 1..80: mol_type = other DNA
cacaacaagtcctatttctgaacatgactaccagattggtggttgtactgaaaaatgggaatctggagtaaaagactgtg

SEQ ID NO: 52058 - DNA, 80 bp, synthetic construct
  source 1..80: mol_type = other DNA
acatagcacaagtagatgtagttaactttaatctcacatagcaatctttaatcagtgtgtaacattagggaggacttgaa

SEQ ID NO: 52059 - DNA, 80 bp, synthetic construct
  source 1..80: mol_type = other DNA
gaagctgcgctgtgcacctttttgttaaataaagaaatgtatctaaagttgcgtagtgatgtgctattacctcttacgca

SEQ ID NO: 52060 - DNA, 80 bp, synthetic construct
  source 1..80: mol_type = other DNA
gacactgctcttgagtatttggtgtcttttggagtgtggattcgcactcctcccgcttacagaccaccaaaggcccctat

SEQ ID NO: 52061 - DNA, 80 bp, synthetic construct
  source 1..80: mol_type = other DNA
cttcaatcccaacaaccaaactctgcaagatcccagagtgagaggcctgtatcttcctgctggtggctccagttcaggaa

SEQ ID NO: 52062 - DNA, 80 bp, synthetic construct
  source 1..80: mol_type = other DNA
caattcttgcccaaggtcttacataagaggactcttggactctgggtcttacataagaggactcttggactctctgtaat

SEQ ID NO: 52063 - DNA, 80 bp, synthetic construct
  source 1..80: mol_type = other DNA
accagcaatcctctgggattctttcccgaccaccagttggatccagccttcagagcaaacaccgcaaatccagattggga

SEQ ID NO: 52064 - DNA, 80 bp, synthetic construct
  source 1..80: mol_type = other DNA
cgcacctctctttacgcggactccccgtctgtgccttctcatctgccggaaagcttgagctcttctttttcacctctgcc

SEQ ID NO: 52065 - DNA, 80 bp, synthetic construct
  source 1..80: mol_type = other DNA
aaaattatggaggacaaatgtttttagaacttctcttgaagatgaaataactaaaatttatgctgctgctgaggtatcca

SEQ ID NO: 52066 - DNA, 80 bp, synthetic construct
  source 1..80: mol_type = other DNA
tttttagatgtgagctagatttgattggtagtcagtcttcttttggagcagcaatgtctgcaatgattgcactaatgata

SEQ ID NO: 52067 - DNA, 80 bp, synthetic construct
  source 1..80: mol_type = other DNA
atcaagagaatatggacgatgaagtgtttgatgttctatgcaatcttgtttacaatgaattgatagcatgggctgctgat

SEQ ID NO: 52068 - DNA, 80 bp, synthetic construct
  source 1..80: mol_type = other DNA
agatttgtattgctaagaaggccttggcttccactttataactctagggatgtgcggagaaatgctcacgttttggttcc

SEQ ID NO: 52069 - DNA, 80 bp, synthetic construct
  source 1..80: mol_type = other DNA
gaaatccttaaactttttaaaaccattataataaaactgaaaagttcaacaatcaaaacaactcctcttgaaaacgagtt

SEQ ID NO: 52070 - DNA, 80 bp, synthetic construct
  source 1..80: mol_type = other DNA
actaaattcatcgaatttacagtcgcactgactccagatctgcaattatttaacggtttattagtgtttgagcaataaat

SEQ ID NO: 52071 - DNA, 80 bp, synthetic construct
  source 1..80: mol_type = other DNA
actgactccagatctgcaattatttaacggtttattagtgtttgagcaataaatcacggcctagcttattcaatataccc

SEQ ID NO: 52072 - DNA, 80 bp, synthetic construct
  source 1..80: mol_type = other DNA
ttctatcaaaaactttgttcgttgatacggattctgaagcgtattcattatatgttccagaatctcagaaacttgatgtt

SEQ ID NO: 52073 - DNA, 80 bp, synthetic construct
  source 1..80: mol_type = other DNA
ctattgagttaactacgattgaaaaatatcaaccaaaagttaatattctcaaacaagcagttatagttccatctcaaaat

SEQ ID NO: 52074 - DNA, 80 bp, synthetic construct
  source 1..80: mol_type = other DNA
cagctatatttttttgataaagcatacaaattaaagaaagaattaccaaatctaccatttctttcgtcattggataagga

SEQ ID NO: 52075 - DNA, 80 bp, synthetic construct
  source 1..80: mol_type = other DNA
attagatgctagaagagcagcaatgcaatttgataatgttattgttgacgcacaaaacagaaccgttcaatttaatgtta

SEQ ID NO: 52076 - DNA, 80 bp, synthetic construct
  source 1..80: mol_type = other DNA
atgacaatgatgaccaaattgttgttattggtgatgatgtagatgatattgacactattaattgtgaaagtatttatgaa

SEQ ID NO: 52077 - DNA, 80 bp, synthetic construct
  source 1..80: mol_type = other DNA
cctcctgcctccaccaatcggcagtcaggaagacagcctacacctctaagagacagtcatcctcaggccatgcagtggaa

SEQ ID NO: 52078 - DNA, 80 bp, synthetic construct
  source 1..80: mol_type = other DNA
aaggggaatgcccaaagtttgtgtttcctcttaactcaaaagtcaaagtcattcaaccacgtgttgaaaagaaaaagact

SEQ ID NO: 52079 - DNA, 80 bp, synthetic construct
  source 1..80: mol_type = other DNA
tggggcgtatacgctctgtgtaccctgttgcatctccacaggagtgtaacaatatgcacttgtctaccttgatgaaatgt

SEQ ID NO: 52080 - DNA, 80 bp, synthetic construct
  source 1..80: mol_type = other DNA
aacgtgttgtctgtgtgacaaacgtgcaacttgcttttctacttcatcagatacttatgcctgctggaatcattctgtgg

SEQ ID NO: 52081 - DNA, 80 bp, synthetic construct
  source 1..80: mol_type = other DNA
tgtctataacccatttatgattgatgttcagcagtggggctttacgggtaaccttcagagtaaccatgaccaacattgcc

SEQ ID NO: 52082 - DNA, 80 bp, synthetic construct
  source 1..80: mol_type = other DNA
aaatgctgttataccaaaaggaataatgatgaatgtcgcaaagtatactcaactgtgtcaatacttaaatacacttactt

SEQ ID NO: 52083 - DNA, 80 bp, synthetic construct
  source 1..80: mol_type = other DNA
tggtagtgaccttgaccggtgcaccacttttgatgatgttcaagctcctaattacactcaacatacttcatctatgaggg

SEQ ID NO: 52084 - DNA, 80 bp, synthetic construct
  source 1..80: mol_type = other DNA
ctaattacactcaacatacttcatctatgaggggggtttactatcctgatgaaatttttagatcagacactctttattta

SEQ ID NO: 52085 - DNA, 80 bp, synthetic construct
  source 1..80: mol_type = other DNA
aaaataaagatgggtttctctatgtttataagggctatcaacctatagatgtagttcgtgatctaccttctggttttaac

SEQ ID NO: 52086 - DNA, 80 bp, synthetic construct
  source 1..80: mol_type = other DNA
tggggcacgtcagctgcagcctattttgttggctatttaaagccaactacatttatgctcaagtatgatgaaaatggtac

SEQ ID NO: 52087 - DNA, 80 bp, synthetic construct
  source 1..80: mol_type = other DNA
ctgaaatattagacatttcaccttgctcttttgggggtgtaagtgtaattacacctggaacaaatgcttcatctgaagtt

SEQ ID NO: 52088 - DNA, 80 bp, synthetic construct
  source 1..80: mol_type = other DNA
cgctacaagcctcactccctttcggatggcttgttattggcgttgcatttcttgctgtttttcagagcgctaccaaaata

SEQ ID NO: 52089 - DNA, 80 bp, synthetic construct
  source 1..80: mol_type = other DNA
caatgtctttcgcttaaaagggggtgcaccaattaaaggtgtaacctttggagaagatactgtttgggaagttcaaggtt

SEQ ID NO: 52090 - DNA, 80 bp, synthetic construct
  source 1..80: mol_type = other DNA
atgtgcttgaagatccttgtaaggtacaacactaggggtaatacttatagcactgcttggctttgtgctctaggaaaggt

SEQ ID NO: 52091 - DNA, 80 bp, synthetic construct
  source 1..80: mol_type = other DNA
ggcaaggccaaaacagcgccgaccccaaggtttacccaataatactgcgtcttggttcacagctctcactcagcatggca

SEQ ID NO: 52092 - DNA, 80 bp, synthetic construct
  source 1..80: mol_type = other DNA
tatggaagagccctaatgtgtaaaattaattttagtagtgctatccccatgtgattttaatagcttcttaggagaatgac

SEQ ID NO: 52093 - DNA, 80 bp, synthetic construct
  source 1..80: mol_type = other DNA
cttcggggactctgtggaagaggccctatcggaggcacgtgaacacctcaaaaatggcacttgtggtctagtagagctgg

SEQ ID NO: 52094 - DNA, 80 bp, synthetic construct
  source 1..80: mol_type = other DNA
cgtgccacacgcgttgagtgtacaactattgttaatggcatgaagagatctttctatgtctatgcaaatggaggccgtgg

SEQ ID NO: 52095 - DNA, 80 bp, synthetic construct
  source 1..80: mol_type = other DNA
acactagagatgatggtgttaactatggatgggacattaagctcaacatgggaaggatgggtgtgttgtgagtggtatga

SEQ ID NO: 52096 - DNA, 80 bp, synthetic construct
  source 1..80: mol_type = other DNA
atggatgggggcatattgccgcgccatatagctttcaggcacgattgctagagtgtttggcgtttccaatgtacaatggg

SEQ ID NO: 52097 - DNA, 80 bp, synthetic construct
  source 1..80: mol_type = other DNA
aaccaacagaatctattgttagatttcctaatattacaaacttgtgcccttttggtgaagtttttaacgccaccagattt

SEQ ID NO: 52098 - DNA, 80 bp, synthetic construct
  source 1..80: mol_type = other DNA
aacaatttgatacttataacctctggaacacttttacaagacttcagagtttagaaaatgtggcttttaatgttgtaaat

SEQ ID NO: 52099 - DNA, 80 bp, synthetic construct
  source 1..80: mol_type = other DNA
aagaactttactctccaatttttcttattgttgcggcaatagtgtttataacactttgcttcacactcaaaagaaagata

SEQ ID NO: 52100 - DNA, 80 bp, synthetic construct
  source 1..80: mol_type = other DNA
cttagtttctacacaggagtttagatatatgaattcacagggactactcccacccaagaatagcatagatgccttcaaac

SEQ ID NO: 52101 - DNA, 80 bp, synthetic construct
  source 1..80: mol_type = other DNA
agatctgttctctaaacgaactttaaaatctgtgtggctgtcactcggctgcatgcttagtgcactcacgcagtataatt

SEQ ID NO: 52102 - DNA, 80 bp, synthetic construct
  source 1..80: mol_type = other DNA
cctccacgcccttactacttctgagtaagcttggaggcggtggcggcctcggcctcctgtatatataaaaaaaagggaag

SEQ ID NO: 52103 - DNA, 80 bp, synthetic construct
  source 1..80: mol_type = other DNA
acccatggaatgtagccaaacaggaaggaaagtgcatgactgggcagccagccagtggcagttaatagtgaaaccccgcc

SEQ ID NO: 52104 - DNA, 80 bp, synthetic construct
  source 1..80: mol_type = other DNA
cagttaatagtgaaaccccgcccctactggccaaaggagtggaaagcaggccatggttcttcgccagctgtcacgacaag

SEQ ID NO: 52105 - DNA, 80 bp, synthetic construct
  source 1..80: mol_type = other DNA
gtagggaggagctggctaaaactggatggctgccagccaagcatgactcatacctacggagccacagggaggagctgcta

SEQ ID NO: 52106 - DNA, 80 bp, synthetic construct
  source 1..80: mol_type = other DNA
gcgaaggcttagacttgggttgcctgagattctgataacaggactatccccaattctggatgtggccctcctccagatag

SEQ ID NO: 52107 - DNA, 80 bp, synthetic construct
  source 1..80: mol_type = other DNA
tggatgaggatgatgagcctggggtcctccagggttacccatatctgatggcacactatttaaacaggtgcccattccac

SEQ ID NO: 52108 - DNA, 80 bp, synthetic construct
  source 1..80: mol_type = other DNA
ccaactttcgatctcttgtagatctgttctctaaacgaactttaaaatctgtgtggctgtcactcggctgcatgcttagt

SEQ ID NO: 52109 - DNA, 80 bp, synthetic construct
  source 1..80: mol_type = other DNA
tatattaattagtagaaactttatatttaaatatttgattgttagagtagttataaggtttagctgtagtataaacgcct

SEQ ID NO: 52110 - DNA, 80 bp, synthetic construct
  source 1..80: mol_type = other DNA
atgaagatgttgttaatggtgacaatgtcgatgaagatgttgttactggtgaaaatgacgatgatgatgttgttactggt

SEQ ID NO: 52111 - DNA, 80 bp, synthetic construct
  source 1..80: mol_type = other DNA
tccttctattcgagatcttacttttggaagagaaactgttcttgagtatttggtgtcttttggagtgtggattcgcactc

SEQ ID NO: 52112 - DNA, 80 bp, synthetic construct
  source 1..80: mol_type = other DNA
tttattatttttagctttattgtttattgtgtttttactttttctagtttaccatggctaatattaaatctaaacatgtt

SEQ ID NO: 52113 - DNA, 80 bp, synthetic construct
  source 1..80: mol_type = other DNA
atactgacaatgaaactttagaatattgggttacaccgctatctagacgtcagtatcttcttaattttgatgagcacggt

SEQ ID NO: 52114 - DNA, 80 bp, synthetic construct
  source 1..80: mol_type = other DNA
ttattctgatcattgtttttctgttaacagcgacttttgcccttgtgcagatccgtctgttgttaattcttgtgttaaat

SEQ ID NO: 52115 - DNA, 80 bp, synthetic construct
  source 1..80: mol_type = other DNA
ctaagcctccttctgccatttgtcctgctggtactaaatatcgtcattgcgacttggatactactctttatgttaaaaac

SEQ ID NO: 52116 - DNA, 80 bp, synthetic construct
  source 1..80: mol_type = other DNA
ttgttattaaagcatctcatgatgattagattttaaatctaaactttatatatggaagtttggaggcctagctataaata

SEQ ID NO: 52117 - DNA, 80 bp, synthetic construct
  source 1..80: mol_type = other DNA
aatttccccttaaattaaggggtactgctgttatgtctttaaaagaaggtcaaatcaatgatatgattttatctcttctt

SEQ ID NO: 52118 - DNA, 80 bp, synthetic construct
  source 1..80: mol_type = other DNA
ccctctctcagaaacaaagtgtacgttgaaatccttcactgtagaaaaaggaatctatcaaacttctaactttagagtcc

SEQ ID NO: 52119 - DNA, 80 bp, synthetic construct
  source 1..80: mol_type = other DNA
tgctagggagagctgcctatatggaagagccctaatgtgtaaaattaattttagtagtgctatccccatgtgattttaat

SEQ ID NO: 52120 - DNA, 80 bp, synthetic construct
  source 1..80: mol_type = other DNA
tacttgcttatttgactcctggtgattcttcttcaggttggacagctggtgctgcagtttattatgtgggttatcttcaa

SEQ ID NO: 52121 - DNA, 80 bp, synthetic construct
  source 1..80: mol_type = other DNA
gaaactttatatttaaatatttgattgttagagtagttataaggtttagctgtagtataaacgcctccgggaagagctag

SEQ ID NO: 52122 - DNA, 80 bp, synthetic construct
  source 1..80: mol_type = other DNA
gctatggaaacatttaatcacaataatggtaatgatgtcttataccaacctcctacagcatctgtttctacatctttttt

SEQ ID NO: 52123 - DNA, 80 bp, synthetic construct
  source 1..80: mol_type = other DNA
aaagcagatcttgttttagatgctttggcttcaatgacaggtgtttctattgaaactttattggctgctattaagcgtct

SEQ ID NO: 52124 - DNA, 80 bp, synthetic construct
  source 1..80: mol_type = other DNA
atgtgtactttgttttgttagttttatgatgttactagttaaacataagcatttttatttgactatgtatataattcctg

SEQ ID NO: 52125 - DNA, 80 bp, synthetic construct
  source 1..80: mol_type = other DNA
acagtgtttttagaatgcctatgggtgtttataattataaaatttctgttcaagaattgcgttatatgaatgctaatggc

SEQ ID NO: 52126 - DNA, 80 bp, synthetic construct
  source 1..80: mol_type = other DNA
tcatttttgcagacactttagttgaagtaggtttagttggtgttttaactttagataaccaagatttgtatggtcaatgg

SEQ ID NO: 52127 - DNA, 80 bp, synthetic construct
  source 1..80: mol_type = other DNA
gtggttatgaacttagatgttgacacacaccgttatcgtttgtctcttaaagatttacttctttatgcagcagatcctgc

SEQ ID NO: 52128 - DNA, 80 bp, synthetic construct
  source 1..80: mol_type = other DNA
ctatgctagtataagattttctagtgtttatagtgttccattggtgtttcaaaataatgttgctaattatcagcacattg

SEQ ID NO: 52129 - DNA, 80 bp, synthetic construct
  source 1..80: mol_type = other DNA
tattgatatggatgataatctgtttattgctaaatatggtttagaagactatgcatttgatcatatagtttatggtagtt

SEQ ID NO: 52130 - DNA, 80 bp, synthetic construct
  source 1..80: mol_type = other DNA
agttattgatttattattagatgattttgtttctattgttaagtcattaaatttgagttgtgttagtaaagttgttaata

SEQ ID NO: 52131 - DNA, 80 bp, synthetic construct
  source 1..80: mol_type = other DNA
gttattaattatttttattttgcctacaacattagctgttataggtgattttaattgtactaattttgctattaatgata

SEQ ID NO: 52132 - DNA, 80 bp, synthetic construct
  source 1..80: mol_type = other DNA
ttgttttaagagtattgttttagataaatttgccatacccaactccagacgatctgatttgcagttgggcagttctggtt

SEQ ID NO: 52133 - DNA, 80 bp, synthetic construct
  source 1..80: mol_type = other DNA
atcttttgtatgattctaatggcaacattattggttttaaagattttgttactaataaaacatataatattttcccttgt

SEQ ID NO: 52134 - DNA, 80 bp, synthetic construct
  source 1..80: mol_type = other DNA
ttgtcattagttcaaaatgctccttatggtttgttgtttatgcattttagttataaacctatttcttttaaaactgtttt

SEQ ID NO: 52135 - DNA, 80 bp, synthetic construct
  source 1..80: mol_type = other DNA
aaatgtatgtaaaatggccttggtatgtttggctactaatttctttttcatttataatattccttgtattgctctttttt

SEQ ID NO: 52136 - DNA, 80 bp, synthetic construct
  source 1..80: mol_type = other DNA
ttgcttttttagcaactattaagctttgtatgcaactttgtggtttttgtaatttctttattatttcaccttcggcttac

SEQ ID NO: 52137 - DNA, 80 bp, synthetic construct
  source 1..80: mol_type = other DNA
gagattccgaggctgactcacctgttaaagatgtttttgaacttcgttattctggttctattaggtttgatagtacttta

SEQ ID NO: 52138 - DNA, 80 bp, synthetic construct
  source 1..80: mol_type = other DNA
ttatgggcttgttccgtacatacaagactaaacgttatgttgtacatcatctttctatgactacatctactactaatttt

SEQ ID NO: 52139 - DNA, 80 bp, synthetic construct
  source 1..80: mol_type = other DNA
tttatatgtgaaacgttattttaaaggatgtgaaacttttggtaagcctgttatttggttttgtcatgatgaagcatcat

SEQ ID NO: 52140 - DNA, 80 bp, synthetic construct
  source 1..80: mol_type = other DNA
ttttgtttggctcttaaaaatgcttttcagacatttagatggagtatatttataaaaggtttccttgttgtagccactgt

SEQ ID NO: 52141 - DNA, 80 bp, synthetic construct
  source 1..80: mol_type = other DNA
tgaagatatcggttctactatgtttaatgttcctactaaagttttgagacatggctttcatgttttacattttttaactt

SEQ ID NO: 52142 - DNA, 80 bp, synthetic construct
  source 1..80: mol_type = other DNA
accatacagcactaaggccaccaaatgcccctatcttatcaacacttccggaaactactgttgttagacgacgaggcagg

SEQ ID NO: 52143 - DNA, 80 bp, synthetic construct
  source 1..80: mol_type = other DNA
gaatgcctatgggtgtttataattataaaatttctgttcaagaattgcgttatatgaatgctaatggcttacgtccaccc

SEQ ID NO: 52144 - DNA, 80 bp, synthetic construct
  source 1..80: mol_type = other DNA
taaatactacaacattagctgttcctgttaatatgcgtgtcttacacttaggtgcaggatctgataaagaagtagcccct

SEQ ID NO: 52145 - DNA, 80 bp, synthetic construct
  source 1..80: mol_type = other DNA
tgcattttggacagttttttgtactaatgtaaatgcttcttctagtgaagggtttttaataggtataaattatttgggta

SEQ ID NO: 52146 - DNA, 80 bp, synthetic construct
  source 1..80: mol_type = other DNA
tgcatcggatatttctttatctgttgcatgtcaattgccttattgttattttcgcaattcttctgctaattatgttggca

SEQ ID NO: 52147 - DNA, 80 bp, synthetic construct
  source 1..80: mol_type = other DNA
ttttgcaatcttctaattataaaattgacactacttctagttcttgtcaattgtattatagtttacctttacctaatgtt

SEQ ID NO: 52148 - DNA, 80 bp, synthetic construct
  source 1..80: mol_type = other DNA
atttttaatggaattaatagtggcaccacttgttctaatgatttattgcagcctaacactgaagtttctactggtgtttg

SEQ ID NO: 52149 - DNA, 80 bp, synthetic construct
  source 1..80: mol_type = other DNA
tatgcaggaagagtttctgctgcttttcatcaaaatgcttcctctttggctttactttatcgtaatttaaagtgtagcta

SEQ ID NO: 52150 - DNA, 80 bp, synthetic construct
  source 1..80: mol_type = other DNA
gctaccaactctgcacttgctaaaatacaaagtgttgttaattctaatgctcaagcacttaatagtttgttacagcaatt

SEQ ID NO: 52151 - DNA, 80 bp, synthetic construct
  source 1..80: mol_type = other DNA
gtttataatagaggtatgcagttgtataagtcttatagtgaacaagttataccacccacttcagattatttaatctaaat

SEQ ID NO: 52152 - DNA, 80 bp, synthetic construct
  source 1..80: mol_type = other DNA
cagttattgaggactatcatacattaacggctactgttatccgtggtcatctttatatacagggtgttaaacttggcact

SEQ ID NO: 52153 - DNA, 80 bp, synthetic construct
  source 1..80: mol_type = other DNA
gagactctgatgctgattcaccttctaaagacacttttgaacttcgttattctggttctattaggtttgatagtacttta

SEQ ID NO: 52154 - DNA, 80 bp, synthetic construct
  source 1..80: mol_type = other DNA
ctccccgtctgtgccttctcatctgccggaccgtgtgcgcttctgtttcacctctgcctaatcatccagcaccatgcaac

SEQ ID NO: 52155 - DNA, 80 bp, synthetic construct
  source 1..80: mol_type = other DNA
ttacgatctcttgtcagatctcattaaatctaaactttttaaacaagattccctgttatccatgcttgtgagtgtggttt

SEQ ID NO: 52156 - DNA, 80 bp, synthetic construct
  source 1..80: mol_type = other DNA
gattattctgccttattgtgtagagttactctaggtgattttactataatgtctggtcggatgagtttaacagttgtgtc

SEQ ID NO: 52157 - DNA, 80 bp, synthetic construct
  source 1..80: mol_type = other DNA
tgttattggggatttttctctcttttaaacagtgtttttagaatgcctatgggtgtttataattataaaatttctgttca

SEQ ID NO: 52158 - DNA, 80 bp, synthetic construct
  source 1..80: mol_type = other DNA
ttcggggtactagtgtgaatgcccggctagtaccctgtgctagtggtttatctactgatgttcaattaagggcatttgac

SEQ ID NO: 52159 - DNA, 80 bp, synthetic construct
  source 1..80: mol_type = other DNA
ttagaagtttataataaagagaaaacttattatgagttgactaaaagttgtggtgttgtggctgaacatgatttctttac

SEQ ID NO: 52160 - DNA, 80 bp, synthetic construct
  source 1..80: mol_type = other DNA
tggggttatacaggttctttaactagtaatcacgatataatttgtaatgtacataaaggtgcacatgttgcgtcagctga

SEQ ID NO: 52161 - DNA, 80 bp, synthetic construct
  source 1..80: mol_type = other DNA
gctattatgaatgacaaagttgttgttaagattaataatgtagatactgttatttttaaaaataatacatcatttcctac

SEQ ID NO: 52162 - DNA, 80 bp, synthetic construct
  source 1..80: mol_type = other DNA
ttaataatttaaaaattaaaaattttgattatttggatattcaccctagtttgtgcaacaatggtaagatttcatctagt

SEQ ID NO: 52163 - DNA, 80 bp, synthetic construct
  source 1..80: mol_type = other DNA
gtttatttaaatactactatattatttactggttatttccctaaatctggtgccaattttagggatctatctttaaaagg

SEQ ID NO: 52164 - DNA, 80 bp, synthetic construct
  source 1..80: mol_type = other DNA
aaactaattctcctaaagttactattgattgttctttatttgtctgttctaattatgcagcttgccatgacttattgtca

SEQ ID NO: 52165 - DNA, 80 bp, synthetic construct
  source 1..80: mol_type = other DNA
atttaataaatttggtgcaattagttcttctttacaagaaattttatctcgtctcgatgctttagaggctcaggttcaga

SEQ ID NO: 52166 - DNA, 80 bp, synthetic construct
  source 1..80: mol_type = other DNA
ctaaacattatgaataaatctttttttcctcaatttacttctgatcaagctgttacattcttaaaagaatggaatttctc

SEQ ID NO: 52167 - DNA, 80 bp, synthetic construct
  source 1..80: mol_type = other DNA
aaggggtcttctgggttgctaatcaccaagctgacacttctactccctccgatgtttcgtcaagggatcctactactcaa

SEQ ID NO: 52168 - DNA, 80 bp, synthetic construct
  source 1..80: mol_type = other DNA
aaggtttagctgtagtataaacgcctccgggaagagctatcaattgtagtgtttaatatatatattagtatatgattgaa

SEQ ID NO: 52169 - DNA, 80 bp, synthetic construct
  source 1..80: mol_type = other DNA
ttgaagacactattaatgacgatgaagatgttgttactggtgacaatgacgatgaagatgttgttactggtgacaatgac

SEQ ID NO: 52170 - DNA, 80 bp, synthetic construct
  source 1..80: mol_type = other DNA
gacctccggctcaaggcatactcacctctccgccagcagctcctcctcctgcttccaccaatcggcaggtaggaaggttg

SEQ ID NO: 52171 - DNA, 80 bp, synthetic construct
  source 1..80: mol_type = other DNA
ttcacaattggaactgtaactttgaagcaaggtgttcgcgctactgcaacgataccgatacaagcctcactccctttcgg

SEQ ID NO: 52172 - DNA, 80 bp, synthetic construct
  source 1..80: mol_type = other DNA
atcttttggttctcacttgaactgcaagatcataatgaaacttgtcacgcctatcttgttttcttaggaatcatcacaac

SEQ ID NO: 52173 - DNA, 80 bp, synthetic construct
  source 1..80: mol_type = other DNA
atggtcgcatgtttattttcttattatttcttactctcactagtggtagtgaccttgaccggtgcaccacttttgatgat

SEQ ID NO: 52174 - DNA, 80 bp, synthetic construct
  source 1..80: mol_type = other DNA
tgagtacgaacttgtgtactcattcgtttcgtaagaaacaggtacgttaattaagtagcatggtaagcacaagaaagtga

SEQ ID NO: 52175 - DNA, 80 bp, synthetic construct
  source 1..80: mol_type = other DNA
gttggtcgcttatgtactcattcgtttcggaagaaacaggtacgttaatagttaatagcgtacttctttttcttgctttc

SEQ ID NO: 52176 - DNA, 80 bp, synthetic construct
  source 1..80: mol_type = other DNA
aaccggtaatgagatcactgtggctacatctggtcgcatgtttcatcttgttgacttccaggttacaatagcagagatat

SEQ ID NO: 52177 - DNA, 80 bp, synthetic construct
  source 1..80: mol_type = other DNA
atggtcgcatgaaacttctcattgttttgacttgtatttctctatgcagttgcatatgcactgtagtacagcgctgtgca

SEQ ID NO: 52178 - DNA, 80 bp, synthetic construct
  source 1..80: mol_type = other DNA
gtgcgcttatagctaggtgttggtaccttcatgaaggtcaccaaactgctgcatttagagatgtgttagtcgtactcaac

SEQ ID NO: 52179 - DNA, 80 bp, synthetic construct
  source 1..80: mol_type = other DNA
aagaggacaaattaagacgtacttgttgttttaaataatggtcgcaaattaaaatgtctgataatggaccccaatcaaac

SEQ ID NO: 52180 - DNA, 80 bp, synthetic construct
  source 1..80: mol_type = other DNA
gagtttttgcagtatgattctagtattcattcatatttcattactgatcaagagtgtggtagtagtaagagtgtttgtac

SEQ ID NO: 52181 - DNA, 80 bp, synthetic construct
  source 1..80: mol_type = other DNA
aatactggtgtttatgatttgtctggttttactgtaaagcctgttgcaactgtttatcgtcggattcctaatttacctga

SEQ ID NO: 52182 - DNA, 80 bp, synthetic construct
  source 1..80: mol_type = other DNA
tagtgttgaaactgtaggtggtttatttgagatcaaaattcctactaactttaccatagctggtcatgaagaatttattc

SEQ ID NO: 52183 - DNA, 80 bp, synthetic construct
  source 1..80: mol_type = other DNA
gatggtttaaagttcactgatgaatcattttataagaatatgtatttaaaaagtgccgtgatgcagagtgtaggtgcatg

SEQ ID NO: 52184 - DNA, 80 bp, synthetic construct
  source 1..80: mol_type = other DNA
taaatctaaacatgttattaattatttttattttgcctacaacactagctgttataggtgattttaattgtactaactct

SEQ ID NO: 52185 - DNA, 80 bp, synthetic construct
  source 1..80: mol_type = other DNA
tgttaattatgatctttatggcatcacaggccaaggtatttttaaagaagtttctgcggcttattataataattggcaga

SEQ ID NO: 52186 - DNA, 80 bp, synthetic construct
  source 1..80: mol_type = other DNA
caaactaattctcctaaagttactattgattgttcagcttttgtttgctctaattatgctgcttgtcatgatttattgtc

SEQ ID NO: 52187 - DNA, 80 bp, synthetic construct
  source 1..80: mol_type = other DNA
ggatgtttactggtagttcctattattacccagaaccaatttcagataaaaatgttgttttcatgaatagttgctctgtt

SEQ ID NO: 52188 - DNA, 80 bp, synthetic construct
  source 1..80: mol_type = other DNA
ccccttctgaatcaaaaggatattggtataaacacaaccggcgttcttttaaaacagctgatggtcaacaaaagcagttg

SEQ ID NO: 52189 - DNA, 80 bp, synthetic construct
  source 1..80: mol_type = other DNA
gtataaacgcctccgggaagagctagcaattgtagtgtttaatatatatattagtatatgattgaaattaattatagcct

SEQ ID NO: 52190 - DNA, 80 bp, synthetic construct
  source 1..80: mol_type = other DNA
tggttgcctgatttgtttatgttagaaactatgcattggttgattagatttattgtgtttgtagctaatatgttacctgc

SEQ ID NO: 52191 - DNA, 80 bp, synthetic construct
  source 1..80: mol_type = other DNA
aatggggaatgtccaaattttgtatttcccttaaattccataatcaagactattcaaccaagggttgaaaagaaaaagct

SEQ ID NO: 52192 - DNA, 80 bp, synthetic construct
  source 1..80: mol_type = other DNA
atggggtaaggctagactttattatgattcaatgagttatgaggatcaagatgcacttttcgcatatacaaaacgtaatg

SEQ ID NO: 52193 - DNA, 80 bp, synthetic construct
  source 1..80: mol_type = other DNA
acaatggggttttacaggtaacctacaaagcaaccatgatctgtattgtcaagtccatggtaatgcacatgtagctagtt

SEQ ID NO: 52194 - DNA, 80 bp, synthetic construct
  source 1..80: mol_type = other DNA
atgtttttcaaacacgtgcaggctgtttaataggggctgaacatgtcaacaactcatatgagtgtgacatacccattggt

SEQ ID NO: 52195 - DNA, 80 bp, synthetic construct
  source 1..80: mol_type = other DNA
gataccgatacaagcctcactccctttcggatggcttattgttggcgttgcacttcttgctgtttttcagagcgcttcca

SEQ ID NO: 52196 - DNA, 80 bp, synthetic construct
  source 1..80: mol_type = other DNA
ggcgcgatcaaaacaacgtcggccccaaggtttacccaataatactgcgtcttggttcaccgctctcactcaacatggca

SEQ ID NO: 52197 - DNA, 80 bp, synthetic construct
  source 1..80: mol_type = other DNA
ccctaatgtgtaaaattaattttagtagtgctatccccatgtgattttaatagcttcttaggagaatgacaaaaaaaaaa

SEQ ID NO: 52198 - DNA, 80 bp, synthetic construct
  source 1..80: mol_type = other DNA
ctttggagactccgtggaggaggtcttatcagaggcacgtcaacatcttaaagatggcacttgtggcttagtagaagttg

SEQ ID NO: 52199 - DNA, 80 bp, synthetic construct
  source 1..80: mol_type = other DNA
tctctactacccttctgctcgcatagtgtatacagcttgctctcatgccgctgttgatgcactatgtgagaaggcattaa

SEQ ID NO: 52200 - DNA, 80 bp, synthetic construct
  source 1..80: mol_type = other DNA
gaatgattgacttctatttgtgctttttagcctttctgctattccttgttttaattatgcttattatcttttggttctca

SEQ ID NO: 52201 - DNA, 80 bp, synthetic construct
  source 1..80: mol_type = other DNA
gcaggtatatgcgctagttatcagactcagactaattctcctcggcgggcacgtagtgtagctagtcaatccatcattgc

SEQ ID NO: 52202 - DNA, 80 bp, synthetic construct
  source 1..80: mol_type = other DNA
atttgaactctactaatgtcactattgcaacctactgtactggttctataccttgtagtgtttgtcttagtggtttagat

SEQ ID NO: 52203 - DNA, 80 bp, synthetic construct
  source 1..80: mol_type = other DNA
cgtctatcagcttacgatctcttgtcagatctcattaaatctaaactttttaaacaagattccctgttatccatgcttgt

SEQ ID NO: 52204 - DNA, 80 bp, synthetic construct
  source 1..80: mol_type = other DNA
gaggcacacctcgaaaaggcatggggacgaatccagcaattcctcctcctgcctccaccaatcggcagtcaggaaggcag

SEQ ID NO: 52205 - DNA, 80 bp, synthetic construct
  source 1..80: mol_type = other DNA
tattgtttcttaggctatttttgtacttgttactttggcctcttttgtttactcaaccgctactttagactgactcttgg

SEQ ID NO: 52206 - DNA, 80 bp, synthetic construct
  source 1..80: mol_type = other DNA
gttaccttcttcatctacaataaaattgttgatgagcctgaagaacatgtccaaattcacacaatcgacggttcatccgg

SEQ ID NO: 52207 - DNA, 80 bp, synthetic construct
  source 1..80: mol_type = other DNA
aagtgaaatcataggatacaaggctattgatggtggtgtcactcgtgacatagcatctacagatacttgttttgctaaca

SEQ ID NO: 52208 - DNA, 80 bp, synthetic construct
  source 1..80: mol_type = other DNA
attggatttgattacgtctataatccgtttatgattgatgttcaacaatggggttttacaggtaacctacaaagcaacca

SEQ ID NO: 52209 - DNA, 80 bp, synthetic construct
  source 1..80: mol_type = other DNA
tcctataattggtgatgaactgaagattaatgcggcttgtagaaaggttcaacacatggttgttaaagctgcattattag

SEQ ID NO: 52210 - DNA, 80 bp, synthetic construct
  source 1..80: mol_type = other DNA
gttcttacctttcttttccaatgttacttggttccatgctatacatgtctctgggaccaatggtactaagaggtttgata

SEQ ID NO: 52211 - DNA, 80 bp, synthetic construct
  source 1..80: mol_type = other DNA
attaacctccacacgcaagttgtggacatgtcaatgacatatggacaacagtttggtccaacttatttggatggagctga

SEQ ID NO: 52212 - DNA, 80 bp, synthetic construct
  source 1..80: mol_type = other DNA
aactcttgttacaatgccacttggctatgtaacacatggcttaaatttggaagaagctgctcggtatatgagatctctca

SEQ ID NO: 52213 - DNA, 80 bp, synthetic construct
  source 1..80: mol_type = other DNA
tttgttgaaataataaaatcccaagatttatctgtagtttctaaggttgtcaaagtgactattgactacacagaaatttc

SEQ ID NO: 52214 - DNA, 80 bp, synthetic construct
  source 1..80: mol_type = other DNA
tgtttgtactaattatatgccttatttctttactttattgctacaattgtgtacttttactagaagtacaaattctagaa

SEQ ID NO: 52215 - DNA, 80 bp, synthetic construct
  source 1..80: mol_type = other DNA
gtttactcattcttacctggtgtttattctgttatttacttgtacttgacattttatcttactaatgatgtttctttttt

SEQ ID NO: 52216 - DNA, 80 bp, synthetic construct
  source 1..80: mol_type = other DNA
tgttactaaaataaaacctcataattcacatgaaggtaaaacattttatgttttacctaatgatgacactctacgtgttg

SEQ ID NO: 52217 - DNA, 80 bp, synthetic construct
  source 1..80: mol_type = other DNA
tttgtgcacttatcttagcctactgtaataagacagtaggtgagttaggtgatgttagagaaacaatgagttacttgttt

SEQ ID NO: 52218 - DNA, 80 bp, synthetic construct
  source 1..80: mol_type = other DNA
gtaaacaagctacaaaatatctagtacaacaggagtcaccttttgttatgatgtcagcaccacctgctcagtatgaactt

SEQ ID NO: 52219 - DNA, 80 bp, synthetic construct
  source 1..80: mol_type = other DNA
gcgccgatctaaagtcatttgacttaggcgacgagcttggcactgatccttatgaagattttcaagaaaactggaacact

SEQ ID NO: 52220 - DNA, 80 bp, synthetic construct
  source 1..80: mol_type = other DNA
attgtttaggaagtctaatctcaaaccttttgagagagatatttcaactgaaatctatcaggccggtagcacaccttgta

SEQ ID NO: 52221 - DNA, 80 bp, synthetic construct
  source 1..80: mol_type = other DNA
ttgtattacacagttacttcacttcagactattaccagctgtactcaactcaattgagtacagacactggtgttgaacat

SEQ ID NO: 52222 - DNA, 80 bp, synthetic construct
  source 1..80: mol_type = other DNA
tgattttgtagaaaacccagatatattacgcgtatacgccaacttaggtgaacgtgtacgccaagctttgttaaaaacag

SEQ ID NO: 52223 - DNA, 80 bp, synthetic construct
  source 1..80: mol_type = other DNA
ctataatatgagagttatacattttggtgctggttctgataaaggagttgcaccaggtacagctgttttaagacagtggt

SEQ ID NO: 52224 - DNA, 80 bp, synthetic construct
  source 1..80: mol_type = other DNA
attttgtaatgatccatttttgggtgtttattaccacaaaaacaacaaaagtaggatggaaagtgagttcagagtttatt

SEQ ID NO: 52225 - DNA, 80 bp, synthetic construct
  source 1..80: mol_type = other DNA
ccctcttttaagaaaggagctaaattgttacataaacctattgtttggcatgttaacaatgcaactaataaagccacgta

SEQ ID NO: 52226 - DNA, 80 bp, synthetic construct
  source 1..80: mol_type = other DNA
gcatctgtttatgcttggaacaggaagagaatcagcaactgtgttgctgattattctgtcctatataattccgcatcatt

SEQ ID NO: 52227 - DNA, 80 bp, synthetic construct
  source 1..80: mol_type = other DNA
gttggatatggttgatactagtttgaagctaaaagactgtgttatgtatgcatcagctgtagtgttactaatccttatga

SEQ ID NO: 52228 - DNA, 80 bp, synthetic construct
  source 1..80: mol_type = other DNA
aattggtctgttcaccagcaccatgcaacttttttgccttctgacttctttccttctattcgtgatctcctcgacaccgc

SEQ ID NO: 52229 - DNA, 80 bp, synthetic construct
  source 1..80: mol_type = other DNA
gacccggcatccagggaattaagagaaactgttcttgagtatttggtgtcttttggagtgtggattcgcactcctcccgc

SEQ ID NO: 52230 - DNA, 80 bp, synthetic construct
  source 1..80: mol_type = other DNA
ttttatataatgtctcttgtatttcttattatggctcctttttgtatgacaattttacatcaatttggcctcggtttgct

SEQ ID NO: 52231 - DNA, 80 bp, synthetic construct
  source 1..80: mol_type = other DNA
tttggtaattgtcctacatctgcttatattaaattaaattgtttctatgatcctttgcctattattttacaaggtatttt

SEQ ID NO: 52232 - DNA, 80 bp, synthetic construct
  source 1..80: mol_type = other DNA
gcctccgggaagggctggcaattatagtatttaatatatatattagtatatgattgaaattaattatagccctgtggagg

SEQ ID NO: 52233 - DNA, 80 bp, synthetic construct
  source 1..80: mol_type = other DNA
agtttattctagtgcgaataattgcacttttgaatatgtctctcagccttttcttatggaccttgaaggaaaacagggta

SEQ ID NO: 52234 - DNA, 80 bp, synthetic construct
  source 1..80: mol_type = other DNA
actcaatggtctttgttcttttttttgtatgaaaatgcctttttaccttttgctatgggtattattgctatgtctgcttt

SEQ ID NO: 52235 - DNA, 80 bp, synthetic construct
  source 1..80: mol_type = other DNA
tgttaaaatatgacttcacggaagagaggttaaaactctttgaccgttattttaaatattgggatcagacataccaccca

SEQ ID NO: 52236 - DNA, 80 bp, synthetic construct
  source 1..80: mol_type = other DNA
gtcaacatcaatattgttggtgactttaaacttaatgaagagatcgccattattttggcatctttttctgcttccacaag

SEQ ID NO: 52237 - DNA, 80 bp, synthetic construct
  source 1..80: mol_type = other DNA
taaaaacaaatgtgtcaatttcaacttcaatggtttaacaggcacaggtgttcttactgagtctaacaaaaagtttctgc

SEQ ID NO: 52238 - DNA, 80 bp, synthetic construct
  source 1..80: mol_type = other DNA
taagaataataatgaggctttggctttgctggaaatgccgttccaaaaacccattactttatgatgccaactattttctt

SEQ ID NO: 52239 - DNA, 80 bp, synthetic construct
  source 1..80: mol_type = other DNA
gcaacaatccatgagcagtgctgactcaactcaggcctaaactcatgcagaccacacaaggcagatgggctatataaacg

SEQ ID NO: 52240 - DNA, 80 bp, synthetic construct
  source 1..80: mol_type = other DNA
ccaacaaatagagttgaagtttaatccacctgctctacaagatgcttattacagagcaagggctggtgaagctgataact

SEQ ID NO: 52241 - DNA, 80 bp, synthetic construct
  source 1..80: mol_type = other DNA
aaaacagttacacaacaaccataaaaccagttacttataaattggatggtgttgtttgtacagaaattgaccctaagttg

SEQ ID NO: 52242 - DNA, 80 bp, synthetic construct
  source 1..80: mol_type = other DNA
aacatgctgattttgacacatggtttagccagcgtggtggtagttatactaatgacaaagcttgcccattgattgctgca

SEQ ID NO: 52243 - DNA, 80 bp, synthetic construct
  source 1..80: mol_type = other DNA
tttcttacctagagtttttagtgcagttggtaacttctgttacacaccatcaaaacttatagagtacactgacttttgca

SEQ ID NO: 52244 - DNA, 80 bp, synthetic construct
  source 1..80: mol_type = other DNA
actattccttatgtcattcactgtactctgtttaacaccagtttactcattcttacctggtgtttattctgttatttact

SEQ ID NO: 52245 - DNA, 80 bp, synthetic construct
  source 1..80: mol_type = other DNA
aatttaagcactttacttcgtctagtccatgttgattctttttcttgtaataatcttgatgaatctaagatatatggtag

SEQ ID NO: 52246 - DNA, 80 bp, synthetic construct
  source 1..80: mol_type = other DNA
attttaaatggtatcaatagtggtaccacttgttctaatgatttattgcagcccaatactgaagtttttactgatgtttg

SEQ ID NO: 52247 - DNA, 80 bp, synthetic construct
  source 1..80: mol_type = other DNA
caaggtcaaactttcagatgtaggttttgttgaagcttataataattgcactggtggtagtgaaattagagatcttctct

SEQ ID NO: 52248 - DNA, 80 bp, synthetic construct
  source 1..80: mol_type = other DNA
agactgtttgtttaaggactgggaggagttggggttaatcattaggaggctgtaggcataaattggtctgcgcaccagct

SEQ ID NO: 52249 - DNA, 80 bp, synthetic construct
  source 1..80: mol_type = other DNA
tgttttgaataatatttctttaactacgcagccatattttgatagttatcttggttgtgttttgaatgctgttaatttaa

SEQ ID NO: 52250 - DNA, 80 bp, synthetic construct
  source 1..80: mol_type = other DNA
ttctgcctatgtttataatagaggtagacagttgtataagtcttatagtgaacatgtcataccttctactttagatgatt

SEQ ID NO: 52251 - DNA, 80 bp, synthetic construct
  source 1..80: mol_type = other DNA
attaaggctaatattaaaagtgatattttatcacttaacaatcctattggtactaatcattctcaggacgtttatttcac

SEQ ID NO: 52252 - DNA, 80 bp, synthetic construct
  source 1..80: mol_type = other DNA
aattttttctactggttttgttttatccatacctactaaagccctttgctttaataaatctaaacaatttgtacccgtgc

SEQ ID NO: 52253 - DNA, 80 bp, synthetic construct
  source 1..80: mol_type = other DNA
aggttgttgattctaggtggaacaatcttcgtgcatcggatacttctttatccgatgcatgtcagttgccttattgttat

SEQ ID NO: 52254 - DNA, 80 bp, synthetic construct
  source 1..80: mol_type = other DNA
tataataaaaccattccgcgtataagcgaggatggtgttgatgtatctcttggtttgggcacatattatgttcttaatcg

SEQ ID NO: 52255 - DNA, 80 bp, synthetic construct
  source 1..80: mol_type = other DNA
tgtttatttaaatactaccttgttatttacaggttattttcctaaatctggtgctaattttacagacttggctttaaagg

SEQ ID NO: 52256 - DNA, 80 bp, synthetic construct
  source 1..80: mol_type = other DNA
tccaaagactgacaaagaaactttagaatattgggttacaccgctatctagacgtcagtatcttctcaattttgatgagc

SEQ ID NO: 52257 - DNA, 80 bp, synthetic construct
  source 1..80: mol_type = other DNA
acggtgttattactaaagccgttgattgttcaagtagttttcttagtgagattcaatgtaaaactcaatcttttgcacct

SEQ ID NO: 52258 - DNA, 80 bp, synthetic construct
  source 1..80: mol_type = other DNA
ttgctttaatagtattactgttgacaagtttgctatacctaatcgtagacgagatgatttgcaattgggcagttctggct

SEQ ID NO: 52259 - DNA, 80 bp, synthetic construct
  source 1..80: mol_type = other DNA
ttttgcaatcatctaattacaaaatagatactacttctagttcttgtcaattgtattatagtttgcctgcaattaatgtt

SEQ ID NO: 52260 - DNA, 80 bp, synthetic construct
  source 1..80: mol_type = other DNA
ataaaccaccttctgcttcctgtcctattggtactaaatatcgtcattgcgacttggatactactctttatgttaaaaac

SEQ ID NO: 52261 - DNA, 80 bp, synthetic construct
  source 1..80: mol_type = other DNA
tggtgtagatgttcttgtctacctgaccccatttctacttattctcctaacacatgtcctcaaaagaaggtcgttgttgg

SEQ ID NO: 52262 - DNA, 80 bp, synthetic construct
  source 1..80: mol_type = other DNA
tataggtgaacattgtccaggtcttggtattaatgaggaaaaatgtggtacacaattaaatcatagttcctgttcttgta

SEQ ID NO: 52263 - DNA, 80 bp, synthetic construct
  source 1..80: mol_type = other DNA
tattctggtagagtgtctgctgcattttataaaaattcttcctcaccagctttgctttatcgtaatttaaagtgtagtta

SEQ ID NO: 52264 - DNA, 80 bp, synthetic construct
  source 1..80: mol_type = other DNA
tgttttgaataatatttcttttatctcacaaccattttattttgatagttatcttggttgtgttttgaatgctgttaatt

SEQ ID NO: 52265 - DNA, 80 bp, synthetic construct
  source 1..80: mol_type = other DNA
ctagctattctgtatcctcttgtgatttgcgtatgggtagtgggttttgtattgattatgctttaccctcttctcggcgt

SEQ ID NO: 52266 - DNA, 80 bp, synthetic construct
  source 1..80: mol_type = other DNA
ttctaggttgtttaggttcacaatgtggttcttcgtctagatctttgttagaggatttattattcaacaaggtcaaactt

SEQ ID NO: 52267 - DNA, 80 bp, synthetic construct
  source 1..80: mol_type = other DNA
tcagatgtaggttttgttgaagcttataataattgcactggtggtagtgaaattagagatcttctctgtgtgcaatcttt

SEQ ID NO: 52268 - DNA, 80 bp, synthetic construct
  source 1..80: mol_type = other DNA
tcattaatggtcgtttgactgctttaaatgcttatgtttctcaacagcttagtgatattacacttattaaggctggagct

SEQ ID NO: 52269 - DNA, 80 bp, synthetic construct
  source 1..80: mol_type = other DNA
tctcgtgctattgagaaggttaatgagtgtgttaaaagtcaatcccctcgtataaatttttgtggcaatggtaaccacat

SEQ ID NO: 52270 - DNA, 80 bp, synthetic construct
  source 1..80: mol_type = other DNA
atgtatgttaaatggccttggtacatttggttgttaattgtcatttcatttataatttttcttatgatacttttctttat

SEQ ID NO: 52271 - DNA, 80 bp, synthetic construct
  source 1..80: mol_type = other DNA
atgctgctgtactggttgcggttcagcatgttttagtaaatgtcataattgttgtgatgagtatgggggtcacaatgatt

SEQ ID NO: 52272 - DNA, 80 bp, synthetic construct
  source 1..80: mol_type = other DNA
ttgttattaaagcatctcatgatgattagtcattaaatctaaactttatataatctaaactttatatatggaagtttgga

SEQ ID NO: 52273 - DNA, 80 bp, synthetic construct
  source 1..80: mol_type = other DNA
ggcctagctataaatattctcttattactagagaatttggtgtcacagatctcgaggatttgtgttttaaatataattat

SEQ ID NO: 52274 - DNA, 80 bp, synthetic construct
  source 1..80: mol_type = other DNA
gggaagagctagcaattatagtatttaatatatatattagtatatgattgaaattaattatagccttttggaggaattac

SEQ ID NO: 52275 - DNA, 80 bp, synthetic construct
  source 1..80: mol_type = other DNA
ttaggttgttctctttatttagtaccgctttgcctttttaaatctaactttagtcagtactattataacatagatactgg

SEQ ID NO: 52276 - DNA, 80 bp, synthetic construct
  source 1..80: mol_type = other DNA
gttctacatatttgagtactctctggtatcagaaaccctttttatctgattttaataatggtattttttctaaggttaag

SEQ ID NO: 52277 - DNA, 80 bp, synthetic construct
  source 1..80: mol_type = other DNA
tcagggtgttctttgtatttagtacctctttgtctttttaaatctaactttagtcagtactattataatatggatactgg

SEQ ID NO: 52278 - DNA, 80 bp, synthetic construct
  source 1..80: mol_type = other DNA
gtttttaattatttttattttgcctacaacactagctgttataggtgattttaattgtactaactcttttattaatcatt

SEQ ID NO: 52279 - DNA, 80 bp, synthetic construct
  source 1..80: mol_type = other DNA
tcgcgtcgtaaacgtagaggtatttcttctccttatcgctttgtaacttttgaaccctttaatgttagttttgttaacga

SEQ ID NO: 52280 - DNA, 80 bp, synthetic construct
  source 1..80: mol_type = other DNA
aggctgtttctaaattagttgaatcagcatctgattttatcgcttggcgagctgaagcacttaataagtatggttgatgt

SEQ ID NO: 52281 - DNA, 80 bp, synthetic construct
  source 1..80: mol_type = other DNA
gtttataatagaggtagacagttgtataagtcttatagtgaacatgtcataccttctactttagatgatttaatttaaat

SEQ ID NO: 52282 - DNA, 80 bp, synthetic construct
  source 1..80: mol_type = other DNA
tacacaccacagttccgcgtataagcgaggatgttgttgatgtatctcttggtttgggcacatattatgttcttaaccgt

SEQ ID NO: 52283 - DNA, 80 bp, synthetic construct
  source 1..80: mol_type = other DNA
cttgtagtcctgatgcctttttgggttggtcttttgatagttgtattagtaataatcgttgcaatattttttctaatttt

SEQ ID NO: 52284 - DNA, 80 bp, synthetic construct
  source 1..80: mol_type = other DNA
tggtggctccagttcaggaacagtgagccctgctcagaatactgtctctgccatatcgtcaatcttatcgaagactgggg

SEQ ID NO: 52285 - DNA, 80 bp, synthetic construct
  source 1..80: mol_type = other DNA
gaggttagtcttccaaacctcgagaaggcatggggacaaatctttgggacctcaacccgcacaaggacaactggccggac

SEQ ID NO: 52286 - DNA, 80 bp, synthetic construct
  source 1..80: mol_type = other DNA
gccacccaggtgggagtgggagcattcgggtcagggttcacccctccacatggtggactgttggtgtgaagccctcaggc

SEQ ID NO: 52287 - DNA, 80 bp, synthetic construct
  source 1..80: mol_type = other DNA
ggctctgcaagaccccaaagtcaggggtctgtattttcctgctggtggctccagttcaggaacagtaaaccctgctccga

SEQ ID NO: 52288 - DNA, 80 bp, synthetic construct
  source 1..80: mol_type = other DNA
agactgtttatttaaagactgggaggagttgggggaggagattatgggaggctgtaggcataaattggtcggttcaccag

SEQ ID NO: 52289 - DNA, 80 bp, synthetic construct
  source 1..80: mol_type = other DNA
aattcaaacaatccagattgggacttcaaccccaacaaggatcaatggccagcagcaaaccaggtaggagcgggagcatt

SEQ ID NO: 52290 - DNA, 80 bp, synthetic construct
  source 1..80: mol_type = other DNA
tccttctattcgagatctcctcgacaccgcctcagctctgtatcgggaggcctttcttgagtatttggtgtcttttggag

SEQ ID NO: 52291 - DNA, 80 bp, synthetic construct
  source 1..80: mol_type = other DNA
tgtggattcgcacccctcctgcttacagaccaccaaatgcccctatcttatcaacacttccggaaactactgttgttaga

SEQ ID NO: 52292 - DNA, 80 bp, synthetic construct
  source 1..80: mol_type = other DNA
gaagttgttcttccaaacctcgagaagacatgggcaactgtgccagcagctcctcctcctgcctccaccaatcggcagtc

SEQ ID NO: 52293 - DNA, 80 bp, synthetic construct
  source 1..80: mol_type = other DNA
gcaaacaccgcaaatccagattgggacttcaatcccaacaaggacacctggccagacgccaacaaggccatgcagtggaa

SEQ ID NO: 52294 - DNA, 80 bp, synthetic construct
  source 1..80: mol_type = other DNA
aatccagattgggacttcaatcccaacaaggacacctggccagacgccaacaaggccatgcagtggaactccacaacctt

SEQ ID NO: 52295 - DNA, 80 bp, synthetic construct
  source 1..80: mol_type = other DNA
ccaacaaggccatgcagtggaactccacaaccttccaccaaactctgcaagatcccagggtgagaggcctgtatttccct

SEQ ID NO: 52296 - DNA, 80 bp, synthetic construct
  source 1..80: mol_type = other DNA
tgctttattaaagtgtgtagctgtagagagaatgttaaagactgtcacctctgcgtgattgcaagtgaacagtgcccccc

SEQ ID NO: 52297 - DNA, 80 bp, synthetic construct
  source 1..80: mol_type = other DNA
ccctatttggaatgataatgctcacggagtaggatctatcccgatgcacacagaccttgaattagatttttccctgacat

SEQ ID NO: 52298 - DNA, 80 bp, synthetic construct
  source 1..80: mol_type = other DNA
aatctaaagacctcctttcattgttatggtgcatgtacaaaatatgaatacccatggcatactgccaagtgtcactatga

SEQ ID NO: 52299 - DNA, 80 bp, synthetic construct
  source 1..80: mol_type = other DNA
ccctacatggaatgataatgcccacggggttgggtccatacccatgcacacagatttagagctagacttttctctaacat

SEQ ID NO: 52300 - DNA, 80 bp, synthetic construct
  source 1..80: mol_type = other DNA
tcctgtatggaacgataatgcccatggggtgggttctataccaatgcatacagacttagagttggacttttccttgacat

SEQ ID NO: 52301 - DNA, 80 bp, synthetic construct
  source 1..80: mol_type = other DNA
aatcttaagacgtcttttcactgttacggtgcatgcacaaagtaggagtatccttggcatactgcgaaatgccattatga

SEQ ID NO: 52302 - DNA, 80 bp, synthetic construct
  source 1..80: mol_type = other DNA
aatctcaagacatcctttcactgttacggtgcatgcaccaagtatgagtacccatggcatactgcaaaatgccactatga

SEQ ID NO: 52303 - DNA, 80 bp, synthetic construct
  source 1..80: mol_type = other DNA
tcctgtttggaatgacaatgcccatggtgttggttctgtgcctatgcacacagatctggagcttgatttttctctgacat

SEQ ID NO: 52304 - DNA, 80 bp, synthetic construct
  source 1..80: mol_type = other DNA
tcctgtatggaatgataatgcccatggggtaggttctgttcctatgcatacagatttagaacttgatttctccttaacat

SEQ ID NO: 52305 - DNA, 80 bp, synthetic construct
  source 1..80: mol_type = other DNA
aacctcaaaacatcctttcactgttatggtgcttgtacaaagtatgaatacccctggcatactgcaaagtgccactatga

SEQ ID NO: 52306 - DNA, 80 bp, synthetic construct
  source 1..80: mol_type = other DNA
tcctgtatggaatgataatgcccatggagtagggtcagttccaatgcatacagacttagagctggacttttccttgacat

SEQ ID NO: 52307 - DNA, 80 bp, synthetic construct
  source 1..80: mol_type = other DNA
ccctgtatggaatgacaacgcccatggagtaggttctgtaccgatgcacacagacttagagctggatttttctttaacat

SEQ ID NO: 52308 - DNA, 80 bp, synthetic construct
  source 1..80: mol_type = other DNA
aatcttaagacatcctttcactgctatggtgcttgtacaaaatatgaatatccatggcatacagcaaagtgtcactatga

SEQ ID NO: 52309 - DNA, 80 bp, synthetic construct
  source 1..80: mol_type = other DNA
aatctgaagacctcatttcattgttatggtgcatgcacaaaatatcaatatccatggcacaccgcaaaatgccattttga

SEQ ID NO: 52310 - DNA, 80 bp, synthetic construct
  source 1..80: mol_type = other DNA
agctccaaattagtgtttgaaatggagggcaatgctcgccccgaggggcagaaccccgagcgcacaaatgtgccactggc

SEQ ID NO: 52311 - DNA, 80 bp, synthetic construct
  source 1..80: mol_type = other DNA
gcgttgaactggcagccgcaaccggagcaatcaccagcaatgttcccagttgcatcagggagtgtttcgccagtgtcact

SEQ ID NO: 52312 - DNA, 80 bp, synthetic construct
  source 1..80: mol_type = other DNA
agtgtttcgccagtgtcactacgctcccctggaccacgcgccaagcggccaacacgttcttgggtgcaatccaccttggt

SEQ ID NO: 52313 - DNA, 80 bp, synthetic construct
  source 1..80: mol_type = other DNA
ctccccacaggacaccattggcccaagtgctgcgctattgctcccaactcaaattgaaactccaaatgccactgcacagc

SEQ ID NO: 52314 - DNA, 80 bp, synthetic construct
  source 1..80: mol_type = other DNA
ccactctggacagataatgctcatggcgttgggagtgttcctatgcatacagatcttgaattagactttactttgccatc

SEQ ID NO: 52315 - DNA, 80 bp, synthetic construct
  source 1..80: mol_type = other DNA
atctaaaaacctcatttcattgctatggtgcctgcacaaaataccaatatccttggcacactgcaaaatgccattttgag

SEQ ID NO: 52316 - DNA, 80 bp, synthetic construct
  source 1..80: mol_type = other DNA
aactttaatacatccttccactgttatggtgcctgtacaaagtatgagtacccatggcatactgcaaagtgtcactatga

SEQ ID NO: 52317 - DNA, 80 bp, synthetic construct
  source 1..80: mol_type = other DNA
ttgcttggaacgacaggatgcccacgggaacttttcttggatctatatcgcttcatcccaacataaacccgtacacttct

SEQ ID NO: 52318 - DNA, 80 bp, synthetic construct
  source 1..80: mol_type = other DNA
tcctatatggaatgataatgcacacggagtgggttctgtaccaatgcatacagatctggagcttgacttctcattgacat

SEQ ID NO: 52319 - DNA, 80 bp, synthetic construct
  source 1..80: mol_type = other DNA
cttttgcttggaatgatagaatgcccacaggaacttatcttggatctgtttcactccatcccaacattaacccgtacacc

SEQ ID NO: 52320 - DNA, 80 bp, synthetic construct
  source 1..80: mol_type = other DNA
tgggctgcctgacgatcgtttaaaaaattgtgtaattgatgctctcagaaatgtttacaaaacagacttttatatgtcta

SEQ ID NO: 52321 - DNA, 80 bp, synthetic construct
  source 1..80: mol_type = other DNA
taacaaaagctctgaaatcttcttcataccgccgcagctctatatcgggatgcgttagagtctcctgagcattgttcacc

SEQ ID NO: 52322 - DNA, 80 bp, synthetic construct
  source 1..80: mol_type = other DNA
gttttttgccgcctgacttctttccttctattcgagatctcctcgacaccgcctctgctctgtatcgggaggccttagag

SEQ ID NO: 52323 - DNA, 80 bp, synthetic construct
  source 1..80: mol_type = other DNA
cagaactttgattttaacgaacttaaataaaagccctgttgtttagcgtattgttgcacttgtctggtgggattgtggca

SEQ ID NO: 52324 - DNA, 80 bp, synthetic construct
  source 1..80: mol_type = other DNA
atatccctcgcttaactacgctggggctttgtgggacattacagttataaacaatgtggacaatgaaattgttaagtctt

SEQ ID NO: 52325 - DNA, 80 bp, synthetic construct
  source 1..80: mol_type = other DNA
gtggggcatcatatacagctaatgatgtcgaagtccaatcatctggcatgattaagccaaatgctcttttttgtgctact

SEQ ID NO: 52326 - DNA, 80 bp, synthetic construct
  source 1..80: mol_type = other DNA
gagtccggggttctattgtaaatgcccgaatagaaccctgttcaagtggtttgtccactgatgtcgtctttagggcattt

SEQ ID NO: 52327 - DNA, 80 bp, synthetic construct
  source 1..80: mol_type = other DNA
aagggggctgcgtggcctattgttagacgacgtatagtgcaaatgttgtcagacactttagacaaattgtctgattactg

SEQ ID NO: 52328 - DNA, 80 bp, synthetic construct
  source 1..80: mol_type = other DNA
tatgtctacaaccctttctttgtcgatgttcaacagtggggttatgtaggcaatcttgctactaatcacgatcgttattg

SEQ ID NO: 52329 - DNA, 80 bp, synthetic construct
  source 1..80: mol_type = other DNA
tacagcttgtaatttagggggcgctgtttgtaggaagcatgctacagagtacagagagtatatggaagcatataatcttg

SEQ ID NO: 52330 - DNA, 80 bp, synthetic construct
  source 1..80: mol_type = other DNA
ggtttcgtccggtgcgtggcaattcggggcacatcatgtctttcgtggctggtgtgaccgcgcaaggtgcgcgcggtacg

SEQ ID NO: 52331 - DNA, 80 bp, synthetic construct
  source 1..80: mol_type = other DNA
tatttattagaaacttcgatcagcgttgcagctgttctcgttgtttttatttgcactcttccacttatatagagtgcact

SEQ ID NO: 52332 - DNA, 80 bp, synthetic construct
  source 1..80: mol_type = other DNA
agtgtaactgctgttgtaaccaatggccacctcaaaatggctggcatgcatttcggtgcttgtgactacgacagacttcc

SEQ ID NO: 52333 - DNA, 80 bp, synthetic construct
  source 1..80: mol_type = other DNA
accgtggccaaacccaatgtgctgattgctttaaaaatggtgaagcggcaaagctatggaactaattccggcgttgccat

SEQ ID NO: 52334 - DNA, 80 bp, synthetic construct
  source 1..80: mol_type = other DNA
actggctcccaggtggtacttctactacactggaactggacccgaagcagcactcccattccgggctgttaaggatggca

SEQ ID NO: 52335 - DNA, 80 bp, synthetic construct
  source 1..80: mol_type = other DNA
tcgcgcccggtactaagcttcctaaaaacttccacattgaggggactggaggcaatagtcaatcatcttcaagagcctct

SEQ ID NO: 52336 - DNA, 80 bp, synthetic construct
  source 1..80: mol_type = other DNA
tcagcgcactcgcacccgtccaagtgttcagcctggtccaatgattgatgttaacactgattagtgttactcaaagtaac

SEQ ID NO: 52337 - DNA, 80 bp, synthetic construct
  source 1..80: mol_type = other DNA
tgctatggggagtctgtgttagttaatgctgctaacacacatcttaagcatggcggtggtatcgctggtgctattaatgc

SEQ ID NO: 52338 - DNA, 80 bp, synthetic construct
  source 1..80: mol_type = other DNA
gatgcctctcggttacttcataccgtgcttgcaaaggctgagttatgctgttctgcacgcatggtttggagagagtggtg

SEQ ID NO: 52339 - DNA, 80 bp, synthetic construct
  source 1..80: mol_type = other DNA
tggggaataccttcatctgtgaagaagtcgcaaatgacctcactaccgccctacgcaggcctattaacgctacggataga

SEQ ID NO: 52340 - DNA, 80 bp, synthetic construct
  source 1..80: mol_type = other DNA
gcctggggcttttgcgtacagtcagatgaggcctcatgttcgttacgacttgtatgatggtaacatgtttattaaatttc

SEQ ID NO: 52341 - DNA, 80 bp, synthetic construct
  source 1..80: mol_type = other DNA
aagcggacgtcgcagcacgtgctgatgacgaaggcttcatcacattaaagaacaatctatatagattggtttggcatgtt

SEQ ID NO: 52342 - DNA, 80 bp, synthetic construct
  source 1..80: mol_type = other DNA
cacgatttttggggttgtttaacaagtataagtacttctctggtgctatggaaacagccgcttatcgtgaagctgcagca

SEQ ID NO: 52343 - DNA, 80 bp, synthetic construct
  source 1..80: mol_type = other DNA
ctctggcgtgttgcaaagcggtttggtgaaaatgtcacatcccagtggagatgttgaggcttgtatggttcaggttacct

SEQ ID NO: 52344 - DNA, 80 bp, synthetic construct
  source 1..80: mol_type = other DNA
tctgtgccttctcatctgccggaccgtgtgctcttctttttcacctctgcctaatcaaaaggctctgagccctgagccag

SEQ ID NO: 52345 - DNA, 80 bp, synthetic construct
  source 1..80: mol_type = other DNA
tcatctgccggaccgtgtgctcttctttttcacctctgcctaatcaaaaggctctgagccctgagccagcaccatgcaac

SEQ ID NO: 52346 - DNA, 80 bp, synthetic construct
  source 1..80: mol_type = other DNA
aactcatgatggtcctctcagttaattaacgaactctatggattacgtgtctctgcttaatcaaatttggcagaagtacc

SEQ ID NO: 52347 - DNA, 80 bp, synthetic construct
  source 1..80: mol_type = other DNA
tcttgttcttaatgcatcagagatctactgtgctaacatacatagatttaaacacggcaatccctactattaaggattgg

SEQ ID NO: 52348 - DNA, 80 bp, synthetic construct
  source 1..80: mol_type = other DNA
tacatcatccaggatttttaaacccgtccagctagtcccagtttctcctgcatttcatcgcattgagtctactgactcta

SEQ ID NO: 52349 - DNA, 80 bp, synthetic construct
  source 1..80: mol_type = other DNA
caccagttggaccctgcgttcggagccaactcaaacaatccacctctaagagacagtcatcctcaggccatgcagtggaa

SEQ ID NO: 52350 - DNA, 80 bp, synthetic construct
  source 1..80: mol_type = other DNA
gaggcatggggacgaatctttctgttcccaatcctctgggattctttcccgatcaccagttggacccggcgttcggagcc

SEQ ID NO: 52351 - DNA, 80 bp, synthetic construct
  source 1..80: mol_type = other DNA
atctcacttcccctcgttctcttgcagaactttgattttaacgaacttaaataaaagccctgttgtttagcgtattgttg

SEQ ID NO: 52352 - DNA, 80 bp, synthetic construct
  source 1..80: mol_type = other DNA
gacccagcatccagggaattagcttacagaccaccaaatgcccctatcttatcaacacttccggaaactactgttgttag

SEQ ID NO: 52353 - DNA, 80 bp, synthetic construct
  source 1..80: mol_type = other DNA
ccccccgggaagagctctacagtgtgaaatgtaaataaaaatagctattattcaattagattaggctaattagatgattt

SEQ ID NO: 52354 - DNA, 80 bp, synthetic construct
  source 1..80: mol_type = other DNA
ctctacagtgtgaaatgtaaataaaaatagctattattcaattagattaggctaattagatgatttgcaaaaaaaaaaaa

SEQ ID NO: 52355 - DNA, 80 bp, synthetic construct
  source 1..80: mol_type = other DNA
aactcatgatgattttactagtgtgaatctttttgacgttggttacccagttaattaacgaactctatggattacgtgtc

SEQ ID NO: 52356 - DNA, 80 bp, synthetic construct
  source 1..80: mol_type = other DNA
ccagtgatttaggtagtctcattgattgtaatgcggcttcagttaaccaaattgtcttgcgtaatggtgcttgtatttgg

SEQ ID NO: 52357 - DNA, 80 bp, synthetic construct
  source 1..80: mol_type = other DNA
caccaagctctgctagatcccagagtgaggggcctatattttcctgctggtggctccagttccggaacagtaaaccctgt

SEQ ID NO: 52358 - DNA, 80 bp, synthetic construct
  source 1..80: mol_type = other DNA
aatgctggcattctatataagagagaaaccacacgtagcgcctcattttgcgggtcaccatattcttgggaacaagagct

SEQ ID NO: 52359 - DNA, 80 bp, synthetic construct
  source 1..80: mol_type = other DNA
cgttcggagccaactcaaacaatccagattgggacttcaaccccaacaaggttcactggccaaaggcaaatcaggccatg

SEQ ID NO: 52360 - DNA, 80 bp, synthetic construct
  source 1..80: mol_type = other DNA
aggattcctaggacccctgctcgtgttacaggcggggtttttcttgttgacaaaaatcctcaggggaccacatctggact

SEQ ID NO: 52361 - DNA, 80 bp, synthetic construct
  source 1..80: mol_type = other DNA
accaaggtatgttgcccgtttgtcctctacttccaggaacatcaactaccagcacgggaccatgcaagacatgcacgact

SEQ ID NO: 52362 - DNA, 80 bp, synthetic construct
  source 1..80: mol_type = other DNA
gagccaactcaaacaatccagattgggacttcaaccccaacaaggatcactggccagaggcatcccaggccgcagtggaa

SEQ ID NO: 52363 - DNA, 80 bp, synthetic construct
  source 1..80: mol_type = other DNA
accatacagcactcagagtgtggattcgcactcctcctgcttacagaccaccaaatgcacctatcttatcaacacttccg

SEQ ID NO: 52364 - DNA, 80 bp, synthetic construct
  source 1..80: mol_type = other DNA
aacctcccccatagttatgaagagtaacctgaaatgccactattgtggaaataggataattaaccgtgtttatttattgc

SEQ ID NO: 52365 - DNA, 80 bp, synthetic construct
  source 1..80: mol_type = other DNA
aattaattatagccttttggaggaattaacctaagcgtaaaagaggtgttaaacaataacctgaatcgtttgactctctt

SEQ ID NO: 52366 - DNA, 80 bp, synthetic construct
  source 1..80: mol_type = other DNA
aatttaagtgctgatactcagcacatttcaaatgattttactcctgaggatcatagtttacttgctactcttgatgatcc

SEQ ID NO: 52367 - DNA, 80 bp, synthetic construct
  source 1..80: mol_type = other DNA
atatgatgtttgagcgattgacgttcgtaccgtctatcagcttacgatctcttgtcagatctcattaaatctaaactttt

SEQ ID NO: 52368 - DNA, 80 bp, synthetic construct
  source 1..80: mol_type = other DNA
ccgaatggcagactccttcttttcctaagattcatttacatgaggatattgttaataggtgtcaacaatttgtgggccct

SEQ ID NO: 52369 - DNA, 80 bp, synthetic construct
  source 1..80: mol_type = other DNA
gatccagcatccagggacctagtagtcagttatgttatcttatcaacaactccggagaatactgttgttagacgaagagg

SEQ ID NO: 52370 - DNA, 80 bp, synthetic construct
  source 1..80: mol_type = other DNA
tataaagaatttggagctaccgtggagttactctcgtttttgcctgttgatttctttccttcaatacgagatcttctgga

SEQ ID NO: 52371 - DNA, 80 bp, synthetic construct
  source 1..80: mol_type = other DNA
tataaagaatttggagcttctgtggagttactctcgtttttgcctactgacttctttccttcagtacgtgatcttctaga

SEQ ID NO: 52372 - DNA, 80 bp, synthetic construct
  source 1..80: mol_type = other DNA
actctctgtaatgtcaacgaccgaccttgaggcatacttcaaagactgtttgttcaaagactgggaggagttgggggagg

SEQ ID NO: 52373 - DNA, 80 bp, synthetic construct
  source 1..80: mol_type = other DNA
attccactgccttccaccaagctcctgctggtggctccagttcaggaacagtaaaccctgctccgaatattgcctctcac

SEQ ID NO: 52374 - DNA, 80 bp, synthetic construct
  source 1..80: mol_type = other DNA
actctgcaagatcccagagtgagaggcctatatttccctgctggtggctccagttcaggaacagtaaaccctgttccgac

SEQ ID NO: 52375 - DNA, 80 bp, synthetic construct
  source 1..80: mol_type = other DNA
aatccagattgggacttcaatcccaacaaggacacctggctagccgccaacaaggtaggagcacaaaccttgccaacaaa

SEQ ID NO: 52376 - DNA, 80 bp, synthetic construct
  source 1..80: mol_type = other DNA
ccaacaaggacacctggctagccgccaacaaggtaggagcacaaaccttgccaacaaatccgcctcctgcctccaccaat

SEQ ID NO: 52377 - DNA, 80 bp, synthetic construct
  source 1..80: mol_type = other DNA
atcagatcctgcccaaggtcttacataagaggactcttggactcccatacatgacaggaatccttttggggcatggacat

SEQ ID NO: 52378 - DNA, 80 bp, synthetic construct
  source 1..80: mol_type = other DNA
ccagttggacccggcgttccgagcagtcagggagacagcctactcccatctctccacctctaagagacagtcatcctcag

SEQ ID NO: 52379 - DNA, 80 bp, synthetic construct
  source 1..80: mol_type = other DNA
cgttccgagcagtcagggagacagcctactcccatctctccacctctaagagacagtcatcctcaggccatgcagtggaa

SEQ ID NO: 52380 - DNA, 80 bp, synthetic construct
  source 1..80: mol_type = other DNA
aaatataacgctgttgaaaggaaattagtaaaatatgcaaaaggtaagccgctagaggcagatttgacggtgaatgaatt

SEQ ID NO: 52381 - DNA, 80 bp, synthetic construct
  source 1..80: mol_type = other DNA
acaattacgcagtattgcagttcaatacagaagtgactaaacaaatggttcaagatgtatcaaacgacgtgagagagacg

SEQ ID NO: 52382 - DNA, 80 bp, synthetic construct
  source 1..80: mol_type = other DNA
ccagattgggacttcaaccccaacaaggatcactggccagaggcgaatcaggtaggacatcctcaggccatgcagtggaa

SEQ ID NO: 52383 - DNA, 80 bp, synthetic construct
  source 1..80: mol_type = other DNA
aagccaactcagaaaatccagattgggacctcaatccgcacaaggacaactggccgaacgccagcaaggccatgcagtgg

SEQ ID NO: 52384 - DNA, 80 bp, synthetic construct
  source 1..80: mol_type = other DNA
cgggaacctgcccaaggtcttgcataagaggactcttggactttcagcaatgtcaacgaccgaccttggtcttgcataag

SEQ ID NO: 52385 - DNA, 80 bp, synthetic construct
  source 1..80: mol_type = other DNA
agactgtgtgtttactgagtgggaggagttgggtctttgtactaggaggctgtaggcataaattggtgtgttcaccagca

SEQ ID NO: 52386 - DNA, 80 bp, synthetic construct
  source 1..80: mol_type = other DNA
tccttctattcgagatctcctcgacaccgcctctgcctgtcttacttttgggagagaaactgttcttgaatatttggtgt

SEQ ID NO: 52387 - DNA, 80 bp, synthetic construct
  source 1..80: mol_type = other DNA
gccaattcaaacaatccagattgggacttcaaccccaacaaggacccttggccagaggcctggcaggccatgcagtggaa

SEQ ID NO: 52388 - DNA, 80 bp, synthetic construct
  source 1..80: mol_type = other DNA
accatacagcattacggcaggctattctgtgttgggtgtggattcgcactcctcccgcttacaggccatcaaatgcccct

SEQ ID NO: 52389 - DNA, 80 bp, synthetic construct
  source 1..80: mol_type = other DNA
aacaattcctcctcctgcctccaccaatcggcagtcccaccaagctctgcaggatcccagagtcaggggtctgtattttc

SEQ ID NO: 52390 - DNA, 80 bp, synthetic construct
  source 1..80: mol_type = other DNA
ggaagagagactgtacttgaatatttggtctctttcggagtgtggattcgcactcctccagcctatagaccaccaaatgc

SEQ ID NO: 52391 - DNA, 80 bp, synthetic construct
  source 1..80: mol_type = other DNA
ccaactcaaacaatccagattgggacttcaaccccaacaaggatcactggccagaggcaaatcaggtccatgcagtggaa

SEQ ID NO: 52392 - DNA, 80 bp, synthetic construct
  source 1..80: mol_type = other DNA
gaatatagcgatgtcatagagaatgccacactgttgtcaatattatcgtactcttacgataaatataacgctgttgaaag

SEQ ID NO: 52393 - DNA, 80 bp, synthetic construct
  source 1..80: mol_type = other DNA
ccattaaaaatggctcatggataagtttattctgtaactacccaaaatcagaaatgataaaattacggaagaaaatgtgg

SEQ ID NO: 52394 - DNA, 80 bp, synthetic construct
  source 1..80: mol_type = other DNA
tcccgtcagttcgggacctactcgacaccgcgtgagttaatgactttggcttcctgggtgggcaataatttggaagatcc

SEQ ID NO: 52395 - DNA, 80 bp, synthetic construct
  source 1..80: mol_type = other DNA
ttacaacattgccagcaaatccgcctcctgctcccaccaatcggcggtccgggagaaagccaaccccagtctctccacct

SEQ ID NO: 52396 - DNA, 80 bp, synthetic construct
  source 1..80: mol_type = other DNA
agactgtttgtttaaagactggttaatcattacattactgggtaatcattaggaggttaatcattaggaggctgtaggca

SEQ ID NO: 52397 - DNA, 80 bp, synthetic construct
  source 1..80: mol_type = other DNA
cctggccagacgccaacaaggtaggagctggagcattcgggctggggcaaatccgcctcctgcctctaccaatcgccagt

SEQ ID NO: 52398 - DNA, 80 bp, synthetic construct
  source 1..80: mol_type = other DNA
aattggtctgttcaccagcaccatgcaactttttcacctctacaccgcctctgctctgtatcgggaggccttagagtctc

SEQ ID NO: 52399 - DNA, 80 bp, synthetic construct
  source 1..80: mol_type = other DNA
cggaacattgttcacctcaccatacagcactcaggcaagctattctgtgttggggtgagttgatgaatctggccacctgg

SEQ ID NO: 52400 - DNA, 80 bp, synthetic construct
  source 1..80: mol_type = other DNA
ggccagggctcacccctcccactctgcaggatcccagagtcaggggtctgtattttcctgctggtggctccagttcagga

SEQ ID NO: 52401 - DNA, 80 bp, synthetic construct
  source 1..80: mol_type = other DNA
ctcaaacaatccagattgggacttcaaccccatcaaggaccactggccagcagccaaccaggtaggagtgggagcattcg

SEQ ID NO: 52402 - DNA, 80 bp, synthetic construct
  source 1..80: mol_type = other DNA
tccttcagtaagacctcaccacgctgcactcaggcaagccattctttgctgggggaactaatgactctagctacctgggt

SEQ ID NO: 52403 - DNA, 80 bp, synthetic construct
  source 1..80: mol_type = other DNA
tccgtcggctcgagatctcctagacaccgcctctgctttgtttcgggaagccttagagtctcctgaacattgctcagctc

SEQ ID NO: 52404 - DNA, 80 bp, synthetic construct
  source 1..80: mol_type = other DNA
accatactgcactcaggcaagctattttgtgctggggggaagtaacgactctaggtacctgggttggtactaatttacaa

SEQ ID NO: 52405 - DNA, 80 bp, synthetic construct
  source 1..80: mol_type = other DNA
gggaagtaacgactctaggtacctgggtgggtactaatttacaagatcaagcatccagagacctagtagttaactatgtt

SEQ ID NO: 52406 - DNA, 80 bp, synthetic construct
  source 1..80: mol_type = other DNA
gttcagaaaaggcatggggacaaatctttctgtccccaatcctctgggattctttcccgatcaccagttggaccctgcat

SEQ ID NO: 52407 - DNA, 80 bp, synthetic construct
  source 1..80: mol_type = other DNA
gccaagccaatgctcctcctcctgcctccaccaatcggcaggtaggaaggcagcctactcccctttctccacctctaaga

SEQ ID NO: 52408 - DNA, 80 bp, synthetic construct
  source 1..80: mol_type = other DNA
tatattatcctacagaagcatcaactcaaattggagatacggaatggaaggatactctgtcccaattattcttgactaaa

SEQ ID NO: 52409 - DNA, 80 bp, synthetic construct
  source 1..80: mol_type = other DNA
caatggctcccaacaaggggcacgaccaaaaagtccacctcaaagtgttgaccttcctggcacggttggcccgaccacat

SEQ ID NO: 52410 - DNA, 80 bp, synthetic construct
  source 1..80: mol_type = other DNA
atagaatgcccacaggaacttatcttggatctgtttcactccatcccaacattaatccgtacaccggtcacctctccgcc

SEQ ID NO: 52411 - DNA, 80 bp, synthetic construct
  source 1..80: mol_type = other DNA
ccaacgttgttgtggctaatccggaacaacccaatgggcccgcgcagcgcctggaaatggctgttgctactgggtcaatc

SEQ ID NO: 52412 - DNA, 80 bp, synthetic construct
  source 1..80: mol_type = other DNA
acaggatgcccgcgggaacttaccttggatctgtatcgcttcatcccaacattaatccatacactcagcacttgtcagca

SEQ ID NO: 52413 - DNA, 80 bp, synthetic construct
  source 1..80: mol_type = other DNA
ccaacgttgttgtggctaatccggaacaacccaatgggaccgcacaacgcttggagatggctgttgccactggcacgatc

SEQ ID NO: 52414 - DNA, 80 bp, synthetic construct
  source 1..80: mol_type = other DNA
gactccactcaatctgcagctgtgacagcagcctcacttgaaatcctcgcatccttcatgacaccaactccaattgtttc

SEQ ID NO: 52415 - DNA, 80 bp, synthetic construct
  source 1..80: mol_type = other DNA
ccttcaggcatatgaagcacacaatcttccatatagtgacaatgtttttaacattgaaaccattcacacttatggtgatg

SEQ ID NO: 52416 - DNA, 80 bp, synthetic construct
  source 1..80: mol_type = other DNA
accatacagcactcaggcaagctattctgtgttggggtgttggagtgtggattcgcactcctcctgcttacagaccacca

SEQ ID NO: 52417 - DNA, 80 bp, synthetic construct
  source 1..80: mol_type = other DNA
cagaggacatcagccttcttaagaagatggatgagccctttactgaagacacctcagaaatataagagaatgaaccttat

SEQ ID NO: 52418 - DNA, 80 bp, synthetic construct
  source 1..80: mol_type = other DNA
acaatccagattgggacttcaaccccaacaaggatcactggccagaggcaaatcaggtaggagcgggagcattagtggaa

SEQ ID NO: 52419 - DNA, 80 bp, synthetic construct
  source 1..80: mol_type = other DNA
gaaccagcatccagggacctagtagtcagttatgtcaatactaaagagaatactgttgttagacgaaaaggcaggtcccc

SEQ ID NO: 52420 - DNA, 80 bp, synthetic construct
  source 1..80: mol_type = other DNA
taaaagaagaactccctcgcctcgcagacgaagatctcaatcgccgcgtcgcagaagatctcaatttccagcttcccaat

SEQ ID NO: 52421 - DNA, 80 bp, synthetic construct
  source 1..80: mol_type = other DNA
accagttgcatactcagcaagacgagactcagggcatactcacaactgtgccagcagctcctcctcctgcctccaccaat

SEQ ID NO: 52422 - DNA, 80 bp, synthetic construct
  source 1..80: mol_type = other DNA
atcagatcctgcccaaggtcttacataaggggactcttgcccaatgtcttacataagaggactcttggactcccagcaat

SEQ ID NO: 52423 - DNA, 80 bp, synthetic construct
  source 1..80: mol_type = other DNA
caccgtgaacgcccaccaggtcttgcccaaggtcttacataagaggactcttggactctcagcaatgtcaacgaccgacc

SEQ ID NO: 52424 - DNA, 80 bp, synthetic construct
  source 1..80: mol_type = other DNA
accatacagcactaagagaaacggttcttgagtatttggtgtccttcggggtgtggattcgcacaccacccgcatatagg

SEQ ID NO: 52425 - DNA, 80 bp, synthetic construct
  source 1..80: mol_type = other DNA
accatacagcactcagagaaactgtccttgagtatttggtgtcttttggagtgtggattcgcactcctcctgcttacaga

SEQ ID NO: 52426 - DNA, 80 bp, synthetic construct
  source 1..80: mol_type = other DNA
gatttttcatagtggtgtttatattcatttctgctgttaacagctttcagccagggacgtgttgtatcctaggcagtggc

SEQ ID NO: 52427 - DNA, 80 bp, synthetic construct
  source 1..80: mol_type = other DNA
gttgtttagatgtggtacgtaaagagctagaagaaggcgatcttcctgagaatgatgatgatgcttggtttaagctatcg

SEQ ID NO: 52428 - DNA, 80 bp, synthetic construct
  source 1..80: mol_type = other DNA
tataaagaatttggagcttctgtggagttactctcttttttgccttctgacttctttccttctattcgagatctcctcga

SEQ ID NO: 52429 - DNA, 80 bp, synthetic construct
  source 1..80: mol_type = other DNA
actttcagcaatgtcaacgaccgaccttgaggcatacttcaaagactgtgtgtttacggagtgggaggagttgggtgagg

SEQ ID NO: 52430 - DNA, 80 bp, synthetic construct
  source 1..80: mol_type = other DNA
caccgcctctgctctgtatcgggaggccttagagtctccggaacattgttcacctcaccatacagcactaaggcaagcta

SEQ ID NO: 52431 - DNA, 80 bp, synthetic construct
  source 1..80: mol_type = other DNA
cgggggcctggcaggtaggagcaggagcattcgggccagggttcaccccaccacacggcggtcttttggcgtggagccct

SEQ ID NO: 52432 - DNA, 80 bp, synthetic construct
  source 1..80: mol_type = other DNA
actttcaggaaggtcaatcacctggatcgaagaatacatcaaagactgtgtatttaaggactgggaggagctgggggagg

SEQ ID NO: 52433 - DNA, 80 bp, synthetic construct
  source 1..80: mol_type = other DNA
tataaagaatttggagcttctgtggagttactctcatttttgccttctgacttcttcccgtctgtccgggacctactcga

SEQ ID NO: 52434 - DNA, 80 bp, synthetic construct
  source 1..80: mol_type = other DNA
actttcgccccggtcaacgacctggattgaggactacatcaaagactgtgtatttaaggactgggaggagtcgggtgagg

SEQ ID NO: 52435 - DNA, 80 bp, synthetic construct
  source 1..80: mol_type = other DNA
tgccacttcaacattagaattaatgggtattcaatatgattacaatgaagtatttaccagagttaaaagtaaatttgatt

SEQ ID NO: 52436 - DNA, 80 bp, synthetic construct
  source 1..80: mol_type = other DNA
gtgtatatgtctagatatagggaatctcgtaagccacgtaattttttgttgatacagggttctattcaaggtccttactt

SEQ ID NO: 52437 - DNA, 80 bp, synthetic construct
  source 1..80: mol_type = other DNA
gatgcccctatcttatcaacaattccggagaatactgttgttagacgaagaggcaggtcccctagaagaagaactccctc

SEQ ID NO: 52438 - DNA, 80 bp, synthetic construct
  source 1..80: mol_type = other DNA
agacgccaacaatgtaggagctggagcattcgggctgggattcaccccacctcacggaggccttttggggtggagccctc

SEQ ID NO: 52439 - DNA, 80 bp, synthetic construct
  source 1..80: mol_type = other DNA
tgggacttcaaccccaacaagggtcattggccagaggcaaatcaggtaagagacagtcatcctcaggccatgcagtagaa

SEQ ID NO: 52440 - DNA, 80 bp, synthetic construct
  source 1..80: mol_type = other DNA
gagccctgctggtggctccagttcaggaacagtaaaccctgttcagaacactgcctctgccatatcgtcaatcttatcga

SEQ ID NO: 52441 - DNA, 80 bp, synthetic construct
  source 1..80: mol_type = other DNA
accagttggaccctgcattccaagccaactccgacaatcccgattgccctcaagctcagggcatactcacaactgtgcca

SEQ ID NO: 52442 - DNA, 80 bp, synthetic construct
  source 1..80: mol_type = other DNA
accatacagcactcaggcaagcagttttgagttcttgagtatttggtgtctttcggagtgtggatccgcactcctcccgc

SEQ ID NO: 52443 - DNA, 80 bp, synthetic construct
  source 1..80: mol_type = other DNA
atacagaccaccaaatgcccctatcttatcaacacttccggaaactactgttgttagacgacgaggcaggtcccctagaa

SEQ ID NO: 52444 - DNA, 80 bp, synthetic construct
  source 1..80: mol_type = other DNA
agactgtgtatttaaggactgggaggagttgggggaggagattaacctttgtactgggaggctgttcatgttccactgtt

SEQ ID NO: 52445 - DNA, 80 bp, synthetic construct
  source 1..80: mol_type = other DNA
tataaagaatttggagctactggggagttactctcgtttttgccttctgacttctttccttccgtcagagatctcctaga

SEQ ID NO: 52446 - DNA, 80 bp, synthetic construct
  source 1..80: mol_type = other DNA
tataaagaatttgaggctactgtggagttactcttcattttgccttctgacttctttccttccgtccgggatctactaga

SEQ ID NO: 52447 - DNA, 80 bp, synthetic construct
  source 1..80: mol_type = other DNA
tagccaagttaaatctgaccttgttatagatgctttagcttctatgactggtgtgtctttggaaacactgttggctgcta

SEQ ID NO: 52448 - DNA, 80 bp, synthetic construct
  source 1..80: mol_type = other DNA
atttagctcttactaatatgtataaagaagctagaattaatgataagaagagtaaggttgtttctgccttgcaaactatg

SEQ ID NO: 52449 - DNA, 80 bp, synthetic construct
  source 1..80: mol_type = other DNA
gtactgctatttctgtccaaacatgtgatctcacagtaggtagtggttactgtgtggattactttaaaaacagacgaagt

SEQ ID NO: 52450 - DNA, 80 bp, synthetic construct
  source 1..80: mol_type = other DNA
caaattagaggataatcccctatttttatttgatgaggctggcgaagaagtttttgctcctaaattgtattgtgccttta

SEQ ID NO: 52451 - DNA, 80 bp, synthetic construct
  source 1..80: mol_type = other DNA
gaggccctaatcagaattttggtggtggagaaatgttaaaacttggaactagtgacccacagttccccattcttgcagaa

SEQ ID NO: 52452 - DNA, 80 bp, synthetic construct
  source 1..80: mol_type = other DNA
aggattatgaaaatgtttgttttgagttttatactacagagccagaatttgttaaagttttgggtctgtatgtgcctaaa

SEQ ID NO: 52453 - DNA, 80 bp, synthetic construct
  source 1..80: mol_type = other DNA
ttgtacttccacaaggtggttatgttgctgattttgcatattggtttttaaccttatgtgattggcagtgtgttgcatgc

SEQ ID NO: 52454 - DNA, 80 bp, synthetic construct
  source 1..80: mol_type = other DNA
gcatttgtttcgacatttaatgttttacaggatgttttatccttaagacatgatatagcacttgatgatgatgcacgaac

SEQ ID NO: 52455 - DNA, 80 bp, synthetic construct
  source 1..80: mol_type = other DNA
tgttgatggtgttaatttcactaataggtttgtgcctgttggtgaaagttttggtaagagtctaggaaatgtgttttgtg

SEQ ID NO: 52456 - DNA, 80 bp, synthetic construct
  source 1..80: mol_type = other DNA
ccagttggaccctgcgttcggagccaactcaaacaatccaaacaaggatcactggccagaggccaagcaggtaggagcgg

SEQ ID NO: 52457 - DNA, 80 bp, synthetic construct
  source 1..80: mol_type = other DNA
gatcactggccagaggccaagcaggtaggagcgggagcattcgggccaagagacagtcatcctcaggccacgcagtggaa

SEQ ID NO: 52458 - DNA, 80 bp, synthetic construct
  source 1..80: mol_type = other DNA
gttgtaatgtatagtgttggagaaagtgaaagacttgcggaagtaattgccgacaagtgccaaaggagaaaacagcataa

SEQ ID NO: 52459 - DNA, 80 bp, synthetic construct
  source 1..80: mol_type = other DNA
tgctgctataatagatagagaaggttatagcagactatatattaattagttgaaagttttgtgttgtaatgtatagtgtt

SEQ ID NO: 52460 - DNA, 80 bp, synthetic construct
  source 1..80: mol_type = other DNA
ctccaccaagctctgcaggatcccagagtcaggggtctgcattttcatgctggtggctccagttcagaaacagtaaaccc

SEQ ID NO: 52461 - DNA, 80 bp, synthetic construct
  source 1..80: mol_type = other DNA
accatactgcactcaggcaagccattctctgctggggggaattgatgactctagctacctgggttggtactgtacttgaa

SEQ ID NO: 52462 - DNA, 80 bp, synthetic construct
  source 1..80: mol_type = other DNA
ttgatgactctagctacctgggtgggtactgtacttgaatatttggtctctttcggagcgtggattcgcactcctccagc

SEQ ID NO: 52463 - DNA, 80 bp, synthetic construct
  source 1..80: mol_type = other DNA
ggagctgggggaggagaataggttaatcattactttgtattaggaggctgtaggcataaattggtctgcgcaccagcacc

SEQ ID NO: 52464 - DNA, 80 bp, synthetic construct
  source 1..80: mol_type = other DNA
tatttggtctctttcggagcgtggattcgcactcctccagcctatagaccaccaaatgcccctatcttatcaacacctcc

SEQ ID NO: 52465 - DNA, 80 bp, synthetic construct
  source 1..80: mol_type = other DNA
tccttcagtacgagatcttctagataccgcctcagctctatatcgggaagccaccatactgcactcaggcaagcaattct

SEQ ID NO: 52466 - DNA, 80 bp, synthetic construct
  source 1..80: mol_type = other DNA
gatccaatatccagggacctagcagtcagttatgttaacactcatatgggcctaaagttcttggaagagatacggtcata

SEQ ID NO: 52467 - DNA, 80 bp, synthetic construct
  source 1..80: mol_type = other DNA
gagtatttggtgtctttcggagtgtggattcgcactcctccagcttatagaccaccaaaaatgcccctatcttatcaaaa

SEQ ID NO: 52468 - DNA, 80 bp, synthetic construct
  source 1..80: mol_type = other DNA
tgcaggtactaattctttaacttgtgataatttatgtactcttgatcctattacacttacagatacttataagtgtcccc

SEQ ID NO: 52469 - DNA, 80 bp, synthetic construct
  source 1..80: mol_type = other DNA
gatccagcatccagggaattagtagtgtccttcggggtgtggattcgtacaccccccgcatataggccaccaaatgcccc

SEQ ID NO: 52470 - DNA, 80 bp, synthetic construct
  source 1..80: mol_type = other DNA
cttttggggtggagccctcaggctcagggcatactacaaaccttgccagcaaatccgcctcctgcctctaccaatcgcca

SEQ ID NO: 52471 - DNA, 80 bp, synthetic construct
  source 1..80: mol_type = other DNA
gatcctgcatccagggaaaatgcccctatcttatcaacacttccggaaactactgttgttagacgacgaggcaggtcccc

SEQ ID NO: 52472 - DNA, 80 bp, synthetic construct
  source 1..80: mol_type = other DNA
gcattccgcttcactgatctcttgttagatctttttgtaatctaaactttataaaaacatccactccctgtaatctatgc

SEQ ID NO: 52473 - DNA, 80 bp, synthetic construct
  source 1..80: mol_type = other DNA
agagaaggttatagcagaccatagattaattagttgaaagttttgtgttgtaatgtatagtgttggagaaagtgaaagac

SEQ ID NO: 52474 - DNA, 80 bp, synthetic construct
  source 1..80: mol_type = other DNA
aaggaatatttctaacatccacactatgtttgtattatccaacagaagcaagtactcaaattaatgatggtgaatggaaa

SEQ ID NO: 52475 - DNA, 80 bp, synthetic construct
  source 1..80: mol_type = other DNA
ctccttttaatgtatggtattgaatataccacagctctatcctttttgatatctttcgttctagtgaattatatattaaa

SEQ ID NO: 52476 - DNA, 80 bp, synthetic construct
  source 1..80: mol_type = other DNA
ttatttatcgtcgttgtgtcaccattcgctaaagcacaaaattatggaataaatttgccaatcactggttccatggatac

SEQ ID NO: 52477 - DNA, 80 bp, synthetic construct
  source 1..80: mol_type = other DNA
agcctatgcaaattcaccgcagcaagaaactttcttgacttcaacgctgtgtttgtattatcctactgaagcaccaactc

SEQ ID NO: 52478 - DNA, 80 bp, synthetic construct
  source 1..80: mol_type = other DNA
aagaaactttcttgacttcaacgctgtgtttgtattatcctactgaagcaccaactcaaataagggatactgaatggaag

SEQ ID NO: 52479 - DNA, 80 bp, synthetic construct
  source 1..80: mol_type = other DNA
ttgacaccaggtagatttagaactattgtttgtgggctctttcctgctcagattatgcacagaaacatcataagtcctgt

SEQ ID NO: 52480 - DNA, 80 bp, synthetic construct
  source 1..80: mol_type = other DNA
agattggttctctatcggccagtacatcacaggatttgcgcttgcaataatattgaaggcattgtacatgctgtcaacta

SEQ ID NO: 52481 - DNA, 80 bp, synthetic construct
  source 1..80: mol_type = other DNA
agattggttttctattggtcaatatatcacaggatttgcacttgcaataatcttgaaggcattatatatgctgtcaacta

SEQ ID NO: 52482 - DNA, 80 bp, synthetic construct
  source 1..80: mol_type = other DNA
agactggttttctatcggccaatacattacaggatttgcacttgcaataatcttgaaagcattgtacatgctatcaacta

SEQ ID NO: 52483 - DNA, 80 bp, synthetic construct
  source 1..80: mol_type = other DNA
ttgacaccaggtagattcaggacaattgtctgtggacttttccctgctcagattatgcatagaaatatcataagtcctgt

SEQ ID NO: 52484 - DNA, 80 bp, synthetic construct
  source 1..80: mol_type = other DNA
aagacttgcggaagtaattgccgacaagtgcccaagggaagagccagcatgttaagttaccacccagtaattagtaaatg

SEQ ID NO: 52485 - DNA, 80 bp, synthetic construct
  source 1..80: mol_type = other DNA
tgaaaccatagttagtcactggatgggaattcgttttgaatacacatcgcccactgataagctagctatgattatgggtt

SEQ ID NO: 52486 - DNA, 80 bp, synthetic construct
  source 1..80: mol_type = other DNA
tgatggtccaagtgtggagacatctgattcacaagttgaagaagatgtagaaatgtcggattttgttgatcttgaatctg

SEQ ID NO: 52487 - DNA, 80 bp, synthetic construct
  source 1..80: mol_type = other DNA
gatccagcatccagggaattaatatgggcctaaaaatcagacaactattgaaactactgttgttagacgaagaggcaggt

SEQ ID NO: 52488 - DNA, 80 bp, synthetic construct
  source 1..80: mol_type = other DNA
gatcgtgtgtatttaaatactacgttgtttcttaatggttattaccccacttcaggttccacatatcgtaatatggcact

SEQ ID NO: 52489 - DNA, 80 bp, synthetic construct
  source 1..80: mol_type = other DNA
cccaaactaaatctttagttggtataggtgagcactgttcaggtcttgctgttaaaagtgattattgtggaaacaattct

SEQ ID NO: 52490 - DNA, 80 bp, synthetic construct
  source 1..80: mol_type = other DNA
ggacatctggcgacctgagaagaaatttctccgttacattaacggttttaatgtctcagaattagaagatgcttgtttta

SEQ ID NO: 52491 - DNA, 80 bp, synthetic construct
  source 1..80: mol_type = other DNA
gcaactcgcaacaattgctggttgcgatcagttttggcagtgatgcagaaattgccctgtcaatttaaagataaaaattt

SEQ ID NO: 52492 - DNA, 80 bp, synthetic construct
  source 1..80: mol_type = other DNA
gcattttggtacattgagtcgtgaagatcttgagattggttataccgtggactgttcttgcggtaaaaagctaattcatt

SEQ ID NO: 52493 - DNA, 80 bp, synthetic construct
  source 1..80: mol_type = other DNA
cttaccgacgaaggtatcaatcgccgcgtcgcagaagatctcaatctcgggaatctcaatgttagtattccttggactca

SEQ ID NO: 52494 - DNA, 80 bp, synthetic construct
  source 1..80: mol_type = other DNA
tgcattcaaagccaactccgacaatcccgatctcacaactgtgccagcagctcctcctcctgcctccaccaatcggcagg

SEQ ID NO: 52495 - DNA, 80 bp, synthetic construct
  source 1..80: mol_type = other DNA
accagttggaccctgcattcaaagccaactcagggggactgttggggtggagccctcaggctcagggcctactcacaact

SEQ ID NO: 52496 - DNA, 80 bp, synthetic construct
  source 1..80: mol_type = other DNA
caggctcagggcctactcacaactgtgccagcagctcctcctccttaaagggacactcatcctcaggccatgcagtggaa

SEQ ID NO: 52497 - DNA, 80 bp, synthetic construct
  source 1..80: mol_type = other DNA
taatggggtattttgcattttggactgtgttttgcacaaatgcaaatgcttcttctagtgaaggatttttaattggcata

SEQ ID NO: 52498 - DNA, 80 bp, synthetic construct
  source 1..80: mol_type = other DNA
gttggagagagtgaaagacttgcggaagtaattgccgacaagtgcccaagggaagagccagcatgttaagttaccaccca

SEQ ID NO: 52499 - DNA, 80 bp, synthetic construct
  source 1..80: mol_type = other DNA
ttttacttgattatataaatgttacattcttggacctacaagttgaaatgaataggttacaggaggcgataaaagtttta

SEQ ID NO: 52500 - DNA, 80 bp, synthetic construct
  source 1..80: mol_type = other DNA
atgccaacagaagtttttagtgcaatcaaagattttaggttttcatgtctcaggaaagaatttagaacagagaagaataa

SEQ ID NO: 52501 - DNA, 80 bp, synthetic construct
  source 1..80: mol_type = other DNA
tgaagaaaaaattgcgccgaggccacgccgagtaggatcgagggtacaggtaggatcgagggtacaggtaggatcgaggg

SEQ ID NO: 52502 - DNA, 80 bp, synthetic construct
  source 1..80: mol_type = other DNA
gaagtaattgccgacaagtgcccaagggaagagccagcatgttaagttaccacccagtaattagtaaatgaatgaagtta

SEQ ID NO: 52503 - DNA, 80 bp, synthetic construct
  source 1..80: mol_type = other DNA
agaggcaaatcaggtaggagtgggagcattcgggccaactcagggcatactgacaacagtgccagcagcacctcctcctg

SEQ ID NO: 52504 - DNA, 80 bp, synthetic construct
  source 1..80: mol_type = other DNA
gacccagcatccgcttacagaccaccaaatgcccctatcttatcaacacttccggaaactactgttgttagacgacgagg

SEQ ID NO: 52505 - DNA, 80 bp, synthetic construct
  source 1..80: mol_type = other DNA
aaacctcgacaaggcatggggacaaatctttccgtccccaatccgctgggattctttcccgatcaccagttggaccctgc

SEQ ID NO: 52506 - DNA, 80 bp, synthetic construct
  source 1..80: mol_type = other DNA
attcaaagccaacagccctcaagctcagggcattctcacaactgtgccagcagctcctcctcctgcctccaccaatcggc

SEQ ID NO: 52507 - DNA, 80 bp, synthetic construct
  source 1..80: mol_type = other DNA
gacccagcatccagggaatgagtagtcagctatgctatcttatcaacacttccggaaactactgttgttagacgacgagg

SEQ ID NO: 52508 - DNA, 80 bp, synthetic construct
  source 1..80: mol_type = other DNA
cttcgaaaacttccaccaaactcgccctgctggtggctccagttcaggaatagtaaaccctgttccgactactgtctctc

SEQ ID NO: 52509 - DNA, 80 bp, synthetic construct
  source 1..80: mol_type = other DNA
ccaacaaggtaggggctcagtgcttgccagcaaatccgcctcctgctcgcaagtcaggaaggcggcctaccccgctgact

SEQ ID NO: 52510 - DNA, 80 bp, synthetic construct
  source 1..80: mol_type = other DNA
cctgctcgcaagtcaggaaggcggcctaccccgctgactccacctttgagaaacactcatcctcaggccatgcagtggaa

SEQ ID NO: 52511 - DNA, 80 bp, synthetic construct
  source 1..80: mol_type = other DNA
actgtcttaaatttggaagagaaactgttctagacaatttggtgtcttttggagtgtggattcgcactcctcccacttac

SEQ ID NO: 52512 - DNA, 80 bp, synthetic construct
  source 1..80: mol_type = other DNA
ttgacaacagtgccagcagcgcctcctcctgcctccaccaatcgtctaagagacagtcatcctcaggccatgtagtggaa

SEQ ID NO: 52513 - DNA, 80 bp, synthetic construct
  source 1..80: mol_type = other DNA
accatacagcactcagttcctgtcttacttttggaagagaaccggttcttgagtatttggtgtcttttggagtgtggatt

SEQ ID NO: 52514 - DNA, 80 bp, synthetic construct
  source 1..80: mol_type = other DNA
accatacagcactaaggcaagccattctgtgttggggagaaactgttcttgggtgtttggtgtcttttggagtgtggatt

SEQ ID NO: 52515 - DNA, 80 bp, synthetic construct
  source 1..80: mol_type = other DNA
cgcactcctcccgcttgcagaccaccaaatgcccctatcttatcaacacttccggaaactactgttgttagacgacgagg

SEQ ID NO: 52516 - DNA, 80 bp, synthetic construct
  source 1..80: mol_type = other DNA
gctacattctaaggttaagagtgtgcctaatatgcatgttgtggtagtggaaaatgatgctgataaagccaattttctga

SEQ ID NO: 52517 - DNA, 80 bp, synthetic construct
  source 1..80: mol_type = other DNA
gccgacaagtgccaaagggaagagccagcatgttaagttactacccagtaattagtaaatgaatgaagttaattatggcc

SEQ ID NO: 52518 - DNA, 80 bp, synthetic construct
  source 1..80: mol_type = other DNA
tagctaaggtctcccacctttgcacttataagcgtgcattcttagacaaggtagacggtgttagcggttttgctgtttat

SEQ ID NO: 52519 - DNA, 80 bp, synthetic construct
  source 1..80: mol_type = other DNA
gtgaagtccaaggtcggaaattaccgactgccctcaacacaaaccgagtctggcgcggacaccgcattgttgagaaataa

SEQ ID NO: 52520 - DNA, 80 bp, synthetic construct
  source 1..80: mol_type = other DNA
aaagagtttcagtttgcacaaggacaaggagtgcctattgccaatggaatcccagcttcacagcaaaagggatattggta

SEQ ID NO: 52521 - DNA, 80 bp, synthetic construct
  source 1..80: mol_type = other DNA
cagacacaaccgacgttcctttaaaacacctgatggccagcagaagcagctactgcccagatggtatttttactatctgg

SEQ ID NO: 52522 - DNA, 80 bp, synthetic construct
  source 1..80: mol_type = other DNA
atgagcctcagaaagatgtgtatgagctgcaatattcaggtgcagttagatttgatagtactctacctggttttgagact

SEQ ID NO: 52523 - DNA, 80 bp, synthetic construct
  source 1..80: mol_type = other DNA
atcatgaaagtgttgaatgagaatttgaatgcctaccagaatcaagatggtatgatgaatatgagtccaaaaccacagcg

SEQ ID NO: 52524 - DNA, 80 bp, synthetic construct
  source 1..80: mol_type = other DNA
atctcttgttagatctttttgtaatctaaactttataaaaacatccactccctgtaatctatgcttgtgggcgtagattt

SEQ ID NO: 52525 - DNA, 80 bp, synthetic construct
  source 1..80: mol_type = other DNA
cttcactgatctcttgttagatctttttgtaatctaaactttataaaaacatccactccctgtaatctatgcttgtgggc

SEQ ID NO: 52526 - DNA, 80 bp, synthetic construct
  source 1..80: mol_type = other DNA
gatgatagatcggaagagcttcgtgtagggaaagctccttgtaaatttactgttcaagatgctaaaggtcttaaaattaa

SEQ ID NO: 52527 - DNA, 80 bp, synthetic construct
  source 1..80: mol_type = other DNA
gtacctttattttgtaaaaggttgtaacacactagcaagaggctgggttgttggtacaatttcttctacagttagattgc

SEQ ID NO: 52528 - DNA, 80 bp, synthetic construct
  source 1..80: mol_type = other DNA
taacgcccgccatgatgagcctaaggctcagagcagcaatattccgcttgcatcacctcaggacaccatcggcccgagcg

SEQ ID NO: 52529 - DNA, 80 bp, synthetic construct
  source 1..80: mol_type = other DNA
atctcaagcaatataccaaactgtgtccgtgagtgttttgctagtgtcaccactttgccttggaccactcgcatggcagc

SEQ ID NO: 52530 - DNA, 80 bp, synthetic construct
  source 1..80: mol_type = other DNA
ctcgcatggcagctaacacttttctgggggccatccaccttggtccccgaattaacccctacactgcacacatgagtgcc

SEQ ID NO: 52531 - DNA, 80 bp, synthetic construct
  source 1..80: mol_type = other DNA
cagcattgcttcttccaactcaaattgaaaccccaaacgcaaccgcccagcgcgtggaattggccgctgccactggtgca

SEQ ID NO: 52532 - DNA, 80 bp, synthetic construct
  source 1..80: mol_type = other DNA
cgttaggtgcacaatattccatgtggaagctgaagtaccttaatgtcaagttaacctctatggttggcgcatctgctgtc

SEQ ID NO: 52533 - DNA, 80 bp, synthetic construct
  source 1..80: mol_type = other DNA
agggatggttggtggctcacaaacaccaatgataatgcatctgacaccttggggccctccatctcaaacactaagccatt

SEQ ID NO: 52534 - DNA, 80 bp, synthetic construct
  source 1..80: mol_type = other DNA
aagaatgatggccacaagggattcttttcaatcatttaacttaactgacccacatataactacaaataagcttgaatgga

SEQ ID NO: 52535 - DNA, 80 bp, synthetic construct
  source 1..80: mol_type = other DNA
caatggctcccagctgggttcccgccaacaccaagaaagccaggcagcggttgacccgcctggtgcgactggcccaacca

SEQ ID NO: 52536 - DNA, 80 bp, synthetic construct
  source 1..80: mol_type = other DNA
atagaatgcccgcgggtacttttcttggatctgtatcacttcatcccaacattaatctgtacacttcgcacctctcgggg

SEQ ID NO: 52537 - DNA, 80 bp, synthetic construct
  source 1..80: mol_type = other DNA
catcccatgttgttgtttctaatccagaacaacccaatgggcccgcacaacgcttggagatggctgttgccactggtgca

SEQ ID NO: 52538 - DNA, 80 bp, synthetic construct
  source 1..80: mol_type = other DNA
caatggctcccaaccgcctcagaaaggttctggcgacactaacccgaatgttgacccgcctggcacaactggtccgacca

SEQ ID NO: 52539 - DNA, 80 bp, synthetic construct
  source 1..80: mol_type = other DNA
cttaggccagccaccccaatcagggcaaggtaacccaccacaaggtgtggttacgcctcaggacacaatttcaccaaccg

SEQ ID NO: 52540 - DNA, 80 bp, synthetic construct
  source 1..80: mol_type = other DNA
attaactccaatgtcccaaattgtgtgcgagaatgttttgcggcggtgacaactattccatggaacacccgccaagccgc

SEQ ID NO: 52541 - DNA, 80 bp, synthetic construct
  source 1..80: mol_type = other DNA
cccgccaagccgcaaacacattcctgggtgcagttcacctgggaccaaggctgaacccatacaccgctcacctcagtgca

SEQ ID NO: 52542 - DNA, 80 bp, synthetic construct
  source 1..80: mol_type = other DNA
aggcacttttactcccaacgcaggtagaaatgccgaactcgggtgcacaacgcctggagatggcggtcgccactggggca

SEQ ID NO: 52543 - DNA, 80 bp, synthetic construct
  source 1..80: mol_type = other DNA
cttgggccagccacagtcccaaagggaccaacaggttatggaacaggttgtcaccccccaggacaccattggaccaacga

SEQ ID NO: 52544 - DNA, 80 bp, synthetic construct
  source 1..80: mol_type = other DNA
cctaggccaaccgcagccacagggtggcgaaaagactaacccacagcctgtgacaccacaggacaccattggccctacat

SEQ ID NO: 52545 - DNA, 80 bp, synthetic construct
  source 1..80: mol_type = other DNA
atcacgagtaatgtaccaaattgtattcgtgagtgtttcgcctctgttaccacaatcccctggacaactcgacaggccgc

SEQ ID NO: 52546 - DNA, 80 bp, synthetic construct
  source 1..80: mol_type = other DNA
ctcgacaggccgctaacactttcctcggggccatccacctaggcccacgcatcaacccatacactgctcacctgagcgca

SEQ ID NO: 52547 - DNA, 80 bp, synthetic construct
  source 1..80: mol_type = other DNA
cagccctcctacttccaactcagattgaaacaccaaatgcaagtgcacagcgcttggagttggccatggccacaggggca

SEQ ID NO: 52548 - DNA, 80 bp, synthetic construct
  source 1..80: mol_type = other DNA
caatgctcgccccgaggggcagaaccccgagcgcacgaatgtgccactggcctccccacaggacaccattggtccaagtg

SEQ ID NO: 52549 - DNA, 80 bp, synthetic construct
  source 1..80: mol_type = other DNA
cacgccaagcggctaacacattcttgggtgccattcaccttggtccgaggatcaacccgtacaccgcacacatgagtgcc

SEQ ID NO: 52550 - DNA, 80 bp, synthetic construct
  source 1..80: mol_type = other DNA
agattggtacacaattggagtatatgttataggctttacactccctatcatactaaaggccttgtacatgttatcaacac

SEQ ID NO: 52551 - DNA, 80 bp, synthetic construct
  source 1..80: mol_type = other DNA
aaaataaaggaactcgcatccggtttaaagatgatacctcatttgaggacataaatggtattcgaagaccaaagcatttg

SEQ ID NO: 52552 - DNA, 80 bp, synthetic construct
  source 1..80: mol_type = other DNA
taactcctggccggtttagaaccatagtatgtggtcttttcccaactcaaattcaagtgcgaaatataatgagtcctgtg

SEQ ID NO: 52553 - DNA, 80 bp, synthetic construct
  source 1..80: mol_type = other DNA
cacccctcactcctagacaatatttactcgctttcaatcaagatggtattatttttaatgctgttgattgtatgagtgat

SEQ ID NO: 52554 - DNA, 80 bp, synthetic construct
  source 1..80: mol_type = other DNA
acttttaatttccttaccaacggcttttgctgttataggagatttaaattgtactttagataatcgtacaggtagcctta

SEQ ID NO: 52555 - DNA, 80 bp, synthetic construct
  source 1..80: mol_type = other DNA
tggaaatgcattaaatgtgatttagctcttaagcttaaaggcttggatgctatgttcttttatggtgatgttgtctcaca

SEQ ID NO: 52556 - DNA, 80 bp, synthetic construct
  source 1..80: mol_type = other DNA
cttcgttcagagcaatgttgatgttctacctgagggttggcgtgttgtcaataagttttatcaaattaatggtgttagaa

SEQ ID NO: 52557 - DNA, 80 bp, synthetic construct
  source 1..80: mol_type = other DNA
tttcactaataggtttgtgcctgttggtgaaagttttggtaagagtctaggaaatgtgttttgtgatggagttaatgtca

SEQ ID NO: 52558 - DNA, 80 bp, synthetic construct
  source 1..80: mol_type = other DNA
ggtggctccagttccggaacaataaaccctgttccgactactgcctcacccatatcgtcaatcttctcgaggactgggga

SEQ ID NO: 52559 - DNA, 80 bp, synthetic construct
  source 1..80: mol_type = other DNA
ccaagttctgcaagatcccagagtcaggggcctgtattttcctgctggtggctccagttcagggacactcaaccctgttc

SEQ ID NO: 52560 - DNA, 80 bp, synthetic construct
  source 1..80: mol_type = other DNA
tggccacaagccaaccaggtaggagtgggagcattcgggccagggttcactcccccacacggaggtgttttggtgtggag

SEQ ID NO: 52561 - DNA, 80 bp, synthetic construct
  source 1..80: mol_type = other DNA
ccaatcggcctgctggtggctccagttccggaacagtaaaccctgttccgactactgtctcacccatatcgtcaatcttc

SEQ ID NO: 52562 - DNA, 80 bp, synthetic construct
  source 1..80: mol_type = other DNA
cagctcctgaagatgatgactttcttgaggaaagtgatgttgaagaagatgatgaaactgatttaactatcacaagtgct

SEQ ID NO: 52563 - DNA, 80 bp, synthetic construct
  source 1..80: mol_type = other DNA
aggtttttggcaaagatggtgtaatgtatagtgagttccctgctataactataggtagtacttttgtaaatacatcctat

SEQ ID NO: 52564 - DNA, 80 bp, synthetic construct
  source 1..80: mol_type = other DNA
ttattataaatcattgcctgggaccttttgtggtagagatgtttttgatttaatttatcagctatttaaaggtttagcac

SEQ ID NO: 52565 - DNA, 80 bp, synthetic construct
  source 1..80: mol_type = other DNA
catggcatgttgtgcgtgatccagcgatttgcgtgcgtgcatcccgcttcactgatctcttgttagatctttttgtaatc

SEQ ID NO: 52566 - DNA, 80 bp, synthetic construct
  source 1..80: mol_type = other DNA
tgtggtgttggctaatgatgattgagcgatttgcgtgcgtgcatcccgcttcactgatctcttgttagatctttttgtaa

SEQ ID NO: 52567 - DNA, 80 bp, synthetic construct
  source 1..80: mol_type = other DNA
actcgtggtggacttctctcaattttctagggggaactaccgtgtgtcttggccaaaattcgcagcccatcttcttgttg

SEQ ID NO: 52568 - DNA, 80 bp, synthetic construct
  source 1..80: mol_type = other DNA
cgcctcttgcctccaccaatcggcagtcaagaaggcagcctaccccactcactccacctgctggtggctccagttccaga

SEQ ID NO: 52569 - DNA, 80 bp, synthetic construct
  source 1..80: mol_type = other DNA
tccttcagtaagagatcttctagaaaccgcctcaccaccacacggcactcaggcaagccattctttgctagaggaaacta

SEQ ID NO: 52570 - DNA, 80 bp, synthetic construct
  source 1..80: mol_type = other DNA
catctcttgtctcactttaagtatttggtgtcttttggagtgtaaattcgcactcctccagcttatagaccaccaaatgc

SEQ ID NO: 52571 - DNA, 80 bp, synthetic construct
  source 1..80: mol_type = other DNA
agggttcactcccccacacagaggccttttaaagtgaagccctcaggcttaaggcatgctaaaaacattgccaacagatc

SEQ ID NO: 52572 - DNA, 80 bp, synthetic construct
  source 1..80: mol_type = other DNA
acagtgaaccctgttccgactactgtctcactcatctcgtcaatcttctcgaagattgaagaccctgcaccaaacataga

SEQ ID NO: 52573 - DNA, 80 bp, synthetic construct
  source 1..80: mol_type = other DNA
cagtgatgtcttatcaaatgcggggttgtatgcttgttcttacagtgaccctgcaaaattctcgtacgccaaaatataca

SEQ ID NO: 52574 - DNA, 80 bp, synthetic construct
  source 1..80: mol_type = other DNA
cttaacaattgtaattggtttatacaaagtgataagtgttctgtagaagattttaatgtgtgggctctgtccaatggatt

SEQ ID NO: 52575 - DNA, 80 bp, synthetic construct
  source 1..80: mol_type = other DNA
tgttattggggtttgttttccttgatgaacagtttgtttagaatgcctttgggtgtttataattataaaatttcagtaca

SEQ ID NO: 52576 - DNA, 80 bp, synthetic construct
  source 1..80: mol_type = other DNA
caatcaaaagatactaattttttaaacgcgttcggggtgcgagtgtagatgcccgtctcgtaccctgcgccagtggttta

SEQ ID NO: 52577 - DNA, 80 bp, synthetic construct
  source 1..80: mol_type = other DNA
ataatagagagatgaaatgctatgagcgtgtaaaagattgtaagtttgtggctgaacacgatttctttacatttgatgta

SEQ ID NO: 52578 - DNA, 80 bp, synthetic construct
  source 1..80: mol_type = other DNA
cgtggtctgctcttctcaaacatcattacgttgtggcagttgcatcagaaagcctcttctttgctgcaagtgttgttatg

SEQ ID NO: 52579 - DNA, 80 bp, synthetic construct
  source 1..80: mol_type = other DNA
tttatttgattaataagtttttgaaggctaaccctttgtggcataaagctgtttttattagcccatataatagtcagaac

SEQ ID NO: 52580 - DNA, 80 bp, synthetic construct
  source 1..80: mol_type = other DNA
tactaatttatttaaagattgtagcaagagttatagcggttaccacccagctcatgctccttcatttttggcagtagatg

SEQ ID NO: 52581 - DNA, 80 bp, synthetic construct
  source 1..80: mol_type = other DNA
tggggatatattggttctttatcaagtaatcatgatttatattgtagtgtccataaaggagcacatgttgcttcctctga

SEQ ID NO: 52582 - DNA, 80 bp, synthetic construct
  source 1..80: mol_type = other DNA
cacaaggtaatctggggagtaatggtaaacccggtaatgtcggtggtaatgatgctctgtcaacctcaactatctttaca

SEQ ID NO: 52583 - DNA, 80 bp, synthetic construct
  source 1..80: mol_type = other DNA
ttggaacgggggtgcttatagcctgtttgacatggctaaattcccacttaagttggctggtactgccgtaataaatttaa

SEQ ID NO: 52584 - DNA, 80 bp, synthetic construct
  source 1..80: mol_type = other DNA
tggggtgatggttttcagattaaatttgagaatcctcacatcctaggaacatgcatagttttagatgttaaaggtgtaga

SEQ ID NO: 52585 - DNA, 80 bp, synthetic construct
  source 1..80: mol_type = other DNA
agattgtaattgtttggggttttatgaatcttcagttgaagaatattaaactcagtgaaaatgtttttgctttctagatt

SEQ ID NO: 52586 - DNA, 80 bp, synthetic construct
  source 1..80: mol_type = other DNA
aatctgggattattacgaaggttgaagctgatttttatttgtcaggttgtgacgagtatatcgtaccactttgtattttt

SEQ ID NO: 52587 - DNA, 80 bp, synthetic construct
  source 1..80: mol_type = other DNA
acttttaatttccttaccaacggcttttgctgttataggagatttaaattgtactttagatcctaggcttaaaggtagct

SEQ ID NO: 52588 - DNA, 80 bp, synthetic construct
  source 1..80: mol_type = other DNA
ttaataatagagacaccggtcttcctcctataagtattgatactgttgatgttactaatggtttgggtacttattatgtt

SEQ ID NO: 52589 - DNA, 80 bp, synthetic construct
  source 1..80: mol_type = other DNA
tgtaataatattgatgctgctaagatatatggtatgtgtttttccagcataactatagataagtttgctatacccaatcg

SEQ ID NO: 52590 - DNA, 80 bp, synthetic construct
  source 1..80: mol_type = other DNA
aaaaatttctgtccgtgtagttcctgttctggtaaaaataatggtataggcacttgtcctgcaggtactaattctttaac

SEQ ID NO: 52591 - DNA, 80 bp, synthetic construct
  source 1..80: mol_type = other DNA
tgatttattgcattgatcttttgttagatcttttttcaatctagcattctttaccacgcccttttaatggacatttggag

SEQ ID NO: 52592 - DNA, 80 bp, synthetic construct
  source 1..80: mol_type = other DNA
atggctgatgcttatcttgcagacactgtgtggtatgtggggcaaataatttttatagttgccatttgtttattggttac

SEQ ID NO: 52593 - DNA, 80 bp, synthetic construct
  source 1..80: mol_type = other DNA
ggggtagaagagctcaacccaagcaaactgctacttctcagcaaccatcaggagggaatgttgtaccccactattcttgg

SEQ ID NO: 52594 - DNA, 80 bp, synthetic construct
  source 1..80: mol_type = other DNA
ggtactggtacagacacaacagacgttcttttaaaacagccgatggcaaccagcgtcaactgctgccacgatggtatttt

SEQ ID NO: 52595 - DNA, 80 bp, synthetic construct
  source 1..80: mol_type = other DNA
ttgtgctactggagattgttatgtctctacagggggcaaattatgtaaaactgtgcttaatgttgttggacctgatgcga

SEQ ID NO: 52596 - DNA, 80 bp, synthetic construct
  source 1..80: mol_type = other DNA
tgttgttaatggtaagtatttcacttttaagcaagctaataacaattgttttgttaatgtttcttgcttaatgctccaga

SEQ ID NO: 52597 - DNA, 80 bp, synthetic construct
  source 1..80: mol_type = other DNA
actggggcaatatgtgattttgaaattgcatgtaaatgtggtgtaaagcaggaacagcgtactggtctagatgctgttat

SEQ ID NO: 52598 - DNA, 80 bp, synthetic construct
  source 1..80: mol_type = other DNA
aatatttttataggtgataatgttggtcattatgttcatgttaagtgtgaacaatcttatcagctttatgatgcttctaa

SEQ ID NO: 52599 - DNA, 80 bp, synthetic construct
  source 1..80: mol_type = other DNA
gggttgtattacttttggtaaacctgttatatggttaagccatgagaaagcttctctcaattctttaacatattttaata

SEQ ID NO: 52600 - DNA, 80 bp, synthetic construct
  source 1..80: mol_type = other DNA
gggggtgcagtttttagttattttgtttatgtgtgttttgtgttgagtttggtctgttttattggactgtggtgcttaat

SEQ ID NO: 52601 - DNA, 80 bp, synthetic construct
  source 1..80: mol_type = other DNA
accttattgttatacagatgggcttatgcaaaatgcttctctgtatagttcattggtacctcacgtgcggtataatcttg

SEQ ID NO: 52602 - DNA, 80 bp, synthetic construct
  source 1..80: mol_type = other DNA
ctcttccgatctaattgcgtgcgtgcaacccgcttcactgatctcttgttagatctttttgtaatctaaactttataaaa

SEQ ID NO: 52603 - DNA, 80 bp, synthetic construct
  source 1..80: mol_type = other DNA
ttaagttaccacccagtaattagtaaatgaatgaagttaattatggccaattggaagaatcacaaagatcggaagagcac

SEQ ID NO: 52604 - DNA, 80 bp, synthetic construct
  source 1..80: mol_type = other DNA
gtgttaattatgacctctatggtattttaggccaaggcatttttgttgaggttaatgcgacttattataatagttggcag

SEQ ID NO: 52605 - DNA, 80 bp, synthetic construct
  source 1..80: mol_type = other DNA
atctaaactttataaaaacatccactccctgtaatctatgcttgtgggcgtagatttttcatagtggtgtttatattcat

SEQ ID NO: 52606 - DNA, 80 bp, synthetic construct
  source 1..80: mol_type = other DNA
aaccgtgttgcctggggaggacccacccccctattcacccttaactagcccggacagtgggagtgcccctatgatcacct

SEQ ID NO: 52607 - DNA, 80 bp, synthetic construct
  source 1..80: mol_type = other DNA
agtaaatgaatgaagttaattatggccaattggaaagatcggaagagcgtcgtgtagggaaagagtgtagatctcggtgg

SEQ ID NO: 52608 - DNA, 80 bp, synthetic construct
  source 1..80: mol_type = other DNA
gcatgtcaagttactacccagtaattagtaaatgaatgaagttaattatggccaattggaagagccagcatgtcaagtta

SEQ ID NO: 52609 - DNA, 80 bp, synthetic construct
  source 1..80: mol_type = other DNA
tcaacccgtttcaaactggctccgtttccacatgttggctcagtttcgaaacgcggcccggccctgactttgatttttgt

SEQ ID NO: 52610 - DNA, 80 bp, synthetic construct
  source 1..80: mol_type = other DNA
ctcctcaaggcccccgagcaggaaatggacaatgggatatcacctgccaacctgttgccacgccgcctcgggcgttcccg

SEQ ID NO: 52611 - DNA, 80 bp, synthetic construct
  source 1..80: mol_type = other DNA
aggcaaccgcctcggcggtcgtgttgtgggtctggttgtggtagctgcggccgagcaagtcaaccaccacttcggcgcaa

SEQ ID NO: 52612 - DNA, 80 bp, synthetic construct
  source 1..80: mol_type = other DNA
actccaccacacttggttggtcaacactgcccattgagccaatagcgggagcagtttcttggtacgatgacaacaacgaa

SEQ ID NO: 52613 - DNA, 80 bp, synthetic construct
  source 1..80: mol_type = other DNA
cataccaagatacgggggctcttgagcgcacaaggaaagggtatcatcttcccaaacattgtcaaccattggacagatgt

SEQ ID NO: 52614 - DNA, 80 bp, synthetic construct
  source 1..80: mol_type = other DNA
gtcattgtccgccaagacctcagggcagaccaccatccccatagccgctgacaacctcaacaacagccctggggcggctg

SEQ ID NO: 52615 - DNA, 80 bp, synthetic construct
  source 1..80: mol_type = other DNA
gcccggtggtcatgtttgaaaacaatggggacgtcaatgagtccacagcaaaccatggcatattaaccgctgcgtcgcat

SEQ ID NO: 52616 - DNA, 80 bp, synthetic construct
  source 1..80: mol_type = other DNA
gatttcacatcactatcccaaactatcgatgcagcagggctgtgggtttggatgccatggaccaggaacaaaccagacgg

SEQ ID NO: 52617 - DNA, 80 bp, synthetic construct
  source 1..80: mol_type = other DNA
gcgcacaaacacaaatgtctatatcaccccaacttggattaatggcaaccctgcccgccccatacatgagaagtgtacca

SEQ ID NO: 52618 - DNA, 80 bp, synthetic construct
  source 1..80: mol_type = other DNA
acatggtcgggaccaattttcaatttggtggcactgggacaaacaacatcatgttatggcaggagcaacacttcacatct

SEQ ID NO: 52619 - DNA, 80 bp, synthetic construct
  source 1..80: mol_type = other DNA
tttccaggtgctgcagaggtgtactgttcacaactggagagcacagcagaaatgtttcaaaacaatgtggtcaacatccc

SEQ ID NO: 52620 - DNA, 80 bp, synthetic construct
  source 1..80: mol_type = other DNA
cgcaaaccaaatggcagtcttcaacgtggagacagcaggtaacacatttcagattgggatcttgccaaacggctattcag

SEQ ID NO: 52621 - DNA, 80 bp, synthetic construct
  source 1..80: mol_type = other DNA
gatgattaggttccctcagataatcaaatttccattttcagttttctttgcttttcttttcttttcccatggtaccacac

SEQ ID NO: 52622 - DNA, 80 bp, synthetic construct
  source 1..80: mol_type = other DNA
ttcagttttctttgcttttcttttcttttcccatggtaccacacgcgttcgggtggataattgtggttaagcgaccacag

SEQ ID NO: 52623 - DNA, 80 bp, synthetic construct
  source 1..80: mol_type = other DNA
cactggccagaggcaaatcaggtatgagctcccatctctccacctctaagagacagtcatcctcaggccatgcagtggaa

SEQ ID NO: 52624 - DNA, 80 bp, synthetic construct
  source 1..80: mol_type = other DNA
tccttcagtacgagatcttctagataccgcctcagctcacctcaccatactgcactcaggcaagcaattctttgctgggg

SEQ ID NO: 52625 - DNA, 80 bp, synthetic construct
  source 1..80: mol_type = other DNA
gtggagccctcaggctcagggcatactacaaaccttgccagcaaatccgcctcctgcctctaccaatcgccagtcaggaa

SEQ ID NO: 52626 - DNA, 80 bp, synthetic construct
  source 1..80: mol_type = other DNA
accatacagcactcaggcaagctattctgtgttggggtgagttgatgaatctatgggcctaaaactaagacaactattgt

SEQ ID NO: 52627 - DNA, 80 bp, synthetic construct
  source 1..80: mol_type = other DNA
ggtttcacatttcctgtcttacttttggaagagaaactgttcttgagtatctggtgtcttttggagtgtggattcgcact

SEQ ID NO: 52628 - DNA, 80 bp, synthetic construct
  source 1..80: mol_type = other DNA
gttatcgctgacaaccaagcaaaatgggctgccccgacaacacgaacagatgacaagttgcggatggagacatgcttcca

SEQ ID NO: 52629 - DNA, 80 bp, synthetic construct
  source 1..80: mol_type = other DNA
acggggtcttgtctgttgatctgagtcttacagttgagcttaaaatcaaaattgcttcgggattcgggccattgatcaca

SEQ ID NO: 52630 - DNA, 80 bp, synthetic construct
  source 1..80: mol_type = other DNA
ccattgatcacacatggttcagggatggacctatacaaatccaaccacaacaatgtgtattggctgaccatcccgccaat

SEQ ID NO: 52631 - DNA, 80 bp, synthetic construct
  source 1..80: mol_type = other DNA
gcaggcatgtaagggtaaaatccaggcactctgcgagaatcccgagtgggcaccattgaaggataacagaattccttcat

SEQ ID NO: 52632 - DNA, 80 bp, synthetic construct
  source 1..80: mol_type = other DNA
gacccagcatccaggggatttggagtgtggtctcgcactcctcctgcttacagaccaccaaatgcccctatcttatcaac

SEQ ID NO: 52633 - DNA, 80 bp, synthetic construct
  source 1..80: mol_type = other DNA
ggacgaatctttctgttcccaatcctctgggattctttcccgatcaccagttggacccagcgttcagagccaattcaaac

SEQ ID NO: 52634 - DNA, 80 bp, synthetic construct
  source 1..80: mol_type = other DNA
gaggttggtcttccaaacctcggaaaggcatggggacgaatctttctgttcccaatcagggttcactcctcctcacggag

SEQ ID NO: 52635 - DNA, 80 bp, synthetic construct
  source 1..80: mol_type = other DNA
gaggccttttggggtgaagccctcaggcgcaaggcatgctaaaaacattgccagcagatccgcctcctgcctccaccaat

SEQ ID NO: 52636 - DNA, 80 bp, synthetic construct
  source 1..80: mol_type = other DNA
ccagaggcaaatcaggtaggagcgggagcattcgggcctccacctctaaaagacagtcatcctcaggccatgcagtggaa

SEQ ID NO: 52637 - DNA, 80 bp, synthetic construct
  source 1..80: mol_type = other DNA
cccaccacacggcggtcttttggggtgaagccctcaggctcagggcatattgacaacagtgccagcaacacctcctcctg

SEQ ID NO: 52638 - DNA, 80 bp, synthetic construct
  source 1..80: mol_type = other DNA
accatacagcactcaggcaagctattctgtgttggggtgagttgatgaatctggccacctgggtgggaagtcttgagtat

SEQ ID NO: 52639 - DNA, 80 bp, synthetic construct
  source 1..80: mol_type = other DNA
ttggtgtcttttggagtgtggattcgcactcctcccgcttacagaccaccaaatgcccctatcttatcaacacttccgga

SEQ ID NO: 52640 - DNA, 80 bp, synthetic construct
  source 1..80: mol_type = other DNA
ccggattcctgtgcctccacagtgatgggtggcatggacacagaccgccatatgccatccacaggagtctgtggtccagc

SEQ ID NO: 52641 - DNA, 80 bp, synthetic construct
  source 1..80: mol_type = other DNA
gcaggtacaggggcgtgtgacacccatggatggtactaactttgttttcacttcttcaggtgctaacaccttggcactct

SEQ ID NO: 52642 - DNA, 80 bp, synthetic construct
  source 1..80: mol_type = other DNA
gggaggagcggttactcagttatgatggacatcaggcaatcttgtactcctctcagttagagcgtactgcggagtacttc

SEQ ID NO: 52643 - DNA, 80 bp, synthetic construct
  source 1..80: mol_type = other DNA
gtcccgtacactggcaatgtgttccagatagagactgttcacacttatggtgatgactgcatctacagtgtttgtcctgc

SEQ ID NO: 52644 - DNA, 80 bp, synthetic construct
  source 1..80: mol_type = other DNA
ttcttttcttttgaggtgatgccacacgcgttcgggtggttaaatgtgattaagcgatcacagtcactaatctttcacca

SEQ ID NO: 52645 - DNA, 80 bp, synthetic construct
  source 1..80: mol_type = other DNA
ggctctgtccttgccaacttgtcctcctttggtctcaaacccactgccgctgacaaaagtgcggacattaagcccaccca

SEQ ID NO: 52646 - DNA, 80 bp, synthetic construct
  source 1..80: mol_type = other DNA
aacaccagttttcttaaaaagaacattcacacaaacaccccatggggtgagggcactgttggacatcaattccattgttc

SEQ ID NO: 52647 - DNA, 80 bp, synthetic construct
  source 1..80: mol_type = other DNA
ggcagaaggggaaggtgtggtgcttgtaaatacaaattttgatttggccctcgccacctacaatgcctggttcataggtg

SEQ ID NO: 52648 - DNA, 80 bp, synthetic construct
  source 1..80: mol_type = other DNA
ggcggtcttttggggtggagccctcaggctcagggaatatgaacaacagtgtcagcagcacctcctcctgcctccaccaa

SEQ ID NO: 52649 - DNA, 80 bp, synthetic construct
  source 1..80: mol_type = other DNA
tcagttggaccctgcattcaaagccaactcagaaaatccagattgggacctccgccagcagctcctcctcctgcctccgc

SEQ ID NO: 52650 - DNA, 80 bp, synthetic construct
  source 1..80: mol_type = other DNA
gaggcaaatcagtcaggaagacagcctactcccatctctccacctctaagagacagtcatcctcaggccatgcagtggaa

SEQ ID NO: 52651 - DNA, 80 bp, synthetic construct
  source 1..80: mol_type = other DNA
ccttgggtggctttggggcatggacattgacccttataaagaatttgtctcgtttttgccttctgacttctttccttcag

SEQ ID NO: 52652 - DNA, 80 bp, synthetic construct
  source 1..80: mol_type = other DNA
taagagatcttctagataccgcctcagctctgtatcgggaaagatccagcatccagggacctagtagtaagttatgtcaa

SEQ ID NO: 52653 - DNA, 80 bp, synthetic construct
  source 1..80: mol_type = other DNA
tcttcctgctggtggctccagttcaagaacagtaagccctgttccgaatactgcctctcacatctcgtcaatctcttcga

SEQ ID NO: 52654 - DNA, 80 bp, synthetic construct
  source 1..80: mol_type = other DNA
agactgtgtgtttaaagactgggaggagttggggggaggagactagggttaatgatcgtgctgatattgcctactgttca

SEQ ID NO: 52655 - DNA, 80 bp, synthetic construct
  source 1..80: mol_type = other DNA
agcctccaagctgtgccttgggtggctttggggcatggacattgacccttataaagaatttggagctaccgtggagttac

SEQ ID NO: 52656 - DNA, 80 bp, synthetic construct
  source 1..80: mol_type = other DNA
gatccagcatccagagatttggtgggtttaaaaatcaggcaactattgtggtttcacatttcctgtcttacttttgggag

SEQ ID NO: 52657 - DNA, 80 bp, synthetic construct
  source 1..80: mol_type = other DNA
agaagaactccctcgccagcttcccaatgttagtattccttggactcacaaggtgggaaactttacggggctgtattctt

SEQ ID NO: 52658 - DNA, 80 bp, synthetic construct
  source 1..80: mol_type = other DNA
ctcctgcctccaccaatcgtcaagctctgcaggatcccagagtcaggggtctgtattttcctgctggtggctccagttca

SEQ ID NO: 52659 - DNA, 80 bp, synthetic construct
  source 1..80: mol_type = other DNA
gcgaatcaggtaggagtgggagcattcgggcccatctctccacctctaagagacagtcatcctcaggccatgcagtgaaa

SEQ ID NO: 52660 - DNA, 80 bp, synthetic construct
  source 1..80: mol_type = other DNA
accatacaaaaatcagacaactattgtggtttcacatttcctgtcttacttttggaagagaaactgttcttgagtatttg

SEQ ID NO: 52661 - DNA, 80 bp, synthetic construct
  source 1..80: mol_type = other DNA
agatggtgagttaaccaacaccatgcaactttgtcacctttccataatcatgtcttgttcaagtcggagggttcaagcgt

SEQ ID NO: 52662 - DNA, 80 bp, synthetic construct
  source 1..80: mol_type = other DNA
gacttctacccgcacaaggacaactggccggacgccaacaaggtgggagtgggagcattcgggccagggttcacccctcc

SEQ ID NO: 52663 - DNA, 80 bp, synthetic construct
  source 1..80: mol_type = other DNA
gatttctttcgtcatatccatctcgtccgctgttcgtatcatcaatttatcgtaaatacgtttcagcaattccacttgtt

SEQ ID NO: 52664 - DNA, 80 bp, synthetic construct
  source 1..80: mol_type = other DNA
cttttggggtgaagccctcagactcaaagcatattaacaacaatgccagcaacacctcctcctgcctccaccaatcagcg

SEQ ID NO: 52665 - DNA, 80 bp, synthetic construct
  source 1..80: mol_type = other DNA
gacccagcatttggagtgtggattcgcactcctcccgcttacagaccactaaatgcccctatcttatcaacacttccgga

SEQ ID NO: 52666 - DNA, 80 bp, synthetic construct
  source 1..80: mol_type = other DNA
tcctgctggtggctccagttccggaacagtaaaccttgttccgaccactgcctcacccatatagtcaatcttctcgagga

SEQ ID NO: 52667 - DNA, 80 bp, synthetic construct
  source 1..80: mol_type = other DNA
cagggcatactacaaaccttgccagcaaatccgcctcctgcctctaccaatcgccagtcaggacaggccatgcagtggaa

SEQ ID NO: 52668 - DNA, 80 bp, synthetic construct
  source 1..80: mol_type = other DNA
gagaggttggtcttccaaacctcggaaaggcatggggacgaatctttctgttcccaatgctctgggatttcagggttcac

SEQ ID NO: 52669 - DNA, 80 bp, synthetic construct
  source 1..80: mol_type = other DNA
gacccagcatccagggaattggtgtcttttggggtgtggattcgcactcctcctgcttacagaccaccaaatgcccctat

SEQ ID NO: 52670 - DNA, 80 bp, synthetic construct
  source 1..80: mol_type = other DNA
ccaacaaggtaggacctgcaaatccgcctcctgcctccaccaagcgccagtcaggaaggcagcctaccccactgtctcca

SEQ ID NO: 52671 - DNA, 80 bp, synthetic construct
  source 1..80: mol_type = other DNA
ttccacaactttccaccaagctctgcaagatcccaaagtcagtgctggtggctccagttcaggaacagtaaaccctgctc

SEQ ID NO: 52672 - DNA, 80 bp, synthetic construct
  source 1..80: mol_type = other DNA
aattggtctgcgtgggggctgggacattgacccttataaagaatttggagctactgtggagttactctcatttttgcctt

SEQ ID NO: 52673 - DNA, 80 bp, synthetic construct
  source 1..80: mol_type = other DNA
aaatccagcatccagggacctaggaagagaaaccgtcatagagtatttggtgtcttttggagtgtggattcgcactcctc

SEQ ID NO: 52674 - DNA, 80 bp, synthetic construct
  source 1..80: mol_type = other DNA
cagcttatagaccaccaaatgcccctatcttatcaacacttccggagaatactgttgttagacgaagaggcaggtcccct

SEQ ID NO: 52675 - DNA, 80 bp, synthetic construct
  source 1..80: mol_type = other DNA
caggtaggagcgggagcattcgggcctactcccatctctccacctctaagagacagtcatcctcaggccatgcagtggaa

SEQ ID NO: 52676 - DNA, 80 bp, synthetic construct
  source 1..80: mol_type = other DNA
accatacagcactcaggcaagctattctgtgttggggtgagtttatttcctgtcttacttttggaagagaaactgttctt

SEQ ID NO: 52677 - DNA, 80 bp, synthetic construct
  source 1..80: mol_type = other DNA
ggaattagtagtcagtttggtgtcttttggagtgtggattcgcactcctcccgcttacagaccaccaaatgcccctatct

SEQ ID NO: 52678 - DNA, 80 bp, synthetic construct
  source 1..80: mol_type = other DNA
agactgtgtgtttaacgcccaccaggtcttgcccaaggtcttatataagaggactcttggactctcagcaatgtcaacga

SEQ ID NO: 52679 - DNA, 80 bp, synthetic construct
  source 1..80: mol_type = other DNA
gaggttggtcttccaaccctcgacaaggcatggggacggctcagggcatattgacaacagtgccagcagcacctcctcct

SEQ ID NO: 52680 - DNA, 80 bp, synthetic construct
  source 1..80: mol_type = other DNA
tcccagagtcagggctctgtactttcctgctggtggctccagttcaggaacagtaaaccctgttcagaacactgcctctt

SEQ ID NO: 52681 - DNA, 80 bp, synthetic construct
  source 1..80: mol_type = other DNA
tgtatcccgtccagagggccctaaggccaattccaatgaaaacgtgcctcttgcatcaccacaggacacaattggaccaa

SEQ ID NO: 52682 - DNA, 80 bp, synthetic construct
  source 1..80: mol_type = other DNA
gctattagcaacaacgtccccatgtgcgtgagggagtgtttcgccagtgtgaccactctcccttggacaacgcgccaagc

SEQ ID NO: 52683 - DNA, 80 bp, synthetic construct
  source 1..80: mol_type = other DNA
cgcgccaagcatccaacactttccttggtgccatccatctcggtccacgcattaacccctatactgcacacttgagtgcc

SEQ ID NO: 52684 - DNA, 80 bp, synthetic construct
  source 1..80: mol_type = other DNA
acgcagcacttctcctgcctacgcagattgagacacccaacggagctgcgcaaagggtagagatggccgcagcaacaggg

SEQ ID NO: 52685 - DNA, 80 bp, synthetic construct
  source 1..80: mol_type = other DNA
acagaatgcccactggaactttcctgggatctttatcgcttcatcccaacattaatccatacacatcccatctttcaggc

SEQ ID NO: 52686 - DNA, 80 bp, synthetic construct
  source 1..80: mol_type = other DNA
ccacatcccatgttgttgtatctaatccagaacaacccaatgggcccgcgcaacgcctggaaatggctgttgctactggt

SEQ ID NO: 52687 - DNA, 80 bp, synthetic construct
  source 1..80: mol_type = other DNA
atcagatcctgcccaaggccttacataagaggactcttcttacataagaggactcttggactcccagcaatgtcaacgac

SEQ ID NO: 52688 - DNA, 80 bp, synthetic construct
  source 1..80: mol_type = other DNA
cgaccttgaggcctacttcaaagactgtgtgtttaaggactgggaggagctgggggaggagattaggttaaatattagga

SEQ ID NO: 52689 - DNA, 80 bp, synthetic construct
  source 1..80: mol_type = other DNA
agaagaactccctcgcgtcgcagaagatctcaatctcgggaatctcaatgttagtattccgtggactcataaggtgggaa

SEQ ID NO: 52690 - DNA, 80 bp, synthetic construct
  source 1..80: mol_type = other DNA
agactgtgtgtttaaggactgggaggagttgggggaggaaactaggttaatgatctttgttaaggtggctggacattgac

SEQ ID NO: 52691 - DNA, 80 bp, synthetic construct
  source 1..80: mol_type = other DNA
ccaacaaggtaggcatactacaaaccttgccaacaaatccgcctcctgcctctaccaatcgccagtcaggaaggcagcct

SEQ ID NO: 52692 - DNA, 80 bp, synthetic construct
  source 1..80: mol_type = other DNA
gctcagggcctactcacaacggtgccagcagctcctcctcctgcctccaccaatcggcagtaagtaatgaatgctggtgg

SEQ ID NO: 52693 - DNA, 80 bp, synthetic construct
  source 1..80: mol_type = other DNA
caaatcaggtaggagcgggacagggcacattgacaacagtgccagtagcacctcctcctgcctccaccaatcggcaggcc

SEQ ID NO: 52694 - DNA, 80 bp, synthetic construct
  source 1..80: mol_type = other DNA
taggagcgggacagggcacattgacaacagtgccagtagcacctcctcctgcctccaccaatcggcaggccatgcagtgg

SEQ ID NO: 52695 - DNA, 80 bp, synthetic construct
  source 1..80: mol_type = other DNA
ccagttggaccctgcgttcggagccaactcaaacaatccagagggtcacggcatattcacaacagtgccagtagcacctc

SEQ ID NO: 52696 - DNA, 80 bp, synthetic construct
  source 1..80: mol_type = other DNA
gacccagcaagagaaactgttcttgagtatttggtgtcgtttggagtgtggattcgcactcctcctgcttacagaccacc

SEQ ID NO: 52697 - DNA, 80 bp, synthetic construct
  source 1..80: mol_type = other DNA
accatacagcactcaggcaagtggggtgagttgatgaatctggccacctgggtgggaagtaatttggaagacccagctgt

SEQ ID NO: 52698 - DNA, 80 bp, synthetic construct
  source 1..80: mol_type = other DNA
gaggtccggattgggacttcaaccccaacaaggatcactggccagcggcaaatcaggtaggagcgggagcattcgggcca

SEQ ID NO: 52699 - DNA, 80 bp, synthetic construct
  source 1..80: mol_type = other DNA
gacccagcatccagggaattagtagtcagctatttggaagacccagcatccagggaattagtagtcagctatgtctcccc

SEQ ID NO: 52700 - DNA, 80 bp, synthetic construct
  source 1..80: mol_type = other DNA
tatcatatcaacaattccggaaactactgttgttagacgacgaggcaggtcccctagaagaagaactcccttgcctcgca

SEQ ID NO: 52701 - DNA, 80 bp, synthetic construct
  source 1..80: mol_type = other DNA
ccagttggaccctgcgttcggagccatggtggggtgaagccctcaggctcagggcatattgacaacagtgccagtagcac

SEQ ID NO: 52702 - DNA, 80 bp, synthetic construct
  source 1..80: mol_type = other DNA
gatccagcatccagggtgtcttttggagtgtggattcgcactcctcctgcttacagaccaccaaatgcccctatcttatc

SEQ ID NO: 52703 - DNA, 80 bp, synthetic construct
  source 1..80: mol_type = other DNA
gattcaccccggctcagggcatactacaaaccttgccagcaaatccgcctcctgcctctaccaatcgccagtcaggaagg

SEQ ID NO: 52704 - DNA, 80 bp, synthetic construct
  source 1..80: mol_type = other DNA
ccgcggcacaccaggtaggagtgggatccttcgggccagggttcactccaccacacggcaatcttcctgcctccaccaat

SEQ ID NO: 52705 - DNA, 80 bp, synthetic construct
  source 1..80: mol_type = other DNA
tggctccagttcaggaacagtgagcctgctcagaatactttttgccatatcgtcatctatcgagactgggacctgtaccg

SEQ ID NO: 52706 - DNA, 80 bp, synthetic construct
  source 1..80: mol_type = other DNA
aattggtgtgttcaccagcaccatgcaactttttgggccgaatatgtcctactgttcgcgcctccaagctgtgccttggg

SEQ ID NO: 52707 - DNA, 80 bp, synthetic construct
  source 1..80: mol_type = other DNA
cagcagctcctcctcctgcctccaccaatcggcagtcaggaaggcagcctactcccttatctccactctaagggaacact

SEQ ID NO: 52708 - DNA, 80 bp, synthetic construct
  source 1..80: mol_type = other DNA
gacccagagtatttggtgtcttttggagtgtggattcgcactcctcccgcttacagaccaccaaatgcccctatcttatc

SEQ ID NO: 52709 - DNA, 80 bp, synthetic construct
  source 1..80: mol_type = other DNA
caaatcaggtaggagcgggagcacggcagtcaggaagacagcctactcccatctctcctcctctaagagacagtcatcct

SEQ ID NO: 52710 - DNA, 80 bp, synthetic construct
  source 1..80: mol_type = other DNA
agtgagaagagaaaccgtcatagagtatttggtgtcttttggagtgtggattcgcactcctccagcttatagaccaccaa

SEQ ID NO: 52711 - DNA, 80 bp, synthetic construct
  source 1..80: mol_type = other DNA
tccttctattcgggatctcctcgacaccgcctttgctctgcgtagggaggccttagagtctccggaacatgtttcacctc

SEQ ID NO: 52712 - DNA, 80 bp, synthetic construct
  source 1..80: mol_type = other DNA
aatccagattgggacttcaatcccaacaagttggggtggagccctcaggctcagggcatactacaaaccttgccagcaaa

SEQ ID NO: 52713 - DNA, 80 bp, synthetic construct
  source 1..80: mol_type = other DNA
tccgcctcctgcctctaccaatcgccagtcaggaaggcagcctaccccgctgtctccacctttgagaaacacgcatcctc

SEQ ID NO: 52714 - DNA, 80 bp, synthetic construct
  source 1..80: mol_type = other DNA
agactgtgtgtttaaagactgggaggagttggaggtaggaagcaagctttccgggtggcttgggtggctttgaggcatgc

SEQ ID NO: 52715 - DNA, 80 bp, synthetic construct
  source 1..80: mol_type = other DNA
gaggttggtcttccaaacctcgaaaaggcatgggattcttccccgatcatcagttggaccctgcattcaaagccaactca

SEQ ID NO: 52716 - DNA, 80 bp, synthetic construct
  source 1..80: mol_type = other DNA
aattggtgtgttcaccagcaccatgcaactttttgctgggagttgactctctcttttttgccttctgacttctttccttc

SEQ ID NO: 52717 - DNA, 80 bp, synthetic construct
  source 1..80: mol_type = other DNA
ctctttttaatgtatggtattgaatataccacaattctgaccattttaatatctatcatattattgaattatatactaaa

SEQ ID NO: 52718 - DNA, 80 bp, synthetic construct
  source 1..80: mol_type = other DNA
aaaattatggcatgtatttaccaataacgggatcactagacgccgtatacacgaattcaactagtggagaatcatttcta

SEQ ID NO: 52719 - DNA, 80 bp, synthetic construct
  source 1..80: mol_type = other DNA
tcatttctaacttcaacgttatgtttatattatccaacagaagctaaaaatgagatttcggataatgaatgggaaaatac

SEQ ID NO: 52720 - DNA, 80 bp, synthetic construct
  source 1..80: mol_type = other DNA
aactataactaatacaatggactacataatttttagatttttactactcatcgctctgatgtcaccatttgtgaggacac

SEQ ID NO: 52721 - DNA, 80 bp, synthetic construct
  source 1..80: mol_type = other DNA
gtatttctaacatccacattatgtatgtattatccaactgaagcaagtactcaaatcagtgatggtgaatggaaagactc

SEQ ID NO: 52722 - DNA, 80 bp, synthetic construct
  source 1..80: mol_type = other DNA
ttgccagcaaatccgcctcctgcctctaccaatcgccagtcaggaaggcagcctactcatcctcaggccatgcagtggaa

SEQ ID NO: 52723 - DNA, 80 bp, synthetic construct
  source 1..80: mol_type = other DNA
aaacctcgacaaggcatggggacggacttcaaccccaacaaggatcactggccagaggcaaatcaggtaggagcgggagc

SEQ ID NO: 52724 - DNA, 80 bp, synthetic construct
  source 1..80: mol_type = other DNA
gatacaccccaaatccgcctcctgcctctacccctcgccggtcaggaaggcagccaaccccgctgactccacctttgaga

SEQ ID NO: 52725 - DNA, 80 bp, synthetic construct
  source 1..80: mol_type = other DNA
acccctcgccggtcaggaaggcagccaaccccgctgactccacctttgagagacactcatcctcaggttatgcagtggaa

SEQ ID NO: 52726 - DNA, 80 bp, synthetic construct
  source 1..80: mol_type = other DNA
gacccagcatccggggaattaactgttctagagtatttggtgtcttttggagtgtggattcgcactcctcccgcttacag

SEQ ID NO: 52727 - DNA, 80 bp, synthetic construct
  source 1..80: mol_type = other DNA
accagttggacccagcgttcggagccaattcaaatttggggtggagccctcaagctcagggcatgctcacaactgtgcca

SEQ ID NO: 52728 - DNA, 80 bp, synthetic construct
  source 1..80: mol_type = other DNA
gcagctcctcctcctgcctccaccaatcggcaggtaggaaggcagcctactcccctgtctccacctctaagagatactca

SEQ ID NO: 52729 - DNA, 80 bp, synthetic construct
  source 1..80: mol_type = other DNA
agcaaccaggctgatgtcaataccccggctgacattgtcgatcgggacccaagtagcgatgaggctattccgactaggtt

SEQ ID NO: 52730 - DNA, 80 bp, synthetic construct
  source 1..80: mol_type = other DNA
gacccagcattttggaagagaaactgttcttgagtatttggtgtcttttggagtgtggattcgcactcctcctgcttaca

SEQ ID NO: 52731 - DNA, 80 bp, synthetic construct
  source 1..80: mol_type = other DNA
cagcagcaccttcctcctgcctccaccaatcggcagagtcaggaagctacagccacctgctggtggctccagttccggaa

SEQ ID NO: 52732 - DNA, 80 bp, synthetic construct
  source 1..80: mol_type = other DNA
ccaacaaggtaggggctgctcagggcatactacacacatcgccagcaaatccgcctcctgcctctaccaatcgccggtca

SEQ ID NO: 52733 - DNA, 80 bp, synthetic construct
  source 1..80: mol_type = other DNA
gatccagcatccagggaattagtagtcagtttggtgtcttttggagtgtggattcgcactcctcccgcttacagaccacc

SEQ ID NO: 52734 - DNA, 80 bp, synthetic construct
  source 1..80: mol_type = other DNA
tccttccgtaagagatctcctagacaccgcctcgagaagccttagagtcgcccgagcattgctcacctcaccatactgca

SEQ ID NO: 52735 - DNA, 80 bp, synthetic construct
  source 1..80: mol_type = other DNA
agggccctgtactttcctgctggtggctccagttcaggaacagtgagccctgctcagaatactgtctctgccatatcgtc

SEQ ID NO: 52736 - DNA, 80 bp, synthetic construct
  source 1..80: mol_type = other DNA
ggagccctctggctcagggcatactcacaactgtgccagcagctcctcctcctgccaccaccaatcggcaatcaggaagg

SEQ ID NO: 52737 - DNA, 80 bp, synthetic construct
  source 1..80: mol_type = other DNA
ttctgacttctttccttcagtacgagatcttctagataccgcctcacatactgcactcaggcaagcaattctttgctggg

SEQ ID NO: 52738 - DNA, 80 bp, synthetic construct
  source 1..80: mol_type = other DNA
tccttcagtacgagatcttctagataccgcctcacatactgcactcaggcaagcaattctttgctggggggaactaatga

SEQ ID NO: 52739 - DNA, 80 bp, synthetic construct
  source 1..80: mol_type = other DNA
tgcctcatcttcttgttggttcttctggactatcaaggtatgttggccgtttgtcctctaaccagcacgggaccatgcag

SEQ ID NO: 52740 - DNA, 80 bp, synthetic construct
  source 1..80: mol_type = other DNA
cctctcacatctcgtcaatctcctcgaggactggggaccctgcgctgaacatggagaacatcacatcaggattcctagga

SEQ ID NO: 52741 - DNA, 80 bp, synthetic construct
  source 1..80: mol_type = other DNA
agactgtgtgtttaaagactgggaggagttgggtgaggagattaggttaaaagcctccaagctgtgccttgggtggcttt

SEQ ID NO: 52742 - DNA, 80 bp, synthetic construct
  source 1..80: mol_type = other DNA
caggaatggcaaactccttcttttcctaagattcatttacatgaggacattattaatagatgtcaacaatttgtaggtcc

SEQ ID NO: 52743 - DNA, 80 bp, synthetic construct
  source 1..80: mol_type = other DNA
tggggtggagccctcaggctcagggtgcattgacaacagtgccagtagcacctcctcctgcctccaccaatcggcagcct

SEQ ID NO: 52744 - DNA, 80 bp, synthetic construct
  source 1..80: mol_type = other DNA
accatacagccctcaggcaagctgttctgtgttggggtgagttaatgaatcttgctacctgggtgggaacctgtctcaca

SEQ ID NO: 52745 - DNA, 80 bp, synthetic construct
  source 1..80: mol_type = other DNA
caaaccttgccagcaaatccgcctcctgctgctaccaatcgccagtcagccgcctcctgctgctaccaatcgccagtcag

SEQ ID NO: 52746 - DNA, 80 bp, synthetic construct
  source 1..80: mol_type = other DNA
gacccagcatcccgggaatttgagtatttggtgtctttcggagtgtggattcgcactcctcccgcttacagaccaccaaa

SEQ ID NO: 52747 - DNA, 80 bp, synthetic construct
  source 1..80: mol_type = other DNA
gacccagcatcctgttcttgagtatctggtgtcttttggagtgtggattcgcactcctcccgcttacagaccaccaaatg

SEQ ID NO: 52748 - DNA, 80 bp, synthetic construct
  source 1..80: mol_type = other DNA
caggcacttatctgggatctgctgcgctgtccccagctctcaacccatataccgcacatctttcggcgatgtgggctggg

SEQ ID NO: 52749 - DNA, 80 bp, synthetic construct
  source 1..80: mol_type = other DNA
cgaatgcagttaagacaaatgcagacgctggcgtgtctatggattcatcgacgcagtcacgaccttcaagcaacgttggg

SEQ ID NO: 52750 - DNA, 80 bp, synthetic construct
  source 1..80: mol_type = other DNA
tccttcagtaagagatcttctagataccgcctcagctctgtatcgggatgccggggagaactaatgactctagctacctg

SEQ ID NO: 52751 - DNA, 80 bp, synthetic construct
  source 1..80: mol_type = other DNA
ggtgggtgtaaatttggaagatccagcatccagggacctagtagtaagttatgtcaatactaatatgggcctaaagttca

SEQ ID NO: 52752 - DNA, 80 bp, synthetic construct
  source 1..80: mol_type = other DNA
gctggtggctccagttccggaacagtaagccctgttcagaatactgtctctcacatctcatcaatcttcacgaagactgg

SEQ ID NO: 52753 - DNA, 80 bp, synthetic construct
  source 1..80: mol_type = other DNA
tctaaatcctcacaaaacaaaaagatggggttattccctcaacttcatgggatatgtaattggtagctggggaagcttac

SEQ ID NO: 52754 - DNA, 80 bp, synthetic construct
  source 1..80: mol_type = other DNA
cacaagatcatattgtacaaaaaatcaaacagtgttttagaaaacttcctgtaaataggcctattgattggaaagtgtgc

SEQ ID NO: 52755 - DNA, 80 bp, synthetic construct
  source 1..80: mol_type = other DNA
aagatcccagagtcagggccctgtactttcctgctggtggctccagttcaggaacagtcagccctgctcagaatactgtc

SEQ ID NO: 52756 - DNA, 80 bp, synthetic construct
  source 1..80: mol_type = other DNA
catttcttgtctcactcctccagcttatagaccaccaaatgcccctatcttatcaacacttccggagactactgttgtta

SEQ ID NO: 52757 - DNA, 80 bp, synthetic construct
  source 1..80: mol_type = other DNA
gaggttggtcttccaaacctcgacaaggcatggggacaaatctttctgttcccaatcctctgggaaatcaggtaggagcg

SEQ ID NO: 52758 - DNA, 80 bp, synthetic construct
  source 1..80: mol_type = other DNA
ccaacaaggtaggagctcaggctcagggcatactacaaaccttgccagcaaatccgcctcctgcctctaccaatcgccag

SEQ ID NO: 52759 - DNA, 80 bp, synthetic construct
  source 1..80: mol_type = other DNA
tcagggcatactacacactttgccagcaaatccgcctcctgcctccaccaatcgccagtcaggaaggcggcagccgaccc

SEQ ID NO: 52760 - DNA, 80 bp, synthetic construct
  source 1..80: mol_type = other DNA
gaggttggtcttccaaacctcgacaaggcatggggacgagagccaatccaaaccatccagattgggacttcaaccccaac

SEQ ID NO: 52761 - DNA, 80 bp, synthetic construct
  source 1..80: mol_type = other DNA
aaggatcaatggccagcggcaaaccaggtaggagtgggagcattcgggccagggttcactccaccacacggcagtctttt

SEQ ID NO: 52762 - DNA, 80 bp, synthetic construct
  source 1..80: mol_type = other DNA
actccaaagtgaggggcctatgctttcctgctggtggctcaagttccggaacagtaaaccctgttccgactactgcctct

SEQ ID NO: 52763 - DNA, 80 bp, synthetic construct
  source 1..80: mol_type = other DNA
accatacagcaataaggcaagcttttgtgtgttggggtgagttgctgaatctggccacctgggtgggaagtaatttggac

SEQ ID NO: 52764 - DNA, 80 bp, synthetic construct
  source 1..80: mol_type = other DNA
atgcctgctggtggctccagttcaggaacagtaaaccctgctccgactattgcctctcacatatcgtcaatctccgcgag

SEQ ID NO: 52765 - DNA, 80 bp, synthetic construct
  source 1..80: mol_type = other DNA
aggactgggaggagctgggggaggagattaggttaaatattaggaggctgtaggcataaattggtctgcgcaccagcacc

SEQ ID NO: 52766 - DNA, 80 bp, synthetic construct
  source 1..80: mol_type = other DNA
gatccagcatccagggatctagtaagtttaaagatcaggcaactattgtggtttcatatatcttgccttacttttggaag

SEQ ID NO: 52767 - DNA, 80 bp, synthetic construct
  source 1..80: mol_type = other DNA
aattggtctgcgtaccagcaccatgcaacttttctactgttcaagcctccaagctgtgccttgggtggctttggggcatg

SEQ ID NO: 52768 - DNA, 80 bp, synthetic construct
  source 1..80: mol_type = other DNA
ctgctaggttgtactgccaactggattcttcgcgggacgtcctttgtttacgtcccgtcggcgctgaatcccgcggacga

SEQ ID NO: 52769 - DNA, 80 bp, synthetic construct
  source 1..80: mol_type = other DNA
tggctggggcttggccataggccatcagcgcatgcgtggaacctttgtggctcctctgccgatccatactgcggaactcc

SEQ ID NO: 52770 - DNA, 80 bp, synthetic construct
  source 1..80: mol_type = other DNA
aacatcacatcaaaattcctaggacccctgctcgtgttacaggaggggtttttctcgttgacaagaatcctcacaatacc

SEQ ID NO: 52771 - DNA, 80 bp, synthetic construct
  source 1..80: mol_type = other DNA
taattgatacagcatcagctctgtatcgggaagccttagaatctccggagcattgctccgctcaccatacagcactcagg

SEQ ID NO: 52772 - DNA, 80 bp, synthetic construct
  source 1..80: mol_type = other DNA
tccggagcattgctccgctcaccatacagcactcaggcaagccattctatgctggggggaagtaacgaatctagctacct

SEQ ID NO: 52773 - DNA, 80 bp, synthetic construct
  source 1..80: mol_type = other DNA
agtcggggctctgtactttcctgctgggggctccggttcaagaacagtgagccctgctcagaatactgtctctgccatat

SEQ ID NO: 52774 - DNA, 80 bp, synthetic construct
  source 1..80: mol_type = other DNA
gaggttggtcttccaaccctcgacaaggcatggggacggacttcaaccccaacaaggatcactggccagaggcaaatcag

SEQ ID NO: 52775 - DNA, 80 bp, synthetic construct
  source 1..80: mol_type = other DNA
attttggggtggagccctcaggctcagggcatactgacaacagtgccagtagcacctcctcctgcctccaccaatcggca

SEQ ID NO: 52776 - DNA, 80 bp, synthetic construct
  source 1..80: mol_type = other DNA
caactgtgccaacagcacctcctcctgcctccaccaatcggcagttaggaaggaagcctactcccctgtctctcagagac

SEQ ID NO: 52777 - DNA, 80 bp, synthetic construct
  source 1..80: mol_type = other DNA
agccctcaggctcagggcatattgacaacagtgccagcggcgcctcctcctgcctccaccaatcggcagtcaggaagaca

SEQ ID NO: 52778 - DNA, 80 bp, synthetic construct
  source 1..80: mol_type = other DNA
agcggcaaaccaggtaggagtgggatcattcgggccaggggtcactccacggcagtcaagaagacagcctactcccatct

SEQ ID NO: 52779 - DNA, 80 bp, synthetic construct
  source 1..80: mol_type = other DNA
actccacggcagtcaagaagacagcctactcccatctctccacctctaagagacagtcatcctcaggccgcgaggtggaa

SEQ ID NO: 52780 - DNA, 80 bp, synthetic construct
  source 1..80: mol_type = other DNA
accatacagcactcaggcaagcagttttgtgttggggtgagttgatgactctagctacctggttgggaagtaattgggaa

SEQ ID NO: 52781 - DNA, 80 bp, synthetic construct
  source 1..80: mol_type = other DNA
agactgtttgtttaaagactgggaggagttgggggaggagattaggcacctctgcctaatcatctcatgttcatgtccta

SEQ ID NO: 52782 - DNA, 80 bp, synthetic construct
  source 1..80: mol_type = other DNA
ctattcaagcctccaagctgtgccttgggtggttttggggcatggacattgacccatataaagaatttggagcttctgtg

SEQ ID NO: 52783 - DNA, 80 bp, synthetic construct
  source 1..80: mol_type = other DNA
ttgggattctacacaaaacccggccgtgacagccgcgtccttggcaatccttgagcggctgtctgaagcgacaccaataa

SEQ ID NO: 52784 - DNA, 80 bp, synthetic construct
  source 1..80: mol_type = other DNA
aggcctatgaacaacatggggcgccttacactggtaatgtgtttcaggtggaaactgttcacacatatggtgatgactga

SEQ ID NO: 52785 - DNA, 80 bp, synthetic construct
  source 1..80: mol_type = other DNA
caacatcggccgtagagttgctatcatcaccagcacgtggccacttaaatgacataatctttgtgacaaagtctggactc

SEQ ID NO: 52786 - DNA, 80 bp, synthetic construct
  source 1..80: mol_type = other DNA
tccatggactacacggcaggccgccaacacattcttgggtgccatccacctgggtccacgtatcaacccatacactgctc

SEQ ID NO: 52787 - DNA, 80 bp, synthetic construct
  source 1..80: mol_type = other DNA
tgatcgaatgcccacgggaacttatcttggatctctttcacttcaccccaacattaatccgtatacggcccatctctcgg

SEQ ID NO: 52788 - DNA, 80 bp, synthetic construct
  source 1..80: mol_type = other DNA
gatgcctaatgaagtctttagggctattaaggactttagattctcgtgtcttaggggagatttgcaaacaaaagaaaaca

SEQ ID NO: 52789 - DNA, 80 bp, synthetic construct
  source 1..80: mol_type = other DNA
cctgctggtggctccagttcagggacacagaaccctgctccgactattgcctctctcacatcatcaatcttctcgaagac

SEQ ID NO: 52790 - DNA, 80 bp, synthetic construct
  source 1..80: mol_type = other DNA
gtgttttaacaaccttgccagcagatccgcctcctgcttccaccaatcggcggttcgggagaaagccaccccctgtctgt

SEQ ID NO: 52791 - DNA, 80 bp, synthetic construct
  source 1..80: mol_type = other DNA
gatggaagagaaactgttcttgaatacttggtgtcttttggagtgtggattcgcactcctcccgcttacagaccaccaaa

SEQ ID NO: 52792 - DNA, 80 bp, synthetic construct
  source 1..80: mol_type = other DNA
ttcccctgctggtggctccagttcaggaacagtaaaccctgttccgactactgtctctcccatatcgtcaatcttctcga

SEQ ID NO: 52793 - DNA, 80 bp, synthetic construct
  source 1..80: mol_type = other DNA
aaactcttcaagatcccagagtcagggccctgaactttcctgctggtggctccagttcaggaacagtgagccctgctcag

SEQ ID NO: 52794 - DNA, 80 bp, synthetic construct
  source 1..80: mol_type = other DNA
attcaattcgccctatagtgagccgtattacactcacctctgcctaatcatctcatgttcatgtcctactgttcaagcct

SEQ ID NO: 52795 - DNA, 80 bp, synthetic construct
  source 1..80: mol_type = other DNA
gttggggtggcgccctcaggctcagggcctactcacaactgtgccagcagctcctcctcctgcctccaccaatcggcagt

SEQ ID NO: 52796 - DNA, 80 bp, synthetic construct
  source 1..80: mol_type = other DNA
ctcaggctcagggcataatacaaaccttgccagcaaatccgcctcctgcatctaccactcgccggtcagggaggcagcct

SEQ ID NO: 52797 - DNA, 80 bp, synthetic construct
  source 1..80: mol_type = other DNA
gatccagcattgtggtttcacatttcctgtcttacttttgggagagaaactgttcttgaatatttggtgtcttttggagt

SEQ ID NO: 52798 - DNA, 80 bp, synthetic construct
  source 1..80: mol_type = other DNA
gaaaaggcatggggacaaatctttctgtccccaatcccctgggattcttccccgatcatcagttggaccctgcattcaaa

SEQ ID NO: 52799 - DNA, 80 bp, synthetic construct
  source 1..80: mol_type = other DNA
cagatcttgcccaaggtcttacataagaggactcttggactcgcagcttacataagaggactcttggactcgcagcaatg

SEQ ID NO: 52800 - DNA, 80 bp, synthetic construct
  source 1..80: mol_type = other DNA
tcaacgaccgaccttgaggcatacttcaaagactgtttgtttaaggactgggaggagttgggggaggagattaggttaat

SEQ ID NO: 52801 - DNA, 80 bp, synthetic construct
  source 1..80: mol_type = other DNA
tcccttatctccacctctaagggacactcaaggtcagggccctgtactttcctgctggtggctccagttcaggaacagtg

SEQ ID NO: 52802 - DNA, 80 bp, synthetic construct
  source 1..80: mol_type = other DNA
ccagggttcaccggagccctcaggctcagggcatactcacaactgtgccagcagctcctcctcctgcctccaccaatcgg

SEQ ID NO: 52803 - DNA, 80 bp, synthetic construct
  source 1..80: mol_type = other DNA
caggctcagggcatactcacaactgtgccagcagctcctcctcctgcctccaccaatcggcagtcaggaaggcagcctac

SEQ ID NO: 52804 - DNA, 80 bp, synthetic construct
  source 1..80: mol_type = other DNA
tccatcaaactcttcaagatcccagagtcagggctctgtactttcctgctggtggctccagttcaggaacagtgagccct

SEQ ID NO: 52805 - DNA, 80 bp, synthetic construct
  source 1..80: mol_type = other DNA
ccaacaaggtaggagtgggagcattccggccagggttcatccctccccattagggcctgttggggtgaagccctcaggct

SEQ ID NO: 52806 - DNA, 80 bp, synthetic construct
  source 1..80: mol_type = other DNA
ggaggagattaggttaaaggtctttgtattagttaatcattaggaggctgtaggcataaattggtctgcgcaccagcacc

SEQ ID NO: 52807 - DNA, 80 bp, synthetic construct
  source 1..80: mol_type = other DNA
ggccttacttttggaagagagactgtacttgaatatttggtctctttcggagtgtggattcgcactcctccagcctatag

SEQ ID NO: 52808 - DNA, 80 bp, synthetic construct
  source 1..80: mol_type = other DNA
atcagatcctgcccaatcctgcccaaggtcttacataagaggactcttggactcccagcaatgtcaacgaccgaccttga

SEQ ID NO: 52809 - DNA, 80 bp, synthetic construct
  source 1..80: mol_type = other DNA
tccgtctgtacgcgatcttctagataccgccgcgtcctgagcattgttcacctcaccatactgcactcaggcaagcaatt

SEQ ID NO: 52810 - DNA, 80 bp, synthetic construct
  source 1..80: mol_type = other DNA
gacccagcatccagggaattactattgtggtttcacatttcctgaactgttcttgagtatttggtgtcttttggagtgtg

SEQ ID NO: 52811 - DNA, 80 bp, synthetic construct
  source 1..80: mol_type = other DNA
agccaacaaggtaggagctggagcattcgggctgggagtcaccccactgcacggaggccttttggtgtggagacctcagg

SEQ ID NO: 52812 - DNA, 80 bp, synthetic construct
  source 1..80: mol_type = other DNA
caaataccaatttattattcttccaattcagaattagaaaaaagatgtattgagtttcatgctaaatgtgttgacagttc

SEQ ID NO: 52813 - DNA, 80 bp, synthetic construct
  source 1..80: mol_type = other DNA
ataaatcacgccattaagagtggagcatggattagtttgttctgtaattacccaaaatctgagatgattaaactatggaa

SEQ ID NO: 52814 - DNA, 80 bp, synthetic construct
  source 1..80: mol_type = other DNA
ctgctggtggctcaagttccggaacagtaaaccctgttccgactactgcctctcccatatcgtcaatctcctcgaggact

SEQ ID NO: 52815 - DNA, 80 bp, synthetic construct
  source 1..80: mol_type = other DNA
tctgacttctttccttctattcgagatctcctcgacaccgcctctgctctgtatcgggaggccttagagtctccggaaca

SEQ ID NO: 52816 - DNA, 80 bp, synthetic construct
  source 1..80: mol_type = other DNA
gaggtcggttttccaaacctcgacaaggcatggggacgaacctttgtcaccatttggacccggcgttcggagccaattca

SEQ ID NO: 52817 - DNA, 80 bp, synthetic construct
  source 1..80: mol_type = other DNA
gagaggttggtcttccaaacctcggaaaggcatggggacgaatctttctgttcccaataccccaacaaggaccatggcca

SEQ ID NO: 52818 - DNA, 80 bp, synthetic construct
  source 1..80: mol_type = other DNA
gcggcaaaccaggtaggagtgggatctttcggaccagggttcactcctcctcacggaggtcttttggtgtggagccctca

SEQ ID NO: 52819 - DNA, 80 bp, synthetic construct
  source 1..80: mol_type = other DNA
tggactctgttcagatgcaagtgatgaatgactctttaaagggaggtgttctctactgcctggattactccaaatgggac

SEQ ID NO: 52820 - DNA, 80 bp, synthetic construct
  source 1..80: mol_type = other DNA
tcctgcttacagaccaccaaatgcccctatcttatcaacacttccggaaactcctgttgttagacgacgaggcaggtccc

SEQ ID NO: 52821 - DNA, 80 bp, synthetic construct
  source 1..80: mol_type = other DNA
actcgacaaggcatggggacgaacctttctgttcccaaccctctgggattctttcccgatcatcagttggaccctccatt

SEQ ID NO: 52822 - DNA, 80 bp, synthetic construct
  source 1..80: mol_type = other DNA
ccaacaaggtaggagctgtgggggggagccctcaggctcagggcatactacaaaccttgccaacaaatccgcctcctgcc

SEQ ID NO: 52823 - DNA, 80 bp, synthetic construct
  source 1..80: mol_type = other DNA
tcaggctcagggcatactacaaaccttgccaacaaatccgcctcctgcctctaccaatcgacagtcaggaaggcagccta

SEQ ID NO: 52824 - DNA, 80 bp, synthetic construct
  source 1..80: mol_type = other DNA
ctgtattttcctgctggtggctccagttcaggaacagtaaaccctgctccgaatattgcctctcacatctcgtcaatctc

SEQ ID NO: 52825 - DNA, 80 bp, synthetic construct
  source 1..80: mol_type = other DNA
gacccagcatccaggggtcttacttttggaagagaaactgttcttgagtatttggtatcttttggagtgtggattcgcac

SEQ ID NO: 52826 - DNA, 80 bp, synthetic construct
  source 1..80: mol_type = other DNA
tccgtctattcgggacttcacctcaccatacagcactcaggcaagcagttttgtgttggggtgagttgatgactctagct

SEQ ID NO: 52827 - DNA, 80 bp, synthetic construct
  source 1..80: mol_type = other DNA
caggttttgcccaaggtcttacataagaggactcttggactctcagcaatgtcaacgaccgcaaggtcttacataagagg

SEQ ID NO: 52828 - DNA, 80 bp, synthetic construct
  source 1..80: mol_type = other DNA
gatcccatatccggggacctagtagtcagttatgttaacactaatatgggcctaaagttcaggcaactattgtggtttca

SEQ ID NO: 52829 - DNA, 80 bp, synthetic construct
  source 1..80: mol_type = other DNA
ccaccaaaatctgcaagatccccctgctggtggctccagttcaggaacagtaaaccctgttccgactactgcctctccct

SEQ ID NO: 52830 - DNA, 80 bp, synthetic construct
  source 1..80: mol_type = other DNA
ctccacctttgagaaacacgcatcctcaggccatgcagtggaattccacaacctcccaccaaactgctggtggctccagt

SEQ ID NO: 52831 - DNA, 80 bp, synthetic construct
  source 1..80: mol_type = other DNA
gggcatactacaaactttgccagcaaatccgcctcctgcctccaccaatcgccagtcaggaaggcagcctaccccgctga

SEQ ID NO: 52832 - DNA, 80 bp, synthetic construct
  source 1..80: mol_type = other DNA
ataccacccctgctggtggctccagttccggaactgtaaaccctgttccgaccactgcctcacccacatcgtcaatcttc

SEQ ID NO: 52833 - DNA, 80 bp, synthetic construct
  source 1..80: mol_type = other DNA
tctgtgccttctcatctgccggaccgtgtgcacttcgcttcacctctgcctaatcatgcccagcatcatgcaactttttg

SEQ ID NO: 52834 - DNA, 80 bp, synthetic construct
  source 1..80: mol_type = other DNA
aagagctcaagcctgctggaaagctggaggtcttctttttcacctctgcctaatcagcagaccccagcaccatgcaactt

SEQ ID NO: 52835 - DNA, 80 bp, synthetic construct
  source 1..80: mol_type = other DNA
actttttgaagagctcaatttccggaaagcttgagctcttcgttttcacctctgcctaatcatgcccagcaccatgcaac

SEQ ID NO: 52836 - DNA, 80 bp, synthetic construct
  source 1..80: mol_type = other DNA
caaatcaggtaggagcgggagcattagggccagtgccagtagcacctcctcctgcctccaccaatcggcagtcaggaaga

SEQ ID NO: 52837 - DNA, 80 bp, synthetic construct
  source 1..80: mol_type = other DNA
ggggcacaacttatcggaaccgacaactctgttgtcctctctcggaaatacacctcctttccatggctgctaggatgtgc

SEQ ID NO: 52838 - DNA, 80 bp, synthetic construct
  source 1..80: mol_type = other DNA
gatccagcatctaggggcctaaagttcaggcaactattgtggtttcacatttcttgtctcacttttggaagagaaacggt

SEQ ID NO: 52839 - DNA, 80 bp, synthetic construct
  source 1..80: mol_type = other DNA
agcagcaaaccaggtaggagtgggagcattcgggccagggttcactccggctcagggcttaacaacaatgccagcagcgc

SEQ ID NO: 52840 - DNA, 80 bp, synthetic construct
  source 1..80: mol_type = other DNA
ctcccaccaaactctgctacatcctgctggtggctccagttcagaaacagtaaaccctgttccgaccactgcctctccct

SEQ ID NO: 52841 - DNA, 80 bp, synthetic construct
  source 1..80: mol_type = other DNA
agggaccacaaaatagtgtttgagatggagggcaatggctccaacacagaagccaaagcaaaagcaacaacccaatggtc

SEQ ID NO: 52842 - DNA, 80 bp, synthetic construct
  source 1..80: mol_type = other DNA
agtctttcgtacttttgcttggaacgacaggatgcccacgggaaactttttcttggaatctatatcgctttcatcccaac

SEQ ID NO: 52843 - DNA, 80 bp, synthetic construct
  source 1..80: mol_type = other DNA
atggagggcgtaccccgcccagagggccccaaggccaactccaatgaaaatgtgcctcttgcgtcaccacaagacacaat

SEQ ID NO: 52844 - DNA, 80 bp, synthetic construct
  source 1..80: mol_type = other DNA
caacacgccaagcgtccaacacctttcttggcgccatccatcttggtccacgcattaacccttacactgcacatctgagt

SEQ ID NO: 52845 - DNA, 80 bp, synthetic construct
  source 1..80: mol_type = other DNA
aattggtctgcctaatcatctcttgttcatgtcctactgttcaagcctccaagctgtgccttgggtggctttagggcatg

SEQ ID NO: 52846 - DNA, 80 bp, synthetic construct
  source 1..80: mol_type = other DNA
aattggtgtgttcaccagcaccatgcaactttttgctcttagggcatggacattgacccgtataaagaatttggcggttt

SEQ ID NO: 52847 - DNA, 80 bp, synthetic construct
  source 1..80: mol_type = other DNA
ccctgcatctggtcagaaccttagtctcagtcgtaccaagctacggacggaacgcacgtatcccatccatcatctgggct

SEQ ID NO: 52848 - DNA, 80 bp, synthetic construct
  source 1..80: mol_type = other DNA
ccaaatactatggagtggctcagtcgtctcctagtcagttactagtgcatggtcagtggtcgtagggctttccccacctg

SEQ ID NO: 52849 - DNA, 80 bp, synthetic construct
  source 1..80: mol_type = other DNA
ttctggctttcagtaaaggatgatgtggtattgggggccaagtctgtacaacatcttgagtccctttatgccgctgttac

SEQ ID NO: 52850 - DNA, 80 bp, synthetic construct
  source 1..80: mol_type = other DNA
ctccacaacctcacaccaaactctgcctgctggtggctccagttcaggaacagtaaaccctgttccgactactgtatctc

SEQ ID NO: 52851 - DNA, 80 bp, synthetic construct
  source 1..80: mol_type = other DNA
ctggaacctgccacttcaagactgtgtgtttagtgagtgggaggtgttgggggaggaggttaggttaatgatctttgtac

SEQ ID NO: 52852 - DNA, 80 bp, synthetic construct
  source 1..80: mol_type = other DNA
cgaatcaggtaggagcgggagcattgacaacagtgccagcagcacctcctcctgcctccaccaatcggcaggcaggaaga

SEQ ID NO: 52853 - DNA, 80 bp, synthetic construct
  source 1..80: mol_type = other DNA
ctccacaaccttccatcaaactctgcaagagaggcctgctggtggctccagttcaggaacagtaaaccctgttccgacca

SEQ ID NO: 52854 - DNA, 80 bp, synthetic construct
  source 1..80: mol_type = other DNA
atgtcctactgttcaagcctccaagctgtgccttgggtggctttggggcatggacattgacccttataaagaatttggag

SEQ ID NO: 52855 - DNA, 80 bp, synthetic construct
  source 1..80: mol_type = other DNA
gacccagcatccagggaatttatttcctgtcttacttttggaagagaaactgttcttgagtatctggtgtcttttggagt

SEQ ID NO: 52856 - DNA, 80 bp, synthetic construct
  source 1..80: mol_type = other DNA
atatttcttgccttacttttggaagaaaaaatgcccctatcttatcaacacttccggaaactactgttgttagacgacga

SEQ ID NO: 52857 - DNA, 80 bp, synthetic construct
  source 1..80: mol_type = other DNA
ccaacaaggtgggagtgggagcattcgggccagggttcacccctcccgctcctcctcctgccttcaccaatcggcagtca

SEQ ID NO: 52858 - DNA, 80 bp, synthetic construct
  source 1..80: mol_type = other DNA
ttccacagctgtccaccaacatcacctgtattttcctgctggtggctccagttcaggaacagtaaaccctgttccgaata

SEQ ID NO: 52859 - DNA, 80 bp, synthetic construct
  source 1..80: mol_type = other DNA
agactgtgtgtttaaagactgggaggagtgggggaggagattaggttaaaggtaataggattaggacaccattgccctaa

SEQ ID NO: 52860 - DNA, 80 bp, synthetic construct
  source 1..80: mol_type = other DNA
aatcttccgttaatatatactaatatattaatatcttaccttgtgccttgggatggctttggggcatggacattgaccct

SEQ ID NO: 52861 - DNA, 80 bp, synthetic construct
  source 1..80: mol_type = other DNA
cctcctgtcccccaacttgtcctggttacatcttcctcttcatcctgctgctatgcctcatcttcttgttggttcttctg

SEQ ID NO: 52862 - DNA, 80 bp, synthetic construct
  source 1..80: mol_type = other DNA
gacatttgtcacccgtcagaatggggaaccgagtgtcaacatacagccctcaattcatcacaatcaatggaaataataat

SEQ ID NO: 52863 - DNA, 80 bp, synthetic construct
  source 1..80: mol_type = other DNA
tttacttctggaatgtgctttttaaaccgagttagattggccttgcaattgtttgttactaagttggatgaggagacgaa

SEQ ID NO: 52864 - DNA, 80 bp, synthetic construct
  source 1..80: mol_type = other DNA
gtcgcgtcaagattattggtgtgatatgttaaatcagcttatggaggtgcactcctgccctttgctatatacagcttttc

SEQ ID NO: 52865 - DNA, 80 bp, synthetic construct
  source 1..80: mol_type = other DNA
ttctaagtggtggatggaatgatgaggtgtctatgaaagtggagcccattgacggtgtggtgctggaacgattggaattc

SEQ ID NO: 52866 - DNA, 80 bp, synthetic construct
  source 1..80: mol_type = other DNA
tccggccgctatttgtggatgtcttggaggaatgctgctacgtattctgagtatgtgcgaatgcatgcagagggagtgga

SEQ ID NO: 52867 - DNA, 80 bp, synthetic construct
  source 1..80: mol_type = other DNA
tggtgatgatgatatcttaggcttgttgaagcgaggtgcagcccagatgaaagggatggtggcgggacatcttcggccag

SEQ ID NO: 52868 - DNA, 80 bp, synthetic construct
  source 1..80: mol_type = other DNA
ttctgaatgaggcggcgggagcggctgaacgcgtgatgaccggttgggcaaaacagaaggctggtacgttaaagcaagcg

SEQ ID NO: 52869 - DNA, 80 bp, synthetic construct
  source 1..80: mol_type = other DNA
gtgacgaacgcgatggctggggtgttattggacacgaagagggaggcccaggcggaagctaatgtgtacgggagcatggt

SEQ ID NO: 52870 - DNA, 80 bp, synthetic construct
  source 1..80: mol_type = other DNA
tccaactagagctgaattctcaactgtgaatgacatgcgtgcatttctcggactgcgagatgatttgctatgtgaggatg

SEQ ID NO: 52871 - DNA, 80 bp, synthetic construct
  source 1..80: mol_type = other DNA
tggtggtcggcatgttttggctcttccccctacggatcatttgcaaaaattggcgcctttagtcccaccaggtgctgctg

SEQ ID NO: 52872 - DNA, 80 bp, synthetic construct
  source 1..80: mol_type = other DNA
acacggttattgatgatgtgaaacgggttggtcaccatgtcggattggctatcatggagagaggggagccagtgagagag

SEQ ID NO: 52873 - DNA, 80 bp, synthetic construct
  source 1..80: mol_type = other DNA
ccggttgtcgagaatcatgtggtgcatgagatggtaaacaggacaaagactggagtcggccagattggcgaggttaggag

SEQ ID NO: 52874 - DNA, 80 bp, synthetic construct
  source 1..80: mol_type = other DNA
ggagttagcaaagtgttctgaagttatgaaggatgtatcagtggagaagatggtagctagaccggatgaggtgcggggaa

SEQ ID NO: 52875 - DNA, 80 bp, synthetic construct
  source 1..80: mol_type = other DNA
catcatttccgatacacactcgggggtatcatgtatctttagttgatgggtgtgacaagcatgcgatgaaggacccgacg

SEQ ID NO: 52876 - DNA, 80 bp, synthetic construct
  source 1..80: mol_type = other DNA
aataatctcgctgcaggggcgactttctcttgtcaaggattagtgacggggaaacttaaaacatgtttttcagtgacgtt

SEQ ID NO: 52877 - DNA, 80 bp, synthetic construct
  source 1..80: mol_type = other DNA
agcaaaagctcatcataacagagaaacatctccgactacgttgcatgtcatttcagggggtttcttctcctatgacccgg

SEQ ID NO: 52878 - DNA, 80 bp, synthetic construct
  source 1..80: mol_type = other DNA
cagctgttcacataggagggcaagatggtgggggaccagatcatgatatgaatattaacgttgtagtgacagcggcagtg

SEQ ID NO: 52879 - DNA, 80 bp, synthetic construct
  source 1..80: mol_type = other DNA
aagaagtccacatcggagacggcatgtaaggtgtacgttggtgctattgctaagtctccgaatacgactcatcacacaac

SEQ ID NO: 52880 - DNA, 80 bp, synthetic construct
  source 1..80: mol_type = other DNA
caacaatggggttggatttgttccagcgattgacgacaaggggcagacatattttacgacatcgggagtgtttgtggtga

SEQ ID NO: 52881 - DNA, 80 bp, synthetic construct
  source 1..80: mol_type = other DNA
atgatatcttcgaagatatgtttgatcagatggttggttcagaaggtaaaatcaaaggtgtggtgtctggtacattggat

SEQ ID NO: 52882 - DNA, 80 bp, synthetic construct
  source 1..80: mol_type = other DNA
gactttctttcaatatttccgcactgctgaggggtggattaacaggtgtgacctcttgtccctgggatggtacctttgct

SEQ ID NO: 52883 - DNA, 80 bp, synthetic construct
  source 1..80: mol_type = other DNA
ttcgttgtagcttgtggatgttcgaattatgggagcagtggttgtacgcatgttgaactcgtgcaattaggtgttgagtt

SEQ ID NO: 52884 - DNA, 80 bp, synthetic construct
  source 1..80: mol_type = other DNA
tggggagtgcattattgtgccgagggggctggatcgatattacatatttaatcgggttcggtactatgacaagaccattt

SEQ ID NO: 52885 - DNA, 80 bp, synthetic construct
  source 1..80: mol_type = other DNA
ttgatttcataggtcgggttgatgcaactgtcgctgtttcagaatctcctttagatgtagtgagtgcgtggtcggagtta

SEQ ID NO: 52886 - DNA, 80 bp, synthetic construct
  source 1..80: mol_type = other DNA
atcagtcccttggtggtgtatcttccattgatggtgcacgaattgaagagcgctaacactttagccctcgtgaagactcg

SEQ ID NO: 52887 - DNA, 80 bp, synthetic construct
  source 1..80: mol_type = other DNA
gtatcgtgcatggctgaagaaggttggtttgaaaatgggtgaaaacaatccttttagaactgatgaagactgtgatggct

SEQ ID NO: 52888 - DNA, 80 bp, synthetic construct
  source 1..80: mol_type = other DNA
gggtgtgtgcagcaattttggcgatgcctatgtggatgcgttacgcaggtggcaatcctttaattattatgactcaagat

SEQ ID NO: 52889 - DNA, 80 bp, synthetic construct
  source 1..80: mol_type = other DNA
gatcgaaaggcgtcggcgataatgttgttgtctactgctaaggccatgcttcctcttagtgcatttcagttggtggatgg

SEQ ID NO: 52890 - DNA, 80 bp, synthetic construct
  source 1..80: mol_type = other DNA
atccttgtctcgtgctgcagccaaaggacttaagtgggcggctgatcgtgagattatggggtaggtatgtgacattcatt

SEQ ID NO: 52891 - DNA, 80 bp, synthetic construct
  source 1..80: mol_type = other DNA
ggcggctgatcgtgagattatggggtaggtatgtgacattcattcccagggtgcattcttgatgtgaagacaatgcagtc

SEQ ID NO: 52892 - DNA, 80 bp, synthetic construct
  source 1..80: mol_type = other DNA
ggctatgaaaagatccgaaaagcagcgaattggctcggtggaacgtatagccgaccgtggagagttgaaacaagggaaat

SEQ ID NO: 52893 - DNA, 80 bp, synthetic construct
  source 1..80: mol_type = other DNA
gtctgagattcagaagcggattgatactgcgttacctgccatgacatcaatcattggagggacctttggacccggtgcag

SEQ ID NO: 52894 - DNA, 80 bp, synthetic construct
  source 1..80: mol_type = other DNA
ccagagtaggaggggatcatatgctcgtgcgacctgagcagtgggttaatgtaagggatgatttctttctggtgcatgat

SEQ ID NO: 52895 - DNA, 80 bp, synthetic construct
  source 1..80: mol_type = other DNA
gatggatttgagtcgaggcatatcgcagtagggacggatgcgtttcagtgtgttcgcctaggaagattgatgccagaatt

SEQ ID NO: 52896 - DNA, 80 bp, synthetic construct
  source 1..80: mol_type = other DNA
tggtgatgcagtgcgcggtggaggttgggcaaatggtgtaagttatttgatgggtcagcccttgtttcagattgcatatg

SEQ ID NO: 52897 - DNA, 80 bp, synthetic construct
  source 1..80: mol_type = other DNA
gtcgagtggtgaatgatgtagatcgtccgattcaaatcttgtggcaggcagctttaaggacggcagcttcgagtgaggga

SEQ ID NO: 52898 - DNA, 80 bp, synthetic construct
  source 1..80: mol_type = other DNA
gcactggatacaaaaacgatggaacgctttgatcagactaattcggtagacgcagccgttaaattacccgatggaatcaa

SEQ ID NO: 52899 - DNA, 80 bp, synthetic construct
  source 1..80: mol_type = other DNA
gatgtcccagtggcggaggctttaaaaattcttggggcgatgacaaagagcacgttttcctggatggtgtcgattgtagg

SEQ ID NO: 52900 - DNA, 80 bp, synthetic construct
  source 1..80: mol_type = other DNA
gacggagtactcaatggaggctacagcggagaggccaatgtttccaatgacgcaccttacgtccgctgattatgagctct

SEQ ID NO: 52901 - DNA, 80 bp, synthetic construct
  source 1..80: mol_type = other DNA
tgcatagactttttgttatgtggttgaagggcgatgtcatgcattcgcgattttttgatgtcgttgcgaatctcgaatcg

SEQ ID NO: 52902 - DNA, 80 bp, synthetic construct
  source 1..80: mol_type = other DNA
agactgtgtgtttaaagactgggagaatttgggggaagaaaattatttttcacctctgcctaatcatctcttgtacatgt

SEQ ID NO: 52903 - DNA, 80 bp, synthetic construct
  source 1..80: mol_type = other DNA
tgctggtggctccagttcagaaacagtaaaccctgttccgaatattgcctctcacatctcgtcaatctcctcgaggactg

SEQ ID NO: 52904 - DNA, 80 bp, synthetic construct
  source 1..80: mol_type = other DNA
agactgtgtatttaaagactgggaggagttgggggaggagatagataaaaactttttcacctctgcctaatcatctcatg

SEQ ID NO: 52905 - DNA, 80 bp, synthetic construct
  source 1..80: mol_type = other DNA
ctccacaactttccaccaaactccgcaagtccctgctggtggctcagcttcaggaacagtaaaccctgttccgactactg

SEQ ID NO: 52906 - DNA, 80 bp, synthetic construct
  source 1..80: mol_type = other DNA
atgcaatggaattccacaaccttccaccaaactcagcaagtcactgctggtggctccagttcaggaacagtaaaccctgt

SEQ ID NO: 52907 - DNA, 80 bp, synthetic construct
  source 1..80: mol_type = other DNA
cagccgtaacatttatattacatctttacgcaaaacttgaaataataaatcatgccattaagaatggagcatggattagt

SEQ ID NO: 52908 - DNA, 80 bp, synthetic construct
  source 1..80: mol_type = other DNA
tttcacgtcaggggtttgctttttgaacagggtgcgtttggctttgcagttgtttgtgtctaaattagcagaggaaacaa

SEQ ID NO: 52909 - DNA, 80 bp, synthetic construct
  source 1..80: mol_type = other DNA
aatcttctcaggagtattggtgtgacgcattaagtcagcttttggagatgcactcctgtcctttgttctactctgctttt

SEQ ID NO: 52910 - DNA, 80 bp, synthetic construct
  source 1..80: mol_type = other DNA
cttttgagctctgcatgggtggatggggtatctatggatgttgcgcccattgatgcggtggtgctggagcggctggagtt

SEQ ID NO: 52911 - DNA, 80 bp, synthetic construct
  source 1..80: mol_type = other DNA
tgctgggagacatctctggctttcttggagaaatgctgcgacatattctgagtatgttcgcactcattttctggatggtg

SEQ ID NO: 52912 - DNA, 80 bp, synthetic construct
  source 1..80: mol_type = other DNA
gtggtgatgatgacattctcggccttctcaaaagaggtgcctcaaaaatgaagggtatggttgcgggccatttacgtcca

SEQ ID NO: 52913 - DNA, 80 bp, synthetic construct
  source 1..80: mol_type = other DNA
gttttaggtgaagcagctggagcagctgagagagtgatggcgggatgggcgaaacaaaaagctggtactttgaaacaagc

SEQ ID NO: 52914 - DNA, 80 bp, synthetic construct
  source 1..80: mol_type = other DNA
cgtaaccaatgctatggctggtgtgttgctggatacgaagagagaggcccaggccgaggcaaatgtttatggaagtatgg

SEQ ID NO: 52915 - DNA, 80 bp, synthetic construct
  source 1..80: mol_type = other DNA
atccaactagagctgaatttgcttcaattcaagatatgcgtgcctttctaggccttcaggatgatctactgagtgaggag

SEQ ID NO: 52916 - DNA, 80 bp, synthetic construct
  source 1..80: mol_type = other DNA
gatacagttattgatgatgtgaagagggttgggcatcatgttgggttagcgatcactgaaagaggggaaccagtgaagga

SEQ ID NO: 52917 - DNA, 80 bp, synthetic construct
  source 1..80: mol_type = other DNA
gccagtagtggagaaccatgttgtgcatgagatggttaatcggacgaaaacaggcgtagggcaaatcggtgaggtcagaa

SEQ ID NO: 52918 - DNA, 80 bp, synthetic construct
  source 1..80: mol_type = other DNA
gggagttggcgaaatgctcagaggttatgaaggatgtttctattgagaagatggtggcgcgccccgatgaagtacgtggg

SEQ ID NO: 52919 - DNA, 80 bp, synthetic construct
  source 1..80: mol_type = other DNA
acttcttttcctgtgcatactcgagggtatcatgtatccttagttgatggttgtgacaagcatcctatgcagaacccgac

SEQ ID NO: 52920 - DNA, 80 bp, synthetic construct
  source 1..80: mol_type = other DNA
ggaaaagctcgcgacaggttcaactttctcttgtcaggggttggtaacaggaaaactgaagacatgctttggggtcacct

SEQ ID NO: 52921 - DNA, 80 bp, synthetic construct
  source 1..80: mol_type = other DNA
tggcgaaggtacatcatgggcgggatacatctccaactacggtgcaggttatttcagggagtttcttttcttatgatccc

SEQ ID NO: 52922 - DNA, 80 bp, synthetic construct
  source 1..80: mol_type = other DNA
gcagccgtgcatattggaggtcaagacggtggacttcccgaccatgatatgaacatcaatgttgtggtcacagctgccgt

SEQ ID NO: 52923 - DNA, 80 bp, synthetic construct
  source 1..80: mol_type = other DNA
taaaaaaaccgcttcatctgggacaacatgcaagatttatgtgggagcgattgccaagtctccagatacgtctcaccatg

SEQ ID NO: 52924 - DNA, 80 bp, synthetic construct
  source 1..80: mol_type = other DNA
cgacaaacaatggggtcggatttgtgcctgcaattgacgacaagggccaaacatactttacaggatccggggtatttgtg

SEQ ID NO: 52925 - DNA, 80 bp, synthetic construct
  source 1..80: mol_type = other DNA
gatgacatttttgaggacatgtttgaccagatggttggatcaggtggaaagatcaaaggagtggtgtcaggtaccttgga

SEQ ID NO: 52926 - DNA, 80 bp, synthetic construct
  source 1..80: mol_type = other DNA
gcggttgtcatttaatatttcagctctgcttagaggtggtttaacaggtgtgacgtcgtgtccgtggaatggcacgtttg

SEQ ID NO: 52927 - DNA, 80 bp, synthetic construct
  source 1..80: mol_type = other DNA
cttttgttgtggcttgttcttgcactgactgcggaacaactgggtgtagtcatgtggaacttgtgcagcttggagttgag

SEQ ID NO: 52928 - DNA, 80 bp, synthetic construct
  source 1..80: mol_type = other DNA
tttggagaatgcattattgtacctcggggtttggatcgatattatattttcaatcgggtccgttattatgataaaactat

SEQ ID NO: 52929 - DNA, 80 bp, synthetic construct
  source 1..80: mol_type = other DNA
aataggcccgttagttgtataccttcctctcatggtgcacgaattgcagagtactaacactttggctctagtgaaaaccc

SEQ ID NO: 52930 - DNA, 80 bp, synthetic construct
  source 1..80: mol_type = other DNA
ggtatcgaacatggttgaggaaggttggccttagaatgggtgataagaatccatttaagacagatgaggagtgcgatgct

SEQ ID NO: 52931 - DNA, 80 bp, synthetic construct
  source 1..80: mol_type = other DNA
tgggtctgttcttccatcctcgcaatgccaatgtggatgcggtacacgacgggaaatcccctcatcgttcttacccatga

SEQ ID NO: 52932 - DNA, 80 bp, synthetic construct
  source 1..80: mol_type = other DNA
ggatcgcaaagcagcagcaataatgttactttctactgctaaggctatgttgcctctgagcgcgttccagttggtggatg

SEQ ID NO: 52933 - DNA, 80 bp, synthetic construct
  source 1..80: mol_type = other DNA
tgtccgaaatacagaagcgaattgacacagctttgccggcgatgacgtcaatcatcggaggtacgtttgggccaggtgct

SEQ ID NO: 52934 - DNA, 80 bp, synthetic construct
  source 1..80: mol_type = other DNA
gcaagggttggaggagatcacatgttggtgcgtcctgaacaatggatagatgtgagggaggagacgttttcaggatatga

SEQ ID NO: 52935 - DNA, 80 bp, synthetic construct
  source 1..80: mol_type = other DNA
tgatggttttgagtcacgccacgtagctgtgatgactgatacttttgaatgtgtgaaactaggacatttgatgccggagt

SEQ ID NO: 52936 - DNA, 80 bp, synthetic construct
  source 1..80: mol_type = other DNA
ttgcggatgccgttagagctggtggatggaatcatggtcttagttatttgatgagtaatcagctgttccagattgcatac

SEQ ID NO: 52937 - DNA, 80 bp, synthetic construct
  source 1..80: mol_type = other DNA
agcgaggttataactgatgcggagcggccaatcaatgttctttggcaggcagcattgaggacagcggcctcaagtgatgg

SEQ ID NO: 52938 - DNA, 80 bp, synthetic construct
  source 1..80: mol_type = other DNA
tgaagtgtccgtggtagaggcgatgaagatttttagtcagatgacaaagagcacttggagttggctcgtgtcaactgtta

SEQ ID NO: 52939 - DNA, 80 bp, synthetic construct
  source 1..80: mol_type = other DNA
atacagaatacaatgtggaggcgatcgcacagctgccgacgtttcctatgacacatgtcacttctgcggactatgagttg

SEQ ID NO: 52940 - DNA, 80 bp, synthetic construct
  source 1..80: mol_type = other DNA
ttgcaccgcctgttcgctatgtggttgagaaaagagatttccagttctcgattctttgatgtggttgcaaattttgaatc

SEQ ID NO: 52941 - DNA, 80 bp, synthetic construct
  source 1..80: mol_type = other DNA
ttttacgtcaggggtttgtttcttgaacagggtgcgtttggctctgcagttatttgtgtcaaaactggcggaggaaacga

SEQ ID NO: 52942 - DNA, 80 bp, synthetic construct
  source 1..80: mol_type = other DNA
aaccttcccaagagtattggtgtgatgcactaagtcagcttctggagatgcattcttgccctttgttctactctgctttt

SEQ ID NO: 52943 - DNA, 80 bp, synthetic construct
  source 1..80: mol_type = other DNA
cttctaagctctgcatgggtggatggagtatctatggatgtctcacctattgattcagtggtgctagagcgattggagtt

SEQ ID NO: 52944 - DNA, 80 bp, synthetic construct
  source 1..80: mol_type = other DNA
gtggcgatgatgatatccttggccttctcaagagaggtgcttcaaaaatgaagggcatggttgcagggcatttacggcct

SEQ ID NO: 52945 - DNA, 80 bp, synthetic construct
  source 1..80: mol_type = other DNA
gtcctaggtgaagcggctggagcagctgaacgagtgatggcagggtgggcaaaacagaaagctgggaccctgaaacaggc

SEQ ID NO: 52946 - DNA, 80 bp, synthetic construct
  source 1..80: mol_type = other DNA
cgtgactaatgctatggctggcgtgctcctagatacaaaaagagaagcacaggctgaggcgaatgtttatggaagcatgg

SEQ ID NO: 52947 - DNA, 80 bp, synthetic construct
  source 1..80: mol_type = other DNA
atccaactagagctgaattcgcttcagttcaggatatgcgtgcctttctgggccttcaagatgatttattgagtgaagaa

SEQ ID NO: 52948 - DNA, 80 bp, synthetic construct
  source 1..80: mol_type = other DNA
ttggtggtcggcatgttttggctcttcctccaacagagcacttacaaaagctggctcctttagttcctcccggtgctgct

SEQ ID NO: 52949 - DNA, 80 bp, synthetic construct
  source 1..80: mol_type = other DNA
gctagtagtggagaatcatgttgtgcatgagatggtcaaccggacgaagaccggtgtagggcaaatcggtgaggtcagga

SEQ ID NO: 52950 - DNA, 80 bp, synthetic construct
  source 1..80: mol_type = other DNA
gagagttggcaaaatgttccgaggttatgaaggatgtttccattgagaagatggtggcgcgtcctgatgaagtgcgtggg

SEQ ID NO: 52951 - DNA, 80 bp, synthetic construct
  source 1..80: mol_type = other DNA
acctcttttcctgttcatactcgaggataccatgtttctctggttgacggttgtgataaacatcctatgcagaatccgac

SEQ ID NO: 52952 - DNA, 80 bp, synthetic construct
  source 1..80: mol_type = other DNA
agaaaagctcgcgacaggctcaaccttttcttgtcaggggttggtaacgggcaagttgaagacatgttttggggttactt

SEQ ID NO: 52953 - DNA, 80 bp, synthetic construct
  source 1..80: mol_type = other DNA
gcggctgtacacattggaggtcaagatggtggacttcctgatcatgacatgaatattaacgttgtggtcacggctgcagt

SEQ ID NO: 52954 - DNA, 80 bp, synthetic construct
  source 1..80: mol_type = other DNA
gcgactaacaatggtgtcggatttgtgcccgcaattgacgataagggccaaacatattttacaggatctggagtcttcgt

SEQ ID NO: 52955 - DNA, 80 bp, synthetic construct
  source 1..80: mol_type = other DNA
gatgatatttttgaagatatgtttgatcaaatggttgggtcaggtggaaagattaaaggagtggtgtcaggtactttgga

SEQ ID NO: 52956 - DNA, 80 bp, synthetic construct
  source 1..80: mol_type = other DNA
ggggcgattgtcatttaacatctcggcgttgcttagaggcggtttaacgggtgtgacgtcgtgcccatggaatggtacgt

SEQ ID NO: 52957 - DNA, 80 bp, synthetic construct
  source 1..80: mol_type = other DNA
ttgcttttgtcgtagcttgttcctgtactgattgtggaacaacgggatgtagtcatgtggaacttgtgcaacttggggtc

SEQ ID NO: 52958 - DNA, 80 bp, synthetic construct
  source 1..80: mol_type = other DNA
gagtttggtgaatgtattattgtgccacgcggtctggatcgatattatatcttcaatcgagtccgttactatgataagac

SEQ ID NO: 52959 - DNA, 80 bp, synthetic construct
  source 1..80: mol_type = other DNA
tgataggcccattggtcgtatatctccctcttatggtgcatgaattgcagagtactaataccttggctcttgtaaaaaca

SEQ ID NO: 52960 - DNA, 80 bp, synthetic construct
  source 1..80: mol_type = other DNA
cgatatcggacatggttgaggaaggtagggcttagaatgggtgataagaatccattcaaaacagatgaagagtgtgatgc

SEQ ID NO: 52961 - DNA, 80 bp, synthetic construct
  source 1..80: mol_type = other DNA
ttgggtgtgctcgtcgattcttgccatgccgatgtggatgcggtatacgacaggaaaccctctcattgttcttactcacg

SEQ ID NO: 52962 - DNA, 80 bp, synthetic construct
  source 1..80: mol_type = other DNA
aggatcgcaaagcggcagcaataatgctcctctctactgctaaagctatgttgcctctgagtgcgttccaattggtagat

SEQ ID NO: 52963 - DNA, 80 bp, synthetic construct
  source 1..80: mol_type = other DNA
ggttcattgtcacgcgcagcggcgaaaggattaaagtgggcggctgatcgtgaaattttggggtaggtatgtggcgttcg

SEQ ID NO: 52964 - DNA, 80 bp, synthetic construct
  source 1..80: mol_type = other DNA
tgtctgagatacaaaaacgcatcgacacagctttaccggcgatgacgtcaatcatcggaggcacgtttggaccaggtgct

SEQ ID NO: 52965 - DNA, 80 bp, synthetic construct
  source 1..80: mol_type = other DNA
tgatggttttgagtcacgacatgtagctgtgatgactgacacttttgaatgcgtgaagctggggcatttgatgccagagt

SEQ ID NO: 52966 - DNA, 80 bp, synthetic construct
  source 1..80: mol_type = other DNA
ttgcggacgctgttagagctggtggatggaatcatggtcttagttatttaatgggtaatcagctatttcaaattgcgtac

SEQ ID NO: 52967 - DNA, 80 bp, synthetic construct
  source 1..80: mol_type = other DNA
cgaagtgcctgtggtggaggcgatgaagatttttagtcagatgacaaagagtacgtggagctggcttgtgtcaacggtta

SEQ ID NO: 52968 - DNA, 80 bp, synthetic construct
  source 1..80: mol_type = other DNA
atacggaatataatgtggaggcaatcgcacaacttccgatgtttcctatgacgcatgttacctctgcagattatgagctc

SEQ ID NO: 52969 - DNA, 80 bp, synthetic construct
  source 1..80: mol_type = other DNA
atggagtcaggctggtcagatacagctcatggtgttggtgaggtcccaatgaagacagatctagagctggacttttcact

SEQ ID NO: 52970 - DNA, 80 bp, synthetic construct
  source 1..80: mol_type = other DNA
tgtgaggtgtggaagtaggagtgtgaaacagggaaagagctcaaggcccacaatttatcctgcccacagtcccagtgtcc

SEQ ID NO: 52971 - DNA, 80 bp, synthetic construct
  source 1..80: mol_type = other DNA
taaaagcagatgttacattttcacagtatgggtaaccttgttgataattgagtcgataatgtgggccgccaccgcatccg

SEQ ID NO: 52972 - DNA, 80 bp, synthetic construct
  source 1..80: mol_type = other DNA
actcggctcccagcgaggccagcagcctgacgaacaggttgccagcagtgctgcacaggccgctccccaagacacaatca

SEQ ID NO: 52973 - DNA, 80 bp, synthetic construct
  source 1..80: mol_type = other DNA
ctaggacaagtcccaatccttcatgcgtgaacaaactgcatccaaacgatgccgtccagtcatgagacataaagaaaaaa

SEQ ID NO: 52974 - DNA, 80 bp, synthetic construct
  source 1..80: mol_type = other DNA
ttgggacaagtcccaatccttcatgtgtgaacaaactgcgtttaaatgatgccgtccagtcatgagaaataaagaaaaaa

SEQ ID NO: 52975 - DNA, 80 bp, synthetic construct
  source 1..80: mol_type = other DNA
ccaggacaagtcccagtccatcatgcgagaacaagttgcatttaaatgatgccgttcaatcatgagatataaagaaaaaa

SEQ ID NO: 52976 - DNA, 80 bp, synthetic construct
  source 1..80: mol_type = other DNA
aagaatgaatctcctggggtcgtaacgtctcgtgaccctgccgttgcactatgccggcgatccaaccttccttataccta

SEQ ID NO: 52977 - DNA, 80 bp, synthetic construct
  source 1..80: mol_type = other DNA
ttaggacaagtcccaatccatcatgcgagaacaagctgcatttgaatgaagccgtccaatcctgagacataaagaaaaaa

SEQ ID NO: 52978 - DNA, 80 bp, synthetic construct
  source 1..80: mol_type = other DNA
tccttctattcgtgatctcctcgacaccgcctctgactaaggcaagccattctgtgttggggtgagttgatgaatctggc

SEQ ID NO: 52979 - DNA, 80 bp, synthetic construct
  source 1..80: mol_type = other DNA
cacctgggtgggaagtaatttggaagacccggcatccagggaattagtagtaaactatgtcaatattaatatgggcctaa

SEQ ID NO: 52980 - DNA, 80 bp, synthetic construct
  source 1..80: mol_type = other DNA
gaactcaagtcagttccaccaggctctgttagatccgagggtgaggcctgctggtggctccagttcagagacacagaacc

SEQ ID NO: 52981 - DNA, 80 bp, synthetic construct
  source 1..80: mol_type = other DNA
tcccgtcagttcgggacctactcgacaattgcacacctaaccataccgctctcaggcaagctatcttgtgctggggtgag

SEQ ID NO: 52982 - DNA, 80 bp, synthetic construct
  source 1..80: mol_type = other DNA
actcaacaaccttccaacaaactctgcaagatccccctgctggtggctccagttcaggaacagtaaaccctgttccgact

SEQ ID NO: 52983 - DNA, 80 bp, synthetic construct
  source 1..80: mol_type = other DNA
tgggggaggagataaggttaatgatctttgtattaggaggctgtaggcataaattggtctgcgcaccagcaccatgcaac

SEQ ID NO: 52984 - DNA, 80 bp, synthetic construct
  source 1..80: mol_type = other DNA
gaaccttcctgctggtggctccagttcaggaacagtgagccctgctcagaatactgtctctgccatatcgtcaatcttat

SEQ ID NO: 52985 - DNA, 80 bp, synthetic construct
  source 1..80: mol_type = other DNA
acctccacaatcttcagccaagatctgatagctcccactgctggtggctcaacttcaggaacagtaatccctgttccgac

SEQ ID NO: 52986 - DNA, 80 bp, synthetic construct
  source 1..80: mol_type = other DNA
gttgctgttggcattaacatggactctgttcagatgcaagtgatgaatgactctttaaaggggggtgttctttactgttt

SEQ ID NO: 52987 - DNA, 80 bp, synthetic construct
  source 1..80: mol_type = other DNA
ggtttaaagatcaggcaactattgtggtttcatatatcttgccttacttttggaagagagactgtacttgaatatttggt

SEQ ID NO: 52988 - DNA, 80 bp, synthetic construct
  source 1..80: mol_type = other DNA
gacccagcatccagggaattagtttcacatttcttgtcttacttttggaagagaaacggttcttgagtatttggtgtcct

SEQ ID NO: 52989 - DNA, 80 bp, synthetic construct
  source 1..80: mol_type = other DNA
aattggtctgcacctactgttcaagcctccaagctgtgccttgactggctttagggcagagacattgacccttataaaga

SEQ ID NO: 52990 - DNA, 80 bp, synthetic construct
  source 1..80: mol_type = other DNA
agaagaactcccgagcttcgcaggaatctcaatgttagtatcaagattctcaatctcgggaacctcaatgttagtattcc

SEQ ID NO: 52991 - DNA, 80 bp, synthetic construct
  source 1..80: mol_type = other DNA
aattggtctgttctactgttcaagcctccaagctgtgccttgggtggctttggggcatggacattgacccgtataaagaa

SEQ ID NO: 52992 - DNA, 80 bp, synthetic construct
  source 1..80: mol_type = other DNA
atgcagtggaactcaacaactttccaccaaactctgcaaaatcctgctggtggctccagttcaggaactgtaaaccctgt

SEQ ID NO: 52993 - DNA, 80 bp, synthetic construct
  source 1..80: mol_type = other DNA
accatacagcggggtgagttgatgactctagctacctggttgggaagtaatttggaagaccctgcctccagggatttggt

SEQ ID NO: 52994 - DNA, 80 bp, synthetic construct
  source 1..80: mol_type = other DNA
agtcagctatgtaaatgttaatatgggcctaaaaattagatcttacttttggaagagaaactgttcttgagtatttggtg

SEQ ID NO: 52995 - DNA, 80 bp, synthetic construct
  source 1..80: mol_type = other DNA
ctccacaaccttccaccaacctctgcaagttcaaaactctgttggtggctccagttcaggaacagtaaaccctgttccga

SEQ ID NO: 52996 - DNA, 80 bp, synthetic construct
  source 1..80: mol_type = other DNA
tgagaacttctatccttcaatacgagatcttctagataccgcctcagccctatatcgggatgccttggaatctcctgagc

SEQ ID NO: 52997 - DNA, 80 bp, synthetic construct
  source 1..80: mol_type = other DNA
accaatcggcagtcaggaagacagcctactcccatctctccacctctgagagacagtcgtcctctcatctctccacctct

SEQ ID NO: 52998 - DNA, 80 bp, synthetic construct
  source 1..80: mol_type = other DNA
gggaggagactaggttaatgatctttgtattaggaggctgtaggcataaattggtctgcgaagatagagcgacaggcaag

SEQ ID NO: 52999 - DNA, 80 bp, synthetic construct
  source 1..80: mol_type = other DNA
aattggtctgcgaagatagagcgacaggcaagaaccggggggctttgggggcatggacattgacccttataaagaatttg

SEQ ID NO: 53000 - DNA, 80 bp, synthetic construct
  source 1..80: mol_type = other DNA
caaatcaggtaggagcggtggggtgaagccctcaggctcagggcatattgacaacagtgccagcagcacctcctcctgcc

SEQ ID NO: 53001 - DNA, 80 bp, synthetic construct
  source 1..80: mol_type = other DNA
tccttccgccagagatctcctggacaccgcctcagctctgtatcgagactccttagagtctcctgagcattgctcacctc

SEQ ID NO: 53002 - DNA, 80 bp, synthetic construct
  source 1..80: mol_type = other DNA
tcagctctgtatcgagactccttagagtctcctgagcattgctcacctcaccatactgcactcaggcaagccgttctctg

SEQ ID NO: 53003 - DNA, 80 bp, synthetic construct
  source 1..80: mol_type = other DNA
accatactgcactcaggcaagccgttctctgctggggggaattgatgaatctagctacctgggtgtgtggtaatttgcaa

SEQ ID NO: 53004 - DNA, 80 bp, synthetic construct
  source 1..80: mol_type = other DNA
caatgtcaacgaccgaccttgaggcctacttcaaagactgtgtgtttaaagactgggaggaactgggggaggagattagg

SEQ ID NO: 53005 - DNA, 80 bp, synthetic construct
  source 1..80: mol_type = other DNA
ctccacccctgctggtggctccagttccggaacagcaaaccctgttccgactactgcctcacccatatcgtcaaccttct

SEQ ID NO: 53006 - DNA, 80 bp, synthetic construct
  source 1..80: mol_type = other DNA
caccacaatcttccaccaaactctgacacctacaagcaatcctgctggtggctccagttcaggaacagtaaaccctgttc

SEQ ID NO: 53007 - DNA, 80 bp, synthetic construct
  source 1..80: mol_type = other DNA
gctcagggcatattgacaacagtgccagcagcacctcctcctgcctccaccaatcggcttcctcaggccatgcagtggaa

SEQ ID NO: 53008 - DNA, 80 bp, synthetic construct
  source 1..80: mol_type = other DNA
cagggcatactaaatccgcctcctgcctctaccaatcgccagtcaggaaggcagcctacccctctgtctccacctttgag

SEQ ID NO: 53009 - DNA, 80 bp, synthetic construct
  source 1..80: mol_type = other DNA
ctccacaaacttccaccaaactctgcaggatcccagagtccctgctggtggctccagttcaggaacagtaagccctgttc

SEQ ID NO: 53010 - DNA, 80 bp, synthetic construct
  source 1..80: mol_type = other DNA
ttccacaactttccatcaaactctgcaagataccaacctccttgctggtggctccagttcaggaacagtaaaccctgttc

SEQ ID NO: 53011 - DNA, 80 bp, synthetic construct
  source 1..80: mol_type = other DNA
ccctgctggtggctccagttcaggaacactcaaccctgttccaactattgcctctcacatatcgtcaatctcctcgagga

SEQ ID NO: 53012 - DNA, 80 bp, synthetic construct
  source 1..80: mol_type = other DNA
gcatgcgtggaacctttctggctcctctgccgatccatactgcggaactcctagccgcttgctttgctgcaaacattctc

SEQ ID NO: 53013 - DNA, 80 bp, synthetic construct
  source 1..80: mol_type = other DNA
tggattcaatgcaaatgcaagtgatgaacgactctttgaggggtggcatactctactgtttagactactctaaatgggat

SEQ ID NO: 53014 - DNA, 80 bp, synthetic construct
  source 1..80: mol_type = other DNA
taggaacattgcattaccacagaatggacattactgaacccacttgctcccttggtttttgggtctaccaaccattgctc

SEQ ID NO: 53015 - DNA, 80 bp, synthetic construct
  source 1..80: mol_type = other DNA
aacccattttccaccacagcagtcacaacatgctgggtgtccattgaaaccaaacctggtggtgattttgatttctgcct

SEQ ID NO: 53016 - DNA, 80 bp, synthetic construct
  source 1..80: mol_type = other DNA
cttgacggcccctggtcaacagatggaaaatggtgtgtcacctgaaggtctcctcccacgccgtttgggttacacacggg

SEQ ID NO: 53017 - DNA, 80 bp, synthetic construct
  source 1..80: mol_type = other DNA
tgccatagaatccctctcttcaccagcaattggttacctcaatgacatcaagtttgtaaccaagggaggtctcccatcag

SEQ ID NO: 53018 - DNA, 80 bp, synthetic construct
  source 1..80: mol_type = other DNA
ggaaccgagttggggggctattagttggtatggttttggttgctgaccaccgccaggtgaatagacatttcaacgcacgg

SEQ ID NO: 53019 - DNA, 80 bp, synthetic construct
  source 1..80: mol_type = other DNA
tttggttgctgaccaccgccaggtgaatagacatttcaacgcacggtctatcacctatgggtggtctactgcaccagtta

SEQ ID NO: 53020 - DNA, 80 bp, synthetic construct
  source 1..80: mol_type = other DNA
tctatcacctatgggtggtctactgcaccagttaatccaatggcagcggcgatccaaaccaaccacaaccacactggaac

SEQ ID NO: 53021 - DNA, 80 bp, synthetic construct
  source 1..80: mol_type = other DNA
caccaatgccaacaaaaggaacgcctggttgttactcagtgcagaaaacaagggcccattattcccaggtattccaaacc

SEQ ID NO: 53022 - DNA, 80 bp, synthetic construct
  source 1..80: mol_type = other DNA
acttcccggattcctgtgcttccacaatgatgggtggcatggacacagaccgccatatgccatccacaggagtctgtggc

SEQ ID NO: 53023 - DNA, 80 bp, synthetic construct
  source 1..80: mol_type = other DNA
ccagcaatcggcttccagaacaacggagatgtctatgaaaacgagactcctgcagtgatgtttgccactctaaatcctct

SEQ ID NO: 53024 - DNA, 80 bp, synthetic construct
  source 1..80: mol_type = other DNA
aactggtggtacaaatgagaaccctgtagcgctctttggttcaatcaacatggcctctttggctgtggttcgcacccaac

SEQ ID NO: 53025 - DNA, 80 bp, synthetic construct
  source 1..80: mol_type = other DNA
aggatgcagacttcccaacagccggcttccgcaacgacatgaacgtggttgtggaaatgtcctgggaaatgtactcaggg

SEQ ID NO: 53026 - DNA, 80 bp, synthetic construct
  source 1..80: mol_type = other DNA
actctgggaggagcggttacttagttatgatggacatcaggcaatttcgtactcctctcagttggagcgtactgcggagt

SEQ ID NO: 53027 - DNA, 80 bp, synthetic construct
  source 1..80: mol_type = other DNA
acttccaaaatgataatgtcaacataccccctggttcaatggctgttttcaatgttgaaacaaattctgcttctttccaa

SEQ ID NO: 53028 - DNA, 80 bp, synthetic construct
  source 1..80: mol_type = other DNA
gaatgcccttcacgctagtcatcaattctgtgaaccacatgatatactttgcagcgggtgtgctcaaagcttatgaggac

SEQ ID NO: 53029 - DNA, 80 bp, synthetic construct
  source 1..80: mol_type = other DNA
attggcattcgggaagatggatacatggtcactggtggcactgttggaactcatgttgctttggatgcggaaacacgatt

SEQ ID NO: 53030 - DNA, 80 bp, synthetic construct
  source 1..80: mol_type = other DNA
gacagttttactgggtcaaggcgaaccgcaccagtgacccatctagtccccctgcttttgatcgcactgcacgtactggc

SEQ ID NO: 53031 - DNA, 80 bp, synthetic construct
  source 1..80: mol_type = other DNA
tccacacagaacccagctgttactgctgccagtctctccatcttagagagattcatggaaagcagcccactagtgtcatg

SEQ ID NO: 53032 - DNA, 80 bp, synthetic construct
  source 1..80: mol_type = other DNA
tccttctattcgagatctcctcgacaccacctcaccatacagcactcaggcaagctattctgtgttggggtgagttgatg

SEQ ID NO: 53033 - DNA, 80 bp, synthetic construct
  source 1..80: mol_type = other DNA
tccagattgggacttcaaccccaacaaggaccattggccacaagcccatcaggtaggagtgggagcattcgggccagggt

SEQ ID NO: 53034 - DNA, 80 bp, synthetic construct
  source 1..80: mol_type = other DNA
gtccctcaggctcagggcattcaacaaaccttgccagcaaatccgccccctgcctctaccaatcgccagtcaggaaggca

SEQ ID NO: 53035 - DNA, 80 bp, synthetic construct
  source 1..80: mol_type = other DNA
tgcccggcattgcccggcaacggccaggtctgtgccaagtgtttgctgacgcaacccccactggctggggcttggtcatg

SEQ ID NO: 53036 - DNA, 80 bp, synthetic construct
  source 1..80: mol_type = other DNA
acttatcttggatctgctgcgctgtccccagctctcaacccatacaccgcacatctttcggcgatgtgggccgggtgagg

SEQ ID NO: 53037 - DNA, 80 bp, synthetic construct
  source 1..80: mol_type = other DNA
ctccacaacacctgctggtggctccagcgccggaacagtaaaccctgttccgactactgcctctcccatatcgacaatct

SEQ ID NO: 53038 - DNA, 80 bp, synthetic construct
  source 1..80: mol_type = other DNA
actgtgaggggcctatctcttcctgctggtggctccagttccggaacagtaaaccctgttccgactactgcctcacccat

SEQ ID NO: 53039 - DNA, 80 bp, synthetic construct
  source 1..80: mol_type = other DNA
aactccacaactcctgctggtggctccagttccggaacagtaaaccttgttccgactactgcctcacccatatcgtcaat

SEQ ID NO: 53040 - DNA, 80 bp, synthetic construct
  source 1..80: mol_type = other DNA
gcctactcccatctctccacctctaagagacagtcatcctcaggccatgcagtggaattccactgctggtggctccagtt

SEQ ID NO: 53041 - DNA, 80 bp, synthetic construct
  source 1..80: mol_type = other DNA
agccctcaggctcagggcatattgaccacagtgtcaacaattcctcctcctgcctccaccaatcggcagtcaggaaggca

SEQ ID NO: 53042 - DNA, 80 bp, synthetic construct
  source 1..80: mol_type = other DNA
caggaacagtaaaccctgctccgaatattgcctctcacatatcgtcaagctccgcgaggactggggaccctgtgacgaac

SEQ ID NO: 53043 - DNA, 80 bp, synthetic construct
  source 1..80: mol_type = other DNA
ggggcctgtatcttcctgctggtggctccagttcaggaacagtaaaccctgttccgaatattgtctctcacatctcatca

SEQ ID NO: 53044 - DNA, 80 bp, synthetic construct
  source 1..80: mol_type = other DNA
gatccagcatccagggaattagtagtaagctttcacatttcctgtcttacttttggaagagaaactgttcttgagtattt

SEQ ID NO: 53045 - DNA, 80 bp, synthetic construct
  source 1..80: mol_type = other DNA
caaatcaggtaggagtgggagcattcggtcaggctcagggcatgttgacaacagtgccaacagcacctcctcctgcctcc

SEQ ID NO: 53046 - DNA, 80 bp, synthetic construct
  source 1..80: mol_type = other DNA
actccacaacattcatccaaactccgacagagaccgcagtgccctctgttggtggctccaattcaggaacagtaaaccct

SEQ ID NO: 53047 - DNA, 80 bp, synthetic construct
  source 1..80: mol_type = other DNA
agactgtttgtttaaagactggaacgaattggcggaagaaaattagttaaatggtcgtttgttttcgaggcgcggggact

SEQ ID NO: 53048 - DNA, 80 bp, synthetic construct
  source 1..80: mol_type = other DNA
aaatgggtcccaaaaaatactgttcaagcctccaagctgtgccttgggtggctttgggacatggacattgacccttataa

SEQ ID NO: 53049 - DNA, 80 bp, synthetic construct
  source 1..80: mol_type = other DNA
agactgtgtgtttaccaccgtgaacgcccacaggaacctgcccaaggtcttgcataagaggactcttggactttcagcaa

SEQ ID NO: 53050 - DNA, 80 bp, synthetic construct
  source 1..80: mol_type = other DNA
agactgtttgtttaaggactgggaggagttgggggaggagattagtttatcattaagaaggtggaaggataaattggtct

SEQ ID NO: 53051 - DNA, 80 bp, synthetic construct
  source 1..80: mol_type = other DNA
aggggcccatatcttcctgctggtggctccagttccggaacagtaaaccctgttccgactactgcctcacccatatcgtc

SEQ ID NO: 53052 - DNA, 80 bp, synthetic construct
  source 1..80: mol_type = other DNA
ctcaacgaggggccttgctggtggctccagttccggaacagtaaaccctgttccgactactgcctcacccatatcgtcaa

SEQ ID NO: 53053 - DNA, 80 bp, synthetic construct
  source 1..80: mol_type = other DNA
cacctcccttatctccacctctaagagacactcatcctcaggccatgcagtggaactccaccactttccatcaaactctt

SEQ ID NO: 53054 - DNA, 80 bp, synthetic construct
  source 1..80: mol_type = other DNA
ctccagccaagttcatgctggtggctcaagttcaggaacagtaaaccctgttccgactactgcctctcccatatcgtcaa

SEQ ID NO: 53055 - DNA, 80 bp, synthetic construct
  source 1..80: mol_type = other DNA
gggcccatactttcttgctggtggctcaagttccgaaacagtaaaccctgttccgactactgcctctcccatatcgtcaa

SEQ ID NO: 53056 - DNA, 80 bp, synthetic construct
  source 1..80: mol_type = other DNA
atgcagtggaactccccaacctttcatcaaactctccaagatcccagagtgagagtccctgctggtggctccagttcagg

SEQ ID NO: 53057 - DNA, 80 bp, synthetic construct
  source 1..80: mol_type = other DNA
ctcaactcacttccaccaagctctgttggatcccagggtaggggaaccctgctccgactattgcctctctcacatcatca

SEQ ID NO: 53058 - DNA, 80 bp, synthetic construct
  source 1..80: mol_type = other DNA
ctcaaccacattccaccctgctggtggctccagttccggaacagtaaaccctgttccgactactgcctcacccatatcgt

SEQ ID NO: 53059 - DNA, 80 bp, synthetic construct
  source 1..80: mol_type = other DNA
atattgacaacagtaccagcagcgcctactcccatctctccacctctaagagacagtcatcctcaggccatgcagtggaa

SEQ ID NO: 53060 - DNA, 80 bp, synthetic construct
  source 1..80: mol_type = other DNA
tccagattgggacttcaaccgcaacaaggatccatggccagaggcatggcaggtaggagtgggatcattcgggccagggt

SEQ ID NO: 53061 - DNA, 80 bp, synthetic construct
  source 1..80: mol_type = other DNA
tacatttatatgctaaattagaagttataaaccatgctattaaaaatggttcatggataagtctgttctgtaactatcca

SEQ ID NO: 53062 - DNA, 80 bp, synthetic construct
  source 1..80: mol_type = other DNA
atgtggactcttcttctcattattgaatccatcctctgggcagcaagtgcagcagaaattccccttgtccctctctggac

SEQ ID NO: 53063 - DNA, 80 bp, synthetic construct
  source 1..80: mol_type = other DNA
tcacaaacccagttaatgaccaacagagtgtttcattgcatatagaaattgaaagccaaggcattggtgctgatgttcat

SEQ ID NO: 53064 - DNA, 80 bp, synthetic construct
  source 1..80: mol_type = other DNA
ctgcacaaaatatcaatatccatggcacactgcaaacaaaattgtaagtgtgagatacagcagaaaagtgtgtgtgcagt

SEQ ID NO: 53065 - DNA, 80 bp, synthetic construct
  source 1..80: mol_type = other DNA
gaaggaaaatgctttgttcctgacaaggctgttgttgctggtgaagactttagggcaatggaggttttttctgggattat

SEQ ID NO: 53066 - DNA, 80 bp, synthetic construct
  source 1..80: mol_type = other DNA
tcccttctattcgagatctcctcgacaccgcctcttagagtctccggaacattgttcacctcaccatacagcactcaggc

SEQ ID NO: 53067 - DNA, 80 bp, synthetic construct
  source 1..80: mol_type = other DNA
tggacagttaccaggtggaggtgctcaatgaatcccttaagggcggtgtcgtgtattgcctagactacagcaagtgggat

SEQ ID NO: 53068 - DNA, 80 bp, synthetic construct
  source 1..80: mol_type = other DNA
tgcatccgggagtgttttgctgcggtcaccacaataccatggaccacccggcaagcagcaaacacctttctcggtgccat

SEQ ID NO: 53069 - DNA, 80 bp, synthetic construct
  source 1..80: mol_type = other DNA
acaccttggcccacgcatcaaccactacactgcacacttgagtgcgatgttcgctggttggggggggggctttcaggtgc

SEQ ID NO: 53070 - DNA, 80 bp, synthetic construct
  source 1..80: mol_type = other DNA
gttcaaaacccgggtgtcttcccccatgcgttcattgacgctcgcacaactgaccccatactgatcaacttacctgacat

SEQ ID NO: 53071 - DNA, 80 bp, synthetic construct
  source 1..80: mol_type = other DNA
ccggcccattgattttcaccgtgtggatggggacgacgcgacggtctgtggggttgtgggtcgcgaccccttgatcaacc

SEQ ID NO: 53072 - DNA, 80 bp, synthetic construct
  source 1..80: mol_type = other DNA
cgtttcaaactggttccgtatccacatgttggcttagttttgaaacacggcctggccctgactttgatttttgtctcctc

SEQ ID NO: 53073 - DNA, 80 bp, synthetic construct
  source 1..80: mol_type = other DNA
aaggcccccgagcaggaaatggacaatgggatatcacctgccaacctgttgccacgccgcctcggttctcggggcaaccg

SEQ ID NO: 53074 - DNA, 80 bp, synthetic construct
  source 1..80: mol_type = other DNA
cctcgggcgtgttgtggggctggttgtggtagctgcggccgagcaagttaatcaccacttcggcgcaaactccaccacac

SEQ ID NO: 53075 - DNA, 80 bp, synthetic construct
  source 1..80: mol_type = other DNA
ttggttggtcaacactgcctattgagccaattgcgggcggaatttcttggtacgatgacaacaatgaacataccaagata

SEQ ID NO: 53076 - DNA, 80 bp, synthetic construct
  source 1..80: mol_type = other DNA
cgggggcttttgagtgcacaaggaaagggtatcatcttcccaaacattgtcaaccactggacagatgtgtcattgtccgc

SEQ ID NO: 53077 - DNA, 80 bp, synthetic construct
  source 1..80: mol_type = other DNA
caagacctcggggcagaccaccatccccatagctgccgacaacctcaacaatagcccttggggcagctggccggtagtca

SEQ ID NO: 53078 - DNA, 80 bp, synthetic construct
  source 1..80: mol_type = other DNA
tgtttgaaaacaatggagatgtcaatgagtccacggcaaaccatggcatactaactgccgcgtcgcatgacttcacatca

SEQ ID NO: 53079 - DNA, 80 bp, synthetic construct
  source 1..80: mol_type = other DNA
ctatcccaaactttcgatgcagccgggttgtgggtttggatgccatggacccggaacaaaccagacgggcgcacaaacac

SEQ ID NO: 53080 - DNA, 80 bp, synthetic construct
  source 1..80: mol_type = other DNA
aaatgtctacatcactccaacttggattaatggcaaccctgcccgtcccatacatgagaaatgtaccaacatggttggaa

SEQ ID NO: 53081 - DNA, 80 bp, synthetic construct
  source 1..80: mol_type = other DNA
ccaattttcaattcggtggcactgggacaaacaacatcatgttatggcaggagcaacacttcacatcttttccaggtgct

SEQ ID NO: 53082 - DNA, 80 bp, synthetic construct
  source 1..80: mol_type = other DNA
gcagaggtgtactgttcacaattggagagcacagcagaaatgttccaaaacaatgtggttaacatccctgcaaaccaaat

SEQ ID NO: 53083 - DNA, 80 bp, synthetic construct
  source 1..80: mol_type = other DNA
ccttgctgtcaatggaacggccaacgtcgactcactggtcaaggcggggttcacccctgttgatgctcgcagactggcgg

SEQ ID NO: 53084 - DNA, 80 bp, synthetic construct
  source 1..80: mol_type = other DNA
gtggcacggagagcgtcgagtacggcctgctggacagacctgtactgcaacgttcggtgctctcgggcatctcagagact

SEQ ID NO: 53085 - DNA, 80 bp, synthetic construct
  source 1..80: mol_type = other DNA
ttcgtcaacccaaattatcaggcttcaccaccaaagttaacacttggccccagacccccggtgactaatgtataatgatg

SEQ ID NO: 53086 - DNA, 80 bp, synthetic construct
  source 1..80: mol_type = other DNA
caaaggccaacaggttatggaacaggttgtcaccccccaagacaccattgggccaacgagtgcacttttattgcccactc

SEQ ID NO: 53087 - DNA, 80 bp, synthetic construct
  source 1..80: mol_type = other DNA
caggtcttgcccaaggtcttgcccaagctcttatataagaggactcttggactctcagcaatgtcaacgaccgaccttga

SEQ ID NO: 53088 - DNA, 80 bp, synthetic construct
  source 1..80: mol_type = other DNA
ttgacagcagtgccagcagcacctcctcctgcctccaccaatcggcagtcagacagtcatcctcaggccatgcagtggaa

SEQ ID NO: 53089 - DNA, 80 bp, synthetic construct
  source 1..80: mol_type = other DNA
caacaaaacattccaccaaactccgcctgctggtggctccagttccggaacagtgaaccctgttccgactactgcctcac

SEQ ID NO: 53090 - DNA, 80 bp, synthetic construct
  source 1..80: mol_type = other DNA
ccgtccccaagttccaaagttctgctggtggctccagttcaggaacagtgaaccctgttcagaacactgcctcttccata

SEQ ID NO: 53091 - DNA, 80 bp, synthetic construct
  source 1..80: mol_type = other DNA
taccgacttctttccttcagtacgagatcttctagacaccgcctcagctctgtttcgggaagccttagagtctcctgagc

SEQ ID NO: 53092 - DNA, 80 bp, synthetic construct
  source 1..80: mol_type = other DNA
ctccacaacattccaccaggctctgctagggcccagagtgaggggcctaaaccctgttccgactactgcctcacccatat

SEQ ID NO: 53093 - DNA, 80 bp, synthetic construct
  source 1..80: mol_type = other DNA
acatacagtggaactccacagcattcaaacaaactctacaagatcccagagtgagaggcctgtatctccctgctggtggc

SEQ ID NO: 53094 - DNA, 80 bp, synthetic construct
  source 1..80: mol_type = other DNA
tgggggaggagactagattacagttgtttgtactaggaggctgtaggcataaattggtgtgcgcaccagcaccatgcaac

SEQ ID NO: 53095 - DNA, 80 bp, synthetic construct
  source 1..80: mol_type = other DNA
gctaccaatcgccagtcaggaaggcagcctaccccactgtctccacctctgagagacactcatcctggcctgaggtggac

SEQ ID NO: 53096 - DNA, 80 bp, synthetic construct
  source 1..80: mol_type = other DNA
ctccagcacattccaccaagctgctggtggctcaagttccggaacagtaaaccctgttccgacttctgcctctcccatat

SEQ ID NO: 53097 - DNA, 80 bp, synthetic construct
  source 1..80: mol_type = other DNA
accatacagcattaaggcaagctattctgtgttggtttgagttgacgaatctggccacctgggtgggaggtaatttggaa

SEQ ID NO: 53098 - DNA, 80 bp, synthetic construct
  source 1..80: mol_type = other DNA
ctccagaggcctatactttcctgctggtggctccagttccggaacagtaaaccctgttccgactactgcctctcccatat

SEQ ID NO: 53099 - DNA, 80 bp, synthetic construct
  source 1..80: mol_type = other DNA
acacataccccaaagctctgcttgctggtggctccaattcaggaacagtaaaccctgttcagactactgcctctcccata

SEQ ID NO: 53100 - DNA, 80 bp, synthetic construct
  source 1..80: mol_type = other DNA
tcctaatgttcgtgatctcctcgacaccgcctctgctctgtatcgggaggccttagagtctccggaacattgtacacctc

SEQ ID NO: 53101 - DNA, 80 bp, synthetic construct
  source 1..80: mol_type = other DNA
aggacacgtcccaatacctcatgtgtgaacaagctgcatccaaatgatgccgttcagtcataagacataaagaaaaaagc

SEQ ID NO: 53102 - DNA, 80 bp, synthetic construct
  source 1..80: mol_type = other DNA
cattctatataaaaaagaaactacccgcaacgcctctttttgtgggtcaccatattcttggaaacctcgaaaaggcatgg

SEQ ID NO: 53103 - DNA, 80 bp, synthetic construct
  source 1..80: mol_type = other DNA
tcccagagtgaggggcctgtattttcctgctggtggctccagttcaggaacaataaaccctgttccgaatactgcctctc

SEQ ID NO: 53104 - DNA, 80 bp, synthetic construct
  source 1..80: mol_type = other DNA
cctcgaaacctgccaagggtattgcataagaggactcttggactttcagcactgtcaacatccacgattgagacatactt

SEQ ID NO: 53105 - DNA, 80 bp, synthetic construct
  source 1..80: mol_type = other DNA
caatcgccagtcaggaaggcagcccaccccgccgtctccacctttgagaaacactcatcctcaggccatgaagtggaatt

SEQ ID NO: 53106 - DNA, 80 bp, synthetic construct
  source 1..80: mol_type = other DNA
aacatggactaccagcacgggaccctgcagaacctgcacgattcctgctcaaggaacctctttgtatccctcatgttgct

SEQ ID NO: 53107 - DNA, 80 bp, synthetic construct
  source 1..80: mol_type = other DNA
ccacccaggtaggagcgggagcattcggtccagggttcgccccaccacatggaggccttctagggtggagccctcaggcc

SEQ ID NO: 53108 - DNA, 80 bp, synthetic construct
  source 1..80: mol_type = other DNA
ggagcatcgatcattgggactgacaattccgttgttttgtcccggaggtatacttcctttccatggctgctaggttgtgc

SEQ ID NO: 53109 - DNA, 80 bp, synthetic construct
  source 1..80: mol_type = other DNA
accatacagcactcagacaagctgtgttgtgctggggtgagttaatgaatctggcttcctgggtgggcagtaatctggaa

SEQ ID NO: 53110 - DNA, 80 bp, synthetic construct
  source 1..80: mol_type = other DNA
ttaaatcctaacaaaacaaaacggtggggttattccctccatttcatgggatacgtgatcggaagttggggaaccttacc

SEQ ID NO: 53111 - DNA, 80 bp, synthetic construct
  source 1..80: mol_type = other DNA
ggcagaacctttctgtcagcaatcctctgggattcttccccgagcatcagttggatcctctattcagagccaacacacac

SEQ ID NO: 53112 - DNA, 80 bp, synthetic construct
  source 1..80: mol_type = other DNA
tccgtcggttagagacctcctcgacaccgcctcagctctgtatcgggaagccttagagtctccagaacattgttcaccta

SEQ ID NO: 53113 - DNA, 80 bp, synthetic construct
  source 1..80: mol_type = other DNA
actccttcttttccggacatccatttgcgtcaggatcttattgaaaagtgtgaacaatttgtgggccctctcacggtaaa

SEQ ID NO: 53114 - DNA, 80 bp, synthetic construct
  source 1..80: mol_type = other DNA
ggcagaatcattctgtcaccaatcctttgggattcttccccgatcatcagttggaccctctgttcagagccaactcaaac

SEQ ID NO: 53115 - DNA, 80 bp, synthetic construct
  source 1..80: mol_type = other DNA
cggagcttgccaaaggccttgcacaagaggactcttggactttcagtactgtcaacatccggaattgaaacatacttcaa

SEQ ID NO: 53116 - DNA, 80 bp, synthetic construct
  source 1..80: mol_type = other DNA
aattggtctgcgcaccagcaccatgcaactttttgaagtctgcctaatcatctcttgttcagctcaggctgtccggacct

SEQ ID NO: 53117 - DNA, 80 bp, synthetic construct
  source 1..80: mol_type = other DNA
gcacaagatcacatcaggattcctaggacccctgctcgtgttacaggcggggtttatcttgttgacaagaatcctctctc

SEQ ID NO: 53118 - DNA, 80 bp, synthetic construct
  source 1..80: mol_type = other DNA
ctccacgacaattacccaagctcctgctggtggctccggttcagaaacagtaaaccctgttccgactattgcctctcaca

SEQ ID NO: 53119 - DNA, 80 bp, synthetic construct
  source 1..80: mol_type = other DNA
accaatcgtcagccaggaaggcagcctaccactctgtctccacctttgagaaacacgcatcatcaggcaatgaagtggaa

SEQ ID NO: 53120 - DNA, 80 bp, synthetic construct
  source 1..80: mol_type = other DNA
ctccacaacattccaccaagctcctgctggtggctccagttccggaacagtaaaccctgttccgactactgcctcaccca

SEQ ID NO: 53121 - DNA, 80 bp, synthetic construct
  source 1..80: mol_type = other DNA
accaatcgccaatcaagaaggcagcctaccccgccttcactacctttgagaaacactcatcctcaggcaatgcagtggaa

SEQ ID NO: 53122 - DNA, 80 bp, synthetic construct
  source 1..80: mol_type = other DNA
aattggtgtgttcaccagcaccatgcaactttttgcttactgttcaagcctccaagctgtgccttgggtggctttagggc

SEQ ID NO: 53123 - DNA, 80 bp, synthetic construct
  source 1..80: mol_type = other DNA
ggaaatctacaagatccaacatccagagacctagtagtcagttatgttaacactaatatgggcctaaagttcaggcaact

SEQ ID NO: 53124 - DNA, 80 bp, synthetic construct
  source 1..80: mol_type = other DNA
ctcaacccagttccaacagagccctgctggtggctccagttcaaaaacacaaaaccctgctccgactattgtctctccca

SEQ ID NO: 53125 - DNA, 80 bp, synthetic construct
  source 1..80: mol_type = other DNA
cggagcttgccaaggacattgcacaagaggactcttggactttcagcaatgtcaacgaccgaagttgaaacatacttcaa

SEQ ID NO: 53126 - DNA, 80 bp, synthetic construct
  source 1..80: mol_type = other DNA
atacagaatcgtcaggcttttactttctcgccaacttacaaggcctttctacgtacacaatatctgaccctttaccccgt

SEQ ID NO: 53127 - DNA, 80 bp, synthetic construct
  source 1..80: mol_type = other DNA
tgctcggcaacgacagggtgtgtgccaagtgtttgctgacgcaacccccactggctggggcttggcactgggttctctgc

SEQ ID NO: 53128 - DNA, 80 bp, synthetic construct
  source 1..80: mol_type = other DNA
ggcagaatctttctgtcagcaacccgctgggattttttcccgagcaccagttggaccctctgttcagagccaacacaaac

SEQ ID NO: 53129 - DNA, 80 bp, synthetic construct
  source 1..80: mol_type = other DNA
aaagaattgtaggactcttaggctttgccgctcctttcacgcaatgtggctatcctgctttaatgcctttatataattgc

SEQ ID NO: 53130 - DNA, 80 bp, synthetic construct
  source 1..80: mol_type = other DNA
ttccacaaaccttccaccaccaccaaactctgccagagtgagaggcctgtatttccctgctggtggctccagttcaggaa

SEQ ID NO: 53131 - DNA, 80 bp, synthetic construct
  source 1..80: mol_type = other DNA
atacagtggaactacaaaaccttccaccaaactctacaagatcccaaagtgagtggcctgtatttccctgctggtggctc

SEQ ID NO: 53132 - DNA, 80 bp, synthetic construct
  source 1..80: mol_type = other DNA
ttgctgtcaatgagaaaagaagattgcaattgattatgcctgctaggttttaccctaactttaccaaatatttaccttta

SEQ ID NO: 53133 - DNA, 80 bp, synthetic construct
  source 1..80: mol_type = other DNA
aacttttcttatccaaggtcttcacaaagaggacttttggactctctgtaatgtcaacgaccgaccttgaggcatacttc

SEQ ID NO: 53134 - DNA, 80 bp, synthetic construct
  source 1..80: mol_type = other DNA
atcagatcctgcccaaggtcttacataagaggactctgcattttttttgggggtcaatcacctggatcgaagaatacatc

SEQ ID NO: 53135 - DNA, 80 bp, synthetic construct
  source 1..80: mol_type = other DNA
gagcacctctctcaacgaccaatcatggggaattctttccagaccatcagctggatcctcttttcagagcaaattccagc

SEQ ID NO: 53136 - DNA, 80 bp, synthetic construct
  source 1..80: mol_type = other DNA
accaatcgccagtcaggaaggcagcctacccctctgtctccacctttgagagacagtcatcctcaagtcatgcagtggaa

SEQ ID NO: 53137 - DNA, 80 bp, synthetic construct
  source 1..80: mol_type = other DNA
aattggtctgttcaccagcaccatgcaactttttgggccgaaccagacctccaagctgtgccttgggtggctttggggca

SEQ ID NO: 53138 - DNA, 80 bp, synthetic construct
  source 1..80: mol_type = other DNA
ctcgccaattcttgcccaaggtcttacataagaggactcttggactctctgtgatgtcaacgaccgaccttgaggcatac

SEQ ID NO: 53139 - DNA, 80 bp, synthetic construct
  source 1..80: mol_type = other DNA
cagcgaggaaccatgcagaacctgcacgactactgttcaaggaatctctctacagccctcctgttgctgtaccaaacgtt

SEQ ID NO: 53140 - DNA, 80 bp, synthetic construct
  source 1..80: mol_type = other DNA
tgctctgtatcgggaggccttagagtctccggaacattgtacacctcaccatactgcactcaggcaagcaattctttgct

SEQ ID NO: 53141 - DNA, 80 bp, synthetic construct
  source 1..80: mol_type = other DNA
accatactgcactcaggcaagcaattctttgctggggggaactaatgactctagctacctgggttggtgttaatttggaa

SEQ ID NO: 53142 - DNA, 80 bp, synthetic construct
  source 1..80: mol_type = other DNA
ctgtcgcagcgaccaatcgccagtcaggaaggcagcctacccccatgtctccacctgtgagagacacccatcctcaggcc

SEQ ID NO: 53143 - DNA, 80 bp, synthetic construct
  source 1..80: mol_type = other DNA
ctccacagcagcgcaccaagcccttcctgctggtggctccagttccggaacagtaaaccctgttccgaatactgtctctc

SEQ ID NO: 53144 - DNA, 80 bp, synthetic construct
  source 1..80: mol_type = other DNA
gcatgcaagcttgcttttgggctcctctgccgatccatactgcggaactcctagccgcttgttttgctcgcagcaggtct

SEQ ID NO: 53145 - DNA, 80 bp, synthetic construct
  source 1..80: mol_type = other DNA
ttccacaactctccaccctgctggtggctccagttcaggaacactcaaccctgttccaactattgcctctcacatctcgt

SEQ ID NO: 53146 - DNA, 80 bp, synthetic construct
  source 1..80: mol_type = other DNA
gcatgcgtggaacctttacggctcctctgccgatccatactgcggaactcctagccgcttattttgctcgcagcaggtct

SEQ ID NO: 53147 - DNA, 80 bp, synthetic construct
  source 1..80: mol_type = other DNA
caaatcttgcccaagatcttacacaagaggactcttggactctccacaatgtcaacgaccgatcttgagcaatacttcaa

SEQ ID NO: 53148 - DNA, 80 bp, synthetic construct
  source 1..80: mol_type = other DNA
cggaacctgccaaaggacttatataagaggactcttggactgtttgctatgtcaataacccggattgagaaatacttcaa

SEQ ID NO: 53149 - DNA, 80 bp, synthetic construct
  source 1..80: mol_type = other DNA
aggatccagcatctagggagcaagtggttaattatgtcaatactaatatgggattaaagataagacagctgctgtggttc

SEQ ID NO: 53150 - DNA, 80 bp, synthetic construct
  source 1..80: mol_type = other DNA
aattggtctgcgcaccagcaccatgcaactttttcacctctgcctaatcatctcttgttcatgtcctactgttcaagcct

SEQ ID NO: 53151 - DNA, 80 bp, synthetic construct
  source 1..80: mol_type = other DNA
agtaaaccctgttccgactactgcctctcacttatcgtcaatcttctcgaggattggggaccctgcgctgaacatggaga

SEQ ID NO: 53152 - DNA, 80 bp, synthetic construct
  source 1..80: mol_type = other DNA
aaagaattgtgggtctcttgggctttgctgccccttttacacaatgtggttaccctgccttaatgcctttatatgcatgt

SEQ ID NO: 53153 - DNA, 80 bp, synthetic construct
  source 1..80: mol_type = other DNA
cttatagaccaccccatgcccctatcttatcaacacttcctgagacttgtgttgataaaggacgaggcaggaccaataaa

SEQ ID NO: 53154 - DNA, 80 bp, synthetic construct
  source 1..80: mol_type = other DNA
ataccatctccctcgaatcgcagactaacgtctcactcgccgcatcacataagatcacaatctcgggaagctcaatgtta

SEQ ID NO: 53155 - DNA, 80 bp, synthetic construct
  source 1..80: mol_type = other DNA
gtattccctggaggcaaaaggcgggaaactttaccgtgctttattcttctactgtacctgtctttaaccctcattggaaa

SEQ ID NO: 53156 - DNA, 80 bp, synthetic construct
  source 1..80: mol_type = other DNA
cttcgtacaggactaaggcaagctattctgtgttggggtgagttgatgaatttggccacctgggtgggaagtaatttgga

SEQ ID NO: 53157 - DNA, 80 bp, synthetic construct
  source 1..80: mol_type = other DNA
agaccaagcatccagggacttagtagtaagctatgtcaatgttaacatgggcctaaaactcagacaattattgtggtttc

SEQ ID NO: 53158 - DNA, 80 bp, synthetic construct
  source 1..80: mol_type = other DNA
ttccacagcctggcagctgcgcgggacgtcctttgtttacgtcccgtcggcgctgaatcccgcggacgacccctcccggg

SEQ ID NO: 53159 - DNA, 80 bp, synthetic construct
  source 1..80: mol_type = other DNA
acaccctcttttcctaatatacatttacaggaggcagtcatcaaaaaatgtgaacaatttgtaggcccgctcacagcaaa

SEQ ID NO: 53160 - DNA, 80 bp, synthetic construct
  source 1..80: mol_type = other DNA
gggaaaacgaagactgcggttaattatgcctgctaggttttatccaaatgttaccaaagatttgccattagataagggta

SEQ ID NO: 53161 - DNA, 80 bp, synthetic construct
  source 1..80: mol_type = other DNA
gattaggaggcggtaggcataaaaattggtctatggggttactctttacatttcatgggctatgtcattggatgttatgg

SEQ ID NO: 53162 - DNA, 80 bp, synthetic construct
  source 1..80: mol_type = other DNA
gtcattgccacaagatcacattatacagaaaatcaaggaatgttttagaaaacttcctgttaacaggccgattgattgga

SEQ ID NO: 53163 - DNA, 80 bp, synthetic construct
  source 1..80: mol_type = other DNA
aagttcatcaatgcttgcccaaggtcttacataagagaactcttggactctctgcaatgtcaacgaccgaccttgaggca

SEQ ID NO: 53164 - DNA, 80 bp, synthetic construct
  source 1..80: mol_type = other DNA
gacttgaacggatatgatgcatggacattgacccttataaagaatttggagcttctgtggagttactctcgtttttgcct

SEQ ID NO: 53165 - DNA, 80 bp, synthetic construct
  source 1..80: mol_type = other DNA
cagttcaggaacagtaaaccctgttccgactactgcctctcccatatcgtcaatcttctcgaggattggggaccctgcgc

SEQ ID NO: 53166 - DNA, 80 bp, synthetic construct
  source 1..80: mol_type = other DNA
gatccaatatccagggacctagtagtcagttatcttagatgtaatatgggcttaaagttcaagcaactagggaggtttca

SEQ ID NO: 53167 - DNA, 80 bp, synthetic construct
  source 1..80: mol_type = other DNA
catttcttgtttcatttttggaagagaaacgatcatcgggtatttggtgtctttcggattggggattcgcattcctcaag

SEQ ID NO: 53168 - DNA, 80 bp, synthetic construct
  source 1..80: mol_type = other DNA
gtattccttggactcataaggtgggaaactttacggggctttattcttctactgttcctgtctttaaccctcattggaaa

SEQ ID NO: 53169 - DNA, 80 bp, synthetic construct
  source 1..80: mol_type = other DNA
caccactgcagcatgcagaacctgcacgactcccgctcgaggaaccaccatgactccctccggttgttgtaccaaacctt

SEQ ID NO: 53170 - DNA, 80 bp, synthetic construct
  source 1..80: mol_type = other DNA
gatcaagcatctagggacctagtagttagttatgtcaacactaatatgggcataaagttcaggcaacttttgtggtttca

SEQ ID NO: 53171 - DNA, 80 bp, synthetic construct
  source 1..80: mol_type = other DNA
gaggagttggggaacatcgagttaatcattacttccaaactaggaggctgtaggcataaattggtctgcgcaccatcacc

SEQ ID NO: 53172 - DNA, 80 bp, synthetic construct
  source 1..80: mol_type = other DNA
gaggagttgggggaggagattagattaatgatctttgtactaggaggctgtaggcataaattggtctgcgcaccagcacc

SEQ ID NO: 53173 - DNA, 80 bp, synthetic construct
  source 1..80: mol_type = other DNA
ggacaaatctttccgtccccaatcctctgggattctttcccgatcaccagttggaccctgcattcaaagccaactccgac

SEQ ID NO: 53174 - DNA, 80 bp, synthetic construct
  source 1..80: mol_type = other DNA
ctcctccaactaccaatcgccaatcaggaaggcagcctaccccgctgtcaccacctttgagaaacactcatcctcaggcc

SEQ ID NO: 53175 - DNA, 80 bp, synthetic construct
  source 1..80: mol_type = other DNA
acgatcaacaatccagggacctggtagtcagttatgtcaacactaatatgggcctaaagttcagacaactattgtggttt

SEQ ID NO: 53176 - DNA, 80 bp, synthetic construct
  source 1..80: mol_type = other DNA
atgcagtggaactcaacaaccttccaccaaactttgcaagatcccagagtgagaggcctgtatttccctgctggtggctc

SEQ ID NO: 53177 - DNA, 80 bp, synthetic construct
  source 1..80: mol_type = other DNA
caggtctggagcaaacattatcgggactgataactctgttgtcctctcccgcaaatatacatcgtttccatggctgctag

SEQ ID NO: 53178 - DNA, 80 bp, synthetic construct
  source 1..80: mol_type = other DNA
aattccaggatcttcaaccaccagcacgggaccatgcagaacctgcacgactcctgctcaaggaacctctatgtatccct

SEQ ID NO: 53179 - DNA, 80 bp, synthetic construct
  source 1..80: mol_type = other DNA
actcgtggtggacttgtctcaatgtcttagggggaactaccgcgtgtgtcggccaaaatgcgcaggcccgaaccttgaat

SEQ ID NO: 53180 - DNA, 80 bp, synthetic construct
  source 1..80: mol_type = other DNA
ccttctgccctacaacttggcctggctatcgctggatgtctctgcggagtgctatcatctctctcttgatgccgctgcta

SEQ ID NO: 53181 - DNA, 80 bp, synthetic construct
  source 1..80: mol_type = other DNA
tgcctgatcttgttgggggtgattctggacttgcgaaggatgttgcccgtttgtcctctaattccaggatcttcaaccac

SEQ ID NO: 53182 - DNA, 80 bp, synthetic construct
  source 1..80: mol_type = other DNA
accatacagcactcagaatacctgtgttggggtgagttgatgaatctggccacctgggtgggaagtaatttggaagaccc

SEQ ID NO: 53183 - DNA, 80 bp, synthetic construct
  source 1..80: mol_type = other DNA
caccacgacatttcaccaggatcttgctggtggctccagttcaggaacagtaagccctgttccgaatactgtctctcaca

SEQ ID NO: 53184 - DNA, 80 bp, synthetic construct
  source 1..80: mol_type = other DNA
tccttcgggccgtgacttactcgacaccgccagagccttgtatcaggaagccctaacctctgcagaccattattcttctc

SEQ ID NO: 53185 - DNA, 80 bp, synthetic construct
  source 1..80: mol_type = other DNA
accatacagcactcaggcaagccatatggtgttgggaagactttatatctttggcttcatgggtgggcaatgaattggaa

SEQ ID NO: 53186 - DNA, 80 bp, synthetic construct
  source 1..80: mol_type = other DNA
gatcccatatctaaggaattagtaattacctatgttgataccaacttgggtttaaaaattagacaattattgtggtttca

SEQ ID NO: 53187 - DNA, 80 bp, synthetic construct
  source 1..80: mol_type = other DNA
ttccacaggtcaccaaagtcgtgctggtggctccagttcaggaacactcaaccctgttccaaatattgcctctcacatct

SEQ ID NO: 53188 - DNA, 80 bp, synthetic construct
  source 1..80: mol_type = other DNA
accatacagcaatcaggcaagctgttttgtgttggggggagttaatgaatttagccacctgggttggaagtaatttggac

SEQ ID NO: 53189 - DNA, 80 bp, synthetic construct
  source 1..80: mol_type = other DNA
gggagttaatgaatttagccacctgggtgggaagtaatttggacgacccagcatccagggaattagtagtcggttatgtc

SEQ ID NO: 53190 - DNA, 80 bp, synthetic construct
  source 1..80: mol_type = other DNA
ctccaccacgttccaccaaactcttcctgctggtggctccagttcaggaacagtgaaccctgttcagaacactgtctctt

SEQ ID NO: 53191 - DNA, 80 bp, synthetic construct
  source 1..80: mol_type = other DNA
ctccagcacattccaccaagctcttcctgctggtggctcaagttccgggacagtaaaccctgttccgactactgcctctc

SEQ ID NO: 53192 - DNA, 80 bp, synthetic construct
  source 1..80: mol_type = other DNA
tttttcacctctgcctaatcatctcttgttcatgtcctactgttcaagcctccaagctgtgccttgggtggctttggggc

SEQ ID NO: 53193 - DNA, 80 bp, synthetic construct
  source 1..80: mol_type = other DNA
gaggagaataggttaatgatttatgtattaggaggctgtaggcataaattggtctgcgcaccagcaccatgcaacttttt

SEQ ID NO: 53194 - DNA, 80 bp, synthetic construct
  source 1..80: mol_type = other DNA
gaggggcttagattaaaggtctttgtactaggaggctgtaggcataaattggtctgcgcaccagcaccatgcaacttttt

SEQ ID NO: 53195 - DNA, 80 bp, synthetic construct
  source 1..80: mol_type = other DNA
tttttcccctggctcgggagcactgttggatccgagagtaaggggtctgtattttcctgctggtggctccagttcagaaa

SEQ ID NO: 53196 - DNA, 80 bp, synthetic construct
  source 1..80: mol_type = other DNA
ggagcggacgttatcggcactgacacctccttccatggctgctcggttgtgctgccaactggatcctacgcgggacgtcc

SEQ ID NO: 53197 - DNA, 80 bp, synthetic construct
  source 1..80: mol_type = other DNA
gacccatccgtgccttggggggctttggggcatggacattgacccttataaagaatttggagcttctgtggagttactct

SEQ ID NO: 53198 - DNA, 80 bp, synthetic construct
  source 1..80: mol_type = other DNA
ccagcacggcggtcaggaaggcagcctaccccaatcactccacctttgagagacactcatcctcaggccatgcagtggaa

SEQ ID NO: 53199 - DNA, 80 bp, synthetic construct
  source 1..80: mol_type = other DNA
gtgccagcagcacctcctcctgcctccaccaatcggcagtcaggaagacagcctactccacctcaggccatgcagtggaa

SEQ ID NO: 53200 - DNA, 80 bp, synthetic construct
  source 1..80: mol_type = other DNA
ctcaacaacattccaccaagctctgcttcctgctggtggctccagttccggaacagtaaaccctgttccgactactgtct

SEQ ID NO: 53201 - DNA, 80 bp, synthetic construct
  source 1..80: mol_type = other DNA
ttccactgccctcagccaaattcctgctggtggctccagttcagaaacagtaaaccctgctccgattattgcatctcaca

SEQ ID NO: 53202 - DNA, 80 bp, synthetic construct
  source 1..80: mol_type = other DNA
tgcctcatcttcttgttggctcttctggactgtcaaggtatgttgcccgtttgtcctctaactgcagccaacgggtcttc

SEQ ID NO: 53203 - DNA, 80 bp, synthetic construct
  source 1..80: mol_type = other DNA
gaccaccagcacggaacagtgcagaacctgcacgactcctgctcaaggaacctctatgtatctctcctgttgctgtacaa

SEQ ID NO: 53204 - DNA, 80 bp, synthetic construct
  source 1..80: mol_type = other DNA
accatactgcactcaggcaagcaattctttgggtgggtgttaatttggaagatccagcatctagagacctagtagtcagt

SEQ ID NO: 53205 - DNA, 80 bp, synthetic construct
  source 1..80: mol_type = other DNA
accaatcgtcagtcaggaaggcagcctactcctctgtctccgcctttgagaaacactcatcctcaggctatgcagtggaa

SEQ ID NO: 53206 - DNA, 80 bp, synthetic construct
  source 1..80: mol_type = other DNA
ttccacagctttccaccaagctcctgctggtggctccagttcaggaacgctcaaccctgttccaactactgcctctcgca

SEQ ID NO: 53207 - DNA, 80 bp, synthetic construct
  source 1..80: mol_type = other DNA
accatactgcaatcaggcaacctattctatgctggagtgaattaatgactctagttacctgggtgagtaataatttccag

SEQ ID NO: 53208 - DNA, 80 bp, synthetic construct
  source 1..80: mol_type = other DNA
caaaactcgtagaggacttctctcagttttctacggggatcacccgtgtgtcatgacccatattcgaagtcaccaacctt

SEQ ID NO: 53209 - DNA, 80 bp, synthetic construct
  source 1..80: mol_type = other DNA
agaggactcttggactctcagcaatgtcaacgaccgaccttgaggcatacttcaaagactgtgtgtttaaagactgggag

SEQ ID NO: 53210 - DNA, 80 bp, synthetic construct
  source 1..80: mol_type = other DNA
gggagaatctttctgttcccaaccctctgggattctttcccgatcatcagttggaccctgcattcggagccaactcaaac

SEQ ID NO: 53211 - DNA, 80 bp, synthetic construct
  source 1..80: mol_type = other DNA
tctttctattcgggacctcctcgacaccgcctctgctctgtaccgggaggccttagagtctccggagcattgttcacctc

SEQ ID NO: 53212 - DNA, 80 bp, synthetic construct
  source 1..80: mol_type = other DNA
accatacagcactaaggcaagctattctgtgttggggtgagttgatgaatctggccacctgggatccagggaattagtag

SEQ ID NO: 53213 - DNA, 80 bp, synthetic construct
  source 1..80: mol_type = other DNA
ttccacaacattccaccaagctctgcaggatccccctgctggtggctccagttccggaacagtgaaccctgttccgacta

SEQ ID NO: 53214 - DNA, 80 bp, synthetic construct
  source 1..80: mol_type = other DNA
atcacgcccatcaattcttgcccaaggtcttacataagaggactcttggactttctgtaatgtcaacgaccgaccttgag

SEQ ID NO: 53215 - DNA, 80 bp, synthetic construct
  source 1..80: mol_type = other DNA
caattcaaccaatgcctgcccaaggtcttacataagaggactcttggactctctgtaatgtcaacaaccgaccttgaggc

SEQ ID NO: 53216 - DNA, 80 bp, synthetic construct
  source 1..80: mol_type = other DNA
ctcaaatcccagagtgaggggcctatgtcctcctgctggtggctccagttccggaacagtaaaccctgttccgactactg

SEQ ID NO: 53217 - DNA, 80 bp, synthetic construct
  source 1..80: mol_type = other DNA
ctccagcacattccaccaagctgtgctggatcctgctggtggctccagttccggaacagtaaaccctgttctgactactg

SEQ ID NO: 53218 - DNA, 80 bp, synthetic construct
  source 1..80: mol_type = other DNA
ccgagtggcaaccgccctcctttcctcacattcatttacaggaagacattattaatagatgtcaacaatatgtgggccct

SEQ ID NO: 53219 - DNA, 80 bp, synthetic construct
  source 1..80: mol_type = other DNA
cgcaagaacatattgtactaaatgcctgtaaatagacctattgattggaaagtatgtcagagaattgtgggtcttttggg

SEQ ID NO: 53220 - DNA, 80 bp, synthetic construct
  source 1..80: mol_type = other DNA
cctcttgtcctccaatttgtcctggttatttatcatcttcctcttcatcctgctgctatgcctcatcttcttgttggttc

SEQ ID NO: 53221 - DNA, 80 bp, synthetic construct
  source 1..80: mol_type = other DNA
ttaaatccccacaaaacaaaaagatggggttattccctcaactttatgggatatgtgatcgggagttggggaagcttacc

SEQ ID NO: 53222 - DNA, 80 bp, synthetic construct
  source 1..80: mol_type = other DNA
ggcagaacatggagaagaatctttccaccagcaatcctctgggattctttcccgaccaccagttggatccagccttcaga

SEQ ID NO: 53223 - DNA, 80 bp, synthetic construct
  source 1..80: mol_type = other DNA
ctccagcacattccaccaagctctgctagatcctcctgctggtggctcaagttccgggacagtaaaccctgttccgacta

SEQ ID NO: 53224 - DNA, 80 bp, synthetic construct
  source 1..80: mol_type = other DNA
ttcgcaaaggcatggggacgaatctttcggttcccaatcctctgggattctttcccgatcaccagttggacccagcgttc

SEQ ID NO: 53225 - DNA, 80 bp, synthetic construct
  source 1..80: mol_type = other DNA
ttccactgccatccaccaacatcagtttcatgctggtggctccagttcaggaacagtaaaccctgctccgaatattgcct

SEQ ID NO: 53226 - DNA, 80 bp, synthetic construct
  source 1..80: mol_type = other DNA
agactgtgtgtttaaagactgggaggagttgggggaggagtgtttgtattaggttaaatattaggagaggtcttgtttgt

SEQ ID NO: 53227 - DNA, 80 bp, synthetic construct
  source 1..80: mol_type = other DNA
attaggttaaatattaggaggctgtaggcataaattggtctgcgcaccagcaccatgcaactttttcacctctgcctaat

SEQ ID NO: 53228 - DNA, 80 bp, synthetic construct
  source 1..80: mol_type = other DNA
atcatacagcactcaggcaagccattctgctggggaattaatgactctagctaaagccattctctgctggtggaattaat

SEQ ID NO: 53229 - DNA, 80 bp, synthetic construct
  source 1..80: mol_type = other DNA
gactctagctacctgggtgggtaataatttggaaaatcctgcatccagggatctagtagtcaattatgttaatactaaca

SEQ ID NO: 53230 - DNA, 80 bp, synthetic construct
  source 1..80: mol_type = other DNA
tgttggctacagtgccagcaattcctcccactgcctccaccaatcggcagtcaggaaggcagcctactcccatctctcca

SEQ ID NO: 53231 - DNA, 80 bp, synthetic construct
  source 1..80: mol_type = other DNA
caggtcttgcccaaggtcttacataagaggactcttgccaagggcttatataagaggactcttggactcgcagcaatgtc

SEQ ID NO: 53232 - DNA, 80 bp, synthetic construct
  source 1..80: mol_type = other DNA
tccttctattcgagatctcctcgacaccgcctcagctctgtaagtctccggaacattgttcacctcaccatacagcactc

SEQ ID NO: 53233 - DNA, 80 bp, synthetic construct
  source 1..80: mol_type = other DNA
agactgtttgtttaaggactgggaggagttgggggaggtactaggaggctgtaggcataaattggtctgttcaccagcac

SEQ ID NO: 53234 - DNA, 80 bp, synthetic construct
  source 1..80: mol_type = other DNA
agactgtgtatttaaagactgggaggagttgggggaggagattaggatgctgaacgttgaacttggatgttcaccagcac

SEQ ID NO: 53235 - DNA, 80 bp, synthetic construct
  source 1..80: mol_type = other DNA
tccttctattcgagatcttctcgacaccgcctctgctctgtatcgggaggccttagagtctccggagcggcactcaggca

SEQ ID NO: 53236 - DNA, 80 bp, synthetic construct
  source 1..80: mol_type = other DNA
agctattctgtgttggggagagttgatgaatctggccacctgggtaggaagtaatttggaagatccagcatccagggaat

SEQ ID NO: 53237 - DNA, 80 bp, synthetic construct
  source 1..80: mol_type = other DNA
agactgtgtatttaaagactgggaggagctgggtgaggagattaggggctggaggcataaattgggctgctctccagcca

SEQ ID NO: 53238 - DNA, 80 bp, synthetic construct
  source 1..80: mol_type = other DNA
ttcttctactccagatttcctccacaccccccctgctttgtatcaggaggcctttgaatctccggaacattgtttacctc

SEQ ID NO: 53239 - DNA, 80 bp, synthetic construct
  source 1..80: mol_type = other DNA
cccctaaaccactaacgccacccattctgtgttgggaggaagttatgaatctggccacctgggtgggaagtaatttggaa

SEQ ID NO: 53240 - DNA, 80 bp, synthetic construct
  source 1..80: mol_type = other DNA
gggaagttatgaatctggccacctgggtgggaagtaatttggaagacccagcatccagggaattagtagtaagctatgtc

SEQ ID NO: 53241 - DNA, 80 bp, synthetic construct
  source 1..80: mol_type = other DNA
aattggtctgttttcacctctgcctaatcatctcttgttcatgtcctactgttcaagcctccaagctgtgccttgggtgg

SEQ ID NO: 53242 - DNA, 80 bp, synthetic construct
  source 1..80: mol_type = other DNA
agactgtgtgtttactgagtgggaggagttgggggaggaggtttaggaggctgtaggcataaattggtgtgttcaccagc

SEQ ID NO: 53243 - DNA, 80 bp, synthetic construct
  source 1..80: mol_type = other DNA
tacctcgataaggcatggggacaaatctttctgtccccaatccactgggattcttccccgatcatcagttggacccagca

SEQ ID NO: 53244 - DNA, 80 bp, synthetic construct
  source 1..80: mol_type = other DNA
tcctgctggtggctccagttcagggatagtgaaccctgctccgaatattgcctctcacatctcgtcaacctccgcgagga

SEQ ID NO: 53245 - DNA, 80 bp, synthetic construct
  source 1..80: mol_type = other DNA
aattggtctgttcaccagcaccatgcaactttttcaccaccgtgaacgcccaccaggtcttgcccaaggtcttacataag

SEQ ID NO: 53246 - DNA, 80 bp, synthetic construct
  source 1..80: mol_type = other DNA
acacctcggaaaggcatggggacaaatctttctgtacccaatcctctgggatttcttcccgatcatcagttggaccctgc

SEQ ID NO: 53247 - DNA, 80 bp, synthetic construct
  source 1..80: mol_type = other DNA
ccccatcacattccaccaagagccgtcagttcacaatcctgctggtggcttcagttccggaacagtaaaccctgttccga

SEQ ID NO: 53248 - DNA, 80 bp, synthetic construct
  source 1..80: mol_type = other DNA
acttgtggtggacttctctcaattttctagggggagtgcccgtgtgtcctggcctaaattcgcagtccccaacctccaat

SEQ ID NO: 53249 - DNA, 80 bp, synthetic construct
  source 1..80: mol_type = other DNA
actccctcttttcctcacattcatttgaaagaggacattgtcaatatatgtcaacaatatgtgggccctcttacagttaa

SEQ ID NO: 53250 - DNA, 80 bp, synthetic construct
  source 1..80: mol_type = other DNA
gagctccgctttccaaatctcgacgaggcatggggacgaatctttctgttcccaatcctctgggattcctccccgatcac

SEQ ID NO: 53251 - DNA, 80 bp, synthetic construct
  source 1..80: mol_type = other DNA
aaaccaggtgggagtgggatccttcgggccagggttcactccaccacacggcggtcttttggtgtggagccctcaggctc

SEQ ID NO: 53252 - DNA, 80 bp, synthetic construct
  source 1..80: mol_type = other DNA
aaggcacattaacaacagtgccagcagcccctcctcctgcctccaccaatcggcagtcaagaagaaagcctactcccatc

SEQ ID NO: 53253 - DNA, 80 bp, synthetic construct
  source 1..80: mol_type = other DNA
ctccacaacattccaccaagctctgctagaccccattcctgctggtggatccagttccggaacagtaaaccctgttccga

SEQ ID NO: 53254 - DNA, 80 bp, synthetic construct
  source 1..80: mol_type = other DNA
ttccacaaagttccaccaagctctgcaggatcccaggcctcctgctggtggctccagttccggaacagtgaaccctgttc

SEQ ID NO: 53255 - DNA, 80 bp, synthetic construct
  source 1..80: mol_type = other DNA
aaatgctgatcacgagcaagccattctttgctggggggacctaatgactctagctacctggttgggtgcaaatttggaag

SEQ ID NO: 53256 - DNA, 80 bp, synthetic construct
  source 1..80: mol_type = other DNA
gggacctaatgactctagctacctgggtgggtgcaaatttggaagatccagcatccagggacctagtagtcagttatgtc

SEQ ID NO: 53257 - DNA, 80 bp, synthetic construct
  source 1..80: mol_type = other DNA
tgcctaatcatctcatgttcatgtcccactcttcaagcctccaagctgtgccttgggtggctttggggcatggacatcga

SEQ ID NO: 53258 - DNA, 80 bp, synthetic construct
  source 1..80: mol_type = other DNA
tccgtccattcgagacctccttgacaccgcatccgctctgtaccaggaagccttagagtctcaggaacattgttctcctc

SEQ ID NO: 53259 - DNA, 80 bp, synthetic construct
  source 1..80: mol_type = other DNA
ccgattggtgtaaggaaccgctgctcttcagaacgagtcacctctgcctaatcatctcttgttcatgtcctactgttcaa

SEQ ID NO: 53260 - DNA, 80 bp, synthetic construct
  source 1..80: mol_type = other DNA
accgctgctcttcagaacgagtcacctctgcctaatcatctcttgttcatgtcctactgttcaagcctccaagctgtgcc

SEQ ID NO: 53261 - DNA, 80 bp, synthetic construct
  source 1..80: mol_type = other DNA
aaaccttgactaggcatggggacgaatctttctgttcccaatcctctgggattctttcccgatcatcagttggacccggc

SEQ ID NO: 53262 - DNA, 80 bp, synthetic construct
  source 1..80: mol_type = other DNA
tgcctcaccttcttgttggttcttctggactacaaaggtatgttgcccgtttgtcctctaattccagaagcaacactttc

SEQ ID NO: 53263 - DNA, 80 bp, synthetic construct
  source 1..80: mol_type = other DNA
cggcaaaggaccatgcaggacctgcacgactactgctcaaggaacctctatgtttccctattgttgctgtacaaaacctt

SEQ ID NO: 53264 - DNA, 80 bp, synthetic construct
  source 1..80: mol_type = other DNA
cttacagaccaccaaatgcccctatcttatcaacactttagacgacgaggcaggtcccctagaagaagaactccctcgcc

SEQ ID NO: 53265 - DNA, 80 bp, synthetic construct
  source 1..80: mol_type = other DNA
ctccacaacattccaccacagagtgaggggcctatactttcctgctggtggctccagttccggaacagtaaaccctgttc

SEQ ID NO: 53266 - DNA, 80 bp, synthetic construct
  source 1..80: mol_type = other DNA
ctccagaacattccaccaagctctgctagatcccagagtgatgggcgtatactttcctgctcgtggctcaagttcctgga

SEQ ID NO: 53267 - DNA, 80 bp, synthetic construct
  source 1..80: mol_type = other DNA
actcgtggtggacttctctcacgtgtcctggccaaaattttgcagtccccaacctccaatcactcaccaacctcttgtcc

SEQ ID NO: 53268 - DNA, 80 bp, synthetic construct
  source 1..80: mol_type = other DNA
attggtctgcaaagatccaagggacaggaataaaaacactcctactgttcaagcctccaagctgtgccttgggtggcttt

SEQ ID NO: 53269 - DNA, 80 bp, synthetic construct
  source 1..80: mol_type = other DNA
aattggtgcgttcaccagcaccatgcaactttcatctcatgttcatgtcctactgttcaagcctccaagctgtgccttgg

SEQ ID NO: 53270 - DNA, 80 bp, synthetic construct
  source 1..80: mol_type = other DNA
ttcgcaaaggcatggggcagaatctttccaccagcaatcctctgggattctttcccgaccaccagttggatccagccttc

SEQ ID NO: 53271 - DNA, 80 bp, synthetic construct
  source 1..80: mol_type = other DNA
attctatataagagggaaaccacacgtagcgcatcattttgcgggtcaccatattcttgggaacaagagctaaaaccttc

SEQ ID NO: 53272 - DNA, 80 bp, synthetic construct
  source 1..80: mol_type = other DNA
ccatgcaacttttaccatgcaactttttcacctctgcctaatcatctcatgttcatgtcctactgttcaagcctccaagc

SEQ ID NO: 53273 - DNA, 80 bp, synthetic construct
  source 1..80: mol_type = other DNA
accaaacctcgacaaggcatggggacgaatctttctgttcccaaccccctgggattctttcccgatcaccagttggaccc

SEQ ID NO: 53274 - DNA, 80 bp, synthetic construct
  source 1..80: mol_type = other DNA
ctctacagcattccaccaagctctacaaaatcccaaagtcagtcctgctggtggctccagttcagggatagtgaaccctg

SEQ ID NO: 53275 - DNA, 80 bp, synthetic construct
  source 1..80: mol_type = other DNA
ttccacagcttcccaccaagctctcctgtattttcctgctggtggctccagttcaggaacactcaaccctgttccaaata

SEQ ID NO: 53276 - DNA, 80 bp, synthetic construct
  source 1..80: mol_type = other DNA
cacccccacttgccatcaaactcttcaaaatcccagagtcagggctctgtatttacctgctggtggctccagttcaggaa

SEQ ID NO: 53277 - DNA, 80 bp, synthetic construct
  source 1..80: mol_type = other DNA
ggcaaaatctttccaccaggcagaatctttccaccagcaatcctctgggattctttcccgaccaccagttggatccagcc

SEQ ID NO: 53278 - DNA, 80 bp, synthetic construct
  source 1..80: mol_type = other DNA
accactgtttggctttcagttatcccactgtttggacttcttgagtccctttatgccgctgttaccaattttcttttgtc

SEQ ID NO: 53279 - DNA, 80 bp, synthetic construct
  source 1..80: mol_type = other DNA
tttgggtatacatttaaaccctcacaaaacaaaaagatggggatattcccttaacttcatgggatatgtaattgggagtt

SEQ ID NO: 53280 - DNA, 80 bp, synthetic construct
  source 1..80: mol_type = other DNA
caaatcactgaggagcggcagaattcgggccagggttcaccccaccacacggaggtcttttggggtggagccctcaggct

SEQ ID NO: 53281 - DNA, 80 bp, synthetic construct
  source 1..80: mol_type = other DNA
ctccagcacagtccaccaagctctgctaaatccccgagtgcctgctggtggctccagttccggaacagtaaaccctgttc

SEQ ID NO: 53282 - DNA, 80 bp, synthetic construct
  source 1..80: mol_type = other DNA
ctccaccacattccaccaagctctgctagatcccagagtgaggactgctggtggctccagttccggaacagtaaaccctg

SEQ ID NO: 53283 - DNA, 80 bp, synthetic construct
  source 1..80: mol_type = other DNA
cagggtatattgacacaagtacaaccagcgcctcctcctgcctccaccaatcggcagtcaggaagacagcctactcccat

SEQ ID NO: 53284 - DNA, 80 bp, synthetic construct
  source 1..80: mol_type = other DNA
attccacaacctttcaccaaactctgcaagatccgaatttccctgctggtggctccagttcaggagcagtaaaccctgtt

SEQ ID NO: 53285 - DNA, 80 bp, synthetic construct
  source 1..80: mol_type = other DNA
aattggtctgttcaccagcaccatgcaactttttcacctctgcctaatcatctcatgtgttcaagcctccaagctgtgcc

SEQ ID NO: 53286 - DNA, 80 bp, synthetic construct
  source 1..80: mol_type = other DNA
cttggactctcagcaatgtcaacgaccgaccttgaggcatacttcaaaaactgtgtatttaaagactgggaggagttggg

SEQ ID NO: 53287 - DNA, 80 bp, synthetic construct
  source 1..80: mol_type = other DNA
aaactgtgtatttaaagactgggaggagttgggtgaggagatttgggaggctgtctgtgtaatgggtggtgttaagcata

SEQ ID NO: 53288 - DNA, 80 bp, synthetic construct
  source 1..80: mol_type = other DNA
gtgcaaacctcgacaaggtatggggacgaacctttctgttcccaatcctctgggattctttcccggtcaccagttggacc

SEQ ID NO: 53289 - DNA, 80 bp, synthetic construct
  source 1..80: mol_type = other DNA
ctccactcagttccaccagactctgttagatccgagagtaagggctgctggtggctccagttcagagacacagaaccctg

SEQ ID NO: 53290 - DNA, 80 bp, synthetic construct
  source 1..80: mol_type = other DNA
ctccacagcattccatcaagctctgcaagatctcaaagtaaggactgctggtggctccagttccggggcagtaaaccctg

SEQ ID NO: 53291 - DNA, 80 bp, synthetic construct
  source 1..80: mol_type = other DNA
acatctcgcacaggcatggggacgaatctttctgttcccaaccctctgggattctttcccgatcatcagttggaccctgc

SEQ ID NO: 53292 - DNA, 80 bp, synthetic construct
  source 1..80: mol_type = other DNA
tgcctcatcttcttgttggttcttctggactatcaaggtacgttgcccgtttgtcctctaacaaacagaaccagcaccgg

SEQ ID NO: 53293 - DNA, 80 bp, synthetic construct
  source 1..80: mol_type = other DNA
acggcaggccttagagtctccggaacattgttcacctcaccatacagcactcaggcaagctattctgtgttgggtggagt

SEQ ID NO: 53294 - DNA, 80 bp, synthetic construct
  source 1..80: mol_type = other DNA
gagtatttggtatcttttggagtgtggattcgcactcctaccgcttacagaccaccaaatgcccctatcttatcaacact

SEQ ID NO: 53295 - DNA, 80 bp, synthetic construct
  source 1..80: mol_type = other DNA
cctggaaggtgggaaggggagcattcgggccagggttcgtccctccacatggaggactgttgggatggagccctcaggct

SEQ ID NO: 53296 - DNA, 80 bp, synthetic construct
  source 1..80: mol_type = other DNA
tgcccaccaagctctgctagatcccagagtgaaaggcccatactttcctgctggtggctccagttccggaacagtaaacc

SEQ ID NO: 53297 - DNA, 80 bp, synthetic construct
  source 1..80: mol_type = other DNA
tccttcgattcgtgatctcctcgacaccgcctctgctttgtttagggaggccctagagtctccggaacattatacacctc

SEQ ID NO: 53298 - DNA, 80 bp, synthetic construct
  source 1..80: mol_type = other DNA
ctcaacccagttccaccatgccctgttggatccgagggtagcggctcctgctggtgcatacagttcagagacaccaaacc

SEQ ID NO: 53299 - DNA, 80 bp, synthetic construct
  source 1..80: mol_type = other DNA
agaacacctaccacccctgctcgtgtcatcggcggtgtcttccttgttgacaagaatccgcacaataccacggagtctag

SEQ ID NO: 53300 - DNA, 80 bp, synthetic construct
  source 1..80: mol_type = other DNA
ctctacaacattccaccaagctctgctagaccccacagtgaggggccttcctgctggtggctccagttccggaacagtaa

SEQ ID NO: 53301 - DNA, 80 bp, synthetic construct
  source 1..80: mol_type = other DNA
ttccactgccacccaccaagctctgcaggatcccaaagtcgatcctgctggtggctccagttcaggaacagtaaaccctg

SEQ ID NO: 53302 - DNA, 80 bp, synthetic construct
  source 1..80: mol_type = other DNA
agactgtgtgtttaaggactgggaggagctgggggaggagaataggactaggaggctgtaggcataaattggtctgcgca

SEQ ID NO: 53303 - DNA, 80 bp, synthetic construct
  source 1..80: mol_type = other DNA
ctccacagcattccatcaagctctgcaagatcccaaagtaaggggtcttcctgctggtggctccagttccggggcagtaa

SEQ ID NO: 53304 - DNA, 80 bp, synthetic construct
  source 1..80: mol_type = other DNA
tccgtctattcgtgatctcctcgacacagccgccgctctgtatcgagaggccttagagtctccggaacattgctcacctc

SEQ ID NO: 53305 - DNA, 80 bp, synthetic construct
  source 1..80: mol_type = other DNA
ctccagcacattccaccaagctctgctagatcccagagtgaggggcctatatgctggtggctcaagttccggaacagtaa

SEQ ID NO: 53306 - DNA, 80 bp, synthetic construct
  source 1..80: mol_type = other DNA
gacgtgccaggaacaactggtccgacttcgtcggcagtggtggtggcaaatcctgacctaccttctgcccaggcccaacg

SEQ ID NO: 53307 - DNA, 80 bp, synthetic construct
  source 1..80: mol_type = other DNA
cacatctttcggcgatgtgggctgggtggggtggtagcatggaggcgcgtgtcaccatttctggttctggcacctttgct

SEQ ID NO: 53308 - DNA, 80 bp, synthetic construct
  source 1..80: mol_type = other DNA
ggccacactgaagggacccacaaaatagtgtttgagatggagggcaatggctccaacacagagccaaagcaaagcaacaa

SEQ ID NO: 53309 - DNA, 80 bp, synthetic construct
  source 1..80: mol_type = other DNA
tgcccaattgcatccgggagtgttttgctgcagtcaccacaataccatggaccacccggcaagcagcaaacacatttctc

SEQ ID NO: 53310 - DNA, 80 bp, synthetic construct
  source 1..80: mol_type = other DNA
gcccactcaagttgagacaccaaatgctagtgctcagcgtgtggaacttgcaatggccacaggggcagtgaccagcaatg

SEQ ID NO: 53311 - DNA, 80 bp, synthetic construct
  source 1..80: mol_type = other DNA
ccttgggtggccagcaccatgtctgctcccaacatgcaactttttgggcctaaccagatactccctttcttctcttctca

SEQ ID NO: 53312 - DNA, 80 bp, synthetic construct
  source 1..80: mol_type = other DNA
cttctttagatctattcgaaatctcctcaatccgcctcagctctgtttagggaggccttaaattctccagagttttggtc

SEQ ID NO: 53313 - DNA, 80 bp, synthetic construct
  source 1..80: mol_type = other DNA
acctctgcataccgcgctctggcaagcttgtctgtgttggggtgacttgatgaatgcagctttttgggtaggaagtaatt

SEQ ID NO: 53314 - DNA, 80 bp, synthetic construct
  source 1..80: mol_type = other DNA
tggaagatccagcatccaaggaattagtagtcagctatgtcaacgttaatatgggcctaaaaatcagacaactattgtgg

SEQ ID NO: 53315 - DNA, 80 bp, synthetic construct
  source 1..80: mol_type = other DNA
ggagcgacacttatcgggacggataattccgtcgttctctcccggaaatatacatcctttccatggctgctaggctgcgc

SEQ ID NO: 53316 - DNA, 80 bp, synthetic construct
  source 1..80: mol_type = other DNA
acaaactgtctggataaatactgcaaagactggttgtatgagaccagataagagatctttgaactacgaggatgcaggca

SEQ ID NO: 53317 - DNA, 80 bp, synthetic construct
  source 1..80: mol_type = other DNA
taatttgttctgctgcccaccaccatgctactttttcacctctgcctaatcatctcttgttcatgtccactgttcaagcc

SEQ ID NO: 53318 - DNA, 80 bp, synthetic construct
  source 1..80: mol_type = other DNA
ggggaccctgcaccgaacatggagaacacaacatccggattcctaggacccctgctcgtgttacaggcggtgtttttctt

SEQ ID NO: 53319 - DNA, 80 bp, synthetic construct
  source 1..80: mol_type = other DNA
ctgctggtggctccagttcaggaacagtgaaccctgttcagagcactgcctcttccatatcgtcaatcttatcgaagact

SEQ ID NO: 53320 - DNA, 80 bp, synthetic construct
  source 1..80: mol_type = other DNA
tgcccggcgaacggtctctgccaagtatttgctgacgcaacccccactggatggggcttggccataggccatcggcgcat

SEQ ID NO: 53321 - DNA, 80 bp, synthetic construct
  source 1..80: mol_type = other DNA
cagggcctactcacaactggagcagctcctcctcctgccttcaccaaccgggagtaaggaaggcagcctactcccttaac

SEQ ID NO: 53322 - DNA, 80 bp, synthetic construct
  source 1..80: mol_type = other DNA
ggcagaatctttccaccagcaatcctctgggattctttcccgccaccagcaatcctctgggattctttcccgaccaccag

SEQ ID NO: 53323 - DNA, 80 bp, synthetic construct
  source 1..80: mol_type = other DNA
tctcttgctcagttactagaattcatttgttcagtggttcgtagggctttcccccactgtttggctttcagttatatgga

SEQ ID NO: 53324 - DNA, 80 bp, synthetic construct
  source 1..80: mol_type = other DNA
gaaggtgttccaccactcggaaaggcatggggacgaatctttctgttcccaatcctctgggatttcttcccgatcatcag

SEQ ID NO: 53325 - DNA, 80 bp, synthetic construct
  source 1..80: mol_type = other DNA
acccctcgtagcaccacacctcggaaaggcatggggacgaatctttctgtacccaatcctctgggatttcttcccgatca

SEQ ID NO: 53326 - DNA, 80 bp, synthetic construct
  source 1..80: mol_type = other DNA
tctgtatcgggatgccttagaatctcctgagcattgttcaccttcacatctgccactcaggcaagccattctttgctggg

SEQ ID NO: 53327 - DNA, 80 bp, synthetic construct
  source 1..80: mol_type = other DNA
ttcacatctgccactcaggcaagccattctttgctggggggatgtaatgaatctagctacctgggttggtgtaaatttgg

SEQ ID NO: 53328 - DNA, 80 bp, synthetic construct
  source 1..80: mol_type = other DNA
ttaaatcccaacaacacaaaaagatggggatatcccccaaatttcatgggcaatgtaattggaagttggtggtctttacc

SEQ ID NO: 53329 - DNA, 80 bp, synthetic construct
  source 1..80: mol_type = other DNA
caggtcttgccagtcttacataagaggactcttggactctcggcaatgtcaacgaccgaccttgaggcatacttcaaaga

SEQ ID NO: 53330 - DNA, 80 bp, synthetic construct
  source 1..80: mol_type = other DNA
tccgtctatacgggatctcctcgacaccgcatttgctctgcatcgggaggccttagagtctccggaacattgtacacctc

SEQ ID NO: 53331 - DNA, 80 bp, synthetic construct
  source 1..80: mol_type = other DNA
actccgactttccctgatattcatttgcaccaggacattattaacaaatgtgaacaatttgtaggtcctctaacactaaa

SEQ ID NO: 53332 - DNA, 80 bp, synthetic construct
  source 1..80: mol_type = other DNA
tgagaaacgaagattaaatttagttatgcctgctaggttttttcccatctctacgaaatatttgcccctagagaaaggta

SEQ ID NO: 53333 - DNA, 80 bp, synthetic construct
  source 1..80: mol_type = other DNA
taaaaccttattatccagataatgtagttaatcattacttccaaaccagacactatttacataccctttggaaggcgggc

SEQ ID NO: 53334 - DNA, 80 bp, synthetic construct
  source 1..80: mol_type = other DNA
gtctttcttggacggtccctctcgaatgggggaagaatcattccaccaccaatcctctgggattttttcccgaccaccag

SEQ ID NO: 53335 - DNA, 80 bp, synthetic construct
  source 1..80: mol_type = other DNA
gcttggggataaaccatccccttctccgtctgccgttccggccgaccacgcggcgcacctctctttacgcggtctcccag

SEQ ID NO: 53336 - DNA, 80 bp, synthetic construct
  source 1..80: mol_type = other DNA
ttaaattccaacaaaacaaaaagatggggatattccctccagttcatgggttatgtaattggaagttggtggtcattacc

SEQ ID NO: 53337 - DNA, 80 bp, synthetic construct
  source 1..80: mol_type = other DNA
acaggatcacatcagaatgaaaatcaaagactgttttagaaaactccctgttaatcggcctattgattggaaagtatgtc

SEQ ID NO: 53338 - DNA, 80 bp, synthetic construct
  source 1..80: mol_type = other DNA
agagaattgtgggtctgttgggctttgctgccccttttacacaatgtggatatcctgctttaatgcctctgtatgcgtgt

SEQ ID NO: 53339 - DNA, 80 bp, synthetic construct
  source 1..80: mol_type = other DNA
gtattccttggactcacaaggtgggaaattttacggggctttactcttctactatacctgtctttaatcctaactggaaa

SEQ ID NO: 53340 - DNA, 80 bp, synthetic construct
  source 1..80: mol_type = other DNA
agaagaactccctcgcctcgcagacgaagatctcaatcgccgcgtcgcagaagatctcaatcccaacccccccccttgga

SEQ ID NO: 53341 - DNA, 80 bp, synthetic construct
  source 1..80: mol_type = other DNA
gtggaacactttccaccaggctctgttagatccgaaggtaagggctctgtattttcctgctggtggctccagttcagaga

SEQ ID NO: 53342 - DNA, 80 bp, synthetic construct
  source 1..80: mol_type = other DNA
atttatcatttgtttataattcacaatctgcagttcaaataccaatttattattcttccaattcagaattagaaaaaaga

SEQ ID NO: 53343 - DNA, 80 bp, synthetic construct
  source 1..80: mol_type = other DNA
tgttttatattcgaactacattgttaacaaattacgaggatttgagactgatagagaatttatattaactaaaattatac

SEQ ID NO: 53344 - DNA, 80 bp, synthetic construct
  source 1..80: mol_type = other DNA
acaacgctgtggaacgtaaactagtcagttatgctaaaggtaaacctttagaggctgatttaacggcaaacgagcttgat

SEQ ID NO: 53345 - DNA, 80 bp, synthetic construct
  source 1..80: mol_type = other DNA
aaatgacatctgtagccattactggatcactaaggctatttccgtcagaacgagtgttaactactaattctacattcaaa

SEQ ID NO: 53346 - DNA, 80 bp, synthetic construct
  source 1..80: mol_type = other DNA
tctgtaattacccaaaatctgagatgattaaactatggaagaaaatgtggaacataacagcattacggtctccctatact

SEQ ID NO: 53347 - DNA, 80 bp, synthetic construct
  source 1..80: mol_type = other DNA
acgttgctgatgcaaataaaatttataagcgtagactagatttatttaccatagtggcatctacaataaataaatacgga

SEQ ID NO: 53348 - DNA, 80 bp, synthetic construct
  source 1..80: mol_type = other DNA
aattggtctgatctcgctcgcccaaatttttcacctctgcctaatcatctcatgttcatgtcctactgttcaagcctcca

SEQ ID NO: 53349 - DNA, 80 bp, synthetic construct
  source 1..80: mol_type = other DNA
ggagctaaactactcgggactgacaactctgtcgtcctctcccgcaaatatacatcatttccatggctgctaggctgtgc

SEQ ID NO: 53350 - DNA, 80 bp, synthetic construct
  source 1..80: mol_type = other DNA
ggggcaacgctgctcgggactgacaactctgttgttctctcccgcaaatatacatcatttccatggctgctaggctgtac

SEQ ID NO: 53351 - DNA, 80 bp, synthetic construct
  source 1..80: mol_type = other DNA
agaagccaacaaggtaggagtgggagcattcgggcctggtttcactcccccacacggaggccttttggggtggagccctc

SEQ ID NO: 53352 - DNA, 80 bp, synthetic construct
  source 1..80: mol_type = other DNA
ctctggcttccacaattgggaattcaggaaggccggcttacccaatcaccccaactttgagagacactcattctcaggcc

SEQ ID NO: 53353 - DNA, 80 bp, synthetic construct
  source 1..80: mol_type = other DNA
acaattgggaattcaggaaggccggcttacccaatcaccccaactttgagagacactcattctcaggccatgcagtggaa

SEQ ID NO: 53354 - DNA, 80 bp, synthetic construct
  source 1..80: mol_type = other DNA
gcctcccatcaggattccttggacccctgcccgttttacaggcggggtttttcctgttgacaaaaatcctcccaataccg

SEQ ID NO: 53355 - DNA, 80 bp, synthetic construct
  source 1..80: mol_type = other DNA
aaggaaccctgttccgactactgccttactcctctcctcaatcttcccgaggattgggggcttggcaccggacatggaaa

SEQ ID NO: 53356 - DNA, 80 bp, synthetic construct
  source 1..80: mol_type = other DNA
gagcgaaaacttatcggaaccgacaactctgttgtcctctctcggaaatacacctcttcttcatggctgctagggtgtgc

SEQ ID NO: 53357 - DNA, 80 bp, synthetic construct
  source 1..80: mol_type = other DNA
ttacaagacattccaccaagctctgcaggatcccagagtaaatcctgctggtggctccagttccgggacagtgaaccctg

SEQ ID NO: 53358 - DNA, 80 bp, synthetic construct
  source 1..80: mol_type = other DNA
agactgtttgtttaaagataatgtagttaatcattacttgtactatgagataatgtagttaatcattacttgtactagga

SEQ ID NO: 53359 - DNA, 80 bp, synthetic construct
  source 1..80: mol_type = other DNA
ggctgtaggcataaattggtctgcgcaccagcaccatgcaactttttcacctccgcctaatcatctcttgttcatgtcct

SEQ ID NO: 53360 - DNA, 80 bp, synthetic construct
  source 1..80: mol_type = other DNA
tacaaaattgaaacaggctaacactttctgccctataaacaaggcctttctaagtaaataattccccaacctttcccccg

SEQ ID NO: 53361 - DNA, 80 bp, synthetic construct
  source 1..80: mol_type = other DNA
ttaaccggcaaaggccccgtctgtgccaagtgtttgctgacgcaacccccaagggcgggcccttggtcatcggccataaa

SEQ ID NO: 53362 - DNA, 80 bp, synthetic construct
  source 1..80: mol_type = other DNA
cccttgcgtggaatctttccgccttctcccccggcccatactgcggaactcctagccctttgttttactcgcagcaggtc

SEQ ID NO: 53363 - DNA, 80 bp, synthetic construct
  source 1..80: mol_type = other DNA
ggaaaagaaatcatcgggacggacaacccccccgtccccccccccaagcatacctcctttccatggctgctaggctgtgc

SEQ ID NO: 53364 - DNA, 80 bp, synthetic construct
  source 1..80: mol_type = other DNA
tgccaactggatcctgcgcgggaagtcatcacgacacctccccccggcgctgaatccgggagacgacccctcggcggctc

SEQ ID NO: 53365 - DNA, 80 bp, synthetic construct
  source 1..80: mol_type = other DNA
gcttgggactctatcgccccctcttccgtctgccgaaccgtccgaacacggggcgcacttcttcttacgcggtctccccg

SEQ ID NO: 53366 - DNA, 80 bp, synthetic construct
  source 1..80: mol_type = other DNA
tattgggggccaagtctgtacaacatcttgagtcctttttttaccgctgtaccgaggaatttacacatacatctaaaccc

SEQ ID NO: 53367 - DNA, 80 bp, synthetic construct
  source 1..80: mol_type = other DNA
ccacaaattgaaattttgttgggctttgccgcccttttctggcgctttggttgacttggcctcatgccttttaacacatg

SEQ ID NO: 53368 - DNA, 80 bp, synthetic construct
  source 1..80: mol_type = other DNA
tttggaccccgttcggagccaactcaaacaatccagattgggctttattcttctactgtacctgtctttaatcctgagtg

SEQ ID NO: 53369 - DNA, 80 bp, synthetic construct
  source 1..80: mol_type = other DNA
gcaaactccctcctttcctaacattcatttacaggaggacattattaatagatgtgaacaatatgtgggccctcttacaa

SEQ ID NO: 53370 - DNA, 80 bp, synthetic construct
  source 1..80: mol_type = other DNA
cagggtctactcacaactgtgccagcggctcctcctcctgcctccaccgatcggcagtcaggaaggcagcctactccctt

SEQ ID NO: 53371 - DNA, 80 bp, synthetic construct
  source 1..80: mol_type = other DNA
gtattccttggacacataaggtgggaaactttacggggctttattcttctacggtaccctgctttaatcctatatggcaa

SEQ ID NO: 53372 - DNA, 80 bp, synthetic construct
  source 1..80: mol_type = other DNA
agaagatctccgtctcgtcgcagacgaaggtctcggtcgccgcgtcgcagaagatctcaatctcgggaatctcaatgtta

SEQ ID NO: 53373 - DNA, 80 bp, synthetic construct
  source 1..80: mol_type = other DNA
attaccgctaaacaggcttttgtcttttcgccaacctacaaggcctttctatgtcaacaatacaggaacctttaccccgt

SEQ ID NO: 53374 - DNA, 80 bp, synthetic construct
  source 1..80: mol_type = other DNA
taattttcctttgactcaaaaggtgggaaaccttacttggctttaatctttttccgcacctgtcttttatcctgagtggc

SEQ ID NO: 53375 - DNA, 80 bp, synthetic construct
  source 1..80: mol_type = other DNA
ccaatgttagtattccttggactcataaggtgggaaactttacggggctctactcttctactgtacctgctttcaatcct

SEQ ID NO: 53376 - DNA, 80 bp, synthetic construct
  source 1..80: mol_type = other DNA
gtattccttggactcataaggtgggaaactttaccggtctttactcctctactgcacctgttttcaatcctgactggtta

SEQ ID NO: 53377 - DNA, 80 bp, synthetic construct
  source 1..80: mol_type = other DNA
tccgtcgattcgagacctcctagataccgctgctgcactgtatcgggaagccttagaatctcctgaacattgcacacctc

SEQ ID NO: 53378 - DNA, 80 bp, synthetic construct
  source 1..80: mol_type = other DNA
cggatcctgtccaaggacttacgtactatgactcttgaactttcaggactgtcgacgtccgaccttgaggcatacttcaa

SEQ ID NO: 53379 - DNA, 80 bp, synthetic construct
  source 1..80: mol_type = other DNA
tccatctattcgagatctcctcgacaccgcatcagctttgtaccgggaggccttagagtctccggaacattgttcacctc

SEQ ID NO: 53380 - DNA, 80 bp, synthetic construct
  source 1..80: mol_type = other DNA
taattgtatcagtgcgaaacaggcttttgtcttttcgccaacttacaaggcctttctctgtaaacagtacatgaaccttt

SEQ ID NO: 53381 - DNA, 80 bp, synthetic construct
  source 1..80: mol_type = other DNA
tgctttgtatcgggaagccttagagtctcctcaacattgctcgcctcaccatacagcaatcaggcaagctgtgttgtgct

SEQ ID NO: 53382 - DNA, 80 bp, synthetic construct
  source 1..80: mol_type = other DNA
accatacagcaatcaggcaagctgtgttgtgctggggggaattaatgactctagcttcctgggtgaataataatttacaa

SEQ ID NO: 53383 - DNA, 80 bp, synthetic construct
  source 1..80: mol_type = other DNA
accagttggaccctgcattcaaagccaactccgacaatccagattgggacctcaacccacacaaggacaatcagtcagac

SEQ ID NO: 53384 - DNA, 80 bp, synthetic construct
  source 1..80: mol_type = other DNA
tccgtcggcgcgagacctcctcgataccactgctgctctgtatcgggaagccttagaatctcctgaacattgctcatctc

SEQ ID NO: 53385 - DNA, 80 bp, synthetic construct
  source 1..80: mol_type = other DNA
gaggttacagcaccaaacctcgacaaggcatggggacaaatctttctgttcccaatcctctgggattctttcccgatcac

SEQ ID NO: 53386 - DNA, 80 bp, synthetic construct
  source 1..80: mol_type = other DNA
tccttctgttcgagatcttctcaaccccgttttggttttgtatcggggggccttagagtctccggaacattgttcacctc

SEQ ID NO: 53387 - DNA, 80 bp, synthetic construct
  source 1..80: mol_type = other DNA
ggccttagagtctccggaacattgttcacctcaccatacggcactcaggcaagctattctgtgttggggtgagttaatga

SEQ ID NO: 53388 - DNA, 80 bp, synthetic construct
  source 1..80: mol_type = other DNA
tgccttcaccgtttgcctgtgtgtctggactatcaaggtatgttgcccgtgtgtcctctacttccaggatctacaaccac

SEQ ID NO: 53389 - DNA, 80 bp, synthetic construct
  source 1..80: mol_type = other DNA
cacatcaggtaggcacaggagcattcgggccagggttcaccccaccacacggaggtctgttggggtggagccctcaggct

SEQ ID NO: 53390 - DNA, 80 bp, synthetic construct
  source 1..80: mol_type = other DNA
tccgtcgattcgagatcttcttgacaccgcctctgctctgtatcgagaggctttagagtctccggaacattgttcacctc

SEQ ID NO: 53391 - DNA, 80 bp, synthetic construct
  source 1..80: mol_type = other DNA
gtttgaacatctaccgtccccttctgcgtctgcccttccggccgaccacggggcgcacctctctttacgcggtctccccg

SEQ ID NO: 53392 - DNA, 80 bp, synthetic construct
  source 1..80: mol_type = other DNA
tctgtgccttctcatctgccggaccgtgtgcacttcgcttcacctctgcacgtcgcatggaaaccaccgtgaacgcccac

SEQ ID NO: 53393 - DNA, 80 bp, synthetic construct
  source 1..80: mol_type = other DNA
atcacacagcaatcaggcaagctgttctgtgctggctggaattaatgactctagctaactgggtgggcaataatttacaa

SEQ ID NO: 53394 - DNA, 80 bp, synthetic construct
  source 1..80: mol_type = other DNA
cccacaaggtgggaataggagcattcggacccgggttcacccctccccatgggggactattggtgtggagccctcaggct

SEQ ID NO: 53395 - DNA, 80 bp, synthetic construct
  source 1..80: mol_type = other DNA
agactgtgtgtttacggagtgggaggagttgggggaggagattagtgaaaaggttgcatggcgctggtgcagtaagcata

SEQ ID NO: 53396 - DNA, 80 bp, synthetic construct
  source 1..80: mol_type = other DNA
ttttgctctgttcaccagaatcctgcaactttttaacctatgccttatcctctctcgttcatgtcctaatgcacaagcct

SEQ ID NO: 53397 - DNA, 80 bp, synthetic construct
  source 1..80: mol_type = other DNA
cttaactttgccttgggtggctttagggcatggacattgacccgtataaagaatttggagcttctgtggagttactctct

SEQ ID NO: 53398 - DNA, 80 bp, synthetic construct
  source 1..80: mol_type = other DNA
cctcgaagcctgccaacagtcttacataagcggactcttggactctcaggacggtcaatgacctggatcgaagactacat

SEQ ID NO: 53399 - DNA, 80 bp, synthetic construct
  source 1..80: mol_type = other DNA
atggctgctaggctgtgctgccaactggatcctgcgcgggacgtcctttgtttacgtcccgtcggcgctgaatcccgcgg

SEQ ID NO: 53400 - DNA, 80 bp, synthetic construct
  source 1..80: mol_type = other DNA
tttgctcgcagcaggtctggagcaaaactcatcgggactgacaattctgtcgtgctctcccgcaagtatacatcctttcc

SEQ ID NO: 53401 - DNA, 80 bp, synthetic construct
  source 1..80: mol_type = other DNA
ctcgaggactggggaccctgcaccgaacatggagagcacaacatcaggattcctaggacccctgctcgtgttacaggcgg

SEQ ID NO: 53402 - DNA, 80 bp, synthetic construct
  source 1..80: mol_type = other DNA
ctatattttcctgctggtggctccagttccggaacagtaaaccctgttccgactactgcctcacccatatcgtcaatctt

SEQ ID NO: 53403 - DNA, 80 bp, synthetic construct
  source 1..80: mol_type = other DNA
tccgtcggtgcatgacctcctagataccgcttctgctttgtatcgggaagccttagaatctcctgaacattgctcacctc

SEQ ID NO: 53404 - DNA, 80 bp, synthetic construct
  source 1..80: mol_type = other DNA
gatcccgaatcttgggaaatagtaggcacctatgtcaatggtagcctggggctaagaggcagaccactattgcggtttca

SEQ ID NO: 53405 - DNA, 80 bp, synthetic construct
  source 1..80: mol_type = other DNA
gatgggtgggaacggtctggtttctgccaagtgtttgctgacgcaacccccactggatggggcttggctattggccatcg

SEQ ID NO: 53406 - DNA, 80 bp, synthetic construct
  source 1..80: mol_type = other DNA
ctccgccacttttcatcaaactcttcaagatcccagagtcagggctctgtaccttcctgctggtggctccagttcaggaa

SEQ ID NO: 53407 - DNA, 80 bp, synthetic construct
  source 1..80: mol_type = other DNA
catcataccgttatcaggcaagctgttttgtgttggggtgaattaatgactttggcttcctgggtgggcaataatttgga

SEQ ID NO: 53408 - DNA, 80 bp, synthetic construct
  source 1..80: mol_type = other DNA
ctccagcacattccacaaagctctgctagatccccgagtgaggggcccatactttcctgctggtggctccagttccggaa

SEQ ID NO: 53409 - DNA, 80 bp, synthetic construct
  source 1..80: mol_type = other DNA
cagtaaaccctgttccgactactgcctctcccatatcgtcaatcttctcgatgactggggaccctgcaccgaatatggag

SEQ ID NO: 53410 - DNA, 80 bp, synthetic construct
  source 1..80: mol_type = other DNA
accttgcactgttcaccagaaccatgcaactttttcacctctgcctaatcatctcatgttcatgtcctactgttcaagcc

SEQ ID NO: 53411 - DNA, 80 bp, synthetic construct
  source 1..80: mol_type = other DNA
acagatcggcagtctcgaagacagcctactaccatctctccacctctaagagacagtcatcctcacgccatgcagtggaa

SEQ ID NO: 53412 - DNA, 80 bp, synthetic construct
  source 1..80: mol_type = other DNA
atcatacggctatcaggcaagctattgtgtgttggggtgagttgatgaatctagccacctgggtgtgaggtaatttggac

SEQ ID NO: 53413 - DNA, 80 bp, synthetic construct
  source 1..80: mol_type = other DNA
gtttggggatttaccgtccccttctccgtctgccgtaccggccgtccacggggcgcacctctctttacgcggactccccg

SEQ ID NO: 53414 - DNA, 80 bp, synthetic construct
  source 1..80: mol_type = other DNA
actccctcttttcctaacattcatttacatgaggacattatcaataggtgtgaacagtttgtgggccctttgacattgaa

SEQ ID NO: 53415 - DNA, 80 bp, synthetic construct
  source 1..80: mol_type = other DNA
aacatcacatcaggattcctcggacccctgctcgtattacaggcgggatttttcttgttgacaaaaatcctcacaatacc

SEQ ID NO: 53416 - DNA, 80 bp, synthetic construct
  source 1..80: mol_type = other DNA
tcagctctgtaccgggaggccttagagtctccggaacattgttcacctcaccatacagcaatcaggcaagctgtactatg

SEQ ID NO: 53417 - DNA, 80 bp, synthetic construct
  source 1..80: mol_type = other DNA
accatacagcaatcaggcaagctgtactatgctggggggagttgatgactctagctacctggttgggaagtaatttggat

SEQ ID NO: 53418 - DNA, 80 bp, synthetic construct
  source 1..80: mol_type = other DNA
accagatggaccctgcgttcggaattgctacaaacaatcccgattgggacttcggcccaacgaggatcactggccagagg

SEQ ID NO: 53419 - DNA, 80 bp, synthetic construct
  source 1..80: mol_type = other DNA
attgggacttcggcccaacgaggatcactggccagagggaaatttcgtacgaggtggagcattcccacacagggttcatt

SEQ ID NO: 53420 - DNA, 80 bp, synthetic construct
  source 1..80: mol_type = other DNA
gaaatttcgtacgaggtggagcattcccacacagggttcattccgccacggagccgtcttgtggggtggagccctacagc

SEQ ID NO: 53421 - DNA, 80 bp, synthetic construct
  source 1..80: mol_type = other DNA
tcagggcacattgactactccggcctccacccctcctcctgcctcaacaaatcggcatcccagaacaccgcctactccca

SEQ ID NO: 53422 - DNA, 80 bp, synthetic construct
  source 1..80: mol_type = other DNA
acaaatcggcatcccagaacaccgcctactcccatctctccacctctaacagacagtcgtacctccgccatgttccggaa

SEQ ID NO: 53423 - DNA, 80 bp, synthetic construct
  source 1..80: mol_type = other DNA
accaatcggcaggcaagaagacggactactcccatctctccacctctaatagacagtcatcctcaggccatccaatggaa

SEQ ID NO: 53424 - DNA, 80 bp, synthetic construct
  source 1..80: mol_type = other DNA
ctccacgctattccaccaagttctgcgagatcccttagttgcgggtggatattttcctgctggaggatccagttctggaa

SEQ ID NO: 53425 - DNA, 80 bp, synthetic construct
  source 1..80: mol_type = other DNA
caggggacattgacacctccggcagccgcccctcctcctgcctccagaaaacctccttcaggttctccacctactctaat

SEQ ID NO: 53426 - DNA, 80 bp, synthetic construct
  source 1..80: mol_type = other DNA
agaaaacctccttcaggttctccacctactctaatttctcttcctctaagagacagtcatcccaacgccatacactgcca

SEQ ID NO: 53427 - DNA, 80 bp, synthetic construct
  source 1..80: mol_type = other DNA
acaaatcggcattctcgaatacatcctactcccatctctccacctctaaaagacatgcatccgcaggccatgcagtggaa

SEQ ID NO: 53428 - DNA, 80 bp, synthetic construct
  source 1..80: mol_type = other DNA
tctttccattcgagatctcctggacaccgcctctgctctgtatcgggagcccttagagtctccggaacattgttcccctc

SEQ ID NO: 53429 - DNA, 80 bp, synthetic construct
  source 1..80: mol_type = other DNA
caaattatccaggagtgggatcattcgggccggggttcactccaccacacggcaatcttttggcgtggagccctcaggct

SEQ ID NO: 53430 - DNA, 80 bp, synthetic construct
  source 1..80: mol_type = other DNA
agaggcaaatcaggtaggagtgagagcattgctcccggggttcaccccaccacacggtggtcttttggtgcggagccctc

SEQ ID NO: 53431 - DNA, 80 bp, synthetic construct
  source 1..80: mol_type = other DNA
accaatctcctctcgggatgacaggctactcccatctctccacctctaatatacagtccccctcaggccatgcactggaa

SEQ ID NO: 53432 - DNA, 80 bp, synthetic construct
  source 1..80: mol_type = other DNA
accaatcggcagtttggtgggggggctactcccttatctccacctctaacggacaataatcctcacgccatacaatggaa

SEQ ID NO: 53433 - DNA, 80 bp, synthetic construct
  source 1..80: mol_type = other DNA
gacccagcatccagggaattggtagtcggctatgtcaaagttaatatgggcctaaaacggggacaaaagagttggtttca

SEQ ID NO: 53434 - DNA, 80 bp, synthetic construct
  source 1..80: mol_type = other DNA
caaatcaggtaataccgggaaaattcgggccagggttcaccccactgcacgacggtcttttggggtggagccctcaggct

SEQ ID NO: 53435 - DNA, 80 bp, synthetic construct
  source 1..80: mol_type = other DNA
accatacagcaatcaggcaagttgtcctgtgttggggtgatttgatgaatctagccacctgggtgggaagtaatctggaa

SEQ ID NO: 53436 - DNA, 80 bp, synthetic construct
  source 1..80: mol_type = other DNA
tgacgcaacccccactggatggggcttggccataggccatcggcgcatgcgtggaacctttgtggctcctctgccgatcc

SEQ ID NO: 53437 - DNA, 80 bp, synthetic construct
  source 1..80: mol_type = other DNA
tgcccggcaacggccaggtctctgccaagtgtttgcgcacgtcgcatggagaccaccgtgaacgcccatcaggtcttgcc

SEQ ID NO: 53438 - DNA, 80 bp, synthetic construct
  source 1..80: mol_type = other DNA
tctgtgccttctcatctgccggaccgtgtgcacttcgcttcacctctttccacaacattccaccaagctctgctagatcc

SEQ ID NO: 53439 - DNA, 80 bp, synthetic construct
  source 1..80: mol_type = other DNA
ggggcaagactcatcgggactgacaattctgttgtgctctcccgcaagtatacatcatttccatggctgctaggatgtgc

SEQ ID NO: 53440 - DNA, 80 bp, synthetic construct
  source 1..80: mol_type = other DNA
tccctctattcaagatctccttgacaccgcctggccactgtatcgggaggccttagagtctccggaacattgttcacctc

SEQ ID NO: 53441 - DNA, 80 bp, synthetic construct
  source 1..80: mol_type = other DNA
ccaagctgtgccttgggtggctttagggcatggacattgacccttataaagaatttggagcttctgtggaattgctcact

SEQ ID NO: 53442 - DNA, 80 bp, synthetic construct
  source 1..80: mol_type = other DNA
accatacagccatcaggcaaataattttgtgttggggtgagttgatgaatctagctacctgggtgggaagtaatttggac

SEQ ID NO: 53443 - DNA, 80 bp, synthetic construct
  source 1..80: mol_type = other DNA
tccgtctactcgggaccttctcgacaccgcatcagctctctatcgggaggccttagagtctccggaacattgttcacctc

SEQ ID NO: 53444 - DNA, 80 bp, synthetic construct
  source 1..80: mol_type = other DNA
ccctcgcaattgcgggtcaccatattcttgggaacaagagctacagcatgggaggtcttttggcgtggagccctcaggct

SEQ ID NO: 53445 - DNA, 80 bp, synthetic construct
  source 1..80: mol_type = other DNA
caaggcattttaacgaacgtgccagcagttcctcctcctgcctccaccaatcggcagtcaggaaggcagccaactcccat

SEQ ID NO: 53446 - DNA, 80 bp, synthetic construct
  source 1..80: mol_type = other DNA
cttacttggtgttgcccatggttttgcgtaagcgaacttttggactttcagcaatgtcaacgaccgactctgaggcatac

SEQ ID NO: 53447 - DNA, 80 bp, synthetic construct
  source 1..80: mol_type = other DNA
gccatcagcgcatgcgcggaacctttgtggctcctctgccgatccatactgcggaactcctagcagcttgttttgctcgc

SEQ ID NO: 53448 - DNA, 80 bp, synthetic construct
  source 1..80: mol_type = other DNA
caaatcaggtagtgccgtgagcctccgcaacggggttcactccaccacacggcaatcttttggggtggagccctcaggct

SEQ ID NO: 53449 - DNA, 80 bp, synthetic construct
  source 1..80: mol_type = other DNA
tccttttattcgagatattctggacaggggcgatgctctgtatcgggaggccttagagtgtccggaacattgttcacctc

SEQ ID NO: 53450 - DNA, 80 bp, synthetic construct
  source 1..80: mol_type = other DNA
caggtcttgcccaaggtcttacataagaggactcttggactcacaggactgacaacgaacgactctggggctcacatcaa

SEQ ID NO: 53451 - DNA, 80 bp, synthetic construct
  source 1..80: mol_type = other DNA
ctgtgatccctgttcagagcactgtctctcccatatcgtcaatcttatcgaagactggggaccctgtgccgaacatggag

SEQ ID NO: 53452 - DNA, 80 bp, synthetic construct
  source 1..80: mol_type = other DNA
tccttctactcgagacctcattgacaccgcctctgccctgcatcgggaggccttagagtctccggaacattgttcacctc

SEQ ID NO: 53453 - DNA, 80 bp, synthetic construct
  source 1..80: mol_type = other DNA
cgagaggcatggcaggtaggagtgggggcattcgggccagggttcaccccgccacacggaggtcttttggtgtggagccc

SEQ ID NO: 53454 - DNA, 80 bp, synthetic construct
  source 1..80: mol_type = other DNA
ctcaacccagttccatcaggctctgttggatcccagggtaagggctctgtatcttcctgctggtggctccagttcaggaa

SEQ ID NO: 53455 - DNA, 80 bp, synthetic construct
  source 1..80: mol_type = other DNA
ggagcgactctcatcggcacggacaactctgttgtcctctctaggaagtacacctccttcccatggctgctcgggtgtgc

SEQ ID NO: 53456 - DNA, 80 bp, synthetic construct
  source 1..80: mol_type = other DNA
tgcaaactggatcctgcgcgggacgtcctttgtttacgtcccgtcggcgctgaatcccgcggacgacccctcccggggcc

SEQ ID NO: 53457 - DNA, 80 bp, synthetic construct
  source 1..80: mol_type = other DNA
ccttggagtttgccaacagtcttacataagaggactcttggactttcaggagggtcaatgacccggattgcagaatacat

SEQ ID NO: 53458 - DNA, 80 bp, synthetic construct
  source 1..80: mol_type = other DNA
tccatcggttcgggacctactcgacaccgcttcagccctttaccgggatgctttagagtcacctgaacattgcactcccc

SEQ ID NO: 53459 - DNA, 80 bp, synthetic construct
  source 1..80: mol_type = other DNA
atcacactgccctcaggcaagttattttgtgctggggtgagttaatgactttggcttcctgggtgggcaataacttggaa

SEQ ID NO: 53460 - DNA, 80 bp, synthetic construct
  source 1..80: mol_type = other DNA
gaccctgctgccagggatttagtagttaactatgttaacactaacatgggcctaaaaattagacaactactgtggtttca

SEQ ID NO: 53461 - DNA, 80 bp, synthetic construct
  source 1..80: mol_type = other DNA
catttcctgccttacttttggaagagatatagttcttgagtatttggtgtcctttggagtgtggattcgcactcctcctg

SEQ ID NO: 53462 - DNA, 80 bp, synthetic construct
  source 1..80: mol_type = other DNA
gttaactccttcttttcctaatattcatttacatcaagacctaatttctaaatgtgaacaatttgtaggcccactcacta

SEQ ID NO: 53463 - DNA, 80 bp, synthetic construct
  source 1..80: mol_type = other DNA
aaaatgaattaaggaggttaaaattggttatgccagctagattttatcctaaggttaccaaatattttcctatggagaaa

SEQ ID NO: 53464 - DNA, 80 bp, synthetic construct
  source 1..80: mol_type = other DNA
ggaatcaagccttattatcctgagcatgcagttaatcattactttaaaacaagacattatttgcatactttatggaaggc

SEQ ID NO: 53465 - DNA, 80 bp, synthetic construct
  source 1..80: mol_type = other DNA
ctcctgcttccaccaatcggcggtccgggagaaagccaaccccagtctctccacctctaagagacactcatccacaggca

SEQ ID NO: 53466 - DNA, 80 bp, synthetic construct
  source 1..80: mol_type = other DNA
accaatcggcggtccgggagaaagccaaccccagtctctccacctctaagagacactcatccacaggcaatgcagtggaa

SEQ ID NO: 53467 - DNA, 80 bp, synthetic construct
  source 1..80: mol_type = other DNA
cggacggaaactgcacttgtattcccatcccatcatcctgggctttaggaaaatacctatgggagtgggcctcagcccgt

SEQ ID NO: 53468 - DNA, 80 bp, synthetic construct
  source 1..80: mol_type = other DNA
ttaaatacttctaaaactaagagatggggttacaccctacattttatgggttatgtcattggtagttggggatcattacc

SEQ ID NO: 53469 - DNA, 80 bp, synthetic construct
  source 1..80: mol_type = other DNA
tcaagatcatattgtacacaaaatcaaagaatgttttcggaaactgcctgtaaatcgtccaattgattggaaagtctgtc

SEQ ID NO: 53470 - DNA, 80 bp, synthetic construct
  source 1..80: mol_type = other DNA
gcctggggatttaccgtccccttctttgcctgccgttccggccgaccacggggcgcacctctctttacgcggtctccccg

SEQ ID NO: 53471 - DNA, 80 bp, synthetic construct
  source 1..80: mol_type = other DNA
accatacagccctcaggcaagctgttctgtgttggggtgagttaatgaatctggcgacctgggtgggaagtaatttggaa

SEQ ID NO: 53472 - DNA, 80 bp, synthetic construct
  source 1..80: mol_type = other DNA
accaacttatcagaactcctaaaactcctgctcgggttacaggcggggtttttcttgttgacaaaaatcctcacaatacc

SEQ ID NO: 53473 - DNA, 80 bp, synthetic construct
  source 1..80: mol_type = other DNA
atcagatcctgcccaaggtcttacataagaggactcttggactttcaggacggttcatgacctggatcgaagaatacatc

SEQ ID NO: 53474 - DNA, 80 bp, synthetic construct
  source 1..80: mol_type = other DNA
tccgtcggttcgggatctcctagacaccgccgctgcgttgtatcgggaagccttagagtctcctgaacattgctcgtatc

SEQ ID NO: 53475 - DNA, 80 bp, synthetic construct
  source 1..80: mol_type = other DNA
accaatcggcaggtaggaaggcagcctactcccctttctccacctctaagagacactcatcctcaagcggtacagtggaa

SEQ ID NO: 53476 - DNA, 80 bp, synthetic construct
  source 1..80: mol_type = other DNA
cagggtgtgctcacaacattgccagcagatccgcctcccgcttccaccaatcggcggtccgggagaaaaccaaccccagt

SEQ ID NO: 53477 - DNA, 80 bp, synthetic construct
  source 1..80: mol_type = other DNA
tattggggggcaggtctgtacaacatcttgagtccctttttacctctattaccaattttcttttgtctttgggtatacat

SEQ ID NO: 53478 - DNA, 80 bp, synthetic construct
  source 1..80: mol_type = other DNA
agaagaactccctcgcctcgcagacgaaggtctcaatcgccgcgtcgcagaagatctcaatctccatcttcccgatgtta

SEQ ID NO: 53479 - DNA, 80 bp, synthetic construct
  source 1..80: mol_type = other DNA
gtattccttggactcataaggtgggaaattttacggggctctactcttctactgtacctgctttcaatcctcactggtta

SEQ ID NO: 53480 - DNA, 80 bp, synthetic construct
  source 1..80: mol_type = other DNA
aaaggatttcaggtctcctgggctttgctgctcccttcacacaatgtggttatcctgcattaatgcctttatatgcatgt

SEQ ID NO: 53481 - DNA, 80 bp, synthetic construct
  source 1..80: mol_type = other DNA
tccgtctcttctggatcccctctacaccgcctctgctctgtatcgggaggccttaaagtctccggaacattgttcacctc

SEQ ID NO: 53482 - DNA, 80 bp, synthetic construct
  source 1..80: mol_type = other DNA
acaacacttactcaggactcctaagacccctgctcgtgtcacaggcggtgtgttccttgttgacaaaaatcctcacaata

SEQ ID NO: 53483 - DNA, 80 bp, synthetic construct
  source 1..80: mol_type = other DNA
aattgatgcgttcacgatgtccatgcggctttttcacctctgcctaatcatctcatgttcatgtcctactgttcaagcct

SEQ ID NO: 53484 - DNA, 80 bp, synthetic construct
  source 1..80: mol_type = other DNA
ggagggaaggtaatcggcactgacaactctgttgtcctttctcggaaatatacttcctttccatggttcctagggtgtgc

SEQ ID NO: 53485 - DNA, 80 bp, synthetic construct
  source 1..80: mol_type = other DNA
gttggggcctctatggtcccctttttcatttgccgttccggccaaccgcggggcgcacggctctctacgcggtctccccg

SEQ ID NO: 53486 - DNA, 80 bp, synthetic construct
  source 1..80: mol_type = other DNA
tttgccccttctcgtctgccggaccgtgtgcacttcgcttcacctcttcacgttgcatggagaccaccgtgaacccccac

SEQ ID NO: 53487 - DNA, 80 bp, synthetic construct
  source 1..80: mol_type = other DNA
tgcccggcaacggccaggtttctcccaagtgtttcatgactcaacccccactggatgggggttgcccataggccatggag

SEQ ID NO: 53488 - DNA, 80 bp, synthetic construct
  source 1..80: mol_type = other DNA
gcatgcgaggaacctttgtggctcctctggcgctccatagtgtggtactcctagcagcttgttttgattgcagccggttt

SEQ ID NO: 53489 - DNA, 80 bp, synthetic construct
  source 1..80: mol_type = other DNA
ggggcgaaagttatcggcacggacaaatatgttgtcctctctaggaaatacacctcctttccatggaatacagggtgtgt

SEQ ID NO: 53490 - DNA, 80 bp, synthetic construct
  source 1..80: mol_type = other DNA
tgcccggcaacggtcaggtctttggcaagtatttggttacgcaacccccaaaggatggggcttaaaaataggccatcaaa

SEQ ID NO: 53491 - DNA, 80 bp, synthetic construct
  source 1..80: mol_type = other DNA
gcatgcgaggaacctttgtggctcctctgccgatccatactgcggaactacaagcagcttgtttcgctcgcagcaggtct

SEQ ID NO: 53492 - DNA, 80 bp, synthetic construct
  source 1..80: mol_type = other DNA
tcttttttttcaaaatctcctcaacaccccctctgctctgtatcgggaggccttaaagtctccggaacattgttcacctc

SEQ ID NO: 53493 - DNA, 80 bp, synthetic construct
  source 1..80: mol_type = other DNA
accatacagcactcaggcaagctattctgggttgggttgagttgataaatctggccccctgggagggaagtaatttgaaa

SEQ ID NO: 53494 - DNA, 80 bp, synthetic construct
  source 1..80: mol_type = other DNA
aacccaccttccagggaattattattcacctttgtcaatgttaatatgggcctaaaaatcaaacaacttctggggtttca

SEQ ID NO: 53495 - DNA, 80 bp, synthetic construct
  source 1..80: mol_type = other DNA
gcttacgaaccacaaaatgcccctatcttatcaacccttccgaaaactactgttgttaaacaacaaggcaggccccctaa

SEQ ID NO: 53496 - DNA, 80 bp, synthetic construct
  source 1..80: mol_type = other DNA
aaaaaaaactccctcccctcccaaacaaaggtctcaatcgccgcgtcgcagaagatctcaatctcgggggattcaatgtt

SEQ ID NO: 53497 - DNA, 80 bp, synthetic construct
  source 1..80: mol_type = other DNA
caggtgcaaaacttatcgctacgcacaactccgttgtcctctctcagaaatacacctcctttccatggctgctagggtgt

SEQ ID NO: 53498 - DNA, 80 bp, synthetic construct
  source 1..80: mol_type = other DNA
gtaaccgatcttattatcctgaacatgcagttaattcttacttcaaaactagtcattatttacatactctgtggaaggct

SEQ ID NO: 53499 - DNA, 80 bp, synthetic construct
  source 1..80: mol_type = other DNA
ggcattctatataagagagaaactacacgcagcgcctcattttgtgggtcaccatattttcgggaacaagagctacagca

SEQ ID NO: 53500 - DNA, 80 bp, synthetic construct
  source 1..80: mol_type = other DNA
ggagggaaagttatcggtaccgacaaatctgttgtcctctcttggaaatacacctcctttccatggttgctagggtgtgc

SEQ ID NO: 53501 - DNA, 80 bp, synthetic construct
  source 1..80: mol_type = other DNA
gtttgggactttacggtcccattgttcctttgccgttccggcggaccacggggcgcacctgtccacacgcggtctccccg

SEQ ID NO: 53502 - DNA, 80 bp, synthetic construct
  source 1..80: mol_type = other DNA
gcatgcgtggaaccttggaggctccttggctcctccatagttccgtacttcgagcagtttggcaggcttgcagccggtca

SEQ ID NO: 53503 - DNA, 80 bp, synthetic construct
  source 1..80: mol_type = other DNA
ggagctaaggagctaggaacggacaaatccgtaatcctctcttggaatttcacatcctctccatggttgcaagggtgtgc

SEQ ID NO: 53504 - DNA, 80 bp, synthetic construct
  source 1..80: mol_type = other DNA
tgccaagtggaccattggagggacgtcgggagtttacgtgccgtcggcccggaatcccgcggacgaccggtctcgccgcc

SEQ ID NO: 53505 - DNA, 80 bp, synthetic construct
  source 1..80: mol_type = other DNA
tttacgtgccgtcggcccggaatcccgcggacgaccggtctcgccgccgtggggccgtttgcggtccccttgttcctttg

SEQ ID NO: 53506 - DNA, 80 bp, synthetic construct
  source 1..80: mol_type = other DNA
gtggtgccgtttgcggtccccttgttcctttgccgttccggcggaccacggggcgcacgggcgcacccgcggtctccccg

SEQ ID NO: 53507 - DNA, 80 bp, synthetic construct
  source 1..80: mol_type = other DNA
tccgtcccttggcatctgccggactccctgcccttcggctcacctctgcaccttgcatggaaaccaccgtgaagaccccc

SEQ ID NO: 53508 - DNA, 80 bp, synthetic construct
  source 1..80: mol_type = other DNA
cgagcccccccccaagccccacgtaagaggactagtggactcttagcagggtcaaagagttgtcgacaggcatacttcca

SEQ ID NO: 53509 - DNA, 80 bp, synthetic construct
  source 1..80: mol_type = other DNA
agcttcaaagattaaagaatgggaggagttgggggaggagattaggttaaggatctgtgtattaggaggctgtaggcata

SEQ ID NO: 53510 - DNA, 80 bp, synthetic construct
  source 1..80: mol_type = other DNA
tccccaaaaacggtcaggtctctgcgaagtgttaagagacgcaaccccccctggaagggactgggctattagccatagca

SEQ ID NO: 53511 - DNA, 80 bp, synthetic construct
  source 1..80: mol_type = other DNA
gcatacgggaaacctttagggatcctaggccgatccttaatgcggaactccaagcagcttgttttgctaacagccggtct

SEQ ID NO: 53512 - DNA, 80 bp, synthetic construct
  source 1..80: mol_type = other DNA
cttccttcctgtcttacttttggaagacaaactgttcttgcttatctggtaacttttgcagcgtggatacgaactcctcc

SEQ ID NO: 53513 - DNA, 80 bp, synthetic construct
  source 1..80: mol_type = other DNA
agcttaccgaccaccaaatgcccctatcttatcatcacttcgggaaactactgtggactcacgacgaggcaggtcccata

SEQ ID NO: 53514 - DNA, 80 bp, synthetic construct
  source 1..80: mol_type = other DNA
ggcgcgttactccctcgcctcgcagacgagaagaccaattgccgcgtcccagaagatctcaatctcggggatctcaatgt

SEQ ID NO: 53515 - DNA, 80 bp, synthetic construct
  source 1..80: mol_type = other DNA
agactgtgtgtttaaagaatcattacactgtgtgaaggaggcagttaatcattaccttgtactaggaggctgtaggcata

SEQ ID NO: 53516 - DNA, 80 bp, synthetic construct
  source 1..80: mol_type = other DNA
tgcccggcaacggtcaggtatctgccaagtgtttgctgacgcaacccccattggacgggggcagccgaggaacccctgga

SEQ ID NO: 53517 - DNA, 80 bp, synthetic construct
  source 1..80: mol_type = other DNA
gcatgtgtggcacctctgtgggtcctactccgagcaatcctgggggactgctagcagcgtggttggttcgcagccggtct

SEQ ID NO: 53518 - DNA, 80 bp, synthetic construct
  source 1..80: mol_type = other DNA
ggagggaaaggtagtcgcagggaccaattccaggtcctccccatgaaatccacgtcctttccatggctggtccaatggtg

SEQ ID NO: 53519 - DNA, 80 bp, synthetic construct
  source 1..80: mol_type = other DNA
tcccgaccggaacctccgcggggtcggccctgtatacgtcgaatcggcggtgaaacccgcggagggcccgtttcgggccc

SEQ ID NO: 53520 - DNA, 80 bp, synthetic construct
  source 1..80: mol_type = other DNA
tgtatacgtcgaatcggcggtgaaacccgcggagggcccgtttcgggcccgtccggccctttcccgtcccgctgtccctg

SEQ ID NO: 53521 - DNA, 80 bp, synthetic construct
  source 1..80: mol_type = other DNA
gtccggccctttcccgtcccgctgtccctgcggcgcaccgggcgccccgggggctccccggtcttcccgtggtctccgcc

SEQ ID NO: 53522 - DNA, 80 bp, synthetic construct
  source 1..80: mol_type = other DNA
tctgcgcctgctcatcggccggtccgtgtacccttcgcttcacccacgcagaccgcccggagaccgccgtgaacccccac

SEQ ID NO: 53523 - DNA, 80 bp, synthetic construct
  source 1..80: mol_type = other DNA
caggtcttcccccaagttgtgcaaaagaggaccacaggaggatcagcggcgtcaaagacagaccttcaagcataccgccc

SEQ ID NO: 53524 - DNA, 80 bp, synthetic construct
  source 1..80: mol_type = other DNA
gaccttgaaggttaaagaatggaaggagtgggaaaaggagggaagaggaagaatcctggtactaggaggctgtaggcata

SEQ ID NO: 53525 - DNA, 80 bp, synthetic construct
  source 1..80: mol_type = other DNA
cggtgcacgagtggaacctttgtggatcctttgcggatccatagtggggaactcctagcagcttgtttcgctcgcagccg

SEQ ID NO: 53526 - DNA, 80 bp, synthetic construct
  source 1..80: mol_type = other DNA
gtttggagcgaatctgatcggaaccgacaagtctgttgtcctctcttggaaatacacctcctttccatggctgttagggg

SEQ ID NO: 53527 - DNA, 80 bp, synthetic construct
  source 1..80: mol_type = other DNA
cggaatttcccaaaggttttgcaaaagaggatttttgtcctttcagaaatgtcaacgaccgaccttgaggcatacttcaa

SEQ ID NO: 53528 - DNA, 80 bp, synthetic construct
  source 1..80: mol_type = other DNA
ggaccaaacctcattggtcccgacaattccgttgtcctttctaggaaatacacctcctttccatggctggtaggatgggc

SEQ ID NO: 53529 - DNA, 80 bp, synthetic construct
  source 1..80: mol_type = other DNA
tttgtttacgtcccgtcggcgctgaatcccgcggacgacccgtctcggggcggtttggccctgttccgtccccttgttca

SEQ ID NO: 53530 - DNA, 80 bp, synthetic construct
  source 1..80: mol_type = other DNA
cggtttggccctgttccgtccccttgttcaggtgccgttccggccaacctcgggaggcacctccctctacgcggtccccc

SEQ ID NO: 53531 - DNA, 80 bp, synthetic construct
  source 1..80: mol_type = other DNA
tgtaaacgttgcccggcaacggtcaggtctgtcccaagtatttcatgactcaacccccaatggatgggggcagcccacag

SEQ ID NO: 53532 - DNA, 80 bp, synthetic construct
  source 1..80: mol_type = other DNA
gccatgggggcaggcgaggaacctttgtggctcctgtggcgatccatagtgtggtactcctatcagcttgttttgattgc

SEQ ID NO: 53533 - DNA, 80 bp, synthetic construct
  source 1..80: mol_type = other DNA
ggagcgatagtaatcggtacggacaaatattttgtcctctctcggaaatacacctcctttccatggctgctaggtcgtgt

SEQ ID NO: 53534 - DNA, 80 bp, synthetic construct
  source 1..80: mol_type = other DNA
ggatgggtcttttcggtcccgtttgtgttttgccgttcccgctgctcatggggcgcacctctctctcaggggtctcaccg

SEQ ID NO: 53535 - DNA, 80 bp, synthetic construct
  source 1..80: mol_type = other DNA
ttcgttccttgttctcccccggaccgtgtgcacttcgcttcacctgtgcgcgttgcatggaaaccaccgtgaacgcccac

SEQ ID NO: 53536 - DNA, 80 bp, synthetic construct
  source 1..80: mol_type = other DNA
caggtcttgcccaaggtcacccataagaggactattggactctcagcaaggttaacgactctccttgaatcatacttcaa

SEQ ID NO: 53537 - DNA, 80 bp, synthetic construct
  source 1..80: mol_type = other DNA
agcctgtttgcttaaagactgggaggagtttggagaggagattaggttaaaggtgaggggactaggaggctgtaggcata

SEQ ID NO: 53538 - DNA, 80 bp, synthetic construct
  source 1..80: mol_type = other DNA
tgcccggcaacggtcaggttttcgaccagtgtttggtggcgcaacccccaatggaaggggcttggccataggccattggc

SEQ ID NO: 53539 - DNA, 80 bp, synthetic construct
  source 1..80: mol_type = other DNA
gcctgcgtggaacttttgtgggtcctctgccgaaccataatgcggaactcctagccggttgttttgcttgcagccggttt

SEQ ID NO: 53540 - DNA, 80 bp, synthetic construct
  source 1..80: mol_type = other DNA
gggacaaaccttattggtaccgacaaatttgttgttctttttcggaaatacacctcctttccatgggtggtagggtgtgc

SEQ ID NO: 53541 - DNA, 80 bp, synthetic construct
  source 1..80: mol_type = other DNA
tgccaaacggatccttcgggcgacgtcctttgtttacgtcccgtcggcccggaatcccgcggacggcccgtcttggggcc

SEQ ID NO: 53542 - DNA, 80 bp, synthetic construct
  source 1..80: mol_type = other DNA
cctttgggtttctaccgttcccttcttcctctggcggtccggccccccccggggcgcccccctctttacgcggtcttccc

SEQ ID NO: 53543 - DNA, 80 bp, synthetic construct
  source 1..80: mol_type = other DNA
gtttgcgccttttcattcgccggaccgtgggcaattcgattcaactctgcaagtagcaaggaaaccaccgtgaacgcccc

SEQ ID NO: 53544 - DNA, 80 bp, synthetic construct
  source 1..80: mol_type = other DNA
ggttgggtcttttcggtccccttcttcttttgccgttcccgccaaccatggggcgcacctccctatccggggtctccccg

SEQ ID NO: 53545 - DNA, 80 bp, synthetic construct
  source 1..80: mol_type = other DNA
tttgtgccttggcatcccccggtccgtgttcacttcgcttcacctgtgcacgttgcatggagaccaccgtgaacgcccac

SEQ ID NO: 53546 - DNA, 80 bp, synthetic construct
  source 1..80: mol_type = other DNA
ttaaatccacacaaaacgaaaaggtggggttattctctccacttcatgggatatgtaattgggagctggtggagcttacc

SEQ ID NO: 53547 - DNA, 80 bp, synthetic construct
  source 1..80: mol_type = other DNA
tccatctattcgtgatctcctcgacacggcctccgctctctatcgggaggccctagagtctgcggaacattgttcacctc

SEQ ID NO: 53548 - DNA, 80 bp, synthetic construct
  source 1..80: mol_type = other DNA
ggggcaaaacttctcggcaccgacaactcagtcgtcctctctcggaaatacacatcatttccatggctgctcggttgtgc

SEQ ID NO: 53549 - DNA, 80 bp, synthetic construct
  source 1..80: mol_type = other DNA
ctcccctcaattccaccagggtctgttaaatcccagggtaaagggcctccggaattttcctggtgggtccagttccaaga

SEQ ID NO: 53550 - DNA, 80 bp, synthetic construct
  source 1..80: mol_type = other DNA
ctcccctcaattccaccagggtctgttaattcccagggtaaagggtctcctgctggttgctggtgggtccagttccaaga

SEQ ID NO: 53551 - DNA, 80 bp, synthetic construct
  source 1..80: mol_type = other DNA
cagggtgtgcttacaacattgccagcagatccgcctcctgcttccaccaatcggcggtcgggaaggaaaccccgaccctg

SEQ ID NO: 53552 - DNA, 80 bp, synthetic construct
  source 1..80: mol_type = other DNA
caccacccagttccaccaggctcttcaagatcccagagtcagggccctgttgagtcctgctggtggctccagttcagaga

SEQ ID NO: 53553 - DNA, 80 bp, synthetic construct
  source 1..80: mol_type = other DNA
caaggtgttttaaccaccttgccagcggatccgcctcctgcttccaccaatcggcggtccgggaggaagccaaccccagt

SEQ ID NO: 53554 - DNA, 80 bp, synthetic construct
  source 1..80: mol_type = other DNA
acaacaccacatccggacacctagaacccctgcccgtgttacagggggtgttttccttgttgacaaaaatcctcacaata

SEQ ID NO: 53555 - DNA, 80 bp, synthetic construct
  source 1..80: mol_type = other DNA
accaatcggaggtcgggaagaaaaccaacccccgtctctccacctctaagagacactcatccacagttcatacagagcaa

SEQ ID NO: 53556 - DNA, 80 bp, synthetic construct
  source 1..80: mol_type = other DNA
ctccagcacattccaccaaactctgaaagattccagagtgaggggcctaaactttcctgctggtggctcaggttccggaa

SEQ ID NO: 53557 - DNA, 80 bp, synthetic construct
  source 1..80: mol_type = other DNA
accaatcggcagtcaggaaggcagcctactcccttatctccacctctaagggaaactcatcctcaggacgagcaatggaa

SEQ ID NO: 53558 - DNA, 80 bp, synthetic construct
  source 1..80: mol_type = other DNA
cattcggtataagagagaaactacacgcagcgcttcatttggggtttctctctattcttgggaacaagagctacagcatg

SEQ ID NO: 53559 - DNA, 80 bp, synthetic construct
  source 1..80: mol_type = other DNA
attccctcttttcctgatatacatttgcaggaggacattgttaatagatgtcaacaattaaaaggccctgtaactgcaaa

SEQ ID NO: 53560 - DNA, 80 bp, synthetic construct
  source 1..80: mol_type = other DNA
agactgtttgtttaaagactgggaggagttgggtttactgattggggagttggtggatgttctaagtggatggaaggcta

SEQ ID NO: 53561 - DNA, 80 bp, synthetic construct
  source 1..80: mol_type = other DNA
agactgtgtgtttactgagtgggaggagttgggggaggagattgaggagttgggagatgttctaaggcgatggaaggcta

SEQ ID NO: 53562 - DNA, 80 bp, synthetic construct
  source 1..80: mol_type = other DNA
tccgtctattcgggaccttctcgacaccgcctctgctctgtgtcgggacgccttagagtctccggaacatgtttcagctc

SEQ ID NO: 53563 - DNA, 80 bp, synthetic construct
  source 1..80: mol_type = other DNA
ctccaggggcctatacctagctctggcagatcccagagtgaggagcctatattttcctgctggtggctccagttccggaa

SEQ ID NO: 53564 - DNA, 80 bp, synthetic construct
  source 1..80: mol_type = other DNA
accaattggacccagcgttcggaatcaactcaaacaatcccgattgggacttcaaccccaacaaggatcaagggccagtg

SEQ ID NO: 53565 - DNA, 80 bp, synthetic construct
  source 1..80: mol_type = other DNA
caaggatcaagggccagtggcaaacttcggaggagtgggatcattcgggccagggttcactccgcctcggagccctcttt

SEQ ID NO: 53566 - DNA, 80 bp, synthetic construct
  source 1..80: mol_type = other DNA
gcaaacttcggaggagtgggatcattcgggccagggttcactccgcctcggagccctcttttggcgtggagccctcaggc

SEQ ID NO: 53567 - DNA, 80 bp, synthetic construct
  source 1..80: mol_type = other DNA
tcagggcatattgactactgtggccgctgcgcctcctcctgcctctacaaatcggactcccggaagaccgcctactccca

SEQ ID NO: 53568 - DNA, 80 bp, synthetic construct
  source 1..80: mol_type = other DNA
acaaatcggactcccggaagaccgcctactcccatctctccacctctaagagacagtcgtcctcccgccatgttctggaa

SEQ ID NO: 53569 - DNA, 80 bp, synthetic construct
  source 1..80: mol_type = other DNA
aatgtatctgttaaacagcaccatgcaactttttcacctctgcctaatcatctcatgttcatgtcctactgttcaagcct

SEQ ID NO: 53570 - DNA, 80 bp, synthetic construct
  source 1..80: mol_type = other DNA
tggagacagttgcaggaattctttcaattttctagggggagcacccacgtgtcgtggccaaaattcgcagtccccaacct

SEQ ID NO: 53571 - DNA, 80 bp, synthetic construct
  source 1..80: mol_type = other DNA
cctgttgtcctccaacttgtcctggctatcattggaggtgtctgcggggatttatcatattcctgctcatcccggtaaca

SEQ ID NO: 53572 - DNA, 80 bp, synthetic construct
  source 1..80: mol_type = other DNA
tgcctcatcttcttgttggttcttctggactatcaaggtatgttgcccggttgtcatgtacttccaggaacatcaactac

SEQ ID NO: 53573 - DNA, 80 bp, synthetic construct
  source 1..80: mol_type = other DNA
ctccagcacattccaccctacacttcaagatcccagagtcagggctctgtactttcctgctggtggctccagttcaggaa

SEQ ID NO: 53574 - DNA, 80 bp, synthetic construct
  source 1..80: mol_type = other DNA
gtctccggaacattgttcacctcaccatacggcactcaggcaagctattctgtgttggggtgagttaatgaatctagcca

SEQ ID NO: 53575 - DNA, 80 bp, synthetic construct
  source 1..80: mol_type = other DNA
cctccaagctgtgccttgggtggctttagggcatggacattgacccgtataaagaatttggagcttctgccgagttactc

SEQ ID NO: 53576 - DNA, 80 bp, synthetic construct
  source 1..80: mol_type = other DNA
actccttcttttcccaacatacatttgcaggaaaacattattgataggtgtgaacaatttgtgggacccctcacaacaaa

SEQ ID NO: 53577 - DNA, 80 bp, synthetic construct
  source 1..80: mol_type = other DNA
acgaccaaccatccagagacctagtagtcaattatgttaacaccaacatgggactaaagatcaggcaattattgtggttt

SEQ ID NO: 53578 - DNA, 80 bp, synthetic construct
  source 1..80: mol_type = other DNA
tgctgccttgtatcgggaatccttagagtctcctgaacattgctcgcctcaccatacggcactcaggcatgttgttttgt

SEQ ID NO: 53579 - DNA, 80 bp, synthetic construct
  source 1..80: mol_type = other DNA
accatacggcactcaggcatgttgttttgtgctggggggatgtaacgactctaggtacctgggtgcggaataatttagaa

SEQ ID NO: 53580 - DNA, 80 bp, synthetic construct
  source 1..80: mol_type = other DNA
gaattactgcaaaacaggcttttgctcttttcccaacttacagggcctttctctgtaaacaatacgtgaacctttacccc

SEQ ID NO: 53581 - DNA, 80 bp, synthetic construct
  source 1..80: mol_type = other DNA
aattggtctgttcgaaagcttgactcttctttttcacctctgcctaatcatcttttgttcatgtcccactgttcaagcct

SEQ ID NO: 53582 - DNA, 80 bp, synthetic construct
  source 1..80: mol_type = other DNA
ggagcgcacgttatcggcacagacaactctgtggtcctctctaggaagtacacctcctttccatggctgctcgggtgtgc

SEQ ID NO: 53583 - DNA, 80 bp, synthetic construct
  source 1..80: mol_type = other DNA
accacacggcactcaggcaagctattctgtgttgtggtgagttgatgaatctggccacctgggtgggaagtaatctggaa

SEQ ID NO: 53584 - DNA, 80 bp, synthetic construct
  source 1..80: mol_type = other DNA
accatacagcactaaggcacgcaattgtgtgttggggtgagttgatgaatctggctacctgggttggaggtaatttggaa

SEQ ID NO: 53585 - DNA, 80 bp, synthetic construct
  source 1..80: mol_type = other DNA
tccgaatatccgagatctcctcgacaccgcctccgctctataccgagaggccttagagtctccggaacactgcacacctc

SEQ ID NO: 53586 - DNA, 80 bp, synthetic construct
  source 1..80: mol_type = other DNA
tccgtctattcgagatctcctcgacaccgcatccgctctgtatcgggaggccttagagtctccggagcattgcacacatc

SEQ ID NO: 53587 - DNA, 80 bp, synthetic construct
  source 1..80: mol_type = other DNA
cagggcatattgacaacagtgccagtagcacctcctcctgcctccaccaatcggcagtcaggaagacagcctactcccat

SEQ ID NO: 53588 - DNA, 80 bp, synthetic construct
  source 1..80: mol_type = other DNA
tccaaatattcgagatctcctcgacaccgcctcagctctatatcgggatgccttagagtctccggaacatttgtcacctc

SEQ ID NO: 53589 - DNA, 80 bp, synthetic construct
  source 1..80: mol_type = other DNA
actctacagcattccaccaagctctacaaaatcccaaagtcaggggcctgtatcttcctgctggtggctccagttcaggg

SEQ ID NO: 53590 - DNA, 80 bp, synthetic construct
  source 1..80: mol_type = other DNA
aaattcgaccaccagcacgggatcctgcagaacctgcacgactcctgctcaaagaaactctacgtatccctcctgttgct

SEQ ID NO: 53591 - DNA, 80 bp, synthetic construct
  source 1..80: mol_type = other DNA
ctcacctaaccataccgctctccggcaagctatattgtgctggaatgaggtaacggagtttggtaactgggtgggcaata

SEQ ID NO: 53592 - DNA, 80 bp, synthetic construct
  source 1..80: mol_type = other DNA
atttggaagatcctgctgccagggacttagtggttgactatgtcaatactaacatgggcctaaagattagacaattactg

SEQ ID NO: 53593 - DNA, 80 bp, synthetic construct
  source 1..80: mol_type = other DNA
gctaagagctctaccgcccgcttctccgtctgttgtacagaccgagcacggggcgcacctctctttacgcggaccccgcg

SEQ ID NO: 53594 - DNA, 80 bp, synthetic construct
  source 1..80: mol_type = other DNA
ggggcgaaactcatcaagactgacaattctgtcgtgctctcccgcaaatatacatcctttccatggctgctaggctgtac

SEQ ID NO: 53595 - DNA, 80 bp, synthetic construct
  source 1..80: mol_type = other DNA
aacatcgcatcaagactcctaagacccctgctcgtattacaggcggggttttccttgttaacaaaaatcctcacaatacc

SEQ ID NO: 53596 - DNA, 80 bp, synthetic construct
  source 1..80: mol_type = other DNA
accatacagcactcaagcaagctattgtgtgttgaggtgagttgataaatctagccacctaggtaagaagtaatttagaa

SEQ ID NO: 53597 - DNA, 80 bp, synthetic construct
  source 1..80: mol_type = other DNA
gtattccttagacgcataaagtaagaaactttacaaggctttattcttctacagtaccatgctttaatcctaactagcaa

SEQ ID NO: 53598 - DNA, 80 bp, synthetic construct
  source 1..80: mol_type = other DNA
ccaacaaggtaggagtaggagcattcaggccaaagttcacccctccccatgaaagactgttgaagtagagccctcaggct

SEQ ID NO: 53599 - DNA, 80 bp, synthetic construct
  source 1..80: mol_type = other DNA
caaagcatactcacaactgtgccagcagctcctcctcctgcctccaccaatcggcagacaagaaggcagcctactccctt

SEQ ID NO: 53600 - DNA, 80 bp, synthetic construct
  source 1..80: mol_type = other DNA
aatccaacatccagaaaattagtaatcaactatatcaacattaatatgagcctaaaaatcaaacaactattgtgatttca

SEQ ID NO: 53601 - DNA, 80 bp, synthetic construct
  source 1..80: mol_type = other DNA
accatacggcactcagacaagctattgtgtgttggggtgagttgataaatctagccacctgggtgggaagtaatttaaaa

SEQ ID NO: 53602 - DNA, 80 bp, synthetic construct
  source 1..80: mol_type = other DNA
accaatcggcagtcaggaaggcagcctactcccatatctccacctctaagggacactcatcctttccaccaaactcttca

SEQ ID NO: 53603 - DNA, 80 bp, synthetic construct
  source 1..80: mol_type = other DNA
accaatcggcagtcaggaaggcagcctactcccatatctccacctctaagggacactcatcggactctgtaccagtggaa

SEQ ID NO: 53604 - DNA, 80 bp, synthetic construct
  source 1..80: mol_type = other DNA
gacccagcatccagggaattagtagtcagctatgtcaatgttaatatgggcctaaaaatcagacaactactgtggtttca

SEQ ID NO: 53605 - DNA, 80 bp, synthetic construct
  source 1..80: mol_type = other DNA
actccctcctttcctcatattcatttacaggaggacattattaatagatgtcaacaatatgtgggctctcttacagttaa

SEQ ID NO: 53606 - DNA, 80 bp, synthetic construct
  source 1..80: mol_type = other DNA
tgaaaaacggagattaaaattaattatgcctgctaggttctatcctaaccttaccaaatatttgcccttggacaaaggca

SEQ ID NO: 53607 - DNA, 80 bp, synthetic construct
  source 1..80: mol_type = other DNA
ccagggttcaccccaccacacggaggtcttttggggtggagccctcaggctcagggcatattgacaacagtgccagtagc

SEQ ID NO: 53608 - DNA, 80 bp, synthetic construct
  source 1..80: mol_type = other DNA
acctcctcctgcctccaccaatcggcagtcaggaagacagcctactcccatctctccacctctaagagacagtcatcctc

SEQ ID NO: 53609 - DNA, 80 bp, synthetic construct
  source 1..80: mol_type = other DNA
ttgaaccctaataaaaccaaacgttggggctactcacttaacttcatgggatatgtaattggatgttggggtactttacc

SEQ ID NO: 53610 - DNA, 80 bp, synthetic construct
  source 1..80: mol_type = other DNA
gcaagaacatattgtgcaaaaaatcaagcaatgttttagaaaactgcctgtaaatagacctattgattggaaagtatgtc

SEQ ID NO: 53611 - DNA, 80 bp, synthetic construct
  source 1..80: mol_type = other DNA
ctccggcacgttccaccaaactcttcaagatccccgagtcaaggctctgtactttcctgctggtggcttatgttaaagag

SEQ ID NO: 53612 - DNA, 80 bp, synthetic construct
  source 1..80: mol_type = other DNA
ctcaacacagttccaccaagcactgttggatccgagagtaagggggctgtattttcctgctggtggctccagttcaaaaa

SEQ ID NO: 53613 - DNA, 80 bp, synthetic construct
  source 1..80: mol_type = other DNA
ccttggaacttgccaacaaccttacataagaggactcttggactttcgccccggtcaacgacctggattgaggaatacat

SEQ ID NO: 53614 - DNA, 80 bp, synthetic construct
  source 1..80: mol_type = other DNA
caaagactgtgtatttaaggactgggaggagtcgggggaggagttgaggttaatgatctttgtattaggaggctgtaggc

SEQ ID NO: 53615 - DNA, 80 bp, synthetic construct
  source 1..80: mol_type = other DNA
ccttgggtggctttggggcatggagattgacccttataaagaatttggagcttctgtggagttactctcatttttgcctt

SEQ ID NO: 53616 - DNA, 80 bp, synthetic construct
  source 1..80: mol_type = other DNA
tcccgtctgtccgggacctactcgacaccgcttcagccctctaccgagatgccttagaatcaccagaacattgcaccccc

SEQ ID NO: 53617 - DNA, 80 bp, synthetic construct
  source 1..80: mol_type = other DNA
aaccacactgctctcaggcaagctattttgtgctggggtgagttgatgacattggcttcctgggtgggcaataatttaga

SEQ ID NO: 53618 - DNA, 80 bp, synthetic construct
  source 1..80: mol_type = other DNA
ggatcctgcagcaagagatctagtagttaattatgtcaatactaacatgggcctaaaaattagacaattattatggtttc

SEQ ID NO: 53619 - DNA, 80 bp, synthetic construct
  source 1..80: mol_type = other DNA
actcgtggtggacttctctcaattttctaggggtaccacccgggtgtcctggccaaaattcgcagtccccaatctccaat

SEQ ID NO: 53620 - DNA, 80 bp, synthetic construct
  source 1..80: mol_type = other DNA
gttaactccttcttttcctgacattcacttgcatcaagatctgatacaaaaatgtgaacaatttgtaggcccactcacta

SEQ ID NO: 53621 - DNA, 80 bp, synthetic construct
  source 1..80: mol_type = other DNA
caaatgaaaggagacgattgaaactaattatgccagctaggttttatcccaaagttactaaatacttccctttggataaa

SEQ ID NO: 53622 - DNA, 80 bp, synthetic construct
  source 1..80: mol_type = other DNA
ggtattaagccttactatccagagaatgtggttaatcattactttaaaactagacattatttacatactttgtggaaggc

SEQ ID NO: 53623 - DNA, 80 bp, synthetic construct
  source 1..80: mol_type = other DNA
gagcacctctctcaacggcgagaaggggcatgggacagaatctttctgtgcccaatcctctgggattctttccagaccac

SEQ ID NO: 53624 - DNA, 80 bp, synthetic construct
  source 1..80: mol_type = other DNA
cagttggatccactattcagagcaaattccagcagtcccgattgggacttcaacgcaaacaaggacaattggccaatggc

SEQ ID NO: 53625 - DNA, 80 bp, synthetic construct
  source 1..80: mol_type = other DNA
aaacaaggtaggagtgggaggcttcggtccagggttcacacccccacacggtggccttctggggtggagccctcaggcac

SEQ ID NO: 53626 - DNA, 80 bp, synthetic construct
  source 1..80: mol_type = other DNA
cagcacgggaccctgcaaaacctgcaccactcttgctcaaggaacctctatgtttccctcctgctgctgtaccaaacctt

SEQ ID NO: 53627 - DNA, 80 bp, synthetic construct
  source 1..80: mol_type = other DNA
cacagaaccctgctccgactattgcctctctcacatcatcaatcttctcgaagactggggaccctgttctgaacatggag

SEQ ID NO: 53628 - DNA, 80 bp, synthetic construct
  source 1..80: mol_type = other DNA
ttgaacgcagctaaaacaaaatggtggggttatacccttcactttatgggttatagaattgggagttggtggaccttgcc

SEQ ID NO: 53629 - DNA, 80 bp, synthetic construct
  source 1..80: mol_type = other DNA
tcaggaacatattgtgcataaaatcaaagattgctttcgcaaacttcccgtgaatagacccattgattggaaggtttgtc

SEQ ID NO: 53630 - DNA, 80 bp, synthetic construct
  source 1..80: mol_type = other DNA
aacgcattgtgggtcttttgggctttgcagccccttttactcaatgtggttatcctgctctcatgcccttgtatgcctgt

SEQ ID NO: 53631 - DNA, 80 bp, synthetic construct
  source 1..80: mol_type = other DNA
actccttcttttcctgacattcatttgcaggaggacattgttgatagatgtaagcaatttgtggggccccttacagtaaa

SEQ ID NO: 53632 - DNA, 80 bp, synthetic construct
  source 1..80: mol_type = other DNA
tgaaaacaggagactaaaattaattatgcctgctaggttttatcccaatgttactaaatatttgcccttagataaaggga

SEQ ID NO: 53633 - DNA, 80 bp, synthetic construct
  source 1..80: mol_type = other DNA
gaggttggtcttccaaacctcgaaaaggcatggggacaaatctttctgtccccaatcccctgggattcttccccgatcat

SEQ ID NO: 53634 - DNA, 80 bp, synthetic construct
  source 1..80: mol_type = other DNA
cagttggatcctgcattcaaagccaactcagaaaatccagattgggatctcaacccgcacaaggacaactggccggacgc

SEQ ID NO: 53635 - DNA, 80 bp, synthetic construct
  source 1..80: mol_type = other DNA
cagcaccggaccatgcaaaacctgcacaactcctgctcaaggaacctctatgtttccctcatgttgctgtacaaaaccta

SEQ ID NO: 53636 - DNA, 80 bp, synthetic construct
  source 1..80: mol_type = other DNA
agtgagccctgctcagaatactgtctctgccatatcgtcaatcttatcgaagactggggaccctgtaccgaacatggaga

SEQ ID NO: 53637 - DNA, 80 bp, synthetic construct
  source 1..80: mol_type = other DNA
ttaaaccctcataaaacaaaaagatggggatattcccttaacttcatgggatatgtaattgggtgttggggcacattgcc

SEQ ID NO: 53638 - DNA, 80 bp, synthetic construct
  source 1..80: mol_type = other DNA
acaggaacatattgtacaaaaaatcaaaatgtgttttaggaaacttcctgtaaacagacctattgattggaaagtatgtc

SEQ ID NO: 53639 - DNA, 80 bp, synthetic construct
  source 1..80: mol_type = other DNA
ctccatcacactccatcaagctctgctagatcccagaccgaggggcatagactttcctgctggtggctccagttccggaa

SEQ ID NO: 53640 - DNA, 80 bp, synthetic construct
  source 1..80: mol_type = other DNA
agcaattggcagtcaggacgacagcctatttccacttctccacgtgtcagagacagtcatccccagcccatacagtggaa

SEQ ID NO: 53641 - DNA, 80 bp, synthetic construct
  source 1..80: mol_type = other DNA
gaagtagctacagcaaacctcgacaaggcatggggacgaacctttctgttcccaatcctctgggattctttcccggtcac

SEQ ID NO: 53642 - DNA, 80 bp, synthetic construct
  source 1..80: mol_type = other DNA
ctccaccgttttccatcaaacggttcaagatcccagagtcagggctctgtattttcctgctggtggctccagttcaggaa

SEQ ID NO: 53643 - DNA, 80 bp, synthetic construct
  source 1..80: mol_type = other DNA
ttccagcacattccaccaagccctgatagatcccagagtgacaagcctagaccttcctgctggtggctccagttccggaa

SEQ ID NO: 53644 - DNA, 80 bp, synthetic construct
  source 1..80: mol_type = other DNA
gtattccttggactcataaggtgggaaactttacgggactctattcctctactgttcctacttttaatcccgactggtta

SEQ ID NO: 53645 - DNA, 80 bp, synthetic construct
  source 1..80: mol_type = other DNA
ttgctcggcaacggcctggtctgtgccaaatgtttgttgacgcaacccccactggttggggcttggccataggccaccag

SEQ ID NO: 53646 - DNA, 80 bp, synthetic construct
  source 1..80: mol_type = other DNA
acatgcgtggaacctttgtggctcctcttccgatccatactgcagaactcctagcagcttgttttgctcgcagccggtct

SEQ ID NO: 53647 - DNA, 80 bp, synthetic construct
  source 1..80: mol_type = other DNA
ctaaaccctaacaaaaccaagagatggggttattccctaaactttatgggttatgtaattggtagttggggtacattgcc

SEQ ID NO: 53648 - DNA, 80 bp, synthetic construct
  source 1..80: mol_type = other DNA
cggaacctaacaacggtcttacataagaggactcttggactttcagcaatgtcaacgaccgaccttgaggcatacttcaa

SEQ ID NO: 53649 - DNA, 80 bp, synthetic construct
  source 1..80: mol_type = other DNA
tccgtctattcgggatctcctcgacaccgccaatgctttgtttcgggaggccttggagtctcaggaacattgttcacctc

SEQ ID NO: 53650 - DNA, 80 bp, synthetic construct
  source 1..80: mol_type = other DNA
ccagttggaccccgcattcggagccaattcaaacaatccagattgggacttcaatcccaacctcgattgctggcctgggg

SEQ ID NO: 53651 - DNA, 80 bp, synthetic construct
  source 1..80: mol_type = other DNA
tccgccaggtaggagtgggatcattcgggccagggttcactcctccacacggcaatcttttggggtggagccctctgcac

SEQ ID NO: 53652 - DNA, 80 bp, synthetic construct
  source 1..80: mol_type = other DNA
ctccagcacattccaccaaactctgcaagatccattccaccaacatctgctggttcctgctggtggctcaagttccggaa

SEQ ID NO: 53653 - DNA, 80 bp, synthetic construct
  source 1..80: mol_type = other DNA
gagacgcaaagccctgctccgactattgcctctctcacatcatcaatcttctcgaagactgggggccctgctatgaacat

SEQ ID NO: 53654 - DNA, 80 bp, synthetic construct
  source 1..80: mol_type = other DNA
catcataccgctctcaggcaagctattgtgtgttgaaatgaggtaatagctctagcttcctgggtgggcaataatttgga

SEQ ID NO: 53655 - DNA, 80 bp, synthetic construct
  source 1..80: mol_type = other DNA
tgaacctgcatctagggatttagtagttaactatgttaacactaatatgggcctaaagatcaaacaactatcgtggtttc

SEQ ID NO: 53656 - DNA, 80 bp, synthetic construct
  source 1..80: mol_type = other DNA
gggtatgaacaacaaagtgcccctatggtataaacacttcaggaaactaccgttgttagacgaagaggctggtcccctag

SEQ ID NO: 53657 - DNA, 80 bp, synthetic construct
  source 1..80: mol_type = other DNA
tccgtctattcgggatctcctcgacaccgcccaagctctgtatcgggaggccttagagtctccggaacattgctcatatc

SEQ ID NO: 53658 - DNA, 80 bp, synthetic construct
  source 1..80: mol_type = other DNA
gagacgtcgaacatccaaacctcgaaaaggcatggggacgaatctttctgttcccaatcctctgggattctttcccgatc

SEQ ID NO: 53659 - DNA, 80 bp, synthetic construct
  source 1..80: mol_type = other DNA
tccatctattctagatctcctcgacaccgcctcagctctatatctggagggcttagagtctccggaacattgctcacctc

SEQ ID NO: 53660 - DNA, 80 bp, synthetic construct
  source 1..80: mol_type = other DNA
tccatatagcactcaggcgagctattctgcgttggggtgagttgatgaatctggccacctgggtgggaagtaatttggaa

SEQ ID NO: 53661 - DNA, 80 bp, synthetic construct
  source 1..80: mol_type = other DNA
accatacagcactcaggcaagctattctgtgttggggtgagttgatgaacctggccacctgggtgagaggaaatttggac

SEQ ID NO: 53662 - DNA, 80 bp, synthetic construct
  source 1..80: mol_type = other DNA
accatacggcactcaggcaagctatactatgttggggtgagttgatgaatctagccacctgggtgtgaggtaatttgcaa

SEQ ID NO: 53663 - DNA, 80 bp, synthetic construct
  source 1..80: mol_type = other DNA
gaggcccgtcttccaaacctcgacaaggcatggggacgaacctttctgttcccaatcctctgggattctttcccagtcac

SEQ ID NO: 53664 - DNA, 80 bp, synthetic construct
  source 1..80: mol_type = other DNA
tgcccggcaacggtccggtctctgccaagtgtttgctgacgccactctcgttgattggggcttggctattggccatcgcc

SEQ ID NO: 53665 - DNA, 80 bp, synthetic construct
  source 1..80: mol_type = other DNA
tgggggaggagattaggttaaaggtctttgtactaggaggctgtaggcataaattggtgcgttcaccagcaccatgcaac

SEQ ID NO: 53666 - DNA, 80 bp, synthetic construct
  source 1..80: mol_type = other DNA
acaacatcacatcaggactcctaaaacccctactcatgttacaggcggtgtatttcttattaacaaaaatcctcacaata

SEQ ID NO: 53667 - DNA, 80 bp, synthetic construct
  source 1..80: mol_type = other DNA
gatttactccaccccatgggggactgttggggtggagccctcaagctcagggcatattcacaactgtgccaacagctcct

SEQ ID NO: 53668 - DNA, 80 bp, synthetic construct
  source 1..80: mol_type = other DNA
tccttctatgcgagatctcctcgacaccgcttctgctttgtatcgggaggccttagagtctgtggaacatgttacacctc

SEQ ID NO: 53669 - DNA, 80 bp, synthetic construct
  source 1..80: mol_type = other DNA
caggccatattctcaactgtgccaacagctccacctcctgcctccaccaatcggcaggtaggaaggcagcctactcccat

SEQ ID NO: 53670 - DNA, 80 bp, synthetic construct
  source 1..80: mol_type = other DNA
cagggcatactcacaactgcgacagcatctccacctcctgcctccacaaatcggcaggtaggaaggcagcctactcccct

SEQ ID NO: 53671 - DNA, 80 bp, synthetic construct
  source 1..80: mol_type = other DNA
accatacggcaatcaggcaagctattctgtgttggggtgagttaatgaatctagccacctgggtgtgcggaaatttagaa

SEQ ID NO: 53672 - DNA, 80 bp, synthetic construct
  source 1..80: mol_type = other DNA
ctaaccaggtcttgcccaaggtcttacataagaggactcttggactctcagcaatgtcaacgaccgaccttgaggcgtac

SEQ ID NO: 53673 - DNA, 80 bp, synthetic construct
  source 1..80: mol_type = other DNA
accatacagcagtaaggcaaattattctgtgttggggtgagttgatgaatctggccacctgggtgggaagtaatgtggaa

SEQ ID NO: 53674 - DNA, 80 bp, synthetic construct
  source 1..80: mol_type = other DNA
ttgttcatgtccctttggggcatggacattgacccgtataaagaatttggagcttctgtggagttactctcttttttgcc

SEQ ID NO: 53675 - DNA, 80 bp, synthetic construct
  source 1..80: mol_type = other DNA
ctcccaaacatttcatcaagctctgctagatcccagaataaggggcctataccttcctgctggtggctccagttccggaa

SEQ ID NO: 53676 - DNA, 80 bp, synthetic construct
  source 1..80: mol_type = other DNA
tccttctattcgcgatcttctcgacaccgcctctgcgctgtatcgggaggccttagagtctccggaacattgttcatatc

SEQ ID NO: 53677 - DNA, 80 bp, synthetic construct
  source 1..80: mol_type = other DNA
accccttcttttcctgatatacatttgaaggaggacattattgatagatgtcaacaatttgtgggccctcttaatataaa

SEQ ID NO: 53678 - DNA, 80 bp, synthetic construct
  source 1..80: mol_type = other DNA
actccctcgtttcctgatatacatttgcaggaggacattattactagatgtgagcaatttgtgggccctcttaatataaa

SEQ ID NO: 53679 - DNA, 80 bp, synthetic construct
  source 1..80: mol_type = other DNA
ctccacaacattccaacaaggtcatctagaccccagactgaggagcttataaattcctgctggtggctccagttccggaa

SEQ ID NO: 53680 - DNA, 80 bp, synthetic construct
  source 1..80: mol_type = other DNA
ctccaaaaccttccaccaaactctcagtcatcttccaacgttccaccaaactctccctgctggtggctccagttcaggaa

SEQ ID NO: 53681 - DNA, 80 bp, synthetic construct
  source 1..80: mol_type = other DNA
gcatggggctgtacagcccgcttctccgcctgccgtaccgaccgaccacggggcgcacctctctttacgcggactccccg

SEQ ID NO: 53682 - DNA, 80 bp, synthetic construct
  source 1..80: mol_type = other DNA
caaatggactctgcccaaggtcttgtataagaggactcttggactttcagcaatgtcaacgaccgaccttgaggcatact

SEQ ID NO: 53683 - DNA, 80 bp, synthetic construct
  source 1..80: mol_type = other DNA
tccgtctattcgagatctcctcgacactgcctctgctctatatcgggaggccttagagtctccggaacattgttcagctc

SEQ ID NO: 53684 - DNA, 80 bp, synthetic construct
  source 1..80: mol_type = other DNA
catccgccaggtcttgcccaaggtcttatataaaaggactcttggactctcagcaatgtcaacgaccgaccttgaggcat

SEQ ID NO: 53685 - DNA, 80 bp, synthetic construct
  source 1..80: mol_type = other DNA
tgtcagcacattccaccaagctctgacagaacccaaagtgaggggacaaaaccttcctgctggtggctccagttccgaaa

SEQ ID NO: 53686 - DNA, 80 bp, synthetic construct
  source 1..80: mol_type = other DNA
actccttcttttcctgatatacatttgcaggaagacattattaatagatgtcaacaatttgtgggccctctaaatgccaa

SEQ ID NO: 53687 - DNA, 80 bp, synthetic construct
  source 1..80: mol_type = other DNA
agcaccgcatcaggacccctaggacccctgctcgtgttacaggcggggtttttcttgttgacaaaaatcctcacaatacc

SEQ ID NO: 53688 - DNA, 80 bp, synthetic construct
  source 1..80: mol_type = other DNA
aacatccggtgccagcaaggggccatgcaggacctgcacgaatcctgttcaaggaacctctatatttccctcttgttgct

SEQ ID NO: 53689 - DNA, 80 bp, synthetic construct
  source 1..80: mol_type = other DNA
gaccaaaattccaggggacgcagtagtcggctatgtcaatgttaatatgggcctaaaactcagacaactactgtggtttc

SEQ ID NO: 53690 - DNA, 80 bp, synthetic construct
  source 1..80: mol_type = other DNA
tcctaatattcgtgatcttctcgacaccgccaatgctctgtatcgggacgccttagaggctccggaacattgttcagctc

SEQ ID NO: 53691 - DNA, 80 bp, synthetic construct
  source 1..80: mol_type = other DNA
gaccccccctcccgggaattaatagtcggctatgtcgttgttgttaagggccgaaaaatcatacaactattgtggtgcca

SEQ ID NO: 53692 - DNA, 80 bp, synthetic construct
  source 1..80: mol_type = other DNA
tctgtgccttctcatctgccggaccgtgtgcacttcgcttcacctcttctccaagctgtgccttgggtggctttggggca

SEQ ID NO: 53693 - DNA, 80 bp, synthetic construct
  source 1..80: mol_type = other DNA
tggacattgacacgtataaagaatttggaggactcttggactttcagcaatgtcaacgaccgaccttgaggcatacttca

SEQ ID NO: 53694 - DNA, 80 bp, synthetic construct
  source 1..80: mol_type = other DNA
atttggaagatcctggtgctagggatctagtggttaactatgtcaattctcacatgggcctaaaaattagacaattactg

SEQ ID NO: 53695 - DNA, 80 bp, synthetic construct
  source 1..80: mol_type = other DNA
tccttctattcgcgatctactcgacaccgccatcgcgctgtatcgggaggcattagagtctccggaccatatttcacctc

SEQ ID NO: 53696 - DNA, 80 bp, synthetic construct
  source 1..80: mol_type = other DNA
catatagaccacaaaatgcccctatcttatcccctatcttatcaacacttccggaaactgctgttgttagacaaagatgc

SEQ ID NO: 53697 - DNA, 80 bp, synthetic construct
  source 1..80: mol_type = other DNA
aggacccctagaagaagaactccctcgcctcgcagacgaaggtctaaatcgccgcgtcgcggaagatctcaatctcggga

SEQ ID NO: 53698 - DNA, 80 bp, synthetic construct
  source 1..80: mol_type = other DNA
cagctcctcctcctgcctccaccaatcactcccttatctcctcctctaagggacactcatcctcaggccatgcagtggaa

SEQ ID NO: 53699 - DNA, 80 bp, synthetic construct
  source 1..80: mol_type = other DNA
tgttggatgctgcactagatcaattgaaaactgaatatacagaagacgtagatgacgagatgtatcgagaatacacaatg

SEQ ID NO: 53700 - DNA, 80 bp, synthetic construct
  source 1..80: mol_type = other DNA
ctgataagagatgaagttgttaaaatgcttgaggaaccggtaaaacatgatgatcacttattgcaagactctgaattagc

SEQ ID NO: 53701 - DNA, 80 bp, synthetic construct
  source 1..80: mol_type = other DNA
acgtcatcaagaaaatacaatacggagctgtagcatcaggagaaaagcagacgaaagcggcgaattcgatagcaaatctg

SEQ ID NO: 53702 - DNA, 80 bp, synthetic construct
  source 1..80: mol_type = other DNA
tactcttttcaaagaataacatagtatccaggggaatagctctgactgaaaaagcaaaattgaattcatatgcaccaata

SEQ ID NO: 53703 - DNA, 80 bp, synthetic construct
  source 1..80: mol_type = other DNA
aatggttcatggatcagtttattctgtaattatccaaaatcagaaatgataaagctatggaagaaaatgtggaacattac

SEQ ID NO: 53704 - DNA, 80 bp, synthetic construct
  source 1..80: mol_type = other DNA
tgaaaatgatactgctgagaagcttaaaatttataagagaagattagatttatttactatagttgcatcaacggtgaaca

SEQ ID NO: 53705 - DNA, 80 bp, synthetic construct
  source 1..80: mol_type = other DNA
aatatggtgtaccaagacataacgcaaaatatagatatgagtatgatgtaatgaaggataaaccatattacttagtaaca

SEQ ID NO: 53706 - DNA, 80 bp, synthetic construct
  source 1..80: mol_type = other DNA
ggaggctgtaggcataaattggtctgcgcaccagcaccatgcaactttttgaagagcatgagctctccggaagggcgaat

SEQ ID NO: 53707 - DNA, 80 bp, synthetic construct
  source 1..80: mol_type = other DNA
accaatccctggctacactcaaagaacagaataggaactggattatacaaggctgaggacacagatgaagatggatgcag

SEQ ID NO: 53708 - DNA, 80 bp, synthetic construct
  source 1..80: mol_type = other DNA
agcagtagcctgttctcatggatcatgtgtctctgtacatcaggagccttccactttcttaaagatagactatcctggaa

SEQ ID NO: 53709 - DNA, 80 bp, synthetic construct
  source 1..80: mol_type = other DNA
tggcggcctccactggaggggagataggcattcacttatctcatactgacgactcattaagtgttcataaaatgatatct

SEQ ID NO: 53710 - DNA, 80 bp, synthetic construct
  source 1..80: mol_type = other DNA
tgccctcctcgagatccgtgcgaagctcataattgtctcgtgtgctatcatggattaataaattaccagtgtcatacagc

SEQ ID NO: 53711 - DNA, 80 bp, synthetic construct
  source 1..80: mol_type = other DNA
ccttagttatgcggtagtttcctttttatttgtatctttctcttatttggcaatttatataattagtaggactttaagat

SEQ ID NO: 53712 - DNA, 80 bp, synthetic construct
  source 1..80: mol_type = other DNA
tcttcagaataattccaaggcatctcaagaatccactatcttggttagtttacttaataagatggatatttggagtcttg

SEQ ID NO: 53713 - DNA, 80 bp, synthetic construct
  source 1..80: mol_type = other DNA
acatctactgtaagaatatcatttgaaaagattagtgagatgattggatggaataatgcacaagtgagacacattgatgt

SEQ ID NO: 53714 - DNA, 80 bp, synthetic construct
  source 1..80: mol_type = other DNA
agaagcaaatagacaaccgcttagaaggttcaagacgacttttgttctcactatgctaatggtcacaggatcattagcat

SEQ ID NO: 53715 - DNA, 80 bp, synthetic construct
  source 1..80: mol_type = other DNA
tcaaccatagatcaatgttagaggcaagtaatgaagggataatactaaaagaaggtacatcttgtgaggttgagactaat

SEQ ID NO: 53716 - DNA, 80 bp, synthetic construct
  source 1..80: mol_type = other DNA
gctctaatactgagatatccaattctaagcagacaaagtgcgtacaatctggctcaggaattaaatgttcagttactgca

SEQ ID NO: 53717 - DNA, 80 bp, synthetic construct
  source 1..80: mol_type = other DNA
acggtcaccttaaaagcaggcataataggagcagaatcatgtttcatcattaaaggaccttcagaaaatcagcagaaagt

SEQ ID NO: 53718 - DNA, 80 bp, synthetic construct
  source 1..80: mol_type = other DNA
gatcagaataaaaaccatatccagtgagacaatctgtagagaaggatccagcttctggacaggccacttcaccccttcat

SEQ ID NO: 53719 - DNA, 80 bp, synthetic construct
  source 1..80: mol_type = other DNA
gcgttagctcaagaagatgtcacctagttggtgattgcgttggcaataagtgtcaatcttggagggatgatgttatttct

SEQ ID NO: 53720 - DNA, 80 bp, synthetic construct
  source 1..80: mol_type = other DNA
aaagaatttgggaacatgaaggaaaataatgtgatgtctgagaacaaatgctttgagcagtgtggtgctgctggctgtgg

SEQ ID NO: 53721 - DNA, 80 bp, synthetic construct
  source 1..80: mol_type = other DNA
ttgctttaatataaatccctcttgtctttatgttcacacaataattaaaagtgcaagaaatgaggctatcagagtcttta

SEQ ID NO: 53722 - DNA, 80 bp, synthetic construct
  source 1..80: mol_type = other DNA
agtgcaatgattgggtgcacagattgacattcatggtgacaggaccatcaggggagaaagatgaggttgtcttaaacagt

SEQ ID NO: 53723 - DNA, 80 bp, synthetic construct
  source 1..80: mol_type = other DNA
ctgagcacaaagttcctacaatggggaactatttctcttagcttggatgcggaagggatcactggtacaaatagttactc

SEQ ID NO: 53724 - DNA, 80 bp, synthetic construct
  source 1..80: mol_type = other DNA
atttttggagagcaataagggaggatttgcaatacacgatgaagagttctcagaagttcctagagaaggatttctagggg

SEQ ID NO: 53725 - DNA, 80 bp, synthetic construct
  source 1..80: mol_type = other DNA
agatccggtgctcttcagaatctgcagtcatagcagctcacaagtcatgcatcagagcacctaatttgataaaatacaag

SEQ ID NO: 53726 - DNA, 80 bp, synthetic construct
  source 1..80: mol_type = other DNA
aaagactttaaatgctatgaagaaagatcctatttaaagtggtcctgtcctcatcttgccaattcagtacacttcattga

SEQ ID NO: 53727 - DNA, 80 bp, synthetic construct
  source 1..80: mol_type = other DNA
ccaatgactgatcagatagagtgttcctcaactctaatggatccttttgcaatattcatcaaaggatcacttcctcagtc

SEQ ID NO: 53728 - DNA, 80 bp, synthetic construct
  source 1..80: mol_type = other DNA
aagatctggatatacattcacgagttctagggacaagaagacagttcaagcttttaacagcggtcatatcaaagctttta

SEQ ID NO: 53729 - DNA, 80 bp, synthetic construct
  source 1..80: mol_type = other DNA
tatccataaatatggatgatcatgagattgaatttctgtcagactcagtagactgtgatgcttcattcttgaatatttca

SEQ ID NO: 53730 - DNA, 80 bp, synthetic construct
  source 1..80: mol_type = other DNA
ggatgttacacttgtaattacggtgcacaagtctgcataaggattagatcttcaaagtcagggatactacatagcaataa

SEQ ID NO: 53731 - DNA, 80 bp, synthetic construct
  source 1..80: mol_type = other DNA
taaagacaactctctcacaataaactttgaggtgtcagaaggaacacacgactactgtcagatacagcattttaatactc

SEQ ID NO: 53732 - DNA, 80 bp, synthetic construct
  source 1..80: mol_type = other DNA
ctatggttgaagaaactttacactatagttgtggaggggattcaaaactgctaattttaaaaggatctcttatcatggtc

SEQ ID NO: 53733 - DNA, 80 bp, synthetic construct
  source 1..80: mol_type = other DNA
gggccctatgactttagaaacaaaactgggggtctatccacagttgtaaatcctcatgaggagagctggagcattatgaa

SEQ ID NO: 53734 - DNA, 80 bp, synthetic construct
  source 1..80: mol_type = other DNA
ctggtttggaggcttaatgaattggctaggtggtcctcttaaggccatcttaaagataattgtgttaatcattgtgggca

SEQ ID NO: 53735 - DNA, 80 bp, synthetic construct
  source 1..80: mol_type = other DNA
taattatattccttcttctggtctatctttgcagacttttgttcaataccatttcactaaaactcaagaggcaataaaac

SEQ ID NO: 53736 - DNA, 80 bp, synthetic construct
  source 1..80: mol_type = other DNA
aagaggcaaatgattgaaaacacagcagaccacaaaatcaaaaggtcagccaaagcccaagagaaacacaagaaggacac

SEQ ID NO: 53737 - DNA, 80 bp, synthetic construct
  source 1..80: mol_type = other DNA
aacacagcagaccacaaaatcaaaaggtcagccaaagcccaagagaaacacaagaaggacacacccaaaagaaaagaaac

SEQ ID NO: 53738 - DNA, 80 bp, synthetic construct
  source 1..80: mol_type = other DNA
caataaggggaagttgcgtgtggtcaaatgtaaaacagattacgagataactgaggattgtacatactgcaggaagatca

SEQ ID NO: 53739 - DNA, 80 bp, synthetic construct
  source 1..80: mol_type = other DNA
agaagaaatcaaatcaaaataagcaagtctacaagacttctatagctctgcaagatgttatatgtcaggagtactctgat

SEQ ID NO: 53740 - DNA, 80 bp, synthetic construct
  source 1..80: mol_type = other DNA
tattacaatggaccaaagatcacctacaatggagtctgcaaaattggctcaattgaatataagccatgcaaacaaaaggt

SEQ ID NO: 53741 - DNA, 80 bp, synthetic construct
  source 1..80: mol_type = other DNA
ctcctcttttgagaatataggtttcattgtgattagagacaaggggaaattttatattgagaatatgaaaataaagaaca

SEQ ID NO: 53742 - DNA, 80 bp, synthetic construct
  source 1..80: mol_type = other DNA
tcgagatggttgccaatgtgtcttttatctgttatcagcatcaaggtcaagatactgaaaaagacaacagactgttgaag

SEQ ID NO: 53743 - DNA, 80 bp, synthetic construct
  source 1..80: mol_type = other DNA
aaggtaaaaataacggactgtaaggtttatgatgataataaaaccaaacattgtacaggagatcatgtcttctgcgaaaa

SEQ ID NO: 53744 - DNA, 80 bp, synthetic construct
  source 1..80: mol_type = other DNA
aggcctggactatggtgtggcgtgtttggggttcgattatttactaaggatggatatatatcccttttttaattctcatg

SEQ ID NO: 53745 - DNA, 80 bp, synthetic construct
  source 1..80: mol_type = other DNA
atatgattgtacaaagtcttatcctgaggccacatgcatacaggctcctggatctggaccagttttagttcaggtgatgg

SEQ ID NO: 53746 - DNA, 80 bp, synthetic construct
  source 1..80: mol_type = other DNA
gagtttggtttaagcctcaatgtgtgggctatgagaaagtcttagtagagcgagaggtgaagattccactgttgacaaca

SEQ ID NO: 53747 - DNA, 80 bp, synthetic construct
  source 1..80: mol_type = other DNA
gaaagagattgtgacacttgtgtgtacgagtgtcaggaagacaagatcctcataaagtcaacaggcttcaagatggtttc

SEQ ID NO: 53748 - DNA, 80 bp, synthetic construct
  source 1..80: mol_type = other DNA
ggagcaaaactcatcgggactgataattctgtcgtcctttctcggaaatatacatcatttccatggctgctaggttgtac

SEQ ID NO: 53749 - DNA, 80 bp, synthetic construct
  source 1..80: mol_type = other DNA
tctgggatctgctgcgctgtccccagctctcaacccatataccgcacacctttcggcaatgtgggcagggtggtgcggta

SEQ ID NO: 53750 - DNA, 80 bp, synthetic construct
  source 1..80: mol_type = other DNA
tccctaatattcgagatctcctcgacaccgcctctgctctgtatcgagaggccttagagtctccggaacatgtttcagct

SEQ ID NO: 53751 - DNA, 80 bp, synthetic construct
  source 1..80: mol_type = other DNA
aattcacagtctgcagttcaaattccaatttattattcttccaatagtgagctggaaagtagatgtatagaatttcattc

SEQ ID NO: 53752 - DNA, 80 bp, synthetic construct
  source 1..80: mol_type = other DNA
cgggaacctgcccaaggtcgggaacctgcccaaggtcttgcataagaggactcttggactttcagcaatgtcaacgaccg

SEQ ID NO: 53753 - DNA, 80 bp, synthetic construct
  source 1..80: mol_type = other DNA
catatagaccacaaaatgcccctatcttatcaacgcttccggaaactacggaggtgtaagcaaagggtgggacccctgaa

SEQ ID NO: 53754 - DNA, 80 bp, synthetic construct
  source 1..80: mol_type = other DNA
gatcatgcatccagggacctagtagtcaattatgtaaatgataatatgggactaaagctcagacaactattgtggtttca

SEQ ID NO: 53755 - DNA, 80 bp, synthetic construct
  source 1..80: mol_type = other DNA
tatttcttgccttacttttggaaaacaaactgtccttgagtatttggtctccttcggagtgtggattcgcactcctccag

SEQ ID NO: 53756 - DNA, 80 bp, synthetic construct
  source 1..80: mol_type = other DNA
cacgtcagaccctgcccaaggtcttacataagagaactcttggactcccagcaatgtcaacgaccgaccttgaggcctac

SEQ ID NO: 53757 - DNA, 80 bp, synthetic construct
  source 1..80: mol_type = other DNA
tttgctcgcagccggtctggagcgaaactcatcggaactgacaattctgttgtcctctcgcggaaatatacatcgtttcc

SEQ ID NO: 53758 - DNA, 80 bp, synthetic construct
  source 1..80: mol_type = other DNA
cctttggtcatttctcgtccccttctctgtctaacattccgaacgaccacggagcgcacctctcattccactgcctaccc

SEQ ID NO: 53759 - DNA, 80 bp, synthetic construct
  source 1..80: mol_type = other DNA
atcagatgctgcgcaagttgttacataaaagagctgttggactcccagcaatatcaacagccgaccttgaggcttacttc

SEQ ID NO: 53760 - DNA, 80 bp, synthetic construct
  source 1..80: mol_type = other DNA
atacttcttccattacttttggaagagaacttgtacttgaatatttggtctctttcggagtgtggattcgcactcctcca

SEQ ID NO: 53761 - DNA, 80 bp, synthetic construct
  source 1..80: mol_type = other DNA
ttaaatacaaacaaaacaaaaagatggggttattctctaaacttcatgggatacataattggaagttggggatcattacc

SEQ ID NO: 53762 - DNA, 80 bp, synthetic construct
  source 1..80: mol_type = other DNA
actccttcttttccaaagattcatttacatgaggacattattaataggtgtcaacaattcgtgggccctctcaacaaaaa

SEQ ID NO: 53763 - DNA, 80 bp, synthetic construct
  source 1..80: mol_type = other DNA
ttaaaccctagcaaaaccaaaagatggggttattccctaaacttcatgggatacataattggcagttggggatcactacc

SEQ ID NO: 53764 - DNA, 80 bp, synthetic construct
  source 1..80: mol_type = other DNA
ttacgctgccttccaccgggctctgcaggatcccaaagtcaagggtctgtattttcctgctggtggctccagttcaggaa

SEQ ID NO: 53765 - DNA, 80 bp, synthetic construct
  source 1..80: mol_type = other DNA
tcctaacgttagagatctcctagacaccgcctcagccctatatcgagaagccttagagtctcctgagcattgctcacctc

SEQ ID NO: 53766 - DNA, 80 bp, synthetic construct
  source 1..80: mol_type = other DNA
actccttcttttcctaaaattcatttacatgaagatattgctaataggtgtcagcaatttgtaggccctctcacggtaaa

SEQ ID NO: 53767 - DNA, 80 bp, synthetic construct
  source 1..80: mol_type = other DNA
tgaaaagagaagattgaaattaattatgcctgctaggttctatcctaacagcactaaatatttgcctctagacaaaggga

SEQ ID NO: 53768 - DNA, 80 bp, synthetic construct
  source 1..80: mol_type = other DNA
ttaaaccttattatcctgatcatgtagttaatcattactttcaaaccagacattatttacatactctttggaaggctggg

SEQ ID NO: 53769 - DNA, 80 bp, synthetic construct
  source 1..80: mol_type = other DNA
gaggttggtcatcaaaacctcgcaaaggcatggggacgaacctttctgttcccaatcctctgggattctttcccgatcat

SEQ ID NO: 53770 - DNA, 80 bp, synthetic construct
  source 1..80: mol_type = other DNA
cagttggaccctgcattcggagccaattcaaacaatccagattgggacttcaaccccatcaaggaccattggccacaagc

SEQ ID NO: 53771 - DNA, 80 bp, synthetic construct
  source 1..80: mol_type = other DNA
actcaaccctgttccaaatattgcctctcacatctcgtcaatctcctcgaggactggggaccctgcaccgaacatggaga

SEQ ID NO: 53772 - DNA, 80 bp, synthetic construct
  source 1..80: mol_type = other DNA
gcttgaagatgtatcgtccccttctccgtctgccgtaccgtccgaccacggggcgcacctctctttacgcggtctccccg

SEQ ID NO: 53773 - DNA, 80 bp, synthetic construct
  source 1..80: mol_type = other DNA
acaatgtcacatcagtgttcaaaggacccctgctcgtgttacaggcggggtttttcttgttgacaagaatcctcacaata

SEQ ID NO: 53774 - DNA, 80 bp, synthetic construct
  source 1..80: mol_type = other DNA
gatccagcatcaagggatctactagtcaattatgttaatggtgacatgggtttaaaaattaggcaactagggaggtttca

SEQ ID NO: 53775 - DNA, 80 bp, synthetic construct
  source 1..80: mol_type = other DNA
tgccaactggattcttcgcgggacgtccttcctctacacctcaaaggtgtcagaactgcataaggatatgctgctggcta

SEQ ID NO: 53776 - DNA, 80 bp, synthetic construct
  source 1..80: mol_type = other DNA
gggtacattgccacaggattcctaggacccctgctcatattataggcggggtttttcttgttgacaaaaaatcaaacact

SEQ ID NO: 53777 - DNA, 80 bp, synthetic construct
  source 1..80: mol_type = other DNA
aattggttctcttagcagcatcatgcaactttttcacctctgcctaatcctttttcatacatgtccctctgcctaatcct

SEQ ID NO: 53778 - DNA, 80 bp, synthetic construct
  source 1..80: mol_type = other DNA
ccaagctgtgccttggatggctttggggcatggacattgacccttataaagagtttggagctactgtggagttattttca

SEQ ID NO: 53779 - DNA, 80 bp, synthetic construct
  source 1..80: mol_type = other DNA
taatcctttttcaccttcagtacgggatctgcctaatcctttttcacctctgtatcgggaagccttagaatctccggagc

SEQ ID NO: 53780 - DNA, 80 bp, synthetic construct
  source 1..80: mol_type = other DNA
gttttaggatctagacttgtggtggacttctctcaattttccagggggcccacccgtgtgtcttggccaaaattcgcagt

SEQ ID NO: 53781 - DNA, 80 bp, synthetic construct
  source 1..80: mol_type = other DNA
cttcctgtcaatcgacctatcctggttatcgctggatgtgtctgcggcgttttatcatattcctcttcatcctgctgcta

SEQ ID NO: 53782 - DNA, 80 bp, synthetic construct
  source 1..80: mol_type = other DNA
tgcctcatcttctgattggtacttctggattatcaaagtatgtcacccgtttgtcctctaattccaggatcaacaacaac

SEQ ID NO: 53783 - DNA, 80 bp, synthetic construct
  source 1..80: mol_type = other DNA
acggataagaattgtgcctgtattcccatcccaccatcttgggctttcgcaaaatacctatgggagtgggcctcagtccg

SEQ ID NO: 53784 - DNA, 80 bp, synthetic construct
  source 1..80: mol_type = other DNA
ccccctttccttcagtccgtcctggttatcgttggatctacttgatacattttatcatattcctcttcatcctgctgcta

SEQ ID NO: 53785 - DNA, 80 bp, synthetic construct
  source 1..80: mol_type = other DNA
tgccttagctctgtatcggttcttctgaagccttagagtctccagagcattgctcccctcacctcaggatccacaacaac

SEQ ID NO: 53786 - DNA, 80 bp, synthetic construct
  source 1..80: mol_type = other DNA
atatggtctgcgcaccatcatcatgcaactttttcacctctgcctaatcatctcttgtacttgatgtacacttttcagcc

SEQ ID NO: 53787 - DNA, 80 bp, synthetic construct
  source 1..80: mol_type = other DNA
gattctatataagagggaaactacacgtagcgcctcgcctttttggtcaccacatatgtgagctcaagagctacatcatg

SEQ ID NO: 53788 - DNA, 80 bp, synthetic construct
  source 1..80: mol_type = other DNA
accatacggcactaaggcaagccattgtgtgttggggtgaattaatgaatctagccacctgggtgggaagtaatttggaa

SEQ ID NO: 53789 - DNA, 80 bp, synthetic construct
  source 1..80: mol_type = other DNA
tgagccttttatgcctaagaatgtgtctgtctcataatgcaagtggtcaatccagccagcaccatgcaactttttcacct

SEQ ID NO: 53790 - DNA, 80 bp, synthetic construct
  source 1..80: mol_type = other DNA
accaatcggcagacaggaaggcagcctactcccatttctccacctctaagagacagtcatcctcacgtcctacggaggac

SEQ ID NO: 53791 - DNA, 80 bp, synthetic construct
  source 1..80: mol_type = other DNA
cagtaaaccctgctccgaatattgcctctcacatctcatcaatctccgcgaggactggggaccctgtgacgaacatggag

SEQ ID NO: 53792 - DNA, 80 bp, synthetic construct
  source 1..80: mol_type = other DNA
aaacagaacatcaactaccagcacgggaccatgcaagacctgcacgattcctgctcaaggaacctctatgtttccctctt

SEQ ID NO: 53793 - DNA, 80 bp, synthetic construct
  source 1..80: mol_type = other DNA
agactgtgtgtttaaagactgggaggagttgggggaggagattaggttaaatgaccctctataaagaatttggagctact

SEQ ID NO: 53794 - DNA, 80 bp, synthetic construct
  source 1..80: mol_type = other DNA
attaggttaaaggtctttgtattaggaggctgtaggcatcttgatacagcttcagctctgtatcgggaagccttagagtc

SEQ ID NO: 53795 - DNA, 80 bp, synthetic construct
  source 1..80: mol_type = other DNA
tcccccggtccgggatctacttggaacagccgcagctctgtatcgggaagccttagagtcttctgatcattgttcacctc

SEQ ID NO: 53796 - DNA, 80 bp, synthetic construct
  source 1..80: mol_type = other DNA
gtttttgccttctgacttctttccttcagtacgtgaccttctagataccgcctcagctctgtatcgggaagccttagaat

SEQ ID NO: 53797 - DNA, 80 bp, synthetic construct
  source 1..80: mol_type = other DNA
cgtttttgccttctgacttttttccttcagtccgggatctacttgatacagcctcagctctgtatcgggaagccttagag

SEQ ID NO: 53798 - DNA, 80 bp, synthetic construct
  source 1..80: mol_type = other DNA
attcgttttggagcaaaactcatcgggactgataattttgtcgtcctttctgggaaatatacatcaattccatggctcct

SEQ ID NO: 53799 - DNA, 80 bp, synthetic construct
  source 1..80: mol_type = other DNA
aggttgttatgccaaccggattcttcgcgggacgtcctttgtttacgtcccgtcggcgctgaatcccgcggacgacccct

SEQ ID NO: 53800 - DNA, 80 bp, synthetic construct
  source 1..80: mol_type = other DNA
gtattccttggactcataaggtgggaaattttactgggctttattcctctactgtacctagctttaatcaggaatggcaa

SEQ ID NO: 53801 - DNA, 80 bp, synthetic construct
  source 1..80: mol_type = other DNA
tggctctctttttcttgatcatgtctttgttcaagctgggtacaaaacaggtatttcgatcgaggacgaagctggcttag

SEQ ID NO: 53802 - DNA, 80 bp, synthetic construct
  source 1..80: mol_type = other DNA
gaaaagcgtacgccaatacactgtatgccatctaaaatgcataaatggagctgagaggctaatcactctaacaagtgagc

SEQ ID NO: 53803 - DNA, 80 bp, synthetic construct
  source 1..80: mol_type = other DNA
tcaagactcctactgacagtgctacccacatttgcagttctgccacaagtggcaagaaaagcacggagattcaattccac

SEQ ID NO: 53804 - DNA, 80 bp, synthetic construct
  source 1..80: mol_type = other DNA
atgggcaaagtcatctggttctcctctctgatctgcttagtcattcaatgcagtggggacacgggcccaatcatatgcgc

SEQ ID NO: 53805 - DNA, 80 bp, synthetic construct
  source 1..80: mol_type = other DNA
tggctctcttcttcttaatcatgtctttgttcaaactggggacaagacaggtatttcgatcaaggacaaaactggcttag

SEQ ID NO: 53806 - DNA, 80 bp, synthetic construct
  source 1..80: mol_type = other DNA
tggctctcttcttcttaattatgtccttgttcaaactgggaacaaaacagatattccgatcaaggacgaagctggcttag

SEQ ID NO: 53807 - DNA, 80 bp, synthetic construct
  source 1..80: mol_type = other DNA
tcccgtctgttcgtgatcttctcgacaccgcttcagctttgtaccgcattgttcgcctcaccatacagcactcaggcaag

SEQ ID NO: 53808 - DNA, 80 bp, synthetic construct
  source 1..80: mol_type = other DNA
ggagcaaacctcatcgggaaggataattctgtatacctgtctcagaaatatacaacctttccatgggtgctaggttgtac

SEQ ID NO: 53809 - DNA, 80 bp, synthetic construct
  source 1..80: mol_type = other DNA
tgcttccgtccgggatctactaaacacagcctctgctctatatcgggaagccttatagtctcccgagcaatgctcgcctc

SEQ ID NO: 53810 - DNA, 80 bp, synthetic construct
  source 1..80: mol_type = other DNA
tccatacagcaatcaggcaagccattctatgctggggagaattaatgactctagctacctgggtgggtaataatttggac

SEQ ID NO: 53811 - DNA, 80 bp, synthetic construct
  source 1..80: mol_type = other DNA
caggaacctgcccaaggtcttgcataagaggactcttggactttcaggtcttgcataagaggactcttggactttcagca

SEQ ID NO: 53812 - DNA, 80 bp, synthetic construct
  source 1..80: mol_type = other DNA
cctatagaccaccaaatgcccctatcttatcaacacttccggaaactactgttgttagacgacgagaccgagccgaggta

SEQ ID NO: 53813 - DNA, 80 bp, synthetic construct
  source 1..80: mol_type = other DNA
cggaacctgcccaaggtcttgcccaaggtcttgcataagaggactcttggactttcagcaatgtcaacgaccgaccttga

SEQ ID NO: 53814 - DNA, 80 bp, synthetic construct
  source 1..80: mol_type = other DNA
tccgaacatacgagacctcctagatactgctgctgctttgtatcgggatgccttagaatctcctgagcactgctcacctc

SEQ ID NO: 53815 - DNA, 80 bp, synthetic construct
  source 1..80: mol_type = other DNA
tgctttgtatcgggatgccttagaatctcctgagcactgctcacctcaccacacagcactcaggcaagctattctgtgct

SEQ ID NO: 53816 - DNA, 80 bp, synthetic construct
  source 1..80: mol_type = other DNA
accacacagcactcaggcaagctattctgtgctggggggatgtaatgaatctagccacctgggttggcactaatttacaa

SEQ ID NO: 53817 - DNA, 80 bp, synthetic construct
  source 1..80: mol_type = other DNA
gattcagggtccagggatctagtagtcaattatgttaacactaacatgggcctaaagatgaggcaattattgtggtttca

SEQ ID NO: 53818 - DNA, 80 bp, synthetic construct
  source 1..80: mol_type = other DNA
cagcacaactaccagcacgggaccatgcaagacctgcacgattcctgctcaaggaacctctatgtttccctcttgttgct

SEQ ID NO: 53819 - DNA, 80 bp, synthetic construct
  source 1..80: mol_type = other DNA
gatctctagtccctatcaggaatgacaatgcgcatggggtaagatctgtcccgatgcatacagaccttgaattagatttt

SEQ ID NO: 53820 - DNA, 80 bp, synthetic construct
  source 1..80: mol_type = other DNA
gaagaaggctcacaaacccacttgaagagacacaatcagtagatctccatattgagcttgaggaacaaactataggtgta

SEQ ID NO: 53821 - DNA, 80 bp, synthetic construct
  source 1..80: mol_type = other DNA
tccatacactcagcacttgtcagcaatgtgggctgggtggggtggcagttttgaggcccgtctatcggtcgctgggtcta

SEQ ID NO: 53822 - DNA, 80 bp, synthetic construct
  source 1..80: mol_type = other DNA
gcaccactgagattgaggcgtgtattctcctcaaccctgtccttgttaaggacgctactggaagtactcagtttggcccc

SEQ ID NO: 53823 - DNA, 80 bp, synthetic construct
  source 1..80: mol_type = other DNA
tcaacgctatgcttatattatcctacagaagcatcaactcaaattggagatacggaatggaaggatactctgtcccaatt

SEQ ID NO: 53824 - DNA, 80 bp, synthetic construct
  source 1..80: mol_type = other DNA
ctttctgatttcatcgttaagactgaagatggatatatgccatcagacagagaatgtgttgcattggatagatatttatc

SEQ ID NO: 53825 - DNA, 80 bp, synthetic construct
  source 1..80: mol_type = other DNA
ctatggactcttgtgactgattggttactaaatttacttcaagatgaagaaaatcaggaaatgtttgaagattttattag

SEQ ID NO: 53826 - DNA, 80 bp, synthetic construct
  source 1..80: mol_type = other DNA
gaaaacaactcaaccaccagcatcaacaccagcagggggccatgcaagacctgcacgattcctgctcaaggaaactctat

SEQ ID NO: 53827 - DNA, 80 bp, synthetic construct
  source 1..80: mol_type = other DNA
atcacgtcttgcccaaggtcgtcttgcccaaggtcttatataagcggactcttggactctcagcaatgtcaacgaccgac

SEQ ID NO: 53828 - DNA, 80 bp, synthetic construct
  source 1..80: mol_type = other DNA
tctgtaactatccaaaatcagaaatgataaagttatggaagaaaatgtggaacattacgtcgttacgttcgccatatacc

SEQ ID NO: 53829 - DNA, 80 bp, synthetic construct
  source 1..80: mol_type = other DNA
cgacaggtcttgcccaaggtcttacataagaggactcttggactctcgtcttacataagaggactcttggactctcagca

SEQ ID NO: 53830 - DNA, 80 bp, synthetic construct
  source 1..80: mol_type = other DNA
caggtcttgcccaaggtcttacataagaggactcttggactctttgcccaaggtcctacataagaggactcttggactct

SEQ ID NO: 53831 - DNA, 80 bp, synthetic construct
  source 1..80: mol_type = other DNA
cacctcctccagtgccagcagcacctcctcctgcctccaccaatcggcagtcaggaagacagcctactcccatctctcca

SEQ ID NO: 53832 - DNA, 80 bp, synthetic construct
  source 1..80: mol_type = other DNA
tgagaaacaactagttatgcctgccagatttttcccaaactctactaaatatttaccattagacaaaggtatcaagtatt

SEQ ID NO: 53833 - DNA, 80 bp, synthetic construct
  source 1..80: mol_type = other DNA
cggaacctgcccaaggtcttgcataagaggactcttggactttcagcaatgtcaacgaccgttgcataagaggactcttg

SEQ ID NO: 53834 - DNA, 80 bp, synthetic construct
  source 1..80: mol_type = other DNA
gtactaggaggctgtaggcataaattggtctgttcaccagcaccatgcaactttttcacctctgcctaatcatctcatgt

SEQ ID NO: 53835 - DNA, 80 bp, synthetic construct
  source 1..80: mol_type = other DNA
cggaacctgcccaaggtcttgcataagaggactcttggactcttgcataagaggactcttggacttttagcaatgtcaac

SEQ ID NO: 53836 - DNA, 80 bp, synthetic construct
  source 1..80: mol_type = other DNA
gaccgaccttgaggcatacttcaaagactgtgtgtttactgagtgggaggagttgggggaggaggttaggttaaaggtct

SEQ ID NO: 53837 - DNA, 80 bp, synthetic construct
  source 1..80: mol_type = other DNA
aaacccttaacccctgtttggaatgataatgctcatggtgtaggatctgtcccaatgcacacagaccttgagttagattt

SEQ ID NO: 53838 - DNA, 80 bp, synthetic construct
  source 1..80: mol_type = other DNA
cctttcactgttatggtgcatgcacaaaatatgaatacccatggcatactgccaagtgtcactatgaaagagattatcaa

SEQ ID NO: 53839 - DNA, 80 bp, synthetic construct
  source 1..80: mol_type = other DNA
ttctctgacgtctagctctaaatatacttatcgaagaaaactcacaaacccacttgaggaaactcaagcagtagatctcc

SEQ ID NO: 53840 - DNA, 80 bp, synthetic construct
  source 1..80: mol_type = other DNA
cgggaacttaccttggatctgtatcgcttcatcccaacattaatccatacactcagcatttgtcagcaatgtgggctgga

SEQ ID NO: 53841 - DNA, 80 bp, synthetic construct
  source 1..80: mol_type = other DNA
ggaacactcgacagccccagggatctttgctcacagctgtgtctttacatcctgacatcaacccgtacacaaaacatctt

SEQ ID NO: 53842 - DNA, 80 bp, synthetic construct
  source 1..80: mol_type = other DNA
ccgctaacactttccttggggctatccaccttggcccacgcatcaacccatacaccgcccacctgagcgcaatgtttgct

SEQ ID NO: 53843 - DNA, 80 bp, synthetic construct
  source 1..80: mol_type = other DNA
caagcagcaaacacctttctcggtgccatacatctgggcccgcgcattaacccctacactgcacatttaagtgcgatgtt

SEQ ID NO: 53844 - DNA, 80 bp, synthetic construct
  source 1..80: mol_type = other DNA
accaacgagtgcacttctattgcccactcaagttgagacaccaaatgccagtgctcagcgtgtagaacttgcaatggcca

SEQ ID NO: 53845 - DNA, 80 bp, synthetic construct
  source 1..80: mol_type = other DNA
caggggcagtgactagcaacgtgcccaattgcatccgggagtgttttgctgcagtcaccacaataccatggaccacccgg

SEQ ID NO: 53846 - DNA, 80 bp, synthetic construct
  source 1..80: mol_type = other DNA
atggagggcttgggccagccacagtcccaaagggaccaacaggtcatggaacaggttgttgccccccaggaccaccttgg

SEQ ID NO: 53847 - DNA, 80 bp, synthetic construct
  source 1..80: mol_type = other DNA
atataccacaattctaacctttctgatatcaatagttttattgaactatatattaaaatcactaactagtgcgatggact

SEQ ID NO: 53848 - DNA, 80 bp, synthetic construct
  source 1..80: mol_type = other DNA
tgattactccaagtgggactccacacaaaacccagctgtcactgcagctagcctgtccattttagagagattcatggaaa

SEQ ID NO: 53849 - DNA, 80 bp, synthetic construct
  source 1..80: mol_type = other DNA
gcagcccattggtgtcctgtgcaatagagtccctgtcctcaccagcaattggctatctcaatgacattaaatttgtaacc

SEQ ID NO: 53850 - DNA, 80 bp, synthetic construct
  source 1..80: mol_type = other DNA
tcctggcagggacaccatcactctgtctagagtgtcggctgcttttgttccatggaccgttcaagcacttcgcgttctgt

SEQ ID NO: 53851 - DNA, 80 bp, synthetic construct
  source 1..80: mol_type = other DNA
tctaagacaataaatccatctttgagaaccaagcaggctaatgaggtggctgctacgtttgaaaagcccaacatggccgc

SEQ ID NO: 53852 - DNA, 80 bp, synthetic construct
  source 1..80: mol_type = other DNA
agagacgcgcgcagatatcagctttgttaacaatgctacaaaaaccagttacttttaaatcaaacaagataacaataaac

SEQ ID NO: 53853 - DNA, 80 bp, synthetic construct
  source 1..80: mol_type = other DNA
gacatacttaaagacataaaaccattttttacaatgaatgaagcacatttaccaatacagtatcaaaagtgtatgccaac

SEQ ID NO: 53854 - DNA, 80 bp, synthetic construct
  source 1..80: mol_type = other DNA
ccaaagtcagaaatgataaagttatggaagaaaatgtggaacattacatcattacgttcgccatataccaatgcaaattt

SEQ ID NO: 53855 - DNA, 80 bp, synthetic construct
  source 1..80: mol_type = other DNA
ttccactgccgccttccaccaagatctgcaggatcccaaagtcaggggtctgtattttcctgctggtggctccagttcag

SEQ ID NO: 53856 - DNA, 80 bp, synthetic construct
  source 1..80: mol_type = other DNA
ccttgggtggctttggggcatggacattgacccttataaagaatttggaccttataaagaatttggagctacttcggagt

SEQ ID NO: 53857 - DNA, 80 bp, synthetic construct
  source 1..80: mol_type = other DNA
taatctcgtttttgccttctgacttctttccttccgtcagagatctcctagacaccgcctcagctctgtatcgagaagcc

SEQ ID NO: 53858 - DNA, 80 bp, synthetic construct
  source 1..80: mol_type = other DNA
taggcaatgagtccaggttaatgatctatgtattaggaggctgtaggcataaattggtctgcgcaccagcaccatgtaac

SEQ ID NO: 53859 - DNA, 80 bp, synthetic construct
  source 1..80: mol_type = other DNA
atacaagctaagcaggcttttactttctcgccaacttataaggcctttctctgtaaacaatacatgaacctttaccccgt

SEQ ID NO: 53860 - DNA, 80 bp, synthetic construct
  source 1..80: mol_type = other DNA
ctctcatcatctgccaaggcagttatataagaggactcttggactgtttgttatgtcaacaaccggggtggagaaatact

SEQ ID NO: 53861 - DNA, 80 bp, synthetic construct
  source 1..80: mol_type = other DNA
tcaaggactgtgtttttgctgagtgggaagaattaggcaatgagtccaggttaatgacctttgtattaggaggctgtagg

SEQ ID NO: 53862 - DNA, 80 bp, synthetic construct
  source 1..80: mol_type = other DNA
ccttgggtggctttagggcatggatagaacaactttgccatatggcctttttggcttagacattgacccttataaagaat

SEQ ID NO: 53863 - DNA, 80 bp, synthetic construct
  source 1..80: mol_type = other DNA
ggctttcttggacggtccctctcgagtggggaaagaacctttccaccagcaatcctctaggattccttcccgatcaccag

SEQ ID NO: 53864 - DNA, 80 bp, synthetic construct
  source 1..80: mol_type = other DNA
caacaatccagattgggacttcaatcccaaaaaggacccttggccagaggccaacaaagtaggagttggagcctatggac

SEQ ID NO: 53865 - DNA, 80 bp, synthetic construct
  source 1..80: mol_type = other DNA
ccgggttcacccctccacacggaggccttttggggtggagccctcagtctcagggcacactaacaactttgccagcagat

SEQ ID NO: 53866 - DNA, 80 bp, synthetic construct
  source 1..80: mol_type = other DNA
cagtacgggaccctgcaaaacctgcacgactcctgctcaaggcaactctatgtatccctcatgttgctgtacaaaacctt

SEQ ID NO: 53867 - DNA, 80 bp, synthetic construct
  source 1..80: mol_type = other DNA
ggatagtgaaccctgttccgactattgcctctcacatctcgtcaatcttctccaggattggggaccctgcaccgaacatg

SEQ ID NO: 53868 - DNA, 80 bp, synthetic construct
  source 1..80: mol_type = other DNA
aacgaataactggtctgttgggtttcgctgctccttttacccaatgtggttaccctgccttaatgcctttatatgcatgt

SEQ ID NO: 53869 - DNA, 80 bp, synthetic construct
  source 1..80: mol_type = other DNA
tgccatatcgaccctttcagggacgtcctttgtttacgtcccgtcagcgttgaatccagcggacgacccctcctggggtc

SEQ ID NO: 53870 - DNA, 80 bp, synthetic construct
  source 1..80: mol_type = other DNA
gtttggggatctgtcgcccccttctccgtctgccgttcctgccgaccacggggcgcacctctctttacgcggtctcccgg

SEQ ID NO: 53871 - DNA, 80 bp, synthetic construct
  source 1..80: mol_type = other DNA
cctggggtggtctgtggcccccttctccgtttgccgttcctgccgaccacggggcgcacgtgtctttacgcggtctcccg

SEQ ID NO: 53872 - DNA, 80 bp, synthetic construct
  source 1..80: mol_type = other DNA
ttctccgtttgccgttcctgccgaccacggggcgcacgtgtctttacgcggtctcccggtctgttccttttcatctgccg

SEQ ID NO: 53873 - DNA, 80 bp, synthetic construct
  source 1..80: mol_type = other DNA
gtctgttccttttcatctgccggaccgtgtgcccttggcttcacctctgcacgttacatggaaaccgccatgaacacctc

SEQ ID NO: 53874 - DNA, 80 bp, synthetic construct
  source 1..80: mol_type = other DNA
aattggtctgcgcaccagcaccatgcaactttttgaagagctcaagctttccggaaagcttgagctcttctttttcacct

SEQ ID NO: 53875 - DNA, 80 bp, synthetic construct
  source 1..80: mol_type = other DNA
aattggtctgttcaccagcaccatgcaactttttcacctctgcctaatcaccatgcaactttttcacctctacctaacca

SEQ ID NO: 53876 - DNA, 80 bp, synthetic construct
  source 1..80: mol_type = other DNA
gatccagcatccagggatctagtagtcaattatgttaatattaacatgggtttaaagattcctgtcttacttttggaaga

SEQ ID NO: 53877 - DNA, 80 bp, synthetic construct
  source 1..80: mol_type = other DNA
gaaacaggcaactattgtggtttcatatatcttgccttacttttggaagagagactgtacttgaatatttggtctctttt

SEQ ID NO: 53878 - DNA, 80 bp, synthetic construct
  source 1..80: mol_type = other DNA
atcagatcctgcccaaggtcttacataagaggactcttggactgtttgttatgtcaacaaccggggtggagaaatacttc

SEQ ID NO: 53879 - DNA, 80 bp, synthetic construct
  source 1..80: mol_type = other DNA
ctgagcattgtggtctacttgacatcattcgtggttccaatactgttgaaggctctttacatgcttaccaccagagggag

SEQ ID NO: 53880 - DNA, 80 bp, synthetic construct
  source 1..80: mol_type = other DNA
agttattatcgtacggcgacgtcacaaggttcctatcgagtaattcaatggtgttatatacggatgtatcacaatgggat

SEQ ID NO: 53881 - DNA, 80 bp, synthetic construct
  source 1..80: mol_type = other DNA
tttatactcaaattacattgttaacaagttacgaggattcgagactgacagagagttcatattaactaaaattattcaaa

SEQ ID NO: 53882 - DNA, 80 bp, synthetic construct
  source 1..80: mol_type = other DNA
tgacatctgtggctatcactggatcactaagactatttccatcagagcgggtactaactaccaactccacatttaaagtg

SEQ ID NO: 53883 - DNA, 80 bp, synthetic construct
  source 1..80: mol_type = other DNA
ccgaaatgattaaattagggaagaaaatgcgccgcctgccagcagcggtttcaggacggtctgccagtgggtgatacccc

SEQ ID NO: 53884 - DNA, 80 bp, synthetic construct
  source 1..80: mol_type = other DNA
gtcagtattttctcatgaagactatttaattgcaaaagaattaattattttatcatattcaaatagatctacattagcca

SEQ ID NO: 53885 - DNA, 80 bp, synthetic construct
  source 1..80: mol_type = other DNA
aattggtcgcatggagaccaccatgaacgccaatcaggtcttgcccaaggtcttacgtaagaggactctaggactctcag

SEQ ID NO: 53886 - DNA, 80 bp, synthetic construct
  source 1..80: mol_type = other DNA
accatacagcactaaggcaagctattctgtgttggggaagagaaacggttcttgagtatttggtgtccttcggtgtgtgg

SEQ ID NO: 53887 - DNA, 80 bp, synthetic construct
  source 1..80: mol_type = other DNA
attcgcacaccacccgcatataggccaccaaatgcccctatcttatcaacacttccggaaactactgttgttagacgacg

SEQ ID NO: 53888 - DNA, 80 bp, synthetic construct
  source 1..80: mol_type = other DNA
caaagaatggattatcactaaaaaaactttttactgaatacagcgatgttatagagaatgctacattgctgtcaatatta

SEQ ID NO: 53889 - DNA, 80 bp, synthetic construct
  source 1..80: mol_type = other DNA
agttactatcttatggtgatgttacacgctttttatccaataacgctatggtgctatatacagacgtctcccaatgggat

SEQ ID NO: 53890 - DNA, 80 bp, synthetic construct
  source 1..80: mol_type = other DNA
tcatctcaacataatacgcagccatttaggaaagggataataatgggattggacatgttagctaacatgactaatgatgc

SEQ ID NO: 53891 - DNA, 80 bp, synthetic construct
  source 1..80: mol_type = other DNA
atgttattaaaaagatacagtatggagctgtagcgtcaggagagaagcagacaaaagcagcaaattcaatagcgaattta

SEQ ID NO: 53892 - DNA, 80 bp, synthetic construct
  source 1..80: mol_type = other DNA
tcatactcttatgataaatataacgctgttgaaaggaaattggtgaaatatgcaaaaggtaagtcgctagaagcagactt

SEQ ID NO: 53893 - DNA, 80 bp, synthetic construct
  source 1..80: mol_type = other DNA
tgttgttttcaaagaataacatagtgtcaagaggaatagcattgactgaaaaggcgaagttaaactcatacgcaccaata

SEQ ID NO: 53894 - DNA, 80 bp, synthetic construct
  source 1..80: mol_type = other DNA
acaattacgccgtattacaatttaatacagaagtaactaaacaaatggttcaagatgtgtcaaatgatgtaagggaaacc

SEQ ID NO: 53895 - DNA, 80 bp, synthetic construct
  source 1..80: mol_type = other DNA
tatgcacgtatgaatgctaaagttaaagctttagtatcaacagtaggaatagagatagctaaaaggtatatcgcaggtgg

SEQ ID NO: 53896 - DNA, 80 bp, synthetic construct
  source 1..80: mol_type = other DNA
ttaattcaccagatttggaaaagttaattaggataccgtttaaaggaaagataccagctgttactttcatactgcatttg

SEQ ID NO: 53897 - DNA, 80 bp, synthetic construct
  source 1..80: mol_type = other DNA
gtacccagacataatgaaaaatacagatatgaatatgaagtgatgaaggataaaccgtattacttagtaacttgggctaa

SEQ ID NO: 53898 - DNA, 80 bp, synthetic construct
  source 1..80: mol_type = other DNA
attaatggatcctgctatattaacttcgttatcttcaaatttaaatgcagttatgttttggttagaacgacactcaaatg

SEQ ID NO: 53899 - DNA, 80 bp, synthetic construct
  source 1..80: mol_type = other DNA
tgggctaactcatctatagaaatgcttatgtcagtgttttcacatgaagattatttaatagcaaaagagttaataatatt

SEQ ID NO: 53900 - DNA, 80 bp, synthetic construct
  source 1..80: mol_type = other DNA
acgaaaatgatactgctgaaaaatttaaaatttataaaagaagattagacttattcactatagtagcttcaactgtgaac

SEQ ID NO: 53901 - DNA, 80 bp, synthetic construct
  source 1..80: mol_type = other DNA
aaatatggtgtaccaaggcataatgcaaaatatagatacgaatatgatgtgatgaaagataaaccatattacttagtgac

SEQ ID NO: 53902 - DNA, 80 bp, synthetic construct
  source 1..80: mol_type = other DNA
aagtcagagatcgggaatagctgatgaaatagccgcatcaccaacattcaaaaattatgtgtttagattatcagaacagc

SEQ ID NO: 53903 - DNA, 80 bp, synthetic construct
  source 1..80: mol_type = other DNA
aacgatgaacgaactggattatgaaaataataaaataacgtctgagctgtttccaacagcggaagaatacaccgactcat

SEQ ID NO: 53904 - DNA, 80 bp, synthetic construct
  source 1..80: mol_type = other DNA
caaaaaatggtctatcactgaaaaaattatttgatgaatatagtgatgtcattaagaatgctacgctattatcaatacta

SEQ ID NO: 53905 - DNA, 80 bp, synthetic construct
  source 1..80: mol_type = other DNA
acgttattaagaaaatacagtatggagctgtagcatcaggggaaaaacaaacgaaggcagctaactctatagcaaatctg

SEQ ID NO: 53906 - DNA, 80 bp, synthetic construct
  source 1..80: mol_type = other DNA
tagagtcatccagacactaaacttatataaacagacgcaaattaatctaatggattcatacgttcaaataccagatggtg

SEQ ID NO: 53907 - DNA, 80 bp, synthetic construct
  source 1..80: mol_type = other DNA
cgtccaacacctttcttggcgccatccatcttggtccacgcattaacccttacactgcacatctgagtgccatgtttgct

SEQ ID NO: 53908 - DNA, 80 bp, synthetic construct
  source 1..80: mol_type = other DNA
ttgttttggatggattctcattccattcattgccatgatattactaaaaatactgattgcattcgcatacttatgttcaa

SEQ ID NO: 53909 - DNA, 80 bp, synthetic construct
  source 1..80: mol_type = other DNA
caggaacttatcttggatctatttcactccatcccaacattaacccgtacaccggccacctctccgccatgtgggcaggg

SEQ ID NO: 53910 - DNA, 80 bp, synthetic construct
  source 1..80: mol_type = other DNA
ctggggcagtcaccagcaatgttcccagttgcatcagagaatgttttgccagtgtcaccacgctcccctggaccacgcgc

SEQ ID NO: 53911 - DNA, 80 bp, synthetic construct
  source 1..80: mol_type = other DNA
caagcggctaacacgttcctgggcgcaatccaccttggtccgaggatcaacccttataccgcacacatgagtgccatgtg

SEQ ID NO: 53912 - DNA, 80 bp, synthetic construct
  source 1..80: mol_type = other DNA
ttgctagattgtcaaatcgtgtatttagagataaattatttccatctattgtaaacgtacataaaaaagtgataaatgtt

SEQ ID NO: 53913 - DNA, 80 bp, synthetic construct
  source 1..80: mol_type = other DNA
tggtcactgctatttactactactataatttatactattcgaaacctataatatacatgcttggttcagctcctcttatt

SEQ ID NO: 53914 - DNA, 80 bp, synthetic construct
  source 1..80: mol_type = other DNA
cacttaattcaattaaggttactcaatctgatcttgctaatgttctttcgagagtagtctctgttagacatttgaaaata

SEQ ID NO: 53915 - DNA, 80 bp, synthetic construct
  source 1..80: mol_type = other DNA
gcttgcctttgttatcctcatttggagagcgatagctataaatttattccttttaatagtttggcaataaaatgcatgtt

SEQ ID NO: 53916 - DNA, 80 bp, synthetic construct
  source 1..80: mol_type = other DNA
catttattccaattaaagttactcaatctgatgttgcaaatgttctttcaagagtagtttctgttagacatttgaaaata

SEQ ID NO: 53917 - DNA, 80 bp, synthetic construct
  source 1..80: mol_type = other DNA
gatctgctgcgctgtccccatctctcaacccatataccgcacatctttcggcgatgtgggctgggtggtgcggtactttt

SEQ ID NO: 53918 - DNA, 80 bp, synthetic construct
  source 1..80: mol_type = other DNA
cattacatgagaatgaaatacaactatatttaatttcattaggcataccaaaaatagatgctgatacatatgttggttca

SEQ ID NO: 53919 - DNA, 80 bp, synthetic construct
  source 1..80: mol_type = other DNA
ctaattagagacgaagttgtaaagatgttagaggaggcagttaagcatgatgatcatcttcttcaagattctgaattagc

SEQ ID NO: 53920 - DNA, 80 bp, synthetic construct
  source 1..80: mol_type = other DNA
taaagtaatacagaccttacacttatataagcaaacgcaaattaatttaatggattcatatgtacaaataccagatggag

SEQ ID NO: 53921 - DNA, 80 bp, synthetic construct
  source 1..80: mol_type = other DNA
tagctaacaaatattcatttgtgactaaaataattcgagttgatggcgatgataactatgcagttttacagttcaatact

SEQ ID NO: 53922 - DNA, 80 bp, synthetic construct
  source 1..80: mol_type = other DNA
cacttcatgaacaagaaattcaactttacttagtgtcattaggaattcctaaaattgatgctgatacgtacgtaggatcg

SEQ ID NO: 53923 - DNA, 80 bp, synthetic construct
  source 1..80: mol_type = other DNA
aagatttattcacaagataaatatcgcatactagagtcatacgtatacaatttactgtccataaattatggttgttatca

SEQ ID NO: 53924 - DNA, 80 bp, synthetic construct
  source 1..80: mol_type = other DNA
actgcagagaaagctaaaatttataaaaggaggctagatctattttcaattgtagcttcgacagtgaataaatatggagt

SEQ ID NO: 53925 - DNA, 80 bp, synthetic construct
  source 1..80: mol_type = other DNA
tttatactcaaactacatcgttaacaaattacgaggatttgaaactgatagagaatttatactaactaaaattatacaaa

SEQ ID NO: 53926 - DNA, 80 bp, synthetic construct
  source 1..80: mol_type = other DNA
tgttagatgcagcattagatcagttgaagactgaatacactgaagacgttgatgatgagatgtatagagaatataccacg

SEQ ID NO: 53927 - DNA, 80 bp, synthetic construct
  source 1..80: mol_type = other DNA
caggactgctctcaatgtcatcagcgtcaaatggtgagtcacgacaattgaaattcggtcgaaagactattttttccaca

SEQ ID NO: 53928 - DNA, 80 bp, synthetic construct
  source 1..80: mol_type = other DNA
caaaaaaaggactatctttaaaaaacgtttttctagaatataaagacgtcactgaaaacgcaactttactgtctatacta

SEQ ID NO: 53929 - DNA, 80 bp, synthetic construct
  source 1..80: mol_type = other DNA
aactgctctcgtatggagatgttactaggtttctatcaagcaatgctatggtgttatacactgatgtgtcacaatgggat

SEQ ID NO: 53930 - DNA, 80 bp, synthetic construct
  source 1..80: mol_type = other DNA
tgacatcagtagctatcactggatcgcttagattgtttccatcagaaagagttttaacaactaactctacatttaaggtc

SEQ ID NO: 53931 - DNA, 80 bp, synthetic construct
  source 1..80: mol_type = other DNA
tcgtattcgtatgacaagtataacgcagtagaacggaagctagtacattatgcaaaaggtaagcctttagaagctgattt

SEQ ID NO: 53932 - DNA, 80 bp, synthetic construct
  source 1..80: mol_type = other DNA
ttcgattctgaagacttcataattgaatatggtactacagatgatgaggtgtacattcaaagagcattcatgtcattatc

SEQ ID NO: 53933 - DNA, 80 bp, synthetic construct
  source 1..80: mol_type = other DNA
aagccagaaatcaggaatagcagatgaaatcgcagcatcacagacgtttaaaaactatgtgtctaagctttcagaccaac

SEQ ID NO: 53934 - DNA, 80 bp, synthetic construct
  source 1..80: mol_type = other DNA
tattagtatcaaaaaatacaattgtttcaagaggtatagcactaactgaaaaagcaaagttaaattcatatgcacctatt

SEQ ID NO: 53935 - DNA, 80 bp, synthetic construct
  source 1..80: mol_type = other DNA
tccttagagaagcgtcgtgcccaaatctctgctctgctaactatgttacagaagccagtgacatttaagtcaaataaaat

SEQ ID NO: 53936 - DNA, 80 bp, synthetic construct
  source 1..80: mol_type = other DNA
aactattaatgacattttacgcgatattaaaccatactttgtaacaagtgaggctaatctgcccatgcagtatcaaaaat

SEQ ID NO: 53937 - DNA, 80 bp, synthetic construct
  source 1..80: mol_type = other DNA
ttatgccaactttgcctaataacgttcaatatataatacaatgcattgggtcaagaacttatcagattgaagatgatgga

SEQ ID NO: 53938 - DNA, 80 bp, synthetic construct
  source 1..80: mol_type = other DNA
acaagaaattcaactttacttagtgtcattgggaattcctaagattgatgctgatacttacgtaggatcgaagatttatt

SEQ ID NO: 53939 - DNA, 80 bp, synthetic construct
  source 1..80: mol_type = other DNA
cacaagataaatatcgcatactagagtcatacgtatacaatttgttgtctataaattatggttgttatcaactttttgac

SEQ ID NO: 53940 - DNA, 80 bp, synthetic construct
  source 1..80: mol_type = other DNA
aaacgcaaatgaattggactatgagaataataaattaactagtgatctatttccaacagctgaagaatatactgattctt

SEQ ID NO: 53941 - DNA, 80 bp, synthetic construct
  source 1..80: mol_type = other DNA
taatggatccagcgatcttgacatcactgtcttcaaatttaaatgcagttatgttttggttggagagacatgcaaatgat

SEQ ID NO: 53942 - DNA, 80 bp, synthetic construct
  source 1..80: mol_type = other DNA
ttcatattcaaatagatccactttagctaagatcgtttcgtcaccaatgtcaattttagtcgcgttagtagatataaacg

SEQ ID NO: 53943 - DNA, 80 bp, synthetic construct
  source 1..80: mol_type = other DNA
gatgagctaaatgagatgcttgataatatgaagaaagctggactagtcgatataccaaaaatgatacaagactggttaat

SEQ ID NO: 53944 - DNA, 80 bp, synthetic construct
  source 1..80: mol_type = other DNA
agattgttcaattgataagtttcctttgatggcaaagatttattcatggtcttttcacgtaggattcagaaaacagaaaa

SEQ ID NO: 53945 - DNA, 80 bp, synthetic construct
  source 1..80: mol_type = other DNA
tacgccaaactagaaattattaattacgctataaaaaacggttcatggatcagtttattttgtaactatccaaagtctga

SEQ ID NO: 53946 - DNA, 80 bp, synthetic construct
  source 1..80: mol_type = other DNA
gctgcttttttcaaggaataatatagtatctagaggaatagctttgactgagaaagcaaagttgaattcatatgcaccaa

SEQ ID NO: 53947 - DNA, 80 bp, synthetic construct
  source 1..80: mol_type = other DNA
caaaggtagtacaaacactgaatttatataaacaaacacaaattaatctcatggattcatacgttcaaatacctgatggt

SEQ ID NO: 53948 - DNA, 80 bp, synthetic construct
  source 1..80: mol_type = other DNA
ttcaaatgacgttgctgatgcaaacaaaatttataaacgtagactggatctatttaccatagtagcatctacaataaata

SEQ ID NO: 53949 - DNA, 80 bp, synthetic construct
  source 1..80: mol_type = other DNA
aatatggagtgcctagacataatgaaaaatacagatatgaatacgaggtgatgaaggataaaccgtactacttagtaaca

SEQ ID NO: 53950 - DNA, 80 bp, synthetic construct
  source 1..80: mol_type = other DNA
gcgcaacatgctgttgtggagaaaatgctactatacgcaaagcataccagggagtatgcggaattttattcacagtcaaa

SEQ ID NO: 53951 - DNA, 80 bp, synthetic construct
  source 1..80: mol_type = other DNA
tcagttgttatcatatggtgatgttacgagattcctgtctagtaattctatggtattatacacagacgtctcacaatggg

SEQ ID NO: 53952 - DNA, 80 bp, synthetic construct
  source 1..80: mol_type = other DNA
acaatgcggtggagcgaaaattagttaattatgcaagaggtaaaccgttagaagccgatttaacagcaaatgagttagat

SEQ ID NO: 53953 - DNA, 80 bp, synthetic construct
  source 1..80: mol_type = other DNA
tttatttagaaaaacgtcgtgcacaaatatcagcattattgactatgttgcagaagccggtatcgttcaagtcaaacaaa

SEQ ID NO: 53954 - DNA, 80 bp, synthetic construct
  source 1..80: mol_type = other DNA
aacttcgttgtcttcaaatttaaatgcagttatgttttggctagaacgacactcaaatgatgttgctgacgcgaataaag

SEQ ID NO: 53955 - DNA, 80 bp, synthetic construct
  source 1..80: mol_type = other DNA
cttgggctaattcatccatagaaatgctaatgtcagtattttcacatgaagattatttaatagcgaaggaactgataatt

SEQ ID NO: 53956 - DNA, 80 bp, synthetic construct
  source 1..80: mol_type = other DNA
ttatcatattcaaacagatcaacgttagccaaattggtttcatctccgatgtcgatattagttgcattaatagacattaa

SEQ ID NO: 53957 - DNA, 80 bp, synthetic construct
  source 1..80: mol_type = other DNA
tgcgggccggctactcttctttcccttctctcgtcttcctcggtcaacctctgaagttcctcttcctcctccctgctgag

SEQ ID NO: 53958 - DNA, 80 bp, synthetic construct
  source 1..80: mol_type = other DNA
ggatcggatgggaagagtagatcctatgggaatccccggtctcctctcaggtccagcccctccccggtccgagcgaaggg

SEQ ID NO: 53959 - DNA, 80 bp, synthetic construct
  source 1..80: mol_type = other DNA
ctccagtcggcgggccggctactcttctttccctttcctcgtcctctctggtcagccttctgagttcctcttcttcctcc

SEQ ID NO: 53960 - DNA, 80 bp, synthetic construct
  source 1..80: mol_type = other DNA
ggatcggatgggaagagtatatcctatgggaatccccctcctcccctcacgtccagcccctccccgtgtctgtggaaggg

SEQ ID NO: 53961 - DNA, 80 bp, synthetic construct
  source 1..80: mol_type = other DNA
ggactccgggacgccttgcatgttggggacgaagccgcccccgggcgctcccctcgccaatccctcggaggtgttcacat

SEQ ID NO: 53962 - DNA, 80 bp, synthetic construct
  source 1..80: mol_type = other DNA
cgcgggccggctactcttcttttcctttcctcgtcttccttggtcaacttccgaagttcctcttcctcctcccggctgag

SEQ ID NO: 53963 - DNA, 80 bp, synthetic construct
  source 1..80: mol_type = other DNA
ggatcggatgggaagagtatatcctacgggaatcctcgttcccccctcacgtccagcccctccccggtcctggtaaaggg

SEQ ID NO: 53964 - DNA, 80 bp, synthetic construct
  source 1..80: mol_type = other DNA
gaaagaaggacgcgagacgggactcgtgagtgaaaacccgctttattcactggggtcgacaactctggggagagaaggga

SEQ ID NO: 53965 - DNA, 80 bp, synthetic construct
  source 1..80: mol_type = other DNA
atgttggatgccgcattagatcaattgaaaactgagtatacagaagatgtagatgatgaaatgtatcaagaatacacaat

SEQ ID NO: 53966 - DNA, 80 bp, synthetic construct
  source 1..80: mol_type = other DNA
gatatacttagagatataaagccttttttcattataagtgaggcgcatctgtcgatacaatatcaaaaatttatgccaac

SEQ ID NO: 53967 - DNA, 80 bp, synthetic construct
  source 1..80: mol_type = other DNA
tttaccagataatgtgcagtatataattcagtgtataggatccagaacctatcaaattgaagatgatggttcaaagtcag

SEQ ID NO: 53968 - DNA, 80 bp, synthetic construct
  source 1..80: mol_type = other DNA
tcgactgctccattgaaaaatttccactgatggctaaaatatattcttggtcatttcatgtcgggttcagaaaacagaaa

SEQ ID NO: 53969 - DNA, 80 bp, synthetic construct
  source 1..80: mol_type = other DNA
aactcttatcgtacggtgatgttacacgtttcctttctaataattctatggtgttatacacagacgtgtctcaatgggat

SEQ ID NO: 53970 - DNA, 80 bp, synthetic construct
  source 1..80: mol_type = other DNA
attaatggatccagctattttagcttcgttgtcatcaaatttaatagccgtcatgttttggttagatagccattcaaatg

SEQ ID NO: 53971 - DNA, 80 bp, synthetic construct
  source 1..80: mol_type = other DNA
atgttgctgatgcaatcaaaatttataaaagcagattagatttatttactatagtagcttcaacagtaaataaatatggt

SEQ ID NO: 53972 - DNA, 80 bp, synthetic construct
  source 1..80: mol_type = other DNA
tgggctaactcttcaattgaaatgcttatgttagtattttcacatgaagattatataattgcaagagacttgattgtgtt

SEQ ID NO: 53973 - DNA, 80 bp, synthetic construct
  source 1..80: mol_type = other DNA
gcaataaagaatgtatatgatatgaagatagagtgtccacattcagtcaactttggagagaccagtgttacaggtcaagt

SEQ ID NO: 53974 - DNA, 80 bp, synthetic construct
  source 1..80: mol_type = other DNA
ttgccactatcaacaccctgacaaaggtaagttggaggaaaaaggctgatcaggtctcagctagtcaaaactcctttgaa

SEQ ID NO: 53975 - DNA, 80 bp, synthetic construct
  source 1..80: mol_type = other DNA
tcaaaagaactcaaagcacataacctatcatgcccgcaatctgaatgcccttactgtttcacacattgtgagcccacaga

SEQ ID NO: 53976 - DNA, 80 bp, synthetic construct
  source 1..80: mol_type = other DNA
gtaattgaagcagagactagtttcaaaggattgtgtatgcttaagcacaggatgattgaagaatcatttaaaaatagaag

SEQ ID NO: 53977 - DNA, 80 bp, synthetic construct
  source 1..80: mol_type = other DNA
ggaatcgcttgctggttcataaaatctggagaatgggtgaagggcatctttaatggtaactggatcgtcttgattgtctt

SEQ ID NO: 53978 - DNA, 80 bp, synthetic construct
  source 1..80: mol_type = other DNA
cgaattgccagcacttccaatcacagaggcagaacagcttgtcccagaaagttcctgcaacatggataaccaccaatctc

SEQ ID NO: 53979 - DNA, 80 bp, synthetic construct
  source 1..80: mol_type = other DNA
caaaagtagtgcaaacgctgaacttgtataaacaaacgcaaattaaccttatggattcgtatgttcaaatccctgacggt

SEQ ID NO: 53980 - DNA, 80 bp, synthetic construct
  source 1..80: mol_type = other DNA
aacgtaattaaaaagattcaatacggagctgttgcttcaggagaaaaacagactaaagcggcaaattctatagctaattt

SEQ ID NO: 53981 - DNA, 80 bp, synthetic construct
  source 1..80: mol_type = other DNA
tcatgtactcgaattacatagtcaataaactacgagggtttgaaacagacagagaatttatattaactaaaattatacaa

SEQ ID NO: 53982 - DNA, 80 bp, synthetic construct
  source 1..80: mol_type = other DNA
atgacatcggtagccataactggatcattgagactatttccgtcagaacgagtgttgactactaattctacatttaaagt

SEQ ID NO: 53983 - DNA, 80 bp, synthetic construct
  source 1..80: mol_type = other DNA
actgttagtgtcgaaaaatgcgattgtgtctaaaggtatagcggtaacagagaaagcaaaattgaattcgtacgcaccag

SEQ ID NO: 53984 - DNA, 80 bp, synthetic construct
  source 1..80: mol_type = other DNA
ttactattaatgacattttacgtgatataaaaccattttttgttaccgccgaagccgatttaccaattcaatataggaag

SEQ ID NO: 53985 - DNA, 80 bp, synthetic construct
  source 1..80: mol_type = other DNA
ttcatgcctacgttacctgacaatgttcaatatgttatacaatgtataggatcaaggacataccaaatagaagatagcgg

SEQ ID NO: 53986 - DNA, 80 bp, synthetic construct
  source 1..80: mol_type = other DNA
tgacagcgaatgaacttgattatgaaaataacaaaataacctctgaattgtttcactcagctgaagaatatactgattca

SEQ ID NO: 53987 - DNA, 80 bp, synthetic construct
  source 1..80: mol_type = other DNA
ttaatggatcccgctatattaacttcactatcttcaaatttaaatgcagttatgttctggttagagcgacattcaaacga

SEQ ID NO: 53988 - DNA, 80 bp, synthetic construct
  source 1..80: mol_type = other DNA
cgttgctgatgcaaataaaatttacaaacgtagattggatttattcactatggtagcatctacagtgaacaagtatggag

SEQ ID NO: 53989 - DNA, 80 bp, synthetic construct
  source 1..80: mol_type = other DNA
tgccgagacacaacgagaaatacaggtatgattatgaagtgatgaaggataaaccatactatctagtaacttgggctaat

SEQ ID NO: 53990 - DNA, 80 bp, synthetic construct
  source 1..80: mol_type = other DNA
aggatcggatgggaagagtatatcctatgggaagccccgttctcctctcgtgtccagcccctccccggtccgggagaagg

SEQ ID NO: 53991 - DNA, 80 bp, synthetic construct
  source 1..80: mol_type = other DNA
agggtcggatgggaaaagtatatcctatgggaatccccggtttcccgtcaggtccagcccctccccggtccgagtgaagg

SEQ ID NO: 53992 - DNA, 80 bp, synthetic construct
  source 1..80: mol_type = other DNA
gaaagaaggacgcgagacacgaacccgtgaagtgttttccactttattcactggggtcgacaactctggggagaaaaggg

SEQ ID NO: 53993 - DNA, 80 bp, synthetic construct
  source 1..80: mol_type = other DNA
aggatcggctgggaagagtatatcctatgggaatccgccagttcccctgatgtccagcccctccccggttctggtgaagg

SEQ ID NO: 53994 - DNA, 80 bp, synthetic construct
  source 1..80: mol_type = other DNA
gacgggccggctgttcttctttcccttttctcgtcctccacggtcaacttcctgagttcctcttcttcttccttgctgag

SEQ ID NO: 53995 - DNA, 80 bp, synthetic construct
  source 1..80: mol_type = other DNA
aggatcggctgggaagagtctatcctatgggaatccctggtttcccctcacgtccagcccctccccggtccgatggaagg

SEQ ID NO: 53996 - DNA, 80 bp, synthetic construct
  source 1..80: mol_type = other DNA
agggtcggctgggaagagtatatcctatggaaatccgtggcttccccttatgtccagtccctctccggtccgagaaaagg

SEQ ID NO: 53997 - DNA, 80 bp, synthetic construct
  source 1..80: mol_type = other DNA
cccccagccgacgggccggccactcttcttttccttctctcgtcttcctcggtcaacctccgaagttcctcttcctcctc

SEQ ID NO: 53998 - DNA, 80 bp, synthetic construct
  source 1..80: mol_type = other DNA
gggactccgggacaccttgcatgttcgggacgaagccgcccccgggcgctcccctcgatccaccttcgaggaggttcact

SEQ ID NO: 53999 - DNA, 80 bp, synthetic construct
  source 1..80: mol_type = other DNA
aggatcggatgggaagagtatatcctatgggaatccctggtttcccctcaggtccagcccctccccagttctggtgaagg

SEQ ID NO: 54000 - DNA, 80 bp, synthetic construct
  source 1..80: mol_type = other DNA
aggatcggttgggaagagtagatcctatgggaatccctggcttccccttacgtccagcccctccccggtcctggagaagg

SEQ ID NO: 54001 - DNA, 80 bp, synthetic construct
  source 1..80: mol_type = other DNA
gcgggccggctaattcttctttcccttctctcgtcttcctgggtcaacctctcgtgttccccttcctcctccttgctgag

SEQ ID NO: 54002 - DNA, 80 bp, synthetic construct
  source 1..80: mol_type = other DNA
ggatcggctgggaggagtatatctcatgggattccctggtttcccctcaggtccagcccccccccggtcctggtgaaggg

SEQ ID NO: 54003 - DNA, 80 bp, synthetic construct
  source 1..80: mol_type = other DNA
gaaagaaggacgcgaaacgcaatccgtgagtggaaatctcgatttattcactggggtcgacaactctggggagaaaaggg

SEQ ID NO: 54004 - DNA, 80 bp, synthetic construct
  source 1..80: mol_type = other DNA
aggatcggatgggaagagtatatcctatgggaatccgcggtcccccctcgtgtccagcccctccccgtgtctgtggaagg

SEQ ID NO: 54005 - DNA, 80 bp, synthetic construct
  source 1..80: mol_type = other DNA
gaaagaagaacgcgagacgcgaacctgtgagtggaaacccgctttattcactggggtcgacaactctgaggagaaaaggg

SEQ ID NO: 54006 - DNA, 80 bp, synthetic construct
  source 1..80: mol_type = other DNA
gagactccggaactccttgcatgctggggacgaagccgcccccgggcgctcccctccgttcgccttcgaggtggttcaca

SEQ ID NO: 54007 - DNA, 80 bp, synthetic construct
  source 1..80: mol_type = other DNA
cctccaggcgacgggccggctactcttcttttcctttcctcgtcatctctggtcaacttcctgagttcctcttcttcctc

SEQ ID NO: 54008 - DNA, 80 bp, synthetic construct
  source 1..80: mol_type = other DNA
gacgggccggctactcttcttttcctttcctcgtcatctctggtcaacttcctgagttcctcttcttcctccccgctgag

SEQ ID NO: 54009 - DNA, 80 bp, synthetic construct
  source 1..80: mol_type = other DNA
aggatcggatgggaagagtatatcctatgggaatccctgcctgcccatcacgtccagtccatccccgtgtctagagaagg

SEQ ID NO: 54010 - DNA, 80 bp, synthetic construct
  source 1..80: mol_type = other DNA
agggtcggatgggaacagtatatcctatgggaatccccgcgagcccgtcacgtccagcccttctccgtgtctggtgaagg

SEQ ID NO: 54011 - DNA, 80 bp, synthetic construct
  source 1..80: mol_type = other DNA
aggatcggatgggaagagtatatcctacgggaatccgtgatcccccctcacgtccagcccctccccgcgtctggcgaagg

SEQ ID NO: 54012 - DNA, 80 bp, synthetic construct
  source 1..80: mol_type = other DNA
ggcgggccggctactcttccttcccttctctcgtcttcctcggtcaacttcctgagttcctcttcttcctccttgctgag

SEQ ID NO: 54013 - DNA, 80 bp, synthetic construct
  source 1..80: mol_type = other DNA
aggatcggatgggaaaagtatatcccacgggaagccccggtctcctctgacgtccagtccctctccgtgtctggagaagg

SEQ ID NO: 54014 - DNA, 80 bp, synthetic construct
  source 1..80: mol_type = other DNA
gtggcggctctaatttgtgaggcacttaattcaattaaagttactcaatctgatcttgctaatgttctttcgagagtagt

SEQ ID NO: 54015 - DNA, 80 bp, synthetic construct
  source 1..80: mol_type = other DNA
ggcaagcagcaaacacctttctcggtgccatacatctgggcccacgcattaacccttacactgcgcatctgagcgcgatg

SEQ ID NO: 54016 - DNA, 80 bp, synthetic construct
  source 1..80: mol_type = other DNA
gggcctaatgaagcaccccttgttccagtcaatccagaacagcccaattccattgcccaacgcatggagttggctgttgc

SEQ ID NO: 54017 - DNA, 80 bp, synthetic construct
  source 1..80: mol_type = other DNA
tatgctaaattagaagtgataaaccatgcgattaagaatggttcatgggtaagtctattctgtaactatccaaagtcaga

SEQ ID NO: 54018 - DNA, 80 bp, synthetic construct
  source 1..80: mol_type = other DNA
gacgtcgcatggaaaccaccgtgaacgcccacaggaacctgcccaaggtcttgcataagagaactcttggactttcaaca

SEQ ID NO: 54019 - DNA, 80 bp, synthetic construct
  source 1..80: mol_type = other DNA
tcaaagccaactcgttggggtagagccctcaggctcagggcctactcacaactgtgccagcagctcctcctcctgcctcc

SEQ ID NO: 54020 - DNA, 80 bp, synthetic construct
  source 1..80: mol_type = other DNA
gttgctgttggcattaacaggcgagaagagaggcggcagccacccctcctggaaggacaccttatgcccttgtcaccggg

SEQ ID NO: 54021 - DNA, 80 bp, synthetic construct
  source 1..80: mol_type = other DNA
cctcccgcgccccatcttattggggcctgctccccttgcgaatggcaggaaattgtttgactctagccagaagagcacct

SEQ ID NO: 54022 - DNA, 80 bp, synthetic construct
  source 1..80: mol_type = other DNA
cccgagagaacagcggtatgacggagtccgatgcatctcgccagcctgtacgctggcttctgcccttctgggtgatgact

SEQ ID NO: 54023 - DNA, 80 bp, synthetic construct
  source 1..80: mol_type = other DNA
cagcggtatgacggagtccgatgcatctcgccagcctgtacgctggcttctgcccttctgggtgatgactgcatctactg

SEQ ID NO: 54024 - DNA, 80 bp, synthetic construct
  source 1..80: mol_type = other DNA
ccggtgtcgggttgacaaggtttcaaaacgagccgtgacgcccattgacgtgatgaatgacacaaaaatgacttttactg

SEQ ID NO: 54025 - DNA, 80 bp, synthetic construct
  source 1..80: mol_type = other DNA
acactttccttggggctatccaccttggcccacgcatcaatccatataccgcccacctgagtgccatgtttgctggatgg

SEQ ID NO: 54026 - DNA, 80 bp, synthetic construct
  source 1..80: mol_type = other DNA
gaggatcggctgggaagagtatatcctatgggaatccctggctccctcttatgtccagcccctccccggtccgagtgaag

SEQ ID NO: 54027 - DNA, 80 bp, synthetic construct
  source 1..80: mol_type = other DNA
gacgggccggctactcttcttttcctttcctcgtcttccttggtcaacctcttaagttcctcttcttcctccttgctgag

SEQ ID NO: 54028 - DNA, 80 bp, synthetic construct
  source 1..80: mol_type = other DNA
aggatcggctgggaggggtagatcccatgggagtccccggtctcctctcaggtccagccccttcccggtccgaatgaagg

SEQ ID NO: 54029 - DNA, 80 bp, synthetic construct
  source 1..80: mol_type = other DNA
tcccccagccgacgggccggctattcttctttcccttctctcgtcttcctcggtcaacctcttaagttcctcttcttctt

SEQ ID NO: 54030 - DNA, 80 bp, synthetic construct
  source 1..80: mol_type = other DNA
gaggatcggatgggaagagtatatcctatggaaatccctgacttcccctcacgtccagcccctccccgtgtctggtgaag

SEQ ID NO: 54031 - DNA, 80 bp, synthetic construct
  source 1..80: mol_type = other DNA
gattactccaagtgggactccacacaaaatcctgcagtaacggcagcgtcactagccatattggagagatttgctgagcc

SEQ ID NO: 54032 - DNA, 80 bp, synthetic construct
  source 1..80: mol_type = other DNA
atgaaagccacaatgtcccgtacactggaaatgtcttccaagtggaaactgtccacacgtatggtgatgattacattgtc

SEQ ID NO: 54033 - DNA, 80 bp, synthetic construct
  source 1..80: mol_type = other DNA
ctcaaagcttatgaagaccaccacgtcccatacactggcaatgtgtttcagatagagactgtccacacttatggtgatga

SEQ ID NO: 54034 - DNA, 80 bp, synthetic construct
  source 1..80: mol_type = other DNA
atgaagaccaccacgtcccatacactggcaatgtgtttcagatagagactgtccacacttatggtgatgattacattgtc

SEQ ID NO: 54035 - DNA, 80 bp, synthetic construct
  source 1..80: mol_type = other DNA
atgaacaacatggggcaccttacactggtaatgtgtttcaggtggagactgttcacacatatggtgatgattacattgtc

SEQ ID NO: 54036 - DNA, 80 bp, synthetic construct
  source 1..80: mol_type = other DNA
gcgattcactgctgctcttcataatggattgcctgatgacaggttaaaaaactgtgttattgatgccttacgccatgtat

SEQ ID NO: 54037 - DNA, 80 bp, synthetic construct
  source 1..80: mol_type = other DNA
gtggcaatgtctttattattcaaagaaatctggacgaggttatttccagaattagactgcttttttgaatttgcccacca

SEQ ID NO: 54038 - DNA, 80 bp, synthetic construct
  source 1..80: mol_type = other DNA
atggagggcttgggccagccacagtcccaaagggacccacaggttatgaaacaggttgttactccccaggacaccattgg

SEQ ID NO: 54039 - DNA, 80 bp, synthetic construct
  source 1..80: mol_type = other DNA
cgggggcagtgaccagtaatgtgcccaactgcatccgggaatgttttgctgcggttaccacaataccatggaccacccgg

SEQ ID NO: 54040 - DNA, 80 bp, synthetic construct
  source 1..80: mol_type = other DNA
caagcagctaacactttccttggtgccatacacctgggcccacgcatcaacccctacactgcgcacctaagtgccatgtt

SEQ ID NO: 54041 - DNA, 80 bp, synthetic construct
  source 1..80: mol_type = other DNA
acactttccttggtgccatacacctgggcccacgcatcaacccctacactgcgcacctaagtgccatgtttgctggctgg

SEQ ID NO: 54042 - DNA, 80 bp, synthetic construct
  source 1..80: mol_type = other DNA
accaaccagtgcactattgctgcccactcaagttgagacaccaaacgctagtgctcagcgtgtggaacttgcaatggcca

SEQ ID NO: 54043 - DNA, 80 bp, synthetic construct
  source 1..80: mol_type = other DNA
ctggttataaataccttggtccatttaatcctcttgaaaacggtgaaccagttaataaagctgatcgtgctgctcaagct

SEQ ID NO: 54044 - DNA, 80 bp, synthetic construct
  source 1..80: mol_type = other DNA
taaagagcgagctcaaaaaagacatttttactttgcaaactcaaataaaggtgctaaaaaaacaaaaaacaacgagccta

SEQ ID NO: 54045 - DNA, 80 bp, synthetic construct
  source 1..80: mol_type = other DNA
tagagtcatccagacactaaatctatataaacaaacgcaaattaatttgatggactcatatgttcaaataccagatggca

SEQ ID NO: 54046 - DNA, 80 bp, synthetic construct
  source 1..80: mol_type = other DNA
cttccaatcctgaactagagaaaaggtgtattgattttcacgctaaatgtgtcgataactcaaagagaggcttatcacta

SEQ ID NO: 54047 - DNA, 80 bp, synthetic construct
  source 1..80: mol_type = other DNA
ataatgctgtagagcggaagttagttaattatgctaaaggtaaaccattagaagcagatttgacggcaaacgaacttgat

SEQ ID NO: 54048 - DNA, 80 bp, synthetic construct
  source 1..80: mol_type = other DNA
tatgaaaataataaaataacttctgaattattcaaatcagctgaggaatatactgattcgttaatggatcctgccatact

SEQ ID NO: 54049 - DNA, 80 bp, synthetic construct
  source 1..80: mol_type = other DNA
aacttcattatcatctaatttaaatgcagttatgttttggttggaacgccactcaaatgatgttgctgacgcaagcaaaa

SEQ ID NO: 54050 - DNA, 80 bp, synthetic construct
  source 1..80: mol_type = other DNA
tttataaacgcagattagatttattcactatagtagcgtctacaatcaataaatatggagtaccaaggcataacgaaaaa

SEQ ID NO: 54051 - DNA, 80 bp, synthetic construct
  source 1..80: mol_type = other DNA
ggctattaaagatgtacaatggggaagtacaatctaatcttgtcagaatatttatcatttgtttacaattcacaatctgc

SEQ ID NO: 54052 - DNA, 80 bp, synthetic construct
  source 1..80: mol_type = other DNA
cttccaattcagaattagaaaaaagatgtatcgaatttcatgctaaatgtgttgacagttctaagaaaggtttgtcatta

SEQ ID NO: 54053 - DNA, 80 bp, synthetic construct
  source 1..80: mol_type = other DNA
tgattgacgcagcattagaccaattgaagacagagtacactgaagatgtagataatgagatgtataatgagtatacaatg

SEQ ID NO: 54054 - DNA, 80 bp, synthetic construct
  source 1..80: mol_type = other DNA
ttaattagagatgaaatagtcaagatgctagaagtaccagttaaacatgatgatcatctacttcgcgattcagaattggc

SEQ ID NO: 54055 - DNA, 80 bp, synthetic construct
  source 1..80: mol_type = other DNA
ccggattgttatcaatgtcatcggcttcaaatggtgaatcaaggcagcttaaatttggtcgtaaaacgatattttcaact

SEQ ID NO: 54056 - DNA, 80 bp, synthetic construct
  source 1..80: mol_type = other DNA
aagaaaaatatgcatgtcatggatgatattgcacatggaaaatatactccgggtgttattcctccagtaaacgtagatag

SEQ ID NO: 54057 - DNA, 80 bp, synthetic construct
  source 1..80: mol_type = other DNA
accaattccattaggtcgtagagatgttcctggacggagaacaagaattatattcatattaccatatgaatattttattg

SEQ ID NO: 54058 - DNA, 80 bp, synthetic construct
  source 1..80: mol_type = other DNA
cccagcacgctgtcgtagaaaaaatgttattatacgcaaaacatactagagaatatgcagaattttactcgcaatcaaat

SEQ ID NO: 54059 - DNA, 80 bp, synthetic construct
  source 1..80: mol_type = other DNA
aattattatcatatggtgatgttacaagattcttatccagtaattctatggtattatacacagacgtctcacaatgggat

SEQ ID NO: 54060 - DNA, 80 bp, synthetic construct
  source 1..80: mol_type = other DNA
tcgtcacaacataacacacagccatttagaaaaggaataattatgggtttagatatgttatccaatatgactaatgatcc

SEQ ID NO: 54061 - DNA, 80 bp, synthetic construct
  source 1..80: mol_type = other DNA
atgtaatcaaaaagattcagtatggtgctgttgcttcaggagaaaaacaaactaaggcagctaactctatagctaactta

SEQ ID NO: 54062 - DNA, 80 bp, synthetic construct
  source 1..80: mol_type = other DNA
aaacctttattcgaagaatataaagatgtaatagataatgcaactctactatctatattatcatattcttatgacaaata

SEQ ID NO: 54063 - DNA, 80 bp, synthetic construct
  source 1..80: mol_type = other DNA
gcactcattaaaacagtattgtcaagaattgcgaataagtattcttttataaccaaaataatcagagtcgatggtgatga

SEQ ID NO: 54064 - DNA, 80 bp, synthetic construct
  source 1..80: mol_type = other DNA
taattatgcagtactacaatttaacactgatgtcactaaacaaatggtccaagatgtatcgaacgatgtgagatatatat

SEQ ID NO: 54065 - DNA, 80 bp, synthetic construct
  source 1..80: mol_type = other DNA
attctagaatgaatgctaaagttaaagcattggtatctacagtcggtattgaaatagcaaaaagatatatagcaggagga

SEQ ID NO: 54066 - DNA, 80 bp, synthetic construct
  source 1..80: mol_type = other DNA
aaaatatttttcagagctggtataaacttattaaataatgagaaacgtgggcaaagtacacaatgggatcaagcagctat

SEQ ID NO: 54067 - DNA, 80 bp, synthetic construct
  source 1..80: mol_type = other DNA
tttgactcagaagatttcattatagaatatggaacaactgacgatgaagtatatatacaaagagcatttatgtcactgtc

SEQ ID NO: 54068 - DNA, 80 bp, synthetic construct
  source 1..80: mol_type = other DNA
tagtcaaaagtcaggaatagctgatgaaatagcgtcttcacaaacatttaaaaattatgttaacaagttatctgaccaat

SEQ ID NO: 54069 - DNA, 80 bp, synthetic construct
  source 1..80: mol_type = other DNA
tattaatatcaaaaaacgtaattgtatccaaaggtatagctataacagaaaaggcaaaattgaattcatatgcaccagtt

SEQ ID NO: 54070 - DNA, 80 bp, synthetic construct
  source 1..80: mol_type = other DNA
tatttagaaaaacgtcgtgcgcaaatatcagcgttattaactatgttgcaaaaaccagtgtcatttaaatcaaataaaat

SEQ ID NO: 54071 - DNA, 80 bp, synthetic construct
  source 1..80: mol_type = other DNA
tactattaatgatattttgcgtgacataaaaccattttttgtcacttctgaagctaatttgccaattcaatacaaaaaat

SEQ ID NO: 54072 - DNA, 80 bp, synthetic construct
  source 1..80: mol_type = other DNA
ttatgccaactctacctaataatgtccaatatgttatacaatgcataggatcgaggacgtatcaaatagaagatagtggg

SEQ ID NO: 54073 - DNA, 80 bp, synthetic construct
  source 1..80: mol_type = other DNA
tcaaaatcatctatttcgaagctaatatcaaaatattcagtttacaaaccatctattgaagaactatataaagttatatc

SEQ ID NO: 54074 - DNA, 80 bp, synthetic construct
  source 1..80: mol_type = other DNA
tttaagagaacaagaaatacagttgtatttagtttcattaggagttccaccagttgacgcaggcacgtacgttgggtcaa

SEQ ID NO: 54075 - DNA, 80 bp, synthetic construct
  source 1..80: mol_type = other DNA
gaatatattcgcaggataagtataaaatattagaatcttacgtatataatttattatcaattaattacggatgttatcaa

SEQ ID NO: 54076 - DNA, 80 bp, synthetic construct
  source 1..80: mol_type = other DNA
ttaattctccagatttagaaaaacttatacgaattccttttaaaggcaagataccagccgtaacatttatattgcatctt

SEQ ID NO: 54077 - DNA, 80 bp, synthetic construct
  source 1..80: mol_type = other DNA
tatgctaaacttgaaataataaactatgctattaagaatggagcttggattagtttgttttgtaactacccaaaatctga

SEQ ID NO: 54078 - DNA, 80 bp, synthetic construct
  source 1..80: mol_type = other DNA
aatgattaaattatggaagaaaatgtggaatataacagcattacggtctccctacactagtgcgaacttctttcaagatt

SEQ ID NO: 54079 - DNA, 80 bp, synthetic construct
  source 1..80: mol_type = other DNA
ttacggcaaacgagattgattatgaaaataataacggatctcctgaattgtttcagtcttccgaagaatatactgattca

SEQ ID NO: 54080 - DNA, 80 bp, synthetic construct
  source 1..80: mol_type = other DNA
aaaatgtggaatataacagcattacggtctccctacactagtgcgaacttctttcaagattagagtgcttagatgtgacc

SEQ ID NO: 54081 - DNA, 80 bp, synthetic construct
  source 1..80: mol_type = other DNA
atcatattcaaatagatcgacattagctaaactagtttcatctccaatgtcgatattagttgcattaatagatatcaatg

SEQ ID NO: 54082 - DNA, 80 bp, synthetic construct
  source 1..80: mol_type = other DNA
gtacgtttattacaaatgaagagttagaacttgaattttcagataaatatgttaaggcaattgtacctgatcaaattttt

SEQ ID NO: 54083 - DNA, 80 bp, synthetic construct
  source 1..80: mol_type = other DNA
gatgaactacaggaaatgatcgacaatatgagaaaagctggtttagtagatataccaagaatgattcaagaatggttagt

SEQ ID NO: 54084 - DNA, 80 bp, synthetic construct
  source 1..80: mol_type = other DNA
tgattgttcattagagaaatttacactgatgtcaaaaatttattcttggtcatttcatgttggatttagaaaacaaaaga

SEQ ID NO: 54085 - DNA, 80 bp, synthetic construct
  source 1..80: mol_type = other DNA
ttcctctacaagatattctgcgtgccagaaaaacatattttgtctattccgaaggtaatcatgcaatacagtacagaaat

SEQ ID NO: 54086 - DNA, 80 bp, synthetic construct
  source 1..80: mol_type = other DNA
tataatccaactctaccgtataaagtcccatatgttatacaatgcacaatctcgagaacgtatcatatagaagatagtgg

SEQ ID NO: 54087 - DNA, 80 bp, synthetic construct
  source 1..80: mol_type = other DNA
ctaccattcgattttacttctccagagttagaaaaacttaaacgaattccttttaaaggcaagatgccagccgtaacatt

SEQ ID NO: 54088 - DNA, 80 bp, synthetic construct
  source 1..80: mol_type = other DNA
tgacagtgaatgaattagattatgagaataacaagataacgtctgagcttttccaaacggcagaagaatacactgattca

SEQ ID NO: 54089 - DNA, 80 bp, synthetic construct
  source 1..80: mol_type = other DNA
cttccaatccggatctagaaaaaaggtgtgtagaatttcattcaaaatgtttagacaattcaaagaaaggactatcttta

SEQ ID NO: 54090 - DNA, 80 bp, synthetic construct
  source 1..80: mol_type = other DNA
ttgattagggatgaaatcgtgaaaatgctccaagaggttgttaaacatgatgatcatcttcttcgagattctgaactagc

SEQ ID NO: 54091 - DNA, 80 bp, synthetic construct
  source 1..80: mol_type = other DNA
aggactattatcaatgtcatcagcatcaaatggtgaatcgcgacaattaaaatttggccggaaaaccattttttctacga

SEQ ID NO: 54092 - DNA, 80 bp, synthetic construct
  source 1..80: mol_type = other DNA
aaaagaacatgcacgtaatggatgatatggctaatggaaaatatacaccgggagtaataccaccagttaatgttgataaa

SEQ ID NO: 54093 - DNA, 80 bp, synthetic construct
  source 1..80: mol_type = other DNA
aacttctttcatatggtgacgttactagatttttatcgaataatgctatggtgctatatactgatgtatcgcaatgggac

SEQ ID NO: 54094 - DNA, 80 bp, synthetic construct
  source 1..80: mol_type = other DNA
ccaaagtaatacaaacgctgaatttgtataagcaaacgcaagttaatttaatggattcatatgtgcaaataccagatgga

SEQ ID NO: 54095 - DNA, 80 bp, synthetic construct
  source 1..80: mol_type = other DNA
aatgtaattaagaagatacaatatggagcggtcgcatcaggcgaaaaacaaacaaaagctgctaattctatagctaattt

SEQ ID NO: 54096 - DNA, 80 bp, synthetic construct
  source 1..80: mol_type = other DNA
aaaagtgtttttctagaatacaaagatgtcatcgagaacgcaactttgttatctatattatcatattcatatgataagta

SEQ ID NO: 54097 - DNA, 80 bp, synthetic construct
  source 1..80: mol_type = other DNA
tgcaaacaaatattcattcacaactaaaataattagggtagacggagatgacaattatgcagttttacaatttaacactg

SEQ ID NO: 54098 - DNA, 80 bp, synthetic construct
  source 1..80: mol_type = other DNA
aagtcactaagcagatggtgcaggatgtttcaaatgacgttagagacacttacgcacgaatgaatgctaaagtgaaggca

SEQ ID NO: 54099 - DNA, 80 bp, synthetic construct
  source 1..80: mol_type = other DNA
cggtcttatattcaaattacattgttaacagattgaggggtttcgagactgatagagagtttatactgacaaaaatcatg

SEQ ID NO: 54100 - DNA, 80 bp, synthetic construct
  source 1..80: mol_type = other DNA
caaatgacatcagtagctattactggatcgcttagattatttccgtcggaaagagttttaacaaccaactccacattcaa

SEQ ID NO: 54101 - DNA, 80 bp, synthetic construct
  source 1..80: mol_type = other DNA
aatctttgattctgaagatttcataattgagtacggtacaacggatgatgaagtatacattcagagagcattcatgtcgt

SEQ ID NO: 54102 - DNA, 80 bp, synthetic construct
  source 1..80: mol_type = other DNA
aagtcaaaaatcagggatagcagatgagattgcggcatcacaaacatttaagaactatgtgtctaaactttcagatcagc

SEQ ID NO: 54103 - DNA, 80 bp, synthetic construct
  source 1..80: mol_type = other DNA
atctttggaaaagcgtcgtgcacaaatttctgctttactaacaatgttacagaagccagtgacgtttaaatcgaataaga

SEQ ID NO: 54104 - DNA, 80 bp, synthetic construct
  source 1..80: mol_type = other DNA
taatgcagtagaacgaaagctagtgcattatgcaaaaggtaaacctttagaggctgatttagatgcaaatgaactggatt

SEQ ID NO: 54105 - DNA, 80 bp, synthetic construct
  source 1..80: mol_type = other DNA
taacaattaatgacattttacatgacattaagccatactttgtagtaagtgaagctagtctacccattcaatatcaaaga

SEQ ID NO: 54106 - DNA, 80 bp, synthetic construct
  source 1..80: mol_type = other DNA
tttatgccaacattgcctgataatgtccagtacgtaatacagtgtattggatcaagaacttatcagatagaagatgacgg

SEQ ID NO: 54107 - DNA, 80 bp, synthetic construct
  source 1..80: mol_type = other DNA
ccatttcaagactaatatcgaaatattcagtatatagaccatcagtagaagaattatataaggtaatatcgcttcatgaa

SEQ ID NO: 54108 - DNA, 80 bp, synthetic construct
  source 1..80: mol_type = other DNA
caagaaattcagctttatttagtgtcactgggagttccaaaaattgatgctgatacttatgtcggatcaaaaatatattc

SEQ ID NO: 54109 - DNA, 80 bp, synthetic construct
  source 1..80: mol_type = other DNA
atgaaaataataaattgactaatgaactgtttccgacagctgaagaatataccgattctttaatggacccagccatttta

SEQ ID NO: 54110 - DNA, 80 bp, synthetic construct
  source 1..80: mol_type = other DNA
acatcactctcttcaaatctgaatgcggtcatgttttggctagaaaaacatactaatgatactgcggaaaaagctaaaat

SEQ ID NO: 54111 - DNA, 80 bp, synthetic construct
  source 1..80: mol_type = other DNA
ttacaaaagaagactagatctattcacaattgtggcttcgacagtgaacaaatacggagtgcccagacataatgcaaaat

SEQ ID NO: 54112 - DNA, 80 bp, synthetic construct
  source 1..80: mol_type = other DNA
tgggcaaattcttcaattgaaatgttaatgtcagtattctctcacgaagattacttaattgcaagagaactaataattct

SEQ ID NO: 54113 - DNA, 80 bp, synthetic construct
  source 1..80: mol_type = other DNA
ttcatattcaaacagatctactttagctaaacttgtttcatcaccaatgtcaattttagttgcgttgatagatataaatg

SEQ ID NO: 54114 - DNA, 80 bp, synthetic construct
  source 1..80: mol_type = other DNA
gatgagttaaaagaaatgctgaataacatgaagaaggccggtctagttgacataccaaagatgatacaagattggctagt

SEQ ID NO: 54115 - DNA, 80 bp, synthetic construct
  source 1..80: mol_type = other DNA
agactgttcaatagaaaaatttcctctgatggcaaaaatctattcctggtccttccatgtcgggttcagaaaacaaaaaa

SEQ ID NO: 54116 - DNA, 80 bp, synthetic construct
  source 1..80: mol_type = other DNA
ctagtcagaagtcaggaatagctgatgagatagctgcatcatcaacgtttaagaattatgtgtctagattatctgggcag

SEQ ID NO: 54117 - DNA, 80 bp, synthetic construct
  source 1..80: mol_type = other DNA
actattcgactttaattcaccagatctagaaaaactgatcagaataccgtttaaaggaaaaataccagctgtcactttta

SEQ ID NO: 54118 - DNA, 80 bp, synthetic construct
  source 1..80: mol_type = other DNA
cgaagaatggtctatcactgaaaaaactattcaatgaatatagtgatgtcattgagaatgctacgttattatcaatatta

SEQ ID NO: 54119 - DNA, 80 bp, synthetic construct
  source 1..80: mol_type = other DNA
taacggtaaatgagcttgattatgaaaataacaaaataacttctgaactgtttcagtcagctgaagaatataccgattca

SEQ ID NO: 54120 - DNA, 80 bp, synthetic construct
  source 1..80: mol_type = other DNA
tggcttgttgtcaatgtcttcagcatcgaatggagaatccagacagcttaaatttggtagaaaaatagttttttcaacta

SEQ ID NO: 54121 - DNA, 80 bp, synthetic construct
  source 1..80: mol_type = other DNA
aagtcagagatcaggaatagctgatgaaatagctgcgtcaccaacatttaaaaattacgggtccagactatcagaaacga

SEQ ID NO: 54122 - DNA, 80 bp, synthetic construct
  source 1..80: mol_type = other DNA
cccttttttcaaaaaataatatagtatctagaggaatagctgtgactgaaaaagcaaagttaaattcatatgcaccaata

SEQ ID NO: 54123 - DNA, 80 bp, synthetic construct
  source 1..80: mol_type = other DNA
tctctaacaaatactcattcatcacaaaaataataagagttgacggcgatgataactatgctgtattacagtttaacacg

SEQ ID NO: 54124 - DNA, 80 bp, synthetic construct
  source 1..80: mol_type = other DNA
acgatatacttaaagatataaaaccgtttttcacattgagtgaagcacatttaccaatgcagtatcaaaagttcatgcca

SEQ ID NO: 54125 - DNA, 80 bp, synthetic construct
  source 1..80: mol_type = other DNA
aacttgccggaaaacgtacaatacattattcagtgtatagggtcaagaacttatcagattgaagatgatggttcaaaatc

SEQ ID NO: 54126 - DNA, 80 bp, synthetic construct
  source 1..80: mol_type = other DNA
acgaaaatgatactgctgaaaagcttaaaatttacaagagaagattggatttatttagtatagtagcctcaactgtaaac

SEQ ID NO: 54127 - DNA, 80 bp, synthetic construct
  source 1..80: mol_type = other DNA
gcacaacacgccgtagtggaaaaaatgctatcatacacaaagcacaccagagaatatgcggaattctattcacagtcgaa

SEQ ID NO: 54128 - DNA, 80 bp, synthetic construct
  source 1..80: mol_type = other DNA
tcagttactatcctatggtgatgtcacaagatttttgtcgagcaattctatggtgttatatacagacgtttcccagtggg

SEQ ID NO: 54129 - DNA, 80 bp, synthetic construct
  source 1..80: mol_type = other DNA
caaaagtggtgcagacactgaacttgtataaacaaacgcaaattaaccttatggactcatatgtacaaataccagacggt

SEQ ID NO: 54130 - DNA, 80 bp, synthetic construct
  source 1..80: mol_type = other DNA
gatgtgataaaaaagatacagtacggagctgtcgcctcgggtgagaaacagactaaagcagcgaattctatagctaattt

SEQ ID NO: 54131 - DNA, 80 bp, synthetic construct
  source 1..80: mol_type = other DNA
tatgtattcaaactacattgtaaataagctacgagggtttgaaactgatagagaattcatattgactaaaatcatacaga

SEQ ID NO: 54132 - DNA, 80 bp, synthetic construct
  source 1..80: mol_type = other DNA
tgacatctgtagctattactggatcactaaggttatttccatcagaacgcgtactaacaactaactccacgtttaaagta

SEQ ID NO: 54133 - DNA, 80 bp, synthetic construct
  source 1..80: mol_type = other DNA
actattagtatcaaaaaatgcaattgtctctaaagggatagcagtaacagaaaaagcgaaactaaactcatacgcgccgg

SEQ ID NO: 54134 - DNA, 80 bp, synthetic construct
  source 1..80: mol_type = other DNA
tctatttagaaaagcgacgtgctcaaatttccgcattattaactatgttgcaaaaaccagtgtcatttaaatcgagtaag

SEQ ID NO: 54135 - DNA, 80 bp, synthetic construct
  source 1..80: mol_type = other DNA
ttaatggatcccgctatattaacttcattatcatctaatttaaatgcagttatgttttggttggaacgccattcaaatga

SEQ ID NO: 54136 - DNA, 80 bp, synthetic construct
  source 1..80: mol_type = other DNA
tgttgccgatgcgaataaaatttacaaacgcagattagatttatttattatagtagcatctacaatcaataaatatggag

SEQ ID NO: 54137 - DNA, 80 bp, synthetic construct
  source 1..80: mol_type = other DNA
caatgtcccgacttatatcgaagtactcagtttataaaccgtcgatcgaagaactatataaagtaatttcattacatgaa

SEQ ID NO: 54138 - DNA, 80 bp, synthetic construct
  source 1..80: mol_type = other DNA
aatgaaatacaactatatttaatttcattaggcataccaaaaatagatgctgatacatatgttggttcaaaaatttactc

SEQ ID NO: 54139 - DNA, 80 bp, synthetic construct
  source 1..80: mol_type = other DNA
taattacgcagtactacagttcaatacagaagtaactaaacaaatggttcaagatgtatcaaatgatgtgagagaaacgt

SEQ ID NO: 54140 - DNA, 80 bp, synthetic construct
  source 1..80: mol_type = other DNA
acgcgcgaatgaatgctaaagttaaagccttagtatctacagtgggaatagaaatagctaaaaggtatattgcaggtggg

SEQ ID NO: 54141 - DNA, 80 bp, synthetic construct
  source 1..80: mol_type = other DNA
tgggcgaattcctcaattgaaatgctaatgtcagttttttctcacgaggattatttaattgcgaaggaactgatagtact

SEQ ID NO: 54142 - DNA, 80 bp, synthetic construct
  source 1..80: mol_type = other DNA
atcatattctaacagatcaactctggcgaaactggtgtcatcaccgatgtcaattctagtagctttagtggatataaacg

SEQ ID NO: 54143 - DNA, 80 bp, synthetic construct
  source 1..80: mol_type = other DNA
tgacagtgaatgagttggattatgaaaataacaagataacatctgaactattcccaacggcagaggaatatactgattta

SEQ ID NO: 54144 - DNA, 80 bp, synthetic construct
  source 1..80: mol_type = other DNA
ttgatggatccagcaattttaacttcattatcatcgaatttaaatgcagttatgttctggttggaaaaacatgaaaatga

SEQ ID NO: 54145 - DNA, 80 bp, synthetic construct
  source 1..80: mol_type = other DNA
actcaaatgacgttgctgatgcaaataaaatttataggcgtagactagatttatttaccatagtggcatctacaataaat

SEQ ID NO: 54146 - DNA, 80 bp, synthetic construct
  source 1..80: mol_type = other DNA
gattactccaagtgggactccactcaacacccagctgttacagctgcgtccttggcaatccttgagcggttgtctgaagc

SEQ ID NO: 54147 - DNA, 80 bp, synthetic construct
  source 1..80: mol_type = other DNA
gacaccaataacaacatcggccgtagagttgctctcatcaccagcacgtggccacttgaatgacataatctttgtgacaa

SEQ ID NO: 54148 - DNA, 80 bp, synthetic construct
  source 1..80: mol_type = other DNA
ggaggatcggatgggaagagtatatcctatgggaatccgcggtcccctctcgtgtctagcccatccccgcgtctggagaa

SEQ ID NO: 54149 - DNA, 80 bp, synthetic construct
  source 1..80: mol_type = other DNA
tggattcagcttctttgtaaaggactggatggagaggattgaaaacttcctagctgctgaatgcccatttctcccaaaac

SEQ ID NO: 54150 - DNA, 80 bp, synthetic construct
  source 1..80: mol_type = other DNA
atggagggcttgggccagcaacagccacagggtggcgaaaagaacacaccacaacctgtgacaccacaggataccattgg

SEQ ID NO: 54151 - DNA, 80 bp, synthetic construct
  source 1..80: mol_type = other DNA
caggtgcagtcacgagcaatgtgccaaattgcatccgggagtgttttgcttctgtcaccactataccctggactacacga

SEQ ID NO: 54152 - DNA, 80 bp, synthetic construct
  source 1..80: mol_type = other DNA
caggctgccaacacctttctgggggccatccatcttgggccccgaatcaacccatacactgctcacctgagcgccatgtt

SEQ ID NO: 54153 - DNA, 80 bp, synthetic construct
  source 1..80: mol_type = other DNA
cacctttctggaggccatccatcttgggccccgaatcaacccatacactgctcacctgagcgccatgtttgctggctggg

SEQ ID NO: 54154 - DNA, 80 bp, synthetic construct
  source 1..80: mol_type = other DNA
tcctactgcggccttgttactccccactcaaattgaaactccaaatgcaagtgcccagcgcctggagctggctatggcaa

SEQ ID NO: 54155 - DNA, 80 bp, synthetic construct
  source 1..80: mol_type = other DNA
gtcctgtttctcacgctctgtccgtccggactcagtgcctggggctctccaggagaccctattgtttgtggtgtgaggac

SEQ ID NO: 54156 - DNA, 80 bp, synthetic construct
  source 1..80: mol_type = other DNA
aaataagcaagcctcctgtttcaaacctctggtgggccagaagcctgacagaggtttgaaacaaatgctctgacatctga

SEQ ID NO: 54157 - DNA, 80 bp, synthetic construct
  source 1..80: mol_type = other DNA
aagtcatctggttctcctctctgatctgctttgtcattcaatgcagtggggactcgggcccaatcatctgcgcaggaccc

SEQ ID NO: 54158 - DNA, 80 bp, synthetic construct
  source 1..80: mol_type = other DNA
tgattactccaagtgggactccacgcaaaaccccgcagtaacagcagcatccctagcaatattggagaggtttgctgaac

SEQ ID NO: 54159 - DNA, 80 bp, synthetic construct
  source 1..80: mol_type = other DNA
cgagagccacaatgttccatacactggaaatgttttccaggtggagacagttcacacgtatggtgatgattacattgtca

SEQ ID NO: 54160 - DNA, 80 bp, synthetic construct
  source 1..80: mol_type = other DNA
tgattactccaaatgggactccacacaacacccagcagtcacggctgcgtctttgtcaatcctcgagcgattgtctgagg

SEQ ID NO: 54161 - DNA, 80 bp, synthetic construct
  source 1..80: mol_type = other DNA
attcgctcaatcacatgacgtacttcgcagctgcagtgttgaaagcttatgagcagcatggagcaccctacactggcaac

SEQ ID NO: 54162 - DNA, 80 bp, synthetic construct
  source 1..80: mol_type = other DNA
tgagcagcatggagcaccctacactggcaacgtgttccaggttgagactgtccacacttatggtgatgattacattgtca

SEQ ID NO: 54163 - DNA, 80 bp, synthetic construct
  source 1..80: mol_type = other DNA
caacaccaataacgacgtcagctgttgagttactttcgtcacccgcacgcggccatctgaatgacatagtgtttgtcaca

SEQ ID NO: 54164 - DNA, 80 bp, synthetic construct
  source 1..80: mol_type = other DNA
ctgcttagtcatccaatgcagtggggatacgggcccaatcatatgcgcagggcccatccactcaaacaagagtgccaaca

SEQ ID NO: 54165 - DNA, 80 bp, synthetic construct
  source 1..80: mol_type = other DNA
acaccttccttggcgccatccatcttggtccacgcatcaatccctacaccgcacatctgagcgccatgtttgctggctgg

SEQ ID NO: 54166 - DNA, 80 bp, synthetic construct
  source 1..80: mol_type = other DNA
aacaggtccgaccacatcccacgttgttgttgctaatccggagcaacccaatggggccgcacagcgcctggagttggctg

SEQ ID NO: 54167 - DNA, 80 bp, synthetic construct
  source 1..80: mol_type = other DNA
cccagttgccaaccaatcaaaatggtggtcatgttggccaggatgttgacccgcctggcgcgactggaccgaccacatcc

SEQ ID NO: 54168 - DNA, 80 bp, synthetic construct
  source 1..80: mol_type = other DNA
tctatcgcttcatcccaacattaatccatacacatcccatctttcaggcatgtgggcagggtggggaggtacttttgaag

SEQ ID NO: 54169 - DNA, 80 bp, synthetic construct
  source 1..80: mol_type = other DNA
atggagggtaatgcccgccatgatgagcctaaggctcagagcagcaataatgttccgcttgcatcacctcaggacaccat

SEQ ID NO: 54170 - DNA, 80 bp, synthetic construct
  source 1..80: mol_type = other DNA
ccactggagcaatctcaagcaacataccaaactgtgttcgcgagtgttttgctagtgtcaccaccttgccatggactact

SEQ ID NO: 54171 - DNA, 80 bp, synthetic construct
  source 1..80: mol_type = other DNA
acacttttctgggggccattcatcttggtccccgaattaacccttacactgcacacatgagcgccatgtttgctggctgg

SEQ ID NO: 54172 - DNA, 80 bp, synthetic construct
  source 1..80: mol_type = other DNA
tggccctagcgcggcattacttctcccaactcaaattgaaaccccaaacgctactgcccagcgtgtggaattggctgctg

SEQ ID NO: 54173 - DNA, 80 bp, synthetic construct
  source 1..80: mol_type = other DNA
agcagaaatcccccttgtccctctctggacagataatgctcatggcgttgggagtgttcctatgcatacagatcttgaat

SEQ ID NO: 54174 - DNA, 80 bp, synthetic construct
  source 1..80: mol_type = other DNA
tttcattgttatggtgcctgcacaaaatatcagtatccatggcacactgcaaaatgtcattttgagaaagattatgagta

SEQ ID NO: 54175 - DNA, 80 bp, synthetic construct
  source 1..80: mol_type = other DNA
gtgcatttggggaccccggtgatatcatgtctactcctagtggtatgaggtgtccagaacacactggatcattcaggaaa

SEQ ID NO: 54176 - DNA, 80 bp, synthetic construct
  source 1..80: mol_type = other DNA
atgctattaagtccaactaaccaacaagttgtgttagaaggtactaacagaactgatgtttggattgctatattacttat

SEQ ID NO: 54177 - DNA, 80 bp, synthetic construct
  source 1..80: mol_type = other DNA
ataaatggaaattctttgaaatgtttagaaacagtgccggcgcagaatttcaacataaacgcactttaacgtcagacact

SEQ ID NO: 54178 - DNA, 80 bp, synthetic construct
  source 1..80: mol_type = other DNA
ttttgaagcatggtggacgtgtatggacttttcatggtgaaacgccgcatgctacaactgattattcatcaacttcaaat

SEQ ID NO: 54179 - DNA, 80 bp, synthetic construct
  source 1..80: mol_type = other DNA
tgaacctaatgtgactaaccaaagtaggcagtatgtattattcggagaaacgaagcaaattactatagaaaataattcaa

SEQ ID NO: 54180 - DNA, 80 bp, synthetic construct
  source 1..80: mol_type = other DNA
gacggccaacaatgatgaaagtcatctggttctcctctctgatctgctttgtcattcaatgcagtggggactcaggccca

SEQ ID NO: 54181 - DNA, 80 bp, synthetic construct
  source 1..80: mol_type = other DNA
caaaggattggtcaatgcactggctgccatctggaatgcataaatgggggtgtgaggctaataactctaaccagtgagct

SEQ ID NO: 54182 - DNA, 80 bp, synthetic construct
  source 1..80: mol_type = other DNA
caagtcagctactgtctgtgcttctcacttttgtagttctgccacaagtggcaagaaaagcacggagattcaattccact

SEQ ID NO: 54183 - DNA, 80 bp, synthetic construct
  source 1..80: mol_type = other DNA
caggatcattggttgggaaaacagcaatacacgtcaaaggggcattggtagatggaactgaattcacatttgagggtagt

SEQ ID NO: 54184 - DNA, 80 bp, synthetic construct
  source 1..80: mol_type = other DNA
tgcatgttcccagatggttgtgatgcggtggactgcactttctgtcgtgagtttctaaaaaatccccagtgctaccctgc

SEQ ID NO: 54185 - DNA, 80 bp, synthetic construct
  source 1..80: mol_type = other DNA
aaagaagtggctgttcatcattattgtcatcctccttggatatgcaggcctcatgctactcaccaatgtcctcaaggcaa

SEQ ID NO: 54186 - DNA, 80 bp, synthetic construct
  source 1..80: mol_type = other DNA
ttgggatttggggatcatgggtcatagctccagtgaagctaatatttgccatcataaagaaactaatgagaactgtgagc

SEQ ID NO: 54187 - DNA, 80 bp, synthetic construct
  source 1..80: mol_type = other DNA
tgcttgatggggaaattgatggataggggaaggcaagtgatccatgaggagataggtgagaatagagagggcaaccaaga

SEQ ID NO: 54188 - DNA, 80 bp, synthetic construct
  source 1..80: mol_type = other DNA
gatagatcggctgatacatgtttcgtcatggctcaggaaccactcacaatttcagggctacgtaggccagcgaggtggac

SEQ ID NO: 54189 - DNA, 80 bp, synthetic construct
  source 1..80: mol_type = other DNA
tgatgttaggattgagatggcaagacccagaagggtaaggcattggatgtactcacctgtcatcctgactattttagcaa

SEQ ID NO: 54190 - DNA, 80 bp, synthetic construct
  source 1..80: mol_type = other DNA
tagggcttgctgagagctgtgatgagatggtccatgctgattctaagcttgtttcatgcaggcaagggagcggaaatatg

SEQ ID NO: 54191 - DNA, 80 bp, synthetic construct
  source 1..80: mol_type = other DNA
aaggaatgtgtcacaactgggagggcgcttcttcctgcggtgaacccaggtcaagaggcatgtctgcacttcacggcacc

SEQ ID NO: 54192 - DNA, 80 bp, synthetic construct
  source 1..80: mol_type = other DNA
tgggagtccggactcaaaatgtctcaaaattaaggttaagaggatcaacctaaaatgtaagaagtcatcatcatattttg

SEQ ID NO: 54193 - DNA, 80 bp, synthetic construct
  source 1..80: mol_type = other DNA
ttcctgatgcccggtccagatgtacatcagtgaggagatgtcgttgggctggagactgccagtctgggtgcccccctcat

SEQ ID NO: 54194 - DNA, 80 bp, synthetic construct
  source 1..80: mol_type = other DNA
ttcacatccaactccttttctgatgattgggcaggtaagatggacagggctggtctagggttcagtggctgctctgatgg

SEQ ID NO: 54195 - DNA, 80 bp, synthetic construct
  source 1..80: mol_type = other DNA
atgtggaggagcagcctgcggctgctttaatgcagccccttcttgcatcttctggaggaaatgggtagagaacccacatg

SEQ ID NO: 54196 - DNA, 80 bp, synthetic construct
  source 1..80: mol_type = other DNA
ggatcatctggaaagtatctccttgtgccgcatgggtcccatcggcagtcatagagctaacaatgccctcaggggaggtg

SEQ ID NO: 54197 - DNA, 80 bp, synthetic construct
  source 1..80: mol_type = other DNA
aggacattccaccccatgagtggcatccccacacaagtcttcaagggtgtgagtgtgacttacttgggctcagatatgga

SEQ ID NO: 54198 - DNA, 80 bp, synthetic construct
  source 1..80: mol_type = other DNA
ggtgtctggcttgactgacctatgtgagatagaggagctcaagtccaagaagctggcattagctccctgcaaccaggctg

SEQ ID NO: 54199 - DNA, 80 bp, synthetic construct
  source 1..80: mol_type = other DNA
gctctcaggtgagctactacccagctgaaaattcttactcaaggtggagtgggcttctaagcccctgtgatgctgattgg

SEQ ID NO: 54200 - DNA, 80 bp, synthetic construct
  source 1..80: mol_type = other DNA
gcatgggggttgtaggcaaggttggagagatacagtgcagtagcgaggaaagtgcccgtaccataaaaaaagatgggtgc

SEQ ID NO: 54201 - DNA, 80 bp, synthetic construct
  source 1..80: mol_type = other DNA
atatggaatgcagaccttgtgggcatagagctacgagtggatgacgctgtgtgctactctaagatcactagtgtggaagc

SEQ ID NO: 54202 - DNA, 80 bp, synthetic construct
  source 1..80: mol_type = other DNA
ctacgagtggatgacgctgtgtgctactctaagatcactagtgtggaagcagttgcaaactactctgccatacccaccac

SEQ ID NO: 54203 - DNA, 80 bp, synthetic construct
  source 1..80: mol_type = other DNA
agttgcaaactactctgccatacccaccactattggggggctgaggtttgagagaagccatgacagccagggtaaaatat

SEQ ID NO: 54204 - DNA, 80 bp, synthetic construct
  source 1..80: mol_type = other DNA
ctggtagccccctggacatcacagctataagaggatctttttctgttaattatagaggccttcgactgagcctctcagaa

SEQ ID NO: 54205 - DNA, 80 bp, synthetic construct
  source 1..80: mol_type = other DNA
attactgctacctgcacaggggaggtgacaaatgtgagtggatgttattcttgcatgacaggcgccaaagtctctatcaa

SEQ ID NO: 54206 - DNA, 80 bp, synthetic construct
  source 1..80: mol_type = other DNA
actacatagcagcaaaaatagcactgcccatgtaagatgcaaaggggatgagactgcattcagtgtcttggaggtggtcc

SEQ ID NO: 54207 - DNA, 80 bp, synthetic construct
  source 1..80: mol_type = other DNA
atagctacactgtcagtctcagttttgaccatgcagtggtcgatgagcagtgccaactgaactgtgggggacatgagagt

SEQ ID NO: 54208 - DNA, 80 bp, synthetic construct
  source 1..80: mol_type = other DNA
caagtgactctaaaaggcaaccttatcttcctggatgtcccaaaatttgtggatggcagctacatgcagacatatcatag

SEQ ID NO: 54209 - DNA, 80 bp, synthetic construct
  source 1..80: mol_type = other DNA
cactgtgcccacaggggcaaatatcccaagcccaacagactggctgaatgccttgtttggcaatgggctgagtaggtgga

SEQ ID NO: 54210 - DNA, 80 bp, synthetic construct
  source 1..80: mol_type = other DNA
tcctgggggtgataggggttctacttggtgggttggctctctttttcatgattatgtctttgttcaagctgggaacaaaa

SEQ ID NO: 54211 - DNA, 80 bp, synthetic construct
  source 1..80: mol_type = other DNA
gattatgtctttgttcaagctgggaacaaaacaggtatttcgatcaaggacgaagctggcttagatgggcaaatttctgg

SEQ ID NO: 54212 - DNA, 80 bp, synthetic construct
  source 1..80: mol_type = other DNA
cttgggatgcttgtcgtgaagaaggccaaggggtctgatatgatagttcctgggccttcatacaagggaaaagtcttttt

SEQ ID NO: 54213 - DNA, 80 bp, synthetic construct
  source 1..80: mol_type = other DNA
caggtatttcgatcaaggacgaagctggcttagatgggcaaatttctggtctagtgaccctctgggagcagtgctctcag

SEQ ID NO: 54214 - DNA, 80 bp, synthetic construct
  source 1..80: mol_type = other DNA
tagtgaccctctgggagcagtgctctcaggggagttggctcacagtgtgcatgtttcgtggtcctggctcacattcttag

SEQ ID NO: 54215 - DNA, 80 bp, synthetic construct
  source 1..80: mol_type = other DNA
tgagcggccaacttttgatggatatgtaggctggggctgtggcagtgggaagtctaggacagagtcaggagagctctgca

SEQ ID NO: 54216 - DNA, 80 bp, synthetic construct
  source 1..80: mol_type = other DNA
gttcagactcagggactagctctggtcttctgccttcagatagggttctctggataggtgatgttgcttgtcagcctatg

SEQ ID NO: 54217 - DNA, 80 bp, synthetic construct
  source 1..80: mol_type = other DNA
acacccatccctgaagagacatttctggagctgaagagttttagccaaagtgaattcccagacatatgcaaaattgatgg

SEQ ID NO: 54218 - DNA, 80 bp, synthetic construct
  source 1..80: mol_type = other DNA
cattgtattcaaccagtgtgagggtgagagcctacctcagccctttgatgttgcatggatggatgttggccactctcata

SEQ ID NO: 54219 - DNA, 80 bp, synthetic construct
  source 1..80: mol_type = other DNA
aaatcatcatgagggagcacaagaccaaatgggtgcaagagagctcatccaaggattttgtgtgctacaaggaagggact

SEQ ID NO: 54220 - DNA, 80 bp, synthetic construct
  source 1..80: mol_type = other DNA
tttgtgtgctacaaggaagggactgggccttgttctgaatcagaagaaaagacttgcaagaccagtggatcatgcagggg

SEQ ID NO: 54221 - DNA, 80 bp, synthetic construct
  source 1..80: mol_type = other DNA
atcatctgcgcaggacccatccactcaaacaagagtgctgacatacctcacctgctgggttactctgagaagatatgtca

SEQ ID NO: 54222 - DNA, 80 bp, synthetic construct
  source 1..80: mol_type = other DNA
gggccttgttctgaatcagaagaaaagacttgcaagaccagtggatcatgcaggggggacatgcagttctgcaaggtagc

SEQ ID NO: 54223 - DNA, 80 bp, synthetic construct
  source 1..80: mol_type = other DNA
aggttgtgaacatggggaagaggcatctgaagccaagtgtagatgctcacttgtgcacaagcccggagaagtcgttgtgt

SEQ ID NO: 54224 - DNA, 80 bp, synthetic construct
  source 1..80: mol_type = other DNA
catatggagggatgcgtgtcagaccaaagtgctatggtttctccagaatgatggcaacactggaggtgaaccaaccagag

SEQ ID NO: 54225 - DNA, 80 bp, synthetic construct
  source 1..80: mol_type = other DNA
gtttgtagcccttgcaaaaaactggacagaacgggttgaagaatggcttgacctcccgtgcaagctactatctgagccat

SEQ ID NO: 54226 - DNA, 80 bp, synthetic construct
  source 1..80: mol_type = other DNA
caggagcacctgatagatgccctcctacctgcctgtttattgcaggcatggcagagctaggtgcattctttgctgttctc

SEQ ID NO: 54227 - DNA, 80 bp, synthetic construct
  source 1..80: mol_type = other DNA
tttgcttatcaaggatttgacccaaagcgcattgttcagttggtcaaggagagaggaacagcaaagggcagggattggaa

SEQ ID NO: 54228 - DNA, 80 bp, synthetic construct
  source 1..80: mol_type = other DNA
ttactagttattgctgttttagttggcccaggttctgcaataaagaatgtatatgatatgaagatagagtgtccacattc

SEQ ID NO: 54229 - DNA, 80 bp, synthetic construct
  source 1..80: mol_type = other DNA
cagcacttccaatcacagaggcagaacagcttgtcccagaaagttcctgcaacatggataaccaccaatctcttgccact

SEQ ID NO: 54230 - DNA, 80 bp, synthetic construct
  source 1..80: mol_type = other DNA
atcaacaccctgacaaaggtaagttggaggaaaaaggctgatcaggtctcagctagtcaaaactcctttgaagtaattga

SEQ ID NO: 54231 - DNA, 80 bp, synthetic construct
  source 1..80: mol_type = other DNA
agcagagactagtttcaaaggattgtgtatgcttaagcacaggatgattgaagaatcatttaaaaatagaaggtcagtta

SEQ ID NO: 54232 - DNA, 80 bp, synthetic construct
  source 1..80: mol_type = other DNA
ggagaatgggtgaagggcatctttaatggtaactggatcgtcctgattgtcttatgtgtgttacttttaatatccataat

SEQ ID NO: 54233 - DNA, 80 bp, synthetic construct
  source 1..80: mol_type = other DNA
atctggttctcctctctggtctgcttagtcattcaatgcagtggggattcgggcccaatcatctgcgcaggacccatcca

SEQ ID NO: 54234 - DNA, 80 bp, synthetic construct
  source 1..80: mol_type = other DNA
gcaaagtttaggagatttacagccagcttgcataatgggctaccagatgacaggttaagaaattgtgtgattgatgcttt

SEQ ID NO: 54235 - DNA, 80 bp, synthetic construct
  source 1..80: mol_type = other DNA
aagttaaagaattcttaaaattctttcctaatggccaccatggagagttcgtgggaatttggttacaggggaatttgaac

SEQ ID NO: 54236 - DNA, 80 bp, synthetic construct
  source 1..80: mol_type = other DNA
aaatgctcatctttatttggggtagcaatgtctcttttatttaaaaggttatggtatgaacttttcccagagttagattg

SEQ ID NO: 54237 - DNA, 80 bp, synthetic construct
  source 1..80: mol_type = other DNA
tttggggtagcaatgtctcttttatttaaaaggttatggtatgaacttttcccagagttagattgcttttttgaatttgc

SEQ ID NO: 54238 - DNA, 80 bp, synthetic construct
  source 1..80: mol_type = other DNA
aaagaatatttataaaacagatttctttatgtcacggaaattaagacgttatatcgattcaaatgacactcatgaaccac

SEQ ID NO: 54239 - DNA, 80 bp, synthetic construct
  source 1..80: mol_type = other DNA
agtgctctcaggggagttggctcacagtgtgcatgtttcgtggtcctggctcacattcttagaacatggaggttctattg

SEQ ID NO: 54240 - DNA, 80 bp, synthetic construct
  source 1..80: mol_type = other DNA
gggagttggctcacagtgtgtttgtttcgtggtcctggctcacattcttagaacatggaggttccattgaagtgttggcc

SEQ ID NO: 54241 - DNA, 80 bp, synthetic construct
  source 1..80: mol_type = other DNA
gagggtacagcaccagatccagagcaccccaatgaaggagcaccccaattagtgtttgagatggagggcaatggttcccc

SEQ ID NO: 54242 - DNA, 80 bp, synthetic construct
  source 1..80: mol_type = other DNA
cccaagtcagaaaagtggtccaggagctggccaggaagttgatccacctggcacgactggtccaaccacatcccgtgttg

SEQ ID NO: 54243 - DNA, 80 bp, synthetic construct
  source 1..80: mol_type = other DNA
tgtttgagatggagggcaatggctccaacacagagccaaagcaaagcaacaacccgatggtcgttgacccacctggtaca

SEQ ID NO: 54244 - DNA, 80 bp, synthetic construct
  source 1..80: mol_type = other DNA
tattcacaatctgcagttcaaataccaatttactattcttctaattcagaattagaaaagagatgtattgaatttcatgc

SEQ ID NO: 54245 - DNA, 80 bp, synthetic construct
  source 1..80: mol_type = other DNA
acaacgctgtagaacggaagctagtcaattatgcaaaaggtaaaaccttagaggctgatttaacggcaaacgagaccgac

SEQ ID NO: 54246 - DNA, 80 bp, synthetic construct
  source 1..80: mol_type = other DNA
taacggcaaacgagaccgaccacgaaaacaacaaaccaacccctgaaccgtctcggtcggccgaagaatccaccaattcc

SEQ ID NO: 54247 - DNA, 80 bp, synthetic construct
  source 1..80: mol_type = other DNA
tattcaacgtctgcggttcaaataccggtttactattcttctgattcaggattggaggagagatgtatcggatttcatgc

SEQ ID NO: 54248 - DNA, 80 bp, synthetic construct
  source 1..80: mol_type = other DNA
taacggcaaacgagattgattatgaaaataataaactaacttctgaatcgtttcggtcggccgaagaatacacctgttcc

SEQ ID NO: 54249 - DNA, 80 bp, synthetic construct
  source 1..80: mol_type = other DNA
tattcaacgtctgcagttcaaataccaatttactattcttcttattcagtatttgatttgagatgcatcgagtttcatgc

SEQ ID NO: 54250 - DNA, 80 bp, synthetic construct
  source 1..80: mol_type = other DNA
acaatgctgtagaacgaaagctagtcaattatgctaaaggtaaaccattagaggctgatgtaacggcaaacgagattgat

SEQ ID NO: 54251 - DNA, 80 bp, synthetic construct
  source 1..80: mol_type = other DNA
ggttctcgcttatgggtgaggttgcccataaatatgaaagagtgtataaatggtattgtaggaacctagttaataggttc

SEQ ID NO: 54252 - DNA, 80 bp, synthetic construct
  source 1..80: mol_type = other DNA
taggctctctacctatcgcactttaccaactgattacacctccaaagttgtagccatgtataaagatgtctttggaatgt

SEQ ID NO: 54253 - DNA, 80 bp, synthetic construct
  source 1..80: mol_type = other DNA
atggagggcaatggctccatgtcaggagatgctcaacgcaatgtgcaggctatggacccgcctggtgcgactggtccgac

SEQ ID NO: 54254 - DNA, 80 bp, synthetic construct
  source 1..80: mol_type = other DNA
cacagtgtacatgtttcgtggtcctggctcacattcttagagcatggaggttctattgaagtgttggccggtctttgtgt

SEQ ID NO: 54255 - DNA, 80 bp, synthetic construct
  source 1..80: mol_type = other DNA
gggagttggctcacagtgtgcatgtttcatagtcctggttcatattcatagagcatggaggttctattgaagtgttggcg

SEQ ID NO: 54256 - DNA, 80 bp, synthetic construct
  source 1..80: mol_type = other DNA
atgtatggtattgaatataccacaattctgaccattttgatatttatcatattattgaattatatattaaaaactgtaac

SEQ ID NO: 54257 - DNA, 80 bp, synthetic construct
  source 1..80: mol_type = other DNA
aacagaagctaaaaatgagatttcagataatgaatgggaaaatactctatcgcaattatttttaactaaaggatggccaa

SEQ ID NO: 54258 - DNA, 80 bp, synthetic construct
  source 1..80: mol_type = other DNA
taatacgatggactatataatttttaggtttttactactcatcgctctgatgtcaccatttgtgaggacgcaaaattatg

SEQ ID NO: 54259 - DNA, 80 bp, synthetic construct
  source 1..80: mol_type = other DNA
atgtatggtattgaatataccacagttttaacctttttgatatcagttatattgttgaattacgtaatcaaatccttaac

SEQ ID NO: 54260 - DNA, 80 bp, synthetic construct
  source 1..80: mol_type = other DNA
gaataaatcttccgattactggctcaatggacacaccatatacgaactcaacgcgagaggaagtatttctaacttcgact

SEQ ID NO: 54261 - DNA, 80 bp, synthetic construct
  source 1..80: mol_type = other DNA
ttatgtttgtattacccaactgaagcagcaacagaaataaatgataattcatggaaggatacactttctcagctattttt

SEQ ID NO: 54262 - DNA, 80 bp, synthetic construct
  source 1..80: mol_type = other DNA
tagaataatggactttattatttacagatttcttttaattatagttatattatcaccacttcttaatgcacaaaattatg

SEQ ID NO: 54263 - DNA, 80 bp, synthetic construct
  source 1..80: mol_type = other DNA
tacagaagcatcaactcaaattggagatacggaatggaaggatactctgtcccaattattcttgactaaaggatggccaa

SEQ ID NO: 54264 - DNA, 80 bp, synthetic construct
  source 1..80: mol_type = other DNA
aactgaagcaagtgctcaaatcaatgacggtgaatggaaagactcattatcgcaaatgtttcttacaaaaggatggccaa

SEQ ID NO: 54265 - DNA, 80 bp, synthetic construct
  source 1..80: mol_type = other DNA
catgaatagtacaagacaacataaatgtagaaaagaatgtataacacagtggtacaatcacttattaatgccaataacat

SEQ ID NO: 54266 - DNA, 80 bp, synthetic construct
  source 1..80: mol_type = other DNA
tgtgaatatgatccgtgccaaaaaagagtttgtcccccttcaaagcctttacctcctccaacatgtgttcctagaattat

SEQ ID NO: 54267 - DNA, 80 bp, synthetic construct
  source 1..80: mol_type = other DNA
tgatccagttacagtgaccgcaacccctaccgctccatctctacccgccggcagccccgctaaaataagtcttccaccct

SEQ ID NO: 54268 - DNA, 80 bp, synthetic construct
  source 1..80: mol_type = other DNA
ccccgctaaaataagtcttccacccttaaatgaaaatttaacttgtgatactttgttattatgggaagctgtttctttaa

SEQ ID NO: 54269 - DNA, 80 bp, synthetic construct
  source 1..80: mol_type = other DNA
agcaaattcgctagaatgggttgatccagatagttcacttaaggaccatgtaaatgtcctagtcaatagagatatttcct

SEQ ID NO: 54270 - DNA, 80 bp, synthetic construct
  source 1..80: mol_type = other DNA
atgtcctagtcaatagagatatttcctttcaagatctatctgagacaccttgtaaggttgatctttcagtatcttctata

SEQ ID NO: 54271 - DNA, 80 bp, synthetic construct
  source 1..80: mol_type = other DNA
aagaaatgttcttttgccacaatgccctcatgccagtatgaaggaaataccatttctggatataagagaatgatagctac

SEQ ID NO: 54272 - DNA, 80 bp, synthetic construct
  source 1..80: mol_type = other DNA
accgtaatccactgagatgattgtcccgattgtcctgtttctcacgctctgtccgtccgaactcagtgcctggggctctc

SEQ ID NO: 54273 - DNA, 80 bp, synthetic construct
  source 1..80: mol_type = other DNA
ggtgggccagaagcctgacagaggtttgaaacagatgctctgacatctggggcatgaatgataatgggtgtgttttcaat

SEQ ID NO: 54274 - DNA, 80 bp, synthetic construct
  source 1..80: mol_type = other DNA
atacgggtccaatcatatgcgcagggcccatccactcaaacaagagtgccaacataccccacctgcttggctactctgag

SEQ ID NO: 54275 - DNA, 80 bp, synthetic construct
  source 1..80: mol_type = other DNA
gtttctccagagccaacaatgatgaaagtcatctggttctcctctctgatctgctttgtcattcaatgcagtggggactc

SEQ ID NO: 54276 - DNA, 80 bp, synthetic construct
  source 1..80: mol_type = other DNA
cacagtgtgcatgtttcgtagttccggctcacattcttagaacctccatgttctattgaagtgttggccggtctttgtgt

SEQ ID NO: 54277 - DNA, 80 bp, synthetic construct
  source 1..80: mol_type = other DNA
gacaaatgcagacgctggcgtgtctatggattcatcgacacaatcacgaccttcaagtaacgttgggtgcgataaatgga

SEQ ID NO: 54278 - DNA, 80 bp, synthetic construct
  source 1..80: mol_type = other DNA
ttacacagaggaggccaacaatgatgaaagtcatctggttctcctctctgatctgctttgtcattcaatgcagtggggat

SEQ ID NO: 54279 - DNA, 80 bp, synthetic construct
  source 1..80: mol_type = other DNA
gtgtgcatgtttcgtggtcctggctcacatccttaaaacatggaggttctattgaagtgttggccgtccttttgtgtaag

SEQ ID NO: 54280 - DNA, 80 bp, synthetic construct
  source 1..80: mol_type = other DNA
gtcttgggagtctgctctacattgacgctggcaatgccaaaaaccatttatgagcttaaaatggaatgtccacacaccgt

SEQ ID NO: 54281 - DNA, 80 bp, synthetic construct
  source 1..80: mol_type = other DNA
ttatagggtcaactgagctagggttagttccaattgagtctgcttcagatttaaagctggaaagctcatgtaactttgac

SEQ ID NO: 54282 - DNA, 80 bp, synthetic construct
  source 1..80: mol_type = other DNA
ttggctggatcctaatacctgccattacattagtcaccctcaagttcttgaaagtagtgacattttcatgctctcactat

SEQ ID NO: 54283 - DNA, 80 bp, synthetic construct
  source 1..80: mol_type = other DNA
tcaaaaagcctgaagtaaggaagggttgttatcggacattaggagtattcagatataagagtaggtgttatgttggacta

SEQ ID NO: 54284 - DNA, 80 bp, synthetic construct
  source 1..80: mol_type = other DNA
atacaacgaatgctgcttcaacaacatttgaatcccaggccaaaactgtcaatttacggggcacctgcgtattggcatca

SEQ ID NO: 54285 - DNA, 80 bp, synthetic construct
  source 1..80: mol_type = other DNA
agcaaacaagctcgaatggattgatcctgatggtaacacgagggatcatgtgaatcttgtactgaaccgggatgtatcct

SEQ ID NO: 54286 - DNA, 80 bp, synthetic construct
  source 1..80: mol_type = other DNA
gagctttatgatacactgaagaaagttaaaaagactgtactctgttatgatttgacctgcaatcaaacacactgccagcc

SEQ ID NO: 54287 - DNA, 80 bp, synthetic construct
  source 1..80: mol_type = other DNA
tagttgttgtactcgtggtgatactaattttttccataatactcttcagtatcctctgtccacgaagaggacataagaaa

SEQ ID NO: 54288 - DNA, 80 bp, synthetic construct
  source 1..80: mol_type = other DNA
ctgcccatacattaaccctctcacagcctgctcatacttatgagacagtaacacttcctgtgacttgtttttttacacca

SEQ ID NO: 54289 - DNA, 80 bp, synthetic construct
  source 1..80: mol_type = other DNA
aaaaaatctgaccaaaataaattggttaagacatttgaggggataattactaaaacaggctgtacagaaaatgcccttca

SEQ ID NO: 54290 - DNA, 80 bp, synthetic construct
  source 1..80: mol_type = other DNA
ttccaagcttggatgatatccgttctgcagaggttgttagtcgaatgattgtacacccaagaggtgaagaccatgatcca

SEQ ID NO: 54291 - DNA, 80 bp, synthetic construct
  source 1..80: mol_type = other DNA
attcaaaactctcaaggctatttacgaatagtagggccagtaactgcaaaggtgccaagcactagctcttctgataccct

SEQ ID NO: 54292 - DNA, 80 bp, synthetic construct
  source 1..80: mol_type = other DNA
ccaagggactgcctttgctggtgtgccaatgtacagctccttgtcaacattagtgaggagcccagatcctgaatttgtct

SEQ ID NO: 54293 - DNA, 80 bp, synthetic construct
  source 1..80: mol_type = other DNA
tattcacaatctgcagttcaaataccaatttattattcttccaatcctgagttagagaagaggtgcattgattttcacgt

SEQ ID NO: 54294 - DNA, 80 bp, synthetic construct
  source 1..80: mol_type = other DNA
tgacggcgaatgaacttgattatgaaaataataaaataacttctgaattattccaatcagccgaagaatacactgattca

SEQ ID NO: 54295 - DNA, 80 bp, synthetic construct
  source 1..80: mol_type = other DNA
aaagtgtgtcgataattcgaagaaaggtttatcactaaaaccattgtttgaagagtataaagatgtaatagataacgcaa

SEQ ID NO: 54296 - DNA, 80 bp, synthetic construct
  source 1..80: mol_type = other DNA
acaccttcctcggtgccatccacctgggaccacgcatcaacccgtacacggcgcaccttagtgctatgtttgctggctgg

SEQ ID NO: 54297 - DNA, 80 bp, synthetic construct
  source 1..80: mol_type = other DNA
atggagggtttaggcaaccccaaggggcaagagcccaacaatcaagggcagagtgacgtccctcaagtcaccccgcagga

SEQ ID NO: 54298 - DNA, 80 bp, synthetic construct
  source 1..80: mol_type = other DNA
ccgcagccacaggtgccatatctagcaatgtcccaaactgcatcagggagtgctttgcagctgtgacgaccataccctgg

SEQ ID NO: 54299 - DNA, 80 bp, synthetic construct
  source 1..80: mol_type = other DNA
acaactcgacaagcagctaacaccttcctcggtgccatccacctgggaccacgcatcaacccgtacacggcgcaccttag

SEQ ID NO: 54300 - DNA, 80 bp, synthetic construct
  source 1..80: mol_type = other DNA
cacgattgggccaactggggcactgctcctcccaactcaaatagagacaccaaatgcaatggcacaacgtgtcgagcttg

SEQ ID NO: 54301 - DNA, 80 bp, synthetic construct
  source 1..80: mol_type = other DNA
atgacatcgattaaagcatgtgaccttgccatgtgttacggttctacagttgccaatctagctagggggtccaacacagt

SEQ ID NO: 54302 - DNA, 80 bp, synthetic construct
  source 1..80: mol_type = other DNA
atgtatggtattgaatataccacagttctattttatttgatatcgttcgttcttgtgagttatattctgaaaactataat

SEQ ID NO: 54303 - DNA, 80 bp, synthetic construct
  source 1..80: mol_type = other DNA
gaataaatttgccaatcactggatctatggatacagcatatgctaactcaacacaagataataataattttttatcttca

SEQ ID NO: 54304 - DNA, 80 bp, synthetic construct
  source 1..80: mol_type = other DNA
actttatgtctatattatccatcagaagctccaactcaaattagtgacactgaatggaaagatacactatctcagctgtt

SEQ ID NO: 54305 - DNA, 80 bp, synthetic construct
  source 1..80: mol_type = other DNA
atcagaagctccaactcaaattagtgacactgaatggaaagatacactatctcagctgtttttaaccaaaggatggccaa

SEQ ID NO: 54306 - DNA, 80 bp, synthetic construct
  source 1..80: mol_type = other DNA
aaagataatggactatattatttatagaataacgtttgtaattgtagcattatcagtattatcgaatgcacaaaattatg

SEQ ID NO: 54307 - DNA, 80 bp, synthetic construct
  source 1..80: mol_type = other DNA
atgtggagtttgctattactggccgctttggttggccaaggctctgcattaaaaaatgtgtttgacatgagaatccagtg

SEQ ID NO: 54308 - DNA, 80 bp, synthetic construct
  source 1..80: mol_type = other DNA
ttgttttgtgtgtcttattactcttctctcttatcctgttaagcattttatgtcctgttaggaagcataaaaaatcataa

SEQ ID NO: 54309 - DNA, 80 bp, synthetic construct
  source 1..80: mol_type = other DNA
atgatcatgtggggtttactattgacaatgactttgatcaatctcgggtcaaccctgaggaatgtatatgacatgaaaat

SEQ ID NO: 54310 - DNA, 80 bp, synthetic construct
  source 1..80: mol_type = other DNA
ctgtaatctatagccctggcctgttccctaagttgaaccagtcctcatgtgataaagttgcattaccattaatatgggaa

SEQ ID NO: 54311 - DNA, 80 bp, synthetic construct
  source 1..80: mol_type = other DNA
ctgcagagcagcaaattaattttgtatgccagcgagttgatcaagatattgtgatatactgcaatgggcagagaaaaacc

SEQ ID NO: 54312 - DNA, 80 bp, synthetic construct
  source 1..80: mol_type = other DNA
tagaattacctcctatcccgctgactgatgctgagacgttggttcctgaaagctcttgtaatatggacaatcatcaatcc

SEQ ID NO: 54313 - DNA, 80 bp, synthetic construct
  source 1..80: mol_type = other DNA
atcctaacaaaaacattggtgattggacagtgtatttattcagtgacaagcttgttttcaataatgcccagtgtagcaca

SEQ ID NO: 54314 - DNA, 80 bp, synthetic construct
  source 1..80: mol_type = other DNA
cccttctattacactggctatactggttgtcttaaaattctttgctgcaatcctgcataatagttcccaagaaaatcgat

SEQ ID NO: 54315 - DNA, 80 bp, synthetic construct
  source 1..80: mol_type = other DNA
ttatcaattacacaaaaagtaacaaaagtaagctggagaaaaaaggcagataagattcaagcagctaaggattcatttga

SEQ ID NO: 54316 - DNA, 80 bp, synthetic construct
  source 1..80: mol_type = other DNA
ttcttggtcccatggaggggggaggtctgatatttaaggactggtgtaccacaacctgtcagtttggtgacccagaggac

SEQ ID NO: 54317 - DNA, 80 bp, synthetic construct
  source 1..80: mol_type = other DNA
ggtctgatatttaaggactggtgtaccacaacctgtcagtttggggacccaggggacatcatgagtcccaaggataaagg

SEQ ID NO: 54318 - DNA, 80 bp, synthetic construct
  source 1..80: mol_type = other DNA
atacgagttatatacactacactgatgagcggattgagtggaaagatccagatgggatgctcaaagaccatttaaacata

SEQ ID NO: 54319 - DNA, 80 bp, synthetic construct
  source 1..80: mol_type = other DNA
aacatcaagtgaagttaatctaaaaggaacatgcacattgactcacaggatggttgaagaatcctataggagcagaaaat

SEQ ID NO: 54320 - DNA, 80 bp, synthetic construct
  source 1..80: mol_type = other DNA
gtattattgagcaagaaagcacacaagtgtatgatgatggtgcaccccaatgtggtatttcatgttggtttataaagtct

SEQ ID NO: 54321 - DNA, 80 bp, synthetic construct
  source 1..80: mol_type = other DNA
ttgtgttaattttctttttcatactgtctctgatattacttagtttcttatgccccattcgcaagcataagcgctcataa

SEQ ID NO: 54322 - DNA, 80 bp, synthetic construct
  source 1..80: mol_type = other DNA
cagtaatatgttatgacttgtcctgtaattcaacacactgtaaaccaacaatgcacatgattgtccctgtccattcatgc

SEQ ID NO: 54323 - DNA, 80 bp, synthetic construct
  source 1..80: mol_type = other DNA
tggagtttttgacattgctagtgtgagtattgtctgcttcttcatccgagtgaaaggaaatagttataaaataatggcaa

SEQ ID NO: 54324 - DNA, 80 bp, synthetic construct
  source 1..80: mol_type = other DNA
tcgtaggagccaactcttctcctgtttacacaccctcagccactgattttagatcaacagaagcacttgccagtttatta

SEQ ID NO: 54325 - DNA, 80 bp, synthetic construct
  source 1..80: mol_type = other DNA
gagttaccccccatcccgcttgctgatgcagagactctagttcctgaaagttcctgtaatatggataaccatcaatcatt

SEQ ID NO: 54326 - DNA, 80 bp, synthetic construct
  source 1..80: mol_type = other DNA
ctacttcaaatgaaattaatctcaaagggacatgcacattgacacacaggatggttgaagaatcctataggagtagaaaa

SEQ ID NO: 54327 - DNA, 80 bp, synthetic construct
  source 1..80: mol_type = other DNA
tcagtcatctgttatgacttatcctgcaactcgacacactgtaagccaacaatgcatatgattgtccctgtccactcatg

SEQ ID NO: 54328 - DNA, 80 bp, synthetic construct
  source 1..80: mol_type = other DNA
gtaacatgatgaaaagctgtcttgtgggactaggaccttaccggattcaggttgtttatgagaggacatactgcacaact

SEQ ID NO: 54329 - DNA, 80 bp, synthetic construct
  source 1..80: mol_type = other DNA
gaggggaaatgctttgtaccagaccagagcattattagtgtaataaagaacggggtttttgacattgcaagtgtaggtat

SEQ ID NO: 54330 - DNA, 80 bp, synthetic construct
  source 1..80: mol_type = other DNA
tgtttgcttctttatccgagtaaagggaactagttataaaataatggcaagtataaaggaggcaaacccaaataactgta

SEQ ID NO: 54331 - DNA, 80 bp, synthetic construct
  source 1..80: mol_type = other DNA
ggtccccccatggtgaagaccatgatctgtttggggaagaggttgcaacttactcaattgctggccaagttgagggcaaa

SEQ ID NO: 54332 - DNA, 80 bp, synthetic construct
  source 1..80: mol_type = other DNA
atgatcatgtgggttttactattgacaatggtcctgatcaaccatggggcgtctctaaagaatgtgtatgacatgagaat

SEQ ID NO: 54333 - DNA, 80 bp, synthetic construct
  source 1..80: mol_type = other DNA
ctgtgatttatagccctggacttttccctaaattaaaccaatcctcatgtgacaaggttgcattgcccttgatatgggaa

SEQ ID NO: 54334 - DNA, 80 bp, synthetic construct
  source 1..80: mol_type = other DNA
ctgcagagcagcaaattaactttgtatgtcaaagagttgaccaagacattgtaatatattgcaatgggcagaaaaaaacc

SEQ ID NO: 54335 - DNA, 80 bp, synthetic construct
  source 1..80: mol_type = other DNA
cccttctattacactggccatattaattgtcttgaaattctttgctgcaatcctgcataacagctctcaggaaaaccgat

SEQ ID NO: 54336 - DNA, 80 bp, synthetic construct
  source 1..80: mol_type = other DNA
gaaaggagctcaaggcacacaacttgtcctgcccacaatcacaatgtccatactgcttcacacattgtgagctcacagaa

SEQ ID NO: 54337 - DNA, 80 bp, synthetic construct
  source 1..80: mol_type = other DNA
tggataaccatcagtcattgtcagttacacaaaaagtgacaaaggtgagctggagaaaaaaggcggataaagttcaagca

SEQ ID NO: 54338 - DNA, 80 bp, synthetic construct
  source 1..80: mol_type = other DNA
aggttaatggtattgttgaacaagagagcacacaagtgtatgatgatggtgcgcctcaatgtggcatttcatgttggttc

SEQ ID NO: 54339 - DNA, 80 bp, synthetic construct
  source 1..80: mol_type = other DNA
ataaagtcaggagaatggataaagggtatctttaatggaaactggattgttattgttgtgttgatcttccttttcatact

SEQ ID NO: 54340 - DNA, 80 bp, synthetic construct
  source 1..80: mol_type = other DNA
ttgtgttgatcttccttttcatactatctctgatattgctaagcttcctatgtcctatccgtaagcacaagcgctcataa

SEQ ID NO: 54341 - DNA, 80 bp, synthetic construct
  source 1..80: mol_type = other DNA
tattttgacagagggaaaatgctttgtaccagaccagagcatcatcagtgtgataaagaacggggtttttgacattgcaa

SEQ ID NO: 54342 - DNA, 80 bp, synthetic construct
  source 1..80: mol_type = other DNA
gtgtaggtattgtttgcttctttatccgagtgaagggaactagttataaaataatggcaagtataaaggaggcaaaccca

SEQ ID NO: 54343 - DNA, 80 bp, synthetic construct
  source 1..80: mol_type = other DNA
tgtaggagctaactcttctcctgtttacgcaccttcaactactgatttcagatcaatagaggcacttgctagtttactga

SEQ ID NO: 54344 - DNA, 80 bp, synthetic construct
  source 1..80: mol_type = other DNA
agcaaacatgttgttcactgcattttcaggaattccaagctattcctcattgagtgttttcactggaaatcaggatggaa

SEQ ID NO: 54345 - DNA, 80 bp, synthetic construct
  source 1..80: mol_type = other DNA
atttagacaaggttaatggtattgttgaacaagagagcacacaagtgtatgacgatggtgcacctcaatgtggcatttcc

SEQ ID NO: 54346 - DNA, 80 bp, synthetic construct
  source 1..80: mol_type = other DNA
tgctggttcataaagtcaggagaatggataaagggtatctttaacggaaactggattgttattgttgtgttaatcttcct

SEQ ID NO: 54347 - DNA, 80 bp, synthetic construct
  source 1..80: mol_type = other DNA
acttcaacccagtgattcttagaccaaataacgttgaagtagaatttctattaaacgggcagataataaatacttaccaa

SEQ ID NO: 54348 - DNA, 80 bp, synthetic construct
  source 1..80: mol_type = other DNA
gcacagccatttgaacatcacgcaacagtaggactcacgcttagaattgaatctgcagtttgtgaatcagtgcttgccga

SEQ ID NO: 54349 - DNA, 80 bp, synthetic construct
  source 1..80: mol_type = other DNA
ttgccgacgcaagtgaaacaatgctagcaaatgtgacatctgttagacaagaatacgcgataccagttggaccagttttt

SEQ ID NO: 54350 - DNA, 80 bp, synthetic construct
  source 1..80: mol_type = other DNA
catagctagaaattttgatacaatcagattgtcatttcagttgatgagaccaccaaatatgacaccagcggtagcggcgt

SEQ ID NO: 54351 - DNA, 80 bp, synthetic construct
  source 1..80: mol_type = other DNA
gtgtttgagatggagggcaatggctcccaacaaggggtacgaccaaaaagtccacctcaaagtgttgatcttcctggcac

SEQ ID NO: 54352 - DNA, 80 bp, synthetic construct
  source 1..80: mol_type = other DNA
gactggcccggccacatccaacgttgttgtggctaatccggaacaacccaatggggccgcacaacgcttggagatggctg

SEQ ID NO: 54353 - DNA, 80 bp, synthetic construct
  source 1..80: mol_type = other DNA
atggagggcaatggctcccccccaagtcagaagagtggttcaggagctggccaggaagttgatccacctggcacgactgg

SEQ ID NO: 54354 - DNA, 80 bp, synthetic construct
  source 1..80: mol_type = other DNA
tccaaccacatcccgtgttgttgttcctaatccggagcaacccaatgggcccgcgcagcgcttggagatggctgttgcta

SEQ ID NO: 54355 - DNA, 80 bp, synthetic construct
  source 1..80: mol_type = other DNA
aaggttactcaatctgatgttgcaaatgttctttcaagagtagtttctgttagacatttggaaaatactggttttaagaa

SEQ ID NO: 54356 - DNA, 80 bp, synthetic construct
  source 1..80: mol_type = other DNA
attttaatcctgtggtattgaggccaaataatgtggaagttgaatttcttttgaatggtcagattattaatacttatcaa

SEQ ID NO: 54357 - DNA, 80 bp, synthetic construct
  source 1..80: mol_type = other DNA
agcagatgctaacgaaactatgctcgctaatgttacatcagtgagacaagagtacgccattccagttggaccagtttttc

SEQ ID NO: 54358 - DNA, 80 bp, synthetic construct
  source 1..80: mol_type = other DNA
gtacaaccatttgaacaccatgctactgtaggtctaacgctaagaatcgaatctgcggtgtgtgaatctgtacttgctga

SEQ ID NO: 54359 - DNA, 80 bp, synthetic construct
  source 1..80: mol_type = other DNA
gacaataaggatagggaacaaccaataggccatgttttactaatggcaggggtgccgaatgaagtaatacaaggcatgga

SEQ ID NO: 54360 - DNA, 80 bp, synthetic construct
  source 1..80: mol_type = other DNA
aacagttattgcagcaggaggcagcaagaggaaatttacctggtggttaccgaataaagtttgatgtagttgctgttaga

SEQ ID NO: 54361 - DNA, 80 bp, synthetic construct
  source 1..80: mol_type = other DNA
acacagagacggctatacattaaagtagaggtaaaccgtaatccactgagatgattgtcccgattgtcctgtttctcacg

SEQ ID NO: 54362 - DNA, 80 bp, synthetic construct
  source 1..80: mol_type = other DNA
ggattctccagaatgatggcaacattggaagttcacaaacctgatagagaattaacagggtgcacgggttgtcacctaga

SEQ ID NO: 54363 - DNA, 80 bp, synthetic construct
  source 1..80: mol_type = other DNA
gtgcatagagggaggagttaaaattgtaacgcttacaagcgagctgagaagtgcaacagtttgtgcttcacatttttgtg

SEQ ID NO: 54364 - DNA, 80 bp, synthetic construct
  source 1..80: mol_type = other DNA
catctgcaaaggggggctcaaagacaactgacatactcttccacactggtgctctcgttggacccaattccattagaata

SEQ ID NO: 54365 - DNA, 80 bp, synthetic construct
  source 1..80: mol_type = other DNA
gtgctctcgttggacccaattccattagaataactggtcagttgttagatgggagcaagttctcctttgatgggcactgc

SEQ ID NO: 54366 - DNA, 80 bp, synthetic construct
  source 1..80: mol_type = other DNA
actggtcagttgttagatgggagcaagttctcctttgatgggcactgcatattcccagatgggtgcatggctcttgactg

SEQ ID NO: 54367 - DNA, 80 bp, synthetic construct
  source 1..80: mol_type = other DNA
caccttctgtaaagagttcctgagaaacccgcaatgttaccctgtaaagaaatggctcttcctggtggtagttataatgt

SEQ ID NO: 54368 - DNA, 80 bp, synthetic construct
  source 1..80: mol_type = other DNA
gctgctattgtgccctgatgctgcttactaacatactgagagctataggtgtttgggggacatgggtttttgctccaata

SEQ ID NO: 54369 - DNA, 80 bp, synthetic construct
  source 1..80: mol_type = other DNA
aagttggctctagcattagggttgaggcttgccaaactgtcaaagaaggggctggttgctgtggttacaaggggccaaat

SEQ ID NO: 54370 - DNA, 80 bp, synthetic construct
  source 1..80: mol_type = other DNA
cattcagattgagtggaaggagggaagatcagagaagctatgccagattgacaggcttgggcatgtcacaagctggttaa

SEQ ID NO: 54371 - DNA, 80 bp, synthetic construct
  source 1..80: mol_type = other DNA
gatcgtgaatgatgagctgcaccaggttcgagtggagagaggtgagcaaaatgagggaagacaaggttatggcccaagag

SEQ ID NO: 54372 - DNA, 80 bp, synthetic construct
  source 1..80: mol_type = other DNA
gccccatccgtcactggctatactcacctgccctcattctcattctcaccacttcaatttgctctggatgtgatgagctt

SEQ ID NO: 54373 - DNA, 80 bp, synthetic construct
  source 1..80: mol_type = other DNA
gttcatgctgagagtaaatccatcacatgcaagtctgcatctgggaatgagaaggagtgctcagtgacaggcagagcttt

SEQ ID NO: 54374 - DNA, 80 bp, synthetic construct
  source 1..80: mol_type = other DNA
gctcccagctgtcaatccagggcaggaggcctgcttgcactttagcgtgccaggaagcccagactccaagtgccttaaga

SEQ ID NO: 54375 - DNA, 80 bp, synthetic construct
  source 1..80: mol_type = other DNA
tcaaagtgaaatcaataaatctcagatgtaagcaagcctcttcatattatgttcctgaagcaaaggcaagatgtacatct

SEQ ID NO: 54376 - DNA, 80 bp, synthetic construct
  source 1..80: mol_type = other DNA
gtcagaaggtgcaggtgggcaggtgactgtcaatctgggtgtccaacatatttcagctcaaactcattctcagatgattg

SEQ ID NO: 54377 - DNA, 80 bp, synthetic construct
  source 1..80: mol_type = other DNA
ggcaaacaggatggacagggctgggctcgggatgagtgggtgctcagatgggtgtggtggagctgcatgtgggtgtttta

SEQ ID NO: 54378 - DNA, 80 bp, synthetic construct
  source 1..80: mol_type = other DNA
atgcagcgccatcctgcatcttttggagaaagtgggtggagaacccatccaatcgtgtctggaaggtgtcaccttgtgca

SEQ ID NO: 54379 - DNA, 80 bp, synthetic construct
  source 1..80: mol_type = other DNA
tcatgggtgctagctgcaaccattgagttgactttgccatcaggagaggttaagactctagagcctgtcacagggcaagc

SEQ ID NO: 54380 - DNA, 80 bp, synthetic construct
  source 1..80: mol_type = other DNA
aactcagatgttcaagggtgttgcaatcacatatctgggatcatccattgagattgttggcatgaccaggctatgtgaga

SEQ ID NO: 54381 - DNA, 80 bp, synthetic construct
  source 1..80: mol_type = other DNA
gaaaccactcatctttccaggggcttattggtcaggtgaaggggagaccaagtgtttcctacttcccggaaggtgcttct

SEQ ID NO: 54382 - DNA, 80 bp, synthetic construct
  source 1..80: mol_type = other DNA
tgaaagagatggggactgggataatggcactggccccctgcaatgatccagggcacgccataatgggaaatgtgggtgag

SEQ ID NO: 54383 - DNA, 80 bp, synthetic construct
  source 1..80: mol_type = other DNA
atccaatgcagtagtatagaaagcgcaaagcacatcaggtctgatgggtgcatttggaatgctgacctagttggaataga

SEQ ID NO: 54384 - DNA, 80 bp, synthetic construct
  source 1..80: mol_type = other DNA
attgagggttgatgatgctgtgtgtttctcgaaactcactagtgttgaggcagttgcaaatttttcaaaaatcccggcaa

SEQ ID NO: 54385 - DNA, 80 bp, synthetic construct
  source 1..80: mol_type = other DNA
caatttctggggttcgctttgatcaagggaatcatggagaatcacgtatctatggtagcccattagatatcacgagggtt

SEQ ID NO: 54386 - DNA, 80 bp, synthetic construct
  source 1..80: mol_type = other DNA
agtggggaattctcagtgtcattcagagggatgaggctcaaactatctgagatatcagcaagctgcacaggtgagataac

SEQ ID NO: 54387 - DNA, 80 bp, synthetic construct
  source 1..80: mol_type = other DNA
aaacgtctctggttgttactcctgcatgactggggcctcagtcagcataaaattacatagcagtaagaacacaacaggtc

SEQ ID NO: 54388 - DNA, 80 bp, synthetic construct
  source 1..80: mol_type = other DNA
atcttaagtgtgattcagatgagactgcattcagtgtcatggagggaacacacacatataggcctcacatgagctttgat

SEQ ID NO: 54389 - DNA, 80 bp, synthetic construct
  source 1..80: mol_type = other DNA
aaagcagtaatagatgaggagtgtgtgctaaactgtggtggccactcatcaaaactgttgcttaaagggagccttgtttt

SEQ ID NO: 54390 - DNA, 80 bp, synthetic construct
  source 1..80: mol_type = other DNA
tatggacgtgccaaggtttgttgatggaagttatgtccaaacatatcacagcaaggtgcccgctgggggaagggtcccaa

SEQ ID NO: 54391 - DNA, 80 bp, synthetic construct
  source 1..80: mol_type = other DNA
atccggtagactggctcaacgcactgtttggagatggcataacacgatggattcttgggattataggggttctgctggca

SEQ ID NO: 54392 - DNA, 80 bp, synthetic construct
  source 1..80: mol_type = other DNA
tacccaaggtggagcggcctattaagcccatgtgatgctgaatggctgggactgatagcagtgagcaaggctggagacac

SEQ ID NO: 54393 - DNA, 80 bp, synthetic construct
  source 1..80: mol_type = other DNA
tgtgtcatgctatttgtggtggtggttgccatcactaggcgattgatcaagggactgactcaaagggcgaaggtggcatg

SEQ ID NO: 54394 - DNA, 80 bp, synthetic construct
  source 1..80: mol_type = other DNA
attggcgttaattgacaaataagcaagcctcctgtttcaaacctctggtgggccagaagcctgacagaggtttgaaacaa

SEQ ID NO: 54395 - DNA, 80 bp, synthetic construct
  source 1..80: mol_type = other DNA
aggtttgaaacaaatgctctgacatctgaggcatgaatgataatgggtgggttttcaatttgtatagccggtctttgtgt

SEQ ID NO: 54396 - DNA, 80 bp, synthetic construct
  source 1..80: mol_type = other DNA
agacatgattgtcccaggcccaacttacaaagggaaaatctttgttgagagaccaacatacaacggttacaaaggctggg

SEQ ID NO: 54397 - DNA, 80 bp, synthetic construct
  source 1..80: mol_type = other DNA
gttgtgcagatggaaagtcactaagccactcaggcacatattgtgaaactgacagctcagtgagttctggtttaattcag

SEQ ID NO: 54398 - DNA, 80 bp, synthetic construct
  source 1..80: mol_type = other DNA
ggagatagggttctctgggttggggaagtagtctgtcagagagggacccctgtgccagaagatgtatttagtgaactggt

SEQ ID NO: 54399 - DNA, 80 bp, synthetic construct
  source 1..80: mol_type = other DNA
tagcttgagtcaaagtgagttcccagatgtgtgcaagattgatggtgttgcactgaaccagtgtgagcaggagagcatcc

SEQ ID NO: 54400 - DNA, 80 bp, synthetic construct
  source 1..80: mol_type = other DNA
cccagccactggacgttgcatggattgatgttggaaggtctcataaggtactgatgagagaacacaaaactaaatgggtc

SEQ ID NO: 54401 - DNA, 80 bp, synthetic construct
  source 1..80: mol_type = other DNA
ctctgtccgtccgaactcagtgcctggggctccccaggagaccctattgtttgtggtgtgaggactgaaacaaacaaatc

SEQ ID NO: 54402 - DNA, 80 bp, synthetic construct
  source 1..80: mol_type = other DNA
caagagagctcagcaaaggactttgtgtgtttcaaggtgggtcaggggccatgttcgaaacaagaggaagatgactgcat

SEQ ID NO: 54403 - DNA, 80 bp, synthetic construct
  source 1..80: mol_type = other DNA
gagtaagggcaactgccatggggatgaggttttctgcaggatggcaggatgctctgcccgtatgcaagataatcaagaag

SEQ ID NO: 54404 - DNA, 80 bp, synthetic construct
  source 1..80: mol_type = other DNA
gctgcaggtgcgaactgcttcaaaaacctggagaaatcattgtgaattatggaggcgtctctgtgagaccaacctgttat

SEQ ID NO: 54405 - DNA, 80 bp, synthetic construct
  source 1..80: mol_type = other DNA
gaaatttttctttttcattgaaagaaaaagaattaaatgttggtaggacatttggaaaattgccttatttaactaggaat

SEQ ID NO: 54406 - DNA, 80 bp, synthetic construct
  source 1..80: mol_type = other DNA
agataataaagacaaggaacagcccattggtcatgtcttattgatggctggagttccgaatgatgtgattcaaggaatgg

SEQ ID NO: 54407 - DNA, 80 bp, synthetic construct
  source 1..80: mol_type = other DNA
agtcttaaaataccaaggtggtttagaatttattgaacaattattacatatagaagcccaaaaaggtaattgtcagcctg

SEQ ID NO: 54408 - DNA, 80 bp, synthetic construct
  source 1..80: mol_type = other DNA
aacaattattacatatagaagcccaaaaaggtaattgtcagcctgggtttaaaataaaatttgatgtagttgcagttagg

SEQ ID NO: 54409 - DNA, 80 bp, synthetic construct
  source 1..80: mol_type = other DNA
aaaaacgaataattcctggaagtcccagtggtcaaatattaaggtcgttctttaagatgacaccagacaattataaaata

SEQ ID NO: 54410 - DNA, 80 bp, synthetic construct
  source 1..80: mol_type = other DNA
ggtattagagaaaaagttctaaagtaccaaggtggcctagaattcattgaacagcttctgcatattgaagcacaaaaggg

SEQ ID NO: 54411 - DNA, 80 bp, synthetic construct
  source 1..80: mol_type = other DNA
aacagcttctgcatattgaagcacaaaagggtaattgtcagcctggatttaagataaaatttgatgttgttgcagttagg

SEQ ID NO: 54412 - DNA, 80 bp, synthetic construct
  source 1..80: mol_type = other DNA
aacaattacttcagattgaagcccaaaaaggcaattgtcagtcaggcttcaaaataaaatttgatgtagtagccattcgg

SEQ ID NO: 54413 - DNA, 80 bp, synthetic construct
  source 1..80: mol_type = other DNA
gagaaaaaggttatcccaggaagccctagtggtcaaattttgaggtcattctttaaaatgactcctgataattacaaaat

SEQ ID NO: 54414 - DNA, 80 bp, synthetic construct
  source 1..80: mol_type = other DNA
aacagttactccatatagaggcacaaaaaggtaactgtcaatctggttttaaaataaagtttgatgttgtagctatcaga

SEQ ID NO: 54415 - DNA, 80 bp, synthetic construct
  source 1..80: mol_type = other DNA
ttggggagccttctggaagcttgggacaatataactgagtctattggtctgacgtctggcacttgtaaagtgggatcact

SEQ ID NO: 54416 - DNA, 80 bp, synthetic construct
  source 1..80: mol_type = other DNA
cattggacgactatgatgtggtgtaccaaaatagccagtccgactgctcagctacatttaagaatctcaccggctgatat

SEQ ID NO: 54417 - DNA, 80 bp, synthetic construct
  source 1..80: mol_type = other DNA
ccactgagatgattgtcccaattgtcctgtttctcacgctctgtccgtcccaacttagtgcctggggctctccaggagac

SEQ ID NO: 54418 - DNA, 80 bp, synthetic construct
  source 1..80: mol_type = other DNA
gattgacattaattgaaaaataagcaaaataagcaagcctcctgtttcaaacctctggtgggccagaagcctgacagagg

SEQ ID NO: 54419 - DNA, 80 bp, synthetic construct
  source 1..80: mol_type = other DNA
aatgctctgatatctgaggtgtgaatgataatgggtgggttttcaattaatgtcaatcatgccaccttcgccctttgagt

SEQ ID NO: 54420 - DNA, 80 bp, synthetic construct
  source 1..80: mol_type = other DNA
ataatgggtgggttttcaattaatgtcaatcatgccaccttcgccctttgagtcagccccttgatcaatcgcctagtgat

SEQ ID NO: 54421 - DNA, 80 bp, synthetic construct
  source 1..80: mol_type = other DNA
cggatgcaaatgaaactttattggcgaatgttaccgcggtacgtcaagaatatgctataccagttggaccagtattccca

SEQ ID NO: 54422 - DNA, 80 bp, synthetic construct
  source 1..80: mol_type = other DNA
tgttgatgcacataaagaaattaaggttcaccttaatgggttccatgtcccgcaagtatgaaaatgtatacaagtggtat

SEQ ID NO: 54423 - DNA, 80 bp, synthetic construct
  source 1..80: mol_type = other DNA
taatctatggagatgataggatatccacatatcgaagcatccctaatgaatacaccaaaataatagttgacatgtataaa

SEQ ID NO: 54424 - DNA, 80 bp, synthetic construct
  source 1..80: mol_type = other DNA
gatggatcttgataccatttactgctatgttattattaaaaatattgattgcatttgcttacttgtgctcaaagtataat

SEQ ID NO: 54425 - DNA, 80 bp, synthetic construct
  source 1..80: mol_type = other DNA
ttccgttaacacaagtggagtctctaaaactggaaagttcatgtaactttgacctgcatactagcacatcatcacaacaa

SEQ ID NO: 54426 - DNA, 80 bp, synthetic construct
  source 1..80: mol_type = other DNA
atcctgctgaagccacaacatctgctttacaagcccattttaaagtgtgtaaactaacgtcaagatttcaggataactta

SEQ ID NO: 54427 - DNA, 80 bp, synthetic construct
  source 1..80: mol_type = other DNA
aggaagtcgttaggcgcttatgaaccaaaacagggctgttacaggacattgtccctctttcgttatagaagcaggttttt

SEQ ID NO: 54428 - DNA, 80 bp, synthetic construct
  source 1..80: mol_type = other DNA
tcaattctgggtggacagatacagcacatgggtctggagtgataccaatgagaacagaccttgaattggatttttctctt

SEQ ID NO: 54429 - DNA, 80 bp, synthetic construct
  source 1..80: mol_type = other DNA
ggttggggatgtaacccacctgattgcccgggagttggaactggatgcacagcatgtggtgtgtatttagataagttgaa

SEQ ID NO: 54430 - DNA, 80 bp, synthetic construct
  source 1..80: mol_type = other DNA
atcagtgggtaaagcattcaggattgtgtccttaaaatatacaaggaaagcatgtattcagctaggtactgaacaaactt

SEQ ID NO: 54431 - DNA, 80 bp, synthetic construct
  source 1..80: mol_type = other DNA
tcatttacaaaatggacatgggaaatgaagagtgatttggcagagaacacgcaggcatcatcaacaagttttcaaacaaa

SEQ ID NO: 54432 - DNA, 80 bp, synthetic construct
  source 1..80: mol_type = other DNA
gtaaaagtgttgacagtaatgattgtcttgtaactacatctgtcaaagtatgtttgattggaactgtgtcaaaatttcaa

SEQ ID NO: 54433 - DNA, 80 bp, synthetic construct
  source 1..80: mol_type = other DNA
ccacgggatataatgagcactccggttggtatgaggtgcccagaattaagtggttcatttagaaaaaaatgtgcatttgc

SEQ ID NO: 54434 - DNA, 80 bp, synthetic construct
  source 1..80: mol_type = other DNA
aacaacacctgtttgtcaatttgatggaaatactatctctgggtataaaagaatgattgcaacaaaggattcattccagt

SEQ ID NO: 54435 - DNA, 80 bp, synthetic construct
  source 1..80: mol_type = other DNA
ctggagttggcttcaacctaatttgttctgtaagtctaacagagtgttcaacatttttaacttcaattaaagcatgtgac

SEQ ID NO: 54436 - DNA, 80 bp, synthetic construct
  source 1..80: mol_type = other DNA
tcagcaatgtgttatggctcaacaactgctaatcttatgagagggcaaaatacaatccatatcgttggaaaaggaggaca

SEQ ID NO: 54437 - DNA, 80 bp, synthetic construct
  source 1..80: mol_type = other DNA
aagtactggtctggtagcagcagcaccacatttagatcgtgtaacaggatataaccaagcagacagtgataaaatctttg

SEQ ID NO: 54438 - DNA, 80 bp, synthetic construct
  source 1..80: mol_type = other DNA
tattattcatattatccatttttctctttacattatgttgcccacgtagacctagttatgcaaaagaacataaaccttag

SEQ ID NO: 54439 - DNA, 80 bp, synthetic construct
  source 1..80: mol_type = other DNA
tactgtcttcctgataggtccaatacaaacatgtctaacaacaaagagttgtcttttaggtctaggtgatcagagaattc

SEQ ID NO: 54440 - DNA, 80 bp, synthetic construct
  source 1..80: mol_type = other DNA
gtttcaacaggtgacagcatgaaaattgagaagagctttgagacccttgtccaaaagactggttgtacaggtaatggttt

SEQ ID NO: 54441 - DNA, 80 bp, synthetic construct
  source 1..80: mol_type = other DNA
tcaaggttattatgtttgtcttataggaagcagttcagaaccattatatatcccaacattggatgattataggtcggctg

SEQ ID NO: 54442 - DNA, 80 bp, synthetic construct
  source 1..80: mol_type = other DNA
aggaagtccttaggtgcatatgaaccaaaacagggttgttacaggacattgtcccttttccgttataggagcaggttctt

SEQ ID NO: 54443 - DNA, 80 bp, synthetic construct
  source 1..80: mol_type = other DNA
aggtcctttcaaggatggcattggccccacatggtgaagaccatgatattgaaaagaatgccataagtgcaatgaggatt

SEQ ID NO: 54444 - DNA, 80 bp, synthetic construct
  source 1..80: mol_type = other DNA
tactgttttcttgattggcccgatacaaacatgcataacaacaaagagctgcctcttaggtttaggtgatcagaggattc

SEQ ID NO: 54445 - DNA, 80 bp, synthetic construct
  source 1..80: mol_type = other DNA
aggttaactatgaaaaaacgtactgtgtttcaggtcaacttattgaaggtatttgctttaacccggttcacactatggcc

SEQ ID NO: 54446 - DNA, 80 bp, synthetic construct
  source 1..80: mol_type = other DNA
ctagccatacatatgacgtggtaactgtgatggtgcgttgttttttaattgtgaaaaaagtatcaacaggggatagcatg

SEQ ID NO: 54447 - DNA, 80 bp, synthetic construct
  source 1..80: mol_type = other DNA
aagattgaaaaaagctttgagactcttgtccaaaaaactggttgtacaggtaatggctttcaaggctattatgtctgttt

SEQ ID NO: 54448 - DNA, 80 bp, synthetic construct
  source 1..80: mol_type = other DNA
atgggtaaaattattccagtttgtctgtacttgctcttccggtgtctattactatgggatagaggaaatgccagaaacct

SEQ ID NO: 54449 - DNA, 80 bp, synthetic construct
  source 1..80: mol_type = other DNA
caaggccttgttattggatcagttgaattaccaccagttccattaacacaaatagaatctctaaaactcgagagctcatg

SEQ ID NO: 54450 - DNA, 80 bp, synthetic construct
  source 1..80: mol_type = other DNA
gcaatgggttgaagaaggtaattcttaccaaaactttcattataggacaatgtatatatacgttcactagtatcttttcc

SEQ ID NO: 54451 - DNA, 80 bp, synthetic construct
  source 1..80: mol_type = other DNA
ggctgggctacaatgttactcctactaacattctgttttgggtgggtcttgataccatttttttctatgatattattaaa

SEQ ID NO: 54452 - DNA, 80 bp, synthetic construct
  source 1..80: mol_type = other DNA
aaaagaactggaatcacacaggaagagttgcccgatgggttcatgtccgtactgcctcaatcctgctgaagctaccacgt

SEQ ID NO: 54453 - DNA, 80 bp, synthetic construct
  source 1..80: mol_type = other DNA
taggggcatatgaaccgaagcagggttgttaccgaacattgtcccttttccgttatagaagtaggttttttgtgggtttc

SEQ ID NO: 54454 - DNA, 80 bp, synthetic construct
  source 1..80: mol_type = other DNA
ttaattcagggtggacagatacagcacatggttcaggagttataccaatgagaactgaccttgaattagatttctctctc

SEQ ID NO: 54455 - DNA, 80 bp, synthetic construct
  source 1..80: mol_type = other DNA
taacttcgatttgcatactagcacatcatcacagcagtcattcacaaaatggacctgggaaataaaaagtgatttggcag

SEQ ID NO: 54456 - DNA, 80 bp, synthetic construct
  source 1..80: mol_type = other DNA
ccatcttctgcaagttatacatacaggagacaattacagaatccagcaaatgaacaggaaaagatcccgtttcaccttca

SEQ ID NO: 54457 - DNA, 80 bp, synthetic construct
  source 1..80: mol_type = other DNA
ggctggggctgcaatcctcctgactgcccaggtgtggggactggatgtacagcatgtggtgtgtacttagataaactaaa

SEQ ID NO: 54458 - DNA, 80 bp, synthetic construct
  source 1..80: mol_type = other DNA
atcagttggtaaggcattcaaaattgtatccttgaggtacacaagaaaggcatgtattcaacttggtaccgagcaaactt

SEQ ID NO: 54459 - DNA, 80 bp, synthetic construct
  source 1..80: mol_type = other DNA
gtaaaagtgttgatagtaatgactgcttagtaacaacatcagtcaaagtatgtttaattgggacagtatcaaagtttcag

SEQ ID NO: 54460 - DNA, 80 bp, synthetic construct
  source 1..80: mol_type = other DNA
aaaacacacaagcctcatcaacaagttttcaaacaaagagtagtgaggtaaacctgcgtggtctgtgtctagtccctcca

SEQ ID NO: 54461 - DNA, 80 bp, synthetic construct
  source 1..80: mol_type = other DNA
aatgtaatcgtaggacgtgacctctcttttcaggatttaagtgaaacaccttgtcaagttgatctaactacaacatctat

SEQ ID NO: 54462 - DNA, 80 bp, synthetic construct
  source 1..80: mol_type = other DNA
ggagtaggtttcaacctgatttgttctgtcagcttgacagagtgttcaacattcttgacttcaattaaagcatgtgattc

SEQ ID NO: 54463 - DNA, 80 bp, synthetic construct
  source 1..80: mol_type = other DNA
agcaatgtgttatggttctacaacagctaatctcttaagaggacaaaatacagtccacattgttggcaaaggaggacatt

SEQ ID NO: 54464 - DNA, 80 bp, synthetic construct
  source 1..80: mol_type = other DNA
cattgtttatattttctatcttcctcttcacattgtgctgtccacgtaggcccagttatgcaaaagaacataaaccttaa

SEQ ID NO: 54465 - DNA, 80 bp, synthetic construct
  source 1..80: mol_type = other DNA
ttagtaatagaaactgctgcaagaactcgaaagacaatagcttgctttgatttatcttgtaatcaaacagcatgtcagcc

SEQ ID NO: 54466 - DNA, 80 bp, synthetic construct
  source 1..80: mol_type = other DNA
ggttttatcaagaatggcatttgcaccacatggcgaggaccatgacattgaaaaaaatgccataagtgcaatgaggattg

SEQ ID NO: 54467 - DNA, 80 bp, synthetic construct
  source 1..80: mol_type = other DNA
ttggtaaagtaacaggtaaggcaccatcaactgaggcatctgacacagtacagggtatagctttttcaggtaatcctctc

SEQ ID NO: 54468 - DNA, 80 bp, synthetic construct
  source 1..80: mol_type = other DNA
atgggaaaaattattccagtttgtctgtacctgctcttcttgtgtctgctactatgggatagaggagataccagaaacct

SEQ ID NO: 54469 - DNA, 80 bp, synthetic construct
  source 1..80: mol_type = other DNA
tgctttgggtggatcttaataccatttttttccatgatattgttgaaaatcttaattgcatttgcttacttatgctctaa

SEQ ID NO: 54470 - DNA, 80 bp, synthetic construct
  source 1..80: mol_type = other DNA
atataatacagattcaaagtttaaaatattaatagaaaaagtgaaaaaagaatatcaaaagactatgggctccatggtat

SEQ ID NO: 54471 - DNA, 80 bp, synthetic construct
  source 1..80: mol_type = other DNA
ttccgttgacacaggtagagtctttaaaactggaaagttcatgcaattttgatctacataccagtacatcatcacaacag

SEQ ID NO: 54472 - DNA, 80 bp, synthetic construct
  source 1..80: mol_type = other DNA
gtgaagtttgtcagtatgagtgtgagactgcaaaagaactagagtcacataggaaaagttgcccaatgggttcatgtcca

SEQ ID NO: 54473 - DNA, 80 bp, synthetic construct
  source 1..80: mol_type = other DNA
ttaattccggatggacagacacagcacatggatctggaataatacccatgaggactgaccttgaacttgatttttctctc

SEQ ID NO: 54474 - DNA, 80 bp, synthetic construct
  source 1..80: mol_type = other DNA
ccatcttctgcaagttatacatataggagacagttacagaatccagcaaatgagcaagagaaaataccatttcatttaca

SEQ ID NO: 54475 - DNA, 80 bp, synthetic construct
  source 1..80: mol_type = other DNA
ggatggggatgtaatccaccagattgtccaggggtgggaactgggtgtacagcatgtggtgtgtatttagacaagctaaa

SEQ ID NO: 54476 - DNA, 80 bp, synthetic construct
  source 1..80: mol_type = other DNA
atcagtgggaaaagcatttaaaattgtatctttgagatacacaaggaaagcatgtattcagcttgggactgaacaaacct

SEQ ID NO: 54477 - DNA, 80 bp, synthetic construct
  source 1..80: mol_type = other DNA
gtaaaagtgtagatagtaatgattgcttggtgactacatcagtcaaagtgtgcttaattggaactgtgtcaaaatttcaa

SEQ ID NO: 54478 - DNA, 80 bp, synthetic construct
  source 1..80: mol_type = other DNA
acccgggggatataatgagtacaccagtcagcatgaagtgccctgaattaagcggttcatttagaaaaaaatgtgccttt

SEQ ID NO: 54479 - DNA, 80 bp, synthetic construct
  source 1..80: mol_type = other DNA
gcaacaacacctgtttgtcaatttgacggaaatactctttccggatataaacgaatgattgcaacaaaagattcatttca

SEQ ID NO: 54480 - DNA, 80 bp, synthetic construct
  source 1..80: mol_type = other DNA
tcaattaaggcatgtgactcagcaatgtgttatggctctacaacagccaatcttttaagagggcaaaatacagttcatat

SEQ ID NO: 54481 - DNA, 80 bp, synthetic construct
  source 1..80: mol_type = other DNA
cattattcatattatctattttcctcttcacattatgttgcccacggaggcctagctatgcaaaagaacataagccttaa

SEQ ID NO: 54482 - DNA, 80 bp, synthetic construct
  source 1..80: mol_type = other DNA
tttggtgattgagactgctgcaaggactcggaaaacaatagcatgttttgacttatcctgtaatcagacagcctgccagc

SEQ ID NO: 54483 - DNA, 80 bp, synthetic construct
  source 1..80: mol_type = other DNA
cagaggattcaagtcaattatgaaaaaacatattgtgtttcaggtcaacttgttgagggtatctgtttcaacccagtaca

SEQ ID NO: 54484 - DNA, 80 bp, synthetic construct
  source 1..80: mol_type = other DNA
taccatggccttgtctcaacctagccacacatatgatatagtgactgtgatggtgcgttgttttttaattgtgaaaaagg

SEQ ID NO: 54485 - DNA, 80 bp, synthetic construct
  source 1..80: mol_type = other DNA
gaatgaacttaaaatggaatgtccgcacacaattggtttgggtcagggccttgttattggatcagttgaattaccgcctg

SEQ ID NO: 54486 - DNA, 80 bp, synthetic construct
  source 1..80: mol_type = other DNA
ggttctttcaaggatggcatttgcacctcatggggaagatcatgatattgaaaaaaatgcaataagtgcaatgaggattg

SEQ ID NO: 54487 - DNA, 80 bp, synthetic construct
  source 1..80: mol_type = other DNA
atggaaaaacttattccagtttgtttgtgtctgcttcttcagggtctattactatggaatagaggaagtgccagaaacct

SEQ ID NO: 54488 - DNA, 80 bp, synthetic construct
  source 1..80: mol_type = other DNA
cactgcccttaacatggactggttacataccgttaccaggggaaattgaaaagacaacacaatgtacagtgttttgtact

SEQ ID NO: 54489 - DNA, 80 bp, synthetic construct
  source 1..80: mol_type = other DNA
gtaatggggcaaagaaagtaattcttactaaaactttagttattggacagtgcatatatacatttactagcatcttttct

SEQ ID NO: 54490 - DNA, 80 bp, synthetic construct
  source 1..80: mol_type = other DNA
actccctagcagtagaattatgtgtaccaggtttgcatggatgggcaactatgatgcttttactaacattttgttttggc

SEQ ID NO: 54491 - DNA, 80 bp, synthetic construct
  source 1..80: mol_type = other DNA
agaaaatcactagcagcatatgaaccgaagcaaggatgttaccgtaccttatctcttttcagatatagaagcaggttctt

SEQ ID NO: 54492 - DNA, 80 bp, synthetic construct
  source 1..80: mol_type = other DNA
ggttggggttgtaatcctcctgactgtcctggggtaggaacaggatgtactgcttgtggagtttatctggacaagcttaa

SEQ ID NO: 54493 - DNA, 80 bp, synthetic construct
  source 1..80: mol_type = other DNA
tttgaaatataccagaaaagcatgtatccagctcggtacagaacagacatgcaaaagtgttgatagcaatgattgcttag

SEQ ID NO: 54494 - DNA, 80 bp, synthetic construct
  source 1..80: mol_type = other DNA
ccttacttttcctaggtcctttagaacaaggtgggttaatttttaagcaatggtgtacaacaacttgtcaatttggagac

SEQ ID NO: 54495 - DNA, 80 bp, synthetic construct
  source 1..80: mol_type = other DNA
ggagtaggttttaatttagtgtgttcagtgagcttaaccgaatgccctacatttctaacctctatcaaggcttgtgattc

SEQ ID NO: 54496 - DNA, 80 bp, synthetic construct
  source 1..80: mol_type = other DNA
ttggatcgtgtaacaggattcaatcaagcagacagtgacaagatatttgatgatggggcaccagaatgcggtgtatcttg

SEQ ID NO: 54497 - DNA, 80 bp, synthetic construct
  source 1..80: mol_type = other DNA
ctggttcacaaaatccggagaatggatccttggggtattgaatggaaattggatggttgtagcagttttaatagcactgt

SEQ ID NO: 54498 - DNA, 80 bp, synthetic construct
  source 1..80: mol_type = other DNA
cactgtttgtattatccatctttttatttacattatgctgtccaaggaggcctagttatgcaaaagaacataaaccctag

SEQ ID NO: 54499 - DNA, 80 bp, synthetic construct
  source 1..80: mol_type = other DNA
cagaggatccaagttaattatgagaagacatactgtgtagcaggccagcttgtggagggcatatgtttcaatcctataca

SEQ ID NO: 54500 - DNA, 80 bp, synthetic construct
  source 1..80: mol_type = other DNA
cacaatggccctgtctcagcctagtcatacatatgatatagtcaccataatggttcgttgcttcctagttgtcaaaaagg

SEQ ID NO: 54501 - DNA, 80 bp, synthetic construct
  source 1..80: mol_type = other DNA
taacatcaggggacagtatgaaaattgagaagaactttgagacccttgttcaaaagagtgattgtacaggcaataacttt

SEQ ID NO: 54502 - DNA, 80 bp, synthetic construct
  source 1..80: mol_type = other DNA
cagggctattatgtatgcttaataggaagtagttctgaaccgttatatattccaacactagatgactacaggtcagctga

SEQ ID NO: 54503 - DNA, 80 bp, synthetic construct
  source 1..80: mol_type = other DNA
tcaacttcacttataattgtagctatcatattcatagcctccgcaaacaacaaagtcacactaacaactgcaatcataca

SEQ ID NO: 54504 - DNA, 80 bp, synthetic construct
  source 1..80: mol_type = other DNA
cccaaatacaacccagcaagcccaccacaaaacaacgccaaaacaaaccaccaaacaaacccaatgatgattttcacttt

SEQ ID NO: 54505 - DNA, 80 bp, synthetic construct
  source 1..80: mol_type = other DNA
tcaacctctctcataattgcagccataatattcatcatctctgccaatcacaaagttacactaacaactgtcacagttca

SEQ ID NO: 54506 - DNA, 80 bp, synthetic construct
  source 1..80: mol_type = other DNA
ctccaacacagaacaacaagccaagcacaaaactacgtccaaaaaatccaccaaaaaaaccaaaagatgattaccatttt

SEQ ID NO: 54507 - DNA, 80 bp, synthetic construct
  source 1..80: mol_type = other DNA
cgacaggggccgttagcaacaacgtccccatgtgtgtgagggagtgctttgctagtgtgaccacactaccttggacaaca

SEQ ID NO: 54508 - DNA, 80 bp, synthetic construct
  source 1..80: mol_type = other DNA
tggaccaaacgcggcacttctccttcccacgcagattgagacacccaacggagctgcgcaaagagtggagatggctgcag

SEQ ID NO: 54509 - DNA, 80 bp, synthetic construct
  source 1..80: mol_type = other DNA
ccaggggataactcagcaaaattccgaagatttacccagacattacatgatggtttgcgagatgataaactgaaaaggtg

SEQ ID NO: 54510 - DNA, 80 bp, synthetic construct
  source 1..80: mol_type = other DNA
cctcactctttggagttgcaatgtcattgttgtttaagcaagtgtggaacaatttgtttccagagctagattgctttttc

SEQ ID NO: 54511 - DNA, 80 bp, synthetic construct
  source 1..80: mol_type = other DNA
tgagaccgtcacctccgaccaaatataaaggatggtgtctggactgttgccaacacactgatttaacttactgtcgaggt

SEQ ID NO: 54512 - DNA, 80 bp, synthetic construct
  source 1..80: mol_type = other DNA
gaccttcctggcacggttggctccgaccacatccaacgttgttgtggctaatccggaacaacccaatgggaccgcgcaac

SEQ ID NO: 54513 - DNA, 80 bp, synthetic construct
  source 1..80: mol_type = other DNA
acctggggacaactctgcaaagtttaggagattcacagcagcagttcataatggcctccctgatgagagattgaagaact

SEQ ID NO: 54514 - DNA, 80 bp, synthetic construct
  source 1..80: mol_type = other DNA
cctctttggcgttgccatgtcattattattcaagagattatggcaggaattgttcccagaacttgattgcttttttgaat

SEQ ID NO: 54515 - DNA, 80 bp, synthetic construct
  source 1..80: mol_type = other DNA
ccccggggataactcagctaaattcagaagatttactgcagctttacacaatggactgcctgatgatcgcctaaaaaatt

SEQ ID NO: 54516 - DNA, 80 bp, synthetic construct
  source 1..80: mol_type = other DNA
tcagaaatatttacaagacagacttttatatgtccagaaagctgagagcttatatagacaacatggatgggcttgagcct

SEQ ID NO: 54517 - DNA, 80 bp, synthetic construct
  source 1..80: mol_type = other DNA
tcctggggataattcagctaaatttagaagattcactgcagctttacacaatgggcttcctgatgaccgtttaaaaaatt

SEQ ID NO: 54518 - DNA, 80 bp, synthetic construct
  source 1..80: mol_type = other DNA
tcctggggataactcagctaaattcagacggtttacttcagctttacataatgggttacctgatgatcgtctaaaaaatt

SEQ ID NO: 54519 - DNA, 80 bp, synthetic construct
  source 1..80: mol_type = other DNA
tttatttggtgtaggaatgtcacttcttttcaagcaattatggaatagtctattcccagaactggactgcttttttgaat

SEQ ID NO: 54520 - DNA, 80 bp, synthetic construct
  source 1..80: mol_type = other DNA
ttagtgtttgaaatggagggcttgggccagccacagtcccaaagggaccaacaagttatggaacaggttgttactcccca

SEQ ID NO: 54521 - DNA, 80 bp, synthetic construct
  source 1..80: mol_type = other DNA
tctttaatccaatcatcctaagaccaaacaatgtagaagtagaatttttactaaatggacaaattattaatacatatcaa

SEQ ID NO: 54522 - DNA, 80 bp, synthetic construct
  source 1..80: mol_type = other DNA
tactgttcaaacaagtatggaataatttattccctgagcttgattgtttctttgagtttgcccaccatccggacgacgca

SEQ ID NO: 54523 - DNA, 80 bp, synthetic construct
  source 1..80: mol_type = other DNA
acgtaaacatcttgatgttactgttggtaagaatgcaacatttaagttgaaaccttctgaccttggtggacctagggatg

SEQ ID NO: 54524 - DNA, 80 bp, synthetic construct
  source 1..80: mol_type = other DNA
acgtaagcaccttgatgttacagtgggaaaaaacgcaacatttaaattgaaaccctctgacctgggtgggcctagagatg

SEQ ID NO: 54525 - DNA, 80 bp, synthetic construct
  source 1..80: mol_type = other DNA
catccactccatcatcaactagttggtctggtcttggtgctcgtaagcacatggatgtaacagttggaaggaatgcagtc

SEQ ID NO: 54526 - DNA, 80 bp, synthetic construct
  source 1..80: mol_type = other DNA
tcgtaagcacatggatgtaacagttggaaggaatgcagtctttaaacttagaccatcagatcttggggggcccagggatg

SEQ ID NO: 54527 - DNA, 80 bp, synthetic construct
  source 1..80: mol_type = other DNA
gcgcaaacatctagatgttactgttggaaaaaatgcagtttttaagttaaaaccttctgatttaggtgggcctcgagatg

SEQ ID NO: 54528 - DNA, 80 bp, synthetic construct
  source 1..80: mol_type = other DNA
taatccaattatcctaagaccaaacaatgtacaggtagaatttttactgaatggacaaattattaatacatatcaagcta

SEQ ID NO: 54529 - DNA, 80 bp, synthetic construct
  source 1..80: mol_type = other DNA
cagagagcaacagccacccttgggacggtcgggtcaaacaccagcggcaccactgagattgaggcgtgtattctcctcaa

SEQ ID NO: 54530 - DNA, 80 bp, synthetic construct
  source 1..80: mol_type = other DNA
acaccacaggacaccattggccctacagcggccctcttacttccaactcagattgaaacaccaaacgcaagtgcacagcg

SEQ ID NO: 54531 - DNA, 80 bp, synthetic construct
  source 1..80: mol_type = other DNA
ggggtggtggcttccaagtgagagtgactatatctggttcaggtctgtttgctggtcgggcggtgactgctatcttgcca

SEQ ID NO: 54532 - DNA, 80 bp, synthetic construct
  source 1..80: mol_type = other DNA
cttggaattggccatggccacaggggcagtcacgagtaatgtgccaaactgcattcgtgagtgttttgcctctgtcacca

SEQ ID NO: 54533 - DNA, 80 bp, synthetic construct
  source 1..80: mol_type = other DNA
cccctgacccaccttgaagcacacagagacggctatacattaaggtagaggtaaaccgtaatccactgagatgattgtcc

SEQ ID NO: 54534 - DNA, 80 bp, synthetic construct
  source 1..80: mol_type = other DNA
tttctcggtgccatacatctgggcccacgcattaacccctacactgcacaccttagtgcaatgtttgctggttggtgcgg

SEQ ID NO: 54535 - DNA, 80 bp, synthetic construct
  source 1..80: mol_type = other DNA
caccttggcccacgcatcaacccatacaccgctcacctgagcgcaatgtttgctgggtggggaggtacctttgaagcccg

SEQ ID NO: 54536 - DNA, 80 bp, synthetic construct
  source 1..80: mol_type = other DNA
acaccattaactcctgtctggaatgacaatgcccatggggtaggttctgttcctatgcatacagatttagagcttgattt

SEQ ID NO: 54537 - DNA, 80 bp, synthetic construct
  source 1..80: mol_type = other DNA
tagagacaccaaatgctagtgctcagcgtgtggaacttgcaatggccacaggggcagtgaccagcaatgtgcccaactgc

SEQ ID NO: 54538 - DNA, 80 bp, synthetic construct
  source 1..80: mol_type = other DNA
tctgggcccacgcattaacccctacactgcacacctaagtgcgatgtttgctggttgggcgaggggctttcaggtgcgtg

SEQ ID NO: 54539 - DNA, 80 bp, synthetic construct
  source 1..80: mol_type = other DNA
tcacgatttcaggttccggactctttgctggtcgggccattactgctatcctgccaccaggtgtcaacccggctgctgtc

SEQ ID NO: 54540 - DNA, 80 bp, synthetic construct
  source 1..80: mol_type = other DNA
tcgggccattactgctatcctgccaccaggtgtcaacccggctgctgtccaaaacccgggcgtcttcccccatgcgttta

SEQ ID NO: 54541 - DNA, 80 bp, synthetic construct
  source 1..80: mol_type = other DNA
catacttttactgtgcaagacgagcccatcgatatccatttattcgcttcatcagtttgctggtagtaatacaacgttac

SEQ ID NO: 54542 - DNA, 80 bp, synthetic construct
  source 1..80: mol_type = other DNA
ggcaagtaatggactcttttcaatttttcagttggttactgaaggacattgaaaggaatctactgtacaccagtttgata

SEQ ID NO: 54543 - DNA, 80 bp, synthetic construct
  source 1..80: mol_type = other DNA
cagttgaacagtttacgctgatttttaattgtttttcggctacttttcatgtaggtcaccgtatagataatgctcaagat

SEQ ID NO: 54544 - DNA, 80 bp, synthetic construct
  source 1..80: mol_type = other DNA
aaagaagaaattatacaatacgttgaggaccatgttgctaaacagtatgttgacgtaacagccgaatctctttcagcttt

SEQ ID NO: 54545 - DNA, 80 bp, synthetic construct
  source 1..80: mol_type = other DNA
tcaaatggattttctaaagaagtaactttcattgatagaagaattaagactactaaaaaaattctacatttagataatga

SEQ ID NO: 54546 - DNA, 80 bp, synthetic construct
  source 1..80: mol_type = other DNA
tttaaataaaatcaaagataaattagattctttatcatgcattcatgataaaattgaagagctgttacgcatacgatatt

SEQ ID NO: 54547 - DNA, 80 bp, synthetic construct
  source 1..80: mol_type = other DNA
tgtggaaaaatatttgaaagaggagcaattcccatttttacggccgaaaggccttatggaactgatgtatcaatacaatc

SEQ ID NO: 54548 - DNA, 80 bp, synthetic construct
  source 1..80: mol_type = other DNA
aatttaaaaaacgtacaagcgtcatgatcaaaagcatgcagatgaagttacacactgaggctacggcactatcaagaata

SEQ ID NO: 54549 - DNA, 80 bp, synthetic construct
  source 1..80: mol_type = other DNA
aagaggaacaaaaaacattaggagtaccaaacgttcagagtcaaaaaaatagaagtcaggtgttgaaggcgattgacatt

SEQ ID NO: 54550 - DNA, 80 bp, synthetic construct
  source 1..80: mol_type = other DNA
aattgggagtaagaatatctgactcaaaaccaatcgccaagccatccaatcatttatatgacatagtcagttctatttct

SEQ ID NO: 54551 - DNA, 80 bp, synthetic construct
  source 1..80: mol_type = other DNA
aaatctgggggaatatactgagtatgattctatcaaactaattgaactacaagcaagacaatggaggatagataatgcta

SEQ ID NO: 54552 - DNA, 80 bp, synthetic construct
  source 1..80: mol_type = other DNA
gctacatatgttagacaatatacaactggatcaagtgtcgttttcggatgacgcttggtagaacatagccaataaaaccc

SEQ ID NO: 54553 - DNA, 80 bp, synthetic construct
  source 1..80: mol_type = other DNA
acattccaattaatgaatatcttcgagataatgaaattgagttgctagatactggcgataataaatggagatcagacact

SEQ ID NO: 54554 - DNA, 80 bp, synthetic construct
  source 1..80: mol_type = other DNA
gaattgcaatagttcgatatgaagaaagcgaaaaatcaaagttatggaaatcaaaagaaaccaacgttttatctccaacg

SEQ ID NO: 54555 - DNA, 80 bp, synthetic construct
  source 1..80: mol_type = other DNA
caattgaacaattttcactaatttttaattgtttttcagctactttccatgtaggccaccgtatagataatgctcaagat

SEQ ID NO: 54556 - DNA, 80 bp, synthetic construct
  source 1..80: mol_type = other DNA
tcaaatggattctctaaggaagtgacgtttattgatagaaagattaagactactaaaaaaattctgcatttagataatga

SEQ ID NO: 54557 - DNA, 80 bp, synthetic construct
  source 1..80: mol_type = other DNA
aacaagatcaaagataagctagattctttatcatgtattcatgacaaaattgaagaactgttacgcatacggtattttac

SEQ ID NO: 54558 - DNA, 80 bp, synthetic construct
  source 1..80: mol_type = other DNA
tgtgggaaaatattcgaaagaggggcaatccccatttttacggctgaaagaccttacggaaccgatgtgtcaatacaatc

SEQ ID NO: 54559 - DNA, 80 bp, synthetic construct
  source 1..80: mol_type = other DNA
aagaagaacaaaaaacattaggagtgccaaatgttcagagtcaaaagaatagaagtcagatactaaaggcaattaacatt

SEQ ID NO: 54560 - DNA, 80 bp, synthetic construct
  source 1..80: mol_type = other DNA
aattgggggtaaggatatctgactcaaaaccaatcgccaaaccatctaatcatttgtatgatatagttagttccatttct

SEQ ID NO: 54561 - DNA, 80 bp, synthetic construct
  source 1..80: mol_type = other DNA
tggggaaacatgctgagtatgattctatcaagttgattgaattacaggcaagacagtggaggataagtaatgctaactta

SEQ ID NO: 54562 - DNA, 80 bp, synthetic construct
  source 1..80: mol_type = other DNA
ctacatatgttagatgatatacaactggatcgagtgtcattttcagatgacgcttggtagatcataactaataaaaaccc

SEQ ID NO: 54563 - DNA, 80 bp, synthetic construct
  source 1..80: mol_type = other DNA
gaattgcaatagttcgatatgaagaaagtgaaaaatcaagattatgggaatcgaaagaaactaacgttttatctccagag

SEQ ID NO: 54564 - DNA, 80 bp, synthetic construct
  source 1..80: mol_type = other DNA
acaccgctaactcctgtttggaatgacaatgcccatggtgttggttctgtgcctatgcacacagatctggagcttgattt

SEQ ID NO: 54565 - DNA, 80 bp, synthetic construct
  source 1..80: mol_type = other DNA
gtacgagtacccatggcatactgcaaagtgtcactatgaacgagattaccaatatgtgacgagctggggttctaatccaa

SEQ ID NO: 54566 - DNA, 80 bp, synthetic construct
  source 1..80: mol_type = other DNA
gcaaatgaaacattattggcgaatgttaccgcagtacgtcaagagtatgctataccagttgggccagtatttccaccagg

SEQ ID NO: 54567 - DNA, 80 bp, synthetic construct
  source 1..80: mol_type = other DNA
acaatttttaatacgctattgaagttggcaggttataaagaacaaatcactactaaagatgaaatagagaagcagatgga

SEQ ID NO: 54568 - DNA, 80 bp, synthetic construct
  source 1..80: mol_type = other DNA
ataagttgactacacgtgagattgagcaagttgagctacttaagcgtattcatgataaactgatggtgcgaacaactgac

SEQ ID NO: 54569 - DNA, 80 bp, synthetic construct
  source 1..80: mol_type = other DNA
acgaaagaaataaatcaaaaaaacgtgaaaacgctagaagaatgggaaagtgggagaaatccttatgaaccaaaagaagt

SEQ ID NO: 54570 - DNA, 80 bp, synthetic construct
  source 1..80: mol_type = other DNA
ccttatgaaccaaaagaagtgactgcagcaatgtgagaggttgagctgccgtcgactgtcttcggaagcggcggagttct

SEQ ID NO: 54571 - DNA, 80 bp, synthetic construct
  source 1..80: mol_type = other DNA
tttggagtagcaatgtcattgctgtttaaagaggtttggaccaggttattcccagaattagattgcttctttgagtttgc

SEQ ID NO: 54572 - DNA, 80 bp, synthetic construct
  source 1..80: mol_type = other DNA
atggagggcaatggctcccaaccgcctcagaaaggttctggcaacactaacccgaatgttgacccgcctggcacaactgg

SEQ ID NO: 54573 - DNA, 80 bp, synthetic construct
  source 1..80: mol_type = other DNA
aatagagtcaaaaactaaaatatctaatgaattgaatgatgcaattaatgccataacgattgagtcaagaaattggaaga

SEQ ID NO: 54574 - DNA, 80 bp, synthetic construct
  source 1..80: mol_type = other DNA
gattgataatattcagttagacacagtaatgttttctgataacatattttaaacgtgagagtacatccattaatataccc

SEQ ID NO: 54575 - DNA, 80 bp, synthetic construct
  source 1..80: mol_type = other DNA
agaatcatttaaaccataccattacaatcagttagtgtcggactttttaaaatataatgaatttgaaatacttgaaggta

SEQ ID NO: 54576 - DNA, 80 bp, synthetic construct
  source 1..80: mol_type = other DNA
aaaatggaaaagtgacactttgcaggggttgagcccaaattacaatcatagaacacatactttgatttcatcaattatat

SEQ ID NO: 54577 - DNA, 80 bp, synthetic construct
  source 1..80: mol_type = other DNA
agtgcaatgtttgctggttggggggggggttttcaggtgcgggtaacaatctcaggttccggactttttgctggtagtgc

SEQ ID NO: 54578 - DNA, 80 bp, synthetic construct
  source 1..80: mol_type = other DNA
tttcaggtgcgggtaacaatctcaggttccggactttttgctggtagggccattactgctatcctgcccccgggtgtgga

SEQ ID NO: 54579 - DNA, 80 bp, synthetic construct
  source 1..80: mol_type = other DNA
tattgtgtatagccttaacatatatactaatttttatattccagtataatctatctaacacactaaaaaaaaatagtagc

SEQ ID NO: 54580 - DNA, 80 bp, synthetic construct
  source 1..80: mol_type = other DNA
tgtcaatacttctttttagctttttttgtcctgttagaagtagaaaaaataaagctaaaaagaagtattgacaataccaa

SEQ ID NO: 54581 - DNA, 80 bp, synthetic construct
  source 1..80: mol_type = other DNA
ttttttgtcctgttagaagtagaaaaaataaagctaaaaagaagtattgacaataccaaaattacaatcagaacagcaac

SEQ ID NO: 54582 - DNA, 80 bp, synthetic construct
  source 1..80: mol_type = other DNA
accaaagaatcaaaggcaattcgtcagcatgcagagacagctggctgtagcatgattgaacatattgagtcaccatcatc

SEQ ID NO: 54583 - DNA, 80 bp, synthetic construct
  source 1..80: mol_type = other DNA
aagcatgtgaccttgccatgtgttatggttctacagttgccaatctagctaggggttctaatacagtaaaagtggttggt

SEQ ID NO: 54584 - DNA, 80 bp, synthetic construct
  source 1..80: mol_type = other DNA
ggcccacgcatcaaccactacactgcacacttgagtgcgatgtttgctggttggggggggggctttcaggtgcgtgtcac

SEQ ID NO: 54585 - DNA, 80 bp, synthetic construct
  source 1..80: mol_type = other DNA
tggtcaccaggagataactcagcgaaattcaggcggtttacatctatgttgcataatggacttcctaatgataaattaaa

SEQ ID NO: 54586 - DNA, 80 bp, synthetic construct
  source 1..80: mol_type = other DNA
acattaagcagttcctagatttctttcctgatgggcatcacggggaagttaaaggaaactggttgcaaggaaatcttaat

SEQ ID NO: 54587 - DNA, 80 bp, synthetic construct
  source 1..80: mol_type = other DNA
tttggagttgcaatgtcattgttgtttaagcaagtatggaacaatttatttccagagctagattgcttttttgagtttgc

SEQ ID NO: 54588 - DNA, 80 bp, synthetic construct
  source 1..80: mol_type = other DNA
aaattgtgttattgatgccttgaaacaagtatacagaactgatttttttatgtcaaggaaactacgaaactatatagata

SEQ ID NO: 54589 - DNA, 80 bp, synthetic construct
  source 1..80: mol_type = other DNA
gcagtcaatcagcaacatggggatatggaagtggctagtgatggccagtttagtatggcctgttttaacactgagaaatg

SEQ ID NO: 54590 - DNA, 80 bp, synthetic construct
  source 1..80: mol_type = other DNA
tatattccagtataatctatctaacacactaaaaaaaatagtagctttctaaccacaaaacttagattcttcttctgtat

SEQ ID NO: 54591 - DNA, 80 bp, synthetic construct
  source 1..80: mol_type = other DNA
tgatacagcaaaactgactccagtgttaattgacgctagaccaattcaaacttgtcagcctaaagctttgatgtacaagg

SEQ ID NO: 54592 - DNA, 80 bp, synthetic construct
  source 1..80: mol_type = other DNA
gtgaaccctttcaatatacataacacgctatgtcttaactttggtcaaaaggaatactacaacataattgcagatcgtac

SEQ ID NO: 54593 - DNA, 80 bp, synthetic construct
  source 1..80: mol_type = other DNA
gcccacgcattaacccctacactgcacacctgagtgcaatgtttgctggttggggaggtacctttgaagcccgaacaccg

SEQ ID NO: 54594 - DNA, 80 bp, synthetic construct
  source 1..80: mol_type = other DNA
tgactactggtcccactctcaattcatggtctggtcttggagcccgaattcacaaggatgttagggttggttcaaatctt

SEQ ID NO: 54595 - DNA, 80 bp, synthetic construct
  source 1..80: mol_type = other DNA
agcaaaatgcactaaatacataaataatggattaccaccaatacaaaatacgagaaatatcgtaccagtttcgatagtat

SEQ ID NO: 54596 - DNA, 80 bp, synthetic construct
  source 1..80: mol_type = other DNA
accagagatggtgaagaagttactgcacatactacgtgttcagtaaatggaataaatgattttaattataatggtggatc

SEQ ID NO: 54597 - DNA, 80 bp, synthetic construct
  source 1..80: mol_type = other DNA
aaaccaaagaaaaaaccaaccacaaaacccacaaacaaaccacctaccaaaaccacaaacaaaagagaccccaaaacacc

SEQ ID NO: 54598 - DNA, 80 bp, synthetic construct
  source 1..80: mol_type = other DNA
ctctccactcaaccacccccgaaaacacacccaactccacacaaacacccacagcatccgagccctctacatcaaattct

SEQ ID NO: 54599 - DNA, 80 bp, synthetic construct
  source 1..80: mol_type = other DNA
ggttattagagtgtctctaagctccacaagagaggagacctgttttggtgactccaccaacccagagatgattgaaggag

SEQ ID NO: 54600 - DNA, 80 bp, synthetic construct
  source 1..80: mol_type = other DNA
gaaagcagtcaatcagcaacatggggatgtggaagtggctagtaatagccagtttagtagggcctgttttggcactgcga

SEQ ID NO: 54601 - DNA, 80 bp, synthetic construct
  source 1..80: mol_type = other DNA
gattccatggctgggctacagctgctttgcttgttacatactgttttggatgggtccttataccagctgtcacgtttgtt

SEQ ID NO: 54602 - DNA, 80 bp, synthetic construct
  source 1..80: mol_type = other DNA
atactaacagtcttaaagtttgttgctaacatttttcacacaagcaaccaagagaacaggctgaaatcagtattgagaaa

SEQ ID NO: 54603 - DNA, 80 bp, synthetic construct
  source 1..80: mol_type = other DNA
tccttctcattctggaatctatactgtgggctgctagtgcatcagaaacaccgttagctcctgtttggaatgacaatgcc

SEQ ID NO: 54604 - DNA, 80 bp, synthetic construct
  source 1..80: mol_type = other DNA
catggtgttggttctgtgcccatgcacacagatctggagcttgatttttctctgacatccagctctaagtatacataccg

SEQ ID NO: 54605 - DNA, 80 bp, synthetic construct
  source 1..80: mol_type = other DNA
ttaaaaacttaacctggctctaatatctaataactaactttcatttttatttttatatggattaattactaaaaaaaata

SEQ ID NO: 54606 - DNA, 80 bp, synthetic construct
  source 1..80: mol_type = other DNA
tcagccccttgatcaatcgcctagtgatggccaccaccaccacaaatagcaagacacatgccaacagaactcctataatc

SEQ ID NO: 54607 - DNA, 80 bp, synthetic construct
  source 1..80: mol_type = other DNA
tgatcaatcgcctagtgatggccaccaccaccacaaatagcaagacacatgccaacagaactcctataatcccaagaatc

SEQ ID NO: 54608 - DNA, 80 bp, synthetic construct
  source 1..80: mol_type = other DNA
tcgctccatcccaacattaatccatacactcagcacttgtcagcaatgtgggctgggtggggcggtacctttgaagcccg

SEQ ID NO: 54609 - DNA, 80 bp, synthetic construct
  source 1..80: mol_type = other DNA
ccttattgttctaaagtttattgcaaatatactccacacaaactcacaagaaaatagattcaaacttattttgcgaaaaa

SEQ ID NO: 54610 - DNA, 80 bp, synthetic construct
  source 1..80: mol_type = other DNA
ttaaagatgagtttgagaaaacaaagggttcaatggtttgtgaagtctgtaagtacgaatgtgaaacatcaaaagagctg

SEQ ID NO: 54611 - DNA, 80 bp, synthetic construct
  source 1..80: mol_type = other DNA
ctggatgttatcgaacacttaatctgtttaggtataaaagccgttgttatattctaactatgtggctttttcttttagta

SEQ ID NO: 54612 - DNA, 80 bp, synthetic construct
  source 1..80: mol_type = other DNA
gtggaatctgtaatgtgggcagcaagtgcacttgagattccattagtcccactctggacagataatgcacatggtattgg

SEQ ID NO: 54613 - DNA, 80 bp, synthetic construct
  source 1..80: mol_type = other DNA
gatcagttcctatgcatactgatttagaattggatttttcccttccatcaagttcaaaatacacatacaagagaaaactt

SEQ ID NO: 54614 - DNA, 80 bp, synthetic construct
  source 1..80: mol_type = other DNA
gtcatttaacactagcagtatacactttacagatgaaagaattgaatggaaagatccagacggaatgcttcgtgaccata

SEQ ID NO: 54615 - DNA, 80 bp, synthetic construct
  source 1..80: mol_type = other DNA
gattaatactttctttttttaaaaaaaatactatcttctatctttctgtctctgtagctttattctgtgggttgtttcaa

SEQ ID NO: 54616 - DNA, 80 bp, synthetic construct
  source 1..80: mol_type = other DNA
ttatctttcaaaagggccatacttataaaatcctagaagaggcaaaaaaatcaatcaacaataagtgcaatgaaaccgaa

SEQ ID NO: 54617 - DNA, 80 bp, synthetic construct
  source 1..80: mol_type = other DNA
aaattttctcaaacattcttctatccccctttggagaagaccatgatctccctggggaagaaatatctacataccagatt

SEQ ID NO: 54618 - DNA, 80 bp, synthetic construct
  source 1..80: mol_type = other DNA
ctgggtgttatcggacgcttaatctgtttagatacaaaagccggtgttacatcctaactatgtggctttttcttcttgta

SEQ ID NO: 54619 - DNA, 80 bp, synthetic construct
  source 1..80: mol_type = other DNA
actcctagtctccctgattcttttaagtattttctgtcctgtccgtaaacacaaaaaatcataactgtactgcttgacca

SEQ ID NO: 54620 - DNA, 80 bp, synthetic construct
  source 1..80: mol_type = other DNA
tttaaaaatgtatatacattatcacttaactaatctgttaccatttactctttatttgactaacactttctttttttaaa

SEQ ID NO: 54621 - DNA, 80 bp, synthetic construct
  source 1..80: mol_type = other DNA
aaattttttcaaatatccttttatccccttttggagaagaccatgacctccctggagaagaaatatctgcttatcagatt

SEQ ID NO: 54622 - DNA, 80 bp, synthetic construct
  source 1..80: mol_type = other DNA
gacatttgtcatggcacagctgttgttcaggaaaacgactcaagacttccgagattgctttggactgaaacacgaaatac

SEQ ID NO: 54623 - DNA, 80 bp, synthetic construct
  source 1..80: mol_type = other DNA
tattctgttgttgtctagctcgaggtgtgtcacgtgatcaagtgcggacgctgaaggatgtacggaatgtagctcaggcg

SEQ ID NO: 54624 - DNA, 80 bp, synthetic construct
  source 1..80: mol_type = other DNA
cagattaggcacgttgtttcagggcagggcgtatggtgggagcatatggtgcggggtcaacctctggcatgttcaatcag

SEQ ID NO: 54625 - DNA, 80 bp, synthetic construct
  source 1..80: mol_type = other DNA
acctggtaaggtggtgctagttgtagattacgaggatggacctcttcacgtgtctattcgtgttaggcttttgaatgtac

SEQ ID NO: 54626 - DNA, 80 bp, synthetic construct
  source 1..80: mol_type = other DNA
attatgctagagagttgggcatgaaagcgagcgatgttgtagttcggattcccacatcgaatcgtccacggtgggttgag

SEQ ID NO: 54627 - DNA, 80 bp, synthetic construct
  source 1..80: mol_type = other DNA
actaaggagtatgagcgatctttgagattttatgagttccgacctggctcaattactacagagttccaccatgtctttgc

SEQ ID NO: 54628 - DNA, 80 bp, synthetic construct
  source 1..80: mol_type = other DNA
tttttattgttactggggatgtggtcgggtggaaaagcgacgccacctttatcagattcgagaagtgagaaggggaaatc

SEQ ID NO: 54629 - DNA, 80 bp, synthetic construct
  source 1..80: mol_type = other DNA
tatatagtagatctaggtttttaagaaggattgccgaggacggagagaaagtgaaagttcaaggtcgaacacatgtgact

SEQ ID NO: 54630 - DNA, 80 bp, synthetic construct
  source 1..80: mol_type = other DNA
gctctaggtgagttagtaagagatggcacggtcgcaatttcattcggacctgggatttattcacgtatgttttctcattt

SEQ ID NO: 54631 - DNA, 80 bp, synthetic construct
  source 1..80: mol_type = other DNA
gcgacgagggctgtccagcatgagaaatgtaatccgaatgaggatatcatctactcaagggaatttgctcgggaactggc

SEQ ID NO: 54632 - DNA, 80 bp, synthetic construct
  source 1..80: mol_type = other DNA
gctgacgggaaaaatcaaggaggctggggcgctagctgtgatttatacttgcatgcaaacgttaggtgtagatatagatc

SEQ ID NO: 54633 - DNA, 80 bp, synthetic construct
  source 1..80: mol_type = other DNA
ctcctgctggttgggtgcgtgaaggtcgaccgaaacagagaaccgctaagctttgtcatcttttgactagaatattgaca

SEQ ID NO: 54634 - DNA, 80 bp, synthetic construct
  source 1..80: mol_type = other DNA
gcattcttttcttaccgtggcgggtcgtcaagtttggtgtgcagtgttatggttgtaattttttccatcatattatatta

SEQ ID NO: 54635 - DNA, 80 bp, synthetic construct
  source 1..80: mol_type = other DNA
cttgcgtttgaagcatgtggatcaagaggttcgatatgatgagctaacattgatctggtatggggatggcggggttgagc

SEQ ID NO: 54636 - DNA, 80 bp, synthetic construct
  source 1..80: mol_type = other DNA
tgcagcgtatcttgcgtgaagtgtcgatgacgaggtttgttgctgtggccggtgatccagctacgccagagtatatagcg

SEQ ID NO: 54637 - DNA, 80 bp, synthetic construct
  source 1..80: mol_type = other DNA
caggcaaagctttgggctaacaagaagagtaatatagtggtgttcaattacgcgcgtccatatgagaggggtccagtttt

SEQ ID NO: 54638 - DNA, 80 bp, synthetic construct
  source 1..80: mol_type = other DNA
tgagaatctgattcgtgatacagtttctcttcgggaagcggcggaggtttttattttgagaacagatgactcttggagtc

SEQ ID NO: 54639 - DNA, 80 bp, synthetic construct
  source 1..80: mol_type = other DNA
aatacggaaatacagtagttgccatgctgggagagggtgatttttgtgatctagtccattttggtgcctcgtgcgatccg

SEQ ID NO: 54640 - DNA, 80 bp, synthetic construct
  source 1..80: mol_type = other DNA
atggagcattattttgttcatatttctcaaccccctggtacaaaccctggctatgaaccggcgaatcaggaagagccttt

SEQ ID NO: 54641 - DNA, 80 bp, synthetic construct
  source 1..80: mol_type = other DNA
acgtgatgattctgattatcggtctgcccttactgactgcgtggctcatgggtggaagcaaactcgagatgcgagggatg

SEQ ID NO: 54642 - DNA, 80 bp, synthetic construct
  source 1..80: mol_type = other DNA
tgaggagtggttgtatgagacccaggctatggagcgagtaattccgacaacgtgggaatcagaaattgtcgatgcgcgtg

SEQ ID NO: 54643 - DNA, 80 bp, synthetic construct
  source 1..80: mol_type = other DNA
ggatgctagtgtcaatcttaacgtttcattttcgcttcgcggggtggtttgagctggatgtcccggtggatgatattggt

SEQ ID NO: 54644 - DNA, 80 bp, synthetic construct
  source 1..80: mol_type = other DNA
cgtggcctgcagttgatgggaagcattaacaaggttgtgcatgttagctgtttcgtacaaaacggtagacgttattttcg

SEQ ID NO: 54645 - DNA, 80 bp, synthetic construct
  source 1..80: mol_type = other DNA
gctatcggtcgatttagatgttgatcgagtcttgaggaatatgagacatgaaggtgatgcattaatggcggcagagttat

SEQ ID NO: 54646 - DNA, 80 bp, synthetic construct
  source 1..80: mol_type = other DNA
ttgtcaccgacgcggtgttagtgtgtgaggggcttgtcgtaggtgagatgcatcggttacaacgaacctaccgatcagta

SEQ ID NO: 54647 - DNA, 80 bp, synthetic construct
  source 1..80: mol_type = other DNA
aatgcaatggtgtatcatcaagggatgactaactttattgtgtatgaatggatgaggcgcgttctcttaactaatttgtt

SEQ ID NO: 54648 - DNA, 80 bp, synthetic construct
  source 1..80: mol_type = other DNA
agatgagatgttagtttttgatattgggggacggaatggcgagttgtcgggatgggtggtgcaggatgtaaaagttcatt

SEQ ID NO: 54649 - DNA, 80 bp, synthetic construct
  source 1..80: mol_type = other DNA
acttttgtgtcgatcctgcggtggaagaggccattcctaaaggtcaacgcgttaggctgccgggtgggagagcgatatgg

SEQ ID NO: 54650 - DNA, 80 bp, synthetic construct
  source 1..80: mol_type = other DNA
gatatagcggaaaccgttgagcagaatgttgctcgttatctagaagttgtcggaaaaccacagactccagccgaaggcat

SEQ ID NO: 54651 - DNA, 80 bp, synthetic construct
  source 1..80: mol_type = other DNA
aatactaattttctcaaatagcattgtggcggcgtatgaggcggctggtcgcaacaacagaaaccaggtagcgaatttgt

SEQ ID NO: 54652 - DNA, 80 bp, synthetic construct
  source 1..80: mol_type = other DNA
ttcgagagtggcaacgatctgctgcgattatgtgcgcggagaggtatatgtataaggtgaggcaggcgtataagagggtg

SEQ ID NO: 54653 - DNA, 80 bp, synthetic construct
  source 1..80: mol_type = other DNA
atcaacaattacaggcttggtgtggtcgtgttttcattcgtgatcagttggttccgacgcgagcaaaccccggggattat

SEQ ID NO: 54654 - DNA, 80 bp, synthetic construct
  source 1..80: mol_type = other DNA
tggattcaggcggcttttcccggtaatgtttatcctcccggtttatgtgaggatttcaatattgatcctgatgcggggat

SEQ ID NO: 54655 - DNA, 80 bp, synthetic construct
  source 1..80: mol_type = other DNA
tttgcctctgagatatcctgatactggtcaaggtgctaccgatgttgttctagctaacggtagattggggcacttaacct

SEQ ID NO: 54656 - DNA, 80 bp, synthetic construct
  source 1..80: mol_type = other DNA
catcgtggtttcagagtctgtattgtggggccgcaagaggttttatcctgaatgggtttggcagattgatttggccaatc

SEQ ID NO: 54657 - DNA, 80 bp, synthetic construct
  source 1..80: mol_type = other DNA
gttgaaaacttggatcatatgtacgcctggcattacttgaccgaagggccctccgagcatgtctttattctgccagctat

SEQ ID NO: 54658 - DNA, 80 bp, synthetic construct
  source 1..80: mol_type = other DNA
gtatgaatctgtacggcatgaaactacttctgaggcgtatggaatgcaatgtggtggtatcatcggaggaaatgtatcat

SEQ ID NO: 54659 - DNA, 80 bp, synthetic construct
  source 1..80: mol_type = other DNA
tgatgcttcctagagacgagcaatacacaactttatttaaagcgtggttgatgtctctggcgaaaatgagtttgtctgag

SEQ ID NO: 54660 - DNA, 80 bp, synthetic construct
  source 1..80: mol_type = other DNA
cttcgcgagccccattggaacggtgttcgggtgcaactatcgagggatcatagaatcttgtactatggtgatttattgcc

SEQ ID NO: 54661 - DNA, 80 bp, synthetic construct
  source 1..80: mol_type = other DNA
aagtgatggagacattacatacctagtgaataaattagagtatcacactatctggtttccagaaggagatttcgagacca

SEQ ID NO: 54662 - DNA, 80 bp, synthetic construct
  source 1..80: mol_type = other DNA
ttgcatcaatttacaacgaaaaaagcaccttctctagtgaaaacgggtcaatccaaatattggaagaagcagaagttaat

SEQ ID NO: 54663 - DNA, 80 bp, synthetic construct
  source 1..80: mol_type = other DNA
tgatgggtgcaatgcttcgagattcgtttccagcaggttgtcatgcacacttaaatattccagtgcctcattatttcgta

SEQ ID NO: 54664 - DNA, 80 bp, synthetic construct
  source 1..80: mol_type = other DNA
tttgatactgatgatgatttgatattgaggtgttggaagggtgtgcgggatacatggattaagttgcggctcggttatga

SEQ ID NO: 54665 - DNA, 80 bp, synthetic construct
  source 1..80: mol_type = other DNA
ggagggaggagtgaacgattctcgtatgagcgaggctttaattgtgaatagagatttacctgctgatttaagtgagtctt

SEQ ID NO: 54666 - DNA, 80 bp, synthetic construct
  source 1..80: mol_type = other DNA
aaaagcagttaaatatcagcaagaaaatgtggggtctactagctattgctgttttaatcggcccctgtttggccatcaaa

SEQ ID NO: 54667 - DNA, 80 bp, synthetic construct
  source 1..80: mol_type = other DNA
gtgtgggaacaggatgtacagcttgtggcctataccttgatcagatgaaacctattggaacagcatataagctagtagca

SEQ ID NO: 54668 - DNA, 80 bp, synthetic construct
  source 1..80: mol_type = other DNA
aatcatttaataccagcagtatacattttacagatgaacggattgaatggaaggatccagacggaatgcttcgtgaccat

SEQ ID NO: 54669 - DNA, 80 bp, synthetic construct
  source 1..80: mol_type = other DNA
atattttctttttttaaaaaaaatactatcttctatctttctatctctatagctttgttctgtgggttgtttcaacatcc

SEQ ID NO: 54670 - DNA, 80 bp, synthetic construct
  source 1..80: mol_type = other DNA
tatgatttatcttgtaattcgacattttgcaagccaacagttcacatggtagtcccagttcatgcctgtaacatgatgaa

SEQ ID NO: 54671 - DNA, 80 bp, synthetic construct
  source 1..80: mol_type = other DNA
ttatttttcaaaaaggtcatacctataagatcttagaagaggcaaaaaaatcaataaacaataaatgcaacgacactgaa

SEQ ID NO: 54672 - DNA, 80 bp, synthetic construct
  source 1..80: mol_type = other DNA
attttttcaaatatccttctgtcccctttcggagaagatcatgacctccctggagaagaaatatctacctaccagatcgc

SEQ ID NO: 54673 - DNA, 80 bp, synthetic construct
  source 1..80: mol_type = other DNA
ttactaacttgattcgtgatacagtctcccttcgagaggcagcggaggtcttcattctaagaacggatgattcttggagt

SEQ ID NO: 54674 - DNA, 80 bp, synthetic construct
  source 1..80: mol_type = other DNA
tgcggtggtcgatatgttaggcgagggtgatttttgcgacctagttcactttggggcttcatgtgatcctatggaacatt

SEQ ID NO: 54675 - DNA, 80 bp, synthetic construct
  source 1..80: mol_type = other DNA
ttgatcccgcaggggaggagaccattcctaaaggagaacgcgttacattaccgggtgatagagcgatatgggacatagag

SEQ ID NO: 54676 - DNA, 80 bp, synthetic construct
  source 1..80: mol_type = other DNA
aaaatatgggaaaacttagtccagtttgtctgtatctgtttctgcagtgtctattactatggaatagagggagtgccaga

SEQ ID NO: 54677 - DNA, 80 bp, synthetic construct
  source 1..80: mol_type = other DNA
tcaatatgaatgtgagacggcaaaagaattagagtctcatcggaaaagctgtccaattggttcctgcccatactgtctta

SEQ ID NO: 54678 - DNA, 80 bp, synthetic construct
  source 1..80: mol_type = other DNA
atccgtctgaggcaacaacatcagcccttcaggctcattttaaagtgtgtaagttgacatcaaggtttcaagataatcta

SEQ ID NO: 54679 - DNA, 80 bp, synthetic construct
  source 1..80: mol_type = other DNA
tatgctactttcttactgtataacctgtatagtatattatatttaaccactatgtagaaaaaaaactagcactttactaa

SEQ ID NO: 54680 - DNA, 80 bp, synthetic construct
  source 1..80: mol_type = other DNA
tactgtctatttagtaggacccatccaaacatgtattacaacaaaaagctgtcttctaggcttgggtgaccaaaggattc

SEQ ID NO: 54681 - DNA, 80 bp, synthetic construct
  source 1..80: mol_type = other DNA
aagtaaattatgagaaaacatactgcgtctcaggtcagttggttgaaggagtgtgttttaatcctgtgcacacaatggct

SEQ ID NO: 54682 - DNA, 80 bp, synthetic construct
  source 1..80: mol_type = other DNA
caggtgataattctgcgaaatttcgaaggtttactcaagcattgcatgatggtttacgcgatgataaactaaaaaggtgc

SEQ ID NO: 54683 - DNA, 80 bp, synthetic construct
  source 1..80: mol_type = other DNA
cagtttccctgctgttcagaaaaatctggaatcttctttacccagaattagattgcttttttgagtttgcacatcactca

SEQ ID NO: 54684 - DNA, 80 bp, synthetic construct
  source 1..80: mol_type = other DNA
caggagacaattctgcaaaattcagaaggtttactcaaacattgcatgatggtttacgagatgataaactgaaaaggtgt

SEQ ID NO: 54685 - DNA, 80 bp, synthetic construct
  source 1..80: mol_type = other DNA
cagtttccctgttatttagaaaagtctggaaccttctttatccagaactggattgcttttttgagtttgcacatcattct

SEQ ID NO: 54686 - DNA, 80 bp, synthetic construct
  source 1..80: mol_type = other DNA
caggagataattcagctaaattccgaaggtttactcaggcattacatgatggtttgcgagatgataaattaaaaaggtgt

SEQ ID NO: 54687 - DNA, 80 bp, synthetic construct
  source 1..80: mol_type = other DNA
ctgtctccctgttatttagaaagatttggagtctcctttacccagagttagactgcttctttgagtttgcacatcattct

SEQ ID NO: 54688 - DNA, 80 bp, synthetic construct
  source 1..80: mol_type = other DNA
caggagataattcagcaaaattccgaagattcactcaggcattgcatgatggtttacgagatgataaattgaagagatgt

SEQ ID NO: 54689 - DNA, 80 bp, synthetic construct
  source 1..80: mol_type = other DNA
cagtttccttgttatttagaaagatttggagtctcctttatccggaattggattgcttttttgagtttgcacaccattct

SEQ ID NO: 54690 - DNA, 80 bp, synthetic construct
  source 1..80: mol_type = other DNA
ctccttttaatgtatggtattgaatataccacaattctaatctttctgatatcaatcattctactcaactatatattaaa

SEQ ID NO: 54691 - DNA, 80 bp, synthetic construct
  source 1..80: mol_type = other DNA
ttaatttttgtagcattatttgccttaattaaagctcagaattatggacttaatatatcaataacaggatcaatggataa

SEQ ID NO: 54692 - DNA, 80 bp, synthetic construct
  source 1..80: mol_type = other DNA
agtatattccaactctactcgagaagaagaatttctaacatactcattcccttccaattatccaaccatcgcaattactc

SEQ ID NO: 54693 - DNA, 80 bp, synthetic construct
  source 1..80: mol_type = other DNA
actcaaatcagtgatggtgaatggaaagactcattatcgcaaatgtttcttacaaaaggatggaaaacaggatcagttta

SEQ ID NO: 54694 - DNA, 80 bp, synthetic construct
  source 1..80: mol_type = other DNA
aactggttgcaaggaaatcttaataagtgttcctcactctttggagttgcaatgtcattgctgttcaagcaagtgtggaa

SEQ ID NO: 54695 - DNA, 80 bp, synthetic construct
  source 1..80: mol_type = other DNA
aaatggtcaccaggagataactcagcaaaattcaggcggtttacatctatgttacataacggccttcccaatgataaatt

SEQ ID NO: 54696 - DNA, 80 bp, synthetic construct
  source 1..80: mol_type = other DNA
acagtatggagagtcatgatccgcacatcaagcagttcctagatttctttcctgatgggcatcacggggaggttaaagga

SEQ ID NO: 54697 - DNA, 80 bp, synthetic construct
  source 1..80: mol_type = other DNA
aaaaaattgtgttattgatgctttgaagcaagtatacagaactgatttttttatgtcaagaaaattacgaaattatatag

SEQ ID NO: 54698 - DNA, 80 bp, synthetic construct
  source 1..80: mol_type = other DNA
tttggtgtggcaatgtccttattatttaaagaaatttggacaaggttatttccagaattagactgcttttttgaatttgc

SEQ ID NO: 54699 - DNA, 80 bp, synthetic construct
  source 1..80: mol_type = other DNA
cataactagataatgctgctatcaagctattgtatgtaactttaacatatatactaatctttatattccaggacacctta

SEQ ID NO: 54700 - DNA, 80 bp, synthetic construct
  source 1..80: mol_type = other DNA
ccttatctaacacactaaaagaaatagtagccttctaaccacaaaacttagatttctcttctgtatgatgtcttaacatc

SEQ ID NO: 54701 - DNA, 80 bp, synthetic construct
  source 1..80: mol_type = other DNA
tacggagacgactgcctatactcggtgtgccctggtactgcttctattttccaaacagttttggccaatttgacttcatt

SEQ ID NO: 54702 - DNA, 80 bp, synthetic construct
  source 1..80: mol_type = other DNA
cgcgtggtattcagttggaaaatgcccttgcgtatgcgtcacagcatggtcacgctgtttttgaggaggttgctgagttg

SEQ ID NO: 54703 - DNA, 80 bp, synthetic construct
  source 1..80: mol_type = other DNA
attcttcactgagtcttgtaacatcatcccaggatgggagatttgtttttagcccaggacttttcccaaacttaaaccag

SEQ ID NO: 54704 - DNA, 80 bp, synthetic construct
  source 1..80: mol_type = other DNA
acacaatgtgaaaagaatgcattgcctatggtatggagaggcatgattgatctctcaggctattatgaggcagtacatcc

SEQ ID NO: 54705 - DNA, 80 bp, synthetic construct
  source 1..80: mol_type = other DNA
ttgtaatgttttctgtgttctatcaggtcctggtgcatcttgtgaggcattctctgagggtgggatcttcaatattacat

SEQ ID NO: 54706 - DNA, 80 bp, synthetic construct
  source 1..80: mol_type = other DNA
aattgagttatgcgtgccaggattttcaggctgggctacagctgctctgctgacaactttctgctttggatggatactta

SEQ ID NO: 54707 - DNA, 80 bp, synthetic construct
  source 1..80: mol_type = other DNA
taccaactattacccttgctgtcttaattgtcctgaagttcatagccaacattcttcacacaaattcacaggaaaatagg

SEQ ID NO: 54708 - DNA, 80 bp, synthetic construct
  source 1..80: mol_type = other DNA
tttaaagttattttaagaaaaatcaaagaagagtttgaaaaaacaaagggctctatggtatgtgaagtgtgcaaatatga

SEQ ID NO: 54709 - DNA, 80 bp, synthetic construct
  source 1..80: mol_type = other DNA
attgaaagaacttaaggcacataacttatcctgtccacaatctgaatgcccttactgctttacacattgtgagcctacag

SEQ ID NO: 54710 - DNA, 80 bp, synthetic construct
  source 1..80: mol_type = other DNA
ctgcctatagcagaagtagaacaacttgttcccgaaagctcctgcaacatggataaccaccaatccctcgcaagtataaa

SEQ ID NO: 54711 - DNA, 80 bp, synthetic construct
  source 1..80: mol_type = other DNA
ccggttgctatagaactttgaatctgttcaggtacaaaagtcgctgttatatcttaacaatgtggctgttcttattggtg

SEQ ID NO: 54712 - DNA, 80 bp, synthetic construct
  source 1..80: mol_type = other DNA
attgagtccattatgtgggctgcaagtgcagtggaaattccactagttcctctctggactgataatgctcatggtattgg

SEQ ID NO: 54713 - DNA, 80 bp, synthetic construct
  source 1..80: mol_type = other DNA
aagaaaactgactaacccaatcaatgctgaacaggaggtgcagttacatattgaaatagaagaacaggggataggggcag

SEQ ID NO: 54714 - DNA, 80 bp, synthetic construct
  source 1..80: mol_type = other DNA
gaactggctgtactgcatgtggattgtatttggatcaaatgaagcctgtgggcacggcatataagcttgttgcaatcaga

SEQ ID NO: 54715 - DNA, 80 bp, synthetic construct
  source 1..80: mol_type = other DNA
taccctcacaaaggtgatatggaggaaaaaggcagatcagtcttcagcaagtcaaaattcatttgaagttgttgaatcag

SEQ ID NO: 54716 - DNA, 80 bp, synthetic construct
  source 1..80: mol_type = other DNA
tagctgaaaacccctgccaaattggtttacaggtatcagcaattgaaggggcttggggttcaggagtcgggtttacacta

SEQ ID NO: 54717 - DNA, 80 bp, synthetic construct
  source 1..80: mol_type = other DNA
aggcgggcacagtggttcatcctttaagtgttgtcatggcactgaatgttctaatactggtttgcaagccagtgcccccc

SEQ ID NO: 54718 - DNA, 80 bp, synthetic construct
  source 1..80: mol_type = other DNA
atctcgacagagtatctggtgtcagtgagcttagtaatgagaaggtatatgatgatggggctcctcaatgtgggattgca

SEQ ID NO: 54719 - DNA, 80 bp, synthetic construct
  source 1..80: mol_type = other DNA
tgctggtttgtaaaatttggagaatgggtaaagggtattctcaatggcaattggattgtgttgattgttctttgtgtttt

SEQ ID NO: 54720 - DNA, 80 bp, synthetic construct
  source 1..80: mol_type = other DNA
actgctgatttcattaatactcttgagcattttttgtcctgtccgtaagcacaaaaaatcatgatttaatcagttagacc

SEQ ID NO: 54721 - DNA, 80 bp, synthetic construct
  source 1..80: mol_type = other DNA
agaccagcttgaagggcttgtgcatgttaaaacatcggatggttgaagattcatacaaaaatcgcaggtcagtcatttgt

SEQ ID NO: 54722 - DNA, 80 bp, synthetic construct
  source 1..80: mol_type = other DNA
ttatgatcttataaccttgtgcatatgtataatttcattaactccatagttattcttcttatgactatgttaaattttaa

SEQ ID NO: 54723 - DNA, 80 bp, synthetic construct
  source 1..80: mol_type = other DNA
cttatgactatgttaaattttaaaaagcaatgtcgtatcttctaatactgtatttcttctcgtgctgcgttgtctggctg

SEQ ID NO: 54724 - DNA, 80 bp, synthetic construct
  source 1..80: mol_type = other DNA
tatgatctatcttgcaattcaactttttgcaaacccacagtctatatgattgtcccagtacatgcatgcaatatgatgaa

SEQ ID NO: 54725 - DNA, 80 bp, synthetic construct
  source 1..80: mol_type = other DNA
tgtgggcctaggaccttacagaatccaggtaatctatgaaaggacttactgtacaattggtatattgacagaagggaaat

SEQ ID NO: 54726 - DNA, 80 bp, synthetic construct
  source 1..80: mol_type = other DNA
gcttcgtcccggataagacaatcttgagttcaattaagagaggaatgttcgtagtgacaagtgttcaggttacatgtttt

SEQ ID NO: 54727 - DNA, 80 bp, synthetic construct
  source 1..80: mol_type = other DNA
tcatagttcagaaaggacatacctataaaattatggatgaaataaaaaaatcacttagcaacaagtgtaatgatacagaa

SEQ ID NO: 54728 - DNA, 80 bp, synthetic construct
  source 1..80: mol_type = other DNA
aacaaaattcagggttattacgtttgtattctaggtggcaactcagcacctgtgtatgttccctctttagatgacttcag

SEQ ID NO: 54729 - DNA, 80 bp, synthetic construct
  source 1..80: mol_type = other DNA
gtccatggaaatattttcaaacatattgcgttcacctttcggagaagaccatgatctccctggcgaagaaatttcaactt

SEQ ID NO: 54730 - DNA, 80 bp, synthetic construct
  source 1..80: mol_type = other DNA
accagattgcaggccccactgaggcaaaggtacctcatacagtcagttcaaaaaatcttgcactgattgcttactctggc

SEQ ID NO: 54731 - DNA, 80 bp, synthetic construct
  source 1..80: mol_type = other DNA
aacttaatcatacaaagtgtgataaaactgctataccgctaacttggaccgggatgattgatttacctggatattatgaa

SEQ ID NO: 54732 - DNA, 80 bp, synthetic construct
  source 1..80: mol_type = other DNA
tataccatcttattcctcactcagtatccttacaagctcgacagaggcaaaacatgtttttagtcctgggttctttccac

SEQ ID NO: 54733 - DNA, 80 bp, synthetic construct
  source 1..80: mol_type = other DNA
tagtagtagactccgcaagaaaaagcagttaaatatcagcaggaaaatgtggggtttactagctattgctgttttgatcg

SEQ ID NO: 54734 - DNA, 80 bp, synthetic construct
  source 1..80: mol_type = other DNA
gtacagggtgtacagcttgtggcctgtatcttgatcagatgaaacctgttgggacagcatataagctcgttgcaatcaga

SEQ ID NO: 54735 - DNA, 80 bp, synthetic construct
  source 1..80: mol_type = other DNA
gtcattcaacactagcagtattcactttacagatgaaaggattgaatggaaggatcctgatgggatgcttcgtgaccaca

SEQ ID NO: 54736 - DNA, 80 bp, synthetic construct
  source 1..80: mol_type = other DNA
gcattacttcttatttccttaattctgttaagtatattctgccctgttcgcaagcacaagaaatcataactatattactc

SEQ ID NO: 54737 - DNA, 80 bp, synthetic construct
  source 1..80: mol_type = other DNA
aacagcttaaaaatgtatatactatataacttaactaatactcacttatttactcttcatttgactaatactttcttttt

SEQ ID NO: 54738 - DNA, 80 bp, synthetic construct
  source 1..80: mol_type = other DNA
tatgacttatcctgcaattcaactttttgcaagccaacagttcatatggtagtcccggtccatgcttgtaacatgatgaa

SEQ ID NO: 54739 - DNA, 80 bp, synthetic construct
  source 1..80: mol_type = other DNA
ttatctttcaaaagggtcatacctacaagatcttagaagaagcaaaaaaatcaattaacaataaatgcaatgatactgag

SEQ ID NO: 54740 - DNA, 80 bp, synthetic construct
  source 1..80: mol_type = other DNA
attttctcaaacattctcttatccccctttggagaagaccatgacctccctggagaggaagtatctacataccagattgc

SEQ ID NO: 54741 - DNA, 80 bp, synthetic construct
  source 1..80: mol_type = other DNA
tcctaccctctctcttctgcaaggtgaatgcccctttcgagattcgtataatgctgtcaactactttattcattattagc

SEQ ID NO: 54742 - DNA, 80 bp, synthetic construct
  source 1..80: mol_type = other DNA
aagaaacagcagttaaataacagcaggatcatgtggagtttgctactgttggctgctttagctggccaaggttttgcatt

SEQ ID NO: 54743 - DNA, 80 bp, synthetic construct
  source 1..80: mol_type = other DNA
catcagattgtcccgggtgtggcacaggctgtacagcatgtggtttatatctagaccgactcaaaccagttggcagtgct

SEQ ID NO: 54744 - DNA, 80 bp, synthetic construct
  source 1..80: mol_type = other DNA
attcttctttaagccttataacctcttcacaggatggaagatatgtatttagtccaggacttttccctaacttaaaccag

SEQ ID NO: 54745 - DNA, 80 bp, synthetic construct
  source 1..80: mol_type = other DNA
acacagtgtgaaaaaaatgcattaccaatggtatggagagggatgattgacctttctgggtactatgaggctatccaccc

SEQ ID NO: 54746 - DNA, 80 bp, synthetic construct
  source 1..80: mol_type = other DNA
cgtgtaatatcttctgtgtcttatctggtccaggtgcatcatgtgaagccttttcagagggtggaatattcaatatcacc

SEQ ID NO: 54747 - DNA, 80 bp, synthetic construct
  source 1..80: mol_type = other DNA
cagttaacttcggagaaaccagtgttacaggtcaagtcgaattgccagcacttccaatcacagaggcagaacagcttgtc

SEQ ID NO: 54748 - DNA, 80 bp, synthetic construct
  source 1..80: mol_type = other DNA
gcatttatacaataacaagcctattttcactcttgcctggtgttgcacactcaattgctatcgaattatgtgtacctgga

SEQ ID NO: 54749 - DNA, 80 bp, synthetic construct
  source 1..80: mol_type = other DNA
cccaacgataactttggctgtattggtagtccttaaattcattgcaaatattctccacacaaattcccaagaaaataggt

SEQ ID NO: 54750 - DNA, 80 bp, synthetic construct
  source 1..80: mol_type = other DNA
ctggatgttataggacgttgaacctatttaggtataaaagcagatgttacatactgacaatgtggcttttcctcctttca

SEQ ID NO: 54751 - DNA, 80 bp, synthetic construct
  source 1..80: mol_type = other DNA
attgaatccataatgtgggctgcaagtgcagctgaaatcccacttgtcccactctggacagataatgcacatggcattgg

SEQ ID NO: 54752 - DNA, 80 bp, synthetic construct
  source 1..80: mol_type = other DNA
gatcagtcccaatgcatactgacttagaacttgatttttccttaccttcaagctcaaaatacacatataaaagaaaactc

SEQ ID NO: 54753 - DNA, 80 bp, synthetic construct
  source 1..80: mol_type = other DNA
agttaacacagaacaaggagttcaattacatatagagattgaagagcaaggaattggtgcagatgtccatcacctaggcc

SEQ ID NO: 54754 - DNA, 80 bp, synthetic construct
  source 1..80: mol_type = other DNA
ccagaaagttcctgcaacatggataaccaccaatctcttgccactatcaacactctgacaaaggttagttggaggaaaaa

SEQ ID NO: 54755 - DNA, 80 bp, synthetic construct
  source 1..80: mol_type = other DNA
gtactgggtgtaccgcttgcgggctgtaccttgatcaaatgaagccaataggaactgcttataaacttgttgctatcagg

SEQ ID NO: 54756 - DNA, 80 bp, synthetic construct
  source 1..80: mol_type = other DNA
tatagtagaaaagcatgtgtccaatttggagaagaacatttatgcaagacaattgacatgaatgattgtttcgtaactcg

SEQ ID NO: 54757 - DNA, 80 bp, synthetic construct
  source 1..80: mol_type = other DNA
ctggctataaaaagatgaaagcaaccattgattcttttcaatctttcaacaccagcagcattcattttacagatgaaaga

SEQ ID NO: 54758 - DNA, 80 bp, synthetic construct
  source 1..80: mol_type = other DNA
tgttacaaaggatatagattttgaaaatttggctgagaatctgtgcgggataggacttcaagtttcagcaattaaaggag

SEQ ID NO: 54759 - DNA, 80 bp, synthetic construct
  source 1..80: mol_type = other DNA
ggctgatcaggtctcagctagtcaaaactcctttgaagtgatcgaagcagagactagttttaaaggattgtgtatgctta

SEQ ID NO: 54760 - DNA, 80 bp, synthetic construct
  source 1..80: mol_type = other DNA
catggggttctggagttggattcacattaacttgccaagtatctttgactgagtgtcctacatttttaacatcaattaag

SEQ ID NO: 54761 - DNA, 80 bp, synthetic construct
  source 1..80: mol_type = other DNA
gcatgtgacatggcaatatgctatggtgcagaaagtgtcactcttgttagaggacaaaatacagtaaaaatcagtgggaa

SEQ ID NO: 54762 - DNA, 80 bp, synthetic construct
  source 1..80: mol_type = other DNA
aggtggacacagtggttcatcatttaagtgttgccatggagttgattgttcaagcaacggcttgcaagcaaacccacccc

SEQ ID NO: 54763 - DNA, 80 bp, synthetic construct
  source 1..80: mol_type = other DNA
atcttgacagggttgcaggagtcagcgagttaactaatgaaaaagtatatgatgatggggcaccccaatgtggaatcgct

SEQ ID NO: 54764 - DNA, 80 bp, synthetic construct
  source 1..80: mol_type = other DNA
tgctggttcataaagtctggagaatgggtgaagggcatctttagtggtaattggatcgtcttgattgtcttatgtgtgtt

SEQ ID NO: 54765 - DNA, 80 bp, synthetic construct
  source 1..80: mol_type = other DNA
acttttaatatccttaatccttcttggtatcttctgtcctgtccgtaagcataaaaagtcataagtaaacacacatgaac

SEQ ID NO: 54766 - DNA, 80 bp, synthetic construct
  source 1..80: mol_type = other DNA
taacacatgattgtaaatatgtaaaaatttattatattaacatttctttacttataacttttaacaacctaaaaaaaata

SEQ ID NO: 54767 - DNA, 80 bp, synthetic construct
  source 1..80: mol_type = other DNA
aaaaaatactatcttctctctctgtctttctatcgctttgttctgtggggtgtttcaacatcttgcggagtctactacta

SEQ ID NO: 54768 - DNA, 80 bp, synthetic construct
  source 1..80: mol_type = other DNA
tgtcggtttgggaccatacagagttcaagttgtttatgagaggacctattgtactgttgggatactgacagaagggaaat

SEQ ID NO: 54769 - DNA, 80 bp, synthetic construct
  source 1..80: mol_type = other DNA
gttttattccagataagacgattttaagttcaattaagagggggatgtttgttgtcactagtgtgcaagtgctttgtttt

SEQ ID NO: 54770 - DNA, 80 bp, synthetic construct
  source 1..80: mol_type = other DNA
tttattgtccagaaaggtcatagttataaaataatggatgaggttaaaaaatcaatgatgaataaatgcaatgatactga

SEQ ID NO: 54771 - DNA, 80 bp, synthetic construct
  source 1..80: mol_type = other DNA
aaggctattacatctgtatattaggcgggaactcagcaccagtctatgtgccatctctagatgactttaggtctatggaa

SEQ ID NO: 54772 - DNA, 80 bp, synthetic construct
  source 1..80: mol_type = other DNA
attttctcaaatatgctccgatctccttttggtgaagatcatgaccttccaggtgaggaattttcaacatatcagattgc

SEQ ID NO: 54773 - DNA, 80 bp, synthetic construct
  source 1..80: mol_type = other DNA
aggtcctactgaagcaaaagtccctcacactgccagctccaaaaacctggcattgattgcttattcagggaacccatcat

SEQ ID NO: 54774 - DNA, 80 bp, synthetic construct
  source 1..80: mol_type = other DNA
cattggtgcacatccacgtgccagtttggggaccctggggatattatgagcccaagagataaaggcttcctttgtcctga

SEQ ID NO: 54775 - DNA, 80 bp, synthetic construct
  source 1..80: mol_type = other DNA
attccccgggagctttcgaaagaaatgcaactttgcaactactcctgtctgtgagtatgacgggaacatggtctcagggt

SEQ ID NO: 54776 - DNA, 80 bp, synthetic construct
  source 1..80: mol_type = other DNA
ggatattgactttgacaaccttggtgacaatccatgcaaagttgggctacagacatcggctattgaaggggcatggggtt

SEQ ID NO: 54777 - DNA, 80 bp, synthetic construct
  source 1..80: mol_type = other DNA
aagtttcagggaagggtggacacagtggctcaacctttaaatgctgtcatggggaagagtgctcacaaattgggctccat

SEQ ID NO: 54778 - DNA, 80 bp, synthetic construct
  source 1..80: mol_type = other DNA
tgatgatggagcaccagaatgtggcataaagtgctggtttgtgaagtcaggtgaatggatttcaggcatcttcaatggta

SEQ ID NO: 54779 - DNA, 80 bp, synthetic construct
  source 1..80: mol_type = other DNA
attggatagttctcattgtgttatgtgcatttttaatcttttcacttgtattattaagcctcctttgtcctgttagaaag

SEQ ID NO: 54780 - DNA, 80 bp, synthetic construct
  source 1..80: mol_type = other DNA
cacaagaaggcatagtcctatagtactaaacacataactacttcatttataattaacttttattaactgctgtattttat

SEQ ID NO: 54781 - DNA, 80 bp, synthetic construct
  source 1..80: mol_type = other DNA
tatattttatctaacacactaaaaaaaatagtagcttcttaaccatataacttaaccttttcttctgtatgatgtcttaa

SEQ ID NO: 54782 - DNA, 80 bp, synthetic construct
  source 1..80: mol_type = other DNA
cctaatagcattaggcccctatagagttcaagatgtctatgagaggacatactgtatgtcaggggtccttctagaaggaa

SEQ ID NO: 54783 - DNA, 80 bp, synthetic construct
  source 1..80: mol_type = other DNA
aatgctttgtaccagaccggagtgttgtgagcattataaaacatggcatatttgatattgcaagtgtccatattgtttgc

SEQ ID NO: 54784 - DNA, 80 bp, synthetic construct
  source 1..80: mol_type = other DNA
tgttatccttacaattttaaagtttattgcaaacatttttcacacaagtaaccaagagaataggcttaaatcagtattaa

SEQ ID NO: 54785 - DNA, 80 bp, synthetic construct
  source 1..80: mol_type = other DNA
atgagacaagttggggctgtaacccagctgattgcccaggggtgggaacaggttgcacagcatgtggattataccttgat

SEQ ID NO: 54786 - DNA, 80 bp, synthetic construct
  source 1..80: mol_type = other DNA
ccagataagttggagaggtaaggctgaacaggcacaagccggccaaaattcatttgaagcagtgtctgctgaagttgacc

SEQ ID NO: 54787 - DNA, 80 bp, synthetic construct
  source 1..80: mol_type = other DNA
ttgctaccacccctctttgtgagtatgatggcaatatggtctcaggttacaagaaagtgatggcaacaattgattccttt

SEQ ID NO: 54788 - DNA, 80 bp, synthetic construct
  source 1..80: mol_type = other DNA
tgccataccattaacctggacaggaatgattgacctacctggttattatgaagcagtacacccttgcactgtcttctgtg

SEQ ID NO: 54789 - DNA, 80 bp, synthetic construct
  source 1..80: mol_type = other DNA
tgaagcagtacacccttgcactgtcttctgtgttttgtccggtcctggtgcgtcctgtgaagcattttcagaagggggga

SEQ ID NO: 54790 - DNA, 80 bp, synthetic construct
  source 1..80: mol_type = other DNA
aatgcccccatacagtcaattttggggaaaacagtgtggtcgggtatgtggagctaccgcctatgccaatcgctgacatc

SEQ ID NO: 54791 - DNA, 80 bp, synthetic construct
  source 1..80: mol_type = other DNA
tctttaatataacttctcccatgtgtttagtctcaaagcaaaatcgctttaggtcatcaaagcaacaagtgaactttgtt

SEQ ID NO: 54792 - DNA, 80 bp, synthetic construct
  source 1..80: mol_type = other DNA
tattaacaattttaaagtttattgcaaacatcttccatacaagcaatcaggaaaatcggctcaagtcagttttgaagaaa

SEQ ID NO: 54793 - DNA, 80 bp, synthetic construct
  source 1..80: mol_type = other DNA
ttttgctgatcctggaatccattttatgggctgcaagtgcttctgaaacacccttaacccctatttggaatgataatgct

SEQ ID NO: 54794 - DNA, 80 bp, synthetic construct
  source 1..80: mol_type = other DNA
actcagatgatgccagagagctcttgcagcatggataaccaccaatctctaaacacaatcacaaagtacacccaagtgag

SEQ ID NO: 54795 - DNA, 80 bp, synthetic construct
  source 1..80: mol_type = other DNA
gacggaagctcacaaacccacttgaggagactcaagcagtagatcttcatattgagttagctgaacagaccataggtgta

SEQ ID NO: 54796 - DNA, 80 bp, synthetic construct
  source 1..80: mol_type = other DNA
gacgtgcatgctttggggcattggtttgacggccgcttaaatctaaagacctcctttcattgttatggtgcatgcacaaa

SEQ ID NO: 54797 - DNA, 80 bp, synthetic construct
  source 1..80: mol_type = other DNA
ttggagaaagaaggctgaccaagcacagtcaagccaaacctcctttgagacagtttcttccgaggtggactttaaaggaa

SEQ ID NO: 54798 - DNA, 80 bp, synthetic construct
  source 1..80: mol_type = other DNA
aagtatcagggaagggtggacatagtggatcaacatttaagtgctgtcatggagaagattgttcacagactgggcttcat

SEQ ID NO: 54799 - DNA, 80 bp, synthetic construct
  source 1..80: mol_type = other DNA
catagctagttactcttactgtattattaatatgtacagccttaacatatatattaatttgtatattttattatactcta

SEQ ID NO: 54800 - DNA, 80 bp, synthetic construct
  source 1..80: mol_type = other DNA
cctgtgtattaaagcacaagatgatagaggattcctatcgcagccgtagatcaataatctgttatgatctttcatgcaat

SEQ ID NO: 54801 - DNA, 80 bp, synthetic construct
  source 1..80: mol_type = other DNA
ataataagattcaggggtattatatatgtcttgtgggagggaattcagcacccatatatgtgccaacccttgatgacttc

SEQ ID NO: 54802 - DNA, 80 bp, synthetic construct
  source 1..80: mol_type = other DNA
aggtcaatggaggcttttgctgggatttttaagtccccacacggggaagatcacgaccttgcaggggaggaagtagcctc

SEQ ID NO: 54803 - DNA, 80 bp, synthetic construct
  source 1..80: mol_type = other DNA
ttattccattgtagggcctgccaatgcaaaagtaccccacagtgccagtgcagatacactgggtttagtcgccttttcag

SEQ ID NO: 54804 - DNA, 80 bp, synthetic construct
  source 1..80: mol_type = other DNA
gaatcccatcctactcatccttcagtgtcctcacaggatctacagatgcccgtcatgtctttagcccaggtttctttcca

SEQ ID NO: 54805 - DNA, 80 bp, synthetic construct
  source 1..80: mol_type = other DNA
tgcagatgctcgtcatggttttagccctggattctttccacaactaaaccagacaaggtgtgataagacagccttaccac

SEQ ID NO: 54806 - DNA, 80 bp, synthetic construct
  source 1..80: mol_type = other DNA
tgacttggacaggtatgattgatctacctggctactatgaagcagtacatccatgcactgttttctgtgttttgtctggc

SEQ ID NO: 54807 - DNA, 80 bp, synthetic construct
  source 1..80: mol_type = other DNA
ccaaagatgccaagttacccatagatttagggatgacttaaagaagacagtaactccccagaattttaccccaggctgtt

SEQ ID NO: 54808 - DNA, 80 bp, synthetic construct
  source 1..80: mol_type = other DNA
gatgtgcatgcgttggggcattggtttgatggccgcttaaatcttaaaacctcctttcactgctatggtgcatgtacaaa

SEQ ID NO: 54809 - DNA, 80 bp, synthetic construct
  source 1..80: mol_type = other DNA
attggatagtactcattgtcttatgtgcatttttaatattctcacttatattgcttagccttctctgtcctgttcgaaag

SEQ ID NO: 54810 - DNA, 80 bp, synthetic construct
  source 1..80: mol_type = other DNA
cacaaaaagtcatagttctaaagcactgcatttataattatcttatttataattaacatttattaactgctatactttac

SEQ ID NO: 54811 - DNA, 80 bp, synthetic construct
  source 1..80: mol_type = other DNA
tctcatgcaatagtacattttgtaaacccaccctttacctaattgtgcctgtacatgcctgtaacatgatgaagagctgc

SEQ ID NO: 54812 - DNA, 80 bp, synthetic construct
  source 1..80: mol_type = other DNA
ctgatagcactagggccctatcgagtacaggttgtctatgagagaacatactgcatgtcaggagtcttcattgaacgaaa

SEQ ID NO: 54813 - DNA, 80 bp, synthetic construct
  source 1..80: mol_type = other DNA
atgctttgtgcctgatcagagtgtagtgagcatcattaaacatggtatatttgacattgcaagtgttcatattgtttgtt

SEQ ID NO: 54814 - DNA, 80 bp, synthetic construct
  source 1..80: mol_type = other DNA
agtgctagcacagacacactgaccttagttgctttctcagggattccatcctattcatcctttagtgtcctaacaggttc

SEQ ID NO: 54815 - DNA, 80 bp, synthetic construct
  source 1..80: mol_type = other DNA
aaactaaaccagacaaggtgtgataagacagccttaccactgacttggacaggtatgattgatctacctggttactatga

SEQ ID NO: 54816 - DNA, 80 bp, synthetic construct
  source 1..80: mol_type = other DNA
agcagtacatccatgcactgttttctgtgttttgtctggccctggagcatcttgtgaagcattctcagaaggaggaatct

SEQ ID NO: 54817 - DNA, 80 bp, synthetic construct
  source 1..80: mol_type = other DNA
tgtttttattaaccctagaatccatattatgggctgctagtgcctctgaaattcctctagtccctatctggaatgacaat

SEQ ID NO: 54818 - DNA, 80 bp, synthetic construct
  source 1..80: mol_type = other DNA
atcacccaaatgatgccagaaagctcttgtagcatggataaccaccagtctttgaacacaatcacgaagtacactcaggt

SEQ ID NO: 54819 - DNA, 80 bp, synthetic construct
  source 1..80: mol_type = other DNA
gcgcatggggtaggatctgtcccgatgcatacagaccttgaattagatttttccttggcttctagctctaaatacactta

SEQ ID NO: 54820 - DNA, 80 bp, synthetic construct
  source 1..80: mol_type = other DNA
caagctggggatgtaacccagctgactgccccggagttggcacaggttgtactgcatgcggcctatatctagaccaatta

SEQ ID NO: 54821 - DNA, 80 bp, synthetic construct
  source 1..80: mol_type = other DNA
aagagatagaggcttcctgtgccccgaatttcctgggagttttcggaagaagtgcaactttgcaactaccccagtatgtg

SEQ ID NO: 54822 - DNA, 80 bp, synthetic construct
  source 1..80: mol_type = other DNA
cagttggagaaaaaaagctgaccaggcgcagtcaagccagaattcatttgaaacagtagcctctgaggtggactttaaag

SEQ ID NO: 54823 - DNA, 80 bp, synthetic construct
  source 1..80: mol_type = other DNA
aagtctcagggaaaggagggcatggtggatcaacatttaagtgctgtcatggcgaagaccgctcacaaattggtctccat

SEQ ID NO: 54824 - DNA, 80 bp, synthetic construct
  source 1..80: mol_type = other DNA
aatggtaattggatagtacttattgtcttatgtgcatttttaatattctcacttatattgcttagccttctctgtcctgt

SEQ ID NO: 54825 - DNA, 80 bp, synthetic construct
  source 1..80: mol_type = other DNA
tcgaaagcacaaaaagtcatagttctaaagcactgcatttataattatcttatctataattaacatttattaactgctgt

SEQ ID NO: 54826 - DNA, 80 bp, synthetic construct
  source 1..80: mol_type = other DNA
actttactacattttatctaacacactaaaaaaaatagtagctttttaaccacacaacttaaccttttcttctgtatgat

SEQ ID NO: 54827 - DNA, 80 bp, synthetic construct
  source 1..80: mol_type = other DNA
gaacttgtgtgttaaaacacaaaatggtggaagactcatatcgcaatcgcaaatcaataatttgctatgacctctcatgc

SEQ ID NO: 54828 - DNA, 80 bp, synthetic construct
  source 1..80: mol_type = other DNA
aatagtacattttgtaaacccaccctttacctaattgtgcctgtacatgcctgtaacatgatgaagagctgcctgatagc

SEQ ID NO: 54829 - DNA, 80 bp, synthetic construct
  source 1..80: mol_type = other DNA
ggattccatcctattcatcctttagtgtcctaacaggttctgcagatgctcgtcatgtttttagccctggattcttccac

SEQ ID NO: 54830 - DNA, 80 bp, synthetic construct
  source 1..80: mol_type = other DNA
caactcaatcagacaagatgtgataagacagctataccacagatttggacaggaatgattgaccttcctggttattatga

SEQ ID NO: 54831 - DNA, 80 bp, synthetic construct
  source 1..80: mol_type = other DNA
ggcaatccacccttgcactgttttttgtgttctgtctggtccaggggcatcttgtgaagcattttcagaaggtgggatct

SEQ ID NO: 54832 - DNA, 80 bp, synthetic construct
  source 1..80: mol_type = other DNA
aaagagttgatatggatatcgtagtttactgtaatggtcagaaaaaagtgatattaacaaaaaccttagtaattggccag

SEQ ID NO: 54833 - DNA, 80 bp, synthetic construct
  source 1..80: mol_type = other DNA
tattaacaattctaaagtttattgcaaacattttccacacaagcaatcaggaaaataggttaaaatcagtcttaaagaaa

SEQ ID NO: 54834 - DNA, 80 bp, synthetic construct
  source 1..80: mol_type = other DNA
gatagcacttggaccatacaaggttcaagttgtttatgagaggacatattgtatgtcaggagtgcttatagaaggaaaat

SEQ ID NO: 54835 - DNA, 80 bp, synthetic construct
  source 1..80: mol_type = other DNA
tagatcaatggaggcttttgctggtatctttaaatcccctcatggagaagatcatgaccttgcaggggaagagattgcct

SEQ ID NO: 54836 - DNA, 80 bp, synthetic construct
  source 1..80: mol_type = other DNA
gaatcccgtcttactcttcattcagtgtccttacagggtctacagatgcccgatatgtatttagtcctgggttctttcct

SEQ ID NO: 54837 - DNA, 80 bp, synthetic construct
  source 1..80: mol_type = other DNA
tacagatgcccgatatgtgtttagtcctgggttctttcctcaactcaatcagacaagatgtgataagacagctataccac

SEQ ID NO: 54838 - DNA, 80 bp, synthetic construct
  source 1..80: mol_type = other DNA
agatttggacaggaatgattgaccttcctggttattatgaggcaatccacccttgcactgttttttgtgttctgtctggt

SEQ ID NO: 54839 - DNA, 80 bp, synthetic construct
  source 1..80: mol_type = other DNA
gtcagagagtggatatggatattgtagtttactgcaatggccagaaaaaggtgatattgacaaaaaccttggtaattgga

SEQ ID NO: 54840 - DNA, 80 bp, synthetic construct
  source 1..80: mol_type = other DNA
caatgcatatatacaataactagcctgttttcacttcttcctggagttgctcattctattgctgtagaattgtgtgttcc

SEQ ID NO: 54841 - DNA, 80 bp, synthetic construct
  source 1..80: mol_type = other DNA
gctgggtcctaatacctgcaattaccctggttattttaacaattttaaaatttattgcaaacatttttcatacaagcaac

SEQ ID NO: 54842 - DNA, 80 bp, synthetic construct
  source 1..80: mol_type = other DNA
caagaaaatagattgaaatcagtcttgaagaaaattaaagaagaatttgagaaaacaaaaggctctatggtatgtgatat

SEQ ID NO: 54843 - DNA, 80 bp, synthetic construct
  source 1..80: mol_type = other DNA
actcaaatgatgcctgagagctcttgtagcatggataaccaccagtccctaaacacaatcacgaagtacactcaggtgag

SEQ ID NO: 54844 - DNA, 80 bp, synthetic construct
  source 1..80: mol_type = other DNA
cacatggggtgggatctattccaatgcacacagatcttgagctggatttttccttaacttcaagctctaagtatacttat

SEQ ID NO: 54845 - DNA, 80 bp, synthetic construct
  source 1..80: mol_type = other DNA
aggagaaagctcataaacccacttgaagagacccaggctgtagatcttcatattgagttagaggaacagacaataggtgt

SEQ ID NO: 54846 - DNA, 80 bp, synthetic construct
  source 1..80: mol_type = other DNA
agatgtacatgctttaggacattggtttgatggccgccttaacctaaagacctcctttcattgttatggtgcatgtacaa

SEQ ID NO: 54847 - DNA, 80 bp, synthetic construct
  source 1..80: mol_type = other DNA
ctttggaccgctagagggtggtggcttaatatttaagcactggtgtacatctacatgtcagtttggggatcctggagata

SEQ ID NO: 54848 - DNA, 80 bp, synthetic construct
  source 1..80: mol_type = other DNA
aagtctcagggaaaggaggccatagtgaatcaacattcaaatgctgccatggggaggagtgctcacagatagggctccat

SEQ ID NO: 54849 - DNA, 80 bp, synthetic construct
  source 1..80: mol_type = other DNA
gtaattggatagtacttattgttctctgtgcatttttaatattttcacttgtattgcttagcctcctctgccctgttagg

SEQ ID NO: 54850 - DNA, 80 bp, synthetic construct
  source 1..80: mol_type = other DNA
aaacataagaagtcatagttctaaggcactgaatagatcattattttattagtacttaacccttgttagctgttgtattg

SEQ ID NO: 54851 - DNA, 80 bp, synthetic construct
  source 1..80: mol_type = other DNA
tattaatttttatctaacacactaaaaaaaatagtagctttttaaccacataacttaactttttcttctgtatgatgtct

SEQ ID NO: 54852 - DNA, 80 bp, synthetic construct
  source 1..80: mol_type = other DNA
agtgccagtgcagacacgttgagcttaattgccttttcaggaatcccgtcttactcttcattcagtgtccttacagggtc

SEQ ID NO: 54853 - DNA, 80 bp, synthetic construct
  source 1..80: mol_type = other DNA
aaaatcaaggaagagtttgaaaggacaaagggatcaatggtatgtgatatctgtaaatatgagtgtgaaaccaacaaaga

SEQ ID NO: 54854 - DNA, 80 bp, synthetic construct
  source 1..80: mol_type = other DNA
tgtcttttagtccttgagtcaatcctgtgggctgctagtgcatcagaaatacccttaagccctacgtggaatgataatgc

SEQ ID NO: 54855 - DNA, 80 bp, synthetic construct
  source 1..80: mol_type = other DNA
tgttgcttagcatcctttgtcctgttagaaaacacaaagaatcataaccaactgatgttctttcatgttatcatgtgtaa

SEQ ID NO: 54856 - DNA, 80 bp, synthetic construct
  source 1..80: mol_type = other DNA
ccttgatatatatatttcctcttatattctaatacatactatctaatacactaaagaagatagtagctgtctaaccataa

SEQ ID NO: 54857 - DNA, 80 bp, synthetic construct
  source 1..80: mol_type = other DNA
acagcttaatcatacaaaatgtgataagactgctataccattaacatggactggaataattgacttgcctggatattatg

SEQ ID NO: 54858 - DNA, 80 bp, synthetic construct
  source 1..80: mol_type = other DNA
aggctgtacatccttgcacagtgttctgtgttttatcaggtccaggtgcatcatgtgaggcattttcagaaggtgggatc

SEQ ID NO: 54859 - DNA, 80 bp, synthetic construct
  source 1..80: mol_type = other DNA
ttgtacttactgtattgaagttcattgcaaatatttttcacacaagtaatcaagagaataggctaaaaatggtcttgaaa

SEQ ID NO: 54860 - DNA, 80 bp, synthetic construct
  source 1..80: mol_type = other DNA
aatctccttctcatccccgggtaccgactgtgggctgctagtgcatcagaaatacccttaagccctacgtggaatgataa

SEQ ID NO: 54861 - DNA, 80 bp, synthetic construct
  source 1..80: mol_type = other DNA
tgctcatggggttggatccatacccatgcatacagatctagagcttgacttttctttaacatcaagttctaagtatacat

SEQ ID NO: 54862 - DNA, 80 bp, synthetic construct
  source 1..80: mol_type = other DNA
gacgttcatgcattgggacactggtttgatggtcgtttaaatctcaagacatcctttcattgttacggtgcatgcacaaa

SEQ ID NO: 54863 - DNA, 80 bp, synthetic construct
  source 1..80: mol_type = other DNA
tggacaaccaccagtccttgagcacagtaacaaagtatacacaagtgagttggagagggaaagctgaccaggcacagtct

SEQ ID NO: 54864 - DNA, 80 bp, synthetic construct
  source 1..80: mol_type = other DNA
cataaccaactgatgttctttcatgttatcatgtgtaaccctgatatatatatttctttttatattctaatacatactat

SEQ ID NO: 54865 - DNA, 80 bp, synthetic construct
  source 1..80: mol_type = other DNA
atcttaagaggacctgtgtattaaaacacaaattggtagaagaatcataccgtagccggaagtcactaacttgttatgac

SEQ ID NO: 54866 - DNA, 80 bp, synthetic construct
  source 1..80: mol_type = other DNA
cataattgcactagggccgcatagagtacaagtggtatacgagagaacatattgcatgactggggttctattagaaggga

SEQ ID NO: 54867 - DNA, 80 bp, synthetic construct
  source 1..80: mol_type = other DNA
agtgttttgtcccagatcagagtgtagtcagcattgtcaggcacggtatctttgacattgcaagtgttcatattgcatgt

SEQ ID NO: 54868 - DNA, 80 bp, synthetic construct
  source 1..80: mol_type = other DNA
tttttgtagcgatcacagggaacacatataagctttttgaacaagttaagaagtcatttgggacaacatgcaatgacact

SEQ ID NO: 54869 - DNA, 80 bp, synthetic construct
  source 1..80: mol_type = other DNA
gaaaataaggtgcaaggttactacatctgtattcttggaggaaactccccacctatttatgtcccaacacttgatgattt

SEQ ID NO: 54870 - DNA, 80 bp, synthetic construct
  source 1..80: mol_type = other DNA
ttggtgaaaatccttgtaaggttggcttacggacatcctccattgaaggggcatggggctcaggtgtaggcttcacgctt

SEQ ID NO: 54871 - DNA, 80 bp, synthetic construct
  source 1..80: mol_type = other DNA
cactggcagtcaggatggccctattgtatatagtcctggattgtttcctaaactgaaccaatcatcatgtgataaggttg

SEQ ID NO: 54872 - DNA, 80 bp, synthetic construct
  source 1..80: mol_type = other DNA
gtcccccacactgcaagtacagcaaacatgctcctcactgcattctcaggggttcctagctattcttcactcagcgtctt

SEQ ID NO: 54873 - DNA, 80 bp, synthetic construct
  source 1..80: mol_type = other DNA
cgagaaacagcagttaaagaacaataggatcatgtggagtttgctattactggccgctttagttggccaaggctttgcat

SEQ ID NO: 54874 - DNA, 80 bp, synthetic construct
  source 1..80: mol_type = other DNA
cccagctaaaccatacaaagtgtgacaaaactgctataccattgacatggacagggatgattgaccttcccgggtactat

SEQ ID NO: 54875 - DNA, 80 bp, synthetic construct
  source 1..80: mol_type = other DNA
tattgacaattttaaagttcattgcaaatatcttccacacaagcaatcaggagaataggttaaagtcagtactcagaaag

SEQ ID NO: 54876 - DNA, 80 bp, synthetic construct
  source 1..80: mol_type = other DNA
gtacgggctgtacagcatgcggattgtaccttgaccaattaagggctgttggtagtgcatacaaaattattacaataaga

SEQ ID NO: 54877 - DNA, 80 bp, synthetic construct
  source 1..80: mol_type = other DNA
catagctaactgatattatctacatgatattatatttaatcttaatatgtgtattaatttgtatattccattatattcta

SEQ ID NO: 54878 - DNA, 80 bp, synthetic construct
  source 1..80: mol_type = other DNA
cctcaaaggaacttgtgttttaaagcataaaatgttagaagagtcataccgcagcagaaaatcaatagcttgttatgacc

SEQ ID NO: 54879 - DNA, 80 bp, synthetic construct
  source 1..80: mol_type = other DNA
tctcttgtaatagtacctattgcaagcctaccctgtatatgattgtgccaatccatgcatgcaatatgatgaaaagttgt

SEQ ID NO: 54880 - DNA, 80 bp, synthetic construct
  source 1..80: mol_type = other DNA
caagttggggctgtaacccatcagactgccctggagtaggtacaggctgtacagcatgtggattataccttgaccaacta

SEQ ID NO: 54881 - DNA, 80 bp, synthetic construct
  source 1..80: mol_type = other DNA
gctggagaaagaaggctgatcaggcacagtccagccaaaattcatttgaaacagtatctgttgaggttgaccttaaaggg

SEQ ID NO: 54882 - DNA, 80 bp, synthetic construct
  source 1..80: mol_type = other DNA
agacaaaaaaagactgagagcaagatggataggtggtttctggtagtcgttggagtcttgactactgctgtggctgcatt

SEQ ID NO: 54883 - DNA, 80 bp, synthetic construct
  source 1..80: mol_type = other DNA
tcattgccgattcaaatcacagtagttgtgacaagaagactttaccgctgacttggaggggttttctttccatgtctgga

SEQ ID NO: 54884 - DNA, 80 bp, synthetic construct
  source 1..80: mol_type = other DNA
tcctaacaaagacattggtaatagggcaatgtatatatacatttactagcctattttcattaataccaaatgttgcacac

SEQ ID NO: 54885 - DNA, 80 bp, synthetic construct
  source 1..80: mol_type = other DNA
ccccacaatcacaatgatgatcttgaaggtattacgcctactgacatactcttgctctcattattcaactgaatctaagt

SEQ ID NO: 54886 - DNA, 80 bp, synthetic construct
  source 1..80: mol_type = other DNA
aagtgaatatggttacattagaccagattactgaattgaaggttgaaagctcatgcaattttgaccatcatgcaccccct

SEQ ID NO: 54887 - DNA, 80 bp, synthetic construct
  source 1..80: mol_type = other DNA
ttattcagtgtgtaaactaacagggcgttatcatgaagctcttaaaaaatctttaaagaagccggaggtccagaggggtt

SEQ ID NO: 54888 - DNA, 80 bp, synthetic construct
  source 1..80: mol_type = other DNA
gttataggacacttggggtgttccggtataagagcaggtgctatgtaggtcttgtctggtcctttctattaacattggaa

SEQ ID NO: 54889 - DNA, 80 bp, synthetic construct
  source 1..80: mol_type = other DNA
acaactgctcagacattcactcaactgaagtgggctaagactgcaggtacaacagacacaacaaatgcaggtgaaaacac

SEQ ID NO: 54890 - DNA, 80 bp, synthetic construct
  source 1..80: mol_type = other DNA
acgtgtcagaagctcatataacaacaaatcgattagagtgggttgatccagatagcaatatcaaagatcatattaattta

SEQ ID NO: 54891 - DNA, 80 bp, synthetic construct
  source 1..80: mol_type = other DNA
gtcctgaatcgtgatgtttcattccaggatcttagtgataatccttgcaaagtggatctaacaacacaagcaattgacgg

SEQ ID NO: 54892 - DNA, 80 bp, synthetic construct
  source 1..80: mol_type = other DNA
tgtggtgactcttgtacgtggttccaatacagtgaaagttgttggtaaaggcgggcactcaggttcgctgttcaagtgct

SEQ ID NO: 54893 - DNA, 80 bp, synthetic construct
  source 1..80: mol_type = other DNA
gccatgataaagaatgtactagcactgggcttgcagcatctgctccacatctagagagggttacaggatttaaccaggtt

SEQ ID NO: 54894 - DNA, 80 bp, synthetic construct
  source 1..80: mol_type = other DNA
agtgggaattgggttgttgttgcagtccttgttgtcatattcttaatttcaatacttctttttagctttttttgccccat

SEQ ID NO: 54895 - DNA, 80 bp, synthetic construct
  source 1..80: mol_type = other DNA
aaggtctcataaaaaacaagtgtagtcatgtattaccttctgccttcctatcatttaattagttaatcattgtaatactt

SEQ ID NO: 54896 - DNA, 80 bp, synthetic construct
  source 1..80: mol_type = other DNA
taagcttatataaagtcataacaaccaaaactactcaatgcctacacaatatatattatttactaatgttactaaaaaaa

SEQ ID NO: 54897 - DNA, 80 bp, synthetic construct
  source 1..80: mol_type = other DNA
tactcaatgcctacacaatatatattatttactaatgttactaaaaaaaactaacactttaatactatataactcatttg

SEQ ID NO: 54898 - DNA, 80 bp, synthetic construct
  source 1..80: mol_type = other DNA
ttgtcagcctacaatccacttacttgcaccgatacagacatgcatgtctgttcgtaactgcatgatcagcctactcacaa

SEQ ID NO: 54899 - DNA, 80 bp, synthetic construct
  source 1..80: mol_type = other DNA
gccggattcaagtagtctatgaaaaaacatattgcatctctggacagttgatagaaggtctctgctttaaccctgtacca

SEQ ID NO: 54900 - DNA, 80 bp, synthetic construct
  source 1..80: mol_type = other DNA
caacattagctctaacacagcctgggcatacatatgatacaataacattacctgttatgtgctttttaattgcaaagaaa

SEQ ID NO: 54901 - DNA, 80 bp, synthetic construct
  source 1..80: mol_type = other DNA
ggtacaaacttgaagattgctgttgagctagaaaagttaacaacaaggacaggttgtactgaaaatgcacttcaagctta

SEQ ID NO: 54902 - DNA, 80 bp, synthetic construct
  source 1..80: mol_type = other DNA
ccctcgaagtgtccatgaactcaagattgaatgtccgcatactgtagtattgggtcaaggttatgttgcaggttcagtgg

SEQ ID NO: 54903 - DNA, 80 bp, synthetic construct
  source 1..80: mol_type = other DNA
aaagggttgatatggatattattgtatattgcaatggccagaggaaagtaatacttacaaaaaccttagtcataggacag

SEQ ID NO: 54904 - DNA, 80 bp, synthetic construct
  source 1..80: mol_type = other DNA
ccttgggtcattggtttgacggtcggctaaaccttaaaacatctttccattgttacggtgcctgcacaaaatatgagtat

SEQ ID NO: 54905 - DNA, 80 bp, synthetic construct
  source 1..80: mol_type = other DNA
ccaggtaagctggaggggtaaggctgatcaggcacaagccagtcagaattcatttgaagcagtgtctgctgaggttgacc

SEQ ID NO: 54906 - DNA, 80 bp, synthetic construct
  source 1..80: mol_type = other DNA
aactttatcacatatattaatttgtatttcctattataacctatctaacacactaaaaaaaatagtagctgtctaaccat

SEQ ID NO: 54907 - DNA, 80 bp, synthetic construct
  source 1..80: mol_type = other DNA
ttaaaggaacttgtgttttgaagcacaaaatgctagaagaatcataccgcagcagaaaatcaataacatgttatgacctt

SEQ ID NO: 54908 - DNA, 80 bp, synthetic construct
  source 1..80: mol_type = other DNA
aatctcctcctggtccccgggtaccgagcttgggctgcaagtgcatcggaaatacccttaaaccctgtatggaatgacaa

SEQ ID NO: 54909 - DNA, 80 bp, synthetic construct
  source 1..80: mol_type = other DNA
cgcccatggagtaggttctgtaccgatgcacacagacttagagctggatttttctttaacatcaagttccaagtatacat

SEQ ID NO: 54910 - DNA, 80 bp, synthetic construct
  source 1..80: mol_type = other DNA
aaagagttgacatggatatcgtggtttattgtaatggtcaaaggaaggtgatattaacaaaaaccttagttattggacaa

SEQ ID NO: 54911 - DNA, 80 bp, synthetic construct
  source 1..80: mol_type = other DNA
atacaaatggttcctgaaagttcttgtagcatggacaaccaccagtccatgagcacagcaacgaagtatactcaagtgag

SEQ ID NO: 54912 - DNA, 80 bp, synthetic construct
  source 1..80: mol_type = other DNA
gagtgggtacaggatgcacagcatgtgggttatatctcgaccagttaaaaccggttggcagtgcatataaaatcattaca

SEQ ID NO: 54913 - DNA, 80 bp, synthetic construct
  source 1..80: mol_type = other DNA
tttttgtagcaattacaggaaacacatataagcttattgaacaagttaagacgtcatttgggacaacatgtaacgatact

SEQ ID NO: 54914 - DNA, 80 bp, synthetic construct
  source 1..80: mol_type = other DNA
agctggggttctaatccaacagactgccccggggtgggtacaggctgtacagcatgtgggctttatcttgaccagctaaa

SEQ ID NO: 54915 - DNA, 80 bp, synthetic construct
  source 1..80: mol_type = other DNA
catagctagatgataccgctatcaagttattgtatatagctttaacatgtatactaagttttatattcctggacacttta

SEQ ID NO: 54916 - DNA, 80 bp, synthetic construct
  source 1..80: mol_type = other DNA
gctaacacactaaaaaaaatagtagctttttaaccacaaaacttagatttttcttctgtatgatgtcttaacatcttgcg

SEQ ID NO: 54917 - DNA, 80 bp, synthetic construct
  source 1..80: mol_type = other DNA
ctattgtatatagtcctggattgtttcctaaactgaaccaatcatcatgtgataaggttgggctgcctctaatatgggaa

SEQ ID NO: 54918 - DNA, 80 bp, synthetic construct
  source 1..80: mol_type = other DNA
ctgctgaacaacaggttaactttgcatgccaaagtgttgaccaggacattttaatcttctgtaatggtcagaagaaaaca

SEQ ID NO: 54919 - DNA, 80 bp, synthetic construct
  source 1..80: mol_type = other DNA
tcaagctcatcttgaaaaagatcaaggaagagtttgaaaaaacaaagggttcaatggtttgtgaggtatgcaagtatgag

SEQ ID NO: 54920 - DNA, 80 bp, synthetic construct
  source 1..80: mol_type = other DNA
cagggaaggaattaaaagcacataatctatcctgcccgcaatcacagtgtccctattgtttcacacactgtgaaccaact

SEQ ID NO: 54921 - DNA, 80 bp, synthetic construct
  source 1..80: mol_type = other DNA
agttctacttagtgaggtagagacgcttgtcccagaaagctcttgcaatatggataatcaccaatcaatgtcaatcatac

SEQ ID NO: 54922 - DNA, 80 bp, synthetic construct
  source 1..80: mol_type = other DNA
atctactagccctgggtgttaccggaccttgaacttgttcaggtacaaaagtaggtgttatatattcacagtgtgggtag

SEQ ID NO: 54923 - DNA, 80 bp, synthetic construct
  source 1..80: mol_type = other DNA
ttctccttgttgtagagtcagtgatgtgggcagccagtgcttcagagacagtattagagccctcatggaatgataacgca

SEQ ID NO: 54924 - DNA, 80 bp, synthetic construct
  source 1..80: mol_type = other DNA
catggagttggtgtagtgcctatgcatacagacttggaattagatttttctctcccatcaagctcgaagtatacgtataa

SEQ ID NO: 54925 - DNA, 80 bp, synthetic construct
  source 1..80: mol_type = other DNA
gactgttttgtcacaaggcatgtgaaagtctgtattattgggacagtctcaaaattctctcaaggggacacactggtatt

SEQ ID NO: 54926 - DNA, 80 bp, synthetic construct
  source 1..80: mol_type = other DNA
tttaggtcctatggagggtggagggctaatatttaaagactggtgtacaagcacatgtcagtttggagatccaggagaca

SEQ ID NO: 54927 - DNA, 80 bp, synthetic construct
  source 1..80: mol_type = other DNA
aaaaagtcactcaactaacttggagaaagaaggctgataaagcgcaggcagcaaaagactcatttgaaattacctcaggt

SEQ ID NO: 54928 - DNA, 80 bp, synthetic construct
  source 1..80: mol_type = other DNA
gcatggggttcaggggttgggttcactttaacatgccaggtttctttaactgaatgttctcgtttcttgacctcaatcaa

SEQ ID NO: 54929 - DNA, 80 bp, synthetic construct
  source 1..80: mol_type = other DNA
agcttgtgacaaggcaatatgctatggcgcacagagtagcaccctcattcgaggacaaaatacagtaaaagtgtctggga

SEQ ID NO: 54930 - DNA, 80 bp, synthetic construct
  source 1..80: mol_type = other DNA
gattgcaagctagtgcaccccatcttgacaagattaatggtattgtagaacaagaaaatgaaaaagtttatgacgatggt

SEQ ID NO: 54931 - DNA, 80 bp, synthetic construct
  source 1..80: mol_type = other DNA
atgctggtttgtgaagtctggagaatggattcaaggtatcttcaatgggaattggattgtaattgttgtcctaatctttt

SEQ ID NO: 54932 - DNA, 80 bp, synthetic construct
  source 1..80: mol_type = other DNA
tcttcatcctatcattgatattgctcagcatcttttgtccaattcgaaagcataaacgctcctagcatggaactgtatat

SEQ ID NO: 54933 - DNA, 80 bp, synthetic construct
  source 1..80: mol_type = other DNA
gaagtcagcttgaaaggtacatgcaccttaacacatagaatggttgaggactctcataggaatagaaagtcaataatatg

SEQ ID NO: 54934 - DNA, 80 bp, synthetic construct
  source 1..80: mol_type = other DNA
ggattgatgctgcttgcttgttaatctgctttttttaataatgccattttatacttactaacctatatttctaaaaaaaa

SEQ ID NO: 54935 - DNA, 80 bp, synthetic construct
  source 1..80: mol_type = other DNA
aaaaaaatagactctttactactagatttcctagtcctttattacgtgggtatttctatatcttgcggagcctactacta

SEQ ID NO: 54936 - DNA, 80 bp, synthetic construct
  source 1..80: mol_type = other DNA
ttatgacctatcctgtaattcaacccattgtaaaccaacaatgcacatgatagttcccattcactcatgtaatatgatga

SEQ ID NO: 54937 - DNA, 80 bp, synthetic construct
  source 1..80: mol_type = other DNA
tggtgtgtttgatattgccagtgttagtattgtttgcttcttcgtgagagtgaagggtacaaattacaagataatggcta

SEQ ID NO: 54938 - DNA, 80 bp, synthetic construct
  source 1..80: mol_type = other DNA
tgtgggtggaaattcttcaccagtgtatgtaccatcaactactgatttccgttcaatggaagcacttgcaagtatgctta

SEQ ID NO: 54939 - DNA, 80 bp, synthetic construct
  source 1..80: mol_type = other DNA
gagcaccccatggtgaagatcatgatttagctggagaagaagttgcaacatattcaattgctggtcaagttgaaggtaaa

SEQ ID NO: 54940 - DNA, 80 bp, synthetic construct
  source 1..80: mol_type = other DNA
agcaaacatgctcctcactgcattctcaggggttcctagctattcttcactcagcgtcttcactggcagtcaggatggcc

SEQ ID NO: 54941 - DNA, 80 bp, synthetic construct
  source 1..80: mol_type = other DNA
ttggtgaaaacccttgtaagatcggcttacagacatctgcaattgagggtgcatggggttcaggtgtaggttttacactt

SEQ ID NO: 54942 - DNA, 80 bp, synthetic construct
  source 1..80: mol_type = other DNA
catagctagttgagaattttcccatcctaaattatataacattaacatatatattaatgtgtatacgctattataaccta

SEQ ID NO: 54943 - DNA, 80 bp, synthetic construct
  source 1..80: mol_type = other DNA
aaagagttgatatggacattgttgtatattgcaatggtcagagaaaagtgatactgacaaagaccttagtcataggacag

SEQ ID NO: 54944 - DNA, 80 bp, synthetic construct
  source 1..80: mol_type = other DNA
tactaacaatcctaaaatttattgcaaatattttccacacaagcaatcaagaaaataggctcaaatcagtgttgaggaaa

SEQ ID NO: 54945 - DNA, 80 bp, synthetic construct
  source 1..80: mol_type = other DNA
caagttggggctgtaatccagctgattgcccaggggtgggtacaggctgtacagcatgtggactttaccttgaccagcta

SEQ ID NO: 54946 - DNA, 80 bp, synthetic construct
  source 1..80: mol_type = other DNA
tggacaaccaccaatcactgaatacgataacaaagtatactcaggtaagttggagaggcaaggctgatcagtcacaggcc

SEQ ID NO: 54947 - DNA, 80 bp, synthetic construct
  source 1..80: mol_type = other DNA
ggatattgactttgataatcttggtgaaaacccttgtaagatcggcttacagacatctgcaattgagggtgcatggggtt

SEQ ID NO: 54948 - DNA, 80 bp, synthetic construct
  source 1..80: mol_type = other DNA
ccttaaggggacatgtgtcttgaagcacaagatgctagaagagtcataccgtagcagaaaatcaataacctgctatgacc

SEQ ID NO: 54949 - DNA, 80 bp, synthetic construct
  source 1..80: mol_type = other DNA
tagtagtagactccgcaaaagaaagcagtcaatcagcaacatggagatatggaagtggctagtaatggccagtttagtat

SEQ ID NO: 54950 - DNA, 80 bp, synthetic construct
  source 1..80: mol_type = other DNA
ccggggcatcatgtgaagcattttctgaaggtggaattttcaacataacatcccctatgtgcttagtgtcaaagcaaaat

SEQ ID NO: 54951 - DNA, 80 bp, synthetic construct
  source 1..80: mol_type = other DNA
gtgcccccacacagttagctttggtgaaaacagtgtgataggttatgtggaattaccccctatgccattggctgacacag

SEQ ID NO: 54952 - DNA, 80 bp, synthetic construct
  source 1..80: mol_type = other DNA
aaactttacacctggttgctatcggacactgaacctgttcagatataaaagtagatgttatatctttacaatgtgggtct

SEQ ID NO: 54953 - DNA, 80 bp, synthetic construct
  source 1..80: mol_type = other DNA
gcctcctggtcttggagtcaatactatgggctgccagtgcttcagaagtgcccttaaatcctgtatggaatgataatgcc

SEQ ID NO: 54954 - DNA, 80 bp, synthetic construct
  source 1..80: mol_type = other DNA
catggggtagggtctgtaccgatgcatactgacttagagctcgactttcccctaacatcaagctcaaagtatacataccg

SEQ ID NO: 54955 - DNA, 80 bp, synthetic construct
  source 1..80: mol_type = other DNA
cagaaggctgacaaatccacttgaagaaacacaatcaattaaccttcacattgaaatagaagaacaaacaattggtgttg

SEQ ID NO: 54956 - DNA, 80 bp, synthetic construct
  source 1..80: mol_type = other DNA
aataagatatagcaggaaagtgtgtgttcaatttggggaggaaaacctatgtaaggtaatagacatgaatgattgctttg

SEQ ID NO: 54957 - DNA, 80 bp, synthetic construct
  source 1..80: mol_type = other DNA
caattgaaggggcctggggttctggtgtaggctttacactcacatgtctaatatctttaacagagtgtcccacgttcctg

SEQ ID NO: 54958 - DNA, 80 bp, synthetic construct
  source 1..80: mol_type = other DNA
acctcaattaaggcttgtgacaaagccatttgttatggtgcagaaagtgtaacattaacaagaggtcagaacacagttaa

SEQ ID NO: 54959 - DNA, 80 bp, synthetic construct
  source 1..80: mol_type = other DNA
gagaagaatgttcacaaattggactccatgctgctgcacctcaccttgataaagtcaatgggatttcagaaattgagaat

SEQ ID NO: 54960 - DNA, 80 bp, synthetic construct
  source 1..80: mol_type = other DNA
tgatgatggggcaccccaatgtggggtaaagtgctggtttgtaaaatccggagaatggatctcagggatttttagtggaa

SEQ ID NO: 54961 - DNA, 80 bp, synthetic construct
  source 1..80: mol_type = other DNA
tgttactcagtgtcctttgtcctgtaagaaagcacaaaaaatcataaataattaatattactcccatgctatcatatata

SEQ ID NO: 54962 - DNA, 80 bp, synthetic construct
  source 1..80: mol_type = other DNA
actttactttatatattcatttgtatattctattatgactaatctaatacactaaaaaaaatagtagctttctaaccata

SEQ ID NO: 54963 - DNA, 80 bp, synthetic construct
  source 1..80: mol_type = other DNA
aaaaaatagtagctttctaaccatataacttagattttttctctgtatgatgtcttaacatcttgcggagtctactacta

SEQ ID NO: 54964 - DNA, 80 bp, synthetic construct
  source 1..80: mol_type = other DNA
tttcctgcaacagcacctactgtaagcccaccctgtatatgattgtaccaattcatgcgtgtaacatgatgaaaagttgc

SEQ ID NO: 54965 - DNA, 80 bp, synthetic construct
  source 1..80: mol_type = other DNA
ctaattgcactggggccttacagagtgcaagtagtttatgaaagaacctactgtatgaccggggtcctgatagaaggaaa

SEQ ID NO: 54966 - DNA, 80 bp, synthetic construct
  source 1..80: mol_type = other DNA
aaaataaagtacaaggatattatatctgcattgtaggaggaaactctgcacctatatatgtgccaacacttgatgatttt

SEQ ID NO: 54967 - DNA, 80 bp, synthetic construct
  source 1..80: mol_type = other DNA
tggagaggaccatgatctagctggagaagagattgcctcttactctattgttggacctgccaatgcaaaagtgcctcaca

SEQ ID NO: 54968 - DNA, 80 bp, synthetic construct
  source 1..80: mol_type = other DNA
catgattcattaggtatgttaacatactgtcatggataactttaacatatatattaatttttatatctcattatatttta

SEQ ID NO: 54969 - DNA, 80 bp, synthetic construct
  source 1..80: mol_type = other DNA
catggagtgggttctgttcctatgcacacagacttagaacttgatttctctttaacgtctagttccaagtatacataccg

SEQ ID NO: 54970 - DNA, 80 bp, synthetic construct
  source 1..80: mol_type = other DNA
gcaactggattgtgctcattgtgctctgtgtattcctgctattttcattggtattgcttagtgtcctttgtcctgtaaga

SEQ ID NO: 54971 - DNA, 80 bp, synthetic construct
  source 1..80: mol_type = other DNA
aagcataaaaagtcatagctagttactcttactgtattattaatatgtacagccttaacatatgtgttaatttgtatatt

SEQ ID NO: 54972 - DNA, 80 bp, synthetic construct
  source 1..80: mol_type = other DNA
ttactatactctatctaacacactaaaaaaaatagtagctgtctaaccatataacttagatttctcctctgtatgatgtc

SEQ ID NO: 54973 - DNA, 80 bp, synthetic construct
  source 1..80: mol_type = other DNA
tattgcttagtgtcctttgtcctgtaagaaagcataaaaagtcatagctagttactcttactgtattattactatataca

SEQ ID NO: 54974 - DNA, 80 bp, synthetic construct
  source 1..80: mol_type = other DNA
gccttaacatatgtattaatttgtgtattttactatactctatctaacacactaaaaaaaatagtagctgtctaaccata

SEQ ID NO: 54975 - DNA, 80 bp, synthetic construct
  source 1..80: mol_type = other DNA
aaagagtagacatggatattgttgtatactgtaatggccagagaaaagtgatactaactaaaacaatggtcattgggcaa

SEQ ID NO: 54976 - DNA, 80 bp, synthetic construct
  source 1..80: mol_type = other DNA
tttctattaattctggaatctatattgtgggctgcaagtgcatctgaggttcccctgaatcctacatggaatgataatgc

SEQ ID NO: 54977 - DNA, 80 bp, synthetic construct
  source 1..80: mol_type = other DNA
aacacagttggtgccagaaagctcttgcagtatggacaatcaccagtcattaaacaccataacaaaatatacccaggtaa

SEQ ID NO: 54978 - DNA, 80 bp, synthetic construct
  source 1..80: mol_type = other DNA
aatgcccccatacagtcagttttggtgagaatagtgtaattgggtatgtggagttaccccctatgccattagctgatgca

SEQ ID NO: 54979 - DNA, 80 bp, synthetic construct
  source 1..80: mol_type = other DNA
aaagggtcgacatggatattgttgtatactgcaatggccagaggaaagtaatattgacaaagaccttagtcataggacaa

SEQ ID NO: 54980 - DNA, 80 bp, synthetic construct
  source 1..80: mol_type = other DNA
tactcacaattctaaaattcattgcaaacattttccatacaagcaaccaggaaaataggctaaagtcagtcttaaggaag

SEQ ID NO: 54981 - DNA, 80 bp, synthetic construct
  source 1..80: mol_type = other DNA
aagtgtctgggaaaggtggacacagcggatcaactttcaagtgttgtcatggagaagattgttcacagattggcctccat

SEQ ID NO: 54982 - DNA, 80 bp, synthetic construct
  source 1..80: mol_type = other DNA
catgacttgataaagttaacaccatgttattgtatataaatttaacacatatattaatttttacaacctgttatgtttta

SEQ ID NO: 54983 - DNA, 80 bp, synthetic construct
  source 1..80: mol_type = other DNA
tctaacacactaaaaaaaatagtagctgtctaaccatataaattagatttcttttctgtatgatgtcttaacatcttgcg

SEQ ID NO: 54984 - DNA, 80 bp, synthetic construct
  source 1..80: mol_type = other DNA
ttttctgaaggcgggattttcaacataacctctcccatgtgcttagtgtcaaaacaaaatcgattccggttaacagaaca

SEQ ID NO: 54985 - DNA, 80 bp, synthetic construct
  source 1..80: mol_type = other DNA
gtgcccccatacagtaagttttggggaaaacagtgtgataggttatgtagaattaccccccgtgccattggccgacacag

SEQ ID NO: 54986 - DNA, 80 bp, synthetic construct
  source 1..80: mol_type = other DNA
ataaagaattaaaggcacacggggtatcatgcccccaatctcaatgtccttactgttttactcattgtgaacccacagaa

SEQ ID NO: 54987 - DNA, 80 bp, synthetic construct
  source 1..80: mol_type = other DNA
aataaggtacagcaggagagtctgtgttcagtttggggaggaaaacctttgtaagataatagacatgaatgattgttttg

SEQ ID NO: 54988 - DNA, 80 bp, synthetic construct
  source 1..80: mol_type = other DNA
tattgagggggcctggggttctggtgtggggttcacattaacatgtctggtatcactaacagaatgtcctacctttttga

SEQ ID NO: 54989 - DNA, 80 bp, synthetic construct
  source 1..80: mol_type = other DNA
ggaggactgttcacaaattggactccatgctgctgcacctcaccttgacaaggtaaatgggatttctgagatagaaaata

SEQ ID NO: 54990 - DNA, 80 bp, synthetic construct
  source 1..80: mol_type = other DNA
gaataaagtgcaaggatattatatttgtattgtagggggaaactctgcaccaatatatgttccaacacttgatgatttca

SEQ ID NO: 54991 - DNA, 80 bp, synthetic construct
  source 1..80: mol_type = other DNA
tggggaagatcatgatctggctggagaagaaattgcatcttattctatagtcggagctgccaatgcaaaagttcctcata

SEQ ID NO: 54992 - DNA, 80 bp, synthetic construct
  source 1..80: mol_type = other DNA
cacaactgcaaatggtgttcgatcaatagtagctatactgtatggaatgatttcagagttaagaagatatatgataacat

SEQ ID NO: 54993 - DNA, 80 bp, synthetic construct
  source 1..80: mol_type = other DNA
catcacaggaaaagatatatgaatgtgttgaaaatattctagacgtgtgtgacaatgaaaaatggaaaacatcggtaaca

SEQ ID NO: 54994 - DNA, 80 bp, synthetic construct
  source 1..80: mol_type = other DNA
aaaatattcaattatctagaaccagtagaacttaatgctgttaactatgttttatttaatcatgaggtaaattgggatgt

SEQ ID NO: 54995 - DNA, 80 bp, synthetic construct
  source 1..80: mol_type = other DNA
aattgggatgttatcaatgtattagtccagagtattggtaaagtaccacaaatattaactttgaatgatgttaccacaat

SEQ ID NO: 54996 - DNA, 80 bp, synthetic construct
  source 1..80: mol_type = other DNA
ctgttgagcattttatgtcctgttaggaagcataaaaaatcataaatctaaccgattgatattcacatcatttatagagc

SEQ ID NO: 54997 - DNA, 80 bp, synthetic construct
  source 1..80: mol_type = other DNA
ttaaaacactttaccattaaaaacttaacctggctctaatatctaataactaactttcattttttattttatatggatta

SEQ ID NO: 54998 - DNA, 80 bp, synthetic construct
  source 1..80: mol_type = other DNA
atatggattaattactaaaaaaaatactctcttctatctcccaatcttttattgattcaccggggtgttatcttgacatc

SEQ ID NO: 54999 - DNA, 80 bp, synthetic construct
  source 1..80: mol_type = other DNA
tagtagtagacaccgcaagagagagcagtctactagcaaaaggaatatgtgggggttactggtagtggccggtttaatcg

SEQ ID NO: 55000 - DNA, 80 bp, synthetic construct
  source 1..80: mol_type = other DNA
ccaaagttgaatcatacaaaatgcacaaagtctgcaattccattggtctggactggtcgaattgatattcccggttacta

SEQ ID NO: 55001 - DNA, 80 bp, synthetic construct
  source 1..80: mol_type = other DNA
tggactggtcgaattgatattcccggttactatgaggctgtccatcccttgacagtttattgtgagctgtctggcccagg

SEQ ID NO: 55002 - DNA, 80 bp, synthetic construct
  source 1..80: mol_type = other DNA
tgaggctgtccatcccttgacagtttattgtgagctgtctggcccaggggcatcatgtgaagccttttctgaagggtgga

SEQ ID NO: 55003 - DNA, 80 bp, synthetic construct
  source 1..80: mol_type = other DNA
tagattcagatccctcagacagcaagttagctttgtgtgccagagagttgacatggatatagttgtgtattgtaatggcc

SEQ ID NO: 55004 - DNA, 80 bp, synthetic construct
  source 1..80: mol_type = other DNA
agaaaaagaccatattaaccaaaacacttgtgataggtcagtgtatttacacaataacgagcctgttttctctgctgccg

SEQ ID NO: 55005 - DNA, 80 bp, synthetic construct
  source 1..80: mol_type = other DNA
agtgttgcacactcaattgctgtagagctttgtgttcctgggtttcatggttgggcaactgcagcactgctaataacatt

SEQ ID NO: 55006 - DNA, 80 bp, synthetic construct
  source 1..80: mol_type = other DNA
taccggcattaacttttatcatattaaccatactcaagtttattgcaaatatctttcatacaagcaatcaggaaaataaa

SEQ ID NO: 55007 - DNA, 80 bp, synthetic construct
  source 1..80: mol_type = other DNA
ataggctatgtggaattgccgccagtgccaatagctgatattacccagatggttcccgaaagttcttgtaatatggataa

SEQ ID NO: 55008 - DNA, 80 bp, synthetic construct
  source 1..80: mol_type = other DNA
ttaaaggctgtcctaaggaaaattaaagaggagtttgaaaaaacaaaaggctcaatggtatgtgatatttgtaaatatga

SEQ ID NO: 55009 - DNA, 80 bp, synthetic construct
  source 1..80: mol_type = other DNA
agtcggcttttcaggctcactataaagtctgtcaagtgacacacagattcagggaagaattaaaaaagacagttacacca

SEQ ID NO: 55010 - DNA, 80 bp, synthetic construct
  source 1..80: mol_type = other DNA
caaaactttacccctggttgttacaggacattaaaccttttcaggtataaaagtaggtgctacatctttacaatgtggat

SEQ ID NO: 55011 - DNA, 80 bp, synthetic construct
  source 1..80: mol_type = other DNA
cctcttactagtctttgaatctatcttgtgggctgcaagtgcttctgatgtccctttatcaactgactggaatgacaatg

SEQ ID NO: 55012 - DNA, 80 bp, synthetic construct
  source 1..80: mol_type = other DNA
cacatggtgttgggtcagtgcctatgcacactgatcttgaacttgacttttcactcacgtcaagttctaaatatacatac

SEQ ID NO: 55013 - DNA, 80 bp, synthetic construct
  source 1..80: mol_type = other DNA
aggcggaaactcacaaaccctgtggatacctctcaggcagtggacttgcatattgaactagaagagcaaacaattgggtt

SEQ ID NO: 55014 - DNA, 80 bp, synthetic construct
  source 1..80: mol_type = other DNA
ggatgtccatgccttagggcactggtttgatggccgtttaaatctcaagacatcctttcactgttacggagcatgcacta

SEQ ID NO: 55015 - DNA, 80 bp, synthetic construct
  source 1..80: mol_type = other DNA
ccaccagtccctcagcacatttacaaaatacacacaactcatttggaggaaaaaggctgagcaggcacaagcaagccaga

SEQ ID NO: 55016 - DNA, 80 bp, synthetic construct
  source 1..80: mol_type = other DNA
ccaaggataagggattcagctgccctgagttttcagggagttttagaaagaaatgcaattttgcaacaacccccgcgtgt

SEQ ID NO: 55017 - DNA, 80 bp, synthetic construct
  source 1..80: mol_type = other DNA
gaatatggtggtaatatggtttcaggctacaggaaagtgatggcaactattgattcattccaagcatttaatacaagtac

SEQ ID NO: 55018 - DNA, 80 bp, synthetic construct
  source 1..80: mol_type = other DNA
atacatttcacagatgagcgaattgagtggaaagacccagatgggatgcttcgtgatcacatcaatatattagtaacaag

SEQ ID NO: 55019 - DNA, 80 bp, synthetic construct
  source 1..80: mol_type = other DNA
tggctgagaatccatgtaaaattggcctccaagtatctgccattgaaggtgcatggggatctggggttggctttacatta

SEQ ID NO: 55020 - DNA, 80 bp, synthetic construct
  source 1..80: mol_type = other DNA
acatgtcaagtctccctaacggagtgttcaacattcctgacctcaattaaagcatgtgataaggcaatttgttatggtgc

SEQ ID NO: 55021 - DNA, 80 bp, synthetic construct
  source 1..80: mol_type = other DNA
aagggtggcatagtggttctgccttcaaatgctgccatggggaggattgttcacagacaggattgcaggcagatgcacca

SEQ ID NO: 55022 - DNA, 80 bp, synthetic construct
  source 1..80: mol_type = other DNA
gggaggattgttcacagacaggattgcaggcagatgcaccacaccttgataaagtcaatggcatttcagaagtagagaat

SEQ ID NO: 55023 - DNA, 80 bp, synthetic construct
  source 1..80: mol_type = other DNA
attcatttgaaactgtctcaagagaggttgattttaaagggacttgtgtgttcaagcataaaatggttgaggagtcttac

SEQ ID NO: 55024 - DNA, 80 bp, synthetic construct
  source 1..80: mol_type = other DNA
caccttgataaagtcaatggcatttcagaagtagagaatgataaagtgtatgatgatggggcacctgagtgtggtataaa

SEQ ID NO: 55025 - DNA, 80 bp, synthetic construct
  source 1..80: mol_type = other DNA
aattggattgtgcttgttgtcctctgtattttccttataatatctctcattttgcttagcatcttatgccctgttaggaa

SEQ ID NO: 55026 - DNA, 80 bp, synthetic construct
  source 1..80: mol_type = other DNA
gcacaaaaagtcatagataaactgttacattccagttaacccctgtaaatagttactaatatttaacagctccaatttat

SEQ ID NO: 55027 - DNA, 80 bp, synthetic construct
  source 1..80: mol_type = other DNA
tttgttgtaccttactagctctattactaaaaaaaatagaaacttttccaactaaataacatagattgtttctctgctga

SEQ ID NO: 55028 - DNA, 80 bp, synthetic construct
  source 1..80: mol_type = other DNA
aaaaatcggaagtctatcatttgttatgatctatcatgcaatattacccattgtaaaccaaccctttacatgataattcc

SEQ ID NO: 55029 - DNA, 80 bp, synthetic construct
  source 1..80: mol_type = other DNA
agtgcatgcatgcaacatgatgaaaagctgcttaattgcacttggcccatttagggttcaagtggtctatgagagaactt

SEQ ID NO: 55030 - DNA, 80 bp, synthetic construct
  source 1..80: mol_type = other DNA
attgcatgtcgggcatactcacagaagggcggtgcttcgtaccataccagagtgtagtgagtattatcaagcatgggatc

SEQ ID NO: 55031 - DNA, 80 bp, synthetic construct
  source 1..80: mol_type = other DNA
ttttatagctgtggaagggaacacctacaaattatttgaagaggtaaagaagtcatttgccctaaattgtaatgatacag

SEQ ID NO: 55032 - DNA, 80 bp, synthetic construct
  source 1..80: mol_type = other DNA
agaataaaattcagggttattacatatgcatcataggagggaattcagcacctgtttatgccccatcacctgatgacttt

SEQ ID NO: 55033 - DNA, 80 bp, synthetic construct
  source 1..80: mol_type = other DNA
gcccatgtatatcactgagaaatgtttatgacatgaagatagagtgcccgcatacagtcaactttggtgaaaacagtgtg

SEQ ID NO: 55034 - DNA, 80 bp, synthetic construct
  source 1..80: mol_type = other DNA
agatccatggaggcattttcaggtattttcaggtcgccgcatggagaaaatcatgatctaaatgggggaagaaatgcacc

SEQ ID NO: 55035 - DNA, 80 bp, synthetic construct
  source 1..80: mol_type = other DNA
atattctattgttggcccaacagatggaaaggttcctcatagttccaagcactacaacattgagtttgacagcattttcc

SEQ ID NO: 55036 - DNA, 80 bp, synthetic construct
  source 1..80: mol_type = other DNA
agaaattcccgacatattcttcatttagtattcttgcaggttctgtggagccaaagcatgtcttccagccaggattattt

SEQ ID NO: 55037 - DNA, 80 bp, synthetic construct
  source 1..80: mol_type = other DNA
tgtgaggtgtgtcaatatgagtgtgaaactgcaaaggaattggaatcacataggaaaagctgttcaattggctcatgtcc

SEQ ID NO: 55038 - DNA, 80 bp, synthetic construct
  source 1..80: mol_type = other DNA
agaaagtcactgacagtatatgagcctatgcaaggttgttatcgcaccttatctctctttagatatcggagtcggttctt

SEQ ID NO: 55039 - DNA, 80 bp, synthetic construct
  source 1..80: mol_type = other DNA
caggttggactgacacagcacacggatctgggataatacctatgaagactgatcttgaattggacttctctcttccctca

SEQ ID NO: 55040 - DNA, 80 bp, synthetic construct
  source 1..80: mol_type = other DNA
gctatggttcatgtgaaaaatatgcttatccttggcaaactgctggttgttttgtagaaaaagattatgagtatgagacc

SEQ ID NO: 55041 - DNA, 80 bp, synthetic construct
  source 1..80: mol_type = other DNA
aggacaccccaattagtgtttgagatggagggcaatggctcccccccaagtcagaagagtggtccaggagctggccagga

SEQ ID NO: 55042 - DNA, 80 bp, synthetic construct
  source 1..80: mol_type = other DNA
tacaccagttggtgttggcatcaatatggattctgttcagatgcaagtgatgaacgactccttgaagggaggtgtccttt

SEQ ID NO: 55043 - DNA, 80 bp, synthetic construct
  source 1..80: mol_type = other DNA
gactacatggtactttaatccagtaattcttagaccaaacaacgttgaagtggagtttctactaaacggtcagataataa

SEQ ID NO: 55044 - DNA, 80 bp, synthetic construct
  source 1..80: mol_type = other DNA
atggagggactcggctcccagcgaggccaacggcctgacgagccggttgccagcaatgctgcacaggccaccccccaaga

SEQ ID NO: 55045 - DNA, 80 bp, synthetic construct
  source 1..80: mol_type = other DNA
ttggtccacgcatcaacccatacactgctcatctgagtgctatgtttgcaggttggggaggtggttttcaagttcgtgtc

SEQ ID NO: 55046 - DNA, 80 bp, synthetic construct
  source 1..80: mol_type = other DNA
aagtgttcttcactctttggagttgcaatgtcattgctgtttaagcaagtatggaacaatttatttccagaattagattg

SEQ ID NO: 55047 - DNA, 80 bp, synthetic construct
  source 1..80: mol_type = other DNA
tagtagtagactccgcaagagaagcaaacacagataaatatgggaaaaataagtccagttctgggcctactactatggag

SEQ ID NO: 55048 - DNA, 80 bp, synthetic construct
  source 1..80: mol_type = other DNA
cattaccattgacatggactgggtacataccactacccggtgaaattgagaaaacaacacagtgtacagtcttttgcact

SEQ ID NO: 55049 - DNA, 80 bp, synthetic construct
  source 1..80: mol_type = other DNA
tcggatggattctcattcctacaattacgctagtcctcctcaaaatattattagcttttgcatatgtgtgctctaagtat

SEQ ID NO: 55050 - DNA, 80 bp, synthetic construct
  source 1..80: mol_type = other DNA
gttcagttgagctcccaccagtgctattaagacaggtagagtcactaaaattagagagttcatgtaattttgacttgcac

SEQ ID NO: 55051 - DNA, 80 bp, synthetic construct
  source 1..80: mol_type = other DNA
aacacagattctaagtttaaaattcttgtggagaaagtaaagcaggaataccagaagactatgggttcaatggtttgtga

SEQ ID NO: 55052 - DNA, 80 bp, synthetic construct
  source 1..80: mol_type = other DNA
caaaggagctagaatcacacaaaaaaagttgtcccgttggttcttgcccttattgtttgaacccagctgaggctactgca

SEQ ID NO: 55053 - DNA, 80 bp, synthetic construct
  source 1..80: mol_type = other DNA
taagaaagtcactcaccgtgtatgaaccaaagcaaggttgttacagagcattgtcccttttccgctatagaagtaggtgc

SEQ ID NO: 55054 - DNA, 80 bp, synthetic construct
  source 1..80: mol_type = other DNA
tttgttgggctaatctggtgtatccttttgacattggagctaattgtttgggctgcaagtgctgaaactttgaatttgaa

SEQ ID NO: 55055 - DNA, 80 bp, synthetic construct
  source 1..80: mol_type = other DNA
cgtcatcatcaagttacacttatcgccgttctttacagaacccagcaaatgaacaggaaaagattccctttcatttacaa

SEQ ID NO: 55056 - DNA, 80 bp, synthetic construct
  source 1..80: mol_type = other DNA
attgaaaagcaagtcatacatgctgaaattcaacatctagggcattggatggatgctaccttcaatttaaagactgcatt

SEQ ID NO: 55057 - DNA, 80 bp, synthetic construct
  source 1..80: mol_type = other DNA
ctctccggtatacacggaaagcttgtatacagcttggcactgaacagacatgtaaaaatgtagacagcaatgattgtctg

SEQ ID NO: 55058 - DNA, 80 bp, synthetic construct
  source 1..80: mol_type = other DNA
gttacaacatctatcaaagtatgtctcatagggacaatatctaagtttcaaccatctgatacactattgtttttaggtcc

SEQ ID NO: 55059 - DNA, 80 bp, synthetic construct
  source 1..80: mol_type = other DNA
cccctattggcatgaagtgccctgagcttaatggttctttccgtaaaaaatgttcctttgcaacaacacctgtatgccag

SEQ ID NO: 55060 - DNA, 80 bp, synthetic construct
  source 1..80: mol_type = other DNA
acagcacacaagcttcatctactagctatcaaacaaagagtagtgaggtaaatcttaaaggcctgtgtctcgtcccaaca

SEQ ID NO: 55061 - DNA, 80 bp, synthetic construct
  source 1..80: mol_type = other DNA
catgtgacacagctatgtgttatggttcaactacagctaacttggttcgtggacaaaacacagtccatgtggtgggtaag

SEQ ID NO: 55062 - DNA, 80 bp, synthetic construct
  source 1..80: mol_type = other DNA
ggtggacattctggttcaaagtttatgtgttgtcatgacacgaaatgctcaaacactggtttactggcagcagcaccaca

SEQ ID NO: 55063 - DNA, 80 bp, synthetic construct
  source 1..80: mol_type = other DNA
cctagatcgagtaactggctacaaccaggctgatagtgataaggtatttgatgatggggccccggaatgtggtatggcat

SEQ ID NO: 55064 - DNA, 80 bp, synthetic construct
  source 1..80: mol_type = other DNA
gttggttcaagaagtctggcgagtggatcatgggtgtattaagtggaaactggatggttgttgctgtgttaatcacatta

SEQ ID NO: 55065 - DNA, 80 bp, synthetic construct
  source 1..80: mol_type = other DNA
cttgtactatccattttcttatttgctttatgctgccctaggcgagctgcttacaagaaagaacataaaccatgaagtgt

SEQ ID NO: 55066 - DNA, 80 bp, synthetic construct
  source 1..80: mol_type = other DNA
attgtttcttgaaatccaaaaatattaacaattgtatacagttactcactcactcacattatataatactctatatatag

SEQ ID NO: 55067 - DNA, 80 bp, synthetic construct
  source 1..80: mol_type = other DNA
cgacagtgtatttaattgggcctattcagacatgcattactaccaaaagttgtcttatcggattaggggaccagagaatc

SEQ ID NO: 55068 - DNA, 80 bp, synthetic construct
  source 1..80: mol_type = other DNA
caggtcaattatgagaagacttattgtgtttcaggtcaattagtagaaggagtatgctttaatcccatacacaccatggc

SEQ ID NO: 55069 - DNA, 80 bp, synthetic construct
  source 1..80: mol_type = other DNA
attgtcacagcctagtcatacttatgatgttgtgacaatgatggttagatgctttctagtggtgaaaaaggtgacttcag

SEQ ID NO: 55070 - DNA, 80 bp, synthetic construct
  source 1..80: mol_type = other DNA
gtgatagtatgaagatagaaaagaactttgaaacacttgttcagaaaacagggtgttctaataacaacttccaaggttat

SEQ ID NO: 55071 - DNA, 80 bp, synthetic construct
  source 1..80: mol_type = other DNA
gaatggattagccagaaacttgaatgagctgaagatggaatgtccacacacaatcggattagggcaaggacttgtcatag

SEQ ID NO: 55072 - DNA, 80 bp, synthetic construct
  source 1..80: mol_type = other DNA
gattctctctaggatggcttttgctccacatggtgaagatcatgatatagagagaaatgcaataagtgcaatgaggattg

SEQ ID NO: 55073 - DNA, 80 bp, synthetic construct
  source 1..80: mol_type = other DNA
taggaaaggtaacaggtaaagcaccctcatctgaatcatctgatacaatacaaggtattgcattcgcaggaaacccatta

SEQ ID NO: 55074 - DNA, 80 bp, synthetic construct
  source 1..80: mol_type = other DNA
tagtagtagactccgcaagaaatagcagttaaataacagcatgatcatgtggggtttactattgacaatgattttgatcg

SEQ ID NO: 55075 - DNA, 80 bp, synthetic construct
  source 1..80: mol_type = other DNA
caggggcatcatgtgaggcattctcagaaggtggtattttcaacattacatcccctacttgccttgtgtcaaagcaaaat

SEQ ID NO: 55076 - DNA, 80 bp, synthetic construct
  source 1..80: mol_type = other DNA
gggtagcacattcaattgcaattgaattatgtgtaccagggttccatggttgggcaactgctgctcttctcactacattc

SEQ ID NO: 55077 - DNA, 80 bp, synthetic construct
  source 1..80: mol_type = other DNA
ttaaaattatcttaagaaagattaaagaagaatttgaaaagactaaaggctcaatggtctgtgaagtgtgcaagtatgag

SEQ ID NO: 55078 - DNA, 80 bp, synthetic construct
  source 1..80: mol_type = other DNA
cctaggccctatggaaggtgggggtttgatatttaaggattggtgcactagcacatgccaatttggtgatccaggagaca

SEQ ID NO: 55079 - DNA, 80 bp, synthetic construct
  source 1..80: mol_type = other DNA
gcatggggttctggggttggtttcactctcacttgtcaaatctcactgacagagtgttcacgctttctaacatcaatcaa

SEQ ID NO: 55080 - DNA, 80 bp, synthetic construct
  source 1..80: mol_type = other DNA
atgctggtttgttaagtctggggagtggataacaggaattttcaatgggaattggattgtcatagttgtgcttgttttct

SEQ ID NO: 55081 - DNA, 80 bp, synthetic construct
  source 1..80: mol_type = other DNA
tggggtgttcgacatcgcaagtgtgagcattgtctgttttttcatcagagttaaagggaccaactacaagataatggcaa

SEQ ID NO: 55082 - DNA, 80 bp, synthetic construct
  source 1..80: mol_type = other DNA
tgtcgggggaaattcttctcctgtgtatgcaccttcaaccactgattttagatctatggaggcacttgctagccttttaa

SEQ ID NO: 55083 - DNA, 80 bp, synthetic construct
  source 1..80: mol_type = other DNA
cttaaggaatgtctatgacatgaaaatagaatgcccacattcaatcaactttggggagagtagtgtaacaggtaaggtgg

SEQ ID NO: 55084 - DNA, 80 bp, synthetic construct
  source 1..80: mol_type = other DNA
aaacacagagaaacatgggaaaaattattccagtttttctgtacttgctcttccggtgtctattactatgggatagagga

SEQ ID NO: 55085 - DNA, 80 bp, synthetic construct
  source 1..80: mol_type = other DNA
catcttactcttcacgttgtgctgtccacgtaggcccagttatgcaaaagaacataaaccttaagtggaggttactatat

SEQ ID NO: 55086 - DNA, 80 bp, synthetic construct
  source 1..80: mol_type = other DNA
atgcatcatattccttatatgaaggacattactataaaaatacctttatttacttacttttcattttctttagtgtatta

SEQ ID NO: 55087 - DNA, 80 bp, synthetic construct
  source 1..80: mol_type = other DNA
aaatacagagaaatatgggaaaaattattccagtttgtctgtacctgctcttcttgtgtctgctactatgggatagagga

SEQ ID NO: 55088 - DNA, 80 bp, synthetic construct
  source 1..80: mol_type = other DNA
tgaattaccgcctgttccgttgacacaggtagagtctttaaaactggaaagttcatgcaattttgatctacataccagta

SEQ ID NO: 55089 - DNA, 80 bp, synthetic construct
  source 1..80: mol_type = other DNA
ctattttcctcttcacattatgttgcccacggaggcctagctatgcaaaagaacataagccttaaataaaagtaattgta

SEQ ID NO: 55090 - DNA, 80 bp, synthetic construct
  source 1..80: mol_type = other DNA
aatgtatcacattacttatactactaacactagtgtataaatcccttcacttttttgcttcataccttgtttagtatatt

SEQ ID NO: 55091 - DNA, 80 bp, synthetic construct
  source 1..80: mol_type = other DNA
caaggttattatgtctgtttgataggaagtagttctgaaccactatatattccaacattggatgattataggtcggcaga

SEQ ID NO: 55092 - DNA, 80 bp, synthetic construct
  source 1..80: mol_type = other DNA
gataccagaaacctgaatgaacttaaaatggaatgtccgcacacaattggtttgggtcagggccttgttattggatcagt

SEQ ID NO: 55093 - DNA, 80 bp, synthetic construct
  source 1..80: mol_type = other DNA
ttttatatataatagactataaagtttctgtgtctaatgagagtagcatcataactaataccaaatactttgagatgact

SEQ ID NO: 55094 - DNA, 80 bp, synthetic construct
  source 1..80: mol_type = other DNA
ctagagatatagcttcagcattaaacctgcatatcgagatagtaattatcaggatagatccagttagccatgacttgcat

SEQ ID NO: 55095 - DNA, 80 bp, synthetic construct
  source 1..80: mol_type = other DNA
tagtaattatcaggatagatccagttagccatgacttgcatatcagctcagatagatttaaggatttatttcccacacta

SEQ ID NO: 55096 - DNA, 80 bp, synthetic construct
  source 1..80: mol_type = other DNA
agacataaaaccagatatagaccccttgacgctggaaattcctcatataacccctgataattatctatacttagacaata

SEQ ID NO: 55097 - DNA, 80 bp, synthetic construct
  source 1..80: mol_type = other DNA
atgggaaaacttagtccagtttgtctgtatctgcttctccagggtctattactatgtaatacagggactgccagaaacct

SEQ ID NO: 55098 - DNA, 80 bp, synthetic construct
  source 1..80: mol_type = other DNA
acggctgggcaactatgtttttattattaacattttgctttggatgggttctaataccaaccgttacaatgatattgctg

SEQ ID NO: 55099 - DNA, 80 bp, synthetic construct
  source 1..80: mol_type = other DNA
tcagcaagctatgcatataggagacagccacagaatccacctaatgaacaagaaaacatcccgtttcatttgcagataag

SEQ ID NO: 55100 - DNA, 80 bp, synthetic construct
  source 1..80: mol_type = other DNA
taaacaggtaattcatgcagagatacagcacttgggtcactggatggatgctacatttaatctaaaaactgcatttcatt

SEQ ID NO: 55101 - DNA, 80 bp, synthetic construct
  source 1..80: mol_type = other DNA
gtgggcattctggctcaaaatttatgtgctgtcatgacacaaaatgctcaaccatcggtcttgttgcagctgcaccgcat

SEQ ID NO: 55102 - DNA, 80 bp, synthetic construct
  source 1..80: mol_type = other DNA
agaaaaaaaactagcactttactaattaaattaccccataccgattatgcctggacttttgttcttgggtagcatactac

SEQ ID NO: 55103 - DNA, 80 bp, synthetic construct
  source 1..80: mol_type = other DNA
aactgtaatctacagccctggtttgttccctaaattaaaccaatcctcatgtgagaaagttgcattgcccttgatatggg

SEQ ID NO: 55104 - DNA, 80 bp, synthetic construct
  source 1..80: mol_type = other DNA
gccaaggattcatttgaaaccacatcaagtgaaatcaatcttaaagggacatgcacactggcacataggatggttgaaga

SEQ ID NO: 55105 - DNA, 80 bp, synthetic construct
  source 1..80: mol_type = other DNA
tattactcagttttctatgccctatccgtaaacacaagcgttcctaagtatatatcatgttaaactctatcccatatcct

SEQ ID NO: 55106 - DNA, 80 bp, synthetic construct
  source 1..80: mol_type = other DNA
atatcatatatattacttttttacactccatatcactaatttgcttgctatgtttatacctagttattaacctatatatc

SEQ ID NO: 55107 - DNA, 80 bp, synthetic construct
  source 1..80: mol_type = other DNA
atcttacaggaacagaaagtcagtcatatgctatgacttatcctgtaattcaacacactgtaaaccaacaatgtatatga

SEQ ID NO: 55108 - DNA, 80 bp, synthetic construct
  source 1..80: mol_type = other DNA
gatctccccatggtgaagaccatgatctgtccggtgaggaagttgcaacttattcaattgccggtcaggttgagggcaaa

SEQ ID NO: 55109 - DNA, 80 bp, synthetic construct
  source 1..80: mol_type = other DNA
gttccgcacactgaaaatgcagcaaatatgctatttactgcattttcaggaatccctagctactcttcactgagtgtatt

SEQ ID NO: 55110 - DNA, 80 bp, synthetic construct
  source 1..80: mol_type = other DNA
ccatcctgacaaagacactagtgattggacaatgcatctactcagtaacaagcctgttttcaattatgcccggtgtagca

SEQ ID NO: 55111 - DNA, 80 bp, synthetic construct
  source 1..80: mol_type = other DNA
cccttctatcacactagctatactgattgtcttaaagttttttgctgcaatcttgcacaacagttctcaagaaaatcggt

SEQ ID NO: 55112 - DNA, 80 bp, synthetic construct
  source 1..80: mol_type = other DNA
tggacaaccaccagtcattatcaattacacaaaaagtgacaaaggtgagttggagaaaaaaagcagacaaagttcaggca

SEQ ID NO: 55113 - DNA, 80 bp, synthetic construct
  source 1..80: mol_type = other DNA
cttgctggtttataaaatctggagagtggataaagggtatctttaatggaaactggattgttattgttgtgttaattttc

SEQ ID NO: 55114 - DNA, 80 bp, synthetic construct
  source 1..80: mol_type = other DNA
ccacatcaagtgaaatcaatcttaaagggacatgcacactggcacataggatggttgaagaatcttacaggagcagaaag

SEQ ID NO: 55115 - DNA, 80 bp, synthetic construct
  source 1..80: mol_type = other DNA
ttcttcatattgtctttgatattactcagttttctatgccctatccgtaaacacaagcgctcctaagtatatatcatgtt

SEQ ID NO: 55116 - DNA, 80 bp, synthetic construct
  source 1..80: mol_type = other DNA
gaactctatcccatatcctatatcatatatattacttttgtacactccatattactaatttgcttactatgtttacacct

SEQ ID NO: 55117 - DNA, 80 bp, synthetic construct
  source 1..80: mol_type = other DNA
agttattaacctatatatctaaaaaaaatacctcctttactactataattcctagtcctttatcacgtgggtgtttctat

SEQ ID NO: 55118 - DNA, 80 bp, synthetic construct
  source 1..80: mol_type = other DNA
tggggtttttgacattgcaagtgtcagtattgtctgcttcttcattcgcataaagggaaacagctataagataatgacaa

SEQ ID NO: 55119 - DNA, 80 bp, synthetic construct
  source 1..80: mol_type = other DNA
tgtaggagccaactcttcccctgtttatgcaccctcaaccactgattttaggtcaatggaggtacttgccagcctgctga

SEQ ID NO: 55120 - DNA, 80 bp, synthetic construct
  source 1..80: mol_type = other DNA
ctgtgatctatagcccagggttatttcccaaattaaaccaatccgcatgcgataaagttgcactacctttaatatgggaa

SEQ ID NO: 55121 - DNA, 80 bp, synthetic construct
  source 1..80: mol_type = other DNA
cccatctatcacattggccatattaattgtcttgaaattctttgctgcaatcttgcacaacagttcccaggagaatcggt

SEQ ID NO: 55122 - DNA, 80 bp, synthetic construct
  source 1..80: mol_type = other DNA
tcaaaatcatcctgagaaaaataaaggaagaatttgagagaacaaaaggatcaatggtttgtgaagtatgtaaatatgaa

SEQ ID NO: 55123 - DNA, 80 bp, synthetic construct
  source 1..80: mol_type = other DNA
gaactaccacctattccacttgctgatgcagagactttggttcctgagagctcttgcaatatggacaatcatcagtcttt

SEQ ID NO: 55124 - DNA, 80 bp, synthetic construct
  source 1..80: mol_type = other DNA
atcaattacacagaaagtgacaaaggtaagctggagaaaaaaagcagataaagttcaagcagccaaggattcatttgaaa

SEQ ID NO: 55125 - DNA, 80 bp, synthetic construct
  source 1..80: mol_type = other DNA
attcactatactgatgaaaggattgagtggaaggacccagatgggatgcttaaagaccatttaaacatacttgttacaaa

SEQ ID NO: 55126 - DNA, 80 bp, synthetic construct
  source 1..80: mol_type = other DNA
atgttggttcataaagtctggagaatggataaagggtatctttaatgggaactggattgtcattgttgtactaatctttt

SEQ ID NO: 55127 - DNA, 80 bp, synthetic construct
  source 1..80: mol_type = other DNA
tcttcatattatctctgatattacttagtttcctatgccctatccgtaaacataagcgctcataaatgtatatcatatta

SEQ ID NO: 55128 - DNA, 80 bp, synthetic construct
  source 1..80: mol_type = other DNA
aacgccatacaatattttatattatatacattgctttttaataatgcatataactgctatacttattaaccttctgtata

SEQ ID NO: 55129 - DNA, 80 bp, synthetic construct
  source 1..80: mol_type = other DNA
atggttaacctaaatatctaaaaaaaatacctcctttattactataactcctagtcctttgctacgtgggtatttctata

SEQ ID NO: 55130 - DNA, 80 bp, synthetic construct
  source 1..80: mol_type = other DNA
aatatgatgaaaagctgtcttgtaggattaggaccttaccggattcaagttgtttatgaaagaacatactgcacaactgg

SEQ ID NO: 55131 - DNA, 80 bp, synthetic construct
  source 1..80: mol_type = other DNA
acggggtatttgacattgcaagtgtgagtattgtttgcttctttatccggataaagggaaatagttacaaaataatggca

SEQ ID NO: 55132 - DNA, 80 bp, synthetic construct
  source 1..80: mol_type = other DNA
tgtaggagctaattcttctcctgtctatgcaccctcaaccactgatttcagatcagtggaagcacttgccagtttattga

SEQ ID NO: 55133 - DNA, 80 bp, synthetic construct
  source 1..80: mol_type = other DNA
agcaaatatgttatttactgcattttcaggaattcctagtcattcttcatttagtgttttcactgggaaccaggatggaa

SEQ ID NO: 55134 - DNA, 80 bp, synthetic construct
  source 1..80: mol_type = other DNA
atgtgatttatagtcctgggctgttcccaaaattaaaccaatcatcatgcgaaaaggttgcattgcctttgatttgggag

SEQ ID NO: 55135 - DNA, 80 bp, synthetic construct
  source 1..80: mol_type = other DNA
ctgcagagcagcaaattaattttgtgtgtcaacgggttgatcaagacattgtaatatactgtaatgggcagaagaaaacc

SEQ ID NO: 55136 - DNA, 80 bp, synthetic construct
  source 1..80: mol_type = other DNA
taccgtctattacactggctatattgattgtcttaaagttctttgctgcattattgcataatagctctcaagaaaatcga

SEQ ID NO: 55137 - DNA, 80 bp, synthetic construct
  source 1..80: mol_type = other DNA
tttaaaataattttgaagaagattaaggaggaatttgaaaaaactaaaggatcaatggtttgtgaggtatgtaagtatga

SEQ ID NO: 55138 - DNA, 80 bp, synthetic construct
  source 1..80: mol_type = other DNA
ggcgaattaccccccctcttgctcactgatgcagagactctggttcctgagagctcttgtaatatggataaccatcagtc

SEQ ID NO: 55139 - DNA, 80 bp, synthetic construct
  source 1..80: mol_type = other DNA
cctatcaattacacagaaagtgacaaaggttagctggagaaaaaaggcagacaaagtccaagctgcaaaggattcatttg

SEQ ID NO: 55140 - DNA, 80 bp, synthetic construct
  source 1..80: mol_type = other DNA
ttcttggtcccatggagagtggaggtttaatattcaaagactggtgtacaacaacgtgtcagttcggggatccaggggac

SEQ ID NO: 55141 - DNA, 80 bp, synthetic construct
  source 1..80: mol_type = other DNA
atcatgagtcctaaggataagggtttcagctgtcctgacttcacaggtcattttagaaaaaaatgcaattttgctaccac

SEQ ID NO: 55142 - DNA, 80 bp, synthetic construct
  source 1..80: mol_type = other DNA
atactagtaacatacattatactgatgagcggatcgaatggaaagatccagatgggatgcttaaagaccatttgaacata

SEQ ID NO: 55143 - DNA, 80 bp, synthetic construct
  source 1..80: mol_type = other DNA
tgggtgaaaacccctgtaaagttgggctacagacagcttctatagatggtgcctggggttctggggttggttttactctt

SEQ ID NO: 55144 - DNA, 80 bp, synthetic construct
  source 1..80: mol_type = other DNA
atgctggtttataaaatctggagagtggataaaaggtatcttcagtggaaattggattgtcattgttgtattaatcttcc

SEQ ID NO: 55145 - DNA, 80 bp, synthetic construct
  source 1..80: mol_type = other DNA
ttttcttactttctttgatattacttagttttctgtgccctattcgcaagcataagcgctcataggtgtatattgtatca

SEQ ID NO: 55146 - DNA, 80 bp, synthetic construct
  source 1..80: mol_type = other DNA
agctcttttcatgtttaatgttatcacatattgctttcacataacctggattactgctatgctaattattttttatacat

SEQ ID NO: 55147 - DNA, 80 bp, synthetic construct
  source 1..80: mol_type = other DNA
agttactaatatgtatctctaaaaaaaatacctcctttattaccataactcctagtcctttattacgtgggtatttctat

SEQ ID NO: 55148 - DNA, 80 bp, synthetic construct
  source 1..80: mol_type = other DNA
agcataaaggaatcaaatccaaataactgcaatgacaccgacaataaagttcagggctattacttgtgcattgtaggagc

SEQ ID NO: 55149 - DNA, 80 bp, synthetic construct
  source 1..80: mol_type = other DNA
taactcctctcctgtttatgcaccctcaactactgattttaggtcagtggaggcacttgctagtttattaagatctcctt

SEQ ID NO: 55150 - DNA, 80 bp, synthetic construct
  source 1..80: mol_type = other DNA
ttcacctacatgcttagttaatagagtacagaggtttaggggggcagagcagcaggtaaagtttgtttgtcaaagggttg

SEQ ID NO: 55151 - DNA, 80 bp, synthetic construct
  source 1..80: mol_type = other DNA
aggtttaggggggcagagcagcaggtaaagtttgtttgtcaaagggttgatttagacattactgtatattgtaatggtgt

SEQ ID NO: 55152 - DNA, 80 bp, synthetic construct
  source 1..80: mol_type = other DNA
aagctgaactatatagcccttatactacttccaaaaaaaactaccattttactactactctaccccataccgattatgcc

SEQ ID NO: 55153 - DNA, 80 bp, synthetic construct
  source 1..80: mol_type = other DNA
ccataatttttagccctggcctatttcctaaactaaatcaatcttcatgtgacaaagttgctttacccttaatatgggaa

SEQ ID NO: 55154 - DNA, 80 bp, synthetic construct
  source 1..80: mol_type = other DNA
cccttcaattacactggccgtgttaattgtcttaaaattctttgctgcaattctgcacaatagttcccaagaaaatcggt

SEQ ID NO: 55155 - DNA, 80 bp, synthetic construct
  source 1..80: mol_type = other DNA
tcaaaataattctgagaaaaataaaggaggagtttgagaaaaccaaagggtcaatggtctgtgaagtctgtaaatatgaa

SEQ ID NO: 55156 - DNA, 80 bp, synthetic construct
  source 1..80: mol_type = other DNA
ccttggtcccatggaaggtggaggtctaatattcaaagattggtgcacaacaacatgtcagtttggggatccaggagata

SEQ ID NO: 55157 - DNA, 80 bp, synthetic construct
  source 1..80: mol_type = other DNA
atgttggttcataaagtctggggagtggataaaaggtatcttcagtggaaactggattgtcattgttgtgttaattgtcc

SEQ ID NO: 55158 - DNA, 80 bp, synthetic construct
  source 1..80: mol_type = other DNA
ttttcatactgtccttaatattactgagtttcctgtgccctatccgcaagcataagcgctcataagtatgtattaaattg

SEQ ID NO: 55159 - DNA, 80 bp, synthetic construct
  source 1..80: mol_type = other DNA
aacttcatgccatattccttattatgtacactgctttttttataatccatattactgctgtactaattatatattatata

SEQ ID NO: 55160 - DNA, 80 bp, synthetic construct
  source 1..80: mol_type = other DNA
tagtcattaatatgtatatctaaaaaaaatacctcctttatcactataattcctagtcctttatcacgtgggtatttcta

SEQ ID NO: 55161 - DNA, 80 bp, synthetic construct
  source 1..80: mol_type = other DNA
tggagtgtttgatatagcaagtgtcagtattgtttgcttcttcatccgagtaaagggaactagctataaaataatggcaa

SEQ ID NO: 55162 - DNA, 80 bp, synthetic construct
  source 1..80: mol_type = other DNA
tgtaggtgctaactcttctcccgtctatgcaccctcaactactgatttcagatcaacagaagcacttgctagcctactga

SEQ ID NO: 55163 - DNA, 80 bp, synthetic construct
  source 1..80: mol_type = other DNA
gatctccccatggtgaagatcatgatctgtctggagaagaggttgcaacttattcaattgctgggcagattgagggcaaa

SEQ ID NO: 55164 - DNA, 80 bp, synthetic construct
  source 1..80: mol_type = other DNA
agcaaatatggcattcactgcattctcaggaatccctagctattcttcattgagtgtatttgcaggaaatcaggatggaa

SEQ ID NO: 55165 - DNA, 80 bp, synthetic construct
  source 1..80: mol_type = other DNA
aagattattatggaactaacctcacttaaaaaaaacaaatactttactcatatataactccatattctcttaccgaggat

SEQ ID NO: 55166 - DNA, 80 bp, synthetic construct
  source 1..80: mol_type = other DNA
gagaaacctattagcatgtccctatatatagcctttaacaatgcaattttatatatcagtttaaacttctgtacttatta

SEQ ID NO: 55167 - DNA, 80 bp, synthetic construct
  source 1..80: mol_type = other DNA
ttttgcttagtcttttgtgtcccattcgtaagcataagcgttcataaatacataccagagaaacccattagtatattcct

SEQ ID NO: 55168 - DNA, 80 bp, synthetic construct
  source 1..80: mol_type = other DNA
acctgtcactttggtgaccctggggatatcatgagcccaagagataaaggcttcctttgccctgaatttccagggagctt

SEQ ID NO: 55169 - DNA, 80 bp, synthetic construct
  source 1..80: mol_type = other DNA
gactttgacaaccttggtgacaatccatgcaaagttgggctacagacatcagctattgaaggggcctggggttcaggtgt

SEQ ID NO: 55170 - DNA, 80 bp, synthetic construct
  source 1..80: mol_type = other DNA
gaggtaaaaaaaggttgttacagaacacttggggtatttcgatacaaaagtagatgttatgtggggttaatatggtgcct

SEQ ID NO: 55171 - DNA, 80 bp, synthetic construct
  source 1..80: mol_type = other DNA
ggtttaatagatttgacaggttactatgaagcaattcatccttgcaatgttttttgtgttttatcaggaccaggtgcatc

SEQ ID NO: 55172 - DNA, 80 bp, synthetic construct
  source 1..80: mol_type = other DNA
ttggggaaacaagtgtgtcaggatatacagagttgcccccactcccactacaggaggcagaacagcttgtgccggaaagc

SEQ ID NO: 55173 - DNA, 80 bp, synthetic construct
  source 1..80: mol_type = other DNA
gttgggttttaatccctgcatgtacattagctgttctattattcttaaagttttttgcaaatatcttacatacaagcaac

SEQ ID NO: 55174 - DNA, 80 bp, synthetic construct
  source 1..80: mol_type = other DNA
cactaaaggaattaaaagctcacaatttgtcctgtgttcaaggggagtgcccatattgcttcacccattgcgagccaact

SEQ ID NO: 55175 - DNA, 80 bp, synthetic construct
  source 1..80: mol_type = other DNA
tcttggacctatggaaggaggcggaattatcttcaaacattggtgcacatcaacctgccattttggagaccctggcgatg

SEQ ID NO: 55176 - DNA, 80 bp, synthetic construct
  source 1..80: mol_type = other DNA
gcctggggctcaggtgttggttttacacttacttgtcaagtatcgcttacagaatgcccaacatttctaacatctataga

SEQ ID NO: 55177 - DNA, 80 bp, synthetic construct
  source 1..80: mol_type = other DNA
gttatggagcagaaagtgtaacactatcacggggccaaaacactataaaaatcacaggaaagggaggtcacagtggttct

SEQ ID NO: 55178 - DNA, 80 bp, synthetic construct
  source 1..80: mol_type = other DNA
tccttcaaatgttgccatggtaaagagtgctcagcaaatggccttcaggcaagtgccccacatttggataaagtgaacgg

SEQ ID NO: 55179 - DNA, 80 bp, synthetic construct
  source 1..80: mol_type = other DNA
ttttgctaagcatattgtgtcctgttagaaagcataagaagtcatgagctcgacctgagaatactcattcaatgtatata

SEQ ID NO: 55180 - DNA, 80 bp, synthetic construct
  source 1..80: mol_type = other DNA
gttctaaacatcttataactctgaactttacctgattttattacctaatacctaacttttacttttatttttatatgtat

SEQ ID NO: 55181 - DNA, 80 bp, synthetic construct
  source 1..80: mol_type = other DNA
aatttgtttctttgttcataaaaaaggaaacacatacaaaatagtatcagcaatcacattagcaatgggctccaaatgca

SEQ ID NO: 55182 - DNA, 80 bp, synthetic construct
  source 1..80: mol_type = other DNA
ataatacagattctaaggtccaaggatactacatatgcattattggtgggaattcagctcctgtttatgctcctgctggt

SEQ ID NO: 55183 - DNA, 80 bp, synthetic construct
  source 1..80: mol_type = other DNA
ctgcacaaaataccaatatccgtggcacaccgcaaaatgtcattttgagaaagattatgagtatgaaaatagttgggcat

SEQ ID NO: 55184 - DNA, 80 bp, synthetic construct
  source 1..80: mol_type = other DNA
aagcaaacactgaataaaggatatacagaatggtagggtgggtttgcatcttcctcgtggtccttactactgcaactgct

SEQ ID NO: 55185 - DNA, 80 bp, synthetic construct
  source 1..80: mol_type = other DNA
cagttaccttacttatattaaaaatcctgaggttgcttactttttcatgctcacattattctacagagtcaaaattcaaa

SEQ ID NO: 55186 - DNA, 80 bp, synthetic construct
  source 1..80: mol_type = other DNA
ctacatttgaggctgcatacaaatcaaggaaaacagtgatctgttatgatctagcctgtaatcaaacacactgtcttcca

SEQ ID NO: 55187 - DNA, 80 bp, synthetic construct
  source 1..80: mol_type = other DNA
tagacaagggtatgactatattatcctattttttcagattcttataccaataatatctgtatatctttataatccaaata

SEQ ID NO: 55188 - DNA, 80 bp, synthetic construct
  source 1..80: mol_type = other DNA
attatactaatttttacttttatataagtattaactagccctttatcagctaaaaaaaacaaactcttaacacctatata

SEQ ID NO: 55189 - DNA, 80 bp, synthetic construct
  source 1..80: mol_type = other DNA
aactcaagttagctgtggagttagaaaaattaattactggtgtgagctgtacagaaaatagtttccaaggttattacata

SEQ ID NO: 55190 - DNA, 80 bp, synthetic construct
  source 1..80: mol_type = other DNA
tgctttattgggaaacattcagagcccctatttgtgccaacaatggaggattataggtcagctgaattatttactcgtat

SEQ ID NO: 55191 - DNA, 80 bp, synthetic construct
  source 1..80: mol_type = other DNA
ttgttcccaaatctcaatcaatctgtttgtgacaataatgcacttcccttaatctggaggggcctaatagacctgacagg

SEQ ID NO: 55192 - DNA, 80 bp, synthetic construct
  source 1..80: mol_type = other DNA
gctgggttttaattcctgcttgcacattggctgttttgctgtttttaaaattctttgcaaatattctacatacaagtaac

SEQ ID NO: 55193 - DNA, 80 bp, synthetic construct
  source 1..80: mol_type = other DNA
caagagaataggtttaaagccatattgcggaaaataaaggaagaatttgaaagaacaaagggttcaatggtatgtgaaat

SEQ ID NO: 55194 - DNA, 80 bp, synthetic construct
  source 1..80: mol_type = other DNA
acagctttcaaaattataagtgtcagatatagtaggaaagtttgtgtccaatttggtgaagaatacctttgtaaaacaat

SEQ ID NO: 55195 - DNA, 80 bp, synthetic construct
  source 1..80: mol_type = other DNA
ataagctaaccaaggtaatatggagaaaaaaagcaaatcaagaatcggcaagtcaaaactcattcgaggttgtggaaagt

SEQ ID NO: 55196 - DNA, 80 bp, synthetic construct
  source 1..80: mol_type = other DNA
gagaatgggttatgggtatcattaacggaaattgggttgtcctgattgtcttatgcgtgttactgctgttctcacttatt

SEQ ID NO: 55197 - DNA, 80 bp, synthetic construct
  source 1..80: mol_type = other DNA
ctgctaagcatcttatgtcctgttaggaagcataagaagtcataagctcaactttctgatatttgtttaatataaataat

SEQ ID NO: 55198 - DNA, 80 bp, synthetic construct
  source 1..80: mol_type = other DNA
gaagtgagttttaaaggactatgcatgttgaaacatagaatggttgaagaatcatacaggaacaggaggtcagtgatctg

SEQ ID NO: 55199 - DNA, 80 bp, synthetic construct
  source 1..80: mol_type = other DNA
ccctagtatcttatgcctataaactttacctagcttcatcatctaatatctaacttccatttttatttttatatgtatta

SEQ ID NO: 55200 - DNA, 80 bp, synthetic construct
  source 1..80: mol_type = other DNA
ggatactgacagaagggaaatgctttgttcctgataaggctgttgttagtgctctaaaaagaggcatgtatgcaatagca

SEQ ID NO: 55201 - DNA, 80 bp, synthetic construct
  source 1..80: mol_type = other DNA
ccttcgctggcattccatcctactcatcaacaagtattttagcagcctcagaggacggtaggtttatattcagtccaggg

SEQ ID NO: 55202 - DNA, 80 bp, synthetic construct
  source 1..80: mol_type = other DNA
ggcctaattgatttaacgggatactatgaggcagtccacccttgcaatgtattctgtgtcttatcaggaccaggtgcttc

SEQ ID NO: 55203 - DNA, 80 bp, synthetic construct
  source 1..80: mol_type = other DNA
ttggggaaacaagtgtgtcaggctacacagaattgcccccactctcattacaggaggcagaacagctagtgccagagagc

SEQ ID NO: 55204 - DNA, 80 bp, synthetic construct
  source 1..80: mol_type = other DNA
ggagtgcccatattgctttacccactgtgaaccgacagaaactgcaattcaggcacattacaaagtttgtcaagccaccc

SEQ ID NO: 55205 - DNA, 80 bp, synthetic construct
  source 1..80: mol_type = other DNA
tcttgggcccatggaaggaggtggtataatctttaaacactggtgtacatctacttgtcattttggagaccctggtgatg

SEQ ID NO: 55206 - DNA, 80 bp, synthetic construct
  source 1..80: mol_type = other DNA
gcttggggttcaggtgtcgggtttacacttacatgccaggtgtctctcacagaatgcccaacatttctcacgtcaataaa

SEQ ID NO: 55207 - DNA, 80 bp, synthetic construct
  source 1..80: mol_type = other DNA
aaaaaatactctcttctatctcccaatcttttattgattcaccggggtgttgtcttgacatcttgcggagtctactacta

SEQ ID NO: 55208 - DNA, 80 bp, synthetic construct
  source 1..80: mol_type = other DNA
gagttgcacattccattgccatagagttatgtgttccaggttttcatggttgggctacagctgcactcctaattacattt

SEQ ID NO: 55209 - DNA, 80 bp, synthetic construct
  source 1..80: mol_type = other DNA
caggatatagaaaagttctggcaacaattgactctttccagtcatttaacacaagtagtatacatttcacagacgagaga

SEQ ID NO: 55210 - DNA, 80 bp, synthetic construct
  source 1..80: mol_type = other DNA
gtgagtgggttatgggtatcatcaatggaaactgggttgtcttgattgtcttatgtgttttactattgttttcactcatt

SEQ ID NO: 55211 - DNA, 80 bp, synthetic construct
  source 1..80: mol_type = other DNA
ttattcccaaacttaaatcagtctgtctgtgacaataatgcactccctctaatctggagaggcttaattgacttaaccgg

SEQ ID NO: 55212 - DNA, 80 bp, synthetic construct
  source 1..80: mol_type = other DNA
ttctgcctggagttgcacattccattgccatagagttatgtgttccaggttttcatggttgggctacagctgcactccta

SEQ ID NO: 55213 - DNA, 80 bp, synthetic construct
  source 1..80: mol_type = other DNA
gttacattttgttttggttgggtcttaattcctgcatgcacattggctgtcctactgtttttgaaattttttgcaaatat

SEQ ID NO: 55214 - DNA, 80 bp, synthetic construct
  source 1..80: mol_type = other DNA
acaaactaactaaagtaatttggcgaaaaaaagcaaatcaggagacggcaagccaaaattcatttgaggttgtagaaaat

SEQ ID NO: 55215 - DNA, 80 bp, synthetic construct
  source 1..80: mol_type = other DNA
ttctgctgagcatcttatgccctgtcagaaagcacaaaaagtcataaataccgcttgatggtagttgtttaatatatatg

SEQ ID NO: 55216 - DNA, 80 bp, synthetic construct
  source 1..80: mol_type = other DNA
gaagtgagttttaaaggtctatgtatgctaaagcatagaatggttgaagaatcatatagaaatagaagatcagttatttg

SEQ ID NO: 55217 - DNA, 80 bp, synthetic construct
  source 1..80: mol_type = other DNA
attctggacattctatcattgtatacattacctgattttattctctaacacctaactctcatttttatttttatatgtat

SEQ ID NO: 55218 - DNA, 80 bp, synthetic construct
  source 1..80: mol_type = other DNA
catttgcgggtatcccatcctattcatcaacaagtatcttggctgcatcagaagatggtcgatttgtcttcagtccaggt

SEQ ID NO: 55219 - DNA, 80 bp, synthetic construct
  source 1..80: mol_type = other DNA
gggttgcccattcgattgctattgagttgtgtgttccaggttttcatggctgggccacagctgcacttttgatcacattt

SEQ ID NO: 55220 - DNA, 80 bp, synthetic construct
  source 1..80: mol_type = other DNA
tagtagtatggctccgcaagagacagcagttaaataacagcaggatcatgtggagtttgctatttttggccgccttagtt

SEQ ID NO: 55221 - DNA, 80 bp, synthetic construct
  source 1..80: mol_type = other DNA
tagtgaaggttgaaaccgaaagagacagcagttaaataacagcaggatcatgtggagtttgctattcttggccgctttag

SEQ ID NO: 55222 - DNA, 80 bp, synthetic construct
  source 1..80: mol_type = other DNA
accacagatccagagtatgtcttttcacccgggataataccagagtccaatcacagtacctgtgacaagaagactatccc

SEQ ID NO: 55223 - DNA, 80 bp, synthetic construct
  source 1..80: mol_type = other DNA
ttgttttggatggatcctaataccagcaattaccttagttgtcctaaaattcttaaagatggcaacattctcttgttcac

SEQ ID NO: 55224 - DNA, 80 bp, synthetic construct
  source 1..80: mol_type = other DNA
ttatagggtcaactgagctcgggctgattccgattgagactgtatcggatttgaagctagaaagctcatgtaattttgac

SEQ ID NO: 55225 - DNA, 80 bp, synthetic construct
  source 1..80: mol_type = other DNA
tgggctgctagtgcagagactccacttcttgagtcaggatggtcagatacagcacatggtgtaggagaggttccaatgaa

SEQ ID NO: 55226 - DNA, 80 bp, synthetic construct
  source 1..80: mol_type = other DNA
tgttgtgcttgtagtggttctgatcttttctataatactctttaatatcttatgcccacggagagggcacaagaagactg

SEQ ID NO: 55227 - DNA, 80 bp, synthetic construct
  source 1..80: mol_type = other DNA
tttaatgtattgaatttactcatccatgcatttattcataataaactgcactaaccaactaatgctcatatgtctcaaaa

SEQ ID NO: 55228 - DNA, 80 bp, synthetic construct
  source 1..80: mol_type = other DNA
cactaaactttattacagtataacccttaattaaaaaaaacaaacactttactcatatataacttcatattctcttaccg

SEQ ID NO: 55229 - DNA, 80 bp, synthetic construct
  source 1..80: mol_type = other DNA
ctgcacatactctaactctctcacagccagcccacacctatgagatggtaacattaccagtcacctgcttttttacacct

SEQ ID NO: 55230 - DNA, 80 bp, synthetic construct
  source 1..80: mol_type = other DNA
aaaaaatctgatcagttgaagctgataaagacatttgagggaataatcagtaaaacaggctgcacagagaatgcactgca

SEQ ID NO: 55231 - DNA, 80 bp, synthetic construct
  source 1..80: mol_type = other DNA
ttccgagcttagaagacatccgttcagttgaagtgttcagtagaatgattatacatccaaggggtgaagatcatgatcca

SEQ ID NO: 55232 - DNA, 80 bp, synthetic construct
  source 1..80: mol_type = other DNA
gtaccagttctactgatacccttaaagggactgcatttgctggtgtcccaatgtacagctctttatcaacactggtgaga

SEQ ID NO: 55233 - DNA, 80 bp, synthetic construct
  source 1..80: mol_type = other DNA
aaatactctcttctatctcccaatcttttattgattcaccggggtgttgtcttgacaacctgccgattttatacaaccta

SEQ ID NO: 55234 - DNA, 80 bp, synthetic construct
  source 1..80: mol_type = other DNA
tagtagtagtaaggatccgcaagagacagcagttaaaaaacagcaggatcatgtggagtttgctattcttggccgcttta

SEQ ID NO: 55235 - DNA, 80 bp, synthetic construct
  source 1..80: mol_type = other DNA
taccgtccatttgattgctcctgttcaaacatgcatgtctgtgcggagctgtatgataggtttgctgtcaagcaggattc

SEQ ID NO: 55236 - DNA, 80 bp, synthetic construct
  source 1..80: mol_type = other DNA
ttagtatggggaattcttttaacaactgagctgatcatatgggcagcaagtgcagatacccccttaatggagtctggttg

SEQ ID NO: 55237 - DNA, 80 bp, synthetic construct
  source 1..80: mol_type = other DNA
gtacaggttgtacagcttgtggggtgtatcttgataagctccgttcggttgggaaagcatacaagatagtatcactcaaa

SEQ ID NO: 55238 - DNA, 80 bp, synthetic construct
  source 1..80: mol_type = other DNA
ggggttcaggggtaggatttacgctggtatgtacagtggggcttacagagtgtgcaaattttataacttcaatcaaagca

SEQ ID NO: 55239 - DNA, 80 bp, synthetic construct
  source 1..80: mol_type = other DNA
cgtacactgctcacctctctgggatgtgggccgggtggggcggtagttttgaggtccggctatcgatctctggttctggc

SEQ ID NO: 55240 - DNA, 80 bp, synthetic construct
  source 1..80: mol_type = other DNA
ggttgggctacaacagctttactcatcacattttgctttggctggttgctcatacctgcaatcacattgattgtgctgaa

SEQ ID NO: 55241 - DNA, 80 bp, synthetic construct
  source 1..80: mol_type = other DNA
aattttaagactgctcacattttcatgttcacattactcaaaagagtctagatttaaaatactcttagaaaaggtgaagg

SEQ ID NO: 55242 - DNA, 80 bp, synthetic construct
  source 1..80: mol_type = other DNA
tctgggcagctagtgcagaaactccattgatggagtcagggtggtctgatacagcacatggtgtaggtatagtccctatg

SEQ ID NO: 55243 - DNA, 80 bp, synthetic construct
  source 1..80: mol_type = other DNA
cactactgtttttaggtccacttgaacaaggtggtattatactaaagcagtggtgtacaacatcatgtgtgtttggagat

SEQ ID NO: 55244 - DNA, 80 bp, synthetic construct
  source 1..80: mol_type = other DNA
ctagtaaccgactagaatggattgaccctgacagtagtattaaagaccatataaatgtagtgctaaatcgtgatgtgtct

SEQ ID NO: 55245 - DNA, 80 bp, synthetic construct
  source 1..80: mol_type = other DNA
tgtgacaaacttattgaggggttctaacacagtcaaagttgtgggcaaaggtgggcattcaggctcattattcaagtgct

SEQ ID NO: 55246 - DNA, 80 bp, synthetic construct
  source 1..80: mol_type = other DNA
aatggcaattggatggtagtggctgtcttggttgtgatactgatactttcaatattacttttcagctttttctgcccaat

SEQ ID NO: 55247 - DNA, 80 bp, synthetic construct
  source 1..80: mol_type = other DNA
ccggagtaaaaagagtaagcccaattaatccgatgtacttttaaggcctttaaatcgtatacatctatatattcttatta

SEQ ID NO: 55248 - DNA, 80 bp, synthetic construct
  source 1..80: mol_type = other DNA
caagtattaactaacccattatcagctaaaaaaaacaaaccattaacacctatataatcccatttgcttattacgaggct

SEQ ID NO: 55249 - DNA, 80 bp, synthetic construct
  source 1..80: mol_type = other DNA
ttttaaacccgagaggtgaagatcatgaccctgatcaaaatggacaaggtttaatgagaatagctggacctattacagct

SEQ ID NO: 55250 - DNA, 80 bp, synthetic construct
  source 1..80: mol_type = other DNA
tgtgataagaagacaatgcctatcacctggacgggatttcttgcagtatctggagaaattgagaagataacaggttgtac

SEQ ID NO: 55251 - DNA, 80 bp, synthetic construct
  source 1..80: mol_type = other DNA
taccctcggtaacattaataatattaagaatcttacggctcctcacattttcttgctcacactactcaacagagtcaaaa

SEQ ID NO: 55252 - DNA, 80 bp, synthetic construct
  source 1..80: mol_type = other DNA
attaggggttttcagatataaaagcaggtgttacgtaggattagtttggggtatactcttaacagctgaattgataatct

SEQ ID NO: 55253 - DNA, 80 bp, synthetic construct
  source 1..80: mol_type = other DNA
ggacaggatggacagcttgtggagtttaccttgataagctaagatcagttgggaaggcatataaaattgtctccttaaaa

SEQ ID NO: 55254 - DNA, 80 bp, synthetic construct
  source 1..80: mol_type = other DNA
ggggttctggagtgggcttcactttagtgtgtacagtaggcttgacagaatgcgcaaactttatcacatcaatcaaggcc

SEQ ID NO: 55255 - DNA, 80 bp, synthetic construct
  source 1..80: mol_type = other DNA
agggtgggcattcaggttcactattcaaatgttgtcatgatactgactgtactgatgaagggcttgctgcctctccacca

SEQ ID NO: 55256 - DNA, 80 bp, synthetic construct
  source 1..80: mol_type = other DNA
agtggctgcttagaatactgaatggcaattggatggtggtggctgtgctgattgttatcctaatactgtctattctacta

SEQ ID NO: 55257 - DNA, 80 bp, synthetic construct
  source 1..80: mol_type = other DNA
ttcagctttttttgccccattcgaagtagaaagagcaaacccaattagttggatatacctgtaacaccataatgccgtat

SEQ ID NO: 55258 - DNA, 80 bp, synthetic construct
  source 1..80: mol_type = other DNA
ataattttatatattcttattatttaatatttatactaacttttatttttatatacatattaacagactaattattagct

SEQ ID NO: 55259 - DNA, 80 bp, synthetic construct
  source 1..80: mol_type = other DNA
ctaaaaaaaacaaatccttaacacccatataatctcatttgcttatcacgaggcttttgttcctgcggagcatactacta

SEQ ID NO: 55260 - DNA, 80 bp, synthetic construct
  source 1..80: mol_type = other DNA
taattgcccctgtccagacatgcatgtctgttcgaagttgtatgatagggcttttatctagtagaattcatgtgatatat

SEQ ID NO: 55261 - DNA, 80 bp, synthetic construct
  source 1..80: mol_type = other DNA
gaaaaaacatattgtgtcaccggacaagtagtggaagggttatgtttcattcccacacacacaattgcattgacacaacc

SEQ ID NO: 55262 - DNA, 80 bp, synthetic construct
  source 1..80: mol_type = other DNA
ctgtagagcttgagaagttgatcactgcaagtggctgtactgaaaatagttttcaaggttattatatttgcttcttgggg

SEQ ID NO: 55263 - DNA, 80 bp, synthetic construct
  source 1..80: mol_type = other DNA
aaacactctgagcctttgtatgtaccgactatggatgattacagatcagctgaactatttacaaggatggttctaaaccc

SEQ ID NO: 55264 - DNA, 80 bp, synthetic construct
  source 1..80: mol_type = other DNA
caaaggtgaggatcatgatcctgatcaggatgggcagggactgatgaggattaccggacctattactgctaaggtgcctt

SEQ ID NO: 55265 - DNA, 80 bp, synthetic construct
  source 1..80: mol_type = other DNA
atggcgtgggggacattcctatgaagactgacttagaattggattttgcaattgcttcttcctcctcttacagctatcgg

SEQ ID NO: 55266 - DNA, 80 bp, synthetic construct
  source 1..80: mol_type = other DNA
ctggggatacacttgtgttcttgggtcctttagaagaaggtgggttgatcttgaaacagtggtgtacaacaacatgtgct

SEQ ID NO: 55267 - DNA, 80 bp, synthetic construct
  source 1..80: mol_type = other DNA
ggggttcaggtgttggtttcacattgacatgtgtagttggcctgacagaatgcccgaattttataacctcaatcaaagca

SEQ ID NO: 55268 - DNA, 80 bp, synthetic construct
  source 1..80: mol_type = other DNA
atagtcctatttagcttcttgtgtcctataagatcacataagaaacagctttaagggcttatacctttatttgcccatgc

SEQ ID NO: 55269 - DNA, 80 bp, synthetic construct
  source 1..80: mol_type = other DNA
ctaaaaaaaactagagctttactaccatataactcatttacttcaagcctgggcttttgttcctgcggagcatactacta

SEQ ID NO: 55270 - DNA, 80 bp, synthetic construct
  source 1..80: mol_type = other DNA
gggtttgtactattccaagtagtgtctttgatacaacatacaaggtggtgacagggagaaagactgttatttgctatgat

SEQ ID NO: 55271 - DNA, 80 bp, synthetic construct
  source 1..80: mol_type = other DNA
tgccaaccaacagtgcatctgcttgcccctattcagacatgcatgtctgttagaaactgtatgatcagtttgctaaccaa

SEQ ID NO: 55272 - DNA, 80 bp, synthetic construct
  source 1..80: mol_type = other DNA
aaagggaaagtcccgcacactgaaacaacggagactgtgctagggattgcctttgctggtttgcctatgtatagttcctt

SEQ ID NO: 55273 - DNA, 80 bp, synthetic construct
  source 1..80: mol_type = other DNA
atggatcaacagtagcaaaccttgccaggggctctaatacaataaaagtagttggtaagggaggtcattcagggtcttca

SEQ ID NO: 55274 - DNA, 80 bp, synthetic construct
  source 1..80: mol_type = other DNA
ctagttccacagataccctgaaggggacagcctttgcgggcgtcccaatgtatagctccttatcaacactagtcaggaat

SEQ ID NO: 55275 - DNA, 80 bp, synthetic construct
  source 1..80: mol_type = other DNA
cttgtgtggggggtccttcttacaactgaactcatagtttgggcagctagtgctgacacccctctgatggagtcaggatg

SEQ ID NO: 55276 - DNA, 80 bp, synthetic construct
  source 1..80: mol_type = other DNA
ttacaactgaactcatagtttgggcagctagtgctgacacccctctgatggagtcaggatggtcagacacagctcatggt

SEQ ID NO: 55277 - DNA, 80 bp, synthetic construct
  source 1..80: mol_type = other DNA
aattttgatttacatgtgccatctacatcaatccagaaatacaaccaggtagaatgggcaaagaaaagttcaaccacaga

SEQ ID NO: 55278 - DNA, 80 bp, synthetic construct
  source 1..80: mol_type = other DNA
atcaattttactctttagctttttttgcccaataaggggtagaaagaataagtccaactaatacagcatgtttatagcct

SEQ ID NO: 55279 - DNA, 80 bp, synthetic construct
  source 1..80: mol_type = other DNA
ctacagagacgatgcaggggatagcctttgctggtgcacctacgtatagctcgttctcaactttagtaaggaaagcagat

SEQ ID NO: 55280 - DNA, 80 bp, synthetic construct
  source 1..80: mol_type = other DNA
cgagacaatgctagcaaatgtgacatctgttagacaagaatacgcaataccagttggaccagtctttccaccaggcatga

SEQ ID NO: 55281 - DNA, 80 bp, synthetic construct
  source 1..80: mol_type = other DNA
attaggggtattcaggtataagagtagatgctatgttggtcttgtctgggggatcctcctgacaactgaactgatcatat

SEQ ID NO: 55282 - DNA, 80 bp, synthetic construct
  source 1..80: mol_type = other DNA
gtactggttgtacagcttgtggggtatacttagacaagttaaggtctgttggtaaagcatataagattgtttcactcaag

SEQ ID NO: 55283 - DNA, 80 bp, synthetic construct
  source 1..80: mol_type = other DNA
cattgatggggcttggggttctggggttgggtttacattagtatgtacagttggactaacagagtgtgcaaactttatta

SEQ ID NO: 55284 - DNA, 80 bp, synthetic construct
  source 1..80: mol_type = other DNA
caggggtattgacagctaaggataacccggtatatatttggtcaccgggaattatcatggaaggaaaccattctgtgtgc

SEQ ID NO: 55285 - DNA, 80 bp, synthetic construct
  source 1..80: mol_type = other DNA
gtgaaattgaaaaaacacctcagtgcacagtcttttgcaccctggcagggccaggtgccgattgtgaagcttactctgaa

SEQ ID NO: 55286 - DNA, 80 bp, synthetic construct
  source 1..80: mol_type = other DNA
accgggattttcaatataagctcacctacttgtttactcaatcgtgtacagagattccgtggtgcagagcaacagataaa

SEQ ID NO: 55287 - DNA, 80 bp, synthetic construct
  source 1..80: mol_type = other DNA
attctaactaaaactttagttataggccaatgcatatataccttcactagtattttctcgctaatccctgggattgcaca

SEQ ID NO: 55288 - DNA, 80 bp, synthetic construct
  source 1..80: mol_type = other DNA
ttccattcattgccatgatattactaaaaatactaattgcgtttgcatatttatgttctaaatataatacagactccaag

SEQ ID NO: 55289 - DNA, 80 bp, synthetic construct
  source 1..80: mol_type = other DNA
tctaaggaagtcattggcagcttatgaaccaaagcaaggatgttatcggacattatcccttttccgttatcgaagtcgtt

SEQ ID NO: 55290 - DNA, 80 bp, synthetic construct
  source 1..80: mol_type = other DNA
tctttgtaggattcatctggtgtatactgctggttttagaattggttatttgggctgctagtgctgaaacacaaaatcta

SEQ ID NO: 55291 - DNA, 80 bp, synthetic construct
  source 1..80: mol_type = other DNA
aactcaggatggacagatactgcacatggttcaggtgttgttcccatgagaactgacttagaactggatttttcattacc

SEQ ID NO: 55292 - DNA, 80 bp, synthetic construct
  source 1..80: mol_type = other DNA
atcttctgcaagttatacatacagaagacaattacagaatcctgcaaatgaacatgaaaagataccctttcacctacaaa

SEQ ID NO: 55293 - DNA, 80 bp, synthetic construct
  source 1..80: mol_type = other DNA
ggctggggttgtaatcccccagattgcccaggtattggaacaggttgcactgcctgtggtgtatatcttgataaactcaa

SEQ ID NO: 55294 - DNA, 80 bp, synthetic construct
  source 1..80: mol_type = other DNA
taattttgacttacacaccagcacagcaacccagcaatcattcacaaagtggacatgggaaatgaaggatgacctagctg

SEQ ID NO: 55295 - DNA, 80 bp, synthetic construct
  source 1..80: mol_type = other DNA
aaggtttttaagatcatttcattaagatacacaagaaaggcttgtattcaactcggcactgaacagacctgcaagagtgt

SEQ ID NO: 55296 - DNA, 80 bp, synthetic construct
  source 1..80: mol_type = other DNA
tgatagtaatgattgcctggtcaccacttcaattaaagtatgcctgattgggactgtctcaaaatttcaaccctcagata

SEQ ID NO: 55297 - DNA, 80 bp, synthetic construct
  source 1..80: mol_type = other DNA
cattattatttttgggcccacttgagcaaggtgggttaatatttaaacaatggtgtacaacaacatgtcaatttggtgat

SEQ ID NO: 55298 - DNA, 80 bp, synthetic construct
  source 1..80: mol_type = other DNA
catatttctacaagtgcacttgaatggattgatccggatagttctcttagagatcatattaatgttgttgtcagccgtga

SEQ ID NO: 55299 - DNA, 80 bp, synthetic construct
  source 1..80: mol_type = other DNA
tctctcatttcaggatttgagtgagacaccatgtcaagtagatttaactacatcttcaatagatggagcatggggttcag

SEQ ID NO: 55300 - DNA, 80 bp, synthetic construct
  source 1..80: mol_type = other DNA
gtgttggctttaatttagtttgtactgttagtttaacagaatgcccaacttttttaacttccatcaaggcatgtgattct

SEQ ID NO: 55301 - DNA, 80 bp, synthetic construct
  source 1..80: mol_type = other DNA
gcaatgtgttatgggtctaccacaaccaacctagtgagaggacagaacacagtccatatcgttgggaagggaggtcattc

SEQ ID NO: 55302 - DNA, 80 bp, synthetic construct
  source 1..80: mol_type = other DNA
aaaacactcaggcatcatcgacaagttttcaaacaaaaagtagtgaagtgaatttaagagggttgtgtttaattccccct

SEQ ID NO: 55303 - DNA, 80 bp, synthetic construct
  source 1..80: mol_type = other DNA
atttagaccgggtaacagggtttaatcaagcagatagtgataagatattcgatgatggtgcaccaggatgtggcatgtct

SEQ ID NO: 55304 - DNA, 80 bp, synthetic construct
  source 1..80: mol_type = other DNA
aaatcaggtgaatggattcttggtgtgttaaacggaaattggttagttgtggctgtcctaatagcactatttatattatc

SEQ ID NO: 55305 - DNA, 80 bp, synthetic construct
  source 1..80: mol_type = other DNA
catattcttgtttaccttatgctgccctagaagaccaacctacactaaggaacataagccttaactgtcatgtattgatt

SEQ ID NO: 55306 - DNA, 80 bp, synthetic construct
  source 1..80: mol_type = other DNA
tccacaccatattgcactcattaacaaatccccatatagttcatgctactttcttactgtataacctgtatagtatatta

SEQ ID NO: 55307 - DNA, 80 bp, synthetic construct
  source 1..80: mol_type = other DNA
tatttaaccaatatatagaaaaaaaactagcactttactaattaaatcacttcataccgattatgcctggacttttgttc

SEQ ID NO: 55308 - DNA, 80 bp, synthetic construct
  source 1..80: mol_type = other DNA
ttagtggttgaaacagcatcacggacccggaagacaattgcttgttttgacatatcatgtaatcaaacagtatgtcaacc

SEQ ID NO: 55309 - DNA, 80 bp, synthetic construct
  source 1..80: mol_type = other DNA
gtaggtaaggtaactggcaaagcaccttctacagaagcatctgacacagtacaaggcatagctttttcaggtagccccct

SEQ ID NO: 55310 - DNA, 80 bp, synthetic construct
  source 1..80: mol_type = other DNA
caggtgtattaacagcaaaggatgatcctgtatatgtctgggcaccaggaatcataatggaaggtaatcattctatttgt

SEQ ID NO: 55311 - DNA, 80 bp, synthetic construct
  source 1..80: mol_type = other DNA
cattacctttaacatggactggttttatacctttgccaggagaagttgaaaagacaacacaatgcacagtattttgtacc

SEQ ID NO: 55312 - DNA, 80 bp, synthetic construct
  source 1..80: mol_type = other DNA
tagagttgtgtgtaccaggcttgcatggatgggcaactatgatgcttctgttaacattctgtttcggctggattctaata

SEQ ID NO: 55313 - DNA, 80 bp, synthetic construct
  source 1..80: mol_type = other DNA
ccctttgtgtctatgatattactgaaaattttgattgctcttgcttatctatgctctaaatataatacagattcaaaatt

SEQ ID NO: 55314 - DNA, 80 bp, synthetic construct
  source 1..80: mol_type = other DNA
caaggtcttgtggttggttcagtcgaattaccgcctgttccaataaatcaagtagagtccttgaagttggaaagctcttg

SEQ ID NO: 55315 - DNA, 80 bp, synthetic construct
  source 1..80: mol_type = other DNA
atccatctgaggcaactacatcagcacttcaggcccacttcaaggtttgtaaacttacatcgaggtttcaagataatctg

SEQ ID NO: 55316 - DNA, 80 bp, synthetic construct
  source 1..80: mol_type = other DNA
ttgtaggatttatttggtgcgtgttattagttctggagctaattgtttgggctgctagtgctgagactcaaaatctaaat

SEQ ID NO: 55317 - DNA, 80 bp, synthetic construct
  source 1..80: mol_type = other DNA
tctggatggactgatacagctcacgggtcaggtattgtgccaatgaggactgatctcgaactggacttttctttgccatc

SEQ ID NO: 55318 - DNA, 80 bp, synthetic construct
  source 1..80: mol_type = other DNA
taattttgatctgcatactagtacagcagcacaacaatcatttacaaaatggacatgggaaataaagagtgacctagcag

SEQ ID NO: 55319 - DNA, 80 bp, synthetic construct
  source 1..80: mol_type = other DNA
tttgaggtacaccagaaaagcatgtattcaacttggcactgaacagacatgcaagagtgttgatagcaatgattgcctag

SEQ ID NO: 55320 - DNA, 80 bp, synthetic construct
  source 1..80: mol_type = other DNA
accctactcttcctgggtcctttagaacagggtgggcttatatttaagcaatggtgtactacaacttgtcaatttggtga

SEQ ID NO: 55321 - DNA, 80 bp, synthetic construct
  source 1..80: mol_type = other DNA
gctatttgttatggctcaacaacagctaatctgttaagagggcagaatacagttcatatagtaggtaaaggtggacattc

SEQ ID NO: 55322 - DNA, 80 bp, synthetic construct
  source 1..80: mol_type = other DNA
cctgttggttcaccaaatcaggagaatggattcttggtgtgttgaatgggaattggatggttgtggcagttttaatagca

SEQ ID NO: 55323 - DNA, 80 bp, synthetic construct
  source 1..80: mol_type = other DNA
ctatctttttattcacactgtgttgtccaagaaggcccagctacacaaaagagcatagaccctgactttaaatgtaaaat

SEQ ID NO: 55324 - DNA, 80 bp, synthetic construct
  source 1..80: mol_type = other DNA
ctacttgtttcaactaccaagaatttcatttaatcaattcaattgcactgctttattttatgcttaatatagtctatgta

SEQ ID NO: 55325 - DNA, 80 bp, synthetic construct
  source 1..80: mol_type = other DNA
tactgtttttttaataggtcctattcagacatgtttgacaacaaaaagctgcctcttagggctaggggatcagaggattc

SEQ ID NO: 55326 - DNA, 80 bp, synthetic construct
  source 1..80: mol_type = other DNA
aagttaattatgaaaagacatattgtgtggcaggtcagcttgtggaaggtgtttgtttcaatccaatacacacaatggct

SEQ ID NO: 55327 - DNA, 80 bp, synthetic construct
  source 1..80: mol_type = other DNA
taacatcaggtgatagtatgaaaattgaaaagaatttcgaaactctcgttcaaaaaagtgattgtacaggcaataacttc

SEQ ID NO: 55328 - DNA, 80 bp, synthetic construct
  source 1..80: mol_type = other DNA
caaggttattatgtatgcttgataggaagtagttcagaaccattatacatcccaacactagatgattataggtcagctga

SEQ ID NO: 55329 - DNA, 80 bp, synthetic construct
  source 1..80: mol_type = other DNA
agtcttatcaaggatggcatttgcacctcatggagaagaccatgatattgagaagaatgcagtaagtgcaatgaggattg

SEQ ID NO: 55330 - DNA, 80 bp, synthetic construct
  source 1..80: mol_type = other DNA
taggaaaagttaccggtaaagcaccttcaacagagtcatctgatacaatacagggtattgcattttccggtagtcctctt

SEQ ID NO: 55331 - DNA, 80 bp, synthetic construct
  source 1..80: mol_type = other DNA
taattactgactcaaatcatagcagttgtgacaaaaaaacgttgccattaacctggagaggcttcatctctttatcaggg

SEQ ID NO: 55332 - DNA, 80 bp, synthetic construct
  source 1..80: mol_type = other DNA
gaaattgaaaaaattacaggctgtaatgtcttctgtacattggcaggtccaggtgctagttgtgaagcttattctgagaa

SEQ ID NO: 55333 - DNA, 80 bp, synthetic construct
  source 1..80: mol_type = other DNA
agtttaagggttcggaacaaagaattaattttatctgccagagaatagatcatgatgttattgtatattgtaatggccaa

SEQ ID NO: 55334 - DNA, 80 bp, synthetic construct
  source 1..80: mol_type = other DNA
tacctacaataaccttaataatattgaagatattaaggctcttgacatactcatgttcacactacactactgagtcaaaa

SEQ ID NO: 55335 - DNA, 80 bp, synthetic construct
  source 1..80: mol_type = other DNA
aaggttatgtgacagggtcagtagaagtaagcttgataacattagatcaggtgacagacttaaaggttgaaagttcatgc

SEQ ID NO: 55336 - DNA, 80 bp, synthetic construct
  source 1..80: mol_type = other DNA
acagaaagtgcattacaagcacactacacagtgtgtaagttgacagggcggttccaggaggctttaaagaaatcgctaaa

SEQ ID NO: 55337 - DNA, 80 bp, synthetic construct
  source 1..80: mol_type = other DNA
aaaaccagaagtaaagattggctgttatcgaacactcggtgtgtttagatacaaaagcaggtgttatgtaggcttagttt

SEQ ID NO: 55338 - DNA, 80 bp, synthetic construct
  source 1..80: mol_type = other DNA
gggccttccttcttacccttgaattgatagtttgggctgccagtgctgacacacagcttgttgaggtaggctggtctgat

SEQ ID NO: 55339 - DNA, 80 bp, synthetic construct
  source 1..80: mol_type = other DNA
atggtgtgggagaaattcctatgaaaacagacctagaattagactttgctatcgcatcttcttcttcatacagctataga

SEQ ID NO: 55340 - DNA, 80 bp, synthetic construct
  source 1..80: mol_type = other DNA
cgaaaattaactaacccagcaaatccagatgaatctgtacctttccattttcagcttgagcgacaagtaatccatgcaga

SEQ ID NO: 55341 - DNA, 80 bp, synthetic construct
  source 1..80: mol_type = other DNA
gagtaggtactggttgtacagcatgtggaatatacttggataagcttaaatctgttggtaaggcatacaagcttgtggcc

SEQ ID NO: 55342 - DNA, 80 bp, synthetic construct
  source 1..80: mol_type = other DNA
cattttgaccatcatgcaaaccctacaatgacccaaaaattcactcaaatgaaatgggcaagaacagcaagtaccacaga

SEQ ID NO: 55343 - DNA, 80 bp, synthetic construct
  source 1..80: mol_type = other DNA
ttgaagtacacaaggaaagtctgtatccaactaggaactgagcaggcttgcaaagacatagatgttaatgattgtcttgt

SEQ ID NO: 55344 - DNA, 80 bp, synthetic construct
  source 1..80: mol_type = other DNA
cacatcagctgtgaaagtgtgcatgattggaactatctcaaaacttcagcctggtgacacactgttatttttaggtccat

SEQ ID NO: 55345 - DNA, 80 bp, synthetic construct
  source 1..80: mol_type = other DNA
ccacatgtgcctttggagaccctggagatataatgtcaacaacttcagggatgaagtgtcctgagcatactggttccttc

SEQ ID NO: 55346 - DNA, 80 bp, synthetic construct
  source 1..80: mol_type = other DNA
acttagtccttaatagagatgtgtcatttcaagacttaagtgacaacccgtgtaaggtcgacttaactacacaggctatt

SEQ ID NO: 55347 - DNA, 80 bp, synthetic construct
  source 1..80: mol_type = other DNA
ggggttccggcgtaggctttactttaacttgtgttgcaggtttaacagagtgcccaaattttatgacatctataaaagca

SEQ ID NO: 55348 - DNA, 80 bp, synthetic construct
  source 1..80: mol_type = other DNA
tggtcattcaggctcactgttcaagtgctgtcatgataaagattgcactaaagttgggttggcagcttctgcacctcatt

SEQ ID NO: 55349 - DNA, 80 bp, synthetic construct
  source 1..80: mol_type = other DNA
tacaacaaatgcagctgaaacaacatttgaaagtaagtcaaccgaggtacaattaaagggggtttgtacaattcctagta

SEQ ID NO: 55350 - DNA, 80 bp, synthetic construct
  source 1..80: mol_type = other DNA
tagagagggtcacaggatacaatcaggtagattcaaataaagtctatgatgatggggcacctccttgcgcaataaagtgc

SEQ ID NO: 55351 - DNA, 80 bp, synthetic construct
  source 1..80: mol_type = other DNA
aatggttaatgggtatattgaatggcaactgggtggttattgctgtccttgttgttgtccttttaatctcaatccttctc

SEQ ID NO: 55352 - DNA, 80 bp, synthetic construct
  source 1..80: mol_type = other DNA
tttagtttcctctgcccaataaggtcacataagaaacagctttaaaaattggttgataactactcatatacatattctgt

SEQ ID NO: 55353 - DNA, 80 bp, synthetic construct
  source 1..80: mol_type = other DNA
gtattctatcccctatactatgttacaaatatataaattcatcactatatatctacttaacacccatattgaataaacat

SEQ ID NO: 55354 - DNA, 80 bp, synthetic construct
  source 1..80: mol_type = other DNA
attactaaaaaaaactataacttcactaccaaataactcatttctttcaagccaaggcttttgttcctgcggagcatact

SEQ ID NO: 55355 - DNA, 80 bp, synthetic construct
  source 1..80: mol_type = other DNA
gtgtttttgatacaacatataaagttgttaatgggagaaagacagtcatatgttatgatcttgcatgtaatcaaactcat

SEQ ID NO: 55356 - DNA, 80 bp, synthetic construct
  source 1..80: mol_type = other DNA
attgtcaacccacagtccatttactagcaccaatacagacatgcatgtctgttaaaaattgtatgatcagtctgttaaac

SEQ ID NO: 55357 - DNA, 80 bp, synthetic construct
  source 1..80: mol_type = other DNA
agtaggattcaagttatctatgaaaaaacatattgcatatcaggacagctggtagaaggactgtgcttcaatcctgtacc

SEQ ID NO: 55358 - DNA, 80 bp, synthetic construct
  source 1..80: mol_type = other DNA
aaaccttgctttaacacaacccgggcatgcatacgacacaatgaccatcccaatcatatgtttcttgatttcaaaaaaag

SEQ ID NO: 55359 - DNA, 80 bp, synthetic construct
  source 1..80: mol_type = other DNA
gttctaatttaaaaattgctgtagaactagaaaaactgacaactaaaactggttgtacagaaaatgcactacaggcttat

SEQ ID NO: 55360 - DNA, 80 bp, synthetic construct
  source 1..80: mol_type = other DNA
attcagaaccactattacttcctatggctgatgatttccgttctgctgaaatctttacacgaatgatgatgaaccctaaa

SEQ ID NO: 55361 - DNA, 80 bp, synthetic construct
  source 1..80: mol_type = other DNA
cttaaccactgttacattggggctccctagaagtgtttatgaattgaaggttgaatgcccccatactgttgtattagggc

SEQ ID NO: 55362 - DNA, 80 bp, synthetic construct
  source 1..80: mol_type = other DNA
tcaagggcaaagtgccacatacagagacttcagatactgtcactgggatagcttttgcaggtttaccaatgtatagttca

SEQ ID NO: 55363 - DNA, 80 bp, synthetic construct
  source 1..80: mol_type = other DNA
cattgccccttacatggactggttttataccactgccaggagaaattgagaagacaacgcaatgtacagtattctgtaca

SEQ ID NO: 55364 - DNA, 80 bp, synthetic construct
  source 1..80: mol_type = other DNA
tgttttgggtggatcttaataccattttttgccatgatattgctgaaagtattaattgtatttgcttatttgtgttcaaa

SEQ ID NO: 55365 - DNA, 80 bp, synthetic construct
  source 1..80: mol_type = other DNA
ggtcaaggtcttgttattggatcagttgagttgccaccagtcccactgatgcaagtagaggctctaaaactagaaagctc

SEQ ID NO: 55366 - DNA, 80 bp, synthetic construct
  source 1..80: mol_type = other DNA
gtataatactgattcaaagtttaaagtccttatagaaaaagttaagaaagaataccaaaaaactatgggctccatggtat

SEQ ID NO: 55367 - DNA, 80 bp, synthetic construct
  source 1..80: mol_type = other DNA
accctgctgaagcaacaacatcagctctgcaagcccattttaaagtatgtaaacttacatcaaggtttcaggataattta

SEQ ID NO: 55368 - DNA, 80 bp, synthetic construct
  source 1..80: mol_type = other DNA
tgtagggttcatttggtgtctgctgttagttttggagttgattgtatgggctgctagtgctgaaactcagaacctcaatt

SEQ ID NO: 55369 - DNA, 80 bp, synthetic construct
  source 1..80: mol_type = other DNA
ctggatggacagatacagcacatggatctggagtaataccaatgcggaccgatcttgaattagatttttctctcccatct

SEQ ID NO: 55370 - DNA, 80 bp, synthetic construct
  source 1..80: mol_type = other DNA
atgcaattttgatctgcatactagcacatcatcacaacaagcatttacaaaatggacatgggagacaaagagtgatctgg

SEQ ID NO: 55371 - DNA, 80 bp, synthetic construct
  source 1..80: mol_type = other DNA
aatcagtaggtaaagcatttaaaattgtctctttgagatatacacgaaaggcatgtatccagctaggtactgagcaaact

SEQ ID NO: 55372 - DNA, 80 bp, synthetic construct
  source 1..80: mol_type = other DNA
tgtaagaatgttgacagtaatgattgtttagtaactacatcagtaaaagtgtgtttaatagggactgtgtcaaaattcca

SEQ ID NO: 55373 - DNA, 80 bp, synthetic construct
  source 1..80: mol_type = other DNA
ctcctgttggaatgaaatgtccagaattaagtggttcatttagaaagaaatgtgcatttgcaacaacacctgtttgtcaa

SEQ ID NO: 55374 - DNA, 80 bp, synthetic construct
  source 1..80: mol_type = other DNA
ttgctggttcacaaagtcaggagaatggattcttggagttctgaatggaaactggatggtagtagctgtattagtagcat

SEQ ID NO: 55375 - DNA, 80 bp, synthetic construct
  source 1..80: mol_type = other DNA
tattcatattatccatctttctttttacattatgctgcccacgtagacctagttatgcaaaggaacataagccttaagtg

SEQ ID NO: 55376 - DNA, 80 bp, synthetic construct
  source 1..80: mol_type = other DNA
agggcaattataatgtaatcaactacctgtactaataatactagtatatgagttccttcatttctgtgctttatatttta

SEQ ID NO: 55377 - DNA, 80 bp, synthetic construct
  source 1..80: mol_type = other DNA
ccttggtgattgaaacagccgcaagaacaagaaaaacaatagcatgttttgatttatcatgtaaccaaacggcatgtcaa

SEQ ID NO: 55378 - DNA, 80 bp, synthetic construct
  source 1..80: mol_type = other DNA
caaaggattcaggtcaactatgaaaaaacatattgtgtttcaggtcaacttattgaaggtgtttgttttaatccagtaca

SEQ ID NO: 55379 - DNA, 80 bp, synthetic construct
  source 1..80: mol_type = other DNA
tacaatggctctatcccaacctagtcatacatatgacatagtgactgtaatggttcgttgctttctaattgtgaagaagg

SEQ ID NO: 55380 - DNA, 80 bp, synthetic construct
  source 1..80: mol_type = other DNA
tgacaacaggtgatagcatgaaaattgaaaaaagctttgagacccttgtccaaaagactggttgcacagataatggtttc

SEQ ID NO: 55381 - DNA, 80 bp, synthetic construct
  source 1..80: mol_type = other DNA
tgtgtctgctactatggagtagaggagataccagaaatctgaatgaacttaaaatggagtgcccacatacaattggctta

SEQ ID NO: 55382 - DNA, 80 bp, synthetic construct
  source 1..80: mol_type = other DNA
ggtcctttctaggatggcttttgcaccacatggagaagatcatgatattgagaagaatgccataagtgcaatgagaattg

SEQ ID NO: 55383 - DNA, 80 bp, synthetic construct
  source 1..80: mol_type = other DNA
tgggcaaagtaacaggtaaagcaccatcaactgagtcatctgatacagtacagggtatagccttctcaggtaatcccctt

SEQ ID NO: 55384 - DNA, 80 bp, synthetic construct
  source 1..80: mol_type = other DNA
gtttaaagtcctgatagaaaaagttaagaaagaataccaaaaaactatgggctccatggtatgtgaagtctgtcagtatg

SEQ ID NO: 55385 - DNA, 80 bp, synthetic construct
  source 1..80: mol_type = other DNA
agaaagtcattgggagcatatgaaccaaaacagggttgctacaggacattgtctctattccgatacagaagcagattttt

SEQ ID NO: 55386 - DNA, 80 bp, synthetic construct
  source 1..80: mol_type = other DNA
tctgcaagttatacatatagaaggcagctacagaatccagcaaatgaacaagaaaaaattccatttcacttgcagataag

SEQ ID NO: 55387 - DNA, 80 bp, synthetic construct
  source 1..80: mol_type = other DNA
aagtcaggagaatggattcttggagttctgaatggaaactggatggtagtggctgtattagtggcattattcatattatc

SEQ ID NO: 55388 - DNA, 80 bp, synthetic construct
  source 1..80: mol_type = other DNA
catctttctcttcacattatgctgtccacgtaggcctagttatgcaaaggaacataagccttaaatgagggcaattatta

SEQ ID NO: 55389 - DNA, 80 bp, synthetic construct
  source 1..80: mol_type = other DNA
tgtaaccaaatgtctatactaataatactagtatatgaattcctttatttctgtgctttatattttacttaatacattat

SEQ ID NO: 55390 - DNA, 80 bp, synthetic construct
  source 1..80: mol_type = other DNA
cacgatggctctatcccaacctagtcacacatatgatatagtgactgtgatggtgcgctgctttctaattgtcaagaagg

SEQ ID NO: 55391 - DNA, 80 bp, synthetic construct
  source 1..80: mol_type = other DNA
gcaatgtgttacggatctactactgctaatctagttaggggacagaataccattcacattgtcgggaagcgtgggcattc

SEQ ID NO: 55392 - DNA, 80 bp, synthetic construct
  source 1..80: mol_type = other DNA
tggtcaccaggagataattcagcaaaattccgtagattcacttctatgctgcataatggacttcctaataataaactgaa

SEQ ID NO: 55393 - DNA, 80 bp, synthetic construct
  source 1..80: mol_type = other DNA
atgtcattactgttcaaacaagtatggaacaatttatttcctgagcttgattgtttctttgagtttgcccaccactcaga

SEQ ID NO: 55394 - DNA, 80 bp, synthetic construct
  source 1..80: mol_type = other DNA
atgtcattgctgttcaagcaagtgtggaacaatttatttccagagctagactgcttttttgagtttgcacaccactcaga

SEQ ID NO: 55395 - DNA, 80 bp, synthetic construct
  source 1..80: mol_type = other DNA
cagagaatacacaggcatcgtcaacaagttttcaaacaaaaagtagtgaggtaaatttaagaggtttatgcttagttccc

SEQ ID NO: 55396 - DNA, 80 bp, synthetic construct
  source 1..80: mol_type = other DNA
tagtagtagactccgcaagaagaagcagacacagagaaatatgggaaaaattattccagtttgtctgtatctgctcttcc

SEQ ID NO: 55397 - DNA, 80 bp, synthetic construct
  source 1..80: mol_type = other DNA
cactcccccttacctggactggctttataccattgccaggggaaatagagaaaacaacacaatgtacagtcttttgtact

SEQ ID NO: 55398 - DNA, 80 bp, synthetic construct
  source 1..80: mol_type = other DNA
ccattcacttgcagtagaactttgtgtaccaggtttacatggatgggccacaatgttacttctattaacattttgttttg

SEQ ID NO: 55399 - DNA, 80 bp, synthetic construct
  source 1..80: mol_type = other DNA
gatgggttcttataccatttattgccatgatagtgttaaaaatattgattgcactagcttatctatgctcaaaatacaat

SEQ ID NO: 55400 - DNA, 80 bp, synthetic construct
  source 1..80: mol_type = other DNA
caaggccttgtaattggctcagttgaattaccaccagtcccattatcacaaatagaatctttgaaactagaaagttcatg

SEQ ID NO: 55401 - DNA, 80 bp, synthetic construct
  source 1..80: mol_type = other DNA
acagattccaaattcaaagtcctaattgaaagagtaaagaaagaataccagaaaactatgggttcaatggtgtgtgaagt

SEQ ID NO: 55402 - DNA, 80 bp, synthetic construct
  source 1..80: mol_type = other DNA
ctgtcagtatgagtgtgagactgcaaaagaattagaatcacataggaagagttgccctatgggctcatgcccatattgtc

SEQ ID NO: 55403 - DNA, 80 bp, synthetic construct
  source 1..80: mol_type = other DNA
accctgctgaagcaacaacatctgcccttcaggctcatttcaaagtgtgcaagctaacatccaggttccaggataacttg

SEQ ID NO: 55404 - DNA, 80 bp, synthetic construct
  source 1..80: mol_type = other DNA
agaaagtcattaggggcctatgagccaaaacagggttgttacagaacattatctctctttcggtatcgaagtagattttt

SEQ ID NO: 55405 - DNA, 80 bp, synthetic construct
  source 1..80: mol_type = other DNA
caattttgatctgcacacaagtacatcaacacagcaatcattcacaagatggacatgggaaataaaaaatgatttagcag

SEQ ID NO: 55406 - DNA, 80 bp, synthetic construct
  source 1..80: mol_type = other DNA
cattgaaatatacaagaaaagcatgtattcagcttggtactgaacaaacttgtaagaatgttgacagcaatgactgcttg

SEQ ID NO: 55407 - DNA, 80 bp, synthetic construct
  source 1..80: mol_type = other DNA
cccttctgtttttaggcccacttgagcagggtggtttgatatttaaacagtggtgtactactacatgccagttcggtgat

SEQ ID NO: 55408 - DNA, 80 bp, synthetic construct
  source 1..80: mol_type = other DNA
cctggagatataatgagcactcctgctggaatgaagtgcccagaattgagtggctcattcaggaaaaaatgtgcatttgc

SEQ ID NO: 55409 - DNA, 80 bp, synthetic construct
  source 1..80: mol_type = other DNA
ttgatggggcatggggctctggagtgggcttcaatttgatatgttctgtaagtctaacagagtgttcaacattcttgacc

SEQ ID NO: 55410 - DNA, 80 bp, synthetic construct
  source 1..80: mol_type = other DNA
cattttcttattcaccttatgctgtccacgtaggcctagctatgcaaaagaacataagccttaattatacttcagtatgt

SEQ ID NO: 55411 - DNA, 80 bp, synthetic construct
  source 1..80: mol_type = other DNA
ggatgtcatattacttatattaacatattactgtatagttatcctcattactttgcattatatcttactcactgtattgt

SEQ ID NO: 55412 - DNA, 80 bp, synthetic construct
  source 1..80: mol_type = other DNA
tactgtctttttaatagggcctattcaaacatgtataacaacaaaaagctgtctcttaggcctaggtgaccaaagaattc

SEQ ID NO: 55413 - DNA, 80 bp, synthetic construct
  source 1..80: mol_type = other DNA
atacaatggccctttctcaacctagtcacacatatgacatagttactgtcatggtgcgttgtttcttagttgttaaaaag

SEQ ID NO: 55414 - DNA, 80 bp, synthetic construct
  source 1..80: mol_type = other DNA
gtgtctacaggtgatagcatgaaaatagaaaagaattttgaaactcttgtccagaaaactggctgtacaagcaatgggtt

SEQ ID NO: 55415 - DNA, 80 bp, synthetic construct
  source 1..80: mol_type = other DNA
tcaaggttattatgtctgtttaataggaagtagctcagagcctttatacatcccaacattagatgattatcggtcagctg

SEQ ID NO: 55416 - DNA, 80 bp, synthetic construct
  source 1..80: mol_type = other DNA
agtgtctactactatgggatagagtaactaccagaaacctgaatgagcttaaaatggaatgtccacacacaattggatta

SEQ ID NO: 55417 - DNA, 80 bp, synthetic construct
  source 1..80: mol_type = other DNA
ggttttatcaagaatggcctttgcaccacatggagaagatcatgatgttgagaagaatgcagtgagtgcaatgagaatag

SEQ ID NO: 55418 - DNA, 80 bp, synthetic construct
  source 1..80: mol_type = other DNA
ttggtaaagtaacaggtaaagcaccatcaactgaatcttcagatacagtacaaggtatagcattttctggcaatcccctt

SEQ ID NO: 55419 - DNA, 80 bp, synthetic construct
  source 1..80: mol_type = other DNA
ctgggttgttgacagcaaaagatgacccgatatacatattggcaccaggaatcataatggaaggaaaccactctatctgt

SEQ ID NO: 55420 - DNA, 80 bp, synthetic construct
  source 1..80: mol_type = other DNA
ttggatggattttaataccgttttttgctatgttgttattaaaaatattaattgcatttgcttatatatgctcaaagtat

SEQ ID NO: 55421 - DNA, 80 bp, synthetic construct
  source 1..80: mol_type = other DNA
ggtcagggccttgttattggatcagttgagttgccaccagtcccattgacacaagtagagtctctgaaactagaaagttc

SEQ ID NO: 55422 - DNA, 80 bp, synthetic construct
  source 1..80: mol_type = other DNA
aatacagactcaaagttcaaagtcctaatagagaaagttaagaaggaataccagaaaactatgggctccatggtgtgtga

SEQ ID NO: 55423 - DNA, 80 bp, synthetic construct
  source 1..80: mol_type = other DNA
agtctgtcaatatgagtgtgaaactgcaaaagaattagagtcacataggaaaagttgtccaatgggttcatgtccatatt

SEQ ID NO: 55424 - DNA, 80 bp, synthetic construct
  source 1..80: mol_type = other DNA
gtttgaatcctgctgaagcaacaacatctgctttacaagctcattttaaagtgtgtaaacttacatcaaggtttcaggat

SEQ ID NO: 55425 - DNA, 80 bp, synthetic construct
  source 1..80: mol_type = other DNA
aatttaagaaagtcattaggggcatatgaaccaaaacagggttgctacaggacattgtctcttttccgttataggagcaa

SEQ ID NO: 55426 - DNA, 80 bp, synthetic construct
  source 1..80: mol_type = other DNA
gttttttgtggggtttatttggtgtttattattagttttagaattgattgtatgggctgctagtgctgaaactcaaaacc

SEQ ID NO: 55427 - DNA, 80 bp, synthetic construct
  source 1..80: mol_type = other DNA
ccatcttctgcaagttacacatatagaagacagttacaaaacccagcaaatgaacaagagagaattccatttcatctaca

SEQ ID NO: 55428 - DNA, 80 bp, synthetic construct
  source 1..80: mol_type = other DNA
atgtaactttgatttgcataccagtacatcatcacaacaatcatttacaaaatggacatgggaaattaagagtgatttgg

SEQ ID NO: 55429 - DNA, 80 bp, synthetic construct
  source 1..80: mol_type = other DNA
atatacaagaaaggcttgtatccagctaggtactgaacaaacttgtaaaagcgttgacagcaatgactgtcttgtaacca

SEQ ID NO: 55430 - DNA, 80 bp, synthetic construct
  source 1..80: mol_type = other DNA
tcaattaaagcatgtgactcagcaatgtgttatggttcaacaacagctaatctcatgagagggcaaaatacaatccatat

SEQ ID NO: 55431 - DNA, 80 bp, synthetic construct
  source 1..80: mol_type = other DNA
ttgctggttcacaaaatcaggagaatggatcttaggtgtcttgaatggaaattggatggtagtggctgtgttagtgatat

SEQ ID NO: 55432 - DNA, 80 bp, synthetic construct
  source 1..80: mol_type = other DNA
aagccattataaatgtattatattgctcgttctaacagtactaatgcataaatcctttaattcctgtgctttacattctg

SEQ ID NO: 55433 - DNA, 80 bp, synthetic construct
  source 1..80: mol_type = other DNA
tttagcactttatatttaaccagtatatagaaaaaaaactagctctttactaattaaattactccataccgattatgcct

SEQ ID NO: 55434 - DNA, 80 bp, synthetic construct
  source 1..80: mol_type = other DNA
cactatggctttatcccagcctagtcatacatatgacatagtgactgtgatggtacgttgctttttgattgttaaaaagg

SEQ ID NO: 55435 - DNA, 80 bp, synthetic construct
  source 1..80: mol_type = other DNA
catcaatcctagtaaggaaagaagatcctatttatttatggtctcctggcatcataactgaaggaaaccattctcagtgt

SEQ ID NO: 55436 - DNA, 80 bp, synthetic construct
  source 1..80: mol_type = other DNA
gataagaagactttgcctctaacatggactggatttattactctgccaggtgaaatagaaaagacaacacagtgtacagt

SEQ ID NO: 55437 - DNA, 80 bp, synthetic construct
  source 1..80: mol_type = other DNA
caggagcagattgtgaggcatattcagacacaggaatattcaatattagctcacccacatgtcttgtgaatagggtccag

SEQ ID NO: 55438 - DNA, 80 bp, synthetic construct
  source 1..80: mol_type = other DNA
cgctttagaggggcagaacaacaagttaaatttgtctgtcaaagagtagacttagatataacagtttattgtaatggtgt

SEQ ID NO: 55439 - DNA, 80 bp, synthetic construct
  source 1..80: mol_type = other DNA
tccattgttgtcaatgattattataagattccttttaatttttacatatctgtgttcgaagtatagcactgattcaaaat

SEQ ID NO: 55440 - DNA, 80 bp, synthetic construct
  source 1..80: mol_type = other DNA
ggcaggggatagtaattggtagtgttgaacttccacccattcctatagccaaagtggagtcgcttaagcttgaaagctca

SEQ ID NO: 55441 - DNA, 80 bp, synthetic construct
  source 1..80: mol_type = other DNA
aggcaactgaatcagcacttcaaggtcacttcaaggtttgtaagctaacaacaaggtttcaggaaaatttaaaaaagtca

SEQ ID NO: 55442 - DNA, 80 bp, synthetic construct
  source 1..80: mol_type = other DNA
ctcagcacctatgaacctaaacgtggcctttataggacactgtctatgtttaggtataaaagcaagtgttatgttggatt

SEQ ID NO: 55443 - DNA, 80 bp, synthetic construct
  source 1..80: mol_type = other DNA
gtatggtgtatcctgttaacaatggaattaatcatttgggcagcaagtgcagagactttaaatttagaaccaggatggac

SEQ ID NO: 55444 - DNA, 80 bp, synthetic construct
  source 1..80: mol_type = other DNA
tgtaattttgatctgcatactagtacatctgcacagcaagcatttacaaaatggacgtgggaaaagaaagcagacacagc

SEQ ID NO: 55445 - DNA, 80 bp, synthetic construct
  source 1..80: mol_type = other DNA
aaggtatataaggtcttatcccttaaatacacaagaaaggtctgtattcaattaggcacagaacaaacatgtaaaactat

SEQ ID NO: 55446 - DNA, 80 bp, synthetic construct
  source 1..80: mol_type = other DNA
tacctctgttaaagtttgtatgatagggaccatctcaaaatttcaaccaggggataccctattattcctgggacccctgg

SEQ ID NO: 55447 - DNA, 80 bp, synthetic construct
  source 1..80: mol_type = other DNA
caaactctcttgaatgggttgatccggacagttcccttaaagatcatgttaacttaatagtcaatagagatctttcattc

SEQ ID NO: 55448 - DNA, 80 bp, synthetic construct
  source 1..80: mol_type = other DNA
gccatgtgctatggatctagtacagcaaatttaatcaggggacagaacacagtacatgtagtgggaaagggtggacattc

SEQ ID NO: 55449 - DNA, 80 bp, synthetic construct
  source 1..80: mol_type = other DNA
tgaaaatgctaaagcagcatcaacaacctttcaatcaaacagcaaagaggtacaattaagaggcttgtgtgttataccca

SEQ ID NO: 55450 - DNA, 80 bp, synthetic construct
  source 1..80: mol_type = other DNA
aagtatttgatgatggggccccacagtgtggtgttaattgctggtttaagaaatcaggcgagtggttactggggatacta

SEQ ID NO: 55451 - DNA, 80 bp, synthetic construct
  source 1..80: mol_type = other DNA
agtgggaattggatggttgtggctgtacttgtcgcattgtttgttttttctctattactgttcagcctatgctgccctcg

SEQ ID NO: 55452 - DNA, 80 bp, synthetic construct
  source 1..80: mol_type = other DNA
gccgtcaaaattataagaaaaataaataactatataaccaacctgatctaaaacttgatgactaaataaagaactaactg

SEQ ID NO: 55453 - DNA, 80 bp, synthetic construct
  source 1..80: mol_type = other DNA
cagcttatattattttatatggcattacatatctcttaatactaataaatttgtgacttttataccaataccaaaaaaaa

SEQ ID NO: 55454 - DNA, 80 bp, synthetic construct
  source 1..80: mol_type = other DNA
cacttgttttagaaactgcttctaggactagaaagacagtgacttgttttgatctttcatgcaatcaaactgtatgtcaa

SEQ ID NO: 55455 - DNA, 80 bp, synthetic construct
  source 1..80: mol_type = other DNA
gacttggtgaccaacgaattcaagtcgtttatgaaaagacatactgtgtgtctggacagctcattgaaggtaattgcttt

SEQ ID NO: 55456 - DNA, 80 bp, synthetic construct
  source 1..80: mol_type = other DNA
ctacccatacatatgacataatgactctagctgtacattgtttcttcatatcaaaaaaaggaggcacagatgacacactg

SEQ ID NO: 55457 - DNA, 80 bp, synthetic construct
  source 1..80: mol_type = other DNA
aagattgaaaaacagtttgagacccttgttgaaaagactggttgtactgaaaatgcactgaaagggtactacgcctgtat

SEQ ID NO: 55458 - DNA, 80 bp, synthetic construct
  source 1..80: mol_type = other DNA
agctcagaagttgtttatgtacctgctatggatgactatagatcctctgaaatattatcaaggatgactactgcacccca

SEQ ID NO: 55459 - DNA, 80 bp, synthetic construct
  source 1..80: mol_type = other DNA
tggtgaggaccacgatgttgatccgaatgcaattagctcgttgaggattgttggtcagctcacaggaaaagcaccatcta

SEQ ID NO: 55460 - DNA, 80 bp, synthetic construct
  source 1..80: mol_type = other DNA
acgatctgttgggaaggtatataaggtcttatcccttaaatacacaagaaaggtctgtatccaattaggcacagaacaaa

SEQ ID NO: 55461 - DNA, 80 bp, synthetic construct
  source 1..80: mol_type = other DNA
catgtaaaactattgactccaatgactgtcttgtaactacttctgttaaagtttgtatgatagggaccatctcaaaattt

SEQ ID NO: 55462 - DNA, 80 bp, synthetic construct
  source 1..80: mol_type = other DNA
caaccaggggataccctattattcctgggacctctggaagagggcgggatgatatttaaacagtggtgtacaacaacctg

SEQ ID NO: 55463 - DNA, 80 bp, synthetic construct
  source 1..80: mol_type = other DNA
tctgacatcaattaaagcatgtgatgctgccatgtgctatggatctagtacagcaaatttaatcaggggacagaacacag

SEQ ID NO: 55464 - DNA, 80 bp, synthetic construct
  source 1..80: mol_type = other DNA
gaaaaaagtaatactaacaaagacattagttataggacaatgtatctacacttttactagtatattttccttgatgccgg

SEQ ID NO: 55465 - DNA, 80 bp, synthetic construct
  source 1..80: mol_type = other DNA
tgactccaatgactgtcttgtaactacttctgttaaagtttgtatgatagggaccatctcaaaatttcaaccaggggata

SEQ ID NO: 55466 - DNA, 80 bp, synthetic construct
  source 1..80: mol_type = other DNA
ccctattattcctgggacctctggaggagggcgggatgatatttaaacagtggtgtacaacaacctgtcagtttggagac

SEQ ID NO: 55467 - DNA, 80 bp, synthetic construct
  source 1..80: mol_type = other DNA
caaagaattcaagtgaattacgaaaagacatactgtgtttcagggcaattggttgaaggtgtatgttttaatcccataca

SEQ ID NO: 55468 - DNA, 80 bp, synthetic construct
  source 1..80: mol_type = other DNA
tacaatggctctttctcaacccagccatacttatgatatagttactatgatggttcgttgttttctagttataaaaaagg

SEQ ID NO: 55469 - DNA, 80 bp, synthetic construct
  source 1..80: mol_type = other DNA
gtaacggtttgaagaaagtgattcttaccaaaactttagtcattggacagtgtatttatacttttacaagcattttctct

SEQ ID NO: 55470 - DNA, 80 bp, synthetic construct
  source 1..80: mol_type = other DNA
ttaatccctggagttgctcactcactagctgtagaattatgtgtgccaggtctccatggttgggccacgatgctactttt

SEQ ID NO: 55471 - DNA, 80 bp, synthetic construct
  source 1..80: mol_type = other DNA
attaacattttgctttgggtggatcttaataccatttttttctatgatattattaaaaattctaattgcatttgcttact

SEQ ID NO: 55472 - DNA, 80 bp, synthetic construct
  source 1..80: mol_type = other DNA
ggtcagggcctagttattggatcagttgaattaccacctgttccattaacacaggtggagtctttaaaactggaaagttc

SEQ ID NO: 55473 - DNA, 80 bp, synthetic construct
  source 1..80: mol_type = other DNA
gtttaaaatactaatagagaaggttaaaagagaatatcaaaaaactatgggctccatggtatgtgaggtttgtcaatatg

SEQ ID NO: 55474 - DNA, 80 bp, synthetic construct
  source 1..80: mol_type = other DNA
atcctgctgaagcaacaacatctgctttacaggcccattttaaggtgtgtaaactcacatcaaggtttcaggacaatcta

SEQ ID NO: 55475 - DNA, 80 bp, synthetic construct
  source 1..80: mol_type = other DNA
aggaagtcattaggggcatatgaacccaaacagggttgttacaggacattgtctctttttcgctatagaagcaggttttt

SEQ ID NO: 55476 - DNA, 80 bp, synthetic construct
  source 1..80: mol_type = other DNA
tgtgggttttaattggtgtttgttgttagttttggaattaattgtgtgggctgctagtgctgaaactcaaagtttaaatt

SEQ ID NO: 55477 - DNA, 80 bp, synthetic construct
  source 1..80: mol_type = other DNA
ctggatggacagatacagcacatggatctggaataatacctatgagaactgaccttgaactagatttttctcttccatct

SEQ ID NO: 55478 - DNA, 80 bp, synthetic construct
  source 1..80: mol_type = other DNA
atgtaattttgatctacataccagtacatcatcacaacagtcattcacaaaatggacatgggagataaaaaatgacctgg

SEQ ID NO: 55479 - DNA, 80 bp, synthetic construct
  source 1..80: mol_type = other DNA
aatccgtgggtaaagcattcaaaattgtgtctttgaggtacacaaggaaagcatgtatccaacttggcactgaacaaact

SEQ ID NO: 55480 - DNA, 80 bp, synthetic construct
  source 1..80: mol_type = other DNA
catgtgactcagcaatgtgttatggttctacaacagccaatcttctaagagggcagaatacagttcatattgtgggaaaa

SEQ ID NO: 55481 - DNA, 80 bp, synthetic construct
  source 1..80: mol_type = other DNA
catcttcctctttacattgtgttgtccacgaaggcctagttatgcaaaagaacataaaccttaaacaaaagcagttataa

SEQ ID NO: 55482 - DNA, 80 bp, synthetic construct
  source 1..80: mol_type = other DNA
atgtatcacattacttatgctgataatgctagtgtataaatcccctcacttctttgcttcatatcttatttagtatatta

SEQ ID NO: 55483 - DNA, 80 bp, synthetic construct
  source 1..80: mol_type = other DNA
cactcgatcattatatagaaaaaaaactagctctttactaattaaattattccataccgattatgcctggacttttgttc

SEQ ID NO: 55484 - DNA, 80 bp, synthetic construct
  source 1..80: mol_type = other DNA
atactatggcattatctcaacccagccatacatatgatatagtgacagtgatggtgcgttgttttttaattgtaaagaag

SEQ ID NO: 55485 - DNA, 80 bp, synthetic construct
  source 1..80: mol_type = other DNA
gtttcaacaggtgatagtatgaagcttgaaaaaagctttgagactcttgttcagaaaactggttgtacaggcaatggttt

SEQ ID NO: 55486 - DNA, 80 bp, synthetic construct
  source 1..80: mol_type = other DNA
tcaaggttattatgtctgtttggtaggaagcagttctgagccactatatattcctacattggatgattacaggtcagctg

SEQ ID NO: 55487 - DNA, 80 bp, synthetic construct
  source 1..80: mol_type = other DNA
tgtgtctgctactatggaatagaggagatgccagaaacctaaatgaacttaaaatggagtgtccacacacaattggtttg

SEQ ID NO: 55488 - DNA, 80 bp, synthetic construct
  source 1..80: mol_type = other DNA
agatcctctcaagaatggcatttgcaccacatggggaagatcatgatgttgaaaagaatgctattagtgcaatgagaatt

SEQ ID NO: 55489 - DNA, 80 bp, synthetic construct
  source 1..80: mol_type = other DNA
gttgggaaagtgacaggcaaagcaccatcaactgagtcatctgatacaatacagggcattgccttttcaggtaaccctct

SEQ ID NO: 55490 - DNA, 80 bp, synthetic construct
  source 1..80: mol_type = other DNA
ccttaccccttacatggactgggtttatctcactacctggcgaaattgaaaagacaacacaatgtacagttttctgcacc

SEQ ID NO: 55491 - DNA, 80 bp, synthetic construct
  source 1..80: mol_type = other DNA
ccgcaatgtgctatggatctactacagctaacctaattaggggacaaaataccattcacattgttgggaaggttgggcat

SEQ ID NO: 55492 - DNA, 80 bp, synthetic construct
  source 1..80: mol_type = other DNA
tttgaatatcatattaaaattactaacagacttaatatataatcaccaatgcactttcatctcttatcgtgtatattatt

SEQ ID NO: 55493 - DNA, 80 bp, synthetic construct
  source 1..80: mol_type = other DNA
ctatatttaaccactgtatagaaaaaaaactagcactttactaattaaattaccctatatcgattatgcctggacttttg

SEQ ID NO: 55494 - DNA, 80 bp, synthetic construct
  source 1..80: mol_type = other DNA
ccttacctctcacatggactggttttatttcattacctggagaaattgagaagacaacacaatgcacagttttctgcacc

SEQ ID NO: 55495 - DNA, 80 bp, synthetic construct
  source 1..80: mol_type = other DNA
gcaatggagttaagaaagttattctcaccaaaaccttagttataggacagtgtatctacacatttactagtatattctct

SEQ ID NO: 55496 - DNA, 80 bp, synthetic construct
  source 1..80: mol_type = other DNA
agaaagtcattaactgtatatgagcctatgcagggttgttatcgtaccttatccctcttcaggtatcggagtcggttttt

SEQ ID NO: 55497 - DNA, 80 bp, synthetic construct
  source 1..80: mol_type = other DNA
tgacatctggtgatagcatgaagatcgaaaagaattttgagactcttgttcaaaaaaacgattgtacagctaatagtttc

SEQ ID NO: 55498 - DNA, 80 bp, synthetic construct
  source 1..80: mol_type = other DNA
caaggttattacatctgtttcataggaagtagctcagagccattatatgtcccaacactggatgactaccgttctgctga

SEQ ID NO: 55499 - DNA, 80 bp, synthetic construct
  source 1..80: mol_type = other DNA
gctggatccttattccatttattgctatgatatcactgaaaatattaattgcatttgcatatttgtgttcaaaatacaac

SEQ ID NO: 55500 - DNA, 80 bp, synthetic construct
  source 1..80: mol_type = other DNA
caaggccttgtcattggttcagtggagttaccacctgttccagtacaacaagtagagtctttgaagttggagagttcctg

SEQ ID NO: 55501 - DNA, 80 bp, synthetic construct
  source 1..80: mol_type = other DNA
ccatattcttgtttaccttatgctgcccccgaagacccatctatgctaaagagcataagccttaactgttacttgccaat

SEQ ID NO: 55502 - DNA, 80 bp, synthetic construct
  source 1..80: mol_type = other DNA
ctttatactataatgcacttatcaataaactctcatatagttcattctgctttctttactgtataccctgtatagtatat

SEQ ID NO: 55503 - DNA, 80 bp, synthetic construct
  source 1..80: mol_type = other DNA
caaaggattcaagtcaattatgaaaaaacatactgtgtctcaggtcagctggttgaaggggtatgttttaatcctgtaca

SEQ ID NO: 55504 - DNA, 80 bp, synthetic construct
  source 1..80: mol_type = other DNA
cacaatggttctttcccaacctagccatacttatgatatagtgaccatgatggtacggtgttttctggtcgtaaagaaag

SEQ ID NO: 55505 - DNA, 80 bp, synthetic construct
  source 1..80: mol_type = other DNA
taacctcaggtgatagcatgaaaattgaaaagaaccttgagactttggtccagaaaactgattgcaatgcaaatggcttt

SEQ ID NO: 55506 - DNA, 80 bp, synthetic construct
  source 1..80: mol_type = other DNA
cagggctattatatttgtcttgtgggaagcagctcagaaccattatatgttcctacattagatgattatcggtctgctga

SEQ ID NO: 55507 - DNA, 80 bp, synthetic construct
  source 1..80: mol_type = other DNA
agttttatcaagaatggcttttgcaccacatggagaagatcatgatattgagcgaaatgctgtgagtgctttaagaattg

SEQ ID NO: 55508 - DNA, 80 bp, synthetic construct
  source 1..80: mol_type = other DNA
tttatgctatattcgatttactagtgcagtcaccatatgactacctatatgccattatttcatatcatgtatattatctt

SEQ ID NO: 55509 - DNA, 80 bp, synthetic construct
  source 1..80: mol_type = other DNA
tatatgctatattttatttactactataatcaccatatgactatctatgtcctattatcttatatcatgtgtttcatttg

SEQ ID NO: 55510 - DNA, 80 bp, synthetic construct
  source 1..80: mol_type = other DNA
ggagattgaaaaaacaacacagtgtacagttttttgtactttagcaggaccaggtgcagattgtgaggcatattctgaga

SEQ ID NO: 55511 - DNA, 80 bp, synthetic construct
  source 1..80: mol_type = other DNA
gcaatggagtaaaaaaagtcatccttactaaaaccctagttattggacagtgcatttatacttttacaagtatcttttcc

SEQ ID NO: 55512 - DNA, 80 bp, synthetic construct
  source 1..80: mol_type = other DNA
tagatgctatattctatttaccagtataatcaccatatgactatctatgttctattgttttatgtcatgtatttcatttg

SEQ ID NO: 55513 - DNA, 80 bp, synthetic construct
  source 1..80: mol_type = other DNA
ccttaccccttacatggactggttttatttcattgcctggagagattgaaaaaacaacacaatgtacagtattttgtaca

SEQ ID NO: 55514 - DNA, 80 bp, synthetic construct
  source 1..80: mol_type = other DNA
gtaatgggatgaagaaagtcattctcaccaagaccctagttattggacaatgcatttatacttttactagtattttctct

SEQ ID NO: 55515 - DNA, 80 bp, synthetic construct
  source 1..80: mol_type = other DNA
cagggtcttgttgtgggttcagtagaattgccatctcttccaatacagcaggtcgagacactaaagctggagagttcttg

SEQ ID NO: 55516 - DNA, 80 bp, synthetic construct
  source 1..80: mol_type = other DNA
taagaaagtcattaacggtatatgagcctatgcaagggtgctaccggactttatccctctttagatataggagtcggttc

SEQ ID NO: 55517 - DNA, 80 bp, synthetic construct
  source 1..80: mol_type = other DNA
tttgtgggtctagtctggtgcgtgttattggttctagagttaattgtatgggctgccagtgctgaaacacaaaatttaaa

SEQ ID NO: 55518 - DNA, 80 bp, synthetic construct
  source 1..80: mol_type = other DNA
tcagcaagctatacatataggagacagctacaaaacccagcaaacgaacaagagaaaatcccatttcatctgcagttaag

SEQ ID NO: 55519 - DNA, 80 bp, synthetic construct
  source 1..80: mol_type = other DNA
caaacaagtgattcatgcagagatccagcatttaggtcattggatggatgctacatttaatcttaaaactgcatttcact

SEQ ID NO: 55520 - DNA, 80 bp, synthetic construct
  source 1..80: mol_type = other DNA
taattttgatctacataccagtacagcaggacaacaatcattcacaaaatggacatgggaaattaaaggtgatcttgcag

SEQ ID NO: 55521 - DNA, 80 bp, synthetic construct
  source 1..80: mol_type = other DNA
ctttgctatttctaggtccactacagcagggtggtctgatatttaaacaatggtgcactacaacatgccagtttggcgat

SEQ ID NO: 55522 - DNA, 80 bp, synthetic construct
  source 1..80: mol_type = other DNA
cccggggacataatgagcacacctacaggcatgaagtgcccagaattaaatggttcttttagaaagaaatgtgcatttgc

SEQ ID NO: 55523 - DNA, 80 bp, synthetic construct
  source 1..80: mol_type = other DNA
ccatactcttattcacattatgttgtcctcgtagacctagttacaggaaagaacataagccctaagttttgcttactaac

SEQ ID NO: 55524 - DNA, 80 bp, synthetic construct
  source 1..80: mol_type = other DNA
ataattattgtattctgtttattgacacaattaccatatgattaactgtattcccccatcttatatcttatataatattc

SEQ ID NO: 55525 - DNA, 80 bp, synthetic construct
  source 1..80: mol_type = other DNA
tgacttctggtgacagtatgaagattgaaaagaactttgagactcttgttcaaaaaaatggctgcacagctaataacttc

SEQ ID NO: 55526 - DNA, 80 bp, synthetic construct
  source 1..80: mol_type = other DNA
caagggtattatatctgtcttatagggagtagttcagagcccctatatgttccagcattagatgattatcgttcagctga

SEQ ID NO: 55527 - DNA, 80 bp, synthetic construct
  source 1..80: mol_type = other DNA
gtctattactatgtaatacaggggctgccagaaaccttaatgagcttaaaatggaatgtccacatactattagattaggg

SEQ ID NO: 55528 - DNA, 80 bp, synthetic construct
  source 1..80: mol_type = other DNA
ctggggttttaacagcaaaggatgatcctgtgtacatctgggcccctggcattatcatggaagggaaccattctgtctgt

SEQ ID NO: 55529 - DNA, 80 bp, synthetic construct
  source 1..80: mol_type = other DNA
ggaaattgagaaaacaacacaatgcacagtcttctgcaccctggctggaccaggtgcagactgtgaagcttattctgaaa

SEQ ID NO: 55530 - DNA, 80 bp, synthetic construct
  source 1..80: mol_type = other DNA
gtataacacagattcaaaattcaggattttgattgaaaaagtaaaaagagaatatcagaaaacaatgggctcgatggtct

SEQ ID NO: 55531 - DNA, 80 bp, synthetic construct
  source 1..80: mol_type = other DNA
ggctggggctgtaacccacttgattgcccaggagtagggacaggctgtactgcctgtggggcctatcttgataaattaaa

SEQ ID NO: 55532 - DNA, 80 bp, synthetic construct
  source 1..80: mol_type = other DNA
atcagttgggaaagtctttaaaattgtgtccttaaggtataccaggaaagtgtgcattcaattaggaactgaacaaacct

SEQ ID NO: 55533 - DNA, 80 bp, synthetic construct
  source 1..80: mol_type = other DNA
ctttcaatgtcacagaaccccatatatctgcaagcgcattggaatggattgatcctgacagttcacttagggatcatata

SEQ ID NO: 55534 - DNA, 80 bp, synthetic construct
  source 1..80: mol_type = other DNA
aatgtaattgtaagccgtgatttatcttttcaagatttaagtgaaacaccatgccaaatagacctttcaacagcatccat

SEQ ID NO: 55535 - DNA, 80 bp, synthetic construct
  source 1..80: mol_type = other DNA
agatggagcatggggttcaggggttggttttaacctagtctgtactgttagcttaacagaatgttctgcatttcttactt

SEQ ID NO: 55536 - DNA, 80 bp, synthetic construct
  source 1..80: mol_type = other DNA
aaaatacacaggcatcatccacaagttttcaaacaaaaagtagtgaagtaaatttgaggggactatgtctaattccaact

SEQ ID NO: 55537 - DNA, 80 bp, synthetic construct
  source 1..80: mol_type = other DNA
atttagaccgtgtgacaggatacaaccaagcagatagtgataaaatctttgatgatggtgcaccagagtgtggtatgtct

SEQ ID NO: 55538 - DNA, 80 bp, synthetic construct
  source 1..80: mol_type = other DNA
aagtcaggggaatggattcttggggtccttaatggaaattggatggtggtggctgtactgatagcattattagttttgtc

SEQ ID NO: 55539 - DNA, 80 bp, synthetic construct
  source 1..80: mol_type = other DNA
cattctcttgttcacattatgctgcccacgcagacctagttacagaaaagagcataagccttagtagatagttgctcatg

SEQ ID NO: 55540 - DNA, 80 bp, synthetic construct
  source 1..80: mol_type = other DNA
taaatatcatattaagtttactaacagacttagtccataaccactcatattcttttatcttttatcatatatattattct

SEQ ID NO: 55541 - DNA, 80 bp, synthetic construct
  source 1..80: mol_type = other DNA
atgtttaatcactatataaaaaaaaaactagcactttactaattaaattaccccataccgattatgcctggacttttgtt

SEQ ID NO: 55542 - DNA, 80 bp, synthetic construct
  source 1..80: mol_type = other DNA
ctagttattgagacagcagcaagaatgcggaaaacaatagcatgttatgatctatcgtgtaatcaaacagtatgtcagcc

SEQ ID NO: 55543 - DNA, 80 bp, synthetic construct
  source 1..80: mol_type = other DNA
ctgggaaagtaacagggaaagcaccatccacagagtcttctgacacagtacagggtattgcattctcgggtagtcctctt

SEQ ID NO: 55544 - DNA, 80 bp, synthetic construct
  source 1..80: mol_type = other DNA
ggattattcctgaatcaaatcagagtgtgtgtgataaaaagacaatacccattacttggaccggttatctgccaattgca

SEQ ID NO: 55545 - DNA, 80 bp, synthetic construct
  source 1..80: mol_type = other DNA
ggtgagatggaaaaggttactggctgtacggtattctgcacattggcaggcccaggagcaagttgtgaggcatactccga

SEQ ID NO: 55546 - DNA, 80 bp, synthetic construct
  source 1..80: mol_type = other DNA
gttgaactttgtgttcctggtctacatggttggtccacaattgccttgctatcaacattttgttttggatggttgctcat

SEQ ID NO: 55547 - DNA, 80 bp, synthetic construct
  source 1..80: mol_type = other DNA
accagcagtaacattagttgtcttaaagtcattaaaaatattgacattttcatgctcccattatactaatgaatcaaaat

SEQ ID NO: 55548 - DNA, 80 bp, synthetic construct
  source 1..80: mol_type = other DNA
gccaaggatatattattggttctactgagttggggttgacgcctattgagtctgttgcagatataaagctggaaagttct

SEQ ID NO: 55549 - DNA, 80 bp, synthetic construct
  source 1..80: mol_type = other DNA
agtgccttacaaggtcactttgccatctgtaaattgacaggcaggtttcaggaagcactgaagaaatctttaaagaaacc

SEQ ID NO: 55550 - DNA, 80 bp, synthetic construct
  source 1..80: mol_type = other DNA
agagattaaaaggggttgctatcgcaccatcggcgtttttagatataaaagtagatgttatgtggggttagtatggtgtt

SEQ ID NO: 55551 - DNA, 80 bp, synthetic construct
  source 1..80: mol_type = other DNA
agagaccccattgctagaatcaggttggtcagatacagcccatggtgttggagaggttcccatgaaaacagatttggaac

SEQ ID NO: 55552 - DNA, 80 bp, synthetic construct
  source 1..80: mol_type = other DNA
tgcaattttgacttacatgtaacatctacacttcagaagagctatacacaggtagaatggagaaagaaaagtgaaacaac

SEQ ID NO: 55553 - DNA, 80 bp, synthetic construct
  source 1..80: mol_type = other DNA
tgtgttacgggtcgactgttgcaaaccttgcaaggggttctaacacagtcaaagtagtaggtaaaggaggccattcaggt

SEQ ID NO: 55554 - DNA, 80 bp, synthetic construct
  source 1..80: mol_type = other DNA
atggaaactggattgttgtggctgtccttgttgtaattcttattatctccataatcttgtttagccttctatgccctagg

SEQ ID NO: 55555 - DNA, 80 bp, synthetic construct
  source 1..80: mol_type = other DNA
agaggacacaagaaaactgtttaacagccaatgggcttagagagtgtgttatcattcataaccatattatcttatatcgt

SEQ ID NO: 55556 - DNA, 80 bp, synthetic construct
  source 1..80: mol_type = other DNA
atattatatgtatttctatatgcttattataaccttatactaatattcattatttacatatattaatgcttaacccttag

SEQ ID NO: 55557 - DNA, 80 bp, synthetic construct
  source 1..80: mol_type = other DNA
atttgagaggaacttgtgtcttagcccatgagctttatgacacactcaagcgaattaagaagacagtgctttgttatgat

SEQ ID NO: 55558 - DNA, 80 bp, synthetic construct
  source 1..80: mol_type = other DNA
tatgaaactgtcacaattcctgtcacttgtttcttcacaccaaaaaaatctgaccaacttaagataattagtacatttga

SEQ ID NO: 55559 - DNA, 80 bp, synthetic construct
  source 1..80: mol_type = other DNA
ggtctgctctacattgacaacggcattgcctaaaacaatttatgaacttaaaatggaatgtccacatacagtgggtttag

SEQ ID NO: 55560 - DNA, 80 bp, synthetic construct
  source 1..80: mol_type = other DNA
ggttgtaagtcgtatgatagtacaccctagaggtgaggatcatgatcctatccagaacgcccagggtttcttaaggattg

SEQ ID NO: 55561 - DNA, 80 bp, synthetic construct
  source 1..80: mol_type = other DNA
taggaccaataacagcaaaagtgcctagtaccagttcaacagatactatgaaaggcactgcatttgcaggtgtacctatg

SEQ ID NO: 55562 - DNA, 80 bp, synthetic construct
  source 1..80: mol_type = other DNA
ccagaatatgtgttttcaccagggattatccctgagtcaaatcagagctcatgtgataagaaaacaatccctctgacatg

SEQ ID NO: 55563 - DNA, 80 bp, synthetic construct
  source 1..80: mol_type = other DNA
ttctttagcagtagagctgtgtgtccctggtctgcatggttgggctactgtagcattgttgtcaacattctgttttggct

SEQ ID NO: 55564 - DNA, 80 bp, synthetic construct
  source 1..80: mol_type = other DNA
taggtttaggacaaggctatatcatgggttcagttgagttagggttattggacataggaaaggttccagacataaaggtt

SEQ ID NO: 55565 - DNA, 80 bp, synthetic construct
  source 1..80: mol_type = other DNA
ttcctgcaataacactggtggtgctaaaggtgttgaagttgttgacatactcttgttctcattataccaatgagtctaaa

SEQ ID NO: 55566 - DNA, 80 bp, synthetic construct
  source 1..80: mol_type = other DNA
gtagatgttatgttggacttgtatggggctttctactaacagttgagctaattttctgggcagcaagtgctgagacacca

SEQ ID NO: 55567 - DNA, 80 bp, synthetic construct
  source 1..80: mol_type = other DNA
ggggttcaggggttggttttacactgacatgtgttgtcagcttgacagagtgccctagcttcataacatcgatcaaggca

SEQ ID NO: 55568 - DNA, 80 bp, synthetic construct
  source 1..80: mol_type = other DNA
gcttcataacatcgatcaaggcatgtgatcttgccatgtgttatggttcaacggtggcaacactggcccgtgggtctaac

SEQ ID NO: 55569 - DNA, 80 bp, synthetic construct
  source 1..80: mol_type = other DNA
atggttcaacggtggcaacactggcccgtgggtctaacacagttaaaatcgtagggaaagggaggcattctgggtctgca

SEQ ID NO: 55570 - DNA, 80 bp, synthetic construct
  source 1..80: mol_type = other DNA
tggtagtgttggttattgtcctcttaatttctatcatcttgttcagtttcttatgtcctaggagaagtcacaagaaaact

SEQ ID NO: 55571 - DNA, 80 bp, synthetic construct
  source 1..80: mol_type = other DNA
gtataagtatattaacagaatacattaaataccaattatgacacattttagtattttttataactattattaaccttata

SEQ ID NO: 55572 - DNA, 80 bp, synthetic construct
  source 1..80: mol_type = other DNA
tatatattatgttcatactcattaatgttagacttacttaaatatctatgctactaataataatctgcttaaaaaaaaca

SEQ ID NO: 55573 - DNA, 80 bp, synthetic construct
  source 1..80: mol_type = other DNA
tgcttaaaaaaaacaagatctttactatcataaaattccatatcattttatcgaggcttttgttcctgcggagcatacta

SEQ ID NO: 55574 - DNA, 80 bp, synthetic construct
  source 1..80: mol_type = other DNA
cggtcatcacatgtatgacaataagaagctgtatggcgaatttattaagcagtagaattcagattacatatgaaaaaaca

SEQ ID NO: 55575 - DNA, 80 bp, synthetic construct
  source 1..80: mol_type = other DNA
tatgaggttgtcacacttccggtgacctgtttcttcactgcaaagaaggcagatcagtataaaatcgtaaagaccctcga

SEQ ID NO: 55576 - DNA, 80 bp, synthetic construct
  source 1..80: mol_type = other DNA
ggggattattagtaagacaggatgtactgataatgccattcaagggttttatgtgtgttttttaggaagtcactcggagc

SEQ ID NO: 55577 - DNA, 80 bp, synthetic construct
  source 1..80: mol_type = other DNA
ctctcattgtgcctaatttagaagatataagatcagctgaggttgtcagccgaatgattgtacatccacgaggtgaagac

SEQ ID NO: 55578 - DNA, 80 bp, synthetic construct
  source 1..80: mol_type = other DNA
caactgatacaatccagggtgttgctttttcaggtgtgcccatgtacagctctctatcaacattggtcaggaacattgat

SEQ ID NO: 55579 - DNA, 80 bp, synthetic construct
  source 1..80: mol_type = other DNA
tattctaatgaatcaaagttcaagatcatactagaaaaggtgaaaattgaataccagaagaccatgggttcaatggtgtg

SEQ ID NO: 55580 - DNA, 80 bp, synthetic construct
  source 1..80: mol_type = other DNA
cttgggccccttgagcagggcggtattattctgaagcagtggtgtacaacctcttgtgcctttggtgatcctggcgatat

SEQ ID NO: 55581 - DNA, 80 bp, synthetic construct
  source 1..80: mol_type = other DNA
ggggttctggtgtagggtttacattaacttgcaatgttggattaacagaatgcccaagctttcttacatctattaaagct

SEQ ID NO: 55582 - DNA, 80 bp, synthetic construct
  source 1..80: mol_type = other DNA
ttagttttctttgtcctcgtagggttcataagaaaagtgtgtaagtaaatatgggatttggctacacttgtaatacctta

SEQ ID NO: 55583 - DNA, 80 bp, synthetic construct
  source 1..80: mol_type = other DNA
ttgaggggcaatgcttcaatcccacccacaccatgactctaactcaacctgcacatacttatgacactgttacccttcct

SEQ ID NO: 55584 - DNA, 80 bp, synthetic construct
  source 1..80: mol_type = other DNA
aaatagttaatacttttgaggggatccttcaaaaaaatgactgcactacaaacaacttccaaggattctatgtttgcttt

SEQ ID NO: 55585 - DNA, 80 bp, synthetic construct
  source 1..80: mol_type = other DNA
gaagatcctatttacctatggtcaccaggtataattccagaaggcaatcattctcaatgtgacaagaaaaccctcccttt

SEQ ID NO: 55586 - DNA, 80 bp, synthetic construct
  source 1..80: mol_type = other DNA
aacatggacaggatttattacattaccaggagaaattgaaaagacaacacagtgtacagtattttgtaccttgtcaggtc

SEQ ID NO: 55587 - DNA, 80 bp, synthetic construct
  source 1..80: mol_type = other DNA
ttggctggcttgtcattcctcttctttcaatgatcataatacggtttttattaatatttacatacctgtgctccaaatac

SEQ ID NO: 55588 - DNA, 80 bp, synthetic construct
  source 1..80: mol_type = other DNA
agtactgactcaaaatttaaactcataatagaaaaggtcaagcaggaatatcaaaagacaatgggctccatggtctgtga

SEQ ID NO: 55589 - DNA, 80 bp, synthetic construct
  source 1..80: mol_type = other DNA
caaggaattgtgattggaagtgttgaattgccacccgtgccactggcaaaagtggaatctttaaagcttgaaagctcttg

SEQ ID NO: 55590 - DNA, 80 bp, synthetic construct
  source 1..80: mol_type = other DNA
caggatggggttgtaatccacctgattgtcctggagtgggaactggctgtacagcatgtggagtttacctagataaattg

SEQ ID NO: 55591 - DNA, 80 bp, synthetic construct
  source 1..80: mol_type = other DNA
caactttgacctacacacaagcacagctgcacagcaggcatttacaaagtggtcatgggagaaaaaggcagacacagctg

SEQ ID NO: 55592 - DNA, 80 bp, synthetic construct
  source 1..80: mol_type = other DNA
agatctgtcggtaaggtgtataaaatattgtcactcaagtatacaaggaaagtttgtatccaacttggaactgaacaaac

SEQ ID NO: 55593 - DNA, 80 bp, synthetic construct
  source 1..80: mol_type = other DNA
ttgtaaaacaattgactcaaatgattgtcttgtcaccacatctgttaaggtttgtatgattggtactatttcaaaatttc

SEQ ID NO: 55594 - DNA, 80 bp, synthetic construct
  source 1..80: mol_type = other DNA
aacttaattgttaatagggatctttccttccaagatctagcagagaacccttgtcaggtagatctaagtgtctcatcaat

SEQ ID NO: 55595 - DNA, 80 bp, synthetic construct
  source 1..80: mol_type = other DNA
aggtgtttgatgacggtgccccacaatgcggtgtccattgttggttcaaaaaatccggagaatggttacttggtatacta

SEQ ID NO: 55596 - DNA, 80 bp, synthetic construct
  source 1..80: mol_type = other DNA
agtgggaactggatggttgttgctgtgcttatagcactgtttatattttctttactcttattcagcctatgctgcccacg

SEQ ID NO: 55597 - DNA, 80 bp, synthetic construct
  source 1..80: mol_type = other DNA
gccgccaaaattataagaaaaacaaataatcttacatcagtactatcttacgatatcacagttttatttagttgacaact

SEQ ID NO: 55598 - DNA, 80 bp, synthetic construct
  source 1..80: mol_type = other DNA
aactgatggtatactctaataactatttataaccataacaatacttgctcataaatatataaattttatactaactccaa

SEQ ID NO: 55599 - DNA, 80 bp, synthetic construct
  source 1..80: mol_type = other DNA
cactggttctagagacagcatcccgaacaaggaagactgtaacttgttttgacctttcatgtaatcagactgtatgtcaa

SEQ ID NO: 55600 - DNA, 80 bp, synthetic construct
  source 1..80: mol_type = other DNA
tttaggtgatcagagaatccaagtcgtgtatgagaaaacatactgtgtgtcaggtcagttaattgaaggtaattgcttta

SEQ ID NO: 55601 - DNA, 80 bp, synthetic construct
  source 1..80: mol_type = other DNA
cacttaagattgaaaaacaattcgaaacactagttgaaaagacaggctgtacagaaaatgcattaaaaggttactatgct

SEQ ID NO: 55602 - DNA, 80 bp, synthetic construct
  source 1..80: mol_type = other DNA
tgtatccttggtactagctcagaggtagtttatgttcctgcaatggatgactataggtcctctgagatcttatccagaat

SEQ ID NO: 55603 - DNA, 80 bp, synthetic construct
  source 1..80: mol_type = other DNA
gtctactactatgctggccatcatgtgcaaggaacctgctagagttaaaagtagaatgtccccatacaattggattaggg

SEQ ID NO: 55604 - DNA, 80 bp, synthetic construct
  source 1..80: mol_type = other DNA
gacaactgcaccacatggagaagatcatgatgtagacccaaatgcaatcagttcattaagaattgttgggcagctcactg

SEQ ID NO: 55605 - DNA, 80 bp, synthetic construct
  source 1..80: mol_type = other DNA
gagcggcacaaactagtgtttgagatggagggcaatggctcccagctgggttcccgccaacatcaagaaagccaggcagc

SEQ ID NO: 55606 - DNA, 80 bp, synthetic construct
  source 1..80: mol_type = other DNA
ggttgatccgcctggtgcgactggcccaaccacatcccatgttgttgtttctaatccagaacaacccaatgggcccgcac

SEQ ID NO: 55607 - DNA, 80 bp, synthetic construct
  source 1..80: mol_type = other DNA
gctgcaagtgcatcagagacaccgttggttcctgtgtggaatgacaatgctcatggagttggttctgtgcctatgcacac

SEQ ID NO: 55608 - DNA, 80 bp, synthetic construct
  source 1..80: mol_type = other DNA
agtatgaatatccgtggcatactgcaaaatgccactatgaacgagattatcagtacgagacgagctggggttgtaatcca

SEQ ID NO: 55609 - DNA, 80 bp, synthetic construct
  source 1..80: mol_type = other DNA
gaagaccccatttacttgtggtcaccaggtataattccagaggggaaccattcccaatgtgataagaaaacccttccttt

SEQ ID NO: 55610 - DNA, 80 bp, synthetic construct
  source 1..80: mol_type = other DNA
aacatggacaggatttatcacactaccaggagagattgagaaaacaacacaatgtacagtattttgtacactgtcaggtc

SEQ ID NO: 55611 - DNA, 80 bp, synthetic construct
  source 1..80: mol_type = other DNA
ctggagctgattgtgaagcttattcagacacaggtatatttaatattagttcacctacatgtcttgttaatagggtgcaa

SEQ ID NO: 55612 - DNA, 80 bp, synthetic construct
  source 1..80: mol_type = other DNA
tggttggttattcccctcctctctatgatcataatacgatttttactgatattcacatacttatgctctaaatatagcac

SEQ ID NO: 55613 - DNA, 80 bp, synthetic construct
  source 1..80: mol_type = other DNA
caaggaattgtgattggaagcactgaattaccacctgtaccattggcaaaagtggagtcattaaaactagaaagctcctg

SEQ ID NO: 55614 - DNA, 80 bp, synthetic construct
  source 1..80: mol_type = other DNA
agactcaaaatttaaactcataatagagaaagtcaaacaagaatatcagaaaacaatgggctctatggtttgtgaggtct

SEQ ID NO: 55615 - DNA, 80 bp, synthetic construct
  source 1..80: mol_type = other DNA
taagcacctatgagcctaaacgtggtctttacagaacattgtctatgtttagatataaaagtaaatgttatgttggactg

SEQ ID NO: 55616 - DNA, 80 bp, synthetic construct
  source 1..80: mol_type = other DNA
gactgtcttgtcacaacatctgttaaagtctgtatgattggtaccatctcaaaattccaacctggagataccttattatt

SEQ ID NO: 55617 - DNA, 80 bp, synthetic construct
  source 1..80: mol_type = other DNA
ctccactaggaatgaagtgtcctgaacatgctggttcctttcggaagaaatgctcatttgcaacactcccttcatgtcaa

SEQ ID NO: 55618 - DNA, 80 bp, synthetic construct
  source 1..80: mol_type = other DNA
tatgatggcaatacggtctcaggataccagcgtatgattgccacaaaggattctttccaatcattcaatattacggaacc

SEQ ID NO: 55619 - DNA, 80 bp, synthetic construct
  source 1..80: mol_type = other DNA
tggggttcaggtgttgggttcaatctcgtttgtcaagtgagtcttacagaatgttctacatttctaacatcaataaaggc

SEQ ID NO: 55620 - DNA, 80 bp, synthetic construct
  source 1..80: mol_type = other DNA
atgtgattctgcaatgtgttatggttcaagtacagctaacttagttagaggacaaaatacagttcatgttgttgggaaag

SEQ ID NO: 55621 - DNA, 80 bp, synthetic construct
  source 1..80: mol_type = other DNA
gccgtcagaattacaagaaaaataagtaaactaacagcagtattattttataacttcatgcttatattcagttattgact

SEQ ID NO: 55622 - DNA, 80 bp, synthetic construct
  source 1..80: mol_type = other DNA
aaataataacatggcctgacagctatcttataaccataaccatattcattaacaaatgcataaattttatattaactcca

SEQ ID NO: 55623 - DNA, 80 bp, synthetic construct
  source 1..80: mol_type = other DNA
ctagttctagaaactgcatctcggacaagaaagactgtaacctgctttgacctctcatgcaatcaaactgtgtgtcagcc

SEQ ID NO: 55624 - DNA, 80 bp, synthetic construct
  source 1..80: mol_type = other DNA
ttaatggcacctatccaaacatgtgtgactacaaagagctgtcttcttggtttgggtgaccagagaattcaggtggtgta

SEQ ID NO: 55625 - DNA, 80 bp, synthetic construct
  source 1..80: mol_type = other DNA
tgaaaagacatattgtgtatcaggtcaactgattgaaggtaactgttttaaccccttgcatactattgctatatcgcaac

SEQ ID NO: 55626 - DNA, 80 bp, synthetic construct
  source 1..80: mol_type = other DNA
cacttaagattgaaaagcagtttgaaacactggttgaaaaaacaggttgtacagagaatgcactaaagggttactatgca

SEQ ID NO: 55627 - DNA, 80 bp, synthetic construct
  source 1..80: mol_type = other DNA
cagaatcctcagacactgttcaaggagttgcatttgctggcacaccattgtacacatccacatccattcttgtaaggaaa

SEQ ID NO: 55628 - DNA, 80 bp, synthetic construct
  source 1..80: mol_type = other DNA
aacatggacaggattcatcacattaccaggggaaatcgaaaagacaacacaatgcacagtgttttgtacattgtcaggtc

SEQ ID NO: 55629 - DNA, 80 bp, synthetic construct
  source 1..80: mol_type = other DNA
gttggttagtcattcctctttgttcaatgattataatccggtttttattaatatttacatacttgtgttctaaatacagt

SEQ ID NO: 55630 - DNA, 80 bp, synthetic construct
  source 1..80: mol_type = other DNA
cacctgactgccctggagtaggaacaggttgtacagcatgcggtgtttacttagataagctaaggtctgtcggtaaagta

SEQ ID NO: 55631 - DNA, 80 bp, synthetic construct
  source 1..80: mol_type = other DNA
ttcagcttggaactgaacaaacttgtaagacaattgattcaaatgattgtcttgttactgcatctgttaaagtctgtatg

SEQ ID NO: 55632 - DNA, 80 bp, synthetic construct
  source 1..80: mol_type = other DNA
caggagacacccttctatttttagggccactagaagaaggcgggatgattttcaaacaatggtgtacaacaacttgtcag

SEQ ID NO: 55633 - DNA, 80 bp, synthetic construct
  source 1..80: mol_type = other DNA
gccgccagaattataagaaaaacaaataatctcataacattattatcttgtaatatcataactttacttagctataaact

SEQ ID NO: 55634 - DNA, 80 bp, synthetic construct
  source 1..80: mol_type = other DNA
cttagttctagagactgcatcccgaacaagaaagactgttacttgctttgatctttcatgtaatcaaactgtgtgtcagc

SEQ ID NO: 55635 - DNA, 80 bp, synthetic construct
  source 1..80: mol_type = other DNA
tctaggtgatcagcggattcaagtggtatatgagaaaacatactgtgtttcaggccaattaattgaaggtaattgcttta

SEQ ID NO: 55636 - DNA, 80 bp, synthetic construct
  source 1..80: mol_type = other DNA
caacacacacatatgatattatgacattagctgtgcattgcttcttcatatcaaagaaaggtggaactgacgacacactg

SEQ ID NO: 55637 - DNA, 80 bp, synthetic construct
  source 1..80: mol_type = other DNA
cagagtcctcagatactgttcagggaattgcatttgccggaacaccattgtacacatctacatctatccttgtaagaaag

SEQ ID NO: 55638 - DNA, 80 bp, synthetic construct
  source 1..80: mol_type = other DNA
ggtttggggcaaggctatattatgggttcagttgagttgggtctattagacattgggaaggtcccagacattaaaattga

SEQ ID NO: 55639 - DNA, 80 bp, synthetic construct
  source 1..80: mol_type = other DNA
attttttatacatataaccgtgtattaactttaacataagatgcttgtataaactaatgtctgacttactaacatcacct

SEQ ID NO: 55640 - DNA, 80 bp, synthetic construct
  source 1..80: mol_type = other DNA
gccgccagaattacaagaaaaataaataagcatgagtgcaataaaactttatattattccccaatatgtatgcacctata

SEQ ID NO: 55641 - DNA, 80 bp, synthetic construct
  source 1..80: mol_type = other DNA
aaaggtttaggggagcagagcagcaagtgaagtttgtttgtcaaagggttgacttagacattacagtgtattgtaatggt

SEQ ID NO: 55642 - DNA, 80 bp, synthetic construct
  source 1..80: mol_type = other DNA
gactgtttggtaacaacttctgtaaaggtctgtatgattggaacaatatcaaaattccaacctggagacacattgctatt

SEQ ID NO: 55643 - DNA, 80 bp, synthetic construct
  source 1..80: mol_type = other DNA
cttgtccttgagactgcttcacggacaaggaaaactgtcacatgttttgacctttcatgcaatcagactgtatgtcagcc

SEQ ID NO: 55644 - DNA, 80 bp, synthetic construct
  source 1..80: mol_type = other DNA
tttaggagatcagaggattcaggtagtttatgagaagacatactgtgtgtcaggacagttaattgaaggaaattgcttta

SEQ ID NO: 55645 - DNA, 80 bp, synthetic construct
  source 1..80: mol_type = other DNA
aagattgaaaaacagtttgaaaccctggttgaaaagacaggctgtacagaaaatgctctcaaaggttattatgcatgtat

SEQ ID NO: 55646 - DNA, 80 bp, synthetic construct
  source 1..80: mol_type = other DNA
ctctaaagattgaaaagcagtttgaaaccctggttgagaaaacaggctgtacagaaaatgcacttaaaggttattatgca

SEQ ID NO: 55647 - DNA, 80 bp, synthetic construct
  source 1..80: mol_type = other DNA
aaatcttaaggctattgaccttctcatgctcgcactattctacagaatcaaaattcaaagtcattttagaaagagtcaag

SEQ ID NO: 55648 - DNA, 80 bp, synthetic construct
  source 1..80: mol_type = other DNA
gcttagtatgggggatcctcttgacgacagagctgattatatgggctgctagtgcagatacccctctaatggagtcaggt

SEQ ID NO: 55649 - DNA, 80 bp, synthetic construct
  source 1..80: mol_type = other DNA
ggacaggttgtacagcctgtggggtatacttagacaagctccgttcagttgggaaagcctataaaattgtatcactcaaa

SEQ ID NO: 55650 - DNA, 80 bp, synthetic construct
  source 1..80: mol_type = other DNA
ggggatcaggagtgggctttacattagtatgtactgtaggtcttacagagtgtgcaaatttcataacttcaattaaggcg

SEQ ID NO: 55651 - DNA, 80 bp, synthetic construct
  source 1..80: mol_type = other DNA
gggtatgatcatattatatcattatgtgtatactcttatatctataatatctatgtatccttatactctaactatttata

SEQ ID NO: 55652 - DNA, 80 bp, synthetic construct
  source 1..80: mol_type = other DNA
ttaatttttacttttatacaagtattaactaacccattaccagctaaaaaaaacaaacccttaacacctatataatccca

SEQ ID NO: 55653 - DNA, 80 bp, synthetic construct
  source 1..80: mol_type = other DNA
ctaaaaaaaacaaacccttaacacctatataatcccatttgcttattacgattcttttgttcctgcggagtctactacta

SEQ ID NO: 55654 - DNA, 80 bp, synthetic construct
  source 1..80: mol_type = other DNA
tacgataccaccaaccttgttgatgcacataaagaaattaaggtttaccttaatgggttccatgtcccgtaagtatgaaa

SEQ ID NO: 55655 - DNA, 80 bp, synthetic construct
  source 1..80: mol_type = other DNA
gagatgataggatatctacatatcgaagcatccctaatgaatacaccaagataatagttgacatgtataaaaatgttttt

SEQ ID NO: 55656 - DNA, 80 bp, synthetic construct
  source 1..80: mol_type = other DNA
gcatcaacccatataccgctcacttgagcgcaatgtttgctgggtggggtggtggtttccaagtgagggtgactatatct

SEQ ID NO: 55657 - DNA, 80 bp, synthetic construct
  source 1..80: mol_type = other DNA
ccactggcctccccacaggacaccattggcccaagtgctgctctcttgctcccaactcaaattgaaactccaaacgccac

SEQ ID NO: 55658 - DNA, 80 bp, synthetic construct
  source 1..80: mol_type = other DNA
gcgtcaccacgctcccctggaccactcgccaagcagccaacacgttcttgggtgcaatccatcttggaccgaggatcaat

SEQ ID NO: 55659 - DNA, 80 bp, synthetic construct
  source 1..80: mol_type = other DNA
aggttcgtgtcacactctctggctcaggactctatgcgggacgtgctgtcgtggccgttttaccaccaggtgttgatccc

SEQ ID NO: 55660 - DNA, 80 bp, synthetic construct
  source 1..80: mol_type = other DNA
tgcacagcgcgtggagctggcagctgcaaccggagcaatcaccagtaatgttcctagttgcattagggagtgctttgcta

SEQ ID NO: 55661 - DNA, 80 bp, synthetic construct
  source 1..80: mol_type = other DNA
gaatccatcctttgggcagcaagtgcagcagaaatcccccttgtccccctctggacagataatgctcatggcgttgggag

SEQ ID NO: 55662 - DNA, 80 bp, synthetic construct
  source 1..80: mol_type = other DNA
cataggtggtacagtacctgacccagtgggttacactgaaggaacccacaaaatagtgtttgagatggagggcaatggct

SEQ ID NO: 55663 - DNA, 80 bp, synthetic construct
  source 1..80: mol_type = other DNA
actgcataatcatttccttaaaggagatatcccacaaccttataagataacatttcaggttgtctcagttagaacagatg

SEQ ID NO: 55664 - DNA, 80 bp, synthetic construct
  source 1..80: mol_type = other DNA
ggttgatccgcctggcacaactggcccgaccacatcccaccttgttgtttctaatccggaacaacccaatgggcccgcgc

SEQ ID NO: 55665 - DNA, 80 bp, synthetic construct
  source 1..80: mol_type = other DNA
gctggtcaccaccttgtgcctcctcgcgaacgtcaccttcccttgctccacacccccaatttgctacgaccgagcacctg

SEQ ID NO: 55666 - DNA, 80 bp, synthetic construct
  source 1..80: mol_type = other DNA
aagaatataagctaacacgcccatacatggcaaagtgcgtccgatgcgcagtgggcagctgtcacagcccaattgccata

SEQ ID NO: 55667 - DNA, 80 bp, synthetic construct
  source 1..80: mol_type = other DNA
gaagcagtgcggagtgatgggcacgatggctacatcaggttgcagacatcatctcagtacggtttggaccccgcaggtaa

SEQ ID NO: 55668 - DNA, 80 bp, synthetic construct
  source 1..80: mol_type = other DNA
gcacgatggctacatcaggttgcagacatcatctcagtacggtttggaccccgcaggtaatgtgaagagcagagttatga

SEQ ID NO: 55669 - DNA, 80 bp, synthetic construct
  source 1..80: mol_type = other DNA
ccaatgaaaggagcaccccaattagtgtttgagatggagggcaatggctcccccccaagtcagaaaagtggtccaggagc

SEQ ID NO: 55670 - DNA, 80 bp, synthetic construct
  source 1..80: mol_type = other DNA
tggccaggaagttgatccacctggcacgactggtccaaccacatcccgtgttgttgttcctaatccggagcaacccaatg

SEQ ID NO: 55671 - DNA, 80 bp, synthetic construct
  source 1..80: mol_type = other DNA
ttcaaaagcacaacatacataactctagatcaaacatgtgagcacttgaaggtctcttgtggacctaagtcagttcaatt

SEQ ID NO: 55672 - DNA, 80 bp, synthetic construct
  source 1..80: mol_type = other DNA
ttatttacaataagtcttgtaaaaaatgtaaattgtgcgggttgagtttaccacccattcacggaatgcgggacacattg

SEQ ID NO: 55673 - DNA, 80 bp, synthetic construct
  source 1..80: mol_type = other DNA
ccatgcatgctttaatcaacacatgtcctgcgtcagattcttgcataggacaattctgcctggatccattgccaactcaa

SEQ ID NO: 55674 - DNA, 80 bp, synthetic construct
  source 1..80: mol_type = other DNA
ttcaaaagcacaacatatataaccctagatcaaacatgtgagcatctaaaagtctcatgtgggcctaagtcagtccaatg

SEQ ID NO: 55675 - DNA, 80 bp, synthetic construct
  source 1..80: mol_type = other DNA
tcatttacaataaatcttgtaaaaaatgtaaattatgtggactagtgtatcatccgttcacagaatgtgggacacattgt

SEQ ID NO: 55676 - DNA, 80 bp, synthetic construct
  source 1..80: mol_type = other DNA
ccatgcatgctttaaccagcatatgtcttgcgtcagattcttacatagaacaatcctacctggatccattgctaattcaa

SEQ ID NO: 55677 - DNA, 80 bp, synthetic construct
  source 1..80: mol_type = other DNA
ttcaaaagcacaacatacataactctagaccaaacatgtgagcatctgaaagtctcatgcggacccaaatcagttcaatt

SEQ ID NO: 55678 - DNA, 80 bp, synthetic construct
  source 1..80: mol_type = other DNA
tatgccaaaatatagaaataataattttagtgactctcacgctattgatttttgtactcttaagtatactaagtaagacc

SEQ ID NO: 55679 - DNA, 80 bp, synthetic construct
  source 1..80: mol_type = other DNA
tcatttataataagtcttgcaaaaaatgtaagctatgtgggttgagtttatcacccattcacggaatgcgggacacattg

SEQ ID NO: 55680 - DNA, 80 bp, synthetic construct
  source 1..80: mol_type = other DNA
ccatgcatgcttcaaccaacacatgtcctgtgtcagatttttgcatagaacagtcttgcctggatccattgctaattcaa

SEQ ID NO: 55681 - DNA, 80 bp, synthetic construct
  source 1..80: mol_type = other DNA
gcgtggttcataggtggtacaggctccggtcaagataatcccagtgaagagactaccaaattagtgtttgaaatggaggg

SEQ ID NO: 55682 - DNA, 80 bp, synthetic construct
  source 1..80: mol_type = other DNA
tcccctggaccacgcgccaagcggccaacacgttcctgggcgcaatccaccttggtccgaggattaatcctacaccgcac

SEQ ID NO: 55683 - DNA, 80 bp, synthetic construct
  source 1..80: mol_type = other DNA
gaggcatcttaggggttttagtaagtcaatttctatatcagatacatttgaaagtgactccccaaataaggacatgcttc

SEQ ID NO: 55684 - DNA, 80 bp, synthetic construct
  source 1..80: mol_type = other DNA
ctttagaattacagggggtggtttttaattacagaacaaagtacccagatggaacaatttttccaaagaatgccaccaag

SEQ ID NO: 55685 - DNA, 80 bp, synthetic construct
  source 1..80: mol_type = other DNA
ttttgctaaaataagtcttcccccactaaatgaaaatttaacctgtgatacattaactttatgggaagctgtttctttaa

SEQ ID NO: 55686 - DNA, 80 bp, synthetic construct
  source 1..80: mol_type = other DNA
ttttgctaaaataaatcttccgccattaaatgaaaatttaacttgtgacactttgaccttatgggaagctgtttctttaa

SEQ ID NO: 55687 - DNA, 80 bp, synthetic construct
  source 1..80: mol_type = other DNA
aaacaccgagggctactactgatagctcaaacactgcaaatttgaacggtatatcaattacaattcattcagaattttat

SEQ ID NO: 55688 - DNA, 80 bp, synthetic construct
  source 1..80: mol_type = other DNA
cagttgttgctattgaaccgcacgttaacccagtagatagacaatatacgatatttggtgaaagcaagcaatttaatgtg

SEQ ID NO: 55689 - DNA, 80 bp, synthetic construct
  source 1..80: mol_type = other DNA
aaacgccaggagctgtaactgatggttcaaatacatcagatttaaatagtatatcaattgtaattcactctgaattttac

SEQ ID NO: 55690 - DNA, 80 bp, synthetic construct
  source 1..80: mol_type = other DNA
aaacaccgagagctactactgatagttcaaatactgcaaatttaaatgatatatcaattataatacactcagaattttat

SEQ ID NO: 55691 - DNA, 80 bp, synthetic construct
  source 1..80: mol_type = other DNA
aaacaccaagagctactactgacagttcaagtactgcaaatttaaataatatatcaattacaattcattcagaattttac

SEQ ID NO: 55692 - DNA, 80 bp, synthetic construct
  source 1..80: mol_type = other DNA
aattaaacaatttaggtactcatgtttagctgaggagtttaaaacagaggagaatttgagtatctataaatggtattgtg

SEQ ID NO: 55693 - DNA, 80 bp, synthetic construct
  source 1..80: mol_type = other DNA
attgtctacttatcctgagttgcctggagattatgtagacagagttgttgacatgtatgccacagtgtttggaatgtggg

SEQ ID NO: 55694 - DNA, 80 bp, synthetic construct
  source 1..80: mol_type = other DNA
ttacctctgatggtgtaaacatgaaagtattagctttaagacatagtgtggctcaggtgtatgcggacactcaaatatat

SEQ ID NO: 55695 - DNA, 80 bp, synthetic construct
  source 1..80: mol_type = other DNA
actattcatattatactaataatgagataaggactgatcaacattgggtaactaagacaaatatagaagattatttatta

SEQ ID NO: 55696 - DNA, 80 bp, synthetic construct
  source 1..80: mol_type = other DNA
cccggcaaatatagccccagtgaagagactaccaaattagtgtttgaaatggagggcttgggccagccacagtcccaaag

SEQ ID NO: 55697 - DNA, 80 bp, synthetic construct
  source 1..80: mol_type = other DNA
atggagggcaatgcctccggctcagcatcgaaaggacttgagcaatccgtcaatgttgacccgcctggtacgacaggccc

SEQ ID NO: 55698 - DNA, 80 bp, synthetic construct
  source 1..80: mol_type = other DNA
tcacctctcagcgatgtgggcagggtggggcggtggttttgaggtccggttatcgatctctgggtctggcgtctttgctg

SEQ ID NO: 55699 - DNA, 80 bp, synthetic construct
  source 1..80: mol_type = other DNA
aaccacatcccatactgttgttgctaatccggaacaacccaatggggccgcacagcgcctggagatggctgttgctactg

SEQ ID NO: 55700 - DNA, 80 bp, synthetic construct
  source 1..80: mol_type = other DNA
cacctctctgggatgtgggccgggtggggcggtagttttgaggtccggctatcgatctctggttctggcgtgttcgctgg

SEQ ID NO: 55701 - DNA, 80 bp, synthetic construct
  source 1..80: mol_type = other DNA
cacttgtcagcaatgtgggctgggtggggtggcagttttgaggcccgtctatcggtctctgggtctggtgtctacgctgg

SEQ ID NO: 55702 - DNA, 80 bp, synthetic construct
  source 1..80: mol_type = other DNA
ttattggcgaatgttactgcagtacgtcaagagtatgctataccagttggaccagtattcccaccaggcatgattggaca

SEQ ID NO: 55703 - DNA, 80 bp, synthetic construct
  source 1..80: mol_type = other DNA
gacggggcgactacatggatcttttatccagtaattcttagacccaacaaagttgaaggggagtttttattaaacgggca

SEQ ID NO: 55704 - DNA, 80 bp, synthetic construct
  source 1..80: mol_type = other DNA
atgctggcaaatgtgactgctgttagacaagaatacgcaataccagttggaccagtcttcccaccaggcatgattggaca

SEQ ID NO: 55705 - DNA, 80 bp, synthetic construct
  source 1..80: mol_type = other DNA
gaagagaccaccaaattagtgtttgaaatggagggtataccccgcccagagggccccagggccaaccccaatgaaaatgt

SEQ ID NO: 55706 - DNA, 80 bp, synthetic construct
  source 1..80: mol_type = other DNA
ctgcgcaaagagtggagatggctgcggcaacaggggctgttagcaacaatgtccccatgtgtgtgagggagtgctttgct

SEQ ID NO: 55707 - DNA, 80 bp, synthetic construct
  source 1..80: mol_type = other DNA
agtgtgaccacgctgccttggacaacacgccaagcgtccaacacctttcttggcgccatccatcttggtccacgcattaa

SEQ ID NO: 55708 - DNA, 80 bp, synthetic construct
  source 1..80: mol_type = other DNA
atcttggtccacgcattaacccctacactgcacacttgagtgccatgtttgctggttggggcggtacttttgaagcccga

SEQ ID NO: 55709 - DNA, 80 bp, synthetic construct
  source 1..80: mol_type = other DNA
gcctcttgcgtcaccacaggacactattggaccaaacgcggcacttctcctccccacgcagattgagacacccaacgggg

SEQ ID NO: 55710 - DNA, 80 bp, synthetic construct
  source 1..80: mol_type = other DNA
aatgaagtgtttatggcaattaaacagtttaggtactcatgtttagctgaggagtttaagacagaggagaacttgagtat

SEQ ID NO: 55711 - DNA, 80 bp, synthetic construct
  source 1..80: mol_type = other DNA
acagaagttttcagtgcaattaaagattttaggttttcatgtctcaggaaggaattcagaacagagaagaacaaaagtgt

SEQ ID NO: 55712 - DNA, 80 bp, synthetic construct
  source 1..80: mol_type = other DNA
aatgaagtctttagggctattaaggactttagattctcatgtcttaggggagatttgcaaacaaaagaaaacagagatgt

SEQ ID NO: 55713 - DNA, 80 bp, synthetic construct
  source 1..80: mol_type = other DNA
ccactagttggtcaggattgggtgcacgtaagcatcttgatgttacggttggtaaaaatgcaacattcaaactgaagcct

SEQ ID NO: 55714 - DNA, 80 bp, synthetic construct
  source 1..80: mol_type = other DNA
agggaacagggtgtcacaggaccaaaacctgcaatttgtcagagagcaacagcaacccttgggacagtcgggtcaaacac

SEQ ID NO: 55715 - DNA, 80 bp, synthetic construct
  source 1..80: mol_type = other DNA
ttctaatctcggttctggtgtgtgaagcggttattagagtgtctctaagctccacaagagaggagacctgttttggtgac

SEQ ID NO: 55716 - DNA, 80 bp, synthetic construct
  source 1..80: mol_type = other DNA
tgaggcagcagcagtctcaagtgctcgtgaatatactagttggcgtgattgtcttttgccagattagttgggaattaaac

SEQ ID NO: 55717 - DNA, 80 bp, synthetic construct
  source 1..80: mol_type = other DNA
tgttagctaatgtaacatctgttagacaagaatatgcaataccagttggaccagtttttccaccaggcatgaattggaca

SEQ ID NO: 55718 - DNA, 80 bp, synthetic construct
  source 1..80: mol_type = other DNA
cacctgagcgcaatgtttgctgggtggggtggtggttttcaggtgagagtgactatatctggctctggcctgtttgctgg

SEQ ID NO: 55719 - DNA, 80 bp, synthetic construct
  source 1..80: mol_type = other DNA
cgccctgctcaggctgcaagccatggcaggaatctcggaagagcaaggctcagacacggacacccctattgtgtacaatg

SEQ ID NO: 55720 - DNA, 80 bp, synthetic construct
  source 1..80: mol_type = other DNA
tctgttcaggtggaagtgcttaatgaatctctcaaaggaggggttctctactgtctggattacagtaagtgggactccac

SEQ ID NO: 55721 - DNA, 80 bp, synthetic construct
  source 1..80: mol_type = other DNA
cctacgagcaacacggggccccctacaccggaaatgttttccaagttgagacagtacacacgtatggtgatgactgcaaa

SEQ ID NO: 55722 - DNA, 80 bp, synthetic construct
  source 1..80: mol_type = other DNA
ttagtgtttgagatggagggcctaggccaaccacaaccacagggtggtgaaaagactagcccacagcctgtgacaccaca

SEQ ID NO: 55723 - DNA, 80 bp, synthetic construct
  source 1..80: mol_type = other DNA
catacaccgcccacctgagcgcaatgtttgctgggtggggtggtggctttcaagtgagagtgactatatctggctctggc

SEQ ID NO: 55724 - DNA, 80 bp, synthetic construct
  source 1..80: mol_type = other DNA
ttccctggacacagatggaatgataagactcccgcaagttgcatatgagggaaccctgataccggggacctacaaggtaa

SEQ ID NO: 55725 - DNA, 80 bp, synthetic construct
  source 1..80: mol_type = other DNA
aggataccttggttcgtgcggaagctcttgcaggtttccgagtcaacaggaacagccctgaaaagaagcagctggctaat

SEQ ID NO: 55726 - DNA, 80 bp, synthetic construct
  source 1..80: mol_type = other DNA
ggtgttactaatactacttgtggtttctatgtctccagttcaatcagcaccaattggcctggagaaggcagtcgtagtct

SEQ ID NO: 55727 - DNA, 80 bp, synthetic construct
  source 1..80: mol_type = other DNA
atcaggctagagagggatacataagcatctgccttttcattttgggaagtgttttattcatggtttcttggctgacaaga

SEQ ID NO: 55728 - DNA, 80 bp, synthetic construct
  source 1..80: mol_type = other DNA
aggttgatcgacggcatcagcaatagtttctttcctggactatcagtctgccagacatgttatataagtagtgtaaatgg

SEQ ID NO: 55729 - DNA, 80 bp, synthetic construct
  source 1..80: mol_type = other DNA
atatgagattgagtctcataagtgctactgcagcatgttctgttgtccctactgtagggcctgttccgttgatagagaag

SEQ ID NO: 55730 - DNA, 80 bp, synthetic construct
  source 1..80: mol_type = other DNA
cccatcagctgcatctaagtgtttgtagaagaaggaggacagggagtaatgtcatgttagctgtctgcaagcgcatgtgt

SEQ ID NO: 55731 - DNA, 80 bp, synthetic construct
  source 1..80: mol_type = other DNA
ttcaaggccaccattgaggcaagcaatggagtccttttcattagaagcatcataaacaccaccttcattgtatgcatact

SEQ ID NO: 55732 - DNA, 80 bp, synthetic construct
  source 1..80: mol_type = other DNA
tatactggtaacatgtattgttagtacatcagctgtggaaatggaaactctgccagcaggcacctgggaaagagaggaag

SEQ ID NO: 55733 - DNA, 80 bp, synthetic construct
  source 1..80: mol_type = other DNA
tttttgccaccaagagtgccaagtcactgatactgaatgcctttgtccatatgaggccttcgtgctcaggaagccccttt

SEQ ID NO: 55734 - DNA, 80 bp, synthetic construct
  source 1..80: mol_type = other DNA
tcttggacagcatagccaagggtgtaaagagccttttaaactcaactagcttagagaccagtctgtcgattgaagcacct

SEQ ID NO: 55735 - DNA, 80 bp, synthetic construct
  source 1..80: mol_type = other DNA
tggggtgccatcaacgtccagtcaacctacagaccaacagcgtcaaccgccaatatagcactcagttggagctcagtaga

SEQ ID NO: 55736 - DNA, 80 bp, synthetic construct
  source 1..80: mol_type = other DNA
caaggagacttctctcagaggacaacagcggtggctgcatatcaagaactcagttgatcaagacagagactgcagaaatc

SEQ ID NO: 55737 - DNA, 80 bp, synthetic construct
  source 1..80: mol_type = other DNA
caaagctgtactcacggtgtgcctggcgacttacagatttaccatgttggcaacttgctaaaaggtgataggataaatgg

SEQ ID NO: 55738 - DNA, 80 bp, synthetic construct
  source 1..80: mol_type = other DNA
acatgggtgactggccttcctgcacatacactggggtgacacagcataaccgtgcagccttcattaacatgttaaatatt

SEQ ID NO: 55739 - DNA, 80 bp, synthetic construct
  source 1..80: mol_type = other DNA
gagactgattacacgaaagttttccacttccattccaaaagggttaccgcacacggggacaccccacaattggacctgaa

SEQ ID NO: 55740 - DNA, 80 bp, synthetic construct
  source 1..80: mol_type = other DNA
ggcaagacccatgtatggagcaggtgaggtcactgtcttagtggaggtggcagatatggagctacacacaaagaggattg

SEQ ID NO: 55741 - DNA, 80 bp, synthetic construct
  source 1..80: mol_type = other DNA
aaatcacaggcctgaggtttgcaagtctaacctgctcaggctgctatgcttgtagctcaggcatctcctgcaaggtcagg

SEQ ID NO: 55742 - DNA, 80 bp, synthetic construct
  source 1..80: mol_type = other DNA
atacacgtggaagaaccggatgagctcactgtccacctaaaaagtagtgacccagatgttgtggctgcgagttcaagcct

SEQ ID NO: 55743 - DNA, 80 bp, synthetic construct
  source 1..80: mol_type = other DNA
catggcacgaaagattgagttcggcactgatggcaccttcaaagccttctcatcaatgccaaaagactctctatgtttct

SEQ ID NO: 55744 - DNA, 80 bp, synthetic construct
  source 1..80: mol_type = other DNA
acattgctgaaagggaccattgcagcagctgcagccaagatgacacacaaagatgtgtgaatataaagcttgaacagcca

SEQ ID NO: 55745 - DNA, 80 bp, synthetic construct
  source 1..80: mol_type = other DNA
catatgtaacgggaccactattgttgatcagaggctgggcagtgagctagggtgttacacaatcaatagagttaggacct

SEQ ID NO: 55746 - DNA, 80 bp, synthetic construct
  source 1..80: mol_type = other DNA
tggaatccattaaaggcttcttttatggcctaaaaaacatgttgggtggcatctttggcaatgtgattatcggcatcctc

SEQ ID NO: 55747 - DNA, 80 bp, synthetic construct
  source 1..80: mol_type = other DNA
ttattcattatcccgtttgctttgctgctgctgttctttttatttggctggaaaattttgttctgctttaaatgctgtag

SEQ ID NO: 55748 - DNA, 80 bp, synthetic construct
  source 1..80: mol_type = other DNA
gagaactagaggcttgttgaagtacaaacatgtcagagaagatgatgaagttggctataaaaaaatcatagaaaggctga

SEQ ID NO: 55749 - DNA, 80 bp, synthetic construct
  source 1..80: mol_type = other DNA
atgacaagaggggaaaatacaaattacttgacggtgaaaggctagcagacagaaagattgctgaactcttctcaaccaaa

SEQ ID NO: 55750 - DNA, 80 bp, synthetic construct
  source 1..80: mol_type = other DNA
gttaatagacaagcacagaccttaatgctgtagaatgtagagcttagttttcttgttgcttgcacccactctgccatgta

SEQ ID NO: 55751 - DNA, 80 bp, synthetic construct
  source 1..80: mol_type = other DNA
tagttttcttgttgcttgcacccactctgccatgtatgtccccgccgccgcaagacaccttagtccatccaacaaaaaac

SEQ ID NO: 55752 - DNA, 80 bp, synthetic construct
  source 1..80: mol_type = other DNA
tcaaactatgtgagaacagtgctcaagacaagggctgtgaaatcgatagtgtgcctgtcaagtgcagacagggcttctgc

SEQ ID NO: 55753 - DNA, 80 bp, synthetic construct
  source 1..80: mol_type = other DNA
ttaaaaattactcaagaaggaagaggccatgtaaagctctccagaggatcagaaattgtgctgggtgtttgtgacacaag

SEQ ID NO: 55754 - DNA, 80 bp, synthetic construct
  source 1..80: mol_type = other DNA
ctgtgaattaatgatacccgaaggcaccggtgacattttggtggactgttctggtggacagcagcactttctgcagaaca

SEQ ID NO: 55755 - DNA, 80 bp, synthetic construct
  source 1..80: mol_type = other DNA
acttggtcgatctaggttgtcccaatgtccctttactgggcaaaatggccatatacatttgcagaatgtcgaaccatcct

SEQ ID NO: 55756 - DNA, 80 bp, synthetic construct
  source 1..80: mol_type = other DNA
tggcattcctcttctggttcagctttggctatttgttcacatgcatattttgcaaaatgcttttctatgtacttataata

SEQ ID NO: 55757 - DNA, 80 bp, synthetic construct
  source 1..80: mol_type = other DNA
tcattgacagaaaggacaagctgaacgacaggtgcaccataacaaccaattgtgtcataaagggaaaagagatcagaaaa

SEQ ID NO: 55758 - DNA, 80 bp, synthetic construct
  source 1..80: mol_type = other DNA
atcggcactctagggaagaggctgaagcagtacagagagctaaagcctcagacatgcaccatatgtgagatgacacctgt

SEQ ID NO: 55759 - DNA, 80 bp, synthetic construct
  source 1..80: mol_type = other DNA
aagggctcacaagacatgtgactcactgccccaagagaagagaaaaggtggaggagactgagctatatctgaacctggag

SEQ ID NO: 55760 - DNA, 80 bp, synthetic construct
  source 1..80: mol_type = other DNA
catctgagtgccatgtttgccggctggggtgggagtttccagatacgagtcaccctctctggttccggcctgtacgcagg

SEQ ID NO: 55761 - DNA, 80 bp, synthetic construct
  source 1..80: mol_type = other DNA
gaaccggttgtcagcaatgctgcacaggccaccccccaagacacaatcagccccaccagtgcacttttgctgccaacgca

SEQ ID NO: 55762 - DNA, 80 bp, synthetic construct
  source 1..80: mol_type = other DNA
gagggcaatggccttagccagggtgggcaacagcaagatcttgaagtgccaggaacaactggtaagactttgttggcagt

SEQ ID NO: 55763 - DNA, 80 bp, synthetic construct
  source 1..80: mol_type = other DNA
atcctcaaccaccagccacgactcctgctcaaggaacctctatgtatccctcctgttgctgtaccaaaccttcggacgga

SEQ ID NO: 55764 - DNA, 80 bp, synthetic construct
  source 1..80: mol_type = other DNA
ggctgaagaaataacaccaggcaggttcagaacaattgcatgtggtctcttccctgcacaagtgaagccaagaaatatca

SEQ ID NO: 55765 - DNA, 80 bp, synthetic construct
  source 1..80: mol_type = other DNA
ggaactcccgtgtgtcttggccaaaattcgcagtccccaacctccaatcactcaccaacctcctgtcctccaacttgtcc

SEQ ID NO: 55766 - DNA, 80 bp, synthetic construct
  source 1..80: mol_type = other DNA
gggacgcagcattttgctctgcttatgagtgcactgctcaatatgccaatgcctattgttcacatgctaatgggtcaggg

SEQ ID NO: 55767 - DNA, 80 bp, synthetic construct
  source 1..80: mol_type = other DNA
aggggtctggaagaagcctttatgtgtagggtatgagcgcgtggtggtgaagagagaactctctgccaagcccatccaga

SEQ ID NO: 55768 - DNA, 80 bp, synthetic construct
  source 1..80: mol_type = other DNA
ttgtgctagcggagtctgtgtcacaggatcgcagagtccttccaccgagattacactcaagtatccaggtatttcccagt

SEQ ID NO: 55769 - DNA, 80 bp, synthetic construct
  source 1..80: mol_type = other DNA
ttccaccgagattacactcaagtatccaggtatttcccagtcttctgggggggacataggggttcacatggcacatgatg

SEQ ID NO: 55770 - DNA, 80 bp, synthetic construct
  source 1..80: mol_type = other DNA
tcttctgggggggacataggggttcacatggcacatgatgaccagtcagttagctccaaaatagtagctcactgccctcc

SEQ ID NO: 55771 - DNA, 80 bp, synthetic construct
  source 1..80: mol_type = other DNA
agagcagggtcagttggagcagaagcttgtttgatgttgaagggggtcaaggaagatcaaaccaagtttcttaaattaaa

SEQ ID NO: 55772 - DNA, 80 bp, synthetic construct
  source 1..80: mol_type = other DNA
cctggtcggggaatgccatgtgaataggtgtctgtcttggagagacaatgaaacatcagcagagttttcatttgttggtg

SEQ ID NO: 55773 - DNA, 80 bp, synthetic construct
  source 1..80: mol_type = other DNA
aaagcacgaccatgagagaaaacaagtgttttgagcaatgtggaggatgggggtgtgggtgtttcaatgttaatccatct

SEQ ID NO: 55774 - DNA, 80 bp, synthetic construct
  source 1..80: mol_type = other DNA
ttcacaaactggggttcagttagcctctcactggacgcagaaggaatttcaggctcaaatagcttttctttcattgagag

SEQ ID NO: 55775 - DNA, 80 bp, synthetic construct
  source 1..80: mol_type = other DNA
ttcttggggagatcaggtgcaattcagagtcctcagtcctgagtgctcatgagagctgccttagggcaccaaaccttatc

SEQ ID NO: 55776 - DNA, 80 bp, synthetic construct
  source 1..80: mol_type = other DNA
gaggttctctgccacagacaaggaatgacaaaacctttgcagccagcaaaggaaatagaggtgttcaagctttctctaag

SEQ ID NO: 55777 - DNA, 80 bp, synthetic construct
  source 1..80: mol_type = other DNA
tgcaatgctggtgccagggtctgcctgtctatcacatccacaggaactggaagcctttctgcccacaataaggatgggtc

SEQ ID NO: 55778 - DNA, 80 bp, synthetic construct
  source 1..80: mol_type = other DNA
ctcataaagggtcctcctcacaaaaagagagttgggatagttcggtgtgagagacgaagagatgctaagcagataggaag

SEQ ID NO: 55779 - DNA, 80 bp, synthetic construct
  source 1..80: mol_type = other DNA
aaggcaccctgatagccattgatccatttgatgataggcgggaagctggaggtgaatcaacagttgtgaatccaaaatct

SEQ ID NO: 55780 - DNA, 80 bp, synthetic construct
  source 1..80: mol_type = other DNA
gggtggtggggtgaggcagcagcagtctcaagtgcttgtgaatattctagttggcgtaatcgtcttttgccagattagct

SEQ ID NO: 55781 - DNA, 80 bp, synthetic construct
  source 1..80: mol_type = other DNA
ggcacaactacattgacgggatgactcaggaggatgccacttgtaaacctgtgacatatgctggggcatgtagcagtttt

SEQ ID NO: 55782 - DNA, 80 bp, synthetic construct
  source 1..80: mol_type = other DNA
gctcttatcctctccaagacttgttttgtcagtcaagtgaggatgatggctccaaattaaaaacaaaaatgaaaggggtc

SEQ ID NO: 55783 - DNA, 80 bp, synthetic construct
  source 1..80: mol_type = other DNA
tgcgaagtgggggttcaagctcttaaaaagtgtgatggccaactcagcactgcacatgaggttgttccttttgcagtgtt

SEQ ID NO: 55784 - DNA, 80 bp, synthetic construct
  source 1..80: mol_type = other DNA
atcctcaaccaccagcgcacgactcctgctcaaggcaactctatgtttccctcatgttgctgtacaaaacctacggatgg

SEQ ID NO: 55785 - DNA, 80 bp, synthetic construct
  source 1..80: mol_type = other DNA
gactccagatgaaaggaaagcggttccctctatatttgagactgagatggatagattatgtgaagtttttggttctagag

SEQ ID NO: 55786 - DNA, 80 bp, synthetic construct
  source 1..80: mol_type = other DNA
tatgatcgaacgatacgagtcatcactccagataagtttcgatttgcttattttgcagagttggagcgtggtgggtttga

SEQ ID NO: 55787 - DNA, 80 bp, synthetic construct
  source 1..80: mol_type = other DNA
tgacaacgggttgactttttctcctgagttgaagactgttgtgtttgttcattctatgcctgagttgttcgaagccatgg

SEQ ID NO: 55788 - DNA, 80 bp, synthetic construct
  source 1..80: mol_type = other DNA
gaagccatgggcggatgtgttgctgagatagttccgactcacagtaccagattagctatattgctccggggacaaggttt

SEQ ID NO: 55789 - DNA, 80 bp, synthetic construct
  source 1..80: mol_type = other DNA
gccttcgcccttacgcccagcgatgtcagcaacaggctggtcggttgcattgggagttgtatgctgcatttcaggagttt

SEQ ID NO: 55790 - DNA, 80 bp, synthetic construct
  source 1..80: mol_type = other DNA
atggagggcaatgcctccggcccagcagcaaagaacggtggtgaactcaccactactgacccgcctggtacaacgggtcc

SEQ ID NO: 55791 - DNA, 80 bp, synthetic construct
  source 1..80: mol_type = other DNA
caacattaatccgtacacttctcatctctcagcaatgtgggcaggatgggggggtggttttgaggtccggctatcgatct

SEQ ID NO: 55792 - DNA, 80 bp, synthetic construct
  source 1..80: mol_type = other DNA
caatgtgggcaggatgggggggtggttttgaggtccggctatcgatctctgggtctggcgtctttgctgtgcgtatcatt

SEQ ID NO: 55793 - DNA, 80 bp, synthetic construct
  source 1..80: mol_type = other DNA
caatgtgggctgggtggggtggcagttttgaggcccgtctatcggtctctgggtctggtgtctacgctggtcgtatcatt

SEQ ID NO: 55794 - DNA, 80 bp, synthetic construct
  source 1..80: mol_type = other DNA
gtggggtggtagcatggaggcgcgcgtcaccatttctggttctggcacctttgctgataaaattattgttgccctactgc

SEQ ID NO: 55795 - DNA, 80 bp, synthetic construct
  source 1..80: mol_type = other DNA
atcctcaaccaccagcacgggaccatgcagaacctgcacgactcctgctcaaggaacctctatgtatccctcctgttgct

SEQ ID NO: 55796 - DNA, 80 bp, synthetic construct
  source 1..80: mol_type = other DNA
taccaattttcttttgtctttgggtatcatattaaaccctaacaaaacaaaaagatggagggttactgtattgggtactt

SEQ ID NO: 55797 - DNA, 80 bp, synthetic construct
  source 1..80: mol_type = other DNA
tataggtggtacaggcaccggtcaagatagccccagtgaagagactaccaaattagtgtttgaaatggagggcttgggcc

SEQ ID NO: 55798 - DNA, 80 bp, synthetic construct
  source 1..80: mol_type = other DNA
ctattacccactcaagttgagacaccaaatgctagtgctcagcgtgtggagctcgcaatggccacaggggcagtgaccag

SEQ ID NO: 55799 - DNA, 80 bp, synthetic construct
  source 1..80: mol_type = other DNA
caatgtgcccaactgcatccgggagtgttttgctgcggtcaccacaataccatggactacccggcaagcagcaaacacct

SEQ ID NO: 55800 - DNA, 80 bp, synthetic construct
  source 1..80: mol_type = other DNA
agccacagtcccaaagggaccaacaggttatggaacaggttgttaccccccaggacaccattggaccaacgagtgcactt

SEQ ID NO: 55801 - DNA, 80 bp, synthetic construct
  source 1..80: mol_type = other DNA
catctacagataagtaagcaagtgatccatgcagaaattcaacatttaggtcattggatggatggtacattcaatttaaa

SEQ ID NO: 55802 - DNA, 80 bp, synthetic construct
  source 1..80: mol_type = other DNA
ggttggggctgtaatcctcctgattgccctggggtagggacaggatgtacagcttgtggagtctatcttgataagcttaa

SEQ ID NO: 55803 - DNA, 80 bp, synthetic construct
  source 1..80: mol_type = other DNA
ctctgaaatatacaagaaaagcatgtattcaacttggtactgaacaaacatgtaagagtgttgacagcaatgattgtctg

SEQ ID NO: 55804 - DNA, 80 bp, synthetic construct
  source 1..80: mol_type = other DNA
tcaacttggtactgaacaaacatgtaagagtgttgacagcaatgattgtctggtaactacttctgttaaagtgtgcctaa

SEQ ID NO: 55805 - DNA, 80 bp, synthetic construct
  source 1..80: mol_type = other DNA
catttacaaataagtaagcaggtgattcatgcagagattcaacatttaggtcactggatggatgccacattcaatctaaa

SEQ ID NO: 55806 - DNA, 80 bp, synthetic construct
  source 1..80: mol_type = other DNA
tcagttaggcactgagcaaacctgtaaaactgtcgatagtaatgattgtctactcaccacttcagtgaaagtgtgtttaa

SEQ ID NO: 55807 - DNA, 80 bp, synthetic construct
  source 1..80: mol_type = other DNA
tcaattgggcactgaacaaacctgtaaaactgttgatagcaatgattgtttaattaccacttcggttaaagtatgtttaa

SEQ ID NO: 55808 - DNA, 80 bp, synthetic construct
  source 1..80: mol_type = other DNA
ggatgtgggccggatggggaggtagttttgagtcccgtgtttcgatctctgggtctggtgtgtttgctgggctggtcgtt

SEQ ID NO: 55809 - DNA, 80 bp, synthetic construct
  source 1..80: mol_type = other DNA
cgatgttcgctggttggggtggtggctttcaggtgcgggtcacaatctcaggttctgggctctttgctggtcgagccatc

SEQ ID NO: 55810 - DNA, 80 bp, synthetic construct
  source 1..80: mol_type = other DNA
caatgtttgctgggtggggtggtggttttcaggtgagagtgactatatctggttctggcctgtttgctggtcgtgcggta

SEQ ID NO: 55811 - DNA, 80 bp, synthetic construct
  source 1..80: mol_type = other DNA
aatggctccaactcagagtcaaagcagagcaacaacccaatggtcgttgatccgcctggcacaacaggtccgaccacatc

SEQ ID NO: 55812 - DNA, 80 bp, synthetic construct
  source 1..80: mol_type = other DNA
aatccaatgtccctgaggcaatacgcaactgctttgcagtctttcgtacttttgcttggaacgacaggatgcccacggga

SEQ ID NO: 55813 - DNA, 80 bp, synthetic construct
  source 1..80: mol_type = other DNA
acttttcttggatctatatcgcttcatcccaacattaacccgtacactgctcacctctctgggatgtgggccgggtgagg

SEQ ID NO: 55814 - DNA, 80 bp, synthetic construct
  source 1..80: mol_type = other DNA
ggtggggcggtagctttgaggtccggctatcgatctctggttctggcgtgttcgctgggcgcatcattgcttctgtcata

SEQ ID NO: 55815 - DNA, 80 bp, synthetic construct
  source 1..80: mol_type = other DNA
ccacgttgttgttgctaatccggagcaacccaatggggccgcacagcgcctggagctggctgttgccactggtgcaatcc

SEQ ID NO: 55816 - DNA, 80 bp, synthetic construct
  source 1..80: mol_type = other DNA
atcctcaaccaccagcggaccatgcacgactcctgctcaaggaacctctatgtatccctcctgttgctgtaccaaacctt

SEQ ID NO: 55817 - DNA, 80 bp, synthetic construct
  source 1..80: mol_type = other DNA
tctttgggtatacatttaaaccctaacaaaacaaaaagatggggttactctttacatttcatgggctatgtcattggaag

SEQ ID NO: 55818 - DNA, 80 bp, synthetic construct
  source 1..80: mol_type = other DNA
aatcgcttccacatccagatccaaagcagagcaacatccccatggtcgttgacccgcctggcacaacaggtccgaccaca

SEQ ID NO: 55819 - DNA, 80 bp, synthetic construct
  source 1..80: mol_type = other DNA
cttgtggagcttagagacactctaataaccgcttcacacaaagacggtgcattaaatgtatgttttattaacaattctaa

SEQ ID NO: 55820 - DNA, 80 bp, synthetic construct
  source 1..80: mol_type = other DNA
attagctgggaattaaactaactctttgaagttgcaccggtctttgtatgttttattaacaattctaatctcggttctgg

SEQ ID NO: 55821 - DNA, 80 bp, synthetic construct
  source 1..80: mol_type = other DNA
ttagttgggaattaaactaactctttgaagttgcaccggtctttgtcatcaacatcgtgataggacagccagggaggcag

SEQ ID NO: 55822 - DNA, 80 bp, synthetic construct
  source 1..80: mol_type = other DNA
ccatgtttgctggctggggcggcagtttccaaatacgggtcaccctgtctggttccgggctgtacgcaggtcgagcagta

SEQ ID NO: 55823 - DNA, 80 bp, synthetic construct
  source 1..80: mol_type = other DNA
tggacccaacgcggcactcttacttcccactcagattgagacacccaacggggctgcgcaaagggtcgagatggctgcag

SEQ ID NO: 55824 - DNA, 80 bp, synthetic construct
  source 1..80: mol_type = other DNA
cctgctgaggatatttgtgctgaagtcctcgatggttacaaagcaaggaaagtgcgcttttgtacacctgataattactt

SEQ ID NO: 55825 - DNA, 80 bp, synthetic construct
  source 1..80: mol_type = other DNA
tttttgatatgaaagacttcttatttggcaaattccgggatgatgataaattccatgctataataagtcaaggagaattc

SEQ ID NO: 55826 - DNA, 80 bp, synthetic construct
  source 1..80: mol_type = other DNA
gatggggaggaagctttcagatccgagtcacaatctccggatcgggcatctttgctgggagagcagtatgtgctgtcttg

SEQ ID NO: 55827 - DNA, 80 bp, synthetic construct
  source 1..80: mol_type = other DNA
cctaggccaaccacagccacagggtggcgaaaaggccagcccgcagcctgtgacaccgcaggacaccattggcccaacag

SEQ ID NO: 55828 - DNA, 80 bp, synthetic construct
  source 1..80: mol_type = other DNA
gaacaaacttgcggaactcaagagacaactggcagatctggtggcagctcaaaaactggcttcaataccagttgatccaa

SEQ ID NO: 55829 - DNA, 80 bp, synthetic construct
  source 1..80: mol_type = other DNA
tacctattgttctaaaagccctatatatgttgtctacaaggggaagacaaactgtgaaggagaataaagggacaaggatt

SEQ ID NO: 55830 - DNA, 80 bp, synthetic construct
  source 1..80: mol_type = other DNA
ggttcataggtggtacagctccagatccagagggccccactgaaggggcacccaaattagtgtttgagatgggaggcaat

SEQ ID NO: 55831 - DNA, 80 bp, synthetic construct
  source 1..80: mol_type = other DNA
gggggcttggccagccacagtcccaaaggccaacaggttatggaaccggttttaaccccccaggacaccattggaccaac

SEQ ID NO: 55832 - DNA, 80 bp, synthetic construct
  source 1..80: mol_type = other DNA
cagtgaccagcaatgtgcccaattgcatccgggagtgttttgctgcagtcactacaataccatggaccacccggcaagca

SEQ ID NO: 55833 - DNA, 80 bp, synthetic construct
  source 1..80: mol_type = other DNA
ccaaacacctttctcggtgccatacatctgggcccacgcattaacccctatactgcgcatctgagtgcgatgtttgctgg

SEQ ID NO: 55834 - DNA, 80 bp, synthetic construct
  source 1..80: mol_type = other DNA
tatactgcgcatctgagtgcgatgtttgctggttggggggggggctttcaggtgcgggtcacaatctcaggttccgtgct

SEQ ID NO: 55835 - DNA, 80 bp, synthetic construct
  source 1..80: mol_type = other DNA
gttggggggggggctttcaggtgcgggtcacaatctcaggttccgggctctttgctggtcgtgccatcactgctatcctg

SEQ ID NO: 55836 - DNA, 80 bp, synthetic construct
  source 1..80: mol_type = other DNA
gagtgcacttctattgcccactcaagttgagacaccaaatgctagtgctcagcgtgtggaacttgcaatggccacagggg

SEQ ID NO: 55837 - DNA, 80 bp, synthetic construct
  source 1..80: mol_type = other DNA
caacattaatccatacaccggccacttgtcagccatgtgggcaggttgggggggaagtttcgacgtccgcctttccatct

SEQ ID NO: 55838 - DNA, 80 bp, synthetic construct
  source 1..80: mol_type = other DNA
gggcaggttgggggggaagtttcgacgtccgcctttccatctctggctctggtatttttgcagggcgtatcattgcttct

SEQ ID NO: 55839 - DNA, 80 bp, synthetic construct
  source 1..80: mol_type = other DNA
atggagggcctaggccaaccacagccacagagtggtgaaaagaccaacccacagcctgtaacaccacaggacaccattgg

SEQ ID NO: 55840 - DNA, 80 bp, synthetic construct
  source 1..80: mol_type = other DNA
caggggcaatcacgagtaatgtaccaaactgcattcgtgagtgtttcgcctctgttaccacaatcccctggacaactcga

SEQ ID NO: 55841 - DNA, 80 bp, synthetic construct
  source 1..80: mol_type = other DNA
caggcctctaacactttcctcggggctatccaccttggcccacgcatcaacccatacaccgctcacttgagcgcaatgtt

SEQ ID NO: 55842 - DNA, 80 bp, synthetic construct
  source 1..80: mol_type = other DNA
ttgctgggtgaggtggtggttttcaagtgagagtaactatatctggttctggcctgtttgctggtcgggcggtaactgcc

SEQ ID NO: 55843 - DNA, 80 bp, synthetic construct
  source 1..80: mol_type = other DNA
ccctacagcggccctcttacttccaactcagattgaaacaccaaatgcaagtgcacagcgcttggagttggccatggcca

SEQ ID NO: 55844 - DNA, 80 bp, synthetic construct
  source 1..80: mol_type = other DNA
tgcacacttgagtgcgatgtttgctggttggggggggggctttcaggtgcgtgtcacaatctcaggttccgtgctctttg

SEQ ID NO: 55845 - DNA, 80 bp, synthetic construct
  source 1..80: mol_type = other DNA
ttgctggttggggggggggctttcaggtgcgtgtcacaatctcaggttccgggctctttgctggtcgtgccattactgcc

SEQ ID NO: 55846 - DNA, 80 bp, synthetic construct
  source 1..80: mol_type = other DNA
gtgtcccacccagagggccccagggccaattccaatgaaaacgtgcctctcgcatcaccacaagacacaattgggccaag

SEQ ID NO: 55847 - DNA, 80 bp, synthetic construct
  source 1..80: mol_type = other DNA
ccattagcaacaatgtccccatgtgcgtgagggagtgctttgctagtgtgaccacgctcccctggacaacgcgccaagca

SEQ ID NO: 55848 - DNA, 80 bp, synthetic construct
  source 1..80: mol_type = other DNA
tctaacaccttccttggcgccattcaccttggtccacgcatcaacccctacaccgcacatctaagtgccatgtttgccgg

SEQ ID NO: 55849 - DNA, 80 bp, synthetic construct
  source 1..80: mol_type = other DNA
tgcggcacttcttctgcccacgcagattgagacacccaatggtgctgcacaaagagtggagatggctgcggcaacgggag

SEQ ID NO: 55850 - DNA, 80 bp, synthetic construct
  source 1..80: mol_type = other DNA
ggcagggtggggaggtagctttgaggcccgcatctcaatttctgggtctggcatgtttgctgggaggatcattgcttctg

SEQ ID NO: 55851 - DNA, 80 bp, synthetic construct
  source 1..80: mol_type = other DNA
caatggctcccagttgccaaccaatcaaaatggtggtcatgttggccaggatgttgacccgcctggcgcgactggtccga

SEQ ID NO: 55852 - DNA, 80 bp, synthetic construct
  source 1..80: mol_type = other DNA
ccttgcagaagagagagggtaggatatcatggatgggcatgtttaatccattcacaggaagaccaaccaaagacttgcaa

SEQ ID NO: 55853 - DNA, 80 bp, synthetic construct
  source 1..80: mol_type = other DNA
tgggcctacttttagtagtgataatcatcatcattgctcgcactggggtgcaacaggccctaaaaaagaaaaacaagtaa

SEQ ID NO: 55854 - DNA, 80 bp, synthetic construct
  source 1..80: mol_type = other DNA
ggtggggtggtggttttcaggtgagagtgactatatctggttctggcctgtttgctggtcgggcggtaactgccatcttg

SEQ ID NO: 55855 - DNA, 80 bp, synthetic construct
  source 1..80: mol_type = other DNA
gtttgctggttggggcggcagtttccaaatacgggtcaccctgtccggttccggactgtacgcaggccgagcagtagttg

SEQ ID NO: 55856 - DNA, 80 bp, synthetic construct
  source 1..80: mol_type = other DNA
agattcagttttccaagagttattaattcagcagatggcgcaactacatggttctttaatccaatcatcctaagaccaaa

SEQ ID NO: 55857 - DNA, 80 bp, synthetic construct
  source 1..80: mol_type = other DNA
aaagagaagcatggaagggtggtgcctcatctttcttgggcttcttgggacagtaatacaggcattaccgagaacagttt

SEQ ID NO: 55858 - DNA, 80 bp, synthetic construct
  source 1..80: mol_type = other DNA
cctttgagtgcagtaactgacataaaagttgagagttcatgcaattttgatctgcatatgacaacagtaactcagaagag

SEQ ID NO: 55859 - DNA, 80 bp, synthetic construct
  source 1..80: mol_type = other DNA
tttcacccaggtagaatggaaaaagaaaggtgatactgctgataatacaaatgcagcatccagcacctttgagactcatt

SEQ ID NO: 55860 - DNA, 80 bp, synthetic construct
  source 1..80: mol_type = other DNA
caaagtcaggtaacctaagaggctcttgtgtcctaacaccagatctatatgacactttcaaacgtgtgaagaagactgtg

SEQ ID NO: 55861 - DNA, 80 bp, synthetic construct
  source 1..80: mol_type = other DNA
atgagttgaagatggaatgccctcatacagttggattgggacaaggctatgttattgggtcagtggacctggcattcatc

SEQ ID NO: 55862 - DNA, 80 bp, synthetic construct
  source 1..80: mol_type = other DNA
tgcacacctgagtgcaatgtttgctggttgggggggaggctttcaggtgcgggttacaatctcaggtgccggactctttg

SEQ ID NO: 55863 - DNA, 80 bp, synthetic construct
  source 1..80: mol_type = other DNA
tgctggttggggtggaggctttcaggtgcgggttacaatctcaggtgccggactctttgctgagcgggccatcactgcta

SEQ ID NO: 55864 - DNA, 80 bp, synthetic construct
  source 1..80: mol_type = other DNA
atacgtacgagaactcagcaaattccgtaggtttacatctatgctccataatggcctccctaacaataaattgaaaaact

SEQ ID NO: 55865 - DNA, 80 bp, synthetic construct
  source 1..80: mol_type = other DNA
gctggggtggcagtttccaaattcgagttaccctatctggctctgggctgtatgcaggccgtgcagtggtcgcagtgctg

SEQ ID NO: 55866 - DNA, 80 bp, synthetic construct
  source 1..80: mol_type = other DNA
accaagcgcagcacttctcctgcctacgcagattgagacacccaatggagctgcgcaaagggtggagatggctgcagcaa

SEQ ID NO: 55867 - DNA, 80 bp, synthetic construct
  source 1..80: mol_type = other DNA
gagggtgtgtcccgaccagagggccccagggccaataacaatgaaaacgtgcacctcgcatcaccacaagacacaattgg

SEQ ID NO: 55868 - DNA, 80 bp, synthetic construct
  source 1..80: mol_type = other DNA
cgggagccattagcaataatgtccccatgtgcgtgagggagtgctttgctagtgtaaccacgctcccctggacaacgcgc

SEQ ID NO: 55869 - DNA, 80 bp, synthetic construct
  source 1..80: mol_type = other DNA
caagcgtccaacaccttccttggcgccattcatcttggtccacgcattaatccctacaccgcacatctgagtgccatgtt

SEQ ID NO: 55870 - DNA, 80 bp, synthetic construct
  source 1..80: mol_type = other DNA
gctggggtgggagtttccagatacgagtcaccctttctggttctggcctgtacgcaggccgagcggtggtagctgtacta

SEQ ID NO: 55871 - DNA, 80 bp, synthetic construct
  source 1..80: mol_type = other DNA
gccaagcgcggcacttctgctgcccacgcagattgagacacccaatggtgctgctcaaagagtggagatggctgcggcaa

SEQ ID NO: 55872 - DNA, 80 bp, synthetic construct
  source 1..80: mol_type = other DNA
gagggtgtaccccgtccagagggccctaaggccaattctaatgaaaatgtgcctctagcatcatcacaggacacaattgg

SEQ ID NO: 55873 - DNA, 80 bp, synthetic construct
  source 1..80: mol_type = other DNA
gagggcaatggctgccagttgccaaccaatcaaaattgtggccatgttggccaggatgttgacccgcctggcgcgaatgg

SEQ ID NO: 55874 - DNA, 80 bp, synthetic construct
  source 1..80: mol_type = other DNA
tccgaccacatcccatgttgttgtgtctaatccagaacaacccaatgggcccgcacagcgcctggaaatggctgttgcta

SEQ ID NO: 55875 - DNA, 80 bp, synthetic construct
  source 1..80: mol_type = other DNA
gatggggaggtagttttgaagcccgcatctcaatttctgggtctggcatgtttgctgggaggatcattgcttctgtcata

SEQ ID NO: 55876 - DNA, 80 bp, synthetic construct
  source 1..80: mol_type = other DNA
ctctgggtatacatttaaaccctaacaaaacaaagagatggggttattccctaaatttcatgggttacgtaattggcaag

SEQ ID NO: 55877 - DNA, 80 bp, synthetic construct
  source 1..80: mol_type = other DNA
aaaggatggccaacaggatcagtgtactttaaagaatatacagacatagcggccttttcagttgacccacaattttactg

SEQ ID NO: 55878 - DNA, 80 bp, synthetic construct
  source 1..80: mol_type = other DNA
aatggttgtgcaatcccatggacataacattgtattattaccaacaaactgatgaagcaaataaatggatttcaatgggt

SEQ ID NO: 55879 - DNA, 80 bp, synthetic construct
  source 1..80: mol_type = other DNA
agttaaagtttgtccattaaatacacatacccttggtattggatgctcaccaactaacacaaacacttttgaaacggttt

SEQ ID NO: 55880 - DNA, 80 bp, synthetic construct
  source 1..80: mol_type = other DNA
cggtttcgacaacggagaagttagtgattacagatgttgtagatggtgtcaaccataaattaaacgtcacaacaacaaca

SEQ ID NO: 55881 - DNA, 80 bp, synthetic construct
  source 1..80: mol_type = other DNA
tgattatcatatagttttaatgaaatatgattctaccaaaaaattggatatgtcagaaatggctgatcttatagggaacg

SEQ ID NO: 55882 - DNA, 80 bp, synthetic construct
  source 1..80: mol_type = other DNA
gttggcattaacatggacagttaccaggtggaggtgcttaacgaatcccttaagggcggtgtcgtgtactgcctggacta

SEQ ID NO: 55883 - DNA, 80 bp, synthetic construct
  source 1..80: mol_type = other DNA
cagctgcgtccttggcaatccttgagcggctgtctgaagcaacaccaataacaacatcggccgtagagttgctctcatca

SEQ ID NO: 55884 - DNA, 80 bp, synthetic construct
  source 1..80: mol_type = other DNA
ccagcacgtggccacttgaatgacatcatctttgtaacaaagtctggacttccctcgggcatgccattcaccagtgttgt

SEQ ID NO: 55885 - DNA, 80 bp, synthetic construct
  source 1..80: mol_type = other DNA
tgaacaacatggggcgccttatactggtaatgtgtttcaggtggaaactgttcacacatatggtgatgactgcatttact

SEQ ID NO: 55886 - DNA, 80 bp, synthetic construct
  source 1..80: mol_type = other DNA
atggggaggcagtttccaggttcgcgtcacactctctggctctgggctctatgcggtgcgtgctgttgtggctgtcctac

SEQ ID NO: 55887 - DNA, 80 bp, synthetic construct
  source 1..80: mol_type = other DNA
gcagcaaacacctttcttggtgccatacatctgggcccacgcattaacccctacactgcacacctgagtgcaatgtttgc

SEQ ID NO: 55888 - DNA, 80 bp, synthetic construct
  source 1..80: mol_type = other DNA
tggctgggagggaggctttcaggtgcgggttacaatctcaggttccggactctttgctggtagggccattactgctatcc

SEQ ID NO: 55889 - DNA, 80 bp, synthetic construct
  source 1..80: mol_type = other DNA
ttagcatgaaggcagaagagattacacctggtagatatagaacagcagtctgtgggctctaccctgcacagattaaggca

SEQ ID NO: 55890 - DNA, 80 bp, synthetic construct
  source 1..80: mol_type = other DNA
tgattgaagatattgagtcaccatcatcaatatgggtttttgctggagcaccagaccgttgtccaccaacatgcttgtaa

SEQ ID NO: 55891 - DNA, 80 bp, synthetic construct
  source 1..80: mol_type = other DNA
tggggaggcagtttccaggttcgtgtcacactctctggctcaggactctttgcgggacgtgctgtcgtggctgttttacc

SEQ ID NO: 55892 - DNA, 80 bp, synthetic construct
  source 1..80: mol_type = other DNA
gttggggcggcagtttccaaatacgggtcaccctgtctggttccgggctgtatgcaggccgagcagtagttgcagtgcta

SEQ ID NO: 55893 - DNA, 80 bp, synthetic construct
  source 1..80: mol_type = other DNA
accagtcttgatcctcagctaatttcgtagattcacttccatgctgcataatggtttacctaatgacaaacttaaaaatt

SEQ ID NO: 55894 - DNA, 80 bp, synthetic construct
  source 1..80: mol_type = other DNA
gtgtaattgatgccctaaaacatgtttataagacagacttttttatgtcaagaaaactaagaaactatattgatggtatg

SEQ ID NO: 55895 - DNA, 80 bp, synthetic construct
  source 1..80: mol_type = other DNA
tacctctcatccttaaagccttatatatgctctcaacaagaggaaggcagacagtaaaggaaaacaaagggacaagaatc

SEQ ID NO: 55896 - DNA, 80 bp, synthetic construct
  source 1..80: mol_type = other DNA
tagcttgtgggctatttcctgcacagattaaggctaggaatatcatcagtccagtcatgggcgtaataggctttggattc

SEQ ID NO: 55897 - DNA, 80 bp, synthetic construct
  source 1..80: mol_type = other DNA
ctatcgcactttaccagttgattacacctccaaggttgtagccatgtataaagatgtctttggaatgtgggttaagccag

SEQ ID NO: 55898 - DNA, 80 bp, synthetic construct
  source 1..80: mol_type = other DNA
ccagtcagtgaactcagcaagttcagtcggtttacatgctatgctcgcataatggcgctccctaacaataaaatgaaaaa

SEQ ID NO: 55899 - DNA, 80 bp, synthetic construct
  source 1..80: mol_type = other DNA
atattaaactttaaaaaaatttttttcctgacgggcaccacggggaagtgaaaggaaactggtaaaaagggaatttaaaa

SEQ ID NO: 55900 - DNA, 80 bp, synthetic construct
  source 1..80: mol_type = other DNA
ggttaaacaaaagtggaaaaaattatttcccgagaccgacagcctctttgagtttgcccacccctctgaggaggtcccat

SEQ ID NO: 55901 - DNA, 80 bp, synthetic construct
  source 1..80: mol_type = other DNA
accgacagcctctttgagtttgcccacccctctgaggaggtcccatatatttatggatagttgtaccccgtagaggacaa

SEQ ID NO: 55902 - DNA, 80 bp, synthetic construct
  source 1..80: mol_type = other DNA
ctgtgttattgatgcacttaaacaagtttataagacagatttctttatgtcaagaaagctaagaaattacattgataata

SEQ ID NO: 55903 - DNA, 80 bp, synthetic construct
  source 1..80: mol_type = other DNA
tggagatataactcctttttttaaagaagttattgaagaagtagaaggagaggaaaatgccgcctaaaagaaagaatgtt

SEQ ID NO: 55904 - DNA, 80 bp, synthetic construct
  source 1..80: mol_type = other DNA
aaatggtatggctacagtgatcccataacagtaacaaatactcctggtattattcagctgcccacttatagtacagctaa

SEQ ID NO: 55905 - DNA, 80 bp, synthetic construct
  source 1..80: mol_type = other DNA
ttagtgtttgagatggagggcaatggctcctctggccagggcaacctgccacaatcccataattctaatgcttcatctgc

SEQ ID NO: 55906 - DNA, 80 bp, synthetic construct
  source 1..80: mol_type = other DNA
catcttgctcaaatgtttgccggctggggcggcgcaatggacatcagagtcacggtctcaggctcgggtatatttgcgtg

SEQ ID NO: 55907 - DNA, 80 bp, synthetic construct
  source 1..80: mol_type = other DNA
ttagccgtgatttatatatcagctcagataggttcaaagatttatttcctacattagtagttgatatcaattttaaccaa

SEQ ID NO: 55908 - DNA, 80 bp, synthetic construct
  source 1..80: mol_type = other DNA
atattgatgtggacttattaatggcaagacatgattattttgggaaagaactttgcaaatcgttaaatatagaatacagg

SEQ ID NO: 55909 - DNA, 80 bp, synthetic construct
  source 1..80: mol_type = other DNA
agatataaagccagatatagaccccttgacattagaaattccacatataaccccagataattatctatacttagacaacg

SEQ ID NO: 55910 - DNA, 80 bp, synthetic construct
  source 1..80: mol_type = other DNA
ttagtcgtgatttacatattagctcagacagatttaaggatttatttcccacactagtagtagatatcaattttaatcaa

SEQ ID NO: 55911 - DNA, 80 bp, synthetic construct
  source 1..80: mol_type = other DNA
atattgacgtagacctactgatggcaagacatgactacttcgggagagagttgtgtaaatcattgaacatagaatatagg

SEQ ID NO: 55912 - DNA, 80 bp, synthetic construct
  source 1..80: mol_type = other DNA
ttagccgtgatttgtatattagttcagatagatttaaagatttgttcccaacattagtggttgatattaattttaaccaa

SEQ ID NO: 55913 - DNA, 80 bp, synthetic construct
  source 1..80: mol_type = other DNA
ttagtcgcgatctatatatcagttcagataggtttaaggatttatttcctacattagtagttgacattaacttcaaccaa

SEQ ID NO: 55914 - DNA, 80 bp, synthetic construct
  source 1..80: mol_type = other DNA
gagacgccagttggagatgattgataaattgactacacgtgaaattgaacaggttgaattactgaagcgtatctacgaca

SEQ ID NO: 55915 - DNA, 80 bp, synthetic construct
  source 1..80: mol_type = other DNA
tgctggttggggggggggctttcaggggcgggttacaatctcaggttccggactctttgctggtagtgccattactgtta

SEQ ID NO: 55916 - DNA, 80 bp, synthetic construct
  source 1..80: mol_type = other DNA
gggggaggtttccaggtgcgggttacaatctcaggttccggactctttgctggtagggccattactgctatcctgccacc

SEQ ID NO: 55917 - DNA, 80 bp, synthetic construct
  source 1..80: mol_type = other DNA
gattggactcgatttgatggtacgataccacctactcttttgatgcatatcaaaaaattacggttctcgcttatgggtga

SEQ ID NO: 55918 - DNA, 80 bp, synthetic construct
  source 1..80: mol_type = other DNA
aatggctccccacgaggaggtaaccagcctcaatcccacaatggtggcacttcacctgctcaggctgcaccgcctggcac

SEQ ID NO: 55919 - DNA, 80 bp, synthetic construct
  source 1..80: mol_type = other DNA
tggtgtattgggtggacaggaagaagtatcaggccttattgaacaggatgggccttcctgaagactgggtggagcagata

SEQ ID NO: 55920 - DNA, 80 bp, synthetic construct
  source 1..80: mol_type = other DNA
aactaagtggtcacctggggacaactctgcaaagttcaggagattcacagcagcagtgcataatggcctccctgatgaga

SEQ ID NO: 55921 - DNA, 80 bp, synthetic construct
  source 1..80: mol_type = other DNA
gatgctacaaagtggtcacctggtgataattcagcaaaatttagaaggttcacacaagcactacatgatggtttaaggga

SEQ ID NO: 55922 - DNA, 80 bp, synthetic construct
  source 1..80: mol_type = other DNA
gatatatagatgggatggaagaactgtctgagtttgtggatgattttttgtcgttcttcccaaacaaagtctctgctgct

SEQ ID NO: 55923 - DNA, 80 bp, synthetic construct
  source 1..80: mol_type = other DNA
tgacaaattgaaaagatgtgttgtagatgcattgaggaacatttatgagactgacttctttatgtcacggaaactacata

SEQ ID NO: 55924 - DNA, 80 bp, synthetic construct
  source 1..80: mol_type = other DNA
gtttggctagcggttagctccttttaatgtatggtattgaatataccacaattctaatcttcttgacatcgattacattg

SEQ ID NO: 55925 - DNA, 80 bp, synthetic construct
  source 1..80: mol_type = other DNA
caccatgataaatgcgcagaactatggagtgaatttgccaattacaggttcaatggatactgcgtacgcaaactctacgc

SEQ ID NO: 55926 - DNA, 80 bp, synthetic construct
  source 1..80: mol_type = other DNA
aaagtgagccatttttgacatcaactctttgtttgtattatcctgttgaggcatcaaacgaaatagctgataccgaatgg

SEQ ID NO: 55927 - DNA, 80 bp, synthetic construct
  source 1..80: mol_type = other DNA
aaggataccttatcacaattgttcttgacaaaaggatggccaacaggatcggtgtactttaaagaatatactgatatagc

SEQ ID NO: 55928 - DNA, 80 bp, synthetic construct
  source 1..80: mol_type = other DNA
tcacaattgttcttgacaaaaggatggccaacaggatcggtgtactttaaagaatatactgatatagcggccttttcagt

SEQ ID NO: 55929 - DNA, 80 bp, synthetic construct
  source 1..80: mol_type = other DNA
ttgaattatatcttaaaatcaataacgagaataatggactatataatttacagatttctgcttatagtagtggtcttggc

SEQ ID NO: 55930 - DNA, 80 bp, synthetic construct
  source 1..80: mol_type = other DNA
atcatcctgggctttcggaaaattcctatgggagtggggctcagcccgtttctcttggctcagtttactagtgcaatttg

SEQ ID NO: 55931 - DNA, 80 bp, synthetic construct
  source 1..80: mol_type = other DNA
gtccaagcaatgagattgatacaagctgatattaatttcgttcgagaacatctcataaagaatgatgagagaggggcact

SEQ ID NO: 55932 - DNA, 80 bp, synthetic construct
  source 1..80: mol_type = other DNA
atatcccaaattataggcctcaacctttatgtcaaccagcattagaaagtcttgttaattattgcaagaattggcttgga

SEQ ID NO: 55933 - DNA, 80 bp, synthetic construct
  source 1..80: mol_type = other DNA
cttttatgtcagataagtttacaagcaccatatttaccatcgacaattgcgtctgatcagtatgatacacagttagcttg

SEQ ID NO: 55934 - DNA, 80 bp, synthetic construct
  source 1..80: mol_type = other DNA
ctgtaaaaactggcttgggattgatcatgcttttgcattcaaagaagtgactggacaacgtgtttttaatgtatttaaag

SEQ ID NO: 55935 - DNA, 80 bp, synthetic construct
  source 1..80: mol_type = other DNA
gttcaggcaatgagattgatacaagcagatattaattttgtaagagaacacctaataaggaatgatgaaagaggagcatt

SEQ ID NO: 55936 - DNA, 80 bp, synthetic construct
  source 1..80: mol_type = other DNA
aaagatgaagaagagttacatgcatcaaagtatggtcattctaggaagcctagaaatttccttttatgtcaaataagtct

SEQ ID NO: 55937 - DNA, 80 bp, synthetic construct
  source 1..80: mol_type = other DNA
cttttatgtcaaataagtctacaagcaccctatctaccatcaacaattgcaggcgatcgagatgatacacgactggcttg

SEQ ID NO: 55938 - DNA, 80 bp, synthetic construct
  source 1..80: mol_type = other DNA
gtacggacatttgacattccaaattatagacctcaacaattatgtcagccagttttggacaacttagtggactactgtaa

SEQ ID NO: 55939 - DNA, 80 bp, synthetic construct
  source 1..80: mol_type = other DNA
cttttatgtcaaataagtctacaagcaccctatctaccatcaacaattgcttctgatcaatatgatacacgattagcttg

SEQ ID NO: 55940 - DNA, 80 bp, synthetic construct
  source 1..80: mol_type = other DNA
atggagggcaatggctcccagttgccaaccaatcaaaatggtggtcgtgttggccaggatgttgacccgcctggcgcgac

SEQ ID NO: 55941 - DNA, 80 bp, synthetic construct
  source 1..80: mol_type = other DNA
gttgctgttgggcattaacatggactctgtccaaatgcaagtgatgaatgactccttgaaaggaggcgttctctactgtc

SEQ ID NO: 55942 - DNA, 80 bp, synthetic construct
  source 1..80: mol_type = other DNA
gagagccacaatgtcccatacactgggaatgtcttccaggtggagaccattcacacgtatggtgatgactgcatctactg

SEQ ID NO: 55943 - DNA, 80 bp, synthetic construct
  source 1..80: mol_type = other DNA
aacatggactctgttcaaatgcaagttttaaatgattctttgaaagggagcgtgttgtactgtttggactattcaaagtg

SEQ ID NO: 55944 - DNA, 80 bp, synthetic construct
  source 1..80: mol_type = other DNA
ccagcgctattgaggcattgtcatccccagcagttgggtacatcaatgacatcaagtttgttacccgtgggggcttacct

SEQ ID NO: 55945 - DNA, 80 bp, synthetic construct
  source 1..80: mol_type = other DNA
tctgggatgccatttacctctgttatcaactcactgaaccacatggtgtacattgcggctgccatattgctcgcatatga

SEQ ID NO: 55946 - DNA, 80 bp, synthetic construct
  source 1..80: mol_type = other DNA
ggagcaccatgtgccatacagtggcaatgtattccagttagagaccatccacacttatggggatgactgtatatatggct

SEQ ID NO: 55947 - DNA, 80 bp, synthetic construct
  source 1..80: mol_type = other DNA
catacagtggcaatgtattccagttagagaccatccacacttatggggatgactgtatatatggcttctgcccagctact

SEQ ID NO: 55948 - DNA, 80 bp, synthetic construct
  source 1..80: mol_type = other DNA
ggattcaacacaacatccagcagtgacagccacctcattggcaattttggaaagatttgctgaaggtcacccactggtgt

SEQ ID NO: 55949 - DNA, 80 bp, synthetic construct
  source 1..80: mol_type = other DNA
caacaggatcagtctattttaaagagtattcaagtattgttgatttttctgttgatccacaattatattgtgattataac

SEQ ID NO: 55950 - DNA, 80 bp, synthetic construct
  source 1..80: mol_type = other DNA
accaaattagtgtttgaaatggagggcttgggccagccacagtcccaaagggaccaacaggttatggaacaggttgtcac

SEQ ID NO: 55951 - DNA, 80 bp, synthetic construct
  source 1..80: mol_type = other DNA
gccaccaaatggtcaccaggtgacaactccgcaaaatttaggaggtttacccaaacattgcatgatggtttacgagatga

SEQ ID NO: 55952 - DNA, 80 bp, synthetic construct
  source 1..80: mol_type = other DNA
ggcgtgaccggcccgaaaccggcgatttgccagcgtgcgaccgcgaccctgggcaccgtgggcagcaacaccagcggcac

SEQ ID NO: 55953 - DNA, 80 bp, synthetic construct
  source 1..80: mol_type = other DNA
tgaccagcatggtgggcgcgagcgcggtgaacggcaccgtgctgcgtgtgagcctgaacccgaccagcaccccgagcagc

SEQ ID NO: 55954 - DNA, 80 bp, synthetic construct
  source 1..80: mol_type = other DNA
accagctggagcggcctgggcgcgcgtaaacatctggatgtgaccgtgggcaaaaacgcgacctttaaactgaaaccgag

SEQ ID NO: 55955 - DNA, 80 bp, synthetic construct
  source 1..80: mol_type = other DNA
ccgtgggcaaaaacgcgacctttaaactgaaaccgagcgatctgggcggcccgcgtgatggctggtggctgaccaacacc

SEQ ID NO: 55956 - DNA, 80 bp, synthetic construct
  source 1..80: mol_type = other DNA
caccgaaattgaagcgtgcattctgctgaacccggtgctggtgaaagatgcgaccggcagcacccagtttggcccggtgc

SEQ ID NO: 55957 - DNA, 80 bp, synthetic construct
  source 1..80: mol_type = other DNA
tgagaaaggagtgggaactagaacgggagaggaaggacgcaatggcagatgatttggcgaaagaaacagcaaaaaggaga

SEQ ID NO: 55958 - DNA, 80 bp, synthetic construct
  source 1..80: mol_type = other DNA
gcagatgaaaatgagatcgaggcaggaatacagtgaggaccaatttttgtgctataaatcagaaagtggctctggttcat

SEQ ID NO: 55959 - DNA, 80 bp, synthetic construct
  source 1..80: mol_type = other DNA
ctgtcaagctaaagaagttcaaggttgagtcatgcaagggtgtcactacatcatcagcctctaagtgctctggcgatgag

SEQ ID NO: 55960 - DNA, 80 bp, synthetic construct
  source 1..80: mol_type = other DNA
agtgaatgtcaacggagtgtgggttgtgcctaggtgtattggctatgaggaggttctggtcaaaaggacatctctcaagg

SEQ ID NO: 55961 - DNA, 80 bp, synthetic construct
  source 1..80: mol_type = other DNA
ctggaccaccctatacacacccatctgcttaagctcaagaagatgtcacttgatgggagaatgtgtctctgatcgttgcc

SEQ ID NO: 55962 - DNA, 80 bp, synthetic construct
  source 1..80: mol_type = other DNA
gcagtgcatgtgtatgactctgttaggcgggtctgagtctcaggaagagtatgagaagcaaaacacgttaatggcagttt

SEQ ID NO: 55963 - DNA, 80 bp, synthetic construct
  source 1..80: mol_type = other DNA
ctgttaggcgggtctgagtctcaggaagagtatgagaagcaaaacacgttaatggcagtttggacatattttgttttgtt

SEQ ID NO: 55964 - DNA, 80 bp, synthetic construct
  source 1..80: mol_type = other DNA
tagactggaagacgagaggaagtctaatgcagaagagacagcaagagagagggctaggatgagggatattgaggaagaat

SEQ ID NO: 55965 - DNA, 80 bp, synthetic construct
  source 1..80: mol_type = other DNA
agatgagaacatgagaagccgtgtgcataaaccaagcacaactagagccccagcgcctacaatcatcaccactctactca

SEQ ID NO: 55966 - DNA, 80 bp, synthetic construct
  source 1..80: mol_type = other DNA
actctaagcgactttgctgagtcaacctgcacattggcctatggatcagaatgcaaatcttgggagcaccttctgaatga

SEQ ID NO: 55967 - DNA, 80 bp, synthetic construct
  source 1..80: mol_type = other DNA
gtccatatactctactgaggagcagcttcccatggtcacacacctttttgagatagctcctgctgaactcatgcatattg

SEQ ID NO: 55968 - DNA, 80 bp, synthetic construct
  source 1..80: mol_type = other DNA
gcccctttcgagattcgtataatgctgtcaactactttattcattattagcacttgcagttctgatcttaaaaccttagg

SEQ ID NO: 55969 - DNA, 80 bp, synthetic construct
  source 1..80: mol_type = other DNA
ggtttctcagggtcaccttcaccaaggaaagtgtccacctgaggcctctggtcttctagctcaataatctttttgtaaag

SEQ ID NO: 55970 - DNA, 80 bp, synthetic construct
  source 1..80: mol_type = other DNA
ccagtagatagacaatataatgtatttggtgaaaataaacaatttaatgtaagaaatgattcagataaatggaagttttt

SEQ ID NO: 55971 - DNA, 80 bp, synthetic construct
  source 1..80: mol_type = other DNA
atgaggaggctaagatacatcttgaaactgtagaatgggcaagaaaatttgaggctaaagagcggaaatatggggatata

SEQ ID NO: 55972 - DNA, 80 bp, synthetic construct
  source 1..80: mol_type = other DNA
ggaatgagcaccctcaaagaagtgcaggacaacatcactcttcacgaacaacagctcgtgactgccagacaaaaactcaa

SEQ ID NO: 55973 - DNA, 80 bp, synthetic construct
  source 1..80: mol_type = other DNA
aagcgggcagacagctgattggaaatctattgggctttacatcttgagttttgcattaccaattatccttaaggccctgt

SEQ ID NO: 55974 - DNA, 80 bp, synthetic construct
  source 1..80: mol_type = other DNA
ggaatgagcaccctcaaagaagtgcaagacaacgtcactctccacgaacaacaactcgtgactgccaggcagaagcttaa

SEQ ID NO: 55975 - DNA, 80 bp, synthetic construct
  source 1..80: mol_type = other DNA
aagcgggcaaactgctgactggaaatctattggactttacattttaagttttgcattaccgattatcctcaaggctttgt

SEQ ID NO: 55976 - DNA, 80 bp, synthetic construct
  source 1..80: mol_type = other DNA
aagtgggcaaacagctgattggaaatccatcggactctacattctaagctttgcattaccgattatccttaaagccttgt

SEQ ID NO: 55977 - DNA, 80 bp, synthetic construct
  source 1..80: mol_type = other DNA
agtcgaaggtcagctgacgccctgctcaggctgcaagccatggcaggaatctcggaagagcaaggctcagacacggacac

SEQ ID NO: 55978 - DNA, 80 bp, synthetic construct
  source 1..80: mol_type = other DNA
ggtgtcacaggaccaaaacctgcaatttgtcaaacagccaccgcaacacttggaacaattggatcaaataccacaggagc

SEQ ID NO: 55979 - DNA, 80 bp, synthetic construct
  source 1..80: mol_type = other DNA
ggtgtcacaggaccaaaacctgcaatttgtcagagagcaacagcaacccttgggacagtcgggtcaaacaccagtggcac

SEQ ID NO: 55980 - DNA, 80 bp, synthetic construct
  source 1..80: mol_type = other DNA
caattggcctgacttctggcacttgcaaagtggggtcactagagaacagggactgcgggaaagacataatgtccaactac

SEQ ID NO: 55981 - DNA, 80 bp, synthetic construct
  source 1..80: mol_type = other DNA
gttgctgaggtgcactctaacctgcacgggctgggagctatgatgcacaactacggtgatgacaagagggttgagatcct

SEQ ID NO: 55982 - DNA, 80 bp, synthetic construct
  source 1..80: mol_type = other DNA
gcgagactatttttcactttatcaatgaagaagagtccatcaatgtcatcaataaggtgagcccggaagtgagcaactac

SEQ ID NO: 55983 - DNA, 80 bp, synthetic construct
  source 1..80: mol_type = other DNA
tgcaccgttctccatttctcaaggcctgttatttctattgagggaacatatgactgcgggctaagcaagagaccaatggt

SEQ ID NO: 55984 - DNA, 80 bp, synthetic construct
  source 1..80: mol_type = other DNA
taggcaggtctgaatcttagggaaagtatggaaagcaaaacaagttgatggcagtttggacatattttgttttgttcttt

SEQ ID NO: 55985 - DNA, 80 bp, synthetic construct
  source 1..80: mol_type = other DNA
atggagggcaatggctcccgacttgggaactcacaaacccaatcccatatggatacttctaacactgtgcagagtgcacc

SEQ ID NO: 55986 - DNA, 80 bp, synthetic construct
  source 1..80: mol_type = other DNA
gccgggcacgacaggccctgcggacgcaccccttgtacctgttaatccagaacagcccaatctccctgcccaacgcctgg

SEQ ID NO: 55987 - DNA, 80 bp, synthetic construct
  source 1..80: mol_type = other DNA
gaatcccgagtgggcaccattgaaggataacaggattccttcatacggggtcttgtatgttgatcggagtctgacagttg

SEQ ID NO: 55988 - DNA, 80 bp, synthetic construct
  source 1..80: mol_type = other DNA
tataatattagttaaagattcactactatttgttggtgcaacaggaaccgattttgctgcatgtatagatgagaaaactg

SEQ ID NO: 55989 - DNA, 80 bp, synthetic construct
  source 1..80: mol_type = other DNA
taactgcaggcctcagaagtcatcgggtggtcatatcaatgttattgaggttggtgatgacctatcgctccatactgaat

SEQ ID NO: 55990 - DNA, 80 bp, synthetic construct
  source 1..80: mol_type = other DNA
gaagaatatgaagtggtggagacagagcttttgaatgcactgaagaagtctaaatgctgggtcaaagaaatggatgatgt

SEQ ID NO: 55991 - DNA, 80 bp, synthetic construct
  source 1..80: mol_type = other DNA
tggcttcaaaataaattcaagagaaggcaattatttaatggatgtaatagggtatgttaaaagtgcatcctactcagcaa

SEQ ID NO: 55992 - DNA, 80 bp, synthetic construct
  source 1..80: mol_type = other DNA
cgagatcaaggttggacagattaatgatcttggtgtttactctaaaggatgtggaaatgtccaaaaggttaatggaacta

SEQ ID NO: 55993 - DNA, 80 bp, synthetic construct
  source 1..80: mol_type = other DNA
gcaacatagaaatcaatgcagaagggacatgtgctggatgtataaattgctttgagaatattcactgtgaatttactata

SEQ ID NO: 55994 - DNA, 80 bp, synthetic construct
  source 1..80: mol_type = other DNA
gctcttacatagggatattttatacaggtatattatctataatttgcctcctcattgtcatttatactgtactgcctatc

SEQ ID NO: 55995 - DNA, 80 bp, synthetic construct
  source 1..80: mol_type = other DNA
aggtatattatctataatttgcctcctcattgtcatttatactgtactgcctatctgcttcaaattaagagacactttaa

SEQ ID NO: 55996 - DNA, 80 bp, synthetic construct
  source 1..80: mol_type = other DNA
atacaattccatgcttgtttcaatcagcatatgtcatgcgtacgattcttgcatagaacaatacttccaggttcaatagc

SEQ ID NO: 55997 - DNA, 80 bp, synthetic construct
  source 1..80: mol_type = other DNA
acacaaagaaggtgcttatgtttattgcaaagttgttattaatttcctgtttagtgcagcaggcctatctgaaatataca

SEQ ID NO: 55998 - DNA, 80 bp, synthetic construct
  source 1..80: mol_type = other DNA
tttacaggaacgggttcaaagttttcaggtgtgtggcatggaatcataggattagactagagatgacgacacactcccga

SEQ ID NO: 55999 - DNA, 80 bp, synthetic construct
  source 1..80: mol_type = other DNA
aagttccctatggttttgatggccatgagcacacagcccactgactggggatccattggtttgattcttgactcagaagg

SEQ ID NO: 56000 - DNA, 80 bp, synthetic construct
  source 1..80: mol_type = other DNA
atgattatattattccaaagggcagagacaatcttcttatttatttagtccggaagctcaatgatccaagtattgttaca

SEQ ID NO: 56001 - DNA, 80 bp, synthetic construct
  source 1..80: mol_type = other DNA
gatgctacaaagtggtcaccaggtgataactctgctaagtttagaagattcactcaagcattgcatgatggcctgcggga

SEQ ID NO: 56002 - DNA, 80 bp, synthetic construct
  source 1..80: mol_type = other DNA
tttctttcattctttccaaacaaggtatcagctgccatcaaggggaattggctacaagggaatttgaacaaatgttcttc

SEQ ID NO: 56003 - DNA, 80 bp, synthetic construct
  source 1..80: mol_type = other DNA
tttattcggagcagcagtatccctgttatttaggaaagtctggaatctcctctatccagaattagattgtttctttgaat

SEQ ID NO: 56004 - DNA, 80 bp, synthetic construct
  source 1..80: mol_type = other DNA
gaattagattgtttctttgaatttgcacaccattctgatgatgcattatttatttatggatatttagaacccacggatga

SEQ ID NO: 56005 - DNA, 80 bp, synthetic construct
  source 1..80: mol_type = other DNA
ataagagctctgcagtttgcaccatttctccttccacacattcatcgaatgcctgtgggagagaggctagtgtcattagg

SEQ ID NO: 56006 - DNA, 80 bp, synthetic construct
  source 1..80: mol_type = other DNA
aagaaatgttatagtaacatgtcagccttcttctacattaacctggcaggtcaaattactgtggttaagtgtgaaacaaa

SEQ ID NO: 56007 - DNA, 80 bp, synthetic construct
  source 1..80: mol_type = other DNA
ccacgtcctttctagtgattgtggaaattgcatctctaagagcttgagtggccaaaaggtatacaccccagtgcaagatg

SEQ ID NO: 56008 - DNA, 80 bp, synthetic construct
  source 1..80: mol_type = other DNA
tgttctgtcagaagggctggacacagtccatcccaagcacaagatattcaaaagacatctgttctattggtttgcacacc

SEQ ID NO: 56009 - DNA, 80 bp, synthetic construct
  source 1..80: mol_type = other DNA
ttgaagatacgacagggagggaatgtgattcctgcttatgggaatgtgggaagaataagctgattgtcaagactcatggt

SEQ ID NO: 56010 - DNA, 80 bp, synthetic construct
  source 1..80: mol_type = other DNA
cccaaagtggtttatgcaacagcatgcagccatggatcctgtaaaagtgtgatgcagaagccagcaacctttgtgtacct

SEQ ID NO: 56011 - DNA, 80 bp, synthetic construct
  source 1..80: mol_type = other DNA
acttagtagcacactgccctgcaagggactcatgtgatgtcagtgactgtctattctgcgttcacggactccttaattat

SEQ ID NO: 56012 - DNA, 80 bp, synthetic construct
  source 1..80: mol_type = other DNA
cagtgccacaccttgttttcagcattgctcatatcaactactgtgatgtcaattctcacattgctgctcttgcttgtgaa

SEQ ID NO: 56013 - DNA, 80 bp, synthetic construct
  source 1..80: mol_type = other DNA
tggttaaaagctggaaaagaagagtgggttcagcaatttctaggacaaacgacactattggttggcgtgaaaacaggcgg

SEQ ID NO: 56014 - DNA, 80 bp, synthetic construct
  source 1..80: mol_type = other DNA
catgctcaagacattgagagagcacagtacacaggaggggctccaggggccaaatattcattttatgtggttatgattct

SEQ ID NO: 56015 - DNA, 80 bp, synthetic construct
  source 1..80: mol_type = other DNA
aggattactgagtagtgcccagagttgctctgaaagtgtgatagcagactccaagatcatgcaatgcacaacctcaggga

SEQ ID NO: 56016 - DNA, 80 bp, synthetic construct
  source 1..80: mol_type = other DNA
gttccaccctttgcaaggcaagcgggacagtaatcatgagattgggacccataggctcagagtcttgtttgattctgaaa

SEQ ID NO: 56017 - DNA, 80 bp, synthetic construct
  source 1..80: mol_type = other DNA
gggctcaaggacagtgaaaagcagttcatatctatcaagaccatatcaagtgaactcacgtgccgagaaggagaatcttt

SEQ ID NO: 56018 - DNA, 80 bp, synthetic construct
  source 1..80: mol_type = other DNA
ggtggttcagttgacttctttggatggttgtctggattgacctcatggctcggaggtcctctcaaaacatttctgactat

SEQ ID NO: 56019 - DNA, 80 bp, synthetic construct
  source 1..80: mol_type = other DNA
tcttggattcctagctgtgggcttactgttggtggtgataattatcatcatcattcggactggaatgcaacaagctttga

SEQ ID NO: 56020 - DNA, 80 bp, synthetic construct
  source 1..80: mol_type = other DNA
agaagaagataaaataaaataatccatcttctttctattattctcatgcatctttcactcaggggttagggggggagtgg

SEQ ID NO: 56021 - DNA, 80 bp, synthetic construct
  source 1..80: mol_type = other DNA
ttctttctattattctcatgcatctttcactcaggggttagggggggagtgggcagtgcatgtgtatggctccgttaggc

SEQ ID NO: 56022 - DNA, 80 bp, synthetic construct
  source 1..80: mol_type = other DNA
gcagtgcatgtgtatggctccgttaggcaggcctgaatctcagggaaagtatgggaagcaaaacaagttgatggcagttt

SEQ ID NO: 56023 - DNA, 80 bp, synthetic construct
  source 1..80: mol_type = other DNA
gggaaagtatgggaagcaaaacaagttgatggcagtttggacatattttgttttgttctttaaagcaccggtctttgtgt

SEQ ID NO: 56024 - DNA, 80 bp, synthetic construct
  source 1..80: mol_type = other DNA
ttattaatgtggcaaagccattgagtgaaatagtcccaatgtcagtgattccaccaccagttgtgaagctccagccacct

SEQ ID NO: 56025 - DNA, 80 bp, synthetic construct
  source 1..80: mol_type = other DNA
gcagaaccatcctccaagaaacatgttccgtttgatgtacttttgtcagaagctgagaaggagctaaaccagacaaaaat

SEQ ID NO: 56026 - DNA, 80 bp, synthetic construct
  source 1..80: mol_type = other DNA
tagactggaagatgagagaaagtccaatgcagaagagacagcaaaggagagggctaggatgaaggagattgaggatgaat

SEQ ID NO: 56027 - DNA, 80 bp, synthetic construct
  source 1..80: mol_type = other DNA
tgagaagggagtgggagctggaacggaagaggaaggacgcaatggcagatgatttagcaaaagaaacagcaagaaggagg

SEQ ID NO: 56028 - DNA, 80 bp, synthetic construct
  source 1..80: mol_type = other DNA
gagatagataggaaggcccatgagcttgatagaatgcttaaaaagaaggagcgcgaaagcctgattgcaaaagagaaagc

SEQ ID NO: 56029 - DNA, 80 bp, synthetic construct
  source 1..80: mol_type = other DNA
agatgagaacatgagaagccatgtgcatgaaccaaacacgactagagccccagcacccacaattatcaccactctgctca

SEQ ID NO: 56030 - DNA, 80 bp, synthetic construct
  source 1..80: mol_type = other DNA
tggcaagtgcagccctagcgggacccctggagaacagggagacaaatcatttgctcaacaggccaggaaatggggcttac

SEQ ID NO: 56031 - DNA, 80 bp, synthetic construct
  source 1..80: mol_type = other DNA
aaggggcaaaggatcttgttaagaaattgttccactggctgatcactcctttatgctggctatcagtcttttgctgctgg

SEQ ID NO: 56032 - DNA, 80 bp, synthetic construct
  source 1..80: mol_type = other DNA
cccgtctatcggtctctgggtctggtgtctacgctggccgtatcattgcttctgtcgtaccacctggggttgacccctca

SEQ ID NO: 56033 - DNA, 80 bp, synthetic construct
  source 1..80: mol_type = other DNA
cagaactagatatgtcagagttagctgacttaatacttaatgagtggctttgtaatccaatggacataacgttgtattat

SEQ ID NO: 56034 - DNA, 80 bp, synthetic construct
  source 1..80: mol_type = other DNA
caacagctgagaaattggcgataacagatgttgtagatggagtaaattataaaataaatgtgacaacgactacctgtacc

SEQ ID NO: 56035 - DNA, 80 bp, synthetic construct
  source 1..80: mol_type = other DNA
attagaaactgtaaaaagttgggaccacgtgaaaatgtcgcagtcattcaagtaggtggatcaaatattttagatattac

SEQ ID NO: 56036 - DNA, 80 bp, synthetic construct
  source 1..80: mol_type = other DNA
agtaggtggatcaaatattttagatattacagcggatccaacaacggcaccacagacagaaaggatgatgagaataaatt

SEQ ID NO: 56037 - DNA, 80 bp, synthetic construct
  source 1..80: mol_type = other DNA
gatgctacaaagtggtcaccaggtgataattcagcaaagttcaggaggttcacacagacattacatgatgggttaagaga

SEQ ID NO: 56038 - DNA, 80 bp, synthetic construct
  source 1..80: mol_type = other DNA
atgagactgactttttcatgtcacgaaaattacatagatatattgatgggatggaagaactatcggaatttgttgatgac

SEQ ID NO: 56039 - DNA, 80 bp, synthetic construct
  source 1..80: mol_type = other DNA
tttttatcatttttcccgaataaagtatctgcagccattaaaggtaattggttacaaggtaatctgaataagtgttcatc

SEQ ID NO: 56040 - DNA, 80 bp, synthetic construct
  source 1..80: mol_type = other DNA
aggtgcgggtcacaatctcaggttccgggctctttgctggtcgggccatcactgctatcctgccaccaggggttgacccc

SEQ ID NO: 56041 - DNA, 80 bp, synthetic construct
  source 1..80: mol_type = other DNA
aattcgccctttctcaaagaaatcgttcccccttgtcaccaatcccaccttcaccttactaaggcaacagattttcttca

SEQ ID NO: 56042 - DNA, 80 bp, synthetic construct
  source 1..80: mol_type = other DNA
acaatcattactaccctgctcatggccagtgcagtaatggcaggacctttggagaacagggaaacaaaccacttactaaa

SEQ ID NO: 56043 - DNA, 80 bp, synthetic construct
  source 1..80: mol_type = other DNA
tttcaaggatgacagctcatatgaagacgtcaatggaattcggaaaccaaagcatctatacgtgtcaatgcctaatgccc

SEQ ID NO: 56044 - DNA, 80 bp, synthetic construct
  source 1..80: mol_type = other DNA
tggagggcaatgcacgccccgaggggcagaaccccgagcgcgcaaatgtgccactggcctccccacaggacaccattgga

SEQ ID NO: 56045 - DNA, 80 bp, synthetic construct
  source 1..80: mol_type = other DNA
cggagcaatcaccagcaatgttcctagttgcatcagggagtgctttgccagtgtcaccacgctcccctggaccacgcgcc

SEQ ID NO: 56046 - DNA, 80 bp, synthetic construct
  source 1..80: mol_type = other DNA
aagcagccaacacgttcttgggtgcaatccatcttggtccgaggatcaatccctacaccgcacacatgagtgccatgttt

SEQ ID NO: 56047 - DNA, 80 bp, synthetic construct
  source 1..80: mol_type = other DNA
tagttttcaggttcgtgtcacactctctggctcggggctctttgcggggcgtgctgttgtggctgttttgccaccaggtg

SEQ ID NO: 56048 - DNA, 80 bp, synthetic construct
  source 1..80: mol_type = other DNA
ttcgtgtcacactctctggctcggggctctttgcggggcgtgctgttgtggctgttttgccaccaggtgttgaccccaca

SEQ ID NO: 56049 - DNA, 80 bp, synthetic construct
  source 1..80: mol_type = other DNA
ccaagtgctgcgctcttgctcccaacccaaattgaaactccaaatgccactgcacagcgcgtagagctagcagctgcaac

SEQ ID NO: 56050 - DNA, 80 bp, synthetic construct
  source 1..80: mol_type = other DNA
cccgtgtttcgatctctgggtctggtgtgtttgctgggcgggtcgttgcttctgtcataccaccaggtgttgacccctca

SEQ ID NO: 56051 - DNA, 80 bp, synthetic construct
  source 1..80: mol_type = other DNA
ggactaatccctttactggcggaatggaacatcagctaattttcgtagattcacttccatgctgcataatggtttaccta

SEQ ID NO: 56052 - DNA, 80 bp, synthetic construct
  source 1..80: mol_type = other DNA
atgacaaacttaaaaattgtgtaattgatgccctaaaacatgtttataagacagacttttttatgtcaagaaaactaaga

SEQ ID NO: 56053 - DNA, 80 bp, synthetic construct
  source 1..80: mol_type = other DNA
tgctgatgcaaccaaatggtcacccggtgataattccgcaaaatttaggaggttcacagctatgctacacaatggcctgc

SEQ ID NO: 56054 - DNA, 80 bp, synthetic construct
  source 1..80: mol_type = other DNA
aggagttatcttgataatatggaatcacatgatcctcatattaaacaatttcttgatttcttccctgatggacaccatgg

SEQ ID NO: 56055 - DNA, 80 bp, synthetic construct
  source 1..80: mol_type = other DNA
tttaaacaaatttggaatagtttattcccagagctagattgctttttcgagtttgctcatcattctgacgatgctctttt

SEQ ID NO: 56056 - DNA, 80 bp, synthetic construct
  source 1..80: mol_type = other DNA
gagctagattgctttttcgagtttgctcatcattctgacgatgctctttttatttatggcaatttagagcctgttgatga

SEQ ID NO: 56057 - DNA, 80 bp, synthetic construct
  source 1..80: mol_type = other DNA
cgaacgataagttaaagaactgtgttattgatgccctaaaacaagtatataagacagacttctttatgtccagaaaatta

SEQ ID NO: 56058 - DNA, 80 bp, synthetic construct
  source 1..80: mol_type = other DNA
aattctcgccacctacgaagcgtggttcataggtggtgcaggcctggtgcaagatggccccagtgaagagaccaccaagt

SEQ ID NO: 56059 - DNA, 80 bp, synthetic construct
  source 1..80: mol_type = other DNA
gcgctgtccccagctctcaacccatataccgcacatctttcggcgatgtgggcagggtggggcggtacctttgaagccga

SEQ ID NO: 56060 - DNA, 80 bp, synthetic construct
  source 1..80: mol_type = other DNA
ggtatattgatgggatggaagaactatcggagtttgttgatgactttttatcatttttcccgaataaagtatctgcggcc

SEQ ID NO: 56061 - DNA, 80 bp, synthetic construct
  source 1..80: mol_type = other DNA
tgacaagttgaagaggtgtgttgtagatgctttgaggaatatttatgagactgacttttttatgtcacgaaaattacata

SEQ ID NO: 56062 - DNA, 80 bp, synthetic construct
  source 1..80: mol_type = other DNA
actttctctcattttttccaaacaaagtgtcagctgccattaagggtaattggctgcaaggtaacttaaataagtgttcc

SEQ ID NO: 56063 - DNA, 80 bp, synthetic construct
  source 1..80: mol_type = other DNA
tcattgtttggtgctgctgtatccctgttgttcagaaaggtttggaatctcctttatccggaattagattgtttctttga

SEQ ID NO: 56064 - DNA, 80 bp, synthetic construct
  source 1..80: mol_type = other DNA
tagattgtttctttgaattcgcacaccattctgatgatgcattattcatttatggatatctagaacccatcgatgacgga

SEQ ID NO: 56065 - DNA, 80 bp, synthetic construct
  source 1..80: mol_type = other DNA
gatgccactaagtggtcaccaggtgacaactctgcaaaattcaggagatttactcaagcattgcatgatggtttgcggga

SEQ ID NO: 56066 - DNA, 80 bp, synthetic construct
  source 1..80: mol_type = other DNA
tgacaaattaaagagatgtgttgtagatgcactaagaaacatatatgaaactgatttctttatgtccagaaagctacata

SEQ ID NO: 56067 - DNA, 80 bp, synthetic construct
  source 1..80: mol_type = other DNA
gatgctactaaatggtcgccaggtgataactccgcaaaatttaggaggtttactcaggcactacatgatggtttaagaga

SEQ ID NO: 56068 - DNA, 80 bp, synthetic construct
  source 1..80: mol_type = other DNA
gatgcaacaaaatggtcacctggtgataattcagcaaaatttaggaggtttacacaaacattacatgatggactaaggga

SEQ ID NO: 56069 - DNA, 80 bp, synthetic construct
  source 1..80: mol_type = other DNA
tatattgatggaatggaagagctatctgaatttgttgatgacttcttatcattcttccctaataaagtgtctgcagctat

SEQ ID NO: 56070 - DNA, 80 bp, synthetic construct
  source 1..80: mol_type = other DNA
tgacaaacttaaaaggtgtgttgtggatgcattaaggaatatttatgagactgatttcttcatgtcacggaaattacata

SEQ ID NO: 56071 - DNA, 80 bp, synthetic construct
  source 1..80: mol_type = other DNA
ggttacaatcccaggttccggactctttgctggtagggccattactgctatcctgccaccaggtgttgatccctcaagcc

SEQ ID NO: 56072 - DNA, 80 bp, synthetic construct
  source 1..80: mol_type = other DNA
tatactgattcattaatggatcctgctatattaacttcgttatcttcaaatttaaatgcagtcatgttttggttagaacg

SEQ ID NO: 56073 - DNA, 80 bp, synthetic construct
  source 1..80: mol_type = other DNA
tatactgactcattgatggatccagcaattctgacttccttatcatctaatttgaatgcagtctggttttggttggaaaa

SEQ ID NO: 56074 - DNA, 80 bp, synthetic construct
  source 1..80: mol_type = other DNA
cagaatatttatcatttatatataattcacaatctgcagttcaaattccaatttattattcttccaatagtgaattagag

SEQ ID NO: 56075 - DNA, 80 bp, synthetic construct
  source 1..80: mol_type = other DNA
cgaaaaatggtttgtcactgaagaaattattcagtgaatatagtgatgttattcagaatgccacattattatcaatatta

SEQ ID NO: 56076 - DNA, 80 bp, synthetic construct
  source 1..80: mol_type = other DNA
tacactgatacactaatggatccagcgattctaacatctttgtcatctaatttaaatgcagttatgttctggctagaaaa

SEQ ID NO: 56077 - DNA, 80 bp, synthetic construct
  source 1..80: mol_type = other DNA
taggtttgttatggatatgaaaagagatgtgaaagtcacaccaggtaccaagcacaccgaagagagaccaaaggtgcagg

SEQ ID NO: 56078 - DNA, 80 bp, synthetic construct
  source 1..80: mol_type = other DNA
ttgctacctaacattcatacactttttgatatgtcagcagaggactttgacgctattatagccgagcactttaaacatgg

SEQ ID NO: 56079 - DNA, 80 bp, synthetic construct
  source 1..80: mol_type = other DNA
tactcgacttaattgagtgtgcctttggtgaaatatcgtcaacacacttgcctacgggcactcgttttaaatttggtgca

SEQ ID NO: 56080 - DNA, 80 bp, synthetic construct
  source 1..80: mol_type = other DNA
taatccaagctgcagagccactagcgacggcatatttgtgtggaatccatcgcgagttggtgcgtagacttacggcggtg

SEQ ID NO: 56081 - DNA, 80 bp, synthetic construct
  source 1..80: mol_type = other DNA
ttctgcgccagctgtcacgacaagcttctgtgaaacttggtaaaacctggactggaacaaaaaaaagagctcagaggatt

SEQ ID NO: 56082 - DNA, 80 bp, synthetic construct
  source 1..80: mol_type = other DNA
tagggcctttaaatattttattatttatctaaatataaggtagttaccttaaagctttagatctctgaagggagtttctc

SEQ ID NO: 56083 - DNA, 80 bp, synthetic construct
  source 1..80: mol_type = other DNA
ctcgccacctacaatgcgtggttcataggtggtacaggctccggccaagataatcccagtgaagagactaccaaattagt

SEQ ID NO: 56084 - DNA, 80 bp, synthetic construct
  source 1..80: mol_type = other DNA
ccattggcccaagtgctgcgctcttgctcccaactcaaattgagactccaaatgccaccgcacagcgcgttgagctggca

SEQ ID NO: 56085 - DNA, 80 bp, synthetic construct
  source 1..80: mol_type = other DNA
gccgcaactggagcaatcaccagcaatgttcccacttgcatcagagaatgtttcgccagtgtcaccacgctcccctggac

SEQ ID NO: 56086 - DNA, 80 bp, synthetic construct
  source 1..80: mol_type = other DNA
cacgcgtcaagctgccaacacgttcctgggcgcaatccaccttggcccgaggatcaatccatacaccgcacacatgagtg

SEQ ID NO: 56087 - DNA, 80 bp, synthetic construct
  source 1..80: mol_type = other DNA
gtttgaaatggagggcaatgctcgccccgaggggcagaactccgagcgctcgaatgtgccactggcctccccgcaggata

SEQ ID NO: 56088 - DNA, 80 bp, synthetic construct
  source 1..80: mol_type = other DNA
agagtgactatatctggttctggcctgtttgctggtcgggcggtaactgccatcttgccacccggagtgaaccccgcgag

SEQ ID NO: 56089 - DNA, 80 bp, synthetic construct
  source 1..80: mol_type = other DNA
gtttccaggtgcgggttacaatctcaggttccggactctttgctggtagggacattactgctatactgccaccaggtgtc

SEQ ID NO: 56090 - DNA, 80 bp, synthetic construct
  source 1..80: mol_type = other DNA
cgggttacaatctcaggttccggactctttgctggtagggacattactgctatactgccaccaggtgtcaacccggctgc

SEQ ID NO: 56091 - DNA, 80 bp, synthetic construct
  source 1..80: mol_type = other DNA
atctctgaccatcaatgcatgggtgaatgagtttgcttaccaagggtttgacccaaagcgcacaaagaaggtgcttatgt

SEQ ID NO: 56092 - DNA, 80 bp, synthetic construct
  source 1..80: mol_type = other DNA
ccctaagtgactttgctgagtccacctgcacgctagcttatggctcagagtgcaaatcctgggagcaccaactggatgag

SEQ ID NO: 56093 - DNA, 80 bp, synthetic construct
  source 1..80: mol_type = other DNA
ctgtcttttcccttcttccactctaaccttgacaagtacagcatgctggaggctgcaacagagacaataccgatactcaa

SEQ ID NO: 56094 - DNA, 80 bp, synthetic construct
  source 1..80: mol_type = other DNA
caagagctcagctgtctgcacaatttccccatccacgcactcatcgaatgcatgtggtagggaagccagcctcataaaga

SEQ ID NO: 56095 - DNA, 80 bp, synthetic construct
  source 1..80: mol_type = other DNA
agaaatgtggaagcaatatgtcggctttcttttatgttaacctagccggtcagatatctgttgtcaagtgtgatacaaac

SEQ ID NO: 56096 - DNA, 80 bp, synthetic construct
  source 1..80: mol_type = other DNA
catgtcttgtctaacgactgtgggaattgtatctcaaaaaccttgagcggccagaagatttatactccagttcaggatat

SEQ ID NO: 56097 - DNA, 80 bp, synthetic construct
  source 1..80: mol_type = other DNA
gttctgtcagaagggttggacagagtccatcccaaacacaaggtactcaaaagacctctgttctattggcctgcatactg

SEQ ID NO: 56098 - DNA, 80 bp, synthetic construct
  source 1..80: mol_type = other DNA
tgaaagaatgcaagactggtaccaccaactttgagagagtgggtttcattgttgtgaagggtcggaagatgtacattgag

SEQ ID NO: 56099 - DNA, 80 bp, synthetic construct
  source 1..80: mol_type = other DNA
ggcactagaacttctttttgttatagctcaagaactagcttggggagcctcctggaagcttgggacaatataactgagtc

SEQ ID NO: 56100 - DNA, 80 bp, synthetic construct
  source 1..80: mol_type = other DNA
cagatgaagatgagatcgaggcaagaattcagcgaagaccagttcttatgctacaaatcagagagcagttccggctcttc

SEQ ID NO: 56101 - DNA, 80 bp, synthetic construct
  source 1..80: mol_type = other DNA
tgtgaaactaaagaaggtcaaggttgagtcatgcaaaggtgtcacaacatcatcagcctctaagtgctctggggatgaat

SEQ ID NO: 56102 - DNA, 80 bp, synthetic construct
  source 1..80: mol_type = other DNA
atttctgcagcaggtacccatgtgaaactgcaaatgttgaagcccactgcattcttcgaaggcatagtgcagtagtagaa

SEQ ID NO: 56103 - DNA, 80 bp, synthetic construct
  source 1..80: mol_type = other DNA
gtgaatgtcaatggtgtatggattgtgccgagatgcattggttatgaagaggttcttgttagaaggacttcattaaaagt

SEQ ID NO: 56104 - DNA, 80 bp, synthetic construct
  source 1..80: mol_type = other DNA
tgaagatacatctagtagagaatgtgatacctgcttatgggaatgcggaaaaaataaactaattgttaaaactcatggcc

SEQ ID NO: 56105 - DNA, 80 bp, synthetic construct
  source 1..80: mol_type = other DNA
ctaaaatagtttatgcaacagcatgtagccatgggtcttgcaagagtgtgatgcaaaagccagcaaccttcgtgtacttg

SEQ ID NO: 56106 - DNA, 80 bp, synthetic construct
  source 1..80: mol_type = other DNA
ccgtacccaggaaacagcgagattgttggaggtgatataggggtccacatgacagaggaatcatcaccttcaaatataca

SEQ ID NO: 56107 - DNA, 80 bp, synthetic construct
  source 1..80: mol_type = other DNA
catggtggcacactgccctgcgaaggattcttgtgaggttagcagctgcctattctgtatgcacggactgcttaattacc

SEQ ID NO: 56108 - DNA, 80 bp, synthetic construct
  source 1..80: mol_type = other DNA
agtgccacaccttgttctctgcattactaatatccaccactgtgatgtccattcttacactgctacttcttcttgtgaag

SEQ ID NO: 56109 - DNA, 80 bp, synthetic construct
  source 1..80: mol_type = other DNA
ggggctaaagatcttgtcaagagattgttctactggctaatcacacccctgtgctggctatcagtgttctgtggctgggt

SEQ ID NO: 56110 - DNA, 80 bp, synthetic construct
  source 1..80: mol_type = other DNA
tattggtctgacgtctggcacttgtaaagtgggatcactggagaacagagattgcaaaagagacatcatgtcaaattatg

SEQ ID NO: 56111 - DNA, 80 bp, synthetic construct
  source 1..80: mol_type = other DNA
gatcaaaagctggaaaaagagagtgggctcagctatttctaggaccaatgacaccatcggttggcgagacaatagacgat

SEQ ID NO: 56112 - DNA, 80 bp, synthetic construct
  source 1..80: mol_type = other DNA
acaggcaagacgttgagagagcacagtacacaggaggagctccaggggctaaatactcattttatggagtaatggtcctt

SEQ ID NO: 56113 - DNA, 80 bp, synthetic construct
  source 1..80: mol_type = other DNA
ggcctattaggtaatgtgcatagttgctctgagagtgtcatagctgactccaaaatcatgcaatgcacaacttcgggaag

SEQ ID NO: 56114 - DNA, 80 bp, synthetic construct
  source 1..80: mol_type = other DNA
ttctaccctctgcaaggctagtgggactgtaattatgaagctagggcctataggctcagagtcctgcctgattttgaagg

SEQ ID NO: 56115 - DNA, 80 bp, synthetic construct
  source 1..80: mol_type = other DNA
gtctcaaggatagtgagaaacaatttatctcaatcaagaccatatcaagtgaactcacatgccgagagggagagtccttc

SEQ ID NO: 56116 - DNA, 80 bp, synthetic construct
  source 1..80: mol_type = other DNA
tggactactctatatactcctgtctgtctaagctcgcgaaggtgccacctgatgggagaatgtgtctccgaccgctgcct

SEQ ID NO: 56117 - DNA, 80 bp, synthetic construct
  source 1..80: mol_type = other DNA
caaatggaaaaccaatgaaacatctgcagaattcactgggaaggcacatggagaggttatgcatgagaataggtgctttg

SEQ ID NO: 56118 - DNA, 80 bp, synthetic construct
  source 1..80: mol_type = other DNA
agcagagcggtggaataggctacggatgctttaatgtgaacccttcttgtctctacgtccattcctatctcaaatctgtc

SEQ ID NO: 56119 - DNA, 80 bp, synthetic construct
  source 1..80: mol_type = other DNA
tacaagaatggatttaagatctttagatgtgtggcatggaaccataggattagacttgaagttactacccactcccggaa

SEQ ID NO: 56120 - DNA, 80 bp, synthetic construct
  source 1..80: mol_type = other DNA
attcccaatggttttgatggctatgagcacacaaccgactgactggggttctattgggttaatcctagattcagaaggga

SEQ ID NO: 56121 - DNA, 80 bp, synthetic construct
  source 1..80: mol_type = other DNA
ttgcagaagtgcattccaacttacatggcctaggagctatgatgcacaactatggtgatgacaagagggttgaggtcctc

SEQ ID NO: 56122 - DNA, 80 bp, synthetic construct
  source 1..80: mol_type = other DNA
taacagggactaacgcgtattcctttatgaagcacgggtcaggaagctttgccatcatagatgacccatattccccagag

SEQ ID NO: 56123 - DNA, 80 bp, synthetic construct
  source 1..80: mol_type = other DNA
cctcgtaaaggctttttaggagaagtgcgatgtccaacagaagaaacagctattcgggcgtcaccctcatgtaagatggc

SEQ ID NO: 56124 - DNA, 80 bp, synthetic construct
  source 1..80: mol_type = other DNA
ccctaacttgatcgagtaccagcctgagatggacactgcagagtgcactacaaacatgatagaccccatggccatattca

SEQ ID NO: 56125 - DNA, 80 bp, synthetic construct
  source 1..80: mol_type = other DNA
atcgagggtccttgccacaagtccgagatggaatgacattcacacaatcaattgagaagaacacagttcaagcactgaca

SEQ ID NO: 56126 - DNA, 80 bp, synthetic construct
  source 1..80: mol_type = other DNA
acaggggaggttagagcttccatacgcctcacattggacgactatgatgtggtgtaccaaaatagccagtccgactgctc

SEQ ID NO: 56127 - DNA, 80 bp, synthetic construct
  source 1..80: mol_type = other DNA
agctacatttaagaatctcaccggctgttattcatgtgatgagggttccagaatgtgctaccaggtgaaggcagaaggag

SEQ ID NO: 56128 - DNA, 80 bp, synthetic construct
  source 1..80: mol_type = other DNA
aaactatctttcactttatcaatgaggatgaatctatcaatgtcattaacaaggtaaacccagacgtaagtgactactgc

SEQ ID NO: 56129 - DNA, 80 bp, synthetic construct
  source 1..80: mol_type = other DNA
actgttctccacttctcaagacctgtcatctctattgaagggaggtatgactgcgggcttagcaaaagaccaatggtaat

SEQ ID NO: 56130 - DNA, 80 bp, synthetic construct
  source 1..80: mol_type = other DNA
aaaaggcactctaattgctactgccccgcatgatgacagaaagcatgaaggaggctcctcattgattgtcaaccccaaag

SEQ ID NO: 56131 - DNA, 80 bp, synthetic construct
  source 1..80: mol_type = other DNA
gcggcacagttgatttcttcggatgggtgtctggactaacctcatggctaggtgggcctctgaaaaccttcctgaccatc

SEQ ID NO: 56132 - DNA, 80 bp, synthetic construct
  source 1..80: mol_type = other DNA
aatgatgtcatcccagatgagctcaatccaggacgtcacaactgcagtgacctagaccggaagccattttggacagagtt

SEQ ID NO: 56133 - DNA, 80 bp, synthetic construct
  source 1..80: mol_type = other DNA
cttggattcctagctctgggcctacttttagtagtgataatcatcatcattgctcgcactggggtgcaacaggccctaag

SEQ ID NO: 56134 - DNA, 80 bp, synthetic construct
  source 1..80: mol_type = other DNA
tcatcatcattgctcgcactggggtgcaacaggccctaaggaagaaaaacaagtaatccatatcatttctatctctcaca

SEQ ID NO: 56135 - DNA, 80 bp, synthetic construct
  source 1..80: mol_type = other DNA
gaagaaaaacaagtaatccatatcatttctatctctcacatattattttatcaggggttagggggggaataggcagtaca

SEQ ID NO: 56136 - DNA, 80 bp, synthetic construct
  source 1..80: mol_type = other DNA
tgtgtgtgtgcccagttaggcaaaacgaaatcttaggaagaatatgaaaagcagtgcacattggtggtattttggacata

SEQ ID NO: 56137 - DNA, 80 bp, synthetic construct
  source 1..80: mol_type = other DNA
aaaagcagtgcacattggtggtattttggacatattttgttttgttctttaaagcaccggtctttgtgtgatatccgcag

SEQ ID NO: 56138 - DNA, 80 bp, synthetic construct
  source 1..80: mol_type = other DNA
cattggtgtggcgaagccaacgaacaaaatagctcctatgtcagtgatcccaccaccaattgtgaaacccataccagttg

SEQ ID NO: 56139 - DNA, 80 bp, synthetic construct
  source 1..80: mol_type = other DNA
cagaatcaaccattaagaaaagcatcccatttgataaactcttatctgaagcagaaaaggagttgaaccaaactaaaatc

SEQ ID NO: 56140 - DNA, 80 bp, synthetic construct
  source 1..80: mol_type = other DNA
agattggaatccgaaagaaggtctaatgcagaagaagctgcaaaagaaagggccaggttgagggaaattgaagacaagct

SEQ ID NO: 56141 - DNA, 80 bp, synthetic construct
  source 1..80: mol_type = other DNA
gagaaaggactgggagctggagcgggagagaaaagatgcagtggcagacgacctggcaaaagaaatagcgagaagaaggg

SEQ ID NO: 56142 - DNA, 80 bp, synthetic construct
  source 1..80: mol_type = other DNA
ttattgcaaagttgttattaatttcctgtttagtgcagcaggcctatctgaaatacactattatttcagaaatagggaac

SEQ ID NO: 56143 - DNA, 80 bp, synthetic construct
  source 1..80: mol_type = other DNA
agatagagagaaaagctcatgaattagataagatgcttaagaagaaggagcgtgaagatctggtggcaagagaaagggtg

SEQ ID NO: 56144 - DNA, 80 bp, synthetic construct
  source 1..80: mol_type = other DNA
agtgaggatatgagaaaccatgtgcgtaaaccaaatacaaccatagcccctgctcccacaatcattaccaccctgctcat

SEQ ID NO: 56145 - DNA, 80 bp, synthetic construct
  source 1..80: mol_type = other DNA
ggccagtgcagtaatggcaggacctttggagaacagggaaacaaaccacttactaaacaggccagggaatggagcttaca

SEQ ID NO: 56146 - DNA, 80 bp, synthetic construct
  source 1..80: mol_type = other DNA
gcttcgatgtccgcctttccatctctggctctggcatttttgcagggcgtatcattgcttctgtcatcccaccaggtgtt

SEQ ID NO: 56147 - DNA, 80 bp, synthetic construct
  source 1..80: mol_type = other DNA
ctgcaaccggagcaatcaccagtaatgttcctagttgcattagggagtgctttgctagcgtcaccacgctaccctggacc

SEQ ID NO: 56148 - DNA, 80 bp, synthetic construct
  source 1..80: mol_type = other DNA
actcgccaagcagccaacacgttcttgggtgcaatccatcttggaccaaggatcaatccctacaccgcacacatgagtgc

SEQ ID NO: 56149 - DNA, 80 bp, synthetic construct
  source 1..80: mol_type = other DNA
gctgatgccactaaatggtctccaggtgacaattcagcaaaattcaggcgattcactgctgcccttcataatggattgcc

SEQ ID NO: 56150 - DNA, 80 bp, synthetic construct
  source 1..80: mol_type = other DNA
catctgcagataagtaaacaggtgattcatgcagaaattcagcacttaggccattggatggatgctacatttaacttgaa

SEQ ID NO: 56151 - DNA, 80 bp, synthetic construct
  source 1..80: mol_type = other DNA
ttatcctgaattgcctgaagattatgtagacagagttgttgacatgtatgccacagtgtttggaatgtgggttaagccag

SEQ ID NO: 56152 - DNA, 80 bp, synthetic construct
  source 1..80: mol_type = other DNA
ggcatctgaactcggtatcactgccgaggatgcaaggcttgtttcagaaatcgcaatgcatactactgaggacaggacca

SEQ ID NO: 56153 - DNA, 80 bp, synthetic construct
  source 1..80: mol_type = other DNA
tttgaaatggagggtgtaccccgtccagagggccctaaggccaatcccaatgaaaatgtgcctcttgcatcaccacagga

SEQ ID NO: 56154 - DNA, 80 bp, synthetic construct
  source 1..80: mol_type = other DNA
ccgcagcaacaggggccgttagcaataacgtccccatgtgtgtgagggagtgttttgccagtgtaaccacgctcccttgg

SEQ ID NO: 56155 - DNA, 80 bp, synthetic construct
  source 1..80: mol_type = other DNA
acaacgcgccaagcatccaacacctttcttggcgccatccacctcggtccacgcatcaacccctataccgcacacttgag

SEQ ID NO: 56156 - DNA, 80 bp, synthetic construct
  source 1..80: mol_type = other DNA
tgccatgtttgctggctggggtggcagtttccaaatacgggttaccatttctggctctgggctgtatgcaggccgtgcag

SEQ ID NO: 56157 - DNA, 80 bp, synthetic construct
  source 1..80: mol_type = other DNA
aaatacgggttaccatttctggctctgggctgtatgcaggccgtgcagtggtcgcagtgctgccacctggtgttaatcca

SEQ ID NO: 56158 - DNA, 80 bp, synthetic construct
  source 1..80: mol_type = other DNA
cacaattgggccaaacgcggcacttctcctgcctacgcagattgagacacccaacggagccgcgcagagggtggagatgg

SEQ ID NO: 56159 - DNA, 80 bp, synthetic construct
  source 1..80: mol_type = other DNA
atgattcgcatactggtactgattgcagttacagctgcaagcccagtgtatcaaaggtgtttccaagatggggctatagt

SEQ ID NO: 56160 - DNA, 80 bp, synthetic construct
  source 1..80: mol_type = other DNA
aacttgtacaggtgattgcccagaaagatgtggttgcacatcatcaacctgtttgcacaaagaatggcctcactcaagaa

SEQ ID NO: 56161 - DNA, 80 bp, synthetic construct
  source 1..80: mol_type = other DNA
acacaaagacggcacgatgatttttacaattttaaatgttttaacaagagccatgctcgtaatgagcatgtattctttaa

SEQ ID NO: 56162 - DNA, 80 bp, synthetic construct
  source 1..80: mol_type = other DNA
ataaaataattgagaaagaagaagaaacatgtgagataggaacaaacaaagagtttaaatgtttcgaggagagagcttat

SEQ ID NO: 56163 - DNA, 80 bp, synthetic construct
  source 1..80: mol_type = other DNA
ataaaggggacatgtccgaccaacatcaatgcagtccattacattgacaataaaggcaaattgcgatatgtaaaatgtaa

SEQ ID NO: 56164 - DNA, 80 bp, synthetic construct
  source 1..80: mol_type = other DNA
ggaaaatctggaaatgactgaggattgtgctttctgtaggaaaatcaagaagaaagctggtcagtctgttcaggtgcaga

SEQ ID NO: 56165 - DNA, 80 bp, synthetic construct
  source 1..80: mol_type = other DNA
aaacttcagttccactccaggatgcaatttgtcaagaaaattcagacacttattctggaccaaagataccctttaaaggg

SEQ ID NO: 56166 - DNA, 80 bp, synthetic construct
  source 1..80: mol_type = other DNA
gtttgcaaaattggtctaatcaaatataaagaatgcaagtttaaaacatcttcttatgagactgtctcattcataacact

SEQ ID NO: 56167 - DNA, 80 bp, synthetic construct
  source 1..80: mol_type = other DNA
caaggagaaggggaagatttacattgagcacctaatgttgaaaaatatagaggtggttacgaatgtctcttttgtttgct

SEQ ID NO: 56168 - DNA, 80 bp, synthetic construct
  source 1..80: mol_type = other DNA
acgaacatgtagggcaggatgagcaagaggtggaacatagggctctgaagagagtatcagttaatgattgtaagattgtg

SEQ ID NO: 56169 - DNA, 80 bp, synthetic construct
  source 1..80: mol_type = other DNA
acacactcaaaaaggcatgactataagaagcaagagtctcagagatgcagagttggagattcagacaaaaaaatgataac

SEQ ID NO: 56170 - DNA, 80 bp, synthetic construct
  source 1..80: mol_type = other DNA
gacaactcaaagcagaaaatttgcacaggagatcacgttttctgtgaaaagtatgattgttccacatcctatccagatgt

SEQ ID NO: 56171 - DNA, 80 bp, synthetic construct
  source 1..80: mol_type = other DNA
tacttgtatccatgcgccaggatcaggaccactgtacataaatctcatgggctcatggataaaaccccaatgtgtgggct

SEQ ID NO: 56172 - DNA, 80 bp, synthetic construct
  source 1..80: mol_type = other DNA
atgagagagtcttagtagacagggaagtcaagcagccattgcttgcaccagaacagaactgtgacacctgtgtttcagag

SEQ ID NO: 56173 - DNA, 80 bp, synthetic construct
  source 1..80: mol_type = other DNA
tgtctagatgagggggtccatataaagtccactggttttgagataacatcagcagtagcctgctcacatgggtcttgcat

SEQ ID NO: 56174 - DNA, 80 bp, synthetic construct
  source 1..80: mol_type = other DNA
ctcagctcatcaagagccatccacatcagtaattgtcccatacccaggattgttggccagtgtgggcggaagaattggga

SEQ ID NO: 56175 - DNA, 80 bp, synthetic construct
  source 1..80: mol_type = other DNA
ttcacctctcacatacttctgattctgctagtgtgcacatggtagtggtttgccctcctagagacagttgtgcagctcat

SEQ ID NO: 56176 - DNA, 80 bp, synthetic construct
  source 1..80: mol_type = other DNA
aattgcttgctatgctatcatggcatcctaaattatcagtgccattcaacattaagtgccatcctgacttcctttctatt

SEQ ID NO: 56177 - DNA, 80 bp, synthetic construct
  source 1..80: mol_type = other DNA
aattctcttcatatacactgtcttttctgtgacgacaaatatattatatgtgctcagactaataccaaaacagctaaaga

SEQ ID NO: 56178 - DNA, 80 bp, synthetic construct
  source 1..80: mol_type = other DNA
gtccagtgggatggctcaagctcttcatcaactggctgctaactgctctaagaatcaaaactagaaatgttatgaggagg

SEQ ID NO: 56179 - DNA, 80 bp, synthetic construct
  source 1..80: mol_type = other DNA
ataaaccagagaataggatgggttgaccatcatgatgtagagagaccaaggcacagagaacctatgagaagattcaaaac

SEQ ID NO: 56180 - DNA, 80 bp, synthetic construct
  source 1..80: mol_type = other DNA
taatgtcacaataatctctctgatttctgaaatacaaaaaagcatctctgagttgtcactatcatgtgtcaatgatgaca

SEQ ID NO: 56181 - DNA, 80 bp, synthetic construct
  source 1..80: mol_type = other DNA
aactctattgttgactctgatcatgatgactggaggaaatgcttgctccaatacagtagtggctaactcaaagcaaacca

SEQ ID NO: 56182 - DNA, 80 bp, synthetic construct
  source 1..80: mol_type = other DNA
gatgtgtacaggaaggatcaaacacaaagtgctcaatcactgcaactataactttaagggcaggtgtgattggtgcagag

SEQ ID NO: 56183 - DNA, 80 bp, synthetic construct
  source 1..80: mol_type = other DNA
tcgtgctttataataaaaggccctatggagaatcagcagaaaacaatatcaatcaaaactatctccagtgagacagtatg

SEQ ID NO: 56184 - DNA, 80 bp, synthetic construct
  source 1..80: mol_type = other DNA
cagagagggatcaagcttctggactagtttatatatcccatcatgtcttagctctaggaggtgtcatcttgttggtgatt

SEQ ID NO: 56185 - DNA, 80 bp, synthetic construct
  source 1..80: mol_type = other DNA
gtgtaggcaataaatgccagtcgtggagagatgatcagctatctagggaattttcaggagtaaaggataaccatatcatg

SEQ ID NO: 56186 - DNA, 80 bp, synthetic construct
  source 1..80: mol_type = other DNA
aacgaaaataaatgctttgaacaatgtggcgcaattggttgtggttgttttaacattaatccttcctgcttgtacgttca

SEQ ID NO: 56187 - DNA, 80 bp, synthetic construct
  source 1..80: mol_type = other DNA
tgcttacctcaaaagtgctagaaatgaagcagttagggttttctcatgttctgattgggtgcacagagtttcttttgagg

SEQ ID NO: 56188 - DNA, 80 bp, synthetic construct
  source 1..80: mol_type = other DNA
taaaaggtcctgatggtgaaacagagctggtcacattgggaagtccaggcaccaagtttttaaactggggcaccctgtca

SEQ ID NO: 56189 - DNA, 80 bp, synthetic construct
  source 1..80: mol_type = other DNA
ttatccctggatgcagaaggcatcagcggaaccaacagcatcagctttctggaaagtagtaaaggaggatttgccttata

SEQ ID NO: 56190 - DNA, 80 bp, synthetic construct
  source 1..80: mol_type = other DNA
cgatgaaggctacaatgagataccaagagagggatttctaggtgagataaggtgtagttctgaatccgcagctatatcag

SEQ ID NO: 56191 - DNA, 80 bp, synthetic construct
  source 1..80: mol_type = other DNA
attctactggacaagtcttaacattcaatggattagaagacacaatacgaggtgattacattgtagactgcgtgactggc

SEQ ID NO: 56192 - DNA, 80 bp, synthetic construct
  source 1..80: mol_type = other DNA
ctcataagtcttgtattagagctcctggtttaatcaagtacaagcctatgacagatcaaatagaatgtactgcatcttta

SEQ ID NO: 56193 - DNA, 80 bp, synthetic construct
  source 1..80: mol_type = other DNA
gtggatccattcgcaattttccttaaaggatctcttcctcagactagaaatggacaaacattcaccagcacaaaagacaa

SEQ ID NO: 56194 - DNA, 80 bp, synthetic construct
  source 1..80: mol_type = other DNA
gaagacagttcaggctttcactaatggagcgataaaagcgctattgtctattaatttagatgatcatgaaattgtcttta

SEQ ID NO: 56195 - DNA, 80 bp, synthetic construct
  source 1..80: mol_type = other DNA
ttaacaaagtgaaaaactgtgatgcaacatttctaaatgttagtggttgctactcctgtgattatggagctcatgtctgt

SEQ ID NO: 56196 - DNA, 80 bp, synthetic construct
  source 1..80: mol_type = other DNA
gtgaaagttaaatcttcagagtcagctgatttctttgcagaatcagaagacaagacaacagttttatctttcccaataca

SEQ ID NO: 56197 - DNA, 80 bp, synthetic construct
  source 1..80: mol_type = other DNA
gtctggcacccatgattactgtcaggttttacattttcaaaaaccattagtagatgaaagactatcatattcttgtggat

SEQ ID NO: 56198 - DNA, 80 bp, synthetic construct
  source 1..80: mol_type = other DNA
cagagcctaagctgatagtgatcaagggaacattggtttgcatgggtgtctatgatttcagaaacaaaacaggtggctct

SEQ ID NO: 56199 - DNA, 80 bp, synthetic construct
  source 1..80: mol_type = other DNA
tcaacagtagtaaacccttcagaaggtgcctggagcatttcaaattggttttctggccttctagactggttaggtgggcc

SEQ ID NO: 56200 - DNA, 80 bp, synthetic construct
  source 1..80: mol_type = other DNA
tatgaaggccatactaaagattttgggctttattgccattgggattgtctgctttgttttattcatgattctgatcagaa

SEQ ID NO: 56201 - DNA, 80 bp, synthetic construct
  source 1..80: mol_type = other DNA
ttgcagtcaactcaataaatatcaagaagaaaaactagcaacaatgtaagtgcatatgaagaccatccaatcccataaga

SEQ ID NO: 56202 - DNA, 80 bp, synthetic construct
  source 1..80: mol_type = other DNA
ttgtatcagtcagatattggagtcggtgtggggctagggaggactcaccatggtcatcagcaaatgaaaaacaaagcagt

SEQ ID NO: 56203 - DNA, 80 bp, synthetic construct
  source 1..80: mol_type = other DNA
aaaacataaacaacccacaccaacaagcataagaaacaataaaaatacaaaacacaacaaaacaaacggcaagccaaatc

SEQ ID NO: 56204 - DNA, 80 bp, synthetic construct
  source 1..80: mol_type = other DNA
aaaaatacaagacaacaacataacataggcaaacaaagcctggcagcatatatgcagagaccactcctcaatcaggaaac

SEQ ID NO: 56205 - DNA, 80 bp, synthetic construct
  source 1..80: mol_type = other DNA
aatcctcaaaacataaaaaaggaccggccctcatgcacacttcacccatgcagtctagtcatcatacatctagtcatctt

SEQ ID NO: 56206 - DNA, 80 bp, synthetic construct
  source 1..80: mol_type = other DNA
caggtctcctgcaaggtgagagtgtagaaagcacagatgttggtttactgttcattttataaacttagtgagatgtgccg

SEQ ID NO: 56207 - DNA, 80 bp, synthetic construct
  source 1..80: mol_type = other DNA
gcaaggtgagagtgtagaaagcacagatgttggtttactgttcattttataaacttagtgagatgtgccggtctttgtgt

SEQ ID NO: 56208 - DNA, 80 bp, synthetic construct
  source 1..80: mol_type = other DNA
tgtaatagatgagaaagaaaggatgatatcactcctagagactcaacaaagtgagaatgacataaagatgcaagtactaa

SEQ ID NO: 56209 - DNA, 80 bp, synthetic construct
  source 1..80: mol_type = other DNA
tgtctgaaattgaacaactgaagaatcaactgtcaaagaagcgaaatgagagaggccaggagaaaagagatgctgagaag

SEQ ID NO: 56210 - DNA, 80 bp, synthetic construct
  source 1..80: mol_type = other DNA
gtgatgtcagacttgatggccaggaattctgacttacggaagcataatgacattctcactgctgaaatatctcagatgaa

SEQ ID NO: 56211 - DNA, 80 bp, synthetic construct
  source 1..80: mol_type = other DNA
aaataaaaacacaatccaaagaaataaaaatacagtgagtactactgtagtcccagcaatactatcagtggccttactgt

SEQ ID NO: 56212 - DNA, 80 bp, synthetic construct
  source 1..80: mol_type = other DNA
ctacgtgggacagcaccagcagaaatgacatgtgcttttctaatgactcacctctagaaggcctagtttactactgggag

SEQ ID NO: 56213 - DNA, 80 bp, synthetic construct
  source 1..80: mol_type = other DNA
catcatcagttgctcccattatagctgcacctccagattcaccgatgattaatccatggcctcatgcaaaaaatagagtt

SEQ ID NO: 56214 - DNA, 80 bp, synthetic construct
  source 1..80: mol_type = other DNA
ggcacaggaatgtacaaatatgatgaaaatgatgactcaggctgtagaccaataagatatggagtttcatgcataggatt

SEQ ID NO: 56215 - DNA, 80 bp, synthetic construct
  source 1..80: mol_type = other DNA
tgactttatgctcaagatggacaaataccctttctttaatgcattcataggtcacaaaactcccttagaatcttttgctg

SEQ ID NO: 56216 - DNA, 80 bp, synthetic construct
  source 1..80: mol_type = other DNA
ccaggctttatgatgtcattgaatcgatccggaggttatgtgatgaccttgggatcaataacagggtggcatctgcagat

SEQ ID NO: 56217 - DNA, 80 bp, synthetic construct
  source 1..80: mol_type = other DNA
tcatgttaatcaaagattcactattgtttgttggtgcaacagggaccgattttgctgcatgcatagatgagaaaacagtc

SEQ ID NO: 56218 - DNA, 80 bp, synthetic construct
  source 1..80: mol_type = other DNA
acatggaattgtactggaccatttctaaacttaggcaggtgcgataaatcccaaaagaaaattggttatgctgatattgc

SEQ ID NO: 56219 - DNA, 80 bp, synthetic construct
  source 1..80: mol_type = other DNA
tgatcagttgaaaggtctgggtgcaatatcagtgctagatattccaatgataaaaaggatgccggatgagatatctgggt

SEQ ID NO: 56220 - DNA, 80 bp, synthetic construct
  source 1..80: mol_type = other DNA
cactgaagtatattgatggtttagagacataccatgaacaactgactgccgaatatgccttccttactagatactgcgat

SEQ ID NO: 56221 - DNA, 80 bp, synthetic construct
  source 1..80: mol_type = other DNA
tgttctgcataaacaagctgatggcttaaggagttgtagaatgaaagatactgggaattgtaatgttcaagaaaatgact

SEQ ID NO: 56222 - DNA, 80 bp, synthetic construct
  source 1..80: mol_type = other DNA
caaatgaaatgaaaacattttatactagccagaaagcaaagtttaacaaagatctgaacttagcattattagtattgcac

SEQ ID NO: 56223 - DNA, 80 bp, synthetic construct
  source 1..80: mol_type = other DNA
cagaaatgtccacttttgagcttgatgaagattgggaggatttcaaatataaacctgaaccaacagaatcacctcaactt

SEQ ID NO: 56224 - DNA, 80 bp, synthetic construct
  source 1..80: mol_type = other DNA
aaatatctactatcagatcatcattattaattacagcataacatgggctttcttactattcggcttaatcctagcatatt

SEQ ID NO: 56225 - DNA, 80 bp, synthetic construct
  source 1..80: mol_type = other DNA
ggcttgacatattggggcgacttcacaagcaaatgcagacaatgcacgtgcgggcagtttgaagatgttactggattaat

SEQ ID NO: 56226 - DNA, 80 bp, synthetic construct
  source 1..80: mol_type = other DNA
ggtacataaaaaatcttacaattgcataattaaatacaaagcaaaatggataagagatatgttaatcgcatatctgattg

SEQ ID NO: 56227 - DNA, 80 bp, synthetic construct
  source 1..80: mol_type = other DNA
tgtcatgctaatcaaagactcactattatttgttggtgcaacaggaactgattttgctgcatgcattgatgagaaaacag

SEQ ID NO: 56228 - DNA, 80 bp, synthetic construct
  source 1..80: mol_type = other DNA
tcacatggaattgcactggaccatttttgaacttggggaggtgcgataaaacccagaagaagactagttatgctgatata

SEQ ID NO: 56229 - DNA, 80 bp, synthetic construct
  source 1..80: mol_type = other DNA
gctaatcaattgaaaggtttgggtgcaatatctgtgctagatatcccaatgataaaaaggatgccagatgagatatctgg

SEQ ID NO: 56230 - DNA, 80 bp, synthetic construct
  source 1..80: mol_type = other DNA
acaaggcttttagaggaactagtacttcatatattgcagaaagtatggctcgaaaggataatagatccatgacacacttt

SEQ ID NO: 56231 - DNA, 80 bp, synthetic construct
  source 1..80: mol_type = other DNA
gccttagaaataaagaaaaagtttccaacaaatgcattattaacagcattaatagattacatttcttatttacaatcact

SEQ ID NO: 56232 - DNA, 80 bp, synthetic construct
  source 1..80: mol_type = other DNA
gaagaatatgaagtagtggagacagagctcttaaatgcgttgaaaaaatccaaatgttgggctaaagaaatggacgatat

SEQ ID NO: 56233 - DNA, 80 bp, synthetic construct
  source 1..80: mol_type = other DNA
tgtcttgcataaacaagttgatggtttaaggagctgcagaatgaaagatactgggaactgtaatgtccagggaaatgact

SEQ ID NO: 56234 - DNA, 80 bp, synthetic construct
  source 1..80: mol_type = other DNA
cacttttgtcttagcccacgatgtagcacaatacgttacccagtaaacaaaagacatattagaaactgtgagtggcaaat

SEQ ID NO: 56235 - DNA, 80 bp, synthetic construct
  source 1..80: mol_type = other DNA
aatgactaccaagcttgcaaatttctgcaaagtcccccaagctaccgtttggaagaacatcaaggtacagtgacagtcat

SEQ ID NO: 56236 - DNA, 80 bp, synthetic construct
  source 1..80: mol_type = other DNA
caagctctgtatgtcagaatatagaaataattatcttggtaactttgtcattagcaatttttatatttctaacaatagtt

SEQ ID NO: 56237 - DNA, 80 bp, synthetic construct
  source 1..80: mol_type = other DNA
agtaagacatatgtatgttacttactaatgcctatatttatcccaatagcatatatttacgggtggatatataataaatc

SEQ ID NO: 56238 - DNA, 80 bp, synthetic construct
  source 1..80: mol_type = other DNA
gccatggttgttggtgagtcaagtgagatctatacactagatgatttgcctgatgatatggtacaaatggcagaaaaagt

SEQ ID NO: 56239 - DNA, 80 bp, synthetic construct
  source 1..80: mol_type = other DNA
atggaagtcctaaacttaatctggttgctgacattatgctcagctagtccagtgtttcagcggtgtttccaagatggggc

SEQ ID NO: 56240 - DNA, 80 bp, synthetic construct
  source 1..80: mol_type = other DNA
gcagagatgtctacttttgaactcgatgaagattgggaagatttcaagtataaatctgaaccaacagaatcaccccaact

SEQ ID NO: 56241 - DNA, 80 bp, synthetic construct
  source 1..80: mol_type = other DNA
cacttttgtcttagccctcgatgtagtacaatacgctacccaataaataaaagacatattggaaattgtgattggcagat

SEQ ID NO: 56242 - DNA, 80 bp, synthetic construct
  source 1..80: mol_type = other DNA
ctcacattcaacaattgacaagatctcagttcaggaattagctgatatagagcaatataaaaaggctatatcacaaaagt

SEQ ID NO: 56243 - DNA, 80 bp, synthetic construct
  source 1..80: mol_type = other DNA
tgaggcccgcatctcaatttctgggtctggcatgtttgctgggaggatcattgcttctgtcataccacctggtgttgacc

SEQ ID NO: 56244 - DNA, 80 bp, synthetic construct
  source 1..80: mol_type = other DNA
cgccacctacgatgcgtggtttataggtggtacagtgcctgacccagaacgccccaatgaaggtgcgtccaaagtagtgt

SEQ ID NO: 56245 - DNA, 80 bp, synthetic construct
  source 1..80: mol_type = other DNA
ctacgttatgggaatgtcttggatgtgaatgcaattgaccttgaagaaccaagtggtcaaacagcggattggaaggcaat

SEQ ID NO: 56246 - DNA, 80 bp, synthetic construct
  source 1..80: mol_type = other DNA
gcctagggatcccaattatcctcaaggcattatatatgctttcaacaagagggagacagactgttaaagagaacaaaggg

SEQ ID NO: 56247 - DNA, 80 bp, synthetic construct
  source 1..80: mol_type = other DNA
ctcaggtatgggaatgtcttggatgtcaatgccatagaccttgaggaacctagtgggcaaactgctgattggaaagcaat

SEQ ID NO: 56248 - DNA, 80 bp, synthetic construct
  source 1..80: mol_type = other DNA
ctgcgttatggaaatgtcctggatgtcaatgctattgaccttgaagaaccgagtggccaaactgccgattggaaggctat

SEQ ID NO: 56249 - DNA, 80 bp, synthetic construct
  source 1..80: mol_type = other DNA
ttagtgtttgaaatggagggccttggccaaccacagccacagggtggcgagaagaccagcccgcagcccgtgacaccgca

SEQ ID NO: 56250 - DNA, 80 bp, synthetic construct
  source 1..80: mol_type = other DNA
tggccatggccacaggggcagtcacgagcaatgtaccaaactgcattcgtgagtgttttgcctctgttaccacaatcccc

SEQ ID NO: 56251 - DNA, 80 bp, synthetic construct
  source 1..80: mol_type = other DNA
aagtgagagtaactatatctggttctggtctgtttgctgggcgagcggtgactgccatcttgccacccggagtgaacccc

SEQ ID NO: 56252 - DNA, 80 bp, synthetic construct
  source 1..80: mol_type = other DNA
ggacaccattggccccacagcggccctcttacttccaactcagattgaaacaccaaatgcgagtgcacagcgcttggagt

SEQ ID NO: 56253 - DNA, 80 bp, synthetic construct
  source 1..80: mol_type = other DNA
tggacaactcgacaggccgctaacactttccttggggctatccaccttggcccacgcatcaacccatacaccgctcacct

SEQ ID NO: 56254 - DNA, 80 bp, synthetic construct
  source 1..80: mol_type = other DNA
gacatttgcgagatggcacgccgtccttcgaaagagtggagagagagattcaatgccttatccctgaaatgcaagcaact

SEQ ID NO: 56255 - DNA, 80 bp, synthetic construct
  source 1..80: mol_type = other DNA
tcggcggggagttgtagcccatctgagagaggccatttttcgtcagagtcgattgcttcgatatcagagtcgcggcttgc

SEQ ID NO: 56256 - DNA, 80 bp, synthetic construct
  source 1..80: mol_type = other DNA
atttggcttcggtgtctaattttcctaagagaagcgtgagcgctgatggtttggatgatcgaataattgagggtttgcaa

SEQ ID NO: 56257 - DNA, 80 bp, synthetic construct
  source 1..80: mol_type = other DNA
aaattcaacagtaaggtgtgctcttttatccagtcatggattttccagattgatttggttgatgaacctgctaggtggct

SEQ ID NO: 56258 - DNA, 80 bp, synthetic construct
  source 1..80: mol_type = other DNA
agcggttatgataaaaacgtttgcaagtgcattgttatacgttatgggtgcaacatctctatctttggaacaatcagcac

SEQ ID NO: 56259 - DNA, 80 bp, synthetic construct
  source 1..80: mol_type = other DNA
aaggtactttaggtattggagatccaatatcgtttccaagacaagagattttgttagaaggggaatggattgcagtggac

SEQ ID NO: 56260 - DNA, 80 bp, synthetic construct
  source 1..80: mol_type = other DNA
tggtactatcctgacccagatttagcggacatgcgtgagatgggaatggcattagtggatgacgcatctccagagtacac

SEQ ID NO: 56261 - DNA, 80 bp, synthetic construct
  source 1..80: mol_type = other DNA
ggactgggaatatgggttcttcaatgtgcagactactaatagtgcaggtaatgtgaaagaggtaattgaagagcgaagaa

SEQ ID NO: 56262 - DNA, 80 bp, synthetic construct
  source 1..80: mol_type = other DNA
tggatgttcgtaagaggttatcgatctctgaaagtttggaagtgtttggtagcctgattgataattgggatcttgttcag

SEQ ID NO: 56263 - DNA, 80 bp, synthetic construct
  source 1..80: mol_type = other DNA
agcagttggttgccgagtttggggatcaaggaaaattgctggcgaaagtcgagaacacacgtatccttgatgctgttcaa

SEQ ID NO: 56264 - DNA, 80 bp, synthetic construct
  source 1..80: mol_type = other DNA
aaaatcacttccacatttcagaatcctcaagatttctgtgattctgccgataatgtacgtaaagctggtgagaggcatca

SEQ ID NO: 56265 - DNA, 80 bp, synthetic construct
  source 1..80: mol_type = other DNA
agttggtcggcggcctagagtgatacagatggttggtactgagggtcaattgtccgcatttgtattgcacaatgtacttc

SEQ ID NO: 56266 - DNA, 80 bp, synthetic construct
  source 1..80: mol_type = other DNA
gtcctgcctataaggctactaggtttactacgtcaggcaagaattctggggatataagagatatgaacattgtgcttgaa

SEQ ID NO: 56267 - DNA, 80 bp, synthetic construct
  source 1..80: mol_type = other DNA
atttcaggcgagcttggatataagtcttctctggatgtaaaaggtatggattcgtctacgaagccttttcagactaattt

SEQ ID NO: 56268 - DNA, 80 bp, synthetic construct
  source 1..80: mol_type = other DNA
gtcacttagttgtgtgtttcatcgtcttaggggagaggttctcggttatccagcgtttttcttgggatcgacgtcgtctt

SEQ ID NO: 56269 - DNA, 80 bp, synthetic construct
  source 1..80: mol_type = other DNA
gggagaggttctcggttatccagcgtttttcttgggatcgacgtcgtcttccaaagataattatgtagtgacgagaacac

SEQ ID NO: 56270 - DNA, 80 bp, synthetic construct
  source 1..80: mol_type = other DNA
ccaaagataattatgtagtgacgagaacacggtatcgtgatgagcatggggggatcctcgttgaagaagagtataagttg

SEQ ID NO: 56271 - DNA, 80 bp, synthetic construct
  source 1..80: mol_type = other DNA
acttatccgcagtacgttttattgctgggagcgatacactggacgagtccaaccaggtttactgatggttactttcagga

SEQ ID NO: 56272 - DNA, 80 bp, synthetic construct
  source 1..80: mol_type = other DNA
gttcgtcatgacatctcgaactgtttttaggtcaggtttgttaaatactgcggatcagcatacgtttcttggcgtgatta

SEQ ID NO: 56273 - DNA, 80 bp, synthetic construct
  source 1..80: mol_type = other DNA
tgtatgcccttttggagaaaagattgaggcaacgatggtatggcaagcatggtaaggagatgcgggaaaagattggccag

SEQ ID NO: 56274 - DNA, 80 bp, synthetic construct
  source 1..80: mol_type = other DNA
ctagttggaactcgagcggagccttttgtgttgaataaccctgcttcttatttattggttaatcaattattggccttagc

SEQ ID NO: 56275 - DNA, 80 bp, synthetic construct
  source 1..80: mol_type = other DNA
cggagagaagcgcttgaagagtatgaggagcatgttaagttgctcggttctgtacttggtgatgatcaggttgctggagc

SEQ ID NO: 56276 - DNA, 80 bp, synthetic construct
  source 1..80: mol_type = other DNA
tttttgtcaaggaattgtagatgaagaagttattttaaggattacgagggatttgtgcgatgagacaaagtttttgatgg

SEQ ID NO: 56277 - DNA, 80 bp, synthetic construct
  source 1..80: mol_type = other DNA
agaggttaggttatgagtgtgagccggagatatctgaatattctgctgagtttcttaaacagaagggagtgcttggagcg

SEQ ID NO: 56278 - DNA, 80 bp, synthetic construct
  source 1..80: mol_type = other DNA
cctgaattgtttccagagcggctgcttttattttcgtcggaaagaggtgatatggctgggtcacttcctcttgatcgagt

SEQ ID NO: 56279 - DNA, 80 bp, synthetic construct
  source 1..80: mol_type = other DNA
taaaatcatgttgagtatgacggatgagaagattggccgcgcgcgatgtcctttgccttatgcgtcattaatgttgttca

SEQ ID NO: 56280 - DNA, 80 bp, synthetic construct
  source 1..80: mol_type = other DNA
catcctgggtgtcagggactgcttctttttcaattggtgaagaaggtcggctgttatatcggactggtagaaattggaag

SEQ ID NO: 56281 - DNA, 80 bp, synthetic construct
  source 1..80: mol_type = other DNA
aaggtatttgcatctaaaagagccgcatccgttgcatggaaggatcaattcacgtccgatggagtgtttgacgtccgatg

SEQ ID NO: 56282 - DNA, 80 bp, synthetic construct
  source 1..80: mol_type = other DNA
gaatggttttgggatgttctataaagagtgggcttctgcaaataccaagacgatcttacttggatgcgggttattgtggg

SEQ ID NO: 56283 - DNA, 80 bp, synthetic construct
  source 1..80: mol_type = other DNA
cttgcagtgacgcgcttggagttccgttccctcccctggtgcaaaaagatgagattctatgtccgggaacgtcggtatat

SEQ ID NO: 56284 - DNA, 80 bp, synthetic construct
  source 1..80: mol_type = other DNA
acgattccttcgaacgcaatgacacactatctcctctgggcaacacgtagagatcgagcagacgcagaacgtatgtggcg

SEQ ID NO: 56285 - DNA, 80 bp, synthetic construct
  source 1..80: mol_type = other DNA
gggacaagctcattctgcagcttctatggtgtttctaaattcgttgatgtatgatgatgcacttgatcatgtgaatctat

SEQ ID NO: 56286 - DNA, 80 bp, synthetic construct
  source 1..80: mol_type = other DNA
ggcagtccgagacgatttacttcgtggtgacaatgatccattggaaagctacattgaatatgtagataagatgtttgccg

SEQ ID NO: 56287 - DNA, 80 bp, synthetic construct
  source 1..80: mol_type = other DNA
aagtgggagttattgacattcctttttcagcgcttcatatttacggagttgggatgggattcgtcgctggagtaatgcct

SEQ ID NO: 56288 - DNA, 80 bp, synthetic construct
  source 1..80: mol_type = other DNA
gtacctatggaagtgtggtatgattttggcttgtttggaaaagtaggagggtttgggacgtggattgcagaacttgtttt

SEQ ID NO: 56289 - DNA, 80 bp, synthetic construct
  source 1..80: mol_type = other DNA
taaggacatccggattgaccgtgagaaatacgatttacctcggctgtctatgtggaagaatgcggccaaccatttactgc

SEQ ID NO: 56290 - DNA, 80 bp, synthetic construct
  source 1..80: mol_type = other DNA
cgagtgaggttcgtagggcgagtttgtatgcacgggatacgttgcatgaaaagtatggaatggtagtcccgtcagctgtt

SEQ ID NO: 56291 - DNA, 80 bp, synthetic construct
  source 1..80: mol_type = other DNA
ctagttgctgaacgtccaggatgtaagatcgatcaggcgctgtttgaggtccgacgagtcgggatggaggatgttagaga

SEQ ID NO: 56292 - DNA, 80 bp, synthetic construct
  source 1..80: mol_type = other DNA
acttgagaaagtgcttgatgagctaacacgcttgaaccacctggagcggaagtttattaagaggctggcgatgggcttat

SEQ ID NO: 56293 - DNA, 80 bp, synthetic construct
  source 1..80: mol_type = other DNA
ttatcgttgagaaattgactgagcgtagaactgggtatggccctgcaatagcaagtaatggatgggggcatattgccgcg

SEQ ID NO: 56294 - DNA, 80 bp, synthetic construct
  source 1..80: mol_type = other DNA
ccatatagctttcaggcacgattgctagagtgtttggcgtttccaatgtacaatgggttcaactacgaagcagtacgtga

SEQ ID NO: 56295 - DNA, 80 bp, synthetic construct
  source 1..80: mol_type = other DNA
aagagtgtttgttgatgggaagctcccgggtgaccctaaattgtatctaaagatagggaggcaggcattatcctatagtg

SEQ ID NO: 56296 - DNA, 80 bp, synthetic construct
  source 1..80: mol_type = other DNA
ggccttatgaagttgagcctccaatccctcagatccctagagaagttttgtcacccccacctttcagtgtcaattcatat

SEQ ID NO: 56297 - DNA, 80 bp, synthetic construct
  source 1..80: mol_type = other DNA
aagaggcgtataaccttgtatctgcttcaatggggttgtcaagcagacaagctgcggacatgcgcgacatgatcttggag

SEQ ID NO: 56298 - DNA, 80 bp, synthetic construct
  source 1..80: mol_type = other DNA
ggaattaacgggctagaggaagcacgatttgccctaaatcctcgtaagacatttctgtttgatgtttcgcgcagaaaggg

SEQ ID NO: 56299 - DNA, 80 bp, synthetic construct
  source 1..80: mol_type = other DNA
tgcaggttttttccaaactcctcaccggcggaagactaatcaggcatattgtgagatgatgggtatggcgctactgttaa

SEQ ID NO: 56300 - DNA, 80 bp, synthetic construct
  source 1..80: mol_type = other DNA
tggaaccatggaaattcagtagtggagattggcgaatgtctttctctcatcgcttgcgcgcaattcttgggaggaggtag

SEQ ID NO: 56301 - DNA, 80 bp, synthetic construct
  source 1..80: mol_type = other DNA
ggcgaatgtctttctctcatcgcttgcgcgcaattcttgggaggaggtaggaatctgagctctccatcgctttgcagtct

SEQ ID NO: 56302 - DNA, 80 bp, synthetic construct
  source 1..80: mol_type = other DNA
tacttgcagagagacatcgatgtcattaaggcgaagacaaaagccgcggtatatatcgagaattatcgagcaggcgacgt

SEQ ID NO: 56303 - DNA, 80 bp, synthetic construct
  source 1..80: mol_type = other DNA
ttttgcgaagaagcgaagtattagtaaaggagccacatttgaagagagagtctatcatggtgctgtgactatgttgcaac

SEQ ID NO: 56304 - DNA, 80 bp, synthetic construct
  source 1..80: mol_type = other DNA
gaatggttaagctacgaggatctaccatccaagaatgctttgtcatcgctatttcgtcctatcgatgttcagattgtgtt

SEQ ID NO: 56305 - DNA, 80 bp, synthetic construct
  source 1..80: mol_type = other DNA
cggcgaatgatggcatccgagtctggtactggcgcaatccatgaaatggatcatatttgcattatgcgatctaacgcact

SEQ ID NO: 56306 - DNA, 80 bp, synthetic construct
  source 1..80: mol_type = other DNA
aatacattcatcaattacaaatgattttacaacaactgacaaagcacaacaaagtaccttttattcctcttctggtttaa

SEQ ID NO: 56307 - DNA, 80 bp, synthetic construct
  source 1..80: mol_type = other DNA
tagatggctgcaagctgcgtttagtgactttccagaatttccgtttttaatgacgcgtgatggtgtaaagtttgcctcaa

SEQ ID NO: 56308 - DNA, 80 bp, synthetic construct
  source 1..80: mol_type = other DNA
attgtggtgcagtaagtacgcaggttcctttgctgtttttccaaacgctagagatgatggtgttaactatggatgggaca

SEQ ID NO: 56309 - DNA, 80 bp, synthetic construct
  source 1..80: mol_type = other DNA
ttaagctcaacatgggaaggatgggtgtgttgtgagtggtatgacagggcgagagttggtttgttttccgagatgtttga

SEQ ID NO: 56310 - DNA, 80 bp, synthetic construct
  source 1..80: mol_type = other DNA
gaaaacttcagtaccgttacaagatgcaatttgtcaagagaactcagacatttactccggaccaaagatacctttcaagg

SEQ ID NO: 56311 - DNA, 80 bp, synthetic construct
  source 1..80: mol_type = other DNA
gagtttgtaagatcggtctaataaagtataaagagtgtaagtttaaaacatcatcttatgagaccatttcattcatcaca

SEQ ID NO: 56312 - DNA, 80 bp, synthetic construct
  source 1..80: mol_type = other DNA
ctcaaagggaaaggaaaaatttacattgagcacttgatgttaaaaaacatagaggtggtcacaaatgtttcttttgtttg

SEQ ID NO: 56313 - DNA, 80 bp, synthetic construct
  source 1..80: mol_type = other DNA
ctatgaacatgcaggtcaagatgatgaacaagaggtagaacacagggccctgaagagagtatcagtcaatgattgtaaga

SEQ ID NO: 56314 - DNA, 80 bp, synthetic construct
  source 1..80: mol_type = other DNA
agacacactcaaaaaaacatgactataagaaacaaggttctcagaagtgtagagttggagattctgataaaaagatgatt

SEQ ID NO: 56315 - DNA, 80 bp, synthetic construct
  source 1..80: mol_type = other DNA
ttgtggacaactctaagcagaagatttgcacaggagaccacattttctgtgagaagtatgactgttctacatcttatcca

SEQ ID NO: 56316 - DNA, 80 bp, synthetic construct
  source 1..80: mol_type = other DNA
gatgtgacttgtatccacacaccaggatcagggccattatacataaatctcatgggctcatggataaaaccccaatgtgt

SEQ ID NO: 56317 - DNA, 80 bp, synthetic construct
  source 1..80: mol_type = other DNA
tggctacgagagagtcttagtagatagggaggttaagcagccattgcttgtaccagagcagaactgtgacacctgtgttt

SEQ ID NO: 56318 - DNA, 80 bp, synthetic construct
  source 1..80: mol_type = other DNA
cagagtgtctagatgaaggagtacacataaaatccactggttttgaaataacatcagcagtggcctgctcacatggatcc

SEQ ID NO: 56319 - DNA, 80 bp, synthetic construct
  source 1..80: mol_type = other DNA
tgtatctcagctcatcaggaagcatccacatcagtaattattccatatccaggcttgttggctagtgtgggcgggagaat

SEQ ID NO: 56320 - DNA, 80 bp, synthetic construct
  source 1..80: mol_type = other DNA
tgggatacacctctcacatacttctgattctgctagtgtacacatggtagtggtttgccctcccagagatagttgtgcag

SEQ ID NO: 56321 - DNA, 80 bp, synthetic construct
  source 1..80: mol_type = other DNA
ctcataattgcttactatgctatcatggcattctgaactatcagtgccattcaacactgagtgctatcctgacttccttt

SEQ ID NO: 56322 - DNA, 80 bp, synthetic construct
  source 1..80: mol_type = other DNA
ctactaattcttttcatatacactgctttttctgtgacaacaaatgttttgtatgtgctcagactaataccgaaacagct

SEQ ID NO: 56323 - DNA, 80 bp, synthetic construct
  source 1..80: mol_type = other DNA
gaaaagtccagtgggatggctcaaactctttgtcaactggctactaactgctctaagaatcaaaactaggcgagtaatgg

SEQ ID NO: 56324 - DNA, 80 bp, synthetic construct
  source 1..80: mol_type = other DNA
ggaggataaatcagagaatagggtgggttgatcatcatgatgtagagagaccaaggcacagagaacctatgaggagattc

SEQ ID NO: 56325 - DNA, 80 bp, synthetic construct
  source 1..80: mol_type = other DNA
tctaatgttacaataatctctctaatttctgaaatacaaaaaagcatctctgagctatcactgtcatgtggtaataatga

SEQ ID NO: 56326 - DNA, 80 bp, synthetic construct
  source 1..80: mol_type = other DNA
aagacaactctattgctaactctgataatggtgacaggaggaaatgcctgctccaatacagtagtggccaattcgaagca

SEQ ID NO: 56327 - DNA, 80 bp, synthetic construct
  source 1..80: mol_type = other DNA
aaccagatgtgtccaagaaggatcaaacacaaagtgttctattactgcaactataactttaagggcaggtgtgattggtg

SEQ ID NO: 56328 - DNA, 80 bp, synthetic construct
  source 1..80: mol_type = other DNA
ctgagtcatgtttcataataaaaggccccatggaaaaccagcagaaaacaatatcaattaaaaccatctctagtgagaca

SEQ ID NO: 56329 - DNA, 80 bp, synthetic construct
  source 1..80: mol_type = other DNA
gtatgcagagaaggttcgagtttctggaccagtttgtacatcccatcttgtcttagttctaggagatgtcatcttgttgg

SEQ ID NO: 56330 - DNA, 80 bp, synthetic construct
  source 1..80: mol_type = other DNA
tgattgtgtgggtaacaaatgccagtcatggcgagatgatcagctatccagggagttttcaggagtaaaggataaccata

SEQ ID NO: 56331 - DNA, 80 bp, synthetic construct
  source 1..80: mol_type = other DNA
ttatgaatgaaaataaatgctttgaacaatgtggtgcaattggctgtggttgtttcaacatcaatccttcctgcttgtat

SEQ ID NO: 56332 - DNA, 80 bp, synthetic construct
  source 1..80: mol_type = other DNA
gtccatgcttatctcaagagtgctagaaatgaagcagtcagggtattctcatgttctgactgggtgcacagagtttcctt

SEQ ID NO: 56333 - DNA, 80 bp, synthetic construct
  source 1..80: mol_type = other DNA
tgaggtcaaaggccctgatggcgagatggagttggtcacactagggagcctgggcactaagtttttaaactggggcactt

SEQ ID NO: 56334 - DNA, 80 bp, synthetic construct
  source 1..80: mol_type = other DNA
tgtcattatccttggatgcagaaggtatcagcggaaccaacagtatcagttttttggaaagtagtaaaggagggtttgct

SEQ ID NO: 56335 - DNA, 80 bp, synthetic construct
  source 1..80: mol_type = other DNA
ctgtacgatgaaggatatagtgaaataccaagagaaggatttcttggagagataaggtgcagttctgaatccgcagccat

SEQ ID NO: 56336 - DNA, 80 bp, synthetic construct
  source 1..80: mol_type = other DNA
caattctactggacaagtcttgacattcaatggattagaagatacaatacgaggcgactacattgtggactgtgtgactg

SEQ ID NO: 56337 - DNA, 80 bp, synthetic construct
  source 1..80: mol_type = other DNA
atcagctcataagtcatgcattagagctcctggtttgatcaagtacaagcccatgacagatcaaatagaatgtactgcat

SEQ ID NO: 56338 - DNA, 80 bp, synthetic construct
  source 1..80: mol_type = other DNA
ctttagtagatccatttgcaattttcctcaaaggatctcttcctcagactaggaatggacagacattcaccagtacaaaa

SEQ ID NO: 56339 - DNA, 80 bp, synthetic construct
  source 1..80: mol_type = other DNA
gacaaaaaaacagtacaggccttcaccaatggagcaataaaagcattattgtcgattaatttagatgatcatgaaatcat

SEQ ID NO: 56340 - DNA, 80 bp, synthetic construct
  source 1..80: mol_type = other DNA
ctttattaataaagtgaaaagctgtgatgccacatttttaaatgttagtggatgctactcttgtgattatggagcacatg

SEQ ID NO: 56341 - DNA, 80 bp, synthetic construct
  source 1..80: mol_type = other DNA
tctgtgtgaaagtaaagtcttcggagtcagccgacttctttgcagaatcggaggacaaaacaacagtcctgtcttttcca

SEQ ID NO: 56342 - DNA, 80 bp, synthetic construct
  source 1..80: mol_type = other DNA
atacaatctggcacacgtgactactgtcaggttttacattttcaaaagccattagtagatgaaagactttcatattcttg

SEQ ID NO: 56343 - DNA, 80 bp, synthetic construct
  source 1..80: mol_type = other DNA
tggatctgagcctaagctgatagtgattaagggaacattagtttacatgggtgtctatgattttagggataaaacaggtg

SEQ ID NO: 56344 - DNA, 80 bp, synthetic construct
  source 1..80: mol_type = other DNA
gttcttcaacagtgataaatccttcagaaggaacctggagcatctccaattggttttctgggcttctggactggctaggt

SEQ ID NO: 56345 - DNA, 80 bp, synthetic construct
  source 1..80: mol_type = other DNA
gggcctatgaaggccatactgaagatactgggcttcattgctattgggattgtttgcttcattttgttcatgattctgat

SEQ ID NO: 56346 - DNA, 80 bp, synthetic construct
  source 1..80: mol_type = other DNA
tagaattgcagtcaactcaataaatatcaagaagaaaaactaacaacaatacaagcacttgcaaagccaactcaaagctt

SEQ ID NO: 56347 - DNA, 80 bp, synthetic construct
  source 1..80: mol_type = other DNA
gattataccagtcagacattggagtcggtgtagggctggggagaatcaaccatgatcatcagcaagtaaaaaataaagca

SEQ ID NO: 56348 - DNA, 80 bp, synthetic construct
  source 1..80: mol_type = other DNA
acaggagcaaacataaacagaaaacccacaccaagaagcacaggagacaatagaaaacaacaagacacagcaaagcatcc

SEQ ID NO: 56349 - DNA, 80 bp, synthetic construct
  source 1..80: mol_type = other DNA
aaaaaaccaaaccacaaaacacaaaacaacagcactcgacacaaaacacaggcacgacaaagcctggcagcacacatgtg

SEQ ID NO: 56350 - DNA, 80 bp, synthetic construct
  source 1..80: mol_type = other DNA
gaaaacactcctcagccaggaaataacctttataaagcacagagtaactggcctctttacatactcatctctgtagtcca

SEQ ID NO: 56351 - DNA, 80 bp, synthetic construct
  source 1..80: mol_type = other DNA
gtcatcacatctctagtcattttcagatttcctgcaaggtgagagtatggaaaacttagttgttggtttactattcattt

SEQ ID NO: 56352 - DNA, 80 bp, synthetic construct
  source 1..80: mol_type = other DNA
caaggtgagagtatggaaaacttagttgttggtttactattcattttaataaatttagtgagatgtgccggtctttgtgt

SEQ ID NO: 56353 - DNA, 80 bp, synthetic construct
  source 1..80: mol_type = other DNA
gttgttatagatgagaaagaaaaaatgatatcacttctagagactcaacaaagtgagaatgacataaagacacaagtact

SEQ ID NO: 56354 - DNA, 80 bp, synthetic construct
  source 1..80: mol_type = other DNA
gatgtctgaaattgaacaactgaagaatcaactatcaaaaagacgaaatgagaggggacaggagaagagagatgctgaaa

SEQ ID NO: 56355 - DNA, 80 bp, synthetic construct
  source 1..80: mol_type = other DNA
agctgatgtcagacctgatggctagaaattctgacttacggaatcacaatgttattctaactgacgaaatatctcaaata

SEQ ID NO: 56356 - DNA, 80 bp, synthetic construct
  source 1..80: mol_type = other DNA
aaaaataatatcacaattcacagaaacagaaacatgatgagtactactgtggtcccagcaatactttcggtggctctgct

SEQ ID NO: 56357 - DNA, 80 bp, synthetic construct
  source 1..80: mol_type = other DNA
aacaacgtgggacagctccagtaggaatgacatatgtttttctaacgactcacctctagagggccttgtctactactggg

SEQ ID NO: 56358 - DNA, 80 bp, synthetic construct
  source 1..80: mol_type = other DNA
atcatcatcagttggtcccattacggctgcacctccagattcaactatgatcaatccatggcctcatgcaaaaaatagag

SEQ ID NO: 56359 - DNA, 80 bp, synthetic construct
  source 1..80: mol_type = other DNA
tttgatttcatgcttaagatggataagtatcctttctttaatgcatttataggtcataaaactcctttagaatccttcgc

SEQ ID NO: 56360 - DNA, 80 bp, synthetic construct
  source 1..80: mol_type = other DNA
agcaacaaacagtgacaatggcgaatttaataattatttcgatggttctgagcattgcctatgggcatccgctctcaaca

SEQ ID NO: 56361 - DNA, 80 bp, synthetic construct
  source 1..80: mol_type = other DNA
gaggagttggccgctgagtttataaagctaacagagcaggtgaatattctagaaagagaaatggaagtcttgaagcagtc

SEQ ID NO: 56362 - DNA, 80 bp, synthetic construct
  source 1..80: mol_type = other DNA
aataattgttatgtttgcaatcattttagtattgttactttttgaaaatatgatattcaaccggcttttccgcatttttt

SEQ ID NO: 56363 - DNA, 80 bp, synthetic construct
  source 1..80: mol_type = other DNA
atcgttcttgctccatgtgcggcttgatacattatagaccaggactcaaaatcgatttaaccaaaactaacagatgtggc

SEQ ID NO: 56364 - DNA, 80 bp, synthetic construct
  source 1..80: mol_type = other DNA
agttgcatctgtggattcgacgagcagcagtcgtctggttttgaatatgaaatatttttaaaggatatgcatgtccaaaa

SEQ ID NO: 56365 - DNA, 80 bp, synthetic construct
  source 1..80: mol_type = other DNA
agaatcatgcaaattcagtccaagagtaaaccactttaggaatactaaagctttattatttgcacttgtaatctgtgcta

SEQ ID NO: 56366 - DNA, 80 bp, synthetic construct
  source 1..80: mol_type = other DNA
ccatatatacagtttatgcagatgaagattgcttatctaaagatattaaaataacatatcaagagttgcacaactgcata

SEQ ID NO: 56367 - DNA, 80 bp, synthetic construct
  source 1..80: mol_type = other DNA
ggtccaaagataatgggcgatacttgtgtatcaaagagtgaattgtattctgatttattctcaaaaaatctagtcacaga

SEQ ID NO: 56368 - DNA, 80 bp, synthetic construct
  source 1..80: mol_type = other DNA
tgttaaagatgacatatctattgttaagagtactactgtttttagcaagaataaactggctcttgaagcaactacaaaat

SEQ ID NO: 56369 - DNA, 80 bp, synthetic construct
  source 1..80: mol_type = other DNA
atatgataaaaaatattttgaacctgatactgtaaatgatcaattcaacaagatagaatttgcccaagatgcacatagaa

SEQ ID NO: 56370 - DNA, 80 bp, synthetic construct
  source 1..80: mol_type = other DNA
tgatactattagaaagaatactttacaagacagaatgtgaaatgctaagcttaaaaaagaacagtggaccttataatgtt

SEQ ID NO: 56371 - DNA, 80 bp, synthetic construct
  source 1..80: mol_type = other DNA
gcctggcgcacatatttaaaaaatcataatatagacttatgcagtaggcacaactacaaaatgatatgtcagtgtattaa

SEQ ID NO: 56372 - DNA, 80 bp, synthetic construct
  source 1..80: mol_type = other DNA
tgcacactctatgtgtaagaatacagacatagattataacaaagagatcgaaacatattacaaaagcaatgctgcagcct

SEQ ID NO: 56373 - DNA, 80 bp, synthetic construct
  source 1..80: mol_type = other DNA
atagagctgacctgaacaccataatggacacattaaaaacagcattcagagggcttacaaaggtcctaattgaaaattat

SEQ ID NO: 56374 - DNA, 80 bp, synthetic construct
  source 1..80: mol_type = other DNA
atagaaaaagatgactctgatgctcttaaggccttatttagtaatattactgattctgtccaggacaactatcagatgat

SEQ ID NO: 56375 - DNA, 80 bp, synthetic construct
  source 1..80: mol_type = other DNA
tggaatattgaaatttgctagtaagctattagatattaaccttggtagatccacccgctcagctcatcattctataatga

SEQ ID NO: 56376 - DNA, 80 bp, synthetic construct
  source 1..80: mol_type = other DNA
caaacgaaattcccaaatctaatccttttactgattacagttattctaatgttaatataaaggaatgcatgtcgccagag

SEQ ID NO: 56377 - DNA, 80 bp, synthetic construct
  source 1..80: mol_type = other DNA
agcttgaaatgttttaagaagagagacagtacaccgcatacaaaccacctgctttgcaagatagacaacaaatataaagc

SEQ ID NO: 56378 - DNA, 80 bp, synthetic construct
  source 1..80: mol_type = other DNA
atttgactggccagagatagaaacaattcaaaaaggtcaaaaattatgccttggtgacagtcattgcaacttggaattta

SEQ ID NO: 56379 - DNA, 80 bp, synthetic construct
  source 1..80: mol_type = other DNA
tttatagatcctttatcgtaaaagactggtctgagtgcaatccagtgctagacaaatttggaaattttatggttttaagt

SEQ ID NO: 56380 - DNA, 80 bp, synthetic construct
  source 1..80: mol_type = other DNA
cagccataactgcagacagaattatgtcattaactaactgttataaagaatctttcactgcgcaaccagcagatatgcag

SEQ ID NO: 56381 - DNA, 80 bp, synthetic construct
  source 1..80: mol_type = other DNA
gctggaattaaaaaatgctcggctgatgaaataggagaatgtacaacacttgaagacaagacatggccaattgtattctg

SEQ ID NO: 56382 - DNA, 80 bp, synthetic construct
  source 1..80: mol_type = other DNA
tagcggcaaatattactactctgatagcaaggagcatgccaaagacggttctatcaacaattattgtttaaccaacaaat

SEQ ID NO: 56383 - DNA, 80 bp, synthetic construct
  source 1..80: mol_type = other DNA
gttctgaacaacgtttcccaatacatgaaaattggttcaaaaaatgtaattgggacaagacccacaaagaatttagcact

SEQ ID NO: 56384 - DNA, 80 bp, synthetic construct
  source 1..80: mol_type = other DNA
atgagacaaataaactataatgatataacttcttatagaaaagcaatagaatctgagataggaacagatttgatgacaca

SEQ ID NO: 56385 - DNA, 80 bp, synthetic construct
  source 1..80: mol_type = other DNA
ccattataagcccacaaagaaccttccacatgttgtaccaaggtatcatagtatagatgtacaaggtacagaatcaacag

SEQ ID NO: 56386 - DNA, 80 bp, synthetic construct
  source 1..80: mol_type = other DNA
agggtattatcaatggtttcatacaaaatacaatacctgctattagtggtctaggtgttggttatcatctgaatttcaaa

SEQ ID NO: 56387 - DNA, 80 bp, synthetic construct
  source 1..80: mol_type = other DNA
ggcaatcagttatttgacatagttatttttgtaaaaaaagctgtatataaagcacagtaccagaaagcatacaccacagg

SEQ ID NO: 56388 - DNA, 80 bp, synthetic construct
  source 1..80: mol_type = other DNA
tcctagcatatccataaatattgaacataacgaaagatgcacaggccactgccccgaaaagattcctgcaaaagaaggtt

SEQ ID NO: 56389 - DNA, 80 bp, synthetic construct
  source 1..80: mol_type = other DNA
ggttaacattttctaaagagcatactagttcttggggatgtgaagaatatggctgtcttgctatagatacaggctgttta

SEQ ID NO: 56390 - DNA, 80 bp, synthetic construct
  source 1..80: mol_type = other DNA
gttgatgataacggccatataatacctaaaatgtatacatgtagagcagcatgtgatattagattaaacaaagataatgc

SEQ ID NO: 56391 - DNA, 80 bp, synthetic construct
  source 1..80: mol_type = other DNA
tatggctcttgtcaagatgtcatacgcccagaattagatgtttataagaagattggcagtgaggcatcactgatagaaat

SEQ ID NO: 56392 - DNA, 80 bp, synthetic construct
  source 1..80: mol_type = other DNA
atgtataactttgcctcatgaaacttattgcaatgatatggacatattagaaccgattataggagataaattaagtgcat

SEQ ID NO: 56393 - DNA, 80 bp, synthetic construct
  source 1..80: mol_type = other DNA
cctttcagaatacacagactaatcaacttccgacccttatagcttataaaaagggaaaaatatacacaggtcaaatcaat

SEQ ID NO: 56394 - DNA, 80 bp, synthetic construct
  source 1..80: mol_type = other DNA
gatattggaaacacagcattgcagtgcggctcaatccaagtaatcaatggatcaactatcggaactggcagcccaaaatt

SEQ ID NO: 56395 - DNA, 80 bp, synthetic construct
  source 1..80: mol_type = other DNA
tgattatatatgccatgctatgagaaggaaagatgttatcgtaaggaagtgtttcaatgacaactatcagtcgtgcacta

SEQ ID NO: 56396 - DNA, 80 bp, synthetic construct
  source 1..80: mol_type = other DNA
ggctagaaaagcgaaatgacttgattccttatagaaaaggcgatgtcatcgaagtatcaaaaacaggatcgaacatgggc

SEQ ID NO: 56397 - DNA, 80 bp, synthetic construct
  source 1..80: mol_type = other DNA
caaatgacatttaaaatagaactaggtgatattaactataaaatatttactaaatcagtagatcttcaaatgtctggcat

SEQ ID NO: 56398 - DNA, 80 bp, synthetic construct
  source 1..80: mol_type = other DNA
ttgtgctgggtgcattgactgtgctgaaggtatttcatgctctataaatgctgaagtgccagccgaaacagtctgccatt

SEQ ID NO: 56399 - DNA, 80 bp, synthetic construct
  source 1..80: mol_type = other DNA
gcaaaacaaactgtgaagattttataaacaatatagtgttttcaccgcaaatcaagaattacaatataaaagtccactgt

SEQ ID NO: 56400 - DNA, 80 bp, synthetic construct
  source 1..80: mol_type = other DNA
aaatctaaggttgaaaaaataacagcacatatctgtgggagagacattgatttacagttgacagttaagccatacaatca

SEQ ID NO: 56401 - DNA, 80 bp, synthetic construct
  source 1..80: mol_type = other DNA
cgaaataatattatcgtcaacaaaactcaaccactttgaaattgtcgggacaacttcgacatcaggctggtttaagaaca

SEQ ID NO: 56402 - DNA, 80 bp, synthetic construct
  source 1..80: mol_type = other DNA
gaagatagacttgtcgcagttagatgaatcaaattacataagggaagaggacctccagtgtggaacatggttatgtaagg

SEQ ID NO: 56403 - DNA, 80 bp, synthetic construct
  source 1..80: mol_type = other DNA
tgcaaaaagaggggattgatattatgtttaaaggattattttcaggcttagggagatattggaccatattaatttattca

SEQ ID NO: 56404 - DNA, 80 bp, synthetic construct
  source 1..80: mol_type = other DNA
attataggtgtggtaataattgtgatattggtttatatcctattgcccataggtcgccttttaaaagcattcctaatcag

SEQ ID NO: 56405 - DNA, 80 bp, synthetic construct
  source 1..80: mol_type = other DNA
acatgaaatagaatatgccatggagcagaaaatcaagtagttttggttaaaaagggtaggcaagtttaaaatcaggtata

SEQ ID NO: 56406 - DNA, 80 bp, synthetic construct
  source 1..80: mol_type = other DNA
tagttttggttaaaaagggtaggcaagtttaaaatcaggtataaataaaattcatataaataaagtcaaaaattgttgtt

SEQ ID NO: 56407 - DNA, 80 bp, synthetic construct
  source 1..80: mol_type = other DNA
caataacaaacaacctagaacatacatgcgagcatgtaactgtaaattgtggtcagaaatcagtaaaattccatgcatgc

SEQ ID NO: 56408 - DNA, 80 bp, synthetic construct
  source 1..80: mol_type = other DNA
tttagacaacataggggttgtataagattttttaaagggacatatatgccatactcaatgatcgaagcaatgtgcgttaa

SEQ ID NO: 56409 - DNA, 80 bp, synthetic construct
  source 1..80: mol_type = other DNA
catagagctaataattctgacattatatatctttgctgcaattatatttgcactaattataacaaagagttatgtagcat

SEQ ID NO: 56410 - DNA, 80 bp, synthetic construct
  source 1..80: mol_type = other DNA
acctgctcctgccgttattttatccagcaacgtggttttatggaaaggtttataaaaagattaattcttgcccaaactgt

SEQ ID NO: 56411 - DNA, 80 bp, synthetic construct
  source 1..80: mol_type = other DNA
agtcaaattggtgaccgctgttttgctggtggtaacctcttcaaggagatgaacttgagtgtaggacttggcgaaatatg

SEQ ID NO: 56412 - DNA, 80 bp, synthetic construct
  source 1..80: mol_type = other DNA
ctacttgcatctcaccctttcaccagctgccccaaaatctgtatatgcggttctaggtttagttgcacagaagctcttaa

SEQ ID NO: 56413 - DNA, 80 bp, synthetic construct
  source 1..80: mol_type = other DNA
ggtgcatagaatgggtaaggactgcttaggctataaatctctaagcaaagctagacagatgtgtaaatcgaaaagctggt

SEQ ID NO: 56414 - DNA, 80 bp, synthetic construct
  source 1..80: mol_type = other DNA
ccttcacagcagctatattaactggattaatattgatggaattcatctcaccaattgcaggagagagaatgtataagctt

SEQ ID NO: 56415 - DNA, 80 bp, synthetic construct
  source 1..80: mol_type = other DNA
cttttcttttcttcctgccttttctgcttactaacagcaacaacctacctcaacacaactacctcatttgcttgctcctt

SEQ ID NO: 56416 - DNA, 80 bp, synthetic construct
  source 1..80: mol_type = other DNA
cagcgaactggctgatgagtttattgctatgaagactgaagtaacagtgatgcaaagatcaatatataatcagaaaatat

SEQ ID NO: 56417 - DNA, 80 bp, synthetic construct
  source 1..80: mol_type = other DNA
taaatatagcattgctaacgttagtggtattaataattcttttagaaacatatatttttaaaatcctttttagtctttta

SEQ ID NO: 56418 - DNA, 80 bp, synthetic construct
  source 1..80: mol_type = other DNA
tatagatcatgctccatgtgtggtttgatacattataaattgggcctaaaaataaatttattaaccactaataaatgtgg

SEQ ID NO: 56419 - DNA, 80 bp, synthetic construct
  source 1..80: mol_type = other DNA
cacctgtatttgcggatttagtgaacaacaatcttctgggtttgaatatgaagttttcttaaaggatatgcataaacagc

SEQ ID NO: 56420 - DNA, 80 bp, synthetic construct
  source 1..80: mol_type = other DNA
gagaatcctgtaaatatttcccgatgttgaaccatttccgcaatctaaaaatattaacaactatattgctactgattctg

SEQ ID NO: 56421 - DNA, 80 bp, synthetic construct
  source 1..80: mol_type = other DNA
ctggcaactagtgtttcaagtgaatgtcttcagaaaccattaaaaataaagctggaagatttgcatgaatgcattggggt

SEQ ID NO: 56422 - DNA, 80 bp, synthetic construct
  source 1..80: mol_type = other DNA
taatttccttgataggcaatgctataatagaaaggacttatatgagtcattaaggtcgaagaacctcatttctgaagttg

SEQ ID NO: 56423 - DNA, 80 bp, synthetic construct
  source 1..80: mol_type = other DNA
ataaaaaatattttgagagcgctgatttaggagggcaatttaagaggatagaatatgctcaggatgcacatcggatgata

SEQ ID NO: 56424 - DNA, 80 bp, synthetic construct
  source 1..80: mol_type = other DNA
cttttagaaagaatactctattccacagagtgtgagatgcatactatcctaacaaatggtggagcatataacattccatg

SEQ ID NO: 56425 - DNA, 80 bp, synthetic construct
  source 1..80: mol_type = other DNA
gagaacatatctaaagaatcacaacttgaatttatgcggcaagcatgtacataaaatggtgtgccaatgtgtgaatacac

SEQ ID NO: 56426 - DNA, 80 bp, synthetic construct
  source 1..80: mol_type = other DNA
acacacaatgcctgtctactggtatagattaccaagacgaaattactaaattctaccaagctgatggagattcatacaga

SEQ ID NO: 56427 - DNA, 80 bp, synthetic construct
  source 1..80: mol_type = other DNA
tctgatctatctataattcttgaaacaatatcaactgcatttagagggttaaccaaagttttaatcgaaacttatatcga

SEQ ID NO: 56428 - DNA, 80 bp, synthetic construct
  source 1..80: mol_type = other DNA
acaagataatagtgagtctatgataaaattgctcaacacaattcaaggaaaggttccaaataattatcaaatgttaggta

SEQ ID NO: 56429 - DNA, 80 bp, synthetic construct
  source 1..80: mol_type = other DNA
tacttaaatttgccatcaagatcatgaacattaatcaaactcgaggtgtacgatctgccaggcatacaattgtatcaaat

SEQ ID NO: 56430 - DNA, 80 bp, synthetic construct
  source 1..80: mol_type = other DNA
gatatacccatgtctgaaccgttttccaacttcgaggcgtcaaatataaacattaagcagtgttcagagccattaactct

SEQ ID NO: 56431 - DNA, 80 bp, synthetic construct
  source 1..80: mol_type = other DNA
aaaatgcttcacaaaaagaggtgactcacctcattctaatcacctgctatgtaaagaacaaagtaaatataaagtattcg

SEQ ID NO: 56432 - DNA, 80 bp, synthetic construct
  source 1..80: mol_type = other DNA
aatggcctgaaatagaaacagttacaaagaataacaaactttgcttaggagatactcattgcaacctcaaatttactgca

SEQ ID NO: 56433 - DNA, 80 bp, synthetic construct
  source 1..80: mol_type = other DNA
acaacatccgacgaaatcatcaaactattgaattgttttagtgatacatacaaaccaaaccctggagaaatggaaatagg

SEQ ID NO: 56434 - DNA, 80 bp, synthetic construct
  source 1..80: mol_type = other DNA
gctcaaaaagtgcaatgctgaaaaaataggtgagtgtgtcacattagaaaatagcccgtggcctatagtatattgtgaaa

SEQ ID NO: 56435 - DNA, 80 bp, synthetic construct
  source 1..80: mol_type = other DNA
acaaatactattattcagaagcaaaagaacatgcaaaggatggtagtgttaatagttactgtttaacaaataagtgtacc

SEQ ID NO: 56436 - DNA, 80 bp, synthetic construct
  source 1..80: mol_type = other DNA
gaagatagattgcctatcaatccagcctggttcaaatcatgcaattgggaaaaaaatattaaggaaacagcaacaataaa

SEQ ID NO: 56437 - DNA, 80 bp, synthetic construct
  source 1..80: mol_type = other DNA
ggaatttgtatacaacgacatcaagtcataccgcaagtcactagaatcagaaatcaatacagacctaatgatacaccatt

SEQ ID NO: 56438 - DNA, 80 bp, synthetic construct
  source 1..80: mol_type = other DNA
ataggcctacgaaaaatttgccacatattaagcctatttacaaatccctcagtatacaaggaagcgagacagtggatggc

SEQ ID NO: 56439 - DNA, 80 bp, synthetic construct
  source 1..80: mol_type = other DNA
ctacagaatagctttatagagggagaaatgccagctatcagtgggttagccaacggttaccacttgacgtataaaggcac

SEQ ID NO: 56440 - DNA, 80 bp, synthetic construct
  source 1..80: mol_type = other DNA
acagctatttgatatagtaatatttataagaaaagcagtatacaaagccaattattacaaaatatacactactgggccta

SEQ ID NO: 56441 - DNA, 80 bp, synthetic construct
  source 1..80: mol_type = other DNA
gtattgctataaatatggagcataatgaacaatgtacaggacattgtccaagcaaaataccttctaaagaaaactggttg

SEQ ID NO: 56442 - DNA, 80 bp, synthetic construct
  source 1..80: mol_type = other DNA
tgtacgggtcgtgccaagatgtcattaggcctgagatagatgtttacaaaaaatctggaaatgagcaaagcttgatagag

SEQ ID NO: 56443 - DNA, 80 bp, synthetic construct
  source 1..80: mol_type = other DNA
ctctgcataacatcagcacatgaaactttttgtaatgatttggacatattagagcccataattggagaaaagatatcagc

SEQ ID NO: 56444 - DNA, 80 bp, synthetic construct
  source 1..80: mol_type = other DNA
atcattccagtctacacagtctaaccaattacccaatataatagccttcaggaaaggacagatacttacaggtgctatca

SEQ ID NO: 56445 - DNA, 80 bp, synthetic construct
  source 1..80: mol_type = other DNA
atgacctaggaaatacaggcagccagtgtgggtcgatacaattagtaaacaacacattattaggggaaggaaatgtcaaa

SEQ ID NO: 56446 - DNA, 80 bp, synthetic construct
  source 1..80: mol_type = other DNA
tttgactatatatgccatgctatgagaaggaaagatgttatcatcagaaggtgttataatgaccactttacaagttgcaa

SEQ ID NO: 56447 - DNA, 80 bp, synthetic construct
  source 1..80: mol_type = other DNA
cctgttgcagaagcgctctgacttgattggtaatattaatgggaaagaattgcaaatcagtatgtcaggacgatcaatgg

SEQ ID NO: 56448 - DNA, 80 bp, synthetic construct
  source 1..80: mol_type = other DNA
gctcaatgaagttcaaaattgaactcggggatataaattacaagttgtatactgaaaatgcagatataactataagaggt

SEQ ID NO: 56449 - DNA, 80 bp, synthetic construct
  source 1..80: mol_type = other DNA
gagtgcggaggttgtattggctgtgcagaagctgtctcatgttctttagaagtggaatcctctagtgaaatattatgtaa

SEQ ID NO: 56450 - DNA, 80 bp, synthetic construct
  source 1..80: mol_type = other DNA
agttgaatgtaattgtcaaccatacatagagaacattttgataaaaccgcaaacaaaaacctattcatttaaggctacat

SEQ ID NO: 56451 - DNA, 80 bp, synthetic construct
  source 1..80: mol_type = other DNA
gcttggaaaggtctaacaccttagacatcaaaatatgtgggaaacaaattatagcacccttgactataaaatcatacaat

SEQ ID NO: 56452 - DNA, 80 bp, synthetic construct
  source 1..80: mol_type = other DNA
caaaaaattgatctatccaaactagacgaatcaaattatgtaaaagaagaagatttagcatgcaatacatggctatgtaa

SEQ ID NO: 56453 - DNA, 80 bp, synthetic construct
  source 1..80: mol_type = other DNA
ggttcaaacagaaggtttcaattttgtcttctctggcttgtttgctgggtttggtagatattggactatcgcaatttata

SEQ ID NO: 56454 - DNA, 80 bp, synthetic construct
  source 1..80: mol_type = other DNA
tattaattgctgtggtaattatattaatactgatatatatattgatgcctatctttagattgatacggaccttcttaata

SEQ ID NO: 56455 - DNA, 80 bp, synthetic construct
  source 1..80: mol_type = other DNA
aaaaatgagatagaatatactactgagcaaaaaatgagatagtaataacaggttgggttgggttatgtgagttgtgcagg

SEQ ID NO: 56456 - DNA, 80 bp, synthetic construct
  source 1..80: mol_type = other DNA
agtaataacaggttgggttgggttatgtgagttgtgcaggcaaaaattctaaaaacaaataaaaataaaatatctttgtt

SEQ ID NO: 56457 - DNA, 80 bp, synthetic construct
  source 1..80: mol_type = other DNA
attccatgcctgctttaggatgcatagaggatgcactagattctttaaaaacacatatatgccatcaacaatgattgaac

SEQ ID NO: 56458 - DNA, 80 bp, synthetic construct
  source 1..80: mol_type = other DNA
gtgcaagacatgtatgcttgctgcccatccgtttactaattgccccaagagatgtgtctgtggatctagattcaattgta

SEQ ID NO: 56459 - DNA, 80 bp, synthetic construct
  source 1..80: mol_type = other DNA
cagaagctctccgtgtacatagattgggcagagactgccaaggatataaatcattaagtaaagccagacagatgtgtaaa

SEQ ID NO: 56460 - DNA, 80 bp, synthetic construct
  source 1..80: mol_type = other DNA
tctttcatcattgcaatcttcactggacttatacttatggaatttataacacctatccacggtgaaaggacttacaaact

SEQ ID NO: 56461 - DNA, 80 bp, synthetic construct
  source 1..80: mol_type = other DNA
ctcgaggtaacaagatcgtcaaggcatcagggaaaatgtcaaactctgggtctaagaggttgatggcactccaagagaaa

SEQ ID NO: 56462 - DNA, 80 bp, synthetic construct
  source 1..80: mol_type = other DNA
atgtaaagatgcgcggagccagcaagacagaggtttacaactctttcagggatcctctccatgctgctgtgaactctgtc

SEQ ID NO: 56463 - DNA, 80 bp, synthetic construct
  source 1..80: mol_type = other DNA
aatatgtgaccaaccctaggttcaatatctccgattacttcgagattgtgcggcagcccggtgatgggaactgcttctac

SEQ ID NO: 56464 - DNA, 80 bp, synthetic construct
  source 1..80: mol_type = other DNA
acggtgatgtgtttacagctgtgaaccttctgcactctgggcaaacacattttgatgctctcagaatactgccacagttt

SEQ ID NO: 56465 - DNA, 80 bp, synthetic construct
  source 1..80: mol_type = other DNA
catggtgcaaaacaggctgcccggatttctggaaacacccaatatacaaagaatttaagatgagtatgcccataccagag

SEQ ID NO: 56466 - DNA, 80 bp, synthetic construct
  source 1..80: mol_type = other DNA
gcaccgcatattacccctgacaattacttatacataaacaatatcttgtatattatagattacaaggtgtctgtatcaaa

SEQ ID NO: 56467 - DNA, 80 bp, synthetic construct
  source 1..80: mol_type = other DNA
gcaccgcatattacccctgacaattatctgtacataaacaatatcttatatatcatagattataaagtatctgtgtctaa

SEQ ID NO: 56468 - DNA, 80 bp, synthetic construct
  source 1..80: mol_type = other DNA
catggtgcaaaacaggctgtccagacttctggaggcatccgatatataaagaatttaaaatgagtatgcctataccagag

SEQ ID NO: 56469 - DNA, 80 bp, synthetic construct
  source 1..80: mol_type = other DNA
gcaccgcatattacccctgacaactacttatacataaacaacatactttatatcatcgattataaggtttcagtctcaaa

SEQ ID NO: 56470 - DNA, 80 bp, synthetic construct
  source 1..80: mol_type = other DNA
ttagttccgatagatttaaagaaatatatcctacattggtagttgatataaattttaatcaattctttgatctaaagaaa

SEQ ID NO: 56471 - DNA, 80 bp, synthetic construct
  source 1..80: mol_type = other DNA
ctactttacgagaaattcggtgacgatgaagaattccttctaaaagtggcacatggtgactttactctcactgcaccttg

SEQ ID NO: 56472 - DNA, 80 bp, synthetic construct
  source 1..80: mol_type = other DNA
cttggtgcaagacaggatgtgcagagttttggaaacatccaatatataaggaatttaagatgagtatgcctgtacctgag

SEQ ID NO: 56473 - DNA, 80 bp, synthetic construct
  source 1..80: mol_type = other DNA
tgagagtagcgtaataacatatgacaagtactacgaattaactagagatatatctgcaagactaaatattccgatagaga

SEQ ID NO: 56474 - DNA, 80 bp, synthetic construct
  source 1..80: mol_type = other DNA
gcaccgcatattacccctgacaattatctgtatgtagacaacatattgtatctaatagattataaagtatccgtatccaa

SEQ ID NO: 56475 - DNA, 80 bp, synthetic construct
  source 1..80: mol_type = other DNA
acaggaccaaaacctgcaatatgtcagagggcaacagcaacccttgggacggtcgggtcaaacaccagtggcaccactga

SEQ ID NO: 56476 - DNA, 80 bp, synthetic construct
  source 1..80: mol_type = other DNA
ttagtgtttgagatggagggcaatggctcccaaccacctcagaaaggttctggcaacactaacccgaatgttgacccgcc

SEQ ID NO: 56477 - DNA, 80 bp, synthetic construct
  source 1..80: mol_type = other DNA
ttagtgtttgagatggagggcaatggctccaactcagagccaaagcagagcagcaacccaatggtcgttgacccgcctgg

SEQ ID NO: 56478 - DNA, 80 bp, synthetic construct
  source 1..80: mol_type = other DNA
ttagtgtttgaaatggaggggcttggctcccagcgaggccagcggcctgatgaaccggttgccaccaatgcagcacaggc

SEQ ID NO: 56479 - DNA, 80 bp, synthetic construct
  source 1..80: mol_type = other DNA
aagggtaggcaggcctaaaatcaggtataaataaaatccatataaataaagtcaaaaattgttgttggtagcacactact

SEQ ID NO: 56480 - DNA, 80 bp, synthetic construct
  source 1..80: mol_type = other DNA
gtagtgtactaccagcaacaaacagtgacaatggcgaatctaataattatttcaatgctcctgggcattgcctatgggca

SEQ ID NO: 56481 - DNA, 80 bp, synthetic construct
  source 1..80: mol_type = other DNA
gatgtacaaacttgaagaactggctgacgattatatagaactggtagagcaggtgaatatattaggaaaagaaatcaaaa

SEQ ID NO: 56482 - DNA, 80 bp, synthetic construct
  source 1..80: mol_type = other DNA
ttttaaaacaatctataattgtcatgcttgcaattattttgatactactgctttctgagaatataatcttcaattacctc

SEQ ID NO: 56483 - DNA, 80 bp, synthetic construct
  source 1..80: mol_type = other DNA
ttcaacaccctttatcgctcttgttctatgtgcgggttgatacactatagaccaggacttaaggttgatttgaccaagac

SEQ ID NO: 56484 - DNA, 80 bp, synthetic construct
  source 1..80: mol_type = other DNA
taacaaatgcgggagttgcatttgcgggtttgatgagcaacaatcatctgggtttgaatacgaggtgtttctaaaagaca

SEQ ID NO: 56485 - DNA, 80 bp, synthetic construct
  source 1..80: mol_type = other DNA
tgcatgttcaaagggaatcttgcaaatttagacctagagtaaaccattttagaaacacaaagattttgttatttacaatt

SEQ ID NO: 56486 - DNA, 80 bp, synthetic construct
  source 1..80: mol_type = other DNA
gctatttgcgcttctttttatacagtttatgcagatgaagactgcttgtccaagaatattaggataacatatcaagaatt

SEQ ID NO: 56487 - DNA, 80 bp, synthetic construct
  source 1..80: mol_type = other DNA
acacagttgcataggaccacacataatgggtgacacctgcatgtcaaaaagtgaattgtattctgatctgctttcaaaga

SEQ ID NO: 56488 - DNA, 80 bp, synthetic construct
  source 1..80: mol_type = other DNA
ttggtgaaatatgtgtcaaagacgatatatctattgttaagagtacaactgcctttagtaagaatgcactagcacttgaa

SEQ ID NO: 56489 - DNA, 80 bp, synthetic construct
  source 1..80: mol_type = other DNA
acttaatcacagaatatgacaaaaaatatttcgaacctgacactgtaaatgaccaattcaacaaaattgaatttgctcaa

SEQ ID NO: 56490 - DNA, 80 bp, synthetic construct
  source 1..80: mol_type = other DNA
gatgcacacagaatgatattattggaaagaatactttataagaccgaatgcgagatgctgagcttaaagaaaaatagtgg

SEQ ID NO: 56491 - DNA, 80 bp, synthetic construct
  source 1..80: mol_type = other DNA
accttacaatgttgcttggcgcacatatttgaaaaatcataacatagatttatgcagcaggcataattacaaaatgatat

SEQ ID NO: 56492 - DNA, 80 bp, synthetic construct
  source 1..80: mol_type = other DNA
gtcagtgtatcaacacccattccatgtgtaaaaatacagatatagacttcaataaagaaattgaaacatattataaagcc

SEQ ID NO: 56493 - DNA, 80 bp, synthetic construct
  source 1..80: mol_type = other DNA
aatgctgcagcttataggtctgacttcaacacaataatagatacattaaaaacagcatttagaggacttacaaaagtact

SEQ ID NO: 56494 - DNA, 80 bp, synthetic construct
  source 1..80: mol_type = other DNA
gattgaaaattacatagaaaaagatgattctgatgcccttaaggctttgtttagcaacattactgattctgttcagaata

SEQ ID NO: 56495 - DNA, 80 bp, synthetic construct
  source 1..80: mol_type = other DNA
actatcagatggtcggtgtgctaaaatttgctagcaagttgctaaatatcagtttaggtaggactacccgttcggctcaa

SEQ ID NO: 56496 - DNA, 80 bp, synthetic construct
  source 1..80: mol_type = other DNA
cattcaataatgactaacgaaattcctaagtcaaacccctttactgattatagttattctagtgtcaatattaaagaatg

SEQ ID NO: 56497 - DNA, 80 bp, synthetic construct
  source 1..80: mol_type = other DNA
tatgtcaccagagagcttaaaatgttttaagaaaagagacagtgcaccacatacgaaccatttgctttgcaagatagata

SEQ ID NO: 56498 - DNA, 80 bp, synthetic construct
  source 1..80: mol_type = other DNA
acaaatataaagcatttgactggccagaaacagagacagttcaaaaagggcaaaagttgtgtcttggtgatagccactgc

SEQ ID NO: 56499 - DNA, 80 bp, synthetic construct
  source 1..80: mol_type = other DNA
gcaactacaaaattctataggtcttttattgtcaaagattggtctgaatgcaacccagtattagataaatttgggaattt

SEQ ID NO: 56500 - DNA, 80 bp, synthetic construct
  source 1..80: mol_type = other DNA
aacttagaatttactgctataactgcagacaagattatgtcattaactaattgttataaagagtctttcactgcacaacc

SEQ ID NO: 56501 - DNA, 80 bp, synthetic construct
  source 1..80: mol_type = other DNA
tgccgacatgcaaactggtattaaaaaatgctcagccgatgagattggggaatgtataacccttgaggataaatcgtggc

SEQ ID NO: 56502 - DNA, 80 bp, synthetic construct
  source 1..80: mol_type = other DNA
caattgttttctgcggagataaatactactactctgagggtaaagaacatgcaaaagatggatccattaataattattgt

SEQ ID NO: 56503 - DNA, 80 bp, synthetic construct
  source 1..80: mol_type = other DNA
cttgcaaataaatgctccgaacagcggttcccaatacataaaaattggttcaaaaaatgcaactgggacaagacttataa

SEQ ID NO: 56504 - DNA, 80 bp, synthetic construct
  source 1..80: mol_type = other DNA
ggagttcaccactatgaggcaaataaattacaatgacataacttcatatagaaaggcaattgaatccgaaataggaacag

SEQ ID NO: 56505 - DNA, 80 bp, synthetic construct
  source 1..80: mol_type = other DNA
atctaatgacacaccattataagcctacaaagaatcttccacatgttgttccacgctatcacagtatagatgttcaaggt

SEQ ID NO: 56506 - DNA, 80 bp, synthetic construct
  source 1..80: mol_type = other DNA
acagaatcaacagaaggtattattaatgggtttatacaaaatacgatacctgctatcagcggcttaggcgtcggctacca

SEQ ID NO: 56507 - DNA, 80 bp, synthetic construct
  source 1..80: mol_type = other DNA
cttaggttttaaaggaaatcaactatttgacatagttatttttgttaaaaaggctgtatataaagcgcaatatcagaaag

SEQ ID NO: 56508 - DNA, 80 bp, synthetic construct
  source 1..80: mol_type = other DNA
tgtacacaactggacctagtatatctataaatatcgaacataatgaaaagtgtacaggccactgtcctgaaaaaatacct

SEQ ID NO: 56509 - DNA, 80 bp, synthetic construct
  source 1..80: mol_type = other DNA
gctaaagaaggttggttgacattttctaaggaacatacaagctcttgggggtgtgaggagtatggttgccttgccataga

SEQ ID NO: 56510 - DNA, 80 bp, synthetic construct
  source 1..80: mol_type = other DNA
catggttttgaatgttgatgataacgggcatttagtccctaagatgtatacatgcagggcagcatgcgatattagattga

SEQ ID NO: 56511 - DNA, 80 bp, synthetic construct
  source 1..80: mol_type = other DNA
cactggctgcctatatggttcttgccaagatgttatacgcccagaattagatatttataaaaagattggtagtgaagcat

SEQ ID NO: 56512 - DNA, 80 bp, synthetic construct
  source 1..80: mol_type = other DNA
cgcttatagaaatatgtataactttgcctcatgagacatattgcaatgatatggatatattagaacctattattggggat

SEQ ID NO: 56513 - DNA, 80 bp, synthetic construct
  source 1..80: mol_type = other DNA
aaattgagtgcatcttttcaaaatacacaaacaaatcagctgccaaacctcatggcttataaaaagggaaaagtctatac

SEQ ID NO: 56514 - DNA, 80 bp, synthetic construct
  source 1..80: mol_type = other DNA
tggacagataaatgatgtaggaaacacagcattacaatgcggttcaatacaagtagtcaatggttcaactattgggtctg

SEQ ID NO: 56515 - DNA, 80 bp, synthetic construct
  source 1..80: mol_type = other DNA
gcaatcctaaatttgactatatatgccatgctatgagacgaaaagatgtcattgtgagaaaatgctttaatgacaattac

SEQ ID NO: 56516 - DNA, 80 bp, synthetic construct
  source 1..80: mol_type = other DNA
cagtcttgcaccagactgaatccaagaaatgatttaattccttacaggaagggcgatattattgagatatcgaagacagg

SEQ ID NO: 56517 - DNA, 80 bp, synthetic construct
  source 1..80: mol_type = other DNA
gtcaaatatgggtcaaatgacatttaaaatagagttgggtgatattaattataaaatatttactaaatcagtagatctcc

SEQ ID NO: 56518 - DNA, 80 bp, synthetic construct
  source 1..80: mol_type = other DNA
agatgtctggtgtttgtgctggatgcattgattgtgctgaaggcatatcatgttctataaatgccgatgtgtcagctgaa

SEQ ID NO: 56519 - DNA, 80 bp, synthetic construct
  source 1..80: mol_type = other DNA
actgtctgccactgtaaaacaaactgtgaagactttataagcaacattgtaatctcaccccaaatcaaaacttataatat

SEQ ID NO: 56520 - DNA, 80 bp, synthetic construct
  source 1..80: mol_type = other DNA
aaaagtacattgcaagtcaaaagttgaaaagataacagcaaatatctgtgggagaaatattgacttacaattaacagtta

SEQ ID NO: 56521 - DNA, 80 bp, synthetic construct
  source 1..80: mol_type = other DNA
ataaggataatgcagaaataatattgtcatcaacaaagcttaaccatttcgaaattgtcggaactacttcaacatcaggt

SEQ ID NO: 56522 - DNA, 80 bp, synthetic construct
  source 1..80: mol_type = other DNA
agccgtacaatcaaaaaatagatctgtcacagctggatgaatcgaattacataaaagaagaagacctccaatgtggaaca

SEQ ID NO: 56523 - DNA, 80 bp, synthetic construct
  source 1..80: mol_type = other DNA
tggctgtgtaaagtccaaaaagagggaattgacattgtatttaaaggactattttcaggattagggaaatattgggctat

SEQ ID NO: 56524 - DNA, 80 bp, synthetic construct
  source 1..80: mol_type = other DNA
tctaatttactcaattataggggtaattgtagtcatactattgatatatgtcctactgccaataggacgccttctaaagg

SEQ ID NO: 56525 - DNA, 80 bp, synthetic construct
  source 1..80: mol_type = other DNA
cattcctaatcaaaaatgaaatagagtacaccatggagcaaaaaattaaatagtgactgtcaaggtaagggtagataaat

SEQ ID NO: 56526 - DNA, 80 bp, synthetic construct
  source 1..80: mol_type = other DNA
aagggtagataaatttagattcagatataagtaaaattcatataaataaagtcaaaaattgttgttggtagcacactact

SEQ ID NO: 56527 - DNA, 80 bp, synthetic construct
  source 1..80: mol_type = other DNA
tggtttaaaaatacaataacaaataatctagaacacacatgcgaacatgtgactgttaattgcggtcagaaatcagtaaa

SEQ ID NO: 56528 - DNA, 80 bp, synthetic construct
  source 1..80: mol_type = other DNA
attccatgcatgctttcgacagcataggggttgtataaggttcttcaaggggacatatatgccgtactcaatgattgaag

SEQ ID NO: 56529 - DNA, 80 bp, synthetic construct
  source 1..80: mol_type = other DNA
caatgtgtgtcaatatagaattaataatcttaacattgtatatctttgctgcaattatatttgcactaatcataacaaaa

SEQ ID NO: 56530 - DNA, 80 bp, synthetic construct
  source 1..80: mol_type = other DNA
agctatatagcatacttacttctgccattgttttatccagtaacttggttttacggaaaagtttacaaaaggattaattc

SEQ ID NO: 56531 - DNA, 80 bp, synthetic construct
  source 1..80: mol_type = other DNA
tccactctcaacaagtcagattggtgaccgctgttttgctggtggtagcctttttaaagaaatgaatctgagtgtgggac

SEQ ID NO: 56532 - DNA, 80 bp, synthetic construct
  source 1..80: mol_type = other DNA
atgtcctaattgtctacttgcatcacacccttttactagctgcccaaaaatctgtatatgtggttctagatttagctgca

SEQ ID NO: 56533 - DNA, 80 bp, synthetic construct
  source 1..80: mol_type = other DNA
cagaagccctcaaagtgcacaggatggggaaagactgtctaggttataaatccctaagcaaagctagacaaatgtgcaag

SEQ ID NO: 56534 - DNA, 80 bp, synthetic construct
  source 1..80: mol_type = other DNA
tctaaaagctggtcattcacagctgctatactaactggcttaatattgatggaatttgtttcaccaattgcaggtgaaag

SEQ ID NO: 56535 - DNA, 80 bp, synthetic construct
  source 1..80: mol_type = other DNA
agtagtgtactaccaagtatagaaaacgttcaaatcctatctcattccaaatatggaagttctaagcttaatctggttgc

SEQ ID NO: 56536 - DNA, 80 bp, synthetic construct
  source 1..80: mol_type = other DNA
ctatgatgattggggaatcaagcgaggtgtacactctagatgatttacccgatgatatggtacaaatggctgagagagtg

SEQ ID NO: 56537 - DNA, 80 bp, synthetic construct
  source 1..80: mol_type = other DNA
aacatttactatcagataatcattataaattatggtgttacatgggctttcttgctacttggtctagttctagcatattt

SEQ ID NO: 56538 - DNA, 80 bp, synthetic construct
  source 1..80: mol_type = other DNA
ctttaagaaataccagcacaagttcctagacttttatgcaatgtattgtaatgaatgtgatatgtatcatgaaaaagccg

SEQ ID NO: 56539 - DNA, 80 bp, synthetic construct
  source 1..80: mol_type = other DNA
gtctaacacattggggtgattttacaaataaatgcagacaatgtacatgtgggcaatatgaagatgttactggattgata

SEQ ID NO: 56540 - DNA, 80 bp, synthetic construct
  source 1..80: mol_type = other DNA
gtacacaaaaaatcatacaattgcttagttaaatataaagcaaagtggataagagatattttaatcacatatttaattat

SEQ ID NO: 56541 - DNA, 80 bp, synthetic construct
  source 1..80: mol_type = other DNA
aatattggttaaagattcactgttatttgttggtgcaacaggaactgactttgctacatgtatagatgagaaaacagtta

SEQ ID NO: 56542 - DNA, 80 bp, synthetic construct
  source 1..80: mol_type = other DNA
catggaactgtactggaccgtttctaaatttaggtagatgtgataaatctcaaaagaaaacaagttacaatgatatagct

SEQ ID NO: 56543 - DNA, 80 bp, synthetic construct
  source 1..80: mol_type = other DNA
gctgtaacagaagtttgcctaaaagatgatgtaagcatgataaagaccgaagcaaaatatgtgaagaacactacaggaac

SEQ ID NO: 56544 - DNA, 80 bp, synthetic construct
  source 1..80: mol_type = other DNA
aaccaattaaaagggttaggcgtcatatcggtactagacatcccaatgataaaaagaatgccagacgagatatcaggatc

SEQ ID NO: 56545 - DNA, 80 bp, synthetic construct
  source 1..80: mol_type = other DNA
actgaagtatattgataacttagaaacataccatgaacaattaactgcagaatatgctttccttactagatactgtgatt

SEQ ID NO: 56546 - DNA, 80 bp, synthetic construct
  source 1..80: mol_type = other DNA
attacacgcagtatactgacaattcaggttatagtcaaacagtatggagaacttatttacggtctcatgattttggtgca

SEQ ID NO: 56547 - DNA, 80 bp, synthetic construct
  source 1..80: mol_type = other DNA
tgtgttgtctatccaaatcagcacttctgtagatgtgtgaaatatggcgataagtgcaatagtgctaaatgggattttac

SEQ ID NO: 56548 - DNA, 80 bp, synthetic construct
  source 1..80: mol_type = other DNA
aaatgaaatgaagacattttatacaggtcgaaaagtgaaatttaacaaagacttgaatttggcactattagtattgcata

SEQ ID NO: 56549 - DNA, 80 bp, synthetic construct
  source 1..80: mol_type = other DNA
aagcatttagaggcactggaactgcatacatagcagaagctatggcccgaaaagacaatggatcgatggcacactttgcc

SEQ ID NO: 56550 - DNA, 80 bp, synthetic construct
  source 1..80: mol_type = other DNA
ttagaagtgcgaaagaagtttccaacaaatgctctattggcagcattaatagattatatagtttacctacaatcacttgc

SEQ ID NO: 56551 - DNA, 80 bp, synthetic construct
  source 1..80: mol_type = other DNA
agaaatatctacattcgaacttgatgaggactgggaagacttcaaatataaaccagaaccaactgagtcaccttctcaag

SEQ ID NO: 56552 - DNA, 80 bp, synthetic construct
  source 1..80: mol_type = other DNA
ctaggtcacatagaagtgatcagtacaacttcaaaaatgcagagagtaatagtaatgtcaaagtttgcaagaatatccag

SEQ ID NO: 56553 - DNA, 80 bp, synthetic construct
  source 1..80: mol_type = other DNA
aaagtactatgtatttcacctagatcaagggctaaattcgagaatattatagcatgcggagaacatgcaaatccctctgt

SEQ ID NO: 56554 - DNA, 80 bp, synthetic construct
  source 1..80: mol_type = other DNA
attcgctaacaacatagccatgagaaagtggcttgttgcagattggcatgattgcagacctcagaagtcatcgggtggtc

SEQ ID NO: 56555 - DNA, 80 bp, synthetic construct
  source 1..80: mol_type = other DNA
atatatgatgcccaatgttagcatttatcaatctaattcagaaaggagtcattattgtatagctgactctcattgtctag

SEQ ID NO: 56556 - DNA, 80 bp, synthetic construct
  source 1..80: mol_type = other DNA
aagactacgaaatagtggaaacagagcttttaagtgcactaaagaagtctaagtgctgggccaaggagatggatgatatt

SEQ ID NO: 56557 - DNA, 80 bp, synthetic construct
  source 1..80: mol_type = other DNA
gttttgcacaagcaaagtggtggtctaagaagttgtaggatgaaagatactgggaactgtgatgttcaagaaaatgactg

SEQ ID NO: 56558 - DNA, 80 bp, synthetic construct
  source 1..80: mol_type = other DNA
gacaattgtcttatgtgaaaatggcaattattactattcagaaatccacaaggattatgataaagatcaagatgtgggac

SEQ ID NO: 56559 - DNA, 80 bp, synthetic construct
  source 1..80: mol_type = other DNA
atttttgccttagtcccagatgcagtacaataagatatccgataaacaagagacatataaaaagatgtaattggcagatt

SEQ ID NO: 56560 - DNA, 80 bp, synthetic construct
  source 1..80: mol_type = other DNA
tcacactcgacaattgataaaatctcagttcaagaactagcagacatagaacagtataaaaaggctatttcacaaaagtt

SEQ ID NO: 56561 - DNA, 80 bp, synthetic construct
  source 1..80: mol_type = other DNA
acagacaagtttgtctatcttcaaatacgtgaagaccaaaaatttgccgcacattaaacctgcatataagtatataactg

SEQ ID NO: 56562 - DNA, 80 bp, synthetic construct
  source 1..80: mol_type = other DNA
tggaaggcattgagactgtggaaggcatagaaaatgctttcatagagtctgagatccctgcattagctggtacagctatc

SEQ ID NO: 56563 - DNA, 80 bp, synthetic construct
  source 1..80: mol_type = other DNA
ggcttcaaaataaactcaagagaaggtaattatttaatggatgtgataggatatgttaagagcgcatcatactctgctac

SEQ ID NO: 56564 - DNA, 80 bp, synthetic construct
  source 1..80: mol_type = other DNA
atatacaaaattgtatacaactggtcctactattggaataaatactagacatgatgagaagtgcacaggaccctgtccag

SEQ ID NO: 56565 - DNA, 80 bp, synthetic construct
  source 1..80: mol_type = other DNA
acatcaatgttattgaagtcggtgatgatctatcactccatacagaatcatacatctgtagtgcagattgtgttatcaca

SEQ ID NO: 56566 - DNA, 80 bp, synthetic construct
  source 1..80: mol_type = other DNA
ctgtgatagaccacaaagatggatggctaactttttcaaaagaaagaaccagtacatggggttgtgaagagtttggttgt

SEQ ID NO: 56567 - DNA, 80 bp, synthetic construct
  source 1..80: mol_type = other DNA
ttagcagttagtgatgggtgtgtcttcgggtcctgtcaagacattataaaagatgagctagctgtttataggaagactac

SEQ ID NO: 56568 - DNA, 80 bp, synthetic construct
  source 1..80: mol_type = other DNA
tgaagaacttactacagtagaattgtgtctgacattttctgataaaacatactgcacaaacttaaatgctataactccca

SEQ ID NO: 56569 - DNA, 80 bp, synthetic construct
  source 1..80: mol_type = other DNA
taataacagacaaattcgaagttcaatttaagacagttgaatcttacacattaccaagagtaattgctgtaaaaaatcat

SEQ ID NO: 56570 - DNA, 80 bp, synthetic construct
  source 1..80: mol_type = other DNA
gaaattaaagttgggcagattaatgacttaggcgtttactctaaagggtgtggaaatgtgcaaaaagtaaatggcaccaa

SEQ ID NO: 56571 - DNA, 80 bp, synthetic construct
  source 1..80: mol_type = other DNA
ttatgggaatggagtgccaaaatttgactatctatgccatctagcaagtagaaaagaggtaattttgaggaaatgctttg

SEQ ID NO: 56572 - DNA, 80 bp, synthetic construct
  source 1..80: mol_type = other DNA
acaacgattaccaagcttgcaaatttttacaaagcccttcaagttaccgtttagaagagcatcagggcacagtaacggtc

SEQ ID NO: 56573 - DNA, 80 bp, synthetic construct
  source 1..80: mol_type = other DNA
atagattataaaaagattttgggcactattaagatgaaggctatactgggagatgttaaatacaaaaactaccagagtaa

SEQ ID NO: 56574 - DNA, 80 bp, synthetic construct
  source 1..80: mol_type = other DNA
tatagaaatcaatgctgaagggacatgtgctgggtgtataaattgctttgaaaatattcattgtgaatttactatacata

SEQ ID NO: 56575 - DNA, 80 bp, synthetic construct
  source 1..80: mol_type = other DNA
ccactgttgaagcgagctgtcctatagtgacagattgtgtttcattccatgatagaattctaataacaccagatgaacat

SEQ ID NO: 56576 - DNA, 80 bp, synthetic construct
  source 1..80: mol_type = other DNA
gttgataaggaaacagctcagatccgcttacaaactgacaatacaaatcattttgaagtcgctgggactacagtaaaatc

SEQ ID NO: 56577 - DNA, 80 bp, synthetic construct
  source 1..80: mol_type = other DNA
aaatatgcattgaaggtagtctgtcaagataaacccaaagtatctttaaaatttaagatttgtaacacgaacattgatgc

SEQ ID NO: 56578 - DNA, 80 bp, synthetic construct
  source 1..80: mol_type = other DNA
atcaatgaccattgtagattctaagccgatcctagagcttgcaccagtagaccaaactgcatatatcaaagagaaagatg

SEQ ID NO: 56579 - DNA, 80 bp, synthetic construct
  source 1..80: mol_type = other DNA
agagatgtaaaacctggatgtgtagagttcgagatgaaggatttcaagttatattagagccttttaaaaatttgttcggc

SEQ ID NO: 56580 - DNA, 80 bp, synthetic construct
  source 1..80: mol_type = other DNA
tcttatattgggatattttatacaggcatattatctgttatttgtctcctcatcgttatttatataatattacccatttg

SEQ ID NO: 56581 - DNA, 80 bp, synthetic construct
  source 1..80: mol_type = other DNA
tattacccatttgtttcaaattgagagacactttgcggcaacatgaagatgcgtataagaaggaaatgaaaataaggtaa

SEQ ID NO: 56582 - DNA, 80 bp, synthetic construct
  source 1..80: mol_type = other DNA
tgggtggtttaaaagtacaacatatataacactcgatcaaacttgtgaacacctcaaggtgtcatgtggacctaaatcga

SEQ ID NO: 56583 - DNA, 80 bp, synthetic construct
  source 1..80: mol_type = other DNA
tacaattccatgcttgctttaaccaacatatgtcatgtgtacggtttttacacagaacaatactccctggttcaatagct

SEQ ID NO: 56584 - DNA, 80 bp, synthetic construct
  source 1..80: mol_type = other DNA
aactctatatgccagaatatagagataataatcttagtcactctatcattaacaatcttcatattcttaacaatagtaag

SEQ ID NO: 56585 - DNA, 80 bp, synthetic construct
  source 1..80: mol_type = other DNA
taagacatatatatgttatttactgatgcccgtttttattccaatagcatttgtttatgggtggatatataataagtctt

SEQ ID NO: 56586 - DNA, 80 bp, synthetic construct
  source 1..80: mol_type = other DNA
tgacattgtgttcagctagtccagtgttccaacggtgtttccaagatggggctatagtgaagcaaaacccgtcaaaggaa

SEQ ID NO: 56587 - DNA, 80 bp, synthetic construct
  source 1..80: mol_type = other DNA
gtaagaaatgtaagttgtgcgggttagtttatcacccttttactgagtgtggaacacattgtgtctgtggtgcacggtat

SEQ ID NO: 56588 - DNA, 80 bp, synthetic construct
  source 1..80: mol_type = other DNA
gaaacttctgataggatgaagttgcacagagcatcaggattgtgcccaggatataaaagcttaagagcagctagggtgat

SEQ ID NO: 56589 - DNA, 80 bp, synthetic construct
  source 1..80: mol_type = other DNA
gtgtaagtcaaaagggccagcatcgattttatctataatgacagcagttttgatattaacatttgtcacccctattagtg

SEQ ID NO: 56590 - DNA, 80 bp, synthetic construct
  source 1..80: mol_type = other DNA
ctcagaaaatggtatatttaatataagttctccaacatgtcttgtcaacaaagtccaaaagttcagaggttcagaacaaa

SEQ ID NO: 56591 - DNA, 80 bp, synthetic construct
  source 1..80: mol_type = other DNA
ttgttttggatggatcttaataccagcaatcacattggtggttctaaaggtcctaaagatggcaaccttctcatgctccc

SEQ ID NO: 56592 - DNA, 80 bp, synthetic construct
  source 1..80: mol_type = other DNA
caaccttctcatgctcccattataccaatgagtctaaattcaaatttatactggaaaaagttaaagttgagtatcaaaag

SEQ ID NO: 56593 - DNA, 80 bp, synthetic construct
  source 1..80: mol_type = other DNA
ttcagaaaacggtatctttaatatcagctctccaacttgtcctgtcaataaagtccaaaaattccgtgggtcagaacaaa

SEQ ID NO: 56594 - DNA, 80 bp, synthetic construct
  source 1..80: mol_type = other DNA
gttgagctgtgtgtgccagggttgcatggatgggctactattatgcttttacttactttttgctttgggtggatactaat

SEQ ID NO: 56595 - DNA, 80 bp, synthetic construct
  source 1..80: mol_type = other DNA
acctacaataacattgattatccttaggtgtttaaaagtagtaactttttcttgctcacattatagtagtgagtcaaaat

SEQ ID NO: 56596 - DNA, 80 bp, synthetic construct
  source 1..80: mol_type = other DNA
taactttttcttgctcacattatagtagtgagtcaaaatttaagctcatattggagaaggttaaggttgaatatcagaag

SEQ ID NO: 56597 - DNA, 80 bp, synthetic construct
  source 1..80: mol_type = other DNA
ggttggtctacaattgcactgctatcaaccttttgttttggatggttgcttataccagcagtaacattggttgtcttaaa

SEQ ID NO: 56598 - DNA, 80 bp, synthetic construct
  source 1..80: mol_type = other DNA
gtcactaaaagtattaaccttttcatgctctcattatactaatgagtcaaagttcaaattaatcctagagaaagttaaag

SEQ ID NO: 56599 - DNA, 80 bp, synthetic construct
  source 1..80: mol_type = other DNA
ttctgagaatggcatctttaatatcagctctcctacatgtcttgttaataaagtccagaagtttcgaggctcagagcaga

SEQ ID NO: 56600 - DNA, 80 bp, synthetic construct
  source 1..80: mol_type = other DNA
gttgaactctgtgttccaggtttacatggttggtctacaattgcactgctatcaaccttttgttttggatggttgcttat

SEQ ID NO: 56601 - DNA, 80 bp, synthetic construct
  source 1..80: mol_type = other DNA
accagcagtaacattggttgtcttaaagtcactaaaagtattaaccttttcatgctctcattatactaatgagtcaaagt

SEQ ID NO: 56602 - DNA, 80 bp, synthetic construct
  source 1..80: mol_type = other DNA
taaccttttcatgctctcattatactaatgagtcaaagttcaaattaatcctagagaaagttaaagtagagtaccagaag

SEQ ID NO: 56603 - DNA, 80 bp, synthetic construct
  source 1..80: mol_type = other DNA
gtatagagatagacatgggggtacttggccaccctgtaatcttcctccccattgttcacctgccattcgaaaaaaacaac

SEQ ID NO: 56604 - DNA, 80 bp, synthetic construct
  source 1..80: mol_type = other DNA
ccattatcattagattcagatcttagtatgtacatgaaggacaaagcattatcacctaataaatcagaatgggactctgt

SEQ ID NO: 56605 - DNA, 80 bp, synthetic construct
  source 1..80: mol_type = other DNA
ctatcccgcaacaaacaccaaatacacaccacctagatctcaaacatctaggagattagttgataggttcattgaagatg

SEQ ID NO: 56606 - DNA, 80 bp, synthetic construct
  source 1..80: mol_type = other DNA
atgagtttgaaccatctgacatgatcaattatgtcctttcaggtgagtatctcagtgatgatacatttaatatctcatac

SEQ ID NO: 56607 - DNA, 80 bp, synthetic construct
  source 1..80: mol_type = other DNA
caggtgagtatctcagtgatgatacatttaatatctcatacagtctaaaagaaaaagaagtcaaagaagtcggacgatta

SEQ ID NO: 56608 - DNA, 80 bp, synthetic construct
  source 1..80: mol_type = other DNA
taaatgcagaatcagtgtcaatagaggactgtattcagaattggcaatcattttgtggattcagtttcaagtgttttatg

SEQ ID NO: 56609 - DNA, 80 bp, synthetic construct
  source 1..80: mol_type = other DNA
ttagtgtttgagatggagggcaatgctcgccccgaggggcaaaaccccgagcgcacgaatgtgccactggcctccccaca

SEQ ID NO: 56610 - DNA, 80 bp, synthetic construct
  source 1..80: mol_type = other DNA
tggcagctgcaaccggagcaatcaccagtaatgttcctagttgcattagggagtgctttgctagtgtcaccacgctcccc

SEQ ID NO: 56611 - DNA, 80 bp, synthetic construct
  source 1..80: mol_type = other DNA
tggaccactcgccaagcagctaacacgttcttgggtgcaattcatcttggaccgaggatcaatccctacaccgcacacat

SEQ ID NO: 56612 - DNA, 80 bp, synthetic construct
  source 1..80: mol_type = other DNA
gagtgccatgtttgcaggatggggaggcagtttccaggttcgtgtcacactctctggctcaggactctatgcaggacgtg

SEQ ID NO: 56613 - DNA, 80 bp, synthetic construct
  source 1..80: mol_type = other DNA
cgtgtcacactctctggctcaggactctatgcaggacgtgctgtcgtgtccgttttaccaccaggtgttgacccctcaaa

SEQ ID NO: 56614 - DNA, 80 bp, synthetic construct
  source 1..80: mol_type = other DNA
ggacaccattggcccaagtgctgctctcttgctcccaactcaaattgaaactccaaatgccactgcccagcgcgtggagc

SEQ ID NO: 56615 - DNA, 80 bp, synthetic construct
  source 1..80: mol_type = other DNA
tttagtgtttgagatggagggcaatggttcccagttgccaaccaatcaaaatggtggccatgttggccaggatgttgacc

SEQ ID NO: 56616 - DNA, 80 bp, synthetic construct
  source 1..80: mol_type = other DNA
gtttcatcccaacattaatccatacacatcccatctttcaggcatgtgggcagggtggggaggtagctttgaggcccgca

SEQ ID NO: 56617 - DNA, 80 bp, synthetic construct
  source 1..80: mol_type = other DNA
cgcctggcgcgactggtccgaccacattccatgttgttgtgtctaatccagaacaacccaatgggcccgcacaacgcctg

SEQ ID NO: 56618 - DNA, 80 bp, synthetic construct
  source 1..80: mol_type = other DNA
agatggccgcagcaacaggggccgttagcaacaacgtccccatgtgtgtgagggagtgttttgccagtgtgaccacactc

SEQ ID NO: 56619 - DNA, 80 bp, synthetic construct
  source 1..80: mol_type = other DNA
ccttggacaacgcgccaagcatccaacacctttcttggtgccatccatctcggtccacgcatcaacccctatactgcaca

SEQ ID NO: 56620 - DNA, 80 bp, synthetic construct
  source 1..80: mol_type = other DNA
cttgagtgccatgtttgctggctggggtggcagtttccaaatacgagtcaccatatctggttctgggctgtatgcaggcc

SEQ ID NO: 56621 - DNA, 80 bp, synthetic construct
  source 1..80: mol_type = other DNA
acaggacacaattggaccaaatgcagcacttctcctgcctacgcagattgagacacccaacggagctgcgcaaagggtgg

SEQ ID NO: 56622 - DNA, 80 bp, synthetic construct
  source 1..80: mol_type = other DNA
gggttcctggagtggtggagtcgtgacgtgaagtacgtcatagggttagggaggtcctgtattagaggtcacgtgagtgt

SEQ ID NO: 56623 - DNA, 80 bp, synthetic construct
  source 1..80: mol_type = other DNA
tgcgtacttctttcttatctagtttccatggctacgtagataagtaccatggcgggttaatcattaactacaaggaaccc

SEQ ID NO: 56624 - DNA, 80 bp, synthetic construct
  source 1..80: mol_type = other DNA
tttttgtgtttgagatggagggcttgggccagccacagccccaaagggaccaacaggttatggaacaggttgtcaccccc

SEQ ID NO: 56625 - DNA, 80 bp, synthetic construct
  source 1..80: mol_type = other DNA
acttgcaatggccacaggggcagtgaccagcaatgtgcccaattgcatccgggagtgttttgctgcagtcaccacaatac

SEQ ID NO: 56626 - DNA, 80 bp, synthetic construct
  source 1..80: mol_type = other DNA
cgtggaccacacggcaagcagcaaacacctttctcggtgccatacatctgggcccacgcattaacccctacactgcacat

SEQ ID NO: 56627 - DNA, 80 bp, synthetic construct
  source 1..80: mol_type = other DNA
ctgtgtgcgatgtttgctggttggggggggggctttcaggtgcgggttacaatctcaggttccgtgctctttgctggtcg

SEQ ID NO: 56628 - DNA, 80 bp, synthetic construct
  source 1..80: mol_type = other DNA
tttcaggtgcgggttacaatctcaggttccgggctctttgctggtcgggccatcactgccatcctgccaccggaggttga

SEQ ID NO: 56629 - DNA, 80 bp, synthetic construct
  source 1..80: mol_type = other DNA
cgggttacaatctcaggttccgggctctttgctggtcgggccatcactgccatcctgccaccggaggttgacccccaaaa

SEQ ID NO: 56630 - DNA, 80 bp, synthetic construct
  source 1..80: mol_type = other DNA
caggacaccattggaccaacgagtgcacttttattgcccactcaagttgaaacaccaaatgctagtgctcagcgtgtgga

SEQ ID NO: 56631 - DNA, 80 bp, synthetic construct
  source 1..80: mol_type = other DNA
ggagttggccactccatcactaggggttcctggaggtgtggagtcgtgacgtgaattacgtcatagggttagggaggtcc

SEQ ID NO: 56632 - DNA, 80 bp, synthetic construct
  source 1..80: mol_type = other DNA
acaatagtatgtggtctatttccaactcagatccaagttcgtaacatcatgagtccagtcatgggggttattggtttttc

SEQ ID NO: 56633 - DNA, 80 bp, synthetic construct
  source 1..80: mol_type = other DNA
aattggggacacggcgaattgtctgattcaacattagttcaaccgacgttagacgggccatatcaaccaaccacatttaa

SEQ ID NO: 56634 - DNA, 80 bp, synthetic construct
  source 1..80: mol_type = other DNA
ggttcgcttgtgtacttgttgaaccgaacgtatcaaatacgcagagagaatacgttttagatggacagacagtgcagcta

SEQ ID NO: 56635 - DNA, 80 bp, synthetic construct
  source 1..80: mol_type = other DNA
caagtctcaaacgactcaagtactctttggaaattcatactatttatcaaactagaaaaaaatggaacttattctcaata

SEQ ID NO: 56636 - DNA, 80 bp, synthetic construct
  source 1..80: mol_type = other DNA
ttcaacattgtccacgtcaaataagttgtgtgcatggatgaaaagagaagggagagtatactggtacgcaggaactacac

SEQ ID NO: 56637 - DNA, 80 bp, synthetic construct
  source 1..80: mol_type = other DNA
agagaagggagagtatactggtacgcaggaactacaccgaatgcgtcagaaagttattatctaacaataaacaacgataa

SEQ ID NO: 56638 - DNA, 80 bp, synthetic construct
  source 1..80: mol_type = other DNA
tttaccaattgactattggatgctaattgcgcctactcaaataggtagagtagcggagggtacgaacacaactgatagat

SEQ ID NO: 56639 - DNA, 80 bp, synthetic construct
  source 1..80: mol_type = other DNA
tttagtgttagtgtttgagatggagggcaatggctccaacccagagccgaagcaaagcaacaacccaatggtggttgacc

SEQ ID NO: 56640 - DNA, 80 bp, synthetic construct
  source 1..80: mol_type = other DNA
ttgaagattaaagtcaattcacaagttccaagatgatgttcgtattgtttttcattgcactaagtgctgcaagcccagtt

SEQ ID NO: 56641 - DNA, 80 bp, synthetic construct
  source 1..80: mol_type = other DNA
acatatgccgacgatccgaactattttattggaatcgagtttaaaaatataccatatgaatatgatgttaaagtaccaca

SEQ ID NO: 56642 - DNA, 80 bp, synthetic construct
  source 1..80: mol_type = other DNA
tgtttagaatggatgtaacaacgagttatacgtatatgttatcagacgaaatctatgtagcaaacgtaagcggcgtgtta

SEQ ID NO: 56643 - DNA, 80 bp, synthetic construct
  source 1..80: mol_type = other DNA
tcaacatattttaagctttacaatgcattctataaagagcaaattacgttcggacaatcaagaatgtttattccacacat

SEQ ID NO: 56644 - DNA, 80 bp, synthetic construct
  source 1..80: mol_type = other DNA
aacattaagtttcagtaacaagaaagtagtgagaatagatagtacgcgattgaacatagactttatatatttgaggaaaa

SEQ ID NO: 56645 - DNA, 80 bp, synthetic construct
  source 1..80: mol_type = other DNA
tcttacatttggcgtattaaatatttcagattctatggtgccggatgtagtagtaattttaaagaaatttaaaagtgaat

SEQ ID NO: 56646 - DNA, 80 bp, synthetic construct
  source 1..80: mol_type = other DNA
gcatctcaatttctgggtctggcatgtttgctgggaggatcattgcttctgtcataccaccaggtgtttgaccccacaaa

SEQ ID NO: 56647 - DNA, 80 bp, synthetic construct
  source 1..80: mol_type = other DNA
agtctaaaataagtcaactagatgcagaccaagcatcgttgttaggcaactctatagatagtgctattaaggcaatcaga

SEQ ID NO: 56648 - DNA, 80 bp, synthetic construct
  source 1..80: mol_type = other DNA
ccataacagtggctattcacaagccaaatggcgattgattgcaaaaacaggacactttgacatatgctccagacatagca

SEQ ID NO: 56649 - DNA, 80 bp, synthetic construct
  source 1..80: mol_type = other DNA
aactgaatccttattttatcaattgatccaaaagaaaaatactacaggggcctccaaagtcttggggaagttaataacta

SEQ ID NO: 56650 - DNA, 80 bp, synthetic construct
  source 1..80: mol_type = other DNA
gaattgagccagaataggagactaacaatcctggcaacacaagaactattaagtaggtcgcactctggcaggcaggagtc

SEQ ID NO: 56651 - DNA, 80 bp, synthetic construct
  source 1..80: mol_type = other DNA
caataaaattaagaaactcacttgcttcttaacagacgtctcagttgaagtagacatcttttcagtggctgcatccacat

SEQ ID NO: 56652 - DNA, 80 bp, synthetic construct
  source 1..80: mol_type = other DNA
ggtataaacacacaacatgatgagcactgtacagggccgtgcccagctgtggtgccacataaagagaactggatgacatt

SEQ ID NO: 56653 - DNA, 80 bp, synthetic construct
  source 1..80: mol_type = other DNA
tgccacggcgctagtaggaaagatgtgatagtcaggaggtgctacaacaataattttgattcatgcaaattactgaaaga

SEQ ID NO: 56654 - DNA, 80 bp, synthetic construct
  source 1..80: mol_type = other DNA
tgtccatcatgttttgaaagctactcctgcaactttcaaatagtgtcaaatatagacactgtgtgctcagtcgaagggcc

SEQ ID NO: 56655 - DNA, 80 bp, synthetic construct
  source 1..80: mol_type = other DNA
tatttgtatcttcaggaactgaaacataaatgaggtggagccaaaccagctcaattcaattatggtattatttattctga

SEQ ID NO: 56656 - DNA, 80 bp, synthetic construct
  source 1..80: mol_type = other DNA
agtagtgtactaccgatacaatccacatctagataaaggttcttcaagatgctattcttgctcatactagcctttttagg

SEQ ID NO: 56657 - DNA, 80 bp, synthetic construct
  source 1..80: mol_type = other DNA
tataactagctacccagaaagcaggaaatatacactggaagagataacagatgttgttgaaggattagtatctgagcaga

SEQ ID NO: 56658 - DNA, 80 bp, synthetic construct
  source 1..80: mol_type = other DNA
atataaaggagtacattgttttctacacctcattgtttggaagtttgatattgttactagcatttataatgtccataact

SEQ ID NO: 56659 - DNA, 80 bp, synthetic construct
  source 1..80: mol_type = other DNA
ttaagcaaaataacaagcatactagcaagaagaaatgttatttattgtgaagaatgctcaatgtatcattcaaaaagagg

SEQ ID NO: 56660 - DNA, 80 bp, synthetic construct
  source 1..80: mol_type = other DNA
cataaagtataacggtgactttacaaacaaatgtggcttttgcacatgcaatgaacaggaggatgcagaagggttagtaa

SEQ ID NO: 56661 - DNA, 80 bp, synthetic construct
  source 1..80: mol_type = other DNA
tacataaagttagtaagagatgcacatataaatatcaactaaagtgggctaaagtgttgatggtcacactggtcttgctt

SEQ ID NO: 56662 - DNA, 80 bp, synthetic construct
  source 1..80: mol_type = other DNA
ctaatagcacaaaacactattctaattgttgcagctggaacagattgctgggcaaaaaaaagcctagatatggactgtat

SEQ ID NO: 56663 - DNA, 80 bp, synthetic construct
  source 1..80: mol_type = other DNA
agggccaatgttagacataggctcttgcacaaataagaataccagaaactatgatacagaagcacagaaattggtgagcc

SEQ ID NO: 56664 - DNA, 80 bp, synthetic construct
  source 1..80: mol_type = other DNA
tatcagaattctgcctcaaggatgacgtctcaatgttaaaatctgaagtggtatatacaaagaatgatactgggctattt

SEQ ID NO: 56665 - DNA, 80 bp, synthetic construct
  source 1..80: mol_type = other DNA
aatctaaagtaagtcaactagatgcagaccaggtatcattattgggcaactctatagatagtgctattaaagcaataaga

SEQ ID NO: 56666 - DNA, 80 bp, synthetic construct
  source 1..80: mol_type = other DNA
gcccagaaaacttatcctacaatgcacttattggaaacaatattcttaatgaaaaattgtgattattacacaagttttaa

SEQ ID NO: 56667 - DNA, 80 bp, synthetic construct
  source 1..80: mol_type = other DNA
ccataatagtggctattcacaagctaaatggcgattaattgcaaaaacagggcactttgatatatgttctaggcatagca

SEQ ID NO: 56668 - DNA, 80 bp, synthetic construct
  source 1..80: mol_type = other DNA
cccaccacttttgccgatgtataaatgatgggaccaaatgtcagaatggtgattgggattttgctggtgaaatgaatgaa

SEQ ID NO: 56669 - DNA, 80 bp, synthetic construct
  source 1..80: mol_type = other DNA
acttataatagcaaaaatgatttttattcacatgatctgaacttgttttacacaatttttgaaaatgcattcccagggac

SEQ ID NO: 56670 - DNA, 80 bp, synthetic construct
  source 1..80: mol_type = other DNA
tactgaatccttattttaccagttaatccagaaaaaaaatactacaggagcctccaaaatcttaggaaagttaataacca

SEQ ID NO: 56671 - DNA, 80 bp, synthetic construct
  source 1..80: mol_type = other DNA
agtatggtaataataacatgtttgttggagtctggaaatttggacagtacttacttacattgccatatataaataatact

SEQ ID NO: 56672 - DNA, 80 bp, synthetic construct
  source 1..80: mol_type = other DNA
gaattgagccagaataggaggcaaacaatcttggcaacacaagaatcattaagtagatcacactctggcaggcaagagtc

SEQ ID NO: 56673 - DNA, 80 bp, synthetic construct
  source 1..80: mol_type = other DNA
tatgtccagtgcaattcagggcagtgttacaaaagaatgccacaatgcaaaggatgttgggtgcataagccctcggtttg

SEQ ID NO: 56674 - DNA, 80 bp, synthetic construct
  source 1..80: mol_type = other DNA
gcattccaattggcaacctcacagcatgtggcgactcacctaattataagatatataaaactccagaaaagttgtataaa

SEQ ID NO: 56675 - DNA, 80 bp, synthetic construct
  source 1..80: mol_type = other DNA
ggtcataataaagtttttagaagctggacaataaaagattggaaactctgcaatcctatacctactgcaggaggaacaat

SEQ ID NO: 56676 - DNA, 80 bp, synthetic construct
  source 1..80: mol_type = other DNA
tcaaataataaaggggaagtttggtgttcgaatgatgttcactgcctgaatgattttgagcctgcagatgaggaagttgt

SEQ ID NO: 56677 - DNA, 80 bp, synthetic construct
  source 1..80: mol_type = other DNA
caataaagttaaaaaactcacttgtttcttaacagacgtctcagtcaaaacagacatcttttcagtagctgcatctacat

SEQ ID NO: 56678 - DNA, 80 bp, synthetic construct
  source 1..80: mol_type = other DNA
gtaagatggcagataaaggcgtttgtacagtgaatgatgctaaatggaatataatcaagtgtgatagtggattatactat

SEQ ID NO: 56679 - DNA, 80 bp, synthetic construct
  source 1..80: mol_type = other DNA
tttacagaccatagagaaggtcaagacacaggcaatgactttggtgagtattgtatatctcacagttgcaacactgagcg

SEQ ID NO: 56680 - DNA, 80 bp, synthetic construct
  source 1..80: mol_type = other DNA
attccctattaacccagacatattaaaagattgcacttgggagttccattccaggaagtctaaatatatttcaaccatta

SEQ ID NO: 56681 - DNA, 80 bp, synthetic construct
  source 1..80: mol_type = other DNA
gtttagaatcattggaagaattcaggagagcaatgacagagaagttatcacacaccctaacaatttacaattttaaacca

SEQ ID NO: 56682 - DNA, 80 bp, synthetic construct
  source 1..80: mol_type = other DNA
acagctaacctccctcatattaggccaacttataaattcatcacagcaaatggtgtcgaaaactctgatggtattgaatc

SEQ ID NO: 56683 - DNA, 80 bp, synthetic construct
  source 1..80: mol_type = other DNA
ggcatatatcttatctagtatccctgcattaggtgggattagtgttggttataatgttcaaaccaaagacaatttcccat

SEQ ID NO: 56684 - DNA, 80 bp, synthetic construct
  source 1..80: mol_type = other DNA
tattggatataattgtatttatcaaaagtgcagtcatcaggacaacatacaaccatatttatgatactgggcctactata

SEQ ID NO: 56685 - DNA, 80 bp, synthetic construct
  source 1..80: mol_type = other DNA
ggcataaatacacaacatgatgagcactgcacaggaccatgcccggctgtggtgccacataaagaaaactggataacatt

SEQ ID NO: 56686 - DNA, 80 bp, synthetic construct
  source 1..80: mol_type = other DNA
aaatgtaattgaggtcaataaagatcttagtctaatgacaaagacatacatatgtagtagagattgcaccataactatag

SEQ ID NO: 56687 - DNA, 80 bp, synthetic construct
  source 1..80: mol_type = other DNA
ctctcaggaaagaacaagcagatgggggtgtgaagagtttggttgcttggccatcaacacaggatgtgtttttggttctt

SEQ ID NO: 56688 - DNA, 80 bp, synthetic construct
  source 1..80: mol_type = other DNA
gccaagatataatacatccagaaaccaaagtataccgtaaagcagtagaagaagaagttgtcttaacagtgtgcattaat

SEQ ID NO: 56689 - DNA, 80 bp, synthetic construct
  source 1..80: mol_type = other DNA
ttcccaggtaataattactgcacagagataaatgccgttgagcccaagataacagatgagatagagctccagttcaaaac

SEQ ID NO: 56690 - DNA, 80 bp, synthetic construct
  source 1..80: mol_type = other DNA
agttgatacaaaaaccttgcccaaccttcttgcagtgcaaaatcacaaactttacagtggccagataaacgatttgggct

SEQ ID NO: 56691 - DNA, 80 bp, synthetic construct
  source 1..80: mol_type = other DNA
ccttttcacaaggttgtggaaatgtccaaaaaacaaatcactcaatcctaggcatgggtacagccaaatttgattatgtc

SEQ ID NO: 56692 - DNA, 80 bp, synthetic construct
  source 1..80: mol_type = other DNA
tgtcatggtgctagtagaaaagatgtgatagtcaggaggtgctataataataattttgattcatgtagattactgaaaga

SEQ ID NO: 56693 - DNA, 80 bp, synthetic construct
  source 1..80: mol_type = other DNA
ggaaacatcattgatatttgcagataatcatgagactctagaggtagcacacacaaagcatctgataggtgaattacagt

SEQ ID NO: 56694 - DNA, 80 bp, synthetic construct
  source 1..80: mol_type = other DNA
ttaagataatgttaggagatataagatacaaatcatttgctgaatcacctgagctggaaattgatgcaaaatgtgttggg

SEQ ID NO: 56695 - DNA, 80 bp, synthetic construct
  source 1..80: mol_type = other DNA
tgtccatcatgttttgaaagttattcctgcaacttccaaatagtgacaaacatagacaccgtatgctcagttgaagggcc

SEQ ID NO: 56696 - DNA, 80 bp, synthetic construct
  source 1..80: mol_type = other DNA
atgcacactatttcataacagaatcattatatcagctaacaagcagtcatatggactcaaaatgagttgccaaacaaagc

SEQ ID NO: 56697 - DNA, 80 bp, synthetic construct
  source 1..80: mol_type = other DNA
ataaagaggaagctcagattatcttccaaacagataagttaaatcattttgaagtgtctggtaccacattaaattcagga

SEQ ID NO: 56698 - DNA, 80 bp, synthetic construct
  source 1..80: mol_type = other DNA
ctaatcaaaatgaagagttcattatctgcaacaggaaatatagtgtcctattcacaactattgataaaaatgataaaata

SEQ ID NO: 56699 - DNA, 80 bp, synthetic construct
  source 1..80: mol_type = other DNA
gaagtgaatacaggggatcagacttcatatatttatgaaaaggatagcagatgtaagacttggttgtgcagggttagaga

SEQ ID NO: 56700 - DNA, 80 bp, synthetic construct
  source 1..80: mol_type = other DNA
tgaggggatcagtgtcctatttgaaccattaaaggcattctttggaagttactttagtataatattttatgttgtcgttg

SEQ ID NO: 56701 - DNA, 80 bp, synthetic construct
  source 1..80: mol_type = other DNA
gaattattgtcctttttttgattatatacatatttttgccaatgttctttaaactaaaagatgttttgaaaagaaatgaa

SEQ ID NO: 56702 - DNA, 80 bp, synthetic construct
  source 1..80: mol_type = other DNA
tatttgtatcttcaagaactgaaacataaatgaagtggagccaaaccaacttgattcagttatagaattatctattttga

SEQ ID NO: 56703 - DNA, 80 bp, synthetic construct
  source 1..80: mol_type = other DNA
agaattatctattttgaaattatagtgaatataacgccttagggcaaactagctgtttttgatatcggtagcacactact

SEQ ID NO: 56704 - DNA, 80 bp, synthetic construct
  source 1..80: mol_type = other DNA
tggttcaaaagcaaagcatctgttaccctggatagaacctgtgaacatgttaaggttacttgtggaaaaaagtctctgca

SEQ ID NO: 56705 - DNA, 80 bp, synthetic construct
  source 1..80: mol_type = other DNA
attccatgcatgcttcaagcaccacatgtcatgtgttaggttcttccacaataccatattacctggcaatatgataaact

SEQ ID NO: 56706 - DNA, 80 bp, synthetic construct
  source 1..80: mol_type = other DNA
ctatgtgccagaatatagaattaataattatcttagggctaacattagctatatttatattaatggttatgcttacaaag

SEQ ID NO: 56707 - DNA, 80 bp, synthetic construct
  source 1..80: mol_type = other DNA
acttatatatgttacttattgatgccaattttcatgccaatagcttatctttatggttgggcatataacaaaagctgcaa

SEQ ID NO: 56708 - DNA, 80 bp, synthetic construct
  source 1..80: mol_type = other DNA
gttctcaacgagcaaccctattgcgactaggtgtttccatgggggccaattaatagcagagtcaaagtctgctacatcta

SEQ ID NO: 56709 - DNA, 80 bp, synthetic construct
  source 1..80: mol_type = other DNA
aaagtgtaactgctgtggtctagcatatcatccatttactaattgtggctcacactgtgtttgtggcttaaaatttgagg

SEQ ID NO: 56710 - DNA, 80 bp, synthetic construct
  source 1..80: mol_type = other DNA
catcagataggatgaggatccatagagaatctggcttatgtcaagggtacaagagtttacgaattgccaggcttttgtgt

SEQ ID NO: 56711 - DNA, 80 bp, synthetic construct
  source 1..80: mol_type = other DNA
aaatctaaagggtcgtctctagttatatctggattattatccatgttaatcttaagctttgtaacgcctatagagggaac

SEQ ID NO: 56712 - DNA, 80 bp, synthetic construct
  source 1..80: mol_type = other DNA
catgggatgttagtataggtttaaatagattttgggttttataggggtggggtcaaataaaactgctgaatttattttag

SEQ ID NO: 56713 - DNA, 80 bp, synthetic construct
  source 1..80: mol_type = other DNA
tgccaggcacatccggcctctgcatgaaatagatcttattcctctttaatatttcaagttcctgtgctggtgtgcctgga

SEQ ID NO: 56714 - DNA, 80 bp, synthetic construct
  source 1..80: mol_type = other DNA
ttgcaacaacacctgtctgtcaattcgatggaaacacaatttctggttacaagagaatgattgcaacaaaagattcattc

SEQ ID NO: 56715 - DNA, 80 bp, synthetic construct
  source 1..80: mol_type = other DNA
cagtctttaaacttagaccatcagatcttggagggcccagggatggctggtggcttactaacaccaatgacaatgcatct

SEQ ID NO: 56716 - DNA, 80 bp, synthetic construct
  source 1..80: mol_type = other DNA
actggatgcactgcttgtggtgtttatcttgataagttaaaatcagtgggtaaagctttcagaattgtttctttaaaata

SEQ ID NO: 56717 - DNA, 80 bp, synthetic construct
  source 1..80: mol_type = other DNA
tacaagaaaagcatgtattcaacttggtactgaacagatttgtaagagtgttgacagtaatgactgtttaatgactacag

SEQ ID NO: 56718 - DNA, 80 bp, synthetic construct
  source 1..80: mol_type = other DNA
cctgtacctataagacagcctaacacaaaagatatagacaatgtagaatttaagtacttaactagatatgaacaacatgt

SEQ ID NO: 56719 - DNA, 80 bp, synthetic construct
  source 1..80: mol_type = other DNA
aatgccatggtggctggagacacacaagaggcattcaggcttgaggatttgccagatgatatgttaaatatggctatgaa

SEQ ID NO: 56720 - DNA, 80 bp, synthetic construct
  source 1..80: mol_type = other DNA
gataaacatgtactatataatgtgcatagttaattatattgtcacttggtcatttatcatatgtgccttgataattgcct

SEQ ID NO: 56721 - DNA, 80 bp, synthetic construct
  source 1..80: mol_type = other DNA
taatcttcaagaagtatcagcacagattcttgaatttctatgccatgtattgtcacgaatgtgatatgtatcacgataga

SEQ ID NO: 56722 - DNA, 80 bp, synthetic construct
  source 1..80: mol_type = other DNA
gcttgttgactcataaaaagacatacaactgtcttgtgcagtataagtcgaaatggctggttaacttcctgattatatac

SEQ ID NO: 56723 - DNA, 80 bp, synthetic construct
  source 1..80: mol_type = other DNA
atactcttgatgcttgtgaaacattctgtactcatagttcaggccgagggcacagattttgagaaatgtagtggagagac

SEQ ID NO: 56724 - DNA, 80 bp, synthetic construct
  source 1..80: mol_type = other DNA
attatatggaattgcacagggccattcttaaatctaggaaattgtgaaaagaaacagaaaaaagaaccatacagcaatat

SEQ ID NO: 56725 - DNA, 80 bp, synthetic construct
  source 1..80: mol_type = other DNA
tgccacccaattaaaaggtctggatgctatatccattctagatatccccatgatatctaaaatacctgaggacatagcag

SEQ ID NO: 56726 - DNA, 80 bp, synthetic construct
  source 1..80: mol_type = other DNA
gagctttgagattcattgaagaacaagactcataccatgttcaattgactgcagaatatgccatgctaactagatattgt

SEQ ID NO: 56727 - DNA, 80 bp, synthetic construct
  source 1..80: mol_type = other DNA
gattattacacccaatttagtgataattctgggtatagtcagacaacctggagagtctatttaaggtcgcatgactttga

SEQ ID NO: 56728 - DNA, 80 bp, synthetic construct
  source 1..80: mol_type = other DNA
agcatgtatattgtacccaaaacaacacttttgtagatgcgtgaaacatggtgacaagtgctcaagttcaaactgggact

SEQ ID NO: 56729 - DNA, 80 bp, synthetic construct
  source 1..80: mol_type = other DNA
ttgccaacgaaatgaagaattattacagtggcaaacaatcgaaattcgacaaggacctgaacttggccctgatgtcattc

SEQ ID NO: 56730 - DNA, 80 bp, synthetic construct
  source 1..80: mol_type = other DNA
caccatgcttttagaggaacatctagcttttatattgctaaactattaaaggaaaaaaagaaagatgaattgattaatta

SEQ ID NO: 56731 - DNA, 80 bp, synthetic construct
  source 1..80: mol_type = other DNA
tatagataaaataaaatctaagtacccaggtaatgcattattgaaagctataatcgattatataaagtacatgaagagcc

SEQ ID NO: 56732 - DNA, 80 bp, synthetic construct
  source 1..80: mol_type = other DNA
tgactgaaatgactaattttaaacatgatgaaatgtgggatgacttcatcttcagagctcccccaacaaagagcccatct

SEQ ID NO: 56733 - DNA, 80 bp, synthetic construct
  source 1..80: mol_type = other DNA
gtaagaaggtcagagtctgcatatgacttcaaaaacaatattaactccaacccatcgcatatatgcaagaatataaaaac

SEQ ID NO: 56734 - DNA, 80 bp, synthetic construct
  source 1..80: mol_type = other DNA
tgttatatgcctttcaccgaaatcaggggtatcatatgactctataattgcctgcggggagcccaaccagccaagtgttt

SEQ ID NO: 56735 - DNA, 80 bp, synthetic construct
  source 1..80: mol_type = other DNA
atagaaaaccaggagttcaggtatatcagtcaaatgcagaccaaacacatttttgcttgtcagacacccactgtttggaa

SEQ ID NO: 56736 - DNA, 80 bp, synthetic construct
  source 1..80: mol_type = other DNA
aattatgagactatcagcgaggaaatcatagatgcaattaaaaagtcaaggtgctgggagacagattttactgaatatat

SEQ ID NO: 56737 - DNA, 80 bp, synthetic construct
  source 1..80: mol_type = other DNA
ctattatactctgcgacgataacaagttttactattcagagttgcagaaggattatgacaaagaccaagacgtggggtac

SEQ ID NO: 56738 - DNA, 80 bp, synthetic construct
  source 1..80: mol_type = other DNA
ttctgtctcagtcctagatgtaacaccattaggcacccaatcaaccagaaacatatttcaaattgcacatggcaagttag

SEQ ID NO: 56739 - DNA, 80 bp, synthetic construct
  source 1..80: mol_type = other DNA
gttaacatgccccacagtaccggttggcttacatttgccaaggagaggacaagctcctggggttgtgaggaatttggttg

SEQ ID NO: 56740 - DNA, 80 bp, synthetic construct
  source 1..80: mol_type = other DNA
tttagcaatcagtgatggatgtgtttttggatcatgccaggacataataaaagaagagctagcagtttacaggaaagaga

SEQ ID NO: 56741 - DNA, 80 bp, synthetic construct
  source 1..80: mol_type = other DNA
ctgaggagaccacagatgtagagctctgtctgacatttgcagataaaacctactgcactaatcttaatgccataacccct

SEQ ID NO: 56742 - DNA, 80 bp, synthetic construct
  source 1..80: mol_type = other DNA
tggatttaactatagaaggggtttgcacagggtgtattaattgctttgaaaatatacactgcgaattgacaatacatagt

SEQ ID NO: 56743 - DNA, 80 bp, synthetic construct
  source 1..80: mol_type = other DNA
actgtagaagctagttgtccagtaaccagttcatgcacagtattccatgatagaatattgataacaccaaacgaacataa

SEQ ID NO: 56744 - DNA, 80 bp, synthetic construct
  source 1..80: mol_type = other DNA
atatgccatcaaagtaatctgcagtgagaagccaggaccatcgctaccatttaaaatctgtaatgcaaagactgatgcgg

SEQ ID NO: 56745 - DNA, 80 bp, synthetic construct
  source 1..80: mol_type = other DNA
ctatgacattagcagaagcaaaaccaataatagaattggcaccagtagatcaaacaacatatataaaagagaaggatgag

SEQ ID NO: 56746 - DNA, 80 bp, synthetic construct
  source 1..80: mol_type = other DNA
gaagacttatcagaaactgtgtccaattcatcatattttgggaagagcacccgagattgcgtgttcggcctgcgatctgg

SEQ ID NO: 56747 - DNA, 80 bp, synthetic construct
  source 1..80: mol_type = other DNA
ccaatgtggacttggatgactgtgtttctgaacaataaatgacttaaaccaggtatggctgccgatggttatcttccaga

SEQ ID NO: 56748 - DNA, 80 bp, synthetic construct
  source 1..80: mol_type = other DNA
caactcaggaaacagggtgtcacaggacctaaaccagcaatttgccaacgtgccacagcaacacttgggacaatcggctc

SEQ ID NO: 56749 - DNA, 80 bp, synthetic construct
  source 1..80: mol_type = other DNA
agtagtgtactaccaagtatagataacgtttgaagattaaagtcaattcacaagttccaagatgatgttcgtattgtttt

SEQ ID NO: 56750 - DNA, 80 bp, synthetic construct
  source 1..80: mol_type = other DNA
atgccatggtagctggggacacccaagaaacaattaagcttgaggacctaccagatgacatgctaagcacggcaatgaaa

SEQ ID NO: 56751 - DNA, 80 bp, synthetic construct
  source 1..80: mol_type = other DNA
gtaaatatgtactacattatgtgtatgataaattatgctgtgacttggtcatttattttatgcgccctattaattgcttt

SEQ ID NO: 56752 - DNA, 80 bp, synthetic construct
  source 1..80: mol_type = other DNA
actcttcaagaagtatcagcatagattcttaaacttttatgccatgtactgccacgagtgcgatatgtaccatgatagat

SEQ ID NO: 56753 - DNA, 80 bp, synthetic construct
  source 1..80: mol_type = other DNA
ctggcctaaaatataatgaagacttcacaaacaaatgtagacagtgcacatgcgggcagtacgaagatgccgcaggtcta

SEQ ID NO: 56754 - DNA, 80 bp, synthetic construct
  source 1..80: mol_type = other DNA
ctaacccacagaaaaacatacaactgcctcgtgcagtacaaatcaaaatggctgactaatttcttaattgtatacataat

SEQ ID NO: 56755 - DNA, 80 bp, synthetic construct
  source 1..80: mol_type = other DNA
cttgatgcttattaaagattctgtactaatagtgcatgctgatggcacagactttgaaaaatgcagtggtgaggcggata

SEQ ID NO: 56756 - DNA, 80 bp, synthetic construct
  source 1..80: mol_type = other DNA
taacatggaattgtacaggaccattcttgaatctaggtaattgtgagaagaagcaaaagaaggagtcatataataatata

SEQ ID NO: 56757 - DNA, 80 bp, synthetic construct
  source 1..80: mol_type = other DNA
caggctgtaacagaggtatgcctaaaggatgacgttagtatgataaaaacagaagctagatatttcagaaatgctaccgg

SEQ ID NO: 56758 - DNA, 80 bp, synthetic construct
  source 1..80: mol_type = other DNA
gcaactcaattaaaagggctagatgccatatcggttttagatatctccatgatatctaaaataccagaggatatagctgg

SEQ ID NO: 56759 - DNA, 80 bp, synthetic construct
  source 1..80: mol_type = other DNA
agccctaagattcattgaagagcaaagatcataccatgtccaactgactgcagaatatgctatgctaactagatactgcg

SEQ ID NO: 56760 - DNA, 80 bp, synthetic construct
  source 1..80: mol_type = other DNA
attattacacccaattcactgacaattctggatacagtcaaaccacatggagggtttacttgagatcccacgattttaag

SEQ ID NO: 56761 - DNA, 80 bp, synthetic construct
  source 1..80: mol_type = other DNA
gcatgtattttatatcccaatcagcatttttgcagatgtgtcaagcatggggacaaatgctcaagctccaattgggattc

SEQ ID NO: 56762 - DNA, 80 bp, synthetic construct
  source 1..80: mol_type = other DNA
cgccaatgagatgaagaacttctacagtggaaaccagtccaaatttgataaagatttaaatttagcattgatgtccttac

SEQ ID NO: 56763 - DNA, 80 bp, synthetic construct
  source 1..80: mol_type = other DNA
accacgcatttagaggaacatctagtttttatattgctaaactcctgaaggaaaagaaaaatgaagaccttgtaacttat

SEQ ID NO: 56764 - DNA, 80 bp, synthetic construct
  source 1..80: mol_type = other DNA
gcagaaaagattaaaggcaaatatccaggcaatgccctgctaaaggcaataattgactacataaagtatatggaggattt

SEQ ID NO: 56765 - DNA, 80 bp, synthetic construct
  source 1..80: mol_type = other DNA
aaccgagatgaacaatttcaaatatgatgagatgtgggatgacttcatatttgaagttcctcctacaaagagcccatcaa

SEQ ID NO: 56766 - DNA, 80 bp, synthetic construct
  source 1..80: mol_type = other DNA
taagaagattagagtcttcatatgattttaaaactaatgtaaattcaaacccatcacacatttgcaagaatatcaaaact

SEQ ID NO: 56767 - DNA, 80 bp, synthetic construct
  source 1..80: mol_type = other DNA
gtggtctgcttgtcaccaaagtcaggagtgtcatatgattcaataattgcctgtggggagccaagccagccaagcatcta

SEQ ID NO: 56768 - DNA, 80 bp, synthetic construct
  source 1..80: mol_type = other DNA
aacatatgccaacaatgttgccattagaaagtggctagtctcagattggcatgactgcagaccaaaaaaagtctcagggg

SEQ ID NO: 56769 - DNA, 80 bp, synthetic construct
  source 1..80: mol_type = other DNA
cagaaagccagacagccaagttttccaatcaaatgctgaccagacacatttttgtttatcagatacacactgcctagaaa

SEQ ID NO: 56770 - DNA, 80 bp, synthetic construct
  source 1..80: mol_type = other DNA
attatgagacagttggagaggaaatcattgatgcaattaaaaaatcgaaatgctgggaaacagaatttactgagtacatc

SEQ ID NO: 56771 - DNA, 80 bp, synthetic construct
  source 1..80: mol_type = other DNA
caatttaaacagagtgatggggtaaggagttgcaggatgaaagactcaggagaatgtacagtcaccaccaatagatggcc

SEQ ID NO: 56772 - DNA, 80 bp, synthetic construct
  source 1..80: mol_type = other DNA
tataatactctgcgataacgataaattctactactctgagttgcagaaagattatgataaggaccaggatataggtcact

SEQ ID NO: 56773 - DNA, 80 bp, synthetic construct
  source 1..80: mol_type = other DNA
tctgtctcagcccaagatgcaacacaattaggcaccctataaatcggaaacatatatcaaattgtacgtggcaggttagt

SEQ ID NO: 56774 - DNA, 80 bp, synthetic construct
  source 1..80: mol_type = other DNA
cacaacaatatagacaagattgaggtacatgaactggaggatcttgaacagtataagaaggccataacacagaagttgca

SEQ ID NO: 56775 - DNA, 80 bp, synthetic construct
  source 1..80: mol_type = other DNA
gacaagcctaactctatttaaatactcaaagacaaaaaacttgccccatatcaagcctatgtacaaatatataacaattg

SEQ ID NO: 56776 - DNA, 80 bp, synthetic construct
  source 1..80: mol_type = other DNA
aaggaacagagactgctgagggtatagaaagtgcctatatagaatcagagatacccgctctagcaggaacatcaataggt

SEQ ID NO: 56777 - DNA, 80 bp, synthetic construct
  source 1..80: mol_type = other DNA
ttcaagatcacatccaagtctggaaagcatttattagatgtcattggttatgttaagagcgcatcttattcggccgttta

SEQ ID NO: 56778 - DNA, 80 bp, synthetic construct
  source 1..80: mol_type = other DNA
tacaaaattgtatacaacaggacctactataggtgttaacactaaacatgatgaattatgcacagggccatgtcctgtca

SEQ ID NO: 56779 - DNA, 80 bp, synthetic construct
  source 1..80: mol_type = other DNA
gtcacataaatgttatagaagttggagatgacttaacgctgcatacagaggcatatgtatgcaatgcagactgcacaata

SEQ ID NO: 56780 - DNA, 80 bp, synthetic construct
  source 1..80: mol_type = other DNA
atgtgcctcatggcacaggttggctcacatttgctaaggagaggacaagctcctgggggtgtgaagaatttggctgcctg

SEQ ID NO: 56781 - DNA, 80 bp, synthetic construct
  source 1..80: mol_type = other DNA
gcaattagcgatgggtgtgtttttggttcctgtcaagatattataaaagatgaaataactgtctataggaaggagactga

SEQ ID NO: 56782 - DNA, 80 bp, synthetic construct
  source 1..80: mol_type = other DNA
ggagaccacagatgtggaattgtgcctgacatttgcagacaaaacatattgcactaacctcaatgcaattacccctataa

SEQ ID NO: 56783 - DNA, 80 bp, synthetic construct
  source 1..80: mol_type = other DNA
tcaccgaccagtttgaagtccaatttaaaactgtagaggcttacagtctgcctagaatcattgcagtgcggaatcatgag

SEQ ID NO: 56784 - DNA, 80 bp, synthetic construct
  source 1..80: mol_type = other DNA
attatggttgggcaaataaatgacataggtgtttactcaaaaggctgtggaaatgtacagaaagtaaacaacacaaatta

SEQ ID NO: 56785 - DNA, 80 bp, synthetic construct
  source 1..80: mol_type = other DNA
tggaaatggtgtgcctaagtttgattacctgtgtcatttagcaagtagaaaagaagtgatagtgaggaaatgctttgata

SEQ ID NO: 56786 - DNA, 80 bp, synthetic construct
  source 1..80: mol_type = other DNA
atgactaccaggcctgcaaatttctacaaacaccagcaagttataggctagaagaggagggaggttcagttacagtcata

SEQ ID NO: 56787 - DNA, 80 bp, synthetic construct
  source 1..80: mol_type = other DNA
gactacaagaaaatccttggcactataaagatgaaggctatccttggagatgtgaaatataaaacatttgcagacaatgt

SEQ ID NO: 56788 - DNA, 80 bp, synthetic construct
  source 1..80: mol_type = other DNA
ggacctaaccgttgagggggtatgcactggctgcatcaattgttttgaaaatatacattgtgagttaacaatacacagta

SEQ ID NO: 56789 - DNA, 80 bp, synthetic construct
  source 1..80: mol_type = other DNA
cagttgaagccagctgcccggtagtaagttcgtgtacagtatttcatgatagaattttaataaccccaaatgagcacaag

SEQ ID NO: 56790 - DNA, 80 bp, synthetic construct
  source 1..80: mol_type = other DNA
ggtgtagataaagaaaccgcacaagtaagattgcaaacagatacaacaaatcattttgagatagcaggaacaacagttaa

SEQ ID NO: 56791 - DNA, 80 bp, synthetic construct
  source 1..80: mol_type = other DNA
tatgctataaaggtgatctgcaatgaaaagccaggtcctacattgccgttcaagatctgcagtgcaaagacagatgctgc

SEQ ID NO: 56792 - DNA, 80 bp, synthetic construct
  source 1..80: mol_type = other DNA
aatgacactggcagatgctaagccaatattagagctagcacctgtagaccaaacaacatatattaaggagaaagatgaaa

SEQ ID NO: 56793 - DNA, 80 bp, synthetic construct
  source 1..80: mol_type = other DNA
ggtgcaagacttggatgtgcagagtaagagatgaaggttttcaagtaatttttgaaccattcaaaaacttatttggttct

SEQ ID NO: 56794 - DNA, 80 bp, synthetic construct
  source 1..80: mol_type = other DNA
tatattgggatattttatacatttataatatctttaatggcaatatttatagttatatatattgtgttgcctatatgttt

SEQ ID NO: 56795 - DNA, 80 bp, synthetic construct
  source 1..80: mol_type = other DNA
caaactcagagacacactgaggcagcatgaagacgcttataagagagagatgaaaattaggtaaggagcatagctgctaa

SEQ ID NO: 56796 - DNA, 80 bp, synthetic construct
  source 1..80: mol_type = other DNA
ggaattggggtttagatattaaggggaggggggctaacaacagcgtaatctatttgacaaacattattctatacttggta

SEQ ID NO: 56797 - DNA, 80 bp, synthetic construct
  source 1..80: mol_type = other DNA
tttagatattaaggggaggggggctaacaacagcgtaatctatttgacaaacattattctatacttggtagcacactact

SEQ ID NO: 56798 - DNA, 80 bp, synthetic construct
  source 1..80: mol_type = other DNA
gtcagggtggttcaaaagcacaacttatatcacccttgatcaaacttgcgagcatttgaaagtttcttgtgggcctaaat

SEQ ID NO: 56799 - DNA, 80 bp, synthetic construct
  source 1..80: mol_type = other DNA
ctatacagttccatgcgtgtttcaatcaacacatgtcttgtgttagattcttacataggacaatcctacctgggtctatt

SEQ ID NO: 56800 - DNA, 80 bp, synthetic construct
  source 1..80: mol_type = other DNA
gccagctccatatgccaaaatgtagagataataatattaacagtgctaaccctccttatatttatactattaagcatact

SEQ ID NO: 56801 - DNA, 80 bp, synthetic construct
  source 1..80: mol_type = other DNA
gagtaaaacttacatatgttatatactcatgccaatatttatcccgcttgcttatatatatggtgtaatatataataaat

SEQ ID NO: 56802 - DNA, 80 bp, synthetic construct
  source 1..80: mol_type = other DNA
tcattgcactaagtgctgcaagcccagtttatcagaggtgtttccaggatggtgcaatcgtcaagcaaaacccatccaaa

SEQ ID NO: 56803 - DNA, 80 bp, synthetic construct
  source 1..80: mol_type = other DNA
cgtgtaaaaaatgtaaactatgcggattagtttaccatcccttcactgagtgcggcacccattgcgtatgtggtgctaga

SEQ ID NO: 56804 - DNA, 80 bp, synthetic construct
  source 1..80: mol_type = other DNA
tacgagacatcggataggatgaaattgcacagggcatctgggttgtgcccaggttataaaagtctcagggctgcaagagt

SEQ ID NO: 56805 - DNA, 80 bp, synthetic construct
  source 1..80: mol_type = other DNA
catgtgcaaatccaaagggccagcttctattttatctataatcactgcagtgttaatccttacttttgtcactcccataa

SEQ ID NO: 56806 - DNA, 80 bp, synthetic construct
  source 1..80: mol_type = other DNA
actaaacatgtactatttgatgtgcattgttaattatattgttacttggtcatttatcatatgtgccttaataattgcgc

SEQ ID NO: 56807 - DNA, 80 bp, synthetic construct
  source 1..80: mol_type = other DNA
taatctttaaaaaataccaacatagattcttgaatttctatgccatgtactgccatgagtgcgatatgtatcatgaccga

SEQ ID NO: 56808 - DNA, 80 bp, synthetic construct
  source 1..80: mol_type = other DNA
tccggtcttaaatataatggtgactttacaaacaaatgcagacaatgcacatgtgggcaatatgaggatgctgctgggct

SEQ ID NO: 56809 - DNA, 80 bp, synthetic construct
  source 1..80: mol_type = other DNA
gctgactcacaggaaaacatataattgcctggtgcaatataaatcaaaatggctagttaactttttgattgtatacatac

SEQ ID NO: 56810 - DNA, 80 bp, synthetic construct
  source 1..80: mol_type = other DNA
tacttatgcttgtcaaggattccatattgatagtccaagcagagggcacagatttcgataaatgcagtggagaggcaggc

SEQ ID NO: 56811 - DNA, 80 bp, synthetic construct
  source 1..80: mol_type = other DNA
ataatttggaattgtacagggccattcttaaatctaggcaactgcgagaaaaaacagaaaaaagaatcgtataataatat

SEQ ID NO: 56812 - DNA, 80 bp, synthetic construct
  source 1..80: mol_type = other DNA
tgcaacgcagctgaagggattgaatgcaatctctgttttagatattcctatgatatcaagaataccagaggatatagccg

SEQ ID NO: 56813 - DNA, 80 bp, synthetic construct
  source 1..80: mol_type = other DNA
gggcattaaggttcattgaagatcagaactcatatcatgtccagctgacagctgagtatgctatgctaactaggtactgc

SEQ ID NO: 56814 - DNA, 80 bp, synthetic construct
  source 1..80: mol_type = other DNA
gactactacacacagttcagcgacaattcaggatatagccagacaacatggagagtttatctaaggtctcataactttga

SEQ ID NO: 56815 - DNA, 80 bp, synthetic construct
  source 1..80: mol_type = other DNA
ggcttgcatattatactccaaccaacacttctgtagatgtgtcaaacatggagataagtgctcaagctctaactgggatt

SEQ ID NO: 56816 - DNA, 80 bp, synthetic construct
  source 1..80: mol_type = other DNA
ttgctaacgaaatgaagaattattattctggtaaacagtccaagttcaacaaagatctaaacctggcattaatgtctctt

SEQ ID NO: 56817 - DNA, 80 bp, synthetic construct
  source 1..80: mol_type = other DNA
catcatgcctttagaggaacatccagcttttatattgccaaactcttgagagagaagaagaatgaagaattaataaatta

SEQ ID NO: 56818 - DNA, 80 bp, synthetic construct
  source 1..80: mol_type = other DNA
tgtggaagagattaagaagaagtacccaggtaatgcattactaaaagctgtgattgattacatcaagtatatgaagaatc

SEQ ID NO: 56819 - DNA, 80 bp, synthetic construct
  source 1..80: mol_type = other DNA
taacagagatggctagctttaagcacgatgagatgtgggatgaatttgtatatgagagtccaccaacaagaagcccatcc

SEQ ID NO: 56820 - DNA, 80 bp, synthetic construct
  source 1..80: mol_type = other DNA
gccagaagatcagaatctgaatatgatttcaaaactaatgtgaattcaaaaccaacacatgtatgtaaaaacataaaaac

SEQ ID NO: 56821 - DNA, 80 bp, synthetic construct
  source 1..80: mol_type = other DNA
tgttgtatgcttgtcaccaaaatcaggggtgtcttatgattcaataattgcttgtggtgagccagggcagccaagtgtat

SEQ ID NO: 56822 - DNA, 80 bp, synthetic construct
  source 1..80: mol_type = other DNA
gtgtatataggaagccagagcaacaagtcttccaatccaatgcagaccagacacacttctgcctattggacacacattgc

SEQ ID NO: 56823 - DNA, 80 bp, synthetic construct
  source 1..80: mol_type = other DNA
catatgcgaataatgttgctattaggaagtggcttgtatcagactggcatgattgcaggcccaagaaaatttctggaggc

SEQ ID NO: 56824 - DNA, 80 bp, synthetic construct
  source 1..80: mol_type = other DNA
ttagaaaattatacaactgtcaatgacgaaattctagatgcgataaaaaaatccagatgttgggagactgaattcactga

SEQ ID NO: 56825 - DNA, 80 bp, synthetic construct
  source 1..80: mol_type = other DNA
gtatattcagttcaaacagggcgatggggtgaggagttgtagaatgaaagactctggcgaatgtgctgtagcagcaaaca

SEQ ID NO: 56826 - DNA, 80 bp, synthetic construct
  source 1..80: mol_type = other DNA
ggtggcctataatattgtgtgacaataataaattttattactcagagctgcaaaaggactatgataaagaccaggatata

SEQ ID NO: 56827 - DNA, 80 bp, synthetic construct
  source 1..80: mol_type = other DNA
gattcaaaatcacttctaaatctggaaagcacttactagatgttattggctacgttaagagtgcatcttattcatctgta

SEQ ID NO: 56828 - DNA, 80 bp, synthetic construct
  source 1..80: mol_type = other DNA
gtcaatgtcccccacaacactggttggcttacatttgcaaaagaaaggacaagttcttgggggtgtgaagaatttggatg

SEQ ID NO: 56829 - DNA, 80 bp, synthetic construct
  source 1..80: mol_type = other DNA
tttagccattagtgatgggtgtgtttttggttcttgccaggatatcataaaggaagagttaacagtttatagaaaagaaa

SEQ ID NO: 56830 - DNA, 80 bp, synthetic construct
  source 1..80: mol_type = other DNA
tcgacctaaccatagaaggagtatgcacaggatgcattaattgcttcgaaaacatacactgcgaattgacaatacatagc

SEQ ID NO: 56831 - DNA, 80 bp, synthetic construct
  source 1..80: mol_type = other DNA
actgttgaagctagctgcccaattattagctcatgcacagtatttcatgatagaattttaataactccgaatgagcataa

SEQ ID NO: 56832 - DNA, 80 bp, synthetic construct
  source 1..80: mol_type = other DNA
aatatgccataaaagtgatctgtaatgagaagcctggttcatcattatcattcagagtctgcaacacaaaaactgatgca

SEQ ID NO: 56833 - DNA, 80 bp, synthetic construct
  source 1..80: mol_type = other DNA
gccatgactttaacagatgcgaaaccaatattagaattagcaccagtggatcaaacagcatacataaaggaaaaagatga

SEQ ID NO: 56834 - DNA, 80 bp, synthetic construct
  source 1..80: mol_type = other DNA
gagatgcaaaacctggatgtgcagggttagagatgaaggtctccaggtgatctttgagccattcaagaacctatttggtt

SEQ ID NO: 56835 - DNA, 80 bp, synthetic construct
  source 1..80: mol_type = other DNA
tacttgtactggtctttgttgcactaagtgctgccagcccagtctatcagaggtgtttccaggatggtgcaattgtcaaa

SEQ ID NO: 56836 - DNA, 80 bp, synthetic construct
  source 1..80: mol_type = other DNA
taagcaaaacatatatatgctatattttaatgccaatatttatcccattagcttatgtgtacggcgttatatataacaag

SEQ ID NO: 56837 - DNA, 80 bp, synthetic construct
  source 1..80: mol_type = other DNA
tcttgcaagaagtgcaaactatgtgggctagtttaccatccatttacagagtgtggaactcactgtgtttgcggtgctcg

SEQ ID NO: 56838 - DNA, 80 bp, synthetic construct
  source 1..80: mol_type = other DNA
aatacagatgtattatataatgtgcattgtcaactatattgtcacatggtcattcattgtatgtgctttaataattgcct

SEQ ID NO: 56839 - DNA, 80 bp, synthetic construct
  source 1..80: mol_type = other DNA
taatttttaagaagtaccaacatagattcttaaatttttatgccatgtattgtcatgaatgcgatatgtaccatgatagg

SEQ ID NO: 56840 - DNA, 80 bp, synthetic construct
  source 1..80: mol_type = other DNA
ggtcaggcttaaaatacaatggggatttcacaaacaaatgtaggcagtgcacatgtggccagtatgaagatgctgcaggc

SEQ ID NO: 56841 - DNA, 80 bp, synthetic construct
  source 1..80: mol_type = other DNA
ttgctaacccataggaaaacatacaactgcctagtacaatacaaatcgaagtggttagtgaactttttaataatatatat

SEQ ID NO: 56842 - DNA, 80 bp, synthetic construct
  source 1..80: mol_type = other DNA
acttctgatgcttgttaaagattcagtactaatagtccaagcagaaggcatagatttcgaaaaatgtagtggagaaataa

SEQ ID NO: 56843 - DNA, 80 bp, synthetic construct
  source 1..80: mol_type = other DNA
acataacctggaattgcacaggacctttcctaaacttaggtaattgtgaaaagaaacaaaagaaggagccatacagtaac

SEQ ID NO: 56844 - DNA, 80 bp, synthetic construct
  source 1..80: mol_type = other DNA
agcgacacaattgaagggcctagatgctatatctattttagacatcccaatgatatcaaggatacctgaagacatagctg

SEQ ID NO: 56845 - DNA, 80 bp, synthetic construct
  source 1..80: mol_type = other DNA
gagctctgaggtttattgaagagcaaaattcatatcatgtgcagctgactgcagaatatgcaatgctaaccagatattgt

SEQ ID NO: 56846 - DNA, 80 bp, synthetic construct
  source 1..80: mol_type = other DNA
actttgctagtaagatgaagaattattacactggcaaacaactgaaatttaataaagatttaaatttagctttgatgtct

SEQ ID NO: 56847 - DNA, 80 bp, synthetic construct
  source 1..80: mol_type = other DNA
tttcatcatgcttttagagggacatctagtttctatgttgcgaaactcctaagagagaaaaataatgacgagttggtgaa

SEQ ID NO: 56848 - DNA, 80 bp, synthetic construct
  source 1..80: mol_type = other DNA
ttacacagaaaagataaagaataagtacccaggcaatgcacttttgaaagctataattgactatataaaatatatgaaga

SEQ ID NO: 56849 - DNA, 80 bp, synthetic construct
  source 1..80: mol_type = other DNA
gcctaagcgagatgaccaactttaaacatgacgagatgtgggatgattttgtttttaatagtcccccaactaagagccct

SEQ ID NO: 56850 - DNA, 80 bp, synthetic construct
  source 1..80: mol_type = other DNA
tctgtaagacgctcagactctgcatatgatttcaaaaataacataaattcaaatccatcacacatatgcaagaatataaa

SEQ ID NO: 56851 - DNA, 80 bp, synthetic construct
  source 1..80: mol_type = other DNA
tgttgtatgtttatcaccaaaatctggagtatcttatgattcaataatagcttgtggcgaaccaagtcagccgacaattt

SEQ ID NO: 56852 - DNA, 80 bp, synthetic construct
  source 1..80: mol_type = other DNA
acaaaaagccggaaagcagagtgtttcagtcaaatgcagatcagacacacttttgtttagcagacacccattgcctggag

SEQ ID NO: 56853 - DNA, 80 bp, synthetic construct
  source 1..80: mol_type = other DNA
catatgcaaataatgttgcaatcaggaaatggttggtttcagactggcatgattgtagaccaaaaaaagtagcaggaggc

SEQ ID NO: 56854 - DNA, 80 bp, synthetic construct
  source 1..80: mol_type = other DNA
aactatgagacagtaggtgaagaaattcttgatgctattaagaaatcaaaatgttgggagacagattttacagagtacat

SEQ ID NO: 56855 - DNA, 80 bp, synthetic construct
  source 1..80: mol_type = other DNA
ctatcatattgtgtgacaataacaagttttactactccgaattacaaaaagactatgacaaagaccaagatataggccat

SEQ ID NO: 56856 - DNA, 80 bp, synthetic construct
  source 1..80: mol_type = other DNA
ttctgcctcagccctagatgcaatacaatcaggcatccaataaatcagaagcacatatcaaattgtacatggcaagtcag

SEQ ID NO: 56857 - DNA, 80 bp, synthetic construct
  source 1..80: mol_type = other DNA
aacgattatcaagcttgtaaatttctacaaacaccagcaagctatagattggaggaagagggtggttctgttacagttat

SEQ ID NO: 56858 - DNA, 80 bp, synthetic construct
  source 1..80: mol_type = other DNA
acagtggaagcaagttgtccagtgacaagctcatgcactgtgtttcatgatagaatcctgataacaccaaatgagcacaa

SEQ ID NO: 56859 - DNA, 80 bp, synthetic construct
  source 1..80: mol_type = other DNA
atacgctataaaggtgatttgtgctgaaaaaccagggccatcattacagttcaaaatatgtaatgcaaaaactgatgcag

SEQ ID NO: 56860 - DNA, 80 bp, synthetic construct
  source 1..80: mol_type = other DNA
gacaacttccatttaggggacgatatggaccctgaattgaggacactagcacaaagcctgattgatgttaaagtgaagga

SEQ ID NO: 56861 - DNA, 80 bp, synthetic construct
  source 1..80: mol_type = other DNA
ctgccttttctgcttactaacaacaacaacctacctcaacacaaaactacttcaacctaactacctcatttgcttgctcc

SEQ ID NO: 56862 - DNA, 80 bp, synthetic construct
  source 1..80: mol_type = other DNA
ataggtttgtattccagatggccagtgcaaccgatgatgcacaaaaggattccatctatgcatctgctctagtggaggca

SEQ ID NO: 56863 - DNA, 80 bp, synthetic construct
  source 1..80: mol_type = other DNA
gaaaagaatgcaggaactatcaagtcttgggatgagagctatactgagcttaaagttggtgtccccaaaatagagcagct

SEQ ID NO: 56864 - DNA, 80 bp, synthetic construct
  source 1..80: mol_type = other DNA
tccaaactaccaacaggctgctctaaagtggaggaaggatataggtttccgtgtcaacgccaatacggcagccttaagca

SEQ ID NO: 56865 - DNA, 80 bp, synthetic construct
  source 1..80: mol_type = other DNA
agaaatgttatcagacatgattagaagaaggaacttgatcctcaacagaggtggcgatgagaacccacgcggtccagtga

SEQ ID NO: 56866 - DNA, 80 bp, synthetic construct
  source 1..80: mol_type = other DNA
ctaactaacaggtatttatactacttgttaacatactaacatggagctatttagaggggtgcttcaagtttcttctaata

SEQ ID NO: 56867 - DNA, 80 bp, synthetic construct
  source 1..80: mol_type = other DNA
gaagcgtaactcaaggcccgccagtaccacccagactgtaactgccccctcctgtacctataagacagcctaacacaaaa

SEQ ID NO: 56868 - DNA, 80 bp, synthetic construct
  source 1..80: mol_type = other DNA
gctatggttattgatgaatcaagtgaaatatatacactagaagatttacctgatgatatggtacaaatggcagaaaggat

SEQ ID NO: 56869 - DNA, 80 bp, synthetic construct
  source 1..80: mol_type = other DNA
aaatatttattatcaaataattattatcaattacggtattacatgggctttcctactgcttggcctacttctcgcatact

SEQ ID NO: 56870 - DNA, 80 bp, synthetic construct
  source 1..80: mol_type = other DNA
ctggtttgacacattggggtgacttcacaaataagtgcagacaatgtacatgcggccaacacgaagacaccactgggtca

SEQ ID NO: 56871 - DNA, 80 bp, synthetic construct
  source 1..80: mol_type = other DNA
atggttcacaaaaaatcccataattgcttggtgaagtataaagcaaaatggatacgagatattttaatcacgtatcttgt

SEQ ID NO: 56872 - DNA, 80 bp, synthetic construct
  source 1..80: mol_type = other DNA
ctttaaaatatattgataatttagagacataccatgagcaactgactgctgagtatgcttttcttactagatactgcgac

SEQ ID NO: 56873 - DNA, 80 bp, synthetic construct
  source 1..80: mol_type = other DNA
agaatccaagccagatcgcatagagatggtcagtacaattttaagaatgcagctagtggcagcaatgttaaagtttgtaa

SEQ ID NO: 56874 - DNA, 80 bp, synthetic construct
  source 1..80: mol_type = other DNA
gcctcaaattaagagacactttaaagcagcatgaggacgcatataagaaagaaatgaaaataagataagtcagatagact

SEQ ID NO: 56875 - DNA, 80 bp, synthetic construct
  source 1..80: mol_type = other DNA
tgagaaattagtataggtttaagttaattttgggttttataggggtggggtcaaacaaaactgctaaatttattttagaa

SEQ ID NO: 56876 - DNA, 80 bp, synthetic construct
  source 1..80: mol_type = other DNA
gcgccataattattgatgagtcaaaagaaatctataccctagacgatttgcctgatgatatggtccagatggcagaaagg

SEQ ID NO: 56877 - DNA, 80 bp, synthetic construct
  source 1..80: mol_type = other DNA
ataaatatctactatcaaatactcttgattaattatggagtaacatgggccttcttattattgggcttaatcttagcata

SEQ ID NO: 56878 - DNA, 80 bp, synthetic construct
  source 1..80: mol_type = other DNA
tttttttaagaaatatcaacataaatttctagattattatgcaatgtattgtgaagagtgtgatatgtaccatgaaaaat

SEQ ID NO: 56879 - DNA, 80 bp, synthetic construct
  source 1..80: mol_type = other DNA
ggcatgacatactggggagatttcacaaataagtgtagacagtgtacatgcggacaatacgaagacgctgctgggctgat

SEQ ID NO: 56880 - DNA, 80 bp, synthetic construct
  source 1..80: mol_type = other DNA
ggtacataaaaagtcttacaattgtcttataaagtataaggcaaaatggataaaaaatattttgattctatatttaatta

SEQ ID NO: 56881 - DNA, 80 bp, synthetic construct
  source 1..80: mol_type = other DNA
tgatattagttaaagattccttgttatttgtcggtgcaacaggaaccgattttgcagcatgcattgatgagaagagtgtg

SEQ ID NO: 56882 - DNA, 80 bp, synthetic construct
  source 1..80: mol_type = other DNA
acatggaattgcacaggaccattcttgaatctgggccgatgcgacaaacctcagaagaaggcaagctttaaagatatagc

SEQ ID NO: 56883 - DNA, 80 bp, synthetic construct
  source 1..80: mol_type = other DNA
ctttaaagtacattgacagtttaagaacatatcacgagcaattgactgcagagtatgcatttctcactagatactgtgat

SEQ ID NO: 56884 - DNA, 80 bp, synthetic construct
  source 1..80: mol_type = other DNA
tattatgctcagtacactgataattcgggttatagccaaacagtatggcggacatatttgcggtcacatgattttggtgc

SEQ ID NO: 56885 - DNA, 80 bp, synthetic construct
  source 1..80: mol_type = other DNA
gctgagatatctacattcgaaccagaggaggattgggaagattctaaatatcaaccagagcctacagaatctgttctaca

SEQ ID NO: 56886 - DNA, 80 bp, synthetic construct
  source 1..80: mol_type = other DNA
acctagggctcacagaagtgatcaatataattttaaaaatgcagatagtaatagtaatgttaaagtgtgtaaaaatataa

SEQ ID NO: 56887 - DNA, 80 bp, synthetic construct
  source 1..80: mol_type = other DNA
taaaaaaggttttatgtatttcacctagatccagagctaaatttgaaaatataattgcttgcggagagcatgccaaccca

SEQ ID NO: 56888 - DNA, 80 bp, synthetic construct
  source 1..80: mol_type = other DNA
tctgtgtacatgatgcccaatactagtatctaccaatcaaactcagagaggagtcattattgtattgcagattcacattg

SEQ ID NO: 56889 - DNA, 80 bp, synthetic construct
  source 1..80: mol_type = other DNA
gaagaatatgaaattgtaaacacagagcttctaacagcattcaagaaatccagatgttgggcaaaagagatagatgatat

SEQ ID NO: 56890 - DNA, 80 bp, synthetic construct
  source 1..80: mol_type = other DNA
tgtgttacacaagcaaagtgatggtttaagaagctgcagaatcaaggacactggaagctgcaatgtgttgggtaatgact

SEQ ID NO: 56891 - DNA, 80 bp, synthetic construct
  source 1..80: mol_type = other DNA
ggactatagtcctgtgcgaaaatggcaattattattattcagaagtccataaagattatgataaggatcaagatgttgga

SEQ ID NO: 56892 - DNA, 80 bp, synthetic construct
  source 1..80: mol_type = other DNA
catttttgcttaagccccaggtgcaacacaatacgatatccaattagtaggagacatattggagagtgtaattggcaaat

SEQ ID NO: 56893 - DNA, 80 bp, synthetic construct
  source 1..80: mol_type = other DNA
tacacattccacaattgataagatttcggttcaagagctagctgatatagagcaatataaaaaagccatatcacaaaaat

SEQ ID NO: 56894 - DNA, 80 bp, synthetic construct
  source 1..80: mol_type = other DNA
tgcaaactagtttgtcaatattcaagtatgtcaaaacaaagaatcttcctcatattaaaccagcctacagatatattact

SEQ ID NO: 56895 - DNA, 80 bp, synthetic construct
  source 1..80: mol_type = other DNA
gtaggaggtactgaaactatagaaggggtggaaaatgccttcatagaatctgaaattcctgcacttgctggaacagctat

SEQ ID NO: 56896 - DNA, 80 bp, synthetic construct
  source 1..80: mol_type = other DNA
tggatttaaaataaactcaagagaaggcaattatttgatggatgttataggttatgttaaaagtgcatcttattcagcaa

SEQ ID NO: 56897 - DNA, 80 bp, synthetic construct
  source 1..80: mol_type = other DNA
tgaaataagaactgggcagatcaatgacctaggtgtttattcaaaaggttgcggaaatgttcagaaagtaaatggaacaa

SEQ ID NO: 56898 - DNA, 80 bp, synthetic construct
  source 1..80: mol_type = other DNA
gttatggtaatggtgtgccaaaatttgattatctatgccatttggcaagtagaaaagaggtcattttgagaaagtgcttt

SEQ ID NO: 56899 - DNA, 80 bp, synthetic construct
  source 1..80: mol_type = other DNA
gctacaagttgagagatacactaaaacagcatgaagatgcttataaaaaagaaatgaaaataagatagtttgggatcaca

SEQ ID NO: 56900 - DNA, 80 bp, synthetic construct
  source 1..80: mol_type = other DNA
tctggcggttatagaaatttatatacatttaggttttattggggtggggttagataaaactgctagatttattttggaaa

SEQ ID NO: 56901 - DNA, 80 bp, synthetic construct
  source 1..80: mol_type = other DNA
ttgctttctctgctcactaacaacaacatcctaactcaacacaaaactacctcactttaactacctcatttgctttttcc

SEQ ID NO: 56902 - DNA, 80 bp, synthetic construct
  source 1..80: mol_type = other DNA
ctgctttctctgcttactaacaacaacattctacctcaacacacaactaccccaacttaactacctcatttgattgctcc

SEQ ID NO: 56903 - DNA, 80 bp, synthetic construct
  source 1..80: mol_type = other DNA
tcccattattgtctatgatcattattgagttcttattaatcttcacatatctatgctcaaaatatagtagagactcaaaa

SEQ ID NO: 56904 - DNA, 80 bp, synthetic construct
  source 1..80: mol_type = other DNA
acatatctatgctcaaaatatagtagagactcaaaatttaaacttatcattgaaaaagtaaaacaagaatatcagaagac

SEQ ID NO: 56905 - DNA, 80 bp, synthetic construct
  source 1..80: mol_type = other DNA
cccaatgaagagaccaccaaattagtgtttgaaatggagggcaatggcctcccccaggctggagaacagcatgcacttga

SEQ ID NO: 56906 - DNA, 80 bp, synthetic construct
  source 1..80: mol_type = other DNA
ccatggtcataggtgaatcaagtgagctgtacacactagatgatttacccaatgatatggtacaaatggcggagagggtg

SEQ ID NO: 56907 - DNA, 80 bp, synthetic construct
  source 1..80: mol_type = other DNA
aatatctattatcaaataaccatcattaattatggtgtcacttgggctttcttttgccttggtttaattttggcatactt

SEQ ID NO: 56908 - DNA, 80 bp, synthetic construct
  source 1..80: mol_type = other DNA
cttcaaaaaatatcaacataaatttctagatttttatgcgatgtattgtgaggaatgcgatatgtatcatgagaaatctg

SEQ ID NO: 56909 - DNA, 80 bp, synthetic construct
  source 1..80: mol_type = other DNA
gtttgacacactggggtgactttactaataaatgtagacagtgcacatgcggtcagtttgaagatgttgctggcttgatg

SEQ ID NO: 56910 - DNA, 80 bp, synthetic construct
  source 1..80: mol_type = other DNA
atacataaaaaatcttacaattgtttggtcaaatataaagcgaaatggataagagacatactcatcatatatttggctat

SEQ ID NO: 56911 - DNA, 80 bp, synthetic construct
  source 1..80: mol_type = other DNA
gattctgatcaaagattcgttattattcgttggagcatcggggacagactttgctgcatgtatagatgagaaagtcgtta

SEQ ID NO: 56912 - DNA, 80 bp, synthetic construct
  source 1..80: mol_type = other DNA
catggaactgcaccgggccattcctaaatttaggtagatgcgacaaatctcagaagaaagcaagctatgcaggtatagct

SEQ ID NO: 56913 - DNA, 80 bp, synthetic construct
  source 1..80: mol_type = other DNA
gcagtgacagaggtgtgcttaaaggatgacgtgagcatgataaaaacagaagcaaaatatgtaaaaaataccacagggac

SEQ ID NO: 56914 - DNA, 80 bp, synthetic construct
  source 1..80: mol_type = other DNA
gatcagttaaagggcttaggagttatatctgttttggatatcccgatgataaaaaatatgccagatgaaatatcaggttc

SEQ ID NO: 56915 - DNA, 80 bp, synthetic construct
  source 1..80: mol_type = other DNA
actaaagtatatcgacagcttagagacgtatcatgagcagctaactgctgaatatgccttcctcaccaggtactgcgact

SEQ ID NO: 56916 - DNA, 80 bp, synthetic construct
  source 1..80: mol_type = other DNA
attatacacaatacacagataaatctggctatagtcaaacagtatggaggacttatttacgatctcatgattttggtgca

SEQ ID NO: 56917 - DNA, 80 bp, synthetic construct
  source 1..80: mol_type = other DNA
tgtgttgtttatccgaatcaacatttttgtagatgcgtaaagtatggagataaatgcaatagtgccaagtgggattttgc

SEQ ID NO: 56918 - DNA, 80 bp, synthetic construct
  source 1..80: mol_type = other DNA
caatgagatgaaaacattctacacaggccagaaagtgaagtttaataaggatttaaacttggcattattggtattacata

SEQ ID NO: 56919 - DNA, 80 bp, synthetic construct
  source 1..80: mol_type = other DNA
aagcatttagaggcactggaactgcatatgttgcagaagctatggctcgggaagataacggttccatggcacattttgct

SEQ ID NO: 56920 - DNA, 80 bp, synthetic construct
  source 1..80: mol_type = other DNA
ttggagataagaaaaaaattcccaacaaatgctttgttagcagcattaatagattatatagtttatttacagtcccttgg

SEQ ID NO: 56921 - DNA, 80 bp, synthetic construct
  source 1..80: mol_type = other DNA
agaaatagccacatttgaactcgatgaagattgggaagattttaaatataagccagagccaacagaatcaacacctcaag

SEQ ID NO: 56922 - DNA, 80 bp, synthetic construct
  source 1..80: mol_type = other DNA
ttaggtcacacagaaatgatcagtataacttcaaaaatgctgaaagtaatagtgataccaaagtctgtaagaatgttcag

SEQ ID NO: 56923 - DNA, 80 bp, synthetic construct
  source 1..80: mol_type = other DNA
aaagtactatgtatttcacccaggtcaaaggcaaaattcgaaaatattatagcatgtggagagcatgcaaatccatctgt

SEQ ID NO: 56924 - DNA, 80 bp, synthetic construct
  source 1..80: mol_type = other DNA
atttgctaataacatagctatgagaaaatggttggttgcagattggcatgactgtaggccccaaaagtcatcaggtggtc

SEQ ID NO: 56925 - DNA, 80 bp, synthetic construct
  source 1..80: mol_type = other DNA
atacatgatgccaaatgtcagcatctaccaatccaattcggaaaggagtcactattgtatagctggctctcattgccttg

SEQ ID NO: 56926 - DNA, 80 bp, synthetic construct
  source 1..80: mol_type = other DNA
agaaatatgaagtggtagaaacagaacttttgaatgctttaaagaagtcaaaatgttgggccaaggaaatggatgatatt

SEQ ID NO: 56927 - DNA, 80 bp, synthetic construct
  source 1..80: mol_type = other DNA
atcttgcataagcagagcgatggcttgaggagttgtagaataaaagatactggaaactgcaatgttcaagaaaatgattg

SEQ ID NO: 56928 - DNA, 80 bp, synthetic construct
  source 1..80: mol_type = other DNA
gaccattgtcttatgcgaaaatggcaactattactactctgaggtccacaaagactatgataaagatcaggatgtaggtc

SEQ ID NO: 56929 - DNA, 80 bp, synthetic construct
  source 1..80: mol_type = other DNA
atttctgtcttagccctagatgcactacaatacgttatccaataagtaaaaggcatataaagaagtgcgaatggcagata

SEQ ID NO: 56930 - DNA, 80 bp, synthetic construct
  source 1..80: mol_type = other DNA
tcacattcaacaattgataaaatctctgttcaagagttagcagacatagaacaatataagaaggccatatcacaaaaact

SEQ ID NO: 56931 - DNA, 80 bp, synthetic construct
  source 1..80: mol_type = other DNA
gcaaacaagtctatcaatttttaagtatgtaagaacaaaaaacctcccacatatcaaacccgcatataagtacataactg

SEQ ID NO: 56932 - DNA, 80 bp, synthetic construct
  source 1..80: mol_type = other DNA
tagaaggtgtcgaaactattgaaggaatcgaaaacgcttttatagagtctgagatcccagcattggcaggtacagctata

SEQ ID NO: 56933 - DNA, 80 bp, synthetic construct
  source 1..80: mol_type = other DNA
ggtttcaaaataaattcaagagaaggcaactatctaatggatgtgatagggtatgttaagagcgcatcatattcagcagt

SEQ ID NO: 56934 - DNA, 80 bp, synthetic construct
  source 1..80: mol_type = other DNA
gtacacaaagctatatacaactgggcctactataggaataaacaccaaacatgatgaaaaatgcacaggaccttgcccag

SEQ ID NO: 56935 - DNA, 80 bp, synthetic construct
  source 1..80: mol_type = other DNA
atattaatgttattgaagttggagatgatctgtcgctccacacagagtcttatatttgcagtgcagattgtgttatcaca

SEQ ID NO: 56936 - DNA, 80 bp, synthetic construct
  source 1..80: mol_type = other DNA
ctataatagatcataaagatggttggctaaccttctcaaaagaaaggaccagcacttggggttgtgaagagtttggttgc

SEQ ID NO: 56937 - DNA, 80 bp, synthetic construct
  source 1..80: mol_type = other DNA
ttagcagtcagtgatggttgtgtatttggctcttgccaagatataataaaagatgaattggctgtttataggaaaactac

SEQ ID NO: 56938 - DNA, 80 bp, synthetic construct
  source 1..80: mol_type = other DNA
tgaagaactcactacagtagaactgtgcttgacattttcagataaaacatattgcaccaacttgaatgctataactccta

SEQ ID NO: 56939 - DNA, 80 bp, synthetic construct
  source 1..80: mol_type = other DNA
ttataacagataaatttgaagtgcagttcaaaactgttgaatcttatacactaccaagagtcattgccataaagaatcat

SEQ ID NO: 56940 - DNA, 80 bp, synthetic construct
  source 1..80: mol_type = other DNA
gagattaaggttggacaaatcaatgacttaggtgtctactcaaaaggatgtggaaatgttcaaaaggtcaatggaacaaa

SEQ ID NO: 56941 - DNA, 80 bp, synthetic construct
  source 1..80: mol_type = other DNA
ctatggcaatggttcaccaaggtttgattatctttgccacttggcgagtagaaaagaagtaatcctaaggaaatgttttg

SEQ ID NO: 56942 - DNA, 80 bp, synthetic construct
  source 1..80: mol_type = other DNA
acaatgattaccaggcttgcaaattcttgcagagtccttcaagttatcgtttagaagagcaccagggaacagtgacagtt

SEQ ID NO: 56943 - DNA, 80 bp, synthetic construct
  source 1..80: mol_type = other DNA
atagattataaaaagattctaggcactataaagatgaaggctatattaggggatgtgaaatacaaaaattatcaaaataa

SEQ ID NO: 56944 - DNA, 80 bp, synthetic construct
  source 1..80: mol_type = other DNA
tatagaaatcagtgctgagggaacatgtgctggatgtattgattgctttgaaaatatacactgtgaatttactatacata

SEQ ID NO: 56945 - DNA, 80 bp, synthetic construct
  source 1..80: mol_type = other DNA
ctacagttgaggcaagttgtcctataacaacagagtgtgtctccttccatgatagaatattgatcacaccagatgaacat

SEQ ID NO: 56946 - DNA, 80 bp, synthetic construct
  source 1..80: mol_type = other DNA
gttgataaagaaactgctcagatccgcttgcaaactgacaatacaaaccactttgaggttgctgggaccacagtaaaatc

SEQ ID NO: 56947 - DNA, 80 bp, synthetic construct
  source 1..80: mol_type = other DNA
aagtatgcattgaagattgtatgtcatgataaaccaaaagtgtctcttaaatttaaaatctgtaacacacatgttgatgc

SEQ ID NO: 56948 - DNA, 80 bp, synthetic construct
  source 1..80: mol_type = other DNA
agctatgactattgtagattctaaaccaattttagaacttgcgccagtagatcaaacaacatacatcagagagaaagatg

SEQ ID NO: 56949 - DNA, 80 bp, synthetic construct
  source 1..80: mol_type = other DNA
aaagatgcaagacctggatgtgtagagtccgagatgaagggttccaggtgatattagaaccttttaaaaacctctttggt

SEQ ID NO: 56950 - DNA, 80 bp, synthetic construct
  source 1..80: mol_type = other DNA
tcgtatattggaatattttatactggtatattgtctattatttgtttactcattgtcgtctatattatattgcccatttg

SEQ ID NO: 56951 - DNA, 80 bp, synthetic construct
  source 1..80: mol_type = other DNA
tttcaaattgagggacaccttaaggcagcatgaagatgcctataaaaaggaaatgaagataagatgattcacatcagctt

SEQ ID NO: 56952 - DNA, 80 bp, synthetic construct
  source 1..80: mol_type = other DNA
gagatagtataatagatttaaagtagtttttgggttttatgggggtggggttaaacaaaactgctgagtttattttagaa

SEQ ID NO: 56953 - DNA, 80 bp, synthetic construct
  source 1..80: mol_type = other DNA
tgggttttatgggggtggggttaaacaaaactgctgagtttattttagaatcatttaaatatacttggtagcacactact

SEQ ID NO: 56954 - DNA, 80 bp, synthetic construct
  source 1..80: mol_type = other DNA
aggttggttcaaaagtacaacttatatcacacttgatcaaacatgtgagcatcttaaagtatcatgcggaccaaaatcga

SEQ ID NO: 56955 - DNA, 80 bp, synthetic construct
  source 1..80: mol_type = other DNA
tacagtttcatgcttgcttcaatcagcatatgtcttgtgtgcgattcttacatagaacgatactaccagggtcaattgct

SEQ ID NO: 56956 - DNA, 80 bp, synthetic construct
  source 1..80: mol_type = other DNA
aattccatatgtcaaaatatagaaataattatcttggttactctctcattagtaatcttcatattcttatcaatagtaag

SEQ ID NO: 56957 - DNA, 80 bp, synthetic construct
  source 1..80: mol_type = other DNA
caagacatatgtatgttacttattaatgcctatcttcaccccaatagcttttatctatggatgggtatacaataaatcct

SEQ ID NO: 56958 - DNA, 80 bp, synthetic construct
  source 1..80: mol_type = other DNA
tagcattgtgctcagctagtccagtatttcaacggtgtttccaagatggagctatagtgaagcaaaacccatctaaggaa

SEQ ID NO: 56959 - DNA, 80 bp, synthetic construct
  source 1..80: mol_type = other DNA
gcaagaaatgcaagttatgtggcttagtttatcacccattcacagaatgtggaacacactgtgtatgtggtgcaagatat

SEQ ID NO: 56960 - DNA, 80 bp, synthetic construct
  source 1..80: mol_type = other DNA
gaaaattctgataggatgaaattgcatagagcatctggattgtgtccagggtacaagagtctcagagcagctagagttat

SEQ ID NO: 56961 - DNA, 80 bp, synthetic construct
  source 1..80: mol_type = other DNA
gtgcaaatcaaaaggaccagcttctatcctatctataatgactgcaattctcatactaacatttgtcacccctattagtg

SEQ ID NO: 56962 - DNA, 80 bp, synthetic construct
  source 1..80: mol_type = other DNA
tgccccctcctgtacctataagacagcctaacacaaaagatatagacaatgtagaatttaagtacttaaccggatatgaa

SEQ ID NO: 56963 - DNA, 80 bp, synthetic construct
  source 1..80: mol_type = other DNA
gaattgtggactgccaaaagccgtgtgcacccattgtaaacactccccaccgtgtcctcagccaggaaccgtaaccaacc

SEQ ID NO: 56964 - DNA, 80 bp, synthetic construct
  source 1..80: mol_type = other DNA
aatttccagctaggggatgatatggatcctgagttgcgaacactggcacagagtttgattgatgttaaagtgaaggaaat

SEQ ID NO: 56965 - DNA, 80 bp, synthetic construct
  source 1..80: mol_type = other DNA
gccttctctgctcactaacaacaacattctacctcaacaacacactacctcaacctaactacctcatttgcttgctcctt

SEQ ID NO: 56966 - DNA, 80 bp, synthetic construct
  source 1..80: mol_type = other DNA
tggctttttttgcttactaacaacaacactctacctcaacacaaaactccctcaacctaactacctcatttgcttgctcc

SEQ ID NO: 56967 - DNA, 80 bp, synthetic construct
  source 1..80: mol_type = other DNA
gataatttccaccttggagatgatatggatcctgagttgagaacactggcacagagtttgattgatattaaagtgaagga

SEQ ID NO: 56968 - DNA, 80 bp, synthetic construct
  source 1..80: mol_type = other DNA
atcaccctggtcaccatgacgcaatcagtttctctttctgatttcatcgttaagactgaagatggatatatgccatcaga

SEQ ID NO: 56969 - DNA, 80 bp, synthetic construct
  source 1..80: mol_type = other DNA
gttttagcttcggcagataagctagcccgtttcgcccagcgattggaggatagaaaagatgtgctacacaagaatttttc

SEQ ID NO: 56970 - DNA, 80 bp, synthetic construct
  source 1..80: mol_type = other DNA
tcttttaaattttagcgggcttttttcccgccttatgcaaatgggcagccattttaagtgtttaactataattttattgg

SEQ ID NO: 56971 - DNA, 80 bp, synthetic construct
  source 1..80: mol_type = other DNA
gggccctgctatggccagccacaaggacgatgaagaaaagtttttccccatgcatggaaccctgatatttggaaagcaag

SEQ ID NO: 56972 - DNA, 80 bp, synthetic construct
  source 1..80: mol_type = other DNA
gtacaaatgctaccaacgcggaattggaaaatgtcatgattacagatgaagaggaaatccgcaccacaaatcccgtggct

SEQ ID NO: 56973 - DNA, 80 bp, synthetic construct
  source 1..80: mol_type = other DNA
acggagcagtacggatatgtgtcaaataatttgcaaaactcaaatactggtccaactactgaaaatgtcaataaccaagg

SEQ ID NO: 56974 - DNA, 80 bp, synthetic construct
  source 1..80: mol_type = other DNA
agcgttacctggtatggtgtggcaggatcgagacgtgtacctgcagggacccatttgggccaagattccacacacggacg

SEQ ID NO: 56975 - DNA, 80 bp, synthetic construct
  source 1..80: mol_type = other DNA
ttcatccttctccacttatgggaggttttggactcaaacatccacctcctcagatcatgatcaaaaacactcccgttcca

SEQ ID NO: 56976 - DNA, 80 bp, synthetic construct
  source 1..80: mol_type = other DNA
gccaatcctcccacaaacttcagtgcggcaaagtttgcttctttcatcacacagtattccacgggacaggtcagcgtgga

SEQ ID NO: 56977 - DNA, 80 bp, synthetic construct
  source 1..80: mol_type = other DNA
actctatggttttaggggaaagtaaggaaacctttgaacttgaagagcttccagacgacatgctggaaatggcattaagg

SEQ ID NO: 56978 - DNA, 80 bp, synthetic construct
  source 1..80: mol_type = other DNA
ataaattcttactacttcacctgtatcttaaattatgctgtaagctggggtcttattattgctggattattggttggact

SEQ ID NO: 56979 - DNA, 80 bp, synthetic construct
  source 1..80: mol_type = other DNA
gatatttaaaaagtaccagcataggttcttaaatatttacgcaatgtactgtgaagaatgtgacatgtatcatgacaaat

SEQ ID NO: 56980 - DNA, 80 bp, synthetic construct
  source 1..80: mol_type = other DNA
taaattggaactgcactgggccattcctaaaccttggaaactgccaaaagcaacaaaagaaagaaccttacacaaatatt

SEQ ID NO: 56981 - DNA, 80 bp, synthetic construct
  source 1..80: mol_type = other DNA
gcaacccagctaaaagggctaaaagcaatttccgtactagatatccctataattacgggtatcccagacgacattgcagg

SEQ ID NO: 56982 - DNA, 80 bp, synthetic construct
  source 1..80: mol_type = other DNA
gcatgcatactatatccaaatcagcatttctgcaggtgtgtgaaaaatggtgagaagtgtagcagctctaattgggactt

SEQ ID NO: 56983 - DNA, 80 bp, synthetic construct
  source 1..80: mol_type = other DNA
tgccaatgaaatgaagaattattactctgggaaacaagcaaaatttgataaagatttaaacctagctctaacagctttgc

SEQ ID NO: 56984 - DNA, 80 bp, synthetic construct
  source 1..80: mol_type = other DNA
ttgctagaggaaaagagtcatcctacaacttcaagttggcagtttcgtcaaaatctataagaacctgtaagaatgttaag

SEQ ID NO: 56985 - DNA, 80 bp, synthetic construct
  source 1..80: mol_type = other DNA
gtatagaaaaccatcaggtggtgtatttcaatccagtactgaccggtctatatattgtttgctagacagccattgtctag

SEQ ID NO: 56986 - DNA, 80 bp, synthetic construct
  source 1..80: mol_type = other DNA
aggagtttgaggctatcagtcaagaggagttggatgcagtaaaaaaatccaagtgttgggagattgaatatcctgacata

SEQ ID NO: 56987 - DNA, 80 bp, synthetic construct
  source 1..80: mol_type = other DNA
agacccctccaagaaagtgacgggtctaaaagctgtagaatgaaagattctgggaactgtaatgttgcaactaacagatg

SEQ ID NO: 56988 - DNA, 80 bp, synthetic construct
  source 1..80: mol_type = other DNA
agcagatccagcatagcaaagatagacgtacataatgttgaagatattgaacaatataaaaaggctataacccaaaagct

SEQ ID NO: 56989 - DNA, 80 bp, synthetic construct
  source 1..80: mol_type = other DNA
tgaagaagtgaccaatgtggagctatgtctaacattttcagacaagacatattgcacaaacttaaaccctgttaccccta

SEQ ID NO: 56990 - DNA, 80 bp, synthetic construct
  source 1..80: mol_type = other DNA
ttatggcaatggggtccccagatttgattacttatgtcatttagctagtagaaaggaagtcatcgttagaaaatgctttg

SEQ ID NO: 56991 - DNA, 80 bp, synthetic construct
  source 1..80: mol_type = other DNA
tgttgatataactgcagaagggtcgtgtgctggctgtatcaattgctttgagaatattcattgtgaattaacactgcata

SEQ ID NO: 56992 - DNA, 80 bp, synthetic construct
  source 1..80: mol_type = other DNA
ggtgtagacaaggaaacagcacaggtcagacttcaaacagatactacaaaccattttgaaatagcaggtactactgtgaa

SEQ ID NO: 56993 - DNA, 80 bp, synthetic construct
  source 1..80: mol_type = other DNA
cttcaaattaagggatacccttagaaagcacgatgatgcatataagagagagatgaaaattagataagggattcatgtaa

SEQ ID NO: 56994 - DNA, 80 bp, synthetic construct
  source 1..80: mol_type = other DNA
tgattgtagttacggctgcaagcccggtgtatcagagatgtttccaagatggggctatagtgaagcaaaacccatccaaa

SEQ ID NO: 56995 - DNA, 80 bp, synthetic construct
  source 1..80: mol_type = other DNA
catgtgcaaatcaaaagggcctgcatcaatattgtctataattactgcagtgctggttctgacatttgtgacaccaatca

SEQ ID NO: 56996 - DNA, 80 bp, synthetic construct
  source 1..80: mol_type = other DNA
agtagtgtactaccaagtatagataacgtttgaatattaaagttttgaatcaaagccaaagatgatttgtatattggtgc

SEQ ID NO: 56997 - DNA, 80 bp, synthetic construct
  source 1..80: mol_type = other DNA
actccatggttttaggagagagtaaagaaacctttgaacttgaagatcttccagacgacatgttggaaatggcatcgaga

SEQ ID NO: 56998 - DNA, 80 bp, synthetic construct
  source 1..80: mol_type = other DNA
ataaattcttattatcttacctgtatcttgaattatgctgtaagctggggtcttgttatcattggattgttgatcgggct

SEQ ID NO: 56999 - DNA, 80 bp, synthetic construct
  source 1..80: mol_type = other DNA
gctttttaagaaataccagcacagattcttaaatgtttacgcaatgtactgtgaagaatgtgacatgtatcatgacaagt

SEQ ID NO: 57000 - DNA, 80 bp, synthetic construct
  source 1..80: mol_type = other DNA
ctgggttgaaaagacatggtgatttcaccaacaaatgcagacagtgcacatgtggtcaatatgaagatgctgcaggtttg

SEQ ID NO: 57001 - DNA, 80 bp, synthetic construct
  source 1..80: mol_type = other DNA
atggctcacaggaaaacctataactgcttagtgcagtacaaagcaaagtggatgatgaacttcctgataatttacatatt

SEQ ID NO: 57002 - DNA, 80 bp, synthetic construct
  source 1..80: mol_type = other DNA
cttaattttgatcaaagattctgctatagttgtacaagctgctggaactgacttcaccacctgcctagagactgagagta

SEQ ID NO: 57003 - DNA, 80 bp, synthetic construct
  source 1..80: mol_type = other DNA
taaattggaactgcactgggccatttttgaacctcgggaattgccaaaagcaacaaaagaaagaaccttacaccaacatt

SEQ ID NO: 57004 - DNA, 80 bp, synthetic construct
  source 1..80: mol_type = other DNA
gaagcagttacagaggtgtgcctgaaagatgatgttagcatgatcaaaacagaggccaggtatgtaagaaatgcaacagg

SEQ ID NO: 57005 - DNA, 80 bp, synthetic construct
  source 1..80: mol_type = other DNA
gcaactcagttaaagggactaaaggcaatttccgtactagatgtccctataataacagggataccagatgatattgcggg

SEQ ID NO: 57006 - DNA, 80 bp, synthetic construct
  source 1..80: mol_type = other DNA
tgctttaagatatatagaagagaaggaagatttccatgtccagctaactatagaatatgcgatgttaagtaaatactgtg

SEQ ID NO: 57007 - DNA, 80 bp, synthetic construct
  source 1..80: mol_type = other DNA
actattatacccaattctcagataactcaggatacagtcagacaacatggagagtgtacttaaggtctcatgattttgaa

SEQ ID NO: 57008 - DNA, 80 bp, synthetic construct
  source 1..80: mol_type = other DNA
gcctgtatactatatccaaatcagcacttttgcagatgtgtaaaaaatggtgagaagtgcagcagctccaatcgggactt

SEQ ID NO: 57009 - DNA, 80 bp, synthetic construct
  source 1..80: mol_type = other DNA
tgccaatgaaatgaaagattattactctgggaaacaaacaaagtttgacaaggatttaaatctagccctaacagctttgc

SEQ ID NO: 57010 - DNA, 80 bp, synthetic construct
  source 1..80: mol_type = other DNA
atcatgccttcagggggacctcatctgcatatatagcaacaatgctctcaaaaaagtccaatgatgacttgattgcatac

SEQ ID NO: 57011 - DNA, 80 bp, synthetic construct
  source 1..80: mol_type = other DNA
acaaataagataaaaacaaaattcccaggtaatgcattgttgaaggctataatagattatatagcatatatgaaaagttt

SEQ ID NO: 57012 - DNA, 80 bp, synthetic construct
  source 1..80: mol_type = other DNA
gccaggtatggcaaatttcaaatatgatgaattctgggatgaattattgtacaaacccaacccagcaaaggcctcaaacc

SEQ ID NO: 57013 - DNA, 80 bp, synthetic construct
  source 1..80: mol_type = other DNA
ttgctagaggaaaggagtcatcttacaacttcaaactagcaatttcatcaaagtctataaagatctgcaagaatgttaag

SEQ ID NO: 57014 - DNA, 80 bp, synthetic construct
  source 1..80: mol_type = other DNA
gatgttgcctgcttatcgccaaggtcaggtgctatatatgcttcaataattgcgtgtggtgaacccaatgggccaagtgt

SEQ ID NO: 57015 - DNA, 80 bp, synthetic construct
  source 1..80: mol_type = other DNA
agttttttcaaataatgtcgcaataaggaaatggctagtctctgattggcatgattgcaggcctaagaagatcgttgggg

SEQ ID NO: 57016 - DNA, 80 bp, synthetic construct
  source 1..80: mol_type = other DNA
gtataggaaaccatcaggtggtgtattccaatctagcactgatccgtctatatactgcttgctggatagccattgtctag

SEQ ID NO: 57017 - DNA, 80 bp, synthetic construct
  source 1..80: mol_type = other DNA
aagaatttgaggccatcggccaggaggagctggatgcggtaaagaaatccaaatgttgggaaattgaatatcctgacgta

SEQ ID NO: 57018 - DNA, 80 bp, synthetic construct
  source 1..80: mol_type = other DNA
aagctcatccaagaaggcgatgggactaaaagctgtagaatgaaagattctgggaactgcaatgttgcaactaacagatg

SEQ ID NO: 57019 - DNA, 80 bp, synthetic construct
  source 1..80: mol_type = other DNA
gccagtgatacaatgtgagaatgacaaattttactactcagagcttcaaaaagattatgacaaaactcaagatattggtc

SEQ ID NO: 57020 - DNA, 80 bp, synthetic construct
  source 1..80: mol_type = other DNA
actattgcttaagccctggatgtactactgtccggtaccctattaatccaaagcacatctctaactgtaattggcaagta

SEQ ID NO: 57021 - DNA, 80 bp, synthetic construct
  source 1..80: mol_type = other DNA
agcagatctagcatagcgaagatagatgtgcacaatattgaggatattgagcaatataagaaagctataactcagaaact

SEQ ID NO: 57022 - DNA, 80 bp, synthetic construct
  source 1..80: mol_type = other DNA
tcaaacaagcctatctctattcaagtatgcaaaaacaaaaaacttgccgcacatcaaaccaatttataaatatataacta

SEQ ID NO: 57023 - DNA, 80 bp, synthetic construct
  source 1..80: mol_type = other DNA
tagaaggaacagaaactgcagaaggtatagagagtgcatacattgaatcagaagtacctgcattggctgggacatctatc

SEQ ID NO: 57024 - DNA, 80 bp, synthetic construct
  source 1..80: mol_type = other DNA
ggattcaaaatcaattctaaagagggcaagcacttgctagatgttatagcatatgtaaaaagtgcctcatactcttcagt

SEQ ID NO: 57025 - DNA, 80 bp, synthetic construct
  source 1..80: mol_type = other DNA
gtatacaaaattgtactcaactggcccaacatcagggataaatactaaacatgatgaattgtgtactggcccatgcccag

SEQ ID NO: 57026 - DNA, 80 bp, synthetic construct
  source 1..80: mol_type = other DNA
gacacatcaatgtaatagaagttggtgatgacctgtcactccatactgaatcatatgtttgcagcgcagattgtaccata

SEQ ID NO: 57027 - DNA, 80 bp, synthetic construct
  source 1..80: mol_type = other DNA
caaatatcaatcatcaggttgggtggctgacatttgcaagagagaggacaagctcatggggatgcgaagagtttggttgc

SEQ ID NO: 57028 - DNA, 80 bp, synthetic construct
  source 1..80: mol_type = other DNA
ctggctgtaagtgatgggtgtgtatttggatcatgccaagatataataaaagaagaactatctgtctataggaaggagac

SEQ ID NO: 57029 - DNA, 80 bp, synthetic construct
  source 1..80: mol_type = other DNA
cgaggaagtgactgatgtagaactgtgtttgacattttcagacaaaacatactgtacaaacttaaaccctgttaccccta

SEQ ID NO: 57030 - DNA, 80 bp, synthetic construct
  source 1..80: mol_type = other DNA
ttataacagatctatttgaggtacagttcaaaactgtagagacctacagcttgcccagaattgttgctgtgcaaaaccat

SEQ ID NO: 57031 - DNA, 80 bp, synthetic construct
  source 1..80: mol_type = other DNA
gagattaagattgggcaaataaatgatttaggagtttactctaagggttgtgggaatgttcaaaaggtcaatggaactat

SEQ ID NO: 57032 - DNA, 80 bp, synthetic construct
  source 1..80: mol_type = other DNA
ttatggcaatggagttcccagatttgactacttatgccatttagctagcaggaaggaagtcattgttagaaaatgcttcg

SEQ ID NO: 57033 - DNA, 80 bp, synthetic construct
  source 1..80: mol_type = other DNA
acaatgattaccaagcatgcaaattccttcaaagccctgctagttacagacttgaagaagacagtggcactgtgaccata

SEQ ID NO: 57034 - DNA, 80 bp, synthetic construct
  source 1..80: mol_type = other DNA
attgactacaaaaagattttaggaacaatcaagatgaaggcaattttaggagatgtcaaatataaaacatttgctgatag

SEQ ID NO: 57035 - DNA, 80 bp, synthetic construct
  source 1..80: mol_type = other DNA
tgtcgatataaccgcagaagggtcatgcaccggctgtattaactgcttcgaaaatatccattgcgaattaacgttgcaca

SEQ ID NO: 57036 - DNA, 80 bp, synthetic construct
  source 1..80: mol_type = other DNA
ccacaattgaagccagctgcccaattaaaagctcgtgcacagtatttcatgacaggattcttgtgactccaaatgaacac

SEQ ID NO: 57037 - DNA, 80 bp, synthetic construct
  source 1..80: mol_type = other DNA
ggtgtagacaaagagactgcacaggtcaggcttcagacagataccacaaatcattttgaaattgcaggcactactgtgaa

SEQ ID NO: 57038 - DNA, 80 bp, synthetic construct
  source 1..80: mol_type = other DNA
aaatatgcattgaaaatggtgtgcacagaaaagccagggaacacactcacaattaaagtctgcaatactaaaattgaagc

SEQ ID NO: 57039 - DNA, 80 bp, synthetic construct
  source 1..80: mol_type = other DNA
atctatggcccttgtcgatgcaaagcctatcatagaactagcaccagttgatcagacagcatatataagagaaaaagatg

SEQ ID NO: 57040 - DNA, 80 bp, synthetic construct
  source 1..80: mol_type = other DNA
aaaggtgtaaaacttggatgtgtagggtaagagatgaaggactgcaggtcatcttggagccatttaaaaatttatttgga

SEQ ID NO: 57041 - DNA, 80 bp, synthetic construct
  source 1..80: mol_type = other DNA
tcttatattgggatattttacacatttattatatctatagtagcattattggttattatctatgtactactacctatatg

SEQ ID NO: 57042 - DNA, 80 bp, synthetic construct
  source 1..80: mol_type = other DNA
ctttaagttaagggatacccttagaaagcatgaagatgcatataagagagagatgaaaattagataggggatctatgcag

SEQ ID NO: 57043 - DNA, 80 bp, synthetic construct
  source 1..80: mol_type = other DNA
aacaaaattgagtcctgtattatatattctatttgtagtatagctgttgttaagtggggggtggggaactaacaacagcg

SEQ ID NO: 57044 - DNA, 80 bp, synthetic construct
  source 1..80: mol_type = other DNA
ttgttaagtggggggtggggaactaacaacagcgtaaatttattttgcaaacattattttatacttggtagcacactact

SEQ ID NO: 57045 - DNA, 80 bp, synthetic construct
  source 1..80: mol_type = other DNA
gtcaggatggttcaagagcacgacatatataactcttgatcaaacttgcgaacaccttaaagtttcctgcggcccaaaat

SEQ ID NO: 57046 - DNA, 80 bp, synthetic construct
  source 1..80: mol_type = other DNA
ctgtacagttccatgcctgcttcaatcagcatatgtcttgcgtcagatttttacacaggacaatattgcctggctctata

SEQ ID NO: 57047 - DNA, 80 bp, synthetic construct
  source 1..80: mol_type = other DNA
gccaattccatatgtcagaatatcgaaatcataattttagttacacttactctattaatctttatattgttaagcatttt

SEQ ID NO: 57048 - DNA, 80 bp, synthetic construct
  source 1..80: mol_type = other DNA
aagtaagacttatatatgttatttattaatgcctatattcatccccatagcatatatatacggtacaatttacaataagt

SEQ ID NO: 57049 - DNA, 80 bp, synthetic construct
  source 1..80: mol_type = other DNA
taattacagttgcagctgcaagcccagtgtatcaaaggtgtttccaagatggggctatagtgaagcaaaacccatccaaa

SEQ ID NO: 57050 - DNA, 80 bp, synthetic construct
  source 1..80: mol_type = other DNA
cgtgcaaaaaatgcaaattatgtggcttagtgtatcacccattcacagagtgtggcacacattgtgtctgtggtgcccgc

SEQ ID NO: 57051 - DNA, 80 bp, synthetic construct
  source 1..80: mol_type = other DNA
tatgatacttcagatagaatgaaactgcatagagcttctggattgtgccctggttataaaagcctaagagctgccagagt

SEQ ID NO: 57052 - DNA, 80 bp, synthetic construct
  source 1..80: mol_type = other DNA
catgtgcaagtcgaaagggcctgcatcaatattgtctataattactgcggtactggtcttaacctttgtgacaccaatca

SEQ ID NO: 57053 - DNA, 80 bp, synthetic construct
  source 1..80: mol_type = other DNA
tggcttcctctgcttactaacaacaacattctacctcaacacaacctaactacctcattagcttgctcgtcgatttcttt

SEQ ID NO: 57054 - DNA, 80 bp, synthetic construct
  source 1..80: mol_type = other DNA
gataacttccacctaggagatgatatggatcctgagctgcgaacactagcacagagcctgattgatgttaaagtgaagga

SEQ ID NO: 57055 - DNA, 80 bp, synthetic construct
  source 1..80: mol_type = other DNA
ttagtgtttggaatggagggcaatggctcccgacttgggaactcacaaacccaatcccatatggatgcttctaacactgt

SEQ ID NO: 57056 - DNA, 80 bp, synthetic construct
  source 1..80: mol_type = other DNA
tttttgtgagctaactaacaggtatttatactacttgttaacatactaacatggagctatttagaggggtgcttcaagtt

SEQ ID NO: 57057 - DNA, 80 bp, synthetic construct
  source 1..80: mol_type = other DNA
cagtcacttctcaccacaagactggcagcgtttaacaaatgaatataaacgctttaaacctagaaaaatgcatgtgaaaa

SEQ ID NO: 57058 - DNA, 80 bp, synthetic construct
  source 1..80: mol_type = other DNA
tattttagattagggcaagagatggtaaggagatcagctggaaaggtcagttccacattggcatctgaactcggtatcac

SEQ ID NO: 57059 - DNA, 80 bp, synthetic construct
  source 1..80: mol_type = other DNA
gcaagacagtcgaaggtcagctgacgccctgctcaggctgcaagccatggcaagaatctcggaagagcaaggctcagaca

SEQ ID NO: 57060 - DNA, 80 bp, synthetic construct
  source 1..80: mol_type = other DNA
ctttaaaatatattgatggtttagagacatatcatgagcaattgaccgctgagtatgcttttcttactagatattgtgat

SEQ ID NO: 57061 - DNA, 80 bp, synthetic construct
  source 1..80: mol_type = other DNA
tattatacacaatacactgataattcaggttatagccaaacagtgtggagaacatatctgcgatctcatgactttggtgc

SEQ ID NO: 57062 - DNA, 80 bp, synthetic construct
  source 1..80: mol_type = other DNA
aatccaagccagatcgcatagagatgaccagtataactttaagaatgcagccagtggtagtaatgttaaagtttgtaaaa

SEQ ID NO: 57063 - DNA, 80 bp, synthetic construct
  source 1..80: mol_type = other DNA
acattcagaaagtgttatgtatttcacctaggtcaagggctaaatttgagaatatcatagcatgtggagaacatgcaaat

SEQ ID NO: 57064 - DNA, 80 bp, synthetic construct
  source 1..80: mol_type = other DNA
cacttttgtttaagccctagatgcagcacaatacgatacccaataaataagaggcatatcagaaggtgtaactggcagat

SEQ ID NO: 57065 - DNA, 80 bp, synthetic construct
  source 1..80: mol_type = other DNA
ttcacattctacaattgacaagatagcagttcaagaattagctgatatagagcaatataagaaagctatctcacagaaat

SEQ ID NO: 57066 - DNA, 80 bp, synthetic construct
  source 1..80: mol_type = other DNA
tgatttaaatagacttgaagagttagtataggtttaaattgattttgggttttataggggtggggtcaaacaaaactgct

SEQ ID NO: 57067 - DNA, 80 bp, synthetic construct
  source 1..80: mol_type = other DNA
attccaaatatggaagtcctaaacttaatctggttgctgacattatgctcagctagtccagtattccagcgatgtttcca

SEQ ID NO: 57068 - DNA, 80 bp, synthetic construct
  source 1..80: mol_type = other DNA
ttatgcttatattatccaagttcagtcacgactgaaataactgatcccgactggacgaacacactgtcacaacttttcct

SEQ ID NO: 57069 - DNA, 80 bp, synthetic construct
  source 1..80: mol_type = other DNA
gactaaaggatggccgacaaattccgtctacttcaagaggtatgctgatatatcgtccttctctgtagatccgcagttgt

SEQ ID NO: 57070 - DNA, 80 bp, synthetic construct
  source 1..80: mol_type = other DNA
tccttctctgtagatccgcagttgtattgtgattataatattgtgtcactacaggaccaaaattcattagcggtagatgt

SEQ ID NO: 57071 - DNA, 80 bp, synthetic construct
  source 1..80: mol_type = other DNA
taatatgatggactttatcatatatcggtttttactaatagttgtcgtcatactgccatttattaaagctcaaaattacg

SEQ ID NO: 57072 - DNA, 80 bp, synthetic construct
  source 1..80: mol_type = other DNA
cgcccggcctcagtgagcgagcgagcgcgcagagagggagtggccaactccatcactaggggttccttgtagttaatgat

SEQ ID NO: 57073 - DNA, 80 bp, synthetic construct
  source 1..80: mol_type = other DNA
aaggtcagttccacattagcatctgaactcggtatcactgccgaggatgcaaggcttgtttcagagattgcaatgcatac

SEQ ID NO: 57074 - DNA, 80 bp, synthetic construct
  source 1..80: mol_type = other DNA
agctaccaggattgggtggcaaggaagataggagggtcaaacagagtcggggagaagccagggagagctacagagaaacc

SEQ ID NO: 57075 - DNA, 80 bp, synthetic construct
  source 1..80: mol_type = other DNA
gggagaagccagggagagctacagagaaaccgggtccagcagaacaagcgatgcgagagctgcccatcttccaaccaaca

SEQ ID NO: 57076 - DNA, 80 bp, synthetic construct
  source 1..80: mol_type = other DNA
gggtccagcagaacaagcgatgcgagagctgcccatcttccaaccaacacacccctagacattgacactgcatcggagtc

SEQ ID NO: 57077 - DNA, 80 bp, synthetic construct
  source 1..80: mol_type = other DNA
aagccaagatccgcaggatagtcgaaggtcagctgacgccctgctcaggctgcaagccatggcaggaatctcggaagaac

SEQ ID NO: 57078 - DNA, 80 bp, synthetic construct
  source 1..80: mol_type = other DNA
tactgaggacaggatcagtagagcggttggacccagacaagcccaagtgtcatttctacacggtgatcaaagtgagaatg

SEQ ID NO: 57079 - DNA, 80 bp, synthetic construct
  source 1..80: mol_type = other DNA
tctgctacatgctggctatgcgtgtactgtatgatatgtcctgaactaaacgggtcttttaggaagaagtgtgcatttgc

SEQ ID NO: 57080 - DNA, 80 bp, synthetic construct
  source 1..80: mol_type = other DNA
taatgtcattgtcggacgtgatttgtcatttcaggatcttagtgaaactccatgtcagattgatcttgcaacttcatcga

SEQ ID NO: 57081 - DNA, 80 bp, synthetic construct
  source 1..80: mol_type = other DNA
ttgatggagcatggggttcaggtgttggcttcaaccttgtatgctcaataagtctaacagagtgtgcaacattcctcact

SEQ ID NO: 57082 - DNA, 80 bp, synthetic construct
  source 1..80: mol_type = other DNA
cagagtgtgcaacattcctcacttccataaaggcatgtcatgctgtatgtgttaaggcatgtcatgctgctttgtgttaa

SEQ ID NO: 57083 - DNA, 80 bp, synthetic construct
  source 1..80: mol_type = other DNA
tacaacccctgtatgccaatttgacggaaatacgatttcaggttacaagaggatgattgccactaaagactcatttcaat

SEQ ID NO: 57084 - DNA, 80 bp, synthetic construct
  source 1..80: mol_type = other DNA
cctgcggttagctctttttaatgtatggtattgaatataccacaattctaacttttttgatatcaattattctattaaat

SEQ ID NO: 57085 - DNA, 80 bp, synthetic construct
  source 1..80: mol_type = other DNA
aatcctcaacctggagtatatcccccgcacgcagcaggtcatttaccatatgtactatatgaccccacagctacagatgc

SEQ ID NO: 57086 - DNA, 80 bp, synthetic construct
  source 1..80: mol_type = other DNA
cttccggccaggagatgatatggatcctgagctgcgaacactagcacagagcctgattgatgttaaagtgaaggaaattt

SEQ ID NO: 57087 - DNA, 80 bp, synthetic construct
  source 1..80: mol_type = other DNA
cagtcatttttcaccacaagactggcaacgcctaacaaatgaatacaagcgcttcaaacctagaaaaatgcatgtaaaaa

SEQ ID NO: 57088 - DNA, 80 bp, synthetic construct
  source 1..80: mol_type = other DNA
cagtcatttttcaccacaagactggcagcgcttaacaaacgaatacaaaagattcagaccaaaaggtatgcatgttaaaa

SEQ ID NO: 57089 - DNA, 80 bp, synthetic construct
  source 1..80: mol_type = other DNA
aggtatgttgcccgtttgtcctctaattccaggaaccacaacaaccagtacgggaccctgcagaacctgcacgactcctg

SEQ ID NO: 57090 - DNA, 80 bp, synthetic construct
  source 1..80: mol_type = other DNA
cgacctttggtcgcccggcctcagtgagcgagcgagcgcgcagagagggagtggccaactccatcactaggggttcctgg

SEQ ID NO: 57091 - DNA, 80 bp, synthetic construct
  source 1..80: mol_type = other DNA
tatggtgacgactgcctctacggtttcacaccggcaactgcttctctagcatcaatgatcatagataaccttcgatcata

SEQ ID NO: 57092 - DNA, 80 bp, synthetic construct
  source 1..80: mol_type = other DNA
gaggggtatctcctggttaataccaattttgaacaagctgtggcgtgctacaacagctggtacattggtggcactacacc

SEQ ID NO: 57093 - DNA, 80 bp, synthetic construct
  source 1..80: mol_type = other DNA
aatgtgacaattaatcctggaccgttcgctcaaacaagttacgcaccagtaacttggagtcatggagaagtgaatgattc

SEQ ID NO: 57094 - DNA, 80 bp, synthetic construct
  source 1..80: mol_type = other DNA
gctatattacttattgaaccaaatacaactaatcaaagcaggcaatacactttatttggagaaacaaaacaaattactat

SEQ ID NO: 57095 - DNA, 80 bp, synthetic construct
  source 1..80: mol_type = other DNA
tcagatactaaattagctggatttttgaagcatggtgggcgcgtatggacttttcacggtgaaacaccaaacgctacaac

SEQ ID NO: 57096 - DNA, 80 bp, synthetic construct
  source 1..80: mol_type = other DNA
tattattaaatctgactaatcaaaaaattatattagaaggtactaatagaactgacgtttgggttgctatattacttgtc

SEQ ID NO: 57097 - DNA, 80 bp, synthetic construct
  source 1..80: mol_type = other DNA
gaaccaaatacaaccaatcaaaatagacaatatacattgtttggagaaacgaaacaaattactattgaaaacaattcaag

SEQ ID NO: 57098 - DNA, 80 bp, synthetic construct
  source 1..80: mol_type = other DNA
taaatggaaattctttgaaatgttcagaaataatgcaagtgctgaatttcaacacaaacgcactttgacgtcagatacca

SEQ ID NO: 57099 - DNA, 80 bp, synthetic construct
  source 1..80: mol_type = other DNA
aacgttacaattaaccccggaccgtttgctcaaacaagttacgcgccagttacttggggtcatggggaagtaaacgattc

SEQ ID NO: 57100 - DNA, 80 bp, synthetic construct
  source 1..80: mol_type = other DNA
atccaactaatcaacagattgtgttagaaggtactaatagaactgatgtttgggtcgctatattacttattgaaccaaat

SEQ ID NO: 57101 - DNA, 80 bp, synthetic construct
  source 1..80: mol_type = other DNA
gtaactaatcaaagcagacaatacgtattatttggagaaacgaagcaaattatcgtcgaaaatagttcaaacaaatggaa

SEQ ID NO: 57102 - DNA, 80 bp, synthetic construct
  source 1..80: mol_type = other DNA
gttctttgaaatgtttagaagcaatgctagtgctgaatttcagcataaacgtactttaacatcggatactaaattagctg

SEQ ID NO: 57103 - DNA, 80 bp, synthetic construct
  source 1..80: mol_type = other DNA
tcggatactaaattagctggatttttgaaacatggtggacgtgtatggacatttcatggtgagacaccaaatgctacaaa

SEQ ID NO: 57104 - DNA, 80 bp, synthetic construct
  source 1..80: mol_type = other DNA
aacaacaatagaaccggtgcttgatggtccatatcaaccaacaagttttaagccaccaaatgattattggatactattaa

SEQ ID NO: 57105 - DNA, 80 bp, synthetic construct
  source 1..80: mol_type = other DNA
ccctataaaattgtgaataatcaaagaagaaataatggctgattacgctaggattgctgttgagttttcaggagaagcca

SEQ ID NO: 57106 - DNA, 80 bp, synthetic construct
  source 1..80: mol_type = other DNA
caacagaagggaggagcaggatggaaagatgatgtgaagatgatgattgttctgtgcttaactagagggaacaagcccac

SEQ ID NO: 57107 - DNA, 80 bp, synthetic construct
  source 1..80: mol_type = other DNA
caagatggtggagaaaatgtctcctgaagggaaggttaaggtcaatcgtctgatctcaacctatgggctgaaaagcggga

SEQ ID NO: 57108 - DNA, 80 bp, synthetic construct
  source 1..80: mol_type = other DNA
acccaggcagggatgatatcactctctctagagttgctgctgcctttgctggatggacctgccaagccctgaatgtcctg

SEQ ID NO: 57109 - DNA, 80 bp, synthetic construct
  source 1..80: mol_type = other DNA
aagccctgaatgtcctgcacccacacctgcctgtttctggaactactatggatgcgatctcacccaactaccccagggca

SEQ ID NO: 57110 - DNA, 80 bp, synthetic construct
  source 1..80: mol_type = other DNA
tcaacctcgctgaaattcaaggttgggtgactgacttcgcctaccaaggctttgacgcccgcaggattgtggagctggta

SEQ ID NO: 57111 - DNA, 80 bp, synthetic construct
  source 1..80: mol_type = other DNA
aacgttacagttaatccgggaccattcgcgcagactgggtacgctccggttaactggggacacggtgaattgtctgactc

SEQ ID NO: 57112 - DNA, 80 bp, synthetic construct
  source 1..80: mol_type = other DNA
caccaactcaaataggtagggtggcggagggcacgaacacgactgatagatggttcgcttgtgttctagttgaaccaaac

SEQ ID NO: 57113 - DNA, 80 bp, synthetic construct
  source 1..80: mol_type = other DNA
gtgcaaaatacacagagagaatatgttttggatggacagacagtacagctgcaagtttcgaacgattcaagtactctttg

SEQ ID NO: 57114 - DNA, 80 bp, synthetic construct
  source 1..80: mol_type = other DNA
gaaatttatcctatttattaaactagagaaaaatggaaattactcccaatattcaacgttatctacctcaaataaattgt

SEQ ID NO: 57115 - DNA, 80 bp, synthetic construct
  source 1..80: mol_type = other DNA
acctcaaataaattgtgtgcatggatgaaaagagaaggaagagtatattggtacgcgggaactacgccaaacgcatcaga

SEQ ID NO: 57116 - DNA, 80 bp, synthetic construct
  source 1..80: mol_type = other DNA
aacattagttcagccgacactagatggaccgtatcaacctactacgtttaacttaccaatcgactattggatgttaattg

SEQ ID NO: 57117 - DNA, 80 bp, synthetic construct
  source 1..80: mol_type = other DNA
caccttctagagagggaaaagttgctgaaggtacgaatacgaccgacagatggtttgcttgtgtgctagttgaaccaaat

SEQ ID NO: 57118 - DNA, 80 bp, synthetic construct
  source 1..80: mol_type = other DNA
aacgttacagttaatccaggaccgtttgcacagactggatatgccccagttaactggggacatggtgagttatcagattc

SEQ ID NO: 57119 - DNA, 80 bp, synthetic construct
  source 1..80: mol_type = other DNA
cgcctactcaaacaggtagagtggcggagggtacaaatacgactgatagatggttcgcttgtgtcttagttgaaccaaat

SEQ ID NO: 57120 - DNA, 80 bp, synthetic construct
  source 1..80: mol_type = other DNA
gtgcaaaatacacaaagagaatatgttctagatggacaaacagtacagttgcaagtttcaaatgaatcaagtacgctttg

SEQ ID NO: 57121 - DNA, 80 bp, synthetic construct
  source 1..80: mol_type = other DNA
acgtcaaataagttgtgtgcatggatgaaaagagaagggagagtatactggtatgcaggaactacaccgaatgcatcaga

SEQ ID NO: 57122 - DNA, 80 bp, synthetic construct
  source 1..80: mol_type = other DNA
aacgttagttcagccaacgctagatggaccgtatcagcccaccacatttaacctgccaatcgactattggatgctgattg

SEQ ID NO: 57123 - DNA, 80 bp, synthetic construct
  source 1..80: mol_type = other DNA
aacgttactgttaatccagggccattcgcacaaacgggatatgcgcctgttgactggggacatggtgaattgcctgactc

SEQ ID NO: 57124 - DNA, 80 bp, synthetic construct
  source 1..80: mol_type = other DNA
cgcctactagagaagggaaagttgctgaaggtacgaatacgactgacagatggttcgcttgtgtactagttgagccaaat

SEQ ID NO: 57125 - DNA, 80 bp, synthetic construct
  source 1..80: mol_type = other DNA
gtgcaaaatacacaaagacaatacgtattagatgggcaaaatgtccaattacatgtctcaaacgattcaaatacttcgtg

SEQ ID NO: 57126 - DNA, 80 bp, synthetic construct
  source 1..80: mol_type = other DNA
gaaatttatattattcattaaattgacacctgacggaacgtacactcaatactcaaccttgtcaacaccgcataagttat

SEQ ID NO: 57127 - DNA, 80 bp, synthetic construct
  source 1..80: mol_type = other DNA
acaccgcataagttatgcgcgtggatgaaaagagataacagagtatactggtatcaaggaacgacaccgaacgcatcaga

SEQ ID NO: 57128 - DNA, 80 bp, synthetic construct
  source 1..80: mol_type = other DNA
tacattagtgcaaccaactcttgatggtccataccaacccacttcactcaacttaccagtcgattattggatgttaattg

SEQ ID NO: 57129 - DNA, 80 bp, synthetic construct
  source 1..80: mol_type = other DNA
gtgcaaaacacacaaagacaatacgtattagatgggcaaaatgttcaattaaatgtttcaaatgattcaagcacttcatg

SEQ ID NO: 57130 - DNA, 80 bp, synthetic construct
  source 1..80: mol_type = other DNA
caccgtgccctcagccaggatgcgtaactaaacgcccaccagtaccacccagagtgtacctgccccctcctgtacctata

SEQ ID NO: 57131 - DNA, 80 bp, synthetic construct
  source 1..80: mol_type = other DNA
gatcactaattattcaccatctagagaggataacttgcagcgtgtatttacagtggcttccattagaagcatgttgatta

SEQ ID NO: 57132 - DNA, 80 bp, synthetic construct
  source 1..80: mol_type = other DNA
actggctgggtatgaagaacagattgctactaaagacgaaattgaaaagcaaatggacagagttgtaaaagaaatgagac

SEQ ID NO: 57133 - DNA, 80 bp, synthetic construct
  source 1..80: mol_type = other DNA
aggcatcaattccaactctaaaaatagcattgagaacgtcgaaatgttcatataaagtcatcaaatattgcatggttaca

SEQ ID NO: 57134 - DNA, 80 bp, synthetic construct
  source 1..80: mol_type = other DNA
aaaattgcactaaagacgtcgaaatgctcatataaggtagtgaagtattgtattgtgacaattttcaatacgctgttgaa

SEQ ID NO: 57135 - DNA, 80 bp, synthetic construct
  source 1..80: mol_type = other DNA
ctgacctcaactacacattgagtgtaatcactttaatgaatgacacattacattctataattcaagatccgggaatggcg

SEQ ID NO: 57136 - DNA, 80 bp, synthetic construct
  source 1..80: mol_type = other DNA
aattggtgactagaccggctgacgttattgacatgtcgaaggaatttaatcagaaaaacattagaacgctagacgaatgg

SEQ ID NO: 57137 - DNA, 80 bp, synthetic construct
  source 1..80: mol_type = other DNA
ccgacctcaactacacattgagtgtaatcactctaatgaacagcacattgcacacaatactagaagatccaggtatggcg

SEQ ID NO: 57138 - DNA, 80 bp, synthetic construct
  source 1..80: mol_type = other DNA
aaaattgcgttgaagacatcgaaatgctcgtataaggtggtaaaatactgtattgtaacaattttcaatacgctactgaa

SEQ ID NO: 57139 - DNA, 80 bp, synthetic construct
  source 1..80: mol_type = other DNA
tataaggagcaaatcactacaaaagatgaaatagaaaaacagatggacagagtcgttaaagaaatgaggcgtcagttgga

SEQ ID NO: 57140 - DNA, 80 bp, synthetic construct
  source 1..80: mol_type = other DNA
ttgatagtgcgaccaactgatgaaatagacatgacgaaagaaataaatcaaaaaaacgtgaaaacgctggaagaatggga

SEQ ID NO: 57141 - DNA, 80 bp, synthetic construct
  source 1..80: mol_type = other DNA
tagaacgtcaaggtgctcatataaagtaatcaagtattgcattgtatcaatttttaacactttgctaaaactggctgggt

SEQ ID NO: 57142 - DNA, 80 bp, synthetic construct
  source 1..80: mol_type = other DNA
tactttccatatattgcttccgtcctaactgtactattcacgctacataaggcttcaattccaactatgaagattgctct

SEQ ID NO: 57143 - DNA, 80 bp, synthetic construct
  source 1..80: mol_type = other DNA
aaaattgcactaaagacgtcgaaatgctcgtataaggtggtaaagtattgcattgtaacaatcttcaatacattattgaa

SEQ ID NO: 57144 - DNA, 80 bp, synthetic construct
  source 1..80: mol_type = other DNA
ttggtagtgcgatcaactgacgagatagatatgacaaaagaaatcaatcaaaagaacgtgaaaacgctagaagagtggga

SEQ ID NO: 57145 - DNA, 80 bp, synthetic construct
  source 1..80: mol_type = other DNA
ttgataattagaccagctgacgccattgacatgtcgaaggaatttaatcagaaaaacatcagaacgctagacgaatggga

SEQ ID NO: 57146 - DNA, 80 bp, synthetic construct
  source 1..80: mol_type = other DNA
ccgacctcaactacacattgagtgtaatcactcttctgaatgacacgttgcataccataatggaggatcctggaatggcg

SEQ ID NO: 57147 - DNA, 80 bp, synthetic construct
  source 1..80: mol_type = other DNA
cttataattaaaccagttgataaaattgatatgtcacaagaatttaatcagagacaatttaaaacgctaactgagtgggt

SEQ ID NO: 57148 - DNA, 80 bp, synthetic construct
  source 1..80: mol_type = other DNA
ctggactatcaaggtatgttgcccgtttgtcctctaattccaggatcatcaacaaccagcaccggaccatgcaaaacctg

SEQ ID NO: 57149 - DNA, 80 bp, synthetic construct
  source 1..80: mol_type = other DNA
ttggccactccctctctgcgcgctcgctcgctcactgaggccgggcgaccaaaggtcgcccgacgcccgggctttgcccg

SEQ ID NO: 57150 - DNA, 80 bp, synthetic construct
  source 1..80: mol_type = other DNA
cagtggatccaggaggaccaggcctcatacatctccttcaatgcggcctccaactcgcggtcccaaatcaaggctgcctt

SEQ ID NO: 57151 - DNA, 80 bp, synthetic construct
  source 1..80: mol_type = other DNA
ggacaatgcgggaaagattatgagcctgactaaaaccgcccccgactacctggtgggccagcagcccgtggaggacattt

SEQ ID NO: 57152 - DNA, 80 bp, synthetic construct
  source 1..80: mol_type = other DNA
ccagcaatcggatttataaaattttggaactaaacgggtacgatccccaatatgcggcttccgtctttctgggatgggcc

SEQ ID NO: 57153 - DNA, 80 bp, synthetic construct
  source 1..80: mol_type = other DNA
acgaaaaagttcggcaagaggaacaccatctggctgtttgggcctgcaactaccgggaagaccaacatcgcggaggccat

SEQ ID NO: 57154 - DNA, 80 bp, synthetic construct
  source 1..80: mol_type = other DNA
agcccacactgtgcccttctacgggtgcgtaaactggaccaatgagaactttcccttcaacgactgtgtcgacaagatgg

SEQ ID NO: 57155 - DNA, 80 bp, synthetic construct
  source 1..80: mol_type = other DNA
tgatctggtgggaggaggggaagatgaccgccaaggtcgtggagtcggccaaagccattctcggaggaagcaaggtgcgc

SEQ ID NO: 57156 - DNA, 80 bp, synthetic construct
  source 1..80: mol_type = other DNA
gtggaccagaaatgcaagtcctcggcccagatagacccgactcccgtgatcgtcacctccaacaccaacatgtgcgccgt

SEQ ID NO: 57157 - DNA, 80 bp, synthetic construct
  source 1..80: mol_type = other DNA
tgacgtgaattacgtcatagggttagggaggtcctgtattagaggtcacgtgagtgttttgcgacattttgcgacaccat

SEQ ID NO: 57158 - DNA, 80 bp, synthetic construct
  source 1..80: mol_type = other DNA
gattgacgggaactcaacgaccttcgaacaccagcagccgttgcaagaccggatgttcaaatttgaactcacccgccgtc

SEQ ID NO: 57159 - DNA, 80 bp, synthetic construct
  source 1..80: mol_type = other DNA
tggatcatgactttgggaaggtcaccaagcaggaagtcaaagactttttccggtgggcaaaggatcacgtggttgaggtg

SEQ ID NO: 57160 - DNA, 80 bp, synthetic construct
  source 1..80: mol_type = other DNA
gagcatgaattctacgtcaaaaagggtggagccaagaaaagacccgcccccagtgacgcagatataagtgagcccaaacg

SEQ ID NO: 57161 - DNA, 80 bp, synthetic construct
  source 1..80: mol_type = other DNA
ggtgcgcgagtcagttgcgcagccatcgacgtcagacgcggaagcttcgatcaactacgcagacaggtaccaaaacaaat

SEQ ID NO: 57162 - DNA, 80 bp, synthetic construct
  source 1..80: mol_type = other DNA
gttctcgtcacgtgggcatgaatctgatgctgtttccctgcagacaatgcgagagaatgaatcagaattcaaatatctgc

SEQ ID NO: 57163 - DNA, 80 bp, synthetic construct
  source 1..80: mol_type = other DNA
ttcactcacggacagaaagactgtttagagtgctttcccgtgtcagaatctcaacccgtttctgtcgtcaaaaaggcgta

SEQ ID NO: 57164 - DNA, 80 bp, synthetic construct
  source 1..80: mol_type = other DNA
tcagaaactgtgctacattcatcatatcatgggaaaggtgccagacgcttgcactgcctgcgatctggtcaatgtggatt

SEQ ID NO: 57165 - DNA, 80 bp, synthetic construct
  source 1..80: mol_type = other DNA
tggatgactgcatctttgaacaataaatgatttaaatcaggtatggctgccgatggttatcttccagattggctcgagga

SEQ ID NO: 57166 - DNA, 80 bp, synthetic construct
  source 1..80: mol_type = other DNA
cactctctctgaaggaataagacagtggtggaagctcaaacctggcccaccaccaccaaagcccgcagagcggcataagg

SEQ ID NO: 57167 - DNA, 80 bp, synthetic construct
  source 1..80: mol_type = other DNA
acgacagcaggggtcttgtgcttcctgggtacaagtacctcggacccttcaacggactcgacaagggagagccggtcaac

SEQ ID NO: 57168 - DNA, 80 bp, synthetic construct
  source 1..80: mol_type = other DNA
gtggtcacgctgggtatttaagcccgagtgagcacgcagggtctccattttgaagcgggaggtttgaacgcgcagccgcc

SEQ ID NO: 57169 - DNA, 80 bp, synthetic construct
  source 1..80: mol_type = other DNA
gaggcagacgccgcggccctcgagcacgtacaaagcctacgaccggcagctcgacagcggagacaacccgtacctcaagt

SEQ ID NO: 57170 - DNA, 80 bp, synthetic construct
  source 1..80: mol_type = other DNA
acaaccacgccgacgcggagtttcaggagcgccttaaagaagatacgtcttttgggggcaacctcggacgagcagtcttc

SEQ ID NO: 57171 - DNA, 80 bp, synthetic construct
  source 1..80: mol_type = other DNA
caggcgaaaaagagggttcttgaacctctgggcctggttgaggaacctgttaagacggctccgggaaaaaagaggccggt

SEQ ID NO: 57172 - DNA, 80 bp, synthetic construct
  source 1..80: mol_type = other DNA
agagcactctcctgtggagccagactcctcctcgggaaccggaaaggcgggccagcagcctgcaagaaaaagattgaatt

SEQ ID NO: 57173 - DNA, 80 bp, synthetic construct
  source 1..80: mol_type = other DNA
ttggtcagactggagacgcagactcagtacctgacccccagcctctcggacagccaccagcagccccctctggtctggga

SEQ ID NO: 57174 - DNA, 80 bp, synthetic construct
  source 1..80: mol_type = other DNA
actaatacgatggctacaggcagtggcgcaccaatggcagacaataacgagggcgccgacggagtgggtaattcctccgg

SEQ ID NO: 57175 - DNA, 80 bp, synthetic construct
  source 1..80: mol_type = other DNA
aaattggcattgcgattccacatggatgggcgacagagtcatcaccaccagcacccgaacctgggccctgcccacctaca

SEQ ID NO: 57176 - DNA, 80 bp, synthetic construct
  source 1..80: mol_type = other DNA
acaaccacctctacaaacaaatttccagccaatcaggagcctcgaacgacaatcactactttggctacagcaccccttgg

SEQ ID NO: 57177 - DNA, 80 bp, synthetic construct
  source 1..80: mol_type = other DNA
gggtattttgacttcaacagattccactgccacttttcaccacgtgactggcaaagactcatcaacaacaactggggatt

SEQ ID NO: 57178 - DNA, 80 bp, synthetic construct
  source 1..80: mol_type = other DNA
ccgacccaagagactcaacttcaagctctttaacattcaagtcaaagaggtcacgcagaatgacggtacgacgacgattg

SEQ ID NO: 57179 - DNA, 80 bp, synthetic construct
  source 1..80: mol_type = other DNA
atgccggggttttacgagattgtgattaaggtccccagcgaccttgacgggcatctgcccggcatttctgacagctttgt

SEQ ID NO: 57180 - DNA, 80 bp, synthetic construct
  source 1..80: mol_type = other DNA
ccaataaccttaccagcacggttcaggtgtttactgactcggagtaccagctcccgtacgtcctcggctcggcgcatcaa

SEQ ID NO: 57181 - DNA, 80 bp, synthetic construct
  source 1..80: mol_type = other DNA
ggatgcctcccgccgttcccagcagacgtcttcatggtgccacagtatggatacctcaccctgaacaacgggagtcaggc

SEQ ID NO: 57182 - DNA, 80 bp, synthetic construct
  source 1..80: mol_type = other DNA
agtaggacgctcttcattttactgcctggagtactttccttctcagatgctgcgtaccggaaacaactttaccttcagct

SEQ ID NO: 57183 - DNA, 80 bp, synthetic construct
  source 1..80: mol_type = other DNA
acacttttgaggacgttcctttccacagcagctacgctcacagccagagtctggaccgtctcatgaatcctctcatcgac

SEQ ID NO: 57184 - DNA, 80 bp, synthetic construct
  source 1..80: mol_type = other DNA
cagtacctgtattacttgagcagaacaaacactccaagtggaaccaccacgcagtcaaggcttcagttttctcaggccgg

SEQ ID NO: 57185 - DNA, 80 bp, synthetic construct
  source 1..80: mol_type = other DNA
agcgagtgacattcgggaccagtctaggaactggcttcctggaccctgttaccgccagcagcgagtatcaaagacatctg

SEQ ID NO: 57186 - DNA, 80 bp, synthetic construct
  source 1..80: mol_type = other DNA
cggataacaacaacagtgaatactcgtggactggagctaccaagtaccacctcaatggcagagactctctggtgaatccg

SEQ ID NO: 57187 - DNA, 80 bp, synthetic construct
  source 1..80: mol_type = other DNA
gccatggcaagccacaaggacgatgaagaaaagttttttcctcagagcggggttctcatctttgggaagcaaggctcaga

SEQ ID NO: 57188 - DNA, 80 bp, synthetic construct
  source 1..80: mol_type = other DNA
gaaaacaaatgtgaacattgaaaaggtcatgattacagacgaagaggaaatcggaacaaccaatcccgtggctacggagc

SEQ ID NO: 57189 - DNA, 80 bp, synthetic construct
  source 1..80: mol_type = other DNA
agtatggttctgtatctaccaacctccagagaggcaacagacaagcagctaccgcagatgtcaacacacaaggcgttctt

SEQ ID NO: 57190 - DNA, 80 bp, synthetic construct
  source 1..80: mol_type = other DNA
gaactgggtggccgagaaggaatgggagttgccgccagattctgacatggatctgaatctgattgagcaggcacccctga

SEQ ID NO: 57191 - DNA, 80 bp, synthetic construct
  source 1..80: mol_type = other DNA
ccaggcatggtctggcaggacagagatgtgtaccttcaggggcccatctgggcaaagattccacacacggacggacattt

SEQ ID NO: 57192 - DNA, 80 bp, synthetic construct
  source 1..80: mol_type = other DNA
tcacccctctcccctcatgggtggattcggacttaaacaccctcctccacagattctcatcaagaacaccccggtacctg

SEQ ID NO: 57193 - DNA, 80 bp, synthetic construct
  source 1..80: mol_type = other DNA
cgaatccttcgaccaccttcagtgcggcaaagtttgcttccttcatcacacagtactccacgggacacggtcagcgtgga

SEQ ID NO: 57194 - DNA, 80 bp, synthetic construct
  source 1..80: mol_type = other DNA
gatcgagtgggagctgcagaaggaaaacagcaaacgctggaatcccgaaattcagtacacttccaactacaacaagtctg

SEQ ID NO: 57195 - DNA, 80 bp, synthetic construct
  source 1..80: mol_type = other DNA
ttaatcgtggacttaccgtggatactaatggcgtgtattcagagcctcgccccattggcaccagatacctgactcgtaat

SEQ ID NO: 57196 - DNA, 80 bp, synthetic construct
  source 1..80: mol_type = other DNA
ctgtaattgcttgttaatcaataaaccgtttaattcgtttcagttgaactttggtctctgcgtatttctttcttatctag

SEQ ID NO: 57197 - DNA, 80 bp, synthetic construct
  source 1..80: mol_type = other DNA
tttccatggctacgtagataagtagcatggcgggttaatcattaactacaaggaacccctagtgatggagttggccactc

SEQ ID NO: 57198 - DNA, 80 bp, synthetic construct
  source 1..80: mol_type = other DNA
cctctctgcgcgctcgctcgctcactgaggccgggcgaccaaaggtcgcccgacgcccgggctttgcccgggcggcctca

SEQ ID NO: 57199 - DNA, 80 bp, synthetic construct
  source 1..80: mol_type = other DNA
cgaccaaaggtcgcccgacgcccgggctttgcccgggcggcctcagtgagcgagcgagcgcgcagagagggagtggccaa

SEQ ID NO: 57200 - DNA, 80 bp, synthetic construct
  source 1..80: mol_type = other DNA
ccgtggccgagaagctgcagcgcgactttctgacggaatggcgccgtgtgagtaaggccccggaggcccttttctttgtg

SEQ ID NO: 57201 - DNA, 80 bp, synthetic construct
  source 1..80: mol_type = other DNA
caatttgagaagggagagagctacttccacatgcacgtgctcgtggaaaccaccggggtgaaatccatggttttgggacg

SEQ ID NO: 57202 - DNA, 80 bp, synthetic construct
  source 1..80: mol_type = other DNA
tttcctgagtcagattcgcgaaaaactgattcagagaatttaccgcgggatcgagccgactttgccaaactggttcgcgg

SEQ ID NO: 57203 - DNA, 80 bp, synthetic construct
  source 1..80: mol_type = other DNA
tcacaaagaccagaaatggcgccggaggcgggaacaaggtggtggatgagtgctacatccccaattacttgctccccaaa

SEQ ID NO: 57204 - DNA, 80 bp, synthetic construct
  source 1..80: mol_type = other DNA
ggcggcctcagtgagcgagcgagcgcgcagagagggagtggccaactccatcactaggggttcctggaggtgtggagtcg

SEQ ID NO: 57205 - DNA, 80 bp, synthetic construct
  source 1..80: mol_type = other DNA
acccagcctgagctccagtgggcgtggactaatatggaacagtatttaagcgcctgtttgaatctcacggagcgtaaacg

SEQ ID NO: 57206 - DNA, 80 bp, synthetic construct
  source 1..80: mol_type = other DNA
gttggtggcgcagcatctgacgcacgtgtcgcagacgcaggagcagaacaaagagaatcagaatcccaattctgatgcgc

SEQ ID NO: 57207 - DNA, 80 bp, synthetic construct
  source 1..80: mol_type = other DNA
cggtgatcagatcaaaaacttcagccaggtacatggagctggtcgggtggctcgtggacaaggggattacctcggagaag

SEQ ID NO: 57208 - DNA, 80 bp, synthetic construct
  source 1..80: mol_type = other DNA
caaatcattttgaagttgccggcactacagttaaatctggatggtttaagagcacaacgtatatcacactcgaccagaca

SEQ ID NO: 57209 - DNA, 80 bp, synthetic construct
  source 1..80: mol_type = other DNA
caaatcattttgaagtcgctgggactacagtaaaatctgggtggtttaaaagtacaacatatataacactcgatcaaact

SEQ ID NO: 57210 - DNA, 80 bp, synthetic construct
  source 1..80: mol_type = other DNA
gcaagagaaagatgacgagaaacaagatcaaaacaatagaatgcaattgtctgacaaagtactttcaaagaaagaggaag

SEQ ID NO: 57211 - DNA, 80 bp, synthetic construct
  source 1..80: mol_type = other DNA
gaagttttgaaaacaaaagaagagcaccaaaaagaaatacaatatgaaattttacaaaaaacgataccaacatttgaacc

SEQ ID NO: 57212 - DNA, 80 bp, synthetic construct
  source 1..80: mol_type = other DNA
aagaaagatactttaccagatggagattatgatgttagagagtattttctaaatttgtatgatcaggttcttactgaaat

SEQ ID NO: 57213 - DNA, 80 bp, synthetic construct
  source 1..80: mol_type = other DNA
tcgtaatcgacagtcaggaggaaattaagattgctgatgaagtgaagaaatcgacgaaagaagaatctaaacaattgctt

SEQ ID NO: 57214 - DNA, 80 bp, synthetic construct
  source 1..80: mol_type = other DNA
acactgcacacaatactagaagatccaggaatggcgtattttccatacatcgcatctgtcctgacagtcttgttcacgtt

SEQ ID NO: 57215 - DNA, 80 bp, synthetic construct
  source 1..80: mol_type = other DNA
acattgcatacaatactagaagatccaggaatggcgtatttcccttacattgcatctgtcctaacagttttgttcacatt

SEQ ID NO: 57216 - DNA, 80 bp, synthetic construct
  source 1..80: mol_type = other DNA
aagattgcactaaagacatcaaaatgttcgtataaggtagtaaaatattgcattgtgacaatttttaatacgctattaaa

SEQ ID NO: 57217 - DNA, 80 bp, synthetic construct
  source 1..80: mol_type = other DNA
tataaagaacagattactactaaagatgaaatagaaaagcagatggacagagttgtcaaagagatgaggcgtcagttgga

SEQ ID NO: 57218 - DNA, 80 bp, synthetic construct
  source 1..80: mol_type = other DNA
aaattaactacacgtgaaattgagcaagttgaactacttaaacgtattcatgataaactggtggtactatcgactgacgg

SEQ ID NO: 57219 - DNA, 80 bp, synthetic construct
  source 1..80: mol_type = other DNA
gatagatatgacaaaagaaattaatcagaagaacgtaaaaacgctagaagaatgggaaagtggaaaaaatccttatgaac

SEQ ID NO: 57220 - DNA, 80 bp, synthetic construct
  source 1..80: mol_type = other DNA
ttatacatcagtgttcctcgtcatgaatgcagctacagatgacgatataataattgaatatatatattccaatgaattag

SEQ ID NO: 57221 - DNA, 80 bp, synthetic construct
  source 1..80: mol_type = other DNA
actttcaaaattttctgttaagaaaaattaaagagagaatgactacatctcttccaattgctagattgtcaaatcgtgta

SEQ ID NO: 57222 - DNA, 80 bp, synthetic construct
  source 1..80: mol_type = other DNA
ctagaggatccaggaatgtcatattttccttatgttgcatctgtcctaacagttttgttcacgttacacaaagcgtcaat

SEQ ID NO: 57223 - DNA, 80 bp, synthetic construct
  source 1..80: mol_type = other DNA
tataaagaacagattactactaaagatgaaatggaaaaacaaatggacagagttgttaaagaaatgagacgtcaattaga

SEQ ID NO: 57224 - DNA, 80 bp, synthetic construct
  source 1..80: mol_type = other DNA
ataaactaactacacgtgaaattgaacaagttgagttgcttaaacgcatctacgataaattggtggtgcaatcgactgat

SEQ ID NO: 57225 - DNA, 80 bp, synthetic construct
  source 1..80: mol_type = other DNA
ggccaaaattcgcagtccccaacctccaatcactcaccaacctcctgtcctccaatttgtcctggttatcgctggatgtg

SEQ ID NO: 57226 - DNA, 80 bp, synthetic construct
  source 1..80: mol_type = other DNA
cccactgaaggcgcgtccaaaatagtgtttgagatggagggcaatggctcccaacaaggggcacgaccaaaaagtccacc

SEQ ID NO: 57227 - DNA, 80 bp, synthetic construct
  source 1..80: mol_type = other DNA
gtctggtgtttacgctggtcgtatcattgcttctgtcgtaccaccaggggttgatccaacgaccatccgtgacccagggg

SEQ ID NO: 57228 - DNA, 80 bp, synthetic construct
  source 1..80: mol_type = other DNA
tcaaagtgttgaccttcctggcacggttggcccggccacatccaacgttgttgtggctaatccggaacaacccaatgggg

SEQ ID NO: 57229 - DNA, 80 bp, synthetic construct
  source 1..80: mol_type = other DNA
cacactgaaggggcccacaaaatagtgtttgagatggaaggcaatgcctccggctcagcatcaaaaggacttgagcagtc

SEQ ID NO: 57230 - DNA, 80 bp, synthetic construct
  source 1..80: mol_type = other DNA
gtctggcgtctttgctgggcgtatcatttcttctgtcataccacctggggttgatccatcgtccatccgggatccaggcg

SEQ ID NO: 57231 - DNA, 80 bp, synthetic construct
  source 1..80: mol_type = other DNA
cgtcactgttgacccgcctggcacgacgggcccaaccacatcccacactgttgttgctaatccggaacaacccaatgggg

SEQ ID NO: 57232 - DNA, 80 bp, synthetic construct
  source 1..80: mol_type = other DNA
catggtatataagcagatgaattttctaaaactttcttttctggctgcttttcactgggaataacgtgctgttatttttc

SEQ ID NO: 57233 - DNA, 80 bp, synthetic construct
  source 1..80: mol_type = other DNA
cattttagactgcgctaatgataactggtggtgctctatgctggatttagatacttctgactgggaaccactaactcact

SEQ ID NO: 57234 - DNA, 80 bp, synthetic construct
  source 1..80: mol_type = other DNA
caggcgccggaaaagcccttacggggcttagtactggcactagtcaaagcaccagaatttccctacgcccagggccagtg

SEQ ID NO: 57235 - DNA, 80 bp, synthetic construct
  source 1..80: mol_type = other DNA
acccagattatatgtacccccgccaataccccgtagggaaccatgtgctaaagatacagatgctgtagaatataagttgc

SEQ ID NO: 57236 - DNA, 80 bp, synthetic construct
  source 1..80: mol_type = other DNA
taacccgttatgaacaacatgtaattagaatgcttagattatgtaatatgtatacaaatttggaaaaataaatggctcaa

SEQ ID NO: 57237 - DNA, 80 bp, synthetic construct
  source 1..80: mol_type = other DNA
caaataaataactaatagtgtatgtggctttaaaaattttaaaaagaagacaccaaatcagatgccgccggtcgccgccg

SEQ ID NO: 57238 - DNA, 80 bp, synthetic construct
  source 1..80: mol_type = other DNA
gacgaggagcttgtcatgctaaaaaacctcgcatttgtgcaaacacagacactgttaataatgaagccggggagtcaagc

SEQ ID NO: 57239 - DNA, 80 bp, synthetic construct
  source 1..80: mol_type = other DNA
tgtggagggggagatgtggtaccatttgccggaaagggaaccaaggcagggttaaagtttcagaccatggtaaattggtt

SEQ ID NO: 57240 - DNA, 80 bp, synthetic construct
  source 1..80: mol_type = other DNA
tgctaattaacaggtatttatactaacttttaatttactaacatggagctattcaggggtgtgttgcacatttcttctaa

SEQ ID NO: 57241 - DNA, 80 bp, synthetic construct
  source 1..80: mol_type = other DNA
aacttctcactaattcatattcggtagacttgcatgacgaaatagaacagattggatcggagaaaactcaaaatgtgacg

SEQ ID NO: 57242 - DNA, 80 bp, synthetic construct
  source 1..80: mol_type = other DNA
cgaaatgtttaaaggtagtagtcagagtgatttttctaatagacggactttaacctctaataatagacttgtaggaatgc

SEQ ID NO: 57243 - DNA, 80 bp, synthetic construct
  source 1..80: mol_type = other DNA
catgcatcttctggaggaaatgggtagagaatccacatgggatcatctggaaagtatctccatgtgctgcatgggtccct

SEQ ID NO: 57244 - DNA, 80 bp, synthetic construct
  source 1..80: mol_type = other DNA
gtgtcggaccgcgaaggacaatgccccgtgcactctcactcaagcacagcaacacttcaggaatcgacagtgcatgtcca

SEQ ID NO: 57245 - DNA, 80 bp, synthetic construct
  source 1..80: mol_type = other DNA
caaaccgctatttcaaaaacatcatggagctggttactggcactctttggcggcgcctcgtcgctattaattataggact

SEQ ID NO: 57246 - DNA, 80 bp, synthetic construct
  source 1..80: mol_type = other DNA
cgttagtttcgacggttaaatgtgaggtcggcgaatgtacttattcagctgattttggtggtatggcaaccctgcagtat

SEQ ID NO: 57247 - DNA, 80 bp, synthetic construct
  source 1..80: mol_type = other DNA
ttacagtgtgagtggtcagccattggatctgcaatattgtacaccaaatataagtgtccaatatccagaaaccatgggaa

SEQ ID NO: 57248 - DNA, 80 bp, synthetic construct
  source 1..80: mol_type = other DNA
gatttcaaaattttactggggtacagcaaacctatgattccacttacaaagcagttttagataaagatggtcattatcca

SEQ ID NO: 57249 - DNA, 80 bp, synthetic construct
  source 1..80: mol_type = other DNA
tgctgcagagtcaacttctgtctctaaagaggctgaggcttaggccccaggcccccgcatatatatgagaaaaaaggtag

SEQ ID NO: 57250 - DNA, 80 bp, synthetic construct
  source 1..80: mol_type = other DNA
ccagattacagtcaagtgctcataatatacaagtagattcttacagtgttcctgattctcttagtggtcagtatattgaa

SEQ ID NO: 57251 - DNA, 80 bp, synthetic construct
  source 1..80: mol_type = other DNA
agaccacaaacatattcagggattaatatgagaccagtaccagattggctattacccttaattcttggcattttgggtga

SEQ ID NO: 57252 - DNA, 80 bp, synthetic construct
  source 1..80: mol_type = other DNA
tttatctcctttctttgaggaaatagtggaagaagttgaaaatggctccaaaaagaaaatctagatgcacctcacagaca

SEQ ID NO: 57253 - DNA, 80 bp, synthetic construct
  source 1..80: mol_type = other DNA
tgtccaatggacacctgtaatcctaggaggagaagatgtgaatatgatccgtgccaaaagtctgtctgtccccctccaaa

SEQ ID NO: 57254 - DNA, 80 bp, synthetic construct
  source 1..80: mol_type = other DNA
acctttacctcctccaacatgtgttcctagaattattgctaagggtggaatggaagttttagacattcaagtaggccctg

SEQ ID NO: 57255 - DNA, 80 bp, synthetic construct
  source 1..80: mol_type = other DNA
atgcagtactaacagtagaagctgttcttcagcctcgaatgggaaataatgatccaaccagtgcctggtatggatttagt

SEQ ID NO: 57256 - DNA, 80 bp, synthetic construct
  source 1..80: mol_type = other DNA
gatccagtcacagtgacagcaactcctgctgctccaactttacccacatatagttttgctaaaataaatcttccaccatt

SEQ ID NO: 57257 - DNA, 80 bp, synthetic construct
  source 1..80: mol_type = other DNA
tcagagtgtggagcagctgctgcgtgacctggaaagctgtcaaaccacggaaaagagcgccaaggcaaccaatagacttt

SEQ ID NO: 57258 - DNA, 80 bp, synthetic construct
  source 1..80: mol_type = other DNA
aaatgaaaatttaacgtgtgacacattaactttatgggaagctgtttctttaaaaacttctattttagggatatcagttt

SEQ ID NO: 57259 - DNA, 80 bp, synthetic construct
  source 1..80: mol_type = other DNA
taatcagtggccatactcctggcacaccaccagctgacagagcaccaggaactttaatagaggggccttcgttccacttt

SEQ ID NO: 57260 - DNA, 80 bp, synthetic construct
  source 1..80: mol_type = other DNA
tatagtgtaagtggtcagcccctggatttacagtactgtgcaccagttataacagtccagtaccctgaaactatgggcag

SEQ ID NO: 57261 - DNA, 80 bp, synthetic construct
  source 1..80: mol_type = other DNA
atttcaaaattttactggagtacagcaaacatatgattccacatataaaggagttttagataaagatggacattacccag

SEQ ID NO: 57262 - DNA, 80 bp, synthetic construct
  source 1..80: mol_type = other DNA
tagaggcctggtttcctgatccttttaaaaatgaaaatggaagatatttttgtactctcacaggaggggcaacaactcca

SEQ ID NO: 57263 - DNA, 80 bp, synthetic construct
  source 1..80: mol_type = other DNA
ccagttttgaatgctactaactctgtctctacagtacttctagatgaaagaggtgttggaatattatgtagaggcgatgg

SEQ ID NO: 57264 - DNA, 80 bp, synthetic construct
  source 1..80: mol_type = other DNA
actttatttgggatctgctgatatttgtggatattttcaaacagatactgtgaatgagaaaaggctcagaggcctagcca

SEQ ID NO: 57265 - DNA, 80 bp, synthetic construct
  source 1..80: mol_type = other DNA
gacatttttctgtaactttaagacagagaaatgtcagaaatccttatcccttaaatacactgctatcatccctattaaca

SEQ ID NO: 57266 - DNA, 80 bp, synthetic construct
  source 1..80: mol_type = other DNA
gcccaaatgcccagagtatcaggacaacctatgcaggggtcttcttctcaaatggaagaagctactattacagatggctc

SEQ ID NO: 57267 - DNA, 80 bp, synthetic construct
  source 1..80: mol_type = other DNA
agaacccttacctggagaccccacattaagaaggactttggatgctagatgttgtcagggttgcccagtagctgttaatc

SEQ ID NO: 57268 - DNA, 80 bp, synthetic construct
  source 1..80: mol_type = other DNA
ggctctgtgcccctaggcacaccttacttccggatattatatagaccataatatttagtcagctgagagtagtaacttcg

SEQ ID NO: 57269 - DNA, 80 bp, synthetic construct
  source 1..80: mol_type = other DNA
ccttaaatcccccaccaaaagacgcagatccaacagatggtgcttaagcctttattcattgtcagaatcttgtgtacaaa

SEQ ID NO: 57270 - DNA, 80 bp, synthetic construct
  source 1..80: mol_type = other DNA
atgctgaatcttgtgtttcattattttctgtatcttcacatattaaaatatttttcaaaggatcttctccattctgaata

SEQ ID NO: 57271 - DNA, 80 bp, synthetic construct
  source 1..80: mol_type = other DNA
tttttttgcatatcatggaacatcccaatagaaacatacttggtaagagtttctttccacagttttacatcctcatgaat

SEQ ID NO: 57272 - DNA, 80 bp, synthetic construct
  source 1..80: mol_type = other DNA
agacgaatgaaacacttttacaggttgccaccacatcaacaacatcagtaaagtttttccactttgtacaattcttctgt

SEQ ID NO: 57273 - DNA, 80 bp, synthetic construct
  source 1..80: mol_type = other DNA
gcaataattcattatttacttctaaagatttttttaaataatgctttggtctaaaatttataactttaaccattcttgcc

SEQ ID NO: 57274 - DNA, 80 bp, synthetic construct
  source 1..80: mol_type = other DNA
aaaattgttaggggaacattatattcattcattgttattattccaggaggaaaaatttggcttcttttatttaaatgttt

SEQ ID NO: 57275 - DNA, 80 bp, synthetic construct
  source 1..80: mol_type = other DNA
ccagattattcatacccataccactggtcaagttagtttttccctcagtttgacctttgacatcttcaaacacaaccatg

SEQ ID NO: 57276 - DNA, 80 bp, synthetic construct
  source 1..80: mol_type = other DNA
aactcatctattgcacagcccaattcaaaattaactttttctggaggacagttgatatttaaggttctaccacctaataa

SEQ ID NO: 57277 - DNA, 80 bp, synthetic construct
  source 1..80: mol_type = other DNA
atctaatatagcagctgctacagttgtttttccactattaataggtcctttaaaaagaaaatatcttctctttggagtat

SEQ ID NO: 57278 - DNA, 80 bp, synthetic construct
  source 1..80: mol_type = other DNA
ttataaccatagttctaataatttctaatactatgtcatcaaaatgattgaaaagtaaagatagccatgcaacaccagcc

SEQ ID NO: 57279 - DNA, 80 bp, synthetic construct
  source 1..80: mol_type = other DNA
gcagcgagccaacaacagcattatgtaagtaaatgggacttttaatatctgtatttctagatttattagatttagtagct

SEQ ID NO: 57280 - DNA, 80 bp, synthetic construct
  source 1..80: mol_type = other DNA
atgtatcttagaatttcaacttctcctgcaatatcctgcatttctttcagtacttgtttgaatcttattacaagtaagtc

SEQ ID NO: 57281 - DNA, 80 bp, synthetic construct
  source 1..80: mol_type = other DNA
ttctctggtactttctaatattaatacccttcttttagcacaaacccagtcacaggcctgctgacacagcgttttttgtg

SEQ ID NO: 57282 - DNA, 80 bp, synthetic construct
  source 1..80: mol_type = other DNA
ttttactatctctaaacagttttgcattattatattctttttcatgaaactgactgtggtgttttagctcagttctacat

SEQ ID NO: 57283 - DNA, 80 bp, synthetic construct
  source 1..80: mol_type = other DNA
ttttcacaattgtctggactctctgaaaaatccaaatatattcccattaaaagcaatggatcctcacagttaaattgcac

SEQ ID NO: 57284 - DNA, 80 bp, synthetic construct
  source 1..80: mol_type = other DNA
tgcaaattcacatatttgttgccagtttactgtgggtttagaattttcttgttccataaattctgcctgactaagtcctt

SEQ ID NO: 57285 - DNA, 80 bp, synthetic construct
  source 1..80: mol_type = other DNA
caggcctggattgttttgttacagcaaagggagatgaacacattctataatagcattcatagggtttcagacaagatttc

SEQ ID NO: 57286 - DNA, 80 bp, synthetic construct
  source 1..80: mol_type = other DNA
actaaaacaaaactaatagaacataaagcagagcaaaaattttttaaagcactcactctatgttttccagccaaaatcat

SEQ ID NO: 57287 - DNA, 80 bp, synthetic construct
  source 1..80: mol_type = other DNA
aaataataaacagcatgtattgtaactatggcaacttataaacatagacttaaatttaggtcctataacagtatacaatt

SEQ ID NO: 57288 - DNA, 80 bp, synthetic construct
  source 1..80: mol_type = other DNA
cattccctttttccatagttgtgtatatacaaaaacagttagaagttttattactaaatacagcatgacttaaaaaagtc

SEQ ID NO: 57289 - DNA, 80 bp, synthetic construct
  source 1..80: mol_type = other DNA
tctaattcagcaggaaaatctgttggatctgctggcttatttttcttaggtggtgttgaattctgagtagaagaatcagg

SEQ ID NO: 57290 - DNA, 80 bp, synthetic construct
  source 1..80: mol_type = other DNA
attacaagttttgatgtagaagctatagtttcaggtgatgctgctgccattgtagctagtcagatagctgctcagacagt

SEQ ID NO: 57291 - DNA, 80 bp, synthetic construct
  source 1..80: mol_type = other DNA
aaattttcttttttgggatgcagaggtcccttcatcatcactgcagttaaaagattcattgcaagttaaatcatcttcaa

SEQ ID NO: 57292 - DNA, 80 bp, synthetic construct
  source 1..80: mol_type = other DNA
aaggttgattaaattcttcccaccattgctcccaagcaggagtaccatattgtccgccctaaaaagaaaaacttaccaga

SEQ ID NO: 57293 - DNA, 80 bp, synthetic construct
  source 1..80: mol_type = other DNA
tttagttgtttgaacatcaataaatccaggtcaagattgtacatcacatgtttccaagcatgaaggctagctttggtaag

SEQ ID NO: 57294 - DNA, 80 bp, synthetic construct
  source 1..80: mol_type = other DNA
atcacatccaaaccaaagtaaaaagcagtcgaagcaatagcattctccccaagtgacacaaggcttgtttctaacttttt

SEQ ID NO: 57295 - DNA, 80 bp, synthetic construct
  source 1..80: mol_type = other DNA
ttatctcatcatgttgtctttttaaaatgcagcaaacacactggcagaaagttctatatctgcattttgcacaggtaggc

SEQ ID NO: 57296 - DNA, 80 bp, synthetic construct
  source 1..80: mol_type = other DNA
caaataaaaattactttgctttcaaattgtggaccaagcaattcacctaaagtaaaagtatcagttaacaacaacattct

SEQ ID NO: 57297 - DNA, 80 bp, synthetic construct
  source 1..80: mol_type = other DNA
taccggcggatacatattttcattttcatttgaacttcgcaaattttgcaaagtattttgcattctggaatataattctg

SEQ ID NO: 57298 - DNA, 80 bp, synthetic construct
  source 1..80: mol_type = other DNA
tcattcttttcatagtttcttcattgcctcctttatctggatgataaattttagatttctgtctaaatctgtatgtaata

SEQ ID NO: 57299 - DNA, 80 bp, synthetic construct
  source 1..80: mol_type = other DNA
aggggtacattaccccaggaatcttctggaagccccagaagacccataagctctttcgcttcttgcctagagagagcttg

SEQ ID NO: 57300 - DNA, 80 bp, synthetic construct
  source 1..80: mol_type = other DNA
tttagaatcagctgaattaacagaagtattatcatcttttggtttaactgaagcttcctatgctgccttaagtgcttttc

SEQ ID NO: 57301 - DNA, 80 bp, synthetic construct
  source 1..80: mol_type = other DNA
caacagcttttcaagaagcagtagataatgtcttattattacagacattgtcaggattgtctagttacattgctgtaggt

SEQ ID NO: 57302 - DNA, 80 bp, synthetic construct
  source 1..80: mol_type = other DNA
atacagttacaaacttatgaaattccagatactaacatggcccttcaaatatggacaccagatattttagatgaaatcat

SEQ ID NO: 57303 - DNA, 80 bp, synthetic construct
  source 1..80: mol_type = other DNA
acctggatacagacaatttcaatattatttggatgttttatcaggttggggccaaagccttgtaagaacagtaggtagag

SEQ ID NO: 57304 - DNA, 80 bp, synthetic construct
  source 1..80: mol_type = other DNA
ctgtgtgactcacattatttattgtctattgcatagtttcatcacctcagtgattcttggcagtttgccacctggctgaa

SEQ ID NO: 57305 - DNA, 80 bp, synthetic construct
  source 1..80: mol_type = other DNA
ccttttgggaagctgttattgatgaaacaacatctagattacaacaaataggttcctcaagcttacaggccgctgaaaat

SEQ ID NO: 57306 - DNA, 80 bp, synthetic construct
  source 1..80: mol_type = other DNA
gcaggactacaaactgtggaaaatgttagacaagctattgttactgttgttgaaaatgctagatgggctattagaactcc

SEQ ID NO: 57307 - DNA, 80 bp, synthetic construct
  source 1..80: mol_type = other DNA
tgttaatatttatgggtctttatcagattattattctagacttccagggttaaatccagctcaactaagagaattaaatt

SEQ ID NO: 57308 - DNA, 80 bp, synthetic construct
  source 1..80: mol_type = other DNA
cccaatgaaggagcgcacaaaatagtgtttgagatggagggcaatggctcccagctgggttcccgccaacatcaagaaag

SEQ ID NO: 57309 - DNA, 80 bp, synthetic construct
  source 1..80: mol_type = other DNA
ccaggcagcggttgatccgcctggtgcgactggcccaaccacatcccatgttgttgtttctaatccagaacaacccaatg

SEQ ID NO: 57310 - DNA, 80 bp, synthetic construct
  source 1..80: mol_type = other DNA
cccagtgaagagaccaccaaattagtgtttgaaatggagggcctaggccaaccacagccacagggtggcgaaaagaccaa

SEQ ID NO: 57311 - DNA, 80 bp, synthetic construct
  source 1..80: mol_type = other DNA
caagtgcacagcgcttggagttggccatggccacaggggcagtcacgagtaatgtaccaaactgtattcgtgagtgtttt

SEQ ID NO: 57312 - DNA, 80 bp, synthetic construct
  source 1..80: mol_type = other DNA
ttctggcctgtttgctggtcgggcggtaactgccatcttgccacccggagtgaaccccgcgagtgtccaaaaccccggtg

SEQ ID NO: 57313 - DNA, 80 bp, synthetic construct
  source 1..80: mol_type = other DNA
cccacagcctgtgacaccacaggacaccattggccctacagcggccctcttactcccaactcagattgaaactccaaacg

SEQ ID NO: 57314 - DNA, 80 bp, synthetic construct
  source 1..80: mol_type = other DNA
catggtaccgagcaagccatgatccagctgagaaactgtgttcctcatccggatgaagatataatccgtgatgacttact

SEQ ID NO: 57315 - DNA, 80 bp, synthetic construct
  source 1..80: mol_type = other DNA
tcggtagtgtgggagcggggaaaggttctggtgtgggtatatccacaggtggctgggtaggaggcagctactttactgac

SEQ ID NO: 57316 - DNA, 80 bp, synthetic construct
  source 1..80: mol_type = other DNA
catactacattcacatgccagaatgctgcaaccgatgatgacttaataatagaatacatttattccgaagcattggactt

SEQ ID NO: 57317 - DNA, 80 bp, synthetic construct
  source 1..80: mol_type = other DNA
gagataaattatttccattactaagtgaaaaacatcagcgtatagtgaacattggaccgagaaatgaatcaatgtttacc

SEQ ID NO: 57318 - DNA, 80 bp, synthetic construct
  source 1..80: mol_type = other DNA
agcaagaaagatggttggggaaaagagtgtctcagttcgacattggacaatacaagaacatgatgaacgtcataacaact

SEQ ID NO: 57319 - DNA, 80 bp, synthetic construct
  source 1..80: mol_type = other DNA
gtatattattattataacttatatcagaaaaaacctattatatatatggttggttcagctccatcttattggatatataa

SEQ ID NO: 57320 - DNA, 80 bp, synthetic construct
  source 1..80: mol_type = other DNA
tcagaatttcatgttaaagaaaattaaagaaagaatgactacttctttaccgatagcacgtttatcaaatagagttttta

SEQ ID NO: 57321 - DNA, 80 bp, synthetic construct
  source 1..80: mol_type = other DNA
ggaagttccgcccaccggaagtgacgtcacaggaaatgacgtcacaggaaatgacgtaattgtccgccatcttgtaccgg

SEQ ID NO: 57322 - DNA, 80 bp, synthetic construct
  source 1..80: mol_type = other DNA
aaacactccccaccgtgccctcagccaggatgcgtaactaaacgcccaccagtaccacccagactgtacctgccccctcc

SEQ ID NO: 57323 - DNA, 80 bp, synthetic construct
  source 1..80: mol_type = other DNA
atgctaagcaaggtgcctggaatcttgagatcagaactgcaagtgttcttattctggcgggttgtgaagtctatgaagag

SEQ ID NO: 57324 - DNA, 80 bp, synthetic construct
  source 1..80: mol_type = other DNA
atgatattagatccctgcaagcggtgataagtgcatgttataatggttattttaagaataaagaggaggaaactgagcca

SEQ ID NO: 57325 - DNA, 80 bp, synthetic construct
  source 1..80: mol_type = other DNA
tcttcgctgtctaagatgtataagaagattatagaattggagcatctctgtctagaagatggtaagcacctaggcatgag

SEQ ID NO: 57326 - DNA, 80 bp, synthetic construct
  source 1..80: mol_type = other DNA
tgacccagaggagcctaaaatgcatgagtttagcagaagctacttaaaacaaagcatactccatggaaaagatctactga

SEQ ID NO: 57327 - DNA, 80 bp, synthetic construct
  source 1..80: mol_type = other DNA
ggagaatgtatggccagaacttcatggagcagattgatagacaaataactcgagaggttgcttcattgagcttagagcgc

SEQ ID NO: 57328 - DNA, 80 bp, synthetic construct
  source 1..80: mol_type = other DNA
gatatctgagtctccctttgttcttgcaaaaagaaatggtcaaataagctggagtggtcttttcaatcctttatctggga

SEQ ID NO: 57329 - DNA, 80 bp, synthetic construct
  source 1..80: mol_type = other DNA
tatacatggggctgaaagagctttggaagcagcccctgacccagtgcaaggcctagtaaatctagtaaactatgctgtaa

SEQ ID NO: 57330 - DNA, 80 bp, synthetic construct
  source 1..80: mol_type = other DNA
aaaagacagaaacacagtggtgctttgcctgaaccaaaagctacataggtaagtaatgtttttttttgtgttttcaggtt

SEQ ID NO: 57331 - DNA, 80 bp, synthetic construct
  source 1..80: mol_type = other DNA
gttgtagtagtcctccggcacggtatggccaaagactgcctacgtgagcaatggatgcgtgaactagaagttgctgtaag

SEQ ID NO: 57332 - DNA, 80 bp, synthetic construct
  source 1..80: mol_type = other DNA
tgagatccaatttgcaatggttaataaccaattcccacagttccagtcgaatccagtgccggacaacggtcttaccctgc

SEQ ID NO: 57333 - DNA, 80 bp, synthetic construct
  source 1..80: mol_type = other DNA
agcgggcttttttcccgccttatgcaaatgggcagccattttaggtgttttactataattttattggtcagttttgtaac

SEQ ID NO: 57334 - DNA, 80 bp, synthetic construct
  source 1..80: mol_type = other DNA
gtaatatgtatacaaatttggaaaaataaataacttaaagaaatagctcatagtgtatgttactttaaaaatttttaaaa

SEQ ID NO: 57335 - DNA, 80 bp, synthetic construct
  source 1..80: mol_type = other DNA
gacgaggagcttgccatgctaaaaaacctcgaattagtacaaacacagacactgtaaataatgaaggaggggaatcaagc

SEQ ID NO: 57336 - DNA, 80 bp, synthetic construct
  source 1..80: mol_type = other DNA
ctaattctgtaacatgcacattctctaggcaatttttaattccatatgatccagagcatcattataaagtgttctcccca

SEQ ID NO: 57337 - DNA, 80 bp, synthetic construct
  source 1..80: mol_type = other DNA
taagaatgctaagattatgtaatatgtacacaaacttggaaaaataaaaaccttaaataaaaaattaatagtgtatggtg

SEQ ID NO: 57338 - DNA, 80 bp, synthetic construct
  source 1..80: mol_type = other DNA
agctagctatttataaggctactaacttagttcctaccagtacatttttaatgcattcagactttgagcaggttacctgc

SEQ ID NO: 57339 - DNA, 80 bp, synthetic construct
  source 1..80: mol_type = other DNA
acccagattatatgtgcccctgccaataccccgtagagaaccgtgtgtaaaagatacagatgctgtagaatacaagttac

SEQ ID NO: 57340 - DNA, 80 bp, synthetic construct
  source 1..80: mol_type = other DNA
ccgtagagaaccgtgtgtaaaagatacagatgctgtagaatacaagttactaacccgttatgaacaacatgtaattagaa

SEQ ID NO: 57341 - DNA, 80 bp, synthetic construct
  source 1..80: mol_type = other DNA
atgtatcaaaatttagaaaaataaacatttgttgtggttaaaaaattatgttgttgcgctttaaaagtttaaaagaagac

SEQ ID NO: 57342 - DNA, 80 bp, synthetic construct
  source 1..80: mol_type = other DNA
cccgtgtgtcttggccaaaattcgcagtccccaacctccaatcactcaccaacctcctgtcctccaatctgtcctggtta

SEQ ID NO: 57343 - DNA, 80 bp, synthetic construct
  source 1..80: mol_type = other DNA
ttatgtaatatgtacacaaatttggaaaaataaaagcctaaaataaataactaatagtgtatgttgctttaaaaatttta

SEQ ID NO: 57344 - DNA, 80 bp, synthetic construct
  source 1..80: mol_type = other DNA
acttgtctggattacaaagctttgtagattatgagtaaaaccactgacaaatggtgggaaagtagtgacaaatttgccca

SEQ ID NO: 57345 - DNA, 80 bp, synthetic construct
  source 1..80: mol_type = other DNA
ggacgtgtataagcagtttgtacaattttatgaaaaagctactggaacagatttagagcttattcaaattttaaaagatc

SEQ ID NO: 57346 - DNA, 80 bp, synthetic construct
  source 1..80: mol_type = other DNA
agttggctatttataaagctactaacttagtacccactagtacattcttgttacatgcagactttgagcaggttacttgc

SEQ ID NO: 57347 - DNA, 80 bp, synthetic construct
  source 1..80: mol_type = other DNA
gcactttcttttctggttgcttttaactggaacccacttgctgttctttgcctgctaactaacaggtatttatactaact

SEQ ID NO: 57348 - DNA, 80 bp, synthetic construct
  source 1..80: mol_type = other DNA
tttaatttactaacatggagctatttcggggtgtcttgcacatttcctctaacattctggactgtgctaatgataactgg

SEQ ID NO: 57349 - DNA, 80 bp, synthetic construct
  source 1..80: mol_type = other DNA
aagacacactagctccagaactgcccatttgggtgtactttcccccccaatatgcttacttaacagtaggtgaagtaaac

SEQ ID NO: 57350 - DNA, 80 bp, synthetic construct
  source 1..80: mol_type = other DNA
cgcccagattatatgtgccccctccagtaccccgtaggcaaccatctataaaagatacagacgctgtagagtataaatta

SEQ ID NO: 57351 - DNA, 80 bp, synthetic construct
  source 1..80: mol_type = other DNA
ttaactagatatgaacaacatgtaattagaatgctaagattatgtaatatgtacacaagcttggaaaaataaaaacctta

SEQ ID NO: 57352 - DNA, 80 bp, synthetic construct
  source 1..80: mol_type = other DNA
ttatgtaatatgtacacaagcttggaaaaataaaaaccttaaataaaaaattaatagtgtatggtgctttaaaaatttaa

SEQ ID NO: 57353 - DNA, 80 bp, synthetic construct
  source 1..80: mol_type = other DNA
tcggagaggagcttgtcaagctaaaagaccccgcattgccgcaaatgcagacagtgttactagtgaaaccggggagtcta

SEQ ID NO: 57354 - DNA, 80 bp, synthetic construct
  source 1..80: mol_type = other DNA
gctgtgcaggtggagatgttgtaccatttgctggaaagggaacaaaagcggggttaaagtttcaaaccatggtaaattgg

SEQ ID NO: 57355 - DNA, 80 bp, synthetic construct
  source 1..80: mol_type = other DNA
tattttaatttaattggacagacgcctaacggttattataggcggagttacgggcggtatataagcagctgtgctctgtg

SEQ ID NO: 57356 - DNA, 80 bp, synthetic construct
  source 1..80: mol_type = other DNA
gtatgtaggctataatggaaagaatacacgaggtctctataatttttcatttatatgtcaaaatgcagctacagatgatg

SEQ ID NO: 57357 - DNA, 80 bp, synthetic construct
  source 1..80: mol_type = other DNA
acatgctaaatgtgatcactactatttactattactataatttatactattcaaaacctataatatacatgcttggttca

SEQ ID NO: 57358 - DNA, 80 bp, synthetic construct
  source 1..80: mol_type = other DNA
ttttcagttgaccgacaactatactgcgattacaatatagttctgatgaaatataattcagcgctagaattggatatgtc

SEQ ID NO: 57359 - DNA, 80 bp, synthetic construct
  source 1..80: mol_type = other DNA
tgtgtaatatgtatcaaaatttagaaaaataaacatttgttgtggttaaaaaattatgttgttgcgctttaaaaatttaa

SEQ ID NO: 57360 - DNA, 80 bp, synthetic construct
  source 1..80: mol_type = other DNA
tatgaccaggctctcgccacctacgaagcatggtttataggtggtacaggcaccggtcaagatagccccagtgaagagac

SEQ ID NO: 57361 - DNA, 80 bp, synthetic construct
  source 1..80: mol_type = other DNA
gcatataaggtaatctctttaaagtatacaaggaaagtctgcatccaattaggaactgagcaggtatgcaaacatattga

SEQ ID NO: 57362 - DNA, 80 bp, synthetic construct
  source 1..80: mol_type = other DNA
atacatactacacaatcttaacattctaataacatgttgttcatatctagttaagtacttaaattctacattgtttatat

SEQ ID NO: 57363 - DNA, 80 bp, synthetic construct
  source 1..80: mol_type = other DNA
cggcggcgaccggcggcatctgatttggtgtcttcttttaaattttagcgggcttttttcccgccttatgcaaatgggca

SEQ ID NO: 57364 - DNA, 80 bp, synthetic construct
  source 1..80: mol_type = other DNA
ccccaagattgggggacatggtagtaagaagtgcactggagacgcagcattttgctctgcttatgagtgcactgcccagt

SEQ ID NO: 57365 - DNA, 80 bp, synthetic construct
  source 1..80: mol_type = other DNA
ggcagtgtcaacattggaggataaacttgccgactttaagagacaactggcagatgctatatcgcgccagaagatggatg

SEQ ID NO: 57366 - DNA, 80 bp, synthetic construct
  source 1..80: mol_type = other DNA
ccacaatgaaggcagatgaactcactcctggtaggttccggaccattgtctgcggtctatttccggcacagataatgaat

SEQ ID NO: 57367 - DNA, 80 bp, synthetic construct
  source 1..80: mol_type = other DNA
tatggtgatgactgtatttatagtgtttgtcctgccaccgcttctatctttggttctgttctcgccaacctgtcctcctt

SEQ ID NO: 57368 - DNA, 80 bp, synthetic construct
  source 1..80: mol_type = other DNA
cacagacgccctatggggtgagggcactattggacatcaattccatcattcggcagttctactgggttaaggcgaaccgc

SEQ ID NO: 57369 - DNA, 80 bp, synthetic construct
  source 1..80: mol_type = other DNA
actagtgacccatctagcccccctgcttttgatcgcactgcccgcagtgcccagttggaagcagctctagcctatgcatc

SEQ ID NO: 57370 - DNA, 80 bp, synthetic construct
  source 1..80: mol_type = other DNA
acaacatggacctttagtgtttgacaaggtgcgtgatattgccatcaaaacggccgaaggagagggtgtggtgcttgtga

SEQ ID NO: 57371 - DNA, 80 bp, synthetic construct
  source 1..80: mol_type = other DNA
gatttggccctcgccacctacaatgcctggttcataggtggtacagctccagatccagagcgccccactgaaggtgcacc

SEQ ID NO: 57372 - DNA, 80 bp, synthetic construct
  source 1..80: mol_type = other DNA
cggtctcaagcccactgccgctgacaaaactgcagaaatcaagcccacccaaacaccagttttcctgaaaagaacattca

SEQ ID NO: 57373 - DNA, 80 bp, synthetic construct
  source 1..80: mol_type = other DNA
ccaagctcggagaacttaaacggcaactggctgatcttattgcagctcagaaactggcttcaaaacctgttgatccaaca

SEQ ID NO: 57374 - DNA, 80 bp, synthetic construct
  source 1..80: mol_type = other DNA
tcccaatcatccttaaggcattgtacatgttatcaactagaggtcgtcaaacagtcaaagagaacaaagggacgcggatc

SEQ ID NO: 57375 - DNA, 80 bp, synthetic construct
  source 1..80: mol_type = other DNA
tccgtaaacctcgacacttatatgtctcaatgccaacagctcaatcaacaatgaaagcagatgagataacacccgggaga

SEQ ID NO: 57376 - DNA, 80 bp, synthetic construct
  source 1..80: mol_type = other DNA
taacacccgggagatttcgtacaattgcatgtggtctgttccctgcacaggtcaaggcaaggaatatcattagtcctgtt

SEQ ID NO: 57377 - DNA, 80 bp, synthetic construct
  source 1..80: mol_type = other DNA
cggacaactacgtcatttcctgtgacgtcatttcctgtgacgtcacttccggtgtgcgggacttccggaattagggttgg

SEQ ID NO: 57378 - DNA, 80 bp, synthetic construct
  source 1..80: mol_type = other DNA
tattttaatttgattggacaaaaagttaacggtttttatgggcggagttacgcatggtatataagcagatggattttgta

SEQ ID NO: 57379 - DNA, 80 bp, synthetic construct
  source 1..80: mol_type = other DNA
aaactttctttcctggctgctttttactggggataacttgctgttatttgcctgctaattaacaggtatttatactaact

SEQ ID NO: 57380 - DNA, 80 bp, synthetic construct
  source 1..80: mol_type = other DNA
tttaatttactaacatggagctatttaggggtgtgttacatatttcctctaacattttagactgcgctaatgacaactgg

SEQ ID NO: 57381 - DNA, 80 bp, synthetic construct
  source 1..80: mol_type = other DNA
gatgctgtagaatataagttactaacccgttatgaacagcatataataagaatgcttagattgtgtaatatgtatcaaaa

SEQ ID NO: 57382 - DNA, 80 bp, synthetic construct
  source 1..80: mol_type = other DNA
agtcccgcctaccggcggcgaccggcggcatctgatttggtgtcttcttttaaattttcgcgggcttttttcccgcctta

SEQ ID NO: 57383 - DNA, 80 bp, synthetic construct
  source 1..80: mol_type = other DNA
aattctgtacaactttctttcctggctgctttttactgggaataacttgctgttatttgcctgctaattaacaggtattt

SEQ ID NO: 57384 - DNA, 80 bp, synthetic construct
  source 1..80: mol_type = other DNA
atactaacttctaatttactaacatggagctatttaggggtgtgttgcatatttcctctaacattttagactgcgctaat

SEQ ID NO: 57385 - DNA, 80 bp, synthetic construct
  source 1..80: mol_type = other DNA
gataactggtggtgctctatgctggatttagatacttctgactgggaacccctaactcactctaacagactaatggcaat

SEQ ID NO: 57386 - DNA, 80 bp, synthetic construct
  source 1..80: mol_type = other DNA
ttgatgctttcttttaatttgattggacaaaaacttaacggtttttatgggcggagttacgcatggtatataagcagatg

SEQ ID NO: 57387 - DNA, 80 bp, synthetic construct
  source 1..80: mol_type = other DNA
cttacaagttcctcctcaatggacaagcggaaagtgaagggtgactgtagtcctgagctcatgggttcaagaccacagcc

SEQ ID NO: 57388 - DNA, 80 bp, synthetic construct
  source 1..80: mol_type = other DNA
gatcaaaggggggggtttcatgatgaaggtctttgggtaagtttttcagcagagcagggaaatactggccaatactgtat

SEQ ID NO: 57389 - DNA, 80 bp, synthetic construct
  source 1..80: mol_type = other DNA
tttcagcagagcagggaaatactggccaatactgtatacctcaatggctgctttttgttcttgaggagctggacaaagag

SEQ ID NO: 57390 - DNA, 80 bp, synthetic construct
  source 1..80: mol_type = other DNA
ctgcagtataccagtctcggggagccccctacacctttaccgacactttggatgctggttcatctctgtgttataccctg

SEQ ID NO: 57391 - DNA, 80 bp, synthetic construct
  source 1..80: mol_type = other DNA
ggatggtagggtatgctggtaaccccactctcagtgatgcctatagccagcaaagaagtgtgcaggctgcctttggaaga

SEQ ID NO: 57392 - DNA, 80 bp, synthetic construct
  source 1..80: mol_type = other DNA
cacccagtacaaagtttattctccaaaatggggaacttatatacccttctagtacagtagcagcaggtgctgcaaatttg

SEQ ID NO: 57393 - DNA, 80 bp, synthetic construct
  source 1..80: mol_type = other DNA
cttatgcagaaaataatatcctctggcaattctggcctttacagtgcatggaattacatactcattacaggtgatcacag

SEQ ID NO: 57394 - DNA, 80 bp, synthetic construct
  source 1..80: mol_type = other DNA
gggcctttgaacaacacatttctttttttaggtatgttttcagttaaaatgcttagtatttcctttagtttagtagtaaa

SEQ ID NO: 57395 - DNA, 80 bp, synthetic construct
  source 1..80: mol_type = other DNA
tttccacacctcctgcatattgctcagctaggattttaaattgcttcttaaaggcctgtaataccagatcctgtctagtt

SEQ ID NO: 57396 - DNA, 80 bp, synthetic construct
  source 1..80: mol_type = other DNA
gtatagctaacaaagcaggtatagcatttattaccaagagttgcatggcttagataatcatgcaggcaagatggaaagtc

SEQ ID NO: 57397 - DNA, 80 bp, synthetic construct
  source 1..80: mol_type = other DNA
aggtggagaggccctggaaattgctggtggtctaggagcccttgtatcaggggaaggactggctacattagaggctctac

SEQ ID NO: 57398 - DNA, 80 bp, synthetic construct
  source 1..80: mol_type = other DNA
agggggctttggtagataatgtgggtccaccacataaaagaatcagcttccacaggtaggccaaaccagagacagtagca

SEQ ID NO: 57399 - DNA, 80 bp, synthetic construct
  source 1..80: mol_type = other DNA
ggtaaattaccccaacaggccatgctgaggcctataagatccattagctccttaacttcttctctggctaaaaggcgatc

SEQ ID NO: 57400 - DNA, 80 bp, synthetic construct
  source 1..80: mol_type = other DNA
ggaggtgttatatacagcaactataaccctggggaactgtacaaggcgccagaaggaccaggtggactcggcccaagagt

SEQ ID NO: 57401 - DNA, 80 bp, synthetic construct
  source 1..80: mol_type = other DNA
ggggaggcgcgggtagaggtctccccgactggcttatcaacatgcttcgtgaagtgccgtctcccacagagatcctcagt

SEQ ID NO: 57402 - DNA, 80 bp, synthetic construct
  source 1..80: mol_type = other DNA
ggaattgggggccttgctgagtagggtaagagaaactgttatacatggggctgaaagagctttggaagcagcccctgacc

SEQ ID NO: 57403 - DNA, 80 bp, synthetic construct
  source 1..80: mol_type = other DNA
aagtcaatagctgctattgttggcaactgttagtattaatcacccagacaactcagaagtttccacctcttggaggcggt

SEQ ID NO: 57404 - DNA, 80 bp, synthetic construct
  source 1..80: mol_type = other DNA
caaacagttttagccaatttgacctctttgggcctcaagccaactgctgcagacaagagtgaaacaatagccccaaccca

SEQ ID NO: 57405 - DNA, 80 bp, synthetic construct
  source 1..80: mol_type = other DNA
cgaccgcgacgcgcgtggcatccagttggaaaatgcccttgcatatgcatcacagcatggtcacacagtctttgaggaag

SEQ ID NO: 57406 - DNA, 80 bp, synthetic construct
  source 1..80: mol_type = other DNA
ctaaccagatatgaacagcatgtaattagaatgctcagattatgtaatatgtacacaaatttggaaaaataaaagcctaa

SEQ ID NO: 57407 - DNA, 80 bp, synthetic construct
  source 1..80: mol_type = other DNA
agttagctatttataaagccaccaacttggtacccactagtacttttttgttacattcagactttgagcaggttacttgt

SEQ ID NO: 57408 - DNA, 80 bp, synthetic construct
  source 1..80: mol_type = other DNA
cctcttatcggcgaggagcctgtcatgctaaaagaccccgcattaccgcaaatacagacaatgttacttgtgaaaccggg

SEQ ID NO: 57409 - DNA, 80 bp, synthetic construct
  source 1..80: mol_type = other DNA
gagtctagctgtggagcgggagatgttgtgccatttgctgggaagggaacaaaggcagggttaaagtttcaaaccatggt

SEQ ID NO: 57410 - DNA, 80 bp, synthetic construct
  source 1..80: mol_type = other DNA
tcggcgaggagcctgtcatgctaaaagaccccgcattaccgcaaatacagacaatattgctggtgaaactggggagtcta

SEQ ID NO: 57411 - DNA, 80 bp, synthetic construct
  source 1..80: mol_type = other DNA
tattttaattttattggacaaaggcctaacggttattatgggcggagttacggacagtatataagcagctgagttctgtg

SEQ ID NO: 57412 - DNA, 80 bp, synthetic construct
  source 1..80: mol_type = other DNA
attaaagacaataaaatagttaaattattactgtgccagaactatgatcctcttctagtaggtcaacatgtgttaaagtg

SEQ ID NO: 57413 - DNA, 80 bp, synthetic construct
  source 1..80: mol_type = other DNA
tttaacttactaacatggaactatttaggggtgtgctgcaaatttcctctaacattctggagtgcgctaatgataactgg

SEQ ID NO: 57414 - DNA, 80 bp, synthetic construct
  source 1..80: mol_type = other DNA
ttttagcgggcttttcgcccgcggtatgcaaatgggcagccattttaagtgtttaactataattttattggttagttttg

SEQ ID NO: 57415 - DNA, 80 bp, synthetic construct
  source 1..80: mol_type = other DNA
ccgtgtgtaaaagatacagatgctgtagaatataagttactaacccgttatgagcaacatgtaattagaatgttaagctt

SEQ ID NO: 57416 - DNA, 80 bp, synthetic construct
  source 1..80: mol_type = other DNA
ccttgctgaatttgcaagtagtaaaaagtttgcagacgcggtaaagatggctcccagagtccttcctcttttcaccggaa

SEQ ID NO: 57417 - DNA, 80 bp, synthetic construct
  source 1..80: mol_type = other DNA
gggctttaagatttccggggaatgtatatcataatttagaaatgtattatacacaattaccaggccttactcctccacaa

SEQ ID NO: 57418 - DNA, 80 bp, synthetic construct
  source 1..80: mol_type = other DNA
gtaaggtcaattcaaaggcgcttagaagaagcgagaaattatggaccttctgttcaagtggataattctgaaaactcagt

SEQ ID NO: 57419 - DNA, 80 bp, synthetic construct
  source 1..80: mol_type = other DNA
tttttcagaacatttaagtggagactatatatttagaggagaagctccaggaggagcaagacaaagacagactcctgatt

SEQ ID NO: 57420 - DNA, 80 bp, synthetic construct
  source 1..80: mol_type = other DNA
ggatgctacaattaattttaggaattcttggagatataactcctttttttaaagaagttattgaagaagtagaaggagag

SEQ ID NO: 57421 - DNA, 80 bp, synthetic construct
  source 1..80: mol_type = other DNA
gaaaatgccgcctaaaagaaagactgtttgtactaaaactgtttgtaccagagcagaagcccccaacaaaaaagtctgtg

SEQ ID NO: 57422 - DNA, 80 bp, synthetic construct
  source 1..80: mol_type = other DNA
aaaaacccacgtgttccagatcttgcagaatgtcatgtaacaaatgtccttgtataccgtgtccagttcctactaaagtt

SEQ ID NO: 57423 - DNA, 80 bp, synthetic construct
  source 1..80: mol_type = other DNA
cctagaattgtttctaagggtgggatagaagttttaaatataattccagggccggacaccacaatgacagttgaggtcat

SEQ ID NO: 57424 - DNA, 80 bp, synthetic construct
  source 1..80: mol_type = other DNA
gtcaacagctattgttggcaagctattgttggcaagtattggtattaatcacccagacaactcagaagtttccacctctt

SEQ ID NO: 57425 - DNA, 80 bp, synthetic construct
  source 1..80: mol_type = other DNA
tcttcaaccaaggatgggcaatgatgtaaaaacaaacaaatggtatggctacagtgatccaataacagtaacaaatactc

SEQ ID NO: 57426 - DNA, 80 bp, synthetic construct
  source 1..80: mol_type = other DNA
ctggtattaatcagctgcccacttatagtacagctaaaattaaactgccacccttaaatgaagatatgacctgtgaaaat

SEQ ID NO: 57427 - DNA, 80 bp, synthetic construct
  source 1..80: mol_type = other DNA
ttgtatatgtgggaggcagttgttcttaaaactgaattaataggagttactagcttaataactttgcatactccaggtgt

SEQ ID NO: 57428 - DNA, 80 bp, synthetic construct
  source 1..80: mol_type = other DNA
tgcagatcctgctactgcgccagctttaccagtggaaggggtttcatttcatttttttgcagtgggaggacagcctttag

SEQ ID NO: 57429 - DNA, 80 bp, synthetic construct
  source 1..80: mol_type = other DNA
atttacaatattgtgttcctgcagctgatattgtttacccagatggaacaggcagttttgcaagttcagggggaactcag

SEQ ID NO: 57430 - DNA, 80 bp, synthetic construct
  source 1..80: mol_type = other DNA
caaacctatgatgcctcatttaaagccattttagatagagatggatactatcctgtagaggcctgggctccagatccagt

SEQ ID NO: 57431 - DNA, 80 bp, synthetic construct
  source 1..80: mol_type = other DNA
aaaaaatgataattctagatactatggaactgttactggaggtactacaacacctcctgtgcttagtacaacaaatgctg

SEQ ID NO: 57432 - DNA, 80 bp, synthetic construct
  source 1..80: mol_type = other DNA
tttctacagtattactggatgatagaggtgtgggacccctgtgtaagggagatgggctatatgtaacagcagtagatatt

SEQ ID NO: 57433 - DNA, 80 bp, synthetic construct
  source 1..80: mol_type = other DNA
tgtggagtgtttcaaatgcctgataataccaggagacacaggggcctagcaagatactttcaggtacagcttagacaaag

SEQ ID NO: 57434 - DNA, 80 bp, synthetic construct
  source 1..80: mol_type = other DNA
agctgttagaaatccttatcctgtaaatagtttgttaaacagtttactgacgaaacaaatacctagcattgatggacagc

SEQ ID NO: 57435 - DNA, 80 bp, synthetic construct
  source 1..80: mol_type = other DNA
ggaggcggtccagagttaacctgtgactgttggcgggaagccaataacagcaactttgacatttcatcacaagcccttta

SEQ ID NO: 57436 - DNA, 80 bp, synthetic construct
  source 1..80: mol_type = other DNA
caatggatgggactgataatcaagtacaggatgtaactgtgttccaaggaacagaacctcttccaggagaccccacttta

SEQ ID NO: 57437 - DNA, 80 bp, synthetic construct
  source 1..80: mol_type = other DNA
actagacatatggatttgcgttgctgcccgggaaccccagtaacagatatgccaagtgacgacactccaacaccagttgc

SEQ ID NO: 57438 - DNA, 80 bp, synthetic construct
  source 1..80: mol_type = other DNA
tccagcagcaagataatttattgtgaattaattccagagtcttgttgtgtatcctcgtcagcatctacacatattaaaat

SEQ ID NO: 57439 - DNA, 80 bp, synthetic construct
  source 1..80: mol_type = other DNA
atctttcaatggatcttctccagattctatgtttcttcttatatcatgatacattccaaagggtacatatttttcaattg

SEQ ID NO: 57440 - DNA, 80 bp, synthetic construct
  source 1..80: mol_type = other DNA
tttctttccaatatcttacattatcatgaatttcaggatgaaatgcaattacaggttgccaccaacaaagaagcaataat

SEQ ID NO: 57441 - DNA, 80 bp, synthetic construct
  source 1..80: mol_type = other DNA
aatgtaacaccactttgaacaattctttttctgagcaactcagaatttttttccaaagaatttcttaagaacaacttagg

SEQ ID NO: 57442 - DNA, 80 bp, synthetic construct
  source 1..80: mol_type = other DNA
cctgaaatttatagtttttatcatcctagcttgcaaagttggaggaataaaatagtcattcatagtaataatacctgggg

SEQ ID NO: 57443 - DNA, 80 bp, synthetic construct
  source 1..80: mol_type = other DNA
gaaatatttggctctttttattcacatgttttttttcaagatttacttttacacaaccatccaaatgatcccttaaatta

SEQ ID NO: 57444 - DNA, 80 bp, synthetic construct
  source 1..80: mol_type = other DNA
tctaagttggacatacccattcctggagttaaagatgagttagagccctcgttttgaccttttacatcttcaaaaacaac

SEQ ID NO: 57445 - DNA, 80 bp, synthetic construct
  source 1..80: mol_type = other DNA
catatattcatcaattgcacaaccaatttcaaaagctaacttatctggaggacagttaacatttagagtttttcccccaa

SEQ ID NO: 57446 - DNA, 80 bp, synthetic construct
  source 1..80: mol_type = other DNA
aacgccctctaggcggaaacggaaaacaattgactcttgtcagggacggaaaaggaatgccgtctgctcaccttagttaa

SEQ ID NO: 57447 - DNA, 80 bp, synthetic construct
  source 1..80: mol_type = other DNA
gcaaatcaagtatagcagcagctacagttgttttaccactattaattgggcctttaaataaaacatatctcctcttaggt

SEQ ID NO: 57448 - DNA, 80 bp, synthetic construct
  source 1..80: mol_type = other DNA
acattttcagtcatggcctttattataaataaaataatttcatcaaaatgaggcatcaataatgataaccaagctactcc

SEQ ID NO: 57449 - DNA, 80 bp, synthetic construct
  source 1..80: mol_type = other DNA
agccatgtattgacaaatttcaacctcaccacaaatatcttccattttttcaaacatatgtttaaaccttaataccaaca

SEQ ID NO: 57450 - DNA, 80 bp, synthetic construct
  source 1..80: mol_type = other DNA
gatgttctctggtactttctagtattaataatcttctctgagcagtgacccagtctgtagcttgctgacaaattgttttt

SEQ ID NO: 57451 - DNA, 80 bp, synthetic construct
  source 1..80: mol_type = other DNA
tgatttttacaatccttaaaaagttttgaattaatattttgagcttcatggaatttataatggtgttttaattttttttg

SEQ ID NO: 57452 - DNA, 80 bp, synthetic construct
  source 1..80: mol_type = other DNA
ttcacattttgagcacccctctacatcttttgcaaagtctaataacattcccataagtagcaagggatcctcacattgaa

SEQ ID NO: 57453 - DNA, 80 bp, synthetic construct
  source 1..80: mol_type = other DNA
cttctactgcaaattcacaaatttgctgccaattcacaactttatctttttcttcttcacagaaatctgttttacttaaa

SEQ ID NO: 57454 - DNA, 80 bp, synthetic construct
  source 1..80: mol_type = other DNA
ccatgttcctgactctgtttaattaatttaaaaggagttttacaaagagcatagtaacattcataggcctttaagcaacc

SEQ ID NO: 57455 - DNA, 80 bp, synthetic construct
  source 1..80: mol_type = other DNA
ttttactaatagaaagctcactgtacacagatttgaacaataattttttatagcacttactctatgttttccacttaata

SEQ ID NO: 57456 - DNA, 80 bp, synthetic construct
  source 1..80: mol_type = other DNA
ataaaaataataaactgtcaccatcaaattcatgcaaactataaaacatagctttaaattttaaaggcactttttcatac

SEQ ID NO: 57457 - DNA, 80 bp, synthetic construct
  source 1..80: mol_type = other DNA
cacgagattttctttggaaatactccaaagtacagtaagtatatgggtgctgtaatctctgttattcttgatttaataga

SEQ ID NO: 57458 - DNA, 80 bp, synthetic construct
  source 1..80: mol_type = other DNA
aagaattgccccttttcccttgtagtatataaaacaaaagaattcagagttttattactaaaaatagcattactaagaaa

SEQ ID NO: 57459 - DNA, 80 bp, synthetic construct
  source 1..80: mol_type = other DNA
ttcaaggagtacttcaggaaaatctacaggattaaagtttcttggcctttttggaggagtacaggtagaattgctgctgg

SEQ ID NO: 57460 - DNA, 80 bp, synthetic construct
  source 1..80: mol_type = other DNA
attctctgggtctcttcttaggagtgttggtatcatttgcagtctgagaagcactttgagaaggccccggttcttcctca

SEQ ID NO: 57461 - DNA, 80 bp, synthetic construct
  source 1..80: mol_type = other DNA
tcactgggagcaaaagattcattacaacttaaatcttcatcccatcctctattaaattcttcccaccattgatcccattc

SEQ ID NO: 57462 - DNA, 80 bp, synthetic construct
  source 1..80: mol_type = other DNA
aggagtcccataagtgggatttccctaaaataaaagagaaagaacttacccacaaaattaattctcccagcaagcgaagc

SEQ ID NO: 57463 - DNA, 80 bp, synthetic construct
  source 1..80: mol_type = other DNA
agatcaaattcagtattgtgcattatatgcttccaccaaaagaatgaagtatagccaaattcttgtccaaaccaaagcaa

SEQ ID NO: 57464 - DNA, 80 bp, synthetic construct
  source 1..80: mol_type = other DNA
aaagcatttgtagcaaaaacattcaccccaaacaagacattgcttttgtttcgctagtttatcatttctgtgctgctttt

SEQ ID NO: 57465 - DNA, 80 bp, synthetic construct
  source 1..80: mol_type = other DNA
taagcaagcagcaaacacagccacatttgtgtcttaataaatcacttgcacacaaaggccaaatgtatataattttttcc

SEQ ID NO: 57466 - DNA, 80 bp, synthetic construct
  source 1..80: mol_type = other DNA
tcaaagctaggtcctagcacatctcctaaggttactacatcgtctataaagtaaccaacctttgcaggaaaataaacttc

SEQ ID NO: 57467 - DNA, 80 bp, synthetic construct
  source 1..80: mol_type = other DNA
tccttctcttctaagcttttcaatggtagtatacattttagaaaacagctcattcaagcgtttcattttttctccatctc

SEQ ID NO: 57468 - DNA, 80 bp, synthetic construct
  source 1..80: mol_type = other DNA
attaatatcagttacaggctttgaagcagaaactataatttcaggggaggcagctgctatagtagaatcacagctttcat

SEQ ID NO: 57469 - DNA, 80 bp, synthetic construct
  source 1..80: mol_type = other DNA
cccctttgtcagggtgcagttttaaacaagtctgcctgtatttatattgcattaagggaatatttccccaagcagcagta

SEQ ID NO: 57470 - DNA, 80 bp, synthetic construct
  source 1..80: mol_type = other DNA
atatttccccaagcagcagtatttaagcttaaaagagccataagctcttttacttcatctctagaaagaactctatccat

SEQ ID NO: 57471 - DNA, 80 bp, synthetic construct
  source 1..80: mol_type = other DNA
ctttggcagttatagaaaatgcttcggcagccgaagttttatctacttttggattaaatgaaacctcttattctttatta

SEQ ID NO: 57472 - DNA, 80 bp, synthetic construct
  source 1..80: mol_type = other DNA
gtaaattttcctcaggcctttgaaaatgctgtatatactgctcaattaattcaaactatttctggggctagttctctgat

SEQ ID NO: 57473 - DNA, 80 bp, synthetic construct
  source 1..80: mol_type = other DNA
tgctgctggtatacaaacgcaaccttttcaagtatttgatgctggtagtaatatggctttacagcaatggagaccagact

SEQ ID NO: 57474 - DNA, 80 bp, synthetic construct
  source 1..80: mol_type = other DNA
agacagaggcttaggcctccggcccccggcttatatagaaaaaattttagcttattgttttgctacttaacctcaggtag

SEQ ID NO: 57475 - DNA, 80 bp, synthetic construct
  source 1..80: mol_type = other DNA
attttgatttatttattcctggatatagacactttgaatattattttaatgttctttctggttggggagaaagtttagta

SEQ ID NO: 57476 - DNA, 80 bp, synthetic construct
  source 1..80: mol_type = other DNA
aatacagtttctagagctttttgggaggctttattatcagaaactagaaacactgcaagacttttagcaagcagtgctgt

SEQ ID NO: 57477 - DNA, 80 bp, synthetic construct
  source 1..80: mol_type = other DNA
agacaatgtttataatgttggtgaacagggactccagaatattcaaaatgctctggtgggattaatagagagtgcaagat

SEQ ID NO: 57478 - DNA, 80 bp, synthetic construct
  source 1..80: mol_type = other DNA
ggagaggaaatagggcaacaggaagttattaggcgagaaaagcccgccctgtgcaggcttacgcaactgggcagggccat

SEQ ID NO: 57479 - DNA, 80 bp, synthetic construct
  source 1..80: mol_type = other DNA
tagtcataactgaggttgaccaccgttgacacaacaccctaattagtaagttcttcaatttctgttttattttgttttaa

SEQ ID NO: 57480 - DNA, 80 bp, synthetic construct
  source 1..80: mol_type = other DNA
catgccaaaccatgacctcaggaaggaaagtgcatgactgggcagccagccagtggcagttaatagtgaaaccggaaagc

SEQ ID NO: 57481 - DNA, 80 bp, synthetic construct
  source 1..80: mol_type = other DNA
aaaccggaaagcagccagacagacatgttttgcgagcctaggaatcttggccttgtccccagttaaactggacaaaggcc

SEQ ID NO: 57482 - DNA, 80 bp, synthetic construct
  source 1..80: mol_type = other DNA
ccttgaggggaggccattgtttgaaccagggggtgttgtcatgtatgacacacaaaatctgccactcagtggaaataatg

SEQ ID NO: 57483 - DNA, 80 bp, synthetic construct
  source 1..80: mol_type = other DNA
agggtttcatgatgaaggaacatgggttagtttccaaggggaggaaggaaacactccccagtatactatacctcaatgga

SEQ ID NO: 57484 - DNA, 80 bp, synthetic construct
  source 1..80: mol_type = other DNA
cctatgagtgacactctggggccgggggctgctttgtgttactctgttgctgttattaatttgcctgaaattcctgatgc

SEQ ID NO: 57485 - DNA, 80 bp, synthetic construct
  source 1..80: mol_type = other DNA
atgataataccagatactttggcagagtggttggagggggagtaacccctccagttgtgtcctatgggaatcagagtacc

SEQ ID NO: 57486 - DNA, 80 bp, synthetic construct
  source 1..80: mol_type = other DNA
tttcactttttaacaaattttaacctcttagtaactgtagtgttctctctcctcagaaagtccttgatattgttggccat

SEQ ID NO: 57487 - DNA, 80 bp, synthetic construct
  source 1..80: mol_type = other DNA
ggtgttccctttacatcctcaattaccaccatgtacttatcaatagcacatcccagttcaaagtttatcttgtcactgct

SEQ ID NO: 57488 - DNA, 80 bp, synthetic construct
  source 1..80: mol_type = other DNA
cttttgggggtgttttctactaagtaggacagcatctctttaattttaatagtgaactgtggcaataggcagtctaacca

SEQ ID NO: 57489 - DNA, 80 bp, synthetic construct
  source 1..80: mol_type = other DNA
ggagctggattaggctttttttgcttaggaggggtggcagaatatttactatcttggctgcatccctcctcaggattcac

SEQ ID NO: 57490 - DNA, 80 bp, synthetic construct
  source 1..80: mol_type = other DNA
tgggggcggaggtctcacctacaaaaagataattagtaaggttgctttgtttactccccttagtcaggcttttaggcctt

SEQ ID NO: 57491 - DNA, 80 bp, synthetic construct
  source 1..80: mol_type = other DNA
ggtggaggggaggccttggaaattgctggaagtgtaggagctttggtgtctggagagggattggccaccttggaagccct

SEQ ID NO: 57492 - DNA, 80 bp, synthetic construct
  source 1..80: mol_type = other DNA
gccacatggggcttccagacctttgatctctcaaagtagcttgcagcttgtcttttaagacattcagtctttgcattttc

SEQ ID NO: 57493 - DNA, 80 bp, synthetic construct
  source 1..80: mol_type = other DNA
aaattcccccaacaggccatgttcaggcctattaattccataagctccttgacttcatctctacctaaaagcttgtccat

SEQ ID NO: 57494 - DNA, 80 bp, synthetic construct
  source 1..80: mol_type = other DNA
gaagtgtggaggcaagaggccaccaagccacctacattaggaaaaaaaaggtggaggaggaaatgtctgggttactgggt

SEQ ID NO: 57495 - DNA, 80 bp, synthetic construct
  source 1..80: mol_type = other DNA
ataaatggggctaatagagctatagaaatggctccagaccctgtacaaggccttctaaatctaataaatcaggccattgc

SEQ ID NO: 57496 - DNA, 80 bp, synthetic construct
  source 1..80: mol_type = other DNA
ttttaaattttcgcgggcttttttcccgccttatgcaaataacctgccatgtttgatgctttattttaatttgattggac

SEQ ID NO: 57497 - DNA, 80 bp, synthetic construct
  source 1..80: mol_type = other DNA
ctttttactgggaataacttgctgttatttgcctgctaattaacaggtatttatactaacttttaatttactaacatgga

SEQ ID NO: 57498 - DNA, 80 bp, synthetic construct
  source 1..80: mol_type = other DNA
gctatttaggggtgtgttgcatatttcctctaacattttagactgcgctaatgataactggtggtgctctatgctggatt

SEQ ID NO: 57499 - DNA, 80 bp, synthetic construct
  source 1..80: mol_type = other DNA
aaaaacttaacggtttttatgggcggagttacgcatggtatataagcatattaattctgtaaaactttctttcctggctg

SEQ ID NO: 57500 - DNA, 80 bp, synthetic construct
  source 1..80: mol_type = other DNA
tgcagaagagaagctgaagaagaaatctgccttctatcaatcttacctaagaaggacacaatctatggggattcaactgg

SEQ ID NO: 57501 - DNA, 80 bp, synthetic construct
  source 1..80: mol_type = other DNA
catgccaaaccatgacctcaggaaggaaagtgcatgactgggcagccagccagtggcagttaatttgcgagcctaggaat

SEQ ID NO: 57502 - DNA, 80 bp, synthetic construct
  source 1..80: mol_type = other DNA
cttggccttgtccccagttaaactggacaaaggccatggttctgcgccagctgtcacgacaagcttcagtgaaagttggt

SEQ ID NO: 57503 - DNA, 80 bp, synthetic construct
  source 1..80: mol_type = other DNA
aagtgctgaagacaaagagtatcagcaaggggtaggaaggtttccaaatgaaaaagaacaacttaagcagttacaagggc

SEQ ID NO: 57504 - DNA, 80 bp, synthetic construct
  source 1..80: mol_type = other DNA
ggctctgcaaaaagtaaaataagtcttactacctgagaattaagttaattaagtttcaaataggtggagaacttcttacc

SEQ ID NO: 57505 - DNA, 80 bp, synthetic construct
  source 1..80: mol_type = other DNA
atagggggttcagagcctagatctggacactatgtacaacattatgctgctccaggagtggcaaatcaaagagtatctca

SEQ ID NO: 57506 - DNA, 80 bp, synthetic construct
  source 1..80: mol_type = other DNA
gggcccctggcctcttatactatcaaaaaaaaacctgtgttgccatagtgattttgcaaattgaggaactaaatgactgg

SEQ ID NO: 57507 - DNA, 80 bp, synthetic construct
  source 1..80: mol_type = other DNA
aaggaggggtagaagttctagaagttagaacaggcccagatgctataactcaaattgaggcctacctaaatccaagaatg

SEQ ID NO: 57508 - DNA, 80 bp, synthetic construct
  source 1..80: mol_type = other DNA
ctgaagtcatggggattagttctctagtaaatctgcatcaggggggtaaatatatctatggctcatcctcaggaactatc

SEQ ID NO: 57509 - DNA, 80 bp, synthetic construct
  source 1..80: mol_type = other DNA
atatatctatggctcatcctcaggaactatcccagtgcagggtaccactctccacatgttttcagtgggtggagagcctc

SEQ ID NO: 57510 - DNA, 80 bp, synthetic construct
  source 1..80: mol_type = other DNA
agtggggcctctttgtaaaggggacaagctgtttttgtctgctgttgatattgttggaattcacactaattattcagaat

SEQ ID NO: 57511 - DNA, 80 bp, synthetic construct
  source 1..80: mol_type = other DNA
ttatttttgcagaatcaacattgcggtttccgttgctaggtggcgcttagcaaccccttggtgacattccggtgactcat

SEQ ID NO: 57512 - DNA, 80 bp, synthetic construct
  source 1..80: mol_type = other DNA
agaagtcagaatttatcagggcactgaaggcctacccggggaccctgatcttgatagatatgttgataaattttgtcaga

SEQ ID NO: 57513 - DNA, 80 bp, synthetic construct
  source 1..80: mol_type = other DNA
ggggatctttaccatcaagaatgttttgctggatatttccaaactgagtaatagatacatgtctctctaaaatctctttc

SEQ ID NO: 57514 - DNA, 80 bp, synthetic construct
  source 1..80: mol_type = other DNA
tttcaattaagtcacttttttctaaactctgctttaggtaggtcttacaatgaaaatggatgtgcaaagcaaatctaact

SEQ ID NO: 57515 - DNA, 80 bp, synthetic construct
  source 1..80: mol_type = other DNA
tttgaacaaagaagaagcccgcctaaactaggtttccgttgctaggtggcgcttagcaactcattttgcaatctaaggtc

SEQ ID NO: 57516 - DNA, 80 bp, synthetic construct
  source 1..80: mol_type = other DNA
gttaatattcaaagctttaccatcaaaaaagtgcatgaaagcagaagctaaggtggttttgccactatttatagggcctt

SEQ ID NO: 57517 - DNA, 80 bp, synthetic construct
  source 1..80: mol_type = other DNA
ttaaaagggggtttacctaaagctctataaagctctaaaggtttaataacagctttacaatgaatgaaactaaaagtaca

SEQ ID NO: 57518 - DNA, 80 bp, synthetic construct
  source 1..80: mol_type = other DNA
cttttggggggcgtgcaggtaaatgaactctgggatgatccagcttcttcctcaggatcagggtcttcagaggcagaagc

SEQ ID NO: 57519 - DNA, 80 bp, synthetic construct
  source 1..80: mol_type = other DNA
tgcaggtaaatgaactctgggatgatccagcttcttcctcaggatcagggtcttcagaggcagaagcagaagagggtgga

SEQ ID NO: 57520 - DNA, 80 bp, synthetic construct
  source 1..80: mol_type = other DNA
ggaggggctgaaggtccaggattattttcatcatcactagatgatatagtctctgaacaaaataaatcatcatattcttt

SEQ ID NO: 57521 - DNA, 80 bp, synthetic construct
  source 1..80: mol_type = other DNA
tggggggggttttaactatattgttggatatttttgaactggctgaacaattaagtttaagtactggatttactgttgat

SEQ ID NO: 57522 - DNA, 80 bp, synthetic construct
  source 1..80: mol_type = other DNA
ggctgaacaattaagtttaagtactggatttactgttgatgcaatattgtctggggaagctatagctgctgctactactg

SEQ ID NO: 57523 - DNA, 80 bp, synthetic construct
  source 1..80: mol_type = other DNA
aaatttccccatgctgctcttgtaagttgcagcaaatccataagctcatttctctcctccaaagacagagtttgatccat

SEQ ID NO: 57524 - DNA, 80 bp, synthetic construct
  source 1..80: mol_type = other DNA
ctggggaagctatagctgctgctactactgaagcagcttggttaattgaaatagaagctgtagatgtagcaggcctagga

SEQ ID NO: 57525 - DNA, 80 bp, synthetic construct
  source 1..80: mol_type = other DNA
tcttttagttactatctgaatgctgctatagactggggagaatcactgtttcatgctgttggcagggaaatatggagaaa

SEQ ID NO: 57526 - DNA, 80 bp, synthetic construct
  source 1..80: mol_type = other DNA
ctgtaaggggtactaatgaatttcaacatatgcttgctcaaattgcagaaaatgcaaggtgggccctaactaatgggcct

SEQ ID NO: 57527 - DNA, 80 bp, synthetic construct
  source 1..80: mol_type = other DNA
tcagacaggatatgattagcataatattagcccgccaaaaagtggtttttatgcagatgaggtttcacctttggtggagg

SEQ ID NO: 57528 - DNA, 80 bp, synthetic construct
  source 1..80: mol_type = other DNA
atgctaaaatttcatgtgctacgctcttaggccttgtgatggctgaattaacacaacgctgcaaactacttcttacacag

SEQ ID NO: 57529 - DNA, 80 bp, synthetic construct
  source 1..80: mol_type = other DNA
cgtccatttgaaccagatgaagctagaatattccatctactcagacgcgttgaacgcgaagcatggtcagggcacactgg

SEQ ID NO: 57530 - DNA, 80 bp, synthetic construct
  source 1..80: mol_type = other DNA
tagctgatttaattctaaatgaatggttatgtaacccaatggatataacattatattattatcagcaaacagatgaagcg

SEQ ID NO: 57531 - DNA, 80 bp, synthetic construct
  source 1..80: mol_type = other DNA
tagggggagcacccgtgtgtcgtggccaaaattcgcagtccccaacctccaatcactcaccaacctcctgtcctccaatt

SEQ ID NO: 57532 - DNA, 80 bp, synthetic construct
  source 1..80: mol_type = other DNA
agtggttcgtagggctttcccccattgtttggctttcagctatatggatgatgtggtattgggggccaagtctgtacaac

SEQ ID NO: 57533 - DNA, 80 bp, synthetic construct
  source 1..80: mol_type = other DNA
gcctcggcctcctgtatatataaaaaaaagggaaggtagggaggagctggctaaaatgagctcatacctagggagccaac

SEQ ID NO: 57534 - DNA, 80 bp, synthetic construct
  source 1..80: mol_type = other DNA
gtcacggtttgactgagcagacatacagtgctttgcctgaaccaaaagctacataggtaagtaatgtttttttttgtgtt

SEQ ID NO: 57535 - DNA, 80 bp, synthetic construct
  source 1..80: mol_type = other DNA
cagctgacagccagagggagccctggctgcatgccactggcagttatataagggagccctggctgcatgccactggcagt

SEQ ID NO: 57536 - DNA, 80 bp, synthetic construct
  source 1..80: mol_type = other DNA
ggtcaatatgttttaaagtggattgacaaaaaatgtggaaaaaaaaacaccctgtggttttacggacccccgagcactgg

SEQ ID NO: 57537 - DNA, 80 bp, synthetic construct
  source 1..80: mol_type = other DNA
gggaggcgcgtagtgtccagctcgaaaacgcccttgcctatgcttcacagcacggccacagtgtctttgaggaggttgcc

SEQ ID NO: 57538 - DNA, 80 bp, synthetic construct
  source 1..80: mol_type = other DNA
ccaaaaccacaaacaaaagaaactccaaaacactagccaaaacaccgaaaaaagaaaccaccattaacccaacaaaaaaa

SEQ ID NO: 57539 - DNA, 80 bp, synthetic construct
  source 1..80: mol_type = other DNA
ccacttgactgcctggggactttttgatgacattccggtgtgtgacaaacaagtgcattgcggtttccgttgctaggtgg

SEQ ID NO: 57540 - DNA, 80 bp, synthetic construct
  source 1..80: mol_type = other DNA
agggggaagtgaaatcattttgcaatctaaggtcaacaaagaagaagcccgcctaaactaaacgcgccaattttgaactt

SEQ ID NO: 57541 - DNA, 80 bp, synthetic construct
  source 1..80: mol_type = other DNA
acaggcacgcagtgcgcaactggagaacgcactggcctatgcttcacaacacgggccagttgtgtttgacaccgtacgcc

SEQ ID NO: 57542 - DNA, 80 bp, synthetic construct
  source 1..80: mol_type = other DNA
gaacatatacaatttttggagtacaagagcaaattacagtggagaatacttcacagacgcaatggagatttgttgatgta

SEQ ID NO: 57543 - DNA, 80 bp, synthetic construct
  source 1..80: mol_type = other DNA
tggtggtagaattcatacatatagtggccaaacgccaaacgcaactactggttattattcagccactaactatgactcag

SEQ ID NO: 57544 - DNA, 80 bp, synthetic construct
  source 1..80: mol_type = other DNA
tgaacatgacgactttttgtgatttttatataataccacgatcagaagagtctaaatgcactgaatatattaacaatgga

SEQ ID NO: 57545 - DNA, 80 bp, synthetic construct
  source 1..80: mol_type = other DNA
ttaccaccgattcaaaatacaagaaacatcgttccgttagcgctctcagctagaaatgtggtatcattaaaagctcaatc

SEQ ID NO: 57546 - DNA, 80 bp, synthetic construct
  source 1..80: mol_type = other DNA
aaatgaggatatcgttgtctcaaagacatcactgtggaaggaaatgcaatataatagggatataacaataagatttaaat

SEQ ID NO: 57547 - DNA, 80 bp, synthetic construct
  source 1..80: mol_type = other DNA
tcaaagacatcactgtggaaggaaatgcaatataatagggatataacaataagatttaaatttgcaaattcaattgttaa

SEQ ID NO: 57548 - DNA, 80 bp, synthetic construct
  source 1..80: mol_type = other DNA
tctaaaactacgcagaatggaagttattcgcagtatggtccattgttgtctactccgaaactgtatgccgtaatgaagta

SEQ ID NO: 57549 - DNA, 80 bp, synthetic construct
  source 1..80: mol_type = other DNA
tttaaagactacaatgatattactacattttccatgaatccacaactgtattgtgattataatgtagtattaatgagata

SEQ ID NO: 57550 - DNA, 80 bp, synthetic construct
  source 1..80: mol_type = other DNA
agtaattactgacgttgtaaatggtgttaatcataagataaatatttcaataagtacgtgcactatacgtaactgtaaca

SEQ ID NO: 57551 - DNA, 80 bp, synthetic construct
  source 1..80: mol_type = other DNA
tgttgctataattcaagttggtggaccgaatgcattagatatcactgctgatccaacaacagttccacaaattcaaagaa

SEQ ID NO: 57552 - DNA, 80 bp, synthetic construct
  source 1..80: mol_type = other DNA
gtggcgtgctacaacagctggtacattggtggcactacaccagaaatgcccactaccaatgaaggctgtgggctattagt

SEQ ID NO: 57553 - DNA, 80 bp, synthetic construct
  source 1..80: mol_type = other DNA
tacggggatgactgcttgtactcggtgtgccccgcaactgcttccatcttccaaacagttttagccaatttgtcctcttt

SEQ ID NO: 57554 - DNA, 80 bp, synthetic construct
  source 1..80: mol_type = other DNA
cctgcacaccacgcggtgtgcgtggcctactagacatcacgtccataaagaggcaatttttgtggattaaggccaacagg

SEQ ID NO: 57555 - DNA, 80 bp, synthetic construct
  source 1..80: mol_type = other DNA
acggtcgacatcaactcaccaccagcatatgaccgtgacgcgcgtggcatccagttggaaaatgcccttgcgtatgcatc

SEQ ID NO: 57556 - DNA, 80 bp, synthetic construct
  source 1..80: mol_type = other DNA
acagcatggtcacacaatctttgaggaagttgctgagttggctcgacacacggccaaggctgagggactggttctgacca

SEQ ID NO: 57557 - DNA, 80 bp, synthetic construct
  source 1..80: mol_type = other DNA
tggcctcaagccaactgctgcagacaagagtgaaacaatagccccaactcacactcctgttttcctcaagagaacattaa

SEQ ID NO: 57558 - DNA, 80 bp, synthetic construct
  source 1..80: mol_type = other DNA
tatggtgatgattgcatttactccttgtgcccagcaaccgcttccatctttgaaactgttttggccaacctcagtgcctt

SEQ ID NO: 57559 - DNA, 80 bp, synthetic construct
  source 1..80: mol_type = other DNA
cctgtacaccaagaggtatccgtgggctactcgacatcacatcaatcaggcggcaattcttctggattaaggccaaccgc

SEQ ID NO: 57560 - DNA, 80 bp, synthetic construct
  source 1..80: mol_type = other DNA
accacagacatatcatccccgcccgcttatgacagggaagcccggagtgtgcagcttgaaaatgccctggcttacgcctc

SEQ ID NO: 57561 - DNA, 80 bp, synthetic construct
  source 1..80: mol_type = other DNA
acaacatggccacgcaatctttgaggagattgccgaaatcgccaggaggacggcacagtcagaagggttagtgctcacca

SEQ ID NO: 57562 - DNA, 80 bp, synthetic construct
  source 1..80: mol_type = other DNA
atgtgaactatgaccaggctctcgccacctacgaagcatggtttataggtggtacaggcaccggtcaagatagccccagt

SEQ ID NO: 57563 - DNA, 80 bp, synthetic construct
  source 1..80: mol_type = other DNA
tcgccacctacgaagcatggtttataggtggtacaggcaccggtcaagatagccccagtgaagagactaccaaattagtg

SEQ ID NO: 57564 - DNA, 80 bp, synthetic construct
  source 1..80: mol_type = other DNA
tggtctacggcccaccgctgccgataaaacagacaaaatagcccccacccgcacaccagtctttttaaagcgaactctct

SEQ ID NO: 57565 - DNA, 80 bp, synthetic construct
  source 1..80: mol_type = other DNA
tttaaaagaagacaccaaatcagatgccgccggtcgccgccggtaggcgggacttccggtacaagatggcggacaattac

SEQ ID NO: 57566 - DNA, 80 bp, synthetic construct
  source 1..80: mol_type = other DNA
tacggggatgactgtctatactcggtgtgccctgctactgcttccattttccagacagttttggccaatttaacatcatt

SEQ ID NO: 57567 - DNA, 80 bp, synthetic construct
  source 1..80: mol_type = other DNA
cctgcacaccacgtggtgtgcgtggcctgttggacatcacatccataaagagacaattcttgtggatcaaggccaatagg

SEQ ID NO: 57568 - DNA, 80 bp, synthetic construct
  source 1..80: mol_type = other DNA
acggtagatatcaattcaccaccagcgtacgatcgcgatgcgcgtggtattcagttggaaaatgcccttgcgtacgcgtc

SEQ ID NO: 57569 - DNA, 80 bp, synthetic construct
  source 1..80: mol_type = other DNA
acagcatggtcacgcagtttttgaggaggttgctgagttggcacgccacacagccaaggctgagggattagtgctaacca

SEQ ID NO: 57570 - DNA, 80 bp, synthetic construct
  source 1..80: mol_type = other DNA
cgccacctacgaatcttggttcataggtggtacaggcttggtgcaaggcagccccagtgaagagaccaccaaattagtgt

SEQ ID NO: 57571 - DNA, 80 bp, synthetic construct
  source 1..80: mol_type = other DNA
tggcctgaagccaactgctgctgacaagagtgagacaatagcccccacccacactcctgttttcctcaagagaacgctga

SEQ ID NO: 57572 - DNA, 80 bp, synthetic construct
  source 1..80: mol_type = other DNA
aaatgtagactcgtttgaaatggttgctgaaaatgagaagctagctatagtggatgtcgttgatgggataaatcaaaaaa

SEQ ID NO: 57573 - DNA, 80 bp, synthetic construct
  source 1..80: mol_type = other DNA
gcttccagagtccttcctcttttcaccggaaagacagaggcttaggcctccggcccccggcttatatagaaaaaatttta

SEQ ID NO: 57574 - DNA, 80 bp, synthetic construct
  source 1..80: mol_type = other DNA
tggaggcggtccagagctaacctgtgagctaacctgtgactgttggcgggaagccaataacagcaactttgacatttcat

SEQ ID NO: 57575 - DNA, 80 bp, synthetic construct
  source 1..80: mol_type = other DNA
gggcccctggcctcttatactatcaaaaaaaaacctgtgttgccatagtgattttgagtgacagggagataactttgcaa

SEQ ID NO: 57576 - DNA, 80 bp, synthetic construct
  source 1..80: mol_type = other DNA
ccggggactttttggtgacattccggtgtgtgacaaacaagtgcattgcggtttccgttgctaggtggcgcttagcaacc

SEQ ID NO: 57577 - DNA, 80 bp, synthetic construct
  source 1..80: mol_type = other DNA
agggggaagtgaaatcatagcaacctagaggaagctcatttcatcagcgccgcccagaagcccgccttttttaaacccgc

SEQ ID NO: 57578 - DNA, 80 bp, synthetic construct
  source 1..80: mol_type = other DNA
ccattttgaacttgggtaagatatggggggggttttaactatattgttggatatttttgaactggctgaacaattaagtt

SEQ ID NO: 57579 - DNA, 80 bp, synthetic construct
  source 1..80: mol_type = other DNA
ctatattgttggatatttttgaactggctgaacaattaagtttaagtactggatttactgttgatgcaatattgtctggg

SEQ ID NO: 57580 - DNA, 80 bp, synthetic construct
  source 1..80: mol_type = other DNA
tctgctaaattagtgcagtacagtgtacgtgcctggtaccaaaaatggcctccaaaagcctctccctttttttataggaa

SEQ ID NO: 57581 - DNA, 80 bp, synthetic construct
  source 1..80: mol_type = other DNA
agatgggtagtaacatccccctataccaccttacagcattattatagaaccttaccccccatgaatgttatccaaatgag

SEQ ID NO: 57582 - DNA, 80 bp, synthetic construct
  source 1..80: mol_type = other DNA
acaacaggcaagacttaggggccaaaagcttcttgaaactagttctgagagagtagaagaaactgaccctgagtctggag

SEQ ID NO: 57583 - DNA, 80 bp, synthetic construct
  source 1..80: mol_type = other DNA
aggtgatacagaaatatggacccccaggtggcgctgatcagccagtaacaccagattggatgctcttgatgatattaggc

SEQ ID NO: 57584 - DNA, 80 bp, synthetic construct
  source 1..80: mol_type = other DNA
ttatatggtgatataacacctctttggggacatgtattgcagcaagaacatatcctgtcccctaaaaatatgattgatgg

SEQ ID NO: 57585 - DNA, 80 bp, synthetic construct
  source 1..80: mol_type = other DNA
gcctcctgctaaaaaaaggcgtaaaatgtaattttttgcaggtaatggcacccaagaggaaaaccacctgctcctctaag

SEQ ID NO: 57586 - DNA, 80 bp, synthetic construct
  source 1..80: mol_type = other DNA
aagacatgccctcagcccagcagtgtccctaaattaataattaagggtggaatagaagtactagatgtaaaaacaggtga

SEQ ID NO: 57587 - DNA, 80 bp, synthetic construct
  source 1..80: mol_type = other DNA
tgacagtatcactcaaattgaggcctttctaaatccccggatgggagtaaatgatgaaactaatacctggtatggtttta

SEQ ID NO: 57588 - DNA, 80 bp, synthetic construct
  source 1..80: mol_type = other DNA
actagagttcattattgattaatgtgtgtactggacatgcctgttcccaggcagacggccaagttccacaggcagacggc

SEQ ID NO: 57589 - DNA, 80 bp, synthetic construct
  source 1..80: mol_type = other DNA
gtgaacaagtaacagtagctactgccagggaaactgatcgcccccctaaagagcaaatgccttactatagctgtgctaga

SEQ ID NO: 57590 - DNA, 80 bp, synthetic construct
  source 1..80: mol_type = other DNA
atccccctccccttattgaatgaggatatgacttgtaataccctacttatgtgggaagctgtcagtgtgaaaactgaagt

SEQ ID NO: 57591 - DNA, 80 bp, synthetic construct
  source 1..80: mol_type = other DNA
gctctaatacacttatgaatgtgcatgattacatgactaggactgacaatggggtaggccatcctgtagtgggctctaca

SEQ ID NO: 57592 - DNA, 80 bp, synthetic construct
  source 1..80: mol_type = other DNA
taccacatgtttgcagtaggtggggaacccctagatctccagggcatccagcagagtcatctggtgcaatatccagaggg

SEQ ID NO: 57593 - DNA, 80 bp, synthetic construct
  source 1..80: mol_type = other DNA
attgattgttcctaaaagtgtaacagatgttactgccaaaattcagtgccttgatccttctgccaaagcaaaattggata

SEQ ID NO: 57594 - DNA, 80 bp, synthetic construct
  source 1..80: mol_type = other DNA
aagatggaaaatatccaattgaaacttggagtccagatccctctaggaatgaaaatactagatattttggaaattattat

SEQ ID NO: 57595 - DNA, 80 bp, synthetic construct
  source 1..80: mol_type = other DNA
ggtggcttaacaaccccccctgtactgacctttacaaatactgtaaccacaattcttttggatgagaatggtgtgggccc

SEQ ID NO: 57596 - DNA, 80 bp, synthetic construct
  source 1..80: mol_type = other DNA
tctttgtaaaggggatggactttttctctcttgttgtgatgtaatgggatggttcacagcagggagtgggacccatcaga

SEQ ID NO: 57597 - DNA, 80 bp, synthetic construct
  source 1..80: mol_type = other DNA
gatttagaggcctaccaagatattttaatgtacaattgaggaaaagggctgtaagaaatccttacccagtatctgctctc

SEQ ID NO: 57598 - DNA, 80 bp, synthetic construct
  source 1..80: mol_type = other DNA
ctaaccagtttgtttactaatatgatgccccggatgtcagggcagcctatgattgggaataaatctcaggtggaagaagt

SEQ ID NO: 57599 - DNA, 80 bp, synthetic construct
  source 1..80: mol_type = other DNA
caagttcctgggcagtctgccaagtttctattttggacacgcgcacttcctgttcctaaccgcggtcagaacaagttaga

SEQ ID NO: 57600 - DNA, 80 bp, synthetic construct
  source 1..80: mol_type = other DNA
aagggtatatgagggtttggagcaacttcctggtgacccagatatggagagacatattgacgaatttggacaagaaataa

SEQ ID NO: 57601 - DNA, 80 bp, synthetic construct
  source 1..80: mol_type = other DNA
caccagttccatgaaatgtgctttattcatctgcttctgtaacaatatcatgtaaggggtcacggcctgctttaatatta

SEQ ID NO: 57602 - DNA, 80 bp, synthetic construct
  source 1..80: mol_type = other DNA
tctttcattaaacatgctatttctgtggtacatatggattccagcagttttttttctatctctatagtttcgcgcaaaga

SEQ ID NO: 57603 - DNA, 80 bp, synthetic construct
  source 1..80: mol_type = other DNA
aggtataaatgcagagctactacaataccacattaatatcataaacatagttaggccactatgggtgattctatgcttta

SEQ ID NO: 57604 - DNA, 80 bp, synthetic construct
  source 1..80: mol_type = other DNA
caatatcatcattcttttctaaagaagtctgcagacatttcatatgagtaaaaattaccatataagcaaatctggctttt

SEQ ID NO: 57605 - DNA, 80 bp, synthetic construct
  source 1..80: mol_type = other DNA
aaattaccatataagcaaatctggcttttacagtggggggcaacttataatcattcatagttacaatacagggttggaaa

SEQ ID NO: 57606 - DNA, 80 bp, synthetic construct
  source 1..80: mol_type = other DNA
acagtggggggcaacttataatcattcatagttacaatacagggttggaaaatctgcgtttttttattaacatgtttttt

SEQ ID NO: 57607 - DNA, 80 bp, synthetic construct
  source 1..80: mol_type = other DNA
ctcaagatttactgtgacagacccatctagatgatctctgatattgtctaggttatttaccccctgtccacattgtaagg

SEQ ID NO: 57608 - DNA, 80 bp, synthetic construct
  source 1..80: mol_type = other DNA
ttttatcgtttcctacttgacctttaacatcctcaaaaacaacagcaaactggtcaagggcacatccaagttcaaaaggt

SEQ ID NO: 57609 - DNA, 80 bp, synthetic construct
  source 1..80: mol_type = other DNA
attaatattcagggtttttccactaattaaatctaacatggcagctgcaaagcttgttttccctgaatttataggccctt

SEQ ID NO: 57610 - DNA, 80 bp, synthetic construct
  source 1..80: mol_type = other DNA
taaataaaacatttctttttttgggaatattttcagtcatcaattttaaaatttgaataacaattctatcaatattttca

SEQ ID NO: 57611 - DNA, 80 bp, synthetic construct
  source 1..80: mol_type = other DNA
acaacaaccagcccataacctctttttttttttaagtaaaaaaaaaagaagaaaaagaatcttaaccctctgtcatcaaa

SEQ ID NO: 57612 - DNA, 80 bp, synthetic construct
  source 1..80: mol_type = other DNA
aacataacagaataccacataacacctgccatatgctccaacactctcattttatctagttctttgtatttgtttaaaaa

SEQ ID NO: 57613 - DNA, 80 bp, synthetic construct
  source 1..80: mol_type = other DNA
tagcttaaatctttcagcaagtagttcttctctagtactctcaataagatgtagtcttcttttagcaattaccacatctg

SEQ ID NO: 57614 - DNA, 80 bp, synthetic construct
  source 1..80: mol_type = other DNA
cagcttgctgacagattgtcttttgagctttactgtttttaaacaaaatagcattattgtggtgagcctcatgaaactga

SEQ ID NO: 57615 - DNA, 80 bp, synthetic construct
  source 1..80: mol_type = other DNA
tagtgaacttttaacactttcatttgacatttgttacagggtagtggtgatgcaaaatcaagataatgacccattattaa

SEQ ID NO: 57616 - DNA, 80 bp, synthetic construct
  source 1..80: mol_type = other DNA
atagggatcatcaatcatattacattcagcaaaggtactaattaaagtccaatctacctgctgactattttcattttcaa

SEQ ID NO: 57617 - DNA, 80 bp, synthetic construct
  source 1..80: mol_type = other DNA
aatctgtttgaaagaggtccttattagattcaatcctcttatatggatcacaacataaagctttataacaatcaaatggc

SEQ ID NO: 57618 - DNA, 80 bp, synthetic construct
  source 1..80: mol_type = other DNA
ttattaatagctttacaatgcaaaaagctaatagtacattgttttgcacaataatttttaacagcactaactctatgctt

SEQ ID NO: 57619 - DNA, 80 bp, synthetic construct
  source 1..80: mol_type = other DNA
tgctactgtaaggatgtacaaatagccatgcgctttattttctccttcatgtctgcttttaaaatcaattttaaatttga

SEQ ID NO: 57620 - DNA, 80 bp, synthetic construct
  source 1..80: mol_type = other DNA
catctattttctgatacagtaattgacatttttccactgtagtaaagattaggaaagcattgacagttttgttagaataa

SEQ ID NO: 57621 - DNA, 80 bp, synthetic construct
  source 1..80: mol_type = other DNA
acagcactagaaagaaaaatattaatatcacaaggaaagtcactaggcccattatccatctttgctttttttgattttgg

SEQ ID NO: 57622 - DNA, 80 bp, synthetic construct
  source 1..80: mol_type = other DNA
tcctgaaccttctagaagatctactaaagtaagtcttttttttttttagatgggtggtgtgatttcactggcaatcgagc

SEQ ID NO: 57623 - DNA, 80 bp, synthetic construct
  source 1..80: mol_type = other DNA
cggcgtagcctggctacagttttggtcagctgaatctccctcaaagtcatctggtacccctccacttgtggaaggagctg

SEQ ID NO: 57624 - DNA, 80 bp, synthetic construct
  source 1..80: mol_type = other DNA
tttggtcagctgaatctccctcaaagtcatctggtacccctccacttgtggaaggagctgaaccacctccatttcttcct

SEQ ID NO: 57625 - DNA, 80 bp, synthetic construct
  source 1..80: mol_type = other DNA
cctccacttgtggaaggagctgaaccacctccatttcttcctcgcttagggggggttgaatcaaatggaaaggatccata

SEQ ID NO: 57626 - DNA, 80 bp, synthetic construct
  source 1..80: mol_type = other DNA
aaccacctccatttcttcctcgcttagggggggttgaatcaaatggaaagaatccataacctgaatctgtggttggagca

SEQ ID NO: 57627 - DNA, 80 bp, synthetic construct
  source 1..80: mol_type = other DNA
tctctaggtattcctccgcctcctctggtaccttttcctggtgagcctgtagaaaatgaggttcgggaagcagattcatg

SEQ ID NO: 57628 - DNA, 80 bp, synthetic construct
  source 1..80: mol_type = other DNA
tatattggctcctgtgcctcgttttctttgggctggctcaggctcttcatctgatgaagtggaggacagggtttcatctg

SEQ ID NO: 57629 - DNA, 80 bp, synthetic construct
  source 1..80: mol_type = other DNA
caaataggtcactttggaatcttctaaaccagaagaaggatccacagggatttccagatggattcctatgaggattgtac

SEQ ID NO: 57630 - DNA, 80 bp, synthetic construct
  source 1..80: mol_type = other DNA
tgtaaattttattaaattaaatttaacaaaattagttaatatgagatatgtcaaaacaaactttacttacctaaaacatc

SEQ ID NO: 57631 - DNA, 80 bp, synthetic construct
  source 1..80: mol_type = other DNA
caactcagcactggaaatttttaacagtctccagtccaggtgtttcaagaggattagccactcagtgaaagcaccgatgc

SEQ ID NO: 57632 - DNA, 80 bp, synthetic construct
  source 1..80: mol_type = other DNA
tacagttcactccaaaccaggtgtaatagcaaagaaaacaataacattgcccccaaacattgcatctgcgtctatatgta

SEQ ID NO: 57633 - DNA, 80 bp, synthetic construct
  source 1..80: mol_type = other DNA
atttttaattgcctatgctgttgaaacaaaatacagcagaagcatctacagtatcttaacaaatttctcatgcactgtga

SEQ ID NO: 57634 - DNA, 80 bp, synthetic construct
  source 1..80: mol_type = other DNA
actgttagtaatcaaattaaatatattgcgagcacccaaaactgtacaagtaacaactggatgtagggaaggctttacct

SEQ ID NO: 57635 - DNA, 80 bp, synthetic construct
  source 1..80: mol_type = other DNA
tggcaggagcaatttcaagtttagtcgctgccacagatttaacagctgaagctattcttgcgggagaagccttagcagct

SEQ ID NO: 57636 - DNA, 80 bp, synthetic construct
  source 1..80: mol_type = other DNA
ctctcagattgtagattccgtctttgaatttattccaaagctcatttaatttcttcatctcagcttcattgcctcccttg

SEQ ID NO: 57637 - DNA, 80 bp, synthetic construct
  source 1..80: mol_type = other DNA
tctgggtgcaagcgtttagctgcaagcttataagctcttgccatagcagggacattaccaaaggtatcaccacttatttt

SEQ ID NO: 57638 - DNA, 80 bp, synthetic construct
  source 1..80: mol_type = other DNA
acattaccaaaggtatcaccacttattttaagtagtgaaatcagtaattgtctctctgcaaaggtgagaattgaatccat

SEQ ID NO: 57639 - DNA, 80 bp, synthetic construct
  source 1..80: mol_type = other DNA
atagaatctgaggtggcctctatggtgttagtggagggatttgctgaagcagacgctttagcagccttaggcctgacagc

SEQ ID NO: 57640 - DNA, 80 bp, synthetic construct
  source 1..80: mol_type = other DNA
tgagcatatgtctatgttgtcagctatacctggtatggtagagcaattagcctcaacaggtttacttgttcaaactcttt

SEQ ID NO: 57641 - DNA, 80 bp, synthetic construct
  source 1..80: mol_type = other DNA
caggtgctgctgctctatttactgctggaataaagttatcacaacacgaagtttcattagttaacagaaacactaatatg

SEQ ID NO: 57642 - DNA, 80 bp, synthetic construct
  source 1..80: mol_type = other DNA
ggacggtggctgggtgcctcttgcctcccagtaataaaaaaaaaaggaggtgcctaagtacatgcctgagtgcgggttta

SEQ ID NO: 57643 - DNA, 80 bp, synthetic construct
  source 1..80: mol_type = other DNA
gcactacaaatatggagaccagactttatggatctgatcctaccaggatttagacattttgagtggggctttaatgtgtt

SEQ ID NO: 57644 - DNA, 80 bp, synthetic construct
  source 1..80: mol_type = other DNA
aggggattggggtcatcaactagctactgcagtaggacgaatgatatgggagatggttcttcatgaaagccgaagaagag

SEQ ID NO: 57645 - DNA, 80 bp, synthetic construct
  source 1..80: mol_type = other DNA
tagccatgattggtgggaatttcctaggtcaagggagcaggcgcgctgcagaacaagtagctcagttaatagagggtgct

SEQ ID NO: 57646 - DNA, 80 bp, synthetic construct
  source 1..80: mol_type = other DNA
tataaacaggagaacccagagagtggatgggcagcctatgtatggtatggaatcccaggtagaggaggttagggtgtttg

SEQ ID NO: 57647 - DNA, 80 bp, synthetic construct
  source 1..80: mol_type = other DNA
cttgcaagatattttaagatccgcctgagaaaaagatctgtaaagaatccttacccaatttcctttttgctaagtgacct

SEQ ID NO: 57648 - DNA, 80 bp, synthetic construct
  source 1..80: mol_type = other DNA
ggactcccttcaggcatgccattcaccagtgttgtcaactctcttaaccatatgacatactttgcggctgcagtgttgaa

SEQ ID NO: 57649 - DNA, 80 bp, synthetic construct
  source 1..80: mol_type = other DNA
aaactgttttggccaacctcagtgcctttggtttgcggcctactgctgccgataaaacagacaaaatcgcccccacccac

SEQ ID NO: 57650 - DNA, 80 bp, synthetic construct
  source 1..80: mol_type = other DNA
acaccagtctttctaaagcgaactcttacctgtacaccaaggggtatccgtgggctactcgacatcacgtcaatcaggcg

SEQ ID NO: 57651 - DNA, 80 bp, synthetic construct
  source 1..80: mol_type = other DNA
cccggagtgtgcagcttgaaaatgccctggcttatgcttcacaacatggccatgcaatctttgaggagattgctgaaatt

SEQ ID NO: 57652 - DNA, 80 bp, synthetic construct
  source 1..80: mol_type = other DNA
acaatgcggggtcaacagtagttaacagagttcttagtgatgaaattcaaagacttttaagagaccttgaatatggattt

SEQ ID NO: 57653 - DNA, 80 bp, synthetic construct
  source 1..80: mol_type = other DNA
aggtcagccacttgacctttctaggcctaccagcgccttgtcagcagcagctggagcattaactgaagcagcttataatt

SEQ ID NO: 57654 - DNA, 80 bp, synthetic construct
  source 1..80: mol_type = other DNA
gctgttgggggacagccacttgatgtagttggtgtaacacccacagacaagtataaaggcccaactacctatacaattaa

SEQ ID NO: 57655 - DNA, 80 bp, synthetic construct
  source 1..80: mol_type = other DNA
agactggggaccctttgtaggccaaaggagagtgaagggtaactgaaatgctaagactgtaagttctaatcctagtattt

SEQ ID NO: 57656 - DNA, 80 bp, synthetic construct
  source 1..80: mol_type = other DNA
aatttcttttaatagtgaacataacagttttttcaaatctcacagcaactgtttctggaatacaatattcattcatggtt

SEQ ID NO: 57657 - DNA, 80 bp, synthetic construct
  source 1..80: mol_type = other DNA
cagttcggggatgttggcgccatcgtctcgaacctggcctgcatacctttggatatagagggtcaccaatttttattttg

SEQ ID NO: 57658 - DNA, 80 bp, synthetic construct
  source 1..80: mol_type = other DNA
aattcattttcttttaaccctccaggaatattttcttcacacaaattaaatggttgtctacacatcctactatacagacc

SEQ ID NO: 57659 - DNA, 80 bp, synthetic construct
  source 1..80: mol_type = other DNA
ttaggaggggttgcctgagaacagctaggctcctcttctggtgcacttctttttggagaagatggcatggattcattaca

SEQ ID NO: 57660 - DNA, 80 bp, synthetic construct
  source 1..80: mol_type = other DNA
acaattatttaaaaacattattttatgcttaccgtaataatggttgaactgctcgtatttcagtattaaaaataatcact

SEQ ID NO: 57661 - DNA, 80 bp, synthetic construct
  source 1..80: mol_type = other DNA
tttctataaattttgtacttttctttatgatatttgcttaaaatacagtgaatgcattggcattcgtgattgtagccatg

SEQ ID NO: 57662 - DNA, 80 bp, synthetic construct
  source 1..80: mol_type = other DNA
tatccattttgcctctctaggcctctcaaatgcctctgcaggccctctccttcttctagaaaaagctggggcttttttgg

SEQ ID NO: 57663 - DNA, 80 bp, synthetic construct
  source 1..80: mol_type = other DNA
aaggcttagctgcccttggtggtataacagagggagctgcacttcttggggaaacaataccaatatctgaagcagctact

SEQ ID NO: 57664 - DNA, 80 bp, synthetic construct
  source 1..80: mol_type = other DNA
tagcatcagaccaccctggggacctgcctccgaacaccccaacaggaagtgcaagtggactccatcccacctcaggatac

SEQ ID NO: 57665 - DNA, 80 bp, synthetic construct
  source 1..80: mol_type = other DNA
tggcgcttagcaaccccttggacaaacaagtgcattgcggtttccgttgctaggtggcgcttagcaacccctctagatac

SEQ ID NO: 57666 - DNA, 80 bp, synthetic construct
  source 1..80: mol_type = other DNA
gcgcatcattgcttctgtcataccaccaggggttgatccctcgtccatcagggacccaggcgtgttgcctcacgctttcg

SEQ ID NO: 57667 - DNA, 80 bp, synthetic construct
  source 1..80: mol_type = other DNA
tgaaattccaaaaccaaataagatgtgcaagaaatttcctaaggttttaagatcagaactgcaagttctaataatgaata

SEQ ID NO: 57668 - DNA, 80 bp, synthetic construct
  source 1..80: mol_type = other DNA
caaggaagaggagactgagccttcctcattatctgctctttacaaaaagattattgagctagaggaccagaggcctcagg

SEQ ID NO: 57669 - DNA, 80 bp, synthetic construct
  source 1..80: mol_type = other DNA
tggacactttccttggtgaaggtgaccccgagaaacccaatatgcatgagttcagcaggagttatctcaaaaaggtgtgt

SEQ ID NO: 57670 - DNA, 80 bp, synthetic construct
  source 1..80: mol_type = other DNA
gaccatgggaagctgctcctcagtagagtatatggacaaagttataaggagcaaatcgattctgcaattatgagagaagt

SEQ ID NO: 57671 - DNA, 80 bp, synthetic construct
  source 1..80: mol_type = other DNA
gagtatatggacaaagttataaggagcaaatcgattctgcaattatgagagaagtgaactctataactttggagaggctt

SEQ ID NO: 57672 - DNA, 80 bp, synthetic construct
  source 1..80: mol_type = other DNA
cggaattcgacgtcacaggaaatgacgtcacaggaaatgacgtaattgtccgccatcttgtaccggaagtcccgcctacc

SEQ ID NO: 57673 - DNA, 80 bp, synthetic construct
  source 1..80: mol_type = other DNA
gggcagcatgtgttaaagtggattgataaaaaatgtggcaaaaaaaatacactatggttttatggcccgccaagtacagg

SEQ ID NO: 57674 - DNA, 80 bp, synthetic construct
  source 1..80: mol_type = other DNA
ccattgctaaaagtgttccagtatatggtatggttaactggaataatgaaaattttccatttaatgatgtagcagggaaa

SEQ ID NO: 57675 - DNA, 80 bp, synthetic construct
  source 1..80: mol_type = other DNA
ctgacatggggttgctaacagaggctgatgtacaacagtggcttacatggtgtaatgcacaaagctgggaccactatgaa

SEQ ID NO: 57676 - DNA, 80 bp, synthetic construct
  source 1..80: mol_type = other DNA
gttagttggggttgattatgtgtgggacggtgtaaggggtttacctgtgtgttgtgtgcaacatattaataatagtggtg

SEQ ID NO: 57677 - DNA, 80 bp, synthetic construct
  source 1..80: mol_type = other DNA
gaggcttgggactttgtccccactgcattaatgtaggggcttggtataatggatggaaatttcgagaatttaccccagat

SEQ ID NO: 57678 - DNA, 80 bp, synthetic construct
  source 1..80: mol_type = other DNA
tgggcggggaataccatatataaagcagcgcagtgctgcagttctttctttcgggctactttttcctggactttcttgct

SEQ ID NO: 57679 - DNA, 80 bp, synthetic construct
  source 1..80: mol_type = other DNA
attataacatttctttagatcatcccctagaaaacccatcctctctgtttgacttagttgctcgtattaaaaataacctt

SEQ ID NO: 57680 - DNA, 80 bp, synthetic construct
  source 1..80: mol_type = other DNA
cagaagccagcactggtgcaggagggggtggcagtaatcctgtcaaaagcatgtggagtgaggaggccacttttactgcc

SEQ ID NO: 57681 - DNA, 80 bp, synthetic construct
  source 1..80: mol_type = other DNA
tactacttgttaacatactaatatggaactatttagaggggtgcttcaagtttcttctaatgttctggactgtgctaacg

SEQ ID NO: 57682 - DNA, 80 bp, synthetic construct
  source 1..80: mol_type = other DNA
ggggggtacaggttactgacagcactacagggcgtttatgtatgttagtagaccatgaatacaagtacccatatgtgtta

SEQ ID NO: 57683 - DNA, 80 bp, synthetic construct
  source 1..80: mol_type = other DNA
tactgacagcactacagggcgtttatgtatgttagtagaccatgaatacaagtacccatatgtgttaggtcaaggtcagg

SEQ ID NO: 57684 - DNA, 80 bp, synthetic construct
  source 1..80: mol_type = other DNA
aatcccttatatggatcccgcttaggagttcctgacacactaggaggtgacccaaaatttagatctctaacacatgaaga

SEQ ID NO: 57685 - DNA, 80 bp, synthetic construct
  source 1..80: mol_type = other DNA
ggggccagtatctcagccataccaccactgggacacagacaagtatgtcacaggaataaatgccatttctcatggtcaaa

SEQ ID NO: 57686 - DNA, 80 bp, synthetic construct
  source 1..80: mol_type = other DNA
ttaggaggatggggtttgcatcagccacctcctcaaatatttttaaaaatattaccacaaagtgggccaattggaggtat

SEQ ID NO: 57687 - DNA, 80 bp, synthetic construct
  source 1..80: mol_type = other DNA
ttggggccccgtaaagctacgggacggtggaatcctcagcctggagtatatcccccgcacgcagcaggtcatttaccata

SEQ ID NO: 57688 - DNA, 80 bp, synthetic construct
  source 1..80: mol_type = other DNA
gactgggaaccactaactcatactaacagactaatggcaatatacttaagcagtgtggcttctaagcttgactttaccgg

SEQ ID NO: 57689 - DNA, 80 bp, synthetic construct
  source 1..80: mol_type = other DNA
tacttaagcagtgtggcttctaagcttgactttaccggggggccgctagcagggtgcttgtacttctttcaagtagaatg

SEQ ID NO: 57690 - DNA, 80 bp, synthetic construct
  source 1..80: mol_type = other DNA
tttgaagaaggctatcatattcatgtggttattgggtggccaggattaaaccccagaaacctaacagtgtgtgtagaggg

SEQ ID NO: 57691 - DNA, 80 bp, synthetic construct
  source 1..80: mol_type = other DNA
ggggggccaggattaaaccccagaaacctaacagtgtgtgtagaggggttatttaataatgtactttatcatcttgtgac

SEQ ID NO: 57692 - DNA, 80 bp, synthetic construct
  source 1..80: mol_type = other DNA
gaaggggagcttgccatgccaagaaaccccgcattaccgcagccataaatgatgcttgtagtgaaccggaggagtctagc

SEQ ID NO: 57693 - DNA, 80 bp, synthetic construct
  source 1..80: mol_type = other DNA
ggcacagggggagaggttgtgccatttaatgggaagggaactaaggctagcataaagtttcaaaccatggtaaactggtt

SEQ ID NO: 57694 - DNA, 80 bp, synthetic construct
  source 1..80: mol_type = other DNA
atgcatatatcattaatgtatgcagttctttgcctacagctgtgtggtctgggggagactcatggatcacataatggaac

SEQ ID NO: 57695 - DNA, 80 bp, synthetic construct
  source 1..80: mol_type = other DNA
tcaaactatgcgaaaacagtgctacagggaagagttgtgagatagatagtgtcccagttaaatgcaggcagggttattgc

SEQ ID NO: 57696 - DNA, 80 bp, synthetic construct
  source 1..80: mol_type = other DNA
ggaagtttacacatcctctccaatcaccaccgagggcctatctccaccggggaccactccagagctcccagccacaaccg

SEQ ID NO: 57697 - DNA, 80 bp, synthetic construct
  source 1..80: mol_type = other DNA
accgggcaagagaggggtacacaagtatgtgtctctttgtgctgggaagtgtcctgtttttagtctcctgtctaatgaaa

SEQ ID NO: 57698 - DNA, 80 bp, synthetic construct
  source 1..80: mol_type = other DNA
gtatagacacttcaggtgcaagtgatgccaaccccagcacacaggcagccagaggcacctctgcactaacagtccacaca

SEQ ID NO: 57699 - DNA, 80 bp, synthetic construct
  source 1..80: mol_type = other DNA
agtttgcccagcagccctagcacaccacctatatcacaagacacacaccaccctgtgaggaacctactttcagttacgag

SEQ ID NO: 57700 - DNA, 80 bp, synthetic construct
  source 1..80: mol_type = other DNA
gccctatgccagaagagacaacagcaccttcgggttcaggcaaggagagctcagcaaccagcagcccccatccagcttcc

SEQ ID NO: 57701 - DNA, 80 bp, synthetic construct
  source 1..80: mol_type = other DNA
gacagaccaccaacccctcccgcaacagcccaggggctcactgaaagtaacagtcacaacgccaccgaacatcttgagtc

SEQ ID NO: 57702 - DNA, 80 bp, synthetic construct
  source 1..80: mol_type = other DNA
atgcatatatcattgatgtatgcagttttctgcttgcaactgtgcggtctagggaagactaacggaccacacaatgggac

SEQ ID NO: 57703 - DNA, 80 bp, synthetic construct
  source 1..80: mol_type = other DNA
gggcgattaggcttcctcaaattcatcatgaaggcacttttatcccaggtacttacaagatagtgatagacaaaaaaagt

SEQ ID NO: 57704 - DNA, 80 bp, synthetic construct
  source 1..80: mol_type = other DNA
tcaagctatgcgaaaacagtgccacagggaagagctgtgaaatagacagtatcccagtcaagtgtaagcagggttattgc

SEQ ID NO: 57705 - DNA, 80 bp, synthetic construct
  source 1..80: mol_type = other DNA
acctggttgacctagggtgtcccaaaattccgttactgggcaaaatggctatttatatctgcaggatgtcgaatcacccc

SEQ ID NO: 57706 - DNA, 80 bp, synthetic construct
  source 1..80: mol_type = other DNA
gagaggtttacacatcccctccaatcaccaccaagggtttgtctctgccggaggccacatctgagccccctgcgactacc

SEQ ID NO: 57707 - DNA, 80 bp, synthetic construct
  source 1..80: mol_type = other DNA
tagttgtattacttgtgctgttcacagtttcattgtcaccagttcaatcagcacccattggtcacgggaaaacaattgaa

SEQ ID NO: 57708 - DNA, 80 bp, synthetic construct
  source 1..80: mol_type = other DNA
agcgtggtcacttcaagtgcaagtgatatcgattctagcacacaggcagccggagacacccccacaccaacagtccgcac

SEQ ID NO: 57709 - DNA, 80 bp, synthetic construct
  source 1..80: mol_type = other DNA
gagtctgcccagcagccctagcacaccatccacatcacaaggcacacactatcccgtgaggagtctgctttcagtcacga

SEQ ID NO: 57710 - DNA, 80 bp, synthetic construct
  source 1..80: mol_type = other DNA
agcagaccaacaacccctcccacaacagcccagaaacccactgaaaacaacagccacaacaccaccgaacagcttgagtc

SEQ ID NO: 57711 - DNA, 80 bp, synthetic construct
  source 1..80: mol_type = other DNA
cttaacacacttagcaactttaggttcaatgatctctccaacacagacagtcctcccacagagtgttacctctatagcca

SEQ ID NO: 57712 - DNA, 80 bp, synthetic construct
  source 1..80: mol_type = other DNA
ttcaagacattcatatcagcccaacaaataggtctaaaagaaaccttaatatggaaataatcttaacgttatctcagggt

SEQ ID NO: 57713 - DNA, 80 bp, synthetic construct
  source 1..80: mol_type = other DNA
tgaacacaataatacacacgttatgacaacgcctgatgacagtcagagccctgaaccgccagtgagcacagccttacttg

SEQ ID NO: 57714 - DNA, 80 bp, synthetic construct
  source 1..80: mol_type = other DNA
ccattttcaaggaagtttgccggaagttcccgcttacaacgcctcagaaaaagttcccgcttacaacgcctcagaaaaat

SEQ ID NO: 57715 - DNA, 80 bp, synthetic construct
  source 1..80: mol_type = other DNA
ttcccgcttacaacgcctcagaaaaatacccaagcatgacttcagttaattctgcagaagccagcactggtgcaggaggg

SEQ ID NO: 57716 - DNA, 80 bp, synthetic construct
  source 1..80: mol_type = other DNA
acccaagcatgacttcagttaattctgcagaagccagcactggtgcaggaggggggggcagtaatcctgttaaaagcatg

SEQ ID NO: 57717 - DNA, 80 bp, synthetic construct
  source 1..80: mol_type = other DNA
atggacatttcttatgttattaatgacaatataacattcattagtaatatcacatcaagtacaaaatatatcaactcatg

SEQ ID NO: 57718 - DNA, 80 bp, synthetic construct
  source 1..80: mol_type = other DNA
tatatgataacgttggcaatactaaggattcattgacatatgtaaatattaataaagtatatatgagatacacgttttga

SEQ ID NO: 57719 - DNA, 80 bp, synthetic construct
  source 1..80: mol_type = other DNA
gtcaccttcaccaaggaaagtgtccacctgaggcctctggtcctctagctcaataatctttttataaagagcagacaatg

SEQ ID NO: 57720 - DNA, 80 bp, synthetic construct
  source 1..80: mol_type = other DNA
aggaaggctcagtctcctcttccttgttcttgaagtacccattatagcagcaactaattaccacttgcaagtctttggtt

SEQ ID NO: 57721 - DNA, 80 bp, synthetic construct
  source 1..80: mol_type = other DNA
ctactgaggagcagcttcccatggtcacacacctttttgagataactcctgctgaactcatgcatattgggtttctcagg

SEQ ID NO: 57722 - DNA, 80 bp, synthetic construct
  source 1..80: mol_type = other DNA
gtggcatccagttagaaaacgccctcgcgtatgcatcgcagcatggccatgcagtttttgaggaagttgctgaattggct

SEQ ID NO: 57723 - DNA, 80 bp, synthetic construct
  source 1..80: mol_type = other DNA
gctacaacagctggtacattggtggcactacaccagaaatgcccactaccaatgaaggctgtgggctgttagtgtttgag

SEQ ID NO: 57724 - DNA, 80 bp, synthetic construct
  source 1..80: mol_type = other DNA
atgcctattagcatcatgcacatatcattgatgtgtgcagttctttgcctgcagctgtatggtctggggggaacccatgg

SEQ ID NO: 57725 - DNA, 80 bp, synthetic construct
  source 1..80: mol_type = other DNA
gaacgaccctgcctgtcacgccggactcccccaccgtcacacccacaaccccagccagcgcaccagaaggctcaggggaa

SEQ ID NO: 57726 - DNA, 80 bp, synthetic construct
  source 1..80: mol_type = other DNA
gcccacacatcccccccaaacaccaccgaaggcccgtctctgccggagtccacgccagagccccccgcggcaaccagcac

SEQ ID NO: 57727 - DNA, 80 bp, synthetic construct
  source 1..80: mol_type = other DNA
gagtctcataagtgctattgtagcttactttgttgcccttactgtaggcactgctctgctgacagggaaattcatcaatt

SEQ ID NO: 57728 - DNA, 80 bp, synthetic construct
  source 1..80: mol_type = other DNA
aggcatcccaggtgcaagtgatgtcaactccagcacacaggcagccagagatacctccacaccaacagtccgcaccggtc

SEQ ID NO: 57729 - DNA, 80 bp, synthetic construct
  source 1..80: mol_type = other DNA
gtcacacaatggaactgaacacaataagacaaacgctgtgacaacgtctagtgacagccggagctcagaaccaccagtaa

SEQ ID NO: 57730 - DNA, 80 bp, synthetic construct
  source 1..80: mol_type = other DNA
ccattttcaaggaagtttgccggaagttcccgcttacaacgcctcagaaaatttttcggaagttcccgcttacaacgcct

SEQ ID NO: 57731 - DNA, 80 bp, synthetic construct
  source 1..80: mol_type = other DNA
catgtcgatcagaagttgtatggctagtgtgtttacaagcaggattcaggtgatttatgaaaagacacattgtgtcacag

SEQ ID NO: 57732 - DNA, 80 bp, synthetic construct
  source 1..80: mol_type = other DNA
ctacatgctaaggaacgccgatactgtatcatatgtcctgaactaaacgggtcttttaggaagaagtgtgcatttgctac

SEQ ID NO: 57733 - DNA, 80 bp, synthetic construct
  source 1..80: mol_type = other DNA
catatttcagccagtgcattaaactggattgaccctgacagttccttaagagatcacattaatgtcattgtcggacgtga

SEQ ID NO: 57734 - DNA, 80 bp, synthetic construct
  source 1..80: mol_type = other DNA
tttatcattccaggatcttagtgaaactccatgtcagattgaccttgcaacttcatcaattgatggagcatggggttcag

SEQ ID NO: 57735 - DNA, 80 bp, synthetic construct
  source 1..80: mol_type = other DNA
tcctcacttccataaaggcatgtcatgctgctaatgtgttaaggcatgtcatgctgctattgtgttaaggtatgccttgc

SEQ ID NO: 57736 - DNA, 80 bp, synthetic construct
  source 1..80: mol_type = other DNA
aaggcatgtcatgctgctattgtgttaaggtatgccttgctgccctgtgttacttaggtcatgctgccctctgttaatta

SEQ ID NO: 57737 - DNA, 80 bp, synthetic construct
  source 1..80: mol_type = other DNA
tgtaatcccgagctcattagttcgaggctatagtccgatggcagtggtgttgccgtctcgaacctagccgttactcgaga

SEQ ID NO: 57738 - DNA, 80 bp, synthetic construct
  source 1..80: mol_type = other DNA
gcctcggcctcctgtatatataaaaaaaagggaagggaaggctgccagccaagcatgagctcatacctagggagccaacc

SEQ ID NO: 57739 - DNA, 80 bp, synthetic construct
  source 1..80: mol_type = other DNA
caagtaaacaaagcacaaggggaagtggaaagcagccaggggaacatgttttgcgagccagagcttgtcaccagctggcc

SEQ ID NO: 57740 - DNA, 80 bp, synthetic construct
  source 1..80: mol_type = other DNA
agctcatacctagggagccaaccagctgacagccagagggagccctggctgcatggcactggcagttacaagtaaacaaa

SEQ ID NO: 57741 - DNA, 80 bp, synthetic construct
  source 1..80: mol_type = other DNA
gaaccagctgacagccagagaacaaagcacaaggggaagtggaaagcagccaagggaacatgttttgcgagccagagctg

SEQ ID NO: 57742 - DNA, 80 bp, synthetic construct
  source 1..80: mol_type = other DNA
tacgtgggctggggctgtggtagtgggaagtcaaggacagagtcaggtgaactctgcagctcagactcagggaccagttc

SEQ ID NO: 57743 - DNA, 80 bp, synthetic construct
  source 1..80: mol_type = other DNA
atgcagagagagcagtggaagtggacccggatgacgttaacaaaaatatactgcaagcaaggcaacaaacagtgtcagca

SEQ ID NO: 57744 - DNA, 80 bp, synthetic construct
  source 1..80: mol_type = other DNA
gcatcaggcgaccaaaacatctatatgtgtctatgcccactgctcagtcgactatgaaggctgaagagcttacacctgga

SEQ ID NO: 57745 - DNA, 80 bp, synthetic construct
  source 1..80: mol_type = other DNA
aaggaaagtgcatgactgggcagccagccaagaggaagtggaaactggccaaaggagtggaaagcagccagacagacatg

SEQ ID NO: 57746 - DNA, 80 bp, synthetic construct
  source 1..80: mol_type = other DNA
gcagaggcttggggctcctagcctccgaggcctctggaaaaaaaagagagaggcctctgaggcttaagaggcttaattag

SEQ ID NO: 57747 - DNA, 80 bp, synthetic construct
  source 1..80: mol_type = other DNA
ccttatcctgctgattactttggaatgttactgctgctggggcaacagagggctttgggtaaacagttttctcctgccca

SEQ ID NO: 57748 - DNA, 80 bp, synthetic construct
  source 1..80: mol_type = other DNA
aagaaacaacaatcctcaaactgctgaaagcacatccagaattgctccatatgcaaaacctacaagttggatgactggac

SEQ ID NO: 57749 - DNA, 80 bp, synthetic construct
  source 1..80: mol_type = other DNA
caggtttactcagtgcacaaagagtaggtccagctacttcagacacaggagcctggatggttgcagttaaaccagaaaac

SEQ ID NO: 57750 - DNA, 80 bp, synthetic construct
  source 1..80: mol_type = other DNA
gcaagcattgacacaggaatgtctggaattggaagtggatttgatccaccacaaggatcactagcaccaacaaatctaga

SEQ ID NO: 57751 - DNA, 80 bp, synthetic construct
  source 1..80: mol_type = other DNA
tatctaatcaaccactatctatgctaagagatcaagctttatttagaggaaatcaaacaacctataacctatgttcagat

SEQ ID NO: 57752 - DNA, 80 bp, synthetic construct
  source 1..80: mol_type = other DNA
ggctgccagccaagcatgagctcataatcacaagggaacatgttttgcgagccagagctgttttggcttgtcaccagctg

SEQ ID NO: 57753 - DNA, 80 bp, synthetic construct
  source 1..80: mol_type = other DNA
ccagctgacagccagagggagccctggctgcatgccactggcagttatagaaggtagggaggagctggctaaaactggat

SEQ ID NO: 57754 - DNA, 80 bp, synthetic construct
  source 1..80: mol_type = other DNA
gtggttttgcgccagctgtcacgacaagcttcagtgaaagttggtaaaacctggactggaactaaaaaaagagctcagag

SEQ ID NO: 57755 - DNA, 80 bp, synthetic construct
  source 1..80: mol_type = other DNA
aaagtgacaactttctatcttcaactctatgtttatactatcctaccgaagctcaaacgcaaataagcgataatgaatgg

SEQ ID NO: 57756 - DNA, 80 bp, synthetic construct
  source 1..80: mol_type = other DNA
aaagatacattatctcaactgtttctgactaaaggatggccgacaggctcagtctattttaatgaatactcaaatgttct

SEQ ID NO: 57757 - DNA, 80 bp, synthetic construct
  source 1..80: mol_type = other DNA
ggaattttccgtcgatccaaagttgtattgtgactataacgttgtattaattagattcgcttctggagaggagttagata

SEQ ID NO: 57758 - DNA, 80 bp, synthetic construct
  source 1..80: mol_type = other DNA
tatccgaattagctgatctaatattgaatgaatggttatgcaatccgatggatatagcattatattattatcagcaaaca

SEQ ID NO: 57759 - DNA, 80 bp, synthetic construct
  source 1..80: mol_type = other DNA
ctaaattatatattaaaatcaataacaagaataatggactacataatttatagatttctattagtagtagtaatactggc

SEQ ID NO: 57760 - DNA, 80 bp, synthetic construct
  source 1..80: mol_type = other DNA
aaagtgaatcttttttaacatcaactctgtgtttgtattatccagttgaagcatcaaatgaaatagctgataccgaatgg

SEQ ID NO: 57761 - DNA, 80 bp, synthetic construct
  source 1..80: mol_type = other DNA
aaaaatactttgtcacaactatttctgaccaaaggatggccaactgggtctgtatatttcaaagaatatactaacatagc

SEQ ID NO: 57762 - DNA, 80 bp, synthetic construct
  source 1..80: mol_type = other DNA
gattataatctagttctaatgaagtatgattcaactctagaattagatatgtccgaattggcagacctcatattgaatga

SEQ ID NO: 57763 - DNA, 80 bp, synthetic construct
  source 1..80: mol_type = other DNA
caccgtgacaaatgcacaaaattatggagttaatttgcctatcacaggatccatggatactacatacgcaaattcaacgc

SEQ ID NO: 57764 - DNA, 80 bp, synthetic construct
  source 1..80: mol_type = other DNA
ttgaattatatgttaaaatcaataactagagtcatggactacatactctacagattcctgctctttattgtaattatcac

SEQ ID NO: 57765 - DNA, 80 bp, synthetic construct
  source 1..80: mol_type = other DNA
ctttagaaccatttttgacatcaacgctatgtctttattatccaacagaagctgaaacagagattgctgatagctcatgg

SEQ ID NO: 57766 - DNA, 80 bp, synthetic construct
  source 1..80: mol_type = other DNA
aaagatacactatcgcaattgttcttgacaaaaggatggccaactggttctgtttaccttaaaagctacacagatattgc

SEQ ID NO: 57767 - DNA, 80 bp, synthetic construct
  source 1..80: mol_type = other DNA
aactttttcgataaatcctcagttatattgtgattataatatagtactgatgaaatataatgctaattcggaattagaca

SEQ ID NO: 57768 - DNA, 80 bp, synthetic construct
  source 1..80: mol_type = other DNA
tgtcggaattggcagatttaatacttaatgaatggctatgtaatccaatggacgtaacattatactactatcaacaaaca

SEQ ID NO: 57769 - DNA, 80 bp, synthetic construct
  source 1..80: mol_type = other DNA
accatttgtgaattcacagaactatggcataaacttgccaattactggatccatggacacgaactatcaaaacgtatcgg

SEQ ID NO: 57770 - DNA, 80 bp, synthetic construct
  source 1..80: mol_type = other DNA
gtgaattatattctgaaaaccataacaaaaatgatggactatctaatttacagaataacatttataattgttgtactatc

SEQ ID NO: 57771 - DNA, 80 bp, synthetic construct
  source 1..80: mol_type = other DNA
aaaatgacaacttcctatcttcaactttttgtttatattatcctactgaagcacaaacgcaaataagtgataatgaatgg

SEQ ID NO: 57772 - DNA, 80 bp, synthetic construct
  source 1..80: mol_type = other DNA
aaagacacattatctcaactgttcttaactaaaggatggccgacaggttcagtttattttaatgaatattcaaatgtcct

SEQ ID NO: 57773 - DNA, 80 bp, synthetic construct
  source 1..80: mol_type = other DNA
agaattttccgtcgatccaaagctgtattgcgattataatgttgtattaattagatttgcttctggtgaagagctggata

SEQ ID NO: 57774 - DNA, 80 bp, synthetic construct
  source 1..80: mol_type = other DNA
tatccgaattggctgacctaatattaaatgaatggttatgtaacccactggatataaaattatattattatcagcaaaca

SEQ ID NO: 57775 - DNA, 80 bp, synthetic construct
  source 1..80: mol_type = other DNA
agtgttatctaatgcgcaaaattacggaataaatttgccaattactggatctatggatacagcctacgctaattcaacgc

SEQ ID NO: 57776 - DNA, 80 bp, synthetic construct
  source 1..80: mol_type = other DNA
gtgagctacattctgaaaacagtaacaaaagtaatggactacattatctatagaacagcatttataatcgtgatattagc

SEQ ID NO: 57777 - DNA, 80 bp, synthetic construct
  source 1..80: mol_type = other DNA
agaatgacaactttttatcttcaacattatgtttgtattatccagccgaagctagaacgcaaatcaacgataatgaatgg

SEQ ID NO: 57778 - DNA, 80 bp, synthetic construct
  source 1..80: mol_type = other DNA
aaagacactttatctcaactattcttaactaaaggatggccaactggttcagtttacttcaatgaatattcgaatgttct

SEQ ID NO: 57779 - DNA, 80 bp, synthetic construct
  source 1..80: mol_type = other DNA
agaattttccgttgatcccaaattgtattgtgattataatattgttttaattagattcatcgctggggaagaattagata

SEQ ID NO: 57780 - DNA, 80 bp, synthetic construct
  source 1..80: mol_type = other DNA
tatctgaattagctgatttaatactaaatgaatgggtatgtaatccgatggatataactttatactattaccagcagact

SEQ ID NO: 57781 - DNA, 80 bp, synthetic construct
  source 1..80: mol_type = other DNA
agtgttgtctaacgcgcagaattatggaataaacttgccaataactggttctatggacacagcgtatgccaattcaacgc

SEQ ID NO: 57782 - DNA, 80 bp, synthetic construct
  source 1..80: mol_type = other DNA
ttgaattacgtgcttaaatcgttatctagaataatggacttcattatctacagatttcttttaattatagttgtactgtc

SEQ ID NO: 57783 - DNA, 80 bp, synthetic construct
  source 1..80: mol_type = other DNA
aagaagaagcatttctagcttcgactttttgcttgtattacccatctgaagcagcaacagaaataaacgataattcatgg

SEQ ID NO: 57784 - DNA, 80 bp, synthetic construct
  source 1..80: mol_type = other DNA
aaagatacgctttctcagctgtttttaactaaagggtggccaacaggatctatctattttaaagactatgctgatattgc

SEQ ID NO: 57785 - DNA, 80 bp, synthetic construct
  source 1..80: mol_type = other DNA
ctcattttcagttgatccacaactgtactgcgattataatttggtactaatgaagtatgacgctacactgcaactggaca

SEQ ID NO: 57786 - DNA, 80 bp, synthetic construct
  source 1..80: mol_type = other DNA
tgtccgaattagcagatttgatacttaatgagtggttgtgtaatcctatggatattactttatattattatcaacaaacc

SEQ ID NO: 57787 - DNA, 80 bp, synthetic construct
  source 1..80: mol_type = other DNA
accatttcttaatgcacaaaactatggaataaatcttccgattactgggtcgatggatacaccatatacaaactcaacgc

SEQ ID NO: 57788 - DNA, 80 bp, synthetic construct
  source 1..80: mol_type = other DNA
ttaaattacattttaaaatcaataacgagagtgatggactacataatttatagatttttgtttgttgtggttctcatagc

SEQ ID NO: 57789 - DNA, 80 bp, synthetic construct
  source 1..80: mol_type = other DNA
aggacgaaccatttttgacatcaactctatgcctatattatccaatcgaggcgtcgaacgagattgcagatacggaatgg

SEQ ID NO: 57790 - DNA, 80 bp, synthetic construct
  source 1..80: mol_type = other DNA
caccattacgaatgcacagaattatggcataaacttgccaataacaggatcaatggataccgcatatgtgaattctacac

SEQ ID NO: 57791 - DNA, 80 bp, synthetic construct
  source 1..80: mol_type = other DNA
gtgagttatattttgaaaacagtaacaaaagtgatggactatcttatctatagagtagcgtttataattgtgatgttagc

SEQ ID NO: 57792 - DNA, 80 bp, synthetic construct
  source 1..80: mol_type = other DNA
aaagtggcaattttttgtcatcaacgttatgtctgtattatccagctgaagctagaacgcaaattggtgataatgaatgg

SEQ ID NO: 57793 - DNA, 80 bp, synthetic construct
  source 1..80: mol_type = other DNA
tcaatgaatattcgaatgttctagaattctctattgatccaaaactttattgtgattataatgttgttttaattagattc

SEQ ID NO: 57794 - DNA, 80 bp, synthetic construct
  source 1..80: mol_type = other DNA
attgccggggaagagttagatatatccgaattagctgatctaatattaaacgaatggctatgcaatccaatggatataac

SEQ ID NO: 57795 - DNA, 80 bp, synthetic construct
  source 1..80: mol_type = other DNA
ttaaactatattttaaaatcagtaacgaggatgatggactacataatttctagatttttattcgttgtagtaattatgac

SEQ ID NO: 57796 - DNA, 80 bp, synthetic construct
  source 1..80: mol_type = other DNA
aaaaacaccttgtcccaactatttttaacaaaaggatggcccacaggatcagtatattttaaagagtatacagatatagc

SEQ ID NO: 57797 - DNA, 80 bp, synthetic construct
  source 1..80: mol_type = other DNA
agcgttttcagttgatccacaactatactgcgattacaacatagttctgatgaagtatgattcagcgctagaattggata

SEQ ID NO: 57798 - DNA, 80 bp, synthetic construct
  source 1..80: mol_type = other DNA
tgtcagaactagctgatcttattttgaacgaatggctatgcaatccgatggacataacgttgtattattaccaacaaact

SEQ ID NO: 57799 - DNA, 80 bp, synthetic construct
  source 1..80: mol_type = other DNA
attatatattggtatatataccacaattctaacctttttgatatcaattattctattaaattatatattaaaatcaataa

SEQ ID NO: 57800 - DNA, 80 bp, synthetic construct
  source 1..80: mol_type = other DNA
ggaataaatcttccaataacaggttctatggataccgcatatgtaaactctacacaacaagagaattttatgacttccac

SEQ ID NO: 57801 - DNA, 80 bp, synthetic construct
  source 1..80: mol_type = other DNA
tttatgcttatattatccaagttcagtcacgacaataattcccgactggacgaacacactgtcacaacttttctcaatga

SEQ ID NO: 57802 - DNA, 80 bp, synthetic construct
  source 1..80: mol_type = other DNA
caggatggccgacaaattccgtctacttcaagagttatgctatatcgtccttctctgtagatccgcagttatattgttat

SEQ ID NO: 57803 - DNA, 80 bp, synthetic construct
  source 1..80: mol_type = other DNA
attgtgttaatacagtaccaaaattcattagcgttagatgtctcagaacttgctttaattttaaaatgaatgttatgtcc

SEQ ID NO: 57804 - DNA, 80 bp, synthetic construct
  source 1..80: mol_type = other DNA
gcgttagatgtctcagaacttgctttaattttaaaatgaatgttatgtccgatggacgtaacaacgaagtacatgagaag

SEQ ID NO: 57805 - DNA, 80 bp, synthetic construct
  source 1..80: mol_type = other DNA
cttaaatgatggactttatcatatatcggtttttactaatagttgtcgtcatactgccattttaaatagctcaaaattat

SEQ ID NO: 57806 - DNA, 80 bp, synthetic construct
  source 1..80: mol_type = other DNA
gacctcaactacacattgagtgtaatcactttaatgaatagtacattacatacaatactagaggatccaggaatggcgta

SEQ ID NO: 57807 - DNA, 80 bp, synthetic construct
  source 1..80: mol_type = other DNA
gatggctgccagccaagcatgagctcataatagtccttaatcacaagtaaacaaagcacaaggggaagtgtgttttgcga

SEQ ID NO: 57808 - DNA, 80 bp, synthetic construct
  source 1..80: mol_type = other DNA
gccagagctgttttggcttgtcaccagctggccatggttcttcgccagctgtcacgtaaggcttctgtgaaagttagtaa

SEQ ID NO: 57809 - DNA, 80 bp, synthetic construct
  source 1..80: mol_type = other DNA
atgttgcccctcaaatctatgctgctgattaacttcatcctttatcagctcttttggagtggcagtggagtcaccagtgg

SEQ ID NO: 57810 - DNA, 80 bp, synthetic construct
  source 1..80: mol_type = other DNA
cgtcaacagacactgccacaaagacagtatctagcacaaccatcagcacgccagatacacagatcaccacggacagtggc

SEQ ID NO: 57811 - DNA, 80 bp, synthetic construct
  source 1..80: mol_type = other DNA
tcaggtgaatccagcactgatccctcggttaccaacaaggacacatcccctacttccgttgccattgtccaaacactaga

SEQ ID NO: 57812 - DNA, 80 bp, synthetic construct
  source 1..80: mol_type = other DNA
aacagaagcacccacgaccctgaacccaaacacaacggcgaccacaggcgattctaccctaagcaccaccacaccagaca

SEQ ID NO: 57813 - DNA, 80 bp, synthetic construct
  source 1..80: mol_type = other DNA
gtccaagtgccaactcgcctacactaccagtcccacagacaaactcatcacctagccccagcaaggcaccaacaccgcag

SEQ ID NO: 57814 - DNA, 80 bp, synthetic construct
  source 1..80: mol_type = other DNA
accaaacaccatctatccagaggtcttctctcagcagcaatcacagaagcagaccaaacagcatcggcagagacttcaac

SEQ ID NO: 57815 - DNA, 80 bp, synthetic construct
  source 1..80: mol_type = other DNA
aaagtagattgttcgatggagaaaggcttgctgacaggaagatcgctgaacttttttcaaccaaaacccacataggctga

SEQ ID NO: 57816 - DNA, 80 bp, synthetic construct
  source 1..80: mol_type = other DNA
aaaagagactactaccacaaacggctcaatgacggcagggagtgacacagcagttacttcaactcaacacgtcaccacca

SEQ ID NO: 57817 - DNA, 80 bp, synthetic construct
  source 1..80: mol_type = other DNA
atagcactacaggacaaactaatcctacaaccttggaaaccccccctaagactcaaacgatacagggccaacagactaca

SEQ ID NO: 57818 - DNA, 80 bp, synthetic construct
  source 1..80: mol_type = other DNA
acaccggtaaccacaccctctattaccaccattgcactcataagcccaacaagcaggtccaaaagagactccaaagtgca

SEQ ID NO: 57819 - DNA, 80 bp, synthetic construct
  source 1..80: mol_type = other DNA
aggtggaaccaactctagtttgatacaaaccgtcccaacacccacaactgctctgaacagcacaactcctgcaccagggc

SEQ ID NO: 57820 - DNA, 80 bp, synthetic construct
  source 1..80: mol_type = other DNA
agctcatacctagggagccaaccagctgacagccagagggagccctggcatgcgtgaaacccctcccatagtccttaatc

SEQ ID NO: 57821 - DNA, 80 bp, synthetic construct
  source 1..80: mol_type = other DNA
aaaacgggttcatctgatttggtgtcttcttttaaattttcgcgggcttttttcccgccttatgcaaataacctgccatg

SEQ ID NO: 57822 - DNA, 80 bp, synthetic construct
  source 1..80: mol_type = other DNA
ataaataactaattgtgtatgttgctttaaaaatttaaaagaagacaccaaatcagatgccgccggtcgccgccggtagg

SEQ ID NO: 57823 - DNA, 80 bp, synthetic construct
  source 1..80: mol_type = other DNA
gtaaacaaagcacaaggggaagtggaaagttttgcgaagtaaacaaagcacaaggggaagtggaaagttttgcgagccag

SEQ ID NO: 57824 - DNA, 80 bp, synthetic construct
  source 1..80: mol_type = other DNA
agctgtcaccagctggccatggttcttcgccagctgtcacgtaaggcttctgtgaaagttagtaaaacctggagtggaac

SEQ ID NO: 57825 - DNA, 80 bp, synthetic construct
  source 1..80: mol_type = other DNA
aagttcctctccaatggacaagaggaaagaaaagggtgactgtaatcccgagctcatgagttcgaggctacagtccgatg

SEQ ID NO: 57826 - DNA, 80 bp, synthetic construct
  source 1..80: mol_type = other DNA
gctcataccgtaaacaaagcacaaggggaagtggaaagcagccaagggaacatgttttgcgagccagagctgttttggct

SEQ ID NO: 57827 - DNA, 80 bp, synthetic construct
  source 1..80: mol_type = other DNA
agctcataccgtaaacaaagcacaagggatgagctcataccgtaaacaaagcacaagggatggctgccagccaagcatga

SEQ ID NO: 57828 - DNA, 80 bp, synthetic construct
  source 1..80: mol_type = other DNA
gggcttccatcaggcatgccattcaccagtgtcattaattccctcaaccacatgacatatttcgccgcggcagtgttgcg

SEQ ID NO: 57829 - DNA, 80 bp, synthetic construct
  source 1..80: mol_type = other DNA
acttgtttcgtgcaagcaagggagcggaaatatgaaggagtgtgtcacaactgggagggcgctccttcctgcggtgaacc

SEQ ID NO: 57830 - DNA, 80 bp, synthetic construct
  source 1..80: mol_type = other DNA
gtagacgggaaaaaaagacagaaacacagtggtttgactcagcagacatacagtgctttgcctgaaccaaaagctacata

SEQ ID NO: 57831 - DNA, 80 bp, synthetic construct
  source 1..80: mol_type = other DNA
agctcatacctagggagccaaccagctgacagccagagggagccctggctgcctgccatagtgaaacccctcccatagtc

SEQ ID NO: 57832 - DNA, 80 bp, synthetic construct
  source 1..80: mol_type = other DNA
agctcatacctagggagccaaccagagggagccctggctgcatgccactggcagttatagtgaaacccctcccatagtcc

SEQ ID NO: 57833 - DNA, 80 bp, synthetic construct
  source 1..80: mol_type = other DNA
agctcatacctagggagccaaccagctgaaagcagctcatgacaatggtgcaggcaccagctttcacagccaagcatgag

SEQ ID NO: 57834 - DNA, 80 bp, synthetic construct
  source 1..80: mol_type = other DNA
caagtaaacaaagcacaaggggaagtggaaagcagccaggggaacatgttttgcgagccagagctgttttggcttgtcac

SEQ ID NO: 57835 - DNA, 80 bp, synthetic construct
  source 1..80: mol_type = other DNA
caaccagctgacagccagagggagccctggctgcctgccactggcagttatagtgaaacccctcccatagtccttaatca

SEQ ID NO: 57836 - DNA, 80 bp, synthetic construct
  source 1..80: mol_type = other DNA
ccatggaatgcggaaggaaagtgcatgactgggcagccagccagtggcagttaatagtgaaaccccgcccctgaaattct

SEQ ID NO: 57837 - DNA, 80 bp, synthetic construct
  source 1..80: mol_type = other DNA
cctttgggaatctgaagtatctgagacttgggaagagcattgtgattgggattcagtgcttgatccatgtccagagtctt

SEQ ID NO: 57838 - DNA, 80 bp, synthetic construct
  source 1..80: mol_type = other DNA
gcctcggcctcctgtatatataaaaaaaagggaaggtagggaggagctggctaaaactggatggctgccagccaagcatg

SEQ ID NO: 57839 - DNA, 80 bp, synthetic construct
  source 1..80: mol_type = other DNA
tcccatagtccttaatcacaagtaaacacaaggggaagtggaaagcagccagcatgttttgcgagccagagctgttttgg

SEQ ID NO: 57840 - DNA, 80 bp, synthetic construct
  source 1..80: mol_type = other DNA
gaaaaacaagggaatttccctggcctcctaaaaagcctccacgcccttactacttctgagtaagcttggaggcggaggcg

SEQ ID NO: 57841 - DNA, 80 bp, synthetic construct
  source 1..80: mol_type = other DNA
agctcatacctagggagccaaccagctgacagccagagggagccctggctgcatgccactggcagttatagtgaaacccc

SEQ ID NO: 57842 - DNA, 80 bp, synthetic construct
  source 1..80: mol_type = other DNA
ccaataaacacaagaggaagtggaaactggccaaaggagtggaaagcagccagacagacatgttttgcaagcctaggaat

SEQ ID NO: 57843 - DNA, 80 bp, synthetic construct
  source 1..80: mol_type = other DNA
tttagctttttgcagcaaaaaattactgcaaaaaagggaaaaacaagggaatttccctggcctcctaaaaagcctccacg

SEQ ID NO: 57844 - DNA, 80 bp, synthetic construct
  source 1..80: mol_type = other DNA
atgttcccccatgcagacctatcaaggcctaataaatccataagctccatggattcctccctattcagcactttgtccat

SEQ ID NO: 57845 - DNA, 80 bp, synthetic construct
  source 1..80: mol_type = other DNA
gcctcggcctcctgtatatataaaaaaaagggaaggtagggaggagctggctggctgccagccaagcatgagctcatacc

SEQ ID NO: 57846 - DNA, 80 bp, synthetic construct
  source 1..80: mol_type = other DNA
cttaatcacaagtaaacaaagcacaaggggaagtggaaagcagccaggggaacatgttttgcgagccagagctgttttgg

SEQ ID NO: 57847 - DNA, 80 bp, synthetic construct
  source 1..80: mol_type = other DNA
tagggagccaaccagctgacagccagagggagccctggctgcatgccactggcagttatagtgaaacccctcccatagtc

SEQ ID NO: 57848 - DNA, 80 bp, synthetic construct
  source 1..80: mol_type = other DNA
gagctcatacctagggagccaaccagctgacagccagagggaacaaagcacaaggggaagtggaaagcagccagtggaac

SEQ ID NO: 57849 - DNA, 80 bp, synthetic construct
  source 1..80: mol_type = other DNA
agctcatacctagggagccaaccagctgacagccagagaatagtccttaatcacaagggagccaaccagctgacagccag

SEQ ID NO: 57850 - DNA, 80 bp, synthetic construct
  source 1..80: mol_type = other DNA
tggctgccagccaagcatgagctcataatcacaagtaaacaaagcacaaggggaagtggaaagcagccaagggaacatgt

SEQ ID NO: 57851 - DNA, 80 bp, synthetic construct
  source 1..80: mol_type = other DNA
ggctgccagccaagcatgagctcataatcacaagtaaacaaagcacaaggggaagtggggaggagctggctaaaactgga

SEQ ID NO: 57852 - DNA, 80 bp, synthetic construct
  source 1..80: mol_type = other DNA
tcgaaggaatttaatcagaaaaatatcagaacgctagatgaatgggaaagtggaagaaatccatatgaaccgtcagaagt

SEQ ID NO: 57853 - DNA, 80 bp, synthetic construct
  source 1..80: mol_type = other DNA
ggctgccagccaagcatgagctcatacctagggagccaaccagctgacagccagagggagccctggctgcatgccactgg

SEQ ID NO: 57854 - DNA, 80 bp, synthetic construct
  source 1..80: mol_type = other DNA
agttatagtgaaacccctcccatagtccttaatcacaagtaaacaaagcacaaggggaagtggaaagcagccaagggaac

SEQ ID NO: 57855 - DNA, 80 bp, synthetic construct
  source 1..80: mol_type = other DNA
cagttatagtgaaacccctcccatagtccttggaaagcagccaagggaacatgtagtccttggaaagcagccaagggaac

SEQ ID NO: 57856 - DNA, 80 bp, synthetic construct
  source 1..80: mol_type = other DNA
aaagcacaaggggaagtggaaagcagccagggtaacatgttttgcgagccagagctgttttggcttgtcaccagctggcc

SEQ ID NO: 57857 - DNA, 80 bp, synthetic construct
  source 1..80: mol_type = other DNA
tcccatagtccttaatcacaagtaaacaaagcacaaggggaagtggaaagcagccaggggaacatgttttgcgagccaga

SEQ ID NO: 57858 - DNA, 80 bp, synthetic construct
  source 1..80: mol_type = other DNA
ttgggactttccaaatgctaactgaacacattccacagcgctggttctttccgcctcagaaggtaccctaaccagttcct

SEQ ID NO: 57859 - DNA, 80 bp, synthetic construct
  source 1..80: mol_type = other DNA
agatacattgatgagtttggacaaaccacaacacgaatgcagtgaacagcatgctttatttgtgcttaagcaatacaagt

SEQ ID NO: 57860 - DNA, 80 bp, synthetic construct
  source 1..80: mol_type = other DNA
gtaatgttttttattatgcaataaaacagttaaaacaacaagcatttcattttatgtgtcagggggtgggggaggttttt

SEQ ID NO: 57861 - DNA, 80 bp, synthetic construct
  source 1..80: mol_type = other DNA
aagattcgggggactgaaatgtgcgttgtgattgtgagtcaacgcctgtttcatgccctgagtcttctaggttgtcattc

SEQ ID NO: 57862 - DNA, 80 bp, synthetic construct
  source 1..80: mol_type = other DNA
cccgcctgtttttcctgcacattttcctcctcagcatcatcttcagaatctctaagccaatctagcacacctgttcccat

SEQ ID NO: 57863 - DNA, 80 bp, synthetic construct
  source 1..80: mol_type = other DNA
accaacattaaacttcattttttgatatatagacatactaaattccttgtcaagcctttctttccactccacaattctgc

SEQ ID NO: 57864 - DNA, 80 bp, synthetic construct
  source 1..80: mol_type = other DNA
ctgcaaggtttttggcatatggtactcattcatggttactattccaggagggaaaatttgtgttctcttatttaggtgtt

SEQ ID NO: 57865 - DNA, 80 bp, synthetic construct
  source 1..80: mol_type = other DNA
acctaaaaggtccattaattgcagggattcttctctgcttaaaactttatccatttttgcaaaaagctaggcctccaaaa

SEQ ID NO: 57866 - DNA, 80 bp, synthetic construct
  source 1..80: mol_type = other DNA
gcctaacaacttctgaagcaatagctgctataggcctcactccacaagcctatgctgtgatctctggggctcctgctgct

SEQ ID NO: 57867 - DNA, 80 bp, synthetic construct
  source 1..80: mol_type = other DNA
gagctgggaggagtttgggcggagtttgggcgagacacggttgagtaactcatttgcatgcatgcttcacatacttgcgg

SEQ ID NO: 57868 - DNA, 80 bp, synthetic construct
  source 1..80: mol_type = other DNA
atatttccccaggcacttctttctagacctaaaaggtccattaattgcagggattcttctctgcttaaaactttatccat

SEQ ID NO: 57869 - DNA, 80 bp, synthetic construct
  source 1..80: mol_type = other DNA
ctttatccatttttgcaaaaaattgcaaaagagtagggatttccccaaatagttttgctaggcccttactacttgagaga

SEQ ID NO: 57870 - DNA, 80 bp, synthetic construct
  source 1..80: mol_type = other DNA
aaattgcaaaagagtagggatttccccaaatagttttgctaggcccttactacttgagagaaagggtggaggcagaggcg

SEQ ID NO: 57871 - DNA, 80 bp, synthetic construct
  source 1..80: mol_type = other DNA
gagccaaccagctgacagccttaatcacaagtaaacaaagcacaaaagtggaaagcagccaagggaacatgttttgcgag

SEQ ID NO: 57872 - DNA, 80 bp, synthetic construct
  source 1..80: mol_type = other DNA
agctcatacctagggagccaaccagctgacagccttaatcacaagtaaacaaagcacaaaagcatgagctcatacctagg

SEQ ID NO: 57873 - DNA, 80 bp, synthetic construct
  source 1..80: mol_type = other DNA
cccagttaaactggacaaaggccatggttctgcgccagctgtcacggaaagttagtaaaacctggactggaacaaaaaaa

SEQ ID NO: 57874 - DNA, 80 bp, synthetic construct
  source 1..80: mol_type = other DNA
ccctggcctcctaaaaagcctccacgcccttactacttctgagtaagcttggaggcggaggcggcctcggcctcctgtat

SEQ ID NO: 57875 - DNA, 80 bp, synthetic construct
  source 1..80: mol_type = other DNA
caaccagctaacagccagagggagcctgccactggcagttacaagtaaacaaagcacaaggggaagtggaaagcagccag

SEQ ID NO: 57876 - DNA, 80 bp, synthetic construct
  source 1..80: mol_type = other DNA
atgacagtgtccatttgaggcagcaaacaatgaatccaggccaccccagccatatattgctctaaaacagcattgccatg

SEQ ID NO: 57877 - DNA, 80 bp, synthetic construct
  source 1..80: mol_type = other DNA
tcattaaatgtattccaccaggattcccactcatctgttccataggttggcacctacaaaaaaaaaattaagtttattgt

SEQ ID NO: 57878 - DNA, 80 bp, synthetic construct
  source 1..80: mol_type = other DNA
gaaacccctcccatagtccttaatcacaagtaaacaaagcacaaggggaagtggaaagcagccaagggaacatgttttgc

SEQ ID NO: 57879 - DNA, 80 bp, synthetic construct
  source 1..80: mol_type = other DNA
caagcatgagctcatacctagggagccaaccagctgacagccagagggagccctggctgcatgccactggtagttatagt

SEQ ID NO: 57880 - DNA, 80 bp, synthetic construct
  source 1..80: mol_type = other DNA
ggggtagatgctataacagaggtagaatgcttcctaaacccagaagaccaagtctctgctaccgtaattaggggctatag

SEQ ID NO: 57881 - DNA, 80 bp, synthetic construct
  source 1..80: mol_type = other DNA
ggctgccagccaagcatgagctcatacctagggagccaaccagctgacagccagaggtcacaagtaaactggctgccagc

SEQ ID NO: 57882 - DNA, 80 bp, synthetic construct
  source 1..80: mol_type = other DNA
gcctcggcctctgcataaataaaaaaaattagtcagccatggagcggagaatgggcggaactgggcggagttaggtgcgg

SEQ ID NO: 57883 - DNA, 80 bp, synthetic construct
  source 1..80: mol_type = other DNA
ttgaaagaagaacccaaagatatttaagggacagtttggcaaggtttttagaggaaactacttggacagtaattaatgct

SEQ ID NO: 57884 - DNA, 80 bp, synthetic construct
  source 1..80: mol_type = other DNA
cctgttaattggtataactctttacaagattactactctactttgtctcccattaggcctacaatggtgagacaagtagc

SEQ ID NO: 57885 - DNA, 80 bp, synthetic construct
  source 1..80: mol_type = other DNA
caacagggaagggttgcaaatatcatttgggcacacctatgataatattgatgaagcagacagtattcagcaagtaactg

SEQ ID NO: 57886 - DNA, 80 bp, synthetic construct
  source 1..80: mol_type = other DNA
agaggtgggaagctcaaagccaaagtcctaatgtgcagtcaggtgaatttattgaaaaatttgaggctcctggtggtgca

SEQ ID NO: 57887 - DNA, 80 bp, synthetic construct
  source 1..80: mol_type = other DNA
aatcaaagaactgctcctcagtggatgttgcctttacttctaggcctgtacggaagtgttacttctgctctaaaagctta

SEQ ID NO: 57888 - DNA, 80 bp, synthetic construct
  source 1..80: mol_type = other DNA
ggagtagacagcttcactgaggtggagtgctttttaaatcctcaaatgggcaatcctgatgaacatcaaaaaggcttaag

SEQ ID NO: 57889 - DNA, 80 bp, synthetic construct
  source 1..80: mol_type = other DNA
actgacacacattccacagctggttctttccgcctcagaaggtacctaaccaagttcctctttcagaggttatttcaggc

SEQ ID NO: 57890 - DNA, 80 bp, synthetic construct
  source 1..80: mol_type = other DNA
taaaagcttagcagctgaaaaacagtttacaaatgactctccagacaaagaccaactgccttgctacagtgtggctagaa

SEQ ID NO: 57891 - DNA, 80 bp, synthetic construct
  source 1..80: mol_type = other DNA
ttcctttgcctaatttaaatgaggacttaacctgtggaaatattttgatgtgggaagctgttactgttaaaactgaggtt

SEQ ID NO: 57892 - DNA, 80 bp, synthetic construct
  source 1..80: mol_type = other DNA
attggggtaactgctatgttaaacttgcattcagggacacaaaaaactcatgaaaatggtgctggaaaacccatacaagg

SEQ ID NO: 57893 - DNA, 80 bp, synthetic construct
  source 1..80: mol_type = other DNA
gtcaaactttcagttttttgctgttggtggggaacctttggagctgcagggtgtgttagcaaactacaggaccaaatatc

SEQ ID NO: 57894 - DNA, 80 bp, synthetic construct
  source 1..80: mol_type = other DNA
ctgctcaaactgtaaccccaaaaaatgctacagttgacagtcagcagatgaacactgaccacaaggctgttttggataag

SEQ ID NO: 57895 - DNA, 80 bp, synthetic construct
  source 1..80: mol_type = other DNA
gtggggaaaatgtgcctcctgttttgcacattactaacacagcaaccacagtgctgcttgatgagcagggtgttgggccc

SEQ ID NO: 57896 - DNA, 80 bp, synthetic construct
  source 1..80: mol_type = other DNA
ttgtgcaaagctgacagcttgtatgtttctgctgttgacatttgtgggctgtttaccaacacttctggaacacagcagtg

SEQ ID NO: 57897 - DNA, 80 bp, synthetic construct
  source 1..80: mol_type = other DNA
aagggacttcccagatattttaaaattacccttagaaagaggtctgtgaaaaacccctacccaatttcctttttgttaag

SEQ ID NO: 57898 - DNA, 80 bp, synthetic construct
  source 1..80: mol_type = other DNA
gattggaatgtcctctcaagtagaggaggttagggtttatgaggacacagaggagcttcctggggatccagacatgataa

SEQ ID NO: 57899 - DNA, 80 bp, synthetic construct
  source 1..80: mol_type = other DNA
catggtgctgcgccggctgtcacgccaggcctccgttaaggttcgtaggtcatggactgaaagtaaaaaaacagctcaac

SEQ ID NO: 57900 - DNA, 80 bp, synthetic construct
  source 1..80: mol_type = other DNA
gctttatttgtaaccattataagctgcaataaacaagttaacaacaacaattgcattcattttatgtttcaggttcaggg

SEQ ID NO: 57901 - DNA, 80 bp, synthetic construct
  source 1..80: mol_type = other DNA
ggaggtgtgggaggttttttaaagcaagtaaaacctctacagatgtgatatggctgattatgatcatgaacagactgtga

SEQ ID NO: 57902 - DNA, 80 bp, synthetic construct
  source 1..80: mol_type = other DNA
ggactgtgagggctgaggggcctgaaatgagccttgagactgtgaatcaatgcctgtttcatgccctgagtcttccatgt

SEQ ID NO: 57903 - DNA, 80 bp, synthetic construct
  source 1..80: mol_type = other DNA
tcttctccccaccatcttcgtcatcatcatcatcatcactgtttcttagccaatctaaaactccaactcccatagccaca

SEQ ID NO: 57904 - DNA, 80 bp, synthetic construct
  source 1..80: mol_type = other DNA
ttaaacttcattttttgatacactgacaaactaaactctttgtccaatctctctttccactccacaattctgctctgaat

SEQ ID NO: 57905 - DNA, 80 bp, synthetic construct
  source 1..80: mol_type = other DNA
actttgagcaaactcagccacaggtctgtaccaaattaacataagaagcaaagcaatgccactttgaattatcctctttt

SEQ ID NO: 57906 - DNA, 80 bp, synthetic construct
  source 1..80: mol_type = other DNA
ctaacaaaaactcactgcgttccaggcaatgctttaaataatctttgggcctaaaatctatttgttttacaaatctggcc

SEQ ID NO: 57907 - DNA, 80 bp, synthetic construct
  source 1..80: mol_type = other DNA
gcctttttgtgtttgttttagagcttttgctgcaattttgtgaaggggaagatactgttgacgggaaacgcaaaaaacca

SEQ ID NO: 57908 - DNA, 80 bp, synthetic construct
  source 1..80: mol_type = other DNA
ccaggttattaattccctgacctgaaggcaaatctctggactcccctccagtgccctttacatcctcaaaaactactaaa

SEQ ID NO: 57909 - DNA, 80 bp, synthetic construct
  source 1..80: mol_type = other DNA
aactggtcaatagctactcctagctcaaagttcagcctgtccaagggcaaattaacatttaaagctttccccccacataa

SEQ ID NO: 57910 - DNA, 80 bp, synthetic construct
  source 1..80: mol_type = other DNA
ttcaagcaaagcagctgctaatgtagttttaccactatcaattggtcctttaaacagccagtatctttttttaggaatgt

SEQ ID NO: 57911 - DNA, 80 bp, synthetic construct
  source 1..80: mol_type = other DNA
tgtacaccatgcattttaaaaagtcatacaccactgaatccattttgggcaacaaacagtgtagccaagcaactccagcc

SEQ ID NO: 57912 - DNA, 80 bp, synthetic construct
  source 1..80: mol_type = other DNA
atccattcttctatgtcagcagagcctgtagaaccaaacattatatccatcctatccaaaagatcattaaatctgtttgt

SEQ ID NO: 57913 - DNA, 80 bp, synthetic construct
  source 1..80: mol_type = other DNA
taacatttgttctctagttagttgtaggctatcaacccgctttttagctaaaacagtatcaacagcctgttggcatatgg

SEQ ID NO: 57914 - DNA, 80 bp, synthetic construct
  source 1..80: mol_type = other DNA
ttttttggtttttgctgtcagcaaatatagcagcatttgcataatgcttttcatggtacttatagtggctgggctgttct

SEQ ID NO: 57915 - DNA, 80 bp, synthetic construct
  source 1..80: mol_type = other DNA
ttaatacattttaaacacatttcaaaactgtactgaaattccaagtacatcccaagcaataacaacacatcatcacattt

SEQ ID NO: 57916 - DNA, 80 bp, synthetic construct
  source 1..80: mol_type = other DNA
tgtttccattgcatactctgttacaagcttccaggacacttgtttagtttcctctgcttcttctggattaaaatcatgct

SEQ ID NO: 57917 - DNA, 80 bp, synthetic construct
  source 1..80: mol_type = other DNA
cctttaacccaccaggcaaactttcctcaataacagaaaatggatctctagttaaggcactatacatcaaatattcctta

SEQ ID NO: 57918 - DNA, 80 bp, synthetic construct
  source 1..80: mol_type = other DNA
gaaaggttaactgaaaaaccagaaagttaactggtaagtttagtctttttgtcttttatttcaggtccatgggtgctgct

SEQ ID NO: 57919 - DNA, 80 bp, synthetic construct
  source 1..80: mol_type = other DNA
aacagtatgttatgattataactgttatgcctacttataaaggttacagaatatttttccataatttttttgtatagcag

SEQ ID NO: 57920 - DNA, 80 bp, synthetic construct
  source 1..80: mol_type = other DNA
tgcagctttttcctttgtggtgtaaatagcaaagcaagcaagagttctattactaaacacagcatgactcaaaaaactta

SEQ ID NO: 57921 - DNA, 80 bp, synthetic construct
  source 1..80: mol_type = other DNA
gcaattctgaaggaaagtccttggggtcttctacctttctcttctttttgggaggagtagaatgttgagagtcagcagta

SEQ ID NO: 57922 - DNA, 80 bp, synthetic construct
  source 1..80: mol_type = other DNA
gcctcatcatcactagatggcatttcttctgagcaaaacaggttttcctcattaaaggcattccaccactgctcccattc

SEQ ID NO: 57923 - DNA, 80 bp, synthetic construct
  source 1..80: mol_type = other DNA
atcagttccataggttggaatctaaaatacacaaacaattagaatcagtagtttaacacattatacacttaaaaatttta

SEQ ID NO: 57924 - DNA, 80 bp, synthetic construct
  source 1..80: mol_type = other DNA
tatttaccttatagctttaaatctctgtaggtagtttgtccaattatgtcacaccacagaagtaaggttccttcacaaag

SEQ ID NO: 57925 - DNA, 80 bp, synthetic construct
  source 1..80: mol_type = other DNA
atcaagtccaaaccacattctaaagcaatcgaagcagtagcaatcaacccacacaagtggatctttcctgtataattttc

SEQ ID NO: 57926 - DNA, 80 bp, synthetic construct
  source 1..80: mol_type = other DNA
tattttcatgcttcatcctcagtaagcacagcaagcatatgcagttagtagacattttttttgcacactcaggccattgt

SEQ ID NO: 57927 - DNA, 80 bp, synthetic construct
  source 1..80: mol_type = other DNA
ttgcagtatattgcatcaacaccaggatttaaggaagaagcaaatacctcagttgcatcccagaagcctccaaagtcagg

SEQ ID NO: 57928 - DNA, 80 bp, synthetic construct
  source 1..80: mol_type = other DNA
ttaacactgttgggggacctaattgctactgtgtctgaagctgctgctgctactggattttcagtagctgaaattgctgc

SEQ ID NO: 57929 - DNA, 80 bp, synthetic construct
  source 1..80: mol_type = other DNA
ttgatgagcatattttactccatcttccattttcttgtacagagtattcattttcttcattttttcttcatctcctcctt

SEQ ID NO: 57930 - DNA, 80 bp, synthetic construct
  source 1..80: mol_type = other DNA
tatcaggatgaaactccttgcatttttttaaatatgcctttctcatcagaggaatattcccccaggcactcctttcaaga

SEQ ID NO: 57931 - DNA, 80 bp, synthetic construct
  source 1..80: mol_type = other DNA
cctagaaggtccattagctgcaaagattcctctctgtttaaaactttatccatatttgcaaagctttttgcaaaagccta

SEQ ID NO: 57932 - DNA, 80 bp, synthetic construct
  source 1..80: mol_type = other DNA
atttgcaaagctttttgcaaaagcctaggcctccaaaaaagcctcttcactacttctggaatagctcagaggccgaggcg

SEQ ID NO: 57933 - DNA, 80 bp, synthetic construct
  source 1..80: mol_type = other DNA
ataggcctcactccacaggcctatgctgtgatatctggggctcctgctgctatagctggatttgcagctttactgcaaac

SEQ ID NO: 57934 - DNA, 80 bp, synthetic construct
  source 1..80: mol_type = other DNA
tgtgactggtgtgagcgctgttgctcaagtggggtatagattttttagtgactgggatcacaaagtttctactgttggtt

SEQ ID NO: 57935 - DNA, 80 bp, synthetic construct
  source 1..80: mol_type = other DNA
gactatggttgctgactaattgagatgcatgctttgcatacttctgcctgctggggagcctggggactttccacacccta

SEQ ID NO: 57936 - DNA, 80 bp, synthetic construct
  source 1..80: mol_type = other DNA
tatatcaacaaccaggaatggctgtagatttgtataggccagatgattattatgatattttatttcctggagtacaaacc

SEQ ID NO: 57937 - DNA, 80 bp, synthetic construct
  source 1..80: mol_type = other DNA
gggtccaacactttttaatgccatttctcaagctttttggcgtgtaatacaaaacattcctaggctcacctcacaggagc

SEQ ID NO: 57938 - DNA, 80 bp, synthetic construct
  source 1..80: mol_type = other DNA
gattttctgaatcaggggctgaagtatctgagacttgggaagagcattgtgattgggattcagtgcttgatccatgtcca

SEQ ID NO: 57939 - DNA, 80 bp, synthetic construct
  source 1..80: mol_type = other DNA
tcccatagtccttaatcatagtccttaatcacaagtaaacaaagcacaaggggaagtggaaagcagccaggggaacatgt

SEQ ID NO: 57940 - DNA, 80 bp, synthetic construct
  source 1..80: mol_type = other DNA
cgactctgtgtacactgacgtggctagcgagacatcaatcagcagcgacgacccaggtaggcattaatacattagccttt

SEQ ID NO: 57941 - DNA, 80 bp, synthetic construct
  source 1..80: mol_type = other DNA
gccagtgcatgactcatgcttacccatggaatgcagccaaaccaggaaggaaagtgcatgactcatcgaatgcagccaaa

SEQ ID NO: 57942 - DNA, 80 bp, synthetic construct
  source 1..80: mol_type = other DNA
ccaggaagtaaagtgcatgacttggcaggcagccagtggcagttaatcaaataaacacaagagccaaaggagtggaaagc

SEQ ID NO: 57943 - DNA, 80 bp, synthetic construct
  source 1..80: mol_type = other DNA
agctcatacctagggagccaaccagctgacagccagaggccaaccagctgacagccagagggagccctggctgcatgcca

SEQ ID NO: 57944 - DNA, 80 bp, synthetic construct
  source 1..80: mol_type = other DNA
tcacatataaaataataaatattcacgaggaggagtggctatcaatggggtgatcataaacacgcccaggaagtgacgta

SEQ ID NO: 57945 - DNA, 80 bp, synthetic construct
  source 1..80: mol_type = other DNA
aaagagtaggcccagctacttcagacacaggatcatggatggttgcagttagaccagaaaacgcaagcattgacacagga

SEQ ID NO: 57946 - DNA, 80 bp, synthetic construct
  source 1..80: mol_type = other DNA
atgtctggaattggaagcggatttgatccaccacaaggctcactagcaccaacaaacctagaatacaaaattcaatggta

SEQ ID NO: 57947 - DNA, 80 bp, synthetic construct
  source 1..80: mol_type = other DNA
atggacaagtggaaaaaaaagggtgactgtaatcccgagctcatgagttcgaggctacagtccgatggcagtggtgttgc

SEQ ID NO: 57948 - DNA, 80 bp, synthetic construct
  source 1..80: mol_type = other DNA
tcccatagtccttaatcacaagtaaacaaagcacaaggggaagtggaaagcagccggagaagtggaaagcagccaaggga

SEQ ID NO: 57949 - DNA, 80 bp, synthetic construct
  source 1..80: mol_type = other DNA
aataaatattcacaaggaggagtggttatatgatgtaatccataaccactcccaggaaatgacgtatgatagccaatcag

SEQ ID NO: 57950 - DNA, 80 bp, synthetic construct
  source 1..80: mol_type = other DNA
atggccccaaccaaaagaaaaggagagtgtccaggggcagctcccaaaaagccaaaggaacccgtgcaagtgccaaaact

SEQ ID NO: 57951 - DNA, 80 bp, synthetic construct
  source 1..80: mol_type = other DNA
ggggtagatgctataacagaggtagaatgcttcctaaacccagaaatggaggatccagatgaaaaccttaggggctttag

SEQ ID NO: 57952 - DNA, 80 bp, synthetic construct
  source 1..80: mol_type = other DNA
aaggaaagtgcatgactgggcagccagccagtggcagttaatagtgaaaccccgcccctaaaattctcaaataaacacaa

SEQ ID NO: 57953 - DNA, 80 bp, synthetic construct
  source 1..80: mol_type = other DNA
aggggaaaatgttcccccagtacttcatgtgaccaacacagctaccacagtgttgctagatgaacagggtgtgtggcctc

SEQ ID NO: 57954 - DNA, 80 bp, synthetic construct
  source 1..80: mol_type = other DNA
tttgtaaagctgatagcctgtatgtttcagctgctgatatttgtggcctgtttactaacagctctggaacacaacagtgg

SEQ ID NO: 57955 - DNA, 80 bp, synthetic construct
  source 1..80: mol_type = other DNA
cttccaggggacccagatatgataagatatattgataaacaaggacaattgcaaaccaaaatgctttaaacaggtgcttt

SEQ ID NO: 57956 - DNA, 80 bp, synthetic construct
  source 1..80: mol_type = other DNA
attttgggggtggtgttttaggccttttaaaacattgaaagcctttacacaaatgcaactcttgactatggtggtctaac

SEQ ID NO: 57957 - DNA, 80 bp, synthetic construct
  source 1..80: mol_type = other DNA
gaggaagtggaaactggccaaaggagtggaaagcagccagacagacatgttttgcgagcctaggaatcttggccttgtcc

SEQ ID NO: 57958 - DNA, 80 bp, synthetic construct
  source 1..80: mol_type = other DNA
ctttgggaatcttcagcaggggctgaagtatctgagacttgggaagagcattgtgattgggattcagtgcttgatccatg

SEQ ID NO: 57959 - DNA, 80 bp, synthetic construct
  source 1..80: mol_type = other DNA
tttgggggacctagttgccagtgtatctgaggctgctgctgccacaggattttcagtggctgaaattgctgctggtgagg

SEQ ID NO: 57960 - DNA, 80 bp, synthetic construct
  source 1..80: mol_type = other DNA
gagagaaagggtggaggcagaggcggcctcggcctcttatatattataaaaaaaaaggccacagggaggagctgctaacc

SEQ ID NO: 57961 - DNA, 80 bp, synthetic construct
  source 1..80: mol_type = other DNA
ctcctggggctattgctgggtttgctgctttaattcaaactgttactggtattagttccttggctcaagtagggtatagg

SEQ ID NO: 57962 - DNA, 80 bp, synthetic construct
  source 1..80: mol_type = other DNA
cagttatagtgaaacccctcccatagtccttaatcacaagtaaacaaagcacaaggggttggcttgtcaccagctggcca

SEQ ID NO: 57963 - DNA, 80 bp, synthetic construct
  source 1..80: mol_type = other DNA
tggttcttcgccagctgtcacgcaagtaaacaaagcacaaggggttggcttgtcaccagctggccatggttcttcgccag

SEQ ID NO: 57964 - DNA, 80 bp, synthetic construct
  source 1..80: mol_type = other DNA
tcctataatttactattatctaaagataaattagttaccttaaagctttagatctctgaagggagtctctccaattattt

SEQ ID NO: 57965 - DNA, 80 bp, synthetic construct
  source 1..80: mol_type = other DNA
ctttatccatttttgcaaaaaattgcaaaagaatagggatttccccaaatagttttgctaggcctcagaaaaagcctcca

SEQ ID NO: 57966 - DNA, 80 bp, synthetic construct
  source 1..80: mol_type = other DNA
tttccccaaatagttttgctaggcctcagaaaaagcctccacacccttactacttgagagaaagggtggaggcagaggcg

SEQ ID NO: 57967 - DNA, 80 bp, synthetic construct
  source 1..80: mol_type = other DNA
ttcttatcttcatttttatcagcattttcctggctgtcatcatcatcatcatcactgtttcttagccaatctaaaactcc

SEQ ID NO: 57968 - DNA, 80 bp, synthetic construct
  source 1..80: mol_type = other DNA
aactcccatagccacattaaacttcattttttgatacactgacaaactaaactctttgtccaatctctctttccactcca

SEQ ID NO: 57969 - DNA, 80 bp, synthetic construct
  source 1..80: mol_type = other DNA
ccatggttcttcgccagctgtggatggctgccagccaagcatgagctcatacctagggagccaaccagctaacaagtaaa

SEQ ID NO: 57970 - DNA, 80 bp, synthetic construct
  source 1..80: mol_type = other DNA
tataaaataataaatattcacaaggaggagtggctacgtatggggtgatcataaacacgcccaggaagtgacgtatgtca

SEQ ID NO: 57971 - DNA, 80 bp, synthetic construct
  source 1..80: mol_type = other DNA
aacatccaatatataaggaatttaagatgagtatgcctgtacctgagcgcagactctttgaagattcagttagattcaat

SEQ ID NO: 57972 - DNA, 80 bp, synthetic construct
  source 1..80: mol_type = other DNA
gaaaaatgatggatataggtgataaagcaagtgagtatgaagaattctgtgtttctctaaaaaataaggcaagatcatct

SEQ ID NO: 57973 - DNA, 80 bp, synthetic construct
  source 1..80: mol_type = other DNA
aaagatgatagctccttcgaggatgtcaatggcattcggaagcccaaacatctatatgtgtctttgcctaatgcacagtc

SEQ ID NO: 57974 - DNA, 80 bp, synthetic construct
  source 1..80: mol_type = other DNA
atatgggtgtttgccggggcaccagatcgctgtccaccaacatgtcttttcattgcaggtattgctgagcctggggcaaa

SEQ ID NO: 57975 - DNA, 80 bp, synthetic construct
  source 1..80: mol_type = other DNA
gttatgaacattgaagataacggccacctagtacctagaatgcatacctgcagagcttcatgcgatataaggttaaacaa

SEQ ID NO: 57976 - DNA, 80 bp, synthetic construct
  source 1..80: mol_type = other DNA
tcaaaaatactataaatctgcccttagagcacacatgtgaacatataactgtgaattgcggacaaaaatcattgagattc

SEQ ID NO: 57977 - DNA, 80 bp, synthetic construct
  source 1..80: mol_type = other DNA
catgcttgcttcaatcaacatatgtcatgcactagattctttaaaaacacatatatgccatcaacaatgattgaacatat

SEQ ID NO: 57978 - DNA, 80 bp, synthetic construct
  source 1..80: mol_type = other DNA
gtgtgtaaacctagagttaataattttcacattatatatcttcaccgcattggtgtttgcatatattattacaaaaagtt

SEQ ID NO: 57979 - DNA, 80 bp, synthetic construct
  source 1..80: mol_type = other DNA
atatagcatatatccttctgccattattttatccattaacttatgtatttggtataatatactcaaaattgaagcagtgc

SEQ ID NO: 57980 - DNA, 80 bp, synthetic construct
  source 1..80: mol_type = other DNA
ttaacttatgtatttggtataatatactcaaaattgaagcagtgcaagacatgcatgcttgcttcattcaacatatgtca

SEQ ID NO: 57981 - DNA, 80 bp, synthetic construct
  source 1..80: mol_type = other DNA
aaatgacgctgaaatcattttatcatcgcagaaaaccaatcattatgaaataattggaaccaccactgtcagtggttggt

SEQ ID NO: 57982 - DNA, 80 bp, synthetic construct
  source 1..80: mol_type = other DNA
gaggcgctctgtgtgcagctcaacagcctgctggcaaatgcttttttgatttttgctatctgcaaaaatttgggcattat

SEQ ID NO: 57983 - DNA, 80 bp, synthetic construct
  source 1..80: mol_type = other DNA
ctaacatttcttctctggtcatgtggatgctgtcaaccctttgtttggctgctacagtatcatatgtagtactctgatgg

SEQ ID NO: 57984 - DNA, 80 bp, synthetic construct
  source 1..80: mol_type = other DNA
aatagtgtttttcatgatggttaaagtgatttggctgatcctttttttcacattttttgcattgctgtgggttttcctga

SEQ ID NO: 57985 - DNA, 80 bp, synthetic construct
  source 1..80: mol_type = other DNA
ggaaagcagccaggggaacatgttttgcgagccagagctgttttggcttgtcaccagctggccatggttcttcgccagct

SEQ ID NO: 57986 - DNA, 80 bp, synthetic construct
  source 1..80: mol_type = other DNA
caagcatgactgggcagccagccagtggcagttaatagtgaaaccaagaggaagtggaaactggccaaaggagtggaaag

SEQ ID NO: 57987 - DNA, 80 bp, synthetic construct
  source 1..80: mol_type = other DNA
cttggttcataggcggtacaggcctggtgcaaggcagccccagtgaagagaccaccaaattagtgtttgaaatggaggga

SEQ ID NO: 57988 - DNA, 80 bp, synthetic construct
  source 1..80: mol_type = other DNA
tcttgtcagaatatttatcatttgtttacaattcacaatctgcagttcaaataccaatttactattcttctaattcagaa

SEQ ID NO: 57989 - DNA, 80 bp, synthetic construct
  source 1..80: mol_type = other DNA
tcttgtcagaatatttatcgtttatatacaattcacaatctgcagttcaaattccgatttattattcttccaacagtgaa

SEQ ID NO: 57990 - DNA, 80 bp, synthetic construct
  source 1..80: mol_type = other DNA
tgaaaatgatactgctgaaagatttaaaatttataaaagaagattagacctatttaccatagttgcatcaacggtgaaca

SEQ ID NO: 57991 - DNA, 80 bp, synthetic construct
  source 1..80: mol_type = other DNA
aaggaaagtgcatgactgggcagccagccagtggcactgggcagccagccagtggcagttaatagtgaaaccccgcccct

SEQ ID NO: 57992 - DNA, 80 bp, synthetic construct
  source 1..80: mol_type = other DNA
ctggcgaagcaaagcacaaggggaagtggaaagcagccaagggaacatgttttgcgtcaccagctggccatggttcttcg

SEQ ID NO: 57993 - DNA, 80 bp, synthetic construct
  source 1..80: mol_type = other DNA
taagcactcctcccaccagacaacgcctagttgtttggtgggaggagtgcttaatgcaccaggattgggtggaacctgca

SEQ ID NO: 57994 - DNA, 80 bp, synthetic construct
  source 1..80: mol_type = other DNA
aaggccacagggaggagctgctaacccatggaatgtagccaaaccatgacctcaggaaggaaagtgcatgactgggcagc

SEQ ID NO: 57995 - DNA, 80 bp, synthetic construct
  source 1..80: mol_type = other DNA
accagctgacagccagagggagccctggctgcctgccactggcagttatagtgaaacccctccgggaagtggaaagcagc

SEQ ID NO: 57996 - DNA, 80 bp, synthetic construct
  source 1..80: mol_type = other DNA
caagggaacatgttttgcgagccagagctgttttggcatagtccttaatcacaagtaaacaaagcacaagtgtcaccagc

SEQ ID NO: 57997 - DNA, 80 bp, synthetic construct
  source 1..80: mol_type = other DNA
gtagggaggagctggctaaaactggatggctgccagccaagcatgagctcatacctagggagccaaccagctgacaatca

SEQ ID NO: 57998 - DNA, 80 bp, synthetic construct
  source 1..80: mol_type = other DNA
tcttacattattcgttaacacagttttgaatgttgtgatcgcctgcagagtactagaggaaagacttaagatgtcgagat

SEQ ID NO: 57999 - DNA, 80 bp, synthetic construct
  source 1..80: mol_type = other DNA
aaagattatttaagcttggtaaaccgctaccagccgacgacgagcaagacgaagatagaaggcgagctttattggacgaa

SEQ ID NO: 58000 - DNA, 80 bp, synthetic construct
  source 1..80: mol_type = other DNA
acaaaggcgtggttcagagtgggcattactgatactttagcaactgctgtagcaactcggtacgaggtagataatatcac

SEQ ID NO: 58001 - DNA, 80 bp, synthetic construct
  source 1..80: mol_type = other DNA
gcgcggcgtttatcggcgacgataatattatacacggggtagtgtctgataaggtgatggcagagaggtgcgccacctgg

SEQ ID NO: 58002 - DNA, 80 bp, synthetic construct
  source 1..80: mol_type = other DNA
gcctcggcctcctgtatatataaaaaaaagggaaggtagggaggagctggctaaaacaaagcacaaactggatggctgcc

SEQ ID NO: 58003 - DNA, 80 bp, synthetic construct
  source 1..80: mol_type = other DNA
actagggagccaaccagctgacagcaaacaaagcacaaactggatggctgccagccaagcatgagctcatacctagggag

SEQ ID NO: 58004 - DNA, 80 bp, synthetic construct
  source 1..80: mol_type = other DNA
ggctgccagccaagcatgagctcatacctagggagccaaccagcgagctggctaaaactggatggctgccagccaagcat

SEQ ID NO: 58005 - DNA, 80 bp, synthetic construct
  source 1..80: mol_type = other DNA
atgttttggcttgtcaccagctggccatggttcttcgccagctgtcacgtaaggcttctgtgaaagttagtaatcacaag

SEQ ID NO: 58006 - DNA, 80 bp, synthetic construct
  source 1..80: mol_type = other DNA
taaacaaagcacaatgttttggcttgtcaccagctggccatggttcttcgccagctgtcacgtaaggcttctgtgaaagt

SEQ ID NO: 58007 - DNA, 80 bp, synthetic construct
  source 1..80: mol_type = other DNA
gctgttttggcttgtcaccagctagccaggggaacatgttttgcgagccagagctgttttggcttgtcaccagctggcca

SEQ ID NO: 58008 - DNA, 80 bp, synthetic construct
  source 1..80: mol_type = other DNA
gacagccagagggagccctggctgcatgccactggcagttatagtgaaacccctcccatagtccttaatcacaagtaaac

SEQ ID NO: 58009 - DNA, 80 bp, synthetic construct
  source 1..80: mol_type = other DNA
agctcatacctagggagccaaccagctgacaggatggctgccagccaagcatgagctcatacctagggagccaaccagct

SEQ ID NO: 58010 - DNA, 80 bp, synthetic construct
  source 1..80: mol_type = other DNA
ggtagtcatgagtcgacactatcaacagcctgctggcaaatgcttttttgatttttgctatctgcaaaaatttgggcatt

SEQ ID NO: 58011 - DNA, 80 bp, synthetic construct
  source 1..80: mol_type = other DNA
ggggcaatgcactgaaggattagtggcacaattaggccattccttgcaataaagggtatcagaattaggaggaaaatcac

SEQ ID NO: 58012 - DNA, 80 bp, synthetic construct
  source 1..80: mol_type = other DNA
gcttggaggcggaggcggcctcggcctcctgtatatataaaaaaaagggaaggtagggaggagctggctaaaactggatg

SEQ ID NO: 58013 - DNA, 80 bp, synthetic construct
  source 1..80: mol_type = other DNA
gctgccagccaagcatgagctcatacctagggagccaaccagctgacagtaaacaaagcacaagggctggctaaaactgg

SEQ ID NO: 58014 - DNA, 80 bp, synthetic construct
  source 1..80: mol_type = other DNA
atggctgccagccaagcatgagctcatacctagggagccaaccagctgacagtaaacaaagcacaaggggaagtggaaag

SEQ ID NO: 58015 - DNA, 80 bp, synthetic construct
  source 1..80: mol_type = other DNA
gggcccttctttgttctccacaatctcccaggctttttggaatcttgttagagatgatttgccatctttaacatctcagg

SEQ ID NO: 58016 - DNA, 80 bp, synthetic construct
  source 1..80: mol_type = other DNA
tggggttgactcaattacagaggtagaatgctttttaactccagaaatgggtgacccagatgagcatcttaggggtttta

SEQ ID NO: 58017 - DNA, 80 bp, synthetic construct
  source 1..80: mol_type = other DNA
gtaactcaatttctatatcagatacatttcaaagtgactccccaaataaggacatgcttccttgttacagtgtggccaga

SEQ ID NO: 58018 - DNA, 80 bp, synthetic construct
  source 1..80: mol_type = other DNA
aaactgaggttataggggtgacaactttgatgaatgtgcactccaatggtcaagcagctcatgacaatggtgcaggaaag

SEQ ID NO: 58019 - DNA, 80 bp, synthetic construct
  source 1..80: mol_type = other DNA
tctgttgggggggaggctttagaattacaaggagtggtttttaattacagaacaaagtacccagatggaacaatttttcc

SEQ ID NO: 58020 - DNA, 80 bp, synthetic construct
  source 1..80: mol_type = other DNA
gaacaaagtacccagatggaacaatttttccaaagaatgcaacagtgcaatctcaagtcatgaacacagagcacaaggcg

SEQ ID NO: 58021 - DNA, 80 bp, synthetic construct
  source 1..80: mol_type = other DNA
aacttccaggggacccagacatgatgagatatgttgacagatatggacagttgcagacaaagatgctgtaatcaaaagcc

SEQ ID NO: 58022 - DNA, 80 bp, synthetic construct
  source 1..80: mol_type = other DNA
cttcacttgacagttgcagttattttgggggaggggtttttggttttttgaaacattgaaagcctttacagatgtgataa

SEQ ID NO: 58023 - DNA, 80 bp, synthetic construct
  source 1..80: mol_type = other DNA
ctaacatttcttctctggtcatatggatactgtcaaccctttgtttggctgctacagtagcgatctatgcacacggatgg

SEQ ID NO: 58024 - DNA, 80 bp, synthetic construct
  source 1..80: mol_type = other DNA
gggtagagtgttgggatcctgtgttttcatcatcactggcaaacatttcttcatggcaaaacaggtcttcatcccacttc

SEQ ID NO: 58025 - DNA, 80 bp, synthetic construct
  source 1..80: mol_type = other DNA
tagggggtgtctccaagaaccttctcccagcaatgaagagcttcttgggttaagtcacacccaaaccattgtctgaagca

SEQ ID NO: 58026 - DNA, 80 bp, synthetic construct
  source 1..80: mol_type = other DNA
tatcaacctactacatttacaccacctactgattattggatacttattaactcaaatacgaatggagtagtatacgagag

SEQ ID NO: 58027 - DNA, 80 bp, synthetic construct
  source 1..80: mol_type = other DNA
ttcttctccccaccttcttcatttttatcagcattttcctggctgtcttcatcatcatcatcattatcatcactgtttct

SEQ ID NO: 58028 - DNA, 80 bp, synthetic construct
  source 1..80: mol_type = other DNA
tagccaatctaaaactccacttcccatagccacattaaacttcattttttgatacactgacaaactaaactctttgtcca

SEQ ID NO: 58029 - DNA, 80 bp, synthetic construct
  source 1..80: mol_type = other DNA
taatatgctactttctagatgcttatgtattaactcctacaggtgacttgggggatacggacggagagaactcccagccg

SEQ ID NO: 58030 - DNA, 80 bp, synthetic construct
  source 1..80: mol_type = other DNA
gcagccaggggaacatgttttgcgagccagagctgttttggctggatggctgccagccaagcatgagctcatacctaggg

SEQ ID NO: 58031 - DNA, 80 bp, synthetic construct
  source 1..80: mol_type = other DNA
actgcggccgctatattcctcatagtgctgacgactctgtgtatactgacgtggctagcgagacatcaatcagcagctgc

SEQ ID NO: 58032 - DNA, 80 bp, synthetic construct
  source 1..80: mol_type = other DNA
gacccaggtaggcattaatacattagccttttaatatgctactttctagatgcttatgtattaactcctacaggtgactt

SEQ ID NO: 58033 - DNA, 80 bp, synthetic construct
  source 1..80: mol_type = other DNA
atggcagtggtgttgccgtctcgaacctagccgttacacccttgtgcattgtgggaggagctgttttgcttacgcaaccg

SEQ ID NO: 58034 - DNA, 80 bp, synthetic construct
  source 1..80: mol_type = other DNA
gtaatctgtgaacaaagattaacgagtgtcctttctgattttaatttcgaagagaatgcactggtaggcaagaagatgcc

SEQ ID NO: 58035 - DNA, 80 bp, synthetic construct
  source 1..80: mol_type = other DNA
gtcgttctttcattatcgcgtatcgccgcgaactggcgcgtttcgaagaactggaaaaagacccaaagaatcgggtgact

SEQ ID NO: 58036 - DNA, 80 bp, synthetic construct
  source 1..80: mol_type = other DNA
atttcgaatattcctgggttgaaacgaactggcaaaagaccttcgcggtggttgcggcagaagtcacatcttttgaaagg

SEQ ID NO: 58037 - DNA, 80 bp, synthetic construct
  source 1..80: mol_type = other DNA
aagggatttcccactttttccgtctacttcaagagttatgctgatatatcgtccttctctgtcatccgcagttgtattgt

SEQ ID NO: 58038 - DNA, 80 bp, synthetic construct
  source 1..80: mol_type = other DNA
tatatattgtgttaatacagtaccaaaattcattagcgttagatgtctcaaacttgctgatttttgtgagtggttatgta

SEQ ID NO: 58039 - DNA, 80 bp, synthetic construct
  source 1..80: mol_type = other DNA
tagatgtctcaaacttgctgatttttgtgagtggttatgtaatccgatgggacgtaaccacgagttcaaagcggaaattc

SEQ ID NO: 58040 - DNA, 80 bp, synthetic construct
  source 1..80: mol_type = other DNA
aattctgctgccgaacggaaaatactccggggagtggcttaacgttgtaagccctgatgccgacgccgccgttaaagccg

SEQ ID NO: 58041 - DNA, 80 bp, synthetic construct
  source 1..80: mol_type = other DNA
aagtttaccgacctcaactacacattgagtgtaatcactttaatgaatagcacattacatacaatactagaggatccagg

SEQ ID NO: 58042 - DNA, 80 bp, synthetic construct
  source 1..80: mol_type = other DNA
aagcttaccgacctcaattacacattgagtgtaatcactctaatgaacagtacattgcatacaatactggaagacccagg

SEQ ID NO: 58043 - DNA, 80 bp, synthetic construct
  source 1..80: mol_type = other DNA
gagctacgacctcactacacattgagtgtaatcactctaatgaacagtacactacatacaatactagaggatccaggaat

SEQ ID NO: 58044 - DNA, 80 bp, synthetic construct
  source 1..80: mol_type = other DNA
gcctcagcctcttggtaatactgagaaaaaacaagatttccatagtaaccccctattaggtcattgtttgcttaagaccg

SEQ ID NO: 58045 - DNA, 80 bp, synthetic construct
  source 1..80: mol_type = other DNA
ttatcctgaggaagctcgtgcgccacctatcatttgttgtggaaaatgctgtgtcagttagtctcaaggggatgtttgtc

SEQ ID NO: 58046 - DNA, 80 bp, synthetic construct
  source 1..80: mol_type = other DNA
aactgacacacattccagcctggggactttccacaccctaactgacacacattccacagctggttctttccgcctcagaa

SEQ ID NO: 58047 - DNA, 80 bp, synthetic construct
  source 1..80: mol_type = other DNA
gcagccaagggaccggctaaaactggatggctgccagccaagcatgagctcatacctagggagccaaccagctgaccctg

SEQ ID NO: 58048 - DNA, 80 bp, synthetic construct
  source 1..80: mol_type = other DNA
aggttagagatgctggaaatgaccaggacagaaatgctatgtaagaagtttaagaagcacctagagagattaagagattt

SEQ ID NO: 58049 - DNA, 80 bp, synthetic construct
  source 1..80: mol_type = other DNA
tacatagatgggatggatgaatgttctaatgctgtaaatgattttctttcatttttttcaaagggtgtgtcagctacagt

SEQ ID NO: 58050 - DNA, 80 bp, synthetic construct
  source 1..80: mol_type = other DNA
ggtctgctatatctttattgtttcgggaagtgtggaagtgcttattccctgagttagaatgcttttttgaatttgcacac

SEQ ID NO: 58051 - DNA, 80 bp, synthetic construct
  source 1..80: mol_type = other DNA
tcctataatttactattatctacataggttggcacctataaaaaaaacataattacttagggccttcctataatttacta

SEQ ID NO: 58052 - DNA, 80 bp, synthetic construct
  source 1..80: mol_type = other DNA
cttaatcacaagtaaacaaagcacaaggggaaggactggatggctgccagccaagcatgagctcatacctagggagccaa

SEQ ID NO: 58053 - DNA, 80 bp, synthetic construct
  source 1..80: mol_type = other DNA
ccagctgacggctgccagccaagcatgagctcataatagtccttaatcacaagtaaacaaagcacaaggggaagtggaaa

SEQ ID NO: 58054 - DNA, 80 bp, synthetic construct
  source 1..80: mol_type = other DNA
ggctgccagccaagcatgagctcatacctagggagccaaccagctgacggctgccagccaagcatgagctcataatagtc

SEQ ID NO: 58055 - DNA, 80 bp, synthetic construct
  source 1..80: mol_type = other DNA
aagcagccagacagacatgttttgcgagcctaggaatcttggccttgtccccagttaaactggacaaaggccatggttct

SEQ ID NO: 58056 - DNA, 80 bp, synthetic construct
  source 1..80: mol_type = other DNA
gcgccaaaccatgacctcaggaaggaaagtgcatgactgggcagccagccagtggcagttaataagcagccagacagaca

SEQ ID NO: 58057 - DNA, 80 bp, synthetic construct
  source 1..80: mol_type = other DNA
tgttttgcgagcctaggaatcttggccttgtccccagttaaactggacaaaggccatggttctgcgccagctgtcacgac

SEQ ID NO: 58058 - DNA, 80 bp, synthetic construct
  source 1..80: mol_type = other DNA
atcaaccattatcaatgctaagagatcaagccttatatagaggcaatcaaacaacatacaatttatgttcagacgtatgg

SEQ ID NO: 58059 - DNA, 80 bp, synthetic construct
  source 1..80: mol_type = other DNA
ccacgtcacatataaaataataaatattcacaaggaggagtggttatatgatgtaatccataaccactcccaggaaatga

SEQ ID NO: 58060 - DNA, 80 bp, synthetic construct
  source 1..80: mol_type = other DNA
aattccaggggtcccggactgggtattcaacttcattgcatcccacctgcccgagttgcctagcctgcaggacgtgttca

SEQ ID NO: 58061 - DNA, 80 bp, synthetic construct
  source 1..80: mol_type = other DNA
cacttgctaccattggggaatctgacccagtaaatgctatagttgaacaagtaagaagctttgttagtggaggaagacaa

SEQ ID NO: 58062 - DNA, 80 bp, synthetic construct
  source 1..80: mol_type = other DNA
tgcctggggctacagggggtactccccattatgcagcccctgactggattttatatgtacttgaagagctaaacagtgac

SEQ ID NO: 58063 - DNA, 80 bp, synthetic construct
  source 1..80: mol_type = other DNA
atgcagaggggactaccccacattattggtctattagtagcccacttaaaactgctgaagctgctaatgttactcctgat

SEQ ID NO: 58064 - DNA, 80 bp, synthetic construct
  source 1..80: mol_type = other DNA
acagggggtgtaggaggtattgctggtccccaactttatttttgggcagttggaggacagcccttggatgtgctaggact

SEQ ID NO: 58065 - DNA, 80 bp, synthetic construct
  source 1..80: mol_type = other DNA
aggggcctgctcagtatactgtaaatcctaaaaccaatggtactgtgcctcatgtttattccagttctgaaacacccagg

SEQ ID NO: 58066 - DNA, 80 bp, synthetic construct
  source 1..80: mol_type = other DNA
cagaatggttggaggggctgcaactccaccagtggtgtcatttagtaataatagcacaattccactgttggatgaaaatg

SEQ ID NO: 58067 - DNA, 80 bp, synthetic construct
  source 1..80: mol_type = other DNA
ggggccctttgtagtccagcggaaagtgaagggtggcttaacagagacgtccttgggttcaaacctaagggtgccataag

SEQ ID NO: 58068 - DNA, 80 bp, synthetic construct
  source 1..80: mol_type = other DNA
gtcgggggtattggcctataggaaaccctagggctctataagcagcatacatatgttgtgacatctccgttgagtctgtg

SEQ ID NO: 58069 - DNA, 80 bp, synthetic construct
  source 1..80: mol_type = other DNA
aattcttccaattctttaggaaatgataaagatgcatctgtagcattgtcctttttttttttaggtggtgttgcctgtga

SEQ ID NO: 58070 - DNA, 80 bp, synthetic construct
  source 1..80: mol_type = other DNA
tcctcatcatcttctctagtacgctttgtaggggtttctccaggagatttaggcatttcctcattacatcttagttcttc

SEQ ID NO: 58071 - DNA, 80 bp, synthetic construct
  source 1..80: mol_type = other DNA
tctggggtaccatatgtgggtatctataataaaaaaaagttattaatttacttataaaacataaaagtacccctataata

SEQ ID NO: 58072 - DNA, 80 bp, synthetic construct
  source 1..80: mol_type = other DNA
ctttctagggggaaagttacagcacaattctgtgcattctacctgtgaagagctccacacttcatcttcttcttcattta

SEQ ID NO: 58073 - DNA, 80 bp, synthetic construct
  source 1..80: mol_type = other DNA
ggtattggtgctaccgtctcgaacctagccgacagccgttggatataaagggtcaccatttttatttcagatgggcatat

SEQ ID NO: 58074 - DNA, 80 bp, synthetic construct
  source 1..80: mol_type = other DNA
ttatccattttgccttctttagcctcaaggcgcctcagcaaggccctctgcttttagttcagaaagttgaggctttttag

SEQ ID NO: 58075 - DNA, 80 bp, synthetic construct
  source 1..80: mol_type = other DNA
ggggaaactgttgaaatatctgaagcagctgctactgtactaacaaaagtacctgagcttgtaactgtaacacaaggtgt

SEQ ID NO: 58076 - DNA, 80 bp, synthetic construct
  source 1..80: mol_type = other DNA
gtacaagggggtgcaggtcttgtaggtggtatatatacagctttagcagcagatcgccctggggacctgcctgcgagtac

SEQ ID NO: 58077 - DNA, 80 bp, synthetic construct
  source 1..80: mol_type = other DNA
aaatttccccagcaggtcatatcaagacccagcagctgcataagttcttttgcttcatttctggacaaagttttatccat

SEQ ID NO: 58078 - DNA, 80 bp, synthetic construct
  source 1..80: mol_type = other DNA
agctcatacaccactcccatagtccttaatcacaagtaaacaaagcacaaggggaagggaggagctggctaaaactggat

SEQ ID NO: 58079 - DNA, 80 bp, synthetic construct
  source 1..80: mol_type = other DNA
tgttgttgaaaaatgctgtgtcagttagtctcaaggggatgtttgtcatactgccacaaacacaggaaggcagccaacag

SEQ ID NO: 58080 - DNA, 80 bp, synthetic construct
  source 1..80: mol_type = other DNA
atgaatttccatatgtttgcagtgggtggggaacccctagaactccagtttctaactggaaactacagaactgattacag

SEQ ID NO: 58081 - DNA, 80 bp, synthetic construct
  source 1..80: mol_type = other DNA
caaaagatggggcctttcctgtagagtgctggtgtccagacccctcaaaaaatgaaaatacaagatattatggcagctat

SEQ ID NO: 58082 - DNA, 80 bp, synthetic construct
  source 1..80: mol_type = other DNA
aacatggtaattggacagtaccaaaccaacaacaaagcaatagtgactccatcctgtagtattctttctgttaataagta

SEQ ID NO: 58083 - DNA, 80 bp, synthetic construct
  source 1..80: mol_type = other DNA
cattaatttaaatctttcctccagtaattcttttctagtactttcaattaactttaatctctgttttgccatcaccacat

SEQ ID NO: 58084 - DNA, 80 bp, synthetic construct
  source 1..80: mol_type = other DNA
tgggggggtggcagagaaggagctctgggtgcagccggtggagtcctctggcgtgggagctcttcttcttcttggattct

SEQ ID NO: 58085 - DNA, 80 bp, synthetic construct
  source 1..80: mol_type = other DNA
tggcgtgggagctcttcttcttcttggattctcctcgctaaattgagtagagggtcccggagtggggcttggagatctag

SEQ ID NO: 58086 - DNA, 80 bp, synthetic construct
  source 1..80: mol_type = other DNA
ttgagtagagggtcccggagtggggcttggagatctagattcatcagagggaatggtggattcatggcagaagaggtctg

SEQ ID NO: 58087 - DNA, 80 bp, synthetic construct
  source 1..80: mol_type = other DNA
cccaggaggggtgcccatagggaggtatatctcttccatcctgggttggaacatcatgctaaaaggaaaaactaaattaa

SEQ ID NO: 58088 - DNA, 80 bp, synthetic construct
  source 1..80: mol_type = other DNA
ggcctatctgcctctgaagccttagggacattggggttaactatggaaaattttagcctaatgcatgctttacctgggat

SEQ ID NO: 58089 - DNA, 80 bp, synthetic construct
  source 1..80: mol_type = other DNA
tatgatattctttttccaggggtacaaacatttgcccactacttaaatgttcttgatcattgggcaagcagcctgatcca

SEQ ID NO: 58090 - DNA, 80 bp, synthetic construct
  source 1..80: mol_type = other DNA
ttagggggactaatcatttccaagatctcatggctagattgatagaaaatagcagatgggtgctgactacaggccctagc

SEQ ID NO: 58091 - DNA, 80 bp, synthetic construct
  source 1..80: mol_type = other DNA
ctttgagtgtgtgtaaggagcacatcatttgcaacatgttgctccgctatgaacacatgctgttgatcagtttcgttttg

SEQ ID NO: 58092 - DNA, 80 bp, synthetic construct
  source 1..80: mol_type = other DNA
cccctcagactaccccaccaacagctttgccctttaaatcttactatgcaaaagggtccttaacttttgattcaggttac

SEQ ID NO: 58093 - DNA, 80 bp, synthetic construct
  source 1..80: mol_type = other DNA
ttctccgccaaatgctattcaagagtgtcgacttcagggttgcagttgattaacatcacacaacacccattaaaaatagc

SEQ ID NO: 58094 - DNA, 80 bp, synthetic construct
  source 1..80: mol_type = other DNA
caacactccaggtccaaagctcaccaaccttaagactgttaattgtataaacttgaaagtgtcaactgacaaagagcaca

SEQ ID NO: 58095 - DNA, 80 bp, synthetic construct
  source 1..80: mol_type = other DNA
gtgaacttgagatcaacgtactcctaccacaggttgctatcaaccttacaaactgccatgcttcaataaaatcacatgtt

SEQ ID NO: 58096 - DNA, 80 bp, synthetic construct
  source 1..80: mol_type = other DNA
tgtgactactcctggaacattgatggaacagtaaagcttccaagggttaaacacaatggtgatttcataccaggaactta

SEQ ID NO: 58097 - DNA, 80 bp, synthetic construct
  source 1..80: mol_type = other DNA
taaaattataattgacaagaaaaacaaacaaaatgatagatgcacactgactactcattgtgttattaaagggagagagg

SEQ ID NO: 58098 - DNA, 80 bp, synthetic construct
  source 1..80: mol_type = other DNA
tcagaaaaggtcaatcagccttgagacaatataaaacagagataagaattgggcagacatcagtaggttcaaggaggctg

SEQ ID NO: 58099 - DNA, 80 bp, synthetic construct
  source 1..80: mol_type = other DNA
cctgaccaccccgaacagcacaacctctaacccagagactccggtgaagacaaccatagcctcggtgccagatgtgacca

SEQ ID NO: 58100 - DNA, 80 bp, synthetic construct
  source 1..80: mol_type = other DNA
cttgcggaggaaggaagcagtgactgtatctcaagaacacagttaatcaaaacggaagttgcagaaattcatgatgacag

SEQ ID NO: 58101 - DNA, 80 bp, synthetic construct
  source 1..80: mol_type = other DNA
ctacggaggacctggcgagaaaataacaatttgcaatggctccacaattgtagatcagagacttggcagcgaattgggat

SEQ ID NO: 58102 - DNA, 80 bp, synthetic construct
  source 1..80: mol_type = other DNA
gttatacaattaacagaataaaatcctacaggctgtgtgagaacagtgcaacagggaagagctgtgaaatagacagtgtc

SEQ ID NO: 58103 - DNA, 80 bp, synthetic construct
  source 1..80: mol_type = other DNA
cacaagaaggaagaggtcatgttaagctgtccagaggttcagaaattgttttggatgtctgtgattctagttgtgagttg

SEQ ID NO: 58104 - DNA, 80 bp, synthetic construct
  source 1..80: mol_type = other DNA
atgatacccaaggggactggagacattctagtggactgctctggagggcaacagcattttttgcagaataaccttgttga

SEQ ID NO: 58105 - DNA, 80 bp, synthetic construct
  source 1..80: mol_type = other DNA
cttaggatgtccgaatgttccactattgggcaagatggcaatatatgtctgcagaatgtcaaatcacccaaaaacaacta

SEQ ID NO: 58106 - DNA, 80 bp, synthetic construct
  source 1..80: mol_type = other DNA
ccaagatgttagacgcacaggccactacagactatggctctggtgagtttaacactaatctcccaacagccagagagaca

SEQ ID NO: 58107 - DNA, 80 bp, synthetic construct
  source 1..80: mol_type = other DNA
acaacactcctcattctgttgctggtctctatgtcaccggttcagtctgctccagttgtccaggagaaggcaattgagat

SEQ ID NO: 58108 - DNA, 80 bp, synthetic construct
  source 1..80: mol_type = other DNA
ctatcagatcagagaaagttatactggtatgtgtctctttctattaggaagtgttctttttgcagtctcttggctaataa

SEQ ID NO: 58109 - DNA, 80 bp, synthetic construct
  source 1..80: mol_type = other DNA
gggctttggttgatgacataggcagtagtttctttcctggactttccgtttgcaagacatgttccattggtagtataaat

SEQ ID NO: 58110 - DNA, 80 bp, synthetic construct
  source 1..80: mol_type = other DNA
gaatttgaaattgagtctcacaagtgttattgcagtctattttgttgcccttactgcagagcttgttcagctgacgaaac

SEQ ID NO: 58111 - DNA, 80 bp, synthetic construct
  source 1..80: mol_type = other DNA
gctttaaagccactgttgaagcaagcaataaagccttgtttattagaagcattataaattctacctttgtgatgtgtgtc

SEQ ID NO: 58112 - DNA, 80 bp, synthetic construct
  source 1..80: mol_type = other DNA
ttgattttagcaatttgtgtggtcagcacttctgctgtagatatggaggatttaccagcaggcacttgggaaagggagga

SEQ ID NO: 58113 - DNA, 80 bp, synthetic construct
  source 1..80: mol_type = other DNA
ggatctcacaagcttctgccatcaggagtgtcaggtgacagaaactgaatgtctttgcccgtatgaagccttaatactta

SEQ ID NO: 58114 - DNA, 80 bp, synthetic construct
  source 1..80: mol_type = other DNA
acccttcccccatccaccaaaaccatccagtcacaagtgacaggggataatacaactgggagatccgacattacagcaag

SEQ ID NO: 58115 - DNA, 80 bp, synthetic construct
  source 1..80: mol_type = other DNA
gtaacaaggtccttgtctcgggcaggtcagagtcaatcataaagttggaagagagaacaggggtcagttggaatttaggt

SEQ ID NO: 58116 - DNA, 80 bp, synthetic construct
  source 1..80: mol_type = other DNA
gttcaatctgggttcagtaacaataacattatctgaacctaggaacatacaacagaggcttccccctgagattgtaacac

SEQ ID NO: 58117 - DNA, 80 bp, synthetic construct
  source 1..80: mol_type = other DNA
tacatcctaaaatagaagaaggattttttgacttgatgcacgttcaaaaagtgctgtctgcgagcacagtttgcaaacta

SEQ ID NO: 58118 - DNA, 80 bp, synthetic construct
  source 1..80: mol_type = other DNA
tccaactgtcacgaccccgagcgtctccacatcaaagccatcagccgcaggcctgcccataccaccaaccacacagggat

SEQ ID NO: 58119 - DNA, 80 bp, synthetic construct
  source 1..80: mol_type = other DNA
tacagagctgcacacatggtgtgccaggtgacttgcagatctatcacatcggtaacctactgaaaggggacaagattaat

SEQ ID NO: 58120 - DNA, 80 bp, synthetic construct
  source 1..80: mol_type = other DNA
aggtgtcaggtttgaagtttgcaagcctgacctgttcgggttgttatgcttgtagctcaggtatttcctgtaaagttaga

SEQ ID NO: 58121 - DNA, 80 bp, synthetic construct
  source 1..80: mol_type = other DNA
ttatggcaaggaaactagagctcggggctgacagcaccttcaaggctttttcatcgatgcccaaaagctctttgtgcttc

SEQ ID NO: 58122 - DNA, 80 bp, synthetic construct
  source 1..80: mol_type = other DNA
tatattgtagaaagggatttctgcagcagttgtgctgaagacgatacgcaaaaatgtgttaacacaaagcttgaacatcc

SEQ ID NO: 58123 - DNA, 80 bp, synthetic construct
  source 1..80: mol_type = other DNA
acaaagcatacttattgagcacaaagggacaataattggcaaacaaaatgacacctgtccaactagaataagttgttggt

SEQ ID NO: 58124 - DNA, 80 bp, synthetic construct
  source 1..80: mol_type = other DNA
acacatcgctcagccccagccacatgccaacaccccaaaccacccattatctctccagaagcctcctctccgcggcaagt

SEQ ID NO: 58125 - DNA, 80 bp, synthetic construct
  source 1..80: mol_type = other DNA
ggagaaccagagggctgctcaagtataaacacattaaagacgaggaagaagctgggtacaaaaaaatcattgagaggttg

SEQ ID NO: 58126 - DNA, 80 bp, synthetic construct
  source 1..80: mol_type = other DNA
aatgacaagaagggcaagagccgactgcttgacggtgaaagacttgcagacagaaagattgccgaactcttctcaaccaa

SEQ ID NO: 58127 - DNA, 80 bp, synthetic construct
  source 1..80: mol_type = other DNA
acccatataggttgataaagagggaaaagctctctcagttgttatgatatcaacattgttaaagttgccaaataaccttt

SEQ ID NO: 58128 - DNA, 80 bp, synthetic construct
  source 1..80: mol_type = other DNA
cagttgttatgatatcaacattgttaaagttgccaaataaccttttctaataaagcatgttttaactataaaaaagaaaa

SEQ ID NO: 58129 - DNA, 80 bp, synthetic construct
  source 1..80: mol_type = other DNA
ttggaggccaatcaatcagcatcagaagcagccgcaacagaaaaacccacaagtaccgaaaatcagcagacaaccacaaa

SEQ ID NO: 58130 - DNA, 80 bp, synthetic construct
  source 1..80: mol_type = other DNA
caacccagctacaacaccagtcccaaacgtcactacccacggtgtcccaacgccgaccagcctccaagttcaagaaacct

SEQ ID NO: 58131 - DNA, 80 bp, synthetic construct
  source 1..80: mol_type = other DNA
ctctcaaagctctaacaacacagagcctacaagccgtcacaccagagaccacaccttcccttgccactatttcatataca

SEQ ID NO: 58132 - DNA, 80 bp, synthetic construct
  source 1..80: mol_type = other DNA
ggccagtttctttggggtggtggagagcctgcccatggaacccaaacaaactccagtgtggcaagaagtgtcacagcacc

SEQ ID NO: 58133 - DNA, 80 bp, synthetic construct
  source 1..80: mol_type = other DNA
ggtccgactagcagatcgaagagagactccagggtggaaataattttaacttttcctcagggccttaagaagtattatag

SEQ ID NO: 58134 - DNA, 80 bp, synthetic construct
  source 1..80: mol_type = other DNA
gactctgagggtctacttgagtggtgtgcacggctgctaaaacaaacatgcaatgatgactatttccacaagagaataga

SEQ ID NO: 58135 - DNA, 80 bp, synthetic construct
  source 1..80: mol_type = other DNA
agaatttttcataactggagagggccatttcaatgatgccttacaattcaagctgtacggcacaccgagtacaacagggt

SEQ ID NO: 58136 - DNA, 80 bp, synthetic construct
  source 1..80: mol_type = other DNA
attcgatttaaggatgatagctcgttcgaggatgttaacggtatccggaaaccaaaacatctttacgtgtccttgccaaa

SEQ ID NO: 58137 - DNA, 80 bp, synthetic construct
  source 1..80: mol_type = other DNA
aatatgggtttttgctggagcaccagaccgttgtccaccaacatgtttgtttatagcaggtattgctgagcctggggcaa

SEQ ID NO: 58138 - DNA, 80 bp, synthetic construct
  source 1..80: mol_type = other DNA
aatcagaaaaatttcaaaacgctagatgattgggagagtggaaaaaatccatatgaaccgatagaagtgactgcatctat

SEQ ID NO: 58139 - DNA, 80 bp, synthetic construct
  source 1..80: mol_type = other DNA
tcagtgctacaacgtcacatataaaataataaatattcacaaggaggagtggctacgtatgaggtgatcataaacacgcc

SEQ ID NO: 58140 - DNA, 80 bp, synthetic construct
  source 1..80: mol_type = other DNA
agacaatggcctttgggggacgtggtccgtgggaacatcttcctgaggtaggagatcaacgtttagctgcttcttctgtt

SEQ ID NO: 58141 - DNA, 80 bp, synthetic construct
  source 1..80: mol_type = other DNA
agtacaacatataaaccaaacaaaaaagagaaacttatgcttaacttactagataaatgcagcgaattaaatcttttagt

SEQ ID NO: 58142 - DNA, 80 bp, synthetic construct
  source 1..80: mol_type = other DNA
ttatgaagacttagtagctaactgtcctgaacttttgcttatgcttgaaggtcaaccaggtggggcacgcttaatagaac

SEQ ID NO: 58143 - DNA, 80 bp, synthetic construct
  source 1..80: mol_type = other DNA
aagtcctaggcatgcaccatattaatgtttgctctaactttactgctcttagttatctctttcacctttaccctggcaca

SEQ ID NO: 58144 - DNA, 80 bp, synthetic construct
  source 1..80: mol_type = other DNA
accttatcttcagataacaaggctttgcagctgttgttgatacaaggttacaacccattaatggttggtcacgccttgtg

SEQ ID NO: 58145 - DNA, 80 bp, synthetic construct
  source 1..80: mol_type = other DNA
ctgtgtactcaacaagcaatttggcaaacaaaacactgtttgcttttatggaccagcttctactggtaaaacaaacatgg

SEQ ID NO: 58146 - DNA, 80 bp, synthetic construct
  source 1..80: mol_type = other DNA
caaaggccatagtccaaggcattagactatatggctgtgttaatcatttaaacaaagggtttgtctttaatgattgcaga

SEQ ID NO: 58147 - DNA, 80 bp, synthetic construct
  source 1..80: mol_type = other DNA
gcatccggtctccggcgagtgaacatctctgggaagagctccacgcttgtggtgagtcaaattatggctttcaatccacc

SEQ ID NO: 58148 - DNA, 80 bp, synthetic construct
  source 1..80: mol_type = other DNA
caacgcctagttgtttggtgggaggagtgcttaatgcaccaggattgggtggaaccagcaaagtgtatcttgggtggaac

SEQ ID NO: 58149 - DNA, 80 bp, synthetic construct
  source 1..80: mol_type = other DNA
tgagtgtagaattgacgtcaaacacagagatagtgtattattgacacaaactccagtaattatttccactaaccacgata

SEQ ID NO: 58150 - DNA, 80 bp, synthetic construct
  source 1..80: mol_type = other DNA
tctacgcggttgttggtggtaattctgtttctcatgttcatgcggctccattaaaagaaagagtgattcagctaaatttt

SEQ ID NO: 58151 - DNA, 80 bp, synthetic construct
  source 1..80: mol_type = other DNA
atgaaacaacttcctcaaacatttggagagatcactccagaagaaattgcagctctactgcaatggtgtttcaatgagta

SEQ ID NO: 58152 - DNA, 80 bp, synthetic construct
  source 1..80: mol_type = other DNA
cgaatgtactctgacaggctttaaaacaaaatggagcctagataaaattccaaactcatttcctcttggggtcctttgtc

SEQ ID NO: 58153 - DNA, 80 bp, synthetic construct
  source 1..80: mol_type = other DNA
ctactcattcacaggacttcatactccacgaaaacggatactgcactgattgtggtggttaccttgctcatagcgctgac

SEQ ID NO: 58154 - DNA, 80 bp, synthetic construct
  source 1..80: mol_type = other DNA
gattctgtgtacactgatcgtgcaagcgacactagcaaagaagccatcgacacaggtaagtttacgttctccaggcactt

SEQ ID NO: 58155 - DNA, 80 bp, synthetic construct
  source 1..80: mol_type = other DNA
tatatatatcctatacacaacactaaaacatatgtttaattacaggtgacttgggggatacggacggagaggactccgag

SEQ ID NO: 58156 - DNA, 80 bp, synthetic construct
  source 1..80: mol_type = other DNA
tcagaagcatcggaagtgggtgttcgtccatccaagaagcgacgcataactattcctgcaactccaccaaattctcctgg

SEQ ID NO: 58157 - DNA, 80 bp, synthetic construct
  source 1..80: mol_type = other DNA
cagctctgtgagtacttctgccttctttgataattggtgcgcacaaccgcgagacgaagatgagctcagggaatacgaaa

SEQ ID NO: 58158 - DNA, 80 bp, synthetic construct
  source 1..80: mol_type = other DNA
tgttattagagcattctcttcacctgcttttacttatgtcttcaaatttccatatccatcatggaaagaaaaagaatggc

SEQ ID NO: 58159 - DNA, 80 bp, synthetic construct
  source 1..80: mol_type = other DNA
gacaagcatcgcgcctacaaaagaaaagggagtccagggagagacgagaggaaacgcccatggcaacctcgtcacaggag

SEQ ID NO: 58160 - DNA, 80 bp, synthetic construct
  source 1..80: mol_type = other DNA
tcggagtcggagcccaatccgacgcagtggggagacaagctcggagtcataccgtcaggaacaccagatcagccacctat

SEQ ID NO: 58161 - DNA, 80 bp, synthetic construct
  source 1..80: mol_type = other DNA
cgtcttgcactgcttcgaaatctctagacccagtgacgaagacgaaggagaatacatcgggaaagagagactctagaact

SEQ ID NO: 58162 - DNA, 80 bp, synthetic construct
  source 1..80: mol_type = other DNA
aatccatacactgtattcagccagcataaagcctcacatcctgatgctccaggatggtgtgggttctattggcattctac

SEQ ID NO: 58163 - DNA, 80 bp, synthetic construct
  source 1..80: mol_type = other DNA
tagaattgctagaaatggtactaatgcaatctttaatgaaatgaaacagcagttccaacaactgcagctagacaacaaaa

SEQ ID NO: 58164 - DNA, 80 bp, synthetic construct
  source 1..80: mol_type = other DNA
ttggctgggatagtgctagagaattattgtttagtcagaaaaaatcactagatcaaaaatacagaaatatgttctggcac

SEQ ID NO: 58165 - DNA, 80 bp, synthetic construct
  source 1..80: mol_type = other DNA
tttagaaatgcttctgattgtgaacgttgtaattactgggacaatgtataccgtatgcacttagctcatgtttcctctca

SEQ ID NO: 58166 - DNA, 80 bp, synthetic construct
  source 1..80: mol_type = other DNA
gacagaatcagaagaaataactgacgaggaaatgctttctgctgctgaaagtatggaaacagatgcctccaattaaaagg

SEQ ID NO: 58167 - DNA, 80 bp, synthetic construct
  source 1..80: mol_type = other DNA
caacctggagggtgggtgcttcctggttacaaataccttggtccatttaatcctcttgataacggtgaaccagttaataa

SEQ ID NO: 58168 - DNA, 80 bp, synthetic construct
  source 1..80: mol_type = other DNA
agctgatcgtgctgctcaatctcatgataaatcatattctgaattaataaaaagtggaaaaaatccttacttatatttca

SEQ ID NO: 58169 - DNA, 80 bp, synthetic construct
  source 1..80: mol_type = other DNA
ttcttcatgcacttctggctcatggtaccgagcaagccatgatccagctgagaaactgtgttcctcatccggatgaagat

SEQ ID NO: 58170 - DNA, 80 bp, synthetic construct
  source 1..80: mol_type = other DNA
ataaagctgatgaaaaattcattgacgatttgaaaaacgactggtctcttggtggcattattggctcaagtttctttaaa

SEQ ID NO: 58171 - DNA, 80 bp, synthetic construct
  source 1..80: mol_type = other DNA
cttaagcgcgccgtggctcctgctctagggaataaagagcgagctcaaaaaagacacttttattttgcaaactcaaataa

SEQ ID NO: 58172 - DNA, 80 bp, synthetic construct
  source 1..80: mol_type = other DNA
aggtgctaaaaaatcaaaaaacaacgaacctaaaccaagcacctcaaaaatgtctgaaaatgaaattcaagaccaacagc

SEQ ID NO: 58173 - DNA, 80 bp, synthetic construct
  source 1..80: mol_type = other DNA
aaatgaaattcaagaccaacagccatcagaacctaatgatggccaacgaggagggggaggaggtgcgaccggcagtgtgg

SEQ ID NO: 58174 - DNA, 80 bp, synthetic construct
  source 1..80: mol_type = other DNA
catcagaacctaatgatggccaacgaggagagagaggaggtgcgaccggcagtgtgggaggggggaaaggttctggtgtg

SEQ ID NO: 58175 - DNA, 80 bp, synthetic construct
  source 1..80: mol_type = other DNA
ggtatatccacaggtggatgggtaggaggcagctactttactgactcctatgtcataacaaaaaacaccagacaatttct

SEQ ID NO: 58176 - DNA, 80 bp, synthetic construct
  source 1..80: mol_type = other DNA
ggttaaaatccaaaacaaccatcaatataaaactgaaaatataattccttccaatggaggaggaaaatcacaaagatgtg

SEQ ID NO: 58177 - DNA, 80 bp, synthetic construct
  source 1..80: mol_type = other DNA
tcagcacaccatggtcatactttaactttaatcaatacagtagtcatttctcaccacaggactggcagcgcctaacaaac

SEQ ID NO: 58178 - DNA, 80 bp, synthetic construct
  source 1..80: mol_type = other DNA
gaatacaaaagattcagacctaaaggtatgcatgttaaaatctacaatttacaaataaaacagattttatcaaatggtgc

SEQ ID NO: 58179 - DNA, 80 bp, synthetic construct
  source 1..80: mol_type = other DNA
tgatgttacatacaacaacgacctaacagcaggagtacacatcttttgtgatggcgaacatgcatatccaaacgctacac

SEQ ID NO: 58180 - DNA, 80 bp, synthetic construct
  source 1..80: mol_type = other DNA
atccatgggacgaagatgtaatgccagaacttccttaccaaacatggtatctgtttcaatatggatacatacctaccatt

SEQ ID NO: 58181 - DNA, 80 bp, synthetic construct
  source 1..80: mol_type = other DNA
ataatccgtgatgacttactactttctctagaagatcgccattttggggcaattctctgcaaggctgtctatatggctac

SEQ ID NO: 58182 - DNA, 80 bp, synthetic construct
  source 1..80: mol_type = other DNA
catgaacttgcagaaatggaagactccaatgcagtagaaaaagcaattgctttacagataccattcttcatgcttgaaaa

SEQ ID NO: 58183 - DNA, 80 bp, synthetic construct
  source 1..80: mol_type = other DNA
cagcgaccatgaagttctaagaactggagaaagtgcagaatttaacttcaactttgactgtgaatggattaacaatgaaa

SEQ ID NO: 58184 - DNA, 80 bp, synthetic construct
  source 1..80: mol_type = other DNA
gagcattcattcctccaggactgatgtttaatccattggtaccaacaagaagagctcaatacatacgaagaaatggaaac

SEQ ID NO: 58185 - DNA, 80 bp, synthetic construct
  source 1..80: mol_type = other DNA
actcaagcaagtacatcacgagttcaaccctatgctaaacctacaagctggatgactgggccaggtttactcagtgcaca

SEQ ID NO: 58186 - DNA, 80 bp, synthetic construct
  source 1..80: mol_type = other DNA
acgagtaggtccagctgcttctgacacagctgcatggatggttggtgtagatccagaaggcgcaaacatcaactcaggaa

SEQ ID NO: 58187 - DNA, 80 bp, synthetic construct
  source 1..80: mol_type = other DNA
gagcaggagttagcagtggatttgatcctccagctggatcactcagacctacagatctagaatacaaagtacaatggtac

SEQ ID NO: 58188 - DNA, 80 bp, synthetic construct
  source 1..80: mol_type = other DNA
caaactccggctggaacaaacaacgatggaaacatcatttcaaatccacctttatcaatgcttagagatcaaactctcta

SEQ ID NO: 58189 - DNA, 80 bp, synthetic construct
  source 1..80: mol_type = other DNA
cagaggaaaccaaacaacctacaacttatgctcagatgtatggatgtttccaaatcaaatttgggacagatacccagtaa

SEQ ID NO: 58190 - DNA, 80 bp, synthetic construct
  source 1..80: mol_type = other DNA
caagagaaaatcctatttggtgcaaacaaccaagatcagacaaacacacaacaattgatccttttgacggatcaatagcc

SEQ ID NO: 58191 - DNA, 80 bp, synthetic construct
  source 1..80: mol_type = other DNA
atggatcatccaccaggcacaattttcatcaaaatggcaaaaattccagttccttcaaacaacaacgcagactcatactt

SEQ ID NO: 58192 - DNA, 80 bp, synthetic construct
  source 1..80: mol_type = other DNA
tactacttttatgtcacagaaacaaagaaatatgtttcctcgctgtgacataatagtccaatctgagcttggggagacaa

SEQ ID NO: 58193 - DNA, 80 bp, synthetic construct
  source 1..80: mol_type = other DNA
aaacatctactgcactggacaagtcagctgcgaaattgtctgggaagtcgaaagatatgcaacaaagaactggagaccag

SEQ ID NO: 58194 - DNA, 80 bp, synthetic construct
  source 1..80: mol_type = other DNA
aaagaagacacaccgcactcggccttggaattggaggggcagatgaaatcaacccaacataccatgttgacaaaaacgga

SEQ ID NO: 58195 - DNA, 80 bp, synthetic construct
  source 1..80: mol_type = other DNA
gcatatattcaacctacaacatgggacatgtgctttccagttaaaacaaacatcaataaagtgttgtaatctcttaagac

SEQ ID NO: 58196 - DNA, 80 bp, synthetic construct
  source 1..80: mol_type = other DNA
tctttattgcttacgcttgtaagttcctctccaatggacaagtggaaagaaaagggtgactgtaatcccgagctcatgag

SEQ ID NO: 58197 - DNA, 80 bp, synthetic construct
  source 1..80: mol_type = other DNA
ttcgaggctacagtccgatggcagtggtgttgccgtctcgaacctagccgttacacccttgtgcattgtgggaggagctg

SEQ ID NO: 58198 - DNA, 80 bp, synthetic construct
  source 1..80: mol_type = other DNA
cctagccgttacacccttgtgcattgtgggaggagctgttttgcttacgcaaccgcgaaactctatatcttttaatgtgt

SEQ ID NO: 58199 - DNA, 80 bp, synthetic construct
  source 1..80: mol_type = other DNA
acctacactgccatattatagttgggggagaaggcttaagcaaaagaaatgcaaaaacatcatgtcctcaactatatgga

SEQ ID NO: 58200 - DNA, 80 bp, synthetic construct
  source 1..80: mol_type = other DNA
ctgatactaggggaattaatccaacgctgcaaaactcttctggctacgcgtccttttgaaccggaagaggcagaaattta

SEQ ID NO: 58201 - DNA, 80 bp, synthetic construct
  source 1..80: mol_type = other DNA
tcatgctttaaaacgagctgagcgagaagcttggggtggagttactagcggcaacctacaaattctccaatacagagatc

SEQ ID NO: 58202 - DNA, 80 bp, synthetic construct
  source 1..80: mol_type = other DNA
caggaagtgacgtatatcagccaatcagcatcgagcatatagcctatataaaccgatgcacttccgcatttcgtcagact

SEQ ID NO: 58203 - DNA, 80 bp, synthetic construct
  source 1..80: mol_type = other DNA
gcagaggagaccttcacgcacaacaagtggatgctcttcgcttcttcaaaaactacctattgcctaaaaatagatgcatt

SEQ ID NO: 58204 - DNA, 80 bp, synthetic construct
  source 1..80: mol_type = other DNA
acatcttacagcagacctgatgtctgtacttctccagaaaactggtttgttttagctgaaaaaacttactgtcacactct

SEQ ID NO: 58205 - DNA, 80 bp, synthetic construct
  source 1..80: mol_type = other DNA
tgttaacgggctgccgcttccagaacattacagaaaacactaccacgcaaccctagataacgaagttctaccagggcctc

SEQ ID NO: 58206 - DNA, 80 bp, synthetic construct
  source 1..80: mol_type = other DNA
atcacaagtaaacaaagcacaagggggctaaaactggatggctgccagccaagcatgagctcatacctagggagccaacc

SEQ ID NO: 58207 - DNA, 80 bp, synthetic construct
  source 1..80: mol_type = other DNA
agcagacagccagagggagccctggctgcatgccactggcagttataatagtccttaatcacaagtaaacaaagcacaag

SEQ ID NO: 58208 - DNA, 80 bp, synthetic construct
  source 1..80: mol_type = other DNA
gggaagtggaaagcagccaagggaacatgttttgcgagccagagctgttttggcttgtcaccagctggccatggttcttc

SEQ ID NO: 58209 - DNA, 80 bp, synthetic construct
  source 1..80: mol_type = other DNA
agagtagaaggaacattccctaattcagagatcgagatgctggaacagtttctctcaacaccagctgatgttgacttcat

SEQ ID NO: 58210 - DNA, 80 bp, synthetic construct
  source 1..80: mol_type = other DNA
cccagttaatactggacaaaggccatggaagtggaaactagccaaaggagtggaaagcagccagacagacatgttttgcg

SEQ ID NO: 58211 - DNA, 80 bp, synthetic construct
  source 1..80: mol_type = other DNA
gcctcggcctctgcataaataaaaaaaattaggggcgggatgggcggagttaggtgcgggactatggttgctgactaatt

SEQ ID NO: 58212 - DNA, 80 bp, synthetic construct
  source 1..80: mol_type = other DNA
aactgacacacattccacagctggttctgcgggactatggttgctgactaattgagatgcatgctttgcatacttctgcc

SEQ ID NO: 58213 - DNA, 80 bp, synthetic construct
  source 1..80: mol_type = other DNA
aaaatagcactgaagacgtcaaaatgttcgtataaggtagtaaagtgttgcattgtaacaattttcaatacgttattgaa

SEQ ID NO: 58214 - DNA, 80 bp, synthetic construct
  source 1..80: mol_type = other DNA
ataaattgactacacgtgagattgagcaagtagagctgcttaaacgtatacatgataaattgatagtgcaatcaactggc

SEQ ID NO: 58215 - DNA, 80 bp, synthetic construct
  source 1..80: mol_type = other DNA
tcctagaggatccaggaatggcgtatttgccctatattgcgtctgtcctaacggttttgttcacattgcacaaagcgtca

SEQ ID NO: 58216 - DNA, 80 bp, synthetic construct
  source 1..80: mol_type = other DNA
agcgctttaaacctagaaaaatgcatgtaaaaatttacaatctacaaataaaacaaatactttcaaatggtgctgacact

SEQ ID NO: 58217 - DNA, 80 bp, synthetic construct
  source 1..80: mol_type = other DNA
agactggtatacgattggggtctatgtcatagggttcacacttcctatcatcttgaaggccttgtatatgttgtcaaccc

SEQ ID NO: 58218 - DNA, 80 bp, synthetic construct
  source 1..80: mol_type = other DNA
tcaaaccagaaattaaaccagggacaccagtgcaggaggctgagtttttgaagaagaataaggtttactttatgcagcgc

SEQ ID NO: 58219 - DNA, 80 bp, synthetic construct
  source 1..80: mol_type = other DNA
aataaggtttactttatgcagcgccaagaagtattggataaaaatcatgttgctgatattgataagttaattgattatgc

SEQ ID NO: 58220 - DNA, 80 bp, synthetic construct
  source 1..80: mol_type = other DNA
tccaggaatggcgtattttccttatattgcatctgtcctgacagttttgtttacattacacaaagcgtcaattccaacaa

SEQ ID NO: 58221 - DNA, 80 bp, synthetic construct
  source 1..80: mol_type = other DNA
gagatagacgtgacgaaagaaattaatcaaaagaacgtgaaaacgctagaagaatgggagagtggaagaaatccttatga

SEQ ID NO: 58222 - DNA, 80 bp, synthetic construct
  source 1..80: mol_type = other DNA
ctagaggatccaggaacggcttattttcctcaaattgcatctgtcctgacagttttgtttacattacacaaagcgtcaat

SEQ ID NO: 58223 - DNA, 80 bp, synthetic construct
  source 1..80: mol_type = other DNA
ctggaagacccagggatggcgtattttccttacattgcatctgtcctgacagtcttgttcacactgcataaagcgtcaat

SEQ ID NO: 58224 - DNA, 80 bp, synthetic construct
  source 1..80: mol_type = other DNA
aagttgactacacgtgaaattgagcaagttgaactacttaaacgtattcatgataaactaatggtacgaacaactgatga

SEQ ID NO: 58225 - DNA, 80 bp, synthetic construct
  source 1..80: mol_type = other DNA
aatagacatgaccaaagagataaatcagaaaaatgtaaaaacgctagaagaatgggagagtggaagaaatccttatgaac

SEQ ID NO: 58226 - DNA, 80 bp, synthetic construct
  source 1..80: mol_type = other DNA
ctagaagatccaggaatggcgtattttccatacatcgcatctgtcctgacagtcttgttcacgttgcacaaagcgtcaac

SEQ ID NO: 58227 - DNA, 80 bp, synthetic construct
  source 1..80: mol_type = other DNA
atggaaaagtttaccgacctcaactacacattaagtgtaatcactttaatgaatagtacattacatacaatattagagga

SEQ ID NO: 58228 - DNA, 80 bp, synthetic construct
  source 1..80: mol_type = other DNA
tgactgagcttgaagattttgcgagagagctggcctatgaaggccttgatcctgctttgatcatcaagaagctgaaggag

SEQ ID NO: 58229 - DNA, 80 bp, synthetic construct
  source 1..80: mol_type = other DNA
gatggaggcctactctctgtggcaagatgccttcacaaagactatcaatgtgaagatgcgcggagccagcaagacagagg

SEQ ID NO: 58230 - DNA, 80 bp, synthetic construct
  source 1..80: mol_type = other DNA
ggtgagcggaacttccggaagtgacgtcacaggaaatgacgtcacaggaaatgacgtaattgtccgccatcttgtaccgg

SEQ ID NO: 58231 - DNA, 80 bp, synthetic construct
  source 1..80: mol_type = other DNA
gtgcaatcaatttgcgagatagacatgacgaaagaaattaatcaaaagaacgtgaaaacgctagaagaatgggagagtgg

SEQ ID NO: 58232 - DNA, 80 bp, synthetic construct
  source 1..80: mol_type = other DNA
gtagtcaaaatgacttttataatagacgtacactaacttctgatactagactcgtaggaatattaaaatatggtggaaga

SEQ ID NO: 58233 - DNA, 80 bp, synthetic construct
  source 1..80: mol_type = other DNA
ttcttctccccaccatcttcatttttatcagcattttcctggctgtcatcatcatcatcatcactgtttcttagccaatc

SEQ ID NO: 58234 - DNA, 80 bp, synthetic construct
  source 1..80: mol_type = other DNA
taaaactccaactcccatagccacattaaacttcattttttgatacactgacaaactaaactctttgtccaatctctctt

SEQ ID NO: 58235 - DNA, 80 bp, synthetic construct
  source 1..80: mol_type = other DNA
gccggcagacatattggattccaagatggcgtcagtgctacaacgtcacatataaaataataaatattcacaaggaggag

SEQ ID NO: 58236 - DNA, 80 bp, synthetic construct
  source 1..80: mol_type = other DNA
gagttagaaagtgaagtcatcccggggccttctaccatggcctttgggggacgtggtgcgtgggaacaacttcctgaggt

SEQ ID NO: 58237 - DNA, 80 bp, synthetic construct
  source 1..80: mol_type = other DNA
aggagaacaacgcttaattacttctaatgcttctactgcttataaagctaacaaaaaagaaaaattaatgctaaatttac

SEQ ID NO: 58238 - DNA, 80 bp, synthetic construct
  source 1..80: mol_type = other DNA
ttgataaatgtgatgaacttaatttacttgtttatgaagacttagttagtgcttgtcctgaccttttacttatgcttgaa

SEQ ID NO: 58239 - DNA, 80 bp, synthetic construct
  source 1..80: mol_type = other DNA
ggtcagccaggtggtgcacgcctaattgaacaggtgcttggcatgcatcatattaaggtgtgtgctaaatacactgcatt

SEQ ID NO: 58240 - DNA, 80 bp, synthetic construct
  source 1..80: mol_type = other DNA
aacatttttatttcatttacatccggatcaattattaacttctaacaataaagctttaaaactactgttgattcaagggt

SEQ ID NO: 58241 - DNA, 80 bp, synthetic construct
  source 1..80: mol_type = other DNA
acaacccacttcaagtagggcatgccatctgttgtgtacttaacaaacagatgggcaagcagaacactatctgcttttat

SEQ ID NO: 58242 - DNA, 80 bp, synthetic construct
  source 1..80: mol_type = other DNA
ggtcctgcttcaacaggcaaaacaaactttgcaaaagcaatagttcaaggtgttcgcctttatggctgtgttaatcattt

SEQ ID NO: 58243 - DNA, 80 bp, synthetic construct
  source 1..80: mol_type = other DNA
aagccgatgcacttccgcatctcgtcagactgcatccggtctccggcgagtgaacatctctgggaagagctccacgcacg

SEQ ID NO: 58244 - DNA, 80 bp, synthetic construct
  source 1..80: mol_type = other DNA
aaacaaagggtttgtctttaacgattgcagacaacgccttataatttggtgggaagagtgtttaatgcaccaagattggg

SEQ ID NO: 58245 - DNA, 80 bp, synthetic construct
  source 1..80: mol_type = other DNA
tggaacctgctaaatgcattttaggcggaactgaatgtagaattgatgttaaacataaagacagtgttcttcttcaacaa

SEQ ID NO: 58246 - DNA, 80 bp, synthetic construct
  source 1..80: mol_type = other DNA
acaccagtaattatttccactaaccatgacatctactctgtagttggtggcaatactgtttctcatgttcatgcagcacc

SEQ ID NO: 58247 - DNA, 80 bp, synthetic construct
  source 1..80: mol_type = other DNA
attaaaagagcgagtccttcagctaaattttatgaaacaactgccacaaacatttggagaaatttctccagttgaaattg

SEQ ID NO: 58248 - DNA, 80 bp, synthetic construct
  source 1..80: mol_type = other DNA
cagaactattgcaatggtgctttaatgagtacgaatgtactcttactggctttaaacaaaaatggaacttagataaagtt

SEQ ID NO: 58249 - DNA, 80 bp, synthetic construct
  source 1..80: mol_type = other DNA
ccaaactcatttcctcttggagacctttgtcctacacattcacaggactacacgcttcacgaaaacggattctgcactga

SEQ ID NO: 58250 - DNA, 80 bp, synthetic construct
  source 1..80: mol_type = other DNA
ctgtggcggctatcttcctcatagtgctgacgattttgtctacactgacgtggctagcgaaacaacaagcggagactgcg

SEQ ID NO: 58251 - DNA, 80 bp, synthetic construct
  source 1..80: mol_type = other DNA
acccaggtaggctttaatacatttgcttaattaaattatatatttgcactttgcttatgtattaactcctacaggtaacc

SEQ ID NO: 58252 - DNA, 80 bp, synthetic construct
  source 1..80: mol_type = other DNA
tgggggatacggacggagaggactccaagtcagaggcatcggaagtggactttcgtccatccaagaagaggcgtgtgatt

SEQ ID NO: 58253 - DNA, 80 bp, synthetic construct
  source 1..80: mol_type = other DNA
tcagcaactccaccaagcagtccagtaagtggtccaagcctttctacctttttagatacttggcagtcacaacctaggga

SEQ ID NO: 58254 - DNA, 80 bp, synthetic construct
  source 1..80: mol_type = other DNA
tggtgagtgacactatggccttttctgctcctgtaattagagctttttctcaacctgcttttacttatgttgttaaattt

SEQ ID NO: 58255 - DNA, 80 bp, synthetic construct
  source 1..80: mol_type = other DNA
cgaagatgagctccgaatctatgaagaacaagcatcgcaactccaaaagaacaccaagtccactccagaaagagaggagg

SEQ ID NO: 58256 - DNA, 80 bp, synthetic construct
  source 1..80: mol_type = other DNA
cgcaactgggagagccacaagagccgcagccggagcccgatccgacggcatggggagaaaaacttggagtatgctcatca

SEQ ID NO: 58257 - DNA, 80 bp, synthetic construct
  source 1..80: mol_type = other DNA
cagcaaccaggagaaccgccagtcgtcttatactgctttgaagacctcagaccaagcgacgaagacgaaggagaaaacat

SEQ ID NO: 58258 - DNA, 80 bp, synthetic construct
  source 1..80: mol_type = other DNA
cgggggggaatagaaccaatccttatactgtattcagtcaacacagggctaatcattcagatgctcctggatggtgtgtg

SEQ ID NO: 58259 - DNA, 80 bp, synthetic construct
  source 1..80: mol_type = other DNA
gtcaacacagggctaatcattcagatgctcctggatggtgtgggttttactggcattctactagacttgctagagatggg

SEQ ID NO: 58260 - DNA, 80 bp, synthetic construct
  source 1..80: mol_type = other DNA
ttttactggcattctactagacttgctagagatgggactaattgtatctttaatgaaatgaaacaagaatttcaagaatt

SEQ ID NO: 58261 - DNA, 80 bp, synthetic construct
  source 1..80: mol_type = other DNA
acaaataaatggaaaaattacttgggacaatgctagagaactattgtttagtcagaaaaaaaagctagatcaaaaataca

SEQ ID NO: 58262 - DNA, 80 bp, synthetic construct
  source 1..80: mol_type = other DNA
gaaacatgctgtatcatttcagacacagtcctgattgtcctagatgtgattattgggataatgtataccgtagacactta

SEQ ID NO: 58263 - DNA, 80 bp, synthetic construct
  source 1..80: mol_type = other DNA
gctcatgtctcttcacaggaatcagaggaggttacagacgaagaaatgctttctgctgttgaaagcatggatacaaatgc

SEQ ID NO: 58264 - DNA, 80 bp, synthetic construct
  source 1..80: mol_type = other DNA
ctccaattaaacgccagcctggagggtgggtgcttcctggttataaataccttggtccattcaatcctcttgaaaacggt

SEQ ID NO: 58265 - DNA, 80 bp, synthetic construct
  source 1..80: mol_type = other DNA
gaaccagttaataaagctgatcgtgctgctcaagctcatgataaatcatattctgaaataataaaaagtggaaaaaatcc

SEQ ID NO: 58266 - DNA, 80 bp, synthetic construct
  source 1..80: mol_type = other DNA
ccatatgaaaactggaaagaggaagagcacttactatggagcttacttgctcctgggactgaacgtctcatgattcaact

SEQ ID NO: 58267 - DNA, 80 bp, synthetic construct
  source 1..80: mol_type = other DNA
ttacttgtatttcaataaagctgatgaaaaattcattgacgatttgaaaaacgactggtctcttggtggcattattggct

SEQ ID NO: 58268 - DNA, 80 bp, synthetic construct
  source 1..80: mol_type = other DNA
caagtttctttaaacttaagcgcgccgtggctcctgctctaggaaataaagagcgagctcaaaaaagacatttttacttt

SEQ ID NO: 58269 - DNA, 80 bp, synthetic construct
  source 1..80: mol_type = other DNA
gcaaactcaaataaaggtgctaaaaaaccaaaaaataacgagcctaaaccaggcacatcaaaaatgtctgaaaatgaaat

SEQ ID NO: 58270 - DNA, 80 bp, synthetic construct
  source 1..80: mol_type = other DNA
aaatgaaatccaagaccaacaaccatctggctccatggaggagcgaggaggcggaggaggtgcggtcggtagtgtgggag

SEQ ID NO: 58271 - DNA, 80 bp, synthetic construct
  source 1..80: mol_type = other DNA
ccaagaccaacaaccatctggctccatggaggagcgaggaggcggaggaggtgcggtcggtagtgtgggagcgtggaaag

SEQ ID NO: 58272 - DNA, 80 bp, synthetic construct
  source 1..80: mol_type = other DNA
gttctggtgtgggtatatccacaggcggctgggttggaggcagctactttactgactcatatgtcataacaaagaacact

SEQ ID NO: 58273 - DNA, 80 bp, synthetic construct
  source 1..80: mol_type = other DNA
agacagttcttagttaaaatacaaaatgaccacaaatacagaacagagaatataattccaagcaacgcaggaggaaaatc

SEQ ID NO: 58274 - DNA, 80 bp, synthetic construct
  source 1..80: mol_type = other DNA
ccagcgatgcgtaagcacgccttggtcatactttaacttcaatcaatacagcagtcacttctcaccacaagactggcagc

SEQ ID NO: 58275 - DNA, 80 bp, synthetic construct
  source 1..80: mol_type = other DNA
gtttaacaaatgaatataaacgctttaagcctagaaaaatgcatgtaaaaatttacaacttacaaataaaacaaatactc

SEQ ID NO: 58276 - DNA, 80 bp, synthetic construct
  source 1..80: mol_type = other DNA
tcaaatggtgctgacactacatacaacaacgacctaacagctggtgttcacatcttttgtgatggtgaacacgcatatcc

SEQ ID NO: 58277 - DNA, 80 bp, synthetic construct
  source 1..80: mol_type = other DNA
aaatgcaacacatccatgggatgaagatgtcatgccagaacttccatatgaaacatggtatttgtttcaatatggataca

SEQ ID NO: 58278 - DNA, 80 bp, synthetic construct
  source 1..80: mol_type = other DNA
aagaaactgcgcaccacatcctgaagatgatcctgtcagggaagatattttatgctcactagcagatcaacactatggtg

SEQ ID NO: 58279 - DNA, 80 bp, synthetic construct
  source 1..80: mol_type = other DNA
ttccagttattcatgaactggctgaaatggaagacgcaaatgctgtagaaaaagctatagcactacaaataccctttttc

SEQ ID NO: 58280 - DNA, 80 bp, synthetic construct
  source 1..80: mol_type = other DNA
atgcttgaaaacagcgaccatgaagtgttaagaacaggagaaagcacagaattcacttttgactttgactgtgaatggat

SEQ ID NO: 58281 - DNA, 80 bp, synthetic construct
  source 1..80: mol_type = other DNA
aaacaacgaaagagcatacattcctcctggattaatgtttaatccaaaagttcctacaagaagagctcaatacatcagac

SEQ ID NO: 58282 - DNA, 80 bp, synthetic construct
  source 1..80: mol_type = other DNA
agcacggaaacacagcatccagcaacaccagaattcaaccatatgcaaaacctacaagctggatgacaggaccaggtcta

SEQ ID NO: 58283 - DNA, 80 bp, synthetic construct
  source 1..80: mol_type = other DNA
ctcagcgcacaaagagtaggaccagctggctcagacactgcatcatggatggttgttgtcaatccagacggagctgcagt

SEQ ID NO: 58284 - DNA, 80 bp, synthetic construct
  source 1..80: mol_type = other DNA
taactcaggaatggcaggagttggttcaggatttgatcctccttcaggatctctaagaccaactgacttagaatacaaaa

SEQ ID NO: 58285 - DNA, 80 bp, synthetic construct
  source 1..80: mol_type = other DNA
tacaatggtaccaaactcctgcaggtaccaacagtgatggaaacatcatttcaaatccaccactatccatgctcagagat

SEQ ID NO: 58286 - DNA, 80 bp, synthetic construct
  source 1..80: mol_type = other DNA
caagctctctacagaggaaatcaaacaacctacaacctatgctcagatgtgtggatgttcccaaatcaaatttgggacag

SEQ ID NO: 58287 - DNA, 80 bp, synthetic construct
  source 1..80: mol_type = other DNA
atatccaataaccagagaaaatccaatctggtgtaaaaaaccaagatcagacaaaaacacaataattgatcctttcgatg

SEQ ID NO: 58288 - DNA, 80 bp, synthetic construct
  source 1..80: mol_type = other DNA
gaacacttgcaatggatcatccgccaggaacaatcttcataaaaatggcaaaaattccagttccttcaaacaacaacgca

SEQ ID NO: 58289 - DNA, 80 bp, synthetic construct
  source 1..80: mol_type = other DNA
ctatttttgctaaagcttgctacatagctacaactacactaatggggcagaaacagagaacaccttttccacgctgcgac

SEQ ID NO: 58290 - DNA, 80 bp, synthetic construct
  source 1..80: mol_type = other DNA
gactcatacctaaacatctactgcactggacaagtcagctgcgaaattgtctgggaagttgaaagatacgcaacaaagaa

SEQ ID NO: 58291 - DNA, 80 bp, synthetic construct
  source 1..80: mol_type = other DNA
ctggagaccagaaagaagacacaccgcacttggtcttggaattggaggagaagaaaacgtaaatccaacttatcatgtag

SEQ ID NO: 58292 - DNA, 80 bp, synthetic construct
  source 1..80: mol_type = other DNA
acaaaaatggaaaatacattcaaccaacaacttgggacatgtgctatcctatcaaaacaaacatcaataaagtgttgtaa

SEQ ID NO: 58293 - DNA, 80 bp, synthetic construct
  source 1..80: mol_type = other DNA
tctcttaagcctgttcattgcttatgcttataagttcctctccaatggacaagaggaaagaaaagggtgactgtaatccc

SEQ ID NO: 58294 - DNA, 80 bp, synthetic construct
  source 1..80: mol_type = other DNA
gagctcatgagttcgaggctacagtccgatggcagtggtgttgccgtctcgaacctagccgttacacccttgtgcattgt

SEQ ID NO: 58295 - DNA, 80 bp, synthetic construct
  source 1..80: mol_type = other DNA
tgcattgtgggaggagctgttttgcttacgcaatcgcgaaattttatatatttaatgtagtgttgtactgcgtcaggcat

SEQ ID NO: 58296 - DNA, 80 bp, synthetic construct
  source 1..80: mol_type = other DNA
attatatgccaatctgaaattggttcagaacatctacattgtcacatacttgttggaggagccggtctcagcaaaagaaa

SEQ ID NO: 58297 - DNA, 80 bp, synthetic construct
  source 1..80: mol_type = other DNA
tgctaaaatttcacgtgctacacttctgggtcttgtgatggctgaactaacacaacgctgcaaacagcttcttgcgcttc

SEQ ID NO: 58298 - DNA, 80 bp, synthetic construct
  source 1..80: mol_type = other DNA
gtccatttgaaccagctgaggctaatatttttcatctcctcaagcgcattgaacgcgaagcatggtcagggcatactggt

SEQ ID NO: 58299 - DNA, 80 bp, synthetic construct
  source 1..80: mol_type = other DNA
tggctacgtatggggtgatcataaacacgcccaggaagtgacgtatgtcaaccaatcagcatcgagcatatatcctatat

SEQ ID NO: 58300 - DNA, 80 bp, synthetic construct
  source 1..80: mol_type = other DNA
aactgggttcaaattcttcaatacaaagataagcgaggtgatcttcacgctcaaccaattgatcctttacgctttttaaa

SEQ ID NO: 58301 - DNA, 80 bp, synthetic construct
  source 1..80: mol_type = other DNA
gcattacatactaccaaaaaatcgattgatttctccttccagcaaacctgacgtctgcactactccagataactggttca

SEQ ID NO: 58302 - DNA, 80 bp, synthetic construct
  source 1..80: mol_type = other DNA
ttctagctgacaaaacatacgctcacactattattaatgggcttccgctgctagaacataacagaaaagcctatctacaa

SEQ ID NO: 58303 - DNA, 80 bp, synthetic construct
  source 1..80: mol_type = other DNA
tctgtaatgcttgaaactgccttcgctctgtttgctttgacctaaatcttgactgcgtgccgccactatatctttgaggg

SEQ ID NO: 58304 - DNA, 80 bp, synthetic construct
  source 1..80: mol_type = other DNA
atgcagcatgcccttcaacatcatgtacacaccactattgtgtgctattctttgtttgcagctgtggagcttagaaggaa

SEQ ID NO: 58305 - DNA, 80 bp, synthetic construct
  source 1..80: mol_type = other DNA
actcaaagtcatccaattcaggacttcagctgatcaacgtcacccaacatttaattagaataacagacacacctgggcct

SEQ ID NO: 58306 - DNA, 80 bp, synthetic construct
  source 1..80: mol_type = other DNA
cccgcgaacacagcatcgcccatcacgtcagaccccccctccaccacatccacagcatcagccagtggaccagaaggctc

SEQ ID NO: 58307 - DNA, 80 bp, synthetic construct
  source 1..80: mol_type = other DNA
tttatggattgtccaacagaacccaacacaatgacactagtaccataaaggtgcccgaagagagtcaaaaaaccagtctg

SEQ ID NO: 58308 - DNA, 80 bp, synthetic construct
  source 1..80: mol_type = other DNA
atgaccacaaatacagaaccgaaaatattattccaagcaatgctggaggaaaatcacaaagatgcgtcagcacaccgtgg

SEQ ID NO: 58309 - DNA, 80 bp, synthetic construct
  source 1..80: mol_type = other DNA
atggaaaagcttgccgacctcaactacacattgagtgtaatcactttaatgaatgacacattgcattctataattcagga

SEQ ID NO: 58310 - DNA, 80 bp, synthetic construct
  source 1..80: mol_type = other DNA
ctaacatttcttctctggtcatgtggatgctgtcaaccctttgtttggctgctacagtatacagcgacgtcatcggatgg

SEQ ID NO: 58311 - DNA, 80 bp, synthetic construct
  source 1..80: mol_type = other DNA
caagctggaatgacaatgcgcatggtgtcggtgtggtcccgatgcatactgatctggagttagatttttctctcccttct

SEQ ID NO: 58312 - DNA, 80 bp, synthetic construct
  source 1..80: mol_type = other DNA
tagaaagccaaggaatttctacaagtgttcatgctttaggtcattggtttgatggaaggttaaacttgaaaacatctttc

SEQ ID NO: 58313 - DNA, 80 bp, synthetic construct
  source 1..80: mol_type = other DNA
caggacggttcaggactgcagtttgtggactctacccagcacaagtgaaagcaaggaatatggtcagtcctgtcatgagt

SEQ ID NO: 58314 - DNA, 80 bp, synthetic construct
  source 1..80: mol_type = other DNA
gatatcccttgcaagtttttgtctgaaccctcacaggtctcgcttcagcaaggacccgctaccaacagggattacatcgt

SEQ ID NO: 58315 - DNA, 80 bp, synthetic construct
  source 1..80: mol_type = other DNA
gcagaggcaaattgctttagggaaaatggagacaaaagaggcacaagcagttcgacaacatgcagtgagtgcaggctgta

SEQ ID NO: 58316 - DNA, 80 bp, synthetic construct
  source 1..80: mol_type = other DNA
acttagtcgaggacattgagtcaccatctgctatctgggtgtttgctggagctcctgaccgttgccctccaacatgcttg

SEQ ID NO: 58317 - DNA, 80 bp, synthetic construct
  source 1..80: mol_type = other DNA
caaacagccgaccaattgcactaccatcacaatggagaagccagtagttaacgtagacgttgaccctcagagtccgtttg

SEQ ID NO: 58318 - DNA, 80 bp, synthetic construct
  source 1..80: mol_type = other DNA
atgttacctgcaacatgcgtgccgagtattccgtcatgcaggacgtgtacatcaacgctcccggaactatctaccatcag

SEQ ID NO: 58319 - DNA, 80 bp, synthetic construct
  source 1..80: mol_type = other DNA
tggattgtgcttcccgaatgcaccatgcccatcaacattatgcatacactattagtgtgcttcattctttacctacagct

SEQ ID NO: 58320 - DNA, 80 bp, synthetic construct
  source 1..80: mol_type = other DNA
gtcaaagccccaagccacccgcgagcaccactctaccacacacaccagaatccaccaccgtcaaactcaccacaccaaca

SEQ ID NO: 58321 - DNA, 80 bp, synthetic construct
  source 1..80: mol_type = other DNA
agcgaaacagaaggctcaggggaaacgaccccacccccaaacaccacccagggcctgcccccgacagggaccacaccaga

SEQ ID NO: 58322 - DNA, 80 bp, synthetic construct
  source 1..80: mol_type = other DNA
acactcagcaacaaccgccacaagcacgtcaagcacagacaacatgaattccaccacacagatgaccgacaacaccccca

SEQ ID NO: 58323 - DNA, 80 bp, synthetic construct
  source 1..80: mol_type = other DNA
catcaacagtcagcataagtccatccagcagccccagcatgccatccacatcacaaggcatacattatcccgtaaggaat

SEQ ID NO: 58324 - DNA, 80 bp, synthetic construct
  source 1..80: mol_type = other DNA
ctattgtcagtctcgagccctaagacagtgacaacaccgacaccaatgagccctggaaggatgagcccggaaaccagcag

SEQ ID NO: 58325 - DNA, 80 bp, synthetic construct
  source 1..80: mol_type = other DNA
tcagcactcagccatgagcagaataccaaccctctacacagcaacccaggtctccactgagaacaccaaccacagcacac

SEQ ID NO: 58326 - DNA, 80 bp, synthetic construct
  source 1..80: mol_type = other DNA
ctagacagtctgagtcctcagtacagccggcaaaccaaagcccaacaacttccccagcgcaaacaatccttctgatgagt

SEQ ID NO: 58327 - DNA, 80 bp, synthetic construct
  source 1..80: mol_type = other DNA
gctgctcccaaagctattcaggacatgcatcccagcccaacaaacaggtccaagaggaaccttgaggtggaaataatttt

SEQ ID NO: 58328 - DNA, 80 bp, synthetic construct
  source 1..80: mol_type = other DNA
gtcgggtttagggggagctcatggacagtcaaacgcaactgaacacaatggaacaaacaccaccacagtgcccggcacaa

SEQ ID NO: 58329 - DNA, 80 bp, synthetic construct
  source 1..80: mol_type = other DNA
aactctgtctcaaggtctgaagaaatattacggtaaaatactgaagcttctgcaccttaccttggaagaggatactgaag

SEQ ID NO: 58330 - DNA, 80 bp, synthetic construct
  source 1..80: mol_type = other DNA
cctagataacgaagtcattccagggcctcaaacaatggcctatggaggacgtggtccgtgggaacatcttcctgaggtag

SEQ ID NO: 58331 - DNA, 80 bp, synthetic construct
  source 1..80: mol_type = other DNA
gagatcagcgcctagctgcgtcttctgttagcactacttataaacctaacaaaaaagaaaaacttatgctaaacttgcta

SEQ ID NO: 58332 - DNA, 80 bp, synthetic construct
  source 1..80: mol_type = other DNA
gacaaatgtaaagagctaaatctattagtttatgaagacttggtagctaattgtcctgaactactccttatgcttgaagg

SEQ ID NO: 58333 - DNA, 80 bp, synthetic construct
  source 1..80: mol_type = other DNA
tcaaccaggaggggcacgccttatagaacaagtcttgggcatgcaccgtattaatgtttgttctaactttacagctctca

SEQ ID NO: 58334 - DNA, 80 bp, synthetic construct
  source 1..80: mol_type = other DNA
catatctttttcatctacatcctgttacttcgcttgactcagacaataaagctttacagcttttgttgattcaaggctat

SEQ ID NO: 58335 - DNA, 80 bp, synthetic construct
  source 1..80: mol_type = other DNA
aatcctctagccgttggtcacgccctgtgctgtgtcctgaacaaacaattcgggaaacaaaacactgtttgcttttacgg

SEQ ID NO: 58336 - DNA, 80 bp, synthetic construct
  source 1..80: mol_type = other DNA
gcctgcctcaacaggtaaaacaaatatggccaaggcaatcgtccaagggattagactttatgggtgtgttaatcatttga

SEQ ID NO: 58337 - DNA, 80 bp, synthetic construct
  source 1..80: mol_type = other DNA
agctgctgcacttcctgattcaatcagactgcatccggtctccggcgagtgaacatctctggaaaaagctccacgcttgt

SEQ ID NO: 58338 - DNA, 80 bp, synthetic construct
  source 1..80: mol_type = other DNA
acaaaggatttgtatttaatgactgcagacaacgcctagttgtttggtgggaggagtgcttaatgcaccaggattgggtg

SEQ ID NO: 58339 - DNA, 80 bp, synthetic construct
  source 1..80: mol_type = other DNA
gaacctgcaaagtgtatcttgggcgggacagaatgcagaattgacgtcaagcatagagacagtgtacttttaactcaaac

SEQ ID NO: 58340 - DNA, 80 bp, synthetic construct
  source 1..80: mol_type = other DNA
acctgtaattatatccactaaccacgatatctacgcggttgttggtggcaattctgtttctcatgttcacgcggctccat

SEQ ID NO: 58341 - DNA, 80 bp, synthetic construct
  source 1..80: mol_type = other DNA
taaaagaaagagtgattcagctaaattttatgaaacaacttcctcaaacatttggagaaatcactgctactgagattgca

SEQ ID NO: 58342 - DNA, 80 bp, synthetic construct
  source 1..80: mol_type = other DNA
gctcttctacagtggtgtttcaatgagtacgactgtactctgacaggatttaaacaaaaatggaatttagataaaattcc

SEQ ID NO: 58343 - DNA, 80 bp, synthetic construct
  source 1..80: mol_type = other DNA
aaactcatttcctcttggggtcctttgtcctactcattcacaggactttacacttcacgaaaacggatactgcactgatt

SEQ ID NO: 58344 - DNA, 80 bp, synthetic construct
  source 1..80: mol_type = other DNA
gcggtggttaccttcctcatagtgctgacaattctatgtacactgatcgcgcaagcgaaactagcacaggagacatcaca

SEQ ID NO: 58345 - DNA, 80 bp, synthetic construct
  source 1..80: mol_type = other DNA
ccaagtaagtaaatacacatgcgcaagtaattcttttactttcacttcgctatttttaccaatttttacttttaggtgac

SEQ ID NO: 58346 - DNA, 80 bp, synthetic construct
  source 1..80: mol_type = other DNA
ttgggggattcggacggagaagacaccgagcctgagacatcgcaagtggactattgtccacccaagaaacgtcgtctaac

SEQ ID NO: 58347 - DNA, 80 bp, synthetic construct
  source 1..80: mol_type = other DNA
tgctccagcaagtcctccaaactcacctgcgagctctgtaagtactattactttctttaacacttggcacgcacagccac

SEQ ID NO: 58348 - DNA, 80 bp, synthetic construct
  source 1..80: mol_type = other DNA
ggtgagtctactatggctttcaatcctcctgtgattagagctttttctcaacctgcttttacttatgtcttcaaatttcc

SEQ ID NO: 58349 - DNA, 80 bp, synthetic construct
  source 1..80: mol_type = other DNA
gtgacgaagatgagctcagggagtatgaaagacaagcatcgctcctacaaaagaaaagggagtccagaaagaggggagag

SEQ ID NO: 58350 - DNA, 80 bp, synthetic construct
  source 1..80: mol_type = other DNA
gaagagacactggcagacaactcatcacaggagcaggagccgcagcccgatccgacacagtggggagagaggctcgggct

SEQ ID NO: 58351 - DNA, 80 bp, synthetic construct
  source 1..80: mol_type = other DNA
catatcatcaggaacacccaatcagccacctatcgtcttgcactgcttcgaagacctcagaccaagtgatgaagacgagg

SEQ ID NO: 58352 - DNA, 80 bp, synthetic construct
  source 1..80: mol_type = other DNA
gagaatacatcggggaaaaaagacaatagaacaaatccatacactgtattcagtcaacacagagcttccaatcctgaagc

SEQ ID NO: 58353 - DNA, 80 bp, synthetic construct
  source 1..80: mol_type = other DNA
tccagggtggtgtgggttctactggcactctactcgcattgctagagatggtactaattcaatctttaatgaaatgaaac

SEQ ID NO: 58354 - DNA, 80 bp, synthetic construct
  source 1..80: mol_type = other DNA
aacagtttcaacagctacaaattgataataaaataggatgggataacactagagaactattgtttaatcaaaagaaaaca

SEQ ID NO: 58355 - DNA, 80 bp, synthetic construct
  source 1..80: mol_type = other DNA
ctagatcaaaaatacagaaatatgttctggcactttagaaataactctgattgtgaaagatgtaattactgggatgatgt

SEQ ID NO: 58356 - DNA, 80 bp, synthetic construct
  source 1..80: mol_type = other DNA
gtaccgtagacacttagctaatgtttcctcacagacagaagcagacgagataactgacgaggaaatgctttctgctgctg

SEQ ID NO: 58357 - DNA, 80 bp, synthetic construct
  source 1..80: mol_type = other DNA
aaagcatggaagcagatgcctccaattaagagacagcctagagggtgggtgctgcctggatacagatatcttgggccatt

SEQ ID NO: 58358 - DNA, 80 bp, synthetic construct
  source 1..80: mol_type = other DNA
taatccacttgataacggtgaacctgtaaataacgctgatcgcgctgctcaattacatgatcacgcctactctgaactaa

SEQ ID NO: 58359 - DNA, 80 bp, synthetic construct
  source 1..80: mol_type = other DNA
atatccacaatggaaagaaaaagaatggctgcttcatgcacttttagctcatggaactgaacaatctatgatacaattaa

SEQ ID NO: 58360 - DNA, 80 bp, synthetic construct
  source 1..80: mol_type = other DNA
taaagagtggtaaaaatccatacctgtatttcaataaagctgatgaaaaattcattgatgatctaaaagacgattggtca

SEQ ID NO: 58361 - DNA, 80 bp, synthetic construct
  source 1..80: mol_type = other DNA
attggtggaattattggatccagtttttttaaaataaagcgcgccgtggctcctgctctgggaaataaagagagagccca

SEQ ID NO: 58362 - DNA, 80 bp, synthetic construct
  source 1..80: mol_type = other DNA
aaaaagacacttttactttgttaactcaaataaaggtgcaaaaaaaacaaaaaaaagtgaacctaaaccaggaacctcaa

SEQ ID NO: 58363 - DNA, 80 bp, synthetic construct
  source 1..80: mol_type = other DNA
aaatgtctgacactgacattcaagaccaacaacctgatactgtggacgcaccacaaaacacctcagggggaggaacagga

SEQ ID NO: 58364 - DNA, 80 bp, synthetic construct
  source 1..80: mol_type = other DNA
agtattggaggaggaaaaggatctggtgtggggatttccactggagggtgggtcggaggttctcacttttcagacaaata

SEQ ID NO: 58365 - DNA, 80 bp, synthetic construct
  source 1..80: mol_type = other DNA
tgtggttactaaaaacacaagacaatttataaccacaattcagaatggtcacctctacaaaacagaggccattgaaacaa

SEQ ID NO: 58366 - DNA, 80 bp, synthetic construct
  source 1..80: mol_type = other DNA
caaaccaaagtggaaaatcacagcgctgcgtcacaactccatggacatactttaactttaatcaatacagctgtcacttc

SEQ ID NO: 58367 - DNA, 80 bp, synthetic construct
  source 1..80: mol_type = other DNA
tcaccacaggattggcagcgccttacaaatgaatataagcgcttcagacctaaagcaatgcaagtaaagatttacaactt

SEQ ID NO: 58368 - DNA, 80 bp, synthetic construct
  source 1..80: mol_type = other DNA
gcaaataaaacaaatactttcaaatggtgctgacacaacatacaacaatgacctcacagctggcgttcacatcttttgtg

SEQ ID NO: 58369 - DNA, 80 bp, synthetic construct
  source 1..80: mol_type = other DNA
atggagagcatgcttacccaaatgcatctcatccatgggatgaggacgtcatgcctgatcttccatacaagacctggaaa

SEQ ID NO: 58370 - DNA, 80 bp, synthetic construct
  source 1..80: mol_type = other DNA
gaaactgcgctcctcatccggatgaagacataatccgtgatgacttgcttatttctttagaagatcgccattttggggct

SEQ ID NO: 58371 - DNA, 80 bp, synthetic construct
  source 1..80: mol_type = other DNA
ctttttcaatatggatatattcctattgaaaatgaactcgcagatcttgatggaaatgcagctggaggcaatgctacaga

SEQ ID NO: 58372 - DNA, 80 bp, synthetic construct
  source 1..80: mol_type = other DNA
aaaagcacttctgtatcagatgcctttttttctacttgaaaacagtgaccaccaagtacttagaactggtgagagcactg

SEQ ID NO: 58373 - DNA, 80 bp, synthetic construct
  source 1..80: mol_type = other DNA
aatttacttttaactttgactgtgaatgggttaacaatgaaagagcatacattcctcctggactaatgtttaatccaaaa

SEQ ID NO: 58374 - DNA, 80 bp, synthetic construct
  source 1..80: mol_type = other DNA
gtcccaacaagaagagttcagtacataagacaaaacggaagcacagcagccagcacaggcagaattcagccatactcaaa

SEQ ID NO: 58375 - DNA, 80 bp, synthetic construct
  source 1..80: mol_type = other DNA
accaacaagctggatgacaggacctggcctactcagtgcacaaagagtaggaccacagtcatcagacactgctccattca

SEQ ID NO: 58376 - DNA, 80 bp, synthetic construct
  source 1..80: mol_type = other DNA
tggtttgcactaacccagaaggaacacacataaacacaggtgctgcaggatttggaactggctttgatcctccaagcgga

SEQ ID NO: 58377 - DNA, 80 bp, synthetic construct
  source 1..80: mol_type = other DNA
tgtctggcaccaactaacctagaatacaaacttcagtggtaccagacaccagaaggaacaggaaataatggaaacataat

SEQ ID NO: 58378 - DNA, 80 bp, synthetic construct
  source 1..80: mol_type = other DNA
tgcaaacccatcactctcaatgcttagagaccaactcctatacaaaggaaaccagaccacatacaatctagtaggggaca

SEQ ID NO: 58379 - DNA, 80 bp, synthetic construct
  source 1..80: mol_type = other DNA
tatggatgtttccaaatcaagtctgggacagatttcctatcaccagagaaaatccaatctggtgcaaaaaaccaagggct

SEQ ID NO: 58380 - DNA, 80 bp, synthetic construct
  source 1..80: mol_type = other DNA
gacaaacacacaatcatggatccatttgatggatcaattgcaatggatcatcctccaggcactatttttataaaaatggc

SEQ ID NO: 58381 - DNA, 80 bp, synthetic construct
  source 1..80: mol_type = other DNA
gttctctgcaaggctgtttacatggcaacaactactctcatgtcacacaaacaaaggaatatgtttcctcgttgtgacat

SEQ ID NO: 58382 - DNA, 80 bp, synthetic construct
  source 1..80: mol_type = other DNA
aaaaattccagttccaactgcctcaaatgcagactcatacctaaacatatactgtactggacaagtcagctgtgaaattg

SEQ ID NO: 58383 - DNA, 80 bp, synthetic construct
  source 1..80: mol_type = other DNA
tatgggaggtagaaagatacgcaacaaagaactggcgtccagaaagaagacatactgcactcgggatgtcactgggagga

SEQ ID NO: 58384 - DNA, 80 bp, synthetic construct
  source 1..80: mol_type = other DNA
gagagcaactacacgcctacataccacgtggatccaacaggagcatacatccagcccacgtcatatgatcagtgtatgcc

SEQ ID NO: 58385 - DNA, 80 bp, synthetic construct
  source 1..80: mol_type = other DNA
agtaaaaacaaacatcaataaagtgttgtagtcttataagcctcttttttgcttctgcttacaagttcctcctcaatgga

SEQ ID NO: 58386 - DNA, 80 bp, synthetic construct
  source 1..80: mol_type = other DNA
caagcggaaagtgaagggtgactgtagtcctgagctcatgggttcaagaccacagcccgatggtagtggtgttaccgtct

SEQ ID NO: 58387 - DNA, 80 bp, synthetic construct
  source 1..80: mol_type = other DNA
ttaccgtctcgaacctagccgacagcccttgtacattgtggggggagctgttttgtttgcttatgcaatcgcgaaactct

SEQ ID NO: 58388 - DNA, 80 bp, synthetic construct
  source 1..80: mol_type = other DNA
cgaacctagccgacagcccttgtacattgtggggggagctgttttgtttgcttatgcaatcgcgaaactctatatctttt

SEQ ID NO: 58389 - DNA, 80 bp, synthetic construct
  source 1..80: mol_type = other DNA
ccttgtacattgtggggggagctgttttgtttgcttatgcaatcgcgaaactctatatcttttaatgttgttgttgtaca

SEQ ID NO: 58390 - DNA, 80 bp, synthetic construct
  source 1..80: mol_type = other DNA
catagttcagtctgagctaggagagaaaaacttacactgccatattatagttgggggagaaggactaagcaagaggaatg

SEQ ID NO: 58391 - DNA, 80 bp, synthetic construct
  source 1..80: mol_type = other DNA
ctaaatcatcctgtgctcagttctatggtttaatactagctgagataattcaacgctgcaaatctcttctggctacacgt

SEQ ID NO: 58392 - DNA, 80 bp, synthetic construct
  source 1..80: mol_type = other DNA
ccttttgaacctgaggaggctgacatatttcacactctaaaaaaggctgagcgagaggcatggggtggagttactggcgg

SEQ ID NO: 58393 - DNA, 80 bp, synthetic construct
  source 1..80: mol_type = other DNA
tggttatatgatataatccataaccactcccaggaaatgacgtatgatagccaatcagtattgagtattaaacctatata

SEQ ID NO: 58394 - DNA, 80 bp, synthetic construct
  source 1..80: mol_type = other DNA
caacatgcagatccttcaatatagagatcgcagaggagaccttcatgcacaaacagtggatcctcttcgcttcttcaaaa

SEQ ID NO: 58395 - DNA, 80 bp, synthetic construct
  source 1..80: mol_type = other DNA
actaccttttacctaaaaatagatgtatttcatcttacagcaaacctgatgtttgtacttctcctgacaactggttcatt

SEQ ID NO: 58396 - DNA, 80 bp, synthetic construct
  source 1..80: mol_type = other DNA
ttagctgaaaaaacttactctcacactcttattaacgggctgccgcttccagaacattacagaaaaaactaccacgcaac

SEQ ID NO: 58397 - DNA, 80 bp, synthetic construct
  source 1..80: mol_type = other DNA
ggactcggattcgattcaaagatgatagctccttcgaggatgtcaatggcattcggaagcccaaacatctatatgtgtct

SEQ ID NO: 58398 - DNA, 80 bp, synthetic construct
  source 1..80: mol_type = other DNA
aaaatagcattgaagacgtcaaaatgttcatataaaatagtgaagtattgtattgtaacaattttcaatacgttactgaa

SEQ ID NO: 58399 - DNA, 80 bp, synthetic construct
  source 1..80: mol_type = other DNA
ttaagcattgtgtttttcaagtatgttgcatccatttgttacattcatttgcatgtcagcaaattcagtaaggcctatat

SEQ ID NO: 58400 - DNA, 80 bp, synthetic construct
  source 1..80: mol_type = other DNA
actagatatcactgctgatccaacaacagttccacagattcaaagaattatgcgagtaaattggaaaaaatggtggcaag

SEQ ID NO: 58401 - DNA, 80 bp, synthetic construct
  source 1..80: mol_type = other DNA
tgttttatacagtagtagactatattaatcaaattatccaagttatgtccaaacggtcaagatcattagacacggctgct

SEQ ID NO: 58402 - DNA, 80 bp, synthetic construct
  source 1..80: mol_type = other DNA
ttttacgtttcataaaccaaacatttttccttactcagcgtcattcacactgaacagatcgcaaccagctcatgataact

SEQ ID NO: 58403 - DNA, 80 bp, synthetic construct
  source 1..80: mol_type = other DNA
gtctacctgacatcatttgtggtcccgatactgctgaaagctctttacatgttgaccaccagagggaggcaaactactaa

SEQ ID NO: 58404 - DNA, 80 bp, synthetic construct
  source 1..80: mol_type = other DNA
gtagcgtcagaaagtctcgtggtgtcaaacctaaacctgtctgaggccgatgtaaatgaaatctgctacagattcaatgc

SEQ ID NO: 58405 - DNA, 80 bp, synthetic construct
  source 1..80: mol_type = other DNA
ctcctcacccttaatgttatggtgcaacatggtgacagccattggtatggagatggccctggccaacaagcaacactgca

SEQ ID NO: 58406 - DNA, 80 bp, synthetic construct
  source 1..80: mol_type = other DNA
aacctggtcagtacatcatcaagaagctgagaaacttcgatgtctaccttctcttgaagccgacgaagagcaatggcccc

SEQ ID NO: 58407 - DNA, 80 bp, synthetic construct
  source 1..80: mol_type = other DNA
atgtttgtgtccatcgcctggtatgccaaggacagcagcaacactttcttcgagaattatagagtgtttaaggctgccaa

SEQ ID NO: 58408 - DNA, 80 bp, synthetic construct
  source 1..80: mol_type = other DNA
cagggaaggagggtggtgttggacagatttccactccttcaagccatccaaagtgtcgactcttgtccgatgctcctcca

SEQ ID NO: 58409 - DNA, 80 bp, synthetic construct
  source 1..80: mol_type = other DNA
ccatgagcaacctctattggttctggagagagcagttcaacattcagccctgggagaccttgcctaatgaggcctccatg

SEQ ID NO: 58410 - DNA, 80 bp, synthetic construct
  source 1..80: mol_type = other DNA
gcttctgtgtcgaagatgatgaagatttgcctgatggttatgcttgaggacaaggccagaacagaagagatatgtacaaa

SEQ ID NO: 58411 - DNA, 80 bp, synthetic construct
  source 1..80: mol_type = other DNA
cttaagatacacgctcctggaggggtttgtgtcagagccatgtctgccaaagccacaaaagatgatcgagaaacttcctg

SEQ ID NO: 58412 - DNA, 80 bp, synthetic construct
  source 1..80: mol_type = other DNA
cagaggtcgaggccacattccaggacattggcttcaactgggaagtcactgaggaaaaattccccccatttagcaagaag

SEQ ID NO: 58413 - DNA, 80 bp, synthetic construct
  source 1..80: mol_type = other DNA
agtttgcgagaaccaagctccaggtctggcttatcaacaagagcctggagctcatgaaagagatctccataagacctttc

SEQ ID NO: 58414 - DNA, 80 bp, synthetic construct
  source 1..80: mol_type = other DNA
tgcggaagatagtgaagatggaagcagctcacccaggaaggtatgactacttgggctatggtgaccctccactggacgac

SEQ ID NO: 58415 - DNA, 80 bp, synthetic construct
  source 1..80: mol_type = other DNA
atcaggacccatgaatactcaacttccttccaaaaatatgtctgcaacctggcccttatcatgctaaagaccacttgggg

SEQ ID NO: 58416 - DNA, 80 bp, synthetic construct
  source 1..80: mol_type = other DNA
catgaacataaagcacagcatgcatatggacatactgaatgcgtttagcaacttgacattggatagagtgtccacgctca

SEQ ID NO: 58417 - DNA, 80 bp, synthetic construct
  source 1..80: mol_type = other DNA
aggcatctagtgcctttgatgagagctggtacacctcagatggatccactccatatcatcggaagaaggtggtggaaaat

SEQ ID NO: 58418 - DNA, 80 bp, synthetic construct
  source 1..80: mol_type = other DNA
gcctagaaaccatagcaaagcaggtgtgtcgtcgcttcaaatcagaaactttgacgaaccctgatcagaagaccaggatt

SEQ ID NO: 58419 - DNA, 80 bp, synthetic construct
  source 1..80: mol_type = other DNA
atgtatgatggctggaaggagcctcctgacttaaactatgttaagaagatggcaaggcattgcatcaaccagaccatcga

SEQ ID NO: 58420 - DNA, 80 bp, synthetic construct
  source 1..80: mol_type = other DNA
tccaagatgggctgaggaaggaagatcctacatcaagacagagactggaatgcttcaagggatcctccacttcctatcca

SEQ ID NO: 58421 - DNA, 80 bp, synthetic construct
  source 1..80: mol_type = other DNA
gtctgcaccacaccacactacagatctggttccaacacttgagcttcagagagttgaatcatgctttcaaggattatcgc

SEQ ID NO: 58422 - DNA, 80 bp, synthetic construct
  source 1..80: mol_type = other DNA
tcaggggttttagtggatgtcctccagagctcagatgactcggctgtattgatttcatacccttgggagagcaatgaagt

SEQ ID NO: 58423 - DNA, 80 bp, synthetic construct
  source 1..80: mol_type = other DNA
ggggtcaaggtgcagaagtctgactgccatgttgctacacatgaagaagaaagtaggcatcttcttgggattgtacccat

SEQ ID NO: 58424 - DNA, 80 bp, synthetic construct
  source 1..80: mol_type = other DNA
cagtcaagtgcacaacacacacgctctacatgatggagttcaactcagaattcttcttccataatgatcacataaggccc

SEQ ID NO: 58425 - DNA, 80 bp, synthetic construct
  source 1..80: mol_type = other DNA
accatcaagtgggtgattgcctgtgatcaagtttctgagcaggaagccttggttgccaggcaagaggagatgtcaaatgc

SEQ ID NO: 58426 - DNA, 80 bp, synthetic construct
  source 1..80: mol_type = other DNA
cgagcttaaagaggaacacggtattggggataagagggacaggactgcaaagctggacgacaactggttcagttgcctca

SEQ ID NO: 58427 - DNA, 80 bp, synthetic construct
  source 1..80: mol_type = other DNA
ctgacgagtgtgctcgagggagggggatcgatcagtctgtgcagtttgtgccaaattggacagtctgtgctccattatca

SEQ ID NO: 58428 - DNA, 80 bp, synthetic construct
  source 1..80: mol_type = other DNA
cttgttgggagcaacagtctctttcctctttgataagttcttgagagaggccatggtcatgaaggacccctcattgggat

SEQ ID NO: 58429 - DNA, 80 bp, synthetic construct
  source 1..80: mol_type = other DNA
acttcctaatggaccacccatttggggctggcatcactggattcaaattcaacttgtggagtcaggtcaggttcggcaat

SEQ ID NO: 58430 - DNA, 80 bp, synthetic construct
  source 1..80: mol_type = other DNA
ctcggagcagtatacaagctgtttcttcaaagcataaaagaggacgtcatccctactgagaaggagagagtgtatcgcag

SEQ ID NO: 58431 - DNA, 80 bp, synthetic construct
  source 1..80: mol_type = other DNA
ccttgaaacaacctcctgcggtgctatggctagttctgttgtgatccgatggggtagcagagcaaaatggtttcgactcc

SEQ ID NO: 58432 - DNA, 80 bp, synthetic construct
  source 1..80: mol_type = other DNA
tggagacgatgaaggttccagccgactgggaggatcaaatggaccagagccccgaatgttgctatagacagcccaagacc

SEQ ID NO: 58433 - DNA, 80 bp, synthetic construct
  source 1..80: mol_type = other DNA
actgaagaggttagactgaaggtggcagaaaaactgcatgccccaggggtgtcagctagcctgtcgagaggtgatcacat

SEQ ID NO: 58434 - DNA, 80 bp, synthetic construct
  source 1..80: mol_type = other DNA
ttagcaaaattgttgcttcttctgtttacatcttgtctaggaatgtggtgtgccagggaacctcttggatgactcctgat

SEQ ID NO: 58435 - DNA, 80 bp, synthetic construct
  source 1..80: mol_type = other DNA
gaaaactcacatctgcaaagggagcccctactcagactgatcttgaggcagaacttgttgaacactaaagacatagacca

SEQ ID NO: 58436 - DNA, 80 bp, synthetic construct
  source 1..80: mol_type = other DNA
gctgaatgagctggaagtggcaaccctcttccccatgaacagagagtatgagcatgtcaagaatgtcctagcttcataca

SEQ ID NO: 58437 - DNA, 80 bp, synthetic construct
  source 1..80: mol_type = other DNA
aagaggtcaccaaatactcgacgggtttccacaagccagggaagatgcggcctaggctcagccacaaggcaactctgccg

SEQ ID NO: 58438 - DNA, 80 bp, synthetic construct
  source 1..80: mol_type = other DNA
tgactgtggatggcatgaaggatcttgggaggaggaagaccgtccaaactagagtcattgtcttccaaaaggaggaggcc

SEQ ID NO: 58439 - DNA, 80 bp, synthetic construct
  source 1..80: mol_type = other DNA
atgagggccaagccagaggatgtcttgactgacatttggtggggcatgaagaggagtgggctcactgctcctgcactgga

SEQ ID NO: 58440 - DNA, 80 bp, synthetic construct
  source 1..80: mol_type = other DNA
tgagcactacaaggaactgtgccgtgtactgccctggctatcaagagatcctcaagagactcttaaaaagtcacccttcc

SEQ ID NO: 58441 - DNA, 80 bp, synthetic construct
  source 1..80: mol_type = other DNA
tgcatcatcaccagttgaggaattttttatccagaatggatctgcagggcagagagatcaaactagtgggagcccccctg

SEQ ID NO: 58442 - DNA, 80 bp, synthetic construct
  source 1..80: mol_type = other DNA
aagaagaaaatggagaccaacatctcaactgccatttccaggaattacttccccaggtgggagctcacaatgcactcaga

SEQ ID NO: 58443 - DNA, 80 bp, synthetic construct
  source 1..80: mol_type = other DNA
cgatagagggctggaaagggctcgcctaagtgacgctctcaagcacttctgctacatgacttgcatcggaccatacactg

SEQ ID NO: 58444 - DNA, 80 bp, synthetic construct
  source 1..80: mol_type = other DNA
actctcgaaaggaacaaatgataatagagggtctgaggagcacgccccagatccccataaatgctggtggtgggaaaact

SEQ ID NO: 58445 - DNA, 80 bp, synthetic construct
  source 1..80: mol_type = other DNA
tttccggggttcatgcccaagttgtcgccggccccaagcattgctctcagagagctgttctggaaagctgaccacttccc

SEQ ID NO: 58446 - DNA, 80 bp, synthetic construct
  source 1..80: mol_type = other DNA
ttccggtcttcatccaggctgagattcagcgacctgagcacctcagcatgtcacggatgaaattgaggatcgatggcact

SEQ ID NO: 58447 - DNA, 80 bp, synthetic construct
  source 1..80: mol_type = other DNA
tgcgtgtccctagtctacaaagaggacgatcaacggaccatgcgcattttgtctttccatggaagatccacagatgtctc

SEQ ID NO: 58448 - DNA, 80 bp, synthetic construct
  source 1..80: mol_type = other DNA
tcaactaaatgtatcaactttgcaggagattctccaatcccagctctggatgcggcgtgacccaacagagagctggttct

SEQ ID NO: 58449 - DNA, 80 bp, synthetic construct
  source 1..80: mol_type = other DNA
tgcttaagtctctgagtccggccaccgtttctaaactcagagagaagcttgaagcaggagtcagcattccaggcattgac

SEQ ID NO: 58450 - DNA, 80 bp, synthetic construct
  source 1..80: mol_type = other DNA
accgtttctaaactcagagagaagcttgaagcaggagtcagcattccaggcattgacaccactagattgagggagatcct

SEQ ID NO: 58451 - DNA, 80 bp, synthetic construct
  source 1..80: mol_type = other DNA
agacaccaagaacccaacaggccaggtctggaagcaggcaatcttggcagtcgcaaagggcaacgtgccaagagtggatg

SEQ ID NO: 58452 - DNA, 80 bp, synthetic construct
  source 1..80: mol_type = other DNA
aggatcaggtgatggaggagagattcttggccggtgatgtgtccaaggatgaagagcactcggcccaggccctgaggtca

SEQ ID NO: 58453 - DNA, 80 bp, synthetic construct
  source 1..80: mol_type = other DNA
acgttccatagagttcaagttgacattccaagagagacaaaaatccagctagccacacttggagtagagggcaagcagtg

SEQ ID NO: 58454 - DNA, 80 bp, synthetic construct
  source 1..80: mol_type = other DNA
agcagtggatgtctacaaccacctgatcatggaaaaccttgttccaagaatgtcagacactgacaccaccaacataggag

SEQ ID NO: 58455 - DNA, 80 bp, synthetic construct
  source 1..80: mol_type = other DNA
gaaagccgaccctgcagtcactctcaacagagcagaaaagaaaaagggcttccaattaacctgcgacctgtccgacatca

SEQ ID NO: 58456 - DNA, 80 bp, synthetic construct
  source 1..80: mol_type = other DNA
acacatttgttgaggccacaaaggatggtgctctcatgcatgaagccataagtatgccaccgtacatggtctccatctta

SEQ ID NO: 58457 - DNA, 80 bp, synthetic construct
  source 1..80: mol_type = other DNA
gatgcagactggaagggcctagctgtccatggatttcaaaagaaagatatcccgattgcaaaaaatgtggagggcttttt

SEQ ID NO: 58458 - DNA, 80 bp, synthetic construct
  source 1..80: mol_type = other DNA
atgtgttgttgttgtacctgcgccatcttagttatatatcatcgggcgctgagccggcggacatattggattccaagatg

SEQ ID NO: 58459 - DNA, 80 bp, synthetic construct
  source 1..80: mol_type = other DNA
ttttaacaaaaggatggcccacaggatcagtatattttaaagagtatacggacatagcagcgttttcagttgacccacaa

SEQ ID NO: 58460 - DNA, 80 bp, synthetic construct
  source 1..80: mol_type = other DNA
tttgaacgaatggttatgcaatccgatggacataacattgtattattaccaacaaactgatgaagcaaataaatggatat

SEQ ID NO: 58461 - DNA, 80 bp, synthetic construct
  source 1..80: mol_type = other DNA
aatgtcgcagtaattcaggtgggtggcgcgaatgtactagacataacagctgatccaacaactgcaccacagatagaatg

SEQ ID NO: 58462 - DNA, 80 bp, synthetic construct
  source 1..80: mol_type = other DNA
ctatactgcgattacaatatagttctgatgaaatataattcaacgctagaatcggatatgtcagaactagctgatcttat

SEQ ID NO: 58463 - DNA, 80 bp, synthetic construct
  source 1..80: mol_type = other DNA
taagctgcttcgttgtatccacaaacagactctgtaatgctcgaaacttccttcgctctgtttgctttgacctaaatctt

SEQ ID NO: 58464 - DNA, 80 bp, synthetic construct
  source 1..80: mol_type = other DNA
gcggcatgtcagtacgtaagtgttaactttgaggaagtggattgagcatcccaaccgcaacatgcccatcagcaccatgc

SEQ ID NO: 58465 - DNA, 80 bp, synthetic construct
  source 1..80: mol_type = other DNA
cacaataagacaaacgctgtgacaacgtccagtaacagccagagctcagaatcaccagcaagaacggccccacctgtcac

SEQ ID NO: 58466 - DNA, 80 bp, synthetic construct
  source 1..80: mol_type = other DNA
gccggactcccccaccgtcacacccacaactccagccagcgcaccagaaggctcaggggaggcccactcatccccgccaa

SEQ ID NO: 58467 - DNA, 80 bp, synthetic construct
  source 1..80: mol_type = other DNA
acaacacagagggcccgtctctgccggagtccacgtcagagccccccgcggcaaccagcacaggcatcccaagtgcaagt

SEQ ID NO: 58468 - DNA, 80 bp, synthetic construct
  source 1..80: mol_type = other DNA
gatgtcaactccagcacacaggcagccagagacacctccacaccaacagtccgcaccagtccccccaacagccccagcac

SEQ ID NO: 58469 - DNA, 80 bp, synthetic construct
  source 1..80: mol_type = other DNA
ttgagcatcccaaccgcaacatgcccatcagcaccatgcacatatcactgatgtgtgcagttctttgcctgcagctgtat

SEQ ID NO: 58470 - DNA, 80 bp, synthetic construct
  source 1..80: mol_type = other DNA
cttgacacagtcgacaaccttaggcccaatgacctctctaacacagacagacctcccacagagtgtcacctccatagctg

SEQ ID NO: 58471 - DNA, 80 bp, synthetic construct
  source 1..80: mol_type = other DNA
acatatcactgatgtgtgcagttctttgcctgcagctgtatggtctggggggaacccatgggttacacaatggaactgaa

SEQ ID NO: 58472 - DNA, 80 bp, synthetic construct
  source 1..80: mol_type = other DNA
cacccggcacaagtcaaagccccaagccacccgcgagcaccactccaccacacacaccagaatcctccaccgtcaaactc

SEQ ID NO: 58473 - DNA, 80 bp, synthetic construct
  source 1..80: mol_type = other DNA
tgaaaggggatagattaaacgggcatctaattcacaaaattgaaccacattttaacacctcttggatgtcctgggatggt

SEQ ID NO: 58474 - DNA, 80 bp, synthetic construct
  source 1..80: mol_type = other DNA
tctcaaagaaatacttgcggcacgtcagtacgtaagtaatagctttgagagcgtaggagagacatccgttatctagcatg

SEQ ID NO: 58475 - DNA, 80 bp, synthetic construct
  source 1..80: mol_type = other DNA
ggtttcttcaatgaggtattactgttcagatcgccaagtacaccaactaccatcaagccgtctcccacgggatcacccac

SEQ ID NO: 58476 - DNA, 80 bp, synthetic construct
  source 1..80: mol_type = other DNA
agttgagcccttcaggtcatactatgccaaaggatctcttacaattgattcaggttacttttcagctaagtgttatccac

SEQ ID NO: 58477 - DNA, 80 bp, synthetic construct
  source 1..80: mol_type = other DNA
gaacatcaaactcagggctgcaattgataaatttgacacagcattcagttgagattgctaacactcctggccccaaacac

SEQ ID NO: 58478 - DNA, 80 bp, synthetic construct
  source 1..80: mol_type = other DNA
tcaagtctcaagaccatcaactgtatcaacattaaagcctcaactgacaaagaacataatgaagttgaaataaatgtgct

SEQ ID NO: 58479 - DNA, 80 bp, synthetic construct
  source 1..80: mol_type = other DNA
ccttccccaagttgcaatcaacctttctaattgtcatgtctctattaggtcacatgtctgtgattactccttagacactg

SEQ ID NO: 58480 - DNA, 80 bp, synthetic construct
  source 1..80: mol_type = other DNA
atggaaagataagacttccacaaatttcccacgaagggacatttataccaggaacttacaagatcataatagataagaag

SEQ ID NO: 58481 - DNA, 80 bp, synthetic construct
  source 1..80: mol_type = other DNA
aataaattgaatgatagatgctccttgatcactagctgtgtcataaaggggagagagttaagaaaaggacaatcaacttt

SEQ ID NO: 58482 - DNA, 80 bp, synthetic construct
  source 1..80: mol_type = other DNA
gccaacagtgcgcacaaacacaactcataaaataagcccaacagccaccgctaaccgcacaacctatgaacaggcaacac

SEQ ID NO: 58483 - DNA, 80 bp, synthetic construct
  source 1..80: mol_type = other DNA
aagacagtataagacagagataaaaattggtcaaacatcctctggctcgaggaggctactttcagaaagcagcgctagtg

SEQ ID NO: 58484 - DNA, 80 bp, synthetic construct
  source 1..80: mol_type = other DNA
gttgcatttcaaggacccagatgatcaagtcagaaacagcagagatccacgacgacatctacggaggacctggtgagaag

SEQ ID NO: 58485 - DNA, 80 bp, synthetic construct
  source 1..80: mol_type = other DNA
cttaccatctgtaatggtaccactgttgtagatcaaagactgggcagtgaactaggttgctacacaatcaacagaattaa

SEQ ID NO: 58486 - DNA, 80 bp, synthetic construct
  source 1..80: mol_type = other DNA
gacctataaattgtgtgaaaacagtgtcaaagaaaaaacttgtgagattgacagtgtaccagtcaagtgtagacaggggc

SEQ ID NO: 58487 - DNA, 80 bp, synthetic construct
  source 1..80: mol_type = other DNA
tttgtttgaagataactcaagaaggaagaggccatgttaagctttccagaggctcagagattgtcctggacatttgtgac

SEQ ID NO: 58488 - DNA, 80 bp, synthetic construct
  source 1..80: mol_type = other DNA
tctagttgtgaattgatgatacctaaaggcactggggacatattggtagattgttctggaggacagcaacattttttaca

SEQ ID NO: 58489 - DNA, 80 bp, synthetic construct
  source 1..80: mol_type = other DNA
tggcatttctcttctggttcagttttggttatgtgatcacatgcatattgtgcaaaatactcttttacctactcataatc

SEQ ID NO: 58490 - DNA, 80 bp, synthetic construct
  source 1..80: mol_type = other DNA
actggcacactagggaaaaaactaaagcagtatagagagctcaagccacaaacatgtaccatatgtgaatcaacacctgt

SEQ ID NO: 58491 - DNA, 80 bp, synthetic construct
  source 1..80: mol_type = other DNA
gaatgcaatagatgctgagatgcatgacctcaactgtagttacaacatatgcccttattgtgcatctagactgacttcag

SEQ ID NO: 58492 - DNA, 80 bp, synthetic construct
  source 1..80: mol_type = other DNA
ccagcactacaccaaagtcttctacaaagccaaccacccatatagcaacagcacaccttgcagagtctgacggctctggt

SEQ ID NO: 58493 - DNA, 80 bp, synthetic construct
  source 1..80: mol_type = other DNA
atgggctcataaggcatgtgaatctgtgccccaagaggaaggagaaagttgaagagacagaactgtatttgaacttagaa

SEQ ID NO: 58494 - DNA, 80 bp, synthetic construct
  source 1..80: mol_type = other DNA
agaataccttggtttgtgagaaagcttttacaggtgtctgaatctacaggagtagctctcaaaagaagcagttggctatt

SEQ ID NO: 58495 - DNA, 80 bp, synthetic construct
  source 1..80: mol_type = other DNA
gatacttgttatattgctcacagtttctatgtcaccagttcagtcggcaccaattaatcaacaaagagcagttgaagcct

SEQ ID NO: 58496 - DNA, 80 bp, synthetic construct
  source 1..80: mol_type = other DNA
accaggctagggagggctacacaggcatctgcctctttatattagggagtgtcctatttatgacctcttggctaacaaaa

SEQ ID NO: 58497 - DNA, 80 bp, synthetic construct
  source 1..80: mol_type = other DNA
ggattgattgacagtattggcgacagtttcttccctgggctctttgtgtgcaaaacatgctccataggcagcatcaatgg

SEQ ID NO: 58498 - DNA, 80 bp, synthetic construct
  source 1..80: mol_type = other DNA
ctttgaaatagaatcccataggtgttactgcagcttgctctgctgtccatactgtagaacctgctctgctgacaaagaca

SEQ ID NO: 58499 - DNA, 80 bp, synthetic construct
  source 1..80: mol_type = other DNA
gccatcagctgcatctaagtatttgtaaaaagaaaaaagcaggaagtaatgtcatgctagcagtgtgtaagcgtatgtgc

SEQ ID NO: 58500 - DNA, 80 bp, synthetic construct
  source 1..80: mol_type = other DNA
ttcaaggcaacaattgaagcaagcaatagggtgctactgattagaagtatcataaacactacattcattatatgcatgct

SEQ ID NO: 58501 - DNA, 80 bp, synthetic construct
  source 1..80: mol_type = other DNA
aattttagtagtgtgtgtcataagcacttctgcagtcgaaatggaagatctaccggcaggcacttgggagagagaagaag

SEQ ID NO: 58502 - DNA, 80 bp, synthetic construct
  source 1..80: mol_type = other DNA
acctcaccaacttctgccaccaagaatgccaagtaacagagactgagtgtttgtgcccttatgaagcttttgtgcttaga

SEQ ID NO: 58503 - DNA, 80 bp, synthetic construct
  source 1..80: mol_type = other DNA
gagaccaccctcctcctcccgaccactgcctcacagtacacaactgaaggtcaaacctctttagaacccacagcagagga

SEQ ID NO: 58504 - DNA, 80 bp, synthetic construct
  source 1..80: mol_type = other DNA
tcttcctgagtagtatagtcaagggtaagaagaatctgctaaactcagcaagtttagaaacaagcctgtcaattgaggca

SEQ ID NO: 58505 - DNA, 80 bp, synthetic construct
  source 1..80: mol_type = other DNA
ccatggggagccataaatgctcagtccacctttaaacccaccatatcaactgcaaatatagcactcagctggagctcagt

SEQ ID NO: 58506 - DNA, 80 bp, synthetic construct
  source 1..80: mol_type = other DNA
ctatcatgaaactcgaggagcgaacaggaatcagttggaacctaggggtagaggacgcatcagagtcaagaatgctaacg

SEQ ID NO: 58507 - DNA, 80 bp, synthetic construct
  source 1..80: mol_type = other DNA
gtctctgtcatggacttgtcacagatgtacttaccagtatttgaatatctgtctggtgacaggcaagtggaagagtggcc

SEQ ID NO: 58508 - DNA, 80 bp, synthetic construct
  source 1..80: mol_type = other DNA
tgttggggggttggaacaggatgcacatgctgcggattagacgtgaaagacctgttcactgattatatgtttgttaagtg

SEQ ID NO: 58509 - DNA, 80 bp, synthetic construct
  source 1..80: mol_type = other DNA
ggttggaacaggatgcacatgctgcggattagacgtgaaagacctgttcactgattatatgtttgttaagtggaaggttg

SEQ ID NO: 58510 - DNA, 80 bp, synthetic construct
  source 1..80: mol_type = other DNA
agtatattaagactgaagccatagtttgtgttgagttaaccagccaagagagacagtgcagcttaattgaggccggcaca

SEQ ID NO: 58511 - DNA, 80 bp, synthetic construct
  source 1..80: mol_type = other DNA
agattcaacttaggtcccgtgacaataacattatcagaaccaaggaacatccaacaaaagctcccttcagagatagtcac

SEQ ID NO: 58512 - DNA, 80 bp, synthetic construct
  source 1..80: mol_type = other DNA
gaccggttcaaacaccatcccaagtgacaccacatccacatcccccatcactgaaaacagtgaaagcacagacacacaga

SEQ ID NO: 58513 - DNA, 80 bp, synthetic construct
  source 1..80: mol_type = other DNA
ggcgcggcccatgtatggtgcaggcgaaataactgtcttggtggaggttgctgacatggaattgcactcaaagaacattg

SEQ ID NO: 58514 - DNA, 80 bp, synthetic construct
  source 1..80: mol_type = other DNA
agatctcaggtctaaaatttgcaagcttgacctgctcaggctgttatgcctgcagctcaggtatttcatgcaaagtcaga

SEQ ID NO: 58515 - DNA, 80 bp, synthetic construct
  source 1..80: mol_type = other DNA
atccatgtagacgagcccgatgagctagcagtacatgtaaagagtgatgatctggatgttgtggcagctagttcaagtct

SEQ ID NO: 58516 - DNA, 80 bp, synthetic construct
  source 1..80: mol_type = other DNA
tatggcaagaaaaatagaattcggaacagatagcacatttaaagctttctcatctatgccaaaagaatctttatgcttct

SEQ ID NO: 58517 - DNA, 80 bp, synthetic construct
  source 1..80: mol_type = other DNA
tgaatgtctcagatagctccagcagccctctagcaacacaaggcgcgaggtctcccgcaaggaacctcctctccgtgcca

SEQ ID NO: 58518 - DNA, 80 bp, synthetic construct
  source 1..80: mol_type = other DNA
aggaccagagggctgtttaagtacaagcatatcaaggatgatgaggaagcaggctacaaaaaaatcattgagaagcttaa

SEQ ID NO: 58519 - DNA, 80 bp, synthetic construct
  source 1..80: mol_type = other DNA
caacaaaaaagggggaacaagtaaattgttagatggtgagagacttgcggacagaaagattgccgaacttttctcaacaa

SEQ ID NO: 58520 - DNA, 80 bp, synthetic construct
  source 1..80: mol_type = other DNA
ctaaattgaaaagaccagcctcatcagcaatgccaagttttgttaatgcctttactcgtcatgcccttgtcatttatgct

SEQ ID NO: 58521 - DNA, 80 bp, synthetic construct
  source 1..80: mol_type = other DNA
tcattgcttactatattgcctgacactaatttatcttacaaccactttgacctaatcttgactgcgtgccgccactatat

SEQ ID NO: 58522 - DNA, 80 bp, synthetic construct
  source 1..80: mol_type = other DNA
tactatattgcctgacactaatttatcttacaaccactttgacctaatcttgactgcgtgccgccactatatctttgaga

SEQ ID NO: 58523 - DNA, 80 bp, synthetic construct
  source 1..80: mol_type = other DNA
agcgtggagccaggacagcagacaacaccaaaacagcccaccacaaaggggaccgtgacccccaccaccccccaaccaac

SEQ ID NO: 58524 - DNA, 80 bp, synthetic construct
  source 1..80: mol_type = other DNA
aaccagcagcccaaccccagccccaacatcagccactctatcaacaaacagcagttccatcagtactccagtacagacta

SEQ ID NO: 58525 - DNA, 80 bp, synthetic construct
  source 1..80: mol_type = other DNA
gttcccctctccaacccatggcccccagtcatgaaactcagcatgccctttacaccacctcaacagaaagcacactcaga

SEQ ID NO: 58526 - DNA, 80 bp, synthetic construct
  source 1..80: mol_type = other DNA
ttacgctatattctgtatgcactgttggcaagtgccattctacatcaacacttatataaagttggtgcagacacccaaaa

SEQ ID NO: 58527 - DNA, 80 bp, synthetic construct
  source 1..80: mol_type = other DNA
acgctctcagctgaacgcatccatccaacgaacagatccagaagaaattctgaggttgaaataattttgactcttcctca

SEQ ID NO: 58528 - DNA, 80 bp, synthetic construct
  source 1..80: mol_type = other DNA
gggccttaaaaaatattacagtagattgctaaagttgcttcatctcacaatggaggaagacactgagggtttgcaagagt

SEQ ID NO: 58529 - DNA, 80 bp, synthetic construct
  source 1..80: mol_type = other DNA
ggtgtgtgcgtgtcttaggccagacctgtgatgacagctactttcataaaaggttggcagagttctttataaccggaaca

SEQ ID NO: 58530 - DNA, 80 bp, synthetic construct
  source 1..80: mol_type = other DNA
acaatgaaaccgaacacaacaaaacaaacgccgtgacaacgtccagtgacagccagagcccagaaccaccaacaagaacg

SEQ ID NO: 58531 - DNA, 80 bp, synthetic construct
  source 1..80: mol_type = other DNA
ctcaagaaggaaggggccatgtgaaattatccaggggctcagaggttgtcttggatgcatgcgactcaagctgtgaagta

SEQ ID NO: 58532 - DNA, 80 bp, synthetic construct
  source 1..80: mol_type = other DNA
accctgcccgtcacgccagactcccccaccgtcacacccacaactccagccagcgcaccagaaggctcaggggaagtcca

SEQ ID NO: 58533 - DNA, 80 bp, synthetic construct
  source 1..80: mol_type = other DNA
aagggctggttaacagtgttggcaacatcttcttccctgggctgtccatttgcaagacgtgctctataggtagtattaat

SEQ ID NO: 58534 - DNA, 80 bp, synthetic construct
  source 1..80: mol_type = other DNA
cacatcccccccaaacaccactgagggcccgtctctgccggagtccacgccagagccccccacggcaaccagcacaggca

SEQ ID NO: 58535 - DNA, 80 bp, synthetic construct
  source 1..80: mol_type = other DNA
ccctgtttcaggacagtatagtcaaaggcatgaaaaacctgctaaactcaacaagtttagaaacaagcttgtcgattgag

SEQ ID NO: 58536 - DNA, 80 bp, synthetic construct
  source 1..80: mol_type = other DNA
tcccaagtgcaagtgatgtcaactccagcacacaggcagccagagacacctccacaccaacagtccacaccagtccaccc

SEQ ID NO: 58537 - DNA, 80 bp, synthetic construct
  source 1..80: mol_type = other DNA
gtggattgagcaccttaactgcaacatgcctattagcgtcatgcacatatcgttgatgtgtgcagttctttgcctgcagc

SEQ ID NO: 58538 - DNA, 80 bp, synthetic construct
  source 1..80: mol_type = other DNA
ctaaatcaactgaaaagacttaaaaggatgatggcactgcactgactaaccttattatatatgctggtttttttagttgc

SEQ ID NO: 58539 - DNA, 80 bp, synthetic construct
  source 1..80: mol_type = other DNA
atccccactacactattatcgcaatatgctacatctaatccgcttcattgtctctacagacagactgaaactgcctttgc

SEQ ID NO: 58540 - DNA, 80 bp, synthetic construct
  source 1..80: mol_type = other DNA
aatccgcttcattgtctctacagacagactgaaactgcctttgctctatttactctagcctaaaccttgactgcgtgccg

SEQ ID NO: 58541 - DNA, 80 bp, synthetic construct
  source 1..80: mol_type = other DNA
gacagaccatcaacctcctccacaacagcccaaggacctactgaaaacaacagctacaacaccaccgaacagcttgagtc

SEQ ID NO: 58542 - DNA, 80 bp, synthetic construct
  source 1..80: mol_type = other DNA
tattagcgtcatgcacatatcgttgatgtgtgcagttctttgcctgcagctgtatggtctggggggaactcatgggtcac

SEQ ID NO: 58543 - DNA, 80 bp, synthetic construct
  source 1..80: mol_type = other DNA
cggcgcgtcagtacgtaagtgttaactttgagtgtgtgacctgagcatcttagatgcagcatgcccttcaacatcatgta

SEQ ID NO: 58544 - DNA, 80 bp, synthetic construct
  source 1..80: mol_type = other DNA
attgtccaacaaaacccaacacaatgacactagtaccataaaggcgcccggagagagtcagaaaactagtctgcctgcga

SEQ ID NO: 58545 - DNA, 80 bp, synthetic construct
  source 1..80: mol_type = other DNA
aacacggccagcagcccccaactcagtgacccctccagtacagccaaccctctctcagagtgaaatttccacggctgttc

SEQ ID NO: 58546 - DNA, 80 bp, synthetic construct
  source 1..80: mol_type = other DNA
gtgtcaactttgagagagtggattgtgcttcccgaatgcaccatgcccatcaacatcatgcatacactattagtgtgctt

SEQ ID NO: 58547 - DNA, 80 bp, synthetic construct
  source 1..80: mol_type = other DNA
cagagcccttcaaatcttacttcgctaagggcttcctttcaatagattcgggttacttctctgccaaatgttatccaaga

SEQ ID NO: 58548 - DNA, 80 bp, synthetic construct
  source 1..80: mol_type = other DNA
ccacagtacccggcacaagtcaaagccccaagccacccgcaagcaccactctaccacacacaccagaatcctccaccgtc

SEQ ID NO: 58549 - DNA, 80 bp, synthetic construct
  source 1..80: mol_type = other DNA
aaactcaccacaccaacaagcgaaacagaaggctcaggggaaacgaccccacccccaaacaccacccagggcctgccccc

SEQ ID NO: 58550 - DNA, 80 bp, synthetic construct
  source 1..80: mol_type = other DNA
atcagaccagagaaggattcacaaatatctgtctctttatgttaggaagcatcctattcatagtttcttacctggtaaag

SEQ ID NO: 58551 - DNA, 80 bp, synthetic construct
  source 1..80: mol_type = other DNA
accagggaccacaccagagcgccccgcaacaaccgccacaagcacgtcaagcacagacaacatgaactccaccacacagg

SEQ ID NO: 58552 - DNA, 80 bp, synthetic construct
  source 1..80: mol_type = other DNA
tgaccgacaacacccccacatcaacagtcagcataagtccatccagcagccccagcatgccatccacatcacaaggcata

SEQ ID NO: 58553 - DNA, 80 bp, synthetic construct
  source 1..80: mol_type = other DNA
ggcatctaattcacaaaattgaaccacattttaacacctcttggatgtcctgggatggttgtgacctagactactattgc

SEQ ID NO: 58554 - DNA, 80 bp, synthetic construct
  source 1..80: mol_type = other DNA
cattatcccgtaaggagtctattgtcagtctcgagccctaagacagtaacaacaccgacaccaatgagccctggagagat

SEQ ID NO: 58555 - DNA, 80 bp, synthetic construct
  source 1..80: mol_type = other DNA
ctaactcaacagaaagaaccttgaaggttgacagcagtatgccgtctagtgtccttgcttattctggctccgttcatcgc

SEQ ID NO: 58556 - DNA, 80 bp, synthetic construct
  source 1..80: mol_type = other DNA
gagcccggaaaccagcagtcagcactcagccatgagcagaataccaaccctctacacagcagcccaggtctccactgaga

SEQ ID NO: 58557 - DNA, 80 bp, synthetic construct
  source 1..80: mol_type = other DNA
acaccaaccgcagcacacctagacaatcagagtcctcagcacagccggcaacccaaagcccaacaactttcccagcgcaa

SEQ ID NO: 58558 - DNA, 80 bp, synthetic construct
  source 1..80: mol_type = other DNA
acaatccttctgatgagtgctgctcctaaagctattcaggacatgcatcccagcccaacaaacaggtccaagaggaacct

SEQ ID NO: 58559 - DNA, 80 bp, synthetic construct
  source 1..80: mol_type = other DNA
cattctttacctacagctgtcgggtttaggaggagctcatggacagtcaaacgcaactgaacacaatggaacaaacacca

SEQ ID NO: 58560 - DNA, 80 bp, synthetic construct
  source 1..80: mol_type = other DNA
tgaggtggaaataattttaactctgtctcaaggtctaaagaagtattacggtaaaatactgaagcttctgcaccttacct

SEQ ID NO: 58561 - DNA, 80 bp, synthetic construct
  source 1..80: mol_type = other DNA
agctggtagactgcaatcagattggagacaattgatgcacccttttcagacatcttcttcatcatggcctctggcttgtt

SEQ ID NO: 58562 - DNA, 80 bp, synthetic construct
  source 1..80: mol_type = other DNA
atacgttactccagcaacagcatccatggtggacccagacactggcagagatcctgagagcactcggagggcctggatag

SEQ ID NO: 58563 - DNA, 80 bp, synthetic construct
  source 1..80: mol_type = other DNA
tcagcaatggttgctccagctccatttggcaggtcaagatcaatgattccagcaaagcttgggtgcatcattgccctggg

SEQ ID NO: 58564 - DNA, 80 bp, synthetic construct
  source 1..80: mol_type = other DNA
aagcttctcattgctgcaggtgttatagatgaagatctggttttggcctctgctgttgtcaggagtgctgagaagtatcg

SEQ ID NO: 58565 - DNA, 80 bp, synthetic construct
  source 1..80: mol_type = other DNA
atctgcttcattgtacccacaaacagactgaaactgcctttgctctatttactctgacctaaaccttaactgcgtgccgc

SEQ ID NO: 58566 - DNA, 80 bp, synthetic construct
  source 1..80: mol_type = other DNA
gaacacaacggaacaaacaccaccacagcacccagcacaagtcaaagccccaagccacttgtgagcacagccccaccaca

SEQ ID NO: 58567 - DNA, 80 bp, synthetic construct
  source 1..80: mol_type = other DNA
cgcactggaatcatccaccatcaaacccaccacaccagcaagcgaaacagaaggctcaggggaaacgaccccacccccaa

SEQ ID NO: 58568 - DNA, 80 bp, synthetic construct
  source 1..80: mol_type = other DNA
acaccacccagggcccgtctccaccagagaccacaccagaacgccccgcaacaactgccacaagtacgccaagcacagac

SEQ ID NO: 58569 - DNA, 80 bp, synthetic construct
  source 1..80: mol_type = other DNA
aacacgaattccaccacacatgtgaccgacaacaaccctacatcaacaatcagcacaagtccatccagcagccccagcac

SEQ ID NO: 58570 - DNA, 80 bp, synthetic construct
  source 1..80: mol_type = other DNA
gttaactcaacagaaataacctcgaaggctgacagcagtgtgctgtctagtgtccttgcttatgctagcttcgttcatcg

SEQ ID NO: 58571 - DNA, 80 bp, synthetic construct
  source 1..80: mol_type = other DNA
gccctaagacagcaacaacaccaacaccaacgagccctggggagataagctcagaaaccagcagtctgcactcagccatg

SEQ ID NO: 58572 - DNA, 80 bp, synthetic construct
  source 1..80: mol_type = other DNA
agcagaacatcaaccctctacacagcaacccaggtctccactgaaaatgccaaccacagcgcacctagacagtctgagtc

SEQ ID NO: 58573 - DNA, 80 bp, synthetic construct
  source 1..80: mol_type = other DNA
ctcagcacagccgacaaccacaagcccaatgacttccccagcacaatcaatccttgtaatgagtgctgcccctacagcta

SEQ ID NO: 58574 - DNA, 80 bp, synthetic construct
  source 1..80: mol_type = other DNA
ttcagaacatacatcccagcccaacgaataggtctaagaggaaccttgagatggaaataattttaactctgtctcaaggt

SEQ ID NO: 58575 - DNA, 80 bp, synthetic construct
  source 1..80: mol_type = other DNA
ctaaagaaatactacggtaagatactgaagcttctgcacctcaccttggaagaggacactgaaggcctgttagaatggtg

SEQ ID NO: 58576 - DNA, 80 bp, synthetic construct
  source 1..80: mol_type = other DNA
gggcgattaggctacctcatgttcattatgaaggaacttttattccaggaacttacaagatagtgatagataaaaaaaac

SEQ ID NO: 58577 - DNA, 80 bp, synthetic construct
  source 1..80: mol_type = other DNA
accgggctagagaggaatacacaagcatttgtctctttatgctgggaagtgtcttgtttgtagtctcttgtctaatgaaa

SEQ ID NO: 58578 - DNA, 80 bp, synthetic construct
  source 1..80: mol_type = other DNA
acacacattggctagatcaactgaagaggcctgggggggtgatggctttgcactgactggtgttgctattcatgctgttt

SEQ ID NO: 58579 - DNA, 80 bp, synthetic construct
  source 1..80: mol_type = other DNA
ctagatcaactgaagaggcctgggggggtgatggctttgcactgactggtgttgctattcatgctgttttccttggctgc

SEQ ID NO: 58580 - DNA, 80 bp, synthetic construct
  source 1..80: mol_type = other DNA
atccccactatacgatcatcacaatatgtcacatctaagctgcttcgttgtatccacaaacagactctgtaatgctcgaa

SEQ ID NO: 58581 - DNA, 80 bp, synthetic construct
  source 1..80: mol_type = other DNA
tcgttgtatccacaaacagactctgtaatgctcgaaactgccttcgctctgtttgctttgacctaaatcttgactgcgtg

SEQ ID NO: 58582 - DNA, 80 bp, synthetic construct
  source 1..80: mol_type = other DNA
gccctaagccagaagaaacaccaacaccgtcaaaatccaacaaagatagctcagcaaccaacagccctcgcccagccgcc

SEQ ID NO: 58583 - DNA, 80 bp, synthetic construct
  source 1..80: mol_type = other DNA
cttaactcgatcagcaacttcaagctcaatggtctctccaacacagacagtacttccacagagtgccacctctataacca

SEQ ID NO: 58584 - DNA, 80 bp, synthetic construct
  source 1..80: mol_type = other DNA
gtcaacatcatgcatacatctttgatatatgtagttctctgcttgcagctgtgtagtctagggaaaactcacggatcaca

SEQ ID NO: 58585 - DNA, 80 bp, synthetic construct
  source 1..80: mol_type = other DNA
cttgcggcacgtcagtacgtaagtgtaaactttgagagagtggattgagcatcccgaattcaccatgcctaccaacatta

SEQ ID NO: 58586 - DNA, 80 bp, synthetic construct
  source 1..80: mol_type = other DNA
atctacttcagggcttcagctgatcaatgttacccaacacccagctaggatagcagaaacaccaggacccaagacaacga

SEQ ID NO: 58587 - DNA, 80 bp, synthetic construct
  source 1..80: mol_type = other DNA
gtctgaaaaccatcaactgtataaacctaagagcatcagtcttcaaagaacacagagaaattgagatcaatgtgcttctt

SEQ ID NO: 58588 - DNA, 80 bp, synthetic construct
  source 1..80: mol_type = other DNA
ctcagattgcagtcaacctttcaaactgccatgttgtgatcaaatcacatgtctgtgattactctttagacactgatggg

SEQ ID NO: 58589 - DNA, 80 bp, synthetic construct
  source 1..80: mol_type = other DNA
ccagtgaggcttcctcacatttaccatgaagggactttcataccaggaacttataaaatcgtgatagataaaaaaaataa

SEQ ID NO: 58590 - DNA, 80 bp, synthetic construct
  source 1..80: mol_type = other DNA
gctaaatgaccgatgcacactggtcaccaactgtgtgataaagggaagagaggttcgtaagggccaatcagtgctgaggc

SEQ ID NO: 58591 - DNA, 80 bp, synthetic construct
  source 1..80: mol_type = other DNA
gaacacgatggaacaaacactaccacagcacccgacacaagtcaaagccctaagccacttgtaagcacaacctcaccaca

SEQ ID NO: 58592 - DNA, 80 bp, synthetic construct
  source 1..80: mol_type = other DNA
cacactggaatcatccaccatcaggctcaccacgccaacaagcgaaacggaaggctcaggggaaacgaccccccctccaa

SEQ ID NO: 58593 - DNA, 80 bp, synthetic construct
  source 1..80: mol_type = other DNA
atagtgtcagtgacagcttcttccctggtctgtctgtctgcaagacatgctctattggcagcataaatggctttgaaatt

SEQ ID NO: 58594 - DNA, 80 bp, synthetic construct
  source 1..80: mol_type = other DNA
ttacattaacaatctgtgttgttagcacctctgcagtagagatggaaaatcttccagcaggcacttgggagagagaggaa

SEQ ID NO: 58595 - DNA, 80 bp, synthetic construct
  source 1..80: mol_type = other DNA
acaccacccagggcccgcccccaccagagaccacaccggaacgccccgcaacaaacgccacaagctcgccgggcacaggc

SEQ ID NO: 58596 - DNA, 80 bp, synthetic construct
  source 1..80: mol_type = other DNA
atctaggcgtggaagatgcttctgaatccaaattgctcaccgtctctatcatggatttgtcacaaatgtattcccccgtt

SEQ ID NO: 58597 - DNA, 80 bp, synthetic construct
  source 1..80: mol_type = other DNA
tatataaaaactgaagccatagtatgtgttgagctcaccagccaagaaagacagtgcagtctgattgaggcaggcactag

SEQ ID NO: 58598 - DNA, 80 bp, synthetic construct
  source 1..80: mol_type = other DNA
attcaacttgggccctgtgaccattaccctgtctgagccaagaaacattcagcagaagctccctcccgagattgtcacgt

SEQ ID NO: 58599 - DNA, 80 bp, synthetic construct
  source 1..80: mol_type = other DNA
tgcatcccaaagttgaagaaggcttctttgacctgatgcatgtgcaaaaagtgttgtctgcaaatacagtgtgtaaactg

SEQ ID NO: 58600 - DNA, 80 bp, synthetic construct
  source 1..80: mol_type = other DNA
cagagctgcacacatggtataccaggagatctacaagtttatcacattggcaacttgctgaaaggggatagagtaaacgg

SEQ ID NO: 58601 - DNA, 80 bp, synthetic construct
  source 1..80: mol_type = other DNA
aacacgaattctaccacacagatgaccgacaacaatcccacattaacagtcagcacaagtccatccagcagtcccagtac

SEQ ID NO: 58602 - DNA, 80 bp, synthetic construct
  source 1..80: mol_type = other DNA
gccatccacaccacaaggcatacatcatcctgtaaggagtctattgtcagtctcgagccctaagacagcaacaacaccaa

SEQ ID NO: 58603 - DNA, 80 bp, synthetic construct
  source 1..80: mol_type = other DNA
tattccttgccccttttgtcctgttggtgcttttctttatgtttggatggaaaatcttgttttgctttaagtgttgcagg

SEQ ID NO: 58604 - DNA, 80 bp, synthetic construct
  source 1..80: mol_type = other DNA
aggaccagaggcttatttaagtatagacacctcaaagacgatgaggaaacaggctacagaaggattattgaaagactgaa

SEQ ID NO: 58605 - DNA, 80 bp, synthetic construct
  source 1..80: mol_type = other DNA
gttgactcaacaggaaaaacctcgaaagttgacagcagtgtactgtctagtgtccccgcctgtgctagcttcgttcatcg

SEQ ID NO: 58606 - DNA, 80 bp, synthetic construct
  source 1..80: mol_type = other DNA
catccatactccatagacaccgcaacacactgcatctaatctgcttgattatatctaaaaataagctctatgatacttga

SEQ ID NO: 58607 - DNA, 80 bp, synthetic construct
  source 1..80: mol_type = other DNA
ttatatctaaaaataagctctatgatacttgaaactgccttagctctacttgctctgaccttaactttgactgcgtgccg

SEQ ID NO: 58608 - DNA, 80 bp, synthetic construct
  source 1..80: mol_type = other DNA
caccaacgagccctggagagataagctcagaaaccagcagtcagcactcagccgtgagcataacaccaaccccctacata

SEQ ID NO: 58609 - DNA, 80 bp, synthetic construct
  source 1..80: mol_type = other DNA
gcaacccaggtccccactgagaataccaaccacagcacaccaagacagtctgagtcctcagcacagccgacacccccaag

SEQ ID NO: 58610 - DNA, 80 bp, synthetic construct
  source 1..80: mol_type = other DNA
cccaatgacttccccagcacaatcaatccttctaatgagtgctgctcctacagctattcagaacatacatcccagcccaa

SEQ ID NO: 58611 - DNA, 80 bp, synthetic construct
  source 1..80: mol_type = other DNA
cgcatacactattagtgtgcttcattctttacctacagctgtttggtctaggaggagctcatgtacagtcaaatgcaact

SEQ ID NO: 58612 - DNA, 80 bp, synthetic construct
  source 1..80: mol_type = other DNA
cgaataggtctaagaggaaccttgagatggaaataattttaactctgtctcaaggtctaaagaaatattacggtaagata

SEQ ID NO: 58613 - DNA, 80 bp, synthetic construct
  source 1..80: mol_type = other DNA
atacttgcggcatgtcagtacgtaagtgtcaactttgagagagtggattgtgcttcccgaatgcaccatgcctatcaaca

SEQ ID NO: 58614 - DNA, 80 bp, synthetic construct
  source 1..80: mol_type = other DNA
actgaacacaatggaacaaacaccaccacagcacccggcacaagtcaaagccccaagccacccgcgagcaccactctacc

SEQ ID NO: 58615 - DNA, 80 bp, synthetic construct
  source 1..80: mol_type = other DNA
acacacaccagaatcctccaccgtcaaacccaccacaccaacaagcgaaacagaaggctcaggggaaacgaccccacccc

SEQ ID NO: 58616 - DNA, 80 bp, synthetic construct
  source 1..80: mol_type = other DNA
caaacaccacccagggcctgcccccaacagggaccacaccagaacgctccgcaacaaccgccacaagcacgtcaagcaca

SEQ ID NO: 58617 - DNA, 80 bp, synthetic construct
  source 1..80: mol_type = other DNA
gacaacatgaactccaccacacaggtgaccgacagcacccccacatcaacagtcagcacaagtccatccagcagctccag

SEQ ID NO: 58618 - DNA, 80 bp, synthetic construct
  source 1..80: mol_type = other DNA
cattatatccacaaataagctctgtgacgcttgaaactgtctctgctctgcttgctctgacgttaactttcactgcgtgc

SEQ ID NO: 58619 - DNA, 80 bp, synthetic construct
  source 1..80: mol_type = other DNA
cgacaccaatgagccctggagagatgagcccggaaaccagcagtcagcactcagccatgagcagagtaccaaccctctac

SEQ ID NO: 58620 - DNA, 80 bp, synthetic construct
  source 1..80: mol_type = other DNA
acagcaacccaggtctccactgagaacaccgaccgcagcacacctagacaatctgagtcctcagtacagccggcaaccca

SEQ ID NO: 58621 - DNA, 80 bp, synthetic construct
  source 1..80: mol_type = other DNA
aagcccaataacttccccagcgcaaacaatccttctgatgagtgctgctcctaaagctattcaggacatgcatcccagcc

SEQ ID NO: 58622 - DNA, 80 bp, synthetic construct
  source 1..80: mol_type = other DNA
ttatgcatacactattagtgtgcttcattctttacctacagctgtcgggtttaggaggagctcatgtacagtcaaacgca

SEQ ID NO: 58623 - DNA, 80 bp, synthetic construct
  source 1..80: mol_type = other DNA
caacaaacaggtccaagaggaaccttgaggtggaaataattttaactctgtctcaaggtctaaagaaatattacggtaaa

SEQ ID NO: 58624 - DNA, 80 bp, synthetic construct
  source 1..80: mol_type = other DNA
cttcaacgaagttctacagtttaaaacactaagcacaccaagctccacggagccgtctcatgccaggctaccgacagcgg

SEQ ID NO: 58625 - DNA, 80 bp, synthetic construct
  source 1..80: mol_type = other DNA
tctgaaaaccatcaactgcatcaatctaagagcatctgtccttaaagaacacagagaagttgagatcaatgtgcttcttc

SEQ ID NO: 58626 - DNA, 80 bp, synthetic construct
  source 1..80: mol_type = other DNA
aacaccaccacagtacccggcacaagtcaaagccccaagccacccgcgagcacaaccccatcacacgcaccagaaccatc

SEQ ID NO: 58627 - DNA, 80 bp, synthetic construct
  source 1..80: mol_type = other DNA
aggcatgcaccatcccgtaaggagtctattgtcagtctcgagctccatgacagcaacaacaccaacaccaatgagccctg

SEQ ID NO: 58628 - DNA, 80 bp, synthetic construct
  source 1..80: mol_type = other DNA
ataaatattcacaaggaggagtggctacgtatggggtgatcataaacacgcccaggaagtgacatatgtcaaccaatcag

SEQ ID NO: 58629 - DNA, 80 bp, synthetic construct
  source 1..80: mol_type = other DNA
tttcaaatcaaccattatcaatgctaagagatcaagccttatatagaggcaatcaaacaacctataagctatgctcagat

SEQ ID NO: 58630 - DNA, 80 bp, synthetic construct
  source 1..80: mol_type = other DNA
cattgttcgccatcctgaaattggctctgtttttgtacactgtcacatacttgttggaggagccggtcttagcaaaagaa

SEQ ID NO: 58631 - DNA, 80 bp, synthetic construct
  source 1..80: mol_type = other DNA
tcttagttatatatcaggcgccgccttagttacgtcacgataaaatgttatataactaaggcggcgcatgatatataact

SEQ ID NO: 58632 - DNA, 80 bp, synthetic construct
  source 1..80: mol_type = other DNA
acgataaaatgttatataactaaggcggcgcatgatatataactaagatggccgacgtagtacgacactacactaaatat

SEQ ID NO: 58633 - DNA, 80 bp, synthetic construct
  source 1..80: mol_type = other DNA
atgctaaaatttcacgcgctacacttttgggtcttgtgatggctgaactaacacaacgctgcaagctacttcttgcacat

SEQ ID NO: 58634 - DNA, 80 bp, synthetic construct
  source 1..80: mol_type = other DNA
ttacttcaatgaagtcttacagttcaaggtaccaagcacactgagctccacagagccgactcataccaggccaccaacag

SEQ ID NO: 58635 - DNA, 80 bp, synthetic construct
  source 1..80: mol_type = other DNA
ttgaacccttcaaatcctacttcgctaaaggcttcctttcaatgaactcaggctacttctctgccaaatgttatccaagg

SEQ ID NO: 58636 - DNA, 80 bp, synthetic construct
  source 1..80: mol_type = other DNA
accaacaggacccaacacaatgaaacaggcaccgtggcaacacccgaaggaaccctgagacctaggctgcctgtgagcac

SEQ ID NO: 58637 - DNA, 80 bp, synthetic construct
  source 1..80: mol_type = other DNA
gggtctaattgacagtgtcggtaacagctttttccctggattgtccatttgcaagacatgctcgattggcagtataaatg

SEQ ID NO: 58638 - DNA, 80 bp, synthetic construct
  source 1..80: mol_type = other DNA
agatatcaggcttgaagtttgcaagtctaacttgcacaggctgctatgcttgtagctctggtatctcctgtaaggtcaag

SEQ ID NO: 58639 - DNA, 80 bp, synthetic construct
  source 1..80: mol_type = other DNA
atattgtggagagagaatactgtaagagctgcagtagagaggacacacgaaaatgtgttaacactaagcttgatcgacca

SEQ ID NO: 58640 - DNA, 80 bp, synthetic construct
  source 1..80: mol_type = other DNA
ctacctacttcattatattcgtaatgcttgaaactgctattgcttcattcactctgtcctaaaccttgactgcgtgccgc

SEQ ID NO: 58641 - DNA, 80 bp, synthetic construct
  source 1..80: mol_type = other DNA
aaggcgtacaccccagcccaacaaacagatccaagaggaaccttgaaatagaaataattttaactttatctcaaggtctg

SEQ ID NO: 58642 - DNA, 80 bp, synthetic construct
  source 1..80: mol_type = other DNA
agaaagtactatggcaagatactgaagcttctggaccttaccttagaagaggacactgaaggcctgctagaatggtgtaa

SEQ ID NO: 58643 - DNA, 80 bp, synthetic construct
  source 1..80: mol_type = other DNA
caaacacaactgaacacaacggaacaaacaccaccacagcacccagcacaagtcaaagccccaagccacttgtgagcaca

SEQ ID NO: 58644 - DNA, 80 bp, synthetic construct
  source 1..80: mol_type = other DNA
cgttatatctacaaataagctctatgatgcttgaagctgccttagctctgcttactctgacattaactttgactgcgtgc

SEQ ID NO: 58645 - DNA, 80 bp, synthetic construct
  source 1..80: mol_type = other DNA
tacgtaagtgttaactttgaggaagtaggttgagcatcttaattgcaacatacctgtcaacatcatgcatatgtcattga

SEQ ID NO: 58646 - DNA, 80 bp, synthetic construct
  source 1..80: mol_type = other DNA
tgtatgcagttttctgcttgcaactgtgtggtctagggaaaacccatggatcacacaatggaactggacacaataaaaca

SEQ ID NO: 58647 - DNA, 80 bp, synthetic construct
  source 1..80: mol_type = other DNA
atacttgcggcatgtcagtacgtaagtgttaactttgagagagtaaattgagcatcttgagtgcatcatgcccgtcagca

SEQ ID NO: 58648 - DNA, 80 bp, synthetic construct
  source 1..80: mol_type = other DNA
actttaatgaagttttgcagtttaaagcaccaagcacaatgagctccacagaaccgactcatgcagggccaccgacagtt

SEQ ID NO: 58649 - DNA, 80 bp, synthetic construct
  source 1..80: mol_type = other DNA
gaacctttcaaatcttactttgctaagggcttcctttcaatagattcaggttatttttctgccaaatgttatccaaggac

SEQ ID NO: 58650 - DNA, 80 bp, synthetic construct
  source 1..80: mol_type = other DNA
ggacttctaattcaggtcttcagttgatcaatgtcacccagcacacagctagaatagcagacacacctggacccaagatc

SEQ ID NO: 58651 - DNA, 80 bp, synthetic construct
  source 1..80: mol_type = other DNA
accaatgtaaagaccatcaattgtataaacttgaaggcatcagtctttaagaagcatagggaggttgaaatcaatgtgct

SEQ ID NO: 58652 - DNA, 80 bp, synthetic construct
  source 1..80: mol_type = other DNA
ctcagattgcggtcaacctctcaaactgccacgtcctgatcaaatcacatgtctgtgactattctttaaacttcgatggg

SEQ ID NO: 58653 - DNA, 80 bp, synthetic construct
  source 1..80: mol_type = other DNA
atggtgagactaccccgcatccaccatgaaggaacttttatacctggaacttacaaaatagtgatagataggaaaaacaa

SEQ ID NO: 58654 - DNA, 80 bp, synthetic construct
  source 1..80: mol_type = other DNA
actgaacaaaatgaaacaggcattacagcgacgcacggaagggttcagggccctccatctgcaagcataacattgcctgt

SEQ ID NO: 58655 - DNA, 80 bp, synthetic construct
  source 1..80: mol_type = other DNA
cacaccggatcctctttccgccacatcagcagcatcaaccagcggaccagagggttcaggggaggtgcctacatcacctt

SEQ ID NO: 58656 - DNA, 80 bp, synthetic construct
  source 1..80: mol_type = other DNA
acagtgtcggcaataattttttccctgggttaactatctgcaaaacatgttccatcagcagtataaacggctttgaaatt

SEQ ID NO: 58657 - DNA, 80 bp, synthetic construct
  source 1..80: mol_type = other DNA
gaatcccacaaatgctactgtagtttactttgctgcccttattgtagacactgctctgctgacagagagatacatcagtt

SEQ ID NO: 58658 - DNA, 80 bp, synthetic construct
  source 1..80: mol_type = other DNA
acttctgtcaccaagaatgtcaagtaacggagactgaatgtctatgtccttacgaagctcttgtgctcaggaaacccctg

SEQ ID NO: 58659 - DNA, 80 bp, synthetic construct
  source 1..80: mol_type = other DNA
caactatcacacaaggcctgacctcatctgaaaacacgccgcagctccccacagcaaccgacacaggtatatcaagcaca

SEQ ID NO: 58660 - DNA, 80 bp, synthetic construct
  source 1..80: mol_type = other DNA
acctaggcgtggaagatgcttccgagtctaggttacttactgtttctgttatggatttgtcacaaatgtactctcccgtt

SEQ ID NO: 58661 - DNA, 80 bp, synthetic construct
  source 1..80: mol_type = other DNA
attgcaccctagaattgaagaaggcttctttgacctaatgcacgtgcagaaagtgctgtctgctagtacggtgtgtaaac

SEQ ID NO: 58662 - DNA, 80 bp, synthetic construct
  source 1..80: mol_type = other DNA
agcatcattgatgtcagtacacagacagctggagacacctccacaccaacagcccacacgagtttgcctaacagccctag

SEQ ID NO: 58663 - DNA, 80 bp, synthetic construct
  source 1..80: mol_type = other DNA
tgcgccgttcacatcacaagacacacgtcatactgtaaggggtctactgacagtgaccagcaccaagtcggatgaagcat

SEQ ID NO: 58664 - DNA, 80 bp, synthetic construct
  source 1..80: mol_type = other DNA
gatgaattaacagaaagggtttcaaggagttatggcagtaaactaactaataccattgcttatgccagcctcatctgtca

SEQ ID NO: 58665 - DNA, 80 bp, synthetic construct
  source 1..80: mol_type = other DNA
tattcctgccacactgccaccacaatatgctatgtataagctgtctcatcatactcacaagtgggatctttagcgcttga

SEQ ID NO: 58666 - DNA, 80 bp, synthetic construct
  source 1..80: mol_type = other DNA
catactcacaagtgggatctttagcgcttgaagctatcattgctctatttactctgacctaaaccttgactgcgtgccgc

SEQ ID NO: 58667 - DNA, 80 bp, synthetic construct
  source 1..80: mol_type = other DNA
caacactaacagacccaaaagaagcaagcacagaggccagaagccccagtccatccatcagcagaacaccaaccccatcc

SEQ ID NO: 58668 - DNA, 80 bp, synthetic construct
  source 1..80: mol_type = other DNA
ccaacagtccaagcctccactgaaaacaatacccccagtacccccagacaacccgagcccaccacacggccagctctccc

SEQ ID NO: 58669 - DNA, 80 bp, synthetic construct
  source 1..80: mol_type = other DNA
aagtccaacgacctcaccaacacagccaagcctctcacagagcgccacctccgcagccattcaggacatgcatcccagcc

SEQ ID NO: 58670 - DNA, 80 bp, synthetic construct
  source 1..80: mol_type = other DNA
tcatgtatataccattagtgtatgctgttatctacctacagctgtatggtttgggaggagcacatgggctgctcaacaag

SEQ ID NO: 58671 - DNA, 80 bp, synthetic construct
  source 1..80: mol_type = other DNA
gtaaacacagccttgcccttcacaccggacccttccactgtcacacccacaacactagctagcagactagaaggctcagg

SEQ ID NO: 58672 - DNA, 80 bp, synthetic construct
  source 1..80: mol_type = other DNA
cgtatgcgtcacagcatggtcacgcagtttttgaggaggttgctgagttggcacgccacacagccaaggctgaatcttgg

SEQ ID NO: 58673 - DNA, 80 bp, synthetic construct
  source 1..80: mol_type = other DNA
aaggaactcggattcgattcaaggatgatagctccttcgaggatgtcaatggcatccggaagccgaagcatctatatgtg

SEQ ID NO: 58674 - DNA, 80 bp, synthetic construct
  source 1..80: mol_type = other DNA
ccatgctgtatataagctatagagttatatgataagattgagaaatttaaagttgattttaaaagcaggcatgcctgtga

SEQ ID NO: 58675 - DNA, 80 bp, synthetic construct
  source 1..80: mol_type = other DNA
acaatggaactgaacacaataaaacagacgctgtaacaacgtctagtgacagccagagctcagaaccaccagtaagaacg

SEQ ID NO: 58676 - DNA, 80 bp, synthetic construct
  source 1..80: mol_type = other DNA
cacatcccctccaaacaccaccaagggtccatctccgccggagtccacgccagagtcccccgtggcaaccagcacaggca

SEQ ID NO: 58677 - DNA, 80 bp, synthetic construct
  source 1..80: mol_type = other DNA
ctaaatcaactgaaaagacttaaaaggatgatggcattgcactgactaacgttgttgtttgtgctggtttctttagttac

SEQ ID NO: 58678 - DNA, 80 bp, synthetic construct
  source 1..80: mol_type = other DNA
atccccactacactattatcgcaatgtgccacatctaatctgcttcattgtgtctacaaacggactaaactccctttgct

SEQ ID NO: 58679 - DNA, 80 bp, synthetic construct
  source 1..80: mol_type = other DNA
ctgcttcattgtgtctacaaacggactaaactccctttgctctatttactctagcctaaaccttgactgcgtgccgccac

SEQ ID NO: 58680 - DNA, 80 bp, synthetic construct
  source 1..80: mol_type = other DNA
agcagaccaccaaccccctccacaacagcccaaggacccactgaaaacaacagccacagcaccaccggacagcttgggtc

SEQ ID NO: 58681 - DNA, 80 bp, synthetic construct
  source 1..80: mol_type = other DNA
ctaactcaatagaaagaacctcgaaagtttacagcagtatgccgtctagtgcccttgcttattctagcttcgtttattgc

SEQ ID NO: 58682 - DNA, 80 bp, synthetic construct
  source 1..80: mol_type = other DNA
gtcagtacgtaagtgtcaactttgagagagtggattgtgcatcccgaatgcaccatgcccatcaacattatgcatacact

SEQ ID NO: 58683 - DNA, 80 bp, synthetic construct
  source 1..80: mol_type = other DNA
agtacaaaacagaaattaagataggcaaggcaccaacaggctctaggaaactactgtccgaagagccaggtgatgattgc

SEQ ID NO: 58684 - DNA, 80 bp, synthetic construct
  source 1..80: mol_type = other DNA
gaacaaacaccaccacagcacccggcacaggtcaaagccccaagccacctgcgagcacaaccccatcacacgcaccggaa

SEQ ID NO: 58685 - DNA, 80 bp, synthetic construct
  source 1..80: mol_type = other DNA
ctatccactatcaaactcaccacaccaacaagcgaaacagaaggctcaggggaaacgaccccacccacaaacaccaccca

SEQ ID NO: 58686 - DNA, 80 bp, synthetic construct
  source 1..80: mol_type = other DNA
ggactcgcccccgctagagaccacaccagaacgctctgcaacaaccgccacaagcacgtcaggcacagacaacatgaatt

SEQ ID NO: 58687 - DNA, 80 bp, synthetic construct
  source 1..80: mol_type = other DNA
ccaccacacagatgaccgataacacccccacatcaacagtcagcacaagtctatccagtagccccagcacgccatccaca

SEQ ID NO: 58688 - DNA, 80 bp, synthetic construct
  source 1..80: mol_type = other DNA
tcacaaggcatgcaccatcccgtgaggagtctattgtcagtctcgagccccaagacagcaacaacaccaacaccaatgag

SEQ ID NO: 58689 - DNA, 80 bp, synthetic construct
  source 1..80: mol_type = other DNA
ctaactcaacagaaagaacctcggaggtttacagcagcatgccgtctagtgcccttgctcattctagtttcgttcatcgc

SEQ ID NO: 58690 - DNA, 80 bp, synthetic construct
  source 1..80: mol_type = other DNA
atccatacttcacagacactgcaacacactgcatctagcctgcctcattatatccacaagtaggctctgtaatgcttgaa

SEQ ID NO: 58691 - DNA, 80 bp, synthetic construct
  source 1..80: mol_type = other DNA
ccctggagagatgagctcggaaaccagcagtcagcactcagccatgagcagaacaccaaccccccacacagcaacccagg

SEQ ID NO: 58692 - DNA, 80 bp, synthetic construct
  source 1..80: mol_type = other DNA
tctccactgagaacgccaaccgcagcacatccagacagtctgagtcctcagcacagccggcaacccaaagcccggtgact

SEQ ID NO: 58693 - DNA, 80 bp, synthetic construct
  source 1..80: mol_type = other DNA
tccccagcgcaatcaatccttctgatgagtgctactcccacaaccattcagaacatacatcccagcccaacaaagaggtc

SEQ ID NO: 58694 - DNA, 80 bp, synthetic construct
  source 1..80: mol_type = other DNA
attagtgtgcttcattctttacctacagctgttgggtctaggaggagctcatggacagtcaaacgcaactgaacacaatg

SEQ ID NO: 58695 - DNA, 80 bp, synthetic construct
  source 1..80: mol_type = other DNA
caagaggaaccttgagatggaaataattttaactctgtctcaaggtctgaagaaatactatggtaaaatactgaagcttc

SEQ ID NO: 58696 - DNA, 80 bp, synthetic construct
  source 1..80: mol_type = other DNA
tctacaaacagactctgtaatgcttgaaactgccttcgctctgtttgctttgacctaaatcttgactgcgtgccgccact

SEQ ID NO: 58697 - DNA, 80 bp, synthetic construct
  source 1..80: mol_type = other DNA
cggcacgtcagtacgtaagtgttaactttgaggaagtaggttgagcatcttaattgcaacatacctgtcaacatcatgca

SEQ ID NO: 58698 - DNA, 80 bp, synthetic construct
  source 1..80: mol_type = other DNA
accgggctagggaagaatacacaagtatttgcctcttcgcactaggaagtattctatttatagtctcttgtctgatgaaa

SEQ ID NO: 58699 - DNA, 80 bp, synthetic construct
  source 1..80: mol_type = other DNA
ctagattaactgaaggggcctagggggatgacgaccctgcgccgactggtgttgccgtccatgctgattcctccaattgc

SEQ ID NO: 58700 - DNA, 80 bp, synthetic construct
  source 1..80: mol_type = other DNA
tatgtcattgatgtatgcagttttctgcttgcagctgtgtggtctagggaaaacccatggatcacacaatggaactggac

SEQ ID NO: 58701 - DNA, 80 bp, synthetic construct
  source 1..80: mol_type = other DNA
tccttaccatattaccatcacaatatgccgcatccaagctacttcattgtaactacaaacagactctgtaatgcttgaag

SEQ ID NO: 58702 - DNA, 80 bp, synthetic construct
  source 1..80: mol_type = other DNA
gctaaatgacaggtgtaccctattcaccaattgtgtgataagaggaagagaagttcgtaaaggccaatctgtcctaaggc

SEQ ID NO: 58703 - DNA, 80 bp, synthetic construct
  source 1..80: mol_type = other DNA
ctcaggaaggaaggggccatgtgaagttgtctagaggctcagaggttgtcctggatgtatgtgactcaaactgtgaggtg

SEQ ID NO: 58704 - DNA, 80 bp, synthetic construct
  source 1..80: mol_type = other DNA
gagaggtttacacctcttctcaaatcactaccaagggtttgtctctgccggaggccacatccgagctccttgcgactacc

SEQ ID NO: 58705 - DNA, 80 bp, synthetic construct
  source 1..80: mol_type = other DNA
agcgtagtcacttcaagtgcaagtgatgccgatcctagcacacagacagctggaaacacccccacaccgacaatccgcac

SEQ ID NO: 58706 - DNA, 80 bp, synthetic construct
  source 1..80: mol_type = other DNA
ctagatcaaccggaggagcttgggagatgacagccctacaccggctggtgccaccattcaggctaactcctttaattgca

SEQ ID NO: 58707 - DNA, 80 bp, synthetic construct
  source 1..80: mol_type = other DNA
gggctccaagccagaagaaacgccaacaccgtcaaaatcaagcaaagatgactcaacaaccagcagccctcacccagccg

SEQ ID NO: 58708 - DNA, 80 bp, synthetic construct
  source 1..80: mol_type = other DNA
ggccgataaggctaccccgtatccaccataagggaactttcataccaggaacttacaaaatagttatagacaaaaaaaac

SEQ ID NO: 58709 - DNA, 80 bp, synthetic construct
  source 1..80: mol_type = other DNA
aagcagaacgacagatgcactttggtcactgactgtgtgataaaaggaagggaaattcgtaagggtcagtcagtgttaag

SEQ ID NO: 58710 - DNA, 80 bp, synthetic construct
  source 1..80: mol_type = other DNA
catggctaggaagctcgaatttggggcagaaagcacctttaaagccttttcagctatgcccaaaacctccttgtgctttt

SEQ ID NO: 58711 - DNA, 80 bp, synthetic construct
  source 1..80: mol_type = other DNA
acattgtggagagagaatactgtaaaagctgcagtaaagaagacacacagaaatgtgtcaacacgaagcttgagcaacca

SEQ ID NO: 58712 - DNA, 80 bp, synthetic construct
  source 1..80: mol_type = other DNA
agaactagaggcctattcaagtacagacacctcaaggatgatgaagaaaccggttacaggaaaatcattgagaggctgaa

SEQ ID NO: 58713 - DNA, 80 bp, synthetic construct
  source 1..80: mol_type = other DNA
ggaagtttatacatcttcctcaatcaccaccaagggcttatctctgccgaaggctacgtctgagctccttgcgactacca

SEQ ID NO: 58714 - DNA, 80 bp, synthetic construct
  source 1..80: mol_type = other DNA
ggccggtaagactgccccgtatccaccatgaaggaacctttataccaggaacttacaaaatagttatagataaaaaaacc

SEQ ID NO: 58715 - DNA, 80 bp, synthetic construct
  source 1..80: mol_type = other DNA
tccaacaaaacccaacacaatgacactagtaccataaaggtgcccgaagagagtcaaaaaaccagtctgcccgcgaacat

SEQ ID NO: 58716 - DNA, 80 bp, synthetic construct
  source 1..80: mol_type = other DNA
acctggttgatctaggatgccccaacatcccactgttaggcaaaatggccatctacatttgtagaatgtcaaatcatccc

SEQ ID NO: 58717 - DNA, 80 bp, synthetic construct
  source 1..80: mol_type = other DNA
acgagcacctctccctcagtcaccacacaaggcccgaccccactagaaatcacgccagagccccacacaacaattgacat

SEQ ID NO: 58718 - DNA, 80 bp, synthetic construct
  source 1..80: mol_type = other DNA
attgcatcctaggattgaagaaggcttctttgacttaatgcatatacaaaaagtactatcagcaagtacagtatgtaagc

SEQ ID NO: 58719 - DNA, 80 bp, synthetic construct
  source 1..80: mol_type = other DNA
cgataaatcaagcacatccatcgctgacatcagcacacggacagtcaaggacatccccacaccaacaacccacaccagtt

SEQ ID NO: 58720 - DNA, 80 bp, synthetic construct
  source 1..80: mol_type = other DNA
tgcccagcactcccagcgcgccaactataccgcaagaagtacatcacactgcaaggggcctactgtcagtcaccagcaca

SEQ ID NO: 58721 - DNA, 80 bp, synthetic construct
  source 1..80: mol_type = other DNA
ctaaatcagcagacagggcctcaagaaatgatgacagtatacttactaatactactgcttgtgctagcaccactgattgt

SEQ ID NO: 58722 - DNA, 80 bp, synthetic construct
  source 1..80: mol_type = other DNA
acctgtgtcacactgtcattgcaatgagttataacctgtttcatcacattcgcaaacaagctcttctgctcttttcactc

SEQ ID NO: 58723 - DNA, 80 bp, synthetic construct
  source 1..80: mol_type = other DNA
atcacattcgcaaacaagctcttctgctcttttcactctgacataaaccttgactgcgtgccgccactatatctttgaga

SEQ ID NO: 58724 - DNA, 80 bp, synthetic construct
  source 1..80: mol_type = other DNA
aaaccagaagaagcatcaacactaacaagcccaggggaagcaagcacagaggccagcagcccacaaccaaccatcagcga

SEQ ID NO: 58725 - DNA, 80 bp, synthetic construct
  source 1..80: mol_type = other DNA
gacaccatcccctcccccaacaacccaagctcccaccgaaatcaacaaccccaacacatccagacagcccatgccctcaa

SEQ ID NO: 58726 - DNA, 80 bp, synthetic construct
  source 1..80: mol_type = other DNA
cacaaccagcagctcccaactcagtgacccctccagtacagccaaccttctctcagagtgacgtttccacggctgctcaa

SEQ ID NO: 58727 - DNA, 80 bp, synthetic construct
  source 1..80: mol_type = other DNA
ccttcaacattatgtacacaccactattgtgtgccattctttgtttgcagctgtggagcttagaaggaatttatggattg

SEQ ID NO: 58728 - DNA, 80 bp, synthetic construct
  source 1..80: mol_type = other DNA
acagactctataatgcttgaaactgcctttgctctatttactctgacctaaatcttgactgcgtgccgccactatatctt

SEQ ID NO: 58729 - DNA, 80 bp, synthetic construct
  source 1..80: mol_type = other DNA
ctctgcaaacaaactttataatgcttgaagctgccttcgctccatttgctttgacctaaatcttgactgcgtgccgccac

SEQ ID NO: 58730 - DNA, 80 bp, synthetic construct
  source 1..80: mol_type = other DNA
ctcagtacgtaagtgttaactttgagcgtgtgtaaagagcaatctgtgagcaacatgttgcctctcaaatctatgctgct

SEQ ID NO: 58731 - DNA, 80 bp, synthetic construct
  source 1..80: mol_type = other DNA
aaactgtcccaacactcacaactgctctgaacagcacaactcctgcaccagggccgtcaacagacactgccacaaagaca

SEQ ID NO: 58732 - DNA, 80 bp, synthetic construct
  source 1..80: mol_type = other DNA
gtatctagcacaaccatcagcacgccagatacacagatcaccacggacagtggctcaggtgaatccagcactgatccctc

SEQ ID NO: 58733 - DNA, 80 bp, synthetic construct
  source 1..80: mol_type = other DNA
ggttaccaacaaggacacatcccctacttccgttgccattgtccaaacacaagaaacagaagcacccacgaccctgaatc

SEQ ID NO: 58734 - DNA, 80 bp, synthetic construct
  source 1..80: mol_type = other DNA
caaacacaacggcgaccacaggcgattctaccccaagcaccaccacaccagacagtccaagtgccaactcgcctacacta

SEQ ID NO: 58735 - DNA, 80 bp, synthetic construct
  source 1..80: mol_type = other DNA
ccagtcccacagacaaactcatctcctagccccagcaaggcaccaacaccgcagaccacacaccatctatccagaggtct

SEQ ID NO: 58736 - DNA, 80 bp, synthetic construct
  source 1..80: mol_type = other DNA
tctctcagcagcaatcacagaagcagaccaaacagcatcggcagagacttcaacaaaagagactactaccacaaacagct

SEQ ID NO: 58737 - DNA, 80 bp, synthetic construct
  source 1..80: mol_type = other DNA
caatgacggcaaggagtgacacagcggttacttcaactcaacacgtcaccaccaataacactacaggacaaactaatcct

SEQ ID NO: 58738 - DNA, 80 bp, synthetic construct
  source 1..80: mol_type = other DNA
acaaccttggtaacctcccctaagactcaaacgatacagggccaacagactacaacaccagtgaccacacccactattac

SEQ ID NO: 58739 - DNA, 80 bp, synthetic construct
  source 1..80: mol_type = other DNA
gactaacttcatcctttgtcagctcttttggagtggcagtggagtcaccagtggaggtggaaccaactctagtttgatac

SEQ ID NO: 58740 - DNA, 80 bp, synthetic construct
  source 1..80: mol_type = other DNA
caccattgcactcataagcccaacaagcaggtccaaaagaaactccaaagtgcaaataattctaaccttccctcaaggtc

SEQ ID NO: 58741 - DNA, 80 bp, synthetic construct
  source 1..80: mol_type = other DNA
accatagaagcaagcagaagagccctgcccatccgaagcatcatcaacaccactcttgtaatgtgcattctaacattagc

SEQ ID NO: 58742 - DNA, 80 bp, synthetic construct
  source 1..80: mol_type = other DNA
cacaaccagcagctcccagctcagtgacccatccagcacagccaaccccctctcagagcgacgtccccacggctgctcaa

SEQ ID NO: 58743 - DNA, 80 bp, synthetic construct
  source 1..80: mol_type = other DNA
acttcaatgaagtgttgcagttcaaaacaccaagcacaccaagccctacgaaaccagctcatgtcgagtcaccgacagta

SEQ ID NO: 58744 - DNA, 80 bp, synthetic construct
  source 1..80: mol_type = other DNA
gaaccctttaaatcttactttgctaaaggcttcctctcaatggactcaggttacttctctgccaagtgttatccaaagtc

SEQ ID NO: 58745 - DNA, 80 bp, synthetic construct
  source 1..80: mol_type = other DNA
aagtcatcaaattcaggacttcagctgatcaatatcacccaacattcaattagaataacagacacaccagggcccaagat

SEQ ID NO: 58746 - DNA, 80 bp, synthetic construct
  source 1..80: mol_type = other DNA
cactagtctgaagaccatcaattgcataaacttgaaggcattagtcttcaaagagcatagggagattgaaatcaatgttc

SEQ ID NO: 58747 - DNA, 80 bp, synthetic construct
  source 1..80: mol_type = other DNA
agtatcgcccaccacgtcagaccccccctccgtcacattcacagcatcagccagtgaaccagaaggctcagggggtacga

SEQ ID NO: 58748 - DNA, 80 bp, synthetic construct
  source 1..80: mol_type = other DNA
atcaatgaatcaagcacagccatcgccgacaccagcacacaaacagtcagggacatcctcacaccaacaacctacaccag

SEQ ID NO: 58749 - DNA, 80 bp, synthetic construct
  source 1..80: mol_type = other DNA
tttgcccagcactcccagcgcgccaaccaagccacaggaaacacgtcacactgcaaggggcctactgtcagtcaccagca

SEQ ID NO: 58750 - DNA, 80 bp, synthetic construct
  source 1..80: mol_type = other DNA
gcctatatcacactgtcattgcaatgagttatatcaaaactgtttcatcacattcgcaaacaagctcttctactcttttc

SEQ ID NO: 58751 - DNA, 80 bp, synthetic construct
  source 1..80: mol_type = other DNA
aagccgggagaaacaccatcaccaacaaacccaggaggagcgggcacagaggccagcagcccacacccaaccatcagcga

SEQ ID NO: 58752 - DNA, 80 bp, synthetic construct
  source 1..80: mol_type = other DNA
gacaccatccccccccccaacagcccaggctcccaccggaatcaacaaccccaacacatccaaacaatccatgctctcaa

SEQ ID NO: 58753 - DNA, 80 bp, synthetic construct
  source 1..80: mol_type = other DNA
gcggcacgtcagtacgtaagtgtcaactttgagagagtggattgtgcatcccgaatgcaccatgcccatcaatattatgc

SEQ ID NO: 58754 - DNA, 80 bp, synthetic construct
  source 1..80: mol_type = other DNA
cacaatggaacaaacaccaccacagtacccggcacaagtcaaagccccaagccacccgcgagcacaaccccatcacacgc

SEQ ID NO: 58755 - DNA, 80 bp, synthetic construct
  source 1..80: mol_type = other DNA
atccacatcacaaggcatgcaccatcccgtaaggagtctattgtcagtctcgagctccatgacagcaacaacaccaacac

SEQ ID NO: 58756 - DNA, 80 bp, synthetic construct
  source 1..80: mol_type = other DNA
caatgagccctggagagatgagctcggaaaccagcagtcagcacccagccatgagcagaacaccaaccccccacacagca

SEQ ID NO: 58757 - DNA, 80 bp, synthetic construct
  source 1..80: mol_type = other DNA
agtgacttccccagtgcaatcaatccttctgatgactgctactcccacaaccattcagaacatacatcccagcccaacaa

SEQ ID NO: 58758 - DNA, 80 bp, synthetic construct
  source 1..80: mol_type = other DNA
acaggtctaagaggaaccttgagatggagataattttaactctgtctcaaggtctgaagaaatactatggtaaaatactg

SEQ ID NO: 58759 - DNA, 80 bp, synthetic construct
  source 1..80: mol_type = other DNA
acattgtggagagggaacactgcaaaagctgtagtaaagaagacacacaaagatgtgtcaacacaaagcttgaacaacca

SEQ ID NO: 58760 - DNA, 80 bp, synthetic construct
  source 1..80: mol_type = other DNA
tatctacaaataagctctataatgcttgaagctaccttagctctgctcactctgaccttaactttgactgcgtgccgcca

SEQ ID NO: 58761 - DNA, 80 bp, synthetic construct
  source 1..80: mol_type = other DNA
taccaacattatgcatacactattagtgtgcttcattctttacctacagctgctgggtccaggaggagcccatggacagc

SEQ ID NO: 58762 - DNA, 80 bp, synthetic construct
  source 1..80: mol_type = other DNA
taacggaccacacaatgggactgaacacaataatacacacgttatgacaacgcctgatgacagtcagagccctgaaccgc

SEQ ID NO: 58763 - DNA, 80 bp, synthetic construct
  source 1..80: mol_type = other DNA
cagtgagcacagccttacccgtcacaccggacccttcaactgtcacaccttcaacaccagccagcggattagaaggctca

SEQ ID NO: 58764 - DNA, 80 bp, synthetic construct
  source 1..80: mol_type = other DNA
tgcatcagaccagtatgatacacgattagcatgcagtgaagttttaaaaaactatcctgagacaccattacagctactag

SEQ ID NO: 58765 - DNA, 80 bp, synthetic construct
  source 1..80: mol_type = other DNA
tttgatgtggtggcaattaggactgatggttcaaacatatcaacacagtggcctagtagaaggaatgagggtgttgttca

SEQ ID NO: 58766 - DNA, 80 bp, synthetic construct
  source 1..80: mol_type = other DNA
tttgatgtggttgcaattagaactgatggctcaaatatatcaacacaatggcctagtagaagaaatgaaggtgttgtcca

SEQ ID NO: 58767 - DNA, 80 bp, synthetic construct
  source 1..80: mol_type = other DNA
tgcatctgatcagtatgatacacggttagcttgcagtgaagttttgaagaattatcctgagacaccactacagctgttag

SEQ ID NO: 58768 - DNA, 80 bp, synthetic construct
  source 1..80: mol_type = other DNA
ttcaagacatttatctcagcccaacgaatagatctaaaagaaaccttgacatggaaataatcttgacgttgtctcagggt

SEQ ID NO: 58769 - DNA, 80 bp, synthetic construct
  source 1..80: mol_type = other DNA
cttcaatgaagtcttacaatttaaaacaccaagcacagtaagccccacggagccatctcatgccagactaccaacagcag

SEQ ID NO: 58770 - DNA, 80 bp, synthetic construct
  source 1..80: mol_type = other DNA
aacccttcaaatcttacttcgctaagggtttcctttcaatagattcgggttacttctctgccaaatgttactcgagatca

SEQ ID NO: 58771 - DNA, 80 bp, synthetic construct
  source 1..80: mol_type = other DNA
ccaaacgcaactgaacacaatagaacaaacaccaccacagcacccggcacaagccatagcctcaagccacttgtgagcac

SEQ ID NO: 58772 - DNA, 80 bp, synthetic construct
  source 1..80: mol_type = other DNA
tcaagctatgtgaaaacagcgccacagggaaagcctgtgaagtggacagcactccggttaagtgcaggcagggtttttgt

SEQ ID NO: 58773 - DNA, 80 bp, synthetic construct
  source 1..80: mol_type = other DNA
acctagagtgccctcatatcccgctattaggtaagttggccatttacatttgcagaatgtcaaatcatcctagaacaact

SEQ ID NO: 58774 - DNA, 80 bp, synthetic construct
  source 1..80: mol_type = other DNA
atggcttttctcttctggttcggctttggctatgtgatcacctgtatactctgcaaggctcttttttattcattgataat

SEQ ID NO: 58775 - DNA, 80 bp, synthetic construct
  source 1..80: mol_type = other DNA
aaccccaccacaagcaccggaatcatccaccattaaacccactacaccaacaagcgaaacagaaggctcaggggaagcga

SEQ ID NO: 58776 - DNA, 80 bp, synthetic construct
  source 1..80: mol_type = other DNA
gaatcgcataaatgctactgtagcttattttgctgcccctactgtaggcactgctctgctgacagagaaattcaccagtt

SEQ ID NO: 58777 - DNA, 80 bp, synthetic construct
  source 1..80: mol_type = other DNA
acacttgagtatctgcaggaaaagaagaacggggagcaatgtcatgctggctgtctgcaaacgcatgtgctttagggcaa

SEQ ID NO: 58778 - DNA, 80 bp, synthetic construct
  source 1..80: mol_type = other DNA
ccatagaagtaagcagaagagccctgctcatccgaagcatcatcaataccacttttgtaatatgtattctaacattaaca

SEQ ID NO: 58779 - DNA, 80 bp, synthetic construct
  source 1..80: mol_type = other DNA
atctgtgttgttagcacttctgcagtagagatggaaaacctcccagcaggcacttgggagagagaggaagacctaacaaa

SEQ ID NO: 58780 - DNA, 80 bp, synthetic construct
  source 1..80: mol_type = other DNA
ccccactttcaaacaccatccaggccccgtcctcaccagagaccacatcagaacgccccgcaacagctgtcataagcacg

SEQ ID NO: 58781 - DNA, 80 bp, synthetic construct
  source 1..80: mol_type = other DNA
tcaggcacagacagcacgaactccaccacacagacgaccgataataaccccacaacaacagtcggcacaagtccatccag

SEQ ID NO: 58782 - DNA, 80 bp, synthetic construct
  source 1..80: mol_type = other DNA
cagccccagtacgccatccacaccacaaggcatacaccatcatgcaaggagtctattgtcagtcacgagccctgagacag

SEQ ID NO: 58783 - DNA, 80 bp, synthetic construct
  source 1..80: mol_type = other DNA
ctaactcaacagaaagaacctcgaaggttgacagcagtgtgctgtccagtgcccttgcccatgctagcttcgctcaaagc

SEQ ID NO: 58784 - DNA, 80 bp, synthetic construct
  source 1..80: mol_type = other DNA
atccatactttacagacactgtaacaaactgcacctgatctgcttcactatatcaaagcaatgtttaaaactgccttagc

SEQ ID NO: 58785 - DNA, 80 bp, synthetic construct
  source 1..80: mol_type = other DNA
caaagcaatgtttaaaactgccttagctctgcttgctctgaccttaactttgactgcgtgccgccactatatctttgaga

SEQ ID NO: 58786 - DNA, 80 bp, synthetic construct
  source 1..80: mol_type = other DNA
taacaacaccaaaaccaacgagccctagggagatgagctcggaaaccagcaatcaacactcagccatgagcaggacacca

SEQ ID NO: 58787 - DNA, 80 bp, synthetic construct
  source 1..80: mol_type = other DNA
acccaccacacagtaacccaggtctccactgagaacaccagccacagcacacccagacagcctgagtcctcagcacagcc

SEQ ID NO: 58788 - DNA, 80 bp, synthetic construct
  source 1..80: mol_type = other DNA
gacatcctcaagcccaatgacttccccagcgcaatcaacccttctaatgagtgctgctcctacagctgtccagagcatac

SEQ ID NO: 58789 - DNA, 80 bp, synthetic construct
  source 1..80: mol_type = other DNA
atcccagcccaacgaacaggtctaagaggaaccttgagacggaaataattttaactctatcccagggtctaaagaaatac

SEQ ID NO: 58790 - DNA, 80 bp, synthetic construct
  source 1..80: mol_type = other DNA
ccaccaacactatgcatacactattagtgtgcttcattctttacctacaactgttgggtctaggaggagctcatgtacag

SEQ ID NO: 58791 - DNA, 80 bp, synthetic construct
  source 1..80: mol_type = other DNA
aagagaaaccttgggtcaaactgtgatgatgacttctttcaaaagagaatagaagaattcttcatgactggtgagggcta

SEQ ID NO: 58792 - DNA, 80 bp, synthetic construct
  source 1..80: mol_type = other DNA
atggatcaagcagtggaactgaacacaacaggacaaacgttgtggcaacgcccggaggtagccagagccctgaaccgcta

SEQ ID NO: 58793 - DNA, 80 bp, synthetic construct
  source 1..80: mol_type = other DNA
tcaagctgtgcgaaaacagtgcaacaggaaagagctgtaaaatagacagtatcccagttaagtgcagacagggttattgc

SEQ ID NO: 58794 - DNA, 80 bp, synthetic construct
  source 1..80: mol_type = other DNA
gtgagcacgaccttgcccgtcacgctagactcctccactgtcacacccgcaacgcaagctagcggaccagaaggctcggg

SEQ ID NO: 58795 - DNA, 80 bp, synthetic construct
  source 1..80: mol_type = other DNA
accaggccagggagggatacacaagtatttgcctctttgtactaggaagtatcctgtttatagtctcttgtctaacaaaa

SEQ ID NO: 58796 - DNA, 80 bp, synthetic construct
  source 1..80: mol_type = other DNA
ggaagtttacacatcccccccaaccaccactgaaggcctgtctccgtcagatgccacgtcagagctccccacaacaactg

SEQ ID NO: 58797 - DNA, 80 bp, synthetic construct
  source 1..80: mol_type = other DNA
gcataggcatctcaagttcaagtgatgtcaattccagcacacaggcagccggggacacctccacaccaacagcacgcaca

SEQ ID NO: 58798 - DNA, 80 bp, synthetic construct
  source 1..80: mol_type = other DNA
ctagattgactaaaaaggcttggaaaatgatgttttccctaactaacattgttattcatgctggtttcttcagttgcatc

SEQ ID NO: 58799 - DNA, 80 bp, synthetic construct
  source 1..80: mol_type = other DNA
cccactacactattatcacaatatgctgcatctaatctacttcactgtacctacagatagactgaaactgcctttgctct

SEQ ID NO: 58800 - DNA, 80 bp, synthetic construct
  source 1..80: mol_type = other DNA
ctacagatagactgaaactgcctttgctctatttgctctgacctaaatcttgactgcgtgccgccactatatctttgaga

SEQ ID NO: 58801 - DNA, 80 bp, synthetic construct
  source 1..80: mol_type = other DNA
gccttaagccagaagaaacaccagcaccgtcaaaatcaggcaaagagagtccagcagccagcagccctcacccagtcgcc

SEQ ID NO: 58802 - DNA, 80 bp, synthetic construct
  source 1..80: mol_type = other DNA
agcagaccaccaaccccttctacaacagctcagggacccaccgaaaacaacagccgcaacaccactgtacagcttaaatc

SEQ ID NO: 58803 - DNA, 80 bp, synthetic construct
  source 1..80: mol_type = other DNA
cgtgacacaatcggcaaccctaggcccaatggcctctccaacacagacagtccttctacagagtgtcacctccatagcca

SEQ ID NO: 58804 - DNA, 80 bp, synthetic construct
  source 1..80: mol_type = other DNA
cccactaacaggacccaacacaataaaacaggcaccatggcgacacccgaaggaaccctgggacccaggctgcctgtaag

SEQ ID NO: 58805 - DNA, 80 bp, synthetic construct
  source 1..80: mol_type = other DNA
cacagcactgcccaccaagtcggaccgcccctctgtcggacccgcagcaccgtccagtggactagagggctcaggggaac

SEQ ID NO: 58806 - DNA, 80 bp, synthetic construct
  source 1..80: mol_type = other DNA
ccatagaagttagcaatagggctttacttatccggagtatcatcaataccacttttgctgtgtgtatactaacactagca

SEQ ID NO: 58807 - DNA, 80 bp, synthetic construct
  source 1..80: mol_type = other DNA
gtttgtgttgtcagcacctctgcagtggagatggaaagtctaccagccggcacctgggagagagaggaagacctaacaaa

SEQ ID NO: 58808 - DNA, 80 bp, synthetic construct
  source 1..80: mol_type = other DNA
cgaatacttccccctcaatcaccacaaaaggcctggccctgccagagaccacgccagcaccccccacagcaaccgacaca

SEQ ID NO: 58809 - DNA, 80 bp, synthetic construct
  source 1..80: mol_type = other DNA
gatgcatcaagcacaggggtcgtcaatgtcagcacgcagatgaccaaggacatccctatgtcgacggcctacacgaatcc

SEQ ID NO: 58810 - DNA, 80 bp, synthetic construct
  source 1..80: mol_type = other DNA
ctaacttaatggaaaaagcctcaaaaggtgatgacagtatacccactaatactatagcttgtgttaacatcattaattgt

SEQ ID NO: 58811 - DNA, 80 bp, synthetic construct
  source 1..80: mol_type = other DNA
gcccacaccatgtcgtcatcgcaatgcatcatattcaacctacttcattatattcgtaatgcttgaaattgctattgctt

SEQ ID NO: 58812 - DNA, 80 bp, synthetic construct
  source 1..80: mol_type = other DNA
attcgtaatgcttgaaattgctattgcttcattcactctgtcctaaaccttaactgcgtgccgccactatatctttgaga

SEQ ID NO: 58813 - DNA, 80 bp, synthetic construct
  source 1..80: mol_type = other DNA
cgaagtcagaagaagtatcaatgtcaacaagcccaggaaaaacaagcacagagaccagcagcccacccccagccaccagc

SEQ ID NO: 58814 - DNA, 80 bp, synthetic construct
  source 1..80: mol_type = other DNA
gagacaccagccccctctccaacaactcaggctcccaccggaaacaataaccctaacacctccagacaacctacgccctc

SEQ ID NO: 58815 - DNA, 80 bp, synthetic construct
  source 1..80: mol_type = other DNA
cacagccagcaatgtcaaacccaacaacctctccagcacagccaaaccttttacagaatgccccccccactgctgatcaa

SEQ ID NO: 58816 - DNA, 80 bp, synthetic construct
  source 1..80: mol_type = other DNA
tgaccgtcaacactgtgtgcacaccactagtgtgtgctgttttctgcctacagctgtggaatctaggaggtactcttgtg

SEQ ID NO: 58817 - DNA, 80 bp, synthetic construct
  source 1..80: mol_type = other DNA
tgcacttgagtatctgcaaaaaaagaaaaacagggagcaatgtcatgctagctgtctgcaagcgcatgtgctttagagca

SEQ ID NO: 58818 - DNA, 80 bp, synthetic construct
  source 1..80: mol_type = other DNA
ccccacccacaagcaccacccagggctcgcccccactagagaccacaccagaacgctctacaacaaccgccacaagcacg

SEQ ID NO: 58819 - DNA, 80 bp, synthetic construct
  source 1..80: mol_type = other DNA
tagagtcagtcaagagctttttttatggattgaagaatatgcttggcagtgtttttggtaattttttcataggtattttg

SEQ ID NO: 58820 - DNA, 80 bp, synthetic construct
  source 1..80: mol_type = other DNA
ataggctctgtgatgcttgaaactgccctggctctgcttgctctgacctaaaccttgactgcgtgccgccactatatctt

SEQ ID NO: 58821 - DNA, 80 bp, synthetic construct
  source 1..80: mol_type = other DNA
caattatgagattagaggaaagaaccggaatcagctggagcctaggtgtggaggatgcctctgaatcgaaaacactcact

SEQ ID NO: 58822 - DNA, 80 bp, synthetic construct
  source 1..80: mol_type = other DNA
atagaccaaacaacggaaccgaacacaacaaaacaaacgttttgacaacgcccggcgacaaactgagccctgaactgcca

SEQ ID NO: 58823 - DNA, 80 bp, synthetic construct
  source 1..80: mol_type = other DNA
gtaagcacagccttgtctgttacgccagactcctccactgtcacacccacaacaccagtcagtggactggaaggctcggg

SEQ ID NO: 58824 - DNA, 80 bp, synthetic construct
  source 1..80: mol_type = other DNA
ggacgtgtacacatcccccccagtcaccaccaagggcctgtctccgtcgaaggccacgtcagagctccccgcgtcttcag

SEQ ID NO: 58825 - DNA, 80 bp, synthetic construct
  source 1..80: mol_type = other DNA
gcatagacacctcaagtgcaagtgatgtcgattccagcacacaggcagccagagacacctcaacactaacagtccgcaca

SEQ ID NO: 58826 - DNA, 80 bp, synthetic construct
  source 1..80: mol_type = other DNA
ctagatcaactaaaaaggcttaaaagaatgatggtattgcactggctaacattgttattcatgctggcttctttagttgc

SEQ ID NO: 58827 - DNA, 80 bp, synthetic construct
  source 1..80: mol_type = other DNA
atccccattgcactattatcacaatatgctacatctaatctgcttcattgtacccacaaacagactgaaactgcctttgc

SEQ ID NO: 58828 - DNA, 80 bp, synthetic construct
  source 1..80: mol_type = other DNA
gcccctggccagaagaaacaacagcaccgtcaaaatcaggcaaagagagtccagtagccaacagccctcacccagtcacc

SEQ ID NO: 58829 - DNA, 80 bp, synthetic construct
  source 1..80: mol_type = other DNA
agcagaccatcatcccctcccataacagtccaaggacccactgaaaacagcagccacaacaccaccggacagcttgagtc

SEQ ID NO: 58830 - DNA, 80 bp, synthetic construct
  source 1..80: mol_type = other DNA
catggcacaatcaacaaccctagtcccaatggcctctccaacacagacagtcctctcacagagtgtcacctccttagccg

SEQ ID NO: 58831 - DNA, 80 bp, synthetic construct
  source 1..80: mol_type = other DNA
cttgcggcacgttagtacgtaagtgttaactttgagcgtgtgtaaagagcaatctgtgagcaacatgttgcctctcaaat

SEQ ID NO: 58832 - DNA, 80 bp, synthetic construct
  source 1..80: mol_type = other DNA
ctactctggtcacctcacctacaaccgtgcccttcaagtcttactatgccaaaggctctctaacttttgactcaggctac

SEQ ID NO: 58833 - DNA, 80 bp, synthetic construct
  source 1..80: mol_type = other DNA
ttttctgctaaatgttatccaagggtatctaactcaggaatgcagttaatcaatgtcacacagcatccagtaaagattgc

SEQ ID NO: 58834 - DNA, 80 bp, synthetic construct
  source 1..80: mol_type = other DNA
gtgaactcgagatcaatgtactacttccgcaggttgctatcaatctttcaaattgtcatgtttcaattaaatcacatgtt

SEQ ID NO: 58835 - DNA, 80 bp, synthetic construct
  source 1..80: mol_type = other DNA
tgtgattactccattgacactgatggaacagtaaagctcccaaaaattgagcacaatggggtttttataccaggaactta

SEQ ID NO: 58836 - DNA, 80 bp, synthetic construct
  source 1..80: mol_type = other DNA
agtttgatacaaaccgtcccaacactcacaactgctctgaacagcacaactcctgcaccagggccgtcaacagacaccgc

SEQ ID NO: 58837 - DNA, 80 bp, synthetic construct
  source 1..80: mol_type = other DNA
cgagaagactgcttgctgaaggaggaagcagtaactgtgtttcaagaacccagctagtcaagaccgaagttgcagaaatc

SEQ ID NO: 58838 - DNA, 80 bp, synthetic construct
  source 1..80: mol_type = other DNA
atggctttcttgttctggtttagctttggatatgtcatcacatgcatagtatgcaaaatgcttttctacctgctgattat

SEQ ID NO: 58839 - DNA, 80 bp, synthetic construct
  source 1..80: mol_type = other DNA
aattggaacactggggaagaagctaaaacagtatagggagctaaagcctcaaacatgtattgtctgtgaatccatcccta

SEQ ID NO: 58840 - DNA, 80 bp, synthetic construct
  source 1..80: mol_type = other DNA
cacaaagacagtatctagcacaaccatcagcacgccagatacacagatcaccacggacagtggctcaggtgaatccagca

SEQ ID NO: 58841 - DNA, 80 bp, synthetic construct
  source 1..80: mol_type = other DNA
taccaggtgagggaaaactacacaggcatatgcctcttcttgttagggagtgttctctttgcggtctcctggttgataaa

SEQ ID NO: 58842 - DNA, 80 bp, synthetic construct
  source 1..80: mol_type = other DNA
agccttaaccgatggcattggcaacagtttttttcctgggctttccatttgtaaaacatgttccattggcagcataaatg

SEQ ID NO: 58843 - DNA, 80 bp, synthetic construct
  source 1..80: mol_type = other DNA
ggtttgaaatagagtcacacaaatgctactgcagcctgttctgttgtccctactgtagagcttgctcatctgataaagtc

SEQ ID NO: 58844 - DNA, 80 bp, synthetic construct
  source 1..80: mol_type = other DNA
actcaccgaatgcacttaaatgcttgcaagaagaggaaagtaggtagtaacgtcatgctggctgtctgtaaacgtatgtg

SEQ ID NO: 58845 - DNA, 80 bp, synthetic construct
  source 1..80: mol_type = other DNA
ctttaaggcaactattgaggcaagcaacaaggcctcaatcatcagaagcatcataaactctacctttgtaatatgcatac

SEQ ID NO: 58846 - DNA, 80 bp, synthetic construct
  source 1..80: mol_type = other DNA
gacctcacaaatttctgtcatcaagaatgtcaggtgacagagactgaatgcctttgtccgtacgaggccttggtgctcag

SEQ ID NO: 58847 - DNA, 80 bp, synthetic construct
  source 1..80: mol_type = other DNA
ctgatccctcggttaccaacaaggacacatcccctacttccgttgccattgtccaaacacaagaaacagaagcacccacg

SEQ ID NO: 58848 - DNA, 80 bp, synthetic construct
  source 1..80: mol_type = other DNA
accctgaatccaaacacaacggcgaccacaggcgattctaccccaagcaccaccacaccagacagtccaagtgccaactc

SEQ ID NO: 58849 - DNA, 80 bp, synthetic construct
  source 1..80: mol_type = other DNA
caaagctgcacacacggtgtgccaggtgacttgcaggtctaccatgttggcaacctgctgaagggagacaaggtcaatgg

SEQ ID NO: 58850 - DNA, 80 bp, synthetic construct
  source 1..80: mol_type = other DNA
ttgagaccgattacacaaaaactttccattttcactcaaagagggtcacggcacacggagacactcctcagttagactta

SEQ ID NO: 58851 - DNA, 80 bp, synthetic construct
  source 1..80: mol_type = other DNA
gcctacactaccagtcccacagacaaactcatctcctagccccagcaaggcaccaacaccgcagaccacacaccatctat

SEQ ID NO: 58852 - DNA, 80 bp, synthetic construct
  source 1..80: mol_type = other DNA
tattccttacaccctttgcactatttgtattatttttcttcttcgggtggagacttctattttgccttaaatgctgcaga

SEQ ID NO: 58853 - DNA, 80 bp, synthetic construct
  source 1..80: mol_type = other DNA
acccacataggctgacaaatcggaccagttgttccctacagcaacgcttaaattccaatgctgctatataccctatccaa

SEQ ID NO: 58854 - DNA, 80 bp, synthetic construct
  source 1..80: mol_type = other DNA
caaaatatgctacaatcgctacacttttaactatcccctattactctaaacttataactgtaaaccatgctgttcgatac

SEQ ID NO: 58855 - DNA, 80 bp, synthetic construct
  source 1..80: mol_type = other DNA
aacttataactgtaaaccatgctgttcgataccactccagctcgacttcactcagacttaaccttgactgcgtgccgcca

SEQ ID NO: 58856 - DNA, 80 bp, synthetic construct
  source 1..80: mol_type = other DNA
ccagaggtcttctctcagcagcaatcacagaagcagaccaaacagcatcggcagagacttcaacaaaagagactactacc

SEQ ID NO: 58857 - DNA, 80 bp, synthetic construct
  source 1..80: mol_type = other DNA
acaaacagctcaatgacggcaaggagtgacacagcggttacttcaactcaacacgtcaccaccaataacactacaggaca

SEQ ID NO: 58858 - DNA, 80 bp, synthetic construct
  source 1..80: mol_type = other DNA
aactaatcctacaaccttggtaacctcccctaagactcaaacgatacagggccaacagactacaacaccagtgaccacac

SEQ ID NO: 58859 - DNA, 80 bp, synthetic construct
  source 1..80: mol_type = other DNA
ctatgctgctgactaacttcatcctttgtcagctcttttggagtggcagtggagtcaccagtggaggtggaaccaactct

SEQ ID NO: 58860 - DNA, 80 bp, synthetic construct
  source 1..80: mol_type = other DNA
ccactattaccaccattgcactcacaagcccaacaagcaggtccaaacgagactccaaagtgcaaataattctaaccttc

SEQ ID NO: 58861 - DNA, 80 bp, synthetic construct
  source 1..80: mol_type = other DNA
ctcaaagaaatacttgcggcacgtcagtacgtaagtgtcaactttgagagagtggattgtgtttcccgaatgcaccatgc

SEQ ID NO: 58862 - DNA, 80 bp, synthetic construct
  source 1..80: mol_type = other DNA
ctccagcatgccatccacatcacaaggcatacatcatcccgtaaggagtctattgtcagtctcgagccctaagacagtaa

SEQ ID NO: 58863 - DNA, 80 bp, synthetic construct
  source 1..80: mol_type = other DNA
accatctgcaatggctcaactattgtagaccaaagactgggcagtgaactagggtgttacaccatcaatagagtgaagtc

SEQ ID NO: 58864 - DNA, 80 bp, synthetic construct
  source 1..80: mol_type = other DNA
gaaagttgaatacatcaagacagaggccatagtgtgtgtagaacttactagtcaggaaaggcagtgtagcttgattgaag

SEQ ID NO: 58865 - DNA, 80 bp, synthetic construct
  source 1..80: mol_type = other DNA
ctaggccaactgaatgggccttaaaaatgatggcatcacactgaccaatgccgtcacccatgccgacatttccagccgca

SEQ ID NO: 58866 - DNA, 80 bp, synthetic construct
  source 1..80: mol_type = other DNA
accccactacattatcatcacaatatactacatctaatctgctacattgtatctatggacagactctataatgcctgaaa

SEQ ID NO: 58867 - DNA, 80 bp, synthetic construct
  source 1..80: mol_type = other DNA
ctatgtaatgcttgaaactgccttcgctctgtttgctttgacctaaatcttgactgcgtgccgccactaagatcggaaga

SEQ ID NO: 58868 - DNA, 80 bp, synthetic construct
  source 1..80: mol_type = other DNA
attggaacactagggaaaaggctcaagcagtatagagagttgaaacctcagacctgcaccatatgtgagacaactcctgt

SEQ ID NO: 58869 - DNA, 80 bp, synthetic construct
  source 1..80: mol_type = other DNA
agaattccttgggttgtaagaaagctgttgcaggtgtcagagtcaactggtgtagcattgaaaagaagcagttggctgat

SEQ ID NO: 58870 - DNA, 80 bp, synthetic construct
  source 1..80: mol_type = other DNA
aatataagacagaaattagaattggcagtgcatcatctggttctaggagattgctttctgaagaatttggtgatgactgc

SEQ ID NO: 58871 - DNA, 80 bp, synthetic construct
  source 1..80: mol_type = other DNA
ggaaccttacacatcacccccagccaccaccaagggcttgtctctgccggaggctacgtctgagctccctgcgactacca

SEQ ID NO: 58872 - DNA, 80 bp, synthetic construct
  source 1..80: mol_type = other DNA
gcataatctcttcaagtgcaagtggcaccgaatctagcacacaagcagccggagatacccccacaccaacaatccgcacg

SEQ ID NO: 58873 - DNA, 80 bp, synthetic construct
  source 1..80: mol_type = other DNA
agcctgcctgatagccccagcacaccatccacaccacaagacacacaccatcccgtgaggaatctgctttcggtcacgag

SEQ ID NO: 58874 - DNA, 80 bp, synthetic construct
  source 1..80: mol_type = other DNA
ctagattaactgaaggggcctagggggatgacgactttgcgctgactggtgttgctattcatgctgattcctttaattgc

SEQ ID NO: 58875 - DNA, 80 bp, synthetic construct
  source 1..80: mol_type = other DNA
atccccaccataccatcatcacaatatgccacatctaagctgcttcattgtctctgcaaacaaactttataatgcttgaa

SEQ ID NO: 58876 - DNA, 80 bp, synthetic construct
  source 1..80: mol_type = other DNA
ccccaagccagaagaaacaccaacaccgtcaaaatcaagcaagggcagctcagcaaccaacagccctcacccagccgcta

SEQ ID NO: 58877 - DNA, 80 bp, synthetic construct
  source 1..80: mol_type = other DNA
cttaaaacagttagcaacttcaggttcaacaatcccaccaacacagacagtcctcccacagagtggcacctctatagcca

SEQ ID NO: 58878 - DNA, 80 bp, synthetic construct
  source 1..80: mol_type = other DNA
gtcaacatcatgcatatgtcattgatgtatgcagttttctgcttgcagctgtgtggtctagggaaaacccatggatcaca

SEQ ID NO: 58879 - DNA, 80 bp, synthetic construct
  source 1..80: mol_type = other DNA
cccaagagggaagaggccacgtaaaattatctagaggctcagaggttgttttggatgcttgcgacacaagctgcgaagta

SEQ ID NO: 58880 - DNA, 80 bp, synthetic construct
  source 1..80: mol_type = other DNA
acttcaatgaagttttacagttcaaaaccccaagcacactgagccctacagaatctgctagtgtagggttaccaacagtt

SEQ ID NO: 58881 - DNA, 80 bp, synthetic construct
  source 1..80: mol_type = other DNA
cagacacacctggacctaagatcacaaatctgaaaaccatcaattgcataaacctaaaggcattggtctttaaagagcat

SEQ ID NO: 58882 - DNA, 80 bp, synthetic construct
  source 1..80: mol_type = other DNA
tcaaatgaaactcaacacaatgaaacaggtatcacaagagcacctgaagggagccaaggacccagtttgcctgtaagcac

SEQ ID NO: 58883 - DNA, 80 bp, synthetic construct
  source 1..80: mol_type = other DNA
agcatcacccatcatgtcagacccctccatcaccacactctcagcgtcgaccagtggactagaaggctcaggggacacga

SEQ ID NO: 58884 - DNA, 80 bp, synthetic construct
  source 1..80: mol_type = other DNA
ctatggaagtgagcaacaaggctctactcatccgaagtgtcatcaacactacttttgttgtatgcatactaatattagca

SEQ ID NO: 58885 - DNA, 80 bp, synthetic construct
  source 1..80: mol_type = other DNA
ctcccccagccatcacacaaggcccgaccctaccagagaccacgccggaaccctccacaacaaccggcacaaacgcattc

SEQ ID NO: 58886 - DNA, 80 bp, synthetic construct
  source 1..80: mol_type = other DNA
agcacagccattgccaatgtcagtacacagacagtcaaggacacccccacaccgacagtacaaacaagtccacctagcac

SEQ ID NO: 58887 - DNA, 80 bp, synthetic construct
  source 1..80: mol_type = other DNA
tcccgacgcatctaccataccacagggcacacatcacaccgcaaggggtctgctgtcagtcaccgtcacaaagccagaag

SEQ ID NO: 58888 - DNA, 80 bp, synthetic construct
  source 1..80: mol_type = other DNA
ctgaaacaacagaagaggcctcaaggaatgatgataatgtgcttactaatactattgcttatgccagcatcaccggttgt

SEQ ID NO: 58889 - DNA, 80 bp, synthetic construct
  source 1..80: mol_type = other DNA
acccatgccacactatcattgcaacatgttacatttaacctgtctcatcgtactcacaagtaagctctgcaacacctgaa

SEQ ID NO: 58890 - DNA, 80 bp, synthetic construct
  source 1..80: mol_type = other DNA
aagtaccaacaccaacaggcccagaacaagcaagcatagagaccaatagcccacgcctagcaactagcaagacaccgtcc

SEQ ID NO: 58891 - DNA, 80 bp, synthetic construct
  source 1..80: mol_type = other DNA
ccctctccaacagctcaggttaccactgaaaacagcaaccctaatacctccagacagctcgtgctctcaacacaaccagc

SEQ ID NO: 58892 - DNA, 80 bp, synthetic construct
  source 1..80: mol_type = other DNA
aacctcaagcccagtgacctctccagcacagctgaacttcgtgcagagtgctactaccatagccgttcaagatgcacacc

SEQ ID NO: 58893 - DNA, 80 bp, synthetic construct
  source 1..80: mol_type = other DNA
ccgtcaacactatgcacacactgctagtgtatgctgtcttttgcttgcagctatggagtccaggaggaactcgtggactg

SEQ ID NO: 58894 - DNA, 80 bp, synthetic construct
  source 1..80: mol_type = other DNA
tttgaaaatcacccaagaggggaggggccacgtaaaattatccaggggctcagaggttgttttggatgcttgcgactcga

SEQ ID NO: 58895 - DNA, 80 bp, synthetic construct
  source 1..80: mol_type = other DNA
cactctaccacacacaccagaatcctccaccgtcaaactcaccacaccaacaagcgaaacagaaggctcaggggaaacga

SEQ ID NO: 58896 - DNA, 80 bp, synthetic construct
  source 1..80: mol_type = other DNA
ccccacccccaaacaccacccagggcctgcccctaccagggaccacaccagaacgctccgcaacaaccgccacaagcacg

SEQ ID NO: 58897 - DNA, 80 bp, synthetic construct
  source 1..80: mol_type = other DNA
tcaagcacagacaacatgaataccaccacacaggtgaccgacaacacccccacatcaacagtcagcataagtccatccag

SEQ ID NO: 58898 - DNA, 80 bp, synthetic construct
  source 1..80: mol_type = other DNA
ggcaacccaaagcccaataacttccccagcgcaaacaatccttctgatgagtgctgctcctaaagctattcaggacatgc

SEQ ID NO: 58899 - DNA, 80 bp, synthetic construct
  source 1..80: mol_type = other DNA
ctacttcaatgaagtcctacaatttaaaacaccaagcacaccaagccccacggagacgtctcatgtcaggctaccaacag

SEQ ID NO: 58900 - DNA, 80 bp, synthetic construct
  source 1..80: mol_type = other DNA
cccaagagggaaggggccacgtaaaattatccaggggctcagaggttgttttagatgcttgcgactcgagctgtgaaata

SEQ ID NO: 58901 - DNA, 80 bp, synthetic construct
  source 1..80: mol_type = other DNA
ccttcaacatcatgcatacactattagtgtgcttcattctttacctacagctgtcgggtttaggaggggctcatggacag

SEQ ID NO: 58902 - DNA, 80 bp, synthetic construct
  source 1..80: mol_type = other DNA
accctctacacagcaacccaggtttccactgagaacaccaaccgcagcacacctagacaatctaagtcctcagtacagcc

SEQ ID NO: 58903 - DNA, 80 bp, synthetic construct
  source 1..80: mol_type = other DNA
gccccaccacacgcactggaatcatccatcatcaaacacaccacaccagtaagcgaaacagaaggctcaggggaaacgac

SEQ ID NO: 58904 - DNA, 80 bp, synthetic construct
  source 1..80: mol_type = other DNA
gcccctgtggcccattttcaaggaagtttgccggaagttcccgcatacaacgcctcagaaaagtacccaagcatgacttc

SEQ ID NO: 58905 - DNA, 80 bp, synthetic construct
  source 1..80: mol_type = other DNA
cttcaatgaagtcttacagttcaaaacaccaagcacactaagccccacgggaccagcccgaactgggtcaccaacagtgg

SEQ ID NO: 58906 - DNA, 80 bp, synthetic construct
  source 1..80: mol_type = other DNA
aaccttttaaatcttacttcgctaaagggttcctttcaatggactcaggctacttctctgccaagtgttatccaagagca

SEQ ID NO: 58907 - DNA, 80 bp, synthetic construct
  source 1..80: mol_type = other DNA
aacaaaatgatagatgcactttggtcaccaactgtgtaataaaaggaagggaaattcgtaagggccagtcagtgttaaga

SEQ ID NO: 58908 - DNA, 80 bp, synthetic construct
  source 1..80: mol_type = other DNA
ctgtccaacaaaacccaacacagtaatacaagcaccacaaaggcgcctgaagtaagccaggaacttggattgcctgtgag

SEQ ID NO: 58909 - DNA, 80 bp, synthetic construct
  source 1..80: mol_type = other DNA
caatacaggacagaaatcaagattggcaaggcatcttctggttccagaagactattgtccgaagagtctggtgatgactg

SEQ ID NO: 58910 - DNA, 80 bp, synthetic construct
  source 1..80: mol_type = other DNA
catatcaagaactcagctattgaggacagagactgcggaaattcacagtgataactatggtggtccaggtgacaagataa

SEQ ID NO: 58911 - DNA, 80 bp, synthetic construct
  source 1..80: mol_type = other DNA
ttaagctttgcgagaacagtgccacaggcaaatcctgtgaaatagatagcaccccagtcaaatgcaggcagggtttctgt

SEQ ID NO: 58912 - DNA, 80 bp, synthetic construct
  source 1..80: mol_type = other DNA
ttgaaaattactcaggagggaaggggccacgtgaagctatcgagaggttcagaagttgtcctggacgcctgcgattcaag

SEQ ID NO: 58913 - DNA, 80 bp, synthetic construct
  source 1..80: mol_type = other DNA
tgggttttcttttttggtttagctttggttatgtggtgacctgtatactctgtaagggcatcttctatctattaatagtt

SEQ ID NO: 58914 - DNA, 80 bp, synthetic construct
  source 1..80: mol_type = other DNA
gtggggacgttggggaaaaagttcaaacagtatagagagttgaaacctcagacctgtaccatatgcgaaacaactcctgt

SEQ ID NO: 58915 - DNA, 80 bp, synthetic construct
  source 1..80: mol_type = other DNA
taatgcaatagatgctgaaatgcacgacctcaactgcagttacaatatatgtccttactgtgcatctaggttaacctcag

SEQ ID NO: 58916 - DNA, 80 bp, synthetic construct
  source 1..80: mol_type = other DNA
cacagtatcgactatcacgtcagaccctccttccatcacatccgcagtatcagtcagtggatcagaaggctcaggagaca

SEQ ID NO: 58917 - DNA, 80 bp, synthetic construct
  source 1..80: mol_type = other DNA
agaatcccctgggttgttaggaaattactgcaggtgtcagaatccaccggtgtggcactaaagaggagtagttggctggt

SEQ ID NO: 58918 - DNA, 80 bp, synthetic construct
  source 1..80: mol_type = other DNA
tgtgctacttgtgttacttacagtttcattgtcaccagtacaatcagcacctatcggccatggaaagacagttgaaacat

SEQ ID NO: 58919 - DNA, 80 bp, synthetic construct
  source 1..80: mol_type = other DNA
atcaaaccagagaaggatacacaagtatttgcctctttgtactaggaagcatcttatttatagtctcttgcctaatgaag

SEQ ID NO: 58920 - DNA, 80 bp, synthetic construct
  source 1..80: mol_type = other DNA
acagtgttggtaacagtttttttcctggtttgtccatttgtaagacatgttctattggcagtgtaaatggctttgagatt

SEQ ID NO: 58921 - DNA, 80 bp, synthetic construct
  source 1..80: mol_type = other DNA
gaatctcacaaatgttactgtagcctattttgttgtccctactgtagacactgctctgccgatagagaaatacataggtt

SEQ ID NO: 58922 - DNA, 80 bp, synthetic construct
  source 1..80: mol_type = other DNA
gcacttgagcatctgcaagaaaaggaagacttggagtaatgtcatgctggccgtctgtaagcgcatgtgctttagggcaa

SEQ ID NO: 58923 - DNA, 80 bp, synthetic construct
  source 1..80: mol_type = other DNA
cgaacacctctccctcggtcaccacacaaggcccgactttgccagaaaccacgctggaacccctaacaacaaccgacaca

SEQ ID NO: 58924 - DNA, 80 bp, synthetic construct
  source 1..80: mol_type = other DNA
ttagacagcattgtcaaaggcatgaagaacttgctaaattcaacaagcttagaaacaagcttatcaattgaggcaccatg

SEQ ID NO: 58925 - DNA, 80 bp, synthetic construct
  source 1..80: mol_type = other DNA
gggagcaataaatgtccaatcaaccttcaaacctaccatgtcagctgcgaatatagctcttagttggagctcagtggaac

SEQ ID NO: 58926 - DNA, 80 bp, synthetic construct
  source 1..80: mol_type = other DNA
tttgagtacctatcaggtgacagacaagtggaggaatggcccaaggcaacctgcacaggagattgcccagaaagatgtgg

SEQ ID NO: 58927 - DNA, 80 bp, synthetic construct
  source 1..80: mol_type = other DNA
tgttggggagtcggcactggatgtacctgctgtgggctggatgtaaaagacctttttacagattacatgtttatcaagtg

SEQ ID NO: 58928 - DNA, 80 bp, synthetic construct
  source 1..80: mol_type = other DNA
gatgcatcaagcactgtcgtcgtcgatgtcagcacacagacggtcaaggacacccctatatcaacaacctacacaagttt

SEQ ID NO: 58929 - DNA, 80 bp, synthetic construct
  source 1..80: mol_type = other DNA
aaaggagacaaggtgaatgggcacctgattcacaaaattgaaccacacttcaacacttcctggatgtcttgggacggctg

SEQ ID NO: 58930 - DNA, 80 bp, synthetic construct
  source 1..80: mol_type = other DNA
atatgggggattggccatcttgcacatatactggagtaacccagcacaatcatgctgcatttgtaaacatgctcaacatc

SEQ ID NO: 58931 - DNA, 80 bp, synthetic construct
  source 1..80: mol_type = other DNA
cagagcattttaatcgagcacaaaggaacgataattggtaagcagaacaacacatgcacagctaaagcaagctgttggct

SEQ ID NO: 58932 - DNA, 80 bp, synthetic construct
  source 1..80: mol_type = other DNA
gcccagtactcccagcgagccaactacaccacagggtacacatcatactgcaaggggtctactgtcagtcaccagcacaa

SEQ ID NO: 58933 - DNA, 80 bp, synthetic construct
  source 1..80: mol_type = other DNA
agagtcagtcaagagcttcttttatgggctaaagaacatgcttagtggcatttttggcaatgttttcataggggttttct

SEQ ID NO: 58934 - DNA, 80 bp, synthetic construct
  source 1..80: mol_type = other DNA
caacaaaaaagggaaaaacaaactgcttgatggtgaaagattagctgataggaagattgctgagctgttctccacaaaga

SEQ ID NO: 58935 - DNA, 80 bp, synthetic construct
  source 1..80: mol_type = other DNA
ctaaatcagtggaaagggcctcaaggagcgatggtagtgcacttaccaataccgctgcttgtgctagtatcaccgaccgc

SEQ ID NO: 58936 - DNA, 80 bp, synthetic construct
  source 1..80: mol_type = other DNA
acccatatcacactgtcattgcaacaagctacatttaatccgtttcattatatccgcaagcaagctctgcaatgcccaac

SEQ ID NO: 58937 - DNA, 80 bp, synthetic construct
  source 1..80: mol_type = other DNA
aagctctgcaatgcccaacaccgccattactctatttactctgacctaaaccttgactgcgtgccgccactatttctttg

SEQ ID NO: 58938 - DNA, 80 bp, synthetic construct
  source 1..80: mol_type = other DNA
agccagaagaagcatcaacacaagcaaatccaggaaaaataagcatggagaccaatagcccgcgcctagccatcagcgag

SEQ ID NO: 58939 - DNA, 80 bp, synthetic construct
  source 1..80: mol_type = other DNA
acaccatccttctctccaacaactcaggctcctaccgaaaacagcaaccccatcacatccaaacagcttatgctctcagc

SEQ ID NO: 58940 - DNA, 80 bp, synthetic construct
  source 1..80: mol_type = other DNA
acaaccagtaaccccaaacccaatgacctctccagtacagccagctctctctcagagtgacacgtccacggccatccaag

SEQ ID NO: 58941 - DNA, 80 bp, synthetic construct
  source 1..80: mol_type = other DNA
tgtctttcagcgtcatgtacacaccacttttgtgtgctgttctttgcttacagctgtggagtttagaagggtctcatgga

SEQ ID NO: 58942 - DNA, 80 bp, synthetic construct
  source 1..80: mol_type = other DNA
tgaagaagtactacggcaagatactaaaacttctggaccttactttggaagaagacactgaaggcctgctagagtggtgt

SEQ ID NO: 58943 - DNA, 80 bp, synthetic construct
  source 1..80: mol_type = other DNA
aagagaaatcttggtttggtctgtgatgacaacttctttcagaagaggatagaagagttttttttgactgggaagggtca

SEQ ID NO: 58944 - DNA, 80 bp, synthetic construct
  source 1..80: mol_type = other DNA
catccgtactttacagacgctgcaacacactgcacctaatctgcttcgttatatcttcaaataagctctatgattcttga

SEQ ID NO: 58945 - DNA, 80 bp, synthetic construct
  source 1..80: mol_type = other DNA
ctctatgattcttgaagctgccttagctctgcttactctgaccttaactttgactgcgtgccgcaagtatttctttgaga

SEQ ID NO: 58946 - DNA, 80 bp, synthetic construct
  source 1..80: mol_type = other DNA
ctcaggaaggaaggggtcatgtaaaattatctagaggctcagaggttgtcttagatgcatgtgacacaagctgtgaagta

SEQ ID NO: 58947 - DNA, 80 bp, synthetic construct
  source 1..80: mol_type = other DNA
ctctatgatgcttgaaactacctctgctctatttaccctgacttaaatcttgactgcgtgccgccactatatctttgaga

SEQ ID NO: 58948 - DNA, 80 bp, synthetic construct
  source 1..80: mol_type = other DNA
ctcagttgcagttcacctgtcgacatcatgcatatatcattaatgtatgcagttctttgcctacagctgtgtggtctggg

SEQ ID NO: 58949 - DNA, 80 bp, synthetic construct
  source 1..80: mol_type = other DNA
gtcgacatcatgcatatatcattaatgtatgcagttctttgcctacagctgtgtggtctggggggagctcatggatcaca

SEQ ID NO: 58950 - DNA, 80 bp, synthetic construct
  source 1..80: mol_type = other DNA
tcaagctatgcgaaaatagtgccacagggaagagctgtgtaatagacagtgtcccagttaaatgcaggcaaggttattgt

SEQ ID NO: 58951 - DNA, 80 bp, synthetic construct
  source 1..80: mol_type = other DNA
accccaccacatgcactggaatcatcaaccatcaaacccaccacaccaacaagcgaaacagaaggctcaggggaaacggc

SEQ ID NO: 58952 - DNA, 80 bp, synthetic construct
  source 1..80: mol_type = other DNA
cccactcccaaacaccacccagggcccgcctccaccagagaccacaccagaacgccccgcaacaactgtcacaagtacgc

SEQ ID NO: 58953 - DNA, 80 bp, synthetic construct
  source 1..80: mol_type = other DNA
caagtacagacaacacgagttccaccatacatgtgaccgacaacaaccccacatcaacaatcagcacaagtccatccagc

SEQ ID NO: 58954 - DNA, 80 bp, synthetic construct
  source 1..80: mol_type = other DNA
aacaacaccaacaccgacgagccctggggagataaactcagaaaccagcagtctgcactcagccatgagcagaacaccaa

SEQ ID NO: 58955 - DNA, 80 bp, synthetic construct
  source 1..80: mol_type = other DNA
ccctccacacagcaacccaggtctccactgaaaatgccaaccacagcgcacctagacagtctgagtcctcagcacagcca

SEQ ID NO: 58956 - DNA, 80 bp, synthetic construct
  source 1..80: mol_type = other DNA
acaaccacaagcctaatgacttccccagcacaatcaatccttctaatgagtgctgctcctacagctattcagaacataca

SEQ ID NO: 58957 - DNA, 80 bp, synthetic construct
  source 1..80: mol_type = other DNA
cttcaatgaggtcctacaatttaaaacactaagcacactaagccccacggagccgtctcatgccaggccaccaacagcgg

SEQ ID NO: 58958 - DNA, 80 bp, synthetic construct
  source 1..80: mol_type = other DNA
tcaaacgcaactgatcacaatagaacaaacaccatcacagcacccagcacaagtcaaaaccccaagccacccgcgagcac

SEQ ID NO: 58959 - DNA, 80 bp, synthetic construct
  source 1..80: mol_type = other DNA
aaccccaccacacacaccggaatcatccaccatcaagctcatcacatcaacaggcgaagcagaaggctcaggggaaacga

SEQ ID NO: 58960 - DNA, 80 bp, synthetic construct
  source 1..80: mol_type = other DNA
tttctgtcatcaggaatgccaggtaaccgagacggagtgcctctgtccatacgaagctcttgtgctcaggaaaccccttt

SEQ ID NO: 58961 - DNA, 80 bp, synthetic construct
  source 1..80: mol_type = other DNA
ctccacccctaaacaccacccagggcccattcccaccagagaccacatcagaacaccctgcatcaaccgccacaaacacg

SEQ ID NO: 58962 - DNA, 80 bp, synthetic construct
  source 1..80: mol_type = other DNA
tcctagacagtatagttaaaggtatgaaaaatttgctaaactcgacaagcttagaaacaagcttatcaattgaggcacca

SEQ ID NO: 58963 - DNA, 80 bp, synthetic construct
  source 1..80: mol_type = other DNA
attcaacttaggccctgtgactatcaccctgtctgagccaagaaacattcagcagaagcttccccctgagatcattacgt

SEQ ID NO: 58964 - DNA, 80 bp, synthetic construct
  source 1..80: mol_type = other DNA
tcaagcacaaacagcatgaattccaccacacagatgaccgataataccctcacatcaacagtcagcacaagtctatccat

SEQ ID NO: 58965 - DNA, 80 bp, synthetic construct
  source 1..80: mol_type = other DNA
accttccacacagcaactcaggtctccactgagaacgccaaccgcagcacccctagacagtctgaatcctcagcacagcc

SEQ ID NO: 58966 - DNA, 80 bp, synthetic construct
  source 1..80: mol_type = other DNA
ggcaacccaaagcccaatgacttccccagcgcaatcaatctttctggtgagtgctgctcctacaaccattcagaacatac

SEQ ID NO: 58967 - DNA, 80 bp, synthetic construct
  source 1..80: mol_type = other DNA
atcccagcccaacaaacaggtccaagaggaaccttgagatggaaataattttgactctgcctcaaggtctaaagaaatac

SEQ ID NO: 58968 - DNA, 80 bp, synthetic construct
  source 1..80: mol_type = other DNA
tcctcttcagggcttcagctgattaatattacccaacatccagctaggatagcagaaacacctggtcccaaaacaacgag

SEQ ID NO: 58969 - DNA, 80 bp, synthetic construct
  source 1..80: mol_type = other DNA
cagccccagcacgccatccacatcacaaggcatacattatccgataaggagtctattgtcagtctcgagccctaggacag

SEQ ID NO: 58970 - DNA, 80 bp, synthetic construct
  source 1..80: mol_type = other DNA
cagcaacaccaacaccaatgagcactagagagatgagctcggaaacaaacagtcagcactcagccgtgagcagaacacca

SEQ ID NO: 58971 - DNA, 80 bp, synthetic construct
  source 1..80: mol_type = other DNA
taacaacaccgacaccaatgagccctggagagatgagcccggaaaccagcagtcagcactttgccatgagcagaatacca

SEQ ID NO: 58972 - DNA, 80 bp, synthetic construct
  source 1..80: mol_type = other DNA
aaccccatcacacgcaccggaactatccaccatcaaactcaccacaccaacaagcgaaacagaaggctcaggggaaacga

SEQ ID NO: 58973 - DNA, 80 bp, synthetic construct
  source 1..80: mol_type = other DNA
accccccacacagcaacccaggtctccactgagaacgccaaccgcagcacatccggacagtctgagtcctcagcacagcc

SEQ ID NO: 58974 - DNA, 80 bp, synthetic construct
  source 1..80: mol_type = other DNA
tagccccagcacgccatccacatcacaaggcatgcaccatcccgtaaggagtctattgtcagtctcgagctccatgacag

SEQ ID NO: 58975 - DNA, 80 bp, synthetic construct
  source 1..80: mol_type = other DNA
tccacttcagggcttcagctgatcaatgtcacccaacacccagctagaatagcagagacacctggacccaaaacaacggg

SEQ ID NO: 58976 - DNA, 80 bp, synthetic construct
  source 1..80: mol_type = other DNA
aagggctagttgacagtgtcagtgaaagcttcttccccggcctgtctgtctgtaagacatgctctattggcagtgtaaat

SEQ ID NO: 58977 - DNA, 80 bp, synthetic construct
  source 1..80: mol_type = other DNA
ttaaacacaactgaacacaatggaacaaacaacaccacagcacctggcgcaagccaaagccctaagccacccatgagcac

SEQ ID NO: 58978 - DNA, 80 bp, synthetic construct
  source 1..80: mol_type = other DNA
tcaagctatgcaaaaacagcgccacagggaaaacctgtgaggtagacagcactccagttaagtgcaagcaaggtttttgt

SEQ ID NO: 58979 - DNA, 80 bp, synthetic construct
  source 1..80: mol_type = other DNA
acagtgtcagtgaaggcttcttccccggcctatctgtctgtaagacatgctctattggcagtgtaaatggcttcgaaatt

SEQ ID NO: 58980 - DNA, 80 bp, synthetic construct
  source 1..80: mol_type = other DNA
cctcacccccaaacaccacccagggcctgtcctcgccagagaccacatcagaacgccctgcaacaacctccatcagcacg

SEQ ID NO: 58981 - DNA, 80 bp, synthetic construct
  source 1..80: mol_type = other DNA
tcaagcacagacagcacgaaccccaccacacagatgaccgacaacacccccacactaacagtcagcacaagcccatccag

SEQ ID NO: 58982 - DNA, 80 bp, synthetic construct
  source 1..80: mol_type = other DNA
cagccccagcacgccatccacaccacaaggcatacatcatcccgcaaggagtctgttgtcagtctcgagccccaagacag

SEQ ID NO: 58983 - DNA, 80 bp, synthetic construct
  source 1..80: mol_type = other DNA
ctaactcaacagaaagaacctcgaaggttgacagcagtatgctgtctagtgtccttgcttgtgctagctttgttaatcgc

SEQ ID NO: 58984 - DNA, 80 bp, synthetic construct
  source 1..80: mol_type = other DNA
atccataatttacagacactgcaacacactgcacctaatctgcttcattatatccacaaataagctctgtgatgcttgaa

SEQ ID NO: 58985 - DNA, 80 bp, synthetic construct
  source 1..80: mol_type = other DNA
ctctgtgatgcttgaaactgccctagctctgcttgctctaaccttaactttgactgcgtgccgccactatatctttgaga

SEQ ID NO: 58986 - DNA, 80 bp, synthetic construct
  source 1..80: mol_type = other DNA
caacaacaccaacaccaacgagccctggagagatgagctcggaaaccagcagtcagcactcagccatgagcaaaacacca

SEQ ID NO: 58987 - DNA, 80 bp, synthetic construct
  source 1..80: mol_type = other DNA
accccccacacagcaacccaggtctccactgagaacaccaaccacagcacacctagacaatctgaatcctcagcacagca

SEQ ID NO: 58988 - DNA, 80 bp, synthetic construct
  source 1..80: mol_type = other DNA
gacaaccccaagcgcaatgacttccccagcgcaatcgattcttctaatgagtgctgctcctacagctgttcaagacatac

SEQ ID NO: 58989 - DNA, 80 bp, synthetic construct
  source 1..80: mol_type = other DNA
ccaccaacgttatgcatacactgttggtgtgcttcattctttacctacagctgttgtgtctgggaggagctcatgggcgg

SEQ ID NO: 58990 - DNA, 80 bp, synthetic construct
  source 1..80: mol_type = other DNA
tttcaatgaagttttacaatttagaacactaggcacattgagtaccacagagtcaacgcatgctggatcaccgacagttg

SEQ ID NO: 58991 - DNA, 80 bp, synthetic construct
  source 1..80: mol_type = other DNA
caatgggactgaacacaataatacacacgttatgacaacgcctgatgacagtcagagccctgaaccgccagtgagcacag

SEQ ID NO: 58992 - DNA, 80 bp, synthetic construct
  source 1..80: mol_type = other DNA
accgggttagggaagaatacacaagtatttgcctctttgtactagggagtatcctgtttatagtctcttttctaatgaaa

SEQ ID NO: 58993 - DNA, 80 bp, synthetic construct
  source 1..80: mol_type = other DNA
aagggcgaattcgcggccgttaaatcaattcaccctatagagatggaaagcctaccagctgggacctgggaaagagaaga

SEQ ID NO: 58994 - DNA, 80 bp, synthetic construct
  source 1..80: mol_type = other DNA
agacctaacaaatttctgccatcaggaatgccaggttacagagactgagtgcctctgcccttatgaagctctagtgctca

SEQ ID NO: 58995 - DNA, 80 bp, synthetic construct
  source 1..80: mol_type = other DNA
ctagatcaaccggaggggcctgggaagtgacggccctgcgccggctggtgctgctgctcatgctaattcctttaattgca

SEQ ID NO: 58996 - DNA, 80 bp, synthetic construct
  source 1..80: mol_type = other DNA
tccccaccatattatcatcacaatatgccacatctaagctgcttcattgtatctacaaacagactctgtaatgcttgaaa

SEQ ID NO: 58997 - DNA, 80 bp, synthetic construct
  source 1..80: mol_type = other DNA
gtcaacatcatgcatatatcattgatgtatgcagttttctgcttgcaactgtgcggtctagggaagactaacggaccaca

SEQ ID NO: 58998 - DNA, 80 bp, synthetic construct
  source 1..80: mol_type = other DNA
gggccctaagcctgaagaaacaccaacaccgtcaaaatcaggcaaagataacttagcaaccaacagcccccacccagcca

SEQ ID NO: 58999 - DNA, 80 bp, synthetic construct
  source 1..80: mol_type = other DNA
tctgaaaaagtattatggcaaaatacttaagctcctgcgtctcaccttagaggaagacactgaaggcttgttagagtggt

SEQ ID NO: 59000 - DNA, 80 bp, synthetic construct
  source 1..80: mol_type = other DNA
gcaagagaaatctcggtcttgactgtgatgacaccttcttccaaaaaagaatcgaagaattcttcataactggtgagggt

SEQ ID NO: 59001 - DNA, 80 bp, synthetic construct
  source 1..80: mol_type = other DNA
ctcaggaagggaggggccacgtaaaattatctaggggttcagaggttgtcttagatgcatgcgatacaagctgtgaaata

SEQ ID NO: 59002 - DNA, 80 bp, synthetic construct
  source 1..80: mol_type = other DNA
accgggccagggaggggtacacaagtatatgtctctttgtactaggaagtatcctatttatagtttcccgtctaatgaaa

SEQ ID NO: 59003 - DNA, 80 bp, synthetic construct
  source 1..80: mol_type = other DNA
ctatataatgcttggaactgcctttgctctattcactctgacctaaatcttgactgcgtgccgccactatatctttgaga

SEQ ID NO: 59004 - DNA, 80 bp, synthetic construct
  source 1..80: mol_type = other DNA
cgaaactgccttcgctctgtttgctttgacctaaatcttgactgcgtgccgccactatatcttttagctgccatcttgcg

SEQ ID NO: 59005 - DNA, 80 bp, synthetic construct
  source 1..80: mol_type = other DNA
acttcaatgaagtcttacagttcaaaacaccaagtacactgagctccacagagccgactcgtgccaggttgccaacagtt

SEQ ID NO: 59006 - DNA, 80 bp, synthetic construct
  source 1..80: mol_type = other DNA
gaacccttcaaatcttacttcgctaaaggcttccttacagtggactcaggttacttttctgccaaatgttatccaagggc

SEQ ID NO: 59007 - DNA, 80 bp, synthetic construct
  source 1..80: mol_type = other DNA
cagacacacctggacccaagatcactaatctgaggaccatcaattgcataaacttaaaggcatcagtcttcaaagaacat

SEQ ID NO: 59008 - DNA, 80 bp, synthetic construct
  source 1..80: mol_type = other DNA
ctcaaatcgcagtcaacctctcaaactgccacgcattaattaagtcgcatgtctgtgactattctttagatactgatggg

SEQ ID NO: 59009 - DNA, 80 bp, synthetic construct
  source 1..80: mol_type = other DNA
acggtgagactacctcgcattcaccatgaaggaactttcataccaggaacttacaaaatagtgatagacagaaaagacaa

SEQ ID NO: 59010 - DNA, 80 bp, synthetic construct
  source 1..80: mol_type = other DNA
tcttccaatgaaactcaacacaatgaaacaggcaccatggcaatacccgaagggagccagggacctaggttgcctgcgag

SEQ ID NO: 59011 - DNA, 80 bp, synthetic construct
  source 1..80: mol_type = other DNA
cacagcaccacccaacagatcggaccaactccctgtcacaattgtagcatcaaccagtggactagagggctcaggggaag

SEQ ID NO: 59012 - DNA, 80 bp, synthetic construct
  source 1..80: mol_type = other DNA
tgaacactttccccccagttacctcacagggcctgaccttaccagagactacgccggaactcctcacaacaacctacaca

SEQ ID NO: 59013 - DNA, 80 bp, synthetic construct
  source 1..80: mol_type = other DNA
gctgcatcacgcacaggagtcgtcaatgtcagcacacagacggccaaagacatccccatatcgacagcccacacgagccc

SEQ ID NO: 59014 - DNA, 80 bp, synthetic construct
  source 1..80: mol_type = other DNA
gagtcactgcacatggagacacaccacaattagacttgaaagccagaccaacttatggtgcaggtgaagttactgtactg

SEQ ID NO: 59015 - DNA, 80 bp, synthetic construct
  source 1..80: mol_type = other DNA
catggcaaggaagcttgaatttgggacagatagtacattcaaagccttttcagccatgcctaagacctccttgtgctttt

SEQ ID NO: 59016 - DNA, 80 bp, synthetic construct
  source 1..80: mol_type = other DNA
acattgtagagagagaatactgcaagagctgcagtggagaagacacacaaaaatgtgttaacacaaagcttgagcgacca

SEQ ID NO: 59017 - DNA, 80 bp, synthetic construct
  source 1..80: mol_type = other DNA
atccagcacccccagcgcaccatccacaccacaaggcacacaccacactgcaaggggcctattgtcagttgccaatacga

SEQ ID NO: 59018 - DNA, 80 bp, synthetic construct
  source 1..80: mol_type = other DNA
ctaactcaacagaaagggcctcgaagagtgatggcagtgtgcttaccaaaactattgcttgtactagtatcattaattgt

SEQ ID NO: 59019 - DNA, 80 bp, synthetic construct
  source 1..80: mol_type = other DNA
gcctatactatgctgtcattgcaatatgttatattcagcatgtttcattattttcgcaaacaagcactgttatgcctgaa

SEQ ID NO: 59020 - DNA, 80 bp, synthetic construct
  source 1..80: mol_type = other DNA
gacaccaaccctctcctcaacaactcaggctctcaccaaaaacaacaacctcaatacatccagacaacccacgcccccaa

SEQ ID NO: 59021 - DNA, 80 bp, synthetic construct
  source 1..80: mol_type = other DNA
tacaaccagcaatcccaaacctagtaacctctccagcacagctaatcttatcacagagtgccccccccacagctgatcaa

SEQ ID NO: 59022 - DNA, 80 bp, synthetic construct
  source 1..80: mol_type = other DNA
tgctcgtcaacaatatgtacacaccactagtgtgtgctgttctttgcttacagctgtgggatctgggaggaacccttgtg

SEQ ID NO: 59023 - DNA, 80 bp, synthetic construct
  source 1..80: mol_type = other DNA
taaaaggaatctcgatctatcttgtgatgatgacttctttcagaagaggatagaagagttttttatgactggtgagggtt

SEQ ID NO: 59024 - DNA, 80 bp, synthetic construct
  source 1..80: mol_type = other DNA
ggatttgaaatagagtcccacaaatgctattgtagtctgttctgttgtccttactgcagagcttgctcatctgataaaat

SEQ ID NO: 59025 - DNA, 80 bp, synthetic construct
  source 1..80: mol_type = other DNA
ctagctcatgatagtcgatcgtcctgctcaacaccactccagcttgatttcatctagacttaactttgactgcgtgccgc

SEQ ID NO: 59026 - DNA, 80 bp, synthetic construct
  source 1..80: mol_type = other DNA
aatgtgttgttgttgtacatgcgccatcttagttttatatcagctggcgccttagttatataacattttatgttatataa

SEQ ID NO: 59027 - DNA, 80 bp, synthetic construct
  source 1..80: mol_type = other DNA
gttgtacatgcgccatcttagttttatatcagctggcgccttagttatataacattttatgttatataactaaggcgcca

SEQ ID NO: 59028 - DNA, 80 bp, synthetic construct
  source 1..80: mol_type = other DNA
agacacacaccatcctgaaatacttgcggcacgtcagtacgtaagtgttaactttgaggaagtggattgagcatcttaat

SEQ ID NO: 59029 - DNA, 80 bp, synthetic construct
  source 1..80: mol_type = other DNA
tttgtgattattccttggacaccgatggagcaataaaactccctagagttgcacacaatggggtttttataccaggtaca

SEQ ID NO: 59030 - DNA, 80 bp, synthetic construct
  source 1..80: mol_type = other DNA
caacctaaatgataggtgtacattaatcaccaattgtgtcataaagggaagagaagtccgaaaagggcagtcggctttga

SEQ ID NO: 59031 - DNA, 80 bp, synthetic construct
  source 1..80: mol_type = other DNA
gggtcgaaacaaactccagctcaacacaagccatccagacgccaccagtcacctcaaacagcacaactccaggtccatca

SEQ ID NO: 59032 - DNA, 80 bp, synthetic construct
  source 1..80: mol_type = other DNA
ttgcctcaaaataacccaagaaggaagaggtcatgtaaaactgtccagagggacagaaattgttctagatgtctgtgatt

SEQ ID NO: 59033 - DNA, 80 bp, synthetic construct
  source 1..80: mol_type = other DNA
tcacactcctcattctactattggtttcgatatcaccagtccaatctgcaccggtaggcaaagagagggcaatcgagacc

SEQ ID NO: 59034 - DNA, 80 bp, synthetic construct
  source 1..80: mol_type = other DNA
tatcaagcaagagaaacctacacaggcatatgcctctttgtgttaggaagtgttctctttgcggtatcctggctgacaaa

SEQ ID NO: 59035 - DNA, 80 bp, synthetic construct
  source 1..80: mol_type = other DNA
ggccttgattgatggcatcggcaacagcttctcccctggactttctgtctgcaagacatgctccattggtagtataaatg

SEQ ID NO: 59036 - DNA, 80 bp, synthetic construct
  source 1..80: mol_type = other DNA
accattgaggcaagcaataaggctttactgatcaggagcatcataaattccacttttgtgatttgcatattaatcctaac

SEQ ID NO: 59037 - DNA, 80 bp, synthetic construct
  source 1..80: mol_type = other DNA
aatctgtgtggtaagcacctccgcagttgatatggaaaatttgcctgcaggcatctgggagaaagaagaagatcttacaa

SEQ ID NO: 59038 - DNA, 80 bp, synthetic construct
  source 1..80: mol_type = other DNA
cgtaagtgttaactttgagtgtgtgtaaagagcagcttgtgatcaacatgttattccactttaaatttatgttgctgatt

SEQ ID NO: 59039 - DNA, 80 bp, synthetic construct
  source 1..80: mol_type = other DNA
gctctggtgagcctagcacagatcctctaaccaccaatgaggcaaccccccctctctctgtcaccactgcccaaacgaca

SEQ ID NO: 59040 - DNA, 80 bp, synthetic construct
  source 1..80: mol_type = other DNA
gagacgaaaaagcacacaaccctggaccccagcacctcgacaaatccagatgccaccaccccgagtatcaccatattgag

SEQ ID NO: 59041 - DNA, 80 bp, synthetic construct
  source 1..80: mol_type = other DNA
tacagagctgcacacacggtgtgccgggcgattttcagatctaccatgtcggtaacctgctgaggggagacaaggttaat

SEQ ID NO: 59042 - DNA, 80 bp, synthetic construct
  source 1..80: mol_type = other DNA
ttgagactgactatacaaaaactttccactttcattcgaagagggtcacggcacatggagatactccccagctagaccta

SEQ ID NO: 59043 - DNA, 80 bp, synthetic construct
  source 1..80: mol_type = other DNA
tgcatcaaatactagcttgcccatatcatcagtgcatgcaagcccatcacccagctccagtgaagaaccaacaccacaaa

SEQ ID NO: 59044 - DNA, 80 bp, synthetic construct
  source 1..80: mol_type = other DNA
tattccttgctccttttgtgctactgatattttttttcttttttgggtggaggcttctgttttgtctcaaatgttgcaga

SEQ ID NO: 59045 - DNA, 80 bp, synthetic construct
  source 1..80: mol_type = other DNA
agaactagaggactgttgaaatacaagcaccttaaggatgaagaggaggctggatacaaaaaaatcattgaaaggctaaa

SEQ ID NO: 59046 - DNA, 80 bp, synthetic construct
  source 1..80: mol_type = other DNA
attcacataggttaacaaaccaggcaaagctctagctgcagcagcacctgccctatcaacgctgtcacatggtttgctta

SEQ ID NO: 59047 - DNA, 80 bp, synthetic construct
  source 1..80: mol_type = other DNA
acaaaacatggcttaatcatcacttcttttattgccttcctctctttttttacttctagttgattatgctgcctgacact

SEQ ID NO: 59048 - DNA, 80 bp, synthetic construct
  source 1..80: mol_type = other DNA
gattatgctgcctgacactactcctgccaaacttcatttagacttaaccttgactgcgtgccgccactatatctttgaga

SEQ ID NO: 59049 - DNA, 80 bp, synthetic construct
  source 1..80: mol_type = other DNA
atgcacaccatctctccagaagtcttctctcagcagtaagtacagagacaggtcaaatagcatcagcagcgaccgcagcc

SEQ ID NO: 59050 - DNA, 80 bp, synthetic construct
  source 1..80: mol_type = other DNA
agccaaagagattacaaccaaaaatagcccgccaacagccggaaatgacacaatggtcacatcagctccaaacggcaata

SEQ ID NO: 59051 - DNA, 80 bp, synthetic construct
  source 1..80: mol_type = other DNA
tacgcaacactccagaacaggccaaccccacagccccagaggcttcccccaagattcaaacaacacaaaaccaacagacc

SEQ ID NO: 59052 - DNA, 80 bp, synthetic construct
  source 1..80: mol_type = other DNA
gttacaccagaggctacacctatcaccacaatcactgcactcacagacctaacaaacaggtccaaaagggactccaaggt

SEQ ID NO: 59053 - DNA, 80 bp, synthetic construct
  source 1..80: mol_type = other DNA
gttattccactttaaatttatgttgctgattaattttattctttgtcatctcctttgggggggtggtggagtcaccggtg

SEQ ID NO: 59054 - DNA, 80 bp, synthetic construct
  source 1..80: mol_type = other DNA
acagaaaattctgaccttttctcaaggcctcaagaagtactatagcaagatattgaaactcttgcaattaacacaagaag

SEQ ID NO: 59055 - DNA, 80 bp, synthetic construct
  source 1..80: mol_type = other DNA
atccaatatgtccgccggcgattagatcatgcgcgcgcgcagcgcgctgcgcgaagcgcaggcatgactgagccggcgga

SEQ ID NO: 59056 - DNA, 80 bp, synthetic construct
  source 1..80: mol_type = other DNA
tcgcgaaattttatatatttaatgtagtgttgtactacgtcggccatcttagttatatatgcgaagcgcaggcatgactg

SEQ ID NO: 59057 - DNA, 80 bp, synthetic construct
  source 1..80: mol_type = other DNA
tttcccgcccttgggatctgcactgccttttttgctaattaagcctcttaagcctcagaggcctctctcttttttttcca

SEQ ID NO: 59058 - DNA, 80 bp, synthetic construct
  source 1..80: mol_type = other DNA
taaaaagggaaatggacttatggacactttcacaaactcctactccttttgtgagaatgtaccaaatctggacaagtttg

SEQ ID NO: 59059 - DNA, 80 bp, synthetic construct
  source 1..80: mol_type = other DNA
tgattagaaggaggaatctaattctcaataggggcggtgatgaaaatccacgcggcccagtgagccgtgaacatgtggag

SEQ ID NO: 59060 - DNA, 80 bp, synthetic construct
  source 1..80: mol_type = other DNA
agaggaagtggctaggcctcagaaaaagcctccacacccttactacttgagagaaagggtggaggccgaggcggcctcgg

SEQ ID NO: 59061 - DNA, 80 bp, synthetic construct
  source 1..80: mol_type = other DNA
ggcctcggaggctaggagccccaagcctctgccaacttgaaaaaaaaaagtcacctaggcagccaagttgtggttacatg

SEQ ID NO: 59062 - DNA, 80 bp, synthetic construct
  source 1..80: mol_type = other DNA
gcagacatagtggggtttctgtttaaaactagtggaaaaatggctcttcatgggctgcctagatattttaatgttacttt

SEQ ID NO: 59063 - DNA, 80 bp, synthetic construct
  source 1..80: mol_type = other DNA
gcctttggggaaaagtgtaaagtataactaaatcttgctattaatgttttggggataaaataatcattagcagtaacaat

SEQ ID NO: 59064 - DNA, 80 bp, synthetic construct
  source 1..80: mol_type = other DNA
actcttaacacaatttttcgaggctcggaggcttttttttctcttacaaagggaggaggacattaaaagagtaagtatcc

SEQ ID NO: 59065 - DNA, 80 bp, synthetic construct
  source 1..80: mol_type = other DNA
atataggggcctcgtcaacctagatgggaaagtacagaaaatcagtcataaataacctttctttgatattttgccttata

SEQ ID NO: 59066 - DNA, 80 bp, synthetic construct
  source 1..80: mol_type = other DNA
taactgtgggggtgaggttgtcacgcgagcaagtgtcacttgtaaagagggatgtttcgtgggtaggtagtaatgaggtt

SEQ ID NO: 59067 - DNA, 80 bp, synthetic construct
  source 1..80: mol_type = other DNA
tttcccgcccttgggatctgccctgagatactgccttttttgctaattaagcctcttaagcctcagaggcctctctcttt

SEQ ID NO: 59068 - DNA, 80 bp, synthetic construct
  source 1..80: mol_type = other DNA
ggcaagatatttttaattctttatctcctacctctaggctgcagatacaatcaaacctagtgaatctgatactaaatagc

SEQ ID NO: 59069 - DNA, 80 bp, synthetic construct
  source 1..80: mol_type = other DNA
aagaataaagcactgatagcaaaaacactctccccacgtcagacagtttttttgctttaaagtttttagactacaatgct

SEQ ID NO: 59070 - DNA, 80 bp, synthetic construct
  source 1..80: mol_type = other DNA
tgcagtaagcagtagtcagtttcttctaaagttttttgccaccagtcaaaactttcccaagtaggaggaaatccaaacca

SEQ ID NO: 59071 - DNA, 80 bp, synthetic construct
  source 1..80: mol_type = other DNA
tctcaaagaaatacttgcggcacgtcagtacgtaagtgttaactttgagtgtgtgtgaaaagcgatttgtgaggaacatg

SEQ ID NO: 59072 - DNA, 80 bp, synthetic construct
  source 1..80: mol_type = other DNA
gaatttttcataaccggaaaaggctacttcaatgatgttttgcagtttaggctgtatgacacacttagtactaccgaatc

SEQ ID NO: 59073 - DNA, 80 bp, synthetic construct
  source 1..80: mol_type = other DNA
aacccagaatacttcacccacagccaagcctttcaggtcatactatgccaaagggtctctaacctttgactcaggctatt

SEQ ID NO: 59074 - DNA, 80 bp, synthetic construct
  source 1..80: mol_type = other DNA
tctctgctaaatgttatccaagggcatcgaactcaggattgcagctaattaatgtcacacaacattcagtgaaaatagct

SEQ ID NO: 59075 - DNA, 80 bp, synthetic construct
  source 1..80: mol_type = other DNA
aacacaccaggccctaaaatatctaatcctaagactatcaactgtataaacttgaaagtgtcaactgacaaggatcatag

SEQ ID NO: 59076 - DNA, 80 bp, synthetic construct
  source 1..80: mol_type = other DNA
caagcttgagatcaacgtacttctaccacaagttgctgttaatctttcaaactgccatgttttaattgaatcacatgtct

SEQ ID NO: 59077 - DNA, 80 bp, synthetic construct
  source 1..80: mol_type = other DNA
ggacaataaagctcccgaaaattacacataatggggcttttataccaggtacttacaaaattgtgatagataagaaaaac

SEQ ID NO: 59078 - DNA, 80 bp, synthetic construct
  source 1..80: mol_type = other DNA
aaattgaatgataggtgtgcactattcaccaactgcgttatcaaaggaagagaggtccgaagagggcagtcagctctgag

SEQ ID NO: 59079 - DNA, 80 bp, synthetic construct
  source 1..80: mol_type = other DNA
ggaagagaggtccgaagagggcagtcagctctgaggcagtacagaacagaaataagaatcgggcaaacatttacaggctc

SEQ ID NO: 59080 - DNA, 80 bp, synthetic construct
  source 1..80: mol_type = other DNA
aggcaggaccaataccagctcaacacaaaccaccctaatatcttcaaacactttaaatagtacaatgtctgtgctggagt

SEQ ID NO: 59081 - DNA, 80 bp, synthetic construct
  source 1..80: mol_type = other DNA
gcagtacagaacagaaataagaatcgggcaaacatttacaggctcgagaagattgcttgcagagggggggagcaatgatt

SEQ ID NO: 59082 - DNA, 80 bp, synthetic construct
  source 1..80: mol_type = other DNA
gtgtttcaagaacccagctagtcaaaacagaggttgcagaaattcatgaagacagttacggtggtcctggcgaaaaaatc

SEQ ID NO: 59083 - DNA, 80 bp, synthetic construct
  source 1..80: mol_type = other DNA
acaatttgcaacggctccacaatagtggatcaaaggcttggcagcgaattaggttgctatacaataaacagagtgagaac

SEQ ID NO: 59084 - DNA, 80 bp, synthetic construct
  source 1..80: mol_type = other DNA
ctataagctctgtgagaacagtgccacagaaaagagctgtgaaatagacagtgttccagttaaatgcaaacaggggttct

SEQ ID NO: 59085 - DNA, 80 bp, synthetic construct
  source 1..80: mol_type = other DNA
ctcaggaaggtaggggccatgtgaaattgtctagagggacagaaatcgttttggatgtctgtgatactagctgtgaactg

SEQ ID NO: 59086 - DNA, 80 bp, synthetic construct
  source 1..80: mol_type = other DNA
atgatacccaaaggcactggggatatattggtggactgctcaggagggcagcaacactttttacaggacaatctaattga

SEQ ID NO: 59087 - DNA, 80 bp, synthetic construct
  source 1..80: mol_type = other DNA
cttgggatgcccaaatattccattgctaggtcgaacagctatatatgtttgtagaatgtcaaaccatcccaagacaacca

SEQ ID NO: 59088 - DNA, 80 bp, synthetic construct
  source 1..80: mol_type = other DNA
tggcttttctgttttggttcagttttggctatgtcatcacatgtgtagtgtgcaaggtgctcttctatttgctaattgtc

SEQ ID NO: 59089 - DNA, 80 bp, synthetic construct
  source 1..80: mol_type = other DNA
atcgggacactaggaaaaaggctgaaacagtacagagagctaaagcctcaaacatgtattgtctgtgaatctatccctgt

SEQ ID NO: 59090 - DNA, 80 bp, synthetic construct
  source 1..80: mol_type = other DNA
caatgcaatagatgctgaaatgcacgatcttaactgcaactacaacatatgcccttactgtgcatccagactgacctcag

SEQ ID NO: 59091 - DNA, 80 bp, synthetic construct
  source 1..80: mol_type = other DNA
catcaataggaactgccacagaaacagtgccgagcacgaccaccaacacaccggacacacaggtcaccacagacagtggt

SEQ ID NO: 59092 - DNA, 80 bp, synthetic construct
  source 1..80: mol_type = other DNA
atggtctcgtcaggcacgtaactcaatgtcccaaacggaaagagaaggtcgaagaaactgaactatacttaaacctggag

SEQ ID NO: 59093 - DNA, 80 bp, synthetic construct
  source 1..80: mol_type = other DNA
agaataccttggttggtgagaaaactcctacaagtgtcggagtcaacaggagtggctctaaagagaagctgctggatgat

SEQ ID NO: 59094 - DNA, 80 bp, synthetic construct
  source 1..80: mol_type = other DNA
cacactccttattctgctgactgtttcaatgtcaccagttcagtccgcaccagtaggccacaaaagggcagttgaagtct

SEQ ID NO: 59095 - DNA, 80 bp, synthetic construct
  source 1..80: mol_type = other DNA
atcaaatgagagaaagctatacaggtatttgcctcttcgtgttaggaagtgttctcttcgcagtctcttggctggtgaag

SEQ ID NO: 59096 - DNA, 80 bp, synthetic construct
  source 1..80: mol_type = other DNA
gccctgattgatagcatcggcaatagtttcttcccggggctttccatatgcaagacatgttccattggtagcataaatgg

SEQ ID NO: 59097 - DNA, 80 bp, synthetic construct
  source 1..80: mol_type = other DNA
atttgaaatagagtcacacaaatgctactgcagtctattttgctgtccttactgtagggcctgctcatcggacaaaatca

SEQ ID NO: 59098 - DNA, 80 bp, synthetic construct
  source 1..80: mol_type = other DNA
ctcaccgaatgcatttgaatgtgtgcaaaaagagaaaggtgggtagtaatgttatgctagccgtttgcaagcgcatgtgt

SEQ ID NO: 59099 - DNA, 80 bp, synthetic construct
  source 1..80: mol_type = other DNA
tttaaagcaactattgaagcaagcaacagggctactttcatcagaaacatcataaactccacttttgtcatatgcatact

SEQ ID NO: 59100 - DNA, 80 bp, synthetic construct
  source 1..80: mol_type = other DNA
aatcctggtgatctgtgtggttagtacctctgctgtcgacatggaaaatttaccggcaggcatctgggaaaaagaggaag

SEQ ID NO: 59101 - DNA, 80 bp, synthetic construct
  source 1..80: mol_type = other DNA
acttctgtcatcaggagtgtcaagtaacagaaactgaatgcctttgcccatatgaggccttaatgcttagaaaaccactt

SEQ ID NO: 59102 - DNA, 80 bp, synthetic construct
  source 1..80: mol_type = other DNA
tctggtgaatccagcacagacccccagaccaccagcaaagaagtaccttccacttctgtcgctaccatcaaaacacaaga

SEQ ID NO: 59103 - DNA, 80 bp, synthetic construct
  source 1..80: mol_type = other DNA
ttcttagatagaatagccaagggaatgaaaagcttgttgaactccacaagtttagaaacgagcttgtcaattgaagctcc

SEQ ID NO: 59104 - DNA, 80 bp, synthetic construct
  source 1..80: mol_type = other DNA
atggggggcaatcaatgttcaatcaactttcaaaccaacagtttcagccgccaatatagcacttagctggagttcagttg

SEQ ID NO: 59105 - DNA, 80 bp, synthetic construct
  source 1..80: mol_type = other DNA
tcagccgccaatatagcacttagctggagttcagttgaacacaagggcaacaagatcttagtttcaggcagatcagagtc

SEQ ID NO: 59106 - DNA, 80 bp, synthetic construct
  source 1..80: mol_type = other DNA
gtgtctaggtgtggaagatgcctctgagtcaaaaacactcaccgtttctgttatggatctgtctcaaatgtattctcctg

SEQ ID NO: 59107 - DNA, 80 bp, synthetic construct
  source 1..80: mol_type = other DNA
ttttcgagtacctgtcaggtgaccgacaggtggaggagtggccaaaagcaacctgcacaggtgactgtccagaaagatgt

SEQ ID NO: 59108 - DNA, 80 bp, synthetic construct
  source 1..80: mol_type = other DNA
tgttggggggtgggaactggctgcacctgctgtgggctagatgtaaaggatctcttcacagactacatgttggttaaatg

SEQ ID NO: 59109 - DNA, 80 bp, synthetic construct
  source 1..80: mol_type = other DNA
ggtgggaactggctgcacctgctgtgggctagatgtaaaggatctcttcacagactacatgttggttaaatggaaagtgg

SEQ ID NO: 59110 - DNA, 80 bp, synthetic construct
  source 1..80: mol_type = other DNA
gtttaacctaggccctgtgacaataactctatcagaaccaaggaacgtacagcagaggcttcctcccgagatcatcacac

SEQ ID NO: 59111 - DNA, 80 bp, synthetic construct
  source 1..80: mol_type = other DNA
tgcaccctaaaatagaagaagggttttttgatttgatgcatgtacagaaggtaatgtctgcaagcacggtttgtaagctg

SEQ ID NO: 59112 - DNA, 80 bp, synthetic construct
  source 1..80: mol_type = other DNA
gtcagaaacgcacagggctcaaaacccaagtaccacggctggctcaggtgcatccactccaagcaacaccacatcaaaca

SEQ ID NO: 59113 - DNA, 80 bp, synthetic construct
  source 1..80: mol_type = other DNA
aaggtggacaaagtcaatgggcactcaatccacaagatagaatcacacctcaacacctcatggatgtcatgggatgggtg

SEQ ID NO: 59114 - DNA, 80 bp, synthetic construct
  source 1..80: mol_type = other DNA
tgatttagactatttttgcaacatgggggactggccctcatgcacatacacaggggtgacacaacacaaccatgctgcat

SEQ ID NO: 59115 - DNA, 80 bp, synthetic construct
  source 1..80: mol_type = other DNA
gggtcacagcacacggagacacccctcagttggacctaaaagcgagaccagcatatggtgcaggcgaaatcactgttcta

SEQ ID NO: 59116 - DNA, 80 bp, synthetic construct
  source 1..80: mol_type = other DNA
aagtgtcgggtctgaaattcgcaagtttgtcatgctccggatgttatgcttgcagctctggcatctcctgcaaagttagg

SEQ ID NO: 59117 - DNA, 80 bp, synthetic construct
  source 1..80: mol_type = other DNA
attcatgtaaatgaaccggatgaattcacagtacatgtaaaaagtaatgacccagatgttgtagcagcaggatcaagtct

SEQ ID NO: 59118 - DNA, 80 bp, synthetic construct
  source 1..80: mol_type = other DNA
catggctagaaagatagagtctggggccgacagcacgtttaaggctttttcatcaatgccaaaaaactctctatgttttt

SEQ ID NO: 59119 - DNA, 80 bp, synthetic construct
  source 1..80: mol_type = other DNA
acatagtagaaagagattattgtagcagctgtacagatgatgacactcagaaatgtgttgacattaaacttgaacatcca

SEQ ID NO: 59120 - DNA, 80 bp, synthetic construct
  source 1..80: mol_type = other DNA
cagagcatactcattgaacacaaaggaacgattattggcaagcagaatgacacctgtccaactaaaacaagctgctggtt

SEQ ID NO: 59121 - DNA, 80 bp, synthetic construct
  source 1..80: mol_type = other DNA
aaccagatgtcaactcactcacatcaccaatcttggaggcaaagtcatcacccagccctagtaaaacatcgatgccgcaa

SEQ ID NO: 59122 - DNA, 80 bp, synthetic construct
  source 1..80: mol_type = other DNA
ggaatctattaagagttttttttatgggcttaaaaacatgctgagtgggatcttcggtaatgttttcttaggcatgctcc

SEQ ID NO: 59123 - DNA, 80 bp, synthetic construct
  source 1..80: mol_type = other DNA
tgtttcttgctccttttatattgctaatattgtttttcttcttcgggtggagacttctcttttgccttaagtgctgtaga

SEQ ID NO: 59124 - DNA, 80 bp, synthetic construct
  source 1..80: mol_type = other DNA
aggaccagaaagctgctaaagtataagcaccttagggacgaagaagagagtggttacaaaaaaatcattgaaaggctaaa

SEQ ID NO: 59125 - DNA, 80 bp, synthetic construct
  source 1..80: mol_type = other DNA
tgacaaaaaaggcaaaagtcgattgtttgatggagaaaggcttgcagacagaaagattgccgaactcttttcaactaaaa

SEQ ID NO: 59126 - DNA, 80 bp, synthetic construct
  source 1..80: mol_type = other DNA
ctcatataggttgacgaatcagacaagttgttttctgccgcaatattcatctttaatgttgctacatactcttgctaacc

SEQ ID NO: 59127 - DNA, 80 bp, synthetic construct
  source 1..80: mol_type = other DNA
aaacatgctccaactattgcaccttcagctaccttttatcgctttgaacttgtaacaatcaactatgctgctcttcacca

SEQ ID NO: 59128 - DNA, 80 bp, synthetic construct
  source 1..80: mol_type = other DNA
aactatgctgctcttcaccatcctggcttgacttcacttagacctaaccttgactgcgtgccgccactatatctttgaga

SEQ ID NO: 59129 - DNA, 80 bp, synthetic construct
  source 1..80: mol_type = other DNA
actgcacatcatctctccagaagtcttctctcagcagcaactacagaaacaaatcaagcagcatcagtaatgaccacaac

SEQ ID NO: 59130 - DNA, 80 bp, synthetic construct
  source 1..80: mol_type = other DNA
cagagagacaacaaccatgagcagtccaacaacagtcaaaaacagtgtaacagccataccaacccaaggcatcaccacca

SEQ ID NO: 59131 - DNA, 80 bp, synthetic construct
  source 1..80: mol_type = other DNA
gcaacacttcgaaacagactgacactataaccctggagatctcccctaagattcaaacaacacagagtcaacagactgca

SEQ ID NO: 59132 - DNA, 80 bp, synthetic construct
  source 1..80: mol_type = other DNA
tttctccacttcaaatttatgttgttgactaacttcttcttttgtcaactcctatggggtggcggcggggttgccagtgg

SEQ ID NO: 59133 - DNA, 80 bp, synthetic construct
  source 1..80: mol_type = other DNA
acaccagcaatcgcacctgccaccactgctattgcattcataagccctacaaacagatctaaaagggaatccaaggtgca

SEQ ID NO: 59134 - DNA, 80 bp, synthetic construct
  source 1..80: mol_type = other DNA
aataattctgactttctctcaaggcctcaagaaatattatagcaagatactgaaactcctacatctgacgcaagaagaag

SEQ ID NO: 59135 - DNA, 80 bp, synthetic construct
  source 1..80: mol_type = other DNA
attctgaaggtctgcttgaatggtgtacgcgggtacttgaacaggcatgcaatgacgactacttcaatgaaagaatagaa

SEQ ID NO: 59136 - DNA, 80 bp, synthetic construct
  source 1..80: mol_type = other DNA
tctcaaagaaatacttgcggcacgtcagtacgtaagtgttaactttgagtgtgcattaagggcaacttgtaggcaacacg

SEQ ID NO: 59137 - DNA, 80 bp, synthetic construct
  source 1..80: mol_type = other DNA
gaattttttataactgggaaaggttacttcaatgatgtacttcagttcaagttgcatgacactcctaccaccactgttcc

SEQ ID NO: 59138 - DNA, 80 bp, synthetic construct
  source 1..80: mol_type = other DNA
ggccctggccgcctcatctacagccatgcctttcagatcatactatgctaaagggtctctaacccttgactcaggctatt

SEQ ID NO: 59139 - DNA, 80 bp, synthetic construct
  source 1..80: mol_type = other DNA
gagcaatacgcctcccgaaagtcgcatacaacggggtttttatgccagggacttacaaaattgttatagacaagaaaaac

SEQ ID NO: 59140 - DNA, 80 bp, synthetic construct
  source 1..80: mol_type = other DNA
aggttgaatgataggtgtgcactaatcacaaactgtgtcattaaaggaagagaagttcgaaaggggcagtcaactttgag

SEQ ID NO: 59141 - DNA, 80 bp, synthetic construct
  source 1..80: mol_type = other DNA
agatggaatcaattccaacacaacacagaccaacttaggaatttcaactattctgaatagtacaactcctgcaccaggac

SEQ ID NO: 59142 - DNA, 80 bp, synthetic construct
  source 1..80: mol_type = other DNA
tgcctcaaagtaacccaagagggcaggggccatgtgaaactatctagaggaacggaaattgtcctggatgtgtgtgacac

SEQ ID NO: 59143 - DNA, 80 bp, synthetic construct
  source 1..80: mol_type = other DNA
cagttgtgagttgatgatacctaaaggcactggagacatattggtggactgctcaggaggacagcagcacttcttgcagg

SEQ ID NO: 59144 - DNA, 80 bp, synthetic construct
  source 1..80: mol_type = other DNA
acttaggttgcccaaatgtaccattactaggcaagatggcaatatatatctgcaggatgtcgaaccatccaaagaccacc

SEQ ID NO: 59145 - DNA, 80 bp, synthetic construct
  source 1..80: mol_type = other DNA
catcaacagatactaccatggagacagttccaagcacggccgacagcatgctggaaacacaggttaccacggacagtggc

SEQ ID NO: 59146 - DNA, 80 bp, synthetic construct
  source 1..80: mol_type = other DNA
tctggtgagcccagcacagagcctacaaccaccggagaagcaacatcctctaccactgctgccactgtcagtatgcagga

SEQ ID NO: 59147 - DNA, 80 bp, synthetic construct
  source 1..80: mol_type = other DNA
tatgtaaaaacagaagctataatgtgtgttgagctaactagtcaggaaaggcagtgtagtttaattgaggcaggtacaag

SEQ ID NO: 59148 - DNA, 80 bp, synthetic construct
  source 1..80: mol_type = other DNA
aacaaaaacacacatgactcagaacacaagatccacagcagacccagacaccaccacccccaacaccaccacatcggttg

SEQ ID NO: 59149 - DNA, 80 bp, synthetic construct
  source 1..80: mol_type = other DNA
tacaagctgcacacacggcgtcccaggcgatttgcaggtctaccatgttggcaacctactgaaaggagacaaggttaatg

SEQ ID NO: 59150 - DNA, 80 bp, synthetic construct
  source 1..80: mol_type = other DNA
gtgacctagactacttttgcaacatgggtgactggccttcatgtacatatactggagtgacacagcacaatcgtgcggca

SEQ ID NO: 59151 - DNA, 80 bp, synthetic construct
  source 1..80: mol_type = other DNA
ttgagactgattatacaaagacttttcacttccattccaagagggttacggcacacggtgacacccctcaactggatctg

SEQ ID NO: 59152 - DNA, 80 bp, synthetic construct
  source 1..80: mol_type = other DNA
aaccaaccactatcccaccaacgtcaccgatcctacaagcaactccaacacccggccacggcaaggcacctacactgccg

SEQ ID NO: 59153 - DNA, 80 bp, synthetic construct
  source 1..80: mol_type = other DNA
cctattccttgctccttttgcactgctgatactcttcttcttctttggatggaggcttctgttctgtctgaagtgttgca

SEQ ID NO: 59154 - DNA, 80 bp, synthetic construct
  source 1..80: mol_type = other DNA
gaaggaccaggggtctgctaaagtataaacaacttaaggatgaagaagaagccgggtacaagaaaatcatcgagaggctg

SEQ ID NO: 59155 - DNA, 80 bp, synthetic construct
  source 1..80: mol_type = other DNA
aatgacaaaaagggcaaaagtcgactttttgatggagagaggctcgctgacaggaagattgctaaactcttctcaaccaa

SEQ ID NO: 59156 - DNA, 80 bp, synthetic construct
  source 1..80: mol_type = other DNA
agactcatatagggtgacaaatcagaccagctgccacctgtagtgtcacccgtttttttatgccactgtgtcctttttac

SEQ ID NO: 59157 - DNA, 80 bp, synthetic construct
  source 1..80: mol_type = other DNA
aacaaatcatacactaatcatcacttctccacttgcttttcatcacctctagctcatgatagtcgatcgtcctgctcaac

SEQ ID NO: 59158 - DNA, 80 bp, synthetic construct
  source 1..80: mol_type = other DNA
gatcgtcctgctcaacaccactccagcttgatttcatctagacttaactttgactgcgtgccgccactatatctttgaga

SEQ ID NO: 59159 - DNA, 80 bp, synthetic construct
  source 1..80: mol_type = other DNA
aacacacaccatctctccagaagtcttctttcagctgtaagcactgaagcaggtcagacaacaccagcaacatccacaac

SEQ ID NO: 59160 - DNA, 80 bp, synthetic construct
  source 1..80: mol_type = other DNA
tgaggcggcttcagccccaagcagctcatcgacagctgagaacaacacgatgtttcaaccagctcaagacaccaccacca

SEQ ID NO: 59161 - DNA, 80 bp, synthetic construct
  source 1..80: mol_type = other DNA
gtggtgtttcggaacagtacaacccaacaaccacaggaatctcaccaaaggcccagacaatgcaggctcaacaggctatt

SEQ ID NO: 59162 - DNA, 80 bp, synthetic construct
  source 1..80: mol_type = other DNA
atgttctgccttaagctcgtgctgctaatcaatcttgccctttgtcagcttcttgaaggcaatgatagagttactagtgc

SEQ ID NO: 59163 - DNA, 80 bp, synthetic construct
  source 1..80: mol_type = other DNA
gtaccagtgactacacctgtcaccacaacctttacacctataaacccaacgaatagatccaagagggagtctaaagtgca

SEQ ID NO: 59164 - DNA, 80 bp, synthetic construct
  source 1..80: mol_type = other DNA
aataattttaacctttcctcaaggtctgaagaagtactacagcaaaatattgaaactcctacacttaactcaagaagagg

SEQ ID NO: 59165 - DNA, 80 bp, synthetic construct
  source 1..80: mol_type = other DNA
actctgaaggcttacttgaatggtgcacacgagtacttcaacaggtatgtgatgatacctatttcaatgagaggatagaa

SEQ ID NO: 59166 - DNA, 80 bp, synthetic construct
  source 1..80: mol_type = other DNA
aaagaattttttataactgggaaaggttacttcaatgatgtacttcagtttaagttgcacgacactcccgctaccaccgt

SEQ ID NO: 59167 - DNA, 80 bp, synthetic construct
  source 1..80: mol_type = other DNA
acttctctgctaaatgttatccaagagcatcaaactcaggaatgcagctaatcaatgtcacacaacacccaatgaagata

SEQ ID NO: 59168 - DNA, 80 bp, synthetic construct
  source 1..80: mol_type = other DNA
gtgagcttgagatcaatgtgcttatacctcaggttgctgtcaacctttcaaactgttttgtttcaatcaagtcacatgtc

SEQ ID NO: 59169 - DNA, 80 bp, synthetic construct
  source 1..80: mol_type = other DNA
tgtgactactccctggacactgatggagcaatacgtctcccgaaagtcgcacacaacggggtttttatgccaggaactta

SEQ ID NO: 59170 - DNA, 80 bp, synthetic construct
  source 1..80: mol_type = other DNA
catcaatagatgctaccatggaggcagtaccaggcacgaccaacagtgtgctggaaacacaggttaccatggacagtggc

SEQ ID NO: 59171 - DNA, 80 bp, synthetic construct
  source 1..80: mol_type = other DNA
tctggtgagctcagcacagatcctacaaccactagggaagcaacaacccccatcactgctgccactgtcagtgcgcagga

SEQ ID NO: 59172 - DNA, 80 bp, synthetic construct
  source 1..80: mol_type = other DNA
gagcctaggtgtagaggatgcttctgagtcaaagacgctgactgtttctgtcatggacctatcccaaatgtattctcccg

SEQ ID NO: 59173 - DNA, 80 bp, synthetic construct
  source 1..80: mol_type = other DNA
tctttgagtatctgtcaggtgatagacaggtagaagagtggccaaaagccacctgcacaggcgactgccaagagagatgt

SEQ ID NO: 59174 - DNA, 80 bp, synthetic construct
  source 1..80: mol_type = other DNA
atttaacctaggccctgtgacaataaccctgtcagagccaagaaacatccagcaaaggctcccttccgaaatcgttacac

SEQ ID NO: 59175 - DNA, 80 bp, synthetic construct
  source 1..80: mol_type = other DNA
aacaaaaacacacatgactcagaacccaggaaccacagtagatccagacaccactacctccaataccaccacatcgattg

SEQ ID NO: 59176 - DNA, 80 bp, synthetic construct
  source 1..80: mol_type = other DNA
ttcatcaatatgctcaatattgagactgattatacaaagactttccacttccattccaagagagtaacggcacatggtga

SEQ ID NO: 59177 - DNA, 80 bp, synthetic construct
  source 1..80: mol_type = other DNA
cacccctcaactggatctgaaggcaaggcctacatatggtgcaggcgaagtcactgttctagtagaggttgcagatctgg

SEQ ID NO: 59178 - DNA, 80 bp, synthetic construct
  source 1..80: mol_type = other DNA
acaaagcatattaattgagcataagggaacaataattggcaaacaaaacgacacctgttcgaccaaaacaagctgttggc

SEQ ID NO: 59179 - DNA, 80 bp, synthetic construct
  source 1..80: mol_type = other DNA
aaccaatcaccactccaccaacatcaccgaccccacaagcaactccaacacccagctacagcgagacacctacactgccg

SEQ ID NO: 59180 - DNA, 80 bp, synthetic construct
  source 1..80: mol_type = other DNA
tagaatcagtcaagagttttttttatggactaaaaaacatgctgggtggcatcttcggtaatgtcttcttaggcatcttc

SEQ ID NO: 59181 - DNA, 80 bp, synthetic construct
  source 1..80: mol_type = other DNA
actcatatagggtaacaaatcagaccagctgccacctgtagtgtcatctgccttttttatgccattgtgtcctttttata

SEQ ID NO: 59182 - DNA, 80 bp, synthetic construct
  source 1..80: mol_type = other DNA
actgatcatgcactgatcgtcacttcttcgtctgcccttcgtcacctctagcttatgatagttgatcatcctgcttaaca

SEQ ID NO: 59183 - DNA, 80 bp, synthetic construct
  source 1..80: mol_type = other DNA
aacacacatcatctctccagaagtcttctttcagctgtgggcactgaagcaggtcagacggcaccagcaacgcccacggc

SEQ ID NO: 59184 - DNA, 80 bp, synthetic construct
  source 1..80: mol_type = other DNA
tgaagtggccttggccccaggcggctcatctacagctgagagcaacacaatatccataccagctcaagacaccaccatca

SEQ ID NO: 59185 - DNA, 80 bp, synthetic construct
  source 1..80: mol_type = other DNA
gtggtgtttcgaaacaggacaacccaacaaccacaggaatctccccagaggcccagacaatgcagagccaacaggccgtt

SEQ ID NO: 59186 - DNA, 80 bp, synthetic construct
  source 1..80: mol_type = other DNA
gcaccagtgaccacacctgccaccgccatctctgcacccacaagcccaacgaacagatccaaaagggagtctaaagtgca

SEQ ID NO: 59187 - DNA, 80 bp, synthetic construct
  source 1..80: mol_type = other DNA
aaaacgttagatgaatgggagagtggaaaaaatccatatgaaccgtcagaagtgactgcatccatgtgagaggttgagtt

SEQ ID NO: 59188 - DNA, 80 bp, synthetic construct
  source 1..80: mol_type = other DNA
ggagcccccagtggaagctcaccaccccacagccagagctcttcctctgggtatgggtccttctcagcgtcccaggcttc

SEQ ID NO: 59189 - DNA, 80 bp, synthetic construct
  source 1..80: mol_type = other DNA
gatgcctgaaatgtataataatttatgcaagcccccttacaaattactgcaagagaataagccactgctcaattatgaat

SEQ ID NO: 59190 - DNA, 80 bp, synthetic construct
  source 1..80: mol_type = other DNA
acaagatggatttagtcctaaataggaaagaaagagaggctctctgcaagcttttagagatttctcctaattgttatggc

SEQ ID NO: 59191 - DNA, 80 bp, synthetic construct
  source 1..80: mol_type = other DNA
ggatcaccaggtaattgttctgacccctcatatattctaacctcttctacctgattatcttttccttccataggttggcc

SEQ ID NO: 59192 - DNA, 80 bp, synthetic construct
  source 1..80: mol_type = other DNA
tcccccaatggcaaacatatggtaatttacccctgacacaggaataccagcaccataatcatgaactcttttcatgtccc

SEQ ID NO: 59193 - DNA, 80 bp, synthetic construct
  source 1..80: mol_type = other DNA
atgccccccatcctgaaaaataaataaggatacttactcttttaatgtcctcctccctttgtaagagaaaaaaagcctcc

SEQ ID NO: 59194 - DNA, 80 bp, synthetic construct
  source 1..80: mol_type = other DNA
tgtaaaacttgctgaactagcagagcttgcagagcttcgggaccccccaaattttcgctttcttgagaatggaggagtgg

SEQ ID NO: 59195 - DNA, 80 bp, synthetic construct
  source 1..80: mol_type = other DNA
gggtcccgaagctctgcaagctctgctagttcagcaagttttacaagcactccaccaaagccaaaaaagaacagagaaac

SEQ ID NO: 59196 - DNA, 80 bp, synthetic construct
  source 1..80: mol_type = other DNA
cttcacaacacgggccagttgtgttcgacaccgtacgccaaattgccataaagactgcccaaggggagggactggtgctt

SEQ ID NO: 59197 - DNA, 80 bp, synthetic construct
  source 1..80: mol_type = other DNA
aaacttactctcacactcttattaacgggctgccgcttccagaacattacagaaaaaactaccacgcaaccctagataac

SEQ ID NO: 59198 - DNA, 80 bp, synthetic construct
  source 1..80: mol_type = other DNA
gaagtcattccagggcctcaaacaatggcctatggaggacgtggtccgtgggaacatcttcctgaggtaggagatcagcg

SEQ ID NO: 59199 - DNA, 80 bp, synthetic construct
  source 1..80: mol_type = other DNA
cctagctgcgtcttctgttagcactacttataaacctaacaaaaaagaaaaacttatgctaaacttgctagacaaatgta

SEQ ID NO: 59200 - DNA, 80 bp, synthetic construct
  source 1..80: mol_type = other DNA
aagagctaaatctattagtttatgaagacttagtagctaattgtcctgaactactccttatgcttgaaggtcaaccagga

SEQ ID NO: 59201 - DNA, 80 bp, synthetic construct
  source 1..80: mol_type = other DNA
ggggcacgccttatagaacaagtcttgggcatgcaccatattaatgtttgttctaactttacagctctcacatatctttt

SEQ ID NO: 59202 - DNA, 80 bp, synthetic construct
  source 1..80: mol_type = other DNA
tcatctacatcctgttacttcgcttgactcagacaataaagctttacagcttttgttgattcaaggctataatcctctag

SEQ ID NO: 59203 - DNA, 80 bp, synthetic construct
  source 1..80: mol_type = other DNA
ccgttggtcacgccctgtgctgtgtcctgaacaaacaattcgggaaacaaaacactgtttgcttttacgggcctgcctca

SEQ ID NO: 59204 - DNA, 80 bp, synthetic construct
  source 1..80: mol_type = other DNA
atgtaatccataaccactcccaggaaatgacgtatgatagccaatcagaattgagtattaaacctatataagctgctgca

SEQ ID NO: 59205 - DNA, 80 bp, synthetic construct
  source 1..80: mol_type = other DNA
acaggtaaaacaaatatggccaaggcaatcgtccaagggattagactttatgggtgtgttaatcatttgaacaaaggatt

SEQ ID NO: 59206 - DNA, 80 bp, synthetic construct
  source 1..80: mol_type = other DNA
tgtatttaatgactgcagacaacgcctagttgtttggtgggaggagtgcttaatgcaccaggattgggtggaacctgcaa

SEQ ID NO: 59207 - DNA, 80 bp, synthetic construct
  source 1..80: mol_type = other DNA
agtgtatcttgggcgggacagaatgcagaattgacgtcaagcatagagacagtgtacttttaactcaaacacctgtaatt

SEQ ID NO: 59208 - DNA, 80 bp, synthetic construct
  source 1..80: mol_type = other DNA
atatccactaaccacgatatctacgcggttgttggtggcaattctgtttctcatgttcacgcggctccattaaaagaaag

SEQ ID NO: 59209 - DNA, 80 bp, synthetic construct
  source 1..80: mol_type = other DNA
agtgattcagctaaattttatgaaacaacttcctcaaacatttggagaaatcactgctactgagattgcagctcttctac

SEQ ID NO: 59210 - DNA, 80 bp, synthetic construct
  source 1..80: mol_type = other DNA
agtggtgtttcaatgagtacgactgtactctgacaggatttaaacaaaaatggaatttagataaaattccaaactcattt

SEQ ID NO: 59211 - DNA, 80 bp, synthetic construct
  source 1..80: mol_type = other DNA
cctcttggggtcctttgtcctactcattcacaggactttacacttcacgaaaacggatactgcactgattgcggtggtta

SEQ ID NO: 59212 - DNA, 80 bp, synthetic construct
  source 1..80: mol_type = other DNA
ccttcctcatagtgctgacaattctatgtacactgatcgcgcaagcgaaactagcacaggagacatcacaccaagtaagt

SEQ ID NO: 59213 - DNA, 80 bp, synthetic construct
  source 1..80: mol_type = other DNA
aaatacgcatgcgcaagtaattcttttactttcacttcgctatttttaccaatttttacttttaggtgacttgggggatt

SEQ ID NO: 59214 - DNA, 80 bp, synthetic construct
  source 1..80: mol_type = other DNA
cggacggagaagacaccgagcctgagacatcgcaagtggactattgtccacccaagaaacgtcgtctaactgctccagca

SEQ ID NO: 59215 - DNA, 80 bp, synthetic construct
  source 1..80: mol_type = other DNA
cttcctgattcaatcagactgcatccggtctccggcgagtgaacatctctggaaaaagctccacgcttgtggtgagtcta

SEQ ID NO: 59216 - DNA, 80 bp, synthetic construct
  source 1..80: mol_type = other DNA
agtcctccaaactcacctgcgagctctgtaagtactattactttctttaacacttggcacgcacagccacgtgacgaaga

SEQ ID NO: 59217 - DNA, 80 bp, synthetic construct
  source 1..80: mol_type = other DNA
tgagctcagggaatatgaaagacaagcatcgctcctacaaaagaaaagggagtccagaaagaggggagaggaagagacac

SEQ ID NO: 59218 - DNA, 80 bp, synthetic construct
  source 1..80: mol_type = other DNA
tggcagacaactcatcacaggagcaggagccgcagcccgatccgacacagtggggagagaggctcgggctcatatcatca

SEQ ID NO: 59219 - DNA, 80 bp, synthetic construct
  source 1..80: mol_type = other DNA
ggaacacccaatcagccacctatcgtcttgcactgcttcgaagacctcagaccaagtgatgaagacgagggagagtacat

SEQ ID NO: 59220 - DNA, 80 bp, synthetic construct
  source 1..80: mol_type = other DNA
cggggaaaaaagacaatagaacaaatccatacactgtattcagtcaacacagagcttccaatcctgaagctccagggtgg

SEQ ID NO: 59221 - DNA, 80 bp, synthetic construct
  source 1..80: mol_type = other DNA
tgtgggttctactggcactctactcgcattgctagagatggtactaattcaatctttaatgaaatgaaacaacagtttca

SEQ ID NO: 59222 - DNA, 80 bp, synthetic construct
  source 1..80: mol_type = other DNA
acagctacaaattgataataaaataggatgggataacactagagaactattgtttaatcaaaaaaaaacactagatcaaa

SEQ ID NO: 59223 - DNA, 80 bp, synthetic construct
  source 1..80: mol_type = other DNA
aatacagaaatatgttctggcactttagaaataactctgattgtgaaagatgtaattactgggatgatgtgtaccgtaga

SEQ ID NO: 59224 - DNA, 80 bp, synthetic construct
  source 1..80: mol_type = other DNA
cacttagctaatgtttcctcacagacagaagcagacgagataactgacgaggaaatgctttctgctgctgaaagcatgga

SEQ ID NO: 59225 - DNA, 80 bp, synthetic construct
  source 1..80: mol_type = other DNA
agcagatgcctccaattaagagacagcctagagggtgggtgctgcctggatacagatatcttgggccatttaatccactt

SEQ ID NO: 59226 - DNA, 80 bp, synthetic construct
  source 1..80: mol_type = other DNA
ctatggctttcaatcctcctgtgattagagctttttctcaacctgcttttacttatgtcttcaaatttccatatccacaa

SEQ ID NO: 59227 - DNA, 80 bp, synthetic construct
  source 1..80: mol_type = other DNA
gataacggtgaacctgtaaataacgctgatcgcgctgctcaattacatgatcacgcctactctgaactaataaagagtgg

SEQ ID NO: 59228 - DNA, 80 bp, synthetic construct
  source 1..80: mol_type = other DNA
taaaaatccatacctgtatttcaataaagctgatgaaaaattcattgatgatctaaaagacgattggtcaattggtggaa

SEQ ID NO: 59229 - DNA, 80 bp, synthetic construct
  source 1..80: mol_type = other DNA
ttattggatccagtttttttaaaataaagcgcgccgtggctcctgctctgggaaataaagagagagcccaaaaaagacac

SEQ ID NO: 59230 - DNA, 80 bp, synthetic construct
  source 1..80: mol_type = other DNA
ttttactttgctaactcaaataaaggtgcaaaaaaaacaaaaaaaagtgaacctaaaccaggaacctcaaaaatgtctga

SEQ ID NO: 59231 - DNA, 80 bp, synthetic construct
  source 1..80: mol_type = other DNA
cactgacattcaagaccaacaacctgatactgtggacgcaccacaaaacacctcagggggaggaacaggaagtattggag

SEQ ID NO: 59232 - DNA, 80 bp, synthetic construct
  source 1..80: mol_type = other DNA
gaggaaaaggatctggtgtggggatttccactggagggtgggtcggaggttctcacttttcagacaaatatgtggttact

SEQ ID NO: 59233 - DNA, 80 bp, synthetic construct
  source 1..80: mol_type = other DNA
aaaaacacaagacaatttataaccacaattcagaatggtcacctctacaaaacagaggccattgaaacaacaaaccaaag

SEQ ID NO: 59234 - DNA, 80 bp, synthetic construct
  source 1..80: mol_type = other DNA
tggaaaatcacagcgctgcgtcacaactccatggacatactttaactttaatcaatacagctgtcacttctcaccacagg

SEQ ID NO: 59235 - DNA, 80 bp, synthetic construct
  source 1..80: mol_type = other DNA
attggcagcgccttacaaatgaatataagcgcttcagacctaaagcaatgcaagtaaagatttacaacttgcaaataaaa

SEQ ID NO: 59236 - DNA, 80 bp, synthetic construct
  source 1..80: mol_type = other DNA
caaatactttcaaatggtgctgacacaacatacaacaatgacctcacagctggcgttcacatcttttgtgatggagagca

SEQ ID NO: 59237 - DNA, 80 bp, synthetic construct
  source 1..80: mol_type = other DNA
tggaaagaaaaagaatggctgcttcatgcacttttagctcatggaactgaacaatctatgatacaattaagaaactgcgc

SEQ ID NO: 59238 - DNA, 80 bp, synthetic construct
  source 1..80: mol_type = other DNA
tgcttacccaaatgcatctcatccatgggatgaggacgtcatgcctgatcttccatacaagacctggaaactttttcaat

SEQ ID NO: 59239 - DNA, 80 bp, synthetic construct
  source 1..80: mol_type = other DNA
atggatatattcctattgaaaatgaactcgcagatcttgatggaaatgcagctggaggcaatgctacagaaaaagcactt

SEQ ID NO: 59240 - DNA, 80 bp, synthetic construct
  source 1..80: mol_type = other DNA
ctgtatcagatgcctttttttctacttgaaaacagtgaccaccaagtacttagaactggtgagagcactgaatttacttt

SEQ ID NO: 59241 - DNA, 80 bp, synthetic construct
  source 1..80: mol_type = other DNA
taactttgactgtgaatgggttaacaatgaaagagcatacattcctcctggactaatgtttaatccaaaagtcccaacaa

SEQ ID NO: 59242 - DNA, 80 bp, synthetic construct
  source 1..80: mol_type = other DNA
gaagagttcagtacataagacaaaacggaagcacagcagcaagcacaggcagaattcagccatactcaaaaccaacaagc

SEQ ID NO: 59243 - DNA, 80 bp, synthetic construct
  source 1..80: mol_type = other DNA
tggatgacaggacctggcctgctcagtgcacaaagagtaggaccacagtcatcagacactgctccattcatggtttgcac

SEQ ID NO: 59244 - DNA, 80 bp, synthetic construct
  source 1..80: mol_type = other DNA
taacccagaaggaacacacataaacacaggtgctgcaggatttggatctggctttgatcctccaagcggatgtctggcac

SEQ ID NO: 59245 - DNA, 80 bp, synthetic construct
  source 1..80: mol_type = other DNA
caactaacctagaatacaaacttcagtggtaccagacaccagaaggaacaggaaataatggaaacataattgcaaaccca

SEQ ID NO: 59246 - DNA, 80 bp, synthetic construct
  source 1..80: mol_type = other DNA
tcactctcaatgcttagagaccaactcctatacaaaggaaaccagaccacatacaatctagtgggggacatatggatgtt

SEQ ID NO: 59247 - DNA, 80 bp, synthetic construct
  source 1..80: mol_type = other DNA
tccaaatcaagtctgggacagatttcctatcaccagagaaaatccaatctggtgcaaaaaaccaagggctgacaaacaca

SEQ ID NO: 59248 - DNA, 80 bp, synthetic construct
  source 1..80: mol_type = other DNA
tcctcatccggatgaagacataatccgtgatgacttgcttatttctttagaagatcgccattttggggctgttctctgca

SEQ ID NO: 59249 - DNA, 80 bp, synthetic construct
  source 1..80: mol_type = other DNA
caatcatggatccatttgatggatcaattgcaatggatcatcctccaggcactatttttataaaaatggcaaaaattcca

SEQ ID NO: 59250 - DNA, 80 bp, synthetic construct
  source 1..80: mol_type = other DNA
gttccaactgcctcaaatgcagactcatacctaaacatatactgtactggacaagtcagctgtgaaattgtatgggaggt

SEQ ID NO: 59251 - DNA, 80 bp, synthetic construct
  source 1..80: mol_type = other DNA
agaaagatacgcaacaaagaactggcgtccagaaagaagacatactgcactcgggatgtcactgggaggagagagcaact

SEQ ID NO: 59252 - DNA, 80 bp, synthetic construct
  source 1..80: mol_type = other DNA
acacgcctacataccacgtggatccaacaggagcatacatccagcccacgtcatatgatcagtgtatgccagtaaaaaca

SEQ ID NO: 59253 - DNA, 80 bp, synthetic construct
  source 1..80: mol_type = other DNA
aacatcaataaagtgttgtaatcttataagcctcttttttgcttctgcttacaagttcctcctcaatggacaagcggaaa

SEQ ID NO: 59254 - DNA, 80 bp, synthetic construct
  source 1..80: mol_type = other DNA
gtgaagggtgactgtagtcctgagctcatgggttcaagaccacagcccgatggtagtggtgttaccgtctcgaacctagc

SEQ ID NO: 59255 - DNA, 80 bp, synthetic construct
  source 1..80: mol_type = other DNA
cttatgcaatcgcgaaactctatatcttttaatgtgttgttgttgtacatgcgccatcttagttttatatcagctggcgc

SEQ ID NO: 59256 - DNA, 80 bp, synthetic construct
  source 1..80: mol_type = other DNA
aggctgtttacatggcaacaactactctcatgtcacacaaacaaaggaatatgtttcctcgttgtgacatcatagttcag

SEQ ID NO: 59257 - DNA, 80 bp, synthetic construct
  source 1..80: mol_type = other DNA
tctgagctaggagagaaaaacttacactgccatattatagttgggggagaaggactaagcaagaggaatgctaaatcatc

SEQ ID NO: 59258 - DNA, 80 bp, synthetic construct
  source 1..80: mol_type = other DNA
ctgtgctcagttctatggtttaatactagctgagataattcaacgctgcaaatctcttctggctacacgtccttttgaac

SEQ ID NO: 59259 - DNA, 80 bp, synthetic construct
  source 1..80: mol_type = other DNA
atattggattccaagatggcgtctgtacaaccacgtcacatataaaataataaatattcacaaggaggagtggttatatg

SEQ ID NO: 59260 - DNA, 80 bp, synthetic construct
  source 1..80: mol_type = other DNA
ctgaggaggctgacatatttcacactctaaaaaaggctgagcgagaggcatggggtggagttactggcggcaacatgcag

SEQ ID NO: 59261 - DNA, 80 bp, synthetic construct
  source 1..80: mol_type = other DNA
atccttcaatatagagatcgcagaggagaccttcatgcacaaacagtggatcctcttcgcttcttcaaaaactacctttt

SEQ ID NO: 59262 - DNA, 80 bp, synthetic construct
  source 1..80: mol_type = other DNA
acctaaaaatagatgtatttcatcttacagcaaacctgatgtttgtacttctcctgacaactggttcattttagctgaaa

SEQ ID NO: 59263 - DNA, 80 bp, synthetic construct
  source 1..80: mol_type = other DNA
cacaccgatcacatcactctttccctacacctcgctcatccgttctggggcacgtcagtacgtaagtgttaactttgagc

SEQ ID NO: 59264 - DNA, 80 bp, synthetic construct
  source 1..80: mol_type = other DNA
ttggagtggcagtggagtcaccagtggaggtggaaccaactctagtttgatacaaaccgtcccaacactcacaactgctc

SEQ ID NO: 59265 - DNA, 80 bp, synthetic construct
  source 1..80: mol_type = other DNA
tgaacagcacaactcctgcaccagggccgtcaacagacactgccacaaagacagtatctagcacaaccatcagcacgcca

SEQ ID NO: 59266 - DNA, 80 bp, synthetic construct
  source 1..80: mol_type = other DNA
acggcctcactaggcacgtaactcaatgtcccaaacggaaggaaaaggttgaggaaaccgaactgtatttgaacttggag

SEQ ID NO: 59267 - DNA, 80 bp, synthetic construct
  source 1..80: mol_type = other DNA
gatacacagatcaccacggacagtggctcaggtgaatccagcactgatccctcggttaccaacaaggacacatcccctac

SEQ ID NO: 59268 - DNA, 80 bp, synthetic construct
  source 1..80: mol_type = other DNA
ttccgttgccattgtccaaacacaagaaacagaagcacccacgaccctgaatccaaacacaacggcgaccacaggcgatt

SEQ ID NO: 59269 - DNA, 80 bp, synthetic construct
  source 1..80: mol_type = other DNA
ctaccccaagcaccaccacaccagacagtccaagtgccaactcgcctacactaccagtcccacagacaaactcatctcct

SEQ ID NO: 59270 - DNA, 80 bp, synthetic construct
  source 1..80: mol_type = other DNA
agccccagcaaggcaccaacaccgcagaccacacaccatctatccagaggtcttctctcagcagcaatcacagaagcaga

SEQ ID NO: 59271 - DNA, 80 bp, synthetic construct
  source 1..80: mol_type = other DNA
ccaaacagcatcggcagagacttcaacaaaagagactactaccacaaacagctcaatgacggcaaggagtgacacagcgg

SEQ ID NO: 59272 - DNA, 80 bp, synthetic construct
  source 1..80: mol_type = other DNA
ttacttcaactcaacacgtcaccaccaataacactacaggacaaactaatcctacaaccttggtaacctcccctaagact

SEQ ID NO: 59273 - DNA, 80 bp, synthetic construct
  source 1..80: mol_type = other DNA
gtgtgtaaagagcaatctgtgagcaacatgttgcctctcaaatctatgctgctgactaacttcatcctttgtcagctctt

SEQ ID NO: 59274 - DNA, 80 bp, synthetic construct
  source 1..80: mol_type = other DNA
caaacgatacagggccaacagactacaacaccagtgaccacacccactattaccaccattgcactcataagcccaacaag

SEQ ID NO: 59275 - DNA, 80 bp, synthetic construct
  source 1..80: mol_type = other DNA
caggtccaaaagaaactccaaagtgcaaataattctaaccttccctcaaggtctcaagaaatactatagtaaaatattga

SEQ ID NO: 59276 - DNA, 80 bp, synthetic construct
  source 1..80: mol_type = other DNA
atggtgttgtccagtacatgagattggtacaggctgaaatcagttatgttagggaacacctgatacgacaagaagaaagg

SEQ ID NO: 59277 - DNA, 80 bp, synthetic construct
  source 1..80: mol_type = other DNA
catagactacctggatcgcctctacgcaataagacatgacattgttgatcagatgataaagcatgactggtcagataaca

SEQ ID NO: 59278 - DNA, 80 bp, synthetic construct
  source 1..80: mol_type = other DNA
tctagggccactagaaggtgggggacttatctttaaggattggtgcacatctacctgccaatttggtgacccaggagata

SEQ ID NO: 59279 - DNA, 80 bp, synthetic construct
  source 1..80: mol_type = other DNA
tcaaagaaatacttgcggcacgtcagttcgtaagtatcaatcttgagagtgtgtgtgaaacatcctgcatgcaatatgtc

SEQ ID NO: 59280 - DNA, 80 bp, synthetic construct
  source 1..80: mol_type = other DNA
aaggaattctttttgacaggagagggttatttcaatgaagtgctactgttcaagttaccaaatcagctgggcaccactgg

SEQ ID NO: 59281 - DNA, 80 bp, synthetic construct
  source 1..80: mol_type = other DNA
gttgcctcttgcaaacaccccaacagccgagcccttcaaatctttttatgctagtgggttcttggtaatggattcaggtt

SEQ ID NO: 59282 - DNA, 80 bp, synthetic construct
  source 1..80: mol_type = other DNA
atttttctgctaagtgctatccaaaagcatcgaactcaggactccaactaattaatgccactcaacactcagctaaaata

SEQ ID NO: 59283 - DNA, 80 bp, synthetic construct
  source 1..80: mol_type = other DNA
gtcaacaccccaggtccaaagtattctaacttaaagactgtcaactgcataaatttaaaggtatcaactgacagagatca

SEQ ID NO: 59284 - DNA, 80 bp, synthetic construct
  source 1..80: mol_type = other DNA
cagtgagcttgaagtgaatgtgcttcttcctcaggttgcagttaacatttcaaattgtcatgtccttatcaaatcccatg

SEQ ID NO: 59285 - DNA, 80 bp, synthetic construct
  source 1..80: mol_type = other DNA
tatgcgactattccatagacacagacggcatgataaggctcccacaaatcacccatgaaggcacttttataccgggaacc

SEQ ID NO: 59286 - DNA, 80 bp, synthetic construct
  source 1..80: mol_type = other DNA
tataagatagtgatagataagaagaacaagcttaatgacaggtgcaccatgaccacaaactgtgtgatcaaaggaagaga

SEQ ID NO: 59287 - DNA, 80 bp, synthetic construct
  source 1..80: mol_type = other DNA
gattcggaaaggacagtcaacccttagacaatacaggacagaaataagggttggtcagatgtcttccgggacgagaagat

SEQ ID NO: 59288 - DNA, 80 bp, synthetic construct
  source 1..80: mol_type = other DNA
tcagcacatctggcaacacaacaggtgtcggcactgccttcaattcagtgcacaatgttaccactaatagtcagaagcag

SEQ ID NO: 59289 - DNA, 80 bp, synthetic construct
  source 1..80: mol_type = other DNA
tactctcagaggcaggtagtggaggctgcatctctaggactcaattaataagaacagaaactgcagaagtgcatggagac

SEQ ID NO: 59290 - DNA, 80 bp, synthetic construct
  source 1..80: mol_type = other DNA
gattatggtggacctggcgagaaaataaccatctgcaatggttcaaccattgtcgatcagaggttgggcagcgaattagg

SEQ ID NO: 59291 - DNA, 80 bp, synthetic construct
  source 1..80: mol_type = other DNA
ttgttacacaatcaacagaataaagtcttttaaactatgtgaaaatagtgcccaaggtaagagctgtgagatagacagtg

SEQ ID NO: 59292 - DNA, 80 bp, synthetic construct
  source 1..80: mol_type = other DNA
ttcctgtacagtgcaggcaaggttactgcctgaaaatcagtcaggaggtgaggggacatgtaaaactttccagaggttcg

SEQ ID NO: 59293 - DNA, 80 bp, synthetic construct
  source 1..80: mol_type = other DNA
gaaattgtcctagatgtctgtgacacaagctgcgagataatgattcctggaggcacaggtgacatattggtagactgctc

SEQ ID NO: 59294 - DNA, 80 bp, synthetic construct
  source 1..80: mol_type = other DNA
aggtgggcagcagcattttctacagagtaacttggttgacctgggttgtccgaacatcccgttgctgggcaagatggcca

SEQ ID NO: 59295 - DNA, 80 bp, synthetic construct
  source 1..80: mol_type = other DNA
tggcttttcttttttggtttagctttggctacgtgattacatgtatactgtgtaaaacgctcttttacatactcataatc

SEQ ID NO: 59296 - DNA, 80 bp, synthetic construct
  source 1..80: mol_type = other DNA
attgggacactagggaaaaaattgaaacagtatagagagctgaaaccccaaacttgcaccatatgtgagtcagtccctgt

SEQ ID NO: 59297 - DNA, 80 bp, synthetic construct
  source 1..80: mol_type = other DNA
cccaccagcataacaccaatggctcagttgggcacagtgactcagaccattgaggcgcaggccacggaggcagatggctc

SEQ ID NO: 59298 - DNA, 80 bp, synthetic construct
  source 1..80: mol_type = other DNA
aagggctcacaaggcatgtgaaccagtgtccaaaaaagaaggagaaggtggaggagacagagctatacttgaacctggag

SEQ ID NO: 59299 - DNA, 80 bp, synthetic construct
  source 1..80: mol_type = other DNA
aggatcccctggattgttaggaagcttctacaggtgtctgagtcaacaggtatggccctgaaaagaagcagctggatgat

SEQ ID NO: 59300 - DNA, 80 bp, synthetic construct
  source 1..80: mol_type = other DNA
catactcctcatactattgataatttccatgtcaccagttcaatctgcaccaataggtcaggaaagagcagttgccctct

SEQ ID NO: 59301 - DNA, 80 bp, synthetic construct
  source 1..80: mol_type = other DNA
ccagttcaatctgcaccaataggtcaggaaagagcagttgccctctatcaatttagagaagactatatgggcatttgcct

SEQ ID NO: 59302 - DNA, 80 bp, synthetic construct
  source 1..80: mol_type = other DNA
atcaatttagagaagactatatgggcatttgccttttcgcaatggggggcgttctactggcagtctctttgctggttaag

SEQ ID NO: 59303 - DNA, 80 bp, synthetic construct
  source 1..80: mol_type = other DNA
gggctgattgacagcattagcagtactttcttccctgggttatctatttgcagaacatgccatattggcagcataaatgg

SEQ ID NO: 59304 - DNA, 80 bp, synthetic construct
  source 1..80: mol_type = other DNA
ttttgagattgagtctcataagtgctactgtagcctactttgctgtccttactgtagagcttgctcgactgaccaggaag

SEQ ID NO: 59305 - DNA, 80 bp, synthetic construct
  source 1..80: mol_type = other DNA
cccatcaattccatctgagtgtctgcaagaggagaaagacaggaagcaatgtcatgttggctgtctgtaagcgcatgtgc

SEQ ID NO: 59306 - DNA, 80 bp, synthetic construct
  source 1..80: mol_type = other DNA
ttcaaggcagccatcgaagctggcaacagagtcttgttaatcaggaatatcataaacaccacttttgttatgtgcatact

SEQ ID NO: 59307 - DNA, 80 bp, synthetic construct
  source 1..80: mol_type = other DNA
tgtgatggtagtctgcataaccagttcgactgctgtagagatggaaaaccttccagcaggcacctgggaaagggaagaag

SEQ ID NO: 59308 - DNA, 80 bp, synthetic construct
  source 1..80: mol_type = other DNA
aactcacaaacttctgtcatcaagagtgccaagtgacagaaactgaatgcctctgcccttatgaatcctacatacttagg

SEQ ID NO: 59309 - DNA, 80 bp, synthetic construct
  source 1..80: mol_type = other DNA
tggtgagtcttccacactctccgctgtggcctctaccccggccacagtaaccggccatgccagttggagaccaacctcga

SEQ ID NO: 59310 - DNA, 80 bp, synthetic construct
  source 1..80: mol_type = other DNA
tcttcctagacagcatagccaaaggtgttaagaacctcttaaactcaacaagcttggagaccagcctgtcgattgaagca

SEQ ID NO: 59311 - DNA, 80 bp, synthetic construct
  source 1..80: mol_type = other DNA
ccatggggagctatcaatgctcaatcaacttataaaccaactacatcaagtgctaatattgctctcacctggagctcggt

SEQ ID NO: 59312 - DNA, 80 bp, synthetic construct
  source 1..80: mol_type = other DNA
ggaacacagaggaaacaagatcttggtctcaggtgggtctgaatcaatcatgaaactcgaagagagaacaggaatgagct

SEQ ID NO: 59313 - DNA, 80 bp, synthetic construct
  source 1..80: mol_type = other DNA
ggaaagttgagtacatcaagacagaagccatagtgtgcgttgaactcaccagccaagaaaggcagtgcagtctgattgaa

SEQ ID NO: 59314 - DNA, 80 bp, synthetic construct
  source 1..80: mol_type = other DNA
gatttagtttagggccagtgactattaccttgtctgagccaaggaacatccagcaaaaacttcctcctgaactggtcaca

SEQ ID NO: 59315 - DNA, 80 bp, synthetic construct
  source 1..80: mol_type = other DNA
ctacatccaaagatagaagaagggtactttgacctaatgcatgttcagaaggtcatgtccgctagcacagtatgcaagtt

SEQ ID NO: 59316 - DNA, 80 bp, synthetic construct
  source 1..80: mol_type = other DNA
ctgtgaatgcatacaccacgagtctggagatcactacaccaacaattctgtctgataaaggcaccccaacgctacagtcc

SEQ ID NO: 59317 - DNA, 80 bp, synthetic construct
  source 1..80: mol_type = other DNA
gcaaagctgcacacacggtgtgccgggagacctacaaatttatcatgttggcaatctgttgaaaggagacagagtgaatg

SEQ ID NO: 59318 - DNA, 80 bp, synthetic construct
  source 1..80: mol_type = other DNA
gagtgacagctcatggagacacaccacagttggacttgaaggcaaggcccaggtacggtgcaggcgaaatcactgtcctg

SEQ ID NO: 59319 - DNA, 80 bp, synthetic construct
  source 1..80: mol_type = other DNA
agataacaggcctgaaattcgcaagcttaacttgctcaggatgctacgcctgtagttcgggcatctcctgtaaggttagg

SEQ ID NO: 59320 - DNA, 80 bp, synthetic construct
  source 1..80: mol_type = other DNA
atacatgtggatgagccagacgaactcactgtgcatgtaaaaagcagcgacccagatattgtggcagctggctccagtct

SEQ ID NO: 59321 - DNA, 80 bp, synthetic construct
  source 1..80: mol_type = other DNA
catggcaaggaagatcgagtttggggttgacagtactttcaaggccttttcttctatgcccaaagattccttatgctttt

SEQ ID NO: 59322 - DNA, 80 bp, synthetic construct
  source 1..80: mol_type = other DNA
acattgtcgagagagactactgcaacagctgcaatagagaggatacacagaggtgtgtgaacgcaaagcttgaacaacca

SEQ ID NO: 59323 - DNA, 80 bp, synthetic construct
  source 1..80: mol_type = other DNA
caaacaagtctatctagcaaaaccaacaggccctcaacaccacgtagcacacatcagcctctgagaaagcttctctccgc

SEQ ID NO: 59324 - DNA, 80 bp, synthetic construct
  source 1..80: mol_type = other DNA
gctagactcatttaaaagttttttttatggtctgaagaatatgttaagcggcatttttggcaatgttattctaggcattc

SEQ ID NO: 59325 - DNA, 80 bp, synthetic construct
  source 1..80: mol_type = other DNA
tcctgttccttgccccttttgctctgctgcttctcttcttcttttttggatggagaattctgttttgttttaaatgctgt

SEQ ID NO: 59326 - DNA, 80 bp, synthetic construct
  source 1..80: mol_type = other DNA
agaagaaccaggggcctgttcaaatacagacacatcaaggatgatgaggaggttggctacaagaaaatcatcgaaagact

SEQ ID NO: 59327 - DNA, 80 bp, synthetic construct
  source 1..80: mol_type = other DNA
gaacagtaaaaaaggcaaacataggctgtttgatggcgagagacttgcagataggaagatcgctgagcttttctcaacaa

SEQ ID NO: 59328 - DNA, 80 bp, synthetic construct
  source 1..80: mol_type = other DNA
agacacacattggataacgaagtcggcagagcctcattatctgtgcgaaacaatgactccaccaatcccccctctccaca

SEQ ID NO: 59329 - DNA, 80 bp, synthetic construct
  source 1..80: mol_type = other DNA
ccctgtagatcatgcatcaatcatcataagagaacacagcaaatagtctgctagtgtgcaattccgccgaacagcatcat

SEQ ID NO: 59330 - DNA, 80 bp, synthetic construct
  source 1..80: mol_type = other DNA
ccccccctggcaaacctatgtctacaagaatcaacaaagcagaataccgcaccgcatgacactgcttcagcttacatcca

SEQ ID NO: 59331 - DNA, 80 bp, synthetic construct
  source 1..80: mol_type = other DNA
agaatcaacaaagcagaataccgcaccgcatgacactgcttcagcttacatccacttgttgaaacctttgactgcgtgcc

SEQ ID NO: 59332 - DNA, 80 bp, synthetic construct
  source 1..80: mol_type = other DNA
agcaagcaccgaaacggtatcccagaccttgccaacagcagtctcaacagaagggaccgaaacctctgccagcccacaag

SEQ ID NO: 59333 - DNA, 80 bp, synthetic construct
  source 1..80: mol_type = other DNA
ccaccaccgacacccctacagcagccccaactcaaaccacatccccagtagacagcagtccacacagcacaccaaaccac

SEQ ID NO: 59334 - DNA, 80 bp, synthetic construct
  source 1..80: mol_type = other DNA
accaaaacaacaccccagccaacatccccaagccccgaggcccaacaaacccagcccaccaccatgccaagcaccacagc

SEQ ID NO: 59335 - DNA, 80 bp, synthetic construct
  source 1..80: mol_type = other DNA
ggatcatttcatgtttctgttgctaatttgtactgttttacataaatccccacagggtgtcagtgcaaacacccacctag

SEQ ID NO: 59336 - DNA, 80 bp, synthetic construct
  source 1..80: mol_type = other DNA
cttggcaattccaaccacacacatcagcccgacaaatagatctaagaggaactctgaggtggaaataattctgacactcc

SEQ ID NO: 59337 - DNA, 80 bp, synthetic construct
  source 1..80: mol_type = other DNA
aggactctgaaggtctactggaatggtgcacaagaacgctaaagcaaacctgcgatgatagctatttccaagaaagaata

SEQ ID NO: 59338 - DNA, 80 bp, synthetic construct
  source 1..80: mol_type = other DNA
gtcagtacgtaagtgttaactttgaggaagtgggttgagcatcttaattgcagcatacctgtcaacatcatgcatacatc

SEQ ID NO: 59339 - DNA, 80 bp, synthetic construct
  source 1..80: mol_type = other DNA
cttccttcgctctgtttgctttgacctaaatcttgactgcgtgccgccactatatctttctgcaagccaggaagagtcgt

SEQ ID NO: 59340 - DNA, 80 bp, synthetic construct
  source 1..80: mol_type = other DNA
tatctttctgcaagccaggaagagtcgtcacgagaaccagaccatgcaggaactctgatcgtggacatttcaacctccag

SEQ ID NO: 59341 - DNA, 80 bp, synthetic construct
  source 1..80: mol_type = other DNA
agcagactatcaacccctcccacaacagaccagggacccactaaaaacaacaaccacaactccaccgaacagcttgagtc

SEQ ID NO: 59342 - DNA, 80 bp, synthetic construct
  source 1..80: mol_type = other DNA
tttgatatatgtagttctctgcttgcagctgtgtagtctagggaaaactcacggatcacataatggaactgaacacaata

SEQ ID NO: 59343 - DNA, 80 bp, synthetic construct
  source 1..80: mol_type = other DNA
caactcaacattgttccttctgtacatcctgaagtgtgtgtgctttatgctgatgaccatcaatctgatgctaataagtt

SEQ ID NO: 59344 - DNA, 80 bp, synthetic construct
  source 1..80: mol_type = other DNA
tctcaaagaaatacttgcggcacgtcagtacgtaagtatcaactttgagggtgctagtggagtgttcagcagtcaacatg

SEQ ID NO: 59345 - DNA, 80 bp, synthetic construct
  source 1..80: mol_type = other DNA
ggtgttggttattttaatgaggttctgctattcaaagaaacgactgatgcacccacattagcaccaactcacaaaggagc

SEQ ID NO: 59346 - DNA, 80 bp, synthetic construct
  source 1..80: mol_type = other DNA
accaccaactgagccttttaagtcttactatgctaagggattcatcacaatggattcgggctacttttctgctaaatgct

SEQ ID NO: 59347 - DNA, 80 bp, synthetic construct
  source 1..80: mol_type = other DNA
attcaagagcatcaaactcagggttgcaactaatcaacgtaacaatgcattcatctaagatgcccattactccaggccca

SEQ ID NO: 59348 - DNA, 80 bp, synthetic construct
  source 1..80: mol_type = other DNA
aagtactccaatctcaagaacattaactgtataaacctaaaagtgtcaactgataaagaacacaatgaagttgagataaa

SEQ ID NO: 59349 - DNA, 80 bp, synthetic construct
  source 1..80: mol_type = other DNA
tgtgcttcttccccaagttgcagtaaatctctcaagctgtcatgtcctggttagatcacatgtctgtgactactcccttg

SEQ ID NO: 59350 - DNA, 80 bp, synthetic construct
  source 1..80: mol_type = other DNA
atgcagatggaatgataaagcttccccagataactcacgagggaacttttatacctggaacttataagatcataatagac

SEQ ID NO: 59351 - DNA, 80 bp, synthetic construct
  source 1..80: mol_type = other DNA
aaaaagaacaaacaaaatgacagatgtactttgatcaccaactgcgtcataaagggaagagaggtcaggaaggggcagtc

SEQ ID NO: 59352 - DNA, 80 bp, synthetic construct
  source 1..80: mol_type = other DNA
tatcagccctacaactaacaaatcccacacagacatatcccatcagccaacatccatcaccgcagcctccagccccgggt

SEQ ID NO: 59353 - DNA, 80 bp, synthetic construct
  source 1..80: mol_type = other DNA
ggctctcagacagtataagacagagataagagtgggtcaggcatcttctggcactagaagattgttatcagaaagcaaca

SEQ ID NO: 59354 - DNA, 80 bp, synthetic construct
  source 1..80: mol_type = other DNA
acaatgattgcgtatcaaggactcagctgatcaagacagaaaatgctgaaatacatggtgatgactatggcgggcccgga

SEQ ID NO: 59355 - DNA, 80 bp, synthetic construct
  source 1..80: mol_type = other DNA
gagaaaataaccatctgcaacggctctactattgtagaacaaagattaggcagcgaattaggatgctacactatcaacag

SEQ ID NO: 59356 - DNA, 80 bp, synthetic construct
  source 1..80: mol_type = other DNA
tcaaactatgcgaaaatagtgcttcaggaaagggttgtgaaattgacagtactccagtaaaatgtaagcaaggcttctgt

SEQ ID NO: 59357 - DNA, 80 bp, synthetic construct
  source 1..80: mol_type = other DNA
ttgaaaataacccaagaaggaaggggtcatgttaaactttccagaggctcagagataattctagacgtttgcgactcaag

SEQ ID NO: 59358 - DNA, 80 bp, synthetic construct
  source 1..80: mol_type = other DNA
ctgtgaaatgatgataccaaaagggtctggtgatatcctggtagattgctctggaggacagcagcacttcctacaggaca

SEQ ID NO: 59359 - DNA, 80 bp, synthetic construct
  source 1..80: mol_type = other DNA
acttggtcgacttaggatgcccaaacgttcccctactgggcaaaatggccatatacatctgcagaatgtcaaaccacccc

SEQ ID NO: 59360 - DNA, 80 bp, synthetic construct
  source 1..80: mol_type = other DNA
cgcccgccaccaccgcgccgcccgaaagatcagtcacaccctcacacactccaaccacctcagtctccgaagccggctcc

SEQ ID NO: 59361 - DNA, 80 bp, synthetic construct
  source 1..80: mol_type = other DNA
aaggtctggttaggcatgtgactcagtgtcctaagaggaaggaaaagatagaggaaacagagctgtacttaaatttggaa

SEQ ID NO: 59362 - DNA, 80 bp, synthetic construct
  source 1..80: mol_type = other DNA
aggataccctggtttgtcagaaagctcttgcaggtatcagaatcaacaggggtagcgctcaagagaagcagctggctggt

SEQ ID NO: 59363 - DNA, 80 bp, synthetic construct
  source 1..80: mol_type = other DNA
gacacttcttgtgttgctaacagtatctttgtcgcctgtgcaatcagcacccattggtcaggaaagaacggtagtaacgt

SEQ ID NO: 59364 - DNA, 80 bp, synthetic construct
  source 1..80: mol_type = other DNA
accaagtcagagaaagttacacaggcatgtgtcttttcatcctaggtagtgtcctttttgcaatctcctggttgacaaag

SEQ ID NO: 59365 - DNA, 80 bp, synthetic construct
  source 1..80: mol_type = other DNA
ggactggtagacagtgttggtaacattttctttcctggactttcagtttgtaaaacatgttccatcggcagcataaatgg

SEQ ID NO: 59366 - DNA, 80 bp, synthetic construct
  source 1..80: mol_type = other DNA
gaatcccacaaatgctattgtagccttttctgctgcccttactgtagatactgctcggccgacagaggtgctcaccagtc

SEQ ID NO: 59367 - DNA, 80 bp, synthetic construct
  source 1..80: mol_type = other DNA
tcatttgagtgtttgtaaaaagaggaaaactggaagcaatgtcatgttagctgtctgcaagcgcatgtgttttagagcta

SEQ ID NO: 59368 - DNA, 80 bp, synthetic construct
  source 1..80: mol_type = other DNA
ctttaaaggtgagcagtgaggctttgattatcaggagcattataaacactacttttgttgtgtgcattctaatattagtt

SEQ ID NO: 59369 - DNA, 80 bp, synthetic construct
  source 1..80: mol_type = other DNA
gtctgtgttgttagcacctcagccgtagagatggagaacttgccagcaggtacttgggagaaggaagaggacctaacaaa

SEQ ID NO: 59370 - DNA, 80 bp, synthetic construct
  source 1..80: mol_type = other DNA
ggagagccccctgcggcaactcctgcctcagccaccgcccagagcccagagccagcaagcgcagcccaaccatcaccaac

SEQ ID NO: 59371 - DNA, 80 bp, synthetic construct
  source 1..80: mol_type = other DNA
tttataaaaactgaagccatagtgtgtgttgaactcacaagccaggaaaggcaatgcagtcttatagaagcaggcacaag

SEQ ID NO: 59372 - DNA, 80 bp, synthetic construct
  source 1..80: mol_type = other DNA
atttaacttgggccctgttaccatcactttatcagaaccaagaaacattcagcagaagctccctcctgaactggttacgc

SEQ ID NO: 59373 - DNA, 80 bp, synthetic construct
  source 1..80: mol_type = other DNA
tgcatccaagagtagaagaaggcttcttcgaccttatgcatgtgcagaaagtgctttctgcaagcactgtgtgtaaattg

SEQ ID NO: 59374 - DNA, 80 bp, synthetic construct
  source 1..80: mol_type = other DNA
cataccgaaaccaaccacacccgacccgaccagcgaagccctaagcacccccgccaccagcagaccccaagagccaagca

SEQ ID NO: 59375 - DNA, 80 bp, synthetic construct
  source 1..80: mol_type = other DNA
cagagctgcacgcatggtgtaccaggtgacttgcaagtgtatcatgtaggcaacttgctgaaaggggataaaataaatgg

SEQ ID NO: 59376 - DNA, 80 bp, synthetic construct
  source 1..80: mol_type = other DNA
caactcatttcacaaaattgagccgaacctaaatacatcatggatgtcttgggacggctgtgatcttgattactactgca

SEQ ID NO: 59377 - DNA, 80 bp, synthetic construct
  source 1..80: mol_type = other DNA
agatatcaggtttgaaatttgctagcctgacctgcacgggctgctatgcttgtagctcaggtatctcctgcaaggttagg

SEQ ID NO: 59378 - DNA, 80 bp, synthetic construct
  source 1..80: mol_type = other DNA
cttcatgtagatgagccagatgagctcacggtacacgtgaagagtgatgatccggatgtagttgcagccagctcaagcct

SEQ ID NO: 59379 - DNA, 80 bp, synthetic construct
  source 1..80: mol_type = other DNA
tgatggccagaaaaattgaatttggaactgatagcacatttaaagctttctcgtccatgcctaaggataaactctgcttt

SEQ ID NO: 59380 - DNA, 80 bp, synthetic construct
  source 1..80: mol_type = other DNA
tacattgtggaaagagactactgcagcagttgcagcaaagaggacacacaaaagtgtgtaaatgcaaaacttgagcagcc

SEQ ID NO: 59381 - DNA, 80 bp, synthetic construct
  source 1..80: mol_type = other DNA
tcagagtatacttattgaacataaaggcaccataattgggaagcaaaatgacacttgtacagtcaaggcgagctgttggt

SEQ ID NO: 59382 - DNA, 80 bp, synthetic construct
  source 1..80: mol_type = other DNA
cccatccaagccccaggagcagcccaagcaagcctgtagagactcaaagcacacgccacactgcaagagagctcctctca

SEQ ID NO: 59383 - DNA, 80 bp, synthetic construct
  source 1..80: mol_type = other DNA
tggaatcggtaaaaagttttttttatggactaaaaaacatgttgggtggtatcttcggcaacgttatcttgggcatcatc

SEQ ID NO: 59384 - DNA, 80 bp, synthetic construct
  source 1..80: mol_type = other DNA
atgttccttgctccttttgccttgttactgctcttcttccttttcggatggagaattctgttctgccttagatgctgcag

SEQ ID NO: 59385 - DNA, 80 bp, synthetic construct
  source 1..80: mol_type = other DNA
aaggactagggggctatttaagtacaaacacatcaaagatgatgaagaatcaggctacaaaaggattattgaaaggttaa

SEQ ID NO: 59386 - DNA, 80 bp, synthetic construct
  source 1..80: mol_type = other DNA
ataacaagaaaggtaagaacaagttatttgacggcgagagattggcagacaagaaaattgctgaactattctcaacgaag

SEQ ID NO: 59387 - DNA, 80 bp, synthetic construct
  source 1..80: mol_type = other DNA
acacacattggctaatacagactagacttaacagggcgcaacagcagcaaaccccttccccgtcgcactactaaatcaac

SEQ ID NO: 59388 - DNA, 80 bp, synthetic construct
  source 1..80: mol_type = other DNA
tgggcaaccacacactctttgccagggctgccccatgttcacacataatcttgacaacacccgtattaacagtatatata

SEQ ID NO: 59389 - DNA, 80 bp, synthetic construct
  source 1..80: mol_type = other DNA
taaccagtgtatagcgtttcacagtatgtgttctcttcctccacactgcagcgtatgtgacactgtttccatttagatct

SEQ ID NO: 59390 - DNA, 80 bp, synthetic construct
  source 1..80: mol_type = other DNA
cacactgcagcgtatgtgacactgtttccatttagatcttgacctaactttgactgcgtgccgccactatatctttgaga

SEQ ID NO: 59391 - DNA, 80 bp, synthetic construct
  source 1..80: mol_type = other DNA
gtaacaggcacggaggcagaacagctcatcacacagacaattcacacgacaaaagaggccacaaaagccaccagccccca

SEQ ID NO: 59392 - DNA, 80 bp, synthetic construct
  source 1..80: mol_type = other DNA
gccgaccgccagcaaccccgaccccacactggcaacaaccagccgctccatcaacagcattaaccccaaggggccagagt

SEQ ID NO: 59393 - DNA, 80 bp, synthetic construct
  source 1..80: mol_type = other DNA
caaccagagccacaccccaatccacatccccaacacccgagagttcaacaattcagactcaaattctgccaatcattacc

SEQ ID NO: 59394 - DNA, 80 bp, synthetic construct
  source 1..80: mol_type = other DNA
ttgtgtcatatcaaacacatattattgttttgcattatcctttatcatcaacaatggaacacaggagcttccaatacaac

SEQ ID NO: 59395 - DNA, 80 bp, synthetic construct
  source 1..80: mol_type = other DNA
accccaggcactctggaggcaattattcatccaacaaatagatccaaaagaaaccttggtactgagataatcctgactct

SEQ ID NO: 59396 - DNA, 80 bp, synthetic construct
  source 1..80: mol_type = other DNA
cccacaaggtctcaagaaatactacagtaaagtgcttaagctgatgcacctcaccagggaagaagactccgagggtctgc

SEQ ID NO: 59397 - DNA, 80 bp, synthetic construct
  source 1..80: mol_type = other DNA
ttgagtggtgtacacggatcttgggacaaacctgtgatgatgattactttcaaaagagaataactgaattcttcataaca

SEQ ID NO: 59398 - DNA, 80 bp, synthetic construct
  source 1..80: mol_type = other DNA
tgaagattacgttttggatgattcagatagtgatgacggtaaatgtaagaattgtaaatataagaaaaaatatttcgcac

SEQ ID NO: 59399 - DNA, 80 bp, synthetic construct
  source 1..80: mol_type = other DNA
aaattcacaaaattacggcattaatttaccgataacaggatcaatggatacgaactaccaaaacgtgtctagtcctgaac

SEQ ID NO: 59400 - DNA, 80 bp, synthetic construct
  source 1..80: mol_type = other DNA
ttatcgcaattattcctaacaaaaggatggccaactggttctgtctatcttaaaagttacacagatattgcaactttttc

SEQ ID NO: 59401 - DNA, 80 bp, synthetic construct
  source 1..80: mol_type = other DNA
aataaatccgcaattatactgtgactataacattgtactaatgaagtataatgctaattcagaactagatatgtcagagt

SEQ ID NO: 59402 - DNA, 80 bp, synthetic construct
  source 1..80: mol_type = other DNA
aattaaggtatgtccattgaacacgcagacattaggaatcggatgcctcaccacagacactacaactttcgaagaggttg

SEQ ID NO: 59403 - DNA, 80 bp, synthetic construct
  source 1..80: mol_type = other DNA
taggaatcggatgcctcaccacagacactacaactttcgaagaggttgcaacagctgaaaaattggcgataacagatgtt

SEQ ID NO: 59404 - DNA, 80 bp, synthetic construct
  source 1..80: mol_type = other DNA
catttctaacatcaacactatgcttgtattatccaatagaagcagagacagaaatagcagatagttcatggaaggatact

SEQ ID NO: 59405 - DNA, 80 bp, synthetic construct
  source 1..80: mol_type = other DNA
ttcgtcatgctgccatttattaaagctcaaaatcatctaataaatcttccaataacaggttctatggataccgcatatac

SEQ ID NO: 59406 - DNA, 80 bp, synthetic construct
  source 1..80: mol_type = other DNA
tcccttaaatacgcaaactttaggaattggatgtacaacaaccgacgtcacaacatttgaagaggtagcaaacgcggaaa

SEQ ID NO: 59407 - DNA, 80 bp, synthetic construct
  source 1..80: mol_type = other DNA
cggttagctccttttgatgtatggtattgaatataccacattcctaatctacttaatatcgattatattatttaattaca

SEQ ID NO: 59408 - DNA, 80 bp, synthetic construct
  source 1..80: mol_type = other DNA
aacgcacaaaattacgggattaatttgcctataactgggtcgatggatatgtcatatgtgaacattactaaagatgaacc

SEQ ID NO: 59409 - DNA, 80 bp, synthetic construct
  source 1..80: mol_type = other DNA
atttctaacgtcaacattatgtttgtactatcctacagaggctagaacagagatacatgataatgagtggatacgtacgt

SEQ ID NO: 59410 - DNA, 80 bp, synthetic construct
  source 1..80: mol_type = other DNA
tatcgcagttgttcttaacgaagggatggccaactggatctgtatactttaaagaatacgatgatatagctgctttttca

SEQ ID NO: 59411 - DNA, 80 bp, synthetic construct
  source 1..80: mol_type = other DNA
gtggatcctcaattgtattgtgactataacatagttttaatgaaatacaattcaactctagaacttgatatgtcagaatt

SEQ ID NO: 59412 - DNA, 80 bp, synthetic construct
  source 1..80: mol_type = other DNA
ttgatatgtcagaattagcgaatttaatattaaatgaatggctgtgcaatccaatggacgttacattatattattatcag

SEQ ID NO: 59413 - DNA, 80 bp, synthetic construct
  source 1..80: mol_type = other DNA
tattaaagagtataactagaatgatggactatataatttataaatttttgattatagtcacaatcttttcaattattgtt

SEQ ID NO: 59414 - DNA, 80 bp, synthetic construct
  source 1..80: mol_type = other DNA
cttccttcgctctgtttgctttgacctaaatcttgactgcgtgccgccactatatcttctttctcgactccatcttcgcg

SEQ ID NO: 59415 - DNA, 80 bp, synthetic construct
  source 1..80: mol_type = other DNA
ttctttctcgactccatcttcgcggtagctgggaccgccgttcagtcgccaatatgcagctctttgtccgcgcccaggag

SEQ ID NO: 59416 - DNA, 80 bp, synthetic construct
  source 1..80: mol_type = other DNA
attgtgattacaatattgtgttaatacagtaccaaaattcactagcgttagatgtctcagaacttgctgatttaatttta

SEQ ID NO: 59417 - DNA, 80 bp, synthetic construct
  source 1..80: mol_type = other DNA
aagtgcaggacaacatcactcttcacgaacaacagctcgtgacagctaggcaaaagctcaaagatgcagaaagagcagtg

SEQ ID NO: 59418 - DNA, 80 bp, synthetic construct
  source 1..80: mol_type = other DNA
ctgccttcgctctgtttgctttgacctaaatcttgactgcgtgccgccactaggttactgcacatggagacacaccacaa

SEQ ID NO: 59419 - DNA, 80 bp, synthetic construct
  source 1..80: mol_type = other DNA
aactagatctgaaggcaaggccaacctatggtgcgggtgagatcaccgtgctggtggaagttgctgacatggaattacac

SEQ ID NO: 59420 - DNA, 80 bp, synthetic construct
  source 1..80: mol_type = other DNA
atggtccatgctgattctaaacttgtttcgtgcaagcaagggagcggaaatatgaaggaatgtgtcacaactgggagggc

SEQ ID NO: 59421 - DNA, 80 bp, synthetic construct
  source 1..80: mol_type = other DNA
gtttctccatgtgctgcatgggtcccatcagcagtcatagagctaacaatgccctcaggggaagtgaggacattccaccc

SEQ ID NO: 59422 - DNA, 80 bp, synthetic construct
  source 1..80: mol_type = other DNA
cggcaacgatatcttaaagaaatacttgcggcacgtcagtacgtaagtgttaactttgaggaagtgggttgagcatctta

SEQ ID NO: 59423 - DNA, 80 bp, synthetic construct
  source 1..80: mol_type = other DNA
ctatttactctagcctaaaccttgactgcgtgccgccactatatcttctgtggtcgctgtctgggtcccttccgcggtac

SEQ ID NO: 59424 - DNA, 80 bp, synthetic construct
  source 1..80: mol_type = other DNA
tcttgcctggaagctgcttcctaggctccgggcgcggacaccatgtacggtttcgtgaaccatgccctggagctgctggt

SEQ ID NO: 59425 - DNA, 80 bp, synthetic construct
  source 1..80: mol_type = other DNA
ggtttaagtcatatcagtggtctctttgagcctgagattatcgtggatcaatatgagtacaagtaccctgctatcaaaga

SEQ ID NO: 59426 - DNA, 80 bp, synthetic construct
  source 1..80: mol_type = other DNA
tagggacatgtccagactggaccagctacgggatcttgatcgcaagaaaaggagagatcaccccggattctcttgtggag

SEQ ID NO: 59427 - DNA, 80 bp, synthetic construct
  source 1..80: mol_type = other DNA
agatcttcgagacagccccttttataatcgtggaacaccatactctgatgacaactcacaaatggggcttaattgggaga

SEQ ID NO: 59428 - DNA, 80 bp, synthetic construct
  source 1..80: mol_type = other DNA
tctgcattttatcaatcctacttgaggcgaactcagtcaatgggaatccaactggatcagaaaataattatcttatacat

SEQ ID NO: 59429 - DNA, 80 bp, synthetic construct
  source 1..80: mol_type = other DNA
tcagcattctaccagtcatacttaagacgtactcagtcaatggggattcaactggaccagaagataatcatcttatacat

SEQ ID NO: 59430 - DNA, 80 bp, synthetic construct
  source 1..80: mol_type = other DNA
gagcagatcttcgagacagccccttttattaaaatcgtggaacaccatactctgatgacaactcacaaaatgttgggcta

SEQ ID NO: 59431 - DNA, 80 bp, synthetic construct
  source 1..80: mol_type = other DNA
cagaagaatataaaaacgctagatgaatgggagaacggaaaaaatccatatgaaccgatagaagtgactgcatctatgtg

SEQ ID NO: 59432 - DNA, 80 bp, synthetic construct
  source 1..80: mol_type = other DNA
gggcgattaggcttcctcacattcattatgagggaacttttattccaggaacttataagatagtgatagataggaaaaat

SEQ ID NO: 59433 - DNA, 80 bp, synthetic construct
  source 1..80: mol_type = other DNA
aagctgaatgataggtgcactctattcaccaactgtgtgataaaaggaagagaagttcgtaaaggccagtcagtcctaag

SEQ ID NO: 59434 - DNA, 80 bp, synthetic construct
  source 1..80: mol_type = other DNA
acagatcagaaaatggaactgaacacaacaaaacaatcaccatggcaacgcctggtgatagccagagccctgaactacca

SEQ ID NO: 59435 - DNA, 80 bp, synthetic construct
  source 1..80: mol_type = other DNA
ttaagctgtgcgaaaatagtgccacagagaagagctgtgaaatagacagtattccagttaagtgtaagcagggttactgt

SEQ ID NO: 59436 - DNA, 80 bp, synthetic construct
  source 1..80: mol_type = other DNA
gtgagcacggctctgcctgtcacactagacccctccactgtcacacctacagcaccagccagcagatttgaaggctcagg

SEQ ID NO: 59437 - DNA, 80 bp, synthetic construct
  source 1..80: mol_type = other DNA
accaggttagggaggaatacacaagtatttgtctctttgtactgggaagtatcttgtttatagtctcttgtttaatgaaa

SEQ ID NO: 59438 - DNA, 80 bp, synthetic construct
  source 1..80: mol_type = other DNA
ggactggtcgacagtgttggcaacatcttctttcctgggctgtccatttgcaagacatgctctataggtagcattaatgg

SEQ ID NO: 59439 - DNA, 80 bp, synthetic construct
  source 1..80: mol_type = other DNA
ggaagttcatacatcttccctaatcaccaccaaaggcttgtctctgcaggaggctacgtctgagctccttgcgactaccg

SEQ ID NO: 59440 - DNA, 80 bp, synthetic construct
  source 1..80: mol_type = other DNA
gcatagttacttcaagtgcaattgatatcgattctagcacacaggcagcagaagacaaccccacaccaacagtccgcaca

SEQ ID NO: 59441 - DNA, 80 bp, synthetic construct
  source 1..80: mol_type = other DNA
agtccgcccgacagccccaacacaccatccacatcacaggacacacaccatcctgtgaggaatctactttcagtcacgag

SEQ ID NO: 59442 - DNA, 80 bp, synthetic construct
  source 1..80: mol_type = other DNA
aacacacattggctagatcagccgaggaggcctggggggggtggtggccctgagttgaccggtgttgccattcatgctgt

SEQ ID NO: 59443 - DNA, 80 bp, synthetic construct
  source 1..80: mol_type = other DNA
ctagatcagccgaggaggcctggggggggtggtggccctgagttgaccggtgttgccattcatgctgtccgccccagctg

SEQ ID NO: 59444 - DNA, 80 bp, synthetic construct
  source 1..80: mol_type = other DNA
catccccaccacaccaccatcacagcatgtcacatccaagctgccccgttatatctacaaacaggccctgtaatgcttga

SEQ ID NO: 59445 - DNA, 80 bp, synthetic construct
  source 1..80: mol_type = other DNA
aactaccttcgctctacttgctttagcctaaattttgactgcgtgccgccactatatcttgccagccggcgccattttga

SEQ ID NO: 59446 - DNA, 80 bp, synthetic construct
  source 1..80: mol_type = other DNA
aagtggagtcgcctacccctgccgctgccgccgccgccgtcgctgtcgtagccgccgctgccgctgccggagaaagagca

SEQ ID NO: 59447 - DNA, 80 bp, synthetic construct
  source 1..80: mol_type = other DNA
gccgccgctgccgctgccggagaaagagcacgagcggggaagccccagagtgaaatctagcatcctgccggctggtctgc

SEQ ID NO: 59448 - DNA, 80 bp, synthetic construct
  source 1..80: mol_type = other DNA
gccctaagccagaagaaacaccaacaccgtcaaagtcaggcaaagacagctcagcaaccgacagccctcacccagccacc

SEQ ID NO: 59449 - DNA, 80 bp, synthetic construct
  source 1..80: mol_type = other DNA
agcagaccatcaaccccccccacaacagcccagggacccactgaagacaacagccacaacaccaccagacagcctgagtc

SEQ ID NO: 59450 - DNA, 80 bp, synthetic construct
  source 1..80: mol_type = other DNA
cttaacacaattagcaactacagactcaatgatccctccaacacagacagtcctcccacagagtgccacctctatagtca

SEQ ID NO: 59451 - DNA, 80 bp, synthetic construct
  source 1..80: mol_type = other DNA
ttcaagacacacatcccagcccaacgaataggtctaaaagaaaccttgaaatggaaataatcttgacgttacctcaaggt

SEQ ID NO: 59452 - DNA, 80 bp, synthetic construct
  source 1..80: mol_type = other DNA
cttgaaaactccatggggggtttgaactttggccgatcttactttgatccagcatatttcagattagggcaagagatggt

SEQ ID NO: 59453 - DNA, 80 bp, synthetic construct
  source 1..80: mol_type = other DNA
agattgcaatgcatactactgaggacaggatcagtagagcggttggacccagacaagcccaggtgtcatttctacacggt

SEQ ID NO: 59454 - DNA, 80 bp, synthetic construct
  source 1..80: mol_type = other DNA
gatcaaagtgagaatgagctaccaggattgggaggcaaggaagataggagggtcaaacagagtcgaggagaagccatgga

SEQ ID NO: 59455 - DNA, 80 bp, synthetic construct
  source 1..80: mol_type = other DNA
gagccacagagaaaccgggtccagcagaacaagtgatgtgagagctgtccatcttccaaccagcacacccctagacattg

SEQ ID NO: 59456 - DNA, 80 bp, synthetic construct
  source 1..80: mol_type = other DNA
acactgcatcggagtcaagtcgagatccgcaggacagtcgaaggtcagctgaagccctactcaggctgcaagccatggca

SEQ ID NO: 59457 - DNA, 80 bp, synthetic construct
  source 1..80: mol_type = other DNA
ccatggcaggaatctcggaagaacaaggctcagacacggacacccctagagtgtacaatgacagagatctactagactag

SEQ ID NO: 59458 - DNA, 80 bp, synthetic construct
  source 1..80: mol_type = other DNA
aaggaggtcagctggaaaggtcagttccacattagcatctgaactcggtatcactgccgaggatgcaaggcttgtttcag

SEQ ID NO: 59459 - DNA, 80 bp, synthetic construct
  source 1..80: mol_type = other DNA
tatactctaatgagttagactttcaaaattttctgttgagaaaaattaaagagagaatgaccacatctcttccaattgct

SEQ ID NO: 59460 - DNA, 80 bp, synthetic construct
  source 1..80: mol_type = other DNA
aacaacgttgaagtggagtttctactaaacggtcaaataataaacacttaccaggctagatttggaacaatcgtagctag

SEQ ID NO: 59461 - DNA, 80 bp, synthetic construct
  source 1..80: mol_type = other DNA
tttgagatgcgcacttccgtcacaggatccagatctatgatccctaatgaggaaaatgacacccatgggcctggtgatga

SEQ ID NO: 59462 - DNA, 80 bp, synthetic construct
  source 1..80: mol_type = other DNA
gcagcgcgctgcgcgcgcgcatgatctaatcgccggcagacatattggattccaagatggcgtctgtacaaccacgtcac

SEQ ID NO: 59463 - DNA, 80 bp, synthetic construct
  source 1..80: mol_type = other DNA
ggattgggcagaacgaattacagaatttatggaaaaagagtgcccctttatcagacctgaaattaagccagggacaccag

SEQ ID NO: 59464 - DNA, 80 bp, synthetic construct
  source 1..80: mol_type = other DNA
cacaggaggcagagtttttgaaaagaaacaaagtttattttatgcaacggcaagaagtactagataagaaccatgtggct

SEQ ID NO: 59465 - DNA, 80 bp, synthetic construct
  source 1..80: mol_type = other DNA
ctgatattgataagttaattgattatgcagcctcaggagaccccacatcgcccgataacatcgagtcccctaatgctcca

SEQ ID NO: 59466 - DNA, 80 bp, synthetic construct
  source 1..80: mol_type = other DNA
ggtgttgttagagtcttcttcctcaaccaaaagaaggccaaagatgtcttacgtaagacatcgcggcccatggttgacct

SEQ ID NO: 59467 - DNA, 80 bp, synthetic construct
  source 1..80: mol_type = other DNA
aaatagttgctgtaagagcagcttttgaggctgtaggcactttggcctgggccaggactggattctccccagcagcaaga

SEQ ID NO: 59468 - DNA, 80 bp, synthetic construct
  source 1..80: mol_type = other DNA
cttccgatcttttttatttgtgacgtggttgtccagacgccatcttggaatccaatatgtctgccggcccagtcatgcct

SEQ ID NO: 59469 - DNA, 80 bp, synthetic construct
  source 1..80: mol_type = other DNA
gcgctgcgcgcagcgcgctgcgcgcgcgcatgatctaattgccggcagacatattggattccaagatggcgtctgtacaa

SEQ ID NO: 59470 - DNA, 80 bp, synthetic construct
  source 1..80: mol_type = other DNA
gcaatctttgaggaaattgccgaaattgccaagaggacggcacagtctgaagggttagtgctcaccaacgtgaactatga

SEQ ID NO: 59471 - DNA, 80 bp, synthetic construct
  source 1..80: mol_type = other DNA
agtcagaatctaataagcctgccctaactgaggcacaaccacttgatttatctcagaagaaagagaaacaaacagaacac

SEQ ID NO: 59472 - DNA, 80 bp, synthetic construct
  source 1..80: mol_type = other DNA
ccagcacatcttagaaattccttcagatgatgttggtgctgaagcacactgtacgtgtgcctgtgagcgcaaacaacagt

SEQ ID NO: 59473 - DNA, 80 bp, synthetic construct
  source 1..80: mol_type = other DNA
agtttggtggtctgggatgaaggcattattaagtccactattgtggaagctgcaaaagccattttaggcggtcagccaac

SEQ ID NO: 59474 - DNA, 80 bp, synthetic construct
  source 1..80: mol_type = other DNA
tacctcatcactccaggcgcctggaacagtgaaaccccgcgctctagtacacccgtccccgggaccagttcaggagaatc

SEQ ID NO: 59475 - DNA, 80 bp, synthetic construct
  source 1..80: mol_type = other DNA
agtactggcactagtcaaagcaccagaatatccctgcgcccagggccagtgtcacagccataccatcactgggacactga

SEQ ID NO: 59476 - DNA, 80 bp, synthetic construct
  source 1..80: mol_type = other DNA
tggaatgtaacaaatttgaggaaggctaccatattcatgtagttattggtggtccaggacttaatgctagaaacctaaca

SEQ ID NO: 59477 - DNA, 80 bp, synthetic construct
  source 1..80: mol_type = other DNA
ttattttgtatgtggggtggttgtacagcccccctcttggaatccaatatgtctgccgccccagtcctgcctgcgctgcg

SEQ ID NO: 59478 - DNA, 80 bp, synthetic construct
  source 1..80: mol_type = other DNA
cgctccccgcggggggcgcgcatgatctaaccgccggcagacatattggattccaagatggcgtctgtacaaccacgtca

SEQ ID NO: 59479 - DNA, 80 bp, synthetic construct
  source 1..80: mol_type = other DNA
tagcagtcatgcagaacctagaggagaaaatgcagtattatctagtgaagacttacacaagcctgggcaagttagcgtac

SEQ ID NO: 59480 - DNA, 80 bp, synthetic construct
  source 1..80: mol_type = other DNA
ccattttcaaggaagtttgccggaagttcccgcttacaacgcctcagaaaaatacccaagcatgacttcagttaattctg

SEQ ID NO: 59481 - DNA, 80 bp, synthetic construct
  source 1..80: mol_type = other DNA
gattattggatgttgattgcacctactcaaataggtagagtggcggaaggtacgaatacaactgatagatggtttgcctg

SEQ ID NO: 59482 - DNA, 80 bp, synthetic construct
  source 1..80: mol_type = other DNA
tctacatcaaacaaattatgtgcatggatgaaaagagaagggagagtatactggtacgcagggactacacctaatgcatc

SEQ ID NO: 59483 - DNA, 80 bp, synthetic construct
  source 1..80: mol_type = other DNA
ggaaagctactatctaacaataaacaatgataatagtaatgtgtcatgtgacgctgaattttacttgataccaaggtcac

SEQ ID NO: 59484 - DNA, 80 bp, synthetic construct
  source 1..80: mol_type = other DNA
acgtctagggaaataagacatacgcgagcgcaaatgaatgaagatatagtggtatcaaagacgtcattatggaaagaaat

SEQ ID NO: 59485 - DNA, 80 bp, synthetic construct
  source 1..80: mol_type = other DNA
tgtactcgttgaaccgaacgtgcaaaatacgcagagagaatatgttctagatggacagacggtacagctgcaagtttcaa

SEQ ID NO: 59486 - DNA, 80 bp, synthetic construct
  source 1..80: mol_type = other DNA
gaccgagagaaaatgtagcaattatacaagtcggtggctcagaagtgttagatattacagcggatccaactaccacacca

SEQ ID NO: 59487 - DNA, 80 bp, synthetic construct
  source 1..80: mol_type = other DNA
tcgtcattatttgttgtcatactaacttgtaggttcatacgtatggcaacggttttcattggcactagatttgagatccg

SEQ ID NO: 59488 - DNA, 80 bp, synthetic construct
  source 1..80: mol_type = other DNA
gaaatagccagtcataatcagtggtttcttgagcccgagatcattgtagaccagtatgagtacaagtacccggctatcaa

SEQ ID NO: 59489 - DNA, 80 bp, synthetic construct
  source 1..80: mol_type = other DNA
tagagcagattttcgagacagcccctttcgtcaagatcgtggaacatcacactttaatgacaactcacaaaatgtgtggc

SEQ ID NO: 59490 - DNA, 80 bp, synthetic construct
  source 1..80: mol_type = other DNA
gtatacttcttatcagcaacaatttttgaggacactggacgtcctgagttcaacttcttggaggattctaagtacagctt

SEQ ID NO: 59491 - DNA, 80 bp, synthetic construct
  source 1..80: mol_type = other DNA
aaagcaagcctagaacagtcagaataacaggagcccctgtaaagaagaggtcaggagtcagtaagatagccatggttatc

SEQ ID NO: 59492 - DNA, 80 bp, synthetic construct
  source 1..80: mol_type = other DNA
atgctgtgtccaggaagaaaatggatactaaacctactgacccgactgggattgaacctgatgatcacctcaaggagaga

SEQ ID NO: 59493 - DNA, 80 bp, synthetic construct
  source 1..80: mol_type = other DNA
cgttaaagactggccagaaagaattagggagtttatggagaaggaatgccccttcataaaaccagaagtcaagcctggga

SEQ ID NO: 59494 - DNA, 80 bp, synthetic construct
  source 1..80: mol_type = other DNA
tgtgaaggattggtctgagagaatcagagagttcatggaaaaagagtgcccattcataaagcctgaagtaaaaccaggca

SEQ ID NO: 59495 - DNA, 80 bp, synthetic construct
  source 1..80: mol_type = other DNA
acctgcattaaagaaaataaaatagctaaactattattatgccagaattatgatcctcttttagtgggtcaacatgtttt

SEQ ID NO: 59496 - DNA, 80 bp, synthetic construct
  source 1..80: mol_type = other DNA
atctgtcatccaacatggatgtaaggttccaaaagttgttccccaccatcaatgacgggtttgacaaccacactcctgat

SEQ ID NO: 59497 - DNA, 80 bp, synthetic construct
  source 1..80: mol_type = other DNA
ttcttctcctcacccttaatgttatggtgcaatatggtgacagccattggcatggagatggccctggccaacaagcagca

SEQ ID NO: 59498 - DNA, 80 bp, synthetic construct
  source 1..80: mol_type = other DNA
ctgcaaacctggacagtacatcatcaagaagttgaggaactttgatgtttaccttctcttgaagccgacgaagagcaatg

SEQ ID NO: 59499 - DNA, 80 bp, synthetic construct
  source 1..80: mol_type = other DNA
gccaacagggaaggggggtggtgctggactgatttccactccttcaagccatctaaggtgtcgactcttgtccgatgctc

SEQ ID NO: 59500 - DNA, 80 bp, synthetic construct
  source 1..80: mol_type = other DNA
tttccactccttcaagccatctaaggtgtcgactcttgtccgatgctcctccaccatgagcaacctctattggttctgga

SEQ ID NO: 59501 - DNA, 80 bp, synthetic construct
  source 1..80: mol_type = other DNA
gcaggccttcaaaaccaaaatgggaaagtacatggtggcctgccaaaaccgatgcaaaaagaagaaaatcatgcttttct

SEQ ID NO: 59502 - DNA, 80 bp, synthetic construct
  source 1..80: mol_type = other DNA
agtactcaacttccttccagaaatatgtctgcaacctggccctgatcatgctaaagactacctggggcatgaacatcaag

SEQ ID NO: 59503 - DNA, 80 bp, synthetic construct
  source 1..80: mol_type = other DNA
gcattgttgcgtctgaaagtcttgtggtatcaaatctgaatctgtctgaggccgacgtgaatgaaatctgttacagattc

SEQ ID NO: 59504 - DNA, 80 bp, synthetic construct
  source 1..80: mol_type = other DNA
cggagacacatggtcaccgagccagagcatcaaagaaaactgctgaccctctgaccaaatttgagacgttggggacatca

SEQ ID NO: 59505 - DNA, 80 bp, synthetic construct
  source 1..80: mol_type = other DNA
gatgacttgaagacctttaaccaaacccagcacaccaccaaacttgccctgacgctgatcatgttcacacatgagagtct

SEQ ID NO: 59506 - DNA, 80 bp, synthetic construct
  source 1..80: mol_type = other DNA
tcaccctttcattgttagagcgtgcagtctgttcatgagaaagaggatcaagatggatgatgaccttctacagatcattg

SEQ ID NO: 59507 - DNA, 80 bp, synthetic construct
  source 1..80: mol_type = other DNA
tgaacaacatgcatctgaagactaacgaccctgttcttgaggagctccacaaggcatacagaggagagatgaaccctcct

SEQ ID NO: 59508 - DNA, 80 bp, synthetic construct
  source 1..80: mol_type = other DNA
aattcacatctgcaaagggagcccctacttagactaatcttaagacagaacttactgaacactaaggacatagaccagct

SEQ ID NO: 59509 - DNA, 80 bp, synthetic construct
  source 1..80: mol_type = other DNA
aagaagatggagaccaacatttcaactgccatttccaggaactactttcccaggtgggagctaacaatgcattcggatga

SEQ ID NO: 59510 - DNA, 80 bp, synthetic construct
  source 1..80: mol_type = other DNA
agaagatgtacgatggctggaaagagcctcctgacttgaactatgttaagaagatggcaaggcattgcatcaaccagacc

SEQ ID NO: 59511 - DNA, 80 bp, synthetic construct
  source 1..80: mol_type = other DNA
tccaacactattgctctcctacagaaatacctaaccacttctgccgctcagtcaatgcaattcagcgaggagatgagatc

SEQ ID NO: 59512 - DNA, 80 bp, synthetic construct
  source 1..80: mol_type = other DNA
accactagattgagggagatcctgagagattctgctgcccataacttaagaaccatgggttacatactccatgatgtccc

SEQ ID NO: 59513 - DNA, 80 bp, synthetic construct
  source 1..80: mol_type = other DNA
gctgcccataacttaagaaccatgggttacatactccatgatgtccctccagtaagagtgtcaaccacagaagcagatgc

SEQ ID NO: 59514 - DNA, 80 bp, synthetic construct
  source 1..80: mol_type = other DNA
atcgatgagcttaaagaggaacacggtattggggataagagggacaggacagcaaagctagatgacaactggtttagttg

SEQ ID NO: 59515 - DNA, 80 bp, synthetic construct
  source 1..80: mol_type = other DNA
cctcaaagaagtcactaaatactcaacgggtttccacaagccagggaagatgcggccaaggctcagccacaaggcaactc

SEQ ID NO: 59516 - DNA, 80 bp, synthetic construct
  source 1..80: mol_type = other DNA
gtcatgatcgacgatgtgcagaattctgtagcagtcattgaattcgctacaacgagaatgtgcagaactgaagctttaat

SEQ ID NO: 59517 - DNA, 80 bp, synthetic construct
  source 1..80: mol_type = other DNA
ctgctacaaaagctgtgatgagcaacctccaagaaatacaggaaaacatcacagtacacgaacagcaattagttgctgct

SEQ ID NO: 59518 - DNA, 80 bp, synthetic construct
  source 1..80: mol_type = other DNA
caattgggatgtacatcttgggctttgctatccccatcatattgaaggcactttacatgttatccacaagagggagacag

SEQ ID NO: 59519 - DNA, 80 bp, synthetic construct
  source 1..80: mol_type = other DNA
ggacatggcgaattgtccgattcaacactagttcagccgacgttggatggaccgtatcagcctaccacgttcaacctacc

SEQ ID NO: 59520 - DNA, 80 bp, synthetic construct
  source 1..80: mol_type = other DNA
cctgtgtacttgttgaaccgaatgtgcaaaatacacagagagaatatgttctagacggacaaaccgtacaactgcaagtt

SEQ ID NO: 59521 - DNA, 80 bp, synthetic construct
  source 1..80: mol_type = other DNA
tcaaataattcaagtacactttggaaatttatactatttattaaactagagaaaaatggaaattattctcaatattcagc

SEQ ID NO: 59522 - DNA, 80 bp, synthetic construct
  source 1..80: mol_type = other DNA
attatccacatcaaataaattatgtgcatggatgaaaagggaaggaagagtatactggtacgaaggaatcacgcctaatg

SEQ ID NO: 59523 - DNA, 80 bp, synthetic construct
  source 1..80: mol_type = other DNA
cgtcggaaagttactacctaacaataaataatgataatagtaatgtgtcatgtgatgctgaattttatttaataccaagg

SEQ ID NO: 59524 - DNA, 80 bp, synthetic construct
  source 1..80: mol_type = other DNA
tcgcaaactgaattatgtgcacaatatataaataacggattgccaccaatacaaaacactaggaatgtagtaccagtgaa

SEQ ID NO: 59525 - DNA, 80 bp, synthetic construct
  source 1..80: mol_type = other DNA
aattgattattggatgctgattgcacctactcaagcaggtagagtggcagaaggcacaaatacaactgatagatggttcg

SEQ ID NO: 59526 - DNA, 80 bp, synthetic construct
  source 1..80: mol_type = other DNA
taaaaatgttctgtgttccgcttccttgttgttcctacactgctatcaacaactgcaaccattaaccatgcttattttac

SEQ ID NO: 59527 - DNA, 80 bp, synthetic construct
  source 1..80: mol_type = other DNA
aaccagttcctagctgtctcaaagggaaactgctcagggcccactacaatcagcggccaattctcaaacatgtcgctgtc

SEQ ID NO: 59528 - DNA, 80 bp, synthetic construct
  source 1..80: mol_type = other DNA
atgcttggttcagccccatcgtattggatttatgacattaagcagtattcagattttacgtttgagacgtgggatccatt

SEQ ID NO: 59529 - DNA, 80 bp, synthetic construct
  source 1..80: mol_type = other DNA
ctaaaaatactaaacgatttataccaaaaggcgtgttatattcatatataaacaatacaatcactgagaacgtgtttata

SEQ ID NO: 59530 - DNA, 80 bp, synthetic construct
  source 1..80: mol_type = other DNA
agaagatgtggttaaattggttaacaatcagaaaaatgcgttaataactgtaaggattaataatacatttaaggatgaac

SEQ ID NO: 59531 - DNA, 80 bp, synthetic construct
  source 1..80: mol_type = other DNA
acttcgtattcaggttacatttttagagatttatcaaataataattttaatttaataggcacaaatgttgagaattcggt

SEQ ID NO: 59532 - DNA, 80 bp, synthetic construct
  source 1..80: mol_type = other DNA
caacaaccgtttaaattgagaacattaaggaatgagtatgtggttgcgttgtacgcgctgtctaacgatttcaacaatag

SEQ ID NO: 59533 - DNA, 80 bp, synthetic construct
  source 1..80: mol_type = other DNA
caacctttaatataaagaccgcattccactgttatggggcatgccagaaatattcatatccttggcagactgcaaagtgt

SEQ ID NO: 59534 - DNA, 80 bp, synthetic construct
  source 1..80: mol_type = other DNA
ctttccgaaagatctgtggatttgccacaacacctgtgtgtgagtaccaaggtaatacaatatctgggtataaaagaatg

SEQ ID NO: 59535 - DNA, 80 bp, synthetic construct
  source 1..80: mol_type = other DNA
caattttgaacataaagactgcctttcactgctatggtgagtgtaaaaaatattcttatccatggcagactgcaaaatgt

SEQ ID NO: 59536 - DNA, 80 bp, synthetic construct
  source 1..80: mol_type = other DNA
ctttcaggaaaatttgtggatttgccacaacaccggtctgtgagtatcaaggtaatacaatctcagggtacaagaggatg

SEQ ID NO: 59537 - DNA, 80 bp, synthetic construct
  source 1..80: mol_type = other DNA
cgacatttaacatcaagactgcctttcattgttatggggcatgtcaaaaatattcatacccttggcaaactgctaaatgt

SEQ ID NO: 59538 - DNA, 80 bp, synthetic construct
  source 1..80: mol_type = other DNA
tgtaaaggtctgcattgtagggacggtttcaaagctccaaccttcagataccctccttttccttggcccacttgagcaag

SEQ ID NO: 59539 - DNA, 80 bp, synthetic construct
  source 1..80: mol_type = other DNA
catttcgtaaaatctgtggttttgcaacaacacctgtatgtgaatatcaaggcaatactgtgtcagggtataagagaatg

SEQ ID NO: 59540 - DNA, 80 bp, synthetic construct
  source 1..80: mol_type = other DNA
aggatgttaacgggattcggaaaccaaagcacctatatgtatccttgcccaatgcccagtcaagcatgaaggcagaagag

SEQ ID NO: 59541 - DNA, 80 bp, synthetic construct
  source 1..80: mol_type = other DNA
taatggatccagcgattctaacatctttgtcatctaatttaaatgcagttatgttctggctagaaaaacatgaaaatgat

SEQ ID NO: 59542 - DNA, 80 bp, synthetic construct
  source 1..80: mol_type = other DNA
gcatcaacggtgaacaaatatggtgtgccaagacataacgcaaaatatagatatgagtatgatgtgatgaaagataaacc

SEQ ID NO: 59543 - DNA, 80 bp, synthetic construct
  source 1..80: mol_type = other DNA
agtgtactaccaacaaagaattttacaatggattgcataatattttacctgtcattttttgctgtagttacagcaaatcc

SEQ ID NO: 59544 - DNA, 80 bp, synthetic construct
  source 1..80: mol_type = other DNA
gtgaagtatgtgttagagatgatatatcaataatcaaaagtacgacagctattcaaaaatcactagaccatttatccacg

SEQ ID NO: 59545 - DNA, 80 bp, synthetic construct
  source 1..80: mol_type = other DNA
cggacaaaattttaccgtgtttacatagttaaggaatgggctgagtgcaacccaattattgattatgctgggaattttat

SEQ ID NO: 59546 - DNA, 80 bp, synthetic construct
  source 1..80: mol_type = other DNA
atctgcccttagagcacacatgcgaacatataactgtgaattgtggacaaaaatcattgagattccatgcttgcttcaat

SEQ ID NO: 59547 - DNA, 80 bp, synthetic construct
  source 1..80: mol_type = other DNA
tgtgtctcaccaccaagttggtgataggtgttttgccggaggcaacttgataaaagatttgaataagacagtaaatattg

SEQ ID NO: 59548 - DNA, 80 bp, synthetic construct
  source 1..80: mol_type = other DNA
tacggaggacacaatctatggggatacaactggaccagcgcatcatcgtactcttcatggttgactggggaaaagaggca

SEQ ID NO: 59549 - DNA, 80 bp, synthetic construct
  source 1..80: mol_type = other DNA
agattggtatacaattggggtttatgtcataggtttcacactccctatcatcttaaaggccttgtacatgttatcaaccc

SEQ ID NO: 59550 - DNA, 80 bp, synthetic construct
  source 1..80: mol_type = other DNA
ctcagtcaactatgaaagctgaggaattaacccctggtaggttcaggactatagtctgcggtttatttccaactcaaatt

SEQ ID NO: 59551 - DNA, 80 bp, synthetic construct
  source 1..80: mol_type = other DNA
gagaatttatggagaaagaatgccccttcatcaaaccagaaatgaaaccagggacaccagcacaggaggcggagttctta

SEQ ID NO: 59552 - DNA, 80 bp, synthetic construct
  source 1..80: mol_type = other DNA
aagagaaataaagtttactttatgcaacgccaagatgtattggacaaaaatcatgtggctgatattgataagttaattga

SEQ ID NO: 59553 - DNA, 80 bp, synthetic construct
  source 1..80: mol_type = other DNA
ctgatattgataagttaattgattatgcagcctcaggagatcctacatcacctgacaacattgagtctcctaatgcccca

SEQ ID NO: 59554 - DNA, 80 bp, synthetic construct
  source 1..80: mol_type = other DNA
gctcctgctctaggaaataaagagcgagctcaaaaaagacatttttactttgcaaactcaaataaaggtgctaaaaaaac

SEQ ID NO: 59555 - DNA, 80 bp, synthetic construct
  source 1..80: mol_type = other DNA
atgaacaacgagggtgtggaggaggtgcgactggtagtgtgggaggtgggaaaggttctggtgtgggtatatccacggtc

SEQ ID NO: 59556 - DNA, 80 bp, synthetic construct
  source 1..80: mol_type = other DNA
gggaaaggttctggtgtgggtatatccacgggcggttgggtaggaggtagctactttactgactcatatgttataaccaa

SEQ ID NO: 59557 - DNA, 80 bp, synthetic construct
  source 1..80: mol_type = other DNA
ggttgggtaggaggtagctactttactgactcatatgttataaccaaaaacaccagacaatttctagttaaaatacaaaa

SEQ ID NO: 59558 - DNA, 80 bp, synthetic construct
  source 1..80: mol_type = other DNA
caaccatcaatataaaacagaattaatatcaccttctacatctcaaggaaaatcacaacgatgtgtcagcacaccttggt

SEQ ID NO: 59559 - DNA, 80 bp, synthetic construct
  source 1..80: mol_type = other DNA
cttactttaacttcaatcaatacagcagtcatttttcaccacaagactggcagcgcttaacaaacgaatacaaaagattc

SEQ ID NO: 59560 - DNA, 80 bp, synthetic construct
  source 1..80: mol_type = other DNA
agaccaaaaggtatgcatgttaaaatctacaatttacaaataaaacaaattctttcaaatggtgctgacactacatacaa

SEQ ID NO: 59561 - DNA, 80 bp, synthetic construct
  source 1..80: mol_type = other DNA
gttaaaatctacaatttacaaataaaacaaattctttcaaatggtgctgacactacatacaacaacgacctcacagctgg

SEQ ID NO: 59562 - DNA, 80 bp, synthetic construct
  source 1..80: mol_type = other DNA
aaaaaacaacgagcctaaaccaggcacttcaaaaatgtctgaaaatgaaattcaagaccaacaaccatcaggctcagcag

SEQ ID NO: 59563 - DNA, 80 bp, synthetic construct
  source 1..80: mol_type = other DNA
ttagggttttgggtttaccaaccattgctcaacccgttttccaccaccgccgtttcaacatgttgggtgtcagtagaaac

SEQ ID NO: 59564 - DNA, 80 bp, synthetic construct
  source 1..80: mol_type = other DNA
gattggtcagacaataaggattcagaagagtctataggaaaggttttattgtttgccgggatacctaataatgtcataac

SEQ ID NO: 59565 - DNA, 80 bp, synthetic construct
  source 1..80: mol_type = other DNA
atttgaaatttaatataagttatgtgaaaaatccaccatactatattcctgattatagaggaattatcctaattctcccc

SEQ ID NO: 59566 - DNA, 80 bp, synthetic construct
  source 1..80: mol_type = other DNA
aatggacaatgtccttactgcatgaccacaacagagtcaacacaaagtgcattacaagcacactttagcatctgcaaact

SEQ ID NO: 59567 - DNA, 80 bp, synthetic construct
  source 1..80: mol_type = other DNA
tatgggggttattactaacaatggaacttgtgatttgggctgccagtgcagaaacaccgctacttgaggcagggtggtca

SEQ ID NO: 59568 - DNA, 80 bp, synthetic construct
  source 1..80: mol_type = other DNA
atagctatcgccgaaagttgacaaatccagctaatagagaagagcaaataccatttcattttcagatggaaaagcaggtg

SEQ ID NO: 59569 - DNA, 80 bp, synthetic construct
  source 1..80: mol_type = other DNA
aaatacaaactttggggcattggatggatgctgtgctgaacattaagactgctttccactgttatggggagtgtaaaaaa

SEQ ID NO: 59570 - DNA, 80 bp, synthetic construct
  source 1..80: mol_type = other DNA
aacaggccgatttcaagaagttttaaagaagtcattaaagaaaccggaagtcaaacgtggatgttatcgaacccttggtg

SEQ ID NO: 59571 - DNA, 80 bp, synthetic construct
  source 1..80: mol_type = other DNA
gtaaatgtaagaattgtaaatataagaaaaaatatttcgcactaagaatgaggatgaagcgagtcgcaatgcaattgatc

SEQ ID NO: 59572 - DNA, 80 bp, synthetic construct
  source 1..80: mol_type = other DNA
atacaaggtttaactggagacgttgtatccgttgaaacgaaaagaatacctacgccaacacaaacaaatctcctcaccaa

SEQ ID NO: 59573 - DNA, 80 bp, synthetic construct
  source 1..80: mol_type = other DNA
cctggatggaaattaacatatgtaggctataatggaaaaagtactagaggtcactacaatttttcatttacatgtcaaaa

SEQ ID NO: 59574 - DNA, 80 bp, synthetic construct
  source 1..80: mol_type = other DNA
gctccatcgtattggatttatgacattaagcagtattcagattttacgtttgagacgtgggatccattggacacaccata

SEQ ID NO: 59575 - DNA, 80 bp, synthetic construct
  source 1..80: mol_type = other DNA
acaaactgatgaagcaaataaatggatatcaatgggttcatcatgtacagttaaagtgtgtccattaaatacgcagacac

SEQ ID NO: 59576 - DNA, 80 bp, synthetic construct
  source 1..80: mol_type = other DNA
catataaaaccaaattatgtaacatcaaatcatagaacatcagcgactgaggtgcataactgtaaatggtgctcaattaa

SEQ ID NO: 59577 - DNA, 80 bp, synthetic construct
  source 1..80: mol_type = other DNA
atagcatctgtactaacggttttgttcacgttgcacaaagcatctattccaacgatgaaaattgcactgaagacgtccaa

SEQ ID NO: 59578 - DNA, 80 bp, synthetic construct
  source 1..80: mol_type = other DNA
gaattcagtagtgtactaccaacaaagaattttacaatggattgcataatattttacctgtcattttttgctgtagttac

SEQ ID NO: 59579 - DNA, 80 bp, synthetic construct
  source 1..80: mol_type = other DNA
taaatattggtgaagtatgcgtcagagatgatatatcaataatcaaaagtacgacagctattcaaaaatcactagaccat

SEQ ID NO: 59580 - DNA, 80 bp, synthetic construct
  source 1..80: mol_type = other DNA
ttatccacgcggacaaagttttaccgtgtttacatagttaaggaatgggctgagtgtaacccaattattgattatgctgg

SEQ ID NO: 59581 - DNA, 80 bp, synthetic construct
  source 1..80: mol_type = other DNA
gaattttattgttatgaatattgatgataatggccacctagtacctagaatgcatacctgcagagcttcctgcgatataa

SEQ ID NO: 59582 - DNA, 80 bp, synthetic construct
  source 1..80: mol_type = other DNA
ggttaaataaaaatgatgctgaaatcattttatcatcgcaaaaaaccaatcattatgagataattggaaccaccactgtc

SEQ ID NO: 59583 - DNA, 80 bp, synthetic construct
  source 1..80: mol_type = other DNA
agtggttggttcaaaaatactataaatctgcccttagagcacacatgtgaacatataactgtaaattgcggacaaaaatc

SEQ ID NO: 59584 - DNA, 80 bp, synthetic construct
  source 1..80: mol_type = other DNA
agcacatcctgtatctcaccaccaagttggtgataggtgttttgccggaggcaacttgataaaagatctgaataaaacag

SEQ ID NO: 59585 - DNA, 80 bp, synthetic construct
  source 1..80: mol_type = other DNA
tggagccggatgaggttaacaaaagtacactacaggggagaagggcagctgtgtctacactggaaaccaagctcggagaa

SEQ ID NO: 59586 - DNA, 80 bp, synthetic construct
  source 1..80: mol_type = other DNA
gctgcaatgataatctcaacctctctcataattgcagccataatattcatcatctctgccaatcacaaagttacactaac

SEQ ID NO: 59587 - DNA, 80 bp, synthetic construct
  source 1..80: mol_type = other DNA
ggtctcccgtctggcatgccgttcaccagtgtcatcaactcactcaaccacatgacttactttgcagctgcagtgcttaa

SEQ ID NO: 59588 - DNA, 80 bp, synthetic construct
  source 1..80: mol_type = other DNA
cacacagccaaggcagagggactggtgctaaccaatgtcaactatgaccaggctctcgccacctacgaatcttggttcat

SEQ ID NO: 59589 - DNA, 80 bp, synthetic construct
  source 1..80: mol_type = other DNA
caattggcactgtcatgaggagcgcccgccccggtacagacttaattacacttgccacgtcccacttgtctggttttaag

SEQ ID NO: 59590 - DNA, 80 bp, synthetic construct
  source 1..80: mol_type = other DNA
aaagaagtgagtttaaaatggaagggtggtatctggttgctcttggagtctgctatacgctgacactggcaatgcccaaa

SEQ ID NO: 59591 - DNA, 80 bp, synthetic construct
  source 1..80: mol_type = other DNA
tttacaagtaggattcaggtgatctatgaaaagacacattgtgtaacaggtcagctgattgagggtcagtgcttcaaccc

SEQ ID NO: 59592 - DNA, 80 bp, synthetic construct
  source 1..80: mol_type = other DNA
ggcatgtgaaggtatgcattataggtactgtttcaaaattctcacaaggtgacaccctagtgtttcttggtcccatggaa

SEQ ID NO: 59593 - DNA, 80 bp, synthetic construct
  source 1..80: mol_type = other DNA
taaatgctaacctggattcatcaatatcagtatcgacacattcaagaaaggagaaatccaaaagcgatcataaaagtaga

SEQ ID NO: 59594 - DNA, 80 bp, synthetic construct
  source 1..80: mol_type = other DNA
aaacactaccctagaattgaagcagagtctgattcggatgagtacgtactagacgattcggacagtgatgatggcaaatg

SEQ ID NO: 59595 - DNA, 80 bp, synthetic construct
  source 1..80: mol_type = other DNA
ttgtaaatataaaaggaagtatttcgcactaagaatgagaatgaaacaagtcgccatgcaattgatcgaagacttgtagg

SEQ ID NO: 59596 - DNA, 80 bp, synthetic construct
  source 1..80: mol_type = other DNA
attgtaaatataagaagaaatatttcgcactaagaatgaggatgaaacgagtcgcaatgcaattgatagaagatttgtaa

SEQ ID NO: 59597 - DNA, 80 bp, synthetic construct
  source 1..80: mol_type = other DNA
ggtcttccatctggcatgccattcaccagtgtcatcaactcgctcaaccacatgacctattttgcagctgcagtactgaa

SEQ ID NO: 59598 - DNA, 80 bp, synthetic construct
  source 1..80: mol_type = other DNA
atctcaagagtctaagtgtgttgaatatattaattatggtctaccaccgattcaaaatactagaaacgtagttccattat

SEQ ID NO: 59599 - DNA, 80 bp, synthetic construct
  source 1..80: mol_type = other DNA
ctaccaccgattcaaaatactagaaacgtagttccattatcattatcatctagatctatacagtataagagagcacaagt

SEQ ID NO: 59600 - DNA, 80 bp, synthetic construct
  source 1..80: mol_type = other DNA
cactgccacaacagtgctgcttgatgaatttggtgttgggccactttgcaaaggtgacaacttgtatttgtcagctgttg

SEQ ID NO: 59601 - DNA, 80 bp, synthetic construct
  source 1..80: mol_type = other DNA
gtgtgtctgcaccagaggcttctgagacctgggaagagcattgtgattgagattcagtgcttgatccatgtccagagtct

SEQ ID NO: 59602 - DNA, 80 bp, synthetic construct
  source 1..80: mol_type = other DNA
ggtttaccatcaggaatgccttttacatcagtggttaattcactcaatcacatgatatacattgctgctgctgttttgca

SEQ ID NO: 59603 - DNA, 80 bp, synthetic construct
  source 1..80: mol_type = other DNA
tgaatgcgaacctagattcatctatatcagtgtcaacaaattcaagaaaggagaagtccaaaaatgaccataaaagtagg

SEQ ID NO: 59604 - DNA, 80 bp, synthetic construct
  source 1..80: mol_type = other DNA
ctaaaattgaagcagaatctgattcagacgattatgtacttgacgattctgatagtgacgatggtaaatgcaaaaactgt

SEQ ID NO: 59605 - DNA, 80 bp, synthetic construct
  source 1..80: mol_type = other DNA
taaatgcaaacttaaattcatcagtatcaaaatcaactaacgcgaaaaaggagaaatccaaaaacgaccataaaagtagg

SEQ ID NO: 59606 - DNA, 80 bp, synthetic construct
  source 1..80: mol_type = other DNA
aaacactaccctaaaattgaagcagaatctgattcagatgactttgtactcgatgattcggacagtgatgatggtaaatg

SEQ ID NO: 59607 - DNA, 80 bp, synthetic construct
  source 1..80: mol_type = other DNA
tccagcatttagaaagatttagaaaaaaactaaattaagaatgaatctcctggggtcgtaacgtctcgagaccctgccgt

SEQ ID NO: 59608 - DNA, 80 bp, synthetic construct
  source 1..80: mol_type = other DNA
tccgaacctgcttccgaatattggtactatctgtacaagctgttacccttatattagttattgtcactttaggtgagcta

SEQ ID NO: 59609 - DNA, 80 bp, synthetic construct
  source 1..80: mol_type = other DNA
acaaactcctactccttttgtgagaatgtaccaaatctggataagtttgtgttccagatggccagcgccactgatgatgc

SEQ ID NO: 59610 - DNA, 80 bp, synthetic construct
  source 1..80: mol_type = other DNA
aggcccagtgagccgtgagcatgtggaatggtgcagggaatttgtcaaaggcaagtatatcatggccttcaatccacctt

SEQ ID NO: 59611 - DNA, 80 bp, synthetic construct
  source 1..80: mol_type = other DNA
tttgtcaaaggcaagtatatcatggccttcaatccaccttggggggacatcaacaaatcaggtcgttcgggaatagcact

SEQ ID NO: 59612 - DNA, 80 bp, synthetic construct
  source 1..80: mol_type = other DNA
ccacagttatactgtgattataatttagttttaatgaaatatgattctacacagaaactagatatgtctgaattggccga

SEQ ID NO: 59613 - DNA, 80 bp, synthetic construct
  source 1..80: mol_type = other DNA
cgacaacggagaagttagtgattacagatgttgtagatggtgtcaaccataaattaaacgtcacaacagcaacgtgcacc

SEQ ID NO: 59614 - DNA, 80 bp, synthetic construct
  source 1..80: mol_type = other DNA
atacgcaactgtaaaaaattaggaccaagggaaaacgtagcaatcatacaggtaggcggtgcaaatgttttagacatcac

SEQ ID NO: 59615 - DNA, 80 bp, synthetic construct
  source 1..80: mol_type = other DNA
aatcaaataattcaaacgatgtccaaaagatctagatcacttaattcgtcagcgttctattacagagtataggtgcatgt

SEQ ID NO: 59616 - DNA, 80 bp, synthetic construct
  source 1..80: mol_type = other DNA
tcttatactgaacgaatggctgtgcaatccaatggacataacgctgtattattatcagcagactgatgaagcaaataaat

SEQ ID NO: 59617 - DNA, 80 bp, synthetic construct
  source 1..80: mol_type = other DNA
ctattgaagattcaatacagtgttttacatgggatatgaactgtgcaaacgctcgcagtacgaatcaagattcacgctta

SEQ ID NO: 59618 - DNA, 80 bp, synthetic construct
  source 1..80: mol_type = other DNA
actgccagatggagattatgatgttcgagaatatttcctaaatttatatgatcaaatattgatagaaatgccggattatt

SEQ ID NO: 59619 - DNA, 80 bp, synthetic construct
  source 1..80: mol_type = other DNA
tatttcctaaatttatatgatcaaatattgatagaaatgccggattatttgttattgaaagatatggctgtagagaataa

SEQ ID NO: 59620 - DNA, 80 bp, synthetic construct
  source 1..80: mol_type = other DNA
gaaaaagaagttgaaaagaacatagacgcaagtatggagaataaagctaataataagaagcaacaattatccgataaagt

SEQ ID NO: 59621 - DNA, 80 bp, synthetic construct
  source 1..80: mol_type = other DNA
agcacacatgtgaacatataactgtaaattgcggacaaaaatcattgagatttcatgcttgcttcaatcaacatatgtca

SEQ ID NO: 59622 - DNA, 80 bp, synthetic construct
  source 1..80: mol_type = other DNA
atgaaagataaaatagaacgtggagaagttgaggttgatgattcgtatgttgatgagaaaatggaaattgatactattga

SEQ ID NO: 59623 - DNA, 80 bp, synthetic construct
  source 1..80: mol_type = other DNA
tcggctcctgcaggcagcaaaagaggacatttctaatgctgtagttccaaacttagtcctcattgctcttatggaggaga

SEQ ID NO: 59624 - DNA, 80 bp, synthetic construct
  source 1..80: mol_type = other DNA
acgtgtttcaggttgaaactgttcacacttacggggatgactgcttgtactcagtgtgccccgcaacagcttccatcttc

SEQ ID NO: 59625 - DNA, 80 bp, synthetic construct
  source 1..80: mol_type = other DNA
cactcctgttttcctcaagagaacattaacctgcacaccacgcggtgtacgtggcctactagacatcacgtccataaaga

SEQ ID NO: 59626 - DNA, 80 bp, synthetic construct
  source 1..80: mol_type = other DNA
ggcaatttttgtggattaaggccaataggacggtcgacatcaactcaccaccagcatacgaccgcgacgcgcgtggcatc

SEQ ID NO: 59627 - DNA, 80 bp, synthetic construct
  source 1..80: mol_type = other DNA
cagttggaaaatgcccttgcatatgcatcacagcatggtcacacagtctttgaggaagttgctgagttggctcgacacac

SEQ ID NO: 59628 - DNA, 80 bp, synthetic construct
  source 1..80: mol_type = other DNA
cagtgaattggggtcatggagaaataaatgattcaacgacagtggaaccaattttagatggtccttaccaacctactata

SEQ ID NO: 59629 - DNA, 80 bp, synthetic construct
  source 1..80: mol_type = other DNA
gctcaggtatatgcagacactcaggtgtacacacatgatgattctaaagatgactatgaaaatgcgtttctaatttctaa

SEQ ID NO: 59630 - DNA, 80 bp, synthetic construct
  source 1..80: mol_type = other DNA
actttcaaatcgcgtgttcagagacaaattgtttaaaacgttgtcagcaaatcatagcaaagtagttaatgttgggccta

SEQ ID NO: 59631 - DNA, 80 bp, synthetic construct
  source 1..80: mol_type = other DNA
atgtcagtgggatcttctaggtcacgcacgtggcttaatgaattacatccagctgttcaaaatcagcttcgggagatatt

SEQ ID NO: 59632 - DNA, 80 bp, synthetic construct
  source 1..80: mol_type = other DNA
gcctgctgtccgatggactctcccctgagacatcgtacagtgaggcatgtctgttagacaaataaatcaattcttttttt

SEQ ID NO: 59633 - DNA, 80 bp, synthetic construct
  source 1..80: mol_type = other DNA
tccaatgaaaatgtgcctcttgcatcaccacaggacacaattggaccaagcgcagcacttctcctgcctacgcagattga

SEQ ID NO: 59634 - DNA, 80 bp, synthetic construct
  source 1..80: mol_type = other DNA
accctggagtgtttccacatgcattcattgatgcccgcaccgtggatcctatcctcatcaacctccctgatatccgtgcg

SEQ ID NO: 59635 - DNA, 80 bp, synthetic construct
  source 1..80: mol_type = other DNA
tgcaagtataaaaagaaatattttgcacttcgtttaagaatgaagcaggttgcaatgcaattgattaaagatttgtgaaa

SEQ ID NO: 59636 - DNA, 80 bp, synthetic construct
  source 1..80: mol_type = other DNA
ggtctaccatccgggatgccatttacatctgttgtcaactccatcaaccatatgatatatgtggcggcagccattctgca

SEQ ID NO: 59637 - DNA, 80 bp, synthetic construct
  source 1..80: mol_type = other DNA
ttcatagaccgaatataggtatgaatggtggaaatattagagccactcttggtaggtggtcaggtaataaaggggttgta

SEQ ID NO: 59638 - DNA, 80 bp, synthetic construct
  source 1..80: mol_type = other DNA
ccagttttagatggtccttatcaacccactacattcaaaccacccaacgattattggctacttattagttcaaatacaga

SEQ ID NO: 59639 - DNA, 80 bp, synthetic construct
  source 1..80: mol_type = other DNA
ggtgttgcagacaaggttttggcattaggttcctctaggtctcgtatgtggcttaatgaactgtcaccagctgtacagaa

SEQ ID NO: 59640 - DNA, 80 bp, synthetic construct
  source 1..80: mol_type = other DNA
tatggtatgccctcatcaccagtttatcatgcgtgttcgtggtgactggttggttgttttagtcacaattgccacttata

SEQ ID NO: 59641 - DNA, 80 bp, synthetic construct
  source 1..80: mol_type = other DNA
aagggcacgccacaacccccggcaattatggatgatatatcatctctcgcaactttggtatcccaatctttaccgcaaat

SEQ ID NO: 59642 - DNA, 80 bp, synthetic construct
  source 1..80: mol_type = other DNA
gcccaagttgtcgccagcccccagtattgctctcagagagttgttctggaaagctgaccacttcccagacacaaagaacc

SEQ ID NO: 59643 - DNA, 80 bp, synthetic construct
  source 1..80: mol_type = other DNA
caacaggccaggtctggaagcaagcaattttggcagtcgcaaagggtaacgtgccaagagtggatgaggatcaggtgatg

SEQ ID NO: 59644 - DNA, 80 bp, synthetic construct
  source 1..80: mol_type = other DNA
gaggagagattcttggctggtgatgtgtctaaggatgaagaacactctgcccaggcccttaggtcaacgttccacagagt

SEQ ID NO: 59645 - DNA, 80 bp, synthetic construct
  source 1..80: mol_type = other DNA
cttagttgacattccaagggaaacaaaaatccagctagccactcttggagtggagggcaagcagtggaaggccgaccccg

SEQ ID NO: 59646 - DNA, 80 bp, synthetic construct
  source 1..80: mol_type = other DNA
cagttactctcaacagagcagagaagaagaaaggcttccagttaacctgcgacttgtccgacatcaacacatttgttgag

SEQ ID NO: 59647 - DNA, 80 bp, synthetic construct
  source 1..80: mol_type = other DNA
gccacaaaggatggcgctcttatgcatgaagccataagtatgccaccatacatggtctccatcttagatgcagactggaa

SEQ ID NO: 59648 - DNA, 80 bp, synthetic construct
  source 1..80: mol_type = other DNA
gggcctagctgtccatggattccaaaagaaagacatcccaattgcaaagaatgtggagggcttcttctcctcacccttga

SEQ ID NO: 59649 - DNA, 80 bp, synthetic construct
  source 1..80: mol_type = other DNA
atagggtgggaaactccattaatgtcacctttgaaatgccggcagcccttgagggcaccggctccaccatccaacaaaat

SEQ ID NO: 59650 - DNA, 80 bp, synthetic construct
  source 1..80: mol_type = other DNA
catcgcctggtatgccaaggacagcagcaacactttcttcgagaattatagagtgtttaaggctgctaacagggaaggag

SEQ ID NO: 59651 - DNA, 80 bp, synthetic construct
  source 1..80: mol_type = other DNA
ggtggtgttggacagatttccactcctttaagccatccaaagtgtcgactcttgtccgatgctcctccaccatgagcaac

SEQ ID NO: 59652 - DNA, 80 bp, synthetic construct
  source 1..80: mol_type = other DNA
ctctattggttctggagagagcagttcaacattcagccctgggagaccttgcctaatgaggcctccatggcttctgtgtc

SEQ ID NO: 59653 - DNA, 80 bp, synthetic construct
  source 1..80: mol_type = other DNA
gaagatgatgaagatttgcctgatggttatgcttgaggacaaggccagaacagaagagatatgtacaaacttaagataca

SEQ ID NO: 59654 - DNA, 80 bp, synthetic construct
  source 1..80: mol_type = other DNA
cgctcctggaggggtttgtgtcagagccatgtctgccaaagccacaaaagatgatcgagaaacttcctgagtttgcgaga

SEQ ID NO: 59655 - DNA, 80 bp, synthetic construct
  source 1..80: mol_type = other DNA
accaagctccaggtctggcttatcaacaagagcctggagctcatgaaagagatctccataagacctttcaccgtgcgagc

SEQ ID NO: 59656 - DNA, 80 bp, synthetic construct
  source 1..80: mol_type = other DNA
agatggaacgaaggtgaaatgggaagggatgaagaatccattcacaggagaccctgtggaagatccctacagactggtga

SEQ ID NO: 59657 - DNA, 80 bp, synthetic construct
  source 1..80: mol_type = other DNA
atttgatgtacctgggctacctaaagaataaggatgaagctcccgaaaagaacggatgcccggcaatggtgcggaagata

SEQ ID NO: 59658 - DNA, 80 bp, synthetic construct
  source 1..80: mol_type = other DNA
gtgaagatggaagcagctcacccaggaaggtatgactacttgggctatggtgaccctccactggacgacatcaggaccca

SEQ ID NO: 59659 - DNA, 80 bp, synthetic construct
  source 1..80: mol_type = other DNA
cctcaatctcagctctcagtcttggcatcggggaagttcattcatgacttcactttcggccatctgtcatctaatatgga

SEQ ID NO: 59660 - DNA, 80 bp, synthetic construct
  source 1..80: mol_type = other DNA
agcacagcatgcatatggacatactgaatgcgtttagcaacttgacattggatagagtgtccacgctcaaggcatctagt

SEQ ID NO: 59661 - DNA, 80 bp, synthetic construct
  source 1..80: mol_type = other DNA
gcctttgatgagagctggtacacctcagacggatccactccatatcatcggaagaaggtggtggaaaatctggagaaatt

SEQ ID NO: 59662 - DNA, 80 bp, synthetic construct
  source 1..80: mol_type = other DNA
catgacaccttcaaacacgcatgtgcaccacattctgaagcaatgcctagagacagtagaggagaggggctgcatgcata

SEQ ID NO: 59663 - DNA, 80 bp, synthetic construct
  source 1..80: mol_type = other DNA
tagacatcttcaagaagaaccagcatggaggcctcagagagatttacgtgcttggaccagaggagaggattgtccagtta

SEQ ID NO: 59664 - DNA, 80 bp, synthetic construct
  source 1..80: mol_type = other DNA
tgtgaggtttcaaaagttgttcccaaccatcaatgatgggtttgacaaccacactcctgatgtcatgattgatgatgtgc

SEQ ID NO: 59665 - DNA, 80 bp, synthetic construct
  source 1..80: mol_type = other DNA
agaattctgtggcagtcattgaattcgcaacaacaagaatgtgcagaactgaggctttaatgcaggccttcaaaaccaaa

SEQ ID NO: 59666 - DNA, 80 bp, synthetic construct
  source 1..80: mol_type = other DNA
atggggaagtacatggtggcctgccagaacagatgcaaaaggaagaaaatcatgcttttttgcatagtagcgtcagagag

SEQ ID NO: 59667 - DNA, 80 bp, synthetic construct
  source 1..80: mol_type = other DNA
cgatccaacaccatagctctcctacagaaatacctaaccacttccgcaactcagtcaatgcaattcagtgaagagatgag

SEQ ID NO: 59668 - DNA, 80 bp, synthetic construct
  source 1..80: mol_type = other DNA
acaaggatttatacagggtcagaggagtttgccaaactgcacctggggcctttcctgaggcagtggtgcaaagacatgaa

SEQ ID NO: 59669 - DNA, 80 bp, synthetic construct
  source 1..80: mol_type = other DNA
tgtggagaacactttaaagcacaaagtggatggaaaagctcccctagttgcccacaattgcgagatctactcatatggga

SEQ ID NO: 59670 - DNA, 80 bp, synthetic construct
  source 1..80: mol_type = other DNA
ctggaattccggtgttcatccaggctgagattcagcgacctgagcacctcagcatgtcacggatgaagttgaggatcgat

SEQ ID NO: 59671 - DNA, 80 bp, synthetic construct
  source 1..80: mol_type = other DNA
ggcacttgcgtgtctctagtctacaaggaggacgatcaacggaccatgcgcattttgtctttccatggaagatccacgga

SEQ ID NO: 59672 - DNA, 80 bp, synthetic construct
  source 1..80: mol_type = other DNA
cctcgtggtatcaaacctaaatttgtctgaggccgatgtaaatgaaatctgctacagattcaatgcagcagtggatgtct

SEQ ID NO: 59673 - DNA, 80 bp, synthetic construct
  source 1..80: mol_type = other DNA
tgtctctcaacttaatgtgtcaaccctgcaggagattctccagtcccaactctggatgcggcgagatcctacagagagtt

SEQ ID NO: 59674 - DNA, 80 bp, synthetic construct
  source 1..80: mol_type = other DNA
ggttcttgctaaaatctctaagtccggccaccgtctcaaaacttagagagaagctagaggctggagtcagtataccaggc

SEQ ID NO: 59675 - DNA, 80 bp, synthetic construct
  source 1..80: mol_type = other DNA
atagacaccacaagactgagggagatcttgagagattctgcagctcataacttgagaacaatgggttatatactccacga

SEQ ID NO: 59676 - DNA, 80 bp, synthetic construct
  source 1..80: mol_type = other DNA
tgtccctcctgtaagagtgtcaaccacagaagcagatgccctggccaccacgttctggagctcagaaatcacatccatcg

SEQ ID NO: 59677 - DNA, 80 bp, synthetic construct
  source 1..80: mol_type = other DNA
acaaccacctgatcatggaaaaccttgtcccaagaatgtcagacactgacaccaccaacataggtgcagaggttgaggcc

SEQ ID NO: 59678 - DNA, 80 bp, synthetic construct
  source 1..80: mol_type = other DNA
acattccaggacataggcttcaactgggaggttactgaggagaagttccctccattcagtaagaagatgtatgatggctg

SEQ ID NO: 59679 - DNA, 80 bp, synthetic construct
  source 1..80: mol_type = other DNA
agacattgacctgcacactccacccgctctagtgtataactatgaccaagtcaatgtgcgggcaccgcaccacacattca

SEQ ID NO: 59680 - DNA, 80 bp, synthetic construct
  source 1..80: mol_type = other DNA
gaaggagcctcctgacttaaactacgttaagaagatggcaaggcattgcatcaaccagaccatcgatgagcttaaagagg

SEQ ID NO: 59681 - DNA, 80 bp, synthetic construct
  source 1..80: mol_type = other DNA
aacacggcattggagacaagagggacaggactgcaaagctggacgacaactggttcagttgcctcaaagaggtcaccaaa

SEQ ID NO: 59682 - DNA, 80 bp, synthetic construct
  source 1..80: mol_type = other DNA
tactcgacgggtttccacaagccagggaagatgcggcctaggctcagccacaaggcaactctgccgtttccggggttcat

SEQ ID NO: 59683 - DNA, 80 bp, synthetic construct
  source 1..80: mol_type = other DNA
gtgagggagtgttttgccagtgtgaccacgctcccttggacaacgcgccaagcatccaacacctttcttggtgccatcca

SEQ ID NO: 59684 - DNA, 80 bp, synthetic construct
  source 1..80: mol_type = other DNA
tctcggtccacgcatcaacccctatactgcacacttgagtgccatgtttgctggctggggtggcagtttccaaatacgag

SEQ ID NO: 59685 - DNA, 80 bp, synthetic construct
  source 1..80: mol_type = other DNA
tcaccctatctggctctgggctgtatgcaggccgtgcagtggtcgcagtgctgcctccaggtgtcaatccagccaatgtc

SEQ ID NO: 59686 - DNA, 80 bp, synthetic construct
  source 1..80: mol_type = other DNA
tgcggtggattaccaccgtgtggatggcgatgagcaaactgcaactgttgggctttgggtcgcccaaccgctcatcaacc

SEQ ID NO: 59687 - DNA, 80 bp, synthetic construct
  source 1..80: mol_type = other DNA
ttgagacacccaacggagctgcgcaaagggtagaaatggccgcagcaacaggggccgtcagcaacaacgtccccatgtgc

SEQ ID NO: 59688 - DNA, 80 bp, synthetic construct
  source 1..80: mol_type = other DNA
aattaagacagttatgtacaggagtgaagactgttgattatgattccggtatatctgacgttgaataatgaaatagagat

SEQ ID NO: 59689 - DNA, 80 bp, synthetic construct
  source 1..80: mol_type = other DNA
attcaatacagtgttttacatgggatatgaactgtgcaaacgctcgcagtacaaatcaagattcacgcttaataatatac

SEQ ID NO: 59690 - DNA, 80 bp, synthetic construct
  source 1..80: mol_type = other DNA
atttcttctagtatatacaaaaatgaatcatcttcaacaacgtcaactctttctggaaaatctattggtaggagtgaaca

SEQ ID NO: 59691 - DNA, 80 bp, synthetic construct
  source 1..80: mol_type = other DNA
aggaagcatttcgcactaggaatgagaatgaaacaagttgcaatgcaattgatcgaagatttgtaggtctaacctgagag

SEQ ID NO: 59692 - DNA, 80 bp, synthetic construct
  source 1..80: mol_type = other DNA
ggatggctgtgcctttccacattggtgttgcagataaggttttgacattaggttcctctaggtctcgtatgtggcttaat

SEQ ID NO: 59693 - DNA, 80 bp, synthetic construct
  source 1..80: mol_type = other DNA
gttgagataaaggataacactggtaaggttgttcaaaaaaccacacttatgccaaattggataggaacaatgtatcagag

SEQ ID NO: 59694 - DNA, 80 bp, synthetic construct
  source 1..80: mol_type = other DNA
tgcacgtggcatgttccagcgtgtacgtactggtgtggcattattcgttagggttaatcctaactgtttatgccacatca

SEQ ID NO: 59695 - DNA, 80 bp, synthetic construct
  source 1..80: mol_type = other DNA
aggttgatggttgcagtggtactggttttagattaggaaatgatatagtgacagcagcacatgtcattggtaatgccaca

SEQ ID NO: 59696 - DNA, 80 bp, synthetic construct
  source 1..80: mol_type = other DNA
caggttgaagttgtgtacaacaattatgtggcccaggctaaagttagacatatacctgataaggacattgcttatttagt

SEQ ID NO: 59697 - DNA, 80 bp, synthetic construct
  source 1..80: mol_type = other DNA
acttccagagggattaaagtcaatgccagtgttgaagttagcacgtacaccatcatatgagcaagtgacaattattgctt

SEQ ID NO: 59698 - DNA, 80 bp, synthetic construct
  source 1..80: mol_type = other DNA
tagaaggtaattgcatgcttgtatcaactaccgaaggtgtgtgccatggtgaaacaatatcatatgcatgtgccacacgt

SEQ ID NO: 59699 - DNA, 80 bp, synthetic construct
  source 1..80: mol_type = other DNA
gatggtatgagtggagcacctgttttagatgttaatggtaatgttcttggtgttcatcaaactaacactggttatactgg

SEQ ID NO: 59700 - DNA, 80 bp, synthetic construct
  source 1..80: mol_type = other DNA
ttcccgttattctatggggactggagttacgctagctgtccaaggtatcaccacaccaggtgtatatagtacctatgttt

SEQ ID NO: 59701 - DNA, 80 bp, synthetic construct
  source 1..80: mol_type = other DNA
tggggccactgtcatacgtgcgacagatgctgccccatatgttgatgaaaatgctgccttgaaaaaagaaattgaggaat

SEQ ID NO: 59702 - DNA, 80 bp, synthetic construct
  source 1..80: mol_type = other DNA
taaaaagaatcatcaaagaaaatgcaatgcaacagagatctgttcaagataatgaggttgttgggattgtacgtgctgca

SEQ ID NO: 59703 - DNA, 80 bp, synthetic construct
  source 1..80: mol_type = other DNA
gtccaacgcgaaattggtatccttcgcgatgagctaaactcttgttatcagaagaagaaaggaaaaaacaaaaaaggccg

SEQ ID NO: 59704 - DNA, 80 bp, synthetic construct
  source 1..80: mol_type = other DNA
tggcgcacgtcatagaatgttgcgtcgtggtcaaaaatttttgactgaagaagaatatcaggaattattggataaaggcc

SEQ ID NO: 59705 - DNA, 80 bp, synthetic construct
  source 1..80: mol_type = other DNA
taaccagagaacaattgcttgatgctatagaagagatagttaggtctaggataggttttccagactggtctgatcctgag

SEQ ID NO: 59706 - DNA, 80 bp, synthetic construct
  source 1..80: mol_type = other DNA
tattcatcagaggaggatgatgctgccatcacatactggtgggagcaagtaaaagaggacaactacaaagatggaatacc

SEQ ID NO: 59707 - DNA, 80 bp, synthetic construct
  source 1..80: mol_type = other DNA
tcaatttgaccacataattccaaaatattcaccttctgaacgtaccttttctgagcaggagcgtaaggacgttgcgaggg

SEQ ID NO: 59708 - DNA, 80 bp, synthetic construct
  source 1..80: mol_type = other DNA
aattagatgcattgcaatctgttgtagataaagtcaataaggatgagtgggatgaaaagaaaaaacagattactgatgaa

SEQ ID NO: 59709 - DNA, 80 bp, synthetic construct
  source 1..80: mol_type = other DNA
ttgaatcatgcactatttgtagtagataaagcccttgcccaacatgggtatatattgtttgaacaaaggatgaggccaaa

SEQ ID NO: 59710 - DNA, 80 bp, synthetic construct
  source 1..80: mol_type = other DNA
aaacggaaagaggggtcctcgcagaaggaccccaaacactacttagactcgtggattggtatgataatgccatgcgctcg

SEQ ID NO: 59711 - DNA, 80 bp, synthetic construct
  source 1..80: mol_type = other DNA
tacatggtgaatcctggttggaggttgacgaagaacgtgttgaacctgcctgtgcatttgttggtgcacttgcagtggac

SEQ ID NO: 59712 - DNA, 80 bp, synthetic construct
  source 1..80: mol_type = other DNA
atggctggttccagagcgctatccactgtatggtggtgtaccgttagataggcctgtgtttgattataaggttgttaatg

SEQ ID NO: 59713 - DNA, 80 bp, synthetic construct
  source 1..80: mol_type = other DNA
atgatttgcttgggcttttacctcccccacctaatcaagaatttgatgtttttggtccaactgtttgggatgaaattgca

SEQ ID NO: 59714 - DNA, 80 bp, synthetic construct
  source 1..80: mol_type = other DNA
tataagaaatcctttgaaaagtttgaatatgctgaatatagtgattttttaaatgtatatattgaatgtgtagcttttgc

SEQ ID NO: 59715 - DNA, 80 bp, synthetic construct
  source 1..80: mol_type = other DNA
agatagtaggtttttagaacactttaattttttgtctgaatctggatttacacatatacttggaacagataaaaatatgg

SEQ ID NO: 59716 - DNA, 80 bp, synthetic construct
  source 1..80: mol_type = other DNA
aatccacacctgcatatccaaaaatgagatggtggttaacagaagaggattatcttgatgagcatggttgggagtactat

SEQ ID NO: 59717 - DNA, 80 bp, synthetic construct
  source 1..80: mol_type = other DNA
gaaaaagaatttgacaatattgcatctggccagaattttgatgtctgttggtatcttttcttaaagaaagaaattttgag

SEQ ID NO: 59718 - DNA, 80 bp, synthetic construct
  source 1..80: mol_type = other DNA
gcaatcaaagattgacgaaggtgatatcagacaaattgtatgtgcagatcctatatactctcgtataggagcttgctttg

SEQ ID NO: 59719 - DNA, 80 bp, synthetic construct
  source 1..80: mol_type = other DNA
aacagcaccaaaatagaatgatgaaagactacactgaaaaatcctctggccagtgtggatggtctcccttctttggaggc

SEQ ID NO: 59720 - DNA, 80 bp, synthetic construct
  source 1..80: mol_type = other DNA
tttgaacaacgtatggataggcttgaaaagaaaggcaataaattctatgttgagcttgactggacacgatttgatggtac

SEQ ID NO: 59721 - DNA, 80 bp, synthetic construct
  source 1..80: mol_type = other DNA
gataccacctactcttttgatgcatatcaaaaaattacggttctcgcttatgggtgaggttgcccataaatatgaaagag

SEQ ID NO: 59722 - DNA, 80 bp, synthetic construct
  source 1..80: mol_type = other DNA
agaacaaagctagcagagcgtaaccgtgaattgcagaatgataatgcatcaatcattgtggaaaaccaacttctgcgaca

SEQ ID NO: 59723 - DNA, 80 bp, synthetic construct
  source 1..80: mol_type = other DNA
tgtataaatggtattgtaggaacctagttaataggttcgttatactcccttctggtgaggtcactctgcagaaccgtggt

SEQ ID NO: 59724 - DNA, 80 bp, synthetic construct
  source 1..80: mol_type = other DNA
aatccatccggtcaaatatcaactacaatggacaataatatgattaattattggttgcaagcctttgagttcaaatattt

SEQ ID NO: 59725 - DNA, 80 bp, synthetic construct
  source 1..80: mol_type = other DNA
gggcctacctgaagatgaatggatacattttgacactattgtgtatggtgatgataggctctctacctatcgcactttac

SEQ ID NO: 59726 - DNA, 80 bp, synthetic construct
  source 1..80: mol_type = other DNA
cagctgattacacctccaaagttgtagccatgtataaagatgtctttggaatgtgggtaaagccagagaaagttaaggtc

SEQ ID NO: 59727 - DNA, 80 bp, synthetic construct
  source 1..80: mol_type = other DNA
tcagacactctcattggtctatcattctgtggattcacaaatactaagaaaggacctgcacctagtgaaccatataagtt

SEQ ID NO: 59728 - DNA, 80 bp, synthetic construct
  source 1..80: mol_type = other DNA
aatggcttcactacttaaacctgtgagcaaactacctgacattgtagccctgcatgggaaacttttgtgcttccagttgt

SEQ ID NO: 59729 - DNA, 80 bp, synthetic construct
  source 1..80: mol_type = other DNA
tgatggcaaataacgctgatcacccattttatgggtatgttgagcaatgcctgcattatacacaccgtgctcttagtgat

SEQ ID NO: 59730 - DNA, 80 bp, synthetic construct
  source 1..80: mol_type = other DNA
gcgaacttaccaaggcgcttcactcggagacaattggagtacatttggaggggtggaccaaatggagattatggctaatg

SEQ ID NO: 59731 - DNA, 80 bp, synthetic construct
  source 1..80: mol_type = other DNA
ccaataagggtgtgacaattaatgtaggaaatgtcaaacgtaagcagcgtgctgccagtaaccagcgaattagatctgct

SEQ ID NO: 59732 - DNA, 80 bp, synthetic construct
  source 1..80: mol_type = other DNA
gggccaggtcctaagcgagcatccaagcttaggaaacgttggcattttcctaatcggaatcgccgtcgtaggacgcatct

SEQ ID NO: 59733 - DNA, 80 bp, synthetic construct
  source 1..80: mol_type = other DNA
tgaagtggagaggctcaggccacctgctactcgaccagtgcgttttagtaatttcgcactatttgtcctcttctttttcc

SEQ ID NO: 59734 - DNA, 80 bp, synthetic construct
  source 1..80: mol_type = other DNA
taatacaactgggcctaagcctgcggtgtcacagacgatcacagcaacacttggcaccgttggatcaaatttgagtgatg

SEQ ID NO: 59735 - DNA, 80 bp, synthetic construct
  source 1..80: mol_type = other DNA
ttgttgagacagaatgtgcagtgttccttaatcctgttgtggccaaagattctggggctagtgccaccttcgggccctta

SEQ ID NO: 59736 - DNA, 80 bp, synthetic construct
  source 1..80: mol_type = other DNA
caatcattaggggcccaatatgcattatggagacttaagtggctggaggttcgcctccagccattagttggtagttctgc

SEQ ID NO: 59737 - DNA, 80 bp, synthetic construct
  source 1..80: mol_type = other DNA
tgttagtggcactgtagttagagttagtcttaacatgacaactggccctacattgaattcatggtcgggtcttggtgcgc

SEQ ID NO: 59738 - DNA, 80 bp, synthetic construct
  source 1..80: mol_type = other DNA
gatttcatcgagatgtgcgtgtcggatctggcctagtgtggaaaattacacagagacatgtttcaggcccttgtgaaact

SEQ ID NO: 59739 - DNA, 80 bp, synthetic construct
  source 1..80: mol_type = other DNA
tggtggaaaacaaatacagcagaagatccctcactatcacttggtcctgcattggaagtccacacaattgggaagacaat

SEQ ID NO: 59740 - DNA, 80 bp, synthetic construct
  source 1..80: mol_type = other DNA
gagtacttacaaaaatgaaacttttactagtggactttttctcttggagattacaggacattgggagtttgctaattatg

SEQ ID NO: 59741 - DNA, 80 bp, synthetic construct
  source 1..80: mol_type = other DNA
ctgcatcaccagcattggcaactttaacccaacataaagatgatagtgagactactaagactcttgctataagtgcggag

SEQ ID NO: 59742 - DNA, 80 bp, synthetic construct
  source 1..80: mol_type = other DNA
ggagcaaatgaaccagttgaaatgttaattcctgttggcaagtggaatatgaaagagcagtatggtggaaatggtacact

SEQ ID NO: 59743 - DNA, 80 bp, synthetic construct
  source 1..80: mol_type = other DNA
tggtgaagcaatttaccaagttgttgacactagtgtgactgttgttacagatctttttccaccaccattttcatggcttg

SEQ ID NO: 59744 - DNA, 80 bp, synthetic construct
  source 1..80: mol_type = other DNA
ttttctttattattggaactaaggcagagaattggcaagatcaaactaaagattatgtaattgactttttaagggatgta

SEQ ID NO: 59745 - DNA, 80 bp, synthetic construct
  source 1..80: mol_type = other DNA
ggaaagcatcatggtggtttatcaggaaagttataggtaaaagcaaaacctatactctaacaggaacaaatcaacaaata

SEQ ID NO: 59746 - DNA, 80 bp, synthetic construct
  source 1..80: mol_type = other DNA
acagctgatgtttacagagtttacacatctgcttccgcagcaagagatgataaaccagcaatttctagtactgcccacca

SEQ ID NO: 59747 - DNA, 80 bp, synthetic construct
  source 1..80: mol_type = other DNA
ggcaaaaaacctcacagggtcagttgtgattacccagatatctactgataatattttgaatgagacaacatatactggac

SEQ ID NO: 59748 - DNA, 80 bp, synthetic construct
  source 1..80: mol_type = other DNA
ccagatctgtgctaccagaccaacccattggaccatcatcatatccaatgaccccagactcacttgttttgatggctggt

SEQ ID NO: 59749 - DNA, 80 bp, synthetic construct
  source 1..80: mol_type = other DNA
tatttcagggcccctgaaataaatgagaattttggcagatacatgccatatgttttccagcagcgaagtgaggtgatcaa

SEQ ID NO: 59750 - DNA, 80 bp, synthetic construct
  source 1..80: mol_type = other DNA
atttgttagtggtacacaccatactatggttgttggtttttggactgttgatagaaccatgtggttggataaacacttta

SEQ ID NO: 59751 - DNA, 80 bp, synthetic construct
  source 1..80: mol_type = other DNA
accactttactaatgaaccagatggtgtgtttggtgaggttgggaacatcctcatcaatggtgataatgttgctaaagtt

SEQ ID NO: 59752 - DNA, 80 bp, synthetic construct
  source 1..80: mol_type = other DNA
atcaccatgagtggttcatctgcaacatctgagaggggagccactttaatgctttgtaaaaccactaaaccagtacaaac

SEQ ID NO: 59753 - DNA, 80 bp, synthetic construct
  source 1..80: mol_type = other DNA
ctttagtgttaatgctgatgttttcataccagcatacagggtcattgatggtcaaagtagtaaggatatcaaaatccaga

SEQ ID NO: 59754 - DNA, 80 bp, synthetic construct
  source 1..80: mol_type = other DNA
ttaattcatgggaagataacaaacagctccagtttacatcaatgcctactggcacttattttatggtcctcactatgggt

SEQ ID NO: 59755 - DNA, 80 bp, synthetic construct
  source 1..80: mol_type = other DNA
aagtatgaatttatatctaatttagatatatattactctgtcttattaaatcttattaggtgggaagtcatttcatgtgt

SEQ ID NO: 59756 - DNA, 80 bp, synthetic construct
  source 1..80: mol_type = other DNA
ggtggcacatttgtagttaagaactatgttgtttataatgaaagaataaacaatgaccttcaactcccagctttttgggg

SEQ ID NO: 59757 - DNA, 80 bp, synthetic construct
  source 1..80: mol_type = other DNA
gaaatatttatctcaagcttttggcttgagttggagctcaccaacatatgcctgtgtcacatgggaacccatttacagta

SEQ ID NO: 59758 - DNA, 80 bp, synthetic construct
  source 1..80: mol_type = other DNA
atgaaccactaccacatcgtaccatagaatgggacgagagtagtgacgaagatgaagaaccagatgaattttttgatgag

SEQ ID NO: 59759 - DNA, 80 bp, synthetic construct
  source 1..80: mol_type = other DNA
gaccccatagctacactacatgcagttgatgcagagagaaaaatccggcgtgcaatattcaatgctctcatggaagaggg

SEQ ID NO: 59760 - DNA, 80 bp, synthetic construct
  source 1..80: mol_type = other DNA
tgttgatgctggccgctctgcagaatatgcagcaagagcatgccctactgaaattcagaagaggaggagaggactctatg

SEQ ID NO: 59761 - DNA, 80 bp, synthetic construct
  source 1..80: mol_type = other DNA
aaagcttgctgtccgacggcttatcacctgagacgtcgtacagcgaagcatgtcttttagacaaataaaattttatcttt

SEQ ID NO: 59762 - DNA, 80 bp, synthetic construct
  source 1..80: mol_type = other DNA
ttatcacctgagacgtcgtacagcgaagcatgtcttttagacaaataaaattttatctttttttttctaatcaggtagat

SEQ ID NO: 59763 - DNA, 80 bp, synthetic construct
  source 1..80: mol_type = other DNA
tattgccatagtttccttctttaaattgaaaagaccatgtgttgccataattggtttgtttttggcgactatttcaaggt

SEQ ID NO: 59764 - DNA, 80 bp, synthetic construct
  source 1..80: mol_type = other DNA
ataattattcagcattgtctattgtgccatatttagacatttacagtactgcttttttatatgtccttatggttgtctac

SEQ ID NO: 59765 - DNA, 80 bp, synthetic construct
  source 1..80: mol_type = other DNA
gaattgtcaccagctgtacagaaccagcttcgagacattttcccttatgaggtacctctaaacacaatgattgtgccttt

SEQ ID NO: 59766 - DNA, 80 bp, synthetic construct
  source 1..80: mol_type = other DNA
tttttggtgccacatgttgctatagttacatcagttgtttgtgctatgctattcactattgttagtatggtatgccctca

SEQ ID NO: 59767 - DNA, 80 bp, synthetic construct
  source 1..80: mol_type = other DNA
tcaccagtttatcatgcgtgttcgtggtgactggttggttgttttagtcacaattgccacttatatatgtgattccatgg

SEQ ID NO: 59768 - DNA, 80 bp, synthetic construct
  source 1..80: mol_type = other DNA
gcatacataccacagccattgctataatggctgctgttgcacgtatatatatgtgtatgccggctaccactgcatctgtt

SEQ ID NO: 59769 - DNA, 80 bp, synthetic construct
  source 1..80: mol_type = other DNA
accaatgccttgtctacctgctgggtgtctgtggaaacaaagccgggtggtgactttgatttctgtcttctcaagccacc

SEQ ID NO: 59770 - DNA, 80 bp, synthetic construct
  source 1..80: mol_type = other DNA
tctcaaccaccttgagattgatgaacctacaggtcaaactgcagactggctgagcattgtggtctacctgacatcatttg

SEQ ID NO: 59771 - DNA, 80 bp, synthetic construct
  source 1..80: mol_type = other DNA
agggtatgtcagaaattttggactattattaccattccttttcttttcttaactgcatatgagactaatactcgaatagc

SEQ ID NO: 59772 - DNA, 80 bp, synthetic construct
  source 1..80: mol_type = other DNA
agctggcagcagaacaagctaaaatttattttgctcaattaagaagaaatctgagatctttaggacacaacttaaaggcg

SEQ ID NO: 59773 - DNA, 80 bp, synthetic construct
  source 1..80: mol_type = other DNA
accgaaacaattctatctacacactttatggtatattccaagagaatttattatgatggatctgtgctatctcagtgtct

SEQ ID NO: 59774 - DNA, 80 bp, synthetic construct
  source 1..80: mol_type = other DNA
caaaaccgtgtctcggtgttgtttttggtctgaaacattagtagacgagacaaaatcagcttgtagcaatatttccacaa

SEQ ID NO: 59775 - DNA, 80 bp, synthetic construct
  source 1..80: mol_type = other DNA
gtctggcaaaatcaatcgaaaacggactttcaagacgtttaggttacatgttaaacgtcctaaaagtgatgcagcaaata

SEQ ID NO: 59776 - DNA, 80 bp, synthetic construct
  source 1..80: mol_type = other DNA
catatatctttgggtatgagcattaatgacacaataaccccagatgtcacatatgatctaatgacaaaccagtcatggat

SEQ ID NO: 59777 - DNA, 80 bp, synthetic construct
  source 1..80: mol_type = other DNA
atgatctaatgacaaaccagtcatggatgatttcagcatctctgattccggcttctttaggaggatataactaccttaat

SEQ ID NO: 59778 - DNA, 80 bp, synthetic construct
  source 1..80: mol_type = other DNA
agcactagtccaaggtgataatcaaacaattgctatgacaagaagggtacacccgaatttaggcttcaaagccaagaagg

SEQ ID NO: 59779 - DNA, 80 bp, synthetic construct
  source 1..80: mol_type = other DNA
atactgcggatttaaataatatatcaattataattcattcagagttttatattattccaagatcccaagaatctaaatgt

SEQ ID NO: 59780 - DNA, 80 bp, synthetic construct
  source 1..80: mol_type = other DNA
ccaagagtggtaggatggctatgcctttccatattggtgttgcagacaagttaatgtcaatgggatcttccaggtcacgc

SEQ ID NO: 59781 - DNA, 80 bp, synthetic construct
  source 1..80: mol_type = other DNA
tcttcatctgttgttgagataaaagacagtacaggtaaggttgtacaaaaatccactcttatgccaaactggttgggcac

SEQ ID NO: 59782 - DNA, 80 bp, synthetic construct
  source 1..80: mol_type = other DNA
aatgtaccagagtgctcgtggcatgttccaacgagttcgctctggtgtagcgtcctttgtaagagttaacccaaactgtc

SEQ ID NO: 59783 - DNA, 80 bp, synthetic construct
  source 1..80: mol_type = other DNA
tatgtcatataaaagttgatggctgtagtggcacaggttttagacttggcaatgatattgtcacagctgcacatgtcata

SEQ ID NO: 59784 - DNA, 80 bp, synthetic construct
  source 1..80: mol_type = other DNA
ggcaacgcaacgcaagttgaggttgtctacaacaattatgttgcccaagcaaaggttagacacataccagataaagatat

SEQ ID NO: 59785 - DNA, 80 bp, synthetic construct
  source 1..80: mol_type = other DNA
agcatatcttattcttccagaaggattgaaatcaatgccagtacttaaactagcaaaaacaccttcatatgaacaggtta

SEQ ID NO: 59786 - DNA, 80 bp, synthetic construct
  source 1..80: mol_type = other DNA
ccattattgcacttgaagggaactgtatgttaatacctactacagagggtgtttgccatggtgaaacaatttcatacgct

SEQ ID NO: 59787 - DNA, 80 bp, synthetic construct
  source 1..80: mol_type = other DNA
tgtgccacacgagatggcatgagtggtgccccagtcttggatgttaatggtaatgttctaggtgtccatcagacaaatac

SEQ ID NO: 59788 - DNA, 80 bp, synthetic construct
  source 1..80: mol_type = other DNA
gattgttccactttcacggtattcccttgggacaggtgttacacttgctgtccaagggatgactgaacttagtgaataca

SEQ ID NO: 59789 - DNA, 80 bp, synthetic construct
  source 1..80: mol_type = other DNA
tggctatacaggtggtgcaacagttataagagctacagacgcagcaccatatattgatgagaatgctgcgcttaaaagag

SEQ ID NO: 59790 - DNA, 80 bp, synthetic construct
  source 1..80: mol_type = other DNA
aaattgaagagttgaagaagatcataaaagaacatgctttgcaacagcgtgctgttcaggataatgaagtcgttggcata

SEQ ID NO: 59791 - DNA, 80 bp, synthetic construct
  source 1..80: mol_type = other DNA
gtacgtgcagcagtccaacgtgaaattggtgttctccgggatgagttaaattcatgttatcagaaaaagaaaggaaagaa

SEQ ID NO: 59792 - DNA, 80 bp, synthetic construct
  source 1..80: mol_type = other DNA
taaaaaaggacgtggcgctcgtcatagaatgttgcgccgtggccaaaaattcttaactgaagaagagtatcaggaacttt

SEQ ID NO: 59793 - DNA, 80 bp, synthetic construct
  source 1..80: mol_type = other DNA
tagataagggtcttactagggaacaactattggatgctatagaggaaatagttagatctagaattggttttcctgattgg

SEQ ID NO: 59794 - DNA, 80 bp, synthetic construct
  source 1..80: mol_type = other DNA
tcagaccctgaatactcatctgaggaggatgatgctgcaatcacttactggtgggaacaggtgaaagaagacaattataa

SEQ ID NO: 59795 - DNA, 80 bp, synthetic construct
  source 1..80: mol_type = other DNA
agatggtgtcccccagtttgaacacattgtaccaaaatattcacctaatgaaagaactttttctgaacaggagcgcaaag

SEQ ID NO: 59796 - DNA, 80 bp, synthetic construct
  source 1..80: mol_type = other DNA
atgttgcaaaagaattggaaatgctgcaatccattgttgataaagtgaataaagatgaatgggatgagaaaaagaaacaa

SEQ ID NO: 59797 - DNA, 80 bp, synthetic construct
  source 1..80: mol_type = other DNA
atcactgatgatttaaatcatgcattgtatattgttgataaagcattggcacaacatgggtatatcctgtttgaacaaag

SEQ ID NO: 59798 - DNA, 80 bp, synthetic construct
  source 1..80: mol_type = other DNA
aatgaggccaaaaaacgggaaaaggggtcctcggaggaggaccccaaacactacctagattcatggattggtatgctaat

SEQ ID NO: 59799 - DNA, 80 bp, synthetic construct
  source 1..80: mol_type = other DNA
acacctacgtgttgcaccatgattcatggcttgaggttgatgaagatcgagtggatcctgcatgtgcctatattggcaca

SEQ ID NO: 59800 - DNA, 80 bp, synthetic construct
  source 1..80: mol_type = other DNA
gccttgcactcggtggctggtccccgagcgctatccattgtatggtggtgtacctttagataggcctgtttttgatttta

SEQ ID NO: 59801 - DNA, 80 bp, synthetic construct
  source 1..80: mol_type = other DNA
aaatagttaatgaagatttattaggtttattacccccacctcccaatagtgattttgatgtttttggtcctactgtttgg

SEQ ID NO: 59802 - DNA, 80 bp, synthetic construct
  source 1..80: mol_type = other DNA
gatgagatagcatataaaaaatcttttgaaaagtttgaatatgcagaatatagtgattttttaaatatgtatagtgattg

SEQ ID NO: 59803 - DNA, 80 bp, synthetic construct
  source 1..80: mol_type = other DNA
tgttgcctttgctgatagtagatttttagagcattttaattttctatctgagtctggatttacacatatattaggtactg

SEQ ID NO: 59804 - DNA, 80 bp, synthetic construct
  source 1..80: mol_type = other DNA
acaaaaatatagagtctacacctgcatatccaaaaatgagatggtggtcaactgaagaagattatcttgaagaacatggt

SEQ ID NO: 59805 - DNA, 80 bp, synthetic construct
  source 1..80: mol_type = other DNA
tgggaatattatgttaaagaatttgaaaatattgcgtctggccaaaattttgatgtgtgttggtatctttttcttaaaaa

SEQ ID NO: 59806 - DNA, 80 bp, synthetic construct
  source 1..80: mol_type = other DNA
agaaattcttaaacaaacaaaaattgatgagggtgatgtcagacaaattgtttgtgcagatccaatatattcacgcatag

SEQ ID NO: 59807 - DNA, 80 bp, synthetic construct
  source 1..80: mol_type = other DNA
gtgcgtgttttgaacaacatcaaaataaaactatgaaagaatacactgaaaagtcatctggacaatgtggttggtcaccg

SEQ ID NO: 59808 - DNA, 80 bp, synthetic construct
  source 1..80: mol_type = other DNA
ttttttggaggttttgaacaaaggatgtgtagacttgaagggaaagggaattccatttatgtagaattggattggaccag

SEQ ID NO: 59809 - DNA, 80 bp, synthetic construct
  source 1..80: mol_type = other DNA
atttgatggtactataccaccaacattattgttgcacatcaaaaaactgcggttttccttaatgggtgatgttgcacata

SEQ ID NO: 59810 - DNA, 80 bp, synthetic construct
  source 1..80: mol_type = other DNA
ttggcactagatagactcaagctacttgaacgtaaccgtgaattgcaagatgaaaattcaacattaattatggacaatca

SEQ ID NO: 59811 - DNA, 80 bp, synthetic construct
  source 1..80: mol_type = other DNA
aatatgagaatgtgtataagtggtattgtagaaacctggtccataggtatgtcatacttccctctggcgaagtaaccctc

SEQ ID NO: 59812 - DNA, 80 bp, synthetic construct
  source 1..80: mol_type = other DNA
caaaatcgtggcaatccatctggtcaaatatccacaacaatggacaataatatgattaattattggctccaagcatttga

SEQ ID NO: 59813 - DNA, 80 bp, synthetic construct
  source 1..80: mol_type = other DNA
gtttaaatatttaggcttacctgaagaggagtggattcattttgacacaatagtgtacggtgatgaccgattgtccactt

SEQ ID NO: 59814 - DNA, 80 bp, synthetic construct
  source 1..80: mol_type = other DNA
atagaacattgccagacaattatgttaatcaagttgttaacatgtacaaagatgtctttggaatgtgggttaaacctgaa

SEQ ID NO: 59815 - DNA, 80 bp, synthetic construct
  source 1..80: mol_type = other DNA
aaagtcaaagtttcaaataccctcaaaggactctcattttgtggttttacaaacacagataatggcccagttcctagtga

SEQ ID NO: 59816 - DNA, 80 bp, synthetic construct
  source 1..80: mol_type = other DNA
accatataaattgatggcttctcttttaaaaccagttacaaagctgccagatataatagccctacatgggaaacttttgt

SEQ ID NO: 59817 - DNA, 80 bp, synthetic construct
  source 1..80: mol_type = other DNA
gcttccagttgttgatggcgaacaacgtagaacatccattttatggatacgttgagcaatgcctacattatacacaccga

SEQ ID NO: 59818 - DNA, 80 bp, synthetic construct
  source 1..80: mol_type = other DNA
gctcttagtgatgctagcttgccaaggcgcttcactcggagacaattggagtacatttggaggggtggaccaaatggaga

SEQ ID NO: 59819 - DNA, 80 bp, synthetic construct
  source 1..80: mol_type = other DNA
ttatggctaatgccaataagggtgtgactattaatgtaggaaatgtcaaacgcaagcaacgtgctccaggtaaccagcga

SEQ ID NO: 59820 - DNA, 80 bp, synthetic construct
  source 1..80: mol_type = other DNA
gctaaacctcctggacctagtcctaagcgaacattcaaacttaggaaacgttggcattttcctaataggaatcgccgtcg

SEQ ID NO: 59821 - DNA, 80 bp, synthetic construct
  source 1..80: mol_type = other DNA
attactgcgacacgaagtggagaggctgagaccacctgctactcgaccggtgcgatttagtaatttcgcactttttgttc

SEQ ID NO: 59822 - DNA, 80 bp, synthetic construct
  source 1..80: mol_type = other DNA
tagggcgaatcttaatacaactgggcctaaacctgcggtgtcgcaaacaatcactgcaacactcggcaccgttggatcaa

SEQ ID NO: 59823 - DNA, 80 bp, synthetic construct
  source 1..80: mol_type = other DNA
atttaagtgatgttgttgaaacagaatgtgcagttttcttaaatccagtggtagctaaagactcaggtgctagtgccact

SEQ ID NO: 59824 - DNA, 80 bp, synthetic construct
  source 1..80: mol_type = other DNA
tttggccctctgcagtcattaggtgcacagtatgcactgtggaggttgaaatggctagaagttagacttcagccattagt

SEQ ID NO: 59825 - DNA, 80 bp, synthetic construct
  source 1..80: mol_type = other DNA
gggtagttctgcagttagtggcacagttgttagggtcagcttaaacatgactactggaccaactttgaactcatggtctg

SEQ ID NO: 59826 - DNA, 80 bp, synthetic construct
  source 1..80: mol_type = other DNA
gtctcggagctcggtttcaccgagatgttcgagttggctctgggcttgtctggaagataacccagaggcatgtttctggc

SEQ ID NO: 59827 - DNA, 80 bp, synthetic construct
  source 1..80: mol_type = other DNA
ccgtgtgaaacatggtggaaaacagatacagcagaggacccatcattatcactgggacctgcacttgaggtccacaccat

SEQ ID NO: 59828 - DNA, 80 bp, synthetic construct
  source 1..80: mol_type = other DNA
tggtaaaaccatgagtacatataaaaatgagacttttacagctggtctgtttctgttagaaataacaggacattgggaat

SEQ ID NO: 59829 - DNA, 80 bp, synthetic construct
  source 1..80: mol_type = other DNA
ttgcaaattacgcagcatcaccagcattggcaaccttgacacaacataaagatgacagtgaaacaaccaaaaccctcgcc

SEQ ID NO: 59830 - DNA, 80 bp, synthetic construct
  source 1..80: mol_type = other DNA
attagcgctgagggtgcaaatgagccagtagagatgcttatcccagtaggaaaatggaacatgaaagaacaatatggtgg

SEQ ID NO: 59831 - DNA, 80 bp, synthetic construct
  source 1..80: mol_type = other DNA
taatggaacacttggggaagcaatatatcaagttgttgatactagtgtaactgtagttacagacttgttccccccaccgt

SEQ ID NO: 59832 - DNA, 80 bp, synthetic construct
  source 1..80: mol_type = other DNA
tctttttcttccttttctttataattggaacaaaggcagaaagttggcaggatcagactaaagattatataatggattca

SEQ ID NO: 59833 - DNA, 80 bp, synthetic construct
  source 1..80: mol_type = other DNA
tctcatggttgggtaaagcttcatggtggtttatcagaaaggttataggaaaaagcaagacatatactatatcaggaacc

SEQ ID NO: 59834 - DNA, 80 bp, synthetic construct
  source 1..80: mol_type = other DNA
aaccaacaaattactgcagatgtgtatcgtgtttacacttcagcatctgccgctagagatgacaaacccgccatttctag

SEQ ID NO: 59835 - DNA, 80 bp, synthetic construct
  source 1..80: mol_type = other DNA
cactgctcaccaggccaaaaatttgactggctcagttgttatcactcaaatttcaacagacaatattttaaatgagacta

SEQ ID NO: 59836 - DNA, 80 bp, synthetic construct
  source 1..80: mol_type = other DNA
catatacaggaccaaggtcaattctacccgaccaacctattggcccatcttcttacccaatgacaccagattcacttgtt

SEQ ID NO: 59837 - DNA, 80 bp, synthetic construct
  source 1..80: mol_type = other DNA
cttatggctggatatttcaggtctccagaaataaatgacaattttggtatgtacttgccctatgttttccaacaaagtac

SEQ ID NO: 59838 - DNA, 80 bp, synthetic construct
  source 1..80: mol_type = other DNA
cagtgtgatacagtttggtagtggcaaccatcgtgtcatggttgttggtttatggacagtagaaagattgatgtggctag

SEQ ID NO: 59839 - DNA, 80 bp, synthetic construct
  source 1..80: mol_type = other DNA
acaaacattttaaccactataccaatgagccggatggcgtgtttggtgaggttggcaatatatttatcaacaatgataat

SEQ ID NO: 59840 - DNA, 80 bp, synthetic construct
  source 1..80: mol_type = other DNA
gttgccaaagtaatcaccatgagtggttcatcagctacatctgagagaggtgcaaccctcatgttatgcaaaactaccaa

SEQ ID NO: 59841 - DNA, 80 bp, synthetic construct
  source 1..80: mol_type = other DNA
accagttcaaaatttcaatctcactgctaatgtttttataccagcctatagggtagttgatggccaaggaggcaaagatg

SEQ ID NO: 59842 - DNA, 80 bp, synthetic construct
  source 1..80: mol_type = other DNA
ttaaaatacagattaatctgtgggaggaaaataaacagctacaatttcctgccatgcccagtggcacttactttatggtt

SEQ ID NO: 59843 - DNA, 80 bp, synthetic construct
  source 1..80: mol_type = other DNA
ttacaaggcataaagtatgaatttattacaaatttggatgtttattattccttcctattgggatgtattaggtgggaagt

SEQ ID NO: 59844 - DNA, 80 bp, synthetic construct
  source 1..80: mol_type = other DNA
ctaaccatggggggtggtacattcacagttggtaggtatcttgtatataatgagagaatcaataatgacctccaactatc

SEQ ID NO: 59845 - DNA, 80 bp, synthetic construct
  source 1..80: mol_type = other DNA
gggtggtacattcacagttggtaggtatcttgtatataatgagagaatcaataatgacctccaactatcagctttctggg

SEQ ID NO: 59846 - DNA, 80 bp, synthetic construct
  source 1..80: mol_type = other DNA
agctttctggggaaaatacttgtctcaagctatgggtctgagttggagttctccaacttatgcttgtgtcacctgggagc

SEQ ID NO: 59847 - DNA, 80 bp, synthetic construct
  source 1..80: mol_type = other DNA
cgatctatagtaatgagactattcatcatcgtatgattgatgaaagtgaatcagatgaaagtgaagatgatgatgaccca

SEQ ID NO: 59848 - DNA, 80 bp, synthetic construct
  source 1..80: mol_type = other DNA
gatgaattctttgatgaagatcccatcacaactctccatgcaattgattcagaaagaaccatacgccgcacgatttttag

SEQ ID NO: 59849 - DNA, 80 bp, synthetic construct
  source 1..80: mol_type = other DNA
tgcactacttgatggtggtgttgatgttgatcgtgcggccgagtatgctgccagagcatgtcctacagaaatacaaagaa

SEQ ID NO: 59850 - DNA, 80 bp, synthetic construct
  source 1..80: mol_type = other DNA
gaaggagaggactttatgaaagcctgctgtccgatggactttcccctgagacatcgtacagtgaggcatgtcttttagac

SEQ ID NO: 59851 - DNA, 80 bp, synthetic construct
  source 1..80: mol_type = other DNA
cctgagacatcgtacagtgaggcatgtcttttagacaaataaatcaattctttttttttctaatcaggtagatttagagg

SEQ ID NO: 59852 - DNA, 80 bp, synthetic construct
  source 1..80: mol_type = other DNA
tgtgtcatgcactatagctcttttctctttctttaaattaaagaggccctgtatagcaattgtaggtttatttttagcaa

SEQ ID NO: 59853 - DNA, 80 bp, synthetic construct
  source 1..80: mol_type = other DNA
ctatatcaaggtacaattactcagctttgtccattgttccataccttgatgtttatagtactgcatttttgtatgtgtta

SEQ ID NO: 59854 - DNA, 80 bp, synthetic construct
  source 1..80: mol_type = other DNA
atgtggcttaatgagttacatccagctgttcaaaatcagcttcgggagatatttccctatgaggttccattgaataccat

SEQ ID NO: 59855 - DNA, 80 bp, synthetic construct
  source 1..80: mol_type = other DNA
atggttgtctatttccttgtgcctcatgtagcagttgtgacatctgttttatgtgctacactttttacacttgttagtat

SEQ ID NO: 59856 - DNA, 80 bp, synthetic construct
  source 1..80: mol_type = other DNA
gatatgcccacatcacatgtttataacacgtgtacgtggtgattggcttgtggtgttagttacttttgcaacatatttgt

SEQ ID NO: 59857 - DNA, 80 bp, synthetic construct
  source 1..80: mol_type = other DNA
gtgactccatgggcatacatactacagccattgctattatggctgctgtggtacgtatttatacgtgtctaccagctgct

SEQ ID NO: 59858 - DNA, 80 bp, synthetic construct
  source 1..80: mol_type = other DNA
ggctttaaatttttcagatcactttgctctacgaagcaatggatttcatcaatcaaactttgttctcaaagtatactgaa

SEQ ID NO: 59859 - DNA, 80 bp, synthetic construct
  source 1..80: mol_type = other DNA
cttattcttgcattaactaatggatcaagaatacttagattcattaactcattcatcatcgtatgtaagaatatagtgat

SEQ ID NO: 59860 - DNA, 80 bp, synthetic construct
  source 1..80: mol_type = other DNA
ataaaatgagaaaaagtaataatttggaacataacacaaagaatgcgcatgaagaatatgaagaagtaatgaagcagata

SEQ ID NO: 59861 - DNA, 80 bp, synthetic construct
  source 1..80: mol_type = other DNA
gactgcactgtttaacagtttacatgatgataatgttaaatggagaatgagtgaatctattcgtcgagaaaagaaacatg

SEQ ID NO: 59862 - DNA, 80 bp, synthetic construct
  source 1..80: mol_type = other DNA
agaaatgaatttaaacattcacataatgatacaaatatatgtgaaaaatctggattagagacggaagtttgtctatgaaa

SEQ ID NO: 59863 - DNA, 80 bp, synthetic construct
  source 1..80: mol_type = other DNA
gaacggacgccatcccgttcatttctagcgagtagagaaaaacattgtacccgagacgctgagttgaggatcaatgtaga

SEQ ID NO: 59864 - DNA, 80 bp, synthetic construct
  source 1..80: mol_type = other DNA
attttttcgactttggtgttgcagataatgttttggcattaggttcctctaggtctcgtatgtggctcaatgaactgtca

SEQ ID NO: 59865 - DNA, 80 bp, synthetic construct
  source 1..80: mol_type = other DNA
aaattagacgtcacatctactacatgtacaatacggaattgtaataaattaggaccgagagaaaatgtagctataataca

SEQ ID NO: 59866 - DNA, 80 bp, synthetic construct
  source 1..80: mol_type = other DNA
aaagctctatacatgctaacaacacgaggaaggcagactacaaaggacaataaagggactaggatcagattcaaggatga

SEQ ID NO: 59867 - DNA, 80 bp, synthetic construct
  source 1..80: mol_type = other DNA
acaggtgcccaccaacatgcctttttattgcaggaatggcagagctcggggcattcttctctattctgcaggacatgcga

SEQ ID NO: 59868 - DNA, 80 bp, synthetic construct
  source 1..80: mol_type = other DNA
gtctagctggtctcttttcatcaatagcgtgcaatgtttgatgcacttgttaaaactggtgtcagtgttgaagaagcatc

SEQ ID NO: 59869 - DNA, 80 bp, synthetic construct
  source 1..80: mol_type = other DNA
aaggagaatgaagatgagtctcagcgcgagttgattaaaacaactgtcataaacccgattgctgagtcaaatggagtgag

SEQ ID NO: 59870 - DNA, 80 bp, synthetic construct
  source 1..80: mol_type = other DNA
atgggacagtggggcagagatctacttgtccttctttccagggactgagatgtttttggaaacattcaaattttacccgc

SEQ ID NO: 59871 - DNA, 80 bp, synthetic construct
  source 1..80: mol_type = other DNA
aaaaggcattgagacagcgctatggcacattgacagctgataagtggatgtcgcagaaggtgacggctatcgccaagagc

SEQ ID NO: 59872 - DNA, 80 bp, synthetic construct
  source 1..80: mol_type = other DNA
agaaggcattaagacagcgctatggcacactgacagctgacaagtggatgtcacaaaaagtgacagctatagccaagagc

SEQ ID NO: 59873 - DNA, 80 bp, synthetic construct
  source 1..80: mol_type = other DNA
gttcacgcagcataaacttaaaatagcatctaaacatataaaaccaaattatgtaacatcaaatcatagaacatcagcga

SEQ ID NO: 59874 - DNA, 80 bp, synthetic construct
  source 1..80: mol_type = other DNA
gtttgaaatggagggcctaggccaaccacagccacagggtggcgaaaagaccagcccacagcctgtgacaccacaggaca

SEQ ID NO: 59875 - DNA, 80 bp, synthetic construct
  source 1..80: mol_type = other DNA
cgtgtagacggtgatgatgctacggcatctgttggactgtgggtagctcaacccctcatcaacccatttcagacaggccc

SEQ ID NO: 59876 - DNA, 80 bp, synthetic construct
  source 1..80: mol_type = other DNA
ccattggccctacagcggccctcttactcccaactcagattgaaacaccaaacgcaagtgcacagcgcttggagttggcc

SEQ ID NO: 59877 - DNA, 80 bp, synthetic construct
  source 1..80: mol_type = other DNA
cacaatccactatactcaatacaaccacatcaaaacacacagaaagagacaccagcaccccacaatccactgtgctcaac

SEQ ID NO: 59878 - DNA, 80 bp, synthetic construct
  source 1..80: mol_type = other DNA
cacaatccactgtgctcgacacaaccacatcaaaacacacagaaagagacaccagcacctcacaatccattgcgcttgac

SEQ ID NO: 59879 - DNA, 80 bp, synthetic construct
  source 1..80: mol_type = other DNA
tttccatattggtgtgtcagacaaagttttgaatctgggttcagctcgctcacgtgagtggcttaatgagctacccagta

SEQ ID NO: 59880 - DNA, 80 bp, synthetic construct
  source 1..80: mol_type = other DNA
ggcacgactggtccaaccacatcccgtgttgttgttcctaatccggagcaacccaatgggcccgcgcagcgcttggagat

SEQ ID NO: 59881 - DNA, 80 bp, synthetic construct
  source 1..80: mol_type = other DNA
tccgtgaccctggtgtcctgccacatgcttttgttgacgctcgtattgtggaaccagtttcattcgtagttccagatgtt

SEQ ID NO: 59882 - DNA, 80 bp, synthetic construct
  source 1..80: mol_type = other DNA
cgagctgtcgactaccacaggatggacggtacggaacccacctgctcattaggattttgggtgtaccaaccactactcaa

SEQ ID NO: 59883 - DNA, 80 bp, synthetic construct
  source 1..80: mol_type = other DNA
cgccttgtccacctgctgggtgtctgtggaaacaaagccgggtggtgactttgacttttgtcttctcaagccacctggcc

SEQ ID NO: 59884 - DNA, 80 bp, synthetic construct
  source 1..80: mol_type = other DNA
gtggtatggctgtgcctttccatgttggtgtgtcagacaaagttttgaatctgggttcagctcgctcacgtgagtggctt

SEQ ID NO: 59885 - DNA, 80 bp, synthetic construct
  source 1..80: mol_type = other DNA
ccaagagtggtggtatggctgtgcctttccatattggtgtgtcagataaagttatgaacctgggttcagctcgttcacgt

SEQ ID NO: 59886 - DNA, 80 bp, synthetic construct
  source 1..80: mol_type = other DNA
gaagcatacaattgtaaataactaattagtttcaattgtaattataatttgctttttttcttccagcataaatgtatgca

SEQ ID NO: 59887 - DNA, 80 bp, synthetic construct
  source 1..80: mol_type = other DNA
accacagtggaaccaattttagatggtccttatcaacctactacatttacaccacctactgactactggatacttattaa

SEQ ID NO: 59888 - DNA, 80 bp, synthetic construct
  source 1..80: mol_type = other DNA
caattgtaaataatcaattaatttcaattgtaattataatttgctttttttcttccagcataaatgtatggaaaaaaaaa

SEQ ID NO: 59889 - DNA, 80 bp, synthetic construct
  source 1..80: mol_type = other DNA
aattgtgaataatcaattaatttcaattgtaattataatttgctttttttcttccagcataaatgtatgacaggctctaa

SEQ ID NO: 59890 - DNA, 80 bp, synthetic construct
  source 1..80: mol_type = other DNA
tgtcaacaccaattatgaccaggctctcgccacctacaatgcttggttcataggtggtacagtacctgacccagtgggtc

SEQ ID NO: 59891 - DNA, 80 bp, synthetic construct
  source 1..80: mol_type = other DNA
tataaatccggtcccattggcacagaatagatatgctccagtcaattggtgtcatggagagataaatgatttgactacag

SEQ ID NO: 59892 - DNA, 80 bp, synthetic construct
  source 1..80: mol_type = other DNA
gcacaggctgtactgcctgtggtgtatacttagacaaactcaggtctgttggaaaggtttataaaattctatctttaaaa

SEQ ID NO: 59893 - DNA, 80 bp, synthetic construct
  source 1..80: mol_type = other DNA
ctcatataacgacaaactccttggagtgggtggaccctgatagttcattaaaggatcatgtcaacctaatcgtaaatagg

SEQ ID NO: 59894 - DNA, 80 bp, synthetic construct
  source 1..80: mol_type = other DNA
tcgtaaatagggatctatcattccaagaccttgctgaaaacccatgtcaaattgatttaagtgtatcatcaattgacggt

SEQ ID NO: 59895 - DNA, 80 bp, synthetic construct
  source 1..80: mol_type = other DNA
agcacaaagctcaagcacgtattgtaagaaaatatcaacgtactgaggctgatagaggttttttcatcactactctcccg

SEQ ID NO: 59896 - DNA, 80 bp, synthetic construct
  source 1..80: mol_type = other DNA
ggcagctacatgcagacatatcacagcactgtgcccacaggggcaaatatcccaagccctacagattggctgaatgcctt

SEQ ID NO: 59897 - DNA, 80 bp, synthetic construct
  source 1..80: mol_type = other DNA
ggtctaccatctggcatgccattcacatctgttgtcaactctatcaatcatatgatatacgtggccgcagctattctaca

SEQ ID NO: 59898 - DNA, 80 bp, synthetic construct
  source 1..80: mol_type = other DNA
gttttacatgggatatgaactgtgcaaacgctcgcagtacgaatcaagattcacgcttaataatatacgagcaggaagac

SEQ ID NO: 59899 - DNA, 80 bp, synthetic construct
  source 1..80: mol_type = other DNA
tgaacagaacattacatacaatactggaagacccagggatggcgtattttccttacattgcatctgtcctgacagtcttg

SEQ ID NO: 59900 - DNA, 80 bp, synthetic construct
  source 1..80: mol_type = other DNA
ataagttaactacacgtgaaattgagcaagttgaattacttaaacgtatttatgataaattggtggtgcgatcaactgac

SEQ ID NO: 59901 - DNA, 80 bp, synthetic construct
  source 1..80: mol_type = other DNA
gacctgatggctgactgagaagccacagtcagtcatatcgcgtgtggcttaagccttaatcccgtttaaccaatccggtc

SEQ ID NO: 59902 - DNA, 80 bp, synthetic construct
  source 1..80: mol_type = other DNA
gtcttccatctatttcttctagcatttataaacatgaatcatcttcaacaacgtcaactctttctggaaaatctattggt

SEQ ID NO: 59903 - DNA, 80 bp, synthetic construct
  source 1..80: mol_type = other DNA
tacgttagtcacgacgttagacggaccatatcaaccaatcacgtttaatttaccaattgactattggatgctgattgcgc

SEQ ID NO: 59904 - DNA, 80 bp, synthetic construct
  source 1..80: mol_type = other DNA
tcaaatacacagagagaatacgttttagatggacagacggtgcagctacaagtttcaaacaactcaagtactctttggaa

SEQ ID NO: 59905 - DNA, 80 bp, synthetic construct
  source 1..80: mol_type = other DNA
attcatactatttatcaaactagaaaaaaatggaacttattctcaatattcaacattatccacgtcaaataagttgtgtg

SEQ ID NO: 59906 - DNA, 80 bp, synthetic construct
  source 1..80: mol_type = other DNA
catggatgaaaagagaagggagagtatactggtacgcaggaactacaccggatgcttcagaaagctattatctaacaata

SEQ ID NO: 59907 - DNA, 80 bp, synthetic construct
  source 1..80: mol_type = other DNA
aataacgataacagtaatgtgtcatgcgacgctgagttttatttaataccaagatcgcaaactgagttatgcgcgcagta

SEQ ID NO: 59908 - DNA, 80 bp, synthetic construct
  source 1..80: mol_type = other DNA
tataaataatgggctgcctccaattcaaaacaccaggaatgtagtgccagtaaatatatcatccagagagattagacata

SEQ ID NO: 59909 - DNA, 80 bp, synthetic construct
  source 1..80: mol_type = other DNA
ccagagagattagacatacacgagcacaaatgaatgaagacatagtagtgtcaaaaacatcattatggaaagaaatgcaa

SEQ ID NO: 59910 - DNA, 80 bp, synthetic construct
  source 1..80: mol_type = other DNA
ccacccaaataggtagagtagcagaaggtacaaacacaactgatagatggttcgcttgtgtacttgttgaaccgaacgta

SEQ ID NO: 59911 - DNA, 80 bp, synthetic construct
  source 1..80: mol_type = other DNA
ctctggcacttccaacatttgatgtttccaagatggtagatagaattaccatagacttcaatctggatgatatacaagga

SEQ ID NO: 59912 - DNA, 80 bp, synthetic construct
  source 1..80: mol_type = other DNA
tggagttatatgaggagacagatgtggcggatgacatgctaggctaagaccaataagcaaagtcaggcttagatttaggg

SEQ ID NO: 59913 - DNA, 80 bp, synthetic construct
  source 1..80: mol_type = other DNA
gcatcaccacaggacacaattggaccaagcgcagcacttctcctgcctacgcagattgagacacccaacggagctgcgca

SEQ ID NO: 59914 - DNA, 80 bp, synthetic construct
  source 1..80: mol_type = other DNA
ccacgctcccttggacaacgcgccaagcatccaacacctttcttggtgccatccatctcggtccacgcatcaacccctat

SEQ ID NO: 59915 - DNA, 80 bp, synthetic construct
  source 1..80: mol_type = other DNA
actgcacacttgagtgccatgtttgctggctggggtggcagtttccaaatacgagttaccctatctggctctgggctgta

SEQ ID NO: 59916 - DNA, 80 bp, synthetic construct
  source 1..80: mol_type = other DNA
cattcattgatgcccgcaccgtggatcctatcctcatcaacctccctgatatccgtgcggtggactgccaccgtgtggat

SEQ ID NO: 59917 - DNA, 80 bp, synthetic construct
  source 1..80: mol_type = other DNA
ggcgatgagcaaactgcaactgttgggcattgggtcgcccaaccgctcatcaacccgttccaaactggctccatctccac

SEQ ID NO: 59918 - DNA, 80 bp, synthetic construct
  source 1..80: mol_type = other DNA
aagggtagaaatggccgcagcaacaggggccgtcagcaacaacgtccccatgtgcgtgagggagtgttttgccagtgtga

SEQ ID NO: 59919 - DNA, 80 bp, synthetic construct
  source 1..80: mol_type = other DNA
atggctagcaagcccagcaaacaggtaactgttgaggtcaacaatggccggagcaggagcagatctaggcctcgatctca

SEQ ID NO: 59920 - DNA, 80 bp, synthetic construct
  source 1..80: mol_type = other DNA
gacgtgacagttggtaagaatgctgtgttcaagttgaaaccagctgacctgggtggccctagggatggctggtggctcac

SEQ ID NO: 59921 - DNA, 80 bp, synthetic construct
  source 1..80: mol_type = other DNA
ttcccaagaaggtggggggtatggctgtgcctttccatattggtgtgtcagacaaagttttgaatctgggttcagctcgc

SEQ ID NO: 59922 - DNA, 80 bp, synthetic construct
  source 1..80: mol_type = other DNA
gcagctaatgcatcagtggtggaaatcaaggatagtgctggtaaagtagttcagaaaacaacattactacccaactggat

SEQ ID NO: 59923 - DNA, 80 bp, synthetic construct
  source 1..80: mol_type = other DNA
cggctcaatgtaccaaggtgcccgaaatatgttgcaaaaagttagaactggtgttgcgacatttgtccgggttaacccta

SEQ ID NO: 59924 - DNA, 80 bp, synthetic construct
  source 1..80: mol_type = other DNA
attgcttgtgccatattagaagtgaaggttgcagtggaacaggctttaggttgggtaatgatatagttactgccgcacat

SEQ ID NO: 59925 - DNA, 80 bp, synthetic construct
  source 1..80: mol_type = other DNA
gttgtaggcaatgctgttcaggttgaggtggtatataataattatgttgctcaagctaaagttagacatatccctgataa

SEQ ID NO: 59926 - DNA, 80 bp, synthetic construct
  source 1..80: mol_type = other DNA
agatattgcatatctcatattaccagagggtctcaaaactatgcctgtcttaaaattggcaaaaaatccaaattatgagc

SEQ ID NO: 59927 - DNA, 80 bp, synthetic construct
  source 1..80: mol_type = other DNA
aggttacaataatagcacttgagggaaattgtatgcttgtttccactacagaaggtgtatgtcatggtgaaactatttca

SEQ ID NO: 59928 - DNA, 80 bp, synthetic construct
  source 1..80: mol_type = other DNA
tatgcctgtgctaccagggatggtatgagtggtgctcctgttcttgatgttaatggaaatgttcttggcgttcatcaaac

SEQ ID NO: 59929 - DNA, 80 bp, synthetic construct
  source 1..80: mol_type = other DNA
tactatgatagtacctaagtctagatatcaattgggtactggtgtcacacttgcagtccaaggtatggttacattgggtt

SEQ ID NO: 59930 - DNA, 80 bp, synthetic construct
  source 1..80: mol_type = other DNA
aaatactggatacacaggtggtgcgacagtgattagagccactgacgctgcaccatatattgatgagaatgctgcactca

SEQ ID NO: 59931 - DNA, 80 bp, synthetic construct
  source 1..80: mol_type = other DNA
aaaaagaaattgaagaattaaagaagatgctgcgcgaacaaacaatgaatcagagatctgttcaagataatgaagttgta

SEQ ID NO: 59932 - DNA, 80 bp, synthetic construct
  source 1..80: mol_type = other DNA
ggtatagtccgtgcagctgttcaaagagaaattggaatattacgtgatgaacttaattcatgttatcaaaaaaagaaagg

SEQ ID NO: 59933 - DNA, 80 bp, synthetic construct
  source 1..80: mol_type = other DNA
aaaaaataagaaaggccgtggtgcacgacatcgtatgctgcgccgtgggcaaaaatttttaacagaagaggagtaccaag

SEQ ID NO: 59934 - DNA, 80 bp, synthetic construct
  source 1..80: mol_type = other DNA
aactgttggataagggtctgactagagaacagttgcttgatgcaattgaggaaattgttagggcacgtatcgggttccct

SEQ ID NO: 59935 - DNA, 80 bp, synthetic construct
  source 1..80: mol_type = other DNA
gattggtcagaccctgaatattcatctgaagaggatgatgcagcagttacatattggtgggaacaagtaaaagagagtga

SEQ ID NO: 59936 - DNA, 80 bp, synthetic construct
  source 1..80: mol_type = other DNA
ttataaagatggagtaccccagtttgaacatattgtacccaaatattctccaaatgaaagagtattttctgaacaagagc

SEQ ID NO: 59937 - DNA, 80 bp, synthetic construct
  source 1..80: mol_type = other DNA
gtaaagatgttagtgaagagttgtctgctctgcaatccatagtagatggagtgaagaaagaagattgggaagaaaccaaa

SEQ ID NO: 59938 - DNA, 80 bp, synthetic construct
  source 1..80: mol_type = other DNA
aagcagactactgacgctcttaatcatgcactatacgttgttgataaggctcttgcacaacatggttatatactttttga

SEQ ID NO: 59939 - DNA, 80 bp, synthetic construct
  source 1..80: mol_type = other DNA
acaacgtatgcggccaaaaaacggaaaaaggggtcctcggaggaggaccccaaacactacctagatacatggattgggat

SEQ ID NO: 59940 - DNA, 80 bp, synthetic construct
  source 1..80: mol_type = other DNA
gctacagtacatatgcacttgatggtgaagtatggatcgaagttgatgaaactagaatagatccaaagtgtgcatatgtt

SEQ ID NO: 59941 - DNA, 80 bp, synthetic construct
  source 1..80: mol_type = other DNA
gcttagtccttgcgttcgttggctggtcccagaacgctttcctttgtatggtggtgtacctttagataggccagtgtatg

SEQ ID NO: 59942 - DNA, 80 bp, synthetic construct
  source 1..80: mol_type = other DNA
attttaaaattgttaatgaagatctattggggttgctcccacccccacctaataatgattttgaggtttttggtcctact

SEQ ID NO: 59943 - DNA, 80 bp, synthetic construct
  source 1..80: mol_type = other DNA
gtatgggatgagattgcatataagaaatcatttgaaaagtttgaatatgctgattatgttgattttgaacagatatatcc

SEQ ID NO: 59944 - DNA, 80 bp, synthetic construct
  source 1..80: mol_type = other DNA
tgagtgtgttgcctttgctgataaaaagtttttggaacattttaattttttgtctgattcttcttttgtaaatattttag

SEQ ID NO: 59945 - DNA, 80 bp, synthetic construct
  source 1..80: mol_type = other DNA
caactgataaaaatgttgattccacacccgcatacccaaagatgcggtggtggcttactgagagtgactatcttgaggag

SEQ ID NO: 59946 - DNA, 80 bp, synthetic construct
  source 1..80: mol_type = other DNA
tgtggatgggaatattatgttaaggagtttgaaaacatcgcttctggtcaaaatccagatgtttgttggtacttgttcct

SEQ ID NO: 59947 - DNA, 80 bp, synthetic construct
  source 1..80: mol_type = other DNA
caagaaagaaattattaaacaacaaaaaattgatgaaggagatgtcagacaaatagtatgtgctgacccaatatattcca

SEQ ID NO: 59948 - DNA, 80 bp, synthetic construct
  source 1..80: mol_type = other DNA
gaattggggcttgctttgagcaacaccaaaatgccatgatgaaggaccatactcttttatcatctggacaatgtggttgg

SEQ ID NO: 59949 - DNA, 80 bp, synthetic construct
  source 1..80: mol_type = other DNA
tcccctttctttggtggttatgaggcaagaatgtccaggctgcgctccaaagggaacaaaatctttgttgagcttgattg

SEQ ID NO: 59950 - DNA, 80 bp, synthetic construct
  source 1..80: mol_type = other DNA
gactcgatttgatggcacgataccaccaaccttgttgatgcacataaagaaattaaggttcaccttaatgggttccatgt

SEQ ID NO: 59951 - DNA, 80 bp, synthetic construct
  source 1..80: mol_type = other DNA
gggaccatggccctagatagggtaaagctcatggatcgcaataaagaactgcagctggaaaatgcatcaatgagtgttga

SEQ ID NO: 59952 - DNA, 80 bp, synthetic construct
  source 1..80: mol_type = other DNA
cccgcaagtatgaaaatgtatacaagtggtattgtaggaacctaatcaacaggtttgttgtgctgccttcaggtgaagtt

SEQ ID NO: 59953 - DNA, 80 bp, synthetic construct
  source 1..80: mol_type = other DNA
acagcgcaacaacgtggaaatccatcgggtcagatatcaaccaccatggataataacatgatcaactattggttgcaggc

SEQ ID NO: 59954 - DNA, 80 bp, synthetic construct
  source 1..80: mol_type = other DNA
atttgaatataaatttttgaatttaccagaagaagagtggatgcattttgatactttaatctatggagatgataggatat

SEQ ID NO: 59955 - DNA, 80 bp, synthetic construct
  source 1..80: mol_type = other DNA
ccacatatcgaagcatccctaatgaatacaccaaactaatagttgacatgtataaaaatgtttttggaatgtgggttaag

SEQ ID NO: 59956 - DNA, 80 bp, synthetic construct
  source 1..80: mol_type = other DNA
ccagaaaaggtcaaagtctcagagtctttggagggactctcattctgtggttttacttatacactaaatggcccagttcc

SEQ ID NO: 59957 - DNA, 80 bp, synthetic construct
  source 1..80: mol_type = other DNA
aagtgagccttacaaactcatggcctcattgttgaaacctgccacaaaattacctgatttaatagctcttcatgggaaac

SEQ ID NO: 59958 - DNA, 80 bp, synthetic construct
  source 1..80: mol_type = other DNA
ttttgtgcttccagttgttgatggcaaatgatactgcacacccattttatgggtatattgaacaatgcttgcagtataca

SEQ ID NO: 59959 - DNA, 80 bp, synthetic construct
  source 1..80: mol_type = other DNA
caccgtgccctcagtgatgttagcttgccaaggcgcttcactcgaaggcagctggagtacatttggaggggtggaccaaa

SEQ ID NO: 59960 - DNA, 80 bp, synthetic construct
  source 1..80: mol_type = other DNA
tgacgactatggctaatgccagtaaaggtgttacagttaacatcaacaatgcaaaacggaagcctcgcttcaccaataac

SEQ ID NO: 59961 - DNA, 80 bp, synthetic construct
  source 1..80: mol_type = other DNA
cagcgagctagatctactaggccaaattttacaccagcacccaaatttaggaaacgtcggtttattcctaataggaatcg

SEQ ID NO: 59962 - DNA, 80 bp, synthetic construct
  source 1..80: mol_type = other DNA
tttacaactgactcgccatgaattggagaggtgtaggccaaccatcattcgaccgcaaagatatggtaactttgcacttt

SEQ ID NO: 59963 - DNA, 80 bp, synthetic construct
  source 1..80: mol_type = other DNA
ccgtcgtaggcaaaatactagtacaactgggcctaaacctgcggtgtcgcagacaattacagcaacactcggcaccgttg

SEQ ID NO: 59964 - DNA, 80 bp, synthetic construct
  source 1..80: mol_type = other DNA
gatcaaatttgagtgatgttgttgaaactgaatgtgcagtctttttgaatcccattatagcaaaagactctggtgccagt

SEQ ID NO: 59965 - DNA, 80 bp, synthetic construct
  source 1..80: mol_type = other DNA
gcaacttttgggccccttcaatccttgggcgcacagtatgcattatggaggctcaagtggctcgaagtcagacttcagcc

SEQ ID NO: 59966 - DNA, 80 bp, synthetic construct
  source 1..80: mol_type = other DNA
tttggtgggaaattcagctgtgagtggtaccgtagctcgtgttagtcttaacatgactactggtcccactctcaattcat

SEQ ID NO: 59967 - DNA, 80 bp, synthetic construct
  source 1..80: mol_type = other DNA
ggtctggtcttggagctcgaattcacaaggatgttagagttggttcaaatcttgtttggcgcattaaacagcgtctagtg

SEQ ID NO: 59968 - DNA, 80 bp, synthetic construct
  source 1..80: mol_type = other DNA
agtggaccttgtgaaacttggtggaaaaccaatacagctgaggacccatcattatctcttggacctgcactggaagtaca

SEQ ID NO: 59969 - DNA, 80 bp, synthetic construct
  source 1..80: mol_type = other DNA
taccataggtaagactatgagcacttataaaaatgaagtgttttccagtgggctattccttcttgagataactggccact

SEQ ID NO: 59970 - DNA, 80 bp, synthetic construct
  source 1..80: mol_type = other DNA
gggaatttgcaaattatgctgcttctccagcccttgctacactcacacaacataaagatgacagtgagaccacaaaaaca

SEQ ID NO: 59971 - DNA, 80 bp, synthetic construct
  source 1..80: mol_type = other DNA
cttgcaattagtgctgatggagctaatgaaccagttgagatgctaatacctgtgaatgaatggaatatgaaggcacagta

SEQ ID NO: 59972 - DNA, 80 bp, synthetic construct
  source 1..80: mol_type = other DNA
tggaggaaatggcacacttggtgaagcaatttaccaagttgttgataccagtgttacagttgtaacagacctctttccac

SEQ ID NO: 59973 - DNA, 80 bp, synthetic construct
  source 1..80: mol_type = other DNA
ttgttcttttctttttccttttctttattttaggaacaaaggccgaagattggcatgatcagactcaggattatttggtt

SEQ ID NO: 59974 - DNA, 80 bp, synthetic construct
  source 1..80: mol_type = other DNA
caccattttcatggattggtaaagcttcatggtggtttatcagaaaaatgattggtaagacaaaacaattccaggttgtt

SEQ ID NO: 59975 - DNA, 80 bp, synthetic construct
  source 1..80: mol_type = other DNA
gttaatggtcaaaaccaaactcttacagcagacgtctatcgtgtttacacttcagcttctgctgctagagatgataaacc

SEQ ID NO: 59976 - DNA, 80 bp, synthetic construct
  source 1..80: mol_type = other DNA
agcaatttccagcaaggcacatgaagctaagcatctgactggtgcagttgttatcacacaaatttccacagacaacattc

SEQ ID NO: 59977 - DNA, 80 bp, synthetic construct
  source 1..80: mol_type = other DNA
tttcagaaaccacatatacaggcccaagatccattgtcacaccagaaactcctattggcccgtctagctatccaatgaca

SEQ ID NO: 59978 - DNA, 80 bp, synthetic construct
  source 1..80: mol_type = other DNA
ccaagttctttggtgcttatggctggatatttcagtggaccagaaattagtgacaattttggcaagtacatgcctttgct

SEQ ID NO: 59979 - DNA, 80 bp, synthetic construct
  source 1..80: mol_type = other DNA
tttccaacagagcacttctaaggttacatttaggagtggtagtcataccataaagattgtaagcatggttcttgttgacc

SEQ ID NO: 59980 - DNA, 80 bp, synthetic construct
  source 1..80: mol_type = other DNA
ggcttatgtggttggataagcactttaaccagtacactaatgaaccagatggagtttttggtgacgttggcaatgttttt

SEQ ID NO: 59981 - DNA, 80 bp, synthetic construct
  source 1..80: mol_type = other DNA
gttgacaacgataatgttgccaaggttattaccatgagtgggtcatcggcgccagctaacagaggagccaccttgatgct

SEQ ID NO: 59982 - DNA, 80 bp, synthetic construct
  source 1..80: mol_type = other DNA
atgtaaagccacaaaaaatatccagactttcaattttgcagcaacagtgtacataccagcttataaagtaaaagatggtg

SEQ ID NO: 59983 - DNA, 80 bp, synthetic construct
  source 1..80: mol_type = other DNA
caggtggcaaagatgttgttctgaatgtggcccagtgggaagcaaacaagactttgacatacccagctatacctaaggac

SEQ ID NO: 59984 - DNA, 80 bp, synthetic construct
  source 1..80: mol_type = other DNA
gaatttctgaaagaagcaaaacaggaaattgtatctaatttggatacatactacagtctccttttacatgtagttaggtg

SEQ ID NO: 59985 - DNA, 80 bp, synthetic construct
  source 1..80: mol_type = other DNA
acgtattttatggttgtaacaatgggaggtgctagctttaccatccaaaggtatgtggtatacaatgagggaattggtga

SEQ ID NO: 59986 - DNA, 80 bp, synthetic construct
  source 1..80: mol_type = other DNA
tggcctagaattaccggcattctggggcaaatacttatcccagctatatggttttagttggagttcaccaacctatgcat

SEQ ID NO: 59987 - DNA, 80 bp, synthetic construct
  source 1..80: mol_type = other DNA
gtgtaacctgggagcccatctatgctgatgagggtataccacatagaagtgcattaaatgatgatgaagtaagcagtgat

SEQ ID NO: 59988 - DNA, 80 bp, synthetic construct
  source 1..80: mol_type = other DNA
ggtgatactgattatgacactgacacagaagacgaagatgagttcttcggtgaggatcccattgctgcattgcacgctat

SEQ ID NO: 59989 - DNA, 80 bp, synthetic construct
  source 1..80: mol_type = other DNA
tgatgaaaagagaccagctagacgtgcaatgtttgatgcacttgttaaaactggtgtcagtgttgaagaagcatctagat

SEQ ID NO: 59990 - DNA, 80 bp, synthetic construct
  source 1..80: mol_type = other DNA
gtgtccttagagcatgtcctacaaaactccaggttaagaaaaggaacctttatgaaagcctcctgtgcgatggcttatca

SEQ ID NO: 59991 - DNA, 80 bp, synthetic construct
  source 1..80: mol_type = other DNA
cctgagtcgtcatacgaggaagcatgcaattgtaaataatcaattaatttcaattgtaattataatttgctttttttctt

SEQ ID NO: 59992 - DNA, 80 bp, synthetic construct
  source 1..80: mol_type = other DNA
ggaggtagtttcatgcattatagcaattgtttccttttttaaattaaagaggccctgtgttgcaataattggcttatttt

SEQ ID NO: 59993 - DNA, 80 bp, synthetic construct
  source 1..80: mol_type = other DNA
tagcaaccatatccagatataattatgcagcattatctattgtaccattcctggatgtttacagcactgttttcttgtat

SEQ ID NO: 59994 - DNA, 80 bp, synthetic construct
  source 1..80: mol_type = other DNA
tcacgtgagtggcttaatgagctacccagtacaacactcaaccagctgcgtgacatctttccatttgaagtcccaattaa

SEQ ID NO: 59995 - DNA, 80 bp, synthetic construct
  source 1..80: mol_type = other DNA
accaccatggttgtgtactttttggtgccccatgtagctataattacatcactagtttgtgcactactgtttactattgt

SEQ ID NO: 59996 - DNA, 80 bp, synthetic construct
  source 1..80: mol_type = other DNA
aagtatggtatgtgcgcaccaccaattcatcatacgtgttcgtggagattggcttgttgtcttaatcaccattgcaacgt

SEQ ID NO: 59997 - DNA, 80 bp, synthetic construct
  source 1..80: mol_type = other DNA
atatttgtgatgttatgggtatacatactacagcaatagctattgctgcatcgttagtgcgcatttatatgtgctttcct

SEQ ID NO: 59998 - DNA, 80 bp, synthetic construct
  source 1..80: mol_type = other DNA
ggaataaaagagacaggtagtggctggaaacgctactctgtccgcactctgccctgaaatgtctgaagcgtctgaattta

SEQ ID NO: 59999 - DNA, 80 bp, synthetic construct
  source 1..80: mol_type = other DNA
aagagtgacagtgaatcttcaagccgcggtgacgtaacgtcagtgtattcagctgaaactactaactcagaatatgagga

SEQ ID NO: 60000 - DNA, 80 bp, synthetic construct
  source 1..80: mol_type = other DNA
ggcatataacaaattgagacgtgagccagtaatagaagaaagtaatgattcttgctgtttggatgattcgtttccatcaa

SEQ ID NO: 60001 - DNA, 80 bp, synthetic construct
  source 1..80: mol_type = other DNA
ccgaaaccacaaaaaaaacaagatcagagaaaattactgaagttagatatgaacaatccgataatagtgatgtccttgaa

SEQ ID NO: 60002 - DNA, 80 bp, synthetic construct
  source 1..80: mol_type = other DNA
aaactatctgaactgacgttggaacttgagaagctcaaaactgcaacacaacctgttggcgtacatcccgcgttcaacca

SEQ ID NO: 60003 - DNA, 80 bp, synthetic construct
  source 1..80: mol_type = other DNA
aatattgagaaatgttgacaatttgaatacgaaacagaagcaggcactggtgaacgccctcgttaattcaatgaactaac

SEQ ID NO: 60004 - DNA, 80 bp, synthetic construct
  source 1..80: mol_type = other DNA
attcaatgaactaacctaatcagattgtggtttccaccggatattgacaggggtcaacccttagtgctggaataataccc

SEQ ID NO: 60005 - DNA, 80 bp, synthetic construct
  source 1..80: mol_type = other DNA
ggtttccaagtggaaatagaaagagagataaagtaagcaaagtgaacactaaaagaatgctatctgattccgcatcaact

SEQ ID NO: 60006 - DNA, 80 bp, synthetic construct
  source 1..80: mol_type = other DNA
aacttgccgacctcaactacacattgagtgtaatcactttaatgaatgacacattacattctataattcaggatcctgga

SEQ ID NO: 60007 - DNA, 80 bp, synthetic construct
  source 1..80: mol_type = other DNA
ttcggaagcggcggaactctttaccgcaagacccattggacctgatgattgactgagaagccacagtcaatcatatcgcg

SEQ ID NO: 60008 - DNA, 80 bp, synthetic construct
  source 1..80: mol_type = other DNA
ggtgtaccacatcatgtgcatttggggaccctggcgacataatgtccacaactgcaggcatgagatgcccagagcataca

SEQ ID NO: 60009 - DNA, 80 bp, synthetic construct
  source 1..80: mol_type = other DNA
atgcaaggttgatcttcacacacaagcaattgaaggggcgtggggctcaggtgttggtcttacattgacatgtggtgttg

SEQ ID NO: 60010 - DNA, 80 bp, synthetic construct
  source 1..80: mol_type = other DNA
ataactaatataggtgcagaaaagaaagagaatgtgactgtgcagattggtgaattcgctcaaagtcaatacgcaccagt

SEQ ID NO: 60011 - DNA, 80 bp, synthetic construct
  source 1..80: mol_type = other DNA
acttaccgtctaactattggtatttgattaatccatcaaatgatggtgtggtgttctcagtaacgaataacagcacattc

SEQ ID NO: 60012 - DNA, 80 bp, synthetic construct
  source 1..80: mol_type = other DNA
tggatgtttacttatttaattttaccaaatacagctcaaactaatgtcacagtaaatgtgatgaatgagacagtaaatat

SEQ ID NO: 60013 - DNA, 80 bp, synthetic construct
  source 1..80: mol_type = other DNA
atcaatagacaattcgagttcaacatataggtttgtagattattttaaaactagttccacgcaatcgtatagacagagga

SEQ ID NO: 60014 - DNA, 80 bp, synthetic construct
  source 1..80: mol_type = other DNA
actatctgattactgaacatagattacaagcttacagaagagatgaaagtggtaatatatcaaattattggggttcgtct

SEQ ID NO: 60015 - DNA, 80 bp, synthetic construct
  source 1..80: mol_type = other DNA
acatatggtgacttgagagttggaacatattttaatcctgtactcaatgcagtgataaacctaaatgcggatttctacat

SEQ ID NO: 60016 - DNA, 80 bp, synthetic construct
  source 1..80: mol_type = other DNA
tgcggatttctacattataccagattcgcaacaagagaaatgcacagaatacataaaaggaggattgccggctatgcaga

SEQ ID NO: 60017 - DNA, 80 bp, synthetic construct
  source 1..80: mol_type = other DNA
ttcatggggatcaggagagatattaagtggaaatgttgaagaacaggctttagatggaccatatacaccagatagttcga

SEQ ID NO: 60018 - DNA, 80 bp, synthetic construct
  source 1..80: mol_type = other DNA
ttccattatctctatcatccagatctattcaatatagaagagcacaagttaatgaagatattacaatttcaaaaacttct

SEQ ID NO: 60019 - DNA, 80 bp, synthetic construct
  source 1..80: mol_type = other DNA
atgaacttggaagtgctttgtggtaggataaacgtggagaatgggctgtctcttggagaaccaggcctgtacgaccaaat

SEQ ID NO: 60020 - DNA, 80 bp, synthetic construct
  source 1..80: mol_type = other DNA
aggacagcatttcttgggtgtctgatcagttctgcgactccaggggtcttgatgaagagagcaccattatgtggggttaa

SEQ ID NO: 60021 - DNA, 80 bp, synthetic construct
  source 1..80: mol_type = other DNA
gatgtaacagttggaaggaatgcagtctttaaacttagaccatcagatcttggagggcccagggatggctggtggctcac

SEQ ID NO: 60022 - DNA, 80 bp, synthetic construct
  source 1..80: mol_type = other DNA
tgattcaactacagtagaaccgattttagacggtccctatcaaccaactacatttaccccacctaaggattattggatac

SEQ ID NO: 60023 - DNA, 80 bp, synthetic construct
  source 1..80: mol_type = other DNA
tgattcaaccacagtggaaccaattttagatggtccttatcaacctactacatttacaccacctactgattattggatac

SEQ ID NO: 60024 - DNA, 80 bp, synthetic construct
  source 1..80: mol_type = other DNA
aggcagcaagagaggacatttctaatgctgtggttccaaactcagccctcattgctcttatggaggagagcctgatgctg

SEQ ID NO: 60025 - DNA, 80 bp, synthetic construct
  source 1..80: mol_type = other DNA
gtcgtacctttatcattaacctcgagaacagttatacataagagagcacaagttaatgaagacatcgtaatttcgaaagc

SEQ ID NO: 60026 - DNA, 80 bp, synthetic construct
  source 1..80: mol_type = other DNA
atccactggtgagcctggggtatatgaccagatttttgaaaggcctggcctcccaaacctcgaagtcacagtagactcca

SEQ ID NO: 60027 - DNA, 80 bp, synthetic construct
  source 1..80: mol_type = other DNA
gcagaaatgtggggttaaaccaaccaggactggggctcaggttgaggtgaagtgactctgctgtctcacttgagatatca

SEQ ID NO: 60028 - DNA, 80 bp, synthetic construct
  source 1..80: mol_type = other DNA
agtgccagtaagtatagcgtccagagagattagacatacacgagcacaaatgaatgaagatatagtagtatcaaagacat

SEQ ID NO: 60029 - DNA, 80 bp, synthetic construct
  source 1..80: mol_type = other DNA
aattaactattggatgttaattgcgcctactcaaataggtagagtagcggaaggtacaaacacaactgatagatggttcg

SEQ ID NO: 60030 - DNA, 80 bp, synthetic construct
  source 1..80: mol_type = other DNA
ggacatggtgaattgtccgattcaacactagttcaaccaacgttggatggaccgtaccagtctactacatttaacttacc

SEQ ID NO: 60031 - DNA, 80 bp, synthetic construct
  source 1..80: mol_type = other DNA
tcaaacgattcaagtaccctttggaaatttatattatttattaaactggaaaaaaatggaacttattctcaatattcaac

SEQ ID NO: 60032 - DNA, 80 bp, synthetic construct
  source 1..80: mol_type = other DNA
tcacaaactgaattgtgtgcacaatacattaataatggactaccaccagtacaaaacactagaaacgtagtgccagtgag

SEQ ID NO: 60033 - DNA, 80 bp, synthetic construct
  source 1..80: mol_type = other DNA
agtgccagtgagtctaacgtctagggaaataagacatacgcgagcgcaaatgaatgaagatatagtggtatcaaagacgt

SEQ ID NO: 60034 - DNA, 80 bp, synthetic construct
  source 1..80: mol_type = other DNA
gttgatccacctggtacgactggtccaaccacatcccgcgttgttgttcctaatccggagcaacccaatgggcccgcgca

SEQ ID NO: 60035 - DNA, 80 bp, synthetic construct
  source 1..80: mol_type = other DNA
ccttttccaccaatgccttgtctacctgctgggtgtctgtggaaacaaagccgggtggtgactttgatttctgtcttctc

SEQ ID NO: 60036 - DNA, 80 bp, synthetic construct
  source 1..80: mol_type = other DNA
ttcagaactctacagagaccagaagagagcattaggatagatgatctggagttatatgaggagacagatgtggcggatga

SEQ ID NO: 60037 - DNA, 80 bp, synthetic construct
  source 1..80: mol_type = other DNA
gacacggagaaataagtgactcaactactgtagagcctgtgttagatggtccatatcaaccagttgcatttaaacctccg

SEQ ID NO: 60038 - DNA, 80 bp, synthetic construct
  source 1..80: mol_type = other DNA
tatcatatctattgaaccaaatgttaattcagagagtagacaatactctctatttggagtcaacaagcaaattactgtag

SEQ ID NO: 60039 - DNA, 80 bp, synthetic construct
  source 1..80: mol_type = other DNA
ttaatacctcaaataaatggaagttcatggaaatgtttagaaataatagtaatgccgaattccagcataagcgtacgtta

SEQ ID NO: 60040 - DNA, 80 bp, synthetic construct
  source 1..80: mol_type = other DNA
acttcgagtacaaaactagtcggtattctgaaacatggcgggagattatggacatatcatggtgaaacaccaaacgctac

SEQ ID NO: 60041 - DNA, 80 bp, synthetic construct
  source 1..80: mol_type = other DNA
taccgattattcaacaacgtcaaatctaaatgaaattagtattacaacatatgctgaattctatattataccacgatctc

SEQ ID NO: 60042 - DNA, 80 bp, synthetic construct
  source 1..80: mol_type = other DNA
ctttatcattaacttcaagagcagttatacataagagagcacaagttaatgaagacatcgtaatttcgaaagcttcatta

SEQ ID NO: 60043 - DNA, 80 bp, synthetic construct
  source 1..80: mol_type = other DNA
aatgattattggatactagttaactcaagttctaatggtgtagtgcttgagggtactaataatacagacgtatgggtagc

SEQ ID NO: 60044 - DNA, 80 bp, synthetic construct
  source 1..80: mol_type = other DNA
agtaccattatcattatcatctagatctatacagtatacgagagcacaagttaatgaagacattacgatttcaaagactt

SEQ ID NO: 60045 - DNA, 80 bp, synthetic construct
  source 1..80: mol_type = other DNA
tgattcaactacagtggaaccagttttagatggtccttatcaaccaactacattcaaaccacccaatgattattggctgc

SEQ ID NO: 60046 - DNA, 80 bp, synthetic construct
  source 1..80: mol_type = other DNA
cccctatactgcacacttgagtgccatgtttgctggctggggtggcagtttccaaatacgagtcaccctatctggctctg

SEQ ID NO: 60047 - DNA, 80 bp, synthetic construct
  source 1..80: mol_type = other DNA
ggctgtatgcaggccgtgcagtggtcgcagtgctgcctccaggtgtcaatccagccaatgtccaaaaccctggagtgttt

SEQ ID NO: 60048 - DNA, 80 bp, synthetic construct
  source 1..80: mol_type = other DNA
ccacatgcattcattgatgcccgcaccgtggatcctatcctcatcaacctccctgatatccgtgcggtggattaccaccg

SEQ ID NO: 60049 - DNA, 80 bp, synthetic construct
  source 1..80: mol_type = other DNA
tgtggatggcgatgagcaaactgcaactgttgggctttgggtcgcccaaccgctcatcaacccgttccaaactggctcca

SEQ ID NO: 60050 - DNA, 80 bp, synthetic construct
  source 1..80: mol_type = other DNA
ctgcgcaaagggtagaaatggccgcagcaacaggggccgtcaacaacaacgtccccatgtgcgtgagggagtgttttgcc

SEQ ID NO: 60051 - DNA, 80 bp, synthetic construct
  source 1..80: mol_type = other DNA
ctgcgcaaagggtggagatggctgcagcaacaggggccgttagcaataacgtccccatgtgtgtgagggagtattttgcc

SEQ ID NO: 60052 - DNA, 80 bp, synthetic construct
  source 1..80: mol_type = other DNA
tgttttggctgggttctgataccatcattaacctttgtgatacttactattttaaagtgtattgcaaatattttccacac

SEQ ID NO: 60053 - DNA, 80 bp, synthetic construct
  source 1..80: mol_type = other DNA
atcagcattccaagcccattataaagtttgccaggtgacccatagatttagagaagagttaaaaaagacagttacaccac

SEQ ID NO: 60054 - DNA, 80 bp, synthetic construct
  source 1..80: mol_type = other DNA
aaaatcttacacctgggtgctatagaacattgaacttatttagatataaaagtagatgctatatcttcactatgtgggtc

SEQ ID NO: 60055 - DNA, 80 bp, synthetic construct
  source 1..80: mol_type = other DNA
tttctactaatctttgagtctattctttgggctgcaagtgcttctgacattccattatcaactgactggaatgataatgc

SEQ ID NO: 60056 - DNA, 80 bp, synthetic construct
  source 1..80: mol_type = other DNA
tcacggtgttggttcagtgcctatgcatactgacctagaacttgatttttctctaacatcaagctctaagtatacataca

SEQ ID NO: 60057 - DNA, 80 bp, synthetic construct
  source 1..80: mol_type = other DNA
ttgatttttctctaacatcaagctctaagtatacatacagaaggaaactcacaaaccctgttgatgcctctcaggcagtt

SEQ ID NO: 60058 - DNA, 80 bp, synthetic construct
  source 1..80: mol_type = other DNA
tagcaatcaagaaaataagttgaaggctgtgttaaggaagatcaaggaggaatttgaaaaaacaaaagggtctatggtgt

SEQ ID NO: 60059 - DNA, 80 bp, synthetic construct
  source 1..80: mol_type = other DNA
gtttgaaatggagggcaatggcctaccccaggctggacaacagcaagctctcgacgtgccaggaacaactggcccgactt

SEQ ID NO: 60060 - DNA, 80 bp, synthetic construct
  source 1..80: mol_type = other DNA
ctgggtttctgggtgttgcaacccctcatcaatccattcagccacgatgctttgtccacagcgtgggtatcggtggaaac

SEQ ID NO: 60061 - DNA, 80 bp, synthetic construct
  source 1..80: mol_type = other DNA
ttttctgttggacgggacggcttggagtatacgtggggcaaccacgacccggtaagagtttacgctcaagaatcagcgcc

SEQ ID NO: 60062 - DNA, 80 bp, synthetic construct
  source 1..80: mol_type = other DNA
tggcgatccccatggatggcctcatgagataatacagcattactatcaccgccatcctgcgtataccatcctaaccgttg

SEQ ID NO: 60063 - DNA, 80 bp, synthetic construct
  source 1..80: mol_type = other DNA
tctcagctgccgttgcagtgcttatcggcttgaccgttgcagcactgtgtacgtgtaaagcgcgacgtgaatgtttaaca

SEQ ID NO: 60064 - DNA, 80 bp, synthetic construct
  source 1..80: mol_type = other DNA
ccgtatgccctagccccgaatgccgttgttccgacttcgatagcgctcctatgttgcattagatcggctaacgctgaaac

SEQ ID NO: 60065 - DNA, 80 bp, synthetic construct
  source 1..80: mol_type = other DNA
attttctgagacgatgagctacctgtggtcaaacagtcagccgttcttttgggctcagttgtgtatccccttagccgctg

SEQ ID NO: 60066 - DNA, 80 bp, synthetic construct
  source 1..80: mol_type = other DNA
ttgtcatccttgtgcgttgctgttcatgttgcttgccttttttagtggttgccggcgtctacctggggaaggtagacgcc

SEQ ID NO: 60067 - DNA, 80 bp, synthetic construct
  source 1..80: mol_type = other DNA
ttgcttgccttttttagtggttgccggcgtctacctggggaaggtagacgcctacgaacatgcgaccactattccaaatg

SEQ ID NO: 60068 - DNA, 80 bp, synthetic construct
  source 1..80: mol_type = other DNA
ctgtctcttggagaaccaggcctgtacgaccaaatctacgaccggcctgggctaccagacctagatgtgactgccgatgc

SEQ ID NO: 60069 - DNA, 80 bp, synthetic construct
  source 1..80: mol_type = other DNA
tgagctgtgggcaaagtgccttctagatgtctcgctaggcaatgtggagggggtagtcagtgaccctgcaaaagaacttg

SEQ ID NO: 60070 - DNA, 80 bp, synthetic construct
  source 1..80: mol_type = other DNA
acattgccatctctgatgatccagaaaaagacacccccaaagaggcaaagataacctataggcgattcaagcctgcctta

SEQ ID NO: 60071 - DNA, 80 bp, synthetic construct
  source 1..80: mol_type = other DNA
agttcgagtgcccgtcaggaattctctctccaaggagtggaggggaagaagtggaagagaatggcagcaaatcagaagaa

SEQ ID NO: 60072 - DNA, 80 bp, synthetic construct
  source 1..80: mol_type = other DNA
agagaaggagtcccatgagacattgagcccgttcttggatgttgatgacataggagatttcctaacattcaacaatcttc

SEQ ID NO: 60073 - DNA, 80 bp, synthetic construct
  source 1..80: mol_type = other DNA
ttgcagattcgaggtatggagacgagtccatccagagagctgtgtcaatattgctggaaaaggcatctgccatgcaagac

SEQ ID NO: 60074 - DNA, 80 bp, synthetic construct
  source 1..80: mol_type = other DNA
acagagctcactcatgccctcaacgattcatttaagaggaatctaagcagcaatgtggttcagtggtctctttgggtctc

SEQ ID NO: 60075 - DNA, 80 bp, synthetic construct
  source 1..80: mol_type = other DNA
ctgtttagcacaggagctagctagtgccctgaagcagcactgcagggccggtgagttcatcatcaagaagctgaagttct

SEQ ID NO: 60076 - DNA, 80 bp, synthetic construct
  source 1..80: mol_type = other DNA
caatccagctctctgaagcatataagatcaatcatgacttcacgttttctggtctgtcaaagacaacagaccgacgcctc

SEQ ID NO: 60077 - DNA, 80 bp, synthetic construct
  source 1..80: mol_type = other DNA
ggcctatctatgtcattatcaagccgaccaaatcatcatcccatatcttctacagcttagggatccgcaaggctgacgtg

SEQ ID NO: 60078 - DNA, 80 bp, synthetic construct
  source 1..80: mol_type = other DNA
acaaggaggctaactggcagagtcttctctgacaccattgatgctggggaatgggaactaacagagttcaaaagcctgaa

SEQ ID NO: 60079 - DNA, 80 bp, synthetic construct
  source 1..80: mol_type = other DNA
gacatgcaagctcacgaatcttgtcaacttgccatgcaccatgctgaactcaatagctttctggagagagaagctgggcg

SEQ ID NO: 60080 - DNA, 80 bp, synthetic construct
  source 1..80: mol_type = other DNA
tggctccatggctggttcgaaagccctgttcagagctcagggagcaggtgggcctgaccttcctgatcagtctggaggac

SEQ ID NO: 60081 - DNA, 80 bp, synthetic construct
  source 1..80: mol_type = other DNA
aagtctaagactgaggagatcatcaccttgacaaggtacacccagatggagggctttgtctctcctcccatgctgcctaa

SEQ ID NO: 60082 - DNA, 80 bp, synthetic construct
  source 1..80: mol_type = other DNA
gccccaaaagatgctagggaaactggaagggcctttgagaactaagctacaggtatacctcctcaggaagcatctggatt

SEQ ID NO: 60083 - DNA, 80 bp, synthetic construct
  source 1..80: mol_type = other DNA
gcatggtgcgaattgcgtctcagcctttcagcctaatccctagagaggggagggtagagtggagaggaacattccatgcc

SEQ ID NO: 60084 - DNA, 80 bp, synthetic construct
  source 1..80: mol_type = other DNA
atctcaggccggtccacaaaccttgagaacatggtgaacagctggtacattgggtactacaagaacaaagaggagtcaac

SEQ ID NO: 60085 - DNA, 80 bp, synthetic construct
  source 1..80: mol_type = other DNA
agagctaaatgccctcggagaaatgtataagaagattgtggagatggaagaggacaagcccagcagtcctgagtttctag

SEQ ID NO: 60086 - DNA, 80 bp, synthetic construct
  source 1..80: mol_type = other DNA
ggtggggggacacagattcccccaagaagcatgaattctcacggagcttcctcagagctgcttgctcatctctagagaga

SEQ ID NO: 60087 - DNA, 80 bp, synthetic construct
  source 1..80: mol_type = other DNA
ttcctcagagctgcttgctcatctctagagagagaaattgctcagcgacatgggaggcaatggaagcagaaccttgagga

SEQ ID NO: 60088 - DNA, 80 bp, synthetic construct
  source 1..80: mol_type = other DNA
tcagaggtattccccattacccatgatggttctgatgggatgacccctgatgtgatccacaccagattggatggaaccat

SEQ ID NO: 60089 - DNA, 80 bp, synthetic construct
  source 1..80: mol_type = other DNA
gaaattgctcagcgacatgggaggcaatggaagcagaaccttgaggagcgtgtcctgagagagatagggaccaagaacat

SEQ ID NO: 60090 - DNA, 80 bp, synthetic construct
  source 1..80: mol_type = other DNA
cctggaccttgcatccatgaaggctacaagcaacttttccaaagactgggagctctactcagaagtccagaccaaagagt

SEQ ID NO: 60091 - DNA, 80 bp, synthetic construct
  source 1..80: mol_type = other DNA
accataggtccaaactactggagaagatggccacattgattgagaagggggttatgtggtacattgatgctgtgggccag

SEQ ID NO: 60092 - DNA, 80 bp, synthetic construct
  source 1..80: mol_type = other DNA
gcatggaaggcagttctggatgacgggtgcatgcgaatctgtctcttcaaaaagaatcagcatggtggccttagagagat

SEQ ID NO: 60093 - DNA, 80 bp, synthetic construct
  source 1..80: mol_type = other DNA
ctacgttatggatgcgaatgcccggctcgtgcagtttggggttgagaccatggctaggtgtgtctgtgagctgagccctc

SEQ ID NO: 60094 - DNA, 80 bp, synthetic construct
  source 1..80: mol_type = other DNA
atgagactgttgctaaccctcggctcaagaattccatcatagagaaccatggactgaagtcagcccgtagtcttggccct

SEQ ID NO: 60095 - DNA, 80 bp, synthetic construct
  source 1..80: mol_type = other DNA
ggctctataaacataaactcatccaatgatgccaagaagtggaatcaggggcactacacaacaaagctagctttagttct

SEQ ID NO: 60096 - DNA, 80 bp, synthetic construct
  source 1..80: mol_type = other DNA
ttgttggttcatgccagctaaattccacagattcatttgggctgccatttccatgtttcggagaaaaaagatgatggtgg

SEQ ID NO: 60097 - DNA, 80 bp, synthetic construct
  source 1..80: mol_type = other DNA
acctaaggtttttagctcacctcagttctaaatctgagtctaggtcatctgatccgtttagggaagcaatgacagatgcc

SEQ ID NO: 60098 - DNA, 80 bp, synthetic construct
  source 1..80: mol_type = other DNA
ttccatggtaatagggatgtctcatggatggacaaagggcgaacttacattaagacagagacaggaatgatgcagggcat

SEQ ID NO: 60099 - DNA, 80 bp, synthetic construct
  source 1..80: mol_type = other DNA
agtggtggttgaattttcaaccactaggagccataacattgggggcctggaggcagcatataggacaaagatagaaaaat

SEQ ID NO: 60100 - DNA, 80 bp, synthetic construct
  source 1..80: mol_type = other DNA
actgcacttcacatccagtctcctccactcttgtgttcagagcttctacaagtcttatttcgtctcgaagctcaaggagg

SEQ ID NO: 60101 - DNA, 80 bp, synthetic construct
  source 1..80: mol_type = other DNA
gctacatgggggaaagcatcagtggggtggtggatgtcatagaaggctctgacgactcagcgatcatgattagcatacgc

SEQ ID NO: 60102 - DNA, 80 bp, synthetic construct
  source 1..80: mol_type = other DNA
cctaagtcagacatggatgaagttcgatccaggttctttgttgctaacttgctccactctgttaagttcttgaatccatt

SEQ ID NO: 60103 - DNA, 80 bp, synthetic construct
  source 1..80: mol_type = other DNA
gtttgggatttattcatcagagaaatcaacagtgaacacagtgtattgtgtcgaatataactctgaattccatttccaca

SEQ ID NO: 60104 - DNA, 80 bp, synthetic construct
  source 1..80: mol_type = other DNA
ggcacttggttagacccacactgagatggatagcagcgtctcatcaaatctcagagactgaagcccttgcaagcaggcaa

SEQ ID NO: 60105 - DNA, 80 bp, synthetic construct
  source 1..80: mol_type = other DNA
gaggattactccaaccttctaacccagtgcttggaaggaggggcctcattctctcttacctacctcatacagtgcgctca

SEQ ID NO: 60106 - DNA, 80 bp, synthetic construct
  source 1..80: mol_type = other DNA
gctcctgcaccactacatgcttctaggactttgcttacatcccctgtttggaaccttcatggggatgctgatatcagacc

SEQ ID NO: 60107 - DNA, 80 bp, synthetic construct
  source 1..80: mol_type = other DNA
cagatccagccctagggttcttcctcatggacaaccctgcattcgcagggggagcaggatttagattcaatctgtggaga

SEQ ID NO: 60108 - DNA, 80 bp, synthetic construct
  source 1..80: mol_type = other DNA
gcctgcaagactacagaccttgggcggaagtatgcatattattttaatgagatacagggtaagacaaagggagatgagga

SEQ ID NO: 60109 - DNA, 80 bp, synthetic construct
  source 1..80: mol_type = other DNA
tttaatgagatacagggtaagacaaagggagatgaggactacagagctctggacgccacatcgggaggaactctcagcca

SEQ ID NO: 60110 - DNA, 80 bp, synthetic construct
  source 1..80: mol_type = other DNA
ctacagagctctggacgccacatcgggaggaactctcagccactctgttatggtgtactggggggacaggaagaagtatc

SEQ ID NO: 60111 - DNA, 80 bp, synthetic construct
  source 1..80: mol_type = other DNA
atagggacccaatctcaaggcgtgttgatatcatggagaacccgagggtcttctttggcgtaattgtagtctcgtcagga

SEQ ID NO: 60112 - DNA, 80 bp, synthetic construct
  source 1..80: mol_type = other DNA
aagccttactgaacaggatgggccttcctgaagactgggtggagcagatagatgagaatcctggagtcctctacaggaga

SEQ ID NO: 60113 - DNA, 80 bp, synthetic construct
  source 1..80: mol_type = other DNA
gctgccaacaagaaagaactgctcttaaagctggcagagaaggttcattcacctggtgtgactagcagcctgagtaaagg

SEQ ID NO: 60114 - DNA, 80 bp, synthetic construct
  source 1..80: mol_type = other DNA
gcatgtagtgcctcgggtggtggcagcaggagtgtacctcctctcacgtcattgctttcgctttagttcaagcatccatg

SEQ ID NO: 60115 - DNA, 80 bp, synthetic construct
  source 1..80: mol_type = other DNA
gcaggggctcaacgcagaaggctagccttataaaattgctgatgatgtcttctatttctgccatgaagcatggtggctca

SEQ ID NO: 60116 - DNA, 80 bp, synthetic construct
  source 1..80: mol_type = other DNA
ctgaaccctaaccaggagcgaatgctcttccctcaggctcaagagtatgacagagtatgcacattgcttgaggaagttga

SEQ ID NO: 60117 - DNA, 80 bp, synthetic construct
  source 1..80: mol_type = other DNA
acacctaacagggaaatttgttgttagggagagaaacattgtcaggagccgcatagatttgttccaagagccagtggact

SEQ ID NO: 60118 - DNA, 80 bp, synthetic construct
  source 1..80: mol_type = other DNA
tgcggtgcaaggcagaagatctggtgtcagaggtgtggtttggcctgaaaaggactaaacttggaccccgtctcctcaag

SEQ ID NO: 60119 - DNA, 80 bp, synthetic construct
  source 1..80: mol_type = other DNA
gaagagtgggataaacttagggcctcatttgcatggctgagcacagacccatctgaaacattgagggatggtccttttct

SEQ ID NO: 60120 - DNA, 80 bp, synthetic construct
  source 1..80: mol_type = other DNA
tagccatgtgcagtttaggaacttcatagcccacgttgatgccaaatcaagatcagtcaggcttctaggtgcccccgtga

SEQ ID NO: 60121 - DNA, 80 bp, synthetic construct
  source 1..80: mol_type = other DNA
agaagtcaggtggggtcaccaccataagccaagtggtcagaatgaacttcttccctggttttagcctagaagctgagaag

SEQ ID NO: 60122 - DNA, 80 bp, synthetic construct
  source 1..80: mol_type = other DNA
ggggtcctgtccaacatgcccttgactcaggatgaggcagaggagctcatgtataggttctgcatagccaatgagatcta

SEQ ID NO: 60123 - DNA, 80 bp, synthetic construct
  source 1..80: mol_type = other DNA
agcttagacaatcaggaaagacttgagagtatctccatcctcaagcatgtcttgttcatggtcttgaatggcccatacac

SEQ ID NO: 60124 - DNA, 80 bp, synthetic construct
  source 1..80: mol_type = other DNA
tgaggagtacaagctggagatgatcatggaggccttctctactcttgtgataccacagccatcagaggtcatcaggaaat

SEQ ID NO: 60125 - DNA, 80 bp, synthetic construct
  source 1..80: mol_type = other DNA
caaggaccatgactttatgcctcttatcgaattacttgtccagtaggggtgggtccattctagaccaaattgagagggca

SEQ ID NO: 60126 - DNA, 80 bp, synthetic construct
  source 1..80: mol_type = other DNA
cagtcaggcactctaggaggcttcagcaagccccagaagacatttattaggccaggaggtggtgttggctacaagggaaa

SEQ ID NO: 60127 - DNA, 80 bp, synthetic construct
  source 1..80: mol_type = other DNA
aggtgtgtggactggagtgatggaggacacccatgttcaaattctgatagatggagatggtacaagtaactggctcgagg

SEQ ID NO: 60128 - DNA, 80 bp, synthetic construct
  source 1..80: mol_type = other DNA
agatcaggctcagtagtgatgctaggctttatgatgtcattgaatccatccgaaggttatgtgatgaccttgggatcaac

SEQ ID NO: 60129 - DNA, 80 bp, synthetic construct
  source 1..80: mol_type = other DNA
aacagggtggcatctgcatatagaggccattgtatggttaggctgagtggattcaagatcaagccagcatcaaggactga

SEQ ID NO: 60130 - DNA, 80 bp, synthetic construct
  source 1..80: mol_type = other DNA
cggctgtccagtcaggattatggaaaggggcttcagaattagggaacttcaaaacccagatgaggtcaagatgagagtga

SEQ ID NO: 60131 - DNA, 80 bp, synthetic construct
  source 1..80: mol_type = other DNA
ggggcgacatcctcaacctctctgtcactatacaagaaggaagggtcatgaacatcctaagctacaggccgagagacact

SEQ ID NO: 60132 - DNA, 80 bp, synthetic construct
  source 1..80: mol_type = other DNA
gatatatcagagtcagccgcagcatacctctggagcaatcgagacctcttctcctttgggaagaaggagccgtcctgcag

SEQ ID NO: 60133 - DNA, 80 bp, synthetic construct
  source 1..80: mol_type = other DNA
cactaaggctagatctatggatgcagacattgagctacagaaaagtgaagaagagcttgaggctattagcagggcactat

SEQ ID NO: 60134 - DNA, 80 bp, synthetic construct
  source 1..80: mol_type = other DNA
ctggatctgcttgaaaactctagataattgggcctggtcacatgcctcagttctcctggcaaatgataggaagacccaag

SEQ ID NO: 60135 - DNA, 80 bp, synthetic construct
  source 1..80: mol_type = other DNA
gtattgacaatagagctatggggaacattttcagggactgtctcgagggttctcttagaaagcaagggttgatgaggtca

SEQ ID NO: 60136 - DNA, 80 bp, synthetic construct
  source 1..80: mol_type = other DNA
aagctcacagagatggtggagaagaatgtagttcctttaacaactcaagagcttgtcgacatcctggaggaggacattga

SEQ ID NO: 60137 - DNA, 80 bp, synthetic construct
  source 1..80: mol_type = other DNA
cttttcagatgtcatagctgtagagctctcagagggatcacttgacattgaatccatctttgatggggcacctatcttgt

SEQ ID NO: 60138 - DNA, 80 bp, synthetic construct
  source 1..80: mol_type = other DNA
ggtctgctgaggtggaggagtttggagaaggagtggtggctgtgagctattcaagcaagtactatcatctgaccctgatg

SEQ ID NO: 60139 - DNA, 80 bp, synthetic construct
  source 1..80: mol_type = other DNA
gaccaagctgccatcacaatgtgtgcaatcatgggtaaggaaggctgcagagggctccttactgagaagagatgcatggc

SEQ ID NO: 60140 - DNA, 80 bp, synthetic construct
  source 1..80: mol_type = other DNA
agccatacgagagcaggtgcggccattcctcatattcctgcaaattcctgaggacagcatttcttgggtgtctgatcagt

SEQ ID NO: 60141 - DNA, 80 bp, synthetic construct
  source 1..80: mol_type = other DNA
tctgcgactccaggggtcttgatgaagagagcaccattatgtggggttaactttaaaacagggctggcacgcagttaatg

SEQ ID NO: 60142 - DNA, 80 bp, synthetic construct
  source 1..80: mol_type = other DNA
ggctggcacgcagttaatgtgtctgtgggtgactggggaatgttggttttagaaggatttccttaagatctgggcggtct

SEQ ID NO: 60143 - DNA, 80 bp, synthetic construct
  source 1..80: mol_type = other DNA
cattcttcagtttgtttgagcctaacattgaaagagtggaaggaacattccctaattcagaaatcgagatgctggagcag

SEQ ID NO: 60144 - DNA, 80 bp, synthetic construct
  source 1..80: mol_type = other DNA
ttcctctcaacgccagctgatgttgacttcatcaccaagaccctcaaagcaaaagaagtagaagcctatgctgatctttg

SEQ ID NO: 60145 - DNA, 80 bp, synthetic construct
  source 1..80: mol_type = other DNA
cacaggtgtgacagtggacataggggctgtgccggactcagcatcacaactgggttcatcaatcaatgctgggttgatca

SEQ ID NO: 60146 - DNA, 80 bp, synthetic construct
  source 1..80: mol_type = other DNA
tgacagccactacctaaagcctgagaaaactatacaggagcggctagagatcaatagatgtgaggctattgacaaaactc

SEQ ID NO: 60147 - DNA, 80 bp, synthetic construct
  source 1..80: mol_type = other DNA
aagacctcctagctggcctgcatgcaaggagcaacaagcaaacatcattgaatcgagggacagtcaaactcccgccctgg

SEQ ID NO: 60148 - DNA, 80 bp, synthetic construct
  source 1..80: mol_type = other DNA
ctaccaaagccatcaagtgagtcaatagacatcaagaccgactcaggctttggttccttaatggatcatggcgcatatgg

SEQ ID NO: 60149 - DNA, 80 bp, synthetic construct
  source 1..80: mol_type = other DNA
cagtgtgaccacgctcccttggacaacgcgccaagcatccagcacctttcttggtgccatccatctcggtccacgcatca

SEQ ID NO: 60150 - DNA, 80 bp, synthetic construct
  source 1..80: mol_type = other DNA
aaaaaaagattgaagaaaaatctgatgttgacttggttgattcagcctcagtttattcacaagaatctgccagaagtaac

SEQ ID NO: 60151 - DNA, 80 bp, synthetic construct
  source 1..80: mol_type = other DNA
gttaaaacgtgaaccaatagttgaagaatcaaatgacgcgaagtataggaattttgaattttctgaagatgaggaagttt

SEQ ID NO: 60152 - DNA, 80 bp, synthetic construct
  source 1..80: mol_type = other DNA
tcagacaaatcatatagagaaatgaaacgtaaatatgatggtactagcacgtcagattccattttagaaaaattgtcaga

SEQ ID NO: 60153 - DNA, 80 bp, synthetic construct
  source 1..80: mol_type = other DNA
agataaaacaaatgaaccaaccagtcacaatcgatgcagcatttaacatgattcttcgaaacgttgataatctaactata

SEQ ID NO: 60154 - DNA, 80 bp, synthetic construct
  source 1..80: mol_type = other DNA
ttattaactctatgaactagactgtgatctacacctgtcatctactggggtcaacctcttgagttatatttaaaaaaccc

SEQ ID NO: 60155 - DNA, 80 bp, synthetic construct
  source 1..80: mol_type = other DNA
aaaaaaagattgaagagaaatctgatattgatttggttgattcagcctctgtctattcacaagagtcttctagaagtaac

SEQ ID NO: 60156 - DNA, 80 bp, synthetic construct
  source 1..80: mol_type = other DNA
catcagacaaatcatacagagaaatgaaacgtaagcatgatgacattaatacgtcagattctattttagagaaactgtca

SEQ ID NO: 60157 - DNA, 80 bp, synthetic construct
  source 1..80: mol_type = other DNA
agataaaacaaatgaaccaaccaattacaattgacgcagcattcaacatgattcttcgaaatgtcgacaatctaacaata

SEQ ID NO: 60158 - DNA, 80 bp, synthetic construct
  source 1..80: mol_type = other DNA
tatgatcaggctctcgccacctacaatgcttggttcataggtggtacagtacctgacccagtgggtcacactgaaggaac

SEQ ID NO: 60159 - DNA, 80 bp, synthetic construct
  source 1..80: mol_type = other DNA
atgaatgcgaacttggattcatcaatatctatagcaactatttcaaaaaaggagaaatccaaaaatgaccataaaagtag

SEQ ID NO: 60160 - DNA, 80 bp, synthetic construct
  source 1..80: mol_type = other DNA
caaaagttgaagcagaatctgattcagatgactacgtacttaatgattctgatagcgatgatggtaaatgtaagaactgc

SEQ ID NO: 60161 - DNA, 80 bp, synthetic construct
  source 1..80: mol_type = other DNA
ttggccgccatcataaatgcgcagaactatggagtgaatttgccaattacaggttcaatggatactgcgtatgccaactc

SEQ ID NO: 60162 - DNA, 80 bp, synthetic construct
  source 1..80: mol_type = other DNA
aatggaaagataccttatcacaactgtttttaacaaaaggatggccaacaggatcggtgtactttaaggaatatgctgat

SEQ ID NO: 60163 - DNA, 80 bp, synthetic construct
  source 1..80: mol_type = other DNA
atagcggccttttcagtagaaccacagctatactgtgattataatttagttttaatgaagtatgattccacacaggaact

SEQ ID NO: 60164 - DNA, 80 bp, synthetic construct
  source 1..80: mol_type = other DNA
agatatgtctgaattggccgatcttatactgaacgaatggctgtgcaatccaatggacataacattatattattatcaac

SEQ ID NO: 60165 - DNA, 80 bp, synthetic construct
  source 1..80: mol_type = other DNA
agtcaaagtatgtccattaaatacgcaaacgcttggtattggatgtttaataactaatccagacacgtttgaaacagttg

SEQ ID NO: 60166 - DNA, 80 bp, synthetic construct
  source 1..80: mol_type = other DNA
caacgacggaaaagttagtgattacagatgttgtagatggtgtcaatcataaattaaacgttacaccagcaacatgtgct

SEQ ID NO: 60167 - DNA, 80 bp, synthetic construct
  source 1..80: mol_type = other DNA
gatgttgtagatggtgtcaatcataaattaaacgttacaccagcaacatgtgctatacgcaactgtaaaaaattaggacc

SEQ ID NO: 60168 - DNA, 80 bp, synthetic construct
  source 1..80: mol_type = other DNA
gaagtgctttgtggtaggataaacgtggagaatgggctgtctcttggggaaccaggcctgtatgaccaaatctacgacag

SEQ ID NO: 60169 - DNA, 80 bp, synthetic construct
  source 1..80: mol_type = other DNA
gactttaaaacatggttggcacgcagttgatgtatctatgggtgactagggagtgttggttttagaaggatttccttaag

SEQ ID NO: 60170 - DNA, 80 bp, synthetic construct
  source 1..80: mol_type = other DNA
ggcgtatcacatgagttcagcgacattagatggaccatatcaaccaactacatttaatttaccaattgactattggatgc

SEQ ID NO: 60171 - DNA, 80 bp, synthetic construct
  source 1..80: mol_type = other DNA
ccaaacgtatcgaatacacaaagagaatacgttttagatggacagacggtgcagctacaagtttcgaacgactcaagtac

SEQ ID NO: 60172 - DNA, 80 bp, synthetic construct
  source 1..80: mol_type = other DNA
tctttggaaattcatactattcattaaactagaaaaaaatggaacttattctcaatattcaacgttatctacttcgaata

SEQ ID NO: 60173 - DNA, 80 bp, synthetic construct
  source 1..80: mol_type = other DNA
agttatgtgcatggatgaaaagggaagggagagtatactggtacgcaggaactacgccgaatgcatcagaaagctattat

SEQ ID NO: 60174 - DNA, 80 bp, synthetic construct
  source 1..80: mol_type = other DNA
ctaacaataaacaatgacaatagcaatgtgtcgtgtgacgctgaattctatttgataccaagatcacaaaccgatttatg

SEQ ID NO: 60175 - DNA, 80 bp, synthetic construct
  source 1..80: mol_type = other DNA
tgcgcagtatataaataacgggctgcctccggtgcaaaacacaaggaacgtagtgccagtaagtatatcgtccagagaga

SEQ ID NO: 60176 - DNA, 80 bp, synthetic construct
  source 1..80: mol_type = other DNA
agagagatcagacacacacgagcgcaaatgaatgaagatatagtggtgtcaaaaacatcattatggaagaaaatgcaata

SEQ ID NO: 60177 - DNA, 80 bp, synthetic construct
  source 1..80: mol_type = other DNA
taattgcacctacccaaataggtagagtggcagagggtacgaacacaactgatagatggttcgcttgtgtgcttgttgaa

SEQ ID NO: 60178 - DNA, 80 bp, synthetic construct
  source 1..80: mol_type = other DNA
agcaccattatgtggggttaactttaaaacatggttggcacgcagatgatgtgtctgtgggtgactagggaacattggtt

SEQ ID NO: 60179 - DNA, 80 bp, synthetic construct
  source 1..80: mol_type = other DNA
gaaagatgctttgtggtaggataaacgtggagaatgggctgtctcttggagaaccaggcctgtacgaccaaatctacgat

SEQ ID NO: 60180 - DNA, 80 bp, synthetic construct
  source 1..80: mol_type = other DNA
taaatgctaacttggattcttctatttcagtatcaacagtttcaaaaaaggagaaatccaaatcagattacagaagtagg

SEQ ID NO: 60181 - DNA, 80 bp, synthetic construct
  source 1..80: mol_type = other DNA
aaacactacccaagaattgaagcagactcagattcagatgaatacgtgcttgatgattctgatagtgacgatggcaaatg

SEQ ID NO: 60182 - DNA, 80 bp, synthetic construct
  source 1..80: mol_type = other DNA
attggatccatatgatttaacagaattagagagcattgtccgaggatggggagaatgtgttattgatcagtttgaaaatc

SEQ ID NO: 60183 - DNA, 80 bp, synthetic construct
  source 1..80: mol_type = other DNA
atgaatttagaagctctttgctctagagtgctttcagagagagggctgtcaaccggtgagcctggggtatatgaccagat

SEQ ID NO: 60184 - DNA, 80 bp, synthetic construct
  source 1..80: mol_type = other DNA
cgcccagatggacttggaagtgctttgtggtaggataaacgtggagaatgggctgtctcttggagaaccaggcctgtacg

SEQ ID NO: 60185 - DNA, 80 bp, synthetic construct
  source 1..80: mol_type = other DNA
ggtctcccatcaggaatgcccttcacctcagtcatcaactcggtgaaccacatgatatactttgcagcgggtgtgctcaa

SEQ ID NO: 60186 - DNA, 80 bp, synthetic construct
  source 1..80: mol_type = other DNA
tttatagtgtttgtcctgccaccgcttctatctttggttctgttctcgccaacctgtcctccttcggtctcaagcccact

SEQ ID NO: 60187 - DNA, 80 bp, synthetic construct
  source 1..80: mol_type = other DNA
gccgctgacaaaactgcagaaatcaagcccacccaaacaccagttttcctgaaaggaacattcacacagacgccctatgg

SEQ ID NO: 60188 - DNA, 80 bp, synthetic construct
  source 1..80: mol_type = other DNA
ggtgagggcactactggacatcaattccatcattcggcagttctactgggttaaggcgaaccgcactagtgacccatcta

SEQ ID NO: 60189 - DNA, 80 bp, synthetic construct
  source 1..80: mol_type = other DNA
gcccccctgcttttgatcgcactgcccgcagtgcccagttggaagcagctctagcctatgcatcacaacatggaccttta

SEQ ID NO: 60190 - DNA, 80 bp, synthetic construct
  source 1..80: mol_type = other DNA
gtgtttgacaaggtgcgtgatattgccatcaaaacggccgaaggagagggtgtggtgcttgtgaatacaaactttgattt

SEQ ID NO: 60191 - DNA, 80 bp, synthetic construct
  source 1..80: mol_type = other DNA
agcttatgaggaccaccacgtcccatacactggcaatgtatttcagatagagactgtccacacctatggtgatgactgta

SEQ ID NO: 60192 - DNA, 80 bp, synthetic construct
  source 1..80: mol_type = other DNA
ttgggggggggcagaacatcttacttgtgctctcgtatactgtatagatctagatgataatgataatggtactacatttc

SEQ ID NO: 60193 - DNA, 80 bp, synthetic construct
  source 1..80: mol_type = other DNA
tttatccagtatcaccatctcaaactgttcgaaaccatgggttctgactcagagcctgaaggcatggtgtgaggatatgc

SEQ ID NO: 60194 - DNA, 80 bp, synthetic construct
  source 1..80: mol_type = other DNA
aagtatacaacaatatggatgtttcaaaagccaacccaaaggccaattactggatgtatggtttcaagatgtatgggtct

SEQ ID NO: 60195 - DNA, 80 bp, synthetic construct
  source 1..80: mol_type = other DNA
tcaaataaaagaggaattgattcttggagatagcccaactgaagttcctgacgaccttcttggctaacaactctgacact

SEQ ID NO: 60196 - DNA, 80 bp, synthetic construct
  source 1..80: mol_type = other DNA
aacaactctgacacttagagaaactaagaaggataaagggttagggggttgttcctttgttatgtctataaattatttaa

SEQ ID NO: 60197 - DNA, 80 bp, synthetic construct
  source 1..80: mol_type = other DNA
cgcagccgatgtgtctgtgggtgactagggaatgttggttttagaaggatttccttaagatctgggcgtcctttggtgta

SEQ ID NO: 60198 - DNA, 80 bp, synthetic construct
  source 1..80: mol_type = other DNA
attctatattatcaaaacagctggttgacaagactggttttgttagagtgccaatcaagcattatgactgtacaatgctg

SEQ ID NO: 60199 - DNA, 80 bp, synthetic construct
  source 1..80: mol_type = other DNA
acacagagacgcccagatggacttggaagtgctttgtggtaggataaacgtggagaatgggctgtctcttggagaaccag

SEQ ID NO: 60200 - DNA, 80 bp, synthetic construct
  source 1..80: mol_type = other DNA
ttaatgtgtctgtgggtgactagggaatgttggttttagaaggatttccttaagatctgggcggtcaaacacaaagttgt

SEQ ID NO: 60201 - DNA, 80 bp, synthetic construct
  source 1..80: mol_type = other DNA
caaggccaggacagaggagatcatcaccctgtcgaggtatgtgttcatggagggctttgtggccctccctatgctgccta

SEQ ID NO: 60202 - DNA, 80 bp, synthetic construct
  source 1..80: mol_type = other DNA
acacaaagacgtccagatgaatttagaagctctttgctctagagtgctttcagagagagggctatcaactggtgagcctg

SEQ ID NO: 60203 - DNA, 80 bp, synthetic construct
  source 1..80: mol_type = other DNA
ggacgttagatgtcaaaacggacacgggatcaggggagctactcaaccatggcccatatggggagttgtggtcaagatgc

SEQ ID NO: 60204 - DNA, 80 bp, synthetic construct
  source 1..80: mol_type = other DNA
ttcctggagattgtccttgggaatgtggagggggtcatcagcagccctgaaaaggagctggagatcgccatcagtgatga

SEQ ID NO: 60205 - DNA, 80 bp, synthetic construct
  source 1..80: mol_type = other DNA
ccctgaggctgacacccctaaggctgcaaagattaaataccataggttccggcctgagctcagtttagagagcaagcatg

SEQ ID NO: 60206 - DNA, 80 bp, synthetic construct
  source 1..80: mol_type = other DNA
aattttcattacaaggcatcgagggcaaaagatggaagcattcagctaggaatgtccttaaagatgaaatgtcccacaag

SEQ ID NO: 60207 - DNA, 80 bp, synthetic construct
  source 1..80: mol_type = other DNA
acaatgagcccatttgttgatgtctcgaacattgaggagtttctgattatgaacaacctgttaaatgacacatcttttaa

SEQ ID NO: 60208 - DNA, 80 bp, synthetic construct
  source 1..80: mol_type = other DNA
tcgggaaggactgcaagaaacaatcaacctgttgttggagaaggctactgaaatgcaccaaaatggcttatcaacagctt

SEQ ID NO: 60209 - DNA, 80 bp, synthetic construct
  source 1..80: mol_type = other DNA
tgaatgattccttcaagagaaacttcaacacaaacgttgtgcagtggagcatgtgggtctcatgcttagctcaggaattg

SEQ ID NO: 60210 - DNA, 80 bp, synthetic construct
  source 1..80: mol_type = other DNA
gttggggccattcctgactcagcatcacagctagggtcctcgataaatgcaggcgtgctcaccatacctctctcagaagc

SEQ ID NO: 60211 - DNA, 80 bp, synthetic construct
  source 1..80: mol_type = other DNA
gcaagtgctttgaagcaacattgcaagcctggtgagtttatcatcaaaaaattaatgcactggccaatattcgtcataat

SEQ ID NO: 60212 - DNA, 80 bp, synthetic construct
  source 1..80: mol_type = other DNA
taagcccactaagtcatcaagtcacatattctacagcttggcaataaaaaaagccaacattaagaggaggctgattggtg

SEQ ID NO: 60213 - DNA, 80 bp, synthetic construct
  source 1..80: mol_type = other DNA
atgtattcacagacacaattgatgcgggggagtgggagttttcagaattcaaaagcctcaagacgtgcaagctgacaaat

SEQ ID NO: 60214 - DNA, 80 bp, synthetic construct
  source 1..80: mol_type = other DNA
ctcattaacctgccgtgcaccatgctcaactcaatagcgttctggagagagaagatgggagtagccccctggatttctag

SEQ ID NO: 60215 - DNA, 80 bp, synthetic construct
  source 1..80: mol_type = other DNA
aaaggcctgctcagagctcagggaacaagtggcaatcactttccttatgagtctggaagacaaatcaacaacagaagagc

SEQ ID NO: 60216 - DNA, 80 bp, synthetic construct
  source 1..80: mol_type = other DNA
ttgttactctcacgaggtattcacaaatggagggatttgtgtctccacccctgctccctaaaccccagaagatggtggaa

SEQ ID NO: 60217 - DNA, 80 bp, synthetic construct
  source 1..80: mol_type = other DNA
aagttagaagttcctttgcgaacaaagcttcaagtgtttttgtttaggaggcatcttgatgctattgttagagttgctgc

SEQ ID NO: 60218 - DNA, 80 bp, synthetic construct
  source 1..80: mol_type = other DNA
atccccattccccattgtggcaagagatggtcgagtggaatggacagggacattcaatgcaatcactggccgaagcactg

SEQ ID NO: 60219 - DNA, 80 bp, synthetic construct
  source 1..80: mol_type = other DNA
ggctggaaaacatggtaaacaactggtatattggctactataaaaacaaagaagagtcgaccgagctaaatgccttgggc

SEQ ID NO: 60220 - DNA, 80 bp, synthetic construct
  source 1..80: mol_type = other DNA
gagatgtacaagaagattgttgagattgaggctgagaagccaacatcttctgagtacctaggatggggagacactagcag

SEQ ID NO: 60221 - DNA, 80 bp, synthetic construct
  source 1..80: mol_type = other DNA
atataagataaatcatgacttcactttctctggactgactaagacaacagataggaagttgtctgaagtattccctttgg

SEQ ID NO: 60222 - DNA, 80 bp, synthetic construct
  source 1..80: mol_type = other DNA
ccctaagaggcatgagttcagtagaagcttcctcaagtcagcatgcatatctcttgagaaggagatagagatgaggcatg

SEQ ID NO: 60223 - DNA, 80 bp, synthetic construct
  source 1..80: mol_type = other DNA
gaaagagctggaagcaaagcttggaggagagagtccttaaagagctgggctcaaagaacttgctggacttagcaacaatg

SEQ ID NO: 60224 - DNA, 80 bp, synthetic construct
  source 1..80: mol_type = other DNA
aaggcaacaagcaactttagcaaggaatgggaagctttctcagaagtcagaacaaaagaataccataggtccaaactcct

SEQ ID NO: 60225 - DNA, 80 bp, synthetic construct
  source 1..80: mol_type = other DNA
agaaaagatggctgaactaatagagcatgggttaatgtggtatgttgatgctgcaggtcatgcatggaaggctgtccttg

SEQ ID NO: 60226 - DNA, 80 bp, synthetic construct
  source 1..80: mol_type = other DNA
atgacaagtgtatgagaatatgcttgtttaagaaaaatcagcatggaggcctgagggaaatttatgtaacgaatgcaaat

SEQ ID NO: 60227 - DNA, 80 bp, synthetic construct
  source 1..80: mol_type = other DNA
gcaaggcttgttcaatttggagtagagacaatggcacggtgtgtgtgtgagctaagcccacatgaaacaatagctaaccc

SEQ ID NO: 60228 - DNA, 80 bp, synthetic construct
  source 1..80: mol_type = other DNA
tagactcaagtcaagcatcatagagaatcatggtctcaagagtgctcgacaattagggcaggggaccattaatgtcaact

SEQ ID NO: 60229 - DNA, 80 bp, synthetic construct
  source 1..80: mol_type = other DNA
cttcaaatgacgcaaaaaaatggagtcagggccattatacaaccaaattggctatggtattatgctggttcatgccagct

SEQ ID NO: 60230 - DNA, 80 bp, synthetic construct
  source 1..80: mol_type = other DNA
aagttccataggttcatatgggcaggcatctcaatgtttaggtgcaagaagatgatgatggacctcaggtttttagaaaa

SEQ ID NO: 60231 - DNA, 80 bp, synthetic construct
  source 1..80: mol_type = other DNA
attgagcacaaaggctaatcagaaaactgatgatgacttcaggaaagacttagctggggccttccatggcaatgttgagg

SEQ ID NO: 60232 - DNA, 80 bp, synthetic construct
  source 1..80: mol_type = other DNA
ttcatgatggctcagactcaatgacccccgatgtgatccacacaagactagatggaacagtagttgtaattgaattcaca

SEQ ID NO: 60233 - DNA, 80 bp, synthetic construct
  source 1..80: mol_type = other DNA
ttccttggatgactcaaggagctacatatctccagactgagacagggatgatgcaagggatcctgcattttacatcaagc

SEQ ID NO: 60234 - DNA, 80 bp, synthetic construct
  source 1..80: mol_type = other DNA
ctactgcattcatgcgtccaaagtttttacaaggcatattttttatctcggcttaaagaagggatcgcaggcagaaccat

SEQ ID NO: 60235 - DNA, 80 bp, synthetic construct
  source 1..80: mol_type = other DNA
caaggcagctatagatgttttagaaggctctgatgactcagctatcatgataagcttgaagccagcctcagacaatgagg

SEQ ID NO: 60236 - DNA, 80 bp, synthetic construct
  source 1..80: mol_type = other DNA
aagcgatggctcggtttttaacagccaacttgctatactcagtcagagtcataaacccgctctttggcatttatagctct

SEQ ID NO: 60237 - DNA, 80 bp, synthetic construct
  source 1..80: mol_type = other DNA
gagaagtcaacagtaaataccttattttgtgtggaatacaactcagagttccacttccacaagcatttagtcaggcctac

SEQ ID NO: 60238 - DNA, 80 bp, synthetic construct
  source 1..80: mol_type = other DNA
aatcagatgggttgcagcatcccaccaaatctctgagtcagaagccctggcaagcaggcaggaagattatgcgaaccttc

SEQ ID NO: 60239 - DNA, 80 bp, synthetic construct
  source 1..80: mol_type = other DNA
tcactcaatgtcttgaagggggttcatcattctctctaacatatttgatccagtgtgcccagctcgtccatcattatatg

SEQ ID NO: 60240 - DNA, 80 bp, synthetic construct
  source 1..80: mol_type = other DNA
ctgctcgggctctgcttgcacccgctgtttgggacatttgtagggatgctgattgaggatccagatccagccctaggctt

SEQ ID NO: 60241 - DNA, 80 bp, synthetic construct
  source 1..80: mol_type = other DNA
cttcataatggacaatccagcttttgcagggggagctggatttagattcaacctttggagatcttgcaagttcacaaacc

SEQ ID NO: 60242 - DNA, 80 bp, synthetic construct
  source 1..80: mol_type = other DNA
ttggcaaaaagtatgcattctttttcaatgagattcaaggaaaaaccaagggggatgcagattacagagcactggatgca

SEQ ID NO: 60243 - DNA, 80 bp, synthetic construct
  source 1..80: mol_type = other DNA
aaccaagggggatgcagattacagagcactggatgcaacaactggtggaacattaagccactctgtaatgacctactggg

SEQ ID NO: 60244 - DNA, 80 bp, synthetic construct
  source 1..80: mol_type = other DNA
acaaccagaagcacaaacatgggaggacttgaggctgcctatcggagcaagcttgaaaaataccgtgacccactaaacag

SEQ ID NO: 60245 - DNA, 80 bp, synthetic construct
  source 1..80: mol_type = other DNA
acaactggtggaacattaagccactctgtaatgacctactggggggacaggagaaagtaccaacatctcctagacaggat

SEQ ID NO: 60246 - DNA, 80 bp, synthetic construct
  source 1..80: mol_type = other DNA
ggggcttcccaaggactgggttgagaggatagatgaaaacccaagcatcttatataggaggcctgagaacaagcaggaac

SEQ ID NO: 60247 - DNA, 80 bp, synthetic construct
  source 1..80: mol_type = other DNA
ttatcttgaggctggcagaaaaagtgcattctccaggtgtcacttccagcttcagcaaagggcatgttgtacctagggtg

SEQ ID NO: 60248 - DNA, 80 bp, synthetic construct
  source 1..80: mol_type = other DNA
tgttgtacctagggtggtggcagctggagtctacttgctgtcaagacattgcttcaggtacactgcatcaatccacggta

SEQ ID NO: 60249 - DNA, 80 bp, synthetic construct
  source 1..80: mol_type = other DNA
gtggcagctggagtctacttgctgtcaagacattgcttcaggtacactgcatcaatccacggtaggggggcatctcagaa

SEQ ID NO: 60250 - DNA, 80 bp, synthetic construct
  source 1..80: mol_type = other DNA
ggcgagtctgattaagctgcttgtcatgtcttcaacatcagctgagaggaatcaaggaaggctgaacccaaatcaagaaa

SEQ ID NO: 60251 - DNA, 80 bp, synthetic construct
  source 1..80: mol_type = other DNA
gaatgctctttcctcaagtccaagagtatgaaagagtattgaccttgttagatgaggttactgcgctcacagggaagttt

SEQ ID NO: 60252 - DNA, 80 bp, synthetic construct
  source 1..80: mol_type = other DNA
gttgtgagagaaaggaacatagtcaaaagcagagtagagcttttccaggagcctgtggacttaaggtgcaaagctgaaaa

SEQ ID NO: 60253 - DNA, 80 bp, synthetic construct
  source 1..80: mol_type = other DNA
cctcattgcagaaatgtggtttggacttaaaagaacaaagttgggcccaaggctgctaaaggaagaatgggacaaactcc

SEQ ID NO: 60254 - DNA, 80 bp, synthetic construct
  source 1..80: mol_type = other DNA
gcgcctccttctcatggttaagcactgatcataaagaaacactggatgtgggtccatttcttagtcatgttcaattcagg

SEQ ID NO: 60255 - DNA, 80 bp, synthetic construct
  source 1..80: mol_type = other DNA
aatttcattgcacatgtggatgcgaagtctaggagtgttcgacttttgggggcccctgtcaagaagtctggaggagtgac

SEQ ID NO: 60256 - DNA, 80 bp, synthetic construct
  source 1..80: mol_type = other DNA
aagaacagacataatgcctgatgcatcaatttactttggaatcattgttgttagtgcatctggtgttctcacaaatatgc

SEQ ID NO: 60257 - DNA, 80 bp, synthetic construct
  source 1..80: mol_type = other DNA
tacagtgtcccaggtggtgaaatctaatttctttccaggtttcattttggactccagtgagagcttagatgaccaagaga

SEQ ID NO: 60258 - DNA, 80 bp, synthetic construct
  source 1..80: mol_type = other DNA
gggttgagggggtgtcaatcttaaaacacattctatttatgaccttgaatggcccttacactgatgagcaaaagaaagcc

SEQ ID NO: 60259 - DNA, 80 bp, synthetic construct
  source 1..80: mol_type = other DNA
atggttctggagaccttccaatattttgcactgccacatgctgctgaagttgtgaagagatcacgatcactaaccctatg

SEQ ID NO: 60260 - DNA, 80 bp, synthetic construct
  source 1..80: mol_type = other DNA
cttgatgaagaattttattgagcagagaggagggtcaatacttgaccaaattgaaaaggctcagtcaggtacagtgggtg

SEQ ID NO: 60261 - DNA, 80 bp, synthetic construct
  source 1..80: mol_type = other DNA
gattcagtaagccccagaagccttaccgcaaacagtcaggaggcattggctacaaggggaaaggtgtttggtcaggcata

SEQ ID NO: 60262 - DNA, 80 bp, synthetic construct
  source 1..80: mol_type = other DNA
atggaaaacacaaatgtacagatcctgatagatggtgatggttcatcaaactggatagaagaaatcaggctgagtagtga

SEQ ID NO: 60263 - DNA, 80 bp, synthetic construct
  source 1..80: mol_type = other DNA
gtccaggctatttgatgtcatagaatctgtcaggaggctgtgtgatgacattaatgtcaataatagagttacatcaagct

SEQ ID NO: 60264 - DNA, 80 bp, synthetic construct
  source 1..80: mol_type = other DNA
ttcggggtcattgcatggtgaggcttagcaactttaaggtcaagccagcttcaagggtagaaggttgcccagtgcgactc

SEQ ID NO: 60265 - DNA, 80 bp, synthetic construct
  source 1..80: mol_type = other DNA
atgccctcttcattccggataaaggagctccaaaacccagatgaggtcttcttaagggtgaggggagacattctaaacct

SEQ ID NO: 60266 - DNA, 80 bp, synthetic construct
  source 1..80: mol_type = other DNA
gtccatcctccttcaagaggaccgagtcatgaatctgcttagctacagagctcgtgacactgacatctcagagtctgcag

SEQ ID NO: 60267 - DNA, 80 bp, synthetic construct
  source 1..80: mol_type = other DNA
ctctgacccaagatgaagctgaagaattgatgttcaggttctgtgtggcaaatgagatttattcccaggcaagagcaatg

SEQ ID NO: 60268 - DNA, 80 bp, synthetic construct
  source 1..80: mol_type = other DNA
catcctacctatggatgaatagaacagacttctcatttggaaagaaggagccatcttgcagctggatgtgcttgaaaaca

SEQ ID NO: 60269 - DNA, 80 bp, synthetic construct
  source 1..80: mol_type = other DNA
ttggactcatgggcttggaatcaagcagcaagagttcttgaaagaaacatcaaaacccctggaattgataacaccgccat

SEQ ID NO: 60270 - DNA, 80 bp, synthetic construct
  source 1..80: mol_type = other DNA
ggggaacattttcaaggattgcttagaaagctcactcagaaagcaggggttgcttagatctagaattgctgagatggtgg

SEQ ID NO: 60271 - DNA, 80 bp, synthetic construct
  source 1..80: mol_type = other DNA
aacgtcatgttatcccactaacaagtcaggagctggtggatatcctggaggaagatgtcgacttttcagaaatgatgcaa

SEQ ID NO: 60272 - DNA, 80 bp, synthetic construct
  source 1..80: mol_type = other DNA
tctgatataatggaaggggacctagacattgatatcctgatggaagggtcaccaatgctctgggcagcagaagtggagga

SEQ ID NO: 60273 - DNA, 80 bp, synthetic construct
  source 1..80: mol_type = other DNA
gatgggagaagctatggtgatactcagtcagtcaggaaagtattatcatctaaaattaatggatcaagcagcaacaaccc

SEQ ID NO: 60274 - DNA, 80 bp, synthetic construct
  source 1..80: mol_type = other DNA
tttcaacaatccttgggaaagatggttgcaggcttctactggggagacctactgggagatcaaatctcagggagcaggtg

SEQ ID NO: 60275 - DNA, 80 bp, synthetic construct
  source 1..80: mol_type = other DNA
aagccctacttgacattattgcaaataagagagggagatgtcaactgggtttctgagtacaaagatgacacacgtggtct

SEQ ID NO: 60276 - DNA, 80 bp, synthetic construct
  source 1..80: mol_type = other DNA
tgatgaagactctgcagaaatgtggggttaaaccaaccaggactggggctcgggttgaggtgaagtgactctgctgtctc

SEQ ID NO: 60277 - DNA, 80 bp, synthetic construct
  source 1..80: mol_type = other DNA
ctcgggttgaggtgaagtgactctgctgtctcacttgagctatcagtacctaaaggttgatatctggacggtctttgtgt

SEQ ID NO: 60278 - DNA, 80 bp, synthetic construct
  source 1..80: mol_type = other DNA
gatgctgaggttgaacttcaaaagtcagaggaggaatatgaggccatatccagagcaagagctttcttcacgctttttga

SEQ ID NO: 60279 - DNA, 80 bp, synthetic construct
  source 1..80: mol_type = other DNA
ctatgacgatggtaagctctctgaggcattccctaactctgacattgagatgctcagaagatttctgagtcagcctgtag

SEQ ID NO: 60280 - DNA, 80 bp, synthetic construct
  source 1..80: mol_type = other DNA
gggtatatgaccagatttttgaaaggcctggcctcccaaaccttgaagtcacagtggactccactggggtagttgtcgat

SEQ ID NO: 60281 - DNA, 80 bp, synthetic construct
  source 1..80: mol_type = other DNA
acacaagttttgtgaccacaaccctcaaagaaaaagagcaagaggcttataagagaatgtgtgaggagcactatctaaag

SEQ ID NO: 60282 - DNA, 80 bp, synthetic construct
  source 1..80: mol_type = other DNA
agtggcatgagcacaaaagagaggcttgaggcgaatcgcagtgatgcaatagacaaaactagagctctcatggagagact

SEQ ID NO: 60283 - DNA, 80 bp, synthetic construct
  source 1..80: mol_type = other DNA
ccacaacatgagcagcaaggagctacactcgaataagagcacagtgaagttgcctccctgggtagtgaagccttctgata

SEQ ID NO: 60284 - DNA, 80 bp, synthetic construct
  source 1..80: mol_type = other DNA
gtattccctttggttcatgatggctcagatgaatttagaagctctttgctctagagtgctctcagagagagggctatcaa

SEQ ID NO: 60285 - DNA, 80 bp, synthetic construct
  source 1..80: mol_type = other DNA
caggactggggctcgggttgaggtgaagtgactctgctgtctcacttgagctatcagtacctaaattggtactgatagct

SEQ ID NO: 60286 - DNA, 80 bp, synthetic construct
  source 1..80: mol_type = other DNA
atggaaagaatccttaaaaaacaaccagctcctgtaagagcattaaccattcatccactgaggaggtatgaatcatcaat

SEQ ID NO: 60287 - DNA, 80 bp, synthetic construct
  source 1..80: mol_type = other DNA
gactacacagaggagcccagatgaacttggaagtgcttcctactagcagaaacgtggagaatgggctgtctcttggagaa

SEQ ID NO: 60288 - DNA, 80 bp, synthetic construct
  source 1..80: mol_type = other DNA
gactacacagaaggcgcccagatgaacttggaagtccactgtggtaggataaacgtggagaatgggctgtctcttggaga

SEQ ID NO: 60289 - DNA, 80 bp, synthetic construct
  source 1..80: mol_type = other DNA
aagaccaataagcaaagtcaggcttagatttagggatactatgctagtattggaatccatgtgggttctgatactagcat

SEQ ID NO: 60290 - DNA, 80 bp, synthetic construct
  source 1..80: mol_type = other DNA
agtgtttataaaaatgaatcgttttcaacaacgtcaactatttctggaaaatctattggtaggagtgaacagtacatttc

SEQ ID NO: 60291 - DNA, 80 bp, synthetic construct
  source 1..80: mol_type = other DNA
aaattttctgattactcttatcattaactgttaaatatttactcattatacggatgataaatgttgtttaattatattat

SEQ ID NO: 60292 - DNA, 80 bp, synthetic construct
  source 1..80: mol_type = other DNA
tgtctgtgggtggctagggagtgttggttttagaaggatttccttaagatctgggcggtctttgggttcgggttccggtg

SEQ ID NO: 60293 - DNA, 80 bp, synthetic construct
  source 1..80: mol_type = other DNA
gatgtccttgaaggcacaggatccaccataagagctcaaccccagtcacacctcaccctccaggcctccactcactttgt

SEQ ID NO: 60294 - DNA, 80 bp, synthetic construct
  source 1..80: mol_type = other DNA
gggcaaaacatcaacatacttagcactcctgatgttcgatcagaggattacgatgttgggcctgacaataaagacattag

SEQ ID NO: 60295 - DNA, 80 bp, synthetic construct
  source 1..80: mol_type = other DNA
gtgggtggctagggagtgttggttttagaaggatttccttgagatctgggcggtctttgtgtagcagcggcctggtgccg

SEQ ID NO: 60296 - DNA, 80 bp, synthetic construct
  source 1..80: mol_type = other DNA
ctatggcacgtagacaaatgacacctactatgattgcaaaactcccaaaatttgttaggaattctccacaagcttatgat

SEQ ID NO: 60297 - DNA, 80 bp, synthetic construct
  source 1..80: mol_type = other DNA
gtgaaagccccatctcaggtggaattgctcaaggaggaaatagagcgactgaaagcccaattgaattccgctgttgaaaa

SEQ ID NO: 60298 - DNA, 80 bp, synthetic construct
  source 1..80: mol_type = other DNA
tgccagaggggagccattttgcccgaacagtacttgcgcgctcaacaacacctactactctagcgcgcgcaggtgaaaga

SEQ ID NO: 60299 - DNA, 80 bp, synthetic construct
  source 1..80: mol_type = other DNA
catagacacttctgacgaagaagatgaaaatgagacagaccgtgtaaccctcctctcaactctcgtgaatcaaggaatga

SEQ ID NO: 60300 - DNA, 80 bp, synthetic construct
  source 1..80: mol_type = other DNA
tcccaattacaatggaatctttgctacgaaaacaaaccatcaacaatgaagggttttttaagcctgaattacgtcatagt

SEQ ID NO: 60301 - DNA, 80 bp, synthetic construct
  source 1..80: mol_type = other DNA
ttaaaagttttaaaggtggaaggtgagcacccaatggcaaggttctggaggcatgttgtaagttctgcacaactagagga

SEQ ID NO: 60302 - DNA, 80 bp, synthetic construct
  source 1..80: mol_type = other DNA
gattgatagaatgtatgacgatccagaagctgagttgcagtatgcattgtctggagacataccaagagctgaacagaaga

SEQ ID NO: 60303 - DNA, 80 bp, synthetic construct
  source 1..80: mol_type = other DNA
ataagtaccacagagtgaaactcaatttatcttctgaggaggatgagtacctggcaactctgggtataagtgggaagaag

SEQ ID NO: 60304 - DNA, 80 bp, synthetic construct
  source 1..80: mol_type = other DNA
atgaaggatctagcatcagtcaaggagtccagagccaggagtaagaaggccttttctattcaacatgacatctcaagatt

SEQ ID NO: 60305 - DNA, 80 bp, synthetic construct
  source 1..80: mol_type = other DNA
ggaaaacttcttatatggagacagtagtaaaatgtttgaggcaaatgatgacttgttctgtccgcttgctgaggactttg

SEQ ID NO: 60306 - DNA, 80 bp, synthetic construct
  source 1..80: mol_type = other DNA
aactaagaatgatggcacaagcgattcatcaaccaacaatgacgaaagatcagggcccaaatgaagtattgaggaatcat

SEQ ID NO: 60307 - DNA, 80 bp, synthetic construct
  source 1..80: mol_type = other DNA
ctaagattgttacataccccctttggatcatggtgtcaaatggtgagcctcataggagcagaattgtctgcatctgtgaa

SEQ ID NO: 60308 - DNA, 80 bp, synthetic construct
  source 1..80: mol_type = other DNA
cgactcattgaaccccaattcaactgtggggtcttctctaacctctgtgatagagataccagagaagaatcttatgaaca

SEQ ID NO: 60309 - DNA, 80 bp, synthetic construct
  source 1..80: mol_type = other DNA
gcagcatgtgaagccaggacaattcataataaagagactgcttaattcaccattgataatggcagttaggcctacttcct

SEQ ID NO: 60310 - DNA, 80 bp, synthetic construct
  source 1..80: mol_type = other DNA
ccaagagtcatatttttgtctcttttggattaattaaagcataccacgtcatggacattgagactggaaatgtatttaag

SEQ ID NO: 60311 - DNA, 80 bp, synthetic construct
  source 1..80: mol_type = other DNA
tcttatatcgatgcgggtgatctgttcatcacagattttgtttcttataaactgagcaaactaaccaatctctgcaagtg

SEQ ID NO: 60312 - DNA, 80 bp, synthetic construct
  source 1..80: mol_type = other DNA
cagctcattaatggaatgttcatcaaatttttggatagaagcatttaattatgcaatttgggattcaacaaaattacttg

SEQ ID NO: 60313 - DNA, 80 bp, synthetic construct
  source 1..80: mol_type = other DNA
caaccgacaggagcccaggtgtaaaggaagcatctttcatgataaagctttcactactaacattattggaagataaagct

SEQ ID NO: 60314 - DNA, 80 bp, synthetic construct
  source 1..80: mol_type = other DNA
gtgactgaagaactgcagacaatacagagatatgtaatgatggaagggtttgtctcacagccagaattgcctaagccaca

SEQ ID NO: 60315 - DNA, 80 bp, synthetic construct
  source 1..80: mol_type = other DNA
caaaatgctcaacaaagtccccggggtgctaaggtcagagttacaggtctttttattctggagagtgataaaatcaatga

SEQ ID NO: 60316 - DNA, 80 bp, synthetic construct
  source 1..80: mol_type = other DNA
agagaatatctgagtctccctttttactctcaaaaagaaatggtcagataagttggagtggtttgttcaatcctctgtct

SEQ ID NO: 60317 - DNA, 80 bp, synthetic construct
  source 1..80: mol_type = other DNA
ggcaatgatgtgagatctttgcaagcagtcataagctcctgttacaatggttattttaagaataaagaagaagaaactga

SEQ ID NO: 60318 - DNA, 80 bp, synthetic construct
  source 1..80: mol_type = other DNA
gccatcatcgttatcaaagatgtacaagaagattattgagctagaacatctttgcccagaagatgacaaatacctgggaa

SEQ ID NO: 60319 - DNA, 80 bp, synthetic construct
  source 1..80: mol_type = other DNA
tggttcatgatataacttttggccatattgccgactctactgatgttaagctgtcatctaagtttggtatagttggtgat

SEQ ID NO: 60320 - DNA, 80 bp, synthetic construct
  source 1..80: mol_type = other DNA
tgagtgatccagaagatcctaaaatgcatgaatttagtagaagctacttaaagcagagtatcctacatggcaaagacttg

SEQ ID NO: 60321 - DNA, 80 bp, synthetic construct
  source 1..80: mol_type = other DNA
ctcaaacgaatgtatgggcagaacttcatggaacagattgacagacagataactcgagaagttgcctctctaagcttaga

SEQ ID NO: 60322 - DNA, 80 bp, synthetic construct
  source 1..80: mol_type = other DNA
aaggttggcaactctaaaggccactagcaattttaacgagtcatggtatgagtataaagacgtaaaagataagaattaca

SEQ ID NO: 60323 - DNA, 80 bp, synthetic construct
  source 1..80: mol_type = other DNA
ctagagaaaaagtgctagtccgaatgtcagagattgccagagatggtaagactctagcagttcatgcatttaatgattgt

SEQ ID NO: 60324 - DNA, 80 bp, synthetic construct
  source 1..80: mol_type = other DNA
atgaatgcagtagaggccagaggatgcatgcatatttgccttttcaagaagcagcaacatggtggattgcgtgaaatata

SEQ ID NO: 60325 - DNA, 80 bp, synthetic construct
  source 1..80: mol_type = other DNA
cagaagggaagaacctacctatactcctagcaatggtttctattaggctttgaacaatcctttcttcagcccccaagaca

SEQ ID NO: 60326 - DNA, 80 bp, synthetic construct
  source 1..80: mol_type = other DNA
ggctatgatcatctaagcccagacatgattgtcgaaacaacatcaggatcgtatattgttgttgaattcaccactttcag

SEQ ID NO: 60327 - DNA, 80 bp, synthetic construct
  source 1..80: mol_type = other DNA
aagcaataacaagaacatcattaaaacgcctttatgcttactttatgaagaaagtgagatctgtgagtgaagatgagcag

SEQ ID NO: 60328 - DNA, 80 bp, synthetic construct
  source 1..80: mol_type = other DNA
ttagaggcttgtagcgttagcccaggcggtgcaataatattgagttcctcacttaaatggggatccagacaaaagtatct

SEQ ID NO: 60329 - DNA, 80 bp, synthetic construct
  source 1..80: mol_type = other DNA
agggagtgaaagaggctgccttaatgccgcgaaagacaagtttgcaaagtaccaaatagcatgtgagaacagatcaagga

SEQ ID NO: 60330 - DNA, 80 bp, synthetic construct
  source 1..80: mol_type = other DNA
aaaactgaggtcaagactaaacatccctgacaactggattgacttgataaacgagaacccttcagtattatatcgagcac

SEQ ID NO: 60331 - DNA, 80 bp, synthetic construct
  source 1..80: mol_type = other DNA
ccaggacatctgaagaaataatgctgaggatagcagagaaggtgcatagcccaggtgttgtgtcttctctgtcgacaggc

SEQ ID NO: 60332 - DNA, 80 bp, synthetic construct
  source 1..80: mol_type = other DNA
tatcagcatctatatttcaggattcaaataagcaagaattcagtatcatggagtccagcaagtatagtttattgcagaag

SEQ ID NO: 60333 - DNA, 80 bp, synthetic construct
  source 1..80: mol_type = other DNA
atgatggcttatgatggctttgagaataatcttgagttaacaatggaagatattcttttcttgttcccaaacattgatga

SEQ ID NO: 60334 - DNA, 80 bp, synthetic construct
  source 1..80: mol_type = other DNA
tctgcagcagttagactgcatagtgtatgacagatgccagattcaggttgcacagagagtcagccacaaagaaaatacac

SEQ ID NO: 60335 - DNA, 80 bp, synthetic construct
  source 1..80: mol_type = other DNA
agactaaaattacagtatttgaaggacatcaaaatctaaaaacaccagcagaatatatggtttcagataagtggtttggc

SEQ ID NO: 60336 - DNA, 80 bp, synthetic construct
  source 1..80: mol_type = other DNA
acaatgaagagtaagattggctcatcaggatttgaaaatgaatggtcaaagttgaaaaccataatcacatggttaacaga

SEQ ID NO: 60337 - DNA, 80 bp, synthetic construct
  source 1..80: mol_type = other DNA
tacacctgcagcaacacttgagaagtcaccactgtcaaatcatgttcaaattaggaatttcttctctagaatggaaagca

SEQ ID NO: 60338 - DNA, 80 bp, synthetic construct
  source 1..80: mol_type = other DNA
aacctagaactgtgcgtgtcactggagcacctgttaagaaaagatcaggctcaagtaagatctccttggttataagagat

SEQ ID NO: 60339 - DNA, 80 bp, synthetic construct
  source 1..80: mol_type = other DNA
cggcaccggtttcactgtatgtcattgctgttcatagagatggattatggactaacatgacaatgagtcaggacgaggtc

SEQ ID NO: 60340 - DNA, 80 bp, synthetic construct
  source 1..80: mol_type = other DNA
aatttcactaagattggttttctccgtgattttgaagatatcagctcagccacaagagctttttcagtggaagttttaaa

SEQ ID NO: 60341 - DNA, 80 bp, synthetic construct
  source 1..80: mol_type = other DNA
acattttttattttgcacactacaagggccatactctgtgcagacaaaatatgatttgtgctataaaattttgagtgagt

SEQ ID NO: 60342 - DNA, 80 bp, synthetic construct
  source 1..80: mol_type = other DNA
ctgaagtcattggcataagagaatcagatgggaaaaccagaacaaaccagttggcagtatttcaaaactttgtgaacagt

SEQ ID NO: 60343 - DNA, 80 bp, synthetic construct
  source 1..80: mol_type = other DNA
aaccctgatataatacatcagattgagtcaataggagcaggaaccataggtggttttattataccacaaaagagcaagga

SEQ ID NO: 60344 - DNA, 80 bp, synthetic construct
  source 1..80: mol_type = other DNA
agtgtctgggaaggtcttttattatggccgcggagtctggcgaggggtcatggatggatcacaaatacagatagagatag

SEQ ID NO: 60345 - DNA, 80 bp, synthetic construct
  source 1..80: mol_type = other DNA
ataacaagcagggtctcccacctcagattgttgaaatctcttttgatggtaggattggaatatgggaagtgtgcagaagt

SEQ ID NO: 60346 - DNA, 80 bp, synthetic construct
  source 1..80: mol_type = other DNA
attagatcttggtgtgaagatgttggtgtaaagaatgatgtggatatgtcaaaacggagtagaagtggtgctagattttg

SEQ ID NO: 60347 - DNA, 80 bp, synthetic construct
  source 1..80: mol_type = other DNA
gctttatgactttaaagcattcacgcaagataaaccatttggttgccctgtctatgtgaccagcagtagaatgacagact

SEQ ID NO: 60348 - DNA, 80 bp, synthetic construct
  source 1..80: mol_type = other DNA
tcagatctgtaagcaatgaagatgtaaaattcaaaataaggaaatgcactatgaatctgttcttaaagaatggtggcaga

SEQ ID NO: 60349 - DNA, 80 bp, synthetic construct
  source 1..80: mol_type = other DNA
gacatacatatactaacgtacacagctcatgatggagatctaagttctagcattttcaggagtccagatgactcagtctg

SEQ ID NO: 60350 - DNA, 80 bp, synthetic construct
  source 1..80: mol_type = other DNA
aatgagttggtttttagatacaggatggcgctcagtatacatgaagaatcacgtaagatctgcccagaactgacagatga

SEQ ID NO: 60351 - DNA, 80 bp, synthetic construct
  source 1..80: mol_type = other DNA
cagattgaagaagcacttctcaaaagaacccagttcatcatgggcgggttgccagtctttgccattcgcctttgtgcata

SEQ ID NO: 60352 - DNA, 80 bp, synthetic construct
  source 1..80: mol_type = other DNA
aagtcttagagttatgcagtggagtactagtgagagatcacattgataacgaaaggctttctaagatagtacagttatgc

SEQ ID NO: 60353 - DNA, 80 bp, synthetic construct
  source 1..80: mol_type = other DNA
actgagaactctttaaggacaaaggtgggtactatctattcagccctaccaaatttctccgaagggagatcaataataga

SEQ ID NO: 60354 - DNA, 80 bp, synthetic construct
  source 1..80: mol_type = other DNA
tgttgattccattgttgatttaatgatagaggatatggccaaggaagactttaacgatgctgttaaaatgatggaaacag

SEQ ID NO: 60355 - DNA, 80 bp, synthetic construct
  source 1..80: mol_type = other DNA
aagaaccagcatcatatgagaatgagtcatttgatataagtgatattgatttatttggacctgcgcactataaagaggta

SEQ ID NO: 60356 - DNA, 80 bp, synthetic construct
  source 1..80: mol_type = other DNA
tcagagctaaccaccatttcacaccctctgatggatgactttgttaatgtattgatcctaaaatgtggcagaaaggacat

SEQ ID NO: 60357 - DNA, 80 bp, synthetic construct
  source 1..80: mol_type = other DNA
tagaagatgccttgagacaggaagatgcatgacaagaaataaagtatacatgagagatctattctcaagcataggtagag

SEQ ID NO: 60358 - DNA, 80 bp, synthetic construct
  source 1..80: mol_type = other DNA
atcctgacgatgtgcatgctgatgactacaatgaaagtgagtcagatccggatgatgatttaatcggttagagctactaa

SEQ ID NO: 60359 - DNA, 80 bp, synthetic construct
  source 1..80: mol_type = other DNA
tcataaaaaagtgaataaccagagataataaaaaaacaaaaaatagtattttaagcattgtaaaagatagtttgatttca

SEQ ID NO: 60360 - DNA, 80 bp, synthetic construct
  source 1..80: mol_type = other DNA
aaaaacaaaaaatagtattttaagcattgtaaaagatagtttgatttcatgattaacaatttagaaaaaatgggacggtc

SEQ ID NO: 60361 - DNA, 80 bp, synthetic construct
  source 1..80: mol_type = other DNA
tgattcagatctgtccaaggcagagagagaactgctgggaacactatctttcatagacctagattggaataaaacagaaa

SEQ ID NO: 60362 - DNA, 80 bp, synthetic construct
  source 1..80: mol_type = other DNA
aaatatttccaatgttcaaaaaagcggtttttgacaattttcatacatctccacctgatgagaactatatgagtcacata

SEQ ID NO: 60363 - DNA, 80 bp, synthetic construct
  source 1..80: mol_type = other DNA
gaccatgacttgttaaacgcagatttgcccacatttctagtggagagatcatctagtaagattattattgatttgaacct

SEQ ID NO: 60364 - DNA, 80 bp, synthetic construct
  source 1..80: mol_type = other DNA
atatcaaaagaacttgagagatctcaatctgatttactgaagtcatctttctttcaagaaggtctcactgcggaagatag

SEQ ID NO: 60365 - DNA, 80 bp, synthetic construct
  source 1..80: mol_type = other DNA
gagattcttgaataggtcagagtgtgacatcaaaatcaatgaatttcttaaagcatttgatagagaagaagagttgagag

SEQ ID NO: 60366 - DNA, 80 bp, synthetic construct
  source 1..80: mol_type = other DNA
acccatttgactctaagtcaacaattcagattcctccttgggtattcactgatgctgaagaggggaaaagtttaaccata

SEQ ID NO: 60367 - DNA, 80 bp, synthetic construct
  source 1..80: mol_type = other DNA
ctccaggtgtcaatccagccaatgtccaaaaccctggagtgtttccacatgcattcattgatgcccgcaccgtggatcct

SEQ ID NO: 60368 - DNA, 80 bp, synthetic construct
  source 1..80: mol_type = other DNA
ctctagatgttgtatgttcacgcaacgtaaacttcaaatagcatctaaactaatgaaaccaaattatatgacatcaaatc

SEQ ID NO: 60369 - DNA, 80 bp, synthetic construct
  source 1..80: mol_type = other DNA
attggggacacggagaaataagtgactcaactactgtagagcctgttttagacggtccataccaaccagttgcatttaaa

SEQ ID NO: 60370 - DNA, 80 bp, synthetic construct
  source 1..80: mol_type = other DNA
acgttaacttcgagtacaaaactagtcggtattctaaagcatggcgggagattatggacatatcatggtgaaacaccaaa

SEQ ID NO: 60371 - DNA, 80 bp, synthetic construct
  source 1..80: mol_type = other DNA
cgctaccaccgattattcgacaacgtcaaatctaaatgaaattagtgttacaacatatgctgaattctatattataccac

SEQ ID NO: 60372 - DNA, 80 bp, synthetic construct
  source 1..80: mol_type = other DNA
tggctatcatatctattgaaccaaatgtcaattcagagagcagacaatattctctgtttggagtcaacaagcaaattacc

SEQ ID NO: 60373 - DNA, 80 bp, synthetic construct
  source 1..80: mol_type = other DNA
gctagagtgatgtctctgagtattgatgtaacgagtcttccctcaatttcttctagtatctttaaaaatgaatcgtcttc

SEQ ID NO: 60374 - DNA, 80 bp, synthetic construct
  source 1..80: mol_type = other DNA
tcaatctgatgctaataagtttaatggtaattttactcaaatattccattcatataactcaataacgctatcattcatga

SEQ ID NO: 60375 - DNA, 80 bp, synthetic construct
  source 1..80: mol_type = other DNA
cgggttttaaaacctttgcgcaagttttatacaaaatactagatctattttttaacagtaagagaaacgttgaaccgcgt

SEQ ID NO: 60376 - DNA, 80 bp, synthetic construct
  source 1..80: mol_type = other DNA
aacattgtcagtgctcaatacattacatgcttatgggattgggagtgagtgccctgttctcagagttttcgaaggccgtc

SEQ ID NO: 60377 - DNA, 80 bp, synthetic construct
  source 1..80: mol_type = other DNA
tccaagtggcttgatccaggacttggtttcttcttgtttgataatccatactctgctggtctatcagggttcaagtacaa

SEQ ID NO: 60378 - DNA, 80 bp, synthetic construct
  source 1..80: mol_type = other DNA
ccccctgcagggactagatgtgagaggggaccatcccatgtgcaacttgtggagagaggtggtcacctctgcaaacctag

SEQ ID NO: 60379 - DNA, 80 bp, synthetic construct
  source 1..80: mol_type = other DNA
aaggggctttaatgagatcataacagagcactacaaattcatgggaagtagaattggctcatggtgccaaatggtcagct

SEQ ID NO: 60380 - DNA, 80 bp, synthetic construct
  source 1..80: mol_type = other DNA
gccctacatagatgctggggatctgctggtcactgattttgtttcttataagctaagcaagcttaccaacctctgcaagt

SEQ ID NO: 60381 - DNA, 80 bp, synthetic construct
  source 1..80: mol_type = other DNA
atcctggggtggcatgttcaatcctttttcagggagacctctccttgatatgcaaccactcatcagctgttgttacaatg

SEQ ID NO: 60382 - DNA, 80 bp, synthetic construct
  source 1..80: mol_type = other DNA
acaagggacaaacttttagtgaagatgtcaaaatatgcctctgagggaaagtctcttgctatccagaagtttgaggattg

SEQ ID NO: 60383 - DNA, 80 bp, synthetic construct
  source 1..80: mol_type = other DNA
gcaaagggcctgtgtggacttgtgcaacatcagatgatgcaaggaaatggaatcaaggccattttgttacaaagtttgcc

SEQ ID NO: 60384 - DNA, 80 bp, synthetic construct
  source 1..80: mol_type = other DNA
cagccccaaatggtggccgctgatcattaggggatgctcaatgttcaccaagaagaggatgatgatgaatttgaattatc

SEQ ID NO: 60385 - DNA, 80 bp, synthetic construct
  source 1..80: mol_type = other DNA
gagccttgtctgtgacatgatgcaaggatcagatgatagtagtatgctaatcagcttcccagctgatgatgaaaaagttc

SEQ ID NO: 60386 - DNA, 80 bp, synthetic construct
  source 1..80: mol_type = other DNA
caaagtggccgcagccatctgcttccgcatgaagaaggagctgggagtgtaccttgccatttacccctcagagaagagca

SEQ ID NO: 60387 - DNA, 80 bp, synthetic construct
  source 1..80: mol_type = other DNA
tcagaggagatgaaagaggtgcattccaggctgccatgactaaacttgccaagtatgaggttccttgtgagaacagatct

SEQ ID NO: 60388 - DNA, 80 bp, synthetic construct
  source 1..80: mol_type = other DNA
ccctggtggagctctaattcttagctcctctctaaagtggggatctaggaagaagttccaaaaattgagagaccgtttga

SEQ ID NO: 60389 - DNA, 80 bp, synthetic construct
  source 1..80: mol_type = other DNA
agactcgggtcactatctttaatgagcagaagaccctccggacatctccagagaagctggtctctgacaagtggtttggg

SEQ ID NO: 60390 - DNA, 80 bp, synthetic construct
  source 1..80: mol_type = other DNA
agtccgcatcactggagctccagtaaagaagaggtcaggggttagtaagatagccatggtgatccgtgacaatttctccc

SEQ ID NO: 60391 - DNA, 80 bp, synthetic construct
  source 1..80: mol_type = other DNA
cagaggacatggaggtcacaaacaaccaggattattcctctaaatcatcccgcggggccagatattggatgcattcattc

SEQ ID NO: 60392 - DNA, 80 bp, synthetic construct
  source 1..80: mol_type = other DNA
aaaggaggaggtggagatgaaagtacggggctctacacttaatttgtacaccaagcaccattctcatcaggacctacaca

SEQ ID NO: 60393 - DNA, 80 bp, synthetic construct
  source 1..80: mol_type = other DNA
atgaaggggtggctcaagccctgcaattatttgagagggagccctccaactgctgggtgagatgtgagtctgtagcccca

SEQ ID NO: 60394 - DNA, 80 bp, synthetic construct
  source 1..80: mol_type = other DNA
tggagatatgtgaggggaagagacagataaagggaattaacagaacccggctctctgagattgtgagaatttgttctgaa

SEQ ID NO: 60395 - DNA, 80 bp, synthetic construct
  source 1..80: mol_type = other DNA
aagatggggagagcctcagttaggaaagtccttgaaacaggtcggtgctccagcaaagactatgatttatcaaaagtgct

SEQ ID NO: 60396 - DNA, 80 bp, synthetic construct
  source 1..80: mol_type = other DNA
acacagagaggcccaaatatggaaagaatccttaaaaaacaaccagctcctgtaagagcattaaccattcatccactgag

SEQ ID NO: 60397 - DNA, 80 bp, synthetic construct
  source 1..80: mol_type = other DNA
agacctggagcctcttaagtctgtgagtgtggagggttctcatcccatgtgcaagatttggaataaggtgtgcacaaatg

SEQ ID NO: 60398 - DNA, 80 bp, synthetic construct
  source 1..80: mol_type = other DNA
cttcaatagagaaaatagagagaatgcatgatgacccagttttggagcttgaatatgcaatgtcagggtcaacagagcgg

SEQ ID NO: 60399 - DNA, 80 bp, synthetic construct
  source 1..80: mol_type = other DNA
tcagttgagaggaacaagtaccaccgcaccgtgctcactttgtccccagaggagagagagtatgctgcagtcctaggagt

SEQ ID NO: 60400 - DNA, 80 bp, synthetic construct
  source 1..80: mol_type = other DNA
ttgtgggaagagaaatgcaaatctgggagctgtcaaagaagccagggtgaggagcaagaagggcttctccattggccaca

SEQ ID NO: 60401 - DNA, 80 bp, synthetic construct
  source 1..80: mol_type = other DNA
acactgagagagtggaagagttcttgtctgatagctgtgtagaggatctcatcccaacagaaggtctgtacaacccgctc

SEQ ID NO: 60402 - DNA, 80 bp, synthetic construct
  source 1..80: mol_type = other DNA
tctgaggacaaatccctgagactactggcaatgggcctgcatcagcctactctgatccacatggatgatgagaccccaga

SEQ ID NO: 60403 - DNA, 80 bp, synthetic construct
  source 1..80: mol_type = other DNA
gactctggattgccatttaaaattcttgagttcaccgataggaagctggctgcaaatggtctccatagttggtgcagagt

SEQ ID NO: 60404 - DNA, 80 bp, synthetic construct
  source 1..80: mol_type = other DNA
ttgcaacctccgagcttgctgatggacaatctgggtctactattcagccttttgaaagtgtccctgctcagaatttaact

SEQ ID NO: 60405 - DNA, 80 bp, synthetic construct
  source 1..80: mol_type = other DNA
tgtctgcttcagtaaagcagcacgtcaagcctaatcagttcattgtgaagaggttgctagactctgctatattcttactg

SEQ ID NO: 60406 - DNA, 80 bp, synthetic construct
  source 1..80: mol_type = other DNA
attaagccaacaacttctaagggtcacatatttgtctctcttgctgtcaacaagaagttcttacatggtgagttaagcaa

SEQ ID NO: 60407 - DNA, 80 bp, synthetic construct
  source 1..80: mol_type = other DNA
atctagtgtcttcaagcaatctatagatgctggtgatctcctggtcacagactttgtttcatttaagctaagtaagatca

SEQ ID NO: 60408 - DNA, 80 bp, synthetic construct
  source 1..80: mol_type = other DNA
ctaacctttgtaaggctctatgtgtattagaggcagcttcttgcttctgggctgagacatatggttttgaaccttggaaa

SEQ ID NO: 60409 - DNA, 80 bp, synthetic construct
  source 1..80: mol_type = other DNA
ttcgtggaccaggccagtgctgtgaagtttttagatgcatggtttatgataaaactatctctcctgactatgttagagga

SEQ ID NO: 60410 - DNA, 80 bp, synthetic construct
  source 1..80: mol_type = other DNA
caaggcaacaacagaagagcttcagactatgcaaaggtatgtgataatggaggggtttgtgtcactccctgaaattccca

SEQ ID NO: 60411 - DNA, 80 bp, synthetic construct
  source 1..80: mol_type = other DNA
agccacacaagatgttgtcaaaaatcccaaaagtgctcaggtctgagctacaagtatttctaacccacaggctattcagc

SEQ ID NO: 60412 - DNA, 80 bp, synthetic construct
  source 1..80: mol_type = other DNA
acaatgcagcgaatatcagccacccctttccagctccacaaggtaggagggaacatccgctggaagggacttttcaatcc

SEQ ID NO: 60413 - DNA, 80 bp, synthetic construct
  source 1..80: mol_type = other DNA
ttactctggaaacagtattgatgagctgcagactttaattagctgctgctataatggttatttcaagaacaaagaggaag

SEQ ID NO: 60414 - DNA, 80 bp, synthetic construct
  source 1..80: mol_type = other DNA
acactgagccatcagcattatcagccatgtacaagaagattatagagctagaacatctccgacccccaacagacacatac

SEQ ID NO: 60415 - DNA, 80 bp, synthetic construct
  source 1..80: mol_type = other DNA
ctgtttaaacatgacttcacttttggtcatctagcagacacaactgataagaagtttgttgaggtgtttggggttttaga

SEQ ID NO: 60416 - DNA, 80 bp, synthetic construct
  source 1..80: mol_type = other DNA
ttaggatatgaagaccccattgaccctaagatgcacgagttcagcaggagctatctgaagctgctgggcaaccatgcaaa

SEQ ID NO: 60417 - DNA, 80 bp, synthetic construct
  source 1..80: mol_type = other DNA
gaccaaactaagaaagcaatatggcagaggagtaatgaatcagattgagaacagcatagtgagagaggtccagtcaataa

SEQ ID NO: 60418 - DNA, 80 bp, synthetic construct
  source 1..80: mol_type = other DNA
ctctggaacggctagctactcttaaagctactagcaacttcgacagttcatggtacactttcaaggacgtgaaagacaag

SEQ ID NO: 60419 - DNA, 80 bp, synthetic construct
  source 1..80: mol_type = other DNA
aattacactagagataaacttctagtcaagatgacccagtttgctcatagaggaaagactttggctatagaggtgtttga

SEQ ID NO: 60420 - DNA, 80 bp, synthetic construct
  source 1..80: mol_type = other DNA
agaatgcatgtcaaggattgaagagaaaggttgcatggagatctgcttattcaagaaacaacagcatggtggtctcagag

SEQ ID NO: 60421 - DNA, 80 bp, synthetic construct
  source 1..80: mol_type = other DNA
aaatttatgtcatgggtgcagatgaaagaatagttcaatcagtgatagaggccatagcgcgggcaattggaaggtttttc

SEQ ID NO: 60422 - DNA, 80 bp, synthetic construct
  source 1..80: mol_type = other DNA
gactcagacaccctatgtaatccatccaacaaaataaggattccagaaacacacgggcagagagccaaaagaaggtgtgg

SEQ ID NO: 60423 - DNA, 80 bp, synthetic construct
  source 1..80: mol_type = other DNA
tcgatctgtctggacttgtgccacctcagatgatgctagaaagtggaatcaaggacattatgtcacaaaatttgccctga

SEQ ID NO: 60424 - DNA, 80 bp, synthetic construct
  source 1..80: mol_type = other DNA
tgctatgtgaattcactcctcaagagtggtggcctttaatcatcagaggttgctcgatgttcacaaacaagtttatgatg

SEQ ID NO: 60425 - DNA, 80 bp, synthetic construct
  source 1..80: mol_type = other DNA
atgaatcttgatttcttgaggataattgatagtcacaaggagctacagattgaggatgagtttgtgagtaagctgttcaa

SEQ ID NO: 60426 - DNA, 80 bp, synthetic construct
  source 1..80: mol_type = other DNA
gaacagggctgatgattctgattttcagtcccctgacatgatcatagagacagagactggccatgtttatgtggttgaat

SEQ ID NO: 60427 - DNA, 80 bp, synthetic construct
  source 1..80: mol_type = other DNA
ggcataccacggtgagagtgtggagccatggatatctcaggggtgcacatacctcaagacaagcactgggatgatgcagg

SEQ ID NO: 60428 - DNA, 80 bp, synthetic construct
  source 1..80: mol_type = other DNA
ggattctgcacttcacttcctccttgcttcattccctgcatcaggagtttgtaaagactacagccatccaactgttcact

SEQ ID NO: 60429 - DNA, 80 bp, synthetic construct
  source 1..80: mol_type = other DNA
ctaaagctaggctctgatgcgtcttcaaaagtagtgtgcgatatgatgcagggctcagatgacagtagtatgatcattag

SEQ ID NO: 60430 - DNA, 80 bp, synthetic construct
  source 1..80: mol_type = other DNA
ctttcctgctgataatgagaagattaaaatgagatacaagctggttgctgctatgtgttttaggattaagaagagccttg

SEQ ID NO: 60431 - DNA, 80 bp, synthetic construct
  source 1..80: mol_type = other DNA
gcatttatattggcatttacccgtccgaaaaatccactcccaacacagacttcgtgatggagtacaactcagagttcttc

SEQ ID NO: 60432 - DNA, 80 bp, synthetic construct
  source 1..80: mol_type = other DNA
tttcattctcagcatgtgaggcctaccatcaggtggatagctgcttcttgctctctccctgaggttgagacattggtcgc

SEQ ID NO: 60433 - DNA, 80 bp, synthetic construct
  source 1..80: mol_type = other DNA
aagacaagaagaggctgctaatctgctcactgccataacagaaggaggaggatcattctccctggcagccatgatacagc

SEQ ID NO: 60434 - DNA, 80 bp, synthetic construct
  source 1..80: mol_type = other DNA
actgccagtgctcaattcattacatgctcagggggttgggtgtaagtgctctattctcagaattctcaaaggccatttcc

SEQ ID NO: 60435 - DNA, 80 bp, synthetic construct
  source 1..80: mol_type = other DNA
aagtggctcgaccctgggcttggtttcttcttgtttgataacccgtactctgctggtctgtcgggattcaagtataatct

SEQ ID NO: 60436 - DNA, 80 bp, synthetic construct
  source 1..80: mol_type = other DNA
gtacagagccataatgaattcaagcctgaagtccatctactcatttttcatgaagagggtaaaagggggatctcaaagaa

SEQ ID NO: 60437 - DNA, 80 bp, synthetic construct
  source 1..80: mol_type = other DNA
ttacaacaaccatgggggatgcaaactcagcagatctggctgccagaaacaagatcgcgaaatatgagatagcttgcctc

SEQ ID NO: 60438 - DNA, 80 bp, synthetic construct
  source 1..80: mol_type = other DNA
cagatggcattataagtgaatcctgcagtgtcagtcctggtggagctatagtcatgagctccactctgaggtggggatca

SEQ ID NO: 60439 - DNA, 80 bp, synthetic construct
  source 1..80: mol_type = other DNA
gtagagaagtttaagaggctaagaaatagactaaacatacctgaaacctggaaagagatgatcaatgagagtcctgaggt

SEQ ID NO: 60440 - DNA, 80 bp, synthetic construct
  source 1..80: mol_type = other DNA
cttgtacagagccccgcagactgggactgaaataatgctaagaatagctgagaaggtgcatagtcctggagtggtttcgt

SEQ ID NO: 60441 - DNA, 80 bp, synthetic construct
  source 1..80: mol_type = other DNA
cattaagcaccgggaatgctgtctgtaaagtcatggcatcttcagtgtactttctttcagcttgcattttcgaagatgca

SEQ ID NO: 60442 - DNA, 80 bp, synthetic construct
  source 1..80: mol_type = other DNA
ggatcacaagagtacaaggttgtcaataatgacaaatacagtctgatgcaaaagatcatagcttttgatcagatcggctg

SEQ ID NO: 60443 - DNA, 80 bp, synthetic construct
  source 1..80: mol_type = other DNA
caacgatgaaattagccaagaggacttgttgtttttgttccctaatctggcagaatttgaggctttcgattcaatcatct

SEQ ID NO: 60444 - DNA, 80 bp, synthetic construct
  source 1..80: mol_type = other DNA
atgataaggggaggtttaatgttatcccaagagcaagccagagggaagcaacccagactcggattgttgtttttgaacac

SEQ ID NO: 60445 - DNA, 80 bp, synthetic construct
  source 1..80: mol_type = other DNA
cactcttcagccagagttgctccagagaaactagtgagtgacaagtggtttggcactagaaagagcaaaataggatctcc

SEQ ID NO: 60446 - DNA, 80 bp, synthetic construct
  source 1..80: mol_type = other DNA
tgggttcaggcaagagtgggatagactcaaggccatcgtccgctggcttagagatactccagaagaaactcttgattcat

SEQ ID NO: 60447 - DNA, 80 bp, synthetic construct
  source 1..80: mol_type = other DNA
caccattctctaaccacatccagattcgcaacttctttgccaggatggagggtaggccaagggtcatcaaagtcactggc

SEQ ID NO: 60448 - DNA, 80 bp, synthetic construct
  source 1..80: mol_type = other DNA
aacaggtctgctataaagcctatctctctatacataattgctgtgcattttaatggagtgatctcaaacctcgacctgtc

SEQ ID NO: 60449 - DNA, 80 bp, synthetic construct
  source 1..80: mol_type = other DNA
gcacctgtaaaaagagatcttggcatgagcaagattgccatggctataagggataatttctgtaagactggattcttaca

SEQ ID NO: 60450 - DNA, 80 bp, synthetic construct
  source 1..80: mol_type = other DNA
agggctggaagacgaagttggccacagcagggccatgcaagtagagaaaataaagcattacctgttttcagtacttatgg

SEQ ID NO: 60451 - DNA, 80 bp, synthetic construct
  source 1..80: mol_type = other DNA
gcccatactccgaagaggccaagctagaatatgtggtcaagattctgaaggaggagccacaagtcattcttaattacaat

SEQ ID NO: 60452 - DNA, 80 bp, synthetic construct
  source 1..80: mol_type = other DNA
gacaagaggtcaagagccaacatcatcagcttgctgcaaaggtttattaaaagtgaaataggcatagcaacactcataga

SEQ ID NO: 60453 - DNA, 80 bp, synthetic construct
  source 1..80: mol_type = other DNA
agatatgaaggcaggggtctttggcgcatttgtgaaggcacagcagtttaaccagtcctcagtcaataataagtattatg

SEQ ID NO: 60454 - DNA, 80 bp, synthetic construct
  source 1..80: mol_type = other DNA
gaagaggtatctggaagggtgtgatggatggctaccaagttcagatagatattgatgggaaggaggggatgccatctcat

SEQ ID NO: 60455 - DNA, 80 bp, synthetic construct
  source 1..80: mol_type = other DNA
ttgtctggaatcaccatctcaaattgctctaaaccatggatcctgacccagagtttgaaggcatggtgtgaggacatgca

SEQ ID NO: 60456 - DNA, 80 bp, synthetic construct
  source 1..80: mol_type = other DNA
ggtatataacaacacggatgtctccaaggccaacccaaaggccaattactggatgtatggtttcaagatgtatgggtctt

SEQ ID NO: 60457 - DNA, 80 bp, synthetic construct
  source 1..80: mol_type = other DNA
catatccatatgggtgcccaatatatcttgtccgccatgacatcacaaatctaggcttgctccatgatgatgacatagat

SEQ ID NO: 60458 - DNA, 80 bp, synthetic construct
  source 1..80: mol_type = other DNA
attaaggtgaggagaaacacaatcaacctatttgtgagaagcaaagataaaagaccaagagatctgcatatcttatcgta

SEQ ID NO: 60459 - DNA, 80 bp, synthetic construct
  source 1..80: mol_type = other DNA
agacgaagaagtcaacgaaatagtattcagattcagactggcaagggacatctttgaggaattgagagaaattaatccag

SEQ ID NO: 60460 - DNA, 80 bp, synthetic construct
  source 1..80: mol_type = other DNA
cactccttcagattcagatataagttctgttagttcaaagcacataatggaggatgaatattttgtgtacaagggagcct

SEQ ID NO: 60461 - DNA, 80 bp, synthetic construct
  source 1..80: mol_type = other DNA
tttctgtagaaccaaccagatcatggatgttatgccagcccttgccgtggagctttgtcagacctgtactgcaggttgcg

SEQ ID NO: 60462 - DNA, 80 bp, synthetic construct
  source 1..80: mol_type = other DNA
acagggagtaggaggagccccaggcaactggatcttgaaaggctgagagagataatcagactttgcactgagtcctcaat

SEQ ID NO: 60463 - DNA, 80 bp, synthetic construct
  source 1..80: mol_type = other DNA
tagaaataaggttgggactgtgtatggtcagaatagacctgagaagttcattgaagcagagcctattgacatgagtgaaa

SEQ ID NO: 60464 - DNA, 80 bp, synthetic construct
  source 1..80: mol_type = other DNA
tgtttgacatgatgttggacgagggaatggacgatgcctttgaggagctggctgactacttaactgtggaagaggatcct

SEQ ID NO: 60465 - DNA, 80 bp, synthetic construct
  source 1..80: mol_type = other DNA
gattatatggatgaagtcagctttgatgatgatagtctcaatctctttggaccagcacactacaaggagttacagagtct

SEQ ID NO: 60466 - DNA, 80 bp, synthetic construct
  source 1..80: mol_type = other DNA
cacagtgttggcacaccctttaatggacgactttgtgacaaggttggtgggtaaaatgggtaggccacagatcaggagat

SEQ ID NO: 60467 - DNA, 80 bp, synthetic construct
  source 1..80: mol_type = other DNA
tgctagaaaagaatgtcacaaccagagatttgagagaactatcagagctgttattcatggccctagacagagacccatct

SEQ ID NO: 60468 - DNA, 80 bp, synthetic construct
  source 1..80: mol_type = other DNA
caaataagagaggaattgattcttggagacagtccaactgaggttcctgatgaccttcttggctaactgctttaagaatt

SEQ ID NO: 60469 - DNA, 80 bp, synthetic construct
  source 1..80: mol_type = other DNA
tcctgatgaccttcttggctaactgctttaagaattggaagaactgagggagagaataggtgtggggggtgttcctttgt

SEQ ID NO: 60470 - DNA, 80 bp, synthetic construct
  source 1..80: mol_type = other DNA
ggaagaactgagggagagaataggtgtgggtggtgttcctttgttatatctataagttatttaagaattgggcggtcttt

SEQ ID NO: 60471 - DNA, 80 bp, synthetic construct
  source 1..80: mol_type = other DNA
ctctatttgactcagatgagactattagtagactagaaagagaggttaacagtgtcatgtctgccatacagattgattgg

SEQ ID NO: 60472 - DNA, 80 bp, synthetic construct
  source 1..80: mol_type = other DNA
gacaccaccgagaagaaattcccgagctttaggagggagctctttgagaacttcaggagtaaggaagttgatgatgagta

SEQ ID NO: 60473 - DNA, 80 bp, synthetic construct
  source 1..80: mol_type = other DNA
gaggtatgaatcatcaatctatgacacaccaataccagcctatgtgatcaagcatagctcagatggtgtcaccatagata

SEQ ID NO: 60474 - DNA, 80 bp, synthetic construct
  source 1..80: mol_type = other DNA
tatctccaagatcatcaaaagatgtactgatgaagccctgagggggattgagagagatagtctctacactgaggacatca

SEQ ID NO: 60475 - DNA, 80 bp, synthetic construct
  source 1..80: mol_type = other DNA
ccaataaagagagatttgagctaaactcaaagagagctgcttctgatataaagaacaagatggcagagatgatgagttat

SEQ ID NO: 60476 - DNA, 80 bp, synthetic construct
  source 1..80: mol_type = other DNA
gagttcttaagggacacagaggatcacaagtcgactgtacagtttcctccctgggtgacaaggacaggcccagctggtaa

SEQ ID NO: 60477 - DNA, 80 bp, synthetic construct
  source 1..80: mol_type = other DNA
aggacctagagccccttaaatctgtgaatgttgaaggttctcatcccatgtgtaagatctggaataaggtatgcacgaat

SEQ ID NO: 60478 - DNA, 80 bp, synthetic construct
  source 1..80: mol_type = other DNA
acatagcaacttctgagcttgctgatgggcaatctggatcaacgatccaaccttttgagagtgttcctgcacagaatctg

SEQ ID NO: 60479 - DNA, 80 bp, synthetic construct
  source 1..80: mol_type = other DNA
gattaagcccacaacatctaagggccacatatttgtctctcttgctgttaacaagaagtcactgtacggagagctgagca

SEQ ID NO: 60480 - DNA, 80 bp, synthetic construct
  source 1..80: mol_type = other DNA
agtctagtgtattcaagcagtctattgatgctggtgacctcctggtgaccgactttgtttctttcaagctcagtaagatc

SEQ ID NO: 60481 - DNA, 80 bp, synthetic construct
  source 1..80: mol_type = other DNA
agtttgtggatcaggcaagtgcagcaaagttctcagatgcttggtttatgatcaagttgtctctcttgaccatgctggaa

SEQ ID NO: 60482 - DNA, 80 bp, synthetic construct
  source 1..80: mol_type = other DNA
gataaagcgacaacagaagagctccagactatgcaaagatatgtgataatggaagggtttgtatcgctcccagaaatccc

SEQ ID NO: 60483 - DNA, 80 bp, synthetic construct
  source 1..80: mol_type = other DNA
accctgttcaaacatgacttcacttttggacatctggcagacactactgacaagaaatttgttgaagtctttggagttct

SEQ ID NO: 60484 - DNA, 80 bp, synthetic construct
  source 1..80: mol_type = other DNA
accttggagcggctggccactctcaaggccaccagcaactttgatagctcatggtacacctttaaagaggtgaaggacaa

SEQ ID NO: 60485 - DNA, 80 bp, synthetic construct
  source 1..80: mol_type = other DNA
gaactacacaagggataagcttctggttaagatgactaagtttgctcatagagggaagaccctggccatagaagtgtttg

SEQ ID NO: 60486 - DNA, 80 bp, synthetic construct
  source 1..80: mol_type = other DNA
tttacagagccataatgaactcaagtctaaagtcaatttactcgttcttcatgaaaagggtaaaaggagggtcacagaaa

SEQ ID NO: 60487 - DNA, 80 bp, synthetic construct
  source 1..80: mol_type = other DNA
acagatggtatcataagtgaatcatgcagtgttagccctggaggagctatagtcatgagctccaccctgaggtggaggtc

SEQ ID NO: 60488 - DNA, 80 bp, synthetic construct
  source 1..80: mol_type = other DNA
tcctttatagggcaccgcagactggaaccgagatcatgttaagaatagcagagaaggtgcatagccctggggtggtctcc

SEQ ID NO: 60489 - DNA, 80 bp, synthetic construct
  source 1..80: mol_type = other DNA
tcattgagcactggcaatgcagtatgcaaggtcatggcatcatcagtgtactttctgtcagcctgtatctttgaagatgc

SEQ ID NO: 60490 - DNA, 80 bp, synthetic construct
  source 1..80: mol_type = other DNA
ctggatttagacaagagtgggacaggctcaaggcaatcgtccgttggctaagagacacaccagaggagactcttgaagca

SEQ ID NO: 60491 - DNA, 80 bp, synthetic construct
  source 1..80: mol_type = other DNA
tcacctttctccaaccacatccagattcgcaacttctttgctaggatggaaggtaggccgagggtcattaaggtcactgg

SEQ ID NO: 60492 - DNA, 80 bp, synthetic construct
  source 1..80: mol_type = other DNA
ttacagtattagcacaccctctgatggatgattttgtaacaaggttggtaggcaagatgggtagacctcagattagaagg

SEQ ID NO: 60493 - DNA, 80 bp, synthetic construct
  source 1..80: mol_type = other DNA
ttactggaaaagaatgtgacgaccagagacctaagagaactatcagagctgttattcatggctcttgacaaagacccttc

SEQ ID NO: 60494 - DNA, 80 bp, synthetic construct
  source 1..80: mol_type = other DNA
cctgacgaccttcttggctaacaactttgacacttagagaaactaagaaggataaagggttaggggggtgttcctttgtt

SEQ ID NO: 60495 - DNA, 80 bp, synthetic construct
  source 1..80: mol_type = other DNA
tgacacttagagaaactaagaaggataaagggttaggggggtgttcctttgttatgtctataaattatttaagaattggg

SEQ ID NO: 60496 - DNA, 80 bp, synthetic construct
  source 1..80: mol_type = other DNA
aactaagaaggataaagggttaggggggtgttcctttgttatgtctataaattatttaagaattgggcggtctttgtgta

SEQ ID NO: 60497 - DNA, 80 bp, synthetic construct
  source 1..80: mol_type = other DNA
gaagaccacagagaagaaatttccaagcttcagaaaggagctatttgacaacttcagaagtagagaggttgatgaagaat

SEQ ID NO: 60498 - DNA, 80 bp, synthetic construct
  source 1..80: mol_type = other DNA
acatatccaagatcattaaggagtgcactgatgaagccttaaaggggattgagagagatagtctctacactgagaatata

SEQ ID NO: 60499 - DNA, 80 bp, synthetic construct
  source 1..80: mol_type = other DNA
accaacaaagagaggttcgaaatgaactcaaaaagggcaacttctgacataaagaacaagatggcagagatgatgagtta

SEQ ID NO: 60500 - DNA, 80 bp, synthetic construct
  source 1..80: mol_type = other DNA
tgagttcttaagagacacagaagatcataagtctactgtgcagttcccaccctgggtgacaagaactggcccctcaggga

SEQ ID NO: 60501 - DNA, 80 bp, synthetic construct
  source 1..80: mol_type = other DNA
ttcaccacaacaatgggtgatgccaattcagctgacctagctgcgaggaacaaaattgccaagtatgaaatagcttgcct

SEQ ID NO: 60502 - DNA, 80 bp, synthetic construct
  source 1..80: mol_type = other DNA
caacaggtccgccataaagccgatctctctgtacataattgctgtgcattttaatggggtggtatcaaatcttgatctat

SEQ ID NO: 60503 - DNA, 80 bp, synthetic construct
  source 1..80: mol_type = other DNA
ctaacatcatttgtggttccaattcttctgaaggctctatacatgctaacaacacgagggagacagactacaaaggacaa

SEQ ID NO: 60504 - DNA, 80 bp, synthetic construct
  source 1..80: mol_type = other DNA
gatttatggcactggctaaggactggagcgagcggatagagcaatggttgagtgaaccctgcaaacttcttcctgacaca

SEQ ID NO: 60505 - DNA, 80 bp, synthetic construct
  source 1..80: mol_type = other DNA
aataggtgtagggggtgttcctttgttatatctataagttatttaagaattgggcggtctttgtgtgatatctgtcagac

SEQ ID NO: 60506 - DNA, 80 bp, synthetic construct
  source 1..80: mol_type = other DNA
ttgtctgaagtattccctttggttcatgatggctcagatgaatttagaagctctttgctctagagtgctttcagagagag

SEQ ID NO: 60507 - DNA, 80 bp, synthetic construct
  source 1..80: mol_type = other DNA
tatcattacctaaaggttgatatctggacgctctcccagtagaagcctgcaaccatctttcccaaggattgttgaaaggg

SEQ ID NO: 60508 - DNA, 80 bp, synthetic construct
  source 1..80: mol_type = other DNA
agaattacaggaaaacatcaccgcacacgaacaacagctcgtgactgccagacagaagcttaaagatgcagaaaaagcag

SEQ ID NO: 60509 - DNA, 80 bp, synthetic construct
  source 1..80: mol_type = other DNA
taacacctggaaggttcaggactattgcatgtgggttattccctgcacaagtgaaagcccggaatatcattagtccagtc

SEQ ID NO: 60510 - DNA, 80 bp, synthetic construct
  source 1..80: mol_type = other DNA
atccatgtgggttctgatactagcatagtgctacaatattgggcggtctttgttttagtaccagtaccatgctgttttgg

SEQ ID NO: 60511 - DNA, 80 bp, synthetic construct
  source 1..80: mol_type = other DNA
atggataaatatagagaaattcacaataaactgaaggagttttctcctggtacattaactgcagtagagtgtatagatta

SEQ ID NO: 60512 - DNA, 80 bp, synthetic construct
  source 1..80: mol_type = other DNA
ggataggacccggtcttgtggataaggacaacctggatactatcttgattgatggtgactcacaatggggagtatcaaaa

SEQ ID NO: 60513 - DNA, 80 bp, synthetic construct
  source 1..80: mol_type = other DNA
caggatttgagtgggggaaaccaaatattccatgtattgtttataagaactgtgttctaagaacaagccttaggactaca

SEQ ID NO: 60514 - DNA, 80 bp, synthetic construct
  source 1..80: mol_type = other DNA
ctcctgctgcatattcattgattatgaaccgagcaaagatatcagtggatttgtttatgttcaatgacctactcaagcta

SEQ ID NO: 60515 - DNA, 80 bp, synthetic construct
  source 1..80: mol_type = other DNA
tgccctgaagatgtcattcctgactcattattttcatttaggcacactatggtattgttaagaaggttatttccacagga

SEQ ID NO: 60516 - DNA, 80 bp, synthetic construct
  source 1..80: mol_type = other DNA
ccgtaagcctaggaactttctgctaatacaatgttccttaattacatcctacaagcctgcaactactctttcagatcaga

SEQ ID NO: 60517 - DNA, 80 bp, synthetic construct
  source 1..80: mol_type = other DNA
acaaagaagccctaaaaatggataacatattgaaaaaacagatctatgagattgatggtttcttcaaacctgatcttgta

SEQ ID NO: 60518 - DNA, 80 bp, synthetic construct
  source 1..80: mol_type = other DNA
gattccttaaaattgcaagaaataagtggtgaacatccaatgatatcaatttggcacaaagtagtgcagagtgcaacaac

SEQ ID NO: 60519 - DNA, 80 bp, synthetic construct
  source 1..80: mol_type = other DNA
tgaggaaattgagagaatgtatgatgatcctgatgcagaacttcaatatgcactctcaggatctataggcagagctgaac

SEQ ID NO: 60520 - DNA, 80 bp, synthetic construct
  source 1..80: mol_type = other DNA
agaaaaataaataccatagagtcaaagtatctttaaatgaagaggaggtcatttatgccgccaccctaggaattggtggg

SEQ ID NO: 60521 - DNA, 80 bp, synthetic construct
  source 1..80: mol_type = other DNA
aaaaaactgagagataattttgcagttaaggctagtagagaaagaagtaagaagtgtttttctctgaaccatgatatttc

SEQ ID NO: 60522 - DNA, 80 bp, synthetic construct
  source 1..80: mol_type = other DNA
agttttggaggagttcgtaattaaggatcatagacatattttcattgtggatgaagatctctggtctcccttatcagaag

SEQ ID NO: 60523 - DNA, 80 bp, synthetic construct
  source 1..80: mol_type = other DNA
atagagaattgagaattgctgctcaggctattcaccagccatcactgactgccaaattaggggctaatgaattctctaaa

SEQ ID NO: 60524 - DNA, 80 bp, synthetic construct
  source 1..80: mol_type = other DNA
aatcattttgatctgatgagctcagccttcatgtcttggtgtcaatttgtatctatatctggtgctgagctgtcagcttc

SEQ ID NO: 60525 - DNA, 80 bp, synthetic construct
  source 1..80: mol_type = other DNA
tgatctgggatctatgaatccaggatcaaccattggatcaaccatttcctcaaagatttatgttaaagacaaggacctcc

SEQ ID NO: 60526 - DNA, 80 bp, synthetic construct
  source 1..80: mol_type = other DNA
agttaagcagcacgtaaaatgtaatcagtatgtgataaagagattaaaagattcacctgtgtatttactgattagaccca

SEQ ID NO: 60527 - DNA, 80 bp, synthetic construct
  source 1..80: mol_type = other DNA
catcatctaaaagtcacatctttgtctcattcgccatagagaagcaatatcacaaatttgatttagagagatcttcagtt

SEQ ID NO: 60528 - DNA, 80 bp, synthetic construct
  source 1..80: mol_type = other DNA
ttcaaaaactactatgatgctggatccatgtttataacagacttcgtctctttcaaattgagcaagattacaaatctttg

SEQ ID NO: 60529 - DNA, 80 bp, synthetic construct
  source 1..80: mol_type = other DNA
caagtgtcaacctttaatggagtctgctatagcctactgggtagaatcatttgggttcaatccgtgggaatctcaaagac

SEQ ID NO: 60530 - DNA, 80 bp, synthetic construct
  source 1..80: mol_type = other DNA
tgttaagctctgatagaagcggaggagtcagagaagcaacactaatggtaaaattgtcactgttaactttaatggaggat

SEQ ID NO: 60531 - DNA, 80 bp, synthetic construct
  source 1..80: mol_type = other DNA
aaggctgtcactgaggagttgcaaactgtacaacgatacattgttatggaaggctttgtgtctcagccagagatgccaaa

SEQ ID NO: 60532 - DNA, 80 bp, synthetic construct
  source 1..80: mol_type = other DNA
accgcataagatgttgtcaaagctgccaacagtgttaagaacagagcttcaggtgtacctcttctggagggtcatcaaaa

SEQ ID NO: 60533 - DNA, 80 bp, synthetic construct
  source 1..80: mol_type = other DNA
caatgcagaggattgctgagcatccatttataatttcgaagaagcagggtcagatatcatggactaatttgtttaatcca

SEQ ID NO: 60534 - DNA, 80 bp, synthetic construct
  source 1..80: mol_type = other DNA
ttatcaggaaacaatttgaagtctctacagcctttaattagtgcttgctacaatgggtattttaaaaataaggaagaaga

SEQ ID NO: 60535 - DNA, 80 bp, synthetic construct
  source 1..80: mol_type = other DNA
aactgagccatcatctctatctaagatgtataagaagatcatagaactcgaacatttatgtccaattgacaatgattatt

SEQ ID NO: 60536 - DNA, 80 bp, synthetic construct
  source 1..80: mol_type = other DNA
taaatttggttcatgatgtttcctttggacatttatccgctgacacagatgtaaagctgcacagcaaatttggaatcatc

SEQ ID NO: 60537 - DNA, 80 bp, synthetic construct
  source 1..80: mol_type = other DNA
taggataccaagatccagtggatcccaaaatgcatgaattcagcaggagctatctaaagcagtgcactactcatgcaaag

SEQ ID NO: 60538 - DNA, 80 bp, synthetic construct
  source 1..80: mol_type = other DNA
gcagttctaaggaaaatgtacggacacaatatcatggatcaaattgataatcaaataaccagagaagttgcttcgattac

SEQ ID NO: 60539 - DNA, 80 bp, synthetic construct
  source 1..80: mol_type = other DNA
actagaaaggctagccacactgaaagcttcaagcaattttaatgaatcctggtatcagtataaagatgttaaagaaaaac

SEQ ID NO: 60540 - DNA, 80 bp, synthetic construct
  source 1..80: mol_type = other DNA
agtattcaagagaaaaggccattgtgaaaatgtctgaatttgccaagaatggtaagacattggctatccagtgttttgaa

SEQ ID NO: 60541 - DNA, 80 bp, synthetic construct
  source 1..80: mol_type = other DNA
gagtgtatgagcaaaatagaaaatagagggtgtatgcatatctgcttattcaagaaacaacaacacggaggacttcgaga

SEQ ID NO: 60542 - DNA, 80 bp, synthetic construct
  source 1..80: mol_type = other DNA
gatatatgttatgggtgctgaggaaagaatagttcaatcaatagttgaagcaatagctaagagtattggaaaattctttc

SEQ ID NO: 60543 - DNA, 80 bp, synthetic construct
  source 1..80: mol_type = other DNA
catcagatactttatgtaacccgggcaataagatcaaaattcctgaatctcatggaacaagggctcgaaatcactgtaaa

SEQ ID NO: 60544 - DNA, 80 bp, synthetic construct
  source 1..80: mol_type = other DNA
tggtggccagtaataattagaggctgctccatgttcacaatgaaatacatgatgatgaaccttcaatacgttagcatact

SEQ ID NO: 60545 - DNA, 80 bp, synthetic construct
  source 1..80: mol_type = other DNA
agataaacacagagaactatacgttgaagatgcttttgtgaatgaacttttcaaggcatatcatggtgaagagaatcaag

SEQ ID NO: 60546 - DNA, 80 bp, synthetic construct
  source 1..80: mol_type = other DNA
ggagatggttatgataatctaagtccagatatgatcatggagcttccttcagggcggatagtcgttattgaatttaccac

SEQ ID NO: 60547 - DNA, 80 bp, synthetic construct
  source 1..80: mol_type = other DNA
aatggattgatccaggatctacgtacctaaaaacaaaaacaggcatgatgcagggaatactccattttacctcttcttta

SEQ ID NO: 60548 - DNA, 80 bp, synthetic construct
  source 1..80: mol_type = other DNA
cttcacacaatccaccaggagttcatcagatcattatcattcaaaatctttaatttgaaagtacatcctgaaatggccta

SEQ ID NO: 60549 - DNA, 80 bp, synthetic construct
  source 1..80: mol_type = other DNA
tagtatagtttgcgacatgatgcaaggatcagatgatagcagcatgatgatcagctttcctgccaaagatgatgttcact

SEQ ID NO: 60550 - DNA, 80 bp, synthetic construct
  source 1..80: mol_type = other DNA
tttcgaaatgcaagatggcagcagccctctgcttcagattaaaaaaatacttgggaatatatctggctatttatccatca

SEQ ID NO: 60551 - DNA, 80 bp, synthetic construct
  source 1..80: mol_type = other DNA
gagaaatccacatccaacactgacttcgtcatggagtacaactctgaattttactttcattctcagcacattagaccaac

SEQ ID NO: 60552 - DNA, 80 bp, synthetic construct
  source 1..80: mol_type = other DNA
gctgtagccttcctgaggttgaaacactggtcgccagacaggaggaagctactaatttaatgacagcagttacagaaggt

SEQ ID NO: 60553 - DNA, 80 bp, synthetic construct
  source 1..80: mol_type = other DNA
ggcggctctttttctctggctcactgcattcagcattcacagtgcacattacattacatgattatgggaatgggtttaag

SEQ ID NO: 60554 - DNA, 80 bp, synthetic construct
  source 1..80: mol_type = other DNA
ttccttatttcatgagtataagaaggcaatactgaaatggaaggatcctggactagggttcttcttattagacaaccctt

SEQ ID NO: 60555 - DNA, 80 bp, synthetic construct
  source 1..80: mol_type = other DNA
actgttcaggtctgggtggttttagatttaatctgtataaggccatttctcgcactgatctcaaacatttatattcttat

SEQ ID NO: 60556 - DNA, 80 bp, synthetic construct
  source 1..80: mol_type = other DNA
tttctgaagaaggtcagatcagatgaagaagaggaagggtttgcaagcaaatgtggagttagccctggtggagcaatcat

SEQ ID NO: 60557 - DNA, 80 bp, synthetic construct
  source 1..80: mol_type = other DNA
cttcagaggtggggagagagggtgcatgaatgcagcaaaagataagttttcaaagtatcagatagcatgtgagaacagaa

SEQ ID NO: 60558 - DNA, 80 bp, synthetic construct
  source 1..80: mol_type = other DNA
tcttagctcagctctaaaatggggatcaaaacaaaaatttataaagttgaggtccagattgaacataccagatgattggc

SEQ ID NO: 60559 - DNA, 80 bp, synthetic construct
  source 1..80: mol_type = other DNA
tagagatgatcaatgacaatccttcagttttgtacagagcaccacggactggagaagaaataattttaaggatagctgaa

SEQ ID NO: 60560 - DNA, 80 bp, synthetic construct
  source 1..80: mol_type = other DNA
aaagtgcacagcccaggagttgtttcatctctctctacaggtaatgctgtggctaaagtgatggcctcatcagtgtactt

SEQ ID NO: 60561 - DNA, 80 bp, synthetic construct
  source 1..80: mol_type = other DNA
cttatcagccagtatatttcaagattcaggacgacaggaattttctatcattgagaacagtaagtatagccttttgcaaa

SEQ ID NO: 60562 - DNA, 80 bp, synthetic construct
  source 1..80: mol_type = other DNA
agatggtgaaatatgagtcttttttgtctgactctccattaagagatgatgagctgctttttctgttcccaaatgttgat

SEQ ID NO: 60563 - DNA, 80 bp, synthetic construct
  source 1..80: mol_type = other DNA
gaactgatagttctcgaccaattagtttatgatagaggagaaattgacattgcgtacaggatgaaccacagagagaacac

SEQ ID NO: 60564 - DNA, 80 bp, synthetic construct
  source 1..80: mol_type = other DNA
gcaaacaagagttacagtgtttgaggggcaccaaactttaagaattgcagctgagaacttggtctctgacaaatggtttg

SEQ ID NO: 60565 - DNA, 80 bp, synthetic construct
  source 1..80: mol_type = other DNA
gtacaatgaagagtaagataggaactacagcatttgaacaagagtggcagagactcaagactataattcaatggctaaga

SEQ ID NO: 60566 - DNA, 80 bp, synthetic construct
  source 1..80: mol_type = other DNA
gatgatgctgagtcaacgcttgaatctagtcctctttccagccatgttcaaatcagaaacttctttgcaagaatggaaaa

SEQ ID NO: 60567 - DNA, 80 bp, synthetic construct
  source 1..80: mol_type = other DNA
caagccaaggactgtcagggtcacaggagctccagttaagaaacgatcaggatctagtaaactgtcaatggtcattagag

SEQ ID NO: 60568 - DNA, 80 bp, synthetic construct
  source 1..80: mol_type = other DNA
gtcaaacttgctccatatcactgtatgtgatagcagttcatagagatggactttggtctaatctaaatctgtctgaagaa

SEQ ID NO: 60569 - DNA, 80 bp, synthetic construct
  source 1..80: mol_type = other DNA
ataatttctgtaaaactggatacttaagagagttccaagatagcagagcttttaacaggagcaacatgatagagataatg

SEQ ID NO: 60570 - DNA, 80 bp, synthetic construct
  source 1..80: mol_type = other DNA
aagcattttcttttctgtgtacttcaaggaccgtataccaatgacatcaagcttgacctagtggaaaagattctttatat

SEQ ID NO: 60571 - DNA, 80 bp, synthetic construct
  source 1..80: mol_type = other DNA
ctcagaacctattggaaccagagagtcagatggtaagtcaagatcaaacatactgtctataatgcagaactttgtgaatt

SEQ ID NO: 60572 - DNA, 80 bp, synthetic construct
  source 1..80: mol_type = other DNA
cagattgcaacattatccgtcaagtagaagatctaggtgcaggaacaataggtggattcctaattccacagaagacagca

SEQ ID NO: 60573 - DNA, 80 bp, synthetic construct
  source 1..80: mol_type = other DNA
agtattgatggaaacattcattattatggcaaaggaatatggagaggtgtcatggatggttctcaagtgcagattgagat

SEQ ID NO: 60574 - DNA, 80 bp, synthetic construct
  source 1..80: mol_type = other DNA
tttcaacaaaactgggtttcctccccaaatagtggagataacatttgacggtaaagcaggtgtgtgggatttagctaaga

SEQ ID NO: 60575 - DNA, 80 bp, synthetic construct
  source 1..80: mol_type = other DNA
gcattaggatttgggccgaagatattggagcaaaaaatgatcaagatatgtcaaagtcatgcaagcgaaatccgaaattc

SEQ ID NO: 60576 - DNA, 80 bp, synthetic construct
  source 1..80: mol_type = other DNA
tggatgcactcattcaaggcatatacttcagagaagccttttggatgtccagtaattttgaccaaccagaagatggttga

SEQ ID NO: 60577 - DNA, 80 bp, synthetic construct
  source 1..80: mol_type = other DNA
cttcagactacgaagtgatgaagaaataatgatgaaggttagaagatctaccatgaatttgtatgttaaaaattcaggaa

SEQ ID NO: 60578 - DNA, 80 bp, synthetic construct
  source 1..80: mol_type = other DNA
gagatgttcacatcatgtcgtacactgctcatgataatgatcttagtcctagttgcttaaggcaacgtaacgaagctcta

SEQ ID NO: 60579 - DNA, 80 bp, synthetic construct
  source 1..80: mol_type = other DNA
gaggtaaatgagatagtattcagattcagaatgtctttggcaatccatgaagagataaggaagctgtgtcctgagatcac

SEQ ID NO: 60580 - DNA, 80 bp, synthetic construct
  source 1..80: mol_type = other DNA
gatgagttaaaattgttgtttcaaaaggagccaagtgcttcatgggcatcttgtcagtcgctcccatatgctttcataca

SEQ ID NO: 60581 - DNA, 80 bp, synthetic construct
  source 1..80: mol_type = other DNA
taagatcttagatttaagtgaaggagttattagtagacccacgattgattctgaaagactttctaaaattatccagatct

SEQ ID NO: 60582 - DNA, 80 bp, synthetic construct
  source 1..80: mol_type = other DNA
gtaccgagaattcattgagatccaaagtagggacagtctactcggctttgcccactcataatgaggcatgctcaagcgtg

SEQ ID NO: 60583 - DNA, 80 bp, synthetic construct
  source 1..80: mol_type = other DNA
gatgtagatacactgatagacctgatgattgaagacatgagcaagaataattttgaggaagcagtacaaatgatgagaga

SEQ ID NO: 60584 - DNA, 80 bp, synthetic construct
  source 1..80: mol_type = other DNA
agaggctaatattgagtatgacatggatgaatttgatgtatctgatattgatctgtttggtccggcacactataaagaaa

SEQ ID NO: 60585 - DNA, 80 bp, synthetic construct
  source 1..80: mol_type = other DNA
cttctgatttgaccatggtttctcatcctttgatggatgactttataaacacactgatctcaaaatgctcaagaagagaa

SEQ ID NO: 60586 - DNA, 80 bp, synthetic construct
  source 1..80: mol_type = other DNA
attaggaggtgtttagaaaccaatcattgtcagcagagattcatcaatcaatttaaagatttatacagagctcttaatag

SEQ ID NO: 60587 - DNA, 80 bp, synthetic construct
  source 1..80: mol_type = other DNA
aaatccagaagatgtggtgtccgacgatatgttttcagacagcagctctgagctggaggatgacatgctagggtagtcca

SEQ ID NO: 60588 - DNA, 80 bp, synthetic construct
  source 1..80: mol_type = other DNA
atgaaattgtggagcaaagtgagaacataaactcataaataaataaagtgcagtcaagagcgaaaagaaataaaaatgag

SEQ ID NO: 60589 - DNA, 80 bp, synthetic construct
  source 1..80: mol_type = other DNA
atgagattataagaacagtaacattaataatgtttgaaacttagattaacaatttagtaaatatagggcggtctttgtgt

SEQ ID NO: 60590 - DNA, 80 bp, synthetic construct
  source 1..80: mol_type = other DNA
agatgatgactctgatctttccaaaattgaaagagaattaattggcactttaagtatgatcgatttaaactgggatgtca

SEQ ID NO: 60591 - DNA, 80 bp, synthetic construct
  source 1..80: mol_type = other DNA
cagaagataaatttcctcatttcaaagaggaattattcattaatttcaggagagaaccaattgatgaggattatattggc

SEQ ID NO: 60592 - DNA, 80 bp, synthetic construct
  source 1..80: mol_type = other DNA
cattatgatcataatctctttgctgttgatataccagaatttgttgttgacagagaagtcggaagagtgtgtattgacat

SEQ ID NO: 60593 - DNA, 80 bp, synthetic construct
  source 1..80: mol_type = other DNA
aagataatatcagacagtctgcagaaagctcaagatggaatcattaaagattcattcttccaaaatggtctctcacttga

SEQ ID NO: 60594 - DNA, 80 bp, synthetic construct
  source 1..80: mol_type = other DNA
agatagaaaatttctaaatgtctctgagtgcgatcttcaagtaaagagatttctagagaattttgacagaactgatgaga

SEQ ID NO: 60595 - DNA, 80 bp, synthetic construct
  source 1..80: mol_type = other DNA
tgagagatgtctttgattctaagtcaacgattcaatttccgccttgggtcttttctaatggggatgaagggaaaagtctc

SEQ ID NO: 60596 - DNA, 80 bp, synthetic construct
  source 1..80: mol_type = other DNA
tagcatagtgctacaatattgggcggtctttgcgcccaatcatggattctatattatcaaaacagctggttgacaagact

SEQ ID NO: 60597 - DNA, 80 bp, synthetic construct
  source 1..80: mol_type = other DNA
gggcttccctcaggcatgccattcaccagtgttgtcaattcactcaatcacatgacatacttcgcagctgcagtgttgaa

SEQ ID NO: 60598 - DNA, 80 bp, synthetic construct
  source 1..80: mol_type = other DNA
aaactgtcttagcaaacctcagtgcctttggtctgcggcccaccgcagctgacaaaacagacaaaatagctcccacccac

SEQ ID NO: 60599 - DNA, 80 bp, synthetic construct
  source 1..80: mol_type = other DNA
acaccagtcttcttgaagcggactctcacctgcacaccaagggggatccgcggcttgctcgacatcacatcaattaagcg

SEQ ID NO: 60600 - DNA, 80 bp, synthetic construct
  source 1..80: mol_type = other DNA
gcaatttttctggatcaaagcaaaccgcactacagacataacatccccccctgcctatgatagggaggcccgcagtgtcc

SEQ ID NO: 60601 - DNA, 80 bp, synthetic construct
  source 1..80: mol_type = other DNA
aacttgaaaatgctctcgcctatgcttcacaacatggtcatgcagtgttcgaggaggttgctgatattgcaaagaaaaca

SEQ ID NO: 60602 - DNA, 80 bp, synthetic construct
  source 1..80: mol_type = other DNA
gcacagtctgaaggtttggttctcacaaatgtgaattacgaccaggctctcgctacctacgaagcgtggttcataggtgg

SEQ ID NO: 60603 - DNA, 80 bp, synthetic construct
  source 1..80: mol_type = other DNA
agcttacgagcagcatggagcaccctacaccggcaacgtgttccaggtcgagactgtccatacttatggtgatgactgca

SEQ ID NO: 60604 - DNA, 80 bp, synthetic construct
  source 1..80: mol_type = other DNA
ggcttaccttcgggaatgccatttacatcagttgtcaactcactcaaccatatgatatacattgctgcagcggtcctaca

SEQ ID NO: 60605 - DNA, 80 bp, synthetic construct
  source 1..80: mol_type = other DNA
tcgccacctacaacgcatggttcataggtggtacagtgcctgacccagaacgccccactgaaggcgcgtccaaaatagtg

SEQ ID NO: 60606 - DNA, 80 bp, synthetic construct
  source 1..80: mol_type = other DNA
cgtacactaccaacatgtatgtgttatcataaagtcgtgagtgcgacttggcacgccctagtcgcacaagttcgccaaag

SEQ ID NO: 60607 - DNA, 80 bp, synthetic construct
  source 1..80: mol_type = other DNA
gaagctgcacttctgcaagtcgccactccagtgtgagacgaaccaacactgcttacgcaccaacagtcggtgtggcaact

SEQ ID NO: 60608 - DNA, 80 bp, synthetic construct
  source 1..80: mol_type = other DNA
ttgcgagatcgtgctcgagcatgggcgtcagatgcacctacgcaatattgcaaacccacatgcatgtcgaggagcgttct

SEQ ID NO: 60609 - DNA, 80 bp, synthetic construct
  source 1..80: mol_type = other DNA
tgcgtgcgacgtactacttagcacactgagccgactcgtgatcacacactcatacaacacacagacacaacctttctcgg

SEQ ID NO: 60610 - DNA, 80 bp, synthetic construct
  source 1..80: mol_type = other DNA
ctgctgttcagaacccgggtgtcttccccccaagcggcgttcattgacgcttcgcacaaccgaccccttatctattcaac

SEQ ID NO: 60611 - DNA, 80 bp, synthetic construct
  source 1..80: mol_type = other DNA
tgcgcaccacagccaggagtcgatcgtaaacatgtgtgtgtgctacccacacctatggagcacgcagtctacgagcaaac

SEQ ID NO: 60612 - DNA, 80 bp, synthetic construct
  source 1..80: mol_type = other DNA
cctcagcttcccgagtagctgggattacaggcgcccaatcatggattctatattatcaaaacagctggttgacaaaactg

SEQ ID NO: 60613 - DNA, 80 bp, synthetic construct
  source 1..80: mol_type = other DNA
ccatgtgggttctgatactagcatagtgctacaatattgggcggtctttgtttgttggtcttagcctagcatgtcatccg

SEQ ID NO: 60614 - DNA, 80 bp, synthetic construct
  source 1..80: mol_type = other DNA
attctcttttttcatttaggcatactatagttctcttacgtagactttttcctcaggattctgtctcaactttctactaa

SEQ ID NO: 60615 - DNA, 80 bp, synthetic construct
  source 1..80: mol_type = other DNA
atggagaaatatagagaaatacacagggatctgaaggagtttactattaattcattgacagccgtggaatgcatggatta

SEQ ID NO: 60616 - DNA, 80 bp, synthetic construct
  source 1..80: mol_type = other DNA
aaaatattaaggaaccaggtacatttaaattaacatcaaacatgatgcggcctgagtcaaaaatcatgctggacatgcta

SEQ ID NO: 60617 - DNA, 80 bp, synthetic construct
  source 1..80: mol_type = other DNA
aacctagagaaaatttgggcaagttaatagaaagtttaaacatcagtagtcatattgtacagtcagattgtgtcagtctc

SEQ ID NO: 60618 - DNA, 80 bp, synthetic construct
  source 1..80: mol_type = other DNA
tatggggtatctcaaaagttatgagtctagatctgaacaggttgcttgctttgaatatagcttttgagaaatcactactt

SEQ ID NO: 60619 - DNA, 80 bp, synthetic construct
  source 1..80: mol_type = other DNA
caccaaaaacaaatgagttacatcctggggctcttcaaattcttaatggatctttctggtgagacatttcagcatgaaag

SEQ ID NO: 60620 - DNA, 80 bp, synthetic construct
  source 1..80: mol_type = other DNA
tccataggggagaattacaaaacccttataaaattacatttaaagtagttgcagtccggacggatggatcaaatatttca

SEQ ID NO: 60621 - DNA, 80 bp, synthetic construct
  source 1..80: mol_type = other DNA
ggggtaaacctaatattccctgtattgtatacaaaaactgtgcattgaggacaggtttgaggacaaaccaggctatcaac

SEQ ID NO: 60622 - DNA, 80 bp, synthetic construct
  source 1..80: mol_type = other DNA
gaataaagctatacctgaatccaatcatttcatcaggactgctagagaacttcatgaaaaatatacctgctgctattccc

SEQ ID NO: 60623 - DNA, 80 bp, synthetic construct
  source 1..80: mol_type = other DNA
tgtcaaggggattgtctattgagaaggtatacaatcccgtcaacatcatactaatgactagatatatatcaaaaaacttt

SEQ ID NO: 60624 - DNA, 80 bp, synthetic construct
  source 1..80: mol_type = other DNA
atttaactgagcttgagagtgttgttaagggatggggtgaatctgttgtggatcagtttgactcccttgacttggaggcc

SEQ ID NO: 60625 - DNA, 80 bp, synthetic construct
  source 1..80: mol_type = other DNA
attctttgttttcttttaggcacactatggtattattacgacggctatttccacaggattcagtttctactttctattaa

SEQ ID NO: 60626 - DNA, 80 bp, synthetic construct
  source 1..80: mol_type = other DNA
tattaactgaccaagatgtcacttggggagtttcaaaagtcatgagcattgacctaaatagactgctagcactcaatatt

SEQ ID NO: 60627 - DNA, 80 bp, synthetic construct
  source 1..80: mol_type = other DNA
ggggaaaacccaatatcccatgtattgtgtacaagaattgtgcattgcgcacaggactcaggacaaatcagactgttaat

SEQ ID NO: 60628 - DNA, 80 bp, synthetic construct
  source 1..80: mol_type = other DNA
gtgtgagcctaatcaccaaaatactttctgaccttgagcttaatattagtgagccaacaagccacggatgctttactacg

SEQ ID NO: 60629 - DNA, 80 bp, synthetic construct
  source 1..80: mol_type = other DNA
tcaggaacgtttataaaacagatttttatatgtctagaaagttgagggcatatatagacaacatgaatgggcatgaacct

SEQ ID NO: 60630 - DNA, 80 bp, synthetic construct
  source 1..80: mol_type = other DNA
acatccctgattatcgaggaattgcactaattcatccaaacattaatgacttagttgtatacatgaaaagctggctgtcg

SEQ ID NO: 60631 - DNA, 80 bp, synthetic construct
  source 1..80: mol_type = other DNA
aagagtcataaattttcatttcatgaagtaaagggacctgctgtgtttgattgtttcaatgaaaatgagcttgaacatgc

SEQ ID NO: 60632 - DNA, 80 bp, synthetic construct
  source 1..80: mol_type = other DNA
atggagaaatacagagaaattcacagggatttgcaatcctttccagttgggtcattaacagcagtggaatgtatagatta

SEQ ID NO: 60633 - DNA, 80 bp, synthetic construct
  source 1..80: mol_type = other DNA
attctctgttttcatttagacacaccatagtcctcttgcgtagacttttcccccaggattctgtctcaactttctactaa

SEQ ID NO: 60634 - DNA, 80 bp, synthetic construct
  source 1..80: mol_type = other DNA
tgtaaagtaccctatttcaaggcacccaagaaactttttattaatacagtgttcactgttatcttcatatagtccggcta

SEQ ID NO: 60635 - DNA, 80 bp, synthetic construct
  source 1..80: mol_type = other DNA
cgatcctctctgatcaagttgatagcagaagagcatgtaattttgtgttgaatttaatccctgaaacaccaacctcattc

SEQ ID NO: 60636 - DNA, 80 bp, synthetic construct
  source 1..80: mol_type = other DNA
atggaaaaatacagagaaattcacagggatctacaatcttttccagttgggtcactgacagcagtagagtgtatagacta

SEQ ID NO: 60637 - DNA, 80 bp, synthetic construct
  source 1..80: mol_type = other DNA
cagggatctgaaggagtttactattaactcattaacagccgtggaatgcatggattacctggataggctttatgctgttc

SEQ ID NO: 60638 - DNA, 80 bp, synthetic construct
  source 1..80: mol_type = other DNA
agtctgcttgttgcattggctcaaaataataaggctagattttattcaaaagttaaacttcttggattgactgtcgacca

SEQ ID NO: 60639 - DNA, 80 bp, synthetic construct
  source 1..80: mol_type = other DNA
tacctctccagctaggattttctacaggtgttaacttagtagctgtaccgactggttatgttgacactgaaaataaccta

SEQ ID NO: 60640 - DNA, 80 bp, synthetic construct
  source 1..80: mol_type = other DNA
gcgctacagtgatgtctctcagtattgacgtgacgagtcttccttctatttcttctagtatatataaaaatgaatcatct

SEQ ID NO: 60641 - DNA, 80 bp, synthetic construct
  source 1..80: mol_type = other DNA
atgaatgcaaacttagattcatcaatatctatatcaactaattcaaagaaggagaaatccaaaaatggcaatgaaagtag

SEQ ID NO: 60642 - DNA, 80 bp, synthetic construct
  source 1..80: mol_type = other DNA
agaatgaaacaagttgcaatgcaattgatcgaagatttgtaggtctaacctgagaggtcactagggagctccccactccc

SEQ ID NO: 60643 - DNA, 80 bp, synthetic construct
  source 1..80: mol_type = other DNA
ttagaaaaatggaaaagtatagagagattcatcagagagttagggatcttgcacctggaacggtatcagcattagaatgc

SEQ ID NO: 60644 - DNA, 80 bp, synthetic construct
  source 1..80: mol_type = other DNA
cctgattcattatcctctttcaggcatgttgatgtcttgctacgaaggttgttcccgcgtgaccctgtatcaacattcta

SEQ ID NO: 60645 - DNA, 80 bp, synthetic construct
  source 1..80: mol_type = other DNA
ctctgggtcgctcaaccgctcatcaacccgtttcagactggatccatctccacgtgttggttgacatttgagactagacc

SEQ ID NO: 60646 - DNA, 80 bp, synthetic construct
  source 1..80: mol_type = other DNA
cagtaaattggggacacggagaaataagtgactcgactactgtagaacctgtgttagatggtccataccaaccagttgca

SEQ ID NO: 60647 - DNA, 80 bp, synthetic construct
  source 1..80: mol_type = other DNA
tgtatgggtagctatcatatctattgaaccaaatgttaattcagagagcagacaatactctctatttggagtaaacaagc

SEQ ID NO: 60648 - DNA, 80 bp, synthetic construct
  source 1..80: mol_type = other DNA
aaattaccgtagttaatacctcaaataaatggaagttcatggaaatgtttagaaataataataatgccgaattccagcat

SEQ ID NO: 60649 - DNA, 80 bp, synthetic construct
  source 1..80: mol_type = other DNA
aagcgtacgttaacttcgagtacaaaactagtcggcattctgaagcatggcgggagattatggacatatcatggtgaaac

SEQ ID NO: 60650 - DNA, 80 bp, synthetic construct
  source 1..80: mol_type = other DNA
accaaacgctaccaccgattattcaacaacgtcaaatctaaatgaaattagtattacaacatatgctgaattttatatta

SEQ ID NO: 60651 - DNA, 80 bp, synthetic construct
  source 1..80: mol_type = other DNA
taccacgatctcaagaatctaagtgtactgaatacattaacactggattaccaccaatacaaaatactagaaatgtcgta

SEQ ID NO: 60652 - DNA, 80 bp, synthetic construct
  source 1..80: mol_type = other DNA
cattaacttcaagaacagttatacataagagagcacaagttaatgaggatatcgtaatttcgaaagcttcattatggaaa

SEQ ID NO: 60653 - DNA, 80 bp, synthetic construct
  source 1..80: mol_type = other DNA
tttaaacctccgaatgattattggatattagttaactcaaattctaatggtgtagtgcttgagggtactaataatacaga

SEQ ID NO: 60654 - DNA, 80 bp, synthetic construct
  source 1..80: mol_type = other DNA
tattagagttatgggcatttaaatgttcatttattgcttgtgctgactgctcgtctacaccaccagacagatggtggatt

SEQ ID NO: 60655 - DNA, 80 bp, synthetic construct
  source 1..80: mol_type = other DNA
gaatatatgggacagccccaggaatggtcaataacccaactgcttacctcaaagtagacagcaatctaatccccatcccg

SEQ ID NO: 60656 - DNA, 80 bp, synthetic construct
  source 1..80: mol_type = other DNA
aattacatggttaaagtacttaatgtttgaaaataagactttagaacaatggattgattctttctgctcaaggggggtat

SEQ ID NO: 60657 - DNA, 80 bp, synthetic construct
  source 1..80: mol_type = other DNA
ttgtgagagaacatttaattaaaaatgaaaaaagaggagctctcgaggcaatgttcaatctaaaattccatgttactggc

SEQ ID NO: 60658 - DNA, 80 bp, synthetic construct
  source 1..80: mol_type = other DNA
ccgaaagtaaggacatttgacattccaaattacagaccacagcctttatgtcaacctacattggaaagcctggtagacta

SEQ ID NO: 60659 - DNA, 80 bp, synthetic construct
  source 1..80: mol_type = other DNA
ttgtaagaattggcttgagacagatcatgcttttgcttttaaggaagtaacaggacaacgtgtcttcaatgtatttaggg

SEQ ID NO: 60660 - DNA, 80 bp, synthetic construct
  source 1..80: mol_type = other DNA
gaaaagagaaaaatcccagggagtcctagtggccaaatattaagatcatttttcaagatgactcatgataatttcaagat

SEQ ID NO: 60661 - DNA, 80 bp, synthetic construct
  source 1..80: mol_type = other DNA
tcaagaaaaagaaagtatattaggtagttatataatggaagagggttatcatatccaggatgtattaaacaaccaagtaa

SEQ ID NO: 60662 - DNA, 80 bp, synthetic construct
  source 1..80: mol_type = other DNA
caacagtcttagaattatatgaacaaaccaaaaagcagaaagctcaggcaaggattgtgaggaagtatcagcgaactgaa

SEQ ID NO: 60663 - DNA, 80 bp, synthetic construct
  source 1..80: mol_type = other DNA
attatttggggctgcaatatcgctactatttaaacgtgtgtggtctaagctatatccagaattagaatgtttcttcgaat

SEQ ID NO: 60664 - DNA, 80 bp, synthetic construct
  source 1..80: mol_type = other DNA
tcaagattttattagggtctctatcagatctccctggtttaggatattttgatgatttagctgcagcacagagccggtgt

SEQ ID NO: 60665 - DNA, 80 bp, synthetic construct
  source 1..80: mol_type = other DNA
tatgggacagcccctggaatggtgaataatcctactgcatatttaaaagtagaaagcaatctgatccccatcccgttggg

SEQ ID NO: 60666 - DNA, 80 bp, synthetic construct
  source 1..80: mol_type = other DNA
tgtctcttgtcaaaaccataaaagtaaagccaaaaaaagaagtattgaaagcagtatccttatatggaaaaaaagaaaaa

SEQ ID NO: 60667 - DNA, 80 bp, synthetic construct
  source 1..80: mol_type = other DNA
gctggggatttaactcacttagcagcaatgagattatgcattgaagtatggagatggtgcaaagcaaatgaacaagattc

SEQ ID NO: 60668 - DNA, 80 bp, synthetic construct
  source 1..80: mol_type = other DNA
ttaaagtacttaatgtttgaaaataagactttagaacaatggattgattctttctgctcaaggggggtattacctgttga

SEQ ID NO: 60669 - DNA, 80 bp, synthetic construct
  source 1..80: mol_type = other DNA
gactttagaacaatggattgattctttctgctcaaggggggtattacctgttgatcctgaaattcagtgcttaggccttc

SEQ ID NO: 60670 - DNA, 80 bp, synthetic construct
  source 1..80: mol_type = other DNA
gagaataattctcagttagattatacgattgatcttgatgatatagattttgaaacaattgatctcaaggaagatattga

SEQ ID NO: 60671 - DNA, 80 bp, synthetic construct
  source 1..80: mol_type = other DNA
aaattgcgagggatggtgaagatactggaacctgttaagttaataaagagttgggtttcaaagggtctgtcgatagataa

SEQ ID NO: 60672 - DNA, 80 bp, synthetic construct
  source 1..80: mol_type = other DNA
ttactgagtttgaaagtattgttaaaggttggggtgagtgtgtcaaggatcgtttcattgagttagatcaagaagcacag

SEQ ID NO: 60673 - DNA, 80 bp, synthetic construct
  source 1..80: mol_type = other DNA
attccctattttcatttagacatgctgatatcttattaaagagattatttccaagggattcagcctcttcattctattaa

SEQ ID NO: 60674 - DNA, 80 bp, synthetic construct
  source 1..80: mol_type = other DNA
cattccaaattacagaccacagcctttatgtcaacctacattggaaagcctggtagactattgtaagaattggcttgaga

SEQ ID NO: 60675 - DNA, 80 bp, synthetic construct
  source 1..80: mol_type = other DNA
gtgtttacccctccttcatgtcaagggtaatttataagcattacaggagtttgatttcagaggcaacaacttgctttttt

SEQ ID NO: 60676 - DNA, 80 bp, synthetic construct
  source 1..80: mol_type = other DNA
tggagacatcaataactcaacggaatgtattaaaaattttaatggaagaggttaccaaagaactattaaggtgtggtatg

SEQ ID NO: 60677 - DNA, 80 bp, synthetic construct
  source 1..80: mol_type = other DNA
ccaaaggtaaggacatttgacattccgaattacaggccacagcctttatgccagccaacattagagagtctggtagacta

SEQ ID NO: 60678 - DNA, 80 bp, synthetic construct
  source 1..80: mol_type = other DNA
tgcctgaagaatatatatcatacggaggtgaaagaaagatattaaacatccaacaagctcttgagaaggcacttcgatgg

SEQ ID NO: 60679 - DNA, 80 bp, synthetic construct
  source 1..80: mol_type = other DNA
gcctctatcaagggtaactggttgcaaggtaacttgaataaatgttcttcattgtttggggctgcaatatcattattatt

SEQ ID NO: 60680 - DNA, 80 bp, synthetic construct
  source 1..80: mol_type = other DNA
aagttttaaagtatcatggtgggatggagttcatagagcatctccttcatatagaagcacagaaaggcaattgtcagcct

SEQ ID NO: 60681 - DNA, 80 bp, synthetic construct
  source 1..80: mol_type = other DNA
ggttaaagaccatgtctcttgttaaaaccattaaagtaaaaccaaaaaaggaagtattgaaagcagtttctttatatggt

SEQ ID NO: 60682 - DNA, 80 bp, synthetic construct
  source 1..80: mol_type = other DNA
agtcacatggctaaagtatttaatgtttgaaaataagactttagaacagtggattgattctttttgttcaaagggggttt

SEQ ID NO: 60683 - DNA, 80 bp, synthetic construct
  source 1..80: mol_type = other DNA
ataaggcattttctatcactatacaagctaatggctttagagcaatggcacaactagatgaagagaatccaagatttctc

SEQ ID NO: 60684 - DNA, 80 bp, synthetic construct
  source 1..80: mol_type = other DNA
gagaatagttcacaattagattatacaattgatcttgacgatatagattttgagacaattgacctaaaagaagatattga

SEQ ID NO: 60685 - DNA, 80 bp, synthetic construct
  source 1..80: mol_type = other DNA
acactttctccaggatgaatcagcttacactggggatttattaattcagacagaggagactgaaataaagaaattgcgag

SEQ ID NO: 60686 - DNA, 80 bp, synthetic construct
  source 1..80: mol_type = other DNA
ggatgataaagatcttagagcctgttaagttgataaaaagttgggtctcaaaaggtttgtcaatagataaaatatacaat

SEQ ID NO: 60687 - DNA, 80 bp, synthetic construct
  source 1..80: mol_type = other DNA
aggaagaagaattacatgcacagaaatatggccactcaagaaagccaagaaattttttattatgtcagattagcctacaa

SEQ ID NO: 60688 - DNA, 80 bp, synthetic construct
  source 1..80: mol_type = other DNA
gcaccatatttaccatctacaattgcctctgaccaatatgatacacgatcagcatgcagtgaagtattgaagaattatcc

SEQ ID NO: 60689 - DNA, 80 bp, synthetic construct
  source 1..80: mol_type = other DNA
atggagaaatacagagagatccatgagagagtcaaggaggcagtcccaggggaaacatcagcagtagagtgtttagatct

SEQ ID NO: 60690 - DNA, 80 bp, synthetic construct
  source 1..80: mol_type = other DNA
tcaagaaaaagaaattaagctgggtagttatataatggaagaaggttatcacatacaggatgtgctgaataatcaggtaa

SEQ ID NO: 60691 - DNA, 80 bp, synthetic construct
  source 1..80: mol_type = other DNA
tcaagaagttgtggaattggctgcgcaagagttaaatacatatttacatgctaaatcccaagttatggctagcaacatta

SEQ ID NO: 60692 - DNA, 80 bp, synthetic construct
  source 1..80: mol_type = other DNA
ggagtcagggaaaaagtattaaaatatcaggggggattggaattcatagagcatctccttcatatagaagcacagaaagg

SEQ ID NO: 60693 - DNA, 80 bp, synthetic construct
  source 1..80: mol_type = other DNA
tgtatggaacagctccggggatggtgaagtaccccacgaccttttcaaaagtagatagaaacttgatacctataccattg

SEQ ID NO: 60694 - DNA, 80 bp, synthetic construct
  source 1..80: mol_type = other DNA
gtattaaaatatcaggggggattggaattcatagagcatctccttcatatagaagcacagaaaggcaattgtcagcctgg

SEQ ID NO: 60695 - DNA, 80 bp, synthetic construct
  source 1..80: mol_type = other DNA
tttagcagccgctgatgcatttgcttccgactacagaccaacatcacaggatatggaactttttcaaacactagttaact

SEQ ID NO: 60696 - DNA, 80 bp, synthetic construct
  source 1..80: mol_type = other DNA
gcacgttctcaaaagaatatgcctggagagatttcttgaatgaagtacaatgtgatgtattaacaacaaggcagattcat

SEQ ID NO: 60697 - DNA, 80 bp, synthetic construct
  source 1..80: mol_type = other DNA
gcagtctctttatacagtagaaaagaaaaggctggggatttaacacatttagcggcaatgagattatgtattgaagtatg

SEQ ID NO: 60698 - DNA, 80 bp, synthetic construct
  source 1..80: mol_type = other DNA
agttgtgtggttaaaatatttaatgtttgaaaacaagactctagaacagtggattgactctttttgttcaagaggtgtat

SEQ ID NO: 60699 - DNA, 80 bp, synthetic construct
  source 1..80: mol_type = other DNA
tggagacatcaataactcaacggaatgttttaaagatcttgatggaagaagttactaaggagttactaagatgtgggatg

SEQ ID NO: 60700 - DNA, 80 bp, synthetic construct
  source 1..80: mol_type = other DNA
ttgtcagggagcacctaattcggaatgaggaaagaggggctctggaggcaatgtttaatttgaaattccatgttactggc

SEQ ID NO: 60701 - DNA, 80 bp, synthetic construct
  source 1..80: mol_type = other DNA
gaaaataactctcaattagattatacaattgatcttgatgacattgattttgaaacaatagatcttaaggaagatattga

SEQ ID NO: 60702 - DNA, 80 bp, synthetic construct
  source 1..80: mol_type = other DNA
gcacttcctacaagatgaatctgcttatactggtgatttactaattcaaacagaggaaactgagattaaaaaattaagag

SEQ ID NO: 60703 - DNA, 80 bp, synthetic construct
  source 1..80: mol_type = other DNA
gaatggttaagatactagaacctgtgaaattgataaaaagctgggtctcaaaaggcttatcaattgacaaaatatacaat

SEQ ID NO: 60704 - DNA, 80 bp, synthetic construct
  source 1..80: mol_type = other DNA
gagaaaagtgtcagaggaaagggtccttcctgaggatgtattgccggattctttattttcatttaggcatgcggacattt

SEQ ID NO: 60705 - DNA, 80 bp, synthetic construct
  source 1..80: mol_type = other DNA
attctttattttcatttaggcatgcggacattttattaaagagattgttccctagggattcagcctcttctttttattga

SEQ ID NO: 60706 - DNA, 80 bp, synthetic construct
  source 1..80: mol_type = other DNA
ccaaaagtacgaacatttgatattcctaattatagaccacaacctttgtgccagcctacattggatagcttaatagatta

SEQ ID NO: 60707 - DNA, 80 bp, synthetic construct
  source 1..80: mol_type = other DNA
ttgtaagaactggcttgagacagaacatacatttgcttttaaagaagtaacaggtcagcgtgttttccatgtatttagtg

SEQ ID NO: 60708 - DNA, 80 bp, synthetic construct
  source 1..80: mol_type = other DNA
aggaggaggagctgcatgcatcaaagtatggacattcaagaaagccaagaaattttcttttgtgtcaaattagtctacaa

SEQ ID NO: 60709 - DNA, 80 bp, synthetic construct
  source 1..80: mol_type = other DNA
gccccttatttaccatccacaatagcttctgaccaatacgacactcgttcagcatgtaatgaaatattaaggaactatcc

SEQ ID NO: 60710 - DNA, 80 bp, synthetic construct
  source 1..80: mol_type = other DNA
agagacaccattgcaacttctagcaagagaaatggcatataaatacatcactttagatcatgatgatataattaactact

SEQ ID NO: 60711 - DNA, 80 bp, synthetic construct
  source 1..80: mol_type = other DNA
gagaagagaataatcccagggagtcctagtggtcaaatattaagatcatttttaaagatgactcctgataattataaaat

SEQ ID NO: 60712 - DNA, 80 bp, synthetic construct
  source 1..80: mol_type = other DNA
catatagaagcacagaaaggcaattgtcagcctggttttaaaataaagtttgatgtggtagctattaggacagatggctc

SEQ ID NO: 60713 - DNA, 80 bp, synthetic construct
  source 1..80: mol_type = other DNA
gccccttatttaccatccacaattgcttctgaccaatatgatacgcggtcagcatgcaatgaagtattgaagaattaccc

SEQ ID NO: 60714 - DNA, 80 bp, synthetic construct
  source 1..80: mol_type = other DNA
ggagacaccagtacagcttttggcaagagacatagcctataagtatattacattagatcatgatgacataataaattatt

SEQ ID NO: 60715 - DNA, 80 bp, synthetic construct
  source 1..80: mol_type = other DNA
gactttataatttatagatttcttttacttattgttattgcatcaccttttgctaaaacacaaaattatggaattaattt

SEQ ID NO: 60716 - DNA, 80 bp, synthetic construct
  source 1..80: mol_type = other DNA
ttgctcaacccgttttccaccaccgccgtttcaacgtgttgggtgtcagtagaaaccaaaccaggcggtgattttgattt

SEQ ID NO: 60717 - DNA, 80 bp, synthetic construct
  source 1..80: mol_type = other DNA
tatttggagacaaagatgatgaatctatgttacagatcgactgtgaaacagactctcttatttcagaatcagttagttca

SEQ ID NO: 60718 - DNA, 80 bp, synthetic construct
  source 1..80: mol_type = other DNA
tataaagaactaactttagagactccagccgacacaaacgattcaacttctacaattattgacagcgcttatgaagagtc

SEQ ID NO: 60719 - DNA, 80 bp, synthetic construct
  source 1..80: mol_type = other DNA
aagatgaacaaactaaagagaataaaaagacagataagaaacttaaaagaatcgaaaatattaaggagaataatcaaaat

SEQ ID NO: 60720 - DNA, 80 bp, synthetic construct
  source 1..80: mol_type = other DNA
tcattgcgaatacaaagaatagaatcagaaacaaagttgaaaacgcttgattcagcttataacactataattacacaagc

SEQ ID NO: 60721 - DNA, 80 bp, synthetic construct
  source 1..80: mol_type = other DNA
aaaaaaaatcattaataagcgccatattagcaactatgagataatcgagagccggatacattcccctcattactaagggt

SEQ ID NO: 60722 - DNA, 80 bp, synthetic construct
  source 1..80: mol_type = other DNA
ttagcaactatgagataatcgagagccggatacattcccctcattactaagggtcagcctctgaggtcaatagtataccc

SEQ ID NO: 60723 - DNA, 80 bp, synthetic construct
  source 1..80: mol_type = other DNA
gaatgacggggttgttcagtatatgaggttggtgcaggcagaaataagttacgtccgagagcacctaataaaaaatgaag

SEQ ID NO: 60724 - DNA, 80 bp, synthetic construct
  source 1..80: mol_type = other DNA
tcatcaacctccctgatatccgtgcggtggattaccaccgtgtggatggcgatgagcaaactgcaactgttgggctttgg

SEQ ID NO: 60725 - DNA, 80 bp, synthetic construct
  source 1..80: mol_type = other DNA
cgctcatcaacccgttccaaactggctccatctccacatgttggttgacatttgagaccagacctggacctgattttgac

SEQ ID NO: 60726 - DNA, 80 bp, synthetic construct
  source 1..80: mol_type = other DNA
acctacaatgcttggttcataggtggtacagtacctgactcagtgggtcacactgaaggaacccacaaaatagtgtttga

SEQ ID NO: 60727 - DNA, 80 bp, synthetic construct
  source 1..80: mol_type = other DNA
agcatacttatgttgatggggttttagataaattttttcagaatgagacacagaagtacttgattgatatcttgaagaaa

SEQ ID NO: 60728 - DNA, 80 bp, synthetic construct
  source 1..80: mol_type = other DNA
tattgttgatggtgatgttacatggggaatttcaaaaataatgagtatagacctaaacagacttcttgccttaaatattg

SEQ ID NO: 60729 - DNA, 80 bp, synthetic construct
  source 1..80: mol_type = other DNA
tatcaaaatattgggaagaaccttattttagtcaaacaagaaatattagcttaaaagggatgtccggccaagtacaagag

SEQ ID NO: 60730 - DNA, 80 bp, synthetic construct
  source 1..80: mol_type = other DNA
ggggaagtgagggggaattggttgcagggtaatctgaacaaatgttcctccctttttgcggtagggatgtcattattatt

SEQ ID NO: 60731 - DNA, 80 bp, synthetic construct
  source 1..80: mol_type = other DNA
tatggcacagcagttggtatggtaaattacccagggagttatctaagaactaaacatgcagaaacaccaatacctttagg

SEQ ID NO: 60732 - DNA, 80 bp, synthetic construct
  source 1..80: mol_type = other DNA
taaagggagatagatctatcttacagcttcaagccaacagacgtgcatattctggaaagcagtatgatgcttattgcgtg

SEQ ID NO: 60733 - DNA, 80 bp, synthetic construct
  source 1..80: mol_type = other DNA
ggggaaaacctaatgtgccatgtattgtttacaaaaattgtgcccttaggactgggcttcgaactaatcaagccatcaat

SEQ ID NO: 60734 - DNA, 80 bp, synthetic construct
  source 1..80: mol_type = other DNA
ggttggggagaaattgttgtggaccaatttgactcaattgataaggaagcccagtcacttgttagtaataaaggaattat

SEQ ID NO: 60735 - DNA, 80 bp, synthetic construct
  source 1..80: mol_type = other DNA
actatggtgcttttaagaaggctttttccacaggattcagtttcaacattttattgatatttaaattctttttcattttc

SEQ ID NO: 60736 - DNA, 80 bp, synthetic construct
  source 1..80: mol_type = other DNA
tcctgccgtctaaatcacttgaagttgcaggctcattcattagattttttactatattcaaggagggactaggccttatt

SEQ ID NO: 60737 - DNA, 80 bp, synthetic construct
  source 1..80: mol_type = other DNA
gatgtagataatcttgactctaaagtagagattgatggtgtttcatggtgtttcagaaaaattattagcctggatttaaa

SEQ ID NO: 60738 - DNA, 80 bp, synthetic construct
  source 1..80: mol_type = other DNA
gcactacgatctgtctttgcattccatttccttctttccacatctcaaaagatgaaactatgtgccatatttgataatct

SEQ ID NO: 60739 - DNA, 80 bp, synthetic construct
  source 1..80: mol_type = other DNA
ggcttttttatcacaacacttcctactagatgcaggcttgaaatcattgaggactactttgatgccattgccaagaacat

SEQ ID NO: 60740 - DNA, 80 bp, synthetic construct
  source 1..80: mol_type = other DNA
tggatttgaatggggaaagccaaatattccttgcattgtttacaagaactgtgtcttaaggacaagccttagaaccacac

SEQ ID NO: 60741 - DNA, 80 bp, synthetic construct
  source 1..80: mol_type = other DNA
taggcataccatggtactgttaaggaggttatttccacaggattctatttcctctttctattaggctttctttctttttc

SEQ ID NO: 60742 - DNA, 80 bp, synthetic construct
  source 1..80: mol_type = other DNA
ttataaggggatggaaccgataggagcaaatattgaagatttagtggactattctaaggaatggttatctagagctagaa

SEQ ID NO: 60743 - DNA, 80 bp, synthetic construct
  source 1..80: mol_type = other DNA
atggcgtacaggaagcgcggaactaaacgtgaaaacttaccacaacagaatgaacgtctgcaagaaaaggaaattgaaaa

SEQ ID NO: 60744 - DNA, 80 bp, synthetic construct
  source 1..80: mol_type = other DNA
gagtgcagatgcaatcatggaaaataaagctagcaataagaaacagcaattatccgataaagtattatcacaaaaggaag

SEQ ID NO: 60745 - DNA, 80 bp, synthetic construct
  source 1..80: mol_type = other DNA
gacaaaccctgaaaagaatggataaatatagagaaattcacaataagctgaaggagttttctcctggtacactaactgca

SEQ ID NO: 60746 - DNA, 80 bp, synthetic construct
  source 1..80: mol_type = other DNA
aagacaagttactagaaagatggagaagtacagagaaattcatagggatttgcaatcctttcaagttgggtcacttactg

SEQ ID NO: 60747 - DNA, 80 bp, synthetic construct
  source 1..80: mol_type = other DNA
gtgtgagccttatcacgaagatactttctgatcttgaattaaatataagcgaaccaacaagtcacagttctttcaccaca

SEQ ID NO: 60748 - DNA, 80 bp, synthetic construct
  source 1..80: mol_type = other DNA
gttcttatataaggtttataacagttttccggatgggacctggtttagtagacaaagataatttggatactgttttaaca

SEQ ID NO: 60749 - DNA, 80 bp, synthetic construct
  source 1..80: mol_type = other DNA
cttagatatttgatccctgcagtcacatcactttattctggattcccatcactaattaataaactctttgaacgtccctt

SEQ ID NO: 60750 - DNA, 80 bp, synthetic construct
  source 1..80: mol_type = other DNA
cagtagaacttgccgctatggaattaaataaaatactatcaacaaagtcccaagttatagctaacagcatacttaacaag

SEQ ID NO: 60751 - DNA, 80 bp, synthetic construct
  source 1..80: mol_type = other DNA
tactgggaagtcccttactttagtcaaactaggaacataagtttaaaagggatgtcaggtcaggttcaagaagatggaca

SEQ ID NO: 60752 - DNA, 80 bp, synthetic construct
  source 1..80: mol_type = other DNA
gagaaagggcttaagtatgaggcagggttaaaatatattgaacaagagctctatactcatttcttaaaaggggatattct

SEQ ID NO: 60753 - DNA, 80 bp, synthetic construct
  source 1..80: mol_type = other DNA
gagacaacttacttatttaccttatccggaagataaatgacccaagtatagtgactgccatgaccatgcagtcacctctt

SEQ ID NO: 60754 - DNA, 80 bp, synthetic construct
  source 1..80: mol_type = other DNA
attatcggggaatccctttaattcaccctaacatcaatgatctagtgatttatatgaaagattggttgtcaaaaaaacat

SEQ ID NO: 60755 - DNA, 80 bp, synthetic construct
  source 1..80: mol_type = other DNA
gagttttcgtttcatgaagtaaagggacctgctgtttttgattgcttcaatgaaaatgaagttaaccatgctttaaaata

SEQ ID NO: 60756 - DNA, 80 bp, synthetic construct
  source 1..80: mol_type = other DNA
tcctatctcaagacatccaaggaatttcttgcttatacaatgttcactgttgtcttcttatagcccagctacaatccttt

SEQ ID NO: 60757 - DNA, 80 bp, synthetic construct
  source 1..80: mol_type = other DNA
ctgatcaagtagatagtaggagggcatgtagttcagttctgaacctgatccctgaaacaccgacgtcatttctaattcat

SEQ ID NO: 60758 - DNA, 80 bp, synthetic construct
  source 1..80: mol_type = other DNA
agagaaatttaccacaaatggaaaaatatagagagattcatgagagagtcaaggaggcagttccaggggaaacatcagca

SEQ ID NO: 60759 - DNA, 80 bp, synthetic construct
  source 1..80: mol_type = other DNA
ggggttagagaaaagatgttaaaatatcaagggggtttagagtttatcgagcagctgttacaaatagaagcgcaaaaagg

SEQ ID NO: 60760 - DNA, 80 bp, synthetic construct
  source 1..80: mol_type = other DNA
aacacacatatgtcgatggagtcttagacaagttttttcagaatgaaacacagaaatatttaattgatatattaaagaaa

SEQ ID NO: 60761 - DNA, 80 bp, synthetic construct
  source 1..80: mol_type = other DNA
tcatggagaagtaaggggaaattggttgcaagggaacctaaataaatgttcttctctttttggtgtaggaatgtcattat

SEQ ID NO: 60762 - DNA, 80 bp, synthetic construct
  source 1..80: mol_type = other DNA
tatggtacagcagctggtatggtaaactatccaggaagttacctacgcactaaacatgcagagacaccaatacctttagg

SEQ ID NO: 60763 - DNA, 80 bp, synthetic construct
  source 1..80: mol_type = other DNA
aaaaacgtctaaagtatgaactgggatttaattatttagagtcagaattgcataagtattatttaaaaggtgagttggca

SEQ ID NO: 60764 - DNA, 80 bp, synthetic construct
  source 1..80: mol_type = other DNA
gtagattggataatgaatgggttactttcagggaagttttggcagcagcaaatagttttgcagaaaattatgagcctact

SEQ ID NO: 60765 - DNA, 80 bp, synthetic construct
  source 1..80: mol_type = other DNA
gcacattctctaaagaatatgcatggaaagactttttgaataatgttaattgtgatgtaattcctgttaaacaggtacaa

SEQ ID NO: 60766 - DNA, 80 bp, synthetic construct
  source 1..80: mol_type = other DNA
caaccttataaaattaaatttcaggtagtggctgttaggacagatggctctaatatatccactcagtggcctagtccaag

SEQ ID NO: 60767 - DNA, 80 bp, synthetic construct
  source 1..80: mol_type = other DNA
ggggaaaacctaatgtaccatgtattgtttataaaaattgtgctctgagaactgggcttcgtaccaaccaggctattaac

SEQ ID NO: 60768 - DNA, 80 bp, synthetic construct
  source 1..80: mol_type = other DNA
ggttggggagaagttgttgtagatcagtttgattcaattgataaggaagcccagttgcttgttagtaacaaagggattat

SEQ ID NO: 60769 - DNA, 80 bp, synthetic construct
  source 1..80: mol_type = other DNA
tattgtgctcttacgaaggctttttccacaggattcagtatcaacattttattgagattttaattctttttcattttccg

SEQ ID NO: 60770 - DNA, 80 bp, synthetic construct
  source 1..80: mol_type = other DNA
caaatgagggttggtgccttttggcatctggggggtagccatggagtgctcatacaagcccaaagggtctcaagtttatg

SEQ ID NO: 60771 - DNA, 80 bp, synthetic construct
  source 1..80: mol_type = other DNA
taacggcagtttgtttagttgtgtgcatgtttatgtcagatgttgaatatattcagctaataaggggccatggagttgtg

SEQ ID NO: 60772 - DNA, 80 bp, synthetic construct
  source 1..80: mol_type = other DNA
attttgacaatctttgcatctcatttgttccatattttacaagtacctagctgggtgaccattgtaattatggtgtctta

SEQ ID NO: 60773 - DNA, 80 bp, synthetic construct
  source 1..80: mol_type = other DNA
tagagtcgccaaattaacaagctttatatttggcgagaaaatagaagctagaggacttgatggtaagattgttgcaacga

SEQ ID NO: 60774 - DNA, 80 bp, synthetic construct
  source 1..80: mol_type = other DNA
tacctagtcagacatcctggttaaacaaggtgtcaaggtttgttcaaggcaaattcaggcagggggtcagaacaggaata

SEQ ID NO: 60775 - DNA, 80 bp, synthetic construct
  source 1..80: mol_type = other DNA
tcatcaacggcgcgtgtgattccaaatggcgttgttactattgaaactaaggaaacagtgggaactggctttagagttca

SEQ ID NO: 60776 - DNA, 80 bp, synthetic construct
  source 1..80: mol_type = other DNA
gaattacatagtgacagctgcacatgttgttggcaatgagacacaagttcgtgtgaagtggggcgatgtctctgcttttg

SEQ ID NO: 60777 - DNA, 80 bp, synthetic construct
  source 1..80: mol_type = other DNA
ctaaggtttgctatatacaccctgaaaaggatgttgcatacctaacattgccatcagaacatcaaggtttgccaacatac

SEQ ID NO: 60778 - DNA, 80 bp, synthetic construct
  source 1..80: mol_type = other DNA
aagctctcggacatatttcaagacggtgggccattgtgttttggttatggcgagctagaaatggcaaaaattgtttctgg

SEQ ID NO: 60779 - DNA, 80 bp, synthetic construct
  source 1..80: mol_type = other DNA
aaattcgccaaaaacattgttgatggtactgttgtgatcacatcacttgaggaatgcggcacactcgccgttgccataac

SEQ ID NO: 60780 - DNA, 80 bp, synthetic construct
  source 1..80: mol_type = other DNA
atgtggatggaaggatagttggagtacatcaaaccaatactgggttcacaggtggagccgtaatattatatcaagatgat

SEQ ID NO: 60781 - DNA, 80 bp, synthetic construct
  source 1..80: mol_type = other DNA
ttgccaccccagaagaaacctctacgggaacaagaacttgaagccaggataaaagatctagaagcagctcttgatgccaa

SEQ ID NO: 60782 - DNA, 80 bp, synthetic construct
  source 1..80: mol_type = other DNA
aatgcagcagcggatgagtgatgatcagatcgttgaacttgtccggttagctgttgggagagaactcacgatcctgagac

SEQ ID NO: 60783 - DNA, 80 bp, synthetic construct
  source 1..80: mol_type = other DNA
atgaactaagcttaaaccaggccaaaggtaagaacaaaggtaagaaaggtggaaagcgtgggaaaaagaaacgcatgtgg

SEQ ID NO: 60784 - DNA, 80 bp, synthetic construct
  source 1..80: mol_type = other DNA
actgaggaagagtacaaagaactcttagaaaaaggctttactaaacaacaattgagagatatggctgaggcattgcgtga

SEQ ID NO: 60785 - DNA, 80 bp, synthetic construct
  source 1..80: mol_type = other DNA
agctgagtactctgatgaagacagtgacgagtatgaagctggatacccccaatggtcagatcctgaggatgatgacgagt

SEQ ID NO: 60786 - DNA, 80 bp, synthetic construct
  source 1..80: mol_type = other DNA
tggaggctgagtggtttggaccaaagaagaagatcctcgatgaggttgaagagggttggtccaaaacagatttctgggaa

SEQ ID NO: 60787 - DNA, 80 bp, synthetic construct
  source 1..80: mol_type = other DNA
gccaaaaagtttggaaggaactagagccaatgagtgaagaagccgtcaacacgttaccttcccaccttaatgacaagtat

SEQ ID NO: 60788 - DNA, 80 bp, synthetic construct
  source 1..80: mol_type = other DNA
ctcagtcaaaccaataaatactttggtgaaaactgtctatgtatcaggtgtccaggcaggtaatgattatgtaacctttt

SEQ ID NO: 60789 - DNA, 80 bp, synthetic construct
  source 1..80: mol_type = other DNA
ggtattacttgttatgttattaccaaagctgatatggaagccctagctaaagatttgcaaaaataccagatggctgttga

SEQ ID NO: 60790 - DNA, 80 bp, synthetic construct
  source 1..80: mol_type = other DNA
agataagatcaaggcaaatgttattagggggcaatggatggaaggtgttgatcctaaaacggtcatcaatgagcttgatg

SEQ ID NO: 60791 - DNA, 80 bp, synthetic construct
  source 1..80: mol_type = other DNA
aattgtggttgggaattaatcatatcatgtgggagaatggtttggttccatttacacagaggaagaaaataaacaggcgt

SEQ ID NO: 60792 - DNA, 80 bp, synthetic construct
  source 1..80: mol_type = other DNA
ggaacgcctacttgaacctggagattatttcctaacaccttccacatatccattgattggagttttgccaattgatcgtc

SEQ ID NO: 60793 - DNA, 80 bp, synthetic construct
  source 1..80: mol_type = other DNA
acagtgtggggtccagaggcttatagaaaatcttttcaaaaatttacatataaggaaccacaggaaaatattgaattaaa

SEQ ID NO: 60794 - DNA, 80 bp, synthetic construct
  source 1..80: mol_type = other DNA
ttatcctagagagtggaagtttgcaatgagggttcttagaagagaatatgattttcttgtagacacacaactgactgata

SEQ ID NO: 60795 - DNA, 80 bp, synthetic construct
  source 1..80: mol_type = other DNA
tcactgcaacatcaaagaactctgactcaaccgcatcatacccaaaatgcttgtggtggaaaacggagtcagagtatcta

SEQ ID NO: 60796 - DNA, 80 bp, synthetic construct
  source 1..80: mol_type = other DNA
aaagatcgtggttataaagattatatccaacaatttgactctattttgaatggtgaaagacctaaagttttgtggtatct

SEQ ID NO: 60797 - DNA, 80 bp, synthetic construct
  source 1..80: mol_type = other DNA
tttcttgaagaaagagatacaaaaattgagcaagatagaggaaagtgatatcaggcaaatagtttgttcagacccgattt

SEQ ID NO: 60798 - DNA, 80 bp, synthetic construct
  source 1..80: mol_type = other DNA
gcttcaagccaggcgtaaacgaatgggttgaagttgagcctgatattcatcagcctacagcacttgttggcgttttgtat

SEQ ID NO: 60799 - DNA, 80 bp, synthetic construct
  source 1..80: mol_type = other DNA
ttgccagaattggttgtgttttcgaagaacatcaaaatcagctgatgaaaaatcgaacaaagacaagaatgggccaatgt

SEQ ID NO: 60800 - DNA, 80 bp, synthetic construct
  source 1..80: mol_type = other DNA
cgcccttttcaggcggcttccactcaaggatatcccgcttggttgacaaaggcaacaggcactttgtcgaatttgattgg

SEQ ID NO: 60801 - DNA, 80 bp, synthetic construct
  source 1..80: mol_type = other DNA
acgagatatgatggcacaatacctaatgaggtgttaattgctatcaaaaagtttagatattcttgcctttcagatcattg

SEQ ID NO: 60802 - DNA, 80 bp, synthetic construct
  source 1..80: mol_type = other DNA
caaaagtgctaaattgctggatgcctacaagtggtattgccacaacatcatgcatagatatgtcatgttaccatctggtg

SEQ ID NO: 60803 - DNA, 80 bp, synthetic construct
  source 1..80: mol_type = other DNA
aagtaacaatacaaaatcggggaaatccctctggccagatttccacaactatggacaacaacatgtgcaatgtgttcttc

SEQ ID NO: 60804 - DNA, 80 bp, synthetic construct
  source 1..80: mol_type = other DNA
caggcatttgagtatgcattcatacatccaaacaaaacagttgaagagctttgtgacatgtgggataaagtcgattcact

SEQ ID NO: 60805 - DNA, 80 bp, synthetic construct
  source 1..80: mol_type = other DNA
aatttatggtgatgacaggctttccacttatcctgagttacctgataactataaggatattgtcattagtatgtatgcag

SEQ ID NO: 60806 - DNA, 80 bp, synthetic construct
  source 1..80: mol_type = other DNA
acatatttggtatgtgggtcaaacctgacaaagttaaagtttctaacacaattgaaggtctcactttctgtggttttact

SEQ ID NO: 60807 - DNA, 80 bp, synthetic construct
  source 1..80: mol_type = other DNA
gttgttaaagataagaacatgtatgtccctgttccaactgaaacagaaaagctgattgctggattggtcaagccaacaaa

SEQ ID NO: 60808 - DNA, 80 bp, synthetic construct
  source 1..80: mol_type = other DNA
caggagtacaagaaggttgctgccagtgaacaagagcttaagaaagacaagtcacaattgcagttggaaatatccctact

SEQ ID NO: 60809 - DNA, 80 bp, synthetic construct
  source 1..80: mol_type = other DNA
aacaacagcaaagaaaacaaaaatggcaaccccgtaagaaacagggtaagactaaatggtttaataagaatcaggttaag

SEQ ID NO: 60810 - DNA, 80 bp, synthetic construct
  source 1..80: mol_type = other DNA
catgaggttaagactgagcttaagaggaagggccttgaaggcccaagaaccaaattcacagtaaaagtttcagctacaat

SEQ ID NO: 60811 - DNA, 80 bp, synthetic construct
  source 1..80: mol_type = other DNA
agttcactcctctagtaggagcttctgcattaactggatccatgtatcgtgcatcgttaaaccttacacagtccccggga

SEQ ID NO: 60812 - DNA, 80 bp, synthetic construct
  source 1..80: mol_type = other DNA
tcaacatcttgggggggccttggcgccaggaagcatctagatatacctgttggtgtgtctcgagtctggcatttgaggaa

SEQ ID NO: 60813 - DNA, 80 bp, synthetic construct
  source 1..80: mol_type = other DNA
gaagcatctagatatacctgttggtgtgtctcgagtctggcatttgaggaaaggtgaccttgctggcccgcgtgaaacat

SEQ ID NO: 60814 - DNA, 80 bp, synthetic construct
  source 1..80: mol_type = other DNA
aggtgaccttgctggcccgcgtgaaacatggtggttgactgacaccaatgaggaaggtggtcagagttgtggtcccatgc

SEQ ID NO: 60815 - DNA, 80 bp, synthetic construct
  source 1..80: mol_type = other DNA
aaggcacgagctggagagagcaagacccaccactaggaccctcaaaccaatcagtgttactcgaattgttatgttcgggc

SEQ ID NO: 60816 - DNA, 80 bp, synthetic construct
  source 1..80: mol_type = other DNA
ttgagattcatggtttgggtaagactacatccacttaccgtgatgcaccatggcaaggtgatctctttgttgttgaggtt

SEQ ID NO: 60817 - DNA, 80 bp, synthetic construct
  source 1..80: mol_type = other DNA
actggtgtttggcagtttaccaactacaatgcaaaacccgctcttggtacactgaatcgtgtggttgaagaaaccaatgc

SEQ ID NO: 60818 - DNA, 80 bp, synthetic construct
  source 1..80: mol_type = other DNA
atcaattgaggttggtgccgatggtgtcatgaagatgacaattccttcaactagccgtcttgctaggcacatgtctgagc

SEQ ID NO: 60819 - DNA, 80 bp, synthetic construct
  source 1..80: mol_type = other DNA
aatgcgaaagaacatcaagtgctgctagccagattggcgaaaccatctggcaggtagttgaccaaggtgctgggttggtt

SEQ ID NO: 60820 - DNA, 80 bp, synthetic construct
  source 1..80: mol_type = other DNA
gcaagtgttgcccctgaaccttttggctggctcattaaaggtgggtggtggtttgtcaagaaaattcttggcagagcaaa

SEQ ID NO: 60821 - DNA, 80 bp, synthetic construct
  source 1..80: mol_type = other DNA
cactggtgatgaggtgtattatgtttacgcctctcttgcagatgcacaaaataataagccagttgaagcaaatcaattta

SEQ ID NO: 60822 - DNA, 80 bp, synthetic construct
  source 1..80: mol_type = other DNA
ataagcagtctcataatacaacattggctgtgacccaaattaatgctccaaatactgggccaaacaatgcgccagcagta

SEQ ID NO: 60823 - DNA, 80 bp, synthetic construct
  source 1..80: mol_type = other DNA
gttacatccaggctgtttcccataccacaagctgggataccagatggctggttttggattagtggacactttgaatcact

SEQ ID NO: 60824 - DNA, 80 bp, synthetic construct
  source 1..80: mol_type = other DNA
tggtacaaatggatcaacattaccctgtggcatcataactactttcccccagtgggaatttaaattgaaaaagggagcta

SEQ ID NO: 60825 - DNA, 80 bp, synthetic construct
  source 1..80: mol_type = other DNA
ccgaatggggctgtgcaatgcagggtgtggcatcaagcccagataatgtaacatgctggtccgttgactcggactatcag

SEQ ID NO: 60826 - DNA, 80 bp, synthetic construct
  source 1..80: mol_type = other DNA
tgctgattggattattgttggcacatgcaactagcggcttcagaactggtcaatgcttagacagtgatgttagtgaaaca

SEQ ID NO: 60827 - DNA, 80 bp, synthetic construct
  source 1..80: mol_type = other DNA
ttgaaagggtggtacgacgttgctggtataccatcaaccggcatagtcgttgattgggtcactggttccaatcaaactgt

SEQ ID NO: 60828 - DNA, 80 bp, synthetic construct
  source 1..80: mol_type = other DNA
ccacctagactgggctgatgtcttggcttggagatccgatgagtggggaacgcttcgtctaacatactggttgtgtagga

SEQ ID NO: 60829 - DNA, 80 bp, synthetic construct
  source 1..80: mol_type = other DNA
ctaggcgtgaggtcactgcttcggattttgatacaactcagaagaatcctagcccatacattacaaatgcagaggcccaa

SEQ ID NO: 60830 - DNA, 80 bp, synthetic construct
  source 1..80: mol_type = other DNA
aaatacaaagctgatgtgcgggaggtttggataccaaccgttgtcactaatgagcaacgcaccaatagcagagtccagta

SEQ ID NO: 60831 - DNA, 80 bp, synthetic construct
  source 1..80: mol_type = other DNA
catttctagagttcgtgctgggacaatagttgtgctttggtgcttaggtagccacacttttgagagtggaactggcaaag

SEQ ID NO: 60832 - DNA, 80 bp, synthetic construct
  source 1..80: mol_type = other DNA
gtaccatagtttctaaggataactatggtgcttatggccagttacccactaagatgtctactacagggctatggcacaga

SEQ ID NO: 60833 - DNA, 80 bp, synthetic construct
  source 1..80: mol_type = other DNA
gctctgtcaacagtggggccatccactgattggcttactgttgcttttgatgcacatgccgccgtgacaagtgatgatat

SEQ ID NO: 60834 - DNA, 80 bp, synthetic construct
  source 1..80: mol_type = other DNA
tgtcactaagctgctggctgaaattgagaataagtatgatctggaaccccgaagacagagatcacgggatcataatagag

SEQ ID NO: 60835 - DNA, 80 bp, synthetic construct
  source 1..80: mol_type = other DNA
atttaaccagattaaaattatatgaagcactacgtgatgctgattgggaacatctccctgcagagggaatgagctcagtg

SEQ ID NO: 60836 - DNA, 80 bp, synthetic construct
  source 1..80: mol_type = other DNA
ctcaagccacaaacctgcattaactggaaatgggatggtgggattgctccagatacggatgtcccatttatggaaaggtt

SEQ ID NO: 60837 - DNA, 80 bp, synthetic construct
  source 1..80: mol_type = other DNA
agggatacactaattgtcttgtggtttgaatcattcattatatgtgattattcaatgaattagtgtgaattgattttccc

SEQ ID NO: 60838 - DNA, 80 bp, synthetic construct
  source 1..80: mol_type = other DNA
gagtgcatggtatacaggatttaaacaacaagtgagagagtactacacaaatagtgctgtttttgagtggatgctgttca

SEQ ID NO: 60839 - DNA, 80 bp, synthetic construct
  source 1..80: mol_type = other DNA
acccttatgatcgggttttacaacatgggagcagaagtgcaagaattaaggggatgcaattggacaaggtttcaaagaac

SEQ ID NO: 60840 - DNA, 80 bp, synthetic construct
  source 1..80: mol_type = other DNA
tgaccggttatctttgtacgtggacagctgttgcaacacttattggagcatattacatgtttagggcagataatccactg

SEQ ID NO: 60841 - DNA, 80 bp, synthetic construct
  source 1..80: mol_type = other DNA
tacatgctattaactatagctttagctacagtctctaaaatacagctattggctatagcagcagtcccaagcatggaaat

SEQ ID NO: 60842 - DNA, 80 bp, synthetic construct
  source 1..80: mol_type = other DNA
cacttcaacattttctctgtggtcctgtatggttgtctattatttcaatcaggtggcagctatgtgcgcatcactaataa

SEQ ID NO: 60843 - DNA, 80 bp, synthetic construct
  source 1..80: mol_type = other DNA
tatggcgctttcttataagcctaggactaaagggttttatgacccatatgacaagaccctcttgtttggcaataagactg

SEQ ID NO: 60844 - DNA, 80 bp, synthetic construct
  source 1..80: mol_type = other DNA
cagactctgaatatattcaagtagtaaagggccatataattgtgattctaaccatgattataacacaccttttccatgcc

SEQ ID NO: 60845 - DNA, 80 bp, synthetic construct
  source 1..80: mol_type = other DNA
ttacaaataccatcatgggtaactattgttgccattgtcacttttagaatagtgaggctcttgagtgtcattgttggtga

SEQ ID NO: 60846 - DNA, 80 bp, synthetic construct
  source 1..80: mol_type = other DNA
gaaaatggaaattaggagtgttgaaggtaagatcatagaaacccgaccaattgggcactcatggataaataaaatttcca

SEQ ID NO: 60847 - DNA, 80 bp, synthetic construct
  source 1..80: mol_type = other DNA
aatttgcacaatcggcatttagacagaaagttcgggttggtgtttcttccacagccagagtcataccaaatggcgttgtg

SEQ ID NO: 60848 - DNA, 80 bp, synthetic construct
  source 1..80: mol_type = other DNA
gttgtggaaacaaaagagacacaggggacagggtttagaatccaaaattatgtgacaacagccagtcacgttacaggcaa

SEQ ID NO: 60849 - DNA, 80 bp, synthetic construct
  source 1..80: mol_type = other DNA
tgaagagcaagtgaaactgaagtggggtgaggttacagcatacgccaaggttgtgtttagacaccccaataaagacctag

SEQ ID NO: 60850 - DNA, 80 bp, synthetic construct
  source 1..80: mol_type = other DNA
cttttatacaattgccgcaggagtttcagaacttgccgacttacaagtttgcaaaaactgttgatgatggtactgttgta

SEQ ID NO: 60851 - DNA, 80 bp, synthetic construct
  source 1..80: mol_type = other DNA
tttggatttggtgatcttgaccaagtccaagtagtgcacggtgtcgttacaccttcacggacgattgtgaaaacggtgta

SEQ ID NO: 60852 - DNA, 80 bp, synthetic construct
  source 1..80: mol_type = other DNA
atcacatcaatagaagattgcggtgtgttggctgtcgcaatctctgagggtgttattgttggtgacaatataacttatgc

SEQ ID NO: 60853 - DNA, 80 bp, synthetic construct
  source 1..80: mol_type = other DNA
tggtcgtatacttggtttacatcagaccaatactggctttactggtggtgctgtcattgtaaaagttgatgatctgcccc

SEQ ID NO: 60854 - DNA, 80 bp, synthetic construct
  source 1..80: mol_type = other DNA
ctcagaaaagaccccaaaaagagctggaacttgaggcaaagattaaggaattagaagaaaggctggcaggtcagcagatg

SEQ ID NO: 60855 - DNA, 80 bp, synthetic construct
  source 1..80: mol_type = other DNA
gctcaatccttgaatagtgaccaaattgttgagcttgttcgcattgcagttggtagagagatcaacatattgaggcatga

SEQ ID NO: 60856 - DNA, 80 bp, synthetic construct
  source 1..80: mol_type = other DNA
aatgagtatgctgcaagctaaggggaaaacaaaaggcaagcggagaggtggctacaaaaagaagaggaaggtctggactg

SEQ ID NO: 60857 - DNA, 80 bp, synthetic construct
  source 1..80: mol_type = other DNA
aacaggaatataaagagttgctagagaagggcttcacaaaagaccaactgcgtgaaatggctgaaactctacgcgaagca

SEQ ID NO: 60858 - DNA, 80 bp, synthetic construct
  source 1..80: mol_type = other DNA
gagtatgacgattactctgatgatgaagagtatgaagctggatatcctgattggtctgaacatgaggatgatgaagacat

SEQ ID NO: 60859 - DNA, 80 bp, synthetic construct
  source 1..80: mol_type = other DNA
agaggctgaatggttcagaaatcgccccaagcagaagatacttgatgaagtggaaaagggttggtcaggtcttgacttct

SEQ ID NO: 60860 - DNA, 80 bp, synthetic construct
  source 1..80: mol_type = other DNA
gggaacagtgtaaaggcgcttgggctgatgcagaacctaagaaggaagaccctgttaacaccctacccgtgcatctgaag

SEQ ID NO: 60861 - DNA, 80 bp, synthetic construct
  source 1..80: mol_type = other DNA
gacaagtatggcatagattgctatgtcataagtgaagcagatgtgaaagctttagccagtgacttgaagaaatatcaaga

SEQ ID NO: 60862 - DNA, 80 bp, synthetic construct
  source 1..80: mol_type = other DNA
cgtctcaggtgttcaggcagagaacaactatgttacttattgctttaagccaggtgacaacaagtgggttgaagtggaac

SEQ ID NO: 60863 - DNA, 80 bp, synthetic construct
  source 1..80: mol_type = other DNA
gaaagttgatgcacttattcaagccaatactttgagagggcaatggcttgatgggattgacccaaaagtggtactggcag

SEQ ID NO: 60864 - DNA, 80 bp, synthetic construct
  source 1..80: mol_type = other DNA
agcttgagggcctttggggcgagattaatcacctcatgtggatgaatggtttaataccatttactcagcgtcgtaagatc

SEQ ID NO: 60865 - DNA, 80 bp, synthetic construct
  source 1..80: mol_type = other DNA
aaacgcaagccaaaaaacttgaaagcggggcccaagatgggccccgtgaagaccaattgaggattgattcatggcttgat

SEQ ID NO: 60866 - DNA, 80 bp, synthetic construct
  source 1..80: mol_type = other DNA
atggttgagcctggtgagaggtatttaacccctgaagagtatcctctcataggtgtggctcccatagatagacccatttg

SEQ ID NO: 60867 - DNA, 80 bp, synthetic construct
  source 1..80: mol_type = other DNA
tgactatgatgaacctgttgatgaccttctaaatttgttaccagcatatgatgaagacccaccatttggtcctactgtct

SEQ ID NO: 60868 - DNA, 80 bp, synthetic construct
  source 1..80: mol_type = other DNA
ggggtcccgaagcttatagtaagtcctttgaaaagtttaaatatagggaaccattaaccaacataaaagccaattatcca

SEQ ID NO: 60869 - DNA, 80 bp, synthetic construct
  source 1..80: mol_type = other DNA
cgtgaatggggttttgccatgcgtgtcctgcgtagggaatatgatttcttaaatggcagtgttatgatcgacataacgtc

SEQ ID NO: 60870 - DNA, 80 bp, synthetic construct
  source 1..80: mol_type = other DNA
tgcaacaaagaattctgaatctacccctgcatatcccaagagctgctggtggaagactgaagcagattacttgggtgagc

SEQ ID NO: 60871 - DNA, 80 bp, synthetic construct
  source 1..80: mol_type = other DNA
gtggctatcaggattacattcgtgagtacgaacgtatccgggctggtgctaggcctaaggcattatggtacttgtttctt

SEQ ID NO: 60872 - DNA, 80 bp, synthetic construct
  source 1..80: mol_type = other DNA
aagaaagaaattctcaaaacatctaaaatagaagaaggagacattaggcagataatatgctcagatcccatttttgctag

SEQ ID NO: 60873 - DNA, 80 bp, synthetic construct
  source 1..80: mol_type = other DNA
ctgacatacacaagccaactgctctagttggtgtgctatgtcaagaacataagcgtcttacagaccagaaccgggagctc

SEQ ID NO: 60874 - DNA, 80 bp, synthetic construct
  source 1..80: mol_type = other DNA
ggatggtcccctttttgtggtggatttgatagacgtgtaaagcgtctagttgggaaggacaacaatctctttgttgagtt

SEQ ID NO: 60875 - DNA, 80 bp, synthetic construct
  source 1..80: mol_type = other DNA
tgattggacacgatttgatgggacaataccactggaagtctttaaagaaataaagaaatttagattcagttgcctggcga

SEQ ID NO: 60876 - DNA, 80 bp, synthetic construct
  source 1..80: mol_type = other DNA
aagaataccgtaccaaagacaactgggatatctacacgtggtattgtactaacataatgcacagatatgtgatgttacca

SEQ ID NO: 60877 - DNA, 80 bp, synthetic construct
  source 1..80: mol_type = other DNA
tcaggtgaaataacagtacaaaatcgtggaaatccttctggccagatatcaaccaccatggacaataacatgtgtaatgt

SEQ ID NO: 60878 - DNA, 80 bp, synthetic construct
  source 1..80: mol_type = other DNA
tcttctttcaggcatttgagtatgcttatatgcatcctaccaagacccatgatgacttatgtgctgattgggagaaagtt

SEQ ID NO: 60879 - DNA, 80 bp, synthetic construct
  source 1..80: mol_type = other DNA
gactctctcatctatggtgatgaccgattgtcaacgtttcctgagttaccaactgattatattgataaagttgtcaaaat

SEQ ID NO: 60880 - DNA, 80 bp, synthetic construct
  source 1..80: mol_type = other DNA
gtatgccgacattttcggcatgtgggttaagcctgacaaagtgaaagtctctaattctataattggcctgtctttttgcg

SEQ ID NO: 60881 - DNA, 80 bp, synthetic construct
  source 1..80: mol_type = other DNA
gatttacaataacatcggatggggggacttatgttcccgtgccaactgaagttgacaagttaactgctgcccttattaag

SEQ ID NO: 60882 - DNA, 80 bp, synthetic construct
  source 1..80: mol_type = other DNA
gggacttatgttcccgtgccaactgaagttgacaagttaactgctgcccttattaagccaaccaagaagctgcaagatat

SEQ ID NO: 60883 - DNA, 80 bp, synthetic construct
  source 1..80: mol_type = other DNA
ccaaccaagaagctgcaagatataacatctctgtatgggaaactcctttgctaccgcatacttagccacaacctaccaga

SEQ ID NO: 60884 - DNA, 80 bp, synthetic construct
  source 1..80: mol_type = other DNA
aaggacgaaatatcttccttgaaattagaggcctcattgttaagacatgaagttgaacgccaccgaccatcatctccagt

SEQ ID NO: 60885 - DNA, 80 bp, synthetic construct
  source 1..80: mol_type = other DNA
gattcttcagcaggttgtcaaacctaagattaagtggcagaataaccgcaagtggcagcctaagcctcgcgttaagcgcg

SEQ ID NO: 60886 - DNA, 80 bp, synthetic construct
  source 1..80: mol_type = other DNA
agattcagaaaaaactcaaaaaagaaggactcgagggacccaaaacaagatttgcagtcacggttgccgccacaataggt

SEQ ID NO: 60887 - DNA, 80 bp, synthetic construct
  source 1..80: mol_type = other DNA
aaaattggacccaataaacagaatggacctgagcttcaaatatctacattcctacatccaagtttgatgaaagaaccaaa

SEQ ID NO: 60888 - DNA, 80 bp, synthetic construct
  source 1..80: mol_type = other DNA
tgatggcactaactttgggccattgcaggctgctgccgcccagtggggcctgtggaagcttgccagtctgaaaataactt

SEQ ID NO: 60889 - DNA, 80 bp, synthetic construct
  source 1..80: mol_type = other DNA
tcacacctcttgttggtgcatctgcggtcactggctctgtgtacagggtcagtctcaacctaacacaatcccccggtaac

SEQ ID NO: 60890 - DNA, 80 bp, synthetic construct
  source 1..80: mol_type = other DNA
accagttggggtggattaggtgcccgcaaacaccttgatataccaacaggtaaatcagtgacttggaatttgcataaagg

SEQ ID NO: 60891 - DNA, 80 bp, synthetic construct
  source 1..80: mol_type = other DNA
agatctggcaggcccccgacaaacatggtggcttactgacacaaatgaagaaggagggcagagttgcgggcccatgatag

SEQ ID NO: 60892 - DNA, 80 bp, synthetic construct
  source 1..80: mol_type = other DNA
tatgaaacccttgaagcattctacattgttcctctttgcattcttaattggcttgctttttacacagagtgcactaggct

SEQ ID NO: 60893 - DNA, 80 bp, synthetic construct
  source 1..80: mol_type = other DNA
aggttcatgggcttggggcaaccacatcaacttacaaggatgctgcgtgggcaggtgatctcttcattgttgaagttaag

SEQ ID NO: 60894 - DNA, 80 bp, synthetic construct
  source 1..80: mol_type = other DNA
ggtgtgtggcatttctcaaattacaatgcaaaaccagcacttggtgctttggagaggaaaactgaatccctacaagctag

SEQ ID NO: 60895 - DNA, 80 bp, synthetic construct
  source 1..80: mol_type = other DNA
tatggaggttggggcagatggtgtattaaccatgtcattgccatcctcaagtcaactagcaaggcatatggaggaacgct

SEQ ID NO: 60896 - DNA, 80 bp, synthetic construct
  source 1..80: mol_type = other DNA
atgaacgccctggtagcaatgctactggggtgggtgagaccatctggcaaattgttgatgagggtgctggcttaatatcc

SEQ ID NO: 60897 - DNA, 80 bp, synthetic construct
  source 1..80: mol_type = other DNA
aatgtcgcgccccccccatttggatggcttataaagggtggatggtggtttgctaagaggatgctcggccgatccaattc

SEQ ID NO: 60898 - DNA, 80 bp, synthetic construct
  source 1..80: mol_type = other DNA
tggtgaagaaaaataccaggtatttgcttcacttgccgatgctcagaacaataggcctgtcatggctgaaaccatgacta

SEQ ID NO: 60899 - DNA, 80 bp, synthetic construct
  source 1..80: mol_type = other DNA
agaaaacacaccaaaccacgctcatctccacgcaaattaatgcacccaatacaggtcctggtaatacctctggcatggtt

SEQ ID NO: 60900 - DNA, 80 bp, synthetic construct
  source 1..80: mol_type = other DNA
gtctcaggtggctttcctataccacagagtggtgtgccagaaggcgcatttgtcgtctctgggccttttgaagccataca

SEQ ID NO: 60901 - DNA, 80 bp, synthetic construct
  source 1..80: mol_type = other DNA
catttgtggacatggcacagcagctgccactaccttggttaatggatatattccttctaatccttgggagttcacattaa

SEQ ID NO: 60902 - DNA, 80 bp, synthetic construct
  source 1..80: mol_type = other DNA
agaaaggggcaactgtttggggcgcagcccaagggggtgtcgtggcatcagcagaccaccttctctgtttttcttttgat

SEQ ID NO: 60903 - DNA, 80 bp, synthetic construct
  source 1..80: mol_type = other DNA
tcagaacaggcaaatgtcttgatagtgatgtttcagacaccaataggccacaaacatgcataatgtgggcttgggacggt

SEQ ID NO: 60904 - DNA, 80 bp, synthetic construct
  source 1..80: mol_type = other DNA
tcagaaaatgaatgtactggctggtatgacatacatggtattgcttccacaggcattaccgtagactggaaaaccaacgc

SEQ ID NO: 60905 - DNA, 80 bp, synthetic construct
  source 1..80: mol_type = other DNA
cactacagttccagaatgggctgatgttcttgcgtggaggtcagatgattggaacactctcagaatgacatactacttat

SEQ ID NO: 60906 - DNA, 80 bp, synthetic construct
  source 1..80: mol_type = other DNA
gtagggtgaaaaagaaccacacaccaacagattatgaagatcagcagaaaattccattgcccaccataaccagtcttgca

SEQ ID NO: 60907 - DNA, 80 bp, synthetic construct
  source 1..80: mol_type = other DNA
gataataaagctgtcacagcagtacatgaaattaaaatgacacagtccatacatacagctggtggtaatactatgcaggt

SEQ ID NO: 60908 - DNA, 80 bp, synthetic construct
  source 1..80: mol_type = other DNA
gaaatacaacaccattagggcaggcaatatacttatactgtggcagcttggttcacacactttcaatgatgccactggac

SEQ ID NO: 60909 - DNA, 80 bp, synthetic construct
  source 1..80: mol_type = other DNA
aagcttctgtcgtccaacagagtaactttacagcatatcagttgaatgtggagaagagatcaacaactggtatgtgggtc

SEQ ID NO: 60910 - DNA, 80 bp, synthetic construct
  source 1..80: mol_type = other DNA
agggctcttacgcccattggcccaaaacaggagtggttgactgccctcttccactcacctgctagacagtatgatcttgt

SEQ ID NO: 60911 - DNA, 80 bp, synthetic construct
  source 1..80: mol_type = other DNA
tgaccagcttatggatcagattcaagaaaggtttgcactagttcctagatctagtgctgacactgactctagtgaagatg

SEQ ID NO: 60912 - DNA, 80 bp, synthetic construct
  source 1..80: mol_type = other DNA
agtttgaggatatatctgatcctaaaactgctaagctggcactgtatgaggcactgaagggcataaattggccccatgat

SEQ ID NO: 60913 - DNA, 80 bp, synthetic construct
  source 1..80: mol_type = other DNA
gccgcagagactgtaatggacagtctcattaagagtcgccgaggccacgccgagtaggatcgagggtacagcgattcatt

SEQ ID NO: 60914 - DNA, 80 bp, synthetic construct
  source 1..80: mol_type = other DNA
ggagttgaacctgatgaaactgtgcctatcatggataggctacaggcttgggctgttgggtttaagattaggctcgtgaa

SEQ ID NO: 60915 - DNA, 80 bp, synthetic construct
  source 1..80: mol_type = other DNA
accaatcaatataaaactaggtgaatattattaatcatataatgatctgtaatatttagaatattgattgaaaattttga

SEQ ID NO: 60916 - DNA, 80 bp, synthetic construct
  source 1..80: mol_type = other DNA
ctaggtgaatattattaatcatataatgatctgtaatatttagaatattgattgaaaattttgattggcaaaaccaatgc

SEQ ID NO: 60917 - DNA, 80 bp, synthetic construct
  source 1..80: mol_type = other DNA
ttatttctcggaagagaatctatttgtcagtgtactctacaattatgcccaattagccataagttggagtgttgtggcat

SEQ ID NO: 60918 - DNA, 80 bp, synthetic construct
  source 1..80: mol_type = other DNA
ccaggcgcaaggggctacaactcgatgcgttatccaataataaattggctgacatatttgaggatggtggtcctttgtgc

SEQ ID NO: 60919 - DNA, 80 bp, synthetic construct
  source 1..80: mol_type = other DNA
ttatgattggaatttattacaccataaaagctgaaaaaccactatacatgctggctacattgatacttgcaacattttcc

SEQ ID NO: 60920 - DNA, 80 bp, synthetic construct
  source 1..80: mol_type = other DNA
aaggtccagatgtttgctatagctgccatccctaatatggagatgacatcgacattctcgatgtggatttcaatggtcat

SEQ ID NO: 60921 - DNA, 80 bp, synthetic construct
  source 1..80: mol_type = other DNA
gtattattttaatcatatagcggcaatagcctcatctatgcttgttggccttacatgtgtggttgtctgcatgtttatgg

SEQ ID NO: 60922 - DNA, 80 bp, synthetic construct
  source 1..80: mol_type = other DNA
caatgatattaacacattttctgtgaatccacaactatattgtgattataatgtagtattgatgaaatatgataatacat

SEQ ID NO: 60923 - DNA, 80 bp, synthetic construct
  source 1..80: mol_type = other DNA
tatcaacaaaatagcgaatcaaataaatggatatcaatgggaacagactgtacggtaaaagtttgtccactcaatacaca

SEQ ID NO: 60924 - DNA, 80 bp, synthetic construct
  source 1..80: mol_type = other DNA
aactttaggaattggatgcaaaactacggacgtggatacatttgagattgttgcctcgtctgaaaaattggtaattactg

SEQ ID NO: 60925 - DNA, 80 bp, synthetic construct
  source 1..80: mol_type = other DNA
atgttgtaaatggtgttaatcataaaataaatatttcaataagtacgtgtactatacgtaattgtaataaactaggacca

SEQ ID NO: 60926 - DNA, 80 bp, synthetic construct
  source 1..80: mol_type = other DNA
tcaaagaatcatgcgagtaaattggaaaaaatggtggcaagtgttttatacagtagttgactatattaaccaaattatac

SEQ ID NO: 60927 - DNA, 80 bp, synthetic construct
  source 1..80: mol_type = other DNA
ctgaattagatgcatcggagttagcagatcttatattgaacgaatggctgtgcaatcctatggatatatcactttactat

SEQ ID NO: 60928 - DNA, 80 bp, synthetic construct
  source 1..80: mol_type = other DNA
gacatgcttatatcttattaaagagattatttcccagggactcagcctcttccttttattaacagattatacttcttatt

SEQ ID NO: 60929 - DNA, 80 bp, synthetic construct
  source 1..80: mol_type = other DNA
tgctttgagatctgtctttgcattccattttcttttatcaacgtcccaaaaaatgaagctatgtgcaattttcgataact

SEQ ID NO: 60930 - DNA, 80 bp, synthetic construct
  source 1..80: mol_type = other DNA
tgaggtatctgataccagctgtaacatcgacatattcaggctttgaaccattaataagaaaattctttgaaagacctttt

SEQ ID NO: 60931 - DNA, 80 bp, synthetic construct
  source 1..80: mol_type = other DNA
tccgcgaaaaagaaaggagactaggtagttatattatggaagaaggatatcatatccaagatgtgttaaacaatcaagtt

SEQ ID NO: 60932 - DNA, 80 bp, synthetic construct
  source 1..80: mol_type = other DNA
gttgtagagcaacagctattttgtcaagaagttgtagaattagctgcccaagaattaaatacttacttgcatgcaaagtc

SEQ ID NO: 60933 - DNA, 80 bp, synthetic construct
  source 1..80: mol_type = other DNA
ttaaatcattcacaaaacaatccaactgtgttggaattatacgaacaaacgaaaaaacagagggctcaagctaggattgt

SEQ ID NO: 60934 - DNA, 80 bp, synthetic construct
  source 1..80: mol_type = other DNA
acgaaagtatcaaagaactgaggctgatcgaggcttctttatcaccacattacctactagggtgaggcttgagattatag

SEQ ID NO: 60935 - DNA, 80 bp, synthetic construct
  source 1..80: mol_type = other DNA
gcttcaattaagggaaactggttacagggtaatttgaacaaatgttcatctttatttggggctgcgatatcactgttgtt

SEQ ID NO: 60936 - DNA, 80 bp, synthetic construct
  source 1..80: mol_type = other DNA
acatgcacggaaagataatgacagatatatcttaggcctatttaagtttctgatgtcattatctgatgatatctttcaac

SEQ ID NO: 60937 - DNA, 80 bp, synthetic construct
  source 1..80: mol_type = other DNA
gttttaaaataaaatttgatgtaattgcaataaggacagatggatcaaatatctctacgcaatggcccagtaggaggaat

SEQ ID NO: 60938 - DNA, 80 bp, synthetic construct
  source 1..80: mol_type = other DNA
tactagagacttctgtgactcaacgtaatgtactaagaattcttatggaagaagtgaccaaagagttattacggtgtgga

SEQ ID NO: 60939 - DNA, 80 bp, synthetic construct
  source 1..80: mol_type = other DNA
ataaggcattctcgattacaatccaagcaaatggattcagagccatggcacaacttgatgaagaaaatccaaggtttctt

SEQ ID NO: 60940 - DNA, 80 bp, synthetic construct
  source 1..80: mol_type = other DNA
ctgttgggaacatatggtttaaaatgactcaacataagttatttataaatcccattatctctgctggtcttctggagaat

SEQ ID NO: 60941 - DNA, 80 bp, synthetic construct
  source 1..80: mol_type = other DNA
tttatgaaaggcttaccagcagctatcccacctgcagcatattcgctgattatgaataaggccaaaatttctgtagatct

SEQ ID NO: 60942 - DNA, 80 bp, synthetic construct
  source 1..80: mol_type = other DNA
ggaagttaaggggaatggtaaagattttagagcctgtcaaattgataaagagctgggtgtctaaaggcctttcaatagac

SEQ ID NO: 60943 - DNA, 80 bp, synthetic construct
  source 1..80: mol_type = other DNA
aagatatataatcctgtaaacattattcttatgactcgatatatgtctaaacattttaattttcatgcaaaacagttatc

SEQ ID NO: 60944 - DNA, 80 bp, synthetic construct
  source 1..80: mol_type = other DNA
actgtaagaattggcttgagactgagcatgcatttgcttttaaagaggtaactgggcagcgtgtttttaatgtttttaaa

SEQ ID NO: 60945 - DNA, 80 bp, synthetic construct
  source 1..80: mol_type = other DNA
gaagaggaagaattacatgcatctaaatatggacattccagaaaacctagaaattttttattatgtcaaatcagcttgca

SEQ ID NO: 60946 - DNA, 80 bp, synthetic construct
  source 1..80: mol_type = other DNA
cagagacaccactacagcttttagctagagatatggcttataaatatgtaacattagatcatgatgatattattaactat

SEQ ID NO: 60947 - DNA, 80 bp, synthetic construct
  source 1..80: mol_type = other DNA
ataatccgagagtttattttaaggcaacacagagtgtcaaggagccaggaactttcaagttaaatctatcaaatagggat

SEQ ID NO: 60948 - DNA, 80 bp, synthetic construct
  source 1..80: mol_type = other DNA
gcaaagtcaaaggcactaattgatttaatttcaaaggattcaaaaaaaggtgtgtttggtgagttgattgatagcataga

SEQ ID NO: 60949 - DNA, 80 bp, synthetic construct
  source 1..80: mol_type = other DNA
atatagcaagtcaagtccagcagaatgaatgtgccaagactgttgagaagatattatccgacttagaggtgaatttgggt

SEQ ID NO: 60950 - DNA, 80 bp, synthetic construct
  source 1..80: mol_type = other DNA
gaatcgactgtgggtttagaccaaccaaaaagaacaacaggtgtggatgatattttgagaaaattttatgataatgaact

SEQ ID NO: 60951 - DNA, 80 bp, synthetic construct
  source 1..80: mol_type = other DNA
tataaaatatttaattgccgttattaggaaaacaactgcctggcatctgggccatttattacgtgatataacagaatctt

SEQ ID NO: 60952 - DNA, 80 bp, synthetic construct
  source 1..80: mol_type = other DNA
taatagcacatgctgggttaaaaaggtcaaaatattggtcagctcatggttatgcttatggcagtgtacttttatgcatt

SEQ ID NO: 60953 - DNA, 80 bp, synthetic construct
  source 1..80: mol_type = other DNA
taccgtctaaatcattagaagtctctgggtcatttattaggttttttacagtatttaaggaggggttgggcctgattgat

SEQ ID NO: 60954 - DNA, 80 bp, synthetic construct
  source 1..80: mol_type = other DNA
tctgaaaaccttgactcaaaagttgatattgacggggtgacctggtgttttagtaaaattattagcctggacttgaatag

SEQ ID NO: 60955 - DNA, 80 bp, synthetic construct
  source 1..80: mol_type = other DNA
attgctagcattgaatattgcatttggaaaatctctccttgatacagcaacttggttccaatactatgctgaagatcaag

SEQ ID NO: 60956 - DNA, 80 bp, synthetic construct
  source 1..80: mol_type = other DNA
gacactttccccttcaacatgctttaagatctgtttttgcattccattttctattatccccatcccaaaaaatgaagtta

SEQ ID NO: 60957 - DNA, 80 bp, synthetic construct
  source 1..80: mol_type = other DNA
tgtgcaatctttgataacctgaggtatctgatacctgctgtaacatcgacatactcaggttttgaaccattaataagaaa

SEQ ID NO: 60958 - DNA, 80 bp, synthetic construct
  source 1..80: mol_type = other DNA
attctttgaaagaccttttaaaagtgcactcgaagtctatctatacaatattattaaaacactgcttgtgagtttagctc

SEQ ID NO: 60959 - DNA, 80 bp, synthetic construct
  source 1..80: mol_type = other DNA
tgatacagaggatggaaaaacgtataattccagggagtcctagtgggcaaatacttagatcatttttcaaaatgacccca

SEQ ID NO: 60960 - DNA, 80 bp, synthetic construct
  source 1..80: mol_type = other DNA
catttattacatataaacatgcacggaaggataatgacagatacatcttaggtctgtttaaatttggaatgtcattgact

SEQ ID NO: 60961 - DNA, 80 bp, synthetic construct
  source 1..80: mol_type = other DNA
gatgatatgtttcagcatgatcgcttaggggaattcagttttgtgggaaaggtccagtggaaagtctttacacccaagag

SEQ ID NO: 60962 - DNA, 80 bp, synthetic construct
  source 1..80: mol_type = other DNA
gctgcagcagatgcatttgcatctgaatataaaccaactacacaggacatggaactctttcagacacttgtgaattgtac

SEQ ID NO: 60963 - DNA, 80 bp, synthetic construct
  source 1..80: mol_type = other DNA
ggcctaagatagctcgaacattccctgtgaaagaaagagatcaaacaatacagaaccctatcactgctgtcataggttat

SEQ ID NO: 60964 - DNA, 80 bp, synthetic construct
  source 1..80: mol_type = other DNA
gctgtttctttgtatggtaaaaaagaaaaggctggagatttaacacatttagccgcaatgaggttatgcatagaagtttg

SEQ ID NO: 60965 - DNA, 80 bp, synthetic construct
  source 1..80: mol_type = other DNA
ctatggcatggttaaaatgtttaatgtttgaaaataaaaccttggaacaatggatagattctttctgttctaggggggta

SEQ ID NO: 60966 - DNA, 80 bp, synthetic construct
  source 1..80: mol_type = other DNA
tggaacaatggatagattctttctgttctaggggggtattacctgttgatccagaaattcagtgtttagggctattagtg

SEQ ID NO: 60967 - DNA, 80 bp, synthetic construct
  source 1..80: mol_type = other DNA
ggggcaaacctaatataccctgtattgtgtataaaaactgtgcccttaggacaggtcttagagttagaaaacctacaaat

SEQ ID NO: 60968 - DNA, 80 bp, synthetic construct
  source 1..80: mol_type = other DNA
ccgtcgggaacatatggttcaaaatgactcaacataagttattcataaatcctatcatctctggtggtcttttagagaat

SEQ ID NO: 60969 - DNA, 80 bp, synthetic construct
  source 1..80: mol_type = other DNA
gatgatgtatctcagttagattatacaattgatcttgacgatatcgattttgagacaatcgacctgaaagaagatattga

SEQ ID NO: 60970 - DNA, 80 bp, synthetic construct
  source 1..80: mol_type = other DNA
aagaagctaaggggcatggtaaagattttagagcctgttaggttgataaaaagctgggtatccaagggcctttcaataga

SEQ ID NO: 60971 - DNA, 80 bp, synthetic construct
  source 1..80: mol_type = other DNA
caagatctacaatcctgtgaacattatccttatgactagatatatgtcgaaacacttcaattttcatgcaaaacagttat

SEQ ID NO: 60972 - DNA, 80 bp, synthetic construct
  source 1..80: mol_type = other DNA
atttaactgaatttgagagtattgttaaaggttggggtgaacttgaacaggaagcacagcgaaaagtgtctgaagagatg

SEQ ID NO: 60973 - DNA, 80 bp, synthetic construct
  source 1..80: mol_type = other DNA
acttgcagaattggcttgagactgaacatgcatttgcttttaaagaggttacagggcaacgtgtctttaatgtttttaaa

SEQ ID NO: 60974 - DNA, 80 bp, synthetic construct
  source 1..80: mol_type = other DNA
agggggaacatcagcagtagaatgcttagatctactagatcgattatatgcagtcagacatgatgttgtggatcagatga

SEQ ID NO: 60975 - DNA, 80 bp, synthetic construct
  source 1..80: mol_type = other DNA
gaagaagaagaattacatgcatctaaatatgggcactcaagaaaacctaggaattttctattgtgccaaatcagcctaca

SEQ ID NO: 60976 - DNA, 80 bp, synthetic construct
  source 1..80: mol_type = other DNA
agcaccatatttgccttcaaccattgcttcagaccaatatgatactcggttagtatgtaatgaagtattgaaaaattatc

SEQ ID NO: 60977 - DNA, 80 bp, synthetic construct
  source 1..80: mol_type = other DNA
attgatggatcctgctatattaacttcactatcttcaaatttaaatgcagtcatgttttggctagagcggcattcaaatg

SEQ ID NO: 60978 - DNA, 80 bp, synthetic construct
  source 1..80: mol_type = other DNA
atgttgctgatgcaaacaaagtttataaacgtagactggatttatttaccatagtagcatctacagtaaataagtatgga

SEQ ID NO: 60979 - DNA, 80 bp, synthetic construct
  source 1..80: mol_type = other DNA
atatgaatacgaagtgatgaaggataaaccgtactacttagtaacctgggccaactcatctatagaaatgctcatgtcag

SEQ ID NO: 60980 - DNA, 80 bp, synthetic construct
  source 1..80: mol_type = other DNA
attgttaagggatggggtgagtctgttgtggatcagtttgattcccttgacttagaagcccaaaatctagttcaaaagca

SEQ ID NO: 60981 - DNA, 80 bp, synthetic construct
  source 1..80: mol_type = other DNA
tatttccagaattagactgcttttttgaatttgctcaccattcagatgatgcacttttcatatatggctacttggaacca

SEQ ID NO: 60982 - DNA, 80 bp, synthetic construct
  source 1..80: mol_type = other DNA
gctaaaatttctgtggatcttttcatgttcaacgacttacttagactggtaaacccaggtaacacacttgacttgtctgg

SEQ ID NO: 60983 - DNA, 80 bp, synthetic construct
  source 1..80: mol_type = other DNA
ggtcccttcaaacattataacagcactagagaaaaaaataataccaaatcatcccacaggaaaaagtctcaaggctttct

SEQ ID NO: 60984 - DNA, 80 bp, synthetic construct
  source 1..80: mol_type = other DNA
agaatattaaagaaccaggcactttcaagttaacttcaagcatgatgcgccctgagtcaaagattatgttggatatgttg

SEQ ID NO: 60985 - DNA, 80 bp, synthetic construct
  source 1..80: mol_type = other DNA
taattacgaagattttatcagacttggaactaaatatttcagagcctagcagtcatgagcaaatcacagccaagcacaca

SEQ ID NO: 60986 - DNA, 80 bp, synthetic construct
  source 1..80: mol_type = other DNA
catgttgatactgtgttagataagttctttcaaaatgagacacagaaatatttgattgatattctaaaaaagactacagc

SEQ ID NO: 60987 - DNA, 80 bp, synthetic construct
  source 1..80: mol_type = other DNA
tgacatccttatattctgggtttccatccctaattgaaaaattatttgaaaggcccttcaagagtgcattagaggtttat

SEQ ID NO: 60988 - DNA, 80 bp, synthetic construct
  source 1..80: mol_type = other DNA
gttgagttagcagcaaatgagttgaatcgaatacttatcacaaaatctcaggtagttgctaatagtatattgaataaatt

SEQ ID NO: 60989 - DNA, 80 bp, synthetic construct
  source 1..80: mol_type = other DNA
aagaaataatccgaatgtccttcaactttatgaagaaactagacatcaaaaggcacaagctaggattgtaagaaaatttc

SEQ ID NO: 60990 - DNA, 80 bp, synthetic construct
  source 1..80: mol_type = other DNA
gcaaaattccgacggtttacagctgcattacacaatggactcccagatgatagactaaagaattgtgtgatagatgcttt

SEQ ID NO: 60991 - DNA, 80 bp, synthetic construct
  source 1..80: mol_type = other DNA
tattccctgagttggattgcttttttgagtttgcccatcattcagatgatgctctctttatctatggttatctagagcca

SEQ ID NO: 60992 - DNA, 80 bp, synthetic construct
  source 1..80: mol_type = other DNA
cttggaaggactttttaaatcatgtgcattgtgatgtgatacctactaaacaagtacaacgtgcaaaggtagcacgcaca

SEQ ID NO: 60993 - DNA, 80 bp, synthetic construct
  source 1..80: mol_type = other DNA
gctaaaatctctgtagacctctttatgtttaatgacctacttagattgataaatcctggcaatactcttgatttatcagg

SEQ ID NO: 60994 - DNA, 80 bp, synthetic construct
  source 1..80: mol_type = other DNA
actggtgaagggtacagcacagtgagcagtatctctagtagactttggtcagaggagatgagtcttgttgatgaagagga

SEQ ID NO: 60995 - DNA, 80 bp, synthetic construct
  source 1..80: mol_type = other DNA
cattatcaagacatccaagaaatttcttgctgattcaatgctctgtactgacagcttataagcctgcaactatattatct

SEQ ID NO: 60996 - DNA, 80 bp, synthetic construct
  source 1..80: mol_type = other DNA
gatcagcttgacagccgtagagcctgcattcaatttttgaacctaatacctgaaactccagcagctattcttgctcatga

SEQ ID NO: 60997 - DNA, 80 bp, synthetic construct
  source 1..80: mol_type = other DNA
ctacccaatggcctagtctaagaaatgatggtgtagtgcaatatatgagacttgtgcaggcagaaattagttatgttaga

SEQ ID NO: 60998 - DNA, 80 bp, synthetic construct
  source 1..80: mol_type = other DNA
ccaagtagggtttggtgcctttgggcatctggtgggttagctatggagcgttcctataaaccagggggtcttaatatcta

SEQ ID NO: 60999 - DNA, 80 bp, synthetic construct
  source 1..80: mol_type = other DNA
tatagcttcagtgtgttatgtctcttgcatgttcatgagtgacattgaatatgtacaagttttgagaggccatgccgtgg

SEQ ID NO: 61000 - DNA, 80 bp, synthetic construct
  source 1..80: mol_type = other DNA
ttgtttttaccataatatgctcccacattttccatattttacaaataccatcttgggttactgttttaataatggtttta

SEQ ID NO: 61001 - DNA, 80 bp, synthetic construct
  source 1..80: mol_type = other DNA
tacagggtggtgaggttaactagtgttgtgattggagagaaaattgaggttaggaacctcgacggtaaggtggttaatac

SEQ ID NO: 61002 - DNA, 80 bp, synthetic construct
  source 1..80: mol_type = other DNA
aatcacaactcagacatcatggcttaataaagtttccaaatttgtgcaaagtaaattcaagcaaaatgttagggtgggtg

SEQ ID NO: 61003 - DNA, 80 bp, synthetic construct
  source 1..80: mol_type = other DNA
tttcatcaactgctcgagttgtaccaaatggggtattagttgtggaggccaaggataacatcgggactggctttagagtg

SEQ ID NO: 61004 - DNA, 80 bp, synthetic construct
  source 1..80: mol_type = other DNA
caaaactatgttgttacagcagcacatgttgttggtagtgaaacccaggttcgcctaaaatggggtgatgttagtgcatt

SEQ ID NO: 61005 - DNA, 80 bp, synthetic construct
  source 1..80: mol_type = other DNA
tgctaaggttgtttacatacatcctagtaaggatgtggcatatttaagtttgccacctgaaatgcagaacttaccaacat

SEQ ID NO: 61006 - DNA, 80 bp, synthetic construct
  source 1..80: mol_type = other DNA
ataagttggcagacatattctcagatggtggcccattgtgctttggttatggagttctggaaatggttaaggttgacact

SEQ ID NO: 61007 - DNA, 80 bp, synthetic construct
  source 1..80: mol_type = other DNA
acaagtttgcaaaagccgttgctgatgggaccatagtcattacctcattagaggattgtggggttttggctgttgccatc

SEQ ID NO: 61008 - DNA, 80 bp, synthetic construct
  source 1..80: mol_type = other DNA
acagaaggtgttgtcgtctctaacaacatgacatatgctgtgtgtaccaaaaatggtatgagtgggtcaccagttaccaa

SEQ ID NO: 61009 - DNA, 80 bp, synthetic construct
  source 1..80: mol_type = other DNA
tgttgatgggcgcgtcattggtgttcatcagacaaacactggtttcactggtggcgcagtcattatacgccaggaagacc

SEQ ID NO: 61010 - DNA, 80 bp, synthetic construct
  source 1..80: mol_type = other DNA
tcccaccccaaaagaagccacaacgtgagttggagctggaggagaaggttaagcaacttgaggaagccctagcaggaaaa

SEQ ID NO: 61011 - DNA, 80 bp, synthetic construct
  source 1..80: mol_type = other DNA
atgaatcaaaaattcagtgaagaccaggtcatcgaattgataaggatggctgttggtagagaaattggaatattacgcca

SEQ ID NO: 61012 - DNA, 80 bp, synthetic construct
  source 1..80: mol_type = other DNA
cgaattgtctatgaatcaagccaaaggtaaaaataagggtaagaggcgtggcaatgtcaaacgtaagaggaggaggatgt

SEQ ID NO: 61013 - DNA, 80 bp, synthetic construct
  source 1..80: mol_type = other DNA
ggactgaagaagagtacaaagagctcctagaaaaaggctttaccagacagcagctacgggatatggctgaaacgctgcgt

SEQ ID NO: 61014 - DNA, 80 bp, synthetic construct
  source 1..80: mol_type = other DNA
gaggcagaatatactgacactgagagtgaggaatatgagtcaggttatcctgcttggtctgatccagaagattctgatga

SEQ ID NO: 61015 - DNA, 80 bp, synthetic construct
  source 1..80: mol_type = other DNA
gatagaccgagaatggtttgggcccaaaaagaagatacttgatgaggttgactctggatggtccaaaggagacttctggg

SEQ ID NO: 61016 - DNA, 80 bp, synthetic construct
  source 1..80: mol_type = other DNA
agcagtgtcaaaaagtgtggaaggaaactgaaccgatgagtgaggagcaagtgaacactcttccatcacacctgcatgaa

SEQ ID NO: 61017 - DNA, 80 bp, synthetic construct
  source 1..80: mol_type = other DNA
ggttcagtgcaaccagtgactacaccagtgaaaaccgtgtacgtctcaggcgtccttgcgggcaatgagtacgttaccta

SEQ ID NO: 61018 - DNA, 80 bp, synthetic construct
  source 1..80: mol_type = other DNA
aaatacggtttgacatgttacgtcattacaaaagcagacatggaggcattggctaaagacttgctaaagtatcaatcatt

SEQ ID NO: 61019 - DNA, 80 bp, synthetic construct
  source 1..80: mol_type = other DNA
ggttgaagataaaataaagaacaatgtggtcaggggccaatggattgatggtgtggatcccaaggtgatcataaatgaat

SEQ ID NO: 61020 - DNA, 80 bp, synthetic construct
  source 1..80: mol_type = other DNA
tagatgaattgtggcttggtatcaatcacataatgtgggagaatgggcttgtcccatttacccaacgccgtaagatcaat

SEQ ID NO: 61021 - DNA, 80 bp, synthetic construct
  source 1..80: mol_type = other DNA
taatgtgggagaatgggcttgtcccatttacccaacgccgtaagatcaataaaagaaagaatcaaaaaaacttgaagggg

SEQ ID NO: 61022 - DNA, 80 bp, synthetic construct
  source 1..80: mol_type = other DNA
aaaagaaagaatcaaaaaaacttgaagggggggctcaaggtgagcccccaacaaaagaacaattaactctttcttattgg

SEQ ID NO: 61023 - DNA, 80 bp, synthetic construct
  source 1..80: mol_type = other DNA
gaaaatatgttggagccaggggattattaccttacccctccaacataccctttattgggtgttttaccaatcaaccgacc

SEQ ID NO: 61024 - DNA, 80 bp, synthetic construct
  source 1..80: mol_type = other DNA
aatatgtgattatgatgagccaattgatgatttgctaaatttgttgccaagttatgatgatgatatgtcatatggtccaa

SEQ ID NO: 61025 - DNA, 80 bp, synthetic construct
  source 1..80: mol_type = other DNA
cagtttggggccctgaagcctatgttaagtcatttgaaaagtttacatataaagaaccaatgagtaacatcaaggacaaa

SEQ ID NO: 61026 - DNA, 80 bp, synthetic construct
  source 1..80: mol_type = other DNA
tataagagagagtggaactttgccatgagagtcttgaggagggagtttgattacctaattgatagtgtgatgacagacat

SEQ ID NO: 61027 - DNA, 80 bp, synthetic construct
  source 1..80: mol_type = other DNA
cacagcaacatctaagaattcagactccacaccctcctacccaaaatgcctgtggtggaaaacagaggctgaatacttga

SEQ ID NO: 61028 - DNA, 80 bp, synthetic construct
  source 1..80: mol_type = other DNA
aagagaggggctaccaagattatataacacagttggaatccataaagaaaggtgaaaggcccaaagttctctggtatttg

SEQ ID NO: 61029 - DNA, 80 bp, synthetic construct
  source 1..80: mol_type = other DNA
ctgcttcaaacctggtgttaaccaatgggttgaagtggatccagatatacatcaaccaacggctttggtgggtacattgt

SEQ ID NO: 61030 - DNA, 80 bp, synthetic construct
  source 1..80: mol_type = other DNA
tttctcaagaaggagatcctaaagctcagcaaaattgaggatggggatatacgacaaatcgtgtgttcagatccgatatt

SEQ ID NO: 61031 - DNA, 80 bp, synthetic construct
  source 1..80: mol_type = other DNA
tgcgcgcattgggtgtgtttttgaggaacatcagaataacctaatgaaaatgaggacaaagacccgcatggggcaatgtg

SEQ ID NO: 61032 - DNA, 80 bp, synthetic construct
  source 1..80: mol_type = other DNA
gctggtccccattctgtggtggcttcaatgatcatgtcaagaggctggtggataaaggtaacaatttgtttgtcgagttt

SEQ ID NO: 61033 - DNA, 80 bp, synthetic construct
  source 1..80: mol_type = other DNA
gattggacacgatatgatggtacaataccaaatgaagtgtttatggcaattaaacaatttaggtactcatgtttagctga

SEQ ID NO: 61034 - DNA, 80 bp, synthetic construct
  source 1..80: mol_type = other DNA
ggagtttaaaacagaggagaatttgagtatctataaatggtattgtgagagtatactagataggtacgttatgttacctt

SEQ ID NO: 61035 - DNA, 80 bp, synthetic construct
  source 1..80: mol_type = other DNA
ctggtgaagtcaccaaacaggttaggggaaacccttcaggtcaagtgtcaacaactatggacaataatttgtgtaatgtc

SEQ ID NO: 61036 - DNA, 80 bp, synthetic construct
  source 1..80: mol_type = other DNA
ttcttccaagcgtttgagtacgcgtacatgcaccctgataaggatataagtcaacttatgcatgattgggagagggttga

SEQ ID NO: 61037 - DNA, 80 bp, synthetic construct
  source 1..80: mol_type = other DNA
ttcacttatatatggtgatgatagattgtctacttatcctgagttgcctggagattatgtagacagagttgttgatatgt

SEQ ID NO: 61038 - DNA, 80 bp, synthetic construct
  source 1..80: mol_type = other DNA
atgccacagtgtttggaatgtgggtcaaacctgaaaaagtgaaaatcccaaatagtataataggccttacattttgtggt

SEQ ID NO: 61039 - DNA, 80 bp, synthetic construct
  source 1..80: mol_type = other DNA
ttcacagtgacagaatcaaatggggtatatgtcccagtccccacagaaacagagaaactcatggctggactagtgcgacc

SEQ ID NO: 61040 - DNA, 80 bp, synthetic construct
  source 1..80: mol_type = other DNA
atcaagaatacaaaaaactggtccagtctgaaagggaattgaaagaaactaagtcaggactacaattagaaatatccctt

SEQ ID NO: 61041 - DNA, 80 bp, synthetic construct
  source 1..80: mol_type = other DNA
aactaaaagattacctgacattttatcgctgtatgggaaactcctttgctaccgcatactaagtcacaatctgccagatg

SEQ ID NO: 61042 - DNA, 80 bp, synthetic construct
  source 1..80: mol_type = other DNA
accacaaatttaaaaattacatcttggtggccttagaagttgtggctaggcacatccgtgctagtggaggtgaagagcct

SEQ ID NO: 61043 - DNA, 80 bp, synthetic construct
  source 1..80: mol_type = other DNA
tactatattacggatggtatgctggatagactttggaggggcggaccaaagcgtggagatggctggtaagcagccccagc

SEQ ID NO: 61044 - DNA, 80 bp, synthetic construct
  source 1..80: mol_type = other DNA
atgctgcaactaaggctgccattaaggcagttgctaaagaggttgtcaaggaggagaagaaggcattcaaacccagacag

SEQ ID NO: 61045 - DNA, 80 bp, synthetic construct
  source 1..80: mol_type = other DNA
caaaacaaaagcactaggaataagtatagaaataaatggcaaactaaacatcaagttaagaatgaaattaagactgaact

SEQ ID NO: 61046 - DNA, 80 bp, synthetic construct
  source 1..80: mol_type = other DNA
taagaagaaaggacttgagggacccaagacaaaatttacagttaaagtctcagcaacaattggaaaaattggaccaaatg

SEQ ID NO: 61047 - DNA, 80 bp, synthetic construct
  source 1..80: mol_type = other DNA
taaattcagggcctgaattacaaatttcaacatttatgcatcctgctttgatgaaagagccaaatgatggcaccaacttt

SEQ ID NO: 61048 - DNA, 80 bp, synthetic construct
  source 1..80: mol_type = other DNA
ggcccattgcaagctgcagctgctcagtggggtctgtggagactatcagacctcaagatacagtttacaccactcgtggg

SEQ ID NO: 61049 - DNA, 80 bp, synthetic construct
  source 1..80: mol_type = other DNA
ttcatcggctgtaactggctcagtgtaccgcacatctttgaacctaacgcaatcccctgggtctacatcttggggtggtc

SEQ ID NO: 61050 - DNA, 80 bp, synthetic construct
  source 1..80: mol_type = other DNA
taggtgcccgaaaacacctggacattccagttggggtgtcacggacatggcacctaaagaaaggtgatcttgctgggccc

SEQ ID NO: 61051 - DNA, 80 bp, synthetic construct
  source 1..80: mol_type = other DNA
ttgaggcacgaattggaacgctccagacccactgtcagaaccctacgcccatacaaaatggctaacatagtgttttttgg

SEQ ID NO: 61052 - DNA, 80 bp, synthetic construct
  source 1..80: mol_type = other DNA
agggagacatggtggttaacagataccaatgaagagggagggcaaagctgcggtcctatgcttgaagtccatggcctcgg

SEQ ID NO: 61053 - DNA, 80 bp, synthetic construct
  source 1..80: mol_type = other DNA
caaaacaacctcaacttataaggatgaagcctggaggggtgatctctttatagttgaagttacaggagtgtggcagttca

SEQ ID NO: 61054 - DNA, 80 bp, synthetic construct
  source 1..80: mol_type = other DNA
caaactacaatgccaaacctgctttgggaacactgaacagggtggttgaggacaccacggcgactattgaggtcggcaca

SEQ ID NO: 61055 - DNA, 80 bp, synthetic construct
  source 1..80: mol_type = other DNA
gatggcataatgaagatgtcaataccatcaactgggcagctagcacgccacatgtcagagcaaaatgaaagggcatcaaa

SEQ ID NO: 61056 - DNA, 80 bp, synthetic construct
  source 1..80: mol_type = other DNA
tgcagcgaacacaattggtgagaccatatggcaggtcgttgaccaaggagctggtcttgttgccagtgttgcacctgagc

SEQ ID NO: 61057 - DNA, 80 bp, synthetic construct
  source 1..80: mol_type = other DNA
ctttcggctggctcatcaagggtggttggtggtttgttaagaaactgattggcagggccaataccactactgaacagtat

SEQ ID NO: 61058 - DNA, 80 bp, synthetic construct
  source 1..80: mol_type = other DNA
tatgtttatgcttcactagcagatgcacaaaacaacaaaccagttgaagcaaatactttcgctgcttcaagccatgctac

SEQ ID NO: 61059 - DNA, 80 bp, synthetic construct
  source 1..80: mol_type = other DNA
aacactggctgttactcaaataaatgctcctaacactgggccaagcacagcctcagcggttgtccaatccagaatgtttc

SEQ ID NO: 61060 - DNA, 80 bp, synthetic construct
  source 1..80: mol_type = other DNA
ccctaccacaagcggggattcctgatggttggttttggctcagtggacaatttgaagctttgcacacggttggtttgaat

SEQ ID NO: 61061 - DNA, 80 bp, synthetic construct
  source 1..80: mol_type = other DNA
ggtaccaacgggtctactcttccatgtggtatgatcacatcatttgacaaatgggagttcaaactaaagaaaggcactgt

SEQ ID NO: 61062 - DNA, 80 bp, synthetic construct
  source 1..80: mol_type = other DNA
attactactgggattgttaatggcacatgcagttacaggctttagaacaggacaatgccttgacccagatgtaagtgaaa

SEQ ID NO: 61063 - DNA, 80 bp, synthetic construct
  source 1..80: mol_type = other DNA
tgagtggggatgtgctatgcaaggaatggcagcagcaagcaatactgttacttgctggtcagttgatcgtgaaaatcagc

SEQ ID NO: 61064 - DNA, 80 bp, synthetic construct
  source 1..80: mol_type = other DNA
ttttgggttggtacgatgtcagcggcattgcttcaactggcattgtcgttgattgggtaactggcccaaatggtggcacc

SEQ ID NO: 61065 - DNA, 80 bp, synthetic construct
  source 1..80: mol_type = other DNA
gtgcatttggactgggctgatgtccttgcttggaggacagatttgtgggggacactccgcatgacatactggttgtgtcg

SEQ ID NO: 61066 - DNA, 80 bp, synthetic construct
  source 1..80: mol_type = other DNA
aactagaagagccgtgcaaggctctgactttgatacgacacagaagagcccatcgccttacatcgcgcgggcttggcctg

SEQ ID NO: 61067 - DNA, 80 bp, synthetic construct
  source 1..80: mol_type = other DNA
agacaataagcaatgtcaggcttgatgttcgggaggttttgatggttaatacaaccaccaatgccactgattcaaatagc

SEQ ID NO: 61068 - DNA, 80 bp, synthetic construct
  source 1..80: mol_type = other DNA
cgagtccaatatatccaaagagtgccagctggcgccatagtcatactctggtgcctggggaatcacacatttgacacatc

SEQ ID NO: 61069 - DNA, 80 bp, synthetic construct
  source 1..80: mol_type = other DNA
aactggccaaggttccattgtccaaaagtcctcatttggtggatttggacagctgcctagtaagtcatctactactggtt

SEQ ID NO: 61070 - DNA, 80 bp, synthetic construct
  source 1..80: mol_type = other DNA
tgtggtctcgtgcacttaattcagttggtccatctaccgattggattactgtgtcttttgactcacacccaccagtttgt

SEQ ID NO: 61071 - DNA, 80 bp, synthetic construct
  source 1..80: mol_type = other DNA
gatgacgttgtttcaaggctgatggctgaaattgctgacaggtatgaccttgagccccgcagaaagaagcctaaggatgc

SEQ ID NO: 61072 - DNA, 80 bp, synthetic construct
  source 1..80: mol_type = other DNA
aactaaagagctaaccaggctcaaaatctatgaagcacttagagaagctgattgggaacacctacctgcagaggaggtga

SEQ ID NO: 61073 - DNA, 80 bp, synthetic construct
  source 1..80: mol_type = other DNA
ctctgaagcctcagacctgtattaattggaaatgggatggtggtatagctccagacaccgaggtaccactagttgaaagg

SEQ ID NO: 61074 - DNA, 80 bp, synthetic construct
  source 1..80: mol_type = other DNA
gctcagtgctttaaattccgccgaggccacgccgagtaggatcgagggtacagcggactattgattgcttgtggaatgaa

SEQ ID NO: 61075 - DNA, 80 bp, synthetic construct
  source 1..80: mol_type = other DNA
agcggactattgattgcttgtggaatgaattagtttatgattataatctgttcatttgatcattagtgaatttgattctc

SEQ ID NO: 61076 - DNA, 80 bp, synthetic construct
  source 1..80: mol_type = other DNA
gcatatgcatggtatacaggagttaaacagcagatgaaggaatactataatgacagcgttatagtagattggtctgtgta

SEQ ID NO: 61077 - DNA, 80 bp, synthetic construct
  source 1..80: mol_type = other DNA
tgacccttacgaccgtgttttgcaacacggaagtaagagtgccagaataaagggtattcaactggacaaagtttcaggga

SEQ ID NO: 61078 - DNA, 80 bp, synthetic construct
  source 1..80: mol_type = other DNA
tgtgttcaagatgttatgttcatggacatcagttgcagtgactataggggttttctacatgattaagtcagaaaatccca

SEQ ID NO: 61079 - DNA, 80 bp, synthetic construct
  source 1..80: mol_type = other DNA
tgtatatgatgttaacattgatgctggctacactatcaaggatacagctaatggcagtggctgccatacctggaatggaa

SEQ ID NO: 61080 - DNA, 80 bp, synthetic construct
  source 1..80: mol_type = other DNA
ataacatcagcattttcattgtggtgctgtatgatagtgtactactttaatcaagcagctgcgatggcatctgcaattat

SEQ ID NO: 61081 - DNA, 80 bp, synthetic construct
  source 1..80: mol_type = other DNA
tcaagatataacttggggagtttcaaaggtcatgagtattgacttgaatagattactagcacttaatatagcgtttgaaa

SEQ ID NO: 61082 - DNA, 80 bp, synthetic construct
  source 1..80: mol_type = other DNA
tccggggtaattggttgcagggaaatctaaataaatgttcatctctttttggtgtaggaatgtcattgctcttcaagcag

SEQ ID NO: 61083 - DNA, 80 bp, synthetic construct
  source 1..80: mol_type = other DNA
ggggcaagcctaatattccatgtattgtatataaaaattgtgcattgcgtacaggtcttagaacaaatcaaactatcaac

SEQ ID NO: 61084 - DNA, 80 bp, synthetic construct
  source 1..80: mol_type = other DNA
gggtgaaacttttccttaatccaattatatcatcaggtctattggaaaactttatgaaaaacctaccagctgcaatacct

SEQ ID NO: 61085 - DNA, 80 bp, synthetic construct
  source 1..80: mol_type = other DNA
gacttgacagaacttgaaagtgttgtcaagggttggggagaatgtgttgttgatcagtttagcacatttgatcaggaagc

SEQ ID NO: 61086 - DNA, 80 bp, synthetic construct
  source 1..80: mol_type = other DNA
tataaaatatcccatttcgcggcacccgagaaactttttattgatacagtgctcgctactatcttcgtatagtccagcta

SEQ ID NO: 61087 - DNA, 80 bp, synthetic construct
  source 1..80: mol_type = other DNA
caattctttctgatcaggttgatagtagaagggcatgtaattctgtactaaacttgatccctgaaacaccaacttcattt

SEQ ID NO: 61088 - DNA, 80 bp, synthetic construct
  source 1..80: mol_type = other DNA
gagaaattcaggaaaatggaaaaatatagggagattcatcaaagaatcaaggagattcctcctgggggggcttctgcatt

SEQ ID NO: 61089 - DNA, 80 bp, synthetic construct
  source 1..80: mol_type = other DNA
tgggtccagggctagtcgataaagacaatctggatacaattctgactgatcaggatgttacctggagggtttcaaaggtt

SEQ ID NO: 61090 - DNA, 80 bp, synthetic construct
  source 1..80: mol_type = other DNA
tcaggatgttacctggggggtttcaaaggttatgagtattgatttgaacaggttactagcgctcaatattgcatttgaaa

SEQ ID NO: 61091 - DNA, 80 bp, synthetic construct
  source 1..80: mol_type = other DNA
cggggcaattggttgcagggaaatctaaataagtgttcatctctttttggtgtaggaatgtcgttgctatttaagcaact

SEQ ID NO: 61092 - DNA, 80 bp, synthetic construct
  source 1..80: mol_type = other DNA
tggggtgcagtgtgatgttattcctacgaagcagatccagagggcaaaagtggccagaacattcactgtgagagaaaaag

SEQ ID NO: 61093 - DNA, 80 bp, synthetic construct
  source 1..80: mol_type = other DNA
tggggaaagcctaatattccttgcattgtatataaaaactgtgcactacgtacaggtttaagagcaaaccaaactgttaa

SEQ ID NO: 61094 - DNA, 80 bp, synthetic construct
  source 1..80: mol_type = other DNA
ggataaaactattccttaacccaattatttcatcaggtttattagaaaatttcatgaaaaatttaccagcagcaatacct

SEQ ID NO: 61095 - DNA, 80 bp, synthetic construct
  source 1..80: mol_type = other DNA
gacttgactgagtttgaaagcattgttaaaggttggggagaatgtgttgttgatcagttcagtacatttgatcaggagac

SEQ ID NO: 61096 - DNA, 80 bp, synthetic construct
  source 1..80: mol_type = other DNA
tggggaatctctggtagaaaatggatatatgatgtgggatctgcgcgaaaatgcagagttggcagaacaacaattgtact

SEQ ID NO: 61097 - DNA, 80 bp, synthetic construct
  source 1..80: mol_type = other DNA
ctcaggtatttaatacctgctgttacatccctgtactctggttttccatcattgatagagaagttgtttgagcgcccgtt

SEQ ID NO: 61098 - DNA, 80 bp, synthetic construct
  source 1..80: mol_type = other DNA
gtttattggtagcacttgcacaaaataacaaggccagattttattctaaagttaaattgctgggactgactgttgaccaa

SEQ ID NO: 61099 - DNA, 80 bp, synthetic construct
  source 1..80: mol_type = other DNA
tggggaagttaaaggaaattggctacaaggtaatttgaataaatgttcatccctctttggtgtggcaatgtcactactgt

SEQ ID NO: 61100 - DNA, 80 bp, synthetic construct
  source 1..80: mol_type = other DNA
tttagccgctgctaatagctttgcagagagttatactcctaccagccaggatatggacctgtttcaaacattaacaagct

SEQ ID NO: 61101 - DNA, 80 bp, synthetic construct
  source 1..80: mol_type = other DNA
gtacattttctaaagagtatgcatggaaagacttcttgaatgggattcattgtgatgtcataccaacaaaacaaattcag

SEQ ID NO: 61102 - DNA, 80 bp, synthetic construct
  source 1..80: mol_type = other DNA
aggtttaacacagagcaggttcaaggagtacgacatatggtattgtttaagactgaatctggatttgaatggggaaagcc

SEQ ID NO: 61103 - DNA, 80 bp, synthetic construct
  source 1..80: mol_type = other DNA
gggatttgttgattagcacggaggagactgaatctaagaaaatgagaggtatagtaaagatacttgagccggtcaggttg

SEQ ID NO: 61104 - DNA, 80 bp, synthetic construct
  source 1..80: mol_type = other DNA
ctaaaaccttcaatctgagcaccaagcaggtatccttactggacccttatgatttaactgaattagaaagtattgttaga

SEQ ID NO: 61105 - DNA, 80 bp, synthetic construct
  source 1..80: mol_type = other DNA
tcgatagcaggcgagcttgctcatatattttgaatcttattccagacacacctggatcatatctaattcatgatatggca

SEQ ID NO: 61106 - DNA, 80 bp, synthetic construct
  source 1..80: mol_type = other DNA
tcaataatcataagagtggagagaaatatggccaacaaattgagagtctaaatatagcaagtcatattgttcaatctgag

SEQ ID NO: 61107 - DNA, 80 bp, synthetic construct
  source 1..80: mol_type = other DNA
tctgtcagcttaataaccaagatcttatctgacttggagttaaatatcactgagccttcaactcaggagttcctgacaac

SEQ ID NO: 61108 - DNA, 80 bp, synthetic construct
  source 1..80: mol_type = other DNA
caaacacacttatgttgatacagtattggataagttttttcaaaatgaaacgcaaaaatatttaattgacattttaaaga

SEQ ID NO: 61109 - DNA, 80 bp, synthetic construct
  source 1..80: mol_type = other DNA
tactgtattcaggatgggtccaggtttagttgataaagagaatttggatactatcttgcttgatggtgagtatcaatggg

SEQ ID NO: 61110 - DNA, 80 bp, synthetic construct
  source 1..80: mol_type = other DNA
ggatgggtccaggtttagttgataaagagaatttggatactatcttgcttgatggtgagtatcaatggggggtttcaaaa

SEQ ID NO: 61111 - DNA, 80 bp, synthetic construct
  source 1..80: mol_type = other DNA
caaaccatttccttttgtcagtttgtcaaaagatgaaactctgtgcaatttttgataacctgagataccttataccagct

SEQ ID NO: 61112 - DNA, 80 bp, synthetic construct
  source 1..80: mol_type = other DNA
caggctttccttccctgatagaaaaactctttgaaagacctttcaagtcagcattggaagtttatgtttattataatata

SEQ ID NO: 61113 - DNA, 80 bp, synthetic construct
  source 1..80: mol_type = other DNA
tggtgaatcactagtggagaatggttacatgatgtgggaactcatagaaaatcctgacttggcagaacaacagctgtatt

SEQ ID NO: 61114 - DNA, 80 bp, synthetic construct
  source 1..80: mol_type = other DNA
gccaagatgctatcgaactggcagcaatagaattaaacaaggtgttgtccacaaagtcaagtgttgttgcaaatagtata

SEQ ID NO: 61115 - DNA, 80 bp, synthetic construct
  source 1..80: mol_type = other DNA
aagctatggctaggatagttagaaaataccagaggacagaggctgatagaggcttctttattaccacattggcaacaagg

SEQ ID NO: 61116 - DNA, 80 bp, synthetic construct
  source 1..80: mol_type = other DNA
tgtagactagagataattgaggactattatgatgctattgcaaaaaatattacagaagagtatatttcctatggaggtga

SEQ ID NO: 61117 - DNA, 80 bp, synthetic construct
  source 1..80: mol_type = other DNA
aaagaagatcttggccatccagggggcactagaaaaggctctgaggtgggcatctggtgaaagttttatagaactgagca

SEQ ID NO: 61118 - DNA, 80 bp, synthetic construct
  source 1..80: mol_type = other DNA
gcaaagtttcggagatttactgctatgttacacaatggacttcctaatgataaattaaaaaactgtgtcattgatgctct

SEQ ID NO: 61119 - DNA, 80 bp, synthetic construct
  source 1..80: mol_type = other DNA
aaagcaagtctataaaacagatttctttatgtcaagaaaactaagaaattatattgatagcatggaaaatcatgaccctc

SEQ ID NO: 61120 - DNA, 80 bp, synthetic construct
  source 1..80: mol_type = other DNA
tattcaagcagatttggtcccaattatttccggaacttgactgcttttttgaatttgcacaccattcagatgatgcatta

SEQ ID NO: 61121 - DNA, 80 bp, synthetic construct
  source 1..80: mol_type = other DNA
ttcaacttacatgaacatatcctacttctcggctctataaaaatttcacctaagaaaactactgtctcccctaccaatgc

SEQ ID NO: 61122 - DNA, 80 bp, synthetic construct
  source 1..80: mol_type = other DNA
tgtaaaggcacttgatttgggcgcttcacctcaggtagcacaattagccgtagccttgtgcacaagtaaggttgaaagat

SEQ ID NO: 61123 - DNA, 80 bp, synthetic construct
  source 1..80: mol_type = other DNA
tgtatgggacagcacccgggatggtcaaccacccagctgcatatctccaagtaaaacatagtgatacaccgatcccgtta

SEQ ID NO: 61124 - DNA, 80 bp, synthetic construct
  source 1..80: mol_type = other DNA
ttgctgctgcaaatagctttgcagaaggctatgtccctgataatcaggatatagatttattccagacattaacaagttgc

SEQ ID NO: 61125 - DNA, 80 bp, synthetic construct
  source 1..80: mol_type = other DNA
tccgagttaagccccataaagaagttctccaggcagtgtcgatttttaataggaaagaggatatagggcagcaaaaagac

SEQ ID NO: 61126 - DNA, 80 bp, synthetic construct
  source 1..80: mol_type = other DNA
tcaaggtgtaagacacatggtcctgtttaaaactgagtccggttttgaatgggggaagccaaatattccctgtatagtct

SEQ ID NO: 61127 - DNA, 80 bp, synthetic construct
  source 1..80: mol_type = other DNA
acggtctccgtgctatcgcacagcacgatgaggatagtccccggtttctattagcacatgctttccatacaattagggac

SEQ ID NO: 61128 - DNA, 80 bp, synthetic construct
  source 1..80: mol_type = other DNA
accgaggagtcaagctatatttaaatcctattatttcttcagggttattagagaactttatgaaaaacctccctgcagct

SEQ ID NO: 61129 - DNA, 80 bp, synthetic construct
  source 1..80: mol_type = other DNA
gggatttgttgataagcacagaagaaactgaggttaaaaagatgaggggtattgtaaaaatacttgagcctgtaaggtta

SEQ ID NO: 61130 - DNA, 80 bp, synthetic construct
  source 1..80: mol_type = other DNA
gggtggggtgagtgtgtcattgatcaatttgacacccttgataaagaagcccaaagcatggtagtcaataagtggatctg

SEQ ID NO: 61131 - DNA, 80 bp, synthetic construct
  source 1..80: mol_type = other DNA
tcctgaagatgttataccagattcattgttttcttttcgacacacaatggtgttgttacgccgtttatttccacaggatt

SEQ ID NO: 61132 - DNA, 80 bp, synthetic construct
  source 1..80: mol_type = other DNA
tcgtaaacctaggaattttctcttaatacagtgttctctgattacatcgtataagcctgccaccacattatcagatcaaa

SEQ ID NO: 61133 - DNA, 80 bp, synthetic construct
  source 1..80: mol_type = other DNA
agtctattagtagctttggcgcaaaataataaggctcggttctattcaaaagtcaaattattagggttaactgtagatca

SEQ ID NO: 61134 - DNA, 80 bp, synthetic construct
  source 1..80: mol_type = other DNA
tatcttcttctgttacaattattgaagcaatacgctatttatcaaattcacgacataatcctagtctattgaaactgtat

SEQ ID NO: 61135 - DNA, 80 bp, synthetic construct
  source 1..80: mol_type = other DNA
gaggcttcttcattaccacattggcaacaagatgtagactagaaataattgaggactattatgatgctattgcaaaaaat

SEQ ID NO: 61136 - DNA, 80 bp, synthetic construct
  source 1..80: mol_type = other DNA
ttgaaagattgtatggaacagcacctgggatggtcaaccacccagctgcatatctccaagtaaaacatagtgatacacca

SEQ ID NO: 61137 - DNA, 80 bp, synthetic construct
  source 1..80: mol_type = other DNA
attgaagctcataaaccctagcaacaccttagacttatctggtcttgagaccacaggagatgggtttagcacagttagtt

SEQ ID NO: 61138 - DNA, 80 bp, synthetic construct
  source 1..80: mol_type = other DNA
tgcaggatgtagactttgaaaacattgacattgaggcagatattgagcattttctccaggatgaaagcttttacactggg

SEQ ID NO: 61139 - DNA, 80 bp, synthetic construct
  source 1..80: mol_type = other DNA
gctaaatttcgtagattcacttccatgctgcataatggtttacctaatgacaaacttaaaaattgtgtaatcgatgccct

SEQ ID NO: 61140 - DNA, 80 bp, synthetic construct
  source 1..80: mol_type = other DNA
aaaacatgtttataagacagacttttttatgtcacgaaaactaagaaactatattgatggtatggaaagccttgatcctc

SEQ ID NO: 61141 - DNA, 80 bp, synthetic construct
  source 1..80: mol_type = other DNA
gtgcttaccggttaaaatcaatgtccttagtaaagaccataagggtaaaaccccataaagaggttttgcaagcagtttca

SEQ ID NO: 61142 - DNA, 80 bp, synthetic construct
  source 1..80: mol_type = other DNA
ttcaaggagtaagacatatggtcctcttcaaaacggaatctgggttcgaatggggaaaaccaaatattccctgcattgta

SEQ ID NO: 61143 - DNA, 80 bp, synthetic construct
  source 1..80: mol_type = other DNA
gagtgaagttgtacttgaatcccattatatcatctggcttattagagaattttagaagaacccctcctgctgctatccca

SEQ ID NO: 61144 - DNA, 80 bp, synthetic construct
  source 1..80: mol_type = other DNA
aacaggggatggttttaccactgtcagttcgatgtcaagcagactctggtctgaagaaatgagccttgttgatgatgaag

SEQ ID NO: 61145 - DNA, 80 bp, synthetic construct
  source 1..80: mol_type = other DNA
gggatttgttgattagtacagaggaaactgagtctaagaaaatgagaggcatagtgaaaatacttgaacctatcagacta

SEQ ID NO: 61146 - DNA, 80 bp, synthetic construct
  source 1..80: mol_type = other DNA
ttataaggggattgaaccaattggagcaagtattgaggacttagttgattatgctaaagagtggctatctagggctagaa

SEQ ID NO: 61147 - DNA, 80 bp, synthetic construct
  source 1..80: mol_type = other DNA
ttgatagcaggcgagcctgtgcatacatattaaatcttatacctgatacgccagcatcacatttaattcatgacatggca

SEQ ID NO: 61148 - DNA, 80 bp, synthetic construct
  source 1..80: mol_type = other DNA
atggcatatcggtatattaacctaacacgtgatgatgtgattaacttttatgcacctagaattaactttcaacctaccca

SEQ ID NO: 61149 - DNA, 80 bp, synthetic construct
  source 1..80: mol_type = other DNA
gaatattaaggaacctggaacattcaagttaacttcaagtatgttgcgggcagaatcaaaagcaatgttagatcttttga

SEQ ID NO: 61150 - DNA, 80 bp, synthetic construct
  source 1..80: mol_type = other DNA
ataatcataagcctggtgaaaagcatgggttaaaaattgaaagcctgaatgtcggaagtcacattgtgcaatcagaatca

SEQ ID NO: 61151 - DNA, 80 bp, synthetic construct
  source 1..80: mol_type = other DNA
gttagtctgataactaaaatcctctcggacttagagctaaacatcactgagccatcatctcaagaatttcaaaccacaaa

SEQ ID NO: 61152 - DNA, 80 bp, synthetic construct
  source 1..80: mol_type = other DNA
aatattggtcattacactcttgcaataatggaaatgttgtgttgtttattcttccatccaaatctttagaagtggcaggg

SEQ ID NO: 61153 - DNA, 80 bp, synthetic construct
  source 1..80: mol_type = other DNA
tcctttataaggtttataacagtttttaggatggggccaggtttagttgataaagataatctagacactgtattagttga

SEQ ID NO: 61154 - DNA, 80 bp, synthetic construct
  source 1..80: mol_type = other DNA
tggggattcgcaatggggtgtatcaaaagttatgagtattgatttgaatagattgcttgcactgaatatagcatttgaaa

SEQ ID NO: 61155 - DNA, 80 bp, synthetic construct
  source 1..80: mol_type = other DNA
gtttattagttgcactagcacagaataataaagcgaggttttattcaaaagtaaagttgctgggtttaacagtggaccag

SEQ ID NO: 61156 - DNA, 80 bp, synthetic construct
  source 1..80: mol_type = other DNA
tggaatgggctctcaagtttcgagagaaggaggaaatgtttggagaatcccttgttgaaaatggttacatgattggtgag

SEQ ID NO: 61157 - DNA, 80 bp, synthetic construct
  source 1..80: mol_type = other DNA
ttgaaagaggacccaagattggctgaacagcaattatactgtcaagatgcagtggagcttgcagctattgagctcaataa

SEQ ID NO: 61158 - DNA, 80 bp, synthetic construct
  source 1..80: mol_type = other DNA
gttatcacagccatggagaagaaagttatccctaatcatccaacaggaaaaaacttaaaggcatttttcaagatgacccc

SEQ ID NO: 61159 - DNA, 80 bp, synthetic construct
  source 1..80: mol_type = other DNA
taattgaggctattcggtatttatccaattcccgacataacccgagtttattgaaactatatgaagaaacaagagagcac

SEQ ID NO: 61160 - DNA, 80 bp, synthetic construct
  source 1..80: mol_type = other DNA
atcagcgtactgaggccgatcgtggtttctttattacaacactacctactaggtgtcgattagagatcattgaagactat

SEQ ID NO: 61161 - DNA, 80 bp, synthetic construct
  source 1..80: mol_type = other DNA
atatatcttatggaggggagaagaaaatcttagctattcaatctgcttcggaaaaagcattaagatgggcatctggcgaa

SEQ ID NO: 61162 - DNA, 80 bp, synthetic construct
  source 1..80: mol_type = other DNA
ataagttgaaggattgtgtaattgatgcactaaaacaagtctataagacagacttttttatgtctaggaagctacggaat

SEQ ID NO: 61163 - DNA, 80 bp, synthetic construct
  source 1..80: mol_type = other DNA
tatctagacaatatggaatcacatgatcctcatattaagcaattccttgatttctttccagatggtcatcacggagaagt

SEQ ID NO: 61164 - DNA, 80 bp, synthetic construct
  source 1..80: mol_type = other DNA
agacaattacaaaattacaggatcaacaattgagttcatagaggtcacagtaacagcagatgttgatagaggaattagag

SEQ ID NO: 61165 - DNA, 80 bp, synthetic construct
  source 1..80: mol_type = other DNA
ccttggtgcctctccgcagatagctcagttggctgttgcactgtgtactagtaaggttgaaagattatatggaacagcag

SEQ ID NO: 61166 - DNA, 80 bp, synthetic construct
  source 1..80: mol_type = other DNA
agaagaggctcaagtatgaagcaggcttggcctatgtagagcaagagctgcacaactttttcctgaagggcgagctggcc

SEQ ID NO: 61167 - DNA, 80 bp, synthetic construct
  source 1..80: mol_type = other DNA
tcttagctgctgctaatagctatgcagacacttattcacttacgaatcaggaccttgacctcttccagacactgacaaac

SEQ ID NO: 61168 - DNA, 80 bp, synthetic construct
  source 1..80: mol_type = other DNA
cagatgtgttggacacagcccgatttcctgattcattgtctgttgatttaaaaacaatgaaagacggtgtgtacagggaa

SEQ ID NO: 61169 - DNA, 80 bp, synthetic construct
  source 1..80: mol_type = other DNA
gtgcatattggttaaaatcaatgtcacttgtaaagacaataagggtaaagccccataaggaggtacttcaggctgtttct

SEQ ID NO: 61170 - DNA, 80 bp, synthetic construct
  source 1..80: mol_type = other DNA
cagccatatagaatagtttttaatgttgtagcagtgaggactgatggttcaaacatcacaacacaatggccaagtcggcg

SEQ ID NO: 61171 - DNA, 80 bp, synthetic construct
  source 1..80: mol_type = other DNA
caatgtgcagcattaatgattgcagacgttaagggtgattattctgtccttcaactccaagcaaatcgacgtgcatattc

SEQ ID NO: 61172 - DNA, 80 bp, synthetic construct
  source 1..80: mol_type = other DNA
tgggaagcagtatgatgcttactgtgtgcaaacatacaatgagatgacaaagttatatgaaggagatttacgtgttacat

SEQ ID NO: 61173 - DNA, 80 bp, synthetic construct
  source 1..80: mol_type = other DNA
caggctttgagtggggaaaaccaaatgtaccgtgcattgtttataagaactgtgtcctccgtacaagcttgcggacaaca

SEQ ID NO: 61174 - DNA, 80 bp, synthetic construct
  source 1..80: mol_type = other DNA
ggcataaaactgtacttaaatccaataatttcatctggactgtttgaaaattttatgaaaaacttgccagctgcaattcc

SEQ ID NO: 61175 - DNA, 80 bp, synthetic construct
  source 1..80: mol_type = other DNA
tgttaagattaataaatccacataatacattagacttatctggtcttgaaacaaccggtgagggatttagtactgttatc

SEQ ID NO: 61176 - DNA, 80 bp, synthetic construct
  source 1..80: mol_type = other DNA
tctatgtctagtcggctgtggtcagaggagatgagcttagtagatgatgaggaggaattagaggatgagtttactattga

SEQ ID NO: 61177 - DNA, 80 bp, synthetic construct
  source 1..80: mol_type = other DNA
aaaatgagaggaatagttaaaatcttggagccagttaggttaataaaaagctgggtatcaaggggcttatcaatagagaa

SEQ ID NO: 61178 - DNA, 80 bp, synthetic construct
  source 1..80: mol_type = other DNA
ggttggtgggaatgtgtcattgaccagtttgacacatttgatagggaggcacagctgttggtgcagaataagggtatttg

SEQ ID NO: 61179 - DNA, 80 bp, synthetic construct
  source 1..80: mol_type = other DNA
acgagcagcccttgaggctatgtttaatttaaagttcaatataagttctgtaaaaaaccagccatattatattcctgatt

SEQ ID NO: 61180 - DNA, 80 bp, synthetic construct
  source 1..80: mol_type = other DNA
atagaggcattgatccaataggtgcaaatatagatgacttggttcaatactcccgtgagtggttgtctaaggcacagaat

SEQ ID NO: 61181 - DNA, 80 bp, synthetic construct
  source 1..80: mol_type = other DNA
ttttcattcttcgaagtaaaaggaacatctgtttttgagtgctttaatgtcaatgaagctgaccactgcttaaagtaccc

SEQ ID NO: 61182 - DNA, 80 bp, synthetic construct
  source 1..80: mol_type = other DNA
tatgtccagacacccaagaaatttcctcctaattcaatgctctttaataacaccttataaaccagctactatactttcag

SEQ ID NO: 61183 - DNA, 80 bp, synthetic construct
  source 1..80: mol_type = other DNA
accagatagatagtcgcagagcctgttcattcattctgaatcttataccggatacacctgcatcatttttaatacatgat

SEQ ID NO: 61184 - DNA, 80 bp, synthetic construct
  source 1..80: mol_type = other DNA
gcaatgtgattctattcatcctcccttcaaagtcactagaagtggcaggttcctttatacggtttatcactgtttttagg

SEQ ID NO: 61185 - DNA, 80 bp, synthetic construct
  source 1..80: mol_type = other DNA
gtttcccttcattaatagaaaagctgtttgaccgcccatttaaatctgcactggaagtgtatgtttattacaatatcaag

SEQ ID NO: 61186 - DNA, 80 bp, synthetic construct
  source 1..80: mol_type = other DNA
agccttttagtagcacttgcacaaaataacaaagccaggttttattctaaggtgaagttattaggcttgactgttgacca

SEQ ID NO: 61187 - DNA, 80 bp, synthetic construct
  source 1..80: mol_type = other DNA
tgatgctattgcaaagaatataactgaagagtatatctcatacggaggtgaaaagaaaattctcgcaattcaaggggcac

SEQ ID NO: 61188 - DNA, 80 bp, synthetic construct
  source 1..80: mol_type = other DNA
gccaagttccggagatttacatcaatgttgcataatggtcttcccaataacaagttgaaaaattgtgtgattgatgcact

SEQ ID NO: 61189 - DNA, 80 bp, synthetic construct
  source 1..80: mol_type = other DNA
taagcaggtttataagacagatttttttatgtcaaggaaattaagaaattatattgatagcatggaaagtcttgatccac

SEQ ID NO: 61190 - DNA, 80 bp, synthetic construct
  source 1..80: mol_type = other DNA
aaaaaagaggctgaaatacgaggccggactaacatatattgagcaagaactgcataagtttttccttaaaggcgaaatcc

SEQ ID NO: 61191 - DNA, 80 bp, synthetic construct
  source 1..80: mol_type = other DNA
gggataatttgcttatttacttagttaggaagctaaatgacccgagcattgtaactgccatgaccatgcaatcaccttta

SEQ ID NO: 61192 - DNA, 80 bp, synthetic construct
  source 1..80: mol_type = other DNA
ttttagctgcagcaaatagctttgctgaaagttacattccaactagtcaggacatagatttatttcagacattaacaagt

SEQ ID NO: 61193 - DNA, 80 bp, synthetic construct
  source 1..80: mol_type = other DNA
tgcacattttctaaagaatatgcatggaaagactttttaaatggaattcattgtgatgttatcccaacaaagcaagttca

SEQ ID NO: 61194 - DNA, 80 bp, synthetic construct
  source 1..80: mol_type = other DNA
gcgcctactggttaaaatcaatgtccttagtgaaaactataagagtaaagcctcacaaagaagttctgcaggcagtctca

SEQ ID NO: 61195 - DNA, 80 bp, synthetic construct
  source 1..80: mol_type = other DNA
ctcagccatataagataatcttcaatgttgttgcggtgcgcacagatggttcgaatatcacaacacagtggccaagtagg

SEQ ID NO: 61196 - DNA, 80 bp, synthetic construct
  source 1..80: mol_type = other DNA
atctttaatcgtaaggaggatattggacaacagaaggatttagctgctcttaaattatgtatagaagtatggagatggtg

SEQ ID NO: 61197 - DNA, 80 bp, synthetic construct
  source 1..80: mol_type = other DNA
gattttgtagagtgggtgtcccacccattgatcctgaaatacaatgtgctgctctgatgatagctgacataaaaggggat

SEQ ID NO: 61198 - DNA, 80 bp, synthetic construct
  source 1..80: mol_type = other DNA
tactctgtgttgcaattgcaagctaacagaagggcatactcagggaaacaatatgatgcatattgtgttcagacatataa

SEQ ID NO: 61199 - DNA, 80 bp, synthetic construct
  source 1..80: mol_type = other DNA
gtgcaaggcttgaaatattctgggataaacgggcatacatattagagacatcaattacacagaaacatgtattaaagatt

SEQ ID NO: 61200 - DNA, 80 bp, synthetic construct
  source 1..80: mol_type = other DNA
gggttaaactctatctaaatcctatcatttcatctggtctgctggaaaatttcatgaaaaatctgcctgctgcaatacca

SEQ ID NO: 61201 - DNA, 80 bp, synthetic construct
  source 1..80: mol_type = other DNA
gaccttttaaagctcatcaatcctagcaatacattggacctttcaggcctagagacaactggtgatggtttcagcacggt

SEQ ID NO: 61202 - DNA, 80 bp, synthetic construct
  source 1..80: mol_type = other DNA
ctcgtaaagccagaaactttctattgattcagtgctccttaattaactttcacaagcctgctactacattatctgaccag

SEQ ID NO: 61203 - DNA, 80 bp, synthetic construct
  source 1..80: mol_type = other DNA
attgatagtagacgggcatgttcatatatcttaaaccttatccctgatacacgtgcatcacatttggtccatgacatggc

SEQ ID NO: 61204 - DNA, 80 bp, synthetic construct
  source 1..80: mol_type = other DNA
tagtagtattcccctaaaaaaacaaactctgaaaagaatggataaatatagagaaattcacaataagttgaaggagtttt

SEQ ID NO: 61205 - DNA, 80 bp, synthetic construct
  source 1..80: mol_type = other DNA
tggggaatctttagtagaaaatggatatatgatgtgggaattacgggagaatgctgagttagctgaacaacaactgtact

SEQ ID NO: 61206 - DNA, 80 bp, synthetic construct
  source 1..80: mol_type = other DNA
caaaacataagagagcctggtacattcaagctgacatcaagcatgttaagggcagaatcaaaggcaatgctggatctgct

SEQ ID NO: 61207 - DNA, 80 bp, synthetic construct
  source 1..80: mol_type = other DNA
caacaatcataagagtggtgaaaaacatggtgaacagatagaaagcttgaatattgcgagccatatagtacagtctgagt

SEQ ID NO: 61208 - DNA, 80 bp, synthetic construct
  source 1..80: mol_type = other DNA
ggtaacaaaaattctatctgacctagaattgaatataactgagccatcaacccaagagtattctactacaaaacacacct

SEQ ID NO: 61209 - DNA, 80 bp, synthetic construct
  source 1..80: mol_type = other DNA
cagtggggtgtctcaaaggttatgagtattgatctaaatagattacttgcattaaatattgcctttgagaaggcattgat

SEQ ID NO: 61210 - DNA, 80 bp, synthetic construct
  source 1..80: mol_type = other DNA
tgccatcagatctgtatttgcaaatcactttttactggctatttgccaaaaaatgaaactttgtgcaatttttgataatc

SEQ ID NO: 61211 - DNA, 80 bp, synthetic construct
  source 1..80: mol_type = other DNA
tttgcaggggttccatctaacatcattacagcattagagaagaaagtcataccaactcacccaacagacaagaatctcaa

SEQ ID NO: 61212 - DNA, 80 bp, synthetic construct
  source 1..80: mol_type = other DNA
cattggtagaaaacggctatatgatgtgggagcttcgagaaaatgcagaattggctgagcagcaattatattgtcaagat

SEQ ID NO: 61213 - DNA, 80 bp, synthetic construct
  source 1..80: mol_type = other DNA
gctgtagaattagcagccattgaattgaataaagttttatccaccaagtctagtgtagtagcaaatagtatattgaataa

SEQ ID NO: 61214 - DNA, 80 bp, synthetic construct
  source 1..80: mol_type = other DNA
aaattgggaagaaccatattttagtcagacaagaaatattagtcttaaaggcatgtcagggcaagtccaggaggatggtc

SEQ ID NO: 61215 - DNA, 80 bp, synthetic construct
  source 1..80: mol_type = other DNA
acgacacaaccctagcttattaaagctgtacgaagaaacaagagagcagaaggcaatggccaggattgtaaggaaatacc

SEQ ID NO: 61216 - DNA, 80 bp, synthetic construct
  source 1..80: mol_type = other DNA
agagaacagaagcagatagaggtttcttcatcacaacactcccgactcggtgccggctagaaattattgaggactattat

SEQ ID NO: 61217 - DNA, 80 bp, synthetic construct
  source 1..80: mol_type = other DNA
tggagaagtaaaagggaactggctacaaggcaacttaaacaagtgctcatctctatttggtgtagcaatgccattgttgt

SEQ ID NO: 61218 - DNA, 80 bp, synthetic construct
  source 1..80: mol_type = other DNA
ctgataattacaaaattaatggaacgactatcgactttttagaagttactgtaacagctgatgttgataaaggcataagg

SEQ ID NO: 61219 - DNA, 80 bp, synthetic construct
  source 1..80: mol_type = other DNA
ttaagcaagtgtggaataatctgtttcctgagcttgattgcttctttgaatttgctcaccactcagatgatgccctgttt

SEQ ID NO: 61220 - DNA, 80 bp, synthetic construct
  source 1..80: mol_type = other DNA
gcaccaggtatggtgaatcaccctgctgcatacttgcatgttaaacacggcgatacacctatcccgttagggggaaatgg

SEQ ID NO: 61221 - DNA, 80 bp, synthetic construct
  source 1..80: mol_type = other DNA
tcataggttattcacacaaaagacagaagtcaatgttatatattcttggcctgtttaagtttttgatgaatttatcgaat

SEQ ID NO: 61222 - DNA, 80 bp, synthetic construct
  source 1..80: mol_type = other DNA
gagaaaaaaatgaaatatgaagcaggtttggcatatattgaacaggaactacacaagtttttcctaaagggtgagattcc

SEQ ID NO: 61223 - DNA, 80 bp, synthetic construct
  source 1..80: mol_type = other DNA
gcaaccgtataagataacatttaatgtagttgcagtccggacagatggttcaaacatcactacacagtggcccagtagaa

SEQ ID NO: 61224 - DNA, 80 bp, synthetic construct
  source 1..80: mol_type = other DNA
taagggtaaagccccataaggaagttcttcaagctgtatcaatttttaaccggaaagaagacattggccagcaaaaggat

SEQ ID NO: 61225 - DNA, 80 bp, synthetic construct
  source 1..80: mol_type = other DNA
ctggctgccctaaagttatgtatagaagtctggagatggtgtaaagcaaataatgcaccatatagggattggtttcaggc

SEQ ID NO: 61226 - DNA, 80 bp, synthetic construct
  source 1..80: mol_type = other DNA
ggggcaaacctaacattccctgtattgtttataagaattgtgttcttagaaccagtttaaggaccacacaggcaattaac

SEQ ID NO: 61227 - DNA, 80 bp, synthetic construct
  source 1..80: mol_type = other DNA
gaccttttaaagcttattaaccctaataacacgttagacctttctggtctagagacagcaggagatgggtttagtactgt

SEQ ID NO: 61228 - DNA, 80 bp, synthetic construct
  source 1..80: mol_type = other DNA
tagctccatgtcaagcagactatggtctgaagaaatgagcctggtcgatgatgatgaagaacttgatgatgagttcacaa

SEQ ID NO: 61229 - DNA, 80 bp, synthetic construct
  source 1..80: mol_type = other DNA
cctacaggatgtggactttgaaaatatagatatggaggcagatattgagcacttcttacaagatgagagttcctatacag

SEQ ID NO: 61230 - DNA, 80 bp, synthetic construct
  source 1..80: mol_type = other DNA
tgtaaagatacttgagcctgttagattaattaagagctgggtatcacgaggtttatctattgagaaagtatatagtcctg

SEQ ID NO: 61231 - DNA, 80 bp, synthetic construct
  source 1..80: mol_type = other DNA
caaaaacttttaatctaagtacaaagcaggtttcgctgttggacccatatgatttgactgaattagaaagtatcgttcga

SEQ ID NO: 61232 - DNA, 80 bp, synthetic construct
  source 1..80: mol_type = other DNA
ggttggggagaatgtgtaattgatcaatttgaaagtctcgatagggaggctcaaagcatggtggttaataaaggaatatg

SEQ ID NO: 61233 - DNA, 80 bp, synthetic construct
  source 1..80: mol_type = other DNA
aaggttatttccacaggattctatttcatctttctactaggctttctttcttcttcattttccggagcgtactactacta

SEQ ID NO: 61234 - DNA, 80 bp, synthetic construct
  source 1..80: mol_type = other DNA
actacaagggtatagatccaataggggcaaatattgaggacttggtggattattccagggagtggttatctagggctaga

SEQ ID NO: 61235 - DNA, 80 bp, synthetic construct
  source 1..80: mol_type = other DNA
tcttcgaggtcaaaggcacagcagtttttgattgttttaattcaaatgaagcaacccattgtcaaaagtaccctatgtcc

SEQ ID NO: 61236 - DNA, 80 bp, synthetic construct
  source 1..80: mol_type = other DNA
caaaatgtgaaagagcctggaacatttaaactaacatcaagtatgctgagagcagagtcaaaggcaatgctagatcttct

SEQ ID NO: 61237 - DNA, 80 bp, synthetic construct
  source 1..80: mol_type = other DNA
aaataatcataaaagtggtgaaaagcatggtgagcagatagagagtttaaacatcgccagccatattgtgcaatccgaat

SEQ ID NO: 61238 - DNA, 80 bp, synthetic construct
  source 1..80: mol_type = other DNA
taataacaaaaatcctgtctgacttagaattaaatataactgagccatcaactcaagaatattcaacaactaagcatact

SEQ ID NO: 61239 - DNA, 80 bp, synthetic construct
  source 1..80: mol_type = other DNA
attggacctggcttagtggacaaggataatctagatacaattctaattgatggtgaatcccaatggggggtgtcaaaagt

SEQ ID NO: 61240 - DNA, 80 bp, synthetic construct
  source 1..80: mol_type = other DNA
tttgcaggggttccttccaacattataacagcattggaaaagaagatcataccaaatcaccccacagggaaaaaccttaa

SEQ ID NO: 61241 - DNA, 80 bp, synthetic construct
  source 1..80: mol_type = other DNA
tggggaaacactagtagaaaatggttacatgatgtgggagcttagagagaatgctgaattagctgagcagcaattatatt

SEQ ID NO: 61242 - DNA, 80 bp, synthetic construct
  source 1..80: mol_type = other DNA
gtcaagatgctgtagaattagcagcaatagagttaaataaagtgctgtctacaaagtctaatgtggttgctaatagtata

SEQ ID NO: 61243 - DNA, 80 bp, synthetic construct
  source 1..80: mol_type = other DNA
ctaggcataaccccagtcttttaaagttgtatgaagaaacaagagaacaaaaagcaatggcaagaattgtaaggaaatat

SEQ ID NO: 61244 - DNA, 80 bp, synthetic construct
  source 1..80: mol_type = other DNA
agaagaagattcttgcaattcaaggggcactggaaaaggcactaaggtgggcatcaggtgagagcttcattgaacttagc

SEQ ID NO: 61245 - DNA, 80 bp, synthetic construct
  source 1..80: mol_type = other DNA
acggtgaagtgaaaggaaactggttacaaggcaatttaaataagtgttcgtcactttttggtgtggcaatgtctttattg

SEQ ID NO: 61246 - DNA, 80 bp, synthetic construct
  source 1..80: mol_type = other DNA
tgcaatgtcaataatggaactagcaacagctgggatagggatgtcagataagaatcttttaaagcgtgcattaataggtt

SEQ ID NO: 61247 - DNA, 80 bp, synthetic construct
  source 1..80: mol_type = other DNA
attcacacaagaggcaaaagtcaatgctatacatcctgggcctatttaaattcttaatgaacttatctgatgagacattc

SEQ ID NO: 61248 - DNA, 80 bp, synthetic construct
  source 1..80: mol_type = other DNA
attggacagcaaaaggatttagctgcccttaaattgtgtatagaagtatggagatggtgtaaagcaaacaatgcaccata

SEQ ID NO: 61249 - DNA, 80 bp, synthetic construct
  source 1..80: mol_type = other DNA
gggtaaagttatacctaaaccccataatctcatcaggtttacttgaaaatttcatgaaaaaccttcctgctgctatccca

SEQ ID NO: 61250 - DNA, 80 bp, synthetic construct
  source 1..80: mol_type = other DNA
aacaggggatgggttcagtactgtcagctcaatgtctagccgtttgtggtcagaagaaatgagtctagttgatgatgatg

SEQ ID NO: 61251 - DNA, 80 bp, synthetic construct
  source 1..80: mol_type = other DNA
tgaggggtatagtgaagatacttgaacctgttaggttaatcaaaagttgggtatcacggggtctatctattgagaaagta

SEQ ID NO: 61252 - DNA, 80 bp, synthetic construct
  source 1..80: mol_type = other DNA
ggggttggggagagtgtgttatcgatcaatttgagagtcttgatagagaggcccagagtatggttatcaataaagggata

SEQ ID NO: 61253 - DNA, 80 bp, synthetic construct
  source 1..80: mol_type = other DNA
ttacaaaggtattgagccaataggagcaaatatagaggacttagttgaatactcaaaagaatggctgtctagggcaagga

SEQ ID NO: 61254 - DNA, 80 bp, synthetic construct
  source 1..80: mol_type = other DNA
tctttgaagtgaagggcactgcagtttttgactgctttaattcaaatgaaacacttcactgccaaaagtatcctatgtct

SEQ ID NO: 61255 - DNA, 80 bp, synthetic construct
  source 1..80: mol_type = other DNA
cgtaaacctagaaatttcttacttatacaatgctccctgataacatcatacaagccagctactactttatctgatcaaat

SEQ ID NO: 61256 - DNA, 80 bp, synthetic construct
  source 1..80: mol_type = other DNA
agtttagaaaaatggaaaaatatagagagattcatcagagagttagggaacttgctcctggaagtgcatcagcattagag

SEQ ID NO: 61257 - DNA, 80 bp, synthetic construct
  source 1..80: mol_type = other DNA
atagcatttaaatatttaagtcttacaaaggatgaactcataaatttttatagtcctagggtgcactttcaagcaagttc

SEQ ID NO: 61258 - DNA, 80 bp, synthetic construct
  source 1..80: mol_type = other DNA
aaatgtaaaagaaccaggaacaataaaattaggcctgtctcaattgaatccgttatctaaatcagtattagataatgttg

SEQ ID NO: 61259 - DNA, 80 bp, synthetic construct
  source 1..80: mol_type = other DNA
agttaatgcttgtgctaaagttgtggagcagattctttcaaatttagaaattaacatcggggaaacaaacacaggtatgc

SEQ ID NO: 61260 - DNA, 80 bp, synthetic construct
  source 1..80: mol_type = other DNA
catccccacataaaaccacaggtgtagatgagttgctcaataagttctatgataatgaaatcggtaagtatatgttatcc

SEQ ID NO: 61261 - DNA, 80 bp, synthetic construct
  source 1..80: mol_type = other DNA
ggtctagttgattcagacaatattgactctagagtagatattgatggggttgtatggtgttattcaaaagtaatgagtat

SEQ ID NO: 61262 - DNA, 80 bp, synthetic construct
  source 1..80: mol_type = other DNA
gggcaagaaagtttcaggccaaagaagcaaaatatggggatatccttctaaaggaaggctatacaatagagtcagtaata

SEQ ID NO: 61263 - DNA, 80 bp, synthetic construct
  source 1..80: mol_type = other DNA
atacagaatgctctagaaaaggcacttaggtgggcatcaggtatgtctgaaataaccactagtacaggcaaagtgatcaa

SEQ ID NO: 61264 - DNA, 80 bp, synthetic construct
  source 1..80: mol_type = other DNA
tgtcccggaagctacatcgatatattgatagcatggatgagcattcagatgctgttaacgattttttagcattcttttct

SEQ ID NO: 61265 - DNA, 80 bp, synthetic construct
  source 1..80: mol_type = other DNA
ggtggcgtttctgctgctgttaaaggtaattggttgcagggtaatctaaataaatgttcatcactatatggtgctgcaat

SEQ ID NO: 61266 - DNA, 80 bp, synthetic construct
  source 1..80: mol_type = other DNA
tcctgtttagagaggtgtggaagcagctgtttccagaattagaatgctttttcgaatttgctcaccactcagatgatgca

SEQ ID NO: 61267 - DNA, 80 bp, synthetic construct
  source 1..80: mol_type = other DNA
aagaaggtctcaaatttgttgaaagtctacttgaaactgaagcacggaaaggtaacctaacacaagtatacaggataact

SEQ ID NO: 61268 - DNA, 80 bp, synthetic construct
  source 1..80: mol_type = other DNA
aaatactggcagcagctgacagctttgccacagtttatcaaccaagtgagagagatatggatttgttcaatacactggtg

SEQ ID NO: 61269 - DNA, 80 bp, synthetic construct
  source 1..80: mol_type = other DNA
agctgtacattctcaaaggaatatgcatggaaggactttctaaatgaagtacgatgcgaggtattaacaacaaggcatgt

SEQ ID NO: 61270 - DNA, 80 bp, synthetic construct
  source 1..80: mol_type = other DNA
ataagtatgcgatgactgttgatgaaatcagtgatgttctagatagtgcattcttccctgaatccttgtcagctgacttg

SEQ ID NO: 61271 - DNA, 80 bp, synthetic construct
  source 1..80: mol_type = other DNA
caggttatgaaagatggggtttatcgagagcttggattggatataagctctccagaggtcttaaagcgcatagctccatt

SEQ ID NO: 61272 - DNA, 80 bp, synthetic construct
  source 1..80: mol_type = other DNA
ggctaaaggccatgtcattaattaagacaattagggttcgaccaaagaaagaggttttgaaagctatgtctttgtatagc

SEQ ID NO: 61273 - DNA, 80 bp, synthetic construct
  source 1..80: mol_type = other DNA
gttaaagaaaatataggcctacaagatgatattgcggctacacgattgtgtatagagatttggcgatggtgtaaggctaa

SEQ ID NO: 61274 - DNA, 80 bp, synthetic construct
  source 1..80: mol_type = other DNA
aggaatacatcctagaaacttctattacccaaagacatgtcttgaggcttctgatggaagaagtatctcaggagttagtt

SEQ ID NO: 61275 - DNA, 80 bp, synthetic construct
  source 1..80: mol_type = other DNA
cgatgtggtatgagattcaaaacagagcaagtcaatcaaacaagaagtttagtgttatttaaaacagaatctggatttga

SEQ ID NO: 61276 - DNA, 80 bp, synthetic construct
  source 1..80: mol_type = other DNA
atggtgttgtacagcacatgcgcttagtccaggctgacataaactatgttcgagaacacctaattagagttgatgagagg

SEQ ID NO: 61277 - DNA, 80 bp, synthetic construct
  source 1..80: mol_type = other DNA
catatcatacgttgcgtgacattcgctatcaagctgttcaggcagtgggaaatgtttggttcaggacggagcagcataaa

SEQ ID NO: 61278 - DNA, 80 bp, synthetic construct
  source 1..80: mol_type = other DNA
acaaccctgttgggataattcttatggctagatatatgtcaaaaacatataactttaactcaacacccttagcattatta

SEQ ID NO: 61279 - DNA, 80 bp, synthetic construct
  source 1..80: mol_type = other DNA
gcatcccttgaggcaatgttcaacttgaaatttcatgtctctggaccaaagttgaggtattttaatgttcctgattatag

SEQ ID NO: 61280 - DNA, 80 bp, synthetic construct
  source 1..80: mol_type = other DNA
aatccttatgatctcacagagttagaaagtgtagttaagggctggggtgagacagtcaatgatagatttaaagaattaga

SEQ ID NO: 61281 - DNA, 80 bp, synthetic construct
  source 1..80: mol_type = other DNA
aggatgtccttcctgactctttattttcatttaggcatgtagatgttctcttgcgtaggctttttccacgtgatcctgtg

SEQ ID NO: 61282 - DNA, 80 bp, synthetic construct
  source 1..80: mol_type = other DNA
tctaagttttattgaacagaattcttatcttgtttatccattatgtaatgtttagtgttcttttcccggagcgggtcgca

SEQ ID NO: 61283 - DNA, 80 bp, synthetic construct
  source 1..80: mol_type = other DNA
gccacaacaactttgtaatcctaggatagacaaccttatacattattgcaagaattggttaacagaagaacataaatttg

SEQ ID NO: 61284 - DNA, 80 bp, synthetic construct
  source 1..80: mol_type = other DNA
tattcagggaggttacaggggctgctgtgatccatacatttgaagagcatgagcaggtgcatttgaataagtataatgag

SEQ ID NO: 61285 - DNA, 80 bp, synthetic construct
  source 1..80: mol_type = other DNA
tcgaggaagcctcgaaattttttactaattcaattaacagtacaaggggcctacctcccttctacaataagttctgacca

SEQ ID NO: 61286 - DNA, 80 bp, synthetic construct
  source 1..80: mol_type = other DNA
gtcgccgtggcctctttaaagaaccaatggcgtacagaaaacgtggagcgcgccctgaggcgaatataaataataatgat

SEQ ID NO: 61287 - DNA, 80 bp, synthetic construct
  source 1..80: mol_type = other DNA
aatcgaccaaagaggaatctaaacaattacttgaagtgttaaaaacaaaggaagaacatcagaaggaaatacagtatgaa

SEQ ID NO: 61288 - DNA, 80 bp, synthetic construct
  source 1..80: mol_type = other DNA
attctacaaaaaacaataccgacatttgaaccaaaagagtcaatattaaagaaattagagaatattaagccagaacaagc

SEQ ID NO: 61289 - DNA, 80 bp, synthetic construct
  source 1..80: mol_type = other DNA
aggatgatgaaaagcaagataaaagcaataaaacgcaattatctgataaagtactttcaaagaaagaggatgttataact

SEQ ID NO: 61290 - DNA, 80 bp, synthetic construct
  source 1..80: mol_type = other DNA
atgctccagtgaattggggacacggagagattaatgattcaactacagtggaaccagttttagatggtccttatcaacca

SEQ ID NO: 61291 - DNA, 80 bp, synthetic construct
  source 1..80: mol_type = other DNA
acactatctcagctgtttttaaccaaaggatggccaacaggttcagtttattttaatgaatattcaaacgttttagaatt

SEQ ID NO: 61292 - DNA, 80 bp, synthetic construct
  source 1..80: mol_type = other DNA
ttccatcgacccaaagctatactgcgattataatgttgtgctaattaaattcgtttctggtgaggagctggacatatctg

SEQ ID NO: 61293 - DNA, 80 bp, synthetic construct
  source 1..80: mol_type = other DNA
atcgaatgcacaaaattatggaataaatttgccaattactggatctatggatacagcatatgctaactcaacacaagaca

SEQ ID NO: 61294 - DNA, 80 bp, synthetic construct
  source 1..80: mol_type = other DNA
gaatcatccggagactcccatacaggtgctagcaagggatattgcacttaagtatgttatgctggacaaagatgatctca

SEQ ID NO: 61295 - DNA, 80 bp, synthetic construct
  source 1..80: mol_type = other DNA
taaattactataatcctagaacatactttaaacaaactgcaaatatcaaggaaccaggaacatttaaaataaatctttct

SEQ ID NO: 61296 - DNA, 80 bp, synthetic construct
  source 1..80: mol_type = other DNA
tctatggatcccaaagccaaggcacttttagatgtgatatcaaagaactcaaagaaaggtatatttggtgagaaaattga

SEQ ID NO: 61297 - DNA, 80 bp, synthetic construct
  source 1..80: mol_type = other DNA
aaccctaggagaacaacaggtgttgacgatatattgaaaaagttctatgacaatgaattaattaagtacatgatgcatat

SEQ ID NO: 61298 - DNA, 80 bp, synthetic construct
  source 1..80: mol_type = other DNA
tgtcagaaagactacagcatggcatatgggacatttactcagggatatcacggagtgtttaatagcccatgcgggtttac

SEQ ID NO: 61299 - DNA, 80 bp, synthetic construct
  source 1..80: mol_type = other DNA
gccgctcaaaatattggtcagtccatgggttttcacatggtgggatattgttaatgattcttccatcaaaatcattagag

SEQ ID NO: 61300 - DNA, 80 bp, synthetic construct
  source 1..80: mol_type = other DNA
gtggcaggttcctacataaggttttttactgtctttaaagatggtttaggtttgattgattatgacaatttagattcaac

SEQ ID NO: 61301 - DNA, 80 bp, synthetic construct
  source 1..80: mol_type = other DNA
tgcatctatagatggtgttacctggtgttttagcaaaataatgagtttagatttaaatagattgttggcattaaatattg

SEQ ID NO: 61302 - DNA, 80 bp, synthetic construct
  source 1..80: mol_type = other DNA
gctataagcctttaattgtcaagttttttgagaggccatttaaaagtgcacttgatgtttatctttatacagttataaaa

SEQ ID NO: 61303 - DNA, 80 bp, synthetic construct
  source 1..80: mol_type = other DNA
acattgcttgtgagtttggcacagaacaataaaattagattttattccagagtgaggttattgggtctgactgtagatca

SEQ ID NO: 61304 - DNA, 80 bp, synthetic construct
  source 1..80: mol_type = other DNA
agagtgaaatccaacttagtatgggacaaacaattaagttgaaaagaaaattgatgtatgtaagtgcagatgcaacaaaa

SEQ ID NO: 61305 - DNA, 80 bp, synthetic construct
  source 1..80: mol_type = other DNA
actttctctctttttttcctaataaagtatcagctgccatcaaaggtaattggctgcaagggaatttgaacaaatgctct

SEQ ID NO: 61306 - DNA, 80 bp, synthetic construct
  source 1..80: mol_type = other DNA
tcattatttggtgctgctgtctctttattatttaggaaagtctggaatttattatatcctgaactagattgtttcttcga

SEQ ID NO: 61307 - DNA, 80 bp, synthetic construct
  source 1..80: mol_type = other DNA
atatgggtgcatcacctcaattagcacagctagggattgtcttatgcacaagtaaggtagaaagattatatggtactgct

SEQ ID NO: 61308 - DNA, 80 bp, synthetic construct
  source 1..80: mol_type = other DNA
tatattgggactttttaaatttcttatgagcttaagtgatgatgtatttcaacatgatcgtcttggagagttcagctttg

SEQ ID NO: 61309 - DNA, 80 bp, synthetic construct
  source 1..80: mol_type = other DNA
agattttaaaatatcaagcagggttggaatacattgaacaactgcttcagcaagaagcagccaaaggaaatgtccctagt

SEQ ID NO: 61310 - DNA, 80 bp, synthetic construct
  source 1..80: mol_type = other DNA
tctatgaccaatattctggaaagtatcttcagttatggacagaacaacatccggtttatgactatattattccacgtggg

SEQ ID NO: 61311 - DNA, 80 bp, synthetic construct
  source 1..80: mol_type = other DNA
gctgctgcagattcctttgcacaaagctttaaaccatcacaaagtgatatggaactgtttcaaacacttgttaactgcac

SEQ ID NO: 61312 - DNA, 80 bp, synthetic construct
  source 1..80: mol_type = other DNA
accggccaaagattgcaaggactttcacagtcaaagagagggatcaggcaatccaaaattctataacagcagtaattgga

SEQ ID NO: 61313 - DNA, 80 bp, synthetic construct
  source 1..80: mol_type = other DNA
tcattgtcaacggatttacaggtaatgagagaaggggtgtatagagagttgggtcttgatataaattatccaaatgtctt

SEQ ID NO: 61314 - DNA, 80 bp, synthetic construct
  source 1..80: mol_type = other DNA
gaaacgagttgcaccattattatacaaagcagggaagtcaagagtagtaattgtccaaggaaatattgagggaacagcag

SEQ ID NO: 61315 - DNA, 80 bp, synthetic construct
  source 1..80: mol_type = other DNA
ggctatcgtataaaatttgatgtagtagcagtgaggacagatggatctaatatttcaacgcaatggcccagccagagaaa

SEQ ID NO: 61316 - DNA, 80 bp, synthetic construct
  source 1..80: mol_type = other DNA
gcggtttcactatttagtaagaaagagaagataggtgatttgacccacttagctgcttcaaggttgtgtatagatatatg

SEQ ID NO: 61317 - DNA, 80 bp, synthetic construct
  source 1..80: mol_type = other DNA
gagatggtgcaaagcaaatgagcaggaacccaaggcttggcttggagctttatattttgaaggaagaacattaatgcaat

SEQ ID NO: 61318 - DNA, 80 bp, synthetic construct
  source 1..80: mol_type = other DNA
gggttgatgtttttttggataaaggtgttgtccctgttgaccctgaaattcaatgcatgggtttaatgatccatgaccta

SEQ ID NO: 61319 - DNA, 80 bp, synthetic construct
  source 1..80: mol_type = other DNA
actgggcagaagaacctattacagatgcaagcaaataggcgagcatactccgggaagcaatatgatgcatattgtgttca

SEQ ID NO: 61320 - DNA, 80 bp, synthetic construct
  source 1..80: mol_type = other DNA
aaggcatgtactaaaaattttaatggaagaagtaacaaaggaattattaaggtgtgggatgaggtttaagacagaacaag

SEQ ID NO: 61321 - DNA, 80 bp, synthetic construct
  source 1..80: mol_type = other DNA
gaacaggtttaagagtaaaacaccctataaataagtcgttcacaataacaatacaggcaggtggattcagagcaatggca

SEQ ID NO: 61322 - DNA, 80 bp, synthetic construct
  source 1..80: mol_type = other DNA
caattagatgaagacaatccacggtttttattagcacatgcataccacaatttaaaggatgtgagataccaagcattaca

SEQ ID NO: 61323 - DNA, 80 bp, synthetic construct
  source 1..80: mol_type = other DNA
agctatagggaatatatggtttaaaacgcaacaacataaattatttataaatcctatcatctctgcaggcctgttggaaa

SEQ ID NO: 61324 - DNA, 80 bp, synthetic construct
  source 1..80: mol_type = other DNA
acaggatgagtcagcatacactggtgatttattgatccaaactgatgatacagagataaagagacttagggggatgacca

SEQ ID NO: 61325 - DNA, 80 bp, synthetic construct
  source 1..80: mol_type = other DNA
ggatccttgaaccaataaaattgatcaaaagttgggtatctaagggtttgtcgattgagaaagtttatagtccagtgggt

SEQ ID NO: 61326 - DNA, 80 bp, synthetic construct
  source 1..80: mol_type = other DNA
ataatattgatggctaggtatatgtctaaacattatgagttcaataagatcccactttcattgttgaacccttatgacct

SEQ ID NO: 61327 - DNA, 80 bp, synthetic construct
  source 1..80: mol_type = other DNA
tacagagtttgagagcatagttaagggttggggtgaatgtgtcaatgacaggtttatcgaatatgatcaggaggcagaaa

SEQ ID NO: 61328 - DNA, 80 bp, synthetic construct
  source 1..80: mol_type = other DNA
agagatcagctttggaagcaatgttcaatttgaaattccatgttagtgggcctaaggctcgaacatttgatattccagat

SEQ ID NO: 61329 - DNA, 80 bp, synthetic construct
  source 1..80: mol_type = other DNA
ctggagaagtgtcagcagttgaatgtctggatctcctggatagattctatgctgtgagacatgatgttgttgatcagatg

SEQ ID NO: 61330 - DNA, 80 bp, synthetic construct
  source 1..80: mol_type = other DNA
gaaagatacaacccgtcaaggaagcctagaaattttttactaatacaaggaactatacaaggtccttatctaccatcaac

SEQ ID NO: 61331 - DNA, 80 bp, synthetic construct
  source 1..80: mol_type = other DNA
tagcaagggatattgcacttaagtatgttatgctggacaaagatgatcttataaattactataaccctagaacatacttt

SEQ ID NO: 61332 - DNA, 80 bp, synthetic construct
  source 1..80: mol_type = other DNA
aaacaaactgcaaatatcaaggaaccaggaacatttaaaataaatctttcttctatggatcccaaagccaaggcactttt

SEQ ID NO: 61333 - DNA, 80 bp, synthetic construct
  source 1..80: mol_type = other DNA
agatgtgatatcaaagaactcaaagaaaggtatatttggtgagaaaattgatagtattgaaataagtagtcttatacaac

SEQ ID NO: 61334 - DNA, 80 bp, synthetic construct
  source 1..80: mol_type = other DNA
atacagcaggcacttgaaaaagcattacgatgggcatcaggtgagagtgaaatccaacttagcatgggacaaacaattaa

SEQ ID NO: 61335 - DNA, 80 bp, synthetic construct
  source 1..80: mol_type = other DNA
gttgaaaagaaaattgatgtatgtaagtgcagatgcaacaaaatggtcaccaggggacaattcagccaagtttaggagat

SEQ ID NO: 61336 - DNA, 80 bp, synthetic construct
  source 1..80: mol_type = other DNA
ttctcaaagtagatagggcatcaatccctattccgttaggtggtgatggatccatgtcaataatggagctggcaacagca

SEQ ID NO: 61337 - DNA, 80 bp, synthetic construct
  source 1..80: mol_type = other DNA
accaggatccttgaaccaataaaattgatcaaaagttgggtgtctaaggggttgtcaattgaaaaagtttatagtccagt

SEQ ID NO: 61338 - DNA, 80 bp, synthetic construct
  source 1..80: mol_type = other DNA
accggcctcaacaattatgcaaacccaacatcaccaatctgttggactattgtaagaattggttgactcgtgagcatgaa

SEQ ID NO: 61339 - DNA, 80 bp, synthetic construct
  source 1..80: mol_type = other DNA
tattgcttcagatcaatacgatacaaaagttggttgtttagagatcttaaagaatcatccggaaactcccatacaggtgc

SEQ ID NO: 61340 - DNA, 80 bp, synthetic construct
  source 1..80: mol_type = other DNA
tcaatggaaagtatttaccccgaaatccgaattcgagttctatgaccaatattctggaaagtatcttcagttgtggacag

SEQ ID NO: 61341 - DNA, 80 bp, synthetic construct
  source 1..80: mol_type = other DNA
aacaacatccggtttatgactatattattccacgtgggagagataatctgctggtatacttagtaagaaaactaaatgat

SEQ ID NO: 61342 - DNA, 80 bp, synthetic construct
  source 1..80: mol_type = other DNA
aggtaatgagagaaggggtgtatagagagttgggtcttgatataaattatccaaatgtcctgaaacgagttgcaccgtta

SEQ ID NO: 61343 - DNA, 80 bp, synthetic construct
  source 1..80: mol_type = other DNA
ttatacaaggcagggaagtcaagagtagtaattgtccaaggaaatattgagggaacagcagaatcaatatgtagctattg

SEQ ID NO: 61344 - DNA, 80 bp, synthetic construct
  source 1..80: mol_type = other DNA
acaagactatttactagaaacatctattacccaaaggcatgtactaaaaatcttaatggaagaagtaacaaaggaattat

SEQ ID NO: 61345 - DNA, 80 bp, synthetic construct
  source 1..80: mol_type = other DNA
agtaaggaaaacaacagcctggcatatggggcatttgttaagggatataactgaatgtctaattgcacatgctggcttga

SEQ ID NO: 61346 - DNA, 80 bp, synthetic construct
  source 1..80: mol_type = other DNA
tgagatatttgatccctgctgtgacttcactttattcaggatataaaccattgattataaagttttttgaaaggccattt

SEQ ID NO: 61347 - DNA, 80 bp, synthetic construct
  source 1..80: mol_type = other DNA
tgatgtgtacttgtacactattataaaaacactacttgtaagccttgcacaaaataataaaatccgtttttactcaaagg

SEQ ID NO: 61348 - DNA, 80 bp, synthetic construct
  source 1..80: mol_type = other DNA
gatcggggatttaactcatcttgctgccacaagactgtgtattgatgtctggaggtggtgtaaagctaatgaacaagatc

SEQ ID NO: 61349 - DNA, 80 bp, synthetic construct
  source 1..80: mol_type = other DNA
ttcttttcaaaactgatgcaggctttgaatggggtaagcccaatatcccctgtattgtgttcagaaactgtgcactacgc

SEQ ID NO: 61350 - DNA, 80 bp, synthetic construct
  source 1..80: mol_type = other DNA
tagctagagatatggcattgaaatacataatgttagataaagatgatcttataaattattacaaccctagggcatatttt

SEQ ID NO: 61351 - DNA, 80 bp, synthetic construct
  source 1..80: mol_type = other DNA
ttaaacaaactgccaatgtgaaagagcctgggactttcaaactaaacttatcttcaatggatccaaaagccaaggcacta

SEQ ID NO: 61352 - DNA, 80 bp, synthetic construct
  source 1..80: mol_type = other DNA
ttagatgtgatctctaaaaattcaaagaaaggtgtattcggtgagatcattgacagcattgaaataagcagcttaataca

SEQ ID NO: 61353 - DNA, 80 bp, synthetic construct
  source 1..80: mol_type = other DNA
agaatgattgctgcaaggtaatagagaagatattgtcagacttagagatcaatgttggtgaaacaaaccagggactagac

SEQ ID NO: 61354 - DNA, 80 bp, synthetic construct
  source 1..80: mol_type = other DNA
aatcccaagaggacaactggtgttgatgacattttaaagaaattctatgacaatgagctagtgaaatacatgttacagat

SEQ ID NO: 61355 - DNA, 80 bp, synthetic construct
  source 1..80: mol_type = other DNA
ttgttagaaagacagcagcttggcacatgggccatttgctgcgggacataacagaatgtttgattgctcatgccggtcta

SEQ ID NO: 61356 - DNA, 80 bp, synthetic construct
  source 1..80: mol_type = other DNA
aggcgatcaaaatattggtctatacatggattttcccatggtgggatactattgatgatattaccatcaaaatcactaga

SEQ ID NO: 61357 - DNA, 80 bp, synthetic construct
  source 1..80: mol_type = other DNA
ccgcatctattgatggtgtcacatggtgctttagtaaaatcatgagcttggatttgaatcgtttattggccctcaatata

SEQ ID NO: 61358 - DNA, 80 bp, synthetic construct
  source 1..80: mol_type = other DNA
tcttttgaaaaaacattattggcaactgctacatggtttcaatactatacagaggatcagggccactttcctttacaaca

SEQ ID NO: 61359 - DNA, 80 bp, synthetic construct
  source 1..80: mol_type = other DNA
taaaagtgcacttgatgtatatctttatacaattataaagacattacttgtaagtctggcacaaaataacaaaatacggt

SEQ ID NO: 61360 - DNA, 80 bp, synthetic construct
  source 1..80: mol_type = other DNA
aatgataaggaaagaaattatggttcttatataatggaagaaggttacacaataaaagacataattgatggtaatgtcct

SEQ ID NO: 61361 - DNA, 80 bp, synthetic construct
  source 1..80: mol_type = other DNA
agtagagcaacagctgttctgtcaggaggttgtggaattatcagcaatggaattaaatacatatttagaagcaaaatcac

SEQ ID NO: 61362 - DNA, 80 bp, synthetic construct
  source 1..80: mol_type = other DNA
gcgtcacattgattgaggcaataagattcttaaatcaatctcagcagaatccatcagtccttgaaatgtatgaacagacg

SEQ ID NO: 61363 - DNA, 80 bp, synthetic construct
  source 1..80: mol_type = other DNA
atcaagttaaaacgaaaattgatgtatgtaagtgcagatgcaaccaaatggtcaccaggtgacaattctgcaaaatttag

SEQ ID NO: 61364 - DNA, 80 bp, synthetic construct
  source 1..80: mol_type = other DNA
aaaagtttttaaaataccaagcaggcctagagtatatagagcagctgcttcatcacgaatcagagagggggaacctacca

SEQ ID NO: 61365 - DNA, 80 bp, synthetic construct
  source 1..80: mol_type = other DNA
taagaaggaaaaaattggcgatttaactcatcttgctgctacaagattatgtgttgacgtttggagatggtgtaaagcta

SEQ ID NO: 61366 - DNA, 80 bp, synthetic construct
  source 1..80: mol_type = other DNA
actgggcataagaacctcctacaaatacaggcaaatagacgagcttactctggaaaacagtatgatgcctattgtgtccg

SEQ ID NO: 61367 - DNA, 80 bp, synthetic construct
  source 1..80: mol_type = other DNA
gtgcacgcttagaagttttttgggacaaacaagattatttattagaaacatcaataacacagcggcatgttctgaagata

SEQ ID NO: 61368 - DNA, 80 bp, synthetic construct
  source 1..80: mol_type = other DNA
tgaaagatgtcagataccaagcgttgcaggcaataggtaacatatggtttaaaacccaacagcacaaattgttcataaac

SEQ ID NO: 61369 - DNA, 80 bp, synthetic construct
  source 1..80: mol_type = other DNA
gatcaaccagactacactattgacttggatgacattgattttgaaacaatagatttgaaagaagacattgaacatttttt

SEQ ID NO: 61370 - DNA, 80 bp, synthetic construct
  source 1..80: mol_type = other DNA
atataccagattatcgccctcaacaattgtgtcatcctaatatagacaaccttctcagttattgtaagaactggctgaca

SEQ ID NO: 61371 - DNA, 80 bp, synthetic construct
  source 1..80: mol_type = other DNA
agagaacatgaatttgcctttgaggaagtaaaaggacagagggtttttaacatatttgaagaggaagagattaaacataa

SEQ ID NO: 61372 - DNA, 80 bp, synthetic construct
  source 1..80: mol_type = other DNA
gagaggtatacatcatcacggaaaccaaggaattttctattgatccaggggactgttcaagggccttatttaccttcaac

SEQ ID NO: 61373 - DNA, 80 bp, synthetic construct
  source 1..80: mol_type = other DNA
aatagcttcagaccagtatgatacaaaagttggttgtctagaaatactgaaaaatcacccagacacaccagtacaaattc

SEQ ID NO: 61374 - DNA, 80 bp, synthetic construct
  source 1..80: mol_type = other DNA
ttggccagagacatggcattaaagtatataatgttagataaagatgacattgtaaattactataatcctcgagcatattt

SEQ ID NO: 61375 - DNA, 80 bp, synthetic construct
  source 1..80: mol_type = other DNA
ttaggcaaacagctaatgtgaaagaacctgggacttttaaattaaatttgtcttcaatggacccaaaagccaaggcatta

SEQ ID NO: 61376 - DNA, 80 bp, synthetic construct
  source 1..80: mol_type = other DNA
ctagacgtgatttctaaaaactctaagaaaggtgtatttggtgaaactattgatagtattgaaataagcagtttaataca

SEQ ID NO: 61377 - DNA, 80 bp, synthetic construct
  source 1..80: mol_type = other DNA
agaatgattgttcaaaggtaatagaaaagatattatcagatttagagattaatgttggtgagacaaatcaaggattagac

SEQ ID NO: 61378 - DNA, 80 bp, synthetic construct
  source 1..80: mol_type = other DNA
agcccaaagagaacaactggtgttgatgatatgttaaagaaattttatgacaatgagctagttaagtatatgttacagat

SEQ ID NO: 61379 - DNA, 80 bp, synthetic construct
  source 1..80: mol_type = other DNA
agttagaaagacaacagcttggcacatgggccatttattacgggatgtaaccgagtgcttgatagcacatgctggcttac

SEQ ID NO: 61380 - DNA, 80 bp, synthetic construct
  source 1..80: mol_type = other DNA
ggcggtcaaaatattggtctatgcatggattctcacatggtggaatgctattgatgatattgccatcaaaatcacttgaa

SEQ ID NO: 61381 - DNA, 80 bp, synthetic construct
  source 1..80: mol_type = other DNA
tgcatctattgatggtgtgacctggtgttttagcaaggtaatgagtttagatctgaatcggctattggcacttaatatat

SEQ ID NO: 61382 - DNA, 80 bp, synthetic construct
  source 1..80: mol_type = other DNA
ctttcgagaaaacactgttagctactgccacatggtttcagtattacacagaggatcaaggtcattttcccttacaacat

SEQ ID NO: 61383 - DNA, 80 bp, synthetic construct
  source 1..80: mol_type = other DNA
tgtgtgctatttttgacaacctaagatatctaattcctgcagtgacttcactttattctggatataaaccactaattgtg

SEQ ID NO: 61384 - DNA, 80 bp, synthetic construct
  source 1..80: mol_type = other DNA
aaattctttgagagacctttcaaaagtgcacttgatgtgtacctatatacaattattaagacattgcttgtaagtttagc

SEQ ID NO: 61385 - DNA, 80 bp, synthetic construct
  source 1..80: mol_type = other DNA
acaaaataacaaaatacggttttattcaaaagtaagactactgggactaactgttgatcagtcaactattggtgctagtg

SEQ ID NO: 61386 - DNA, 80 bp, synthetic construct
  source 1..80: mol_type = other DNA
aggttacacgataaaggatataacagatggtaatgtcccagttgaacagcaattgttttgtcaagaggttgtggagctag

SEQ ID NO: 61387 - DNA, 80 bp, synthetic construct
  source 1..80: mol_type = other DNA
cagctatggaattaaatacatatttagaagcaaagtcacaagtaatggcagctaacattatgaacaagcattgggatcgt

SEQ ID NO: 61388 - DNA, 80 bp, synthetic construct
  source 1..80: mol_type = other DNA
catcagtgttagaaatgtatgagcagacaaagagacaaaaggcaatggcacggattgtgcggaaatatcaacgaacagaa

SEQ ID NO: 61389 - DNA, 80 bp, synthetic construct
  source 1..80: mol_type = other DNA
acatacagcaggcccttgaaaaggctttacggtgggcatcaggtgagagtgaaatccagcttagtatgggtcaagttatt

SEQ ID NO: 61390 - DNA, 80 bp, synthetic construct
  source 1..80: mol_type = other DNA
ccttattcggggcagcagtatccctgttatttaggaaagtttggaatctcctgtatccagaattagattgttttttcgag

SEQ ID NO: 61391 - DNA, 80 bp, synthetic construct
  source 1..80: mol_type = other DNA
catgggtgcatgccctcaactggcacaattaggaattgttttatgtacaagcaaagtagaacgactttatgggactgctg

SEQ ID NO: 61392 - DNA, 80 bp, synthetic construct
  source 1..80: mol_type = other DNA
gttgcaagagggacacgggagaagtttttaaaatatcaagcaggccttgagtatatcgagcaattacttcatcaggaatc

SEQ ID NO: 61393 - DNA, 80 bp, synthetic construct
  source 1..80: mol_type = other DNA
aacaacatcctgtgtatgattacatcattccacgtggtagggataatttgctagtgtatcttgttaggaaattgaacgat

SEQ ID NO: 61394 - DNA, 80 bp, synthetic construct
  source 1..80: mol_type = other DNA
cctagtatagtgacagccatgaccatgcagtcacctctccaactacggtttagaatgcaagcaaagcagcatatgaaagt

SEQ ID NO: 61395 - DNA, 80 bp, synthetic construct
  source 1..80: mol_type = other DNA
tctttgtcgactgacttacaggtcatgagagagggagtctaccgggaattaggactggacataaactatccgaatgtctt

SEQ ID NO: 61396 - DNA, 80 bp, synthetic construct
  source 1..80: mol_type = other DNA
ggaaagagggaatttaccaggtgggtatcggataaaatttgatgttgtggccataaggacagatggatcaaatatatcta

SEQ ID NO: 61397 - DNA, 80 bp, synthetic construct
  source 1..80: mol_type = other DNA
aaaaagggtagctcctttgctgtataaagccggaaaatcaagagtggtgattgtacaagggaatattgaggggactgcag

SEQ ID NO: 61398 - DNA, 80 bp, synthetic construct
  source 1..80: mol_type = other DNA
aagctgtttccctgtttagtaaaaaagaaaaaattggagatttaacccatcttgctgcaacacgattgtgtattgatgtg

SEQ ID NO: 61399 - DNA, 80 bp, synthetic construct
  source 1..80: mol_type = other DNA
gggtggatgtttttttggataagggagttgtcccagttgatccagaaatccagtgtatgggcttaatgatatatgaccta

SEQ ID NO: 61400 - DNA, 80 bp, synthetic construct
  source 1..80: mol_type = other DNA
acaggccaaaaaaatcttctacaaatacaggcaaatagacgagcttattctggaaaacagtatgatgcatattgtgttca

SEQ ID NO: 61401 - DNA, 80 bp, synthetic construct
  source 1..80: mol_type = other DNA
gaatcctagaacccattaaactaataaaaagctgggtatcaaaaggtctatcaattgaaaaagtatatagccctgtgggt

SEQ ID NO: 61402 - DNA, 80 bp, synthetic construct
  source 1..80: mol_type = other DNA
ataatactaatggctagatatatgtcaaagcattatgacttccacaaagccccattatccctattgaatccttatgattt

SEQ ID NO: 61403 - DNA, 80 bp, synthetic construct
  source 1..80: mol_type = other DNA
aacagaatttgaaagtattgttaaaggctggggtgagtgtgtgaatgataggttcattgaatatgatcatgaggcggaga

SEQ ID NO: 61404 - DNA, 80 bp, synthetic construct
  source 1..80: mol_type = other DNA
aggatgtacttcctgattctcttttttcttttaggcatgctgatattctccttaggagattgtttccaaaggactcagct

SEQ ID NO: 61405 - DNA, 80 bp, synthetic construct
  source 1..80: mol_type = other DNA
ctggagaggtatctgcagtagaatgcttggacttgttagatagattttatgctgtgagacatgatgttgtagaccagatg

SEQ ID NO: 61406 - DNA, 80 bp, synthetic construct
  source 1..80: mol_type = other DNA
caatagcttcagaccaatatgatacaaaggtagggtgtttagaaatactaaagaaccacccagatactccaatccagatt

SEQ ID NO: 61407 - DNA, 80 bp, synthetic construct
  source 1..80: mol_type = other DNA
caaaattcaataacagctgtaattgggtacaaatatgctaataaagctgatgaaataagtgatgtgctagacagtgcagt

SEQ ID NO: 61408 - DNA, 80 bp, synthetic construct
  source 1..80: mol_type = other DNA
gctgtgtcattatttagtaagaaagaaaagattggggatttaactcaccttgcagctacaaggctatgcattgatgtctg

SEQ ID NO: 61409 - DNA, 80 bp, synthetic construct
  source 1..80: mol_type = other DNA
aattgtatgaaggggatttaagagtaacattcaattttgggattgactgtgcccgcttggagattttttgggacaagcag

SEQ ID NO: 61410 - DNA, 80 bp, synthetic construct
  source 1..80: mol_type = other DNA
tccttatcgactgacctacaggtcatgagagagggagtataccgagaattagggctggatataaattatcctaatgtttt

SEQ ID NO: 61411 - DNA, 80 bp, synthetic construct
  source 1..80: mol_type = other DNA
aaaacgtgtggctcctttgttgtataaagcagggaaatcaagagttgtgattgtacaaggaaatattgagggcactgcag

SEQ ID NO: 61412 - DNA, 80 bp, synthetic construct
  source 1..80: mol_type = other DNA
aaatcttttactattaccatacaagcaggcgggtttcgggcaatggcacaactttatgaggaaaatccgagatttctttt

SEQ ID NO: 61413 - DNA, 80 bp, synthetic construct
  source 1..80: mol_type = other DNA
ggcacatgcctaccataatttgaaagatgtcagataccaagcgttgcaggcaataggtaacatatggtttaaaacccaac

SEQ ID NO: 61414 - DNA, 80 bp, synthetic construct
  source 1..80: mol_type = other DNA
tatacgtgttggtgatgtacaagtagaacaacaggtattttgtcaggaggttgtggaattgagtgcagaagaactcaaca

SEQ ID NO: 61415 - DNA, 80 bp, synthetic construct
  source 1..80: mol_type = other DNA
agtacttgcaagcaaaaagtcaggtcgtatcatctaatatcatgaataaacattgggacaagccatattttagtcaaaca

SEQ ID NO: 61416 - DNA, 80 bp, synthetic construct
  source 1..80: mol_type = other DNA
aattagatttttaaataggtcacagactaatcctaatgttattgacatgtatgagcagacaaagcagcataaagcccaag

SEQ ID NO: 61417 - DNA, 80 bp, synthetic construct
  source 1..80: mol_type = other DNA
tcaaagcaatggacttaggggcatccccgcagttggcacaattagctgttgttatttgcactagtaaagttgagagattg

SEQ ID NO: 61418 - DNA, 80 bp, synthetic construct
  source 1..80: mol_type = other DNA
atggggtagaccaaatgtgccatgtattgtcttcaagcattgtgctttgcgtacaggtttaaggaccaagcaagccatta

SEQ ID NO: 61419 - DNA, 80 bp, synthetic construct
  source 1..80: mol_type = other DNA
cagaggaagttgaggtaaaaaggataagaggtgtaacacgtgtgcttgaaccggttaaactaattaagagctgggtttca

SEQ ID NO: 61420 - DNA, 80 bp, synthetic construct
  source 1..80: mol_type = other DNA
tttgtttttagggaagttacgggcaataatgttatgaactcatttgagaataatgaggatgtatatatgtctagatacag

SEQ ID NO: 61421 - DNA, 80 bp, synthetic construct
  source 1..80: mol_type = other DNA
gggcttctgcattagagtgtttagatttgcttgaccgtctttatgcagtcagacatgatgtagttgaccagatgattaag

SEQ ID NO: 61422 - DNA, 80 bp, synthetic construct
  source 1..80: mol_type = other DNA
ccaaatttgttggctgtgccgattggcgctaatgggccatggagcgctcatacaagcctagtggcagtagccactatgat

SEQ ID NO: 61423 - DNA, 80 bp, synthetic construct
  source 1..80: mol_type = other DNA
gctatgtgctctattgtttgccttttcatgggtgatgctgagtatgtgaaggtgataaggggccatggcgtggttgtttt

SEQ ID NO: 61424 - DNA, 80 bp, synthetic construct
  source 1..80: mol_type = other DNA
aactgttgttgtttctcatgtctttagtgttttgttagtgccacactgggtcacagtgttcctaatagttgcttttagaa

SEQ ID NO: 61425 - DNA, 80 bp, synthetic construct
  source 1..80: mol_type = other DNA
ttgttaggttaattggagtggttgttggtgaaaaaatagaagttagaaatgctgagggaaaagttacaagtgtcacatca

SEQ ID NO: 61426 - DNA, 80 bp, synthetic construct
  source 1..80: mol_type = other DNA
acaacaacatcctggttgaaccgtatttctggatttgtccagtccaaatttacccaaaaagttagaactggtataatgtc

SEQ ID NO: 61427 - DNA, 80 bp, synthetic construct
  source 1..80: mol_type = other DNA
aacagctagagtgatacctaatggtgtcgttattgttgagtcaaaagaaagctcaggcactggcttcagggttcaaaatt

SEQ ID NO: 61428 - DNA, 80 bp, synthetic construct
  source 1..80: mol_type = other DNA
acatagttacagccggacatgttgttggcaatgaaacacaaataaaggttaagtggggagatgttaatgtttatacaaaa

SEQ ID NO: 61429 - DNA, 80 bp, synthetic construct
  source 1..80: mol_type = other DNA
gttgtttacgtgcatcccaggaaggatatggcttatcttgccttaccatcagagtatcaagcactcccaacatataaatt

SEQ ID NO: 61430 - DNA, 80 bp, synthetic construct
  source 1..80: mol_type = other DNA
gcttgaagagattttttcatgtggtgggcctttgtgttttggctatggtgatgttgagactactcgtgtctcaaatggag

SEQ ID NO: 61431 - DNA, 80 bp, synthetic construct
  source 1..80: mol_type = other DNA
tgctaagttgattgaggatggcaccgttgtcataacatcaatggaggactgtggtgtccttgccgttgcggttacagaag

SEQ ID NO: 61432 - DNA, 80 bp, synthetic construct
  source 1..80: mol_type = other DNA
gtgttattgttaaggataacataacatatgctgttagcacccgaaacggcatgagtggttcacctgttacaaatgttgat

SEQ ID NO: 61433 - DNA, 80 bp, synthetic construct
  source 1..80: mol_type = other DNA
ggtagaattgttggcatacaccaagccaacactggatttacaggcggtgctgtcatcataaagcaagaggatttaccacc

SEQ ID NO: 61434 - DNA, 80 bp, synthetic construct
  source 1..80: mol_type = other DNA
ccaaaagaagccacaaagggagatagaccttgagaacaaaattaaagaattagaagatgcccttaaaggtcagatgaatc

SEQ ID NO: 61435 - DNA, 80 bp, synthetic construct
  source 1..80: mol_type = other DNA
aaggcctaaatgaaaatcagataattgaattgattcggcttgctgttggtcgtgaggttgaaatcttacggcatgaaatt

SEQ ID NO: 61436 - DNA, 80 bp, synthetic construct
  source 1..80: mol_type = other DNA
aatatgaaccaagcaaaaggtaaagataaaaggaagaatcaccacaagaggcgtaggaaggggaaagtttggactgagga

SEQ ID NO: 61437 - DNA, 80 bp, synthetic construct
  source 1..80: mol_type = other DNA
agagtacaaagaccttttggaaaagggattcaccagacagcaattacgggatatggctgaagtgcttagagaggcagact

SEQ ID NO: 61438 - DNA, 80 bp, synthetic construct
  source 1..80: mol_type = other DNA
attctgaagatgatgaaagtgatgagtatgacactggttatccacaatggtcagacccagaagactctgaggaggttgaa

SEQ ID NO: 61439 - DNA, 80 bp, synthetic construct
  source 1..80: mol_type = other DNA
agggaatggtttgggccaaagaaaaaaatacttgatgaggttgaaggtggttggtccaatactgatttctgggagcagtg

SEQ ID NO: 61440 - DNA, 80 bp, synthetic construct
  source 1..80: mol_type = other DNA
tcagaaggtgtggaaggagatggagcccatgccggaagagtctgttaacactctaccgtcacacttaagtgataagtatg

SEQ ID NO: 61441 - DNA, 80 bp, synthetic construct
  source 1..80: mol_type = other DNA
ttgttgagccacaacctttaattgttgagacggtatatgtctcaggagtgagagagggtaatgaatacgtcacttacctt

SEQ ID NO: 61442 - DNA, 80 bp, synthetic construct
  source 1..80: mol_type = other DNA
gcattacatgttatgttgtcacaaagagtgatatggaagccttagcccgcgatttgcaggaataccaagccaaggttgag

SEQ ID NO: 61443 - DNA, 80 bp, synthetic construct
  source 1..80: mol_type = other DNA
gagaagattaaggcaaatgttgtccgtggtcagtggcttgagggagtcaatccaaaaactatcataagtgagttggatga

SEQ ID NO: 61444 - DNA, 80 bp, synthetic construct
  source 1..80: mol_type = other DNA
attatggctgaaactgaaccacttaatgtggactcatggtatagtccctttcatacagaggaaaaaaattaacagaaaga

SEQ ID NO: 61445 - DNA, 80 bp, synthetic construct
  source 1..80: mol_type = other DNA
aacagcaaaaaaacttgaagggggccccgaaacaggggccccaaaaccagaacaactaaggcttgggtactggagagaac

SEQ ID NO: 61446 - DNA, 80 bp, synthetic construct
  source 1..80: mol_type = other DNA
tattacaacctggtgaatattaccttacccccccacattgccccttggttggcgttctaccaatagataggcctataagt

SEQ ID NO: 61447 - DNA, 80 bp, synthetic construct
  source 1..80: mol_type = other DNA
gattatgatgagccaattgatgatttattaaatttgttgccaaaatgtgaggaaaagccgccgtacgcaccttctacatg

SEQ ID NO: 61448 - DNA, 80 bp, synthetic construct
  source 1..80: mol_type = other DNA
gggaccagaagcgtataggcggtcatttgataaattcttttacagaaagccaactgaaaatataaaaggaaaatacccta

SEQ ID NO: 61449 - DNA, 80 bp, synthetic construct
  source 1..80: mol_type = other DNA
gggagtggaaatttgcaatgtcagtgctcagaagagaatttgatttcctacaggatagtgttcttattgacataacgtcc

SEQ ID NO: 61450 - DNA, 80 bp, synthetic construct
  source 1..80: mol_type = other DNA
acttcaaagaatgctgactccacacctgcttatccaaagacattatggtggaaaactgaaacagattaccttaaagagcg

SEQ ID NO: 61451 - DNA, 80 bp, synthetic construct
  source 1..80: mol_type = other DNA
gggttaccaagattacattaaagagttagatttaataagatctggagagaggcctgacgtcttatggtacttatttttaa

SEQ ID NO: 61452 - DNA, 80 bp, synthetic construct
  source 1..80: mol_type = other DNA
tttaaaccgggacttaatgattgggttgaggttgacgctaacatacataaacctactgccattgttggtgtattatatca

SEQ ID NO: 61453 - DNA, 80 bp, synthetic construct
  source 1..80: mol_type = other DNA
aaaaagagattttaaagataagtaaaattgaggaagaagacattaggcaaattgtttgtgctgatcccattttctctaga

SEQ ID NO: 61454 - DNA, 80 bp, synthetic construct
  source 1..80: mol_type = other DNA
attggttgtgtatttgaagagcaccaaaatcaattaatgaaaaatagaaccctgacacgcatgggtcaatgtggatggtc

SEQ ID NO: 61455 - DNA, 80 bp, synthetic construct
  source 1..80: mol_type = other DNA
accgtttatgggaggtttccataaacgtataaagcgcttagttgacaaaggcaatgattatttcattgagttcgactgga

SEQ ID NO: 61456 - DNA, 80 bp, synthetic construct
  source 1..80: mol_type = other DNA
cgcgttatgatggtaccatccctaatgaagtttttagggctattaaggacttcagattctcgtgtcttaggggagatttg

SEQ ID NO: 61457 - DNA, 80 bp, synthetic construct
  source 1..80: mol_type = other DNA
caaacaaaagaaaacagagatgtttacaactggtattgtgagaacatatttagaagatacgtgatgttaccttcaggaga

SEQ ID NO: 61458 - DNA, 80 bp, synthetic construct
  source 1..80: mol_type = other DNA
agtgacaatccaggatagggggaacccctctggacaaatatccacaactatggataataacatctgtaatgtctttttcc

SEQ ID NO: 61459 - DNA, 80 bp, synthetic construct
  source 1..80: mol_type = other DNA
aggcatttgagtttgcatatctgaatactgaattggattctgatgaattaaaggaaaattgggataagtatgactcactt

SEQ ID NO: 61460 - DNA, 80 bp, synthetic construct
  source 1..80: mol_type = other DNA
atatatggagatgataggttaactacaacccctattttatgtgacaactatgtagatagagtcattaaaatgtatgctga

SEQ ID NO: 61461 - DNA, 80 bp, synthetic construct
  source 1..80: mol_type = other DNA
tgtttttgggatgtgggttaagagagagaaagtaaaagtttcaaatgaaattaatggattgacattttgtggctttactg

SEQ ID NO: 61462 - DNA, 80 bp, synthetic construct
  source 1..80: mol_type = other DNA
ttcaagagtcaaatggcctttttgtccccataccagctgatacagataaattacttgctggtttaataacaccaataaag

SEQ ID NO: 61463 - DNA, 80 bp, synthetic construct
  source 1..80: mol_type = other DNA
tgagtatagcaggcttaaatcagagaatgaaagtttgaaaatagagcgctcatctttacaattggatgtatcaatcctca

SEQ ID NO: 61464 - DNA, 80 bp, synthetic construct
  source 1..80: mol_type = other DNA
aagttacctgatattttgtcactctatgggaagctcctttgctaccgcatcctcggccataacttgccggatgaccataa

SEQ ID NO: 61465 - DNA, 80 bp, synthetic construct
  source 1..80: mol_type = other DNA
atttaaaaattacattttggtcgccttggaggtagtggccaggcacatccgtgctagtggtggggaagaaccctattata

SEQ ID NO: 61466 - DNA, 80 bp, synthetic construct
  source 1..80: mol_type = other DNA
tcacggatagcatgctggataggctttggaggggaggtccaaagcaaagccatggctggtaagcagccccagcaggccct

SEQ ID NO: 61467 - DNA, 80 bp, synthetic construct
  source 1..80: mol_type = other DNA
gcccaaggcagcggcaaagcaaatagccaaggaggtagtcaaacaggagaagaaggaaccagtggtgcgtaaaaagaaac

SEQ ID NO: 61468 - DNA, 80 bp, synthetic construct
  source 1..80: mol_type = other DNA
agttttatccaaatctaaggtttaataatagatctaataagaaatttgtgaagaaacagctagataaaaatttgaagaaa

SEQ ID NO: 61469 - DNA, 80 bp, synthetic construct
  source 1..80: mol_type = other DNA
caaggtcttgaaggaccaagacctagatttgctgtcactgtttctgctaccattggcaaggttgggccaaataaaagtca

SEQ ID NO: 61470 - DNA, 80 bp, synthetic construct
  source 1..80: mol_type = other DNA
ggggcctgaactccaaatatctacttttatgcaccccagcttgatgaaagagccaaatgatggcacaaattttggtcccc

SEQ ID NO: 61471 - DNA, 80 bp, synthetic construct
  source 1..80: mol_type = other DNA
tacagtcagcagctgcacaatggggtttgtggcgcttgaaaagcttgagcgtcacgtttactcctcttgttggtccatca

SEQ ID NO: 61472 - DNA, 80 bp, synthetic construct
  source 1..80: mol_type = other DNA
gcagttactgggtctgttttccgcatatccctaaacatggcacagtcacctggagccacgtcatggggaggtcttggtgc

SEQ ID NO: 61473 - DNA, 80 bp, synthetic construct
  source 1..80: mol_type = other DNA
taggaagcacaaggatgttgctgtgggaaagcagtttacttggaagctacagaagggagacctcacaggccccagggaaa

SEQ ID NO: 61474 - DNA, 80 bp, synthetic construct
  source 1..80: mol_type = other DNA
gacatgagcttgagcgtgcaagaccaccaactaaaacaattaggcctttcagcgttagatgcattgtattgtatggttta

SEQ ID NO: 61475 - DNA, 80 bp, synthetic construct
  source 1..80: mol_type = other DNA
cctggtggctcacagacacaaatgaggagggagcacaaagttgtgggcctcttcttgaaatccatggccttggtgaaaca

SEQ ID NO: 61476 - DNA, 80 bp, synthetic construct
  source 1..80: mol_type = other DNA
acttctacctacaaggatgcagcatggcctggagacctctttattgttgaggtcaggggtcgctgggagtttgcaaatta

SEQ ID NO: 61477 - DNA, 80 bp, synthetic construct
  source 1..80: mol_type = other DNA
caacagcaaacctgcattaggtatgttggagagagtgactgaaaatattgatgcttcaattgaagtagctaatggtaata

SEQ ID NO: 61478 - DNA, 80 bp, synthetic construct
  source 1..80: mol_type = other DNA
tgattatgacagttccacagaggtcccaacttgcaaggcatatgagtgaaaggttcgagaggaccacaaatgcaagtact

SEQ ID NO: 61479 - DNA, 80 bp, synthetic construct
  source 1..80: mol_type = other DNA
gttggtgaaacaatatggcagattgtggatgagggtgctggcctggttgcagatgttgcacctcccccgttcacttggtt

SEQ ID NO: 61480 - DNA, 80 bp, synthetic construct
  source 1..80: mol_type = other DNA
gattaaaggggggtggtggtttgtcaagaaattgctaggtagatcagcaaatactgatgttcaatatctagtctatgcat

SEQ ID NO: 61481 - DNA, 80 bp, synthetic construct
  source 1..80: mol_type = other DNA
gtggtttgtcaagaaattgctaggtagatcagcaaatactgatgttcaatatctagtctatgcatcattggcagacgccc

SEQ ID NO: 61482 - DNA, 80 bp, synthetic construct
  source 1..80: mol_type = other DNA
cattggcagacgcccaaaacaacagacctgtagaggcacaaaattacacaaaagtcacacgacaaacaacactttcttcc

SEQ ID NO: 61483 - DNA, 80 bp, synthetic construct
  source 1..80: mol_type = other DNA
acgcaaattaatgcaccaaatacaggccctaataccactacagggtcaattggaaacaacaaccagcagtggccggtacc

SEQ ID NO: 61484 - DNA, 80 bp, synthetic construct
  source 1..80: mol_type = other DNA
tccgacaggggcaccggttggtgacttttatgtctgtggcaagatgacaacattgcatatgggtggtcagtctggcattc

SEQ ID NO: 61485 - DNA, 80 bp, synthetic construct
  source 1..80: mol_type = other DNA
aagccacgactttagtgaatgggatgatatatcgtacagatcacccagaatcatcaacaaggccaatttccaattgggaa

SEQ ID NO: 61486 - DNA, 80 bp, synthetic construct
  source 1..80: mol_type = other DNA
ctgattggccttttgtttttacacatctcacaagcttttaggactggtgtgtgtcttgatccagatgttggtgaaacact

SEQ ID NO: 61487 - DNA, 80 bp, synthetic construct
  source 1..80: mol_type = other DNA
ttcacagttttggaaaataacacaattgttggtgctggaatggggtgtgtgtggtttcggggatctgaagtagcagtgtg

SEQ ID NO: 61488 - DNA, 80 bp, synthetic construct
  source 1..80: mol_type = other DNA
gacactagatggccagaagctatcaggatggaacacgctagatggcgttggtacaacccaattgacagtcgcctggagac

SEQ ID NO: 61489 - DNA, 80 bp, synthetic construct
  source 1..80: mol_type = other DNA
agcacaacagaacaatttatggatgggctaatgttgttgcttggaactctgaagaatggcacacaaatgcagaacaacca

SEQ ID NO: 61490 - DNA, 80 bp, synthetic construct
  source 1..80: mol_type = other DNA
caccagcctatattgaggttgacatattggttagtaaaaattaatgttttgtctgaaccagaagattttgatgttgtcca

SEQ ID NO: 61491 - DNA, 80 bp, synthetic construct
  source 1..80: mol_type = other DNA
aaaatccccattggcttatttagaagattacactacagtacaatcaagatctgctatccaaaagcttaactttcaaacgt

SEQ ID NO: 61492 - DNA, 80 bp, synthetic construct
  source 1..80: mol_type = other DNA
ttcagaaacctgaaggtggaggcactttgcgggcacaatactcaacttctcccaggcaaggggattttgccgtaatatgg

SEQ ID NO: 61493 - DNA, 80 bp, synthetic construct
  source 1..80: mol_type = other DNA
caggttggtagacataattttgatatgtctaccggtaagggtacaccagttgagagtttgagtgattatgtcatgcccca

SEQ ID NO: 61494 - DNA, 80 bp, synthetic construct
  source 1..80: mol_type = other DNA
gcagaaagatgcctgtagtggcatgtggtatcgtgctttaactagtgttggaccaagatcagatgttttgacccttcatt

SEQ ID NO: 61495 - DNA, 80 bp, synthetic construct
  source 1..80: mol_type = other DNA
tccatttgccaatagtggaaaaagatttagttgagcagattattgatcaaattcagcatcgctacagattgaccccactg

SEQ ID NO: 61496 - DNA, 80 bp, synthetic construct
  source 1..80: mol_type = other DNA
gattcggattcagactcctctagttctgattccgatttcgagcctgaagatggatttgagaagcttaaaatccatgaggg

SEQ ID NO: 61497 - DNA, 80 bp, synthetic construct
  source 1..80: mol_type = other DNA
agagccacaaacctgtataaactggaagtgggacggtggaattgaaccagatgagactattccattttatgataggttta

SEQ ID NO: 61498 - DNA, 80 bp, synthetic construct
  source 1..80: mol_type = other DNA
ttccaggtccagtggtcaaaaattgcgccgaggccacgccgagtaggaccgagggtacagcgctaaattgattactagag

SEQ ID NO: 61499 - DNA, 80 bp, synthetic construct
  source 1..80: mol_type = other DNA
ttgattactagaggtgttaatcaataaatcattgatttggtgattgatatgattaatttgaaattgaaatttccagcagg

SEQ ID NO: 61500 - DNA, 80 bp, synthetic construct
  source 1..80: mol_type = other DNA
cagcttggtatgcaggtttaatacaacagtttaaaagtatgtataatgacattgtcattgatttagtgatccaggctttt

SEQ ID NO: 61501 - DNA, 80 bp, synthetic construct
  source 1..80: mol_type = other DNA
ccctatgatagggtactacaacatggtagtgtcaaagcacggatacagggccttcagcttaataaagtggctaaaaccaa

SEQ ID NO: 61502 - DNA, 80 bp, synthetic construct
  source 1..80: mol_type = other DNA
ggctttgcttacacatggacagctatagcactgatgataggcacatattatatgttgaaatccaccaacccagcatatat

SEQ ID NO: 61503 - DNA, 80 bp, synthetic construct
  source 1..80: mol_type = other DNA
gctagtgacattgatgatggcaactgtgtcaagaatgcagttatttgcaatatctgctgtacctaacatggaggtcactt

SEQ ID NO: 61504 - DNA, 80 bp, synthetic construct
  source 1..80: mol_type = other DNA
caatgttttcattgtggtgctgtatggtattatactattttaatcaggctgcagcaatggccgcgtcattaatgatagca

SEQ ID NO: 61505 - DNA, 80 bp, synthetic construct
  source 1..80: mol_type = other DNA
tgcagacaaccttgattcaaaagtagagatagatggtgttacatggtgttttagtaaaataattagtttggacctaaacc

SEQ ID NO: 61506 - DNA, 80 bp, synthetic construct
  source 1..80: mol_type = other DNA
gattgttagctttaaatattgcctttgagaaatctcttcttgctacggccacgtggttccaatactacacggaggaccaa

SEQ ID NO: 61507 - DNA, 80 bp, synthetic construct
  source 1..80: mol_type = other DNA
atgctttacggtctgtttttgcatttcactttctgttagctacatcccaaaaaatgaaattatgtgcaatatttgataac

SEQ ID NO: 61508 - DNA, 80 bp, synthetic construct
  source 1..80: mol_type = other DNA
ttgcgctacctcatcccagcagttacatccacatattctgggtttgagccattgattagaaagttctttgagcgaccgtt

SEQ ID NO: 61509 - DNA, 80 bp, synthetic construct
  source 1..80: mol_type = other DNA
ggtgttagagaaaaaatactaaagtatcaaggagggttagaattcattgagcaattactacagatagaagcccaaaaggg

SEQ ID NO: 61510 - DNA, 80 bp, synthetic construct
  source 1..80: mol_type = other DNA
tcattgtctactgacctacaactcatgagggagggtgtgtatagagaattaggcctggatatcagtcaaccaaatgtact

SEQ ID NO: 61511 - DNA, 80 bp, synthetic construct
  source 1..80: mol_type = other DNA
aaatgtctcaacacaatggcctagtaggaggaatgagggtgtggtacaggcaatgaggctgatacaggcagatatcaatt

SEQ ID NO: 61512 - DNA, 80 bp, synthetic construct
  source 1..80: mol_type = other DNA
gttatacaacagttagtacaatttcaagtacgcaatggtcagaagaagtgagcctgactatggatgacagtgatgatgac

SEQ ID NO: 61513 - DNA, 80 bp, synthetic construct
  source 1..80: mol_type = other DNA
ggtgatgcttcccagcttgattatactattgaccttgatgatatagattttgaaacaattgatttgaaagaagatattga

SEQ ID NO: 61514 - DNA, 80 bp, synthetic construct
  source 1..80: mol_type = other DNA
ttgttagagaacacttaataaaaaatgatgaaaggggagcacttgaagcaatgttcaatttaaagttccatgtcacaggc

SEQ ID NO: 61515 - DNA, 80 bp, synthetic construct
  source 1..80: mol_type = other DNA
catcccaaattatagacctcaacaattgtgtcagcctgtattagaaaatttagttgagtactgtaaaaattggcttggga

SEQ ID NO: 61516 - DNA, 80 bp, synthetic construct
  source 1..80: mol_type = other DNA
tgaaacacctctgcaattgttagccagggatatggcttacaaatatattacactagataatgaagatatcatcaactatt

SEQ ID NO: 61517 - DNA, 80 bp, synthetic construct
  source 1..80: mol_type = other DNA
ataatccgagggtctacttcaaacccacacaaaatatcaaagaaccagggacttttaagttaaatttatctaatatggat

SEQ ID NO: 61518 - DNA, 80 bp, synthetic construct
  source 1..80: mol_type = other DNA
atgaagaagagctacatgcatctaagtatggacattctagaaagcctagaaattttcttttatgccaaataagccttcaa

SEQ ID NO: 61519 - DNA, 80 bp, synthetic construct
  source 1..80: mol_type = other DNA
gcaccatatctaccatcaactatagcttctgatcaatatgatacaagattagcttgtagtgaaattttaaaaaattatcc

SEQ ID NO: 61520 - DNA, 80 bp, synthetic construct
  source 1..80: mol_type = other DNA
acaagtatgctagcaaagtagatgaaatcagcgacgttttggacagtgctatccatccagactcgttgtccactgattta

SEQ ID NO: 61521 - DNA, 80 bp, synthetic construct
  source 1..80: mol_type = other DNA
gttgtataagtctggaaagtcaaggattgtaattgtgcaagggagtatagagggtacagcagagtcgatttgtagttatt

SEQ ID NO: 61522 - DNA, 80 bp, synthetic construct
  source 1..80: mol_type = other DNA
agcagttacatctacatattctggctttgaaccattaattaggaagttctttgaaagacctttcaaaagtgcattggagg

SEQ ID NO: 61523 - DNA, 80 bp, synthetic construct
  source 1..80: mol_type = other DNA
ggtgttagggaaaaaatattaaaatatcaaggaggtttggagtttattgagcaactattacaggtggaagcacaaaaagg

SEQ ID NO: 61524 - DNA, 80 bp, synthetic construct
  source 1..80: mol_type = other DNA
gattcaggataaagtttgatgtagtggctataagaactgatggatcaaatatctcaacacagtggcctagcaggaggaat

SEQ ID NO: 61525 - DNA, 80 bp, synthetic construct
  source 1..80: mol_type = other DNA
ggagttagagagaagatattaaagtatcaagggggtttagaatttattgaacaattgttacagatagaagctcagaaagg

SEQ ID NO: 61526 - DNA, 80 bp, synthetic construct
  source 1..80: mol_type = other DNA
aggggaaacatcagcagtagaatgtttagatttattggatagattgtatgcagtgaggcatgatgttgtagaccagatga

SEQ ID NO: 61527 - DNA, 80 bp, synthetic construct
  source 1..80: mol_type = other DNA
ggggtaagcctaatgtgccctgtatagtttatagaaattgtactctccggacaggccttagggtaaggcatccgacgaat

SEQ ID NO: 61528 - DNA, 80 bp, synthetic construct
  source 1..80: mol_type = other DNA
ctataatccacgtgtttattttaaaccaacacaaaatataaaagagccagggacgtttaagctaaacttatcaaacatgg

SEQ ID NO: 61529 - DNA, 80 bp, synthetic construct
  source 1..80: mol_type = other DNA
aatctacatcaggattagatcagccaaagagaacaacaggtgtagatgatattcttaggaaattttatgataatgaactt

SEQ ID NO: 61530 - DNA, 80 bp, synthetic construct
  source 1..80: mol_type = other DNA
gttaaatatttaatttctgtgataagaaagactactgcctggcatttaggacatttattgcgcgatattacagaatcatt

SEQ ID NO: 61531 - DNA, 80 bp, synthetic construct
  source 1..80: mol_type = other DNA
gattgcacatgcagggttaaggagatctaaatactggtcagctcatggatatgcctgtggtaatgtactattgtgtattt

SEQ ID NO: 61532 - DNA, 80 bp, synthetic construct
  source 1..80: mol_type = other DNA
taccttcaaagtcacttgaagttgcaggttcttttattaggttttttactgtttttaaagagggcttaggacttattgat

SEQ ID NO: 61533 - DNA, 80 bp, synthetic construct
  source 1..80: mol_type = other DNA
cctgataatttggattcaaaaatagaaattgatggggtttcatggtgctttagtaaggttatcagcttggatctaaatcg

SEQ ID NO: 61534 - DNA, 80 bp, synthetic construct
  source 1..80: mol_type = other DNA
gcattgcgttctgtatttgcctttcattttttacttgctacttcccaaaaaatgaaactctgtgcaatctttgacaattt

SEQ ID NO: 61535 - DNA, 80 bp, synthetic construct
  source 1..80: mol_type = other DNA
ttacatcaacatactcaggctttgaacctctaatacggaaattttttgaaagaccctttaagagtgctcttgaagtttat

SEQ ID NO: 61536 - DNA, 80 bp, synthetic construct
  source 1..80: mol_type = other DNA
ttatatagtatcattaaaacactgcttgtgagcttagctcaaaataataaaattagattttattcaagggtccgactttt

SEQ ID NO: 61537 - DNA, 80 bp, synthetic construct
  source 1..80: mol_type = other DNA
aaaaattctaaagtatcaagggggtctagaattcatagagcaactcctccatgtagaagcccagaaaggtaattgtcagt

SEQ ID NO: 61538 - DNA, 80 bp, synthetic construct
  source 1..80: mol_type = other DNA
attagcagctgctgatgcatttgcatctgattataagcccagtccacaagatatggaactttttcaaacactagtcaatt

SEQ ID NO: 61539 - DNA, 80 bp, synthetic construct
  source 1..80: mol_type = other DNA
gacctaaaatagcacgtactttcacagttaaagaaaaggatcaaaccatacagaacccaattacagcagttataggttac

SEQ ID NO: 61540 - DNA, 80 bp, synthetic construct
  source 1..80: mol_type = other DNA
aaatatgctagtaaagtggatgaaatcagtgatgttctagatagtgccatacaccctgattctttgtctacagatttgca

SEQ ID NO: 61541 - DNA, 80 bp, synthetic construct
  source 1..80: mol_type = other DNA
agttacatggttaaagtatttaatgtttgaaaacaaaactttagaacaatggattgactccttttgctctagaggtgttt

SEQ ID NO: 61542 - DNA, 80 bp, synthetic construct
  source 1..80: mol_type = other DNA
taccagttgatcctgaaatacaatgtttaggccttttaatttacgaccttaaaggacagaaaggcctgttgcagatacag

SEQ ID NO: 61543 - DNA, 80 bp, synthetic construct
  source 1..80: mol_type = other DNA
gggggaagcctaatataccttgtattgtttatagaaactgtacactcagaacaggtctgagagtgcggcatccgacaaat

SEQ ID NO: 61544 - DNA, 80 bp, synthetic construct
  source 1..80: mol_type = other DNA
gaaaacagttctcagttagactacacaattgatcttgatgatatagattttgaaacaattgatcttaaagaggatattga

SEQ ID NO: 61545 - DNA, 80 bp, synthetic construct
  source 1..80: mol_type = other DNA
ttatactcatgaccagatatatgtctaaacacttcaatttccatgcaaaacagttgtcattgatggacccatatgatctc

SEQ ID NO: 61546 - DNA, 80 bp, synthetic construct
  source 1..80: mol_type = other DNA
actgaatttgagagtattgttaaaggctggggagagtgtgttaaagatcgatttatagaattggatcaagaggcacaaag

SEQ ID NO: 61547 - DNA, 80 bp, synthetic construct
  source 1..80: mol_type = other DNA
ccaaaagtgaggacgtttgatatcccaaactatagaccacaaccattatgtcaaccaacattagaaagtttagtagatta

SEQ ID NO: 61548 - DNA, 80 bp, synthetic construct
  source 1..80: mol_type = other DNA
ttgcaagaattggcttgagacagatcatgcatttgcattcaaagaagtaactggacagagggtatttaatgtatttagag

SEQ ID NO: 61549 - DNA, 80 bp, synthetic construct
  source 1..80: mol_type = other DNA
aagaagaagaattacatgcattaaagtatgggcattcaagaaaaccaaggaattttcttctttgtcaaattagtttacaa

SEQ ID NO: 61550 - DNA, 80 bp, synthetic construct
  source 1..80: mol_type = other DNA
tcaccatatttaccatcaacaattgcttcagatcaatatgacacacgtttagtttgtagtgaaatattgaaaaactaccc

SEQ ID NO: 61551 - DNA, 80 bp, synthetic construct
  source 1..80: mol_type = other DNA
aaaccacatcaggtttagatcaaccaaaaagaacaactggagtagatgatattctaagaaaattctatgataatgagctt

SEQ ID NO: 61552 - DNA, 80 bp, synthetic construct
  source 1..80: mol_type = other DNA
tgattgcacatgctggtctaaggagatccaagtattggtcagctcatggttacgcttgtggtaatgttttgttatgtata

SEQ ID NO: 61553 - DNA, 80 bp, synthetic construct
  source 1..80: mol_type = other DNA
ctaccatctaagtcacttgaggtagctggatcgttcattaggttcttcactgtatttaaagagggtttaggattaattga

SEQ ID NO: 61554 - DNA, 80 bp, synthetic construct
  source 1..80: mol_type = other DNA
tcctgacaatttagactctaaagtagaaatcgatggggtatcttggtgctttagtaaaatcattagtttagacttaaacc

SEQ ID NO: 61555 - DNA, 80 bp, synthetic construct
  source 1..80: mol_type = other DNA
tgtgcaatctttgataacttgaggtacttgataccagcagtaacatcaacatattcaggttttgagcctttaataagaaa

SEQ ID NO: 61556 - DNA, 80 bp, synthetic construct
  source 1..80: mol_type = other DNA
ttgtaagcttagctcaaaacaataagattagattttattctaaggttcgactcttaggacttacagtagaccaatccacg

SEQ ID NO: 61557 - DNA, 80 bp, synthetic construct
  source 1..80: mol_type = other DNA
caacagttttggagttatacgaacagactaaaaaacagaaagctcaagctaggattgtaaggaaataccagaggactgaa

SEQ ID NO: 61558 - DNA, 80 bp, synthetic construct
  source 1..80: mol_type = other DNA
ggttccaatatgtaactcagcagattcaagctgggaacttacattggcacgctgtaaatcaagagatgtggaaaagtatg

SEQ ID NO: 61559 - DNA, 80 bp, synthetic construct
  source 1..80: mol_type = other DNA
agagccggtgtgtgaaagcattggacatgggtgcatgccctcagcttgcacagttagggatagtattgtgtacaagtaag

SEQ ID NO: 61560 - DNA, 80 bp, synthetic construct
  source 1..80: mol_type = other DNA
tatataaatcagggaaatcaagaattgttattgtacaaggaaatgttgaggggacagcagaatccatttgcagttactgg

SEQ ID NO: 61561 - DNA, 80 bp, synthetic construct
  source 1..80: mol_type = other DNA
ctaaagagcatgtctcttgtcaagaccattaaagtaaaaccgaaaaaggaagtactaaaggcagtttccttatatggtaa

SEQ ID NO: 61562 - DNA, 80 bp, synthetic construct
  source 1..80: mol_type = other DNA
aaaggaaaaagctggagatttaacacatcttgctgcaatgagattatgcattgaggtatggagatggtgtaaagcaaatg

SEQ ID NO: 61563 - DNA, 80 bp, synthetic construct
  source 1..80: mol_type = other DNA
ttaaagtatttaatgtttgagaataaaaccttggagcagtggattgattctttctgctcaagaggggtattacctgttga

SEQ ID NO: 61564 - DNA, 80 bp, synthetic construct
  source 1..80: mol_type = other DNA
ggggaaagccaaatatcccatgtattgtatatcggaattgtacacttagaacaggtcttagggtaagacacccaacaaat

SEQ ID NO: 61565 - DNA, 80 bp, synthetic construct
  source 1..80: mol_type = other DNA
gaagacaactcacaattagattatacaattgatcttgatgatatagactttgaaacaattgatcttaaagaagacattga

SEQ ID NO: 61566 - DNA, 80 bp, synthetic construct
  source 1..80: mol_type = other DNA
acattttttacaggatgaatctgcttacactggggatttattaatccaaacagaagagactgagataaaaaaattgcgag

SEQ ID NO: 61567 - DNA, 80 bp, synthetic construct
  source 1..80: mol_type = other DNA
ttactgagtttgagagtattgtcaaaggttggggtgagtgtgttaaggatagattcatcgaattggatcaagaagcacag

SEQ ID NO: 61568 - DNA, 80 bp, synthetic construct
  source 1..80: mol_type = other DNA
aggaaagtctcagaggagagggttctccctgaagatgtattgcctgattccctattttcatttagacatgctgatatctt

SEQ ID NO: 61569 - DNA, 80 bp, synthetic construct
  source 1..80: mol_type = other DNA
ccaaaagtgaggacatttgacatcccaaattataggccacagcctttatgccagcctacattagaaagtctggtagatta

SEQ ID NO: 61570 - DNA, 80 bp, synthetic construct
  source 1..80: mol_type = other DNA
ggctattagcattaaatatatcatttgaaaaatctctactagctacagccacatggttccaatattatacagaggaccag

SEQ ID NO: 61571 - DNA, 80 bp, synthetic construct
  source 1..80: mol_type = other DNA
tatgtgcaatctttgacaacttgcgttacctgatcccagcagtaacgtctacctattctgggtttgaaccattaattaga

SEQ ID NO: 61572 - DNA, 80 bp, synthetic construct
  source 1..80: mol_type = other DNA
aaattctttgaacggccttttaagagtgcacttgaagtctatctgtataatataataaaaacattattggtaagcttagc

SEQ ID NO: 61573 - DNA, 80 bp, synthetic construct
  source 1..80: mol_type = other DNA
aagcagatcgaggattctttattactacattgccaaccagagtgagattagagattattgaagactattatgatgccata

SEQ ID NO: 61574 - DNA, 80 bp, synthetic construct
  source 1..80: mol_type = other DNA
ggtgtgagagaaaagatattaaaatatcaaggaggactagaattcattgaacagctcttacagatagaagcccaaaaagg

SEQ ID NO: 61575 - DNA, 80 bp, synthetic construct
  source 1..80: mol_type = other DNA
tatataaatctgggaaatcaaggattgtaattgtacaaggtaacattgaaggaacagcagaatcaatttgtagttattgg

SEQ ID NO: 61576 - DNA, 80 bp, synthetic construct
  source 1..80: mol_type = other DNA
agttgtgtggttaaaatacttgatgtttgaaaacaaaactttagagcaatggatagatttgttttgttcacggggtgtat

SEQ ID NO: 61577 - DNA, 80 bp, synthetic construct
  source 1..80: mol_type = other DNA
gggggaaacctaacattccatgtattgtttatagaaactgtacccttcgtacgggccttagagtgcggcaaccaacgaat

SEQ ID NO: 61578 - DNA, 80 bp, synthetic construct
  source 1..80: mol_type = other DNA
gataatgcatcccagttagattatactattgatcttgatgatatagattttgagacaattgatcttaaagaggatattga

SEQ ID NO: 61579 - DNA, 80 bp, synthetic construct
  source 1..80: mol_type = other DNA
aggggaaacatcagcagtagaatgtctggacttattggatcgattgtatgcagttcgacatgatgttgttgaccaaatga

SEQ ID NO: 61580 - DNA, 80 bp, synthetic construct
  source 1..80: mol_type = other DNA
aagaggaagaaatacatgcatccaaatatgggcattcaaggaagcctagaaattttttattgtgccagataggtttacaa

SEQ ID NO: 61581 - DNA, 80 bp, synthetic construct
  source 1..80: mol_type = other DNA
gcaccgtatttaccatcaacaattgcatctgatcagtatgacacacgattagcttgtagtgaggtcttaaagaattatcc

SEQ ID NO: 61582 - DNA, 80 bp, synthetic construct
  source 1..80: mol_type = other DNA
cctaagtcgaaggcattgattgatataatctcaaaggattcaaagaaaggggtttttggtgaattaattgatagtattga

SEQ ID NO: 61583 - DNA, 80 bp, synthetic construct
  source 1..80: mol_type = other DNA
tgtagcaagtcaggttcagcagaatgaatgtgcaaaaactattgaaaaaatcctttctgatcttgaagttaatataggtg

SEQ ID NO: 61584 - DNA, 80 bp, synthetic construct
  source 1..80: mol_type = other DNA
attctactgctggattagaacaaccaaaaagaactaccggagtggatgatatcttaaggaagttttatgacaatgaactt

SEQ ID NO: 61585 - DNA, 80 bp, synthetic construct
  source 1..80: mol_type = other DNA
gttaagtacttaatctcagttatacggaaaacaactgcttggcatttaggacatctattacgtgatattactgaatctct

SEQ ID NO: 61586 - DNA, 80 bp, synthetic construct
  source 1..80: mol_type = other DNA
ttgcattccatttccttctttccacatctcaaaagatgaaactatgtgccatatttgataatctacggtaccttattcca

SEQ ID NO: 61587 - DNA, 80 bp, synthetic construct
  source 1..80: mol_type = other DNA
gctttgagccattaattaggaagttctttgaacgacccttcaaaagtgcattggaggtatacttgtataacattataaag

SEQ ID NO: 61588 - DNA, 80 bp, synthetic construct
  source 1..80: mol_type = other DNA
acactattagttagcttagcccaaaataataaaataagattttattcaagagttagacttttggggctaactgttgatca

SEQ ID NO: 61589 - DNA, 80 bp, synthetic construct
  source 1..80: mol_type = other DNA
gaaagagagttaggtagttatataatggaagaaggttatcatatacaagatgtcttaaacaatcaggtagttgttgaaca

SEQ ID NO: 61590 - DNA, 80 bp, synthetic construct
  source 1..80: mol_type = other DNA
gaggtgaaagaaagatactgaacattcaacaggctttagagaaggcattgaggtgggcttccggagaaagtgaaatccag

SEQ ID NO: 61591 - DNA, 80 bp, synthetic construct
  source 1..80: mol_type = other DNA
tcctcgttgggtcactccataaaattgaaaagaaagctgatgtatgtaagtgcagatgcaactaaatggtcaccaggtga

SEQ ID NO: 61592 - DNA, 80 bp, synthetic construct
  source 1..80: mol_type = other DNA
attatttggggcggcggtatcattattgtttaaacgtgtgtgggccaaattatatccagagttagagtgtttttttgagt

SEQ ID NO: 61593 - DNA, 80 bp, synthetic construct
  source 1..80: mol_type = other DNA
aacttacaaacatgcaaaaaaagataatgatagatatgtgttaggattgtttaaattcttaatgtcattgtcagatgata

SEQ ID NO: 61594 - DNA, 80 bp, synthetic construct
  source 1..80: mol_type = other DNA
atattaaaataccaagggggtttagagtttattgagcaacaactacaggtagaagcacaaaaaggtaattgtcaatctgg

SEQ ID NO: 61595 - DNA, 80 bp, synthetic construct
  source 1..80: mol_type = other DNA
agcttatgagggaaggtgtctacagagaattaggtcttgatatcagccaaccgaatgtattgaagaaagttgcaccattg

SEQ ID NO: 61596 - DNA, 80 bp, synthetic construct
  source 1..80: mol_type = other DNA
ctgtatcttggttaaagtatctaatgtttgaaaacaaaacattggaacaatggatagattcattttgttcaagaggagtt

SEQ ID NO: 61597 - DNA, 80 bp, synthetic construct
  source 1..80: mol_type = other DNA
ttacctgtggatcctgagatccaatgtttaggccttcttgtatatgatcttaagggacaaaagggtttattgcaaataca

SEQ ID NO: 61598 - DNA, 80 bp, synthetic construct
  source 1..80: mol_type = other DNA
tctggaaacatccataacccaacgaaatgtattaaagattctcatggaagaagtaactaaagaattactacgttgtggta

SEQ ID NO: 61599 - DNA, 80 bp, synthetic construct
  source 1..80: mol_type = other DNA
ggggtaaacccaatgtaccatgtattgtttatagaaattgcacccttaggacaggattgagagtacgacagcctacaaac

SEQ ID NO: 61600 - DNA, 80 bp, synthetic construct
  source 1..80: mol_type = other DNA
aaagcattttcaattactattcaggctaatggatttagggctatggcccagcttgatgaagaaaatcctagatttttact

SEQ ID NO: 61601 - DNA, 80 bp, synthetic construct
  source 1..80: mol_type = other DNA
aagctgagaggtatgatcaaaattcttgagcctgtaaagcttattaaaagttgggtttccaaaggtttatccatagacaa

SEQ ID NO: 61602 - DNA, 80 bp, synthetic construct
  source 1..80: mol_type = other DNA
ttgttctcatgactcgatacatgtccaagcattacaatttccatacaaagcagttatctcttatggatccgtatgattta

SEQ ID NO: 61603 - DNA, 80 bp, synthetic construct
  source 1..80: mol_type = other DNA
acagagttcgaaagtattgttaaaggttggggagagtgtgttaaagataggtttattgaacttgaccaggaagcccagcg

SEQ ID NO: 61604 - DNA, 80 bp, synthetic construct
  source 1..80: mol_type = other DNA
acaatccacgtgtttattttaaaccgacacaaaatataaaagaaccagggacattcaaacttaacttgtcaaatatggat

SEQ ID NO: 61605 - DNA, 80 bp, synthetic construct
  source 1..80: mol_type = other DNA
gattccacctcaggcctagatcagccaaaaagaacaactggagtagatgatatcttgagaaaattttatgataacgaact

SEQ ID NO: 61606 - DNA, 80 bp, synthetic construct
  source 1..80: mol_type = other DNA
tgttaaatatctaatttcagtgataaggaaaactactgcatggcatttaggacatctattacgtgatattacggagtctt

SEQ ID NO: 61607 - DNA, 80 bp, synthetic construct
  source 1..80: mol_type = other DNA
aattgcacatgcaggattacgaagatctaaatattggtcagcccatggttatgcctgtggtaatatactgttatgtattt

SEQ ID NO: 61608 - DNA, 80 bp, synthetic construct
  source 1..80: mol_type = other DNA
taccatccaaatcacttgaggtggcagggtcttatattagattttttactgtgtttaaagaaggtttagggcttattgat

SEQ ID NO: 61609 - DNA, 80 bp, synthetic construct
  source 1..80: mol_type = other DNA
cctgataatttagattcaaaagtagagatagatggggtttcttggtgttttagtaaaattatcagtttagatttaaatag

SEQ ID NO: 61610 - DNA, 80 bp, synthetic construct
  source 1..80: mol_type = other DNA
tttcaacttcccagaagatgaagctatgtgcaatttttgacaacctgaggtatttaataccagcagtgacatctacatat

SEQ ID NO: 61611 - DNA, 80 bp, synthetic construct
  source 1..80: mol_type = other DNA
tcaggttttgagcctttaataagaaaattctttgaaagacctttcaagagtgctcttgaaatatatttatacagtattat

SEQ ID NO: 61612 - DNA, 80 bp, synthetic construct
  source 1..80: mol_type = other DNA
caaaacattgcttgtaagtttagcacaaaataataaaattagattttactctaaagttaggctactagggctaacagttg

SEQ ID NO: 61613 - DNA, 80 bp, synthetic construct
  source 1..80: mol_type = other DNA
tgatccaaggaatggagaaaagaataattccagggagccctagcggtcaaatactaagatcatttttcaaaatgactccc

SEQ ID NO: 61614 - DNA, 80 bp, synthetic construct
  source 1..80: mol_type = other DNA
cgacagttttagaattatatgaactaacaaagaaacaaaaagctcaagcaaggattgtgcgaaaatatcaaagaacagag

SEQ ID NO: 61615 - DNA, 80 bp, synthetic construct
  source 1..80: mol_type = other DNA
gctgaccgaggattttttattactaccctacccactcgagtgagattagagatcatagaagattattacgatgctatagc

SEQ ID NO: 61616 - DNA, 80 bp, synthetic construct
  source 1..80: mol_type = other DNA
agggcatagtattaagttaaagaggaaattaatgtatgtaagtgcagatgcaacgaagtggtcacctggcgataattctg

SEQ ID NO: 61617 - DNA, 80 bp, synthetic construct
  source 1..80: mol_type = other DNA
acttttcggggcagcaatatcattattatttaaacgtgtgtgggcaaaattgtatccagaattagaatgtttctttgaat

SEQ ID NO: 61618 - DNA, 80 bp, synthetic construct
  source 1..80: mol_type = other DNA
tagcagcagctgactcatttgcatctacttataaacctagtactcaagatatggagctttttcaaacactagtaaattgt

SEQ ID NO: 61619 - DNA, 80 bp, synthetic construct
  source 1..80: mol_type = other DNA
gctttataagtcaggaaagtcaaggattgttattgtacaagggaatattgagggaactgcagagtctatctgtagttact

SEQ ID NO: 61620 - DNA, 80 bp, synthetic construct
  source 1..80: mol_type = other DNA
tacctgtcgatccggaaattcagtgcttgggcctgttaatctatgatttgaaaaaacagaaaggattactacaaatacaa

SEQ ID NO: 61621 - DNA, 80 bp, synthetic construct
  source 1..80: mol_type = other DNA
ataaggcattctctattactatacaggctaatggtttcagagccatggcacagttagatgaagaaaatcctagattcctg

SEQ ID NO: 61622 - DNA, 80 bp, synthetic construct
  source 1..80: mol_type = other DNA
acgagaatagttcacaaatggattacacaattgaccttgatgatatagactttgaaacaattgatctcaaagaagatatt

SEQ ID NO: 61623 - DNA, 80 bp, synthetic construct
  source 1..80: mol_type = other DNA
aaattgagaggtatggtcaaaattttagaacctgtaaaattaataaagagctgggtttcaaaaggtctatcaatagacaa

SEQ ID NO: 61624 - DNA, 80 bp, synthetic construct
  source 1..80: mol_type = other DNA
gatatacaaccctgttaatattattcttatgactcggtacatgtcaaaacactttaatttccatgcaaagcagttgtcat

SEQ ID NO: 61625 - DNA, 80 bp, synthetic construct
  source 1..80: mol_type = other DNA
ttactgaatttgagagtattgtgaaaggctggggtgagtgtgttaaatatcgatttattgaattagatcaggaagcacag

SEQ ID NO: 61626 - DNA, 80 bp, synthetic construct
  source 1..80: mol_type = other DNA
agaaaagtttctgaggagagagttctcccagaagatgtactgccagattccttattttcattcagacatgctgatatctt

SEQ ID NO: 61627 - DNA, 80 bp, synthetic construct
  source 1..80: mol_type = other DNA
ccaaaagtaaggacatttgatattcctaattataggcctcaaccactgtgtcaaccagcattagaaagcttggtggatta

SEQ ID NO: 61628 - DNA, 80 bp, synthetic construct
  source 1..80: mol_type = other DNA
ctgtaaaaattggcttgagacagatcatgcattcgcatttaaagaagtaacaggacagcgtgtatttaatgtgtttagag

SEQ ID NO: 61629 - DNA, 80 bp, synthetic construct
  source 1..80: mol_type = other DNA
aggagagacatcagcagttgagtgtttagacttattagatagattatatgcagtaaggcatgatgttgttgaccagatga

SEQ ID NO: 61630 - DNA, 80 bp, synthetic construct
  source 1..80: mol_type = other DNA
ccagaaacaccagtacagctcttagcaagggacatggcctacaaatatattacattggatcacgatgatataataaatta

SEQ ID NO: 61631 - DNA, 80 bp, synthetic construct
  source 1..80: mol_type = other DNA
actccacctctagtctagatcaaccaaaaagaacaactggagtagatgatatcttgagaaagttttatgataatgaactt

SEQ ID NO: 61632 - DNA, 80 bp, synthetic construct
  source 1..80: mol_type = other DNA
gttaaatatctaatctcagtgataagaaaaactactgcatggcatttaggccaccttttacgtgatattacagaagcatt

SEQ ID NO: 61633 - DNA, 80 bp, synthetic construct
  source 1..80: mol_type = other DNA
cctgacaacttagattcaaaagtagaaatagatggagtttcttggtgctttagtaagatcatcagcttagatttaaatag

SEQ ID NO: 61634 - DNA, 80 bp, synthetic construct
  source 1..80: mol_type = other DNA
tcacatctacatactcaggctttgagcctttaataagaaaattctttgaaagaccttttaagagtgctcttgaagtatat

SEQ ID NO: 61635 - DNA, 80 bp, synthetic construct
  source 1..80: mol_type = other DNA
ttatacaatattataaaaacattacttgtaagtttagcacaaaataataaaattagattttattctaaagttagactact

SEQ ID NO: 61636 - DNA, 80 bp, synthetic construct
  source 1..80: mol_type = other DNA
caacagttttagaattatacgaacaaacaaagaagctaaaagctcaagcaaggattgtgcggaaataccagagaacagaa

SEQ ID NO: 61637 - DNA, 80 bp, synthetic construct
  source 1..80: mol_type = other DNA
agccacatggttaaagtacttaatgtttgaaaataagactttggaacagtggattgactctttctgttcaaggggcgtct

SEQ ID NO: 61638 - DNA, 80 bp, synthetic construct
  source 1..80: mol_type = other DNA
aataactcagagaaatgtattgaagattttaatggaagaggttacaaaggaattattacgttgtggcatgagatttaaga

SEQ ID NO: 61639 - DNA, 80 bp, synthetic construct
  source 1..80: mol_type = other DNA
aattaatccaaaaaatgtattaaatctagatggtattgaagaaacttctgagggctatacaacagttagtacaatatcta

SEQ ID NO: 61640 - DNA, 80 bp, synthetic construct
  source 1..80: mol_type = other DNA
gaaaatagttcacaaatggattatacaattgaccttgatgatatagacttcgaaacaattgatctgaaggaagacattga

SEQ ID NO: 61641 - DNA, 80 bp, synthetic construct
  source 1..80: mol_type = other DNA
agatatataaccctgttaacattatccttatgactcgatacatgtcaaaacattttaattttcatgcaaagcagctatca

SEQ ID NO: 61642 - DNA, 80 bp, synthetic construct
  source 1..80: mol_type = other DNA
ccaaaagtgaggacatttgatatcccaaattataggccccaaccgctatgtcaaccatcattagaaagtttggtggatta

SEQ ID NO: 61643 - DNA, 80 bp, synthetic construct
  source 1..80: mol_type = other DNA
aagcaccatatctaccatccactattgcctctgaccagtatgatacacgttctgtttgcaatgagatactaaagaattat

SEQ ID NO: 61644 - DNA, 80 bp, synthetic construct
  source 1..80: mol_type = other DNA
gggggagtctcagcgactgttaagggtaattggttacaagggaatttaaataaatgttcatccttgtttggtgttgctgt

SEQ ID NO: 61645 - DNA, 80 bp, synthetic construct
  source 1..80: mol_type = other DNA
gggattcgcgagaagagacttaaatatgagagtggtcttcgctttacagaagaacttttagaactagaggtaaaaaaagg

SEQ ID NO: 61646 - DNA, 80 bp, synthetic construct
  source 1..80: mol_type = other DNA
gcaaaggggtggtgcctgtcgaccctgaaatacaatgtatggctttattactgtatgatgtattagggtttaagaatgtg

SEQ ID NO: 61647 - DNA, 80 bp, synthetic construct
  source 1..80: mol_type = other DNA
caagatgagtcagcctatgttggtgacttactcatacaaacagaagaggttgaggttaagcggattaggggggtaacacg

SEQ ID NO: 61648 - DNA, 80 bp, synthetic construct
  source 1..80: mol_type = other DNA
gcctatgttggtgacttactcatacaaacagaagaggttgaggttaagcggattaggggggtaacacgtattcttgagcc

SEQ ID NO: 61649 - DNA, 80 bp, synthetic construct
  source 1..80: mol_type = other DNA
ctcatacaaacagaagaggttgaggttaagcggattaggggggtaacacgtattcttgagccagtaaaactaataaagag

SEQ ID NO: 61650 - DNA, 80 bp, synthetic construct
  source 1..80: mol_type = other DNA
tatctcttcattttattaattgaatactttttactcaggttatgtttattaattgctcttttctcggagcatactactat

SEQ ID NO: 61651 - DNA, 80 bp, synthetic construct
  source 1..80: mol_type = other DNA
tatgctccagtaaattggggacacggagaaataagtgactcaactactgtagagcctgttttagacggtccataccaacc

SEQ ID NO: 61652 - DNA, 80 bp, synthetic construct
  source 1..80: mol_type = other DNA
atacggatgtatgggtggctatcatatctattgaaccaaatgttaattcagagagcagacaatattctctgtttggagtc

SEQ ID NO: 61653 - DNA, 80 bp, synthetic construct
  source 1..80: mol_type = other DNA
aacaagcaaatcaccgtagttaatacctcagataaatggaagttcatggaaatgtttagaaataatagtaatgtcgaatt

SEQ ID NO: 61654 - DNA, 80 bp, synthetic construct
  source 1..80: mol_type = other DNA
ccagcataagcgtacgttaacttcgagtacaaaactagtcggtattctaaaacatggagggagattatggacatatcatg

SEQ ID NO: 61655 - DNA, 80 bp, synthetic construct
  source 1..80: mol_type = other DNA
gtgaaacaccaaacgctaccaccgattattcgacaacgtcaaatctaaatgaaattagtgttacaacatatgctgaattc

SEQ ID NO: 61656 - DNA, 80 bp, synthetic construct
  source 1..80: mol_type = other DNA
tatattataccacgatctcaagaatctaagtgtactgaatacattaacattggattaccaccaatacaaaatactagaaa

SEQ ID NO: 61657 - DNA, 80 bp, synthetic construct
  source 1..80: mol_type = other DNA
agttgcatttaaacctccgaatgattattggatactagttaactcaaattctaatggtgtagtgcttgagggtactaata

SEQ ID NO: 61658 - DNA, 80 bp, synthetic construct
  source 1..80: mol_type = other DNA
gaatgtaaaagaaccaggcacattcaagatgggattatcacaattgaaccctttgtcaaaggccattttagataatatag

SEQ ID NO: 61659 - DNA, 80 bp, synthetic construct
  source 1..80: mol_type = other DNA
ctctagccaaattcaattaaatgaatgtgcaaagaccattgaacaaatactttcaaatcttgagattaatataggtgatc

SEQ ID NO: 61660 - DNA, 80 bp, synthetic construct
  source 1..80: mol_type = other DNA
ttagtgaaagtgtaccattacctaagaagactacaggtgtagatgagttgctagggaagttttatgagaatgaaatcata

SEQ ID NO: 61661 - DNA, 80 bp, synthetic construct
  source 1..80: mol_type = other DNA
gttcttatatcaggttctttacagtgtttaaagacggaatagggttagttgataatgataatatcgattctaagacagag

SEQ ID NO: 61662 - DNA, 80 bp, synthetic construct
  source 1..80: mol_type = other DNA
ttagtcttgcacagaataataaagtgcggttttattctaaagtaaggctgcttggtttaactgttgaccagtccacagtt

SEQ ID NO: 61663 - DNA, 80 bp, synthetic construct
  source 1..80: mol_type = other DNA
tactaatgagggaagggtatacaattgaattattacagaaacaaaatgtagctgtagaacagcagctgttttgtcaggaa

SEQ ID NO: 61664 - DNA, 80 bp, synthetic construct
  source 1..80: mol_type = other DNA
ctgcagaattgaacaaatacttacaagccaaatctcaagtattatgtgcaaatataatgaataagcattgggataaacca

SEQ ID NO: 61665 - DNA, 80 bp, synthetic construct
  source 1..80: mol_type = other DNA
tccagggcatggagaaaaagataatcccaaatagcccaagtggtcagcttttaaaaagttttttccgaatgacacctgac

SEQ ID NO: 61666 - DNA, 80 bp, synthetic construct
  source 1..80: mol_type = other DNA
gaggtgatcgtaaagtccttaacatccaggctgcattggaaaaagcattgcgctgggcatctgggatctctgaggtgatc

SEQ ID NO: 61667 - DNA, 80 bp, synthetic construct
  source 1..80: mol_type = other DNA
acaagcacaggaaagaagataagattcaaacgcaaactcatgtatgttagtgcagatgcaacaaaatggtcccccggtga

SEQ ID NO: 61668 - DNA, 80 bp, synthetic construct
  source 1..80: mol_type = other DNA
aacatggaagataggtcagagtctgttgaagacttcctatcattcttctcaggtggagtctcagctcctgttaaaggtaa

SEQ ID NO: 61669 - DNA, 80 bp, synthetic construct
  source 1..80: mol_type = other DNA
ttggttacaagggaaccttaataagtgctcttctttatttggtgtagctgtttcgctcttgtttaaaagggtatggcttg

SEQ ID NO: 61670 - DNA, 80 bp, synthetic construct
  source 1..80: mol_type = other DNA
aatttcaaaataactggaactcatattgagtttatagaggttactgttactgctgatgttgcaagaggaattcgtgaaaa

SEQ ID NO: 61671 - DNA, 80 bp, synthetic construct
  source 1..80: mol_type = other DNA
ggcttaagtatgaaggtgggcttcaatttattgaagaactgctagagttagaagtaaagaaaggaaatttacaagaaata

SEQ ID NO: 61672 - DNA, 80 bp, synthetic construct
  source 1..80: mol_type = other DNA
tacagaataacatttaatgtagtagcagtcaagacagatggttccaatatctctacacagtggccaagtaggagaaatga

SEQ ID NO: 61673 - DNA, 80 bp, synthetic construct
  source 1..80: mol_type = other DNA
acaaaagataatttaggtttgcaagatgatatagctgcaacacgtatctgcatagaagtgtggagatggtgtaaagcaaa

SEQ ID NO: 61674 - DNA, 80 bp, synthetic construct
  source 1..80: mol_type = other DNA
tgctcaagatgttcaagattggtttaatgcattgtactttgaaaatcagacattgtatgattggatagaaaggtttcggc

SEQ ID NO: 61675 - DNA, 80 bp, synthetic construct
  source 1..80: mol_type = other DNA
gaaaaggtgtagtgccagttgaccctgaaattcagtgtatggcgttattgttgtatgatgtgttaggttacaagagtgta

SEQ ID NO: 61676 - DNA, 80 bp, synthetic construct
  source 1..80: mol_type = other DNA
taacgtctatgtcaagtaggcaatggtctgaggaaatgagcctgatgtcagaggatgagatagatgatgaagaagaatac

SEQ ID NO: 61677 - DNA, 80 bp, synthetic construct
  source 1..80: mol_type = other DNA
ggagaaacagttaatgatcactttcgggaagtcgatatagaagcacaagcactagttaaaaagagaaatatacagcctga

SEQ ID NO: 61678 - DNA, 80 bp, synthetic construct
  source 1..80: mol_type = other DNA
agacatattacctgattcattattctcattcagacatgttgatgttttgttgaggagattatttcctcgagaccctatat

SEQ ID NO: 61679 - DNA, 80 bp, synthetic construct
  source 1..80: mol_type = other DNA
aaagagcatcattagaggctatgttcaatttaaaattccatgttagcagcccgaaaatgaggtatttcagtataccagat

SEQ ID NO: 61680 - DNA, 80 bp, synthetic construct
  source 1..80: mol_type = other DNA
tatcttcgttttattaggtctgttttcccttttattttaggtaaatgagattaatgctcttttctcggagcatactacta

SEQ ID NO: 61681 - DNA, 80 bp, synthetic construct
  source 1..80: mol_type = other DNA
tacagacctcaagtattatgtaatcctacaattgatggcttattaaattattgtaagcaatggctgacagaggaacatga

SEQ ID NO: 61682 - DNA, 80 bp, synthetic construct
  source 1..80: mol_type = other DNA
gttaatggatcaagtgttatggcatcctttgaaaagaatgaaaacagccataaggacagatattatgagtcacgaaaacc

SEQ ID NO: 61683 - DNA, 80 bp, synthetic construct
  source 1..80: mol_type = other DNA
aagaaattttcttctccttcagaccacaattcaaggtgtttacctgccgtccactataagttctgaccaatgtaatacaa

SEQ ID NO: 61684 - DNA, 80 bp, synthetic construct
  source 1..80: mol_type = other DNA
tcggggtaattggcttcagggcaaccttaataaatgctcttcattattcggtgctgctgtatcattgctatttaggagtg

SEQ ID NO: 61685 - DNA, 80 bp, synthetic construct
  source 1..80: mol_type = other DNA
caattcatgcctatgaccatggtggggttatactgttcatcctcccttcaaaatccctagaggttgttggatcttatatc

SEQ ID NO: 61686 - DNA, 80 bp, synthetic construct
  source 1..80: mol_type = other DNA
gagctgcagtatcattattattcagacgtatctgggcagagttgttccctgaattagaatgcttttttgaatttgcacat

SEQ ID NO: 61687 - DNA, 80 bp, synthetic construct
  source 1..80: mol_type = other DNA
caatggatttaggagcatccccgcaattggcacaattggctgttgtcatctgcactagtaaagttgagaggttatatggt

SEQ ID NO: 61688 - DNA, 80 bp, synthetic construct
  source 1..80: mol_type = other DNA
gtgggggaaaccaaatgtgccatgtattgtctttaagcattgtgctttacgcacagggttgaggactaagcaagcaatca

SEQ ID NO: 61689 - DNA, 80 bp, synthetic construct
  source 1..80: mol_type = other DNA
aacaatacaaacagaggaagttgaagttaaacgaataagaggtgtaacacgtgtgcttgaacctgttaagcttattaaga

SEQ ID NO: 61690 - DNA, 80 bp, synthetic construct
  source 1..80: mol_type = other DNA
tttgtttttaaagaagttacaggcaataatgtcatgagttcatttgagaataatgaagatgtgtatatgtctagatataa

SEQ ID NO: 61691 - DNA, 80 bp, synthetic construct
  source 1..80: mol_type = other DNA
gggggggcatctgcattagagtgtttagatttacttgaccgtctctacgcagtcaggcatgatgtagttgatcaactgat

SEQ ID NO: 61692 - DNA, 80 bp, synthetic construct
  source 1..80: mol_type = other DNA
tattgcatacaaatatttgagtttaaccaaagatgaactgattaattattatagtcctaaggtgcatttccaggcgagtc

SEQ ID NO: 61693 - DNA, 80 bp, synthetic construct
  source 1..80: mol_type = other DNA
agaatgttaaagaaccgggaacacttaaaattgggctttcacagcttaatcctgtgtctaaagccattatcgaaaacgtg

SEQ ID NO: 61694 - DNA, 80 bp, synthetic construct
  source 1..80: mol_type = other DNA
ggtaaacataagtctgaaaagggcttatttggcgagatgattgagagcatcaatatagggagtcagatccaactcaatga

SEQ ID NO: 61695 - DNA, 80 bp, synthetic construct
  source 1..80: mol_type = other DNA
gtgttctaaaactattgagaaactcctgtctaatttagagataaacataggagaaacacatgcctctataccttcaccta

SEQ ID NO: 61696 - DNA, 80 bp, synthetic construct
  source 1..80: mol_type = other DNA
tcagtaagtacatgatttctattttaagaaaaaccgcagcctggcatatagggcatcttattcgtgacatcactgagagt

SEQ ID NO: 61697 - DNA, 80 bp, synthetic construct
  source 1..80: mol_type = other DNA
ttaatagcacactcaggattgaggaggtctaagtactggtctgtacatgcttatgaccacgggaatgttattctctttat

SEQ ID NO: 61698 - DNA, 80 bp, synthetic construct
  source 1..80: mol_type = other DNA
caaggatggaatcggtctattggatcaggataatttagattccaaggttgagattgatggtgtagtttggcgctattcta

SEQ ID NO: 61699 - DNA, 80 bp, synthetic construct
  source 1..80: mol_type = other DNA
cagactgcttgctcttaacattgcatttgaaaagtctttattggctacttctacctggttccaatactatactgaagatc

SEQ ID NO: 61700 - DNA, 80 bp, synthetic construct
  source 1..80: mol_type = other DNA
aaagcattattaatcagtcttgcacagaataataaagtacggttctattcaaaggttcgattattaggtttaacagtgga

SEQ ID NO: 61701 - DNA, 80 bp, synthetic construct
  source 1..80: mol_type = other DNA
gaaagcaagtatggggatatactaatgcgggagggatatactattgattccatcgtaaaggtggatgtcaaggttgaaca

SEQ ID NO: 61702 - DNA, 80 bp, synthetic construct
  source 1..80: mol_type = other DNA
gcaattgttctgtcaagaggtggtagagctcagtgcacaggaattaaataagtacttacaagccaaatctcaagttttat

SEQ ID NO: 61703 - DNA, 80 bp, synthetic construct
  source 1..80: mol_type = other DNA
tcattcatgggatggagaagaagattatccctaatagtccatctgggcaaatattaaaaagtttttttaagatgacccca

SEQ ID NO: 61704 - DNA, 80 bp, synthetic construct
  source 1..80: mol_type = other DNA
tatattgatgagatggaagagtgttctgaggctgtccgtgattttttgtccttcttttctggtggtgtctcagcatgtgt

SEQ ID NO: 61705 - DNA, 80 bp, synthetic construct
  source 1..80: mol_type = other DNA
ttaaggcattagatctaggtgcatgcccgcaacttgctcagttagctattgtattgtgtactagtaaagtagagaggctt

SEQ ID NO: 61706 - DNA, 80 bp, synthetic construct
  source 1..80: mol_type = other DNA
ccccagaggacgggataatttactggtgtatttagtgaggaaacttaatgatcccagcattatcacagcaatgactatgc

SEQ ID NO: 61707 - DNA, 80 bp, synthetic construct
  source 1..80: mol_type = other DNA
tcttggcagctgctgatagctttgcaacatcttatcatcctactgaaaaggacttagatttattcaatacacttgtaagt

SEQ ID NO: 61708 - DNA, 80 bp, synthetic construct
  source 1..80: mol_type = other DNA
tgtacattctcgaaagagtatgcttggaaggactttctaaatgaagtgcgctgtgaggtagtgacagcacgacatgtcca

SEQ ID NO: 61709 - DNA, 80 bp, synthetic construct
  source 1..80: mol_type = other DNA
cttgcaagtcatgaaagacggggtatatagagaattagggttggatattgggtcacctgaggtattgaagaggattgctc

SEQ ID NO: 61710 - DNA, 80 bp, synthetic construct
  source 1..80: mol_type = other DNA
atccttgtatagcccaaaagaaaatgttggtctacaggatgatttagcagcaactcgattgtgcattgaagtatggcgtt

SEQ ID NO: 61711 - DNA, 80 bp, synthetic construct
  source 1..80: mol_type = other DNA
gacgtaaaggagttgttccggttgacccagagatccagtgtatgggactccttctgtacgacgtgttaggctataaaagt

SEQ ID NO: 61712 - DNA, 80 bp, synthetic construct
  source 1..80: mol_type = other DNA
gtactccagatgcaggcaaaccgaagagcttattcaggcaagcagtatgatgcatattgtattcaaacttataatgagga

SEQ ID NO: 61713 - DNA, 80 bp, synthetic construct
  source 1..80: mol_type = other DNA
cctgtccgtttgatcaaaagttgggtatctaagggtttagcaatagaaaaagtctataaccccatagggattatcttaat

SEQ ID NO: 61714 - DNA, 80 bp, synthetic construct
  source 1..80: mol_type = other DNA
cctataattttggaacagcaccactagcgttattgaacccttatgatttaacagaattggaaagtgtagtcaaaggttgg

SEQ ID NO: 61715 - DNA, 80 bp, synthetic construct
  source 1..80: mol_type = other DNA
ggtgaaaccgtaaatgataggttcttagaattagataaggaggcacaggcactagttagagaaaaaggtattcaaccaga

SEQ ID NO: 61716 - DNA, 80 bp, synthetic construct
  source 1..80: mol_type = other DNA
atcgccctcagcaactatgtgagcccaatatcggaaatttattagaatattgtaaaaattggttgactgaagagcacaaa

SEQ ID NO: 61717 - DNA, 80 bp, synthetic construct
  source 1..80: mol_type = other DNA
tttgtttttaaggaagtcactggttcaaatgttgcacaggtctttgagcaacatgaacaggaacatatgcttaaatatgc

SEQ ID NO: 61718 - DNA, 80 bp, synthetic construct
  source 1..80: mol_type = other DNA
agaatccagaaagcctagaaatttcttactagtgcaactaactgtacagggtgtttatatgccttctacaataagttcag

SEQ ID NO: 61719 - DNA, 80 bp, synthetic construct
  source 1..80: mol_type = other DNA
ggcatctttggggatattattgatagtgtaaatattgctagccaagtccagctcaatgagtgttcaaaaataattgagaa

SEQ ID NO: 61720 - DNA, 80 bp, synthetic construct
  source 1..80: mol_type = other DNA
ggaagctacatctaaccttgcgactccaaagaaaactactggggttgatgaacttcttggaaagttttatgataatgaat

SEQ ID NO: 61721 - DNA, 80 bp, synthetic construct
  source 1..80: mol_type = other DNA
aaaacattattgataaacttagctcagaataataaagttaggttctattcaaaagtcaggttgttaggactcactgttga

SEQ ID NO: 61722 - DNA, 80 bp, synthetic construct
  source 1..80: mol_type = other DNA
aaagtaggaaaaccgtatgtgccaatccctcttggaggggatgggtcaatgtcaattatggaacttgcaacagcaggtat

SEQ ID NO: 61723 - DNA, 80 bp, synthetic construct
  source 1..80: mol_type = other DNA
atctttatataatcagaaagacaatttaggccttcaagatgatttagctgctacaagattatgtatagaagtatggcggt

SEQ ID NO: 61724 - DNA, 80 bp, synthetic construct
  source 1..80: mol_type = other DNA
ggaggaagggggttgttcctgttgatcctgagattcaatgtgttggtttactgttatatgatcttctgggttataaaagt

SEQ ID NO: 61725 - DNA, 80 bp, synthetic construct
  source 1..80: mol_type = other DNA
gaggggttactaaggtcttggaaccagttaggttaataaaaagttgggtctccaagggcttaggtattgataaagtatat

SEQ ID NO: 61726 - DNA, 80 bp, synthetic construct
  source 1..80: mol_type = other DNA
ttgaaagtgttgtcaagggttggggggaaacagttaatgacagattcattgaattggatacagaagcacaggcactcgtt

SEQ ID NO: 61727 - DNA, 80 bp, synthetic construct
  source 1..80: mol_type = other DNA
tgacagattcattgaattggatacagaagcacaggcactcgttcgggagaagggcatccagcctgaggatatattgccgg

SEQ ID NO: 61728 - DNA, 80 bp, synthetic construct
  source 1..80: mol_type = other DNA
actttttcctaaggatcctgtatcctcgttttactagggtatatacgtctcaattaattctacttatgttattcattgtt

SEQ ID NO: 61729 - DNA, 80 bp, synthetic construct
  source 1..80: mol_type = other DNA
atctgagaaaggtttattcggggagttactagagagtattaatattgcaagtcaaatccaacagaatgaatgttcacgtg

SEQ ID NO: 61730 - DNA, 80 bp, synthetic construct
  source 1..80: mol_type = other DNA
aacttagaagttaatgtaggggaggtcacaatgaatttagcaaatccaaggaaaacaactggtgtggatgagctgctggg

SEQ ID NO: 61731 - DNA, 80 bp, synthetic construct
  source 1..80: mol_type = other DNA
gggctgctgtttctttactctttagacgggtttgggctgaactgttccctgaactagaatgtttttttgaatttgcacat

SEQ ID NO: 61732 - DNA, 80 bp, synthetic construct
  source 1..80: mol_type = other DNA
tatggacttaggggcttccccacagttagcgcaacttgcagttgttatctgtactagtaaggtagaacggttatatggca

SEQ ID NO: 61733 - DNA, 80 bp, synthetic construct
  source 1..80: mol_type = other DNA
gtggggaaagccaaatgtaccatgtatagtgtttaagcattgtgcactacgtaccgggctaaggacaaagcaggccataa

SEQ ID NO: 61734 - DNA, 80 bp, synthetic construct
  source 1..80: mol_type = other DNA
ctgaagaagtagaagtcaaacggatcaggggtgtcacacgtgtattagaaccagttaagttaataaaaagttgggtgtcc

SEQ ID NO: 61735 - DNA, 80 bp, synthetic construct
  source 1..80: mol_type = other DNA
ggtgagactgtgaatgataggtttttagaggttgatggcgatgcacagaggctagttagggaaaagaatatattacctga

SEQ ID NO: 61736 - DNA, 80 bp, synthetic construct
  source 1..80: mol_type = other DNA
ctatagaaaagattttgtcaaatttggaaataaatataggggagacaaacacatctatccctgtgcctaataagactaca

SEQ ID NO: 61737 - DNA, 80 bp, synthetic construct
  source 1..80: mol_type = other DNA
ttatttgagaaaggtttgcatgggaatttgccagaagaagcaaagatacatttagagacagtagagtgggccagaaagtt

SEQ ID NO: 61738 - DNA, 80 bp, synthetic construct
  source 1..80: mol_type = other DNA
atgggggaagccaaacataccatgcatcgtatataagcattgtgttttacgaactgggctaagaaccagacaacccatca

SEQ ID NO: 61739 - DNA, 80 bp, synthetic construct
  source 1..80: mol_type = other DNA
tcatggagcgctcatacaagcctagtggcagtagccactatgacccctatgatagggtactacaacatggtagtgtcaaa

SEQ ID NO: 61740 - DNA, 80 bp, synthetic construct
  source 1..80: mol_type = other DNA
gctgagtatgtgaaagtgataaggggccatggtgtggtcatcttgactgttgttgtttctcacatttttagtgttttgtt

SEQ ID NO: 61741 - DNA, 80 bp, synthetic construct
  source 1..80: mol_type = other DNA
agtgccacactgggtcacagtgttcctaatagttgctttcagaattgttaggttaattggagcagttgttggtgaaaaaa

SEQ ID NO: 61742 - DNA, 80 bp, synthetic construct
  source 1..80: mol_type = other DNA
tagaagttagaaatgctgagggaaaagttataagtgttataccaacaacaacatcttggttaaatcggatttctgggttt

SEQ ID NO: 61743 - DNA, 80 bp, synthetic construct
  source 1..80: mol_type = other DNA
gttcagtccaaatttacccaaaaagttagaactggcataatgtcaacagctagagtgatacctaatggtgtcgttattgt

SEQ ID NO: 61744 - DNA, 80 bp, synthetic construct
  source 1..80: mol_type = other DNA
tgaatcaaaagaaagctcaggcactggcttcagggttcaaaattacatagtcacagccgggcatgttgttggcaatgaaa

SEQ ID NO: 61745 - DNA, 80 bp, synthetic construct
  source 1..80: mol_type = other DNA
cacaaataaaggttaagtggggagatgttaatgtttacacaaaagttgtttacatgcatcctaccaaggacattgcctat

SEQ ID NO: 61746 - DNA, 80 bp, synthetic construct
  source 1..80: mol_type = other DNA
cttgccttaccatcagagtatcaagcactcccaacatacaaatttgctaagctgattgaggatggcaccgttgttataac

SEQ ID NO: 61747 - DNA, 80 bp, synthetic construct
  source 1..80: mol_type = other DNA
ttttggctatggtgatgttgagactactcgtgtctcaaatggagttgttgagccacaacctttaattgtcaaaacggttt

SEQ ID NO: 61748 - DNA, 80 bp, synthetic construct
  source 1..80: mol_type = other DNA
atcaatggaggactgtggtgtccttgccgttgcggttacagaaggtgttattgttaaagataacataacatatgctgtta

SEQ ID NO: 61749 - DNA, 80 bp, synthetic construct
  source 1..80: mol_type = other DNA
gcacccgaaacggcatgagtggttcacctgttacaaatgttgatggtagaattgttggcatacatcaagccaacactgga

SEQ ID NO: 61750 - DNA, 80 bp, synthetic construct
  source 1..80: mol_type = other DNA
ttcacaggcggtgctgtcattataaagcaagaggatctaccaccccaaaagaagccacaaagggaaatagaccttgaaaa

SEQ ID NO: 61751 - DNA, 80 bp, synthetic construct
  source 1..80: mol_type = other DNA
caaaattaaagaattagaggatgcccttaaaggtcagatgaatcaaggcctaaatgaaaatcagataattgaattgattc

SEQ ID NO: 61752 - DNA, 80 bp, synthetic construct
  source 1..80: mol_type = other DNA
ggcttgctgttggtcgtgagattgaaatcttacggcatgaaattaatatgaaccaagcaaaaggtaaaaataaaaggaag

SEQ ID NO: 61753 - DNA, 80 bp, synthetic construct
  source 1..80: mol_type = other DNA
aatcaccataagaggcgcaggaagggaaaagtttggactgaggaagagtacaaagaccttttggaaaagggatttaccag

SEQ ID NO: 61754 - DNA, 80 bp, synthetic construct
  source 1..80: mol_type = other DNA
acagcaattacgggacatggctgaagtgcttagagaggcagactattctgaagatgatgaaagtgatgagtatgaaactg

SEQ ID NO: 61755 - DNA, 80 bp, synthetic construct
  source 1..80: mol_type = other DNA
gttatccacaatggtcagacccagaagattctgaggaggttgaaagggaatggtttgggccaaagaaaaaaatacttgat

SEQ ID NO: 61756 - DNA, 80 bp, synthetic construct
  source 1..80: mol_type = other DNA
gaggttgaggaaggttggtccaatactgatttctgggagcagtgccagaaggtgtggaaggagatggagcccatgccaga

SEQ ID NO: 61757 - DNA, 80 bp, synthetic construct
  source 1..80: mol_type = other DNA
agagtctgttaacactttaccgtcacacttgagtgataagtacggcattacatgctatgttgtcacaaagagtgatatgg

SEQ ID NO: 61758 - DNA, 80 bp, synthetic construct
  source 1..80: mol_type = other DNA
atgtctcaggagtgagagagggtaatgaatatgtcacttacctttttaaaccgggacttaatgactgggttgaggttgac

SEQ ID NO: 61759 - DNA, 80 bp, synthetic construct
  source 1..80: mol_type = other DNA
aagccttagcccgtgatttgcaggaataccaagccaaggttgaggagaagattaaggcaaatgttgttcgtggtcagtgg

SEQ ID NO: 61760 - DNA, 80 bp, synthetic construct
  source 1..80: mol_type = other DNA
cttgagggagtcaatccaaaaactatcataagtgagttggatgaattatggctgaaactgaaccacttaatgtggaccca

SEQ ID NO: 61761 - DNA, 80 bp, synthetic construct
  source 1..80: mol_type = other DNA
tggcatagtccctttcatacagaggaaaaaaattaatagaaagaaacagcaaaaaaacttgaagggggccccgaaacagg

SEQ ID NO: 61762 - DNA, 80 bp, synthetic construct
  source 1..80: mol_type = other DNA
ggccccaaaaccagaacaactaaggcttgggtactggagagaactattacaacctggtgaatattatcttacccccccac

SEQ ID NO: 61763 - DNA, 80 bp, synthetic construct
  source 1..80: mol_type = other DNA
attgccctttggttggtgttttaccaatagataggcctataagtgattatgatgaaccaattgatgatttattaaatttg

SEQ ID NO: 61764 - DNA, 80 bp, synthetic construct
  source 1..80: mol_type = other DNA
ttgccaaaatgtgaggaaaagccgccatacgcaccttctacatggggaccagaagcgtataggcggtcatttgataaatt

SEQ ID NO: 61765 - DNA, 80 bp, synthetic construct
  source 1..80: mol_type = other DNA
tttttacagaaagccaactgaaaatataaaagaaaaatatcctagggagtggaaatttgcaatgtcagtgcttagaagag

SEQ ID NO: 61766 - DNA, 80 bp, synthetic construct
  source 1..80: mol_type = other DNA
aatttgatttcctacaggacagtgttcttattgacataacatccacctcaaagaatgctgactccacacctgcttatcca

SEQ ID NO: 61767 - DNA, 80 bp, synthetic construct
  source 1..80: mol_type = other DNA
aagacattatggtggaaaactgagacagattaccttaaagagcgtggttaccaagattacattaaagagttagattcaat

SEQ ID NO: 61768 - DNA, 80 bp, synthetic construct
  source 1..80: mol_type = other DNA
aagatctggagagaggcctgatgtcttatggtatttatttttaaagaaagagattttaaagataagtaaaattgaggaag

SEQ ID NO: 61769 - DNA, 80 bp, synthetic construct
  source 1..80: mol_type = other DNA
gctaacatacataaacctactgccattgttggtgtattgtatcatgagtataacaggcttaaatcagagaatgaaagctt

SEQ ID NO: 61770 - DNA, 80 bp, synthetic construct
  source 1..80: mol_type = other DNA
aagacattaggcaaattgtttgtgctgatcccattttttctagaattggttgtgtatttgaagagcaccaaaatcaattg

SEQ ID NO: 61771 - DNA, 80 bp, synthetic construct
  source 1..80: mol_type = other DNA
atgaaaaatcgaactctgacacgcatgggtcaatgtggatggtcaccgtttatgggaggtttccataaacgcataaagcg

SEQ ID NO: 61772 - DNA, 80 bp, synthetic construct
  source 1..80: mol_type = other DNA
cttagttgataaaggcaatgattacttcattgagtttgactggacgcgctatgatggtaccatccctaatgaagtcttta

SEQ ID NO: 61773 - DNA, 80 bp, synthetic construct
  source 1..80: mol_type = other DNA
gggctattaaggactttagattctcgtgtcttaggggagatttgcaaacaaaagaaaacagagatgtctacaactggtat

SEQ ID NO: 61774 - DNA, 80 bp, synthetic construct
  source 1..80: mol_type = other DNA
tgtgagaacatatttagaagatatgtgatgttaccttcaggagaagtgacaatccaggacagggggaacccctctgggca

SEQ ID NO: 61775 - DNA, 80 bp, synthetic construct
  source 1..80: mol_type = other DNA
aatatccacaactatggataataacatctgtaatgtcttcttccaggcatttgagtttgcatatcttaatactgaattgg

SEQ ID NO: 61776 - DNA, 80 bp, synthetic construct
  source 1..80: mol_type = other DNA
attctgatgagttgaaggaaaattgggataagtatgattcacttatatatggagatgacaggctaaccacaacccctatc

SEQ ID NO: 61777 - DNA, 80 bp, synthetic construct
  source 1..80: mol_type = other DNA
ttatgtgacaattatgtggacagagtcattgaaatgtatgctgatgtctttgggatgtgggttaagagagagaaagtaag

SEQ ID NO: 61778 - DNA, 80 bp, synthetic construct
  source 1..80: mol_type = other DNA
agtttcaaataaaattaatggattgaccttttgtggctttactgttcaagagtcaaatggcctatttgtccccataccaa

SEQ ID NO: 61779 - DNA, 80 bp, synthetic construct
  source 1..80: mol_type = other DNA
ctgatacagataaactacttgctggtttaataacaccaataaagaaattacctgatattctgtcactctatgggaagctc

SEQ ID NO: 61780 - DNA, 80 bp, synthetic construct
  source 1..80: mol_type = other DNA
gaaaacagagcgctcatctttacaattggatatatcaatcctcagacatgagcttgagcgtgcaagaccaccaactaaaa

SEQ ID NO: 61781 - DNA, 80 bp, synthetic construct
  source 1..80: mol_type = other DNA
ctttgctaccgcatccttggccataacttgccggaggaccataaatttaaaaattacattttggtcgccttagaggtagt

SEQ ID NO: 61782 - DNA, 80 bp, synthetic construct
  source 1..80: mol_type = other DNA
ggccaggcacatccgtgctagtggtggggaagaaccctactatatcacggatagcatgctggataggctttggagtggag

SEQ ID NO: 61783 - DNA, 80 bp, synthetic construct
  source 1..80: mol_type = other DNA
gtccaaagcaaagtcatggctggtaaacagccccagcaggccctgcccaaggcagcggcaaagcaaatagccaaggaggt

SEQ ID NO: 61784 - DNA, 80 bp, synthetic construct
  source 1..80: mol_type = other DNA
ggtcaaacaggagaagaaggaaccagtggttcgtaaaaagagacagttttacccaaatccaaagtttaataatagattca

SEQ ID NO: 61785 - DNA, 80 bp, synthetic construct
  source 1..80: mol_type = other DNA
ataagaaatttgtgaaaaaacagttagacaaaaatttgaagaaacaagggtttgaaggaccaaaacctagatttgctgtc

SEQ ID NO: 61786 - DNA, 80 bp, synthetic construct
  source 1..80: mol_type = other DNA
accgtttctgccaccattggtaaggtcgggccaaataaaagtcagggacctgaactccaaatatctactttcatgcatcc

SEQ ID NO: 61787 - DNA, 80 bp, synthetic construct
  source 1..80: mol_type = other DNA
cagcttgatgaaagagccaaatgatggtacaaattttggtcccctacagtcagcagctgcacaatggggcttgtggcgct

SEQ ID NO: 61788 - DNA, 80 bp, synthetic construct
  source 1..80: mol_type = other DNA
tgaaaaatttgagcgtcacgtttactcctcttgttggtccatcagcagttaccgggtctgttttccgcatatccctaaac

SEQ ID NO: 61789 - DNA, 80 bp, synthetic construct
  source 1..80: mol_type = other DNA
atggcacaatcacctggagccacgtcatgggggggccttggtgctaggaagcacaaggatgttgccgtgggaaagcagtt

SEQ ID NO: 61790 - DNA, 80 bp, synthetic construct
  source 1..80: mol_type = other DNA
gggccttggtgctaggaagcacaaggatgttgccgtgggaaagcagtttacttggaagctacagaagggagacctcacag

SEQ ID NO: 61791 - DNA, 80 bp, synthetic construct
  source 1..80: mol_type = other DNA
tacttggaagctacagaagggagacctcacaggccccagggaaacctggtggctcacagacacaaatgaggagggagcac

SEQ ID NO: 61792 - DNA, 80 bp, synthetic construct
  source 1..80: mol_type = other DNA
taattaggccttttagcgttggatgcatcatattgtatggtttactgattggtcttttgttttcacacatttcacaagct

SEQ ID NO: 61793 - DNA, 80 bp, synthetic construct
  source 1..80: mol_type = other DNA
aaagttgtgggccacttcttgagatccatggccttggtgaaacaacctctacctacaaggatgcagcatgggctggagac

SEQ ID NO: 61794 - DNA, 80 bp, synthetic construct
  source 1..80: mol_type = other DNA
ctctttattgttgaggtcaggggccgctgggagtttgcaaattacaacagcaaacctgcattaggtatgttggagagagt

SEQ ID NO: 61795 - DNA, 80 bp, synthetic construct
  source 1..80: mol_type = other DNA
gactgaaactaccaatgtttcaattgaagtagctaatggtaatatgatcatgactgttccacagaattcccaacttgcaa

SEQ ID NO: 61796 - DNA, 80 bp, synthetic construct
  source 1..80: mol_type = other DNA
ggcatatgagtgaaaggttcgagaggaccacaaatgcaagtactgttggtgaaacaatatggcagattgtggatgagggt

SEQ ID NO: 61797 - DNA, 80 bp, synthetic construct
  source 1..80: mol_type = other DNA
gctggcctggttgcaaatgttgcaccacccccgttcacttggttgattaaagggggatggtggtttgttaagaaattgct

SEQ ID NO: 61798 - DNA, 80 bp, synthetic construct
  source 1..80: mol_type = other DNA
aggtagatcagcaaatactgatgttcaatatctagtctatgcatcattggcagatgcccaaaataacaggcctgtagagg

SEQ ID NO: 61799 - DNA, 80 bp, synthetic construct
  source 1..80: mol_type = other DNA
cacaaaattacacaaaggtcacacgacagacaacactctcttccacgcaaattaatgcacctaatacaggccctaacacc

SEQ ID NO: 61800 - DNA, 80 bp, synthetic construct
  source 1..80: mol_type = other DNA
actacagggtcaattggaaataacaaccaacagtggccgatacctccaacaggggtgccggttggtgacttttatgtctg

SEQ ID NO: 61801 - DNA, 80 bp, synthetic construct
  source 1..80: mol_type = other DNA
tggcaggatgacaacattgcatatgggtggtcaatctggcattcaagccacgactttggtgaatgggatgatatatcgta

SEQ ID NO: 61802 - DNA, 80 bp, synthetic construct
  source 1..80: mol_type = other DNA
cagaccacccagaaccatcaacaagtccagtctccaattgggaattcacagttttggaaaataacacaattgttggtgct

SEQ ID NO: 61803 - DNA, 80 bp, synthetic construct
  source 1..80: mol_type = other DNA
tttaggactggtgtgtgcctcgatccagatgttggtgaaacactaaagccacaaacctgtataaactggaggtgggacgg

SEQ ID NO: 61804 - DNA, 80 bp, synthetic construct
  source 1..80: mol_type = other DNA
ggaatggggtgtgtgtggtttcagaaatctgaagcactagtgtggacactggatggccagaagctgtcaggatggaacac

SEQ ID NO: 61805 - DNA, 80 bp, synthetic construct
  source 1..80: mol_type = other DNA
gctagatggtgttggtacaacccaattgacagtcgcctggagacagcacaacagaacaatttacggatgggctaatgttg

SEQ ID NO: 61806 - DNA, 80 bp, synthetic construct
  source 1..80: mol_type = other DNA
ttgcttggaactctgaagaatggcatacaaatgcagaacaaccacaccagcctatattgaggctaatatattggctagta

SEQ ID NO: 61807 - DNA, 80 bp, synthetic construct
  source 1..80: mol_type = other DNA
aaaatcaatgttttgtctgaaccagaagattttgatgttgtccaaaaatccccattagcttatttagaagattacactac

SEQ ID NO: 61808 - DNA, 80 bp, synthetic construct
  source 1..80: mol_type = other DNA
agcacaatcaaaatccgccatccaaaagctcaactttcaaacatttcagaaacctgaagggggaggcactttgcgggcac

SEQ ID NO: 61809 - DNA, 80 bp, synthetic construct
  source 1..80: mol_type = other DNA
aatactcaaccactcccaggcaaggggattttgccgtaatatggcagattggtaggcataattttgatatgtctaccggt

SEQ ID NO: 61810 - DNA, 80 bp, synthetic construct
  source 1..80: mol_type = other DNA
aagggtacaccagttgaaagtttgagtgattatgtcatgccccagcagaaagatgcccttattggcatgtggtatcgtgc

SEQ ID NO: 61811 - DNA, 80 bp, synthetic construct
  source 1..80: mol_type = other DNA
tctaactagtgttggaccaagatcagatgttttgacccttcatttccatttgccaactgtggagaaagatttagttgagc

SEQ ID NO: 61812 - DNA, 80 bp, synthetic construct
  source 1..80: mol_type = other DNA
agatcattgatcaaattcagcatcgctacagattgaccccgctggattcggattcagactcctctagttctgattccgac

SEQ ID NO: 61813 - DNA, 80 bp, synthetic construct
  source 1..80: mol_type = other DNA
tttgagcccgaagatagatttgagaagttgaaaatctatgagggtctcgggtccagtggtctgtcacaccacgtgtctga

SEQ ID NO: 61814 - DNA, 80 bp, synthetic construct
  source 1..80: mol_type = other DNA
tggaattgaatcagatgaaactatcccattttatgatagggttacagcttggtatacaggtttaatacaacaatttaaaa

SEQ ID NO: 61815 - DNA, 80 bp, synthetic construct
  source 1..80: mol_type = other DNA
tggtgctgcgatagctgttaagaaaaagttgcgccgaggccacgccgagtaggatcgagggtacagcgctaaattgatta

SEQ ID NO: 61816 - DNA, 80 bp, synthetic construct
  source 1..80: mol_type = other DNA
ctagaggtgttaatcaataaatcattgatttggtgattgatatgatcaatttgaaattgaaatttccagcaaaaaaaaaa

SEQ ID NO: 61817 - DNA, 80 bp, synthetic construct
  source 1..80: mol_type = other DNA
gcatgtacaatgacattgtcattgatttagtggtccaggcttttggctttgcttacacatggacagctatagcactgatg

SEQ ID NO: 61818 - DNA, 80 bp, synthetic construct
  source 1..80: mol_type = other DNA
gcacggatacagggccttcagcttaataaagtagctaaaaccaagcttgaagagattttttcatgtggtgggcccttgtg

SEQ ID NO: 61819 - DNA, 80 bp, synthetic construct
  source 1..80: mol_type = other DNA
ataggcacatattacatgttgaaatccaccaatccagcatatatgctggtgacattgatgatggcaactgtgtcaagaat

SEQ ID NO: 61820 - DNA, 80 bp, synthetic construct
  source 1..80: mol_type = other DNA
gcagttatttgcaatatctgctatacctaacatggaagtcacttcaatgttttcattgtggtgctgcatggtattatact

SEQ ID NO: 61821 - DNA, 80 bp, synthetic construct
  source 1..80: mol_type = other DNA
attttaatcaggttgcagcaatggccgcatcattaatgatagcagctatgtgctctattgtttgccttttcatgggtgat

SEQ ID NO: 61822 - DNA, 80 bp, synthetic construct
  source 1..80: mol_type = other DNA
gaaagcataaaaaggataaaggattatttggtgagatcatagatagcataaatgtggcaagtcaaatacagatcaatgca

SEQ ID NO: 61823 - DNA, 80 bp, synthetic construct
  source 1..80: mol_type = other DNA
gatcttatcaaatcttgaaataaacattggagaaataaatgctagtatgccttctcctaataagacaacaggtgtagatg

SEQ ID NO: 61824 - DNA, 80 bp, synthetic construct
  source 1..80: mol_type = other DNA
taaattttatgataatgagcttggtaaatatatgttatccattctgaggaaaacagcagcatggcatataggccatctag

SEQ ID NO: 61825 - DNA, 80 bp, synthetic construct
  source 1..80: mol_type = other DNA
aacgatggggtaattcagcacatgcgtctagtccaagctgatataaattatgtcagagagcatttaataaagttagatga

SEQ ID NO: 61826 - DNA, 80 bp, synthetic construct
  source 1..80: mol_type = other DNA
gggcatatctaccatcaacaatcagttctgaccagtgcaatactaggattgggtgtctagaaatatcaaaaaaccaacca

SEQ ID NO: 61827 - DNA, 80 bp, synthetic construct
  source 1..80: mol_type = other DNA
gattggcactggtgggtcatggagcgctcatacaagcctagtggcagtagccactatgatccctatgatagggtactaca

SEQ ID NO: 61828 - DNA, 80 bp, synthetic construct
  source 1..80: mol_type = other DNA
ggtacagcgctaaattgattactagaggtgttaatcaataaatcattgatttggtggttgatatgatcaatttgaaaaaa

SEQ ID NO: 61829 - DNA, 80 bp, synthetic construct
  source 1..80: mol_type = other DNA
tctgggtactacaaccacttatcaaccccttttcaaacgaagcagtgtccactgcttggatctctattgaaaccaaaccc

SEQ ID NO: 61830 - DNA, 80 bp, synthetic construct
  source 1..80: mol_type = other DNA
tcaacgctaacttagattcctctatttcagtatcaacaatttctaaaaaggagaaatccaaatcagaccataaaagtagg

SEQ ID NO: 61831 - DNA, 80 bp, synthetic construct
  source 1..80: mol_type = other DNA
ccaatgtttggttctgtgccgattggcacctgtgggatggagcggacataccgacctagtggcttaggccacatggatcc

SEQ ID NO: 61832 - DNA, 80 bp, synthetic construct
  source 1..80: mol_type = other DNA
gctatgttcagtgatttgcctttttatgggtgatgctgaatatatacaggttattagagggcatggtgttgttatcatca

SEQ ID NO: 61833 - DNA, 80 bp, synthetic construct
  source 1..80: mol_type = other DNA
ccattgtgctgtcacatgttttccatgttttacaaataccaaattgggttactgttttggtgatagttgcactaagggtt

SEQ ID NO: 61834 - DNA, 80 bp, synthetic construct
  source 1..80: mol_type = other DNA
atcaggttgatgagtgcagtcattggagaaaaaattgaaattaggaacatagatggaaaagttgtcaatgtaattcctac

SEQ ID NO: 61835 - DNA, 80 bp, synthetic construct
  source 1..80: mol_type = other DNA
aacaacatcatggcttaacagagtttctgggtttgtacagtccaggtttaggcaaaaagttaggaccggtatagtttcaa

SEQ ID NO: 61836 - DNA, 80 bp, synthetic construct
  source 1..80: mol_type = other DNA
cagctagagtaattccaaatggtgtcgtagttgttgagtcaaaggagacatcaggtaccggttttagagtccaaaattat

SEQ ID NO: 61837 - DNA, 80 bp, synthetic construct
  source 1..80: mol_type = other DNA
attgtaacagcagcacatgttgttggtaatgaaacacagcttaaagttaaatggggagatgtggtggtgtattcaaaagt

SEQ ID NO: 61838 - DNA, 80 bp, synthetic construct
  source 1..80: mol_type = other DNA
tgtatatatccatccaaataaagatgtagcttacatcacattaccagctgagtttcaggctcttccaacatataaatttg

SEQ ID NO: 61839 - DNA, 80 bp, synthetic construct
  source 1..80: mol_type = other DNA
tagaagacatatttgagtcaggaggtcctttgtgctttggatatggtgatgtggaaacaacacatgtaaagaatggcgtt

SEQ ID NO: 61840 - DNA, 80 bp, synthetic construct
  source 1..80: mol_type = other DNA
ccaaaactgttgaggatggcaccatagtcataacatcacttgaagattgtggtgttttggcagtggccgtgtcagagggt

SEQ ID NO: 61841 - DNA, 80 bp, synthetic construct
  source 1..80: mol_type = other DNA
gttgttgtcaaagataacatgacctatgctattcaaaccaaaaatgggatgagtggttctccagtgacaaatgttgacgg

SEQ ID NO: 61842 - DNA, 80 bp, synthetic construct
  source 1..80: mol_type = other DNA
tcgtattattggggtacatcaaagtaacacaggctttacaggaggtgctgtcataatacggccggaggacttgccaccac

SEQ ID NO: 61843 - DNA, 80 bp, synthetic construct
  source 1..80: mol_type = other DNA
aaaagaaaccccagcgggagttggaattggaagcaaaaattaaggaactggaggaaactctcaagagtcaaatgaatcag

SEQ ID NO: 61844 - DNA, 80 bp, synthetic construct
  source 1..80: mol_type = other DNA
gggctgaatgaaaatcaaatagttgatcttattaggttagctgttggtagggaacttgaaattctccgccatgaaatgaa

SEQ ID NO: 61845 - DNA, 80 bp, synthetic construct
  source 1..80: mol_type = other DNA
tttaaatcaagcaaaaggtaagaacaagcaccgaggtaaacatggtgcccgcagacgtagaaaagtgcgtgtgtggacag

SEQ ID NO: 61846 - DNA, 80 bp, synthetic construct
  source 1..80: mol_type = other DNA
aggaagaatataaggatttgcttgagaaaggattttcaagacaacaattacgtgacatggctgacgtgttacgtgaggct

SEQ ID NO: 61847 - DNA, 80 bp, synthetic construct
  source 1..80: mol_type = other DNA
gaatatactgatgatgacagtgaagactttgctgaagaggaaggatatcctcagtggtctgatcctgaagactatgaaga

SEQ ID NO: 61848 - DNA, 80 bp, synthetic construct
  source 1..80: mol_type = other DNA
aattgagagggagtggtttggccccaagaagaaaatcctagatgaagtggaggatggatggtcaaaaaccgatttctggg

SEQ ID NO: 61849 - DNA, 80 bp, synthetic construct
  source 1..80: mol_type = other DNA
agcagtgtcaaaaaatttggaaagaaacggaaccaatgccagaagaatctgtcaatacactaccatcacatttacatgat

SEQ ID NO: 61850 - DNA, 80 bp, synthetic construct
  source 1..80: mol_type = other DNA
gttgaaccacatcccataatagtcaagactgtctatgtgtcaggagtccgtgaaggtaatgaatatgttacctatctttt

SEQ ID NO: 61851 - DNA, 80 bp, synthetic construct
  source 1..80: mol_type = other DNA
aagtatggcttaacatgttatgtggtaacaaaagctgatatgcaggctttagctaaagatttgcaagaataccagcaaaa

SEQ ID NO: 61852 - DNA, 80 bp, synthetic construct
  source 1..80: mol_type = other DNA
agttgaggacaagattaagacaaatgttgtccgtggccaatgggtcagtggaatcgacccaaaggttgtaattacagaat

SEQ ID NO: 61853 - DNA, 80 bp, synthetic construct
  source 1..80: mol_type = other DNA
tggatgaactctggctcaagttgaaccaccttatgtggtcacatggtttggttccatttatacaaagaaagaagatcaac

SEQ ID NO: 61854 - DNA, 80 bp, synthetic construct
  source 1..80: mol_type = other DNA
aggcgcaagcaacaaaaaaacttgaagggggccccgaagtcggggccccaaaaccagaccaattaagattggactcttgg

SEQ ID NO: 61855 - DNA, 80 bp, synthetic construct
  source 1..80: mol_type = other DNA
aaacagatgcttgagcctggtgaatattttcttactccagtaaattgccctttaataggtgtcctaccaatagatagacc

SEQ ID NO: 61856 - DNA, 80 bp, synthetic construct
  source 1..80: mol_type = other DNA
aattagtgattatgatgaaccagttgatgatttgttgaatttattacccaaatgtgatgaagatccaccatatgccccgt

SEQ ID NO: 61857 - DNA, 80 bp, synthetic construct
  source 1..80: mol_type = other DNA
caacgtggggcccagaagcttatcgcaaatcattccaaaaattcttttataaagaacctgttaaaaatataaaagaaaag

SEQ ID NO: 61858 - DNA, 80 bp, synthetic construct
  source 1..80: mol_type = other DNA
tataagcgtgagtggaagtttgccatgtcagcgctacgcagagaatttgatttcttgaatgatagcgtcatgattgacat

SEQ ID NO: 61859 - DNA, 80 bp, synthetic construct
  source 1..80: mol_type = other DNA
aacagcaacatctaaaaatgcagactccacaccagcttatcccaaaactttatggtggaaaactgagacagattacctta

SEQ ID NO: 61860 - DNA, 80 bp, synthetic construct
  source 1..80: mol_type = other DNA
aagagagaggttatcaagattacatcactgaattggataggataatgaatggtgaccgccctgatgtactttggtatctc

SEQ ID NO: 61861 - DNA, 80 bp, synthetic construct
  source 1..80: mol_type = other DNA
caagccaggtgttaatgattgggttgaaaccgaagtcaatatacaccaacccacagccatagttggcgtcctgtatcagg

SEQ ID NO: 61862 - DNA, 80 bp, synthetic construct
  source 1..80: mol_type = other DNA
tttttgagaaaagagattctaaagataagcaaaatagaagatgaggacatacgacaaatagtttgttctgatcctatatt

SEQ ID NO: 61863 - DNA, 80 bp, synthetic construct
  source 1..80: mol_type = other DNA
tgctagaataggctgtgtttttgaggagaatcaaaatcagttgatgaagggcagaacgctgaccagaatgggtcagtgtg

SEQ ID NO: 61864 - DNA, 80 bp, synthetic construct
  source 1..80: mol_type = other DNA
gttggtcaccattcatgggtggtttccaccgtagggtcaaaagattagtggacaaaggtaatcaccattttatagagttt

SEQ ID NO: 61865 - DNA, 80 bp, synthetic construct
  source 1..80: mol_type = other DNA
gattggacccgatatgatggcaccatcccaacagaagttttcagtgcaattaaagattttagattttcatgtctcaggaa

SEQ ID NO: 61866 - DNA, 80 bp, synthetic construct
  source 1..80: mol_type = other DNA
ggaatttagaacagagaagaacaaaagtgtctatgactggtactgtaaaaatatttttagaaggtatgttatgttgccat

SEQ ID NO: 61867 - DNA, 80 bp, synthetic construct
  source 1..80: mol_type = other DNA
ctggagaagtcacagttcaagagcgtggaaatccttcaggccagatatcaactaccatggataataatctatgtaatgta

SEQ ID NO: 61868 - DNA, 80 bp, synthetic construct
  source 1..80: mol_type = other DNA
tttttccaggcatttgagtttgctcatttgaatccggataaaacaattgatgaactgagagaaggatgggagaaagttga

SEQ ID NO: 61869 - DNA, 80 bp, synthetic construct
  source 1..80: mol_type = other DNA
ttcacttatctacggtgatgacaggctttctacagttccatatgtttgctctaactatgttgaaaaagtaatagacatgt

SEQ ID NO: 61870 - DNA, 80 bp, synthetic construct
  source 1..80: mol_type = other DNA
atgaaaacatctttggtatgtgggtaaaacccaataaagtgaaattgtcagatagtgtgattggcctaacgttttgtggt

SEQ ID NO: 61871 - DNA, 80 bp, synthetic construct
  source 1..80: mol_type = other DNA
tttaccatcacaatgtcagataatgtctatgtaccagtcccaacagacacagacaaattgttagctggacttgttacacc

SEQ ID NO: 61872 - DNA, 80 bp, synthetic construct
  source 1..80: mol_type = other DNA
aatttaggaggctgactgtggagaaccaaacattgaaatcagaaagatcaactttacagctagagttgtccctggttagg

SEQ ID NO: 61873 - DNA, 80 bp, synthetic construct
  source 1..80: mol_type = other DNA
agtcaagaaattgccagatatattatctctctatgggaagctcctttgctatcgcatccttggccataacttgccagacg

SEQ ID NO: 61874 - DNA, 80 bp, synthetic construct
  source 1..80: mol_type = other DNA
accataagttcaagaactatattttggtcgctttagaggtattggctagacacatccgcaatggtggtggtgaagaaccc

SEQ ID NO: 61875 - DNA, 80 bp, synthetic construct
  source 1..80: mol_type = other DNA
tatcatattacggatgagatgctggatagactttggaggggaggaccaaagttaggatatggctggtaaacagccccagc

SEQ ID NO: 61876 - DNA, 80 bp, synthetic construct
  source 1..80: mol_type = other DNA
aggccatgcctaaggccactgtcaagcagttggccaaggaggtggttaagcaggagcgacaagtaaaacagaaccaacca

SEQ ID NO: 61877 - DNA, 80 bp, synthetic construct
  source 1..80: mol_type = other DNA
aagaagaagtatttcccagtgaaaaataaaaaatatattaagagggaggttaggaaggatttaaagaaacaaggctttga

SEQ ID NO: 61878 - DNA, 80 bp, synthetic construct
  source 1..80: mol_type = other DNA
aggtccaaaacctagattctctgtttcagtctcagcaacaattggaaaagttgggccgaacaaggcacaggggcccgagt

SEQ ID NO: 61879 - DNA, 80 bp, synthetic construct
  source 1..80: mol_type = other DNA
tgcaaatttcaacttttatgcatccaagtcttatgaaggagcctaatgatggcacaaattttggcccattgcagtcggct

SEQ ID NO: 61880 - DNA, 80 bp, synthetic construct
  source 1..80: mol_type = other DNA
gcagcccagtggggactgtggagactcaaaaatcttagtgtcacttttacaccattagttggcccatcagcggtcactgg

SEQ ID NO: 61881 - DNA, 80 bp, synthetic construct
  source 1..80: mol_type = other DNA
ctcagttttcagaatctcactgaacatggcacaatctccaggtgccacatcttggggaggattgggtgctagaaaacatc

SEQ ID NO: 61882 - DNA, 80 bp, synthetic construct
  source 1..80: mol_type = other DNA
gagatgttgctgttggaaaacagttcacgtggaaactccaacgtggagatctcactggacccagagaaacttggtggctg

SEQ ID NO: 61883 - DNA, 80 bp, synthetic construct
  source 1..80: mol_type = other DNA
catgaacttgagagagttagaccagcagaaaaagtgttgaagcctatgaaaatcagtagtattatcttttatggcttgct

SEQ ID NO: 61884 - DNA, 80 bp, synthetic construct
  source 1..80: mol_type = other DNA
acagacacaaatgaagagggagcccaaagctgtgggcccttgcttgaaatacatggtcttggagcaactacttcaaccta

SEQ ID NO: 61885 - DNA, 80 bp, synthetic construct
  source 1..80: mol_type = other DNA
caaggatgcagcatggaacggtgacctttttatagttgaggtaaaaggtaggtgggagtttgccaactataatagcaaac

SEQ ID NO: 61886 - DNA, 80 bp, synthetic construct
  source 1..80: mol_type = other DNA
cagcattgggaatgctagagaggatcaccgagagtactagtgcatctatagaagttactgatggtaacatgattatgact

SEQ ID NO: 61887 - DNA, 80 bp, synthetic construct
  source 1..80: mol_type = other DNA
gttcctagaagttctcaactagctcgccacatgggtgaacgctatgagaagtctgggaatgcatcaacagtaggtgagac

SEQ ID NO: 61888 - DNA, 80 bp, synthetic construct
  source 1..80: mol_type = other DNA
aatttggcaaatagttgatgagggtgcaggccttgtggcgaatgtcgccccaccgccattcacttggttgataaagggcg

SEQ ID NO: 61889 - DNA, 80 bp, synthetic construct
  source 1..80: mol_type = other DNA
gttggtggtttgtcaagaaattgcttggtaggtcagcaaatactgatgctcagtaccttgtctatgcgtccttggctgac

SEQ ID NO: 61890 - DNA, 80 bp, synthetic construct
  source 1..80: mol_type = other DNA
gcacagaataatcggccagttgaggcacagacattccctaagacaacacacacaacagtactctcttcaacacaaataaa

SEQ ID NO: 61891 - DNA, 80 bp, synthetic construct
  source 1..80: mol_type = other DNA
tgctccaaacactgggcctaacaccacaactggatccatatcgaatgatatcagtgtttggccaataattccatcaggta

SEQ ID NO: 61892 - DNA, 80 bp, synthetic construct
  source 1..80: mol_type = other DNA
gcccagttgttgacttctatgtgagtggaaggatgaagtcattgcacatgggtggacaagcagggacccaagccacaaca

SEQ ID NO: 61893 - DNA, 80 bp, synthetic construct
  source 1..80: mol_type = other DNA
ctagtgggtggtctcatttacaggccagaactaccgccctcagcaaccccgccagtctcgaagtgggaatttactgtaca

SEQ ID NO: 61894 - DNA, 80 bp, synthetic construct
  source 1..80: mol_type = other DNA
gattggattaatttttgcccacatcactacagcttttagaacaggagtatgcctagatagtgatgttagtgagacactta

SEQ ID NO: 61895 - DNA, 80 bp, synthetic construct
  source 1..80: mol_type = other DNA
tgaaggtaataacatagttggagctggcatgagctgtgttatgtttcgtgccaacgatgtagtgtcttggtcgcaggacg

SEQ ID NO: 61896 - DNA, 80 bp, synthetic construct
  source 1..80: mol_type = other DNA
gtcaggaccttgttggttggtatcgtttagacaacataaaaacaacacaactcactgtctcttggagacaacagaacagg

SEQ ID NO: 61897 - DNA, 80 bp, synthetic construct
  source 1..80: mol_type = other DNA
gttgtctatggatggggcaatgtagtcgcctggaattcagaagagtggcataccaattcagaaacaccacatcaacccat

SEQ ID NO: 61898 - DNA, 80 bp, synthetic construct
  source 1..80: mol_type = other DNA
attaaggcttacatattggttggttaaagtaaatgtgacagcagacccagctgattttgacatattacagaaaatgcccc

SEQ ID NO: 61899 - DNA, 80 bp, synthetic construct
  source 1..80: mol_type = other DNA
ttgggtatttggatccctataatacttctgagtcaacagcagcaatccaaaaaatcaattttcagacagttcaaaaacca

SEQ ID NO: 61900 - DNA, 80 bp, synthetic construct
  source 1..80: mol_type = other DNA
tcaggtggcaatacacttagggtgcagtactcatcaacaccgcagcaaggtgattttgtcgtgatctggcaaattggaag

SEQ ID NO: 61901 - DNA, 80 bp, synthetic construct
  source 1..80: mol_type = other DNA
gcatgattttgacatgtctactggaaagggtactgctgtggatactgtttcagattacatatttccacaagcaaaagatg

SEQ ID NO: 61902 - DNA, 80 bp, synthetic construct
  source 1..80: mol_type = other DNA
ccgccggtggcctttggtatcgggcacttacaatggttggtcccaggactgacaggatggtcttgcatttttattatcca

SEQ ID NO: 61903 - DNA, 80 bp, synthetic construct
  source 1..80: mol_type = other DNA
actgcaactgatgaccttgttgaacagataataacacaaattcaaagcaggtataagctggcccctttaccagctgactc

SEQ ID NO: 61904 - DNA, 80 bp, synthetic construct
  source 1..80: mol_type = other DNA
tgattcagatacctctagctctgattcagagatggattgttatgatggctttgaaaagcttcaggtctatgaaaatgtga

SEQ ID NO: 61905 - DNA, 80 bp, synthetic construct
  source 1..80: mol_type = other DNA
aaccacaaacctgcattaactggaaatgggatggtggaattgatcccgatgacaccgttccctattatgacagacttatc

SEQ ID NO: 61906 - DNA, 80 bp, synthetic construct
  source 1..80: mol_type = other DNA
gacaagctggcttgaaccatgcagtgtccgagaatttagcactagctgttgtgaagaaaaaattgcgccgaggccacgcc

SEQ ID NO: 61907 - DNA, 80 bp, synthetic construct
  source 1..80: mol_type = other DNA
gagtaggatcgagggtacagcgcttagttgattgtctagagggttgtttaatgaaataatttcagtaatcaattaatcaa

SEQ ID NO: 61908 - DNA, 80 bp, synthetic construct
  source 1..80: mol_type = other DNA
gcttagttgattgtctagagggttgtttaatgaaataatttcagtaatcaattaatcaacttaaaattgaaaagcacatc

SEQ ID NO: 61909 - DNA, 80 bp, synthetic construct
  source 1..80: mol_type = other DNA
gcgtggtatagtggtgtctcacagcaaattaaaagtatatataacgaccagttgtttaactggttgttgtatatttccac

SEQ ID NO: 61910 - DNA, 80 bp, synthetic construct
  source 1..80: mol_type = other DNA
atatgataggatccttcagcatggcagcttgaaagcacgcatacaaggcatccaacttaataaagttgctaagaccaaat

SEQ ID NO: 61911 - DNA, 80 bp, synthetic construct
  source 1..80: mol_type = other DNA
tcttacatacacatggacagctgtggcattggcaataggcacttattacatgattagagctgaaaaccccatatatatgc

SEQ ID NO: 61912 - DNA, 80 bp, synthetic construct
  source 1..80: mol_type = other DNA
tgataactttgataatggccaccatttcaaaaatgcaactttttgccgtatcagctatacccaatatggaaatgacttca

SEQ ID NO: 61913 - DNA, 80 bp, synthetic construct
  source 1..80: mol_type = other DNA
atgttttcattgtggtgttgcatggcactttatgtgttaaaccaagcagcagcaatggcagcgtcccttatgatagctat

SEQ ID NO: 61914 - DNA, 80 bp, synthetic construct
  source 1..80: mol_type = other DNA
ctcggcaattatgtctgaagtcaactctctagttaatctggttgcacgaacactccccaccaccaggacagactacagct

SEQ ID NO: 61915 - DNA, 80 bp, synthetic construct
  source 1..80: mol_type = other DNA
ttagcactcctgatgttcgatcagaggattacgatgttggacctgacaataaagacatcagtcaatttggttagagatga

SEQ ID NO: 61916 - DNA, 80 bp, synthetic construct
  source 1..80: mol_type = other DNA
cacaagactagatggaacagtagttgtaattgaattcacaacaaccagaagcaccaacatgggaggacttgaggctgagc

SEQ ID NO: 61917 - DNA, 80 bp, synthetic construct
  source 1..80: mol_type = other DNA
cagcagaagtggaggaaatgggagaagctatggtgatactcagtcagtcaggaaagtattatcatctaaaattaatggat

SEQ ID NO: 61918 - DNA, 80 bp, synthetic construct
  source 1..80: mol_type = other DNA
catcatgaacacaaagacgtccagatgaatttagaagctctttgctctagagtgctttcagagagagggctatcaactgg

SEQ ID NO: 61919 - DNA, 80 bp, synthetic construct
  source 1..80: mol_type = other DNA
tcccagtaggagcctgcaaccatctttcccaaggattgttgaaagggttgttgctgcttgatccattaattttagatgat

SEQ ID NO: 61920 - DNA, 80 bp, synthetic construct
  source 1..80: mol_type = other DNA
gagtctgagccatcatgaacacaaagacgtccagatgaatttagaagctctttgctctagagtgctttcagagagagggc

SEQ ID NO: 61921 - DNA, 80 bp, synthetic construct
  source 1..80: mol_type = other DNA
tcagaatgtaacgattaatcccggaccgtttgctcaaacaaattatgcaccagtgacttggagtcatggggaagtgaatg

SEQ ID NO: 61922 - DNA, 80 bp, synthetic construct
  source 1..80: mol_type = other DNA
ttgaatccaaccaatcaacaagttgtattagaaggtaccaataaaactgatatttgggtcgctttattacttgttgaacc

SEQ ID NO: 61923 - DNA, 80 bp, synthetic construct
  source 1..80: mol_type = other DNA
aaacgtaaccaatcaaagtagacaatacacattatttggagaaacgaaacaaattactgtagaaaataacacaaacaaat

SEQ ID NO: 61924 - DNA, 80 bp, synthetic construct
  source 1..80: mol_type = other DNA
ggaaattcttcgaaatgttcagaggtagtgttagtgccgaatttcaacataagcgcactttaacatcagacactaaatta

SEQ ID NO: 61925 - DNA, 80 bp, synthetic construct
  source 1..80: mol_type = other DNA
ttcaaatttgtctgaagtagaaactgtaatacatgttgagttttatataataccaagatcgcaagaatctaagtgtagtg

SEQ ID NO: 61926 - DNA, 80 bp, synthetic construct
  source 1..80: mol_type = other DNA
accaccaatgcagaatacaaggaatatagttccagttgcgttatcatctagatcggtgacttatcaacgtgctcaggtta

SEQ ID NO: 61927 - DNA, 80 bp, synthetic construct
  source 1..80: mol_type = other DNA
attcgacaacaatagagccagtactcgatggtccttatcaaccaacaaattttaagccaccaaacgattactggatatta

SEQ ID NO: 61928 - DNA, 80 bp, synthetic construct
  source 1..80: mol_type = other DNA
accttgatgttacagtgggcaaaaatgcaacattcaaattgaaaccctctgacctcggtgggcctaggatggcttggtgg

SEQ ID NO: 61929 - DNA, 80 bp, synthetic construct
  source 1..80: mol_type = other DNA
gctccagttaattggggtcatggagaggtaaatgattcaactacagtagaaccaattttagatggtccttatcaaccaac

SEQ ID NO: 61930 - DNA, 80 bp, synthetic construct
  source 1..80: mol_type = other DNA
cgttaacttctgatactaggctcgtaggaatattgaaatatggtggaagaatatggacatttcataaagaaacgccagga

SEQ ID NO: 61931 - DNA, 80 bp, synthetic construct
  source 1..80: mol_type = other DNA
gctgttactgatggttcaaatacatcagatttaattagtatatcaattgtaattcactctgaattttacataataccgag

SEQ ID NO: 61932 - DNA, 80 bp, synthetic construct
  source 1..80: mol_type = other DNA
catggttgaaagactgcctaggttcgtcaggaattctccacaagtctatgattggatcgtaagaggtctaatctttccca

SEQ ID NO: 61933 - DNA, 80 bp, synthetic construct
  source 1..80: mol_type = other DNA
gtcgcgtactggcagtccaccaaacgcatactggctacacaggaggtgctgttataatagatccagcagatttccaccca

SEQ ID NO: 61934 - DNA, 80 bp, synthetic construct
  source 1..80: mol_type = other DNA
gccaaggccccatctcaggtagaactactcaaagaggagatagagcgattaaaagctcagttaaacactgcaactgagaa

SEQ ID NO: 61935 - DNA, 80 bp, synthetic construct
  source 1..80: mol_type = other DNA
gcacactaaaattaaaacctgcctctgaatctgaagctaatgaacaaccacttgatttgacctggaagaaggagaaacag

SEQ ID NO: 61936 - DNA, 80 bp, synthetic construct
  source 1..80: mol_type = other DNA
cctgagcaagagcggcaattgagtaaatctcctaagccccaaaagaatgaacctcagccgtattcacaaacttacggcaa

SEQ ID NO: 61937 - DNA, 80 bp, synthetic construct
  source 1..80: mol_type = other DNA
aaagacctgaggtactttggtacttatttcttaaaaaagaaattattaaggaggaaaaaattaagaattctgatatccgg

SEQ ID NO: 61938 - DNA, 80 bp, synthetic construct
  source 1..80: mol_type = other DNA
aataccacttctgatactgtctggcaagttttgaacaccgctgtttcagctgcagagctggttactcccccgccttttaa

SEQ ID NO: 61939 - DNA, 80 bp, synthetic construct
  source 1..80: mol_type = other DNA
cttggttcataggtggtacagtacctgacccagtgggtcacactgaaggaacccacaaaatagtgtttgaaatggaggga

SEQ ID NO: 61940 - DNA, 80 bp, synthetic construct
  source 1..80: mol_type = other DNA
gtacaatggggaagtacaatctaatcttgtcagaatatctatcatttatttataattcacaatctgctgtacaaattcca

SEQ ID NO: 61941 - DNA, 80 bp, synthetic construct
  source 1..80: mol_type = other DNA
caaaaaaaggactatcgttgaagaacatttttacagaatataaagatgtcactgaaagtgcaacgctactatcaatacta

SEQ ID NO: 61942 - DNA, 80 bp, synthetic construct
  source 1..80: mol_type = other DNA
tcgtattcgtacgacaagtataacgcggtggaaagaaagttagtatattacgcaaaaggtaaaccattagaagctgatct

SEQ ID NO: 61943 - DNA, 80 bp, synthetic construct
  source 1..80: mol_type = other DNA
aaatgcgaatgaattagattacgaaaataataaattaaccagtgatttatttccaacagctgaagaatacactgattctt

SEQ ID NO: 61944 - DNA, 80 bp, synthetic construct
  source 1..80: mol_type = other DNA
taatggatccagcaatattaacatcgctgtcttcaaacttaaatgcagttatgttttggctagaaaagcacatgaatgat

SEQ ID NO: 61945 - DNA, 80 bp, synthetic construct
  source 1..80: mol_type = other DNA
actgcagaaaaagctaaaatttataagagaaggcttgatttattcacaattgtagcttcaacagtgaataagtatggagt

SEQ ID NO: 61946 - DNA, 80 bp, synthetic construct
  source 1..80: mol_type = other DNA
atacgaggtaatgaaagataaaccatattatttagtgacgtgggcgaactcatcaattgaaatgctgatgtcagtgtttc

SEQ ID NO: 61947 - DNA, 80 bp, synthetic construct
  source 1..80: mol_type = other DNA
ttcaatttcgggagtacaatggcacgtaaacaaatgacacctactatggttgcaaaactcccaaaatttgttaggaattc

SEQ ID NO: 61948 - DNA, 80 bp, synthetic construct
  source 1..80: mol_type = other DNA
agggcggctggctataactatgacagtgataacactgaatacttggatgccccagactttgctgatcagctcagagaaga

SEQ ID NO: 61949 - DNA, 80 bp, synthetic construct
  source 1..80: mol_type = other DNA
catagagacagacacagacatcgagagtacagaggacgaagacgatgaagcggacaggtttgatatcatagacacttctg

SEQ ID NO: 61950 - DNA, 80 bp, synthetic construct
  source 1..80: mol_type = other DNA
gtgtgaagaagcacgcaaagcagcaggggaaatcaatccctgcacatctggaagccgcggccacgccgagtaagaacgag

SEQ ID NO: 61951 - DNA, 80 bp, synthetic construct
  source 1..80: mol_type = other DNA
atctaacgactgccgtcacccagcaacctatcgttacactcgaacagaagaatgttagcgatagtgatgttgttgacctt

SEQ ID NO: 61952 - DNA, 80 bp, synthetic construct
  source 1..80: mol_type = other DNA
catttcttatttctaatctaactactcacaatatattatacttaaattacagtgtcaaaacattgaaaatattaaataaa

SEQ ID NO: 61953 - DNA, 80 bp, synthetic construct
  source 1..80: mol_type = other DNA
tgactacgtctcttccaatcgctaggttatcaaatcgtgtatttagagataaactgtttccatctatagtaacgttgccc

SEQ ID NO: 61954 - DNA, 80 bp, synthetic construct
  source 1..80: mol_type = other DNA
atgctccagtcaattggggtcatggagagataaatgattcaaccacagtggaaccaatcttagatggtccttatcaacct

SEQ ID NO: 61955 - DNA, 80 bp, synthetic construct
  source 1..80: mol_type = other DNA
tattgtacatggcaacaccctctcatatgcagttcgcacccaagatgggatgtcgggtgcaccagtttgtgacaagtatg

SEQ ID NO: 61956 - DNA, 80 bp, synthetic construct
  source 1..80: mol_type = other DNA
cattagtgacaagctagatgctgtgaggcaaatccttaatttcgcattcgtacctagagctcactggttaagaactgttt

SEQ ID NO: 61957 - DNA, 80 bp, synthetic construct
  source 1..80: mol_type = other DNA
tgctgatatagcgtccttctctgtagatccgcagttgtattgtgattataatattgtgttaatacagtaccaaaattcat

SEQ ID NO: 61958 - DNA, 80 bp, synthetic construct
  source 1..80: mol_type = other DNA
tagactcatttgaaacagttgctgaaaatgaaaaattagctatagtggatgtcgttgatgggataaatcataaaataaat

SEQ ID NO: 61959 - DNA, 80 bp, synthetic construct
  source 1..80: mol_type = other DNA
ctactcaactatacattaaaatcagtgactcgaataatggactacattatatatagatctttgttgatttttgtagcatt

SEQ ID NO: 61960 - DNA, 80 bp, synthetic construct
  source 1..80: mol_type = other DNA
tagactcgtttgaaatggtcgctgagaatgagaaattagctatagtagatgtcgttgatggaataaatcataaaataaat

SEQ ID NO: 61961 - DNA, 80 bp, synthetic construct
  source 1..80: mol_type = other DNA
cttgtgagttatattctgaaaactataataaagataatggactatattatttatagaataacatttgtaattgtagtatt

SEQ ID NO: 61962 - DNA, 80 bp, synthetic construct
  source 1..80: mol_type = other DNA
cacaagacaataattttttatcttcaactttatgtctatattatccatcagatgctccaactcaaattagtgacactgaa

SEQ ID NO: 61963 - DNA, 80 bp, synthetic construct
  source 1..80: mol_type = other DNA
tggaaagatacactatctcagctgtttttaaccaaaggatggccgacaggttcagtgtattttaatgaatattcaaacat

SEQ ID NO: 61964 - DNA, 80 bp, synthetic construct
  source 1..80: mol_type = other DNA
tttagaattttccatcgacccaaagttatactgtgattataatgttgtgctaattaaattcgcttctggtgaggagttgg

SEQ ID NO: 61965 - DNA, 80 bp, synthetic construct
  source 1..80: mol_type = other DNA
acatatctgaattagctgatctaatactgaatgagtggttatgtaatccaatggatataacattatattattatcaacaa

SEQ ID NO: 61966 - DNA, 80 bp, synthetic construct
  source 1..80: mol_type = other DNA
cagctacttttgaaacagttgctgatagcgaaaaattagcaataattgatgttgtcgacagtgtgaatcataaattagat

SEQ ID NO: 61967 - DNA, 80 bp, synthetic construct
  source 1..80: mol_type = other DNA
atcagtattatcaaatgcacaaaattatggaataaatttgccaattactggatctatggatgcagcatatgctaactcaa

SEQ ID NO: 61968 - DNA, 80 bp, synthetic construct
  source 1..80: mol_type = other DNA
tttgtgagttatattttaaaaactataacaaaaataatggactatctaatttacagaatgacatttataattgttgtact

SEQ ID NO: 61969 - DNA, 80 bp, synthetic construct
  source 1..80: mol_type = other DNA
cgcaaaatgaaaattttctgtcgtcaactttatgcttatattatcctactgaagctcaaacacaaataaacgataatgaa

SEQ ID NO: 61970 - DNA, 80 bp, synthetic construct
  source 1..80: mol_type = other DNA
aatgagtactcaaatgttctagaattttctgtcgatccaaagttatattgtgactataatgttgtattaattaggttcgc

SEQ ID NO: 61971 - DNA, 80 bp, synthetic construct
  source 1..80: mol_type = other DNA
ttcaggagaggagttagatatatctgaattggctgatctaatattaaatgaatgggtatgcaacccaatggatataacat

SEQ ID NO: 61972 - DNA, 80 bp, synthetic construct
  source 1..80: mol_type = other DNA
caaacacttttgaaacggttgctgacagtgagaaattggcaataattgacgttgttgatggtgtgaatcataaattggat

SEQ ID NO: 61973 - DNA, 80 bp, synthetic construct
  source 1..80: mol_type = other DNA
aatatttcttctacactcttttgtcaaatagttgacaggatggcacacggtgagccatactatagttctaaacctgacaa

SEQ ID NO: 61974 - DNA, 80 bp, synthetic construct
  source 1..80: mol_type = other DNA
agtttacatggacctgcttgtttcgggggcaagccctaacagtgcatggtcccatgcgtgtgaagaagcacgcaaagcag

SEQ ID NO: 61975 - DNA, 80 bp, synthetic construct
  source 1..80: mol_type = other DNA
ggctttaaaagcgctacagtgatgtctctcagcattgacgtaacaagtcttccctcaatttcttctagtatctttaaaaa

SEQ ID NO: 61976 - DNA, 80 bp, synthetic construct
  source 1..80: mol_type = other DNA
ctctttctggaaaatctattggtaggagtgaacagtacatttcaccagatgcagaagcattcaataaatacatgttgtcg

SEQ ID NO: 61977 - DNA, 80 bp, synthetic construct
  source 1..80: mol_type = other DNA
aggatattggaccatctgattctgcttcaaacgatccactcaccagcttttcgattagatcgaatgcagttaagacaaat

SEQ ID NO: 61978 - DNA, 80 bp, synthetic construct
  source 1..80: mol_type = other DNA
gcgtgtctatggattcatcgacgcaatcacgaccttcaagtaacgttgggtgcgatcaattggatttctccttaactaaa

SEQ ID NO: 61979 - DNA, 80 bp, synthetic construct
  source 1..80: mol_type = other DNA
ggtattaatgttagtgctaatcttgattcatgtatatcaatatcaactgatcataagaaggagaaatccaagaaagataa

SEQ ID NO: 61980 - DNA, 80 bp, synthetic construct
  source 1..80: mol_type = other DNA
aagtaggaaacactatccgagaattgaagcagattctggttctgaagattatgttttggatgattcagatagtgatgacg

SEQ ID NO: 61981 - DNA, 80 bp, synthetic construct
  source 1..80: mol_type = other DNA
aaaaatatttcgcactaagaatgaggatgaagcgagtcgcaatgcaattgatcgaggatttgtaatgtcaacctgagaac

SEQ ID NO: 61982 - DNA, 80 bp, synthetic construct
  source 1..80: mol_type = other DNA
agtcgcaatgcaattgatcgaggatttgtaatgtcaacctgagaacacactagggagctccccactcccgttttgtgacc

SEQ ID NO: 61983 - DNA, 80 bp, synthetic construct
  source 1..80: mol_type = other DNA
tgaggcaaataaatggatttcaatgggatcatcttgtactataaaggtatgtccactaaatacgcaaacattaggaattg

SEQ ID NO: 61984 - DNA, 80 bp, synthetic construct
  source 1..80: mol_type = other DNA
ggtatgctccagtgaattggggtcatggagaggtaaatgattcaactacagtagaaccaattttagacggtccctatcaa

SEQ ID NO: 61985 - DNA, 80 bp, synthetic construct
  source 1..80: mol_type = other DNA
aactttgggagcacaatggcacgtagacaaatgacacctactatggttgcaaaactcccaaaatttgttaggagttctcc

SEQ ID NO: 61986 - DNA, 80 bp, synthetic construct
  source 1..80: mol_type = other DNA
catcagacctgatggttgactgagaagccacagtcaatcatatcgcggtgtgctcagccttaatcccgtttaaccaatcc

SEQ ID NO: 61987 - DNA, 80 bp, synthetic construct
  source 1..80: mol_type = other DNA
aaaattgcgctgaaaacatcaagatgctcgtacaaggtggtgaagtactgcatcgtgacaatttttaatacgctactgaa

SEQ ID NO: 61988 - DNA, 80 bp, synthetic construct
  source 1..80: mol_type = other DNA
tacaaagaacaaattactaccaaagatgaaatagaaagacagatggatagagtcgttaaagagatgagacgtcagttgga

SEQ ID NO: 61989 - DNA, 80 bp, synthetic construct
  source 1..80: mol_type = other DNA
aagttaaccacacgtgagattgaacaagtcgaactactcaaacgtattcatgacaaactaatggtgcgaccaactgatga

SEQ ID NO: 61990 - DNA, 80 bp, synthetic construct
  source 1..80: mol_type = other DNA
aatagacatgacaaaagagataaatcaaaaaaacgtgaagacgctagaagaatgggagagtgggaaaaatccttatgaaa

SEQ ID NO: 61991 - DNA, 80 bp, synthetic construct
  source 1..80: mol_type = other DNA
tcggacctgatggttggctgagaagccacagtcggccatatcgcgtgtggctcaagccttaatcccgtttaaccaatccg

SEQ ID NO: 61992 - DNA, 80 bp, synthetic construct
  source 1..80: mol_type = other DNA
ctagaagatccaggaatggcatatttcccttatatcgcatctgtcctaacagtcttgttcacattacacaaagcgtcgat

SEQ ID NO: 61993 - DNA, 80 bp, synthetic construct
  source 1..80: mol_type = other DNA
gcttctgatcaatatgatacaagattagcttgtagtgaaatcctaaaaaattatcctgaaacacccctacaactcttagc

SEQ ID NO: 61994 - DNA, 80 bp, synthetic construct
  source 1..80: mol_type = other DNA
attgcacatgcagggcttaaaagatctaaatattggtctgctcatggctatgcctatggtagtgttctgttgtgtattct

SEQ ID NO: 61995 - DNA, 80 bp, synthetic construct
  source 1..80: mol_type = other DNA
ttagtggttgccggcgtctacctggggaaggtagacgcctacgaacatgcgaccaccattccaaatgtgccgaagattcc

SEQ ID NO: 61996 - DNA, 80 bp, synthetic construct
  source 1..80: mol_type = other DNA
gtcatagctgggccagtttcgtcctcctttacaccgtttaatcataaggttgtcatctaccgtggtttagtctataatta

SEQ ID NO: 61997 - DNA, 80 bp, synthetic construct
  source 1..80: mol_type = other DNA
ttagtctataattatgacttccctgaatacggcgcaatgaaacctggagtgttcggagacatccaagctacctccttgac

SEQ ID NO: 61998 - DNA, 80 bp, synthetic construct
  source 1..80: mol_type = other DNA
cagggatatggcttacaagtatattacattagataatgaagatattattaactattataatccgagggtttattttaaac

SEQ ID NO: 61999 - DNA, 80 bp, synthetic construct
  source 1..80: mol_type = other DNA
ataatccaagggtttattttaaacccacgcaaaatataaaagaaccagggactttcaagttaaacttgtctagtatggac

SEQ ID NO: 62000 - DNA, 80 bp, synthetic construct
  source 1..80: mol_type = other DNA
gcctcggatcaatatgatacaaggttagcttgtagtgaaattttaaaaaattatcctgagacacctttacaactgttagc

SEQ ID NO: 62001 - DNA, 80 bp, synthetic construct
  source 1..80: mol_type = other DNA
tatgcttatggtagtgttctgttatgtattctgccatctaaatcactagaagttgcaggttcatttattagattttttac

SEQ ID NO: 62002 - DNA, 80 bp, synthetic construct
  source 1..80: mol_type = other DNA
cagggatatggcttacaagtacattacactggataatgaagatattatcaactactataacccaagggtttactttaaac

SEQ ID NO: 62003 - DNA, 80 bp, synthetic construct
  source 1..80: mol_type = other DNA
gtatacatggacctgcttgcctctggcctctcaccaggcaatgcatggtcacatgcgtgtgaagaagcacgcatcatggg

SEQ ID NO: 62004 - DNA, 80 bp, synthetic construct
  source 1..80: mol_type = other DNA
gtggtgcgatgcactcgacccaagtgagtctcgagtgctgttggaagagacagactatgaatatgaagaagatgaggacg

SEQ ID NO: 62005 - DNA, 80 bp, synthetic construct
  source 1..80: mol_type = other DNA
aagggcacgccacaacccccggcaattatgtctgaagtcaactctctagttaatctggttgcacgaacactccccaccac

SEQ ID NO: 62006 - DNA, 80 bp, synthetic construct
  source 1..80: mol_type = other DNA
gcccatggtgtctgaatatccttccattagcgtcaaggagatcctcaaaaaaccctccaacttccccactacaaagaacc

SEQ ID NO: 62007 - DNA, 80 bp, synthetic construct
  source 1..80: mol_type = other DNA
caactggcagagcttggaacgaggccattctggcaattgctagagggaaggttgcaagaatggatgaagagcaagaaaca

SEQ ID NO: 62008 - DNA, 80 bp, synthetic construct
  source 1..80: mol_type = other DNA
gaagagaagttcctgtcagggaccatcacaaaggatgaagaacattccgccaaagcattgaggtcctcattccatagagt

SEQ ID NO: 62009 - DNA, 80 bp, synthetic construct
  source 1..80: mol_type = other DNA
caagctagacctccctaacgaagttcaggtagagttggcaaaactgggagtggaaggcaagaaatggaagtcagacagtg

SEQ ID NO: 62010 - DNA, 80 bp, synthetic construct
  source 1..80: mol_type = other DNA
gggttgtacaaaacagggctgagaagaaaaagggctttccactatcaactgatgtttctgacataaataagtttgtggac

SEQ ID NO: 62011 - DNA, 80 bp, synthetic construct
  source 1..80: mol_type = other DNA
tcaaccaaggatggaattctggagcatgaaagaatcaccatgcctccctacttaaaggccattctgcaatctgattggga

SEQ ID NO: 62012 - DNA, 80 bp, synthetic construct
  source 1..80: mol_type = other DNA
tgccatcaccacccatgggtttaaggacgatgaattgcctgtaaagaaaacagtggaggggttcttcaactcaccattga

SEQ ID NO: 62013 - DNA, 80 bp, synthetic construct
  source 1..80: mol_type = other DNA
ccagaaatgcaaatgatatcaatgtggtgttccatgtgccagatgttctggaaggcacgggatccaccataagagctcag

SEQ ID NO: 62014 - DNA, 80 bp, synthetic construct
  source 1..80: mol_type = other DNA
tgctctggtgcagcatggtgtctgccatcggaatggagctggccctggccaacaaacaacattgtaagcctggagagtac

SEQ ID NO: 62015 - DNA, 80 bp, synthetic construct
  source 1..80: mol_type = other DNA
ataatcaagaagttgagaaactttgaggtcttcctgctcataaagccaaccaagagcaatgggccaatgttcgtatccct

SEQ ID NO: 62016 - DNA, 80 bp, synthetic construct
  source 1..80: mol_type = other DNA
ggcttggcatgcaaaagatgtgtccaacacatacctcacagactacatggtgttcaaggccactcagcaggtgggagact

SEQ ID NO: 62017 - DNA, 80 bp, synthetic construct
  source 1..80: mol_type = other DNA
ggtgctggactgaattccattccttcaaaccatccaagatctctactctgatcaggtgcacatccacaatgaacaacctt

SEQ ID NO: 62018 - DNA, 80 bp, synthetic construct
  source 1..80: mol_type = other DNA
tactggttctggagggagcagatggatatcaagccttgggagaaacatcccaactcagtgcttatggagtcagtcagcaa

SEQ ID NO: 62019 - DNA, 80 bp, synthetic construct
  source 1..80: mol_type = other DNA
gatgatgaaaatctccctgatggtgatgttggaggacaaagcagccaccgaggagctctgcaccaatttccgatacacgc

SEQ ID NO: 62020 - DNA, 80 bp, synthetic construct
  source 1..80: mol_type = other DNA
ttctggagggctttgtgtcagatccctgtctgccccatcctcacaagatgatcgaaaagcttccagatgtggccaggacc

SEQ ID NO: 62021 - DNA, 80 bp, synthetic construct
  source 1..80: mol_type = other DNA
aagctccaggtctggctgatcaacaagagcctcaacctcatgcaagacattgctctgaggccttaccagccaagagggga

SEQ ID NO: 62022 - DNA, 80 bp, synthetic construct
  source 1..80: mol_type = other DNA
cagagggagaatggtctgggagaacctgagaaacccctacactggtgaggcagttgctgacccgtatcgcctagtgaacc

SEQ ID NO: 62023 - DNA, 80 bp, synthetic construct
  source 1..80: mol_type = other DNA
taatgtacctaggctatctgaagaacaaggatgaatctccagagaagaacggttgccctgccctcgtgaggaagattgtg

SEQ ID NO: 62024 - DNA, 80 bp, synthetic construct
  source 1..80: mol_type = other DNA
ccccagtcacacctcacccttcaagcctcaactcacttcgtccatgatttcacgttccagtacctgtcacgagacacaga

SEQ ID NO: 62025 - DNA, 80 bp, synthetic construct
  source 1..80: mol_type = other DNA
aagatggaggcagcccaccctggtcgctatgagtacttaggccagaaggatcctcctctggacgacataaagacacatga

SEQ ID NO: 62026 - DNA, 80 bp, synthetic construct
  source 1..80: mol_type = other DNA
gtactccgtgtcatttcagaagtacgtgtgtgacgtggcactggtgcacctcaaagcaacctggggccccaacattgtgc

SEQ ID NO: 62027 - DNA, 80 bp, synthetic construct
  source 1..80: mol_type = other DNA
aatcaatgcacatggatgtattgaatgcattctgcggcctctccttggacagagttggaactttgaaagcatccagtgca

SEQ ID NO: 62028 - DNA, 80 bp, synthetic construct
  source 1..80: mol_type = other DNA
tttgacgagagctggtatgaatcagatgggagcaccccatatcaccggaaaaaggtcatagagaacttggagaaattcat

SEQ ID NO: 62029 - DNA, 80 bp, synthetic construct
  source 1..80: mol_type = other DNA
cacgcccatgaacacacatgttcaccacatcttgcgtcagtgtctggaaacagtggaagataggggttgcatgcacattg

SEQ ID NO: 62030 - DNA, 80 bp, synthetic construct
  source 1..80: mol_type = other DNA
acatattcaagaagaaccagcatggaggactcagagagatatatgttctgggccctgaggagagaattgtgcagctagga

SEQ ID NO: 62031 - DNA, 80 bp, synthetic construct
  source 1..80: mol_type = other DNA
ctggagaccattgcaaagcaagtgtgcaggagattcaagtctgagactctcaccaatcctgaccagaagacgcgcatccc

SEQ ID NO: 62032 - DNA, 80 bp, synthetic construct
  source 1..80: mol_type = other DNA
agagactcatgggaaaagagcaagggactcaagaaagaacaaggatgtgcacctcagattcgagactgtggggacgtcag

SEQ ID NO: 62033 - DNA, 80 bp, synthetic construct
  source 1..80: mol_type = other DNA
acgatttgaagacattcaaccaaactcagcacaccacaaagcttgctctgacccttatcaagttcacccctgaagtgctt

SEQ ID NO: 62034 - DNA, 80 bp, synthetic construct
  source 1..80: mol_type = other DNA
caccccttcatcattcgggcctgcagtctgttcatgaagaagaggataaaaatggatgatgacctactccagatcattgt

SEQ ID NO: 62035 - DNA, 80 bp, synthetic construct
  source 1..80: mol_type = other DNA
tgttcccttcaagaaattctatgagactgtgaatgatggctttgacaaccacacccctgatgtcataattgaagacatcc

SEQ ID NO: 62036 - DNA, 80 bp, synthetic construct
  source 1..80: mol_type = other DNA
caacaactcccagatgcagacagaggacccagtgctagaagaattgcacaaggcatacagaggtaactgtatccccccac

SEQ ID NO: 62037 - DNA, 80 bp, synthetic construct
  source 1..80: mol_type = other DNA
ccagatgggcagaggccggtaagtcgtacatcaagacagagacaggcatgcttcagggcatactccacttcctctcaagc

SEQ ID NO: 62038 - DNA, 80 bp, synthetic construct
  source 1..80: mol_type = other DNA
ctgcaccacacaactcctcaaatctggtttcagtatcactgttaccatgtcttgagtcgagtctttggaaggcacaggac

SEQ ID NO: 62039 - DNA, 80 bp, synthetic construct
  source 1..80: mol_type = other DNA
tggtgtgcttgtggatgttatgcaaagctcagatgactcagctgtgttgatctcgtatccgtgggaagacaaggagaaag

SEQ ID NO: 62040 - DNA, 80 bp, synthetic construct
  source 1..80: mol_type = other DNA
gcattcaatgcagattgttgacagctatgctcctacacttaaagaaaaaaataggagtttttctaggactttatccttca

SEQ ID NO: 62041 - DNA, 80 bp, synthetic construct
  source 1..80: mol_type = other DNA
gtgaagtgcacaactcacactctgttctttgtagaattcaactcagagttctttttccatgatgaccacatcagaccaac

SEQ ID NO: 62042 - DNA, 80 bp, synthetic construct
  source 1..80: mol_type = other DNA
catcaagtgggtgattgcttgtgatcaggtttctgaacaagaggcaatagtggcgaggcaggaagagatgtccaattcac

SEQ ID NO: 62043 - DNA, 80 bp, synthetic construct
  source 1..80: mol_type = other DNA
tatcaagtgtccttgagggaggtggttcactcagtctctgcagtctctgccaggtgggtcagtctgtgctgcattacatg

SEQ ID NO: 62044 - DNA, 80 bp, synthetic construct
  source 1..80: mol_type = other DNA
ttgctaggagcctcggtgtctttcctatttgatcgatttatgggagaggcatcaatactgaaagacccgtccatggggta

SEQ ID NO: 62045 - DNA, 80 bp, synthetic construct
  source 1..80: mol_type = other DNA
ctttctcatggaccacccatttggagcaggcatcacaggattcaaatataatctatggaatcaagttaggttcggaaccc

SEQ ID NO: 62046 - DNA, 80 bp, synthetic construct
  source 1..80: mol_type = other DNA
aaggatacacggcagtagttgagtttgccacaacaaggatgtgcacagagtcttctctcatgaaggccttcaaaacaaaa

SEQ ID NO: 62047 - DNA, 80 bp, synthetic construct
  source 1..80: mol_type = other DNA
tgggagcagtttacaagttgttcatgcagaccatcaaggaagactccatacctgaagataaggtcagggtctaccggagc

SEQ ID NO: 62048 - DNA, 80 bp, synthetic construct
  source 1..80: mol_type = other DNA
ctggaaaccacctcctgtggagcaatggccagctcagtagttgttcgatggggaaacaggaagaaatggtttagactcct

SEQ ID NO: 62049 - DNA, 80 bp, synthetic construct
  source 1..80: mol_type = other DNA
ggaagccatgaatgtgccagacaactgggaggagctgttggatgcaaaccctgagtgttgctataggcaggcaaagacga

SEQ ID NO: 62050 - DNA, 80 bp, synthetic construct
  source 1..80: mol_type = other DNA
ctgaggaggtgaaactaaaggtggctgaaaaactccatgctcctggggtgtcagcaagcctggcgagaggtgatcacatc

SEQ ID NO: 62051 - DNA, 80 bp, synthetic construct
  source 1..80: mol_type = other DNA
tcaaaaatcgtcagctcttctgtctacatattgtccagaaatgtggtctgccagggcacttcttggatggcacccgagac

SEQ ID NO: 62052 - DNA, 80 bp, synthetic construct
  source 1..80: mol_type = other DNA
ttcagaactcaggagagagccactgttaaggatgatcatgaggcaaaatgcagtcagtgtgacacagcgtgatcagctca

SEQ ID NO: 62053 - DNA, 80 bp, synthetic construct
  source 1..80: mol_type = other DNA
cagagctagagattaacactttgtttccaatgaacaaagagtatgagcatggtaaggacatcctggccacatacatgtcc

SEQ ID NO: 62054 - DNA, 80 bp, synthetic construct
  source 1..80: mol_type = other DNA
aaagagggtcaaaacgtgcagggtcgaaggaagacagtccaaaccagggtggtggttttccacagagaagaggcaatgcg

SEQ ID NO: 62055 - DNA, 80 bp, synthetic construct
  source 1..80: mol_type = other DNA
agcaaggccagaagatgtcctcacagatgtatggtggggtctcagaaggagtggccttaccttgcctgcactgaaggagc

SEQ ID NO: 62056 - DNA, 80 bp, synthetic construct
  source 1..80: mol_type = other DNA
attttgagcaactgcagagagtgctcccatggctgaccaaggatcccaatgagtcattgagaagatcccctttcttgcac

SEQ ID NO: 62057 - DNA, 80 bp, synthetic construct
  source 1..80: mol_type = other DNA
attggaaaatactcggtggcctgcatcaatcgtggaaggcagcgaccaaccttgttgttttgcatagttgtgtcagagag

SEQ ID NO: 62058 - DNA, 80 bp, synthetic construct
  source 1..80: mol_type = other DNA
caccatcaactcaggaactttctctcgcggatggagatccaaggtagagaagttaggctcgtaggggcccccctcaagcg

SEQ ID NO: 62059 - DNA, 80 bp, synthetic construct
  source 1..80: mol_type = other DNA
gaaactggagacaaacattgccactgttgttgccaggaactactttccccaatgggagctcaatctgcaatatgatccca

SEQ ID NO: 62060 - DNA, 80 bp, synthetic construct
  source 1..80: mol_type = other DNA
gagcacaaagtagagcaaaactcagtgaggccatgaaacacatctgctacatgttgacagtgggccctcacactgatgag

SEQ ID NO: 62061 - DNA, 80 bp, synthetic construct
  source 1..80: mol_type = other DNA
agaaggcaggacttgattgagagggttttgttggattgtgagcaaatacccattgttggaggagcaggtaagacccgaac

SEQ ID NO: 62062 - DNA, 80 bp, synthetic construct
  source 1..80: mol_type = other DNA
caacaccctggcgctgctgcaaaagttcatgaagaaccgaggagatgcttttcaatttaacaatgagatgagaaaggcaa

SEQ ID NO: 62063 - DNA, 80 bp, synthetic construct
  source 1..80: mol_type = other DNA
actgtggcatcatcggaggtttcactaagcctcaagcactggtggagagaggtgggtcactggtctactccggtaggggc

SEQ ID NO: 62064 - DNA, 80 bp, synthetic construct
  source 1..80: mol_type = other DNA
acctggcagggcactgtcaacggtcaatttgttcagattgagattgacacgtttgacggtgagagccagatcacagaggt

SEQ ID NO: 62065 - DNA, 80 bp, synthetic construct
  source 1..80: mol_type = other DNA
tattacaaactctttggaattcgcacgtctacacttgggtccttttttgcgacagtggtgcaaagatatgggcgtctcga

SEQ ID NO: 62066 - DNA, 80 bp, synthetic construct
  source 1..80: mol_type = other DNA
acacaaagacttaccatgatctgcagtctcctctaatagcccacaactgcgagatatactcctatggcaagggggtccca

SEQ ID NO: 62067 - DNA, 80 bp, synthetic construct
  source 1..80: mol_type = other DNA
gtgaagctgtctagtcacatagggaggcagcagcagctgagcatgcggaagatggaactaaaagttgaaggcacatgcat

SEQ ID NO: 62068 - DNA, 80 bp, synthetic construct
  source 1..80: mol_type = other DNA
cctagtggtctccaatctgaatctaactaatgatgatgtgaacgagctgtgctacaggttcaatgccgcagtggatgtgt

SEQ ID NO: 62069 - DNA, 80 bp, synthetic construct
  source 1..80: mol_type = other DNA
aagcctagtctacaacgaagacgacagcagaaagatgaggatcttggccttccatggtagatctactgatgtctcaaagc

SEQ ID NO: 62070 - DNA, 80 bp, synthetic construct
  source 1..80: mol_type = other DNA
agaatattggcaaaatagaagatctgctacaagggcagaaatgggtgaacggcgagccatccaacagttggatgctgctc

SEQ ID NO: 62071 - DNA, 80 bp, synthetic construct
  source 1..80: mol_type = other DNA
aaggccatgagatgggggaccttcaatgtgctgaaagatctgtacgaagaaggccaaaggatcccaggagtagactttga

SEQ ID NO: 62072 - DNA, 80 bp, synthetic construct
  source 1..80: mol_type = other DNA
gaggttccgtcagctgctctgtgaatctgccctgcacaatctaagggtcaaggggtacatcttgcatgatgctcctcctg

SEQ ID NO: 62073 - DNA, 80 bp, synthetic construct
  source 1..80: mol_type = other DNA
ttagggtttctaccactgaggcaacagctacaatctcaaatctatggaatgttgacctgacaaaaacgatcacagagacc

SEQ ID NO: 62074 - DNA, 80 bp, synthetic construct
  source 1..80: mol_type = other DNA
attgactacatcttcgggccaccaaagccaaagaaagctcaacctgcgctagatgcagatggccagcctgtggctggacc

SEQ ID NO: 62075 - DNA, 80 bp, synthetic construct
  source 1..80: mol_type = other DNA
atgcagatggccagcctgtggctggaccatcaggcataggtcacgaaggaccagctttcagagcagaggttgaaagcatt

SEQ ID NO: 62076 - DNA, 80 bp, synthetic construct
  source 1..80: mol_type = other DNA
atcaggcataggtcacgaaggaccagctttcagagcagaggttgaaagcattccgtcctggggggagatcatggacgtgg

SEQ ID NO: 62077 - DNA, 80 bp, synthetic construct
  source 1..80: mol_type = other DNA
gctcttctagtgatgatgactatggctgggagccagcagccaagagggagaagaggccagaaccagaaaagcctgctgaa

SEQ ID NO: 62078 - DNA, 80 bp, synthetic construct
  source 1..80: mol_type = other DNA
cccctagaacaaaaggaaggcttcttcgacatgccagacctagatctgacagatgtggtggatgttgatgcttttgggga

SEQ ID NO: 62079 - DNA, 80 bp, synthetic construct
  source 1..80: mol_type = other DNA
gccgccttttgagattatgcctcagaccctatactgccacactgacctggctaagaacatactcgacaatggagtctatt

SEQ ID NO: 62080 - DNA, 80 bp, synthetic construct
  source 1..80: mol_type = other DNA
actcacatctagtcttacacgacatggtgcctgagatgtcagattctgacacaactgtccagggctcagaagtggagact

SEQ ID NO: 62081 - DNA, 80 bp, synthetic construct
  source 1..80: mol_type = other DNA
ctaaactgggcacccaagatgtttacactctcttgtccactggatcatgtcttaaagggaatgagaaagagtcacgcttc

SEQ ID NO: 62082 - DNA, 80 bp, synthetic construct
  source 1..80: mol_type = other DNA
ctaatgtggttgttgaggagagaagggcaaaacatcaacatacttagcactcctgatgttcgatcagaggattacgatgt

SEQ ID NO: 62083 - DNA, 80 bp, synthetic construct
  source 1..80: mol_type = other DNA
tgggcctgacaatgcagacatcagtcaatttggttagagatgagttgtttgctaaagagccgggggtctttgtggcagta

SEQ ID NO: 62084 - DNA, 80 bp, synthetic construct
  source 1..80: mol_type = other DNA
atcagtcaatttggttagagatgagttgtttgctaaagagccgggggtctttgtggcagtatagggtctttgagattatg

SEQ ID NO: 62085 - DNA, 80 bp, synthetic construct
  source 1..80: mol_type = other DNA
gctttcaaagacatcaggttcaggtgggatgtcacggaggagaagttccctcccttttctaagcaactatatgactcatg

SEQ ID NO: 62086 - DNA, 80 bp, synthetic construct
  source 1..80: mol_type = other DNA
caggacagactacagctccccaccacctgggcttttcatcaatgaccaaaccttttctagtgccattcaatatgaagtcg

SEQ ID NO: 62087 - DNA, 80 bp, synthetic construct
  source 1..80: mol_type = other DNA
gcaggagcccccagaccaggactacatcaagaagatgctggcacattgcacccagcaaacaattgatgagctgaagaggg

SEQ ID NO: 62088 - DNA, 80 bp, synthetic construct
  source 1..80: mol_type = other DNA
agcatctcattgattccacagacaccaagacaaacaagctggatctcaattggctagaatgcaccaagaaggtgaatgag

SEQ ID NO: 62089 - DNA, 80 bp, synthetic construct
  source 1..80: mol_type = other DNA
tacaggacttccttccacaagcctcgcaaaatgcgagggaggctttcacataaatcaactatccctttcccaggctttat

SEQ ID NO: 62090 - DNA, 80 bp, synthetic construct
  source 1..80: mol_type = other DNA
tatattagttctgataggtttaaagatttatttcctactttagtagtcgatattaattttaaccaattctttgacttaaa

SEQ ID NO: 62091 - DNA, 80 bp, synthetic construct
  source 1..80: mol_type = other DNA
gtccagagggccctaaggtcaattccaatgaaaatgtgcctcttgcatcaccacaggacacaattggaccaaacgcagca

SEQ ID NO: 62092 - DNA, 80 bp, synthetic construct
  source 1..80: mol_type = other DNA
caacaacgtccccatgtgcgtgagggagtgttttgccagtgtgactacgctcccttggacaacgcgccaagcatccaaca

SEQ ID NO: 62093 - DNA, 80 bp, synthetic construct
  source 1..80: mol_type = other DNA
cctttcttggtgccatccatctcggtccacgcatcaacccctatactgcacacttgagtgccatgtttgctggctggggt

SEQ ID NO: 62094 - DNA, 80 bp, synthetic construct
  source 1..80: mol_type = other DNA
ggcagtttccaaatacgagttaccctatctggctctgggctgtatgcaggccgtgcagtggtcgcagtgctgcctccagg

SEQ ID NO: 62095 - DNA, 80 bp, synthetic construct
  source 1..80: mol_type = other DNA
tgtcaatccagccaatgtccaaagccctggagtgtttccacatgcattcattgatgcccgcaccgtggatcctatcctca

SEQ ID NO: 62096 - DNA, 80 bp, synthetic construct
  source 1..80: mol_type = other DNA
gcccaaccgctcatcaacctgttccaaactggctccatctccacatgttggttgacatttgagaccagacctggacctga

SEQ ID NO: 62097 - DNA, 80 bp, synthetic construct
  source 1..80: mol_type = other DNA
actggctccatctccacatgttggttgacatttgagaccagacctggacctgattttgacttttgtcttctcaaggcccc

SEQ ID NO: 62098 - DNA, 80 bp, synthetic construct
  source 1..80: mol_type = other DNA
cttctcctgcctacgcagattgagacacccaacggagctgcgcaaagggtagaaatggccgcagcaacaggggccgttag

SEQ ID NO: 62099 - DNA, 80 bp, synthetic construct
  source 1..80: mol_type = other DNA
gaattcaaatgaatgcgaacctggattcatcaatatccatatcaactatttcaaagaaggagaaatccaaaagtgactat

SEQ ID NO: 62100 - DNA, 80 bp, synthetic construct
  source 1..80: mol_type = other DNA
aaaagtaggaaacactaccctaaaatagaagcagaatctgattcagatgactacgtactcgatgattctgatagtgatga

SEQ ID NO: 62101 - DNA, 80 bp, synthetic construct
  source 1..80: mol_type = other DNA
taaatgcaaatttagattcatccatatcagtatcaactaattcacgaagggagaaatccaaagataaccataaaagtagg

SEQ ID NO: 62102 - DNA, 80 bp, synthetic construct
  source 1..80: mol_type = other DNA
aaaggaagtacttcgcactaagaatgagaatgaaacaggttgctatgcagttgattgaagacttgtaagtctgacctgag

SEQ ID NO: 62103 - DNA, 80 bp, synthetic construct
  source 1..80: mol_type = other DNA
gaattagtatgaacgcgaacctggattcatcaatatccatatcaaccagttcgaagaaggagaaatccaaaagcgaccat

SEQ ID NO: 62104 - DNA, 80 bp, synthetic construct
  source 1..80: mol_type = other DNA
atgaatgcgaatctggattcatcaatatccatatcgactaattcaaagaaggagaaatccaaaaacgaccataaaagtag

SEQ ID NO: 62105 - DNA, 80 bp, synthetic construct
  source 1..80: mol_type = other DNA
ctaaaatagaagcagaatcagattcagatgactacgtacttgacgattctgatagtgatgatggaaaatgcaaaaattgt

SEQ ID NO: 62106 - DNA, 80 bp, synthetic construct
  source 1..80: mol_type = other DNA
taaacgctaatttagattcatctatttcagtatcaacagtttccaagaaggagaaatccaaatcagatcataaaaatagg

SEQ ID NO: 62107 - DNA, 80 bp, synthetic construct
  source 1..80: mol_type = other DNA
aaggacaaaccgtattacttagtaacttgggctaactcatctatagaaatgcttatgtcagtgttttcacatgaagatta

SEQ ID NO: 62108 - DNA, 80 bp, synthetic construct
  source 1..80: mol_type = other DNA
gcaatgcaattgatcgaagatttgtaatgtcaacctgagagcacactagggagctctcaggttgacattacaaaccttct

SEQ ID NO: 62109 - DNA, 80 bp, synthetic construct
  source 1..80: mol_type = other DNA
ctcagtgaccgccgttacgcatcaacctatcgttacactagaacagaaaggtgttagcgatagtgatgttgttgaccttg

SEQ ID NO: 62110 - DNA, 80 bp, synthetic construct
  source 1..80: mol_type = other DNA
tggtttctggccttggcccagatgcagcatggtcccatgtgtgtgatcaagcacgcaaagtagacgataatcatgaccta

SEQ ID NO: 62111 - DNA, 80 bp, synthetic construct
  source 1..80: mol_type = other DNA
tttgtcaaatagttgacaggatggcatacggtgagccatactatagttctaaacctgacaaagatttcaactttgggagc

SEQ ID NO: 62112 - DNA, 80 bp, synthetic construct
  source 1..80: mol_type = other DNA
ttgatttgactcagaagaaagtttctctgagttctcagaaacaacctgatgatgaaaatcaagtggttaaacctaagcct

SEQ ID NO: 62113 - DNA, 80 bp, synthetic construct
  source 1..80: mol_type = other DNA
atggtccttatcaacctactacatttacaccacctactgattattgggatacttattaactcaaatacaaatggagtaat

SEQ ID NO: 62114 - DNA, 80 bp, synthetic construct
  source 1..80: mol_type = other DNA
atatggctgtagaaaataaaaactctagggatgctggtaaagttgtagattctgagactgcaagtatttgtgcttataag

SEQ ID NO: 62115 - DNA, 80 bp, synthetic construct
  source 1..80: mol_type = other DNA
taagtgcaaatttagattcatctatctcagtatcaacagtttcgaaaaaggagaaatccaaatcagaccataaaagtagg

SEQ ID NO: 62116 - DNA, 80 bp, synthetic construct
  source 1..80: mol_type = other DNA
ttatcattgtatagataagattttctacactcttttatcaaatggtgtacaagatggcacacgttgagccatactacagt

SEQ ID NO: 62117 - DNA, 80 bp, synthetic construct
  source 1..80: mol_type = other DNA
ttatcagagtatagataatattctccgtactcttttattaaacatctgacaagatggcacacggtgagccatactatagt

SEQ ID NO: 62118 - DNA, 80 bp, synthetic construct
  source 1..80: mol_type = other DNA
ttatcagtgtatagaaaacattttctgctctctttcatataattaccaataagatggcacacggtgagccatactatagt

SEQ ID NO: 62119 - DNA, 80 bp, synthetic construct
  source 1..80: mol_type = other DNA
cttactaactagaccggttgacactatagatatgacgaaggaatttaatcagaagaatataaaaacgctagatgaatggg

SEQ ID NO: 62120 - DNA, 80 bp, synthetic construct
  source 1..80: mol_type = other DNA
cggaactctttaccgcaagacccattggacctgatgattgactgagaagccacagtcaatcatatcgcgtgtggctcagc

SEQ ID NO: 62121 - DNA, 80 bp, synthetic construct
  source 1..80: mol_type = other DNA
caagaggggggtggtgattggcctttggcttatcagtgtatagataatattctcctactttttattaaacatctgacaag

SEQ ID NO: 62122 - DNA, 80 bp, synthetic construct
  source 1..80: mol_type = other DNA
caggtgtgagagttggagtcaatgagtttgtagttataaaaccaggtgctttatgtgttatagacactcctgaagggaaa

SEQ ID NO: 62123 - DNA, 80 bp, synthetic construct
  source 1..80: mol_type = other DNA
cccagtgactgtcatcacacaacagcctattgctacattagagcagaaaagtgttagcgatagtgaagtgattgaccttg

SEQ ID NO: 62124 - DNA, 80 bp, synthetic construct
  source 1..80: mol_type = other DNA
tcagaactgcaatggaacgtgagatgaaggtgctgcgtgatgaaatcaatgggatacttgcaccattcctacaaaagaag

SEQ ID NO: 62125 - DNA, 80 bp, synthetic construct
  source 1..80: mol_type = other DNA
aaaggcaagaccaaacatgggcggggaagagtcagacgcaaccttaggaaaggagtgaagcttcttactgaggaagagta

SEQ ID NO: 62126 - DNA, 80 bp, synthetic construct
  source 1..80: mol_type = other DNA
agaaatcgaggcacaaccacttgacttatctcagaagaaagagaaacaaacagaacacgaacaacaaatcgctaagcctg

SEQ ID NO: 62127 - DNA, 80 bp, synthetic construct
  source 1..80: mol_type = other DNA
ctaagcaccagaagagtgagccccaaccatactcacaaacttacggtaaggcaccaatttgggaatcttatgattttgac

SEQ ID NO: 62128 - DNA, 80 bp, synthetic construct
  source 1..80: mol_type = other DNA
gctaatttcccattagtaggtcatttaccaatcaatagacccatttatgatgataagaaacccagagatgatctccttgg

SEQ ID NO: 62129 - DNA, 80 bp, synthetic construct
  source 1..80: mol_type = other DNA
taacatctatggtaggtgcctcagcagttaatggcaccgtagtgaggatatcacttaatccgacttccactccttcctct

SEQ ID NO: 62130 - DNA, 80 bp, synthetic construct
  source 1..80: mol_type = other DNA
actagttggtctgggcttggagcgcgcaaacatctagatgttactgttggtaaaaatgcagtttttaaattaaagccttc

SEQ ID NO: 62131 - DNA, 80 bp, synthetic construct
  source 1..80: mol_type = other DNA
atttctggtggagttgtcttcagcatggtgcttcacagggtatgcagcaaacccaaacttagtcaatcttgtaaaatcta

SEQ ID NO: 62132 - DNA, 80 bp, synthetic construct
  source 1..80: mol_type = other DNA
cagacaagagtgttgatgtcacttttgagggatcagctggaacaccacttattatgaatgtacctgagcacagtcatttt

SEQ ID NO: 62133 - DNA, 80 bp, synthetic construct
  source 1..80: mol_type = other DNA
gcgagaatggctgtggaacattcctccctgtccacttccctttctagggctggtggtgagtcatcatctgacactgtttg

SEQ ID NO: 62134 - DNA, 80 bp, synthetic construct
  source 1..80: mol_type = other DNA
gcaagtcttgaacacagctgtttcagcagctgagcttgtgactccaccgccattcaattggctggtcaaaggtggttggt

SEQ ID NO: 62135 - DNA, 80 bp, synthetic construct
  source 1..80: mol_type = other DNA
actcattgctgggcgtgctcgcactggtgcgcgtaggttctatgtctaccctagttaccaggatgctttatccaacaagc

SEQ ID NO: 62136 - DNA, 80 bp, synthetic construct
  source 1..80: mol_type = other DNA
ctgccctttgcaccggcggagtgtccgcttataccaggcagagcaacccagttcgaaccacgctccagttcacacagatg

SEQ ID NO: 62137 - DNA, 80 bp, synthetic construct
  source 1..80: mol_type = other DNA
aatcaacctagtcttggccatggtgccactccagcaacactgggccggtccatcccagagcctggtgaccaatttaaagt

SEQ ID NO: 62138 - DNA, 80 bp, synthetic construct
  source 1..80: mol_type = other DNA
gagcagtgcttacatttttatccctaatacctgggggctatgcacaaagtcagaccaataacactatatttacagacatg

SEQ ID NO: 62139 - DNA, 80 bp, synthetic construct
  source 1..80: mol_type = other DNA
tatcatgactgctggcgctctgatgcaaccaaataggtctgattcccagaattggctattcaaaactgtcactccaccca

SEQ ID NO: 62140 - DNA, 80 bp, synthetic construct
  source 1..80: mol_type = other DNA
caggacatgatgctgctagggttggctggaatacacaacattatttgaccatacaaggctttcttctcatagacagcctg

SEQ ID NO: 62141 - DNA, 80 bp, synthetic construct
  source 1..80: mol_type = other DNA
gaatggttaacacccaacctgcaagaatctcaggaaccaccatctatcccagaattgggtgtttatgttggcatacataa

SEQ ID NO: 62142 - DNA, 80 bp, synthetic construct
  source 1..80: mol_type = other DNA
gaaagcactagtgtattttatgcagcaatatgtaaacccacataccaataacaaacatcaggtttccagcatcttcctca

SEQ ID NO: 62143 - DNA, 80 bp, synthetic construct
  source 1..80: mol_type = other DNA
taaaaccaactgaaaatttcagtatcacaaattatatgagctactttttcagagagagccaaagtgaccagaacgtggct

SEQ ID NO: 62144 - DNA, 80 bp, synthetic construct
  source 1..80: mol_type = other DNA
aatttgaaaatacgcccacagacatggcagcaaacagtgaatttccaacgtgggaagtggtatctggtcactaacacagc

SEQ ID NO: 62145 - DNA, 80 bp, synthetic construct
  source 1..80: mol_type = other DNA
cattagaagtggcccacctccatcagggtggatttgggacaacatggagctaacaaatgacagcatatactatgctgatc

SEQ ID NO: 62146 - DNA, 80 bp, synthetic construct
  source 1..80: mol_type = other DNA
aagtcctagcccatttcataaacccacccccacaaaactccaagctctattttgaagtgcatacaacaatgccccagtcg

SEQ ID NO: 62147 - DNA, 80 bp, synthetic construct
  source 1..80: mol_type = other DNA
agcatgagaaatgttggttttgatgaggatcaaaccgataattggcatgaactagatgaagatctccagacctcgactga

SEQ ID NO: 62148 - DNA, 80 bp, synthetic construct
  source 1..80: mol_type = other DNA
agagagtgattatgagacagattctctagaggatgaatcagatgatgaagacacttgcacaaacagagagcttgttatta

SEQ ID NO: 62149 - DNA, 80 bp, synthetic construct
  source 1..80: mol_type = other DNA
acactctagtcaaccagggcattagtagggatcgtgcaacttacattggtatgtcagcatatcctagtgttgagtgggga

SEQ ID NO: 62150 - DNA, 80 bp, synthetic construct
  source 1..80: mol_type = other DNA
ggtggtgaaaaatctacaagccagcacatctcagaaattccttcagatgatgttggtgctgaagcacactgtacgtgtgc

SEQ ID NO: 62151 - DNA, 80 bp, synthetic construct
  source 1..80: mol_type = other DNA
ctgtgagcgcaaacaacagtcgctcagtcaagggagccgcggccacgccgagtaggatcgagggtacagctcccattctt

SEQ ID NO: 62152 - DNA, 80 bp, synthetic construct
  source 1..80: mol_type = other DNA
atcgagggtacagctcccattcttttctgtctctgtttagatgattttaatcaacatttaaaattgatttaatcaggtgc

SEQ ID NO: 62153 - DNA, 80 bp, synthetic construct
  source 1..80: mol_type = other DNA
cacaaacgataatgcttcagacacacttggtccatctgtagaaatacatacattgggtcaaactatgtcatcttaccaga

SEQ ID NO: 62154 - DNA, 80 bp, synthetic construct
  source 1..80: mol_type = other DNA
gcgtgcgaggagtattgggcttgaagaggatcaaactgacaactggcaagaaccagatgaagatctccaaacctcgactg

SEQ ID NO: 62155 - DNA, 80 bp, synthetic construct
  source 1..80: mol_type = other DNA
aagtggtgaacaatcaacaagtcagcacatccaggaaatctcctcagatgatgttggcgcaggagcacactattcgtgtg

SEQ ID NO: 62156 - DNA, 80 bp, synthetic construct
  source 1..80: mol_type = other DNA
ttatcatgactgttggtgcattagtgcggcctaacaggtctgacacccagaattggctgttcaagacaaccactccacct

SEQ ID NO: 62157 - DNA, 80 bp, synthetic construct
  source 1..80: mol_type = other DNA
gagtgtgaggagtattgggcttgaggaggatcaaattgataactggcaggagccagatgaatatctccagacctcgactg

SEQ ID NO: 62158 - DNA, 80 bp, synthetic construct
  source 1..80: mol_type = other DNA
aagtggcgaacagccaccaagccagcacatccaagagatttctttggatgatgttggcgcaggagcacactattcgtgtg

SEQ ID NO: 62159 - DNA, 80 bp, synthetic construct
  source 1..80: mol_type = other DNA
agaatctaacaagcctgcccttgatctatcccagaaaaaagagaaacaaccagaacatgaacaacaagttatgaagccta

SEQ ID NO: 62160 - DNA, 80 bp, synthetic construct
  source 1..80: mol_type = other DNA
gagtgtaagaaatattgggcttgaggaggatcaaactgacaactggcaagaaccagatgaggatgtccagacctcgactg

SEQ ID NO: 62161 - DNA, 80 bp, synthetic construct
  source 1..80: mol_type = other DNA
aagagagtgactatgagacagattctctagaggatgaatctgatgatgaagactctaatacatgcagagagcttgttatt

SEQ ID NO: 62162 - DNA, 80 bp, synthetic construct
  source 1..80: mol_type = other DNA
tgacatcaatggtcggtgcttcagctgtcaatggcacagttgtaagagtttcccttaatccaacatcaacaccttcatcc

SEQ ID NO: 62163 - DNA, 80 bp, synthetic construct
  source 1..80: mol_type = other DNA
gggcaataatcatatgcctaatgtttctggagaccgcggccacgccgagtaggatcgagggtacagtctccatctctttt

SEQ ID NO: 62164 - DNA, 80 bp, synthetic construct
  source 1..80: mol_type = other DNA
ccaagaggggggtggcgattggcctttggcttatcacataactataaaattctcttcttcatattacacacataccacca

SEQ ID NO: 62165 - DNA, 80 bp, synthetic construct
  source 1..80: mol_type = other DNA
tgttagcaccgatccttggaattgttttcttatgcttcatggaggactccaactatgttaatcaagttcgtggccttata

SEQ ID NO: 62166 - DNA, 80 bp, synthetic construct
  source 1..80: mol_type = other DNA
tagccacagctattttgatagctggaggtcatgcctgtttaacacttactggcacgaccacatcactatttgttgtcata

SEQ ID NO: 62167 - DNA, 80 bp, synthetic construct
  source 1..80: mol_type = other DNA
ctgacatgcagatttatacgtatggcaacagtgtttgttggggcaaggtttgaaatccgtgatgctaatgggaaaattgt

SEQ ID NO: 62168 - DNA, 80 bp, synthetic construct
  source 1..80: mol_type = other DNA
agcaactgtgccaactagaataaggaatgctgcattcgatttcttccaaaaattaaaacagtctggagtgcgagtcgggg

SEQ ID NO: 62169 - DNA, 80 bp, synthetic construct
  source 1..80: mol_type = other DNA
tcaatgactttgtggtaataaaaccaggagctttatgtataattgatacacctgagggcaagggaaccggtttcttttcc

SEQ ID NO: 62170 - DNA, 80 bp, synthetic construct
  source 1..80: mol_type = other DNA
ggtaacgacataatcacagcagctcatgtcgttggtaacaacacctttgttactgtatgctatgatgggttaatgtacga

SEQ ID NO: 62171 - DNA, 80 bp, synthetic construct
  source 1..80: mol_type = other DNA
ggcaaaagtgcgatacatgcctgagaaagacatagcatttataacatgccctggtgatttgcatccaacaacaagattga

SEQ ID NO: 62172 - DNA, 80 bp, synthetic construct
  source 1..80: mol_type = other DNA
gttacgccttctatggttaaaaagctgcctaaatttgtcaggaattctccacaagcctatgattggattgtaagaggtct

SEQ ID NO: 62173 - DNA, 80 bp, synthetic construct
  source 1..80: mol_type = other DNA
ttggcaaaaaatccagactacagtagtgtcacggttatggcttatgtcaatgaagatctggtggtctcaaccgccactgc

SEQ ID NO: 62174 - DNA, 80 bp, synthetic construct
  source 1..80: mol_type = other DNA
catggtccatggtaacactctctcttatgcagtacgcacccaggacggaatgtcgggtgcgcccgtttgtgacaaatatg

SEQ ID NO: 62175 - DNA, 80 bp, synthetic construct
  source 1..80: mol_type = other DNA
gtaaaagctccatctcaaattgaacaacttaaggaagagatagagcgattgaaggcccagctgaacgctacaacagaaag

SEQ ID NO: 62176 - DNA, 80 bp, synthetic construct
  source 1..80: mol_type = other DNA
cgcaccagacattactgagccacagtccattgccacattagaacagaagaatgttagtgataatgatgtggttgatctcg

SEQ ID NO: 62177 - DNA, 80 bp, synthetic construct
  source 1..80: mol_type = other DNA
ttaggattgcaatggagcgtgaaatgaaggtgttgcgggatgaaattaataaagttttagaaccattcatacaaaagaag

SEQ ID NO: 62178 - DNA, 80 bp, synthetic construct
  source 1..80: mol_type = other DNA
aagggtaagaccaaacacggtagaggtagggttagacgtaaccttaggaagggagtgaaacttctgaccgaagaggaata

SEQ ID NO: 62179 - DNA, 80 bp, synthetic construct
  source 1..80: mol_type = other DNA
gggctagttggtgatgatgtagaatttgactatacagaagttatcaattttgatcaacaccgtaagaagcctacccctgc

SEQ ID NO: 62180 - DNA, 80 bp, synthetic construct
  source 1..80: mol_type = other DNA
cccccgtatatttaaaccaaagctcacccctgcaccagtgactgaggtacaaccacttgacttatcttgcaagcaacaag

SEQ ID NO: 62181 - DNA, 80 bp, synthetic construct
  source 1..80: mol_type = other DNA
tgcagccagaacctgagcagcaacctgaggctattaagacccagagaaatgagcctcagccgtattcacaaacctacggc

SEQ ID NO: 62182 - DNA, 80 bp, synthetic construct
  source 1..80: mol_type = other DNA
accagggggcccaaaactaccactcattagattcatggcagctattacttgaggccccacgagagcggaagtgtgtacct

SEQ ID NO: 62183 - DNA, 80 bp, synthetic construct
  source 1..80: mol_type = other DNA
actaacttcccactggttggccacctacccatcaatagacctatctatgatgacaagaaacccagagatgacttattagg

SEQ ID NO: 62184 - DNA, 80 bp, synthetic construct
  source 1..80: mol_type = other DNA
attattaccagaaccaacttggcatgcttttgaggagtatgggcctactacatggggcccgcaggctttcgtcaagtctt

SEQ ID NO: 62185 - DNA, 80 bp, synthetic construct
  source 1..80: mol_type = other DNA
cctttgctgattgggctacatatcgtgaatttagatacttggaggatactagagttatacatataactgcaactgagaag

SEQ ID NO: 62186 - DNA, 80 bp, synthetic construct
  source 1..80: mol_type = other DNA
catttgcatttgatggcaaggagtggattgagatttacccaatagagcatttaaatctcatggcctccctgaagctaatt

SEQ ID NO: 62187 - DNA, 80 bp, synthetic construct
  source 1..80: mol_type = other DNA
ttgatactgaagaagaatatcttgaagcacatggatgggccccatacattagggaattcactagagtctttaagggaggt

SEQ ID NO: 62188 - DNA, 80 bp, synthetic construct
  source 1..80: mol_type = other DNA
tgctgtggtatttgttcctcaagaaggaaatcataaaagaggaaaaaatcaaaaattctgacatccggcaaatagtatgt

SEQ ID NO: 62189 - DNA, 80 bp, synthetic construct
  source 1..80: mol_type = other DNA
tatacaccaggataggggcgtgcttagaagcacatcagaatgcactgatgaaacagcacacagagacatctgttggccaa

SEQ ID NO: 62190 - DNA, 80 bp, synthetic construct
  source 1..80: mol_type = other DNA
cataaaagtaatgctctacaggagaggctccgccattcccaagaagagaaagccaccctcgctctagatgtacaattcct

SEQ ID NO: 62191 - DNA, 80 bp, synthetic construct
  source 1..80: mol_type = other DNA
tgtggctttacagttaattcggaccttgagcctgtgccaacatcaccagaaaaactgatggcatctctccttaaaccata

SEQ ID NO: 62192 - DNA, 80 bp, synthetic construct
  source 1..80: mol_type = other DNA
caaagttctacctgacctagaatcactccatgggaagctcctatgctaccagttgctcgctgcatttatggcagaagatc

SEQ ID NO: 62193 - DNA, 80 bp, synthetic construct
  source 1..80: mol_type = other DNA
acccctttaaggtgtatgtagaacactgcctgtctcggactgctaagcagcttcgtgagtctggactacctgccagactc

SEQ ID NO: 62194 - DNA, 80 bp, synthetic construct
  source 1..80: mol_type = other DNA
acagaagagcaactccatcgcatttggaggggaggaccaaagaagtgtgatggctagcaagtctgataagcaagttactg

SEQ ID NO: 62195 - DNA, 80 bp, synthetic construct
  source 1..80: mol_type = other DNA
cccaatctagaggtcgaggtagatctgttaaaatcacagtcaactctcagaataaaggaagaagacaaaacggacgcaac

SEQ ID NO: 62196 - DNA, 80 bp, synthetic construct
  source 1..80: mol_type = other DNA
aaatatcagtctactcaacgtgtccgtaaaattgtcaataaacaactcaggaaacagggtgtcacaggaccaaaacctgc

SEQ ID NO: 62197 - DNA, 80 bp, synthetic construct
  source 1..80: mol_type = other DNA
caattgggtcaaacacaacaggagcaacagagattgaggcatgtatactccttaatcccgtcctggttaaggacgctact

SEQ ID NO: 62198 - DNA, 80 bp, synthetic construct
  source 1..80: mol_type = other DNA
gggagtactcagtttgggccagtgcaggcgctaggcgcccagtattcgatgtggaaactaaaatatttgaatgtcaaact

SEQ ID NO: 62199 - DNA, 80 bp, synthetic construct
  source 1..80: mol_type = other DNA
actaacttccatggtgggcgcctcagctgtcaatgggactgtactccgtatctcgctcaatcctacatccactccatcat

SEQ ID NO: 62200 - DNA, 80 bp, synthetic construct
  source 1..80: mol_type = other DNA
tcaacatgaaaacgtacgattgaaggagttgatcccaaaaccaaaaccaagagtaatacaaatgaagtgggtgattttgg

SEQ ID NO: 62201 - DNA, 80 bp, synthetic construct
  source 1..80: mol_type = other DNA
caactagttggtctggtcttggtgctcgcaagcacatggatgtaacagttggaaggaatgcagtctttaaacttagacca

SEQ ID NO: 62202 - DNA, 80 bp, synthetic construct
  source 1..80: mol_type = other DNA
acattaggtccatctattgaaattcacacccttggtaaaaccatgtcttcatataaaaatgagcaattcacaggtgggct

SEQ ID NO: 62203 - DNA, 80 bp, synthetic construct
  source 1..80: mol_type = other DNA
atttcttgtcgagcttgcgtcagaatggtgtttcactggctatgcagctaatccaaatttggttaacttagtcaaatcca

SEQ ID NO: 62204 - DNA, 80 bp, synthetic construct
  source 1..80: mol_type = other DNA
ccgaccatgaggtgaatgtcacctttgagggctcaaagggcacgcccctaataatgaatgttccagagcatagccacttt

SEQ ID NO: 62205 - DNA, 80 bp, synthetic construct
  source 1..80: mol_type = other DNA
gcaaggatggctgaacaacattcctccatctcaacaacattctcaagagctggaggggatgcaacatccgatactgtttg

SEQ ID NO: 62206 - DNA, 80 bp, synthetic construct
  source 1..80: mol_type = other DNA
gcaggtgctgaatacagcagtctcagcagcagagcttgtaacaccaccaccgttcaattggcttataaagggtggttggt

SEQ ID NO: 62207 - DNA, 80 bp, synthetic construct
  source 1..80: mol_type = other DNA
ggtttgtaaaactaattgcaggtaggactagaactggtaccaagcaattttatgtttatccaagctatcaggatgctcta

SEQ ID NO: 62208 - DNA, 80 bp, synthetic construct
  source 1..80: mol_type = other DNA
tcaaataaaccagccctttgcactggtggagttacaggtggcggccaacgcaccacaccagtaacaactctacagttcac

SEQ ID NO: 62209 - DNA, 80 bp, synthetic construct
  source 1..80: mol_type = other DNA
tcaaatgaaccagccaagtcttggccatggtgagcaaactgctaccattggccgtattgtgcaagacccaagtggggaac

SEQ ID NO: 62210 - DNA, 80 bp, synthetic construct
  source 1..80: mol_type = other DNA
gggctgtgctcacgtttctatcattaatacctggtggatatgcacaaagccagcagaacaaaactatatttacagacatg

SEQ ID NO: 62211 - DNA, 80 bp, synthetic construct
  source 1..80: mol_type = other DNA
tgcgtgtgctgctaactgttggttcaatcatgagcccgaactcagccgacaggcaagtttggctgaacaaaactctgaca

SEQ ID NO: 62212 - DNA, 80 bp, synthetic construct
  source 1..80: mol_type = other DNA
gcgccaggaacaagcccaaatgacaatcttgtgaagatagcccatgacctaggtcactatttgattatgcaagggttcat

SEQ ID NO: 62213 - DNA, 80 bp, synthetic construct
  source 1..80: mol_type = other DNA
gcatataaagacagtagagtggttcactcctgattttcaaccttcgcgtgacccaactcctattgctggcatgtcagtga

SEQ ID NO: 62214 - DNA, 80 bp, synthetic construct
  source 1..80: mol_type = other DNA
tggttaacataacaaagaaggctgatgtctacttcatgaggcagttcaaaaattctcacaccaacaatcgccatcaaata

SEQ ID NO: 62215 - DNA, 80 bp, synthetic construct
  source 1..80: mol_type = other DNA
acaagtatttttctagttaaaccattggcagatttcgaggtgcaaagttatatgagctactttaaaagagagtcacatga

SEQ ID NO: 62216 - DNA, 80 bp, synthetic construct
  source 1..80: mol_type = other DNA
taataatgatggggttgccaatcttacagtgagaagcatgactagcccgaagactgtcaggttccaagctggagaatggt

SEQ ID NO: 62217 - DNA, 80 bp, synthetic construct
  source 1..80: mol_type = other DNA
atttgttaacgagtaccacacttaaggagaacaatctaccagagggctgggtttgggacagagtggagcttaagagcgac

SEQ ID NO: 62218 - DNA, 80 bp, synthetic construct
  source 1..80: mol_type = other DNA
acaccatattatgctgatcaagctttggcatatttcataacaccacccccagtggactctcaaatcttatttgaaggtag

SEQ ID NO: 62219 - DNA, 80 bp, synthetic construct
  source 1..80: mol_type = other DNA
taccacattgcccaggatctcatttccacctgacaatcccagtgggcggtatatggaaaaccagcaacatgactgtgaca

SEQ ID NO: 62220 - DNA, 80 bp, synthetic construct
  source 1..80: mol_type = other DNA
cttctgatgatgaagatgattgtgagacagagtatgtttcagaagagacagaaactgaggatgaggaagatgaggacgta

SEQ ID NO: 62221 - DNA, 80 bp, synthetic construct
  source 1..80: mol_type = other DNA
ctcactgcttgcaaatattcaacagagactttgacagaaaatcttgacctcagaatcaaaatagccctagcaaatataac

SEQ ID NO: 62222 - DNA, 80 bp, synthetic construct
  source 1..80: mol_type = other DNA
gacgatgaagcggacaggtttgatctccacagctcctatggttctgaacctgaggactcagatgagaacaaccgtgtaac

SEQ ID NO: 62223 - DNA, 80 bp, synthetic construct
  source 1..80: mol_type = other DNA
cctcctctctacactcataaaccagggaatgacagtggaacgcgcaacaaggataactaagcgcgctttcccaacctgcg

SEQ ID NO: 62224 - DNA, 80 bp, synthetic construct
  source 1..80: mol_type = other DNA
ccgagaaaacaaagcgcagtgtatacatggacctgcttgcctccggcgcatcgccgagcagtgcatggtcaaacgcgtgt

SEQ ID NO: 62225 - DNA, 80 bp, synthetic construct
  source 1..80: mol_type = other DNA
caaacgcgtgtgaagaagcacgcaatgtgggcagcaatcagctggccaaactttctggagaccgcggccacgccgagtag

SEQ ID NO: 62226 - DNA, 80 bp, synthetic construct
  source 1..80: mol_type = other DNA
aaatggcacttggtgaaccatattacagttctaagcctgacaaggactttgactttgggtgcacgatggcgcgtagacat

SEQ ID NO: 62227 - DNA, 80 bp, synthetic construct
  source 1..80: mol_type = other DNA
cactacactaaccttgtgggttatgaacaccctcatgttggtgtatttctttgacaacctactggctataactctagcac

SEQ ID NO: 62228 - DNA, 80 bp, synthetic construct
  source 1..80: mol_type = other DNA
tcaaatcgtgtgtttagagataaattatttccatctattgtgaacatgtatgaaaaagtaataaatgttggtccgcgtat

SEQ ID NO: 62229 - DNA, 80 bp, synthetic construct
  source 1..80: mol_type = other DNA
cgtgtgcttgatttgacgatacagtgatgtctctcagtgttgacgtgacgagtcttccttctatctcttcgagtatatat

SEQ ID NO: 62230 - DNA, 80 bp, synthetic construct
  source 1..80: mol_type = other DNA
taaatgcaaacttagattcatcagtatcaatatcaactaatgtgaagaaggagaaatccaagattgaccataaaagtagg

SEQ ID NO: 62231 - DNA, 80 bp, synthetic construct
  source 1..80: mol_type = other DNA
agatattgagctgtcaaagcccaaaatattagatttcaacgatgagaacatttatctggcaagtctaactatgattgaac

SEQ ID NO: 62232 - DNA, 80 bp, synthetic construct
  source 1..80: mol_type = other DNA
caacaatatcaacatttacaagctcaaagtcttgtatcaaaattgggaatttccaaaaggagaaggaagtacaacataca

SEQ ID NO: 62233 - DNA, 80 bp, synthetic construct
  source 1..80: mol_type = other DNA
ttatcagtgtatagataatatttttcctacactcttttgtcaaatagctgacaggatggcacacggtgagccatactata

SEQ ID NO: 62234 - DNA, 80 bp, synthetic construct
  source 1..80: mol_type = other DNA
tgtgggtggtcaccaatggaaggcggctttaaaaaaaccatgcagcgcctagttaataaagggaataaacattttattga

SEQ ID NO: 62235 - DNA, 80 bp, synthetic construct
  source 1..80: mol_type = other DNA
ttgtcgggtcaaacaccagcggcaccactgagattgaggcgtgtattctccttaaccctgtccttgttaaggacgctact

SEQ ID NO: 62236 - DNA, 80 bp, synthetic construct
  source 1..80: mol_type = other DNA
acttattgctggaagaactagaactggcacccgtagcttttatgtatatcctagctaccaagatgcattgtccaataagc

SEQ ID NO: 62237 - DNA, 80 bp, synthetic construct
  source 1..80: mol_type = other DNA
gaacagttaaaccaaaaccttgccctgaaccagaaattgaaccacaaccacttgacttgtctaagaagaagggggaacaa

SEQ ID NO: 62238 - DNA, 80 bp, synthetic construct
  source 1..80: mol_type = other DNA
gagcagtgcttacatttttatctctaatacctgggggctatgcgcaaagtcagaccaacaatgcctgcaaatattcaact

SEQ ID NO: 62239 - DNA, 80 bp, synthetic construct
  source 1..80: mol_type = other DNA
agaataccttgaccaaggtgatcaagcagtagtaacttatgatagccctggacaagcgctatttagtgctgaagagacag

SEQ ID NO: 62240 - DNA, 80 bp, synthetic construct
  source 1..80: mol_type = other DNA
tgccactagaaatggcccacctccatcagggtggatttgggacaacatggagctgacaaatgaaagcatatattatgctg

SEQ ID NO: 62241 - DNA, 80 bp, synthetic construct
  source 1..80: mol_type = other DNA
gaggcctgaggtactttggtatcttttccttaagaaagagatcataaaggaagagaaaattaggaattctgatattcggc

SEQ ID NO: 62242 - DNA, 80 bp, synthetic construct
  source 1..80: mol_type = other DNA
taaaaagcaaacgaaattgtttaggatatttgaaccaagacaattgccgatttatcgagcaaatggcgagaaagaattaa

SEQ ID NO: 62243 - DNA, 80 bp, synthetic construct
  source 1..80: mol_type = other DNA
aatgaaaactctagagatgctggtaaagtcgtagactcagaaacagcaagcatttgtgacgctatatttcaagatgaaga

SEQ ID NO: 62244 - DNA, 80 bp, synthetic construct
  source 1..80: mol_type = other DNA
gaaaaagaaaatgaaaagaatgtagacataactatggagagtaaaactaacaataagaaacaacaattatctgataaggt

SEQ ID NO: 62245 - DNA, 80 bp, synthetic construct
  source 1..80: mol_type = other DNA
gacattttgtctcagaacgatgccctgtaatcgcgctgttttcggagccttcgttttagcgttactcataagcctacagt

SEQ ID NO: 62246 - DNA, 80 bp, synthetic construct
  source 1..80: mol_type = other DNA
cacgaagttgctgtcaacgtgattgttgagttctcttttgacattttgttctttctttgtggattactcggatttgagtt

SEQ ID NO: 62247 - DNA, 80 bp, synthetic construct
  source 1..80: mol_type = other DNA
aagcccaaccgctagacgcctgatttttagacgaacagctagtgcagaaaaagctgatactgttgaacttgaacatgtgt

SEQ ID NO: 62248 - DNA, 80 bp, synthetic construct
  source 1..80: mol_type = other DNA
cgtcacgacgacggaatgactctagagatgattcggcagtacgcaatgtctcgaagacatcaccacttgcctcccaacgg

SEQ ID NO: 62249 - DNA, 80 bp, synthetic construct
  source 1..80: mol_type = other DNA
tcccgtgatcactttgacggagatccacgagaacccgcccccccagcttattctcccgccgatttccatcctccgccagc

SEQ ID NO: 62250 - DNA, 80 bp, synthetic construct
  source 1..80: mol_type = other DNA
ctctcctcacatatatgagaccccgctctcgacgcgtgtggcgccctctgctcctagcgctagtttgtttactgctggtg

SEQ ID NO: 62251 - DNA, 80 bp, synthetic construct
  source 1..80: mol_type = other DNA
gtattggtcttccttagattttatgcatgacgggcagggtagtcgctgaggacctcgccggcttacggaatgatgtcgtc

SEQ ID NO: 62252 - DNA, 80 bp, synthetic construct
  source 1..80: mol_type = other DNA
agggtagtcgctgaggacctcgccggcttacggaatgatgtcgtcctagcatcattctcccgggacgggtaattgcagtc

SEQ ID NO: 62253 - DNA, 80 bp, synthetic construct
  source 1..80: mol_type = other DNA
cagtatatttcaaactttacgaattttacaagaataacgaaactgcaagaaatacgactgtcgccgggtttttgaaacgt

SEQ ID NO: 62254 - DNA, 80 bp, synthetic construct
  source 1..80: mol_type = other DNA
gccacagcgattttaatagctggagggcatgcctgtttaacacttactggcacgaccacgtcattgtttgttgtcatact

SEQ ID NO: 62255 - DNA, 80 bp, synthetic construct
  source 1..80: mol_type = other DNA
tacagtcagaacctgaacagcaacctgagcccattaagacccaaaaaaatgagccccagccatactcacaaacatatggg

SEQ ID NO: 62256 - DNA, 80 bp, synthetic construct
  source 1..80: mol_type = other DNA
caccacaccgtctaacaaaagctgatgagatcgtgcttgggtctaaaattgtgaagcttaggactattattgagacagct

SEQ ID NO: 62257 - DNA, 80 bp, synthetic construct
  source 1..80: mol_type = other DNA
ataaaaacccagaactacggtgccttgcctgaagccgtctttgaactagataaggcagcctatgaggcaggattagaagg

SEQ ID NO: 62258 - DNA, 80 bp, synthetic construct
  source 1..80: mol_type = other DNA
ccatttacccatcaataggcctatctatgatgataagaaaccaagagatgacttactgggattgttaccggaaccaacct

SEQ ID NO: 62259 - DNA, 80 bp, synthetic construct
  source 1..80: mol_type = other DNA
ggcatgcttttgaggaatacggaccaaccacatggggcccacaggctttcatcaaatcttttgataaatttttctatgct

SEQ ID NO: 62260 - DNA, 80 bp, synthetic construct
  source 1..80: mol_type = other DNA
ttgattcagaggaagaatatctggaagcacatggatgggcaccatacatcagagaattcactagggtattcagaggggag

SEQ ID NO: 62261 - DNA, 80 bp, synthetic construct
  source 1..80: mol_type = other DNA
tactttggtatcttttccttaaaaaagagatcataaaggaagagaaaattaggaattctgatattcggcaaatagtatgt

SEQ ID NO: 62262 - DNA, 80 bp, synthetic construct
  source 1..80: mol_type = other DNA
tttacaccaggataggggcgtgcttagaagcacatcagaattcgctgatgaagcagcataccgagacagccgttggtcaa

SEQ ID NO: 62263 - DNA, 80 bp, synthetic construct
  source 1..80: mol_type = other DNA
caagatcctacctgacctaaaatcactccatgggaagctcctatgctaccagttgcttgctgcgttcatggcagaaaatc

SEQ ID NO: 62264 - DNA, 80 bp, synthetic construct
  source 1..80: mol_type = other DNA
atccttttaaggtatatgtagaacactgcctatcacggactgttaagcagcttcgtgactctggtcttccggccagactc

SEQ ID NO: 62265 - DNA, 80 bp, synthetic construct
  source 1..80: mol_type = other DNA
ctcagtcaagaggtcggggcagatctgtcaaaattacagtcaattcccagaataaaggcagaagacaaaacggacgcaac

SEQ ID NO: 62266 - DNA, 80 bp, synthetic construct
  source 1..80: mol_type = other DNA
aggttaacatcaatggttggtgcttcagcagtaaatggcacagtagtcagggtctcacttaaccctacctcaacaccatc

SEQ ID NO: 62267 - DNA, 80 bp, synthetic construct
  source 1..80: mol_type = other DNA
ttccactagttggtcaggattaggggcccgcaagcaccttgacgttactgtggggaagaatgccatctttaaattaaaac

SEQ ID NO: 62268 - DNA, 80 bp, synthetic construct
  source 1..80: mol_type = other DNA
tgggtggtggctcacaaacaccaatgacaatgcttcagatacgcttggcccgtctgttgaaattcatacgctgggaagga

SEQ ID NO: 62269 - DNA, 80 bp, synthetic construct
  source 1..80: mol_type = other DNA
atacgcttggcccgtctgttgaaattcatacgctgggaaggaccatgtcgtcataccaaaatcagcagtttacggggggc

SEQ ID NO: 62270 - DNA, 80 bp, synthetic construct
  source 1..80: mol_type = other DNA
cttttcctagtggaattagcttctgagtggtgcttcaccggctacgcagccaacccaaaccttgttaacctagttaaatc

SEQ ID NO: 62271 - DNA, 80 bp, synthetic construct
  source 1..80: mol_type = other DNA
tactgacaaacaagtgaatgtcacctttgaagggtctgcaggcacaccattggtcatgaatgttcccgctgcaagtcact

SEQ ID NO: 62272 - DNA, 80 bp, synthetic construct
  source 1..80: mol_type = other DNA
ttgctagaacagttgcccaacgctctacattaccaacatctatggctagagctggagaaaatacaacttctgacacggta

SEQ ID NO: 62273 - DNA, 80 bp, synthetic construct
  source 1..80: mol_type = other DNA
tggcaggtgctcaatgcagcggtatctgctgcagagctggttactccaccacctttcaattggctagttaaaggtggatg

SEQ ID NO: 62274 - DNA, 80 bp, synthetic construct
  source 1..80: mol_type = other DNA
agcttatagctggtagggtgcgtagtggaaaccgtagtttctatgtctatgcaagctatcaagatgcactgtccaataaa

SEQ ID NO: 62275 - DNA, 80 bp, synthetic construct
  source 1..80: mol_type = other DNA
ccagctctgtgtacagggagtactccaggaagcatgagaacacgcccagcagtaatgacaacattacagttcacacaaat

SEQ ID NO: 62276 - DNA, 80 bp, synthetic construct
  source 1..80: mol_type = other DNA
gaaccaacctagtttaggccatggtgagacgcctgcgacacttggcaggtctattccaacttcaggagagacgctgaagg

SEQ ID NO: 62277 - DNA, 80 bp, synthetic construct
  source 1..80: mol_type = other DNA
tgcttctcactattgggaaccctattagccctaatgaaactaacaaacaaacttgggttaataagacaattgaacctcct

SEQ ID NO: 62278 - DNA, 80 bp, synthetic construct
  source 1..80: mol_type = other DNA
ggagctgtggtcaagataggcagagacgctcagcattattgcacaatgaacgggttcacccttatcactaaggttgattg

SEQ ID NO: 62279 - DNA, 80 bp, synthetic construct
  source 1..80: mol_type = other DNA
gttcactgaagaattccaaccatctgaagaacctgcccctgtccaaggcttgatggtgcttctggacaatcataagaaag

SEQ ID NO: 62280 - DNA, 80 bp, synthetic construct
  source 1..80: mol_type = other DNA
cagatgtctacgccgctcagcagtacaaaaaccctatcaccaatgacaaacagcaagtaaccagtgttttcttggttaga

SEQ ID NO: 62281 - DNA, 80 bp, synthetic construct
  source 1..80: mol_type = other DNA
gtgaatgaagggtttcaggtaaccaaccatatgagctatttctataggaatagcgtcaacaccgatgctgtcgagaacat

SEQ ID NO: 62282 - DNA, 80 bp, synthetic construct
  source 1..80: mol_type = other DNA
caagattaggtctgccaccagacacacgacagtccggtttaatcagggtagttggtacctactcacaagcaccgtactgc

SEQ ID NO: 62283 - DNA, 80 bp, synthetic construct
  source 1..80: mol_type = other DNA
atactggaccacctgtatcaggatggctgtggatgaaccaagagttacaaaatgaccaggcctacatcattgaccaagga

SEQ ID NO: 62284 - DNA, 80 bp, synthetic construct
  source 1..80: mol_type = other DNA
actatgcatttaataactccccctccagtctcatctcagatctattttgagatggccactattgttcctcagactaggac

SEQ ID NO: 62285 - DNA, 80 bp, synthetic construct
  source 1..80: mol_type = other DNA
tagtggagaagaaactgggcttgaactagctatgggactatctgaagatgaacatccaatctcccatgtcaatgatgagg

SEQ ID NO: 62286 - DNA, 80 bp, synthetic construct
  source 1..80: mol_type = other DNA
aagagacagaatatgagacagagagtgatgaggacgaaaccgatgaagtggacaggtttgatctctgttgtacttccgat

SEQ ID NO: 62287 - DNA, 80 bp, synthetic construct
  source 1..80: mol_type = other DNA
tcggaggacgacattgagagcaaccgcgtaaccctcctctcaactctcatcaatcagggaatgacagtggatcgcgcaac

SEQ ID NO: 62288 - DNA, 80 bp, synthetic construct
  source 1..80: mol_type = other DNA
catgatcacaagtcgcgctttccccacgccaaatcacaaatctaggcgtgaactttcaaatgacctgctgggccccagcg

SEQ ID NO: 62289 - DNA, 80 bp, synthetic construct
  source 1..80: mol_type = other DNA
attgtctggcgacagcacggtcgcatgcatgcaacgaatcatgccaactttcaggaagccgcggccacgccgagtaggat

SEQ ID NO: 62290 - DNA, 80 bp, synthetic construct
  source 1..80: mol_type = other DNA
gcttcctttcttttctgtctctgtttagattattttaatcaccatttaaaattgatttaatcagaagcaaaaaaaaaaaa

SEQ ID NO: 62291 - DNA, 80 bp, synthetic construct
  source 1..80: mol_type = other DNA
cattactgacaagttggatgctatgaagcaaattttcaactttgcttttgttcctagggtgcactggctgcgaactgtct

SEQ ID NO: 62292 - DNA, 80 bp, synthetic construct
  source 1..80: mol_type = other DNA
cctgggacggatttaattactttagcaacatctcgattgtctggttttagaatggctgttttaccaactataccattcca

SEQ ID NO: 62293 - DNA, 80 bp, synthetic construct
  source 1..80: mol_type = other DNA
ccaagaggggggtggtgattggcctttggcttatcagtgtataaacaagagtttttacactcttctattaagtaactgac

SEQ ID NO: 62294 - DNA, 80 bp, synthetic construct
  source 1..80: mol_type = other DNA
caggggtgagagttggagtcaatgacttcgtagttattaaaccaggtgcattatgcattatagacacccctgaagggaaa

SEQ ID NO: 62295 - DNA, 80 bp, synthetic construct
  source 1..80: mol_type = other DNA
aaaggcaagaccaagcatggtagaggtagggtcagacgtaatcttaggaaaggtgtgaaacttcttactgaggaagagta

SEQ ID NO: 62296 - DNA, 80 bp, synthetic construct
  source 1..80: mol_type = other DNA
ggaatggttggtgatgatgtagaatttgattatactgaagtaatcaattttgaccaagcaaaaccaacccctgccccgag

SEQ ID NO: 62297 - DNA, 80 bp, synthetic construct
  source 1..80: mol_type = other DNA
agtcagaaaccggagcacaaccacttgatttgtctcagaagaaagagaaacaaccagaacatgagcaacaagtggcgaaa

SEQ ID NO: 62298 - DNA, 80 bp, synthetic construct
  source 1..80: mol_type = other DNA
cccaccaagccccagaagagtgagccacaaccatattcacaaacttatggtaaggcaccaatctgggaatcttatgattt

SEQ ID NO: 62299 - DNA, 80 bp, synthetic construct
  source 1..80: mol_type = other DNA
accaaggggcccaaaactaccactcattagatgcatggaagtcgctactagaacctccgcgggagcggaggtgcgtacct

SEQ ID NO: 62300 - DNA, 80 bp, synthetic construct
  source 1..80: mol_type = other DNA
ggcatgcttttgaggaatatggaccaaccacgtggggcccacaagcttttgttaaatcttttgataaatttttttatgca

SEQ ID NO: 62301 - DNA, 80 bp, synthetic construct
  source 1..80: mol_type = other DNA
ttgacactgaggaagattacttggaagcacatggttgggcaccatatataagagaattcactagagtctttaaaggtgac

SEQ ID NO: 62302 - DNA, 80 bp, synthetic construct
  source 1..80: mol_type = other DNA
tactttggtatctatttctcaagaaagagattattaaggaggaaaaaattaggaattctgatattcggcagatagtttgt

SEQ ID NO: 62303 - DNA, 80 bp, synthetic construct
  source 1..80: mol_type = other DNA
tttacaccaggataggggcgtgcttagaggcacatcagaatgctttgatgaaacaacacaccgacacctcagttggccaa

SEQ ID NO: 62304 - DNA, 80 bp, synthetic construct
  source 1..80: mol_type = other DNA
ctcaatctagaggtcgaggcagatcagtcaagattacagtcaattcccataacaaaggtagaagacagaacggacgcaac

SEQ ID NO: 62305 - DNA, 80 bp, synthetic construct
  source 1..80: mol_type = other DNA
caattggatcaaacaccacaggagcaacagaaattgaggcgtgcatcctccttaatccagttttggttaaggacgctact

SEQ ID NO: 62306 - DNA, 80 bp, synthetic construct
  source 1..80: mol_type = other DNA
gggagtactcagtttggcccagtgcaggcgctaggagcgcagtattcaatgtggaagctcaaatatcttaacgtcagatt

SEQ ID NO: 62307 - DNA, 80 bp, synthetic construct
  source 1..80: mol_type = other DNA
gacgtctatggttggtgcttcagcagtaaatggcaccgtagtgagaatatcactcaatccaacttccactccgtcctcca

SEQ ID NO: 62308 - DNA, 80 bp, synthetic construct
  source 1..80: mol_type = other DNA
ctagctggtctggactcggagcacgtaagcatctagatgttactgttgggaaaaatgcagtctttaaattgaaaccttcc

SEQ ID NO: 62309 - DNA, 80 bp, synthetic construct
  source 1..80: mol_type = other DNA
acgcttggtccatccattgaaatacatacattgggccaaactatgtcatcataccagaacacacagttcacaggaggcct

SEQ ID NO: 62310 - DNA, 80 bp, synthetic construct
  source 1..80: mol_type = other DNA
tggagctttcatcagcatggtgctttactggatatgcggctaatccaaatttagtaaatttggtgaagtctacagataag

SEQ ID NO: 62311 - DNA, 80 bp, synthetic construct
  source 1..80: mol_type = other DNA
agtgttgatgtcacttttgaaggctcagccggaacaccgctcataatgaatgtgccagaacacagccatttcgcaagaac

SEQ ID NO: 62312 - DNA, 80 bp, synthetic construct
  source 1..80: mol_type = other DNA
agcggtggaacactcttctctgtccacatccctctcgagggctggtggtgagtcatcatctgacactgtttggcaagtct

SEQ ID NO: 62313 - DNA, 80 bp, synthetic construct
  source 1..80: mol_type = other DNA
tgaacaccgctgtttcggcagctgagctggtaaccccgccgccattcaattggctggtcaagggtggctggtggtttgtc

SEQ ID NO: 62314 - DNA, 80 bp, synthetic construct
  source 1..80: mol_type = other DNA
aaactcatagccgggcgtgcgcgcactggtgcgcgtaggttctatgtttatcctagttaccaagatgccctgtctaataa

SEQ ID NO: 62315 - DNA, 80 bp, synthetic construct
  source 1..80: mol_type = other DNA
acctgccctttgcactggtggtgttcctgccagcgctaggcagagtaacccagtacgcaccacacttcagtttacacaga

SEQ ID NO: 62316 - DNA, 80 bp, synthetic construct
  source 1..80: mol_type = other DNA
tgaatcagcctagtctaggtcatggtgctactccaatgacatttggccgctccataccagaacctggtgagcaatttaga

SEQ ID NO: 62317 - DNA, 80 bp, synthetic construct
  source 1..80: mol_type = other DNA
gagcagttcttacatttttatctctaatacctggaggttatgcgcagagtcagaccaacaatactatattcacagacatg

SEQ ID NO: 62318 - DNA, 80 bp, synthetic construct
  source 1..80: mol_type = other DNA
gttttgctaactgttggacctccaatggcccctaacacagccaactctcagaattgggtgaacaagacaattgttccacc

SEQ ID NO: 62319 - DNA, 80 bp, synthetic construct
  source 1..80: mol_type = other DNA
cgagaaccagtacacagttaaaattggtatagaccttgagcattataccacaatgcagggatttacccctgttgagagtg

SEQ ID NO: 62320 - DNA, 80 bp, synthetic construct
  source 1..80: mol_type = other DNA
tgagctggtacacagctgatttccaaccctctgatgagcccagcccaatacccgggctatatgcccgcgtgaataacacc

SEQ ID NO: 62321 - DNA, 80 bp, synthetic construct
  source 1..80: mol_type = other DNA
aagaaagctgatgtgtatggtgtgcaacaatttaaaagctcacacaccaataatagacaccagataaccagtgtatttct

SEQ ID NO: 62322 - DNA, 80 bp, synthetic construct
  source 1..80: mol_type = other DNA
tgtgagagtgacaactagcttccaggtgataaactacaccagctacttcataagaggtgctgaaagtggctcaaatgtct

SEQ ID NO: 62323 - DNA, 80 bp, synthetic construct
  source 1..80: mol_type = other DNA
ctaatgtaaagattagagaccaaacataccacacaccactacagtttacgcagggtaagtggtacctgctaactagcaca

SEQ ID NO: 62324 - DNA, 80 bp, synthetic construct
  source 1..80: mol_type = other DNA
gttatgcatgatggtcctacatcatcaggctgggtttggatgaatcaagagctgactaacaatattgcatatagaattga

SEQ ID NO: 62325 - DNA, 80 bp, synthetic construct
  source 1..80: mol_type = other DNA
tccaggtatgatgcaccttatcacacctcccccagccgcatcacaactctattttgaactgcatactgtgcttcctcaag

SEQ ID NO: 62326 - DNA, 80 bp, synthetic construct
  source 1..80: mol_type = other DNA
taagatcagaggaacctgagacatatgtggatgctctcttgcctgtagaaccatcaattgaagaagaagagacagacagt

SEQ ID NO: 62327 - DNA, 80 bp, synthetic construct
  source 1..80: mol_type = other DNA
gactttgagagtacagaggacgaaaacgatgaagtggacaggttcgatctccatccctcttctgaatcagatgatgatga

SEQ ID NO: 62328 - DNA, 80 bp, synthetic construct
  source 1..80: mol_type = other DNA
tgttgagaacgaccgtgcaaccctcctctctaccctcctcaatcaaggaatttcagtggagcgcgccactagaatcacta

SEQ ID NO: 62329 - DNA, 80 bp, synthetic construct
  source 1..80: mol_type = other DNA
atggtgcattcccagcacgcgccgatagaatgaggcgcagtgtctacaatgacctgttggtttccgggctcagccctggt

SEQ ID NO: 62330 - DNA, 80 bp, synthetic construct
  source 1..80: mol_type = other DNA
gcagcatggtcccatgcgtgcgaacaagcacgcagagcaggagataatcatgacctgcaactatctggaagccgcggcca

SEQ ID NO: 62331 - DNA, 80 bp, synthetic construct
  source 1..80: mol_type = other DNA
agggtacagcttcctatctctcttttctgtctctgtttagattattttaatcaccatttaaaattgatttaatcagatgc

SEQ ID NO: 62332 - DNA, 80 bp, synthetic construct
  source 1..80: mol_type = other DNA
atgatggcactcggtgagccatactatagttccaaacctgacaaagatttcaatttcgggagcacaatggcacgtaggca

SEQ ID NO: 62333 - DNA, 80 bp, synthetic construct
  source 1..80: mol_type = other DNA
ttattacataactacaataatctcttcttggtattacacacataccaccaatatggcacttggtgaaccatattacagtt

SEQ ID NO: 62334 - DNA, 80 bp, synthetic construct
  source 1..80: mol_type = other DNA
gggatatttttggtatgtgggttaaacccggcaaggtgatttgtagagagagtatagttgggctatcattttgtggattc

SEQ ID NO: 62335 - DNA, 80 bp, synthetic construct
  source 1..80: mol_type = other DNA
gctgatctgggcggccctagagatggttggtggttaacaaacactaatgacaatgcttctgataccctgggcccttcaat

SEQ ID NO: 62336 - DNA, 80 bp, synthetic construct
  source 1..80: mol_type = other DNA
gttaaagagaacttccaggtcaccaaccatttaagttacttctttagagagaaggttgacactactgcaactgaacttat

SEQ ID NO: 62337 - DNA, 80 bp, synthetic construct
  source 1..80: mol_type = other DNA
gaagattagacctcaaacatattatacaactgtcaattttgtccagaataattggtatctcttgactagtacagtcttgc

SEQ ID NO: 62338 - DNA, 80 bp, synthetic construct
  source 1..80: mol_type = other DNA
tggcttcggccagactccagaagagcaactccatcgcatttggaggggaggaccaaagaagtgtgatggctagcaagtcc

SEQ ID NO: 62339 - DNA, 80 bp, synthetic construct
  source 1..80: mol_type = other DNA
cacgtaagcaccttgatgttacagtgggcaaaaatgcaacattcaattgaaaccctctgacctcggtgggcctaggtgtg

SEQ ID NO: 62340 - DNA, 80 bp, synthetic construct
  source 1..80: mol_type = other DNA
aaagatgcatgctaccattacaaaagaatgaataaattgaatggttccattttaaaattaggagctaatgatgaatggag

SEQ ID NO: 62341 - DNA, 80 bp, synthetic construct
  source 1..80: mol_type = other DNA
ctctatatcatgtgtgtcaatggtgtagtcaatataaccgatgctttctagatgaagagccacacttactgaggatgaga

SEQ ID NO: 62342 - DNA, 80 bp, synthetic construct
  source 1..80: mol_type = other DNA
acatttaaaaccaacataaacagagaagatgttgaaaatttacttaatatgtatgacattctattcccaatacatgcaaa

SEQ ID NO: 62343 - DNA, 80 bp, synthetic construct
  source 1..80: mol_type = other DNA
aatagtgaataagtttattaataatgttaagcaacgtaagtgcaggaatgagtatttattggaatggtataatcatctat

SEQ ID NO: 62344 - DNA, 80 bp, synthetic construct
  source 1..80: mol_type = other DNA
tacttccacttactttgcaagcattagctataagactagaaaacagcacatattatatatttggatactatgactgcatg

SEQ ID NO: 62345 - DNA, 80 bp, synthetic construct
  source 1..80: mol_type = other DNA
gagcaagaaaaccaaacaccattctattttgtaaatctgataaataatcatgacaagttgctattggatgatagaaactt

SEQ ID NO: 62346 - DNA, 80 bp, synthetic construct
  source 1..80: mol_type = other DNA
taataggatggcacatttaccaccaatattacaacaagaatatgcattgaggtacttttcaaagtcaaggtttataaata

SEQ ID NO: 62347 - DNA, 80 bp, synthetic construct
  source 1..80: mol_type = other DNA
gaatatgcattgaggtacttttcaaagtcaaggtttataaataaaccaaaaagagagctagaaagaaatgattttgcaga

SEQ ID NO: 62348 - DNA, 80 bp, synthetic construct
  source 1..80: mol_type = other DNA
accagcaccaataacgaaatttaaaggttggtgtctagattgttgccaatatacaaatctaacatactgtaggggatgtg

SEQ ID NO: 62349 - DNA, 80 bp, synthetic construct
  source 1..80: mol_type = other DNA
catcgtggtttcgaccgcagcacatgtcgttggtaataacacttttgtgaatgtgtgctatgagggcttgatgtacgaag

SEQ ID NO: 62350 - DNA, 80 bp, synthetic construct
  source 1..80: mol_type = other DNA
cgaaggttcggtacatgcccgaaaaggatatagcattcataacttgtcctggtgacttacatccaacagcaagattaaaa

SEQ ID NO: 62351 - DNA, 80 bp, synthetic construct
  source 1..80: mol_type = other DNA
ccaagaggggggtggtgattggcctttggcttatcagagtatagacaagatttctcctacactcttttatcaaatagttt

SEQ ID NO: 62352 - DNA, 80 bp, synthetic construct
  source 1..80: mol_type = other DNA
ctggggtaagggttggggtcaacgaatttgtagtcataaaaccaggtgcattatgtgttatagatacccctgaaggaaaa

SEQ ID NO: 62353 - DNA, 80 bp, synthetic construct
  source 1..80: mol_type = other DNA
gacaaccaaattaaaatctaaccctgagccagaagttgaagcacaaccacttgacttatcccagaagaaagagaaacaac

SEQ ID NO: 62354 - DNA, 80 bp, synthetic construct
  source 1..80: mol_type = other DNA
cagaacatgaacaacaggccgtgaagcccaataagcctcaaaagagtgagcctcaaccatactcgcaaacttatggtaag

SEQ ID NO: 62355 - DNA, 80 bp, synthetic construct
  source 1..80: mol_type = other DNA
cgcaatctagagggcgggacagatcagttaaaatcacagttaattcaaaaaacaggaccagaagacagtccggacgcggc

SEQ ID NO: 62356 - DNA, 80 bp, synthetic construct
  source 1..80: mol_type = other DNA
ccttagagtttcacttaatcccacatctacgccatcgtccactagttggtcaggattgggtgcacgtaagcaccttgatg

SEQ ID NO: 62357 - DNA, 80 bp, synthetic construct
  source 1..80: mol_type = other DNA
ttacagtgggtaaaaatgcaacatttaaattgaaaccctctgacctcggtgggcctagagatggctggtggctcacaaac

SEQ ID NO: 62358 - DNA, 80 bp, synthetic construct
  source 1..80: mol_type = other DNA
accctgggaccctccattgaaatccacacactcggacgaacaatgtcctcatacaagaatgagcagttcacagggggtct

SEQ ID NO: 62359 - DNA, 80 bp, synthetic construct
  source 1..80: mol_type = other DNA
ttccagagggcagtcactttgctcggacagcacttgcacgctcgacagttcccaccaccttagcgcgtgcaggtgagcgg

SEQ ID NO: 62360 - DNA, 80 bp, synthetic construct
  source 1..80: mol_type = other DNA
ccactggggatgctataactaacctattggttaggggagatacatatacagcagggataagttttacccagtgtggatgg

SEQ ID NO: 62361 - DNA, 80 bp, synthetic construct
  source 1..80: mol_type = other DNA
tattgttgatggggctatgccacctggctgggtctggaataacgtggaacttaaaactaacacatcatatcacatggata

SEQ ID NO: 62362 - DNA, 80 bp, synthetic construct
  source 1..80: mol_type = other DNA
gcttcgggggcaagcccaggcaatgcatggtcccatgcgtgtgaagaagcacgcaaagcagcaggggaaatcaatccctg

SEQ ID NO: 62363 - DNA, 80 bp, synthetic construct
  source 1..80: mol_type = other DNA
atggactatcaagagtatcaacaattcttggctaggattaatactgcaagggatgcatgtgtagccaaggatatcgatgt

SEQ ID NO: 62364 - DNA, 80 bp, synthetic construct
  source 1..80: mol_type = other DNA
ttgctctgataaactctaaattagaaacacagagagatttctctgaattcactaaactgatgaaaaaggaaggtgggagg

SEQ ID NO: 62365 - DNA, 80 bp, synthetic construct
  source 1..80: mol_type = other DNA
ccaagaggggggtggtgattggcctttggcttatcagtgtatagataacatttctctgctcgtttaccatacaattaaca

SEQ ID NO: 62366 - DNA, 80 bp, synthetic construct
  source 1..80: mol_type = other DNA
tgccagaggggagccattttgcacgaacagttcttgcacgctcaacaacaccaaccactctagcgcgtgcaggagagaga

SEQ ID NO: 62367 - DNA, 80 bp, synthetic construct
  source 1..80: mol_type = other DNA
gcagggtattggcagttcatcagactaatactggttacactggtggtgctgttgtgatagatccagcagactttcaccca

SEQ ID NO: 62368 - DNA, 80 bp, synthetic construct
  source 1..80: mol_type = other DNA
cccgcacaattaaaccaaagctcgctcctgcaccagcgattgaggcacaaccacttgatctaacttgtaagcagcgagta

SEQ ID NO: 62369 - DNA, 80 bp, synthetic construct
  source 1..80: mol_type = other DNA
caggggtgagggttggtgtcaatgaattcgttgtcataaagccaggtgcattatgtgtcatagacactcctgaagggaaa

SEQ ID NO: 62370 - DNA, 80 bp, synthetic construct
  source 1..80: mol_type = other DNA
gggatggtcggagatgatgtggaatttgattatactgaagtaattaacttcgatcaagtaaaaccaactcctgccccaag

SEQ ID NO: 62371 - DNA, 80 bp, synthetic construct
  source 1..80: mol_type = other DNA
aacaaccaaaccaaagccatgccctgtgccagaagctgagacacaaccacttgacttatcccagaggaaagagaaacaac

SEQ ID NO: 62372 - DNA, 80 bp, synthetic construct
  source 1..80: mol_type = other DNA
cagaacatgaacagcaagtggtgaagtctactaaaccacagaagagtgaacctcagccatactcacaaacttatggcaag

SEQ ID NO: 62373 - DNA, 80 bp, synthetic construct
  source 1..80: mol_type = other DNA
atcaaggggcccaaaattaccactcattagatgcatggaaatccatgctcgaacctccacgggaacggaggtgcgtacct

SEQ ID NO: 62374 - DNA, 80 bp, synthetic construct
  source 1..80: mol_type = other DNA
ttgatactgaggaaaattacttggaagcacatgggtgggcaccatacataagagagtttactagggtctttaaaggtgat

SEQ ID NO: 62375 - DNA, 80 bp, synthetic construct
  source 1..80: mol_type = other DNA
ctcagtctaggggccgtggcaaatcagtcaaaattacggttaactccaggggtggaagtagaagacaaaacggacgcaac

SEQ ID NO: 62376 - DNA, 80 bp, synthetic construct
  source 1..80: mol_type = other DNA
ttgtaagggtctctcttaatccaacatcaacaccttcatccacgagctggtctgggcttggtgctcgtaaacaccttgat

SEQ ID NO: 62377 - DNA, 80 bp, synthetic construct
  source 1..80: mol_type = other DNA
gtaactgttggcaaaaatgctgttttcaaacttaaaccggccgacctgggtgggcccagggatggatggtggttgaccaa

SEQ ID NO: 62378 - DNA, 80 bp, synthetic construct
  source 1..80: mol_type = other DNA
cacaaatgacaatgcttcagacacactggggccttctgttgaaatccatactcttggtatgacaatgtcatcatataaaa

SEQ ID NO: 62379 - DNA, 80 bp, synthetic construct
  source 1..80: mol_type = other DNA
atgaacaatttacaggaggccttttcctggttgagttggcttcagagtggtgttttacaggctatgcagctaatcccaac

SEQ ID NO: 62380 - DNA, 80 bp, synthetic construct
  source 1..80: mol_type = other DNA
ctagtgaaccttgtgaaatcaactgacaagcaggttaatgtcacttttgaaggttccaatggcacgcctctgataatgaa

SEQ ID NO: 62381 - DNA, 80 bp, synthetic construct
  source 1..80: mol_type = other DNA
ggttccagaggcaagtcattttgctaggactgctgtagctcgctcctcgctgcctactactctagccagagccggacaaa

SEQ ID NO: 62382 - DNA, 80 bp, synthetic construct
  source 1..80: mol_type = other DNA
acaccacctctgacactgtctggcaggtattaaataccgccgtgtctgcagcagagcttgttacaccaccaccttttaat

SEQ ID NO: 62383 - DNA, 80 bp, synthetic construct
  source 1..80: mol_type = other DNA
tggcttgtcaagggtggttggtggtttgtgaagcttatagctgggagggctagaactggtacacgcagtttctatgtcta

SEQ ID NO: 62384 - DNA, 80 bp, synthetic construct
  source 1..80: mol_type = other DNA
ccctagctatcaggatgccctttctaataagccagctctatgtactggcagcacgccaagtggcatgagggcacgtgcag

SEQ ID NO: 62385 - DNA, 80 bp, synthetic construct
  source 1..80: mol_type = other DNA
cagtaatgacaacactgcaatttacacaaatgaaccagcctagtcttggacatggagagatgaccgccactcttggtaga

SEQ ID NO: 62386 - DNA, 80 bp, synthetic construct
  source 1..80: mol_type = other DNA
gctataccatctcccggtgacacattcaatgttgtcttaaccattggtcaaccattggctccaaatacatcgacaaaaca

SEQ ID NO: 62387 - DNA, 80 bp, synthetic construct
  source 1..80: mol_type = other DNA
gaattggctgaataaaacaacagtgtcgccacaaaatcatcatgtggtgaaaattgctaaagatgttaacaactacacca

SEQ ID NO: 62388 - DNA, 80 bp, synthetic construct
  source 1..80: mol_type = other DNA
ccatgcagggctttacacctatcagctctgttgaatggtacactacagatttccaaccatcagaggagcccactcccata

SEQ ID NO: 62389 - DNA, 80 bp, synthetic construct
  source 1..80: mol_type = other DNA
cctgggctgcaggtgttggtcaatagctccaaaaaagctgatgtctatgccatacaacagtatttgaataaccagacaaa

SEQ ID NO: 62390 - DNA, 80 bp, synthetic construct
  source 1..80: mol_type = other DNA
taacaaagtacagctaactagcatatttctggttaaagtcactaccagctttcaggttaacaactacctgagttatttct

SEQ ID NO: 62391 - DNA, 80 bp, synthetic construct
  source 1..80: mol_type = other DNA
atagaagttatggaactggtactactgttgagaatttgaaggtgcgttcagacactaccgcacaggatgtcaacttccct

SEQ ID NO: 62392 - DNA, 80 bp, synthetic construct
  source 1..80: mol_type = other DNA
gtcggttggtatcttatgaccaatacggccatatttaatgcacccgcaccacctggatggatttggcagaatgttgagct

SEQ ID NO: 62393 - DNA, 80 bp, synthetic construct
  source 1..80: mol_type = other DNA
tctgaatgatacagcttacctcattgaccagggtatgatgcacctcatcatgccgcctcctgcaaacactcagttgctgt

SEQ ID NO: 62394 - DNA, 80 bp, synthetic construct
  source 1..80: mol_type = other DNA
tggtgcgacgcactcgactcaggcgagtctcaagtgctgatggaagagacagactatgaagatgaggaagatgaggacgt

SEQ ID NO: 62395 - DNA, 80 bp, synthetic construct
  source 1..80: mol_type = other DNA
agacgatgaagcggacaggtttgatcttcatagttcttatggttctgaacctgaggacgatgatgagaataaccgtgtaa

SEQ ID NO: 62396 - DNA, 80 bp, synthetic construct
  source 1..80: mol_type = other DNA
ccctcctctctacactcataaaccaaggaatgacagtggagcgcgcaacaaggatcaccaaacgtgcgttccccactagc

SEQ ID NO: 62397 - DNA, 80 bp, synthetic construct
  source 1..80: mol_type = other DNA
gctgataaaacaaagcgcagtgtatacatggacctgcttgcctctggcctctcgccaagtaatgcatggtcacatgcgtg

SEQ ID NO: 62398 - DNA, 80 bp, synthetic construct
  source 1..80: mol_type = other DNA
tgaagaagcacgcatcatgggcactaatcatatgcctaatgtttctggagaccgcggccacgccgagtaggatcgagggt

SEQ ID NO: 62399 - DNA, 80 bp, synthetic construct
  source 1..80: mol_type = other DNA
gatggcacacggtgagccatattatagttccaagcctgacaaagatttcaattttggaagcacaatggcgcgtaggcaaa

SEQ ID NO: 62400 - DNA, 80 bp, synthetic construct
  source 1..80: mol_type = other DNA
ggtggtgattggcctttggcttatcacgcatataattttattctcttctgtgttatttacattttaccatcaatatggta

SEQ ID NO: 62401 - DNA, 80 bp, synthetic construct
  source 1..80: mol_type = other DNA
tgttggcaccggttcttggaatagttttcttatgctttatggaagattcaaactatgttaaccaagtacgtggtcttatt

SEQ ID NO: 62402 - DNA, 80 bp, synthetic construct
  source 1..80: mol_type = other DNA
gctacagcgatattgattgctgggggccatgcctgtcttacactcacgggtacaactacatcattatttgttgtcatact

SEQ ID NO: 62403 - DNA, 80 bp, synthetic construct
  source 1..80: mol_type = other DNA
aacttgtagattcatacgtatggctacagtttttgtgggggccaggtttgaaatccgtgatgtcaatgggaaagttgtag

SEQ ID NO: 62404 - DNA, 80 bp, synthetic construct
  source 1..80: mol_type = other DNA
cgactgtaccaactagaattagaaacgctgcatttgactttttccaaaaattgaaacaatctggggtacgaattggagtc

SEQ ID NO: 62405 - DNA, 80 bp, synthetic construct
  source 1..80: mol_type = other DNA
aatgattttgttgtcataaaaccgggcgctttatgtattatagatacacctgaagggaaaggaacaggatttttctccgg

SEQ ID NO: 62406 - DNA, 80 bp, synthetic construct
  source 1..80: mol_type = other DNA
caacgacataataacagcagcccatgtcgttgggaataatacatttgtcaatgtttgctatgaaggcttgatgtatgagg

SEQ ID NO: 62407 - DNA, 80 bp, synthetic construct
  source 1..80: mol_type = other DNA
ctaaggtccgatacatgcctgaaaaagacatagcatttataacctgccctggtgacttacatccgacaactagattgaag

SEQ ID NO: 62408 - DNA, 80 bp, synthetic construct
  source 1..80: mol_type = other DNA
ttagcaaagaacccagactacagtagtgttacagtcatggcctatgtgaatgaagatcttgtggtttcaactgcaacagc

SEQ ID NO: 62409 - DNA, 80 bp, synthetic construct
  source 1..80: mol_type = other DNA
atgtgacgcccaccagtgtatcacaaccagttgccacattagagcaaaagagtgttaatgagaacgatgtggttgaactt

SEQ ID NO: 62410 - DNA, 80 bp, synthetic construct
  source 1..80: mol_type = other DNA
gttcggactgcaatggagcgtgagatgagggtgttgcgtgatgagatcaacaagatcctgacacctttcttacagaagaa

SEQ ID NO: 62411 - DNA, 80 bp, synthetic construct
  source 1..80: mol_type = other DNA
gaaagggaaaaccaagcatgggaggggtagagtcagacgaaatctcaggaaaggcgtaaagcttctaactgaggaggaat

SEQ ID NO: 62412 - DNA, 80 bp, synthetic construct
  source 1..80: mol_type = other DNA
ggcatggttggtgatgatgtggagtttgattacactgaagtgattaatttcgatcaagcaaaaccagtgccagccccacg

SEQ ID NO: 62413 - DNA, 80 bp, synthetic construct
  source 1..80: mol_type = other DNA
cacactaaaatcgagatctgttcctgaacctgaagttggtgaacaaccacttgatttaacccaaaagaaaggaaaacaac

SEQ ID NO: 62414 - DNA, 80 bp, synthetic construct
  source 1..80: mol_type = other DNA
ttgaacaagagcaacaatcaattaaatcttcaaaaccccaaaagaatgagcctcagccgtattcacaaacctacggcaaa

SEQ ID NO: 62415 - DNA, 80 bp, synthetic construct
  source 1..80: mol_type = other DNA
cattcgtatatgatggtaaggggtggatagagatttttccaatagaacatctgaatcttatggcctccctgaagttgata

SEQ ID NO: 62416 - DNA, 80 bp, synthetic construct
  source 1..80: mol_type = other DNA
cataagaacaatgcccttcaggagagactacgccactcccaagaagagaaagctaccctcgctctggatgtgcaattcct

SEQ ID NO: 62417 - DNA, 80 bp, synthetic construct
  source 1..80: mol_type = other DNA
tcaacacgagaatgttcggatgaaggagttgataccaaaacagaaaccaaggacaatacaaatgaggtgggtaattttgg

SEQ ID NO: 62418 - DNA, 80 bp, synthetic construct
  source 1..80: mol_type = other DNA
gtgctgttctcacattcttatcactaatacctggtggatatgctcaaggtcaacaaaacaacacagtatttacagatatg

SEQ ID NO: 62419 - DNA, 80 bp, synthetic construct
  source 1..80: mol_type = other DNA
caccacattgccaaggatctcatctccgcctgacaattccagtgggcgacatatggaaagccagcaacaggactgtgaca

SEQ ID NO: 62420 - DNA, 80 bp, synthetic construct
  source 1..80: mol_type = other DNA
tttgctacctgcaaatattcaacagaaacattaacagagaaccttaaccttaggattaagatagcattggcaaacataac

SEQ ID NO: 62421 - DNA, 80 bp, synthetic construct
  source 1..80: mol_type = other DNA
gatgaagcacgcaatgtgggcagcaatcagctgaccaaactttctggagaccgcggccacgccgagtaggatcgagggta

SEQ ID NO: 62422 - DNA, 80 bp, synthetic construct
  source 1..80: mol_type = other DNA
cattgctgacaagctagatgctgtgaaacaaattcttaattttgcctttgtacctaggatccattggttgagaactgtgt

SEQ ID NO: 62423 - DNA, 80 bp, synthetic construct
  source 1..80: mol_type = other DNA
ttcactatatccactattatgagatgtggaacatctttatgtttgtgcttgcagtcagcacagtgatgaggagtactcgc

SEQ ID NO: 62424 - DNA, 80 bp, synthetic construct
  source 1..80: mol_type = other DNA
cttggtgaaccatattacagttccaagcctgataaggacttcgactttggaagtacaatggcacgcagatacatgacgac

SEQ ID NO: 62425 - DNA, 80 bp, synthetic construct
  source 1..80: mol_type = other DNA
cctggaacagatttaatcacactggcaacatctcatctttcaggtttcagaatggctgtgttaccaactatcccattcca

SEQ ID NO: 62426 - DNA, 80 bp, synthetic construct
  source 1..80: mol_type = other DNA
caccacattaaccttatgggttatgaacacactcatgatggtgtatttctttgacaatttactagcaataacgctggcaa

SEQ ID NO: 62427 - DNA, 80 bp, synthetic construct
  source 1..80: mol_type = other DNA
agaatctaacaagcctgctctaattgaggcacaaccacttgacttatctcgaaagaaggagaaacaaacagaacatgaac

SEQ ID NO: 62428 - DNA, 80 bp, synthetic construct
  source 1..80: mol_type = other DNA
gtcgagtactggcagttcatcaaactaatactggatataccggaggggctgttataatagatccagcagatttccatcca

SEQ ID NO: 62429 - DNA, 80 bp, synthetic construct
  source 1..80: mol_type = other DNA
ttatcacgcaaacatttttattctcttctgtgttatttacattttaccatcaatatggtgcttggtgaaccatattacag

SEQ ID NO: 62430 - DNA, 80 bp, synthetic construct
  source 1..80: mol_type = other DNA
cagcggtccatggaaacaccctttcatatgcggtccgcacccaggatggtatgtctggcgcgccggtatgcgacaagtat

SEQ ID NO: 62431 - DNA, 80 bp, synthetic construct
  source 1..80: mol_type = other DNA
ggtcgtgtgctggcagtccatcaaacgcacactgggtacacaggaggcgctgttataatagatccagcagacttccaccc

SEQ ID NO: 62432 - DNA, 80 bp, synthetic construct
  source 1..80: mol_type = other DNA
tgccgaccctatatacaccaggataggggcgtgcttagaagcacatcagaatgcactgatgaaacagcacactgagacat

SEQ ID NO: 62433 - DNA, 80 bp, synthetic construct
  source 1..80: mol_type = other DNA
ctcggtgccatacatctggacccacgcattaacacctacactgcgcatctgagtgcgatgtttgctggttggggggtgtg

SEQ ID NO: 62434 - DNA, 80 bp, synthetic construct
  source 1..80: mol_type = other DNA
catgttggctcagttttgaaacacggcctggccctgactttgatttctgtctcctcaaggcccccgagcaggaaatggag

SEQ ID NO: 62435 - DNA, 80 bp, synthetic construct
  source 1..80: mol_type = other DNA
gctgtagaaaataaaaactctagagatgctggtaaagttgtagattctgagacagcaagcatttgtgatgctatatttca

SEQ ID NO: 62436 - DNA, 80 bp, synthetic construct
  source 1..80: mol_type = other DNA
gaaaaagaaaatgaaaaaaatacagacgtaatcatggaaaataagaataacaacagaaagcagcaattatctgacaaagt

SEQ ID NO: 62437 - DNA, 80 bp, synthetic construct
  source 1..80: mol_type = other DNA
ggtggtgattggcctttggcttatcagtgtataaacaatactttttctacacttctatcaaatatctggcaagatggcac

SEQ ID NO: 62438 - DNA, 80 bp, synthetic construct
  source 1..80: mol_type = other DNA
tttgagatgcgcacctccgttacaggatccagggctatgatctctaatgaggaaattgacatccatgggcctggtgacga

SEQ ID NO: 62439 - DNA, 80 bp, synthetic construct
  source 1..80: mol_type = other DNA
ccaagaggggggtggcgattggcctttggctcgttacataattacaatattctcttcttggtgttatacacatcaccacc

SEQ ID NO: 62440 - DNA, 80 bp, synthetic construct
  source 1..80: mol_type = other DNA
tgttggcaccgatcctcggaattgtattcctatgctttatggaggactccaactatgttggccaagtgcgtggtcttata

SEQ ID NO: 62441 - DNA, 80 bp, synthetic construct
  source 1..80: mol_type = other DNA
gctacagcgatactaattgctggagggcatgcctgtttaacactcactggcacgaccacatcactatttgttatcatact

SEQ ID NO: 62442 - DNA, 80 bp, synthetic construct
  source 1..80: mol_type = other DNA
ccggagtgcgagtcggagtcaatgattttgtagtgataaaaccaggtgcattgtgtattattgatacacctgagggcaag

SEQ ID NO: 62443 - DNA, 80 bp, synthetic construct
  source 1..80: mol_type = other DNA
ggaaccggctttttctccggtaacgacataattacagcagcccatgtcgttggtaataacacctttgttaatatatgcta

SEQ ID NO: 62444 - DNA, 80 bp, synthetic construct
  source 1..80: mol_type = other DNA
ttggcgaaaaacccagactacagtagtgtcacggtcatggcctatgtcaacgaagacttggtggtttcaactgccactgc

SEQ ID NO: 62445 - DNA, 80 bp, synthetic construct
  source 1..80: mol_type = other DNA
catggttcatggaaacactctttcatacgcagtgcgtacccaagacggtatgtcgggagcacctgtctgtgacaaatatg

SEQ ID NO: 62446 - DNA, 80 bp, synthetic construct
  source 1..80: mol_type = other DNA
gtaaaagctccatcccaaattgaacaactcaaggaagagatagaacgattgaaggcccagctaagtgcaactacagagag

SEQ ID NO: 62447 - DNA, 80 bp, synthetic construct
  source 1..80: mol_type = other DNA
cgcactagaacccactgagtcacagcctgctgccaatttggaacaaaagagtattagtgataatgatgtggttgaccttg

SEQ ID NO: 62448 - DNA, 80 bp, synthetic construct
  source 1..80: mol_type = other DNA
aaaggtaaaactaaacatggtagaggaagagtcagacgtaaccttaggaagggggttaaacttctgactgaagaggaata

SEQ ID NO: 62449 - DNA, 80 bp, synthetic construct
  source 1..80: mol_type = other DNA
tgagacattccttgatcttatagaccgtatcattggcgagagagccggttaccctgattatgatgatgatgactactatg

SEQ ID NO: 62450 - DNA, 80 bp, synthetic construct
  source 1..80: mol_type = other DNA
ggattagtcggtgatgatgtagaatttgattatacagaagttattaattttgatcaacaccataagaaaccgacccctgc

SEQ ID NO: 62451 - DNA, 80 bp, synthetic construct
  source 1..80: mol_type = other DNA
cccccgcacaaccaaaccaaagcttgctcctgcaccaataaacgaggtgcaaccacttgacctaacttgtaagcaaaaag

SEQ ID NO: 62452 - DNA, 80 bp, synthetic construct
  source 1..80: mol_type = other DNA
gatctttcccgctaccggtaagaactacttccagcggatagtggttgtcactggtgggcttgaagatggaacgtatggtt

SEQ ID NO: 62453 - DNA, 80 bp, synthetic construct
  source 1..80: mol_type = other DNA
tgcaaccagcaccagaacagcagcctgaacctactaagacccaaaaacctgaaccccagccatactcacaaacctatggg

SEQ ID NO: 62454 - DNA, 80 bp, synthetic construct
  source 1..80: mol_type = other DNA
aaggcacccatatgggagtcctatgattttgattgggatgaagatgatgcaaggtatatattaccagcaccacaccgcct

SEQ ID NO: 62455 - DNA, 80 bp, synthetic construct
  source 1..80: mol_type = other DNA
taaaaactcagaactacagtgccctgcctgaagccgtctttgaattagataaggcggcttatgaggcagggttggaaggg

SEQ ID NO: 62456 - DNA, 80 bp, synthetic construct
  source 1..80: mol_type = other DNA
accaaggggcccaaaactaccactcattagatgcatggcaggtgctgttagaggccccgcgagagcggaagtgtgtacct

SEQ ID NO: 62457 - DNA, 80 bp, synthetic construct
  source 1..80: mol_type = other DNA
gcaaactttccactggtgggccatctacctattaacagacctatctatgatgataaaaaaccaagagatgatcttcttgg

SEQ ID NO: 62458 - DNA, 80 bp, synthetic construct
  source 1..80: mol_type = other DNA
catttgcatttgatggtaaggagtgggtggagatctattcagtagagcacttgaatctcatggcctctctgaaattaata

SEQ ID NO: 62459 - DNA, 80 bp, synthetic construct
  source 1..80: mol_type = other DNA
tttctacagaggaagaatatctggaagcacatggatgggcaccatatattagagaatttactagggtgtttaaaggagat

SEQ ID NO: 62460 - DNA, 80 bp, synthetic construct
  source 1..80: mol_type = other DNA
tgctttggtaccttttccttaagaaagaaatcataaaggaggaaaaaattaggaattctgatatacggcaaatagtgtgt

SEQ ID NO: 62461 - DNA, 80 bp, synthetic construct
  source 1..80: mol_type = other DNA
tttacaccaggataggggcgtgcttagaagcacatcagaactcgctaatgaagcaatatactgaaacatctgttggtcaa

SEQ ID NO: 62462 - DNA, 80 bp, synthetic construct
  source 1..80: mol_type = other DNA
gcagatctagaggacggtctcagtccagaggccgtgggagatccttcaaaattacagtcaactcaaagaatagaggcaga

SEQ ID NO: 62463 - DNA, 80 bp, synthetic construct
  source 1..80: mol_type = other DNA
caattggatccaacacaagtgggtcgaccgagattgaggcgtgtattttactcaatccagttcttgttaaggacgctact

SEQ ID NO: 62464 - DNA, 80 bp, synthetic construct
  source 1..80: mol_type = other DNA
gggagcactcaatttggaccagtgcaggcgctaggtgcgcaatattctatgtggaaacttaaataccttaatgtaaaact

SEQ ID NO: 62465 - DNA, 80 bp, synthetic construct
  source 1..80: mol_type = other DNA
cacatccatggttggttcctcagcagttaatggcacagcagtcagaatatcactgaaccctacatctacaccttcttcca

SEQ ID NO: 62466 - DNA, 80 bp, synthetic construct
  source 1..80: mol_type = other DNA
tcaacatgaaaatgttcggttgagggaattgattccaaaaccgaagccaagagcaatacaaatgaagtgggtgattttgg

SEQ ID NO: 62467 - DNA, 80 bp, synthetic construct
  source 1..80: mol_type = other DNA
ctagttggtcaggacttggtgcccgcaaacatttggatgttacagtgggaaagaatgcagtttttagactgaaaccagca

SEQ ID NO: 62468 - DNA, 80 bp, synthetic construct
  source 1..80: mol_type = other DNA
gacttgggtggccctagagacgggtggtggttgaccaatactaatgataatgcatctgacacgcttgggccatcaataga

SEQ ID NO: 62469 - DNA, 80 bp, synthetic construct
  source 1..80: mol_type = other DNA
ctgacacgcttgggccatcaatagagattcacacacttggcaaaactatgtcctcatatctaaaccagcagtttactggg

SEQ ID NO: 62470 - DNA, 80 bp, synthetic construct
  source 1..80: mol_type = other DNA
gattcacacacttggcaaaactatgtcctcatatctaaaccagcagtttactggggggctatttttggtggaattggctt

SEQ ID NO: 62471 - DNA, 80 bp, synthetic construct
  source 1..80: mol_type = other DNA
ctgaatggtgtttcactggctatgctgccaaccctaatcttgtcaatctaatgaaatcaactgacaaacaagttaatgtt

SEQ ID NO: 62472 - DNA, 80 bp, synthetic construct
  source 1..80: mol_type = other DNA
tcttttgagggtgacaacgggacaccactcataatgaaagttccagatacaagccattttgcacggacagcagtggcccg

SEQ ID NO: 62473 - DNA, 80 bp, synthetic construct
  source 1..80: mol_type = other DNA
ttcatcgttgcctaccaccttggcaagggctggacaaaatactacctctgatactgtctggcaagtgttgaacacagcgg

SEQ ID NO: 62474 - DNA, 80 bp, synthetic construct
  source 1..80: mol_type = other DNA
tctcggctgcggagatagtcactcctccaccattcaactggctgatcaaaggtggatggtggtttgtcaagctgatagct

SEQ ID NO: 62475 - DNA, 80 bp, synthetic construct
  source 1..80: mol_type = other DNA
ggcagatccagggctggtatgcgtagcttctacgtgtacccaagctaccaagatgcactatctaataaaccagcactttg

SEQ ID NO: 62476 - DNA, 80 bp, synthetic construct
  source 1..80: mol_type = other DNA
tactggaagtgtcccgggtggcatgagagttagagcagcaattccaaccactctccaatttacacaaatgaaccaaccca

SEQ ID NO: 62477 - DNA, 80 bp, synthetic construct
  source 1..80: mol_type = other DNA
gccttgggcatggtgaagtaacagctaccctgggtaggtctataccaacacctggtgacacttttaaggtagttttgacc

SEQ ID NO: 62478 - DNA, 80 bp, synthetic construct
  source 1..80: mol_type = other DNA
gggctgtcctaacttttctatcattaatacctggtggacatgcgcatagtcagcaaaacaaaacaatattcacagacatg

SEQ ID NO: 62479 - DNA, 80 bp, synthetic construct
  source 1..80: mol_type = other DNA
ataggccaacctttggcaccaaacactttgaccaatcaaacatgggtgaataaaacaactacagcaccccaaggccaaca

SEQ ID NO: 62480 - DNA, 80 bp, synthetic construct
  source 1..80: mol_type = other DNA
tgtggttaaaattgccaaggacacaagcaactacaccaccatgcaaggctttacaccaattagtaatgtcacctggtaca

SEQ ID NO: 62481 - DNA, 80 bp, synthetic construct
  source 1..80: mol_type = other DNA
cagaagatttccagccctctgaggaaccaccacctatttctgggctgcaagtcctcgttgacagcaggaagaaggctgat

SEQ ID NO: 62482 - DNA, 80 bp, synthetic construct
  source 1..80: mol_type = other DNA
gtgtacgctgttcagcagtaccttaatcatccatcaaataccaaagatcaacttactagtatctttttagtgaaggttac

SEQ ID NO: 62483 - DNA, 80 bp, synthetic construct
  source 1..80: mol_type = other DNA
taccagcttccaagtcaataaccacttgagctatttttatagggctgctggcactggcactgctgtcgaaaatttcaaaa

SEQ ID NO: 62484 - DNA, 80 bp, synthetic construct
  source 1..80: mol_type = other DNA
taaggggtgcaacttcagagcaaaacatcagcttttctgaggggtggtacctaatgacaaacacagccactttcaatccc

SEQ ID NO: 62485 - DNA, 80 bp, synthetic construct
  source 1..80: mol_type = other DNA
ccagctcctcctggctggatatggaagaatgttgagctagacaacaacaccccgtacattgtagaccagggtatgatgca

SEQ ID NO: 62486 - DNA, 80 bp, synthetic construct
  source 1..80: mol_type = other DNA
cttgatcatgtccccccctgttggcacacagcttttgtttgagatgaaaacaacagtatctggcacacgaaatgtgtccc

SEQ ID NO: 62487 - DNA, 80 bp, synthetic construct
  source 1..80: mol_type = other DNA
attttgatcatgatgaaaatccatctcctgtgtggtgtgacgcacttgatgcggcagatgtgtgggaactgcccacagag

SEQ ID NO: 62488 - DNA, 80 bp, synthetic construct
  source 1..80: mol_type = other DNA
acagacacagaaagtgaggaagatgaggacgaagacgacgaagcggacaggtttgatcttcatagttcttatggctctga

SEQ ID NO: 62489 - DNA, 80 bp, synthetic construct
  source 1..80: mol_type = other DNA
tttgctgcttgcaaatactcgacagagtcattaacagaaaatcttgacctcagaatcaaaatagccttggcaaacataac

SEQ ID NO: 62490 - DNA, 80 bp, synthetic construct
  source 1..80: mol_type = other DNA
gcctgaggacgatgatgagaataaccgtgtaaccctcctctctacactcataaaccaaggaatgacagtggagcgcgcaa

SEQ ID NO: 62491 - DNA, 80 bp, synthetic construct
  source 1..80: mol_type = other DNA
caatgattaccaaacgcgcgttccccacttgcgctgacaaacaaaagcgcagtgtacacatggacctgcttgcttctggc

SEQ ID NO: 62492 - DNA, 80 bp, synthetic construct
  source 1..80: mol_type = other DNA
ctctcgccaggcaatgtatggtcacatgcgtgtgaagaagcacgcaccatgggcactaatcatatgcctaatgtttctgg

SEQ ID NO: 62493 - DNA, 80 bp, synthetic construct
  source 1..80: mol_type = other DNA
agaccgcggccacgccgagtaggatcgagggtacagtctccatttcttttctgtctctgtttagattattttaatcatca

SEQ ID NO: 62494 - DNA, 80 bp, synthetic construct
  source 1..80: mol_type = other DNA
ctatcactgataagttggatgctatgaaacaaattctcaactttgcttttgtacctagagtgcactggctgcgaacagtt

SEQ ID NO: 62495 - DNA, 80 bp, synthetic construct
  source 1..80: mol_type = other DNA
aatatggcacttggtgaaccatactatagttccaaacctgacaaggactttgacttcgggagcacaatggcgcgtagaca

SEQ ID NO: 62496 - DNA, 80 bp, synthetic construct
  source 1..80: mol_type = other DNA
ttccattacatccattattatgaaatgtggaatatttttatgttagtacttgcagtcagtacagtcatgaaaagtacccg

SEQ ID NO: 62497 - DNA, 80 bp, synthetic construct
  source 1..80: mol_type = other DNA
ccctggaacggacctaattactttagcaacatcccacttatcaggttttagaatggctgtgctaccaactataccctttc

SEQ ID NO: 62498 - DNA, 80 bp, synthetic construct
  source 1..80: mol_type = other DNA
cactacgttgactctatgggttatgaatactctcatgttagtatatttctttgacaacttactggctataacgctagcat

SEQ ID NO: 62499 - DNA, 80 bp, synthetic construct
  source 1..80: mol_type = other DNA
ggcttatcagtgtatagaaaacattttctgctcttttatcatacaattacaaataagatggcacacggtgagccatatta

SEQ ID NO: 62500 - DNA, 80 bp, synthetic construct
  source 1..80: mol_type = other DNA
gcaaatccagagctcgacctcaatctagaggtagaagcagatcagtcaagattacagtcaattcccataataaaggcaga

SEQ ID NO: 62501 - DNA, 80 bp, synthetic construct
  source 1..80: mol_type = other DNA
ttatcagtgtatagataagattttttccacacttttatcaaatatctgacaagatggcacacggtgagccatactatagt

SEQ ID NO: 62502 - DNA, 80 bp, synthetic construct
  source 1..80: mol_type = other DNA
agaatctaacaagcctgccctaactgatgcacaaccacttgacttatttcagaagaaagagaaacaaacagaacacgaac

SEQ ID NO: 62503 - DNA, 80 bp, synthetic construct
  source 1..80: mol_type = other DNA
agcaccaggatccaatacaagtggagctaatccagaaaatcttgtaaaaatagctcacgacttgggtcactacttaatta

SEQ ID NO: 62504 - DNA, 80 bp, synthetic construct
  source 1..80: mol_type = other DNA
tgcaagggtttttgcacataaagtcggtggagtggtacactcctgacttccaaccctcacgtgacccaggccctatttct

SEQ ID NO: 62505 - DNA, 80 bp, synthetic construct
  source 1..80: mol_type = other DNA
ggtatgtcagtaatggtcaacataacaaagaaggcagatgtctacttcatgaggcaatttaagaattcccacactaacaa

SEQ ID NO: 62506 - DNA, 80 bp, synthetic construct
  source 1..80: mol_type = other DNA
aacaagcatctttttgattaaacctgtggcagactttgaggtgcaaagttacatgagttatttcaagagggattcacaag

SEQ ID NO: 62507 - DNA, 80 bp, synthetic construct
  source 1..80: mol_type = other DNA
acaatgacagtgctgtcaatctcacagtcaggagcatgacaactaccaagactgtcagattccaaacaggggagtggtac

SEQ ID NO: 62508 - DNA, 80 bp, synthetic construct
  source 1..80: mol_type = other DNA
ttgctaactagtaccacaattaaagaaaacagtttgccagaatcttgggtgtgggacagagtggagcttcagagtaacac

SEQ ID NO: 62509 - DNA, 80 bp, synthetic construct
  source 1..80: mol_type = other DNA
gcattgaattacctagcacttccacactacaagcagactctagtgtccgggctactggcgcccgaggtgcaaatgatgaa

SEQ ID NO: 62510 - DNA, 80 bp, synthetic construct
  source 1..80: mol_type = other DNA
tcctctgatgatgatgatgcttatgcatcagaagagacagaaactgatgatgaggaagacgaggacgaagacgacgaagc

SEQ ID NO: 62511 - DNA, 80 bp, synthetic construct
  source 1..80: mol_type = other DNA
ataaaaagctggagcccaagaagataaatgatgctttagtcctttgggaacagcagtttatggtaaactcagaacttata

SEQ ID NO: 62512 - DNA, 80 bp, synthetic construct
  source 1..80: mol_type = other DNA
acgagattgacgtcttcaacccagggtgcctacatggtacttttaaatgcaatagtggctatatttcaatttctaaggca

SEQ ID NO: 62513 - DNA, 80 bp, synthetic construct
  source 1..80: mol_type = other DNA
aataacgaaaatctggtcaaaagatttaactaagcaaactgttaacttacaaatcttgatgcattctttatgtaaaaact

SEQ ID NO: 62514 - DNA, 80 bp, synthetic construct
  source 1..80: mol_type = other DNA
tacttgctgacacttctaggcataatcacttaaggaataggatagagaataggaataattttagacgatcaataacaaca

SEQ ID NO: 62515 - DNA, 80 bp, synthetic construct
  source 1..80: mol_type = other DNA
aaagaaactgatcctgccagatgacttaatgtgtaatttattagatcagaaaactacttataaggatgatattatatctg

SEQ ID NO: 62516 - DNA, 80 bp, synthetic construct
  source 1..80: mol_type = other DNA
ttatgaccaaccaattacaaacaaattgtgttgagattaaacgcaactggcttcaaggtaatttcaattatactagcagt

SEQ ID NO: 62517 - DNA, 80 bp, synthetic construct
  source 1..80: mol_type = other DNA
ctttgctgtttagaactggtgacttgactcaacatgatcttgataaatatgacgccatgaagagtcaagagagggtcact

SEQ ID NO: 62518 - DNA, 80 bp, synthetic construct
  source 1..80: mol_type = other DNA
tggaatgattggcaaacatcaaggcacttagatatgggggcaataaacttaacaataaatggttataacagagccataac

SEQ ID NO: 62519 - DNA, 80 bp, synthetic construct
  source 1..80: mol_type = other DNA
gatgtcgaactatcaaaacctaagatattagacttcaatgatgaaaatatctatttatccagtctcactatgattgagca

SEQ ID NO: 62520 - DNA, 80 bp, synthetic construct
  source 1..80: mol_type = other DNA
gtgcaaaattatgttatcagagcagagtggtctaaaaagtaataattttatattggatgaatttgggaaaaaaataggag

SEQ ID NO: 62521 - DNA, 80 bp, synthetic construct
  source 1..80: mol_type = other DNA
ctggcgatgggaaattaaagattttggaacaaaaatctgaacaagaaattcgcttcctagttgagacaacgcggcagaag

SEQ ID NO: 62522 - DNA, 80 bp, synthetic construct
  source 1..80: mol_type = other DNA
aatagggagatagatgaagcaatagaagccctagctgcggaaaactttgaaggaaacatctcaaagatcgagaaactagc

SEQ ID NO: 62523 - DNA, 80 bp, synthetic construct
  source 1..80: mol_type = other DNA
tgaagggaagtcaagaggcttgaaaatggagataaatgcagatatgtctaaatggagtgctcaagatgtattctttaaat

SEQ ID NO: 62524 - DNA, 80 bp, synthetic construct
  source 1..80: mol_type = other DNA
gtttcaggctgataactcactttgcagactctttcatagatgccggttctagacctgctttcttgcagttgatcttagat

SEQ ID NO: 62525 - DNA, 80 bp, synthetic construct
  source 1..80: mol_type = other DNA
agcttcagttacaaagatgtaaaagttaataaattatatgagataataaaaaatggccacaataggacagattttatacc

SEQ ID NO: 62526 - DNA, 80 bp, synthetic construct
  source 1..80: mol_type = other DNA
taggaagttgttaagctctaggcatggtttgaaatttgaaaacatgacaaaagtcacaacatacccagggaattattata

SEQ ID NO: 62527 - DNA, 80 bp, synthetic construct
  source 1..80: mol_type = other DNA
ttacttacagaaagaaagataggcaccaatacatttatcaaatacacacacatgagtcaattttacgaagaaatgaagaa

SEQ ID NO: 62528 - DNA, 80 bp, synthetic construct
  source 1..80: mol_type = other DNA
atgaaattgatgtctttaaccctgggtgcttgcatggtacttttaaatgcaatagtggctatatttcaatatctaaggca

SEQ ID NO: 62529 - DNA, 80 bp, synthetic construct
  source 1..80: mol_type = other DNA
agaaaaagaacattgaaattgaaagtaggaagaggagactggcaaatcctctctttgtctcagatgaagaattagggcta

SEQ ID NO: 62530 - DNA, 80 bp, synthetic construct
  source 1..80: mol_type = other DNA
gaagtggggcactgtaattacaatatgttaagagaggcaatgccagaatacaaagactacatttcaactaaagtttttga

SEQ ID NO: 62531 - DNA, 80 bp, synthetic construct
  source 1..80: mol_type = other DNA
accgcttgtatgaaatgctagatacgaaccaggtttctgacaaacctacaatagaattaattatggatatgatgactgat

SEQ ID NO: 62532 - DNA, 80 bp, synthetic construct
  source 1..80: mol_type = other DNA
catacagacttttattttacatttttcaataagggccaaaaaacttccaaggatagagaaatatttgtaggggaatatga

SEQ ID NO: 62533 - DNA, 80 bp, synthetic construct
  source 1..80: mol_type = other DNA
tggagacacaaagaaatttccaagactttgcaaaaatgatgaggaggtctgagggaagaaccaatttggactttaattaa

SEQ ID NO: 62534 - DNA, 80 bp, synthetic construct
  source 1..80: mol_type = other DNA
ataaaggagaaattctggagggctgggagatgatggtagagagagttcaccagcaaagagaagtaagtaaatctgtccat

SEQ ID NO: 62535 - DNA, 80 bp, synthetic construct
  source 1..80: mol_type = other DNA
gaccaaaagcctagtatccattttatatggtctgctcataatcctaataacagtaacaacgccactttcaaattaatctt

SEQ ID NO: 62536 - DNA, 80 bp, synthetic construct
  source 1..80: mol_type = other DNA
atggataacacagaatatcaacaattccttgctcgcatcaatgctgcaagagatgcatgtgtagcaaaggatattgatgt

SEQ ID NO: 62537 - DNA, 80 bp, synthetic construct
  source 1..80: mol_type = other DNA
ttggagatagaataactgaatatgaatcacattgtgatcacttaaagacgcaagcaaggcaaagctggcgacaagtcatg

SEQ ID NO: 62538 - DNA, 80 bp, synthetic construct
  source 1..80: mol_type = other DNA
aacaaaaagctagagccaaaaaagataaacgatgctttagtcctttgggaacagcagttcatggtaaactcggaacttat

SEQ ID NO: 62539 - DNA, 80 bp, synthetic construct
  source 1..80: mol_type = other DNA
ataggaatgataagcttaaactttttagagatttctgtggcataggtaggcacaagcaatttaaaaacaaaatgttggaa

SEQ ID NO: 62540 - DNA, 80 bp, synthetic construct
  source 1..80: mol_type = other DNA
gacattgaactgtcaaaacctaaaatattggatttcaacgatgaaaatatttacttatctagcctcactatgattgaaca

SEQ ID NO: 62541 - DNA, 80 bp, synthetic construct
  source 1..80: mol_type = other DNA
aagagacatagcatctgcattaaacctacacatagagatagttattattaggatagaccctattagccgtgatttatata

SEQ ID NO: 62542 - DNA, 80 bp, synthetic construct
  source 1..80: mol_type = other DNA
tcagttcagatagattcaaagatttgttcccaacattagtagttgatattaattttaatcaattttttgatttaaagcaa

SEQ ID NO: 62543 - DNA, 80 bp, synthetic construct
  source 1..80: mol_type = other DNA
tccagaatcctgctcagttatttattgagcagatcctattctcgaacaaaccaataattgacttctcaggcattagagat

SEQ ID NO: 62544 - DNA, 80 bp, synthetic construct
  source 1..80: mol_type = other DNA
aaatatataaatctacatgatagcagagcactagaaagagaacctgacatcattgggaaagtcacatttaaagaagcata

SEQ ID NO: 62545 - DNA, 80 bp, synthetic construct
  source 1..80: mol_type = other DNA
atctaagggttaaaatggagaagaggatttcagataacgaattagaaaaaggagctcgagatattgtctttgaactaaaa

SEQ ID NO: 62546 - DNA, 80 bp, synthetic construct
  source 1..80: mol_type = other DNA
gaaatgacaagattctatcaagtttgctacgaatatattaagtctacagagcataaaataaaagtgtttatcttaccagc

SEQ ID NO: 62547 - DNA, 80 bp, synthetic construct
  source 1..80: mol_type = other DNA
tgcaagacaggatgttcacaagtttggcaacatcccatatacaaggaattcaaaatgagtatgccaatccctgagaggag

SEQ ID NO: 62548 - DNA, 80 bp, synthetic construct
  source 1..80: mol_type = other DNA
tggaaacacaaagaaattttcaagactttgcaaagatgatgaggagatctgagggaaaaaccaatttagatttcaattaa

SEQ ID NO: 62549 - DNA, 80 bp, synthetic construct
  source 1..80: mol_type = other DNA
aaaaggggggtggtgattggcctttggcttatcagtgtatagacaatattttacaatatttttcaaatagttgacaggat

SEQ ID NO: 62550 - DNA, 80 bp, synthetic construct
  source 1..80: mol_type = other DNA
aacacccaaatccgtaccaaccccttcagagaagttaccaaagccttgccccgagccagaagctgaagtacaaccactcg

SEQ ID NO: 62551 - DNA, 80 bp, synthetic construct
  source 1..80: mol_type = other DNA
atttgtctcagaagaaaactgttgagaacccagagaaacaaccggagcatgagagacaagtggtgaagcctaagcctcag

SEQ ID NO: 62552 - DNA, 80 bp, synthetic construct
  source 1..80: mol_type = other DNA
aagagtgagccacaaccatactcacagacctatggtaaggcaccaatctgggagtcttatgattttgactgggatgagga

SEQ ID NO: 62553 - DNA, 80 bp, synthetic construct
  source 1..80: mol_type = other DNA
ttgatactgaagagaaatatcttgaatcacatggatgggcaccatatattagagaatttaccaggatctttaaaggagat

SEQ ID NO: 62554 - DNA, 80 bp, synthetic construct
  source 1..80: mol_type = other DNA
tttacaccaggataggggcgtgcctagaggcacatcagaatgtcctaatgaaacaacacactgaaacgtcagttggtcaa

SEQ ID NO: 62555 - DNA, 80 bp, synthetic construct
  source 1..80: mol_type = other DNA
gtggtttatggtgatgataggctctctactacgccttcagtgccagaaaattatgaagaaagagtgattgacatgtacag

SEQ ID NO: 62556 - DNA, 80 bp, synthetic construct
  source 1..80: mol_type = other DNA
tgtggttttacagtcaatgcagaccttgaacctgtaccaacctcaccagaaaaactgatggcatctcttctgaaacctta

SEQ ID NO: 62557 - DNA, 80 bp, synthetic construct
  source 1..80: mol_type = other DNA
taaaatcttacctgatttagaatcactccatgggaagctcctatgctaccagttgcttgctgcgttcatggcagaagacc

SEQ ID NO: 62558 - DNA, 80 bp, synthetic construct
  source 1..80: mol_type = other DNA
acagaagagcaactccatcgcatttggaggggaggaccaaagaagtgtgatggctagcaagcccagcaaacaggtaactg

SEQ ID NO: 62559 - DNA, 80 bp, synthetic construct
  source 1..80: mol_type = other DNA
gcagatctaggcctcgatctcaatccagaggccgagacaaatcagtcaaaattacagttaattccagaaacaaaggtaga

SEQ ID NO: 62560 - DNA, 80 bp, synthetic construct
  source 1..80: mol_type = other DNA
cagggagtactcaatttgggccagtgcaggcgctaggggcgcagtattcaatgtggaagcttaaatatcttaatgtgaag

SEQ ID NO: 62561 - DNA, 80 bp, synthetic construct
  source 1..80: mol_type = other DNA
cttacttccatggttggatcctctgcagtcaatggtactgtggtgagagtatctttgaatccaacgtctacaccttcttc

SEQ ID NO: 62562 - DNA, 80 bp, synthetic construct
  source 1..80: mol_type = other DNA
tactagctggtctggcttgggagctcgaaaacatcttgatgtgacagttggtaagaatgctgtgttcaagttgaaaccag

SEQ ID NO: 62563 - DNA, 80 bp, synthetic construct
  source 1..80: mol_type = other DNA
atacccttggcccttcaatagagatccacactttgggtaggactatgtcatcttaccaaaaccagcaatttactggaggg

SEQ ID NO: 62564 - DNA, 80 bp, synthetic construct
  source 1..80: mol_type = other DNA
ctgtttcttgtggagcttgcctctgagtggtgctttacaggctatgctgcaaatccaaaccttgtcaacttaatgaagtc

SEQ ID NO: 62565 - DNA, 80 bp, synthetic construct
  source 1..80: mol_type = other DNA
gaccgacaaacaggtcaatgtcaccttcagtggatctgccggagagccactggttatgagtgtacctgcaacaagccact

SEQ ID NO: 62566 - DNA, 80 bp, synthetic construct
  source 1..80: mol_type = other DNA
ttgttcgcgcagtcgtagcaagatcaacactgccgacgtctttagcacgggctggggagagaacaacatctgatactgtt

SEQ ID NO: 62567 - DNA, 80 bp, synthetic construct
  source 1..80: mol_type = other DNA
tggcaggtactcaacaccgccgtgtctgccgctgagttggttactcccccaccattcaattggctagtcaaaggtggatg

SEQ ID NO: 62568 - DNA, 80 bp, synthetic construct
  source 1..80: mol_type = other DNA
gtggtttgtcaagctgattgcaggtagaacaaggaatggtacgcgtagcttctatgtgtatccaagctaccaggatgcgc

SEQ ID NO: 62569 - DNA, 80 bp, synthetic construct
  source 1..80: mol_type = other DNA
cagctctttgcactggagggcttccaagtgggctaagagcagcgtctgcagtcaccacaactttgcagttcacccagatg

SEQ ID NO: 62570 - DNA, 80 bp, synthetic construct
  source 1..80: mol_type = other DNA
gagcagtgcttacatttttatctcttatacctgggggctatgcgcaaagccacaataacactatctttacagacatgata

SEQ ID NO: 62571 - DNA, 80 bp, synthetic construct
  source 1..80: mol_type = other DNA
aaccaacccagtcttggacatggagaaaacacagcaactttgggtaggtctattgctacagctggcgaccgtcttaaagt

SEQ ID NO: 62572 - DNA, 80 bp, synthetic construct
  source 1..80: mol_type = other DNA
aattcttactgtgggtcagccagtaacacccaatgaagtcaacaaacaaaactgggttggtaaaacaaatacacctactg

SEQ ID NO: 62573 - DNA, 80 bp, synthetic construct
  source 1..80: mol_type = other DNA
aagaggttattaaaataggtgtaaacacccagagctataatgtcatgaatggttttaccatgatatccagtatagactgg

SEQ ID NO: 62574 - DNA, 80 bp, synthetic construct
  source 1..80: mol_type = other DNA
tatgatgaggaaatgcagcccctggaggtccccgcaccgatgtctgacctattggttatgaaaggcatcaataagaaggc

SEQ ID NO: 62575 - DNA, 80 bp, synthetic construct
  source 1..80: mol_type = other DNA
agatgtgtatgcagcacagcaatacaagaactctatcagtaacaataagcaccagataaccagtgtatacctgattagag

SEQ ID NO: 62576 - DNA, 80 bp, synthetic construct
  source 1..80: mol_type = other DNA
ttagggaaaacttccaggtcactaatcatttgagttacttctttagagaaaaagttgataccactgcagttgaactcatg

SEQ ID NO: 62577 - DNA, 80 bp, synthetic construct
  source 1..80: mol_type = other DNA
aagattaggcctcaaacataccatacaactgttaattttgtccaaaacaattggtatctcttgactagcacagtactgca

SEQ ID NO: 62578 - DNA, 80 bp, synthetic construct
  source 1..80: mol_type = other DNA
tactggatcccttccatctggctgggtttggatgaaccaagaactcatgaacagtgagaactacattgttgaccagggca

SEQ ID NO: 62579 - DNA, 80 bp, synthetic construct
  source 1..80: mol_type = other DNA
tgaagcatcttatgactacaccaccagtgtcatcccaactttactttgagatgcttacttctctgccacaggctatggca

SEQ ID NO: 62580 - DNA, 80 bp, synthetic construct
  source 1..80: mol_type = other DNA
gcacaatttgaccaaagtgaacaagcagtaacatttcatgatagccctgaacaagcactatttagtgctgaagagacaga

SEQ ID NO: 62581 - DNA, 80 bp, synthetic construct
  source 1..80: mol_type = other DNA
tagtgactttgagagtactgaggacgaaaacgatgaagtggacaggtttgatctccatctctcttctgagtcagatgatg

SEQ ID NO: 62582 - DNA, 80 bp, synthetic construct
  source 1..80: mol_type = other DNA
atgatgttgagaacaaccgtgtaaccctcctctctaccctcattaatcaaggaatgtcagtggagcgcgccacaagaatc

SEQ ID NO: 62583 - DNA, 80 bp, synthetic construct
  source 1..80: mol_type = other DNA
accagtaacgcgttcccgacacgcgccgctagattgaggcgcagtgtctacaatgacctgttggtttctggccttggtcc

SEQ ID NO: 62584 - DNA, 80 bp, synthetic construct
  source 1..80: mol_type = other DNA
agatgcagcatggtcccatgcgtgtgatcaagcacgcaaagtaggcgacaatcatgacctacaagcttcaggaagccgcg

SEQ ID NO: 62585 - DNA, 80 bp, synthetic construct
  source 1..80: mol_type = other DNA
gaacaaccaaatctgtaccaacctcttcagcagaagttaccaaagcgccccttgattttgctgagaacccagagaaacaa

SEQ ID NO: 62586 - DNA, 80 bp, synthetic construct
  source 1..80: mol_type = other DNA
ccggagaatgagaaacaagtggtgaagcctaagcctcataagagtgagccacaaccatactcacagacctatggtaaggc

SEQ ID NO: 62587 - DNA, 80 bp, synthetic construct
  source 1..80: mol_type = other DNA
gcactatattgcccaggattacctctacacctgacagtcccagcgggcgatatatagaaagccaacaacaagactgtcct

SEQ ID NO: 62588 - DNA, 80 bp, synthetic construct
  source 1..80: mol_type = other DNA
caggggccgttagcaacaacgtccccatgtgtgtgagggagtgttttgccagcgtgaccacgctcccttggacaacgcgc

SEQ ID NO: 62589 - DNA, 80 bp, synthetic construct
  source 1..80: mol_type = other DNA
caagcatccaacacctttcttggtgccatccatctcggtccacgcatcaacccctatactgcacacttgagtgccatgtt

SEQ ID NO: 62590 - DNA, 80 bp, synthetic construct
  source 1..80: mol_type = other DNA
tgctggctggggtggcagtttccaaatacgagtcaccatatctggctctgggctgtatgcaggccgtgcagtggtggcag

SEQ ID NO: 62591 - DNA, 80 bp, synthetic construct
  source 1..80: mol_type = other DNA
tgctgcctccaggtgtcaacccagccaatgtccaaaaccctggagtgtttccacatgcgttcattgatgcccgcaccgtg

SEQ ID NO: 62592 - DNA, 80 bp, synthetic construct
  source 1..80: mol_type = other DNA
gatcctatcctcatcaacctccctgatatccgtgcggtggattaccaccgtgtggatggcgatgagcaaactgcaactgt

SEQ ID NO: 62593 - DNA, 80 bp, synthetic construct
  source 1..80: mol_type = other DNA
tgggctttgggttgcccaaccgctcatcaacccgttccaagctggctccatctccacatgttggttgacatttgagacca

SEQ ID NO: 62594 - DNA, 80 bp, synthetic construct
  source 1..80: mol_type = other DNA
gacccgaacaaccccagtgaagaggttgccaaattagtgtttgaaatggagggcttaggccagccaccccaatcagggca

SEQ ID NO: 62595 - DNA, 80 bp, synthetic construct
  source 1..80: mol_type = other DNA
aaatgccaaactcgggtgctcaacgcctggagatggcggtcgccactggggcaatcaactccaatgtcccaaattgtgtg

SEQ ID NO: 62596 - DNA, 80 bp, synthetic construct
  source 1..80: mol_type = other DNA
acagtgggcctttgggtggcacagccattgctaaatccattctctactggctcttcagtttccacatgctggctgtcttt

SEQ ID NO: 62597 - DNA, 80 bp, synthetic construct
  source 1..80: mol_type = other DNA
aggtaacccaccacaaggtgtggtgacgcctcaggacacaatttcaccaaccgaggcacttttactcccaacccaggtag

SEQ ID NO: 62598 - DNA, 80 bp, synthetic construct
  source 1..80: mol_type = other DNA
atgcaagagaaagatgatgagaaacaagatcaaaacaataaaatgcaattgtctgataaagtactgtcagagaaagaaga

SEQ ID NO: 62599 - DNA, 80 bp, synthetic construct
  source 1..80: mol_type = other DNA
aatcgacgaaagaagagtctaagcaattacttgaagtgttaaaaacgaaagaagagcaccagaaagaaatacaatatgaa

SEQ ID NO: 62600 - DNA, 80 bp, synthetic construct
  source 1..80: mol_type = other DNA
attttgcaaaatacgataccaacattcgaaccaaaagagtcaatattgaagaaattagaagatattaaaccagagcaggc

SEQ ID NO: 62601 - DNA, 80 bp, synthetic construct
  source 1..80: mol_type = other DNA
gcagtgaggagatttattgcggaaatgagacagcgcatacaagctgatagaaatgttgttaattacccatcaatattgca

SEQ ID NO: 62602 - DNA, 80 bp, synthetic construct
  source 1..80: mol_type = other DNA
gcaacttttgtaggcagatgacaggtgctagcctgaagaaagggtcttatcctctccaggacttattttgtcagtcaagt

SEQ ID NO: 62603 - DNA, 80 bp, synthetic construct
  source 1..80: mol_type = other DNA
cccatcggacctgatgactgactgagaagccacagtcagtcatatcgcgtgtggcttaagccttaatcccgtttaaccaa

SEQ ID NO: 62604 - DNA, 80 bp, synthetic construct
  source 1..80: mol_type = other DNA
gcagcccaaagcgggtggtgattggcctttggcttatcagtgtatagaaaacattttctgctcttttatcatataattac

SEQ ID NO: 62605 - DNA, 80 bp, synthetic construct
  source 1..80: mol_type = other DNA
gaataaccaattccggtccaacctcttcagagaagtcacccaagccttgccccgagccggaagctgaaccacacccactt

SEQ ID NO: 62606 - DNA, 80 bp, synthetic construct
  source 1..80: mol_type = other DNA
gatttgtcccagaagaaagtagctgagaacccagagaaacaaccggagtatgagaaacaagtggtgaagcctaagcctca

SEQ ID NO: 62607 - DNA, 80 bp, synthetic construct
  source 1..80: mol_type = other DNA
gtagtgtactcctatttcaaaacaaacaaaaacaatctcaaaatgtcgcaactgttactcaaccaatatcgaaataggat

SEQ ID NO: 62608 - DNA, 80 bp, synthetic construct
  source 1..80: mol_type = other DNA
aacaggaagctatgtaagtgctttcaaatcattaggaagattgatggatatatcgtcagacatcaaaaagtatgaatcgt

SEQ ID NO: 62609 - DNA, 80 bp, synthetic construct
  source 1..80: mol_type = other DNA
tctgcggaaaattaaaatctttggcaaggtctagtgtaaagaaactcgacaggaaaatagaaccggtgcaaattggaaca

SEQ ID NO: 62610 - DNA, 80 bp, synthetic construct
  source 1..80: mol_type = other DNA
gcaactgtcttatgggagcagcaatttaaattggatacggatgtcataaaaagagaagacagaatacatttaatgaaaga

SEQ ID NO: 62611 - DNA, 80 bp, synthetic construct
  source 1..80: mol_type = other DNA
ttatttcggaattggtaaacacaagtctttttcaaaaaagctaaacaatgacataaatatcgataagcctaaaatattga

SEQ ID NO: 62612 - DNA, 80 bp, synthetic construct
  source 1..80: mol_type = other DNA
attttgacaatgacgatatagttaggaaatgcaaagataaatataaccaagtcacacataacttgtctcaagttaataat

SEQ ID NO: 62613 - DNA, 80 bp, synthetic construct
  source 1..80: mol_type = other DNA
ttagacaagattggaaattacctagagcatttttcagctaaaattagtgcctgcagtgtagaaatgtgggactttatata

SEQ ID NO: 62614 - DNA, 80 bp, synthetic construct
  source 1..80: mol_type = other DNA
taatacgactaaaaccaagtactggcaatgtatcaacgactactctaccctaatgaaaaacatgctagctgtttcccaat

SEQ ID NO: 62615 - DNA, 80 bp, synthetic construct
  source 1..80: mol_type = other DNA
aattttgcagagctgcaaaccttgagtatagaaatgatgttcctgctgaggatatttgtgctgaagtcctcgatggttac

SEQ ID NO: 62616 - DNA, 80 bp, synthetic construct
  source 1..80: mol_type = other DNA
ataataggcacaatacctttaggattgtctcatgtgcaaataacaatgtatttggcttagtgatgccaagctcagacata

SEQ ID NO: 62617 - DNA, 80 bp, synthetic construct
  source 1..80: mol_type = other DNA
aaaacaaaaaaagcaacattagtctatgcaataatagctctccacaatgaggaggcagagatagcagaacttggttcact

SEQ ID NO: 62618 - DNA, 80 bp, synthetic construct
  source 1..80: mol_type = other DNA
ctattccactttcaagacaacaacaggctatatttcaatatcgaaagcttttaggctagataaagaaaggtgtcagcgca

SEQ ID NO: 62619 - DNA, 80 bp, synthetic construct
  source 1..80: mol_type = other DNA
tagtgtcttctccaggcttatttctcatgacaagctgtctattattcaatggtaataagagtctagagtttgataagtta

SEQ ID NO: 62620 - DNA, 80 bp, synthetic construct
  source 1..80: mol_type = other DNA
ctaggtttttcattttttacatcaatatcgattacaaaagctatgctctctcttactgagccttcacgctatatgatcat

SEQ ID NO: 62621 - DNA, 80 bp, synthetic construct
  source 1..80: mol_type = other DNA
gaactcattggcagtttctagccatgtaaaagagtatatatctgaaaaattttctccttatacaaaaacatcattttctg

SEQ ID NO: 62622 - DNA, 80 bp, synthetic construct
  source 1..80: mol_type = other DNA
tagtgatgacagatttgattaaaaaaggttgctattcagcatatgaacagaggaaaaaggtccaaataagggatataaag

SEQ ID NO: 62623 - DNA, 80 bp, synthetic construct
  source 1..80: mol_type = other DNA
ttaacagactacgatataacacagaaaggggtagattccaaaagagatcttaaatccatttggttcccgggaaaggtaaa

SEQ ID NO: 62624 - DNA, 80 bp, synthetic construct
  source 1..80: mol_type = other DNA
tttaaaagaatacttgaaccagatttatttaccattttattttaattccaaaggattgcatgaaaagcatcatgttttaa

SEQ ID NO: 62625 - DNA, 80 bp, synthetic construct
  source 1..80: mol_type = other DNA
tagatttggctaaaacagtgctagaaatcgaaaaagagcaaagagaatcactacctgagccatggtcagagatacctgcc

SEQ ID NO: 62626 - DNA, 80 bp, synthetic construct
  source 1..80: mol_type = other DNA
aaagcaaggaaagtgcgcttttgcacacctgataattacttactacacgacgggaaaatgtatataatagattttaaagt

SEQ ID NO: 62627 - DNA, 80 bp, synthetic construct
  source 1..80: mol_type = other DNA
aagcagactgtcaacttaaatattttaatttactcaattgcaaggaatttgaacttagatacttcaagacataattttgt

SEQ ID NO: 62628 - DNA, 80 bp, synthetic construct
  source 1..80: mol_type = other DNA
gaggagccgggtggaaaatgcaaataactttaacaggtctataacaacaatatccacctttaccagctcgaaatcatgca

SEQ ID NO: 62629 - DNA, 80 bp, synthetic construct
  source 1..80: mol_type = other DNA
ttaaaattggtgattttgaagaggagaaaaagaagaaaactaaaaatgatgcaaagaaactagcaaaagatatttctaaa

SEQ ID NO: 62630 - DNA, 80 bp, synthetic construct
  source 1..80: mol_type = other DNA
ttaactatagccaacccagcattcttagacgaaatcacaaatgaacatgagataagacactcaacttatgaggatttgaa

SEQ ID NO: 62631 - DNA, 80 bp, synthetic construct
  source 1..80: mol_type = other DNA
acaatctatcccagattacacagactatatgtctgtaaaagtttttgacagactatatgagaagattactactaatgaaa

SEQ ID NO: 62632 - DNA, 80 bp, synthetic construct
  source 1..80: mol_type = other DNA
taagtgataaagaaacaatcaagttgattttagagactatgaagaagcataaaatattttacttcgggttcttcaacaaa

SEQ ID NO: 62633 - DNA, 80 bp, synthetic construct
  source 1..80: mol_type = other DNA
ggacagaaaacagctaaagatagggaaatatttttaggtgaattcgaggcaaaaatgtgcctgtaccttgtcgaaagaat

SEQ ID NO: 62634 - DNA, 80 bp, synthetic construct
  source 1..80: mol_type = other DNA
agccaaagagagatgcaaattaaatccagaagaaatgataagcgaaccaggtgactctaaattaagagtattggaaaagc

SEQ ID NO: 62635 - DNA, 80 bp, synthetic construct
  source 1..80: mol_type = other DNA
aatcagaagatgaaattaggtatatcagcaacacaataaagacattggggaatgccatagaaaacctgcaatccgggtct

SEQ ID NO: 62636 - DNA, 80 bp, synthetic construct
  source 1..80: mol_type = other DNA
ttaaattgggcagatatatgtgaaagtaaggcacgagggcttaaaatagaaataaatgctgatatgtctaaatggagtgc

SEQ ID NO: 62637 - DNA, 80 bp, synthetic construct
  source 1..80: mol_type = other DNA
gtctgtggatgatcggtcttccagaattacaagagagaaatacaatgaaatttttggagaagtgttcaatccagaaggtg

SEQ ID NO: 62638 - DNA, 80 bp, synthetic construct
  source 1..80: mol_type = other DNA
ccaagatgtacttttcaagtatttctggctgatagtacttgatcctatcttatatcctgctgagaggaagagaataattt

SEQ ID NO: 62639 - DNA, 80 bp, synthetic construct
  source 1..80: mol_type = other DNA
attttctatgtaattacatgcaaaaaaggcttataatgcctgatgaattgctcactacgatattggaccagagggttcct

SEQ ID NO: 62640 - DNA, 80 bp, synthetic construct
  source 1..80: mol_type = other DNA
tattcaaatgatataattgggttgatgacaaacaattatagatccaacacagtagaaataaagcgcaactggcttcaagg

SEQ ID NO: 62641 - DNA, 80 bp, synthetic construct
  source 1..80: mol_type = other DNA
caatttaaattatacaagtagttacttgcacagctgtagtatgtctgtgtataaagatataataagggaagcagcaacat

SEQ ID NO: 62642 - DNA, 80 bp, synthetic construct
  source 1..80: mol_type = other DNA
tattagagggggaagcccttgtgaattcaatggtacattctgatgataatcaaacatccatatgtatggtgcaaaacaag

SEQ ID NO: 62643 - DNA, 80 bp, synthetic construct
  source 1..80: mol_type = other DNA
ttgccagatgacaatgtaattgaattttgcatcaagatattcgagaagatatgtttaacttttggaaatcaggcaaacat

SEQ ID NO: 62644 - DNA, 80 bp, synthetic construct
  source 1..80: mol_type = other DNA
gaaaaagacatacttaaccaacttcatcaaggaatttgtttctttatttaatatacacggggagccattctctatatacg

SEQ ID NO: 62645 - DNA, 80 bp, synthetic construct
  source 1..80: mol_type = other DNA
ggaggtttttgcttactgcagtaggggactgtgcctatctggggccttatgaagatttagcaagtaggctatctgcaaca

SEQ ID NO: 62646 - DNA, 80 bp, synthetic construct
  source 1..80: mol_type = other DNA
caaaccgctataaagcatggctgcccaccgtcactggcatgggtatccattgctttgaatcactggataactcacaccac

SEQ ID NO: 62647 - DNA, 80 bp, synthetic construct
  source 1..80: mol_type = other DNA
gtataatatgttacctggccaaaataatgacccattaccattcttccctaccaacaatagaaatgaaataccagtggaga

SEQ ID NO: 62648 - DNA, 80 bp, synthetic construct
  source 1..80: mol_type = other DNA
tggactttgaaatcgttattatcaggttggatccttcaaatatggctatacatgttgactctcgagatttcatgaataca

SEQ ID NO: 62649 - DNA, 80 bp, synthetic construct
  source 1..80: mol_type = other DNA
tgtgcggaatactagaaagcgacttatcaacaattgcactaactggtttagaagcgggaaatgtcacgtttctaacaaat

SEQ ID NO: 62650 - DNA, 80 bp, synthetic construct
  source 1..80: mol_type = other DNA
atagcaaggaaactatcatctccaatcttgcaaagagaaagtatccaagaccaatacaatgctatagaaaaatgggacct

SEQ ID NO: 62651 - DNA, 80 bp, synthetic construct
  source 1..80: mol_type = other DNA
aagtaggttatcgcagatcgacattctgaggcttaaaatgcttaggtacatatctcttgatagttcggtcacatctgacg

SEQ ID NO: 62652 - DNA, 80 bp, synthetic construct
  source 1..80: mol_type = other DNA
atggtatgggggagaccagtgaaatgaggtcgcgatcacttttaacacctcgtaaattcacaacgagtgggtcactcaat

SEQ ID NO: 62653 - DNA, 80 bp, synthetic construct
  source 1..80: mol_type = other DNA
aggcttaaatcgtataaagattttcaaaatataataacagatgaggataagacaaatgagctatttgagaatttcattag

SEQ ID NO: 62654 - DNA, 80 bp, synthetic construct
  source 1..80: mol_type = other DNA
gcatccagagttattggtcacaaaaggtgaaacatttgaagaatttatcaatacaatattatttaggtataattcaaaga

SEQ ID NO: 62655 - DNA, 80 bp, synthetic construct
  source 1..80: mol_type = other DNA
aattcaaagaatctctgtcaatacaaaatccagcacaactctttattgagcaaatattattttccaataaaccaataatc

SEQ ID NO: 62656 - DNA, 80 bp, synthetic construct
  source 1..80: mol_type = other DNA
gactacactagcatacatgataagatttttggattgcaagatatgccgggaatcgaagaactagatacaatcataggccg

SEQ ID NO: 62657 - DNA, 80 bp, synthetic construct
  source 1..80: mol_type = other DNA
caaaacatttgttgaaagttatgtccagattgtagatgatttaagcaacttaacactggatattaatgatgtcaagacta

SEQ ID NO: 62658 - DNA, 80 bp, synthetic construct
  source 1..80: mol_type = other DNA
tattcgccttctgtctcatgaatgatccactactaattacatctgctaataacataataatgtctgttaaagggcatagc

SEQ ID NO: 62659 - DNA, 80 bp, synthetic construct
  source 1..80: mol_type = other DNA
atcgggccaatcacgctaaacattagcatgcaatggttttttgatatgaaagacttcttatttggcaaattccgggatga

SEQ ID NO: 62660 - DNA, 80 bp, synthetic construct
  source 1..80: mol_type = other DNA
caagagagaataggacaatcagcatgcaaaatgccagaagtcaggagtctgaagcttatacattattcaccagcagttgt

SEQ ID NO: 62661 - DNA, 80 bp, synthetic construct
  source 1..80: mol_type = other DNA
tttgagagcctatgtgagagggccaacaaatgtgccaaatgtagatatagacgagcttgcgagggatctatctcatctgg

SEQ ID NO: 62662 - DNA, 80 bp, synthetic construct
  source 1..80: mol_type = other DNA
aagatttcatacaaagcacaaaactcagagagaatatgagagaaagaatagaaataaatgagaaacggcatttaggaaga

SEQ ID NO: 62663 - DNA, 80 bp, synthetic construct
  source 1..80: mol_type = other DNA
gatttcaagtttgaaatcaaagaattgactagattttaccaagtgtgttacgattatataaaatctacagaacataaaat

SEQ ID NO: 62664 - DNA, 80 bp, synthetic construct
  source 1..80: mol_type = other DNA
taaggtattcatattgccatacaaagttttcacatcaatagaattctgcggcgcactgacagggaacttaataaatgaca

SEQ ID NO: 62665 - DNA, 80 bp, synthetic construct
  source 1..80: mol_type = other DNA
aattgtggtacataacacattacttgaaaaatatagtgtctactacacacaaggcacaaatctcgtcctcacctgaattg

SEQ ID NO: 62666 - DNA, 80 bp, synthetic construct
  source 1..80: mol_type = other DNA
gaattgcaaatagctgatgaagcactgagactaatagcacattttgccgatactttcttggcatctgaatcaagaattca

SEQ ID NO: 62667 - DNA, 80 bp, synthetic construct
  source 1..80: mol_type = other DNA
atttctgaaaaaggttatcgaagaattcacatacaaagggatacctgtaaaacatttatattccaaaataaagaattcca

SEQ ID NO: 62668 - DNA, 80 bp, synthetic construct
  source 1..80: mol_type = other DNA
agttgagggtcaaattcctagggatccttttatggttggatgacctaacacaaaatgatttggacaagtttgatgcagat

SEQ ID NO: 62669 - DNA, 80 bp, synthetic construct
  source 1..80: mol_type = other DNA
aaatcagacgaaaagattatatggaataactggcaagtatctagagacatgaacaccggaccaatagatttaatgataag

SEQ ID NO: 62670 - DNA, 80 bp, synthetic construct
  source 1..80: mol_type = other DNA
tgataaattccatgctataataagtcaaggcgaattcacaatgacattgccatggatcgaagaagatactccagaattgc

SEQ ID NO: 62671 - DNA, 80 bp, synthetic construct
  source 1..80: mol_type = other DNA
tggctattccaggcagctgcggatcacaggggaagatgataaattgattgctgctgaattgcaagtcactagattgtcag

SEQ ID NO: 62672 - DNA, 80 bp, synthetic construct
  source 1..80: mol_type = other DNA
aagatttgatttacagacacggccaggcaatgttaaataaaccgcacggattgaagcttgaaaaaatgcagcctgtaact

SEQ ID NO: 62673 - DNA, 80 bp, synthetic construct
  source 1..80: mol_type = other DNA
gagatgtctaaacaactacattatatcgttttccagcagaggtcaagaaaacggtacttctattctatattgcccaccca

SEQ ID NO: 62674 - DNA, 80 bp, synthetic construct
  source 1..80: mol_type = other DNA
aataattgaagatcataattctagagtcgaatcatctaggttaaacagagattcaaaatgggttcctgtgtgtcctgttg

SEQ ID NO: 62675 - DNA, 80 bp, synthetic construct
  source 1..80: mol_type = other DNA
cagtatcaaaactctatcagcaaggacgacctatactttccaaagttaagaatttgaatatgcagactcattcactttcc

SEQ ID NO: 62676 - DNA, 80 bp, synthetic construct
  source 1..80: mol_type = other DNA
agaatacaggttaatgtagatgaatatgccattacaagaagagcgcatttccagaagatgcctttctttgaaggaccatc

SEQ ID NO: 62677 - DNA, 80 bp, synthetic construct
  source 1..80: mol_type = other DNA
cattccttctggtggcatggatctatcagagttaatgaaatccacatccttactgagcttaaattatgacaatataaaga

SEQ ID NO: 62678 - DNA, 80 bp, synthetic construct
  source 1..80: mol_type = other DNA
atgcttctttattggatatgtctagagtattcaagtgcaatggcagtgaaaatgaccaaatggcttttgagttcctgtca

SEQ ID NO: 62679 - DNA, 80 bp, synthetic construct
  source 1..80: mol_type = other DNA
gatgaaattctagagcaagatgtagttgaagaaatagaatgcaaccctatattttctatcagttatacaaaaagaggaga

SEQ ID NO: 62680 - DNA, 80 bp, synthetic construct
  source 1..80: mol_type = other DNA
atccaatatgacttataaaaatgctttccacaaagctttaatctcagaatgcgacaaatttgaagaagcattcgactttc

SEQ ID NO: 62681 - DNA, 80 bp, synthetic construct
  source 1..80: mol_type = other DNA
ttactcatcctatatacaatgagttcatgaattcaatgccagagtcagagcaggccttgttcaaagaagcattggaattc

SEQ ID NO: 62682 - DNA, 80 bp, synthetic construct
  source 1..80: mol_type = other DNA
ttgacatgggattttgctcgaacgagaaccttagtattttagaggaaatacattggattatcagttatttgaagacgaat

SEQ ID NO: 62683 - DNA, 80 bp, synthetic construct
  source 1..80: mol_type = other DNA
cagtggtccacagaactagacaattgtattcatatgtgtatgtataggaatgggtatgatgcagagtatcatagatttga

SEQ ID NO: 62684 - DNA, 80 bp, synthetic construct
  source 1..80: mol_type = other DNA
tataccttctaaattcctcaaagacccgataaaccgaacaataaattggacagaggttattgagtttatactattaattg

SEQ ID NO: 62685 - DNA, 80 bp, synthetic construct
  source 1..80: mol_type = other DNA
aagatttccaaacaaagattgagccatggtcaagtatgaagtcacatttctgttcaaaagcacacagtgtagcattagag

SEQ ID NO: 62686 - DNA, 80 bp, synthetic construct
  source 1..80: mol_type = other DNA
tgcatgaaaagcgagaaaagatcactggtagaatttgtagacaaaagtaagaaagctgggaaatccaagtttgatttcta

SEQ ID NO: 62687 - DNA, 80 bp, synthetic construct
  source 1..80: mol_type = other DNA
aagcgagaaaagatcactggtagaatttgtagacaaaagtaagaaagctgggaaatccaagtttgatttctaaggtatat

SEQ ID NO: 62688 - DNA, 80 bp, synthetic construct
  source 1..80: mol_type = other DNA
aaatcattcggagcagaaaaatggaatattttcttaaagggagtgatgtctaagtatggtgaatattataaagaatttac

SEQ ID NO: 62689 - DNA, 80 bp, synthetic construct
  source 1..80: mol_type = other DNA
attgcattgccgtgaacctgaaatagcaaaggatatatggcgtgatctattgaatgatcgacacaactacttttctcgag

SEQ ID NO: 62690 - DNA, 80 bp, synthetic construct
  source 1..80: mol_type = other DNA
caaaggacatgcccaatccgtatttttggcaacaggggactatcccaaaccagataaggaccaaatttcagctggctggc

SEQ ID NO: 62691 - DNA, 80 bp, synthetic construct
  source 1..80: mol_type = other DNA
gagagatggtaagtagggtgagctctgaacgtgacatgtcaaatgacataaatcaggaaaaaccaagtatacattttata

SEQ ID NO: 62692 - DNA, 80 bp, synthetic construct
  source 1..80: mol_type = other DNA
tgggcacaaaatgattcaagtagcaataataacatacagaaattaatcaaactatccaaatcattgcaagccatgagtgg

SEQ ID NO: 62693 - DNA, 80 bp, synthetic construct
  source 1..80: mol_type = other DNA
cctcctggtggtgtgttgtattgtttggactactcaaagtgggactccactcagaaccccgcagttacagcagcctcatt

SEQ ID NO: 62694 - DNA, 80 bp, synthetic construct
  source 1..80: mol_type = other DNA
cagttttggccagcttaattcggttcggactaaagcccactgcggcagataaaagtgaagcaattaaacccaccaccaca

SEQ ID NO: 62695 - DNA, 80 bp, synthetic construct
  source 1..80: mol_type = other DNA
ccagtgtttttgaaaagaacgtttacacagacaccacaaggagttagggcattgttagatttgtcctcaatcacaaggca

SEQ ID NO: 62696 - DNA, 80 bp, synthetic construct
  source 1..80: mol_type = other DNA
catttgaccgccaggcgcggggtgctcaattggaaaacgcgctggcatttgcctcccaacacggaccgctagcttttgac

SEQ ID NO: 62697 - DNA, 80 bp, synthetic construct
  source 1..80: mol_type = other DNA
atggagaacatcacatcaggattcctaggacccctactcgtgttacaggcggggtttttcttgttgacaagaatcctcac

SEQ ID NO: 62698 - DNA, 80 bp, synthetic construct
  source 1..80: mol_type = other DNA
gactttattatttacagatttcttttaattattatggtattatcacccctccttaatgctcaaaattatggaataaatct

SEQ ID NO: 62699 - DNA, 80 bp, synthetic construct
  source 1..80: mol_type = other DNA
attacccaactgaagcagcaactcaaatcaatgataattcatggaaggactcactttctcagctatttttaatcaaagga

SEQ ID NO: 62700 - DNA, 80 bp, synthetic construct
  source 1..80: mol_type = other DNA
gattataatttggtattaatgaaatatgacgctacactgcaactagacatgtccgaactagcagatttgttacttaatga

SEQ ID NO: 62701 - DNA, 80 bp, synthetic construct
  source 1..80: mol_type = other DNA
ctataaaggtatgtccactaaatacgcaaacattaggaattgggtgcctaacaactgatacaaacacgtttgaagaagtt

SEQ ID NO: 62702 - DNA, 80 bp, synthetic construct
  source 1..80: mol_type = other DNA
aaaattagtgatcactgacgtcgtagatggaatcaatcataaattgaacgtgacaacaaacacttgtacgattagaaatt

SEQ ID NO: 62703 - DNA, 80 bp, synthetic construct
  source 1..80: mol_type = other DNA
atggaatcaatcataaattgaacgtgacaacaaacacttgtacgattagaaattgtaaaaaattaggaccaagggaaaac

SEQ ID NO: 62704 - DNA, 80 bp, synthetic construct
  source 1..80: mol_type = other DNA
tccgattactggatcaatggacacaccatataccaactctacacgagaagaagtattcctaacttccacattatgtctgt

SEQ ID NO: 62705 - DNA, 80 bp, synthetic construct
  source 1..80: mol_type = other DNA
ttgaggcatacttcaaagactgtttgtttaaagactgggaggagttgggggaggagactagattaatcttgtttgtatta

SEQ ID NO: 62706 - DNA, 80 bp, synthetic construct
  source 1..80: mol_type = other DNA
ttgaggcatacttcaaagactgtttgtttaaagactgggaggagttgggggaggagcttagattaaaggtctttgtactc

SEQ ID NO: 62707 - DNA, 80 bp, synthetic construct
  source 1..80: mol_type = other DNA
tcactggcagaatttgtagacaaaagtaagaaaactgggaaatccaagtttgatttctaaggtatatgcatgtaaaagta

SEQ ID NO: 62708 - DNA, 80 bp, synthetic construct
  source 1..80: mol_type = other DNA
aagagcgagggtggtgattggcctttggcgtatcagtgtatagaaaacattttctgctcttttatcatataattaccaat

SEQ ID NO: 62709 - DNA, 80 bp, synthetic construct
  source 1..80: mol_type = other DNA
caatctaggggccgagataagtcagtcaagatcacagtcaattcaagaaacagagccaggagacagcccggacgcgacaa

SEQ ID NO: 62710 - DNA, 80 bp, synthetic construct
  source 1..80: mol_type = other DNA
tgccagaggggagccattttgcacgtacagctcttgcacgatcagcaatacccaccaccctagctcgtgcaggagagaga

SEQ ID NO: 62711 - DNA, 80 bp, synthetic construct
  source 1..80: mol_type = other DNA
ttggctacaagcttttgaattcgcctacttcaacgggccaaacaaggaactctggaagacctatgatactgtggtctatg

SEQ ID NO: 62712 - DNA, 80 bp, synthetic construct
  source 1..80: mol_type = other DNA
acccggattgcaggtgctggttaatagttctaagaaggctgatgtttacgccatacaacagtacttaaataaccagacaa

SEQ ID NO: 62713 - DNA, 80 bp, synthetic construct
  source 1..80: mol_type = other DNA
acaataaagtacaacttactagcattttcctggttaaagtcactaccagttttcaggttaacaactatttgagctatttc

SEQ ID NO: 62714 - DNA, 80 bp, synthetic construct
  source 1..80: mol_type = other DNA
gaacaatcaagccacaacaagccaacacatctcaaaaacctcgccccgagctagaagctgaagcacaaccacttgatttg

SEQ ID NO: 62715 - DNA, 80 bp, synthetic construct
  source 1..80: mol_type = other DNA
tctggagaggtaactgtgcaaacacggggtaacccgtctggacaattttcaacaactatggacaacaatatggtcaattt

SEQ ID NO: 62716 - DNA, 80 bp, synthetic construct
  source 1..80: mol_type = other DNA
tttgagatgcgcacttccattacaggatccaggtctatgatctctagtgaggaacctgacacccatgaacctggtgatga

SEQ ID NO: 62717 - DNA, 80 bp, synthetic construct
  source 1..80: mol_type = other DNA
atggtgcgacgcactcgatgcaagtgactctcgagtgttgttggaagagacagattatgaagatgaggaagatgaggacg

SEQ ID NO: 62718 - DNA, 80 bp, synthetic construct
  source 1..80: mol_type = other DNA
agtggccagacagcagattggctcagtatcgttatctatctaacatcatttgtggttccaattcttctaaaggctctata

SEQ ID NO: 62719 - DNA, 80 bp, synthetic construct
  source 1..80: mol_type = other DNA
gcaatggttgagtgaaccctgcaaacttcttcctgacacatcggcggtcagcctccttggtggtccggcaacaaacaggg

SEQ ID NO: 62720 - DNA, 80 bp, synthetic construct
  source 1..80: mol_type = other DNA
ttatcagagtatagacaagatttctcctacactcttttccaaacagtttacaggatggcacacggtgagccatattatag

SEQ ID NO: 62721 - DNA, 80 bp, synthetic construct
  source 1..80: mol_type = other DNA
gaacaactaagccacaacaagttgacacatctcaaaaaaaacctcgccccgaactagaagctgaagcacaaccgcttgat

SEQ ID NO: 62722 - DNA, 80 bp, synthetic construct
  source 1..80: mol_type = other DNA
cagattgatagctctttctcgattccaagaggggggtggtgattggcctttggcttatcagtgtatagaaaacattttct

SEQ ID NO: 62723 - DNA, 80 bp, synthetic construct
  source 1..80: mol_type = other DNA
tttggtttcggccattttatagaccagcttctcactaattcatattcagtagattattatgatgaaatagagcaaattgg

SEQ ID NO: 62724 - DNA, 80 bp, synthetic construct
  source 1..80: mol_type = other DNA
attcagaattttatattattccaaggtcccaagagtctaagtgtaatgaatatattaacaatggtctaccaccaattcaa

SEQ ID NO: 62725 - DNA, 80 bp, synthetic construct
  source 1..80: mol_type = other DNA
gaaatagacatgacgaaagaaattaaccaaaagaacgtgagaacgctaaaagagtgggaaaatggaaagaatccttacga

SEQ ID NO: 62726 - DNA, 80 bp, synthetic construct
  source 1..80: mol_type = other DNA
atgactggctgagaagccacagtcagtcatatcgcgtgtggctcaagccttaatcccgtttaaccaatccggtcagcacc

SEQ ID NO: 62727 - DNA, 80 bp, synthetic construct
  source 1..80: mol_type = other DNA
cagaaagaagagataattacggataatcaagaagaagttaagatagctgatgaagttaaaagatctaacaaagaagaatc

SEQ ID NO: 62728 - DNA, 80 bp, synthetic construct
  source 1..80: mol_type = other DNA
cctaaacaactgccaatatatagagcaaatggagagaaggaattacgtaacagatggtattggaaattaaaacgggacac

SEQ ID NO: 62729 - DNA, 80 bp, synthetic construct
  source 1..80: mol_type = other DNA
tactactcaaagacatggctgttgaaaacaagaattctagagatgcgggtaaagttgttgactctgaaactgcggccatt

SEQ ID NO: 62730 - DNA, 80 bp, synthetic construct
  source 1..80: mol_type = other DNA
aacaagaattctagagatgcgggtaaagttgttgactctgaaactgcggccatttgtgattgctatattcaagatgaaga

SEQ ID NO: 62731 - DNA, 80 bp, synthetic construct
  source 1..80: mol_type = other DNA
aagaggaaagtaaaagtataagtaatagtattgaaaataagagtgttacaaaaactcaattatcagaaaaggtattgtct

SEQ ID NO: 62732 - DNA, 80 bp, synthetic construct
  source 1..80: mol_type = other DNA
cacccaactccacacaaacacccacagcatccgagccctccacatcaaactctatctaaagactccagtcatatgcttag

SEQ ID NO: 62733 - DNA, 80 bp, synthetic construct
  source 1..80: mol_type = other DNA
aagattgctcttagaacgtcaaggtgttcatataaagtaatcaagtattgcattgtatcaatttttaacactttgctaaa

SEQ ID NO: 62734 - DNA, 80 bp, synthetic construct
  source 1..80: mol_type = other DNA
ataagttaactactagggaaattgaacaagttgaattgctcaaacgaattcatgatgtgcttataattaaaccagttgat

SEQ ID NO: 62735 - DNA, 80 bp, synthetic construct
  source 1..80: mol_type = other DNA
aatggaggatcccggaatggcgtactttccatatattgcctctgtcctaactgtactattcacgctacataaggcttcaa

SEQ ID NO: 62736 - DNA, 80 bp, synthetic construct
  source 1..80: mol_type = other DNA
ggacagggagctatgtaaatgctttcaagtcattaggaagattaatggatatatcatcagatattaaaaaatatgaatca

SEQ ID NO: 62737 - DNA, 80 bp, synthetic construct
  source 1..80: mol_type = other DNA
ttttgtgggaagttaaaatctctggcaaggtctagtataaaaaaacttgacaggaaaatagagccaattcaaattgggac

SEQ ID NO: 62738 - DNA, 80 bp, synthetic construct
  source 1..80: mol_type = other DNA
attattttgggatcggtaagcacaaatcattttcaaagaaattaaacaatgacataaatactgataagcctaaaatattg

SEQ ID NO: 62739 - DNA, 80 bp, synthetic construct
  source 1..80: mol_type = other DNA
aattttgacaatgatgatatagttaggaaatgcaaagataaatataatcaagtcatacataacctatcccaaatcaatga

SEQ ID NO: 62740 - DNA, 80 bp, synthetic construct
  source 1..80: mol_type = other DNA
ataatacaactaaaactaagtactggcaatgcatcaatgactattccaccctaatgaaaaacatgttagctgtctctcaa

SEQ ID NO: 62741 - DNA, 80 bp, synthetic construct
  source 1..80: mol_type = other DNA
tataatagacacaatacgtttagaattgtctcatgtgcaaacaataatgtattcggtttagtaatgccaagctcagacat

SEQ ID NO: 62742 - DNA, 80 bp, synthetic construct
  source 1..80: mol_type = other DNA
tctactcaacttttaagacagcaacaggatatatttcaatatccaaggcttttaggctggataaagaaagatgccaacgc

SEQ ID NO: 62743 - DNA, 80 bp, synthetic construct
  source 1..80: mol_type = other DNA
atagtatcctctccaggcttgttcctcatgacaagctgcctattattcaacggtaacaagagtttagaatttgataaatt

SEQ ID NO: 62744 - DNA, 80 bp, synthetic construct
  source 1..80: mol_type = other DNA
gtggtaatgacagacttaatcaaaaagggttgctattcagcatatgaacagagaaaaaaagtacaaataagagacataaa

SEQ ID NO: 62745 - DNA, 80 bp, synthetic construct
  source 1..80: mol_type = other DNA
attaacagattatgatataacacaaaagggagtggattccaaaagagatcttaaatctatttggttcccaggaaaggtaa

SEQ ID NO: 62746 - DNA, 80 bp, synthetic construct
  source 1..80: mol_type = other DNA
acctaaaagaatatttaaaccaaatctatctgccattttattttaactctaaaggattacatgaaaaacatcatgtcttg

SEQ ID NO: 62747 - DNA, 80 bp, synthetic construct
  source 1..80: mol_type = other DNA
taaagcaaggaaagttcgcttttgcacacctgataattacttactacatgatggaaagatgtatataatagacttcaaag

SEQ ID NO: 62748 - DNA, 80 bp, synthetic construct
  source 1..80: mol_type = other DNA
taagaagccgggtagaaaatgcaaataatttcaacagatctataacgacaatatctacttttaccagctcaaaatcatgc

SEQ ID NO: 62749 - DNA, 80 bp, synthetic construct
  source 1..80: mol_type = other DNA
attaagattggtgattttgaagaagaaaaaaagagaaaaactaagaatgatacaaagaaacttgcaaaggatatttctaa

SEQ ID NO: 62750 - DNA, 80 bp, synthetic construct
  source 1..80: mol_type = other DNA
attaaccatagccaacccagcattcttagatgaaatcacaaacgaacatgagataaggcattcaacttatgaggacttaa

SEQ ID NO: 62751 - DNA, 80 bp, synthetic construct
  source 1..80: mol_type = other DNA
ataagcgataaggaaacagtcaaactgattctagagaccatgaaaaaacataaaatatttcattttgggttcttcaataa

SEQ ID NO: 62752 - DNA, 80 bp, synthetic construct
  source 1..80: mol_type = other DNA
aggacaaaaaacagccaaagatagagaaatatttttaggtgaatttgaagcaaaaatgtgtctgtaccttgtcgaaaggc

SEQ ID NO: 62753 - DNA, 80 bp, synthetic construct
  source 1..80: mol_type = other DNA
tagccaaagagaggtgcaaattaaaccctgaagaaatgataagtgaaccaggcgactcgaaattaagggtattagagaag

SEQ ID NO: 62754 - DNA, 80 bp, synthetic construct
  source 1..80: mol_type = other DNA
caatcagaagacgaaatcaggtatattagcaatacgataaaaacactagggaatgccatagaaagtttgcaatctggatc

SEQ ID NO: 62755 - DNA, 80 bp, synthetic construct
  source 1..80: mol_type = other DNA
tgtctgtagacgaccgatcttctagaatcacaagggaaaaatataatgagatttttggagaagtattcaatccagaaggt

SEQ ID NO: 62756 - DNA, 80 bp, synthetic construct
  source 1..80: mol_type = other DNA
cccaagatgtactttttaagtatttttggttgatagtacttgatcccatcttgtatcctgctgagaggaaaaggataatt

SEQ ID NO: 62757 - DNA, 80 bp, synthetic construct
  source 1..80: mol_type = other DNA
tatttcctctgtaattatatgcagaaaaggcttataatgcctgatgaattgctcactactatattggatcaaagagttcc

SEQ ID NO: 62758 - DNA, 80 bp, synthetic construct
  source 1..80: mol_type = other DNA
gcaacttgaattatacaagcagttacttacacagctgtagtatgtctgtatacaaagatataataagagaagcagcaaca

SEQ ID NO: 62759 - DNA, 80 bp, synthetic construct
  source 1..80: mol_type = other DNA
attaccagatgacaatataattgaattttgcattaagatattcgagaagatatgcttaacttttggcaatcaggcgaata

SEQ ID NO: 62760 - DNA, 80 bp, synthetic construct
  source 1..80: mol_type = other DNA
tgaagaagacatatctaactaatttcatcaaagagtttgtttctttatttaatatacatggagaaccattttctatatat

SEQ ID NO: 62761 - DNA, 80 bp, synthetic construct
  source 1..80: mol_type = other DNA
gggagatttctactcacagcagtaggagactgtgcctatctagggccttatgaagatttagcaagtaggctatctgcaac

SEQ ID NO: 62762 - DNA, 80 bp, synthetic construct
  source 1..80: mol_type = other DNA
acaaactgctataaagcatggttgtccaccgtcacttgcatgggtatctatcgctctaaatcactggataacccacacta

SEQ ID NO: 62763 - DNA, 80 bp, synthetic construct
  source 1..80: mol_type = other DNA
catataatatgctgcctggccaaaataatgacccgttgccattcttccctactaacaatagaagtgaaataccagtagag

SEQ ID NO: 62764 - DNA, 80 bp, synthetic construct
  source 1..80: mol_type = other DNA
gtagattttgaaattgttattattagattagatccctcaaatatggctatacatgtggactctcgagatttcatgaatac

SEQ ID NO: 62765 - DNA, 80 bp, synthetic construct
  source 1..80: mol_type = other DNA
tatagcaaggaagttatcaaccccaatcttacaaagagaaagtattcaagatcaatataattctatagaaaagtgggatc

SEQ ID NO: 62766 - DNA, 80 bp, synthetic construct
  source 1..80: mol_type = other DNA
tgagtaaattatcacagatcgacattctaaggcttaaaatgctcaggtatatatctcttgatagttcagtcacatctgat

SEQ ID NO: 62767 - DNA, 80 bp, synthetic construct
  source 1..80: mol_type = other DNA
gacggtatgggagagactagtgaaatgagatctcgatcacttttaacgcctcgtaaattcacaacaagtgggtcacttaa

SEQ ID NO: 62768 - DNA, 80 bp, synthetic construct
  source 1..80: mol_type = other DNA
taggttgaaatcatacaaagattttcaagatataatagcagatgaggacaagacaaacgaactatttgagaatttcatta

SEQ ID NO: 62769 - DNA, 80 bp, synthetic construct
  source 1..80: mol_type = other DNA
gacacccagagttactggttacaaaaggcgaaacatttgaagaatttgttaatacgatattatttaggtacaattcaaag

SEQ ID NO: 62770 - DNA, 80 bp, synthetic construct
  source 1..80: mol_type = other DNA
tgactacactagcatacatgacaagatttttggattacaagacatgccaggaattgaagaactagatacaattataggtc

SEQ ID NO: 62771 - DNA, 80 bp, synthetic construct
  source 1..80: mol_type = other DNA
gcaaaacatttgttgagagttatgtccagatcgtagatgacttaagcaatctaacattggatataaacgatgtcaagact

SEQ ID NO: 62772 - DNA, 80 bp, synthetic construct
  source 1..80: mol_type = other DNA
atatttgccttttgtcttatgaatgacccactactgatcacatctgctaacaatataataatgtctgtcaagggacatag

SEQ ID NO: 62773 - DNA, 80 bp, synthetic construct
  source 1..80: mol_type = other DNA
aattgggccgatcacattaaacattagtatgcaatggttttttgacatgaaagacttcttgttcggaaaattccgggatg

SEQ ID NO: 62774 - DNA, 80 bp, synthetic construct
  source 1..80: mol_type = other DNA
tcaaaaaagaataggtcaatcagcatgcaaaatgccagaggtccgaagtctaaaactcatacattactcgccagcagttg

SEQ ID NO: 62775 - DNA, 80 bp, synthetic construct
  source 1..80: mol_type = other DNA
gaagacttcatacaaagtacaaaactcagagaaaatatgagagagagaatagaaataaatgagaagcggcacttagggag

SEQ ID NO: 62776 - DNA, 80 bp, synthetic construct
  source 1..80: mol_type = other DNA
ggatttcaaatttgaaatcaaagaactaactagattttaccaagtgtgttatgattacataaagtctacagaacataaag

SEQ ID NO: 62777 - DNA, 80 bp, synthetic construct
  source 1..80: mol_type = other DNA
ggaattgcaaatagctgatgaggcactaagactagtagcacattttgctgatactttcttggcatcagaatcaaggatac

SEQ ID NO: 62778 - DNA, 80 bp, synthetic construct
  source 1..80: mol_type = other DNA
aatttctgaagaaaattattgaagaattcacatacaaaggaatacctgtaaaacatttatactcaaaaataaagaactcc

SEQ ID NO: 62779 - DNA, 80 bp, synthetic construct
  source 1..80: mol_type = other DNA
aaattgagggttaaatttctagggattcttttatggttagatgatctaacacagaatgatctggataaatttgatgcaga

SEQ ID NO: 62780 - DNA, 80 bp, synthetic construct
  source 1..80: mol_type = other DNA
taaatcagatgaaaagattatatggaataactggcaagtgtcaagagatatgaatactggaccaatagacttaatgataa

SEQ ID NO: 62781 - DNA, 80 bp, synthetic construct
  source 1..80: mol_type = other DNA
gcggttactctaggcagctgcggattactggggaagatgacaaattgattgctgctgaattgcaggttactagattgtca

SEQ ID NO: 62782 - DNA, 80 bp, synthetic construct
  source 1..80: mol_type = other DNA
gaagatttaatttatagacacggtcaggcaatgttgaataagccacatggcttaaagcttgaaaaaatgcaacctgtgac

SEQ ID NO: 62783 - DNA, 80 bp, synthetic construct
  source 1..80: mol_type = other DNA
tgagatgtctaaacgattacattatatcgttttccagcagagatcacggaaacgatacttctattctatattacctaccc

SEQ ID NO: 62784 - DNA, 80 bp, synthetic construct
  source 1..80: mol_type = other DNA
aagtaattgaggaccataattctagagttgaatcatctaggctaagcagagattcaaaatgggttcctgtatgccctgtt

SEQ ID NO: 62785 - DNA, 80 bp, synthetic construct
  source 1..80: mol_type = other DNA
gcaatatcaaaactctaccaacaaggacggcctatactttccaaagttagaaatctgaatatgcagactcattcgctttc

SEQ ID NO: 62786 - DNA, 80 bp, synthetic construct
  source 1..80: mol_type = other DNA
caatcccttctggtggtatggatttatcagagctaatgaaatccacatccctattaagcttgaactatgataacattaaa

SEQ ID NO: 62787 - DNA, 80 bp, synthetic construct
  source 1..80: mol_type = other DNA
aatgcatctttattggacatgtctagggtatttaagtgcaatggcagtgaagatgaccaaatggctttcgaatttctatc

SEQ ID NO: 62788 - DNA, 80 bp, synthetic construct
  source 1..80: mol_type = other DNA
cttactcatcctatatacaatgaattcatgaattcaatgccagaggcagaacaggccctattcaaggaagcattagaatt

SEQ ID NO: 62789 - DNA, 80 bp, synthetic construct
  source 1..80: mol_type = other DNA
cttgacatgggattttgctcgaatgaaaatcttagcattctggaggaaatacattggataatcagttatttgaaaacaaa

SEQ ID NO: 62790 - DNA, 80 bp, synthetic construct
  source 1..80: mol_type = other DNA
tcaatggtctacggaactagataattgtattcacatgtgcatgtacaggaatgggtatgatgcagaatatcataaatttg

SEQ ID NO: 62791 - DNA, 80 bp, synthetic construct
  source 1..80: mol_type = other DNA
gtgtatgaaaaatgagaaaagatcattggcagaatttgtagacagaagtaagaaaactggcaaatctaaatttgacttct

SEQ ID NO: 62792 - DNA, 80 bp, synthetic construct
  source 1..80: mol_type = other DNA
aaaactggcaaatctaaatttgacttctaaggtatacacatgtaaaagtagtgtttgtttctaaataggagcacactact

SEQ ID NO: 62793 - DNA, 80 bp, synthetic construct
  source 1..80: mol_type = other DNA
ctaaaggacatgctcattctatatttctgacaacaggggactaccccaagccagataaaaaccaaatttcagcaggttgg

SEQ ID NO: 62794 - DNA, 80 bp, synthetic construct
  source 1..80: mol_type = other DNA
atgggcacaaaatgattcaagtagcaataataatatacaaaagctaatcaaactatccaaatcactgcaagctatgagcg

SEQ ID NO: 62795 - DNA, 80 bp, synthetic construct
  source 1..80: mol_type = other DNA
tagttatggataacgcagaatatcaacaattccttgctcgtatcaatactgctaaggatgcatgtgtagcgaaggatatc

SEQ ID NO: 62796 - DNA, 80 bp, synthetic construct
  source 1..80: mol_type = other DNA
atgaaactgatatattcaatcctgggtgcttacatggaactttcaaatgcaataatggttatatttctatatcccgggct

SEQ ID NO: 62797 - DNA, 80 bp, synthetic construct
  source 1..80: mol_type = other DNA
atcagactagataaagaacgctgccagagaatagtatcttctcctggcctttttctgacaacatgcctgttatttaaaca

SEQ ID NO: 62798 - DNA, 80 bp, synthetic construct
  source 1..80: mol_type = other DNA
aattacaaaaatctggtcaaaggatctgaccaagcaaacagttaatttacaaatcctaatacattccttatgcaaaaatt

SEQ ID NO: 62799 - DNA, 80 bp, synthetic construct
  source 1..80: mol_type = other DNA
agaagaggaatattgagattgagagtaggaaaaggagattggcaaatcctctgtttgtttcagatgaagaaatagggtta

SEQ ID NO: 62800 - DNA, 80 bp, synthetic construct
  source 1..80: mol_type = other DNA
gaagtaggacactgcaactataatatgttaagagaggcaatgccagagtatagagattacatctcaaccaaagtttttga

SEQ ID NO: 62801 - DNA, 80 bp, synthetic construct
  source 1..80: mol_type = other DNA
taatgactaatcaactacaaactaattgtgtagaaattaagcgtaattggttgcaaggtaactttaactatacaagtagt

SEQ ID NO: 62802 - DNA, 80 bp, synthetic construct
  source 1..80: mol_type = other DNA
tatgttcatagctgtgccatgtctgtatataaagatgttttaaaggaagccatgtcttatcttgatgggtcaattgtagt

SEQ ID NO: 62803 - DNA, 80 bp, synthetic construct
  source 1..80: mol_type = other DNA
atttaaaaatcaaaatggagaaaagaatattagaaaatgaactggagaaaggggccagagacattgtgtttgaattgaaa

SEQ ID NO: 62804 - DNA, 80 bp, synthetic construct
  source 1..80: mol_type = other DNA
gaaatgacaagattctatcaggtttgttatgaatatataaaatcaacagaacataaaataaaggtatttatcttacctgc

SEQ ID NO: 62805 - DNA, 80 bp, synthetic construct
  source 1..80: mol_type = other DNA
aaaggatcctaatccggaagttggattacttaaacaatgacatcttttcattagctaaaataaaagttggcatagatgaa

SEQ ID NO: 62806 - DNA, 80 bp, synthetic construct
  source 1..80: mol_type = other DNA
tatgcagtaataaagaaagcacattttagcaaaatggtatcgtttgatggcccaccaataaaaacaggactattaaattt

SEQ ID NO: 62807 - DNA, 80 bp, synthetic construct
  source 1..80: mol_type = other DNA
ttgcaaagatgatgagaaggtctgaagggagaactaatttagattttagttagataaagtgagtacataaaatatctaga

SEQ ID NO: 62808 - DNA, 80 bp, synthetic construct
  source 1..80: mol_type = other DNA
actaatttagattttagttagataaagtgagtacataaaatatctagacgtaaacttataaaattggccatgttcaaatt

SEQ ID NO: 62809 - DNA, 80 bp, synthetic construct
  source 1..80: mol_type = other DNA
caaagaaagaatacaatgactttgtaacaaaatcggcaaaggaggtctttttagccactggagattacaaacagcccaat

SEQ ID NO: 62810 - DNA, 80 bp, synthetic construct
  source 1..80: mol_type = other DNA
aaaaatgaaatcctagaaggctgggagatgatggttgaaagagtgcatcaacagagggaagttagtaaatccattcatga

SEQ ID NO: 62811 - DNA, 80 bp, synthetic construct
  source 1..80: mol_type = other DNA
cggaaagatggataagcttgccgaccttaactacacattgagtgtaatcactttaatgaatgacacattacattctataa

SEQ ID NO: 62812 - DNA, 80 bp, synthetic construct
  source 1..80: mol_type = other DNA
agcaggaagacggcttttggaaaatagtgaccgagactttgtctataaaattaaaaccttattttaaagcttacggaaca

SEQ ID NO: 62813 - DNA, 80 bp, synthetic construct
  source 1..80: mol_type = other DNA
acaacgccgtagaacgtaaactagtcaactatgctaaaggtaagccgttggaggctgatttaacagcaaacgaacttgac

SEQ ID NO: 62814 - DNA, 80 bp, synthetic construct
  source 1..80: mol_type = other DNA
tacgaaaataataaaataacttctgaattatttcattcagccgaagaatatactgattcattgatggatcctgctatatt

SEQ ID NO: 62815 - DNA, 80 bp, synthetic construct
  source 1..80: mol_type = other DNA
aacttcactatcttcaaatttaaatgcagtcatgttttggttagagcggcattcaaatgatgtttctgatgcaaataaaa

SEQ ID NO: 62816 - DNA, 80 bp, synthetic construct
  source 1..80: mol_type = other DNA
tctataaacgtagactggatttatttaccatagtagcatctacagtaaataagtatggagtacccagacataatgaaaaa

SEQ ID NO: 62817 - DNA, 80 bp, synthetic construct
  source 1..80: mol_type = other DNA
aaggacaaaccgtactatttagtaacctgggccaattcttctatagaaatgcttatgtcagtgttttctcatgaggatta

SEQ ID NO: 62818 - DNA, 80 bp, synthetic construct
  source 1..80: mol_type = other DNA
ccaagccatacaggccaatatccctcgaccccactttcgagtgggtcgttttccgtcgctgctacctcagggtaacacct

SEQ ID NO: 62819 - DNA, 80 bp, synthetic construct
  source 1..80: mol_type = other DNA
gtgtcgggcatgtggggtaaaatactcaaggtgtgcggaggcattacaaccataaccgctgccatacggggtatcaagtg

SEQ ID NO: 62820 - DNA, 80 bp, synthetic construct
  source 1..80: mol_type = other DNA
gctcagagaactgtatgaagaggctgaaagtaaaaggctcgccaagatgtacatggctagggcggcagccctaattgagt

SEQ ID NO: 62821 - DNA, 80 bp, synthetic construct
  source 1..80: mol_type = other DNA
tggcagcaagcagggaagtgactggggttagggagttgaaggagctcctcagttgcttcaccgtcctcatagaggagtgt

SEQ ID NO: 62822 - DNA, 80 bp, synthetic construct
  source 1..80: mol_type = other DNA
gctgaacttctacaaaagtttggcacaagccccctttctggccttatacgcacatatgtgtcagaattggaaacccaagc

SEQ ID NO: 62823 - DNA, 80 bp, synthetic construct
  source 1..80: mol_type = other DNA
aaacaacatcagatccaccatcatgctagacacacctcgtgaggttccagtagtcattatcttgactggaccaccaggta

SEQ ID NO: 62824 - DNA, 80 bp, synthetic construct
  source 1..80: mol_type = other DNA
ttggtaagacacggttggcccagtttataggggaaaaatttggtaaagtgtccaacttcagtgttgcagtggatcaccat

SEQ ID NO: 62825 - DNA, 80 bp, synthetic construct
  source 1..80: mol_type = other DNA
taggaccccccctaggagggagtttgtggaggagggtctccttgacgcgtttaacagcaagccagtggttgaacctaatg

SEQ ID NO: 62826 - DNA, 80 bp, synthetic construct
  source 1..80: mol_type = other DNA
aaagacctttgtctatgctaaccgtggtgtgtgtgacgttttcccaaaccctgcctcccgtgacatcacagagacatctg

SEQ ID NO: 62827 - DNA, 80 bp, synthetic construct
  source 1..80: mol_type = other DNA
agggcattctctttagagaactctttggggtggacttgcaggaacagtttccaatgtcaattcatgacctcgccaaatta

SEQ ID NO: 62828 - DNA, 80 bp, synthetic construct
  source 1..80: mol_type = other DNA
ttgggtatctttgtgaggtggtggcagaatttgccctacattttggtccattaatcttggcagcaaccaacatagcttac

SEQ ID NO: 62829 - DNA, 80 bp, synthetic construct
  source 1..80: mol_type = other DNA
ctgtgctcaagaggcaatcgggatgaggaagccaaagggaagtcaaaacatggcagaggagccaaacacgcacatcgtgg

SEQ ID NO: 62830 - DNA, 80 bp, synthetic construct
  source 1..80: mol_type = other DNA
acttcctcatgctacgggagcgcagcgctctcggtatggatgacgaagacgtggcacgctacagagcatggctagaaatt

SEQ ID NO: 62831 - DNA, 80 bp, synthetic construct
  source 1..80: mol_type = other DNA
caaggtgaggcggtggatgccttgcgtaatcctggacatcaattacgtaggaaatacacaacacaaaccctaaagaaact

SEQ ID NO: 62832 - DNA, 80 bp, synthetic construct
  source 1..80: mol_type = other DNA
acaaaaggtagttaaagagctgcctgtggagagtgaatttcactggaagggcctcccagtcatcaaatctgacctggata

SEQ ID NO: 62833 - DNA, 80 bp, synthetic construct
  source 1..80: mol_type = other DNA
ggttaccaaaatcacaagggtggtacctgtccaggccaccctacaagacatgcatgagcggcgcgattttgaaagggaac

SEQ ID NO: 62834 - DNA, 80 bp, synthetic construct
  source 1..80: mol_type = other DNA
gtgccgacttgttcaaagaactacccctgctagatgaagagataacacaaaaacccaagacatatttttattcaatgtgg

SEQ ID NO: 62835 - DNA, 80 bp, synthetic construct
  source 1..80: mol_type = other DNA
gggatccgggcgtgctccctcacgctttcgttgatgctcgtatcactgatccagtatcatttatgatccctgatgtgaga

SEQ ID NO: 62836 - DNA, 80 bp, synthetic construct
  source 1..80: mol_type = other DNA
cgtcaagttgtgaagaaaggtaaaacctacttcatgccactcgtaaagacaaatgggtgggttagtaaaatcacaaaaat

SEQ ID NO: 62837 - DNA, 80 bp, synthetic construct
  source 1..80: mol_type = other DNA
cactgaccccatcaaagatttcatcatagctttttgccaggcagtccaacaagagatggggacggatccacggtatttgc

SEQ ID NO: 62838 - DNA, 80 bp, synthetic construct
  source 1..80: mol_type = other DNA
agctggcttggattcaaaagctaaagccaaccgtgctcaccatcatcctacaacaacacaaaaacaccgtgtcagggtgg

SEQ ID NO: 62839 - DNA, 80 bp, synthetic construct
  source 1..80: mol_type = other DNA
cgggaaacatttgtagaggatttcaaagaattagaatattatttcaccacgcgcttgtgcgcgtggttaaagcgtgtcac

SEQ ID NO: 62840 - DNA, 80 bp, synthetic construct
  source 1..80: mol_type = other DNA
ttggcgacactaacagctctagtggaagtttactccaacctttttgatgatttgcgcaagtctgccgttaccatcatatc

SEQ ID NO: 62841 - DNA, 80 bp, synthetic construct
  source 1..80: mol_type = other DNA
ggcactaagtgctttcttcgatgtgtgtaaggacttcattgctagtgttgttgacttgattaaaaccacattcacacctc

SEQ ID NO: 62842 - DNA, 80 bp, synthetic construct
  source 1..80: mol_type = other DNA
agggccccactgatcttggatggaccgcagttgcggctggagcagtcatgattctactaaaggcttctggttgccctggt

SEQ ID NO: 62843 - DNA, 80 bp, synthetic construct
  source 1..80: mol_type = other DNA
acaaaagaaattaatcaaaagaatgtgagaacgctagaagagtgggaggatggaaaaaatccttatgaactaaaagaagt

SEQ ID NO: 62844 - DNA, 80 bp, synthetic construct
  source 1..80: mol_type = other DNA
ctggctaagaagccatagtcagccatatcgcgtgtggcttaagccttaatcccgtttaaccaatccggtcagcaccggac

SEQ ID NO: 62845 - DNA, 80 bp, synthetic construct
  source 1..80: mol_type = other DNA
gtggactttatccagcccaaatcaaggcacggcaaatgatcagccctgtaatgagtgtcataggatttatggcactggct

SEQ ID NO: 62846 - DNA, 80 bp, synthetic construct
  source 1..80: mol_type = other DNA
aaggactggagcgaacggatagagcaatggttgagtgaaccctgcaaacttcttcctgacacatcggcagtcagcctcct

SEQ ID NO: 62847 - DNA, 80 bp, synthetic construct
  source 1..80: mol_type = other DNA
tggtggtccggcaacaaacaaggattacctgcggcaaaggcagattgccttaggcaacatggaaaccaaagattcaaaag

SEQ ID NO: 62848 - DNA, 80 bp, synthetic construct
  source 1..80: mol_type = other DNA
caatacgccaacaagctgaggctgcaggctgcagcatgattgaggacattgattcaccatcatcaatttgggtctttgcc

SEQ ID NO: 62849 - DNA, 80 bp, synthetic construct
  source 1..80: mol_type = other DNA
agtagtgtactcctatataaagaaattacaaaccaaaccaagaacaatatggaggaccaaatgcatgatcaattcctcaa

SEQ ID NO: 62850 - DNA, 80 bp, synthetic construct
  source 1..80: mol_type = other DNA
acagtctatcattgagccttcaacttggacagactcattaaaagcaattggcaaaagtatggatatagatggcaacgttg

SEQ ID NO: 62851 - DNA, 80 bp, synthetic construct
  source 1..80: mol_type = other DNA
gagcatatgagaatctctgcttggaaaggaagttgatagccagatcaacaggaaaaaagatagacaataagaggctagaa

SEQ ID NO: 62852 - DNA, 80 bp, synthetic construct
  source 1..80: mol_type = other DNA
gccattaaaataggaaatgcattagtgctttgggagcaacaatttatcttggcaaatgatcttttcaaaggacaagaaag

SEQ ID NO: 62853 - DNA, 80 bp, synthetic construct
  source 1..80: mol_type = other DNA
acaaaaattcctcaagaatttcttaggtattgggaaacacaaaaatttcaaggacaaaactacaaccgatctagaactag

SEQ ID NO: 62854 - DNA, 80 bp, synthetic construct
  source 1..80: mol_type = other DNA
ataagccaaagatattagacttcaacaataccattgtcctgatggcagcaaggtcaatgataaacaaaaacaaaacattc

SEQ ID NO: 62855 - DNA, 80 bp, synthetic construct
  source 1..80: mol_type = other DNA
ttggcacaaactaatacattggaaaatctacatccaataatgggagtattctcagaccagataaaagaggcttcagaaga

SEQ ID NO: 62856 - DNA, 80 bp, synthetic construct
  source 1..80: mol_type = other DNA
tacattcaacacactaaaaaagattaataaaacatgtttttggcaatgcataacagacatctcaatgttaatgagaaata

SEQ ID NO: 62857 - DNA, 80 bp, synthetic construct
  source 1..80: mol_type = other DNA
gtcgagaactctgtgcctcaataggcatagagtttagaaacaacgttctcttagatgagatcatcctggatgttgcacct

SEQ ID NO: 62858 - DNA, 80 bp, synthetic construct
  source 1..80: mol_type = other DNA
ttctttcagtatcacaatataacaggcataatactttcagagtagctatgtgtgcaaatgactctatgtatgccctcgtg

SEQ ID NO: 62859 - DNA, 80 bp, synthetic construct
  source 1..80: mol_type = other DNA
ttcccttcttcagatatcaagacaaaaagagcaacagttgttttctcagtagtctgtattcatcaagaaaagcaatctat

SEQ ID NO: 62860 - DNA, 80 bp, synthetic construct
  source 1..80: mol_type = other DNA
tatggatgcaggtgccttatttacaactttagaattaaaaacaaaaaactttatatctattagcaaggctattaggctgg

SEQ ID NO: 62861 - DNA, 80 bp, synthetic construct
  source 1..80: mol_type = other DNA
ataaagaaagatgccagagagtagtatcatccccaggcttattccttctaagtgctctattattgtataataataaccca

SEQ ID NO: 62862 - DNA, 80 bp, synthetic construct
  source 1..80: mol_type = other DNA
aacatatctcttgtagatgttttaaattttgcattttatacaagtttatctataactaaaagtatgttatctttaactga

SEQ ID NO: 62863 - DNA, 80 bp, synthetic construct
  source 1..80: mol_type = other DNA
accatctagatatatgataatgaactctttagccatctccagtcatgtgaaagattatatatctgaaaagttctcaccct

SEQ ID NO: 62864 - DNA, 80 bp, synthetic construct
  source 1..80: mol_type = other DNA
atactaagacactttttagtgtctatatggtaaatttaatcaagagaggttgtagctctgccaatgaacaatccagcaaa

SEQ ID NO: 62865 - DNA, 80 bp, synthetic construct
  source 1..80: mol_type = other DNA
atacagttgaggaatatttatctttcagattatgaaataacacagaaaggtgtgaacgatgagaggaacttggaatctat

SEQ ID NO: 62866 - DNA, 80 bp, synthetic construct
  source 1..80: mol_type = other DNA
atggttccctggtaaagtaaacctcaaagaatatatcaatcagatttacttacctttttattttaacgcaaaaggccttc

SEQ ID NO: 62867 - DNA, 80 bp, synthetic construct
  source 1..80: mol_type = other DNA
atgaaaagcatcatgttatgatagacctagccaagacagttcttgaaatagaaatgactcagaggatggatgacttgggc

SEQ ID NO: 62868 - DNA, 80 bp, synthetic construct
  source 1..80: mol_type = other DNA
ggaattaacctgatgaactttaatataccaaatgttacacctgataattacatctgggacgatgatttcctaattataat

SEQ ID NO: 62869 - DNA, 80 bp, synthetic construct
  source 1..80: mol_type = other DNA
atatggtctaagcatgggaagaaacaacatgttaatctaccaatattgattcattccctagctaaatcattaattttaga

SEQ ID NO: 62870 - DNA, 80 bp, synthetic construct
  source 1..80: mol_type = other DNA
cacttccagacataatcatctgagaaacagagtggaaagccgtaacaatttcaagagaagtataacaaccattagtacat

SEQ ID NO: 62871 - DNA, 80 bp, synthetic construct
  source 1..80: mol_type = other DNA
ttaccagctcaaaatcatgcattaagattggagattttagggagatcaaggcaaaaaacctagctacatcagtaaaatct

SEQ ID NO: 62872 - DNA, 80 bp, synthetic construct
  source 1..80: mol_type = other DNA
caacagaaagcttgtgagaagtatcgcttatcgaatcctttatttttagtggatgaggaatctacattagaaaccagaca

SEQ ID NO: 62873 - DNA, 80 bp, synthetic construct
  source 1..80: mol_type = other DNA
ttgcagctatgaagatttagttgcaaagatcccgaattataaagattacatttctgttaaagtatttgacagattatatg

SEQ ID NO: 62874 - DNA, 80 bp, synthetic construct
  source 1..80: mol_type = other DNA
agttattcaaattaaaagaattagatgataggccatttatagatcaggctatggagatgatgcaaaagcataaggacttt

SEQ ID NO: 62875 - DNA, 80 bp, synthetic construct
  source 1..80: mol_type = other DNA
tcatttacattttttaataaagggcaaaagacagcaaaggacagagaaatatttgtaggtgagtttgaagcaaaaatgtg

SEQ ID NO: 62876 - DNA, 80 bp, synthetic construct
  source 1..80: mol_type = other DNA
tatgtatgttatagagagaatttctaaagaaagatgtaagttaaatacagatgaaatgattagtgaaccaggagattcaa

SEQ ID NO: 62877 - DNA, 80 bp, synthetic construct
  source 1..80: mol_type = other DNA
aattgaggatcttagagaaaaaagcagaggaagagataagatacatcgtggagaaaacgaaggatagtattcagaaaggt

SEQ ID NO: 62878 - DNA, 80 bp, synthetic construct
  source 1..80: mol_type = other DNA
gatcctacaaaagcattgaaactagagattaatgctgatatgtcgaaatggagtgcgcaagacgttttctataagtattt

SEQ ID NO: 62879 - DNA, 80 bp, synthetic construct
  source 1..80: mol_type = other DNA
ggattacaaagtctcagtagggaatgatagtacagaaataacatacaaaaaatatacaaccctgatattaccagttatgg

SEQ ID NO: 62880 - DNA, 80 bp, synthetic construct
  source 1..80: mol_type = other DNA
ttggcttatagttttggatccaatactttacccaaatgagaaaaagaggatgttatttttcatgtgtaattatatgcaga

SEQ ID NO: 62881 - DNA, 80 bp, synthetic construct
  source 1..80: mol_type = other DNA
aagtgctgatcttaccagatgatttgctatccaacatattggatcaaaaaactccatacaacaatgatttaattctaaac

SEQ ID NO: 62882 - DNA, 80 bp, synthetic construct
  source 1..80: mol_type = other DNA
tcaactaatggtttaaatgccaactttgtaaacataaaaagaaattggttacaagggaattttaattatatctctagcta

SEQ ID NO: 62883 - DNA, 80 bp, synthetic construct
  source 1..80: mol_type = other DNA
tgtacatagttgtgcaatgatggtttacaaagatattttcaaagaaactatgaagttgctggacggagattgtctggtaa

SEQ ID NO: 62884 - DNA, 80 bp, synthetic construct
  source 1..80: mol_type = other DNA
attctatggttcattcggacgacaaccagacatcccttgccatcatgcaaaataaagtcaaagatgacatggttatacaa

SEQ ID NO: 62885 - DNA, 80 bp, synthetic construct
  source 1..80: mol_type = other DNA
tttgctgcacatacatttgaatctgtctgtctcacctttggatgccaggcaaatatgaaaaaaacatatataacccatac

SEQ ID NO: 62886 - DNA, 80 bp, synthetic construct
  source 1..80: mol_type = other DNA
atgtaaagagtttgtgtcactttttaacttacatggtgagccattgtctatatatgggagattcttactacctagtgtag

SEQ ID NO: 62887 - DNA, 80 bp, synthetic construct
  source 1..80: mol_type = other DNA
gagattgtgcatatatagggccatatgaagatctggcaagtaggctatcagccacacaacaaagcataaagcatgggtgc

SEQ ID NO: 62888 - DNA, 80 bp, synthetic construct
  source 1..80: mol_type = other DNA
ccacctagcttagcatggcttgcaataagctgcagccattggataactcatctaacatataacatgctagatgagcaagt

SEQ ID NO: 62889 - DNA, 80 bp, synthetic construct
  source 1..80: mol_type = other DNA
gaattgcccaacaaatcatttaccatttacaaatagaaaggatataccagttgagctaaatggctatatcaatgcgccat

SEQ ID NO: 62890 - DNA, 80 bp, synthetic construct
  source 1..80: mol_type = other DNA
agcagataggtataccaactgaaatagcaatcataagggcaaatcctgtgacatatcaaatcagtataataggtgaaaat

SEQ ID NO: 62891 - DNA, 80 bp, synthetic construct
  source 1..80: mol_type = other DNA
tataccttatatcattagtaggccttgaagctggcaacctatggtttcttatagagatgttgaagaaattggtaccaatt

SEQ ID NO: 62892 - DNA, 80 bp, synthetic construct
  source 1..80: mol_type = other DNA
gataagcaaagagaaacaatacagactcaatgccagtggctagctcacttaggtaatctaacagaatcagaaaaatttag

SEQ ID NO: 62893 - DNA, 80 bp, synthetic construct
  source 1..80: mol_type = other DNA
attcaaaattctaagatatctgacacttgacacagaagtaagtacagactcgaacatgggggagaccagtgacatgagaa

SEQ ID NO: 62894 - DNA, 80 bp, synthetic construct
  source 1..80: mol_type = other DNA
gtaggtccttgttgacaccaagaaagttcaccactccaggatcattaaataaattagtttcatatctagacttcaaaaat

SEQ ID NO: 62895 - DNA, 80 bp, synthetic construct
  source 1..80: mol_type = other DNA
tctatgtcgaatgatgattataaagaaacattgagttatatgttacaaaatccagagctattagttacaaaaggtgagaa

SEQ ID NO: 62896 - DNA, 80 bp, synthetic construct
  source 1..80: mol_type = other DNA
taaagaacaatttatgacatcagtattgtatcgttacaattccaagcgatttaaagaaagtctatctatccagaatccag

SEQ ID NO: 62897 - DNA, 80 bp, synthetic construct
  source 1..80: mol_type = other DNA
ctcaattatttatagagcaagtacttttctcccataaaccaatcattgattatagcagtatctttgataagttgagttct

SEQ ID NO: 62898 - DNA, 80 bp, synthetic construct
  source 1..80: mol_type = other DNA
ttagtggaatctgacataattgctgatttgccggaaatcatcggtagggtcacatttccacaagcataccagatgatagt

SEQ ID NO: 62899 - DNA, 80 bp, synthetic construct
  source 1..80: mol_type = other DNA
tagggacatcaatcatctacccttagatctggaagacataagtatagtgtataaatactgtatattaaatgacccactga

SEQ ID NO: 62900 - DNA, 80 bp, synthetic construct
  source 1..80: mol_type = other DNA
tgataactgcagcaaacacttctctactgtgtgtcaaagggacaccacaagataggaatggattgagtgctaaccagatg

SEQ ID NO: 62901 - DNA, 80 bp, synthetic construct
  source 1..80: mol_type = other DNA
tttaaagctaaatatccaaatatacccatacagctagatttttcaaagttttttgagttgaggaaattattactggacaa

SEQ ID NO: 62902 - DNA, 80 bp, synthetic construct
  source 1..80: mol_type = other DNA
ccagaattcagaaatatgaaattaatacatcattctcctgcattggtattaaaagccttcagtaaagggacaactgatct

SEQ ID NO: 62903 - DNA, 80 bp, synthetic construct
  source 1..80: mol_type = other DNA
acccggtgctgagccaacagagcttgagaaagacttacaccatttgaatgagtttttagaaaccactggtatcaaagaaa

SEQ ID NO: 62904 - DNA, 80 bp, synthetic construct
  source 1..80: mol_type = other DNA
aaatagggcaaaatatggacaacccacccaagcatttaactgggatggaaattacaatgtacaagatcagagaattaaca

SEQ ID NO: 62905 - DNA, 80 bp, synthetic construct
  source 1..80: mol_type = other DNA
aagttgtatcaattgtgctatgattatataaaatctactgaacacaaggtcaaagtctttatattgccaatgaaagcata

SEQ ID NO: 62906 - DNA, 80 bp, synthetic construct
  source 1..80: mol_type = other DNA
tacatctgtggacttttgcacattaattcagggtaatactatttctgacgataaatggttcacgatgcattatttgaaac

SEQ ID NO: 62907 - DNA, 80 bp, synthetic construct
  source 1..80: mol_type = other DNA
aaattctaagtggatcagcaaagggcaatatagtaactacaagtacaactgagcaaattatagcaaatgaatgttttagg

SEQ ID NO: 62908 - DNA, 80 bp, synthetic construct
  source 1..80: mol_type = other DNA
gtattgacacattttgcagattcatttgtggaggaggcaagtcgtttgagttttatcacagaggtagtagataatttttc

SEQ ID NO: 62909 - DNA, 80 bp, synthetic construct
  source 1..80: mol_type = other DNA
atataagaacataccagttaattcattatacaatacaattttaggaagcaatttaagattggattttatcccattacttt

SEQ ID NO: 62910 - DNA, 80 bp, synthetic construct
  source 1..80: mol_type = other DNA
ttagaatgcaagcactgacacaggcagatttgaacaaatttgatgctctaaaaacaaatgaaagagtgtcctggaacaat

SEQ ID NO: 62911 - DNA, 80 bp, synthetic construct
  source 1..80: mol_type = other DNA
tggcagactaatagatctcttaattcgggtgtcatagatttaacaatctcaggttacctaaggtctataagaattgttgg

SEQ ID NO: 62912 - DNA, 80 bp, synthetic construct
  source 1..80: mol_type = other DNA
gttcgcagatgatgaggagtttctacttatgattgctcatggtgattttacactgacagcaccatggtgtatggatgata

SEQ ID NO: 62913 - DNA, 80 bp, synthetic construct
  source 1..80: mol_type = other DNA
tgaagataaaatattaaagattgcagagttaacaataccgaatttttacccaaatacagttttccatgcggggaataaac

SEQ ID NO: 62914 - DNA, 80 bp, synthetic construct
  source 1..80: mol_type = other DNA
tattgaattctagacatggtttgaagttcgagtttatgtcagagcaagttctagatgataaatttaattattatattaca

SEQ ID NO: 62915 - DNA, 80 bp, synthetic construct
  source 1..80: mol_type = other DNA
taccaaaaaaaacgcgcccatatatatacatatcaagtatcgacaatagaacatatatatagaagaaaccaggaaggcct

SEQ ID NO: 62916 - DNA, 80 bp, synthetic construct
  source 1..80: mol_type = other DNA
tactgctagaggaaatagatacaatcgaatggtcccagtgtgcccagttgtactgtcagttcgagatgaattgttccgaa

SEQ ID NO: 62917 - DNA, 80 bp, synthetic construct
  source 1..80: mol_type = other DNA
tgagtatgaacaatgtttttagtttaaatatgaccaattttagtatgtccaggttatacatctcaccagatgaaatggca

SEQ ID NO: 62918 - DNA, 80 bp, synthetic construct
  source 1..80: mol_type = other DNA
actataaagaaagctcatatgtcaaaaatgatgttctttaatgggccagacataaaggcaggtataataaatctaacagc

SEQ ID NO: 62919 - DNA, 80 bp, synthetic construct
  source 1..80: mol_type = other DNA
tctaatgaggacacaagagctcctatcattaaattatgataatatttgtaaatccagtatagttccattttgtagaatac

SEQ ID NO: 62920 - DNA, 80 bp, synthetic construct
  source 1..80: mol_type = other DNA
tttcatgtgaagggagtgaagataatggggaattaatatttctatcagatgaagtgatggattttacaatatctgaagaa

SEQ ID NO: 62921 - DNA, 80 bp, synthetic construct
  source 1..80: mol_type = other DNA
atagaatctatgccaatattcactattaaatatcaaaaaaggggaaatgagaaaatgacatataaaaatgcaatatctaa

SEQ ID NO: 62922 - DNA, 80 bp, synthetic construct
  source 1..80: mol_type = other DNA
attagtctcacatggtgttgaagaaatcacaacagtctttgacttttctaaagatgggttctattcgaagaaaaaccttg

SEQ ID NO: 62923 - DNA, 80 bp, synthetic construct
  source 1..80: mol_type = other DNA
ctccagaattgtatgaccacccaatttataaagaattcataggatccatgccccctagatttgtgaacttatttgatgaa

SEQ ID NO: 62924 - DNA, 80 bp, synthetic construct
  source 1..80: mol_type = other DNA
ggataataaataccctatgctcaataataaatctactggaaacaaatgagtggtcgtcgattcttttaaattcatttcat

SEQ ID NO: 62925 - DNA, 80 bp, synthetic construct
  source 1..80: mol_type = other DNA
attgctatgttgctagagggaatggacagggaatttcacctcttttccctaccatctgcttttttcaataatgtagcctc

SEQ ID NO: 62926 - DNA, 80 bp, synthetic construct
  source 1..80: mol_type = other DNA
tgggaacataaactggacaaaacttttaaaattcataaaatccctcccaaaaatccacaatgagccttggtcaatgatga

SEQ ID NO: 62927 - DNA, 80 bp, synthetic construct
  source 1..80: mol_type = other DNA
tggagaggtttatagaaaagacaatatatttaatagaaaaggagttgaataaggaggccaattttagtgatttcctagat

SEQ ID NO: 62928 - DNA, 80 bp, synthetic construct
  source 1..80: mol_type = other DNA
gagctagagttccagacagggaaatcaatgtttagttttttctagatttaaaacgttctcatattaacccctaattggac

SEQ ID NO: 62929 - DNA, 80 bp, synthetic construct
  source 1..80: mol_type = other DNA
ctaattggacatcttcaaaagcctatatggcacaaaaaaacagcaaatttatcaatttctttatataggagcacactact

SEQ ID NO: 62930 - DNA, 80 bp, synthetic construct
  source 1..80: mol_type = other DNA
gccatttcattcagtgcctattctgctgaacgctggaacagcctgttgtacactgcaaaagcaaagacagaacaagatta

SEQ ID NO: 62931 - DNA, 80 bp, synthetic construct
  source 1..80: mol_type = other DNA
gaggattcagtcagctaaaacagccactgtagcaaaggacatcagcactgacatcttggaagcacgtcatgattattttg

SEQ ID NO: 62932 - DNA, 80 bp, synthetic construct
  source 1..80: mol_type = other DNA
tcaagagttcctctcagaaaagtcacatgctatatttaacatgaatggtgaatatatgaaacctacgcaatctgaaattg

SEQ ID NO: 62933 - DNA, 80 bp, synthetic construct
  source 1..80: mol_type = other DNA
ataaaggctgggaattaatgagccgaagaatttctgaagaaagagatatcataacagatataaataaacagaagccgtcc

SEQ ID NO: 62934 - DNA, 80 bp, synthetic construct
  source 1..80: mol_type = other DNA
atacattttatatgggcaaaaaatgctaataggaaactaagtggtgcaactgcaaagctcatatttttgtcaaactcttt

SEQ ID NO: 62935 - DNA, 80 bp, synthetic construct
  source 1..80: mol_type = other DNA
ggttcataggtggtacaggtctggtgcaagatggccccagtgaagagaccaccaaattagtgtttgaaatggagggcaat

SEQ ID NO: 62936 - DNA, 80 bp, synthetic construct
  source 1..80: mol_type = other DNA
acagtagtgcgttttacgtctaatggtgtaagcatgaaagtattagctttaagacacagtgtggctcaggtgtatgcaga

SEQ ID NO: 62937 - DNA, 80 bp, synthetic construct
  source 1..80: mol_type = other DNA
agggataaattatttccagctatcatgaacatacataaaaaagtgataaatgttggtccggatgcattttttttgttaaa

SEQ ID NO: 62938 - DNA, 80 bp, synthetic construct
  source 1..80: mol_type = other DNA
agtagtgtactcctatttaacaaaacttacaaattacaaataattgctttaaatatagctatggataacacagaatatca

SEQ ID NO: 62939 - DNA, 80 bp, synthetic construct
  source 1..80: mol_type = other DNA
atcaaagtcacttcaatctataaaaggcaactcaacatatactgagtctttcaaatcattagggaaaatgatggatatcg

SEQ ID NO: 62940 - DNA, 80 bp, synthetic construct
  source 1..80: mol_type = other DNA
gtgacaagataacagattatgagtcacactgtgattacttaaaaacacaagcaagattgagctggcgacaagttatgaac

SEQ ID NO: 62941 - DNA, 80 bp, synthetic construct
  source 1..80: mol_type = other DNA
aagaaattagagccaaaaaagataaatgatgctttagtcctttgggagcagcaatttatggtaaattcagagcttataaa

SEQ ID NO: 62942 - DNA, 80 bp, synthetic construct
  source 1..80: mol_type = other DNA
taaaaatgacaaacttaaactctttagggatttttgcggtataggcaaacacaaacaattcaaaaacaaaatgttagaag

SEQ ID NO: 62943 - DNA, 80 bp, synthetic construct
  source 1..80: mol_type = other DNA
atattgaactatcaaagcccaaaatattggatttcaatgatgagaacatttatttggcaagtctaaccatgattgaacaa

SEQ ID NO: 62944 - DNA, 80 bp, synthetic construct
  source 1..80: mol_type = other DNA
tgtaaaattatgttatcagaacaaagtggcctgaaaagcaacaattttatattagatgagtttggaaagaaaatagggga

SEQ ID NO: 62945 - DNA, 80 bp, synthetic construct
  source 1..80: mol_type = other DNA
ttgtaacaaaaatacattggatatcatgacttctatttttgagactaggttctggcagtgtatttctgatttttcaacac

SEQ ID NO: 62946 - DNA, 80 bp, synthetic construct
  source 1..80: mol_type = other DNA
atgattattttgggaaagagttgtgcaaatcactaaatatagaatatagaaatgatgtcccgtttgtagatatactacta

SEQ ID NO: 62947 - DNA, 80 bp, synthetic construct
  source 1..80: mol_type = other DNA
taatgaaaaacattttgtcagtatcacaatataatagacataatacatttagaatagcaatgtgtgcgaataacaatttg

SEQ ID NO: 62948 - DNA, 80 bp, synthetic construct
  source 1..80: mol_type = other DNA
tttgcactagtctacccatccgcagatataaagacaaagaaagcaactgtagtttatagcataattgcccttcataaaaa

SEQ ID NO: 62949 - DNA, 80 bp, synthetic construct
  source 1..80: mol_type = other DNA
tgaggctgatgtcttcaaccctgggtgtttgcatgggactttcaaatgcaacaatggctatatctcgatatctagagcaa

SEQ ID NO: 62950 - DNA, 80 bp, synthetic construct
  source 1..80: mol_type = other DNA
ttagattagataaagaacgttgccaaagaatagtatcttctcctggccttttcttgacaacatgccttttattcaaacat

SEQ ID NO: 62951 - DNA, 80 bp, synthetic construct
  source 1..80: mol_type = other DNA
gaaaatccgactgttagattagaagatgttatgacattttctctattcactagcttatctataacaaaaagtgtgttgtc

SEQ ID NO: 62952 - DNA, 80 bp, synthetic construct
  source 1..80: mol_type = other DNA
cttaactgagcctgcacgttatatgataatgaattccctagccatttcaagtaatgttaaagattatattgctgagaagt

SEQ ID NO: 62953 - DNA, 80 bp, synthetic construct
  source 1..80: mol_type = other DNA
tttcaccttacactaaaacactctttagtgtttatatgactagactaataaaaaatgcatgttttgaggcttacaatcag

SEQ ID NO: 62954 - DNA, 80 bp, synthetic construct
  source 1..80: mol_type = other DNA
cggcaaaaagtccagctcagagatatttacttgtcagattatgatataactcagaaaggtattaaagataatagagaatt

SEQ ID NO: 62955 - DNA, 80 bp, synthetic construct
  source 1..80: mol_type = other DNA
aacaagcatatggttccctggtagtgtaacacttaaagagtatctaacacaaatttacttgccattctatttcaatgcca

SEQ ID NO: 62956 - DNA, 80 bp, synthetic construct
  source 1..80: mol_type = other DNA
aaggtctgcatgagaagcatcatgttatggtagacttagctaaaacaatcctagaaatagagaatgaacagagaaacgaa

SEQ ID NO: 62957 - DNA, 80 bp, synthetic construct
  source 1..80: mol_type = other DNA
gatataagacctgatatagatcctttgactttagatatcccccatataactccagataactacttatatttagacaatat

SEQ ID NO: 62958 - DNA, 80 bp, synthetic construct
  source 1..80: mol_type = other DNA
atcacaaagatttggtcaaaagatctaactaagcagactgtcaatttgcagatcctgatacattcattatgtaagaatct

SEQ ID NO: 62959 - DNA, 80 bp, synthetic construct
  source 1..80: mol_type = other DNA
acttgctgacacttctaggcataatcatttgaggaatagaattgaaaataggaacaatttcagacgatctataacaacaa

SEQ ID NO: 62960 - DNA, 80 bp, synthetic construct
  source 1..80: mol_type = other DNA
tatcaacatttacaagctcaaagtcttgtatcaaaattggaaatttccaaaaggaaaaagaagtacaatatacaagacaa

SEQ ID NO: 62961 - DNA, 80 bp, synthetic construct
  source 1..80: mol_type = other DNA
aggaaaaatatagagattgaaagcagaaagaggagattagcaaatcccctatttgtctcagatgaagaaataggattgga

SEQ ID NO: 62962 - DNA, 80 bp, synthetic construct
  source 1..80: mol_type = other DNA
agtagggcattgcaattataatatgctaagagaagctatgcctgaatacagagattatatctcaacgaaagtattcgatc

SEQ ID NO: 62963 - DNA, 80 bp, synthetic construct
  source 1..80: mol_type = other DNA
gtttatatgaaatgttggacacagatcaagtttctgataaacccactatagaattaatcatggatatgatggcagaccat

SEQ ID NO: 62964 - DNA, 80 bp, synthetic construct
  source 1..80: mol_type = other DNA
acagacttttattttacattttttaacaaaggccaaaaaacatccaaagatcgggaaatatttgtgggagaatatgaagc

SEQ ID NO: 62965 - DNA, 80 bp, synthetic construct
  source 1..80: mol_type = other DNA
taaaatgtgtatgtatgctgtagaaaggatagctaaagaacgttgcaaattaaatccagatgaaatgatatctgaacccg

SEQ ID NO: 62966 - DNA, 80 bp, synthetic construct
  source 1..80: mol_type = other DNA
gtgatggaaaactaaaagtattagaacaaaaatcagaacaagaaattcgattcttagttgagactacaagacaaaagaat

SEQ ID NO: 62967 - DNA, 80 bp, synthetic construct
  source 1..80: mol_type = other DNA
agggaaatagatgaggctattgaaactttggctgcagaaaattttgagggaaatatttcaaaaattgagaaactggctaa

SEQ ID NO: 62968 - DNA, 80 bp, synthetic construct
  source 1..80: mol_type = other DNA
tttatatatcatagattataaagtctctgtatctaatgaaagtagtattataactaacactaaatattttgagatgacac

SEQ ID NO: 62969 - DNA, 80 bp, synthetic construct
  source 1..80: mol_type = other DNA
gggtaaagcaaggggcctgaaaatggagatcaatgcagatatgtccaagtggagtgctcaggatgtcttcttcaaatatt

SEQ ID NO: 62970 - DNA, 80 bp, synthetic construct
  source 1..80: mol_type = other DNA
tctggttaatagcattggatccaatattgtaccctcaagagaaggagagaattattttcttcttttgcaactatatgcaa

SEQ ID NO: 62971 - DNA, 80 bp, synthetic construct
  source 1..80: mol_type = other DNA
aagaaattaattttaccagatgacttgatgtgcaatctattagatcaaaaggccacctacagagatgatatcatatctat

SEQ ID NO: 62972 - DNA, 80 bp, synthetic construct
  source 1..80: mol_type = other DNA
attgaccaatcagttgcaaaccaattgtgtggaaatcaaacgcaattggttgcaaggtaatttcaattatacgagcagtt

SEQ ID NO: 62973 - DNA, 80 bp, synthetic construct
  source 1..80: mol_type = other DNA
atgtgcatagttgtgctatgtctgtatacaaagatgttttaaaagaagcaatgtcttatcttgaaggatcgattgtagtg

SEQ ID NO: 62974 - DNA, 80 bp, synthetic construct
  source 1..80: mol_type = other DNA
aattcattagtacactctgatgataatcagacttctgtaacaatagttcaagacaaggctccagatgaagttttaataga

SEQ ID NO: 62975 - DNA, 80 bp, synthetic construct
  source 1..80: mol_type = other DNA
attcagtatcacacaatttcagaaaatatgtcttgcttttggatgtcaagccaatatgaaaaagacatatgttactaatt

SEQ ID NO: 62976 - DNA, 80 bp, synthetic construct
  source 1..80: mol_type = other DNA
gtataaaagaatttgtttcactctttaatttatatggagaacctttttctatttatgggagattcttactaacatctgtg

SEQ ID NO: 62977 - DNA, 80 bp, synthetic construct
  source 1..80: mol_type = other DNA
ggtgactgcgcatatataggcccatatgaggatcttgcaagtagaatatcatcagctcagactgctataaaacacggttg

SEQ ID NO: 62978 - DNA, 80 bp, synthetic construct
  source 1..80: mol_type = other DNA
tccaccaagcttagcatgggtctccatagctataagccactggataactgggttaacgtataatatgctacctggacaaa

SEQ ID NO: 62979 - DNA, 80 bp, synthetic construct
  source 1..80: mol_type = other DNA
gagatatagcatctgtactgggtttacatattgaagtagttatcattagaatagatcctattagtcgtgatttatatatt

SEQ ID NO: 62980 - DNA, 80 bp, synthetic construct
  source 1..80: mol_type = other DNA
gtaatgatcctatggattactttcctgcagaaaccaggaaagatataccaatagaattgaatggtgtcctagatgctcca

SEQ ID NO: 62981 - DNA, 80 bp, synthetic construct
  source 1..80: mol_type = other DNA
ttatctatgattagcacagtggggttagaagctggaaatctatggttccttattaagatgctaaataaacatacaccaat

SEQ ID NO: 62982 - DNA, 80 bp, synthetic construct
  source 1..80: mol_type = other DNA
aatgcaaaaaagagaatcagttgtaaatcaaatttctgagataaggaattgggatttaagtcgaatggatgataatgaaa

SEQ ID NO: 62983 - DNA, 80 bp, synthetic construct
  source 1..80: mol_type = other DNA
tatttaagttaaaaatactaagatatttagttctggatgctgaaatggatccaagtgatattatgggtgaaacaagcgat

SEQ ID NO: 62984 - DNA, 80 bp, synthetic construct
  source 1..80: mol_type = other DNA
atgagaggtagatctatattaacacctaggaaattcacaacaagcggtagtcttaggaaattgtactcattttcaaaata

SEQ ID NO: 62985 - DNA, 80 bp, synthetic construct
  source 1..80: mol_type = other DNA
ccaagatagattgtcatcaccaggaggaatgaatgaattatttcaatacctacttgataaaccagagctccttgttacaa

SEQ ID NO: 62986 - DNA, 80 bp, synthetic construct
  source 1..80: mol_type = other DNA
aaggagaagataaaaaggattacatggaatctgtaatcttcagatataattccaaaagatttaaagagagcctttctata

SEQ ID NO: 62987 - DNA, 80 bp, synthetic construct
  source 1..80: mol_type = other DNA
caaaatccagctcaattatttattgaacaaatattattttcaaataagccaataatagatttttcaggtatcagagacaa

SEQ ID NO: 62988 - DNA, 80 bp, synthetic construct
  source 1..80: mol_type = other DNA
atatataaatcttcatgatagtagggcattggaaaaggaaccagatatcattggtaaagttacatttagagaagcatata

SEQ ID NO: 62989 - DNA, 80 bp, synthetic construct
  source 1..80: mol_type = other DNA
gaatattaatgaaagatttgaatagcctgcctttaacaaatgatgatatacaagtggtctattcatacataattttaaat

SEQ ID NO: 62990 - DNA, 80 bp, synthetic construct
  source 1..80: mol_type = other DNA
agttctgataggtttaaagatttatttcctacattagtagtcgatattaattttaaccagttctttgatttaaagcaggc

SEQ ID NO: 62991 - DNA, 80 bp, synthetic construct
  source 1..80: mol_type = other DNA
gacccactaatgataacaattgcaaacacccaaattttgtctatatatggcagtcctcaaaagcgaactggaatgtcttg

SEQ ID NO: 62992 - DNA, 80 bp, synthetic construct
  source 1..80: mol_type = other DNA
ctctaccatgccagaattccgaaacttaaaattgatacatcattcccctgcattggtgcttagagcatatagtaaaaata

SEQ ID NO: 62993 - DNA, 80 bp, synthetic construct
  source 1..80: mol_type = other DNA
ccccagatgtgcagggtgcagatccaacagagatgtcaagagatttggtacatctaaaagagtttgtagataatacaaac

SEQ ID NO: 62994 - DNA, 80 bp, synthetic construct
  source 1..80: mol_type = other DNA
ttgaggactaaaatggagaaaagaataatagaaaatgagttagagaagggggccagagatattgtttttgaactaaagga

SEQ ID NO: 62995 - DNA, 80 bp, synthetic construct
  source 1..80: mol_type = other DNA
gatgacaaggttttatcaagtttgttatgaatatataaaatctacagagcacaagataaaagtattcatcttacctgcca

SEQ ID NO: 62996 - DNA, 80 bp, synthetic construct
  source 1..80: mol_type = other DNA
aagcatacactacaacagatttttgctcattaatgcaaggtaatctcataaaagataaagaatggtatacagtacactat

SEQ ID NO: 62997 - DNA, 80 bp, synthetic construct
  source 1..80: mol_type = other DNA
ctgaagcaaattctgtctggaggacataaagcaatcatgcagcacaattcaaccagtgaacagaatatagcttttgaatg

SEQ ID NO: 62998 - DNA, 80 bp, synthetic construct
  source 1..80: mol_type = other DNA
ttttcgattgataactcattttgcggattcattcatagatgctggctctagacctgctttcttacaactgattttagata

SEQ ID NO: 62999 - DNA, 80 bp, synthetic construct
  source 1..80: mol_type = other DNA
gtttcagttacaaggacgtaaaagttaataagctatatgagataataaagaatggtcataacaggacagattttatcccc

SEQ ID NO: 63000 - DNA, 80 bp, synthetic construct
  source 1..80: mol_type = other DNA
ttattatttagaactggcgatttaactcaatacgaccttgataaatatgatgctatgaagagccaggaaagggttacttg

SEQ ID NO: 63001 - DNA, 80 bp, synthetic construct
  source 1..80: mol_type = other DNA
actatatgaaaaatttggtgatgatgaagagtttttacttaaggttgcacatggtgattttacattgacagcgccctggt

SEQ ID NO: 63002 - DNA, 80 bp, synthetic construct
  source 1..80: mol_type = other DNA
gaatgactggcaaacatcaaggcatttagatatgggagcaataaacttaacaataagtggctacaatagagctataacta

SEQ ID NO: 63003 - DNA, 80 bp, synthetic construct
  source 1..80: mol_type = other DNA
taatcggtgaagacaataagctaacctactctgaattaaatatcactaggaaaacaccagaaaatatatcaataagtggt

SEQ ID NO: 63004 - DNA, 80 bp, synthetic construct
  source 1..80: mol_type = other DNA
agaaaattactaagttctagacatggcttgaaatttgaaaatatggcaaaggtcacaacatacccagggaattactatat

SEQ ID NO: 63005 - DNA, 80 bp, synthetic construct
  source 1..80: mol_type = other DNA
cacttatagaaagaaagatagacatcaatatatttatcaaatacacacacatgaatcaattttacgaagaaatgaagagc

SEQ ID NO: 63006 - DNA, 80 bp, synthetic construct
  source 1..80: mol_type = other DNA
atatggcgatacggacaaggatatttaatgaaattgtgccagtatgtttagtaaatgtagctgagatagatggggatcag

SEQ ID NO: 63007 - DNA, 80 bp, synthetic construct
  source 1..80: mol_type = other DNA
agaattttgattagaaagctagattacctaaataatgacattttttcactagcaaggataaaagttggtattgatgaata

SEQ ID NO: 63008 - DNA, 80 bp, synthetic construct
  source 1..80: mol_type = other DNA
tgcagtaataaagaaggcacatttcagcaaaatggtttcatttgatggcccacccataaagacaggactattgaatttaa

SEQ ID NO: 63009 - DNA, 80 bp, synthetic construct
  source 1..80: mol_type = other DNA
cagaactaatgaaatcacaagacttgttaaatttgaattatgacaatataagaaatagcaatctgatttcattttcaaaa

SEQ ID NO: 63010 - DNA, 80 bp, synthetic construct
  source 1..80: mol_type = other DNA
ataatttgttgcgaggggacagataatatagatgagggcttggaatttctttctgatgatccgatggcatttacagaagg

SEQ ID NO: 63011 - DNA, 80 bp, synthetic construct
  source 1..80: mol_type = other DNA
agagactattcattctacacctatttttaatatttactactcaaagaaaggggaaaggcatatgacatatcgtaatgcta

SEQ ID NO: 63012 - DNA, 80 bp, synthetic construct
  source 1..80: mol_type = other DNA
gtaaaacagggtgtccacaggtttggcaacaccctatttataaagaatttaaactaagtatgccagtcccggagagaagg

SEQ ID NO: 63013 - DNA, 80 bp, synthetic construct
  source 1..80: mol_type = other DNA
taaaattattaatagagcgagaaacaagtaattttgaagaagcatttacattttacaaagatggatttctatcccctgag

SEQ ID NO: 63014 - DNA, 80 bp, synthetic construct
  source 1..80: mol_type = other DNA
aatttaggttgtttagaagccattatttccttgatcagagtcttaaaaacaaacgagtggtccactgttatagataagtg

SEQ ID NO: 63015 - DNA, 80 bp, synthetic construct
  source 1..80: mol_type = other DNA
tatacatatttgtttaataaaaaataatatggattatctttatcacaagtttgatatgccttcatgttttatagacgacc

SEQ ID NO: 63016 - DNA, 80 bp, synthetic construct
  source 1..80: mol_type = other DNA
caatatctagaaatataaattggctaatgtatagagattttatctccacactgccaaccacttatattgccccttggaat

SEQ ID NO: 63017 - DNA, 80 bp, synthetic construct
  source 1..80: mol_type = other DNA
attatgctagaacactttagaacaaagtgttcgacattaattatggataaaatggaaacacaacgaaattttcaagattt

SEQ ID NO: 63018 - DNA, 80 bp, synthetic construct
  source 1..80: mol_type = other DNA
tgcaaaaatgatgagaagatctgaagggagaacaaacttggactttagttaaacagggtaagtacacaagaagagatcta

SEQ ID NO: 63019 - DNA, 80 bp, synthetic construct
  source 1..80: mol_type = other DNA
gggagaacaaacttggactttagttaaacagggtaagtacacaagaagagatctagatataagaatacataattggctat

SEQ ID NO: 63020 - DNA, 80 bp, synthetic construct
  source 1..80: mol_type = other DNA
ctttttgaagaatctatgaaatttaactcatatgaatcagaaagatggaacactaaccttattaagattagggaatacac

SEQ ID NO: 63021 - DNA, 80 bp, synthetic construct
  source 1..80: mol_type = other DNA
acaatttcttgctcgcatcaatgctgcaagagatgcatgcgtggcaaaagacattgatgtggacttgctgatggcaaggc

SEQ ID NO: 63022 - DNA, 80 bp, synthetic construct
  source 1..80: mol_type = other DNA
aaaaaaagaatataatgactttataacaaaatcagcaaaagaagttttcctggctacagggaactacaaacagcccaaca

SEQ ID NO: 63023 - DNA, 80 bp, synthetic construct
  source 1..80: mol_type = other DNA
aaagtgaaattttggaaggctgggagatgatggtagaaagagtccaccaacagagagaagttagtaactccattcatgat

SEQ ID NO: 63024 - DNA, 80 bp, synthetic construct
  source 1..80: mol_type = other DNA
caaaagcctagtatccattttatatggtccacacataatccaaataatagcaacaatgctacctttaaattgattttgtt

SEQ ID NO: 63025 - DNA, 80 bp, synthetic construct
  source 1..80: mol_type = other DNA
ctccacgtgttggttgacatttgagactagacctgggcctgattttgacttttgcctccttaaggccccggagcaggaaa

SEQ ID NO: 63026 - DNA, 80 bp, synthetic construct
  source 1..80: mol_type = other DNA
ttccttaatggaccatggcgcatatggtgagctgtgggcaaagtgccttctagatgtctcgctgggcaatgtggagggtg

SEQ ID NO: 63027 - DNA, 80 bp, synthetic construct
  source 1..80: mol_type = other DNA
attatcatatatcggtttttactactagttgtcgtcatactgccatttattaaagctcaaaattatggaataaatcttcc

SEQ ID NO: 63028 - DNA, 80 bp, synthetic construct
  source 1..80: mol_type = other DNA
atccaagttcagtcacgactgagataactgaccctgattggacgagcacactgtcacaacttttcatgactaaaggatgg

SEQ ID NO: 63029 - DNA, 80 bp, synthetic construct
  source 1..80: mol_type = other DNA
ccgacaaattccgtctatttcaagagttatgctgatatatcgtccttctctgtagatccgcagttatattgtgattacaa

SEQ ID NO: 63030 - DNA, 80 bp, synthetic construct
  source 1..80: mol_type = other DNA
caagattaatattacagtgaatacatgcactatacggaattgcaaaaaattaggaccaagggaaaatgtagcaattatac

SEQ ID NO: 63031 - DNA, 80 bp, synthetic construct
  source 1..80: mol_type = other DNA
aataacaggttctatggataccgcatatgcaaactctacacaacaagagaattttatgatttccactttatgcttatatt

SEQ ID NO: 63032 - DNA, 80 bp, synthetic construct
  source 1..80: mol_type = other DNA
acttacaaaaactttagtttgaaaccaatatacttatcatggaccatcaggaataccagcagttcctcgcgaggatcaat

SEQ ID NO: 63033 - DNA, 80 bp, synthetic construct
  source 1..80: mol_type = other DNA
aaaggcttatcaacttacacagaagcattcaagtctcttgggaaaatgatggacataggtgatagggcaacagaatatga

SEQ ID NO: 63034 - DNA, 80 bp, synthetic construct
  source 1..80: mol_type = other DNA
atcacattgtgaaagtctaaagaacaaggcgagggcttcttggaagcaagttatgaataaaaagttagaacctaaacaga

SEQ ID NO: 63035 - DNA, 80 bp, synthetic construct
  source 1..80: mol_type = other DNA
taaatacagccttagttttatgggaacagcagttcatggtcaacaacgaaatcatagataagaatgacaggatcaaactg

SEQ ID NO: 63036 - DNA, 80 bp, synthetic construct
  source 1..80: mol_type = other DNA
ctgaagaacttctgcggaatagggaagcataaacagtttaaaaacaaaatgctagatgatatagacaattcaaaacccac

SEQ ID NO: 63037 - DNA, 80 bp, synthetic construct
  source 1..80: mol_type = other DNA
tatattggattttgatgatgaaaatgtgttcctggctagtttaacaatgatggagcagactaagaggatattgtcaaaac

SEQ ID NO: 63038 - DNA, 80 bp, synthetic construct
  source 1..80: mol_type = other DNA
ctagtggtctaaagagcgataattttatattaaacgagtttggccaaaggatcaaagactgcaataaggacacatatgaa

SEQ ID NO: 63039 - DNA, 80 bp, synthetic construct
  source 1..80: mol_type = other DNA
aatatgtaccaaatatttgaaactaggtattggcaatgtatatcagatttttctactctaatgaagaatatactgtctgt

SEQ ID NO: 63040 - DNA, 80 bp, synthetic construct
  source 1..80: mol_type = other DNA
atgcaaatctttaaatatagaatataggaatgatgtaccatttatagatataatcctagatataagacctgaaaccgacc

SEQ ID NO: 63041 - DNA, 80 bp, synthetic construct
  source 1..80: mol_type = other DNA
atcacagtacaatagacacaataccttcagaatcgcaatgtgtgcaaataataatgtttttgcaatagtgttcccttctg

SEQ ID NO: 63042 - DNA, 80 bp, synthetic construct
  source 1..80: mol_type = other DNA
ctgatataaaaacaaagaaagcaactgtagtttatagtatcgtggtcttgcacaaagaagaaaccaatgtattgaaccca

SEQ ID NO: 63043 - DNA, 80 bp, synthetic construct
  source 1..80: mol_type = other DNA
ggatgcttgcatggcacatttaaatgcatgaatgggtacatatcaatttcgcgagccattagattagacaaagagagatg

SEQ ID NO: 63044 - DNA, 80 bp, synthetic construct
  source 1..80: mol_type = other DNA
ccaaagaatagtctcatctccaggtctattcttaacaacctgcttattatttaaacacgaaaatccaacactagttatga

SEQ ID NO: 63045 - DNA, 80 bp, synthetic construct
  source 1..80: mol_type = other DNA
atgacgtcatgaatttttctatatatactagtctttcaataacaaaaagtgttttatccctcacagaacctgcaaggtac

SEQ ID NO: 63046 - DNA, 80 bp, synthetic construct
  source 1..80: mol_type = other DNA
atgataatgaactctcttgctatctcgagcaatgtcaaagcttatatagctgaaaaattctcaccttatactaagacact

SEQ ID NO: 63047 - DNA, 80 bp, synthetic construct
  source 1..80: mol_type = other DNA
atttagtgtttatatgacaaaacttataaaaaatgcatgttttgatgcttatggacaaagagagcgagtccaattaagag

SEQ ID NO: 63048 - DNA, 80 bp, synthetic construct
  source 1..80: mol_type = other DNA
atatctatctttctgattatgatataacacaaaaaggtataaaagacaacagagaattagttagcatatggtttccaggg

SEQ ID NO: 63049 - DNA, 80 bp, synthetic construct
  source 1..80: mol_type = other DNA
agtgtgaccctcaaagaatacttaacacaagtatatctcccattttacttcaatgctaaaggcctgcatgaaaaacacca

SEQ ID NO: 63050 - DNA, 80 bp, synthetic construct
  source 1..80: mol_type = other DNA
ctttaactgtagatgcccctcatattactcctgataattatctgtatgtagacaacatattgtatctaatagattataaa

SEQ ID NO: 63051 - DNA, 80 bp, synthetic construct
  source 1..80: mol_type = other DNA
gtatccgtatccaatgagagtagcataataacatatgataaatactatgaactaactagagatatatctagacgaatgaa

SEQ ID NO: 63052 - DNA, 80 bp, synthetic construct
  source 1..80: mol_type = other DNA
aatattgtacccgcaagagaaggagaggatcctttttttcatgtgtaattacatgcagaaagaacttatattacctgatg

SEQ ID NO: 63053 - DNA, 80 bp, synthetic construct
  source 1..80: mol_type = other DNA
agctattgttcaatctacttgaccagaaggtaacatatcagaatgacataatatctactatgacaaaccaactgaattca

SEQ ID NO: 63054 - DNA, 80 bp, synthetic construct
  source 1..80: mol_type = other DNA
aatactgttcctataaaaagaaactggcttcaagggaatttcaattacacctctagctatgttcatagctgtgcaatgtc

SEQ ID NO: 63055 - DNA, 80 bp, synthetic construct
  source 1..80: mol_type = other DNA
agtatataaggacatccttaaagaagcaataacatttttagatggatctatattagttaactctctagtccattcagatg

SEQ ID NO: 63056 - DNA, 80 bp, synthetic construct
  source 1..80: mol_type = other DNA
acaatcaaacatctataacaatagtacaagacaaaacaaccaatgaaatattaatagactttgcaatgagggaattcgaa

SEQ ID NO: 63057 - DNA, 80 bp, synthetic construct
  source 1..80: mol_type = other DNA
aaatcatgcctaacctttggatgccaggcgaatatgaaaaagacctatgtaacaaactgcataaaagagtttgtctcatt

SEQ ID NO: 63058 - DNA, 80 bp, synthetic construct
  source 1..80: mol_type = other DNA
attcaatttgtacggagagcctttctcaatatacggtcgttttttactgacttcggtgggggattgcgcatatataggac

SEQ ID NO: 63059 - DNA, 80 bp, synthetic construct
  source 1..80: mol_type = other DNA
cctatgaagatcttgccagtaggatatcgtctgcccaaacagcaattaagcatggttgccctcccagcttggcatgggta

SEQ ID NO: 63060 - DNA, 80 bp, synthetic construct
  source 1..80: mol_type = other DNA
tctatagctatcagccactggatgacttatctaacttataacatgttaccagggcaatctaatgatccaattgattattt

SEQ ID NO: 63061 - DNA, 80 bp, synthetic construct
  source 1..80: mol_type = other DNA
tatagaaatagagatagttatagtgagaatagatcctgtaagtaaagagttgcatattagctccaatagattcaaagaat

SEQ ID NO: 63062 - DNA, 80 bp, synthetic construct
  source 1..80: mol_type = other DNA
cccagcagagaaccggaaagagatacctatagaattgaatggcatactagatgcaccactgtctatgataagcacagttg

SEQ ID NO: 63063 - DNA, 80 bp, synthetic construct
  source 1..80: mol_type = other DNA
gattagaggctgggaacctgaattttttgataagtttactgaataaatacacaccagttatgatgaaaagagaatctgtg

SEQ ID NO: 63064 - DNA, 80 bp, synthetic construct
  source 1..80: mol_type = other DNA
gttaatcagatagcagaagtgagatcatggaaggttgaagaattaacagataatgaaatatttaagctcaaaatattaag

SEQ ID NO: 63065 - DNA, 80 bp, synthetic construct
  source 1..80: mol_type = other DNA
atttctggtcttagatgcagaaatggatcccaatgatataatgggggagacaagtgatatgagaggcagatccttgctga

SEQ ID NO: 63066 - DNA, 80 bp, synthetic construct
  source 1..80: mol_type = other DNA
cgcctagaaaattcacaacagcaggtagcttgaggaaactgtattcatttagtaaataccaagatagattgtcagcccct

SEQ ID NO: 63067 - DNA, 80 bp, synthetic construct
  source 1..80: mol_type = other DNA
ggtggaatggaggagctatttacatatttactggaaaagcctgagctgctagttacaaaaggggaagattccaaagatta

SEQ ID NO: 63068 - DNA, 80 bp, synthetic construct
  source 1..80: mol_type = other DNA
catggaatctgtcatttttaggtataattcaaagaggtttaaggagagcttgtcaattcaaaaccctgctcaattattca

SEQ ID NO: 63069 - DNA, 80 bp, synthetic construct
  source 1..80: mol_type = other DNA
tagagcagattttattttcacataaaccagttatagatttttctgggataagagataagtatataaatctccatgacagc

SEQ ID NO: 63070 - DNA, 80 bp, synthetic construct
  source 1..80: mol_type = other DNA
agggctatagagaaagagccagatatattagggaaagttacatttactgaggcttacagattattaatgaaagatttgtc

SEQ ID NO: 63071 - DNA, 80 bp, synthetic construct
  source 1..80: mol_type = other DNA
atcgctcaccctcacaaatgaagatatacaggttgtttattcatatatcatactaaatgatccattaatgataactatag

SEQ ID NO: 63072 - DNA, 80 bp, synthetic construct
  source 1..80: mol_type = other DNA
tatatccggcactagtggttgatataaactttgatcagttctttgatttaaaacaattgttgtatgagaaattcggtgat

SEQ ID NO: 63073 - DNA, 80 bp, synthetic construct
  source 1..80: mol_type = other DNA
caaatactcatgttctgtctatctatggcagtccccagaaaagaatgggaatgtcatgctccactatgccagaatttaga

SEQ ID NO: 63074 - DNA, 80 bp, synthetic construct
  source 1..80: mol_type = other DNA
aatctaaagcttatacatcactcccctgcactagtactaagagcgtacagtaaaaacaacccagatgtccaaggtgcaga

SEQ ID NO: 63075 - DNA, 80 bp, synthetic construct
  source 1..80: mol_type = other DNA
cccaaccgagatggcaagggacttagtacatttaaaagagtttgtagaaaatacaggcttagaagagaagatgagattaa

SEQ ID NO: 63076 - DNA, 80 bp, synthetic construct
  source 1..80: mol_type = other DNA
gaattgcccaaaatgaagtagagaaaggccaaagagatattgtctttgaattaaaggaaatgaccagattttatcaagta

SEQ ID NO: 63077 - DNA, 80 bp, synthetic construct
  source 1..80: mol_type = other DNA
tgttacgagtacgttaaatctacagagcataaaatcaaagtctttattctcccagcaaaagcatatacaacaactgactt

SEQ ID NO: 63078 - DNA, 80 bp, synthetic construct
  source 1..80: mol_type = other DNA
ctgcgcacttatgcaggggaatctaataaaagacaaagaatggtatacggtacactatctaaagcaaatactatcaggtg

SEQ ID NO: 63079 - DNA, 80 bp, synthetic construct
  source 1..80: mol_type = other DNA
ggcataaggcaatcatgcaacataatgccacgagtgaacaaaatatagcctttgaatgcttcaagttaattgtacatttt

SEQ ID NO: 63080 - DNA, 80 bp, synthetic construct
  source 1..80: mol_type = other DNA
gcagactcattcatagaagcctcatcaaggtctgcattcttgcaattaatcttggagcaatttagctataaggatgtcag

SEQ ID NO: 63081 - DNA, 80 bp, synthetic construct
  source 1..80: mol_type = other DNA
agttcacaaattgtatgatataataaagaatgggcacaatcgaacagattttatccccttgctctttaggacaggggatc

SEQ ID NO: 63082 - DNA, 80 bp, synthetic construct
  source 1..80: mol_type = other DNA
ttaaacaaacagacctagataaatatgatgctatgaagagccatgagagagtgacctggaatgattggcaaacttcaaga

SEQ ID NO: 63083 - DNA, 80 bp, synthetic construct
  source 1..80: mol_type = other DNA
gatgaagaattccttctcaaagtatcacatggtgattttacattaactgctccatggtgtaaagaaggatgtccagattt

SEQ ID NO: 63084 - DNA, 80 bp, synthetic construct
  source 1..80: mol_type = other DNA
catttagatatgggggttattaatctaacaataactggttacaacaggtccattaccataataggtgaagacaataagct

SEQ ID NO: 63085 - DNA, 80 bp, synthetic construct
  source 1..80: mol_type = other DNA
aacttatgcagaactctgtataacgagaaagacaccagagaacataactataagtggcagaaaattacttagttcaagac

SEQ ID NO: 63086 - DNA, 80 bp, synthetic construct
  source 1..80: mol_type = other DNA
atgggctaaagttcgagaatatggccaagataccaacttacccaggaaattattatataacttttagaaaaaaagataga

SEQ ID NO: 63087 - DNA, 80 bp, synthetic construct
  source 1..80: mol_type = other DNA
catcaatatgtctaccaaatacattcacatgagtcaataactagaagaaacgaagagcatatggcaattagaactagaat

SEQ ID NO: 63088 - DNA, 80 bp, synthetic construct
  source 1..80: mol_type = other DNA
ctttaacgaaataacaccagtatgtgttgttaacgtggctgaggtcgacggagatcaaaggatactcataaggaaattag

SEQ ID NO: 63089 - DNA, 80 bp, synthetic construct
  source 1..80: mol_type = other DNA
atttcctaaataatgatgtcttcacactatcgagaattaaggtcggcatagatgagtttgcaactataaaaaaagcacat

SEQ ID NO: 63090 - DNA, 80 bp, synthetic construct
  source 1..80: mol_type = other DNA
tttagcaagatggtgtcctttgatggcccccccataaagacaggccttctagatctaacagaactcatgaaatcgcaaga

SEQ ID NO: 63091 - DNA, 80 bp, synthetic construct
  source 1..80: mol_type = other DNA
cttattgaacttaaactatgacaatatccgaaacagcaatttaatatcattctccaaattaatctgctgcgagggttcag

SEQ ID NO: 63092 - DNA, 80 bp, synthetic construct
  source 1..80: mol_type = other DNA
aagatatagatgatgggctagaattcttatcagatgaccctatgaactttacagagggagaatcaatacattcaacacca

SEQ ID NO: 63093 - DNA, 80 bp, synthetic construct
  source 1..80: mol_type = other DNA
atatttaatatctattattcaaagcgtggggagagccatatgacttacagaaatgcaataaagcaactaatagacaggga

SEQ ID NO: 63094 - DNA, 80 bp, synthetic construct
  source 1..80: mol_type = other DNA
ctggaaacacccaatatataaagagttcaaaatgagtatgccagttcctgaaaggaggctctttgaggaatcagtgaagt

SEQ ID NO: 63095 - DNA, 80 bp, synthetic construct
  source 1..80: mol_type = other DNA
aacatcatcattcgaagaagctttcactttcagcacaaatgggtttatatccccagaaaatttaggttgtttagaagcaa

SEQ ID NO: 63096 - DNA, 80 bp, synthetic construct
  source 1..80: mol_type = other DNA
tagtgtcgctaattagaatattaaagactaatgagtggtctacggttatagataaatgcatacatatatgcctaatcaag

SEQ ID NO: 63097 - DNA, 80 bp, synthetic construct
  source 1..80: mol_type = other DNA
aacgggatggatcacatgtaccatgcatttgatatacccaagtgtttcgtcgataatcctataaacaggaaggtcgattg

SEQ ID NO: 63098 - DNA, 80 bp, synthetic construct
  source 1..80: mol_type = other DNA
ggtgatgtatagagaatttataaataacttgcctgctacaagggttcccccttggaatgtaatgatggataacttcatga

SEQ ID NO: 63099 - DNA, 80 bp, synthetic construct
  source 1..80: mol_type = other DNA
acaatagagtatagttgtgttatttcaaatctaaattccaaatttgtagggttgaattggggctaattggggttagggca

SEQ ID NO: 63100 - DNA, 80 bp, synthetic construct
  source 1..80: mol_type = other DNA
ttaatgcttatgagtctgaaagatggaacacaaatttaataaaaataagagaatatacgaagaaagattattctgatttt

SEQ ID NO: 63101 - DNA, 80 bp, synthetic construct
  source 1..80: mol_type = other DNA
actgcaagggatgcctgcattgcgaaggatatagacgtggacctgttgatggctaggcatgactatttcggaaaggagtt

SEQ ID NO: 63102 - DNA, 80 bp, synthetic construct
  source 1..80: mol_type = other DNA
ataactaagtctgctaaagacatatttttagcaactggcttttataaacaacctaacaagaatgaaataagtgaaggatg

SEQ ID NO: 63103 - DNA, 80 bp, synthetic construct
  source 1..80: mol_type = other DNA
ggacctgatgatagagagaatacatgagcaaaggaacataactaaatcattacatgagcagaagccaagcatgcatttta

SEQ ID NO: 63104 - DNA, 80 bp, synthetic construct
  source 1..80: mol_type = other DNA
tatggggtccacacaatccagggaacagcaataattcaactttcaaattgatattattgtcaaaatctttacaaagtatc

SEQ ID NO: 63105 - DNA, 80 bp, synthetic construct
  source 1..80: mol_type = other DNA
atatagctatggataacacagaatatcaacaatttcttgctcgcattaatgctgcaagggatgcatgtgtggcaaaggac

SEQ ID NO: 63106 - DNA, 80 bp, synthetic construct
  source 1..80: mol_type = other DNA
ataggggattgtaacaaaaatacattggatatcatgacttctatttttgagactaggttctggcagtgtatttctgattt

SEQ ID NO: 63107 - DNA, 80 bp, synthetic construct
  source 1..80: mol_type = other DNA
agcattgaattcaatcaaagttactcaatctgatgttgcaaatgttctttcaagagtagtttccgttagacatttggaaa

SEQ ID NO: 63108 - DNA, 80 bp, synthetic construct
  source 1..80: mol_type = other DNA
tcaaaagatgaaacaagagaaaaatccgttcaaaggattgtcaactgatagaaaaatggatgaagtctcacatgttggaa

SEQ ID NO: 63109 - DNA, 80 bp, synthetic construct
  source 1..80: mol_type = other DNA
ataaaaatgtaagcactgctcccacaattatccacttcatctggatcttccgtggttctggttttggaatcaattccttc

SEQ ID NO: 63110 - DNA, 80 bp, synthetic construct
  source 1..80: mol_type = other DNA
aaggaactgcacatcaagaggggggtggtgattggcctttggctcatcagagtatagacaatatttttcctacactcttt

SEQ ID NO: 63111 - DNA, 80 bp, synthetic construct
  source 1..80: mol_type = other DNA
caatcgcatttgacggcatagaatgggttgagatctacccaatagaacatctgaaccttatgtcatctttaaagctaata

SEQ ID NO: 63112 - DNA, 80 bp, synthetic construct
  source 1..80: mol_type = other DNA
cacaaagccaatgctcttcaggagagactacgtctctcccaggaggagaaagccacccttgctcttgatgtgcagttcct

SEQ ID NO: 63113 - DNA, 80 bp, synthetic construct
  source 1..80: mol_type = other DNA
ttggaatcaattccttcagtcgtacgttctcatgctgaaggaactgcacatcaagaggggggtggtgattggcctttggc

SEQ ID NO: 63114 - DNA, 80 bp, synthetic construct
  source 1..80: mol_type = other DNA
atgtcagagttcattttcaacgatgtaccacaacggactacatctacatttgatccggaagcagcatatgtggcatttga

SEQ ID NO: 63115 - DNA, 80 bp, synthetic construct
  source 1..80: mol_type = other DNA
gtaagacatcgaggcccatggttgaccttacttttggtggggtccaatttgcaatggttaataaccatttcccacagttc

SEQ ID NO: 63116 - DNA, 80 bp, synthetic construct
  source 1..80: mol_type = other DNA
caatcgaatccagtgccggacaacggtcttaccttgcaccgtctgtcaggatacctagcgcgctgggcctttactcagat

SEQ ID NO: 63117 - DNA, 80 bp, synthetic construct
  source 1..80: mol_type = other DNA
gcgatcaccaattaagcaagctgagttcagagctactgtagtagtgcctttggctgaggtaaaaggctgtacttggaatg

SEQ ID NO: 63118 - DNA, 80 bp, synthetic construct
  source 1..80: mol_type = other DNA
atggtgatgcaatgtacctggggtttgctgctggtgctgagatgttcctgcagacgttcactttcttccctttggtgatt

SEQ ID NO: 63119 - DNA, 80 bp, synthetic construct
  source 1..80: mol_type = other DNA
gagatgcatagggttctcaaggatggcatggatgtcaactttatgaagaaagtcctccggcaacggtatggccaaaaaac

SEQ ID NO: 63120 - DNA, 80 bp, synthetic construct
  source 1..80: mol_type = other DNA
tgccgagcaatggatgcgtgaagaaatagttgctgtaagagcagcttttgaagctgtaggcactctggcctgggccagaa

SEQ ID NO: 63121 - DNA, 80 bp, synthetic construct
  source 1..80: mol_type = other DNA
ctgtaggcactctggcctgggccagaactggattctccccagcagcaagagacttcttgcgccaattcggaattggcata

SEQ ID NO: 63122 - DNA, 80 bp, synthetic construct
  source 1..80: mol_type = other DNA
agctagatacggacaagtgctcaatgctggtgttgttagagtcttcttcctcaaccaaaagaaggccaaagatgtcttac

SEQ ID NO: 63123 - DNA, 80 bp, synthetic construct
  source 1..80: mol_type = other DNA
gcaccagtgacttggagtcatggggaagtgaatgattcgacaacgatagagccagtactcgatggtccttatcaaccaac

SEQ ID NO: 63124 - DNA, 80 bp, synthetic construct
  source 1..80: mol_type = other DNA
ataataccaagatcacaagaatctaagtgtagtgaatacataaatactgggttaccaccaatgcagaatacaaggaatat

SEQ ID NO: 63125 - DNA, 80 bp, synthetic construct
  source 1..80: mol_type = other DNA
agttccagttgcgttatcatctagatcagtgacttatcaacgtgctcaggttaatgaggacatcgccatatcaaagacat

SEQ ID NO: 63126 - DNA, 80 bp, synthetic construct
  source 1..80: mol_type = other DNA
atgaggacatcgccatatcaaagacatcgttgtggaaagaaatgcaatataacagagacattataataaggtttaaattt

SEQ ID NO: 63127 - DNA, 80 bp, synthetic construct
  source 1..80: mol_type = other DNA
gggtgttgcaacccctcatcaacccattcagccacgatgctttgtccacagcgtgggtatcggtggaaactagaccagga

SEQ ID NO: 63128 - DNA, 80 bp, synthetic construct
  source 1..80: mol_type = other DNA
aacgacgttatagaaaatgctacgttgctatcaattctatcatactcatatgataaatacaacgctgttgaaaggaaatt

SEQ ID NO: 63129 - DNA, 80 bp, synthetic construct
  source 1..80: mol_type = other DNA
tgaaagtgatactgctgaaaagtttaaggtttataaaagaagattagatttatttactatagtcgcatcaacagtgaaca

SEQ ID NO: 63130 - DNA, 80 bp, synthetic construct
  source 1..80: mol_type = other DNA
tagaattagaattttcaaacaaatatgtacgagccatagtaccggatcagacatttgacgaactgaaacaaatgcttgac

SEQ ID NO: 63131 - DNA, 80 bp, synthetic construct
  source 1..80: mol_type = other DNA
atggctggtaaacagccccagcatgcccctgtcaaagctgccgctaaggcagcggctaaggaggtggttaaggaggaaaa

SEQ ID NO: 63132 - DNA, 80 bp, synthetic construct
  source 1..80: mol_type = other DNA
gcgagattcagaagaaactcaaaaaagagggacttgaaggaccagaaaccagattctcagtcacagttgctgcaacaata

SEQ ID NO: 63133 - DNA, 80 bp, synthetic construct
  source 1..80: mol_type = other DNA
gggaaaattggacccaacaaacaaaatggccctgagttacagatttctacattcttacatccaagtttaatgaaggaacc

SEQ ID NO: 63134 - DNA, 80 bp, synthetic construct
  source 1..80: mol_type = other DNA
aaatgatggcaccaactttggcccgctgcaagctgcagcggctcaatggggactttggaaacttgtcggcctcaaaataa

SEQ ID NO: 63135 - DNA, 80 bp, synthetic construct
  source 1..80: mol_type = other DNA
catttaccccattagttggtgcatctgcagttactggctccgtctacagagtcagtttgaatttgacacaatcccctggt

SEQ ID NO: 63136 - DNA, 80 bp, synthetic construct
  source 1..80: mol_type = other DNA
aacaccagttggggcgggctgggtgcccgtaagcatctggatataccaacaggaaaatcagtcacctggagtttgcacaa

SEQ ID NO: 63137 - DNA, 80 bp, synthetic construct
  source 1..80: mol_type = other DNA
gggtgaccttgctgggcctcgtcaaacgtggtggctcacagatacaaatgaagaaggaggacagagctgtggtcccatga

SEQ ID NO: 63138 - DNA, 80 bp, synthetic construct
  source 1..80: mol_type = other DNA
aaggaggacagagctgtggtcccatgatagaggtccatggccttggtgtaaccacctccacatacaaggatgcagcatgg

SEQ ID NO: 63139 - DNA, 80 bp, synthetic construct
  source 1..80: mol_type = other DNA
gaaagttattcagcagattgtcaaacctaaggttaagtggcagaataaccgcaagtggcagcctaagcctcgcgttaagc

SEQ ID NO: 63140 - DNA, 80 bp, synthetic construct
  source 1..80: mol_type = other DNA
tactgccaagtgccactttgaacatgatttccagtatgaaaatagttggggctgcaatcctcccgactgccctggtgttg

SEQ ID NO: 63141 - DNA, 80 bp, synthetic construct
  source 1..80: mol_type = other DNA
caaggggacacactggtgtttctagggccactggaaggcgtgggacttatctttaaggattggtgcacgtctacctgcca

SEQ ID NO: 63142 - DNA, 80 bp, synthetic construct
  source 1..80: mol_type = other DNA
tgaacatactagtaacaaaggacatcgactttgaaaatcttggggaaaacccttgtaaagtagggcttcaaacatcatct

SEQ ID NO: 63143 - DNA, 80 bp, synthetic construct
  source 1..80: mol_type = other DNA
tgcgatggactttataatttacagatttcttttatttattgttattgcatcaccttttgttaaaacacaaaattatggaa

SEQ ID NO: 63144 - DNA, 80 bp, synthetic construct
  source 1..80: mol_type = other DNA
aatcataaacttgatgtgactacgagtacttgtacaattaggaattgtaagaagttaggaccaagggaaaatgtagcgat

SEQ ID NO: 63145 - DNA, 80 bp, synthetic construct
  source 1..80: mol_type = other DNA
gaggagcgtgtcctgagagagattgggaccaagaacatcctagacctggcatccatgaaggccacaagcaacttttccaa

SEQ ID NO: 63146 - DNA, 80 bp, synthetic construct
  source 1..80: mol_type = other DNA
acctcagttctaaatctgagtctaggtcatctgatccgtttagggaagcaatgacagacgccttccatggtaatagggaa

SEQ ID NO: 63147 - DNA, 80 bp, synthetic construct
  source 1..80: mol_type = other DNA
tgtaaacttataaaattggccatgttcaaattcaaaatatagcagcttatagtatatatttgtaaataggagcacactac

SEQ ID NO: 63148 - DNA, 80 bp, synthetic construct
  source 1..80: mol_type = other DNA
atgttatggtagacttagctaaaacaattctggagatagaaagcgaacagaggagtgagattacaaggatttggtcaaaa

SEQ ID NO: 63149 - DNA, 80 bp, synthetic construct
  source 1..80: mol_type = other DNA
ttgcaaagatgatgagaaggtctgaaggaaggacaaatttagatttcagttaagcagggtgagtatataagagaggattt

SEQ ID NO: 63150 - DNA, 80 bp, synthetic construct
  source 1..80: mol_type = other DNA
agacataaaattacataattggccatattcaaattgaaaatataacagcttatagtatatatttgtaaataggagcacac

SEQ ID NO: 63151 - DNA, 80 bp, synthetic construct
  source 1..80: mol_type = other DNA
ataagaatacataattggccatattcaaatcaaaaatataacagcttatagtatatatttgtaaataggagcacactact

SEQ ID NO: 63152 - DNA, 80 bp, synthetic construct
  source 1..80: mol_type = other DNA
atgaattacagcctcaaaacattaaaaatattaaataaatcaggtatagcggcagttgaagtacaatctccaaatgaatt

SEQ ID NO: 63153 - DNA, 80 bp, synthetic construct
  source 1..80: mol_type = other DNA
atcacaatttgatatcggacaatataaaaatatgttaaatgtgatcactactatttactattactacaatctatactatt

SEQ ID NO: 63154 - DNA, 80 bp, synthetic construct
  source 1..80: mol_type = other DNA
agtagtgtactcctatctacaaaacttacaaaaactttagtttgaaaccaatatatgtatcatggaccatcaggaatacc

SEQ ID NO: 63155 - DNA, 80 bp, synthetic construct
  source 1..80: mol_type = other DNA
tgtcaaaatctttacaaagtatcaaaggcttatcaacttacacagaagcattcaagtctcttgggaaaatgatggacata

SEQ ID NO: 63156 - DNA, 80 bp, synthetic construct
  source 1..80: mol_type = other DNA
ggtgatagggcaacagaatatgaatcacattgtgaaagtctaaagaacaaggcgagggcttcttggaagcaagttatgaa

SEQ ID NO: 63157 - DNA, 80 bp, synthetic construct
  source 1..80: mol_type = other DNA
taaaaagttagaacctaaacagataaatacagccttagttttatgggaacagcagttcatggtcaacaacgaaatcatag

SEQ ID NO: 63158 - DNA, 80 bp, synthetic construct
  source 1..80: mol_type = other DNA
ataagaacaacaggatcaaactgctgaagaacttctgcggaatagggaagcataaacagtttaaaaacaaaatgctagat

SEQ ID NO: 63159 - DNA, 80 bp, synthetic construct
  source 1..80: mol_type = other DNA
gatatagacaattcaaaacccactatattggattttgatgatgaaaatgtgttcctggctagtttaacaatgatggagca

SEQ ID NO: 63160 - DNA, 80 bp, synthetic construct
  source 1..80: mol_type = other DNA
gactaagaggatattgtcaaaacctagtggtctaaagagcgataattttatattaaacgagtttggccaaaggatcaaag

SEQ ID NO: 63161 - DNA, 80 bp, synthetic construct
  source 1..80: mol_type = other DNA
actgcaataagggcacatatgaaaatatgtaccaaatatttgaaactaggtattggcaatgtatatcagatttttctact

SEQ ID NO: 63162 - DNA, 80 bp, synthetic construct
  source 1..80: mol_type = other DNA
catgactatttcggaaaggagttatgcaaatctttaaatatagaatataggaatgatgtaccatttatagatataatcct

SEQ ID NO: 63163 - DNA, 80 bp, synthetic construct
  source 1..80: mol_type = other DNA
ctaatgaagaatatactgtctgtatcacagtacaatagacacaataccttcagaatcgcaatgtgtgcaaataataatgt

SEQ ID NO: 63164 - DNA, 80 bp, synthetic construct
  source 1..80: mol_type = other DNA
ttttgcaatagtgttcccttctgctgatataaaaacaaagaaagcaactgtagtttatagtatcgtggtcttgcacaaag

SEQ ID NO: 63165 - DNA, 80 bp, synthetic construct
  source 1..80: mol_type = other DNA
aagaaaccaatgtattgaacccaggatgcttgcatggcacatttaaatgcatgaatgggtacatatcaatttcgcgagcc

SEQ ID NO: 63166 - DNA, 80 bp, synthetic construct
  source 1..80: mol_type = other DNA
attagattagacaaagagagatgccaaagaatagtctcatctccaggtctattcttaacaacctgcttattgtttaaaca

SEQ ID NO: 63167 - DNA, 80 bp, synthetic construct
  source 1..80: mol_type = other DNA
cgaaaatccaacactagttatgaatgacgtcatgaatttttctatatatactagtctttcaataacaaaaagtgttttat

SEQ ID NO: 63168 - DNA, 80 bp, synthetic construct
  source 1..80: mol_type = other DNA
ccctcacagaacctgcaaggtacatgataatgaactctcttgctatctcgagcaatgtcaaagcttatatagctgaaaaa

SEQ ID NO: 63169 - DNA, 80 bp, synthetic construct
  source 1..80: mol_type = other DNA
ttctcaccttatactaagacactattcagtgtttatatgacaaaacttataaaaaatgcatgttttgatgcttatggaca

SEQ ID NO: 63170 - DNA, 80 bp, synthetic construct
  source 1..80: mol_type = other DNA
aagagagagagtccaattaagagatatctatctttctgattatgatataacacaaaaaggtataaaagacaacagagaat

SEQ ID NO: 63171 - DNA, 80 bp, synthetic construct
  source 1..80: mol_type = other DNA
tagttagcatatggtttccagggagtgtgaccctcaaagaatacctaacacaagtatatctcccattttacttcaatgct

SEQ ID NO: 63172 - DNA, 80 bp, synthetic construct
  source 1..80: mol_type = other DNA
aaaggcctgcacgaaaaacaccacgtaatggtggaccttgcaaagactatattagagattgaaagtgatcaacgagagaa

SEQ ID NO: 63173 - DNA, 80 bp, synthetic construct
  source 1..80: mol_type = other DNA
agatataagacctgaaaccgaccctttaactgtagatgcccctcatattactcctgataattatctgtatgtagacaaca

SEQ ID NO: 63174 - DNA, 80 bp, synthetic construct
  source 1..80: mol_type = other DNA
tataactgaaatatggtccacaaattgcacaaagcaaacagttaatctaaagattttagttcactcattgtgcaaaaacc

SEQ ID NO: 63175 - DNA, 80 bp, synthetic construct
  source 1..80: mol_type = other DNA
tactagctgatacttccagacacaaccatcttaggaataggatagagaatagaaacaactttcgaaggtcaattactaca

SEQ ID NO: 63176 - DNA, 80 bp, synthetic construct
  source 1..80: mol_type = other DNA
atatcgacttttacaagctcaaaatcttgtttaaagataggggactttaggaaggaaaaagaactacaaaatgccaaaca

SEQ ID NO: 63177 - DNA, 80 bp, synthetic construct
  source 1..80: mol_type = other DNA
gaaaaggctcttagaaaatgagagccgaagacgaagattagccaaccctatttttgttacagatgagcaagttaatttag

SEQ ID NO: 63178 - DNA, 80 bp, synthetic construct
  source 1..80: mol_type = other DNA
aagttggacattgcaattacaacatgttaagggaggcaatgccaaattacacagattatatatccactaaagtttttgat

SEQ ID NO: 63179 - DNA, 80 bp, synthetic construct
  source 1..80: mol_type = other DNA
agattatatgaactactagacacaaaagtcttaagtgataggccagtgatagaacaaataatggatatgatggtcaatca

SEQ ID NO: 63180 - DNA, 80 bp, synthetic construct
  source 1..80: mol_type = other DNA
taaaaagttttactttacgtttttcaataaaggtcaaaaaacttctaaagacagagaaatttttgtaggggagtacgagg

SEQ ID NO: 63181 - DNA, 80 bp, synthetic construct
  source 1..80: mol_type = other DNA
caaagatgtgtatgtatgctgtggagagaattgcaaaagaaaggtgcaagctaaatcctgatgaaatgatatccgagcca

SEQ ID NO: 63182 - DNA, 80 bp, synthetic construct
  source 1..80: mol_type = other DNA
ggcgatgggaagctcaaagttcttgaacaaaaatccgaacaggaaattaggttcctggtggaaactacaagacaaaaaaa

SEQ ID NO: 63183 - DNA, 80 bp, synthetic construct
  source 1..80: mol_type = other DNA
cagagacattgacgaggcaataagtgcactagcctcagagaacttcgaagaaaatgtagagcgaatagagaagctatcaa

SEQ ID NO: 63184 - DNA, 80 bp, synthetic construct
  source 1..80: mol_type = other DNA
tattgtatctaatagattataaagtatccgtatccaatgagagtagcataataacatatgataaatactatgaactaact

SEQ ID NO: 63185 - DNA, 80 bp, synthetic construct
  source 1..80: mol_type = other DNA
gagggaagtcaagaggactaaaaatggaaataaacgcagatatgtctaaatggagtgctcaagatgtgttttataaatac

SEQ ID NO: 63186 - DNA, 80 bp, synthetic construct
  source 1..80: mol_type = other DNA
ttctggttgatagcattggacccaatattatacccgcaagagaaggagaggatcctctttttcatgtgtaattacatgca

SEQ ID NO: 63187 - DNA, 80 bp, synthetic construct
  source 1..80: mol_type = other DNA
gaaagaacttatattacctgatgagctattgttcaatttacttgaccagaaagtaacatatcagaatgacataatatcta

SEQ ID NO: 63188 - DNA, 80 bp, synthetic construct
  source 1..80: mol_type = other DNA
ctatgacaaaccagctgaattcaaacactgttcctataaaaagaaactggcttcaagggaatttcaattacacctctagc

SEQ ID NO: 63189 - DNA, 80 bp, synthetic construct
  source 1..80: mol_type = other DNA
tatgttcatagctgtgcaatgtcagtatataaggacatccttaaagaagcaataacatttttagatgggtctatattagt

SEQ ID NO: 63190 - DNA, 80 bp, synthetic construct
  source 1..80: mol_type = other DNA
taactctctagtccattcagatgacaatcaaacatctataacaatagtacaagacaaaacaactaatgaaatattaatag

SEQ ID NO: 63191 - DNA, 80 bp, synthetic construct
  source 1..80: mol_type = other DNA
actttgcaataagggaattcgaaaaatcatgcctaacctttggatgccaggcgaatatgaaaaagacctatgtaacaaac

SEQ ID NO: 63192 - DNA, 80 bp, synthetic construct
  source 1..80: mol_type = other DNA
tgcataaaagagtttgtctcattattcaatttgtacggagaacctttctcaatatacggtcgttttttactgacttcggt

SEQ ID NO: 63193 - DNA, 80 bp, synthetic construct
  source 1..80: mol_type = other DNA
gggggactgcgcatatataggaccctatgaagatcttgccagtaggatatcgtctgcccaaacagcaattaagcatggtt

SEQ ID NO: 63194 - DNA, 80 bp, synthetic construct
  source 1..80: mol_type = other DNA
gccctcccagcttggcatgggtatctatagctatcagccactggatgacttatctaacttataacatgttaccagggcaa

SEQ ID NO: 63195 - DNA, 80 bp, synthetic construct
  source 1..80: mol_type = other DNA
agagatatatctagacgaatgaatatagaaatagagatagttatagtgagaatagatcctgtaagtaaagagttgcatat

SEQ ID NO: 63196 - DNA, 80 bp, synthetic construct
  source 1..80: mol_type = other DNA
tctaatgatccaattgattatttcccagcagagaaccggaaagagatacctatagaattgaatggcatactagatgcacc

SEQ ID NO: 63197 - DNA, 80 bp, synthetic construct
  source 1..80: mol_type = other DNA
gctgtctatgataagcacagttggattagaggctgggaacctgaattttttgataagtttactgaataaatacacaccag

SEQ ID NO: 63198 - DNA, 80 bp, synthetic construct
  source 1..80: mol_type = other DNA
ttatgatgaaaagagaatctgtggttaatcagatagcagaagtgagatcatggaaggttgaagaattaacagataatgaa

SEQ ID NO: 63199 - DNA, 80 bp, synthetic construct
  source 1..80: mol_type = other DNA
atatttaagctcaaaatattaagatttctggtcttagatgcagaaatggatcccaatgatataatgggggagacaagtga

SEQ ID NO: 63200 - DNA, 80 bp, synthetic construct
  source 1..80: mol_type = other DNA
tatgagaggcagatccttgctgacgcctagaaaattcacaacagcaggtagcttgaggaaactgtattcatttagtaaat

SEQ ID NO: 63201 - DNA, 80 bp, synthetic construct
  source 1..80: mol_type = other DNA
accaagatagattgtcagcccctggtggaatggaggagctatttacatatttactggaaaagcctgagctgctagttaca

SEQ ID NO: 63202 - DNA, 80 bp, synthetic construct
  source 1..80: mol_type = other DNA
aaaggggaagattccaaagattacatggaatctgtcatttttaggtataattcaaagaggtttaaggagagcttgtcaat

SEQ ID NO: 63203 - DNA, 80 bp, synthetic construct
  source 1..80: mol_type = other DNA
tcaaaaccctgctcaattattcatagagcagattttattttcacataaaccagttatagatttttctgggataagagata

SEQ ID NO: 63204 - DNA, 80 bp, synthetic construct
  source 1..80: mol_type = other DNA
agtatataaatctccatgacagcagggctatagagaaagagccagatatattagggaaagttacatttactgaggcttac

SEQ ID NO: 63205 - DNA, 80 bp, synthetic construct
  source 1..80: mol_type = other DNA
agattattaatgaaagatttgtcatcgctcaccctcacaaatgaagatatacaggttgtttattcatatatcatactaaa

SEQ ID NO: 63206 - DNA, 80 bp, synthetic construct
  source 1..80: mol_type = other DNA
tagctccaatagattcaaagaattgtatccggcactagtggttgatataaactttgatcaattctttgatttaaaacaat

SEQ ID NO: 63207 - DNA, 80 bp, synthetic construct
  source 1..80: mol_type = other DNA
tgatccattaatgataactatagcaaatactcatgttctgtctatctatggcagtccccagaaaagaatgggaatgtcat

SEQ ID NO: 63208 - DNA, 80 bp, synthetic construct
  source 1..80: mol_type = other DNA
gctccactatgccagaatttagaaatctaaagcttatacatcactcccctgcactagtactaagagcgtacagtaaaaac

SEQ ID NO: 63209 - DNA, 80 bp, synthetic construct
  source 1..80: mol_type = other DNA
aacccagatgtccaaggtgcagacccaaccgagatggcaagggacttagtacatttaaaagagtttgtagaaaacacagg

SEQ ID NO: 63210 - DNA, 80 bp, synthetic construct
  source 1..80: mol_type = other DNA
cttagaagagaagatgagattaagaattgcccaaaatgaagtagagaaaggccaaagagatattgtctttgaattaaagg

SEQ ID NO: 63211 - DNA, 80 bp, synthetic construct
  source 1..80: mol_type = other DNA
aaatgaccagattttatcaagtatgttacgaatacgttaaatctacagagcataaaatcaaagtctttattcttccagca

SEQ ID NO: 63212 - DNA, 80 bp, synthetic construct
  source 1..80: mol_type = other DNA
aaagcatatacgacaactgatttctgcgcacttatgcagggaaatctaataaaagacaaagaatggtatacggtacacta

SEQ ID NO: 63213 - DNA, 80 bp, synthetic construct
  source 1..80: mol_type = other DNA
tctaaagcaaatactatcaggtgggcataaggcaatcatgcaacataatgccacgagtgaacaaaatatagcctttgaat

SEQ ID NO: 63214 - DNA, 80 bp, synthetic construct
  source 1..80: mol_type = other DNA
gcttcaagttaattgtacattttgcagactcattcatagaagcctcatcaaggtctgcattcttgcaattaatcttagag

SEQ ID NO: 63215 - DNA, 80 bp, synthetic construct
  source 1..80: mol_type = other DNA
caatttagctataaggatgtcagagttcacaaattgtatgatataataaagaatgggcacaatcggacagattttatccc

SEQ ID NO: 63216 - DNA, 80 bp, synthetic construct
  source 1..80: mol_type = other DNA
cttgctctttaggacaggggatcttaaacaaacagacctagataaatatgatgctatgaagagccatgagagggtgacct

SEQ ID NO: 63217 - DNA, 80 bp, synthetic construct
  source 1..80: mol_type = other DNA
tgttgtatgagaaattcggtgatgatgaagaattccttctcaaagtatcacatggtgattttacattaactgctccatgg

SEQ ID NO: 63218 - DNA, 80 bp, synthetic construct
  source 1..80: mol_type = other DNA
ggaatgattggcaaacttcaagacatttagatatgggggttattaatctaacaataactggttacaacaggtccattacc

SEQ ID NO: 63219 - DNA, 80 bp, synthetic construct
  source 1..80: mol_type = other DNA
ataataggtgaagacaataagctaacttatgcagaactctgtataacgagaaagacaccagagaacattactataagtgg

SEQ ID NO: 63220 - DNA, 80 bp, synthetic construct
  source 1..80: mol_type = other DNA
cagaaaattacttagttcaagacatgggctaaagttcgagaatatggccaagataccaacttacccaggaaattattata

SEQ ID NO: 63221 - DNA, 80 bp, synthetic construct
  source 1..80: mol_type = other DNA
taacttttagaaaaaaagatagacatcagtatgtctaccaaatacattcacatgagtcaataactagaagaaacgaagag

SEQ ID NO: 63222 - DNA, 80 bp, synthetic construct
  source 1..80: mol_type = other DNA
catatggcaattagaactagaatctttaacgaaataacaccagtatgtgttgttaacgtggctgaggtcgacggagacca

SEQ ID NO: 63223 - DNA, 80 bp, synthetic construct
  source 1..80: mol_type = other DNA
gaggatactcataaggaaattagatttcctaaataatgatgtcttcacactatcgagaattaaagtcggcatagatgagt

SEQ ID NO: 63224 - DNA, 80 bp, synthetic construct
  source 1..80: mol_type = other DNA
ttgcaactataaaaaaagcacattttagcaagatggtgtcctttgatggcccccccataaagacaggccttctagatcta

SEQ ID NO: 63225 - DNA, 80 bp, synthetic construct
  source 1..80: mol_type = other DNA
acagaactcatgaaatcgcaagacttattgaacttaaactatgacaatatccgaaacagcaatttaatatcattctccaa

SEQ ID NO: 63226 - DNA, 80 bp, synthetic construct
  source 1..80: mol_type = other DNA
attaatctgctgcgagggttcagaagatatagatgatgggctagaattcttatctgatgaccctatgaactttacagagg

SEQ ID NO: 63227 - DNA, 80 bp, synthetic construct
  source 1..80: mol_type = other DNA
gagaatcaatacattcaacaccaatatttaatatctattattcaaagcgtggggagagccatatgacttacagaaatgca

SEQ ID NO: 63228 - DNA, 80 bp, synthetic construct
  source 1..80: mol_type = other DNA
tgtaaagaaggatgtccagatttctggaaacatccaatatataaagagttcaaaatgagtatgccagttcctgaaaggag

SEQ ID NO: 63229 - DNA, 80 bp, synthetic construct
  source 1..80: mol_type = other DNA
ataaagcaactaatagacagggaaacattatcattcgaagaagctttcactttcagcacaaatgggtttatatccccaga

SEQ ID NO: 63230 - DNA, 80 bp, synthetic construct
  source 1..80: mol_type = other DNA
aaatttaggttgtttagaagcaatagtgtcgctaattagaatattaaagactgatgagtggtctacggttatagataaat

SEQ ID NO: 63231 - DNA, 80 bp, synthetic construct
  source 1..80: mol_type = other DNA
gcatacatatatgcctaatcaagaacgggatggatcacatgtaccatgcatttgatatacccaagtgtttcgtcgataat

SEQ ID NO: 63232 - DNA, 80 bp, synthetic construct
  source 1..80: mol_type = other DNA
cctataaacaggaaggtcgattgggtgatgtatagagaatttataaataacttgcctactacaagggttcccccttggaa

SEQ ID NO: 63233 - DNA, 80 bp, synthetic construct
  source 1..80: mol_type = other DNA
tgtaatgatggataacttcaagaagaagtgcctggcactaataaattcaaaactggaaactcaacgagatttttccgaat

SEQ ID NO: 63234 - DNA, 80 bp, synthetic construct
  source 1..80: mol_type = other DNA
ttgttcaaatgatgaaaaaggaaggtggtagaggcaatttagaattcgattaaacaatagagtatagttttattatttca

SEQ ID NO: 63235 - DNA, 80 bp, synthetic construct
  source 1..80: mol_type = other DNA
aatctaaattccaaatttatagggttgaattggggctaattggggttagggcaaataacagctattgtatagatttgtag

SEQ ID NO: 63236 - DNA, 80 bp, synthetic construct
  source 1..80: mol_type = other DNA
ttatagggttgaattggggctaattggggttagggcaaataacagctattgtatagatttgtagataggagcacactact

SEQ ID NO: 63237 - DNA, 80 bp, synthetic construct
  source 1..80: mol_type = other DNA
gctctttgaggaatcagtgaagtttaatgcttatgagtctgaaagatggaacacaaatttaataaaaataagagaatata

SEQ ID NO: 63238 - DNA, 80 bp, synthetic construct
  source 1..80: mol_type = other DNA
agcagttcctcgcgaggatcaatactgcaagggatgcctgcattgcgaaggatatagacgtggacctgttgatggctagg

SEQ ID NO: 63239 - DNA, 80 bp, synthetic construct
  source 1..80: mol_type = other DNA
cgaagaaagattattctgattttataactaagtctgccaaagacatatttttagcaactggcttttataaacaacctaac

SEQ ID NO: 63240 - DNA, 80 bp, synthetic construct
  source 1..80: mol_type = other DNA
aagaatgaaataagtgaaggatgggacctgatgatagagagaatacatgagcaaaggaacataactaagtcattacatga

SEQ ID NO: 63241 - DNA, 80 bp, synthetic construct
  source 1..80: mol_type = other DNA
gcagaagccaagcatgcattttatatggggtccacacaatccagggaacagcaataattcaactttcaaattgatattat

SEQ ID NO: 63242 - DNA, 80 bp, synthetic construct
  source 1..80: mol_type = other DNA
aaaggaaacttttagaaaatgaaagtcggaaaagaagattagcaaaccctatctttgtaacagatgagcaggtcaacttg

SEQ ID NO: 63243 - DNA, 80 bp, synthetic construct
  source 1..80: mol_type = other DNA
gaggttggacattgtaactacaatatgcttagagaagctatgcctaactatacagattatatatcaactaaggtttttga

SEQ ID NO: 63244 - DNA, 80 bp, synthetic construct
  source 1..80: mol_type = other DNA
tagagacatagatgaagcaataagcgctttagcatcagaaaactttgaggataatatagaaagaatagaaaagttatcca

SEQ ID NO: 63245 - DNA, 80 bp, synthetic construct
  source 1..80: mol_type = other DNA
tggagggatggaagaattgtttgcatacctattagagaagcctgagctgttggttaccaaaggagaggattccaaagatt

SEQ ID NO: 63246 - DNA, 80 bp, synthetic construct
  source 1..80: mol_type = other DNA
cctcacttgcattaacaaatgaagatatacaagttatatattcatatattatactcaatgacccactaatgataacaata

SEQ ID NO: 63247 - DNA, 80 bp, synthetic construct
  source 1..80: mol_type = other DNA
taagttccaacaggtttaaagagctatacccagcattagttgttgacataaacttcaaccaattttttgacttgaaacag

SEQ ID NO: 63248 - DNA, 80 bp, synthetic construct
  source 1..80: mol_type = other DNA
cgcgacatcttgatatgggggtcataaacttgactataacgggttataacagatctatcactataataggtgaggataac

SEQ ID NO: 63249 - DNA, 80 bp, synthetic construct
  source 1..80: mol_type = other DNA
catggattaaaatttgagaacatgacaaaaataccgacctacccaggtaattattatatcactttcaggaagaaagacag

SEQ ID NO: 63250 - DNA, 80 bp, synthetic construct
  source 1..80: mol_type = other DNA
gcaccaatatgtgtaccagatacattcccatgaatcaataacaaggaggaatgaggagcatatggctataagaactagaa

SEQ ID NO: 63251 - DNA, 80 bp, synthetic construct
  source 1..80: mol_type = other DNA
atagtatcactaataaagatcctaaggactaatgaatggtcaacagttattgacaggtgcatacatatttgcttgataaa

SEQ ID NO: 63252 - DNA, 80 bp, synthetic construct
  source 1..80: mol_type = other DNA
tcctatcaatagagaagtgaactgggtgatgtatagagaatttatcaacaacctaccagctactaaaatacctccttgga

SEQ ID NO: 63253 - DNA, 80 bp, synthetic construct
  source 1..80: mol_type = other DNA
atgtaatgatggataattttaagaaaaaatgcttagcactaataaattccaaattagaaactcagcgagatttctcagaa

SEQ ID NO: 63254 - DNA, 80 bp, synthetic construct
  source 1..80: mol_type = other DNA
tttgtgaagatgatgaagaaagatggtgggaggggcaacttagaatttgattgagcttaaaagtagtaattttgttagga

SEQ ID NO: 63255 - DNA, 80 bp, synthetic construct
  source 1..80: mol_type = other DNA
taaaatctaaattccaaatctacaaaattgaattagggttaattagggttagggcaaataacagcaattgtatagatttg

SEQ ID NO: 63256 - DNA, 80 bp, synthetic construct
  source 1..80: mol_type = other DNA
agtagtgtactcctatctacaaaatttacaaaaaattcagttatatcacaatatacacataatggactatcaagagtatc

SEQ ID NO: 63257 - DNA, 80 bp, synthetic construct
  source 1..80: mol_type = other DNA
tctcaaagtccctacaaagcataaagggtatatctacctacacagaagcatttaaatctttaggtaaaatgatggatatc

SEQ ID NO: 63258 - DNA, 80 bp, synthetic construct
  source 1..80: mol_type = other DNA
ggggataagactattgaatatgaagaattttgcatgtccctaaaaagcaaagcaagatcatcatggaagcaaataatgaa

SEQ ID NO: 63259 - DNA, 80 bp, synthetic construct
  source 1..80: mol_type = other DNA
taaaaaattagagcccaaacagataaataatgcacttgtcctatgggaacagcagtttatggtaaacaatgacctaatag

SEQ ID NO: 63260 - DNA, 80 bp, synthetic construct
  source 1..80: mol_type = other DNA
acaaaagcgaaaaattgaaattgtttaagaacttctgtggtataggcaagcacaagcaattcaagaataagatgctagaa

SEQ ID NO: 63261 - DNA, 80 bp, synthetic construct
  source 1..80: mol_type = other DNA
gacattgagatgtcaaagcccaagatattagactttgatgacccaaatatgtatctggctagcttaaccatgatggaaca

SEQ ID NO: 63262 - DNA, 80 bp, synthetic construct
  source 1..80: mol_type = other DNA
aagtaagaagatattgtctaaaagtaatgggttgaaaccagataattttatattgaatgaatttggatccagaattaaag

SEQ ID NO: 63263 - DNA, 80 bp, synthetic construct
  source 1..80: mol_type = other DNA
atgctaataaggaaacatatgataacatgcataaaatttttgagacaagatattggcaatgcatatctgacttctccacc

SEQ ID NO: 63264 - DNA, 80 bp, synthetic construct
  source 1..80: mol_type = other DNA
cacgattattttggaagagagctatgtaagtccttaaatatagaatatagaaatgatgtaccattcgtagatataatttt

SEQ ID NO: 63265 - DNA, 80 bp, synthetic construct
  source 1..80: mol_type = other DNA
ctaatgaagaatatcttatctgtgtctcaatataataggcacaatacatttaggatagctatgtgtgctaataacaatgt

SEQ ID NO: 63266 - DNA, 80 bp, synthetic construct
  source 1..80: mol_type = other DNA
gttcgctatagtatttccttcagctgatataaaaacgaaaaaagcaactgtagtttatagtatcatagtgctgcacaaag

SEQ ID NO: 63267 - DNA, 80 bp, synthetic construct
  source 1..80: mol_type = other DNA
aggaggaaaacatattcaacccaggatgtttgcatggcacattcaagtgtatgaatgggtacatttccatttctagagct

SEQ ID NO: 63268 - DNA, 80 bp, synthetic construct
  source 1..80: mol_type = other DNA
ataaggctagataaagagaggtgccaaagaattgtttcttcgcctggattatttttgactacttgcttactattcaaaca

SEQ ID NO: 63269 - DNA, 80 bp, synthetic construct
  source 1..80: mol_type = other DNA
tgataatccaaccctagtgatgagtgatatcatgaatttttctatatacactagcttgtctatcacaaagagtgttttat

SEQ ID NO: 63270 - DNA, 80 bp, synthetic construct
  source 1..80: mol_type = other DNA
ctttgacagagccagcacgatacatgattatgaattcattagccatctccagtaatgttaaagattatatagcagagaag

SEQ ID NO: 63271 - DNA, 80 bp, synthetic construct
  source 1..80: mol_type = other DNA
ttttccccttatacaaagacactatttagcgtctatatgaccagattaataaaaaatgcttgctttgatgcttatgacca

SEQ ID NO: 63272 - DNA, 80 bp, synthetic construct
  source 1..80: mol_type = other DNA
gagacagcgtgttcaacttagagatatatatttatccgattatgacataacccaaaaaggtattaaagacaatagagaat

SEQ ID NO: 63273 - DNA, 80 bp, synthetic construct
  source 1..80: mol_type = other DNA
taacaagcatatggttccctggtagtgtaacgctaaaagaatatttaacacaaatatatttaccattttatttcaatgct

SEQ ID NO: 63274 - DNA, 80 bp, synthetic construct
  source 1..80: mol_type = other DNA
aaaggattacatgagaaacatcatgttatggtagatctagcaaagactatattagaaatagaatgcgaacagagggaaaa

SEQ ID NO: 63275 - DNA, 80 bp, synthetic construct
  source 1..80: mol_type = other DNA
agacataaggcctgaaatagacccactaaccatagacgcaccacatattaccccagataattacttgtatataaataatg

SEQ ID NO: 63276 - DNA, 80 bp, synthetic construct
  source 1..80: mol_type = other DNA
cataaaggaaatatggtctacaaattgtaccaaacaaacagtgaatcttaaaattctaatccattccttgtgcaagaatc

SEQ ID NO: 63277 - DNA, 80 bp, synthetic construct
  source 1..80: mol_type = other DNA
tgcttgcagacacctcaagacacaatcatttgcggaacaggatagagaataggaataatttcagaaggtctataacaact

SEQ ID NO: 63278 - DNA, 80 bp, synthetic construct
  source 1..80: mol_type = other DNA
atttcaacattcacaagttcaaagtcttgtctcaaaataggagactttaagaaagagaaagaattacaatcagtaaaaca

SEQ ID NO: 63279 - DNA, 80 bp, synthetic construct
  source 1..80: mol_type = other DNA
aaagaaaatcttagagacacaaagtcgcaaaatgaggttagcaaatccaatgtttgtgacagatgaacaagtgtgccttg

SEQ ID NO: 63280 - DNA, 80 bp, synthetic construct
  source 1..80: mol_type = other DNA
aagtcagtcactgcaattatgagatgctaagaaatgctatgccaaattatacagattacatatccactaaagtgttcgat

SEQ ID NO: 63281 - DNA, 80 bp, synthetic construct
  source 1..80: mol_type = other DNA
agattatatgaattgttggataaaggagttttaacagataaacccgttatagagcaaataatggatatgatggttaacca

SEQ ID NO: 63282 - DNA, 80 bp, synthetic construct
  source 1..80: mol_type = other DNA
caagaagttctacttcacatttttcaataagggccagaaaacatcaaaagatagagaaatatttgttggagaatatgaag

SEQ ID NO: 63283 - DNA, 80 bp, synthetic construct
  source 1..80: mol_type = other DNA
ctaaaatgtgcatgtatgcagttgaaaggatagcaaaagaaagatgcaaactaaaccctgatgaaatgatatctgagcca

SEQ ID NO: 63284 - DNA, 80 bp, synthetic construct
  source 1..80: mol_type = other DNA
ggagatggtaagttgaaggtgttggaacaaaaatcagaacaagaaattagattcttggttgagactacaagacaaaaaaa

SEQ ID NO: 63285 - DNA, 80 bp, synthetic construct
  source 1..80: mol_type = other DNA
ccgtgaaatagatgaagcaattgagacgttagctgcagaaggatatgagagtaatctaaagaagattgaaaagctttcac

SEQ ID NO: 63286 - DNA, 80 bp, synthetic construct
  source 1..80: mol_type = other DNA
tattgtacatcatagattataaggtctctgtatcgaatgaaagtagtttgataacatatgacaaatactacgagttaact

SEQ ID NO: 63287 - DNA, 80 bp, synthetic construct
  source 1..80: mol_type = other DNA
ttggcaaagcaaagggcctaaagatggaaataaatgcagacatgtctaaatggagtgcccaagatgttttttacaaatac

SEQ ID NO: 63288 - DNA, 80 bp, synthetic construct
  source 1..80: mol_type = other DNA
ttttggctcattgccttggaccctatcctctacccacaagaaaaagagagaatattatactttatgtgcaattacatgga

SEQ ID NO: 63289 - DNA, 80 bp, synthetic construct
  source 1..80: mol_type = other DNA
taaggagttgatactgccagatgaattattattcaatttattagaccaaaaagttgcataccaaaatgacataatagcta

SEQ ID NO: 63290 - DNA, 80 bp, synthetic construct
  source 1..80: mol_type = other DNA
ctatgactaatcaattaaattccaacacggttttaataaagaggaattggcttcaaggaaattttaactatacctcaagt

SEQ ID NO: 63291 - DNA, 80 bp, synthetic construct
  source 1..80: mol_type = other DNA
tacgtccatagctgcgcaatgtctgtgtataaagaaatattaaaagaggctataacattactggacgggtctatattggt

SEQ ID NO: 63292 - DNA, 80 bp, synthetic construct
  source 1..80: mol_type = other DNA
caattcattagttcattcagatgataaccaaacatcaataacaatagttcaggacaaggtggaaaatgataaaattatag

SEQ ID NO: 63293 - DNA, 80 bp, synthetic construct
  source 1..80: mol_type = other DNA
actttgcaatgaaagaatttgagaaggcttgtttgacatttggatgccaagcaaatatgaaaaagacatatgttacaaac

SEQ ID NO: 63294 - DNA, 80 bp, synthetic construct
  source 1..80: mol_type = other DNA
tgtattaaagagtttgtttcattgtttaatttgtatggtgagcccttttcaatttatggcagattcttattaacatctgt

SEQ ID NO: 63295 - DNA, 80 bp, synthetic construct
  source 1..80: mol_type = other DNA
gggcgattgtgcttatatagggccttacgaagatttagctagtcgaatatcatcagcccagacagccataaaacatggtt

SEQ ID NO: 63296 - DNA, 80 bp, synthetic construct
  source 1..80: mol_type = other DNA
gcccgcccagtctggcatgggtatctatagcaataagccactggatgacttctctaacatacaatatgctaccagggcaa

SEQ ID NO: 63297 - DNA, 80 bp, synthetic construct
  source 1..80: mol_type = other DNA
agagatatatctgacagattaggtattccgatagaaatagtcatcatccgtatagatccagtgagcaaagatttacatat

SEQ ID NO: 63298 - DNA, 80 bp, synthetic construct
  source 1..80: mol_type = other DNA
tcaaatgacccgcttgattattttccagcagagagtaggaaagacatacctatagaattgaatggcgtattagatgctcc

SEQ ID NO: 63299 - DNA, 80 bp, synthetic construct
  source 1..80: mol_type = other DNA
attatcaatgatcagtacagttggattagaatctgggaatttatactttttaataaaattgttgagcaaatacaccccag

SEQ ID NO: 63300 - DNA, 80 bp, synthetic construct
  source 1..80: mol_type = other DNA
ttatgcaaaaaagggagtcagtagtcaatcagatagctgaagttaagaactggaaagttgagaatctaacagataatgaa

SEQ ID NO: 63301 - DNA, 80 bp, synthetic construct
  source 1..80: mol_type = other DNA
gtattcagactaaagatacttagatatttggttttagatgcagagatggaccctagtgacattatgggtgagacaagtga

SEQ ID NO: 63302 - DNA, 80 bp, synthetic construct
  source 1..80: mol_type = other DNA
tatgagagggagatctattttaacacctagaaaattcacaacagcaggtagcttgagaaaattgtattcatttagtaagt

SEQ ID NO: 63303 - DNA, 80 bp, synthetic construct
  source 1..80: mol_type = other DNA
atcaagatagactgtcttcccctggaggcatgattgaattatttacctatttgcttgagaagcctgaattgttagtgacc

SEQ ID NO: 63304 - DNA, 80 bp, synthetic construct
  source 1..80: mol_type = other DNA
aaaggggaagatatgaaagattatatggaatctgtgatattccgatataactccaaaaggttcaaggaaagtttatcaat

SEQ ID NO: 63305 - DNA, 80 bp, synthetic construct
  source 1..80: mol_type = other DNA
acagaatccagcacagctgtttatagaacagatattgttctcacataagcccataatagacttttctggcattagggaca

SEQ ID NO: 63306 - DNA, 80 bp, synthetic construct
  source 1..80: mol_type = other DNA
aatatataaacctacatgatagcagagccctagagaaagagcctgatatattagggaaagtaacgtttacagaggcttat

SEQ ID NO: 63307 - DNA, 80 bp, synthetic construct
  source 1..80: mol_type = other DNA
agattgttaatgagggatctatctagcttagaactgacaaatgacgatattcaagtaatttattcttatataatactcaa

SEQ ID NO: 63308 - DNA, 80 bp, synthetic construct
  source 1..80: mol_type = other DNA
caattctgataggtttaaagaactctaccctgcaatagtggtggatataaatttcaatcagttttttgatttaaagcaat

SEQ ID NO: 63309 - DNA, 80 bp, synthetic construct
  source 1..80: mol_type = other DNA
tgatcctatgatgataacaattgcaaacacacatatactatcaatatacgggagtccacaaagacggatgggtatgtcct

SEQ ID NO: 63310 - DNA, 80 bp, synthetic construct
  source 1..80: mol_type = other DNA
gttctacaatgccagaatttagaaatttaaagttgatacaccattccccagccttggttttaagagcatacagtaaaaat

SEQ ID NO: 63311 - DNA, 80 bp, synthetic construct
  source 1..80: mol_type = other DNA
aatccagacatccaaggtgccgaccccacagaaatggctagagatttagttcatctaaaagaatttgttgaaaatacaaa

SEQ ID NO: 63312 - DNA, 80 bp, synthetic construct
  source 1..80: mol_type = other DNA
tttggaagagaaaatgaaggtcagaattgctataaatgaggctgaaaaggggcaacgggatatagtctttgaactaaaag

SEQ ID NO: 63313 - DNA, 80 bp, synthetic construct
  source 1..80: mol_type = other DNA
agatgactagattttatcaggtttgctatgagtatgttaagtctacagaacacaagataaaagtcttcatccttccagca

SEQ ID NO: 63314 - DNA, 80 bp, synthetic construct
  source 1..80: mol_type = other DNA
aagtcatacacaacaacagatttctgctcgctcatgcaagggaacttaataaaggacaaagagtggtacacagtccacta

SEQ ID NO: 63315 - DNA, 80 bp, synthetic construct
  source 1..80: mol_type = other DNA
cttgaagcagatattgtctggtggtcacaaagccataatgcagcataatgccactagtgagcaaaatattgcttttgagt

SEQ ID NO: 63316 - DNA, 80 bp, synthetic construct
  source 1..80: mol_type = other DNA
gttttaagttgataacccattttgcagactcattcatagattcgctatctagatcagcctttttacagttgataatagat

SEQ ID NO: 63317 - DNA, 80 bp, synthetic construct
  source 1..80: mol_type = other DNA
gaatttagttataaagatgtgaaggttagtaagctctatgacataataaagaatgggtataatcgaactgactttatacc

SEQ ID NO: 63318 - DNA, 80 bp, synthetic construct
  source 1..80: mol_type = other DNA
tttgctttttaggaccggcgatttaagacaagcagacttagataaatatgatgctatgaaaagccatgagagagtaacgt

SEQ ID NO: 63319 - DNA, 80 bp, synthetic construct
  source 1..80: mol_type = other DNA
tgctctatgaaaaattcggtgatgatgaagaatttttactaaaagtagcgcatggtgatttcactctcacagcaccctgg

SEQ ID NO: 63320 - DNA, 80 bp, synthetic construct
  source 1..80: mol_type = other DNA
ggaatgactggcagacatctcgtcatttggacatgggctctattaatctaacaataactggttataataggtcaataaca

SEQ ID NO: 63321 - DNA, 80 bp, synthetic construct
  source 1..80: mol_type = other DNA
ataattggagaagacaataagttgacatatgcagagctatgtctgaccaggaaaactcctgagaatataactataagcgg

SEQ ID NO: 63322 - DNA, 80 bp, synthetic construct
  source 1..80: mol_type = other DNA
tagaaagttgctgggctcaaggcacggtcttaaatttgaaaatatgtctaaaatccaaacatacccaggcaattattaca

SEQ ID NO: 63323 - DNA, 80 bp, synthetic construct
  source 1..80: mol_type = other DNA
taacatataggaagaaggatcgccaccagtttgtataccagatacattctcatgaatcaataacaaggaggaacgaagaa

SEQ ID NO: 63324 - DNA, 80 bp, synthetic construct
  source 1..80: mol_type = other DNA
cacatggctatcaagactagaatatacaatgaaataaccccggtatgtgtagttaatgttgcagaggtggatggggatca

SEQ ID NO: 63325 - DNA, 80 bp, synthetic construct
  source 1..80: mol_type = other DNA
acgtatattaataagatccttagattatttaaataatgatatattctctctttcaagaattaaagttgggcttgatgaat

SEQ ID NO: 63326 - DNA, 80 bp, synthetic construct
  source 1..80: mol_type = other DNA
ttgcaacaataaaaaaagcacacttcagcaagatggtttcatttgaaggacccccaattaagacaggccttcttgatctt

SEQ ID NO: 63327 - DNA, 80 bp, synthetic construct
  source 1..80: mol_type = other DNA
actgaattgatgaaatcccaagatttacttaaccttaattatgacaatataaggaatagcaacctgatatccttttcaaa

SEQ ID NO: 63328 - DNA, 80 bp, synthetic construct
  source 1..80: mol_type = other DNA
attgatttgttgtgaagggtcaaataatataaatgatggcttagagttcctatctgatgatcctatgaactttacagaag

SEQ ID NO: 63329 - DNA, 80 bp, synthetic construct
  source 1..80: mol_type = other DNA
gcgaagcaatacattcaacaccaatttttaatatatattactcaaagaagggagataaacatatgacatacagaaatgca

SEQ ID NO: 63330 - DNA, 80 bp, synthetic construct
  source 1..80: mol_type = other DNA
tgcaagactgggtgccctgatttttggaagcatcccatttataaagagttcaagatgagtatgccagtacctgagcgaag

SEQ ID NO: 63331 - DNA, 80 bp, synthetic construct
  source 1..80: mol_type = other DNA
atcaaactactgatagagagggaaactaagatttttgaagaagcctttacattcagcgagaatggcttcatatcaccgga

SEQ ID NO: 63332 - DNA, 80 bp, synthetic construct
  source 1..80: mol_type = other DNA
gaatcttggttgcttagaagctgtggtatcattaataaaattgttgaaaactaatgaatggtccacagttatagacaaat

SEQ ID NO: 63333 - DNA, 80 bp, synthetic construct
  source 1..80: mol_type = other DNA
gtatccatatatgcttaataaaaaatggcatggaccatatgtatcattcatttgatgttcccaaatgctttatggggaat

SEQ ID NO: 63334 - DNA, 80 bp, synthetic construct
  source 1..80: mol_type = other DNA
cctattactagagatataaattgggtaatgtttagagaatttatcaatagcttaccaggaacagatataccgccatggaa

SEQ ID NO: 63335 - DNA, 80 bp, synthetic construct
  source 1..80: mol_type = other DNA
tgttatgacagagaactttaagaagaaatgtattgccctaataaattccaaatttgaaacacagagagatttctcagaat

SEQ ID NO: 63336 - DNA, 80 bp, synthetic construct
  source 1..80: mol_type = other DNA
tcactaaattgatgaaaaaggaaggtggaaggagcaatatagagtttgactagtagttatgggtttataggggactgaca

SEQ ID NO: 63337 - DNA, 80 bp, synthetic construct
  source 1..80: mol_type = other DNA
attagaccataaatctgggagtggtttgaaattggctaagattcaaaaagaggggaattaacagcaactgtataaatttg

SEQ ID NO: 63338 - DNA, 80 bp, synthetic construct
  source 1..80: mol_type = other DNA
aggggtttgaaattggctaagattcaaaaagaggggaattaacagcaactgtataaatttgtagagtggagcacactact

SEQ ID NO: 63339 - DNA, 80 bp, synthetic construct
  source 1..80: mol_type = other DNA
gctttttgaagaatcagtcaaattcaatgcttacgaatcagagagatggaatactaacttggttaaaattagagaatata

SEQ ID NO: 63340 - DNA, 80 bp, synthetic construct
  source 1..80: mol_type = other DNA
aacaattcttggctaggatcaacactgcaagagacgcatgtgtagccaaagatatcgacgttgacctattaatggccaga

SEQ ID NO: 63341 - DNA, 80 bp, synthetic construct
  source 1..80: mol_type = other DNA
caaagaaagactatttagaacacatttcaaaatctgcaaagaatatttttctggctagtggattctataaacagccaaat

SEQ ID NO: 63342 - DNA, 80 bp, synthetic construct
  source 1..80: mol_type = other DNA
aaaaacgagattagtgagggatggacattaatggttgaaagggtgcaagaccagagggaaatctcaaaaaccctccatga

SEQ ID NO: 63343 - DNA, 80 bp, synthetic construct
  source 1..80: mol_type = other DNA
tcagaaacccagcatacattttatatggggggcccataacccaggaaacagtaacaatgcaaccttcaaactcatactgc

SEQ ID NO: 63344 - DNA, 80 bp, synthetic construct
  source 1..80: mol_type = other DNA
gggcccataacccaggaaacagtaacaatgcaaccttcaaactcatactgctctcaaagtccctacaaagcataaagggt

SEQ ID NO: 63345 - DNA, 80 bp, synthetic construct
  source 1..80: mol_type = other DNA
gggatatttacttatccgattacgatattacacagaagggaataaaagataatagggaattggtaagcatatggttccca

SEQ ID NO: 63346 - DNA, 80 bp, synthetic construct
  source 1..80: mol_type = other DNA
ctgtgtataaagatattttaaaagaagcaataactctgttagatggctcaatactggttaattcattagtccactccgat

SEQ ID NO: 63347 - DNA, 80 bp, synthetic construct
  source 1..80: mol_type = other DNA
agcaaaaaccaagcatccacttcatatggggtcctcataatcctgggaatagcaacaattcaacctttaaactaattttg

SEQ ID NO: 63348 - DNA, 80 bp, synthetic construct
  source 1..80: mol_type = other DNA
gtagtattatcagtattatcgaatgcacaaaattatggaataaatttgccaatcactggatctatggatacagcatatgc

SEQ ID NO: 63349 - DNA, 80 bp, synthetic construct
  source 1..80: mol_type = other DNA
gtgacactgaatggaaagatacactatctcaactgtttttaaccaaaggatggccgacaggttcagtttattttaatgaa

SEQ ID NO: 63350 - DNA, 80 bp, synthetic construct
  source 1..80: mol_type = other DNA
tattcaaacgctttagaattttccatcgaaccaaaactatactgtgattataatgttgtgctaattaaattcacttctgg

SEQ ID NO: 63351 - DNA, 80 bp, synthetic construct
  source 1..80: mol_type = other DNA
tgaggaattggacatatctgaattagctgatctaatactgaatgagtggttatgcaatccaatggatataacattatatt

SEQ ID NO: 63352 - DNA, 80 bp, synthetic construct
  source 1..80: mol_type = other DNA
taactcaacacaatataataataattttttatcttcaactttatgtctatattatccatcagaagctccaactcaaatta

SEQ ID NO: 63353 - DNA, 80 bp, synthetic construct
  source 1..80: mol_type = other DNA
aggatctagaagtgtcaaagcccaaaatattagactttgatgacgcaaatatgtatctagctagcctaaccatgatggaa

SEQ ID NO: 63354 - DNA, 80 bp, synthetic construct
  source 1..80: mol_type = other DNA
ttcactaaactgatgaaaaaggaaggtgggaggagtaatatagaatttgattagtagttatgagtttacagagaacctac

SEQ ID NO: 63355 - DNA, 80 bp, synthetic construct
  source 1..80: mol_type = other DNA
aattaggctataaatttgggagggttttggaaattggctaaaattcaaaaagaggtggattaacagcaactgtataaatt

SEQ ID NO: 63356 - DNA, 80 bp, synthetic construct
  source 1..80: mol_type = other DNA
gagaacctacaattaggccataaatttgggagggttttggaaattggctaaaattcaaaaagaggtggattaacagcaac

SEQ ID NO: 63357 - DNA, 80 bp, synthetic construct
  source 1..80: mol_type = other DNA
acctactagggaaggaaaaattgctgaaggtacgaatacgactgatagatggtttgcttgcgtattagttgaaccaaatg

SEQ ID NO: 63358 - DNA, 80 bp, synthetic construct
  source 1..80: mol_type = other DNA
tgcaaagtacacaaagacagtacgtactagatggacaaaatgttcaattacaggtttcaaatgattcaaatacttcgtgg

SEQ ID NO: 63359 - DNA, 80 bp, synthetic construct
  source 1..80: mol_type = other DNA
aaattcatattatttattaaattgacgcatgacggaacgtatactcaatattcaaccttatcaacaccgcacaaattatg

SEQ ID NO: 63360 - DNA, 80 bp, synthetic construct
  source 1..80: mol_type = other DNA
cgcgtggatgaagagagataacagagtatactggtaccaaggaacgacaccgaacgcatcagaaagctattacttaacta

SEQ ID NO: 63361 - DNA, 80 bp, synthetic construct
  source 1..80: mol_type = other DNA
taaacaatgataacagtaacgtttcaagtgacgctgaattttatttaataccgcaatcacaaactactatgtgtacacaa

SEQ ID NO: 63362 - DNA, 80 bp, synthetic construct
  source 1..80: mol_type = other DNA
tatataaataatggtttaccaccaattcagaacacaagaaacattgtaccagtaaatattacatctagacagattaaaaa

SEQ ID NO: 63363 - DNA, 80 bp, synthetic construct
  source 1..80: mol_type = other DNA
tacatctagacagattaaaaacgtaagagcccagaagaatgaagatatagtaatatcaaaaacctcattgtggaaggaaa

SEQ ID NO: 63364 - DNA, 80 bp, synthetic construct
  source 1..80: mol_type = other DNA
acactagtgcaaccaactcttgacggtccatatcaacctacttcattcaatctgccgattgattattggatgttgattgc

SEQ ID NO: 63365 - DNA, 80 bp, synthetic construct
  source 1..80: mol_type = other DNA
atttatagatttcttttacttattgttattgcatcaccttttgctaaaacacaaaattatggaattaatttaccgattac

SEQ ID NO: 63366 - DNA, 80 bp, synthetic construct
  source 1..80: mol_type = other DNA
ccatcggacccgatgactggttgagaagccacaatcagtcatatcgcgtgtgacttagtcttaatcccgtttaaccaatc

SEQ ID NO: 63367 - DNA, 80 bp, synthetic construct
  source 1..80: mol_type = other DNA
aaccagttgataaaatcgatatgtcacaagagtttaatcagaagcattttaaaacgctaaatgagtgggctgagggtgag

SEQ ID NO: 63368 - DNA, 80 bp, synthetic construct
  source 1..80: mol_type = other DNA
aatccatatgaatcaaaagaagtgactgcatcattgtgagaggttgagctgccgtcgtctgtctgcggaagcggcggagt

SEQ ID NO: 63369 - DNA, 80 bp, synthetic construct
  source 1..80: mol_type = other DNA
gttgagaagccacaaccagtcatatcgcgtgtgacttagtcttaatcccgtttaaccaatccagccagcgctggacgtta

SEQ ID NO: 63370 - DNA, 80 bp, synthetic construct
  source 1..80: mol_type = other DNA
aaaattgctcttaaaacgtcaaagtgttcatacaaagtaattaaatattgtattgtgtcaattttcaacattctattaaa

SEQ ID NO: 63371 - DNA, 80 bp, synthetic construct
  source 1..80: mol_type = other DNA
actggctggatataaagagcagattactaccaaagatgaaattgaaaagcaaatggacagggttgtaagagaaatgagac

SEQ ID NO: 63372 - DNA, 80 bp, synthetic construct
  source 1..80: mol_type = other DNA
aaaattgacatgtcacaagaaattaatcagaaacacttcaaaacgctgaatgagtgggctgaaggtgaaaatccatatga

SEQ ID NO: 63373 - DNA, 80 bp, synthetic construct
  source 1..80: mol_type = other DNA
aatggaggatcctggaatggcgtattttccatacattgcttctgtcctaactgtactatttacgttacataaggcatcga

SEQ ID NO: 63374 - DNA, 80 bp, synthetic construct
  source 1..80: mol_type = other DNA
ctgccttcgctctgtttgctttgacctaaatcttgactgcgtgccgccactatatcttctttccagtcctacttgcagtt

SEQ ID NO: 63375 - DNA, 80 bp, synthetic construct
  source 1..80: mol_type = other DNA
ctgaagaatatttctttgtttatgatgccattacaggaatttgtaagtgtctgggttcgagatcctaggattcagaagga

SEQ ID NO: 63376 - DNA, 80 bp, synthetic construct
  source 1..80: mol_type = other DNA
ggacttctggcattcttacattgactatgagatatgtattcatactaatagcatgtgttttacaatgaaaacatcctgtg

SEQ ID NO: 63377 - DNA, 80 bp, synthetic construct
  source 1..80: mol_type = other DNA
tacgaagaagatatagagaattcgtgtggctgaggcagagactccaaagtaatgcgttgctggtacaactgccagaactt

SEQ ID NO: 63378 - DNA, 80 bp, synthetic construct
  source 1..80: mol_type = other DNA
ccatctaaaaacctgtttttcaacatgaacaatcgccagcacgtggatcagcgtcgccagggtctggaagatttcctcag

SEQ ID NO: 63379 - DNA, 80 bp, synthetic construct
  source 1..80: mol_type = other DNA
aaaagtcctacagaatgcacttttgctttcagatagcagccttcacctcttcttacagagccatctgaattcagaagaca

SEQ ID NO: 63380 - DNA, 80 bp, synthetic construct
  source 1..80: mol_type = other DNA
ttgaggcgtgtgtttctgggcagactaagtactctgtggaagaagcaattcacaagtttgccttaatgaatagacgtttc

SEQ ID NO: 63381 - DNA, 80 bp, synthetic construct
  source 1..80: mol_type = other DNA
cctgaagaagatgaagaaggaaaaaaagaaaatgatatagattatgattcagaaagttcatcctctgggcttggacacag

SEQ ID NO: 63382 - DNA, 80 bp, synthetic construct
  source 1..80: mol_type = other DNA
tagtgatgacagcagttcacatggatgtaaagtaaatacagctccgcaggaatcctgaaaaataattctaatgttactat

SEQ ID NO: 63383 - DNA, 80 bp, synthetic construct
  source 1..80: mol_type = other DNA
cttaggaatagcaaattatgtccagtcatagagaagaaagcttcataataatacattcttacctaaagctcactgtcatg

SEQ ID NO: 63384 - DNA, 80 bp, synthetic construct
  source 1..80: mol_type = other DNA
atgttaggtatttaaattcttaaagatgttgggttgtttattagtggtatttttatgttgtcttattttaggtaagcttc

SEQ ID NO: 63385 - DNA, 80 bp, synthetic construct
  source 1..80: mol_type = other DNA
tgtgtaaagctaaaaatcctgtgaatacaatactatcctttacaggcagacattattggtaaacaagatcttgccctcca

SEQ ID NO: 63386 - DNA, 80 bp, synthetic construct
  source 1..80: mol_type = other DNA
atgaaatgacttacatgttttaaaaaaccgagttggttttattgaatttaaaaagataggtaactaagtagcatttaaaa

SEQ ID NO: 63387 - DNA, 80 bp, synthetic construct
  source 1..80: mol_type = other DNA
tcaagatagagcattccttcttgtatcagtggggcagtgttaccataaacacggtgtatatgttgttaaaccctatgaag

SEQ ID NO: 63388 - DNA, 80 bp, synthetic construct
  source 1..80: mol_type = other DNA
agtaacagtgtagaccagactgcctctctcagatatgtgcctgatattttgtggatacctcccctgcactggcaaaacac

SEQ ID NO: 63389 - DNA, 80 bp, synthetic construct
  source 1..80: mol_type = other DNA
tatgcttttgggtgttagactgaaatattttaagagtatttaacctttccagtattctgtttcacgcttagatggaaatg

SEQ ID NO: 63390 - DNA, 80 bp, synthetic construct
  source 1..80: mol_type = other DNA
tatcttatgaatagagacatattaaaataatgtttacatcttagaaaaaacatagatagtgctagtaatattacttataa

SEQ ID NO: 63391 - DNA, 80 bp, synthetic construct
  source 1..80: mol_type = other DNA
ctgtaatatatagattcagaaatacattttcattatccaaaatcagcttcaacaaatggtttctggagacaaataatttg

SEQ ID NO: 63392 - DNA, 80 bp, synthetic construct
  source 1..80: mol_type = other DNA
ttttcattatcattgtataatcaggttaatgatttattttttgactaaatgtgcaatttcttatcactagataactttca

SEQ ID NO: 63393 - DNA, 80 bp, synthetic construct
  source 1..80: mol_type = other DNA
gtatcagtggtggttacttattacttaaatcagaggaaggattttataaagattaataaatttaattttaccaataaata

SEQ ID NO: 63394 - DNA, 80 bp, synthetic construct
  source 1..80: mol_type = other DNA
ttcccataatttagaaaaggatgtcgacttgctaatttcagaaataattattcatttttaaaaagccccttttaaagcat

SEQ ID NO: 63395 - DNA, 80 bp, synthetic construct
  source 1..80: mol_type = other DNA
ttgctaatttcagaaataattattcatttttaaaaagccccttttaaagcatctacttgaagattggtataattttcata

SEQ ID NO: 63396 - DNA, 80 bp, synthetic construct
  source 1..80: mol_type = other DNA
tcaaaatgtaactgtaaatccaggtccatttgctcaaacaagatatgctccagtcaattggggtcatggagaaataaatg

SEQ ID NO: 63397 - DNA, 80 bp, synthetic construct
  source 1..80: mol_type = other DNA
tccaagacgtgcaagaaaacatcacactacacgagcagcagctcgtgactgctcgtcaaaagttaaaagatgcagaaaag

SEQ ID NO: 63398 - DNA, 80 bp, synthetic construct
  source 1..80: mol_type = other DNA
aggcaagaaatataataagtcctgtcatgggggtgattggatttggcttttttgttaaggactggatggaaaggatagaa

SEQ ID NO: 63399 - DNA, 80 bp, synthetic construct
  source 1..80: mol_type = other DNA
gcgtgcggaaagatggataagcttaccgacctcaactacacattgaatgtgatcactttaatgaatgacacattacattc

SEQ ID NO: 63400 - DNA, 80 bp, synthetic construct
  source 1..80: mol_type = other DNA
tggagatgattgacaaattgacaactcgtgagattgagcaggttgagttacttaaacgtatacatgataagttagtggct

SEQ ID NO: 63401 - DNA, 80 bp, synthetic construct
  source 1..80: mol_type = other DNA
agaccagttgatgctatagatatgtcgaaagaatttaatcagaagaacattagaacgctagatgaatgggaaaacggaaa

SEQ ID NO: 63402 - DNA, 80 bp, synthetic construct
  source 1..80: mol_type = other DNA
aaccagttaataaaattgatatgtcacaagaatttaatcagaaacatttcaaaacgctgaacgagtgggctgagggtgaa

SEQ ID NO: 63403 - DNA, 80 bp, synthetic construct
  source 1..80: mol_type = other DNA
aggcttcaattccaaccatgaaaatcgctcttaaaacatcaagatgttcgtataaagtaatcaaatattgcattgtgtca

SEQ ID NO: 63404 - DNA, 80 bp, synthetic construct
  source 1..80: mol_type = other DNA
ataaactgactacacgtgaaatcgagcaagtagagctacttaaacgtatatatgataaattgatggtgcaatcaatttgc

SEQ ID NO: 63405 - DNA, 80 bp, synthetic construct
  source 1..80: mol_type = other DNA
acgaccgaccttgaggcatcctttcaagactgtttgtttaaggactgggaggagttgggggaggagaatagattacagtt

SEQ ID NO: 63406 - DNA, 80 bp, synthetic construct
  source 1..80: mol_type = other DNA
atgcccctatcctatcaacacttccggagactactgttattagacgacgaggcaggtcccctagaagaagaggtccctcg

SEQ ID NO: 63407 - DNA, 80 bp, synthetic construct
  source 1..80: mol_type = other DNA
gtgcgatcaactgatgagatagatatgacaaaagaaattaatcaaaagaacgtaagaacgctagaagagtgggagagcgg

SEQ ID NO: 63408 - DNA, 80 bp, synthetic construct
  source 1..80: mol_type = other DNA
gaaatagatatgacaaaggaaattaatcaaaagaacgtgagaacgctagaagagtgggagagtggaaaaaatccttatga

SEQ ID NO: 63409 - DNA, 80 bp, synthetic construct
  source 1..80: mol_type = other DNA
agccatagtcagccatatcgcgtgtggtgcgagccttaatcccgtttaactaatccggtcagcaccggacgttaatggaa

SEQ ID NO: 63410 - DNA, 80 bp, synthetic construct
  source 1..80: mol_type = other DNA
aaaatagcattgaagacgtcaaagtgttcgtataaagtagtgaaatattgcattgtaacgatttttaatacgttgttgaa

SEQ ID NO: 63411 - DNA, 80 bp, synthetic construct
  source 1..80: mol_type = other DNA
ataaattgactacacgtgaaattgaacaagtggaactactgaagcgtatctatgacaaattgatggtgcgatcgaatagt

SEQ ID NO: 63412 - DNA, 80 bp, synthetic construct
  source 1..80: mol_type = other DNA
aaaattgcattgaagacgtccaagtgttcatataaagtagtgaagtattgtattgtgacgattttcaatgcgttgttgaa

SEQ ID NO: 63413 - DNA, 80 bp, synthetic construct
  source 1..80: mol_type = other DNA
tataaagaacagattaccactaaagatgagatagaaaagcaaatggacagggtagtcaaagagatgagacgtcagctaga

SEQ ID NO: 63414 - DNA, 80 bp, synthetic construct
  source 1..80: mol_type = other DNA
ataagttgactacacgtgaaattgagcaggtggaattactaaaacgcattcacgataagttgatgatacgagcagtagac

SEQ ID NO: 63415 - DNA, 80 bp, synthetic construct
  source 1..80: mol_type = other DNA
aaacaacaaatgtagactcgtttgaaatggttgctgaaaatgagaaattagctatagtggatgtcgttgatgggataaat

SEQ ID NO: 63416 - DNA, 80 bp, synthetic construct
  source 1..80: mol_type = other DNA
gacaaaaatgatagaataaagttgttgaaaaatttctgcgggataggtaaacacaagcaatttaagaacaagatgttgga

SEQ ID NO: 63417 - DNA, 80 bp, synthetic construct
  source 1..80: mol_type = other DNA
aaactaaaagaatattatcaaaacccagcggcttaaaaaatgacaattttatcttaaacgaattcggccagagaattaaa

SEQ ID NO: 63418 - DNA, 80 bp, synthetic construct
  source 1..80: mol_type = other DNA
gactgcaataaagacacttatgacaacatgtgtcaaatttttgggaccagatattggcaatgtatatcagatttttccac

SEQ ID NO: 63419 - DNA, 80 bp, synthetic construct
  source 1..80: mol_type = other DNA
acataccttttattgacattcttttagacattaaacctgagacagaccctctaacagtggatgccccccatataacccct

SEQ ID NO: 63420 - DNA, 80 bp, synthetic construct
  source 1..80: mol_type = other DNA
acattaccgagatatggtcaactaattgtacaaaacagacagtcaacttgaaaattttggttcattctttatgtaaaaat

SEQ ID NO: 63421 - DNA, 80 bp, synthetic construct
  source 1..80: mol_type = other DNA
ctactagcagacacatctagacacaatcacctccgaaataggatagaaaataggaacaacttccgaagatctatcaccac

SEQ ID NO: 63422 - DNA, 80 bp, synthetic construct
  source 1..80: mol_type = other DNA
agaggaagctcctagagaatgagagcagaaagcgtagattagcaaaccctatatttgtcacagatgagcaagtcaacttg

SEQ ID NO: 63423 - DNA, 80 bp, synthetic construct
  source 1..80: mol_type = other DNA
gaagttggacattgcaattataatatgcttagggaggccatgcctaattacacagattatatgtctacaaaagtttttga

SEQ ID NO: 63424 - DNA, 80 bp, synthetic construct
  source 1..80: mol_type = other DNA
gacaactacctatatatagacaatatactatacttaatagattataaggtatctgtttcaaatgagagtagtataataac

SEQ ID NO: 63425 - DNA, 80 bp, synthetic construct
  source 1..80: mol_type = other DNA
acagagaaatagatgaggcaatcagtgcattggcttctgaaaattttgaagaaaatatagaaaaaatagagaagctctct

SEQ ID NO: 63426 - DNA, 80 bp, synthetic construct
  source 1..80: mol_type = other DNA
agggggaaatcacgagggttaaaaatggaaataaatgcagacatgtctaaatggagtgctcaagatgttttttataaata

SEQ ID NO: 63427 - DNA, 80 bp, synthetic construct
  source 1..80: mol_type = other DNA
cattatctatgataagcactgtagggttagaagctggaaatttaaatttcctgatcaatttactaaacaagtacacacct

SEQ ID NO: 63428 - DNA, 80 bp, synthetic construct
  source 1..80: mol_type = other DNA
gttatgatgaaaagggagtcagttgtaaaccaaattgcagaagttagatcatggaaggtagaagatttgacagacaatga

SEQ ID NO: 63429 - DNA, 80 bp, synthetic construct
  source 1..80: mol_type = other DNA
taaggaagttatattcatttaccaaataccaggacagattatctgctccaggggggatggaggagctatttgcatacttg

SEQ ID NO: 63430 - DNA, 80 bp, synthetic construct
  source 1..80: mol_type = other DNA
caggggggatggaggagctatttgcatacttgttagaaaaacctgagttattagttacgaaaggagaggactcaagagat

SEQ ID NO: 63431 - DNA, 80 bp, synthetic construct
  source 1..80: mol_type = other DNA
taagttcaaatagatttaaggagttgtatccagctttagttgtagacataaattttaaccagttcttcgatttaaaacaa

SEQ ID NO: 63432 - DNA, 80 bp, synthetic construct
  source 1..80: mol_type = other DNA
tgaggataactcaaaatgagatggagaaaggtcagagagacattgtttttgaactaaaagagatgactagattttatcaa

SEQ ID NO: 63433 - DNA, 80 bp, synthetic construct
  source 1..80: mol_type = other DNA
catgggttgaaatttgaaaatatgaccaaaattcagacctatcctggcaactattatatcactttcaggaagaaagatag

SEQ ID NO: 63434 - DNA, 80 bp, synthetic construct
  source 1..80: mol_type = other DNA
tttgtacaaatgatgaagaaagagggtggtaagaataatctagaatttgattagattcaaatactataagatgtttaggt

SEQ ID NO: 63435 - DNA, 80 bp, synthetic construct
  source 1..80: mol_type = other DNA
agggttcaaattccaaacttacattttgaattaggattaattagggttaggggaaaataacagcaattgtatagatttgt

SEQ ID NO: 63436 - DNA, 80 bp, synthetic construct
  source 1..80: mol_type = other DNA
gtatagatttgtagataggagcacactacctaaacatcttatagtatttgaatctaatcaaattctagattattcttacc

SEQ ID NO: 63437 - DNA, 80 bp, synthetic construct
  source 1..80: mol_type = other DNA
cgatgtaagaggttgatctgccgtcgactatcttcggaagcggcggagatctttacagtaaactccattggacctgatgg

SEQ ID NO: 63438 - DNA, 80 bp, synthetic construct
  source 1..80: mol_type = other DNA
agccacaactgatcatatcgcgtgtggcttaagccttaatcccgtttaaccaacctggcgagcgctgggcgttaatggaa

SEQ ID NO: 63439 - DNA, 80 bp, synthetic construct
  source 1..80: mol_type = other DNA
cggtaaaaatagcgttaaaaacgtcaaaatgttcgtataaagtagtaaagtattgtattgtaacaatttttaacacgtta

SEQ ID NO: 63440 - DNA, 80 bp, synthetic construct
  source 1..80: mol_type = other DNA
gagaagccacagtcagccatatcgcgtatggctcaagccttaatcccgtttaaccaatccggtcagcaccggacgttaat

SEQ ID NO: 63441 - DNA, 80 bp, synthetic construct
  source 1..80: mol_type = other DNA
caactgatacaaacacgttggaagaagttgcaacagatgaaagattagtgatcactgacgttgtagatggagtcaatcac

SEQ ID NO: 63442 - DNA, 80 bp, synthetic construct
  source 1..80: mol_type = other DNA
aggcttcgattccaaccatgaagattgctcttaaaacgtcaaagtgttcatataaagtaatcaaatattgtattgtgtca

SEQ ID NO: 63443 - DNA, 80 bp, synthetic construct
  source 1..80: mol_type = other DNA
atttttaacactctattgaagctggctggatataaagaacagattactactaaagatgaaattgaaaagcaaatggacag

SEQ ID NO: 63444 - DNA, 80 bp, synthetic construct
  source 1..80: mol_type = other DNA
aagctaactactagagagattgaacaagtcgaactgcttaagcgaattcatgatatgttgataattaaaccagtcgacaa

SEQ ID NO: 63445 - DNA, 80 bp, synthetic construct
  source 1..80: mol_type = other DNA
tggagatgattgataaattaactactcgtgaaattgaacaagttgaattgcttaaacgtatatatgacaatttaataacc

SEQ ID NO: 63446 - DNA, 80 bp, synthetic construct
  source 1..80: mol_type = other DNA
agaccagttgacattgtagatatgacgaaggaatttaatcaaaaaaatataaaaacgctggatgagtgggagagcggaaa

SEQ ID NO: 63447 - DNA, 80 bp, synthetic construct
  source 1..80: mol_type = other DNA
agagcgcgtgcggaaagatggataaacttgccgacctcaactacacattgagtgtaatcactttaatgaatgacacatta

SEQ ID NO: 63448 - DNA, 80 bp, synthetic construct
  source 1..80: mol_type = other DNA
aatccatatgaaccgatagaggtgactgcatccatgtgagaggttgagttgccgtcgtctgtcttcggaagcgacggaac

SEQ ID NO: 63449 - DNA, 80 bp, synthetic construct
  source 1..80: mol_type = other DNA
gtaaaattaaattcgcgtaacagactttaggatctgtgaagcagctaggagacgatctctctgtagttgtttctccccaa

SEQ ID NO: 63450 - DNA, 80 bp, synthetic construct
  source 1..80: mol_type = other DNA
gtggaaaccaaatctgggggtgactttgacttctgcttgctcaaaccacctggccagcagatggagaatggattctcacc

SEQ ID NO: 63451 - DNA, 80 bp, synthetic construct
  source 1..80: mol_type = other DNA
tctgttccgagagagcgcgtgcggaaagatggaaaaatttaccgacctcaactacacattgagtgtaatcactttaatga

SEQ ID NO: 63452 - DNA, 80 bp, synthetic construct
  source 1..80: mol_type = other DNA
agcagctcaaatggggaagaggaggacttagcgatgctgcaagaaccttcttgatcaaatttggtgtgaaactgccttaa

SEQ ID NO: 63453 - DNA, 80 bp, synthetic construct
  source 1..80: mol_type = other DNA
caccaattcaaaatactagaaatgtagttccattatctctatcatccagatctattcaatatagaagagcacaagttaat

SEQ ID NO: 63454 - DNA, 80 bp, synthetic construct
  source 1..80: mol_type = other DNA
caaatacagcgacttttgaagaggtggctacaagtgaaaaattagtaataaccgacgttgttgatggtgtgaaccataaa

SEQ ID NO: 63455 - DNA, 80 bp, synthetic construct
  source 1..80: mol_type = other DNA
gttccttctgtacatcctgaagtgtgtatgctttatgctgatgaccatcaatctgatgcaaataagtttaatggtaattt

SEQ ID NO: 63456 - DNA, 80 bp, synthetic construct
  source 1..80: mol_type = other DNA
agttttatacaaaatattagatctattttttaacagtaagagaaacgttgaaccgcgtgcataaagaggactaggtgaaa

SEQ ID NO: 63457 - DNA, 80 bp, synthetic construct
  source 1..80: mol_type = other DNA
cgagagagcgcgtgcggaaagatggaaaagcttaccgacctcaattacacattgagtgtaatcactttaatgaacagtac

SEQ ID NO: 63458 - DNA, 80 bp, synthetic construct
  source 1..80: mol_type = other DNA
atataccacaattctgaccattttaatatctatcatattattgaattacatattaaaaactataactaatacaatggact

SEQ ID NO: 63459 - DNA, 80 bp, synthetic construct
  source 1..80: mol_type = other DNA
ataacgggatcactagacgctgtatacacaaattcaactagtggagaatcatttctaacttcaacgttatgtttatatta

SEQ ID NO: 63460 - DNA, 80 bp, synthetic construct
  source 1..80: mol_type = other DNA
cgactgggtcagtttatttcaaagactacaatgattttactacattttctatgaatccacaactgtattgtgattataat

SEQ ID NO: 63461 - DNA, 80 bp, synthetic construct
  source 1..80: mol_type = other DNA
atagtattgatgcgatatgataatacatctgaattggatgcatcggaattagcagatcttatattgaacgaatggctgtg

SEQ ID NO: 63462 - DNA, 80 bp, synthetic construct
  source 1..80: mol_type = other DNA
caatcctatggatatatcactttactattatcaacaaaatagcgaatcaaataaatggatatcaatgggaacagactgca

SEQ ID NO: 63463 - DNA, 80 bp, synthetic construct
  source 1..80: mol_type = other DNA
cggtaaaagtttgtccactcaatacacaaactttagggattggatgtaaaactacggacgtggatacatttgagattgtt

SEQ ID NO: 63464 - DNA, 80 bp, synthetic construct
  source 1..80: mol_type = other DNA
acataatttttagatttttactactcatcgctttaatatcaccattcgtgagaacgcaaaattacggcatgtatttacca

SEQ ID NO: 63465 - DNA, 80 bp, synthetic construct
  source 1..80: mol_type = other DNA
ctgtaaatccaggtccatttgctcaaacaagatatgctccagtcaattggggtcatggagaaataaatgattcaaccaca

SEQ ID NO: 63466 - DNA, 80 bp, synthetic construct
  source 1..80: mol_type = other DNA
aaaattgcgctaaagacatcaaagtgttcatatagggtagtaaaatactgcatagtgacaatctttaatacgctattgaa

SEQ ID NO: 63467 - DNA, 80 bp, synthetic construct
  source 1..80: mol_type = other DNA
tacaaagaacaaattactactaaagacgaaatagaaaaacaaatggacagagtggtcaaagagatgcgacgccagttgga

SEQ ID NO: 63468 - DNA, 80 bp, synthetic construct
  source 1..80: mol_type = other DNA
ataaattaactacacgtgagattgagcaagttgagttgcttaaacgtatttatgatagattggtaacacaaccaactgac

SEQ ID NO: 63469 - DNA, 80 bp, synthetic construct
  source 1..80: mol_type = other DNA
ctggaagacccgggaatggcgtattttccttatatagcatctgtcttaacagttctgtttacactacataaggcgtcaat

SEQ ID NO: 63470 - DNA, 80 bp, synthetic construct
  source 1..80: mol_type = other DNA
aagaagttgcaacagatgaaaaattagtgatcactgacattgtagatggagtcaatcataaattgaacgtgacaactaac

SEQ ID NO: 63471 - DNA, 80 bp, synthetic construct
  source 1..80: mol_type = other DNA
ataaactaactacacgtgaaattgagcaagtagagctacttaaacgtatccatgataaactgatggttcaatcagctggc

SEQ ID NO: 63472 - DNA, 80 bp, synthetic construct
  source 1..80: mol_type = other DNA
acaaaagagactaatcaaaagaacgtgagaacgctagaagaatgggagagtggaagaaatccctacgaaccaaaagaagt

SEQ ID NO: 63473 - DNA, 80 bp, synthetic construct
  source 1..80: mol_type = other DNA
tcacagccataagagggtctttttcagttaattatagaggccttcgactgagcctctcagaaattactgctacttgcaca

SEQ ID NO: 63474 - DNA, 80 bp, synthetic construct
  source 1..80: mol_type = other DNA
cctcatggttgactgagaagccacagtcaatcatatcgcgtgtggctcagccttcatcccgtttaaccaatccagcgagt

SEQ ID NO: 63475 - DNA, 80 bp, synthetic construct
  source 1..80: mol_type = other DNA
gaaataaacttctatagaaggcatacttggttgatatgggagatctggttttttatgatgtcgcatccacaggtgcaaat

SEQ ID NO: 63476 - DNA, 80 bp, synthetic construct
  source 1..80: mol_type = other DNA
gctcattgctaagagtctaaaggatgtagaacagcttaaatggggaagaggagggcttagcgatgctgcaagaaccttct

SEQ ID NO: 63477 - DNA, 80 bp, synthetic construct
  source 1..80: mol_type = other DNA
ccccggtggtcagccccgcttttagcgcggaggggctcctagatgcctttgcatccaaacccccagtggacattaacccc

SEQ ID NO: 63478 - DNA, 80 bp, synthetic construct
  source 1..80: mol_type = other DNA
ggcacacaccgatcccccactttaacttacaatgaaccatgtgccctattggatcgcagcacatcttgtggtccgttcat

SEQ ID NO: 63479 - DNA, 80 bp, synthetic construct
  source 1..80: mol_type = other DNA
ttggtgcaaactccacaacacttggttggtcaacactgcccattgagccaattgcgggagcagtctcttggtatgatgac

SEQ ID NO: 63480 - DNA, 80 bp, synthetic construct
  source 1..80: mol_type = other DNA
acagcataaaaacacttaccgtggttggctcgccaccattacagctcttgttgaggtctattcaaacttgtttcaagaca

SEQ ID NO: 63481 - DNA, 80 bp, synthetic construct
  source 1..80: mol_type = other DNA
gccgccggctctgtcgtggacatggccggcacaatatcatcaattgttgcacagcacagacaacttgatttgatggcaca

SEQ ID NO: 63482 - DNA, 80 bp, synthetic construct
  source 1..80: mol_type = other DNA
ggcaaatcgtatacaacaggattgggtaaacagacaagaggcacttatcacacgaggacaggacatctctcgtgatcttg

SEQ ID NO: 63483 - DNA, 80 bp, synthetic construct
  source 1..80: mol_type = other DNA
gcacttgcagtctgtgcaaggtgccttgagtgctttcaaaaatggatccagctacggagcccctcccgcccccgcgggct

SEQ ID NO: 63484 - DNA, 80 bp, synthetic construct
  source 1..80: mol_type = other DNA
cggagcccctcccgcccccgcgggcttcgtcaacccaaattatcaggcttcacccccaaagttaacattgggccccagac

SEQ ID NO: 63485 - DNA, 80 bp, synthetic construct
  source 1..80: mol_type = other DNA
cctttgcgcaagttttatacaaaatattagatctattttttaacagtaagagaaacgttgaaccgcgtgcataaagagac

SEQ ID NO: 63486 - DNA, 80 bp, synthetic construct
  source 1..80: mol_type = other DNA
agctcaaaattatggaataaatcttccaataacaggttctatggataccgcatatgtaaactctacacaacaagagaatt

SEQ ID NO: 63487 - DNA, 80 bp, synthetic construct
  source 1..80: mol_type = other DNA
tcacaacttttcctgactaaaggatggccgacaaattccgtctacttcaagagttatgctgatatatcgtccttctctgt

SEQ ID NO: 63488 - DNA, 80 bp, synthetic construct
  source 1..80: mol_type = other DNA
agatccgcagttgtattgtgattataatattgtgttaacacagtatcaaaattcattagcgttagatgtcccagaacttg

SEQ ID NO: 63489 - DNA, 80 bp, synthetic construct
  source 1..80: mol_type = other DNA
ttatgacttccactttatgcttatattatccaagttcagtcacgactgaaataactgatcccgaccggacgaacacactg

SEQ ID NO: 63490 - DNA, 80 bp, synthetic construct
  source 1..80: mol_type = other DNA
tgggtgtcagtggagaccaaaccaggtggtgattttgatttttgcctattgaggccaccggggtcaacagatggacaatg

SEQ ID NO: 63491 - DNA, 80 bp, synthetic construct
  source 1..80: mol_type = other DNA
ttgaatccaactaatcaacaagttgtattagagggtaccaataggactgatgtttggattgctctattacttgttgaacc

SEQ ID NO: 63492 - DNA, 80 bp, synthetic construct
  source 1..80: mol_type = other DNA
gctgggtttatgaaattttataatagtgtttggacttttcacggtgaaacgccgcatgctacaactgattactcgtcaac

SEQ ID NO: 63493 - DNA, 80 bp, synthetic construct
  source 1..80: mol_type = other DNA
aatacataaatactgggttaccaccaatgcaaaatacaaggaatatagttccagttgcattatcatctagatcagtgact

SEQ ID NO: 63494 - DNA, 80 bp, synthetic construct
  source 1..80: mol_type = other DNA
acttatcaacgtgctcaggttaatgaggatatcattatatcaaagacatcgttgtggaaagaaatgcaatataacagaga

SEQ ID NO: 63495 - DNA, 80 bp, synthetic construct
  source 1..80: mol_type = other DNA
acacgtttgaagaagttgcaacagatgaaaaattagtgatcactgacgttgtagatggagtcaatcacaaattgaacgtg

SEQ ID NO: 63496 - DNA, 80 bp, synthetic construct
  source 1..80: mol_type = other DNA
tacaatagtttgtggcctgtttcctacacaaatacaagtacgtaatatcatgagcccagtgatgggagtaattggttttt

SEQ ID NO: 63497 - DNA, 80 bp, synthetic construct
  source 1..80: mol_type = other DNA
gctagcaggctataaagaacagataactactaaagatgaaatagagaaacaaatggacagagtcgttaaagaaatgagac

SEQ ID NO: 63498 - DNA, 80 bp, synthetic construct
  source 1..80: mol_type = other DNA
caaacaagatatgctccagtcaattggggtcatggagaaataaatgattcaaccacagtggaaccaattttagatggtcc

SEQ ID NO: 63499 - DNA, 80 bp, synthetic construct
  source 1..80: mol_type = other DNA
acaaaaagtgtttggatggagggcaatggctccaacccagagccaaagcagagcaacaacccgatggtcgttgcccgcct

SEQ ID NO: 63500 - DNA, 80 bp, synthetic construct
  source 1..80: mol_type = other DNA
ggtattgaatataccacaattctaatcttcctgatatcaatcattctactcaattatatattaaaatcagtgactcaaat

SEQ ID NO: 63501 - DNA, 80 bp, synthetic construct
  source 1..80: mol_type = other DNA
atactgcgtcgcatcccagtaaccaacccttcttttagtgcggagggacttctggatgcatttgcgtccaaacctcctgt

SEQ ID NO: 63502 - DNA, 80 bp, synthetic construct
  source 1..80: mol_type = other DNA
ctcagggcaaatttgtggaaactatgattggtgtggtgaatacagcaccgtacccattgaactgtgacagagtggagaac

SEQ ID NO: 63503 - DNA, 80 bp, synthetic construct
  source 1..80: mol_type = other DNA
aagggtaaagtgttcacatccaattacatcatctgtaccagtaactaccccacatctgtcttgccagaaaacccaagggc

SEQ ID NO: 63504 - DNA, 80 bp, synthetic construct
  source 1..80: mol_type = other DNA
acattgcgcctgctcattgaaacaatcactgaaagtttggcccatttcggtccactacttctgatggttcacaatgtggc

SEQ ID NO: 63505 - DNA, 80 bp, synthetic construct
  source 1..80: mol_type = other DNA
ttggggagtttgttgagttgcgcgagcgttatgctctcggtatggactcagaagatgtgcagcgttaccgagcttggcta

SEQ ID NO: 63506 - DNA, 80 bp, synthetic construct
  source 1..80: mol_type = other DNA
cattcgcacgcaacccatgcgtgccccacgggccccccgctccactgggtatgatgaagaggctccaacaccaatggtca

SEQ ID NO: 63507 - DNA, 80 bp, synthetic construct
  source 1..80: mol_type = other DNA
cttttaccagcaatggtgaccatgttggttatggttgtcatgttggcaatggtgttgtggtcacagtcacccatgttgcc

SEQ ID NO: 63508 - DNA, 80 bp, synthetic construct
  source 1..80: mol_type = other DNA
ccccgcaccctttggtgctggagactctcggtacaatttttcacaggtagaaatgttggttactggcctcaagccctatt

SEQ ID NO: 63509 - DNA, 80 bp, synthetic construct
  source 1..80: mol_type = other DNA
ctgagcccacaccaggcattccccctgccctcctgcagcgggcagccacacacacccgcacctacctggagtcaatagtg

SEQ ID NO: 63510 - DNA, 80 bp, synthetic construct
  source 1..80: mol_type = other DNA
cagccgcttctttgtccattcttgaacggctgtctgaggctacgccaataaccacttcagctgtcgaactgttgacgtca

SEQ ID NO: 63511 - DNA, 80 bp, synthetic construct
  source 1..80: mol_type = other DNA
ccagctcgcggccatctgaatgacataatctttgttacaaaatcagggcttccttccggcatgccattcaccagtgtggt

SEQ ID NO: 63512 - DNA, 80 bp, synthetic construct
  source 1..80: mol_type = other DNA
gaattcactcaaccacatgacatactttgcagctgcagttttaaaagcctatgaacaacatggggcaccatacactggca

SEQ ID NO: 63513 - DNA, 80 bp, synthetic construct
  source 1..80: mol_type = other DNA
gccagatatacgccctgttgactttcatcgagttgatggggatgaggccactgccactgttgggctctgggtggcgcaac

SEQ ID NO: 63514 - DNA, 80 bp, synthetic construct
  source 1..80: mol_type = other DNA
ctgcagcatcaaccacactaggctggtcaacactccccttggaacccatggcggctgacatctattggcacactgacaca

SEQ ID NO: 63515 - DNA, 80 bp, synthetic construct
  source 1..80: mol_type = other DNA
aacggatctcgagtgcgtgggttggttagcgctgctggtaagggcatcattttcccaaatattgtcaatcattggactga

SEQ ID NO: 63516 - DNA, 80 bp, synthetic construct
  source 1..80: mol_type = other DNA
tgtggccctttcctctaagaccactggttccaccaccatgccaacatctgatttttccagttctcctggtgcttccggtc

SEQ ID NO: 63517 - DNA, 80 bp, synthetic construct
  source 1..80: mol_type = other DNA
cactggtgatgtttaatgacaatggagatgtcaatgaacaagatgtacgcagtgccatattcaccgttgctgaccagagt

SEQ ID NO: 63518 - DNA, 80 bp, synthetic construct
  source 1..80: mol_type = other DNA
tttaccaacctggccccgaccttcgatggagcggggatgtgggtgtggatgccatgggcgagcaccaagcctggctccgc

SEQ ID NO: 63519 - DNA, 80 bp, synthetic construct
  source 1..80: mol_type = other DNA
ggacagcaacatatacatcaacccaacctggatcaacggcagcccaagccatgtcattcaggagaagtgcactaacatga

SEQ ID NO: 63520 - DNA, 80 bp, synthetic construct
  source 1..80: mol_type = other DNA
cagcacaaaaatacttatcggggatggttagccactatcacagcccttatagaagtctactcaaatctgttccaggatat

SEQ ID NO: 63521 - DNA, 80 bp, synthetic construct
  source 1..80: mol_type = other DNA
cctggtgcagcccacatttattgttcacagcttgagagcactgcagaaatattccagaacaacatagtgaacatacccac

SEQ ID NO: 63522 - DNA, 80 bp, synthetic construct
  source 1..80: mol_type = other DNA
gcgcgagaccgcggtgtccgcagtgtccgcaatcaccctcctgtttgagtcactaaagcagtttgtcgaaggtgtcattg

SEQ ID NO: 63523 - DNA, 80 bp, synthetic construct
  source 1..80: mol_type = other DNA
tcaaggcctccacatgttaatttgggtcacaacccccctgtcacaaatctataaatacttttctttctttctgtccatgg

SEQ ID NO: 63524 - DNA, 80 bp, synthetic construct
  source 1..80: mol_type = other DNA
gtcaccattactaaaagctcagaattatggaattaatctaccaattactggttcaatggacactgcatatgctaattcta

SEQ ID NO: 63525 - DNA, 80 bp, synthetic construct
  source 1..80: mol_type = other DNA
ctttcacagttgtttttgaccaaaggatggccaactggttcagtttactttaaagaatatacggatattgcttctttctc

SEQ ID NO: 63526 - DNA, 80 bp, synthetic construct
  source 1..80: mol_type = other DNA
aataaaagtgtgtccacttaatgtgcagactcttggaattgggtgtctaactaccgatactgcaacatttgaagaagttg

SEQ ID NO: 63527 - DNA, 80 bp, synthetic construct
  source 1..80: mol_type = other DNA
tagcagtaattcaagttggaggttctgatattctcgatataacagctgatccaactacagcaccacaaactgaacgaatg

SEQ ID NO: 63528 - DNA, 80 bp, synthetic construct
  source 1..80: mol_type = other DNA
ctttccttacatcaactctgtgtctgtattatccaaacgaagccgcaacagaaataaatgataattcatggaaggataca

SEQ ID NO: 63529 - DNA, 80 bp, synthetic construct
  source 1..80: mol_type = other DNA
acacactacattctattattcaagatccaggaatggcgtattttccatatattgcatctgtcctgactgttctgtttact

SEQ ID NO: 63530 - DNA, 80 bp, synthetic construct
  source 1..80: mol_type = other DNA
ggatgattctggcgttaagaataatctaataggtaaagcagctacaattgatcaggctttgaatggtaaatttagttcat

SEQ ID NO: 63531 - DNA, 80 bp, synthetic construct
  source 1..80: mol_type = other DNA
tcattaaatgtactaggttaatgaaagagaaaatattttgtggagaagtcgaagtggatgatgatttcattgaagaaaaa

SEQ ID NO: 63532 - DNA, 80 bp, synthetic construct
  source 1..80: mol_type = other DNA
atagatcatattaatccagtaaaggctttcgatgatttcgagtctattcttcgtaatttaatatctgattatgatagaat

SEQ ID NO: 63533 - DNA, 80 bp, synthetic construct
  source 1..80: mol_type = other DNA
tgttccgagagagcgcgtgcggaaagatggataagcttgtagaactcggctacacattgagtgtaatcactttaatgaat

SEQ ID NO: 63534 - DNA, 80 bp, synthetic construct
  source 1..80: mol_type = other DNA
gacacattacattctataattcaggatcctgggatggcgtattttccatatattgcatctgttctgacagttttattcac

SEQ ID NO: 63535 - DNA, 80 bp, synthetic construct
  source 1..80: mol_type = other DNA
gagccgtggccaatgtttctcacaaaaggttggccaacaggatcagtctattttaaagagtattcaagtattgttgattt

SEQ ID NO: 63536 - DNA, 80 bp, synthetic construct
  source 1..80: mol_type = other DNA
agatttctatttgtagtagtgatattggctgccgtaacaaacgcacaaaactatggagtcaatttgcctataacaggatc

SEQ ID NO: 63537 - DNA, 80 bp, synthetic construct
  source 1..80: mol_type = other DNA
catcaaacgaaatagctgacactgaatggaaaaatactttgtcacaattatttttgacgaaaggatggccgactggatcc

SEQ ID NO: 63538 - DNA, 80 bp, synthetic construct
  source 1..80: mol_type = other DNA
cggtgaaagtgtgtccattaaatacacaaacgctcggtattggatgtctaacgactgatccaaatacatttgaaacagtt

SEQ ID NO: 63539 - DNA, 80 bp, synthetic construct
  source 1..80: mol_type = other DNA
gcaacgactgagaagttagcgatcactgatgttgtagatggcgtcaaccacaaactagatgttacaacgacgacttgcac

SEQ ID NO: 63540 - DNA, 80 bp, synthetic construct
  source 1..80: mol_type = other DNA
tatacgcaactgtaagaaattaggaccaagagaaaacgtagcagttatacaagtgggtggtgcgaatgttttagacatta

SEQ ID NO: 63541 - DNA, 80 bp, synthetic construct
  source 1..80: mol_type = other DNA
aatggatactacatatacaaattcaacacaaaatgaatcttttttgacgtcaacactgtgcttgtattatccaattgaag

SEQ ID NO: 63542 - DNA, 80 bp, synthetic construct
  source 1..80: mol_type = other DNA
gtattattaaattatatactaaaatcaataactcgaattatggactatatactctacagatttttgttgtttattgtaat

SEQ ID NO: 63543 - DNA, 80 bp, synthetic construct
  source 1..80: mol_type = other DNA
tatcgacttcagaaccatttctaacatcaacattatgtctttattatccaacagaggctgaaacagagattgctgacagt

SEQ ID NO: 63544 - DNA, 80 bp, synthetic construct
  source 1..80: mol_type = other DNA
tcatggaaagatacgctatcacagttatttttaacaaaagggtggccaactggttctgtttatcttagaagctacacaga

SEQ ID NO: 63545 - DNA, 80 bp, synthetic construct
  source 1..80: mol_type = other DNA
tatttcaactttttcaataaatcctcagttgtattgcgattacaacatagttctaatgaaatataacgccgattcggaac

SEQ ID NO: 63546 - DNA, 80 bp, synthetic construct
  source 1..80: mol_type = other DNA
tagatatgtcagagttagcagacttgatactcaatgaatggctatgtaatccaatggatataacgttgtactattatcag

SEQ ID NO: 63547 - DNA, 80 bp, synthetic construct
  source 1..80: mol_type = other DNA
gagtgaactacaaaataaatgttactactactacatgtacaattagaaactgtaaaaaactgggacctagagagaatgtt

SEQ ID NO: 63548 - DNA, 80 bp, synthetic construct
  source 1..80: mol_type = other DNA
tattacgccatttgtaaattcacagaactatggcataaatttaccaattactggatctatggacgcaaactaccagaacg

SEQ ID NO: 63549 - DNA, 80 bp, synthetic construct
  source 1..80: mol_type = other DNA
tatatcatccgtacgctagaagtagaaactatcgcatggaaaaaccacaaacacagcccccccccccaaaggccctcgaa

SEQ ID NO: 63550 - DNA, 80 bp, synthetic construct
  source 1..80: mol_type = other DNA
ataacgctgtagagcgaaaattaattaattatgctaaaggtaaaccattggaggcaaatctgacagcgaatgagattgat

SEQ ID NO: 63551 - DNA, 80 bp, synthetic construct
  source 1..80: mol_type = other DNA
tatgaaaacaacaaaataacctctgagttatttcaatcagctgaagaatatactgattcattaatggatcctgccatatt

SEQ ID NO: 63552 - DNA, 80 bp, synthetic construct
  source 1..80: mol_type = other DNA
aacctcactatcatcaaatctaaatgcagttatgttctggttagagcgtcattcaaatgacgttgctgatgcaaacaaaa

SEQ ID NO: 63553 - DNA, 80 bp, synthetic construct
  source 1..80: mol_type = other DNA
tttacaaacgtagattggatctattcattatagtggcatctacgataaataaatatggagtaccgagacacaatgaaaaa

SEQ ID NO: 63554 - DNA, 80 bp, synthetic construct
  source 1..80: mol_type = other DNA
tatagatatgattatgatgtaatgaaagataaaccgtattatttagtaacttgggctaattcagctatagagatgcttat

SEQ ID NO: 63555 - DNA, 80 bp, synthetic construct
  source 1..80: mol_type = other DNA
tggggaagtacaatctaatcttgtcggaatacttatcatttgtttataattcacaatctgcagttcaaataccaatttat

SEQ ID NO: 63556 - DNA, 80 bp, synthetic construct
  source 1..80: mol_type = other DNA
ccacaaaataggtttgagatggagggcaatggctccaacccagagccaaagcagagcaacaacccgatggtcgttgaccc

SEQ ID NO: 63557 - DNA, 80 bp, synthetic construct
  source 1..80: mol_type = other DNA
gagaccaaaccaggtggtgattttgatttttgcctattgaggccaccgggtcaacagatggacaatggtgtgtcacctga

SEQ ID NO: 63558 - DNA, 80 bp, synthetic construct
  source 1..80: mol_type = other DNA
tggcacgcacagcagctctacttgagcttgcagcatctcgagacgtgacgggcactgacgaactcaaacgcctattagat

SEQ ID NO: 63559 - DNA, 80 bp, synthetic construct
  source 1..80: mol_type = other DNA
aaggcaaggtgttcacatctgattacatcatatgcactagcaattacccaacctctgtgctacctgacaacccacgagcg

SEQ ID NO: 63560 - DNA, 80 bp, synthetic construct
  source 1..80: mol_type = other DNA
gaaacccccacccgacttgtacaagaatgatttcacgcacctccgcctgtctgtcagaccgttcttagggtacaaccccg

SEQ ID NO: 63561 - DNA, 80 bp, synthetic construct
  source 1..80: mol_type = other DNA
tttaaggaacagggcaatgaacaacggaacctgtggataacatgcccgcgcgacctagtggcccctgccgcatctggtct

SEQ ID NO: 63562 - DNA, 80 bp, synthetic construct
  source 1..80: mol_type = other DNA
cgtcccgtgtgtacgtgtcatgtaacaatccacctcccacatacagtgggcgggtagtcaaaattacagccatcaatcca

SEQ ID NO: 63563 - DNA, 80 bp, synthetic construct
  source 1..80: mol_type = other DNA
acactccgcctgttggcagaaactataactgaaagtctagtgcactttggccccttcctactcatgatgcacaatgtttc

SEQ ID NO: 63564 - DNA, 80 bp, synthetic construct
  source 1..80: mol_type = other DNA
gctgggaacaagtcaatccgtgggcttgttagtgcccaggggaagggtataatatttccaaacatagtcaatcactggac

SEQ ID NO: 63565 - DNA, 80 bp, synthetic construct
  source 1..80: mol_type = other DNA
tgacgttgcactgtcctccaagacatctaacaccacaaccataccaacagacacgtccactcttggtaatctaccaggtg

SEQ ID NO: 63566 - DNA, 80 bp, synthetic construct
  source 1..80: mol_type = other DNA
ctaatatgattggcacaaactttcagtttggagggaccggcaccaacaacatcatgttgtggcaggaacagcacttcaca

SEQ ID NO: 63567 - DNA, 80 bp, synthetic construct
  source 1..80: mol_type = other DNA
tcacttcaggggccccatgggaatagtggtcgggccgttaggttcttagaataatgtcttggtttactggagcatccctg

SEQ ID NO: 63568 - DNA, 80 bp, synthetic construct
  source 1..80: mol_type = other DNA
acaccttcaggccatgcagggcgctttaagtgcattcaaaaatggcgcctcctacggagccccgccagccccatcaggtt

SEQ ID NO: 63569 - DNA, 80 bp, synthetic construct
  source 1..80: mol_type = other DNA
ccgccagccccatcaggttttgttaatccaaattatcaaccctcacctccaagattgaaactaggccctaggccccctag

SEQ ID NO: 63570 - DNA, 80 bp, synthetic construct
  source 1..80: mol_type = other DNA
ataaccaaatgtgagcctcatggattggttgtccgatcaacagggttcaagatatcatctgcagttgcttgtgctagcgg

SEQ ID NO: 63571 - DNA, 80 bp, synthetic construct
  source 1..80: mol_type = other DNA
gactatgcggaatggggaacattactatcagacaccaaactctatgggatgatgaaatatggaaagagactattcatata

SEQ ID NO: 63572 - DNA, 80 bp, synthetic construct
  source 1..80: mol_type = other DNA
acttttatataatttcaagatcacaggaatcagcatgcactgagtatataaacaacggactgccacccatccaaaatacc

SEQ ID NO: 63573 - DNA, 80 bp, synthetic construct
  source 1..80: mol_type = other DNA
aggaatgtagtgcctgtggcaatatcgtcaagatcaattgaaccaagaaaagtgcaggctaatgaagatattgtagtttc

SEQ ID NO: 63574 - DNA, 80 bp, synthetic construct
  source 1..80: mol_type = other DNA
taagacgtcactatggaaagaaatgcaatataatagagatatcataattagatttaggtttgataactcaataataaaat

SEQ ID NO: 63575 - DNA, 80 bp, synthetic construct
  source 1..80: mol_type = other DNA
gctataagtgggctgaaatctcatttaaagctgcaaattatcaatacaattacatgagagacggagaagaagttacagcg

SEQ ID NO: 63576 - DNA, 80 bp, synthetic construct
  source 1..80: mol_type = other DNA
catacgacgtgctcagttaatggtgttaatgattttagctttaacggaggctcattaccaacagatttcgcaatatcgag

SEQ ID NO: 63577 - DNA, 80 bp, synthetic construct
  source 1..80: mol_type = other DNA
tgcgatcattggcagcgaatttgaatgacgtaatgtgttctggcggagattacagcttcgcgctacctgtcggacaatgg

SEQ ID NO: 63578 - DNA, 80 bp, synthetic construct
  source 1..80: mol_type = other DNA
cgaaggagaaaccccaaatgccacgaccaaaagatacattgtgacgaagtatgcatcagttgaggtaaggccatatagtg

SEQ ID NO: 63579 - DNA, 80 bp, synthetic construct
  source 1..80: mol_type = other DNA
aaacaagacatgtacatgcatgtttgtagggtgattgctggggtgcggcgtgatatgctgcgtcgtatcccagtgaccaa

SEQ ID NO: 63580 - DNA, 80 bp, synthetic construct
  source 1..80: mol_type = other DNA
cctacgtgagcgagctagaaaccgctgctaacggtattagaagcactattcttttggatacccccagaaaggttcctgta

SEQ ID NO: 63581 - DNA, 80 bp, synthetic construct
  source 1..80: mol_type = other DNA
gtgagttgtttgggatagacccgcatgagcaattcccattgtccataactgatttggccaagttacagggtgagcttgtg

SEQ ID NO: 63582 - DNA, 80 bp, synthetic construct
  source 1..80: mol_type = other DNA
gaaggggacacattggagggtgttcgggtgaagccgatcttaactagcgtggatggcctctctcggctcatggagaccaa

SEQ ID NO: 63583 - DNA, 80 bp, synthetic construct
  source 1..80: mol_type = other DNA
tgaaatcttatatggccgccaaccgggccctggcacaagtcttcgcagagccatcctcaaatgaaattgcggaaacgtgc

SEQ ID NO: 63584 - DNA, 80 bp, synthetic construct
  source 1..80: mol_type = other DNA
tagtcccagttacctcatcatttgactttgtgcgtgggttgcgccatcacctcggcttgtgctccattaaagggatgtgg

SEQ ID NO: 63585 - DNA, 80 bp, synthetic construct
  source 1..80: mol_type = other DNA
acactgcgcttgcttgttgagacaatcactgaaagcttggctcattttggcccactgctcctgatggttcataatgtgac

SEQ ID NO: 63586 - DNA, 80 bp, synthetic construct
  source 1..80: mol_type = other DNA
aactggcacaaaaggtgagccgagtctcaaaggtggaaaatgcctttgcttggaagggcctgcctgttttgcggggtcct

SEQ ID NO: 63587 - DNA, 80 bp, synthetic construct
  source 1..80: mol_type = other DNA
ggcactcacagatccaaaaatttgacatacaatgaggcatgtgctttattagaccgcggcacatcctgtggcccattcat

SEQ ID NO: 63588 - DNA, 80 bp, synthetic construct
  source 1..80: mol_type = other DNA
ttaacgagtcccttaaaggtggggtggtgtactgccttgactacagcaaatgggactccacgcagcaccctgcagtcaca

SEQ ID NO: 63589 - DNA, 80 bp, synthetic construct
  source 1..80: mol_type = other DNA
gctgcttctttgtccattcttgaacggctgtctgaggcaacgccaataaccacttcagctgtcgaattgctgtcatcacc

SEQ ID NO: 63590 - DNA, 80 bp, synthetic construct
  source 1..80: mol_type = other DNA
cctcggtgccattcacctgggaccacgcatcaacccgtacacggcacaccttagtgcgatgtttgcgggttggtgtggcg

SEQ ID NO: 63591 - DNA, 80 bp, synthetic construct
  source 1..80: mol_type = other DNA
acggtcacgtggtaaccgcatgggtggtcgcatctcaggactggttgtcgtggcccgtgcagagcaagtaaatcaccact

SEQ ID NO: 63592 - DNA, 80 bp, synthetic construct
  source 1..80: mol_type = other DNA
tgcggacagcaacatatacatcaaccccacctggattaatggcagcccaagccacgtcatccaggagaagtgcactaaca

SEQ ID NO: 63593 - DNA, 80 bp, synthetic construct
  source 1..80: mol_type = other DNA
caaccaaatggctgttttcaacgtggagacggctggaaactctttccaaattggcattttgcctaacgggtattgtgtca

SEQ ID NO: 63594 - DNA, 80 bp, synthetic construct
  source 1..80: mol_type = other DNA
tctgtccatggtactacacgcgttcgggtagttaaatttgattaagcgatcaaagccatgtttaatcttcaggaaaaaaa

SEQ ID NO: 63595 - DNA, 80 bp, synthetic construct
  source 1..80: mol_type = other DNA
agtggggggtcttccttcggtgctacctcagggtagagcctagggaggagttttgcgagagtatacaagatttgaaatct

SEQ ID NO: 63596 - DNA, 80 bp, synthetic construct
  source 1..80: mol_type = other DNA
aatacaggtgccacaataaatttgaatcactccccaggcagttcaaatgcttaaattttcttttcccaaaatgtgatgcc

SEQ ID NO: 63597 - DNA, 80 bp, synthetic construct
  source 1..80: mol_type = other DNA
gcagtcctgtgttctgcctacctcagggtaggtggacgggactcaatctttgaaaaccaccaggacatgttaaatcatgt

SEQ ID NO: 63598 - DNA, 80 bp, synthetic construct
  source 1..80: mol_type = other DNA
cggcagcattacatcggtcactgcggctgcacgtgcggttgcttggattcgggacaccatacgtgaggcagagggtcgcc

SEQ ID NO: 63599 - DNA, 80 bp, synthetic construct
  source 1..80: mol_type = other DNA
gtcggctcaagcagttcatggcgcgatcttcagctctcattgaattggccgcctcgcgggaggtcactggtactgacgac

SEQ ID NO: 63600 - DNA, 80 bp, synthetic construct
  source 1..80: mol_type = other DNA
cttaagaagctgcttgagtgttttgtgcagctgagtgaggaaggtgcggacttgatccaagagtttggaacctccccttt

SEQ ID NO: 63601 - DNA, 80 bp, synthetic construct
  source 1..80: mol_type = other DNA
agctggactgactcggtcgtatgtgtcagaactggaagctgctgctaacactgttagaacgacaattcagcttgacacgc

SEQ ID NO: 63602 - DNA, 80 bp, synthetic construct
  source 1..80: mol_type = other DNA
caaggaaagttccagtagctgtcatactcacaggcccacctggcattggcaaaacacaccttgcacaacacattggggca

SEQ ID NO: 63603 - DNA, 80 bp, synthetic construct
  source 1..80: mol_type = other DNA
gggtttggtaagtgctccactttctcagtgtgcactgaccaccatgatagttacactgggaacagggttgccatatggga

SEQ ID NO: 63604 - DNA, 80 bp, synthetic construct
  source 1..80: mol_type = other DNA
tgagtttgacgttgacacccagggccggtacgtggaaactatgattggcataatcaacagtgcaccatacccactaaatt

SEQ ID NO: 63605 - DNA, 80 bp, synthetic construct
  source 1..80: mol_type = other DNA
ggttgttggacgcattttcatccaaaccaccggccgacattaaccctgacaccacatttcgtgaactctttggcgtcgac

SEQ ID NO: 63606 - DNA, 80 bp, synthetic construct
  source 1..80: mol_type = other DNA
gtgatcgggccgaaaacaaaggtaaagttttctcatctgaattcgtaatttgcaccagcaattatccaacctcagtcttg

SEQ ID NO: 63607 - DNA, 80 bp, synthetic construct
  source 1..80: mol_type = other DNA
cctgacaacccccgagcgggtgcgttttatcgtcgtgttctaactgttgacgtaaccgcacctgacattgatgagtggaa

SEQ ID NO: 63608 - DNA, 80 bp, synthetic construct
  source 1..80: mol_type = other DNA
gaagaaaaaccccggcaaaaagcccccaggcgacatgttcaaagcggacttctcccatctgcgtctttttgttcgcccat

SEQ ID NO: 63609 - DNA, 80 bp, synthetic construct
  source 1..80: mol_type = other DNA
atcttgggtacaacgccgatggggacacgctagagggtgttcgggtgcggccccaacaggtgactgtggatggattaacc

SEQ ID NO: 63610 - DNA, 80 bp, synthetic construct
  source 1..80: mol_type = other DNA
aagatcatggagagacgttttgaggagcagggggcagatcaattacagaacctctggattatgtgccccaaggagctggt

SEQ ID NO: 63611 - DNA, 80 bp, synthetic construct
  source 1..80: mol_type = other DNA
caccactgccacggccggcctaaaggcgttcatgtctgcaaacagagcactctgtcaggtcatacaggacccatcctcaa

SEQ ID NO: 63612 - DNA, 80 bp, synthetic construct
  source 1..80: mol_type = other DNA
atgagatagctgagacttgtgtgtcacgtatttttgtcagcaacctcaaccccccccaggggtatcgtggccacaaggtt

SEQ ID NO: 63613 - DNA, 80 bp, synthetic construct
  source 1..80: mol_type = other DNA
aaggtttctagtgtgtgcccagaggacgcttcaattgccaattctatgctctcaatgttcaacagtgattccaggctttc

SEQ ID NO: 63614 - DNA, 80 bp, synthetic construct
  source 1..80: mol_type = other DNA
tgctgcggcacagcgagacatcatgtaccgtgtgtggcgacccctagtccatcttcaagaccaaagacccaacacacagg

SEQ ID NO: 63615 - DNA, 80 bp, synthetic construct
  source 1..80: mol_type = other DNA
tcgttcccgtttcctccccatttgacttcgtgcggggcctacgtcaccacctaggtctgtgctctattcgtgggatgtgg

SEQ ID NO: 63616 - DNA, 80 bp, synthetic construct
  source 1..80: mol_type = other DNA
ccacatgaacaattcccactatccataacagatttggcacgacttcaaggtgaacttgtagatgcagtgcggaatccgca

SEQ ID NO: 63617 - DNA, 80 bp, synthetic construct
  source 1..80: mol_type = other DNA
agtgcctaccgtgggtggtatgactcagccacaattattgagtttgttgctaagcacatggctgatgtcgcgttcccaat

SEQ ID NO: 63618 - DNA, 80 bp, synthetic construct
  source 1..80: mol_type = other DNA
gaacccagagtgcaccgttttccgaaccaccgatggggatgtggtgttctacacttatgggtcatacgcctgcttggcat

SEQ ID NO: 63619 - DNA, 80 bp, synthetic construct
  source 1..80: mol_type = other DNA
gatgtggtgttctacacttatgggtcatacgcctgcttggcatcccctgcacgagtgccatttgtaggcgatccaccaaa

SEQ ID NO: 63620 - DNA, 80 bp, synthetic construct
  source 1..80: mol_type = other DNA
cccctgcacgagtgccatttgtaggcgatccaccaaaagttgttcattcaaatgttaccagaaacatgacctggggggaa

SEQ ID NO: 63621 - DNA, 80 bp, synthetic construct
  source 1..80: mol_type = other DNA
accctacaactagttgctgagaccctcatggaggttattacaagattcaccccatttcttttaaccctgtacaatgtgac

SEQ ID NO: 63622 - DNA, 80 bp, synthetic construct
  source 1..80: mol_type = other DNA
ctacctcaccatgcggtggagtcgcgaggaagagggcaagggcaagaacaaacatggcaggggtgctcgtcatggcaggc

SEQ ID NO: 63623 - DNA, 80 bp, synthetic construct
  source 1..80: mol_type = other DNA
gtggtggtgttagcctaagtgatgatgagtatgatgagtggagagatctcatccgagactggcgtaaggacatgtcagtt

SEQ ID NO: 63624 - DNA, 80 bp, synthetic construct
  source 1..80: mol_type = other DNA
aatgagttcctcgacctgagagaacgtttcgccgctggcatggatgcagaggatgttgaaaggtaccgaatgtggctcca

SEQ ID NO: 63625 - DNA, 80 bp, synthetic construct
  source 1..80: mol_type = other DNA
aatccgcgcaatgcgtctgaatgctggtgcttacacacatgccaccatcataggcaaggggagagttgaggacaccatca

SEQ ID NO: 63626 - DNA, 80 bp, synthetic construct
  source 1..80: mol_type = other DNA
tccgcacccagccactgagggccccaagaagaccaaccaacattgagtatgatgaagaggctcccaccccggtggttgag

SEQ ID NO: 63627 - DNA, 80 bp, synthetic construct
  source 1..80: mol_type = other DNA
tttacgtcagatggagagcatgttggttatgggtgccaccttggcaatggcgttgtgttgtcggtgacacacgttgtgtc

SEQ ID NO: 63628 - DNA, 80 bp, synthetic construct
  source 1..80: mol_type = other DNA
tcacgcgctgagacggcactactctaccgattcgatcaccgccctaattactaagctcaccaagattgtcccagtacagg

SEQ ID NO: 63629 - DNA, 80 bp, synthetic construct
  source 1..80: mol_type = other DNA
ggcagccaacgaggttgaagggataccatttagtgtgaagaagacagaaggagagctcacatgggtaaacacaaatcttg

SEQ ID NO: 63630 - DNA, 80 bp, synthetic construct
  source 1..80: mol_type = other DNA
ctcgactcccccactaccaaattggcgacggtaatccagtgtacttttccccccgcctccatcctgtcctcacccttgcg

SEQ ID NO: 63631 - DNA, 80 bp, synthetic construct
  source 1..80: mol_type = other DNA
gagggcacttatgagaccccaaacatcacagtaaatgggttccacattaggataaccaatgggtatccaacaaagaaagg

SEQ ID NO: 63632 - DNA, 80 bp, synthetic construct
  source 1..80: mol_type = other DNA
ggactgtgggttaccatatttcaacggttgtcgccaactggttgcgctacatgctgctactgccaccaacagtgagacca

SEQ ID NO: 63633 - DNA, 80 bp, synthetic construct
  source 1..80: mol_type = other DNA
aattggctcaaaaggtcacccgtgtgtcgaaggctgaaaacgtctttgcatggaaagggctgcccgtcacgcgtggccca

SEQ ID NO: 63634 - DNA, 80 bp, synthetic construct
  source 1..80: mol_type = other DNA
gactgtggtggaatgccaactggcacacgataccatcgttcacctgcgtggcccgatgtacaacctggggagacacacgc

SEQ ID NO: 63635 - DNA, 80 bp, synthetic construct
  source 1..80: mol_type = other DNA
gccccgttcggggcgggcgactcccgctacagtttctcacaggtcgagatgctggtgaacgggctaaagccatatgcaga

SEQ ID NO: 63636 - DNA, 80 bp, synthetic construct
  source 1..80: mol_type = other DNA
gccaacaccagggattccccctgcacttttgcaacgtgcagccacacacacacgagtgtacctggaatcaatcattggca

SEQ ID NO: 63637 - DNA, 80 bp, synthetic construct
  source 1..80: mol_type = other DNA
accacaaatcaccaaacttgtcattctctgaggcttgtgacctcctcgaacgatccacatcttgtgggccgtttgtggca

SEQ ID NO: 63638 - DNA, 80 bp, synthetic construct
  source 1..80: mol_type = other DNA
ggacagaaaggggattactgggatgaaaacacccatgcttacactggactactgcgggagcacctggagcggacgtggga

SEQ ID NO: 63639 - DNA, 80 bp, synthetic construct
  source 1..80: mol_type = other DNA
ccacattggaagacatgcaaaggcgcagagattttgagagggaacgtgccgaggtgtttcgggagttgccccattcagat

SEQ ID NO: 63640 - DNA, 80 bp, synthetic construct
  source 1..80: mol_type = other DNA
cgctgcatcacggggcattgccccaccaaacgcatacaagctcgcgctcaaggatgagctacgaccaactgagaaaaacg

SEQ ID NO: 63641 - DNA, 80 bp, synthetic construct
  source 1..80: mol_type = other DNA
cccaaggcaagcggcgtttgctatggggctgtgatgctggggcaactcttgtggcaactgcagcgtttaaaggagtggca

SEQ ID NO: 63642 - DNA, 80 bp, synthetic construct
  source 1..80: mol_type = other DNA
gggcggctccaaggtgtgtcaccaatgacacctgttgcggttgggataaatatggacagctttcaggtctctgtgctcaa

SEQ ID NO: 63643 - DNA, 80 bp, synthetic construct
  source 1..80: mol_type = other DNA
gcctcatcacttgacatccttgcacgtttctcggaagctacccccataaccgcctctgcggttgagttgttaacatcacc

SEQ ID NO: 63644 - DNA, 80 bp, synthetic construct
  source 1..80: mol_type = other DNA
agcaaaaggtcacctcaatgacattgtgttcacaactcggtctggactaccatcaggcatgcccttcactagcgttgtca

SEQ ID NO: 63645 - DNA, 80 bp, synthetic construct
  source 1..80: mol_type = other DNA
actccctaaaccacatgacatactttgctgctgctgtcctcaaggcgtatgaatcccgaggggtgccatacactggcaat

SEQ ID NO: 63646 - DNA, 80 bp, synthetic construct
  source 1..80: mol_type = other DNA
gtgttccagctggaaaccgtacacacctatggggacgactgtgtctattcactttgccccgcaacggcttccctctttaa

SEQ ID NO: 63647 - DNA, 80 bp, synthetic construct
  source 1..80: mol_type = other DNA
tgatgtgctttccaatctagccagttttggtctcaaaccaaccgccccagacaaaagtgattccatagcccctacacaca

SEQ ID NO: 63648 - DNA, 80 bp, synthetic construct
  source 1..80: mol_type = other DNA
ctcctgtgtttttgaagcgaacgctcacagcaacacctaggggcatcagggctctgttggacatcacctcaattaaaagg

SEQ ID NO: 63649 - DNA, 80 bp, synthetic construct
  source 1..80: mol_type = other DNA
gaagccccccaacgagaccccaaaagcttcttctatgccatgtggagacaagtgatcaaacgaggaaagggctattttat

SEQ ID NO: 63650 - DNA, 80 bp, synthetic construct
  source 1..80: mol_type = other DNA
caattttattgggtcaaggccaaccgtacaactgacatcaattcacctgctgtgttcgaccgtgtggcgcgttgtacaca

SEQ ID NO: 63651 - DNA, 80 bp, synthetic construct
  source 1..80: mol_type = other DNA
gctggaaaacgccttggcctatgcatctcaacatggcccaaccatgtttgatgaagtcgccaaaattgcacaagtcaccg

SEQ ID NO: 63652 - DNA, 80 bp, synthetic construct
  source 1..80: mol_type = other DNA
caaccgcggaagggttggcactcaccaacatcaattatgaccaggccctcgccacctatgaagcatggttcattgggggc

SEQ ID NO: 63653 - DNA, 80 bp, synthetic construct
  source 1..80: mol_type = other DNA
acagtgcctgacccaaacaaccccagtgaagaggttgctaaattagtgtttgaaatggagggcctaggccagccacccca

SEQ ID NO: 63654 - DNA, 80 bp, synthetic construct
  source 1..80: mol_type = other DNA
atcagggcaaggtaatccaccacaaggtgtggtcacgcctcaggatacaatttcaccaaccgaggcacttttgcttccta

SEQ ID NO: 63655 - DNA, 80 bp, synthetic construct
  source 1..80: mol_type = other DNA
cgcaggtagaaatgccaaattcaggtgcacaacgcctagagatggcggtcgccactggggcaattaactccaatgtccca

SEQ ID NO: 63656 - DNA, 80 bp, synthetic construct
  source 1..80: mol_type = other DNA
cctgggtgcagttcacctgggaccaaggctgaacccatacaccgctcacctcagtgcaatgtttgctgggtgtggaggaa

SEQ ID NO: 63657 - DNA, 80 bp, synthetic construct
  source 1..80: mol_type = other DNA
gctttcagatccgagtcacaatctccggatcgggcatctttgctgggagagcggtgtgtgctgtcttgccaccgggcgta

SEQ ID NO: 63658 - DNA, 80 bp, synthetic construct
  source 1..80: mol_type = other DNA
aaccctgctagtgtgcaaaaccctggagtattcccacatgctttcatcgacgcccgcaccactgagcctgtgctcatcaa

SEQ ID NO: 63659 - DNA, 80 bp, synthetic construct
  source 1..80: mol_type = other DNA
tcccttagtgaagtgcacatcatggaggcgaaagttttccggagctgctgaagtggtgcgacagtgcttagttggatttt

SEQ ID NO: 63660 - DNA, 80 bp, synthetic construct
  source 1..80: mol_type = other DNA
ccttcctgacatccgggccgtcgactaccaccgagtcgacggtgatgaggcaacggcaacagtaggcctttgggtggcac

SEQ ID NO: 63661 - DNA, 80 bp, synthetic construct
  source 1..80: mol_type = other DNA
agccattgctaaatccattctccactggctcttcagtttccacgtgctggctgtcttttgaaacccgtcctggacctgac

SEQ ID NO: 63662 - DNA, 80 bp, synthetic construct
  source 1..80: mol_type = other DNA
tttgatttctgcttgctcaaggctcctgatcaagaaatggacaatggtgtgtcgccagctggtttgttaccacgccggct

SEQ ID NO: 63663 - DNA, 80 bp, synthetic construct
  source 1..80: mol_type = other DNA
tgggcgggcgcgtggaaaccgtctcggtggacgaatagttaagatggttgtggtggctgcagctcaccaagtgaaccacc

SEQ ID NO: 63664 - DNA, 80 bp, synthetic construct
  source 1..80: mol_type = other DNA
actttagtgcaaatagcaccacccttggttggtcatcgctccctctggaaccagtcgctgctcatgcttattggcacgca

SEQ ID NO: 63665 - DNA, 80 bp, synthetic construct
  source 1..80: mol_type = other DNA
acaacaactactccaacaaaaaggtattgtctactcagtgccgagaacaagggcatcatctttccgcacattgttaacca

SEQ ID NO: 63666 - DNA, 80 bp, synthetic construct
  source 1..80: mol_type = other DNA
ttggccagactcatcgatgtcagcaaacacctctcaagacacagatattccacaaagtacctttgacactcatgttggga

SEQ ID NO: 63667 - DNA, 80 bp, synthetic construct
  source 1..80: mol_type = other DNA
gcgcgggccctgtcatgacgttccgtgatgatggtgatgttgatgaaacacactgtgagacaggaatttttaccactgca

SEQ ID NO: 63668 - DNA, 80 bp, synthetic construct
  source 1..80: mol_type = other DNA
gatgctcagttttctcacttggctgacagttttggcggagccaacacatacatctacttgccatggatgtcacgcacccc

SEQ ID NO: 63669 - DNA, 80 bp, synthetic construct
  source 1..80: mol_type = other DNA
aactgaccaaaatgtgtacgtgaaaccaacatgggttaatgggtccacctctaaaccaatcaaagaaaagtgtaccaaca

SEQ ID NO: 63670 - DNA, 80 bp, synthetic construct
  source 1..80: mol_type = other DNA
gtgagggaatgcgaactcaattctccacagatgtcaactacatccagttagacttgttagcacgcctaagaccaacagtg

SEQ ID NO: 63671 - DNA, 80 bp, synthetic construct
  source 1..80: mol_type = other DNA
tgaaaggcaccaacttccatttcgggggcactggcatggctaacatagtgttgtggcaagagcaggcttttacatcatgg

SEQ ID NO: 63672 - DNA, 80 bp, synthetic construct
  source 1..80: mol_type = other DNA
ccaggtgctgctgaaatatattgctctcaattggaatcaactgcagaaatgttccaaaacaacattgtcaacatccctgc

SEQ ID NO: 63673 - DNA, 80 bp, synthetic construct
  source 1..80: mol_type = other DNA
aggtcaaatggctgtgttcaatgttgaaaccaatggtaacgtcttccaagttggcatacttccaaatggttaccacgtga

SEQ ID NO: 63674 - DNA, 80 bp, synthetic construct
  source 1..80: mol_type = other DNA
caactgcaccaattggcaccgttattgagctggatcctgaaactgttttccgatttgttggtctcttccctcagtctact

SEQ ID NO: 63675 - DNA, 80 bp, synthetic construct
  source 1..80: mol_type = other DNA
tctcttcaagggcctcatgggaataatggtcgggccatacgattccttgaataatgtcttggacacaagcattggcaatg

SEQ ID NO: 63676 - DNA, 80 bp, synthetic construct
  source 1..80: mol_type = other DNA
gcaactgggtctgttgttgacatggcaggcactatatccaacattgtggcacaacacagacaaattgcagtcatggagga

SEQ ID NO: 63677 - DNA, 80 bp, synthetic construct
  source 1..80: mol_type = other DNA
agctaaccgaattcaggctgattgggtgcgcaggcaggaaaaattggcataccgcgcacaggacattactgccgatttgg

SEQ ID NO: 63678 - DNA, 80 bp, synthetic construct
  source 1..80: mol_type = other DNA
cagtcaatggactgtcccgcaaagttgattccttggttcaatctgggttcaccccgcttgacgcacgccgcctcgcgggt

SEQ ID NO: 63679 - DNA, 80 bp, synthetic construct
  source 1..80: mol_type = other DNA
ggtactgaggtggttttgcatggcaccatggagcgtccagtgctgccacgcactgtgcttcagggtatctcagacactca

SEQ ID NO: 63680 - DNA, 80 bp, synthetic construct
  source 1..80: mol_type = other DNA
ccacatgcagagcaatctcatggctgcccgcgccttcaacaccggtctgtcttctgggacaccaccccctccacaaggat

SEQ ID NO: 63681 - DNA, 80 bp, synthetic construct
  source 1..80: mol_type = other DNA
ttgaccatgattctccaacagcatcgcaacacattcaatggttggcttgccaccatcaccgccctcatcgaagtttattc

SEQ ID NO: 63682 - DNA, 80 bp, synthetic construct
  source 1..80: mol_type = other DNA
tcggcaacccaaattaccaaagtggaagacccaaagtgaatcttggcccacgcccaccacagaccaatgtataactttct

SEQ ID NO: 63683 - DNA, 80 bp, synthetic construct
  source 1..80: mol_type = other DNA
cccacgcccaccacagaccaatgtataactttcttcttttgactttccttttatttctctattttcttttcttttccggc

SEQ ID NO: 63684 - DNA, 80 bp, synthetic construct
  source 1..80: mol_type = other DNA
ttcccgtttggttgagcgggcctggcagcaacaccaggcccgcgttccacggcatttggggcttgaatttgaggctgagg

SEQ ID NO: 63685 - DNA, 80 bp, synthetic construct
  source 1..80: mol_type = other DNA
aggcttgtttcaaaacatgcgggacaccgcagtgtcagtggtgtcttccataacacttgtctttgactcattgagggctt

SEQ ID NO: 63686 - DNA, 80 bp, synthetic construct
  source 1..80: mol_type = other DNA
ttgtagagaaggtcatcaaccttgtgcgcaccaccttcaccgcgcaagggcccacagatttcggatgggctgccatcctt

SEQ ID NO: 63687 - DNA, 80 bp, synthetic construct
  source 1..80: mol_type = other DNA
gctggtaccatcataattctcatgaagatctctggctgcccacaagctttgggttattggggaaaaattttgaaagtgtg

SEQ ID NO: 63688 - DNA, 80 bp, synthetic construct
  source 1..80: mol_type = other DNA
ctttgggaagaaggagccatcctgcagctggatctgcctgaaaactctagacaattgggcctggtcacatgcctcagttc

SEQ ID NO: 63689 - DNA, 80 bp, synthetic construct
  source 1..80: mol_type = other DNA
ggttgagtattcagtgctcagatcggctcacctcagggtgagtggtcgtgagcaaatgtttgagactacagcagatttag

SEQ ID NO: 63690 - DNA, 80 bp, synthetic construct
  source 1..80: mol_type = other DNA
gttggcgccttcccccctgggaagttcgtcaccgccgccctcctcaacacccccccgccctaccaagtcagctgcggtgg

SEQ ID NO: 63691 - DNA, 80 bp, synthetic construct
  source 1..80: mol_type = other DNA
cggctgtcaacattggacacaacccaggctcatcatctgcctgacccaccctctttcattccttctcctgtctctgatac

SEQ ID NO: 63692 - DNA, 80 bp, synthetic construct
  source 1..80: mol_type = other DNA
caaccgtaaggttgagtactcagtgctcagatcggctcacctcagggtgagtggtcgtgagcaaatgtttgagactacag

SEQ ID NO: 63693 - DNA, 80 bp, synthetic construct
  source 1..80: mol_type = other DNA
tagttctcaatgccacttttgagtggcaagtcttcaagcggtgctacctcagggtagctccgcgtgaagcattttgtgag

SEQ ID NO: 63694 - DNA, 80 bp, synthetic construct
  source 1..80: mol_type = other DNA
attctattaaattatatattaaaaacaataactaatataatggactttatcatatatcggtttttactactagttgtcgt

SEQ ID NO: 63695 - DNA, 80 bp, synthetic construct
  source 1..80: mol_type = other DNA
tagatatctcagaacttgctgatttaattttaaatgaatggttatgtaatccgatggatgtaacgttgtactattatcag

SEQ ID NO: 63696 - DNA, 80 bp, synthetic construct
  source 1..80: mol_type = other DNA
gttccgagagagcgcgtgcggaaagatggataagcttaccgacctcaactatacattgagtgtaatcactctaatgaaca

SEQ ID NO: 63697 - DNA, 80 bp, synthetic construct
  source 1..80: mol_type = other DNA
aaaattgcattgaagacgtcaaaatgttcatataaggtagtaaaatattgtattgtaacaattttcaatacacttctgaa

SEQ ID NO: 63698 - DNA, 80 bp, synthetic construct
  source 1..80: mol_type = other DNA
aaattgaccacacgtgaaattgaacaagtggaattgcttaaacgtattcatgacaaattgatgatacgaacgacggacga

SEQ ID NO: 63699 - DNA, 80 bp, synthetic construct
  source 1..80: mol_type = other DNA
acgaaagaaattaatcaaaagaacgtgagaacgctaaaagaatgggaaaatggaaaaaatccttacgaaccaaaagaagt

SEQ ID NO: 63700 - DNA, 80 bp, synthetic construct
  source 1..80: mol_type = other DNA
cttgaggatccaggaatggcgtatttcccttatatagcatctgtcctaacagtcttgttcacgctacataaagcatcaat

SEQ ID NO: 63701 - DNA, 80 bp, synthetic construct
  source 1..80: mol_type = other DNA
accaaggtgggatttttattttttgcctatttgggccaccggggttcaacaaattgggacaatggtgttgtccaccctga

SEQ ID NO: 63702 - DNA, 80 bp, synthetic construct
  source 1..80: mol_type = other DNA
actgtggtgcaagcacctgcatcgcagtttggctgccacccccacatttacggaggagggtttgctggactctttccttt

SEQ ID NO: 63703 - DNA, 80 bp, synthetic construct
  source 1..80: mol_type = other DNA
tgtatcttggcggaagaaattcacggagcctgcggagattgttagacaggtcctggttcacttctgtgaagggatgaggt

SEQ ID NO: 63704 - DNA, 80 bp, synthetic construct
  source 1..80: mol_type = other DNA
tcctcttctctgctcacctcagggtgagcgggagagaggaaattttcgaaaccaaacaggacatgtatgcccatgttcgc

SEQ ID NO: 63705 - DNA, 80 bp, synthetic construct
  source 1..80: mol_type = other DNA
agatgcctttgcatccaaacccccagtggacattaaccccgacaccacattccgtgagttgtttggaatagacccacatg

SEQ ID NO: 63706 - DNA, 80 bp, synthetic construct
  source 1..80: mol_type = other DNA
cgggcggtacggagagcgtgcagtacggcctgctggacaggcctatattgcagcgttcagtgctgtcgggcatcacagag

SEQ ID NO: 63707 - DNA, 80 bp, synthetic construct
  source 1..80: mol_type = other DNA
caagtggtcgccggggtgcggcgcgagataatgcgtcgcaccccggtggtcagccccgcttttagtgcggaggtgctcct

SEQ ID NO: 63708 - DNA, 80 bp, synthetic construct
  source 1..80: mol_type = other DNA
taaaaatgtctgggtgcccaggtgtactcgggatgtggacaaaagtgctcaaaatctgcggaggcatcaccaccatcaca

SEQ ID NO: 63709 - DNA, 80 bp, synthetic construct
  source 1..80: mol_type = other DNA
acgtggtgctgctttaattgaactagccgccagccgtgaagtgacgggtgttgacgagcttaaaggtctccttgattgtt

SEQ ID NO: 63710 - DNA, 80 bp, synthetic construct
  source 1..80: mol_type = other DNA
aacagcacaaataaacattggccacaagcccggtagctctagtgcctaaacctaaattttcttttctttgaaacggtccc

SEQ ID NO: 63711 - DNA, 80 bp, synthetic construct
  source 1..80: mol_type = other DNA
ggtcaaaacaacgttcacatcgcagggcccaacagacctcgggtgtgcggcagtgttagcaggggccgcaatgattctat

SEQ ID NO: 63712 - DNA, 80 bp, synthetic construct
  source 1..80: mol_type = other DNA
agtttaaagaacaaggaaacgagcaacgcaacatctggatcacctgcccgcgcgatctggtggcccctgccgcatcaggc

SEQ ID NO: 63713 - DNA, 80 bp, synthetic construct
  source 1..80: mol_type = other DNA
atgtaagtgacacgggtgcagacttccaaattggcatttgccctgatgggtacatgcgcacgggatctccagttggcacg

SEQ ID NO: 63714 - DNA, 80 bp, synthetic construct
  source 1..80: mol_type = other DNA
tggagaacgatagctataaatttattccttttaataatttagcaataaaatgcatgttgacagcaaaagtagataaaaaa

SEQ ID NO: 63715 - DNA, 80 bp, synthetic construct
  source 1..80: mol_type = other DNA
attcatcagttgctaaccatgcagatagagtatttgctacatataagaataatgctaagagtggtaatactactgatttc

SEQ ID NO: 63716 - DNA, 80 bp, synthetic construct
  source 1..80: mol_type = other DNA
cattctacccaatagagttcaacccgagagttgagcttcaagtgctccgatcggcccacctcagggtgggtggtcgtgag

SEQ ID NO: 63717 - DNA, 80 bp, synthetic construct
  source 1..80: mol_type = other DNA
acacagggtaaatttgtggagaccatgattggtgtggttaacaccgccccctatccacttaattgtgaccgagtggagaa

SEQ ID NO: 63718 - DNA, 80 bp, synthetic construct
  source 1..80: mol_type = other DNA
tagtttggctgccacccccacattcacggaagagggcttattagactctttcctttcaaaaccaccggttgacatcaatc

SEQ ID NO: 63719 - DNA, 80 bp, synthetic construct
  source 1..80: mol_type = other DNA
caaaggcaaagtgttcacgtctgactatatcatatgcaccagcaattacccaacctctgtgttacctgacaacccacgag

SEQ ID NO: 63720 - DNA, 80 bp, synthetic construct
  source 1..80: mol_type = other DNA
aagaagcccccacccgacttgtacaaaaatgatttcacacaccttcgcctatctgttagaccgttcttggggtacaaccc

SEQ ID NO: 63721 - DNA, 80 bp, synthetic construct
  source 1..80: mol_type = other DNA
cgagggggataccttggatggtgtccgagtgaaacctgtgctcaccagtgtggatggtttgtcacgcttgatggaaacca

SEQ ID NO: 63722 - DNA, 80 bp, synthetic construct
  source 1..80: mol_type = other DNA
agacactccgtctgttggcagaaactgtgactgaaagtttggtacactttggccccttcctactcatgatgcacaatgtt

SEQ ID NO: 63723 - DNA, 80 bp, synthetic construct
  source 1..80: mol_type = other DNA
tcatacctcgccacccggtccggtcgagaagaggaggccaaaggaaagaccaaacatggccgtggtgccaaacacgctag

SEQ ID NO: 63724 - DNA, 80 bp, synthetic construct
  source 1..80: mol_type = other DNA
ggtcacttgccccattaccagatcggtgatggcgccccagtctactactcggcgcgcctacaccctgtcaccacgctcgc

SEQ ID NO: 63725 - DNA, 80 bp, synthetic construct
  source 1..80: mol_type = other DNA
tcccgcaccgtttggttccggtgatgagcgatacaaattttcccaggtagagatgttggtcaacggcttaaagccttact

SEQ ID NO: 63726 - DNA, 80 bp, synthetic construct
  source 1..80: mol_type = other DNA
aagcacgtcgtgccttcgagcgagagcgcgcggagctgtttaaggaactgccacatgctgatttggatgtaagtcgtcaa

SEQ ID NO: 63727 - DNA, 80 bp, synthetic construct
  source 1..80: mol_type = other DNA
gacagttctagccaacttaacctcgttcggtctcaaaccaacagctgcagacaagagtgagacgatagccccaacccaca

SEQ ID NO: 63728 - DNA, 80 bp, synthetic construct
  source 1..80: mol_type = other DNA
caattcttgtggatcaaggccaacaggacagttgacatcaattcaccgccagcatacgatcgtgacgcgcgtggtatcca

SEQ ID NO: 63729 - DNA, 80 bp, synthetic construct
  source 1..80: mol_type = other DNA
gttagaaaacgccctcgcgtatgcatcgcagcatggccatacagtttttgaggaggtcgccgaattggctcgtcacacag

SEQ ID NO: 63730 - DNA, 80 bp, synthetic construct
  source 1..80: mol_type = other DNA
gccacagggtggcgagaagaccagcccgcagcccgtgacaccgcaggacaccattggccccacagcggccctcttacttc

SEQ ID NO: 63731 - DNA, 80 bp, synthetic construct
  source 1..80: mol_type = other DNA
caaaagtcatacttttacgccatgtggcgacaggtggttaagaagagcaaggagtttttcatccctctggtcaaatgtac

SEQ ID NO: 63732 - DNA, 80 bp, synthetic construct
  source 1..80: mol_type = other DNA
acgttctcgaggcaacagaatgggtgggcgaattgtgggattggttgtggtggcggctgcggaacaggtgaaccatcact

SEQ ID NO: 63733 - DNA, 80 bp, synthetic construct
  source 1..80: mol_type = other DNA
cctctggaccacttgtcacttttgctgacaatggggatgttaatgagagttccgcccagaacgccatattgacagctgca

SEQ ID NO: 63734 - DNA, 80 bp, synthetic construct
  source 1..80: mol_type = other DNA
aggtgcgtcagacagcaacatctacattagtcctacctgggtaaatggcaatccctcccacccaattcatgaaaaatgca

SEQ ID NO: 63735 - DNA, 80 bp, synthetic construct
  source 1..80: mol_type = other DNA
agcaaatagaatccaggcagattgggtgcgccgtcaagaggcattacaaatccgtggccaggacatctcacgagaccttg

SEQ ID NO: 63736 - DNA, 80 bp, synthetic construct
  source 1..80: mol_type = other DNA
ttgtgaacccaaattaccaaccttcacctccaagattgaaaataggccctaggccccctagtaccaatgtttgaaatctt

SEQ ID NO: 63737 - DNA, 80 bp, synthetic construct
  source 1..80: mol_type = other DNA
taggccctaggccccctagtaccaatgtttgaaatcttgccttttatgcaaattttctatcttttcttttctttctacac

SEQ ID NO: 63738 - DNA, 80 bp, synthetic construct
  source 1..80: mol_type = other DNA
caacacaagaatacctacagagggtggttggcaacagtcactgctttagttgaagtgtattccaacctgtttcaagatat

SEQ ID NO: 63739 - DNA, 80 bp, synthetic construct
  source 1..80: mol_type = other DNA
caaatgtttgaaaccattgatgatctcaatgatcatgtcaggggtgtggtggccagactgtggtgcaagcaattgcaccg

SEQ ID NO: 63740 - DNA, 80 bp, synthetic construct
  source 1..80: mol_type = other DNA
gcgggataccgcagtctcagcagtgtcagccatcacactggtgtttgaaaccattaaggattttatagttaatgtgatag

SEQ ID NO: 63741 - DNA, 80 bp, synthetic construct
  source 1..80: mol_type = other DNA
caattatcctcactggtcctcctggtataggtaaaactagacttgcacaacaccttgctgcgggctttggtaaagtgtca

SEQ ID NO: 63742 - DNA, 80 bp, synthetic construct
  source 1..80: mol_type = other DNA
acaaccccgagtgcacagtttttcgggccccggacggtgatgtgatcttttacacgtttgggtcatacgcttgcttcgta

SEQ ID NO: 63743 - DNA, 80 bp, synthetic construct
  source 1..80: mol_type = other DNA
cgctagaggtcatttgaatgacattgtgttcattacaaaatctggtctcccatctggcatgccgttcaccagtgtcatca

SEQ ID NO: 63744 - DNA, 80 bp, synthetic construct
  source 1..80: mol_type = other DNA
ctgttaacggcactgcccagcgtgtcgagtctttggtcaatgcaggcttcacgcccgtggacgcacgtcggctggccggc

SEQ ID NO: 63745 - DNA, 80 bp, synthetic construct
  source 1..80: mol_type = other DNA
aggccctaggccccctagcaccaatgtttgaaatcatatctcttataaaattttcttatcttttcttttctttctacacg

SEQ ID NO: 63746 - DNA, 80 bp, synthetic construct
  source 1..80: mol_type = other DNA
aatgtgagcctcatggattggttgtccgatcaacagggttcaagatatcatctgcagttgcatgtgctagcggagtttgt

SEQ ID NO: 63747 - DNA, 80 bp, synthetic construct
  source 1..80: mol_type = other DNA
caaaaaacggactatcattaaagaagctcttcatagaatacaacgacgttatagaaaatgctacgttgctatcaatccta

SEQ ID NO: 63748 - DNA, 80 bp, synthetic construct
  source 1..80: mol_type = other DNA
aatatgatgtgatgaaagataaaccatattacttagtaacatgggcgaattctgcaattgaaatgttgatgtcacttttt

SEQ ID NO: 63749 - DNA, 80 bp, synthetic construct
  source 1..80: mol_type = other DNA
gtgcatggggaagtataatctaatcttgtcagaatatttatcattcatatataattcacaatctgcagttcagattccga

SEQ ID NO: 63750 - DNA, 80 bp, synthetic construct
  source 1..80: mol_type = other DNA
aggccaagggaatccttggcccagatggggtccccagcagagctgctgaggttgctgctgctgcttacagaaacctgtaa

SEQ ID NO: 63751 - DNA, 80 bp, synthetic construct
  source 1..80: mol_type = other DNA
atggagtcaatcataaactagatgttactacggctacttgtacgatcagaaattgtaaaaaactaggaccaagagaaaat

SEQ ID NO: 63752 - DNA, 80 bp, synthetic construct
  source 1..80: mol_type = other DNA
accgcacaaattaacattggtcacaaccctggtagctccaatgcctaaatccaaattttcttttctttgaaacggtccca

SEQ ID NO: 63753 - DNA, 80 bp, synthetic construct
  source 1..80: mol_type = other DNA
atggcttccaagccattctacccaatagagttcaacccgagtgttgagcttcaagtgctccgatcggcccacctcagggt

SEQ ID NO: 63754 - DNA, 80 bp, synthetic construct
  source 1..80: mol_type = other DNA
ttaatgaaattgtcgggttgctctaacaccacaagctattggcaccgactcctcaaggtgtgtgggggtgtcaccaccat

SEQ ID NO: 63755 - DNA, 80 bp, synthetic construct
  source 1..80: mol_type = other DNA
tgctgcagcggcccgtgctatcgtgtgggtgcgagacatcatagcggaagctgatggtaaagcgaggttgaagaagtaca

SEQ ID NO: 63756 - DNA, 80 bp, synthetic construct
  source 1..80: mol_type = other DNA
atatgtgagtgagcttgagtctactgcaaacagtattaggagcaccatcctcctagacacaccccgaaagaccccagttg

SEQ ID NO: 63757 - DNA, 80 bp, synthetic construct
  source 1..80: mol_type = other DNA
cgaacttttctgtcactttggaccaccacgactcttacaccgggaatgaagttgcaatttgggatgagtttgacgttgac

SEQ ID NO: 63758 - DNA, 80 bp, synthetic construct
  source 1..80: mol_type = other DNA
acgcagggtaaatttgtggagaccatgattggtatagtcaacaccgccccctacccactcaactgcgaccgagtggagaa

SEQ ID NO: 63759 - DNA, 80 bp, synthetic construct
  source 1..80: mol_type = other DNA
agtatttgcaccgtagcttggctgccgcccccacattcacagaggagggcttgctagactccttcctttcaaaaccacca

SEQ ID NO: 63760 - DNA, 80 bp, synthetic construct
  source 1..80: mol_type = other DNA
ggggctttctaccgccgagtcacaacgatagatgtgtcatctcctaccattgaagattggaagaagaagaacccagggaa

SEQ ID NO: 63761 - DNA, 80 bp, synthetic construct
  source 1..80: mol_type = other DNA
gaaacccccccccgacttgtataagaatgattttacacacctccgtctatctgttagaccgttcctggggtacaaccccg

SEQ ID NO: 63762 - DNA, 80 bp, synthetic construct
  source 1..80: mol_type = other DNA
aaggggacaccttagacggtgtccgggtgaaacctgtgctcactagtgtggatggtctgtcacgcttgatggaaaccaag

SEQ ID NO: 63763 - DNA, 80 bp, synthetic construct
  source 1..80: mol_type = other DNA
tttaaggagcagggcaatgagcaccgaaatctgtggataacatgcccgcgtgacctggtggcccccgccgcatctggctt

SEQ ID NO: 63764 - DNA, 80 bp, synthetic construct
  source 1..80: mol_type = other DNA
gaaagcatacatggccgctaaccgggcgctcgcacaagtgttccaggaaccatcttcacaggatattggtgaaacctgca

SEQ ID NO: 63765 - DNA, 80 bp, synthetic construct
  source 1..80: mol_type = other DNA
catcccgtgtgtacgtgtcatgcaataacccaccccccacgtacagcggacgggtggtaaaaatcacagccatcaaccca

SEQ ID NO: 63766 - DNA, 80 bp, synthetic construct
  source 1..80: mol_type = other DNA
tgggatgcatcacttgccaattccatgttatcaatgtttgagaccaccagtcacatccctgcctcgattcagcgtgaaat

SEQ ID NO: 63767 - DNA, 80 bp, synthetic construct
  source 1..80: mol_type = other DNA
catgtatagagtttgggacccactggttcacctgcagacacgtgaaccaaacacgcagatgctcccctatatcaacagag

SEQ ID NO: 63768 - DNA, 80 bp, synthetic construct
  source 1..80: mol_type = other DNA
tggtcccggtgtcttctgcatttgactttatccgaggccttaggcaccatcttggtctgtgttcagtcaaaggcatgtgg

SEQ ID NO: 63769 - DNA, 80 bp, synthetic construct
  source 1..80: mol_type = other DNA
agagcctaccagggttggaatagttccagctccatcttggaattcttgtcaaagcacatggctgatgttgctttcccaca

SEQ ID NO: 63770 - DNA, 80 bp, synthetic construct
  source 1..80: mol_type = other DNA
caaccctgaatgcactgttttccgggccccggatggtgatgtgatcttctacacgttcgggtcatacgcttgctttgtgt

SEQ ID NO: 63771 - DNA, 80 bp, synthetic construct
  source 1..80: mol_type = other DNA
ccccagcccgtgtcccatttgttggggagcccccgaagaacgtccactcaaacataacacgcaacatgacgtgggcagag

SEQ ID NO: 63772 - DNA, 80 bp, synthetic construct
  source 1..80: mol_type = other DNA
ttcgcacccaaccaatgcgtgctccacgtgcgccccgtaaccaaggctacgatgaagaagcccccacaccaattgtcaca

SEQ ID NO: 63773 - DNA, 80 bp, synthetic construct
  source 1..80: mol_type = other DNA
ttcacatctggtggcgaccacattgggtatggttgtcacatgggtaatggggtagttgtcacagttacacacgtggcctc

SEQ ID NO: 63774 - DNA, 80 bp, synthetic construct
  source 1..80: mol_type = other DNA
tgcgtctgaccaagtagaagggcaggacttcacaatcaggaagaccgagggtgaaaccacctgggtgaacaccaatctag

SEQ ID NO: 63775 - DNA, 80 bp, synthetic construct
  source 1..80: mol_type = other DNA
ggcacctgccccattaccaggtcggtgacggtgcccctgtctactactcggcacgcctgcaccctgtcaccacgcttgcg

SEQ ID NO: 63776 - DNA, 80 bp, synthetic construct
  source 1..80: mol_type = other DNA
agcttgctcagcgtgtgactaaaacatctaaggtggagaatgcttttgcttggaagggtctagcagtggtccgaggccct

SEQ ID NO: 63777 - DNA, 80 bp, synthetic construct
  source 1..80: mol_type = other DNA
gattgtggcggcatgcccacggggactcgttaccaccgctcacctgcatggcccaaccctgtagaaggagaaacacacgc

SEQ ID NO: 63778 - DNA, 80 bp, synthetic construct
  source 1..80: mol_type = other DNA
ccctgcgccgtttggttccggtgatgagcggtacaagttttcccaggtggaaatgttggtcaacggcttaaagccgtact

SEQ ID NO: 63779 - DNA, 80 bp, synthetic construct
  source 1..80: mol_type = other DNA
cagagcctacccccggcataccccctgctctgttacaacgcgcagccacgcacacacggacgtatttggaaacaataatt

SEQ ID NO: 63780 - DNA, 80 bp, synthetic construct
  source 1..80: mol_type = other DNA
ggcacccatcgatcaccaaatctgtcattcagtgaggcatgttcactcttggaaaaatcaacatcgtgtggtccgttcgt

SEQ ID NO: 63781 - DNA, 80 bp, synthetic construct
  source 1..80: mol_type = other DNA
ggctggccaaaaaggggattactgggacgaggacaagcagtgttacacaggtgtgttggcagaacaccttgccaaagctt

SEQ ID NO: 63782 - DNA, 80 bp, synthetic construct
  source 1..80: mol_type = other DNA
aacgcgcagggaaaaagacgcctcctgtggggttgtgatgcgggtgctacattggtggctaccgcggcattcaagggcgt

SEQ ID NO: 63783 - DNA, 80 bp, synthetic construct
  source 1..80: mol_type = other DNA
tgccactcgcctccaggcagttgctccaatgacaccagttggcgttggtataaacatggacagttaccaggttgaggtgc

SEQ ID NO: 63784 - DNA, 80 bp, synthetic construct
  source 1..80: mol_type = other DNA
gccgcctcacttgggattttggagagattgtccgaggccactcccatcacaacgtcagctgtcgagttgctatcctcccc

SEQ ID NO: 63785 - DNA, 80 bp, synthetic construct
  source 1..80: mol_type = other DNA
tgccagaggccatttaaatgacatcgtatttatcacaaaatctggtctcccatctggtatgccgttcaccagtgtcatca

SEQ ID NO: 63786 - DNA, 80 bp, synthetic construct
  source 1..80: mol_type = other DNA
actcacttaaccacatgacttactttgcagctgcagtgcttaaggcgtatgaacaacatggagcaccatatacaggcaac

SEQ ID NO: 63787 - DNA, 80 bp, synthetic construct
  source 1..80: mol_type = other DNA
acgtgtttcaagttgagactgttcacacctacggggacgactgtctatactcagtatgccctgcaacagcctccattttc

SEQ ID NO: 63788 - DNA, 80 bp, synthetic construct
  source 1..80: mol_type = other DNA
aagcacgccgagctttcgagcgtgagcgtgcggagctgtttaaggagctgccacatgctgatttggatgtgggtcgccaa

SEQ ID NO: 63789 - DNA, 80 bp, synthetic construct
  source 1..80: mol_type = other DNA
caaacagttctagccaacttaacctcgtttggcctcaaaccaacagctgcagataagagtgagacaatagccccgaccca

SEQ ID NO: 63790 - DNA, 80 bp, synthetic construct
  source 1..80: mol_type = other DNA
cacccctgtcttccttaagagaactctaacatgcacaccacgtggagtgcgtggtctactagacatcacatccataaaga

SEQ ID NO: 63791 - DNA, 80 bp, synthetic construct
  source 1..80: mol_type = other DNA
gacaattcctgtggatcaaggccaacaggacagttgacattaattcaccaccagcatatgatcgcgacgcgcgcggcatc

SEQ ID NO: 63792 - DNA, 80 bp, synthetic construct
  source 1..80: mol_type = other DNA
aattagaaaacgccctcgcgtatgcatcacagcatggtcatgcagtttttgaggaagttgctgaattggctcgacacaca

SEQ ID NO: 63793 - DNA, 80 bp, synthetic construct
  source 1..80: mol_type = other DNA
gccaaggctgagggactggtgctaaccaacgtcaactatgaccaagctctcgccacctacgaatcttggttcataggtgg

SEQ ID NO: 63794 - DNA, 80 bp, synthetic construct
  source 1..80: mol_type = other DNA
gccacagggtggcgaaaagactagcccacagcctgtgacaccacaggacaccattggccccacatcggccctcctgcttc

SEQ ID NO: 63795 - DNA, 80 bp, synthetic construct
  source 1..80: mol_type = other DNA
caactcagattgaaacaccaaatgcaagtgcgcagcgcttggagttggccatggctacaggggcaatcacgagtaatgta

SEQ ID NO: 63796 - DNA, 80 bp, synthetic construct
  source 1..80: mol_type = other DNA
gttttcaagtgagagtgactatatctggttctggcctgtttgctggtcgagcggtaactgccatcttgccacccggagtg

SEQ ID NO: 63797 - DNA, 80 bp, synthetic construct
  source 1..80: mol_type = other DNA
aaccccgcgagtgtccaaaaccctggggttttccctcatgccttcattgatgcgcgcaccactgagccaatcttgatcaa

SEQ ID NO: 63798 - DNA, 80 bp, synthetic construct
  source 1..80: mol_type = other DNA
cctgccagacattcgtcctgttgacttccaccgtgtcgacggtgacgatgctacggcatctgttggactgtgggtagctc

SEQ ID NO: 63799 - DNA, 80 bp, synthetic construct
  source 1..80: mol_type = other DNA
agccccttatcaacccatttcagacaggccctgtgtccacttgttggttgagttttgaaacaagacccggccctgatttt

SEQ ID NO: 63800 - DNA, 80 bp, synthetic construct
  source 1..80: mol_type = other DNA
gatttctgtttattgaaggccccagagcagcagatggacaatggaatttcacccgcctccttgttgccccgtaggctcgg

SEQ ID NO: 63801 - DNA, 80 bp, synthetic construct
  source 1..80: mol_type = other DNA
acgctctcgaggcaacagaatgggtgggcgaattgtagggctggttgtggtggcagccgcagaacaggtgaaccaccact

SEQ ID NO: 63802 - DNA, 80 bp, synthetic construct
  source 1..80: mol_type = other DNA
ttgatgcccggtcaacaacattagggtggtccacattgcctgttgaacctatcgcgggggatatatcctggtatggtgat

SEQ ID NO: 63803 - DNA, 80 bp, synthetic construct
  source 1..80: mol_type = other DNA
gctggcaacaagtcaatccgtgggcttgtcagtgcccagggtaaaggcataatattcccaaacatagtcaaccattggac

SEQ ID NO: 63804 - DNA, 80 bp, synthetic construct
  source 1..80: mol_type = other DNA
tgacgttgcactgtcttccaagacatccaacaccacaaccataccaactgacacgtccaccctcggcaatttgccaggcg

SEQ ID NO: 63805 - DNA, 80 bp, synthetic construct
  source 1..80: mol_type = other DNA
cctctgggccgcttgtcacttttgctgacaacggggatgtcaatgagagttccgcccaaaatgccatactaacagctgca

SEQ ID NO: 63806 - DNA, 80 bp, synthetic construct
  source 1..80: mol_type = other DNA
aatcagaacttcacatcattctctccaacttttgacgcggcagggatgtgggtgtggatgccttggtccacggcgcgtcc

SEQ ID NO: 63807 - DNA, 80 bp, synthetic construct
  source 1..80: mol_type = other DNA
aggtgcgtcggacagcaacatctatatcaaccctacctgggtaaatggcaacccctcccacccaatccatgagaaatgta

SEQ ID NO: 63808 - DNA, 80 bp, synthetic construct
  source 1..80: mol_type = other DNA
cctggtgcggcagaggtgtactgctcgcaactggaaagcactgctgagattttccagaacaacattgtcaacatcccaat

SEQ ID NO: 63809 - DNA, 80 bp, synthetic construct
  source 1..80: mol_type = other DNA
gaaccaaatggcggtgtttaatgttgagactgcaggcaattcattccaaatagccatcttgcccaatggttactgtgtca

SEQ ID NO: 63810 - DNA, 80 bp, synthetic construct
  source 1..80: mol_type = other DNA
ccaacgcaccagtgggaacacaccagcttcttgactatgagaccagtttcaaatttgtaggactcttcccccaaagcact

SEQ ID NO: 63811 - DNA, 80 bp, synthetic construct
  source 1..80: mol_type = other DNA
tggctgccggttcacttgtggacatggcaggtaccatttcatcaattgtggcacaacaaagacaaattgatctgatggca

SEQ ID NO: 63812 - DNA, 80 bp, synthetic construct
  source 1..80: mol_type = other DNA
gaagcaaacaaaatccaggcagactgggtgcgccgtcaagaggcactgcaaatccgtggccaagacatctcacgagatct

SEQ ID NO: 63813 - DNA, 80 bp, synthetic construct
  source 1..80: mol_type = other DNA
tgccgtcaacggcaccgcccagcgtgttgagtctctagtcaatgcaggcttcacacctgtggacgcacgtcggctggccg

SEQ ID NO: 63814 - DNA, 80 bp, synthetic construct
  source 1..80: mol_type = other DNA
gcggaacggaaacggtgagttacggcctgctggatcgccctattctacaacggggcgttctttctggcatcactgagaca

SEQ ID NO: 63815 - DNA, 80 bp, synthetic construct
  source 1..80: mol_type = other DNA
cgacacctccagaccatgcagggcgcgctaagtgcattcaaaaatggcgcctcttacggagccccgccagccccttcagg

SEQ ID NO: 63816 - DNA, 80 bp, synthetic construct
  source 1..80: mol_type = other DNA
ctttgtgaatccaaattatcaaccttcacctccgagattgaaattaggccctagaccccctagcaccaatgtctgaaact

SEQ ID NO: 63817 - DNA, 80 bp, synthetic construct
  source 1..80: mol_type = other DNA
aattaggccctagaccccctagcaccaatgtctgaaactctatttcttgctatcttttcttttctttctacacggtacct

SEQ ID NO: 63818 - DNA, 80 bp, synthetic construct
  source 1..80: mol_type = other DNA
gggtggtcgtgagcaaatgtttgaaaccattaatgatctcaatgatcatgttaggggtgtggtggccaagctgtggtgca

SEQ ID NO: 63819 - DNA, 80 bp, synthetic construct
  source 1..80: mol_type = other DNA
accttgtcaagagcacgttccagtcgcagggcccaacatcttgcggctgggctgccatcattgctggtgcagtgctcatc

SEQ ID NO: 63820 - DNA, 80 bp, synthetic construct
  source 1..80: mol_type = other DNA
cccaaaatcaaccttgggttcaatccccctagtactaatgtttaatcatcctatttcttttctttctttccttccatggg

SEQ ID NO: 63821 - DNA, 80 bp, synthetic construct
  source 1..80: mol_type = other DNA
atgtttgaaaccaccaacgatctcaatgatcatgttaggggtgtggtggccagactgtggtgtaagcatctgcatcgcag

SEQ ID NO: 63822 - DNA, 80 bp, synthetic construct
  source 1..80: mol_type = other DNA
atacaacattccgcgagctattcggcattgacccacacgaacaattcccgttgtccatccacgatttggcaagattacag

SEQ ID NO: 63823 - DNA, 80 bp, synthetic construct
  source 1..80: mol_type = other DNA
aatcccccctccctccttcaatcaacttttcttttctttccaagtggttcctcacgcgttcgggtggataattgtgatta

SEQ ID NO: 63824 - DNA, 80 bp, synthetic construct
  source 1..80: mol_type = other DNA
ctaagccatttcacccaattgagttcaaccgtaaggttgaaacaacagtcctcttctctgctcacctcagggtgagcggg

SEQ ID NO: 63825 - DNA, 80 bp, synthetic construct
  source 1..80: mol_type = other DNA
cttctcaagatctctggctgccctagtgtcatggggtactggcagcgcttgttaaaagtgtgtgccggcgtcacgaccat

SEQ ID NO: 63826 - DNA, 80 bp, synthetic construct
  source 1..80: mol_type = other DNA
agccgcggctgcgagagctttcacctgggttcgtgacatcatagtggaggcagaaagaaaagctcgcctcaagaaataca

SEQ ID NO: 63827 - DNA, 80 bp, synthetic construct
  source 1..80: mol_type = other DNA
tggcccgcaccgctgccctgttggaacttgctgcatcgcgagatgtcactggtacggaagaactaaaacgattgctagaa

SEQ ID NO: 63828 - DNA, 80 bp, synthetic construct
  source 1..80: mol_type = other DNA
gcaataatcttgactggtccaccgggtatagggaagacacaccttgcacagcacttagccgcaggttttggtaagacatc

SEQ ID NO: 63829 - DNA, 80 bp, synthetic construct
  source 1..80: mol_type = other DNA
gcgtcgcaccccggtggtcagccccgcttttagcgcggaggggctcctagatgcctttgcatccaaacccccagtggaca

SEQ ID NO: 63830 - DNA, 80 bp, synthetic construct
  source 1..80: mol_type = other DNA
tgaaatcttacatggctgctaacagggcactggcacaagttttcgcggaaccttcttccaacgaaatcgcggaaacatgc

SEQ ID NO: 63831 - DNA, 80 bp, synthetic construct
  source 1..80: mol_type = other DNA
ccccagcacgggttccattcgtcggagatccaccaaaaaccgtccactccaacatcacacgcaacatgacgtggattgag

SEQ ID NO: 63832 - DNA, 80 bp, synthetic construct
  source 1..80: mol_type = other DNA
accttgcgtctgcttgttgaaacaatcacggagagtttggcccattttggcccgctactactgatggttcacaacgtgac

SEQ ID NO: 63833 - DNA, 80 bp, synthetic construct
  source 1..80: mol_type = other DNA
gcggtggagtgagcttgtcggatgatgagtatgacgagtggcgcgaccttgtgcgtgattggaggcaggacatgaccgtt

SEQ ID NO: 63834 - DNA, 80 bp, synthetic construct
  source 1..80: mol_type = other DNA
gaaggcacatatgaaacacctaacatcacagttcatggattccatctccgtattgtcaatggttaccctacaaaacgtgg

SEQ ID NO: 63835 - DNA, 80 bp, synthetic construct
  source 1..80: mol_type = other DNA
cagaacccacccctggaataccccctgccctcctgcagcgggcagccacgcacacacgcacatacttggagtccatagtc

SEQ ID NO: 63836 - DNA, 80 bp, synthetic construct
  source 1..80: mol_type = other DNA
tcaacgaatccctcaagggcggtgttgtgtactgcctggactatagtaagtgggattccactcaacacccggccgttaca

SEQ ID NO: 63837 - DNA, 80 bp, synthetic construct
  source 1..80: mol_type = other DNA
agcacgtggccatttaaacgacatcatctttgtgacaaagtctggactcccctcaggtatgccattcaccagcgttgtca

SEQ ID NO: 63838 - DNA, 80 bp, synthetic construct
  source 1..80: mol_type = other DNA
agcttgaaaatgccctggcttacgcctcacaacatggccacgcaatttttgaagaggttgccgaaattgccaagaggacg

SEQ ID NO: 63839 - DNA, 80 bp, synthetic construct
  source 1..80: mol_type = other DNA
actcaagtagagacaccaaatgctagtgctcagcgtgtggagcttgcaatggcgacaggggcagtaaccagtaatgtacc

SEQ ID NO: 63840 - DNA, 80 bp, synthetic construct
  source 1..80: mol_type = other DNA
tgctgtccaaaacccaggcgtctttccccatgcattcattgatgctcgcacaaccgatcccatcctgatcaatttgcccg

SEQ ID NO: 63841 - DNA, 80 bp, synthetic construct
  source 1..80: mol_type = other DNA
acatccggcccattgactttcaccgtgtggatggggacgacgcgacagcgtctgtggggttatgggtcgcgcaacccttg

SEQ ID NO: 63842 - DNA, 80 bp, synthetic construct
  source 1..80: mol_type = other DNA
gatttttgtctcctcaaagcccccgaacaggaaatggacaatgggatatcacccgccaacttgttgccacgccgtctcgg

SEQ ID NO: 63843 - DNA, 80 bp, synthetic construct
  source 1..80: mol_type = other DNA
acgttcccggggcaaccgcctcggcggtcgcgtcgtgggactggttgtggtggctgcggccgagcaagtcaaccaccact

SEQ ID NO: 63844 - DNA, 80 bp, synthetic construct
  source 1..80: mol_type = other DNA
aacaatgaacacaccaaaatacgagggctcttgagcgcacaaggtaagggtatcatcttcccaaacattgtcaaccactg

SEQ ID NO: 63845 - DNA, 80 bp, synthetic construct
  source 1..80: mol_type = other DNA
gacagatgtgtcactgtctgccaagacctcgggacaaaccaccatccccatagctgctgacaacctcaacaacagccctg

SEQ ID NO: 63846 - DNA, 80 bp, synthetic construct
  source 1..80: mol_type = other DNA
catcatggaggaaaaagttctcagaaccagctgagattgtgcgccaactcctagtgcacttttgtgaaggcatgcgcaca

SEQ ID NO: 63847 - DNA, 80 bp, synthetic construct
  source 1..80: mol_type = other DNA
gcgtcgcacgacttcacgtcactgtcccaaactttcgatgcagcagggctttgggtttggatgccatggacccgaaacaa

SEQ ID NO: 63848 - DNA, 80 bp, synthetic construct
  source 1..80: mol_type = other DNA
caacatccccgcaaaccaaatggcagtcttcaatgtggaaactgcgggcaacacatttcagattgggatcttgccaaacg

SEQ ID NO: 63849 - DNA, 80 bp, synthetic construct
  source 1..80: mol_type = other DNA
gcacaggcaaatcgtatacaacaggattgggtaaacagacaagaggcactcatcgcacgaggacaggacatctcccgtga

SEQ ID NO: 63850 - DNA, 80 bp, synthetic construct
  source 1..80: mol_type = other DNA
ccccagacccccagtgactaatgtgtagtgatgattgggtttcttgaaataatcaaattttcatttattcatgctttcct

SEQ ID NO: 63851 - DNA, 80 bp, synthetic construct
  source 1..80: mol_type = other DNA
agagaggaaatttttgaaaccaaacaggacatgtatgcccatgttcgccaagtggtcgccggggtgcggcgcgagataat

SEQ ID NO: 63852 - DNA, 80 bp, synthetic construct
  source 1..80: mol_type = other DNA
gcgagaaaccgcagtatccgcggtgtctgcaatcacgctcctttttgaatcacttaagcagtttgtggaaggagtcattg

SEQ ID NO: 63853 - DNA, 80 bp, synthetic construct
  source 1..80: mol_type = other DNA
atcttgtcaaaggcactttccaggctcagggccccacgaactgtgggtgggccgccattgcggctggtgttatcctgatt

SEQ ID NO: 63854 - DNA, 80 bp, synthetic construct
  source 1..80: mol_type = other DNA
cacatcaccgcgtagagccccgacccgaccccaacaacactatgaggaagagagcccaaccgcaattgtagaattcacac

SEQ ID NO: 63855 - DNA, 80 bp, synthetic construct
  source 1..80: mol_type = other DNA
agggtggtgaccacattggatatggagtacacattggcaatggcaacgtagtaaccgtcacccatgtggcgtcaacatcc

SEQ ID NO: 63856 - DNA, 80 bp, synthetic construct
  source 1..80: mol_type = other DNA
cccaacgagttgtcaaagaagtcaccactcaagacgagttccagtggaagggtttgcccgtggtgaagtctgggttggat

SEQ ID NO: 63857 - DNA, 80 bp, synthetic construct
  source 1..80: mol_type = other DNA
gttggaggcatgcccactggaactcgttaccacaggtctcccgcatggccagaggaacagtctggtgagacacatgcccc

SEQ ID NO: 63858 - DNA, 80 bp, synthetic construct
  source 1..80: mol_type = other DNA
attggtcacaacccaggtagctccaatgcctaaatccaaattttcttttctttgaaacggtcccacacgcgttcgggtgg

SEQ ID NO: 63859 - DNA, 80 bp, synthetic construct
  source 1..80: mol_type = other DNA
agccattctaccctatttcattcaaccgcaaggttgagtattcagtgctcagatcggctcacctcagggtgagtggtcgt

SEQ ID NO: 63860 - DNA, 80 bp, synthetic construct
  source 1..80: mol_type = other DNA
accctctttcattccgtttctgttcttttcttttcttttccgactggcactcacgcgttcgggagtataatgccaattaa

SEQ ID NO: 63861 - DNA, 80 bp, synthetic construct
  source 1..80: mol_type = other DNA
tttcaacatgttgggtatcagtggagacaaaaccaggcggtgactttgatttctgcctattaaggccaccaggtcaacag

SEQ ID NO: 63862 - DNA, 80 bp, synthetic construct
  source 1..80: mol_type = other DNA
tttcaacatgttgggtgtcagtagaaactaagccaggcggtgattttgatttctgcctgctaagaccaccgggtcaacag

SEQ ID NO: 63863 - DNA, 80 bp, synthetic construct
  source 1..80: mol_type = other DNA
tactttatgaataattcattggagaaaataataatacacattgtattaataataatttcattatgcggaataaaggccca

SEQ ID NO: 63864 - DNA, 80 bp, synthetic construct
  source 1..80: mol_type = other DNA
ataatctatattgttagactgttgttttggaaaatgtacaacgtaattaacaatttagtgaataaaatgataaatagaga

SEQ ID NO: 63865 - DNA, 80 bp, synthetic construct
  source 1..80: mol_type = other DNA
tgctgatcgccaaatagttgataataggtttagagaatttgaagaacgttttagaattttactacttcagcatgatgaaa

SEQ ID NO: 63866 - DNA, 80 bp, synthetic construct
  source 1..80: mol_type = other DNA
aagacaatatagtacaatataataaattagataatttcgctgaatccataaagagtgaatttaacttaaaagttgcagaa

SEQ ID NO: 63867 - DNA, 80 bp, synthetic construct
  source 1..80: mol_type = other DNA
tttcaagaattgaaatggagatgtgatatgatagctaacaaaacaatgaatacaatagtcctaacaaatacggttgattc

SEQ ID NO: 63868 - DNA, 80 bp, synthetic construct
  source 1..80: mol_type = other DNA
gatgaaaaaataatttttgatgaaggatcagtggtacaatataatcgtgagtgatgtgcagcatgctctaccatggatgg

SEQ ID NO: 63869 - DNA, 80 bp, synthetic construct
  source 1..80: mol_type = other DNA
gtgagtgatgtgcagcatgctctaccatggatggaaacatagcttggtagaggctctcccatgctcaatgcaatataccc

SEQ ID NO: 63870 - DNA, 80 bp, synthetic construct
  source 1..80: mol_type = other DNA
atgacaatgaatttatctctagattctcacagaatccattacacgcattttctttatttacaaacggaaatatacaggag

SEQ ID NO: 63871 - DNA, 80 bp, synthetic construct
  source 1..80: mol_type = other DNA
cttgaagatccagggatggcgtatttcccttatatagcatctgtcctaacagttttgtttacgttgcacaaagcgtctat

SEQ ID NO: 63872 - DNA, 80 bp, synthetic construct
  source 1..80: mol_type = other DNA
aaaatcgcactaaagacgtccaaatgttcatataaagtggtgaagtattgtatcgtaacgattttcaatacgttgttgaa

SEQ ID NO: 63873 - DNA, 80 bp, synthetic construct
  source 1..80: mol_type = other DNA
ataagttgactacacgtgagattgaacaggtagaattgctgaaacgtatttatgataaattgatgatacgaacagcagac

SEQ ID NO: 63874 - DNA, 80 bp, synthetic construct
  source 1..80: mol_type = other DNA
atgaggtgcgtccaagtagtgtttgagatggagggcaatggctcccaaccgcctcagaaaggttctggcaacactaaccc

SEQ ID NO: 63875 - DNA, 80 bp, synthetic construct
  source 1..80: mol_type = other DNA
ggagaccaaacctgggggtgacttttgcttctgcttgctcaaaccacctggccagcaaatggacaatggtggttgttcac

SEQ ID NO: 63876 - DNA, 80 bp, synthetic construct
  source 1..80: mol_type = other DNA
atggcttccaagccatgcaggccaatattcctcgaccccactttcgagtgggtcgttttccgtcgctgctacctcagggt

SEQ ID NO: 63877 - DNA, 80 bp, synthetic construct
  source 1..80: mol_type = other DNA
gctgccatacggggtatcaagtggctcagagaactgtatgaagaggctgaaagcaaaaggctcgccaaaatgtacatggc

SEQ ID NO: 63878 - DNA, 80 bp, synthetic construct
  source 1..80: mol_type = other DNA
tagggcagcagccctaattgagttggcagcaagcagggaagtgactggggttaaggagttgaaggagctcctcagttgct

SEQ ID NO: 63879 - DNA, 80 bp, synthetic construct
  source 1..80: mol_type = other DNA
tattttgactggaccaccaggtattggtaagacacggttggcccagtttgtaggggaaaaatttggtaaagtgtccaact

SEQ ID NO: 63880 - DNA, 80 bp, synthetic construct
  source 1..80: mol_type = other DNA
tatagaatttggaatcccatcatccatattcaagagaggtccatcaacacacaaaacctgccatatgtcaaccgcgtgat

SEQ ID NO: 63881 - DNA, 80 bp, synthetic construct
  source 1..80: mol_type = other DNA
cccagtcacatctcactgggatttcttacgtggcctaagacaccaccttggtttggtgtccattcccggaatgtggcggg

SEQ ID NO: 63882 - DNA, 80 bp, synthetic construct
  source 1..80: mol_type = other DNA
tgcccgcgtaccctatgttggaaatccaccatccaccatccattcaaatgtcccgagatgcatgacgtggggtgaaacca

SEQ ID NO: 63883 - DNA, 80 bp, synthetic construct
  source 1..80: mol_type = other DNA
aatgacttcctcatgctacgagagcgcagtgctctcggtatggatgatgaagacgtagcacgctatagagcatggctaga

SEQ ID NO: 63884 - DNA, 80 bp, synthetic construct
  source 1..80: mol_type = other DNA
ccaactacccccatttgcaaattggttcaggaagacccgtgtattacacgatgcgattgcatccagtggtgactatcacg

SEQ ID NO: 63885 - DNA, 80 bp, synthetic construct
  source 1..80: mol_type = other DNA
cgattgtggactgccttacttaaatgccaacaggcaggtggtgggattgcatgctggtaccgatgttcaaggggaaacca

SEQ ID NO: 63886 - DNA, 80 bp, synthetic construct
  source 1..80: mol_type = other DNA
agttggcacaaaaggtagttaaggagctgcctgtagagagtgaatttcactggaagggccttccggttatcaaatctgac

SEQ ID NO: 63887 - DNA, 80 bp, synthetic construct
  source 1..80: mol_type = other DNA
tgtagagagtgaatttcactggaagggccttccggttatcaaatctgacctggatgttggggggatgccaaccggcacac

SEQ ID NO: 63888 - DNA, 80 bp, synthetic construct
  source 1..80: mol_type = other DNA
ctggatgttggggggatgccaaccggcacacggtaccatcgttcacctgcatggccagaacaactccccgaagaaaccta

SEQ ID NO: 63889 - DNA, 80 bp, synthetic construct
  source 1..80: mol_type = other DNA
acacggagactacacctggcattcccccttccttgctgtcacgggctacaacccatgtgcgtgcttaccttgaaacaatt

SEQ ID NO: 63890 - DNA, 80 bp, synthetic construct
  source 1..80: mol_type = other DNA
attggcacacaccgctctcctgtactcaccttcacccaggcagttgagttgcttgaaaaatccacttcatgtggcccatt

SEQ ID NO: 63891 - DNA, 80 bp, synthetic construct
  source 1..80: mol_type = other DNA
catacaaggactaaaaggagactattgggatgatgaaacacaacaatacactggggccctacgtgaacatttagacagag

SEQ ID NO: 63892 - DNA, 80 bp, synthetic construct
  source 1..80: mol_type = other DNA
catgggatcacgctgtcaggggcattgcaccagggaactcctacaaattggcacttaaggatgagctccgtcctgaggaa

SEQ ID NO: 63893 - DNA, 80 bp, synthetic construct
  source 1..80: mol_type = other DNA
aagaataaagaagggaagaggcggttgctgtggggctgtgacgccgcaacaaccctaattgcagtggcggcgtttaagcc

SEQ ID NO: 63894 - DNA, 80 bp, synthetic construct
  source 1..80: mol_type = other DNA
agtggccgcacgcttacaagtagtgacaccaatgactccaatttccgttggcatcaacatggactcgatgcaaatgcaag

SEQ ID NO: 63895 - DNA, 80 bp, synthetic construct
  source 1..80: mol_type = other DNA
tgatgaatgattctttgagaggtggtgtgctttactgcctagattactccaaatgggactccacacaaaacccggctgtc

SEQ ID NO: 63896 - DNA, 80 bp, synthetic construct
  source 1..80: mol_type = other DNA
actgcagccagcctgtccattttagagagattcatggaaagtagcccattggtgtcctgtgcaatagagtccctgtcctc

SEQ ID NO: 63897 - DNA, 80 bp, synthetic construct
  source 1..80: mol_type = other DNA
accagcaattggctatctcaatgacattaaatttgtaaccaaagggggtctcccatcaggaatgcccttcacctcagtca

SEQ ID NO: 63898 - DNA, 80 bp, synthetic construct
  source 1..80: mol_type = other DNA
tcaactcggtgaaccacatgatatactttgcagcgggtgtgctcaaagcttatgaggaccatcacgtcccatacactggc

SEQ ID NO: 63899 - DNA, 80 bp, synthetic construct
  source 1..80: mol_type = other DNA
aatgtatttcagatagagactgtccacacctatggtgatgactgtatttatagtgtttgtcctgccaccgcttctatctt

SEQ ID NO: 63900 - DNA, 80 bp, synthetic construct
  source 1..80: mol_type = other DNA
cggcagttttactgggttaaggcgaatcgcactagtgacccgtctagcccccctgcatttgatcgcactgcccgcagtgc

SEQ ID NO: 63901 - DNA, 80 bp, synthetic construct
  source 1..80: mol_type = other DNA
cttccacggtaatgggcgccatggacacagaccgccacatgccatccacaggagtctgtggcccagcaattggctttcaa

SEQ ID NO: 63902 - DNA, 80 bp, synthetic construct
  source 1..80: mol_type = other DNA
aacaatggagatgtctatgaaaatgagactcccgcagtcatgtttgccactctaaaccccttgactggcggtactaatga

SEQ ID NO: 63903 - DNA, 80 bp, synthetic construct
  source 1..80: mol_type = other DNA
aaatcctgtagccctctttggttcaatcaatatggcctctttagctgtagttcgcactcaacaggatgtggacttcacaa

SEQ ID NO: 63904 - DNA, 80 bp, synthetic construct
  source 1..80: mol_type = other DNA
ccaccggttttgccaacaacatgaacgtggttgtggaaacgtcctgggaaatgtactcgggatcacaacagatacagggg

SEQ ID NO: 63905 - DNA, 80 bp, synthetic construct
  source 1..80: mol_type = other DNA
cgagtgacacctatggatggtactaactttgttttcacttcttcaggcgccaacaccctggtgctctgggaggagcgatt

SEQ ID NO: 63906 - DNA, 80 bp, synthetic construct
  source 1..80: mol_type = other DNA
actcagttatgatggaacccaagcaatcttgtactcatctcagttggagcgcactgcagagtacttccaaaatgacaatg

SEQ ID NO: 63907 - DNA, 80 bp, synthetic construct
  source 1..80: mol_type = other DNA
tcaacatacctccaggttcaatggctgtttttaatgttgaaacaaattctgcctctttccaagttggcattcggcatgat

SEQ ID NO: 63908 - DNA, 80 bp, synthetic construct
  source 1..80: mol_type = other DNA
ggatacatggtgactggtggtacagttggaactcatgttgctctggatgcagaaacacgatttcaatttgttggtattct

SEQ ID NO: 63909 - DNA, 80 bp, synthetic construct
  source 1..80: mol_type = other DNA
tatttgcagctggcttggattcaaaagctaaagccaaccgtgctcactatcatcctacaacaacacaagaacaccgtgtc

SEQ ID NO: 63910 - DNA, 80 bp, synthetic construct
  source 1..80: mol_type = other DNA
ccaaaccctcaatcaatctcaatcaccaacctggatcatccagtgtttgattttaaattttcttttaattttaaattttc

SEQ ID NO: 63911 - DNA, 80 bp, synthetic construct
  source 1..80: mol_type = other DNA
gattaaaaccacattcacacctcagggtcccactgatcttgggtggaccgcagttgcggctggagcagtcatgattctac

SEQ ID NO: 63912 - DNA, 80 bp, synthetic construct
  source 1..80: mol_type = other DNA
acattgggccccagacccccagtgactaatgtgtagtgatgattgggtttcttaaaataatcaaattttcatttattcat

SEQ ID NO: 63913 - DNA, 80 bp, synthetic construct
  source 1..80: mol_type = other DNA
tcagggtgagcgggaaagaggaaatttttgaaaccaaacaggatatgtatgcccatgttcgccaagtggtcgccggggtg

SEQ ID NO: 63914 - DNA, 80 bp, synthetic construct
  source 1..80: mol_type = other DNA
ttggttggcatggcttctaagccattctacccaattgagttcaaccgtaaggttgaaacaacagtcctcttctctgctca

SEQ ID NO: 63915 - DNA, 80 bp, synthetic construct
  source 1..80: mol_type = other DNA
ctccttaagatttctggctgccctggtgttatgggatattggcagcgcttgttaaaagtatgtgccggtgtcacgaccat

SEQ ID NO: 63916 - DNA, 80 bp, synthetic construct
  source 1..80: mol_type = other DNA
agctgctgctgcgagagcattcacctgggttcgcgacatcattgtagaggcagagagaaaggctcgccttaaaaaataca

SEQ ID NO: 63917 - DNA, 80 bp, synthetic construct
  source 1..80: mol_type = other DNA
tggcccgcaccgccgccctgctggagcttgctgcatcgcgagatgtcactggcacggaagaattgaagcggttgctggaa

SEQ ID NO: 63918 - DNA, 80 bp, synthetic construct
  source 1..80: mol_type = other DNA
caataatcctaaccggtccaccgggtatagggaaaacacaccttgcacagcacttagctgctggttttggtaaaacatca

SEQ ID NO: 63919 - DNA, 80 bp, synthetic construct
  source 1..80: mol_type = other DNA
aacttttctgtcacgcttgatcaccatgattcctacacaggtaatgacgtggccatctgggacgagttcgatgtggatgc

SEQ ID NO: 63920 - DNA, 80 bp, synthetic construct
  source 1..80: mol_type = other DNA
ccaggggaagtttgtggagacaatgattggtgtggtgaacaccgcaccataccccttgaactgtgacagagtagaaaaca

SEQ ID NO: 63921 - DNA, 80 bp, synthetic construct
  source 1..80: mol_type = other DNA
tgtggcgcgaaacaatgcgtcgcaccccggtggtcgagcccgctttcagtgcggaggggctcctagatgcttttgcatcc

SEQ ID NO: 63922 - DNA, 80 bp, synthetic construct
  source 1..80: mol_type = other DNA
aaggcaaagtcttcacatccaattacattatatgtaccagtaattatcctacctctgttctgccagagaacccgagggct

SEQ ID NO: 63923 - DNA, 80 bp, synthetic construct
  source 1..80: mol_type = other DNA
ggagccttttaccgtcgcgtcacgacgatagatgtgtcatcccctgttattgatgattggaaaaagaaaaaccctggcaa

SEQ ID NO: 63924 - DNA, 80 bp, synthetic construct
  source 1..80: mol_type = other DNA
agaaacctccactggacttgtataagaaagatttttcacatctgcgcctttccgtccgaccataccttggttacaatcct

SEQ ID NO: 63925 - DNA, 80 bp, synthetic construct
  source 1..80: mol_type = other DNA
gaaggggacactctggagggcgttcgcgtgaaacctatcctaaccagtgtggacggcctgtcccggcttatggaaactaa

SEQ ID NO: 63926 - DNA, 80 bp, synthetic construct
  source 1..80: mol_type = other DNA
acatcaaggattttcgtgtctgccaacaatccgccccccacctttgtgggtagacacgtgaaaataacggccatcaatcc

SEQ ID NO: 63927 - DNA, 80 bp, synthetic construct
  source 1..80: mol_type = other DNA
ctgggatgcatcccttgccaactcaatgttgtcaatgttcgagaccaacactcacataccagcagccacccagagggaaa

SEQ ID NO: 63928 - DNA, 80 bp, synthetic construct
  source 1..80: mol_type = other DNA
catgtaccgtgtctggacgcccctaatacacatgcaaacacgggaaccaaacacccagatgctcccctacatcaatcggg

SEQ ID NO: 63929 - DNA, 80 bp, synthetic construct
  source 1..80: mol_type = other DNA
tggtgccggttacctcttcatttgactttgttcgtgggttacgccaccatcttggattgtgttccatcaaaggcatgtgg

SEQ ID NO: 63930 - DNA, 80 bp, synthetic construct
  source 1..80: mol_type = other DNA
aaagcgtatcagggatggcacagctccgcgacgattttggagttcctgtccaaacacatggaggatgtaacatttccctc

SEQ ID NO: 63931 - DNA, 80 bp, synthetic construct
  source 1..80: mol_type = other DNA
caatccggaatgcaccgtgtttcgagctgcggatggagatgtcatcttttacacatttgggtcctatgcctgctttgtct

SEQ ID NO: 63932 - DNA, 80 bp, synthetic construct
  source 1..80: mol_type = other DNA
accttgcgcctacttgttgaaacaatcacggagagtttggcccactttggcccactactgttgatggtgcacaacgtggc

SEQ ID NO: 63933 - DNA, 80 bp, synthetic construct
  source 1..80: mol_type = other DNA
ttggggagtttgtcgagttgcgcgagcgctacgcccttgggatggactcagaagacgtgcaacgatatcgggcatggctg

SEQ ID NO: 63934 - DNA, 80 bp, synthetic construct
  source 1..80: mol_type = other DNA
caacttcgtgccatgcggctaggtgcaggtgcctaccaacatgcaaccatcatcgggcgcggacgtgttgaggataccat

SEQ ID NO: 63935 - DNA, 80 bp, synthetic construct
  source 1..80: mol_type = other DNA
ttcaccagtaacggggaccatgtgggttatggttgtcacattggcaacggtgtggtggtgacagtgactcacgtggctgc

SEQ ID NO: 63936 - DNA, 80 bp, synthetic construct
  source 1..80: mol_type = other DNA
gccacctgccacactaccaactgggtgatggggcaccagtttattattcaactcgactacaccccgtcaccacaatcgca

SEQ ID NO: 63937 - DNA, 80 bp, synthetic construct
  source 1..80: mol_type = other DNA
gaaggcacatatgaaactcccaacatcacagtccatgggttccaccttcgcattattaatggttaccctacaaaacgcgg

SEQ ID NO: 63938 - DNA, 80 bp, synthetic construct
  source 1..80: mol_type = other DNA
agactgcggcacgccgtacttcgactcatgtcgaagactggtgggcctgcatgccgcaacgtcaaccaatggggagacca

SEQ ID NO: 63939 - DNA, 80 bp, synthetic construct
  source 1..80: mol_type = other DNA
agttggcacagaaagtaagtcgagtttcaaaggtggaaaacgcttttgcctggaagggtttgcccgtcttacgaggccct

SEQ ID NO: 63940 - DNA, 80 bp, synthetic construct
  source 1..80: mol_type = other DNA
gattgtggtggtatgcccacaggaacaagataccatcgatctccagcctggccagaacaactttcaagtgagacccatgc

SEQ ID NO: 63941 - DNA, 80 bp, synthetic construct
  source 1..80: mol_type = other DNA
ggcacacaccgatcccctaatctaacttacaacgaggcatgtgctttattggatcgcagcacatcttgcggtccgttcat

SEQ ID NO: 63942 - DNA, 80 bp, synthetic construct
  source 1..80: mol_type = other DNA
tgcaggccaaaagggggattactgggatgaagatcgccagtgttacacaggagtgttggcagagcacctcggtaagacct

SEQ ID NO: 63943 - DNA, 80 bp, synthetic construct
  source 1..80: mol_type = other DNA
aaccaacaaggcaagcgtcgactattgtggggttgtgacgccggggcaactttggttgctacggcagccttcaaagggat

SEQ ID NO: 63944 - DNA, 80 bp, synthetic construct
  source 1..80: mol_type = other DNA
aaactgtgctggccaacctcagcgcctttggcctgcggcccaccgctgccgacaaaacagacaaaatagcccccacccat

SEQ ID NO: 63945 - DNA, 80 bp, synthetic construct
  source 1..80: mol_type = other DNA
aagcgcgaagggcgcatgagagggaacgagcagacctatttaaggaattgccgttagtcgatcctgaagtgacccagcaa

SEQ ID NO: 63946 - DNA, 80 bp, synthetic construct
  source 1..80: mol_type = other DNA
acaccagtctttctcaagcgaactctcacttgcacaccaagaggtatccgtgggttacttgacgttacgtcaatcaggcg

SEQ ID NO: 63947 - DNA, 80 bp, synthetic construct
  source 1..80: mol_type = other DNA
gcaatttttctggattaaggctaaccgcaccacagatatatcatccccgcccgcctatgacagggaagcccggagtgtgc

SEQ ID NO: 63948 - DNA, 80 bp, synthetic construct
  source 1..80: mol_type = other DNA
agcttgaaaatgccctggcttatgcttcacaacacggccacgcaatctttgaggaaattgccgaaattgccaagagaacg

SEQ ID NO: 63949 - DNA, 80 bp, synthetic construct
  source 1..80: mol_type = other DNA
gcagtttccaggttcgtgttacactctctggctcaggactctatgcaggacgtgctgtcgtggccgttttaccaccaggg

SEQ ID NO: 63950 - DNA, 80 bp, synthetic construct
  source 1..80: mol_type = other DNA
gttaatccggcaaatgtgcaaaatccaggggtttttccgcatgcgttcatagacgcgcgcaccgtggatcccatcctgat

SEQ ID NO: 63951 - DNA, 80 bp, synthetic construct
  source 1..80: mol_type = other DNA
caacctgccagacattcgagcagttgattaccaccgggtcgacggcgatgagcctactgccaccgttggcctctgggttg

SEQ ID NO: 63952 - DNA, 80 bp, synthetic construct
  source 1..80: mol_type = other DNA
tggacgatctcgaggcaaccgccttggcggacgaataacaggtttggtggtggtggccgtggcggaacaagtaaaccacc

SEQ ID NO: 63953 - DNA, 80 bp, synthetic construct
  source 1..80: mol_type = other DNA
tccactgcctccaacagtgtccgggggttaattggggctgcaggtaagggcatcatcttcccaaacattgtcaaccactg

SEQ ID NO: 63954 - DNA, 80 bp, synthetic construct
  source 1..80: mol_type = other DNA
gacggatgtagccctctctgccaaaaactcgggtcaaaccagtttacccgcccccaatgctgacatgagtggttacccgg

SEQ ID NO: 63955 - DNA, 80 bp, synthetic construct
  source 1..80: mol_type = other DNA
gccaatcacgactttaccacactgacacagacttttgacgctgctggcacgtggatttggatgccttggacttcaaccca

SEQ ID NO: 63956 - DNA, 80 bp, synthetic construct
  source 1..80: mol_type = other DNA
aatgcacaaacatgaccggcaccaattttcaattcggtggcactggtaccaacaatatcatgttgtggcaggaacagcac

SEQ ID NO: 63957 - DNA, 80 bp, synthetic construct
  source 1..80: mol_type = other DNA
caaatgctgctgttggtacacaccaactccttgactttgaaactgcgtttagatttgttggtcttttcccccaaagtaca

SEQ ID NO: 63958 - DNA, 80 bp, synthetic construct
  source 1..80: mol_type = other DNA
acacttcaagggcccaatgggaacgctggtcgggccgtcagatttcttgaataatgtcttggttcacaggtgcagctctt

SEQ ID NO: 63959 - DNA, 80 bp, synthetic construct
  source 1..80: mol_type = other DNA
gccgctggttctgtcgtggacatggccggcaccatttcatctattgtggctcagcacaggcaattggatctaatggcgca

SEQ ID NO: 63960 - DNA, 80 bp, synthetic construct
  source 1..80: mol_type = other DNA
ccattaatggtactgccaagcgggttgagtcccttattaattctggattcaccccagtagatgcccgccgccttgctggg

SEQ ID NO: 63961 - DNA, 80 bp, synthetic construct
  source 1..80: mol_type = other DNA
ggcactgagaccgtacagtatggactgctggacaggcccattctgcaccgagaggttctcacaggcatctctgaaacaca

SEQ ID NO: 63962 - DNA, 80 bp, synthetic construct
  source 1..80: mol_type = other DNA
tcatcaatccaaattaccaatctgcacccccccgagtgaatttgggtttccgacccccttctaccaatgtgtaaatatcc

SEQ ID NO: 63963 - DNA, 80 bp, synthetic construct
  source 1..80: mol_type = other DNA
gggtttccgacccccttctaccaatgtgtaaatatccttttaattcttttctgtcttttctttctttcattccgtggttc

SEQ ID NO: 63964 - DNA, 80 bp, synthetic construct
  source 1..80: mol_type = other DNA
caacataagaacacttaccgtggttggcttgccaccatcacagcccttgttgaggtctattcaaatttgttccaggacat

SEQ ID NO: 63965 - DNA, 80 bp, synthetic construct
  source 1..80: mol_type = other DNA
cctcagggtgagtgggagagaggaaatttttgaaaccaaacaggacatgtacgcccatgtttgtcaagtggtcgccggtg

SEQ ID NO: 63966 - DNA, 80 bp, synthetic construct
  source 1..80: mol_type = other DNA
gcgtgaaaccgcggtatctgcggtgtccgcaatcacactcctttttgaatcattgaaacagtttgtggaaggtgttattg

SEQ ID NO: 63967 - DNA, 80 bp, synthetic construct
  source 1..80: mol_type = other DNA
atcttgttagaggcactttccaggcacagggccctacaaattgtgggtgggctgccatcgccgctggtgttatcctaatc

SEQ ID NO: 63968 - DNA, 80 bp, synthetic construct
  source 1..80: mol_type = other DNA
taagagagcacaagttaatgaagacattacaatttcaaagacctcattatggaaagaaatgcaatataacagagatatta

SEQ ID NO: 63969 - DNA, 80 bp, synthetic construct
  source 1..80: mol_type = other DNA
aaattaactactagagaaatagaacaagtagagttactcaaacgaatttatgatatgttgaccattaaaccagtcgacaa

SEQ ID NO: 63970 - DNA, 80 bp, synthetic construct
  source 1..80: mol_type = other DNA
aattgatatgtcacaagaatttaatcaaaaacattttaaaacgctaaatgaatggatggagggtgaaaatccatatgaac

SEQ ID NO: 63971 - DNA, 80 bp, synthetic construct
  source 1..80: mol_type = other DNA
caaaagaattgactgcacctttgtgagaggttgagctgccgtcgtctgtctacggaagcggcggagttcttaacagtaag

SEQ ID NO: 63972 - DNA, 80 bp, synthetic construct
  source 1..80: mol_type = other DNA
gtttatcttctgcaccacaaactacaccacaagtgttctacctgacaacccccgtgctggagccttttatcgtcgaatca

SEQ ID NO: 63973 - DNA, 80 bp, synthetic construct
  source 1..80: mol_type = other DNA
atgtttctgagaccgagcaatgatgattcgttcacagagcatgactggaagagttattggtatgctatgtggcggcgtgt

SEQ ID NO: 63974 - DNA, 80 bp, synthetic construct
  source 1..80: mol_type = other DNA
ccgaccaccctggtcccacaatcctgtattcctcacaattggacagcacagccactattttccaatctggtccagtcaat

SEQ ID NO: 63975 - DNA, 80 bp, synthetic construct
  source 1..80: mol_type = other DNA
ccccatctactgatttataattctaatctatatttcttttcttccctttgtggttgcacacgcgtgcgggtgcatgacgg

SEQ ID NO: 63976 - DNA, 80 bp, synthetic construct
  source 1..80: mol_type = other DNA
attcaagccaatagttctcaatgccacatttgagtggcaaatcttcaagcggtgctacctcagggtagcgccgcgtgaag

SEQ ID NO: 63977 - DNA, 80 bp, synthetic construct
  source 1..80: mol_type = other DNA
ttaaaatgtctggatgcccaggcgtcattggcatgtggacaaaagtgcttaagatctgtgggggtatcaccaccatcaca

SEQ ID NO: 63978 - DNA, 80 bp, synthetic construct
  source 1..80: mol_type = other DNA
cgaagccccccgacagtgtccaagagggcactttatttcgagaactgttcggggttgaccaggctgaacaatttcctttg

SEQ ID NO: 63979 - DNA, 80 bp, synthetic construct
  source 1..80: mol_type = other DNA
tacctgtaacgtcacactgggatttcctgaggggtcttcgacaccatcttggcttcacctccatcccaggtatgtggaga

SEQ ID NO: 63980 - DNA, 80 bp, synthetic construct
  source 1..80: mol_type = other DNA
gcttttcaaggttggcgcacatcacaaggcattgttgactttgtagcccaccacatggcagatgtcacgttcccaagcaa

SEQ ID NO: 63981 - DNA, 80 bp, synthetic construct
  source 1..80: mol_type = other DNA
tcccttgcagatttggccaagttgcaaggggaacttgttgacgcaacacgcactccagggcacgccctgcgtcagaagta

SEQ ID NO: 63982 - DNA, 80 bp, synthetic construct
  source 1..80: mol_type = other DNA
agggtggtgaccatattgggtatggagtccacattggtaatggtaacataataacagtcacacatgtggcgtcaacatct

SEQ ID NO: 63983 - DNA, 80 bp, synthetic construct
  source 1..80: mol_type = other DNA
gatgaaattaacgggagtgccttcaagatagtgcgcactgtcggagaaacaacttgggtgcagggccccttctcacaatt

SEQ ID NO: 63984 - DNA, 80 bp, synthetic construct
  source 1..80: mol_type = other DNA
gccacacatgcagatagggagtggatccccagtttatttcaccacacggttgcatccagttttcaccatatcagagggaa

SEQ ID NO: 63985 - DNA, 80 bp, synthetic construct
  source 1..80: mol_type = other DNA
ggattaccgtacttcaactctaatcgccagttagtggcactacacgctggcactgacacgcaaggtgagacaaaagtggc

SEQ ID NO: 63986 - DNA, 80 bp, synthetic construct
  source 1..80: mol_type = other DNA
acaacgtgttgtgaaggaggtcaccacccaagatgagttccaatggaagggcttacccgtagtgaaatctgggttagacg

SEQ ID NO: 63987 - DNA, 80 bp, synthetic construct
  source 1..80: mol_type = other DNA
tccaggtggagaccatccacacatacggtgatgactgcatgtacagcgtgtgcccagccaccgcgtcaatctttcatgct

SEQ ID NO: 63988 - DNA, 80 bp, synthetic construct
  source 1..80: mol_type = other DNA
gtacttgcaaatttgacatcatatggactcaaacccactgcagcagacaagagtgaggcaattaaaccaaccaacacacc

SEQ ID NO: 63989 - DNA, 80 bp, synthetic construct
  source 1..80: mol_type = other DNA
attagaaaacgcgctggcctacgcctcacaacatggtcctgtcatctttgacactatacgccaagttgccataaaaaccg

SEQ ID NO: 63990 - DNA, 80 bp, synthetic construct
  source 1..80: mol_type = other DNA
cccaaggagagggtttggtgctagttaacaccaattacgaccaggctctcgccacctacaatgcttggttcataggtggt

SEQ ID NO: 63991 - DNA, 80 bp, synthetic construct
  source 1..80: mol_type = other DNA
agcaaaaccaattaatggaaacatggatgaacaagcaggaggcattacagaaatctcagttggagctgacccgagatctt

SEQ ID NO: 63992 - DNA, 80 bp, synthetic construct
  source 1..80: mol_type = other DNA
tctatcaatggccctgccgctcgggtacagtcagcacttgatgcgggcttcgatgcagtgagtgcacggcgtatcgctgg

SEQ ID NO: 63993 - DNA, 80 bp, synthetic construct
  source 1..80: mol_type = other DNA
aagtcatcagttgctattgtctcaagcattggggccttctttgacttgtgcaaggactttgtcacgcaagtcgtagagct

SEQ ID NO: 63994 - DNA, 80 bp, synthetic construct
  source 1..80: mol_type = other DNA
agtcaaaacaacgttcaccgcacagggtccgacagatctgggatgggctgcagtattagcaggggcggcgatgatcctac

SEQ ID NO: 63995 - DNA, 80 bp, synthetic construct
  source 1..80: mol_type = other DNA
ccctggtagcaccagtgtctaaatttaaattttcttttctttgaaacggtcccacacgcgttcgggtgggttttggacaa

SEQ ID NO: 63996 - DNA, 80 bp, synthetic construct
  source 1..80: mol_type = other DNA
actgatattggaaatgaaaaaaatagtaatgtcactgtcaatccaggaccattttcacagacagggtatgctccagttga

SEQ ID NO: 63997 - DNA, 80 bp, synthetic construct
  source 1..80: mol_type = other DNA
taccagtggattattggatgatgatgtcaccaacacaagcaggtagagtagctgaaggaacaaatggtacagatagatgg

SEQ ID NO: 63998 - DNA, 80 bp, synthetic construct
  source 1..80: mol_type = other DNA
tttgcgtgtataatagtagaaccaaatgtatcattacagtccagagattatgttctagatggccaaatagtccagttaca

SEQ ID NO: 63999 - DNA, 80 bp, synthetic construct
  source 1..80: mol_type = other DNA
agtagataacacatctaatactatgtggaaattcatattatttatcaaacttacgaaaagcggaaactattcacaatact

SEQ ID NO: 64000 - DNA, 80 bp, synthetic construct
  source 1..80: mol_type = other DNA
acgtactcagactgatagttgtagacgatatatcaataatggactaccaccaattcagaatacacgtaatgttgtttcag

SEQ ID NO: 64001 - DNA, 80 bp, synthetic construct
  source 1..80: mol_type = other DNA
taaaactgtcagctcgtgagattccaacagttaaagcacaaatgaatgaggatattatcatatctaaaacatcactatgg

SEQ ID NO: 64002 - DNA, 80 bp, synthetic construct
  source 1..80: mol_type = other DNA
ttccaacagttaaagcacaaatgaatgaggatattatcatatctaaaacatcactatggaaggaaatgcaatataacaga

SEQ ID NO: 64003 - DNA, 80 bp, synthetic construct
  source 1..80: mol_type = other DNA
atggcttcgccattttatagacagttgctatccaattcatatgtgacgaacatttctgatgaagttagtgaaattgggac

SEQ ID NO: 64004 - DNA, 80 bp, synthetic construct
  source 1..80: mol_type = other DNA
aattatccgattcaacattagtccagccgacgatagatggaccatatcaaccaactacatttaatttgccaattgattat

SEQ ID NO: 64005 - DNA, 80 bp, synthetic construct
  source 1..80: mol_type = other DNA
tggatgttaattgcgcctactcaaataggtagagtagcggagggtacgaacacaactgacagatggttcgctagtgtact

SEQ ID NO: 64006 - DNA, 80 bp, synthetic construct
  source 1..80: mol_type = other DNA
tgttgaaccaaacgtatcaaatacacaaagagaatacgttttggatgggcagacggtgcagttacaagtctcaaacgact

SEQ ID NO: 64007 - DNA, 80 bp, synthetic construct
  source 1..80: mol_type = other DNA
caagcactctttggaaattcatattgttcattaagctagagaaaaatggaacttattctcaatattcaacgttatctaca

SEQ ID NO: 64008 - DNA, 80 bp, synthetic construct
  source 1..80: mol_type = other DNA
tcaaataagttatgtgcatggatgaagagagaagggagagtgtattggtatgcaggaactacgccaaacgcgtcagaaag

SEQ ID NO: 64009 - DNA, 80 bp, synthetic construct
  source 1..80: mol_type = other DNA
ctattatctaacaataaacaatgacaacagcaatgtgtcatgcgatgctgagttttatttaataccaaggtcgcagactg

SEQ ID NO: 64010 - DNA, 80 bp, synthetic construct
  source 1..80: mol_type = other DNA
acttgtgcgcgcaatatataaataacgggctgcctccaatacaaaataccaggaacgtagtgccagtaagtatagcgtcc

SEQ ID NO: 64011 - DNA, 80 bp, synthetic construct
  source 1..80: mol_type = other DNA
ataacgggctgcctccaatacaaaataccaggaacgtagtgccagtaagtatagcgtccagagaaattagacacacacga

SEQ ID NO: 64012 - DNA, 80 bp, synthetic construct
  source 1..80: mol_type = other DNA
taggaaagcaacgaacgttacagttaatccaggaccgttcgcgcagaccaggtacgctccagttaattggggacacggtg

SEQ ID NO: 64013 - DNA, 80 bp, synthetic construct
  source 1..80: mol_type = other DNA
aattagctggtcgtaaagaacaggttactactaaagacgaaattgaacaacagatggacaggatcatcaaagagatgagg

SEQ ID NO: 64014 - DNA, 80 bp, synthetic construct
  source 1..80: mol_type = other DNA
aattaatgactagaccagctgacgttatagatatgtcgaaggaattcaatcagaagaatatcagaacgctagatgaatgg

SEQ ID NO: 64015 - DNA, 80 bp, synthetic construct
  source 1..80: mol_type = other DNA
tataaagagcaaataactactaaagatgaaatagaaaaacaaatggacagagtcattaaagaaatgagacgtcaactgga

SEQ ID NO: 64016 - DNA, 80 bp, synthetic construct
  source 1..80: mol_type = other DNA
tagagttcaacccgagtgttgagcttcaagtgctccgatcggcccacctcagggtgggtggtcgtgagcaaatgtttgaa

SEQ ID NO: 64017 - DNA, 80 bp, synthetic construct
  source 1..80: mol_type = other DNA
cgcccccacattcacagaggagggcttgttagactctttcctttcaaaaccaccggttgacatcaatcccgacacaacgt

SEQ ID NO: 64018 - DNA, 80 bp, synthetic construct
  source 1..80: mol_type = other DNA
accattgatgacctcaatgatcatgtcaggggtgtggtggccagactgtggtgcaagcacttgcaccgtagtttgactgc

SEQ ID NO: 64019 - DNA, 80 bp, synthetic construct
  source 1..80: mol_type = other DNA
tacccaatggagttcaacctaaaggttgagctacttgtgctccgatctgcccacctcagggtgggtggtcgagagcagat

SEQ ID NO: 64020 - DNA, 80 bp, synthetic construct
  source 1..80: mol_type = other DNA
gaatttttccgtcacactggaccaccatgactcatatactggaaatgaggttgccatttgggatgaatttgacgtggacg

SEQ ID NO: 64021 - DNA, 80 bp, synthetic construct
  source 1..80: mol_type = other DNA
tggccgccaccccgtcattcacagaggagggtctcttggactccttcatgtcaaaaccacctgttgacatcaaccccgac

SEQ ID NO: 64022 - DNA, 80 bp, synthetic construct
  source 1..80: mol_type = other DNA
gggatgcggccaacagaggggtggccccacaaaacgcctacaagctggcactcaaagacgagctgagacccattgagaaa

SEQ ID NO: 64023 - DNA, 80 bp, synthetic construct
  source 1..80: mol_type = other DNA
acgtgttccaggtcgagaccgttcacacctatggtgacgattgcctatactcagtgtgcccagcaactgcctcaatcttc

SEQ ID NO: 64024 - DNA, 80 bp, synthetic construct
  source 1..80: mol_type = other DNA
cagttggagaacgcgctggcttacgcttcacagcatggccatgcagtcttcgaggaagtagctgagttggctcgccacac

SEQ ID NO: 64025 - DNA, 80 bp, synthetic construct
  source 1..80: mol_type = other DNA
ggccaaggccgaaggccttgttttgaccaacgtcaattacgaccaggctctcgccacctacgagtcgtggttcataggtg

SEQ ID NO: 64026 - DNA, 80 bp, synthetic construct
  source 1..80: mol_type = other DNA
ttctccttcttcttttcttttcttttccacatggttcctcacgcgtccgggtggataattgtgattaagcgatcacagcc

SEQ ID NO: 64027 - DNA, 80 bp, synthetic construct
  source 1..80: mol_type = other DNA
ttttgagactgttgaagaccttgacagtcacgtcaaaggggtggtggccagattgtggcgcgctcatgtgcgccgtagtt

SEQ ID NO: 64028 - DNA, 80 bp, synthetic construct
  source 1..80: mol_type = other DNA
attctacccaattgagttcaaccaaaaggttgaaaccatcattctcctttccgcccacctcagggtgagcggacgggagg

SEQ ID NO: 64029 - DNA, 80 bp, synthetic construct
  source 1..80: mol_type = other DNA
ctccttaagatctctggctgtcccaacgcaatgggatattggcagcgcttgttgaaggtgtgcgctggtgtcacaaccat

SEQ ID NO: 64030 - DNA, 80 bp, synthetic construct
  source 1..80: mol_type = other DNA
tgccgctgctgcaagggcattcgcttgggttcgtgacataattgtggaggccgaaagaaaggcacgcttgaagaaataca

SEQ ID NO: 64031 - DNA, 80 bp, synthetic construct
  source 1..80: mol_type = other DNA
tggcccgcacggctgctctgttggaacttgctgcatcaagagatgtcactgggactgaggagctaaagagattactggag

SEQ ID NO: 64032 - DNA, 80 bp, synthetic construct
  source 1..80: mol_type = other DNA
tgtttcactcagcttattgaggaaggcacagagctcatacaggaatttgggacctcaccaatggcgggccttacacggtc

SEQ ID NO: 64033 - DNA, 80 bp, synthetic construct
  source 1..80: mol_type = other DNA
ttatgtcagtgagctcgaaactgcagcgaatggcattaggagcaccattcttttagacacccccaggaaggttcccgtgg

SEQ ID NO: 64034 - DNA, 80 bp, synthetic construct
  source 1..80: mol_type = other DNA
caataatcctaaccggaccaccaggcatagggaaaacacaccttgcacaacacttggctgctggctttggtaagacctca

SEQ ID NO: 64035 - DNA, 80 bp, synthetic construct
  source 1..80: mol_type = other DNA
aacttttctgtcacccttgaccatcacgattcctacaccggtaacgacgttgccatatgggatgaattcgatgtagatgc

SEQ ID NO: 64036 - DNA, 80 bp, synthetic construct
  source 1..80: mol_type = other DNA
ccagggcaagtttgtagaaactatgattggtgtggtcaacacagcaccgtacccattaaactgtgatagagtggaaaata

SEQ ID NO: 64037 - DNA, 80 bp, synthetic construct
  source 1..80: mol_type = other DNA
atcccggtggtcagcccttcctttagtgcagaggggcttttggatgcatttgcgtctaaaccccctgttgacatcaaccc

SEQ ID NO: 64038 - DNA, 80 bp, synthetic construct
  source 1..80: mol_type = other DNA
agggcaaagtgtttacatccaattacatcatatgtacaagtaattaccccacgtctgtcctaccagaaaatccgagggct

SEQ ID NO: 64039 - DNA, 80 bp, synthetic construct
  source 1..80: mol_type = other DNA
ggagcattttaccgtcgcgttacaacagtcgacgtgtcatccccaatcatcgacgattggaagaagaaaaaccctggaaa

SEQ ID NO: 64040 - DNA, 80 bp, synthetic construct
  source 1..80: mol_type = other DNA
gaaacctcctcaagacctgtacaagaaagacttttctcacctgcgactctctgtgcgtccataccttggttacaaccctg

SEQ ID NO: 64041 - DNA, 80 bp, synthetic construct
  source 1..80: mol_type = other DNA
agggggacacgctggagggtgttcgggtgaaacctattttagttagtgtggatggtctgtcccgactcatggagaccaag

SEQ ID NO: 64042 - DNA, 80 bp, synthetic construct
  source 1..80: mol_type = other DNA
tttaaggagcaagggaatgaattgcgcaacctttggatcacatgcccccgtgatttggtgacacctgcagcatcaggctt

SEQ ID NO: 64043 - DNA, 80 bp, synthetic construct
  source 1..80: mol_type = other DNA
tgaaatcatacatggctgccaacagggccttagcccaagtctttgcggaaccatcttcaaatgaaattgcggaaacgtgc

SEQ ID NO: 64044 - DNA, 80 bp, synthetic construct
  source 1..80: mol_type = other DNA
acttccagagtgttcgtgtccgctaacaaccccccgtcgtctttcgtggggagacatgttaaaatcacagccatcaatcc

SEQ ID NO: 64045 - DNA, 80 bp, synthetic construct
  source 1..80: mol_type = other DNA
ttgggatgcatccctggccaactcaatgttatcaatgtttgaaacgaacacacacatacccgctgtcacccaaagggaga

SEQ ID NO: 64046 - DNA, 80 bp, synthetic construct
  source 1..80: mol_type = other DNA
tgataccacattccgtgaattgtttgggatagacccacatgagcagtttcctttatccattactgatttggctaaactac

SEQ ID NO: 64047 - DNA, 80 bp, synthetic construct
  source 1..80: mol_type = other DNA
aaggcgtaccaggggtggcatagctctgcaacaatcctagaatttctgtctaaacacatggaggatgtgacatttccctc

SEQ ID NO: 64048 - DNA, 80 bp, synthetic construct
  source 1..80: mol_type = other DNA
cgccagcgcgggtaccatttgtgggagaaccaccaaagactgtccactccaacattacacgcaacatgacatgggttgaa

SEQ ID NO: 64049 - DNA, 80 bp, synthetic construct
  source 1..80: mol_type = other DNA
actttacgcctgctcattgaaacaatcactgaaagtttggcccattttggcccgctactcctaatggttcacaatgtaac

SEQ ID NO: 64050 - DNA, 80 bp, synthetic construct
  source 1..80: mol_type = other DNA
ttggggagtttgttgaactgcgcgagcgctacgccctaggtatggactcagaagacgtgcagcgttatcgcgcctggtta

SEQ ID NO: 64051 - DNA, 80 bp, synthetic construct
  source 1..80: mol_type = other DNA
caactccgcgccatgcgtttaggggcaggggcgtaccagcacgcaactatcattgggcgtggtcgcgtggaagacaccat

SEQ ID NO: 64052 - DNA, 80 bp, synthetic construct
  source 1..80: mol_type = other DNA
tatccgcacacagcccatacgcgccccgcgagctcctcgctccactgggtatgatgaagaagctccaacaccaatggtca

SEQ ID NO: 64053 - DNA, 80 bp, synthetic construct
  source 1..80: mol_type = other DNA
cgctgcagatgccgttgagggctcggagttcacagttaggaagactgaaggtgaaaccacctgggtaaatacccctttag

SEQ ID NO: 64054 - DNA, 80 bp, synthetic construct
  source 1..80: mol_type = other DNA
gccacttgccacattaccaacttggtgagggggcaccagtctactactctacccgacttcaccctgtcactacaattgcg

SEQ ID NO: 64055 - DNA, 80 bp, synthetic construct
  source 1..80: mol_type = other DNA
ctgattgtggagggatgcctaccgggactaggtatcaccggtctccggcctggccagaacaacaaacaagtgagacacat

SEQ ID NO: 64056 - DNA, 80 bp, synthetic construct
  source 1..80: mol_type = other DNA
gcccccgccccctttggtgctggggattctcggtacaattattcacaggtggaaatgctagtcacaggcctcaaacccta

SEQ ID NO: 64057 - DNA, 80 bp, synthetic construct
  source 1..80: mol_type = other DNA
ttctgaacccaccccaggtatcccccctgccctcctacaacgggcagccatacacacccgcacttatttagaatcaattg

SEQ ID NO: 64058 - DNA, 80 bp, synthetic construct
  source 1..80: mol_type = other DNA
ggcacacacagatccccaaatctaacctacaatgaagcatgtgccctattggaccgtggcacatcctgtggcccattcat

SEQ ID NO: 64059 - DNA, 80 bp, synthetic construct
  source 1..80: mol_type = other DNA
cgcaggtcaaaagggggacttttgggatgaagaccggcagtgctatactggggtgttggctgaacacctcacaaaagttt

SEQ ID NO: 64060 - DNA, 80 bp, synthetic construct
  source 1..80: mol_type = other DNA
aaccaacaaggcaaacgccgcctattgtgggggtgtgacgcgggcgcaactttgatcgcaacagccgcttttaaaggtat

SEQ ID NO: 64061 - DNA, 80 bp, synthetic construct
  source 1..80: mol_type = other DNA
cagctgcctctttgtcaattcttgaacggctgtctgaggcaacaccaataaccacatcagctgttgaactgttatcatca

SEQ ID NO: 64062 - DNA, 80 bp, synthetic construct
  source 1..80: mol_type = other DNA
ccagcccggggccacttgaatgacataatctttgtcacaaaatcagggcttccttctggcatgccattcaccagcgttgt

SEQ ID NO: 64063 - DNA, 80 bp, synthetic construct
  source 1..80: mol_type = other DNA
aagcccgaagagctcatgaaagggaaagggcggatttgtttaaggagctgccccttgtcgaccccgaaatatcccaacag

SEQ ID NO: 64064 - DNA, 80 bp, synthetic construct
  source 1..80: mol_type = other DNA
acactgtcctggccaacctcaccgcctttggtctgcggcccaccgctgcagataaaacagataagattgcacccactcat

SEQ ID NO: 64065 - DNA, 80 bp, synthetic construct
  source 1..80: mol_type = other DNA
acaccagttttcctcaagcgcaccctaacctgcacaccacggggaatccgagggctgcttgatatcacatccatcaagcg

SEQ ID NO: 64066 - DNA, 80 bp, synthetic construct
  source 1..80: mol_type = other DNA
aacttgaaaatgctcttgcctacgcttcgcagcacggccacgcggtcttcgaggaggtcgccgaaattgcaaagaaaacc

SEQ ID NO: 64067 - DNA, 80 bp, synthetic construct
  source 1..80: mol_type = other DNA
acaggcactggccaagatagccccagtgaagaggctaccaaattagtgtttgaaatggagggcaacactcgccccgaggg

SEQ ID NO: 64068 - DNA, 80 bp, synthetic construct
  source 1..80: mol_type = other DNA
gcaaaaccccgagcgcacgaatgtgccactggcctccccacaggacaccattggtccaagtgctgcgctcttgctcccaa

SEQ ID NO: 64069 - DNA, 80 bp, synthetic construct
  source 1..80: mol_type = other DNA
ctcaaattgaaactccaaatgccactgcacagcgtgttgaattggcagctgcaaccggagcaatcaccagcaatgttccc

SEQ ID NO: 64070 - DNA, 80 bp, synthetic construct
  source 1..80: mol_type = other DNA
agttgcatcagggagtgttttgccagtgtcaccacgctcccctggaccacgcgccaagcagctaacacgttcttaggtgc

SEQ ID NO: 64071 - DNA, 80 bp, synthetic construct
  source 1..80: mol_type = other DNA
tagtttccaggtccgcgtcacactctctggctctggactctttgcgggacgtgctgtcgtggctgttttaccaccagggg

SEQ ID NO: 64072 - DNA, 80 bp, synthetic construct
  source 1..80: mol_type = other DNA
tcaatccagcaaatgtgcaaaacccaggggttttcccacacgcattcatagatgcgcgtactgtggatcccattctgatc

SEQ ID NO: 64073 - DNA, 80 bp, synthetic construct
  source 1..80: mol_type = other DNA
aatttgccagacattcgagccgtcgattaccatcgagtcgacggtgatgagcctacagccaccgttggcctttgggttgc

SEQ ID NO: 64074 - DNA, 80 bp, synthetic construct
  source 1..80: mol_type = other DNA
acaaccactcattaacccctttcagactggctcgatatccacgtgttggttgagttttgagacgcgccctggtccggact

SEQ ID NO: 64075 - DNA, 80 bp, synthetic construct
  source 1..80: mol_type = other DNA
ttgacttctgtctcctcaaggcacccgagcaggagatggacaatggtgtttcccctgcaaatttgctcccgcggcgcctc

SEQ ID NO: 64076 - DNA, 80 bp, synthetic construct
  source 1..80: mol_type = other DNA
ggacgatcccgtggcaaccgccttggtggacgtataacaggtttggtagtggtggctgtggcggaacaggtgaaccatca

SEQ ID NO: 64077 - DNA, 80 bp, synthetic construct
  source 1..80: mol_type = other DNA
ctttgcagccaactcaacaacacttggctggtcgacgctcccgattgaaccaatcgcgggggccgtgtcctggtataagt

SEQ ID NO: 64078 - DNA, 80 bp, synthetic construct
  source 1..80: mol_type = other DNA
ccaccgcctccaacagtgttcgggggctaattggggccgcaggcaagggcatcatttttccaaacattgtcaaccactgg

SEQ ID NO: 64079 - DNA, 80 bp, synthetic construct
  source 1..80: mol_type = other DNA
catcatggaagaagagattttcagaaccagccgaaattgtgcgccaacttgtcgtgcacttctgcgaaggtatgcgcaca

SEQ ID NO: 64080 - DNA, 80 bp, synthetic construct
  source 1..80: mol_type = other DNA
acagatgtagcactctctgccaagaactcaggtcaaaccaatctgcctgcccccaatgctgacatgagtggctacccggg

SEQ ID NO: 64081 - DNA, 80 bp, synthetic construct
  source 1..80: mol_type = other DNA
ggcttctggtcccgtggtgatgttccagaacaatggtgatgtcaatgaaagctcagccaaccatggcatacttactgcag

SEQ ID NO: 64082 - DNA, 80 bp, synthetic construct
  source 1..80: mol_type = other DNA
ccaaccatgacttcactacattaacacagacttttgatgctgctggcacgtggatttggatgccctggacctcaacccaa

SEQ ID NO: 64083 - DNA, 80 bp, synthetic construct
  source 1..80: mol_type = other DNA
cctgatggcacgcagaacaacaacgtgtacatcaacccaatttggattaatggcaactcttcccaccccatacatggcaa

SEQ ID NO: 64084 - DNA, 80 bp, synthetic construct
  source 1..80: mol_type = other DNA
gtgcacaaacatggtcggcaccaacttccagtttggtggcactggtaccaacaacatcatgttgtggcaggaacagcatt

SEQ ID NO: 64085 - DNA, 80 bp, synthetic construct
  source 1..80: mol_type = other DNA
tcacttcgtggccaggggcagcagaggtatactgttcccagcttgaaagcactgcagagatgtttcagaacaatatagtc

SEQ ID NO: 64086 - DNA, 80 bp, synthetic construct
  source 1..80: mol_type = other DNA
aacattcctgctaaccaaatggcagtctttaatgtggaaaccgctgggaacacgttccaaattggcatcctaccaaatgg

SEQ ID NO: 64087 - DNA, 80 bp, synthetic construct
  source 1..80: mol_type = other DNA
tgtgttacaaatgctgccgttggtacacaccaacttcttgactttgaaactgcatttagatttgttggtcttttccccca

SEQ ID NO: 64088 - DNA, 80 bp, synthetic construct
  source 1..80: mol_type = other DNA
aagtacaacacttcaagggcccaatgggaacgctggtcgggccgtcaggtttcttgaataatgtcttggttcacaggtgc

SEQ ID NO: 64089 - DNA, 80 bp, synthetic construct
  source 1..80: mol_type = other DNA
gctgccggctctgtcgtagacatggctggcaccatatcaactattgtagctcaacacagacaattagatctgatggcgca

SEQ ID NO: 64090 - DNA, 80 bp, synthetic construct
  source 1..80: mol_type = other DNA
cagttcaacacaaatgccaattacatcaacttatcgctgttggcaaagttacggcctacagttctaacaatgatattcca

SEQ ID NO: 64091 - DNA, 80 bp, synthetic construct
  source 1..80: mol_type = other DNA
agccaacaaaattcaacaggagtgggtgacaaagcaggaggcactggctcgacggggtcaagacatctctcaggatctgg

SEQ ID NO: 64092 - DNA, 80 bp, synthetic construct
  source 1..80: mol_type = other DNA
ccatcaatggcactgccaaacgggttgagtccctcatcaattctggattcaccccagttgacgcccgccgcctcgctggg

SEQ ID NO: 64093 - DNA, 80 bp, synthetic construct
  source 1..80: mol_type = other DNA
ggcactgaaaccgtgcagtatgggctgctggacagacccattttgcaccgagaagtcctcacgggcatctctgaaactca

SEQ ID NO: 64094 - DNA, 80 bp, synthetic construct
  source 1..80: mol_type = other DNA
ccacctccagtcaatgcaaggggctctcagtgcttttaaacaggggtccaagtacggtgcccctccggcacctgctggct

SEQ ID NO: 64095 - DNA, 80 bp, synthetic construct
  source 1..80: mol_type = other DNA
tcatcaatccaaattatcaacctgcacccccccgtgtcaatttgggtttccgacccccatccaccaatgtgtaaatgttc

SEQ ID NO: 64096 - DNA, 80 bp, synthetic construct
  source 1..80: mol_type = other DNA
ttttaacactttatctttcttttctttcttccattccgtggttcctcacgcgttcgggtggacaattgcgattaagcgat

SEQ ID NO: 64097 - DNA, 80 bp, synthetic construct
  source 1..80: mol_type = other DNA
cagcacaagaacacgtatcgcggctggttggctactatcacagctcttgtggaagtttactcaaatttgttccaggatat

SEQ ID NO: 64098 - DNA, 80 bp, synthetic construct
  source 1..80: mol_type = other DNA
aaattttcgaaacgagacacgacatgcttgcgcatgtccaacgggtgatcgctggggtgcggcgcaacatactgtgtcgt

SEQ ID NO: 64099 - DNA, 80 bp, synthetic construct
  source 1..80: mol_type = other DNA
gcgtgagaccgcagtatctgcagtgtctgcaattacgctcctgtttgagtctttgaaacattttgttgaaggtgtcattg

SEQ ID NO: 64100 - DNA, 80 bp, synthetic construct
  source 1..80: mol_type = other DNA
accttgtcaagggcaccttccaagctcaaggccccacaaattgtgggtgggcagcaattgctgctggtgtcatcttaata

SEQ ID NO: 64101 - DNA, 80 bp, synthetic construct
  source 1..80: mol_type = other DNA
gaaatagagcaaattggatcagaaaaaactcaaaatgtaaccgtaaatccaggtccatttgctcaaacaagatatgctcc

SEQ ID NO: 64102 - DNA, 80 bp, synthetic construct
  source 1..80: mol_type = other DNA
aactatactgtgattataatgttgtgctaattaaattcacttctggtgaggaattggacatatctgaattagctgatcta

SEQ ID NO: 64103 - DNA, 80 bp, synthetic construct
  source 1..80: mol_type = other DNA
atattgaatgagtggttatgcaatccaatggatataacattatattattatcaacaaactggagaggcaaacaaatggat

SEQ ID NO: 64104 - DNA, 80 bp, synthetic construct
  source 1..80: mol_type = other DNA
cccatggagcaggcggcttatgccgtcagccaagcagagctgatcgtcattgttggaacgagttttcaagttcatccgtt

SEQ ID NO: 64105 - DNA, 80 bp, synthetic construct
  source 1..80: mol_type = other DNA
caggcggcttatgccgtcagccaagcagagctgatcgtcattgttggaacgagttttcaagttcatccgttttgtgatct

SEQ ID NO: 64106 - DNA, 80 bp, synthetic construct
  source 1..80: mol_type = other DNA
tcatttcttttcttttccgactggcactcacgcgttcgggagtataatgccaattaagcgattggctctcgctacctacc

SEQ ID NO: 64107 - DNA, 80 bp, synthetic construct
  source 1..80: mol_type = other DNA
ccacatttacagaggagggtttgctggactctttcctttcaaagccacctgttgacatcaatcctgatacaacattccgt

SEQ ID NO: 64108 - DNA, 80 bp, synthetic construct
  source 1..80: mol_type = other DNA
gagctattcggcattgacccacacgaacaattcccgttgtccatccacgatttggcaagattacagggtgagcttgtgga

SEQ ID NO: 64109 - DNA, 80 bp, synthetic construct
  source 1..80: mol_type = other DNA
aatcggctttattttcttttctttccaagtggttcctcacgcgttcgggtggataattgtgattaagcgatcacagccac

SEQ ID NO: 64110 - DNA, 80 bp, synthetic construct
  source 1..80: mol_type = other DNA
caacgatctcaatgatcatgttaggggtgtggtggccagactgtggtgcaaggatttgcatcgccgtttggctgccaccc

SEQ ID NO: 64111 - DNA, 80 bp, synthetic construct
  source 1..80: mol_type = other DNA
atggcttccaagccattcaagccaatagttctcaatgccacctttgagtggcaagtcttcaagcggtgctacctcagggt

SEQ ID NO: 64112 - DNA, 80 bp, synthetic construct
  source 1..80: mol_type = other DNA
acgtggtgctgctctgatcgagctagccgccagccgtgaggtgacaggtgttgacgagcttaaaggcctcttagattgtt

SEQ ID NO: 64113 - DNA, 80 bp, synthetic construct
  source 1..80: mol_type = other DNA
tcaccatattgattgaggagggcactgagctcatccacaagtttggcaccagcccacttgcaggtctagtacgcacgtac

SEQ ID NO: 64114 - DNA, 80 bp, synthetic construct
  source 1..80: mol_type = other DNA
actttttaatgcttagggaaaggtctgcacttggaatggatgatgaggacgtggccagatatcgagcatggcttgaaatc

SEQ ID NO: 64115 - DNA, 80 bp, synthetic construct
  source 1..80: mol_type = other DNA
cgtgccatgcgaatggctggaggtgcgtacacacatgccactatcattggtcgtggtggcgtgcgggatgagatcatacg

SEQ ID NO: 64116 - DNA, 80 bp, synthetic construct
  source 1..80: mol_type = other DNA
tccttctccgctcttttcttttcttttctttccgactggcactcacgcgttcgggagtataatgccaattaagcgattgg

SEQ ID NO: 64117 - DNA, 80 bp, synthetic construct
  source 1..80: mol_type = other DNA
tcaacgagttgttaaagaagttaccacccaagatgaattccaatggaagggtttgcccgtggtgaagtccgggttggatg

SEQ ID NO: 64118 - DNA, 80 bp, synthetic construct
  source 1..80: mol_type = other DNA
ttggaggtatgcctactgggacgcggtaccacaggtcccccgcgtggccagaggagcagcctggtgagacacatgcccca

SEQ ID NO: 64119 - DNA, 80 bp, synthetic construct
  source 1..80: mol_type = other DNA
caccatattgatcgaggagggcactgaacttatccacaagttcggcactagcccactggcaggtttggtgcgcacttatg

SEQ ID NO: 64120 - DNA, 80 bp, synthetic construct
  source 1..80: mol_type = other DNA
atcctcactggggcacctggcattggaaaaactcgtttagcacaatatgtcggccagcgctttggtaaaacgtccaattt

SEQ ID NO: 64121 - DNA, 80 bp, synthetic construct
  source 1..80: mol_type = other DNA
ccactccagatttgtaccaagatgatttctctcacctcaaattgatgcttagaccatatttgggttacaatccagacgga

SEQ ID NO: 64122 - DNA, 80 bp, synthetic construct
  source 1..80: mol_type = other DNA
ggaacaagctgggcccctgcagaacttatggttacaagtccccaagccacttgtagaacagtccacaaacatggtcaaag

SEQ ID NO: 64123 - DNA, 80 bp, synthetic construct
  source 1..80: mol_type = other DNA
tgcgtccattgccaattcattattgtcaatgttcaccaccactacacgactgtctgccgcagctcaaagggagtatatgt

SEQ ID NO: 64124 - DNA, 80 bp, synthetic construct
  source 1..80: mol_type = other DNA
cagaatgcaccatcttccgcacgccagatgcggacgtggttttctacacttttggctcttatgtgtgctttgctacccca

SEQ ID NO: 64125 - DNA, 80 bp, synthetic construct
  source 1..80: mol_type = other DNA
gcacgagtgccgtacgttggtacaccacccaccaccatccattccaacacaccacggtgcatgacttggggcgagaccat

SEQ ID NO: 64126 - DNA, 80 bp, synthetic construct
  source 1..80: mol_type = other DNA
ttatgactcggggctcaaggactgaggaagccaagggtaagaccaagcatggacgtggtatgcgtcatggccacagggcc

SEQ ID NO: 64127 - DNA, 80 bp, synthetic construct
  source 1..80: mol_type = other DNA
acggcaccacgcagagctccaacacgaccccagcaacattatgaggaagaggccccgacagcgattgtggagttcaccca

SEQ ID NO: 64128 - DNA, 80 bp, synthetic construct
  source 1..80: mol_type = other DNA
cctcgcagacctggccaggttgcaaggggaacttgttgacgcaactcgcactccaggacacgtgctgcgtcaaaagtata

SEQ ID NO: 64129 - DNA, 80 bp, synthetic construct
  source 1..80: mol_type = other DNA
atgaggtcaacggcagtactttcaaaataacacgtactgttggagagacaacgtgggtacaaggaccattctcacaacta

SEQ ID NO: 64130 - DNA, 80 bp, synthetic construct
  source 1..80: mol_type = other DNA
caccctttggtgcaggagacaagaggtacacattttcacagacagaaatgctagtaaacgggttgaagccttacacggaa

SEQ ID NO: 64131 - DNA, 80 bp, synthetic construct
  source 1..80: mol_type = other DNA
cccactgctggggtgccaccacagcttttgtctcgtgcggtcacacacgtacgatcatacatagaaacaatcattggtac

SEQ ID NO: 64132 - DNA, 80 bp, synthetic construct
  source 1..80: mol_type = other DNA
caatgaccaccatacaggacttgattaacaagattaccaaggttgttccagtgcaggccacgctcactgagatgcacgcg

SEQ ID NO: 64133 - DNA, 80 bp, synthetic construct
  source 1..80: mol_type = other DNA
gccttaagggtgactactgggatgaagagcaacagcagtatactggtgtgctggcaaaccaccttgaacaggcatgggac

SEQ ID NO: 64134 - DNA, 80 bp, synthetic construct
  source 1..80: mol_type = other DNA
atcactgtcgatattggaaagatttgctgaaccccacccaatcgtgtcttgtgccattgaagctctctcctcccctgcag

SEQ ID NO: 64135 - DNA, 80 bp, synthetic construct
  source 1..80: mol_type = other DNA
aaggctacgttaatgacatcaagtttgtgacacgcggcggtctaccatctgggatgccattcacatctgttgtcaattct

SEQ ID NO: 64136 - DNA, 80 bp, synthetic construct
  source 1..80: mol_type = other DNA
atcaaccatatgatatacgtggccgcagccattttacaggcatatgaaagtcacaatgttccgtacactggaaatgtctt

SEQ ID NO: 64137 - DNA, 80 bp, synthetic construct
  source 1..80: mol_type = other DNA
tgcttgcgaatctgacatcatatggacttaaacctactgcagcagacaagagtgaagcaatcaaaccaaccaacacacca

SEQ ID NO: 64138 - DNA, 80 bp, synthetic construct
  source 1..80: mol_type = other DNA
cgtaggcaattcgagcgtgagcgagccgacctgtttcacgagctcccattggtagatgaggatgctgtttcacaacccaa

SEQ ID NO: 64139 - DNA, 80 bp, synthetic construct
  source 1..80: mol_type = other DNA
aacctatttttacaccatgtggcgccaagttgtgaagaaaggcaaagcgtatttctgtcctctcgttaagacgagtgcat

SEQ ID NO: 64140 - DNA, 80 bp, synthetic construct
  source 1..80: mol_type = other DNA
accaccgggtcaacagatggaaaatggggtctcaccagaaggcctattgcccagacgcctaggttactcgcgtggtaatc

SEQ ID NO: 64141 - DNA, 80 bp, synthetic construct
  source 1..80: mol_type = other DNA
aaaatgaacttatggagacatggatgaacaaacaagaggcactgcagaagtctcaaatggaattaacccgagacctctcc

SEQ ID NO: 64142 - DNA, 80 bp, synthetic construct
  source 1..80: mol_type = other DNA
ggtgttaatccgcagtacctacaacttgcctggttgcaaaaactcaaacccaccactttaaccatcattctgcaacaaca

SEQ ID NO: 64143 - DNA, 80 bp, synthetic construct
  source 1..80: mol_type = other DNA
atttggactctctgagtcattcattggccacatttaaaaatggaactccattcggaaaacctgcacccccaacagcaaaa

SEQ ID NO: 64144 - DNA, 80 bp, synthetic construct
  source 1..80: mol_type = other DNA
tctggaaggccccaggccacaactgcaaaaatcaccattggtcacaaccctggtagcaccagtgtttaaatttaaatttt

SEQ ID NO: 64145 - DNA, 80 bp, synthetic construct
  source 1..80: mol_type = other DNA
gtgattggttagatggtttccaagccattcaagccaatagttctcaatgtcactttcgagtggcaggtcttcaagcggtg

SEQ ID NO: 64146 - DNA, 80 bp, synthetic construct
  source 1..80: mol_type = other DNA
aaaaatgtctgggtgcccaggcgtcattggtatgtggacaaaagtacttaaaatctgggggggcatcaccactatcacag

SEQ ID NO: 64147 - DNA, 80 bp, synthetic construct
  source 1..80: mol_type = other DNA
aaagtacttaaaatctgggggggcatcaccactatcacagcagcggcgcgtggagtgcgttggctgaaggatctctatga

SEQ ID NO: 64148 - DNA, 80 bp, synthetic construct
  source 1..80: mol_type = other DNA
accactatcacagcagcggcgcgtggagtgcgttggctgaaggatctctatgaggaggctgaaggacgtaggctagcaaa

SEQ ID NO: 64149 - DNA, 80 bp, synthetic construct
  source 1..80: mol_type = other DNA
cagcggcgcgtggagtgcgttggctgaaggatctctatgaggaggctgaaggacgtaggctagcaaaaatgtacatggca

SEQ ID NO: 64150 - DNA, 80 bp, synthetic construct
  source 1..80: mol_type = other DNA
cgcggtgccgccctcattgaacttgctgctagtcgtgaggttacaggcattgacgagctcaagggcctccttgattgttt

SEQ ID NO: 64151 - DNA, 80 bp, synthetic construct
  source 1..80: mol_type = other DNA
taccatactaatcgaggagggcactgaactcatccacaagtttggcactagcccactggcaggtctggtacgcacatatg

SEQ ID NO: 64152 - DNA, 80 bp, synthetic construct
  source 1..80: mol_type = other DNA
tgtccgaactagaaacccaggcaaacaacattagatccaccattaagcttgatacccccagacgggtgcccgttgtcatt

SEQ ID NO: 64153 - DNA, 80 bp, synthetic construct
  source 1..80: mol_type = other DNA
atccttaccggggcacctggcatcgggaaaactcgcttagcacaatatgttggccagcgatttgggaaaacctccaactt

SEQ ID NO: 64154 - DNA, 80 bp, synthetic construct
  source 1..80: mol_type = other DNA
ctcagtagctgtggaccaccatgatggctacacagggaacactgtttgcatatgggatgaatttgatgttgattccaagg

SEQ ID NO: 64155 - DNA, 80 bp, synthetic construct
  source 1..80: mol_type = other DNA
cctggctcaagcatgccacaaggaccctcccagacaaatacacgtttgtcgaggagggtctccttgacatgtttggtaca

SEQ ID NO: 64156 - DNA, 80 bp, synthetic construct
  source 1..80: mol_type = other DNA
gtgcgtttgtggagacaatgattgggatcgcaaatacggcacccttcccgttaaattgtgacagggttgaaaacaaaggg

SEQ ID NO: 64157 - DNA, 80 bp, synthetic construct
  source 1..80: mol_type = other DNA
cgtgtgttcacgtccgattatgtcatttgtacatccaattaccctacatccgtcatcccagacaacccaagagctgcggc

SEQ ID NO: 64158 - DNA, 80 bp, synthetic construct
  source 1..80: mol_type = other DNA
cttttaccgtagggtcctaactgttgatgtcagcgcgccagatttggaggaatggaaaaagaggaaccctggcaaacgcc

SEQ ID NO: 64159 - DNA, 80 bp, synthetic construct
  source 1..80: mol_type = other DNA
ctactccagacttataccaagatgatttttcccatcttaaattgatgctaagaccatatttgggttacaatccagacgga

SEQ ID NO: 64160 - DNA, 80 bp, synthetic construct
  source 1..80: mol_type = other DNA
gacacacttgaaggtcccagagttgctccaacccaaataagtatagcgggactgataaccctgatggaaagaaggtttaa

SEQ ID NO: 64161 - DNA, 80 bp, synthetic construct
  source 1..80: mol_type = other DNA
ggaacaggctgggcccctgcagaacttatggttgcaagtcccaaagtcacttgtggagcagtccacaaatatggttaaaa

SEQ ID NO: 64162 - DNA, 80 bp, synthetic construct
  source 1..80: mol_type = other DNA
cattcatgtacgccaaccgcgcagtgtgtgacgtgatacctaatcccgccacccgtgacatcaccgaaactgcgttgtca

SEQ ID NO: 64163 - DNA, 80 bp, synthetic construct
  source 1..80: mol_type = other DNA
aaaatctttgtgtgtggcaccgccccaccacctgagttcgttggcaagcatatagtcatcactggcatagaggtgggtga

SEQ ID NO: 64164 - DNA, 80 bp, synthetic construct
  source 1..80: mol_type = other DNA
tgcatccattgccaactcactactgtccatgttcaccaccaccacacgactgtctgccgcggctcagagggagtacatgt

SEQ ID NO: 64165 - DNA, 80 bp, synthetic construct
  source 1..80: mol_type = other DNA
acagagtgtggagtccactcatccacatccaagatcgaagtataaacactcaaaacctcccatacatcaatagagtgatc

SEQ ID NO: 64166 - DNA, 80 bp, synthetic construct
  source 1..80: mol_type = other DNA
aaggctcctgacagtgttcaagaaggcacactgttccgggagctgttcggggttgaccaaaccgagcaattcccgctgtc

SEQ ID NO: 64167 - DNA, 80 bp, synthetic construct
  source 1..80: mol_type = other DNA
ccagtgacatcccactgggactttttgaggggtctgcggcaccaccttggtttcacatccattccaggcatgtggaaggc

SEQ ID NO: 64168 - DNA, 80 bp, synthetic construct
  source 1..80: mol_type = other DNA
atttcaaggttggcgcacatcacagggcatagttgactttgtggcacatcatatggcagatgtcacattcccaagtaacc

SEQ ID NO: 64169 - DNA, 80 bp, synthetic construct
  source 1..80: mol_type = other DNA
cagaatgcaccattttccgcacaccggatgcagatgtggtcttttacacttttggctcatatgtatgttttgccacccca

SEQ ID NO: 64170 - DNA, 80 bp, synthetic construct
  source 1..80: mol_type = other DNA
gcaagggtgccgtatgttggcacaccacccaccaccatccactccaacacaccccgatgcatgacttggggtgaaaccat

SEQ ID NO: 64171 - DNA, 80 bp, synthetic construct
  source 1..80: mol_type = other DNA
agcactgttgtgtgaggtggttgccgagtttgtccttcatttcggtcccgtgattctgtctgcagccaacattgcctacc

SEQ ID NO: 64172 - DNA, 80 bp, synthetic construct
  source 1..80: mol_type = other DNA
ttatgaccagggggtcaaggactgaggaggccaagggcaaaaccaaacatggacgtggcatgcgccatggccacagggcc

SEQ ID NO: 64173 - DNA, 80 bp, synthetic construct
  source 1..80: mol_type = other DNA
ggagtgagcctctcagacgatgagtatgatgagtggcgtgacttgatgcgtgattggaggcgtgacatgagtgtcaatga

SEQ ID NO: 64174 - DNA, 80 bp, synthetic construct
  source 1..80: mol_type = other DNA
cttcctgatgctcagagagaggtctgcgcttgggatggatgatgaggatgtggccaggtacagggcatggcttgagatcc

SEQ ID NO: 64175 - DNA, 80 bp, synthetic construct
  source 1..80: mol_type = other DNA
gcgccatgcgaatggcagggggtgcgtatacgcatgccactattattgggcgtggtggtgtgcgagatgagatcatacgc

SEQ ID NO: 64176 - DNA, 80 bp, synthetic construct
  source 1..80: mol_type = other DNA
acggcgccacgcagagccccaactcggccccaacaacactatgaggaagaggccccaacagcaattgtggagttcacgca

SEQ ID NO: 64177 - DNA, 80 bp, synthetic construct
  source 1..80: mol_type = other DNA
cctcgcagacttggccaagttgcaaggagaacttgttgacgcgacccgtaccccaggacacgcattgcgtcaaaagtaca

SEQ ID NO: 64178 - DNA, 80 bp, synthetic construct
  source 1..80: mol_type = other DNA
gggcggtgaccacattggatacggggttcacattggcaatggcaatgtggtaaccgtcacccacgtggcatcaacgtctg

SEQ ID NO: 64179 - DNA, 80 bp, synthetic construct
  source 1..80: mol_type = other DNA
acgagatcaatggtagtgcctttaaaataacacgcactgttggagagacaacgtgggtgcaagggccattctcacaatta

SEQ ID NO: 64180 - DNA, 80 bp, synthetic construct
  source 1..80: mol_type = other DNA
ccacacatgcaaataggtagtggctccccggtttacttcaccacacggttgcacccagttttcacaatatcggagggaac

SEQ ID NO: 64181 - DNA, 80 bp, synthetic construct
  source 1..80: mol_type = other DNA
atttgaaactccaaacatcaccgtgaatgggttccatgtcagaataatgaatggttacccaactaagaaaggtgactgtg

SEQ ID NO: 64182 - DNA, 80 bp, synthetic construct
  source 1..80: mol_type = other DNA
ggctgccctacttcaattccaaccgccagttggtggcgttgcatgctggcacggacacacaaggtgaaacaaaagtggct

SEQ ID NO: 64183 - DNA, 80 bp, synthetic construct
  source 1..80: mol_type = other DNA
caacgtgttgtcaaggaggtcaccacccaagatgaattccaatggaagggtttgccagtggtcaagtctggacttgacgt

SEQ ID NO: 64184 - DNA, 80 bp, synthetic construct
  source 1..80: mol_type = other DNA
tgggggcatgcccactgggactcggtaccacaggtcccctgcgtggcccgaagaacagcctggtgagacacacgccccag

SEQ ID NO: 64185 - DNA, 80 bp, synthetic construct
  source 1..80: mol_type = other DNA
caccttttggtgcgggagacaagaggtacacattttcacaaacggaaatgctggtgaatggactaaaaccctatacggaa

SEQ ID NO: 64186 - DNA, 80 bp, synthetic construct
  source 1..80: mol_type = other DNA
cccactgctgggataccaccacagctcctgtctcgtgcggtcacacatgtacggtcgtacatagaaacaatcatcggcac

SEQ ID NO: 64187 - DNA, 80 bp, synthetic construct
  source 1..80: mol_type = other DNA
acaccggtctcctgtactgacataccatcaagcatgtgagctgcttgaacggaccacttcatgtggtccgttcgtgcagg

SEQ ID NO: 64188 - DNA, 80 bp, synthetic construct
  source 1..80: mol_type = other DNA
caatggccactatacaggactttattaataagatcaccaaggttgtgccagtacaggctacgctcactgagatgcacgcg

SEQ ID NO: 64189 - DNA, 80 bp, synthetic construct
  source 1..80: mol_type = other DNA
gtctcaagggcgactactgggatgaagagcatcagcagtacaccggtgtgctggctaaccaccttgaacaggcgtgggac

SEQ ID NO: 64190 - DNA, 80 bp, synthetic construct
  source 1..80: mol_type = other DNA
aaggctaacaaagggatagcaccaaggaacgcctataaattggcacttaaagatgagctcaggccaattgagaagaacaa

SEQ ID NO: 64191 - DNA, 80 bp, synthetic construct
  source 1..80: mol_type = other DNA
agctggcaaacgtaggttgttgtggggctgtgatgctgccaccacactcatagccaccgcagccttcaaggccgtggcta

SEQ ID NO: 64192 - DNA, 80 bp, synthetic construct
  source 1..80: mol_type = other DNA
ccaggctgcaggtagtgacgccaatgacaccggttgctgttggcatcaatatggactctgttcagatgcaagtaatgaat

SEQ ID NO: 64193 - DNA, 80 bp, synthetic construct
  source 1..80: mol_type = other DNA
gactccttaaagggaggtgtcctttactgcctggactactccaaatgggattccacacaaaatcctgcagtaacagcagc

SEQ ID NO: 64194 - DNA, 80 bp, synthetic construct
  source 1..80: mol_type = other DNA
gtcactagctatactggagagatttgctgaaccccacccaatcgtgtcttgtgccattgaggcgctttcttcccctgcag

SEQ ID NO: 64195 - DNA, 80 bp, synthetic construct
  source 1..80: mol_type = other DNA
agggctacgtgaatgatatcaagttcgtgacacgcggcggtctaccttccgggatgccattcacatctgttgtcaactcc

SEQ ID NO: 64196 - DNA, 80 bp, synthetic construct
  source 1..80: mol_type = other DNA
atcaaccatatgatatatgtagcggcagccattctgcaggcgtacgaaagccacagtgtcccgtacactggaaatgtttt

SEQ ID NO: 64197 - DNA, 80 bp, synthetic construct
  source 1..80: mol_type = other DNA
ccaagtggaaacagtccacacgtatggcgatgattgcatgtacagtgtgtgccctgccactgcatcaattttccacactg

SEQ ID NO: 64198 - DNA, 80 bp, synthetic construct
  source 1..80: mol_type = other DNA
tgcttgccaacctaacatcgtatggactcaagcccactgcagcagacaagagtgaagcaatcaagccaaccaacacgcca

SEQ ID NO: 64199 - DNA, 80 bp, synthetic construct
  source 1..80: mol_type = other DNA
cgcaggcaattcgagcgtgaacgagctgacctgtttcatgaactcccattagtggatgaggatgctggttcgcaacccaa

SEQ ID NO: 64200 - DNA, 80 bp, synthetic construct
  source 1..80: mol_type = other DNA
gtgtttttgaagaggacattcacacaaaccccgcatggagtccgagcactgctagacatcacttctataactagacagtt

SEQ ID NO: 64201 - DNA, 80 bp, synthetic construct
  source 1..80: mol_type = other DNA
ttactggctgaaggctaataggacatcagacccttctagcccacctgctttcgatcgacaagcacgcagtgcgcaactgg

SEQ ID NO: 64202 - DNA, 80 bp, synthetic construct
  source 1..80: mol_type = other DNA
agaacgcgctagcctatgcttcacaacatggacctgttgtgtttgacaccgtgcgccaaattgccatgaagactgcccaa

SEQ ID NO: 64203 - DNA, 80 bp, synthetic construct
  source 1..80: mol_type = other DNA
ggggagggattggtgcttgtcaataccaattatgaccaggctctcgccacctacaatgcttggttcataggtggtacagt

SEQ ID NO: 64204 - DNA, 80 bp, synthetic construct
  source 1..80: mol_type = other DNA
acctgacccagtaggtcacactgaaggaacccacaaaatagtgtttgagatggagggcaatggctccaattcagagccaa

SEQ ID NO: 64205 - DNA, 80 bp, synthetic construct
  source 1..80: mol_type = other DNA
agcagagcaacaacccgatggtcgttgacccgcctggcacaacaggtccgaccacatcccacgttgttgttgctaatccg

SEQ ID NO: 64206 - DNA, 80 bp, synthetic construct
  source 1..80: mol_type = other DNA
gagcaacccaatggggccgcacagcgcctggagctggctgttgccactggtgcaatccaatccaatgtccctgaggcaat

SEQ ID NO: 64207 - DNA, 80 bp, synthetic construct
  source 1..80: mol_type = other DNA
acgcaactgctttgcagtctttcgtacttttgcttggaacgacaggatgcccacgggaacttttcttggatctatatcgc

SEQ ID NO: 64208 - DNA, 80 bp, synthetic construct
  source 1..80: mol_type = other DNA
ttcatcccaacattaacccgtacactacacacctctctgggatgtgggccgggtggggcggtagttttgaggtccggcta

SEQ ID NO: 64209 - DNA, 80 bp, synthetic construct
  source 1..80: mol_type = other DNA
tcgatctctggttctggcgtgttcgctgggcgcatcattgcttctgtcataccaccaggggttgatccctcgtccatcag

SEQ ID NO: 64210 - DNA, 80 bp, synthetic construct
  source 1..80: mol_type = other DNA
aacttacttctacaccatgtggcgccaagttgtgaagaagggtaaagcgtacttctgccctctcgtcaagacgagtgcat

SEQ ID NO: 64211 - DNA, 80 bp, synthetic construct
  source 1..80: mol_type = other DNA
ggacccaggcgtgttgcctcacgctttcgttgatgctcgcatcactgagccagtttctttcatgatccctgatgttagag

SEQ ID NO: 64212 - DNA, 80 bp, synthetic construct
  source 1..80: mol_type = other DNA
ctgtggactaccataggatggacggtgctgaacccacttgctcgttaggattttgggtttaccaaccattgctcaacccg

SEQ ID NO: 64213 - DNA, 80 bp, synthetic construct
  source 1..80: mol_type = other DNA
ttttccaccaccgccgtttcaacatgttgggtatcagtggagactaagccaggtggtgattttgatttctgcctattaag

SEQ ID NO: 64214 - DNA, 80 bp, synthetic construct
  source 1..80: mol_type = other DNA
gccaccaggtcaacaaatggagaacggggtttcaccagaaggcctgttgcccaggcgcctaggttactcacgcggtaacc

SEQ ID NO: 64215 - DNA, 80 bp, synthetic construct
  source 1..80: mol_type = other DNA
gtgttggtggcttggtggttggcatgatcttggtggctgagcacaagcaggttaacagacacttcaattccaattcagtc

SEQ ID NO: 64216 - DNA, 80 bp, synthetic construct
  source 1..80: mol_type = other DNA
acttttggttggtccacggcacctgttaacccaatggcagcagaaattgtgacaaaccaggcacattcaacatcacgcca

SEQ ID NO: 64217 - DNA, 80 bp, synthetic construct
  source 1..80: mol_type = other DNA
tgcttggctttccattggtgctcaaaacaagggtccattgtttcccgggatacctaaccacttccccgactcgtgtgcgt

SEQ ID NO: 64218 - DNA, 80 bp, synthetic construct
  source 1..80: mol_type = other DNA
caacaattgtggaggccatggacacctcccttggtggccggccatccactggggtatgtggacctgccataagcttccaa

SEQ ID NO: 64219 - DNA, 80 bp, synthetic construct
  source 1..80: mol_type = other DNA
aacaatggtgatgtgtacgaaaatgacactccctcagtcatgtttgccacttatgacccactcacgtcaggtactggggt

SEQ ID NO: 64220 - DNA, 80 bp, synthetic construct
  source 1..80: mol_type = other DNA
tgctctcaccaacagtatcaatcctgcatccctggcgttagtgcgcatatccaacaatgactttgacactagtggctttg

SEQ ID NO: 64221 - DNA, 80 bp, synthetic construct
  source 1..80: mol_type = other DNA
ggcgcaccaagatcagtgccataacagaacccatcaaggacttcttaattgcgttttgccaggcagtgcaacaagaaatg

SEQ ID NO: 64222 - DNA, 80 bp, synthetic construct
  source 1..80: mol_type = other DNA
ccaatgataagaacgtggtggttcaaatgtcatgggagatgtacacaggcaccaatcaaattagaggtcaggttacacca

SEQ ID NO: 64223 - DNA, 80 bp, synthetic construct
  source 1..80: mol_type = other DNA
atgtctggcactaactacaccttcacatctacaggtgcaaacacccttgtgttgtggcaggagcgtatgctcagctacga

SEQ ID NO: 64224 - DNA, 80 bp, synthetic construct
  source 1..80: mol_type = other DNA
tggacaccaagcaatactgtactcgtcacaattggagaggacggctgagtacttccagaatgatatagtgaatatacctg

SEQ ID NO: 64225 - DNA, 80 bp, synthetic construct
  source 1..80: mol_type = other DNA
aaaactccatggcagtgttcaatgtggaaaccaactctgcatctttccaaattggcatcagacctgatggttacatggta

SEQ ID NO: 64226 - DNA, 80 bp, synthetic construct
  source 1..80: mol_type = other DNA
acaggtggctctattggtattaatgtaccgcttgaacctgaaacccgattccaatacgttggaattctccctttgtccgc

SEQ ID NO: 64227 - DNA, 80 bp, synthetic construct
  source 1..80: mol_type = other DNA
agctttatctgggcccagtgggaacatgggaagggccagacgggtgttccaatgagttggttggtgggtgcccttcagac

SEQ ID NO: 64228 - DNA, 80 bp, synthetic construct
  source 1..80: mol_type = other DNA
cttcgggtctttggcggatgttgctggcactgtctccaacatagtgtaccagcagcgccaagccgctcagttggaaaaac

SEQ ID NO: 64229 - DNA, 80 bp, synthetic construct
  source 1..80: mol_type = other DNA
aaaatgaactaatggagacctggatgaataaacaagaggcactgcaaaaatcccaaatggaattaactcgggacctctcc

SEQ ID NO: 64230 - DNA, 80 bp, synthetic construct
  source 1..80: mol_type = other DNA
atcagtggtccagctgcccgggtgcaatcagcacttgatgcaggttttgatgaggtaagtgcacggcgcattgctggttc

SEQ ID NO: 64231 - DNA, 80 bp, synthetic construct
  source 1..80: mol_type = other DNA
aggtgaacgcgtgatatgggggaacttagatcgacccatcatgcacgctggcactatggatagcatacgccagaccaaac

SEQ ID NO: 64232 - DNA, 80 bp, synthetic construct
  source 1..80: mol_type = other DNA
ggcgtgaacccacaatatctacaacttgcctggctgcagaaactcaaacccaccacattaaccatcattcttcaacaaca

SEQ ID NO: 64233 - DNA, 80 bp, synthetic construct
  source 1..80: mol_type = other DNA
atttggattctctgagtcattctttggccacattcaaaaatgggactccatttgggaaacccgcacctccaacagcaaaa

SEQ ID NO: 64234 - DNA, 80 bp, synthetic construct
  source 1..80: mol_type = other DNA
cttgggaggcctcaggccacaactgcacaaatcaatattggccacaaccctggtagcaccagtgtctaaattcaaatttt

SEQ ID NO: 64235 - DNA, 80 bp, synthetic construct
  source 1..80: mol_type = other DNA
attcaaattttcttttctttgaaacggtcccacacgcgttcgggtgggttttggacaattaagcgattgtcgccgttcct

SEQ ID NO: 64236 - DNA, 80 bp, synthetic construct
  source 1..80: mol_type = other DNA
ctacctcagggtagcgccgcgtgaagcattttgtgagaacttgagtgaacttcatcactattttgccaggcgtgtgaacg

SEQ ID NO: 64237 - DNA, 80 bp, synthetic construct
  source 1..80: mol_type = other DNA
caagcacaccgtctcagggtggctggccactatgacagcacttgtagaagtgtactcaaatctgtttgatgacttacgca

SEQ ID NO: 64238 - DNA, 80 bp, synthetic construct
  source 1..80: mol_type = other DNA
aatcctcagttgccatcgtgtcaagcattggagccttctttgacatttgtaaagattttgtgtcacaggttgtagagctg

SEQ ID NO: 64239 - DNA, 80 bp, synthetic construct
  source 1..80: mol_type = other DNA
gtcaaaacgacattcactgcccagggtccgacagacttggggtgggcagcagtgctggcaggggctgcaatgattttgct

SEQ ID NO: 64240 - DNA, 80 bp, synthetic construct
  source 1..80: mol_type = other DNA
gagctgcgagcaatgcgcatgggagcaggtgcctaccaacatgccaccattatcggtaggggaggagtgcaagataccat

SEQ ID NO: 64241 - DNA, 80 bp, synthetic construct
  source 1..80: mol_type = other DNA
gggacgcagccaataggggcgttgcaccccaaaacgcttacaaattggctttgaaagatgaactgagaccaattgaaaag

SEQ ID NO: 64242 - DNA, 80 bp, synthetic construct
  source 1..80: mol_type = other DNA
aatcagaacttcacatcattctctccaacttttgatgcagcaggaatgtgggtgtggatgccttgggctacagatcgccc

SEQ ID NO: 64243 - DNA, 80 bp, synthetic construct
  source 1..80: mol_type = other DNA
atctcttataaaattttcttatcttttcttttctttctacacggtacctcacgcgttcgggtggtcaaatgcaattaagc

SEQ ID NO: 64244 - DNA, 80 bp, synthetic construct
  source 1..80: mol_type = other DNA
tttcttatcttttcttttctttctacacggtacctcacgcgttcgggtggtcaaatgcaattaagcgattgcagccgtgc

SEQ ID NO: 64245 - DNA, 80 bp, synthetic construct
  source 1..80: mol_type = other DNA
acctcgttaagagcacgttccaatcacaaggcccaacgtcttgcggctgggctgctatcattgcaggtgcattgctcatt

SEQ ID NO: 64246 - DNA, 80 bp, synthetic construct
  source 1..80: mol_type = other DNA
tttaaacatacttgttacaaaagacattgactttgaaaacctcggagaaaacccatgtagagttgggctgcaaacagcat

SEQ ID NO: 64247 - DNA, 80 bp, synthetic construct
  source 1..80: mol_type = other DNA
ggttcgatggcttccaagccattaaagccaatagttctcaacccattcttcgaatgggagttcttccgacgagcctacct

SEQ ID NO: 64248 - DNA, 80 bp, synthetic construct
  source 1..80: mol_type = other DNA
tgaaaatgtcgggctgtcccggggtcctaggcatgtggaccaagatactgaaaatgtgtggtgcaatcacctcaatcaca

SEQ ID NO: 64249 - DNA, 80 bp, synthetic construct
  source 1..80: mol_type = other DNA
gctgcggcccgtgggattaagtggttgagagaattgtacgaggaagcagaaggccgtagactggcaaagatgtacatggc

SEQ ID NO: 64250 - DNA, 80 bp, synthetic construct
  source 1..80: mol_type = other DNA
tcgtggcgctgccctcatagagttagcagccagtcgggaagtcaccggtgtgaacgagcttaaagggctacttgactgct

SEQ ID NO: 64251 - DNA, 80 bp, synthetic construct
  source 1..80: mol_type = other DNA
tcaatgtactaattgaagaaggaactgagctcatccataaatttggcaccagccccctggcaggccttattcggacttat

SEQ ID NO: 64252 - DNA, 80 bp, synthetic construct
  source 1..80: mol_type = other DNA
gtatctgaactggaagcacaggcaaataacatcaggtcaacaatcaaacttgacaccccaagagatgtccccgttgttgt

SEQ ID NO: 64253 - DNA, 80 bp, synthetic construct
  source 1..80: mol_type = other DNA
catcctcacagggccccctggcataggtaaaactaggttagcacaattcataggtcagcggtttggtaaaatatcaaatt

SEQ ID NO: 64254 - DNA, 80 bp, synthetic construct
  source 1..80: mol_type = other DNA
acaagcatgtcactaggcccctacctgtacacactttcacagaggaggggctccttgacatgtttgcgagcaaaccacca

SEQ ID NO: 64255 - DNA, 80 bp, synthetic construct
  source 1..80: mol_type = other DNA
tcgagttttcagttccaattacgtcatctgcacatccaactaccccacttcagtgatcccagacaaccctcgtgctgcag

SEQ ID NO: 64256 - DNA, 80 bp, synthetic construct
  source 1..80: mol_type = other DNA
cattctatcgaagggtcatcatagtggatgtctcagcacctgacctagatgagtggaaaaagaaaaaccccggcaagaaa

SEQ ID NO: 64257 - DNA, 80 bp, synthetic construct
  source 1..80: mol_type = other DNA
cccacacaagatttgtaccaagatgattattcacacctgaagcttatgctcaggccttaccttgggtataatcctgaagg

SEQ ID NO: 64258 - DNA, 80 bp, synthetic construct
  source 1..80: mol_type = other DNA
ggacacacttgagggaaaccgtgtcaagccaacgccaatatcaattgctggtctgattacattgatggagaggcgattca

SEQ ID NO: 64259 - DNA, 80 bp, synthetic construct
  source 1..80: mol_type = other DNA
aggaacagggtggttcactacaaaacttgtggctccaggtcccaaaatcaactgtggaacaggcaacgaacatggtacgc

SEQ ID NO: 64260 - DNA, 80 bp, synthetic construct
  source 1..80: mol_type = other DNA
gccttcatgtatgctaaccgggctgtgtgtgacatcgtccccaatccagcatcaagggacataacagaaacagcactgtc

SEQ ID NO: 64261 - DNA, 80 bp, synthetic construct
  source 1..80: mol_type = other DNA
aaaaatctttatatgtgacacagccccaactccagagtttgttggccgccacattgttgctactgggttggaaacatctg

SEQ ID NO: 64262 - DNA, 80 bp, synthetic construct
  source 1..80: mol_type = other DNA
atgcgtcacttgcaaattcactcctgtcaatgttcacaaccagcaccagactatcagcagctgcgcaaagggagttcatg

SEQ ID NO: 64263 - DNA, 80 bp, synthetic construct
  source 1..80: mol_type = other DNA
tataaggtttggcagcctatgatacatatacaagacaggtccatcaacacacagaacttgccatatgtcaacagggtcat

SEQ ID NO: 64264 - DNA, 80 bp, synthetic construct
  source 1..80: mol_type = other DNA
acctgtaacatcacactgggacttcttacgtggcatccgacatcatcttgggttttcttcaatccctgggatgtggcgag

SEQ ID NO: 64265 - DNA, 80 bp, synthetic construct
  source 1..80: mol_type = other DNA
gtagaggttgacgagggcgcgctcttccgcgacctatttggggttgacccaaaggaacagcgagctatgtcactcatgga

SEQ ID NO: 64266 - DNA, 80 bp, synthetic construct
  source 1..80: mol_type = other DNA
cctgagtgtaccatcttccgggccccagacgcggatgtgctgttttatacctttggatcatacatctgttttgccacccc

SEQ ID NO: 64267 - DNA, 80 bp, synthetic construct
  source 1..80: mol_type = other DNA
agctagagtgccttttgttggcacccccccaccaagggtacattctaacaccccacaatgcatgacttggggtgagacca

SEQ ID NO: 64268 - DNA, 80 bp, synthetic construct
  source 1..80: mol_type = other DNA
tatcactcttgtgtgaggttgtgatggagtttgtcttacactttggccccatgatactatcagcagcaaacatcacctac

SEQ ID NO: 64269 - DNA, 80 bp, synthetic construct
  source 1..80: mol_type = other DNA
ttgttgtcacgggggtcacgagtggatgaagccaagggcaagacaaaacatggtagaggcgtgcgtcatggacaccgtgc

SEQ ID NO: 64270 - DNA, 80 bp, synthetic construct
  source 1..80: mol_type = other DNA
cggtgtcagcctgtcagatgatgagtatgatgaatggcgtgacctgatgcgagactggcgaaaagatatgagtgtcaatg

SEQ ID NO: 64271 - DNA, 80 bp, synthetic construct
  source 1..80: mol_type = other DNA
acttcttaatgctccgagagcgttccgcattgggtatggacgatgaggatgtcatgcgataccgtgcttggctagaaatc

SEQ ID NO: 64272 - DNA, 80 bp, synthetic construct
  source 1..80: mol_type = other DNA
agatcacttcgcatggctggaggggcatatacacatgccacaataatcggcaagggtggtgtccgggatgaaatcattcg

SEQ ID NO: 64273 - DNA, 80 bp, synthetic construct
  source 1..80: mol_type = other DNA
cactgccccacgtcgcgcgcccacgcgccctacacactcatatgaagaggaggcgcccacagccgtggttgagttcacac

SEQ ID NO: 64274 - DNA, 80 bp, synthetic construct
  source 1..80: mol_type = other DNA
atgatggggaccacattggctacggtgtgcacacgggcaatgggaacatcgtgacagtcacccatgtggcatcagggtca

SEQ ID NO: 64275 - DNA, 80 bp, synthetic construct
  source 1..80: mol_type = other DNA
tctcgctcagctccaaggtgagcttgttgacgcgactagaacaccaggtcacgcacttagacaaaagtactctcttgaaa

SEQ ID NO: 64276 - DNA, 80 bp, synthetic construct
  source 1..80: mol_type = other DNA
aatgctgtcaacgatgtcccatttaaggtgacacgtaccattggtgaaaccacttgggttcaagcaccactttcccaatt

SEQ ID NO: 64277 - DNA, 80 bp, synthetic construct
  source 1..80: mol_type = other DNA
accacatgcccaaattggaaaaggcacaccagtgtactttagtacaagattacacccagtagtcaccatttctgagggta

SEQ ID NO: 64278 - DNA, 80 bp, synthetic construct
  source 1..80: mol_type = other DNA
cttttgagacgccaaacatcacggtggttgggtaccatttacgcatttccaatggttatcctacaaagaaaggagattgt

SEQ ID NO: 64279 - DNA, 80 bp, synthetic construct
  source 1..80: mol_type = other DNA
ggactaccttactacaactccaaccgccaagtggtcgccctacatgctggcacagatacccaaggtgagaccaaggttgc

SEQ ID NO: 64280 - DNA, 80 bp, synthetic construct
  source 1..80: mol_type = other DNA
ccagaaaatcaacaaagaaacaacaatagaggatgagttccagtggaagggtctaccagtggtaaagtcgggtgtggatg

SEQ ID NO: 64281 - DNA, 80 bp, synthetic construct
  source 1..80: mol_type = other DNA
tgggaggcatgccaaccggtacccggtaccacagatctcccgcttggccagaagtgcaagctgaggaaacacatgaacca

SEQ ID NO: 64282 - DNA, 80 bp, synthetic construct
  source 1..80: mol_type = other DNA
gccccatttggctccggcgatcagagatacaaattctcccaaacagaaatgttggtcaatgggttaaaaccatacactga

SEQ ID NO: 64283 - DNA, 80 bp, synthetic construct
  source 1..80: mol_type = other DNA
aaccaccccaggcataccaccccaactcctgacacgggctgctacgcatgtacgtagctatttggaaactattataggta

SEQ ID NO: 64284 - DNA, 80 bp, synthetic construct
  source 1..80: mol_type = other DNA
cccacaagtcccctgtactaactttccaacaagcttgtgagctactggagcgaacaacatcatgtgggccatttgtccaa

SEQ ID NO: 64285 - DNA, 80 bp, synthetic construct
  source 1..80: mol_type = other DNA
ggactgaaaggtgactattgggatgaggacaaccaacaatacactgggctgttgaatgatcacttggttgaagcctggga

SEQ ID NO: 64286 - DNA, 80 bp, synthetic construct
  source 1..80: mol_type = other DNA
cgatcagacaacttgtggataagatcacaagagtggtcccagtgcaagccaccctcaacgagatgcacacacgtaggcaa

SEQ ID NO: 64287 - DNA, 80 bp, synthetic construct
  source 1..80: mol_type = other DNA
taaggcaaataagggcattgctcccaagaatgcttacaagctggcactcaaggacgaattacgaccaactgagaagaaca

SEQ ID NO: 64288 - DNA, 80 bp, synthetic construct
  source 1..80: mol_type = other DNA
agcttgggaaaaggagactcctatggggctgcgatgcggccacaacccttgtggcaactgcagcatttaaatctgttgcc

SEQ ID NO: 64289 - DNA, 80 bp, synthetic construct
  source 1..80: mol_type = other DNA
actcgcttgcaagctgtcaccccaatgaccccggtgtcagttggtatcaacatggactctgttcaaatgcaagttttgaa

SEQ ID NO: 64290 - DNA, 80 bp, synthetic construct
  source 1..80: mol_type = other DNA
tgactctttgaaagggagtgtgttgtattgtctggactattcaaagtgggattcaacacaacatccagcagtgacggcca

SEQ ID NO: 64291 - DNA, 80 bp, synthetic construct
  source 1..80: mol_type = other DNA
cctcactggcaattttggaaaggtttgctgagggtcacccactggtgtccagcgctattgaggcattgtcatctcctgca

SEQ ID NO: 64292 - DNA, 80 bp, synthetic construct
  source 1..80: mol_type = other DNA
tccagttagaaaccatccacacctatggagatgactgtatatatggcttctgcccggctactgcctcaatcttcccatca

SEQ ID NO: 64293 - DNA, 80 bp, synthetic construct
  source 1..80: mol_type = other DNA
attcttggcaatctgtcacggtttggtcttaagcctacagcggcagacaagagcgacaaaatagtgcctaccaatgtccc

SEQ ID NO: 64294 - DNA, 80 bp, synthetic construct
  source 1..80: mol_type = other DNA
agttttcctcaagagaacatttacacacacttcacatggtgtgcgtgcccttctcgacataacgtccatcaaaagacaat

SEQ ID NO: 64295 - DNA, 80 bp, synthetic construct
  source 1..80: mol_type = other DNA
tttgaacgcgagcgtgctgatctattccaggagctccccctggtcgatgaggatgtgattaaacaaccaaagagttactt

SEQ ID NO: 64296 - DNA, 80 bp, synthetic construct
  source 1..80: mol_type = other DNA
ttttctggttgaaggcaaacagaacatgtgatcctaccagccctccagcatttgaccgggtggcacgcagtgcacagttg

SEQ ID NO: 64297 - DNA, 80 bp, synthetic construct
  source 1..80: mol_type = other DNA
gagaacgctctggcatttgcatcacaacatgggccaacaatttttgatgaggtgcgccagattgcaattaaaactgcaat

SEQ ID NO: 64298 - DNA, 80 bp, synthetic construct
  source 1..80: mol_type = other DNA
gggtgaagggttggtgttagtcaacaccaattatgaccatgctctcgccacctacaatgcatggttcataggtggtacag

SEQ ID NO: 64299 - DNA, 80 bp, synthetic construct
  source 1..80: mol_type = other DNA
agctgggttcccgccaacatcaagaaagccaggcagcggttgatccgcctggtgcgactggcccaaccacatcccatgtt

SEQ ID NO: 64300 - DNA, 80 bp, synthetic construct
  source 1..80: mol_type = other DNA
tgcgcaatactgactaccaccgtatggatggcaatgagcccacctgttcactaggtttgtgggtgtaccaaccactaatt

SEQ ID NO: 64301 - DNA, 80 bp, synthetic construct
  source 1..80: mol_type = other DNA
aacccgttctccacatcagctgtgtcaacgtgctgggtgtcaatcgaaaccaaacctggtggtgactttgacttttgcct

SEQ ID NO: 64302 - DNA, 80 bp, synthetic construct
  source 1..80: mol_type = other DNA
actcaaaccccctgggcaaagaatggagaacggtgtgtcccctgagggcttgttgcctcgacgattgggttacgcgcgag

SEQ ID NO: 64303 - DNA, 80 bp, synthetic construct
  source 1..80: mol_type = other DNA
gtaacagagttggtggcttggtggtaggtatggtgctggtggctgaacaccatcaagtgaacagacatttcaacgcaaat

SEQ ID NO: 64304 - DNA, 80 bp, synthetic construct
  source 1..80: mol_type = other DNA
tcaataacctatggttggtccaccgcaccagtcaatcccatggcagcagagattgtggtcaaacatgattccaccagcaa

SEQ ID NO: 64305 - DNA, 80 bp, synthetic construct
  source 1..80: mol_type = other DNA
taggaatgcctggttgtcaattggcgccaaaaacaagggtccacttttccctggtctgccaaaccactttccagactctt

SEQ ID NO: 64306 - DNA, 80 bp, synthetic construct
  source 1..80: mol_type = other DNA
gtgcttcaacattggtggaggccatggatacaggtagacacatgcccgccacaggggtttgtggccccgctattgggttc

SEQ ID NO: 64307 - DNA, 80 bp, synthetic construct
  source 1..80: mol_type = other DNA
caagacaatggagatgtttttgagaacgagacacctgcagtgatgttcgccacattcaacccattgactggtggtgacaa

SEQ ID NO: 64308 - DNA, 80 bp, synthetic construct
  source 1..80: mol_type = other DNA
tggaagacaaaaatcagtgccatcactgagccagttcgagagttcctcatagcattttgccaggctattcaacaagagat

SEQ ID NO: 64309 - DNA, 80 bp, synthetic construct
  source 1..80: mol_type = other DNA
caccaacccaatagcactgtatgactccatcaatgcggcctctctggcagtcatgtgtaccaaatcaaactccaactttg

SEQ ID NO: 64310 - DNA, 80 bp, synthetic construct
  source 1..80: mol_type = other DNA
attcaagtgggtttagcaatgataagaatgttgttgtccagatgtcctgggagatgtacaccaactcccaacaaatccag

SEQ ID NO: 64311 - DNA, 80 bp, synthetic construct
  source 1..80: mol_type = other DNA
ggacgagtcacacctatgcaaggcaccaactttgtattcacctcatcaggggccaacacccttgccctctgggaggaaag

SEQ ID NO: 64312 - DNA, 80 bp, synthetic construct
  source 1..80: mol_type = other DNA
gttgttgagttatgacggccaccaagccatattgtactcatcccaaatggagcgtacatctgaatatttccaaaatgaca

SEQ ID NO: 64313 - DNA, 80 bp, synthetic construct
  source 1..80: mol_type = other DNA
atgttaacatcccccctggctctatggctgttttcaatgttgaaacaaattcggcctcatttcaaattggagtccgagag

SEQ ID NO: 64314 - DNA, 80 bp, synthetic construct
  source 1..80: mol_type = other DNA
taggtgctctccaaaccactgggtcacttgttgacctagcaggcacagtgtctaacattgtgtatcagcaacgccaggtt

SEQ ID NO: 64315 - DNA, 80 bp, synthetic construct
  source 1..80: mol_type = other DNA
gcacaattggagaaacaaaaccaactgatggagcaatggatgggcaagcaagaacaactccaacgtgaccaaatggccct

SEQ ID NO: 64316 - DNA, 80 bp, synthetic construct
  source 1..80: mol_type = other DNA
aacacgagatctggcagttaatggaccagtggagcgagttcaagctgcgttagacgctggttttgatcaagtcagtgccc

SEQ ID NO: 64317 - DNA, 80 bp, synthetic construct
  source 1..80: mol_type = other DNA
gggggttaacccacagtacttacagctagcctggcttcaaaagttaaaacccaccaccctgacaattatattgcaacaac

SEQ ID NO: 64318 - DNA, 80 bp, synthetic construct
  source 1..80: mol_type = other DNA
gcagattggctggatctcaagagagagtcatatatggcaatttggaccgacccatcatgcatgctgggactgtggagggt

SEQ ID NO: 64319 - DNA, 80 bp, synthetic construct
  source 1..80: mol_type = other DNA
atccgcaacacccgccacttggactccatcagttcttcactagcaacatttaagaaaggcactcaattcggtttatcagc

SEQ ID NO: 64320 - DNA, 80 bp, synthetic construct
  source 1..80: mol_type = other DNA
acccccaaaattcaacactggcaggcccaccagtacccagcccaccattaatttgggacacacaccagggagctccaatg

SEQ ID NO: 64321 - DNA, 80 bp, synthetic construct
  source 1..80: mol_type = other DNA
tctaataaattttcttttctttccacgtgacaccacacgcgttcgggtggtttgtgtgattaagcgatcacagtcacgcc

SEQ ID NO: 64322 - DNA, 80 bp, synthetic construct
  source 1..80: mol_type = other DNA
acaaaaatacagtttctggttggttagccaccctaacagcacttgttgaggtgtactcaagtctgtttgacgacttgcgt

SEQ ID NO: 64323 - DNA, 80 bp, synthetic construct
  source 1..80: mol_type = other DNA
cagggtagacccaagggagagcttttgtgaggacgaacaagagttactacaatatttcaccaggcacactagtgcctggt

SEQ ID NO: 64324 - DNA, 80 bp, synthetic construct
  source 1..80: mol_type = other DNA
aagtcatctgtgactatagtgtccagtcttggcgctttctttgacgtgtgcaaggacttcatttcgcacgtggtgggttt

SEQ ID NO: 64325 - DNA, 80 bp, synthetic construct
  source 1..80: mol_type = other DNA
ggtgcgagattgtttcacatcagaaggcccaacagatttggggtggaccgcaatacttgctggtgcggccatgatactac

SEQ ID NO: 64326 - DNA, 80 bp, synthetic construct
  source 1..80: mol_type = other DNA
tctctgtagcagtggaccaccatgatggatacactggtaacaccgtgtgtatatgggatgaatttgacgttgactcaaaa

SEQ ID NO: 64327 - DNA, 80 bp, synthetic construct
  source 1..80: mol_type = other DNA
ggggcatttgtggagactatgataggtatagcaaacacagccccgttccctctgaactgtgatagggtggaaaacaaagg

SEQ ID NO: 64328 - DNA, 80 bp, synthetic construct
  source 1..80: mol_type = other DNA
cactgaaccacatggtgtacattgcggctgccatcttgctcgcatacgaggagcaccatgtgccatacaatggaaatgta

SEQ ID NO: 64329 - DNA, 80 bp, synthetic construct
  source 1..80: mol_type = other DNA
tggttatacaggcaacccagtgtgcatttgggatgagtttgatgtggacgcaaaaggtagtttcgtggaaacgatgattg

SEQ ID NO: 64330 - DNA, 80 bp, synthetic construct
  source 1..80: mol_type = other DNA
gtattgccaatacagcaccgttcccacttaattgtgaccgtgtggagaacaaaggtagggtgttcacttcaaattatgtt

SEQ ID NO: 64331 - DNA, 80 bp, synthetic construct
  source 1..80: mol_type = other DNA
atttgcacatcaaactaccccacatctgtcattccagagaacccacgtgccccagccttttaccgccgggtcatcatctt

SEQ ID NO: 64332 - DNA, 80 bp, synthetic construct
  source 1..80: mol_type = other DNA
ggatgtctcatctccagaacttgatgattggaagaagaagaaccctgggaaaaagcccccatctgacttgtataaacaag

SEQ ID NO: 64333 - DNA, 80 bp, synthetic construct
  source 1..80: mol_type = other DNA
acttctcacatctaaagttgatgctccgcccctaccttgggtacaatcccgaaggggacacacttgacggcaccagagtc

SEQ ID NO: 64334 - DNA, 80 bp, synthetic construct
  source 1..80: mol_type = other DNA
aaacccacccagatctccatcacaagtttaatctcactcatgcaaaagaggtttaaggagcaatcaggggaaaaccagaa

SEQ ID NO: 64335 - DNA, 80 bp, synthetic construct
  source 1..80: mol_type = other DNA
cctatggatgcaagttcctagaggagctgttgatcaagcatctaatatgataaagacctttgtctatgctaaccgtggtg

SEQ ID NO: 64336 - DNA, 80 bp, synthetic construct
  source 1..80: mol_type = other DNA
tgtgtgacgttctcccaaaccctgcctcccgtgatatcacagagacatctgtatcaaaaatcttcgtctcctcaacagcc

SEQ ID NO: 64337 - DNA, 80 bp, synthetic construct
  source 1..80: mol_type = other DNA
ccaccaccagaattcttaggccgccatgtggtcattactgggtttgaacttggggatgcatccatagcaaactctttgtt

SEQ ID NO: 64338 - DNA, 80 bp, synthetic construct
  source 1..80: mol_type = other DNA
atccatgttttccacaagcacacgcctcactgctggtgcacagcgagagtatatgtatagaatttggaatcccatcatcc

SEQ ID NO: 64339 - DNA, 80 bp, synthetic construct
  source 1..80: mol_type = other DNA
atatccaagagaggtccatcaacacacaaaatctgccatatgttaaccgcgtgatcccagtcacatcccactgggatttc

SEQ ID NO: 64340 - DNA, 80 bp, synthetic construct
  source 1..80: mol_type = other DNA
gacagcccctcgccgtgcccccataagtgcgcggcgtgccaattatgaagaggaagcccccactgccattgtcgagttca

SEQ ID NO: 64341 - DNA, 80 bp, synthetic construct
  source 1..80: mol_type = other DNA
tcagacagtgttgagggggcaccttttaaggtacaaagaactgttggtgaaaccacctgggttgaagcacagcttcccaa

SEQ ID NO: 64342 - DNA, 80 bp, synthetic construct
  source 1..80: mol_type = other DNA
cacctgcatggccagaacaactccccgaggaaacctatgcccccgccccctttggtgccggtgacaaacgctatcacttc

SEQ ID NO: 64343 - DNA, 80 bp, synthetic construct
  source 1..80: mol_type = other DNA
acccagactgagatgttagtgaatgccctcaagccctacacggaaaccacacctggcattcccccttccttgttatcacg

SEQ ID NO: 64344 - DNA, 80 bp, synthetic construct
  source 1..80: mol_type = other DNA
attggctatcttaatgacattaaattcgtgaccaaagggggcctcccatcgggaatgcccttcacctcagtcatcaactc

SEQ ID NO: 64345 - DNA, 80 bp, synthetic construct
  source 1..80: mol_type = other DNA
gacgtggtggtgtcagcttaagtgatgatgagtatgacgagtggagagatctcatccgtgactggcgtaaggatatgtca

SEQ ID NO: 64346 - DNA, 80 bp, synthetic construct
  source 1..80: mol_type = other DNA
tcatccgcacccagccattgagggccccaagaaggcctaccaacactgagtatgacgaagaggctcccaccccagtggtt

SEQ ID NO: 64347 - DNA, 80 bp, synthetic construct
  source 1..80: mol_type = other DNA
gagttcacgtcagatggagagcatgttggttatgggtgccatcttggcaatggtgttgtgatgtcagtgacacacgttgt

SEQ ID NO: 64348 - DNA, 80 bp, synthetic construct
  source 1..80: mol_type = other DNA
ttgctcgactcccacactaccaaattggcgacggcaatcctgtgtatttttccccccgcctccaccctgtccttaccctt

SEQ ID NO: 64349 - DNA, 80 bp, synthetic construct
  source 1..80: mol_type = other DNA
cgctgcttcgcggggtgttgctccaccaaattcatacaagctagcactcaaggatgaactacgaccaattgagaaaaatt

SEQ ID NO: 64350 - DNA, 80 bp, synthetic construct
  source 1..80: mol_type = other DNA
gggcggcttcagggtgtgtcaccaatgacgcccgttgcagttgggatcaatatggatagctttcaggtttctgtgcttaa

SEQ ID NO: 64351 - DNA, 80 bp, synthetic construct
  source 1..80: mol_type = other DNA
caactgcaccaattggtacaattatcgagctggaccctgaaactgctttccgatttgttggtctcttccctcaatcaacc

SEQ ID NO: 64352 - DNA, 80 bp, synthetic construct
  source 1..80: mol_type = other DNA
ttctttttatccctctattttcttttcttttccggcagttccacacgcgttcgggtggataatggtggttaagcgaccaa

SEQ ID NO: 64353 - DNA, 80 bp, synthetic construct
  source 1..80: mol_type = other DNA
tcatcctacttcttttctttctttccttccatggtccctcacgcgttcgggtgggtgaaatttggttaagcgaccaaagc

SEQ ID NO: 64354 - DNA, 80 bp, synthetic construct
  source 1..80: mol_type = other DNA
ctgatgaaactttcagggtgttccaataccacgagctattggcaccgactccttaaggtgtgtggaggtgtgaccaccat

SEQ ID NO: 64355 - DNA, 80 bp, synthetic construct
  source 1..80: mol_type = other DNA
tgccgcggcagcccgtgctgtcgtgtgggtgcgggacatcatagcagaagctgatggtaaggcaagactgaagaagtaca

SEQ ID NO: 64356 - DNA, 80 bp, synthetic construct
  source 1..80: mol_type = other DNA
tggcccgcacggcagccctacttgagcttgcggcatcccgagatgtaacgggcactgacgagctcaaacgtttgttggat

SEQ ID NO: 64357 - DNA, 80 bp, synthetic construct
  source 1..80: mol_type = other DNA
tgtttcacacagcttattgaggagggcacagagctaatacaggaatttggcacgtcaccacttgctggtctgactaggtc

SEQ ID NO: 64358 - DNA, 80 bp, synthetic construct
  source 1..80: mol_type = other DNA
atatgtgagtgaacttgagtccactgcaaatagcattaggagcaccatcctcctagatacaccccggaaggctccggttg

SEQ ID NO: 64359 - DNA, 80 bp, synthetic construct
  source 1..80: mol_type = other DNA
caatcatcctcactggtcctcctgggataggcaaaacaaggctcgcacaacaccttgctgcaggttttggtaaagtgtca

SEQ ID NO: 64360 - DNA, 80 bp, synthetic construct
  source 1..80: mol_type = other DNA
aacttttccgtcacgttagaccaccatgactcatacaccgggaatgaagttgcaatctgggatgagtttgacgtagacac

SEQ ID NO: 64361 - DNA, 80 bp, synthetic construct
  source 1..80: mol_type = other DNA
acagggcaagtttgtcgaaaccatgattggcatagttaacaccgccccctacccactcaactgcgaccgagtagagaaca

SEQ ID NO: 64362 - DNA, 80 bp, synthetic construct
  source 1..80: mol_type = other DNA
cgccgtagtttggctgccacccccacatttacagaggaaggcttgctagactctttcctttcaaagccacctgttgacat

SEQ ID NO: 64363 - DNA, 80 bp, synthetic construct
  source 1..80: mol_type = other DNA
ggggctttttaccgccgggttacaacgatagatgcgtcatccccaactattgaagattggaaaaagaaaaacccaggaaa

SEQ ID NO: 64364 - DNA, 80 bp, synthetic construct
  source 1..80: mol_type = other DNA
aaggggacaccttggacggagttcgagtaaagcctgtgctcaccagtgtggatggactgtcacgcttgatggaaaccaag

SEQ ID NO: 64365 - DNA, 80 bp, synthetic construct
  source 1..80: mol_type = other DNA
tggtaccagtgtcttctgcatttgacttcatccgcggcctcaggcaccatcttggtttatgttcagttaagggcatgtgg

SEQ ID NO: 64366 - DNA, 80 bp, synthetic construct
  source 1..80: mol_type = other DNA
agggcttaccagggctggaacagttccagttcaattttggaattcttgtcaaaacacatggctgacgttgctttccccca

SEQ ID NO: 64367 - DNA, 80 bp, synthetic construct
  source 1..80: mol_type = other DNA
ccccggcccgtgttccatttgttggagaacccccaaagaatgtacactcgaacataacacgtaatatgacttgggccgaa

SEQ ID NO: 64368 - DNA, 80 bp, synthetic construct
  source 1..80: mol_type = other DNA
acactccgtttgctggcagaaaccataactgaaagtctggtgcactttggcccgttcttactcatgatgcacaacgtttc

SEQ ID NO: 64369 - DNA, 80 bp, synthetic construct
  source 1..80: mol_type = other DNA
atacctcgccacccggtctggtcgggaggaagaggctaaagggaagaccaaacatggccgtggcaccaagcacgccagga

SEQ ID NO: 64370 - DNA, 80 bp, synthetic construct
  source 1..80: mol_type = other DNA
ggggagtttgtggagctacgcgagcgatacgcgctcggaatggattctgaggatgtgcagcgctaccgtgcttggcttga

SEQ ID NO: 64371 - DNA, 80 bp, synthetic construct
  source 1..80: mol_type = other DNA
ttcacatctggggtggaccacattgggtatggttgccatatgggcaacggggtagttgttacagtcacccatgttgcctc

SEQ ID NO: 64372 - DNA, 80 bp, synthetic construct
  source 1..80: mol_type = other DNA
gggtagttgttacagtcacccatgttgcctccgcatctgaccaagtggagggccaagactttgctattagaaagactgag

SEQ ID NO: 64373 - DNA, 80 bp, synthetic construct
  source 1..80: mol_type = other DNA
cgcatctgaccaagtggagggccaagactttgctattagaaagactgagggtgagaccacctgggtgaacaccaaccttg

SEQ ID NO: 64374 - DNA, 80 bp, synthetic construct
  source 1..80: mol_type = other DNA
gacatttaccccattaccagatcggtgatggtgcccctgtttactactcggcacgtctacaccctgtaaccacgcttgca

SEQ ID NO: 64375 - DNA, 80 bp, synthetic construct
  source 1..80: mol_type = other DNA
gagggtacctacgaaacacccaacatcacggtccagggatatcatctgcgcatcctaaatgggtaccctacaaagcgtgg

SEQ ID NO: 64376 - DNA, 80 bp, synthetic construct
  source 1..80: mol_type = other DNA
agattgtggcactccctactttgattcatgccgccgattggtaggcttgcatgcagccacgtcaacgaatggggaaacca

SEQ ID NO: 64377 - DNA, 80 bp, synthetic construct
  source 1..80: mol_type = other DNA
agcttgcccaacgagtaaccaagacatctaaagtggagaatgcttttgcctggaagggtctggcggtcgttcggggccct

SEQ ID NO: 64378 - DNA, 80 bp, synthetic construct
  source 1..80: mol_type = other DNA
ccctgcgccgtttggttccggtgatgaacggtacaaattttcccaagtggagatgctggttaacggtctaaagccttact

SEQ ID NO: 64379 - DNA, 80 bp, synthetic construct
  source 1..80: mol_type = other DNA
ggccggccaaaagggtgattactgggatgaggacaaacagtgttacactggcgtgctggcagaacaccttgccaaggctt

SEQ ID NO: 64380 - DNA, 80 bp, synthetic construct
  source 1..80: mol_type = other DNA
tcaatgaatcacttaaaggcggggtactttactgtcttgactacagcaaatgggactcaacacaacaccccgccgtaacg

SEQ ID NO: 64381 - DNA, 80 bp, synthetic construct
  source 1..80: mol_type = other DNA
aagcacgcagagcatttgagcgagagcgtgcggagctgtttaaggaactgccacatgctgatatagacgtgagtcgccag

SEQ ID NO: 64382 - DNA, 80 bp, synthetic construct
  source 1..80: mol_type = other DNA
acaggcctggtccaaggcagccccagtgaagagaccaccaaattagtgtttgaaatggagggtgtgtcccacccagaggg

SEQ ID NO: 64383 - DNA, 80 bp, synthetic construct
  source 1..80: mol_type = other DNA
cgccattcatcttggcccacgcatcaacccctacaccgcacatttgagtgccatgtttgccgggtggggtgggagtttcc

SEQ ID NO: 64384 - DNA, 80 bp, synthetic construct
  source 1..80: mol_type = other DNA
agatacgagtcaccctctctggttctggcctgtatgcaggtcgagcggtggtggctgtactgcccccaggtgttaaccca

SEQ ID NO: 64385 - DNA, 80 bp, synthetic construct
  source 1..80: mol_type = other DNA
gccaacgtccaaaaccctggagtctttccacacgcattcattgacgcccgcaccgtggatcccgtcctcattaatctccc

SEQ ID NO: 64386 - DNA, 80 bp, synthetic construct
  source 1..80: mol_type = other DNA
gaccgatgttgctctctccagcaaaacctcagggaggtccactgtaccaactgatcaggacaacctcggccagtgtcccg

SEQ ID NO: 64387 - DNA, 80 bp, synthetic construct
  source 1..80: mol_type = other DNA
gggcctcaggtcccgttgtgatgttccaaaacaatggggatgtgaatgaaaccagtgccaataattgtgtgttaacagct

SEQ ID NO: 64388 - DNA, 80 bp, synthetic construct
  source 1..80: mol_type = other DNA
agtcttcaagggcccaatgggaacgctggacgggccgtcaggttcctcgaataatgtcttggtttacaggagcagctctt

SEQ ID NO: 64389 - DNA, 80 bp, synthetic construct
  source 1..80: mol_type = other DNA
agttttccactaacgccaactatatcaacttgtccctcatcgccaagctccgaccaacggtccttacaatgattctccag

SEQ ID NO: 64390 - DNA, 80 bp, synthetic construct
  source 1..80: mol_type = other DNA
tcctttcttttaatcagctattattttcttttctttccaagtggttcctcacgcgttcgggtggataattgtgattaagc

SEQ ID NO: 64391 - DNA, 80 bp, synthetic construct
  source 1..80: mol_type = other DNA
caacataagaacacgtacagggggtggttggcaacagtcacggctctggttgaagtgtattccaatttgttccaagacat

SEQ ID NO: 64392 - DNA, 80 bp, synthetic construct
  source 1..80: mol_type = other DNA
gtgagcaaatgtttgaaaccatcaatgaccttaatgaacatgtcaggggtgtggtggccggattgtggtgcaagtgtttg

SEQ ID NO: 64393 - DNA, 80 bp, synthetic construct
  source 1..80: mol_type = other DNA
gcgagacactgcggtgtcagcagtgtcagccatcacgttagtgtttgagaccattaaggactttgtagtcaatgtgatag

SEQ ID NO: 64394 - DNA, 80 bp, synthetic construct
  source 1..80: mol_type = other DNA
acctagtcaagaataccttccagtcgcagggtccaacaccttgcggctgggctgccatcgtcgctggcgcagtgctgatc

SEQ ID NO: 64395 - DNA, 80 bp, synthetic construct
  source 1..80: mol_type = other DNA
gttcaaggagcagggcaatgaacagcgaaacttgtggataacatgcccgcgagatctggtggcccctgctgcgtccggtt

SEQ ID NO: 64396 - DNA, 80 bp, synthetic construct
  source 1..80: mol_type = other DNA
gttggaaaatgcccttgcatacgcttcacaacatggccacacaatctttgaggaagttgctgagttggctcgacatacgg

SEQ ID NO: 64397 - DNA, 80 bp, synthetic construct
  source 1..80: mol_type = other DNA
accacggtaggcgtcagcacacgcggtctgctcagtgctgaaggcaagggcatcatcttcccaaacatagtcaaccactg

SEQ ID NO: 64398 - DNA, 80 bp, synthetic construct
  source 1..80: mol_type = other DNA
ggttggtatggcttcaaagccattctacccaattgagttcaaccaaaaggttgaaaccatcattctcctgtccgcccacc

SEQ ID NO: 64399 - DNA, 80 bp, synthetic construct
  source 1..80: mol_type = other DNA
ctccttaagatttcaggttgtccaaacgcaatgggatattggcagcgtttgttgaaggtgtgcgccggcgttacgaccat

SEQ ID NO: 64400 - DNA, 80 bp, synthetic construct
  source 1..80: mol_type = other DNA
cgccgcagctgcaaaggcatttacttgggttcgtgacataattgtggaggctgagaggaaggctcgcttaaagaaataca

SEQ ID NO: 64401 - DNA, 80 bp, synthetic construct
  source 1..80: mol_type = other DNA
tggcccgcacagccgctctgttggaacttgctgcgtcaagggatgtcactggaactgaggagctcaagaggttattggag

SEQ ID NO: 64402 - DNA, 80 bp, synthetic construct
  source 1..80: mol_type = other DNA
tgtttcactcagcttattgaggagggcacagaacttatacaggagtttggaacgtcaccaatggcagggctcacgcgctc

SEQ ID NO: 64403 - DNA, 80 bp, synthetic construct
  source 1..80: mol_type = other DNA
caataattctgactggacccccgggtatagggaaaacccaccttgcacaacatttggctgctggctttggtaagacatca

SEQ ID NO: 64404 - DNA, 80 bp, synthetic construct
  source 1..80: mol_type = other DNA
aatttttccgtcacccttgatcatcatgattcctacactggtaacgacgtggctatatgggatgaatttgatgtggatgc

SEQ ID NO: 64405 - DNA, 80 bp, synthetic construct
  source 1..80: mol_type = other DNA
cggcgtgacatactgcgtcgcatcccagtaaccagcccttcctttagtgcagaggggcttctggatgcatttgcgtctaa

SEQ ID NO: 64406 - DNA, 80 bp, synthetic construct
  source 1..80: mol_type = other DNA
agaaaccccctcaagatttatacaagaaagatttctctcatttgcggctctctgtgcgcccttaccttggttacaatcct

SEQ ID NO: 64407 - DNA, 80 bp, synthetic construct
  source 1..80: mol_type = other DNA
gaaggggatacattagagggtgtacgcgtgaagcccattttaactagtgtggatggtctctctcggcttatggaaaccaa

SEQ ID NO: 64408 - DNA, 80 bp, synthetic construct
  source 1..80: mol_type = other DNA
gttcaaagagcagggaaatgagttgcgtaacctttggatcacgtgcccccgtgacttagtgacacctgcggcatctggct

SEQ ID NO: 64409 - DNA, 80 bp, synthetic construct
  source 1..80: mol_type = other DNA
tgaaatcctatatggcagccaatcgggccctggcacaagtcttcgcagaaccatcttcaaatgagattgcggaggcgtgc

SEQ ID NO: 64410 - DNA, 80 bp, synthetic construct
  source 1..80: mol_type = other DNA
acttccagagtgttcgtatccgccaacaaccctcccccatctttcgttggaagacatgtcaaaatcacagccatcaatcc

SEQ ID NO: 64411 - DNA, 80 bp, synthetic construct
  source 1..80: mol_type = other DNA
ttgggatgcgtccctggccaactcaatgttgtcaatgttcgaaaccaacacacacgtgcccgctgtcacccaaagagaaa

SEQ ID NO: 64412 - DNA, 80 bp, synthetic construct
  source 1..80: mol_type = other DNA
tagtgccagtcacctcatcatttgactttatacgtgggctgcgccatcacctgggcttgtgttctattaagggaatgtgg

SEQ ID NO: 64413 - DNA, 80 bp, synthetic construct
  source 1..80: mol_type = other DNA
aaagcataccaggggtggcacagctccgcaacaatcctagaattcttgtccaaacacatggaggatgtaacattcccctc

SEQ ID NO: 64414 - DNA, 80 bp, synthetic construct
  source 1..80: mol_type = other DNA
caccagcgcgggttccatttgtgggggagccaccaaaaactgtccattccaatatcacccgcaacatgacatgggttgaa

SEQ ID NO: 64415 - DNA, 80 bp, synthetic construct
  source 1..80: mol_type = other DNA
acactgcgcctgctcattgaaacaatcactgaaggtttggcccattttggcccactgctcctaatggtccataatgtggc

SEQ ID NO: 64416 - DNA, 80 bp, synthetic construct
  source 1..80: mol_type = other DNA
atatttaacaaccaggtcacaacgtgatgaggaggctaaaggtaaaaccaaacatggcagaggagccagacacgcacgcc

SEQ ID NO: 64417 - DNA, 80 bp, synthetic construct
  source 1..80: mol_type = other DNA
gtggtggggtgagcttgtcagatgacgagtacgatgagtggcgtgacttggtgcgtgactggagacaggacatgactgtt

SEQ ID NO: 64418 - DNA, 80 bp, synthetic construct
  source 1..80: mol_type = other DNA
actccgtgccatgcgactaggagcaggggcatatcagcacgcgaccattatcgggcgtggacgtgttgaagacaccatca

SEQ ID NO: 64419 - DNA, 80 bp, synthetic construct
  source 1..80: mol_type = other DNA
tccgcacgcaacctatgcgtgccccacgggccccccgctccactggttacgacgaggaggctccaacaccaatggtcact

SEQ ID NO: 64420 - DNA, 80 bp, synthetic construct
  source 1..80: mol_type = other DNA
ttcaccagcaatggtgaccatgttgggtatggttgtcatattggcaatggtgttgtagttacagtcacccacgttgccgc

SEQ ID NO: 64421 - DNA, 80 bp, synthetic construct
  source 1..80: mol_type = other DNA
ggctgcagatgctgttgaaggtctggagttcacggtcaggaagaccgaaggtgaaacaacttgggtaaacacccccctga

SEQ ID NO: 64422 - DNA, 80 bp, synthetic construct
  source 1..80: mol_type = other DNA
gccacttaccacactaccaattaggtgaggggtctccggtctattattcgacccgactccaccctgtcaccacaattgca

SEQ ID NO: 64423 - DNA, 80 bp, synthetic construct
  source 1..80: mol_type = other DNA
gaaggcacatatgaaacacccaacattacagtccatgggttccacctacgtatcatcaacggctacccaaccaagcgtgg

SEQ ID NO: 64424 - DNA, 80 bp, synthetic construct
  source 1..80: mol_type = other DNA
gtgattgcggcaccccatacttcgactcgtgccggagattggtggggttgcatgccgccacgtcaactaatggagaaaca

SEQ ID NO: 64425 - DNA, 80 bp, synthetic construct
  source 1..80: mol_type = other DNA
aagttggcacaaaaggtaagccgagtctcaaaggtggaaaatgctttcgcctggaagggcctacctgttttgcggggtcc

SEQ ID NO: 64426 - DNA, 80 bp, synthetic construct
  source 1..80: mol_type = other DNA
tgattgcggtgggatgcccaccggaacgaggtaccaccggtccccagcttggccagaacaacagtcaaatgaaacgcatg

SEQ ID NO: 64427 - DNA, 80 bp, synthetic construct
  source 1..80: mol_type = other DNA
cccccgccccctttggtgctggagactctcggtacaacttctcacaggtggaaatgttggttaccggcctgaaaccctat

SEQ ID NO: 64428 - DNA, 80 bp, synthetic construct
  source 1..80: mol_type = other DNA
ggcactcatagatccccaaatttaacatataatgaggcatgtgctttattagaccgtggtacatcctgtggtccattcat

SEQ ID NO: 64429 - DNA, 80 bp, synthetic construct
  source 1..80: mol_type = other DNA
cgctggccaaaagggggacttttgggatgaagaccggcaatgctacactggagtgttggccgaacaccttgcaaaagttt

SEQ ID NO: 64430 - DNA, 80 bp, synthetic construct
  source 1..80: mol_type = other DNA
gggacgctgccaatcgaggcgtggcaccgcaaaatgcttacaagttggccctcaaagacgaattgcgaccagttgagaaa

SEQ ID NO: 64431 - DNA, 80 bp, synthetic construct
  source 1..80: mol_type = other DNA
aaccaacaaggcaaacgtcgcctattgtgggggtgtgatgcaggtgcgaccctgattgcaacagccgccttcaaaggaat

SEQ ID NO: 64432 - DNA, 80 bp, synthetic construct
  source 1..80: mol_type = other DNA
tgccacacgcctgcaggcagttgcacccatgacacctgttggcgttggcatcaacatggacagctaccaagttgaggtgc

SEQ ID NO: 64433 - DNA, 80 bp, synthetic construct
  source 1..80: mol_type = other DNA
cctctttgtccattcttgaacggctgtctgaggcaacaccaataaccacttcagctgtcgaattgttgacgtcaccagcc

SEQ ID NO: 64434 - DNA, 80 bp, synthetic construct
  source 1..80: mol_type = other DNA
cgcggccatctgaatgacataatctttgttacaaaatcggggcttccctctggtatgccattcaccagtgtggtgaattc

SEQ ID NO: 64435 - DNA, 80 bp, synthetic construct
  source 1..80: mol_type = other DNA
acactgtcttggccaacctcaccgccttcggcctacggcccactgctgcagataaaactgacaagattgtgccaacccac

SEQ ID NO: 64436 - DNA, 80 bp, synthetic construct
  source 1..80: mol_type = other DNA
aagcccgtagagctcatgaaagggagagggcagacctgttcaaggagctacctctggtcgatcctgaaataactcaacaa

SEQ ID NO: 64437 - DNA, 80 bp, synthetic construct
  source 1..80: mol_type = other DNA
acaccagtcttcctcaaacgcacattaacttgcacgccacggggaattcggggattgcttgatatcacatcaatcaagcg

SEQ ID NO: 64438 - DNA, 80 bp, synthetic construct
  source 1..80: mol_type = other DNA
acaattcttctggattaaggccaaccgcaccacagatataacctccccccccgcatatgacagggaggcccgaagtgtac

SEQ ID NO: 64439 - DNA, 80 bp, synthetic construct
  source 1..80: mol_type = other DNA
agcttgagaatgcccttgcctatgcctcacaacatggtcatgcagtttttgaggaggttgccgagattgcgaagaagact

SEQ ID NO: 64440 - DNA, 80 bp, synthetic construct
  source 1..80: mol_type = other DNA
ggcaccagccacgatagtcccagtgaagagaccaccaagttagtgtttgaaatggagggtttgggtaaccccaaggggca

SEQ ID NO: 64441 - DNA, 80 bp, synthetic construct
  source 1..80: mol_type = other DNA
agagcccaacaatcaagggcagagtgacgttcctcaagtcaccccgcaggacacaattgggccaacgggggcactactcc

SEQ ID NO: 64442 - DNA, 80 bp, synthetic construct
  source 1..80: mol_type = other DNA
tcccaactcaaatagagacaccgaatgcaatggcacaacgtgttgagcttgccgcggccacaggtgccatatctagcaat

SEQ ID NO: 64443 - DNA, 80 bp, synthetic construct
  source 1..80: mol_type = other DNA
gtcccaaattgcatcagggagtgctttgcagctgtgaccaccataccctggacaactcgacaagcagctaacactttcct

SEQ ID NO: 64444 - DNA, 80 bp, synthetic construct
  source 1..80: mol_type = other DNA
tggtgccatccacctgggaccacgcatcaatccgtacacggcgcaccttagtgcaatgtttgcgggttggtgtggcggct

SEQ ID NO: 64445 - DNA, 80 bp, synthetic construct
  source 1..80: mol_type = other DNA
tccaggtccgggtcaccatgtcaggttctggattgtttgcggggcgtgtcatcacggccattctaccacctggtgtcaac

SEQ ID NO: 64446 - DNA, 80 bp, synthetic construct
  source 1..80: mol_type = other DNA
cagaagtcttacttctacgccatgtggcgtcaggttgtaaagaaaggtaaggaattcttcataccactagtaaagtgcac

SEQ ID NO: 64447 - DNA, 80 bp, synthetic construct
  source 1..80: mol_type = other DNA
cctgcagctgtgcaaaaccctggggtctttccacatgcattcattgatgcccgaacaacggcaccaattttaatcaacct

SEQ ID NO: 64448 - DNA, 80 bp, synthetic construct
  source 1..80: mol_type = other DNA
agccacttatcaacccgttccaggcaacatctgtgtcaacatgctggctgagttttgaaactcgaccagggcctgatttt

SEQ ID NO: 64449 - DNA, 80 bp, synthetic construct
  source 1..80: mol_type = other DNA
gatttctgtttgctcaaggcccccgaacaacaaatggacaatgggatttctcctgctgccctgcttcccaggcgcctggg

SEQ ID NO: 64450 - DNA, 80 bp, synthetic construct
  source 1..80: mol_type = other DNA
acgatcacgtggtaaccgcatgggtggccgcatctcaggactagtcgttgtggcccgtgcggagcaagtcaaccaccact

SEQ ID NO: 64451 - DNA, 80 bp, synthetic construct
  source 1..80: mol_type = other DNA
tttctgcagcatctaccacactaggctggtcaacactacctctggagcccatggcggctgacatctattggcacactgac

SEQ ID NO: 64452 - DNA, 80 bp, synthetic construct
  source 1..80: mol_type = other DNA
acaaacggatctcgagtgcgtgggttggtcagtgctgctggtaagggcatcattttcccaaacatagttaaccattggac

SEQ ID NO: 64453 - DNA, 80 bp, synthetic construct
  source 1..80: mol_type = other DNA
tgatgtggccctctcctccaaaaccactggctccaccaccatgccaacatctgatttttccagttcccctggtgcttccg

SEQ ID NO: 64454 - DNA, 80 bp, synthetic construct
  source 1..80: mol_type = other DNA
gtccgttggtgatgttcaatgacaatggagatgtgaatgaacaagatgtgcgcagtgccatattcaccgttgctgatcag

SEQ ID NO: 64455 - DNA, 80 bp, synthetic construct
  source 1..80: mol_type = other DNA
agtttcaccaacctagccccgacctttgatggggcgggaatgtgggtgtggatgccatgggcaagtaccaaacctggctc

SEQ ID NO: 64456 - DNA, 80 bp, synthetic construct
  source 1..80: mol_type = other DNA
catcatggaagaaaaagttctcagaaccagcagaaattgtgcgacaacttgtcgtacacttttgtgagggcatgcgcaca

SEQ ID NO: 64457 - DNA, 80 bp, synthetic construct
  source 1..80: mol_type = other DNA
tgcagacagcaacatatacatcaacccaacttggatcaatggcagtccaagccatgtcattcaggagaagtgcaccaaca

SEQ ID NO: 64458 - DNA, 80 bp, synthetic construct
  source 1..80: mol_type = other DNA
tgactggcacaaatttccaatttggaggcactggtactaataacatcatgctctgggaagaacaacacttcacttcctgg

SEQ ID NO: 64459 - DNA, 80 bp, synthetic construct
  source 1..80: mol_type = other DNA
ccaccaatcagatggctgttttcaacgtggagacggctggaaattctttccaaattggcattttgcccaacgggtattgt

SEQ ID NO: 64460 - DNA, 80 bp, synthetic construct
  source 1..80: mol_type = other DNA
gtcactaatgccacaattggcacacatcaattgctagattttgaaactagtttcaagtttgttggtctctttcctcaaag

SEQ ID NO: 64461 - DNA, 80 bp, synthetic construct
  source 1..80: mol_type = other DNA
tctttacaagggcctaatgggaactctggacgggccgtcagattccttgaataatgtcttggtttacaggtgctgcaatg

SEQ ID NO: 64462 - DNA, 80 bp, synthetic construct
  source 1..80: mol_type = other DNA
ggtttgggcagcgtggtggacatggctggcaccatttcctccatagttgcccagcacaaacagatcgaactgatgaaaca

SEQ ID NO: 64463 - DNA, 80 bp, synthetic construct
  source 1..80: mol_type = other DNA
agctaaccaaattcaatctgagtgggtccataaacaggaggcacttgccattcgtggccaggatttgacacgtgaactgt

SEQ ID NO: 64464 - DNA, 80 bp, synthetic construct
  source 1..80: mol_type = other DNA
ccatccacggccctgctcttagaatgcaatcccttgttgatgctggttacaacccagtcgacgcacgccggatgttgggg

SEQ ID NO: 64465 - DNA, 80 bp, synthetic construct
  source 1..80: mol_type = other DNA
agcaccgaaaccgttcaatacggcttgatggagcgccccgttctccagcgcagtgtcattactggcatcagcgagacaaa

SEQ ID NO: 64466 - DNA, 80 bp, synthetic construct
  source 1..80: mol_type = other DNA
cagttcagcacgaatgccaactatattaacttgtcactgctggcaaagttgcggcccactgtcttaacaatgatctttca

SEQ ID NO: 64467 - DNA, 80 bp, synthetic construct
  source 1..80: mol_type = other DNA
acatctgcagagtgttcagcaggccttaaatactttcaagaatggcacttcaattggcaccaaacccgctcccattggtt

SEQ ID NO: 64468 - DNA, 80 bp, synthetic construct
  source 1..80: mol_type = other DNA
ttggcaatccaaattatcagtcaaggcctccacatgttaatttgggccacaatccccctatcacaaatctataaatactt

SEQ ID NO: 64469 - DNA, 80 bp, synthetic construct
  source 1..80: mol_type = other DNA
ttctttctttctgtccatggtgctacacgcgttcgggtagttaaatttgattaagcgatcaaagccatgtttaatcttca

SEQ ID NO: 64470 - DNA, 80 bp, synthetic construct
  source 1..80: mol_type = other DNA
acagcacaaaaacacttaccggggatggttggctactatcacagccctcatagaagtttactcaaacctgttccaggata

SEQ ID NO: 64471 - DNA, 80 bp, synthetic construct
  source 1..80: mol_type = other DNA
tcagggtgagtggacgggaggaaatttttgaaacaaaacacgacatgtatgtgcatgtttgtagggttattgctggtgtg

SEQ ID NO: 64472 - DNA, 80 bp, synthetic construct
  source 1..80: mol_type = other DNA
gcgtgagaccgcggtgtctgcagtttctgcaattaccctcgtgtttgagtcactaaaacagtttgttgaagatgtcattg

SEQ ID NO: 64473 - DNA, 80 bp, synthetic construct
  source 1..80: mol_type = other DNA
gccttgtcaagggcaccttccaggcacaaggccccacaaattgtgggtgggctgccattgcagctggtgttatcttgata

SEQ ID NO: 64474 - DNA, 80 bp, synthetic construct
  source 1..80: mol_type = other DNA
ctttttatcgcagggttttgactgtcgacgtgagtgcgcccgacctggaagagtggaagaagaggaaccccggcaagcgg

SEQ ID NO: 64475 - DNA, 80 bp, synthetic construct
  source 1..80: mol_type = other DNA
cccactcctgacctgtaccaagatgacttctcacaccttaagctcatgttgaggccatatttgggttacaacccagacgg

SEQ ID NO: 64476 - DNA, 80 bp, synthetic construct
  source 1..80: mol_type = other DNA
gcctttcagggttggcgcacgtctcaaggtattgttgattttgtggctcaccacatggcagatgtcacgttcccaagtaa

SEQ ID NO: 64477 - DNA, 80 bp, synthetic construct
  source 1..80: mol_type = other DNA
accatggacactatacaagagctgatcaataaaatcaccaaggttgtgccagtgcaagccacactcaatgaaatgcatgc

SEQ ID NO: 64478 - DNA, 80 bp, synthetic construct
  source 1..80: mol_type = other DNA
tgattctctgaaagggggtgttctctactgcttagattattccaagtgggactccacacagaaccctgcagtaacagcag

SEQ ID NO: 64479 - DNA, 80 bp, synthetic construct
  source 1..80: mol_type = other DNA
catccctggcaatattggagaggtttgctgagcctcatccaattgtgtcgtgtgccattgaagccctgtcatcccctgcg

SEQ ID NO: 64480 - DNA, 80 bp, synthetic construct
  source 1..80: mol_type = other DNA
tcgtaggcaattcgagcgtgagcgggccgacctgtttcatgagctcccactagttgatgaagacgcggtcgcacaaccta

SEQ ID NO: 64481 - DNA, 80 bp, synthetic construct
  source 1..80: mol_type = other DNA
tgcgtgcggtggattaccaccgtatggacggcgaagagcccacatgctcgctggggttctgggtgtaccagccactgcta

SEQ ID NO: 64482 - DNA, 80 bp, synthetic construct
  source 1..80: mol_type = other DNA
aacccattttccacaacagcagtttcaacctgttgggtgtcggttgagacgaagccgggtggtgattttgatttctgctt

SEQ ID NO: 64483 - DNA, 80 bp, synthetic construct
  source 1..80: mol_type = other DNA
gctgcgcccaccaggacaacgcatggacaacggcatcacacccgagggtctgttgccgcggcgcttggggtatgcgcgtg

SEQ ID NO: 64484 - DNA, 80 bp, synthetic construct
  source 1..80: mol_type = other DNA
gtaaccgtgttggaggccttgtggtgggcatggtccttgttgcagagcacaagcaagtcaaccggcatttcaattcagat

SEQ ID NO: 64485 - DNA, 80 bp, synthetic construct
  source 1..80: mol_type = other DNA
tctgtcacccttggatggtctaccgcaccagtcaacccaatggcagcagagatagtcacaaacacacctcgcaccagtgc

SEQ ID NO: 64486 - DNA, 80 bp, synthetic construct
  source 1..80: mol_type = other DNA
acgacacgcttggctatccattggtgcgcaaggaaagggaccactttttcccggtatacctaaccactttcccgactcct

SEQ ID NO: 64487 - DNA, 80 bp, synthetic construct
  source 1..80: mol_type = other DNA
cctccacagtagttggtgcaatgaacacatctcttggtggtatgccctcaacaggaatttgtggccctgtaattggtttc

SEQ ID NO: 64488 - DNA, 80 bp, synthetic construct
  source 1..80: mol_type = other DNA
caagacaacggagacgtgtttgaaacagacacaccatcagccatgtttgccacatatgatcccctcacctcaggtgatac

SEQ ID NO: 64489 - DNA, 80 bp, synthetic construct
  source 1..80: mol_type = other DNA
ggttgcactgtccaatacaatcaacccactctctctcgctttggttcgcatatcaaacaatgactttgatgcaaccgggt

SEQ ID NO: 64490 - DNA, 80 bp, synthetic construct
  source 1..80: mol_type = other DNA
tttccaacaataagaatgttgtggctcagatgtcatgggaaatgtattctggcaccaaccaaattcagggcaacgtgact

SEQ ID NO: 64491 - DNA, 80 bp, synthetic construct
  source 1..80: mol_type = other DNA
ccaatgacaggcacaaattacaccttttcctcgtcaggtgctaacacactagtgttgtggcaggagcgcatgcttagctt

SEQ ID NO: 64492 - DNA, 80 bp, synthetic construct
  source 1..80: mol_type = other DNA
caatgagcatcaggccattttgtactcatcacaattggagcgaactgctgagtacttccaaaatgatgtggttaacatac

SEQ ID NO: 64493 - DNA, 80 bp, synthetic construct
  source 1..80: mol_type = other DNA
cccataacacaatggcagttttcaacgtggaaacaaattcggcttcatttcaggttggcatccgtgctgatggctacatg

SEQ ID NO: 64494 - DNA, 80 bp, synthetic construct
  source 1..80: mol_type = other DNA
cggcaggctccctcgtggacactgctggtacaatttccaacattgtgtatcaacagagacaagcagctcaattggaaaaa

SEQ ID NO: 64495 - DNA, 80 bp, synthetic construct
  source 1..80: mol_type = other DNA
cagaatcagctgatggagatgtggatgaacaaacaagaagcactgcaaaaatcccagatggaactgtcacgtgatttggc

SEQ ID NO: 64496 - DNA, 80 bp, synthetic construct
  source 1..80: mol_type = other DNA
tgtcaatggcccggcactccgtgtacaggctgcgttggatgctggcttcgacgctgttagtgctcgaagaatggcaggtt

SEQ ID NO: 64497 - DNA, 80 bp, synthetic construct
  source 1..80: mol_type = other DNA
ccggtgagagggttatatggggcaatttagaccgcccacttatgcatgctggcaccatggacagcatccgtaacaccaaa

SEQ ID NO: 64498 - DNA, 80 bp, synthetic construct
  source 1..80: mol_type = other DNA
caccttgagtccatcagccactcccttgccacgttcaaaaatggcaccccatttggcaaatcagcaccacctcaattcaa

SEQ ID NO: 64499 - DNA, 80 bp, synthetic construct
  source 1..80: mol_type = other DNA
acagggcaggccagctgccacaactgcacaaatccaattaggacctaaacctggtagctccagcgtctaaattcatctta

SEQ ID NO: 64500 - DNA, 80 bp, synthetic construct
  source 1..80: mol_type = other DNA
ttaaattttgttttggcccttgtggtcccacacgcgttcgggtgggttcaatagcggttaagcgaccgctgccactgtgg

SEQ ID NO: 64501 - DNA, 80 bp, synthetic construct
  source 1..80: mol_type = other DNA
agttaaaacaacattcaccgcacagggtccgacggatctgggatgggctgcagtgctagcaggggcagcaatgatcctgc

SEQ ID NO: 64502 - DNA, 80 bp, synthetic construct
  source 1..80: mol_type = other DNA
gtttggttgccacccccacatttacagaggagggtttgctggactctttcctttcaaagccacctgttgacatcaatcct

SEQ ID NO: 64503 - DNA, 80 bp, synthetic construct
  source 1..80: mol_type = other DNA
aagaaacccccccccgatttgtacaagagtgacttcacacaccttcgcctatctgttaggccatttttggggtacaaccc

SEQ ID NO: 64504 - DNA, 80 bp, synthetic construct
  source 1..80: mol_type = other DNA
gggacgcagctaacaggggcgttgcaccccaaaacgcctataaattggctttaaaagatgagttgagaccagttgaaaag

SEQ ID NO: 64505 - DNA, 80 bp, synthetic construct
  source 1..80: mol_type = other DNA
tgaacgaatcactcaaaggtggggtactctactgtcttgattacagcaagtgggattcaacacaacaccccgccgtcacg

SEQ ID NO: 64506 - DNA, 80 bp, synthetic construct
  source 1..80: mol_type = other DNA
gacaattcttgtggatcaaggccaataggacggttgatatcaactcgccaccggcgtacgatcgcgacgcacgtggaatc

SEQ ID NO: 64507 - DNA, 80 bp, synthetic construct
  source 1..80: mol_type = other DNA
tttgacttttgtcttctcaaggccccagagcaggaaatggacaacggtatatctcccgccaacttgctcccccgccgcct

SEQ ID NO: 64508 - DNA, 80 bp, synthetic construct
  source 1..80: mol_type = other DNA
aacaccacgccgggcattagcacacgtggcctgctcagcgccgaaggtaaaggcatcatcttcccaaacatagtcaacca

SEQ ID NO: 64509 - DNA, 80 bp, synthetic construct
  source 1..80: mol_type = other DNA
ctggggcctctggtcccgttgtgatgttccaaaacaatggggacgtgaatgagaccagtgccaacaactgtgtgttaaca

SEQ ID NO: 64510 - DNA, 80 bp, synthetic construct
  source 1..80: mol_type = other DNA
cgtcgcaccccagttgtcagccccgctttcagtgcggaggggcttctagatgcttttgcgtccaaacctccagtggacat

SEQ ID NO: 64511 - DNA, 80 bp, synthetic construct
  source 1..80: mol_type = other DNA
aaggcaaagtcttcacgtccaattacatcatatgcactagtaattaccccacctctgttctgccggagaacccgagggcc

SEQ ID NO: 64512 - DNA, 80 bp, synthetic construct
  source 1..80: mol_type = other DNA
caatcctgacaccacatttcgtgagctgtttggaatagacccacacgagcaattcccattgtccatcactgatttggcca

SEQ ID NO: 64513 - DNA, 80 bp, synthetic construct
  source 1..80: mol_type = other DNA
aaactgtgttggctaacctcagtgcctttggtctgcggcccaccgctgccgataaaacagataaaatagcacccacccac

SEQ ID NO: 64514 - DNA, 80 bp, synthetic construct
  source 1..80: mol_type = other DNA
gcgatcccggggtaaccgcctcggtggccgtgtcgtggggttggttgtggtggctgcggccgagcaagtcaaccaccatt

SEQ ID NO: 64515 - DNA, 80 bp, synthetic construct
  source 1..80: mol_type = other DNA
gcatcgcatgacttcacatcattatcccaaacttttgatgcagcagggttgtgggtttggatgccatggacccgaaacag

SEQ ID NO: 64516 - DNA, 80 bp, synthetic construct
  source 1..80: mol_type = other DNA
caagtttccatttatttaatcttctttgcttttcttttcttttcctatggtaccacacgcgttcgggtggataattgtgg

SEQ ID NO: 64517 - DNA, 80 bp, synthetic construct
  source 1..80: mol_type = other DNA
gactggatcatggggaagattcgcgacgcgcgccattcttccatgtgcaaacagttccttagccgtgtgtctgcactgtt

SEQ ID NO: 64518 - DNA, 80 bp, synthetic construct
  source 1..80: mol_type = other DNA
acatggggtacaaccctgacggggatactctagctggcaaacgcgtgaagcccaccccaatcaccatagctgggcttcat

SEQ ID NO: 64519 - DNA, 80 bp, synthetic construct
  source 1..80: mol_type = other DNA
tcaggggaggtccggggcatttggatcactgtgccccggcgtagtgtgcaaacagcccttgttgctgttaagaagttttg

SEQ ID NO: 64520 - DNA, 80 bp, synthetic construct
  source 1..80: mol_type = other DNA
tgcgcacccgccacctggtgctccacttttgcacatcaagaatgcacatcttgaagtagaccacactggccaagctgtca

SEQ ID NO: 64521 - DNA, 80 bp, synthetic construct
  source 1..80: mol_type = other DNA
cccatggatttcattgggggtttaaggcaccaccttggctttagttcaattcctggtctgtggcgtgcccttaagcatct

SEQ ID NO: 64522 - DNA, 80 bp, synthetic construct
  source 1..80: mol_type = other DNA
gagtgtgatggtgcccatgttgggtgcggggtacaccttgggaacgggcgcgtagtgacagtcacccatgtggccacatc

SEQ ID NO: 64523 - DNA, 80 bp, synthetic construct
  source 1..80: mol_type = other DNA
ttgggaacgggcgcgtagtgacagtcacccatgtggccacatcatctaacactgtgaacgggctaccatttaaggtcaag

SEQ ID NO: 64524 - DNA, 80 bp, synthetic construct
  source 1..80: mol_type = other DNA
actgacggggagacttgccaagtttatgccactctaggtaacttgccacactaccagcttggggatggtgcgcctgttta

SEQ ID NO: 64525 - DNA, 80 bp, synthetic construct
  source 1..80: mol_type = other DNA
gctggcgcaacgagttgctgagaaaccacaaacaggggatgcattcgtctggaagggattgcccgttgttcgtggtagtg

SEQ ID NO: 64526 - DNA, 80 bp, synthetic construct
  source 1..80: mol_type = other DNA
aggaagttccaggggtgcctccagcattacttaatagagctattgttcacactcgcaattacctacaatcaataattggg

SEQ ID NO: 64527 - DNA, 80 bp, synthetic construct
  source 1..80: mol_type = other DNA
gaacagggtaagaggcgcctgctgtggggtgctgatgctgggcttactctcgtgtgttgtgctgctctcaaaccagcagc

SEQ ID NO: 64528 - DNA, 80 bp, synthetic construct
  source 1..80: mol_type = other DNA
atgagtcccttaaggggcgtgtgctttatgcattagattatagcaagtgggacagcacccaatctgcagctgtgacagca

SEQ ID NO: 64529 - DNA, 80 bp, synthetic construct
  source 1..80: mol_type = other DNA
ctgcgcagctcgaggtggcattggcctatgccagtcaacatggtcatgagttcttcaacaaagcacgtgaaatcgctgag

SEQ ID NO: 64530 - DNA, 80 bp, synthetic construct
  source 1..80: mol_type = other DNA
acaccaacccaaaaattggctactactgggaggttggtgctgaccagcgtggcccgctttttccaaacattgttaatcat

SEQ ID NO: 64531 - DNA, 80 bp, synthetic construct
  source 1..80: mol_type = other DNA
tggacgcggcacagtcagagaagcatttgatccatccacaatgcatctggtccgcactaatggcaccactcaaccatctg

SEQ ID NO: 64532 - DNA, 80 bp, synthetic construct
  source 1..80: mol_type = other DNA
agtctaggggcaatttgacttcgttgtcaaacgcccttgccacttaccaaaaaggcactcaatttggactcaaacaaccc

SEQ ID NO: 64533 - DNA, 80 bp, synthetic construct
  source 1..80: mol_type = other DNA
ctgccacccccacattcacagaggagggtttgctggactcattcctttcaaagccacctgttgacatcaatcctgacaca

SEQ ID NO: 64534 - DNA, 80 bp, synthetic construct
  source 1..80: mol_type = other DNA
acattccgtgagctattcggcattgatccacacgaacaattcccattgtccatccacgatttggcaagattacagggtga

SEQ ID NO: 64535 - DNA, 80 bp, synthetic construct
  source 1..80: mol_type = other DNA
tgaaaccatcaacgatctcgatgatcatgttaggggtgtggtggctagactgtggtgcaagcatctgcatcgcagtttgg

SEQ ID NO: 64536 - DNA, 80 bp, synthetic construct
  source 1..80: mol_type = other DNA
aaagcataccaagggtggcacagctccgcgacaattttggagtttttgtccaagcacatggaagatgttgcattcccctc

SEQ ID NO: 64537 - DNA, 80 bp, synthetic construct
  source 1..80: mol_type = other DNA
ggagccagacacgcacgacgcggtggagtgagcttgtcggatgatgagtatgatgagtggcgcgacctcgtgcgcgattg

SEQ ID NO: 64538 - DNA, 80 bp, synthetic construct
  source 1..80: mol_type = other DNA
accagacgggcacacgaacacaaatgtctacatcactccaacttggattaatggtaaccctgcccgcccaatacatgaga

SEQ ID NO: 64539 - DNA, 80 bp, synthetic construct
  source 1..80: mol_type = other DNA
ttcacatctttcccagatgccgcagaggtgtactgttcacaattggagagcacagcagaaatgttccagaataatgtggt

SEQ ID NO: 64540 - DNA, 80 bp, synthetic construct
  source 1..80: mol_type = other DNA
aaggcaaagtcttcacatccaactacattatatgtactagcaattaccccacttctgtcttgccagaaaacccaagagct

SEQ ID NO: 64541 - DNA, 80 bp, synthetic construct
  source 1..80: mol_type = other DNA
cccaaagggaccaacaggttgtggaacaggtcgttaccccccaggacaccattggaccaacgagtgcacttctattgccc

SEQ ID NO: 64542 - DNA, 80 bp, synthetic construct
  source 1..80: mol_type = other DNA
caactgcatccgagagtgttttgccgcggttaccacaataccatggaccaccaggcaagcagcaaacacctttctcggtg

SEQ ID NO: 64543 - DNA, 80 bp, synthetic construct
  source 1..80: mol_type = other DNA
gagcagcaggtccggtggtcatgtttgaaaacaatggagatgtcaatgagtccactgcaaaccatggcatactaaccgct

SEQ ID NO: 64544 - DNA, 80 bp, synthetic construct
  source 1..80: mol_type = other DNA
gatgatttgatctttcaaagcaatcaaattttcatttattcaggttcttcttgcttttcttttcttttcccatggtgcca

SEQ ID NO: 64545 - DNA, 80 bp, synthetic construct
  source 1..80: mol_type = other DNA
aaattttcatttattcaggttcttcttgcttttcttttcttttcccatggtgccacacgcgttcgggtggacaattgtgg

SEQ ID NO: 64546 - DNA, 80 bp, synthetic construct
  source 1..80: mol_type = other DNA
gtgattggttagatggcttccaagccatacaagccaattactctcaaccccacttttgagtggggggtcttccttaggtg

SEQ ID NO: 64547 - DNA, 80 bp, synthetic construct
  source 1..80: mol_type = other DNA
caagatggcagggtgtccaggggttattggcatgtggtcaaagatcttgaagatttgtggaggcataaccacgataactg

SEQ ID NO: 64548 - DNA, 80 bp, synthetic construct
  source 1..80: mol_type = other DNA
ccgcggcccgaggcattcgttggttgaaagagctctatgaggaagcagaaggccgtcggctcactaaaatgtacatggcc

SEQ ID NO: 64549 - DNA, 80 bp, synthetic construct
  source 1..80: mol_type = other DNA
cgtggggcagcactaatagaacttgcagctagcaaagaagtcaccggtgtcgacgagttgaaaggcctgcttgagtgctt

SEQ ID NO: 64550 - DNA, 80 bp, synthetic construct
  source 1..80: mol_type = other DNA
caccgtgctcattgaggaaggcaccgaattgatgcacaaatttggcacaagcccactagccggtttaatcagaacgtacg

SEQ ID NO: 64551 - DNA, 80 bp, synthetic construct
  source 1..80: mol_type = other DNA
tgtctgagcttgaggcacaagccaataacatcagatcgacgatcaagctagatactccaaggcaagttccgactgtggta

SEQ ID NO: 64552 - DNA, 80 bp, synthetic construct
  source 1..80: mol_type = other DNA
atcctcacaggacctccaggcattggtaagaccaaattggcccagtacatcggtcaacggtttggtaaaacgtcgaattt

SEQ ID NO: 64553 - DNA, 80 bp, synthetic construct
  source 1..80: mol_type = other DNA
ctctgtggctgtcgaccaccacgatggttacactggcaacaaggtgtgcatatgggatgaatttgacgttgactcaaaag

SEQ ID NO: 64554 - DNA, 80 bp, synthetic construct
  source 1..80: mol_type = other DNA
cctacgtcgagcatgccaccagggccccctcggtaacctataggttcactgaggagggcctccttgacatgttcggcact

SEQ ID NO: 64555 - DNA, 80 bp, synthetic construct
  source 1..80: mol_type = other DNA
gggtgtttgtggaaacaatgatagggattgccaacactgctcctttcccactaaattgtgatagagttgaaaataaaggt

SEQ ID NO: 64556 - DNA, 80 bp, synthetic construct
  source 1..80: mol_type = other DNA
cgcgtgttcacgtcggattacgtgatatgcacctcaaattaccccacctcggtaatcccagagaatccacgtgctgcagc

SEQ ID NO: 64557 - DNA, 80 bp, synthetic construct
  source 1..80: mol_type = other DNA
cttctaccgcagggtcatcatcgtagacgtctctgccccggaccttgaggaatggaagaagaggaacccaggcaaacggc

SEQ ID NO: 64558 - DNA, 80 bp, synthetic construct
  source 1..80: mol_type = other DNA
ccacacctgacctgtaccaagatgatttctcccacttgaaattgatgttgcggccgtaccttggttacaacccagagggt

SEQ ID NO: 64559 - DNA, 80 bp, synthetic construct
  source 1..80: mol_type = other DNA
gatacccttgagggtaatagggtgcgaccaactcaaattagcataggaaaccttgttacccttatggaaaagagatttaa

SEQ ID NO: 64560 - DNA, 80 bp, synthetic construct
  source 1..80: mol_type = other DNA
ggagcagtctggggatcttcaaaatttgtggttacaagttccaaagactatggttgagcagtccaccaacatggttaaga

SEQ ID NO: 64561 - DNA, 80 bp, synthetic construct
  source 1..80: mol_type = other DNA
catttatgtatgccaaccgcgctgtttgcagcgtgatccccaaccccgcctcaagagacatcaccgaaactgcactttct

SEQ ID NO: 64562 - DNA, 80 bp, synthetic construct
  source 1..80: mol_type = other DNA
aaggtgttcatatgcggcaccgcacccccccccgagttcgttgggaaacacatagtgatcaccggtcttgagcctgggga

SEQ ID NO: 64563 - DNA, 80 bp, synthetic construct
  source 1..80: mol_type = other DNA
agcgtcgctggcaaactccctcttgtccatgttcaccaccaccacacgtttgtcagcatccacacagcgcgagtacatgt

SEQ ID NO: 64564 - DNA, 80 bp, synthetic construct
  source 1..80: mol_type = other DNA
accgtgtgtggagtcccatgattcacatacaagatcggtccatcaacacacagaatcttccatatgtcaatagggtcata

SEQ ID NO: 64565 - DNA, 80 bp, synthetic construct
  source 1..80: mol_type = other DNA
aagccaccagacaatatacaagaaagtacactatttcgggagctatttggtgtggatgcagctgatcagttcccattgtc

SEQ ID NO: 64566 - DNA, 80 bp, synthetic construct
  source 1..80: mol_type = other DNA
cctgtaacatcacactgggactttcttaggggactacgacaccaccttgggttttcatcaatccctggtatgtggcgggc

SEQ ID NO: 64567 - DNA, 80 bp, synthetic construct
  source 1..80: mol_type = other DNA
cttccagggctggagaacgtcacaaggcataatagactttgtagcaaaccatatggcagatgtcacatttccaagcaacc

SEQ ID NO: 64568 - DNA, 80 bp, synthetic construct
  source 1..80: mol_type = other DNA
ctgagtgcacaatattcaggaccccagatgccgatgtggtgttttatacctttggttcatatgtctgttttgcctcgccc

SEQ ID NO: 64569 - DNA, 80 bp, synthetic construct
  source 1..80: mol_type = other DNA
gccagagtcccatttgtgggtgtgccaccacctagtgtacattctaatgttcctcactgtatgacttggggtgaaaccct

SEQ ID NO: 64570 - DNA, 80 bp, synthetic construct
  source 1..80: mol_type = other DNA
tgccctattttgtgaggtggcggttgaattcatgttacactttggacctgtaatactatctgcagccaacattgcctacc

SEQ ID NO: 64571 - DNA, 80 bp, synthetic construct
  source 1..80: mol_type = other DNA
tcgtcacccgcggttccaggtctgaggaagccaaaggaaaaaccaagcacggccgcggcatgagacatggccaccgtgca

SEQ ID NO: 64572 - DNA, 80 bp, synthetic construct
  source 1..80: mol_type = other DNA
ggagtgagtttgtctgatgacgagtacgacgaatggcgagatctaatgagggactggagaagggacatgagcgtcaacga

SEQ ID NO: 64573 - DNA, 80 bp, synthetic construct
  source 1..80: mol_type = other DNA
tttcctcatgttgagggaaagatcagcactcggtatggatgatgaggatgttgcgcgttaccgcgcttggcttgaagtcc

SEQ ID NO: 64574 - DNA, 80 bp, synthetic construct
  source 1..80: mol_type = other DNA
gtgcaatgcgcctcgctggtggagcttacacccacgccaccatcatcggtcgtggaggggtgagggatgaaatcatacgc

SEQ ID NO: 64575 - DNA, 80 bp, synthetic construct
  source 1..80: mol_type = other DNA
acagcaccccgcagagcaccagccagaccaccccctagctatgaagaggaaggcccaactgctgtggtggaatttaccat

SEQ ID NO: 64576 - DNA, 80 bp, synthetic construct
  source 1..80: mol_type = other DNA
attgacagaccttgcacgcctccagggtgagcttgttgatgcgacgcgtacgcctggccatgcactacgtcaaaagtaca

SEQ ID NO: 64577 - DNA, 80 bp, synthetic construct
  source 1..80: mol_type = other DNA
ggatggtgatcacattggctatggagtacacgtgggcaacggtaacgtggtgactgtcacccatgtggcttctacttcaa

SEQ ID NO: 64578 - DNA, 80 bp, synthetic construct
  source 1..80: mol_type = other DNA
atcttgttgacggtcaccctttcaaggtgcatcgcacccttggagaaacaacttgggtgcatgcaccactttctggacta

SEQ ID NO: 64579 - DNA, 80 bp, synthetic construct
  source 1..80: mol_type = other DNA
ccacacatgcaagtgggggggggcacgcctgtgtactttaccaacaggcttcacccggtacttactatatctgagtggac

SEQ ID NO: 64580 - DNA, 80 bp, synthetic construct
  source 1..80: mol_type = other DNA
gggcacgcctgtgtactttaccaacaggcttcacccggtacttactatatctgaggggacgtttgagaccccaaacataa

SEQ ID NO: 64581 - DNA, 80 bp, synthetic construct
  source 1..80: mol_type = other DNA
gtttgagaccccaaacataacagtaaagggttaccacgtacgcatcaccaatggataccccacaaagaaaggtgattgtg

SEQ ID NO: 64582 - DNA, 80 bp, synthetic construct
  source 1..80: mol_type = other DNA
gtttaccatactttaatgcccaccgccaacttgttgccctgcacgctggtactgacacccagggtgagacaaaagttgca

SEQ ID NO: 64583 - DNA, 80 bp, synthetic construct
  source 1..80: mol_type = other DNA
cagcgggttcccaaggatgccacagttgagagtgagtttcagtggaaaggattgcctgtcgttaaatctgacatagatgt

SEQ ID NO: 64584 - DNA, 80 bp, synthetic construct
  source 1..80: mol_type = other DNA
tttcagtggaaaggattgcctgtcgttaaatctgacatagatgttggggggatgccaactgggactcgataccaccggtc

SEQ ID NO: 64585 - DNA, 80 bp, synthetic construct
  source 1..80: mol_type = other DNA
tggggggatgccaactgggactcgataccaccggtcccctgcgtggccagaagaacaacccggcgagacccatgcacctg

SEQ ID NO: 64586 - DNA, 80 bp, synthetic construct
  source 1..80: mol_type = other DNA
ccccatttggagcgggtgacaagagatacaccttttcacaaactgagatgctggtgaacgggttaaagccgtatactgaa

SEQ ID NO: 64587 - DNA, 80 bp, synthetic construct
  source 1..80: mol_type = other DNA
acaacgcctggcataccccctcaactgcttgcacgtgcagtgacccatgttcgcagctacatagagaccattattggaac

SEQ ID NO: 64588 - DNA, 80 bp, synthetic construct
  source 1..80: mol_type = other DNA
ccacaggtcccctgttctcacattccaccaagctagtgagttattagaacgtgccacatcctgtgggccatttatacaag

SEQ ID NO: 64589 - DNA, 80 bp, synthetic construct
  source 1..80: mol_type = other DNA
ccctatccacaataaaccaattggtggaaaagataaccaagctagttcccgtacaggctaccttaaatgagatgcatgcg

SEQ ID NO: 64590 - DNA, 80 bp, synthetic construct
  source 1..80: mol_type = other DNA
gcttaaaaggtgattactgggatgaagaagagcaagcatacaagggcctgcttggtgaccaccttagggatgcgtgggac

SEQ ID NO: 64591 - DNA, 80 bp, synthetic construct
  source 1..80: mol_type = other DNA
aaagcatgtaaaggagttgcccccaaaaacgcttacaagttggccttgaaagatgagctgcgccccatagaaaagaacaa

SEQ ID NO: 64592 - DNA, 80 bp, synthetic construct
  source 1..80: mol_type = other DNA
aatggggaagagacgcctgctctggggttgcgacgcagccacaacattggttgccactgctgccttcaaggcagtcgcaa

SEQ ID NO: 64593 - DNA, 80 bp, synthetic construct
  source 1..80: mol_type = other DNA
ctaggcttcaagcagtcaccccaatgacccctgttgcggtgggaattaacatggactctgttcaaatgcaagtgatgaat

SEQ ID NO: 64594 - DNA, 80 bp, synthetic construct
  source 1..80: mol_type = other DNA
gactcgttaactggtggtgtactgtactgcttggattattcaaaatgggattcaactcaaaaccctgccgtcacagcggc

SEQ ID NO: 64595 - DNA, 80 bp, synthetic construct
  source 1..80: mol_type = other DNA
gtccctggccatccttgaaagattttctgaacctcacccaatcgtgtcatgtgccattgaggccctgtcctctccagcta

SEQ ID NO: 64596 - DNA, 80 bp, synthetic construct
  source 1..80: mol_type = other DNA
tcggttacatcaatgatattaaatttataacccgagggggtttaccatcaggaatgccttttacatcagtggttaattcg

SEQ ID NO: 64597 - DNA, 80 bp, synthetic construct
  source 1..80: mol_type = other DNA
ctcaatcacatgatatacattgctgctgctgttttgcaggcatatgaggaacatcatgttccctatactgggaacgtttt

SEQ ID NO: 64598 - DNA, 80 bp, synthetic construct
  source 1..80: mol_type = other DNA
ccaaattgaaaccatccacacttatggtgatgattgcatgtatagtttttgccctgccactgcgtccatattccaaaccg

SEQ ID NO: 64599 - DNA, 80 bp, synthetic construct
  source 1..80: mol_type = other DNA
tattggccggtttaatccggtttggtcttaaacccacggccgcagataaaagtgacagcatcaagccaactacaacacca

SEQ ID NO: 64600 - DNA, 80 bp, synthetic construct
  source 1..80: mol_type = other DNA
cgcagacagtacgagcgtgagcgtgcagacttgtttcttgagctccccttggtggatgaggaggttatcaaacaacccaa

SEQ ID NO: 64601 - DNA, 80 bp, synthetic construct
  source 1..80: mol_type = other DNA
gtgtttttgaagagaacgttcacccaaacagcccaaggggtgagagcgttgttggatctgtcatccatcaccaggcaatt

SEQ ID NO: 64602 - DNA, 80 bp, synthetic construct
  source 1..80: mol_type = other DNA
ttactggttaaaggcaaacaggacctcagacccaacgagtcctcctgcgtttgatcgccaggcgcggagcgcacagttgg

SEQ ID NO: 64603 - DNA, 80 bp, synthetic construct
  source 1..80: mol_type = other DNA
agaatgcactggcgtttgcctcccagcatggtccactggcttttgacaaggtccgtgaaatagccatcaagacggcagaa

SEQ ID NO: 64604 - DNA, 80 bp, synthetic construct
  source 1..80: mol_type = other DNA
ggtgaggggttggtgttggtcaacaccaactatgatcacgccctcgccacctataatgcttggttcataggtggtacagt

SEQ ID NO: 64605 - DNA, 80 bp, synthetic construct
  source 1..80: mol_type = other DNA
gcctgacccagaacgccccaatgaaggtgcgtccaaagtagtgtttgagatggagggcaatggctcccaaccgcctcaga

SEQ ID NO: 64606 - DNA, 80 bp, synthetic construct
  source 1..80: mol_type = other DNA
aaggttctggcaacactaacccgaatgttgacccgcctggcacaactggtccgaccacatcccatcttgttgtttctaat

SEQ ID NO: 64607 - DNA, 80 bp, synthetic construct
  source 1..80: mol_type = other DNA
ccggaacaacccaatgggcccgcgcagcgcctggaaatggctgttgctactgggtcaatccaatcaaatgtccctgatgc

SEQ ID NO: 64608 - DNA, 80 bp, synthetic construct
  source 1..80: mol_type = other DNA
aatacgcaacagctttgcagtctatcgtacttttgcttggaatgatagaatgcccacaggaacttatcttggatctgttt

SEQ ID NO: 64609 - DNA, 80 bp, synthetic construct
  source 1..80: mol_type = other DNA
cactccatcccaacattaacccgtacaccggtcacctctccgccatgtgggcagggtggggaggtagctttgatgtccgt

SEQ ID NO: 64610 - DNA, 80 bp, synthetic construct
  source 1..80: mol_type = other DNA
ctttccatctctggctctggcatttttgcagggcgtatcattgcttctgtcatcccgcccggggttgacccgacttcaat

SEQ ID NO: 64611 - DNA, 80 bp, synthetic construct
  source 1..80: mol_type = other DNA
gacctacttttacactatgtggaggcaagtggtgaagaaaggtaaggcttacttctgtccactcatcaagaccagtgcat

SEQ ID NO: 64612 - DNA, 80 bp, synthetic construct
  source 1..80: mol_type = other DNA
ccgcgacccgggtgttttgcctcatgcttttgttgatgcacgcattgtggagccagtatcatttgtagtccctgacgtcc

SEQ ID NO: 64613 - DNA, 80 bp, synthetic construct
  source 1..80: mol_type = other DNA
gggcggttgattaccacagaatggacggtactgagcctacatgttcacttgggttttgggtgtaccaacccctgctcaac

SEQ ID NO: 64614 - DNA, 80 bp, synthetic construct
  source 1..80: mol_type = other DNA
cctttctccaccaccgccttgtccacctgttgggtgtcagtggaaaccaaacctgggggtgactttgacttctgcttgct

SEQ ID NO: 64615 - DNA, 80 bp, synthetic construct
  source 1..80: mol_type = other DNA
caaaccacctggccagcagatggagaatggagtttcaccagagggccttcttcccagaagacttggttatgcacggagga

SEQ ID NO: 64616 - DNA, 80 bp, synthetic construct
  source 1..80: mol_type = other DNA
accgtgttgggggtcttgcagtgggtatggttgttgtggcagaccataggcaggtcaacagacactttaatgcacagtca

SEQ ID NO: 64617 - DNA, 80 bp, synthetic construct
  source 1..80: mol_type = other DNA
gtcacatatggttggtcaactgcacctgtcaacccaatggcagcggagatagtcacaaggaatggtcatgctggctcagg

SEQ ID NO: 64618 - DNA, 80 bp, synthetic construct
  source 1..80: mol_type = other DNA
tggcaacatcaggaatgcatggttgttggtgggctctcagaacaaaggcccgctaatcccgggtatgcccaaccacttcc

SEQ ID NO: 64619 - DNA, 80 bp, synthetic construct
  source 1..80: mol_type = other DNA
cagattcgtgcgcatccacaatcaacggcgctctggacactagcagtggtcgcccgtcaactggtgtatgtgggccagct

SEQ ID NO: 64620 - DNA, 80 bp, synthetic construct
  source 1..80: mol_type = other DNA
atagggttccaaaacaatggtgatgtctttgagaacaagaccccttcagtcatgtttgcaacatacaatcccctcactag

SEQ ID NO: 64621 - DNA, 80 bp, synthetic construct
  source 1..80: mol_type = other DNA
tggcccaacggtagccctttatgattctctcaaccccgcctcacttgcacttgttaggattgagtccaaccaggattttc

SEQ ID NO: 64622 - DNA, 80 bp, synthetic construct
  source 1..80: mol_type = other DNA
ggcgaactcgtgtcagttcagtgacagagcccatcaaggagttcgtcatagcattttgccaagcagttcaaaaggaaatg

SEQ ID NO: 64623 - DNA, 80 bp, synthetic construct
  source 1..80: mol_type = other DNA
ctgatggtgggtttgacaatgataaaaatgtggtagttgaaatgtcctgggaaatgttccgggattcatcccaaattttt

SEQ ID NO: 64624 - DNA, 80 bp, synthetic construct
  source 1..80: mol_type = other DNA
gataaggtgacaccaatgcagggtaccaattttgttttcacttcatctggggcaaacaacattgtgctttggaaagagcg

SEQ ID NO: 64625 - DNA, 80 bp, synthetic construct
  source 1..80: mol_type = other DNA
gctgctgagttacaccaaccaggcagccatattgtactcatcccagcttgagcgcactgcagagtattttcaaaatgaca

SEQ ID NO: 64626 - DNA, 80 bp, synthetic construct
  source 1..80: mol_type = other DNA
cagtaaacataccccaggggtatatggcagtctttaatgtggaatcaaactctgcatcctttcaagttgggatacgccct

SEQ ID NO: 64627 - DNA, 80 bp, synthetic construct
  source 1..80: mol_type = other DNA
gatgggtacatggttaccggtggcactgttggcacacatgttgagcttgaccctgaaactcgctttcaatatgttggaat

SEQ ID NO: 64628 - DNA, 80 bp, synthetic construct
  source 1..80: mol_type = other DNA
cctccccctctccgctgcacttactgggcccaatgggaactcgggtcgggccaggagacttttccaatgagttggttagt

SEQ ID NO: 64629 - DNA, 80 bp, synthetic construct
  source 1..80: mol_type = other DNA
tggtgcacttcagactgccggttcacttgtggacatggcagggaccatctctggcatagtttaccagcaacgccaggctg

SEQ ID NO: 64630 - DNA, 80 bp, synthetic construct
  source 1..80: mol_type = other DNA
cgcagttggagcgccaaaaccagcttatggaacagtggatgactaaacaagaaacacttcaaagggatcaaatggcacta

SEQ ID NO: 64631 - DNA, 80 bp, synthetic construct
  source 1..80: mol_type = other DNA
acccgtgacctgtcaatcaatggcccagctgagagggttaatgccgcaatcaatgcgggctttgacccggtcagtgcacg

SEQ ID NO: 64632 - DNA, 80 bp, synthetic construct
  source 1..80: mol_type = other DNA
taggttggctggttctcaagagcgagtaatttatgggaatttagatagaccaattgctcacattggaacaatggatggca

SEQ ID NO: 64633 - DNA, 80 bp, synthetic construct
  source 1..80: mol_type = other DNA
ggagtcaatcctcagtacctccagctagcttggttacagaagttgaagcccacaactttaactattattctgcagcaaca

SEQ ID NO: 64634 - DNA, 80 bp, synthetic construct
  source 1..80: mol_type = other DNA
ttagggccactagacacctagaatctatgaatgctgcactctcaacattcaagcaaggaacaccatttggaaaaccagcc

SEQ ID NO: 64635 - DNA, 80 bp, synthetic construct
  source 1..80: mol_type = other DNA
cctccaaagtacacaactggccgcccgtccaacacaggtgccacaataaatttgaatcacaccccgggcagttcaaatgt

SEQ ID NO: 64636 - DNA, 80 bp, synthetic construct
  source 1..80: mol_type = other DNA
ttaaaattttcttttcccaaaatgtgatgccacacgcgttcgggtggttaaatgtggttaagcgaccacagtcacacact

SEQ ID NO: 64637 - DNA, 80 bp, synthetic construct
  source 1..80: mol_type = other DNA
ctacctcagggtagagcctagggaagagttttgtgagagcatacaagatttgaagttttattttgacaggcgcattagcg

SEQ ID NO: 64638 - DNA, 80 bp, synthetic construct
  source 1..80: mol_type = other DNA
caaacataccgtttctgggtggctagcaacaatgacagctcttgtggaggtgtattctagcctctttgacgatttgagga

SEQ ID NO: 64639 - DNA, 80 bp, synthetic construct
  source 1..80: mol_type = other DNA
agtcctctgtcactataatttccagcatcggcgcgttctttgatatgtgcaaggacttcattggagaagtgataggacta

SEQ ID NO: 64640 - DNA, 80 bp, synthetic construct
  source 1..80: mol_type = other DNA
gtaaaatccacattcactgcccaaggaccaaccgacttagggtgggcagcagtgctagctggtgctgcaatgattttact

SEQ ID NO: 64641 - DNA, 80 bp, synthetic construct
  source 1..80: mol_type = other DNA
ctacagaaactggtcactaaaatcacaagggtggtacctgtccaggccaccctgcaagacatgcatgagcggcgcgattt

SEQ ID NO: 64642 - DNA, 80 bp, synthetic construct
  source 1..80: mol_type = other DNA
gtgattggttcgatggcttccaagccattaaagccaatagttctcaacccattctttgaatgggagttcttccggagggc

SEQ ID NO: 64643 - DNA, 80 bp, synthetic construct
  source 1..80: mol_type = other DNA
tgaaaatgtcaggttgccctggggtccttggcatgtggaccaaaatactaaaaatgtgtggtgcaatcacatcaatcaca

SEQ ID NO: 64644 - DNA, 80 bp, synthetic construct
  source 1..80: mol_type = other DNA
gccgcagcccgtggaatcaagtggctgagggagctgtatgaggaagcagaaggccgcagactggcaaagatgtacatggc

SEQ ID NO: 64645 - DNA, 80 bp, synthetic construct
  source 1..80: mol_type = other DNA
ccgtggcgctgctcttatagagttagcagccagtcgggaggttactggggtgaacgagcttaaagggttgcttgactgct

SEQ ID NO: 64646 - DNA, 80 bp, synthetic construct
  source 1..80: mol_type = other DNA
tcaatatactaattgaagaggggactgagctcattcataagtttggtaccagtcccctagcaggtctcatccgaacttat

SEQ ID NO: 64647 - DNA, 80 bp, synthetic construct
  source 1..80: mol_type = other DNA
gtttcggaattggaagcacaggcaaacaacattaggtcaacaatcaaacttgacaccccaagagatgttcctgtcgttgt

SEQ ID NO: 64648 - DNA, 80 bp, synthetic construct
  source 1..80: mol_type = other DNA
catccttacaggaccccctggtataggcaaaactagattggcacagttcataggacagcgatttggtaagatatcaaact

SEQ ID NO: 64649 - DNA, 80 bp, synthetic construct
  source 1..80: mol_type = other DNA
tttcagtggctgtggaccaccacgatggatacactggcaacaccgtgtgtatatgggatgagtttgatgtagattcaaag

SEQ ID NO: 64650 - DNA, 80 bp, synthetic construct
  source 1..80: mol_type = other DNA
cctggtacaagcatgtcaccaggcccctatctgtatgctcgtttacagaggaggggctccttgacatgtttgcaagtaag

SEQ ID NO: 64651 - DNA, 80 bp, synthetic construct
  source 1..80: mol_type = other DNA
tcgtgtgttcagctccaactatgtcatttgcacttctaactaccctacttcagtgattccagacaaccctcgtgccgcag

SEQ ID NO: 64652 - DNA, 80 bp, synthetic construct
  source 1..80: mol_type = other DNA
cattctaccggagggttatcatagttgatgtttctgcccctgacttagatgagtggaagaagaaaaatccaggaaagaaa

SEQ ID NO: 64653 - DNA, 80 bp, synthetic construct
  source 1..80: mol_type = other DNA
cccacacaggatctataccaagatgattactcacacctgaaactcatgctcagaccttaccttgggtataatcctgaggg

SEQ ID NO: 64654 - DNA, 80 bp, synthetic construct
  source 1..80: mol_type = other DNA
agacacacttgaaggaaaccgtgtcaagccaacgccaatatcaatcgctggtctcatcacactaatggaaaggcgattta

SEQ ID NO: 64655 - DNA, 80 bp, synthetic construct
  source 1..80: mol_type = other DNA
aggaacagggcggttcactgcaaaatttgtggcttcaggtaccaaaatcaactgtggaacaagcgaccaacatggtgcgt

SEQ ID NO: 64656 - DNA, 80 bp, synthetic construct
  source 1..80: mol_type = other DNA
gcctttatgtatgccaaccgggctgtgtgtgacattatccccaacccagcaacacgggatataactgagacagcactatc

SEQ ID NO: 64657 - DNA, 80 bp, synthetic construct
  source 1..80: mol_type = other DNA
aaagatctttatttgtgacacagccccaaccccagaattcgttggccgccatgttgtcgctactggtctggagacgtctg

SEQ ID NO: 64658 - DNA, 80 bp, synthetic construct
  source 1..80: mol_type = other DNA
acgcatcacttgcaaactcgcttttgtcaatgttcacaaccaacactaggctatcagcagccgcccaaagggagttcatg

SEQ ID NO: 64659 - DNA, 80 bp, synthetic construct
  source 1..80: mol_type = other DNA
tataaggtttggcagcccatgatacacatacaagataggtccatcaacactcagaatctgccgtatgttaatagagtcat

SEQ ID NO: 64660 - DNA, 80 bp, synthetic construct
  source 1..80: mol_type = other DNA
acctgtgacttcacactgggactttctgcgtggcatccgacaccaccttgggttctcttcaatcccggggatgtggcgag

SEQ ID NO: 64661 - DNA, 80 bp, synthetic construct
  source 1..80: mol_type = other DNA
ccaccagtagaggtcgacgaaggtgcgctctttcgcgacttattcggggttgacccaaaagaacagcgagcgatgtcact

SEQ ID NO: 64662 - DNA, 80 bp, synthetic construct
  source 1..80: mol_type = other DNA
cgttccaaggctggcggacttcacagggcattgtggattttctggcaaaccatatgggtgatgtcacatttcccagcaat

SEQ ID NO: 64663 - DNA, 80 bp, synthetic construct
  source 1..80: mol_type = other DNA
cccgaatgcaccattttccgagccccagacgcagacgtgctcttttacacctttgggtcatacatctgttttgccacgcc

SEQ ID NO: 64664 - DNA, 80 bp, synthetic construct
  source 1..80: mol_type = other DNA
ctgctgtcacgtgggtcacgagtagatgaagccaagggcaagacaaagcatggtagaggcgtgcgtcacggacatcgcgc

SEQ ID NO: 64665 - DNA, 80 bp, synthetic construct
  source 1..80: mol_type = other DNA
tggtgtcagcttgtcagatgatgagtacgatgaatggcgtgatttgatgcgggattggcgacgagacatgagcgtcaatg

SEQ ID NO: 64666 - DNA, 80 bp, synthetic construct
  source 1..80: mol_type = other DNA
acttcctgatgcttcgagagcggtctgcactaggcatggatgatgaggatgtcatgcgataccgtgcttggctggaaatc

SEQ ID NO: 64667 - DNA, 80 bp, synthetic construct
  source 1..80: mol_type = other DNA
agatcacttcgtttggctggaggggcgtacacacatgcaacaatcattggcaagggtggtgtgcgagatgaactcatacg

SEQ ID NO: 64668 - DNA, 80 bp, synthetic construct
  source 1..80: mol_type = other DNA
aactgctccacgtcgtgcacccacacgccccacacactcatacgaagaggaggctccaacagccgtggtcgagtttacac

SEQ ID NO: 64669 - DNA, 80 bp, synthetic construct
  source 1..80: mol_type = other DNA
atgatggggaccacattggctacggcgttcacaccggtaacgggaacattgtcacagttacacacgtggcttcagggtca

SEQ ID NO: 64670 - DNA, 80 bp, synthetic construct
  source 1..80: mol_type = other DNA
catggacctcgctcggctccaaggtgaacttgttgatgctactagaactccaggccatgcattgagacaaaagtactcac

SEQ ID NO: 64671 - DNA, 80 bp, synthetic construct
  source 1..80: mol_type = other DNA
aacgccgttaacgacgtcccgttcaaggtggtgcgaaccactggcgaaaccacatgggtccaagcaccactctcccaact

SEQ ID NO: 64672 - DNA, 80 bp, synthetic construct
  source 1..80: mol_type = other DNA
gccacacgcccaaattggaaaaggctcaccagtctacttcagcacaaggttgcacccagtagtcactatatctgagggca

SEQ ID NO: 64673 - DNA, 80 bp, synthetic construct
  source 1..80: mol_type = other DNA
cctttgaaacaccaaacatcacggtggttggataccacttacgcatctccaacggctatcctacaaagaaaggagattgt

SEQ ID NO: 64674 - DNA, 80 bp, synthetic construct
  source 1..80: mol_type = other DNA
ccaaaaggttaacaaagaaacaacaatagaagatgaattccagtggaaggggctgccagtggtgaagtcaggtgtcgatg

SEQ ID NO: 64675 - DNA, 80 bp, synthetic construct
  source 1..80: mol_type = other DNA
tgggagggatgccaactggtactcggtaccacaggtctcctgcctggccagaggtgcaagttgaggaaacgcatgagcca

SEQ ID NO: 64676 - DNA, 80 bp, synthetic construct
  source 1..80: mol_type = other DNA
gctccttttggctctggtgaccagaggtacaaattctcccaaacagaaatgttggtgaacgggttaaaaccatatactga

SEQ ID NO: 64677 - DNA, 80 bp, synthetic construct
  source 1..80: mol_type = other DNA
gaccaccccaggcataccaccccaactcctaacaagagctgccacgcacgtacgtagctatttggaaaccattattggca

SEQ ID NO: 64678 - DNA, 80 bp, synthetic construct
  source 1..80: mol_type = other DNA
ctcataagtctccagtgttaacattccaacaagctagtgagctactggagcgaactacatcatgtgggccatttgttcaa

SEQ ID NO: 64679 - DNA, 80 bp, synthetic construct
  source 1..80: mol_type = other DNA
ggactaaaaggtgactactgggatgaggataaccaacagtacactggactgttaatggaccacttggttgaagcctggga

SEQ ID NO: 64680 - DNA, 80 bp, synthetic construct
  source 1..80: mol_type = other DNA
ttgagacgatcaagcaacttgtggacaagattacaagagtggttccagtgcaagccaccctcaatgagatgcacacacgc

SEQ ID NO: 64681 - DNA, 80 bp, synthetic construct
  source 1..80: mol_type = other DNA
caaggcaaacaagggcattgcacccacgaatgcttataagttggcacttaaagatgaattgcggccaatagaaaagaaca

SEQ ID NO: 64682 - DNA, 80 bp, synthetic construct
  source 1..80: mol_type = other DNA
aacttggaaaaaggaggctcctctggggttgtgatgcagccacaactcttgtagcaactgcggcattcaaatctgtcgcc

SEQ ID NO: 64683 - DNA, 80 bp, synthetic construct
  source 1..80: mol_type = other DNA
acccgcttacaggctgtcacccctatgaccccagtgtcagttggtatcaatatggattctgttcaaatgcaagtcttaaa

SEQ ID NO: 64684 - DNA, 80 bp, synthetic construct
  source 1..80: mol_type = other DNA
catcactagcaatcctggaaagatttgctgaaggtcacccattggtgtccagtgccattgaggcattgtcatcccctgca

SEQ ID NO: 64685 - DNA, 80 bp, synthetic construct
  source 1..80: mol_type = other DNA
ttccagctagagaccatccacacgtacggagatgactgcatatatggcttttgtccagccaccgcctcaatcttcccttc

SEQ ID NO: 64686 - DNA, 80 bp, synthetic construct
  source 1..80: mol_type = other DNA
aatccttggcaatttgtcacggtttggtctcaaacccacagcagcagacaagagtgacaaaataataccaactaatattc

SEQ ID NO: 64687 - DNA, 80 bp, synthetic construct
  source 1..80: mol_type = other DNA
cagttttcctcaagaggacgttcacacacactccacatggcgtgcgtgcccttcttgatataacatccatcaaaaggcag

SEQ ID NO: 64688 - DNA, 80 bp, synthetic construct
  source 1..80: mol_type = other DNA
tttttctggttgaaggccaatagaacatgtgaccccacaagtcccccagcgtttgaccgagtagcacgcagtgcacaatt

SEQ ID NO: 64689 - DNA, 80 bp, synthetic construct
  source 1..80: mol_type = other DNA
ggaaaacgcactagcatttgcatcacaacacgggccaacaatatttgatgaggtacgccaaattgcaatcaaaactgcag

SEQ ID NO: 64690 - DNA, 80 bp, synthetic construct
  source 1..80: mol_type = other DNA
tgcctgatccagagcgccccaatgaaggagcacacaaaatagtgtttgagatggagggcaatggctcccagctgggttcc

SEQ ID NO: 64691 - DNA, 80 bp, synthetic construct
  source 1..80: mol_type = other DNA
cgccaacatcaagaaaaccaggcagcggttgacccgcctggtgcgactggcccaaccacctcccatgttgttgtttctaa

SEQ ID NO: 64692 - DNA, 80 bp, synthetic construct
  source 1..80: mol_type = other DNA
aaagctacttttacacaatgtggaagcaagtggtgaagaaagggaaagcgtacttttgcccccttgttaaaaccagtgcg

SEQ ID NO: 64693 - DNA, 80 bp, synthetic construct
  source 1..80: mol_type = other DNA
gtctactcaaaccccctgggcaaaggatggaaaatggtgtgtcacctgagggtttgttacctcgacgtttgggctatgcg

SEQ ID NO: 64694 - DNA, 80 bp, synthetic construct
  source 1..80: mol_type = other DNA
cgaggtaatagagttggtggtttagtggtgggtttggtgctggtggctgaccaccatcaggtgaacagacattttaacgc

SEQ ID NO: 64695 - DNA, 80 bp, synthetic construct
  source 1..80: mol_type = other DNA
aaattcaataacttatggttggtctaccgcacctgtcaaccccatggcagcagagattgtagtcaaacacgactacacta

SEQ ID NO: 64696 - DNA, 80 bp, synthetic construct
  source 1..80: mol_type = other DNA
gtaacagaaatgcttggctgtcaatcggtgccaaaaataaaggcccactctttcctggtctaccaaatcacttcccagac

SEQ ID NO: 64697 - DNA, 80 bp, synthetic construct
  source 1..80: mol_type = other DNA
tcctgtgcatcaacaatagtaggggccatggacacaggtagacacatgcctgccacaggggtttgtggacctgctattgg

SEQ ID NO: 64698 - DNA, 80 bp, synthetic construct
  source 1..80: mol_type = other DNA
gttccaagacaatggagatgtctttgaaaatgaaacacctgcagtgatgtttgccacattcaacccactatctggaggtg

SEQ ID NO: 64699 - DNA, 80 bp, synthetic construct
  source 1..80: mol_type = other DNA
acaacactaacccaatagcactgtatgactccatcaacgcagcatccctggcagttatgtgtactaagtcaaattccaat

SEQ ID NO: 64700 - DNA, 80 bp, synthetic construct
  source 1..80: mol_type = other DNA
tggagaacaaaaatcagtgctattactgaaccaattcgagagttccttatagcattttgccaggccattcaacaagagat

SEQ ID NO: 64701 - DNA, 80 bp, synthetic construct
  source 1..80: mol_type = other DNA
tttgattcgaatggattctccaatgataagaatgttgttgtccaaatgtcttgggaaatgtacaccaactcccaacaaat

SEQ ID NO: 64702 - DNA, 80 bp, synthetic construct
  source 1..80: mol_type = other DNA
ccaggtgcgggtcacacccatgcaaggcactaactttgtgttcacctcatcaggggccaacactctcgcgctttgtgagg

SEQ ID NO: 64703 - DNA, 80 bp, synthetic construct
  source 1..80: mol_type = other DNA
agaggctgctgagttatgacggccatcaagccatattgtactcatcccagatggagcgcacatctgagtacttccaaaat

SEQ ID NO: 64704 - DNA, 80 bp, synthetic construct
  source 1..80: mol_type = other DNA
gataacgtcaacattcctcctggctccatggcagtattcaatgttgaaacaaattcggcctcattccaaattggaatccg

SEQ ID NO: 64705 - DNA, 80 bp, synthetic construct
  source 1..80: mol_type = other DNA
agaggatggatacatggtcactggtggcactattggaacccatgttgttcttgatcctgaaacacgatttcaatatgttg

SEQ ID NO: 64706 - DNA, 80 bp, synthetic construct
  source 1..80: mol_type = other DNA
gtttgcttcctttaactgcagcacttgctgggcccaatgggaattctggacgggccaggagagttttccaatgagttggt

SEQ ID NO: 64707 - DNA, 80 bp, synthetic construct
  source 1..80: mol_type = other DNA
tggtaggtgctcttcaaaccactgggtcacttgttgacctagctggcacagtgtctaacattgtataccaacaacgccag

SEQ ID NO: 64708 - DNA, 80 bp, synthetic construct
  source 1..80: mol_type = other DNA
gttgcacaattagagaaacagaaccaattaatggagcaatggatgggaaagcaagaacaactccagcgtgatcaaatggc

SEQ ID NO: 64709 - DNA, 80 bp, synthetic construct
  source 1..80: mol_type = other DNA
ccttacgcgtgatctagcggtgaatggaccagtggagcgagttcaagccgcattggatgcaggttttgaccaagttagtg

SEQ ID NO: 64710 - DNA, 80 bp, synthetic construct
  source 1..80: mol_type = other DNA
cccgtagattggctggatctcaggagagggtgatatatggcaatttggaccgccctatcatgcatgctgggacagtggag

SEQ ID NO: 64711 - DNA, 80 bp, synthetic construct
  source 1..80: mol_type = other DNA
gggggtcaatccacaatatctacagttggcctggcttcaaaaattaaaacccaccacactgacaatcatactacaacaac

SEQ ID NO: 64712 - DNA, 80 bp, synthetic construct
  source 1..80: mol_type = other DNA
ggtattcgcaacacccgccacctagactccattagttcatcattagcaacatttaagaaaggtactcaatttggcttatc

SEQ ID NO: 64713 - DNA, 80 bp, synthetic construct
  source 1..80: mol_type = other DNA
agcacctccaaaatttaacacaggtaggcctactagcacccagcccaccattagtttgggacactcaccaggaagctcaa

SEQ ID NO: 64714 - DNA, 80 bp, synthetic construct
  source 1..80: mol_type = other DNA
tttcttttctttccacgtgataccacacgcgttcgggtggtttgtgtgattaagcgatcacagtcacgtaccctctttgg

SEQ ID NO: 64715 - DNA, 80 bp, synthetic construct
  source 1..80: mol_type = other DNA
acaaaaacacagtttctggttggttagccactatgacagcccttgtcgaggtgtactcaagtttgtttgatgacctacgt

SEQ ID NO: 64716 - DNA, 80 bp, synthetic construct
  source 1..80: mol_type = other DNA
ctacctcagggtagacccaagggagagcttttgtgaggacgaacaagatttactacaatactttaccaggcacaccagtg

SEQ ID NO: 64717 - DNA, 80 bp, synthetic construct
  source 1..80: mol_type = other DNA
aagtcatctgtaactatagtgtccagtcttggtgctttctttgatgtgtgtaaggacttcatcacacacgtagtgggttt

SEQ ID NO: 64718 - DNA, 80 bp, synthetic construct
  source 1..80: mol_type = other DNA
agtgcgagactgttttacatcagaaggtccaacagagttgggatggacagcaatacttgccggggcggctatgatattac

SEQ ID NO: 64719 - DNA, 80 bp, synthetic construct
  source 1..80: mol_type = other DNA
atgcgtcactcgcaaactcactcctgtcaatgttcacaaccaacaccaggctatcagcagccgcccagagggagtttatg

SEQ ID NO: 64720 - DNA, 80 bp, synthetic construct
  source 1..80: mol_type = other DNA
ccaccagtggaggttgatgagggcgcgctctttcgcgacctatttggggttgacccaaaggaacaacgagctatgtcact

SEQ ID NO: 64721 - DNA, 80 bp, synthetic construct
  source 1..80: mol_type = other DNA
acttcctaatgctccgggagcggtctgcattaggtatggatgatgaggatgtcatgcggtaccgtgcttggttagaaatt

SEQ ID NO: 64722 - DNA, 80 bp, synthetic construct
  source 1..80: mol_type = other DNA
catggatctcgctcagctccaaggtgagcttgttgacgcgactagaacaccaggtcatgcactcagacaaaagtactctc

SEQ ID NO: 64723 - DNA, 80 bp, synthetic construct
  source 1..80: mol_type = other DNA
atccttggcaatctatcacggtttggcctcaaacctaccgcggcagacaagagtgacaaaatagcgccaaccaatgtccc

SEQ ID NO: 64724 - DNA, 80 bp, synthetic construct
  source 1..80: mol_type = other DNA
aggcaatttgaacgtgagcgtgctgatctattccaggaactccccctggtcgatgaggatgtggttaaacagccaaaaag

SEQ ID NO: 64725 - DNA, 80 bp, synthetic construct
  source 1..80: mol_type = other DNA
tcttctggttaaaggccaacaggacgtgtgaccccaccagccctccagcatttgaccgggtggcacgtagtgcacagttg

SEQ ID NO: 64726 - DNA, 80 bp, synthetic construct
  source 1..80: mol_type = other DNA
acctccaaaattcaacactggcaggcctaccagtactcaacccaccatcaatttggggcactcaccaggaagctccaatg

SEQ ID NO: 64727 - DNA, 80 bp, synthetic construct
  source 1..80: mol_type = other DNA
gtgattggttagtatggcttctaagccattctaccctatttcattcaaccgtaaggttgagtactcagtgctcagatcgg

SEQ ID NO: 64728 - DNA, 80 bp, synthetic construct
  source 1..80: mol_type = other DNA
taatgaagctttcaggatgctccaacacagctagctactggcacaggttgcttaaggtgtgtggtggagtcaccaccctt

SEQ ID NO: 64729 - DNA, 80 bp, synthetic construct
  source 1..80: mol_type = other DNA
gctgcggcggctcgcgctgtggtttgggttcgtgacataatcatggaagctgatggcaagtcccgactcaaaaagtacat

SEQ ID NO: 64730 - DNA, 80 bp, synthetic construct
  source 1..80: mol_type = other DNA
ggcccggaccgcagccttgctggagcttgcagcctccagagatgtcaatggcaccgacgagctaaagcggttactggaat

SEQ ID NO: 64731 - DNA, 80 bp, synthetic construct
  source 1..80: mol_type = other DNA
gcttcacacagcttatcgaggaagggacggagctgattcaggagttcggaacatcaccactggctggccttgcccgctcg

SEQ ID NO: 64732 - DNA, 80 bp, synthetic construct
  source 1..80: mol_type = other DNA
tatgtcagtgagctggagtcggctgctaacagcatcagaagcaccattttgcttgacaccccacgcaagacccccgttgc

SEQ ID NO: 64733 - DNA, 80 bp, synthetic construct
  source 1..80: mol_type = other DNA
catcatcctcactggccctccaggcataggcaaaactaggttggcacaacacctcgcggctgggtttggcaaggtgtcaa

SEQ ID NO: 64734 - DNA, 80 bp, synthetic construct
  source 1..80: mol_type = other DNA
atttttccgtgacgcttgaccatcatgattcgtacactggcaacgaggttgccatttgggacgagtttgatgttgacaca

SEQ ID NO: 64735 - DNA, 80 bp, synthetic construct
  source 1..80: mol_type = other DNA
ggactgtggcgtgataacttgcgccgcagtctggtagccacccctaccttcactgaggaggggttgttagactctttcct

SEQ ID NO: 64736 - DNA, 80 bp, synthetic construct
  source 1..80: mol_type = other DNA
caaggcaagttcgttgagaccatgattggtattgtcaacacggcaccttacccactcaactgcgaccgggtagagaacaa

SEQ ID NO: 64737 - DNA, 80 bp, synthetic construct
  source 1..80: mol_type = other DNA
agggaaagtgttcacatctgactatgtcatctgcactagcaactaccctacatctgtcctcccggagaacccacgggccg

SEQ ID NO: 64738 - DNA, 80 bp, synthetic construct
  source 1..80: mol_type = other DNA
gcgccttctaccgtcgtgtgatcacggtggacgtctcatcaccctcaatagatgactggaagaagaggaaccctggaaag

SEQ ID NO: 64739 - DNA, 80 bp, synthetic construct
  source 1..80: mol_type = other DNA
aaacccccagtggacctgtacaagggagatttctcgcacttgcgcttgtcagttagaccgttccttggctacaaccctga

SEQ ID NO: 64740 - DNA, 80 bp, synthetic construct
  source 1..80: mol_type = other DNA
aggagacacattagacggcgtgcgggttaagcccacaaccaccagtgttgatggattgtcacgcttaatggagaccaagt

SEQ ID NO: 64741 - DNA, 80 bp, synthetic construct
  source 1..80: mol_type = other DNA
ttaaggaacaaggaaatgagcaacgcaacatctggatcacctgtccgcgcgatctggtggcccccgctgcatcaggtctg

SEQ ID NO: 64742 - DNA, 80 bp, synthetic construct
  source 1..80: mol_type = other DNA
aaatcctacatggcagccaatcgcgcacttgctcaagtgtttcaggagccctcttcccaggacattggggaaacgtgtac

SEQ ID NO: 64743 - DNA, 80 bp, synthetic construct
  source 1..80: mol_type = other DNA
gtcgcgcgtgtacgtttcatgcaacaacccaccacccacatttgttggacgcgttgtaaaagtcacagctattaacccat

SEQ ID NO: 64744 - DNA, 80 bp, synthetic construct
  source 1..80: mol_type = other DNA
gggatgcctcgttggccaattcaatgctctcaatgtttgagacttccacacacataccagcatcagtgcagcgtgagatt

SEQ ID NO: 64745 - DNA, 80 bp, synthetic construct
  source 1..80: mol_type = other DNA
atgtacagagtctgggacccgttggtccacctacaatcacgggagcccaacacacagatgttaccttacatcaatcgggt

SEQ ID NO: 64746 - DNA, 80 bp, synthetic construct
  source 1..80: mol_type = other DNA
atcaaaaccacccgtggacatcaacccagacacgacgtttcgtgagttgtttggggtcgaccctcacgaacagttcccct

SEQ ID NO: 64747 - DNA, 80 bp, synthetic construct
  source 1..80: mol_type = other DNA
ggtacctgtcgccacggcttttgatttcatacgaggcctccgacaccatctcggtctgtgctcaatcaaggggatgtggc

SEQ ID NO: 64748 - DNA, 80 bp, synthetic construct
  source 1..80: mol_type = other DNA
gcgcttaccaaggctggacaagttcaaattcaatcctcgagtttttgtcaaaacatatggctgatgtgaatttcccccat

SEQ ID NO: 64749 - DNA, 80 bp, synthetic construct
  source 1..80: mol_type = other DNA
aatcctgagtgcactgtgtttcgggcccctgatggggacgtcatcttctacacttttgggtcatacgcatgctttgtgtc

SEQ ID NO: 64750 - DNA, 80 bp, synthetic construct
  source 1..80: mol_type = other DNA
ccccgcccgcgtgccctttgttggcgatccccccaaaaacgttcactcaaacatcacccgcaacatgacatgggttgaaa

SEQ ID NO: 64751 - DNA, 80 bp, synthetic construct
  source 1..80: mol_type = other DNA
ccttacgcttgcttgctgagacggtgacggagtgcctagcacatttcggcccgttcttgcttatgttgcacaatgtgtcc

SEQ ID NO: 64752 - DNA, 80 bp, synthetic construct
  source 1..80: mol_type = other DNA
tacctcaccgcgcggtccagccgcgacgaggaagcaaagggtaaaacaaaacatggccgcggtgctaagcactcacgcag

SEQ ID NO: 64753 - DNA, 80 bp, synthetic construct
  source 1..80: mol_type = other DNA
agggggagtcagcctgtctgatgatgagtacgatgagtggcgagatctagtgcgtgactggcgccaagacatgacagtca

SEQ ID NO: 64754 - DNA, 80 bp, synthetic construct
  source 1..80: mol_type = other DNA
gcgagttcgtcgagcttcgagaaaggttcgcgctcggcatggactctgaggatgtgcagcgataccgtgcctggctcgag

SEQ ID NO: 64755 - DNA, 80 bp, synthetic construct
  source 1..80: mol_type = other DNA
ttgagagcaatgcgcatgggggcaggggcctaccaacatgccacaatcatcggcagaggtggtgttcaagacacgataat

SEQ ID NO: 64756 - DNA, 80 bp, synthetic construct
  source 1..80: mol_type = other DNA
acgcactcaacccatgcgcgcaccacgtgcgccacgcagtcagggctatgatgaggaagcacccaccccaatagttgtgt

SEQ ID NO: 64757 - DNA, 80 bp, synthetic construct
  source 1..80: mol_type = other DNA
tgtccattcatgatctggccaagttacaaggcgagcttgtggaggcggcgcgcaaccctggtcacatattgcggcgtcat

SEQ ID NO: 64758 - DNA, 80 bp, synthetic construct
  source 1..80: mol_type = other DNA
tcacttccggagatgagcacattggttacggttgccacttgggcaatggcgtggttgtcactgtcacgcatgttgcatca

SEQ ID NO: 64759 - DNA, 80 bp, synthetic construct
  source 1..80: mol_type = other DNA
gccgcagaccaggtggaaggtcaggagttcactatcaggaaaactgaaggggaaaccacctgggttaacacaaatctcgg

SEQ ID NO: 64760 - DNA, 80 bp, synthetic construct
  source 1..80: mol_type = other DNA
ccacctgccccattaccaacttggggacggtgccccagtctattactcagcccgcctccacccagtgacgacaatagcgg

SEQ ID NO: 64761 - DNA, 80 bp, synthetic construct
  source 1..80: mol_type = other DNA
aaggaacatatgaaacacccaacatcacagtacaggggtaccatctcaggatcctcaatggttacccaaccaagcgcgga

SEQ ID NO: 64762 - DNA, 80 bp, synthetic construct
  source 1..80: mol_type = other DNA
gattgcggaacgccatattttgacgcctgccgcagactggtgggtttgcacgccgcgacttccaccaacggcgagacaaa

SEQ ID NO: 64763 - DNA, 80 bp, synthetic construct
  source 1..80: mol_type = other DNA
gctcgctcaacgcgtaactaagacatcacgtgttgagaacgcttttgcgtggaaaggtctggcggtcatacgtggccctg

SEQ ID NO: 64764 - DNA, 80 bp, synthetic construct
  source 1..80: mol_type = other DNA
actgcgggggcatgcccactggcactcgttaccaccgctctcctgcctggcctgagacaatcgagggtgagacccacgcc

SEQ ID NO: 64765 - DNA, 80 bp, synthetic construct
  source 1..80: mol_type = other DNA
cctgccccatttgggtctggtgactctcggtattcattctctcaggtggaaatgctcgttaatggactcaagccttactc

SEQ ID NO: 64766 - DNA, 80 bp, synthetic construct
  source 1..80: mol_type = other DNA
tgaacccacaccaggtatcccacctgccttgctccagagggcggcaacacacacacgcacctacctggagactataattg

SEQ ID NO: 64767 - DNA, 80 bp, synthetic construct
  source 1..80: mol_type = other DNA
gcacccacaggtcacctaacttaacttttggagaagcctgtgccttgttggagcgcacaacctcttgtgggccatttgtg

SEQ ID NO: 64768 - DNA, 80 bp, synthetic construct
  source 1..80: mol_type = other DNA
tactccaccgattcgctcaccgccctaattaataaaataacaaaatttgtccccgtccaggcaaccctacaagaaatgca

SEQ ID NO: 64769 - DNA, 80 bp, synthetic construct
  source 1..80: mol_type = other DNA
gccggccagaaaggggactattgggatgaagacaagcagtgctacacaggcgtgctggcagaccacctcgccaaggcctg

SEQ ID NO: 64770 - DNA, 80 bp, synthetic construct
  source 1..80: mol_type = other DNA
ggacgccgccaacagaggtgtggcccctcagaatgcatacaagctggcactcaaggatgaacttcggcccattgacaaga

SEQ ID NO: 64771 - DNA, 80 bp, synthetic construct
  source 1..80: mol_type = other DNA
acgcgcagggcaagcgccggctgttgtggggttgtgatgctggggccacgctggttgccaccgcagcattcaaagtggtg

SEQ ID NO: 64772 - DNA, 80 bp, synthetic construct
  source 1..80: mol_type = other DNA
gccacgcgactgcaagcggttgctcccatgacaccagttgcggttggcatcaacatggacagctaccaagttgaagtgct

SEQ ID NO: 64773 - DNA, 80 bp, synthetic construct
  source 1..80: mol_type = other DNA
taatgagtctctcaagggaggggttctctactgtctggattacagtaagtgggactccacccagcatccagcggtcacgg

SEQ ID NO: 64774 - DNA, 80 bp, synthetic construct
  source 1..80: mol_type = other DNA
cctcctcattgtcaatcttagaacggttgtctgaggccaccccaatcaccacatccgcggtggagttgctatcatccccg

SEQ ID NO: 64775 - DNA, 80 bp, synthetic construct
  source 1..80: mol_type = other DNA
gcgcgaggccacttaaacgacataatttttgtcaccaagtccgggcttccatcaggcatgccattcaccagtgtcatcaa

SEQ ID NO: 64776 - DNA, 80 bp, synthetic construct
  source 1..80: mol_type = other DNA
ttccctcaaccacatgacatattttgccgcggcagtgttgcgggcctacgagcaacacggggccccctacaccggaaatg

SEQ ID NO: 64777 - DNA, 80 bp, synthetic construct
  source 1..80: mol_type = other DNA
ttttccaagttgaaacagtacacacttatggagatgactgtctgtattcagtctgtcctgccacggcctccatcttccac

SEQ ID NO: 64778 - DNA, 80 bp, synthetic construct
  source 1..80: mol_type = other DNA
tctgttttggccaatctcacctcatttggactaaagcctaccgctgcagacaagagtgaatgcattgcccccactcacac

SEQ ID NO: 64779 - DNA, 80 bp, synthetic construct
  source 1..80: mol_type = other DNA
ggctcgacgtgcatttgagcgtgaacgagcggatcttttcaaggagctgccacacgtcgaaccagacgttggtcaccagc

SEQ ID NO: 64780 - DNA, 80 bp, synthetic construct
  source 1..80: mol_type = other DNA
gccagtatttcttaaaagaaccctgacctgtacgcctcgtggcgtgcgggggctcttggacataacctccatcaaaaggc

SEQ ID NO: 64781 - DNA, 80 bp, synthetic construct
  source 1..80: mol_type = other DNA
aattcctttggatcaaggccaatagaacaactgacatcaattccccaccggcatatgaccgggaggcacgtggtgtccag

SEQ ID NO: 64782 - DNA, 80 bp, synthetic construct
  source 1..80: mol_type = other DNA
ctcgaaaacgccctcgcctatgcttcacagcacggccacagtgtctttgaggaggttgccaagctggcccgtcacacggc

SEQ ID NO: 64783 - DNA, 80 bp, synthetic construct
  source 1..80: mol_type = other DNA
caaagctgaggggcttgtgttgacgaatgtcaactacgaccaggctctcgccacctacgaatcctggttcataggtggta

SEQ ID NO: 64784 - DNA, 80 bp, synthetic construct
  source 1..80: mol_type = other DNA
caggtctggtgcaagatggccccagtgaagagaccaccaaattagtgtttgaaatggagggcaatggcctaccccaggct

SEQ ID NO: 64785 - DNA, 80 bp, synthetic construct
  source 1..80: mol_type = other DNA
ggacaacagcaagctcttgacgtgccaggaacaactggcccgacttcgtcggcagtggtggtggcaaatcctgaccaacc

SEQ ID NO: 64786 - DNA, 80 bp, synthetic construct
  source 1..80: mol_type = other DNA
ttctgcccaggcccaacgcatggagctggctgttgcaaccggtgccgtgtcatcaaatgtcccggatgcagtgcgtcagt

SEQ ID NO: 64787 - DNA, 80 bp, synthetic construct
  source 1..80: mol_type = other DNA
gctttgcactccttcgcacgtttccttggaacactcgacaggccacaggcacttatctgggatctgctgcgctgtcccca

SEQ ID NO: 64788 - DNA, 80 bp, synthetic construct
  source 1..80: mol_type = other DNA
gctctcaacccatataccgcacatctttcggcgatgtgggctgggtggggtggtagcatggaggcgcgtgtcaccatttc

SEQ ID NO: 64789 - DNA, 80 bp, synthetic construct
  source 1..80: mol_type = other DNA
tggttctggcacctttgctggtaaaatcattgttgccctactgcccccggggttggacccaacgcgtgtgcgtgatcctg

SEQ ID NO: 64790 - DNA, 80 bp, synthetic construct
  source 1..80: mol_type = other DNA
agaagtcctacttctatgcaatgtggcggcaggtggtgaagaagggaaaggagttcttcataccccttgttaagtgcacc

SEQ ID NO: 64791 - DNA, 80 bp, synthetic construct
  source 1..80: mol_type = other DNA
gagttttgccccacgcccaggttgacgctcgcgctgtggatcctatcacatttaacatcaacgatgtgagggctgtggac

SEQ ID NO: 64792 - DNA, 80 bp, synthetic construct
  source 1..80: mol_type = other DNA
taccatcgcaccgatggccaggaggccactagcaccctgggtttctgggtgttgcaacccctcatcaatccattcagcca

SEQ ID NO: 64793 - DNA, 80 bp, synthetic construct
  source 1..80: mol_type = other DNA
cgatgctttgtccacagcgtgggtgtcggtggaaactagaccaggacctgattttgacttctgcctcctaaaacccccac

SEQ ID NO: 64794 - DNA, 80 bp, synthetic construct
  source 1..80: mol_type = other DNA
aaatggagatggagaacgggctctcacccagcacgctcttacccagacatcttggccgttctcgcggcaataggtgtggg

SEQ ID NO: 64795 - DNA, 80 bp, synthetic construct
  source 1..80: mol_type = other DNA
gggttcattgtaggtatggctgtagtggccatggcacaccaggtcaaccaccatttctccaccgcagccacaacctatgg

SEQ ID NO: 64796 - DNA, 80 bp, synthetic construct
  source 1..80: mol_type = other DNA
gtggtccacacttcccctcggcccgtgtgctgcaaagatcactagttctctccctggggaaataaacaactacaccgggt

SEQ ID NO: 64797 - DNA, 80 bp, synthetic construct
  source 1..80: mol_type = other DNA
ttgcagatgttgatggcgcgggtgagggaccaataatgcccaacatcccaaatcattggcctgactcttgtgcctcgtct

SEQ ID NO: 64798 - DNA, 80 bp, synthetic construct
  source 1..80: mol_type = other DNA
gtcattgcaacttgggacagctcacttcaccgcccaaaccttggcattagtggttcaataatgacctttgacaaccatgg

SEQ ID NO: 64799 - DNA, 80 bp, synthetic construct
  source 1..80: mol_type = other DNA
agatgcggatgaagcccaaataaccggggctatggcagcaacggtggatccatcccccagtcgtagaacccagctgcaag

SEQ ID NO: 64800 - DNA, 80 bp, synthetic construct
  source 1..80: mol_type = other DNA
gtagcttcactgccaacaccatgcgcataatgcgcacatccggtcttgacaaaattggtgaggttaataagaatgtgtac

SEQ ID NO: 64801 - DNA, 80 bp, synthetic construct
  source 1..80: mol_type = other DNA
tcatggcggaaaaagttcactgaacctgccgaaattatacgacaagtgctggtccatttttgtgagggaatgcgttcgca

SEQ ID NO: 64802 - DNA, 80 bp, synthetic construct
  source 1..80: mol_type = other DNA
tttatcccaatccttcttgatggggccactgggtacatcaatgaaaaagttacaaacttggctgatatcaacatctcata

SEQ ID NO: 64803 - DNA, 80 bp, synthetic construct
  source 1..80: mol_type = other DNA
tggccctgttggttccaacaatgtcatcctttggcgcgagcgggtcttttccagccaccctcgaccaggcatcttgtaca

SEQ ID NO: 64804 - DNA, 80 bp, synthetic construct
  source 1..80: mol_type = other DNA
gctcccagcttgaatccactgcttctatcttccaagatgggccagtaaacatacccaacaactacatggcagtcttcaat

SEQ ID NO: 64805 - DNA, 80 bp, synthetic construct
  source 1..80: mol_type = other DNA
gtgagtgacacgggtgcagatttccaaattggcatttgccctgacgggtacatgcgtacaggatctccagttggcacagt

SEQ ID NO: 64806 - DNA, 80 bp, synthetic construct
  source 1..80: mol_type = other DNA
tgttgatctaacacccgagtgcacttttacttttgttggtcttttcccttttacttcccctctcaatgggcctcatggga

SEQ ID NO: 64807 - DNA, 80 bp, synthetic construct
  source 1..80: mol_type = other DNA
ctgggcgaggcagaagtgtttaccaatgagttggttggtaggagcactccagcttggcggtgcgcttgttgacgctgctg

SEQ ID NO: 64808 - DNA, 80 bp, synthetic construct
  source 1..80: mol_type = other DNA
gcagcgtgtccaacatggtgtaccagcacaaacaacttgaactccttaaacaacaaaatcaactgtattcaacttggatg

SEQ ID NO: 64809 - DNA, 80 bp, synthetic construct
  source 1..80: mol_type = other DNA
gccaaaaatgaacagctccaacgtgactccatggcactgtctgaaaagctgtccacggagggccccgctctccgagtcaa

SEQ ID NO: 64810 - DNA, 80 bp, synthetic construct
  source 1..80: mol_type = other DNA
ggctgcactagacgcgggttttgaccccgtcagtgcccgccgtttggccgggtcaggggaacgccggattcagtggtaca

SEQ ID NO: 64811 - DNA, 80 bp, synthetic construct
  source 1..80: mol_type = other DNA
tagacatgcctgtcatgacccagcagcagtcatctgcacactgggtgaatggcaatttgaccaaagtcaactcggcactt

SEQ ID NO: 64812 - DNA, 80 bp, synthetic construct
  source 1..80: mol_type = other DNA
attttccacgaatgcgaactacatcaacttgtcgctcatcgcaaagatgcgaccgaccgttttgaccatgatttttcaac

SEQ ID NO: 64813 - DNA, 80 bp, synthetic construct
  source 1..80: mol_type = other DNA
accacattccagcaaggtaccccttttggcaagccccaaccccccaaatttcaaacaggtgggcccaacattgggaacaa

SEQ ID NO: 64814 - DNA, 80 bp, synthetic construct
  source 1..80: mol_type = other DNA
caggccggcagtcaacattggacacaacccaggctcatcatctgcctgacccaccctctttcattccttttccgttcttt

SEQ ID NO: 64815 - DNA, 80 bp, synthetic construct
  source 1..80: mol_type = other DNA
tcttttcttttccgactggcactcacgcgttcgggagtataatgccaattaagcgattggctccagtttcctcttggaaa

SEQ ID NO: 64816 - DNA, 80 bp, synthetic construct
  source 1..80: mol_type = other DNA
ctcacctcagggtgagtggtcgtgagcaaatgtttgagactacagcagaattagacagtcatgttgaaacagtggttgcc

SEQ ID NO: 64817 - DNA, 80 bp, synthetic construct
  source 1..80: mol_type = other DNA
aacacaagaacacataccgtggctggctggcaacggtcaccgctctgattgaggtgtactccaacttgttccaggacatg

SEQ ID NO: 64818 - DNA, 80 bp, synthetic construct
  source 1..80: mol_type = other DNA
agggacactgcggtgtccgcagtgtctgcggtcaccctcgtgtttgaaacaatcaaggatttcatcaacaacgtcattga

SEQ ID NO: 64819 - DNA, 80 bp, synthetic construct
  source 1..80: mol_type = other DNA
cttggtcaagtccacctttcgggcgcaaggcccaacaccatgtgggtgggcggccatagccgctggtgcgttgctcatct

SEQ ID NO: 64820 - DNA, 80 bp, synthetic construct
  source 1..80: mol_type = other DNA
ttaaaatggcggggtgtccaggggttgctggcatgtggtcaaaggttttgaagatttgtggtagcataacaaccatcact

SEQ ID NO: 64821 - DNA, 80 bp, synthetic construct
  source 1..80: mol_type = other DNA
tcatcttaactggaccccccggtataggcaagactaagttggcacaatacattggccagcgatttggcaagacatccaac

SEQ ID NO: 64822 - DNA, 80 bp, synthetic construct
  source 1..80: mol_type = other DNA
ttctctgttgctgtcgatcaccacgatggttacaccggaaacaaagtctgcatctgggacgagttcgatgttgattctaa

SEQ ID NO: 64823 - DNA, 80 bp, synthetic construct
  source 1..80: mol_type = other DNA
gcctttgtcaagcacgccaccagggccctccaaaggaactacacctttgaagaggagggcctccttgacgtgtttggaac

SEQ ID NO: 64824 - DNA, 80 bp, synthetic construct
  source 1..80: mol_type = other DNA
gtcgtgtgttcacatcggactatgtcatctgcacatccaactaccccacttcagtgatacccgaaaacccacgtgcagca

SEQ ID NO: 64825 - DNA, 80 bp, synthetic construct
  source 1..80: mol_type = other DNA
gccttctatcgtagggtaattattgtggatgtatcggcccctgatttggaagaatggaagaagaggaaccccggcaagcg

SEQ ID NO: 64826 - DNA, 80 bp, synthetic construct
  source 1..80: mol_type = other DNA
ccccacacccgatctataccaggatgacttttctcatttgaaattgatgttgcgaccatacctcgggtacaaccccgaag

SEQ ID NO: 64827 - DNA, 80 bp, synthetic construct
  source 1..80: mol_type = other DNA
gggacactctggaggggactagagttcggccaacacagatcagcatcgggaaccttgtaaaccttatggagaaaaggttt

SEQ ID NO: 64828 - DNA, 80 bp, synthetic construct
  source 1..80: mol_type = other DNA
aaggaacagtcaggagatttacaaaatctatggctacaggtacccaaagcaatggttgaccaggctaccaacatggtaaa

SEQ ID NO: 64829 - DNA, 80 bp, synthetic construct
  source 1..80: mol_type = other DNA
aactttcatgtatgcaaaccgggccgtttgtagtgtcatcccaaaccccgcttctagagacattactgagacagcacttt

SEQ ID NO: 64830 - DNA, 80 bp, synthetic construct
  source 1..80: mol_type = other DNA
caaaaatattcatatgtggcacagccccccccccagagtttgagggcaagcacattgtgattactggcctcgaacctggc

SEQ ID NO: 64831 - DNA, 80 bp, synthetic construct
  source 1..80: mol_type = other DNA
gaggcctctttggcaaattcacttttgtctatgttttccaccaccacacgattatctgcttccgcccagcgtgagtacat

SEQ ID NO: 64832 - DNA, 80 bp, synthetic construct
  source 1..80: mol_type = other DNA
gtaccgtgtgtggagtccaatgattcacattcaagaccgatccatcaacacacaaaacctcccttacatcaatagagtta

SEQ ID NO: 64833 - DNA, 80 bp, synthetic construct
  source 1..80: mol_type = other DNA
taaaccaccagatgatgtccaggaaagcacactatttcgggagttgtttggagtagacccaaccgaacagttcccgttgt

SEQ ID NO: 64834 - DNA, 80 bp, synthetic construct
  source 1..80: mol_type = other DNA
ccttccagggttggaggacctcccaaggtataattgattttgtggctaaccacatggcagacgtgacgttcccaagtaat

SEQ ID NO: 64835 - DNA, 80 bp, synthetic construct
  source 1..80: mol_type = other DNA
cccgagtgtacaatatttagaacccctgatgcagatgtggtgttctatacctttggatcctatgtgtgttttgcttcacc

SEQ ID NO: 64836 - DNA, 80 bp, synthetic construct
  source 1..80: mol_type = other DNA
cttgttggcacgtggctcaagatccgaggaggccaaagggaaaactaaacacggccgaggaatgagacacggtcaccggg

SEQ ID NO: 64837 - DNA, 80 bp, synthetic construct
  source 1..80: mol_type = other DNA
caggcgtgagcctgtctgacgatgagtacgatgagtggcgtgacctcatgagggactggcgcagagacatgagtgttagt

SEQ ID NO: 64838 - DNA, 80 bp, synthetic construct
  source 1..80: mol_type = other DNA
cacagcaccgcgtagggcgccaaccaaaccacattccagctatgaggaggaagggccgaccgctgtagtggagttcacca

SEQ ID NO: 64839 - DNA, 80 bp, synthetic construct
  source 1..80: mol_type = other DNA
cattgacagaccttgcacgcctccaaggcgagcttgttgatgccacacgaacacctgggcacaagcttcgccagaggtac

SEQ ID NO: 64840 - DNA, 80 bp, synthetic construct
  source 1..80: mol_type = other DNA
tggatggagatcacattggttatggtgtgcatgttggcaatggtagcgttgtgactgtgacacatgttgcctcctcgtcc

SEQ ID NO: 64841 - DNA, 80 bp, synthetic construct
  source 1..80: mol_type = other DNA
aacctggtagacggtcaaccctttaaagtgcaccgaacacttggagagaccacctgggtgcacacatcattgtctgggct

SEQ ID NO: 64842 - DNA, 80 bp, synthetic construct
  source 1..80: mol_type = other DNA
accccacatgcaaattggccaaggcacaccagtttattttaccaataggctccacccggtacttactatatctgagggga

SEQ ID NO: 64843 - DNA, 80 bp, synthetic construct
  source 1..80: mol_type = other DNA
ggcctcccttactttaatgctcatcgccagcttgtggcattgcatgcaggaactgatacacagggtgaaacaaaagtggc

SEQ ID NO: 64844 - DNA, 80 bp, synthetic construct
  source 1..80: mol_type = other DNA
acagcgggtcccaaaggacgccactgtggaggatgagttccaatggaaagggctacctgtggtgaagtcagacattgatg

SEQ ID NO: 64845 - DNA, 80 bp, synthetic construct
  source 1..80: mol_type = other DNA
cccacaggtcacccgtcctgacattccaccaagccagcgagctcctggaacgtgcaacttcttgtggcccattcatacag

SEQ ID NO: 64846 - DNA, 80 bp, synthetic construct
  source 1..80: mol_type = other DNA
gatctcaatacaattggcaggctagtggataagatcaccaagttggtccctgttcaagccaccctcaatgagatgcatgc

SEQ ID NO: 64847 - DNA, 80 bp, synthetic construct
  source 1..80: mol_type = other DNA
ggtctcaaaggtgattattgggacgaagaagaacaggtttacaaaggtatacttggtgaccatcttagagaggcttggga

SEQ ID NO: 64848 - DNA, 80 bp, synthetic construct
  source 1..80: mol_type = other DNA
caaagcgtgcaaaggtgttgcccccaagaacgcctacaagctggctttgaaggatgagctccgcccaatagagaagaata

SEQ ID NO: 64849 - DNA, 80 bp, synthetic construct
  source 1..80: mol_type = other DNA
agttggggaagaggcggttactctggggatgtgacgctgccaccacgctaatcgctacagcagccttcaaagcggttgcc

SEQ ID NO: 64850 - DNA, 80 bp, synthetic construct
  source 1..80: mol_type = other DNA
acgagattacaagcagtcactcccatgacaccagtcgctgtaggtattaacatggactcaatgcagatgcaagtgatgaa

SEQ ID NO: 64851 - DNA, 80 bp, synthetic construct
  source 1..80: mol_type = other DNA
tgactcactcactggtggcgtgttgtattgcttggactactcaaagtgggactccacacaaaaccccgcggtcacagcag

SEQ ID NO: 64852 - DNA, 80 bp, synthetic construct
  source 1..80: mol_type = other DNA
cctctttggcaattcttgaaagatttgctgaacctcacccaattgtctcatgcgccattgagtcgttgtcatccccagct

SEQ ID NO: 64853 - DNA, 80 bp, synthetic construct
  source 1..80: mol_type = other DNA
gttggttacatcaatgatatcaagtttacaaccagagggggcttaccttcaggcatgccattcacatcagttgtcaactc

SEQ ID NO: 64854 - DNA, 80 bp, synthetic construct
  source 1..80: mol_type = other DNA
cagttttggccagtttgattcggttcggattgaagcccactgcggcagacaaaagtgaagcaatcaaacccacaacaaca

SEQ ID NO: 64855 - DNA, 80 bp, synthetic construct
  source 1..80: mol_type = other DNA
acgtagacagtacgagcgtgatcgtgctgaactgtttcatgaactgcctttggtggatgatgagattgttaggaaaccaa

SEQ ID NO: 64856 - DNA, 80 bp, synthetic construct
  source 1..80: mol_type = other DNA
tctactggttgaaagccaacagaacttcagacccatctagcccaccagcatttgaccgccaggcacggggtgctcaattg

SEQ ID NO: 64857 - DNA, 80 bp, synthetic construct
  source 1..80: mol_type = other DNA
gaaaacgcactagcatttgcctcccaacacggaccactagcctttgacaaggtccgtgagatagccatcaaaacggcaca

SEQ ID NO: 64858 - DNA, 80 bp, synthetic construct
  source 1..80: mol_type = other DNA
caaggggcacgaccaaaaagtccacctcaaagtgttgaccttcctggcacggttggcccggccacatccaatgttgttgt

SEQ ID NO: 64859 - DNA, 80 bp, synthetic construct
  source 1..80: mol_type = other DNA
aaccatacttttatactatgtggagacaggtggtcaagaagagcaaagcatatttttgcccactagtaaagacaagcgct

SEQ ID NO: 64860 - DNA, 80 bp, synthetic construct
  source 1..80: mol_type = other DNA
gccttttgaaaccaccagggcagcagatgcaaaatggtatatcacctgagggcctgttgccacgccgactgggttatgca

SEQ ID NO: 64861 - DNA, 80 bp, synthetic construct
  source 1..80: mol_type = other DNA
agaggcaatagggttggtggccttgctgttggtatggttttggtgtctgagcacaagcaagtcaaccgccacttcaactc

SEQ ID NO: 64862 - DNA, 80 bp, synthetic construct
  source 1..80: mol_type = other DNA
ccaatcaataacatatggctggtcaaccgcacccgtcaacccaatggcagccgaaattgtcaacaagtatgatcacactg

SEQ ID NO: 64863 - DNA, 80 bp, synthetic construct
  source 1..80: mol_type = other DNA
gcacaggtaataccaaaaggaatgcatggctatcaattggggcacaaaataagggtccactgttccctggtctacctaac

SEQ ID NO: 64864 - DNA, 80 bp, synthetic construct
  source 1..80: mol_type = other DNA
cactttccagactcctgcgcatcaactattgtgggtgccatggacacaaaccgtgggatgccatccactggggtttgtgg

SEQ ID NO: 64865 - DNA, 80 bp, synthetic construct
  source 1..80: mol_type = other DNA
tcctgcaattggtttccaaaacaatggtgatgtgtatgaaaatcacaccccctctgtgatgtttgctacatacaatccac

SEQ ID NO: 64866 - DNA, 80 bp, synthetic construct
  source 1..80: mol_type = other DNA
tggaggtggtaacaacccagttgcactttctgattcaattaatttggcatcattggcagttgtacgcattcagtctgacc

SEQ ID NO: 64867 - DNA, 80 bp, synthetic construct
  source 1..80: mol_type = other DNA
tggcgcacccgcgtcagtgccataactgaacccattaaggattttgtgatagcattttgccaggcagtccaaaaagagat

SEQ ID NO: 64868 - DNA, 80 bp, synthetic construct
  source 1..80: mol_type = other DNA
aaaattttgactcaacaggtttcagcaatgataaaaatgtggttgtgcagacttcatgggagatgtttgacaatgtgcag

SEQ ID NO: 64869 - DNA, 80 bp, synthetic construct
  source 1..80: mol_type = other DNA
cagatttatgggagggtcaccccaatgcagggcaccaattttgtctttacttcatctggggcaaatacgctcgtgttgtg

SEQ ID NO: 64870 - DNA, 80 bp, synthetic construct
  source 1..80: mol_type = other DNA
ggaggagcgcttgctcagttacgatggtcacgctgctattttacactcatcccaacttgaacgcaccgctgaagtcttcc

SEQ ID NO: 64871 - DNA, 80 bp, synthetic construct
  source 1..80: mol_type = other DNA
aaaatgacaacgtgaacataccccaaggtgccatggcagttttcaatgttgacaccaattcggcttcatttcaagtcggc

SEQ ID NO: 64872 - DNA, 80 bp, synthetic construct
  source 1..80: mol_type = other DNA
atcagggctgatggatacatggtcacaggaggcaccgttgggacccatgtggcacttgacccagaaaccagattccaatt

SEQ ID NO: 64873 - DNA, 80 bp, synthetic construct
  source 1..80: mol_type = other DNA
tgttggggtgctccccttaaccgctgctctctcagggcccaatgggaacaatggtcgggccaggcgtgtgttccaatgag

SEQ ID NO: 64874 - DNA, 80 bp, synthetic construct
  source 1..80: mol_type = other DNA
ccgccgggtccctcgtggacatggctggaaccatctctggcattgtgtatcaacagagacaagctgcccaactagaaaag

SEQ ID NO: 64875 - DNA, 80 bp, synthetic construct
  source 1..80: mol_type = other DNA
caaaacaagctaatggaggaatggatgggcaaacaagaggcactccaacgatcacagatggagttgactagagagttggc

SEQ ID NO: 64876 - DNA, 80 bp, synthetic construct
  source 1..80: mol_type = other DNA
agtcaatgcacctgtggctagagttcaagcagcacttgatgcagggtttgatcaaataagtgccaggcgtatggcggggt

SEQ ID NO: 64877 - DNA, 80 bp, synthetic construct
  source 1..80: mol_type = other DNA
ccaatgagagggtgatctatggcaatcttgaccgccccataatgcatgctggcacaatggaagggattcggaacaccagg

SEQ ID NO: 64878 - DNA, 80 bp, synthetic construct
  source 1..80: mol_type = other DNA
gggtcttaacccacagtatttgcaattggcatggttgcaaaaattgaaacctactacactgaccattatactacagcaac

SEQ ID NO: 64879 - DNA, 80 bp, synthetic construct
  source 1..80: mol_type = other DNA
catcttgagtcaatcagtagctccctagccactttcaaaaatggcactcaatttggaaaaccttctccacctaaatttat

SEQ ID NO: 64880 - DNA, 80 bp, synthetic construct
  source 1..80: mol_type = other DNA
gactggtccacccaaaatacaacaagctaccattaacattggccacaaccctggtagctcacaggcctaaattttatttt

SEQ ID NO: 64881 - DNA, 80 bp, synthetic construct
  source 1..80: mol_type = other DNA
attttattttggatgtgtatgattcctcacgcgttcgggaggagttagtgtagttaagcgactgcagtcatactacaacc

SEQ ID NO: 64882 - DNA, 80 bp, synthetic construct
  source 1..80: mol_type = other DNA
acaagcacactgtatctggctggctagccacaatgacatcccttgttgaggtttactcaaacctctttgatgacctgaga

SEQ ID NO: 64883 - DNA, 80 bp, synthetic construct
  source 1..80: mol_type = other DNA
aagtcctctgtaaccatcattgcaagtataggggctttctttgacatgtgtaaagactttattagtgaagtgatcagttt

SEQ ID NO: 64884 - DNA, 80 bp, synthetic construct
  source 1..80: mol_type = other DNA
agtaaaaaccactttcaccccgcaagggccaactgacttggggtgggcagccgtgcttgcaggagccactatgatcttgc

SEQ ID NO: 64885 - DNA, 80 bp, synthetic construct
  source 1..80: mol_type = other DNA
gggtcgttcccgtttccaccccattcgacttcgtgcggggcttacgccaccacctaggtttgtgctctatccgtgggatg

SEQ ID NO: 64886 - DNA, 80 bp, synthetic construct
  source 1..80: mol_type = other DNA
gcggagggcacttatgaaaccccaaacatcacagtgaatgggtttcatattaggataaccaatgggtacccaacaaagaa

SEQ ID NO: 64887 - DNA, 80 bp, synthetic construct
  source 1..80: mol_type = other DNA
actcctgtgtttttgaagcgcacgctcacggcaacacccaggggcattagggccctattggacatcacttcaattaaaag

SEQ ID NO: 64888 - DNA, 80 bp, synthetic construct
  source 1..80: mol_type = other DNA
gtgattggttggtatggcttctaagccattctacccaattagtttcaactctagagttgaagcaactgtccttctctccg

SEQ ID NO: 64889 - DNA, 80 bp, synthetic construct
  source 1..80: mol_type = other DNA
tcctcaaaatatcggggtgtccaaatgttatgagttactggcagcgactgttgaaagtttgtgctggcatcacaacgatc

SEQ ID NO: 64890 - DNA, 80 bp, synthetic construct
  source 1..80: mol_type = other DNA
gctgcagcagcaagggccttcacttgggtgcgtgacctgatcattgaggctgagggtaaggcgcggctcaagaagtacat

SEQ ID NO: 64891 - DNA, 80 bp, synthetic construct
  source 1..80: mol_type = other DNA
ggcacgcactgccgctcttttggagcttgccgcttctcgtgacgtcaccggcacggaagaacttaaaagattgctggaat

SEQ ID NO: 64892 - DNA, 80 bp, synthetic construct
  source 1..80: mol_type = other DNA
gtttcacccaactcatagaggagggcacggaactcatacaggaatttggaacgtcacccatggcaggtctgactcgctct

SEQ ID NO: 64893 - DNA, 80 bp, synthetic construct
  source 1..80: mol_type = other DNA
tacgttagtgagcttgaaacggctgccaatggcattaggagcaccatcttgctggacacacctcgaaaggtgcctgttgc

SEQ ID NO: 64894 - DNA, 80 bp, synthetic construct
  source 1..80: mol_type = other DNA
aattgttttgactggaccacctggcattggtaaaacccatctcgcacaacacctggcggcaggctttggtaagtcctcca

SEQ ID NO: 64895 - DNA, 80 bp, synthetic construct
  source 1..80: mol_type = other DNA
acttttccgtcacgctggaccaccatgatgcgtacacgggcaatgatgtggccatctgggatgaatttgatgttgatgcc

SEQ ID NO: 64896 - DNA, 80 bp, synthetic construct
  source 1..80: mol_type = other DNA
gagatgcgacgcgctattgcgcgccgcatcccggttgatggcctatctttctctgctgaagggctcctcgacgcctttgc

SEQ ID NO: 64897 - DNA, 80 bp, synthetic construct
  source 1..80: mol_type = other DNA
caagggaaatttgtggaaacaatgataggcattgtcaacactgcgccttacccactgaattgtgaccgggttgagaataa

SEQ ID NO: 64898 - DNA, 80 bp, synthetic construct
  source 1..80: mol_type = other DNA
gggtaaggttttcacatccaactacattatttgtaccagcaactaccccacttctgtgttgcctgaaaacccacgagccg

SEQ ID NO: 64899 - DNA, 80 bp, synthetic construct
  source 1..80: mol_type = other DNA
gcgcgttctaccgtcgtatcactacggtagacgtgtcatcacccactattgatgattggaaaaagaaaaaccctggaaaa

SEQ ID NO: 64900 - DNA, 80 bp, synthetic construct
  source 1..80: mol_type = other DNA
cgaccaccccaagacttatacaagaaggatttttcccatctgcgcttgtcagtccggccttttctagggtataaccctga

SEQ ID NO: 64901 - DNA, 80 bp, synthetic construct
  source 1..80: mol_type = other DNA
aggggacacgttggagggggtgcgggtcaagcccatcctgacaagtgtggacggcctatcaaggattatggagaccaaat

SEQ ID NO: 64902 - DNA, 80 bp, synthetic construct
  source 1..80: mol_type = other DNA
tcaaagaacaaggcaatgagctacgcaacctatggatcacttgcccccgtgatttggtgacccctgccacctcaggatta

SEQ ID NO: 64903 - DNA, 80 bp, synthetic construct
  source 1..80: mol_type = other DNA
aaatcttatatggcagccaatcgagcacttgctcaagtgttttctgagccttcctctaatgagatagctgagacatgtac

SEQ ID NO: 64904 - DNA, 80 bp, synthetic construct
  source 1..80: mol_type = other DNA
atcacgcatctttgtctcagccaataaccccccgacaacttttgtgggcagacacatcaaaataacagctatcaacccgt

SEQ ID NO: 64905 - DNA, 80 bp, synthetic construct
  source 1..80: mol_type = other DNA
gggatgcctcacttgccaattcaatgctgtcaatgtttgaaaccaacacccacataccagctgccacacaaagggagatc

SEQ ID NO: 64906 - DNA, 80 bp, synthetic construct
  source 1..80: mol_type = other DNA
atgtaccgtgtttggtcacccctcattcacttgcagactcgggaaccaaacacccaaatgctgccttacatcaatagagt

SEQ ID NO: 64907 - DNA, 80 bp, synthetic construct
  source 1..80: mol_type = other DNA
atcgaaaccccccgttgatattaatcccgacaccacctttcgtgagttgttcgggatagacccccacgaacagtttcccc

SEQ ID NO: 64908 - DNA, 80 bp, synthetic construct
  source 1..80: mol_type = other DNA
tgtgcctgtgacatcctcctttgactttatacgcgggttgaggcaccaccttggtctgtgttcagtcagaggaatgtgga

SEQ ID NO: 64909 - DNA, 80 bp, synthetic construct
  source 1..80: mol_type = other DNA
aagcttaccaggggtggcatagctctgccacaatcattgagtttttgtccaagcatatggaggatgttaccttcccttca

SEQ ID NO: 64910 - DNA, 80 bp, synthetic construct
  source 1..80: mol_type = other DNA
aacccagagtgcactgtctttcgggcggctgatggtgatgtcatcttttacacatttgggtcattcgcatgtttcgtgtc

SEQ ID NO: 64911 - DNA, 80 bp, synthetic construct
  source 1..80: mol_type = other DNA
cccggcacgagtaccctttgttggagacccccccaagagcgtgcattctaacatcacacgcaacatgacgtgggtagaaa

SEQ ID NO: 64912 - DNA, 80 bp, synthetic construct
  source 1..80: mol_type = other DNA
ccttgagactgctagtagagacaatcactgagagtctcgcccattttggaccactcttattaatgctccacaatgtgacc

SEQ ID NO: 64913 - DNA, 80 bp, synthetic construct
  source 1..80: mol_type = other DNA
aatgctccacaatgtgacctacttgacaacaagatctcagagagatgaagaagccaaaggcaagaccaagcacggcaggg

SEQ ID NO: 64914 - DNA, 80 bp, synthetic construct
  source 1..80: mol_type = other DNA
tacttgacaacaagatctcagagagatgaagaagccaaaggcaagaccaagcacggcaggggggctaagcatgcacggcg

SEQ ID NO: 64915 - DNA, 80 bp, synthetic construct
  source 1..80: mol_type = other DNA
tggtggcgtcagcttgtcagacgatgagtatgacgagtggcgagacctggtccgtgattggcggcaggacatgaccgtca

SEQ ID NO: 64916 - DNA, 80 bp, synthetic construct
  source 1..80: mol_type = other DNA
gtgagtttgtggagctccgtgaacggtatgcacttggaatggattcagaggatgtccaacgttaccgtgcctggctgcaa

SEQ ID NO: 64917 - DNA, 80 bp, synthetic construct
  source 1..80: mol_type = other DNA
attcgagccatgcgtctgggcgctggtgcataccaacatgccaccattattgggcgtgggcgtgtggaggacaccatcat

SEQ ID NO: 64918 - DNA, 80 bp, synthetic construct
  source 1..80: mol_type = other DNA
ccgcacacagcctatgcgtgctccacgagcacctcgttcacaggagtatgacgaggaagccccaacacctgttgtcacct

SEQ ID NO: 64919 - DNA, 80 bp, synthetic construct
  source 1..80: mol_type = other DNA
tgtccatcacagatttggctaagttgcaaggtgagcttgtggatgcggcacacaacccaggacatgtcctgcggcgccac

SEQ ID NO: 64920 - DNA, 80 bp, synthetic construct
  source 1..80: mol_type = other DNA
ttaccagtaacggagaacatgtgggatttgggtgtcacattggcaacggggttgtgatcaccgtcacccatgttgcggct

SEQ ID NO: 64921 - DNA, 80 bp, synthetic construct
  source 1..80: mol_type = other DNA
gcggcagatgccgttgaggggcttgaattctcagttagaaagactgagggcgagacaacttgggtcaacacatcactcag

SEQ ID NO: 64922 - DNA, 80 bp, synthetic construct
  source 1..80: mol_type = other DNA
ccatttgccacattaccaactaggggatggtgtccccgtatattactcatccaggctacaccctgtcaccaccattgcag

SEQ ID NO: 64923 - DNA, 80 bp, synthetic construct
  source 1..80: mol_type = other DNA
agggcacctacgagactccaaatatcacggtccacggctaccacttacgcattatcaatggttacccaacgaaacgaggg

SEQ ID NO: 64924 - DNA, 80 bp, synthetic construct
  source 1..80: mol_type = other DNA
gactgtggtacgccatattttgactcatgccgtaggttggtgggcttgcatgctgcaaccgcgacaaatggggaaacaaa

SEQ ID NO: 64925 - DNA, 80 bp, synthetic construct
  source 1..80: mol_type = other DNA
acttgcacaaaaggtgagtcgtgtgtctaaggtggagaatgcttttgcctggaaaggcttacccgtcatacgtgggccag

SEQ ID NO: 64926 - DNA, 80 bp, synthetic construct
  source 1..80: mol_type = other DNA
actgtggcggcatgcccaccgggactcggtatcatcggtccccagcgtggcccaaccaggaccctagcgagacccatgca

SEQ ID NO: 64927 - DNA, 80 bp, synthetic construct
  source 1..80: mol_type = other DNA
cctgccccatttggatcaggagacacacgatacaaattttcacaagtggaaatgttggtcacaggactgaaaccctattc

SEQ ID NO: 64928 - DNA, 80 bp, synthetic construct
  source 1..80: mol_type = other DNA
agaacccaccccaggcatccccccagcactactacagcgtgccgcaacacatacccgcacgtatctggaatcaattgtgg

SEQ ID NO: 64929 - DNA, 80 bp, synthetic construct
  source 1..80: mol_type = other DNA
gtacacatcgctctcataatttgacttacggggaggcgtgtgcccttctagatcgcggcacttcttgtggaccattcata

SEQ ID NO: 64930 - DNA, 80 bp, synthetic construct
  source 1..80: mol_type = other DNA
tattccaccgattcgctcaccaaattaattaacaagatcaccaaatatgtccctgtacaggcaacgctggcagagatgca

SEQ ID NO: 64931 - DNA, 80 bp, synthetic construct
  source 1..80: mol_type = other DNA
gcaggtcagaagggtgactattgggatgaggaccgccagtgttacactggcgttttggcagagcatcttgctaaagtctg

SEQ ID NO: 64932 - DNA, 80 bp, synthetic construct
  source 1..80: mol_type = other DNA
ggatgcagctaaccgcggtgttgcaccacaaaacgcctacaagcttgctctgaaagacgagctccggccaattgagaaga

SEQ ID NO: 64933 - DNA, 80 bp, synthetic construct
  source 1..80: mol_type = other DNA
accagcagggcaagcggcggttgctgtggggttgtgacgcaggggcgacgcttgttgccactgctgcatttaaaggaata

SEQ ID NO: 64934 - DNA, 80 bp, synthetic construct
  source 1..80: mol_type = other DNA
gccacccggttgcaagcggtcgcacccatgacacccgtgggtgttggtatcaacatggacagttatcaagttgaagtgct

SEQ ID NO: 64935 - DNA, 80 bp, synthetic construct
  source 1..80: mol_type = other DNA
caatgaatctcttaagggtggtgtggtctattgtctggactacagtaagtgggactcaacacaacaccctgctgtcactg

SEQ ID NO: 64936 - DNA, 80 bp, synthetic construct
  source 1..80: mol_type = other DNA
ctgcatccctgtcaattttggaaaggctgtcagaggccacacccatcaccacatcagcagtcgagcttctctcgtcgcct

SEQ ID NO: 64937 - DNA, 80 bp, synthetic construct
  source 1..80: mol_type = other DNA
gcccgtggccacctcaacgacatagtcttcatcaccaaatctgggctgccctcgggcatgccattcactagtgtgattaa

SEQ ID NO: 64938 - DNA, 80 bp, synthetic construct
  source 1..80: mol_type = other DNA
ttcactcaaccacatgacctattttgcagcagcagtgcttaaggcctatgaacaacatggtgccccttatactggtaatg

SEQ ID NO: 64939 - DNA, 80 bp, synthetic construct
  source 1..80: mol_type = other DNA
tgttccaggtggagactgtccacacatatggtgatgactgcatatattcactgtgcccagcaacggcatccatttttgag

SEQ ID NO: 64940 - DNA, 80 bp, synthetic construct
  source 1..80: mol_type = other DNA
actgtcctggctaacttgagtgcttttggcctgaaacccactgcagcagacaagacagagaaaattacacccacccatac

SEQ ID NO: 64941 - DNA, 80 bp, synthetic construct
  source 1..80: mol_type = other DNA
ggctcgcagggcccacgagagagagagagctgacctttttaaggagttgccacttgtagacccagaggtcacacaacaac

SEQ ID NO: 64942 - DNA, 80 bp, synthetic construct
  source 1..80: mol_type = other DNA
cccagtcttcctcaaacgcactctaacatgcacccctcgcggcatccgaggactgcttgacatcacatcaattcgacgac

SEQ ID NO: 64943 - DNA, 80 bp, synthetic construct
  source 1..80: mol_type = other DNA
agttttattggatcaaggccaaccgcactacagacataacatccccacctgcatatgatagggaagccagaagcgtgcag

SEQ ID NO: 64944 - DNA, 80 bp, synthetic construct
  source 1..80: mol_type = other DNA
cttgaaaatgccctggcttatgcctcgcagcacggtcatgcggtctttgaagaaattgccgagatcgcaaagaaaactgc

SEQ ID NO: 64945 - DNA, 80 bp, synthetic construct
  source 1..80: mol_type = other DNA
tcaagccgaggggttggtgttgacaaatgtgaattatgaccaggctctcgccacctatgaagcgtggttcataggtggta

SEQ ID NO: 64946 - DNA, 80 bp, synthetic construct
  source 1..80: mol_type = other DNA
caggcaccagcccagatggccccagtgaagagaccaccaaattagtgtttgaaatggagggacttggctcccagcaaggc

SEQ ID NO: 64947 - DNA, 80 bp, synthetic construct
  source 1..80: mol_type = other DNA
cagcggcctgatgagcaggttgctaacagtgctacacaggccaccccccaagacacaattagtcccacaagtgcactttt

SEQ ID NO: 64948 - DNA, 80 bp, synthetic construct
  source 1..80: mol_type = other DNA
gttgccaactcaaattgaggtgccaaacgccactgcccagcgtgttgagttggctgcagcaacaggggccattaccagca

SEQ ID NO: 64949 - DNA, 80 bp, synthetic construct
  source 1..80: mol_type = other DNA
atgtcccaaactgtgtccgtgagtgctttgccgctgtaacaacaattccatggactacacggcaggccgccaacacattc

SEQ ID NO: 64950 - DNA, 80 bp, synthetic construct
  source 1..80: mol_type = other DNA
ttgggtgccatccaccttggtccacgtatcaacccatacactgcccatctgagtgccatgtttgcaggctggtgaggtgg

SEQ ID NO: 64951 - DNA, 80 bp, synthetic construct
  source 1..80: mol_type = other DNA
attccaagttcgtgtcacattatctggatctgggttgtatgccggtcgtgtggtcactgccatcctgccacctggcgtca

SEQ ID NO: 64952 - DNA, 80 bp, synthetic construct
  source 1..80: mol_type = other DNA
aaaagtcttacttctatgccatgtggcgacaggttgttaagaagggcaaggagtatttcataccattggtcaagtgtacc

SEQ ID NO: 64953 - DNA, 80 bp, synthetic construct
  source 1..80: mol_type = other DNA
atccggctgcggtgcaaaaccctggagtgttcccacacgcgttcattgacgcgcgcaccacagccccaatattgatcaac

SEQ ID NO: 64954 - DNA, 80 bp, synthetic construct
  source 1..80: mol_type = other DNA
ctgccagacatccgaccagtggacttccaccgggtggatggtgatgatgccacagcaacggtcgggctgtgggtggccca

SEQ ID NO: 64955 - DNA, 80 bp, synthetic construct
  source 1..80: mol_type = other DNA
accattgatcaaccctttccagattggctcagtgtcaacttgttggctaagctttgagaccaggccaggcccggactttg

SEQ ID NO: 64956 - DNA, 80 bp, synthetic construct
  source 1..80: mol_type = other DNA
acttctgcctcttgaaggccccagaacaggagatggacaacggcatatcacctgccgctctcctcccgcgtcgcctcggg

SEQ ID NO: 64957 - DNA, 80 bp, synthetic construct
  source 1..80: mol_type = other DNA
cgttcgaaaggtaatcgcatgggaggtagggttgtgggcattgttgttgtcgcacgtgcagagcaggtcaaccaccactt

SEQ ID NO: 64958 - DNA, 80 bp, synthetic construct
  source 1..80: mol_type = other DNA
ttctgctagttccaccacactcggctggtcaacactaccactagaacctatggctggggacgtgtactggcatggcactg

SEQ ID NO: 64959 - DNA, 80 bp, synthetic construct
  source 1..80: mol_type = other DNA
acgactctggaaaaattcgtggccttgtcagtgcagcaggaaagggcatcatcttccccaacatcgtcaaccattggacc

SEQ ID NO: 64960 - DNA, 80 bp, synthetic construct
  source 1..80: mol_type = other DNA
gatgttgccctgtctgcaaagacgacgggcaacacaactattccaaccagtgatttctccgcttcacccggagcctctgg

SEQ ID NO: 64961 - DNA, 80 bp, synthetic construct
  source 1..80: mol_type = other DNA
tcctttggtgacgtttgcggacaatggcgacgtgaacgagcagacagcacgaaatgccattttcaccgctgctactcaag

SEQ ID NO: 64962 - DNA, 80 bp, synthetic construct
  source 1..80: mol_type = other DNA
atttcactgctttgtcccagacctttgatgccgccggcatgtgggtgtggttgccctggacatcacaaaaacctggtcaa

SEQ ID NO: 64963 - DNA, 80 bp, synthetic construct
  source 1..80: mol_type = other DNA
tcatggagaaagaagttttctgaacccgcagaggtggtacgccagctcattgtgcacttttgcgagggtatgcgtactca

SEQ ID NO: 64964 - DNA, 80 bp, synthetic construct
  source 1..80: mol_type = other DNA
tcagacagtaacatctacatcaatcccacctggattaatggtaatcctgctcatgcaatccaggagcgttgcaccaatat

SEQ ID NO: 64965 - DNA, 80 bp, synthetic construct
  source 1..80: mol_type = other DNA
gattggcaccaatttccaatttgggggtacaggcacaaacaacataatgctgtgggaggagcagcacttcacttcctggc

SEQ ID NO: 64966 - DNA, 80 bp, synthetic construct
  source 1..80: mol_type = other DNA
ctggtgctgctcgtatatattgttcacaattggagagtactgctgaaattttccaaaacaacatagtgaacatcccagcc

SEQ ID NO: 64967 - DNA, 80 bp, synthetic construct
  source 1..80: mol_type = other DNA
aaccaaatggcagtgtttaatgtggaaacagctgggaattcatttcaaattggcatcctcccaaatggttactcagtcac

SEQ ID NO: 64968 - DNA, 80 bp, synthetic construct
  source 1..80: mol_type = other DNA
caatgccacgattggaacacaccaactgttggactatgaaactagcttcaagtttgttggactctttccccaaagcactt

SEQ ID NO: 64969 - DNA, 80 bp, synthetic construct
  source 1..80: mol_type = other DNA
ctcttcaggggcccaatgggaacagtggacgggccgtcaggttcctagaataatgtcttggttcaatgctgcagcacttg

SEQ ID NO: 64970 - DNA, 80 bp, synthetic construct
  source 1..80: mol_type = other DNA
gtcttggctctgtcgtggacatggccgggacgatttcctccattgttgcccaacatcggcaaatagacatgatggctgaa

SEQ ID NO: 64971 - DNA, 80 bp, synthetic construct
  source 1..80: mol_type = other DNA
gctaacagaatacaggcagattgggttcgccgccaagaacagttgctcatgcgtgggcaggatatgacacgtgatttgtc

SEQ ID NO: 64972 - DNA, 80 bp, synthetic construct
  source 1..80: mol_type = other DNA
aatcaatggccccgcacagcgtgtggagtcccttgtcaacgcagggttcactcccacggacgcccgccgcatggtgggtg

SEQ ID NO: 64973 - DNA, 80 bp, synthetic construct
  source 1..80: mol_type = other DNA
gctccgaaacagtcagttatgggttgctggatcgacccgtgctgcaaaggagcatcttggcaggcatcagtgaaactcgc

SEQ ID NO: 64974 - DNA, 80 bp, synthetic construct
  source 1..80: mol_type = other DNA
gttcaacacaaatgtcaattatatcaacctatctctgttggccaagttgcgaccaacagtgctaacaatgattttacaac

SEQ ID NO: 64975 - DNA, 80 bp, synthetic construct
  source 1..80: mol_type = other DNA
catctccaaaacatgcaggggacactcagtgccttcaagactggcacgggtgtcggcactaagccagcacctgccggatt

SEQ ID NO: 64976 - DNA, 80 bp, synthetic construct
  source 1..80: mol_type = other DNA
tggtaatccaaattacaaaactggcccccctaaaatcaaccttggattcaatccccctagcactaatgtctaatattctt

SEQ ID NO: 64977 - DNA, 80 bp, synthetic construct
  source 1..80: mol_type = other DNA
attccttttctttctttccttccatggtccctcacgcgttcgggggggtgaaatttggttaagcgaccaaagccatgttc

SEQ ID NO: 64978 - DNA, 80 bp, synthetic construct
  source 1..80: mol_type = other DNA
tctttctttccttccatggtccctcacgcgttcgggggggtgaaatttggttaagcgaccaaagccatgttcttctttgg

SEQ ID NO: 64979 - DNA, 80 bp, synthetic construct
  source 1..80: mol_type = other DNA
ctcacctcagggtgagtggtagagaagagatttttgagacaagagaagatctggtcaatcacatacaccagaccgtcacc

SEQ ID NO: 64980 - DNA, 80 bp, synthetic construct
  source 1..80: mol_type = other DNA
agcataagaacacataccgtggctggctggccacagtgacagccctaatagaagtgtactccaaccttttccaagatatg

SEQ ID NO: 64981 - DNA, 80 bp, synthetic construct
  source 1..80: mol_type = other DNA
cgtgagacggccgtgtctgcggtgtctgccatcactctactatttgagtccttgaaacatttcattgaagatgttatcgg

SEQ ID NO: 64982 - DNA, 80 bp, synthetic construct
  source 1..80: mol_type = other DNA
tctagtaaagggcacgtttcaggcacaaggacccactaactgtggctgggctgccattggggctggtgtgatcatgatac

SEQ ID NO: 64983 - DNA, 80 bp, synthetic construct
  source 1..80: mol_type = other DNA
cccaattgagttcaaccgtaaggttgaaacaacagtcctcttctctgctcacctcagggtgagcgggagagaggaaattt

SEQ ID NO: 64984 - DNA, 80 bp, synthetic construct
  source 1..80: mol_type = other DNA
tatggcttctaagccattctacccaattgagttcaaccaaaaggttgaaactgcaatcctcttttccgcccacctcaggg

SEQ ID NO: 64985 - DNA, 80 bp, synthetic construct
  source 1..80: mol_type = other DNA
gacatattgtgccgcatcccgacacccataccctccttcagtgcggaggggctccttgacgcattcgcatccaaaccccc

SEQ ID NO: 64986 - DNA, 80 bp, synthetic construct
  source 1..80: mol_type = other DNA
ggggcattctatcgccgtgtcacaacggtggatgtgtcatcccctattattgaggagtggaagaagaagaaccctggaaa

SEQ ID NO: 64987 - DNA, 80 bp, synthetic construct
  source 1..80: mol_type = other DNA
gaaaccccccgtggacctgtataagaaggatttttcccatctgcgcctctccatacgcccgtaccttggctacaacccgg

SEQ ID NO: 64988 - DNA, 80 bp, synthetic construct
  source 1..80: mol_type = other DNA
gtgggacgcttctcttgccaactcaatgctgtcaatgtttgagaccaacactcacataccagctgtcacgcaaagagaga

SEQ ID NO: 64989 - DNA, 80 bp, synthetic construct
  source 1..80: mol_type = other DNA
ttgtgccagtcacctcatcatttgattttattcgtggattgcgccaccaccttggcctgtgttctattaaggggatgtgg

SEQ ID NO: 64990 - DNA, 80 bp, synthetic construct
  source 1..80: mol_type = other DNA
tgtggacatcaaccctgacaccacattccgtgagctgttcgggattgacccacatgagcaattccctttgtccatcactg

SEQ ID NO: 64991 - DNA, 80 bp, synthetic construct
  source 1..80: mol_type = other DNA
tccgcacacaacccatgcgcgctccacgtgcaccccgttctacggggtacgatgaggaagccccaacaccaatagtcact

SEQ ID NO: 64992 - DNA, 80 bp, synthetic construct
  source 1..80: mol_type = other DNA
gaactccgagcgctcgaatgtgccactggcctccccgcaggataccattggcccaagtgctgcgctcttgctcccaactc

SEQ ID NO: 64993 - DNA, 80 bp, synthetic construct
  source 1..80: mol_type = other DNA
aaattgagactccaaatgccaccgcacagcgcgttgagctggcagccgcaactggagcaatcaccagcaatgttcccact

SEQ ID NO: 64994 - DNA, 80 bp, synthetic construct
  source 1..80: mol_type = other DNA
tgcatcagagaatgtttcgccagtgtcaccacgctcccctggaccacgcgtcaagctgccaacacgttcctgggcgcaat

SEQ ID NO: 64995 - DNA, 80 bp, synthetic construct
  source 1..80: mol_type = other DNA
cacaaccgctcattaaccccttccaaactggctcaatttccacgtgttggctgagttttgagacacgccctggtccggac

SEQ ID NO: 64996 - DNA, 80 bp, synthetic construct
  source 1..80: mol_type = other DNA
agtgcacaaatatgactggcaccaacttccagttcggtggcactggcaccaacaatatcatgttgtggcaggaacagcat

SEQ ID NO: 64997 - DNA, 80 bp, synthetic construct
  source 1..80: mol_type = other DNA
ccaggggcagcagaggtctactgttcccagcttgaaagcactgcagaaatgttccaaaataacatagttaacatccctgc

SEQ ID NO: 64998 - DNA, 80 bp, synthetic construct
  source 1..80: mol_type = other DNA
caaccaaatggcagtctttaatgtggaaactgctgggaacacgttccaaattggcatcctgccaaacgggtactgtgtca

SEQ ID NO: 64999 - DNA, 80 bp, synthetic construct
  source 1..80: mol_type = other DNA
cagcacaaaaacacctaccgtgggtggttggccactatcactgctcttattgaggtctattcaaatctgtttcaggacat

SEQ ID NO: 65000 - DNA, 80 bp, synthetic construct
  source 1..80: mol_type = other DNA
tgagtggaagggaggaaatctttgaaacaagacatgacatgtacacccatgtctgccaggtggttgccagggtgcggcgc

SEQ ID NO: 65001 - DNA, 80 bp, synthetic construct
  source 1..80: mol_type = other DNA
tcggtctggactaccatcaggcatgcccttcactagtgttgtcaactctctcaaccacatgacatattttgctgctgctg

SEQ ID NO: 65002 - DNA, 80 bp, synthetic construct
  source 1..80: mol_type = other DNA
actctctcaaccacatgacatattttgctgctgctgtcctcaaagcatatgaatctcggggggtgccatatactggcaat

SEQ ID NO: 65003 - DNA, 80 bp, synthetic construct
  source 1..80: mol_type = other DNA
atacaggccaataaccctcgaccccactttcgagtgggccgtttttcgtcgctgctacctcagggtagcacctcgggaaa

SEQ ID NO: 65004 - DNA, 80 bp, synthetic construct
  source 1..80: mol_type = other DNA
gcatgtggggcaagatacttaaggtgtgcgggggcatcacaactataaccgctgccatacgtggtatcaagtggctcaga

SEQ ID NO: 65005 - DNA, 80 bp, synthetic construct
  source 1..80: mol_type = other DNA
gaactgtatgaagaggctgaaagcaagaggcttgctaagatgtacatggctagggcagcagccttgattgagttagcagc

SEQ ID NO: 65006 - DNA, 80 bp, synthetic construct
  source 1..80: mol_type = other DNA
aagcagggaggtgactggggtcaaggagttgaaggaactcctcagttgcttcaccgtcctcatagaggaaggcgctgagc

SEQ ID NO: 65007 - DNA, 80 bp, synthetic construct
  source 1..80: mol_type = other DNA
tactgcaaaagtttggtacgagccccctctctggtctcatccgcacatatgtgtcggagctggaaacccaagcgaacaac

SEQ ID NO: 65008 - DNA, 80 bp, synthetic construct
  source 1..80: mol_type = other DNA
atcagatccactatcatgctagatacgccccgtgaggtcccagtagtcatcattttaactggcccaccaggcattgggaa

SEQ ID NO: 65009 - DNA, 80 bp, synthetic construct
  source 1..80: mol_type = other DNA
aacccggttggcccagttcataggggaaaagtttggtaaagtatctaacttcagtgtggcggtagaccaccatgatggtt

SEQ ID NO: 65010 - DNA, 80 bp, synthetic construct
  source 1..80: mol_type = other DNA
ctccctgggagggagtttgtggaggagggtctccttgacgcgttccacagcaagccagtggtcgaacctaatgaggatat

SEQ ID NO: 65011 - DNA, 80 bp, synthetic construct
  source 1..80: mol_type = other DNA
ccggctttctaccgccgagtcatcatcttggatgtgtcatccccagaacttgaagagtggaagaaaaagaaccctgggaa

SEQ ID NO: 65012 - DNA, 80 bp, synthetic construct
  source 1..80: mol_type = other DNA
gaagcccccgtctgatctgtataagcaagacttctcacacttaaagctaatgctccgcccctaccttggctacaaccccg

SEQ ID NO: 65013 - DNA, 80 bp, synthetic construct
  source 1..80: mol_type = other DNA
aaggggatacacttgatggcaccagagtcaaacccacccagatatccatcccaggcttggtgtcactcatgcaaaagagg

SEQ ID NO: 65014 - DNA, 80 bp, synthetic construct
  source 1..80: mol_type = other DNA
aaagacctttgtgtacgccaatcgtggtgtatgcgatgttatcccaaacccagcctcccgtgacatcacagagacatctg

SEQ ID NO: 65015 - DNA, 80 bp, synthetic construct
  source 1..80: mol_type = other DNA
tatcaaaaatttttgtctcctcaacggctcctccaccggaatttttaggccgccacgtgaccatcactgggtttgaactt

SEQ ID NO: 65016 - DNA, 80 bp, synthetic construct
  source 1..80: mol_type = other DNA
ggagacgcatccatagcaaactccttgctgtccatgttttccacaaatacacgtcttactgctggtgcacaaagagagta

SEQ ID NO: 65017 - DNA, 80 bp, synthetic construct
  source 1..80: mol_type = other DNA
tatgtacagaatttggaaccctatcattcatatccaagagaggtcaatcaacacacaaaatctgccatatgtcaaccgtg

SEQ ID NO: 65018 - DNA, 80 bp, synthetic construct
  source 1..80: mol_type = other DNA
tctcttcagagaattgtttggggtggatttacaagaacagtttccaatgtcaattcacgacctcgccaaattacaaggtg

SEQ ID NO: 65019 - DNA, 80 bp, synthetic construct
  source 1..80: mol_type = other DNA
agagcattccaagggtggcgatcgtcccagggcatcattgattttgttgcgaatcatatgaatgaagttacattccctag

SEQ ID NO: 65020 - DNA, 80 bp, synthetic construct
  source 1..80: mol_type = other DNA
cccccgcccgtgtgccttacgttggcaatccaccatccaccatccactcgaacgtcccaaggtgcatgacgtggggtgaa

SEQ ID NO: 65021 - DNA, 80 bp, synthetic construct
  source 1..80: mol_type = other DNA
actatcgggtatctctgtgaggtggtggcagaatttgcccttcattttggcccactaatcttagcagcaaccaacatagc

SEQ ID NO: 65022 - DNA, 80 bp, synthetic construct
  source 1..80: mol_type = other DNA
ttaatgatttcctcatgcttcgggagcgtagtgctctgggtatggatgatgaagatgtggcacgttacagagcatggttg

SEQ ID NO: 65023 - DNA, 80 bp, synthetic construct
  source 1..80: mol_type = other DNA
gagattcgtgccatgcggctagcaggtggcgcttacacccatgccacagtgattggcaaaggcggtgtgcgagatgaaat

SEQ ID NO: 65024 - DNA, 80 bp, synthetic construct
  source 1..80: mol_type = other DNA
tattaggacatctccgcgccgcgcccccatgagcgcacgacgtgccaactatgaagaggaaggccccactgcaattgttg

SEQ ID NO: 65025 - DNA, 80 bp, synthetic construct
  source 1..80: mol_type = other DNA
agttcaccaaccaaggtgaccacatagggtatggagtccatcttggtaacgggagagtggtcactgtcacccatgttgct

SEQ ID NO: 65026 - DNA, 80 bp, synthetic construct
  source 1..80: mol_type = other DNA
aagcagtggatgccttgcataaccctggacatcaattgcgtaggaagtacacaacacagaccctgaagaaactgattacc

SEQ ID NO: 65027 - DNA, 80 bp, synthetic construct
  source 1..80: mol_type = other DNA
tcatcatcggacaatgttgagggtgcacccttcaaggtacaaaggactgttggtgagactacttgggttgaaacacagct

SEQ ID NO: 65028 - DNA, 80 bp, synthetic construct
  source 1..80: mol_type = other DNA
ccctaactacccccacctacaaattggtacaggaagacccgtctactatacgatgcggttacatccagtggtgaccatca

SEQ ID NO: 65029 - DNA, 80 bp, synthetic construct
  source 1..80: mol_type = other DNA
cggaaggtacttttgaaaccccaaatattactgttcatggttaccatgttcgcatcacaaatgggtatcagaccaggaaa

SEQ ID NO: 65030 - DNA, 80 bp, synthetic construct
  source 1..80: mol_type = other DNA
ggtgactgtggcttaccctacctcaatgcaaataggcagctagtagggttgcacgctgggaccgacgtccaaggagaaac

SEQ ID NO: 65031 - DNA, 80 bp, synthetic construct
  source 1..80: mol_type = other DNA
caaattggcacaaaaagtagtcagggaactgcctgtggagagtgagtttcactggaagggcctccctgtgatcaaatctg

SEQ ID NO: 65032 - DNA, 80 bp, synthetic construct
  source 1..80: mol_type = other DNA
cacctgcatggccagaacaactccctgaggagacttatgctcccgccccctttggtgctggtgacaagcgctaccacttt

SEQ ID NO: 65033 - DNA, 80 bp, synthetic construct
  source 1..80: mol_type = other DNA
acccagactgagatgttggtaaatgcccttaagccttacactgagacaacacctggcattcccccttccttgctgtcacg

SEQ ID NO: 65034 - DNA, 80 bp, synthetic construct
  source 1..80: mol_type = other DNA
cgccacaacccatgtacgtacttaccttgaaacaatcattggtacgcaccgctctcctgtgctcacgttcacccaggcag

SEQ ID NO: 65035 - DNA, 80 bp, synthetic construct
  source 1..80: mol_type = other DNA
ttgagctacttgaaaagtccacctcttgtggcccattcatccaaggacttaaaggggattattgggatgacgaaacacaa

SEQ ID NO: 65036 - DNA, 80 bp, synthetic construct
  source 1..80: mol_type = other DNA
aagatcacaagggtggtgcctgtccaggccaccctacaagatatgcatgagcggcgcgacttcgaaagggaacgtgccga

SEQ ID NO: 65037 - DNA, 80 bp, synthetic construct
  source 1..80: mol_type = other DNA
caatatactggggccttacgtgaacatctagatagagcatgggactatgctgtgaggggcattgcgccagggaactttta

SEQ ID NO: 65038 - DNA, 80 bp, synthetic construct
  source 1..80: mol_type = other DNA
caaactagcactcaaggatgaactccgccccgaggaaaagaacaaagaagggaaaaggcggctgctatggggctgtgacg

SEQ ID NO: 65039 - DNA, 80 bp, synthetic construct
  source 1..80: mol_type = other DNA
ccgcaacaaccttgattgcagtggcagcatttaagccagttgccgcacgtctgcaagtagtaacaccaatgactccaatc

SEQ ID NO: 65040 - DNA, 80 bp, synthetic construct
  source 1..80: mol_type = other DNA
tccgttggtatcaacatggattcaatgcaaatgcaagtaatgaatgactccttgaggggtggtgtgctctactgtctaga

SEQ ID NO: 65041 - DNA, 80 bp, synthetic construct
  source 1..80: mol_type = other DNA
gttcttgccaatttgtcttcctttggcctcaagcctactgctgctgacaaaagtgcagatatcaaacccacccaaacacc

SEQ ID NO: 65042 - DNA, 80 bp, synthetic construct
  source 1..80: mol_type = other DNA
agtcttcttaaaaagaacattcacacagacaccctatggggtgagggcactgttggacatcaactccattgttcgacagt

SEQ ID NO: 65043 - DNA, 80 bp, synthetic construct
  source 1..80: mol_type = other DNA
cttattcaaggagctgcccctgctagatgaggagacaatacaaaaacccaagacatatttttattcaatgtggcgccagg

SEQ ID NO: 65044 - DNA, 80 bp, synthetic construct
  source 1..80: mol_type = other DNA
tctactgggtcaaggcgaaccgcaccagtgacccatctagtccccccgcatttgatcgcactgcacgcagtgcccaattg

SEQ ID NO: 65045 - DNA, 80 bp, synthetic construct
  source 1..80: mol_type = other DNA
gaagcagccctagcatatgcatcacaacatggacctttggtatttgacaaggtgcgtgacatcgccattagaacggctga

SEQ ID NO: 65046 - DNA, 80 bp, synthetic construct
  source 1..80: mol_type = other DNA
ttgtcaagaaaggtaaggcttactttatgccacttgtgaagacaaatggttgggttagcaaaatcacaaaaatcactgac

SEQ ID NO: 65047 - DNA, 80 bp, synthetic construct
  source 1..80: mol_type = other DNA
ggaacattgattatcacagaatggacagcattgaacccacttgttctcttggcttctgggtctaccaaccattgctcaac

SEQ ID NO: 65048 - DNA, 80 bp, synthetic construct
  source 1..80: mol_type = other DNA
cacctatgggtggtccactgcaccagttaatccaatggcagcggcaatccaaaccaaccacaaccacacgggaaccacca

SEQ ID NO: 65049 - DNA, 80 bp, synthetic construct
  source 1..80: mol_type = other DNA
aattggtttccagaacaatggggatgtctatgaaaatgagactcccgcagtgatgtttgccactctaaaccctctaactg

SEQ ID NO: 65050 - DNA, 80 bp, synthetic construct
  source 1..80: mol_type = other DNA
gcggacttcccaacagctggttttcgcaacgacatgaatgtggttgtggaaatgtcctgggagatgtactcagggtcaca

SEQ ID NO: 65051 - DNA, 80 bp, synthetic construct
  source 1..80: mol_type = other DNA
cccatcaaagatttcatcatagcattttgccaggcagtccagcaagagatgggttcggacccacggtatttgcaactagc

SEQ ID NO: 65052 - DNA, 80 bp, synthetic construct
  source 1..80: mol_type = other DNA
cattcgggaagatggatacatggtcactggtggtactgttggaacccatgttgctctggatgcggaaacacgatttcagt

SEQ ID NO: 65053 - DNA, 80 bp, synthetic construct
  source 1..80: mol_type = other DNA
atcaggcaaaccaatcatttgaacgccatcagttcagcaatggctacattcaaaaatggcacacaatttggaaaacctgc

SEQ ID NO: 65054 - DNA, 80 bp, synthetic construct
  source 1..80: mol_type = other DNA
ttggttccaaaaactgaagccaactgtgcttactatcattttacaacaacacaaaaataccgtgtcagggtggttagcga

SEQ ID NO: 65055 - DNA, 80 bp, synthetic construct
  source 1..80: mol_type = other DNA
tcctccaagaatccaaactgggacaccagtcaaaccttcaatcaaccttaatcatcaacctggatcttctaatgtttaat

SEQ ID NO: 65056 - DNA, 80 bp, synthetic construct
  source 1..80: mol_type = other DNA
catttgtagaggatttcaaagaattagaacattattttaccacgcgcttgtgcgcgtggttggagcgtgtcactaggacc

SEQ ID NO: 65057 - DNA, 80 bp, synthetic construct
  source 1..80: mol_type = other DNA
cactgacagctctagtggaagtctactccaatttatttgatgacttacgcaaatctgccgttaccatcatatcggcatta

SEQ ID NO: 65058 - DNA, 80 bp, synthetic construct
  source 1..80: mol_type = other DNA
agtgccttctttgatctgtgtaaggatttcattgccagtgtcgttgatttgattaaaaccacatttacacctcagggccc

SEQ ID NO: 65059 - DNA, 80 bp, synthetic construct
  source 1..80: mol_type = other DNA
cactgatcttggttggaccgcagtcatggctggggcagtcatgattttgctaaaggcttctggttgccctggtgtgtcag

SEQ ID NO: 65060 - DNA, 80 bp, synthetic construct
  source 1..80: mol_type = other DNA
cgctgcttcgcggggcatttccccaccaaactcatacaagttagcgctcaaggatgaactacgaccaatggagaaaaatt

SEQ ID NO: 65061 - DNA, 80 bp, synthetic construct
  source 1..80: mol_type = other DNA
tgctgcggcggcccgtgctgtcgtgtgggtgcgagacatcatagcagaggctgatggcaaggctaggctgaaaaagtaca

SEQ ID NO: 65062 - DNA, 80 bp, synthetic construct
  source 1..80: mol_type = other DNA
tggctcgcacggcagccctacttgagcttgcagcgtctcgggacgtgacgggtacagacgagctcaaacgcctattagaa

SEQ ID NO: 65063 - DNA, 80 bp, synthetic construct
  source 1..80: mol_type = other DNA
tgtttcacacagctcatcgaggagggtactgagttgatccaggagtttggtacatcaccgcttgctggcctgactagatc

SEQ ID NO: 65064 - DNA, 80 bp, synthetic construct
  source 1..80: mol_type = other DNA
cgatcatccttactggtcctcctggtataggcaaaacaagacttgcacagcaccttgctgcaggctttggcaaagtgtca

SEQ ID NO: 65065 - DNA, 80 bp, synthetic construct
  source 1..80: mol_type = other DNA
cagactgaggtgcaagcatttgcaccgcagtttggctgccgcccccacattcacggaggagggcttgttggactctttcc

SEQ ID NO: 65066 - DNA, 80 bp, synthetic construct
  source 1..80: mol_type = other DNA
agtttaaggagcagagtggtgaacatcggaacttgtggataacatgcccgcgtgacctggtggcccccgccgcatctggt

SEQ ID NO: 65067 - DNA, 80 bp, synthetic construct
  source 1..80: mol_type = other DNA
ttgaaagcatacatggctgccaaccgagcgctcgcacaggtgttccaggaaccatcttcacaggacattggtgaaacttg

SEQ ID NO: 65068 - DNA, 80 bp, synthetic construct
  source 1..80: mol_type = other DNA
catcccgtgtgtacgtgtcatgtaacaacccacctcccacatacagtggacgagtggtgaaaatcacggccatcaatcca

SEQ ID NO: 65069 - DNA, 80 bp, synthetic construct
  source 1..80: mol_type = other DNA
tttcaaaaccaccggttgacatcaatcctgacacaacgttccgtgagctatttggtgttgatccccatgagcagttcccg

SEQ ID NO: 65070 - DNA, 80 bp, synthetic construct
  source 1..80: mol_type = other DNA
agggcttaccagggttggaacagttccagctcgatcttggaattcttgtcaaagcatatggctgatgtcaatttcccaca

SEQ ID NO: 65071 - DNA, 80 bp, synthetic construct
  source 1..80: mol_type = other DNA
atacctcgccacacggtctggtcgggaggaggaggccaaaggaaagaccaaacatggacgtggtgccaaacatgccagga

SEQ ID NO: 65072 - DNA, 80 bp, synthetic construct
  source 1..80: mol_type = other DNA
ggggaggtgtcagcttgtctgatgacgagtatgatgagtggcgtgacctggtacgggactggcggcaagacatgaccgtt

SEQ ID NO: 65073 - DNA, 80 bp, synthetic construct
  source 1..80: mol_type = other DNA
tccgcacccaaccaatgcgtgctccacgcgctccccgcaatcaaggttatgatgaagaagctcccacaccaattgtcaca

SEQ ID NO: 65074 - DNA, 80 bp, synthetic construct
  source 1..80: mol_type = other DNA
ctgtccattcacgatttggcaaaattacagggtgagcttgtggacgcggcacgaacccaggcaatgtgttgcggcgccac

SEQ ID NO: 65075 - DNA, 80 bp, synthetic construct
  source 1..80: mol_type = other DNA
gtcatttgccccactaccagatcggtgatggcgcccctgtttactattcggcgcgcctacaccctgtcaccacacttgcg

SEQ ID NO: 65076 - DNA, 80 bp, synthetic construct
  source 1..80: mol_type = other DNA
gagggcacgtatgagacacccaacattacggtccaggggtatcacctgcgcatcataaatggatacccaacaaagcgtgg

SEQ ID NO: 65077 - DNA, 80 bp, synthetic construct
  source 1..80: mol_type = other DNA
ggactgtggcacaccctattttgattcatgccgtcgtttggtcggactgcacgcagccacatcaacaaatggagaaacca

SEQ ID NO: 65078 - DNA, 80 bp, synthetic construct
  source 1..80: mol_type = other DNA
ctgagcccacccctggcataccccccgctttgttacaacgtgcagccatccacacacgcacgtatctggaaacaataatt

SEQ ID NO: 65079 - DNA, 80 bp, synthetic construct
  source 1..80: mol_type = other DNA
aatgcacaaggaaaaagacgcctcctgtggggttgtgatgcgggtgccacattggtggccaccgcagccttcaagggtgt

SEQ ID NO: 65080 - DNA, 80 bp, synthetic construct
  source 1..80: mol_type = other DNA
cagccgcttcacttgggattttggagagattgtctgaagccactcccatcacaacatcagctgtcgagttgctgtcatcc

SEQ ID NO: 65081 - DNA, 80 bp, synthetic construct
  source 1..80: mol_type = other DNA
aaacacgccgtgcttttgagcgagagcgcgcggagctgtttaaggaacttccacatgctgacttggatgtgagtcgccaa

SEQ ID NO: 65082 - DNA, 80 bp, synthetic construct
  source 1..80: mol_type = other DNA
actcctgtcttccttaaaagaactttaacatgcacaccccgtggcgtgcgtggcctattagacattacatccataaagag

SEQ ID NO: 65083 - DNA, 80 bp, synthetic construct
  source 1..80: mol_type = other DNA
ggcctgacacaaggtagccccagtgaagagaccaccaaattagtgtttgaaatggagggtaatgcccgccatgatgagcc

SEQ ID NO: 65084 - DNA, 80 bp, synthetic construct
  source 1..80: mol_type = other DNA
taaggctcagagcagcaacaatgttccgcttgcatcacctcaggacaccatcggtcctagtgcggcattacttctcccaa

SEQ ID NO: 65085 - DNA, 80 bp, synthetic construct
  source 1..80: mol_type = other DNA
aactgtgttcgcgagtgttttgccagtgtcaccactttgccatggactactcgcatggcggctaatacttttctgggggc

SEQ ID NO: 65086 - DNA, 80 bp, synthetic construct
  source 1..80: mol_type = other DNA
tattcatcttggcccccgaatcaacccctacactgcacatatgagtgccatgtttgctggatggggtggcagtttccaag

SEQ ID NO: 65087 - DNA, 80 bp, synthetic construct
  source 1..80: mol_type = other DNA
cttcttaaggcccctgaacagcagatggacaatgggatttcaccagcaaacctcttacctcggaggcttgggcggtcacg

SEQ ID NO: 65088 - DNA, 80 bp, synthetic construct
  source 1..80: mol_type = other DNA
tggcaaccgacttgggggtcgaattgtcgggttggccgtcgtggcagttgctgaacaggttaaccaccattttatggcta

SEQ ID NO: 65089 - DNA, 80 bp, synthetic construct
  source 1..80: mol_type = other DNA
attccacaactttaggctggtccactttgccaattgaaccaattgctggcgccatttcatggtaccaaaccccaaatcaa

SEQ ID NO: 65090 - DNA, 80 bp, synthetic construct
  source 1..80: mol_type = other DNA
accattacaacacgtggtttgttgagtgctgaaggcaaaggcatcatctttccaaacattgtcaaccattggaccgatgt

SEQ ID NO: 65091 - DNA, 80 bp, synthetic construct
  source 1..80: mol_type = other DNA
ggcactatccagcaaaacggccggtcaaacagccgtcccgagcactcaggagattctcaaccgctcaccaggtgcttctg

SEQ ID NO: 65092 - DNA, 80 bp, synthetic construct
  source 1..80: mol_type = other DNA
ggcctgtggtgatgttccaaaacaatggtgatgttaatgagagcagtgcaaacaactgtgttctgacggcggcatcccaa

SEQ ID NO: 65093 - DNA, 80 bp, synthetic construct
  source 1..80: mol_type = other DNA
gacttcactacgctgtcctccaactttgatgctgctggcatgtgggtgtggctcccatggacatcgagcacccctaatgg

SEQ ID NO: 65094 - DNA, 80 bp, synthetic construct
  source 1..80: mol_type = other DNA
taccaccaaccaaaatgtgtatgtcacacccacttggatcaatggtgatccttccaaacccatccatggtaaatgcacca

SEQ ID NO: 65095 - DNA, 80 bp, synthetic construct
  source 1..80: mol_type = other DNA
acatgattggcaccaatttccaatttggtggcacaggcacaaacaacatcatgttgtggcaagagcagcacttcacatcg

SEQ ID NO: 65096 - DNA, 80 bp, synthetic construct
  source 1..80: mol_type = other DNA
cgttccccggggcggcggaggtgtattgttctcagttggaaaccacggctgagatgtttcaaaataacgtggtgaacatt

SEQ ID NO: 65097 - DNA, 80 bp, synthetic construct
  source 1..80: mol_type = other DNA
agttctccaccaatgcaaattacatcaatttgtccctcattgccaaactccggccaacagtcctcacaatgattctccag

SEQ ID NO: 65098 - DNA, 80 bp, synthetic construct
  source 1..80: mol_type = other DNA
caacacaagaacacctacagagggtggttggcaactgtcaccgcattggttgaggtgtactccaacctgttccaagacat

SEQ ID NO: 65099 - DNA, 80 bp, synthetic construct
  source 1..80: mol_type = other DNA
atcttgttaagagcacgttccagtcacaaggcccaacatcttacggttgggctgctattgttgctggtgcattgctcatt

SEQ ID NO: 65100 - DNA, 80 bp, synthetic construct
  source 1..80: mol_type = other DNA
ttcaccagcaatggggaccatgtgggttttggttgccacgttggcaacggcgtggtagtgacagtcactcacgtggccgc

SEQ ID NO: 65101 - DNA, 80 bp, synthetic construct
  source 1..80: mol_type = other DNA
tgggcggtctcgaggcaatcgccttggtggccgtataacaggtttggtggtggtggccgtggcggaacaagtaaatcatc

SEQ ID NO: 65102 - DNA, 80 bp, synthetic construct
  source 1..80: mol_type = other DNA
caacattcccgccaatcaaatggcagtattcaatgtggagactgctgggaacacatttcaaattggcatcctgccaaatg

SEQ ID NO: 65103 - DNA, 80 bp, synthetic construct
  source 1..80: mol_type = other DNA
ttttaaattcttttctgtcttttctttcttccatttcgtggttcctcacgcgtccgggtggataattgcgattaagcgat

SEQ ID NO: 65104 - DNA, 80 bp, synthetic construct
  source 1..80: mol_type = other DNA
ctgctgaaggcctctgggtgtcctggagtgacgggaatgtggagcaaaatcttaaaggtgtgtggtggtgtgaccaccat

SEQ ID NO: 65105 - DNA, 80 bp, synthetic construct
  source 1..80: mol_type = other DNA
cactgcagcaattcgcggggtgaagtggctccgcgagctgtacgaggaagccgaaagcaaacgccttgctaaaatgtaca

SEQ ID NO: 65106 - DNA, 80 bp, synthetic construct
  source 1..80: mol_type = other DNA
tggcacgtgccgcagcgttgatcgaactagcagctagccgtgaagtaacaggggtcaaagaactcaaggagctcttggtg

SEQ ID NO: 65107 - DNA, 80 bp, synthetic construct
  source 1..80: mol_type = other DNA
tgtttcacagtccttattgaggaaggggctgagcttctccaaaagtttgggaccagtccactctctggcctcatacgcac

SEQ ID NO: 65108 - DNA, 80 bp, synthetic construct
  source 1..80: mol_type = other DNA
atatgtgtctgaactagaggctcaagccaacaatatcagatcaacaataatgctggatactccccgcgacgtccctgtcg

SEQ ID NO: 65109 - DNA, 80 bp, synthetic construct
  source 1..80: mol_type = other DNA
tggtcatactaactggaccccccggtattggcaaaaccaggttggcacaatatattggggagaaatttgggaaggtttcc

SEQ ID NO: 65110 - DNA, 80 bp, synthetic construct
  source 1..80: mol_type = other DNA
aatttttccgtggccgtcgaccaccatgacggctatactggaaacccagtctgtatatgggatgaatttgatgttgatgc

SEQ ID NO: 65111 - DNA, 80 bp, synthetic construct
  source 1..80: mol_type = other DNA
catcagcgcgtggatccggcgtcgcctggagccctctcccacgttttgtttcgtggaggagggtcttctagacgcgttcg

SEQ ID NO: 65112 - DNA, 80 bp, synthetic construct
  source 1..80: mol_type = other DNA
ggaacatttgtagagactatgataggtattgccaacacggccccctttcctttaaactgtgatcgagttgagaataaggg

SEQ ID NO: 65113 - DNA, 80 bp, synthetic construct
  source 1..80: mol_type = other DNA
ccgtgtgttcacatcaaattatgtcatttgtacatccaactacccgacttcagttataccagaaaatccccgtgcccctg

SEQ ID NO: 65114 - DNA, 80 bp, synthetic construct
  source 1..80: mol_type = other DNA
ccttctaccgtcgtgtcatcactgttgatgtcacagcacctgaactcgatgactggaagaagaagaatcccggtaagaaa

SEQ ID NO: 65115 - DNA, 80 bp, synthetic construct
  source 1..80: mol_type = other DNA
ccaacctctgacctctacaagccggacttttcccatcttagattgatgcttaggccatacttaggttataatccagaagg

SEQ ID NO: 65116 - DNA, 80 bp, synthetic construct
  source 1..80: mol_type = other DNA
tgacacactagatggcactagagtgaaacccactccaatttccctgtcctcactcatatcaatgatggagaaaagattca

SEQ ID NO: 65117 - DNA, 80 bp, synthetic construct
  source 1..80: mol_type = other DNA
aggagcaagctggtgaacttcaaaatttgtggctacaagttccaaaaggtgctgttgagcaggcgaccaatatggtgcgc

SEQ ID NO: 65118 - DNA, 80 bp, synthetic construct
  source 1..80: mol_type = other DNA
acgttcatttatgccaaccggggtgtgtgcaccatcctcccaaatcccgcctcaagggacattactgaaacatcaatttc

SEQ ID NO: 65119 - DNA, 80 bp, synthetic construct
  source 1..80: mol_type = other DNA
gaaaatcttcatatgcgccacagcaccgccccctgagtttgttggtcgccacattcatatcactgggtttgaactcggtg

SEQ ID NO: 65120 - DNA, 80 bp, synthetic construct
  source 1..80: mol_type = other DNA
acgcatctttagcaaattcactactttccatgttcacaacatccaccaggctgactgcgggcgctcagagggaatacatg

SEQ ID NO: 65121 - DNA, 80 bp, synthetic construct
  source 1..80: mol_type = other DNA
taccgcatatggagccccatgatctcaatacaggacaggtccatcaacactcagaatctgccgtatgtgaacagagtcat

SEQ ID NO: 65122 - DNA, 80 bp, synthetic construct
  source 1..80: mol_type = other DNA
gtaccaagccacaggatgaccccagtgaggatttgctcttcagggacctctttgggattgatgtgcaagaacagttcccc

SEQ ID NO: 65123 - DNA, 80 bp, synthetic construct
  source 1..80: mol_type = other DNA
tcccggtaacaacacattgggacttcctccgtgggttgcggcaccatctgggtttcgtctccattcccggtatgtggaga

SEQ ID NO: 65124 - DNA, 80 bp, synthetic construct
  source 1..80: mol_type = other DNA
gcattccaggggtggcgtacttcccagggtataattgattttgtggcaaatcatatgaatgatgtaacttttccaagcaa

SEQ ID NO: 65125 - DNA, 80 bp, synthetic construct
  source 1..80: mol_type = other DNA
cccagagtgcacagttttccggacaggtgatggtgacgtggtgttttacacgtttgggtcatacgcgtgtttcgcttcac

SEQ ID NO: 65126 - DNA, 80 bp, synthetic construct
  source 1..80: mol_type = other DNA
ctgcacgcgtaccctatgttgggacaccacccccaacagtccactccaacgtgccacgctgcatgacatggggtgagacc

SEQ ID NO: 65127 - DNA, 80 bp, synthetic construct
  source 1..80: mol_type = other DNA
tcagctacttgtgtgaggttgccgtggagtttgcgctccactttggaccgctcatccttgcggctgcaaacatcacatac

SEQ ID NO: 65128 - DNA, 80 bp, synthetic construct
  source 1..80: mol_type = other DNA
ttgtgtacacgtggttcacgtgatgaagaaggcaagggcaagaacaagcatggccggggcgtcaagcacgctcaccgtgg

SEQ ID NO: 65129 - DNA, 80 bp, synthetic construct
  source 1..80: mol_type = other DNA
tggagtcagtctgtcagatgatgaatatgatgaatggagagatttgatcagagactggcgaaaagacatgagtgtgaatg

SEQ ID NO: 65130 - DNA, 80 bp, synthetic construct
  source 1..80: mol_type = other DNA
actttctcatgcttcgtgaacgcagtgccctcggaatggatgacgaggacgtggctcgctaccgcgcttggctggaaata

SEQ ID NO: 65131 - DNA, 80 bp, synthetic construct
  source 1..80: mol_type = other DNA
cgcgctatgcggatggctggaggagcctacacacatgccaccattataggtaagggcggtgtacgtgatgagattatccg

SEQ ID NO: 65132 - DNA, 80 bp, synthetic construct
  source 1..80: mol_type = other DNA
cactgctccccgccgtgccccaatggccccaagacacggtggttaccaggaagaggctcaaagtgccatcgttgaattca

SEQ ID NO: 65133 - DNA, 80 bp, synthetic construct
  source 1..80: mol_type = other DNA
ctgtctatacgggatcttgccaagcttcaaggcgagatggtggacgctattaaaaaccccggccaccagctaaggcggaa

SEQ ID NO: 65134 - DNA, 80 bp, synthetic construct
  source 1..80: mol_type = other DNA
ccaaccagggagaccacattggctatggtgtccatcttggaaatggtaaagttgtcacagtcacccatgtcgcgtcttca

SEQ ID NO: 65135 - DNA, 80 bp, synthetic construct
  source 1..80: mol_type = other DNA
tcagattcagttgaaggcctaccattcaagattcaaaagactgtgggtgaaaccacttgggtgcatgctggtcttgtcaa

SEQ ID NO: 65136 - DNA, 80 bp, synthetic construct
  source 1..80: mol_type = other DNA
ctacccacatctgcaggttggggcaggtaacccggtgtactacacaatgcgcctacatccagtggtcaccatcaccgaag

SEQ ID NO: 65137 - DNA, 80 bp, synthetic construct
  source 1..80: mol_type = other DNA
ggacatttgaaacacccaacatcactgtgcatggtttccatgtgcgcattgtcaatgggtaccaaacaaagaagggtgat

SEQ ID NO: 65138 - DNA, 80 bp, synthetic construct
  source 1..80: mol_type = other DNA
ggccttccatacctcaatgccaacagacagctggtaggattacatgcaggcacagatgtccagggagaaaccaagctcgc

SEQ ID NO: 65139 - DNA, 80 bp, synthetic construct
  source 1..80: mol_type = other DNA
ccagaaggtttgcaaagaaattcctgttgaaagtgaattccattggaaagggctcccagtcattaaatcagacatggata

SEQ ID NO: 65140 - DNA, 80 bp, synthetic construct
  source 1..80: mol_type = other DNA
ttggaggtatgcccacaggaaccaggtaccatcgatctccagcatggcctgatgaacaagctggggagacacatgcccct

SEQ ID NO: 65141 - DNA, 80 bp, synthetic construct
  source 1..80: mol_type = other DNA
gccccatttggagctggagacaagcgctaccacttcacccaaactgagatgctggtgaacgcactcaagccttatacaga

SEQ ID NO: 65142 - DNA, 80 bp, synthetic construct
  source 1..80: mol_type = other DNA
agagcacccctggtattccaccagcactgttatcccgggccaccgttcatgttaggacctacttggaaacgatcattgga

SEQ ID NO: 65143 - DNA, 80 bp, synthetic construct
  source 1..80: mol_type = other DNA
acccaccgttctcaagtactaacataccaacaggcaacagagctcttggagaaatcaacatcttgtggtccatttgttca

SEQ ID NO: 65144 - DNA, 80 bp, synthetic construct
  source 1..80: mol_type = other DNA
gtacaacattgacaccctccgtaggttggtgaataaaatcactagattggttccagttcaagccacactgcaggacatgc

SEQ ID NO: 65145 - DNA, 80 bp, synthetic construct
  source 1..80: mol_type = other DNA
gggattgaaaggggattactgggatgaggttagtagtcagtacactgggttgttatcagagcatcttaacaaagcgtgtg

SEQ ID NO: 65146 - DNA, 80 bp, synthetic construct
  source 1..80: mol_type = other DNA
accttgcaatgaagggcatagcacctgggaacagttacaaattggcacttaaagatgagctcagacccattgagaagaac

SEQ ID NO: 65147 - DNA, 80 bp, synthetic construct
  source 1..80: mol_type = other DNA
aatgagggcaagcggaggttgctgtgggggtgcgatgcagccaccaccctcattgcagtggcggcatttaaaccagtggc

SEQ ID NO: 65148 - DNA, 80 bp, synthetic construct
  source 1..80: mol_type = other DNA
agcacgcctccaaacagtcacaccgatgacacctgtatctgtgggcataaacatggactctgtgcaaatgcaagtgatga

SEQ ID NO: 65149 - DNA, 80 bp, synthetic construct
  source 1..80: mol_type = other DNA
acgactctttgaaagggggggtactctactgtctagattactcaaaatgggactccacccaaaatccagcggtcacagca

SEQ ID NO: 65150 - DNA, 80 bp, synthetic construct
  source 1..80: mol_type = other DNA
aaatgggactccacccaaaatccagcggtcacagcagccagcttgtcagtattggaaaggtttatggagtcgcacccact

SEQ ID NO: 65151 - DNA, 80 bp, synthetic construct
  source 1..80: mol_type = other DNA
ccagcttgtcagtattggaaaggtttatggagtcgcacccactggtgtcatgcgcagtggaatccctatcatcacctgct

SEQ ID NO: 65152 - DNA, 80 bp, synthetic construct
  source 1..80: mol_type = other DNA
gtgggttatctcaatgacatcaagtttgtcactaagggtgggctaccatctggcatgccattcacatcagtcataaattc

SEQ ID NO: 65153 - DNA, 80 bp, synthetic construct
  source 1..80: mol_type = other DNA
aatcaaccacatgatttactttgcagctggtgtgctcaaagcatatgaagatcaccatgtcccttacacagggaacgttt

SEQ ID NO: 65154 - DNA, 80 bp, synthetic construct
  source 1..80: mol_type = other DNA
tccaagtggagactgtccatacctatggtgacgactgcctatacagtgtttgccctgcaactgcttcaatattcacatct

SEQ ID NO: 65155 - DNA, 80 bp, synthetic construct
  source 1..80: mol_type = other DNA
gtactggccaacttctccttgtttgggcttaagccaactgccgcagacaaatcatctgaaataaaacccacccaggtccc

SEQ ID NO: 65156 - DNA, 80 bp, synthetic construct
  source 1..80: mol_type = other DNA
acgaaaggcgtgacttcgaacgtgatcgtgctgatctcttcaaggaacttccactggttgatgaagatgttgtgaagaaa

SEQ ID NO: 65157 - DNA, 80 bp, synthetic construct
  source 1..80: mol_type = other DNA
agtgtttcttaagcgtacattcgcacaaacaccgtttggggttcgcgccctattggacataaattcaataaccaggcaat

SEQ ID NO: 65158 - DNA, 80 bp, synthetic construct
  source 1..80: mol_type = other DNA
tttattggatcaaggcaaaccgcactagtgacccaacaagtccaccagcatttgaccgtgtggcacgaagtgcacagctt

SEQ ID NO: 65159 - DNA, 80 bp, synthetic construct
  source 1..80: mol_type = other DNA
gaggcggcgctagcgtacgcttcacagcatggcccacttgtttttgaacaggttcgggaagttgcactcaaaactgctgc

SEQ ID NO: 65160 - DNA, 80 bp, synthetic construct
  source 1..80: mol_type = other DNA
tggggagggtgttgtgcttgtcaacacaaactatgacctggcactcgccacctacaacgcttggttcataggaggtacag

SEQ ID NO: 65161 - DNA, 80 bp, synthetic construct
  source 1..80: mol_type = other DNA
gcaccagatccggagcaccccaatgaaggagcaccccaattagtgtttgagatggagggcaatggctcccccccaagtca

SEQ ID NO: 65162 - DNA, 80 bp, synthetic construct
  source 1..80: mol_type = other DNA
gaaaaacggtccaggagttagccaggaagttgacccacctggcacgactggtccaaccacatcccgtgttgttatttcta

SEQ ID NO: 65163 - DNA, 80 bp, synthetic construct
  source 1..80: mol_type = other DNA
tccaaaacttatttttacactatgtggaggcagatagttaagaaaggcaaatcatacttcataccgttggttaagactgg

SEQ ID NO: 65164 - DNA, 80 bp, synthetic construct
  source 1..80: mol_type = other DNA
aaaccacctggtcaggagatggagaacggggtgtctcctgaaggcttgctcccacgcagacttggctactcccgtggcaa

SEQ ID NO: 65165 - DNA, 80 bp, synthetic construct
  source 1..80: mol_type = other DNA
ccgtgcgggaggtctggcagttggcatggtgctagtcactgagcacaggcaagtaaaccggcactttaactcgcagtcaa

SEQ ID NO: 65166 - DNA, 80 bp, synthetic construct
  source 1..80: mol_type = other DNA
tcacctatggttggtcaacagccccagtcaatccaatggctgctgagatagtgaccaataatccacataccaccagtggc

SEQ ID NO: 65167 - DNA, 80 bp, synthetic construct
  source 1..80: mol_type = other DNA
tccacacgcaatgcttggttacttgttggcgcgcaaaacaaaggaccactcatcccgggcatgcctaaccatttcccaga

SEQ ID NO: 65168 - DNA, 80 bp, synthetic construct
  source 1..80: mol_type = other DNA
ttcatgcgcatccaccatcaacggtgcaatggacacaggtagcggaaggccatccacaggggtctgcggtgccgccattg

SEQ ID NO: 65169 - DNA, 80 bp, synthetic construct
  source 1..80: mol_type = other DNA
gtttccagaacaacggagatgtgttcgagaactcgactccatctgtcatgttcgcgacatacaaccccctcactggcggc

SEQ ID NO: 65170 - DNA, 80 bp, synthetic construct
  source 1..80: mol_type = other DNA
tccaccgcaaacccagttgctttggcagattctctcaatcctgcttcactcgcactagtgcgcattgaatcatcccaaaa

SEQ ID NO: 65171 - DNA, 80 bp, synthetic construct
  source 1..80: mol_type = other DNA
tggttgggcttcaaagatcaccaaagtcacggagccaatcaaggatttcatcatagcattctgccaggcagtccaaaaag

SEQ ID NO: 65172 - DNA, 80 bp, synthetic construct
  source 1..80: mol_type = other DNA
ttttccaaacggtggttttgaagtagataagaatgtggttgttccaatgtcttgggaaatgtttagagacacagctcaaa

SEQ ID NO: 65173 - DNA, 80 bp, synthetic construct
  source 1..80: mol_type = other DNA
tttacggcaaggtgacaccaatgcaaggcactaactttgttttcacatcttcaggtgcaaatacaatagtactttggaaa

SEQ ID NO: 65174 - DNA, 80 bp, synthetic construct
  source 1..80: mol_type = other DNA
gaaaggctcctaagttacaccaatcaagcggccattctgtactcatcgcaattggaacacactgctgagtacatgcaaaa

SEQ ID NO: 65175 - DNA, 80 bp, synthetic construct
  source 1..80: mol_type = other DNA
tgacaatgtcaacatcccacaaggttatatggctgtgttcaacgttgaatcaaactctgcttcatttcaagtgggcatac

SEQ ID NO: 65176 - DNA, 80 bp, synthetic construct
  source 1..80: mol_type = other DNA
gccctgatggttacatggtaacaggtggtacaatcggcactcatgtggatcttgaccctgaaacacgattccagtttgtt

SEQ ID NO: 65177 - DNA, 80 bp, synthetic construct
  source 1..80: mol_type = other DNA
ttttgccattaacggcaaccctcagtgggcccaatgggaattctggaagggccagacgactcttccaatgagttggctag

SEQ ID NO: 65178 - DNA, 80 bp, synthetic construct
  source 1..80: mol_type = other DNA
ttggagctttacaaacggccggctcgttggtggacatggcagggacaatatcaggtattgtttaccagcaacgccaggct

SEQ ID NO: 65179 - DNA, 80 bp, synthetic construct
  source 1..80: mol_type = other DNA
gcacaattggagagacagaacaagctcatggaagattggatgaacaagcaagaagcacttcaacatgaacagatgcagtt

SEQ ID NO: 65180 - DNA, 80 bp, synthetic construct
  source 1..80: mol_type = other DNA
atccaaatatttggctattgaaggccccactgctagagttcaagcagcaattgattcaggttttgatccagttagtgcca

SEQ ID NO: 65181 - DNA, 80 bp, synthetic construct
  source 1..80: mol_type = other DNA
ggaggcttgccgggtcccaggagagggtgatttatggtaatttggaccgcccaattatgcaggctactgcaattgaggtg

SEQ ID NO: 65182 - DNA, 80 bp, synthetic construct
  source 1..80: mol_type = other DNA
agatgggaactgacccacgctacctccagctagcgtggttccagaggctaaaacccactgtgctcaccatgatactccaa

SEQ ID NO: 65183 - DNA, 80 bp, synthetic construct
  source 1..80: mol_type = other DNA
atccgcaccacgaaacatttagaatctatgaatttggctctcagtacgttcaaaaagggcaccccattcggcaaacccgc

SEQ ID NO: 65184 - DNA, 80 bp, synthetic construct
  source 1..80: mol_type = other DNA
cccaccaagaatcactacagggcgaccaggaggcaacaatccatctatcaatttgggccacaatccaggcacttcacaag

SEQ ID NO: 65185 - DNA, 80 bp, synthetic construct
  source 1..80: mol_type = other DNA
cgacagtgctacctcagggtaacaccacgggaaacgtttgttgagaacattacagagttaaaaacatatttccacacgcg

SEQ ID NO: 65186 - DNA, 80 bp, synthetic construct
  source 1..80: mol_type = other DNA
tttaatcaaattttcttttcttctttccgtgatgccacacgcgttcgggtggttaaatgcagttaagcgactgcagtcac

SEQ ID NO: 65187 - DNA, 80 bp, synthetic construct
  source 1..80: mol_type = other DNA
caacacaagaacacaacttcaggttggctagcaaccatcacggcccttatagaggtgtattctgggttatttgacgatct

SEQ ID NO: 65188 - DNA, 80 bp, synthetic construct
  source 1..80: mol_type = other DNA
ccgaaaatcgtcagtgaccatcatttcagcacttggggccttttttgacctgtgtaaagatttcatcgcaaatgtggtgg

SEQ ID NO: 65189 - DNA, 80 bp, synthetic construct
  source 1..80: mol_type = other DNA
aactcatccgcaccacctttacaccacagggcccaacagactttgggtgggcggcagtaatggcaggagcagtgatgatc

SEQ ID NO: 65190 - DNA, 80 bp, synthetic construct
  source 1..80: mol_type = other DNA
atggcttctaagccattctactcaattgagttcaacccacgagttgaacatgcagtcctgtgttctgcctacctcagggt

SEQ ID NO: 65191 - DNA, 80 bp, synthetic construct
  source 1..80: mol_type = other DNA
ctcatgaagatctctggctgtccacaagctttgggttattgggggaaaattttgaaagtgtgcggcagcatcacatcagt

SEQ ID NO: 65192 - DNA, 80 bp, synthetic construct
  source 1..80: mol_type = other DNA
cactgcagctgcacgtgcagtcgcttggattcgggataccatgcgtgaagcagagggccgccgtcggctcaaacagttca

SEQ ID NO: 65193 - DNA, 80 bp, synthetic construct
  source 1..80: mol_type = other DNA
tggcacgatcttcagctctcattgaactggccgcctcacgggaggtcactggtactgacgaccttaagaagctgcttgag

SEQ ID NO: 65194 - DNA, 80 bp, synthetic construct
  source 1..80: mol_type = other DNA
tgctttgtgcaactgagtgaggaaggtgcggacctgatccaagaatttggaacttcccccttggccgggctaacacgttc

SEQ ID NO: 65195 - DNA, 80 bp, synthetic construct
  source 1..80: mol_type = other DNA
gtatgtgtcagaactggaagccgctgccaacactgttagaacgacaattcagcttgacacaccaaggaaagttcccgtag

SEQ ID NO: 65196 - DNA, 80 bp, synthetic construct
  source 1..80: mol_type = other DNA
ctgtcattctcacaggcccacctggcattggcaaaacacaccttgcacaacacatcggggcagggtttggtaaatgctcc

SEQ ID NO: 65197 - DNA, 80 bp, synthetic construct
  source 1..80: mol_type = other DNA
actttctcagtgtgcactgatcaccatgatggttatactggaaacagggttgccatatgggacgagtttgacgttgacac

SEQ ID NO: 65198 - DNA, 80 bp, synthetic construct
  source 1..80: mol_type = other DNA
ccagggccggttcgtggagaccatgattggcataatcaatagtgcaccatacccactaaattgtgaccgggccgaaaaca

SEQ ID NO: 65199 - DNA, 80 bp, synthetic construct
  source 1..80: mol_type = other DNA
aacaccaggcccgcgtcccacggcatttagggtttgaatttgaggctgaggggttgttggacgcattttcatccaaacca

SEQ ID NO: 65200 - DNA, 80 bp, synthetic construct
  source 1..80: mol_type = other DNA
aaggtaaagttttctcgtctgagtacgtaatttgcaccagcaattatccaacctcagttttgcctgacaacccccgtgcg

SEQ ID NO: 65201 - DNA, 80 bp, synthetic construct
  source 1..80: mol_type = other DNA
ggtgcgttttatcgtcgtgttctaactgttgacgtaaccgcacctgacatagatgattggaagaagaaaaaccccggaaa

SEQ ID NO: 65202 - DNA, 80 bp, synthetic construct
  source 1..80: mol_type = other DNA
aaagcccccaagtgacatgttcaaagcagacttcacccatttgcgcctcttcgttcgaccatatcttgggtacaacgccg

SEQ ID NO: 65203 - DNA, 80 bp, synthetic construct
  source 1..80: mol_type = other DNA
atggggacacgctggagggtgttcgggtacggccccaacaggtgactgtggacggattaaccaagatcatggagagacgt

SEQ ID NO: 65204 - DNA, 80 bp, synthetic construct
  source 1..80: mol_type = other DNA
tttgaggagcaaggggcagatcagttgcagaacctttggattgtatgccccaaggagctggtcaccaccgctacagctgg

SEQ ID NO: 65205 - DNA, 80 bp, synthetic construct
  source 1..80: mol_type = other DNA
cttaaaggcgttcatgtcagcaaacagagcactctgtcaggtcatacaggacccgtcctcaaatgagatagctgaaactt

SEQ ID NO: 65206 - DNA, 80 bp, synthetic construct
  source 1..80: mol_type = other DNA
gtgtgtcacgtgtttttgtcagcaacctcaaccccccccaggggtatcgtggccacaaggttaaagtttctagtgtgtgc

SEQ ID NO: 65207 - DNA, 80 bp, synthetic construct
  source 1..80: mol_type = other DNA
ccagaggacgcttcaatagccaattctatgctctcaatgttcaacagtgattccagactttctgctgcggtgcagcgaga

SEQ ID NO: 65208 - DNA, 80 bp, synthetic construct
  source 1..80: mol_type = other DNA
catcatgtaccgtgtgtggcgacccctagtccatcttcaagatcaaagacccaacacacaggtcttaccttacattaatc

SEQ ID NO: 65209 - DNA, 80 bp, synthetic construct
  source 1..80: mol_type = other DNA
ccagccgacatcaatcctgacaccacgtttcgtgaactctttggcgtcgatccacatgaacaatttccattgtccataac

SEQ ID NO: 65210 - DNA, 80 bp, synthetic construct
  source 1..80: mol_type = other DNA
aatgaacccagagtgcactgtttttcggaccaccgacggggacgtggtgttttacacttatgggtcatacgcctgcttgg

SEQ ID NO: 65211 - DNA, 80 bp, synthetic construct
  source 1..80: mol_type = other DNA
catctcccgcacgagtgccatttgtaggcgatccaccaaaagttgttcactctaacgtcactaggaacatgacttggtgg

SEQ ID NO: 65212 - DNA, 80 bp, synthetic construct
  source 1..80: mol_type = other DNA
gaaaccctacaattagtagctgaaacccttatggaggttatcacaagattcaccccatttcttctgaccctgtacaatgt

SEQ ID NO: 65213 - DNA, 80 bp, synthetic construct
  source 1..80: mol_type = other DNA
gacctatctcaccatgcgagggagccgtgaggaagagggcaagggcaagaacaaacatggcagaggtgctcgtcatggta

SEQ ID NO: 65214 - DNA, 80 bp, synthetic construct
  source 1..80: mol_type = other DNA
gttaacgaatttcttgacttgagagaacgttttgctgctggtatggatgcagaggatgttgagaggtatcgaatgtggct

SEQ ID NO: 65215 - DNA, 80 bp, synthetic construct
  source 1..80: mol_type = other DNA
ccaaatccgcgcaatgcgcttgaatgctggtgcttacacacacgccaccatcataggcaagggaagggttgaggacacca

SEQ ID NO: 65216 - DNA, 80 bp, synthetic construct
  source 1..80: mol_type = other DNA
agatttggcacgacttcaaggtgaacttgtagatgcagtgcggaatccgcaccacgcgctgagacggcactactctaccg

SEQ ID NO: 65217 - DNA, 80 bp, synthetic construct
  source 1..80: mol_type = other DNA
ggcagcagccaacgaagttgaagggataccatttagtgtgaagaagacagaaggggaactcacatgggtgaatacaaatc

SEQ ID NO: 65218 - DNA, 80 bp, synthetic construct
  source 1..80: mol_type = other DNA
gggttaccgtatttcaacggttgtcgccaactcgttgcgctgcatgctgccaccgccaccaacagtgaaaccaaattggc

SEQ ID NO: 65219 - DNA, 80 bp, synthetic construct
  source 1..80: mol_type = other DNA
tcagaaggtcacccgtgtgtcgaaggttgaaaacgtctttgcgtggaaggggctacccgttacacgcggcccggactgtg

SEQ ID NO: 65220 - DNA, 80 bp, synthetic construct
  source 1..80: mol_type = other DNA
cccaaggcaaacgacgcctactgtggggctgtgatgctggagcaactcttgtggcaactgcagcgttcaaaggagtggca

SEQ ID NO: 65221 - DNA, 80 bp, synthetic construct
  source 1..80: mol_type = other DNA
aaaggcgcagagattttgagagggaacgtgccgaggtgtttcgggagttgccccattcagacgaagcccctcaacgagac

SEQ ID NO: 65222 - DNA, 80 bp, synthetic construct
  source 1..80: mol_type = other DNA
atgttgtgctttccaatttggctagttttggtctcaaaccaaccgccccagacaagagtgattctatagcccccacacac

SEQ ID NO: 65223 - DNA, 80 bp, synthetic construct
  source 1..80: mol_type = other DNA
aactggaaaacgccttggcctatgcatcacaacacggcccaactgtgtttgatgaagttgccaaaatcgcacaagttacc

SEQ ID NO: 65224 - DNA, 80 bp, synthetic construct
  source 1..80: mol_type = other DNA
cccaagagcttcttctatgccatgtggagacaagtgatcaaacgaggaaagagttacttcattcccttagtgaagtgcac

SEQ ID NO: 65225 - DNA, 80 bp, synthetic construct
  source 1..80: mol_type = other DNA
actttgctgcaaatggcaccacccttggttggtcatcgctccccctagaaccagttgctgctcatgctttctggcactca

SEQ ID NO: 65226 - DNA, 80 bp, synthetic construct
  source 1..80: mol_type = other DNA
acagcaggcactccaactaaaaggtattgtctacttagtgccgagaacaagggcatcatctttccacacatcgtcaatca

SEQ ID NO: 65227 - DNA, 80 bp, synthetic construct
  source 1..80: mol_type = other DNA
ttggccagactcatcaatgtcagcagtcacttcccaagacacagacattccacaaagtacctttgacactcatgtcggaa

SEQ ID NO: 65228 - DNA, 80 bp, synthetic construct
  source 1..80: mol_type = other DNA
atcatggaagcgaaagttctccggagctgctgaagtggtgcgacagtgcttggttggattttgtgagggaatgcgaactc

SEQ ID NO: 65229 - DNA, 80 bp, synthetic construct
  source 1..80: mol_type = other DNA
aattctccactgatgtcaactatattcagttagacttgctagcacgcttgagaccaacagtcatgaccatgatcctccaa

SEQ ID NO: 65230 - DNA, 80 bp, synthetic construct
  source 1..80: mol_type = other DNA
ggtacagaagtagttttgcatggcaccatggagcgcccagtgttaccacgcactgtgcttcagggtatttcagacaccca

SEQ ID NO: 65231 - DNA, 80 bp, synthetic construct
  source 1..80: mol_type = other DNA
tcttttggttttctttttatccctctattttcttttcttttccggcagttccacacgcgttcgggtggataatggtggtt

SEQ ID NO: 65232 - DNA, 80 bp, synthetic construct
  source 1..80: mol_type = other DNA
ttcttttcttttccggcagttccacacgcgttcgggtggataatggtggttaagcgaccaacgctgtcttattccctgga

SEQ ID NO: 65233 - DNA, 80 bp, synthetic construct
  source 1..80: mol_type = other DNA
cagcatcgcaacacattcaatggttggcttgctaccatcactgctcttatcgaagtttactcaggcatgtttcaaaacat

SEQ ID NO: 65234 - DNA, 80 bp, synthetic construct
  source 1..80: mol_type = other DNA
aggtggacgggactcaatttttgaaaaccaccaggacatgttggaccatgtttcccgtttggttgggcgtgcctggcagc

SEQ ID NO: 65235 - DNA, 80 bp, synthetic construct
  source 1..80: mol_type = other DNA
gagggacaccgcagtgtcagtggtgtcttctataacacttgtctttgactcattgagggcttttgtagagaaggtcatta

SEQ ID NO: 65236 - DNA, 80 bp, synthetic construct
  source 1..80: mol_type = other DNA
atcttgtgcgtaccacctttaccgcacaagggcccacagattttggatgggccgccatccttgctggtgccatcataatt

SEQ ID NO: 65237 - DNA, 80 bp, synthetic construct
  source 1..80: mol_type = other DNA
gccgcctcacttggaattttggaaagactgtccgaagctacccctatcacaacgtcagctgttgagttgctgtcctcccc

SEQ ID NO: 65238 - DNA, 80 bp, synthetic construct
  source 1..80: mol_type = other DNA
gcatcgcagtttggctgccactcccacatttacagaggagggtttgctagactctttcctttcaaagccacctgttgata

SEQ ID NO: 65239 - DNA, 80 bp, synthetic construct
  source 1..80: mol_type = other DNA
aatcctgacacaacattccgtgagctattcggcatcgacccacacgaacaattcccgttgtccatccacgatttggcaag

SEQ ID NO: 65240 - DNA, 80 bp, synthetic construct
  source 1..80: mol_type = other DNA
cctacgcagattgagacacccaacggagttgcgcaaagggtggagatggccgcagcaacgggagccgtcagcaacaacgt

SEQ ID NO: 65241 - DNA, 80 bp, synthetic construct
  source 1..80: mol_type = other DNA
ccccatgtgtgtgagggagtgttttgccagcgtaactacgctcccttggacaacgcgccaagcatccaacacctttcttg

SEQ ID NO: 65242 - DNA, 80 bp, synthetic construct
  source 1..80: mol_type = other DNA
tgagcaaatgtttgaaaccatctacgatctcaatgatcatgttaggggtgtggtggccagactgtggtgcaagcatttgc

SEQ ID NO: 65243 - DNA, 80 bp, synthetic construct
  source 1..80: mol_type = other DNA
agttttgcgacttcacttttgaagtccacctcctccgacagtgctacctcagggtagcacctagggaggaatttctattc

SEQ ID NO: 65244 - DNA, 80 bp, synthetic construct
  source 1..80: mol_type = other DNA
caaaggtcttttctcattggcatacacttctaaaactcgctagtggaattaccacagttgttggggccaccagggccgtg

SEQ ID NO: 65245 - DNA, 80 bp, synthetic construct
  source 1..80: mol_type = other DNA
gattggatcatgactaaagtcagggatgcccgccattcttctatgtgtaaacagtttctcagtcgtgtctctgcattgtt

SEQ ID NO: 65246 - DNA, 80 bp, synthetic construct
  source 1..80: mol_type = other DNA
agggtgaggaattggtgtccgaaatcgggggaggttcacttgctgcaataattcgcagtggagtggacacactacagcgg

SEQ ID NO: 65247 - DNA, 80 bp, synthetic construct
  source 1..80: mol_type = other DNA
gtttccaccgagatcaaggctacaatacagcttgacaacccgcgacctgtccctgtgtgtgtggtgttctccggtccccc

SEQ ID NO: 65248 - DNA, 80 bp, synthetic construct
  source 1..80: mol_type = other DNA
aggcataggcaaaacctctcttgcttaccacatggctaaagggattgggctcacttcaaatttttccttggccaatgacc

SEQ ID NO: 65249 - DNA, 80 bp, synthetic construct
  source 1..80: mol_type = other DNA
atcatgatggctatacaggcaatcccgttgcgatctgggatgaatttgacaccgaccgtgatggcaagtttgttgaacaa

SEQ ID NO: 65250 - DNA, 80 bp, synthetic construct
  source 1..80: mol_type = other DNA
atgattgcacttgtcaacacacagccctgtgtgctcaattgtgatcgccctgaaaacaaagggaaacttttcacttccaa

SEQ ID NO: 65251 - DNA, 80 bp, synthetic construct
  source 1..80: mol_type = other DNA
tgagtttgaggctgaggggttgctgtcacggttattcgggacggccggttccccctcacttgactcacaaagcgcctaca

SEQ ID NO: 65252 - DNA, 80 bp, synthetic construct
  source 1..80: mol_type = other DNA
tcacggtggatgtgcgttcccctgaaattgaggattggatgtcagcacatccagggcgatcaccacctaagacacttttt

SEQ ID NO: 65253 - DNA, 80 bp, synthetic construct
  source 1..80: mol_type = other DNA
aaaaatgactgctcccacctaaaattaatggttcggccttatatgggttacaatccagatggtgacacactatcaggtaa

SEQ ID NO: 65254 - DNA, 80 bp, synthetic construct
  source 1..80: mol_type = other DNA
gcgagtcaaaccaacacccatttcaattgcaggtttgcatgacttgatcgacaagaagtttgaagagcagtctggtgagg

SEQ ID NO: 65255 - DNA, 80 bp, synthetic construct
  source 1..80: mol_type = other DNA
tgaggggtttgtggatcaccgtgccgagaaggagcgttcagccagcactggccgcagtaaagaagttttgcgtggcgcat

SEQ ID NO: 65256 - DNA, 80 bp, synthetic construct
  source 1..80: mol_type = other DNA
caggcactgtgccatgtcacctccacgcccacaccagaggtgttgcagtgcaccaccttctcatgtgttgtggtttcaga

SEQ ID NO: 65257 - DNA, 80 bp, synthetic construct
  source 1..80: mol_type = other DNA
cgcccacccacctccaggagtgcctttgattcacattaaaaatgcccatcttgaaagtgatgcaacaggtcaatcattgt

SEQ ID NO: 65258 - DNA, 80 bp, synthetic construct
  source 1..80: mol_type = other DNA
ccagcattagtgagagcttgcttgggatgttcattaccgagcaacgcgtctcctcaaatgtacaacgggacatcatgtac

SEQ ID NO: 65259 - DNA, 80 bp, synthetic construct
  source 1..80: mol_type = other DNA
cacccttcacactgatgcaaactgagccacttaacacgcaaaacctgccccccatccgccggataatttacgcggacacc

SEQ ID NO: 65260 - DNA, 80 bp, synthetic construct
  source 1..80: mol_type = other DNA
gccatggatttcattggtggtttgcgtcatcacttggggtttagttcaatccccggcctttggagggcactgaaacatct

SEQ ID NO: 65261 - DNA, 80 bp, synthetic construct
  source 1..80: mol_type = other DNA
ccctgacacatcctccatgatagagtggattacggaccatttgtcccaggtgcaattcccacttaacccggaatccactc

SEQ ID NO: 65262 - DNA, 80 bp, synthetic construct
  source 1..80: mol_type = other DNA
ttttccgcactggcaatggtgatgtgattttctacacttacgggtctttctatgcattggggacctgtgctagagtacct

SEQ ID NO: 65263 - DNA, 80 bp, synthetic construct
  source 1..80: mol_type = other DNA
actagtgagcaaatgcccctctccctagaagaattggcaaagttgcaaggagaaatcgcctcctcgctccaaaccaataa

SEQ ID NO: 65264 - DNA, 80 bp, synthetic construct
  source 1..80: mol_type = other DNA
gctgtaactggtgacactttgaacccattaccaaacactccacttaagatgacatggtttgagacactaaaagccttgtg

SEQ ID NO: 65265 - DNA, 80 bp, synthetic construct
  source 1..80: mol_type = other DNA
ttcatcagcactccgcctctttacagctgttgccccgtttgcaatcgctgtggcaaacgtcacttacctcacaacccgcg

SEQ ID NO: 65266 - DNA, 80 bp, synthetic construct
  source 1..80: mol_type = other DNA
gggcacgtgaagagcaggcaaaaggcaaaacaaagcatgggcgtggagctcgtcatggacggggccgctccactgcattg

SEQ ID NO: 65267 - DNA, 80 bp, synthetic construct
  source 1..80: mol_type = other DNA
aatgatgatgagtacaatgagtggatggatttgcgtcgtgattggcgggaggaaatgactgccgatcagttcctgcagct

SEQ ID NO: 65268 - DNA, 80 bp, synthetic construct
  source 1..80: mol_type = other DNA
gcgcttaccaacacgccaccattattggtaaaggtggggttagaaatgaaatcatccgcacacaagtgatgaaagcacca

SEQ ID NO: 65269 - DNA, 80 bp, synthetic construct
  source 1..80: mol_type = other DNA
aggaaaggcaagtggtcacacattgactcatctggacccatgaattactttgatgaagccccaaccccattagtggaatt

SEQ ID NO: 65270 - DNA, 80 bp, synthetic construct
  source 1..80: mol_type = other DNA
gaaagtgatggcagtcacattggatggggtgtacaccttggtaatgggcgcattgtaactgtcacccatgttgcaacttc

SEQ ID NO: 65271 - DNA, 80 bp, synthetic construct
  source 1..80: mol_type = other DNA
atccaatacagtcaatggggtgccctttaaaattaaagatacagatggtgagacatgtcaagtgtatgctgcacttggtg

SEQ ID NO: 65272 - DNA, 80 bp, synthetic construct
  source 1..80: mol_type = other DNA
acttaccacactatcaaattggtgatggcccccctgtttattacacaaccagattccacccagtcttggtaattggagag

SEQ ID NO: 65273 - DNA, 80 bp, synthetic construct
  source 1..80: mol_type = other DNA
caatcaatttgtaaccaaacatggcaaggcaaatgtgcaggcactactggaacagttgaaccagcttgtgccacgggacg

SEQ ID NO: 65274 - DNA, 80 bp, synthetic construct
  source 1..80: mol_type = other DNA
ggacaatatgacacacccaccacaaccgtcaatggctttcatgtgaagatcaccaattcctatccaacgaagaagggtga

SEQ ID NO: 65275 - DNA, 80 bp, synthetic construct
  source 1..80: mol_type = other DNA
ttgtggtctgccctacttcaactctctgcgccaagtggttgcattgcatgctgctgggagcactgatggcaccaccaaac

SEQ ID NO: 65276 - DNA, 80 bp, synthetic construct
  source 1..80: mol_type = other DNA
tcgcacagcgagttggcaagaccaatgacacttctgaaagctttgtctggaaggggctgcctgtgttgcgtggcagtgat

SEQ ID NO: 65277 - DNA, 80 bp, synthetic construct
  source 1..80: mol_type = other DNA
gtgggtgggttgccaactggcacccgttaccatagatctcctgcatggccagaaacaatgccccatgaaacacattcacc

SEQ ID NO: 65278 - DNA, 80 bp, synthetic construct
  source 1..80: mol_type = other DNA
tgccccctttggatcaggcgacaagaggtatgacttctcccaagttgaaatgcttgttaacaaccttcgtccataccttg

SEQ ID NO: 65279 - DNA, 80 bp, synthetic construct
  source 1..80: mol_type = other DNA
atgaggtcccaggtataccaccaattctattgaacagagccattgtccacacccgtaactatttgcaatccatcattggt

SEQ ID NO: 65280 - DNA, 80 bp, synthetic construct
  source 1..80: mol_type = other DNA
agtgaacagagtcctagtttgtcatatggagtggcagcaagcatgttggagcgtggcacttcctgtggcccacatgttcc

SEQ ID NO: 65281 - DNA, 80 bp, synthetic construct
  source 1..80: mol_type = other DNA
aggtttaaaatctgactattgggatgaggaaacatgtcaatacacaggagcattgcgggaacacctcgagcaggtgtgga

SEQ ID NO: 65282 - DNA, 80 bp, synthetic construct
  source 1..80: mol_type = other DNA
acaaagctttacttggtacacctccaagccatgactacaaattagccttgaaggatgaattgagaccaaatgagaaaaat

SEQ ID NO: 65283 - DNA, 80 bp, synthetic construct
  source 1..80: mol_type = other DNA
gcccaggggaaacggcgccttttgtggggtgcggatgctggcttgacccttgtgtgttgtgctgctttgaaacccgcagc

SEQ ID NO: 65284 - DNA, 80 bp, synthetic construct
  source 1..80: mol_type = other DNA
tttctgagaccgagcgacggcgacgtgaattctttgaacgtcaaaccgctgcagcgtttgcggagcttcccaatgatgat

SEQ ID NO: 65285 - DNA, 80 bp, synthetic construct
  source 1..80: mol_type = other DNA
agtacggttgcagagtgtcgtccctatgacaccagtggctgtaggtatcaatatggactcggcccacattgaggtcatga

SEQ ID NO: 65286 - DNA, 80 bp, synthetic construct
  source 1..80: mol_type = other DNA
acgagtccctcaagggtcgggtgttatatgccttagactacagtaagtgggacagcacgcagtctgctgctgtcactgct

SEQ ID NO: 65287 - DNA, 80 bp, synthetic construct
  source 1..80: mol_type = other DNA
gcatccctggaaattctttcatccttcatggaaccatcacctgtggtatcctctgccattgaagctttgaaagcaccagc

SEQ ID NO: 65288 - DNA, 80 bp, synthetic construct
  source 1..80: mol_type = other DNA
aaggggcatggtgaatgatgccatatttgtggcgcgctctggtctcccctcgggcatgcccttcactagtgtcatcaatt

SEQ ID NO: 65289 - DNA, 80 bp, synthetic construct
  source 1..80: mol_type = other DNA
caatcaaccacatgctgtacatctcctcagccatcctgcaagcatatgaatccatgggtctgccatacaatgacaatgtg

SEQ ID NO: 65290 - DNA, 80 bp, synthetic construct
  source 1..80: mol_type = other DNA
tggcatcaatgatcatagacaaccttcgatcatacggcctcaaaccaacagcagctgacaaaggtgatgtcattgcccct

SEQ ID NO: 65291 - DNA, 80 bp, synthetic construct
  source 1..80: mol_type = other DNA
gtacaagtgccagtcttcttgaagagaacttttgccacaacaccacacggtttgcgcgccctgcttgatactagctctat

SEQ ID NO: 65292 - DNA, 80 bp, synthetic construct
  source 1..80: mol_type = other DNA
cctgagacaatttcactgggtgaaggcgcaacgcacttgtgacattcagtcccctccacggattgatataaagtcacgag

SEQ ID NO: 65293 - DNA, 80 bp, synthetic construct
  source 1..80: mol_type = other DNA
cagcccaattggaagtggcactcgcttatgcaagtcagcatggccatgaatttttcgagaaggccagggagatcgcagag

SEQ ID NO: 65294 - DNA, 80 bp, synthetic construct
  source 1..80: mol_type = other DNA
tctttcacagagcatgactggaagagttattggtatgctatgtggcggcgtgtcgtgggaggctgtcgctcttattacca

SEQ ID NO: 65295 - DNA, 80 bp, synthetic construct
  source 1..80: mol_type = other DNA
aagaccagtaaagtagaggggtatctcctggttaataccaactttgaacaagctgtggcatgctacaacagctggtacat

SEQ ID NO: 65296 - DNA, 80 bp, synthetic construct
  source 1..80: mol_type = other DNA
tgcccactaccaatgaaggctgtgggctattagtgtttgagatggagggcaatggctcccgacttgggaagtcacaaacc

SEQ ID NO: 65297 - DNA, 80 bp, synthetic construct
  source 1..80: mol_type = other DNA
caatcccatatggatacttctaacactgtgcagagtgcaccgccgggcacgacaggccctgcagacgcaccccttgtacc

SEQ ID NO: 65298 - DNA, 80 bp, synthetic construct
  source 1..80: mol_type = other DNA
tgttaatccagaacagcccaatctccctgcccaacgcctggagttggctattgccacaggagcaacatcctccaatgtcc

SEQ ID NO: 65299 - DNA, 80 bp, synthetic construct
  source 1..80: mol_type = other DNA
gggtgggggggagcaatggacattagagtcacagtctcaggctcgggtctatttgcaggcaagcttgtctgtggcgtact

SEQ ID NO: 65300 - DNA, 80 bp, synthetic construct
  source 1..80: mol_type = other DNA
tggacattagagtcacagtctcaggctcgggtctatttgcaggcaagcttgtctgtggcgtactgcctcctggagttaat

SEQ ID NO: 65301 - DNA, 80 bp, synthetic construct
  source 1..80: mol_type = other DNA
ctcttgtcaacgatccgggggtgcttccacatgcattagttgatgcgcgcattactgaaccagcgtgcttcaatgtggct

SEQ ID NO: 65302 - DNA, 80 bp, synthetic construct
  source 1..80: mol_type = other DNA
cagtctccctcgctggagctctttcaaaacacgtcttgcccgagcgacagagccattgcgtcaggtcttggctgtagccg

SEQ ID NO: 65303 - DNA, 80 bp, synthetic construct
  source 1..80: mol_type = other DNA
gcttactaaaaccccctggacaagccatggagaatggaggttcaccctcacaccttttgccacgcaaattacaacgggcc

SEQ ID NO: 65304 - DNA, 80 bp, synthetic construct
  source 1..80: mol_type = other DNA
cgtggcaaccgtgcgggaggttatgcagttgggatggtaatagttggctcagcacaccaagtcaaccgccatttcaccgc

SEQ ID NO: 65305 - DNA, 80 bp, synthetic construct
  source 1..80: mol_type = other DNA
cccttggtactaccttcgggtggtccactgcaccatatgaaccaatgagatgtgcttttggtggtgtccacgtcggggca

SEQ ID NO: 65306 - DNA, 80 bp, synthetic construct
  source 1..80: mol_type = other DNA
acaaccccaaagaaaattggctattattgggaggttggtgcagatcaacgtggacctctcttccccaacatagtcaacca

SEQ ID NO: 65307 - DNA, 80 bp, synthetic construct
  source 1..80: mol_type = other DNA
ttgctgtcaactccaaatattcatggcctgatgcagactacatcccttacaatgctgttgtgggaacgctggtttcattt

SEQ ID NO: 65308 - DNA, 80 bp, synthetic construct
  source 1..80: mol_type = other DNA
gctgacaatggtgatgtgtctgaaaatgaagtggccacagccttcgcagtgtccatgaacacgccatctactggcgggcg

SEQ ID NO: 65309 - DNA, 80 bp, synthetic construct
  source 1..80: mol_type = other DNA
tggcacgctgcgtgagagctttgacccttcaaccatgcatcttgtgcgcaccaactcaaccgcacaacccgctgattggc

SEQ ID NO: 65310 - DNA, 80 bp, synthetic construct
  source 1..80: mol_type = other DNA
catcaggctcaaatactggcaatggatatttcacaccaatgtggggccacggcagtggaaatgcaatcaatgacaaagtc

SEQ ID NO: 65311 - DNA, 80 bp, synthetic construct
  source 1..80: mol_type = other DNA
actaacatggagggtgctaactacacctttggtggttctggtcaaaacaacatagtgttgtggattgaaaagatcttctc

SEQ ID NO: 65312 - DNA, 80 bp, synthetic construct
  source 1..80: mol_type = other DNA
tcccacaattctgtattcctcacaattggatagcacagctactattttccaatctggtccagtcaacatccctgaaaaca

SEQ ID NO: 65313 - DNA, 80 bp, synthetic construct
  source 1..80: mol_type = other DNA
ctcaaacattcgaccaatgcattcaaactgacccccgcatccttgcaatgaattgtgtcactgcccttaaaccaacagtc

SEQ ID NO: 65314 - DNA, 80 bp, synthetic construct
  source 1..80: mol_type = other DNA
tgatggctgtgtacaatgtgacaaccaatggtgcagactttcaagttgggattcgccgtgatggttatatggtgacatct

SEQ ID NO: 65315 - DNA, 80 bp, synthetic construct
  source 1..80: mol_type = other DNA
ggcttactgacgtggcttctaccatttctggtgtagtctaccaacagaaatatttggaacaattgaggaggcaaaatgat

SEQ ID NO: 65316 - DNA, 80 bp, synthetic construct
  source 1..80: mol_type = other DNA
ttgcagcaggaatggatggcacgcaatgaacaattgcagcgcgatgccatgcagctttcacgtgacctttccacacacgg

SEQ ID NO: 65317 - DNA, 80 bp, synthetic construct
  source 1..80: mol_type = other DNA
cccggccctgagagcgcaggccgccattgaggctgggtttgatgtggttagtgcacgccagcttgctggttcgggtgaac

SEQ ID NO: 65318 - DNA, 80 bp, synthetic construct
  source 1..80: mol_type = other DNA
gcagaattaatggctacttggaacaacccatccgaaccattggtgaagccatggccgtgcaatcaagaggtaacctcact

SEQ ID NO: 65319 - DNA, 80 bp, synthetic construct
  source 1..80: mol_type = other DNA
accctgtctggagccatgagcacattccaaaatggtacacaatttggcatgaaacaaccaaagaactggaaacttcaaag

SEQ ID NO: 65320 - DNA, 80 bp, synthetic construct
  source 1..80: mol_type = other DNA
agctgaacaatcacggggacctgttgtgaacctgggacccagacccccatctactgatttataattctaatctacatttc

SEQ ID NO: 65321 - DNA, 80 bp, synthetic construct
  source 1..80: mol_type = other DNA
taattctaatctacatttcttttcttccctttgtggttgcacacgcgttcgggtgcatgacggtcaattaagcgattgac

SEQ ID NO: 65322 - DNA, 80 bp, synthetic construct
  source 1..80: mol_type = other DNA
ggtggttggcaaccctgacagctctttgggaggttttccaaccctcccttcctaatctgggcacattgggtgcctccgta

SEQ ID NO: 65323 - DNA, 80 bp, synthetic construct
  source 1..80: mol_type = other DNA
gacaacacactggaaacaattgcccagtatttgctgacgcacatgcctagatcccacaagtttaacatggggcaagtttg

SEQ ID NO: 65324 - DNA, 80 bp, synthetic construct
  source 1..80: mol_type = other DNA
gcaaccactttgggactggttgtaactgcattatctcggtttttccagaagctgtgttcctatgtgtctgaaacattctt

SEQ ID NO: 65325 - DNA, 80 bp, synthetic construct
  source 1..80: mol_type = other DNA
tcctgaagctccaactacaccaggctgggttgcaattgtggctggggtcctgcttctcttgttaaaattgtcgtgcattc

SEQ ID NO: 65326 - DNA, 80 bp, synthetic construct
  source 1..80: mol_type = other DNA
gggtgtggcgcgaagtattgcgccgcaccccggtagtcagccccgctttcagtgcagaggggctcctagatgcttttgca

SEQ ID NO: 65327 - DNA, 80 bp, synthetic construct
  source 1..80: mol_type = other DNA
ccagggctggagccttttaccgccgtgtcaccacggtagatgtgtcatcccctaccattgatgattggaagaagaaaaac

SEQ ID NO: 65328 - DNA, 80 bp, synthetic construct
  source 1..80: mol_type = other DNA
tgaaatcatacatggctgctaacagggcattggcgcaagtcttcgcagagccttcttccaacgaaattgcagaaacgtgc

SEQ ID NO: 65329 - DNA, 80 bp, synthetic construct
  source 1..80: mol_type = other DNA
catgtaccgtgtatggtcgcccctgatacatatgcaaacccgagaaccgaacacccagatgctcccctacattaaccggg

SEQ ID NO: 65330 - DNA, 80 bp, synthetic construct
  source 1..80: mol_type = other DNA
tggtaccagtcacctcttcatttgattttgtccgtgggttgcgccaccaccttggattgtgctctatcaaaggcatgtgg

SEQ ID NO: 65331 - DNA, 80 bp, synthetic construct
  source 1..80: mol_type = other DNA
aaagcgtaccaaggatggcatagctccgcaacaattctggaattcctatccaaacacatggaagacgtcacgtttccttc

SEQ ID NO: 65332 - DNA, 80 bp, synthetic construct
  source 1..80: mol_type = other DNA
gaacccggagtgcactgtgtttcgagctgctgatggggacgtcatcttctacacatttgggtcctatgcctgttttgtct

SEQ ID NO: 65333 - DNA, 80 bp, synthetic construct
  source 1..80: mol_type = other DNA
acgcggtggagtgagcttgtcggatgacgagtatgatgagtggcgcgacctcgtgcgagactggagacaagatatgactg

SEQ ID NO: 65334 - DNA, 80 bp, synthetic construct
  source 1..80: mol_type = other DNA
tttaccagcaatggggaccatgtaggctatggttgccacattggcaacggtgtggtggtgacagtcacgcatgtcgctgc

SEQ ID NO: 65335 - DNA, 80 bp, synthetic construct
  source 1..80: mol_type = other DNA
aagttggcacagaaggtgagtcgagtgtcaaaggtggagaatgcttttgcctggaaggggttgcccgtcttgcgaggccc

SEQ ID NO: 65336 - DNA, 80 bp, synthetic construct
  source 1..80: mol_type = other DNA
tgattgtggtggtatgcctacaggaacaaggtaccaccggtccccagcctggccagaacagctcacaagcgaaacacatg

SEQ ID NO: 65337 - DNA, 80 bp, synthetic construct
  source 1..80: mol_type = other DNA
ccccagccccgttcggtgctggtgactcccgttacaatttctcccaggtggaaatgttagtcacagggttgaaaccgtat

SEQ ID NO: 65338 - DNA, 80 bp, synthetic construct
  source 1..80: mol_type = other DNA
tctgagcccacccctgggataccccctgccctcctgcagcgggcagccactcacactcgcacatacttggaatcaatagt

SEQ ID NO: 65339 - DNA, 80 bp, synthetic construct
  source 1..80: mol_type = other DNA
ttgcaggccaaaaggtggattattgggatgaagatcgccagtgttacacaggggtgctggccgagcatctcggcaaggcc

SEQ ID NO: 65340 - DNA, 80 bp, synthetic construct
  source 1..80: mol_type = other DNA
ttgcagccaattcaacaactcttggctggtcgacactcccaattgaaccaattgcaggagctgtgtcctggtataagtcc

SEQ ID NO: 65341 - DNA, 80 bp, synthetic construct
  source 1..80: mol_type = other DNA
ggatgtagcgctttctgccaaaaactcgggtcaaaccagcctacccgcccccaatgctgacatgagtggctacccggtgg

SEQ ID NO: 65342 - DNA, 80 bp, synthetic construct
  source 1..80: mol_type = other DNA
aatcatgactttaccacactgacccagacttttgatgctgctggcacatggatttggatgccctggacttcaacccaacc

SEQ ID NO: 65343 - DNA, 80 bp, synthetic construct
  source 1..80: mol_type = other DNA
gcacaaacatgactggcaccaactttcaatttggaggcactggtaccaataacatcatgttgtggcaggaacaacacttc

SEQ ID NO: 65344 - DNA, 80 bp, synthetic construct
  source 1..80: mol_type = other DNA
cttttctttcttccattccgtggttcctcacgcgtccgggtggacaattgcgattaagcgatcgcagccacgtctgagag

SEQ ID NO: 65345 - DNA, 80 bp, synthetic construct
  source 1..80: mol_type = other DNA
tcacctcagggtgagcgggagagaggaaattttcgaaaccaagcaggatatgtatgcccatgtttgtcgggtggttgccg

SEQ ID NO: 65346 - DNA, 80 bp, synthetic construct
  source 1..80: mol_type = other DNA
acctagttaggggcaccttccaggcgcagggccctacgaactgtggatgggccgctattgccgctggcgtccttctaatc

SEQ ID NO: 65347 - DNA, 80 bp, synthetic construct
  source 1..80: mol_type = other DNA
tgctttacccagctcattgaggaaggtacggagctgattcaggagtttgggacatcacctatggcagggcttgcacgatc

SEQ ID NO: 65348 - DNA, 80 bp, synthetic construct
  source 1..80: mol_type = other DNA
caataatcctaactggtccaccgggtataggaaagacacaccttgcacagcacctagccgctggatttggcaagacatcg

SEQ ID NO: 65349 - DNA, 80 bp, synthetic construct
  source 1..80: mol_type = other DNA
aaaatattgcgtcgcatcccggtggttcgccccgttttcagtgcggaggggctcctagatgcttttgcatccaaaccccc

SEQ ID NO: 65350 - DNA, 80 bp, synthetic construct
  source 1..80: mol_type = other DNA
aaggcaaggtctttacatctaattacattatatgtactagcaattaccccacctctgttttgccagaaaacccgagggct

SEQ ID NO: 65351 - DNA, 80 bp, synthetic construct
  source 1..80: mol_type = other DNA
ggagctttttaccgccgtgtcaccacggtggatgtgtcttcccctatcattgatgattggaaaaagaagaaccctggtaa

SEQ ID NO: 65352 - DNA, 80 bp, synthetic construct
  source 1..80: mol_type = other DNA
agggggacactctggagggtgtccgtgtgaaacctatcctaaccagtgtcgacggtctgtcccgactcatggaaactaag

SEQ ID NO: 65353 - DNA, 80 bp, synthetic construct
  source 1..80: mol_type = other DNA
ttcaaagaacagggcaatgagatgcgcaacctttgggttacgtgcccccgtgacttggtgacacccgcagcatctgggct

SEQ ID NO: 65354 - DNA, 80 bp, synthetic construct
  source 1..80: mol_type = other DNA
tcgggtggtaccagtcacctcttcatttgattttgttcgtgggttacgccaccaccttggactgtgttctatcaaaggca

SEQ ID NO: 65355 - DNA, 80 bp, synthetic construct
  source 1..80: mol_type = other DNA
tgtggaaagcataccagggttggcacagctccgcgacaattctggagttcctctctaaacacatggaggatgttacattc

SEQ ID NO: 65356 - DNA, 80 bp, synthetic construct
  source 1..80: mol_type = other DNA
ccctccaacccggagtgcactgtgtttcgagctgcggatggagatgtcatcttctacacatttgggtcctacgcctgttt

SEQ ID NO: 65357 - DNA, 80 bp, synthetic construct
  source 1..80: mol_type = other DNA
accctgcgtttgcttgttgaaacaattacggagagtttagcccactttggaccactgctgttgatgattcacaatgtggc

SEQ ID NO: 65358 - DNA, 80 bp, synthetic construct
  source 1..80: mol_type = other DNA
tagcccactttggaccactgctgttgatgattcacaatgtggcgtatttaacaactaggtcacaacgtgacgaggaggcc

SEQ ID NO: 65359 - DNA, 80 bp, synthetic construct
  source 1..80: mol_type = other DNA
gtatttaacaactaggtcacaacgtgacgaggaggccaaaggtaaaaccaaacacggcaggggggccagacacgcacgac

SEQ ID NO: 65360 - DNA, 80 bp, synthetic construct
  source 1..80: mol_type = other DNA
ggggagttcgttgagttgcgtgagcgctacgcccttggaatggattcagaagacgtgcaacggtaccgcgcttggttgca

SEQ ID NO: 65361 - DNA, 80 bp, synthetic construct
  source 1..80: mol_type = other DNA
acttcgtgccatgcggctaggtgcaggtgcctatcagcatgcaaccattattgggcgtgggcgtgttgaggacaccatca

SEQ ID NO: 65362 - DNA, 80 bp, synthetic construct
  source 1..80: mol_type = other DNA
cgctgcggatgccgtggagggtgtggaattctcagttaggaaaacagaaggtgaaaccacatgggtaaacacccccctta

SEQ ID NO: 65363 - DNA, 80 bp, synthetic construct
  source 1..80: mol_type = other DNA
gagggtacgtatgaaacccccaacatcacagtccacgggttccacctacgcatcatcaatggttaccctacaaaacgagg

SEQ ID NO: 65364 - DNA, 80 bp, synthetic construct
  source 1..80: mol_type = other DNA
tgactgtggtggtatgcccactggaacgaggtaccatcggtccccagcctggccagaacagctctcaagtgaaacccatg

SEQ ID NO: 65365 - DNA, 80 bp, synthetic construct
  source 1..80: mol_type = other DNA
ggcacacatcgatcccccaatctaacttacagtgaagcatgtgccttattggatcgcagcacatcttgtggcccattcat

SEQ ID NO: 65366 - DNA, 80 bp, synthetic construct
  source 1..80: mol_type = other DNA
catccttagcaatcctcgagcggctgtctgaagcaacaccaataacaacgtcggctgtggagttactatcatcaccagca

SEQ ID NO: 65367 - DNA, 80 bp, synthetic construct
  source 1..80: mol_type = other DNA
cgtggccacttgaatgacataatctttgtgacaaagtctggactcccctcgggcatgcctttcaccagcgttgttaattc

SEQ ID NO: 65368 - DNA, 80 bp, synthetic construct
  source 1..80: mol_type = other DNA
aagcacgaagggcgcatgagagggaacgagcagacctatttaaggagctgccattggttgaccctgaagtgactcagcaa

SEQ ID NO: 65369 - DNA, 80 bp, synthetic construct
  source 1..80: mol_type = other DNA
gactgttttggccaacctcagtgcctttggtctacggcccaccgctgccgacaagacagacaaaatagcccccacccata

SEQ ID NO: 65370 - DNA, 80 bp, synthetic construct
  source 1..80: mol_type = other DNA
caccagtcttcctaaagcggactctcacctgtacaccaagaggtatccgtgggctccttgacatcacgtcaattaagcgg

SEQ ID NO: 65371 - DNA, 80 bp, synthetic construct
  source 1..80: mol_type = other DNA
gcttgaaaatgccctagcctacgcttcacaacatggccacgcaatctttgaggagatcgctaaaattgccaagagaacgg

SEQ ID NO: 65372 - DNA, 80 bp, synthetic construct
  source 1..80: mol_type = other DNA
cagaagtcctacttttacgccatgtggcgacaggtggtaaagaaaggcaaggagtttttcatccccctggtgaagtgtac

SEQ ID NO: 65373 - DNA, 80 bp, synthetic construct
  source 1..80: mol_type = other DNA
gacagatgtggcactctcagctaaaaactcgggccaatccagtctacctgcccctaatgctgacatgagtggttacccgg

SEQ ID NO: 65374 - DNA, 80 bp, synthetic construct
  source 1..80: mol_type = other DNA
ccaggggcagcagaggtctactgttcccagcttgagagcactgcagagatgtttcaaaacaatatagtcaacattcccgc

SEQ ID NO: 65375 - DNA, 80 bp, synthetic construct
  source 1..80: mol_type = other DNA
caatcaaatggcagtattcaatgtggagactgctgggaacacatttcaaattggcatcctgccaaatggctactgtgtca

SEQ ID NO: 65376 - DNA, 80 bp, synthetic construct
  source 1..80: mol_type = other DNA
catttcgtggttcctcacgcgtccgggtggataattgcgattaagcgatcgcagccacgtctctcttatggaaaaaaaaa

SEQ ID NO: 65377 - DNA, 80 bp, synthetic construct
  source 1..80: mol_type = other DNA
tgagcgggagagaggaaatttttgaaaccaagcaggacatgttcgcccatgtttgtcggatggtcgccgggatgtggcgc

SEQ ID NO: 65378 - DNA, 80 bp, synthetic construct
  source 1..80: mol_type = other DNA
gcgtgaaaccgcagtatctgcggtgtccgcaatcacactcctctttgagtccctgaagcagttcgtggaaggtgtcattg

SEQ ID NO: 65379 - DNA, 80 bp, synthetic construct
  source 1..80: mol_type = other DNA
accttgtcaggggcacctttcaggcacagggccctacgaactgtgggtgggccgccattgccgccggtgtcctcctaatc

SEQ ID NO: 65380 - DNA, 80 bp, synthetic construct
  source 1..80: mol_type = other DNA
ctcatgaaactgtccgggtgttcaaacaccaccagttattggcatcgcctcttgaaagtgtgtggtggtgtcacaaccat

SEQ ID NO: 65381 - DNA, 80 bp, synthetic construct
  source 1..80: mol_type = other DNA
tgcggcagctgcccgagccgttgtgtgggtgcgtgacatcattgccgaagccgacggcaaagccaggctcaaaaagtata

SEQ ID NO: 65382 - DNA, 80 bp, synthetic construct
  source 1..80: mol_type = other DNA
tggcgcgcaccgccgcactcctagagttggcggcttcccgagatgtgaccggcaccgatgagctcaagcgcttgctggac

SEQ ID NO: 65383 - DNA, 80 bp, synthetic construct
  source 1..80: mol_type = other DNA
tgtttcacacaactcattgaggagggcacagaactggtacaagaatttggcacatcaccactagcgggtctgactaggtc

SEQ ID NO: 65384 - DNA, 80 bp, synthetic construct
  source 1..80: mol_type = other DNA
gtatgtgagtgagctagagtcaactgcaaacagcattaggagcaccatcctacttgacacacctaggaaaactccagttg

SEQ ID NO: 65385 - DNA, 80 bp, synthetic construct
  source 1..80: mol_type = other DNA
ctattatcctcactggccctccaggaattggtaaaactaagttagcccaacatctcgcagcgggctttggtaaggtgtcg

SEQ ID NO: 65386 - DNA, 80 bp, synthetic construct
  source 1..80: mol_type = other DNA
gccagattgtggcgcgcacatgtgcgccgtagtttggctgccatcccgtcattcacagaggagggtctcttggactcctt

SEQ ID NO: 65387 - DNA, 80 bp, synthetic construct
  source 1..80: mol_type = other DNA
ggtgctttctaccgacgtgttacgacggtggatgtctcgtcacccgccattgaggattggaagaagaagaaccccgggaa

SEQ ID NO: 65388 - DNA, 80 bp, synthetic construct
  source 1..80: mol_type = other DNA
gaagcctccaccagatttatacaagagtgatttcacacaccttcggctgtctattcgaccattccttggttacaaccctg

SEQ ID NO: 65389 - DNA, 80 bp, synthetic construct
  source 1..80: mol_type = other DNA
aaggagacactcttgatggggttcgggtgaaacccgtcctgactagcgttgatggcctgtctcgcttgatggagaccaag

SEQ ID NO: 65390 - DNA, 80 bp, synthetic construct
  source 1..80: mol_type = other DNA
tttaaagaacaaggcaacgagcaacgcaacctttggatcacgtgccctcgggacttggtgtcaccagcagcgtcaggcct

SEQ ID NO: 65391 - DNA, 80 bp, synthetic construct
  source 1..80: mol_type = other DNA
gaaagcttatatggctgcaaaccgagctcttgcacaagtgtttcaggaaccatcttcacaggacattggtgagacctgca

SEQ ID NO: 65392 - DNA, 80 bp, synthetic construct
  source 1..80: mol_type = other DNA
cgtctaggatctatgtttcctgtaacaatcctccacccacatttgttgggcgcgtggtgaagatcacggccatcaacccg

SEQ ID NO: 65393 - DNA, 80 bp, synthetic construct
  source 1..80: mol_type = other DNA
tgggatgcgtcattggccaactccatgctgtctatgtttgagaccactagtcacatcccggcctcggtgcaacgtgagat

SEQ ID NO: 65394 - DNA, 80 bp, synthetic construct
  source 1..80: mol_type = other DNA
catgtatcgtgtgtgggatccactagttcacttgcagactcgggagcccaacacacagatgctcccctatataaacaggg

SEQ ID NO: 65395 - DNA, 80 bp, synthetic construct
  source 1..80: mol_type = other DNA
catgtcaaaaccacctgttgacatcaaccccgacacgacatttcgtgagttgttcggcattgacccccacgaacagttcc

SEQ ID NO: 65396 - DNA, 80 bp, synthetic construct
  source 1..80: mol_type = other DNA
tggtgccggtcaccacagcttttgacttcatcagaggcctgagacaccatcttgggctttgttcggttaagggcatgtgg

SEQ ID NO: 65397 - DNA, 80 bp, synthetic construct
  source 1..80: mol_type = other DNA
cgggcctaccaaggctggagtagctctagctctatcctggaattcctctcaaagcatatggcagatgtgtcttttcccca

SEQ ID NO: 65398 - DNA, 80 bp, synthetic construct
  source 1..80: mol_type = other DNA
caaccctgaatgcaccgtctttcgggcgccagacggcgatgtcatcttctacacctttgggtcctatgcgtgctttgtgt

SEQ ID NO: 65399 - DNA, 80 bp, synthetic construct
  source 1..80: mol_type = other DNA
actttacgcctactcgccgagactgtggcggagagtctagcacactttggaccattcctgctcatgatgcacaacgtgtc

SEQ ID NO: 65400 - DNA, 80 bp, synthetic construct
  source 1..80: mol_type = other DNA
ctaccttgcaactcgctctagccgggacgaggaggcgaaaggtaagaccaaacatgggcgcggcgccaaacattccagga

SEQ ID NO: 65401 - DNA, 80 bp, synthetic construct
  source 1..80: mol_type = other DNA
ggggaggggtcagcttgtctgacgatgagtacgatgagtggcgagaccttgtgcgcgactggaggcaagacatgaccgtt

SEQ ID NO: 65402 - DNA, 80 bp, synthetic construct
  source 1..80: mol_type = other DNA
ttggggaatttgtggagctacgcgagaggtacgcactcggaatggactctgaggatgtacagcgctgccgcgcttggttg

SEQ ID NO: 65403 - DNA, 80 bp, synthetic construct
  source 1..80: mol_type = other DNA
gaattgcgggcgatgcgcatgggggctggggcctaccaacatgcaaccataattggcaggtgcgtggtccaggataccat

SEQ ID NO: 65404 - DNA, 80 bp, synthetic construct
  source 1..80: mol_type = other DNA
tccgaacccagccaatgcgagccccacgcatgcctcgcaatcaaggttatgacgaggaagccccgacaccagtcgtcaca

SEQ ID NO: 65405 - DNA, 80 bp, synthetic construct
  source 1..80: mol_type = other DNA
ttcacatccggtggcgagcacgttgggtacggctgtcacatggggaatggggtggttgtcacggtcacacacgttgcctc

SEQ ID NO: 65406 - DNA, 80 bp, synthetic construct
  source 1..80: mol_type = other DNA
ccgcatctgaccaagtagaaggggaagatttcaccatacggaaaaccgagggcgaaaccacctgggttaacaccaacctt

SEQ ID NO: 65407 - DNA, 80 bp, synthetic construct
  source 1..80: mol_type = other DNA
agccatctacctcactaccaggtgggtgagggagcaccagtgtactactctgcccgcttgcaccccgtcacaacacttgc

SEQ ID NO: 65408 - DNA, 80 bp, synthetic construct
  source 1..80: mol_type = other DNA
tgaaggcacctacgagactcccaacatcaccgtccagggttatcacctccgcattctcaatgggtaccccacgaaacgtg

SEQ ID NO: 65409 - DNA, 80 bp, synthetic construct
  source 1..80: mol_type = other DNA
gtgattgtggcactccatatttcgattcgtgccgccgtttggtagggctgcacgcagccacatcaacgaatggcgagacc

SEQ ID NO: 65410 - DNA, 80 bp, synthetic construct
  source 1..80: mol_type = other DNA
aaacttgcccagcgcgtctcgaaaacatctaaagtggagaatgcttttgcctggaagggacttgcagttgtccgtggacc

SEQ ID NO: 65411 - DNA, 80 bp, synthetic construct
  source 1..80: mol_type = other DNA
tgactgcgggggcatgcccactggcacacggttccaccgctcacccgcctggcccgaaccagtggagggagagacacacg

SEQ ID NO: 65412 - DNA, 80 bp, synthetic construct
  source 1..80: mol_type = other DNA
ccctgctccatttggttcaggggatagccgatacaagttttcccaagttgagatgcttgtcaatggcctaaagccctact

SEQ ID NO: 65413 - DNA, 80 bp, synthetic construct
  source 1..80: mol_type = other DNA
ctgagccgaccccggggatcccaccagccctgttacaacgggccgccactcatacgcgcacgtacctggagacaataata

SEQ ID NO: 65414 - DNA, 80 bp, synthetic construct
  source 1..80: mol_type = other DNA
ggcacccacagatcgccaaatttgtctttcggtgaagcgtgctcacttttggaaaagtccacttcctgtgggcctttcat

SEQ ID NO: 65415 - DNA, 80 bp, synthetic construct
  source 1..80: mol_type = other DNA
tgctggccaaaagggtgattactgggatgaggacaagcagtgttacactggagtgttggccgagcaccttgctaaggcct

SEQ ID NO: 65416 - DNA, 80 bp, synthetic construct
  source 1..80: mol_type = other DNA
aaaatgcccagggcaagcggcggctcctatggggctgtgacgcaggagccactttggtggccactgccgcattcaagggt

SEQ ID NO: 65417 - DNA, 80 bp, synthetic construct
  source 1..80: mol_type = other DNA
gtagctacccggctgcaaactgtcgccccaatgaccccggtgggcgttgggataaacatggacagttatcaggttgaagt

SEQ ID NO: 65418 - DNA, 80 bp, synthetic construct
  source 1..80: mol_type = other DNA
gttgaatgaatcacttaaaggtggggtcttgtactgcttggactatagcaaatgggactcaacacagcaccctgcggtca

SEQ ID NO: 65419 - DNA, 80 bp, synthetic construct
  source 1..80: mol_type = other DNA
cagccgcctcgctcggaattttggagaggctatcagaggccaccccaatcaccacatcagcagttgagttgttatcctcg

SEQ ID NO: 65420 - DNA, 80 bp, synthetic construct
  source 1..80: mol_type = other DNA
cctgcgaggggacacctgaatgacatagttttcattacgaagtctggtttaccatctggaatgccattcaccagtgtcat

SEQ ID NO: 65421 - DNA, 80 bp, synthetic construct
  source 1..80: mol_type = other DNA
caactccctcaaccacatgacctacttcgcagcagctgtgctcaaggcatatgaacagcatggtgctccttacacaggca

SEQ ID NO: 65422 - DNA, 80 bp, synthetic construct
  source 1..80: mol_type = other DNA
tccaaacagtgttggccaatttggcatcctttggtctaaaaccaactgctgctgacaagagtgaaaccattgtgcccacc

SEQ ID NO: 65423 - DNA, 80 bp, synthetic construct
  source 1..80: mol_type = other DNA
aagcacgcagggctttcgagcgggagcgtgctgaactgttcaaggaattgccacacactgacctggatgtcaatcgtcag

SEQ ID NO: 65424 - DNA, 80 bp, synthetic construct
  source 1..80: mol_type = other DNA
catactcctgttttcttaaaaaggactctaacttgcactccacgtggtgtacggggtttgcttgatatcacatccataaa

SEQ ID NO: 65425 - DNA, 80 bp, synthetic construct
  source 1..80: mol_type = other DNA
gagacaattcatgtggatcaaggccaacagaactgtggacattcattccccaccagcttacgaccgtggggctcggagca

SEQ ID NO: 65426 - DNA, 80 bp, synthetic construct
  source 1..80: mol_type = other DNA
tccagttggagaacgccctggcttatgcttcacagcacggccatgcagtcttcgaggaagttgccgagttggcccgccac

SEQ ID NO: 65427 - DNA, 80 bp, synthetic construct
  source 1..80: mol_type = other DNA
tgcaggcctcagtcaaggcaaccccagtgaagaggttaccaaattagtgtttgaaatggagggtaacgcccgccacgatg

SEQ ID NO: 65428 - DNA, 80 bp, synthetic construct
  source 1..80: mol_type = other DNA
agcctaaggctcagagcagcaacaatgttccgcttgcatcacctcaggacaccattggcccgagcgcagcattacttctc

SEQ ID NO: 65429 - DNA, 80 bp, synthetic construct
  source 1..80: mol_type = other DNA
ccaactcaaattgaaaccccaaacgctaccgcccagcgcgtggaattggctgctgccactggagcaatctcaagcaacat

SEQ ID NO: 65430 - DNA, 80 bp, synthetic construct
  source 1..80: mol_type = other DNA
accaaactgtgtccgtgagtgttttgctagtgtcaccactttgccatggaccactcgcatggcagctaacacttttctgg

SEQ ID NO: 65431 - DNA, 80 bp, synthetic construct
  source 1..80: mol_type = other DNA
gcagtttccaagtgcgtgtcaccatttcaggttctggcctgtttgctggtagggctatcaccgccgtcctacctcctggg

SEQ ID NO: 65432 - DNA, 80 bp, synthetic construct
  source 1..80: mol_type = other DNA
cagaaatcttacttttatgcaatgtggcggcaggtggtcaagaagggaaaggagttcttcattcctctggtgaagtgtac

SEQ ID NO: 65433 - DNA, 80 bp, synthetic construct
  source 1..80: mol_type = other DNA
gtcaacccagctaacgtgcaaaaccccggtgtcttcccacatgctttcattgatgcacgcactgtggatcccattctgat

SEQ ID NO: 65434 - DNA, 80 bp, synthetic construct
  source 1..80: mol_type = other DNA
caacctgcctgacatcagggccgttgactaccaccgagtggatggggaagagcaaactgcaacagttgggttatgggtag

SEQ ID NO: 65435 - DNA, 80 bp, synthetic construct
  source 1..80: mol_type = other DNA
cacaacctctcatcaacccgtttcaagcggggtcagtgtccacttgctggctgagttttgaaactcgtccagggcccgac

SEQ ID NO: 65436 - DNA, 80 bp, synthetic construct
  source 1..80: mol_type = other DNA
tttgatttttgtcttcttaaggcccctgaacagcagatggacaatgggatttcaccagcaaacctcttaccccggaggct

SEQ ID NO: 65437 - DNA, 80 bp, synthetic construct
  source 1..80: mol_type = other DNA
tgggcggtcacgtggcaaccgacttgggggtcgaattgtcgggttggccgtcgtggcggttgctgaacaggttaatcacc

SEQ ID NO: 65438 - DNA, 80 bp, synthetic construct
  source 1..80: mol_type = other DNA
attttatggccaattccacaactctgggctggtccaccttgccaattgaaccaattgctggtgctgtttcatggtaccaa

SEQ ID NO: 65439 - DNA, 80 bp, synthetic construct
  source 1..80: mol_type = other DNA
accccaagtcaaaccatcacaacacgtggtttgttgagtgctgaaggcaaaggcatcatcttcccaaacattgtcaacca

SEQ ID NO: 65440 - DNA, 80 bp, synthetic construct
  source 1..80: mol_type = other DNA
ttggaccgatgtggcactttccagcaaaacggccggtcaaacagccgtcccaagtacccaggagattctcaatcgctcac

SEQ ID NO: 65441 - DNA, 80 bp, synthetic construct
  source 1..80: mol_type = other DNA
caggtgcttctgggcctgtggtgatgttccaaaacaatggtgatgttaatgagagcagtgcaaataattgtgttctgacg

SEQ ID NO: 65442 - DNA, 80 bp, synthetic construct
  source 1..80: mol_type = other DNA
gcggcatcccaagacttcactacgttgtcttccaactttgatgctgctggcacgtgggtgtggctcccatggacatcaag

SEQ ID NO: 65443 - DNA, 80 bp, synthetic construct
  source 1..80: mol_type = other DNA
catcttggcgccgaaagttcacagagcccgccgaaattatcaggcaggttttggtccacttttgtgaagggatgaggtca

SEQ ID NO: 65444 - DNA, 80 bp, synthetic construct
  source 1..80: mol_type = other DNA
tacccctaacggtgccaccaaccaaaacgtgtatgtcacacctacttggatcaatggtgatccttccaaacccattcatg

SEQ ID NO: 65445 - DNA, 80 bp, synthetic construct
  source 1..80: mol_type = other DNA
gtaaatgcaccaacatgattggcaccaatttccaatttggtggcacgggcacaaacaacatcatgttgtggcaagagcag

SEQ ID NO: 65446 - DNA, 80 bp, synthetic construct
  source 1..80: mol_type = other DNA
cgttccctggagcggcggaagtgtattgctcccagttggaaagcacggctgagatgtttcaaaacaatgtggtgaatatt

SEQ ID NO: 65447 - DNA, 80 bp, synthetic construct
  source 1..80: mol_type = other DNA
ccatctaatcaaatggccgtgtttaatgtggaaaccgctggcaacacctttcaaattggcattcttccaaatgggtactg

SEQ ID NO: 65448 - DNA, 80 bp, synthetic construct
  source 1..80: mol_type = other DNA
tgtgacaaatgccactgttggcactcatcaattgttggattttgagactggatttcggtttgttggacttttcccccaga

SEQ ID NO: 65449 - DNA, 80 bp, synthetic construct
  source 1..80: mol_type = other DNA
gcacaagtcttcaagggcccaatgggaacgcagggcgggccgtgcgtttccttgaataatgtcttggttcacaggagctg

SEQ ID NO: 65450 - DNA, 80 bp, synthetic construct
  source 1..80: mol_type = other DNA
ccctcgccgctggatccttagtggatatggctggcacagtctcatccatagttgcacaacaccggcaaattgatttaatg

SEQ ID NO: 65451 - DNA, 80 bp, synthetic construct
  source 1..80: mol_type = other DNA
gcacaggcaaatcaaattcaacgagattgggtcaataaacaggaggcattgataaagagaggacaagatatgtcacagga

SEQ ID NO: 65452 - DNA, 80 bp, synthetic construct
  source 1..80: mol_type = other DNA
tttggcaatcaatggcactgctcggcgtgttcagtccttagttgaggctggcttcacccccaccgacgctcgacgtctcg

SEQ ID NO: 65453 - DNA, 80 bp, synthetic construct
  source 1..80: mol_type = other DNA
caggtagtggtgagactgtccaatatggcatcttggaccgccctatcctgcaacggggagtcttgactggcatttcagag

SEQ ID NO: 65454 - DNA, 80 bp, synthetic construct
  source 1..80: mol_type = other DNA
caatttgcaacaaacgccaattacatcaacctgtcccttatagctaagttgcggccaacggttctcaccatgatctttca

SEQ ID NO: 65455 - DNA, 80 bp, synthetic construct
  source 1..80: mol_type = other DNA
acgcaccacctacagacaatgcagggtgcgcttagtgccttcaagaagggctccagttatggggctccaccagcccccgc

SEQ ID NO: 65456 - DNA, 80 bp, synthetic construct
  source 1..80: mol_type = other DNA
tggctttgtcaatccaaattatcaattggcacccccaaaagtaaatttgggctatcggcctccatcaaccaatgtgtaaa

SEQ ID NO: 65457 - DNA, 80 bp, synthetic construct
  source 1..80: mol_type = other DNA
ttttccattcctctttcttcttttcttttcttttctacatggttcctcacgcgtccgggtggataattgtgattaagcga

SEQ ID NO: 65458 - DNA, 80 bp, synthetic construct
  source 1..80: mol_type = other DNA
ctgcccacctcagggtgggtggtcgagagcagatttttgagactgttgaagaccttgacattcacgtcaaaggtgtggtg

SEQ ID NO: 65459 - DNA, 80 bp, synthetic construct
  source 1..80: mol_type = other DNA
acaacacaaaaacacctacagagggtggttggccacagttaccgctcttgttgaggtttattccagcttgtttcaggaca

SEQ ID NO: 65460 - DNA, 80 bp, synthetic construct
  source 1..80: mol_type = other DNA
gagagacactgcagtgtcagcaatatcggctatcaccttggtgtttgagaccatcaaagactttatagtcaatgtgatag

SEQ ID NO: 65461 - DNA, 80 bp, synthetic construct
  source 1..80: mol_type = other DNA
atctagtcaagagcacgtttcagtcccaaggcccgacttcctgtggttgggccgccattgctgccggtgccctcctcata

SEQ ID NO: 65462 - DNA, 80 bp, synthetic construct
  source 1..80: mol_type = other DNA
ccttctcaagatctctggctgccccaatgtcatgggatattggcagcgattattgaaagtgtgtgctggtgtcacgaccg

SEQ ID NO: 65463 - DNA, 80 bp, synthetic construct
  source 1..80: mol_type = other DNA
cttatgtcagtgagcttgaaactgccgctaatggcatcaggagcacaatccttttggacactccaagaaaagtcccagtg

SEQ ID NO: 65464 - DNA, 80 bp, synthetic construct
  source 1..80: mol_type = other DNA
gccggggtgtggcgcgaaatattgcgtcgcatcccggtggtcagccccgttttcagtgcggagtggctcctagatgcttt

SEQ ID NO: 65465 - DNA, 80 bp, synthetic construct
  source 1..80: mol_type = other DNA
tgggacgcatccctcgccaactcaatgttgtcaatgtttgagactaacacacacataccagcagtcacccaaagggagat

SEQ ID NO: 65466 - DNA, 80 bp, synthetic construct
  source 1..80: mol_type = other DNA
tgcatccaaacccccagtggacattaaccctgacaccacatttcgtgagttgtttgggatagatccacatgaacaattcc

SEQ ID NO: 65467 - DNA, 80 bp, synthetic construct
  source 1..80: mol_type = other DNA
agattgcggcacaccgtacttcgactcgtgtcgaaggctggtgggcctacatgccgccacatcaaccaatggggagacta

SEQ ID NO: 65468 - DNA, 80 bp, synthetic construct
  source 1..80: mol_type = other DNA
aaccagcaaggcaagcgtcgactgttgtggggttgcgacgctggggctactttggttgccacagcagccttcaaaggagt

SEQ ID NO: 65469 - DNA, 80 bp, synthetic construct
  source 1..80: mol_type = other DNA
tgctacgcgcctacaggcagttgcacccatgacacctgttggcgttggtattaacatggatagttgccaggtggaggtgc

SEQ ID NO: 65470 - DNA, 80 bp, synthetic construct
  source 1..80: mol_type = other DNA
tcaacgaatccctcaagggcggcgtcgtgtactgcctagactacagcaagtgggactccactcaacatcccgccgtaaca

SEQ ID NO: 65471 - DNA, 80 bp, synthetic construct
  source 1..80: mol_type = other DNA
gccgcgtccttagcaatcctcgagcggctgtctgaagcaacaccagtaacaacatcggccgtagagttactatcatcacc

SEQ ID NO: 65472 - DNA, 80 bp, synthetic construct
  source 1..80: mol_type = other DNA
ctgctcacctcagggtgagcgggagagaggaaatttttgaaaccaagcaggacatgtacgcccatgtttgtcgagtggtt

SEQ ID NO: 65473 - DNA, 80 bp, synthetic construct
  source 1..80: mol_type = other DNA
attctatccaattgagttcaaccacaaggttgaaacaacagtcctcttttctgctcacctcagggtgagtgggagagagg

SEQ ID NO: 65474 - DNA, 80 bp, synthetic construct
  source 1..80: mol_type = other DNA
ctccttaagatctctggttgccccagtgtcatgggatactggcagcgtttgctgaaagtgtgcgccggtgtcacgaccat

SEQ ID NO: 65475 - DNA, 80 bp, synthetic construct
  source 1..80: mol_type = other DNA
tgctgcagccgcgagagcattcacctgggttcgcgacatcattgtggaggctgaaaggaaagctcgcttgaagaaataca

SEQ ID NO: 65476 - DNA, 80 bp, synthetic construct
  source 1..80: mol_type = other DNA
tggcacgcaccgccgccctattggagcttgctgcatcacgggacgtcaccgggacggaagagctaaaaaggttacttgag

SEQ ID NO: 65477 - DNA, 80 bp, synthetic construct
  source 1..80: mol_type = other DNA
cttatgtcagtgagctcgaaactgccgctaatggtatcagaagcacaatcctcctggacaccccaaggaaggtcccggtg

SEQ ID NO: 65478 - DNA, 80 bp, synthetic construct
  source 1..80: mol_type = other DNA
gcaataattttaactggcccaccgggtataggaaaaacacaccttgcacagcacttggccgctggctttggcaagacctc

SEQ ID NO: 65479 - DNA, 80 bp, synthetic construct
  source 1..80: mol_type = other DNA
aaacttttctgtcacacttgatcaccatgactcctatacaggtaacgatgtggctatctgggatgagtttgatgtggacg

SEQ ID NO: 65480 - DNA, 80 bp, synthetic construct
  source 1..80: mol_type = other DNA
actccggtggtcggtccctctttcagtgcggaagggcttctggatgcctttgcatccaaaccccccgtggatattaatcc

SEQ ID NO: 65481 - DNA, 80 bp, synthetic construct
  source 1..80: mol_type = other DNA
aaggtaaagtgttcacatccaattacatcatatgcaccagcaattaccccacctctgttttgccagaaaacccgagggct

SEQ ID NO: 65482 - DNA, 80 bp, synthetic construct
  source 1..80: mol_type = other DNA
ggggcattctaccgccgtgtcacaacggtggacgtgtcatcccctgtcattgatgattggaagaagaaaaaccccggaaa

SEQ ID NO: 65483 - DNA, 80 bp, synthetic construct
  source 1..80: mol_type = other DNA
agaaacccccattggacttgtacaagaaagatttctcacacttgcgcctttccgtccgtccataccttggttataatccc

SEQ ID NO: 65484 - DNA, 80 bp, synthetic construct
  source 1..80: mol_type = other DNA
gagggggacacactggagggtgttcgagtgaaacctatcctgactagcgtggacggtttatcccgtctcatggaaaccaa

SEQ ID NO: 65485 - DNA, 80 bp, synthetic construct
  source 1..80: mol_type = other DNA
gttcaaggaacagggcaatgagttgcgcaatctttggatcacatgcccgcgtgacttagtaacacctgcagcatccgggt

SEQ ID NO: 65486 - DNA, 80 bp, synthetic construct
  source 1..80: mol_type = other DNA
tgaaatcatatatggctgccaatagagcgctggcccaagtttttgcagaaccctcttcaaatgaaattgcggagacatgc

SEQ ID NO: 65487 - DNA, 80 bp, synthetic construct
  source 1..80: mol_type = other DNA
acgtccagaatttttgtgtctgctaacaacccccctcccacctttgtgggtagacacgtgaaaataacagccatcaaccc

SEQ ID NO: 65488 - DNA, 80 bp, synthetic construct
  source 1..80: mol_type = other DNA
ctgggatgcgtcccttgccaattcaatgttgtcaatgtttgagaccaacactcacataccagctgtcactcaaagggaga

SEQ ID NO: 65489 - DNA, 80 bp, synthetic construct
  source 1..80: mol_type = other DNA
accttgcgcctgcttgttgaaacaatcacggagagcttagcccactttggcccattactgctgatggtccacaatgtgac

SEQ ID NO: 65490 - DNA, 80 bp, synthetic construct
  source 1..80: mol_type = other DNA
ggggccagacacgcacgacgtggcggagtgagcttgtcggacgacgagtatgatgagtggcgtgaccttgtgcgtgattg

SEQ ID NO: 65491 - DNA, 80 bp, synthetic construct
  source 1..80: mol_type = other DNA
ttggggaatttgttgaactgcgcgagcgttatgccctcggcatggactcagaggacgtgcaacgatatcgggcatggctg

SEQ ID NO: 65492 - DNA, 80 bp, synthetic construct
  source 1..80: mol_type = other DNA
caacttcgagccatgcgattgggtgcaggtgcctaccagcatgcaaccatcattgggcggggacgcgttgaagataccat

SEQ ID NO: 65493 - DNA, 80 bp, synthetic construct
  source 1..80: mol_type = other DNA
ctttcaccagcaatggggaccacgtggggtacggttgccacattggtaatggtgtggtagtaacggtcactcatgtggct

SEQ ID NO: 65494 - DNA, 80 bp, synthetic construct
  source 1..80: mol_type = other DNA
gctgctgcggatgtcgtagagggtttggaatttacggttaggaaaaccgaaggtgaaaccacatgggtgaacacccccct

SEQ ID NO: 65495 - DNA, 80 bp, synthetic construct
  source 1..80: mol_type = other DNA
cagccacctaccacactaccaactgggtgatggggcgccagtctactactcaactcgattgcaccccgttaccacaattg

SEQ ID NO: 65496 - DNA, 80 bp, synthetic construct
  source 1..80: mol_type = other DNA
cagaaggtacatatgaaactcctaatatcactgtccatgggttccacctccgtattatcaatggttaccccacgaaacgt

SEQ ID NO: 65497 - DNA, 80 bp, synthetic construct
  source 1..80: mol_type = other DNA
ggagactgcggcacgccgtatttcgactcatgccgacggctggtgggcctacacgccgccacatcgactaacggggagac

SEQ ID NO: 65498 - DNA, 80 bp, synthetic construct
  source 1..80: mol_type = other DNA
caagttggctcagaaagtgagccgagtttcaaaggtggaaaatgcttttgcctggaagggcttgcccgtcttgcggggcc

SEQ ID NO: 65499 - DNA, 80 bp, synthetic construct
  source 1..80: mol_type = other DNA
ctgattgtggtggtatgcccacagggacaagatatcaccggtccccagcttggccagagcaactttccaacgaaacccac

SEQ ID NO: 65500 - DNA, 80 bp, synthetic construct
  source 1..80: mol_type = other DNA
gccccagccccattcggtgccggcgactcccgctataacttttcccaggtcgaaatgctagtcacagggttgaaacctta

SEQ ID NO: 65501 - DNA, 80 bp, synthetic construct
  source 1..80: mol_type = other DNA
ttccgaacccacacctgggataccccctgccctcctgcaacgggcggccacgcacacccgcacatacctggagtcaatag

SEQ ID NO: 65502 - DNA, 80 bp, synthetic construct
  source 1..80: mol_type = other DNA
tcggtacacaccggtcccctaacttgacttacaacgaagcatgtgccttattagatcgcagcacatcttgtggcccgttc

SEQ ID NO: 65503 - DNA, 80 bp, synthetic construct
  source 1..80: mol_type = other DNA
attgcaggccaaaaggtggactattgggatgaagaccgccagtgttacacaggggtgttggctgaacacctcgggaaggc

SEQ ID NO: 65504 - DNA, 80 bp, synthetic construct
  source 1..80: mol_type = other DNA
aaaaccaacaaggtaaacgtcgactgttgtggggttgtgacgctggggcaaccttggttgctacagcagccttcaaaggg

SEQ ID NO: 65505 - DNA, 80 bp, synthetic construct
  source 1..80: mol_type = other DNA
attgcaacgcgtttgcaggcagttgcacccatgacacctgttggcgttggcattaacatggacagctatcaggtggaggt

SEQ ID NO: 65506 - DNA, 80 bp, synthetic construct
  source 1..80: mol_type = other DNA
cagctgcgtccttggcaatccttgagcggctgtctgaggcgacgccaataacaacctcggccgttgaactgctatcttca

SEQ ID NO: 65507 - DNA, 80 bp, synthetic construct
  source 1..80: mol_type = other DNA
ccagcacgtggtcacctgaacgacataatttttgtgacaaagtctggactcccttcaggcatgccctttaccagtgttgt

SEQ ID NO: 65508 - DNA, 80 bp, synthetic construct
  source 1..80: mol_type = other DNA
aggcacgaagggcacatgagagggaacgagcagacctgtttaaggaactgccgttagttgatcctgagataacccagcaa

SEQ ID NO: 65509 - DNA, 80 bp, synthetic construct
  source 1..80: mol_type = other DNA
aaattcactcaaccatatgacatattttgcggccgcggtgctaaaggcctatgaacaacatggggcgccttacactggca

SEQ ID NO: 65510 - DNA, 80 bp, synthetic construct
  source 1..80: mol_type = other DNA
caccaatatttttaaaacggactttgacctgcacaccaagaggcatccgtgggttgcttgacatcacgtcaattaggcgg

SEQ ID NO: 65511 - DNA, 80 bp, synthetic construct
  source 1..80: mol_type = other DNA
caatttttctggatcaaggccaaccgcaccacagacatatcatccccccctgcctacgacagggaagcccgaagtgtgca

SEQ ID NO: 65512 - DNA, 80 bp, synthetic construct
  source 1..80: mol_type = other DNA
acaggcaccggccaagatagccccagtgaagagactaccaaattagtgtttgaaatggagggcttaggccagtcacagtc

SEQ ID NO: 65513 - DNA, 80 bp, synthetic construct
  source 1..80: mol_type = other DNA
ccaaagggaccaacaggttatggatcaggttgtcactccccaggacaccattggaccaacaagtgcacttttattgccca

SEQ ID NO: 65514 - DNA, 80 bp, synthetic construct
  source 1..80: mol_type = other DNA
ctcaagttgagacaccaaatgccagtgcccagcgtgtagaacttgcaatggccacaggggcagtaaccagcaatgtgccc

SEQ ID NO: 65515 - DNA, 80 bp, synthetic construct
  source 1..80: mol_type = other DNA
cagaagtcctacttttacgccatgtggcggcaagtggtgaagaagggcaaggagtttttcataccattggtaaagtgtac

SEQ ID NO: 65516 - DNA, 80 bp, synthetic construct
  source 1..80: mol_type = other DNA
caacacctttctcggcgccatacacctgggcccacgcatcaatccctacactgcacacttgagtgcgatgttcgctggtt

SEQ ID NO: 65517 - DNA, 80 bp, synthetic construct
  source 1..80: mol_type = other DNA
ttctcgtcgccatacaccttggcccacgcatcaatccctacactgcacacttgagtgcgatgttcgctggttggggggtg

SEQ ID NO: 65518 - DNA, 80 bp, synthetic construct
  source 1..80: mol_type = other DNA
ggctttcaggtgcgggtcacgatttcaggatccggactctttgctggtcgggctatcactgccatcctgccaccgggcgt

SEQ ID NO: 65519 - DNA, 80 bp, synthetic construct
  source 1..80: mol_type = other DNA
caaccctgccgctgttcagaacccaggcgtcttcccccatgcgttcattgacgcccgcacaactgaccccatactgatca

SEQ ID NO: 65520 - DNA, 80 bp, synthetic construct
  source 1..80: mol_type = other DNA
acttgcccgacatccggcccattgacttccatcgtgtagatggagacgatgcaacagcgtctgtggggttgtgggtggca

SEQ ID NO: 65521 - DNA, 80 bp, synthetic construct
  source 1..80: mol_type = other DNA
cagcccttgatcaacccgtttcaaaccggttctgtatccacatgttggctaagctttgagacacggccaggccctgactt

SEQ ID NO: 65522 - DNA, 80 bp, synthetic construct
  source 1..80: mol_type = other DNA
gatttttgtctccttaaggcacctgagcaggaaatggacaatgggatatcgcctgccaatctgttgccacgccgcctcgg

SEQ ID NO: 65523 - DNA, 80 bp, synthetic construct
  source 1..80: mol_type = other DNA
gcgttcccggggcaaccgcctcggtggtcgtgttgtggggctggtcgtggtggctgcagccgagcaagtcaatcaccact

SEQ ID NO: 65524 - DNA, 80 bp, synthetic construct
  source 1..80: mol_type = other DNA
ttggcgcaaattccaccacacttggttggtccacattgcccattgagccaattgcgggtgcagtttcctggtatgatgac

SEQ ID NO: 65525 - DNA, 80 bp, synthetic construct
  source 1..80: mol_type = other DNA
aacaatgagcatactaagatacgagggctcttaagtgcccaaggaaagggcatcatcttcccaaacattgtcaaccactg

SEQ ID NO: 65526 - DNA, 80 bp, synthetic construct
  source 1..80: mol_type = other DNA
gacagatgtatcattgtccgcgaaaacctcggggcaaaccaccattcccatagccgccgacaaccttaacaacagcccag

SEQ ID NO: 65527 - DNA, 80 bp, synthetic construct
  source 1..80: mol_type = other DNA
gggcagctggcccggtggttatgtttgaaaacaatggggatgtcaatgagtccacggcaaaccatggcattctgactgct

SEQ ID NO: 65528 - DNA, 80 bp, synthetic construct
  source 1..80: mol_type = other DNA
gcatcacatgatttcacatcactatcccaaacttttgatgcggctgggttgtgggtttggatgccttggacccggaacaa

SEQ ID NO: 65529 - DNA, 80 bp, synthetic construct
  source 1..80: mol_type = other DNA
accagacgggcgtacaaacactaacgtctacatcactccaacttggatcaatggcaaccctgcccgccctatacatgaga

SEQ ID NO: 65530 - DNA, 80 bp, synthetic construct
  source 1..80: mol_type = other DNA
aatgcaccaacatggttggaaccaactttcaattcggtggcactggcacaaataacatcatgttatggcaggagcaacac

SEQ ID NO: 65531 - DNA, 80 bp, synthetic construct
  source 1..80: mol_type = other DNA
ttcacatccttcccaggtgctgcagaggtgtactgttcacagttggagagcacggcagaaatgttccaaaacaacgtggt

SEQ ID NO: 65532 - DNA, 80 bp, synthetic construct
  source 1..80: mol_type = other DNA
taacatccctgcaaatcaaatggcagtcttcaacgtggaaactgcaggtaacaccttccagattgggatcttgccaaatg

SEQ ID NO: 65533 - DNA, 80 bp, synthetic construct
  source 1..80: mol_type = other DNA
gctattcagtcaccaatgcggcaatcggcacacaccaactccttgactatgagactagcttcagatttgttggacttttc

SEQ ID NO: 65534 - DNA, 80 bp, synthetic construct
  source 1..80: mol_type = other DNA
ccttagccgccggctctgtcgtggacatggccggcacaatatcttcaattgttgcacaacatagacaacttgatttgatg

SEQ ID NO: 65535 - DNA, 80 bp, synthetic construct
  source 1..80: mol_type = other DNA
gcacaggcgaaccgcatacaacaggactgggttaacagacaggaggcactcatcacccggggacaagacatctcccgcga

SEQ ID NO: 65536 - DNA, 80 bp, synthetic construct
  source 1..80: mol_type = other DNA
ccttgctgttaatggaacggcgcaacgcgttgactcactggtcaaggcagggttcacccctgtcgatgctcgcagacttg

SEQ ID NO: 65537 - DNA, 80 bp, synthetic construct
  source 1..80: mol_type = other DNA
cgggtggcacagagagcgtacagtacggtctgctggacagacctatactgcaacgttcagtgttgtcgggtatctcagag

SEQ ID NO: 65538 - DNA, 80 bp, synthetic construct
  source 1..80: mol_type = other DNA
actcgacacttacaatctgtgcaaggtgccttgagtgctttcaaaaatgggtctagttatggtgcccctcccgctccagc

SEQ ID NO: 65539 - DNA, 80 bp, synthetic construct
  source 1..80: mol_type = other DNA
gggttttgtcaatccaaattatcaggcttcaccaccaaagctgacacttggccccagacccccagtgaccaatgtgtgat

SEQ ID NO: 65540 - DNA, 80 bp, synthetic construct
  source 1..80: mol_type = other DNA
gttaattagatcctctaaactaatcaaatttccattctcaatcactcttccttttcttttcttttcccatggtgccacac

SEQ ID NO: 65541 - DNA, 80 bp, synthetic construct
  source 1..80: mol_type = other DNA
cttttcttttcttttcccatggtgccacacgcgttcgggtggacaattgtgattaagcgatcacagccatgattttctgg

SEQ ID NO: 65542 - DNA, 80 bp, synthetic construct
  source 1..80: mol_type = other DNA
cagcacaaaaacacttaccgtggttggctcgccaccatcacagctctcgttgaggtttattcaaacctatttcaggacat

SEQ ID NO: 65543 - DNA, 80 bp, synthetic construct
  source 1..80: mol_type = other DNA
agatctttgaaactaaacaggacatgtacgcccatgtctgccaagtgatcaccggggtgcggcgcgagatactgcgtcgc

SEQ ID NO: 65544 - DNA, 80 bp, synthetic construct
  source 1..80: mol_type = other DNA
gcgagaaactgcagtatctgcagtgtccgcaatcacactcctctttgagtcattgaagcagtttgtggaaggggttattg

SEQ ID NO: 65545 - DNA, 80 bp, synthetic construct
  source 1..80: mol_type = other DNA
accttgttagaggcactttccaggcgcagggccccacgaactgtgggtgggctgctattgccgctggtgttattttgatc

SEQ ID NO: 65546 - DNA, 80 bp, synthetic construct
  source 1..80: mol_type = other DNA
agaaacccccattggatttgtacaagaaagacttctcacatttgcgcctttccgttcgaccatatcttggttacaatccg

SEQ ID NO: 65547 - DNA, 80 bp, synthetic construct
  source 1..80: mol_type = other DNA
tgacaccacgtttcgtgagctgtttggaatagatccacatgaacaatttccattgtctatcactgatttggccaagctac

SEQ ID NO: 65548 - DNA, 80 bp, synthetic construct
  source 1..80: mol_type = other DNA
aaggcgtaccagggatggcacagttccgcaacaatcttggagtttctgtcgaagcacatggaagatgttacattcccctc

SEQ ID NO: 65549 - DNA, 80 bp, synthetic construct
  source 1..80: mol_type = other DNA
gacagatgtatcattgtccgccaagacctcggggcagaccaccatccccatagctgccgataaccttaataacagccctg

SEQ ID NO: 65550 - DNA, 80 bp, synthetic construct
  source 1..80: mol_type = other DNA
gataattatgcttcctaagctaatcaaatatccattctcatttacttttccttttcttttcttttcccatggtaccacac

SEQ ID NO: 65551 - DNA, 80 bp, synthetic construct
  source 1..80: mol_type = other DNA
tgctgcagctgcgagagcgttcacctgggttcgtgatatcattgtggaggcagaaagaaaagttcgactaaagaaataca

SEQ ID NO: 65552 - DNA, 80 bp, synthetic construct
  source 1..80: mol_type = other DNA
tggctcgcactgccgccctgttggaacttgctgcatcgcgggatgtcaccgggacggaagaactgaaacggctgctcgaa

SEQ ID NO: 65553 - DNA, 80 bp, synthetic construct
  source 1..80: mol_type = other DNA
cttatgtcagtgagcttgaaactgccgccaatggcatcagaagtacaatcctcttagacaccccaagaaaggttccagtg

SEQ ID NO: 65554 - DNA, 80 bp, synthetic construct
  source 1..80: mol_type = other DNA
ccagggcaagttcgtggagacaatgattggtgtagtgaacaccgcaccataccctttaaattgtgacagagtggaaaata

SEQ ID NO: 65555 - DNA, 80 bp, synthetic construct
  source 1..80: mol_type = other DNA
actccggtggtcggcccctctttcagtgcagaggggctcttagatgcctttgcatccaaacccccagtggatattaaccc

SEQ ID NO: 65556 - DNA, 80 bp, synthetic construct
  source 1..80: mol_type = other DNA
gaaggggacactctggagggcgttcgtgtgaaaccaatcctaactagcgtggacggtctgtcccgtctcatggaaaccaa

SEQ ID NO: 65557 - DNA, 80 bp, synthetic construct
  source 1..80: mol_type = other DNA
gttcaaagaacagggcaatgagttgcgcaacctttggatcacgtgccctcgcgacctagtaacacctgcagcatctgggc

SEQ ID NO: 65558 - DNA, 80 bp, synthetic construct
  source 1..80: mol_type = other DNA
tgaaatcatatatggctgctaacagggcgctggctcaagtcttcgcagaaccttcttcaaacgagattgcggaaacgtgc

SEQ ID NO: 65559 - DNA, 80 bp, synthetic construct
  source 1..80: mol_type = other DNA
ttgggacgcgtcccttgccaactcaatgttatcaatgtttgagaccaacactcatataccagcagttacccaaagggaga

SEQ ID NO: 65560 - DNA, 80 bp, synthetic construct
  source 1..80: mol_type = other DNA
actttgcgtctgcttgttgaaacaatcacggagagtttggcccacttcggcccactactgctgatggtccataatgtggc

SEQ ID NO: 65561 - DNA, 80 bp, synthetic construct
  source 1..80: mol_type = other DNA
atacttgacaaccaggtcacaacgtgacgaggaggccaagggcaaaaccaaacacggtaggggagccagacacgcacgac

SEQ ID NO: 65562 - DNA, 80 bp, synthetic construct
  source 1..80: mol_type = other DNA
gcggtggagtgagcttgtcggacgacgagtatgatgaatggcgtgatcttgtgcgtgactggagacaggacatgactgtt

SEQ ID NO: 65563 - DNA, 80 bp, synthetic construct
  source 1..80: mol_type = other DNA
ggggagttcgttgaactgcgcgagcgttacgcccttggcatggactcagaagacgtacaacgatatcgggcatggctgca

SEQ ID NO: 65564 - DNA, 80 bp, synthetic construct
  source 1..80: mol_type = other DNA
ttcaccagcaatggggaccatgtggggtacggttgccacgttggtaacggtgtggtggtgacggttacacatgtggccgc

SEQ ID NO: 65565 - DNA, 80 bp, synthetic construct
  source 1..80: mol_type = other DNA
cgctgcggacgccgtagagggcttggagttctcggttagaaaaaccgagggtgaaaccacatgggtgaacacccccctca

SEQ ID NO: 65566 - DNA, 80 bp, synthetic construct
  source 1..80: mol_type = other DNA
gaaggcacatatgagactcctaatattacagtccatgggttccacctacgcatcatcaatggttaccccacgaaacgtgg

SEQ ID NO: 65567 - DNA, 80 bp, synthetic construct
  source 1..80: mol_type = other DNA
cccagccccgtttggtgccggtgattcccgttacaatttctcccaagtagaaatgttggtcacagggttgaaaccttatt

SEQ ID NO: 65568 - DNA, 80 bp, synthetic construct
  source 1..80: mol_type = other DNA
ccgaacccacccctgggataccccccgccctcttacaacgggcagccacacacacccgtacatacctggagtcaatagtc

SEQ ID NO: 65569 - DNA, 80 bp, synthetic construct
  source 1..80: mol_type = other DNA
cgcaggccaaaaggtggactattgggatgaagatcgccagtgctacactggggtgttggccgagcacctcggtaaggcct

SEQ ID NO: 65570 - DNA, 80 bp, synthetic construct
  source 1..80: mol_type = other DNA
aaccaacaaggcaaacgccgactgttgtggggttgtgacgctggggcaactttggtcgccacagcagctttcaaagggat

SEQ ID NO: 65571 - DNA, 80 bp, synthetic construct
  source 1..80: mol_type = other DNA
acaccagtcttcttaaagcgaactctcacctgcacgccaagaggtatacgtggactacttgacatcacgtcaattaggcg

SEQ ID NO: 65572 - DNA, 80 bp, synthetic construct
  source 1..80: mol_type = other DNA
acttacctgacatccggcccattgatttccaccgtgtggacggggacgacgcaacagcgtctgtgggactgtgggtcgca

SEQ ID NO: 65573 - DNA, 80 bp, synthetic construct
  source 1..80: mol_type = other DNA
aatttaacacaaatgccaattacatcaatttgtcccttttggcaaaattgcgacccacggttttgacaatgatcttccaa

SEQ ID NO: 65574 - DNA, 80 bp, synthetic construct
  source 1..80: mol_type = other DNA
caggcgaaccgcatacaacaggattgggtaaacagacaagaggcactcattactcgaggacaggacatctcccgtgacct

SEQ ID NO: 65575 - DNA, 80 bp, synthetic construct
  source 1..80: mol_type = other DNA
gcggcacagagagcgtccagtatggcctgctggacaggcctatactgcaacgttcagtgctgtcgggtatctcagagact

SEQ ID NO: 65576 - DNA, 80 bp, synthetic construct
  source 1..80: mol_type = other DNA
cgacacttacaatctgtgcaaggtgccttgagtgcttttaaaaatgggtccagctacggtgcccctcccgccccagcggg

SEQ ID NO: 65577 - DNA, 80 bp, synthetic construct
  source 1..80: mol_type = other DNA
aattaggtttcccaagttaatcaaatttccattctcagttaattttgcttttcttttcttttcccatggttccacacgcg

SEQ ID NO: 65578 - DNA, 80 bp, synthetic construct
  source 1..80: mol_type = other DNA
gtgattggttggtatggcttctaagccattctacccaattgagttcaaccaaaaggttgaaactgcaatcctcttttccg

SEQ ID NO: 65579 - DNA, 80 bp, synthetic construct
  source 1..80: mol_type = other DNA
cttctcaagatatctggttgccccggcgtcatgggatactggcagcgcctactcaaagtgtgtgctggtgtcacgaccat

SEQ ID NO: 65580 - DNA, 80 bp, synthetic construct
  source 1..80: mol_type = other DNA
cgctgctgcagcacgagcctttacatgggttcgtgacatcatagtggaggctgaaagaaaggctcggctaaagaagtaca

SEQ ID NO: 65581 - DNA, 80 bp, synthetic construct
  source 1..80: mol_type = other DNA
tggcgcgcacagctgccctgttggagcttgccgcgtcacgagatgtcactgggacggaagagctaaagcggctacttgag

SEQ ID NO: 65582 - DNA, 80 bp, synthetic construct
  source 1..80: mol_type = other DNA
tgtttcacccaactcatagaagaaggtacagagttaatccaggagtttggaacatcaccaatggcagggcttgcacgttc

SEQ ID NO: 65583 - DNA, 80 bp, synthetic construct
  source 1..80: mol_type = other DNA
ttacgtcagcgagctagaaaccgcagccaatggcatcagaagcacaatcctccttgacactcccaggaaggtcccggtgg

SEQ ID NO: 65584 - DNA, 80 bp, synthetic construct
  source 1..80: mol_type = other DNA
caataatcttaaccggtcctccaggtataggaaaaacccatcttgcacaacatctggctgctggttttggtaagacctca

SEQ ID NO: 65585 - DNA, 80 bp, synthetic construct
  source 1..80: mol_type = other DNA
aatttctctgtcacccttgatcatcatgactcctacacaggcaatgaagtagctatatgggatgagtttgatgtggatgc

SEQ ID NO: 65586 - DNA, 80 bp, synthetic construct
  source 1..80: mol_type = other DNA
ccaaggcaagtttgtagaaacaatgatcggtgtggtcaacactgcaccgtatcctttgaattgtgatagagtggaaaaca

SEQ ID NO: 65587 - DNA, 80 bp, synthetic construct
  source 1..80: mol_type = other DNA
ggggtgcggcgcgacatattgcgccgcatcccgacacccacaccctctttcaatgaagaggggctccttgatgcatttgc

SEQ ID NO: 65588 - DNA, 80 bp, synthetic construct
  source 1..80: mol_type = other DNA
agggcaaagtgttcacatctaattacatcatatgcaccagtaactaccccacttctgtcctgccagagaacccgcgagct

SEQ ID NO: 65589 - DNA, 80 bp, synthetic construct
  source 1..80: mol_type = other DNA
agaaaccccccatagacctgtacaagaaggatttctcccatttgcgcctctccgtgcgcccgtatcttggctacaacccg

SEQ ID NO: 65590 - DNA, 80 bp, synthetic construct
  source 1..80: mol_type = other DNA
gaaggggacaccttggagggcgtacgggtgaaacctatactaactagtgtggacggtctgaccaggatcatggaaaccaa

SEQ ID NO: 65591 - DNA, 80 bp, synthetic construct
  source 1..80: mol_type = other DNA
tttaaagagcaaggcaatgaattgcgcaacctttggatcacatgccctcgagacctggtgacacctgcggcttcggggtt

SEQ ID NO: 65592 - DNA, 80 bp, synthetic construct
  source 1..80: mol_type = other DNA
gaagtcctatatggccgccaatcgagccttggcacaagtcttcgcagaaccatcttccaatgaaatcgcggagacatgca

SEQ ID NO: 65593 - DNA, 80 bp, synthetic construct
  source 1..80: mol_type = other DNA
cgtctagggtttacgtgtctgctaacaaccctccccctacctttgtgggtaggcacgttaagattacagctattaaccct

SEQ ID NO: 65594 - DNA, 80 bp, synthetic construct
  source 1..80: mol_type = other DNA
ttgtgccagtcacttcatcatttgactttattcgtgggctgcgccaccaccttggcctatgctccatcaaggggatgtgg

SEQ ID NO: 65595 - DNA, 80 bp, synthetic construct
  source 1..80: mol_type = other DNA
aaggcgtatcaggggtggcacagttctgcaacaatcttggaatttctgtcaaaacacatggaagacgttacgtttccttc

SEQ ID NO: 65596 - DNA, 80 bp, synthetic construct
  source 1..80: mol_type = other DNA
caatccggagtgcaccgtgttccgtgctgcagacggtgatgtcatcttttacacatttggctcgtacgcctgcttcgtct

SEQ ID NO: 65597 - DNA, 80 bp, synthetic construct
  source 1..80: mol_type = other DNA
cacctgcacgcgtgccgttcgtgggggatccaccaaaagccgtccactccaacatcacacggaacatgacgtggattgag

SEQ ID NO: 65598 - DNA, 80 bp, synthetic construct
  source 1..80: mol_type = other DNA
acgctgcgcttgctcgttgaaacaatcacggaaagtctggctcactttggcccactgttgttgatggttcacaacgtggc

SEQ ID NO: 65599 - DNA, 80 bp, synthetic construct
  source 1..80: mol_type = other DNA
gctcactttggcccactgttgttgatggttcacaacgtggcatacctaacaaccagatcacagcgtgacgaagaggcaaa

SEQ ID NO: 65600 - DNA, 80 bp, synthetic construct
  source 1..80: mol_type = other DNA
atacctaacaaccagatcacagcgtgacgaagaggcaaaagggaaaaccaaacatggcaggggggctagacacgcacgac

SEQ ID NO: 65601 - DNA, 80 bp, synthetic construct
  source 1..80: mol_type = other DNA
gtggtggggtcagcttgtcagatgatgagtatgacgagtggcgcgatctcgtgcgtgactggaggcaagacatgactgtt

SEQ ID NO: 65602 - DNA, 80 bp, synthetic construct
  source 1..80: mol_type = other DNA
ttggggagttcgttgagttacgggagcgttatgctctaggcatggattcagaggatgtgcaacggtatcgcgcgtggctg

SEQ ID NO: 65603 - DNA, 80 bp, synthetic construct
  source 1..80: mol_type = other DNA
caactccgtgcgatgcgattgggtgcaggtgcttaccaacatgcaaccatcattggacgcgggcgtgtcgaggacaccat

SEQ ID NO: 65604 - DNA, 80 bp, synthetic construct
  source 1..80: mol_type = other DNA
ctttcactagcaatggagaccacgtggggtacgggtgtcacattggcaatggcgtggtggtgacagtcactcatgtggcc

SEQ ID NO: 65605 - DNA, 80 bp, synthetic construct
  source 1..80: mol_type = other DNA
gctgctgcagatgccgttgacggtctggaattcacagtcaggaagaccgaaggtgaaaccacttgggtgaacacccctct

SEQ ID NO: 65606 - DNA, 80 bp, synthetic construct
  source 1..80: mol_type = other DNA
gtcagttgccacactaccaactgggtgacggggcgccagtttactactccacccgactgcaccctgtcaccacaattgct

SEQ ID NO: 65607 - DNA, 80 bp, synthetic construct
  source 1..80: mol_type = other DNA
gaaggtacttatgaaactcccaacatcactgtccaaggattccatctacgcattatcaatgggtaccccacaaaacgtgg

SEQ ID NO: 65608 - DNA, 80 bp, synthetic construct
  source 1..80: mol_type = other DNA
tgactgcggcacaccatatttcgactcgtgccgtagattggttgggttacatgcggccacctcaaccaatggagagacca

SEQ ID NO: 65609 - DNA, 80 bp, synthetic construct
  source 1..80: mol_type = other DNA
aattggcacagaaagttagccgagtttctaaagtggaaaatgcctttgcctggaaaggcctccctgttttacgaggccca

SEQ ID NO: 65610 - DNA, 80 bp, synthetic construct
  source 1..80: mol_type = other DNA
gattgtggtggcatgcccacagggacgaggtatcatcggtcccccgcttggccacaacaactttccaacgagacacatgc

SEQ ID NO: 65611 - DNA, 80 bp, synthetic construct
  source 1..80: mol_type = other DNA
cccagccccatttggtgccggagattctcgatacaacttctcacaagtggaaatgttggtcacaggtttaaaaccctatt

SEQ ID NO: 65612 - DNA, 80 bp, synthetic construct
  source 1..80: mol_type = other DNA
cggaaccaacacctgggatcccccctgctctactgcaacgggctgccacacacacccgcacatacctggaatcaattgtt

SEQ ID NO: 65613 - DNA, 80 bp, synthetic construct
  source 1..80: mol_type = other DNA
ggcacacaccggtctcccaatttgacttacaacgaagcatgtgccttgctagaccgtggcacatcttgtggcccgttcat

SEQ ID NO: 65614 - DNA, 80 bp, synthetic construct
  source 1..80: mol_type = other DNA
tgcgggccaaaagggagactactgggatgaggaccgtcagtgctacactggggtcctggctgagcacctcgcaaaagctt
